United States Patent Application Publication US 2007/0048756 A1 - sequence listing, part 12

SEQ ID NO: 399256 - DNA, 33 bp, Homo sapien
tctaggtcttgttatatcctgtcctgctgtacc

SEQ ID NO: 399257 - DNA, 33 bp, Homo sapien
ataacacctgccttcaccagaacaactcgtagt

SEQ ID NO: 399258 - DNA, 33 bp, Homo sapien
ataacacctgccttcatcagaacaactcgtagt

SEQ ID NO: 399259 - DNA, 33 bp, Homo sapien
ccactgaatgttaatacgcctttccttttcttg

SEQ ID NO: 399260 - DNA, 33 bp, Homo sapien
ccactgaatgttaatatgcctttccttttcttg

SEQ ID NO: 399261 - DNA, 33 bp, Homo sapien
cttgatttatcctgcactccttcttccatgata

SEQ ID NO: 399262 - DNA, 33 bp, Homo sapien
cttgatttatcctgcattccttcttccatgata

SEQ ID NO: 399263 - DNA, 33 bp, Homo sapien
agttatactgacttcacgttttaaagagcagga

SEQ ID NO: 399264 - DNA, 33 bp, Homo sapien
agttatactgacttcatgttttaaagagcagga

SEQ ID NO: 399265 - DNA, 33 bp, Homo sapien
cagactatactctcccaatctggaaatctaaat

SEQ ID NO: 399266 - DNA, 33 bp, Homo sapien
cagactatactctcccgatctggaaatctaaat

SEQ ID NO: 399267 - DNA, 33 bp, Homo sapien
tgcgaaagttccttaaaaagaagttctgctctt

SEQ ID NO: 399268 - DNA, 33 bp, Homo sapien
tgcgaaagttccttaacaagaagttctgctctt

SEQ ID NO: 399269 - DNA, 33 bp, Homo sapien
gaattgatgagtgtaaatgatgcagcagctgct

SEQ ID NO: 399270 - DNA, 33 bp, Homo sapien
gaattgatgagtgtaagtgatgcagcagctgct

SEQ ID NO: 399271 - DNA, 33 bp, Homo sapien
tccccgcttgcaaggaactcttctaacatcctt

SEQ ID NO: 399272 - DNA, 33 bp, Homo sapien
tccccgcttgcaaggatctcttctaacatcctt

SEQ ID NO: 399273 - DNA, 33 bp, Homo sapien
ttccggagggagagaaccgctaaaataaaggcc

SEQ ID NO: 399274 - DNA, 33 bp, Homo sapien
ttccggagggagagaatcgctaaaataaaggcc

SEQ ID NO: 399275 - DNA, 33 bp, Homo sapien
ccattttccaggcaaaactgtataaaactagcc

SEQ ID NO: 399276 - DNA, 33 bp, Homo sapien
ccattttccaggcaaagctgtataaaactagcc

SEQ ID NO: 399277 - DNA, 33 bp, Homo sapien
atcagaccagaagacccactcagctgacccata

SEQ ID NO: 399278 - DNA, 33 bp, Homo sapien
atcagaccagaagacctactcagctgacccata

SEQ ID NO: 399279 - DNA, 33 bp, Homo sapien
aagttccctgatcaacaaatcttccagccacca

SEQ ID NO: 399280 - DNA, 33 bp, Homo sapien
aagttccctgatcaaccaatcttccagccacca

SEQ ID NO: 399281 - DNA, 33 bp, Homo sapien
ttcaaagacctcaaaactggcttaagtggagtt

SEQ ID NO: 399282 - DNA, 33 bp, Homo sapien
ttcaaagacctcaaaattggcttaagtggagtt

SEQ ID NO: 399283 - DNA, 33 bp, Homo sapien
gccaacatttgatggaacattaaatctggaaag

SEQ ID NO: 399284 - DNA, 33 bp, Homo sapien
gccaacatttgatggaccattaaatctggaaag

SEQ ID NO: 399285 - DNA, 33 bp, Homo sapien
gatgctcatgatgtataaggcacacttgtagaa

SEQ ID NO: 399286 - DNA, 33 bp, Homo sapien
gatgctcatgatgtatcaggcacacttgtagaa

SEQ ID NO: 399287 - DNA, 33 bp, Homo sapien
gaagccgttgatacaaccttgatgttataacct

SEQ ID NO: 399288 - DNA, 33 bp, Homo sapien
gaagccgttgatacaatcttgatgttataacct

SEQ ID NO: 399289 - DNA, 33 bp, Homo sapien
tttttgtctttcctgtaaacagtatgtagttga

SEQ ID NO: 399290 - DNA, 33 bp, Homo sapien
tttttgtctttcctgtgaacagtatgtagttga

SEQ ID NO: 399291 - DNA, 33 bp, Homo sapien
acaaagtgggacaggcactcaaggcaggaacat

SEQ ID NO: 399292 - DNA, 33 bp, Homo sapien
acaaagtgggacaggcgctcaaggcaggaacat

SEQ ID NO: 399293 - DNA, 33 bp, Homo sapien
gaacaataacagcaaacactgcgtgggtcagag

SEQ ID NO: 399294 - DNA, 33 bp, Homo sapien
gaacaataacagcaaagactgcgtgggtcagag

SEQ ID NO: 399295 - DNA, 33 bp, Homo sapien
cctagacattgtctccaatctaactctgccttt

SEQ ID NO: 399296 - DNA, 33 bp, Homo sapien
cctagacattgtctccgatctaactctgccttt

SEQ ID NO: 399297 - DNA, 33 bp, Homo sapien
gaaattgggaaaactcactttgggctgaggaca

SEQ ID NO: 399298 - DNA, 33 bp, Homo sapien
gaaattgggaaaactcgctttgggctgaggaca

SEQ ID NO: 399299 - DNA, 33 bp, Homo sapien
tcttatgaacaacaaaaaaatgctgcctgtgtt

SEQ ID NO: 399300 - DNA, 33 bp, Homo sapien
tcttatgaacaacaaagaaatgctgcctgtgtt

SEQ ID NO: 399301 - DNA, 33 bp, Homo sapien
ccattgcataaatgaaacgcagtttgtcctttc

SEQ ID NO: 399302 - DNA, 33 bp, Homo sapien
ccattgcataaatgaaccgcagtttgtcctttc

SEQ ID NO: 399303 - DNA, 33 bp, Homo sapien
ttgaaccacacaattcaatttcagcctggtgag

SEQ ID NO: 399304 - DNA, 33 bp, Homo sapien
ttgaaccacacaattcgatttcagcctggtgag

SEQ ID NO: 399305 - DNA, 33 bp, Homo sapien
gtacatttttgggatgccagcaatggcctgctc

SEQ ID NO: 399306 - DNA, 33 bp, Homo sapien
gtacatttttgggatgtcagcaatggcctgctc

SEQ ID NO: 399307 - DNA, 33 bp, Homo sapien
cattgctgccatcacactgaggagagattcaga

SEQ ID NO: 399308 - DNA, 33 bp, Homo sapien
cattgctgccatcacattgaggagagattcaga

SEQ ID NO: 399309 - DNA, 33 bp, Homo sapien
caaaacacattgcgtacaaaaacaaaatacact

SEQ ID NO: 399310 - DNA, 33 bp, Homo sapien
caaaacacattgcgtataaaaacaaaatacact

SEQ ID NO: 399311 - DNA, 33 bp, Homo sapien
caaaccatattacaacaaaaccatatcatactg

SEQ ID NO: 399312 - DNA, 33 bp, Homo sapien
caaaccatattacaaccaaaccatatcatactg

SEQ ID NO: 399313 - DNA, 33 bp, Homo sapien
aactgccctaacgggccgccagaatccccagac

SEQ ID NO: 399314 - DNA, 33 bp, Homo sapien
aactgccctaacgggctgccagaatccccagac

SEQ ID NO: 399315 - DNA, 33 bp, Homo sapien
agttaataatgagaaccactcaggcaaattcac

SEQ ID NO: 399316 - DNA, 33 bp, Homo sapien
agttaataatgagaacgactcaggcaaattcac

SEQ ID NO: 399317 - DNA, 33 bp, Homo sapien
ttaactcctttcaaacaatttcctttgtatctt

SEQ ID NO: 399318 - DNA, 33 bp, Homo sapien
ttaactcctttcaaacgatttcctttgtatctt

SEQ ID NO: 399319 - DNA, 33 bp, Homo sapien
tgtcacaggaatagagcagaatcacgaaaagag

SEQ ID NO: 399320 - DNA, 33 bp, Homo sapien
tgtcacaggaatagagtagaatcacgaaaagag

SEQ ID NO: 399321 - DNA, 33 bp, Homo sapien
ttgttgagataggtgcaaagtgccagggaatga

SEQ ID NO: 399322 - DNA, 33 bp, Homo sapien
ttgttgagataggtgcgaagtgccagggaatga

SEQ ID NO: 399323 - DNA, 33 bp, Homo sapien
ttgtaatcactgtagcaatcattaaaaaattat

SEQ ID NO: 399324 - DNA, 33 bp, Homo sapien
ttgtaatcactgtagcgatcattaaaaaattat

SEQ ID NO: 399325 - DNA, 33 bp, Homo sapien
aaaaaagaaagaatgaacatgagttaagagaga

SEQ ID NO: 399326 - DNA, 33 bp, Homo sapien
aaaaaagaaagaatgagcatgagttaagagaga

SEQ ID NO: 399327 - DNA, 33 bp, Homo sapien
gaccatctcaaaaccaatctaacctatgtcaac

SEQ ID NO: 399328 - DNA, 33 bp, Homo sapien
gaccatctcaaaaccagtctaacctatgtcaac

SEQ ID NO: 399329 - DNA, 33 bp, Homo sapien
gactgtgcttagaaggaccttaataaataacat

SEQ ID NO: 399330 - DNA, 33 bp, Homo sapien
gactgtgcttagaagggccttaataaataacat

SEQ ID NO: 399331 - DNA, 33 bp, Homo sapien
ggttaatggcagaaaactaactcaaattggtat

SEQ ID NO: 399332 - DNA, 33 bp, Homo sapien
ggttaatggcagaaaagtaactcaaattggtat

SEQ ID NO: 399333 - DNA, 33 bp, Homo sapien
tatttgaaccacatacactattcagtttacaat

SEQ ID NO: 399334 - DNA, 33 bp, Homo sapien
tatttgaaccacatacgctattcagtttacaat

SEQ ID NO: 399335 - DNA, 33 bp, Homo sapien
actacttgatccttcacgtaagcaggagaattt

SEQ ID NO: 399336 - DNA, 33 bp, Homo sapien
actacttgatccttcatgtaagcaggagaattt

SEQ ID NO: 399337 - DNA, 33 bp, Homo sapien
ctaattgcaggatcccaagtccgtttttatagc

SEQ ID NO: 399338 - DNA, 33 bp, Homo sapien
ctaattgcaggatcccgagtccgtttttatagc

SEQ ID NO: 399339 - DNA, 33 bp, Homo sapien
gttaaaagaaacagcaagaaataacccaggaga

SEQ ID NO: 399340 - DNA, 33 bp, Homo sapien
gttaaaagaaacagcaggaaataacccaggaga

SEQ ID NO: 399341 - DNA, 33 bp, Homo sapien
cttgcctaaggacttacaagtgttccttaacat

SEQ ID NO: 399342 - DNA, 33 bp, Homo sapien
cttgcctaaggacttagaagtgttccttaacat

SEQ ID NO: 399343 - DNA, 33 bp, Homo sapien
aaaagtcagatttcaacgagtagaagtacaaga

SEQ ID NO: 399344 - DNA, 33 bp, Homo sapien
aaaagtcagatttcaatgagtagaagtacaaga

SEQ ID NO: 399345 - DNA, 33 bp, Homo sapien
ttacagataactctcaaaacagatctttgggga

SEQ ID NO: 399346 - DNA, 33 bp, Homo sapien
ttacagataactctcagaacagatctttgggga

SEQ ID NO: 399347 - DNA, 33 bp, Homo sapien
ttgtcctgagggtttcaagtgaataattcatcc

SEQ ID NO: 399348 - DNA, 33 bp, Homo sapien
ttgtcctgagggtttcgagtgaataattcatcc

SEQ ID NO: 399349 - DNA, 33 bp, Homo sapien
tttgcatctaagcctacgttgatgggatcaatg

SEQ ID NO: 399350 - DNA, 33 bp, Homo sapien
tttgcatctaagcctatgttgatgggatcaatg

SEQ ID NO: 399351 - DNA, 33 bp, Homo sapien
gagaatacatgagaacaaatagcaccaagttgg

SEQ ID NO: 399352 - DNA, 33 bp, Homo sapien
gagaatacatgagaaccaatagcaccaagttgg

SEQ ID NO: 399353 - DNA, 33 bp, Homo sapien
ttaacaagtgcctccacagacttctgtcttagg

SEQ ID NO: 399354 - DNA, 33 bp, Homo sapien
ttaacaagtgcctccatagacttctgtcttagg

SEQ ID NO: 399355 - DNA, 33 bp, Homo sapien
gttgttgaggccattcaatccatggtattgtgt

SEQ ID NO: 399356 - DNA, 33 bp, Homo sapien
gttgttgaggccattctatccatggtattgtgt

SEQ ID NO: 399357 - DNA, 33 bp, Homo sapien
ttttagaaacgcttccactctgttaagatttaa

SEQ ID NO: 399358 - DNA, 33 bp, Homo sapien
ttttagaaacgcttccgctctgttaagatttaa

SEQ ID NO: 399359 - DNA, 33 bp, Homo sapien
tccttgaccaggatcaacttgcaaaactatgga

SEQ ID NO: 399360 - DNA, 33 bp, Homo sapien
tccttgaccaggatcagcttgcaaaactatgga

SEQ ID NO: 399361 - DNA, 33 bp, Homo sapien
tttcccagtcctctaaatgttcctgtaaagctc

SEQ ID NO: 399362 - DNA, 33 bp, Homo sapien
tttcccagtcctctaagtgttcctgtaaagctc

SEQ ID NO: 399363 - DNA, 33 bp, Homo sapien
cagggtctactcctcaaccaattcattcccacc

SEQ ID NO: 399364 - DNA, 33 bp, Homo sapien
cagggtctactcctcatccaattcattcccacc

SEQ ID NO: 399365 - DNA, 33 bp, Homo sapien
gtggcagagttatgaggacacagcagggaagag

SEQ ID NO: 399366 - DNA, 33 bp, Homo sapien
gtggcagagttatgagtacacagcagggaagag

SEQ ID NO: 399367 - DNA, 33 bp, Homo sapien
aaaaagaacactggaacggacaatattgctccc

SEQ ID NO: 399368 - DNA, 33 bp, Homo sapien
aaaaagaacactggaatggacaatattgctccc

SEQ ID NO: 399369 - DNA, 33 bp, Homo sapien
tgatgacgtctttccactcttaacaaatgctta

SEQ ID NO: 399370 - DNA, 33 bp, Homo sapien
tgatgacgtctttccattcttaacaaatgctta

SEQ ID NO: 399371 - DNA, 33 bp, Homo sapien
actgtatagagatcaaaaccagagttccttctt

SEQ ID NO: 399372 - DNA, 33 bp, Homo sapien
actgtatagagatcaagaccagagttccttctt

SEQ ID NO: 399373 - DNA, 33 bp, Homo sapien
aatacatttgctgggacccctgtttttcatctt

SEQ ID NO: 399374 - DNA, 33 bp, Homo sapien
aatacatttgctgggatccctgtttttcatctt

SEQ ID NO: 399375 - DNA, 33 bp, Homo sapien
acctgtctgagagtacaggccttgggcaggaaa

SEQ ID NO: 399376 - DNA, 33 bp, Homo sapien
acctgtctgagagtaccggccttgggcaggaaa

SEQ ID NO: 399377 - DNA, 33 bp, Homo sapien
tgtcaaaggccaaaggaccaatggcatttaaag

SEQ ID NO: 399378 - DNA, 33 bp, Homo sapien
tgtcaaaggccaaaggtccaatggcatttaaag

SEQ ID NO: 399379 - DNA, 33 bp, Homo sapien
agttcagatacaggtgacaataggccagaattt

SEQ ID NO: 399380 - DNA, 33 bp, Homo sapien
agttcagatacaggtggcaataggccagaattt

SEQ ID NO: 399381 - DNA, 33 bp, Homo sapien
aagccccagtttctgagagcgtatccataagca

SEQ ID NO: 399382 - DNA, 33 bp, Homo sapien
aagccccagtttctgatagcgtatccataagca

SEQ ID NO: 399383 - DNA, 33 bp, Homo sapien
gaatcagggaacatagaactagagaatatagaa

SEQ ID NO: 399384 - DNA, 33 bp, Homo sapien
gaatcagggaacataggactagagaatatagaa

SEQ ID NO: 399385 - DNA, 33 bp, Homo sapien
aacactcaaaaacaaacccttgatctaggtact

SEQ ID NO: 399386 - DNA, 33 bp, Homo sapien
aacactcaaaaacaaagccttgatctaggtact

SEQ ID NO: 399387 - DNA, 33 bp, Homo sapien
agattgggaaaatggcccattgatttgtgattc

SEQ ID NO: 399388 - DNA, 33 bp, Homo sapien
agattgggaaaatggctcattgatttgtgattc

SEQ ID NO: 399389 - DNA, 33 bp, Homo sapien
gacaactagaatcatgacagctatccaaaaaag

SEQ ID NO: 399390 - DNA, 33 bp, Homo sapien
gacaactagaatcatgtcagctatccaaaaaag

SEQ ID NO: 399391 - DNA, 33 bp, Homo sapien
tgcatcaaccaggatgaaatgaacagacaacta

SEQ ID NO: 399392 - DNA, 33 bp, Homo sapien
tgcatcaaccaggatgcaatgaacagacaacta

SEQ ID NO: 399393 - DNA, 33 bp, Homo sapien
agaactgagaatactgaattccagcttttactt

SEQ ID NO: 399394 - DNA, 33 bp, Homo sapien
agaactgagaatactggattccagcttttactt

SEQ ID NO: 399395 - DNA, 33 bp, Homo sapien
tttcagtttctaggcaatgattcataaaaatgt

SEQ ID NO: 399396 - DNA, 33 bp, Homo sapien
tttcagtttctaggcactgattcataaaaatgt

SEQ ID NO: 399397 - DNA, 33 bp, Homo sapien
ctttctcattttggcacgaccctctaccccttt

SEQ ID NO: 399398 - DNA, 33 bp, Homo sapien
ctttctcattttggcatgaccctctaccccttt

SEQ ID NO: 399399 - DNA, 33 bp, Homo sapien
tgttaaagaacaagagccattttttttgcaaga

SEQ ID NO: 399400 - DNA, 33 bp, Homo sapien
tgttaaagaacaagagtcattttttttgcaaga

SEQ ID NO: 399401 - DNA, 33 bp, Homo sapien
aggttcggataaagatcacaggaagatgagcag

SEQ ID NO: 399402 - DNA, 33 bp, Homo sapien
aggttcggataaagattacaggaagatgagcag

SEQ ID NO: 399403 - DNA, 33 bp, Homo sapien
ttcttggaattatccaggtacctgtaatgttgc

SEQ ID NO: 399404 - DNA, 33 bp, Homo sapien
ttcttggaattatccatgtacctgtaatgttgc

SEQ ID NO: 399405 - DNA, 33 bp, Homo sapien
ttattcttgctcttgaataatttgaaagggaga

SEQ ID NO: 399406 - DNA, 33 bp, Homo sapien
ttattcttgctcttgactaatttgaaagggaga

SEQ ID NO: 399407 - DNA, 33 bp, Homo sapien
cacatttttctgattacaaaaactacatgtact

SEQ ID NO: 399408 - DNA, 33 bp, Homo sapien
cacatttttctgattataaaaactacatgtact

SEQ ID NO: 399409 - DNA, 33 bp, Homo sapien
cagtggtacttacaaccagagctgcgatacaga

SEQ ID NO: 399410 - DNA, 33 bp, Homo sapien
cagtggtacttacaactagagctgcgatacaga

SEQ ID NO: 399411 - DNA, 33 bp, Homo sapien
aaagacaaattggttacgaaacccacaggctcc

SEQ ID NO: 399412 - DNA, 33 bp, Homo sapien
aaagacaaattggttatgaaacccacaggctcc

SEQ ID NO: 399413 - DNA, 33 bp, Homo sapien
aaaccattcacctcaaaagaaaagacaaattgg

SEQ ID NO: 399414 - DNA, 33 bp, Homo sapien
aaaccattcacctcaacagaaaagacaaattgg

SEQ ID NO: 399415 - DNA, 33 bp, Homo sapien
tccagttctctttttaaatcttgtctgcctcag

SEQ ID NO: 399416 - DNA, 33 bp, Homo sapien
tccagttctctttttatatcttgtctgcctcag

SEQ ID NO: 399417 - DNA, 33 bp, Homo sapien
ttccttcaggcattaacatttgttgaatttgag

SEQ ID NO: 399418 - DNA, 33 bp, Homo sapien
ttccttcaggcattaatatttgttgaatttgag

SEQ ID NO: 399419 - DNA, 33 bp, Homo sapien
gtttttaactattaccaaaaagcagctatgaac

SEQ ID NO: 399420 - DNA, 33 bp, Homo sapien
gtttttaactattaccgaaaagcagctatgaac

SEQ ID NO: 399421 - DNA, 33 bp, Homo sapien
taaagtggcttataaaatgttctatcatgtttt

SEQ ID NO: 399422 - DNA, 33 bp, Homo sapien
taaagtggcttataaagtgttctatcatgtttt

SEQ ID NO: 399423 - DNA, 33 bp, Homo sapien
tgaccatatgctgctgcaaaaatctgcaccaac

SEQ ID NO: 399424 - DNA, 33 bp, Homo sapien
tgaccatatgctgctggaaaaatctgcaccaac

SEQ ID NO: 399425 - DNA, 33 bp, Homo sapien
gaagccaacctcaaaaactgccaagggaacttc

SEQ ID NO: 399426 - DNA, 33 bp, Homo sapien
gaagccaacctcaaaacctgccaagggaacttc

SEQ ID NO: 399427 - DNA, 33 bp, Homo sapien
agttgcttatcacagacgacacccacactctgg

SEQ ID NO: 399428 - DNA, 33 bp, Homo sapien
agttgcttatcacagatgacacccacactctgg

SEQ ID NO: 399429 - DNA, 33 bp, Homo sapien
acccttcagtcaaggacgtagacatcaagagcc

SEQ ID NO: 399430 - DNA, 33 bp, Homo sapien
acccttcagtcaaggaggtagacatcaagagcc

SEQ ID NO: 399431 - DNA, 33 bp, Homo sapien
ccttgttttgaattgcccttccgtctctttttg

SEQ ID NO: 399432 - DNA, 33 bp, Homo sapien
ccttgttttgaattgctcttccgtctctttttg

SEQ ID NO: 399433 - DNA, 33 bp, Homo sapien
tatccggctggtattaagtccagggctaccctt

SEQ ID NO: 399434 - DNA, 33 bp, Homo sapien
tatccggctggtattaggtccagggctaccctt

SEQ ID NO: 399435 - DNA, 33 bp, Homo sapien
tgtaacaagttgtagaagctttttccagacatt

SEQ ID NO: 399436 - DNA, 33 bp, Homo sapien
tgtaacaagttgtagaggctttttccagacatt

SEQ ID NO: 399437 - DNA, 33 bp, Homo sapien
atcttttatggaaccactagtaaattacctaac

SEQ ID NO: 399438 - DNA, 33 bp, Homo sapien
atcttttatggaaccagtagtaaattacctaac

SEQ ID NO: 399439 - DNA, 33 bp, Homo sapien
tcagaagtgcaaacaccgagcactgatatcagt

SEQ ID NO: 399440 - DNA, 33 bp, Homo sapien
tcagaagtgcaaacactgagcactgatatcagt

SEQ ID NO: 399441 - DNA, 33 bp, Homo sapien
tgagcaggtaacactcgaggacactctaggtct

SEQ ID NO: 399442 - DNA, 33 bp, Homo sapien
tgagcaggtaacactctaggacactctaggtct

SEQ ID NO: 399443 - DNA, 33 bp, Homo sapien
cttcaaaaatcatacactagctgggccttggga

SEQ ID NO: 399444 - DNA, 33 bp, Homo sapien
cttcaaaaatcatacattagctgggccttggga

SEQ ID NO: 399445 - DNA, 33 bp, Homo sapien
ctacacagaactcttacctgcttgacattaagt

SEQ ID NO: 399446 - DNA, 33 bp, Homo sapien
ctacacagaactcttatctgcttgacattaagt

SEQ ID NO: 399447 - DNA, 33 bp, Homo sapien
agcaccaggatcagagactcagtagcacattcc

SEQ ID NO: 399448 - DNA, 33 bp, Homo sapien
agcaccaggatcagagcctcagtagcacattcc

SEQ ID NO: 399449 - DNA, 33 bp, Homo sapien
tgtttttggacatacaatgtataaagatgtaat

SEQ ID NO: 399450 - DNA, 33 bp, Homo sapien
tgtttttggacatacagtgtataaagatgtaat

SEQ ID NO: 399451 - DNA, 33 bp, Homo sapien
tgagggcaagtgaaaacgccagagatttgttcc

SEQ ID NO: 399452 - DNA, 33 bp, Homo sapien
tgagggcaagtgaaaatgccagagatttgttcc

SEQ ID NO: 399453 - DNA, 33 bp, Homo sapien
gtgaatctatcaaaaaaagaggttgacttacaa

SEQ ID NO: 399454 - DNA, 33 bp, Homo sapien
gtgaatctatcaaaaagagaggttgacttacaa

SEQ ID NO: 399455 - DNA, 33 bp, Homo sapien
aatttttcaagctagaaacctgagatgaatctc

SEQ ID NO: 399456 - DNA, 33 bp, Homo sapien
aatttttcaagctagagacctgagatgaatctc

SEQ ID NO: 399457 - DNA, 33 bp, Homo sapien
gatgcaacaacaaggcaatgtcatggaagtgga

SEQ ID NO: 399458 - DNA, 33 bp, Homo sapien
gatgcaacaacaaggccatgtcatggaagtgga

SEQ ID NO: 399459 - DNA, 33 bp, Homo sapien
tgagctcactgagaaaaaaaaatagacaattga

SEQ ID NO: 399460 - DNA, 33 bp, Homo sapien
tgagctcactgagaaagaaaaatagacaattga

SEQ ID NO: 399461 - DNA, 33 bp, Homo sapien
atgagatgttgaagaagtacaagatttcgttct

SEQ ID NO: 399462 - DNA, 33 bp, Homo sapien
atgagatgttgaagaattacaagatttcgttct

SEQ ID NO: 399463 - DNA, 33 bp, Homo sapien
gcttttataaaggatcagacagtaccatgcctg

SEQ ID NO: 399464 - DNA, 33 bp, Homo sapien
gcttttataaaggatcggacagtaccatgcctg

SEQ ID NO: 399465 - DNA, 33 bp, Homo sapien
cactcattgcccctgcagaatccacacaccccc

SEQ ID NO: 399466 - DNA, 33 bp, Homo sapien
cactcattgcccctgcggaatccacacaccccc

SEQ ID NO: 399467 - DNA, 33 bp, Homo sapien
agggtcagtttttcaccaagccaatgcagggta

SEQ ID NO: 399468 - DNA, 33 bp, Homo sapien
agggtcagtttttcacgaagccaatgcagggta

SEQ ID NO: 399469 - DNA, 33 bp, Homo sapien
gccatgcttgctattacagaaaatgctgtgatt

SEQ ID NO: 399470 - DNA, 33 bp, Homo sapien
gccatgcttgctattatagaaaatgctgtgatt

SEQ ID NO: 399471 - DNA, 33 bp, Homo sapien
gaggggcataaagagacgattcacagaatattt

SEQ ID NO: 399472 - DNA, 33 bp, Homo sapien
gaggggcataaagagatgattcacagaatattt

SEQ ID NO: 399473 - DNA, 33 bp, Homo sapien
agttgttccggctttaacacagtgactgctgac

SEQ ID NO: 399474 - DNA, 33 bp, Homo sapien
agttgttccggctttatcacagtgactgctgac

SEQ ID NO: 399475 - DNA, 33 bp, Homo sapien
tcaattgtgaagaagaaaacgaaatactagagt

SEQ ID NO: 399476 - DNA, 33 bp, Homo sapien
tcaattgtgaagaagagaacgaaatactagagt

SEQ ID NO: 399477 - DNA, 33 bp, Homo sapien
aaaagctgaagtcaacagaccctaccattctga

SEQ ID NO: 399478 - DNA, 33 bp, Homo sapien
aaaagctgaagtcaacggaccctaccattctga

SEQ ID NO: 399479 - DNA, 33 bp, Homo sapien
gctacaggctttgcgaaccttgacagtggaatt

SEQ ID NO: 399480 - DNA, 33 bp, Homo sapien
gctacaggctttgcgacccttgacagtggaatt

SEQ ID NO: 399481 - DNA, 33 bp, Homo sapien
atcatgattatttccaggtggtaggattccagt

SEQ ID NO: 399482 - DNA, 33 bp, Homo sapien
atcatgattatttccatgtggtaggattccagt

SEQ ID NO: 399483 - DNA, 33 bp, Homo sapien
aacgagtcatttgatgaaatagagatcaagtag

SEQ ID NO: 399484 - DNA, 33 bp, Homo sapien
aacgagtcatttgatgcaatagagatcaagtag

SEQ ID NO: 399485 - DNA, 33 bp, Homo sapien
tgtgaattcactaaacaaaaccacagtattgac

SEQ ID NO: 399486 - DNA, 33 bp, Homo sapien
tgtgaattcactaaacgaaaccacagtattgac

SEQ ID NO: 399487 - DNA, 33 bp, Homo sapien
agagatatactgaaaaagtaaggcttaaatgca

SEQ ID NO: 399488 - DNA, 33 bp, Homo sapien
agagatatactgaaaaggtaaggcttaaatgca

SEQ ID NO: 399489 - DNA, 33 bp, Homo sapien
ctatattatgagctggaagtaacagcatcaata

SEQ ID NO: 399490 - DNA, 33 bp, Homo sapien
ctatattatgagctggcagtaacagcatcaata

SEQ ID NO: 399491 - DNA, 33 bp, Homo sapien
aaagagaaaaagagggaaaaatgagatcccttg

SEQ ID NO: 399492 - DNA, 33 bp, Homo sapien
aaagagaaaaagaggggaaaatgagatcccttg

SEQ ID NO: 399493 - DNA, 33 bp, Homo sapien
accaggccttggagaaatcattaccctggtgat

SEQ ID NO: 399494 - DNA, 33 bp, Homo sapien
accaggccttggagaagtcattaccctggtgat

SEQ ID NO: 399495 - DNA, 33 bp, Homo sapien
tgtgccaagagcaaaactgttactcaaaaatta

SEQ ID NO: 399496 - DNA, 33 bp, Homo sapien
tgtgccaagagcaaaattgttactcaaaaatta

SEQ ID NO: 399497 - DNA, 33 bp, Homo sapien
tgccccagctagggataactttcaggtgtgacc

SEQ ID NO: 399498 - DNA, 33 bp, Homo sapien
tgccccagctagggatgactttcaggtgtgacc

SEQ ID NO: 399499 - DNA, 33 bp, Homo sapien
aatagtagctgtccaactacagatatttggttt

SEQ ID NO: 399500 - DNA, 33 bp, Homo sapien
aatagtagctgtccaattacagatatttggttt

SEQ ID NO: 399501 - DNA, 33 bp, Homo sapien
ttggagaagtcagtaacggtcaaactctatcaa

SEQ ID NO: 399502 - DNA, 33 bp, Homo sapien
ttggagaagtcagtaatggtcaaactctatcaa

SEQ ID NO: 399503 - DNA, 33 bp, Homo sapien
ccattcagatcatttaagtaggacgtcttaatt

SEQ ID NO: 399504 - DNA, 33 bp, Homo sapien
ccattcagatcatttaggtaggacgtcttaatt

SEQ ID NO: 399505 - DNA, 33 bp, Homo sapien
ttctgttttgttaaggcaaaaagagagtaattt

SEQ ID NO: 399506 - DNA, 33 bp, Homo sapien
ttctgttttgttaagggaaaaagagagtaattt

SEQ ID NO: 399507 - DNA, 33 bp, Homo sapien
caaagcactgtgcatgaattaactcctttattc

SEQ ID NO: 399508 - DNA, 33 bp, Homo sapien
caaagcactgtgcatggattaactcctttattc

SEQ ID NO: 399509 - DNA, 33 bp, Homo sapien
ggatgaaactagaggacgttatggaaaatgaaa

SEQ ID NO: 399510 - DNA, 33 bp, Homo sapien
ggatgaaactagaggatgttatggaaaatgaaa

SEQ ID NO: 399511 - DNA, 33 bp, Homo sapien
agagcaagatagaaggaatgaagaacaggccaa

SEQ ID NO: 399512 - DNA, 33 bp, Homo sapien
agagcaagatagaagggatgaagaacaggccaa

SEQ ID NO: 399513 - DNA, 33 bp, Homo sapien
gacactaatccttcaactctttcaacttgacca

SEQ ID NO: 399514 - DNA, 33 bp, Homo sapien
gacactaatccttcaattctttcaacttgacca

SEQ ID NO: 399515 - DNA, 33 bp, Homo sapien
cattagacaagggcataaatggagaagtgaaac

SEQ ID NO: 399516 - DNA, 33 bp, Homo sapien
cattagacaagggcatcaatggagaagtgaaac

SEQ ID NO: 399517 - DNA, 33 bp, Homo sapien
aaagtctcagcctgcactgaatgtgaaagagct

SEQ ID NO: 399518 - DNA, 33 bp, Homo sapien
aaagtctcagcctgcattgaatgtgaaagagct

SEQ ID NO: 399519 - DNA, 33 bp, Homo sapien
tagagaaattgaggccagattgcattcttcaaa

SEQ ID NO: 399520 - DNA, 33 bp, Homo sapien
tagagaaattgaggccggattgcattcttcaaa

SEQ ID NO: 399521 - DNA, 33 bp, Homo sapien
aactctttccactaccaatgttccttatcctgt

SEQ ID NO: 399522 - DNA, 33 bp, Homo sapien
aactctttccactaccgatgttccttatcctgt

SEQ ID NO: 399523 - DNA, 33 bp, Homo sapien
tatgtgcttgtgattcaaaaagaaataactgca

SEQ ID NO: 399524 - DNA, 33 bp, Homo sapien
tatgtgcttgtgattcgaaaagaaataactgca

SEQ ID NO: 399525 - DNA, 33 bp, Homo sapien
gtaaagatctggctagactaccagtttaagatg

SEQ ID NO: 399526 - DNA, 33 bp, Homo sapien
gtaaagatctggctaggctaccagtttaagatg

SEQ ID NO: 399527 - DNA, 33 bp, Homo sapien
gggtaaacttgagaaacaggaagacatggctac

SEQ ID NO: 399528 - DNA, 33 bp, Homo sapien
gggtaaacttgagaaagaggaagacatggctac

SEQ ID NO: 399529 - DNA, 33 bp, Homo sapien
agtgtttatcaaactaccctatcttcaaaatgt

SEQ ID NO: 399530 - DNA, 33 bp, Homo sapien
agtgtttatcaaactatcctatcttcaaaatgt

SEQ ID NO: 399531 - DNA, 33 bp, Homo sapien
aacttggaggttttaacgtgctaatgcgtattg

SEQ ID NO: 399532 - DNA, 33 bp, Homo sapien
aacttggaggttttaatgtgctaatgcgtattg

SEQ ID NO: 399533 - DNA, 33 bp, Homo sapien
tacttcagaatgtacactgatacgtattgatac

SEQ ID NO: 399534 - DNA, 33 bp, Homo sapien
tacttcagaatgtacattgatacgtattgatac

SEQ ID NO: 399535 - DNA, 33 bp, Homo sapien
ccttcaagctctacctcactttttaatatgtga

SEQ ID NO: 399536 - DNA, 33 bp, Homo sapien
ccttcaagctctacctgactttttaatatgtga

SEQ ID NO: 399537 - DNA, 33 bp, Homo sapien
ttttgctttcctggaagttagtaagcctttaga

SEQ ID NO: 399538 - DNA, 33 bp, Homo sapien
ttttgctttcctggaatttagtaagcctttaga

SEQ ID NO: 399539 - DNA, 33 bp, Homo sapien
ctagtttactgtgttcaaagaaaccgagaggta

SEQ ID NO: 399540 - DNA, 33 bp, Homo sapien
ctagtttactgtgttcgaagaaaccgagaggta

SEQ ID NO: 399541 - DNA, 33 bp, Homo sapien
agccaaagtgacctaacgtgaattttcagaatt

SEQ ID NO: 399542 - DNA, 33 bp, Homo sapien
agccaaagtgacctaatgtgaattttcagaatt

SEQ ID NO: 399543 - DNA, 33 bp, Homo sapien
aagtggaattacattacgcaaatgaaaacagca

SEQ ID NO: 399544 - DNA, 33 bp, Homo sapien
aagtggaattacattaggcaaatgaaaacagca

SEQ ID NO: 399545 - DNA, 33 bp, Homo sapien
agccagtccaattagggcaaataagcctccatt

SEQ ID NO: 399546 - DNA, 33 bp, Homo sapien
agccagtccaattaggtcaaataagcctccatt

SEQ ID NO: 399547 - DNA, 33 bp, Homo sapien
cccaaattcaaaacaacgcccaaatagcaattc

SEQ ID NO: 399548 - DNA, 33 bp, Homo sapien
cccaaattcaaaacaatgcccaaatagcaattc

SEQ ID NO: 399549 - DNA, 33 bp, Homo sapien
gtaccctcctgctaaagtattgtacgcatacgg

SEQ ID NO: 399550 - DNA, 33 bp, Homo sapien
gtaccctcctgctaaattattgtacgcatacgg

SEQ ID NO: 399551 - DNA, 33 bp, Homo sapien
aagtttccaatttctccaaaatctcactaacat

SEQ ID NO: 399552 - DNA, 33 bp, Homo sapien
aagtttccaatttctctaaaatctcactaacat

SEQ ID NO: 399553 - DNA, 33 bp, Homo sapien
tatgtctctgaaaccacatgacctcacaggtct

SEQ ID NO: 399554 - DNA, 33 bp, Homo sapien
tatgtctctgaaaccatatgacctcacaggtct

SEQ ID NO: 399555 - DNA, 33 bp, Homo sapien
cattaaacagggccaactcacacaggtccaggg

SEQ ID NO: 399556 - DNA, 33 bp, Homo sapien
cattaaacagggccaattcacacaggtccaggg

SEQ ID NO: 399557 - DNA, 33 bp, Homo sapien
aaaggaacgctgtccaataagtttacagtattt

SEQ ID NO: 399558 - DNA, 33 bp, Homo sapien
aaaggaacgctgtccagtaagtttacagtattt

SEQ ID NO: 399559 - DNA, 33 bp, Homo sapien
ttattaaatgctcctaatacacaaccaacttac

SEQ ID NO: 399560 - DNA, 33 bp, Homo sapien
ttattaaatgctcctattacacaaccaacttac

SEQ ID NO: 399561 - DNA, 33 bp, Homo sapien
gcttactacatcagtaactaatgaatgccttct

SEQ ID NO: 399562 - DNA, 33 bp, Homo sapien
gcttactacatcagtagctaatgaatgccttct

SEQ ID NO: 399563 - DNA, 33 bp, Homo sapien
aaatggtggatacccacgcgattacccctccag

SEQ ID NO: 399564 - DNA, 33 bp, Homo sapien
aaatggtggatacccatgcgattacccctccag

SEQ ID NO: 399565 - DNA, 33 bp, Homo sapien
gattccaaatgagaggcatttacaggctttgtt

SEQ ID NO: 399566 - DNA, 33 bp, Homo sapien
gattccaaatgagagggatttacaggctttgtt

SEQ ID NO: 399567 - DNA, 33 bp, Homo sapien; identical to SEQ ID NO: 399565

SEQ ID NO: 399568 - DNA, 33 bp, Homo sapien; identical to SEQ ID NO: 399566

SEQ ID NO: 399569 - DNA, 33 bp, Homo sapien
gatggagatgaaatcaaaggtggttgaaactgt

SEQ ID NO: 399570 - DNA, 33 bp, Homo sapien
gatggagatgaaatcataggtggttgaaactgt

SEQ ID NO: 399571 - DNA, 33 bp, Homo sapien
aaatgatatagctaaaactaaacggatagaaag

SEQ ID NO: 399572 - DNA, 33 bp, Homo sapien
aaatgatatagctaaagctaaacggatagaaag

SEQ ID NO: 399573 - DNA, 33 bp, Homo sapien
ttttcactgaaaataaaggttactaagagttac

SEQ ID NO: 399574 - DNA, 33 bp, Homo sapien
ttttcactgaaaataagggttactaagagttac

SEQ ID NO: 399575 - DNA, 33 bp, Homo sapien
caaaactgctaagcaacgaaaacttaatttcaa

SEQ ID NO: 399576 - DNA, 33 bp, Homo sapien
caaaactgctaagcaatgaaaacttaatttcaa

SEQ ID NO: 399577 - DNA, 33 bp, Homo sapien
cttgaccttgagccaaacttctttacatttctt

SEQ ID NO: 399578 - DNA, 33 bp, Homo sapien
cttgaccttgagccaagcttctttacatttctt

SEQ ID NO: 399579 - DNA, 33 bp, Homo sapien
gaggcatttgtgggcaacggtttatttacttta

SEQ ID NO: 399580 - DNA, 33 bp, Homo sapien
gaggcatttgtgggcatcggtttatttacttta

SEQ ID NO: 399581 - DNA, 33 bp, Homo sapien
cctgtagcttttccacactcagactctcacggt

SEQ ID NO: 399582 - DNA, 33 bp, Homo sapien
cctgtagcttttccacgctcagactctcacggt

SEQ ID NO: 399583 - DNA, 33 bp, Homo sapien
gagctgtgggaatgggaacactgccttccagac

SEQ ID NO: 399584 - DNA, 33 bp, Homo sapien
gagctgtgggaatggggacactgccttccagac

SEQ ID NO: 399585 - DNA, 33 bp, Homo sapien
catctgggtttgtgtaagcatttttctgaacaa

SEQ ID NO: 399586 - DNA, 33 bp, Homo sapien
catctgggtttgtgtacgcatttttctgaacaa

SEQ ID NO: 399587 - DNA, 33 bp, Homo sapien
ttctgtccccaagcaaagtggaatgtagtctag

SEQ ID NO: 399588 - DNA, 33 bp, Homo sapien
ttctgtccccaagcaatgtggaatgtagtctag

SEQ ID NO: 399589 - DNA, 33 bp, Homo sapien
tactctcaagcttatacgtaagtgtcagaaaag

SEQ ID NO: 399590 - DNA, 33 bp, Homo sapien
tactctcaagcttatatgtaagtgtcagaaaag

SEQ ID NO: 399591 - DNA, 33 bp, Homo sapien
cagtaatttactcttccccagtggccagattag

SEQ ID NO: 399592 - DNA, 33 bp, Homo sapien
cagtaatttactcttctccagtggccagattag

SEQ ID NO: 399593 - DNA, 33 bp, Homo sapien
aatctttcccagccaaaaatttggatcacacag

SEQ ID NO: 399594 - DNA, 33 bp, Homo sapien
aatctttcccagccaagaatttggatcacacag

SEQ ID NO: 399595 - DNA, 33 bp, Homo sapien
tgaataattgagggaaaaaatcaatctctatat

SEQ ID NO: 399596 - DNA, 33 bp, Homo sapien
tgaataattgagggaagaaatcaatctctatat

SEQ ID NO: 399597 - DNA, 33 bp, Homo sapien
atagtaaataatttcacgtatgtggctgtaatt

SEQ ID NO: 399598 - DNA, 33 bp, Homo sapien
atagtaaataatttcatgtatgtggctgtaatt

SEQ ID NO: 399599 - DNA, 33 bp, Homo sapien
gagactgtacatcaaacggaatataaaatcaag

SEQ ID NO: 399600 - DNA, 33 bp, Homo sapien
gagactgtacatcaaatggaatataaaatcaag

SEQ ID NO: 399601 - DNA, 33 bp, Homo sapien
aaataccacactgttgaaattatgccagtgtta

SEQ ID NO: 399602 - DNA, 33 bp, Homo sapien
aaataccacactgttgtaattatgccagtgtta

SEQ ID NO: 399603 - DNA, 33 bp, Homo sapien
agatggaaccagatcacgagtagggtggaaatg

SEQ ID NO: 399604 - DNA, 33 bp, Homo sapien
agatggaaccagatcatgagtagggtggaaatg

SEQ ID NO: 399605 - DNA, 33 bp, Homo sapien
aatctgaggatgaaaactgaatatgcgaaggat

SEQ ID NO: 399606 - DNA, 33 bp, Homo sapien
aatctgaggatgaaaagtgaatatgcgaaggat

SEQ ID NO: 399607 - DNA, 33 bp, Homo sapien
tccatgccatgatttagctggttagcatatttt

SEQ ID NO: 399608 - DNA, 33 bp, Homo sapien
tccatgccatgatttatctggttagcatatttt

SEQ ID NO: 399609 - DNA, 33 bp, Homo sapien
agattcacattccaacactcacattagttctcg

SEQ ID NO: 399610 - DNA, 33 bp, Homo sapien
agattcacattccaacgctcacattagttctcg

SEQ ID NO: 399611 - DNA, 33 bp, Homo sapien
acatgctcagtaacacagcctgtattagtgtct

SEQ ID NO: 399612 - DNA, 33 bp, Homo sapien
acatgctcagtaacaccgcctgtattagtgtct

SEQ ID NO: 399613 - DNA, 33 bp, Homo sapien
tggatttccttgtggagagccaaatctctgcca

SEQ ID NO: 399614 - DNA, 33 bp, Homo sapien
tggatttccttgtggatagccaaatctctgcca

SEQ ID NO: 399615 - DNA, 33 bp, Homo sapien
atggtaatcttacatccgaaaatccagctcagg

SEQ ID NO: 399616 - DNA, 33 bp, Homo sapien
atggtaatcttacatcggaaaatccagctcagg

SEQ ID NO: 399617 - DNA, 33 bp, Homo sapien
ctagttttcatacttccattgttgatcatgatg

SEQ ID NO: 399618 - DNA, 33 bp, Homo sapien
ctagttttcatacttctattgttgatcatgatg

SEQ ID NO: 399619 - DNA, 33 bp, Homo sapien
aagagactggagaacaagactcaaatctacctc

SEQ ID NO: 399620 - DNA, 33 bp, Homo sapien
aagagactggagaacaggactcaaatctacctc

SEQ ID NO: 399621 - DNA, 33 bp, Homo sapien
aaatggtcacctatcgcacactcatgcaggctt

SEQ ID NO: 399622 - DNA, 33 bp, Homo sapien
aaatggtcacctatcggacactcatgcaggctt

SEQ ID NO: 399623 - DNA, 33 bp, Homo sapien
ctaaaagcaagtgaccaaaaacaagtgaggtaa

SEQ ID NO: 399624 - DNA, 33 bp, Homo sapien
ctaaaagcaagtgaccgaaaacaagtgaggtaa

SEQ ID NO: 399625 - DNA, 33 bp, Homo sapien
agtgatgaaaggaaccacaggagccccagtgaa

SEQ ID NO: 399626 - DNA, 33 bp, Homo sapien
agtgatgaaaggaaccccaggagccccagtgaa

SEQ ID NO: 399627 - DNA, 33 bp, Homo sapien
cagtatagtgagcttacggaatgagaaaggaat

SEQ ID NO: 399628 - DNA, 33 bp, Homo sapien
cagtatagtgagcttatggaatgagaaaggaat

SEQ ID NO: 399629 - DNA, 33 bp, Homo sapien
tcaagagaagatgagacgatttagaaggcagta

SEQ ID NO: 399630 - DNA, 33 bp, Homo sapien
tcaagagaagatgagatgatttagaaggcagta

SEQ ID NO: 399631 - DNA, 33 bp, Homo sapien
gaaaattacgagaaatcaagtagagaattaagt

SEQ ID NO: 399632 - DNA, 33 bp, Homo sapien
gaaaattacgagaaatgaagtagagaattaagt

SEQ ID NO: 399633 - DNA, 33 bp, Homo sapien
agatagtttctatgaacatgtgacttagctccc

SEQ ID NO: 399634 - DNA, 33 bp, Homo sapien
agatagtttctatgaatatgtgacttagctccc

SEQ ID NO: 399635 - DNA, 33 bp, Homo sapien
taaatacccggcaacaatgaaatgtttcaagaa

SEQ ID NO: 399636 - DNA, 33 bp, Homo sapien
taaatacccggcaacagtgaaatgtttcaagaa

SEQ ID NO: 399637 - DNA, 33 bp, Homo sapien
cgatgaagtataaatccgatcatcttctactta

SEQ ID NO: 399638 - DNA, 33 bp, Homo sapien
cgatgaagtataaatctgatcatcttctactta

SEQ ID NO: 399639 - DNA, 33 bp, Homo sapien
aagaaatgacctctccaatggaagaatttcaag

SEQ ID NO: 399640 - DNA, 33 bp, Homo sapien
aagaaatgacctctccgatggaagaatttcaag

SEQ ID NO: 399641 - DNA, 33 bp, Homo sapien
ttttcttgcaacagaaaagagaacatctgagga

SEQ ID NO: 399642 - DNA, 33 bp, Homo sapien
ttttcttgcaacagaagagagaacatctgagga

SEQ ID NO: 399643 - DNA, 33 bp, Homo sapien
gtaccagggaagaagaagaccctgaccagtgac

SEQ ID NO: 399644 - DNA, 33 bp, Homo sapien
gtaccagggaagaagaggaccctgaccagtgac

SEQ ID NO: 399645 - DNA, 33 bp, Homo sapien
tataagactaatagtaccaagtgctggaaaaaa

SEQ ID NO: 399646 - DNA, 33 bp, Homo sapien
tataagactaatagtatcaagtgctggaaaaaa

SEQ ID NO: 399647 - DNA, 33 bp, Homo sapien
gctcccacttccaatacggagaatgctgtagac

SEQ ID NO: 399648 - DNA, 33 bp, Homo sapien
gctcccacttccaatatggagaatgctgtagac

SEQ ID NO: 399649 - DNA, 33 bp, Homo sapien
tgactaatacagccacacaattgtacattcaaa

SEQ ID NO: 399650 - DNA, 33 bp, Homo sapien
tgactaatacagccacgcaattgtacattcaaa

SEQ ID NO: 399651 - DNA, 33 bp, Homo sapien
taacatccattattcaataaacagtgaaatgag

SEQ ID NO: 399652 - DNA, 33 bp, Homo sapien
taacatccattattcagtaaacagtgaaatgag

SEQ ID NO: 399653 - DNA, 33 bp, Homo sapien
atgccactgggacaaagatttaataccttccct

SEQ ID NO: 399654 - DNA, 33 bp, Homo sapien
atgccactgggacaaatatttaataccttccct

SEQ ID NO: 399655 - DNA, 33 bp, Homo sapien
tggaagcctcgttttcccctgttctctagcagg

SEQ ID NO: 399656 - DNA, 33 bp, Homo sapien
tggaagcctcgttttctcctgttctctagcagg

SEQ ID NO: 399657 - DNA, 33 bp, Homo sapien
ttcttacaagcaactccctgagccttaattttt

SEQ ID NO: 399658 - DNA, 33 bp, Homo sapien
ttcttacaagcaactctctgagccttaattttt

SEQ ID NO: 399659 - DNA, 33 bp, Homo sapien
gaataaaaaatacatacacggtggtgtcaaagg

SEQ ID NO: 399660 - DNA, 33 bp, Homo sapien
gaataaaaaatacatatacggtggtgtcaaagg

SEQ ID NO: 399661 - DNA, 33 bp, Homo sapien
ctgaaggcaagaaaaacgtgggtgcatgaaccc

SEQ ID NO: 399662 - DNA, 33 bp, Homo sapien
ctgaaggcaagaaaaatgtgggtgcatgaaccc

SEQ ID NO: 399663 - DNA, 33 bp, Homo sapien
taaaaagtccagatacaatagatgctggcgagg

SEQ ID NO: 399664 - DNA, 33 bp, Homo sapien
taaaaagtccagatacgatagatgctggcgagg

SEQ ID NO: 399665 - DNA, 33 bp, Homo sapien
catttgtctactgatccatgatattgagccttt

SEQ ID NO: 399666 - DNA, 33 bp, Homo sapien
catttgtctactgatctatgatattgagccttt

SEQ ID NO: 399667 - DNA, 33 bp, Homo sapien
ctctgttgccaccacacgggatacctaggagaa

SEQ ID NO: 399668 - DNA, 33 bp, Homo sapien
ctctgttgccaccacatgggatacctaggagaa

SEQ ID NO: 399669 - DNA, 33 bp, Homo sapien
cctttctaattgctggcagccttgggccatgtt

SEQ ID NO: 399670 - DNA, 33 bp, Homo sapien
cctttctaattgctggtagccttgggccatgtt

SEQ ID NO: 399671 - DNA, 33 bp, Homo sapien
tttgaatagctgcaacagatacctaatggcatg

SEQ ID NO: 399672 - DNA, 33 bp, Homo sapien
tttgaatagctgcaacggatacctaatggcatg

SEQ ID NO: 399673 - DNA, 33 bp, Homo sapien
tccaaattttattggcacttattgggtctgaca

SEQ ID NO: 399674 - DNA, 33 bp, Homo sapien
tccaaattttattggcgcttattgggtctgaca

SEQ ID NO: 399675 - DNA, 33 bp, Homo sapien
tggcttcccagacaatcatcgaaccctctgctc

SEQ ID NO: 399676 - DNA, 33 bp, Homo sapien
tggcttcccagacaattatcgaaccctctgctc

SEQ ID NO: 399677 - DNA, 33 bp, Homo sapien
aacaaacacccgaaatcaaggtgtatatgtggg

SEQ ID NO: 399678 - DNA, 33 bp, Homo sapien
aacaaacacccgaaatgaaggtgtatatgtggg

SEQ ID NO: 399679 - DNA, 33 bp, Homo sapien
ttcacagggccattccaagttcaagaccaccta

SEQ ID NO: 399680 - DNA, 33 bp, Homo sapien
ttcacagggccattcccagttcaagaccaccta

SEQ ID NO: 399681 - DNA, 33 bp, Homo sapien
gtttatgcatgataaacagaggaaatggagggg

SEQ ID NO: 399682 - DNA, 33 bp, Homo sapien
gtttatgcatgataaagagaggaaatggagggg

SEQ ID NO: 399683 - DNA, 33 bp, Homo sapien
aattcaatctaagcaacctgtcatatcacccct

SEQ ID NO: 399684 - DNA, 33 bp, Homo sapien
aattcaatctaagcaatctgtcatatcacccct

SEQ ID NO: 399685 - DNA, 33 bp, Homo sapien
tgcaggtaaatgaggactatgcatttacttcat

SEQ ID NO: 399686 - DNA, 33 bp, Homo sapien
tgcaggtaaatgaggattatgcatttacttcat

SEQ ID NO: 399687 - DNA, 33 bp, Homo sapien
aaattcaccacaggtacgctatgatggatcaat

SEQ ID NO: 399688 - DNA, 33 bp, Homo sapien
aaattcaccacaggtatgctatgatggatcaat

SEQ ID NO: 399689 - DNA, 33 bp, Homo sapien
cctgtgcctagtataacgaatttttgctgaagt

SEQ ID NO: 399690 - DNA, 33 bp, Homo sapien
cctgtgcctagtataatgaatttttgctgaagt

SEQ ID NO: 399691 - DNA, 33 bp, Homo sapien
acttggtggcaacaggcaagatgttggaggtaa

SEQ ID NO: 399692 - DNA, 33 bp, Homo sapien
acttggtggcaacaggtaagatgttggaggtaa

SEQ ID NO: 399693 - DNA, 33 bp, Homo sapien
attgtgcactttcagaaaactttccctgaaata

SEQ ID NO: 399694 - DNA, 33 bp, Homo sapien
attgtgcactttcagagaactttccctgaaata

SEQ ID NO: 399695 - DNA, 33 bp, Homo sapien
cacccaaattggtgataagaaattccatgagca

SEQ ID NO: 399696 - DNA, 33 bp, Homo sapien
cacccaaattggtgatgagaaattccatgagca

SEQ ID NO: 399697 - DNA, 33 bp, Homo sapien
gaagctcccagtctcactaaccatcccccaact

SEQ ID NO: 399698 - DNA, 33 bp, Homo sapien
gaagctcccagtctcattaaccatcccccaact

SEQ ID NO: 399699 - DNA, 33 bp, Homo sapien
tcatggattcttggcaccgatatgcagaacaga

SEQ ID NO: 399700 - DNA, 33 bp, Homo sapien
tcatggattcttggcagcgatatgcagaacaga

SEQ ID NO: 399701 - DNA, 33 bp, Homo sapien
gagagtcactttttgacgatgtttcttggaaga

SEQ ID NO: 399702 - DNA, 33 bp, Homo sapien
gagagtcactttttgatgatgtttcttggaaga

SEQ ID NO: 399703 - DNA, 33 bp, Homo sapien
ttagttttgctcttaaacacccaatgttcagga

SEQ ID NO: 399704 - DNA, 33 bp, Homo sapien
ttagttttgctcttaaccacccaatgttcagga

SEQ ID NO: 399705 - DNA, 33 bp, Homo sapien
ctcagagtattgctgcaaagaaagttactacaa

SEQ ID NO: 399706 - DNA, 33 bp, Homo sapien
ctcagagtattgctgccaagaaagttactacaa

SEQ ID NO: 399707 - DNA, 33 bp, Homo sapien
gggggagataataacaaaacctctcagagtatt

SEQ ID NO: 399708 - DNA, 33 bp, Homo sapien
gggggagataataacagaacctctcagagtatt

SEQ ID NO: 399709 - DNA, 33 bp, Homo sapien
agtccagttgtctgtcccagatttgaactcaga

SEQ ID NO: 399710 - DNA, 33 bp, Homo sapien
agtccagttgtctgtctcagatttgaactcaga

SEQ ID NO: 399711 - DNA, 33 bp, Homo sapien
caaaccagcatgcaaacagacaaacagttgctc

SEQ ID NO: 399712 - DNA, 33 bp, Homo sapien
caaaccagcatgcaaatagacaaacagttgctc

SEQ ID NO: 399713 - DNA, 33 bp, Homo sapien
aggggtgtgtgcaaaacaggaaggaggggagag

SEQ ID NO: 399714 - DNA, 33 bp, Homo sapien
aggggtgtgtgcaaaagaggaaggaggggagag

SEQ ID NO: 399715 - DNA, 33 bp, Homo sapien
gcatactctgctctccaatatttccaataacag

SEQ ID NO: 399716 - DNA, 33 bp, Homo sapien
gcatactctgctctccgatatttccaataacag

SEQ ID NO: 399717 - DNA, 33 bp, Homo sapien
aactatacttggaacagggaaagtactcaataa

SEQ ID NO: 399718 - DNA, 33 bp, Homo sapien
aactatacttggaacatggaaagtactcaataa

SEQ ID NO: 399719 - DNA, 33 bp, Homo sapien
aggtaggatttctgaccctgaagcacaggttta

SEQ ID NO: 399720 - DNA, 33 bp, Homo sapien
aggtaggatttctgacgctgaagcacaggttta

SEQ ID NO: 399721 - DNA, 33 bp, Homo sapien
tcattatgactttttacctttatcaatgtttct

SEQ ID NO: 399722 - DNA, 33 bp, Homo sapien
tcattatgactttttatctttatcaatgtttct

SEQ ID NO: 399723 - DNA, 33 bp, Homo sapien
ccccttctctcaatcaataataacacaactaag

SEQ ID NO: 399724 - DNA, 33 bp, Homo sapien
ccccttctctcaatcagtaataacacaactaag

SEQ ID NO: 399725 - DNA, 33 bp, Homo sapien
caactgtatgctagacacaagttttgaatgctt

SEQ ID NO: 399726 - DNA, 33 bp, Homo sapien
caactgtatgctagacgcaagttttgaatgctt

SEQ ID NO: 399727 - DNA, 33 bp, Homo sapien
tgagttgtttttcctacaggtggatgttggaga

SEQ ID NO: 399728 - DNA, 33 bp, Homo sapien
tgagttgtttttcctataggtggatgttggaga

SEQ ID NO: 399729 - DNA, 33 bp, Homo sapien
taattccttatattaaacttttcctgctcaaat

SEQ ID NO: 399730 - DNA, 33 bp, Homo sapien
taattccttatattaagcttttcctgctcaaat

SEQ ID NO: 399731 - DNA, 33 bp, Homo sapien
aaggtatctgtatctgccagaattaaatgagac

SEQ ID NO: 399732 - DNA, 33 bp, Homo sapien
aaggtatctgtatctggcagaattaaatgagac

SEQ ID NO: 399733 - DNA, 33 bp, Homo sapien
catgaaataaggtggacctgtgtagccaacagg

SEQ ID NO: 399734 - DNA, 33 bp, Homo sapien
catgaaataaggtggatctgtgtagccaacagg

SEQ ID NO: 399735 - DNA, 33 bp, Homo sapien
ccagaggtcagaccaacaggcagagaccaattg

SEQ ID NO: 399736 - DNA, 33 bp, Homo sapien
ccagaggtcagaccaataggcagagaccaattg

SEQ ID NO: 399737 - DNA, 33 bp, Homo sapien
gtttagtgaaatttcaaggtaagtattgaagcc

SEQ ID NO: 399738 - DNA, 33 bp, Homo sapien
gtttagtgaaatttcagggtaagtattgaagcc

SEQ ID NO: 399739 - DNA, 33 bp, Homo sapien
gcaaccagcagaaaacaggattgggggtatgct

SEQ ID NO: 399740 - DNA, 33 bp, Homo sapien
gcaaccagcagaaaacgggattgggggtatgct

SEQ ID NO: 399741 - DNA, 33 bp, Homo sapien
caacgtccacttcacaaatgagggacatgaggc

SEQ ID NO: 399742 - DNA, 33 bp, Homo sapien
caacgtccacttcacagatgagggacatgaggc

SEQ ID NO: 399743 - DNA, 33 bp, Homo sapien
cgccactaagccaagacgtatgtttgcttgaat

SEQ ID NO: 399744 - DNA, 33 bp, Homo sapien
cgccactaagccaagatgtatgtttgcttgaat

SEQ ID NO: 399745 - DNA, 33 bp, Homo sapien
gttaagtagcgttaaaatcattttattgtgata

SEQ ID NO: 399746 - DNA, 33 bp, Homo sapien
gttaagtagcgttaaagtcattttattgtgata

SEQ ID NO: 399747 - DNA, 33 bp, Homo sapien
tggctttttcatgcacagaagatcagcgctcct

SEQ ID NO: 399748 - DNA, 33 bp, Homo sapien
tggctttttcatgcacggaagatcagcgctcct

SEQ ID NO: 399749 - DNA, 33 bp, Homo sapien
tacaaatttatcatcagatccaggaactgagaa

SEQ ID NO: 399750 - DNA, 33 bp, Homo sapien
tacaaatttatcatcatatccaggaactgagaa

SEQ ID NO: 399751 - DNA, 33 bp, Homo sapien
accaattcataccccaacacaatcagcttcatt

SEQ ID NO: 399752 - DNA, 33 bp, Homo sapien
accaattcataccccaccacaatcagcttcatt

SEQ ID NO: 399753 - DNA, 33 bp, Homo sapien
tttcctgtctttccaccatttgtccactaggat

SEQ ID NO: 399754 - DNA, 33 bp, Homo sapien
tttcctgtctttccactatttgtccactaggat

SEQ ID NO: 399755 - DNA, 33 bp, Homo sapien
tgtgcccttcttgaccaccatggccgccatcct

SEQ ID NO: 399756 - DNA, 33 bp, Homo sapien
tgtgcccttcttgaccgccatggccgccatcct

SEQ ID NO: 399757 - DNA, 33 bp, Homo sapien
tcctctccaaatttacgcttcattccctgcttt

SEQ ID NO: 399758 - DNA, 33 bp, Homo sapien
tcctctccaaatttactcttcattccctgcttt

SEQ ID NO: 399759 - DNA, 33 bp, Homo sapien
aatcatttgaccagggcaagttggctacaaaga

SEQ ID NO: 399760 - DNA, 33 bp, Homo sapien
aatcatttgaccagggtaagttggctacaaaga

SEQ ID NO: 399761 - DNA, 33 bp, Homo sapien
gcactgccctgcaagacgtatcatacgtttact

SEQ ID NO: 399762 - DNA, 33 bp, Homo sapien
gcactgccctgcaagatgtatcatacgtttact

SEQ ID NO: 399763 - DNA, 33 bp, Homo sapien
ggacaagtatccaaaccatattataggcctcct

SEQ ID NO: 399764 - DNA, 33 bp, Homo sapien
ggacaagtatccaaactatattataggcctcct

SEQ ID NO: 399765 - DNA, 33 bp, Homo sapien
ccacaccattgtgaccagaaagagacccaaggc

SEQ ID NO: 399766 - DNA, 33 bp, Homo sapien
ccacaccattgtgaccggaaagagacccaaggc

SEQ ID NO: 399767 - DNA, 33 bp, Homo sapien
gggggagactattctgaattatctggtgagccg

SEQ ID NO: 399768 - DNA, 33 bp, Homo sapien
gggggagactattctggattatctggtgagccg

SEQ ID NO: 399769 - DNA, 33 bp, Homo sapien
ttctggaatcatgcgacggaaaaaaggcagcat

SEQ ID NO: 399770 - DNA, 33 bp, Homo sapien
ttctggaatcatgcgagggaaaaaaggcagcat

SEQ ID NO: 399771 - DNA, 33 bp, Homo sapien
ctgtagcctacctggacgatcctaattaacact

SEQ ID NO: 399772 - DNA, 33 bp, Homo sapien
ctgtagcctacctggatgatcctaattaacact

SEQ ID NO: 399773 - DNA, 33 bp, Homo sapien
aagactgctcaaggcaaagaggagagtagacaa

SEQ ID NO: 399774 - DNA, 33 bp, Homo sapien
aagactgctcaaggcagagaggagagtagacaa

SEQ ID NO: 399775 - DNA, 33 bp, Homo sapien
atttcaagcactatgcaaggttcaggatgcgta

SEQ ID NO: 399776 - DNA, 33 bp, Homo sapien
atttcaagcactatgcgaggttcaggatgcgta

SEQ ID NO: 399777 - DNA, 33 bp, Homo sapien
tacagaggtaagaagaagacaaatcatggagag

SEQ ID NO: 399778 - DNA, 33 bp, Homo sapien
tacagaggtaagaagacgacaaatcatggagag

SEQ ID NO: 399779 - DNA, 33 bp, Homo sapien
gcaattcagaagccacaagtgaaatgagaggct

SEQ ID NO: 399780 - DNA, 33 bp, Homo sapien
gcaattcagaagccacgagtgaaatgagaggct

SEQ ID NO: 399781 - DNA, 33 bp, Homo sapien
actatgacttgtctgaagattatctgcttggga

SEQ ID NO: 399782 - DNA, 33 bp, Homo sapien
actatgacttgtctgatgattatctgcttggga

SEQ ID NO: 399783 - DNA, 33 bp, Homo sapien
tattgatcacctataacgtgccgaaaattggga

SEQ ID NO: 399784 - DNA, 33 bp, Homo sapien
tattgatcacctataatgtgccgaaaattggga

SEQ ID NO: 399785 - DNA, 33 bp, Homo sapien
cagaatgaagctcaaaaccacgatcctcattgt

SEQ ID NO: 399786 - DNA, 33 bp, Homo sapien
cagaatgaagctcaaatccacgatcctcattgt

SEQ ID NO: 399787 - DNA, 33 bp, Homo sapien
tatgtatcttctataaatggcgaggaaagtagt

SEQ ID NO: 399788 - DNA, 33 bp, Homo sapien
tatgtatcttctataactggcgaggaaagtagt

SEQ ID NO: 399789 - DNA, 33 bp, Homo sapien
gtggttactattgtgaaggtcaatggtcagaag

SEQ ID NO: 399790 - DNA, 33 bp, Homo sapien
gtggttactattgtgagggtcaatggtcagaag

SEQ ID NO: 399791 - DNA, 33 bp, Homo sapien
tgaatgcagtgactcaagaatggagacaaaatg

SEQ ID NO: 399792 - DNA, 33 bp, Homo sapien
tgaatgcagtgactcaggaatggagacaaaatg

SEQ ID NO: 399793 - DNA, 33 bp, Homo sapien
ttgaaggtacccaagacaatgcatgcaaggtgg

SEQ ID NO: 399794 - DNA, 33 bp, Homo sapien
ttgaaggtacccaagataatgcatgcaaggtgg

SEQ ID NO: 399795 - DNA, 33 bp, Homo sapien
ggaagatgagcaagtcaacccaaaggcattagg

SEQ ID NO: 399796 - DNA, 33 bp, Homo sapien
ggaagatgagcaagtcgacccaaaggcattagg

SEQ ID NO: 399797 - DNA, 33 bp, Homo sapien
atctctcaacaggcacaattctgcattttattg

SEQ ID NO: 399798 - DNA, 33 bp, Homo sapien
atctctcaacaggcactattctgcattttattg

SEQ ID NO: 399799 - DNA, 33 bp, Homo sapien
cattgatacccaagtccaataataatattcacc

SEQ ID NO: 399800 - DNA, 33 bp, Homo sapien
cattgatacccaagtctaataataatattcacc

SEQ ID NO: 399801 - DNA, 33 bp, Homo sapien
tttacacaatgcgagacaattgcaaaatgaaga

SEQ ID NO: 399802 - DNA, 33 bp, Homo sapien
tttacacaatgcgagataattgcaaaatgaaga

SEQ ID NO: 399803 - DNA, 33 bp, Homo sapien
taaatttggtgcctgaacgcatggagggaagtt

SEQ ID NO: 399804 - DNA, 33 bp, Homo sapien
taaatttggtgcctgagcgcatggagggaagtt

SEQ ID NO: 399805 - DNA, 33 bp, Homo sapien
aaggtagtggagcaacagtcacagtttggagca

SEQ ID NO: 399806 - DNA, 33 bp, Homo sapien
aaggtagtggagcaacggtcacagtttggagca

SEQ ID NO: 399807 - DNA, 33 bp, Homo sapien
acattactggtgggaaatatatcaacgtgttaa

SEQ ID NO: 399808 - DNA, 33 bp, Homo sapien
acattactggtgggaagtatatcaacgtgttaa

SEQ ID NO: 399809 - DNA, 33 bp, Homo sapien
cagaagttctggataaggcaaataacaaactca

SEQ ID NO: 399810 - DNA, 33 bp, Homo sapien
cagaagttctggataatgcaaataacaaactca

SEQ ID NO: 399811 - DNA, 33 bp, Homo sapien
ctgtaaaataggcttaagaaaggagaaagacat

SEQ ID NO: 399812 - DNA, 33 bp, Homo sapien
ctgtaaaataggcttaggaaaggagaaagacat

SEQ ID NO: 399813 - DNA, 33 bp, Homo sapien
agcttgaccatcatgccatccatcgtcaggctc

SEQ ID NO: 399814 - DNA, 33 bp, Homo sapien
agcttgaccatcatgctatccatcgtcaggctc

SEQ ID NO: 399815 - DNA, 33 bp, Homo sapien
tgccctttgcaagctgcaggatttgacaccatg

SEQ ID NO: 399816 - DNA, 33 bp, Homo sapien
tgccctttgcaagctggaggatttgacaccatg

SEQ ID NO: 399817 - DNA, 33 bp, Homo sapien
ctgtattttccaactacgctgtaatgaagggca

SEQ ID NO: 399818 - DNA, 33 bp, Homo sapien
ctgtattttccaactatgctgtaatgaagggca

SEQ ID NO: 399819 - DNA, 33 bp, Homo sapien
tctgagtagaatgtataaatttcaaccatgcta

SEQ ID NO: 399820 - DNA, 33 bp, Homo sapien
tctgagtagaatgtatgaatttcaaccatgcta

SEQ ID NO: 399821 - DNA, 33 bp, Homo sapien
tccatgctgctttagtaaattgacatgcatctt

SEQ ID NO: 399822 - DNA, 33 bp, Homo sapien
tccatgctgctttagtgaattgacatgcatctt

SEQ ID NO: 399823 - DNA, 33 bp, Homo sapien
ggtagaatcctgaacactgaattacattagtga

SEQ ID NO: 399824 - DNA, 33 bp, Homo sapien
ggtagaatcctgaacagtgaattacattagtga

SEQ ID NO: 399825 - DNA, 33 bp, Homo sapien
gtgtcaaatgtccagacgtaattgttattatta

SEQ ID NO: 399826 - DNA, 33 bp, Homo sapien
gtgtcaaatgtccagatgtaattgttattatta

SEQ ID NO: 399827 - DNA, 33 bp, Homo sapien
acctcatctaaggagcccgtacgtgtaagcaag

SEQ ID NO: 399828 - DNA, 33 bp, Homo sapien
acctcatctaaggagctcgtacgtgtaagcaag

SEQ ID NO: 399829 - DNA, 33 bp, Homo sapien
tgctgagcttttgtgaacaaaccatggaaatat

SEQ ID NO: 399830 - DNA, 33 bp, Homo sapien
tgctgagcttttgtgagcaaaccatggaaatat

SEQ ID NO: 399831 - DNA, 33 bp, Homo sapien
tgctcctcaatcttaacagtgttttccctggga

SEQ ID NO: 399832 - DNA, 33 bp, Homo sapien
tgctcctcaatcttaagagtgttttccctggga

SEQ ID NO: 399833 - DNA, 33 bp, Homo sapien
agctttccatgtcaaaatctatcttgggaactg

SEQ ID NO: 399834 - DNA, 33 bp, Homo sapien
agctttccatgtcaaagtctatcttgggaactg

SEQ ID NO: 399835 - DNA, 33 bp, Homo sapien
ataagaagatgccttcaaaacctcattttttca

SEQ ID NO: 399836 - DNA, 33 bp, Homo sapien
ataagaagatgccttcgaaacctcattttttca

SEQ ID NO: 399837 - DNA, 33 bp, Homo sapien
ttcccgctgatgttgaccaatccgatgatgtaa

SEQ ID NO: 399838 - DNA, 33 bp, Homo sapien
ttcccgctgatgttgatcaatccgatgatgtaa

SEQ ID NO: 399839 - DNA, 33 bp, Homo sapien
attgtaaggtttacttcaacttttagagcaaat

SEQ ID NO: 399840 - DNA, 33 bp, Homo sapien
attgtaaggtttacttgaacttttagagcaaat

SEQ ID NO: 399841 - DNA, 33 bp, Homo sapien
aagcacctaaaacttacaagaaaatcagtgaca

SEQ ID NO: 399842 - DNA, 33 bp, Homo sapien
aagcacctaaaacttagaagaaaatcagtgaca

SEQ ID NO: 399843 - DNA, 33 bp, Homo sapien
tttacctaccttaagaacactgaggaaggcttt

SEQ ID NO: 399844 - DNA, 33 bp, Homo sapien
tttacctaccttaagagcactgaggaaggcttt

SEQ ID NO: 399845 - DNA, 33 bp, Homo sapien
ccatttccactgccacactttgagttttgtcct

SEQ ID NO: 399846 - DNA, 33 bp, Homo sapien
ccatttccactgccacgctttgagttttgtcct

SEQ ID NO: 399847 - DNA, 33 bp, Homo sapien
attaccttactgctacaccttgtttctttgtat

SEQ ID NO: 399848 - DNA, 33 bp, Homo sapien
attaccttactgctacgccttgtttctttgtat

SEQ ID NO: 399849 - DNA, 33 bp, Homo sapien
aacaaaaagataaggaacttgagcaaatatagc

SEQ ID NO: 399850 - DNA, 33 bp, Homo sapien
aacaaaaagataaggatcttgagcaaatatagc

SEQ ID NO: 399851 - DNA, 33 bp, Homo sapien
gagggaatggtacataccaaattcagaatagag

SEQ ID NO: 399852 - DNA, 33 bp, Homo sapien
gagggaatggtacatatcaaattcagaatagag

SEQ ID NO: 399853 - DNA, 33 bp, Homo sapien
caatgtagggtacagaaactcagtggtattgag

SEQ ID NO: 399854 - DNA, 33 bp, Homo sapien
caatgtagggtacagacactcagtggtattgag

SEQ ID NO: 399855 - DNA, 33 bp, Homo sapien
aatctagcaatataaccgcccttcattcacagg

SEQ ID NO: 399856 - DNA, 33 bp, Homo sapien
aatctagcaatataactgcccttcattcacagg

SEQ ID NO: 399857 - DNA, 33 bp, Homo sapien
aacagagatgacagaactgaactaaaaattcaa

SEQ ID NO: 399858 - DNA, 33 bp, Homo sapien
aacagagatgacagaagtgaactaaaaattcaa

SEQ ID NO: 399859 - DNA, 33 bp, Homo sapien
atgacaagaacaaaaaaggaaccacactcaacc

SEQ ID NO: 399860 - DNA, 33 bp, Homo sapien
atgacaagaacaaaaagggaaccacactcaacc

SEQ ID NO: 399861 - DNA, 33 bp, Homo sapien
gcctctacgtatcttggagtccctgtcaatgga

SEQ ID NO: 399862 - DNA, 33 bp, Homo sapien
gcctctacgtatcttgtagtccctgtcaatgga

SEQ ID NO: 399863 - DNA, 33 bp, Homo sapien
tttcctcttgctattcaccctttctctgggcct

SEQ ID NO: 399864 - DNA, 33 bp, Homo sapien
tttcctcttgctattctccctttctctgggcct

SEQ ID NO: 399865 - DNA, 33 bp, Homo sapien
caagtctttgctcagaagttgcctttcagggag

SEQ ID NO: 399866 - DNA, 33 bp, Homo sapien
caagtctttgctcagacgttgcctttcagggag

SEQ ID NO: 399867 - DNA, 33 bp, Homo sapien
gagccttctgatccaacgtgtgagctgaggaat

SEQ ID NO: 399868 - DNA, 33 bp, Homo sapien
gagccttctgatccaatgtgtgagctgaggaat

SEQ ID NO: 399869 - DNA, 33 bp, Homo sapien
ttcaggtatgaatatgaaaagggatataaaagt

SEQ ID NO: 399870 - DNA, 33 bp, Homo sapien
ttcaggtatgaatatggaaagggatataaaagt

SEQ ID NO: 399871 - DNA, 33 bp, Homo sapien
gttggagcaggttgtacgtccaatcttggagca

SEQ ID NO: 399872 - DNA, 33 bp, Homo sapien
gttggagcaggttgtatgtccaatcttggagca

SEQ ID NO: 399873 - DNA, 33 bp, Homo sapien
ctgaaatggtgccttacgccaagagaggaatct

SEQ ID NO: 399874 - DNA, 33 bp, Homo sapien
ctgaaatggtgccttatgccaagagaggaatct

SEQ ID NO: 399875 - DNA, 33 bp, Homo sapien
tggtatttcctctgcaatatagtctcattttga

SEQ ID NO: 399876 - DNA, 33 bp, Homo sapien
tggtatttcctctgcagtatagtctcattttga

SEQ ID NO: 399877 - DNA, 33 bp, Homo sapien
tcagacagtggttctcaaatgttagcagcatcc

SEQ ID NO: 399878 - DNA, 33 bp, Homo sapien
tcagacagtggttctcgaatgttagcagcatcc

SEQ ID NO: 399879 - DNA, 33 bp, Homo sapien
gatcttgtctagcaccccacggatgtttttact

SEQ ID NO: 399880 - DNA, 33 bp, Homo sapien
gatcttgtctagcacctcacggatgtttttact

SEQ ID NO: 399881 - DNA, 33 bp, Homo sapien
acctgccatttgcagaaggtttaatgaacccca

SEQ ID NO: 399882 - DNA, 33 bp, Homo sapien
acctgccatttgcagatggtttaatgaacccca

SEQ ID NO: 399883 - DNA, 33 bp, Homo sapien
gtgtgccttcttctacacataaatctactgata

SEQ ID NO: 399884 - DNA, 33 bp, Homo sapien
gtgtgccttcttctacgcataaatctactgata

SEQ ID NO: 399885 - DNA, 33 bp, Homo sapien
acaccaaacccgtgcaacacacaattcacccat

SEQ ID NO: 399886 - DNA, 33 bp, Homo sapien
acaccaaacccgtgcagcacacaattcacccat

SEQ ID NO: 399887 - DNA, 33 bp, Homo sapien
tactgaaagagatcccaagactcaagggcccca

SEQ ID NO: 399888 - DNA, 33 bp, Homo sapien
tactgaaagagatcccgagactcaagggcccca

SEQ ID NO: 399889 - DNA, 33 bp, Homo sapien
actttcctgtaatgcaaaacttgtgggatcact

SEQ ID NO: 399890 - DNA, 33 bp, Homo sapien
actttcctgtaatgcagaacttgtgggatcact

SEQ ID NO: 399891 - DNA, 33 bp, Homo sapien
acgctgcagtttctacagatccttgcatgtctc

SEQ ID NO: 399892 - DNA, 33 bp, Homo sapien
acgctgcagtttctaccgatccttgcatgtctc

SEQ ID NO: 399893 - DNA, 33 bp, Homo sapien
aaacaaatgacccaatcagagttattcacactg

SEQ ID NO: 399894 - DNA, 33 bp, Homo sapien
aaacaaatgacccaattagagttattcacactg

SEQ ID NO: 399895 - DNA, 33 bp, Homo sapien
tgagaaccagatgtaacacaagtctgctatgtg

SEQ ID NO: 399896 - DNA, 33 bp, Homo sapien
tgagaaccagatgtaatacaagtctgctatgtg

SEQ ID NO: 399897 - DNA, 33 bp, Homo sapien
tagggcataatggccacgaatgaagtctctggg

SEQ ID NO: 399898 - DNA, 33 bp, Homo sapien
tagggcataatggccatgaatgaagtctctggg

SEQ ID NO: 399899 - DNA, 33 bp, Homo sapien
gtgttgtgaagattaactcagcctacgagaagg

SEQ ID NO: 399900 - DNA, 33 bp, Homo sapien
gtgttgtgaagattaagtcagcctacgagaagg

SEQ ID NO: 399901 - DNA, 33 bp, Homo sapien
actcagccaagatcataagactagtccccatga

SEQ ID NO: 399902 - DNA, 33 bp, Homo sapien
actcagccaagatcatgagactagtccccatga

SEQ ID NO: 399903 - DNA, 33 bp, Homo sapien
ttcatctttgcactaaactattcatccaagctc

SEQ ID NO: 399904 - DNA, 33 bp, Homo sapien
ttcatctttgcactaagctattcatccaagctc

SEQ ID NO: 399905 - DNA, 33 bp, Homo sapien
tctgccttcctctctccaatagtttacctttct

SEQ ID NO: 399906 - DNA, 33 bp, Homo sapien
tctgccttcctctctctaatagtttacctttct

SEQ ID NO: 399907 - DNA, 33 bp, Homo sapien
agcagctgcagcaataagtattttaatgaaagg

SEQ ID NO: 399908 - DNA, 33 bp, Homo sapien
agcagctgcagcaataggtattttaatgaaagg

SEQ ID NO: 399909 - DNA, 33 bp, Homo sapien
actttgggttgtgggcactcttgcacataatat

SEQ ID NO: 399910 - DNA, 33 bp, Homo sapien
actttgggttgtgggcgctcttgcacataatat

SEQ ID NO: 399911 - DNA, 33 bp, Homo sapien
aatcaatctcctattacgcagaggtgcctgaaa

SEQ ID NO: 399912 - DNA, 33 bp, Homo sapien
aatcaatctcctattatgcagaggtgcctgaaa

SEQ ID NO: 399913 - DNA, 33 bp, Homo sapien
aattggcacatcacacagatggtcaaatgttaa

SEQ ID NO: 399914 - DNA, 33 bp, Homo sapien
aattggcacatcacacggatggtcaaatgttaa

SEQ ID NO: 399915 - DNA, 33 bp, Homo sapien
agaaatcaggttgtacactaataggacgatcac

SEQ ID NO: 399916 - DNA, 33 bp, Homo sapien
agaaatcaggttgtaccctaataggacgatcac

SEQ ID NO: 399917 - DNA, 33 bp, Homo sapien
aagtaatacagaacccaacaaactggcacacag

SEQ ID NO: 399918 - DNA, 33 bp, Homo sapien
aagtaatacagaacccgacaaactggcacacag

SEQ ID NO: 399919 - DNA, 33 bp, Homo sapien
aggcttctggcacctcaaactttctgttagcta

SEQ ID NO: 399920 - DNA, 33 bp, Homo sapien
aggcttctggcacctccaactttctgttagcta

SEQ ID NO: 399921 - DNA, 33 bp, Homo sapien
tcccctaagactgatacggacactacaggagag

SEQ ID NO: 399922 - DNA, 33 bp, Homo sapien
tcccctaagactgatatggacactacaggagag

SEQ ID NO: 399923 - DNA, 33 bp, Homo sapien
caatgcaaacatgcaaagtaaacattgagggaa

SEQ ID NO: 399924 - DNA, 33 bp, Homo sapien
caatgcaaacatgcaaggtaaacattgagggaa

SEQ ID NO: 399925 - DNA, 33 bp, Homo sapien
cttattgtaagataaaaggagagatggacattt

SEQ ID NO: 399926 - DNA, 33 bp, Homo sapien
cttattgtaagataaatggagagatggacattt

SEQ ID NO: 399927 - DNA, 33 bp, Homo sapien
ataatactctgcttcgaagataaggctctacac

SEQ ID NO: 399928 - DNA, 33 bp, Homo sapien
ataatactctgcttcggagataaggctctacac

SEQ ID NO: 399929 - DNA, 33 bp, Homo sapien
tttgataaatatacaacgtaccatctcactcag

SEQ ID NO: 399930 - DNA, 33 bp, Homo sapien
tttgataaatatacaatgtaccatctcactcag

SEQ ID NO: 399931 - DNA, 33 bp, Homo sapien
ttttaaagaaattgccactggtgttcactcagt

SEQ ID NO: 399932 - DNA, 33 bp, Homo sapien
ttttaaagaaattgcctctggtgttcactcagt

SEQ ID NO: 399933 - DNA, 33 bp, Homo sapien
aaactcaccaagccataagaattcacaaccgca

SEQ ID NO: 399934 - DNA, 33 bp, Homo sapien
aaactcaccaagccatgagaattcacaaccgca

SEQ ID NO: 399935 - DNA, 33 bp, Homo sapien
ctgcgttctgcagttgaaaactctaactgtggc

SEQ ID NO: 399936 - DNA, 33 bp, Homo sapien
ctgcgttctgcagttggaaactctaactgtggc

SEQ ID NO: 399937 - DNA, 33 bp, Homo sapien
taaggaggacttagcacgaggctgctttctctg

SEQ ID NO: 399938 - DNA, 33 bp, Homo sapien
taaggaggacttagcatgaggctgctttctctg

SEQ ID NO: 399939 - DNA, 33 bp, Homo sapien
cacgtctggcctaccaaccaatatttaattttg

SEQ ID NO: 399940 - DNA, 33 bp, Homo sapien
cacgtctggcctaccagccaatatttaattttg

SEQ ID NO: 399941 - DNA, 33 bp, Homo sapien
gacaccagcttggcagcacttggaggttattat

SEQ ID NO: 399942 - DNA, 33 bp, Homo sapien
gacaccagcttggcagtacttggaggttattat

SEQ ID NO: 399943 - DNA, 33 bp, Homo sapien
tgattcagcctcttgaccacagctgttttgaag

SEQ ID NO: 399944 - DNA, 33 bp, Homo sapien
tgattcagcctcttgagcacagctgttttgaag

SEQ ID NO: 399945 - DNA, 33 bp, Homo sapien
gtgatggacccaaaggacaagtctggccctgtc

SEQ ID NO: 399946 - DNA, 33 bp, Homo sapien
gtgatggacccaaagggcaagtctggccctgtc

SEQ ID NO: 399947 - DNA, 33 bp, Homo sapien
acagttctacacacacacgagcccaggcaaaaa

SEQ ID NO: 399948 - DNA, 33 bp, Homo sapien
acagttctacacacactcgagcccaggcaaaaa

SEQ ID NO: 399949 - DNA, 33 bp, Homo sapien
ttctgatcattttctgaaaagccatttatttag

SEQ ID NO: 399950 - DNA, 33 bp, Homo sapien
ttctgatcattttctggaaagccatttatttag

SEQ ID NO: 399951 - DNA, 33 bp, Homo sapien
ttgcccattaatgacaatagccagaattatcat

SEQ ID NO: 399952 - DNA, 33 bp, Homo sapien
ttgcccattaatgacagtagccagaattatcat

SEQ ID NO: 399953 - DNA, 33 bp, Homo sapien
gcagcagagatgagagacaaataccacctcact

SEQ ID NO: 399954 - DNA, 33 bp, Homo sapien
gcagcagagatgagaggcaaataccacctcact

SEQ ID NO: 399955 - DNA, 33 bp, Homo sapien
aatcaccatcctcaagaatttatagttgaggta

SEQ ID NO: 399956 - DNA, 33 bp, Homo sapien
aatcaccatcctcaaggatttatagttgaggta

SEQ ID NO: 399957 - DNA, 33 bp, Homo sapien
aagcaagcctacagaaatcaagaatccataaag

SEQ ID NO: 399958 - DNA, 33 bp, Homo sapien
aagcaagcctacagaagtcaagaatccataaag

SEQ ID NO: 399959 - DNA, 33 bp, Homo sapien
ggtttactcctgagaaaaccagtcagagttaat

SEQ ID NO: 399960 - DNA, 33 bp, Homo sapien
ggtttactcctgagaagaccagtcagagttaat

SEQ ID NO: 399961 - DNA, 33 bp, Homo sapien
tactcaataatactgtaaaagcacagcaaggaa

SEQ ID NO: 399962 - DNA, 33 bp, Homo sapien
tactcaataatactgttaaagcacagcaaggaa

SEQ ID NO: 399963 - DNA, 33 bp, Homo sapien
agaaatgtgttcaatacacaacattaggagaat

SEQ ID NO: 399964 - DNA, 33 bp, Homo sapien
agaaatgtgttcaatatacaacattaggagaat

SEQ ID NO: 399965 - DNA, 33 bp, Homo sapien
caggcacatatagtaacagagccggtaacatca

SEQ ID NO: 399966 - DNA, 33 bp, Homo sapien
caggcacatatagtaagagagccggtaacatca

SEQ ID NO: 399967 - DNA, 33 bp, Homo sapien
agttaatgtaggagtcaatagtgatataaggcc

SEQ ID NO: 399968 - DNA, 33 bp, Homo sapien
agttaatgtaggagtcgatagtgatataaggcc

SEQ ID NO: 399969 - DNA, 33 bp, Homo sapien
aagtcaatgggatagaagattcaattacctaaa

SEQ ID NO: 399970 - DNA, 33 bp, Homo sapien
aagtcaatgggatagaggattcaattacctaaa

SEQ ID NO: 399971 - DNA, 33 bp, Homo sapien
acactttaatgcactaagggagatgctatttaa

SEQ ID NO: 399972 - DNA, 33 bp, Homo sapien
acactttaatgcactaggggagatgctatttaa

SEQ ID NO: 399973 - DNA, 33 bp, Homo sapien
gagatgcaattttaaacaggttttgtcatggaa

SEQ ID NO: 399974 - DNA, 33 bp, Homo sapien
gagatgcaattttaaataggttttgtcatggaa

SEQ ID NO: 399975 - DNA, 33 bp, Homo sapien
gccaccatgcctggtccacgtgacacttcttaa

SEQ ID NO: 399976 - DNA, 33 bp, Homo sapien
gccaccatgcctggtctacgtgacacttcttaa

SEQ ID NO: 399977 - DNA, 33 bp, Homo sapien
atgtgcagccatcaaaggtaatttttgaaaaat

SEQ ID NO: 399978 - DNA, 33 bp, Homo sapien
atgtgcagccatcaaatgtaatttttgaaaaat

SEQ ID NO: 399979 - DNA, 33 bp, Homo sapien
caaatgactatttctacgtgtagaccccagggc

SEQ ID NO: 399980 - DNA, 33 bp, Homo sapien
caaatgactatttctatgtgtagaccccagggc

SEQ ID NO: 399981 - DNA, 33 bp, Homo sapien
tccacacagaaattcaaacacagataatcagca

SEQ ID NO: 399982 - DNA, 33 bp, Homo sapien
tccacacagaaattcatacacagataatcagca

SEQ ID NO: 399983 - DNA, 33 bp, Homo sapien
atgcagataatttgaacagtggttttaagctat

SEQ ID NO: 399984 - DNA, 33 bp, Homo sapien
atgcagataatttgaatagtggttttaagctat

SEQ ID NO: 399985 - DNA, 33 bp, Homo sapien
caaaggtaaaaacagacgcagcactctattgac

SEQ ID NO: 399986 - DNA, 33 bp, Homo sapien
caaaggtaaaaacagatgcagcactctattgac

SEQ ID NO: 399987 - DNA, 33 bp, Homo sapien
cagaaaataatgattccagttcagagaaatata

SEQ ID NO: 399988 - DNA, 33 bp, Homo sapien
cagaaaataatgattcgagttcagagaaatata

SEQ ID NO: 399989 - DNA, 33 bp, Homo sapien
ttgatctttggtgcccaagagaaggctgtctgg

SEQ ID NO: 399990 - DNA, 33 bp, Homo sapien
ttgatctttggtgcccgagagaaggctgtctgg

SEQ ID NO: 399991 - DNA, 33 bp, Homo sapien
acggaatgtgttgtcaacatgccaggatttcaa

SEQ ID NO: 399992 - DNA, 33 bp, Homo sapien
acggaatgtgttgtcagcatgccaggatttcaa

SEQ ID NO: 399993 - DNA, 33 bp, Homo sapien
agaagagaggtctggactcattaaataataata

SEQ ID NO: 399994 - DNA, 33 bp, Homo sapien
agaagagaggtctggattcattaaataataata

SEQ ID NO: 399995 - DNA, 33 bp, Homo sapien
gaaacgaggcggcagacgagttgctaagttgtg

SEQ ID NO: 399996 - DNA, 33 bp, Homo sapien
gaaacgaggcggcagaggagttgctaagttgtg

SEQ ID NO: 399997 - DNA, 33 bp, Homo sapien
ttacatggagaagatacgcaaggagtagaaaac

SEQ ID NO: 399998 - DNA, 33 bp, Homo sapien
ttacatggagaagataggcaaggagtagaaaac

SEQ ID NO: 399999 - DNA, 33 bp, Homo sapien
cagggagcagatacacagaaaagatcaaatggg

SEQ ID NO: 400000 - DNA, 33 bp, Homo sapien
cagggagcagatacacggaaaagatcaaatggg

SEQ ID NO: 400001 - DNA, 33 bp, Homo sapien
cgaagaactaaatagaatatggtgagaaactgt

SEQ ID NO: 400002 - DNA, 33 bp, Homo sapien
cgaagaactaaatagattatggtgagaaactgt

SEQ ID NO: 400003 - DNA, 33 bp, Homo sapien
cggttcataacgatgaagaaaaggatggatgac

SEQ ID NO: 400004 - DNA, 33 bp, Homo sapien
cggttcataacgatgaggaaaaggatggatgac

SEQ ID NO: 400005 - DNA, 33 bp, Homo sapien
acgtggctacactgtacaacagtaatggtaaca

SEQ ID NO: 400006 - DNA, 33 bp, Homo sapien
acgtggctacactgtataacagtaatggtaaca

SEQ ID NO: 400007 - DNA, 33 bp, Homo sapien
caagaccagccttctacgcagagtgctctgatg

SEQ ID NO: 400008 - DNA, 33 bp, Homo sapien
caagaccagccttctatgcagagtgctctgatg

SEQ ID NO: 400009 - DNA, 33 bp, Homo sapien
cattttgtgtgtaatccgaatgggctggaaagg

SEQ ID NO: 400010 - DNA, 33 bp, Homo sapien
cattttgtgtgtaatctgaatgggctggaaagg

SEQ ID NO: 400011 - DNA, 33 bp, Homo sapien
aagaaggaaattcagcacttcagtggccataat

SEQ ID NO: 400012 - DNA, 33 bp, Homo sapien
aagaaggaaattcagcgcttcagtggccataat

SEQ ID NO: 400013 - DNA, 33 bp, Homo sapien
atcaacgctacacacaaaaaaagtgctattaag

SEQ ID NO: 400014 - DNA, 33 bp, Homo sapien
atcaacgctacacacacaaaaagtgctattaag

SEQ ID NO: 400015 - DNA, 33 bp, Homo sapien
atccaggcactcttcaatctgtcacttgagctt

SEQ ID NO: 400016 - DNA, 33 bp, Homo sapien
atccaggcactcttcagtctgtcacttgagctt

SEQ ID NO: 400017 - DNA, 33 bp, Homo sapien
tgaatgaccttgatcaatatttagacaccaccg

SEQ ID NO: 400018 - DNA, 33 bp, Homo sapien
tgaatgaccttgatcagtatttagacaccaccg

SEQ ID NO: 400019 - DNA, 33 bp, Homo sapien
gtgtggttccatcacactggtgaagatggaaag

SEQ ID NO: 400020 - DNA, 33 bp, Homo sapien
gtgtggttccatcacattggtgaagatggaaag

SEQ ID NO: 400021 - DNA, 33 bp, Homo sapien
ggctaagacaatgctacgtatttagaaggatta

SEQ ID NO: 400022 - DNA, 33 bp, Homo sapien
ggctaagacaatgctatgtatttagaaggatta

SEQ ID NO: 400023 - DNA, 33 bp, Homo sapien
actaagatcattaaccaatgctataaatatctc

SEQ ID NO: 400024 - DNA, 33 bp, Homo sapien
actaagatcattaaccgatgctataaatatctc

SEQ ID NO: 400025 - DNA, 33 bp, Homo sapien
ctgaggaaccagcaaaggttggaagaggataat

SEQ ID NO: 400026 - DNA, 33 bp, Homo sapien
ctgaggaaccagcaaatgttggaagaggataat

SEQ ID NO: 400027 - DNA, 33 bp, Homo sapien
aggtctcaactcctcagatcagcatccagagct

SEQ ID NO: 400028 - DNA, 33 bp, Homo sapien
aggtctcaactcctcatatcagcatccagagct

SEQ ID NO: 400029 - DNA, 33 bp, Homo sapien
ggctaggaccagatcacggagagctctggatgc

SEQ ID NO: 400030 - DNA, 33 bp, Homo sapien
ggctaggaccagatcatggagagctctggatgc

SEQ ID NO: 400031 - DNA, 33 bp, Homo sapien
taaaaggcaactgtaaactcaagggctccaaca

SEQ ID NO: 400032 - DNA, 33 bp, Homo sapien
taaaaggcaactgtaatctcaagggctccaaca

SEQ ID NO: 400033 - DNA, 33 bp, Homo sapien
cctcttgttccacaaaacaaagaatattagaaa

SEQ ID NO: 400034 - DNA, 33 bp, Homo sapien
cctcttgttccacaaagcaaagaatattagaaa

SEQ ID NO: 400035 - DNA, 33 bp, Homo sapien
gctggaaatgacaggaggatgaagtgtcggctc

SEQ ID NO: 400036 - DNA, 33 bp, Homo sapien
gctggaaatgacaggatgatgaagtgtcggctc

SEQ ID NO: 400037 - DNA, 33 bp, Homo sapien
gattcgtctaagttgcacattcatctcagtctg

SEQ ID NO: 400038 - DNA, 33 bp, Homo sapien
gattcgtctaagttgcgcattcatctcagtctg

SEQ ID NO: 400039 - DNA, 33 bp, Homo sapien
ctatattttaatttaaacttggatctgtcttat

SEQ ID NO: 400040 - DNA, 33 bp, Homo sapien
ctatattttaatttaagcttggatctgtcttat

SEQ ID NO: 400041 - DNA, 33 bp, Homo sapien
gcatggcactgctaaacggaggagcacagaggg

SEQ ID NO: 400042 - DNA, 33 bp, Homo sapien
gcatggcactgctaaatggaggagcacagaggg

SEQ ID NO: 400043 - DNA, 33 bp, Homo sapien
gataatatccaacctaccggcaactttcgactt

SEQ ID NO: 400044 - DNA, 33 bp, Homo sapien
gataatatccaacctatcggcaactttcgactt

SEQ ID NO: 400045 - DNA, 33 bp, Homo sapien
acacttttccagtggacgtgaaatgttatgata

SEQ ID NO: 400046 - DNA, 33 bp, Homo sapien
acacttttccagtggatgtgaaatgttatgata

SEQ ID NO: 400047 - DNA, 33 bp, Homo sapien
aactactccaacctccagagttcattctggaac

SEQ ID NO: 400048 - DNA, 33 bp, Homo sapien
aactactccaacctccggagttcattctggaac

SEQ ID NO: 400049 - DNA, 33 bp, Homo sapien
ttgaaggtggaactgacatggataatatgactt

SEQ ID NO: 400050 - DNA, 33 bp, Homo sapien
ttgaaggtggaactgatatggataatatgactt

SEQ ID NO: 400051 - DNA, 33 bp, Homo sapien
ctgtttgcaagggctaaagactagaaacaatct

SEQ ID NO: 400052 - DNA, 33 bp, Homo sapien
ctgtttgcaagggctacagactagaaacaatct

SEQ ID NO: 400053 - DNA, 33 bp, Homo sapien
tcaagctgttgataagccagtattcacattgcc

SEQ ID NO: 400054 - DNA, 33 bp, Homo sapien
tcaagctgttgataagtcagtattcacattgcc

SEQ ID NO: 400055 - DNA, 33 bp, Homo sapien
agatcttgacttcacaatgcatcaacaagaagg

SEQ ID NO: 400056 - DNA, 33 bp, Homo sapien
agatcttgacttcacagtgcatcaacaagaagg

SEQ ID NO: 400057 - DNA, 33 bp, Homo sapien
aggttatatttgggaaagtatggattacagaga

SEQ ID NO: 400058 - DNA, 33 bp, Homo sapien
aggttatatttgggaaggtatggattacagaga

SEQ ID NO: 400059 - DNA, 33 bp, Homo sapien
aacccacacacttacaggcggattccagagact

SEQ ID NO: 400060 - DNA, 33 bp, Homo sapien
aacccacacacttacatgcggattccagagact

SEQ ID NO: 400061 - DNA, 33 bp, Homo sapien
gggagacatagccgaaagttttagtcactgtgc

SEQ ID NO: 400062 - DNA, 33 bp, Homo sapien
gggagacatagccgaaggttttagtcactgtgc

SEQ ID NO: 400063 - DNA, 33 bp, Homo sapien
tctggcagagtccaaactcaaacgcctggagca

SEQ ID NO: 400064 - DNA, 33 bp, Homo sapien
tctggcagagtccaaattcaaacgcctggagca

SEQ ID NO: 400065 - DNA, 33 bp, Homo sapien
ggactggaaagggactaaaaagatcttctggac

SEQ ID NO: 400066 - DNA, 33 bp, Homo sapien
ggactggaaagggactgaaaagatcttctggac

SEQ ID NO: 400067 - DNA, 33 bp, Homo sapien
aacaaaagaagccttgcagattggagcagagaa

SEQ ID NO: 400068 - DNA, 33 bp, Homo sapien
aacaaaagaagccttgtagattggagcagagaa

SEQ ID NO: 400069 - DNA, 33 bp, Homo sapien
ttcctctttagccaaaaataaatgaggagtggc

SEQ ID NO: 400070 - DNA, 33 bp, Homo sapien
ttcctctttagccaaacataaatgaggagtggc

SEQ ID NO: 400071 - DNA, 33 bp, Homo sapien
tatgctggatctcaaaaggcaaaggaaatgatg

SEQ ID NO: 400072 - DNA, 33 bp, Homo sapien
tatgctggatctcaaagggcaaaggaaatgatg

SEQ ID NO: 400073 - DNA, 33 bp, Homo sapien
caacaggtaattgttcaaccctcaccctcctct

SEQ ID NO: 400074 - DNA, 33 bp, Homo sapien
caacaggtaattgttccaccctcaccctcctct

SEQ ID NO: 400075 - DNA, 33 bp, Homo sapien
cacataatgggatagacggccttgatagataag

SEQ ID NO: 400076 - DNA, 33 bp, Homo sapien
cacataatgggatagatggccttgatagataag

SEQ ID NO: 400077 - DNA, 33 bp, Homo sapien
ttggatttctgactcaacaaaaacttcttttgt

SEQ ID NO: 400078 - DNA, 33 bp, Homo sapien
ttggatttctgactcagcaaaaacttcttttgt

SEQ ID NO: 400079 - DNA, 33 bp, Homo sapien
caaaactgagtcactacgttgaagatcagggaa

SEQ ID NO: 400080 - DNA, 33 bp, Homo sapien
caaaactgagtcactatgttgaagatcagggaa

SEQ ID NO: 400081 - DNA, 33 bp, Homo sapien
tgcagttctgttaagacgtgagttgtgaggggc

SEQ ID NO: 400082 - DNA, 33 bp, Homo sapien
tgcagttctgttaagatgtgagttgtgaggggc

SEQ ID NO: 400083 - DNA, 33 bp, Homo sapien
tcttgataggtgtcaacgaacgtatacagccag

SEQ ID NO: 400084 - DNA, 33 bp, Homo sapien
tcttgataggtgtcaaggaacgtatacagccag

SEQ ID NO: 400085 - DNA, 33 bp, Homo sapien
aattatctctcaggaacgcaaaaggaggtagga

SEQ ID NO: 400086 - DNA, 33 bp, Homo sapien
aattatctctcaggaatgcaaaaggaggtagga

SEQ ID NO: 400087 - DNA, 33 bp, Homo sapien
aactatagtccgatacagtataagtgtgtcaaa

SEQ ID NO: 400088 - DNA, 33 bp, Homo sapien
aactatagtccgatacggtataagtgtgtcaaa

SEQ ID NO: 400089 - DNA, 33 bp, Homo sapien
attctccttggcaagccaggctcatccacttac

SEQ ID NO: 400090 - DNA, 33 bp, Homo sapien
attctccttggcaagctaggctcatccacttac

SEQ ID NO: 400091 - DNA, 33 bp, Homo sapien
ttgtcatacatcatggccatagcttttgcagtt

SEQ ID NO: 400092 - DNA, 33 bp, Homo sapien
ttgtcatacatcatggtcatagcttttgcagtt

SEQ ID NO: 400093 - DNA, 33 bp, Homo sapien
ctgggaagttttccaacaccctcactcatgcat

SEQ ID NO: 400094 - DNA, 33 bp, Homo sapien
ctgggaagttttccaataccctcactcatgcat

SEQ ID NO: 400095 - DNA, 33 bp, Homo sapien
ttctatttgacccaacaactcacggaggaaaga

SEQ ID NO: 400096 - DNA, 33 bp, Homo sapien
ttctatttgacccaacgactcacggaggaaaga

SEQ ID NO: 400097 - DNA, 33 bp, Homo sapien
ccagctgcacctttgcaagtttcttggtctttg

SEQ ID NO: 400098 - DNA, 33 bp, Homo sapien
ccagctgcacctttgcgagtttcttggtctttg

SEQ ID NO: 400099 - DNA, 33 bp, Homo sapien
ctggacagcccttcaaacatgacgttcaatccc

SEQ ID NO: 400100 - DNA, 33 bp, Homo sapien
ctggacagcccttcaaccatgacgttcaatccc

SEQ ID NO: 400101 - DNA, 33 bp, Homo sapien
ttgtgaaggaaatctaagggacttggtaacgga

SEQ ID NO: 400102 - DNA, 33 bp, Homo sapien
ttgtgaaggaaatctaggggacttggtaacgga

SEQ ID NO: 400103 - DNA, 33 bp, Homo sapien
ggtaatgtgtcaagcaagtgatggatataaaca

SEQ ID NO: 400104 - DNA, 33 bp, Homo sapien
ggtaatgtgtcaagcacgtgatggatataaaca

SEQ ID NO: 400105 - DNA, 33 bp, Homo sapien
gtcacagagaacccaacaggcactaagagtcag

SEQ ID NO: 400106 - DNA, 33 bp, Homo sapien
gtcacagagaacccaataggcactaagagtcag

SEQ ID NO: 400107 - DNA, 33 bp, Homo sapien
tgattgtgtcccaaaccctaccctatatggttg

SEQ ID NO: 400108 - DNA, 33 bp, Homo sapien
tgattgtgtcccaaactctaccctatatggttg

SEQ ID NO: 400109 - DNA, 33 bp, Homo sapien
accaaaaaagctctgccagaattttgatcataa

SEQ ID NO: 400110 - DNA, 33 bp, Homo sapien
accaaaaaagctctgctagaattttgatcataa

SEQ ID NO: 400111 - DNA, 33 bp, Homo sapien
cagtggctgtgtaaacactgaattttgttttgc

SEQ ID NO: 400112 - DNA, 33 bp, Homo sapien
cagtggctgtgtaaacgctgaattttgttttgc

SEQ ID NO: 400113 - DNA, 33 bp, Homo sapien
aaattcttgtttgtaccgatctattcatttcat

SEQ ID NO: 400114 - DNA, 33 bp, Homo sapien
aaattcttgtttgtactgatctattcatttcat

SEQ ID NO: 400115 - DNA, 33 bp, Homo sapien
ctgttgcctgaggaagaaggtgcttttggggag

SEQ ID NO: 400116 - DNA, 33 bp, Homo sapien
ctgttgcctgaggaaggaggtgcttttggggag

SEQ ID NO: 400117 - DNA, 33 bp, Homo sapien
catgctcatcgtcacaagacaagtactattatt

SEQ ID NO: 400118 - DNA, 33 bp, Homo sapien
catgctcatcgtcacaggacaagtactattatt

SEQ ID NO: 400119 - DNA, 33 bp, Homo sapien
gccttctccagaaccagtatctcagcattctgc

SEQ ID NO: 400120 - DNA, 33 bp, Homo sapien
gccttctccagaaccattatctcagcattctgc

SEQ ID NO: 400121 - DNA, 33 bp, Homo sapien
agaatctgggtctctaaggacgcttgagttatc

SEQ ID NO: 400122 - DNA, 33 bp, Homo sapien
agaatctgggtctctagggacgcttgagttatc

SEQ ID NO: 400123 - DNA, 33 bp, Homo sapien
tttgagaagatgacaacgggctgcctcctgaga

SEQ ID NO: 400124 - DNA, 33 bp, Homo sapien
tttgagaagatgacaatgggctgcctcctgaga

SEQ ID NO: 400125 - DNA, 33 bp, Homo sapien
gccacctgctgaccgagccagtgaaggaccaca

SEQ ID NO: 400126 - DNA, 33 bp, Homo sapien
gccacctgctgaccgatccagtgaaggaccaca

SEQ ID NO: 400127 - DNA, 33 bp, Homo sapien
tcttctgtgctttacaaattctctaaccagttg

SEQ ID NO: 400128 - DNA, 33 bp, Homo sapien
tcttctgtgctttacagattctctaaccagttg

SEQ ID NO: 400129 - DNA, 33 bp, Homo sapien
gtatcgggaaaccagaaaatgaatgggtaacat

SEQ ID NO: 400130 - DNA, 33 bp, Homo sapien
gtatcgggaaaccagataatgaatgggtaacat

SEQ ID NO: 400131 - DNA, 33 bp, Homo sapien
aaccgtgatactgaataagcaaagaatcctaag

SEQ ID NO: 400132 - DNA, 33 bp, Homo sapien
aaccgtgatactgaatgagcaaagaatcctaag

SEQ ID NO: 400133 - DNA, 33 bp, Homo sapien
agttgaatgaataaaaccttcctaaatctctct

SEQ ID NO: 400134 - DNA, 33 bp, Homo sapien
agttgaatgaataaaatcttcctaaatctctct

SEQ ID NO: 400135 - DNA, 33 bp, Homo sapien
gttttgctgtatatagcaccctgggccgatcag

SEQ ID NO: 400136 - DNA, 33 bp, Homo sapien
gttttgctgtatatagtaccctgggccgatcag

SEQ ID NO: 400137 - DNA, 33 bp, Homo sapien
agagcaacacttggaacagaagataaaatgatc

SEQ ID NO: 400138 - DNA, 33 bp, Homo sapien
agagcaacacttggaatagaagataaaatgatc

SEQ ID NO: 400139 - DNA, 33 bp, Homo sapien
ccttaggatggctacccgcaatttgccctgttc

SEQ ID NO: 400140 - DNA, 33 bp, Homo sapien
ccttaggatggctacctgcaatttgccctgttc

SEQ ID NO: 400141 - DNA, 33 bp, Homo sapien
gagtagcaatcttgaacgcattttgggccagtt

SEQ ID NO: 400142 - DNA, 33 bp, Homo sapien
gagtagcaatcttgaatgcattttgggccagtt

SEQ ID NO: 400143 - DNA, 33 bp, Homo sapien
atttctgatttttacagtattgcaaacctagat

SEQ ID NO: 400144 - DNA, 33 bp, Homo sapien
atttctgatttttacattattgcaaacctagat

SEQ ID NO: 400145 - DNA, 33 bp, Homo sapien
gaaggaatgcctaaaagttaccacagactgtac

SEQ ID NO: 400146 - DNA, 33 bp, Homo sapien
gaaggaatgcctaaaatttaccacagactgtac

SEQ ID NO: 400147 - DNA, 33 bp, Homo sapien
tcgggggctataccgacacagagccacacgtgg

SEQ ID NO: 400148 - DNA, 33 bp, Homo sapien
tcgggggctataccgagacagagccacacgtgg

SEQ ID NO: 400149 - DNA, 33 bp, Homo sapien
acgatgatctgaaaaacacatggtgcatattga

SEQ ID NO: 400150 - DNA, 33 bp, Homo sapien
acgatgatctgaaaaatacatggtgcatattga

SEQ ID NO: 400151 - DNA, 33 bp, Homo sapien
tgcacactgataaatacgaacccaccaccttgc

SEQ ID NO: 400152 - DNA, 33 bp, Homo sapien
tgcacactgataaatatgaacccaccaccttgc

SEQ ID NO: 400153 - DNA, 33 bp, Homo sapien; identical to SEQ ID NO: 400151

SEQ ID NO: 400154 - DNA, 33 bp, Homo sapien; identical to SEQ ID NO: 400152

SEQ ID NO: 400155 - DNA, 33 bp, Homo sapien
cctgggccaaatgtcacgccctgccacacctgg

SEQ ID NO: 400156 - DNA, 33 bp, Homo sapien
cctgggccaaatgtcaggccctgccacacctgg

SEQ ID NO: 400157 - DNA, 33 bp, Homo sapien; identical to SEQ ID NO: 400155

SEQ ID NO: 400158 - DNA, 33 bp, Homo sapien; identical to SEQ ID NO: 400156

SEQ ID NO: 400159 - DNA, 33 bp, Homo sapien
ggtattgtgagtctataagaaaattccaggaaa

SEQ ID NO: 400160 - DNA, 33 bp, Homo sapien
ggtattgtgagtctatcagaaaattccaggaaa

SEQ ID NO: 400161 - DNA, 33 bp, Homo sapien
agcacatccaaaaatacagaagtgctgtttcct

SEQ ID NO: 400162 - DNA, 33 bp, Homo sapien
agcacatccaaaaatatagaagtgctgtttcct

SEQ ID NO: 400163 - DNA, 33 bp, Homo sapien
gggtaccatgcctatccaatttgacacatacaa

SEQ ID NO: 400164 - DNA, 33 bp, Homo sapien
gggtaccatgcctatcgaatttgacacatacaa

SEQ ID NO: 400165 - DNA, 33 bp, Homo sapien
atgaaaaggatagaaacaatggagtggaaacaa

SEQ ID NO: 400166 - DNA, 33 bp, Homo sapien
atgaaaaggatagaaagaatggagtggaaacaa

SEQ ID NO: 400167 - DNA, 33 bp, Homo sapien
atttacacgattacagaaaatggatcttctagt

SEQ ID NO: 400168 - DNA, 33 bp, Homo sapien
atttacacgattacagcaaatggatcttctagt

SEQ ID NO: 400169 - DNA, 33 bp, Homo sapien
gaagtcatggagaccagaagagccatctactat

SEQ ID NO: 400170 - DNA, 33 bp, Homo sapien
gaagtcatggagaccataagagccatctactat

SEQ ID NO: 400171 - DNA, 33 bp, Homo sapien
gagatttgggaggacaaatttccaaacgatagc

SEQ ID NO: 400172 - DNA, 33 bp, Homo sapien
gagatttgggaggacagatttccaaacgatagc

SEQ ID NO: 400173 - DNA, 33 bp, Homo sapien
ggcatagggatttcaccctctgtgtctctgcag

SEQ ID NO: 400174 - DNA, 33 bp, Homo sapien
ggcatagggatttcactctctgtgtctctgcag

SEQ ID NO: 400175 - DNA, 33 bp, Homo sapien
gctaagtaaatgcacaaagagttctactgccgc

SEQ ID NO: 400176 - DNA, 33 bp, Homo sapien
gctaagtaaatgcacacagagttctactgccgc

SEQ ID NO: 400177 - DNA, 33 bp, Homo sapien
gaaccaacaggtcttgaagatcaacaggtgcag

SEQ ID NO: 400178 - DNA, 33 bp, Homo sapien
gaaccaacaggtcttgcagatcaacaggtgcag

SEQ ID NO: 400179 - DNA, 33 bp, Homo sapien
gatttctgttgtataaaggtcacctggccagag

SEQ ID NO: 400180 - DNA, 33 bp, Homo sapien
gatttctgttgtataacggtcacctggccagag

SEQ ID NO: 400181 - DNA, 33 bp, Homo sapien
atttctcactcctcaacctttagcttctgcctg

SEQ ID NO: 400182 - DNA, 33 bp, Homo sapien
atttctcactcctcaatctttagcttctgcctg

SEQ ID NO: 400183 - DNA, 33 bp, Homo sapien
tatgacaagtgagttacggggcaagagaatggg

SEQ ID NO: 400184 - DNA, 33 bp, Homo sapien
tatgacaagtgagttatggggcaagagaatggg

SEQ ID NO: 400185 - DNA, 33 bp, Homo sapien
gttaaaaagtgcaacaaataaaatttatcaata

SEQ ID NO: 400186 - DNA, 33 bp, Homo sapien
gttaaaaagtgcaacagataaaatttatcaata

SEQ ID NO: 400187 - DNA, 33 bp, Homo sapien
gctctgcaaattgcaccgagaagaactgcagta

SEQ ID NO: 400188 - DNA, 33 bp, Homo sapien
gctctgcaaattgcactgagaagaactgcagta

SEQ ID NO: 400189 - DNA, 33 bp, Homo sapien
agaccccgctcacaaaggctaccgcgctcggcc

SEQ ID NO: 400190 - DNA, 33 bp, Homo sapien
agaccccgctcacaaatgctaccgcgctcggcc

SEQ ID NO: 400191 - DNA, 33 bp, Homo sapien
gattaagttcttatccaaacccactgtggcaga

SEQ ID NO: 400192 - DNA, 33 bp, Homo sapien
gattaagttcttatccgaacccactgtggcaga

SEQ ID NO: 400193 - DNA, 33 bp, Homo sapien
tctgatgagtagaaaacaacctcagagattaag

SEQ ID NO: 400194 - DNA, 33 bp, Homo sapien
tctgatgagtagaaaataacctcagagattaag

SEQ ID NO: 400195 - DNA, 33 bp, Homo sapien
caggtcctgatgagaaaaaaggagctggtgagt

SEQ ID NO: 400196 - DNA, 33 bp, Homo sapien
caggtcctgatgagaacaaaggagctggtgagt

SEQ ID NO: 400197 - DNA, 33 bp, Homo sapien
agctcatgtttttacaatccatcctcactcatt

SEQ ID NO: 400198 - DNA, 33 bp, Homo sapien
agctcatgtttttacagtccatcctcactcatt

SEQ ID NO: 400199 - DNA, 33 bp, Homo sapien
tcatttctcaatcttgcagactttaaaatctgc

SEQ ID NO: 400200 - DNA, 33 bp, Homo sapien
tcatttctcaatcttgtagactttaaaatctgc

SEQ ID NO: 400201 - DNA, 33 bp, Homo sapien
gggcaccatgaggagcacctgtataagatggca

SEQ ID NO: 400202 - DNA, 33 bp, Homo sapien
gggcaccatgaggagcgcctgtataagatggca

SEQ ID NO: 400203 - DNA, 33 bp, Homo sapien
catgaagtgtgtggaacaggagtcattcatttg

SEQ ID NO: 400204 - DNA, 33 bp, Homo sapien
catgaagtgtgtggaataggagtcattcatttg

SEQ ID NO: 400205 - DNA, 33 bp, Homo sapien
acatgtctaccttccactctgctaatttctgag

SEQ ID NO: 400206 - DNA, 33 bp, Homo sapien
acatgtctaccttccattctgctaatttctgag

SEQ ID NO: 400207 - DNA, 33 bp, Homo sapien
caagcattacaggagaagcaacactggagatat

SEQ ID NO: 400208 - DNA, 33 bp, Homo sapien
caagcattacaggagaggcaacactggagatat

SEQ ID NO: 400209 - DNA, 33 bp, Homo sapien
ggatcagaattgaaaaaatgctacaggtgtgaa

SEQ ID NO: 400210 - DNA, 33 bp, Homo sapien
ggatcagaattgaaaatatgctacaggtgtgaa

SEQ ID NO: 400211 - DNA, 33 bp, Homo sapien
tgtaaaaatgtaaacacgatggttctattagag

SEQ ID NO: 400212 - DNA, 33 bp, Homo sapien
tgtaaaaatgtaaacatgatggttctattagag

SEQ ID NO: 400213 - DNA, 33 bp, Homo sapien
tgaagttgtctagtccacacctgattcaacttc

SEQ ID NO: 400214 - DNA, 33 bp, Homo sapien
tgaagttgtctagtccgcacctgattcaacttc

SEQ ID NO: 400215 - DNA, 33 bp, Homo sapien
aaacaactactttcaaacatggtttctatcacc

SEQ ID NO: 400216 - DNA, 33 bp, Homo sapien
aaacaactactttcaagcatggtttctatcacc

SEQ ID NO: 400217 - DNA, 33 bp, Homo sapien
tttacaagagtagagacagtattagagaagtcc

SEQ ID NO: 400218 - DNA, 33 bp, Homo sapien
tttacaagagtagagagagtattagagaagtcc

SEQ ID NO: 400219 - DNA, 33 bp, Homo sapien
tcctaaattgaagtacaacatagtcctttccct

SEQ ID NO: 400220 - DNA, 33 bp, Homo sapien
tcctaaattgaagtacgacatagtcctttccct

SEQ ID NO: 400221 - DNA, 33 bp, Homo sapien
ttccatattgtctggtaaaaacaagtaagagga

SEQ ID NO: 400222 - DNA, 33 bp, Homo sapien
ttccatattgtctggtgaaaacaagtaagagga

SEQ ID NO: 400223 - DNA, 33 bp, Homo sapien
ccttcctaacttctcaacctggctaactgccag

SEQ ID NO: 400224 - DNA, 33 bp, Homo sapien
ccttcctaacttctcaccctggctaactgccag

SEQ ID NO: 400225 - DNA, 33 bp, Homo sapien
tctgtgttctgtgttaagatttctctaataatt

SEQ ID NO: 400226 - DNA, 33 bp, Homo sapien
tctgtgttctgtgttacgatttctctaataatt

SEQ ID NO: 400227 - DNA, 33 bp, Homo sapien
tgaagcgtgagactcaataactatgtgggagat

SEQ ID NO: 400228 - DNA, 33 bp, Homo sapien
tgaagcgtgagactcagtaactatgtgggagat

SEQ ID NO: 400229 - DNA, 33 bp, Homo sapien
ttgatttgcaagagaacgtgacttcagaagaaa

SEQ ID NO: 400230 - DNA, 33 bp, Homo sapien
ttgatttgcaagagaatgtgacttcagaagaaa

SEQ ID NO: 400231 - DNA, 33 bp, Homo sapien
cttggggagtacatatcagaaagcctgggttct

SEQ ID NO: 400232 - DNA, 33 bp, Homo sapien
cttggggagtacatatgagaaagcctgggttct

SEQ ID NO: 400233 - DNA, 33 bp, Homo sapien
aaaacagtatggaaggccccaaagaaattaaaa

SEQ ID NO: 400234 - DNA, 33 bp, Homo sapien
aaaacagtatggaaggtcccaaagaaattaaaa

SEQ ID NO: 400235 - DNA, 33 bp, Homo sapien
atgggagctacagcaaaaagttccaacatccca

SEQ ID NO: 400236 - DNA, 33 bp, Homo sapien
atgggagctacagcaagaagttccaacatccca

SEQ ID NO: 400237 - DNA, 33 bp, Homo sapien
ctgtcctgattaagtacactctagaagccctga

SEQ ID NO: 400238 - DNA, 33 bp, Homo sapien
ctgtcctgattaagtagactctagaagccctga

SEQ ID NO: 400239 - DNA, 33 bp, Homo sapien
tgccatgattaaatcaactcaacttcattccca

SEQ ID NO: 400240 - DNA, 33 bp, Homo sapien
tgccatgattaaatcagctcaacttcattccca

SEQ ID NO: 400241 - DNA, 33 bp, Homo sapien
acaggatatggactccacccaagagaaccatgg

SEQ ID NO: 400242 - DNA, 33 bp, Homo sapien
acaggatatggactccgcccaagagaaccatgg

SEQ ID NO: 400243 - DNA, 33 bp, Homo sapien
gaggcattaaagtggtcaaactcagagagacaa

SEQ ID NO: 400244 - DNA, 33 bp, Homo sapien
gaggcattaaagtggtgaaactcagagagacaa

SEQ ID NO: 400245 - DNA, 33 bp, Homo sapien
gttgttctcaacctaaaccgaaaagcctgatat

SEQ ID NO: 400246 - DNA, 33 bp, Homo sapien
gttgttctcaacctaacccgaaaagcctgatat

SEQ ID NO: 400247 - DNA, 33 bp, Homo sapien
cctgggggcaaaggcacacaaggcaagcggagc

SEQ ID NO: 400248 - DNA, 33 bp, Homo sapien
cctgggggcaaaggcatacaaggcaagcggagc

SEQ ID NO: 400249 - DNA, 33 bp, Homo sapien
tatattttcactaactaactcttctggaaacat

SEQ ID NO: 400250 - DNA, 33 bp, Homo sapien
tatattttcactaactcactcttctggaaacat

SEQ ID NO: 400251 - DNA, 33 bp, Homo sapien
tgcacaggtctgtgtacgggactaggttgctcc

SEQ ID NO: 400252 - DNA, 33 bp, Homo sapien
tgcacaggtctgtgtatgggactaggttgctcc

SEQ ID NO: 400253 - DNA, 33 bp, Homo sapien
cagggtttcaaactcaaatgccaacgggcctga

SEQ ID NO: 400254 - DNA, 33 bp, Homo sapien
cagggtttcaaactcagatgccaacgggcctga

SEQ ID NO: 400255 - DNA, 33 bp, Homo sapien
ccccacagttggactcacaccttcactctgtat

SEQ ID NO: 400256 - DNA, 33 bp, Homo sapien
ccccacagttggactcgcaccttcactctgtat

SEQ ID NO: 400257 - DNA, 33 bp, Homo sapien
ttctcagatccaaaaagccccgtaaaatcccag

SEQ ID NO: 400258 - DNA, 33 bp, Homo sapien
ttctcagatccaaaaatccccgtaaaatcccag

SEQ ID NO: 400259 - DNA, 33 bp, Homo sapien
agagaaataagctcggaacgagaggacaaatac

SEQ ID NO: 400260 - DNA, 33 bp, Homo sapien
agagaaataagctcggcacgagaggacaaatac

SEQ ID NO: 400261 - DNA, 33 bp, Homo sapien
cagcgggctgggcagcaatgtttggcagctttg

SEQ ID NO: 400262 - DNA, 33 bp, Homo sapien
cagcgggctgggcagcgatgtttggcagctttg

SEQ ID NO: 400263 - DNA, 33 bp, Homo sapien
actcagacacgaaagacagtaagttacctgttc

SEQ ID NO: 400264 - DNA, 33 bp, Homo sapien
actcagacacgaaagagagtaagttacctgttc

SEQ ID NO: 400265 - DNA, 33 bp, Homo sapien
gcagcagagctgtagcaaaaatctaacatggag

SEQ ID NO: 400266 - DNA, 33 bp, Homo sapien
gcagcagagctgtagcgaaaatctaacatggag

SEQ ID NO: 400267 - DNA, 33 bp, Homo sapien
agacctgctgcagtcaaagctgagatgtttgac

SEQ ID NO: 400268 - DNA, 33 bp, Homo sapien
agacctgctgcagtcagagctgagatgtttgac

SEQ ID NO: 400269 - DNA, 33 bp, Homo sapien
cctcctgtgctgaatgccagggccatcttgccg

SEQ ID NO: 400270 - DNA, 33 bp, Homo sapien
cctcctgtgctgaatgtcagggccatcttgccg

SEQ ID NO: 400271 - DNA, 33 bp, Homo sapien
tttgtatgctttaaggacacgaattttggggga

SEQ ID NO: 400272 - DNA, 33 bp, Homo sapien
tttgtatgctttaaggtcacgaattttggggga

SEQ ID NO: 400273 - DNA, 33 bp, Homo sapien
ttcctcaagtcacctgcaggcttttattaccca

SEQ ID NO: 400274 - DNA, 33 bp, Homo sapien
ttcctcaagtcacctgtaggcttttattaccca

SEQ ID NO: 400275 - DNA, 33 bp, Homo sapien
agtctgcaactccagcagcaaaaaaaagtctct

SEQ ID NO: 400276 - DNA, 33 bp, Homo sapien
agtctgcaactccagctgcaaaaaaaagtctct

SEQ ID NO: 400277 - DNA, 33 bp, Homo sapien
ggcgtgaagtgaagaaacttaacagggcatttc

SEQ ID NO: 400278 - DNA, 33 bp, Homo sapien
ggcgtgaagtgaagaagcttaacagggcatttc

SEQ ID NO: 400279 - DNA, 33 bp, Homo sapien
cacgacttccagtacacgctctatgagtgacta

SEQ ID NO: 400280 - DNA, 33 bp, Homo sapien
cacgacttccagtacatgctctatgagtgacta

SEQ ID NO: 400281 - DNA, 33 bp, Homo sapien
ggcggccgggtttattcaaggctgactacgaat

SEQ ID NO: 400282 - DNA, 33 bp, Homo sapien
ggcggccgggtttatttaaggctgactacgaat

SEQ ID NO: 400283 - DNA, 33 bp, Homo sapien
gaacacttccatgttacgtatgctagaaagcag

SEQ ID NO: 400284 - DNA, 33 bp, Homo sapien
gaacacttccatgttatgtatgctagaaagcag

SEQ ID NO: 400285 - DNA, 33 bp, Homo sapien
gatttagttgtttgcaaccgaaagtttatccca

SEQ ID NO: 400286 - DNA, 33 bp, Homo sapien
gatttagttgtttgcacccgaaagtttatccca

SEQ ID NO: 400287 - DNA, 33 bp, Homo sapien
cagttcaacactgtgagtattggtatctgttat

SEQ ID NO: 400288 - DNA, 33 bp, Homo sapien
cagttcaacactgtgattattggtatctgttat

SEQ ID NO: 400289 - DNA, 33 bp, Homo sapien
cttagtggttttgaagaacaatcaccgtattat

SEQ ID NO: 400290 - DNA, 33 bp, Homo sapien
cttagtggttttgaaggacaatcaccgtattat

SEQ ID NO: 400291 - DNA, 33 bp, Homo sapien
ccattccagttatacaatcaaggtctttggaaa

SEQ ID NO: 400292 - DNA, 33 bp, Homo sapien
ccattccagttatacattcaaggtctttggaaa

SEQ ID NO: 400293 - DNA, 33 bp, Homo sapien
cacaaaggtgtgataacgaaaatcctctcatgc

SEQ ID NO: 400294 - DNA, 33 bp, Homo sapien
cacaaaggtgtgataatgaaaatcctctcatgc

SEQ ID NO: 400295 - DNA, 33 bp, Homo sapien
tgtatcatctgaggaactgacatttaaactggc

SEQ ID NO: 400296 - DNA, 33 bp, Homo sapien
tgtatcatctgaggaattgacatttaaactggc

SEQ ID NO: 400297 - DNA, 33 bp, Homo sapien
ttcccatctcgattaaaccttgttggcaggagt

SEQ ID NO: 400298 - DNA, 33 bp, Homo sapien
ttcccatctcgattaacccttgttggcaggagt

SEQ ID NO: 400299 - DNA, 33 bp, Homo sapien
actgcaaaacaagggaaagagaggaagatggcc

SEQ ID NO: 400300 - DNA, 33 bp, Homo sapien
actgcaaaacaagggagagagaggaagatggcc

SEQ ID NO: 400301 - DNA, 33 bp, Homo sapien
ttaacattgggaaagacactgatgtgaattatc

SEQ ID NO: 400302 - DNA, 33 bp, Homo sapien
ttaacattgggaaagagactgatgtgaattatc

SEQ ID NO: 400303 - DNA, 33 bp, Homo sapien
ctaaattccaaaaaaagttacttagcatcttat

SEQ ID NO: 400304 - DNA, 33 bp, Homo sapien
ctaaattccaaaaaaatttacttagcatcttat

SEQ ID NO: 400305 - DNA, 33 bp, Homo sapien
actcaaaaagccaaccaaagaatgtaagaaaat

SEQ ID NO: 400306 - DNA, 33 bp, Homo sapien
actcaaaaagccaaccgaagaatgtaagaaaat

SEQ ID NO: 400307 - DNA, 33 bp, Homo sapien
cattaagccagactgacgtaaaagtttcttttt

SEQ ID NO: 400308 - DNA, 33 bp, Homo sapien
cattaagccagactgatgtaaaagtttcttttt

SEQ ID NO: 400309 - DNA, 33 bp, Homo sapien
atcagtgaataacacactgaaaaatgaattgcc

SEQ ID NO: 400310 - DNA, 33 bp, Homo sapien
atcagtgaataacacattgaaaaatgaattgcc

SEQ ID NO: 400311 - DNA, 33 bp, Homo sapien
ccaatgacactgtaaacgactggagatttaaag

SEQ ID NO: 400312 - DNA, 33 bp, Homo sapien
ccaatgacactgtaaatgactggagatttaaag

SEQ ID NO: 400313 - DNA, 33 bp, Homo sapien
ctattaccattaacaactctgggctgtaggtgt

SEQ ID NO: 400314 - DNA, 33 bp, Homo sapien
ctattaccattaacaagtctgggctgtaggtgt

SEQ ID NO: 400315 - DNA, 33 bp, Homo sapien; identical to SEQ ID NO: 400313

SEQ ID NO: 400316 - DNA, 33 bp, Homo sapien; identical to SEQ ID NO: 400314

SEQ ID NO: 400317 - DNA, 33 bp, Homo sapien
ggcaacagtgcacgaaagggcttctcatgagga

SEQ ID NO: 400318 - DNA, 33 bp, Homo sapien
ggcaacagtgcacgaaggggcttctcatgagga

SEQ ID NO: 400319 - DNA, 33 bp, Homo sapien
atggggagtaagttgaaggtgtgggaagcaaga

SEQ ID NO: 400320 - DNA, 33 bp, Homo sapien
atggggagtaagttgagggtgtgggaagcaaga

SEQ ID NO: 400321 - DNA, 33 bp, Homo sapien
tccatcaaggaacctccagtgttgcaggcaaga

SEQ ID NO: 400322 - DNA, 33 bp, Homo sapien
tccatcaaggaacctctagtgttgcaggcaaga

SEQ ID NO: 400323 - DNA, 33 bp, Homo sapien
tcctgcagatcctcacagccacagtggacaatg

SEQ ID NO: 400324 - DNA, 33 bp, Homo sapien
tcctgcagatcctcacggccacagtggacaatg

SEQ ID NO: 400325 - DNA, 33 bp, Homo sapien
tcagtggcagaattgcaaccagaactcctgggc

SEQ ID NO: 400326 - DNA, 33 bp, Homo sapien
tcagtggcagaattgcgaccagaactcctgggc

SEQ ID NO: 400327 - DNA, 33 bp, Homo sapien
accccctcaacaagccacaatttagttccacct

SEQ ID NO: 400328 - DNA, 33 bp, Homo sapien
accccctcaacaagccgcaatttagttccacct

SEQ ID NO: 400329 - DNA, 33 bp, Homo sapien
ggtccccagcttatgtaaaacttggcatgagtg

SEQ ID NO: 400330 - DNA, 33 bp, Homo sapien
ggtccccagcttatgtgaaacttggcatgagtg

SEQ ID NO: 400331 - DNA, 33 bp, Homo sapien
gggacatctaagctaggcctgactgttaacttg

SEQ ID NO: 400332 - DNA, 33 bp, Homo sapien
gggacatctaagctagtcctgactgttaacttg

SEQ ID NO: 400333 - DNA, 33 bp, Homo sapien
gggaagcctggaacgacgtaatgggcaaggagg

SEQ ID NO: 400334 - DNA, 33 bp, Homo sapien
gggaagcctggaacgatgtaatgggcaaggagg

SEQ ID NO: 400335 - DNA, 33 bp, Homo sapien; identical to SEQ ID NO: 400333

SEQ ID NO: 400336 - DNA, 33 bp, Homo sapien; identical to SEQ ID NO: 400334

SEQ ID NO: 400337 - DNA, 33 bp, Homo sapien
ttgtttgttgtttatagaactgtcctaatcgat

SEQ ID NO: 400338 - DNA, 33 bp, Homo sapien
ttgtttgttgtttatataactgtcctaatcgat

SEQ ID NO: 400339 - DNA, 33 bp, Homo sapien
tgccgtgactgtgccaataggagctgaagtgac

SEQ ID NO: 400340 - DNA, 33 bp, Homo sapien
tgccgtgactgtgccagtaggagctgaagtgac

SEQ ID NO: 400341 - DNA, 33 bp, Homo sapien; identical to SEQ ID NO: 400339

SEQ ID NO: 400342 - DNA, 33 bp, Homo sapien; identical to SEQ ID NO: 400340

SEQ ID NO: 400343 - DNA, 33 bp, Homo sapien
agttgcaccggttccaacgcctctgacaagagt

SEQ ID NO: 400344 - DNA, 33 bp, Homo sapien
agttgcaccggttccagcgcctctgacaagagt

SEQ ID NO: 400345 - DNA, 33 bp, Homo sapien
gaaacagtcacttaaactgtcaaaagaacagca

SEQ ID NO: 400346 - DNA, 33 bp, Homo sapien
gaaacagtcacttaaattgtcaaaagaacagca

SEQ ID NO: 400347 - DNA, 33 bp, Homo sapien
ggtctcccgtcttgcccaggttctctgatgtga

SEQ ID NO: 400348 - DNA, 33 bp, Homo sapien
ggtctcccgtcttgcctaggttctctgatgtga

SEQ ID NO: 400349 - DNA, 33 bp, Homo sapien
agaacagcaagaaggtaacatggcggttgggcc

SEQ ID NO: 400350 - DNA, 33 bp, Homo sapien
agaacagcaagaaggtgacatggcggttgggcc

SEQ ID NO: 400351 - DNA, 33 bp, Homo sapien
caacccatgatgaccaaatctctcactgaccat

SEQ ID NO: 400352 - DNA, 33 bp, Homo sapien
caacccatgatgaccagatctctcactgaccat

SEQ ID NO: 400353 - DNA, 33 bp, Homo sapien
tgctctctggatcctgaaggaagttgatccact

SEQ ID NO: 400354 - DNA, 33 bp, Homo sapien
tgctctctggatcctggaggaagttgatccact

SEQ ID NO: 400355 - DNA, 33 bp, Homo sapien
acaaactttggaacccccagactgtgctcaaat

SEQ ID NO: 400356 - DNA, 33 bp, Homo sapien
acaaactttggaaccctcagactgtgctcaaat

SEQ ID NO: 400357 - DNA, 33 bp, Homo sapien
ttgcaggaagtttcaaatgcatcactggatgca

SEQ ID NO: 400358 - DNA, 33 bp, Homo sapien
ttgcaggaagtttcaagtgcatcactggatgca

SEQ ID NO: 400359 - DNA, 33 bp, Homo sapien
gcactgagttggtccgcacttaaagaaaccatt

SEQ ID NO: 400360 - DNA, 33 bp, Homo sapien
gcactgagttggtccgtacttaaagaaaccatt

SEQ ID NO: 400361 - DNA, 33 bp, Homo sapien
ttccctcctgaaaccacgcaaagctgacagtca

SEQ ID NO: 400362 - DNA, 33 bp, Homo sapien
ttccctcctgaaaccatgcaaagctgacagtca

SEQ ID NO: 400363 - DNA, 33 bp, Homo sapien
aggagaaggggaagaaaaaaactgcagaggagt

SEQ ID NO: 400364 - DNA, 33 bp, Homo sapien
aggagaaggggaagaacaaaactgcagaggagt

SEQ ID NO: 400365 - DNA, 33 bp, Homo sapien
acttgtccattttagacgctctggattgattcc

SEQ ID NO: 400366 - DNA, 33 bp, Homo sapien
acttgtccattttagatgctctggattgattcc

SEQ ID NO: 400367 - DNA, 33 bp, Homo sapien
gatttttaaatcactccatcctcagaataaggc

SEQ ID NO: 400368 - DNA, 33 bp, Homo sapien
gatttttaaatcactctatcctcagaataaggc

SEQ ID NO: 400369 - DNA, 33 bp, Homo sapien
caggatcttaccattcccacccctgggctcctg

SEQ ID NO: 400370 - DNA, 33 bp, Homo sapien
caggatcttaccattctcacccctgggctcctg

SEQ ID NO: 400371 - DNA, 33 bp, Homo sapien
acaagttgcacagctacgccaggaggaagtaga

SEQ ID NO: 400372 - DNA, 33 bp, Homo sapien
acaagttgcacagctatgccaggaggaagtaga

SEQ ID NO: 400373 - DNA, 33 bp, Homo sapien
tccactctgagtattccaggcccacacatcaat

SEQ ID NO: 400374 - DNA, 33 bp, Homo sapien
tccactctgagtattctaggcccacacatcaat

SEQ ID NO: 400375 - DNA, 33 bp, Homo sapien
ggatgaatggagaagcacactatgggacatctg

SEQ ID NO: 400376 - DNA, 33 bp, Homo sapien
ggatgaatggagaagcgcactatgggacatctg

SEQ ID NO: 400377 - DNA, 33 bp, Homo sapien
gtctcccaagaccttacgtggtcccaggcagcc

SEQ ID NO: 400378 - DNA, 33 bp, Homo sapien
gtctcccaagaccttatgtggtcccaggcagcc

SEQ ID NO: 400379 - DNA, 33 bp, Homo sapien
tgtccatacttgtggaagttttttctattgaag

SEQ ID NO: 400380 - DNA, 33 bp, Homo sapien
tgtccatacttgtggacgttttttctattgaag

SEQ ID NO: 400381 - DNA, 33 bp, Homo sapien
atgggggatggagtcaagtacttcccaacaagc

SEQ ID NO: 400382 - DNA, 33 bp, Homo sapien
atgggggatggagtcaggtacttcccaacaagc

SEQ ID NO: 400383 - DNA, 33 bp, Homo sapien
catgaatggctagatacgcacatacgcatacat

SEQ ID NO: 400384 - DNA, 33 bp, Homo sapien
catgaatggctagatatgcacatacgcatacat

SEQ ID NO: 400385 - DNA, 33 bp, Homo sapien
cttctacgaatgtctacaggaacaaagggaaac

SEQ ID NO: 400386 - DNA, 33 bp, Homo sapien
cttctacgaatgtctagaggaacaaagggaaac

SEQ ID NO: 400387 - DNA, 33 bp, Homo sapien
acttcatacctgtcagcatggctagaattaaaa

SEQ ID NO: 400388 - DNA, 33 bp, Homo sapien
acttcatacctgtcaggatggctagaattaaaa

SEQ ID NO: 400389 - DNA, 33 bp, Homo sapien
tttagtagttctagcacagtttggtcaacacag

SEQ ID NO: 400390 - DNA, 33 bp, Homo sapien
tttagtagttctagcagagtttggtcaacacag

SEQ ID NO: 400391 - DNA, 33 bp, Homo sapien
ataaacacaagtctacaggtacacttattagtc

SEQ ID NO: 400392 - DNA, 33 bp, Homo sapien
ataaacacaagtctacgggtacacttattagtc

SEQ ID NO: 400393 - DNA, 33 bp, Homo sapien
ttgaattttggataaacgggtggcaacggccat

SEQ ID NO: 400394 - DNA, 33 bp, Homo sapien
ttgaattttggataaatgggtggcaacggccat

SEQ ID NO: 400395 - DNA, 33 bp, Homo sapien
tttgggggaaataggacgtttcaaccaaatgac

SEQ ID NO: 400396 - DNA, 33 bp, Homo sapien
tttgggggaaataggatgtttcaaccaaatgac

SEQ ID NO: 400397 - DNA, 33 bp, Homo sapien
tggaaaataaatatgaaaaagcatccttgtctt

SEQ ID NO: 400398 - DNA, 33 bp, Homo sapien
tggaaaataaatatgagaaagcatccttgtctt

SEQ ID NO: 400399 - DNA, 33 bp, Homo sapien
agcagaagaatgacacaggatctaaaataagat

SEQ ID NO: 400400 - DNA, 33 bp, Homo sapien
agcagaagaatgacacgggatctaaaataagat

SEQ ID NO: 400401 - DNA, 33 bp, Homo sapien
cagtctggcttggagaacatggcacggctgacc

SEQ ID NO: 400402 - DNA, 33 bp, Homo sapien
cagtctggcttggagagcatggcacggctgacc

SEQ ID NO: 400403 - DNA, 33 bp, Homo sapien
cctgccacaggagccacagcagtacctacccta

SEQ ID NO: 400404 - DNA, 33 bp, Homo sapien
cctgccacaggagccatagcagtacctacccta

SEQ ID NO: 400405 - DNA, 33 bp, Homo sapien
tttcacagattaagcaaacctgtgtagccagta

SEQ ID NO: 400406 - DNA, 33 bp, Homo sapien
tttcacagattaagcacacctgtgtagccagta

SEQ ID NO: 400407 - DNA, 33 bp, Homo sapien
accttttggctatcgcaaattatgctgctacga

SEQ ID NO: 400408 - DNA, 33 bp, Homo sapien
accttttggctatcgcgaattatgctgctacga

SEQ ID NO: 400409 - DNA, 33 bp, Homo sapien
gtgccacgtcccataaccacttggagccccagc

SEQ ID NO: 400410 - DNA, 33 bp, Homo sapien
gtgccacgtcccataatcacttggagccccagc

SEQ ID NO: 400411 - DNA, 33 bp, Homo sapien
tgtaggtgtgaagggcagaaggatggagatggt

SEQ ID NO: 400412 - DNA, 33 bp, Homo sapien
tgtaggtgtgaagggcggaaggatggagatggt

SEQ ID NO: 400413 - DNA, 33 bp, Homo sapien
tcaccagacacccaaaatactagcactttaatc

SEQ ID NO: 400414 - DNA, 33 bp, Homo sapien
tcaccagacacccaaagtactagcactttaatc

SEQ ID NO: 400415 - DNA, 33 bp, Homo sapien
agcccacccactcttccaaacgtcccagatgaa

SEQ ID NO: 400416 - DNA, 33 bp, Homo sapien
agcccacccactcttctaaacgtcccagatgaa

SEQ ID NO: 400417 - DNA, 33 bp, Homo sapien
gatgcagcgtgtatggccagcacttagtctttc

SEQ ID NO: 400418 - DNA, 33 bp, Homo sapien
gatgcagcgtgtatggtcagcacttagtctttc

SEQ ID NO: 400419 - DNA, 33 bp, Homo sapien
tttgcctggcagcactaaaaaactcacattttt

SEQ ID NO: 400420 - DNA, 33 bp, Homo sapien
tttgcctggcagcactgaaaaactcacattttt

SEQ ID NO: 400421 - DNA, 33 bp, Homo sapien
aggacttcaagatggcaatgagagcaggacgag

SEQ ID NO: 400422 - DNA, 33 bp, Homo sapien
aggacttcaagatggcgatgagagcaggacgag

SEQ ID NO: 400423 - DNA, 33 bp, Homo sapien
tggatcagtatgaaagactgggacctcctaagg

SEQ ID NO: 400424 - DNA, 33 bp, Homo sapien
tggatcagtatgaaaggctgggacctcctaagg

SEQ ID NO: 400425 - DNA, 33 bp, Homo sapien
ccagcttgttcatctacgtacctaggtgcactg

SEQ ID NO: 400426 - DNA, 33 bp, Homo sapien
ccagcttgttcatctatgtacctaggtgcactg

SEQ ID NO: 400427 - DNA, 33 bp, Homo sapien
gcaatgtgcaaagtccactgcttagtacaagtt

SEQ ID NO: 400428 - DNA, 33 bp, Homo sapien
gcaatgtgcaaagtccgctgcttagtacaagtt

SEQ ID NO: 400429 - DNA, 33 bp, Homo sapien
tgtctcctgggagcgcgaacacggccccatcct

SEQ ID NO: 400430 - DNA, 33 bp, Homo sapien
tgtctcctgggagcgctaacacggccccatcct

SEQ ID NO: 400431 - DNA, 33 bp, Homo sapien
caagtttgcccataggacaaaagagcatttgat

SEQ ID NO: 400432 - DNA, 33 bp, Homo sapien
caagtttgcccataggtcaaaagagcatttgat

SEQ ID NO: 400433 - DNA, 33 bp, Homo sapien
actgacagataaggccagaaacaaaactgatgg

SEQ ID NO: 400434 - DNA, 33 bp, Homo sapien
actgacagataaggccggaaacaaaactgatgg

SEQ ID NO: 400435 - DNA, 33 bp, Homo sapien
ggaaggcccccactgaagctgtgcccgaggaac

SEQ ID NO: 400436 - DNA, 33 bp, Homo sapien
ggaaggcccccactgaggctgtgcccgaggaac

SEQ ID NO: 400437 - DNA, 33 bp, Homo sapien
tcatcatgtgacagaacgtttgtgagaactgct

SEQ ID NO: 400438 - DNA, 33 bp, Homo sapien
tcatcatgtgacagaaggtttgtgagaactgct

SEQ ID NO: 400439 - DNA, 33 bp, Homo sapien
tctttaaaggattcaaatgactgagactatccc

SEQ ID NO: 400440 - DNA, 33 bp, Homo sapien
tctttaaaggattcaagtgactgagactatccc

SEQ ID NO: 400441 - DNA, 33 bp, Homo sapien
agctgtatcactgcccacatagttaacaacatt

SEQ ID NO: 400442 - DNA, 33 bp, Homo sapien
agctgtatcactgcccgcatagttaacaacatt

SEQ ID NO: 400443 - DNA, 33 bp, Homo sapien
ctcctgttctttgaccaacagtttctaaatagc

SEQ ID NO: 400444 - DNA, 33 bp, Homo sapien
ctcctgttctttgaccgacagtttctaaatagc

SEQ ID NO: 400445 - DNA, 33 bp, Homo sapien
acatttcagaggaccaaaagatgaggaagagat

SEQ ID NO: 400446 - DNA, 33 bp, Homo sapien
acatttcagaggaccagaagatgaggaagagat

SEQ ID NO: 400447 - DNA, 33 bp, Homo sapien
aatttcaaagtagaaacgcttgaatgttaacct

SEQ ID NO: 400448 - DNA, 33 bp, Homo sapien
aatttcaaagtagaaatgcttgaatgttaacct

SEQ ID NO: 400449 - DNA, 33 bp, Homo sapien
gactcagtatgcagtcgcaataacatgtctgct

SEQ ID NO: 400450 - DNA, 33 bp, Homo sapien
gactcagtatgcagtctcaataacatgtctgct

SEQ ID NO: 400451 - DNA, 33 bp, Homo sapien
aattaatcatattccacggtttggctactgttt

SEQ ID NO: 400452 - DNA, 33 bp, Homo sapien
aattaatcatattccatggtttggctactgttt

SEQ ID NO: 400453 - DNA, 33 bp, Homo sapien
tggagttggctgtgaacgagtaggggtccgagc

SEQ ID NO: 400454 - DNA, 33 bp, Homo sapien
tggagttggctgtgaatgagtaggggtccgagc

SEQ ID NO: 400455 - DNA, 33 bp, Homo sapien
gaaagcacagataccaataatgttcaacaattc

SEQ ID NO: 400456 - DNA, 33 bp, Homo sapien
gaaagcacagataccagtaatgttcaacaattc

SEQ ID NO: 400457 - DNA, 33 bp, Homo sapien
taaacggactgtgagccgatgagtagcatttac

SEQ ID NO: 400458 - DNA, 33 bp, Homo sapien
taaacggactgtgagctgatgagtagcatttac

SEQ ID NO: 400459 - DNA, 33 bp, Homo sapien
tagcctcacgaaactgaaataagcctttgaaag

SEQ ID NO: 400460 - DNA, 33 bp, Homo sapien
tagcctcacgaaactggaataagcctttgaaag

SEQ ID NO: 400461 - DNA, 33 bp, Homo sapien
ctgtaacagagtagaaatgcaacatgagaagaa

SEQ ID NO: 400462 - DNA, 33 bp, Homo sapien
ctgtaacagagtagaagtgcaacatgagaagaa

SEQ ID NO: 400463 - DNA, 33 bp, Homo sapien
aacaggatggaggaacaaaaacagggtgcactc

SEQ ID NO: 400464 - DNA, 33 bp, Homo sapien
aacaggatggaggaaccaaaacagggtgcactc

SEQ ID NO: 400465 - DNA, 33 bp, Homo sapien
tgttgatggagacaaacggtacttggtttcctt

SEQ ID NO: 400466 - DNA, 33 bp, Homo sapien
tgttgatggagacaaatggtacttggtttcctt

SEQ ID NO: 400467 - DNA, 33 bp, Homo sapien
gctctgaaaagtactacggtgaagaagccaatc

SEQ ID NO: 400468 - DNA, 33 bp, Homo sapien
gctctgaaaagtactatggtgaagaagccaatc

SEQ ID NO: 400469 - DNA, 33 bp, Homo sapien
gaagagtaagaatgaacgggccagtgaagagtc

SEQ ID NO: 400470 - DNA, 33 bp, Homo sapien
gaagagtaagaatgaatgggccagtgaagagtc

SEQ ID NO: 400471 - DNA, 33 bp, Homo sapien
tccacagacctcaccccagtcaaactgagtcgt

SEQ ID NO: 400472 - DNA, 33 bp, Homo sapien
tccacagacctcaccctagtcaaactgagtcgt

SEQ ID NO: 400473 - DNA, 33 bp, Homo sapien
tcatttaacaacaaacactgagtcctcccagtg

SEQ ID NO: 400474 - DNA, 33 bp, Homo sapien
tcatttaacaacaaacgctgagtcctcccagtg

SEQ ID NO: 400475 - DNA, 33 bp, Homo sapien
ttgatacactaaagaccattgaattgtacactt

SEQ ID NO: 400476 - DNA, 33 bp, Homo sapien
ttgatacactaaagactattgaattgtacactt

SEQ ID NO: 400477 - DNA, 33 bp, Homo sapien
agcagcatggggacaacgacaaggcccctctgc

SEQ ID NO: 400478 - DNA, 33 bp, Homo sapien
agcagcatggggacaatgacaaggcccctctgc

SEQ ID NO: 400479 - DNA, 33 bp, Homo sapien
gacccctggtatctcccgcatggactcctcgag

SEQ ID NO: 400480 - DNA, 33 bp, Homo sapien
gacccctggtatctcctgcatggactcctcgag

SEQ ID NO: 400481 - DNA, 33 bp, Homo sapien
cagaaaccttcttgtccccagccacaaacctca

SEQ ID NO: 400482 - DNA, 33 bp, Homo sapien
cagaaaccttcttgtctccagccacaaacctca

SEQ ID NO: 400483 - DNA, 33 bp, Homo sapien
gtctgatgtcgtctcactgaagcttttcctgaa

SEQ ID NO: 400484 - DNA, 33 bp, Homo sapien
gtctgatgtcgtctcagtgaagcttttcctgaa

SEQ ID NO: 400485 - DNA, 33 bp, Homo sapien
gactttccatgaaccgacatgtctctgagtgct

SEQ ID NO: 400486 - DNA, 33 bp, Homo sapien
gactttccatgaaccggcatgtctctgagtgct

SEQ ID NO: 400487 - DNA, 33 bp, Homo sapien
ctggaaacaccagtgccgagagaggggctctca

SEQ ID NO: 400488 - DNA, 33 bp, Homo sapien
ctggaaacaccagtgcggagagaggggctctca

SEQ ID NO: 400489 - DNA, 33 bp, Homo sapien
agtgtttcctgtatccccagtggcatcctctca

SEQ ID NO: 400490 - DNA, 33 bp, Homo sapien
agtgtttcctgtatcctcagtggcatcctctca

SEQ ID NO: 400491 - DNA, 33 bp, Homo sapien
cttgaaccgatgggaaagtgagtctgtagatga

SEQ ID NO: 400492 - DNA, 33 bp, Homo sapien
cttgaaccgatgggaatgtgagtctgtagatga

SEQ ID NO: 400493 - DNA, 33 bp, Homo sapien
cttctcaggttgttggaaaaataagcccacata

SEQ ID NO: 400494 - DNA, 33 bp, Homo sapien
cttctcaggttgttgggaaaataagcccacata

SEQ ID NO: 400495 - DNA, 33 bp, Homo sapien
gaagtccagagttaaacgcagtgaaggcagagt

SEQ ID NO: 400496 - DNA, 33 bp, Homo sapien
gaagtccagagttaaatgcagtgaaggcagagt

SEQ ID NO: 400497 - DNA, 33 bp, Homo sapien
gtccaggctccagtgaagtacgactacgcctgt

SEQ ID NO: 400498 - DNA, 33 bp, Homo sapien
gtccaggctccagtgaggtacgactacgcctgt

SEQ ID NO: 400499 - DNA, 33 bp, Homo sapien
catctgctacaggttacgctatccagccctcac

SEQ ID NO: 400500 - DNA, 33 bp, Homo sapien
catctgctacaggttatgctatccagccctcac

SEQ ID NO: 400501 - DNA, 33 bp, Homo sapien
tgttgaaaattatcacgcctctctctgtgtccc

SEQ ID NO: 400502 - DNA, 33 bp, Homo sapien
tgttgaaaattatcactcctctctctgtgtccc

SEQ ID NO: 400503 - DNA, 33 bp, Homo sapien
tttatccttcgaagaacactcaaagctcgatta

SEQ ID NO: 400504 - DNA, 33 bp, Homo sapien
tttatccttcgaagaatactcaaagctcgatta

SEQ ID NO: 400505 - DNA, 33 bp, Homo sapien
aatctcaaaagaacaaagaaaagtagtcattaa

SEQ ID NO: 400506 - DNA, 33 bp, Homo sapien
aatctcaaaagaacaaggaaaagtagtcattaa

SEQ ID NO: 400507 - DNA, 33 bp, Homo sapien
tttattatctttccaaaaggcaagcattcatat

SEQ ID NO: 400508 - DNA, 33 bp, Homo sapien
tttattatctttccaataggcaagcattcatat

SEQ ID NO: 400509 - DNA, 33 bp, Homo sapien
taattaggatttccatcacctcaaacacatatc

SEQ ID NO: 400510 - DNA, 33 bp, Homo sapien
taattaggatttccattacctcaaacacatatc

SEQ ID NO: 400511 - DNA, 33 bp, Homo sapien
gaatttgccgataaaaaaaaatcagggactagg

SEQ ID NO: 400512 - DNA, 33 bp, Homo sapien
gaatttgccgataaaacaaaatcagggactagg

SEQ ID NO: 400513 - DNA, 33 bp, Homo sapien
gagtagaagtggacccagaccttgaggagccta

SEQ ID NO: 400514 - DNA, 33 bp, Homo sapien
gagtagaagtggaccctgaccttgaggagccta

SEQ ID NO: 400515 - DNA, 33 bp, Homo sapien
ccaatagaatccgtgacctttcaggaagcatct

SEQ ID NO: 400516 - DNA, 33 bp, Homo sapien
ccaatagaatccgtgagctttcaggaagcatct

SEQ ID NO: 400517 - DNA, 33 bp, Homo sapien
aggaaagatcctccccccaagcttttagagcgc

SEQ ID NO: 400518 - DNA, 33 bp, Homo sapien
aggaaagatcctccccgcaagcttttagagcgc

SEQ ID NO: 400519 - DNA, 33 bp, Homo sapien
ctgatcaccagaccgtcaaaagctgccggctcc

SEQ ID NO: 400520 - DNA, 33 bp, Homo sapien
ctgatcaccagaccgttaaaagctgccggctcc

SEQ ID NO: 400521 - DNA, 33 bp, Homo sapien
gtgggatcatttgccaaaggacttgttgacatc

SEQ ID NO: 400522 - DNA, 33 bp, Homo sapien
gtgggatcatttgccagaggacttgttgacatc

SEQ ID NO: 400523 - DNA, 33 bp, Homo sapien
gaggccgggcttgtcaaatggaagtccctcctg

SEQ ID NO: 400524 - DNA, 33 bp, Homo sapien
gaggccgggcttgtcacatggaagtccctcctg

SEQ ID NO: 400525 - DNA, 33 bp, Homo sapien
gttgttccccattatcaaggctcttctatagca

SEQ ID NO: 400526 - DNA, 33 bp, Homo sapien
gttgttccccattatcgaggctcttctatagca

SEQ ID NO: 400527 - DNA, 33 bp, Homo sapien
cctccaaataaggaacactgcaagagcctcctc

SEQ ID NO: 400528 - DNA, 33 bp, Homo sapien
cctccaaataaggaacgctgcaagagcctcctc

SEQ ID NO: 400529 - DNA, 33 bp, Homo sapien
tcatatttagttcagagtcatggcacagcctaa

SEQ ID NO: 400530 - DNA, 33 bp, Homo sapien
tcatatttagttcagattcatggcacagcctaa

SEQ ID NO: 400531 - DNA, 33 bp, Homo sapien
gggattggtgccaggaataaatatcatatcctg

SEQ ID NO: 400532 - DNA, 33 bp, Homo sapien
gggattggtgccaggagtaaatatcatatcctg

SEQ ID NO: 400533 - DNA, 33 bp, Homo sapien
cacagtgcaagacatcaagacctcgagtttagc

SEQ ID NO: 400534 - DNA, 33 bp, Homo sapien
cacagtgcaagacatcgagacctcgagtttagc

SEQ ID NO: 400535 - DNA, 33 bp, Homo sapien
tttgagtttaagcaaactagattcacttgctgt

SEQ ID NO: 400536 - DNA, 33 bp, Homo sapien
tttgagtttaagcaaattagattcacttgctgt

SEQ ID NO: 400537 - DNA, 33 bp, Homo sapien
caggctctcctcgcaccgtactaactccagtgg

SEQ ID NO: 400538 - DNA, 33 bp, Homo sapien
caggctctcctcgcacggtactaactccagtgg

SEQ ID NO: 400539 - DNA, 33 bp, Homo sapien
ctagcctgtcggataactgctgcataagtgaca

SEQ ID NO: 400540 - DNA, 33 bp, Homo sapien
ctagcctgtcggataattgctgcataagtgaca

SEQ ID NO: 400541 - DNA, 33 bp, Homo sapien
cacacaggaaattttgaaagggacacatggcag

SEQ ID NO: 400542 - DNA, 33 bp, Homo sapien
cacacaggaaattttggaagggacacatggcag

SEQ ID NO: 400543 - DNA, 33 bp, Homo sapien
attgttctgtgattcaaactagtatcctaaaaa

SEQ ID NO: 400544 - DNA, 33 bp, Homo sapien
attgttctgtgattcagactagtatcctaaaaa

SEQ ID NO: 400545 - DNA, 33 bp, Homo sapien
tggctaagcctctgccaactacactggcttcta

SEQ ID NO: 400546 - DNA, 33 bp, Homo sapien
tggctaagcctctgccgactacactggcttcta

SEQ ID NO: 400547 - DNA, 33 bp, Homo sapien
ggatgtcgtggacctacgatgcattgaaaccag

SEQ ID NO: 400548 - DNA, 33 bp, Homo sapien
ggatgtcgtggacctatgatgcattgaaaccag

SEQ ID NO: 400549 - DNA, 33 bp, Homo sapien
acacagcatctccatccacacagtggaacactg

SEQ ID NO: 400550 - DNA, 33 bp, Homo sapien
acacagcatctccatctacacagtggaacactg

SEQ ID NO: 400551 - DNA, 33 bp, Homo sapien
accacctttgcctacacaccgcgctgctggtcc

SEQ ID NO: 400552 - DNA, 33 bp, Homo sapien
accacctttgcctacataccgcgctgctggtcc

SEQ ID NO: 400553 - DNA, 33 bp, Homo sapien
ggctagacgcccaccaatgaccctgatgatggc

SEQ ID NO: 400554 - DNA, 33 bp, Homo sapien
ggctagacgcccaccagtgaccctgatgatggc

SEQ ID NO: 400555 - DNA, 33 bp, Homo sapien
acctctgcctctgaacacaaaaggtgagaggag

SEQ ID NO: 400556 - DNA, 33 bp, Homo sapien
acctctgcctctgaacgcaaaaggtgagaggag

SEQ ID NO: 400557 - DNA, 33 bp, Homo sapien
aggagcaggatggtgacgcttagagagtagcag

SEQ ID NO: 400558 - DNA, 33 bp, Homo sapien
aggagcaggatggtgatgcttagagagtagcag

SEQ ID NO: 400559 - DNA, 33 bp, Homo sapien
caagtgcatatatgaacaggcggctctccgagg

SEQ ID NO: 400560 - DNA, 33 bp, Homo sapien
caagtgcatatatgaataggcggctctccgagg

SEQ ID NO: 400561 - DNA, 33 bp, Homo sapien
taaagcctgtcacgatcatcccagggcccagcc

SEQ ID NO: 400562 - DNA, 33 bp, Homo sapien
taaagcctgtcacgatgatcccagggcccagcc

SEQ ID NO: 400563 - DNA, 33 bp, Homo sapien
caggtacccagcaaaccggatgctcagccaagg

SEQ ID NO: 400564 - DNA, 33 bp, Homo sapien
caggtacccagcaaactggatgctcagccaagg

SEQ ID NO: 400565 - DNA, 33 bp, Homo sapien
gaaggaaggaaggctcccatgcagaaggctccg

SEQ ID NO: 400566 - DNA, 33 bp, Homo sapien
gaaggaaggaaggctctcatgcagaaggctccg

SEQ ID NO: 400567 - DNA, 33 bp, Homo sapien
ggctttggataggttacctgcctacccttttct

SEQ ID NO: 400568 - DNA, 33 bp, Homo sapien
ggctttggataggttagctgcctacccttttct

SEQ ID NO: 400569 - DNA, 33 bp, Homo sapien
tcagctcagctttcccacaagtgcaagaggccc

SEQ ID NO: 400570 - DNA, 33 bp, Homo sapien
tcagctcagctttcccgcaagtgcaagaggccc

SEQ ID NO: 400571 - DNA, 33 bp, Homo sapien
gggcctcgtcatcccactccagatgccgtccgg

SEQ ID NO: 400572 - DNA, 33 bp, Homo sapien
gggcctcgtcatcccattccagatgccgtccgg

SEQ ID NO: 400573 - DNA, 33 bp, Homo sapien
ctggagtcatcttctgaatcctggaggtgcccc

SEQ ID NO: 400574 - DNA, 33 bp, Homo sapien
ctggagtcatcttctggatcctggaggtgcccc

SEQ ID NO: 400575 - DNA, 33 bp, Homo sapien
tccatgtgccactggaaggaaagagtttttggt

SEQ ID NO: 400576 - DNA, 33 bp, Homo sapien
tccatgtgccactggagggaaagagtttttggt

SEQ ID NO: 400577 - DNA, 33 bp, Homo sapien
ttccatacacagtagcagagattagtaattatc

SEQ ID NO: 400578 - DNA, 33 bp, Homo sapien
ttccatacacagtagcggagattagtaattatc

SEQ ID NO: 400579 - DNA, 33 bp, Homo sapien
ctcacatgattgcgaaggtgggtactcaacctg

SEQ ID NO: 400580 - DNA, 33 bp, Homo sapien
ctcacatgattgcgaatgtgggtactcaacctg

SEQ ID NO: 400581 - DNA, 33 bp, Homo sapien
gacacacagctaaagaacaaatatcagcctcat

SEQ ID NO: 400582 - DNA, 33 bp, Homo sapien
gacacacagctaaagaccaaatatcagcctcat

SEQ ID NO: 400583 - DNA, 33 bp, Homo sapien
gctggctggtgggcaactgaatctcagccatta

SEQ ID NO: 400584 - DNA, 33 bp, Homo sapien
gctggctggtgggcaattgaatctcagccatta

SEQ ID NO: 400585 - DNA, 33 bp, Homo sapien
gcaagaatttgaaagcaattggtctaggcttgg

SEQ ID NO: 400586 - DNA, 33 bp, Homo sapien
gcaagaatttgaaagccattggtctaggcttgg

SEQ ID NO: 400587 - DNA, 33 bp, Homo sapien
ttgcccgtgacctataataagaaatacatcgta

SEQ ID NO: 400588 - DNA, 33 bp, Homo sapien
ttgcccgtgacctatagtaagaaatacatcgta

SEQ ID NO: 400589 - DNA, 33 bp, Homo sapien
tgaggcaaaccttagaagacctaggatgaagtt

SEQ ID NO: 400590 - DNA, 33 bp, Homo sapien
tgaggcaaaccttagaggacctaggatgaagtt

SEQ ID NO: 400591 - DNA, 33 bp, Homo sapien
agcttagaaaactgctcaagaggccccattttt

SEQ ID NO: 400592 - DNA, 33 bp, Homo sapien
agcttagaaaactgctgaagaggccccattttt

SEQ ID NO: 400593 - DNA, 33 bp, Homo sapien
ccctgctgaatcaagacccctccgtaccactgc

SEQ ID NO: 400594 - DNA, 33 bp, Homo sapien
ccctgctgaatcaagatccctccgtaccactgc

SEQ ID NO: 400595 - DNA, 33 bp, Homo sapien
acacagcagggaaacactgttggaccctctgac

SEQ ID NO: 400596 - DNA, 33 bp, Homo sapien
acacagcagggaaacattgttggaccctctgac

SEQ ID NO: 400597 - DNA, 33 bp, Homo sapien
gaccaccactggaagacagtccctaaaattcaa

SEQ ID NO: 400598 - DNA, 33 bp, Homo sapien
gaccaccactggaagagagtccctaaaattcaa

SEQ ID NO: 400599 - DNA, 33 bp, Homo sapien
tcactgggcagcagcaatgaagccaggaggctg

SEQ ID NO: 400600 - DNA, 33 bp, Homo sapien
tcactgggcagcagcattgaagccaggaggctg

SEQ ID NO: 400601 - DNA, 33 bp, Homo sapien
agtgccaccattcacaaagtcactcaggtctgt

SEQ ID NO: 400602 - DNA, 33 bp, Homo sapien
agtgccaccattcacacagtcactcaggtctgt

SEQ ID NO: 400603 - DNA, 33 bp, Homo sapien
tgccctggttagaggaagcttgtgagatggagg

SEQ ID NO: 400604 - DNA, 33 bp, Homo sapien
tgccctggttagaggaggcttgtgagatggagg

SEQ ID NO: 400605 - DNA, 33 bp, Homo sapien
ctgttgctaccctgagaattgctggtatctgtg

SEQ ID NO: 400606 - DNA, 33 bp, Homo sapien
ctgttgctaccctgaggattgctggtatctgtg

SEQ ID NO: 400607 - DNA, 33 bp, Homo sapien
gccagccagcctgtacaggttttttgtgttttt

SEQ ID NO: 400608 - DNA, 33 bp, Homo sapien
gccagccagcctgtacgggttttttgtgttttt

SEQ ID NO: 400609 - DNA, 33 bp, Homo sapien
cttggctgcaaaatcaactggccaggctctgat

SEQ ID NO: 400610 - DNA, 33 bp, Homo sapien
cttggctgcaaaatcatctggccaggctctgat

SEQ ID NO: 400611 - DNA, 33 bp, Homo sapien
gggaggaggaggacgcaaaccgacttggtcggc

SEQ ID NO: 400612 - DNA, 33 bp, Homo sapien
gggaggaggaggacgcgaaccgacttggtcggc

SEQ ID NO: 400613 - DNA, 33 bp, Homo sapien
ttgtggagggacttgcactggaggtattgctct

SEQ ID NO: 400614 - DNA, 33 bp, Homo sapien
ttgtggagggacttgcgctggaggtattgctct

SEQ ID NO: 400615 - DNA, 33 bp, Homo sapien
gaaaagtgaatactgcccggagctccggagaca

SEQ ID NO: 400616 - DNA, 33 bp, Homo sapien
gaaaagtgaatactgctcggagctccggagaca

SEQ ID NO: 400617 - DNA, 33 bp, Homo sapien
ggaatcctcagtgttaaggaaaagcatgggagc

SEQ ID NO: 400618 - DNA, 33 bp, Homo sapien
ggaatcctcagtgttagggaaaagcatgggagc

SEQ ID NO: 400619 - DNA, 33 bp, Homo sapien
gctgagttcctgccctaagaagctaaaggtctg

SEQ ID NO: 400620 - DNA, 33 bp, Homo sapien
gctgagttcctgccctgagaagctaaaggtctg

SEQ ID NO: 400621 - DNA, 33 bp, Homo sapien
gggcaaatgagaataactgaggtagtcagaaat

SEQ ID NO: 400622 - DNA, 33 bp, Homo sapien
gggcaaatgagaataattgaggtagtcagaaat

SEQ ID NO: 400623 - DNA, 33 bp, Homo sapien
ctccaacttccaaacaactccactccaactttt

SEQ ID NO: 400624 - DNA, 33 bp, Homo sapien
ctccaacttccaaacagctccactccaactttt

SEQ ID NO: 400625 - DNA, 33 bp, Homo sapien
gggatctacttagtgaaagaggtgacgagaaca

SEQ ID NO: 400626 - DNA, 33 bp, Homo sapien
gggatctacttagtgagagaggtgacgagaaca

SEQ ID NO: 400627 - DNA, 33 bp, Homo sapien
cctgtttcgtgtcttacatcactaacttatttg

SEQ ID NO: 400628 - DNA, 33 bp, Homo sapien
cctgtttcgtgtcttatatcactaacttatttg

SEQ ID NO: 400629 - DNA, 33 bp, Homo sapien
cttagcattcctatgcagatttccacttagcga

SEQ ID NO: 400630 - DNA, 33 bp, Homo sapien
cttagcattcctatgccgatttccacttagcga

SEQ ID NO: 400631 - DNA, 33 bp, Homo sapien
ctatagtaaagggtacaagccagaatgcagtcg

SEQ ID NO: 400632 - DNA, 33 bp, Homo sapien
ctatagtaaagggtacgagccagaatgcagtcg

SEQ ID NO: 400633 - DNA, 33 bp, Homo sapien
agggattccaagccacaaggagatatccacggg

SEQ ID NO: 400634 - DNA, 33 bp, Homo sapien
agggattccaagccacgaggagatatccacggg

SEQ ID NO: 400635 - DNA, 33 bp, Homo sapien
ctccaagtagtaggaaaataagcttctgttagg

SEQ ID NO: 400636 - DNA, 33 bp, Homo sapien
ctccaagtagtaggaagataagcttctgttagg

SEQ ID NO: 400637 - DNA, 33 bp, Homo sapien
ggcacttgaaccgccgaaggtagatgatctggg

SEQ ID NO: 400638 - DNA, 33 bp, Homo sapien
ggcacttgaaccgccggaggtagatgatctggg

SEQ ID NO: 400639 - DNA, 33 bp, Homo sapien
catgtacctggactaccggcgcattgatgacca

SEQ ID NO: 400640 - DNA, 33 bp, Homo sapien
catgtacctggactactggcgcattgatgacca

SEQ ID NO: 400641 - DNA, 33 bp, Homo sapien
cgtgcagcctgccggaacggtaccttgtgcttc

SEQ ID NO: 400642 - DNA, 33 bp, Homo sapien
cgtgcagcctgccggagcggtaccttgtgcttc

SEQ ID NO: 400643 - DNA, 33 bp, Homo sapien
ccttgataattaggtaacagaagccaggttttt

SEQ ID NO: 400644 - DNA, 33 bp, Homo sapien
ccttgataattaggtagcagaagccaggttttt

SEQ ID NO: 400645 - DNA, 33 bp, Homo sapien
tctgctggcgaagtcgaaggtggaaaggtgtga

SEQ ID NO: 400646 - DNA, 33 bp, Homo sapien
tctgctggcgaagtcggaggtggaaaggtgtga

SEQ ID NO: 400647 - DNA, 33 bp, Homo sapien
tctctaaagaccttaccagttgtgagatatttg

SEQ ID NO: 400648 - DNA, 33 bp, Homo sapien
tctctaaagaccttactagttgtgagatatttg

SEQ ID NO: 400649 - DNA, 33 bp, Homo sapien
cttccaatgttctaacagaagtcaatgggaaaa

SEQ ID NO: 400650 - DNA, 33 bp, Homo sapien
cttccaatgttctaacggaagtcaatgggaaaa

SEQ ID NO: 400651 - DNA, 33 bp, Homo sapien
tgctcctgaaagcacactgtaaattgaataaga

SEQ ID NO: 400652 - DNA, 33 bp, Homo sapien
tgctcctgaaagcacattgtaaattgaataaga

SEQ ID NO: 400653 - DNA, 33 bp, Homo sapien
tctggaaacattatgccgagcagaggaatctag

SEQ ID NO: 400654 - DNA, 33 bp, Homo sapien
tctggaaacattatgctgagcagaggaatctag

SEQ ID NO: 400655 - DNA, 33 bp, Homo sapien
taatcctagcactttaagaccaggtgccgtggc

SEQ ID NO: 400656 - DNA, 33 bp, Homo sapien
taatcctagcactttaggaccaggtgccgtggc

SEQ ID NO: 400657 - DNA, 33 bp, Homo sapien
tgaaagccctggattaacatctcagtcctgcca

SEQ ID NO: 400658 - DNA, 33 bp, Homo sapien
tgaaagccctggattatcatctcagtcctgcca

SEQ ID NO: 400659 - DNA, 33 bp, Homo sapien
ggggaatttcatttcacgactgtaaatggtgtt

SEQ ID NO: 400660 - DNA, 33 bp, Homo sapien
ggggaatttcatttcaggactgtaaatggtgtt

SEQ ID NO: 400661 - DNA, 33 bp, Homo sapien
ggacggccatgtgacccgaaggttggccaccat

SEQ ID NO: 400662 - DNA, 33 bp, Homo sapien
ggacggccatgtgacctgaaggttggccaccat

SEQ ID NO: 400663 - DNA, 33 bp, Homo sapien
acttcttcacgatctgaatgacgtcctcatgct

SEQ ID NO: 400664 - DNA, 33 bp, Homo sapien
acttcttcacgatctggatgacgtcctcatgct

SEQ ID NO: 400665 - DNA, 33 bp, Homo sapien
taaatccggggtctgcactcacaaactgtgcag

SEQ ID NO: 400666 - DNA, 33 bp, Homo sapien
taaatccggggtctgcgctcacaaactgtgcag

SEQ ID NO: 400667 - DNA, 33 bp, Homo sapien
gccaatgactccctaaatgatgtcaccagccct

SEQ ID NO: 400668 - DNA, 33 bp, Homo sapien
gccaatgactccctaactgatgtcaccagccct

SEQ ID NO: 400669 - DNA, 33 bp, Homo sapien
atgaggaaggctgcagacagagcaaattgagga

SEQ ID NO: 400670 - DNA, 33 bp, Homo sapien
atgaggaaggctgcaggcagagcaaattgagga

SEQ ID NO: 400671 - DNA, 33 bp, Homo sapien
tgcaagtgtgtaccacagccaaatgacgaaagc

SEQ ID NO: 400672 - DNA, 33 bp, Homo sapien
tgcaagtgtgtaccacggccaaatgacgaaagc

SEQ ID NO: 400673 - DNA, 33 bp, Homo sapien
aatgaagaaaaaggcacagaatagggaagtaat

SEQ ID NO: 400674 - DNA, 33 bp, Homo sapien
aatgaagaaaaaggcagagaatagggaagtaat

SEQ ID NO: 400675 - DNA, 33 bp, Homo sapien
cttcacaaggctaccacatgctaactgttaatg

SEQ ID NO: 400676 - DNA, 33 bp, Homo sapien
cttcacaaggctaccatatgctaactgttaatg

SEQ ID NO: 400677 - DNA, 33 bp, Homo sapien
gatagggagctcaccacctaagttcaggcgtga

SEQ ID NO: 400678 - DNA, 33 bp, Homo sapien
gatagggagctcaccatctaagttcaggcgtga

SEQ ID NO: 400679 - DNA, 33 bp, Homo sapien
ggtcccatagggtccactctgttcatgtttagg

SEQ ID NO: 400680 - DNA, 33 bp, Homo sapien
ggtcccatagggtccattctgttcatgtttagg

SEQ ID NO: 400681 - DNA, 33 bp, Homo sapien
ggatgccctccttccacctattgtgctgcttct

SEQ ID NO: 400682 - DNA, 33 bp, Homo sapien
ggatgccctccttccatctattgtgctgcttct

SEQ ID NO: 400683 - DNA, 33 bp, Homo sapien
tctgccatcattccccaaaacccaggaaagtaa

SEQ ID NO: 400684 - DNA, 33 bp, Homo sapien
tctgccatcattccccgaaacccaggaaagtaa

SEQ ID NO: 400685 - DNA, 33 bp, Homo sapien
tattccagcgcctgtaacacagtaagggctcaa

SEQ ID NO: 400686 - DNA, 33 bp, Homo sapien
tattccagcgcctgtagcacagtaagggctcaa

SEQ ID NO: 400687 - DNA, 33 bp, Homo sapien
tttctatcaacattcactcgtttattttttcat

SEQ ID NO: 400688 - DNA, 33 bp, Homo sapien
tttctatcaacattcattcgtttattttttcat

SEQ ID NO: 400689 - DNA, 33 bp, Homo sapien
atgcaggatttgacgacgggcactactaatagg

SEQ ID NO: 400690 - DNA, 33 bp, Homo sapien
atgcaggatttgacgatgggcactactaatagg

SEQ ID NO: 400691 - DNA, 33 bp, Homo sapien
cccacagtgagaagtaccacacaggagttagtg

SEQ ID NO: 400692 - DNA, 33 bp, Homo sapien
cccacagtgagaagtatcacacaggagttagtg

SEQ ID NO: 400693 - DNA, 33 bp, Homo sapien
ggttatcacagaaaaacaaagtacaaggcagat

SEQ ID NO: 400694 - DNA, 33 bp, Homo sapien
ggttatcacagaaaaataaagtacaaggcagat

SEQ ID NO: 400695 - DNA, 33 bp, Homo sapien
atccaactaagatttccccaaaataagctatta

SEQ ID NO: 400696 - DNA, 33 bp, Homo sapien
atccaactaagatttctccaaaataagctatta

SEQ ID NO: 400697 - DNA, 33 bp, Homo sapien
taggaagcgaagctcaatagcttacttggtcat

SEQ ID NO: 400698 - DNA, 33 bp, Homo sapien
taggaagcgaagctcagtagcttacttggtcat

SEQ ID NO: 400699 - DNA, 33 bp, Homo sapien
gtgtatgcacgtggacacagacttactgaacca

SEQ ID NO: 400700 - DNA, 33 bp, Homo sapien
gtgtatgcacgtggactcagacttactgaacca

SEQ ID NO: 400701 - DNA, 33 bp, Homo sapien
accaggcttcgtgtcaccaagttgagaggtcca

SEQ ID NO: 400702 - DNA, 33 bp, Homo sapien
accaggcttcgtgtcatcaagttgagaggtcca

SEQ ID NO: 400703 - DNA, 33 bp, Homo sapien
gttctattctatttcacatactcatctctggta

SEQ ID NO: 400704 - DNA, 33 bp, Homo sapien
gttctattctatttcatatactcatctctggta

SEQ ID NO: 400705 - DNA, 33 bp, Homo sapien
ccttagaccctcagcgcaaagaagccttagagc

SEQ ID NO: 400706 - DNA, 33 bp, Homo sapien
ccttagaccctcagcgtaaagaagccttagagc

SEQ ID NO: 400707 - DNA, 33 bp, Homo sapien
aactgaggcccgaggaaggatggtgactagctt

SEQ ID NO: 400708 - DNA, 33 bp, Homo sapien
aactgaggcccgaggagggatggtgactagctt

SEQ ID NO: 400709 - DNA, 33 bp, Homo sapien
tgaatggcagtgccaaaactagatcatcctcct

SEQ ID NO: 400710 - DNA, 33 bp, Homo sapien
tgaatggcagtgccaagactagatcatcctcct

SEQ ID NO: 400711 - DNA, 33 bp, Homo sapien
gtatacccatttgacccctcttaacctgatcag

SEQ ID NO: 400712 - DNA, 33 bp, Homo sapien
gtatacccatttgacctctcttaacctgatcag

SEQ ID NO: 400713 - DNA, 33 bp, Homo sapien
ctgcctgatcccatccagcaaggcgcagctccc

SEQ ID NO: 400714 - DNA, 33 bp, Homo sapien
ctgcctgatcccatccggcaaggcgcagctccc

SEQ ID NO: 400715 - DNA, 33 bp, Homo sapien
acaagcacagttgtacacgtctttagttcagct

SEQ ID NO: 400716 - DNA, 33 bp, Homo sapien
acaagcacagttgtacgcgtctttagttcagct

SEQ ID NO: 400717 - DNA, 33 bp, Homo sapien
ttaagccaggacatccagaattcattgctttaa

SEQ ID NO: 400718 - DNA, 33 bp, Homo sapien
ttaagccaggacatcccgaattcattgctttaa

SEQ ID NO: 400719 - DNA, 33 bp, Homo sapien
tcacttataagtaaaactgtgatcataatgctt

SEQ ID NO: 400720 - DNA, 33 bp, Homo sapien
tcacttataagtaaaattgtgatcataatgctt

SEQ ID NO: 400721 - DNA, 33 bp, Homo sapien
aaaacaaagaaatcaccctgtttgactctgtgg

SEQ ID NO: 400722 - DNA, 33 bp, Homo sapien
aaaacaaagaaatcactctgtttgactctgtgg

SEQ ID NO: 400723 - DNA, 33 bp, Homo sapien
ttaactgtaactagtagatgcctttcaagtaga

SEQ ID NO: 400724 - DNA, 33 bp, Homo sapien
ttaactgtaactagtatatgcctttcaagtaga

SEQ ID NO: 400725 - DNA, 33 bp, Homo sapien
gcaggtcttgatgttcaatgatggacttctcca

SEQ ID NO: 400726 - DNA, 33 bp, Homo sapien
gcaggtcttgatgttcgatgatggacttctcca

SEQ ID NO: 400727 - DNA, 33 bp, Homo sapien
aattctaggaaaataaaatactatgtcgccact

SEQ ID NO: 400728 - DNA, 33 bp, Homo sapien
aattctaggaaaataagatactatgtcgccact

SEQ ID NO: 400729 - DNA, 33 bp, Homo sapien; identical to SEQ ID NO: 400727

SEQ ID NO: 400730 - DNA, 33 bp, Homo sapien; identical to SEQ ID NO: 400728

SEQ ID NO: 400731 - DNA, 33 bp, Homo sapien
gctcatccatctctcaagtgggggtcctccggc

SEQ ID NO: 400732 - DNA, 33 bp, Homo sapien
gctcatccatctctcaggtgggggtcctccggc

SEQ ID NO: 400733 - DNA, 33 bp, Homo sapien
caataagatgtggcaaattccaaacttttatcc

SEQ ID NO: 400734 - DNA, 33 bp, Homo sapien
caataagatgtggcaacttccaaacttttatcc

SEQ ID NO: 400735 - DNA, 33 bp, Homo sapien
aaaaatgagggtaacagctgtctgggtctgaga

SEQ ID NO: 400736 - DNA, 33 bp, Homo sapien
aaaaatgagggtaacatctgtctgggtctgaga

SEQ ID NO: 400737 - DNA, 33 bp, Homo sapien
gcatttcttctggccaaagttgtagctgatgaa

SEQ ID NO: 400738 - DNA, 33 bp, Homo sapien
gcatttcttctggccagagttgtagctgatgaa

SEQ ID NO: 400739 - DNA, 33 bp, Homo sapien
atgcaggcgaattctaggccgtgaaggaatctc

SEQ ID NO: 400740 - DNA, 33 bp, Homo sapien
atgcaggcgaattctatgccgtgaaggaatctc

SEQ ID NO: 400741 - DNA, 33 bp, Homo sapien
attctttctagtgtcccggaaccatcttttcat

SEQ ID NO: 400742 - DNA, 33 bp, Homo sapien
attctttctagtgtcctggaaccatcttttcat

SEQ ID NO: 400743 - DNA, 33 bp, Homo sapien
agcagcagcacaaggaggcagtagctacaggca

SEQ ID NO: 400744 - DNA, 33 bp, Homo sapien
agcagcagcacaaggatgcagtagctacaggca

SEQ ID NO: 400745 - DNA, 33 bp, Homo sapien
cgggccagaggtatgtaaatatcttcaaaggcc

SEQ ID NO: 400746 - DNA, 33 bp, Homo sapien
cgggccagaggtatgtgaatatcttcaaaggcc

SEQ ID NO: 400747 - DNA, 33 bp, Homo sapien
aggtctttttccctgacgttgaggatcatgcca

SEQ ID NO: 400748 - DNA, 33 bp, Homo sapien
aggtctttttccctgatgttgaggatcatgcca

SEQ ID NO: 400749 - DNA, 33 bp, Homo sapien
tctcccagaattcctcaacaggattaagaccca

SEQ ID NO: 400750 - DNA, 33 bp, Homo sapien
tctcccagaattcctcgacaggattaagaccca

SEQ ID NO: 400751 - DNA, 33 bp, Homo sapien
ctctgctatgtgtctgaaactgttttaaacact

SEQ ID NO: 400752 - DNA, 33 bp, Homo sapien
ctctgctatgtgtctggaactgttttaaacact

SEQ ID NO: 400753 - DNA, 33 bp, Homo sapien
aacagaatactacctcaattggaatgactgctg

SEQ ID NO: 400754 - DNA, 33 bp, Homo sapien
aacagaatactacctcgattggaatgactgctg

SEQ ID NO: 400755 - DNA, 33 bp, Homo sapien
cccaccctggccagaactatcttgcaaacctac

SEQ ID NO: 400756 - DNA, 33 bp, Homo sapien
cccaccctggccagaattatcttgcaaacctac

SEQ ID NO: 400757 - DNA, 33 bp, Homo sapien; identical to SEQ ID NO: 400755

SEQ ID NO: 400758 - DNA, 33 bp, Homo sapien; identical to SEQ ID NO: 400756

SEQ ID NO: 400759 - DNA, 33 bp, Homo sapien
ccttcttataacggtgaacacaaatcccagcac

SEQ ID NO: 400760 - DNA, 33 bp, Homo sapien
ccttcttataacggtggacacaaatcccagcac

SEQ ID NO: 400761 - DNA, 33 bp, Homo sapien
agagtcttctcgggaccggaccccaactccagg

SEQ ID NO: 400762 - DNA, 33 bp, Homo sapien
agagtcttctcgggactggaccccaactccagg

SEQ ID NO: 400763 - DNA, 33 bp, Homo sapien; identical to SEQ ID NO: 400761

SEQ ID NO: 400764 - DNA, 33 bp, Homo sapien; identical to SEQ ID NO: 400762

SEQ ID NO: 400765 - DNA, 33 bp, Homo sapien
ccaaaccaatgaacagaccagatcacacgaggc

SEQ ID NO: 400766 - DNA, 33 bp, Homo sapien
ccaaaccaatgaacagtccagatcacacgaggc

SEQ ID NO: 400767 - DNA, 33 bp, Homo sapien
aaatgtctgagtaccacgcttctttggcatcag

SEQ ID NO: 400768 - DNA, 33 bp, Homo sapien
aaatgtctgagtaccatgcttctttggcatcag

SEQ ID NO: 400769 - DNA, 33 bp, Homo sapien
tctgcgcatattctaacgcactctctctcacac

SEQ ID NO: 400770 - DNA, 33 bp, Homo sapien
tctgcgcatattctaatgcactctctctcacac

SEQ ID NO: 400771 - DNA, 33 bp, Homo sapien
cttcatatttctctagaccaattctaataattt

SEQ ID NO: 400772 - DNA, 33 bp, Homo sapien
cttcatatttctctagcccaattctaataattt

SEQ ID NO: 400773 - DNA, 33 bp, Homo sapien
cgggtgtgagttacaaccaatcaagcggtgaac

SEQ ID NO: 400774 - DNA, 33 bp, Homo sapien
cgggtgtgagttacaatcaatcaagcggtgaac

SEQ ID NO: 400775 - DNA, 33 bp, Homo sapien
agatttttatgttccagaattgcacagagggaa

SEQ ID NO: 400776 - DNA, 33 bp, Homo sapien
agatttttatgttccataattgcacagagggaa

SEQ ID NO: 400777 - DNA, 33 bp, Homo sapien
ccccttatattgagaccctgctttcaggacagg

SEQ ID NO: 400778 - DNA, 33 bp, Homo sapien
ccccttatattgagacgctgctttcaggacagg

SEQ ID NO: 400779 - DNA, 33 bp, Homo sapien
ctgcaactgctactaacggcaaaaaaataaact

SEQ ID NO: 400780 - DNA, 33 bp, Homo sapien
ctgcaactgctactaatggcaaaaaaataaact

SEQ ID NO: 400781 - DNA, 33 bp, Homo sapien
ttaaagtctaaaaaccacttcaacatactatat

SEQ ID NO: 400782 - DNA, 33 bp, Homo sapien
ttaaagtctaaaaaccgcttcaacatactatat

SEQ ID NO: 400783 - DNA, 33 bp, Homo sapien
aaaggaaatgagtataacacagggatacctgca

SEQ ID NO: 400784 - DNA, 33 bp, Homo sapien
aaaggaaatgagtatatcacagggatacctgca

SEQ ID NO: 400785 - DNA, 33 bp, Homo sapien
aggttgctacacccaaatagtggcgcaaaggct

SEQ ID NO: 400786 - DNA, 33 bp, Homo sapien
aggttgctacacccaattagtggcgcaaaggct

SEQ ID NO: 400787 - DNA, 33 bp, Homo sapien
gggagttggttattacaatagctaccatgcaca

SEQ ID NO: 400788 - DNA, 33 bp, Homo sapien
gggagttggttattacgatagctaccatgcaca

SEQ ID NO: 400789 - DNA, 33 bp, Homo sapien
aaacaagtactgacggaatgaacaaagcaagaa

SEQ ID NO: 400790 - DNA, 33 bp, Homo sapien
aaacaagtactgacggcatgaacaaagcaagaa

SEQ ID NO: 400791 - DNA, 33 bp, Homo sapien; identical to SEQ ID NO: 400789

SEQ ID NO: 400792 - DNA, 33 bp, Homo sapien; identical to SEQ ID NO: 400790

SEQ ID NO: 400793 - DNA, 33 bp, Homo sapien
attctgtatttctaacaagtttccagctagtgc

SEQ ID NO: 400794 - DNA, 33 bp, Homo sapien
attctgtatttctaacgagtttccagctagtgc

SEQ ID NO: 400795 - DNA, 33 bp, Homo sapien
agaagagtgcactaaaagcaaatatcacccaca

SEQ ID NO: 400796 - DNA, 33 bp, Homo sapien
agaagagtgcactaaaggcaaatatcacccaca

SEQ ID NO: 400797 - DNA, 33 bp, Homo sapien
atttcaaaaccactcacccacatttcagatggg

SEQ ID NO: 400798 - DNA, 33 bp, Homo sapien
atttcaaaaccactcatccacatttcagatggg

SEQ ID NO: 400799 - DNA, 33 bp, Homo sapien
acacaaacacatcctccctataaaaacctgaaa

SEQ ID NO: 400800 - DNA, 33 bp, Homo sapien
acacaaacacatcctctctataaaaacctgaaa

SEQ ID NO: 400801 - DNA, 33 bp, Homo sapien
ttttcctgccagaaacaagagtacaaattcaag

SEQ ID NO: 400802 - DNA, 33 bp, Homo sapien
ttttcctgccagaaacgagagtacaaattcaag

SEQ ID NO: 400803 - DNA, 33 bp, Homo sapien
ttttgtaaaacttgcaaggaagcatttctagtt

SEQ ID NO: 400804 - DNA, 33 bp, Homo sapien
ttttgtaaaacttgcagggaagcatttctagtt

SEQ ID NO: 400805 - DNA, 33 bp, Homo sapien
aaaagcagtcaacagaaacgatctctgaaaaag

SEQ ID NO: 400806 - DNA, 33 bp, Homo sapien
aaaagcagtcaacagacacgatctctgaaaaag

SEQ ID NO: 400807 - DNA, 33 bp, Homo sapien
tttccgccgcatgagtaaaggttgaggggtgag

SEQ ID NO: 400808 - DNA, 33 bp, Homo sapien
tttccgccgcatgagtgaaggttgaggggtgag

SEQ ID NO: 400809 - DNA, 33 bp, Homo sapien
catccctctgtgaacacgtgggtgacagaagta

SEQ ID NO: 400810 - DNA, 33 bp, Homo sapien
catccctctgtgaacaggtgggtgacagaagta

SEQ ID NO: 400811 - DNA, 33 bp, Homo sapien
acttgagtgttggccaaatatgattgaaattgg

SEQ ID NO: 400812 - DNA, 33 bp, Homo sapien
acttgagtgttggccagatatgattgaaattgg

SEQ ID NO: 400813 - DNA, 33 bp, Homo sapien
taaaaaggtattgtgaacaagagctctgtcgac

SEQ ID NO: 400814 - DNA, 33 bp, Homo sapien
taaaaaggtattgtgagcaagagctctgtcgac

SEQ ID NO: 400815 - DNA, 33 bp, Homo sapien
catagctacgggatataagacaaccagaactga

SEQ ID NO: 400816 - DNA, 33 bp, Homo sapien
catagctacgggatatgagacaaccagaactga

SEQ ID NO: 400817 - DNA, 33 bp, Homo sapien
acaaacacacaaaaaactcatgcttaaatcatc

SEQ ID NO: 400818 - DNA, 33 bp, Homo sapien
acaaacacacaaaaaattcatgcttaaatcatc

SEQ ID NO: 400819 - DNA, 33 bp, Homo sapien
ctccatctcaacaacaaaaaaaagccagatgcg

SEQ ID NO: 400820 - DNA, 33 bp, Homo sapien
ctccatctcaacaacagaaaaaagccagatgcg

SEQ ID NO: 400821 - DNA, 33 bp, Homo sapien
tagctgtactgacacaatataatttaccaagcc

SEQ ID NO: 400822 - DNA, 33 bp, Homo sapien
tagctgtactgacacagtataatttaccaagcc

SEQ ID NO: 400823 - DNA, 33 bp, Homo sapien
gagtttggcttcccagactctctcgtttcctct

SEQ ID NO: 400824 - DNA, 33 bp, Homo sapien
gagtttggcttcccaggctctctcgtttcctct

SEQ ID NO: 400825 - DNA, 33 bp, Homo sapien
cacaccaaaagctaacacccagcaagttccaaa

SEQ ID NO: 400826 - DNA, 33 bp, Homo sapien
cacaccaaaagctaacgcccagcaagttccaaa

SEQ ID NO: 400827 - DNA, 33 bp, Homo sapien
gtctcaggtgttacagcagcacaaagtggacaa

SEQ ID NO: 400828 - DNA, 33 bp, Homo sapien
gtctcaggtgttacagtagcacaaagtggacaa

SEQ ID NO: 400829 - DNA, 33 bp, Homo sapien
catgctgtctgcttaacgagaacccttggcatt

SEQ ID NO: 400830 - DNA, 33 bp, Homo sapien
catgctgtctgcttaatgagaacccttggcatt

SEQ ID NO: 400831 - DNA, 33 bp, Homo sapien
cttgcggtggtgtctcactgttgtttgaatttg

SEQ ID NO: 400832 - DNA, 33 bp, Homo sapien
cttgcggtggtgtctctctgttgtttgaatttg

SEQ ID NO: 400833 - DNA, 33 bp, Homo sapien
tgtattttgctctgaacgtggccgtgggcatat

SEQ ID NO: 400834 - DNA, 33 bp, Homo sapien
tgtattttgctctgaatgtggccgtgggcatat

SEQ ID NO: 400835 - DNA, 33 bp, Homo sapien
tacccaaagagagaaacgggcttggtcaaggtc

SEQ ID NO: 400836 - DNA, 33 bp, Homo sapien
tacccaaagagagaaaggggcttggtcaaggtc

SEQ ID NO: 400837 - DNA, 33 bp, Homo sapien
aaagcagttttcagtcacttgttaacagatact

SEQ ID NO: 400838 - DNA, 33 bp, Homo sapien
aaagcagttttcagtcgcttgttaacagatact

SEQ ID NO: 400839 - DNA, 33 bp, Homo sapien
atgctgcctttagtacagcaagatcacggcaca

SEQ ID NO: 400840 - DNA, 33 bp, Homo sapien
atgctgcctttagtacggcaagatcacggcaca

SEQ ID NO: 400841 - DNA, 33 bp, Homo sapien
ataaaataaaatggttaaaatgatgaattgtat

SEQ ID NO: 400842 - DNA, 33 bp, Homo sapien
ataaaataaaatggttcaaatgatgaattgtat

SEQ ID NO: 400843 - DNA, 33 bp, Homo sapien
ccctccgtttagaatccgatgaggcccactggc

SEQ ID NO: 400844 - DNA, 33 bp, Homo sapien
ccctccgtttagaatcggatgaggcccactggc

SEQ ID NO: 400845 - DNA, 33 bp, Homo sapien
ttttcccatcaaggccaaacgaatctgcacatg

SEQ ID NO: 400846 - DNA, 33 bp, Homo sapien
ttttcccatcaaggcccaacgaatctgcacatg

SEQ ID NO: 400847 - DNA, 33 bp, Homo sapien
tctgctctcagggaaacgctctgcacgcagcag

SEQ ID NO: 400848 - DNA, 33 bp, Homo sapien
tctgctctcagggaaatgctctgcacgcagcag

SEQ ID NO: 400849 - DNA, 33 bp, Homo sapien
ttcctgcagtcattcccagaccaagccagttgg

SEQ ID NO: 400850 - DNA, 33 bp, Homo sapien
ttcctgcagtcattccgagaccaagccagttgg

SEQ ID NO: 400851 - DNA, 33 bp, Homo sapien
tcctgtgaccacagaaccactcttgaagcagaa

SEQ ID NO: 400852 - DNA, 33 bp, Homo sapien
tcctgtgaccacagaagcactcttgaagcagaa

SEQ ID NO: 400853 - DNA, 33 bp, Homo sapien
gtcttgctcatggagacggatgaacttggagct

SEQ ID NO: 400854 - DNA, 33 bp, Homo sapien
gtcttgctcatggagatggatgaacttggagct

SEQ ID NO: 400855 - DNA, 33 bp, Homo sapien
aaaggaggtgcttaaaattgcaggagttcttgt

SEQ ID NO: 400856 - DNA, 33 bp, Homo sapien
aaaggaggtgcttaaagttgcaggagttcttgt

SEQ ID NO: 400857 - DNA, 33 bp, Homo sapien
aggaggaggcaagtagacatcggccaagtccaa

SEQ ID NO: 400858 - DNA, 33 bp, Homo sapien
aggaggaggcaagtagccatcggccaagtccaa

SEQ ID NO: 400859 - DNA, 33 bp, Homo sapien
atgtttattttttggccgaatctcactgttttt

SEQ ID NO: 400860 - DNA, 33 bp, Homo sapien
atgtttattttttggctgaatctcactgttttt

SEQ ID NO: 400861 - DNA, 33 bp, Homo sapien
ctaaaggggctttgcaacctcagtcagttacat

SEQ ID NO: 400862 - DNA, 33 bp, Homo sapien
ctaaaggggctttgcaccctcagtcagttacat

SEQ ID NO: 400863 - DNA, 33 bp, Homo sapien
gcactgagcctgtcccaaacctattaacaatgt

SEQ ID NO: 400864 - DNA, 33 bp, Homo sapien
gcactgagcctgtccctaacctattaacaatgt

SEQ ID NO: 400865 - DNA, 33 bp, Homo sapien
gggaggacgatctgcacgagacactggaagacg

SEQ ID NO: 400866 - DNA, 33 bp, Homo sapien
gggaggacgatctgcatgagacactggaagacg

SEQ ID NO: 400867 - DNA, 33 bp, Homo sapien
ttgttgctgagccatacaaagagagattatata

SEQ ID NO: 400868 - DNA, 33 bp, Homo sapien
ttgttgctgagccatataaagagagattatata

SEQ ID NO: 400869 - DNA, 33 bp, Homo sapien
gaggtgaggacagtagaagtttggaagagggag

SEQ ID NO: 400870 - DNA, 33 bp, Homo sapien
gaggtgaggacagtaggagtttggaagagggag

SEQ ID NO: 400871 - DNA, 33 bp, Homo sapien
cagcattgccagtgacagtagataaagtagaaa

SEQ ID NO: 400872 - DNA, 33 bp, Homo sapien
cagcattgccagtgacggtagataaagtagaaa

SEQ ID NO: 400873 - DNA, 33 bp, Homo sapien
ttcaagagcccgataaatgccccttcctctggg

SEQ ID NO: 400874 - DNA, 33 bp, Homo sapien
ttcaagagcccgataactgccccttcctctggg

SEQ ID NO: 400875 - DNA, 33 bp, Homo sapien
aataatagatgtgcccaactgttcgcacccctc

SEQ ID NO: 400876 - DNA, 33 bp, Homo sapien
aataatagatgtgcccgactgttcgcacccctc

SEQ ID NO: 400877 - DNA, 33 bp, Homo sapien
acatgaatgaacgaataaactatcggattttgg

SEQ ID NO: 400878 - DNA, 33 bp, Homo sapien
acatgaatgaacgaatcaactatcggattttgg

SEQ ID NO: 400879 - DNA, 33 bp, Homo sapien
atggcatgaaccctgccgatattgagtccctgc

SEQ ID NO: 400880 - DNA, 33 bp, Homo sapien
atggcatgaaccctgctgatattgagtccctgc

SEQ ID NO: 400881 - DNA, 33 bp, Homo sapien
catctgcaaataggggaaagtttatttcatcct

SEQ ID NO: 400882 - DNA, 33 bp, Homo sapien
catctgcaaatagggggaagtttatttcatcct

SEQ ID NO: 400883 - DNA, 33 bp, Homo sapien
gagagtcctcctgacagtcaaagggcccagggc

SEQ ID NO: 400884 - DNA, 33 bp, Homo sapien
gagagtcctcctgacattcaaagggcccagggc

SEQ ID NO: 400885 - DNA, 33 bp, Homo sapien
gactttacagatgataactcgagctgggtttac

SEQ ID NO: 400886 - DNA, 33 bp, Homo sapien
gactttacagatgatatctcgagctgggtttac

SEQ ID NO: 400887 - DNA, 33 bp, Homo sapien
agtcagtttcatagcccagaagtcttcctagta

SEQ ID NO: 400888 - DNA, 33 bp, Homo sapien
agtcagtttcatagcctagaagtcttcctagta

SEQ ID NO: 400889 - DNA, 33 bp, Homo sapien
cccatgatcctgtcaacaggcagtcaacaagca

SEQ ID NO: 400890 - DNA, 33 bp, Homo sapien
cccatgatcctgtcaagaggcagtcaacaagca

SEQ ID NO: 400891 - DNA, 33 bp, Homo sapien
cttatgtacatgaaatcacctgatcgtttatgg

SEQ ID NO: 400892 - DNA, 33 bp, Homo sapien
cttatgtacatgaaattacctgatcgtttatgg

SEQ ID NO: 400893 - DNA, 33 bp, Homo sapien
ggtatccactgtagaactgcttagtgtgtgagg

SEQ ID NO: 400894 - DNA, 33 bp, Homo sapien
ggtatccactgtagaattgcttagtgtgtgagg

SEQ ID NO: 400895 - DNA, 33 bp, Homo sapien
tacaagcttatcttccaaggggcagaacaaagt

SEQ ID NO: 400896 - DNA, 33 bp, Homo sapien
tacaagcttatcttccgaggggcagaacaaagt

SEQ ID NO: 400897 - DNA, 33 bp, Homo sapien
aggctgtgttcaaaaccgcagcgtaactgagaa

SEQ ID NO: 400898 - DNA, 33 bp, Homo sapien
aggctgtgttcaaaactgcagcgtaactgagaa

SEQ ID NO: 400899 - DNA, 33 bp, Homo sapien
agaatggcctaacacaaccagaaagcctcagga

SEQ ID NO: 400900 - DNA, 33 bp, Homo sapien
agaatggcctaacacatccagaaagcctcagga

SEQ ID NO: 400901 - DNA, 33 bp, Homo sapien
cagacccttctgctcacggcatcatgcacggct

SEQ ID NO: 400902 - DNA, 33 bp, Homo sapien
cagacccttctgctcagggcatcatgcacggct

SEQ ID NO: 400903 - DNA, 33 bp, Homo sapien
ttctagaccaaaccgacgtataccttacaagta

SEQ ID NO: 400904 - DNA, 33 bp, Homo sapien
ttctagaccaaaccgatgtataccttacaagta

SEQ ID NO: 400905 - DNA, 33 bp, Homo sapien
tgatcctttgctccaaagaagctacaggaccta

SEQ ID NO: 400906 - DNA, 33 bp, Homo sapien
tgatcctttgctccaaggaagctacaggaccta

SEQ ID NO: 400907 - DNA, 33 bp, Homo sapien
atttctgttcctatgcccccaattcagtttatt

SEQ ID NO: 400908 - DNA, 33 bp, Homo sapien
atttctgttcctatgctcccaattcagtttatt

SEQ ID NO: 400909 - DNA, 33 bp, Homo sapien
taccaagaaagaggtaacaactatgccaaaggg

SEQ ID NO: 400910 - DNA, 33 bp, Homo sapien
taccaagaaagaggtagcaactatgccaaaggg

SEQ ID NO: 400911 - DNA, 33 bp, Homo sapien
tccttaacagtcagaaacattcatctttccttt

SEQ ID NO: 400912 - DNA, 33 bp, Homo sapien
tccttaacagtcagaatcattcatctttccttt

SEQ ID NO: 400913 - DNA, 33 bp, Homo sapien
acctgactatttgacactgacttgttcatcatg

SEQ ID NO: 400914 - DNA, 33 bp, Homo sapien
acctgactatttgacattgacttgttcatcatg

SEQ ID NO: 400915 - DNA, 33 bp, Homo sapien
ttctggggaaaagaagacagctattactcttgc

SEQ ID NO: 400916 - DNA, 33 bp, Homo sapien
ttctggggaaaagaaggcagctattactcttgc

SEQ ID NO: 400917 - DNA, 33 bp, Homo sapien
tgactgtttaatcacagaggaggagttctggct

SEQ ID NO: 400918 - DNA, 33 bp, Homo sapien
tgactgtttaatcacataggaggagttctggct

SEQ ID NO: 400919 - DNA, 33 bp, Homo sapien
accctcactacatctacgggtaactgaggcaca

SEQ ID NO: 400920 - DNA, 33 bp, Homo sapien
accctcactacatctatgggtaactgaggcaca

SEQ ID NO: 400921 - DNA, 33 bp, Homo sapien; identical to SEQ ID NO: 400919

SEQ ID NO: 400922 - DNA, 33 bp, Homo sapien; identical to SEQ ID NO: 400920

SEQ ID NO: 400923 - DNA, 33 bp, Homo sapien
tgtgcaaatgtggttacggttttcttcagtcag

SEQ ID NO: 400924 - DNA, 33 bp, Homo sapien
tgtgcaaatgtggttatggttttcttcagtcag

SEQ ID NO: 400925 - DNA, 33 bp, Homo sapien
ctcagaagctcccccaatgctgtcagctgttgg

SEQ ID NO: 400926 - DNA, 33 bp, Homo sapien
ctcagaagctcccccagtgctgtcagctgttgg

SEQ ID NO: 400927 - DNA, 33 bp, Homo sapien
aggtttgtcagaggtcaccaactgaaggaacaa

SEQ ID NO: 400928 - DNA, 33 bp, Homo sapien
aggtttgtcagaggtcgccaactgaaggaacaa

SEQ ID NO: 400929 - DNA, 33 bp, Homo sapien
gctcagattaacacagcctcattctacaaatcc

SEQ ID NO: 400930 - DNA, 33 bp, Homo sapien
gctcagattaacacaggctcattctacaaatcc

SEQ ID NO: 400931 - DNA, 33 bp, Homo sapien
gatgattgtcgccagaactttatccctacactt

SEQ ID NO: 400932 - DNA, 33 bp, Homo sapien
gatgattgtcgccagagctttatccctacactt

SEQ ID NO: 400933 - DNA, 33 bp, Homo sapien
tcaaaacagtaatgaactagaaggcttttggga

SEQ ID NO: 400934 - DNA, 33 bp, Homo sapien
tcaaaacagtaatgaattagaaggcttttggga

SEQ ID NO: 400935 - DNA, 33 bp, Homo sapien
gtgttaacaagcaaccaagtattatcagattat

SEQ ID NO: 400936 - DNA, 33 bp, Homo sapien
gtgttaacaagcaacccagtattatcagattat

SEQ ID NO: 400937 - DNA, 33 bp, Homo sapien
gacacttgtacaagtacgcaaagacacatcttg

SEQ ID NO: 400938 - DNA, 33 bp, Homo sapien
gacacttgtacaagtatgcaaagacacatcttg

SEQ ID NO: 400939 - DNA, 33 bp, Homo sapien
ctgaggcttcaattcacgtctgttgtcttaaac

SEQ ID NO: 400940 - DNA, 33 bp, Homo sapien
ctgaggcttcaattcatgtctgttgtcttaaac

SEQ ID NO: 400941 - DNA, 33 bp, Homo sapien
cctgctggaagccagacgaaattccagaaagga

SEQ ID NO: 400942 - DNA, 33 bp, Homo sapien
cctgctggaagccagatgaaattccagaaagga

SEQ ID NO: 400943 - DNA, 33 bp, Homo sapien
cagtccacagaagctacgtgaattctcccagta

SEQ ID NO: 400944 - DNA, 33 bp, Homo sapien
cagtccacagaagctatgtgaattctcccagta

SEQ ID NO: 400945 - DNA, 33 bp, Homo sapien
tgaacccacatagaaccaatctggagactccag

SEQ ID NO: 400946 - DNA, 33 bp, Homo sapien
tgaacccacatagaactaatctggagactccag

SEQ ID NO: 400947 - DNA, 33 bp, Homo sapien
cttcaaagccttgtgaaagttcccaatttcatc

SEQ ID NO: 400948 - DNA, 33 bp, Homo sapien
cttcaaagccttgtgagagttcccaatttcatc

SEQ ID NO: 400949 - DNA, 33 bp, Homo sapien
ggtagatggaacagtgaactaaggtttagggaa

SEQ ID NO: 400950 - DNA, 33 bp, Homo sapien
ggtagatggaacagtggactaaggtttagggaa

SEQ ID NO: 400951 - DNA, 33 bp, Homo sapien
tttcctctctccaggcagaatattactgaagaa

SEQ ID NO: 400952 - DNA, 33 bp, Homo sapien
tttcctctctccaggctgaatattactgaagaa

SEQ ID NO: 400953 - DNA, 33 bp, Homo sapien
acgcaaagaactcaaactagtctgaacccagat

SEQ ID NO: 400954 - DNA, 33 bp, Homo sapien
acgcaaagaactcaaattagtctgaacccagat

SEQ ID NO: 400955 - DNA, 33 bp, Homo sapien
tatgtctcctacaaacaagtgagaatgtacaaa

SEQ ID NO: 400956 - DNA, 33 bp, Homo sapien
tatgtctcctacaaacgagtgagaatgtacaaa

SEQ ID NO: 400957 - DNA, 33 bp, Homo sapien
tggaaacagtagaaacaaactgggatcatgtca

SEQ ID NO: 400958 - DNA, 33 bp, Homo sapien
tggaaacagtagaaacgaactgggatcatgtca

SEQ ID NO: 400959 - DNA, 33 bp, Homo sapien
gaaagctgcacatccaaaagtacacggcttccc

SEQ ID NO: 400960 - DNA, 33 bp, Homo sapien
gaaagctgcacatccagaagtacacggcttccc

SEQ ID NO: 400961 - DNA, 33 bp, Homo sapien
aatattcattagcccccgattaggcgcaagtgc

SEQ ID NO: 400962 - DNA, 33 bp, Homo sapien
aatattcattagcccctgattaggcgcaagtgc

SEQ ID NO: 400963 - DNA, 33 bp, Homo sapien
acaagccagagttggacggcgcagagaccccca

SEQ ID NO: 400964 - DNA, 33 bp, Homo sapien
acaagccagagttggatggcgcagagaccccca

SEQ ID NO: 400965 - DNA, 33 bp, Homo sapien
gtgctctgcagggaacgcagtggtcctcaagcc

SEQ ID NO: 400966 - DNA, 33 bp, Homo sapien
gtgctctgcagggaactcagtggtcctcaagcc

SEQ ID NO: 400967 - DNA, 33 bp, Homo sapien
ccccctggagagatgaggtaggactcttgacac

SEQ ID NO: 400968 - DNA, 33 bp, Homo sapien
ccccctggagagatgatgtaggactcttgacac

SEQ ID NO: 400969 - DNA, 33 bp, Homo sapien
ataaatgggttcccccaaccagactcctggggt

SEQ ID NO: 400970 - DNA, 33 bp, Homo sapien
ataaatgggttcccccgaccagactcctggggt

SEQ ID NO: 400971 - DNA, 33 bp, Homo sapien
cccagagggagcgaacacattgtccccatgcaa

SEQ ID NO: 400972 - DNA, 33 bp, Homo sapien
cccagagggagcgaacgcattgtccccatgcaa

SEQ ID NO: 400973 - DNA, 33 bp, Homo sapien
ttatatgggttgttacagaggaagtctggggca

SEQ ID NO: 400974 - DNA, 33 bp, Homo sapien
ttatatgggttgttacggaggaagtctggggca

SEQ ID NO: 400975 - DNA, 33 bp, Homo sapien
ggggactggcactgaaagctaggctgggcaggc

SEQ ID NO: 400976 - DNA, 33 bp, Homo sapien
ggggactggcactgaacgctaggctgggcaggc

SEQ ID NO: 400977 - DNA, 33 bp, Homo sapien
tgggaagtgggaggaccctcaagtctagatgtg

SEQ ID NO: 400978 - DNA, 33 bp, Homo sapien
tgggaagtgggaggactctcaagtctagatgtg

SEQ ID NO: 400979 - DNA, 33 bp, Homo sapien
taagctacctgccaaactgagttgcagaaaccc

SEQ ID NO: 400980 - DNA, 33 bp, Homo sapien
taagctacctgccaaattgagttgcagaaaccc

SEQ ID NO: 400981 - DNA, 33 bp, Homo sapien
tcggcttcacctcttgcaccaaagctgtgattt

SEQ ID NO: 400982 - DNA, 33 bp, Homo sapien
tcggcttcacctcttgtaccaaagctgtgattt

SEQ ID NO: 400983 - DNA, 33 bp, Homo sapien
gaaaaacactgcatacaggaaagctgacaactt

SEQ ID NO: 400984 - DNA, 33 bp, Homo sapien
gaaaaacactgcatacgggaaagctgacaactt

SEQ ID NO: 400985 - DNA, 33 bp, Homo sapien
ctagacggcctcagaccacttttttctgagtcc

SEQ ID NO: 400986 - DNA, 33 bp, Homo sapien
ctagacggcctcagacgacttttttctgagtcc

SEQ ID NO: 400987 - DNA, 33 bp, Homo sapien
ataatttatcatatgaagtctcaactcagcata

SEQ ID NO: 400988 - DNA, 33 bp, Homo sapien
ataatttatcatatgaggtctcaactcagcata

SEQ ID NO: 400989 - DNA, 33 bp, Homo sapien
gtgacaaggtagacacaaagattacaaggatac

SEQ ID NO: 400990 - DNA, 33 bp, Homo sapien
gtgacaaggtagacaccaagattacaaggatac

SEQ ID NO: 400991 - DNA, 33 bp, Homo sapien
tggattagaaagaaacaatgctggctcagatat

SEQ ID NO: 400992 - DNA, 33 bp, Homo sapien
tggattagaaagaaacgatgctggctcagatat

SEQ ID NO: 400993 - DNA, 33 bp, Homo sapien
gaagttagagaatgagaaaacaagaaatagata

SEQ ID NO: 400994 - DNA, 33 bp, Homo sapien
gaagttagagaatgaggaaacaagaaatagata

SEQ ID NO: 400995 - DNA, 33 bp, Homo sapien
cctacattgaacaggaagattgttactctatat

SEQ ID NO: 400996 - DNA, 33 bp, Homo sapien
cctacattgaacaggatgattgttactctatat

SEQ ID NO: 400997 - DNA, 33 bp, Homo sapien
gtaaagggaagcaatcagaagggtagaaatcca

SEQ ID NO: 400998 - DNA, 33 bp, Homo sapien
gtaaagggaagcaatcggaagggtagaaatcca

SEQ ID NO: 400999 - DNA, 33 bp, Homo sapien
ttagtcattaagtggaaagttattaagtatctg

SEQ ID NO: 401000 - DNA, 33 bp, Homo sapien
ttagtcattaagtggagagttattaagtatctg

SEQ ID NO: 401001 - DNA, 33 bp, Homo sapien
cctatctcctactaacaaatcaactactacccc

SEQ ID NO: 401002 - DNA, 33 bp, Homo sapien
cctatctcctactaacgaatcaactactacccc

SEQ ID NO: 401003 - DNA, 33 bp, Homo sapien
aaagcttgtgctagagaaaagaacaacagggaa

SEQ ID NO: 401004 - DNA, 33 bp, Homo sapien
aaagcttgtgctagaggaaagaacaacagggaa

SEQ ID NO: 401005 - DNA, 33 bp, Homo sapien
aaggatggctaaaaaacgcttctgtaacaagaa

SEQ ID NO: 401006 - DNA, 33 bp, Homo sapien
aaggatggctaaaaaatgcttctgtaacaagaa

SEQ ID NO: 401007 - DNA, 33 bp, Homo sapien
aaccatgagtcaaagaagtcataaaggcaaatt

SEQ ID NO: 401008 - DNA, 33 bp, Homo sapien
aaccatgagtcaaagaggtcataaaggcaaatt

SEQ ID NO: 401009 - DNA, 33 bp, Homo sapien
gttcctaggcttttgacgtagggatctcagaga

SEQ ID NO: 401010 - DNA, 33 bp, Homo sapien
gttcctaggcttttgatgtagggatctcagaga

SEQ ID NO: 401011 - DNA, 33 bp, Homo sapien
atatcagattgcatcaataaaatccatcatctg

SEQ ID NO: 401012 - DNA, 33 bp, Homo sapien
atatcagattgcatcagtaaaatccatcatctg

SEQ ID NO: 401013 - DNA, 33 bp, Homo sapien
ttatgaaaactttagaaaaaggctttgcacata

SEQ ID NO: 401014 - DNA, 33 bp, Homo sapien
ttatgaaaactttagacaaaggctttgcacata

SEQ ID NO: 401015 - DNA, 33 bp, Homo sapien
ggtgatagacgtactacgggtttggacagatgt

SEQ ID NO: 401016 - DNA, 33 bp, Homo sapien
ggtgatagacgtactatgggtttggacagatgt

SEQ ID NO: 401017 - DNA, 33 bp, Homo sapien
cctctcatccaatcaaaggaaagtccttaacaa

SEQ ID NO: 401018 - DNA, 33 bp, Homo sapien
cctctcatccaatcaagggaaagtccttaacaa

SEQ ID NO: 401019 - DNA, 33 bp, Homo sapien
tgggaaacaggccagagggtgaagggtcttgca

SEQ ID NO: 401020 - DNA, 33 bp, Homo sapien
tgggaaacaggccagatggtgaagggtcttgca

SEQ ID NO: 401021 - DNA, 33 bp, Homo sapien
tgggaaacatctattacccatgcctccatcatg

SEQ ID NO: 401022 - DNA, 33 bp, Homo sapien
tgggaaacatctattatccatgcctccatcatg

SEQ ID NO: 401023 - DNA, 33 bp, Homo sapien
tccgtgatatttgtccccagtgctgtgactaca

SEQ ID NO: 401024 - DNA, 33 bp, Homo sapien
tccgtgatatttgtccgcagtgctgtgactaca

SEQ ID NO: 401025 - DNA, 33 bp, Homo sapien
gatgattaagcaataaagtatgcatagggcaag

SEQ ID NO: 401026 - DNA, 33 bp, Homo sapien
gatgattaagcaataacgtatgcatagggcaag

SEQ ID NO: 401027 - DNA, 33 bp, Homo sapien
caagaaatgtcaaggaaagagaaataagctaaa

SEQ ID NO: 401028 - DNA, 33 bp, Homo sapien
caagaaatgtcaaggagagagaaataagctaaa

SEQ ID NO: 401029 - DNA, 33 bp, Homo sapien
cttggatttgactaaactactcttctgattaaa

SEQ ID NO: 401030 - DNA, 33 bp, Homo sapien
cttggatttgactaaagtactcttctgattaaa

SEQ ID NO: 401031 - DNA, 33 bp, Homo sapien
cgccgtgcctagccaacgctttattattaataa

SEQ ID NO: 401032 - DNA, 33 bp, Homo sapien
cgccgtgcctagccaatgctttattattaataa

SEQ ID NO: 401033 - DNA, 33 bp, Homo sapien
tctggccatttcaagacggagagaatgggcact

SEQ ID NO: 401034 - DNA, 33 bp, Homo sapien
tctggccatttcaagatggagagaatgggcact

SEQ ID NO: 401035 - DNA, 33 bp, Homo sapien
ccacctggatgaatatcaagggaattatgctgt

SEQ ID NO: 401036 - DNA, 33 bp, Homo sapien
ccacctggatgaatattaagggaattatgctgt

SEQ ID NO: 401037 - DNA, 33 bp, Homo sapien
aatttcagtcattcaaaaatagttgtgggaatt

SEQ ID NO: 401038 - DNA, 33 bp, Homo sapien
aatttcagtcattcaataatagttgtgggaatt

SEQ ID NO: 401039 - DNA, 33 bp, Homo sapien
tctaacattctgaacaatcttgggctagttgtc

SEQ ID NO: 401040 - DNA, 33 bp, Homo sapien
tctaacattctgaacagtcttgggctagttgtc

SEQ ID NO: 401041 - DNA, 33 bp, Homo sapien
gcctctgcggaaaacactatgctgggtcatcaa

SEQ ID NO: 401042 - DNA, 33 bp, Homo sapien
gcctctgcggaaaacagtatgctgggtcatcaa

SEQ ID NO: 401043 - DNA, 33 bp, Homo sapien
atgagagtgggataaaacggaatgaacaaataa

SEQ ID NO: 401044 - DNA, 33 bp, Homo sapien
atgagagtgggataaagcggaatgaacaaataa

SEQ ID NO: 401045 - DNA, 33 bp, Homo sapien
tccctgcatggcagtaataaggagcccatccct

SEQ ID NO: 401046 - DNA, 33 bp, Homo sapien
tccctgcatggcagtagtaaggagcccatccct

SEQ ID NO: 401047 - DNA, 33 bp, Homo sapien
aaccctaggacctgacactaggcttcctttgtt

SEQ ID NO: 401048 - DNA, 33 bp, Homo sapien
aaccctaggacctgacgctaggcttcctttgtt

SEQ ID NO: 401049 - DNA, 33 bp, Homo sapien
ttgatagacgctgccaaattgctttccatagaa

SEQ ID NO: 401050 - DNA, 33 bp, Homo sapien
ttgatagacgctgccagattgctttccatagaa

SEQ ID NO: 401051 - DNA, 33 bp, Homo sapien
ccaactgtgtttttcccgatgcctatcctgctg

SEQ ID NO: 401052 - DNA, 33 bp, Homo sapien
ccaactgtgtttttcctgatgcctatcctgctg

SEQ ID NO: 401053 - DNA, 33 bp, Homo sapien
ctggatgcccacttagaaacttagcctgcacgg

SEQ ID NO: 401054 - DNA, 33 bp, Homo sapien
ctggatgcccacttaggaacttagcctgcacgg

SEQ ID NO: 401055 - DNA, 33 bp, Homo sapien
tttattgatgggcgccaacctcttccatctcct

SEQ ID NO: 401056 - DNA, 33 bp, Homo sapien
tttattgatgggcgccgacctcttccatctcct

SEQ ID NO: 401057 - DNA, 33 bp, Homo sapien
agttccagaagagagacgattttctggaggttt

SEQ ID NO: 401058 - DNA, 33 bp, Homo sapien
agttccagaagagagatgattttctggaggttt

SEQ ID NO: 401059 - DNA, 33 bp, Homo sapien
agtcctgtttggctacactgcagggtaaggggt

SEQ ID NO: 401060 - DNA, 33 bp, Homo sapien
agtcctgtttggctacgctgcagggtaaggggt

SEQ ID NO: 401061 - DNA, 33 bp, Homo sapien
ttttatagttcagcaacaagggaatgtcgagga

SEQ ID NO: 401062 - DNA, 33 bp, Homo sapien
ttttatagttcagcaagaagggaatgtcgagga

SEQ ID NO: 401063 - DNA, 33 bp, Homo sapien
gtcacccagtttatggaatttctcttacagcag

SEQ ID NO: 401064 - DNA, 33 bp, Homo sapien
gtcacccagtttatggtatttctcttacagcag

SEQ ID NO: 401065 - DNA, 33 bp, Homo sapien
ttgttgaatcctatgcactaatattttgatctc

SEQ ID NO: 401066 - DNA, 33 bp, Homo sapien
ttgttgaatcctatgcgctaatattttgatctc

SEQ ID NO: 401067 - DNA, 33 bp, Homo sapien
cacctcttcagttccacaatgcctaaggttaat

SEQ ID NO: 401068 - DNA, 33 bp, Homo sapien
cacctcttcagttccagaatgcctaaggttaat

SEQ ID NO: 401069 - DNA, 33 bp, Homo sapien
gatcccacgtgtgctacataaagaaacatctaa

SEQ ID NO: 401070 - DNA, 33 bp, Homo sapien
gatcccacgtgtgctatataaagaaacatctaa

SEQ ID NO: 401071 - DNA, 33 bp, Homo sapien
agcttagaattcagcaacttaactagtgcagag

SEQ ID NO: 401072 - DNA, 33 bp, Homo sapien
agcttagaattcagcaccttaactagtgcagag

SEQ ID NO: 401073 - DNA, 33 bp, Homo sapien
gggcaacagaggaagaaaacgactcaaaagaaa

SEQ ID NO: 401074 - DNA, 33 bp, Homo sapien
gggcaacagaggaagacaacgactcaaaagaaa

SEQ ID NO: 401075 - DNA, 33 bp, Homo sapien
cacaggggtagacatacaggagtaattgtttct

SEQ ID NO: 401076 - DNA, 33 bp, Homo sapien
cacaggggtagacatataggagtaattgtttct

SEQ ID NO: 401077 - DNA, 33 bp, Homo sapien
cactcgctgttaaatacaaaactctgtgcttcg

SEQ ID NO: 401078 - DNA, 33 bp, Homo sapien
cactcgctgttaaatagaaaactctgtgcttcg

SEQ ID NO: 401079 - DNA, 33 bp, Homo sapien
agcagattgcattttccagctgaggctgtgact

SEQ ID NO: 401080 - DNA, 33 bp, Homo sapien
agcagattgcattttctagctgaggctgtgact

SEQ ID NO: 401081 - DNA, 33 bp, Homo sapien
ccgggcggtggtgccacaaacgcctgtagtccc

SEQ ID NO: 401082 - DNA, 33 bp, Homo sapien
ccgggcggtggtgccataaacgcctgtagtccc

SEQ ID NO: 401083 - DNA, 33 bp, Homo sapien; identical to SEQ ID NO: 401081

SEQ ID NO: 401084 - DNA, 33 bp, Homo sapien; identical to SEQ ID NO: 401082

SEQ ID NO: 401085 - DNA, 33 bp, Homo sapien
gggacctttcgaagcaacaaggccccacgcagg

SEQ ID NO: 401086 - DNA, 33 bp, Homo sapien
gggacctttcgaagcagcaaggccccacgcagg

SEQ ID NO: 401087 - DNA, 33 bp, Homo sapien
ttagaagctgtagaaacatgtctagacaggatg

SEQ ID NO: 401088 - DNA, 33 bp, Homo sapien
ttagaagctgtagaaatatgtctagacaggatg

SEQ ID NO: 401089 - DNA, 33 bp, Homo sapien
caagcttggatcaaagaattagattagacatta

SEQ ID NO: 401090 - DNA, 33 bp, Homo sapien
caagcttggatcaaagcattagattagacatta

SEQ ID NO: 401091 - DNA, 33 bp, Homo sapien
atagagaatgtcggcgaaaggcacacaaaaacg

SEQ ID NO: 401092 - DNA, 33 bp, Homo sapien
atagagaatgtcggcggaaggcacacaaaaacg

SEQ ID NO: 401093 - DNA, 33 bp, Homo sapien
gtttcctctaaagaagcattgcagccccaagta

SEQ ID NO: 401094 - DNA, 33 bp, Homo sapien
gtttcctctaaagaaggattgcagccccaagta

SEQ ID NO: 401095 - DNA, 33 bp, Homo sapien
atagtcagagaaacacaatgtatgcttccaaat

SEQ ID NO: 401096 - DNA, 33 bp, Homo sapien
atagtcagagaaacacgatgtatgcttccaaat

SEQ ID NO: 401097 - DNA, 33 bp, Homo sapien
ccaaatcagcaaacaccgaactattgtctctag

SEQ ID NO: 401098 - DNA, 33 bp, Homo sapien
ccaaatcagcaaacactgaactattgtctctag

SEQ ID NO: 401099 - DNA, 33 bp, Homo sapien
tggtgattctgatttgcatccttcatagaaagc

SEQ ID NO: 401100 - DNA, 33 bp, Homo sapien
tggtgattctgatttgtatccttcatagaaagc

SEQ ID NO: 401101 - DNA, 33 bp, Homo sapien
caagacagaggcaaacaaaacaaaagcagacac

SEQ ID NO: 401102 - DNA, 33 bp, Homo sapien
caagacagaggcaaacgaaacaaaagcagacac

SEQ ID NO: 401103 - DNA, 33 bp, Homo sapien
ccattcttatgcttagaagtcagagtgtctgaa

SEQ ID NO: 401104 - DNA, 33 bp, Homo sapien
ccattcttatgcttaggagtcagagtgtctgaa

SEQ ID NO: 401105 - DNA, 33 bp, Homo sapien
cacattctgtttcttcgatttgctatgtttatg

SEQ ID NO: 401106 - DNA, 33 bp, Homo sapien
cacattctgtttcttctatttgctatgtttatg

SEQ ID NO: 401107 - DNA, 33 bp, Homo sapien
gttatgcggtaagggacaacatcagccaacttc

SEQ ID NO: 401108 - DNA, 33 bp, Homo sapien
gttatgcggtaagggataacatcagccaacttc

SEQ ID NO: 401109 - DNA, 33 bp, Homo sapien
cccaaattgttggcaaccaaaacactctcttct

SEQ ID NO: 401110 - DNA, 33 bp, Homo sapien
cccaaattgttggcaatcaaaacactctcttct

SEQ ID NO: 401111 - DNA, 33 bp, Homo sapien
tcacacctgtaatgtcaacactttggaaggttg

SEQ ID NO: 401112 - DNA, 33 bp, Homo sapien
tcacacctgtaatgtccacactttggaaggttg

SEQ ID NO: 401113 - DNA, 33 bp, Homo sapien
tttcaccgcaggctaactgacatgggccagagt

SEQ ID NO: 401114 - DNA, 33 bp, Homo sapien
tttcaccgcaggctaattgacatgggccagagt

SEQ ID NO: 401115 - DNA, 33 bp, Homo sapien
ctctgtgatctgtaaactgttaaactttccaaa

SEQ ID NO: 401116 - DNA, 33 bp, Homo sapien
ctctgtgatctgtaaattgttaaactttccaaa

SEQ ID NO: 401117 - DNA, 33 bp, Homo sapien
ttcctgcaagaatgaacgtacagcattttctaa

SEQ ID NO: 401118 - DNA, 33 bp, Homo sapien
ttcctgcaagaatgaatgtacagcattttctaa

SEQ ID NO: 401119 - DNA, 33 bp, Homo sapien
tctttaactgacaagaaggaatcaaagtttcac

SEQ ID NO: 401120 - DNA, 33 bp, Homo sapien
tctttaactgacaagagggaatcaaagtttcac

SEQ ID NO: 401121 - DNA, 33 bp, Homo sapien
tgtgctcagttttatacggtacgagtctgcctg

SEQ ID NO: 401122 - DNA, 33 bp, Homo sapien
tgtgctcagttttatatggtacgagtctgcctg

SEQ ID NO: 401123 - DNA, 33 bp, Homo sapien
cagtaaatatgaaaaaaaaaatgcttgtcacac

SEQ ID NO: 401124 - DNA, 33 bp, Homo sapien
cagtaaatatgaaaaacaaaatgcttgtcacac

SEQ ID NO: 401125 - DNA, 33 bp, Homo sapien; identical to SEQ ID NO: 401123

SEQ ID NO: 401126 - DNA, 33 bp, Homo sapien; identical to SEQ ID NO: 401124

SEQ ID NO: 401127 - DNA, 33 bp, Homo sapien
agttgttcaattggtacataggacagcaatgga

SEQ ID NO: 401128 - DNA, 33 bp, Homo sapien
agttgttcaattggtatataggacagcaatgga

SEQ ID NO: 401129 - DNA, 33 bp, Homo sapien
tacttttataggttaagagattgtgtattcatg

SEQ ID NO: 401130 - DNA, 33 bp, Homo sapien
tacttttataggttaatagattgtgtattcatg

SEQ ID NO: 401131 - DNA, 33 bp, Homo sapien
gacttacagaaaggaactgatgaagaattgggc

SEQ ID NO: 401132 - DNA, 33 bp, Homo sapien
gacttacagaaaggaagtgatgaagaattgggc

SEQ ID NO: 401133 - DNA, 33 bp, Homo sapien
ggaaaggagtggaagaagagttggtagaacatt

SEQ ID NO: 401134 - DNA, 33 bp, Homo sapien
ggaaaggagtggaagaggagttggtagaacatt

SEQ ID NO: 401135 - DNA, 33 bp, Homo sapien
ccatttccctcaaacaactgtgtgagccacgcc

SEQ ID NO: 401136 - DNA, 33 bp, Homo sapien
ccatttccctcaaacacctgtgtgagccacgcc

SEQ ID NO: 401137 - DNA, 33 bp, Homo sapien
gctgagtatagaaaaaataagatgctgaccttg

SEQ ID NO: 401138 - DNA, 33 bp, Homo sapien
gctgagtatagaaaaagtaagatgctgaccttg

SEQ ID NO: 401139 - DNA, 33 bp, Homo sapien
ttaattcttctctacccgaaatctaattcatta

SEQ ID NO: 401140 - DNA, 33 bp, Homo sapien
ttaattcttctctacctgaaatctaattcatta

SEQ ID NO: 401141 - DNA, 33 bp, Homo sapien
aaatgctaatgcctccactgatccagaaacgga

SEQ ID NO: 401142 - DNA, 33 bp, Homo sapien
aaatgctaatgcctcctctgatccagaaacgga

SEQ ID NO: 401143 - DNA, 33 bp, Homo sapien
ggctttaccaagctagaacagatagcagggatg

SEQ ID NO: 401144 - DNA, 33 bp, Homo sapien
ggctttaccaagctaggacagatagcagggatg

SEQ ID NO: 401145 - DNA, 33 bp, Homo sapien
caggaaggctctgttccaggtctctctcctggc

SEQ ID NO: 401146 - DNA, 33 bp, Homo sapien
caggaaggctctgttctaggtctctctcctggc

SEQ ID NO: 401147 - DNA, 33 bp, Homo sapien
ttctctctcattccaaatgcctttgtgatacct

SEQ ID NO: 401148 - DNA, 33 bp, Homo sapien
ttctctctcattccaactgcctttgtgatacct

SEQ ID NO: 401149 - DNA, 33 bp, Homo sapien
gtactcccttctctaagttaatgtgcctgataa

SEQ ID NO: 401150 - DNA, 33 bp, Homo sapien
gtactcccttctctaatttaatgtgcctgataa

SEQ ID NO: 401151 - DNA, 33 bp, Homo sapien
gtatacataagaaatgaagcagctcatacaaga

SEQ ID NO: 401152 - DNA, 33 bp, Homo sapien
gtatacataagaaatgcagcagctcatacaaga

SEQ ID NO: 401153 - DNA, 33 bp, Homo sapien
attgatgttttacgtgaacataacctgaatctt

SEQ ID NO: 401154 - DNA, 33 bp, Homo sapien
attgatgttttacgtgcacataacctgaatctt

SEQ ID NO: 401155 - DNA, 33 bp, Homo sapien
gtgacaaaactctctacatttaatgactgattc

SEQ ID NO: 401156 - DNA, 33 bp, Homo sapien
gtgacaaaactctctagatttaatgactgattc

SEQ ID NO: 401157 - DNA, 33 bp, Homo sapien
ctcaattatgccagaaacgtaaaataaataaaa

SEQ ID NO: 401158 - DNA, 33 bp, Homo sapien
ctcaattatgccagaaccgtaaaataaataaaa

SEQ ID NO: 401159 - DNA, 33 bp, Homo sapien
ttccacattggccacaccacagcaaacctgaca

SEQ ID NO: 401160 - DNA, 33 bp, Homo sapien
ttccacattggccacatcacagcaaacctgaca

SEQ ID NO: 401161 - DNA, 33 bp, Homo sapien
ttcaacaagttagtgacgtagaataaatacaat

SEQ ID NO: 401162 - DNA, 33 bp, Homo sapien
ttcaacaagttagtgatgtagaataaatacaat

SEQ ID NO: 401163 - DNA, 33 bp, Homo sapien; identical to SEQ ID NO: 401161

SEQ ID NO: 401164 - DNA, 33 bp, Homo sapien; identical to SEQ ID NO: 401162

SEQ ID NO: 401165 - DNA, 33 bp, Homo sapien
agaactgccaccaatacaacgtcttgacgatgg

SEQ ID NO: 401166 - DNA, 33 bp, Homo sapien
agaactgccaccaatataacgtcttgacgatgg

SEQ ID NO: 401167 - DNA, 33 bp, Homo sapien
tcccacaattttactgaaaagttaatcaggtaa

SEQ ID NO: 401168 - DNA, 33 bp, Homo sapien
tcccacaattttactggaaagttaatcaggtaa

SEQ ID NO: 401169 - DNA, 33 bp, Homo sapien
ggttagagttttgctaaatctgtaacatcctga

SEQ ID NO: 401170 - DNA, 33 bp, Homo sapien
ggttagagttttgctacatctgtaacatcctga

SEQ ID NO: 401171 - DNA, 33 bp, Homo sapien
gtgactgatacattcccacaggttctgtgtatc

SEQ ID NO: 401172 - DNA, 33 bp, Homo sapien
gtgactgatacattcctacaggttctgtgtatc

SEQ ID NO: 401173 - DNA, 33 bp, Homo sapien
tatgcagcaactaaaggaaccacctagcatgat

SEQ ID NO: 401174 - DNA, 33 bp, Homo sapien
tatgcagcaactaaagtaaccacctagcatgat

SEQ ID NO: 401175 - DNA, 33 bp, Homo sapien
acacatctacccagcaagatcattataatcaca

SEQ ID NO: 401176 - DNA, 33 bp, Homo sapien
acacatctacccagcaggatcattataatcaca

SEQ ID NO: 401177 - DNA, 33 bp, Homo sapien
caggacttgtcttttaccatttatcattaaaat

SEQ ID NO: 401178 - DNA, 33 bp, Homo sapien
caggacttgtcttttatcatttatcattaaaat

SEQ ID NO: 401179 - DNA, 33 bp, Homo sapien
gaatatacgtaagaaacgcagtgtctcatagaa

SEQ ID NO: 401180 - DNA, 33 bp, Homo sapien
gaatatacgtaagaaatgcagtgtctcatagaa

SEQ ID NO: 401181 - DNA, 33 bp, Homo sapien
caatctagcagtttaaccccttactacaaaaca

SEQ ID NO: 401182 - DNA, 33 bp, Homo sapien
caatctagcagtttaatcccttactacaaaaca

SEQ ID NO: 401183 - DNA, 33 bp, Homo sapien
gtgaatgtgtgagactcactgagagatggtgtg

SEQ ID NO: 401184 - DNA, 33 bp, Homo sapien
gtgaatgtgtgagacttactgagagatggtgtg

SEQ ID NO: 401185 - DNA, 33 bp, Homo sapien
aacaaatatgccattgaattggaagactgttgt

SEQ ID NO: 401186 - DNA, 33 bp, Homo sapien
aacaaatatgccattgtattggaagactgttgt

SEQ ID NO: 401187 - DNA, 33 bp, Homo sapien
gttgtcaacctcaaaactccagagcactgacat

SEQ ID NO: 401188 - DNA, 33 bp, Homo sapien
gttgtcaacctcaaaattccagagcactgacat

SEQ ID NO: 401189 - DNA, 33 bp, Homo sapien
agatgtgactggaaaaagacagtaaagcttggc

SEQ ID NO: 401190 - DNA, 33 bp, Homo sapien
agatgtgactggaaaaggacagtaaagcttggc

SEQ ID NO: 401191 - DNA, 33 bp, Homo sapien
taccactatcgataccaaagacttttctatcgc

SEQ ID NO: 401192 - DNA, 33 bp, Homo sapien
taccactatcgatacccaagacttttctatcgc

SEQ ID NO: 401193 - DNA, 33 bp, Homo sapien
attaccagcttcacaaatcatttaaattctgcc

SEQ ID NO: 401194 - DNA, 33 bp, Homo sapien
attaccagcttcacaagtcatttaaattctgcc

SEQ ID NO: 401195 - DNA, 33 bp, Homo sapien
gaatgggccaacgaagcccagatagcaatgtct

SEQ ID NO: 401196 - DNA, 33 bp, Homo sapien
gaatgggccaacgaagtccagatagcaatgtct

SEQ ID NO: 401197 - DNA, 33 bp, Homo sapien; identical to SEQ ID NO: 401195

SEQ ID NO: 401198 - DNA, 33 bp, Homo sapien; identical to SEQ ID NO: 401196

SEQ ID NO: 401199 - DNA, 33 bp, Homo sapien
tggtgggcattattctaaactttcgtatccaag

SEQ ID NO: 401200 - DNA, 33 bp, Homo sapien
tggtgggcattattctgaactttcgtatccaag

SEQ ID NO: 401201 - DNA, 33 bp, Homo sapien
atgggaccatttctgaaaatctcggcccatctc

SEQ ID NO: 401202 - DNA, 33 bp, Homo sapien
atgggaccatttctgagaatctcggcccatctc

SEQ ID NO: 401203 - DNA, 33 bp, Homo sapien
gtccactgagaaattagaaactagggacaaggg

SEQ ID NO: 401204 - DNA, 33 bp, Homo sapien
gtccactgagaaattataaactagggacaaggg

SEQ ID NO: 401205 - DNA, 33 bp, Homo sapien
tctagatgtagctacaaggcagttcaataaaat

SEQ ID NO: 401206 - DNA, 33 bp, Homo sapien
tctagatgtagctacagggcagttcaataaaat

SEQ ID NO: 401207 - DNA, 33 bp, Homo sapien
gcctgcactctagaaaaagcgagactccgtctc

SEQ ID NO: 401208 - DNA, 33 bp, Homo sapien
gcctgcactctagaaagagcgagactccgtctc

SEQ ID NO: 401209 - DNA, 33 bp, Homo sapien
ttgcactaatcacctaccccggagtgtgagctg

SEQ ID NO: 401210 - DNA, 33 bp, Homo sapien
ttgcactaatcacctatcccggagtgtgagctg

SEQ ID NO: 401211 - DNA, 33 bp, Homo sapien
acctagaaatcaaaggaaagttacttagtagct

SEQ ID NO: 401212 - DNA, 33 bp, Homo sapien
acctagaaatcaaagggaagttacttagtagct

SEQ ID NO: 401213 - DNA, 33 bp, Homo sapien
tagtattgggcaaatcaagtcacttttatttgc

SEQ ID NO: 401214 - DNA, 33 bp, Homo sapien
tagtattgggcaaatcgagtcacttttatttgc

SEQ ID NO: 401215 - DNA, 33 bp, Homo sapien
gagattgctctccagaaaagacttgttaaacac

SEQ ID NO: 401216 - DNA, 33 bp, Homo sapien
gagattgctctccagagaagacttgttaaacac

SEQ ID NO: 401217 - DNA, 33 bp, Homo sapien
agggcagctcacaagacggcaaggatctgactg

SEQ ID NO: 401218 - DNA, 33 bp, Homo sapien
agggcagctcacaagatggcaaggatctgactg

SEQ ID NO: 401219 - DNA, 33 bp, Homo sapien
gtatctacagaacctcactgtgtttaactctgc

SEQ ID NO: 401220 - DNA, 33 bp, Homo sapien
gtatctacagaacctcgctgtgtttaactctgc

SEQ ID NO: 401221 - DNA, 33 bp, Homo sapien
gttttattctatttcaggtcttaagctactacg

SEQ ID NO: 401222 - DNA, 33 bp, Homo sapien
gttttattctatttcatgtcttaagctactacg

SEQ ID NO: 401223 - DNA, 33 bp, Homo sapien
aatatgagaaccagaaatataaaactcgtagaa

SEQ ID NO: 401224 - DNA, 33 bp, Homo sapien
aatatgagaaccagaagtataaaactcgtagaa

SEQ ID NO: 401225 - DNA, 33 bp, Homo sapien
ggtatgttttgccttaaatcgtctcacttcttt

SEQ ID NO: 401226 - DNA, 33 bp, Homo sapien
ggtatgttttgccttacatcgtctcacttcttt

SEQ ID NO: 401227 - DNA, 33 bp, Homo sapien
gactgtaatttagcaacctgacttgattcttgg

SEQ ID NO: 401228 - DNA, 33 bp, Homo sapien
gactgtaatttagcaatctgacttgattcttgg

SEQ ID NO: 401229 - DNA, 33 bp, Homo sapien
tgcatctcgcacacccaacatgatgcctggcac

SEQ ID NO: 401230 - DNA, 33 bp, Homo sapien
tgcatctcgcacacccgacatgatgcctggcac

SEQ ID NO: 401231 - DNA, 33 bp, Homo sapien
gacagcaagacagtgaaaaggattatttctata

SEQ ID NO: 401232 - DNA, 33 bp, Homo sapien
gacagcaagacagtgataaggattatttctata

SEQ ID NO: 401233 - DNA, 33 bp, Homo sapien
ggtgccacatctgggtaaacaaaaattcaacct

SEQ ID NO: 401234 - DNA, 33 bp, Homo sapien
ggtgccacatctgggtgaacaaaaattcaacct

SEQ ID NO: 401235 - DNA, 33 bp, Homo sapien
cagtttccaaaccttccatgtagtgattggaga

SEQ ID NO: 401236 - DNA, 33 bp, Homo sapien
cagtttccaaaccttcgatgtagtgattggaga

SEQ ID NO: 401237 - DNA, 33 bp, Homo sapien
ctggttagtgaggaaacgttaattcttacaaca

SEQ ID NO: 401238 - DNA, 33 bp, Homo sapien
ctggttagtgaggaaatgttaattcttacaaca

SEQ ID NO: 401239 - DNA, 33 bp, Homo sapien
ccgatgctgatggaaggcgaccttgcttttgat

SEQ ID NO: 401240 - DNA, 33 bp, Homo sapien
ccgatgctgatggaagtcgaccttgcttttgat

SEQ ID NO: 401241 - DNA, 33 bp, Homo sapien
cttgcctaagcctctgcatctgtcctcagcact

SEQ ID NO: 401242 - DNA, 33 bp, Homo sapien
cttgcctaagcctctgtatctgtcctcagcact

SEQ ID NO: 401243 - DNA, 33 bp, Homo sapien
aatgagtgtgacataactgatttagccattttc

SEQ ID NO: 401244 - DNA, 33 bp, Homo sapien
aatgagtgtgacataattgatttagccattttc

SEQ ID NO: 401245 - DNA, 33 bp, Homo sapien
aactaacccattcgcacatcccgagtccaagga

SEQ ID NO: 401246 - DNA, 33 bp, Homo sapien
aactaacccattcgcagatcccgagtccaagga

SEQ ID NO: 401247 - DNA, 33 bp, Homo sapien
gtcaggctggaagccaaacaactacatttccca

SEQ ID NO: 401248 - DNA, 33 bp, Homo sapien
gtcaggctggaagccagacaactacatttccca

SEQ ID NO: 401249 - DNA, 33 bp, Homo sapien
tcccaccttttccatacgcgaagactctccccc

SEQ ID NO: 401250 - DNA, 33 bp, Homo sapien
tcccaccttttccatatgcgaagactctccccc

SEQ ID NO: 401251 - DNA, 33 bp, Homo sapien
tttcattcgttgtacactcttttccaagttagc

SEQ ID NO: 401252 - DNA, 33 bp, Homo sapien
tttcattcgttgtacagtcttttccaagttagc

SEQ ID NO: 401253 - DNA, 33 bp, Homo sapien
caacaggccgccgcaaatgagagctacaatgtg

SEQ ID NO: 401254 - DNA, 33 bp, Homo sapien
caacaggccgccgcaagtgagagctacaatgtg

SEQ ID NO: 401255 - DNA, 33 bp, Homo sapien
gggccacaggctacgcaactgctgtcactgcgt

SEQ ID NO: 401256 - DNA, 33 bp, Homo sapien
gggccacaggctacgcgactgctgtcactgcgt

SEQ ID NO: 401257 - DNA, 33 bp, Homo sapien
atgcccattttacagacggataagcacaggtca

SEQ ID NO: 401258 - DNA, 33 bp, Homo sapien
atgcccattttacagatggataagcacaggtca

SEQ ID NO: 401259 - DNA, 33 bp, Homo sapien
cccctggcctgtcaccacatcaccgcacacact

SEQ ID NO: 401260 - DNA, 33 bp, Homo sapien
cccctggcctgtcaccgcatcaccgcacacact

SEQ ID NO: 401261 - DNA, 33 bp, Homo sapien
gcttcaggaaacaacaacgtccacagacagaag

SEQ ID NO: 401262 - DNA, 33 bp, Homo sapien
gcttcaggaaacaacagcgtccacagacagaag

SEQ ID NO: 401263 - DNA, 33 bp, Homo sapien
tgcgacagcctggaggcagtatcgtcaaggaca

SEQ ID NO: 401264 - DNA, 33 bp, Homo sapien
tgcgacagcctggagggagtatcgtcaaggaca

SEQ ID NO: 401265 - DNA, 33 bp, Homo sapien
taccaggacgccaccgacaacaaaccttctgct

SEQ ID NO: 401266 - DNA, 33 bp, Homo sapien
taccaggacgccaccggcaacaaaccttctgct

SEQ ID NO: 401267 - DNA, 33 bp, Homo sapien
ccgaagtccaggtgtacggatgggcccagagca

SEQ ID NO: 401268 - DNA, 33 bp, Homo sapien
ccgaagtccaggtgtagggatgggcccagagca

SEQ ID NO: 401269 - DNA, 33 bp, Homo sapien
tcccgactctgtttcaccagtcgctcccccagg

SEQ ID NO: 401270 - DNA, 33 bp, Homo sapien
tcccgactctgtttcatcagtcgctcccccagg

SEQ ID NO: 401271 - DNA, 33 bp, Homo sapien
agctacaggagaaggaccagcggccatgagagt

SEQ ID NO: 401272 - DNA, 33 bp, Homo sapien
agctacaggagaaggatcagcggccatgagagt

SEQ ID NO: 401273 - DNA, 33 bp, Homo sapien
cgtgtggggggaaagcaaggttagtgtggctgg

SEQ ID NO: 401274 - DNA, 33 bp, Homo sapien
cgtgtggggggaaagcgaggttagtgtggctgg

SEQ ID NO: 401275 - DNA, 33 bp, Homo sapien
ccccagagggctgtgacgaggtaacatcctgtg

SEQ ID NO: 401276 - DNA, 33 bp, Homo sapien
ccccagagggctgtgatgaggtaacatcctgtg

SEQ ID NO: 401277 - DNA, 33 bp, Homo sapien
tctatagggaaccaaaaatctgactctaacttc

SEQ ID NO: 401278 - DNA, 33 bp, Homo sapien
tctatagggaaccaaacatctgactctaacttc

SEQ ID NO: 401279 - DNA, 33 bp, Homo sapien
tttcctcaaaacaaagccatgattccaaatgag

SEQ ID NO: 401280 - DNA, 33 bp, Homo sapien
tttcctcaaaacaaaggcatgattccaaatgag

SEQ ID NO: 401281 - DNA, 33 bp, Homo sapien
ctgcgttcttgctgtaaccccggaccacagacc

SEQ ID NO: 401282 - DNA, 33 bp, Homo sapien
ctgcgttcttgctgtacccccggaccacagacc

SEQ ID NO: 401283 - DNA, 33 bp, Homo sapien
gtacacatatgtacacaggcatggacacacaca

SEQ ID NO: 401284 - DNA, 33 bp, Homo sapien
gtacacatatgtacacgggcatggacacacaca

SEQ ID NO: 401285 - DNA, 33 bp, Homo sapien
ggagacaccacagtcactccaagtctggcttgg

SEQ ID NO: 401286 - DNA, 33 bp, Homo sapien
ggagacaccacagtcattccaagtctggcttgg

SEQ ID NO: 401287 - DNA, 33 bp, Homo sapien
ggtggagactattccaaaggtcagggaagactg

SEQ ID NO: 401288 - DNA, 33 bp, Homo sapien
ggtggagactattccagaggtcagggaagactg

SEQ ID NO: 401289 - DNA, 33 bp, Homo sapien
caggcatgatgtcagcacatagtagaggctggg

SEQ ID NO: 401290 - DNA, 33 bp, Homo sapien
caggcatgatgtcagcgcatagtagaggctggg

SEQ ID NO: 401291 - DNA, 33 bp, Homo sapien
tacttggcttctgctcactgcatcacagaagtc

SEQ ID NO: 401292 - DNA, 33 bp, Homo sapien
tacttggcttctgctcgctgcatcacagaagtc

SEQ ID NO: 401293 - DNA, 33 bp, Homo sapien
acagaacctctctgaaactctgcagctcatcca

SEQ ID NO: 401294 - DNA, 33 bp, Homo sapien
acagaacctctctgaacctctgcagctcatcca

SEQ ID NO: 401295 - DNA, 33 bp, Homo sapien
tgccccagggtgcccaacacgtctttgcctccc

SEQ ID NO: 401296 - DNA, 33 bp, Homo sapien
tgccccagggtgcccagcacgtctttgcctccc

SEQ ID NO: 401297 - DNA, 33 bp, Homo sapien
aatcggcactcaaaagaacaggttcaagggccc

SEQ ID NO: 401298 - DNA, 33 bp, Homo sapien
aatcggcactcaaaagcacaggttcaagggccc

SEQ ID NO: 401299 - DNA, 33 bp, Homo sapien
cccacatcgatgtcgacctggtccagcgggatg

SEQ ID NO: 401300 - DNA, 33 bp, Homo sapien
cccacatcgatgtcgatctggtccagcgggatg

SEQ ID NO: 401301 - DNA, 33 bp, Homo sapien
ctgttatgaataatacggctattaacactggca

SEQ ID NO: 401302 - DNA, 33 bp, Homo sapien
ctgttatgaataatactgctattaacactggca

SEQ ID NO: 401303 - DNA, 33 bp, Homo sapien
ggaagggagactgatacgtgtgaggaatatgac

SEQ ID NO: 401304 - DNA, 33 bp, Homo sapien
ggaagggagactgatatgtgtgaggaatatgac

SEQ ID NO: 401305 - DNA, 33 bp, Homo sapien
cactgcctggggatccaaagcaggactcccttc

SEQ ID NO: 401306 - DNA, 33 bp, Homo sapien
cactgcctggggatccgaagcaggactcccttc

SEQ ID NO: 401307 - DNA, 33 bp, Homo sapien
tcagcgtgcgcacatacctctgagtggatgtga

SEQ ID NO: 401308 - DNA, 33 bp, Homo sapien
tcagcgtgcgcacatatctctgagtggatgtga

SEQ ID NO: 401309 - DNA, 33 bp, Homo sapien
aatctgacagatcaaaatgagcagttccaactc

SEQ ID NO: 401310 - DNA, 33 bp, Homo sapien
aatctgacagatcaaagtgagcagttccaactc

SEQ ID NO: 401311 - DNA, 33 bp, Homo sapien
caggataagctaaagaccccagagcaagctttt

SEQ ID NO: 401312 - DNA, 33 bp, Homo sapien
caggataagctaaagatcccagagcaagctttt

SEQ ID NO: 401313 - DNA, 33 bp, Homo sapien
cacatgcttatcaaggaatctttcagccaggag

SEQ ID NO: 401314 - DNA, 33 bp, Homo sapien
cacatgcttatcaaggtatctttcagccaggag

SEQ ID NO: 401315 - DNA, 33 bp, Homo sapien
aacatctccacgataccagttaacacttttctt

SEQ ID NO: 401316 - DNA, 33 bp, Homo sapien
aacatctccacgatactagttaacacttttctt

SEQ ID NO: 401317 - DNA, 33 bp, Homo sapien
aattgctttattgaagcatagttgtctaaggtt

SEQ ID NO: 401318 - DNA, 33 bp, Homo sapien
aattgctttattgaagtatagttgtctaaggtt

SEQ ID NO: 401319 - DNA, 33 bp, Homo sapien
ctgaatccatctataacctgtaaacccctgctt

SEQ ID NO: 401320 - DNA, 33 bp, Homo sapien
ctgaatccatctataatctgtaaacccctgctt

SEQ ID NO: 401321 - DNA, 33 bp, Homo sapien
cagaagacaaatgcacaaggcttgaagccggag

SEQ ID NO: 401322 - DNA, 33 bp, Homo sapien
cagaagacaaatgcacgaggcttgaagccggag

SEQ ID NO: 401323 - DNA, 33 bp, Homo sapien
cttccctatgaattcacggcataataggtgtta

SEQ ID NO: 401324 - DNA, 33 bp, Homo sapien
cttccctatgaattcatggcataataggtgtta

SEQ ID NO: 401325 - DNA, 33 bp, Homo sapien
ggactggaagtcgtagcacttttgaactgtagg

SEQ ID NO: 401326 - DNA, 33 bp, Homo sapien
ggactggaagtcgtagtacttttgaactgtagg

SEQ ID NO: 401327 - DNA, 33 bp, Homo sapien
gaatgccagcatttagaaagaggccgctggaga

SEQ ID NO: 401328 - DNA, 33 bp, Homo sapien
gaatgccagcatttaggaagaggccgctggaga

SEQ ID NO: 401329 - DNA, 33 bp, Homo sapien
cctggccactgtcacagaagtcaaggagtgtcc

SEQ ID NO: 401330 - DNA, 33 bp, Homo sapien
cctggccactgtcacataagtcaaggagtgtcc

SEQ ID NO: 401331 - DNA, 33 bp, Homo sapien
gaaaaatggtacaaaacgcataaacttctagag

SEQ ID NO: 401332 - DNA, 33 bp, Homo sapien
gaaaaatggtacaaaatgcataaacttctagag

SEQ ID NO: 401333 - DNA, 33 bp, Homo sapien
tgacctcacggatttacatcttaagagaggaat

SEQ ID NO: 401334 - DNA, 33 bp, Homo sapien
tgacctcacggatttatatcttaagagaggaat

SEQ ID NO: 401335 - DNA, 33 bp, Homo sapien
cctctgccttgagtccgccactccagggtctca

SEQ ID NO: 401336 - DNA, 33 bp, Homo sapien
cctctgccttgagtcctccactccagggtctca

SEQ ID NO: 401337 - DNA, 33 bp, Homo sapien
tcagttggaaatatataaaaaaattcaagctat

SEQ ID NO: 401338 - DNA, 33 bp, Homo sapien
tcagttggaaatatattaaaaaattcaagctat

SEQ ID NO: 401339 - DNA, 33 bp, Homo sapien
tctgagtctgtaattacgtagctgactctctga

SEQ ID NO: 401340 - DNA, 33 bp, Homo sapien
tctgagtctgtaattatgtagctgactctctga

SEQ ID NO: 401341 - DNA, 33 bp, Homo sapien
taaggctatatatcacacctaagagagcctgag

SEQ ID NO: 401342 - DNA, 33 bp, Homo sapien
taaggctatatatcacgcctaagagagcctgag

SEQ ID NO: 401343 - DNA, 33 bp, Homo sapien
tcttcctggtcttgataagttaggtggcaaatt

SEQ ID NO: 401344 - DNA, 33 bp, Homo sapien
tcttcctggtcttgatgagttaggtggcaaatt

SEQ ID NO: 401345 - DNA, 33 bp, Homo sapien
aagtatgcacttaccacgccagttttagtacca

SEQ ID NO: 401346 - DNA, 33 bp, Homo sapien
aagtatgcacttaccatgccagttttagtacca

SEQ ID NO: 401347 - DNA, 33 bp, Homo sapien
ttggtttttcactataagcctcaacaggctcgg

SEQ ID NO: 401348 - DNA, 33 bp, Homo sapien
ttggtttttcactataggcctcaacaggctcgg

SEQ ID NO: 401349 - DNA, 33 bp, Homo sapien
tcggatttcattcagggacagaaagtgtgagca

SEQ ID NO: 401350 - DNA, 33 bp, Homo sapien
tcggatttcattcaggtacagaaagtgtgagca

SEQ ID NO: 401351 - DNA, 33 bp, Homo sapien
aaagtaagcactcaaaatcctcgtctccctggt

SEQ ID NO: 401352 - DNA, 33 bp, Homo sapien
aaagtaagcactcaaactcctcgtctccctggt

SEQ ID NO: 401353 - DNA, 33 bp, Homo sapien; identical to SEQ ID NO: 401351

SEQ ID NO: 401354 - DNA, 33 bp, Homo sapien; identical to SEQ ID NO: 401352

SEQ ID NO: 401355 - DNA, 33 bp, Homo sapien
agagtattggttaccacatacgggaaagagaaa

SEQ ID NO: 401356 - DNA, 33 bp, Homo sapien
agagtattggttaccatatacgggaaagagaaa

SEQ ID NO: 401357 - DNA, 33 bp, Homo sapien
aagcagaagaccagaaaaccaatcaagaaggtc

SEQ ID NO: 401358 - DNA, 33 bp, Homo sapien
aagcagaagaccagaagaccaatcaagaaggtc

SEQ ID NO: 401359 - DNA, 33 bp, Homo sapien
cagagcgggcactttacgtaaggataaacctgg

SEQ ID NO: 401360 - DNA, 33 bp, Homo sapien
cagagcgggcactttatgtaaggataaacctgg

SEQ ID NO: 401361 - DNA, 33 bp, Homo sapien
aaactacagaattggcgaagatactcacaagcg

SEQ ID NO: 401362 - DNA, 33 bp, Homo sapien
aaactacagaattggctaagatactcacaagcg

SEQ ID NO: 401363 - DNA, 33 bp, Homo sapien
gaatcgaaacactttacggtgccagaaagttgg

SEQ ID NO: 401364 - DNA, 33 bp, Homo sapien
gaatcgaaacactttatggtgccagaaagttgg

SEQ ID NO: 401365 - DNA, 33 bp, Homo sapien
taggatgcagaggtcgacattttccatatcata

SEQ ID NO: 401366 - DNA, 33 bp, Homo sapien
taggatgcagaggtcggcattttccatatcata

SEQ ID NO: 401367 - DNA, 33 bp, Homo sapien; identical to SEQ ID NO: 401365

SEQ ID NO: 401368 - DNA, 33 bp, Homo sapien; identical to SEQ ID NO: 401366

SEQ ID NO: 401369 - DNA, 33 bp, Homo sapien
tgctgaaggatggagcaaatatagtgagcagac

SEQ ID NO: 401370 - DNA, 33 bp, Homo sapien
tgctgaaggatggagcgaatatagtgagcagac

SEQ ID NO: 401371 - DNA, 33 bp, Homo sapien
actcctcttcagatgccattttggaccactccg

SEQ ID NO: 401372 - DNA, 33 bp, Homo sapien
actcctcttcagatgcgattttggaccactccg

SEQ ID NO: 401373 - DNA, 33 bp, Homo sapien
gaaacagtcatgacaccgatttccaggaagaga

SEQ ID NO: 401374 - DNA, 33 bp, Homo sapien
gaaacagtcatgacacggatttccaggaagaga

SEQ ID NO: 401375 - DNA, 33 bp, Homo sapien
atcagctttcaagtgcaccagggcttttctttt

SEQ ID NO: 401376 - DNA, 33 bp, Homo sapien
atcagctttcaagtgccccagggcttttctttt

SEQ ID NO: 401377 - DNA, 33 bp, Homo sapien
ttggaaactaatgcccgcagggagatgtccacc

SEQ ID NO: 401378 - DNA, 33 bp, Homo sapien
ttggaaactaatgccctcagggagatgtccacc

SEQ ID NO: 401379 - DNA, 33 bp, Homo sapien; identical to SEQ ID NO: 401377

SEQ ID NO: 401380 - DNA, 33 bp, Homo sapien; identical to SEQ ID NO: 401378

SEQ ID NO: 401381 - DNA, 33 bp, Homo sapien
agcgtgtatgaccatacagcatgtgcacccagg

SEQ ID NO: 401382 - DNA, 33 bp, Homo sapien
agcgtgtatgaccatatagcatgtgcacccagg

SEQ ID NO: 401383 - DNA, 33 bp, Homo sapien
gagttttgttgtaagacgccaattcataagggc

SEQ ID NO: 401384 - DNA, 33 bp, Homo sapien
gagttttgttgtaagatgccaattcataagggc

SEQ ID NO: 401385 - DNA, 33 bp, Homo sapien
gacatgagagggagaacttctagggtagggatc

SEQ ID NO: 401386 - DNA, 33 bp, Homo sapien
gacatgagagggagaatttctagggtagggatc

SEQ ID NO: 401387 - DNA, 33 bp, Homo sapien
aaggtgttaaaatcccaacattcctgactcctt

SEQ ID NO: 401388 - DNA, 33 bp, Homo sapien
aaggtgttaaaatcccgacattcctgactcctt

SEQ ID NO: 401389 - DNA, 33 bp, Homo sapien
gctcgttaagacaaagaattttatagcagttgc

SEQ ID NO: 401390 - DNA, 33 bp, Homo sapien
gctcgttaagacaaagcattttatagcagttgc

SEQ ID NO: 401391 - DNA, 33 bp, Homo sapien
cagttctgtgagccaaaccccaaagcggcagcg

SEQ ID NO: 401392 - DNA, 33 bp, Homo sapien
cagttctgtgagccaagccccaaagcggcagcg

SEQ ID NO: 401393 - DNA, 33 bp, Homo sapien
gaatggtacctctttaaccatcagttgggcaca

SEQ ID NO: 401394 - DNA, 33 bp, Homo sapien
gaatggtacctctttagccatcagttgggcaca

SEQ ID NO: 401395 - DNA, 33 bp, Homo sapien
gtagcaaagtaaactacgaatgctgtttgtccg

SEQ ID NO: 401396 - DNA, 33 bp, Homo sapien
gtagcaaagtaaactatgaatgctgtttgtccg

SEQ ID NO: 401397 - DNA, 33 bp, Homo sapien; identical to SEQ ID NO: 401395

SEQ ID NO: 401398 - DNA, 33 bp, Homo sapien; identical to SEQ ID NO: 401396

SEQ ID NO: 401399 - DNA, 33 bp, Homo sapien
gaacaattgtaatcaaacaattcaagcactact

SEQ ID NO: 401400 - DNA, 33 bp, Homo sapien
gaacaattgtaatcaagcaattcaagcactact

SEQ ID NO: 401401 - DNA, 33 bp, Homo sapien
gaattttcatgtgatacgaattcagcctaggtg

SEQ ID NO: 401402 - DNA, 33 bp, Homo sapien
gaattttcatgtgatatgaattcagcctaggtg

SEQ ID NO: 401403 - DNA, 33 bp, Homo sapien
tttatactttttgacccagtaggacatcatgtg

SEQ ID NO: 401404 - DNA, 33 bp, Homo sapien
tttatactttttgacctagtaggacatcatgtg

SEQ ID NO: 401405 - DNA, 33 bp, Homo sapien
tttgcttgacgttactaaagttacctccagcag

SEQ ID NO: 401406 - DNA, 33 bp, Homo sapien
tttgcttgacgttactcaagttacctccagcag

SEQ ID NO: 401407 - DNA, 33 bp, Homo sapien
ttgatcacattctgaacccagtggtgagtttgg

SEQ ID NO: 401408 - DNA, 33 bp, Homo sapien
ttgatcacattctgaatccagtggtgagtttgg

SEQ ID NO: 401409 - DNA, 33 bp, Homo sapien
taaaatttttcctgaccacaactgcatgttata

SEQ ID NO: 401410 - DNA, 33 bp, Homo sapien
taaaatttttcctgactacaactgcatgttata

SEQ ID NO: 401411 - DNA, 33 bp, Homo sapien
taacttgtcttcaccaaccttcactaaccccaa

SEQ ID NO: 401412 - DNA, 33 bp, Homo sapien
taacttgtcttcaccatccttcactaaccccaa

SEQ ID NO: 401413 - DNA, 33 bp, Homo sapien
tataatcttatgagaccgccatcgtaacatgat

SEQ ID NO: 401414 - DNA, 33 bp, Homo sapien
tataatcttatgagactgccatcgtaacatgat

SEQ ID NO: 401415 - DNA, 33 bp, Homo sapien
tttcttgcaaaattaacctttgggctgtacttc

SEQ ID NO: 401416 - DNA, 33 bp, Homo sapien
tttcttgcaaaattaatctttgggctgtacttc

SEQ ID NO: 401417 - DNA, 33 bp, Homo sapien
cgatttagtgagtatcaatctggtatccatttc

SEQ ID NO: 401418 - DNA, 33 bp, Homo sapien
cgatttagtgagtatccatctggtatccatttc

SEQ ID NO: 401419 - DNA, 33 bp, Homo sapien
ttgtggaggcagggaaattccaaatcgaggtgt

SEQ ID NO: 401420 - DNA, 33 bp, Homo sapien
ttgtggaggcagggaagttccaaatcgaggtgt

SEQ ID NO: 401421 - DNA, 33 bp, Homo sapien
ttccttttagcagatgacacttacacacacaca

SEQ ID NO: 401422 - DNA, 33 bp, Homo sapien
ttccttttagcagatgccacttacacacacaca

SEQ ID NO: 401423 - DNA, 33 bp, Homo sapien; identical to SEQ ID NO: 401421

SEQ ID NO: 401424 - DNA, 33 bp, Homo sapien; identical to SEQ ID NO: 401422

SEQ ID NO: 401425 - DNA, 33 bp, Homo sapien
cctggaccatcagggacgtttccatagcagcat

SEQ ID NO: 401426 - DNA, 33 bp, Homo sapien
cctggaccatcagggatgtttccatagcagcat

SEQ ID NO: 401427 - DNA, 33 bp, Homo sapien
cttgaatacacatccgaaataaattgaaaaata

SEQ ID NO: 401428 - DNA, 33 bp, Homo sapien
cttgaatacacatccgtaataaattgaaaaata

SEQ ID NO: 401429 - DNA, 33 bp, Homo sapien
agaatcattacatcaaataaagtcgtcataact

SEQ ID NO: 401430 - DNA, 33 bp, Homo sapien
agaatcattacatcaactaaagtcgtcataact

SEQ ID NO: 401431 - DNA, 33 bp, Homo sapien
gaaagtgtgtgtagagaaagcatattttgtaat

SEQ ID NO: 401432 - DNA, 33 bp, Homo sapien
gaaagtgtgtgtagagcaagcatattttgtaat

SEQ ID NO: 401433 - DNA, 33 bp, Homo sapien
tcagctacattgtgtaaggaaatcctctccacg

SEQ ID NO: 401434 - DNA, 33 bp, Homo sapien
tcagctacattgtgtagggaaatcctctccacg

SEQ ID NO: 401435 - DNA, 33 bp, Homo sapien
tgagaccagttaatagccctccagtggcctcta

SEQ ID NO: 401436 - DNA, 33 bp, Homo sapien
tgagaccagttaatagtcctccagtggcctcta

SEQ ID NO: 401437 - DNA, 33 bp, Homo sapien; identical to SEQ ID NO: 401435

SEQ ID NO: 401438 - DNA, 33 bp, Homo sapien; identical to SEQ ID NO: 401436

SEQ ID NO: 401439 - DNA, 33 bp, Homo sapien
caagtcagctctgacaaaaagctagttgacatt

SEQ ID NO: 401440 - DNA, 33 bp, Homo sapien
caagtcagctctgacagaaagctagttgacatt

SEQ ID NO: 401441 - DNA, 33 bp, Homo sapien
tttagcttttataccacgcttgttcgttggaac

SEQ ID NO: 401442 - DNA, 33 bp, Homo sapien
tttagcttttataccatgcttgttcgttggaac

SEQ ID NO: 401443 - DNA, 33 bp, Homo sapien
cagctgttgtctttccaacctatgtttgtcttc

SEQ ID NO: 401444 - DNA, 33 bp, Homo sapien
cagctgttgtctttccgacctatgtttgtcttc

SEQ ID NO: 401445 - DNA, 33 bp, Homo sapien
aaccgtaactgtacatcagacagaactgcccaa

SEQ ID NO: 401446 - DNA, 33 bp, Homo sapien
aaccgtaactgtacatgagacagaactgcccaa

SEQ ID NO: 401447 - DNA, 33 bp, Homo sapien
tctttgctggggcctacgtcaaaaatgctaatt

SEQ ID NO: 401448 - DNA, 33 bp, Homo sapien
tctttgctggggcctatgtcaaaaatgctaatt

SEQ ID NO: 401449 - DNA, 33 bp, Homo sapien
acatgagttaatgtaaaccccgaggtcacccat

SEQ ID NO: 401450 - DNA, 33 bp, Homo sapien
acatgagttaatgtaacccccgaggtcacccat

SEQ ID NO: 401451 - DNA, 33 bp, Homo sapien
tgcctttgctcacttcccaacaactttagcatt

SEQ ID NO: 401452 - DNA, 33 bp, Homo sapien
tgcctttgctcacttctcaacaactttagcatt

SEQ ID NO: 401453 - DNA, 33 bp, Homo sapien
caatgtgccaatggttcaacacatattctatta

SEQ ID NO: 401454 - DNA, 33 bp, Homo sapien
caatgtgccaatggtttaacacatattctatta

SEQ ID NO: 401455 - DNA, 33 bp, Homo sapien
ccattgggtggtcagagaggtccgtaaggaatt

SEQ ID NO: 401456 - DNA, 33 bp, Homo sapien
ccattgggtggtcagataggtccgtaaggaatt

SEQ ID NO: 401457 - DNA, 33 bp, Homo sapien
gctgttggttggaaggcaaagtggtgcagccca

SEQ ID NO: 401458 - DNA, 33 bp, Homo sapien
gctgttggttggaaggtaaagtggtgcagccca

SEQ ID NO: 401459 - DNA, 33 bp, Homo sapien
ttcaaactatgatttcaaaacagataatttgac

SEQ ID NO: 401460 - DNA, 33 bp, Homo sapien
ttcaaactatgatttcgaaacagataatttgac

SEQ ID NO: 401461 - DNA, 33 bp, Homo sapien
aaaaggatggagaaaactgattggaaaaaagta

SEQ ID NO: 401462 - DNA, 33 bp, Homo sapien
aaaaggatggagaaaattgattggaaaaaagta

SEQ ID NO: 401463 - DNA, 33 bp, Homo sapien
tgagataacactgtcaacttgaaaacatcatta

SEQ ID NO: 401464 - DNA, 33 bp, Homo sapien
tgagataacactgtcaccttgaaaacatcatta

SEQ ID NO: 401465 - DNA, 33 bp, Homo sapien
ttatgccacttaataaatcccttcagcttgagg

SEQ ID NO: 401466 - DNA, 33 bp, Homo sapien
ttatgccacttaataattcccttcagcttgagg

SEQ ID NO: 401467 - DNA, 33 bp, Homo sapien
tgccctctcaccatgcaatgccctctcaccatg

SEQ ID NO: 401468 - DNA, 33 bp, Homo sapien
tgccctctcaccatgcgatgccctctcaccatg

SEQ ID NO: 401469 - DNA, 33 bp, Homo sapien
ttagaagttccaaggcaacagtcactttcaaaa

SEQ ID NO: 401470 - DNA, 33 bp, Homo sapien
ttagaagttccaaggcgacagtcactttcaaaa

SEQ ID NO: 401471 - DNA, 33 bp, Homo sapien
atgtcaaggcagtcagcctacctaagcagagaa

SEQ ID NO: 401472 - DNA, 33 bp, Homo sapien
atgtcaaggcagtcagtctacctaagcagagaa

SEQ ID NO: 401473 - DNA, 33 bp, Homo sapien
caggaattcttcaaagcagcttggactccagca

SEQ ID NO: 401474 - DNA, 33 bp, Homo sapien
caggaattcttcaaagtagcttggactccagca

SEQ ID NO: 401475 - DNA, 33 bp, Homo sapien
tgatatttcattctggaatggagagtgtgagca

SEQ ID NO: 401476 - DNA, 33 bp, Homo sapien
tgatatttcattctgggatggagagtgtgagca

SEQ ID NO: 401477 - DNA, 33 bp, Homo sapien
aactagaaacttgctacctgtgagtatgctttg

SEQ ID NO: 401478 - DNA, 33 bp, Homo sapien
aactagaaacttgctatctgtgagtatgctttg

SEQ ID NO: 401479 - DNA, 33 bp, Homo sapien
cacacttggggataataaacatggtcgccttcc

SEQ ID NO: 401480 - DNA, 33 bp, Homo sapien
cacacttggggataatcaacatggtcgccttcc

SEQ ID NO: 401481 - DNA, 33 bp, Homo sapien
acaagcaccctgagaaatgtgaaacctctccct

SEQ ID NO: 401482 - DNA, 33 bp, Homo sapien
acaagcaccctgagaattgtgaaacctctccct

SEQ ID NO: 401483 - DNA, 33 bp, Homo sapien
ttaactcaggcctaccacaatccctgaattgca

SEQ ID NO: 401484 - DNA, 33 bp, Homo sapien
ttaactcaggcctaccgcaatccctgaattgca

SEQ ID NO: 401485 - DNA, 33 bp, Homo sapien
cccagtttaagtgtgaagtcagaaagctcctgt

SEQ ID NO: 401486 - DNA, 33 bp, Homo sapien
cccagtttaagtgtgacgtcagaaagctcctgt

SEQ ID NO: 401487 - DNA, 33 bp, Homo sapien
ttatcaagtcaagacaaatctgaattccagtgg

SEQ ID NO: 401488 - DNA, 33 bp, Homo sapien
ttatcaagtcaagacatatctgaattccagtgg

SEQ ID NO: 401489 - DNA, 33 bp, Homo sapien
ttttaacaatgctttacagttcacaaattgttt

SEQ ID NO: 401490 - DNA, 33 bp, Homo sapien
ttttaacaatgctttatagttcacaaattgttt

SEQ ID NO: 401491 - DNA, 33 bp, Homo sapien
cagaacttccaggtgacgtctttaatctgacga

SEQ ID NO: 401492 - DNA, 33 bp, Homo sapien
cagaacttccaggtgatgtctttaatctgacga

SEQ ID NO: 401493 - DNA, 33 bp, Homo sapien
gaatgtaaagtgaagaataagtccctcctcctg

SEQ ID NO: 401494 - DNA, 33 bp, Homo sapien
gaatgtaaagtgaagagtaagtccctcctcctg

SEQ ID NO: 401495 - DNA, 33 bp, Homo sapien
ccctgtgctattgggacagtggagttatgcctc

SEQ ID NO: 401496 - DNA, 33 bp, Homo sapien
ccctgtgctattgggatagtggagttatgcctc

SEQ ID NO: 401497 - DNA, 33 bp, Homo sapien
ttattgccttttctcaggttattttgaaattta

SEQ ID NO: 401498 - DNA, 33 bp, Homo sapien
ttattgccttttctcatgttattttgaaattta

SEQ ID NO: 401499 - DNA, 33 bp, Homo sapien
ttcctcttgagtgttacgttctcttctcttcat

SEQ ID NO: 401500 - DNA, 33 bp, Homo sapien
ttcctcttgagtgttatgttctcttctcttcat

SEQ ID NO: 401501 - DNA, 33 bp, Homo sapien
tgaatatttccctttacggtcctcttgaacact

SEQ ID NO: 401502 - DNA, 33 bp, Homo sapien
tgaatatttccctttatggtcctcttgaacact

SEQ ID NO: 401503 - DNA, 33 bp, Homo sapien
ctttcatgttgcaaacaaagagcaaaagctgag

SEQ ID NO: 401504 - DNA, 33 bp, Homo sapien
ctttcatgttgcaaacgaagagcaaaagctgag

SEQ ID NO: 401505 - DNA, 33 bp, Homo sapien
agttttcaaacagaaacttaggagggagaatca

SEQ ID NO: 401506 - DNA, 33 bp, Homo sapien
agttttcaaacagaaatttaggagggagaatca

SEQ ID NO: 401507 - DNA, 33 bp, Homo sapien
cagttacagttctaacacagttatttaagagca

SEQ ID NO: 401508 - DNA, 33 bp, Homo sapien
cagttacagttctaacgcagttatttaagagca

SEQ ID NO: 401509 - DNA, 33 bp, Homo sapien
cttctgggcaaggagcaatttgctgacgtggac

SEQ ID NO: 401510 - DNA, 33 bp, Homo sapien
cttctgggcaaggagcgatttgctgacgtggac

SEQ ID NO: 401511 - DNA, 33 bp, Homo sapien
tgaccatcacccttcactaggacatggatgtcc

SEQ ID NO: 401512 - DNA, 33 bp, Homo sapien
tgaccatcacccttcagtaggacatggatgtcc

SEQ ID NO: 401513 - DNA, 33 bp, Homo sapien
tgaaacctttctttctcacttgagttcatgtgc

SEQ ID NO: 401514 - DNA, 33 bp, Homo sapien
tgaaacctttctttctgacttgagttcatgtgc

SEQ ID NO: 401515 - DNA, 33 bp, Homo sapien
agataattgttcaggccgatattctttaagaca

SEQ ID NO: 401516 - DNA, 33 bp, Homo sapien
agataattgttcaggctgatattctttaagaca

SEQ ID NO: 401517 - DNA, 33 bp, Homo sapien
tcagtaagtaagagaaatgaaatggctactcca

SEQ ID NO: 401518 - DNA, 33 bp, Homo sapien
tcagtaagtaagagaagtgaaatggctactcca

SEQ ID NO: 401519 - DNA, 33 bp, Homo sapien
tggggaaaggaagtcaagctggattttcaccca

SEQ ID NO: 401520 - DNA, 33 bp, Homo sapien
tggggaaaggaagtcaggctggattttcaccca

SEQ ID NO: 401521 - DNA, 33 bp, Homo sapien
ctgcagaatatccaaacaatagagatgtgtata

SEQ ID NO: 401522 - DNA, 33 bp, Homo sapien
ctgcagaatatccaaataatagagatgtgtata

SEQ ID NO: 401523 - DNA, 33 bp, Homo sapien
tgcagcaaacattacaaatttttttaaatgctg

SEQ ID NO: 401524 - DNA, 33 bp, Homo sapien
tgcagcaaacattacatatttttttaaatgctg

SEQ ID NO: 401525 - DNA, 33 bp, Homo sapien
taaggttcagccatcaagaggcaacagcaaggg

SEQ ID NO: 401526 - DNA, 33 bp, Homo sapien
taaggttcagccatcaggaggcaacagcaaggg

SEQ ID NO: 401527 - DNA, 33 bp, Homo sapien
attgtaactgagtagccccgtttttctaagaga

SEQ ID NO: 401528 - DNA, 33 bp, Homo sapien
attgtaactgagtagctccgtttttctaagaga

SEQ ID NO: 401529 - DNA, 33 bp, Homo sapien
cacaaataaagaacacaccatagcagtagggaa

SEQ ID NO: 401530 - DNA, 33 bp, Homo sapien
cacaaataaagaacacgccatagcagtagggaa

SEQ ID NO: 401531 - DNA, 33 bp, Homo sapien
aaagctgatgaaaggcaattagactagggagag

SEQ ID NO: 401532 - DNA, 33 bp, Homo sapien
aaagctgatgaaaggccattagactagggagag

SEQ ID NO: 401533 - DNA, 33 bp, Homo sapien
cattcgcttgaaagagacctgttgctttaaatg

SEQ ID NO: 401534 - DNA, 33 bp, Homo sapien
cattcgcttgaaagagtcctgttgctttaaatg

SEQ ID NO: 401535 - DNA, 33 bp, Homo sapien
gagcatataccttgcccctgacccagcagtcca

SEQ ID NO: 401536 - DNA, 33 bp, Homo sapien
gagcatataccttgcctctgacccagcagtcca

SEQ ID NO: 401537 - DNA, 33 bp, Homo sapien
tttaagcacctctgggaagaaattaaactgagg

SEQ ID NO: 401538 - DNA, 33 bp, Homo sapien
tttaagcacctctggggagaaattaaactgagg

SEQ ID NO: 401539 - DNA, 33 bp, Homo sapien
ctctctgcactctacagacagcaccgtgccctc

SEQ ID NO: 401540 - DNA, 33 bp, Homo sapien
ctctctgcactctacatacagcaccgtgccctc

SEQ ID NO: 401541 - DNA, 33 bp, Homo sapien
aagaaaaagaagcaagactgtgacaaaaaaata

SEQ ID NO: 401542 - DNA, 33 bp, Homo sapien
aagaaaaagaagcaaggctgtgacaaaaaaata

SEQ ID NO: 401543 - DNA, 33 bp, Homo sapien
gatgaggcaaaaatagaagcaagtgttgagaaa

SEQ ID NO: 401544 - DNA, 33 bp, Homo sapien
gatgaggcaaaaataggagcaagtgttgagaaa

SEQ ID NO: 401545 - DNA, 33 bp, Homo sapien
ccaatcagaatttttgaagggctatatttaaaa

SEQ ID NO: 401546 - DNA, 33 bp, Homo sapien
ccaatcagaatttttggagggctatatttaaaa

SEQ ID NO: 401547 - DNA, 33 bp, Homo sapien
ggtttgtagaaaattgcaagtacagtacaaaaa

SEQ ID NO: 401548 - DNA, 33 bp, Homo sapien
ggtttgtagaaaattgtaagtacagtacaaaaa

SEQ ID NO: 401549 - DNA, 33 bp, Homo sapien
gaccagaccttattccagagtggaccaggccca

SEQ ID NO: 401550 - DNA, 33 bp, Homo sapien
gaccagaccttattccggagtggaccaggccca

SEQ ID NO: 401551 - DNA, 33 bp, Homo sapien
gcctcttgcagagggtaaaggaggtggctttga

SEQ ID NO: 401552 - DNA, 33 bp, Homo sapien
gcctcttgcagagggtgaaggaggtggctttga

SEQ ID NO: 401553 - DNA, 33 bp, Homo sapien
tcctgatggtcctcgcaacttctgagtcactcc

SEQ ID NO: 401554 - DNA, 33 bp, Homo sapien
tcctgatggtcctcgccacttctgagtcactcc

SEQ ID NO: 401555 - DNA, 33 bp, Homo sapien
acgttctcatacttcaaaatgatgtcctctcac

SEQ ID NO: 401556 - DNA, 33 bp, Homo sapien
acgttctcatacttcataatgatgtcctctcac

SEQ ID NO: 401557 - DNA, 33 bp, Homo sapien; identical to SEQ ID NO: 401555

SEQ ID NO: 401558 - DNA, 33 bp, Homo sapien; identical to SEQ ID NO: 401556

SEQ ID NO: 401559 - DNA, 33 bp, Homo sapien
cagggatcgatatggaatcaagtaagcctatgg

SEQ ID NO: 401560 - DNA, 33 bp, Homo sapien
cagggatcgatatggagtcaagtaagcctatgg

SEQ ID NO: 401561 - DNA, 33 bp, Homo sapien
agggggacacaggcccacagattgggacagagg

SEQ ID NO: 401562 - DNA, 33 bp, Homo sapien
agggggacacaggcccgcagattgggacagagg

SEQ ID NO: 401563 - DNA, 33 bp, Homo sapien
ttgaaatgattttacacgtacaccttccatcca

SEQ ID NO: 401564 - DNA, 33 bp, Homo sapien
ttgaaatgattttacatgtacaccttccatcca

SEQ ID NO: 401565 - DNA, 33 bp, Homo sapien
tccctgttcttcccaccgtgatgtggattcggg

SEQ ID NO: 401566 - DNA, 33 bp, Homo sapien
tccctgttcttcccactgtgatgtggattcggg

SEQ ID NO: 401567 - DNA, 33 bp, Homo sapien
acgggaagaaacccataaggagcacaatgtccc

SEQ ID NO: 401568 - DNA, 33 bp, Homo sapien
acgggaagaaacccatgaggagcacaatgtccc

SEQ ID NO: 401569 - DNA, 33 bp, Homo sapien
aaggctgtctctaccacgtaacacatgactgcc

SEQ ID NO: 401570 - DNA, 33 bp, Homo sapien
aaggctgtctctaccaggtaacacatgactgcc

SEQ ID NO: 401571 - DNA, 33 bp, Homo sapien
tagggggcagaactcaaaacgttccagaagcac

SEQ ID NO: 401572 - DNA, 33 bp, Homo sapien
tagggggcagaactcacaacgttccagaagcac

SEQ ID NO: 401573 - DNA, 33 bp, Homo sapien
gaggagacaccatagacagaaagcaatgggtgc

SEQ ID NO: 401574 - DNA, 33 bp, Homo sapien
gaggagacaccatagatagaaagcaatgggtgc

SEQ ID NO: 401575 - DNA, 33 bp, Homo sapien
tatttgccaactttccccattagactgcgagca

SEQ ID NO: 401576 - DNA, 33 bp, Homo sapien
tatttgccaactttcctcattagactgcgagca

SEQ ID NO: 401577 - DNA, 33 bp, Homo sapien
aaaaggaatatatacacgacacatccttctcca

SEQ ID NO: 401578 - DNA, 33 bp, Homo sapien
aaaaggaatatatacatgacacatccttctcca

SEQ ID NO: 401579 - DNA, 33 bp, Homo sapien
gcaaggaattagatagaatcaaatcaaagagct

SEQ ID NO: 401580 - DNA, 33 bp, Homo sapien
gcaaggaattagataggatcaaatcaaagagct

SEQ ID NO: 401581 - DNA, 33 bp, Homo sapien
caacgacttagtcaaactcacacaaagtagaag

SEQ ID NO: 401582 - DNA, 33 bp, Homo sapien
caacgacttagtcaaagtcacacaaagtagaag

SEQ ID NO: 401583 - DNA, 33 bp, Homo sapien
ctgtgctccagcccgcagcacttgagactgact

SEQ ID NO: 401584 - DNA, 33 bp, Homo sapien
ctgtgctccagcccgcggcacttgagactgact

SEQ ID NO: 401585 - DNA, 33 bp, Homo sapien
gcagggaccccattccagatcaattatgtcaca

SEQ ID NO: 401586 - DNA, 33 bp, Homo sapien
gcagggaccccattccggatcaattatgtcaca

SEQ ID NO: 401587 - DNA, 33 bp, Homo sapien
ttgtgtgggttcctgaaaattatggacccctgc

SEQ ID NO: 401588 - DNA, 33 bp, Homo sapien
ttgtgtgggttcctgagaattatggacccctgc

SEQ ID NO: 401589 - DNA, 33 bp, Homo sapien
atgtactgtgtattcaacattgagtaaagaaaa

SEQ ID NO: 401590 - DNA, 33 bp, Homo sapien
atgtactgtgtattcagcattgagtaaagaaaa

SEQ ID NO: 401591 - DNA, 33 bp, Homo sapien
gaaatacggtccctgcactgatgtgtaattata

SEQ ID NO: 401592 - DNA, 33 bp, Homo sapien
gaaatacggtccctgccctgatgtgtaattata

SEQ ID NO: 401593 - DNA, 33 bp, Homo sapien
gttcagtggctagaacagtgccgagcacacaac

SEQ ID NO: 401594 - DNA, 33 bp, Homo sapien
gttcagtggctagaacggtgccgagcacacaac

SEQ ID NO: 401595 - DNA, 33 bp, Homo sapien
gtctgccagttccagaaggacaggaactcatgt

SEQ ID NO: 401596 - DNA, 33 bp, Homo sapien
gtctgccagttccagacggacaggaactcatgt

SEQ ID NO: 401597 - DNA, 33 bp, Homo sapien
aggaaagctaccaggaaggtcgcgtggctgtga

SEQ ID NO: 401598 - DNA, 33 bp, Homo sapien
aggaaagctaccaggacggtcgcgtggctgtga

SEQ ID NO: 401599 - DNA, 33 bp, Homo sapien
aaggtttttctgtataccatgaactataacaag

SEQ ID NO: 401600 - DNA, 33 bp, Homo sapien
aaggtttttctgtatatcatgaactataacaag

SEQ ID NO: 401601 - DNA, 33 bp, Homo sapien
cttgagaatgacactacagtcacacagaaacat

SEQ ID NO: 401602 - DNA, 33 bp, Homo sapien
cttgagaatgacactagagtcacacagaaacat

SEQ ID NO: 401603 - DNA, 33 bp, Homo sapien
atccctacagatagaaagtaatcattaaaacaa

SEQ ID NO: 401604 - DNA, 33 bp, Homo sapien
atccctacagatagaaggtaatcattaaaacaa

SEQ ID NO: 401605 - DNA, 33 bp, Homo sapien
ctcggctgttcctctcaccctgttactccctgt

SEQ ID NO: 401606 - DNA, 33 bp, Homo sapien
ctcggctgttcctctcgccctgttactccctgt

SEQ ID NO: 401607 - DNA, 33 bp, Homo sapien
ggctgttggccaatcaatcattttcatttcttg

SEQ ID NO: 401608 - DNA, 33 bp, Homo sapien
ggctgttggccaatcagtcattttcatttcttg

SEQ ID NO: 401609 - DNA, 33 bp, Homo sapien
ttttttctgcagttaacagtttctaacgaagac

SEQ ID NO: 401610 - DNA, 33 bp, Homo sapien
ttttttctgcagttaagagtttctaacgaagac

SEQ ID NO: 401611 - DNA, 33 bp, Homo sapien
ctgccccacggctacacaaggcatctgggaaga

SEQ ID NO: 401612 - DNA, 33 bp, Homo sapien
ctgccccacggctacagaaggcatctgggaaga

SEQ ID NO: 401613 - DNA, 33 bp, Homo sapien
caggttgcatactgaacgaatggggacatcctt

SEQ ID NO: 401614 - DNA, 33 bp, Homo sapien
caggttgcatactgaatgaatggggacatcctt

SEQ ID NO: 401615 - DNA, 33 bp, Homo sapien
gaaatgggactcagaactcggtggataaaggtt

SEQ ID NO: 401616 - DNA, 33 bp, Homo sapien
gaaatgggactcagaattcggtggataaaggtt

SEQ ID NO: 401617 - DNA, 33 bp, Homo sapien; identical to SEQ ID NO: 401615

SEQ ID NO: 401618 - DNA, 33 bp, Homo sapien; identical to SEQ ID NO: 401616

SEQ ID NO: 401619 - DNA, 33 bp, Homo sapien
gaggtaccttgaacaggatgggggctgattcct

SEQ ID NO: 401620 - DNA, 33 bp, Homo sapien
gaggtaccttgaacagtatgggggctgattcct

SEQ ID NO: 401621 - DNA, 33 bp, Homo sapien
tccttcatgcgggacaataataataataataat

SEQ ID NO: 401622 - DNA, 33 bp, Homo sapien
tccttcatgcgggacagtaataataataataat

SEQ ID NO: 401623 - DNA, 33 bp, Homo sapien
aaggagggttctaaaccgatgtgcagaatctcc

SEQ ID NO: 401624 - DNA, 33 bp, Homo sapien
aaggagggttctaaactgatgtgcagaatctcc

SEQ ID NO: 401625 - DNA, 33 bp, Homo sapien
atgttcagtatagacaaccatccaatttcattt

SEQ ID NO: 401626 - DNA, 33 bp, Homo sapien
atgttcagtatagacagccatccaatttcattt

SEQ ID NO: 401627 - DNA, 33 bp, Homo sapien; identical to SEQ ID NO: 401625

SEQ ID NO: 401628 - DNA, 33 bp, Homo sapien; identical to SEQ ID NO: 401626

SEQ ID NO: 401629 - DNA, 33 bp, Homo sapien
ttctaagccaagaacacccagaactttggaaat

SEQ ID NO: 401630 - DNA, 33 bp, Homo sapien
ttctaagccaagaacatccagaactttggaaat

SEQ ID NO: 401631 - DNA, 33 bp, Homo sapien
tggtaaagtggtatgaaatctaatatgtgtaat

SEQ ID NO: 401632 - DNA, 33 bp, Homo sapien
tggtaaagtggtatgagatctaatatgtgtaat

SEQ ID NO: 401633 - DNA, 33 bp, Homo sapien
aggataacttaaagcaaccctgtcttcttttac

SEQ ID NO: 401634 - DNA, 33 bp, Homo sapien
aggataacttaaagcagccctgtcttcttttac

SEQ ID NO: 401635 - DNA, 33 bp, Homo sapien
ctcttcccccaattaacgatgctgacaattcaa

SEQ ID NO: 401636 - DNA, 33 bp, Homo sapien
ctcttcccccaattaatgatgctgacaattcaa

SEQ ID NO: 401637 - DNA, 33 bp, Homo sapien
ttccttggactgaaccaatggcatttctcccca

SEQ ID NO: 401638 - DNA, 33 bp, Homo sapien
ttccttggactgaaccgatggcatttctcccca

SEQ ID NO: 401639 - DNA, 33 bp, Homo sapien
ggacatgaaacctcatcagcaattctaatttca

SEQ ID NO: 401640 - DNA, 33 bp, Homo sapien
ggacatgaaacctcatgagcaattctaatttca

SEQ ID NO: 401641 - DNA, 33 bp, Homo sapien
aacgcattgttttcccaggactgttccttgctg

SEQ ID NO: 401642 - DNA, 33 bp, Homo sapien
aacgcattgttttcccgggactgttccttgctg

SEQ ID NO: 401643 - DNA, 33 bp, Homo sapien
agagatgcttgccaaagactttgattacataca

SEQ ID NO: 401644 - DNA, 33 bp, Homo sapien
agagatgcttgccaaatactttgattacataca

SEQ ID NO: 401645 - DNA, 33 bp, Homo sapien
ttcccatcctcaacccaagaattgctgatcttt

SEQ ID NO: 401646 - DNA, 33 bp, Homo sapien
ttcccatcctcaacccgagaattgctgatcttt

SEQ ID NO: 401647 - DNA, 33 bp, Homo sapien
caatgtacttggtgccactgaattgtacacttc

SEQ ID NO: 401648 - DNA, 33 bp, Homo sapien
caatgtacttggtgccgctgaattgtacacttc

SEQ ID NO: 401649 - DNA, 33 bp, Homo sapien
tcgactcacccgagaaagttaagaagaagccat

SEQ ID NO: 401650 - DNA, 33 bp, Homo sapien
tcgactcacccgagaaggttaagaagaagccat

SEQ ID NO: 401651 - DNA, 33 bp, Homo sapien
gtttctctaatttggacctaatgtgtttttgtg

SEQ ID NO: 401652 - DNA, 33 bp, Homo sapien
gtttctctaatttggatctaatgtgtttttgtg

SEQ ID NO: 401653 - DNA, 33 bp, Homo sapien
gattcagataaaggtgcataagatgactaggca

SEQ ID NO: 401654 - DNA, 33 bp, Homo sapien
gattcagataaaggtgtataagatgactaggca

SEQ ID NO: 401655 - DNA, 33 bp, Homo sapien
aatgaataatcaatgcagaatctcccctgcgtt

SEQ ID NO: 401656 - DNA, 33 bp, Homo sapien
aatgaataatcaatgcggaatctcccctgcgtt

SEQ ID NO: 401657 - DNA, 33 bp, Homo sapien
cattcaggattctcagcaggtagcgaggccccc

SEQ ID NO: 401658 - DNA, 33 bp, Homo sapien
cattcaggattctcagtaggtagcgaggccccc

SEQ ID NO: 401659 - DNA, 33 bp, Homo sapien
gagtccaagctggaaaagtggctcgtggttaac

SEQ ID NO: 401660 - DNA, 33 bp, Homo sapien
gagtccaagctggaaacgtggctcgtggttaac

SEQ ID NO: 401661 - DNA, 33 bp, Homo sapien; identical to SEQ ID NO: 401659

SEQ ID NO: 401662 - DNA, 33 bp, Homo sapien; identical to SEQ ID NO: 401660

SEQ ID NO: 401663 - DNA, 33 bp, Homo sapien
ccactgtgcccgaccactatgaatgccaatatt

SEQ ID NO: 401664 - DNA, 33 bp, Homo sapien
ccactgtgcccgaccattatgaatgccaatatt

SEQ ID NO: 401665 - DNA, 33 bp, Homo sapien
gctctgcatgagtgacaagttccctaaatgact

SEQ ID NO: 401666 - DNA, 33 bp, Homo sapien
gctctgcatgagtgacgagttccctaaatgact

SEQ ID NO: 401667 - DNA, 33 bp, Homo sapien
gtagtcactggaggaaagaccttaaactagaag

SEQ ID NO: 401668 - DNA, 33 bp, Homo sapien
gtagtcactggaggaacgaccttaaactagaag

SEQ ID NO: 401669 - DNA, 33 bp, Homo sapien
tttcagcatgaagagcaatttcttcagtttcta

SEQ ID NO: 401670 - DNA, 33 bp, Homo sapien
tttcagcatgaagagcgatttcttcagtttcta

SEQ ID NO: 401671 - DNA, 33 bp, Homo sapien
ggctcacagcccaccacggaagttggtttacat

SEQ ID NO: 401672 - DNA, 33 bp, Homo sapien
ggctcacagcccaccatggaagttggtttacat

SEQ ID NO: 401673 - DNA, 33 bp, Homo sapien
ctccagtgctccgaagaatgaaaatgtaattga

SEQ ID NO: 401674 - DNA, 33 bp, Homo sapien
ctccagtgctccgaaggatgaaaatgtaattga

SEQ ID NO: 401675 - DNA, 33 bp, Homo sapien
tgtgtgcagggattccaaaacttacacagtaga

SEQ ID NO: 401676 - DNA, 33 bp, Homo sapien
tgtgtgcagggattcccaaacttacacagtaga

SEQ ID NO: 401677 - DNA, 33 bp, Homo sapien
atcagtcattttcacacggcctgatagaaactc

SEQ ID NO: 401678 - DNA, 33 bp, Homo sapien
atcagtcattttcacatggcctgatagaaactc

SEQ ID NO: 401679 - DNA, 33 bp, Homo sapien
catacttgaagcttaacataggtttgcatgaat

SEQ ID NO: 401680 - DNA, 33 bp, Homo sapien
catacttgaagcttaatataggtttgcatgaat

SEQ ID NO: 401681 - DNA, 33 bp, Homo sapien
ctgcagccctgggaaacgtgcaccgacctgatg

SEQ ID NO: 401682 - DNA, 33 bp, Homo sapien
ctgcagccctgggaaatgtgcaccgacctgatg

SEQ ID NO: 401683 - DNA, 33 bp, Homo sapien
cagaattccaagaaaacctgacttgaaagcacc

SEQ ID NO: 401684 - DNA, 33 bp, Homo sapien
cagaattccaagaaaatctgacttgaaagcacc

SEQ ID NO: 401685 - DNA, 33 bp, Homo sapien
gttgctgacagttaagaacctgggcttggcatc

SEQ ID NO: 401686 - DNA, 33 bp, Homo sapien
gttgctgacagttaagtacctgggcttggcatc

SEQ ID NO: 401687 - DNA, 33 bp, Homo sapien
ccttgcagaagtctccagaatctctggtcaagc

SEQ ID NO: 401688 - DNA, 33 bp, Homo sapien
ccttgcagaagtctccggaatctctggtcaagc

SEQ ID NO: 401689 - DNA, 33 bp, Homo sapien
ggtggtcttgtgtagacgggggctttggtttca

SEQ ID NO: 401690 - DNA, 33 bp, Homo sapien
ggtggtcttgtgtagatgggggctttggtttca

SEQ ID NO: 401691 - DNA, 33 bp, Homo sapien
tttgatttctccccagaagaattcacctgctgc

SEQ ID NO: 401692 - DNA, 33 bp, Homo sapien
tttgatttctccccagcagaattcacctgctgc

SEQ ID NO: 401693 - DNA, 33 bp, Homo sapien
acaggccaagtgcatcaaaatgctaggacggtt

SEQ ID NO: 401694 - DNA, 33 bp, Homo sapien
acaggccaagtgcatcgaaatgctaggacggtt

SEQ ID NO: 401695 - DNA, 33 bp, Homo sapien
tactgcccctgttctacaccagtacaagattag

SEQ ID NO: 401696 - DNA, 33 bp, Homo sapien
tactgcccctgttctagaccagtacaagattag

SEQ ID NO: 401697 - DNA, 33 bp, Homo sapien
gctctattcagaaaggcactgtgacatggccct

SEQ ID NO: 401698 - DNA, 33 bp, Homo sapien
gctctattcagaaagggactgtgacatggccct

SEQ ID NO: 401699 - DNA, 33 bp, Homo sapien
tatttcatcgcttatccacaaccgtataagaca

SEQ ID NO: 401700 - DNA, 33 bp, Homo sapien
tatttcatcgcttatctacaaccgtataagaca

SEQ ID NO: 401701 - DNA, 33 bp, Homo sapien
gaaaggaaaagaatcactaagttgcaaaagtca

SEQ ID NO: 401702 - DNA, 33 bp, Homo sapien
gaaaggaaaagaatcagtaagttgcaaaagtca

SEQ ID NO: 401703 - DNA, 33 bp, Homo sapien
cgaactcctgtcaagcgatccctccaatttgac

SEQ ID NO: 401704 - DNA, 33 bp, Homo sapien
cgaactcctgtcaagctatccctccaatttgac

SEQ ID NO: 401705 - DNA, 33 bp, Homo sapien
cttcctaatcaatgaaataatgcacaaggggca

SEQ ID NO: 401706 - DNA, 33 bp, Homo sapien
cttcctaatcaatgaactaatgcacaaggggca

SEQ ID NO: 401707 - DNA, 33 bp, Homo sapien
tgtgtgtgtgtgaactaacgtctataaatagga

SEQ ID NO: 401708 - DNA, 33 bp, Homo sapien
tgtgtgtgtgtgaactcacgtctataaatagga

SEQ ID NO: 401709 - DNA, 33 bp, Homo sapien
caccccagaaaggcaacgtgagtccaaaggagt

SEQ ID NO: 401710 - DNA, 33 bp, Homo sapien
caccccagaaaggcaatgtgagtccaaaggagt

SEQ ID NO: 401711 - DNA, 33 bp, Homo sapien
attatttacatggtcacccttggagacaataac

SEQ ID NO: 401712 - DNA, 33 bp, Homo sapien
attatttacatggtcatccttggagacaataac

SEQ ID NO: 401713 - DNA, 33 bp, Homo sapien
agaggacaccaggggcaaaaatggaaaatgggg

SEQ ID NO: 401714 - DNA, 33 bp, Homo sapien
agaggacaccaggggcgaaaatggaaaatgggg

SEQ ID NO: 401715 - DNA, 33 bp, Homo sapien
cccacctccaccctcactctcagcagaggacct

SEQ ID NO: 401716 - DNA, 33 bp, Homo sapien
cccacctccaccctcagtctcagcagaggacct

SEQ ID NO: 401717 - DNA, 33 bp, Homo sapien
cagtatccataagtaacgttttatcatagcaat

SEQ ID NO: 401718 - DNA, 33 bp, Homo sapien
cagtatccataagtaatgttttatcatagcaat

SEQ ID NO: 401719 - DNA, 33 bp, Homo sapien
agtcagaggaaagaggaagaagatggttgtggt

SEQ ID NO: 401720 - DNA, 33 bp, Homo sapien
agtcagaggaaagagggagaagatggttgtggt

SEQ ID NO: 401721 - DNA, 33 bp, Homo sapien
agctcagtcctctgaacccaaagtcccatgtgt

SEQ ID NO: 401722 - DNA, 33 bp, Homo sapien
agctcagtcctctgaatccaaagtcccatgtgt

SEQ ID NO: 401723 - DNA, 33 bp, Homo sapien
ccatctagggttatgccatcttaatcataggtg

SEQ ID NO: 401724 - DNA, 33 bp, Homo sapien
ccatctagggttatgcgatcttaatcataggtg

SEQ ID NO: 401725 - DNA, 33 bp, Homo sapien
ttgttaatttctatagcaagcttggaaactact

SEQ ID NO: 401726 - DNA, 33 bp, Homo sapien
ttgttaatttctatagtaagcttggaaactact

SEQ ID NO: 401727 - DNA, 33 bp, Homo sapien
atggaaaagcaacaggaaacagtttacaccagt

SEQ ID NO: 401728 - DNA, 33 bp, Homo sapien
atggaaaagcaacagggaacagtttacaccagt

SEQ ID NO: 401729 - DNA, 33 bp, Homo sapien
tgcatacgtgggagtaaatctgctagttgaatt

SEQ ID NO: 401730 - DNA, 33 bp, Homo sapien
tgcatacgtgggagtatatctgctagttgaatt

SEQ ID NO: 401731 - DNA, 33 bp, Homo sapien
agagctatcaccttgacgttcctgaatctgccc

SEQ ID NO: 401732 - DNA, 33 bp, Homo sapien
agagctatcaccttgaggttcctgaatctgccc

SEQ ID NO: 401733 - DNA, 33 bp, Homo sapien
aacttgctggcaaaaacggagaagggtcttttg

SEQ ID NO: 401734 - DNA, 33 bp, Homo sapien
aacttgctggcaaaaatggagaagggtcttttg

SEQ ID NO: 401735 - DNA, 33 bp, Homo sapien
ctatgagtctcctccacagctgaatggtcactg

SEQ ID NO: 401736 - DNA, 33 bp, Homo sapien
ctatgagtctcctccatagctgaatggtcactg

SEQ ID NO: 401737 - DNA, 33 bp, Homo sapien
agcccagggggagagacgcaataaagatcttgt

SEQ ID NO: 401738 - DNA, 33 bp, Homo sapien
agcccagggggagagatgcaataaagatcttgt

SEQ ID NO: 401739 - DNA, 33 bp, Homo sapien
cactcacagtatggcaacttgcttcctctacca

SEQ ID NO: 401740 - DNA, 33 bp, Homo sapien
cactcacagtatggcagcttgcttcctctacca

SEQ ID NO: 401741 - DNA, 33 bp, Homo sapien
tgggcatgtgaagaacacaaagagctggattcc

SEQ ID NO: 401742 - DNA, 33 bp, Homo sapien
tgggcatgtgaagaacgcaaagagctggattcc

SEQ ID NO: 401743 - DNA, 33 bp, Homo sapien
tgataagtgagttctcactgagttcatgtgaga

SEQ ID NO: 401744 - DNA, 33 bp, Homo sapien
tgataagtgagttctcgctgagttcatgtgaga

SEQ ID NO: 401745 - DNA, 33 bp, Homo sapien
gttacagaatcatacaatatgggaaaaacagat

SEQ ID NO: 401746 - DNA, 33 bp, Homo sapien
gttacagaatcatacagtatgggaaaaacagat

SEQ ID NO: 401747 - DNA, 33 bp, Homo sapien
catatagtagcattcccatcagtgtgtagtact

SEQ ID NO: 401748 - DNA, 33 bp, Homo sapien
catatagtagcattcctatcagtgtgtagtact

SEQ ID NO: 401749 - DNA, 33 bp, Homo sapien
ctgagaactcttatctcacagaagcacatacac

SEQ ID NO: 401750 - DNA, 33 bp, Homo sapien
ctgagaactcttatcttacagaagcacatacac

SEQ ID NO: 401751 - DNA, 33 bp, Homo sapien
attctatcttccccaaacatatccagattcccc

SEQ ID NO: 401752 - DNA, 33 bp, Homo sapien
attctatcttccccaagcatatccagattcccc

SEQ ID NO: 401753 - DNA, 33 bp, Homo sapien
agatagaggtcaacagaaccataaaaagtttta

SEQ ID NO: 401754 - DNA, 33 bp, Homo sapien
agatagaggtcaacagtaccataaaaagtttta

SEQ ID NO: 401755 - DNA, 33 bp, Homo sapien
cctacatcagctaacactacaaaaagttttaca

SEQ ID NO: 401756 - DNA, 33 bp, Homo sapien
cctacatcagctaacagtacaaaaagttttaca

SEQ ID NO: 401757 - DNA, 33 bp, Homo sapien
tctaaggggtctacgtcaaagagtcatcacaga

SEQ ID NO: 401758 - DNA, 33 bp, Homo sapien
tctaaggggtctacgtgaaagagtcatcacaga

SEQ ID NO: 401759 - DNA, 33 bp, Homo sapien; identical to SEQ ID NO: 401757

SEQ ID NO: 401760 - DNA, 33 bp, Homo sapien; identical to SEQ ID NO: 401758

SEQ ID NO: 401761 - DNA, 33 bp, Homo sapien; identical to SEQ ID NO: 401757

SEQ ID NO: 401762 - DNA, 33 bp, Homo sapien; identical to SEQ ID NO: 401758

SEQ ID NO: 401763 - DNA, 33 bp, Homo sapien
gttgaaggtccagttccacaacaaacaagctgg

SEQ ID NO: 401764 - DNA, 33 bp, Homo sapien
gttgaaggtccagttctacaacaaacaagctgg

SEQ ID NO: 401765 - DNA, 33 bp, Homo sapien
aaaccagtgatttttaacttagcaaagtgagct

SEQ ID NO: 401766 - DNA, 33 bp, Homo sapien
aaaccagtgatttttagcttagcaaagtgagct

SEQ ID NO: 401767 - DNA, 33 bp, Homo sapien
tgagcatctggctctgaaatcagtctgtgttcc

SEQ ID NO: 401768 - DNA, 33 bp, Homo sapien
tgagcatctggctctgcaatcagtctgtgttcc

SEQ ID NO: 401769 - DNA, 33 bp, Homo sapien
gtaaccacaaaaaagcaagctcacagcattaag

SEQ ID NO: 401770 - DNA, 33 bp, Homo sapien
gtaaccacaaaaaagcgagctcacagcattaag

SEQ ID NO: 401771 - DNA, 33 bp, Homo sapien
gttactttcttgtcaaggttcccaggatcccag

SEQ ID NO: 401772 - DNA, 33 bp, Homo sapien
gttactttcttgtcaatgttcccaggatcccag

SEQ ID NO: 401773 - DNA, 33 bp, Homo sapien
agtggatttgtctttaacttgttacctcaatga

SEQ ID NO: 401774 - DNA, 33 bp, Homo sapien
agtggatttgtctttatcttgttacctcaatga

SEQ ID NO: 401775 - DNA, 33 bp, Homo sapien
gcctgtccccagtgaaatgtgaaaggaatccaa

SEQ ID NO: 401776 - DNA, 33 bp, Homo sapien
gcctgtccccagtgaagtgtgaaaggaatccaa

SEQ ID NO: 401777 - DNA, 33 bp, Homo sapien
gggtattactggcaaaaagactaacatatacta

SEQ ID NO: 401778 - DNA, 33 bp, Homo sapien
gggtattactggcaaagagactaacatatacta

SEQ ID NO: 401779 - DNA, 33 bp, Homo sapien
gataggaagtcaattacgtttgcagctgcagcc

SEQ ID NO: 401780 - DNA, 33 bp, Homo sapien
gataggaagtcaattatgtttgcagctgcagcc

SEQ ID NO: 401781 - DNA, 33 bp, Homo sapien
gtctctataaattgacccttgaacagcacaatt

SEQ ID NO: 401782 - DNA, 33 bp, Homo sapien
gtctctataaattgacgcttgaacagcacaatt

SEQ ID NO: 401783 - DNA, 33 bp, Homo sapien
gaaccactgtgtctggccaatactccttgtctt

SEQ ID NO: 401784 - DNA, 33 bp, Homo sapien
gaaccactgtgtctggtcaatactccttgtctt

SEQ ID NO: 401785 - DNA, 33 bp, Homo sapien
tcccatgacccactaaatatggatcccaacact

SEQ ID NO: 401786 - DNA, 33 bp, Homo sapien
tcccatgacccactaagtatggatcccaacact

SEQ ID NO: 401787 - DNA, 33 bp, Homo sapien
attgcaaacaaaaagacgttgtgatgtcatgga

SEQ ID NO: 401788 - DNA, 33 bp, Homo sapien
attgcaaacaaaaagatgttgtgatgtcatgga

SEQ ID NO: 401789 - DNA, 33 bp, Homo sapien
aggatcattcaattccaattccagggctttttc

SEQ ID NO: 401790 - DNA, 33 bp, Homo sapien
aggatcattcaattccgattccagggctttttc

SEQ ID NO: 401791 - DNA, 33 bp, Homo sapien
ctaagaaatacctttacatacaccatcatcatc

SEQ ID NO: 401792 - DNA, 33 bp, Homo sapien
ctaagaaatacctttatatacaccatcatcatc

SEQ ID NO: 401793 - DNA, 33 bp, Homo sapien
caagtccggctagtacacgaattggagaaaaag

SEQ ID NO: 401794 - DNA, 33 bp, Homo sapien
caagtccggctagtacgcgaattggagaaaaag

SEQ ID NO: 401795 - DNA, 33 bp, Homo sapien
cccaggaattcagataagaggcagagggcgaag

SEQ ID NO: 401796 - DNA, 33 bp, Homo sapien
cccaggaattcagatacgaggcagagggcgaag

SEQ ID NO: 401797 - DNA, 33 bp, Homo sapien
tattaaaatatgaaaaggtgctgggtccagtgg

SEQ ID NO: 401798 - DNA, 33 bp, Homo sapien
tattaaaatatgaaaatgtgctgggtccagtgg

SEQ ID NO: 401799 - DNA, 33 bp, Homo sapien
ggttccagtgttccaccgcgatggccaccagca

SEQ ID NO: 401800 - DNA, 33 bp, Homo sapien
ggttccagtgttccactgcgatggccaccagca

SEQ ID NO: 401801 - DNA, 33 bp, Homo sapien
gaagcctcaatttgcgcatctgtgaaatgggat

SEQ ID NO: 401802 - DNA, 33 bp, Homo sapien
gaagcctcaatttgcgtatctgtgaaatgggat

SEQ ID NO: 401803 - DNA, 33 bp, Homo sapien
actggggacacagctccaatcaggcagactgtc

SEQ ID NO: 401804 - DNA, 33 bp, Homo sapien
actggggacacagctcgaatcaggcagactgtc

SEQ ID NO: 401805 - DNA, 33 bp, Homo sapien
acagacatggatacccaggaacacacagttaca

SEQ ID NO: 401806 - DNA, 33 bp, Homo sapien
acagacatggatacccgggaacacacagttaca

SEQ ID NO: 401807 - DNA, 33 bp, Homo sapien
catgactagcccacaccgagagcagagctggga

SEQ ID NO: 401808 - DNA, 33 bp, Homo sapien
catgactagcccacactgagagcagagctggga

SEQ ID NO: 401809 - DNA, 33 bp, Homo sapien
caagggcctggtatgacgttgtggcaatctcat

SEQ ID NO: 401810 - DNA, 33 bp, Homo sapien
caagggcctggtatgatgttgtggcaatctcat

SEQ ID NO: 401811 - DNA, 33 bp, Homo sapien
tggctcctactgttccaaatctgcccctttgcc

SEQ ID NO: 401812 - DNA, 33 bp, Homo sapien
tggctcctactgttccgaatctgcccctttgcc

SEQ ID NO: 401813 - DNA, 33 bp, Homo sapien
aacccagcccagtggtcaaagttcagcatcagg

SEQ ID NO: 401814 - DNA, 33 bp, Homo sapien
aacccagcccagtggttaaagttcagcatcagg

SEQ ID NO: 401815 - DNA, 33 bp, Homo sapien
tctcccaacactgaaacgtgccttgcctggctt

SEQ ID NO: 401816 - DNA, 33 bp, Homo sapien
tctcccaacactgaaatgtgccttgcctggctt

SEQ ID NO: 401817 - DNA, 33 bp, Homo sapien
caaactttttggccagaccatctaaagcaaaca

SEQ ID NO: 401818 - DNA, 33 bp, Homo sapien
caaactttttggccaggccatctaaagcaaaca

SEQ ID NO: 401819 - DNA, 33 bp, Homo sapien
tttctggaaagtatcaagcgttcattcagtgct

SEQ ID NO: 401820 - DNA, 33 bp, Homo sapien
tttctggaaagtatcacgcgttcattcagtgct

SEQ ID NO: 401821 - DNA, 33 bp, Homo sapien
ttgacccccttcttgcccacgagtgacgctatt

SEQ ID NO: 401822 - DNA, 33 bp, Homo sapien
ttgacccccttcttgctcacgagtgacgctatt

SEQ ID NO: 401823 - DNA, 33 bp, Homo sapien
cgtgcttgatggtcacacccgactggccctcca

SEQ ID NO: 401824 - DNA, 33 bp, Homo sapien
cgtgcttgatggtcacgcccgactggccctcca

SEQ ID NO: 401825 - DNA, 33 bp, Homo sapien
ggatggtgtcaaagacaaactccttagtgcagt

SEQ ID NO: 401826 - DNA, 33 bp, Homo sapien
ggatggtgtcaaagacgaactccttagtgcagt

SEQ ID NO: 401827 - DNA, 33 bp, Homo sapien
tgaagtttgaggataactgtggtttgctgtccc

SEQ ID NO: 401828 - DNA, 33 bp, Homo sapien
tgaagtttgaggataagtgtggtttgctgtccc

SEQ ID NO: 401829 - DNA, 33 bp, Homo sapien
cagtttactctatgcccgactggatgaggatca

SEQ ID NO: 401830 - DNA, 33 bp, Homo sapien
cagtttactctatgcctgactggatgaggatca

SEQ ID NO: 401831 - DNA, 33 bp, Homo sapien
tatcaccaaacaaagagagctgtacccattttc

SEQ ID NO: 401832 - DNA, 33 bp, Homo sapien
tatcaccaaacaaagatagctgtacccattttc

SEQ ID NO: 401833 - DNA, 33 bp, Homo sapien
atcttaaaaagactgacgctgtgccagaactct

SEQ ID NO: 401834 - DNA, 33 bp, Homo sapien
atcttaaaaagactgatgctgtgccagaactct

SEQ ID NO: 401835 - DNA, 33 bp, Homo sapien
aagcttaaaggggcccaagaattgaaagcttaa

SEQ ID NO: 401836 - DNA, 33 bp, Homo sapien
aagcttaaaggggcccgagaattgaaagcttaa

SEQ ID NO: 401837 - DNA, 33 bp, Homo sapien
aatgagatggtatttgcaaagtggttagtacac

SEQ ID NO: 401838 - DNA, 33 bp, Homo sapien
aatgagatggtatttgtaaagtggttagtacac

SEQ ID NO: 401839 - DNA, 33 bp, Homo sapien
aactaagtgtaatacaagttcttggctatcttg

SEQ ID NO: 401840 - DNA, 33 bp, Homo sapien
aactaagtgtaatacaggttcttggctatcttg

SEQ ID NO: 401841 - DNA, 33 bp, Homo sapien
cacacaaatcagtcaaaaaaatagaaatatcgg

SEQ ID NO: 401842 - DNA, 33 bp, Homo sapien
cacacaaatcagtcaagaaaatagaaatatcgg

SEQ ID NO: 401843 - DNA, 33 bp, Homo sapien
ttgtcaaaaattcttgaacagtggtggctcatg

SEQ ID NO: 401844 - DNA, 33 bp, Homo sapien
ttgtcaaaaattcttggacagtggtggctcatg

SEQ ID NO: 401845 - DNA, 33 bp, Homo sapien
tacattcacttctcagacacagctatacattat

SEQ ID NO: 401846 - DNA, 33 bp, Homo sapien
tacattcacttctcaggcacagctatacattat

SEQ ID NO: 401847 - DNA, 33 bp, Homo sapien
ccctaagccaggaggacgtgaaaacactaaagg

SEQ ID NO: 401848 - DNA, 33 bp, Homo sapien
ccctaagccaggaggatgtgaaaacactaaagg

SEQ ID NO: 401849 - DNA, 33 bp, Homo sapien
tgggtacaagaatactcacagcagcattatgaa

SEQ ID NO: 401850 - DNA, 33 bp, Homo sapien
tgggtacaagaatacttacagcagcattatgaa

SEQ ID NO: 401851 - DNA, 33 bp, Homo sapien
gggacagaagtaatgccacctccagtggaaaaa

SEQ ID NO: 401852 - DNA, 33 bp, Homo sapien
gggacagaagtaatgctacctccagtggaaaaa

SEQ ID NO: 401853 - DNA, 33 bp, Homo sapien
agctgaatgctgtataagaatagcaccttcaac

SEQ ID NO: 401854 - DNA, 33 bp, Homo sapien
agctgaatgctgtataggaatagcaccttcaac

SEQ ID NO: 401855 - DNA, 33 bp, Homo sapien
atgcatatagaatcaaagcttctctgattttta

SEQ ID NO: 401856 - DNA, 33 bp, Homo sapien
atgcatatagaatcaaggcttctctgattttta

SEQ ID NO: 401857 - DNA, 33 bp, Homo sapien
ggcagggtcataccagcagaatagcagcagagc

SEQ ID NO: 401858 - DNA, 33 bp, Homo sapien
ggcagggtcataccaggagaatagcagcagagc

SEQ ID NO: 401859 - DNA, 33 bp, Homo sapien
agcagctgcccagaaaacttagcgctctctcca

SEQ ID NO: 401860 - DNA, 33 bp, Homo sapien
agcagctgcccagaaaccttagcgctctctcca

SEQ ID NO: 401861 - DNA, 33 bp, Homo sapien
ctgttgagaggggggacggagagactgagagag

SEQ ID NO: 401862 - DNA, 33 bp, Homo sapien
ctgttgagaggggggatggagagactgagagag

SEQ ID NO: 401863 - DNA, 33 bp, Homo sapien
tacagtgcacttacaactgcaagcattaataag

SEQ ID NO: 401864 - DNA, 33 bp, Homo sapien
tacagtgcacttacaattgcaagcattaataag

SEQ ID NO: 401865 - DNA, 33 bp, Homo sapien
cttctgcagtggcaccacagagctaaaggcaca

SEQ ID NO: 401866 - DNA, 33 bp, Homo sapien
cttctgcagtggcaccgcagagctaaaggcaca

SEQ ID NO: 401867 - DNA, 33 bp, Homo sapien
tcaatttgccagagaacctaagagtacaaaggc

SEQ ID NO: 401868 - DNA, 33 bp, Homo sapien
tcaatttgccagagaatctaagagtacaaaggc

SEQ ID NO: 401869 - DNA, 33 bp, Homo sapien
ctgcattgttccaggaagtgtgtgtcacccttc

SEQ ID NO: 401870 - DNA, 33 bp, Homo sapien
ctgcattgttccaggaggtgtgtgtcacccttc

SEQ ID NO: 401871 - DNA, 33 bp, Homo sapien
taagtcatttcctatacgtagcaagattccacc

SEQ ID NO: 401872 - DNA, 33 bp, Homo sapien
taagtcatttcctatatgtagcaagattccacc

SEQ ID NO: 401873 - DNA, 33 bp, Homo sapien
ttacagcttttgtttcaatgaatgggcagcaat

SEQ ID NO: 401874 - DNA, 33 bp, Homo sapien
ttacagcttttgtttcgatgaatgggcagcaat

SEQ ID NO: 401875 - DNA, 33 bp, Homo sapien
gccaacatggaagagaaaactagaggatgcata

SEQ ID NO: 401876 - DNA, 33 bp, Homo sapien
gccaacatggaagagagaactagaggatgcata

SEQ ID NO: 401877 - DNA, 33 bp, Homo sapien
tagatgcccggatgtgaaagaaactgttcaatt

SEQ ID NO: 401878 - DNA, 33 bp, Homo sapien
tagatgcccggatgtggaagaaactgttcaatt

SEQ ID NO: 401879 - DNA, 33 bp, Homo sapien
ggaagtgggaaatgaaaaaaagccatggaactc

SEQ ID NO: 401880 - DNA, 33 bp, Homo sapien
ggaagtgggaaatgaagaaaagccatggaactc

SEQ ID NO: 401881 - DNA, 33 bp, Homo sapien
attaaaggagcggcgcaattcatttatcaggag

SEQ ID NO: 401882 - DNA, 33 bp, Homo sapien
attaaaggagcggcgcgattcatttatcaggag

SEQ ID NO: 401883 - DNA, 33 bp, Homo sapien
aggccactgaccaatcaagggagaatgacttaa

SEQ ID NO: 401884 - DNA, 33 bp, Homo sapien
aggccactgaccaatcgagggagaatgacttaa

SEQ ID NO: 401885 - DNA, 33 bp, Homo sapien
ggaggccctcttgaccacctctggaaccagacg

SEQ ID NO: 401886 - DNA, 33 bp, Homo sapien
ggaggccctcttgaccgcctctggaaccagacg

SEQ ID NO: 401887 - DNA, 33 bp, Homo sapien
ctatactgagatttccaatttacgtaactaagc

SEQ ID NO: 401888 - DNA, 33 bp, Homo sapien
ctatactgagatttccgatttacgtaactaagc

SEQ ID NO: 401889 - DNA, 33 bp, Homo sapien
acgacttggaaccccccacggatgactctgtgg

SEQ ID NO: 401890 - DNA, 33 bp, Homo sapien
acgacttggaacccccgacggatgactctgtgg

SEQ ID NO: 401891 - DNA, 33 bp, Homo sapien
accagggagttcttgacaggcagggactatgtc

SEQ ID NO: 401892 - DNA, 33 bp, Homo sapien
accagggagttcttgataggcagggactatgtc

SEQ ID NO: 401893 - DNA, 33 bp, Homo sapien
aattgctgtggctgacccttaagctggcttcct

SEQ ID NO: 401894 - DNA, 33 bp, Homo sapien
aattgctgtggctgactcttaagctggcttcct

SEQ ID NO: 401895 - DNA, 33 bp, Homo sapien
actcccctgcttcgaacccttcaatagtcccat

SEQ ID NO: 401896 - DNA, 33 bp, Homo sapien
actcccctgcttcgaatccttcaatagtcccat

SEQ ID NO: 401897 - DNA, 33 bp, Homo sapien
agcaacataaagataaataagcccagtgtcaga

SEQ ID NO: 401898 - DNA, 33 bp, Homo sapien
agcaacataaagataagtaagcccagtgtcaga

SEQ ID NO: 401899 - DNA, 33 bp, Homo sapien
ttcaccatgctggcataacttggatgatgagat

SEQ ID NO: 401900 - DNA, 33 bp, Homo sapien
ttcaccatgctggcattacttggatgatgagat

SEQ ID NO: 401901 - DNA, 33 bp, Homo sapien
gtaataaaagcgtatgaaagtgcatggaaataa

SEQ ID NO: 401902 - DNA, 33 bp, Homo sapien
gtaataaaagcgtatggaagtgcatggaaataa

SEQ ID NO: 401903 - DNA, 33 bp, Homo sapien
gggagactgtggcaaacggattgcttgatccca

SEQ ID NO: 401904 - DNA, 33 bp, Homo sapien
gggagactgtggcaaatggattgcttgatccca

SEQ ID NO: 401905 - DNA, 33 bp, Homo sapien
tattcatctactcacacgaactcataccacaca

SEQ ID NO: 401906 - DNA, 33 bp, Homo sapien
tattcatctactcacatgaactcataccacaca

SEQ ID NO: 401907 - DNA, 33 bp, Homo sapien
aaaaaccttaaccccacgactccagagacatat

SEQ ID NO: 401908 - DNA, 33 bp, Homo sapien
aaaaaccttaaccccatgactccagagacatat

SEQ ID NO: 401909 - DNA, 33 bp, Homo sapien
aagtgggaatgactgaagaaataggcaagtctt

SEQ ID NO: 401910 - DNA, 33 bp, Homo sapien
aagtgggaatgactgacgaaataggcaagtctt

SEQ ID NO: 401911 - DNA, 33 bp, Homo sapien
ggacatgaatactacacaagcattaaaaagaca

SEQ ID NO: 401912 - DNA, 33 bp, Homo sapien
ggacatgaatactacagaagcattaaaaagaca

SEQ ID NO: 401913 - DNA, 33 bp, Homo sapien
tatttcaagagactacacatggttatttaatct

SEQ ID NO: 401914 - DNA, 33 bp, Homo sapien
tatttcaagagactactcatggttatttaatct

SEQ ID NO: 401915 - DNA, 33 bp, Homo sapien
cattgaaaagttttgaacaatgtggtcactttc

SEQ ID NO: 401916 - DNA, 33 bp, Homo sapien
cattgaaaagttttgagcaatgtggtcactttc

SEQ ID NO: 401917 - DNA, 33 bp, Homo sapien
gtctgtttattgtgcccggagagtaagattact

SEQ ID NO: 401918 - DNA, 33 bp, Homo sapien
gtctgtttattgtgcctggagagtaagattact

SEQ ID NO: 401919 - DNA, 33 bp, Homo sapien
tgcccagctaatgcttaaaatttttttgtagaa

SEQ ID NO: 401920 - DNA, 33 bp, Homo sapien
tgcccagctaatgcttcaaatttttttgtagaa

SEQ ID NO: 401921 - DNA, 33 bp, Homo sapien
ccagctctgctctttgaaggtaaatacaggagt

SEQ ID NO: 401922 - DNA, 33 bp, Homo sapien
ccagctctgctctttggaggtaaatacaggagt

SEQ ID NO: 401923 - DNA, 33 bp, Homo sapien
ttcatgcttttctgcaacttctaaaatttctac

SEQ ID NO: 401924 - DNA, 33 bp, Homo sapien
ttcatgcttttctgcatcttctaaaatttctac

SEQ ID NO: 401925 - DNA, 33 bp, Homo sapien
gtaaactgttatttgcaaggaaatgctctattt

SEQ ID NO: 401926 - DNA, 33 bp, Homo sapien
gtaaactgttatttgcgaggaaatgctctattt

SEQ ID NO: 401927 - DNA, 33 bp, Homo sapien
gggatacacagggttacgttccttcgagcctct

SEQ ID NO: 401928 - DNA, 33 bp, Homo sapien
gggatacacagggttaggttccttcgagcctct

SEQ ID NO: 401929 - DNA, 33 bp, Homo sapien
taagataaatggcaagaactacgtctgcctggg

SEQ ID NO: 401930 - DNA, 33 bp, Homo sapien
taagataaatggcaaggactacgtctgcctggg

SEQ ID NO: 401931 - DNA, 33 bp, Homo sapien
tcttcctaattgcctacgtctaagagagatctg

SEQ ID NO: 401932 - DNA, 33 bp, Homo sapien
tcttcctaattgcctatgtctaagagagatctg

SEQ ID NO: 401933 - DNA, 33 bp, Homo sapien
gggggaagtgctacaaactttccactttccaac

SEQ ID NO: 401934 - DNA, 33 bp, Homo sapien
gggggaagtgctacaagctttccactttccaac

SEQ ID NO: 401935 - DNA, 33 bp, Homo sapien
gaaatatttccatcccaaatagctaaacttaaa

SEQ ID NO: 401936 - DNA, 33 bp, Homo sapien
gaaatatttccatccccaatagctaaacttaaa

SEQ ID NO: 401937 - DNA, 33 bp, Homo sapien
tctgtgtacacaattacgtttattagtacagtt

SEQ ID NO: 401938 - DNA, 33 bp, Homo sapien
tctgtgtacacaattatgtttattagtacagtt

SEQ ID NO: 401939 - DNA, 33 bp, Homo sapien
tttagaggcaccaggcagagagaaacataacat

SEQ ID NO: 401940 - DNA, 33 bp, Homo sapien
tttagaggcaccaggcggagagaaacataacat

SEQ ID NO: 401941 - DNA, 33 bp, Homo sapien
agtatctgaaaagccaggtgccagggaagaaaa

SEQ ID NO: 401942 - DNA, 33 bp, Homo sapien
agtatctgaaaagccatgtgccagggaagaaaa

SEQ ID NO: 401943 - DNA, 33 bp, Homo sapien
gtcccattcagagtcaatcttagtcttgtggag

SEQ ID NO: 401944 - DNA, 33 bp, Homo sapien
gtcccattcagagtcagtcttagtcttgtggag

SEQ ID NO: 401945 - DNA, 33 bp, Homo sapien
gcaatgaacaatttcaaacggaattaagaaagt

SEQ ID NO: 401946 - DNA, 33 bp, Homo sapien
gcaatgaacaatttcacacggaattaagaaagt

SEQ ID NO: 401947 - DNA, 33 bp, Homo sapien
agaaattatctccgtaaaataaaaatgcaaggt

SEQ ID NO: 401948 - DNA, 33 bp, Homo sapien
agaaattatctccgtacaataaaaatgcaaggt

SEQ ID NO: 401949 - DNA, 33 bp, Homo sapien
cttgaataacaaactaagaattttcatcagatt

SEQ ID NO: 401950 - DNA, 33 bp, Homo sapien
cttgaataacaaactaggaattttcatcagatt

SEQ ID NO: 401951 - DNA, 33 bp, Homo sapien
aggaaaagtggagcaaataagtctcaaagaaga

SEQ ID NO: 401952 - DNA, 33 bp, Homo sapien
aggaaaagtggagcaagtaagtctcaaagaaga

SEQ ID NO: 401953 - DNA, 33 bp, Homo sapien
aagctctataatgcccaagaccccaaacagtac

SEQ ID NO: 401954 - DNA, 33 bp, Homo sapien
aagctctataatgcccgagaccccaaacagtac

SEQ ID NO: 401955 - DNA, 33 bp, Homo sapien
atctctgagtacttggacactccctatgtataa

SEQ ID NO: 401956 - DNA, 33 bp, Homo sapien
atctctgagtacttgggcactccctatgtataa

SEQ ID NO: 401957 - DNA, 33 bp, Homo sapien
tctgccatctcctaagaaagccagagtgcaggc

SEQ ID NO: 401958 - DNA, 33 bp, Homo sapien
tctgccatctcctaaggaagccagagtgcaggc

SEQ ID NO: 401959 - DNA, 33 bp, Homo sapien
ttggtcgattatcccaacggtgccagagcggca

SEQ ID NO: 401960 - DNA, 33 bp, Homo sapien
ttggtcgattatcccagcggtgccagagcggca

SEQ ID NO: 401961 - DNA, 33 bp, Homo sapien
cttgaacattcaaggaaactactgagcaacagc

SEQ ID NO: 401962 - DNA, 33 bp, Homo sapien
cttgaacattcaaggagactactgagcaacagc

SEQ ID NO: 401963 - DNA, 33 bp, Homo sapien
ttaatatcagatcttaacaaaaaaatgccaggg

SEQ ID NO: 401964 - DNA, 33 bp, Homo sapien
ttaatatcagatcttaccaaaaaaatgccaggg

SEQ ID NO: 401965 - DNA, 33 bp, Homo sapien
cacaaatgtgaagttccataaacccaaactctg

SEQ ID NO: 401966 - DNA, 33 bp, Homo sapien
cacaaatgtgaagttctataaacccaaactctg

SEQ ID NO: 401967 - DNA, 33 bp, Homo sapien
acagatgaggcagtgcaagtataaactcagctt

SEQ ID NO: 401968 - DNA, 33 bp, Homo sapien
acagatgaggcagtgcgagtataaactcagctt

SEQ ID NO: 401969 - DNA, 33 bp, Homo sapien
tatagtttatggcggacgaaatacaatgtctta

SEQ ID NO: 401970 - DNA, 33 bp, Homo sapien
tatagtttatggcggatgaaatacaatgtctta

SEQ ID NO: 401971 - DNA, 33 bp, Homo sapien
ttacagagaacattacaatatatgagtttggat

SEQ ID NO: 401972 - DNA, 33 bp, Homo sapien
ttacagagaacattacgatatatgagtttggat

SEQ ID NO: 401973 - DNA, 33 bp, Homo sapien
ctctctctatatcagcaaagttcacacctcgct

SEQ ID NO: 401974 - DNA, 33 bp, Homo sapien
ctctctctatatcagccaagttcacacctcgct

SEQ ID NO: 401975 - DNA, 33 bp, Homo sapien
aaacagttaaacagcacattcacttcactaaat

SEQ ID NO: 401976 - DNA, 33 bp, Homo sapien
aaacagttaaacagcatattcacttcactaaat

SEQ ID NO: 401977 - DNA, 33 bp, Homo sapien
aagtttgtcttagtagcaaaactcagtatagca

SEQ ID NO: 401978 - DNA, 33 bp, Homo sapien
aagtttgtcttagtaggaaaactcagtatagca

SEQ ID NO: 401979 - DNA, 33 bp, Homo sapien
gctataatcaagaaaagaataagcctttgtttt

SEQ ID NO: 401980 - DNA, 33 bp, Homo sapien
gctataatcaagaaaataataagcctttgtttt

SEQ ID NO: 401981 - DNA, 33 bp, Homo sapien
ggaggtaacttcaacaatagtccatgaacaaat

SEQ ID NO: 401982 - DNA, 33 bp, Homo sapien
ggaggtaacttcaacagtagtccatgaacaaat

SEQ ID NO: 401983 - DNA, 33 bp, Homo sapien
gaaaagcaggagccaaatctttgatgaaagggg

SEQ ID NO: 401984 - DNA, 33 bp, Homo sapien
gaaaagcaggagccaagtctttgatgaaagggg

SEQ ID NO: 401985 - DNA, 33 bp, Homo sapien
gagaacccagccaaagacacagccaagacttgc

SEQ ID NO: 401986 - DNA, 33 bp, Homo sapien
gagaacccagccaaaggcacagccaagacttgc

SEQ ID NO: 401987 - DNA, 33 bp, Homo sapien
ttgattactcaggtacaacacaattaacttaca

SEQ ID NO: 401988 - DNA, 33 bp, Homo sapien
ttgattactcaggtacgacacaattaacttaca

SEQ ID NO: 401989 - DNA, 33 bp, Homo sapien
taaggcttcaaattacaaagaagctcttcaatt

SEQ ID NO: 401990 - DNA, 33 bp, Homo sapien
taaggcttcaaattacgaagaagctcttcaatt

SEQ ID NO: 401991 - DNA, 33 bp, Homo sapien
tagcttttttaagtacacctgcaatgtattcac

SEQ ID NO: 401992 - DNA, 33 bp, Homo sapien
tagcttttttaagtacgcctgcaatgtattcac

SEQ ID NO: 401993 - DNA, 33 bp, Homo sapien
atgccttatggtaatactatgactagtaactca

SEQ ID NO: 401994 - DNA, 33 bp, Homo sapien
atgccttatggtaatattatgactagtaactca

SEQ ID NO: 401995 - DNA, 33 bp, Homo sapien
gtctcactagcaattcaaattatagactttatt

SEQ ID NO: 401996 - DNA, 33 bp, Homo sapien
gtctcactagcaattcgaattatagactttatt

SEQ ID NO: 401997 - DNA, 33 bp, Homo sapien
tatttcctatatacaacatgagcccaatcctat

SEQ ID NO: 401998 - DNA, 33 bp, Homo sapien
tatttcctatatacaagatgagcccaatcctat

SEQ ID NO: 401999 - DNA, 33 bp, Homo sapien
atcaacactcacggacaagacaggtcaagactt

SEQ ID NO: 402000 - DNA, 33 bp, Homo sapien
atcaacactcacggaccagacaggtcaagactt

SEQ ID NO: 402001 - DNA, 33 bp, Homo sapien
atttacaataattgtgcagatttttaaactttt

SEQ ID NO: 402002 - DNA, 33 bp, Homo sapien
atttacaataattgtggagatttttaaactttt

SEQ ID NO: 402003 - DNA, 33 bp, Homo sapien
catcagaaaacagatacgctaggaaaatggtag

SEQ ID NO: 402004 - DNA, 33 bp, Homo sapien
catcagaaaacagatatgctaggaaaatggtag

SEQ ID NO: 402005 - DNA, 33 bp, Homo sapien
atcttttgggcagaaacatcacaaataaaaagc

SEQ ID NO: 402006 - DNA, 33 bp, Homo sapien
atcttttgggcagaaatatcacaaataaaaagc

SEQ ID NO: 402007 - DNA, 33 bp, Homo sapien
atgtcctactggaatagaaatgaacatattaaa

SEQ ID NO: 402008 - DNA, 33 bp, Homo sapien
atgtcctactggaatataaatgaacatattaaa

SEQ ID NO: 402009 - DNA, 33 bp, Homo sapien
tcagtcttgcttcctaacccgcgcttgagtttc

SEQ ID NO: 402010 - DNA, 33 bp, Homo sapien
tcagtcttgcttcctaccccgcgcttgagtttc

SEQ ID NO: 402011 - DNA, 33 bp, Homo sapien
tgtttaattttccttaccctgctctactttttc

SEQ ID NO: 402012 - DNA, 33 bp, Homo sapien
tgtttaattttccttatcctgctctactttttc

SEQ ID NO: 402013 - DNA, 33 bp, Homo sapien
ctatgtctataagtggaaaaggctttgtttatt

SEQ ID NO: 402014 - DNA, 33 bp, Homo sapien
ctatgtctataagtgggaaaggctttgtttatt

SEQ ID NO: 402015 - DNA, 33 bp, Homo sapien
gatctatttgttatcagagaggagtaagattgc

SEQ ID NO: 402016 - DNA, 33 bp, Homo sapien
gatctatttgttatcatagaggagtaagattgc

SEQ ID NO: 402017 - DNA, 33 bp, Homo sapien
gcagcactacatattagcctaataggccaggtg

SEQ ID NO: 402018 - DNA, 33 bp, Homo sapien
gcagcactacatattatcctaataggccaggtg

SEQ ID NO: 402019 - DNA, 33 bp, Homo sapien
ctgtcgcagttactgaactctgcctttgtagta

SEQ ID NO: 402020 - DNA, 33 bp, Homo sapien
ctgtcgcagttactgagctctgcctttgtagta

SEQ ID NO: 402021 - DNA, 33 bp, Homo sapien
caattagttttccagaatatttgaactaaaagg

SEQ ID NO: 402022 - DNA, 33 bp, Homo sapien
caattagttttccagagtatttgaactaaaagg

SEQ ID NO: 402023 - DNA, 33 bp, Homo sapien
gaggtggcaggaagaaggaaagagtgaagataa

SEQ ID NO: 402024 - DNA, 33 bp, Homo sapien
gaggtggcaggaagaatgaaagagtgaagataa

SEQ ID NO: 402025 - DNA, 33 bp, Homo sapien
ggcagaacttcacctaaagatcagtaaatcaaa

SEQ ID NO: 402026 - DNA, 33 bp, Homo sapien
ggcagaacttcacctagagatcagtaaatcaaa

SEQ ID NO: 402027 - DNA, 33 bp, Homo sapien
gccacaacaacagttacaattctcatcacaaga

SEQ ID NO: 402028 - DNA, 33 bp, Homo sapien
gccacaacaacagttataattctcatcacaaga

SEQ ID NO: 402029 - DNA, 33 bp, Homo sapien
tgcagctttgccagtccctgggtcttggatctg

SEQ ID NO: 402030 - DNA, 33 bp, Homo sapien
tgcagctttgccagtctctgggtcttggatctg

SEQ ID NO: 402031 - DNA, 33 bp, Homo sapien
ctgtgttaggtcacggaagaagtgagggtgaca

SEQ ID NO: 402032 - DNA, 33 bp, Homo sapien
ctgtgttaggtcacgggagaagtgagggtgaca

SEQ ID NO: 402033 - DNA, 33 bp, Homo sapien
acttgttatcagcacaagaaaataacaagaagt

SEQ ID NO: 402034 - DNA, 33 bp, Homo sapien
acttgttatcagcacaggaaaataacaagaagt

SEQ ID NO: 402035 - DNA, 33 bp, Homo sapien
cgtcttgggctgtaccacacttgttgggccctc

SEQ ID NO: 402036 - DNA, 33 bp, Homo sapien
cgtcttgggctgtaccgcacttgttgggccctc

SEQ ID NO: 402037 - DNA, 33 bp, Homo sapien
ggtgaggttatggagaccgctcttgtcagaatt

SEQ ID NO: 402038 - DNA, 33 bp, Homo sapien
ggtgaggttatggagatcgctcttgtcagaatt

SEQ ID NO: 402039 - DNA, 33 bp, Homo sapien
agcaacccgtacctgaacaagcatgtaattatc

SEQ ID NO: 402040 - DNA, 33 bp, Homo sapien
agcaacccgtacctgagcaagcatgtaattatc

SEQ ID NO: 402041 - DNA, 33 bp, Homo sapien
ttttctggagagagaaaaagtgtgtagtctagg

SEQ ID NO: 402042 - DNA, 33 bp, Homo sapien
ttttctggagagagaagaagtgtgtagtctagg

SEQ ID NO: 402043 - DNA, 33 bp, Homo sapien
tcagatttccagtctccaccaggaacctcttca

SEQ ID NO: 402044 - DNA, 33 bp, Homo sapien
tcagatttccagtctctaccaggaacctcttca

SEQ ID NO: 402045 - DNA, 33 bp, Homo sapien
tcccatgctggcaggacaatgggttcctgctct

SEQ ID NO: 402046 - DNA, 33 bp, Homo sapien
tcccatgctggcaggataatgggttcctgctct

SEQ ID NO: 402047 - DNA, 33 bp, Homo sapien
cttttagcatacaaaactagacttaccagtatt

SEQ ID NO: 402048 - DNA, 33 bp, Homo sapien
cttttagcatacaaaattagacttaccagtatt

SEQ ID NO: 402049 - DNA, 33 bp, Homo sapien
atttaacctgaaaacacaattgatttggtgaag

SEQ ID NO: 402050 - DNA, 33 bp, Homo sapien
atttaacctgaaaacataattgatttggtgaag

SEQ ID NO: 402051 - DNA, 33 bp, Homo sapien
catctgcctagtaggaggatcagagcctcttcc

SEQ ID NO: 402052 - DNA, 33 bp, Homo sapien
catctgcctagtaggatgatcagagcctcttcc

SEQ ID NO: 402053 - DNA, 33 bp, Homo sapien
tcaaatggctgttaaccacagggaattgtataa

SEQ ID NO: 402054 - DNA, 33 bp, Homo sapien
tcaaatggctgttaactacagggaattgtataa

SEQ ID NO: 402055 - DNA, 33 bp, Homo sapien
cttctaggaaactgcacgtgttcggctatgcag

SEQ ID NO: 402056 - DNA, 33 bp, Homo sapien
cttctaggaaactgcatgtgttcggctatgcag

SEQ ID NO: 402057 - DNA, 33 bp, Homo sapien
gttacttctgcaatacaatattccaggccggtg

SEQ ID NO: 402058 - DNA, 33 bp, Homo sapien
gttacttctgcaatacgatattccaggccggtg

SEQ ID NO: 402059 - DNA, 33 bp, Homo sapien
ggctgttggtttccacaaagtcatgttatcttt

SEQ ID NO: 402060 - DNA, 33 bp, Homo sapien
ggctgttggtttccacgaagtcatgttatcttt

SEQ ID NO: 402061 - DNA, 33 bp, Homo sapien
tttttgttaatggtcactaaacctttaaagtta

SEQ ID NO: 402062 - DNA, 33 bp, Homo sapien
tttttgttaatggtcagtaaacctttaaagtta

SEQ ID NO: 402063 - DNA, 33 bp, Homo sapien
atttccttttctaccacgttcactctcctttga

SEQ ID NO: 402064 - DNA, 33 bp, Homo sapien
atttccttttctaccatgttcactctcctttga

SEQ ID NO: 402065 - DNA, 33 bp, Homo sapien
ttttaaaagaatgttacgagaaagcagggacct

SEQ ID NO: 402066 - DNA, 33 bp, Homo sapien
ttttaaaagaatgttatgagaaagcagggacct

SEQ ID NO: 402067 - DNA, 33 bp, Homo sapien
aaattaaactgatgtccatggttcatatagtgg

SEQ ID NO: 402068 - DNA, 33 bp, Homo sapien
aaattaaactgatgtctatggttcatatagtgg

SEQ ID NO: 402069 - DNA, 33 bp, Homo sapien
tgttaattcatgtgtcaatgggcacttggattt

SEQ ID NO: 402070 - DNA, 33 bp, Homo sapien
tgttaattcatgtgtcgatgggcacttggattt

SEQ ID NO: 402071 - DNA, 33 bp, Homo sapien
tcacgcttctaggtaacacaagctgggaaagtc

SEQ ID NO: 402072 - DNA, 33 bp, Homo sapien
tcacgcttctaggtaatacaagctgggaaagtc

SEQ ID NO: 402073 - DNA, 33 bp, Homo sapien
ataggatcaagatcccagaacaaaaagagctga

SEQ ID NO: 402074 - DNA, 33 bp, Homo sapien
ataggatcaagatcccggaacaaaaagagctga

SEQ ID NO: 402075 - DNA, 33 bp, Homo sapien
aaagtatgtaaaataaatgtggattaacaacaa

SEQ ID NO: 402076 - DNA, 33 bp, Homo sapien
aaagtatgtaaaataagtgtggattaacaacaa

SEQ ID NO: 402077 - DNA, 33 bp, Homo sapien
gcatgaacgcaatcaaatctaagattccataaa

SEQ ID NO: 402078 - DNA, 33 bp, Homo sapien
gcatgaacgcaatcaagtctaagattccataaa

SEQ ID NO: 402079 - DNA, 33 bp, Homo sapien
tgatatctttgcctcaagagtattctttgggcc

SEQ ID NO: 402080 - DNA, 33 bp, Homo sapien
tgatatctttgcctcaggagtattctttgggcc

SEQ ID NO: 402081 - DNA, 33 bp, Homo sapien
ccccgaactataacaacgctggaagacaaccta

SEQ ID NO: 402082 - DNA, 33 bp, Homo sapien
ccccgaactataacaatgctggaagacaaccta

SEQ ID NO: 402083 - DNA, 33 bp, Homo sapien
ttaaaaattaaagttacgcatagtatgttaggg

SEQ ID NO: 402084 - DNA, 33 bp, Homo sapien
ttaaaaattaaagttatgcatagtatgttaggg

SEQ ID NO: 402085 - DNA, 33 bp, Homo sapien
atgagccaagtttacaatctgcagccccagagg

SEQ ID NO: 402086 - DNA, 33 bp, Homo sapien
atgagccaagtttacagtctgcagccccagagg

SEQ ID NO: 402087 - DNA, 33 bp, Homo sapien
tgcgacaaggcccacaatgatgaggtcactccc

SEQ ID NO: 402088 - DNA, 33 bp, Homo sapien
tgcgacaaggcccacagtgatgaggtcactccc

SEQ ID NO: 402089 - DNA, 33 bp, Homo sapien
cagatagaactacaacaaaaatgtctgaaacat

SEQ ID NO: 402090 - DNA, 33 bp, Homo sapien
cagatagaactacaacgaaaatgtctgaaacat

SEQ ID NO: 402091 - DNA, 33 bp, Homo sapien
ccttcccctggactcaatacaaaccagacacag

SEQ ID NO: 402092 - DNA, 33 bp, Homo sapien
ccttcccctggactcagtacaaaccagacacag

SEQ ID NO: 402093 - DNA, 33 bp, Homo sapien; identical to SEQ ID NO: 402091

SEQ ID NO: 402094 - DNA, 33 bp, Homo sapien; identical to SEQ ID NO: 402092

SEQ ID NO: 402095 - DNA, 33 bp, Homo sapien
gggggacactcatctacggcatgacatcgctct

SEQ ID NO: 402096 - DNA, 33 bp, Homo sapien
gggggacactcatctatggcatgacatcgctct

SEQ ID NO: 402097 - DNA, 33 bp, Homo sapien; identical to SEQ ID NO: 402095

SEQ ID NO: 402098 - DNA, 33 bp, Homo sapien; identical to SEQ ID NO: 402096

SEQ ID NO: 402099 - DNA, 33 bp, Homo sapien
catagctggagggcccacccgaatcacaggtga

SEQ ID NO: 402100 - DNA, 33 bp, Homo sapien
catagctggagggcccgcccgaatcacaggtga

SEQ ID NO: 402101 - DNA, 33 bp, Homo sapien
caaagcgttgtgtctacgtgctgactccatttg

SEQ ID NO: 402102 - DNA, 33 bp, Homo sapien
caaagcgttgtgtctatgtgctgactccatttg

SEQ ID NO: 402103 - DNA, 33 bp, Homo sapien
agacacaacgctttgaaaagttttgtagagaat

SEQ ID NO: 402104 - DNA, 33 bp, Homo sapien
agacacaacgctttgagaagttttgtagagaat

SEQ ID NO: 402105 - DNA, 33 bp, Homo sapien
atgcagccatacataaatgatgtaactgatact

SEQ ID NO: 402106 - DNA, 33 bp, Homo sapien
atgcagccatacataagtgatgtaactgatact

SEQ ID NO: 402107 - DNA, 33 bp, Homo sapien
actgttaaacagcatacaattcctgtcttcaaa

SEQ ID NO: 402108 - DNA, 33 bp, Homo sapien
actgttaaacagcatataattcctgtcttcaaa

SEQ ID NO: 402109 - DNA, 33 bp, Homo sapien; identical to SEQ ID NO: 402107

SEQ ID NO: 402110 - DNA, 33 bp, Homo sapien; identical to SEQ ID NO: 402108

SEQ ID NO: 402111 - DNA, 33 bp, Homo sapien
ttcaataaacgttggccaaattgaactagggat

SEQ ID NO: 402112 - DNA, 33 bp, Homo sapien
ttcaataaacgttggctaaattgaactagggat

SEQ ID NO: 402113 - DNA, 33 bp, Homo sapien
gcgtcgttaaaaaaacactagcttgtgacggca

SEQ ID NO: 402114 - DNA, 33 bp, Homo sapien
gcgtcgttaaaaaaacgctagcttgtgacggca

SEQ ID NO: 402115 - DNA, 33 bp, Homo sapien
tctcagctgcgctaatgaacaggcccatttctt

SEQ ID NO: 402116 - DNA, 33 bp, Homo sapien
tctcagctgcgctaattaacaggcccatttctt

SEQ ID NO: 402117 - DNA, 33 bp, Homo sapien
ctcagcctattccatcagaagactcgtggatga

SEQ ID NO: 402118 - DNA, 33 bp, Homo sapien
ctcagcctattccatcggaagactcgtggatga

SEQ ID NO: 402119 - DNA, 33 bp, Homo sapien
aatgtaaacttgttcacctgatactctcaaata

SEQ ID NO: 402120 - DNA, 33 bp, Homo sapien
aatgtaaacttgttcatctgatactctcaaata

SEQ ID NO: 402121 - DNA, 33 bp, Homo sapien
attttgaaggattgaagtgtgaaaattatttgt

SEQ ID NO: 402122 - DNA, 33 bp, Homo sapien
attttgaaggattgaattgtgaaaattatttgt

SEQ ID NO: 402123 - DNA, 33 bp, Homo sapien
tctaatttatatacatcaatctgctagcggcag

SEQ ID NO: 402124 - DNA, 33 bp, Homo sapien
tctaatttatatacatgaatctgctagcggcag

SEQ ID NO: 402125 - DNA, 33 bp, Homo sapien
cactccagcctttatcacttcttactcctacct

SEQ ID NO: 402126 - DNA, 33 bp, Homo sapien
cactccagcctttatcgcttcttactcctacct

SEQ ID NO: 402127 - DNA, 33 bp, Homo sapien
ccccaagatttacgtacggcccagtccatttaa

SEQ ID NO: 402128 - DNA, 33 bp, Homo sapien
ccccaagatttacgtatggcccagtccatttaa

SEQ ID NO: 402129 - DNA, 33 bp, Homo sapien
ggtcagtgtaccatccaatgcaaaatctcataa

SEQ ID NO: 402130 - DNA, 33 bp, Homo sapien
ggtcagtgtaccatccgatgcaaaatctcataa

SEQ ID NO: 402131 - DNA, 33 bp, Homo sapien
gatcatgcaggtcttgcatctgtttgtagttcg

SEQ ID NO: 402132 - DNA, 33 bp, Homo sapien
gatcatgcaggtcttgtatctgtttgtagttcg

SEQ ID NO: 402133 - DNA, 33 bp, Homo sapien
tgtttgaataagttaaaggctagaaagctgttc

SEQ ID NO: 402134 - DNA, 33 bp, Homo sapien
tgtttgaataagttaagggctagaaagctgttc

SEQ ID NO: 402135 - DNA, 33 bp, Homo sapien
ataccccctggcaaccacaaaactactttgtct

SEQ ID NO: 402136 - DNA, 33 bp, Homo sapien
ataccccctggcaaccgcaaaactactttgtct

SEQ ID NO: 402137 - DNA, 33 bp, Homo sapien
gccaaccagatgaagcaatgactcggctgttcg

SEQ ID NO: 402138 - DNA, 33 bp, Homo sapien
gccaaccagatgaagcgatgactcggctgttcg

SEQ ID NO: 402139 - DNA, 33 bp, Homo sapien
gtgcaagataaagtcacctgaatcagtacctgt

SEQ ID NO: 402140 - DNA, 33 bp, Homo sapien
gtgcaagataaagtcatctgaatcagtacctgt

SEQ ID NO: 402141 - DNA, 33 bp, Homo sapien
aatgaagctccaattgaaattagtagcgacgat

SEQ ID NO: 402142 - DNA, 33 bp, Homo sapien
aatgaagctccaattggaattagtagcgacgat

SEQ ID NO: 402143 - DNA, 33 bp, Homo sapien
agaacttgtttccagagagatagatagagatgc

SEQ ID NO: 402144 - DNA, 33 bp, Homo sapien
agaacttgtttccagatagatagatagagatgc

SEQ ID NO: 402145 - DNA, 33 bp, Homo sapien
agagctagtacacaagcctggataagtcttcag

SEQ ID NO: 402146 - DNA, 33 bp, Homo sapien
agagctagtacacaaggctggataagtcttcag

SEQ ID NO: 402147 - DNA, 33 bp, Homo sapien
caaatcaacttacgataaagggttaatggtcgt

SEQ ID NO: 402148 - DNA, 33 bp, Homo sapien
caaatcaacttacgatgaagggttaatggtcgt

SEQ ID NO: 402149 - DNA, 33 bp, Homo sapien
tgatcctgcccatgaagagtcactatactccag

SEQ ID NO: 402150 - DNA, 33 bp, Homo sapien
tgatcctgcccatgaatagtcactatactccag

SEQ ID NO: 402151 - DNA, 33 bp, Homo sapien
gctgcctcataaaaacacaaactcatcaccttt

SEQ ID NO: 402152 - DNA, 33 bp, Homo sapien
gctgcctcataaaaacgcaaactcatcaccttt

SEQ ID NO: 402153 - DNA, 33 bp, Homo sapien
gaggttttggctaataaaaatagtgctgctatg

SEQ ID NO: 402154 - DNA, 33 bp, Homo sapien
gaggttttggctaatacaaatagtgctgctatg

SEQ ID NO: 402155 - DNA, 33 bp, Homo sapien
gtctttctgcaatttacattaagtgtttgatgc

SEQ ID NO: 402156 - DNA, 33 bp, Homo sapien
gtctttctgcaatttatattaagtgtttgatgc

SEQ ID NO: 402157 - DNA, 33 bp, Homo sapien
attctctttgctgaaaacttcttatctttctgt

SEQ ID NO: 402158 - DNA, 33 bp, Homo sapien
attctctttgctgaaaccttcttatctttctgt

SEQ ID NO: 402159 - DNA, 33 bp, Homo sapien
gttttgagaaagttagccaaagcttcagcagaa

SEQ ID NO: 402160 - DNA, 33 bp, Homo sapien
gttttgagaaagttaggcaaagcttcagcagaa

SEQ ID NO: 402161 - DNA, 33 bp, Homo sapien
gaacccagcggtactgccagcagcgctagtggg

SEQ ID NO: 402162 - DNA, 33 bp, Homo sapien
gaacccagcggtactggcagcagcgctagtggg

SEQ ID NO: 402163 - DNA, 33 bp, Homo sapien
ccgaaaatcagacatacatcttcccaggcaacc

SEQ ID NO: 402164 - DNA, 33 bp, Homo sapien
ccgaaaatcagacatatatcttcccaggcaacc

SEQ ID NO: 402165 - DNA, 33 bp, Homo sapien
ggtgagtgatccttcaataagatcagctcctat

SEQ ID NO: 402166 - DNA, 33 bp, Homo sapien
ggtgagtgatccttcagtaagatcagctcctat

SEQ ID NO: 402167 - DNA, 33 bp, Homo sapien
cctggccgaaagtcggaaatatttagacacctc

SEQ ID NO: 402168 - DNA, 33 bp, Homo sapien
cctggccgaaagtcggcaatatttagacacctc

SEQ ID NO: 402169 - DNA, 33 bp, Homo sapien
tctgtgggatctggtacagttttgtaaattcat

SEQ ID NO: 402170 - DNA, 33 bp, Homo sapien
tctgtgggatctggtatagttttgtaaattcat

SEQ ID NO: 402171 - DNA, 33 bp, Homo sapien
ttcttatttagaaggccgaaggttgaatataac

SEQ ID NO: 402172 - DNA, 33 bp, Homo sapien
ttcttatttagaaggctgaaggttgaatataac

SEQ ID NO: 402173 - DNA, 33 bp, Homo sapien; identical to SEQ ID NO: 402171

SEQ ID NO: 402174 - DNA, 33 bp, Homo sapien; identical to SEQ ID NO: 402172

SEQ ID NO: 402175 - DNA, 33 bp, Homo sapien
caacatttagtagaaaaggcattggtgagtttg

SEQ ID NO: 402176 - DNA, 33 bp, Homo sapien
caacatttagtagaaacggcattggtgagtttg

SEQ ID NO: 402177 - DNA, 33 bp, Homo sapien
aatgtacatagttacaatctttccttcaagaac

SEQ ID NO: 402178 - DNA, 33 bp, Homo sapien
aatgtacatagttacagtctttccttcaagaac

SEQ ID NO: 402179 - DNA, 33 bp, Homo sapien
ttatatgcagggagaaaagttaagctacaacag

SEQ ID NO: 402180 - DNA, 33 bp, Homo sapien
ttatatgcagggagaacagttaagctacaacag

SEQ ID NO: 402181 - DNA, 33 bp, Homo sapien
actcaaaaaaggagctaaagtccagggaagttt

SEQ ID NO: 402182 - DNA, 33 bp, Homo sapien
actcaaaaaaggagctgaagtccagggaagttt

SEQ ID NO: 402183 - DNA, 33 bp, Homo sapien
gttgaagacgacaccacggtaagatgttattta

SEQ ID NO: 402184 - DNA, 33 bp, Homo sapien
gttgaagacgacaccatggtaagatgttattta

SEQ ID NO: 402185 - DNA, 33 bp, Homo sapien
aaacagttactaatagcagaaggaaggaaatag

SEQ ID NO: 402186 - DNA, 33 bp, Homo sapien
aaacagttactaataggagaaggaaggaaatag

SEQ ID NO: 402187 - DNA, 33 bp, Homo sapien
aactgttgttcttactgaattctgatcaaaaag

SEQ ID NO: 402188 - DNA, 33 bp, Homo sapien
aactgttgttcttacttaattctgatcaaaaag

SEQ ID NO: 402189 - DNA, 33 bp, Homo sapien
aaaatccaaccccaatcagatctccattttaca

SEQ ID NO: 402190 - DNA, 33 bp, Homo sapien
aaaatccaaccccaattagatctccattttaca

SEQ ID NO: 402191 - DNA, 33 bp, Homo sapien
ttctggtttcttaatactacttcataaaaatat

SEQ ID NO: 402192 - DNA, 33 bp, Homo sapien
ttctggtttcttaatagtacttcataaaaatat

SEQ ID NO: 402193 - DNA, 33 bp, Homo sapien
gctgtgaagtcagcaacggggagtaaaaccagg

SEQ ID NO: 402194 - DNA, 33 bp, Homo sapien
gctgtgaagtcagcaatggggagtaaaaccagg

SEQ ID NO: 402195 - DNA, 33 bp, Homo sapien
accaaaagcttcaacactatgtcaaaagttgat

SEQ ID NO: 402196 - DNA, 33 bp, Homo sapien
accaaaagcttcaacattatgtcaaaagttgat

SEQ ID NO: 402197 - DNA, 33 bp, Homo sapien
tgaattcgactcaagaatatcaggcatctgtaa

SEQ ID NO: 402198 - DNA, 33 bp, Homo sapien
tgaattcgactcaagagtatcaggcatctgtaa

SEQ ID NO: 402199 - DNA, 33 bp, Homo sapien
ccatcagaacagcctccgacaaagctgcatcca

SEQ ID NO: 402200 - DNA, 33 bp, Homo sapien
ccatcagaacagcctctgacaaagctgcatcca

SEQ ID NO: 402201 - DNA, 33 bp, Homo sapien
aatgaaggcacagatcacctaattcctttctgc

SEQ ID NO: 402202 - DNA, 33 bp, Homo sapien
aatgaaggcacagatctcctaattcctttctgc

SEQ ID NO: 402203 - DNA, 33 bp, Homo sapien
tgccagacaaatcccaaccgagaggcattctac

SEQ ID NO: 402204 - DNA, 33 bp, Homo sapien
tgccagacaaatcccatccgagaggcattctac

SEQ ID NO: 402205 - DNA, 33 bp, Homo sapien
cattcatacttgatccagacttccttagttttt

SEQ ID NO: 402206 - DNA, 33 bp, Homo sapien
cattcatacttgatcctgacttccttagttttt

SEQ ID NO: 402207 - DNA, 33 bp, Homo sapien
gcacatcagaaggaagacccaggtgccctgagc

SEQ ID NO: 402208 - DNA, 33 bp, Homo sapien
gcacatcagaaggaaggcccaggtgccctgagc

SEQ ID NO: 402209 - DNA, 33 bp, Homo sapien
tttcagggtctgtaacaggtattgcattcagtc

SEQ ID NO: 402210 - DNA, 33 bp, Homo sapien
tttcagggtctgtaacgggtattgcattcagtc

SEQ ID NO: 402211 - DNA, 33 bp, Homo sapien
acactcctctagagaacataaccagttagatag

SEQ ID NO: 402212 - DNA, 33 bp, Homo sapien
acactcctctagagaatataaccagttagatag

SEQ ID NO: 402213 - DNA, 33 bp, Homo sapien
aaaatgatacacaaaacgcaaatggcataaaaa

SEQ ID NO: 402214 - DNA, 33 bp, Homo sapien
aaaatgatacacaaaatgcaaatggcataaaaa

SEQ ID NO: 402215 - DNA, 33 bp, Homo sapien
cactggagagtttgcacgggcgaggagtagggt

SEQ ID NO: 402216 - DNA, 33 bp, Homo sapien
cactggagagtttgcatgggcgaggagtagggt

SEQ ID NO: 402217 - DNA, 33 bp, Homo sapien
tctgtgcatcagccaccatttagatgagaatac

SEQ ID NO: 402218 - DNA, 33 bp, Homo sapien
tctgtgcatcagccactatttagatgagaatac

SEQ ID NO: 402219 - DNA, 33 bp, Homo sapien
aaaaatgcttgaatcacccaaaaggacagatga

SEQ ID NO: 402220 - DNA, 33 bp, Homo sapien
aaaaatgcttgaatcatccaaaaggacagatga

SEQ ID NO: 402221 - DNA, 33 bp, Homo sapien
tccctccccgtgtttacatcaggcccagaaatt

SEQ ID NO: 402222 - DNA, 33 bp, Homo sapien
tccctccccgtgtttagatcaggcccagaaatt

SEQ ID NO: 402223 - DNA, 33 bp, Homo sapien
caaccaagcaggattcagaacgtggctgctggg

SEQ ID NO: 402224 - DNA, 33 bp, Homo sapien
caaccaagcaggattcggaacgtggctgctggg

SEQ ID NO: 402225 - DNA, 33 bp, Homo sapien
tccagaaaatgatcaaactactccccagggcgg

SEQ ID NO: 402226 - DNA, 33 bp, Homo sapien
tccagaaaatgatcaagctactccccagggcgg

SEQ ID NO: 402227 - DNA, 33 bp, Homo sapien
gctggagcagagtgccactatctcaattcacta

SEQ ID NO: 402228 - DNA, 33 bp, Homo sapien
gctggagcagagtgccgctatctcaattcacta

SEQ ID NO: 402229 - DNA, 33 bp, Homo sapien
acagtgtctggttccacgagcttatccaaacac

SEQ ID NO: 402230 - DNA, 33 bp, Homo sapien
acagtgtctggttccatgagcttatccaaacac

SEQ ID NO: 402231 - DNA, 33 bp, Homo sapien
attcattcatttaatacgtgccagttgcacagg

SEQ ID NO: 402232 - DNA, 33 bp, Homo sapien
attcattcatttaatatgtgccagttgcacagg

SEQ ID NO: 402233 - DNA, 33 bp, Homo sapien
gctatatttattaagtcaattgttggacaacta

SEQ ID NO: 402234 - DNA, 33 bp, Homo sapien
gctatatttattaagtgaattgttggacaacta

SEQ ID NO: 402235 - DNA, 33 bp, Homo sapien
gaaatatgttacaaagcaaatcgccaaagagta

SEQ ID NO: 402236 - DNA, 33 bp, Homo sapien
gaaatatgttacaaagtaaatcgccaaagagta

SEQ ID NO: 402237 - DNA, 33 bp, Homo sapien
gcacacctgatcttaacgccaggaacaagagtg

SEQ ID NO: 402238 - DNA, 33 bp, Homo sapien
gcacacctgatcttaatgccaggaacaagagtg

SEQ ID NO: 402239 - DNA, 33 bp, Homo sapien; identical to SEQ ID NO: 402237

SEQ ID NO: 402240 - DNA, 33 bp, Homo sapien; identical to SEQ ID NO: 402238

SEQ ID NO: 402241 - DNA, 33 bp, Homo sapien
gacatcatatttcacacagtgcggcctcagtgc

SEQ ID NO: 402242 - DNA, 33 bp, Homo sapien
gacatcatatttcacatagtgcggcctcagtgc

SEQ ID NO: 402243 - DNA, 33 bp, Homo sapien
ttgaaggtgaatgctacgccctgttgacatatt

SEQ ID NO: 402244 - DNA, 33 bp, Homo sapien
ttgaaggtgaatgctatgccctgttgacatatt

SEQ ID NO: 402245 - DNA, 33 bp, Homo sapien
gaaagccaatcactgacacaccaagtattgcca

SEQ ID NO: 402246 - DNA, 33 bp, Homo sapien
gaaagccaatcactgagacaccaagtattgcca

SEQ ID NO: 402247 - DNA, 33 bp, Homo sapien
cacccactccactggcacatgagtcttcctgag

SEQ ID NO: 402248 - DNA, 33 bp, Homo sapien
cacccactccactggcgcatgagtcttcctgag

SEQ ID NO: 402249 - DNA, 33 bp, Homo sapien
taaaagttgccatctaggaaataggcgccaggt

SEQ ID NO: 402250 - DNA, 33 bp, Homo sapien
taaaagttgccatctatgaaataggcgccaggt

SEQ ID NO: 402251 - DNA, 33 bp, Homo sapien
gaatagcacgtaaaagcactgttttagtccagt

SEQ ID NO: 402252 - DNA, 33 bp, Homo sapien
gaatagcacgtaaaagtactgttttagtccagt

SEQ ID NO: 402253 - DNA, 33 bp, Homo sapien
ccacttgcctgtgaaaccgggaaccctcattgg

SEQ ID NO: 402254 - DNA, 33 bp, Homo sapien
ccacttgcctgtgaaagcgggaaccctcattgg

SEQ ID NO: 402255 - DNA, 33 bp, Homo sapien
gtaactgggggttaagaagagttggtggaggag

SEQ ID NO: 402256 - DNA, 33 bp, Homo sapien
gtaactgggggttaaggagagttggtggaggag

SEQ ID NO: 402257 - DNA, 33 bp, Homo sapien
aaaccgatttcggtcacctcctctgtgaagtcc

SEQ ID NO: 402258 - DNA, 33 bp, Homo sapien
aaaccgatttcggtcatctcctctgtgaagtcc

SEQ ID NO: 402259 - DNA, 33 bp, Homo sapien
tagtgaggatacagataaaaagtcagacacctt

SEQ ID NO: 402260 - DNA, 33 bp, Homo sapien
tagtgaggatacagatcaaaagtcagacacctt

SEQ ID NO: 402261 - DNA, 33 bp, Homo sapien
tggtaaagttgaataaatagaagcatacttaga

SEQ ID NO: 402262 - DNA, 33 bp, Homo sapien
tggtaaagttgaataagtagaagcatacttaga

SEQ ID NO: 402263 - DNA, 33 bp, Homo sapien
gagatggagtcatgcactaatgtgagcaatggg

SEQ ID NO: 402264 - DNA, 33 bp, Homo sapien
gagatggagtcatgcagtaatgtgagcaatggg

SEQ ID NO: 402265 - DNA, 33 bp, Homo sapien
aaacctactccactgccagtcatatgagtataa

SEQ ID NO: 402266 - DNA, 33 bp, Homo sapien
aaacctactccactgctagtcatatgagtataa

SEQ ID NO: 402267 - DNA, 33 bp, Homo sapien
cactttgctctcgggcaacttgaaaggcctagc

SEQ ID NO: 402268 - DNA, 33 bp, Homo sapien
cactttgctctcgggcgacttgaaaggcctagc

SEQ ID NO: 402269 - DNA, 33 bp, Homo sapien
gtagtacgcgtcccaccgtagcgcctccgggtg

SEQ ID NO: 402270 - DNA, 33 bp, Homo sapien
gtagtacgcgtcccactgtagcgcctccgggtg

SEQ ID NO: 402271 - DNA, 33 bp, Homo sapien
caatacaacatatcaggaatcagagtacatttt

SEQ ID NO: 402272 - DNA, 33 bp, Homo sapien
caatacaacatatcagtaatcagagtacatttt

SEQ ID NO: 402273 - DNA, 33 bp, Homo sapien
gacacagagtagattagcatggtccctgtgcag

SEQ ID NO: 402274 - DNA, 33 bp, Homo sapien
gacacagagtagattatcatggtccctgtgcag

SEQ ID NO: 402275 - DNA, 33 bp, Homo sapien
tgtgaataaggggcagaatacgaggccaagagc

SEQ ID NO: 402276 - DNA, 33 bp, Homo sapien
tgtgaataaggggcaggatacgaggccaagagc

SEQ ID NO: 402277 - DNA, 33 bp, Homo sapien
ctgtgtagtgatgtaaaggagaaaagatggagg

SEQ ID NO: 402278 - DNA, 33 bp, Homo sapien
ctgtgtagtgatgtaagggagaaaagatggagg

SEQ ID NO: 402279 - DNA, 33 bp, Homo sapien
tccctttaaagatcaccagcctgaggttatcaa

SEQ ID NO: 402280 - DNA, 33 bp, Homo sapien
tccctttaaagatcactagcctgaggttatcaa

SEQ ID NO: 402281 - DNA, 33 bp, Homo sapien
tgaaatgtcatcaggaagcagggtttgaagcat

SEQ ID NO: 402282 - DNA, 33 bp, Homo sapien
tgaaatgtcatcaggatgcagggtttgaagcat

SEQ ID NO: 402283 - DNA, 33 bp, Homo sapien
agataaccaagtacacaaggaaacaagacatca

SEQ ID NO: 402284 - DNA, 33 bp, Homo sapien
agataaccaagtacacgaggaaacaagacatca

SEQ ID NO: 402285 - DNA, 33 bp, Homo sapien
accagttattgccctacggtgccataattgctg

SEQ ID NO: 402286 - DNA, 33 bp, Homo sapien
accagttattgccctatggtgccataattgctg

SEQ ID NO: 402287 - DNA, 33 bp, Homo sapien
tgtgaagcaagatgaagtctccctgaaggctta

SEQ ID NO: 402288 - DNA, 33 bp, Homo sapien
tgtgaagcaagatgaattctccctgaaggctta

SEQ ID NO: 402289 - DNA, 33 bp, Homo sapien
taataaagacaagggaataacatgataaaacat

SEQ ID NO: 402290 - DNA, 33 bp, Homo sapien
taataaagacaagggagtaacatgataaaacat

SEQ ID NO: 402291 - DNA, 33 bp, Homo sapien
aaaccctgtcctgtacccatgattaacccagaa

SEQ ID NO: 402292 - DNA, 33 bp, Homo sapien
aaaccctgtcctgtactcatgattaacccagaa

SEQ ID NO: 402293 - DNA, 33 bp, Homo sapien
cagccatttaacgggcagaactgggtaaggggt

SEQ ID NO: 402294 - DNA, 33 bp, Homo sapien
cagccatttaacgggccgaactgggtaaggggt

SEQ ID NO: 402295 - DNA, 33 bp, Homo sapien
agaggcctaacctcaaagaaacactcactctat

SEQ ID NO: 402296 - DNA, 33 bp, Homo sapien
agaggcctaacctcaaggaaacactcactctat

SEQ ID NO: 402297 - DNA, 33 bp, Homo sapien
ttaaccattgagaccgacactcccttttaggcc

SEQ ID NO: 402298 - DNA, 33 bp, Homo sapien
ttaaccattgagaccgtcactcccttttaggcc

SEQ ID NO: 402299 - DNA, 33 bp, Homo sapien
ctgtgactccctggcaagaaaaaaaggatggct

SEQ ID NO: 402300 - DNA, 33 bp, Homo sapien
ctgtgactccctggcaggaaaaaaaggatggct

SEQ ID NO: 402301 - DNA, 33 bp, Homo sapien
tgacaaggcacatgcaacacatggaggggctgc

SEQ ID NO: 402302 - DNA, 33 bp, Homo sapien
tgacaaggcacatgcagcacatggaggggctgc

SEQ ID NO: 402303 - DNA, 33 bp, Homo sapien
tacttgatcatctccacccactgtgcacgagca

SEQ ID NO: 402304 - DNA, 33 bp, Homo sapien
tacttgatcatctccagccactgtgcacgagca

SEQ ID NO: 402305 - DNA, 33 bp, Homo sapien
gttgctgatacatttaaacctacctgcatttgt

SEQ ID NO: 402306 - DNA, 33 bp, Homo sapien
gttgctgatacatttatacctacctgcatttgt

SEQ ID NO: 402307 - DNA, 33 bp, Homo sapien
gagtgcaaaaattgaacggtcagtagagactag

SEQ ID NO: 402308 - DNA, 33 bp, Homo sapien
gagtgcaaaaattgaatggtcagtagagactag

SEQ ID NO: 402309 - DNA, 33 bp, Homo sapien
tgttacatttatagaaacagccccaggattaaa

SEQ ID NO: 402310 - DNA, 33 bp, Homo sapien
tgttacatttatagaagcagccccaggattaaa

SEQ ID NO: 402311 - DNA, 33 bp, Homo sapien
tctgaaatttcctgcaatcagcaagcttcctct

SEQ ID NO: 402312 - DNA, 33 bp, Homo sapien
tctgaaatttcctgcagtcagcaagcttcctct

SEQ ID NO: 402313 - DNA, 33 bp, Homo sapien
ccccctgtttcattcccctgtgaccctcgaaga

SEQ ID NO: 402314 - DNA, 33 bp, Homo sapien
ccccctgtttcattcctctgtgaccctcgaaga

SEQ ID NO: 402315 - DNA, 33 bp, Homo sapien
tgcacagtgaacccgtcaaaggaagtgtcagga

SEQ ID NO: 402316 - DNA, 33 bp, Homo sapien
tgcacagtgaacccgttaaaggaagtgtcagga

SEQ ID NO: 402317 - DNA, 33 bp, Homo sapien
agttcggctcagggaacatttaggtcttcctac

SEQ ID NO: 402318 - DNA, 33 bp, Homo sapien
agttcggctcagggaatatttaggtcttcctac

SEQ ID NO: 402319 - DNA, 33 bp, Homo sapien
agaatttagcacaaccaccagattcaataaacc

SEQ ID NO: 402320 - DNA, 33 bp, Homo sapien
agaatttagcacaaccgccagattcaataaacc

SEQ ID NO: 402321 - DNA, 33 bp, Homo sapien
gaagcaatgcgccccccaaccagtgtgatggag

SEQ ID NO: 402322 - DNA, 33 bp, Homo sapien
gaagcaatgcgccccctaaccagtgtgatggag

SEQ ID NO: 402323 - DNA, 33 bp, Homo sapien
tttataaaaaatgcaacgaatttcacaagttgc

SEQ ID NO: 402324 - DNA, 33 bp, Homo sapien
tttataaaaaatgcaatgaatttcacaagttgc

SEQ ID NO: 402325 - DNA, 33 bp, Homo sapien
tacaagtaggttaaaaacatcttgtaaggaaga

SEQ ID NO: 402326 - DNA, 33 bp, Homo sapien
tacaagtaggttaaaaccatcttgtaaggaaga

SEQ ID NO: 402327 - DNA, 33 bp, Homo sapien
aattggtacaatcttacatagcaaaacgatcac

SEQ ID NO: 402328 - DNA, 33 bp, Homo sapien
aattggtacaatcttatatagcaaaacgatcac

SEQ ID NO: 402329 - DNA, 33 bp, Homo sapien
taggttcttagcttgcactcactgaacagcctt

SEQ ID NO: 402330 - DNA, 33 bp, Homo sapien
taggttcttagcttgcgctcactgaacagcctt

SEQ ID NO: 402331 - DNA, 33 bp, Homo sapien
catagagataaaaaacagatgagtggttgccag

SEQ ID NO: 402332 - DNA, 33 bp, Homo sapien
catagagataaaaaacggatgagtggttgccag

SEQ ID NO: 402333 - DNA, 33 bp, Homo sapien
tatctgaacctctactaagctgagaagtctcaa

SEQ ID NO: 402334 - DNA, 33 bp, Homo sapien
tatctgaacctctactgagctgagaagtctcaa

SEQ ID NO: 402335 - DNA, 33 bp, Homo sapien
gaggtggaggttccaacgagccaagttcgcgct

SEQ ID NO: 402336 - DNA, 33 bp, Homo sapien
gaggtggaggttccaatgagccaagttcgcgct

SEQ ID NO: 402337 - DNA, 33 bp, Homo sapien
tagagacagggtttgcaacattgttcaggctgg

SEQ ID NO: 402338 - DNA, 33 bp, Homo sapien
tagagacagggtttgcgacattgttcaggctgg

SEQ ID NO: 402339 - DNA, 33 bp, Homo sapien
agaagtcagacctctcacctaaaccactgccac

SEQ ID NO: 402340 - DNA, 33 bp, Homo sapien
agaagtcagacctctcgcctaaaccactgccac

SEQ ID NO: 402341 - DNA, 33 bp, Homo sapien
ccgagaacgttacagaccgttattacagttctt

SEQ ID NO: 402342 - DNA, 33 bp, Homo sapien
ccgagaacgttacagatcgttattacagttctt

SEQ ID NO: 402343 - DNA, 33 bp, Homo sapien
agtatacacaaagcaactgaggaggcagaggaa

SEQ ID NO: 402344 - DNA, 33 bp, Homo sapien
agtatacacaaagcaagtgaggaggcagaggaa

SEQ ID NO: 402345 - DNA, 33 bp, Homo sapien
ggccagtcattctcacaattctatgaccactaa

SEQ ID NO: 402346 - DNA, 33 bp, Homo sapien
ggccagtcattctcacgattctatgaccactaa

SEQ ID NO: 402347 - DNA, 33 bp, Homo sapien
gcaaggctgcagggtaaaccttatatactgttg

SEQ ID NO: 402348 - DNA, 33 bp, Homo sapien
gcaaggctgcagggtagaccttatatactgttg

SEQ ID NO: 402349 - DNA, 33 bp, Homo sapien
aaaagataattaaggacgtcggtaatcctagca

SEQ ID NO: 402350 - DNA, 33 bp, Homo sapien
aaaagataattaaggatgtcggtaatcctagca

SEQ ID NO: 402351 - DNA, 33 bp, Homo sapien
tggtttaattgaggtacaaaattttgagggtct

SEQ ID NO: 402352 - DNA, 33 bp, Homo sapien
tggtttaattgaggtagaaaattttgagggtct

SEQ ID NO: 402353 - DNA, 33 bp, Homo sapien
aagaatataatttttacgtgtgtttgttcaata

SEQ ID NO: 402354 - DNA, 33 bp, Homo sapien
aagaatataatttttatgtgtgtttgttcaata

SEQ ID NO: 402355 - DNA, 33 bp, Homo sapien
cttttggagctgatccagagaagaagaacagta

SEQ ID NO: 402356 - DNA, 33 bp, Homo sapien
cttttggagctgatccggagaagaagaacagta

SEQ ID NO: 402357 - DNA, 33 bp, Homo sapien
ttaaaactgttccttcaaactacattttattag

SEQ ID NO: 402358 - DNA, 33 bp, Homo sapien
ttaaaactgttccttcgaactacattttattag

SEQ ID NO: 402359 - DNA, 33 bp, Homo sapien
tgtaatacaggcctacaaatgagaaatgagaat

SEQ ID NO: 402360 - DNA, 33 bp, Homo sapien
tgtaatacaggcctactaatgagaaatgagaat

SEQ ID NO: 402361 - DNA, 33 bp, Homo sapien
tgttgcttcaattaaaactacatactaagacca

SEQ ID NO: 402362 - DNA, 33 bp, Homo sapien
tgttgcttcaattaaacctacatactaagacca

SEQ ID NO: 402363 - DNA, 33 bp, Homo sapien
ttatatttttgtcacaatgtagtaacttgttaa

SEQ ID NO: 402364 - DNA, 33 bp, Homo sapien
ttatatttttgtcacagtgtagtaacttgttaa

SEQ ID NO: 402365 - DNA, 33 bp, Homo sapien
tgactgccagtgcttcccttctttgattttaca

SEQ ID NO: 402366 - DNA, 33 bp, Homo sapien
tgactgccagtgcttctcttctttgattttaca

SEQ ID NO: 402367 - DNA, 33 bp, Homo sapien
actgtagaacttgaaccggagagcacaggctgt

SEQ ID NO: 402368 - DNA, 33 bp, Homo sapien
actgtagaacttgaactggagagcacaggctgt

SEQ ID NO: 402369 - DNA, 33 bp, Homo sapien
catctcctcaaacctccaatactgtaagtcact

SEQ ID NO: 402370 - DNA, 33 bp, Homo sapien
catctcctcaaacctctaatactgtaagtcact

SEQ ID NO: 402371 - DNA, 33 bp, Homo sapien
atcctgtacttggttacccgttattaacgtctt

SEQ ID NO: 402372 - DNA, 33 bp, Homo sapien
atcctgtacttggttatccgttattaacgtctt

SEQ ID NO: 402373 - DNA, 33 bp, Homo sapien
aagaaaagggatgagacattatttgagataact

SEQ ID NO: 402374 - DNA, 33 bp, Homo sapien
aagaaaagggatgagatattatttgagataact

SEQ ID NO: 402375 - DNA, 33 bp, Homo sapien
tttacgcaacattgtacctgtgagaatctattg

SEQ ID NO: 402376 - DNA, 33 bp, Homo sapien
tttacgcaacattgtatctgtgagaatctattg

SEQ ID NO: 402377 - DNA, 33 bp, Homo sapien
cacaaactgttgtgaaaaatgttactttgaatg

SEQ ID NO: 402378 - DNA, 33 bp, Homo sapien
cacaaactgttgtgaagaatgttactttgaatg

SEQ ID NO: 402379 - DNA, 33 bp, Homo sapien
tggcaaatgtttgcagcatgagtgaataaaagg

SEQ ID NO: 402380 - DNA, 33 bp, Homo sapien
tggcaaatgtttgcaggatgagtgaataaaagg

SEQ ID NO: 402381 - DNA, 33 bp, Homo sapien
gcacgtttggattctacgtatgatgctatctgt

SEQ ID NO: 402382 - DNA, 33 bp, Homo sapien
gcacgtttggattctatgtatgatgctatctgt

SEQ ID NO: 402383 - DNA, 33 bp, Homo sapien
ccagtaccaactccccccgctgatgggaagtca

SEQ ID NO: 402384 - DNA, 33 bp, Homo sapien
ccagtaccaactcccctcgctgatgggaagtca

SEQ ID NO: 402385 - DNA, 33 bp, Homo sapien
ttgaaagagcacctggaaccagaaatatttgga

SEQ ID NO: 402386 - DNA, 33 bp, Homo sapien
ttgaaagagcacctgggaccagaaatatttgga

SEQ ID NO: 402387 - DNA, 33 bp, Homo sapien
aattccaatcatgttacgtcatacttaatttag

SEQ ID NO: 402388 - DNA, 33 bp, Homo sapien
aattccaatcatgttatgtcatacttaatttag

SEQ ID NO: 402389 - DNA, 33 bp, Homo sapien
cactctaaggccctcaccagtttcagaaagaaa

SEQ ID NO: 402390 - DNA, 33 bp, Homo sapien
cactctaaggccctcatcagtttcagaaagaaa

SEQ ID NO: 402391 - DNA, 33 bp, Homo sapien
tccttcatctactatactaaggatggcaaaaat

SEQ ID NO: 402392 - DNA, 33 bp, Homo sapien
tccttcatctactatattaaggatggcaaaaat

SEQ ID NO: 402393 - DNA, 33 bp, Homo sapien
aatctaaggcatccaaattattaagttttagta

SEQ ID NO: 402394 - DNA, 33 bp, Homo sapien
aatctaaggcatccaacttattaagttttagta

SEQ ID NO: 402395 - DNA, 33 bp, Homo sapien
attgtcccgttactcaacccctggccaccacca

SEQ ID NO: 402396 - DNA, 33 bp, Homo sapien
attgtcccgttactcagcccctggccaccacca

SEQ ID NO: 402397 - DNA, 33 bp, Homo sapien
aaaaaaaaatcacacacaagttctacagagagt

SEQ ID NO: 402398 - DNA, 33 bp, Homo sapien
aaaaaaaaatcacacagaagttctacagagagt

SEQ ID NO: 402399 - DNA, 33 bp, Homo sapien
tttacattaagtgttacgagccacaaatttcat

SEQ ID NO: 402400 - DNA, 33 bp, Homo sapien
tttacattaagtgttatgagccacaaatttcat

SEQ ID NO: 402401 - DNA, 33 bp, Homo sapien
aacatactttgggaaacgacacaggtgtgcact

SEQ ID NO: 402402 - DNA, 33 bp, Homo sapien
aacatactttgggaaaggacacaggtgtgcact

SEQ ID NO: 402403 - DNA, 33 bp, Homo sapien
agtaacagaagtttacaactccaagtcaatgca

SEQ ID NO: 402404 - DNA, 33 bp, Homo sapien
agtaacagaagtttacgactccaagtcaatgca

SEQ ID NO: 402405 - DNA, 33 bp, Homo sapien
ttataatcatctgtaaacttcacgactaatcgt

SEQ ID NO: 402406 - DNA, 33 bp, Homo sapien
ttataatcatctgtaagcttcacgactaatcgt

SEQ ID NO: 402407 - DNA, 33 bp, Homo sapien
accaagtgttctatatcaggctaggataaccta

SEQ ID NO: 402408 - DNA, 33 bp, Homo sapien
accaagtgttctatattaggctaggataaccta

SEQ ID NO: 402409 - DNA, 33 bp, Homo sapien
taaatcatactttcacagtccacgtgtttttag

SEQ ID NO: 402410 - DNA, 33 bp, Homo sapien
taaatcatactttcacggtccacgtgtttttag

SEQ ID NO: 402411 - DNA, 33 bp, Homo sapien
ctaggatgtagagaaagtaagatgattatagag

SEQ ID NO: 402412 - DNA, 33 bp, Homo sapien
ctaggatgtagagaaattaagatgattatagag

SEQ ID NO: 402413 - DNA, 33 bp, Homo sapien
tcccaagatttagccaatcacacattcagggaa

SEQ ID NO: 402414 - DNA, 33 bp, Homo sapien
tcccaagatttagccagtcacacattcagggaa

SEQ ID NO: 402415 - DNA, 33 bp, Homo sapien
aaggcgtgggcacccaaaagttgagctcagaaa

SEQ ID NO: 402416 - DNA, 33 bp, Homo sapien
aaggcgtgggcacccagaagttgagctcagaaa

SEQ ID NO: 402417 - DNA, 33 bp, Homo sapien
tttagcagggttgttacgtgatccaagccaggc

SEQ ID NO: 402418 - DNA, 33 bp, Homo sapien
tttagcagggttgttatgtgatccaagccaggc

SEQ ID NO: 402419 - DNA, 33 bp, Homo sapien
ctatcctggtgaacagaaacacgataagggctg

SEQ ID NO: 402420 - DNA, 33 bp, Homo sapien
ctatcctggtgaacagcaacacgataagggctg

SEQ ID NO: 402421 - DNA, 33 bp, Homo sapien
ttgtaaagttcctgcccaatcaaaagcttcgcg

SEQ ID NO: 402422 - DNA, 33 bp, Homo sapien
ttgtaaagttcctgcctaatcaaaagcttcgcg

SEQ ID NO: 402423 - DNA, 33 bp, Homo sapien
ctaatttgagtaaaggcagcctcttgacaaaga

SEQ ID NO: 402424 - DNA, 33 bp, Homo sapien
ctaatttgagtaaaggtagcctcttgacaaaga

SEQ ID NO: 402425 - DNA, 33 bp, Homo sapien
tagacactgtaccacaagtgccagggaaatgag

SEQ ID NO: 402426 - DNA, 33 bp, Homo sapien
tagacactgtaccacaggtgccagggaaatgag

SEQ ID NO: 402427 - DNA, 33 bp, Homo sapien
taaaacaaaaaaaaaactgacagagcatacatc

SEQ ID NO: 402428 - DNA, 33 bp, Homo sapien
taaaacaaaaaaaaaagtgacagagcatacatc

SEQ ID NO: 402429 - DNA, 33 bp, Homo sapien
tcctccaatgactcaagcacaggctgtttcagc

SEQ ID NO: 402430 - DNA, 33 bp, Homo sapien
tcctccaatgactcaatcacaggctgtttcagc

SEQ ID NO: 402431 - DNA, 33 bp, Homo sapien
gtgctaattttgtaatcagaacaacaaaaaaaa

SEQ ID NO: 402432 - DNA, 33 bp, Homo sapien
gtgctaattttgtaatgagaacaacaaaaaaaa

SEQ ID NO: 402433 - DNA, 33 bp, Homo sapien
aaggcaagtgtaaagcaactgtcatacaaggca

SEQ ID NO: 402434 - DNA, 33 bp, Homo sapien
aaggcaagtgtaaagccactgtcatacaaggca

SEQ ID NO: 402435 - DNA, 33 bp, Homo sapien
ctgcagggttggcccaagtggacgccagcccac

SEQ ID NO: 402436 - DNA, 33 bp, Homo sapien
ctgcagggttggcccatgtggacgccagcccac

SEQ ID NO: 402437 - DNA, 33 bp, Homo sapien
ctatgagtgttgctaacctgggctgagggcacc

SEQ ID NO: 402438 - DNA, 33 bp, Homo sapien
ctatgagtgttgctaatctgggctgagggcacc

SEQ ID NO: 402439 - DNA, 33 bp, Homo sapien
gtgctgggcagtgaacaccaagctgtcgtgtcc

SEQ ID NO: 402440 - DNA, 33 bp, Homo sapien
gtgctgggcagtgaacgccaagctgtcgtgtcc

SEQ ID NO: 402441 - DNA, 33 bp, Homo sapien
taaaattattttggctaaacttgagatgaggag

SEQ ID NO: 402442 - DNA, 33 bp, Homo sapien
taaaattattttggctcaacttgagatgaggag

SEQ ID NO: 402443 - DNA, 33 bp, Homo sapien
ttgctttctcactcctcaaatactgcttcatct

SEQ ID NO: 402444 - DNA, 33 bp, Homo sapien
ttgctttctcactccttaaatactgcttcatct

SEQ ID NO: 402445 - DNA, 33 bp, Homo sapien
ggcagagctattggcaagggagccgcagggtct

SEQ ID NO: 402446 - DNA, 33 bp, Homo sapien
ggcagagctattggcaggggagccgcagggtct

SEQ ID NO: 402447 - DNA, 33 bp, Homo sapien
atagtccaagtcttaaactctatgcatcctgcc

SEQ ID NO: 402448 - DNA, 33 bp, Homo sapien
atagtccaagtcttaacctctatgcatcctgcc

SEQ ID NO: 402449 - DNA, 33 bp, Homo sapien
aggacgtgatcaccatcaagatccttttcttct

SEQ ID NO: 402450 - DNA, 33 bp, Homo sapien
aggacgtgatcaccattaagatccttttcttct

SEQ ID NO: 402451 - DNA, 33 bp, Homo sapien
atggaattgagtgagcaaagtacagttaaataa

SEQ ID NO: 402452 - DNA, 33 bp, Homo sapien
atggaattgagtgagcgaagtacagttaaataa

SEQ ID NO: 402453 - DNA, 33 bp, Homo sapien
tctctctctatggaccactatgctaatggacaa

SEQ ID NO: 402454 - DNA, 33 bp, Homo sapien
tctctctctatggaccgctatgctaatggacaa

SEQ ID NO: 402455 - DNA, 33 bp, Homo sapien
tgctgaccacgtcttaggaaggtactcttagag

SEQ ID NO: 402456 - DNA, 33 bp, Homo sapien
tgctgaccacgtcttatgaaggtactcttagag

SEQ ID NO: 402457 - DNA, 33 bp, Homo sapien
tagcctagataacccaaacaaaataaagcaaac

SEQ ID NO: 402458 - DNA, 33 bp, Homo sapien
tagcctagataacccagacaaaataaagcaaac

SEQ ID NO: 402459 - DNA, 33 bp, Homo sapien
gctggtagctgataataaatgacttctaggggt

SEQ ID NO: 402460 - DNA, 33 bp, Homo sapien
gctggtagctgataatgaatgacttctaggggt

SEQ ID NO: 402461 - DNA, 33 bp, Homo sapien
tccatggcacaggaacaccgtctatatcttgct

SEQ ID NO: 402462 - DNA, 33 bp, Homo sapien
tccatggcacaggaacgccgtctatatcttgct

SEQ ID NO: 402463 - DNA, 33 bp, Homo sapien
aaccacttcaaatatcacctcctctgtaaaggc

SEQ ID NO: 402464 - DNA, 33 bp, Homo sapien
aaccacttcaaatatcgcctcctctgtaaaggc

SEQ ID NO: 402465 - DNA, 33 bp, Homo sapien
agacagactgggaaaggatctgcaagtagtgta

SEQ ID NO: 402466 - DNA, 33 bp, Homo sapien
agacagactgggaaagtatctgcaagtagtgta

SEQ ID NO: 402467 - DNA, 33 bp, Homo sapien
gtcagataacacaaccactgagaataagagccc

SEQ ID NO: 402468 - DNA, 33 bp, Homo sapien
gtcagataacacaaccgctgagaataagagccc

SEQ ID NO: 402469 - DNA, 33 bp, Homo sapien
atcaggtctgaggtcactcccacagcctacacg

SEQ ID NO: 402470 - DNA, 33 bp, Homo sapien
atcaggtctgaggtcattcccacagcctacacg

SEQ ID NO: 402471 - DNA, 33 bp, Homo sapien
gcagatgatgcggctgcaggcttctgggatatt

SEQ ID NO: 402472 - DNA, 33 bp, Homo sapien
gcagatgatgcggctgtaggcttctgggatatt

SEQ ID NO: 402473 - DNA, 33 bp, Homo sapien
ctagggcagagaacacgactcagcaagtgacat

SEQ ID NO: 402474 - DNA, 33 bp, Homo sapien
ctagggcagagaacactactcagcaagtgacat

SEQ ID NO: 402475 - DNA, 33 bp, Homo sapien
attctgtaataatcacgatgacaacagttaata

SEQ ID NO: 402476 - DNA, 33 bp, Homo sapien
attctgtaataatcactatgacaacagttaata

SEQ ID NO: 402477 - DNA, 33 bp, Homo sapien
gggtctcattctttcaacattcttagtcatcaa

SEQ ID NO: 402478 - DNA, 33 bp, Homo sapien
gggtctcattctttcatcattcttagtcatcaa

SEQ ID NO: 402479 - DNA, 33 bp, Homo sapien
ggtaagatgcttcctgcaggtgtccttctgtgc

SEQ ID NO: 402480 - DNA, 33 bp, Homo sapien
ggtaagatgcttcctgtaggtgtccttctgtgc

SEQ ID NO: 402481 - DNA, 33 bp, Homo sapien
tacaggttcagtctccacgtccaattaactcag

SEQ ID NO: 402482 - DNA, 33 bp, Homo sapien
tacaggttcagtctccgcgtccaattaactcag

SEQ ID NO: 402483 - DNA, 33 bp, Homo sapien
tctatgcaacttgacacagttcaaaaaattgtc

SEQ ID NO: 402484 - DNA, 33 bp, Homo sapien
tctatgcaacttgacagagttcaaaaaattgtc

SEQ ID NO: 402485 - DNA, 33 bp, Homo sapien
cttgagagttaaaggacgcagctctattgatga

SEQ ID NO: 402486 - DNA, 33 bp, Homo sapien
cttgagagttaaaggatgcagctctattgatga

SEQ ID NO: 402487 - DNA, 33 bp, Homo sapien
agactgagaaagtaaacgcaacacagtagtcat

SEQ ID NO: 402488 - DNA, 33 bp, Homo sapien
agactgagaaagtaaatgcaacacagtagtcat

SEQ ID NO: 402489 - DNA, 33 bp, Homo sapien
gaaggtatcacagggcaagtcactagatgggga

SEQ ID NO: 402490 - DNA, 33 bp, Homo sapien
gaaggtatcacagggcgagtcactagatgggga

SEQ ID NO: 402491 - DNA, 33 bp, Homo sapien
tctttgggaggtaaaacccagagatcagtgttg

SEQ ID NO: 402492 - DNA, 33 bp, Homo sapien
tctttgggaggtaaaatccagagatcagtgttg

SEQ ID NO: 402493 - DNA, 33 bp, Homo sapien
aagcttctgtaaagtacggagagataagtattg

SEQ ID NO: 402494 - DNA, 33 bp, Homo sapien
aagcttctgtaaagtatggagagataagtattg

SEQ ID NO: 402495 - DNA, 33 bp, Homo sapien
catctgggaatcagcactagctggccgagttta

SEQ ID NO: 402496 - DNA, 33 bp, Homo sapien
catctgggaatcagcattagctggccgagttta

SEQ ID NO: 402497 - DNA, 33 bp, Homo sapien
agatgggcaccgtgcacagggagagatggaaag

SEQ ID NO: 402498 - DNA, 33 bp, Homo sapien
agatgggcaccgtgcatagggagagatggaaag

SEQ ID NO: 402499 - DNA, 33 bp, Homo sapien
aaaggtcatcatgataacaaagtaggctctctg

SEQ ID NO: 402500 - DNA, 33 bp, Homo sapien
aaaggtcatcatgatagcaaagtaggctctctg

SEQ ID NO: 402501 - DNA, 33 bp, Homo sapien
aagcccacgatccacactggttggtgaatgatt

SEQ ID NO: 402502 - DNA, 33 bp, Homo sapien
aagcccacgatccacattggttggtgaatgatt

SEQ ID NO: 402503 - DNA, 33 bp, Homo sapien
ctggttagaaccttacacatcctttttcatctt

SEQ ID NO: 402504 - DNA, 33 bp, Homo sapien
ctggttagaaccttacgcatcctttttcatctt

SEQ ID NO: 402505 - DNA, 33 bp, Homo sapien
ttgccagttgctgtaagaaatgtgaacaggata

SEQ ID NO: 402506 - DNA, 33 bp, Homo sapien
ttgccagttgctgtaataaatgtgaacaggata

SEQ ID NO: 402507 - DNA, 33 bp, Homo sapien
catcagtcttctaagcaaggagaacctttttaa

SEQ ID NO: 402508 - DNA, 33 bp, Homo sapien
catcagtcttctaagctaggagaacctttttaa

SEQ ID NO: 402509 - DNA, 33 bp, Homo sapien
acagagcagagaatccagaagaggtgtatggac

SEQ ID NO: 402510 - DNA, 33 bp, Homo sapien
acagagcagagaatccggaagaggtgtatggac

SEQ ID NO: 402511 - DNA, 33 bp, Homo sapien
tatctggcttctgaaaaagaaaggaaacaagac

SEQ ID NO: 402512 - DNA, 33 bp, Homo sapien
tatctggcttctgaaagagaaaggaaacaagac

SEQ ID NO: 402513 - DNA, 33 bp, Homo sapien
ctgtcattaagtagaaagaaatcaaagcactgg

SEQ ID NO: 402514 - DNA, 33 bp, Homo sapien
ctgtcattaagtagaatgaaatcaaagcactgg

SEQ ID NO: 402515 - DNA, 33 bp, Homo sapien
gaaagctcaattaaaaagaattactgtgaagaa

SEQ ID NO: 402516 - DNA, 33 bp, Homo sapien
gaaagctcaattaaaaggaattactgtgaagaa

SEQ ID NO: 402517 - DNA, 33 bp, Homo sapien
tcttttcatgacagtaaagttaaaacaggactc

SEQ ID NO: 402518 - DNA, 33 bp, Homo sapien
tcttttcatgacagtagagttaaaacaggactc

SEQ ID NO: 402519 - DNA, 33 bp, Homo sapien
tgcaaatctctgtgaacgttaccagctttaagt

SEQ ID NO: 402520 - DNA, 33 bp, Homo sapien
tgcaaatctctgtgaatgttaccagctttaagt

SEQ ID NO: 402521 - DNA, 33 bp, Homo sapien
cacctttcccaacctacccatagctcgaaagtc

SEQ ID NO: 402522 - DNA, 33 bp, Homo sapien
cacctttcccaacctagccatagctcgaaagtc

SEQ ID NO: 402523 - DNA, 33 bp, Homo sapien
ttgaagacagagaagaacagatacttgaaaata

SEQ ID NO: 402524 - DNA, 33 bp, Homo sapien
ttgaagacagagaagagcagatacttgaaaata

SEQ ID NO: 402525 - DNA, 33 bp, Homo sapien
ggacagacctaatacaagagtcactaagctcag

SEQ ID NO: 402526 - DNA, 33 bp, Homo sapien
ggacagacctaatacaggagtcactaagctcag

SEQ ID NO: 402527 - DNA, 33 bp, Homo sapien
tgaaactctgaaatgcaaaaagaaaagaagagc

SEQ ID NO: 402528 - DNA, 33 bp, Homo sapien
tgaaactctgaaatgcgaaaagaaaagaagagc

SEQ ID NO: 402529 - DNA, 33 bp, Homo sapien
tcttttaacatgtgtcaaaattttcaaagtaca

SEQ ID NO: 402530 - DNA, 33 bp, Homo sapien
tcttttaacatgtgtcgaaattttcaaagtaca

SEQ ID NO: 402531 - DNA, 33 bp, Homo sapien
tataaaagtaattgacaactctgggtgattaag

SEQ ID NO: 402532 - DNA, 33 bp, Homo sapien
tataaaagtaattgacgactctgggtgattaag

SEQ ID NO: 402533 - DNA, 33 bp, Homo sapien
aatacggaagaagcaacgtagtccctaaatgaa

SEQ ID NO: 402534 - DNA, 33 bp, Homo sapien
aatacggaagaagcaatgtagtccctaaatgaa

SEQ ID NO: 402535 - DNA, 33 bp, Homo sapien
gaaacctctaatttaacatgccaataagtctag

SEQ ID NO: 402536 - DNA, 33 bp, Homo sapien
gaaacctctaatttaatatgccaataagtctag

SEQ ID NO: 402537 - DNA, 33 bp, Homo sapien
tgaactgtttattacacatgctattctgtgtgt

SEQ ID NO: 402538 - DNA, 33 bp, Homo sapien
tgaactgtttattacatatgctattctgtgtgt

SEQ ID NO: 402539 - DNA, 33 bp, Homo sapien
attcagcctcttcagacactcttgtgctgtgca

SEQ ID NO: 402540 - DNA, 33 bp, Homo sapien
attcagcctcttcagatactcttgtgctgtgca

SEQ ID NO: 402541 - DNA, 33 bp, Homo sapien
ttcccagggtttgacccggtatctggcacaaag

SEQ ID NO: 402542 - DNA, 33 bp, Homo sapien
ttcccagggtttgacctggtatctggcacaaag

SEQ ID NO: 402543 - DNA, 33 bp, Homo sapien
ccatcccaaccagagaacccgtcattccttcct

SEQ ID NO: 402544 - DNA, 33 bp, Homo sapien
ccatcccaaccagagaccccgtcattccttcct

SEQ ID NO: 402545 - DNA, 33 bp, Homo sapien
tgagacacctgagagacatccaagtgaagatgt

SEQ ID NO: 402546 - DNA, 33 bp, Homo sapien
tgagacacctgagagagatccaagtgaagatgt

SEQ ID NO: 402547 - DNA, 33 bp, Homo sapien
atttaaaccaaaacataagaatgaaaattacct

SEQ ID NO: 402548 - DNA, 33 bp, Homo sapien
atttaaaccaaaacatgagaatgaaaattacct

SEQ ID NO: 402549 - DNA, 33 bp, Homo sapien
tggattgcatgagtagaaaaaccggaaagtttc

SEQ ID NO: 402550 - DNA, 33 bp, Homo sapien
tggattgcatgagtaggaaaaccggaaagtttc

SEQ ID NO: 402551 - DNA, 33 bp, Homo sapien
atgtcatctgttactaggtttttatagctccaa

SEQ ID NO: 402552 - DNA, 33 bp, Homo sapien
atgtcatctgttactatgtttttatagctccaa

SEQ ID NO: 402553 - DNA, 33 bp, Homo sapien
acataaacttttctgtcaatccaggggactctc

SEQ ID NO: 402554 - DNA, 33 bp, Homo sapien
acataaacttttctgtgaatccaggggactctc

SEQ ID NO: 402555 - DNA, 33 bp, Homo sapien
attgctgatgatgcaacggccttccaagtcatg

SEQ ID NO: 402556 - DNA, 33 bp, Homo sapien
attgctgatgatgcaagggccttccaagtcatg

SEQ ID NO: 402557 - DNA, 33 bp, Homo sapien
agaaggataatgaagggcctccttaatcagagt

SEQ ID NO: 402558 - DNA, 33 bp, Homo sapien
agaaggataatgaaggtcctccttaatcagagt

SEQ ID NO: 402559 - DNA, 33 bp, Homo sapien
agatatatgacttactaacctttgcagagctta

SEQ ID NO: 402560 - DNA, 33 bp, Homo sapien
agatatatgacttactcacctttgcagagctta

SEQ ID NO: 402561 - DNA, 33 bp, Homo sapien
aatatcttgaagaaaacaggcgctcaaggctca

SEQ ID NO: 402562 - DNA, 33 bp, Homo sapien
aatatcttgaagaaaataggcgctcaaggctca

SEQ ID NO: 402563 - DNA, 33 bp, Homo sapien
aagtataaacacaatccatctctcttcaaagca

SEQ ID NO: 402564 - DNA, 33 bp, Homo sapien
aagtataaacacaatctatctctcttcaaagca

SEQ ID NO: 402565 - DNA, 33 bp, Homo sapien
gctagatgacaacaaaagtgaatgaattacagc

SEQ ID NO: 402566 - DNA, 33 bp, Homo sapien
gctagatgacaacaaaggtgaatgaattacagc

SEQ ID NO: 402567 - DNA, 33 bp, Homo sapien
gatatggacaatttccacaaaaagcataggagc

SEQ ID NO: 402568 - DNA, 33 bp, Homo sapien
gatatggacaatttccgcaaaaagcataggagc

SEQ ID NO: 402569 - DNA, 33 bp, Homo sapien
agaagggcaaaaccaacggaatcacagacaagt

SEQ ID NO: 402570 - DNA, 33 bp, Homo sapien
agaagggcaaaaccaagggaatcacagacaagt

SEQ ID NO: 402571 - DNA, 33 bp, Homo sapien
aagagctaggaataggacaaaaaccgaataata

SEQ ID NO: 402572 - DNA, 33 bp, Homo sapien
aagagctaggaatagggcaaaaaccgaataata

SEQ ID NO: 402573 - DNA, 33 bp, Homo sapien
cactgttgtatagatgaatgaagttagaaacac

SEQ ID NO: 402574 - DNA, 33 bp, Homo sapien
cactgttgtatagatgcatgaagttagaaacac

SEQ ID NO: 402575 - DNA, 33 bp, Homo sapien
ttcccttccggcattaaaattctatgactcaag

SEQ ID NO: 402576 - DNA, 33 bp, Homo sapien
ttcccttccggcattacaattctatgactcaag

SEQ ID NO: 402577 - DNA, 33 bp, Homo sapien
caacttagtgtggaacaaaacattacaaatatg

SEQ ID NO: 402578 - DNA, 33 bp, Homo sapien
caacttagtgtggaacgaaacattacaaatatg

SEQ ID NO: 402579 - DNA, 33 bp, Homo sapien
gtggaaggagggcgtgcatatatattggtagac

SEQ ID NO: 402580 - DNA, 33 bp, Homo sapien
gtggaaggagggcgtggatatatattggtagac

SEQ ID NO: 402581 - DNA, 33 bp, Homo sapien
ctttggagcttatatgccaccaaggtaggacca

SEQ ID NO: 402582 - DNA, 33 bp, Homo sapien
ctttggagcttatatgtcaccaaggtaggacca

SEQ ID NO: 402583 - DNA, 33 bp, Homo sapien
gctgccttaacttagcacaaatgcaaacttgcc

SEQ ID NO: 402584 - DNA, 33 bp, Homo sapien
gctgccttaacttagcgcaaatgcaaacttgcc

SEQ ID NO: 402585 - DNA, 33 bp, Homo sapien
tttctggtttgaccgaatccatgtttgttttaa

SEQ ID NO: 402586 - DNA, 33 bp, Homo sapien
tttctggtttgaccgagtccatgtttgttttaa

SEQ ID NO: 402587 - DNA, 33 bp, Homo sapien
caaattgaaagctgaacccagtgattagagagg

SEQ ID NO: 402588 - DNA, 33 bp, Homo sapien
caaattgaaagctgaatccagtgattagagagg

SEQ ID NO: 402589 - DNA, 33 bp, Homo sapien
tgaagaagtggatgtacgagaaactgtacatgt

SEQ ID NO: 402590 - DNA, 33 bp, Homo sapien
tgaagaagtggatgtatgagaaactgtacatgt

SEQ ID NO: 402591 - DNA, 33 bp, Homo sapien
agagctaattttcttaagacacacagcaacttc

SEQ ID NO: 402592 - DNA, 33 bp, Homo sapien
agagctaattttcttaggacacacagcaacttc

SEQ ID NO: 402593 - DNA, 33 bp, Homo sapien
attaactgactacacaatgccttttaagggccc

SEQ ID NO: 402594 - DNA, 33 bp, Homo sapien
attaactgactacacagtgccttttaagggccc

SEQ ID NO: 402595 - DNA, 33 bp, Homo sapien
attctttgaccaacagaatggttgcacaacact

SEQ ID NO: 402596 - DNA, 33 bp, Homo sapien
attctttgaccaacaggatggttgcacaacact

SEQ ID NO: 402597 - DNA, 33 bp, Homo sapien
cgaacacctctgcggaatcccccagcttcacag

SEQ ID NO: 402598 - DNA, 33 bp, Homo sapien
cgaacacctctgcggagtcccccagcttcacag

SEQ ID NO: 402599 - DNA, 33 bp, Homo sapien
gattagttaagctatgaagagacctaacattct

SEQ ID NO: 402600 - DNA, 33 bp, Homo sapien
gattagttaagctatggagagacctaacattct

SEQ ID NO: 402601 - DNA, 33 bp, Homo sapien
aaaagttgacattggacatttgatcaagataaa

SEQ ID NO: 402602 - DNA, 33 bp, Homo sapien
aaaagttgacattggatatttgatcaagataaa

SEQ ID NO: 402603 - DNA, 33 bp, Homo sapien
agtgactggagctgttaaaatgattattccagt

SEQ ID NO: 402604 - DNA, 33 bp, Homo sapien
agtgactggagctgttgaaatgattattccagt

SEQ ID NO: 402605 - DNA, 33 bp, Homo sapien
aggttacactctctgacggatcatggaattagc

SEQ ID NO: 402606 - DNA, 33 bp, Homo sapien
aggttacactctctgatggatcatggaattagc

SEQ ID NO: 402607 - DNA, 33 bp, Homo sapien
gggggctctaattatcagagactcctagcaacc

SEQ ID NO: 402608 - DNA, 33 bp, Homo sapien
gggggctctaattatcggagactcctagcaacc

SEQ ID NO: 402609 - DNA, 33 bp, Homo sapien
cagggcaccaggtcccaaggccgcacacagcag

SEQ ID NO: 402610 - DNA, 33 bp, Homo sapien
cagggcaccaggtcccgaggccgcacacagcag

SEQ ID NO: 402611 - DNA, 33 bp, Homo sapien
caagtgattccaaagcgcagccagggctaagag

SEQ ID NO: 402612 - DNA, 33 bp, Homo sapien
caagtgattccaaagctcagccagggctaagag

SEQ ID NO: 402613 - DNA, 33 bp, Homo sapien
ctgtaaccttgagcaccgtacttcatctcccca

SEQ ID NO: 402614 - DNA, 33 bp, Homo sapien
ctgtaaccttgagcactgtacttcatctcccca

SEQ ID NO: 402615 - DNA, 33 bp, Homo sapien
aactttctggcactcaaaggagcttcatggtga

SEQ ID NO: 402616 - DNA, 33 bp, Homo sapien
aactttctggcactcagaggagcttcatggtga

SEQ ID NO: 402617 - DNA, 33 bp, Homo sapien
accatccctaggtgtccaccattatccctggat

SEQ ID NO: 402618 - DNA, 33 bp, Homo sapien
accatccctaggtgtctaccattatccctggat

SEQ ID NO: 402619 - DNA, 33 bp, Homo sapien
caggctccaggccaacagagggccttctagaac

SEQ ID NO: 402620 - DNA, 33 bp, Homo sapien
caggctccaggccaacggagggccttctagaac

SEQ ID NO: 402621 - DNA, 33 bp, Homo sapien
gggtgaatgttctagaaagcaaggtcattgtga

SEQ ID NO: 402622 - DNA, 33 bp, Homo sapien
gggtgaatgttctagagagcaaggtcattgtga

SEQ ID NO: 402623 - DNA, 33 bp, Homo sapien
aagaaggcattgatggaaacagtggttctgttt

SEQ ID NO: 402624 - DNA, 33 bp, Homo sapien
aagaaggcattgatgggaacagtggttctgttt

SEQ ID NO: 402625 - DNA, 33 bp, Homo sapien
caggaataggtgtagtaaagctcttggaaccaa

SEQ ID NO: 402626 - DNA, 33 bp, Homo sapien
caggaataggtgtagtgaagctcttggaaccaa

SEQ ID NO: 402627 - DNA, 33 bp, Homo sapien
aaaacttacagcttgaaattcaaaaaaacaaaa

SEQ ID NO: 402628 - DNA, 33 bp, Homo sapien
aaaacttacagcttgagattcaaaaaaacaaaa

SEQ ID NO: 402629 - DNA, 33 bp, Homo sapien
caatcctccaaaagaacgccacagtaccacaaa

SEQ ID NO: 402630 - DNA, 33 bp, Homo sapien
caatcctccaaaagaatgccacagtaccacaaa

SEQ ID NO: 402631 - DNA, 33 bp, Homo sapien
cgtggaggtggcgccacaagaagtctgagcatg

SEQ ID NO: 402632 - DNA, 33 bp, Homo sapien
cgtggaggtggcgccataagaagtctgagcatg

SEQ ID NO: 402633 - DNA, 33 bp, Homo sapien
cactctggaactgtccaagaacgaacctgccat

SEQ ID NO: 402634 - DNA, 33 bp, Homo sapien
cactctggaactgtccgagaacgaacctgccat

SEQ ID NO: 402635 - DNA, 33 bp, Homo sapien
agtagggcagtggttaaaagtgcttggagggca

SEQ ID NO: 402636 - DNA, 33 bp, Homo sapien
agtagggcagtggttagaagtgcttggagggca

SEQ ID NO: 402637 - DNA, 33 bp, Homo sapien
actgccggtacaagccagagcagcagaacaact

SEQ ID NO: 402638 - DNA, 33 bp, Homo sapien
actgccggtacaagccggagcagcagaacaact

SEQ ID NO: 402639 - DNA, 33 bp, Homo sapien
tgtgtacagttttccacaaaagtcaataaacaa

SEQ ID NO: 402640 - DNA, 33 bp, Homo sapien
tgtgtacagttttccagaaaagtcaataaacaa

SEQ ID NO: 402641 - DNA, 33 bp, Homo sapien
cacctcccccgacatacatatccattagaacac

SEQ ID NO: 402642 - DNA, 33 bp, Homo sapien
cacctcccccgacatatatatccattagaacac

SEQ ID NO: 402643 - DNA, 33 bp, Homo sapien
ttgtagcagctgagaaatgagctgggaaggggc

SEQ ID NO: 402644 - DNA, 33 bp, Homo sapien
ttgtagcagctgagaagtgagctgggaaggggc

SEQ ID NO: 402645 - DNA, 33 bp, Homo sapien
cagaacctcgaactccactctttcatgagacag

SEQ ID NO: 402646 - DNA, 33 bp, Homo sapien
cagaacctcgaactcctctctttcatgagacag

SEQ ID NO: 402647 - DNA, 33 bp, Homo sapien
agtgcccagatgctagaaggtacttgccaagac

SEQ ID NO: 402648 - DNA, 33 bp, Homo sapien
agtgcccagatgctagtaggtacttgccaagac

SEQ ID NO: 402649 - DNA, 33 bp, Homo sapien
ctctctacaaaatgaaagcgactgttgagagaa

SEQ ID NO: 402650 - DNA, 33 bp, Homo sapien
ctctctacaaaatgaaggcgactgttgagagaa

SEQ ID NO: 402651 - DNA, 33 bp, Homo sapien
tccctgtggcaccatgaaacagccctgtgagca

SEQ ID NO: 402652 - DNA, 33 bp, Homo sapien
tccctgtggcaccatggaacagccctgtgagca

SEQ ID NO: 402653 - DNA, 33 bp, Homo sapien
cattcccagcggaagacgagccaggatctcaga

SEQ ID NO: 402654 - DNA, 33 bp, Homo sapien
cattcccagcggaagatgagccaggatctcaga

SEQ ID NO: 402655 - DNA, 33 bp, Homo sapien
tactctcagatgattacggtggtctaaatgttt

SEQ ID NO: 402656 - DNA, 33 bp, Homo sapien
tactctcagatgattagggtggtctaaatgttt

SEQ ID NO: 402657 - DNA, 33 bp, Homo sapien
tgctcaacctgatggacgtgtcctttgaaagtg

SEQ ID NO: 402658 - DNA, 33 bp, Homo sapien
tgctcaacctgatggatgtgtcctttgaaagtg

SEQ ID NO: 402659 - DNA, 33 bp, Homo sapien
cccactcctgtctctcacactttcaaaggacac

SEQ ID NO: 402660 - DNA, 33 bp, Homo sapien
cccactcctgtctctcgcactttcaaaggacac

SEQ ID NO: 402661 - DNA, 33 bp, Homo sapien
ttatatgattaggttgaaccactcagctggttg

SEQ ID NO: 402662 - DNA, 33 bp, Homo sapien
ttatatgattaggttggaccactcagctggttg

SEQ ID NO: 402663 - DNA, 33 bp, Homo sapien
atttggtgctaagcccacctcattgtagagccc

SEQ ID NO: 402664 - DNA, 33 bp, Homo sapien
atttggtgctaagcccccctcattgtagagccc

SEQ ID NO: 402665 - DNA, 33 bp, Homo sapien
cccccaattagttggaccatgccctcctcagtg

SEQ ID NO: 402666 - DNA, 33 bp, Homo sapien
cccccaattagttggatcatgccctcctcagtg

SEQ ID NO: 402667 - DNA, 33 bp, Homo sapien
tgtgcagagatacagaagtataaagaggtataa

SEQ ID NO: 402668 - DNA, 33 bp, Homo sapien
tgtgcagagatacagaggtataaagaggtataa

SEQ ID NO: 402669 - DNA, 33 bp, Homo sapien
atgtgaatcctacccacgcactagtaggtatca

SEQ ID NO: 402670 - DNA, 33 bp, Homo sapien
atgtgaatcctacccatgcactagtaggtatca

SEQ ID NO: 402671 - DNA, 33 bp, Homo sapien
tggttcacaaactgaaatgtgcctgtccatgag

SEQ ID NO: 402672 - DNA, 33 bp, Homo sapien
tggttcacaaactgaagtgtgcctgtccatgag

SEQ ID NO: 402673 - DNA, 33 bp, Homo sapien
tggagcagatttcaaggactcaactgcaccacc

SEQ ID NO: 402674 - DNA, 33 bp, Homo sapien
tggagcagatttcaagtactcaactgcaccacc

SEQ ID NO: 402675 - DNA, 33 bp, Homo sapien
acaacatggtacaccacctgccccttcctgcct

SEQ ID NO: 402676 - DNA, 33 bp, Homo sapien
acaacatggtacaccatctgccccttcctgcct

SEQ ID NO: 402677 - DNA, 33 bp, Homo sapien
acagctaagtcttttaaccacaccatgctactc

SEQ ID NO: 402678 - DNA, 33 bp, Homo sapien
acagctaagtcttttagccacaccatgctactc

SEQ ID NO: 402679 - DNA, 33 bp, Homo sapien
gccattaatggtaagacgttatagacatgttag

SEQ ID NO: 402680 - DNA, 33 bp, Homo sapien
gccattaatggtaagatgttatagacatgttag

SEQ ID NO: 402681 - DNA, 33 bp, Homo sapien
ttgaggtcttcctcaggctgagcaggcttaccc

SEQ ID NO: 402682 - DNA, 33 bp, Homo sapien
ttgaggtcttcctcagtctgagcaggcttaccc

SEQ ID NO: 402683 - DNA, 33 bp, Homo sapien
gcgagtgggagctgagaaatggcctctcagttt

SEQ ID NO: 402684 - DNA, 33 bp, Homo sapien
gcgagtgggagctgaggaatggcctctcagttt

SEQ ID NO: 402685 - DNA, 33 bp, Homo sapien
tctctgctatattgaccgccttctatatgtcat

SEQ ID NO: 402686 - DNA, 33 bp, Homo sapien
tctctgctatattgactgccttctatatgtcat

SEQ ID NO: 402687 - DNA, 33 bp, Homo sapien
atctatcctgaagagacagttttatcctccacc

SEQ ID NO: 402688 - DNA, 33 bp, Homo sapien
atctatcctgaagagagagttttatcctccacc

SEQ ID NO: 402689 - DNA, 33 bp, Homo sapien
gatatctgttgtatggaaatttagcttataact

SEQ ID NO: 402690 - DNA, 33 bp, Homo sapien
gatatctgttgtatgggaatttagcttataact

SEQ ID NO: 402691 - DNA, 33 bp, Homo sapien
acatagaacagtcatagagtcataggccagccc

SEQ ID NO: 402692 - DNA, 33 bp, Homo sapien
acatagaacagtcatatagtcataggccagccc

SEQ ID NO: 402693 - DNA, 33 bp, Homo sapien
ttcaatccactttgacagatgaggcccgaaaag

SEQ ID NO: 402694 - DNA, 33 bp, Homo sapien
ttcaatccactttgacggatgaggcccgaaaag

SEQ ID NO: 402695 - DNA, 33 bp, Homo sapien
ttatcctgaaccaacaatggattaacatggttg

SEQ ID NO: 402696 - DNA, 33 bp, Homo sapien
ttatcctgaaccaacagtggattaacatggttg

SEQ ID NO: 402697 - DNA, 33 bp, Homo sapien
ctcatatacaaatccaacactttcttccatgct

SEQ ID NO: 402698 - DNA, 33 bp, Homo sapien
ctcatatacaaatccagcactttcttccatgct

SEQ ID NO: 402699 - DNA, 33 bp, Homo sapien
ttgacagagcatcacaacaagtatgaaactgga

SEQ ID NO: 402700 - DNA, 33 bp, Homo sapien
ttgacagagcatcacatcaagtatgaaactgga

SEQ ID NO: 402701 - DNA, 33 bp, Homo sapien
agtgtccctgtcaacaaaggctgggtttagcca

SEQ ID NO: 402702 - DNA, 33 bp, Homo sapien
agtgtccctgtcaacagaggctgggtttagcca

SEQ ID NO: 402703 - DNA, 33 bp, Homo sapien
ctcagttgctgtaaaagcctctgcacaatccca

SEQ ID NO: 402704 - DNA, 33 bp, Homo sapien
ctcagttgctgtaaaatcctctgcacaatccca

SEQ ID NO: 402705 - DNA, 33 bp, Homo sapien
gtctttctaccttgtccacctgaccatcttccc

SEQ ID NO: 402706 - DNA, 33 bp, Homo sapien
gtctttctaccttgtctacctgaccatcttccc

SEQ ID NO: 402707 - DNA, 33 bp, Homo sapien
aagccacctttcataaatggcacctaccatgtt

SEQ ID NO: 402708 - DNA, 33 bp, Homo sapien
aagccacctttcataactggcacctaccatgtt

SEQ ID NO: 402709 - DNA, 33 bp, Homo sapien
tgtccagagacctacactctttgaaggagctta

SEQ ID NO: 402710 - DNA, 33 bp, Homo sapien
tgtccagagacctacattctttgaaggagctta

SEQ ID NO: 402711 - DNA, 33 bp, Homo sapien
gatatcagccacccaacacaagaatgccaacca

SEQ ID NO: 402712 - DNA, 33 bp, Homo sapien
gatatcagccacccaagacaagaatgccaacca

SEQ ID NO: 402713 - DNA, 33 bp, Homo sapien
gaaatcagcacaaagacgggcaagctcaggctt

SEQ ID NO: 402714 - DNA, 33 bp, Homo sapien
gaaatcagcacaaagatgggcaagctcaggctt

SEQ ID NO: 402715 - DNA, 33 bp, Homo sapien
atagaaggattggaacggagaacatctcccgaa

SEQ ID NO: 402716 - DNA, 33 bp, Homo sapien
atagaaggattggaactgagaacatctcccgaa

SEQ ID NO: 402717 - DNA, 33 bp, Homo sapien
ccatgaagctgaaagaataggaattggctgtcc

SEQ ID NO: 402718 - DNA, 33 bp, Homo sapien
ccatgaagctgaaagagtaggaattggctgtcc

SEQ ID NO: 402719 - DNA, 33 bp, Homo sapien
ggaattgagaatgaccacagacttgactagctg

SEQ ID NO: 402720 - DNA, 33 bp, Homo sapien
ggaattgagaatgaccgcagacttgactagctg

SEQ ID NO: 402721 - DNA, 33 bp, Homo sapien
acttctatactcgaagaaagtactatgtgtctg

SEQ ID NO: 402722 - DNA, 33 bp, Homo sapien
acttctatactcgaaggaagtactatgtgtctg

SEQ ID NO: 402723 - DNA, 33 bp, Homo sapien
aattggaccagaaaacagtgtcttcatgggtat

SEQ ID NO: 402724 - DNA, 33 bp, Homo sapien
aattggaccagaaaaccgtgtcttcatgggtat

SEQ ID NO: 402725 - DNA, 33 bp, Homo sapien
taagaggcgggcagaactgtagaagaacactga

SEQ ID NO: 402726 - DNA, 33 bp, Homo sapien
taagaggcgggcagaattgtagaagaacactga

SEQ ID NO: 402727 - DNA, 33 bp, Homo sapien
tacagtggccactaccaaaaagatgaaagataa

SEQ ID NO: 402728 - DNA, 33 bp, Homo sapien
tacagtggccactaccgaaaagatgaaagataa

SEQ ID NO: 402729 - DNA, 33 bp, Homo sapien
cagcagtaggaattagcccacccaagcccatgg

SEQ ID NO: 402730 - DNA, 33 bp, Homo sapien
cagcagtaggaattagtccacccaagcccatgg

SEQ ID NO: 402731 - DNA, 33 bp, Homo sapien
atttctcagcaatggaacaatacctaagatttg

SEQ ID NO: 402732 - DNA, 33 bp, Homo sapien
atttctcagcaatggagcaatacctaagatttg

SEQ ID NO: 402733 - DNA, 33 bp, Homo sapien
gccttgcagaggtttaagcaggggcgtttgctt

SEQ ID NO: 402734 - DNA, 33 bp, Homo sapien
gccttgcagaggtttaggcaggggcgtttgctt

SEQ ID NO: 402735 - DNA, 33 bp, Homo sapien
ctaagctgtgtctagagtacttggataaataag

SEQ ID NO: 402736 - DNA, 33 bp, Homo sapien
ctaagctgtgtctagattacttggataaataag

SEQ ID NO: 402737 - DNA, 33 bp, Homo sapien
actagaaatcatgagccgaattttaattttact

SEQ ID NO: 402738 - DNA, 33 bp, Homo sapien
actagaaatcatgagctgaattttaattttact

SEQ ID NO: 402739 - DNA, 33 bp, Homo sapien
tacctgtgttcatataacattctatacacttta

SEQ ID NO: 402740 - DNA, 33 bp, Homo sapien
tacctgtgttcatatagcattctatacacttta

SEQ ID NO: 402741 - DNA, 33 bp, Homo sapien
cagaagaagttttccacgacatgggtcagctgg

SEQ ID NO: 402742 - DNA, 33 bp, Homo sapien
cagaagaagttttccaggacatgggtcagctgg

SEQ ID NO: 402743 - DNA, 33 bp, Homo sapien
ttagaaatgttagctacgttccacttctgtatg

SEQ ID NO: 402744 - DNA, 33 bp, Homo sapien
ttagaaatgttagctatgttccacttctgtatg

SEQ ID NO: 402745 - DNA, 33 bp, Homo sapien
tctattctttctctgaagcccaaagtaaatttt

SEQ ID NO: 402746 - DNA, 33 bp, Homo sapien
tctattctttctctgacgcccaaagtaaatttt

SEQ ID NO: 402747 - DNA, 33 bp, Homo sapien
gaaccagactctctgaaaataaggcccaggaat

SEQ ID NO: 402748 - DNA, 33 bp, Homo sapien
gaaccagactctctgataataaggcccaggaat

SEQ ID NO: 402749 - DNA, 33 bp, Homo sapien
cctgctcttagcacccactatcttagtcacttg

SEQ ID NO: 402750 - DNA, 33 bp, Homo sapien
cctgctcttagcacccgctatcttagtcacttg

SEQ ID NO: 402751 - DNA, 33 bp, Homo sapien
agggtgctccttcatgaacatcctgcagactga

SEQ ID NO: 402752 - DNA, 33 bp, Homo sapien
agggtgctccttcatggacatcctgcagactga

SEQ ID NO: 402753 - DNA, 33 bp, Homo sapien
agcttccatcaagcaaacatctggtcttaggct

SEQ ID NO: 402754 - DNA, 33 bp, Homo sapien
agcttccatcaagcaaccatctggtcttaggct

SEQ ID NO: 402755 - DNA, 33 bp, Homo sapien
caattcctcttggctcaaacctcaggcaggaat

SEQ ID NO: 402756 - DNA, 33 bp, Homo sapien
caattcctcttggctcgaacctcaggcaggaat

SEQ ID NO: 402757 - DNA, 33 bp, Homo sapien
actaagtaaatccctagcatagaacctggacac

SEQ ID NO: 402758 - DNA, 33 bp, Homo sapien
actaagtaaatccctatcatagaacctggacac

SEQ ID NO: 402759 - DNA, 33 bp, Homo sapien
acagcagagaagacagaaaaggaagtaacattt

SEQ ID NO: 402760 - DNA, 33 bp, Homo sapien
acagcagagaagacagcaaaggaagtaacattt

SEQ ID NO: 402761 - DNA, 33 bp, Homo sapien
gcaaagccagcctttacgcaataccgttcggtt

SEQ ID NO: 402762 - DNA, 33 bp, Homo sapien
gcaaagccagcctttatgcaataccgttcggtt

SEQ ID NO: 402763 - DNA, 33 bp, Homo sapien
taaaggctggctttgcagaatgcatctcgacaa

SEQ ID NO: 402764 - DNA, 33 bp, Homo sapien
taaaggctggctttgccgaatgcatctcgacaa

SEQ ID NO: 402765 - DNA, 33 bp, Homo sapien
tactggaaactggaggaaagaccaatcttgtta

SEQ ID NO: 402766 - DNA, 33 bp, Homo sapien
tactggaaactggagggaagaccaatcttgtta

SEQ ID NO: 402767 - DNA, 33 bp, Homo sapien
gccctcttcccctctacaggccttcagatgtgt

SEQ ID NO: 402768 - DNA, 33 bp, Homo sapien
gccctcttcccctctataggccttcagatgtgt

SEQ ID NO: 402769 - DNA, 33 bp, Homo sapien
tgtatctgacctggtcaatgctgaatttggatg

SEQ ID NO: 402770 - DNA, 33 bp, Homo sapien
tgtatctgacctggtcgatgctgaatttggatg

SEQ ID NO: 402771 - DNA, 33 bp, Homo sapien
cagggatccttttgacaacattgtgatttctgc

SEQ ID NO: 402772 - DNA, 33 bp, Homo sapien
cagggatccttttgacgacattgtgatttctgc

SEQ ID NO: 402773 - DNA, 33 bp, Homo sapien
tgatgcctcctaaaggcactgtctggttaccct

SEQ ID NO: 402774 - DNA, 33 bp, Homo sapien
tgatgcctcctaaagggactgtctggttaccct

SEQ ID NO: 402775 - DNA, 33 bp, Homo sapien
agatggtgagtttttacagcggctatgtaggaa

SEQ ID NO: 402776 - DNA, 33 bp, Homo sapien
agatggtgagtttttatagcggctatgtaggaa

SEQ ID NO: 402777 - DNA, 33 bp, Homo sapien
tgacagccaatcaaaaatggtcagggatgaaaa

SEQ ID NO: 402778 - DNA, 33 bp, Homo sapien
tgacagccaatcaaaagtggtcagggatgaaaa

SEQ ID NO: 402779 - DNA, 33 bp, Homo sapien
gggtgcttggatgttgcagaatttaactgaagc

SEQ ID NO: 402780 - DNA, 33 bp, Homo sapien
gggtgcttggatgttggagaatttaactgaagc

SEQ ID NO: 402781 - DNA, 33 bp, Homo sapien
agaagaccaggccagaactatgaccctgcttcc

SEQ ID NO: 402782 - DNA, 33 bp, Homo sapien
agaagaccaggccagagctatgaccctgcttcc

SEQ ID NO: 402783 - DNA, 33 bp, Homo sapien
tgttatttttctgtcactcagacctgggatgat

SEQ ID NO: 402784 - DNA, 33 bp, Homo sapien
tgttatttttctgtcattcagacctgggatgat

SEQ ID NO: 402785 - DNA, 33 bp, Homo sapien
tgaccatgtcattaacagtcctgcttggagacc

SEQ ID NO: 402786 - DNA, 33 bp, Homo sapien
tgaccatgtcattaaccgtcctgcttggagacc

SEQ ID NO: 402787 - DNA, 33 bp, Homo sapien
gctaagtgcttctcacacgtcagacacagttgt

SEQ ID NO: 402788 - DNA, 33 bp, Homo sapien
gctaagtgcttctcacgcgtcagacacagttgt

SEQ ID NO: 402789 - DNA, 33 bp, Homo sapien
tgtcatgatcaagttccctatattaacaatcag

SEQ ID NO: 402790 - DNA, 33 bp, Homo sapien
tgtcatgatcaagttcgctatattaacaatcag

SEQ ID NO: 402791 - DNA, 33 bp, Homo sapien
accccacctggaatcaagttcttgactttaacc

SEQ ID NO: 402792 - DNA, 33 bp, Homo sapien
accccacctggaatcatgttcttgactttaacc

SEQ ID NO: 402793 - DNA, 33 bp, Homo sapien
cctattgctgctgtcacgagtttagtggcttaa

SEQ ID NO: 402794 - DNA, 33 bp, Homo sapien
cctattgctgctgtcatgagtttagtggcttaa

SEQ ID NO: 402795 - DNA, 33 bp, Homo sapien
tgtctcctccccaagacgctcctctttttcaga

SEQ ID NO: 402796 - DNA, 33 bp, Homo sapien
tgtctcctccccaagatgctcctctttttcaga

SEQ ID NO: 402797 - DNA, 33 bp, Homo sapien
agtaaagtttgaggcactctgatttaggctttg

SEQ ID NO: 402798 - DNA, 33 bp, Homo sapien
agtaaagtttgaggcattctgatttaggctttg

SEQ ID NO: 402799 - DNA, 33 bp, Homo sapien
aacagatggcacctatcaaatgccttaaaaatg

SEQ ID NO: 402800 - DNA, 33 bp, Homo sapien
aacagatggcacctatgaaatgccttaaaaatg

SEQ ID NO: 402801 - DNA, 33 bp, Homo sapien
taaagtgcttggcatcaaggggggctgccttct

SEQ ID NO: 402802 - DNA, 33 bp, Homo sapien
taaagtgcttggcatcgaggggggctgccttct

SEQ ID NO: 402803 - DNA, 33 bp, Homo sapien
gcttctctggttaggaacaagtcttgcttcagc

SEQ ID NO: 402804 - DNA, 33 bp, Homo sapien
gcttctctggttaggatcaagtcttgcttcagc

SEQ ID NO: 402805 - DNA, 33 bp, Homo sapien
ctcattttacaaacgacgaaacaggattcaaac

SEQ ID NO: 402806 - DNA, 33 bp, Homo sapien
ctcattttacaaacgatgaaacaggattcaaac

SEQ ID NO: 402807 - DNA, 33 bp, Homo sapien
tgtgagagctgcacgacggcactgcaagatttt

SEQ ID NO: 402808 - DNA, 33 bp, Homo sapien
tgtgagagctgcacgatggcactgcaagatttt

SEQ ID NO: 402809 - DNA, 33 bp, Homo sapien
ttctttgtctggatgagagtttgccatttaatt

SEQ ID NO: 402810 - DNA, 33 bp, Homo sapien
ttctttgtctggatgatagtttgccatttaatt

SEQ ID NO: 402811 - DNA, 33 bp, Homo sapien
gcagaactgtattaaacccatgtctccttcatt

SEQ ID NO: 402812 - DNA, 33 bp, Homo sapien
gcagaactgtattaaatccatgtctccttcatt

SEQ ID NO: 402813 - DNA, 33 bp, Homo sapien
cacctctcgatccagacctcttactccctgccc

SEQ ID NO: 402814 - DNA, 33 bp, Homo sapien
cacctctcgatccagatctcttactccctgccc

SEQ ID NO: 402815 - DNA, 33 bp, Homo sapien
gtccatcaatgtacaacttcatcctctaagaaa

SEQ ID NO: 402816 - DNA, 33 bp, Homo sapien
gtccatcaatgtacaagttcatcctctaagaaa

SEQ ID NO: 402817 - DNA, 33 bp, Homo sapien
gcatctctgctcaggcaagaatgcagaggaatg

SEQ ID NO: 402818 - DNA, 33 bp, Homo sapien
gcatctctgctcaggcgagaatgcagaggaatg

SEQ ID NO: 402819 - DNA, 33 bp, Homo sapien
tgttaaaacaaggtggcacatgttgggagtaag

SEQ ID NO: 402820 - DNA, 33 bp, Homo sapien
tgttaaaacaaggtggtacatgttgggagtaag

SEQ ID NO: 402821 - DNA, 33 bp, Homo sapien
tcagagctactcactccctatcctgttcctctt

SEQ ID NO: 402822 - DNA, 33 bp, Homo sapien
tcagagctactcactctctatcctgttcctctt

SEQ ID NO: 402823 - DNA, 33 bp, Homo sapien
atttttaggatgttaaactcaaaaggtcaggga

SEQ ID NO: 402824 - DNA, 33 bp, Homo sapien
atttttaggatgttaatctcaaaaggtcaggga

SEQ ID NO: 402825 - DNA, 33 bp, Homo sapien
gtcattaagacctctccagaaaaagcgttctgc

SEQ ID NO: 402826 - DNA, 33 bp, Homo sapien
gtcattaagacctctcgagaaaaagcgttctgc

SEQ ID NO: 402827 - DNA, 33 bp, Homo sapien
aagaattcctaaagcacggtgcccggttcctct

SEQ ID NO: 402828 - DNA, 33 bp, Homo sapien
aagaattcctaaagcatggtgcccggttcctct

SEQ ID NO: 402829 - DNA, 33 bp, Homo sapien
agagcgaagacacccaatccaagaaggctttct

SEQ ID NO: 402830 - DNA, 33 bp, Homo sapien
agagcgaagacacccagtccaagaaggctttct

SEQ ID NO: 402831 - DNA, 33 bp, Homo sapien
atctctatgttcaaaggatattgaccctcttct

SEQ ID NO: 402832 - DNA, 33 bp, Homo sapien
atctctatgttcaaagtatattgaccctcttct

SEQ ID NO: 402833 - DNA, 33 bp, Homo sapien
caatgggtggtacttacgtccattttacagata

SEQ ID NO: 402834 - DNA, 33 bp, Homo sapien
caatgggtggtacttatgtccattttacagata

SEQ ID NO: 402835 - DNA, 33 bp, Homo sapien
aactgaggtgcagaaacgttaatgaactagtca

SEQ ID NO: 402836 - DNA, 33 bp, Homo sapien
aactgaggtgcagaaatgttaatgaactagtca

SEQ ID NO: 402837 - DNA, 33 bp, Homo sapien
gcatccactgtgaactcacatccataaatctaa

SEQ ID NO: 402838 - DNA, 33 bp, Homo sapien
gcatccactgtgaacttacatccataaatctaa

SEQ ID NO: 402839 - DNA, 33 bp, Homo sapien
aaactctctcttcttcaaaaatatgtattctgg

SEQ ID NO: 402840 - DNA, 33 bp, Homo sapien
aaactctctcttcttccaaaatatgtattctgg

SEQ ID NO: 402841 - DNA, 33 bp, Homo sapien
tgtggttcagccataccgattcattggatctat

SEQ ID NO: 402842 - DNA, 33 bp, Homo sapien
tgtggttcagccatactgattcattggatctat

SEQ ID NO: 402843 - DNA, 33 bp, Homo sapien
ccttaaggactttgcaaccgtccattgccaact

SEQ ID NO: 402844 - DNA, 33 bp, Homo sapien
ccttaaggactttgcatccgtccattgccaact

SEQ ID NO: 402845 - DNA, 33 bp, Homo sapien
aaattgtttcctccgactccacacacgtttatt

SEQ ID NO: 402846 - DNA, 33 bp, Homo sapien
aaattgtttcctccgattccacacacgtttatt

SEQ ID NO: 402847 - DNA, 33 bp, Homo sapien
ggtgacgatgcaattacgtagtgggtgcctgga

SEQ ID NO: 402848 - DNA, 33 bp, Homo sapien
ggtgacgatgcaattatgtagtgggtgcctgga

SEQ ID NO: 402849 - DNA, 33 bp, Homo sapien
aggcagtgtggttagaggaaaatattcctgaca

SEQ ID NO: 402850 - DNA, 33 bp, Homo sapien
aggcagtgtggttagatgaaaatattcctgaca

SEQ ID NO: 402851 - DNA, 33 bp, Homo sapien
catctgatacctttcaatcaatgctactggtgg

SEQ ID NO: 402852 - DNA, 33 bp, Homo sapien
catctgatacctttcagtcaatgctactggtgg

SEQ ID NO: 402853 - DNA, 33 bp, Homo sapien
acttcacagggttctccattaagcagggaccac

SEQ ID NO: 402854 - DNA, 33 bp, Homo sapien
acttcacagggttctctattaagcagggaccac

SEQ ID NO: 402855 - DNA, 33 bp, Homo sapien
tctatgttcaaaccagaatcagagagaatagaa

SEQ ID NO: 402856 - DNA, 33 bp, Homo sapien
tctatgttcaaaccagcatcagagagaatagaa

SEQ ID NO: 402857 - DNA, 33 bp, Homo sapien
aggagaacactatccaggcctcaagttcaaagt

SEQ ID NO: 402858 - DNA, 33 bp, Homo sapien
aggagaacactatccatgcctcaagttcaaagt

SEQ ID NO: 402859 - DNA, 33 bp, Homo sapien
ttctagatacaaaataacctccagatagaagag

SEQ ID NO: 402860 - DNA, 33 bp, Homo sapien
ttctagatacaaaatatcctccagatagaagag

SEQ ID NO: 402861 - DNA, 33 bp, Homo sapien
tgcatttttatctcagcataatctggttcaagg

SEQ ID NO: 402862 - DNA, 33 bp, Homo sapien
tgcatttttatctcagtataatctggttcaagg

SEQ ID NO: 402863 - DNA, 33 bp, Homo sapien
aaacactgtggttaaagaaagattttgagtcct

SEQ ID NO: 402864 - DNA, 33 bp, Homo sapien
aaacactgtggttaaataaagattttgagtcct

SEQ ID NO: 402865 - DNA, 33 bp, Homo sapien
accacaggctctcagaacaagagaaaaacacag

SEQ ID NO: 402866 - DNA, 33 bp, Homo sapien
accacaggctctcagagcaagagaaaaacacag

SEQ ID NO: 402867 - DNA, 33 bp, Homo sapien
gacctctgccttcaataaacttaacaaccagta

SEQ ID NO: 402868 - DNA, 33 bp, Homo sapien
gacctctgccttcaatgaacttaacaaccagta

SEQ ID NO: 402869 - DNA, 33 bp, Homo sapien
acaaggtgacctaaacaggtttgggatagtaag

SEQ ID NO: 402870 - DNA, 33 bp, Homo sapien
acaaggtgacctaaactggtttgggatagtaag

SEQ ID NO: 402871 - DNA, 33 bp, Homo sapien
tggcttcattgctagacaactgagtgcttgctt

SEQ ID NO: 402872 - DNA, 33 bp, Homo sapien
tggcttcattgctagataactgagtgcttgctt

SEQ ID NO: 402873 - DNA, 33 bp, Homo sapien
tagaaatataggatgccaaagtcgttcattaga

SEQ ID NO: 402874 - DNA, 33 bp, Homo sapien
tagaaatataggatgctaaagtcgttcattaga

SEQ ID NO: 402875 - DNA, 33 bp, Homo sapien
gaaaatgtgactggtccgaaataagacatgctg

SEQ ID NO: 402876 - DNA, 33 bp, Homo sapien
gaaaatgtgactggtctgaaataagacatgctg

SEQ ID NO: 402877 - DNA, 33 bp, Homo sapien
cagtttgtgaggaagacgcctcttcagtggtgt

SEQ ID NO: 402878 - DNA, 33 bp, Homo sapien
cagtttgtgaggaagatgcctcttcagtggtgt

SEQ ID NO: 402879 - DNA, 33 bp, Homo sapien
acagcaggcaagaagacaggccctagcaacatc

SEQ ID NO: 402880 - DNA, 33 bp, Homo sapien
acagcaggcaagaagagaggccctagcaacatc

SEQ ID NO: 402881 - DNA, 33 bp, Homo sapien
gaggtaagatttggacacatgcgaaaaccagta

SEQ ID NO: 402882 - DNA, 33 bp, Homo sapien
gaggtaagatttggacgcatgcgaaaaccagta

SEQ ID NO: 402883 - DNA, 33 bp, Homo sapien
tgcttgtgatttctgacggagaggaatccaggc

SEQ ID NO: 402884 - DNA, 33 bp, Homo sapien
tgcttgtgatttctgatggagaggaatccaggc

SEQ ID NO: 402885 - DNA, 33 bp, Homo sapien
ggcccagtctttcttgaaacactaccatcccac

SEQ ID NO: 402886 - DNA, 33 bp, Homo sapien
ggcccagtctttcttggaacactaccatcccac

SEQ ID NO: 402887 - DNA, 33 bp, Homo sapien
tggatgataaaaaggaacaggtagaatccaagg

SEQ ID NO: 402888 - DNA, 33 bp, Homo sapien
tggatgataaaaaggagcaggtagaatccaagg

SEQ ID NO: 402889 - DNA, 33 bp, Homo sapien
gagattcagatggaagaagttggagattttagc

SEQ ID NO: 402890 - DNA, 33 bp, Homo sapien
gagattcagatggaaggagttggagattttagc

SEQ ID NO: 402891 - DNA, 33 bp, Homo sapien
agatgcagcttattaaccttggttggaaacagc

SEQ ID NO: 402892 - DNA, 33 bp, Homo sapien
agatgcagcttattaatcttggttggaaacagc

SEQ ID NO: 402893 - DNA, 33 bp, Homo sapien
aaactttgcctcgttcacagctgtagccccatt

SEQ ID NO: 402894 - DNA, 33 bp, Homo sapien
aaactttgcctcgttctcagctgtagccccatt

SEQ ID NO: 402895 - DNA, 33 bp, Homo sapien
agatgttgtcaccaccatttcaagagggaggca

SEQ ID NO: 402896 - DNA, 33 bp, Homo sapien
agatgttgtcaccaccgtttcaagagggaggca

SEQ ID NO: 402897 - DNA, 33 bp, Homo sapien
agagtctgacatgtagaaggtacttaggttata

SEQ ID NO: 402898 - DNA, 33 bp, Homo sapien
agagtctgacatgtaggaggtacttaggttata

SEQ ID NO: 402899 - DNA, 33 bp, Homo sapien
tcacatcttgactctgccactgactcatctgtg

SEQ ID NO: 402900 - DNA, 33 bp, Homo sapien
tcacatcttgactctgtcactgactcatctgtg

SEQ ID NO: 402901 - DNA, 33 bp, Homo sapien
taggcagttaagtttaagagtgtggagcttggg

SEQ ID NO: 402902 - DNA, 33 bp, Homo sapien
taggcagttaagtttatgagtgtggagcttggg

SEQ ID NO: 402903 - DNA, 33 bp, Homo sapien
aaaaaatgtgattcaaaggagcaccccattagc

SEQ ID NO: 402904 - DNA, 33 bp, Homo sapien
aaaaaatgtgattcaagggagcaccccattagc

SEQ ID NO: 402905 - DNA, 33 bp, Homo sapien
aggaagggtagtgaaacggtcaagatcatggat

SEQ ID NO: 402906 - DNA, 33 bp, Homo sapien
aggaagggtagtgaaatggtcaagatcatggat

SEQ ID NO: 402907 - DNA, 33 bp, Homo sapien
tggctctcaaggtgaaaatgggtgttaaagaga

SEQ ID NO: 402908 - DNA, 33 bp, Homo sapien
tggctctcaaggtgaagatgggtgttaaagaga

SEQ ID NO: 402909 - DNA, 33 bp, Homo sapien
tttccagtaaataacacggctagctttggtttc

SEQ ID NO: 402910 - DNA, 33 bp, Homo sapien
tttccagtaaataacatggctagctttggtttc

SEQ ID NO: 402911 - DNA, 33 bp, Homo sapien
aggatagtcaaactcacgttacagggaatcgaa

SEQ ID NO: 402912 - DNA, 33 bp, Homo sapien
aggatagtcaaactcatgttacagggaatcgaa

SEQ ID NO: 402913 - DNA, 33 bp, Homo sapien
tcaggagtgagttaaacacaaaccagagagtgg

SEQ ID NO: 402914 - DNA, 33 bp, Homo sapien
tcaggagtgagttaaatacaaaccagagagtgg

SEQ ID NO: 402915 - DNA, 33 bp, Homo sapien
tgacaatcagttcacagaaaaaaaagatcctag

SEQ ID NO: 402916 - DNA, 33 bp, Homo sapien
tgacaatcagttcacataaaaaaaagatcctag

SEQ ID NO: 402917 - DNA, 33 bp, Homo sapien
ccttccagaagggataagattatttgcagaatg

SEQ ID NO: 402918 - DNA, 33 bp, Homo sapien
ccttccagaagggataggattatttgcagaatg

SEQ ID NO: 402919 - DNA, 33 bp, Homo sapien
agcatcactatctgaacctaaatcacttccaag

SEQ ID NO: 402920 - DNA, 33 bp, Homo sapien
agcatcactatctgaagctaaatcacttccaag

SEQ ID NO: 402921 - DNA, 33 bp, Homo sapien
taatatagtgacagtgacaaaatatttctttgt

SEQ ID NO: 402922 - DNA, 33 bp, Homo sapien
taatatagtgacagtggcaaaatatttctttgt

SEQ ID NO: 402923 - DNA, 33 bp, Homo sapien
aagctggcttcctagagctaccattttctagcc

SEQ ID NO: 402924 - DNA, 33 bp, Homo sapien
aagctggcttcctagatctaccattttctagcc

SEQ ID NO: 402925 - DNA, 33 bp, Homo sapien
agaaactaaataactaaattacatggctagaaa

SEQ ID NO: 402926 - DNA, 33 bp, Homo sapien
agaaactaaataactagattacatggctagaaa

SEQ ID NO: 402927 - DNA, 33 bp, Homo sapien
cacaaaatgcaacaaacgttggttattgaatta

SEQ ID NO: 402928 - DNA, 33 bp, Homo sapien
cacaaaatgcaacaaaggttggttattgaatta

SEQ ID NO: 402929 - DNA, 33 bp, Homo sapien
ttgagcctggctttagaaacaactgatcctcca

SEQ ID NO: 402930 - DNA, 33 bp, Homo sapien
ttgagcctggctttaggaacaactgatcctcca

SEQ ID NO: 402931 - DNA, 33 bp, Homo sapien
gtaagtctaaagccaccgtaactgaatggaaca

SEQ ID NO: 402932 - DNA, 33 bp, Homo sapien
gtaagtctaaagccactgtaactgaatggaaca

SEQ ID NO: 402933 - DNA, 33 bp, Homo sapien
cttggggtcaagtgaaatgtgacacagccccca

SEQ ID NO: 402934 - DNA, 33 bp, Homo sapien
cttggggtcaagtgaagtgtgacacagccccca

SEQ ID NO: 402935 - DNA, 33 bp, Homo sapien
tgggctgctgcgggaaaaagacttaaggaggac

SEQ ID NO: 402936 - DNA, 33 bp, Homo sapien
tgggctgctgcgggaacaagacttaaggaggac

SEQ ID NO: 402937 - DNA, 33 bp, Homo sapien
aaccagtcagcaaagaggaaggcccatgggagg

SEQ ID NO: 402938 - DNA, 33 bp, Homo sapien
aaccagtcagcaaagatgaaggcccatgggagg

SEQ ID NO: 402939 - DNA, 33 bp, Homo sapien
gactggcaagataaacaagaatatcttttcaca

SEQ ID NO: 402940 - DNA, 33 bp, Homo sapien
gactggcaagataaacgagaatatcttttcaca

SEQ ID NO: 402941 - DNA, 33 bp, Homo sapien
acaatagttccagaaactcccagaaattcacag

SEQ ID NO: 402942 - DNA, 33 bp, Homo sapien
acaatagttccagaaagtcccagaaattcacag

SEQ ID NO: 402943 - DNA, 33 bp, Homo sapien
aagtgagcaataggtaagaatgaagaagcagat

SEQ ID NO: 402944 - DNA, 33 bp, Homo sapien
aagtgagcaataggtacgaatgaagaagcagat

SEQ ID NO: 402945 - DNA, 33 bp, Homo sapien
atttacataatgaaacagcatatgaaaaaaaga

SEQ ID NO: 402946 - DNA, 33 bp, Homo sapien
atttacataatgaaacggcatatgaaaaaaaga

SEQ ID NO: 402947 - DNA, 33 bp, Homo sapien
gtgagaggaaaaaagaagcattaggattaagtc

SEQ ID NO: 402948 - DNA, 33 bp, Homo sapien
gtgagaggaaaaaagaggcattaggattaagtc

SEQ ID NO: 402949 - DNA, 33 bp, Homo sapien
agaataattaatcacaacctgtagttccccagt

SEQ ID NO: 402950 - DNA, 33 bp, Homo sapien
agaataattaatcacagcctgtagttccccagt

SEQ ID NO: 402951 - DNA, 33 bp, Homo sapien
ctctaagcatcctgaaccttcttgctgcccctg

SEQ ID NO: 402952 - DNA, 33 bp, Homo sapien
ctctaagcatcctgaatcttcttgctgcccctg

SEQ ID NO: 402953 - DNA, 33 bp, Homo sapien
acagatggctgatctgaacaaacaacaattcta

SEQ ID NO: 402954 - DNA, 33 bp, Homo sapien
acagatggctgatctggacaaacaacaattcta

SEQ ID NO: 402955 - DNA, 33 bp, Homo sapien
agagactatatgccacaatagaaagatcactgg

SEQ ID NO: 402956 - DNA, 33 bp, Homo sapien
agagactatatgccacgatagaaagatcactgg

SEQ ID NO: 402957 - DNA, 33 bp, Homo sapien
tgaaggatgtattttgaaggtagtgattcctgt

SEQ ID NO: 402958 - DNA, 33 bp, Homo sapien
tgaaggatgtattttgcaggtagtgattcctgt

SEQ ID NO: 402959 - DNA, 33 bp, Homo sapien
tctcaaatttagctaacggcctgaggattcttg

SEQ ID NO: 402960 - DNA, 33 bp, Homo sapien
tctcaaatttagctaatggcctgaggattcttg

SEQ ID NO: 402961 - DNA, 33 bp, Homo sapien
ggacttctcagtgcgagaggtttcaatctccag

SEQ ID NO: 402962 - DNA, 33 bp, Homo sapien
ggacttctcagtgcgataggtttcaatctccag

SEQ ID NO: 402963 - DNA, 33 bp, Homo sapien
gcactcatgtaccaggacctaaactcacgaagg

SEQ ID NO: 402964 - DNA, 33 bp, Homo sapien
gcactcatgtaccagggcctaaactcacgaagg

SEQ ID NO: 402965 - DNA, 33 bp, Homo sapien
cctaacctcttttgtacctctcttgaagctatc

SEQ ID NO: 402966 - DNA, 33 bp, Homo sapien
cctaacctcttttgtatctctcttgaagctatc

SEQ ID NO: 402967 - DNA, 33 bp, Homo sapien
gtactgggatgaaaacagatggcccctactctt

SEQ ID NO: 402968 - DNA, 33 bp, Homo sapien
gtactgggatgaaaacggatggcccctactctt

SEQ ID NO: 402969 - DNA, 33 bp, Homo sapien
atagatgcagaatggactaggtgtgcgataaat

SEQ ID NO: 402970 - DNA, 33 bp, Homo sapien
atagatgcagaatggattaggtgtgcgataaat

SEQ ID NO: 402971 - DNA, 33 bp, Homo sapien
ttgttttggatgtttccaccatttttaagtttg

SEQ ID NO: 402972 - DNA, 33 bp, Homo sapien
ttgttttggatgtttctaccatttttaagtttg

SEQ ID NO: 402973 - DNA, 33 bp, Homo sapien
ctttttgccttaacacaccaaaagtttgacctt

SEQ ID NO: 402974 - DNA, 33 bp, Homo sapien
ctttttgccttaacacgccaaaagtttgacctt

SEQ ID NO: 402975 - DNA, 33 bp, Homo sapien
tcctccaatgatcctcaatctactctgacctct

SEQ ID NO: 402976 - DNA, 33 bp, Homo sapien
tcctccaatgatcctccatctactctgacctct

SEQ ID NO: 402977 - DNA, 33 bp, Homo sapien
acagatgatttcccatgactcccgcagttgttt

SEQ ID NO: 402978 - DNA, 33 bp, Homo sapien
acagatgatttcccattactcccgcagttgttt

SEQ ID NO: 402979 - DNA, 33 bp, Homo sapien
ctagtttctggagacacgaagatacataattca

SEQ ID NO: 402980 - DNA, 33 bp, Homo sapien
ctagtttctggagacatgaagatacataattca

SEQ ID NO: 402981 - DNA, 33 bp, Homo sapien
agctaagaaaccagaaaccactgagcaggcagg

SEQ ID NO: 402982 - DNA, 33 bp, Homo sapien
agctaagaaaccagaagccactgagcaggcagg

SEQ ID NO: 402983 - DNA, 33 bp, Homo sapien
gatacctggaactttacactgaatgctcagaca

SEQ ID NO: 402984 - DNA, 33 bp, Homo sapien
gatacctggaactttatactgaatgctcagaca

SEQ ID NO: 402985 - DNA, 33 bp, Homo sapien
gagaaagtttcctcaggataaagccagagagag

SEQ ID NO: 402986 - DNA, 33 bp, Homo sapien
gagaaagtttcctcagtataaagccagagagag

SEQ ID NO: 402987 - DNA, 33 bp, Homo sapien
tcaggtttgtcaaagagcagatcattgtagatg

SEQ ID NO: 402988 - DNA, 33 bp, Homo sapien
tcaggtttgtcaaagatcagatcattgtagatg

SEQ ID NO: 402989 - DNA, 33 bp, Homo sapien
gctcataattttctcaccttttaaagcctttga

SEQ ID NO: 402990 - DNA, 33 bp, Homo sapien
gctcataattttctcagcttttaaagcctttga

SEQ ID NO: 402991 - DNA, 33 bp, Homo sapien
atggacaagtctctaaactaatgcttggaaact

SEQ ID NO: 402992 - DNA, 33 bp, Homo sapien
atggacaagtctctaacctaatgcttggaaact

SEQ ID NO: 402993 - DNA, 33 bp, Homo sapien
aaccaaaaacgctcatcagactcacctgggggc

SEQ ID NO: 402994 - DNA, 33 bp, Homo sapien
aaccaaaaacgctcatgagactcacctgggggc

SEQ ID NO: 402995 - DNA, 33 bp, Homo sapien
tcacgtttgtcctttacgtgtttttggtcagct

SEQ ID NO: 402996 - DNA, 33 bp, Homo sapien
tcacgtttgtcctttatgtgtttttggtcagct

SEQ ID NO: 402997 - DNA, 33 bp, Homo sapien
acaacaaataggccaagattaccacagttttga

SEQ ID NO: 402998 - DNA, 33 bp, Homo sapien
acaacaaataggccaatattaccacagttttga

SEQ ID NO: 402999 - DNA, 33 bp, Homo sapien
tgtagtctgtgctttaaatagtggctgacttaa

SEQ ID NO: 403000 - DNA, 33 bp, Homo sapien
tgtagtctgtgctttagatagtggctgacttaa

SEQ ID NO: 403001 - DNA, 33 bp, Homo sapien
agcctgggatgaagcaagagtagctagtcagag

SEQ ID NO: 403002 - DNA, 33 bp, Homo sapien
agcctgggatgaagcaggagtagctagtcagag

SEQ ID NO: 403003 - DNA, 33 bp, Homo sapien
gttgcatgtcaagataatactgttaggaagtac

SEQ ID NO: 403004 - DNA, 33 bp, Homo sapien
gttgcatgtcaagatagtactgttaggaagtac

SEQ ID NO: 403005 - DNA, 33 bp, Homo sapien
ccctaagtgtttcagaacttctgctaaccaggc

SEQ ID NO: 403006 - DNA, 33 bp, Homo sapien
ccctaagtgtttcagatcttctgctaaccaggc

SEQ ID NO: 403007 - DNA, 33 bp, Homo sapien
aatatcccatattctcaagaagtcatttatcat

SEQ ID NO: 403008 - DNA, 33 bp, Homo sapien
aatatcccatattctcgagaagtcatttatcat

SEQ ID NO: 403009 - DNA, 33 bp, Homo sapien
ataattttgtctagtaaccacatgaaaaagact

SEQ ID NO: 403010 - DNA, 33 bp, Homo sapien
ataattttgtctagtagccacatgaaaaagact

SEQ ID NO: 403011 - DNA, 33 bp, Homo sapien
caagggctacttgtcaagaggatttaccagtcc

SEQ ID NO: 403012 - DNA, 33 bp, Homo sapien
caagggctacttgtcaggaggatttaccagtcc

SEQ ID NO: 403013 - DNA, 33 bp, Homo sapien
gattaaatgaattcccagatgtaaaacacttag

SEQ ID NO: 403014 - DNA, 33 bp, Homo sapien
gattaaatgaattcccggatgtaaaacacttag

SEQ ID NO: 403015 - DNA, 33 bp, Homo sapien
aggaaaggtatgttcactcaacaaggtggtgtg

SEQ ID NO: 403016 - DNA, 33 bp, Homo sapien
aggaaaggtatgttcattcaacaaggtggtgtg

SEQ ID NO: 403017 - DNA, 33 bp, Homo sapien
cggaaaccaagaaggaacatgatcccaagtctc

SEQ ID NO: 403018 - DNA, 33 bp, Homo sapien
cggaaaccaagaaggagcatgatcccaagtctc

SEQ ID NO: 403019 - DNA, 33 bp, Homo sapien
ttgggctgatgaatgacgccacctgatcggctt

SEQ ID NO: 403020 - DNA, 33 bp, Homo sapien
ttgggctgatgaatgatgccacctgatcggctt

SEQ ID NO: 403021 - DNA, 33 bp, Homo sapien
acaaagcacttctggaaatggatagaatcatcc

SEQ ID NO: 403022 - DNA, 33 bp, Homo sapien
acaaagcacttctggagatggatagaatcatcc

SEQ ID NO: 403023 - DNA, 33 bp, Homo sapien
ccataaccccactacaatactatctactcttaa

SEQ ID NO: 403024 - DNA, 33 bp, Homo sapien
ccataaccccactacagtactatctactcttaa

SEQ ID NO: 403025 - DNA, 33 bp, Homo sapien
tgaaactctgcagtcactatctatgctgaaaga

SEQ ID NO: 403026 - DNA, 33 bp, Homo sapien
tgaaactctgcagtcattatctatgctgaaaga

SEQ ID NO: 403027 - DNA, 33 bp, Homo sapien
cccgtgagagcctgctaagagtctggcagagat

SEQ ID NO: 403028 - DNA, 33 bp, Homo sapien
cccgtgagagcctgctgagagtctggcagagat

SEQ ID NO: 403029 - DNA, 33 bp, Homo sapien
ccttcacctagaataacatggtgaccaaaaagt

SEQ ID NO: 403030 - DNA, 33 bp, Homo sapien
ccttcacctagaataatatggtgaccaaaaagt

SEQ ID NO: 403031 - DNA, 33 bp, Homo sapien
ctggcacacacatctgaagaagaacagtatttc

SEQ ID NO: 403032 - DNA, 33 bp, Homo sapien
ctggcacacacatctgcagaagaacagtatttc

SEQ ID NO: 403033 - DNA, 33 bp, Homo sapien
aagcccttttttcaagaagactgtgttgctgcc

SEQ ID NO: 403034 - DNA, 33 bp, Homo sapien
aagcccttttttcaaggagactgtgttgctgcc

SEQ ID NO: 403035 - DNA, 33 bp, Homo sapien
gtgacaaccaaaaatacgtccaaagattgccat

SEQ ID NO: 403036 - DNA, 33 bp, Homo sapien
gtgacaaccaaaaataggtccaaagattgccat

SEQ ID NO: 403037 - DNA, 33 bp, Homo sapien
tgtgtttgtccatttaacagtaggcatattgag

SEQ ID NO: 403038 - DNA, 33 bp, Homo sapien
tgtgtttgtccatttagcagtaggcatattgag

SEQ ID NO: 403039 - DNA, 33 bp, Homo sapien
actctgcctacaggggcatgcgatgagacctaa

SEQ ID NO: 403040 - DNA, 33 bp, Homo sapien
actctgcctacaggggtatgcgatgagacctaa

SEQ ID NO: 403041 - DNA, 33 bp, Homo sapien
cctttgatacctcctaacctcttctcattagcc

SEQ ID NO: 403042 - DNA, 33 bp, Homo sapien
cctttgatacctcctaccctcttctcattagcc

SEQ ID NO: 403043 - DNA, 33 bp, Homo sapien
ggtatcaaaggctccaaacagacacggccagtg

SEQ ID NO: 403044 - DNA, 33 bp, Homo sapien
ggtatcaaaggctccatacagacacggccagtg

SEQ ID NO: 403045 - DNA, 33 bp, Homo sapien
gatacttggaggctcacgtagatttagaaatag

SEQ ID NO: 403046 - DNA, 33 bp, Homo sapien
gatacttggaggctcaggtagatttagaaatag

SEQ ID NO: 403047 - DNA, 33 bp, Homo sapien
gactgaggcacagacaaggaacacaatcgcctc

SEQ ID NO: 403048 - DNA, 33 bp, Homo sapien
gactgaggcacagacagggaacacaatcgcctc

SEQ ID NO: 403049 - DNA, 33 bp, Homo sapien
tgtctattgcaacaacaatgtgaaatgtgtgaa

SEQ ID NO: 403050 - DNA, 33 bp, Homo sapien
tgtctattgcaacaacgatgtgaaatgtgtgaa

SEQ ID NO: 403051 - DNA, 33 bp, Homo sapien
atttttataggagcaaaattactctgggaataa

SEQ ID NO: 403052 - DNA, 33 bp, Homo sapien
atttttataggagcaagattactctgggaataa

SEQ ID NO: 403053 - DNA, 33 bp, Homo sapien
tcgttccggtatttgcactcctccataaactat

SEQ ID NO: 403054 - DNA, 33 bp, Homo sapien
tcgttccggtatttgcgctcctccataaactat

SEQ ID NO: 403055 - DNA, 33 bp, Homo sapien
tctactcccaatcagaggcccatagcttggtct

SEQ ID NO: 403056 - DNA, 33 bp, Homo sapien
tctactcccaatcagatgcccatagcttggtct

SEQ ID NO: 403057 - DNA, 33 bp, Homo sapien
acagaatacctgacgcaagtgttccactgacca

SEQ ID NO: 403058 - DNA, 33 bp, Homo sapien
acagaatacctgacgcgagtgttccactgacca

SEQ ID NO: 403059 - DNA, 33 bp, Homo sapien
cctgtcaacttcttccacaaaaagcacagaaga

SEQ ID NO: 403060 - DNA, 33 bp, Homo sapien
cctgtcaacttcttcctcaaaaagcacagaaga

SEQ ID NO: 403061 - DNA, 33 bp, Homo sapien
ttttaagactgaaacacatctgaaatgaactcc

SEQ ID NO: 403062 - DNA, 33 bp, Homo sapien
ttttaagactgaaacatatctgaaatgaactcc

SEQ ID NO: 403063 - DNA, 33 bp, Homo sapien
gtgaacacagccaaccaaggtccaagaaagctt

SEQ ID NO: 403064 - DNA, 33 bp, Homo sapien
gtgaacacagccaaccgaggtccaagaaagctt

SEQ ID NO: 403065 - DNA, 33 bp, Homo sapien
ctcccttagtatttagacaacttccctgcatac

SEQ ID NO: 403066 - DNA, 33 bp, Homo sapien
ctcccttagtatttaggcaacttccctgcatac

SEQ ID NO: 403067 - DNA, 33 bp, Homo sapien
atttttcactaaatgccgaaggtactcttggcc

SEQ ID NO: 403068 - DNA, 33 bp, Homo sapien
atttttcactaaatgctgaaggtactcttggcc

SEQ ID NO: 403069 - DNA, 33 bp, Homo sapien
aaaggggacagtcacacgaggaagtgaagactt

SEQ ID NO: 403070 - DNA, 33 bp, Homo sapien
aaaggggacagtcacatgaggaagtgaagactt

SEQ ID NO: 403071 - DNA, 33 bp, Homo sapien
aagccgatttggaaacagagtccatcatttatt

SEQ ID NO: 403072 - DNA, 33 bp, Homo sapien
aagccgatttggaaacggagtccatcatttatt

SEQ ID NO: 403073 - DNA, 33 bp, Homo sapien
caactgagagatgtcccagatatgactgctcag

SEQ ID NO: 403074 - DNA, 33 bp, Homo sapien
caactgagagatgtcctagatatgactgctcag

SEQ ID NO: 403075 - DNA, 33 bp, Homo sapien
gttttcccttctgcccgctagtctcgatgtttt

SEQ ID NO: 403076 - DNA, 33 bp, Homo sapien
gttttcccttctgccctctagtctcgatgtttt

SEQ ID NO: 403077 - DNA, 33 bp, Homo sapien
gaaatactgattcgtaatacaacttggatgaat

SEQ ID NO: 403078 - DNA, 33 bp, Homo sapien
gaaatactgattcgtactacaacttggatgaat

SEQ ID NO: 403079 - DNA, 33 bp, Homo sapien
cagagagaaaacctgaacaagaggcaaagctga

SEQ ID NO: 403080 - DNA, 33 bp, Homo sapien
cagagagaaaacctgaccaagaggcaaagctga

SEQ ID NO: 403081 - DNA, 33 bp, Homo sapien
gagaaaaggagcctgacgaggtatgtggatgag

SEQ ID NO: 403082 - DNA, 33 bp, Homo sapien
gagaaaaggagcctgatgaggtatgtggatgag

SEQ ID NO: 403083 - DNA, 33 bp, Homo sapien
aatctaagtagaggccacgatacctccacagct

SEQ ID NO: 403084 - DNA, 33 bp, Homo sapien
aatctaagtagaggccccgatacctccacagct

SEQ ID NO: 403085 - DNA, 33 bp, Homo sapien
ccctttgaagctagacaagaactcaggttaatg

SEQ ID NO: 403086 - DNA, 33 bp, Homo sapien
ccctttgaagctagacgagaactcaggttaatg

SEQ ID NO: 403087 - DNA, 33 bp, Homo sapien
tactttttgtctgcccagatagtgagaatcatg

SEQ ID NO: 403088 - DNA, 33 bp, Homo sapien
tactttttgtctgccctgatagtgagaatcatg

SEQ ID NO: 403089 - DNA, 33 bp, Homo sapien
tccaaatttggactcactcattgattcacaggc

SEQ ID NO: 403090 - DNA, 33 bp, Homo sapien
tccaaatttggactcattcattgattcacaggc

SEQ ID NO: 403091 - DNA, 33 bp, Homo sapien
agagttaatgggaccaactgagcagacaatgca

SEQ ID NO: 403092 - DNA, 33 bp, Homo sapien
agagttaatgggaccatctgagcagacaatgca

SEQ ID NO: 403093 - DNA, 33 bp, Homo sapien
gctgtagtgactataacgaatattcctgtacct

SEQ ID NO: 403094 - DNA, 33 bp, Homo sapien
gctgtagtgactataatgaatattcctgtacct

SEQ ID NO: 403095 - DNA, 33 bp, Homo sapien
gctcttctatctcagaaatctcaaacaaagagc

SEQ ID NO: 403096 - DNA, 33 bp, Homo sapien
gctcttctatctcagatatctcaaacaaagagc

SEQ ID NO: 403097 - DNA, 33 bp, Homo sapien
cactatctgttgaaggccacacttgtgcccaca

SEQ ID NO: 403098 - DNA, 33 bp, Homo sapien
cactatctgttgaaggtcacacttgtgcccaca

SEQ ID NO: 403099 - DNA, 33 bp, Homo sapien
ttcctcggccctttcaagggttgtgtaaacctc

SEQ ID NO: 403100 - DNA, 33 bp, Homo sapien
ttcctcggccctttcaggggttgtgtaaacctc

SEQ ID NO: 403101 - DNA, 33 bp, Homo sapien
atttaatatagggcaacagaggtttacacaacc

SEQ ID NO: 403102 - DNA, 33 bp, Homo sapien
atttaatatagggcaatagaggtttacacaacc

SEQ ID NO: 403103 - DNA, 33 bp, Homo sapien
aattaatcttgtgaagcaatcgggacaaatatt

SEQ ID NO: 403104 - DNA, 33 bp, Homo sapien
aattaatcttgtgaagtaatcgggacaaatatt

SEQ ID NO: 403105 - DNA, 33 bp, Homo sapien
cattgcttgacctgtacgttgcctggcttcagg

SEQ ID NO: 403106 - DNA, 33 bp, Homo sapien
cattgcttgacctgtaggttgcctggcttcagg

SEQ ID NO: 403107 - DNA, 33 bp, Homo sapien
ctatatgactgtcacaatctctagttccctgaa

SEQ ID NO: 403108 - DNA, 33 bp, Homo sapien
ctatatgactgtcacactctctagttccctgaa

SEQ ID NO: 403109 - DNA, 33 bp, Homo sapien
ggtaaaccttgggatacggccagaaacaactgt

SEQ ID NO: 403110 - DNA, 33 bp, Homo sapien
ggtaaaccttgggatagggccagaaacaactgt

SEQ ID NO: 403111 - DNA, 33 bp, Homo sapien
ggtgtgttgccatgcaagtgtctgagctcatat

SEQ ID NO: 403112 - DNA, 33 bp, Homo sapien
ggtgtgttgccatgcacgtgtctgagctcatat

SEQ ID NO: 403113 - DNA, 33 bp, Homo sapien
ttctttgcaaaaaaaccacaaagcacctcctga

SEQ ID NO: 403114 - DNA, 33 bp, Homo sapien
ttctttgcaaaaaaactacaaagcacctcctga

SEQ ID NO: 403115 - DNA, 33 bp, Homo sapien
ttcagggtttacagtagaaatgcgtgtcaatgt

SEQ ID NO: 403116 - DNA, 33 bp, Homo sapien
ttcagggtttacagtataaatgcgtgtcaatgt

SEQ ID NO: 403117 - DNA, 33 bp, Homo sapien
gaaggtggaatcagtaaggagccagaaaactat

SEQ ID NO: 403118 - DNA, 33 bp, Homo sapien
gaaggtggaatcagtatggagccagaaaactat

SEQ ID NO: 403119 - DNA, 33 bp, Homo sapien
ctctgtcctgcttcccactgaattttatcactt

SEQ ID NO: 403120 - DNA, 33 bp, Homo sapien
ctctgtcctgcttcccgctgaattttatcactt

SEQ ID NO: 403121 - DNA, 33 bp, Homo sapien
gggttgggtttgaggacctcgagtcaggcaaag

SEQ ID NO: 403122 - DNA, 33 bp, Homo sapien
gggttgggtttgaggatctcgagtcaggcaaag

SEQ ID NO: 403123 - DNA, 33 bp, Homo sapien
aaactatttctccaaaacagtttccacttctcc

SEQ ID NO: 403124 - DNA, 33 bp, Homo sapien
aaactatttctccaaatcagtttccacttctcc

SEQ ID NO: 403125 - DNA, 33 bp, Homo sapien
tggtcctgcaacagacaccgccaggaggaagta

SEQ ID NO: 403126 - DNA, 33 bp, Homo sapien
tggtcctgcaacagacgccgccaggaggaagta

SEQ ID NO: 403127 - DNA, 33 bp, Homo sapien
ctgatttctctcaaacagagtaacttctcttct

SEQ ID NO: 403128 - DNA, 33 bp, Homo sapien
ctgatttctctcaaacggagtaacttctcttct

SEQ ID NO: 403129 - DNA, 33 bp, Homo sapien
tagagccctggatatcacagaacgagcggcatg

SEQ ID NO: 403130 - DNA, 33 bp, Homo sapien
tagagccctggatatctcagaacgagcggcatg

SEQ ID NO: 403131 - DNA, 33 bp, Homo sapien
gcacaggtagcagaaaaatggccaaagagcacg

SEQ ID NO: 403132 - DNA, 33 bp, Homo sapien
gcacaggtagcagaaagatggccaaagagcacg

SEQ ID NO: 403133 - DNA, 33 bp, Homo sapien
attcttcggatggagaacctataggaggagttc

SEQ ID NO: 403134 - DNA, 33 bp, Homo sapien
attcttcggatggagagcctataggaggagttc

SEQ ID NO: 403135 - DNA, 33 bp, Homo sapien
tgggctcttcctacataaggctgcttgcaggaa

SEQ ID NO: 403136 - DNA, 33 bp, Homo sapien
tgggctcttcctacatgaggctgcttgcaggaa

SEQ ID NO: 403137 - DNA, 33 bp, Homo sapien
tcttgtccttgctgtacatgaaaaaactgagac

SEQ ID NO: 403138 - DNA, 33 bp, Homo sapien
tcttgtccttgctgtatatgaaaaaactgagac

SEQ ID NO: 403139 - DNA, 33 bp, Homo sapien
gacaagcttggaggaaaagctgcatggaggaaa

SEQ ID NO: 403140 - DNA, 33 bp, Homo sapien
gacaagcttggaggaagagctgcatggaggaaa

SEQ ID NO: 403141 - DNA, 33 bp, Homo sapien
aacaaatcatttaaaaatatggtggtacatcca

SEQ ID NO: 403142 - DNA, 33 bp, Homo sapien
aacaaatcatttaaaagtatggtggtacatcca

SEQ ID NO: 403143 - DNA, 33 bp, Homo sapien
ggttcccactgcaaaaaatcactggtaactaaa

SEQ ID NO: 403144 - DNA, 33 bp, Homo sapien
ggttcccactgcaaaacatcactggtaactaaa

SEQ ID NO: 403145 - DNA, 33 bp, Homo sapien
cttgtgaggagagaaccagtgttacaggctcag

SEQ ID NO: 403146 - DNA, 33 bp, Homo sapien
cttgtgaggagagaactagtgttacaggctcag

SEQ ID NO: 403147 - DNA, 33 bp, Homo sapien
gtagtggggaaggagacatgaggggctctgttc

SEQ ID NO: 403148 - DNA, 33 bp, Homo sapien
gtagtggggaaggagatatgaggggctctgttc

SEQ ID NO: 403149 - DNA, 33 bp, Homo sapien
gctaacttgctaaaaacgaaagtcctgtagtca

SEQ ID NO: 403150 - DNA, 33 bp, Homo sapien
gctaacttgctaaaaatgaaagtcctgtagtca

SEQ ID NO: 403151 - DNA, 33 bp, Homo sapien
attacatagacttctgaataaagtatcgtaaat

SEQ ID NO: 403152 - DNA, 33 bp, Homo sapien
attacatagacttctggataaagtatcgtaaat

SEQ ID NO: 403153 - DNA, 33 bp, Homo sapien
agtcactgaggtcacaatatcaagctatcattt

SEQ ID NO: 403154 - DNA, 33 bp, Homo sapien
agtcactgaggtcacagtatcaagctatcattt

SEQ ID NO: 403155 - DNA, 33 bp, Homo sapien
tctactctgacttagaacacattatttttgata

SEQ ID NO: 403156 - DNA, 33 bp, Homo sapien
tctactctgacttagagcacattatttttgata

SEQ ID NO: 403157 - DNA, 33 bp, Homo sapien
cagaaggttgtgctacagcggtttgtgagccac

SEQ ID NO: 403158 - DNA, 33 bp, Homo sapien
cagaaggttgtgctaccgcggtttgtgagccac

SEQ ID NO: 403159 - DNA, 33 bp, Homo sapien
gttcatattgtctatccaccaacaaatacttac

SEQ ID NO: 403160 - DNA, 33 bp, Homo sapien
gttcatattgtctatctaccaacaaatacttac

SEQ ID NO: 403161 - DNA, 33 bp, Homo sapien
ggctggcctcagagcaaagacagtgttcagaac

SEQ ID NO: 403162 - DNA, 33 bp, Homo sapien
ggctggcctcagagcagagacagtgttcagaac

SEQ ID NO: 403163 - DNA, 33 bp, Homo sapien
ctgccactgctaagaaattaatatccttttcct

SEQ ID NO: 403164 - DNA, 33 bp, Homo sapien
ctgccactgctaagaacttaatatccttttcct

SEQ ID NO: 403165 - DNA, 33 bp, Homo sapien
aaggaatatggaactaaattgctggtaagattt

SEQ ID NO: 403166 - DNA, 33 bp, Homo sapien
aaggaatatggaactacattgctggtaagattt

SEQ ID NO: 403167 - DNA, 33 bp, Homo sapien
agcattatttaaccacaatgattcttttgtcct

SEQ ID NO: 403168 - DNA, 33 bp, Homo sapien
agcattatttaaccacgatgattcttttgtcct

SEQ ID NO: 403169 - DNA, 33 bp, Homo sapien
tggcagaaagctgtaacgttgacaaaatggcag

SEQ ID NO: 403170 - DNA, 33 bp, Homo sapien
tggcagaaagctgtaaggttgacaaaatggcag

SEQ ID NO: 403171 - DNA, 33 bp, Homo sapien
tcatagccaagtacaacatatgccttgaagaat

SEQ ID NO: 403172 - DNA, 33 bp, Homo sapien
tcatagccaagtacaatatatgccttgaagaat

SEQ ID NO: 403173 - DNA, 33 bp, Homo sapien
aaaggtgttcttggaacgcactgtgtgtagtat

SEQ ID NO: 403174 - DNA, 33 bp, Homo sapien
aaaggtgttcttggaatgcactgtgtgtagtat

SEQ ID NO: 403175 - DNA, 33 bp, Homo sapien
agagtctctaaaaatacagctgctattgtccct

SEQ ID NO: 403176 - DNA, 33 bp, Homo sapien
agagtctctaaaaatatagctgctattgtccct

SEQ ID NO: 403177 - DNA, 33 bp, Homo sapien
ggttcctgaggtttgggagactgatgaagactg

SEQ ID NO: 403178 - DNA, 33 bp, Homo sapien
ggttcctgaggtttggtagactgatgaagactg

SEQ ID NO: 403179 - DNA, 33 bp, Homo sapien
caggcatctgattaataatagggctgtaatcat

SEQ ID NO: 403180 - DNA, 33 bp, Homo sapien
caggcatctgattaatgatagggctgtaatcat

SEQ ID NO: 403181 - DNA, 33 bp, Homo sapien
ttccataaggaactgccaaactttcttccaaag

SEQ ID NO: 403182 - DNA, 33 bp, Homo sapien
ttccataaggaactgctaaactttcttccaaag

SEQ ID NO: 403183 - DNA, 33 bp, Homo sapien
ctgtgttgtgttaaagccactcagttcctgatg

SEQ ID NO: 403184 - DNA, 33 bp, Homo sapien
ctgtgttgtgttaaaggcactcagttcctgatg

SEQ ID NO: 403185 - DNA, 33 bp, Homo sapien
ctgctctttctccacccgaatacactgtgatgg

SEQ ID NO: 403186 - DNA, 33 bp, Homo sapien
ctgctctttctccacctgaatacactgtgatgg

SEQ ID NO: 403187 - DNA, 33 bp, Homo sapien
cagctttcgctttacacaggaagacactagggg

SEQ ID NO: 403188 - DNA, 33 bp, Homo sapien
cagctttcgctttacagaggaagacactagggg

SEQ ID NO: 403189 - DNA, 33 bp, Homo sapien
agttcactctatgccaactcttaccactgtttg

SEQ ID NO: 403190 - DNA, 33 bp, Homo sapien
agttcactctatgccagctcttaccactgtttg

SEQ ID NO: 403191 - DNA, 33 bp, Homo sapien
gtgttgctatgtcataaaattttggtcaatggg

SEQ ID NO: 403192 - DNA, 33 bp, Homo sapien
gtgttgctatgtcatacaattttggtcaatggg

SEQ ID NO: 403193 - DNA, 33 bp, Homo sapien
atctgtaggtgcgaaacgaatgaaaggataaag

SEQ ID NO: 403194 - DNA, 33 bp, Homo sapien
atctgtaggtgcgaaatgaatgaaaggataaag

SEQ ID NO: 403195 - DNA, 33 bp, Homo sapien
cagcacagagagtggaagagctgagcttacatg

SEQ ID NO: 403196 - DNA, 33 bp, Homo sapien
cagcacagagagtggaggagctgagcttacatg

SEQ ID NO: 403197 - DNA, 33 bp, Homo sapien
tcagcctgctgtgcggcaactgaagggatgctt

SEQ ID NO: 403198 - DNA, 33 bp, Homo sapien
tcagcctgctgtgcggtaactgaagggatgctt

SEQ ID NO: 403199 - DNA, 33 bp, Homo sapien
ctctgtgaatacttataaaaaaagctcttgctt

SEQ ID NO: 403200 - DNA, 33 bp, Homo sapien
ctctgtgaatacttatgaaaaaagctcttgctt

SEQ ID NO: 403201 - DNA, 33 bp, Homo sapien
tattcttctattaaaactggtctgggcccctat

SEQ ID NO: 403202 - DNA, 33 bp, Homo sapien
tattcttctattaaaagtggtctgggcccctat

SEQ ID NO: 403203 - DNA, 33 bp, Homo sapien
tgttgggagaattgagcaaaacaatgtttataa

SEQ ID NO: 403204 - DNA, 33 bp, Homo sapien
tgttgggagaattgaggaaaacaatgtttataa

SEQ ID NO: 403205 - DNA, 33 bp, Homo sapien
tacggtgaattcctcaacgcaggctatcaacag

SEQ ID NO: 403206 - DNA, 33 bp, Homo sapien
tacggtgaattcctcagcgcaggctatcaacag

SEQ ID NO: 403207 - DNA, 33 bp, Homo sapien
gtaaaggctaaaactgcagtgaacactgactct

SEQ ID NO: 403208 - DNA, 33 bp, Homo sapien
gtaaaggctaaaactgtagtgaacactgactct

SEQ ID NO: 403209 - DNA, 33 bp, Homo sapien
tatggtgtctcccttacgcaagaaccatgcagt

SEQ ID NO: 403210 - DNA, 33 bp, Homo sapien
tatggtgtctcccttatgcaagaaccatgcagt

SEQ ID NO: 403211 - DNA, 33 bp, Homo sapien
tgaagcgtgagtttgcgcttccctggttctatt

SEQ ID NO: 403212 - DNA, 33 bp, Homo sapien
tgaagcgtgagtttgctcttccctggttctatt

SEQ ID NO: 403213 - DNA, 33 bp, Homo sapien
ttctgcagatgctatcactgttgttaaaacaca

SEQ ID NO: 403214 - DNA, 33 bp, Homo sapien
ttctgcagatgctatcgctgttgttaaaacaca

SEQ ID NO: 403215 - DNA, 33 bp, Homo sapien
cattttattctgttgacggtgtctttcacagag

SEQ ID NO: 403216 - DNA, 33 bp, Homo sapien
cattttattctgttgatggtgtctttcacagag

SEQ ID NO: 403217 - DNA, 33 bp, Homo sapien
tgctttacttttaggcacgtgatccattttgag

SEQ ID NO: 403218 - DNA, 33 bp, Homo sapien
tgctttacttttaggcgcgtgatccattttgag

SEQ ID NO: 403219 - DNA, 33 bp, Homo sapien
tgcaccaccgtgggcacactttcattatcagat

SEQ ID NO: 403220 - DNA, 33 bp, Homo sapien
tgcaccaccgtgggcatactttcattatcagat

SEQ ID NO: 403221 - DNA, 33 bp, Homo sapien
gttcaaatcaacaagacaacggctttgaaggaa

SEQ ID NO: 403222 - DNA, 33 bp, Homo sapien
gttcaaatcaacaagagaacggctttgaaggaa

SEQ ID NO: 403223 - DNA, 33 bp, Homo sapien
agaggcagaggtctgacacttccgatttggggt

SEQ ID NO: 403224 - DNA, 33 bp, Homo sapien
agaggcagaggtctgatacttccgatttggggt

SEQ ID NO: 403225 - DNA, 33 bp, Homo sapien
aatgcggctgttagaaaacctaaaattacgtat

SEQ ID NO: 403226 - DNA, 33 bp, Homo sapien
aatgcggctgttagaagacctaaaattacgtat

SEQ ID NO: 403227 - DNA, 33 bp, Homo sapien
gtgcagaataaaggataaatgtctataggatac

SEQ ID NO: 403228 - DNA, 33 bp, Homo sapien
gtgcagaataaaggatcaatgtctataggatac

SEQ ID NO: 403229 - DNA, 33 bp, Homo sapien
ctcatcctgcctgtcactatttaccagccttgt

SEQ ID NO: 403230 - DNA, 33 bp, Homo sapien
ctcatcctgcctgtcattatttaccagccttgt

SEQ ID NO: 403231 - DNA, 33 bp, Homo sapien
catgctttttctaccacgccttattacctctgt

SEQ ID NO: 403232 - DNA, 33 bp, Homo sapien
catgctttttctaccatgccttattacctctgt

SEQ ID NO: 403233 - DNA, 33 bp, Homo sapien
cacatcaaaatctcagactatttctaacataca

SEQ ID NO: 403234 - DNA, 33 bp, Homo sapien
cacatcaaaatctcaggctatttctaacataca

SEQ ID NO: 403235 - DNA, 33 bp, Homo sapien
tatctcactgccagtggatctctccaacgtcct

SEQ ID NO: 403236 - DNA, 33 bp, Homo sapien
tatctcactgccagtgtatctctccaacgtcct

SEQ ID NO: 403237 - DNA, 33 bp, Homo sapien
tctctagcatcaagtgaagtattggttttatag

SEQ ID NO: 403238 - DNA, 33 bp, Homo sapien
tctctagcatcaagtgcagtattggttttatag

SEQ ID NO: 403239 - DNA, 33 bp, Homo sapien
ctccccgattacaaagaaatgcagatagcctat

SEQ ID NO: 403240 - DNA, 33 bp, Homo sapien
ctccccgattacaaaggaatgcagatagcctat

SEQ ID NO: 403241 - DNA, 33 bp, Homo sapien
tactaatgccttcatacatatcaaacacaaatc

SEQ ID NO: 403242 - DNA, 33 bp, Homo sapien
tactaatgccttcatagatatcaaacacaaatc

SEQ ID NO: 403243 - DNA, 33 bp, Homo sapien
tgtctcatgtgaatcaagacagataccagttaa

SEQ ID NO: 403244 - DNA, 33 bp, Homo sapien
tgtctcatgtgaatcacgacagataccagttaa

SEQ ID NO: 403245 - DNA, 33 bp, Homo sapien
acgaaaacttatcagaagacttgacatcacacc

SEQ ID NO: 403246 - DNA, 33 bp, Homo sapien
acgaaaacttatcagaggacttgacatcacacc

SEQ ID NO: 403247 - DNA, 33 bp, Homo sapien
gagtgtcaggtcatataaggagaaagtgttgat

SEQ ID NO: 403248 - DNA, 33 bp, Homo sapien
gagtgtcaggtcatatgaggagaaagtgttgat

SEQ ID NO: 403249 - DNA, 33 bp, Homo sapien
caatagtatatgggacacagcttactctccctg

SEQ ID NO: 403250 - DNA, 33 bp, Homo sapien
caatagtatatgggacccagcttactctccctg

SEQ ID NO: 403251 - DNA, 33 bp, Homo sapien
aaacatatctagtgctcactctaggtgagatcc

SEQ ID NO: 403252 - DNA, 33 bp, Homo sapien
aaacatatctagtgcttactctaggtgagatcc

SEQ ID NO: 403253 - DNA, 33 bp, Homo sapien
agggggaaacacatcccgaaagacatggttctt

SEQ ID NO: 403254 - DNA, 33 bp, Homo sapien
agggggaaacacatcctgaaagacatggttctt

SEQ ID NO: 403255 - DNA, 33 bp, Homo sapien
attcttcttggcctcaaaactgatccccaaacc

SEQ ID NO: 403256 - DNA, 33 bp, Homo sapien
attcttcttggcctcacaactgatccccaaacc

SEQ ID NO: 403257 - DNA, 33 bp, Homo sapien
atgtttagttcttctcacataaatttccttaag

SEQ ID NO: 403258 - DNA, 33 bp, Homo sapien
atgtttagttcttctcgcataaatttccttaag

SEQ ID NO: 403259 - DNA, 33 bp, Homo sapien
tgccaggaaattaagtaaccgaatgacctaaac

SEQ ID NO: 403260 - DNA, 33 bp, Homo sapien
tgccaggaaattaagtgaccgaatgacctaaac

SEQ ID NO: 403261 - DNA, 33 bp, Homo sapien
atgaggccttttaccaaagcagttcactccttc

SEQ ID NO: 403262 - DNA, 33 bp, Homo sapien
atgaggccttttaccagagcagttcactccttc

SEQ ID NO: 403263 - DNA, 33 bp, Homo sapien
aaagggttcacaaagaaactgtgcaagaaatct

SEQ ID NO: 403264 - DNA, 33 bp, Homo sapien
aaagggttcacaaagagactgtgcaagaaatct

SEQ ID NO: 403265 - DNA, 33 bp, Homo sapien
ttagacttttaacttcaatgggcaaatgtatca

SEQ ID NO: 403266 - DNA, 33 bp, Homo sapien
ttagacttttaacttcgatgggcaaatgtatca

SEQ ID NO: 403267 - DNA, 33 bp, Homo sapien
aataatagcgtaggaaacatgcagatatagaac

SEQ ID NO: 403268 - DNA, 33 bp, Homo sapien
aataatagcgtaggaagcatgcagatatagaac

SEQ ID NO: 403269 - DNA, 33 bp, Homo sapien
gatttatttacagagacagaaaggctcattttc

SEQ ID NO: 403270 - DNA, 33 bp, Homo sapien
gatttatttacagagagagaaaggctcattttc

SEQ ID NO: 403271 - DNA, 33 bp, Homo sapien
ctacattttatgggacaattggtacctggagtg

SEQ ID NO: 403272 - DNA, 33 bp, Homo sapien
ctacattttatgggacgattggtacctggagtg

SEQ ID NO: 403273 - DNA, 33 bp, Homo sapien
tgtcacaggtagaagacacaggggttctttttc

SEQ ID NO: 403274 - DNA, 33 bp, Homo sapien
tgtcacaggtagaagatacaggggttctttttc

SEQ ID NO: 403275 - DNA, 33 bp, Homo sapien
aaacttttgtaaatcacgtacctaatcaagtac

SEQ ID NO: 403276 - DNA, 33 bp, Homo sapien
aaacttttgtaaatcatgtacctaatcaagtac

SEQ ID NO: 403277 - DNA, 33 bp, Homo sapien
gaatctgagtttggcacgcgttcaggttacttt

SEQ ID NO: 403278 - DNA, 33 bp, Homo sapien
gaatctgagtttggcatgcgttcaggttacttt

SEQ ID NO: 403279 - DNA, 33 bp, Homo sapien
atttctgttcctttacaatcggaatccctctct

SEQ ID NO: 403280 - DNA, 33 bp, Homo sapien
atttctgttcctttacgatcggaatccctctct

SEQ ID NO: 403281 - DNA, 33 bp, Homo sapien
ttgaaacaggagaaaaagacataaaacctgttc

SEQ ID NO: 403282 - DNA, 33 bp, Homo sapien
ttgaaacaggagaaaacgacataaaacctgttc

SEQ ID NO: 403283 - DNA, 33 bp, Homo sapien
tgttaggaaaaatcaccgggtcagcacctctct

SEQ ID NO: 403284 - DNA, 33 bp, Homo sapien
tgttaggaaaaatcactgggtcagcacctctct

SEQ ID NO: 403285 - DNA, 33 bp, Homo sapien
cctcccatcccaagaaacatttttactcagcaa

SEQ ID NO: 403286 - DNA, 33 bp, Homo sapien
cctcccatcccaagaagcatttttactcagcaa

SEQ ID NO: 403287 - DNA, 33 bp, Homo sapien
aaacttacttccacaaagagaaggagcttagct

SEQ ID NO: 403288 - DNA, 33 bp, Homo sapien
aaacttacttccacaatgagaaggagcttagct

SEQ ID NO: 403289 - DNA, 33 bp, Homo sapien
cagtatattcagaagacaggttcattatagcat

SEQ ID NO: 403290 - DNA, 33 bp, Homo sapien
cagtatattcagaagagaggttcattatagcat

SEQ ID NO: 403291 - DNA, 33 bp, Homo sapien
gccctttgggcatctcactaatctgaatcctct

SEQ ID NO: 403292 - DNA, 33 bp, Homo sapien
gccctttgggcatctcgctaatctgaatcctct

SEQ ID NO: 403293 - DNA, 33 bp, Homo sapien
aaatgaagaaaatacacaggcttggcaggttac

SEQ ID NO: 403294 - DNA, 33 bp, Homo sapien
aaatgaagaaaatacataggcttggcaggttac

SEQ ID NO: 403295 - DNA, 33 bp, Homo sapien
ggccagctgtcagcaccgagatgggggtagtga

SEQ ID NO: 403296 - DNA, 33 bp, Homo sapien
ggccagctgtcagcactgagatgggggtagtga

SEQ ID NO: 403297 - DNA, 33 bp, Homo sapien
gttgtcagaaccacacccttcttgcgagcaggc

SEQ ID NO: 403298 - DNA, 33 bp, Homo sapien
gttgtcagaaccacactcttcttgcgagcaggc

SEQ ID NO: 403299 - DNA, 33 bp, Homo sapien
acatcactcttttagaacacaggcactgagcac

SEQ ID NO: 403300 - DNA, 33 bp, Homo sapien
acatcactcttttagagcacaggcactgagcac

SEQ ID NO: 403301 - DNA, 33 bp, Homo sapien
atgcaccagttctgaggctcaacatgtgtcctt

SEQ ID NO: 403302 - DNA, 33 bp, Homo sapien
atgcaccagttctgagtctcaacatgtgtcctt

SEQ ID NO: 403303 - DNA, 33 bp, Homo sapien
tggatgacaatattgagccaggggtcaaggaca

SEQ ID NO: 403304 - DNA, 33 bp, Homo sapien
tggatgacaatattgatccaggggtcaaggaca

SEQ ID NO: 403305 - DNA, 33 bp, Homo sapien
agagttcattctggaccatgagaatacctcagc

SEQ ID NO: 403306 - DNA, 33 bp, Homo sapien
agagttcattctggacgatgagaatacctcagc

SEQ ID NO: 403307 - DNA, 33 bp, Homo sapien
agggagggagtcctcaacttacaaatgagaaaa

SEQ ID NO: 403308 - DNA, 33 bp, Homo sapien
agggagggagtcctcaccttacaaatgagaaaa

SEQ ID NO: 403309 - DNA, 33 bp, Homo sapien
agaagaatataagcgcaaaatgcactgaaggca

SEQ ID NO: 403310 - DNA, 33 bp, Homo sapien
agaagaatataagcgccaaatgcactgaaggca

SEQ ID NO: 403311 - DNA, 33 bp, Homo sapien
ctttcagtatcaactcaaagttatcaattaagc

SEQ ID NO: 403312 - DNA, 33 bp, Homo sapien
ctttcagtatcaactcgaagttatcaattaagc

SEQ ID NO: 403313 - DNA, 33 bp, Homo sapien
accttgatgagatgaccgataccctggccttcc

SEQ ID NO: 403314 - DNA, 33 bp, Homo sapien
accttgatgagatgactgataccctggccttcc

SEQ ID NO: 403315 - DNA, 33 bp, Homo sapien
caatggactttcagcacgattagctcatctcat

SEQ ID NO: 403316 - DNA, 33 bp, Homo sapien
caatggactttcagcatgattagctcatctcat

SEQ ID NO: 403317 - DNA, 33 bp, Homo sapien
aaatcgacattgtaaccccctttctaagatgga

SEQ ID NO: 403318 - DNA, 33 bp, Homo sapien
aaatcgacattgtaactccctttctaagatgga

SEQ ID NO: 403319 - DNA, 33 bp, Homo sapien
caaagctcagcacaggcataagggcttgcccat

SEQ ID NO: 403320 - DNA, 33 bp, Homo sapien
caaagctcagcacaggtataagggcttgcccat

SEQ ID NO: 403321 - DNA, 33 bp, Homo sapien
ttggaaagtggattgacgtatttttgtggggag

SEQ ID NO: 403322 - DNA, 33 bp, Homo sapien
ttggaaagtggattgatgtatttttgtggggag

SEQ ID NO: 403323 - DNA, 33 bp, Homo sapien
tcacagtgtaaggtagacattgacaatcttcct

SEQ ID NO: 403324 - DNA, 33 bp, Homo sapien
tcacagtgtaaggtaggcattgacaatcttcct

SEQ ID NO: 403325 - DNA, 33 bp, Homo sapien
ctcagacaaaacactcacagcttcgtggcagag

SEQ ID NO: 403326 - DNA, 33 bp, Homo sapien
ctcagacaaaacactcgcagcttcgtggcagag

SEQ ID NO: 403327 - DNA, 33 bp, Homo sapien
tccctacatatccaaacctctgaattcgactct

SEQ ID NO: 403328 - DNA, 33 bp, Homo sapien
tccctacatatccaaagctctgaattcgactct

SEQ ID NO: 403329 - DNA, 33 bp, Homo sapien
caactatcttctttaacccaggtgcatttctgt

SEQ ID NO: 403330 - DNA, 33 bp, Homo sapien
caactatcttctttaatccaggtgcatttctgt

SEQ ID NO: 403331 - DNA, 33 bp, Homo sapien
aatggtccaggatcaagctccagtcaagcattt

SEQ ID NO: 403332 - DNA, 33 bp, Homo sapien
aatggtccaggatcaatctccagtcaagcattt

SEQ ID NO: 403333 - DNA, 33 bp, Homo sapien
acctacctaagtcctacgattccttcaatatca

SEQ ID NO: 403334 - DNA, 33 bp, Homo sapien
acctacctaagtcctatgattccttcaatatca

SEQ ID NO: 403335 - DNA, 33 bp, Homo sapien
tcctcctccatgttccaaagaaccctatgttta

SEQ ID NO: 403336 - DNA, 33 bp, Homo sapien
tcctcctccatgttccgaagaaccctatgttta

SEQ ID NO: 403337 - DNA, 33 bp, Homo sapien
atggcagcttgcctccacctgcacctgaatggg

SEQ ID NO: 403338 - DNA, 33 bp, Homo sapien
atggcagcttgcctccgcctgcacctgaatggg

SEQ ID NO: 403339 - DNA, 33 bp, Homo sapien
gacactgtaattgaaaattagagcgctcctgcc

SEQ ID NO: 403340 - DNA, 33 bp, Homo sapien
gacactgtaattgaaagttagagcgctcctgcc

SEQ ID NO: 403341 - DNA, 33 bp, Homo sapien
gaactccgcagctctccctctactctggggtgt

SEQ ID NO: 403342 - DNA, 33 bp, Homo sapien
gaactccgcagctctctctctactctggggtgt

SEQ ID NO: 403343 - DNA, 33 bp, Homo sapien
cccattcccaagattcgcatcctttcccctgcc

SEQ ID NO: 403344 - DNA, 33 bp, Homo sapien
cccattcccaagattctcatcctttcccctgcc

SEQ ID NO: 403345 - DNA, 33 bp, Homo sapien
ctggcctggaatcagacggaagtgagtttgtat

SEQ ID NO: 403346 - DNA, 33 bp, Homo sapien
ctggcctggaatcagatggaagtgagtttgtat

SEQ ID NO: 403347 - DNA, 33 bp, Homo sapien
gtcaagagaattttaactgaagcctcaagccat

SEQ ID NO: 403348 - DNA, 33 bp, Homo sapien
gtcaagagaattttaattgaagcctcaagccat

SEQ ID NO: 403349 - DNA, 33 bp, Homo sapien
tcattagcagtggccacagaatagcaataatag

SEQ ID NO: 403350 - DNA, 33 bp, Homo sapien
tcattagcagtggccatagaatagcaataatag

SEQ ID NO: 403351 - DNA, 33 bp, Homo sapien
cagttattttgtggaacgttgagaaagccaaca

SEQ ID NO: 403352 - DNA, 33 bp, Homo sapien
cagttattttgtggaatgttgagaaagccaaca

SEQ ID NO: 403353 - DNA, 33 bp, Homo sapien
aaggaagctgagtttcaatgaatgaattgctca

SEQ ID NO: 403354 - DNA, 33 bp, Homo sapien
aaggaagctgagtttcgatgaatgaattgctca

SEQ ID NO: 403355 - DNA, 33 bp, Homo sapien
aacaataagttattccagatacagcacagtttc

SEQ ID NO: 403356 - DNA, 33 bp, Homo sapien
aacaataagttattccggatacagcacagtttc

SEQ ID NO: 403357 - DNA, 33 bp, Homo sapien
aaatgaggaactataccgtacatacgcacatga

SEQ ID NO: 403358 - DNA, 33 bp, Homo sapien
aaatgaggaactatactgtacatacgcacatga

SEQ ID NO: 403359 - DNA, 33 bp, Homo sapien
cttgtcacaataacaaattcctagatatgtatg

SEQ ID NO: 403360 - DNA, 33 bp, Homo sapien
cttgtcacaataacaagttcctagatatgtatg

SEQ ID NO: 403361 - DNA, 33 bp, Homo sapien
tataacccaaatgagcactggtaaagaagagca

SEQ ID NO: 403362 - DNA, 33 bp, Homo sapien
tataacccaaatgagcgctggtaaagaagagca

SEQ ID NO: 403363 - DNA, 33 bp, Homo sapien
aggatagatcacagataaacaacaattgtaagt

SEQ ID NO: 403364 - DNA, 33 bp, Homo sapien
aggatagatcacagatcaacaacaattgtaagt

SEQ ID NO: 403365 - DNA, 33 bp, Homo sapien
gagattaaacccaccacacccatttcacagatg

SEQ ID NO: 403366 - DNA, 33 bp, Homo sapien
gagattaaacccaccatacccatttcacagatg

SEQ ID NO: 403367 - DNA, 33 bp, Homo sapien
ggcggcttaggtagcaagagacaggcctggcct

SEQ ID NO: 403368 - DNA, 33 bp, Homo sapien
ggcggcttaggtagcaggagacaggcctggcct

SEQ ID NO: 403369 - DNA, 33 bp, Homo sapien
aaacaaaaacactccaatgaaatattagtaaga

SEQ ID NO: 403370 - DNA, 33 bp, Homo sapien
aaacaaaaacactccagtgaaatattagtaaga

SEQ ID NO: 403371 - DNA, 33 bp, Homo sapien
ccgcttgagactgggccactttactacgtccga

SEQ ID NO: 403372 - DNA, 33 bp, Homo sapien
ccgcttgagactgggctactttactacgtccga

SEQ ID NO: 403373 - DNA, 33 bp, Homo sapien
gtaaaatgatcaaaacagtaatagcttcctcct

SEQ ID NO: 403374 - DNA, 33 bp, Homo sapien
gtaaaatgatcaaaacggtaatagcttcctcct

SEQ ID NO: 403375 - DNA, 33 bp, Homo sapien
tgggaaagaatttccaatagtcacatcggtaat

SEQ ID NO: 403376 - DNA, 33 bp, Homo sapien
tgggaaagaatttccagtagtcacatcggtaat

SEQ ID NO: 403377 - DNA, 33 bp, Homo sapien
tgttgtgcagataagaaatggtatgttggtgct

SEQ ID NO: 403378 - DNA, 33 bp, Homo sapien
tgttgtgcagataagagatggtatgttggtgct

SEQ ID NO: 403379 - DNA, 33 bp, Homo sapien
gtcattcttacctcagaacatcacaaaacatga

SEQ ID NO: 403380 - DNA, 33 bp, Homo sapien
gtcattcttacctcaggacatcacaaaacatga

SEQ ID NO: 403381 - DNA, 33 bp, Homo sapien
cttatctttgcaattaataaggcaatttcatac

SEQ ID NO: 403382 - DNA, 33 bp, Homo sapien
cttatctttgcaattagtaaggcaatttcatac

SEQ ID NO: 403383 - DNA, 33 bp, Homo sapien
aattggtttaagccacaaagagacacgattcga

SEQ ID NO: 403384 - DNA, 33 bp, Homo sapien
aattggtttaagccacgaagagacacgattcga

SEQ ID NO: 403385 - DNA, 33 bp, Homo sapien
tttgcaatttggagatcaggtgaaaagtcagaa

SEQ ID NO: 403386 - DNA, 33 bp, Homo sapien
tttgcaatttggagatgaggtgaaaagtcagaa

SEQ ID NO: 403387 - DNA, 33 bp, Homo sapien
atgagaacaactcacccatggcttcagttggga

SEQ ID NO: 403388 - DNA, 33 bp, Homo sapien
atgagaacaactcacctatggcttcagttggga

SEQ ID NO: 403389 - DNA, 33 bp, Homo sapien
tctccacttttgatggacataaattcctcagtg

SEQ ID NO: 403390 - DNA, 33 bp, Homo sapien
tctccacttttgatgggcataaattcctcagtg

SEQ ID NO: 403391 - DNA, 33 bp, Homo sapien
gagatagtctaggggccgcagggatgtaggcct

SEQ ID NO: 403392 - DNA, 33 bp, Homo sapien
gagatagtctaggggctgcagggatgtaggcct

SEQ ID NO: 403393 - DNA, 33 bp, Homo sapien
gttccttctctccccacaaacctcatcctggtc

SEQ ID NO: 403394 - DNA, 33 bp, Homo sapien
gttccttctctccccagaaacctcatcctggtc

SEQ ID NO: 403395 - DNA, 33 bp, Homo sapien
tgagctcctgcacttacgggtgagaaacacaga

SEQ ID NO: 403396 - DNA, 33 bp, Homo sapien
tgagctcctgcacttatgggtgagaaacacaga

SEQ ID NO: 403397 - DNA, 33 bp, Homo sapien
ttgagactttatctcacgtctgttttgagattg

SEQ ID NO: 403398 - DNA, 33 bp, Homo sapien
ttgagactttatctcaggtctgttttgagattg

SEQ ID NO: 403399 - DNA, 33 bp, Homo sapien
atgaagattccacagtcaagatactgtgatcaa

SEQ ID NO: 403400 - DNA, 33 bp, Homo sapien
atgaagattccacagtgaagatactgtgatcaa

SEQ ID NO: 403401 - DNA, 33 bp, Homo sapien
ttcttccatttcaacactggggaaactcctgtt

SEQ ID NO: 403402 - DNA, 33 bp, Homo sapien
ttcttccatttcaacattggggaaactcctgtt

SEQ ID NO: 403403 - DNA, 33 bp, Homo sapien
tgactgcaatcatcccaacagaagatgctgaag

SEQ ID NO: 403404 - DNA, 33 bp, Homo sapien
tgactgcaatcatcccgacagaagatgctgaag

SEQ ID NO: 403405 - DNA, 33 bp, Homo sapien
atgcaccctttgctccaagcctactaaaatact

SEQ ID NO: 403406 - DNA, 33 bp, Homo sapien
atgcaccctttgctcccagcctactaaaatact

SEQ ID NO: 403407 - DNA, 33 bp, Homo sapien
cagcctatgagaagaaagtagaatcccctagaa

SEQ ID NO: 403408 - DNA, 33 bp, Homo sapien
cagcctatgagaagaaggtagaatcccctagaa

SEQ ID NO: 403409 - DNA, 33 bp, Homo sapien
gagcagccagagggcaaggaggtaactgtggaa

SEQ ID NO: 403410 - DNA, 33 bp, Homo sapien
gagcagccagagggcagggaggtaactgtggaa

SEQ ID NO: 403411 - DNA, 33 bp, Homo sapien
gacccagtggaggactcaaggctccaggggaag

SEQ ID NO: 403412 - DNA, 33 bp, Homo sapien
gacccagtggaggactgaaggctccaggggaag

SEQ ID NO: 403413 - DNA, 33 bp, Homo sapien
tgagctgtcatgaggaagactgcctatcaaagc

SEQ ID NO: 403414 - DNA, 33 bp, Homo sapien
tgagctgtcatgaggaggactgcctatcaaagc

SEQ ID NO: 403415 - DNA, 33 bp, Homo sapien
cacactgacagccacaaatatataatgatgatg

SEQ ID NO: 403416 - DNA, 33 bp, Homo sapien
cacactgacagccacagatatataatgatgatg

SEQ ID NO: 403417 - DNA, 33 bp, Homo sapien
gagtggaatcccacgggccactttgataagact

SEQ ID NO: 403418 - DNA, 33 bp, Homo sapien
gagtggaatcccacggtccactttgataagact

SEQ ID NO: 403419 - DNA, 33 bp, Homo sapien
gaatctgatttcagcacctggaaagcagtggtt

SEQ ID NO: 403420 - DNA, 33 bp, Homo sapien
gaatctgatttcagcatctggaaagcagtggtt

SEQ ID NO: 403421 - DNA, 33 bp, Homo sapien
gacacacagggaaagaaacaagaaagatatagt

SEQ ID NO: 403422 - DNA, 33 bp, Homo sapien
gacacacagggaaagagacaagaaagatatagt

SEQ ID NO: 403423 - DNA, 33 bp, Homo sapien
atttattcaatggacacagaacaagtatttaag

SEQ ID NO: 403424 - DNA, 33 bp, Homo sapien
atttattcaatggacagagaacaagtatttaag

SEQ ID NO: 403425 - DNA, 33 bp, Homo sapien
agacaatagagagccactgatggactgggacaa

SEQ ID NO: 403426 - DNA, 33 bp, Homo sapien
agacaatagagagccattgatggactgggacaa

SEQ ID NO: 403427 - DNA, 33 bp, Homo sapien
ctaaaccctgtccacaaatgctctagagatatt

SEQ ID NO: 403428 - DNA, 33 bp, Homo sapien
ctaaaccctgtccacatatgctctagagatatt

SEQ ID NO: 403429 - DNA, 33 bp, Homo sapien
agatgatatatgtaaacgcagaagagaactacc

SEQ ID NO: 403430 - DNA, 33 bp, Homo sapien
agatgatatatgtaaaggcagaagagaactacc

SEQ ID NO: 403431 - DNA, 33 bp, Homo sapien
agataattgatgcccaacactgagtctggctaa

SEQ ID NO: 403432 - DNA, 33 bp, Homo sapien
agataattgatgcccagcactgagtctggctaa

SEQ ID NO: 403433 - DNA, 33 bp, Homo sapien
taattctttcagcacaagatgatgaagtttccc

SEQ ID NO: 403434 - DNA, 33 bp, Homo sapien
taattctttcagcacaggatgatgaagtttccc

SEQ ID NO: 403435 - DNA, 33 bp, Homo sapien
gagtcgaacaatggctaaaagaatgactgtggg

SEQ ID NO: 403436 - DNA, 33 bp, Homo sapien
gagtcgaacaatggctgaaagaatgactgtggg

SEQ ID NO: 403437 - DNA, 33 bp, Homo sapien
ttgtgtgatcattgccaaggtggactttgaggg

SEQ ID NO: 403438 - DNA, 33 bp, Homo sapien
ttgtgtgatcattgcctaggtggactttgaggg

SEQ ID NO: 403439 - DNA, 33 bp, Homo sapien
atgtttgttaaatccacgtgctgggcaactcat

SEQ ID NO: 403440 - DNA, 33 bp, Homo sapien
atgtttgttaaatccatgtgctgggcaactcat

SEQ ID NO: 403441 - DNA, 33 bp, Homo sapien
aataagaatggtgccacatgagactgtagacac

SEQ ID NO: 403442 - DNA, 33 bp, Homo sapien
aataagaatggtgccatatgagactgtagacac

SEQ ID NO: 403443 - DNA, 33 bp, Homo sapien
tgaaagaactcagacaacttagcatgaaaagcg

SEQ ID NO: 403444 - DNA, 33 bp, Homo sapien
tgaaagaactcagacagcttagcatgaaaagcg

SEQ ID NO: 403445 - DNA, 33 bp, Homo sapien
gtgtcctgggcccatcaataaagtagaaggcag

SEQ ID NO: 403446 - DNA, 33 bp, Homo sapien
gtgtcctgggcccatcgataaagtagaaggcag

SEQ ID NO: 403447 - DNA, 33 bp, Homo sapien
tacagcttaaagttctaaactggaagatcccaa

SEQ ID NO: 403448 - DNA, 33 bp, Homo sapien
tacagcttaaagttctgaactggaagatcccaa

SEQ ID NO: 403449 - DNA, 33 bp, Homo sapien
agtagtcgggctattcacaggagtcagacctga

SEQ ID NO: 403450 - DNA, 33 bp, Homo sapien
agtagtcgggctattcgcaggagtcagacctga

SEQ ID NO: 403451 - DNA, 33 bp, Homo sapien
tgaccctctgtaacctcaatggcttccggttct

SEQ ID NO: 403452 - DNA, 33 bp, Homo sapien
tgaccctctgtaacctgaatggcttccggttct

SEQ ID NO: 403453 - DNA, 33 bp, Homo sapien
ggtatgttggcctctaactctataccaggcact

SEQ ID NO: 403454 - DNA, 33 bp, Homo sapien
ggtatgttggcctctacctctataccaggcact

SEQ ID NO: 403455 - DNA, 33 bp, Homo sapien
actcactcgcagttagcagtatggtttacataa

SEQ ID NO: 403456 - DNA, 33 bp, Homo sapien
actcactcgcagttagtagtatggtttacataa

SEQ ID NO: 403457 - DNA, 33 bp, Homo sapien
agagcctggcccatgaaggtgaatcagtggata

SEQ ID NO: 403458 - DNA, 33 bp, Homo sapien
agagcctggcccatgagggtgaatcagtggata

SEQ ID NO: 403459 - DNA, 33 bp, Homo sapien
gaaaaagagtacttaaaaattgcattctttgtg

SEQ ID NO: 403460 - DNA, 33 bp, Homo sapien
gaaaaagagtacttaacaattgcattctttgtg

SEQ ID NO: 403461 - DNA, 33 bp, Homo sapien
ttgcactaatggcttcaacataattgctagtag

SEQ ID NO: 403462 - DNA, 33 bp, Homo sapien
ttgcactaatggcttcgacataattgctagtag

SEQ ID NO: 403463 - DNA, 33 bp, Homo sapien
ttccccggtccacaacagaataagactttgtct

SEQ ID NO: 403464 - DNA, 33 bp, Homo sapien
ttccccggtccacaacggaataagactttgtct

SEQ ID NO: 403465 - DNA, 33 bp, Homo sapien
agcatctggccagatacaacagcaatcatttag

SEQ ID NO: 403466 - DNA, 33 bp, Homo sapien
agcatctggccagatataacagcaatcatttag

SEQ ID NO: 403467 - DNA, 33 bp, Homo sapien
acttgcttaggcccgactaacatttgcactcac

SEQ ID NO: 403468 - DNA, 33 bp, Homo sapien
acttgcttaggcccgattaacatttgcactcac

SEQ ID NO: 403469 - DNA, 33 bp, Homo sapien
agcaggctcaaagctcaactggagggtaggtcc

SEQ ID NO: 403470 - DNA, 33 bp, Homo sapien
agcaggctcaaagctcgactggagggtaggtcc

SEQ ID NO: 403471 - DNA, 33 bp, Homo sapien
tttggattagaaaatgaagtggaaaaggaaatg

SEQ ID NO: 403472 - DNA, 33 bp, Homo sapien
tttggattagaaaatgtagtggaaaaggaaatg

SEQ ID NO: 403473 - DNA, 33 bp, Homo sapien
aaaaaccaaacaagcccctcacccacaggtgac

SEQ ID NO: 403474 - DNA, 33 bp, Homo sapien
aaaaaccaaacaagcctctcacccacaggtgac

SEQ ID NO: 403475 - DNA, 33 bp, Homo sapien
atgctagagaaagatacgttgcttactctattc

SEQ ID NO: 403476 - DNA, 33 bp, Homo sapien
atgctagagaaagatatgttgcttactctattc

SEQ ID NO: 403477 - DNA, 33 bp, Homo sapien
aggtcagggatagtcaaccgaggagaacaaaaa

SEQ ID NO: 403478 - DNA, 33 bp, Homo sapien
aggtcagggatagtcacccgaggagaacaaaaa

SEQ ID NO: 403479 - DNA, 33 bp, Homo sapien
ttccatctctgaatcccgacttctttttcatct

SEQ ID NO: 403480 - DNA, 33 bp, Homo sapien
ttccatctctgaatcctgacttctttttcatct

SEQ ID NO: 403481 - DNA, 33 bp, Homo sapien
catggttaaaagtaagcaatcagatagctctgg

SEQ ID NO: 403482 - DNA, 33 bp, Homo sapien
catggttaaaagtaaggaatcagatagctctgg

SEQ ID NO: 403483 - DNA, 33 bp, Homo sapien
tcttttgagtcttatccatctgtgtatttactg

SEQ ID NO: 403484 - DNA, 33 bp, Homo sapien
tcttttgagtcttatctatctgtgtatttactg

SEQ ID NO: 403485 - DNA, 33 bp, Homo sapien
tgaaaagaaattaagcagaaatgagaaaaatgt

SEQ ID NO: 403486 - DNA, 33 bp, Homo sapien
tgaaaagaaattaagcggaaatgagaaaaatgt

SEQ ID NO: 403487 - DNA, 33 bp, Homo sapien
gtcatctagtagaataacagttttacaattgcg

SEQ ID NO: 403488 - DNA, 33 bp, Homo sapien
gtcatctagtagaatagcagttttacaattgcg

SEQ ID NO: 403489 - DNA, 33 bp, Homo sapien
ctgatacgacactttacactttagtgtatttct

SEQ ID NO: 403490 - DNA, 33 bp, Homo sapien
ctgatacgacactttatactttagtgtatttct

SEQ ID NO: 403491 - DNA, 33 bp, Homo sapien
atgcattaaaattctcaaatcctaagtgtagag

SEQ ID NO: 403492 - DNA, 33 bp, Homo sapien
atgcattaaaattctcgaatcctaagtgtagag

SEQ ID NO: 403493 - DNA, 33 bp, Homo sapien
aaagttttctcatggcgcttggtagtcaatctt

SEQ ID NO: 403494 - DNA, 33 bp, Homo sapien
aaagttttctcatggctcttggtagtcaatctt

SEQ ID NO: 403495 - DNA, 33 bp, Homo sapien
tctgagacatctatcaagttggaaaacatttag

SEQ ID NO: 403496 - DNA, 33 bp, Homo sapien
tctgagacatctatcaggttggaaaacatttag

SEQ ID NO: 403497 - DNA, 33 bp, Homo sapien
aacactgattggattacgtccatattacagatg

SEQ ID NO: 403498 - DNA, 33 bp, Homo sapien
aacactgattggattatgtccatattacagatg

SEQ ID NO: 403499 - DNA, 33 bp, Homo sapien
gctgaaaccttcatgacacaagtgacatcaccc

SEQ ID NO: 403500 - DNA, 33 bp, Homo sapien
gctgaaaccttcatgatacaagtgacatcaccc

SEQ ID NO: 403501 - DNA, 33 bp, Homo sapien
taacatgcttccttccacatccagtgagctaga

SEQ ID NO: 403502 - DNA, 33 bp, Homo sapien
taacatgcttccttcctcatccagtgagctaga

SEQ ID NO: 403503 - DNA, 33 bp, Homo sapien
gttgctcttcttgagacgtatctttgtggtgtt

SEQ ID NO: 403504 - DNA, 33 bp, Homo sapien
gttgctcttcttgagatgtatctttgtggtgtt

SEQ ID NO: 403505 - DNA, 33 bp, Homo sapien
gtgacagctttctagccaacatttttatctttt

SEQ ID NO: 403506 - DNA, 33 bp, Homo sapien
gtgacagctttctagctaacatttttatctttt

SEQ ID NO: 403507 - DNA, 33 bp, Homo sapien
tttaaatagttgccgacgggccaaggaagaacc

SEQ ID NO: 403508 - DNA, 33 bp, Homo sapien
tttaaatagttgccgatgggccaaggaagaacc

SEQ ID NO: 403509 - DNA, 33 bp, Homo sapien
atacaaactctcatggaagcaagcatagaattg

SEQ ID NO: 403510 - DNA, 33 bp, Homo sapien
atacaaactctcatggcagcaagcatagaattg

SEQ ID NO: 403511 - DNA, 33 bp, Homo sapien
ccattcattcattcagcaagtagttaagtttta

SEQ ID NO: 403512 - DNA, 33 bp, Homo sapien
ccattcattcattcaggaagtagttaagtttta

SEQ ID NO: 403513 - DNA, 33 bp, Homo sapien
cccaaagtggtagtgcaagaatatgacagggca

SEQ ID NO: 403514 - DNA, 33 bp, Homo sapien
cccaaagtggtagtgcgagaatatgacagggca

SEQ ID NO: 403515 - DNA, 33 bp, Homo sapien
ggatgatgtttcttccacttggttgcaaaatgt

SEQ ID NO: 403516 - DNA, 33 bp, Homo sapien
ggatgatgtttcttccgcttggttgcaaaatgt

SEQ ID NO: 403517 - DNA, 33 bp, Homo sapien
cattttcatagcaagaaatcacagcagaagctt

SEQ ID NO: 403518 - DNA, 33 bp, Homo sapien
cattttcatagcaagatatcacagcagaagctt

SEQ ID NO: 403519 - DNA, 33 bp, Homo sapien
agtaagtggtcagtaaaggcattgttgagtgca

SEQ ID NO: 403520 - DNA, 33 bp, Homo sapien
agtaagtggtcagtaatggcattgttgagtgca

SEQ ID NO: 403521 - DNA, 33 bp, Homo sapien
tccttcttaatttccaagggacatgagtaagca

SEQ ID NO: 403522 - DNA, 33 bp, Homo sapien
tccttcttaatttccatgggacatgagtaagca

SEQ ID NO: 403523 - DNA, 33 bp, Homo sapien
tcatacctgtatgatcaatgtaggctcagaata

SEQ ID NO: 403524 - DNA, 33 bp, Homo sapien
tcatacctgtatgatcgatgtaggctcagaata

SEQ ID NO: 403525 - DNA, 33 bp, Homo sapien
ggtccctgaatcagaccaccgaatcccttcaaa

SEQ ID NO: 403526 - DNA, 33 bp, Homo sapien
ggtccctgaatcagactaccgaatcccttcaaa

SEQ ID NO: 403527 - DNA, 33 bp, Homo sapien
cctcactccaggtcaaacagcgtcccctgcctc

SEQ ID NO: 403528 - DNA, 33 bp, Homo sapien
cctcactccaggtcaagcagcgtcccctgcctc

SEQ ID NO: 403529 - DNA, 33 bp, Homo sapien
tctgttcagggggacaaaatgtataaaggtgta

SEQ ID NO: 403530 - DNA, 33 bp, Homo sapien
tctgttcagggggacacaatgtataaaggtgta

SEQ ID NO: 403531 - DNA, 33 bp, Homo sapien
ctgaaataggttgttacaaattatgatgttaat

SEQ ID NO: 403532 - DNA, 33 bp, Homo sapien
ctgaaataggttgttataaattatgatgttaat

SEQ ID NO: 403533 - DNA, 33 bp, Homo sapien
ttcagttcattcaaggacaaagcttgagggtgg

SEQ ID NO: 403534 - DNA, 33 bp, Homo sapien
ttcagttcattcaagggcaaagcttgagggtgg

SEQ ID NO: 403535 - DNA, 33 bp, Homo sapien
ggaggtgggaaagttcaagcaaaaaacactcct

SEQ ID NO: 403536 - DNA, 33 bp, Homo sapien
ggaggtgggaaagttccagcaaaaaacactcct

SEQ ID NO: 403537 - DNA, 33 bp, Homo sapien
aaattgagctatatggaacacattacccctaac

SEQ ID NO: 403538 - DNA, 33 bp, Homo sapien
aaattgagctatatggtacacattacccctaac

SEQ ID NO: 403539 - DNA, 33 bp, Homo sapien
atatagctcaatttcaagatggaagcagtccat

SEQ ID NO: 403540 - DNA, 33 bp, Homo sapien
atatagctcaatttcaggatggaagcagtccat

SEQ ID NO: 403541 - DNA, 33 bp, Homo sapien
gtttatttctttctcacgtcacagttcaaggta

SEQ ID NO: 403542 - DNA, 33 bp, Homo sapien
gtttatttctttctcatgtcacagttcaaggta

SEQ ID NO: 403543 - DNA, 33 bp, Homo sapien
tcaaccaattattgcacgtggactacacccaga

SEQ ID NO: 403544 - DNA, 33 bp, Homo sapien
tcaaccaattattgcatgtggactacacccaga

SEQ ID NO: 403545 - DNA, 33 bp, Homo sapien
gtgtaagacaataacactctcatgatttctccc

SEQ ID NO: 403546 - DNA, 33 bp, Homo sapien
gtgtaagacaataacattctcatgatttctccc

SEQ ID NO: 403547 - DNA, 33 bp, Homo sapien
tatctgtgttcctctcaattttattttcctatg

SEQ ID NO: 403548 - DNA, 33 bp, Homo sapien
tatctgtgttcctctccattttattttcctatg

SEQ ID NO: 403549 - DNA, 33 bp, Homo sapien
ctctgtatcagtgttacatgaggcaattggcag

SEQ ID NO: 403550 - DNA, 33 bp, Homo sapien
ctctgtatcagtgttatatgaggcaattggcag

SEQ ID NO: 403551 - DNA, 33 bp, Homo sapien
tgttaaaagatgatccagagttttttaaaaaag

SEQ ID NO: 403552 - DNA, 33 bp, Homo sapien
tgttaaaagatgatcctgagttttttaaaaaag

SEQ ID NO: 403553 - DNA, 33 bp, Homo sapien
gccattctgccttttcactcactccttttctct

SEQ ID NO: 403554 - DNA, 33 bp, Homo sapien
gccattctgccttttcgctcactccttttctct

SEQ ID NO: 403555 - DNA, 33 bp, Homo sapien
gatttttaaacatttaactcatgcatttttcat

SEQ ID NO: 403556 - DNA, 33 bp, Homo sapien
gatttttaaacatttacctcatgcatttttcat

SEQ ID NO: 403557 - DNA, 33 bp, Homo sapien
tatggactccttctcacggactgagtttctcta

SEQ ID NO: 403558 - DNA, 33 bp, Homo sapien
tatggactccttctcatggactgagtttctcta

SEQ ID NO: 403559 - DNA, 33 bp, Homo sapien
tattgaagaaagagctcagagtttgatggagct

SEQ ID NO: 403560 - DNA, 33 bp, Homo sapien
tattgaagaaagagcttagagtttgatggagct

SEQ ID NO: 403561 - DNA, 33 bp, Homo sapien
ggaggccaaatctgaaataaattgttggtcacc

SEQ ID NO: 403562 - DNA, 33 bp, Homo sapien
ggaggccaaatctgaagtaaattgttggtcacc

SEQ ID NO: 403563 - DNA, 33 bp, Homo sapien
tttgggaaggaattacaggttgatggaatatta

SEQ ID NO: 403564 - DNA, 33 bp, Homo sapien
tttgggaaggaattacgggttgatggaatatta

SEQ ID NO: 403565 - DNA, 33 bp, Homo sapien
tagagaagagcaccaaatgggcattggggtccc

SEQ ID NO: 403566 - DNA, 33 bp, Homo sapien
tagagaagagcaccaagtgggcattggggtccc

SEQ ID NO: 403567 - DNA, 33 bp, Homo sapien
tctggaagcccatatcggaccgtttggggatat

SEQ ID NO: 403568 - DNA, 33 bp, Homo sapien
tctggaagcccatatctgaccgtttggggatat

SEQ ID NO: 403569 - DNA, 33 bp, Homo sapien
tggagacatgtagaaaggaaagttgagggcagg

SEQ ID NO: 403570 - DNA, 33 bp, Homo sapien
tggagacatgtagaaatgaaagttgagggcagg

SEQ ID NO: 403571 - DNA, 33 bp, Homo sapien
ttcctatatgtccaccaagggtttatcctgctc

SEQ ID NO: 403572 - DNA, 33 bp, Homo sapien
ttcctatatgtccaccgagggtttatcctgctc

SEQ ID NO: 403573 - DNA, 33 bp, Homo sapien
cccctgaattgctgcaactctctttagccctca

SEQ ID NO: 403574 - DNA, 33 bp, Homo sapien
cccctgaattgctgcatctctctttagccctca

SEQ ID NO: 403575 - DNA, 33 bp, Homo sapien
tttgtcctggggtgtaagctttgagtcagggtg

SEQ ID NO: 403576 - DNA, 33 bp, Homo sapien
tttgtcctggggtgtacgctttgagtcagggtg

SEQ ID NO: 403577 - DNA, 33 bp, Homo sapien
aatgtttaaagtgcaacaacatagcttatcaag

SEQ ID NO: 403578 - DNA, 33 bp, Homo sapien
aatgtttaaagtgcaataacatagcttatcaag

SEQ ID NO: 403579 - DNA, 33 bp, Homo sapien
tctaagatcaaccagagagtaagagatagagtt

SEQ ID NO: 403580 - DNA, 33 bp, Homo sapien
tctaagatcaaccagatagtaagagatagagtt

SEQ ID NO: 403581 - DNA, 33 bp, Homo sapien
gctctttccagtgcacaataacccctcatgctt

SEQ ID NO: 403582 - DNA, 33 bp, Homo sapien
gctctttccagtgcaccataacccctcatgctt

SEQ ID NO: 403583 - DNA, 33 bp, Homo sapien
gcattgggaacttccccaagtgtgggagcagat

SEQ ID NO: 403584 - DNA, 33 bp, Homo sapien
gcattgggaacttccctaagtgtgggagcagat

SEQ ID NO: 403585 - DNA, 33 bp, Homo sapien
attttgtgtgaatatgaatttgggtaagtttat

SEQ ID NO: 403586 - DNA, 33 bp, Homo sapien
attttgtgtgaatatgcatttgggtaagtttat

SEQ ID NO: 403587 - DNA, 33 bp, Homo sapien
cacccagtgtaagcacagagatagatgtgttat

SEQ ID NO: 403588 - DNA, 33 bp, Homo sapien
cacccagtgtaagcacggagatagatgtgttat

SEQ ID NO: 403589 - DNA, 33 bp, Homo sapien
catgaagaaccacaaacatccaggtgagtagct

SEQ ID NO: 403590 - DNA, 33 bp, Homo sapien
catgaagaaccacaaatatccaggtgagtagct

SEQ ID NO: 403591 - DNA, 33 bp, Homo sapien
agttgtggactgtgcaaaaagtgtgttttcaga

SEQ ID NO: 403592 - DNA, 33 bp, Homo sapien
agttgtggactgtgcataaagtgtgttttcaga

SEQ ID NO: 403593 - DNA, 33 bp, Homo sapien
attcatcctactatgcactatgcatccatcttt

SEQ ID NO: 403594 - DNA, 33 bp, Homo sapien
attcatcctactatgcgctatgcatccatcttt

SEQ ID NO: 403595 - DNA, 33 bp, Homo sapien
acgagaagcccctaacaagtctcagagtaacag

SEQ ID NO: 403596 - DNA, 33 bp, Homo sapien
acgagaagcccctaaccagtctcagagtaacag

SEQ ID NO: 403597 - DNA, 33 bp, Homo sapien
gttgtgaacatataaaagactgttatgacaact

SEQ ID NO: 403598 - DNA, 33 bp, Homo sapien
gttgtgaacatataaaggactgttatgacaact

SEQ ID NO: 403599 - DNA, 33 bp, Homo sapien
tattaactattccatacctggttgaaaggctca

SEQ ID NO: 403600 - DNA, 33 bp, Homo sapien
tattaactattccatatctggttgaaaggctca

SEQ ID NO: 403601 - DNA, 33 bp, Homo sapien
atcatgtggagtctgacgggttctccaatagga

SEQ ID NO: 403602 - DNA, 33 bp, Homo sapien
atcatgtggagtctgatgggttctccaatagga

SEQ ID NO: 403603 - DNA, 33 bp, Homo sapien
ctgggtggcagacagcagagaaattattatagg

SEQ ID NO: 403604 - DNA, 33 bp, Homo sapien
ctgggtggcagacagcggagaaattattatagg

SEQ ID NO: 403605 - DNA, 33 bp, Homo sapien
tgtcagtctttgtcacaagtcttcccaattcca

SEQ ID NO: 403606 - DNA, 33 bp, Homo sapien
tgtcagtctttgtcactagtcttcccaattcca

SEQ ID NO: 403607 - DNA, 33 bp, Homo sapien
tgcttggctataaggcacaaggtagaatatggt

SEQ ID NO: 403608 - DNA, 33 bp, Homo sapien
tgcttggctataaggcgcaaggtagaatatggt

SEQ ID NO: 403609 - DNA, 33 bp, Homo sapien
agcttagcgacttaccagggagcaagggtagag

SEQ ID NO: 403610 - DNA, 33 bp, Homo sapien
agcttagcgacttaccggggagcaagggtagag

SEQ ID NO: 403611 - DNA, 33 bp, Homo sapien
gagacatgggctctgcactctacccttgctccc

SEQ ID NO: 403612 - DNA, 33 bp, Homo sapien
gagacatgggctctgcgctctacccttgctccc

SEQ ID NO: 403613 - DNA, 33 bp, Homo sapien
gtgacagacatacaccactagtgactctgcaga

SEQ ID NO: 403614 - DNA, 33 bp, Homo sapien
gtgacagacatacaccgctagtgactctgcaga

SEQ ID NO: 403615 - DNA, 33 bp, Homo sapien
tttggcttttcatgaacgagcattttgagctct

SEQ ID NO: 403616 - DNA, 33 bp, Homo sapien
tttggcttttcatgaatgagcattttgagctct

SEQ ID NO: 403617 - DNA, 33 bp, Homo sapien
ttgaaacccaatttgaacagctgtgtctttagg

SEQ ID NO: 403618 - DNA, 33 bp, Homo sapien
ttgaaacccaatttgaccagctgtgtctttagg

SEQ ID NO: 403619 - DNA, 33 bp, Homo sapien
gcttgtattcatctcaagaaaagccatgcctca

SEQ ID NO: 403620 - DNA, 33 bp, Homo sapien
gcttgtattcatctcaggaaaagccatgcctca

SEQ ID NO: 403621 - DNA, 33 bp, Homo sapien
catgcctcaggagaacagaagaaaacatgccgt

SEQ ID NO: 403622 - DNA, 33 bp, Homo sapien
catgcctcaggagaacggaagaaaacatgccgt

SEQ ID NO: 403623 - DNA, 33 bp, Homo sapien
cctgggctcaagatcacagatatgaatgcatcc

SEQ ID NO: 403624 - DNA, 33 bp, Homo sapien
cctgggctcaagatcatagatatgaatgcatcc

SEQ ID NO: 403625 - DNA, 33 bp, Homo sapien
tcaatgaagagactcacgtcaagttcctattgt

SEQ ID NO: 403626 - DNA, 33 bp, Homo sapien
tcaatgaagagactcatgtcaagttcctattgt

SEQ ID NO: 403627 - DNA, 33 bp, Homo sapien
catgtagaaaatgagaagtttgggtcagaaaac

SEQ ID NO: 403628 - DNA, 33 bp, Homo sapien
catgtagaaaatgagaggtttgggtcagaaaac

SEQ ID NO: 403629 - DNA, 33 bp, Homo sapien
tccctggatggctgcacggttaactcccttatt

SEQ ID NO: 403630 - DNA, 33 bp, Homo sapien
tccctggatggctgcatggttaactcccttatt

SEQ ID NO: 403631 - DNA, 33 bp, Homo sapien
gtgcagatgcactcctaaaagaacaacaaggag

SEQ ID NO: 403632 - DNA, 33 bp, Homo sapien
gtgcagatgcactcctgaaagaacaacaaggag

SEQ ID NO: 403633 - DNA, 33 bp, Homo sapien
tcaaggaggaagtaacaatcagttatctgcaga

SEQ ID NO: 403634 - DNA, 33 bp, Homo sapien
tcaaggaggaagtaacgatcagttatctgcaga

SEQ ID NO: 403635 - DNA, 33 bp, Homo sapien
taaaaaattcactttgcagctgtccttgaaggg

SEQ ID NO: 403636 - DNA, 33 bp, Homo sapien
taaaaaattcactttgtagctgtccttgaaggg

SEQ ID NO: 403637 - DNA, 33 bp, Homo sapien
gagacaatgcatgtaagcactgaactttacatg

SEQ ID NO: 403638 - DNA, 33 bp, Homo sapien
gagacaatgcatgtaatcactgaactttacatg

SEQ ID NO: 403639 - DNA, 33 bp, Homo sapien
cacgttaagtctcaaacgtcgttaaacccctgt

SEQ ID NO: 403640 - DNA, 33 bp, Homo sapien
cacgttaagtctcaaatgtcgttaaacccctgt

SEQ ID NO: 403641 - DNA, 33 bp, Homo sapien
aagtgagagccttagcccaggacctggcaccca

SEQ ID NO: 403642 - DNA, 33 bp, Homo sapien
aagtgagagccttagctcaggacctggcaccca

SEQ ID NO: 403643 - DNA, 33 bp, Homo sapien
tgtatatatcttcacaatagccctcattatcag

SEQ ID NO: 403644 - DNA, 33 bp, Homo sapien
tgtatatatcttcacagtagccctcattatcag

SEQ ID NO: 403645 - DNA, 33 bp, Homo sapien
tttgcttacttgggaactgggtctctgatcttt

SEQ ID NO: 403646 - DNA, 33 bp, Homo sapien
tttgcttacttgggaattgggtctctgatcttt

SEQ ID NO: 403647 - DNA, 33 bp, Homo sapien
gtaagcaaactgatgaactcactctttctcctt

SEQ ID NO: 403648 - DNA, 33 bp, Homo sapien
gtaagcaaactgatgagctcactctttctcctt

SEQ ID NO: 403649 - DNA, 33 bp, Homo sapien
attgtaaataacaaaaatgggatctgaaggaag

SEQ ID NO: 403650 - DNA, 33 bp, Homo sapien
attgtaaataacaaaagtgggatctgaaggaag

SEQ ID NO: 403651 - DNA, 33 bp, Homo sapien
caggtctgtcataagacactctactttcttttc

SEQ ID NO: 403652 - DNA, 33 bp, Homo sapien
caggtctgtcataagatactctactttcttttc

SEQ ID NO: 403653 - DNA, 33 bp, Homo sapien
taatagatgccatcataagcaacagttttttct

SEQ ID NO: 403654 - DNA, 33 bp, Homo sapien
taatagatgccatcatgagcaacagttttttct

SEQ ID NO: 403655 - DNA, 33 bp, Homo sapien
tgcagccttagacaaacaattcacctcctcgga

SEQ ID NO: 403656 - DNA, 33 bp, Homo sapien
tgcagccttagacaaataattcacctcctcgga

SEQ ID NO: 403657 - DNA, 33 bp, Homo sapien
aggcatcaggtaatgacgatggaaataacacaa

SEQ ID NO: 403658 - DNA, 33 bp, Homo sapien
aggcatcaggtaatgatgatggaaataacacaa

SEQ ID NO: 403659 - DNA, 33 bp, Homo sapien
gcaaaaatgccaaaaacaatcgcaacaaaagca

SEQ ID NO: 403660 - DNA, 33 bp, Homo sapien
gcaaaaatgccaaaaataatcgcaacaaaagca

SEQ ID NO: 403661 - DNA, 33 bp, Homo sapien
tattctctctaatatgccagcccagttgcaatg

SEQ ID NO: 403662 - DNA, 33 bp, Homo sapien
tattctctctaatatgtcagcccagttgcaatg

SEQ ID NO: 403663 - DNA, 33 bp, Homo sapien
ctagctatgcagctggaaagaagtagggagcac

SEQ ID NO: 403664 - DNA, 33 bp, Homo sapien
ctagctatgcagctgggaagaagtagggagcac

SEQ ID NO: 403665 - DNA, 33 bp, Homo sapien
ttgccctgcctgtggggacacactctttaagct

SEQ ID NO: 403666 - DNA, 33 bp, Homo sapien
ttgccctgcctgtgggtacacactctttaagct

SEQ ID NO: 403667 - DNA, 33 bp, Homo sapien
gctctacctctaacccacatgagcatcttatct

SEQ ID NO: 403668 - DNA, 33 bp, Homo sapien
gctctacctctaacccgcatgagcatcttatct

SEQ ID NO: 403669 - DNA, 33 bp, Homo sapien
tgtgcatgcatttgcaagtgtagaacagagaaa

SEQ ID NO: 403670 - DNA, 33 bp, Homo sapien
tgtgcatgcatttgcacgtgtagaacagagaaa

SEQ ID NO: 403671 - DNA, 33 bp, Homo sapien
ctacattactggtggacggtgcaaggtcagaag

SEQ ID NO: 403672 - DNA, 33 bp, Homo sapien
ctacattactggtggatggtgcaaggtcagaag

SEQ ID NO: 403673 - DNA, 33 bp, Homo sapien
agtctcgtaagtcttcaagcttcacccagatgc

SEQ ID NO: 403674 - DNA, 33 bp, Homo sapien
agtctcgtaagtcttcgagcttcacccagatgc

SEQ ID NO: 403675 - DNA, 33 bp, Homo sapien
tcataccattggctcccactgtgtgcttttctc

SEQ ID NO: 403676 - DNA, 33 bp, Homo sapien
tcataccattggctcctactgtgtgcttttctc

SEQ ID NO: 403677 - DNA, 33 bp, Homo sapien
tctccctccacaaacaactgttggccatgagga

SEQ ID NO: 403678 - DNA, 33 bp, Homo sapien
tctccctccacaaacatctgttggccatgagga

SEQ ID NO: 403679 - DNA, 33 bp, Homo sapien
cagcactgttttgcaggcacttgctgttttatt

SEQ ID NO: 403680 - DNA, 33 bp, Homo sapien
cagcactgttttgcagtcacttgctgttttatt

SEQ ID NO: 403681 - DNA, 33 bp, Homo sapien
cgatactggctttaaaactctactgctttactt

SEQ ID NO: 403682 - DNA, 33 bp, Homo sapien
cgatactggctttaaatctctactgctttactt

SEQ ID NO: 403683 - DNA, 33 bp, Homo sapien
ttcctggtctcaaaaacgagggggctggattag

SEQ ID NO: 403684 - DNA, 33 bp, Homo sapien
ttcctggtctcaaaaatgagggggctggattag

SEQ ID NO: 403685 - DNA, 33 bp, Homo sapien
atgaggctgccttaagccaaatgcactatcttg

SEQ ID NO: 403686 - DNA, 33 bp, Homo sapien
atgaggctgccttaagtcaaatgcactatcttg

SEQ ID NO: 403687 - DNA, 33 bp, Homo sapien
atcgatggccttgcaaagaatcaaaaccagaaa

SEQ ID NO: 403688 - DNA, 33 bp, Homo sapien
atcgatggccttgcaaggaatcaaaaccagaaa

SEQ ID NO: 403689 - DNA, 33 bp, Homo sapien
atagtagatgctcaaaaacagaactgtaattag

SEQ ID NO: 403690 - DNA, 33 bp, Homo sapien
atagtagatgctcaaagacagaactgtaattag

SEQ ID NO: 403691 - DNA, 33 bp, Homo sapien
ggcccatttcccagacagaggggcctgaccgtc

SEQ ID NO: 403692 - DNA, 33 bp, Homo sapien
ggcccatttcccagacggaggggcctgaccgtc

SEQ ID NO: 403693 - DNA, 33 bp, Homo sapien
ctttaagctgtcagacagaggctgccaatatcc

SEQ ID NO: 403694 - DNA, 33 bp, Homo sapien
ctttaagctgtcagacggaggctgccaatatcc

SEQ ID NO: 403695 - DNA, 33 bp, Homo sapien
cacagcctcaacatccaggaggaccaataggtt

SEQ ID NO: 403696 - DNA, 33 bp, Homo sapien
cacagcctcaacatccgggaggaccaataggtt

SEQ ID NO: 403697 - DNA, 33 bp, Homo sapien
gaatgtttgttaaagaaatggataattgaatgg

SEQ ID NO: 403698 - DNA, 33 bp, Homo sapien
gaatgtttgttaaagacatggataattgaatgg

SEQ ID NO: 403699 - DNA, 33 bp, Homo sapien
gacttttgctctcaggaaactcatggtctagct

SEQ ID NO: 403700 - DNA, 33 bp, Homo sapien
gacttttgctctcaggcaactcatggtctagct

SEQ ID NO: 403701 - DNA, 33 bp, Homo sapien
tccaagtgtttggggaccctcttgacagctgga

SEQ ID NO: 403702 - DNA, 33 bp, Homo sapien
tccaagtgtttggggatcctcttgacagctgga

SEQ ID NO: 403703 - DNA, 33 bp, Homo sapien
aagcactctcctagtaaggtaagagaataaact

SEQ ID NO: 403704 - DNA, 33 bp, Homo sapien
aagcactctcctagtatggtaagagaataaact

SEQ ID NO: 403705 - DNA, 33 bp, Homo sapien
tatgtgccaggcacccagaatacagaggaaaaa

SEQ ID NO: 403706 - DNA, 33 bp, Homo sapien
tatgtgccaggcacccggaatacagaggaaaaa

SEQ ID NO: 403707 - DNA, 33 bp, Homo sapien
ttgtccttaagcacaacgtctgatgggctagtc

SEQ ID NO: 403708 - DNA, 33 bp, Homo sapien
ttgtccttaagcacaatgtctgatgggctagtc

SEQ ID NO: 403709 - DNA, 33 bp, Homo sapien
aagtgctcagtaataaataagtgatattggcca

SEQ ID NO: 403710 - DNA, 33 bp, Homo sapien
aagtgctcagtaataagtaagtgatattggcca

SEQ ID NO: 403711 - DNA, 33 bp, Homo sapien
cctgggttcaatttcaacttgccagtcactagc

SEQ ID NO: 403712 - DNA, 33 bp, Homo sapien
cctgggttcaatttcagcttgccagtcactagc

SEQ ID NO: 403713 - DNA, 33 bp, Homo sapien
aatgagatcatgtgtacaatcaagtaaagcact

SEQ ID NO: 403714 - DNA, 33 bp, Homo sapien
aatgagatcatgtgtataatcaagtaaagcact

SEQ ID NO: 403715 - DNA, 33 bp, Homo sapien
cccctttgttcatgggccccaaacaagcagctc

SEQ ID NO: 403716 - DNA, 33 bp, Homo sapien
cccctttgttcatgggtcccaaacaagcagctc

SEQ ID NO: 403717 - DNA, 33 bp, Homo sapien
atgcatggcatatacaagaagctaattaaatat

SEQ ID NO: 403718 - DNA, 33 bp, Homo sapien
atgcatggcatatacaggaagctaattaaatat

SEQ ID NO: 403719 - DNA, 33 bp, Homo sapien
tggaccaacttcagacagagaggaacagaatgt

SEQ ID NO: 403720 - DNA, 33 bp, Homo sapien
tggaccaacttcagacggagaggaacagaatgt

SEQ ID NO: 403721 - DNA, 33 bp, Homo sapien
gttcctgctttgagataaaatcctccttcctct

SEQ ID NO: 403722 - DNA, 33 bp, Homo sapien
gttcctgctttgagatgaaatcctccttcctct

SEQ ID NO: 403723 - DNA, 33 bp, Homo sapien
atccatacccgaaaccactgcatttttgataga

SEQ ID NO: 403724 - DNA, 33 bp, Homo sapien
atccatacccgaaaccgctgcatttttgataga

SEQ ID NO: 403725 - DNA, 33 bp, Homo sapien
acttcttgtttcttggaaagttgctcctggaac

SEQ ID NO: 403726 - DNA, 33 bp, Homo sapien
acttcttgtttcttggcaagttgctcctggaac

SEQ ID NO: 403727 - DNA, 33 bp, Homo sapien
ggaaaagccacatagcaaagagactctagaccc

SEQ ID NO: 403728 - DNA, 33 bp, Homo sapien
ggaaaagccacatagcgaagagactctagaccc

SEQ ID NO: 403729 - DNA, 33 bp, Homo sapien
catggaaagtctctgaaaagatgaaatttgaac

SEQ ID NO: 403730 - DNA, 33 bp, Homo sapien
catggaaagtctctgagaagatgaaatttgaac

SEQ ID NO: 403731 - DNA, 33 bp, Homo sapien
agagaggctgggctgtcaatttcattcagtagt

SEQ ID NO: 403732 - DNA, 33 bp, Homo sapien
agagaggctgggctgttaatttcattcagtagt

SEQ ID NO: 403733 - DNA, 33 bp, Homo sapien
caaggaccacatatcgaactgtatagtgagaag

SEQ ID NO: 403734 - DNA, 33 bp, Homo sapien
caaggaccacatatcgtactgtatagtgagaag

SEQ ID NO: 403735 - DNA, 33 bp, Homo sapien
caggtgacaagattaaccaaaggcacatgaatg

SEQ ID NO: 403736 - DNA, 33 bp, Homo sapien
caggtgacaagattaatcaaaggcacatgaatg

SEQ ID NO: 403737 - DNA, 33 bp, Homo sapien
gcagttaaatctgccacctagagaagcacagat

SEQ ID NO: 403738 - DNA, 33 bp, Homo sapien
gcagttaaatctgccatctagagaagcacagat

SEQ ID NO: 403739 - DNA, 33 bp, Homo sapien
ggatcactcatatgcacggagcctcaacagaaa

SEQ ID NO: 403740 - DNA, 33 bp, Homo sapien
ggatcactcatatgcatggagcctcaacagaaa

SEQ ID NO: 403741 - DNA, 33 bp, Homo sapien
gtacgatgctcagagtaaagaagtgataaccca

SEQ ID NO: 403742 - DNA, 33 bp, Homo sapien
gtacgatgctcagagtgaagaagtgataaccca

SEQ ID NO: 403743 - DNA, 33 bp, Homo sapien
aaattaatttcaagctaagagtgcacaggtttg

SEQ ID NO: 403744 - DNA, 33 bp, Homo sapien
aaattaatttcaagctgagagtgcacaggtttg

SEQ ID NO: 403745 - DNA, 33 bp, Homo sapien
tcctctggcatcagaaagggtggaatctgaacc

SEQ ID NO: 403746 - DNA, 33 bp, Homo sapien
tcctctggcatcagaaggggtggaatctgaacc

SEQ ID NO: 403747 - DNA, 33 bp, Homo sapien
ggagacttatggaaagacactttgatcacagga

SEQ ID NO: 403748 - DNA, 33 bp, Homo sapien
ggagacttatggaaaggcactttgatcacagga

SEQ ID NO: 403749 - DNA, 33 bp, Homo sapien
gattgtcaactaaacacgagaaggttggcctac

SEQ ID NO: 403750 - DNA, 33 bp, Homo sapien
gattgtcaactaaacatgagaaggttggcctac

SEQ ID NO: 403751 - DNA, 33 bp, Homo sapien
ccagcctgcgaatgacaggaatcactgaggaac

SEQ ID NO: 403752 - DNA, 33 bp, Homo sapien
ccagcctgcgaatgacgggaatcactgaggaac

SEQ ID NO: 403753 - DNA, 33 bp, Homo sapien
gcacggatacgtggaaatatttcagagggaggg

SEQ ID NO: 403754 - DNA, 33 bp, Homo sapien
gcacggatacgtggaagtatttcagagggaggg

SEQ ID NO: 403755 - DNA, 33 bp, Homo sapien
agctaaggctgagacacctggtgcccggatctc

SEQ ID NO: 403756 - DNA, 33 bp, Homo sapien
agctaaggctgagacatctggtgcccggatctc

SEQ ID NO: 403757 - DNA, 33 bp, Homo sapien
gaaatgatgggctcaagtcccactcttaggaag

SEQ ID NO: 403758 - DNA, 33 bp, Homo sapien
gaaatgatgggctcaattcccactcttaggaag

SEQ ID NO: 403759 - DNA, 33 bp, Homo sapien
gctaggtgttccaaaacaaggcagccagcatgg

SEQ ID NO: 403760 - DNA, 33 bp, Homo sapien
gctaggtgttccaaaataaggcagccagcatgg

SEQ ID NO: 403761 - DNA, 33 bp, Homo sapien
attcagctgttcaccaatgcaagatgcaatggg

SEQ ID NO: 403762 - DNA, 33 bp, Homo sapien
attcagctgttcaccagtgcaagatgcaatggg

SEQ ID NO: 403763 - DNA, 33 bp, Homo sapien
tatccgtttattatgaagctaatgaagtctgac

SEQ ID NO: 403764 - DNA, 33 bp, Homo sapien
tatccgtttattatgatgctaatgaagtctgac

SEQ ID NO: 403765 - DNA, 33 bp, Homo sapien
tctgggcattcttatcccccttgtacagatgag

SEQ ID NO: 403766 - DNA, 33 bp, Homo sapien
tctgggcattcttatctcccttgtacagatgag

SEQ ID NO: 403767 - DNA, 33 bp, Homo sapien
ctccaccctgctttccaccgtctagagtcaaga

SEQ ID NO: 403768 - DNA, 33 bp, Homo sapien
ctccaccctgctttccgccgtctagagtcaaga

SEQ ID NO: 403769 - DNA, 33 bp, Homo sapien
tatgcaactgtgatataaattgggaaaaggaac

SEQ ID NO: 403770 - DNA, 33 bp, Homo sapien
tatgcaactgtgatatgaattgggaaaaggaac

SEQ ID NO: 403771 - DNA, 33 bp, Homo sapien
cagagctgggaacagaatccaggtcacctgact

SEQ ID NO: 403772 - DNA, 33 bp, Homo sapien
cagagctgggaacagagtccaggtcacctgact

SEQ ID NO: 403773 - DNA, 33 bp, Homo sapien
tactcatttaaaagaacagtctagtagtgtaat

SEQ ID NO: 403774 - DNA, 33 bp, Homo sapien
tactcatttaaaagaagagtctagtagtgtaat

SEQ ID NO: 403775 - DNA, 33 bp, Homo sapien
gttgttgattgaaacagcattacgtggaggatg

SEQ ID NO: 403776 - DNA, 33 bp, Homo sapien
gttgttgattgaaacatcattacgtggaggatg

SEQ ID NO: 403777 - DNA, 33 bp, Homo sapien
gcctgactgatgagcaataaccatcactgattc

SEQ ID NO: 403778 - DNA, 33 bp, Homo sapien
gcctgactgatgagcagtaaccatcactgattc

SEQ ID NO: 403779 - DNA, 33 bp, Homo sapien
ttgcctacagtatgcaacatggtaatatgctgc

SEQ ID NO: 403780 - DNA, 33 bp, Homo sapien
ttgcctacagtatgcagcatggtaatatgctgc

SEQ ID NO: 403781 - DNA, 33 bp, Homo sapien
acattcggagagcacaaccatctgtggctaaag

SEQ ID NO: 403782 - DNA, 33 bp, Homo sapien
acattcggagagcacagccatctgtggctaaag

SEQ ID NO: 403783 - DNA, 33 bp, Homo sapien
tagaactgagttcttacctactgattcaaggct

SEQ ID NO: 403784 - DNA, 33 bp, Homo sapien
tagaactgagttcttatctactgattcaaggct

SEQ ID NO: 403785 - DNA, 33 bp, Homo sapien
taataactctcatcaccctcgttactgtcatca

SEQ ID NO: 403786 - DNA, 33 bp, Homo sapien
taataactctcatcactctcgttactgtcatca

SEQ ID NO: 403787 - DNA, 33 bp, Homo sapien
tagctatttatacctgaaacacttcatgttttc

SEQ ID NO: 403788 - DNA, 33 bp, Homo sapien
tagctatttatacctggaacacttcatgttttc

SEQ ID NO: 403789 - DNA, 33 bp, Homo sapien
accctcttacatcccacagtggtcttgctgcag

SEQ ID NO: 403790 - DNA, 33 bp, Homo sapien
accctcttacatcccatagtggtcttgctgcag

SEQ ID NO: 403791 - DNA, 33 bp, Homo sapien
ttggacttgagccatgaaggctgggctccgctg

SEQ ID NO: 403792 - DNA, 33 bp, Homo sapien
ttggacttgagccatgcaggctgggctccgctg

SEQ ID NO: 403793 - DNA, 33 bp, Homo sapien
ccttcaagaagctttcccatatcctgcagcact

SEQ ID NO: 403794 - DNA, 33 bp, Homo sapien
ccttcaagaagctttctcatatcctgcagcact

SEQ ID NO: 403795 - DNA, 33 bp, Homo sapien
atggtccatttaagacggctgctccaaagtaat

SEQ ID NO: 403796 - DNA, 33 bp, Homo sapien
atggtccatttaagactgctgctccaaagtaat

SEQ ID NO: 403797 - DNA, 33 bp, Homo sapien
tctccataagatgagcaaagtgcatgatgccaa

SEQ ID NO: 403798 - DNA, 33 bp, Homo sapien
tctccataagatgagcgaagtgcatgatgccaa

SEQ ID NO: 403799 - DNA, 33 bp, Homo sapien
aactccgacagcaagaggtaagaagaggggaag

SEQ ID NO: 403800 - DNA, 33 bp, Homo sapien
aactccgacagcaagatgtaagaagaggggaag

SEQ ID NO: 403801 - DNA, 33 bp, Homo sapien
acttgaagacccaccacgattctctgacatgac

SEQ ID NO: 403802 - DNA, 33 bp, Homo sapien
acttgaagacccaccatgattctctgacatgac

SEQ ID NO: 403803 - DNA, 33 bp, Homo sapien
tcagtttccgcatccacataatgggaatcatga

SEQ ID NO: 403804 - DNA, 33 bp, Homo sapien
tcagtttccgcatccatataatgggaatcatga

SEQ ID NO: 403805 - DNA, 33 bp, Homo sapien
tttcccacacagggacaatattatcagtagcag

SEQ ID NO: 403806 - DNA, 33 bp, Homo sapien
tttcccacacagggactatattatcagtagcag

SEQ ID NO: 403807 - DNA, 33 bp, Homo sapien
acagcacttgcctctcaccctatgcaccagccc

SEQ ID NO: 403808 - DNA, 33 bp, Homo sapien
acagcacttgcctctcgccctatgcaccagccc

SEQ ID NO: 403809 - DNA, 33 bp, Homo sapien
ctcccctggccatgtccctgcttctaatcaaga

SEQ ID NO: 403810 - DNA, 33 bp, Homo sapien
ctcccctggccatgtctctgcttctaatcaaga

SEQ ID NO: 403811 - DNA, 33 bp, Homo sapien
attaggagcagggatgcatttagcctgactgga

SEQ ID NO: 403812 - DNA, 33 bp, Homo sapien
attaggagcagggatgtatttagcctgactgga

SEQ ID NO: 403813 - DNA, 33 bp, Homo sapien
tgatggtgatgcttgaacccgctttgcagacaa

SEQ ID NO: 403814 - DNA, 33 bp, Homo sapien
tgatggtgatgcttgagcccgctttgcagacaa

SEQ ID NO: 403815 - DNA, 33 bp, Homo sapien
ataaggttgtgaacacacagtgggaccatgtaa

SEQ ID NO: 403816 - DNA, 33 bp, Homo sapien
ataaggttgtgaacactcagtgggaccatgtaa

SEQ ID NO: 403817 - DNA, 33 bp, Homo sapien
ccctacccagctcatgaaaacaagatcctcctt

SEQ ID NO: 403818 - DNA, 33 bp, Homo sapien
ccctacccagctcatggaaacaagatcctcctt

SEQ ID NO: 403819 - DNA, 33 bp, Homo sapien
atgtagtggaaaggaaagggtctaaccctgaag

SEQ ID NO: 403820 - DNA, 33 bp, Homo sapien
atgtagtggaaaggaaggggtctaaccctgaag

SEQ ID NO: 403821 - DNA, 33 bp, Homo sapien
taactacacacaatgtaacagtgcaacaagaat

SEQ ID NO: 403822 - DNA, 33 bp, Homo sapien
taactacacacaatgtgacagtgcaacaagaat

SEQ ID NO: 403823 - DNA, 33 bp, Homo sapien
ttcaaatacttgctgaacatccacctcatgaaa

SEQ ID NO: 403824 - DNA, 33 bp, Homo sapien
ttcaaatacttgctgagcatccacctcatgaaa

SEQ ID NO: 403825 - DNA, 33 bp, Homo sapien
tggccctgtacttcaacatgaccacactttaga

SEQ ID NO: 403826 - DNA, 33 bp, Homo sapien
tggccctgtacttcaatatgaccacactttaga

SEQ ID NO: 403827 - DNA, 33 bp, Homo sapien
ttctctgcacaatcagacaaaaaaaaaatactt

SEQ ID NO: 403828 - DNA, 33 bp, Homo sapien
ttctctgcacaatcaggcaaaaaaaaaatactt

SEQ ID NO: 403829 - DNA, 33 bp, Homo sapien
ctgaaatttttccacaagtgataaaagaaatgt

SEQ ID NO: 403830 - DNA, 33 bp, Homo sapien
ctgaaatttttccacaggtgataaaagaaatgt

SEQ ID NO: 403831 - DNA, 33 bp, Homo sapien
acagaacttcaccaaacggacttctcaaagatc

SEQ ID NO: 403832 - DNA, 33 bp, Homo sapien
acagaacttcaccaaatggacttctcaaagatc

SEQ ID NO: 403833 - DNA, 33 bp, Homo sapien
atgcttctggccatccccaggattgatacctga

SEQ ID NO: 403834 - DNA, 33 bp, Homo sapien
atgcttctggccatccgcaggattgatacctga

SEQ ID NO: 403835 - DNA, 33 bp, Homo sapien
tatggattctctcaaacaccaagaaaagaaatg

SEQ ID NO: 403836 - DNA, 33 bp, Homo sapien
tatggattctctcaaagaccaagaaaagaaatg

SEQ ID NO: 403837 - DNA, 33 bp, Homo sapien
tgttactacatctagcacattatattgcaattt

SEQ ID NO: 403838 - DNA, 33 bp, Homo sapien
tgttactacatctagcgcattatattgcaattt

SEQ ID NO: 403839 - DNA, 33 bp, Homo sapien
aagtgaatttgacacaatcccttccctcaaaga

SEQ ID NO: 403840 - DNA, 33 bp, Homo sapien
aagtgaatttgacacagtcccttccctcaaaga

SEQ ID NO: 403841 - DNA, 33 bp, Homo sapien
atatttgttgaatttacagagttgaatgtgtca

SEQ ID NO: 403842 - DNA, 33 bp, Homo sapien
atatttgttgaatttagagagttgaatgtgtca

SEQ ID NO: 403843 - DNA, 33 bp, Homo sapien
gcttattgccttttccagaagtagggagcagca

SEQ ID NO: 403844 - DNA, 33 bp, Homo sapien
gcttattgccttttccggaagtagggagcagca

SEQ ID NO: 403845 - DNA, 33 bp, Homo sapien
gactgatttatggggtaaaactcctgctgctcc

SEQ ID NO: 403846 - DNA, 33 bp, Homo sapien
gactgatttatggggtgaaactcctgctgctcc

SEQ ID NO: 403847 - DNA, 33 bp, Homo sapien
gaaatccaagaaggcaaaacccacttgaacttc

SEQ ID NO: 403848 - DNA, 33 bp, Homo sapien
gaaatccaagaaggcagaacccacttgaacttc

SEQ ID NO: 403849 - DNA, 33 bp, Homo sapien
gcagaggctgaagcaacacctttgtcatttcct

SEQ ID NO: 403850 - DNA, 33 bp, Homo sapien
gcagaggctgaagcaatacctttgtcatttcct

SEQ ID NO: 403851 - DNA, 33 bp, Homo sapien
gtgactttagctcccccataatttcatcagcct

SEQ ID NO: 403852 - DNA, 33 bp, Homo sapien
gtgactttagctccccgataatttcatcagcct

SEQ ID NO: 403853 - DNA, 33 bp, Homo sapien
aagaaggctcccactacgtatactccctcaacc

SEQ ID NO: 403854 - DNA, 33 bp, Homo sapien
aagaaggctcccactaggtatactccctcaacc

SEQ ID NO: 403855 - DNA, 33 bp, Homo sapien
taacatacacatgcacaagtttattatttggaa

SEQ ID NO: 403856 - DNA, 33 bp, Homo sapien
taacatacacatgcacgagtttattatttggaa

SEQ ID NO: 403857 - DNA, 33 bp, Homo sapien
attctccaaacgacatcagggtgccttatcaga

SEQ ID NO: 403858 - DNA, 33 bp, Homo sapien
attctccaaacgacatgagggtgccttatcaga

SEQ ID NO: 403859 - DNA, 33 bp, Homo sapien
agccccttctccactaaagctgtgccctgccat

SEQ ID NO: 403860 - DNA, 33 bp, Homo sapien
agccccttctccactagagctgtgccctgccat

SEQ ID NO: 403861 - DNA, 33 bp, Homo sapien
tatacacacacatagacacgcccttgcagaatt

SEQ ID NO: 403862 - DNA, 33 bp, Homo sapien
tatacacacacatagagacgcccttgcagaatt

SEQ ID NO: 403863 - DNA, 33 bp, Homo sapien
gcattctaacatttgagaatccagtaagttaga

SEQ ID NO: 403864 - DNA, 33 bp, Homo sapien
gcattctaacatttgataatccagtaagttaga

SEQ ID NO: 403865 - DNA, 33 bp, Homo sapien
gacccgaatgaagggacgcaggaccagcaggac

SEQ ID NO: 403866 - DNA, 33 bp, Homo sapien
gacccgaatgaagggatgcaggaccagcaggac

SEQ ID NO: 403867 - DNA, 33 bp, Homo sapien
agatgagaaagtcaagactcaagaaactgaatt

SEQ ID NO: 403868 - DNA, 33 bp, Homo sapien
agatgagaaagtcaagtctcaagaaactgaatt

SEQ ID NO: 403869 - DNA, 33 bp, Homo sapien
tacccaatgtcacagcaagttatggagtcagcc

SEQ ID NO: 403870 - DNA, 33 bp, Homo sapien
tacccaatgtcacagcgagttatggagtcagcc

SEQ ID NO: 403871 - DNA, 33 bp, Homo sapien
atgtcaacagtgttgacagtaagaaatcttggt

SEQ ID NO: 403872 - DNA, 33 bp, Homo sapien
atgtcaacagtgttgatagtaagaaatcttggt

SEQ ID NO: 403873 - DNA, 33 bp, Homo sapien
taagcactgacagtcaacatatatggagtaagg

SEQ ID NO: 403874 - DNA, 33 bp, Homo sapien
taagcactgacagtcagcatatatggagtaagg

SEQ ID NO: 403875 - DNA, 33 bp, Homo sapien
ctatgtggtagtgaaccgtgctattggcttgaa

SEQ ID NO: 403876 - DNA, 33 bp, Homo sapien
ctatgtggtagtgaactgtgctattggcttgaa

SEQ ID NO: 403877 - DNA, 33 bp, Homo sapien
tagttagccttgattcaactggcacaaaggcct

SEQ ID NO: 403878 - DNA, 33 bp, Homo sapien
tagttagccttgattcgactggcacaaaggcct

SEQ ID NO: 403879 - DNA, 33 bp, Homo sapien
tgttccttcaacatgcactaagtagctatgtta

SEQ ID NO: 403880 - DNA, 33 bp, Homo sapien
tgttccttcaacatgccctaagtagctatgtta

SEQ ID NO: 403881 - DNA, 33 bp, Homo sapien
gtaaggctcaaaactcactagtcaaccatcttc

SEQ ID NO: 403882 - DNA, 33 bp, Homo sapien
gtaaggctcaaaactctctagtcaaccatcttc

SEQ ID NO: 403883 - DNA, 33 bp, Homo sapien
tccaggatgtggtatgaattgaaccaatggttc

SEQ ID NO: 403884 - DNA, 33 bp, Homo sapien
tccaggatgtggtatgcattgaaccaatggttc

SEQ ID NO: 403885 - DNA, 33 bp, Homo sapien
tataagaatggaattcaagaagttggacttggg

SEQ ID NO: 403886 - DNA, 33 bp, Homo sapien
tataagaatggaattcgagaagttggacttggg

SEQ ID NO: 403887 - DNA, 33 bp, Homo sapien
atgcctggaagtgtccacaatagctgtgctgaa

SEQ ID NO: 403888 - DNA, 33 bp, Homo sapien
atgcctggaagtgtccgcaatagctgtgctgaa

SEQ ID NO: 403889 - DNA, 33 bp, Homo sapien
tcttgtttcatgtagaactcagcaaatttcact

SEQ ID NO: 403890 - DNA, 33 bp, Homo sapien
tcttgtttcatgtagatctcagcaaatttcact

SEQ ID NO: 403891 - DNA, 33 bp, Homo sapien
agttgatggcagggtcaacctctggggcctgac

SEQ ID NO: 403892 - DNA, 33 bp, Homo sapien
agttgatggcagggtctacctctggggcctgac

SEQ ID NO: 403893 - DNA, 33 bp, Homo sapien
aatttgccaggacctcagaaagatagtgctatg

SEQ ID NO: 403894 - DNA, 33 bp, Homo sapien
aatttgccaggacctcggaaagatagtgctatg

SEQ ID NO: 403895 - DNA, 33 bp, Homo sapien
ccaggatcacacagaacaagcccaatctctccc

SEQ ID NO: 403896 - DNA, 33 bp, Homo sapien
ccaggatcacacagaagaagcccaatctctccc

SEQ ID NO: 403897 - DNA, 33 bp, Homo sapien
gggaatttccctccaacgtagcagtgacctcca

SEQ ID NO: 403898 - DNA, 33 bp, Homo sapien
gggaatttccctccaatgtagcagtgacctcca

SEQ ID NO: 403899 - DNA, 33 bp, Homo sapien
attcccatcagtatatcagaagcagattggggt

SEQ ID NO: 403900 - DNA, 33 bp, Homo sapien
attcccatcagtatatgagaagcagattggggt

SEQ ID NO: 403901 - DNA, 33 bp, Homo sapien
ttttcaacattagtgaagttccatgaggtggca

SEQ ID NO: 403902 - DNA, 33 bp, Homo sapien
ttttcaacattagtgaggttccatgaggtggca

SEQ ID NO: 403903 - DNA, 33 bp, Homo sapien
gtgtcacctagttccacaaaatagaggcaatgg

SEQ ID NO: 403904 - DNA, 33 bp, Homo sapien
gtgtcacctagttccagaaaatagaggcaatgg

SEQ ID NO: 403905 - DNA, 33 bp, Homo sapien
ttccctgtccaatatcaactccacatccagcac

SEQ ID NO: 403906 - DNA, 33 bp, Homo sapien
ttccctgtccaatatcgactccacatccagcac

SEQ ID NO: 403907 - DNA, 33 bp, Homo sapien
ctgttgtttgcttgtgaaaacagtcaacctgat

SEQ ID NO: 403908 - DNA, 33 bp, Homo sapien
ctgttgtttgcttgtggaaacagtcaacctgat

SEQ ID NO: 403909 - DNA, 33 bp, Homo sapien
tgcctgccacatagtaagtgctcactaaagaag

SEQ ID NO: 403910 - DNA, 33 bp, Homo sapien
tgcctgccacatagtaggtgctcactaaagaag

SEQ ID NO: 403911 - DNA, 33 bp, Homo sapien
agacccacttgcttccacttttgtggtcttgag

SEQ ID NO: 403912 - DNA, 33 bp, Homo sapien
agacccacttgcttccgcttttgtggtcttgag

SEQ ID NO: 403913 - DNA, 33 bp, Homo sapien
taaaccttgacctagaaggtctcctggctcact

SEQ ID NO: 403914 - DNA, 33 bp, Homo sapien
taaaccttgacctagatggtctcctggctcact

SEQ ID NO: 403915 - DNA, 33 bp, Homo sapien
gtttgttttaaagctacgtcaggcttagcagag

SEQ ID NO: 403916 - DNA, 33 bp, Homo sapien
gtttgttttaaagctatgtcaggcttagcagag

SEQ ID NO: 403917 - DNA, 33 bp, Homo sapien
cccatgtacaatcaaaagcagaggcatccttga

SEQ ID NO: 403918 - DNA, 33 bp, Homo sapien
cccatgtacaatcaaacgcagaggcatccttga

SEQ ID NO: 403919 - DNA, 33 bp, Homo sapien
aagagatatctctgaccgctctatttctgtcat

SEQ ID NO: 403920 - DNA, 33 bp, Homo sapien
aagagatatctctgacggctctatttctgtcat

SEQ ID NO: 403921 - DNA, 33 bp, Homo sapien
aatgaatacatgtattaaacttgcaaaggatat

SEQ ID NO: 403922 - DNA, 33 bp, Homo sapien
aatgaatacatgtattgaacttgcaaaggatat

SEQ ID NO: 403923 - DNA, 33 bp, Homo sapien
ccagttcagcgcctcagtccgtcaagaggaaag

SEQ ID NO: 403924 - DNA, 33 bp, Homo sapien
ccagttcagcgcctcattccgtcaagaggaaag

SEQ ID NO: 403925 - DNA, 33 bp, Homo sapien
aaaggccagcgtcttacatagtccatgatgact

SEQ ID NO: 403926 - DNA, 33 bp, Homo sapien
aaaggccagcgtcttatatagtccatgatgact

SEQ ID NO: 403927 - DNA, 33 bp, Homo sapien
taattctaagccttccacttggtttttgtttgt

SEQ ID NO: 403928 - DNA, 33 bp, Homo sapien
taattctaagccttccgcttggtttttgtttgt

SEQ ID NO: 403929 - DNA, 33 bp, Homo sapien
tatatatcgctgcccacgctcctatagtaccct

SEQ ID NO: 403930 - DNA, 33 bp, Homo sapien
tatatatcgctgcccatgctcctatagtaccct

SEQ ID NO: 403931 - DNA, 33 bp, Homo sapien
ggacttttgagtcccaatcaggatttgaatccc

SEQ ID NO: 403932 - DNA, 33 bp, Homo sapien
ggacttttgagtcccagtcaggatttgaatccc

SEQ ID NO: 403933 - DNA, 33 bp, Homo sapien
actcactgaacgtatgccacacttcaactgtaa

SEQ ID NO: 403934 - DNA, 33 bp, Homo sapien
actcactgaacgtatgtcacacttcaactgtaa

SEQ ID NO: 403935 - DNA, 33 bp, Homo sapien
ggccctgaggttgttacaggcagaaaggggaaa

SEQ ID NO: 403936 - DNA, 33 bp, Homo sapien
ggccctgaggttgttagaggcagaaaggggaaa

SEQ ID NO: 403937 - DNA, 33 bp, Homo sapien
aacacgtgaacctgcactaaagctccacaatga

SEQ ID NO: 403938 - DNA, 33 bp, Homo sapien
aacacgtgaacctgcattaaagctccacaatga

SEQ ID NO: 403939 - DNA, 33 bp, Homo sapien
ggaaggaagggccacaatgataaaactgctact

SEQ ID NO: 403940 - DNA, 33 bp, Homo sapien
ggaaggaagggccacagtgataaaactgctact

SEQ ID NO: 403941 - DNA, 33 bp, Homo sapien
gcctgagtccagtccaatagtatggtaaaggag

SEQ ID NO: 403942 - DNA, 33 bp, Homo sapien
gcctgagtccagtccagtagtatggtaaaggag

SEQ ID NO: 403943 - DNA, 33 bp, Homo sapien
tggcaaagcgtgtcagcctgaatacaagttccg

SEQ ID NO: 403944 - DNA, 33 bp, Homo sapien
tggcaaagcgtgtcaggctgaatacaagttccg

SEQ ID NO: 403945 - DNA, 33 bp, Homo sapien
taatgctggaccagtcaaatgcaccaaatatcc

SEQ ID NO: 403946 - DNA, 33 bp, Homo sapien
taatgctggaccagtcgaatgcaccaaatatcc

SEQ ID NO: 403947 - DNA, 33 bp, Homo sapien; identical to SEQ ID NO: 403945

SEQ ID NO: 403948 - DNA, 33 bp, Homo sapien; identical to SEQ ID NO: 403946

SEQ ID NO: 403949 - DNA, 33 bp, Homo sapien
ggcatgatggtacaaacacagtctcttactgcc

SEQ ID NO: 403950 - DNA, 33 bp, Homo sapien
ggcatgatggtacaaatacagtctcttactgcc

SEQ ID NO: 403951 - DNA, 33 bp, Homo sapien
tgactgactcttcacccgattacagactgaggc

SEQ ID NO: 403952 - DNA, 33 bp, Homo sapien
tgactgactcttcacctgattacagactgaggc

SEQ ID NO: 403953 - DNA, 33 bp, Homo sapien
acgttgttgatgaagacattgatttggatccat

SEQ ID NO: 403954 - DNA, 33 bp, Homo sapien
acgttgttgatgaagatattgatttggatccat

SEQ ID NO: 403955 - DNA, 33 bp, Homo sapien
ggatgaaactattctacccagatcatcaggcat

SEQ ID NO: 403956 - DNA, 33 bp, Homo sapien
ggatgaaactattctatccagatcatcaggcat

SEQ ID NO: 403957 - DNA, 33 bp, Homo sapien
ctctgaatgctgattacgtagatatgttgactt

SEQ ID NO: 403958 - DNA, 33 bp, Homo sapien
ctctgaatgctgattatgtagatatgttgactt

SEQ ID NO: 403959 - DNA, 33 bp, Homo sapien
cctgctacattgaaaacataattgaaaggatta

SEQ ID NO: 403960 - DNA, 33 bp, Homo sapien
cctgctacattgaaaagataattgaaaggatta

SEQ ID NO: 403961 - DNA, 33 bp, Homo sapien
atactgaccatttgcaaccctattgtttctaaa

SEQ ID NO: 403962 - DNA, 33 bp, Homo sapien
atactgaccatttgcatccctattgtttctaaa

SEQ ID NO: 403963 - DNA, 33 bp, Homo sapien
gatgtgtttatcattcagaaaggactaattaac

SEQ ID NO: 403964 - DNA, 33 bp, Homo sapien
gatgtgtttatcattcggaaaggactaattaac

SEQ ID NO: 403965 - DNA, 33 bp, Homo sapien
ctcttatttaaagttcacaaatacagaacaggt

SEQ ID NO: 403966 - DNA, 33 bp, Homo sapien
ctcttatttaaagttcgcaaatacagaacaggt

SEQ ID NO: 403967 - DNA, 33 bp, Homo sapien
ggcctttggacaagcactgcttaacacttttgg

SEQ ID NO: 403968 - DNA, 33 bp, Homo sapien
ggcctttggacaagcattgcttaacacttttgg

SEQ ID NO: 403969 - DNA, 33 bp, Homo sapien
tcacagaatccatgcccgaatttgctgtataca

SEQ ID NO: 403970 - DNA, 33 bp, Homo sapien
tcacagaatccatgcctgaatttgctgtataca

SEQ ID NO: 403971 - DNA, 33 bp, Homo sapien; identical to SEQ ID NO: 403969

SEQ ID NO: 403972 - DNA, 33 bp, Homo sapien; identical to SEQ ID NO: 403970

SEQ ID NO: 403973 - DNA, 33 bp, Homo sapien
cattgggtgcacactacgggtgctaatttttgt

SEQ ID NO: 403974 - DNA, 33 bp, Homo sapien
cattgggtgcacactatgggtgctaatttttgt

SEQ ID NO: 403975 - DNA, 33 bp, Homo sapien
gcaggaaagagggatacgactgattagtgatgt

SEQ ID NO: 403976 - DNA, 33 bp, Homo sapien
gcaggaaagagggatatgactgattagtgatgt

SEQ ID NO: 403977 - DNA, 33 bp, Homo sapien
gggatgctactcacaccgattcttccaggaaac

SEQ ID NO: 403978 - DNA, 33 bp, Homo sapien
gggatgctactcacactgattcttccaggaaac

SEQ ID NO: 403979 - DNA, 33 bp, Homo sapien
ctgtaccaatgcctgaccacatgcgtacctttc

SEQ ID NO: 403980 - DNA, 33 bp, Homo sapien
ctgtaccaatgcctgatcacatgcgtacctttc

SEQ ID NO: 403981 - DNA, 33 bp, Homo sapien
ccaagaatgcagaaaacgaggacctggcgctcg

SEQ ID NO: 403982 - DNA, 33 bp, Homo sapien
ccaagaatgcagaaaatgaggacctggcgctcg

SEQ ID NO: 403983 - DNA, 33 bp, Homo sapien
tcatctttgagcacacagtcaacaattccacag

SEQ ID NO: 403984 - DNA, 33 bp, Homo sapien
tcatctttgagcacaccgtcaacaattccacag

SEQ ID NO: 403985 - DNA, 33 bp, Homo sapien
cagaggcattagattcccataggcacgtgaacc

SEQ ID NO: 403986 - DNA, 33 bp, Homo sapien
cagaggcattagattctcataggcacgtgaacc

SEQ ID NO: 403987 - DNA, 33 bp, Homo sapien
tggacctgcccggccacgcggatgaggtagggc

SEQ ID NO: 403988 - DNA, 33 bp, Homo sapien
tggacctgcccggccatgcggatgaggtagggc

SEQ ID NO: 403989 - DNA, 33 bp, Homo sapien
gtggaggaaatcatcagcatgaagacaccattc

SEQ ID NO: 403990 - DNA, 33 bp, Homo sapien
gtggaggaaatcatcatcatgaagacaccattc

SEQ ID NO: 403991 - DNA, 33 bp, Homo sapien
aactatgtattcaccactgcagaggggtctctc

SEQ ID NO: 403992 - DNA, 33 bp, Homo sapien
aactatgtattcaccattgcagaggggtctctc

SEQ ID NO: 403993 - DNA, 33 bp, Homo sapien
ttcctgcccactggtagatcttaaaaggcaaat

SEQ ID NO: 403994 - DNA, 33 bp, Homo sapien
ttcctgcccactggtatatcttaaaaggcaaat

SEQ ID NO: 403995 - DNA, 33 bp, Homo sapien
agagtcctctgagatcaactagtcctgattttg

SEQ ID NO: 403996 - DNA, 33 bp, Homo sapien
agagtcctctgagatcgactagtcctgattttg

SEQ ID NO: 403997 - DNA, 33 bp, Homo sapien
ggtagacagtggcaagcctaagattcctgctgg

SEQ ID NO: 403998 - DNA, 33 bp, Homo sapien
ggtagacagtggcaagtctaagattcctgctgg

SEQ ID NO: 403999 - DNA, 33 bp, Homo sapien
cgcgatcacttccgcaagatctgtgaggaatat

SEQ ID NO: 404000 - DNA, 33 bp, Homo sapien
cgcgatcacttccgcaggatctgtgaggaatat

SEQ ID NO: 404001 - DNA, 33 bp, Homo sapien
gtgtgccgggcatcacactaggcctttttgtgt

SEQ ID NO: 404002 - DNA, 33 bp, Homo sapien
gtgtgccgggcatcacgctaggcctttttgtgt

SEQ ID NO: 404003 - DNA, 33 bp, Homo sapien
aatccaaaagactaaacgatgcgtatattgttt

SEQ ID NO: 404004 - DNA, 33 bp, Homo sapien
aatccaaaagactaaatgatgcgtatattgttt

SEQ ID NO: 404005 - DNA, 33 bp, Homo sapien
aagccaaaaaatgctacaaggcccttctttttc

SEQ ID NO: 404006 - DNA, 33 bp, Homo sapien
aagccaaaaaatgctataaggcccttctttttc

SEQ ID NO: 404007 - DNA, 33 bp, Homo sapien
tggggctttcaatccaaaccctgggctagatga

SEQ ID NO: 404008 - DNA, 33 bp, Homo sapien
tggggctttcaatccagaccctgggctagatga

SEQ ID NO: 404009 - DNA, 33 bp, Homo sapien
tgggatgagtcaccgaaggtcaaaggaagcagt

SEQ ID NO: 404010 - DNA, 33 bp, Homo sapien
tgggatgagtcaccgagggtcaaaggaagcagt

SEQ ID NO: 404011 - DNA, 33 bp, Homo sapien
caatcaatcaacaatcaataatcaattagactc

SEQ ID NO: 404012 - DNA, 33 bp, Homo sapien
caatcaatcaacaatcgataatcaattagactc

SEQ ID NO: 404013 - DNA, 33 bp, Homo sapien
actttctgtacaacacaagaagccttgaaaata

SEQ ID NO: 404014 - DNA, 33 bp, Homo sapien
actttctgtacaacacgagaagccttgaaaata

SEQ ID NO: 404015 - DNA, 33 bp, Homo sapien
gttgtgctgttctgataacattgaaatgaatgc

SEQ ID NO: 404016 - DNA, 33 bp, Homo sapien
gttgtgctgttctgatgacattgaaatgaatgc

SEQ ID NO: 404017 - DNA, 33 bp, Homo sapien
aaagaagtccagagacaccggacacagtggtac

SEQ ID NO: 404018 - DNA, 33 bp, Homo sapien
aaagaagtccagagacgccggacacagtggtac

SEQ ID NO: 404019 - DNA, 33 bp, Homo sapien
atttcttcatacttgacgttgtacaagtgcaat

SEQ ID NO: 404020 - DNA, 33 bp, Homo sapien
atttcttcatacttgatgttgtacaagtgcaat

SEQ ID NO: 404021 - DNA, 33 bp, Homo sapien
tctgtattgcttacaactgaagaaagtgaggtt

SEQ ID NO: 404022 - DNA, 33 bp, Homo sapien
tctgtattgcttacaattgaagaaagtgaggtt

SEQ ID NO: 404023 - DNA, 33 bp, Homo sapien
tatcttaagccaaaatcaccacatctccccaac

SEQ ID NO: 404024 - DNA, 33 bp, Homo sapien
tatcttaagccaaaattaccacatctccccaac

SEQ ID NO: 404025 - DNA, 33 bp, Homo sapien
cagtgagcagttccaactgtagcccttgatgtt

SEQ ID NO: 404026 - DNA, 33 bp, Homo sapien
cagtgagcagttccaattgtagcccttgatgtt

SEQ ID NO: 404027 - DNA, 33 bp, Homo sapien
agggtattttaaagcaaatcctaagcaacatat

SEQ ID NO: 404028 - DNA, 33 bp, Homo sapien
agggtattttaaagcacatcctaagcaacatat

SEQ ID NO: 404029 - DNA, 33 bp, Homo sapien
tagtcattcttcaggaccttgccaatttcttca

SEQ ID NO: 404030 - DNA, 33 bp, Homo sapien
tagtcattcttcaggatcttgccaatttcttca

SEQ ID NO: 404031 - DNA, 33 bp, Homo sapien
gcttccaacttccctacgacaacacccttgaat

SEQ ID NO: 404032 - DNA, 33 bp, Homo sapien
gcttccaacttccctatgacaacacccttgaat

SEQ ID NO: 404033 - DNA, 33 bp, Homo sapien
gtttctcctagatgaggagggtatttagactta

SEQ ID NO: 404034 - DNA, 33 bp, Homo sapien
gtttctcctagatgagtagggtatttagactta

SEQ ID NO: 404035 - DNA, 33 bp, Homo sapien
tgtaaggggctaaaaaatccactcacataggac

SEQ ID NO: 404036 - DNA, 33 bp, Homo sapien
tgtaaggggctaaaaattccactcacataggac

SEQ ID NO: 404037 - DNA, 33 bp, Homo sapien
tcagtgggaaatgtaaatatgggggagctcagg

SEQ ID NO: 404038 - DNA, 33 bp, Homo sapien
tcagtgggaaatgtaactatgggggagctcagg

SEQ ID NO: 404039 - DNA, 33 bp, Homo sapien
agtcagacaattgcaaatcagagagtaaatctc

SEQ ID NO: 404040 - DNA, 33 bp, Homo sapien
agtcagacaattgcaactcagagagtaaatctc

SEQ ID NO: 404041 - DNA, 33 bp, Homo sapien
gttctcaatccccagcacctagaaaagtatgtg

SEQ ID NO: 404042 - DNA, 33 bp, Homo sapien
gttctcaatccccagcgcctagaaaagtatgtg

SEQ ID NO: 404043 - DNA, 33 bp, Homo sapien
gtcccactgtacccaagttctccctctctgaac

SEQ ID NO: 404044 - DNA, 33 bp, Homo sapien
gtcccactgtacccaatttctccctctctgaac

SEQ ID NO: 404045 - DNA, 33 bp, Homo sapien
aattttgtaatattgcccaagctgatttcaaac

SEQ ID NO: 404046 - DNA, 33 bp, Homo sapien
aattttgtaatattgctcaagctgatttcaaac

SEQ ID NO: 404047 - DNA, 33 bp, Homo sapien
ttttggtgcctagctcacggagtttatgttctc

SEQ ID NO: 404048 - DNA, 33 bp, Homo sapien
ttttggtgcctagctcgcggagtttatgttctc

SEQ ID NO: 404049 - DNA, 33 bp, Homo sapien
tccctgaacttcaagacagacatgctgggctta

SEQ ID NO: 404050 - DNA, 33 bp, Homo sapien
tccctgaacttcaagagagacatgctgggctta

SEQ ID NO: 404051 - DNA, 33 bp, Homo sapien
tgatccttccaaaaaaagttactaataatcagc

SEQ ID NO: 404052 - DNA, 33 bp, Homo sapien
tgatccttccaaaaaacgttactaataatcagc

SEQ ID NO: 404053 - DNA, 33 bp, Homo sapien
ttgtaccattagatcagagagaaaactttcact

SEQ ID NO: 404054 - DNA, 33 bp, Homo sapien
ttgtaccattagatcatagagaaaactttcact

SEQ ID NO: 404055 - DNA, 33 bp, Homo sapien
tttgagctatttataaacttgaaacatatttta

SEQ ID NO: 404056 - DNA, 33 bp, Homo sapien
tttgagctatttataaccttgaaacatatttta

SEQ ID NO: 404057 - DNA, 33 bp, Homo sapien
cttttcaaatgtttcaaagctgtatgaatttta

SEQ ID NO: 404058 - DNA, 33 bp, Homo sapien
cttttcaaatgtttcagagctgtatgaatttta

SEQ ID NO: 404059 - DNA, 33 bp, Homo sapien
tgtgtattacgcaagacgtggtttggccattcc

SEQ ID NO: 404060 - DNA, 33 bp, Homo sapien
tgtgtattacgcaagatgtggtttggccattcc

SEQ ID NO: 404061 - DNA, 33 bp, Homo sapien
ctgtatacatagctgaaaatgctaagaactttt

SEQ ID NO: 404062 - DNA, 33 bp, Homo sapien
ctgtatacatagctgacaatgctaagaactttt

SEQ ID NO: 404063 - DNA, 33 bp, Homo sapien
gttttttcaaatgtccaatttccaacaaaaatt

SEQ ID NO: 404064 - DNA, 33 bp, Homo sapien
gttttttcaaatgtccgatttccaacaaaaatt

SEQ ID NO: 404065 - DNA, 33 bp, Homo sapien
tcagaaaagacctgagaagaccttaagcttttt

SEQ ID NO: 404066 - DNA, 33 bp, Homo sapien
tcagaaaagacctgaggagaccttaagcttttt

SEQ ID NO: 404067 - DNA, 33 bp, Homo sapien
tctggatctttctggactactttcagaccagtc

SEQ ID NO: 404068 - DNA, 33 bp, Homo sapien
tctggatctttctggattactttcagaccagtc

SEQ ID NO: 404069 - DNA, 33 bp, Homo sapien
attgaatagggtatctaaacgaatctggagacc

SEQ ID NO: 404070 - DNA, 33 bp, Homo sapien
attgaatagggtatctgaacgaatctggagacc

SEQ ID NO: 404071 - DNA, 33 bp, Homo sapien
cttcctgatttttttcacctgaattctcaattt

SEQ ID NO: 404072 - DNA, 33 bp, Homo sapien
cttcctgatttttttcgcctgaattctcaattt

SEQ ID NO: 404073 - DNA, 33 bp, Homo sapien
ccaggtaggcgccaaccattggttataagaacc

SEQ ID NO: 404074 - DNA, 33 bp, Homo sapien
ccaggtaggcgccaactattggttataagaacc

SEQ ID NO: 404075 - DNA, 33 bp, Homo sapien
actagaactagtaaaaagatgacaccagttcac

SEQ ID NO: 404076 - DNA, 33 bp, Homo sapien
actagaactagtaaaatgatgacaccagttcac

SEQ ID NO: 404077 - DNA, 33 bp, Homo sapien
gaacagcttaggactcaatagtttgaataattc

SEQ ID NO: 404078 - DNA, 33 bp, Homo sapien
gaacagcttaggactccatagtttgaataattc

SEQ ID NO: 404079 - DNA, 33 bp, Homo sapien
cagtgggagcatgttcacactcttggagtcttt

SEQ ID NO: 404080 - DNA, 33 bp, Homo sapien
cagtgggagcatgttcgcactcttggagtcttt

SEQ ID NO: 404081 - DNA, 33 bp, Homo sapien
gccttcagggctcaaggagaagatctttgtcat

SEQ ID NO: 404082 - DNA, 33 bp, Homo sapien
gccttcagggctcaagtagaagatctttgtcat

SEQ ID NO: 404083 - DNA, 33 bp, Homo sapien; identical to SEQ ID NO: 404081

SEQ ID NO: 404084 - DNA, 33 bp, Homo sapien; identical to SEQ ID NO: 404082

SEQ ID NO: 404085 - DNA, 33 bp, Homo sapien
tctgtgtggagaagggaacgataaattacttat

SEQ ID NO: 404086 - DNA, 33 bp, Homo sapien
tctgtgtggagaaggggacgataaattacttat

SEQ ID NO: 404087 - DNA, 33 bp, Homo sapien
tcggttaatagtttgaagtccagcgtgcagctt

SEQ ID NO: 404088 - DNA, 33 bp, Homo sapien
tcggttaatagtttgaggtccagcgtgcagctt

SEQ ID NO: 404089 - DNA, 33 bp, Homo sapien
tcccctgctgcaagataaccatttgtgaactta

SEQ ID NO: 404090 - DNA, 33 bp, Homo sapien
tcccctgctgcaagatgaccatttgtgaactta

SEQ ID NO: 404091 - DNA, 33 bp, Homo sapien
gggactgcagacactacgtcggcacaatgagat

SEQ ID NO: 404092 - DNA, 33 bp, Homo sapien
gggactgcagacactatgtcggcacaatgagat

SEQ ID NO: 404093 - DNA, 33 bp, Homo sapien
cgattctgattccccgcatagccacgaagtgat

SEQ ID NO: 404094 - DNA, 33 bp, Homo sapien
cgattctgattccccgtatagccacgaagtgat

SEQ ID NO: 404095 - DNA, 33 bp, Homo sapien
tatacgatgttaaaaacttaaggatcaaaaata

SEQ ID NO: 404096 - DNA, 33 bp, Homo sapien
tatacgatgttaaaaatttaaggatcaaaaata

SEQ ID NO: 404097 - DNA, 33 bp, Homo sapien; identical to SEQ ID NO: 404095

SEQ ID NO: 404098 - DNA, 33 bp, Homo sapien; identical to SEQ ID NO: 404096

SEQ ID NO: 404099 - DNA, 33 bp, Homo sapien
gataaggatatcaagaatattcggtgtgctaaa

SEQ ID NO: 404100 - DNA, 33 bp, Homo sapien
gataaggatatcaagagtattcggtgtgctaaa

SEQ ID NO: 404101 - DNA, 33 bp, Homo sapien
gttggtggtcttgttaccagaagaaagttacta

SEQ ID NO: 404102 - DNA, 33 bp, Homo sapien
gttggtggtcttgttatcagaagaaagttacta

SEQ ID NO: 404103 - DNA, 33 bp, Homo sapien
ttagtatctctgacagcactgtgtttagtgtga

SEQ ID NO: 404104 - DNA, 33 bp, Homo sapien
ttagtatctctgacaggactgtgtttagtgtga

SEQ ID NO: 404105 - DNA, 33 bp, Homo sapien
gtgggtatatctggaaaagtctgtagccacaga

SEQ ID NO: 404106 - DNA, 33 bp, Homo sapien
gtgggtatatctggaagagtctgtagccacaga

SEQ ID NO: 404107 - DNA, 33 bp, Homo sapien
ctcttactctcaaggaactcacagtcttaatag

SEQ ID NO: 404108 - DNA, 33 bp, Homo sapien
ctcttactctcaaggagctcacagtcttaatag

SEQ ID NO: 404109 - DNA, 33 bp, Homo sapien
cttacagccaacaaaccacctgccaagctgtga

SEQ ID NO: 404110 - DNA, 33 bp, Homo sapien
cttacagccaacaaactacctgccaagctgtga

SEQ ID NO: 404111 - DNA, 33 bp, Homo sapien
taaaattctccaatcactcaagttttgatgaaa

SEQ ID NO: 404112 - DNA, 33 bp, Homo sapien
taaaattctccaatcattcaagttttgatgaaa

SEQ ID NO: 404113 - DNA, 33 bp, Homo sapien
cttccttcaggttcacagaaataccttgactac

SEQ ID NO: 404114 - DNA, 33 bp, Homo sapien
cttccttcaggttcacggaaataccttgactac

SEQ ID NO: 404115 - DNA, 33 bp, Homo sapien
ttaaagctgagagcagccctttggagcttatta

SEQ ID NO: 404116 - DNA, 33 bp, Homo sapien
ttaaagctgagagcaggcctttggagcttatta

SEQ ID NO: 404117 - DNA, 33 bp, Homo sapien
tggtcaggagaactagaaactagattgctgttt

SEQ ID NO: 404118 - DNA, 33 bp, Homo sapien
tggtcaggagaactaggaactagattgctgttt

SEQ ID NO: 404119 - DNA, 33 bp, Homo sapien
actaacctaagcctccaatttcttctgtgtaaa

SEQ ID NO: 404120 - DNA, 33 bp, Homo sapien
actaacctaagcctccgatttcttctgtgtaaa

SEQ ID NO: 404121 - DNA, 33 bp, Homo sapien
gctctgttattatctcaagtttacacagaagaa

SEQ ID NO: 404122 - DNA, 33 bp, Homo sapien
gctctgttattatctccagtttacacagaagaa

SEQ ID NO: 404123 - DNA, 33 bp, Homo sapien
aactgttacaagatcaatgacaacaatgcctaa

SEQ ID NO: 404124 - DNA, 33 bp, Homo sapien
aactgttacaagatcagtgacaacaatgcctaa

SEQ ID NO: 404125 - DNA, 33 bp, Homo sapien
tgagcagtgttctctacgtgttctgaggagtga

SEQ ID NO: 404126 - DNA, 33 bp, Homo sapien
tgagcagtgttctctaggtgttctgaggagtga

SEQ ID NO: 404127 - DNA, 33 bp, Homo sapien
ttgtctgtagctttcaatcttggcaacacatca

SEQ ID NO: 404128 - DNA, 33 bp, Homo sapien
ttgtctgtagctttcagtcttggcaacacatca

SEQ ID NO: 404129 - DNA, 33 bp, Homo sapien
atctgtgagacacacaaagtcatgtttcccata

SEQ ID NO: 404130 - DNA, 33 bp, Homo sapien
atctgtgagacacacagagtcatgtttcccata

SEQ ID NO: 404131 - DNA, 33 bp, Homo sapien
caagcttagtttgtccaatttattcaaagttta

SEQ ID NO: 404132 - DNA, 33 bp, Homo sapien
caagcttagtttgtccgatttattcaaagttta

SEQ ID NO: 404133 - DNA, 33 bp, Homo sapien
caagtcttcagggataccagccaaaataattgt

SEQ ID NO: 404134 - DNA, 33 bp, Homo sapien
caagtcttcagggatatcagccaaaataattgt

SEQ ID NO: 404135 - DNA, 33 bp, Homo sapien
gtattagtactcagacactggaatcagatgcag

SEQ ID NO: 404136 - DNA, 33 bp, Homo sapien
gtattagtactcagacgctggaatcagatgcag

SEQ ID NO: 404137 - DNA, 33 bp, Homo sapien
agtctgtaattaaggcagagaaagatttgtcta

SEQ ID NO: 404138 - DNA, 33 bp, Homo sapien
agtctgtaattaaggcggagaaagatttgtcta

SEQ ID NO: 404139 - DNA, 33 bp, Homo sapien
gttgcctttctcacagaaattaagtgtttatgc

SEQ ID NO: 404140 - DNA, 33 bp, Homo sapien
gttgcctttctcacaggaattaagtgtttatgc

SEQ ID NO: 404141 - DNA, 33 bp, Homo sapien
ctctaggtcttgcccacggtcttgtccactgtg

SEQ ID NO: 404142 - DNA, 33 bp, Homo sapien
ctctaggtcttgcccatggtcttgtccactgtg

SEQ ID NO: 404143 - DNA, 33 bp, Homo sapien
gttaactggttgagacagccttaggacataaaa

SEQ ID NO: 404144 - DNA, 33 bp, Homo sapien
gttaactggttgagacggccttaggacataaaa

SEQ ID NO: 404145 - DNA, 33 bp, Homo sapien
ctattaatcagataaaagccttatgtaagacac

SEQ ID NO: 404146 - DNA, 33 bp, Homo sapien
ctattaatcagataaaggccttatgtaagacac

SEQ ID NO: 404147 - DNA, 33 bp, Homo sapien
gcttttattgttcttacgcaaattacctaaaga

SEQ ID NO: 404148 - DNA, 33 bp, Homo sapien
gcttttattgttcttatgcaaattacctaaaga

SEQ ID NO: 404149 - DNA, 33 bp, Homo sapien
ggagaatgtgcttagaacagacaaggcatttga

SEQ ID NO: 404150 - DNA, 33 bp, Homo sapien
ggagaatgtgcttagagcagacaaggcatttga

SEQ ID NO: 404151 - DNA, 33 bp, Homo sapien
gtttggagaaaacttggaaagaagacggagctg

SEQ ID NO: 404152 - DNA, 33 bp, Homo sapien
gtttggagaaaacttgtaaagaagacggagctg

SEQ ID NO: 404153 - DNA, 33 bp, Homo sapien
taggccaggcttcatacagtcttacctttctga

SEQ ID NO: 404154 - DNA, 33 bp, Homo sapien
taggccaggcttcatatagtcttacctttctga

SEQ ID NO: 404155 - DNA, 33 bp, Homo sapien
ttatcttgatgctatgcattttttaacaaataa

SEQ ID NO: 404156 - DNA, 33 bp, Homo sapien
ttatcttgatgctatgtattttttaacaaataa

SEQ ID NO: 404157 - DNA, 33 bp, Homo sapien
tcatcattaagtgtgacgttagccataggtttt

SEQ ID NO: 404158 - DNA, 33 bp, Homo sapien
tcatcattaagtgtgatgttagccataggtttt

SEQ ID NO: 404159 - DNA, 33 bp, Homo sapien
caaggatgctcttacaagtgttttggagcctca

SEQ ID NO: 404160 - DNA, 33 bp, Homo sapien
caaggatgctcttacacgtgttttggagcctca

SEQ ID NO: 404161 - DNA, 33 bp, Homo sapien
atctttcttttgcctaaccttttatcctccccc

SEQ ID NO: 404162 - DNA, 33 bp, Homo sapien
atctttcttttgcctacccttttatcctccccc

SEQ ID NO: 404163 - DNA, 33 bp, Homo sapien
gttaatttgggcaaagaaagtcctgaaggagag

SEQ ID NO: 404164 - DNA, 33 bp, Homo sapien
gttaatttgggcaaagtaagtcctgaaggagag

SEQ ID NO: 404165 - DNA, 33 bp, Homo sapien
agctcagtaggatcctaagctatgatggagcag

SEQ ID NO: 404166 - DNA, 33 bp, Homo sapien
agctcagtaggatcctcagctatgatggagcag

SEQ ID NO: 404167 - DNA, 33 bp, Homo sapien
gcagaacagagaggacagaatgcaccaagttcc

SEQ ID NO: 404168 - DNA, 33 bp, Homo sapien
gcagaacagagaggacggaatgcaccaagttcc

SEQ ID NO: 404169 - DNA, 33 bp, Homo sapien
tgaggagtttaaagacaagacagaaagacaagt

SEQ ID NO: 404170 - DNA, 33 bp, Homo sapien
tgaggagtttaaagacgagacagaaagacaagt

SEQ ID NO: 404171 - DNA, 33 bp, Homo sapien
caggtcagaaaaaagaagtgaggtcatctctcc

SEQ ID NO: 404172 - DNA, 33 bp, Homo sapien
caggtcagaaaaaagacgtgaggtcatctctcc

SEQ ID NO: 404173 - DNA, 33 bp, Homo sapien
aagagatgacaaggtaacatggacgtttaggct

SEQ ID NO: 404174 - DNA, 33 bp, Homo sapien
aagagatgacaaggtagcatggacgtttaggct

SEQ ID NO: 404175 - DNA, 33 bp, Homo sapien
aagtgcaggtgttttacattcatcagagaaaat

SEQ ID NO: 404176 - DNA, 33 bp, Homo sapien
aagtgcaggtgttttatattcatcagagaaaat

SEQ ID NO: 404177 - DNA, 33 bp, Homo sapien
agtaggttaaagttccaaggataaagatgactt

SEQ ID NO: 404178 - DNA, 33 bp, Homo sapien
agtaggttaaagttccgaggataaagatgactt

SEQ ID NO: 404179 - DNA, 33 bp, Homo sapien
actgaaatatatgcaaattcaagttgttagagc

SEQ ID NO: 404180 - DNA, 33 bp, Homo sapien
actgaaatatatgcaagttcaagttgttagagc

SEQ ID NO: 404181 - DNA, 33 bp, Homo sapien
tatgtgtagataaatacgtacatgttactgcac

SEQ ID NO: 404182 - DNA, 33 bp, Homo sapien
tatgtgtagataaatatgtacatgttactgcac

SEQ ID NO: 404183 - DNA, 33 bp, Homo sapien
agaatctccatgaagaagattaggtgagaagac

SEQ ID NO: 404184 - DNA, 33 bp, Homo sapien
agaatctccatgaagatgattaggtgagaagac

SEQ ID NO: 404185 - DNA, 33 bp, Homo sapien
aaactattgacgcaataaagagagttgaagaga

SEQ ID NO: 404186 - DNA, 33 bp, Homo sapien
aaactattgacgcaatgaagagagttgaagaga

SEQ ID NO: 404187 - DNA, 33 bp, Homo sapien; identical to SEQ ID NO: 404185

SEQ ID NO: 404188 - DNA, 33 bp, Homo sapien; identical to SEQ ID NO: 404186

SEQ ID NO: 404189 - DNA, 33 bp, Homo sapien
atctgaacaccttgcaatcgttgcggacaaaca

SEQ ID NO: 404190 - DNA, 33 bp, Homo sapien
atctgaacaccttgcagtcgttgcggacaaaca

SEQ ID NO: 404191 - DNA, 33 bp, Homo sapien
taagcctttctttcaccctttgcaacagatctg

SEQ ID NO: 404192 - DNA, 33 bp, Homo sapien
taagcctttctttcactctttgcaacagatctg

SEQ ID NO: 404193 - DNA, 33 bp, Homo sapien
cagatctttcaaaaagcccactcaaatgttttc

SEQ ID NO: 404194 - DNA, 33 bp, Homo sapien
cagatctttcaaaaagtccactcaaatgttttc

SEQ ID NO: 404195 - DNA, 33 bp, Homo sapien
caaggaggggaggaacactgcactcttaagctt

SEQ ID NO: 404196 - DNA, 33 bp, Homo sapien
caaggaggggaggaacgctgcactcttaagctt

SEQ ID NO: 404197 - DNA, 33 bp, Homo sapien
tgcaagtgctttgacactgccattatctcatgg

SEQ ID NO: 404198 - DNA, 33 bp, Homo sapien
tgcaagtgctttgacattgccattatctcatgg

SEQ ID NO: 404199 - DNA, 33 bp, Homo sapien
gtcagggatctataaccgtagtcaaataaaaaa

SEQ ID NO: 404200 - DNA, 33 bp, Homo sapien
gtcagggatctataactgtagtcaaataaaaaa

SEQ ID NO: 404201 - DNA, 33 bp, Homo sapien
cccaactcagcatatcaagtatccaggaaaaca

SEQ ID NO: 404202 - DNA, 33 bp, Homo sapien
cccaactcagcatatctagtatccaggaaaaca

SEQ ID NO: 404203 - DNA, 33 bp, Homo sapien
ggacaggagctaaggacagaggtgaggaaaccc

SEQ ID NO: 404204 - DNA, 33 bp, Homo sapien
ggacaggagctaaggatagaggtgaggaaaccc

SEQ ID NO: 404205 - DNA, 33 bp, Homo sapien
tgacttcctccacagccattgttacctatttta

SEQ ID NO: 404206 - DNA, 33 bp, Homo sapien
tgacttcctccacagctattgttacctatttta

SEQ ID NO: 404207 - DNA, 33 bp, Homo sapien
tgatgatccttttggaacacccattgaaaccaa

SEQ ID NO: 404208 - DNA, 33 bp, Homo sapien
tgatgatccttttggaccacccattgaaaccaa

SEQ ID NO: 404209 - DNA, 33 bp, Homo sapien
gaaccttaaacaagtcactcaaccaccttgagt

SEQ ID NO: 404210 - DNA, 33 bp, Homo sapien
gaaccttaaacaagtcgctcaaccaccttgagt

SEQ ID NO: 404211 - DNA, 33 bp, Homo sapien
agcatcagaacacggtgaaagcatcctggtagg

SEQ ID NO: 404212 - DNA, 33 bp, Homo sapien
agcatcagaacacggttaaagcatcctggtagg

SEQ ID NO: 404213 - DNA, 33 bp, Homo sapien; identical to SEQ ID NO: 404211

SEQ ID NO: 404214 - DNA, 33 bp, Homo sapien; identical to SEQ ID NO: 404212

SEQ ID NO: 404215 - DNA, 33 bp, Homo sapien
tgggagatggcaggaaaaaaagcctaaagtaat

SEQ ID NO: 404216 - DNA, 33 bp, Homo sapien
tgggagatggcaggaacaaaagcctaaagtaat

SEQ ID NO: 404217 - DNA, 33 bp, Homo sapien
tgcagagagcttacaacggcggctctttaccaa

SEQ ID NO: 404218 - DNA, 33 bp, Homo sapien
tgcagagagcttacaatggcggctctttaccaa

SEQ ID NO: 404219 - DNA, 33 bp, Homo sapien
tgctcttttgcaaacaatataagcagtacaggt

SEQ ID NO: 404220 - DNA, 33 bp, Homo sapien
tgctcttttgcaaacagtataagcagtacaggt

SEQ ID NO: 404221 - DNA, 33 bp, Homo sapien
tcacacacttaacaaacggaccattctgcaagt

SEQ ID NO: 404222 - DNA, 33 bp, Homo sapien
tcacacacttaacaaatggaccattctgcaagt

SEQ ID NO: 404223 - DNA, 33 bp, Homo sapien
catgctggaagcgacaagtttaatatgaacttt

SEQ ID NO: 404224 - DNA, 33 bp, Homo sapien
catgctggaagcgacaggtttaatatgaacttt

SEQ ID NO: 404225 - DNA, 33 bp, Homo sapien
gaaattcatgattagacatttagtgaggccccc

SEQ ID NO: 404226 - DNA, 33 bp, Homo sapien
gaaattcatgattagatatttagtgaggccccc

SEQ ID NO: 404227 - DNA, 33 bp, Homo sapien
gcaaaagaatcaagaaatcacttgaatcaagaa

SEQ ID NO: 404228 - DNA, 33 bp, Homo sapien
gcaaaagaatcaagaagtcacttgaatcaagaa

SEQ ID NO: 404229 - DNA, 33 bp, Homo sapien
tagctgacacacattcacccatttcttcacgtg

SEQ ID NO: 404230 - DNA, 33 bp, Homo sapien
tagctgacacacattcgcccatttcttcacgtg

SEQ ID NO: 404231 - DNA, 33 bp, Homo sapien
caacagccagtgctccaagcccggaattgtgta

SEQ ID NO: 404232 - DNA, 33 bp, Homo sapien
caacagccagtgctccgagcccggaattgtgta

SEQ ID NO: 404233 - DNA, 33 bp, Homo sapien
actctcaaatgcagcaaggcctccacaatagtc

SEQ ID NO: 404234 - DNA, 33 bp, Homo sapien
actctcaaatgcagcagggcctccacaatagtc

SEQ ID NO: 404235 - DNA, 33 bp, Homo sapien
gttatgcattgtgctaagcattaggaaaaccat

SEQ ID NO: 404236 - DNA, 33 bp, Homo sapien
gttatgcattgtgctaggcattaggaaaaccat

SEQ ID NO: 404237 - DNA, 33 bp, Homo sapien
gtatcctcatataggtcaaggagaagatcatag

SEQ ID NO: 404238 - DNA, 33 bp, Homo sapien
gtatcctcatataggtgaaggagaagatcatag

SEQ ID NO: 404239 - DNA, 33 bp, Homo sapien
ctagccatgtgcataagaatgaaactggacccc

SEQ ID NO: 404240 - DNA, 33 bp, Homo sapien
ctagccatgtgcataataatgaaactggacccc

SEQ ID NO: 404241 - DNA, 33 bp, Homo sapien
ctgtctctctaaaacactaattggtcaaagcca

SEQ ID NO: 404242 - DNA, 33 bp, Homo sapien
ctgtctctctaaaacagtaattggtcaaagcca

SEQ ID NO: 404243 - DNA, 33 bp, Homo sapien
agtttactggggatgacgttctgaaataagttt

SEQ ID NO: 404244 - DNA, 33 bp, Homo sapien
agtttactggggatgatgttctgaaataagttt

SEQ ID NO: 404245 - DNA, 33 bp, Homo sapien
actgaactttggataagcattatcttcaaaaca

SEQ ID NO: 404246 - DNA, 33 bp, Homo sapien
actgaactttggataatcattatcttcaaaaca

SEQ ID NO: 404247 - DNA, 33 bp, Homo sapien
tgactctccactgagacgaagtagccgtctgca

SEQ ID NO: 404248 - DNA, 33 bp, Homo sapien
tgactctccactgagaggaagtagccgtctgca

SEQ ID NO: 404249 - DNA, 33 bp, Homo sapien
ggctttgctgcaactaccgagatgttactaagt

SEQ ID NO: 404250 - DNA, 33 bp, Homo sapien
ggctttgctgcaactagcgagatgttactaagt

SEQ ID NO: 404251 - DNA, 33 bp, Homo sapien
gcatggcctcctttcaagaagcaaggttttagt

SEQ ID NO: 404252 - DNA, 33 bp, Homo sapien
gcatggcctcctttcatgaagcaaggttttagt

SEQ ID NO: 404253 - DNA, 33 bp, Homo sapien
ggatcccatttagggacattcattgatactcct

SEQ ID NO: 404254 - DNA, 33 bp, Homo sapien
ggatcccatttagggagattcattgatactcct

SEQ ID NO: 404255 - DNA, 33 bp, Homo sapien
tagttctaatcctacaaaagccctctattatgc

SEQ ID NO: 404256 - DNA, 33 bp, Homo sapien
tagttctaatcctacataagccctctattatgc

SEQ ID NO: 404257 - DNA, 33 bp, Homo sapien
gcctctctactatatcaagatatccatgagaga

SEQ ID NO: 404258 - DNA, 33 bp, Homo sapien
gcctctctactatatcgagatatccatgagaga

SEQ ID NO: 404259 - DNA, 33 bp, Homo sapien
tcgggacacagagacccatgctttacaaaggtc

SEQ ID NO: 404260 - DNA, 33 bp, Homo sapien
tcgggacacagagacctatgctttacaaaggtc

SEQ ID NO: 404261 - DNA, 33 bp, Homo sapien; identical to SEQ ID NO: 404259

SEQ ID NO: 404262 - DNA, 33 bp, Homo sapien; identical to SEQ ID NO: 404260

SEQ ID NO: 404263 - DNA, 33 bp, Homo sapien
gtgtggttaaattttaaaagagagataactgtt

SEQ ID NO: 404264 - DNA, 33 bp, Homo sapien
gtgtggttaaattttagaagagagataactgtt

SEQ ID NO: 404265 - DNA, 33 bp, Homo sapien
tgcttttctgtcattaaaatctgaaaaatccct

SEQ ID NO: 404266 - DNA, 33 bp, Homo sapien
tgcttttctgtcattagaatctgaaaaatccct

SEQ ID NO: 404267 - DNA, 33 bp, Homo sapien
ttgagactctgtacaaattcctaccttccccat

SEQ ID NO: 404268 - DNA, 33 bp, Homo sapien
ttgagactctgtacaagttcctaccttccccat

SEQ ID NO: 404269 - DNA, 33 bp, Homo sapien
agagagaagctgagcaacttttggcctgggctg

SEQ ID NO: 404270 - DNA, 33 bp, Homo sapien
agagagaagctgagcaccttttggcctgggctg

SEQ ID NO: 404271 - DNA, 33 bp, Homo sapien
ataatcactgttgtaacaagaagagcaagatat

SEQ ID NO: 404272 - DNA, 33 bp, Homo sapien
ataatcactgttgtaataagaagagcaagatat

SEQ ID NO: 404273 - DNA, 33 bp, Homo sapien
ccttgagttttatacaagggcagaggaagaacc

SEQ ID NO: 404274 - DNA, 33 bp, Homo sapien
ccttgagttttatacaggggcagaggaagaacc

SEQ ID NO: 404275 - DNA, 33 bp, Homo sapien
tagcctgaagctgacccggccatgctttaaagg

SEQ ID NO: 404276 - DNA, 33 bp, Homo sapien
tagcctgaagctgacctggccatgctttaaagg

SEQ ID NO: 404277 - DNA, 33 bp, Homo sapien
tcatccctcctctccaaatcctgaggcttggct

SEQ ID NO: 404278 - DNA, 33 bp, Homo sapien
tcatccctcctctccagatcctgaggcttggct

SEQ ID NO: 404279 - DNA, 33 bp, Homo sapien
caggtctactgttctcgctgaacttccagtccc

SEQ ID NO: 404280 - DNA, 33 bp, Homo sapien
caggtctactgttctctctgaacttccagtccc

SEQ ID NO: 404281 - DNA, 33 bp, Homo sapien
cagtgagctgttggtaacaatattagacattga

SEQ ID NO: 404282 - DNA, 33 bp, Homo sapien
cagtgagctgttggtagcaatattagacattga

SEQ ID NO: 404283 - DNA, 33 bp, Homo sapien
ctagtcatggccaaccactaatcccacagcccc

SEQ ID NO: 404284 - DNA, 33 bp, Homo sapien
ctagtcatggccaaccgctaatcccacagcccc

SEQ ID NO: 404285 - DNA, 33 bp, Homo sapien
attaaccctgaactaacgtttacctcaaaccca

SEQ ID NO: 404286 - DNA, 33 bp, Homo sapien
attaaccctgaactaatgtttacctcaaaccca

SEQ ID NO: 404287 - DNA, 33 bp, Homo sapien
tttaaagtccccattcaatcattttaacatcca

SEQ ID NO: 404288 - DNA, 33 bp, Homo sapien
tttaaagtccccattcgatcattttaacatcca

SEQ ID NO: 404289 - DNA, 33 bp, Homo sapien
cagagctgagagagaaacccttgagttgtgttg

SEQ ID NO: 404290 - DNA, 33 bp, Homo sapien
cagagctgagagagaaccccttgagttgtgttg

SEQ ID NO: 404291 - DNA, 33 bp, Homo sapien
aaactatagagacaaaagtcagatctggtttcc

SEQ ID NO: 404292 - DNA, 33 bp, Homo sapien
aaactatagagacaaacgtcagatctggtttcc

SEQ ID NO: 404293 - DNA, 33 bp, Homo sapien
ggaacctcggcccttacgttgcattaccagatc

SEQ ID NO: 404294 - DNA, 33 bp, Homo sapien
ggaacctcggcccttatgttgcattaccagatc

SEQ ID NO: 404295 - DNA, 33 bp, Homo sapien
tggagtgatatagacaaaggcaaagtaatttgt

SEQ ID NO: 404296 - DNA, 33 bp, Homo sapien
tggagtgatatagacagaggcaaagtaatttgt

SEQ ID NO: 404297 - DNA, 33 bp, Homo sapien
tggccataccaagtcccgatcacccactcactg

SEQ ID NO: 404298 - DNA, 33 bp, Homo sapien
tggccataccaagtcctgatcacccactcactg

SEQ ID NO: 404299 - DNA, 33 bp, Homo sapien
aacccgacacaatcaaaataccattacttattt

SEQ ID NO: 404300 - DNA, 33 bp, Homo sapien
aacccgacacaatcaagataccattacttattt

SEQ ID NO: 404301 - DNA, 33 bp, Homo sapien
actctcttaaaaggaaaaacaattgtgaaaatc

SEQ ID NO: 404302 - DNA, 33 bp, Homo sapien
actctcttaaaaggaataacaattgtgaaaatc

SEQ ID NO: 404303 - DNA, 33 bp, Homo sapien
gccatcaaagcacatgaatgacagactcacctt

SEQ ID NO: 404304 - DNA, 33 bp, Homo sapien
gccatcaaagcacatggatgacagactcacctt

SEQ ID NO: 404305 - DNA, 33 bp, Homo sapien
tctacctcacgctaataacccaatgaattagac

SEQ ID NO: 404306 - DNA, 33 bp, Homo sapien
tctacctcacgctaatcacccaatgaattagac

SEQ ID NO: 404307 - DNA, 33 bp, Homo sapien
atggtttccacagtgaaaggaggtgagatgctg

SEQ ID NO: 404308 - DNA, 33 bp, Homo sapien
atggtttccacagtgagaggaggtgagatgctg

SEQ ID NO: 404309 - DNA, 33 bp, Homo sapien
attgtagacataggaaaaggaaagaaagtggcc

SEQ ID NO: 404310 - DNA, 33 bp, Homo sapien
attgtagacataggaagaggaaagaaagtggcc

SEQ ID NO: 404311 - DNA, 33 bp, Homo sapien
ggggagaagaaaacagaagataggaaccaaagc

SEQ ID NO: 404312 - DNA, 33 bp, Homo sapien
ggggagaagaaaacaggagataggaaccaaagc

SEQ ID NO: 404313 - DNA, 33 bp, Homo sapien
gagggtatctcagaaccaaactaaagcttcatc

SEQ ID NO: 404314 - DNA, 33 bp, Homo sapien
gagggtatctcagaactaaactaaagcttcatc

SEQ ID NO: 404315 - DNA, 33 bp, Homo sapien
agactctatggcttcaccaaggcagagatggct

SEQ ID NO: 404316 - DNA, 33 bp, Homo sapien
agactctatggcttcatcaaggcagagatggct

SEQ ID NO: 404317 - DNA, 33 bp, Homo sapien
gagggataaagcctcaacagcattcatgaggtc

SEQ ID NO: 404318 - DNA, 33 bp, Homo sapien
gagggataaagcctcaccagcattcatgaggtc

SEQ ID NO: 404319 - DNA, 33 bp, Homo sapien; identical to SEQ ID NO: 404317

SEQ ID NO: 404320 - DNA, 33 bp, Homo sapien; identical to SEQ ID NO: 404318

SEQ ID NO: 404321 - DNA, 33 bp, Homo sapien
gtccctctacaggtataagcctctgagattaca

SEQ ID NO: 404322 - DNA, 33 bp, Homo sapien
gtccctctacaggtatgagcctctgagattaca

SEQ ID NO: 404323 - DNA, 33 bp, Homo sapien
ttgccacggtacagaagaggaaagcaaaaccta

SEQ ID NO: 404324 - DNA, 33 bp, Homo sapien
ttgccacggtacagaataggaaagcaaaaccta

SEQ ID NO: 404325 - DNA, 33 bp, Homo sapien
ttcctgaattaagtccaaatatagtcagtcttt

SEQ ID NO: 404326 - DNA, 33 bp, Homo sapien
ttcctgaattaagtccgaatatagtcagtcttt

SEQ ID NO: 404327 - DNA, 33 bp, Homo sapien
gtctcctgaataaacaaagaatgtgaccacaaa

SEQ ID NO: 404328 - DNA, 33 bp, Homo sapien
gtctcctgaataaacatagaatgtgaccacaaa

SEQ ID NO: 404329 - DNA, 33 bp, Homo sapien
gcatggaaagaaaatggactttggagtcaggtg

SEQ ID NO: 404330 - DNA, 33 bp, Homo sapien
gcatggaaagaaaatgtactttggagtcaggtg

SEQ ID NO: 404331 - DNA, 33 bp, Homo sapien
gccacaagcctgaccccaagaacaaagtgggag

SEQ ID NO: 404332 - DNA, 33 bp, Homo sapien
gccacaagcctgaccctaagaacaaagtgggag

SEQ ID NO: 404333 - DNA, 33 bp, Homo sapien
ttgcagctgctatttcaagtcaaggtgtaggca

SEQ ID NO: 404334 - DNA, 33 bp, Homo sapien
ttgcagctgctatttcgagtcaaggtgtaggca

SEQ ID NO: 404335 - DNA, 33 bp, Homo sapien; identical to SEQ ID NO: 404333

SEQ ID NO: 404336 - DNA, 33 bp, Homo sapien; identical to SEQ ID NO: 404334

SEQ ID NO: 404337 - DNA, 33 bp, Homo sapien
ggatggattctttcccagacaggaatccaggac

SEQ ID NO: 404338 - DNA, 33 bp, Homo sapien
ggatggattctttcccggacaggaatccaggac

SEQ ID NO: 404339 - DNA, 33 bp, Homo sapien
cactcgaaaggaactacggattatggagcaact

SEQ ID NO: 404340 - DNA, 33 bp, Homo sapien
cactcgaaaggaactatggattatggagcaact

SEQ ID NO: 404341 - DNA, 33 bp, Homo sapien
ggcaaacataacaagaacctgatcctacaaaaa

SEQ ID NO: 404342 - DNA, 33 bp, Homo sapien
ggcaaacataacaagaccctgatcctacaaaaa

SEQ ID NO: 404343 - DNA, 33 bp, Homo sapien
taaatcattgttatacggcattgttttttattt

SEQ ID NO: 404344 - DNA, 33 bp, Homo sapien
taaatcattgttatactgcattgttttttattt

SEQ ID NO: 404345 - DNA, 33 bp, Homo sapien
cttctccatactattaaacatacagtccttagc

SEQ ID NO: 404346 - DNA, 33 bp, Homo sapien
cttctccatactattagacatacagtccttagc

SEQ ID NO: 404347 - DNA, 33 bp, Homo sapien
acagacattattagcaagagttttaaacaagtc

SEQ ID NO: 404348 - DNA, 33 bp, Homo sapien
acagacattattagcaggagttttaaacaagtc

SEQ ID NO: 404349 - DNA, 33 bp, Homo sapien
gacttgagttggtttcaaagatttacagtaaat

SEQ ID NO: 404350 - DNA, 33 bp, Homo sapien
gacttgagttggtttcgaagatttacagtaaat

SEQ ID NO: 404351 - DNA, 33 bp, Homo sapien
tgaatcccggtgctacagctcaccaactggatg

SEQ ID NO: 404352 - DNA, 33 bp, Homo sapien
tgaatcccggtgctacggctcaccaactggatg

SEQ ID NO: 404353 - DNA, 33 bp, Homo sapien
tgggaccttaggcatgaaatggcttctgtgttt

SEQ ID NO: 404354 - DNA, 33 bp, Homo sapien
tgggaccttaggcatgcaatggcttctgtgttt

SEQ ID NO: 404355 - DNA, 33 bp, Homo sapien
ggaatgataatgacaacagttgacttttgttaa

SEQ ID NO: 404356 - DNA, 33 bp, Homo sapien
ggaatgataatgacaatagttgacttttgttaa

SEQ ID NO: 404357 - DNA, 33 bp, Homo sapien
tattcatggcctgtgacagttttgctgaggcat

SEQ ID NO: 404358 - DNA, 33 bp, Homo sapien
tattcatggcctgtgatagttttgctgaggcat

SEQ ID NO: 404359 - DNA, 33 bp, Homo sapien
agagtcagaatgatgcaataacgtcatggtggg

SEQ ID NO: 404360 - DNA, 33 bp, Homo sapien
agagtcagaatgatgcgataacgtcatggtggg

SEQ ID NO: 404361 - DNA, 33 bp, Homo sapien
aggggaaaggctaaaacaagtgaagtccttact

SEQ ID NO: 404362 - DNA, 33 bp, Homo sapien
aggggaaaggctaaaataagtgaagtccttact

SEQ ID NO: 404363 - DNA, 33 bp, Homo sapien
atattccctggaaccccgaacagtggctataaa

SEQ ID NO: 404364 - DNA, 33 bp, Homo sapien
atattccctggaaccctgaacagtggctataaa

SEQ ID NO: 404365 - DNA, 33 bp, Homo sapien
tcctatcaattttccaagctactcttaacattc

SEQ ID NO: 404366 - DNA, 33 bp, Homo sapien
tcctatcaattttccatgctactcttaacattc

SEQ ID NO: 404367 - DNA, 33 bp, Homo sapien
ttctgtattgcccgacacctttgtttgctgcct

SEQ ID NO: 404368 - DNA, 33 bp, Homo sapien
ttctgtattgcccgacgcctttgtttgctgcct

SEQ ID NO: 404369 - DNA, 33 bp, Homo sapien
gatacaaatattttggaagaagatgcaatcggg

SEQ ID NO: 404370 - DNA, 33 bp, Homo sapien
gatacaaatattttgggagaagatgcaatcggg

SEQ ID NO: 404371 - DNA, 33 bp, Homo sapien
taaatttggatttttacaccaggcgaggtggct

SEQ ID NO: 404372 - DNA, 33 bp, Homo sapien
taaatttggatttttagaccaggcgaggtggct

SEQ ID NO: 404373 - DNA, 33 bp, Homo sapien
tgttttaggaatgaaactggatactgttcaagt

SEQ ID NO: 404374 - DNA, 33 bp, Homo sapien
tgttttaggaatgaaattggatactgttcaagt

SEQ ID NO: 404375 - DNA, 33 bp, Homo sapien
gaagacaaagtccctcaagtcccttcctacatc

SEQ ID NO: 404376 - DNA, 33 bp, Homo sapien
gaagacaaagtccctcgagtcccttcctacatc

SEQ ID NO: 404377 - DNA, 33 bp, Homo sapien
ggctgtagggcagactaagggagcaccaaaaag

SEQ ID NO: 404378 - DNA, 33 bp, Homo sapien
ggctgtagggcagactgagggagcaccaaaaag

SEQ ID NO: 404379 - DNA, 33 bp, Homo sapien
ctcagataaaatggaaacagacttccttagggc

SEQ ID NO: 404380 - DNA, 33 bp, Homo sapien
ctcagataaaatggaagcagacttccttagggc

SEQ ID NO: 404381 - DNA, 33 bp, Homo sapien
atttcagtgattccccaggattggttactatga

SEQ ID NO: 404382 - DNA, 33 bp, Homo sapien
atttcagtgattccccgggattggttactatga

SEQ ID NO: 404383 - DNA, 33 bp, Homo sapien
acttgctatgtactcaataaataagcactaaga

SEQ ID NO: 404384 - DNA, 33 bp, Homo sapien
acttgctatgtactcagtaaataagcactaaga

SEQ ID NO: 404385 - DNA, 33 bp, Homo sapien
cctggcggtcctcttacgtccttactgtgcagc

SEQ ID NO: 404386 - DNA, 33 bp, Homo sapien
cctggcggtcctcttatgtccttactgtgcagc

SEQ ID NO: 404387 - DNA, 33 bp, Homo sapien
taaacgagacactatgaataagtgcctggctgt

SEQ ID NO: 404388 - DNA, 33 bp, Homo sapien
taaacgagacactatggataagtgcctggctgt

SEQ ID NO: 404389 - DNA, 33 bp, Homo sapien
gctgtggagcttcgacaagtttctttattccct

SEQ ID NO: 404390 - DNA, 33 bp, Homo sapien
gctgtggagcttcgaccagtttctttattccct

SEQ ID NO: 404391 - DNA, 33 bp, Homo sapien
attttccttttgcccgaataactaacatttctt

SEQ ID NO: 404392 - DNA, 33 bp, Homo sapien
attttccttttgcccggataactaacatttctt

SEQ ID NO: 404393 - DNA, 33 bp, Homo sapien
attttaaccactacttcaacaggataaaaatgt

SEQ ID NO: 404394 - DNA, 33 bp, Homo sapien
attttaaccactacttgaacaggataaaaatgt

SEQ ID NO: 404395 - DNA, 33 bp, Homo sapien
cctatgcagagatctcactctatgctggcaggc

SEQ ID NO: 404396 - DNA, 33 bp, Homo sapien
cctatgcagagatctcgctctatgctggcaggc

SEQ ID NO: 404397 - DNA, 33 bp, Homo sapien
agcttgaagtccctgaacaagagtaaaagccag

SEQ ID NO: 404398 - DNA, 33 bp, Homo sapien
agcttgaagtccctgagcaagagtaaaagccag

SEQ ID NO: 404399 - DNA, 33 bp, Homo sapien
cattttacaagtccaaattacaactgccagttt

SEQ ID NO: 404400 - DNA, 33 bp, Homo sapien
cattttacaagtccaagttacaactgccagttt

SEQ ID NO: 404401 - DNA, 33 bp, Homo sapien
acccaatggaactgcaaaaagaactcattctaa

SEQ ID NO: 404402 - DNA, 33 bp, Homo sapien
acccaatggaactgcataaagaactcattctaa

SEQ ID NO: 404403 - DNA, 33 bp, Homo sapien
agggccacctatactacgcactgggtcagttgg

SEQ ID NO: 404404 - DNA, 33 bp, Homo sapien
agggccacctatactatgcactgggtcagttgg

SEQ ID NO: 404405 - DNA, 33 bp, Homo sapien
ccgacctagtaggcaaatagacactgaggctga

SEQ ID NO: 404406 - DNA, 33 bp, Homo sapien
ccgacctagtaggcaagtagacactgaggctga

SEQ ID NO: 404407 - DNA, 33 bp, Homo sapien
tgcctgtagcatgacccctcattatgaaaccag

SEQ ID NO: 404408 - DNA, 33 bp, Homo sapien
tgcctgtagcatgacctctcattatgaaaccag

SEQ ID NO: 404409 - DNA, 33 bp, Homo sapien
ggacgcccaggagagccgatggtttcattccag

SEQ ID NO: 404410 - DNA, 33 bp, Homo sapien
ggacgcccaggagagctgatggtttcattccag

SEQ ID NO: 404411 - DNA, 33 bp, Homo sapien
taaatctggccctagaagctttgaggagcagct

SEQ ID NO: 404412 - DNA, 33 bp, Homo sapien
taaatctggccctagaggctttgaggagcagct

SEQ ID NO: 404413 - DNA, 33 bp, Homo sapien
tggcccctttcatctgcagtgcacaatgattta

SEQ ID NO: 404414 - DNA, 33 bp, Homo sapien
tggcccctttcatctgtagtgcacaatgattta

SEQ ID NO: 404415 - DNA, 33 bp, Homo sapien
cattattcaaaaaagccaagaggcagaagcaac

SEQ ID NO: 404416 - DNA, 33 bp, Homo sapien
cattattcaaaaaagcgaagaggcagaagcaac

SEQ ID NO: 404417 - DNA, 33 bp, Homo sapien
acctgtcagaacaagaaaggggccctgagctgg

SEQ ID NO: 404418 - DNA, 33 bp, Homo sapien
acctgtcagaacaagagaggggccctgagctgg

SEQ ID NO: 404419 - DNA, 33 bp, Homo sapien
tcagcctgatggagtcaaaagaccactaagtcc

SEQ ID NO: 404420 - DNA, 33 bp, Homo sapien
tcagcctgatggagtccaaagaccactaagtcc

SEQ ID NO: 404421 - DNA, 33 bp, Homo sapien
tgtcctgccagtttgcagaagtggcatcttgca

SEQ ID NO: 404422 - DNA, 33 bp, Homo sapien
tgtcctgccagtttgcggaagtggcatcttgca

SEQ ID NO: 404423 - DNA, 33 bp, Homo sapien
ctggagacatatatcccaggggaaacagctctg

SEQ ID NO: 404424 - DNA, 33 bp, Homo sapien
ctggagacatatatcctaggggaaacagctctg

SEQ ID NO: 404425 - DNA, 33 bp, Homo sapien
caggaatggaaaccagaactctttgtctcaaca

SEQ ID NO: 404426 - DNA, 33 bp, Homo sapien
caggaatggaaaccaggactctttgtctcaaca

SEQ ID NO: 404427 - DNA, 33 bp, Homo sapien
ctcccccagttaggaacgctgcaaggtcttcgg

SEQ ID NO: 404428 - DNA, 33 bp, Homo sapien
ctcccccagttaggaatgctgcaaggtcttcgg

SEQ ID NO: 404429 - DNA, 33 bp, Homo sapien
caaaacgaccaatgagcccctcctgaccctcca

SEQ ID NO: 404430 - DNA, 33 bp, Homo sapien
caaaacgaccaatgagtccctcctgaccctcca

SEQ ID NO: 404431 - DNA, 33 bp, Homo sapien
agagatttctgaggaaaacttgaatggtgcaga

SEQ ID NO: 404432 - DNA, 33 bp, Homo sapien
agagatttctgaggaacacttgaatggtgcaga

SEQ ID NO: 404433 - DNA, 33 bp, Homo sapien
caatccaaatattttacagcatgcgtacaagga

SEQ ID NO: 404434 - DNA, 33 bp, Homo sapien
caatccaaatattttatagcatgcgtacaagga

SEQ ID NO: 404435 - DNA, 33 bp, Homo sapien
aatttttgcggaaaacaatgtgggtgatgtatg

SEQ ID NO: 404436 - DNA, 33 bp, Homo sapien
aatttttgcggaaaacgatgtgggtgatgtatg

SEQ ID NO: 404437 - DNA, 33 bp, Homo sapien
ttatgagctggctgccacatagagacagtggcc

SEQ ID NO: 404438 - DNA, 33 bp, Homo sapien
ttatgagctggctgccgcatagagacagtggcc

SEQ ID NO: 404439 - DNA, 33 bp, Homo sapien
tgtaaatgcccatttacagatgctttggtcaga

SEQ ID NO: 404440 - DNA, 33 bp, Homo sapien
tgtaaatgcccatttatagatgctttggtcaga

SEQ ID NO: 404441 - DNA, 33 bp, Homo sapien
cacacttttaaatgaccagaccgcacgtggact

SEQ ID NO: 404442 - DNA, 33 bp, Homo sapien
cacacttttaaatgacgagaccgcacgtggact

SEQ ID NO: 404443 - DNA, 33 bp, Homo sapien
tcttgcaaagtcaccaatcagaggtggagacta

SEQ ID NO: 404444 - DNA, 33 bp, Homo sapien
tcttgcaaagtcaccagtcagaggtggagacta

SEQ ID NO: 404445 - DNA, 33 bp, Homo sapien
ctgacctcagaaaccacgtaagctcctaaatga

SEQ ID NO: 404446 - DNA, 33 bp, Homo sapien
ctgacctcagaaaccatgtaagctcctaaatga

SEQ ID NO: 404447 - DNA, 33 bp, Homo sapien
acacaaaagtggaacacggcgcctccatcaata

SEQ ID NO: 404448 - DNA, 33 bp, Homo sapien
acacaaaagtggaacatggcgcctccatcaata

SEQ ID NO: 404449 - DNA, 33 bp, Homo sapien
aggtaacccaactgaacagtgaagggtggactc

SEQ ID NO: 404450 - DNA, 33 bp, Homo sapien
aggtaacccaactgaatagtgaagggtggactc

SEQ ID NO: 404451 - DNA, 33 bp, Homo sapien
ggtcacgtgggaagacagtcaaccagctgcagt

SEQ ID NO: 404452 - DNA, 33 bp, Homo sapien
ggtcacgtgggaagacggtcaaccagctgcagt

SEQ ID NO: 404453 - DNA, 33 bp, Homo sapien
atttgcagatatgacaatacacatgagatccca

SEQ ID NO: 404454 - DNA, 33 bp, Homo sapien
atttgcagatatgacagtacacatgagatccca

SEQ ID NO: 404455 - DNA, 33 bp, Homo sapien
tggaatgcgttcggtacctttctttttagcaag

SEQ ID NO: 404456 - DNA, 33 bp, Homo sapien
tggaatgcgttcggtagctttctttttagcaag

SEQ ID NO: 404457 - DNA, 33 bp, Homo sapien
atcagattcaatttcacatcagcctgagtccca

SEQ ID NO: 404458 - DNA, 33 bp, Homo sapien
atcagattcaatttcagatcagcctgagtccca

SEQ ID NO: 404459 - DNA, 33 bp, Homo sapien
attatcaccacctatgaattcttttaaaggacc

SEQ ID NO: 404460 - DNA, 33 bp, Homo sapien
attatcaccacctatggattcttttaaaggacc

SEQ ID NO: 404461 - DNA, 33 bp, Homo sapien
tttacagctaaggagaacagtacactggaccca

SEQ ID NO: 404462 - DNA, 33 bp, Homo sapien
tttacagctaaggagaccagtacactggaccca

SEQ ID NO: 404463 - DNA, 33 bp, Homo sapien
aaactgggtgctttccaaagtctctcccagctc

SEQ ID NO: 404464 - DNA, 33 bp, Homo sapien
aaactgggtgctttccgaagtctctcccagctc

SEQ ID NO: 404465 - DNA, 33 bp, Homo sapien
attgccatgtaagtgacaactattgttgattta

SEQ ID NO: 404466 - DNA, 33 bp, Homo sapien
attgccatgtaagtgataactattgttgattta

SEQ ID NO: 404467 - DNA, 33 bp, Homo sapien
ttctatcctggaacacagccctaccgtccccaa

SEQ ID NO: 404468 - DNA, 33 bp, Homo sapien
ttctatcctggaacaccgccctaccgtccccaa

SEQ ID NO: 404469 - DNA, 33 bp, Homo sapien
tcctgctttcttcatccgaattgcctttctcca

SEQ ID NO: 404470 - DNA, 33 bp, Homo sapien
tcctgctttcttcatctgaattgcctttctcca

SEQ ID NO: 404471 - DNA, 33 bp, Homo sapien
accccctggtctgagaagcattttagttttatg

SEQ ID NO: 404472 - DNA, 33 bp, Homo sapien
accccctggtctgagaggcattttagttttatg

SEQ ID NO: 404473 - DNA, 33 bp, Homo sapien
ccaccctgttctctcaacagactgaaatctctt

SEQ ID NO: 404474 - DNA, 33 bp, Homo sapien
ccaccctgttctctcatcagactgaaatctctt

SEQ ID NO: 404475 - DNA, 33 bp, Homo sapien
ggacacagaactgaaagtgccacttggacaaga

SEQ ID NO: 404476 - DNA, 33 bp, Homo sapien
ggacacagaactgaaattgccacttggacaaga

SEQ ID NO: 404477 - DNA, 33 bp, Homo sapien
atagcatctgcttttaaaaggagctgacatttt

SEQ ID NO: 404478 - DNA, 33 bp, Homo sapien
atagcatctgcttttagaaggagctgacatttt

SEQ ID NO: 404479 - DNA, 33 bp, Homo sapien
agaacaaggcagaagcagagacacacaggtgct

SEQ ID NO: 404480 - DNA, 33 bp, Homo sapien
agaacaaggcagaagcggagacacacaggtgct

SEQ ID NO: 404481 - DNA, 33 bp, Homo sapien
gagaagcacaagaagaaagccaggattagaaaa

SEQ ID NO: 404482 - DNA, 33 bp, Homo sapien
gagaagcacaagaagagagccaggattagaaaa

SEQ ID NO: 404483 - DNA, 33 bp, Homo sapien
tcaacaaacctgaaacagacatagacaaggaga

SEQ ID NO: 404484 - DNA, 33 bp, Homo sapien
tcaacaaacctgaaacggacatagacaaggaga

SEQ ID NO: 404485 - DNA, 33 bp, Homo sapien
cccttctctaattggccgatgtcaatggaaggg

SEQ ID NO: 404486 - DNA, 33 bp, Homo sapien
cccttctctaattggctgatgtcaatggaaggg

SEQ ID NO: 404487 - DNA, 33 bp, Homo sapien
ggatgcgccataaatacgtgatgaattgaatga

SEQ ID NO: 404488 - DNA, 33 bp, Homo sapien
ggatgcgccataaatatgtgatgaattgaatga

SEQ ID NO: 404489 - DNA, 33 bp, Homo sapien
gccctgtgcttaggcaatatacaattttagggg

SEQ ID NO: 404490 - DNA, 33 bp, Homo sapien
gccctgtgcttaggcagtatacaattttagggg

SEQ ID NO: 404491 - DNA, 33 bp, Homo sapien
gaaaggagagctaaggaaccacaaggagaagga

SEQ ID NO: 404492 - DNA, 33 bp, Homo sapien
gaaaggagagctaagggaccacaaggagaagga

SEQ ID NO: 404493 - DNA, 33 bp, Homo sapien
gatgaatagacaagcgaatgaatgaagtcaaat

SEQ ID NO: 404494 - DNA, 33 bp, Homo sapien
gatgaatagacaagcggatgaatgaagtcaaat

SEQ ID NO: 404495 - DNA, 33 bp, Homo sapien
gtccagttttcacaggaccaagttggaggctgg

SEQ ID NO: 404496 - DNA, 33 bp, Homo sapien
gtccagttttcacagggccaagttggaggctgg

SEQ ID NO: 404497 - DNA, 33 bp, Homo sapien
cattgtcagcaaaagcaagggagacaatgcttg

SEQ ID NO: 404498 - DNA, 33 bp, Homo sapien
cattgtcagcaaaagcgagggagacaatgcttg

SEQ ID NO: 404499 - DNA, 33 bp, Homo sapien
aagtgtaacattacgcagaacaagcagctggga

SEQ ID NO: 404500 - DNA, 33 bp, Homo sapien
aagtgtaacattacgccgaacaagcagctggga

SEQ ID NO: 404501 - DNA, 33 bp, Homo sapien
catctatttactaatccctctgcccacccatgt

SEQ ID NO: 404502 - DNA, 33 bp, Homo sapien
catctatttactaatctctctgcccacccatgt

SEQ ID NO: 404503 - DNA, 33 bp, Homo sapien
tacttcattacttcaccgctcatttgttaattt

SEQ ID NO: 404504 - DNA, 33 bp, Homo sapien
tacttcattacttcactgctcatttgttaattt

SEQ ID NO: 404505 - DNA, 33 bp, Homo sapien
ccctttccttaccacaaagaggagtcacacact

SEQ ID NO: 404506 - DNA, 33 bp, Homo sapien
ccctttccttaccacatagaggagtcacacact

SEQ ID NO: 404507 - DNA, 33 bp, Homo sapien
tctggtgctcctttcaaccctaagaaaccactg

SEQ ID NO: 404508 - DNA, 33 bp, Homo sapien
tctggtgctcctttcagccctaagaaaccactg

SEQ ID NO: 404509 - DNA, 33 bp, Homo sapien
tctgtacaccacactcacgtgacatgcaattta

SEQ ID NO: 404510 - DNA, 33 bp, Homo sapien
tctgtacaccacactcgcgtgacatgcaattta

SEQ ID NO: 404511 - DNA, 33 bp, Homo sapien
gatgctcttgtctacacggtcacactggcctgc

SEQ ID NO: 404512 - DNA, 33 bp, Homo sapien
gatgctcttgtctacatggtcacactggcctgc

SEQ ID NO: 404513 - DNA, 33 bp, Homo sapien
cgttatggcaaaaggcggagctgctgtaagaaa

SEQ ID NO: 404514 - DNA, 33 bp, Homo sapien
cgttatggcaaaaggctgagctgctgtaagaaa

SEQ ID NO: 404515 - DNA, 33 bp, Homo sapien
caaattgtctaaaacacaatagaactacttaaa

SEQ ID NO: 404516 - DNA, 33 bp, Homo sapien
caaattgtctaaaacagaatagaactacttaaa

SEQ ID NO: 404517 - DNA, 33 bp, Homo sapien
atatggtgtatggaaaatcagacggaaaagtgg

SEQ ID NO: 404518 - DNA, 33 bp, Homo sapien
atatggtgtatggaaagtcagacggaaaagtgg

SEQ ID NO: 404519 - DNA, 33 bp, Homo sapien
tctactctgggcaaaacacttaattgattctct

SEQ ID NO: 404520 - DNA, 33 bp, Homo sapien
tctactctgggcaaaatacttaattgattctct

SEQ ID NO: 404521 - DNA, 33 bp, Homo sapien
cactccaaaggtttacagaagatgttcatgtac

SEQ ID NO: 404522 - DNA, 33 bp, Homo sapien
cactccaaaggtttacggaagatgttcatgtac

SEQ ID NO: 404523 - DNA, 33 bp, Homo sapien
gtccagataaagatgaactttcttagccacagc

SEQ ID NO: 404524 - DNA, 33 bp, Homo sapien
gtccagataaagatgacctttcttagccacagc

SEQ ID NO: 404525 - DNA, 33 bp, Homo sapien
gagctttaagtccgcaatcttaactaatgctca

SEQ ID NO: 404526 - DNA, 33 bp, Homo sapien
gagctttaagtccgcagtcttaactaatgctca

SEQ ID NO: 404527 - DNA, 33 bp, Homo sapien
tcccactgtgaatcccaggaactgaacttatcc

SEQ ID NO: 404528 - DNA, 33 bp, Homo sapien
tcccactgtgaatcccgggaactgaacttatcc

SEQ ID NO: 404529 - DNA, 33 bp, Homo sapien
gggggaggcagttctgcagaaagaatctgaagg

SEQ ID NO: 404530 - DNA, 33 bp, Homo sapien
gggggaggcagttctgtagaaagaatctgaagg

SEQ ID NO: 404531 - DNA, 33 bp, Homo sapien
caaccaagagtcctaacagacatgtatggtttg

SEQ ID NO: 404532 - DNA, 33 bp, Homo sapien
caaccaagagtcctaatagacatgtatggtttg

SEQ ID NO: 404533 - DNA, 33 bp, Homo sapien
tagtgagagctccagaacatataaaccaatcac

SEQ ID NO: 404534 - DNA, 33 bp, Homo sapien
tagtgagagctccagagcatataaaccaatcac

SEQ ID NO: 404535 - DNA, 33 bp, Homo sapien
ggaccaactctctggcacagctgatgctccaga

SEQ ID NO: 404536 - DNA, 33 bp, Homo sapien
ggaccaactctctggcgcagctgatgctccaga

SEQ ID NO: 404537 - DNA, 33 bp, Homo sapien
gaaacaacggaactgagtattcaatctgaaggg

SEQ ID NO: 404538 - DNA, 33 bp, Homo sapien
gaaacaacggaactgattattcaatctgaaggg

SEQ ID NO: 404539 - DNA, 33 bp, Homo sapien
gctctgttgatgtcaacggatacatacgtcttt

SEQ ID NO: 404540 - DNA, 33 bp, Homo sapien
gctctgttgatgtcaatggatacatacgtcttt

SEQ ID NO: 404541 - DNA, 33 bp, Homo sapien
aagctacattcagcccacgtgtaggtgctccag

SEQ ID NO: 404542 - DNA, 33 bp, Homo sapien
aagctacattcagcccgcgtgtaggtgctccag

SEQ ID NO: 404543 - DNA, 33 bp, Homo sapien
gctgtaagtactagaacggaagaacagtgtgct

SEQ ID NO: 404544 - DNA, 33 bp, Homo sapien
gctgtaagtactagaatggaagaacagtgtgct

SEQ ID NO: 404545 - DNA, 33 bp, Homo sapien
gggcgccccctccttccacttcaacatctgatg

SEQ ID NO: 404546 - DNA, 33 bp, Homo sapien
gggcgccccctccttctacttcaacatctgatg

SEQ ID NO: 404547 - DNA, 33 bp, Homo sapien
tctccgaacttgacccactgctaatacctccag

SEQ ID NO: 404548 - DNA, 33 bp, Homo sapien
tctccgaacttgacccgctgctaatacctccag

SEQ ID NO: 404549 - DNA, 33 bp, Homo sapien
gtgttgctcttaggaaagttcagcccatctcta

SEQ ID NO: 404550 - DNA, 33 bp, Homo sapien
gtgttgctcttaggaaggttcagcccatctcta

SEQ ID NO: 404551 - DNA, 33 bp, Homo sapien
agaaatcaaccacagaaaaagcaagctatcaaa

SEQ ID NO: 404552 - DNA, 33 bp, Homo sapien
agaaatcaaccacagagaaagcaagctatcaaa

SEQ ID NO: 404553 - DNA, 33 bp, Homo sapien
ttccgtatatcttgtaaagggcctgtgttgttc

SEQ ID NO: 404554 - DNA, 33 bp, Homo sapien
ttccgtatatcttgtagagggcctgtgttgttc

SEQ ID NO: 404555 - DNA, 33 bp, Homo sapien
tggcccaggtaacaacaatacagctgcacccca

SEQ ID NO: 404556 - DNA, 33 bp, Homo sapien
tggcccaggtaacaacgatacagctgcacccca

SEQ ID NO: 404557 - DNA, 33 bp, Homo sapien
ccccataggaagggctcactcagtgtctcacag

SEQ ID NO: 404558 - DNA, 33 bp, Homo sapien
ccccataggaagggcttactcagtgtctcacag

SEQ ID NO: 404559 - DNA, 33 bp, Homo sapien
agatgagagaatggcccatatatgcacagatag

SEQ ID NO: 404560 - DNA, 33 bp, Homo sapien
agatgagagaatggcctatatatgcacagatag

SEQ ID NO: 404561 - DNA, 33 bp, Homo sapien
aagagaccattgatcaacgaactcagccagaga

SEQ ID NO: 404562 - DNA, 33 bp, Homo sapien
aagagaccattgatcagcgaactcagccagaga

SEQ ID NO: 404563 - DNA, 33 bp, Homo sapien
gtggggtggagaagacaatcttgttgcgtgcgc

SEQ ID NO: 404564 - DNA, 33 bp, Homo sapien
gtggggtggagaagaccatcttgttgcgtgcgc

SEQ ID NO: 404565 - DNA, 33 bp, Homo sapien
cagggggaggtatccaataacgggtccagatac

SEQ ID NO: 404566 - DNA, 33 bp, Homo sapien
cagggggaggtatccagtaacgggtccagatac

SEQ ID NO: 404567 - DNA, 33 bp, Homo sapien
gaaggcccctgttgagaacactattctgggtct

SEQ ID NO: 404568 - DNA, 33 bp, Homo sapien
gaaggcccctgttgaggacactattctgggtct

SEQ ID NO: 404569 - DNA, 33 bp, Homo sapien
aaacagacaaaatcccgggccatcgtgaagctt

SEQ ID NO: 404570 - DNA, 33 bp, Homo sapien
aaacagacaaaatccctggccatcgtgaagctt

SEQ ID NO: 404571 - DNA, 33 bp, Homo sapien
tgaagtaccctcacacacatgcccatcacctgc

SEQ ID NO: 404572 - DNA, 33 bp, Homo sapien
tgaagtaccctcacacgcatgcccatcacctgc

SEQ ID NO: 404573 - DNA, 33 bp, Homo sapien
ctaggacaaagcaggtaaaatatctggggacga

SEQ ID NO: 404574 - DNA, 33 bp, Homo sapien
ctaggacaaagcaggtcaaatatctggggacga

SEQ ID NO: 404575 - DNA, 33 bp, Homo sapien
atgcattgcaccatcacaaaattcctcccagtt

SEQ ID NO: 404576 - DNA, 33 bp, Homo sapien
atgcattgcaccatcagaaaattcctcccagtt

SEQ ID NO: 404577 - DNA, 33 bp, Homo sapien
ttgtctaaagtccctgaaaattcctcccatggc

SEQ ID NO: 404578 - DNA, 33 bp, Homo sapien
ttgtctaaagtccctggaaattcctcccatggc

SEQ ID NO: 404579 - DNA, 33 bp, Homo sapien
ctcagtaggccttgaagcaggtgaatgaatcag

SEQ ID NO: 404580 - DNA, 33 bp, Homo sapien
ctcagtaggccttgaatcaggtgaatgaatcag

SEQ ID NO: 404581 - DNA, 33 bp, Homo sapien
ctactttacttgtccacgaggagaggcacagcc

SEQ ID NO: 404582 - DNA, 33 bp, Homo sapien
ctactttacttgtccatgaggagaggcacagcc

SEQ ID NO: 404583 - DNA, 33 bp, Homo sapien
aatgcttccaagtgaaagctaatcagagcacgg

SEQ ID NO: 404584 - DNA, 33 bp, Homo sapien
aatgcttccaagtgaaggctaatcagagcacgg

SEQ ID NO: 404585 - DNA, 33 bp, Homo sapien
aggttgcctttgcatgcagaacagggtacaaga

SEQ ID NO: 404586 - DNA, 33 bp, Homo sapien
aggttgcctttgcatggagaacagggtacaaga

SEQ ID NO: 404587 - DNA, 33 bp, Homo sapien
caaatttgcaggcaaaagagggggcagtcgata

SEQ ID NO: 404588 - DNA, 33 bp, Homo sapien
caaatttgcaggcaaaggagggggcagtcgata

SEQ ID NO: 404589 - DNA, 33 bp, Homo sapien
gtttggcactttgacacgctgagtactttgaac

SEQ ID NO: 404590 - DNA, 33 bp, Homo sapien
gtttggcactttgacatgctgagtactttgaac

SEQ ID NO: 404591 - DNA, 33 bp, Homo sapien
tgattcccagcttgtcacttgggcaggtcactc

SEQ ID NO: 404592 - DNA, 33 bp, Homo sapien
tgattcccagcttgtcgcttgggcaggtcactc

SEQ ID NO: 404593 - DNA, 33 bp, Homo sapien
catccccagtctccaactctagagctctctcca

SEQ ID NO: 404594 - DNA, 33 bp, Homo sapien
catccccagtctccaagtctagagctctctcca

SEQ ID NO: 404595 - DNA, 33 bp, Homo sapien
cccatgactttattaacaccctgcatacaatgt

SEQ ID NO: 404596 - DNA, 33 bp, Homo sapien
cccatgactttattaataccctgcatacaatgt

SEQ ID NO: 404597 - DNA, 33 bp, Homo sapien
ttctgttagcactggaagagaatgtgggtttct

SEQ ID NO: 404598 - DNA, 33 bp, Homo sapien
ttctgttagcactggatgagaatgtgggtttct

SEQ ID NO: 404599 - DNA, 33 bp, Homo sapien
ctgggaggctagtcacacaatagctttgtagac

SEQ ID NO: 404600 - DNA, 33 bp, Homo sapien
ctgggaggctagtcacgcaatagctttgtagac

SEQ ID NO: 404601 - DNA, 33 bp, Homo sapien
actcactcatcgaacactaattatatgccacat

SEQ ID NO: 404602 - DNA, 33 bp, Homo sapien
actcactcatcgaacattaattatatgccacat

SEQ ID NO: 404603 - DNA, 33 bp, Homo sapien
agatccacacagctaactggcagcagaatcagg

SEQ ID NO: 404604 - DNA, 33 bp, Homo sapien
agatccacacagctaattggcagcagaatcagg

SEQ ID NO: 404605 - DNA, 33 bp, Homo sapien
gctcactttctttctaaagcttgacagagatgg

SEQ ID NO: 404606 - DNA, 33 bp, Homo sapien
gctcactttctttctatagcttgacagagatgg

SEQ ID NO: 404607 - DNA, 33 bp, Homo sapien
gttggattctccccccaacggtaatcagcctag

SEQ ID NO: 404608 - DNA, 33 bp, Homo sapien
gttggattctcccccccacggtaatcagcctag

SEQ ID NO: 404609 - DNA, 33 bp, Homo sapien
tcctatgtcagggatacgcacgtgtaagtgtgt

SEQ ID NO: 404610 - DNA, 33 bp, Homo sapien
tcctatgtcagggatatgcacgtgtaagtgtgt

SEQ ID NO: 404611 - DNA, 33 bp, Homo sapien
gctttagacttgagtcagaagtgtgagaaaggg

SEQ ID NO: 404612 - DNA, 33 bp, Homo sapien
gctttagacttgagtcggaagtgtgagaaaggg

SEQ ID NO: 404613 - DNA, 33 bp, Homo sapien
tgattgcctgtttttcaaagtatctgcatttgg

SEQ ID NO: 404614 - DNA, 33 bp, Homo sapien
tgattgcctgtttttccaagtatctgcatttgg

SEQ ID NO: 404615 - DNA, 33 bp, Homo sapien
tacttttcagaaactaaatgaatatctccttcc

SEQ ID NO: 404616 - DNA, 33 bp, Homo sapien
tacttttcagaaactacatgaatatctccttcc

SEQ ID NO: 404617 - DNA, 33 bp, Homo sapien
tgacttgcattgattacgaaaacattaattgaa

SEQ ID NO: 404618 - DNA, 33 bp, Homo sapien
tgacttgcattgattatgaaaacattaattgaa

SEQ ID NO: 404619 - DNA, 33 bp, Homo sapien
aagtttctcagttgtaagggcaattgcagttaa

SEQ ID NO: 404620 - DNA, 33 bp, Homo sapien
aagtttctcagttgtaggggcaattgcagttaa

SEQ ID NO: 404621 - DNA, 33 bp, Homo sapien
atgagaacatatgagacagtattaacagaaagg

SEQ ID NO: 404622 - DNA, 33 bp, Homo sapien
atgagaacatatgagagagtattaacagaaagg

SEQ ID NO: 404623 - DNA, 33 bp, Homo sapien
gaagcaacatacaaaaccctaatgaactcttag

SEQ ID NO: 404624 - DNA, 33 bp, Homo sapien
gaagcaacatacaaaatcctaatgaactcttag

SEQ ID NO: 404625 - DNA, 33 bp, Homo sapien
aaatggacttctgttcccagctactgctatagc

SEQ ID NO: 404626 - DNA, 33 bp, Homo sapien
aaatggacttctgttctcagctactgctatagc

SEQ ID NO: 404627 - DNA, 33 bp, Homo sapien
ctactctttgcctctaacataaaacccagactc

SEQ ID NO: 404628 - DNA, 33 bp, Homo sapien
ctactctttgcctctagcataaaacccagactc

SEQ ID NO: 404629 - DNA, 33 bp, Homo sapien
ccattcctcctgtgaccgagtctgcttgccatc

SEQ ID NO: 404630 - DNA, 33 bp, Homo sapien
ccattcctcctgtgactgagtctgcttgccatc

SEQ ID NO: 404631 - DNA, 33 bp, Homo sapien
cttgtccctctaaagccagagagaagtaaggct

SEQ ID NO: 404632 - DNA, 33 bp, Homo sapien
cttgtccctctaaagcgagagagaagtaaggct

SEQ ID NO: 404633 - DNA, 33 bp, Homo sapien
ctccgagcaagtattacgtgccagtcttccaaa

SEQ ID NO: 404634 - DNA, 33 bp, Homo sapien
ctccgagcaagtattatgtgccagtcttccaaa

SEQ ID NO: 404635 - DNA, 33 bp, Homo sapien
ataattcagaaagagcaaaaagaatcaagtggc

SEQ ID NO: 404636 - DNA, 33 bp, Homo sapien
ataattcagaaagagcgaaaagaatcaagtggc

SEQ ID NO: 404637 - DNA, 33 bp, Homo sapien
ttttaacataaatgaaactgctgagctcaggat

SEQ ID NO: 404638 - DNA, 33 bp, Homo sapien
ttttaacataaatgaatctgctgagctcaggat

SEQ ID NO: 404639 - DNA, 33 bp, Homo sapien
tcccggtgagctctcacgtaagagtaatgaagt

SEQ ID NO: 404640 - DNA, 33 bp, Homo sapien
tcccggtgagctctcatgtaagagtaatgaagt

SEQ ID NO: 404641 - DNA, 33 bp, Homo sapien
gagcacagccttctccaacatttggttcaggtt

SEQ ID NO: 404642 - DNA, 33 bp, Homo sapien
gagcacagccttctccgacatttggttcaggtt

SEQ ID NO: 404643 - DNA, 33 bp, Homo sapien
atggtgtcagtgtacaagtactggcctcagggg

SEQ ID NO: 404644 - DNA, 33 bp, Homo sapien
atggtgtcagtgtacacgtactggcctcagggg

SEQ ID NO: 404645 - DNA, 33 bp, Homo sapien
ccacaaagctaggcaacagtggagttgtgattt

SEQ ID NO: 404646 - DNA, 33 bp, Homo sapien
ccacaaagctaggcaatagtggagttgtgattt

SEQ ID NO: 404647 - DNA, 33 bp, Homo sapien
gccgacaatttttcctcactcgtctaggaagag

SEQ ID NO: 404648 - DNA, 33 bp, Homo sapien
gccgacaatttttccttactcgtctaggaagag

SEQ ID NO: 404649 - DNA, 33 bp, Homo sapien
agtagagcctttgtaacaatggtctaatatgct

SEQ ID NO: 404650 - DNA, 33 bp, Homo sapien
agtagagcctttgtaataatggtctaatatgct

SEQ ID NO: 404651 - DNA, 33 bp, Homo sapien
tcagcaacaatagttacagacaaagacagcagg

SEQ ID NO: 404652 - DNA, 33 bp, Homo sapien
tcagcaacaatagttatagacaaagacagcagg

SEQ ID NO: 404653 - DNA, 33 bp, Homo sapien
ctaataatggaccaataaagaactacactcaga

SEQ ID NO: 404654 - DNA, 33 bp, Homo sapien
ctaataatggaccaatgaagaactacactcaga

SEQ ID NO: 404655 - DNA, 33 bp, Homo sapien
tctataaaacctcaaccgattagtatgttcagc

SEQ ID NO: 404656 - DNA, 33 bp, Homo sapien
tctataaaacctcaactgattagtatgttcagc

SEQ ID NO: 404657 - DNA, 33 bp, Homo sapien
gaagtaaattggatagcaagatcactgttagtg

SEQ ID NO: 404658 - DNA, 33 bp, Homo sapien
gaagtaaattggatagtaagatcactgttagtg

SEQ ID NO: 404659 - DNA, 33 bp, Homo sapien
atgtatttagctgatacgcactgttcttgtcta

SEQ ID NO: 404660 - DNA, 33 bp, Homo sapien
atgtatttagctgataggcactgttcttgtcta

SEQ ID NO: 404661 - DNA, 33 bp, Homo sapien
tagtgttctgtgatcacgtgaaggagctcaaaa

SEQ ID NO: 404662 - DNA, 33 bp, Homo sapien
tagtgttctgtgatcatgtgaaggagctcaaaa

SEQ ID NO: 404663 - DNA, 33 bp, Homo sapien
gtctaccattaatgaacagattgtggacctgat

SEQ ID NO: 404664 - DNA, 33 bp, Homo sapien
gtctaccattaatgaatagattgtggacctgat

SEQ ID NO: 404665 - DNA, 33 bp, Homo sapien
atggctctttgagaacaaacagtatagaaacag

SEQ ID NO: 404666 - DNA, 33 bp, Homo sapien
atggctctttgagaacgaacagtatagaaacag

SEQ ID NO: 404667 - DNA, 33 bp, Homo sapien
tcaatagttaattgaacagaatcaccagtggct

SEQ ID NO: 404668 - DNA, 33 bp, Homo sapien
tcaatagttaattgaatagaatcaccagtggct

SEQ ID NO: 404669 - DNA, 33 bp, Homo sapien
caaagagcattaagtacagcgtgtagttctcta

SEQ ID NO: 404670 - DNA, 33 bp, Homo sapien
caaagagcattaagtatagcgtgtagttctcta

SEQ ID NO: 404671 - DNA, 33 bp, Homo sapien
ttttgaactttacagacctactggtagtagtaa

SEQ ID NO: 404672 - DNA, 33 bp, Homo sapien
ttttgaactttacagagctactggtagtagtaa

SEQ ID NO: 404673 - DNA, 33 bp, Homo sapien
aggaaacctgataggactttagccttttacctg

SEQ ID NO: 404674 - DNA, 33 bp, Homo sapien
aggaaacctgataggattttagccttttacctg

SEQ ID NO: 404675 - DNA, 33 bp, Homo sapien
aaagatactaagatccaaggaaagaataatcca

SEQ ID NO: 404676 - DNA, 33 bp, Homo sapien
aaagatactaagatccgaggaaagaataatcca

SEQ ID NO: 404677 - DNA, 33 bp, Homo sapien
cttagagatcctcttacgtttactgggtctcat

SEQ ID NO: 404678 - DNA, 33 bp, Homo sapien
cttagagatcctcttatgtttactgggtctcat

SEQ ID NO: 404679 - DNA, 33 bp, Homo sapien
caaggacaaaggtagacgtgagaaactgttaat

SEQ ID NO: 404680 - DNA, 33 bp, Homo sapien
caaggacaaaggtagatgtgagaaactgttaat

SEQ ID NO: 404681 - DNA, 33 bp, Homo sapien
tatacaggacagaataactactgcagatggatt

SEQ ID NO: 404682 - DNA, 33 bp, Homo sapien
tatacaggacagaatatctactgcagatggatt

SEQ ID NO: 404683 - DNA, 33 bp, Homo sapien
tgatgtataaattcgaaagcctagacctcaaga

SEQ ID NO: 404684 - DNA, 33 bp, Homo sapien
tgatgtataaattcgagagcctagacctcaaga

SEQ ID NO: 404685 - DNA, 33 bp, Homo sapien
gaatcctgactgtaacaccttggcctcatttct

SEQ ID NO: 404686 - DNA, 33 bp, Homo sapien
gaatcctgactgtaaccccttggcctcatttct

SEQ ID NO: 404687 - DNA, 33 bp, Homo sapien
cctgcaagggaatacaatataattcattcttaa

SEQ ID NO: 404688 - DNA, 33 bp, Homo sapien
cctgcaagggaatacagtataattcattcttaa

SEQ ID NO: 404689 - DNA, 33 bp, Homo sapien
cactatagtcaacctcaatacagattcctgtgt

SEQ ID NO: 404690 - DNA, 33 bp, Homo sapien
cactatagtcaacctcgatacagattcctgtgt

SEQ ID NO: 404691 - DNA, 33 bp, Homo sapien
gtactggggtcaataccggagatagaatcaacc

SEQ ID NO: 404692 - DNA, 33 bp, Homo sapien
gtactggggtcaatactggagatagaatcaacc

SEQ ID NO: 404693 - DNA, 33 bp, Homo sapien
caattagctaagtttacagaatgcactccagag

SEQ ID NO: 404694 - DNA, 33 bp, Homo sapien
caattagctaagtttatagaatgcactccagag

SEQ ID NO: 404695 - DNA, 33 bp, Homo sapien
caggaaagctaaatgaaaaatgctaagaaagtc

SEQ ID NO: 404696 - DNA, 33 bp, Homo sapien
caggaaagctaaatgagaaatgctaagaaagtc

SEQ ID NO: 404697 - DNA, 33 bp, Homo sapien
tcaatattataattcaaacgttgagaataacca

SEQ ID NO: 404698 - DNA, 33 bp, Homo sapien
tcaatattataattcacacgttgagaataacca

SEQ ID NO: 404699 - DNA, 33 bp, Homo sapien
gactcacaaattacaccagaacaatcgtgcata

SEQ ID NO: 404700 - DNA, 33 bp, Homo sapien
gactcacaaattacacgagaacaatcgtgcata

SEQ ID NO: 404701 - DNA, 33 bp, Homo sapien
aactggcaaaactagaaacaccgactggcttcc

SEQ ID NO: 404702 - DNA, 33 bp, Homo sapien
aactggcaaaactagagacaccgactggcttcc

SEQ ID NO: 404703 - DNA, 33 bp, Homo sapien
gttattattaattttcaacacacagctaccatg

SEQ ID NO: 404704 - DNA, 33 bp, Homo sapien
gttattattaattttcgacacacagctaccatg

SEQ ID NO: 404705 - DNA, 33 bp, Homo sapien
gaaagattcagaaaaacaggagaaaagttggac

SEQ ID NO: 404706 - DNA, 33 bp, Homo sapien
gaaagattcagaaaaataggagaaaagttggac

SEQ ID NO: 404707 - DNA, 33 bp, Homo sapien
cccttgggcaaatctacgtgctctctgagagtc

SEQ ID NO: 404708 - DNA, 33 bp, Homo sapien
cccttgggcaaatctatgtgctctctgagagtc

SEQ ID NO: 404709 - DNA, 33 bp, Homo sapien
ctcttggtccagaactaaggcctacatgcatcc

SEQ ID NO: 404710 - DNA, 33 bp, Homo sapien
ctcttggtccagaactgaggcctacatgcatcc

SEQ ID NO: 404711 - DNA, 33 bp, Homo sapien
aaacatgagatgtcccaggagataaaacctatg

SEQ ID NO: 404712 - DNA, 33 bp, Homo sapien
aaacatgagatgtcccgggagataaaacctatg

SEQ ID NO: 404713 - DNA, 33 bp, Homo sapien
gccctttcattcataactaactgaaaaggttga

SEQ ID NO: 404714 - DNA, 33 bp, Homo sapien
gccctttcattcataagtaactgaaaaggttga

SEQ ID NO: 404715 - DNA, 33 bp, Homo sapien
aggtagttgaatgctacgatttttgtttttttg

SEQ ID NO: 404716 - DNA, 33 bp, Homo sapien
aggtagttgaatgctatgatttttgtttttttg

SEQ ID NO: 404717 - DNA, 33 bp, Homo sapien
aaagaaaaatccgaacccaaatataaaatagta

SEQ ID NO: 404718 - DNA, 33 bp, Homo sapien
aaagaaaaatccgaactcaaatataaaatagta

SEQ ID NO: 404719 - DNA, 33 bp, Homo sapien
ggaaatacttttgatacgaggataacaggtatg

SEQ ID NO: 404720 - DNA, 33 bp, Homo sapien
ggaaatacttttgatatgaggataacaggtatg

SEQ ID NO: 404721 - DNA, 33 bp, Homo sapien
caagtgattacttttccacctcctttggtattt

SEQ ID NO: 404722 - DNA, 33 bp, Homo sapien
caagtgattacttttctacctcctttggtattt

SEQ ID NO: 404723 - DNA, 33 bp, Homo sapien
tgacactgattagtcacagtgtaaatgtctcta

SEQ ID NO: 404724 - DNA, 33 bp, Homo sapien
tgacactgattagtcagagtgtaaatgtctcta

SEQ ID NO: 404725 - DNA, 33 bp, Homo sapien
tcagaatgtatttcaaatgtatactgcaagtga

SEQ ID NO: 404726 - DNA, 33 bp, Homo sapien
tcagaatgtatttcaagtgtatactgcaagtga

SEQ ID NO: 404727 - DNA, 33 bp, Homo sapien
catttctgcttatttcaataaaatatgagtaag

SEQ ID NO: 404728 - DNA, 33 bp, Homo sapien
catttctgcttatttccataaaatatgagtaag

SEQ ID NO: 404729 - DNA, 33 bp, Homo sapien
ttgcttggcaagaaaaccaactcagaggcctta

SEQ ID NO: 404730 - DNA, 33 bp, Homo sapien
ttgcttggcaagaaaatcaactcagaggcctta

SEQ ID NO: 404731 - DNA, 33 bp, Homo sapien
atagctaaaacacactaagtacttaccatattt

SEQ ID NO: 404732 - DNA, 33 bp, Homo sapien
atagctaaaacacactgagtacttaccatattt

SEQ ID NO: 404733 - DNA, 33 bp, Homo sapien
atgcactgttaataaccctgataatagagataa

SEQ ID NO: 404734 - DNA, 33 bp, Homo sapien
atgcactgttaataactctgataatagagataa

SEQ ID NO: 404735 - DNA, 33 bp, Homo sapien
ccacactgcacttaacacttacatctctcaaat

SEQ ID NO: 404736 - DNA, 33 bp, Homo sapien
ccacactgcacttaacgcttacatctctcaaat

SEQ ID NO: 404737 - DNA, 33 bp, Homo sapien
aaatattccagcataaagaatttgtctatcaat

SEQ ID NO: 404738 - DNA, 33 bp, Homo sapien
aaatattccagcataatgaatttgtctatcaat

SEQ ID NO: 404739 - DNA, 33 bp, Homo sapien
tgtgaatgcacagttgaaaatgttgaatatgtg

SEQ ID NO: 404740 - DNA, 33 bp, Homo sapien
tgtgaatgcacagttgtaaatgttgaatatgtg

SEQ ID NO: 404741 - DNA, 33 bp, Homo sapien
tgctgaacgaatgaatcaatcaataaccactca

SEQ ID NO: 404742 - DNA, 33 bp, Homo sapien
tgctgaacgaatgaatgaatcaataaccactca

SEQ ID NO: 404743 - DNA, 33 bp, Homo sapien
gccaagaatgcaaaacactaatcataatgacag

SEQ ID NO: 404744 - DNA, 33 bp, Homo sapien
gccaagaatgcaaaacgctaatcataatgacag

SEQ ID NO: 404745 - DNA, 33 bp, Homo sapien
tctcatgacaaacttacaaagtaccgttacttc

SEQ ID NO: 404746 - DNA, 33 bp, Homo sapien
tctcatgacaaacttataaagtaccgttacttc

SEQ ID NO: 404747 - DNA, 33 bp, Homo sapien
tggggcacagtgggggaagaatgcacagacact

SEQ ID NO: 404748 - DNA, 33 bp, Homo sapien
tggggcacagtgggggcagaatgcacagacact

SEQ ID NO: 404749 - DNA, 33 bp, Homo sapien
ctgctactaaaagttcaaatcagtccatccatc

SEQ ID NO: 404750 - DNA, 33 bp, Homo sapien
ctgctactaaaagttcgaatcagtccatccatc

SEQ ID NO: 404751 - DNA, 33 bp, Homo sapien
aaaaacttgccctaggccattgatgctgaaact

SEQ ID NO: 404752 - DNA, 33 bp, Homo sapien
aaaaacttgccctaggtcattgatgctgaaact

SEQ ID NO: 404753 - DNA, 33 bp, Homo sapien
aagtattatcaagtcaaagcttccttgggccat

SEQ ID NO: 404754 - DNA, 33 bp, Homo sapien
aagtattatcaagtcagagcttccttgggccat

SEQ ID NO: 404755 - DNA, 33 bp, Homo sapien
ttctagattttttgggacagttttggcaggaag

SEQ ID NO: 404756 - DNA, 33 bp, Homo sapien
ttctagattttttgggtcagttttggcaggaag

SEQ ID NO: 404757 - DNA, 33 bp, Homo sapien
caggtaaaatgtggaggatatttgtctaaatat

SEQ ID NO: 404758 - DNA, 33 bp, Homo sapien
caggtaaaatgtggagtatatttgtctaaatat

SEQ ID NO: 404759 - DNA, 33 bp, Homo sapien
actaatcctaagagaacgttatcagataattta

SEQ ID NO: 404760 - DNA, 33 bp, Homo sapien
actaatcctaagagaatgttatcagataattta

SEQ ID NO: 404761 - DNA, 33 bp, Homo sapien
aacccatgttattgtcaaaaactcaccaactgt

SEQ ID NO: 404762 - DNA, 33 bp, Homo sapien
aacccatgttattgtcgaaaactcaccaactgt

SEQ ID NO: 404763 - DNA, 33 bp, Homo sapien
aaaacttgtagaaatacagtaacacaaccagca

SEQ ID NO: 404764 - DNA, 33 bp, Homo sapien
aaaacttgtagaaatatagtaacacaaccagca

SEQ ID NO: 404765 - DNA, 33 bp, Homo sapien
caatagccctaaccaaccagggacatacatgaa

SEQ ID NO: 404766 - DNA, 33 bp, Homo sapien
caatagccctaaccaatcagggacatacatgaa

SEQ ID NO: 404767 - DNA, 33 bp, Homo sapien
gagaggttaagttgtgcaaagctatagtggtgg

SEQ ID NO: 404768 - DNA, 33 bp, Homo sapien
gagaggttaagttgtgtaaagctatagtggtgg

SEQ ID NO: 404769 - DNA, 33 bp, Homo sapien
acaatgatgaaaagtaaagttccttcctactgt

SEQ ID NO: 404770 - DNA, 33 bp, Homo sapien
acaatgatgaaaagtagagttccttcctactgt

SEQ ID NO: 404771 - DNA, 33 bp, Homo sapien
cactctgttgaagtgaaaacttgagctaagagg

SEQ ID NO: 404772 - DNA, 33 bp, Homo sapien
cactctgttgaagtgataacttgagctaagagg

SEQ ID NO: 404773 - DNA, 33 bp, Homo sapien
ggcaagtattttgcctaaacagaagactctgcc

SEQ ID NO: 404774 - DNA, 33 bp, Homo sapien
ggcaagtattttgccttaacagaagactctgcc

SEQ ID NO: 404775 - DNA, 33 bp, Homo sapien
aggtttagttattgtccgaatgagatagtttcc

SEQ ID NO: 404776 - DNA, 33 bp, Homo sapien
aggtttagttattgtctgaatgagatagtttcc

SEQ ID NO: 404777 - DNA, 33 bp, Homo sapien
gtgctttctagttggcaaatgtccctcttgaaa

SEQ ID NO: 404778 - DNA, 33 bp, Homo sapien
gtgctttctagttggccaatgtccctcttgaaa

SEQ ID NO: 404779 - DNA, 33 bp, Homo sapien
ccatataccatacagaagaacaaaaacgttacc

SEQ ID NO: 404780 - DNA, 33 bp, Homo sapien
ccatataccatacagatgaacaaaaacgttacc

SEQ ID NO: 404781 - DNA, 33 bp, Homo sapien
actccagaagaaaggaagatggacctgtcttct

SEQ ID NO: 404782 - DNA, 33 bp, Homo sapien
actccagaagaaaggaggatggacctgtcttct

SEQ ID NO: 404783 - DNA, 33 bp, Homo sapien
tcttgccgtcatgctcccagtgtctgtgtaggc

SEQ ID NO: 404784 - DNA, 33 bp, Homo sapien
tcttgccgtcatgctcgcagtgtctgtgtaggc

SEQ ID NO: 404785 - DNA, 33 bp, Homo sapien
cacacagtaggatgtcaataaatgttagctctt

SEQ ID NO: 404786 - DNA, 33 bp, Homo sapien
cacacagtaggatgtcgataaatgttagctctt

SEQ ID NO: 404787 - DNA, 33 bp, Homo sapien
caagcatcactgcctcaagttcttacgtcgacc

SEQ ID NO: 404788 - DNA, 33 bp, Homo sapien
caagcatcactgcctcgagttcttacgtcgacc

SEQ ID NO: 404789 - DNA, 33 bp, Homo sapien
agatctgcctaactcccaggtcgatgctcccaa

SEQ ID NO: 404790 - DNA, 33 bp, Homo sapien
agatctgcctaactcctaggtcgatgctcccaa

SEQ ID NO: 404791 - DNA, 33 bp, Homo sapien
agttcaacaatgccccgctagtctggaaacaag

SEQ ID NO: 404792 - DNA, 33 bp, Homo sapien
agttcaacaatgcccctctagtctggaaacaag

SEQ ID NO: 404793 - DNA, 33 bp, Homo sapien
ggcattgttgaactcaggcacaaacccactcag

SEQ ID NO: 404794 - DNA, 33 bp, Homo sapien
ggcattgttgaactcatgcacaaacccactcag

SEQ ID NO: 404795 - DNA, 33 bp, Homo sapien
tttggctaagcccaaaaggtatgggtgctttga

SEQ ID NO: 404796 - DNA, 33 bp, Homo sapien
tttggctaagcccaaagggtatgggtgctttga

SEQ ID NO: 404797 - DNA, 33 bp, Homo sapien
gcaataaatctgaacacgccagaaatgaatttg

SEQ ID NO: 404798 - DNA, 33 bp, Homo sapien
gcaataaatctgaacatgccagaaatgaatttg

SEQ ID NO: 404799 - DNA, 33 bp, Homo sapien
gcacagtgaagtaaaacgagggtaaaggtgctg

SEQ ID NO: 404800 - DNA, 33 bp, Homo sapien
gcacagtgaagtaaaatgagggtaaaggtgctg

SEQ ID NO: 404801 - DNA, 33 bp, Homo sapien
atctaaatgcctaagcactctatgtcatccagt

SEQ ID NO: 404802 - DNA, 33 bp, Homo sapien
atctaaatgcctaagcgctctatgtcatccagt

SEQ ID NO: 404803 - DNA, 33 bp, Homo sapien
ctgccacagcctgtagcagagtctgagaccaca

SEQ ID NO: 404804 - DNA, 33 bp, Homo sapien
ctgccacagcctgtaggagagtctgagaccaca

SEQ ID NO: 404805 - DNA, 33 bp, Homo sapien
taagtaacttgcattaagctacacagctggtaa

SEQ ID NO: 404806 - DNA, 33 bp, Homo sapien
taagtaacttgcattaggctacacagctggtaa

SEQ ID NO: 404807 - DNA, 33 bp, Homo sapien
tgaagcagagaagccacgattcctcccaaactc

SEQ ID NO: 404808 - DNA, 33 bp, Homo sapien
tgaagcagagaagccatgattcctcccaaactc

SEQ ID NO: 404809 - DNA, 33 bp, Homo sapien
tataaattggaggacacgggactctagaagatt

SEQ ID NO: 404810 - DNA, 33 bp, Homo sapien
tataaattggaggacatgggactctagaagatt

SEQ ID NO: 404811 - DNA, 33 bp, Homo sapien
gtttattggcttggtcacttttccctgcctatg

SEQ ID NO: 404812 - DNA, 33 bp, Homo sapien
gtttattggcttggtcgcttttccctgcctatg

SEQ ID NO: 404813 - DNA, 33 bp, Homo sapien
acagaaggctagtctcaacccccaaatcctcaa

SEQ ID NO: 404814 - DNA, 33 bp, Homo sapien
acagaaggctagtctccacccccaaatcctcaa

SEQ ID NO: 404815 - DNA, 33 bp, Homo sapien
aagtagacccatgtgacgaagaagaagcccttg

SEQ ID NO: 404816 - DNA, 33 bp, Homo sapien
aagtagacccatgtgatgaagaagaagcccttg

SEQ ID NO: 404817 - DNA, 33 bp, Homo sapien
gttaagtgatagaggcccggctggaaactgggg

SEQ ID NO: 404818 - DNA, 33 bp, Homo sapien
gttaagtgatagaggctcggctggaaactgggg

SEQ ID NO: 404819 - DNA, 33 bp, Homo sapien
ctcctctgagaggataaagattcatgtttgcaa

SEQ ID NO: 404820 - DNA, 33 bp, Homo sapien
ctcctctgagaggatacagattcatgtttgcaa

SEQ ID NO: 404821 - DNA, 33 bp, Homo sapien
tgacagagtggaaaaccgaggttcggagaggac

SEQ ID NO: 404822 - DNA, 33 bp, Homo sapien
tgacagagtggaaaactgaggttcggagaggac

SEQ ID NO: 404823 - DNA, 33 bp, Homo sapien
ctggactactgcaaatcaattatctggacagac

SEQ ID NO: 404824 - DNA, 33 bp, Homo sapien
ctggactactgcaaatgaattatctggacagac

SEQ ID NO: 404825 - DNA, 33 bp, Homo sapien
gctctaagccacatcaaggaagtcaagtccact

SEQ ID NO: 404826 - DNA, 33 bp, Homo sapien
gctctaagccacatcagggaagtcaagtccact

SEQ ID NO: 404827 - DNA, 33 bp, Homo sapien
ggctggaaatcaactcagacttcttgggatgtt

SEQ ID NO: 404828 - DNA, 33 bp, Homo sapien
ggctggaaatcaactcggacttcttgggatgtt

SEQ ID NO: 404829 - DNA, 33 bp, Homo sapien
aagttcagttatttacaccaacctagagctttg

SEQ ID NO: 404830 - DNA, 33 bp, Homo sapien
aagttcagttatttactccaacctagagctttg

SEQ ID NO: 404831 - DNA, 33 bp, Homo sapien
caacctctattaataccaccattactaccacta

SEQ ID NO: 404832 - DNA, 33 bp, Homo sapien
caacctctattaatactaccattactaccacta

SEQ ID NO: 404833 - DNA, 33 bp, Homo sapien
tgacacttactactcaaatgaccttggctcagt

SEQ ID NO: 404834 - DNA, 33 bp, Homo sapien
tgacacttactactcatatgaccttggctcagt

SEQ ID NO: 404835 - DNA, 33 bp, Homo sapien
gctcaccatctaggaacgaaatatgacatgaat

SEQ ID NO: 404836 - DNA, 33 bp, Homo sapien
gctcaccatctaggaaggaaatatgacatgaat

SEQ ID NO: 404837 - DNA, 33 bp, Homo sapien
tactctggtgaatgtacagtgatattatgttat

SEQ ID NO: 404838 - DNA, 33 bp, Homo sapien
tactctggtgaatgtatagtgatattatgttat

SEQ ID NO: 404839 - DNA, 33 bp, Homo sapien
ctttcctttgctctcccattcataagaattgtc

SEQ ID NO: 404840 - DNA, 33 bp, Homo sapien
ctttcctttgctctcctattcataagaattgtc

SEQ ID NO: 404841 - DNA, 33 bp, Homo sapien
tccccagtgttcgttacgtcattcttacgcctt

SEQ ID NO: 404842 - DNA, 33 bp, Homo sapien
tccccagtgttcgttatgtcattcttacgcctt

SEQ ID NO: 404843 - DNA, 33 bp, Homo sapien
atgaagaccaatgaaaacagcttcccaaaaccc

SEQ ID NO: 404844 - DNA, 33 bp, Homo sapien
atgaagaccaatgaaagcagcttcccaaaaccc

SEQ ID NO: 404845 - DNA, 33 bp, Homo sapien
tatctgagttttggtgacaaattaagaagagct

SEQ ID NO: 404846 - DNA, 33 bp, Homo sapien
tatctgagttttggtggcaaattaagaagagct

SEQ ID NO: 404847 - DNA, 33 bp, Homo sapien
cctgtgtggctctccacggtctccacaataaaa

SEQ ID NO: 404848 - DNA, 33 bp, Homo sapien
cctgtgtggctctccatggtctccacaataaaa

SEQ ID NO: 404849 - DNA, 33 bp, Homo sapien
acaggttctcattgtacctcccaggctggagtg

SEQ ID NO: 404850 - DNA, 33 bp, Homo sapien
acaggttctcattgtatctcccaggctggagtg

SEQ ID NO: 404851 - DNA, 33 bp, Homo sapien
ttttatgaaaggagtcaaagccatgtgtctaga

SEQ ID NO: 404852 - DNA, 33 bp, Homo sapien
ttttatgaaaggagtcgaagccatgtgtctaga

SEQ ID NO: 404853 - DNA, 33 bp, Homo sapien
gaatttcccctgacaacgtggcagtagtccctg

SEQ ID NO: 404854 - DNA, 33 bp, Homo sapien
gaatttcccctgacaatgtggcagtagtccctg

SEQ ID NO: 404855 - DNA, 33 bp, Homo sapien
taagagaaaccagacccacttgactgcggtcat

SEQ ID NO: 404856 - DNA, 33 bp, Homo sapien
taagagaaaccagacctacttgactgcggtcat

SEQ ID NO: 404857 - DNA, 33 bp, Homo sapien; identical to SEQ ID NO: 404855

SEQ ID NO: 404858 - DNA, 33 bp, Homo sapien; identical to SEQ ID NO: 404856

SEQ ID NO: 404859 - DNA, 33 bp, Homo sapien
ggcaacacaaagatgacgcaatagtgaattcca

SEQ ID NO: 404860 - DNA, 33 bp, Homo sapien
ggcaacacaaagatgatgcaatagtgaattcca

SEQ ID NO: 404861 - DNA, 33 bp, Homo sapien
tcatcagaacccatgtaaataaatgtcctagaa

SEQ ID NO: 404862 - DNA, 33 bp, Homo sapien
tcatcagaacccatgtgaataaatgtcctagaa

SEQ ID NO: 404863 - DNA, 33 bp, Homo sapien
accaagtactgcagataaattttccaaatgtaa

SEQ ID NO: 404864 - DNA, 33 bp, Homo sapien
accaagtactgcagatgaattttccaaatgtaa

SEQ ID NO: 404865 - DNA, 33 bp, Homo sapien
catgtcacatccagaaagtctttcccatgccat

SEQ ID NO: 404866 - DNA, 33 bp, Homo sapien
catgtcacatccagaacgtctttcccatgccat

SEQ ID NO: 404867 - DNA, 33 bp, Homo sapien
tcccgccaccattgccactgtgcttgtcgactt

SEQ ID NO: 404868 - DNA, 33 bp, Homo sapien
tcccgccaccattgccgctgtgcttgtcgactt

SEQ ID NO: 404869 - DNA, 33 bp, Homo sapien
gcctaagaagactacccaagatccccagctttc

SEQ ID NO: 404870 - DNA, 33 bp, Homo sapien
gcctaagaagactaccgaagatccccagctttc

SEQ ID NO: 404871 - DNA, 33 bp, Homo sapien
tccaacaaagacattacggccagaagtgtgtta

SEQ ID NO: 404872 - DNA, 33 bp, Homo sapien
tccaacaaagacattatggccagaagtgtgtta

SEQ ID NO: 404873 - DNA, 33 bp, Homo sapien
agggtcagtttatgtacgtaaattggtcattcc

SEQ ID NO: 404874 - DNA, 33 bp, Homo sapien
agggtcagtttatgtatgtaaattggtcattcc

SEQ ID NO: 404875 - DNA, 33 bp, Homo sapien
ccccaactgccttcaaagtgagttttccatacc

SEQ ID NO: 404876 - DNA, 33 bp, Homo sapien
ccccaactgccttcaaggtgagttttccatacc

SEQ ID NO: 404877 - DNA, 33 bp, Homo sapien
caggagcatgggaggaagcgaagagcccgtgga

SEQ ID NO: 404878 - DNA, 33 bp, Homo sapien
caggagcatgggaggaggcgaagagcccgtgga

SEQ ID NO: 404879 - DNA, 33 bp, Homo sapien
ccccctcgccttccttaaaacgtctaggtgctg

SEQ ID NO: 404880 - DNA, 33 bp, Homo sapien
ccccctcgccttccttgaaacgtctaggtgctg

SEQ ID NO: 404881 - DNA, 33 bp, Homo sapien
cctggaacgcagagcacgagcaaccagtgatca

SEQ ID NO: 404882 - DNA, 33 bp, Homo sapien
cctggaacgcagagcatgagcaaccagtgatca

SEQ ID NO: 404883 - DNA, 33 bp, Homo sapien
aatattaatgtaaaaacggcccagtctgactgg

SEQ ID NO: 404884 - DNA, 33 bp, Homo sapien
aatattaatgtaaaaatggcccagtctgactgg

SEQ ID NO: 404885 - DNA, 33 bp, Homo sapien
attagctctacctagaaggtcactacaagctga

SEQ ID NO: 404886 - DNA, 33 bp, Homo sapien
attagctctacctagagggtcactacaagctga

SEQ ID NO: 404887 - DNA, 33 bp, Homo sapien
ggactggcacaaaagaatctccctccctcatga

SEQ ID NO: 404888 - DNA, 33 bp, Homo sapien
ggactggcacaaaagagtctccctccctcatga

SEQ ID NO: 404889 - DNA, 33 bp, Homo sapien
catgacatgtatttgcagacactatatgcacac

SEQ ID NO: 404890 - DNA, 33 bp, Homo sapien
catgacatgtatttgcggacactatatgcacac

SEQ ID NO: 404891 - DNA, 33 bp, Homo sapien
gaaggccttggttttccagagcccaaccctaag

SEQ ID NO: 404892 - DNA, 33 bp, Homo sapien
gaaggccttggttttcgagagcccaaccctaag

SEQ ID NO: 404893 - DNA, 33 bp, Homo sapien
ctacgattcataatgacatccgtgtgcacacca

SEQ ID NO: 404894 - DNA, 33 bp, Homo sapien
ctacgattcataatgatatccgtgtgcacacca

SEQ ID NO: 404895 - DNA, 33 bp, Homo sapien
cagttatgaaggagaccaaaagcatgatttcta

SEQ ID NO: 404896 - DNA, 33 bp, Homo sapien
cagttatgaaggagactaaaagcatgatttcta

SEQ ID NO: 404897 - DNA, 33 bp, Homo sapien
tttgcccaacagaaacaacttgggagggtgggg

SEQ ID NO: 404898 - DNA, 33 bp, Homo sapien
tttgcccaacagaaacgacttgggagggtgggg

SEQ ID NO: 404899 - DNA, 33 bp, Homo sapien
aaaaaagaagaggaagcaaccgtgaggccagta

SEQ ID NO: 404900 - DNA, 33 bp, Homo sapien
aaaaaagaagaggaaggaaccgtgaggccagta

SEQ ID NO: 404901 - DNA, 33 bp, Homo sapien
gtacatacctaaagcacagaggtgtcaaatgca

SEQ ID NO: 404902 - DNA, 33 bp, Homo sapien
gtacatacctaaagcatagaggtgtcaaatgca

SEQ ID NO: 404903 - DNA, 33 bp, Homo sapien; identical to SEQ ID NO: 404901

SEQ ID NO: 404904 - DNA, 33 bp, Homo sapien; identical to SEQ ID NO: 404902

SEQ ID NO: 404905 - DNA, 33 bp, Homo sapien
tataaggatgactacagtaaaagcaatggaaca

SEQ ID NO: 404906 - DNA, 33 bp, Homo sapien
tataaggatgactacattaaaagcaatggaaca

SEQ ID NO: 404907 - DNA, 33 bp, Homo sapien
acttaaccaatatgcactgcaggaatgaataaa

SEQ ID NO: 404908 - DNA, 33 bp, Homo sapien
acttaaccaatatgcattgcaggaatgaataaa

SEQ ID NO: 404909 - DNA, 33 bp, Homo sapien
atgagctaatgaagacaggaaagcacgcggcaa

SEQ ID NO: 404910 - DNA, 33 bp, Homo sapien
atgagctaatgaagacgggaaagcacgcggcaa

SEQ ID NO: 404911 - DNA, 33 bp, Homo sapien
aggagggtgctgttgaaaaatggtgacgaggaa

SEQ ID NO: 404912 - DNA, 33 bp, Homo sapien
aggagggtgctgttgagaaatggtgacgaggaa

SEQ ID NO: 404913 - DNA, 33 bp, Homo sapien
ttcatgcagaacttccggatggtgggacatctg

SEQ ID NO: 404914 - DNA, 33 bp, Homo sapien
ttcatgcagaacttcctgatggtgggacatctg

SEQ ID NO: 404915 - DNA, 33 bp, Homo sapien
gggaaagaaagcagacagaacagctgaagtcct

SEQ ID NO: 404916 - DNA, 33 bp, Homo sapien
gggaaagaaagcagacggaacagctgaagtcct

SEQ ID NO: 404917 - DNA, 33 bp, Homo sapien
tctgttgtgctccccaaaataaggtccaaatac

SEQ ID NO: 404918 - DNA, 33 bp, Homo sapien
tctgttgtgctccccagaataaggtccaaatac

SEQ ID NO: 404919 - DNA, 33 bp, Homo sapien
gactatattttttgagcccgagattcaagccac

SEQ ID NO: 404920 - DNA, 33 bp, Homo sapien
gactatattttttgagtccgagattcaagccac

SEQ ID NO: 404921 - DNA, 33 bp, Homo sapien
cagtcacagctttgtgcaggcagaaaaacacaa

SEQ ID NO: 404922 - DNA, 33 bp, Homo sapien
cagtcacagctttgtgtaggcagaaaaacacaa

SEQ ID NO: 404923 - DNA, 33 bp, Homo sapien
aaaccaacacccagagaacaagcctgacccaat

SEQ ID NO: 404924 - DNA, 33 bp, Homo sapien
aaaccaacacccagagtacaagcctgacccaat

SEQ ID NO: 404925 - DNA, 33 bp, Homo sapien
gtttctccttccttaaaatgagccacagtctgt

SEQ ID NO: 404926 - DNA, 33 bp, Homo sapien
gtttctccttccttaacatgagccacagtctgt

SEQ ID NO: 404927 - DNA, 33 bp, Homo sapien
caaaggtgtcagcagaacgaagcatccattttt

SEQ ID NO: 404928 - DNA, 33 bp, Homo sapien
caaaggtgtcagcagagcgaagcatccattttt

SEQ ID NO: 404929 - DNA, 33 bp, Homo sapien
ctggactccagtccccaagtgtaaccagaggca

SEQ ID NO: 404930 - DNA, 33 bp, Homo sapien
ctggactccagtccccgagtgtaaccagaggca

SEQ ID NO: 404931 - DNA, 33 bp, Homo sapien
ctgggtaacttcaaagcctcagcctctcagtgc

SEQ ID NO: 404932 - DNA, 33 bp, Homo sapien
ctgggtaacttcaaagtctcagcctctcagtgc

SEQ ID NO: 404933 - DNA, 33 bp, Homo sapien
agccatttagatcacaccagcaggttcagtaag

SEQ ID NO: 404934 - DNA, 33 bp, Homo sapien
agccatttagatcacatcagcaggttcagtaag

SEQ ID NO: 404935 - DNA, 33 bp, Homo sapien
aacattttggtgagtacagatcaattgcctccc

SEQ ID NO: 404936 - DNA, 33 bp, Homo sapien
aacattttggtgagtatagatcaattgcctccc

SEQ ID NO: 404937 - DNA, 33 bp, Homo sapien
gctggacagtaggagacaagtggttctgcagac

SEQ ID NO: 404938 - DNA, 33 bp, Homo sapien
gctggacagtaggagagaagtggttctgcagac

SEQ ID NO: 404939 - DNA, 33 bp, Homo sapien
gcaagagatacaagatcactgtagaaggacaca

SEQ ID NO: 404940 - DNA, 33 bp, Homo sapien
gcaagagatacaagattactgtagaaggacaca

SEQ ID NO: 404941 - DNA, 33 bp, Homo sapien
taggaatgtaaaatggaatagcccgtttggaaa

SEQ ID NO: 404942 - DNA, 33 bp, Homo sapien
taggaatgtaaaatggtatagcccgtttggaaa

SEQ ID NO: 404943 - DNA, 33 bp, Homo sapien
gcgaaatgcagtgcgcagaccgtatttagattt

SEQ ID NO: 404944 - DNA, 33 bp, Homo sapien
gcgaaatgcagtgcgcggaccgtatttagattt

SEQ ID NO: 404945 - DNA, 33 bp, Homo sapien
ctcccacttcttccaacgcactggcctatctcc

SEQ ID NO: 404946 - DNA, 33 bp, Homo sapien
ctcccacttcttccaatgcactggcctatctcc

SEQ ID NO: 404947 - DNA, 33 bp, Homo sapien
gatggcacgtacacagaatggatattacacacg

SEQ ID NO: 404948 - DNA, 33 bp, Homo sapien
gatggcacgtacacaggatggatattacacacg

SEQ ID NO: 404949 - DNA, 33 bp, Homo sapien
gctagcacgactaataagacgaactcatacatc

SEQ ID NO: 404950 - DNA, 33 bp, Homo sapien
gctagcacgactaatacgacgaactcatacatc

SEQ ID NO: 404951 - DNA, 33 bp, Homo sapien
aagtccgtggtcaccaactgggcctggatcccg

SEQ ID NO: 404952 - DNA, 33 bp, Homo sapien
aagtccgtggtcaccatctgggcctggatcccg

SEQ ID NO: 404953 - DNA, 33 bp, Homo sapien
tctccttatgtttccccgacctcaacagggtag

SEQ ID NO: 404954 - DNA, 33 bp, Homo sapien
tctccttatgtttccctgacctcaacagggtag

SEQ ID NO: 404955 - DNA, 33 bp, Homo sapien
gcatcaggtcagatcactgaaattaaaaaatgt

SEQ ID NO: 404956 - DNA, 33 bp, Homo sapien
gcatcaggtcagatcattgaaattaaaaaatgt

SEQ ID NO: 404957 - DNA, 33 bp, Homo sapien
cccgcatgactgccagaaagagatgaggctcct

SEQ ID NO: 404958 - DNA, 33 bp, Homo sapien
cccgcatgactgccaggaagagatgaggctcct

SEQ ID NO: 404959 - DNA, 33 bp, Homo sapien
aggcaagagaaagagtcaagtagggagagggga

SEQ ID NO: 404960 - DNA, 33 bp, Homo sapien
aggcaagagaaagagtgaagtagggagagggga

SEQ ID NO: 404961 - DNA, 33 bp, Homo sapien
cttgtgctgggtctaccgggtatctctttaatt

SEQ ID NO: 404962 - DNA, 33 bp, Homo sapien
cttgtgctgggtctactgggtatctctttaatt

SEQ ID NO: 404963 - DNA, 33 bp, Homo sapien
tcaggacttgtatgccacttcctgaggtggtct

SEQ ID NO: 404964 - DNA, 33 bp, Homo sapien
tcaggacttgtatgcctcttcctgaggtggtct

SEQ ID NO: 404965 - DNA, 33 bp, Homo sapien
ggcagccagaaccaaccaatattctcaacccat

SEQ ID NO: 404966 - DNA, 33 bp, Homo sapien
ggcagccagaaccaactaatattctcaacccat

SEQ ID NO: 404967 - DNA, 33 bp, Homo sapien
atgctaagcaaaataacagagtcacaaaaggac

SEQ ID NO: 404968 - DNA, 33 bp, Homo sapien
atgctaagcaaaataagagagtcacaaaaggac

SEQ ID NO: 404969 - DNA, 33 bp, Homo sapien
ggggaggcacagctccagcaaacacagagccct

SEQ ID NO: 404970 - DNA, 33 bp, Homo sapien
ggggaggcacagctccggcaaacacagagccct

SEQ ID NO: 404971 - DNA, 33 bp, Homo sapien
acctggatctcagagcggacaaactggctagga

SEQ ID NO: 404972 - DNA, 33 bp, Homo sapien
acctggatctcagagctgacaaactggctagga

SEQ ID NO: 404973 - DNA, 33 bp, Homo sapien
aaaaaaaccctgacacactcaaagtcaaagcag

SEQ ID NO: 404974 - DNA, 33 bp, Homo sapien
aaaaaaaccctgacaccctcaaagtcaaagcag

SEQ ID NO: 404975 - DNA, 33 bp, Homo sapien
ccctttctggaagtcaatccttgattttgttct

SEQ ID NO: 404976 - DNA, 33 bp, Homo sapien
ccctttctggaagtcagtccttgattttgttct

SEQ ID NO: 404977 - DNA, 33 bp, Homo sapien
tactacacggtaagaaatgaagccgcaaaataa

SEQ ID NO: 404978 - DNA, 33 bp, Homo sapien
tactacacggtaagaagtgaagccgcaaaataa

SEQ ID NO: 404979 - DNA, 33 bp, Homo sapien
agaagactaggttatcaatgtaactgttaacat

SEQ ID NO: 404980 - DNA, 33 bp, Homo sapien
agaagactaggttatccatgtaactgttaacat

SEQ ID NO: 404981 - DNA, 33 bp, Homo sapien
aagttgttcacccatcaatacaatcaattttag

SEQ ID NO: 404982 - DNA, 33 bp, Homo sapien
aagttgttcacccatcgatacaatcaattttag

SEQ ID NO: 404983 - DNA, 33 bp, Homo sapien
ctttgtgccatttggcccaattgatcttgatct

SEQ ID NO: 404984 - DNA, 33 bp, Homo sapien
ctttgtgccatttggctcaattgatcttgatct

SEQ ID NO: 404985 - DNA, 33 bp, Homo sapien
gcgaagtgggagttgaagtagaagcgcaagaga

SEQ ID NO: 404986 - DNA, 33 bp, Homo sapien
gcgaagtgggagttgaggtagaagcgcaagaga

SEQ ID NO: 404987 - DNA, 33 bp, Homo sapien
aggcaggaagaaaacacgaggaggctgggctaa

SEQ ID NO: 404988 - DNA, 33 bp, Homo sapien
aggcaggaagaaaacaggaggaggctgggctaa

SEQ ID NO: 404989 - DNA, 33 bp, Homo sapien
ctgggccagagctgcccggaggtctcctctccc

SEQ ID NO: 404990 - DNA, 33 bp, Homo sapien
ctgggccagagctgcctggaggtctcctctccc

SEQ ID NO: 404991 - DNA, 33 bp, Homo sapien
tggagacctcaatcaaaggagcataacttgaca

SEQ ID NO: 404992 - DNA, 33 bp, Homo sapien
tggagacctcaatcaagggagcataacttgaca

SEQ ID NO: 404993 - DNA, 33 bp, Homo sapien
ggtggatttcagaagcacaggcagcccacagac

SEQ ID NO: 404994 - DNA, 33 bp, Homo sapien
ggtggatttcagaagcgcaggcagcccacagac

SEQ ID NO: 404995 - DNA, 33 bp, Homo sapien
taatgcatgtaagggcacccaaaaaaagaccct

SEQ ID NO: 404996 - DNA, 33 bp, Homo sapien
taatgcatgtaagggcgcccaaaaaaagaccct

SEQ ID NO: 404997 - DNA, 33 bp, Homo sapien
aacaacatgaggcccaactcaagactcctgggt

SEQ ID NO: 404998 - DNA, 33 bp, Homo sapien
aacaacatgaggcccagctcaagactcctgggt

SEQ ID NO: 404999 - DNA, 33 bp, Homo sapien
gagagataaaatcgccggagataatggctggct

SEQ ID NO: 405000 - DNA, 33 bp, Homo sapien
gagagataaaatcgcctgagataatggctggct

SEQ ID NO: 405001 - DNA, 33 bp, Homo sapien
gggtctaaatctggcagctccttggctatccac

SEQ ID NO: 405002 - DNA, 33 bp, Homo sapien
gggtctaaatctggcatctccttggctatccac

SEQ ID NO: 405003 - DNA, 33 bp, Homo sapien
attataaactgaaagacggcaataaataagtgt

SEQ ID NO: 405004 - DNA, 33 bp, Homo sapien
attataaactgaaagatggcaataaataagtgt

SEQ ID NO: 405005 - DNA, 33 bp, Homo sapien
tgttctttagtatgaacgtagtagaatgtctca

SEQ ID NO: 405006 - DNA, 33 bp, Homo sapien
tgttctttagtatgaatgtagtagaatgtctca

SEQ ID NO: 405007 - DNA, 33 bp, Homo sapien
cctcccacatcaagtcacttgccaagtcctata

SEQ ID NO: 405008 - DNA, 33 bp, Homo sapien
cctcccacatcaagtcgcttgccaagtcctata

SEQ ID NO: 405009 - DNA, 33 bp, Homo sapien
cttttgacttgtccaacgttacagttaaacctg

SEQ ID NO: 405010 - DNA, 33 bp, Homo sapien
cttttgacttgtccaatgttacagttaaacctg

SEQ ID NO: 405011 - DNA, 33 bp, Homo sapien
gtaaggactttatccaaaatcacttatgtgtct

SEQ ID NO: 405012 - DNA, 33 bp, Homo sapien
gtaaggactttatccagaatcacttatgtgtct

SEQ ID NO: 405013 - DNA, 33 bp, Homo sapien
cttcaatttggacccaggaagatgttactagaa

SEQ ID NO: 405014 - DNA, 33 bp, Homo sapien
cttcaatttggacccatgaagatgttactagaa

SEQ ID NO: 405015 - DNA, 33 bp, Homo sapien; identical to SEQ ID NO: 405013

SEQ ID NO: 405016 - DNA, 33 bp, Homo sapien; identical to SEQ ID NO: 405014

SEQ ID NO: 405017 - DNA, 33 bp, Homo sapien
acctgtagagtacaagaagggagagtaggaaat

SEQ ID NO: 405018 - DNA, 33 bp, Homo sapien
acctgtagagtacaaggagggagagtaggaaat

SEQ ID NO: 405019 - DNA, 33 bp, Homo sapien
agtgctgcacgcgtgaaaaacatggcacagaaa

SEQ ID NO: 405020 - DNA, 33 bp, Homo sapien
agtgctgcacgcgtgataaacatggcacagaaa

SEQ ID NO: 405021 - DNA, 33 bp, Homo sapien
ggcaagcggtaggtacaaagagggctgaggaat

SEQ ID NO: 405022 - DNA, 33 bp, Homo sapien
ggcaagcggtaggtactaagagggctgaggaat

SEQ ID NO: 405023 - DNA, 33 bp, Homo sapien
taaatggcctttagagaaatttcactaacctgc

SEQ ID NO: 405024 - DNA, 33 bp, Homo sapien
taaatggcctttagagtaatttcactaacctgc

SEQ ID NO: 405025 - DNA, 33 bp, Homo sapien
cttctccatcagttcacgttgtcttctcttaac

SEQ ID NO: 405026 - DNA, 33 bp, Homo sapien
cttctccatcagttcatgttgtcttctcttaac

SEQ ID NO: 405027 - DNA, 33 bp, Homo sapien
aactttagagcactgacataaaacgcaaaaaca

SEQ ID NO: 405028 - DNA, 33 bp, Homo sapien
aactttagagcactgagataaaacgcaaaaaca

SEQ ID NO: 405029 - DNA, 33 bp, Homo sapien
actgggaaacctgccgaaagctagagtgtggaa

SEQ ID NO: 405030 - DNA, 33 bp, Homo sapien
actgggaaacctgccggaagctagagtgtggaa

SEQ ID NO: 405031 - DNA, 33 bp, Homo sapien
caagtttaggtccctcaacaaccaggatgaaaa

SEQ ID NO: 405032 - DNA, 33 bp, Homo sapien
caagtttaggtccctccacaaccaggatgaaaa

SEQ ID NO: 405033 - DNA, 33 bp, Homo sapien
ggagcatctttgaataccaccgcatagagctgg

SEQ ID NO: 405034 - DNA, 33 bp, Homo sapien
ggagcatctttgaatatcaccgcatagagctgg

SEQ ID NO: 405035 - DNA, 33 bp, Homo sapien
gcgagactcagtctcaataagtaaataaataat

SEQ ID NO: 405036 - DNA, 33 bp, Homo sapien
gcgagactcagtctcagtaagtaaataaataat

SEQ ID NO: 405037 - DNA, 33 bp, Homo sapien
cagggcattgtgttggcaagagagcatgctttg

SEQ ID NO: 405038 - DNA, 33 bp, Homo sapien
cagggcattgtgttgggaagagagcatgctttg

SEQ ID NO: 405039 - DNA, 33 bp, Homo sapien
gacaccaatgccagagcagtcttcttttcactg

SEQ ID NO: 405040 - DNA, 33 bp, Homo sapien
gacaccaatgccagagtagtcttcttttcactg

SEQ ID NO: 405041 - DNA, 33 bp, Homo sapien
gcgcccactgctaagccgcaaataaggaatccc

SEQ ID NO: 405042 - DNA, 33 bp, Homo sapien
gcgcccactgctaagcggcaaataaggaatccc

SEQ ID NO: 405043 - DNA, 33 bp, Homo sapien
ggtggcttgagggcaaagcgcccactgctaagc

SEQ ID NO: 405044 - DNA, 33 bp, Homo sapien
ggtggcttgagggcaacgcgcccactgctaagc

SEQ ID NO: 405045 - DNA, 33 bp, Homo sapien
gggacacacggcaagcaaaagagtaggtgacag

SEQ ID NO: 405046 - DNA, 33 bp, Homo sapien
gggacacacggcaagcgaaagagtaggtgacag

SEQ ID NO: 405047 - DNA, 33 bp, Homo sapien
cctaagtcaccttcccagagagctgttgcttaa

SEQ ID NO: 405048 - DNA, 33 bp, Homo sapien
cctaagtcaccttcccggagagctgttgcttaa

SEQ ID NO: 405049 - DNA, 33 bp, Homo sapien
caaaaggagaaacctcacaccaagagtggaaca

SEQ ID NO: 405050 - DNA, 33 bp, Homo sapien
caaaaggagaaacctcgcaccaagagtggaaca

SEQ ID NO: 405051 - DNA, 33 bp, Homo sapien
tgccatcccgtcactaaaagatgcctagcctta

SEQ ID NO: 405052 - DNA, 33 bp, Homo sapien
tgccatcccgtcactacaagatgcctagcctta

SEQ ID NO: 405053 - DNA, 33 bp, Homo sapien
gaactcctggattcaaacgatgtttctgcctca

SEQ ID NO: 405054 - DNA, 33 bp, Homo sapien
gaactcctggattcaagcgatgtttctgcctca

SEQ ID NO: 405055 - DNA, 33 bp, Homo sapien
ctgagctcctttgtaacgtcaagtcatcctggt

SEQ ID NO: 405056 - DNA, 33 bp, Homo sapien
ctgagctcctttgtaatgtcaagtcatcctggt

SEQ ID NO: 405057 - DNA, 33 bp, Homo sapien
tttaacaacctagaggaaactggagaggagatc

SEQ ID NO: 405058 - DNA, 33 bp, Homo sapien
tttaacaacctagagggaactggagaggagatc

SEQ ID NO: 405059 - DNA, 33 bp, Homo sapien
gcagcaataccactaaacgactacgtgcggtcg

SEQ ID NO: 405060 - DNA, 33 bp, Homo sapien
gcagcaataccactaagcgactacgtgcggtcg

SEQ ID NO: 405061 - DNA, 33 bp, Homo sapien
ttgtgacttcgcgttaggctctttctctaaaca

SEQ ID NO: 405062 - DNA, 33 bp, Homo sapien
ttgtgacttcgcgttatgctctttctctaaaca

SEQ ID NO: 405063 - DNA, 33 bp, Homo sapien
tggatgccctgtgcgccccttaccctggttccc

SEQ ID NO: 405064 - DNA, 33 bp, Homo sapien
tggatgccctgtgcgctccttaccctggttccc

SEQ ID NO: 405065 - DNA, 33 bp, Homo sapien
caggtgcctacgctgacgactatgtggcgagga

SEQ ID NO: 405066 - DNA, 33 bp, Homo sapien
caggtgcctacgctgatgactatgtggcgagga

SEQ ID NO: 405067 - DNA, 33 bp, Homo sapien
actgggctgaggccaaatgtgtgtgggtacaag

SEQ ID NO: 405068 - DNA, 33 bp, Homo sapien
actgggctgaggccaagtgtgtgtgggtacaag

SEQ ID NO: 405069 - DNA, 33 bp, Homo sapien
aattttacacagcttcaagtggttcatgaactc

SEQ ID NO: 405070 - DNA, 33 bp, Homo sapien
aattttacacagcttcgagtggttcatgaactc

SEQ ID NO: 405071 - DNA, 33 bp, Homo sapien
ggctctgttcctcaccaccattcgctctggata

SEQ ID NO: 405072 - DNA, 33 bp, Homo sapien
ggctctgttcctcaccgccattcgctctggata

SEQ ID NO: 405073 - DNA, 33 bp, Homo sapien
cacactaacttctaacccttacagcctgttggc

SEQ ID NO: 405074 - DNA, 33 bp, Homo sapien
cacactaacttctaactcttacagcctgttggc

SEQ ID NO: 405075 - DNA, 33 bp, Homo sapien
ctgggtctctctattacggtggataggtccaaa

SEQ ID NO: 405076 - DNA, 33 bp, Homo sapien
ctgggtctctctattatggtggataggtccaaa

SEQ ID NO: 405077 - DNA, 33 bp, Homo sapien
tgacacaaatatagataaaaaaaattggatgct

SEQ ID NO: 405078 - DNA, 33 bp, Homo sapien
tgacacaaatatagattaaaaaaattggatgct

SEQ ID NO: 405079 - DNA, 33 bp, Homo sapien
tttgaacaagacaaaacgctaaatatagatgct

SEQ ID NO: 405080 - DNA, 33 bp, Homo sapien
tttgaacaagacaaaatgctaaatatagatgct

SEQ ID NO: 405081 - DNA, 33 bp, Homo sapien
cgagcaatgctattaccggttgagtatccctta

SEQ ID NO: 405082 - DNA, 33 bp, Homo sapien
cgagcaatgctattactggttgagtatccctta

SEQ ID NO: 405083 - DNA, 33 bp, Homo sapien
cttaaatccctactcaagataaccttttgcata

SEQ ID NO: 405084 - DNA, 33 bp, Homo sapien
cttaaatccctactcaggataaccttttgcata

SEQ ID NO: 405085 - DNA, 33 bp, Homo sapien
tgtttgactttgaagaaaactgccaaactgttt

SEQ ID NO: 405086 - DNA, 33 bp, Homo sapien
tgtttgactttgaagagaactgccaaactgttt

SEQ ID NO: 405087 - DNA, 33 bp, Homo sapien
ttcaattacctacaccaaaggataataaataat

SEQ ID NO: 405088 - DNA, 33 bp, Homo sapien
ttcaattacctacaccgaaggataataaataat

SEQ ID NO: 405089 - DNA, 33 bp, Homo sapien
atgactatagcctgatcagttatttttgttttt

SEQ ID NO: 405090 - DNA, 33 bp, Homo sapien
atgactatagcctgattagttatttttgttttt

SEQ ID NO: 405091 - DNA, 33 bp, Homo sapien
cttgcctggcaaattaaccatcatttatctctc

SEQ ID NO: 405092 - DNA, 33 bp, Homo sapien
cttgcctggcaaattagccatcatttatctctc

SEQ ID NO: 405093 - DNA, 33 bp, Homo sapien
ttctgacctcactctactacatgttgatgagct

SEQ ID NO: 405094 - DNA, 33 bp, Homo sapien
ttctgacctcactctagtacatgttgatgagct

SEQ ID NO: 405095 - DNA, 33 bp, Homo sapien
cactcataggcagtaactcacaaagttgtaatg

SEQ ID NO: 405096 - DNA, 33 bp, Homo sapien
cactcataggcagtaattcacaaagttgtaatg

SEQ ID NO: 405097 - DNA, 33 bp, Homo sapien
aatctgtcacagaaccacatcaaatattgaaaa

SEQ ID NO: 405098 - DNA, 33 bp, Homo sapien
aatctgtcacagaaccgcatcaaatattgaaaa

SEQ ID NO: 405099 - DNA, 33 bp, Homo sapien
cttaatacctagaaccacaaattctcctagtct

SEQ ID NO: 405100 - DNA, 33 bp, Homo sapien
cttaatacctagaaccgcaaattctcctagtct

SEQ ID NO: 405101 - DNA, 33 bp, Homo sapien
ctgctattaaagaaaagccagttagactttgta

SEQ ID NO: 405102 - DNA, 33 bp, Homo sapien
ctgctattaaagaaaatccagttagactttgta

SEQ ID NO: 405103 - DNA, 33 bp, Homo sapien
taaggagacaatgacaactttaaggtgatgtca

SEQ ID NO: 405104 - DNA, 33 bp, Homo sapien
taaggagacaatgacagctttaaggtgatgtca

SEQ ID NO: 405105 - DNA, 33 bp, Homo sapien
ttgctacaaaccacaaatcccttctccctttct

SEQ ID NO: 405106 - DNA, 33 bp, Homo sapien
ttgctacaaaccacaactcccttctccctttct

SEQ ID NO: 405107 - DNA, 33 bp, Homo sapien
tttctttaaaatttgactagatgtagaggtgca

SEQ ID NO: 405108 - DNA, 33 bp, Homo sapien
tttctttaaaatttgattagatgtagaggtgca

SEQ ID NO: 405109 - DNA, 33 bp, Homo sapien
tttgctattctctaatcagtttgttgaccttac

SEQ ID NO: 405110 - DNA, 33 bp, Homo sapien
tttgctattctctaatgagtttgttgaccttac

SEQ ID NO: 405111 - DNA, 33 bp, Homo sapien
ctgttggccctcttaaatctttctcaatctaga

SEQ ID NO: 405112 - DNA, 33 bp, Homo sapien
ctgttggccctcttaagtctttctcaatctaga

SEQ ID NO: 405113 - DNA, 33 bp, Homo sapien
ttttccaggttgtcaacgttcagctttaaaacc

SEQ ID NO: 405114 - DNA, 33 bp, Homo sapien
ttttccaggttgtcaatgttcagctttaaaacc

SEQ ID NO: 405115 - DNA, 33 bp, Homo sapien
tgctactgcttaacaaatcaaattcctcattca

SEQ ID NO: 405116 - DNA, 33 bp, Homo sapien
tgctactgcttaacaactcaaattcctcattca

SEQ ID NO: 405117 - DNA, 33 bp, Homo sapien
catttgtttttaataacatccagactgttccga

SEQ ID NO: 405118 - DNA, 33 bp, Homo sapien
catttgtttttaataatatccagactgttccga

SEQ ID NO: 405119 - DNA, 33 bp, Homo sapien
gtacttggaagcaagaaaatggataagatgatc

SEQ ID NO: 405120 - DNA, 33 bp, Homo sapien
gtacttggaagcaagagaatggataagatgatc

SEQ ID NO: 405121 - DNA, 33 bp, Homo sapien
actgcaatatgttggaatagggatggacaaagg

SEQ ID NO: 405122 - DNA, 33 bp, Homo sapien
actgcaatatgttggagtagggatggacaaagg

SEQ ID NO: 405123 - DNA, 33 bp, Homo sapien
ctggtaggttatatcaaggtcaatattctggtt

SEQ ID NO: 405124 - DNA, 33 bp, Homo sapien
ctggtaggttatatcacggtcaatattctggtt

SEQ ID NO: 405125 - DNA, 33 bp, Homo sapien
atggtgcgcctgagcaatctatccagacacctg

SEQ ID NO: 405126 - DNA, 33 bp, Homo sapien
atggtgcgcctgagcattctatccagacacctg

SEQ ID NO: 405127 - DNA, 33 bp, Homo sapien
ctccttctttgagggaagaggaattctagggaa

SEQ ID NO: 405128 - DNA, 33 bp, Homo sapien
ctccttctttgagggaggaggaattctagggaa

SEQ ID NO: 405129 - DNA, 33 bp, Homo sapien
tgctccaaagtgcatcccaaatccaggctcttc

SEQ ID NO: 405130 - DNA, 33 bp, Homo sapien
tgctccaaagtgcatctcaaatccaggctcttc

SEQ ID NO: 405131 - DNA, 33 bp, Homo sapien
tggatgtaaccttgcacaggggtcttatcttcc

SEQ ID NO: 405132 - DNA, 33 bp, Homo sapien
tggatgtaaccttgcagaggggtcttatcttcc

SEQ ID NO: 405133 - DNA, 33 bp, Homo sapien
tgtccctggtgtggaaaactgtggaccagaacc

SEQ ID NO: 405134 - DNA, 33 bp, Homo sapien
tgtccctggtgtggaagactgtggaccagaacc

SEQ ID NO: 405135 - DNA, 33 bp, Homo sapien
cctcaaactttgtgacccttgcggaaagggaag

SEQ ID NO: 405136 - DNA, 33 bp, Homo sapien
cctcaaactttgtgactcttgcggaaagggaag

SEQ ID NO: 405137 - DNA, 33 bp, Homo sapien
actgatatggaatagagtcaagatttttttttt

SEQ ID NO: 405138 - DNA, 33 bp, Homo sapien
actgatatggaatagattcaagatttttttttt

SEQ ID NO: 405139 - DNA, 33 bp, Homo sapien
atccctctcccacttacagcagaagaaagggct

SEQ ID NO: 405140 - DNA, 33 bp, Homo sapien
atccctctcccacttatagcagaagaaagggct

SEQ ID NO: 405141 - DNA, 33 bp, Homo sapien
tgttgatcactttgacagagtctcttgggcaga

SEQ ID NO: 405142 - DNA, 33 bp, Homo sapien
tgttgatcactttgacggagtctcttgggcaga

SEQ ID NO: 405143 - DNA, 33 bp, Homo sapien
tttctcaaactttctacatttgaagctctttca

SEQ ID NO: 405144 - DNA, 33 bp, Homo sapien
tttctcaaactttctatatttgaagctctttca

SEQ ID NO: 405145 - DNA, 33 bp, Homo sapien
aaataaaaggcagcaactattgataccactgtg

SEQ ID NO: 405146 - DNA, 33 bp, Homo sapien
aaataaaaggcagcaattattgataccactgtg

SEQ ID NO: 405147 - DNA, 33 bp, Homo sapien
acaaattgtgtcagagaaaagttggtatatttc

SEQ ID NO: 405148 - DNA, 33 bp, Homo sapien
acaaattgtgtcagagtaaagttggtatatttc

SEQ ID NO: 405149 - DNA, 33 bp, Homo sapien
tcagaatccaactctaagaaggacaaagttgga

SEQ ID NO: 405150 - DNA, 33 bp, Homo sapien
tcagaatccaactctacgaaggacaaagttgga

SEQ ID NO: 405151 - DNA, 33 bp, Homo sapien
aattcagagataatgacgccctaatgctacaga

SEQ ID NO: 405152 - DNA, 33 bp, Homo sapien
aattcagagataatgaggccctaatgctacaga

SEQ ID NO: 405153 - DNA, 33 bp, Homo sapien
gagaaataactgctacccatcaaaaaacaatgg

SEQ ID NO: 405154 - DNA, 33 bp, Homo sapien
gagaaataactgctactcatcaaaaaacaatgg

SEQ ID NO: 405155 - DNA, 33 bp, Homo sapien
agaaggaagggaagaaacagagatgggtaaaag

SEQ ID NO: 405156 - DNA, 33 bp, Homo sapien
agaaggaagggaagaaccagagatgggtaaaag

SEQ ID NO: 405157 - DNA, 33 bp, Homo sapien
gtcatataccacataacgtttgggtcaatgatg

SEQ ID NO: 405158 - DNA, 33 bp, Homo sapien
gtcatataccacataatgtttgggtcaatgatg

SEQ ID NO: 405159 - DNA, 33 bp, Homo sapien
atgcgatgaattaaaacagggctgtgttaaaat

SEQ ID NO: 405160 - DNA, 33 bp, Homo sapien
atgcgatgaattaaaatagggctgtgttaaaat

SEQ ID NO: 405161 - DNA, 33 bp, Homo sapien
aaccaaatctctaggcaattccgttgttgggtg

SEQ ID NO: 405162 - DNA, 33 bp, Homo sapien
aaccaaatctctaggccattccgttgttgggtg

SEQ ID NO: 405163 - DNA, 33 bp, Homo sapien
cactatgggaatttgaggggtgcattaaagtag

SEQ ID NO: 405164 - DNA, 33 bp, Homo sapien
cactatgggaatttgatgggtgcattaaagtag

SEQ ID NO: 405165 - DNA, 33 bp, Homo sapien
tcctcatcaagaaggaagtggatgaggcataca

SEQ ID NO: 405166 - DNA, 33 bp, Homo sapien
tcctcatcaagaaggatgtggatgaggcataca

SEQ ID NO: 405167 - DNA, 33 bp, Homo sapien
cattagacagcaaaaaatgtcactacgtttcag

SEQ ID NO: 405168 - DNA, 33 bp, Homo sapien
cattagacagcaaaaagtgtcactacgtttcag

SEQ ID NO: 405169 - DNA, 33 bp, Homo sapien
atgtcaggtccttgcggatagagtatttgatgt

SEQ ID NO: 405170 - DNA, 33 bp, Homo sapien
atgtcaggtccttgcgtatagagtatttgatgt

SEQ ID NO: 405171 - DNA, 33 bp, Homo sapien
agactgcctataccaacgacatactattgttta

SEQ ID NO: 405172 - DNA, 33 bp, Homo sapien
agactgcctataccaatgacatactattgttta

SEQ ID NO: 405173 - DNA, 33 bp, Homo sapien
tatggtccaggagcaaactttgtcagtaatttc

SEQ ID NO: 405174 - DNA, 33 bp, Homo sapien
tatggtccaggagcaacctttgtcagtaatttc

SEQ ID NO: 405175 - DNA, 33 bp, Homo sapien
gccaggctcataaagacaacgtcctacaatttg

SEQ ID NO: 405176 - DNA, 33 bp, Homo sapien
gccaggctcataaagataacgtcctacaatttg

SEQ ID NO: 405177 - DNA, 33 bp, Homo sapien
cattagcccccagatgcagtgaaaccatcaagt

SEQ ID NO: 405178 - DNA, 33 bp, Homo sapien
cattagcccccagatggagtgaaaccatcaagt

SEQ ID NO: 405179 - DNA, 33 bp, Homo sapien
cacacttagaaaaccacggcaggatacataagc

SEQ ID NO: 405180 - DNA, 33 bp, Homo sapien
cacacttagaaaaccatggcaggatacataagc

SEQ ID NO: 405181 - DNA, 33 bp, Homo sapien
attctgaaatgacgaacgggaagcccagcagct

SEQ ID NO: 405182 - DNA, 33 bp, Homo sapien
attctgaaatgacgaatgggaagcccagcagct

SEQ ID NO: 405183 - DNA, 33 bp, Homo sapien
ccctgaaatgaatatccaaaccagcaccaaaaa

SEQ ID NO: 405184 - DNA, 33 bp, Homo sapien
ccctgaaatgaatatctaaaccagcaccaaaaa

SEQ ID NO: 405185 - DNA, 33 bp, Homo sapien
ggctcacagagagggaaaagagtcagtgggagg

SEQ ID NO: 405186 - DNA, 33 bp, Homo sapien
ggctcacagagagggagaagagtcagtgggagg

SEQ ID NO: 405187 - DNA, 33 bp, Homo sapien
tgagccagctcctattgaagattaatcgcttct

SEQ ID NO: 405188 - DNA, 33 bp, Homo sapien
tgagccagctcctatttaagattaatcgcttct

SEQ ID NO: 405189 - DNA, 33 bp, Homo sapien
ccagcattaaggcaagaaaggtgtctctgtttt

SEQ ID NO: 405190 - DNA, 33 bp, Homo sapien
ccagcattaaggcaagcaaggtgtctctgtttt

SEQ ID NO: 405191 - DNA, 33 bp, Homo sapien
gaatctgggaagtgaacgttgtagtgaagcgag

SEQ ID NO: 405192 - DNA, 33 bp, Homo sapien
gaatctgggaagtgaaggttgtagtgaagcgag

SEQ ID NO: 405193 - DNA, 33 bp, Homo sapien
tgaggggcatcaaagccagaggcaacccgggga

SEQ ID NO: 405194 - DNA, 33 bp, Homo sapien
tgaggggcatcaaagcgagaggcaacccgggga

SEQ ID NO: 405195 - DNA, 33 bp, Homo sapien
gtccttagaaaagataaaagtgtgaagggaaat

SEQ ID NO: 405196 - DNA, 33 bp, Homo sapien
gtccttagaaaagatacaagtgtgaagggaaat

SEQ ID NO: 405197 - DNA, 33 bp, Homo sapien
tccgcaccgactacacactgctggatgtgcttg

SEQ ID NO: 405198 - DNA, 33 bp, Homo sapien
tccgcaccgactacacgctgctggatgtgcttg

SEQ ID NO: 405199 - DNA, 33 bp, Homo sapien
tgtagtgtcattcttcaaagtcaggggatcagg

SEQ ID NO: 405200 - DNA, 33 bp, Homo sapien
tgtagtgtcattcttccaagtcaggggatcagg

SEQ ID NO: 405201 - DNA, 33 bp, Homo sapien
tttagaaatacttagcacaatgatctgcatata

SEQ ID NO: 405202 - DNA, 33 bp, Homo sapien
tttagaaatacttagcgcaatgatctgcatata

SEQ ID NO: 405203 - DNA, 33 bp, Homo sapien
tggcctcagagaagtgaaaaaacttgttcaaga

SEQ ID NO: 405204 - DNA, 33 bp, Homo sapien
tggcctcagagaagtggaaaaacttgttcaaga

SEQ ID NO: 405205 - DNA, 33 bp, Homo sapien
cacacacacacatacacactttgcatctagaaa

SEQ ID NO: 405206 - DNA, 33 bp, Homo sapien
cacacacacacatacatactttgcatctagaaa

SEQ ID NO: 405207 - DNA, 33 bp, Homo sapien
ccagcaccttggcaaaaatgtccgtcagcacct

SEQ ID NO: 405208 - DNA, 33 bp, Homo sapien
ccagcaccttggcaaagatgtccgtcagcacct

SEQ ID NO: 405209 - DNA, 33 bp, Homo sapien
agtttgttatgaactaagcacttttaaaaacat

SEQ ID NO: 405210 - DNA, 33 bp, Homo sapien
agtttgttatgaactaggcacttttaaaaacat

SEQ ID NO: 405211 - DNA, 33 bp, Homo sapien
ctgagtgagacaggaaacattgtctctagataa

SEQ ID NO: 405212 - DNA, 33 bp, Homo sapien
ctgagtgagacaggaaccattgtctctagataa

SEQ ID NO: 405213 - DNA, 33 bp, Homo sapien
ctttctccaaacattaagcacagactcttccag

SEQ ID NO: 405214 - DNA, 33 bp, Homo sapien
ctttctccaaacattaggcacagactcttccag

SEQ ID NO: 405215 - DNA, 33 bp, Homo sapien
ctggaaatgcgggcaaatggcacaacagtagta

SEQ ID NO: 405216 - DNA, 33 bp, Homo sapien
ctggaaatgcgggcaattggcacaacagtagta

SEQ ID NO: 405217 - DNA, 33 bp, Homo sapien
aacaacttaagagaaacgtgaagcaacttccca

SEQ ID NO: 405218 - DNA, 33 bp, Homo sapien
aacaacttaagagaaatgtgaagcaacttccca

SEQ ID NO: 405219 - DNA, 33 bp, Homo sapien
caaaatcatttccataactttccaaggtaaaca

SEQ ID NO: 405220 - DNA, 33 bp, Homo sapien
caaaatcatttccatatctttccaaggtaaaca

SEQ ID NO: 405221 - DNA, 33 bp, Homo sapien
aagttgggagctagtaataatatgagatatggc

SEQ ID NO: 405222 - DNA, 33 bp, Homo sapien
aagttgggagctagtagtaatatgagatatggc

SEQ ID NO: 405223 - DNA, 33 bp, Homo sapien
aaatgagacagtaaaaatcttcaaaatcccaac

SEQ ID NO: 405224 - DNA, 33 bp, Homo sapien
aaatgagacagtaaaagtcttcaaaatcccaac

SEQ ID NO: 405225 - DNA, 33 bp, Homo sapien
gctaacgctggttaaacacagctctactctttt

SEQ ID NO: 405226 - DNA, 33 bp, Homo sapien
gctaacgctggttaaatacagctctactctttt

SEQ ID NO: 405227 - DNA, 33 bp, Homo sapien
gcttgaatagtctcacacatgcagattctttct

SEQ ID NO: 405228 - DNA, 33 bp, Homo sapien
gcttgaatagtctcacgcatgcagattctttct

SEQ ID NO: 405229 - DNA, 33 bp, Homo sapien
atcctgttaccatcaacttctgagatgacttgg

SEQ ID NO: 405230 - DNA, 33 bp, Homo sapien
atcctgttaccatcaatttctgagatgacttgg

SEQ ID NO: 405231 - DNA, 33 bp, Homo sapien
ttcagttctggttctacgtggacctctcagaca

SEQ ID NO: 405232 - DNA, 33 bp, Homo sapien
ttcagttctggttctaggtggacctctcagaca

SEQ ID NO: 405233 - DNA, 33 bp, Homo sapien
aaattattcacctgaaaaaaatagaaagttaga

SEQ ID NO: 405234 - DNA, 33 bp, Homo sapien
aaattattcacctgaagaaaatagaaagttaga

SEQ ID NO: 405235 - DNA, 33 bp, Homo sapien
gcagaggcttgtgtggacatttcccttcactta

SEQ ID NO: 405236 - DNA, 33 bp, Homo sapien
gcagaggcttgtgtgggcatttcccttcactta

SEQ ID NO: 405237 - DNA, 33 bp, Homo sapien
agggcttctgtggtagcagggcccactgggcag

SEQ ID NO: 405238 - DNA, 33 bp, Homo sapien
agggcttctgtggtagtagggcccactgggcag

SEQ ID NO: 405239 - DNA, 33 bp, Homo sapien
gcatattaggcgttcaataaatctgtgttacat

SEQ ID NO: 405240 - DNA, 33 bp, Homo sapien
gcatattaggcgttcagtaaatctgtgttacat

SEQ ID NO: 405241 - DNA, 33 bp, Homo sapien
ggcaagagcctgttaaagtcttagggcctccag

SEQ ID NO: 405242 - DNA, 33 bp, Homo sapien
ggcaagagcctgttaacgtcttagggcctccag

SEQ ID NO: 405243 - DNA, 33 bp, Homo sapien
tgtacgctttaccccacctcaggaggcttggtc

SEQ ID NO: 405244 - DNA, 33 bp, Homo sapien
tgtacgctttaccccatctcaggaggcttggtc

SEQ ID NO: 405245 - DNA, 33 bp, Homo sapien
aatagagtagagtgaacgagagagtgttgggag

SEQ ID NO: 405246 - DNA, 33 bp, Homo sapien
aatagagtagagtgaatgagagagtgttgggag

SEQ ID NO: 405247 - DNA, 33 bp, Homo sapien
agaatgtggctcaggggacagcggggttaggac

SEQ ID NO: 405248 - DNA, 33 bp, Homo sapien
agaatgtggctcagggtacagcggggttaggac

SEQ ID NO: 405249 - DNA, 33 bp, Homo sapien
tgaatgaaggagatggaactcaggcctgctgtg

SEQ ID NO: 405250 - DNA, 33 bp, Homo sapien
tgaatgaaggagatgggactcaggcctgctgtg

SEQ ID NO: 405251 - DNA, 33 bp, Homo sapien
agactctatttccttccatatctgttcctctgt

SEQ ID NO: 405252 - DNA, 33 bp, Homo sapien
agactctatttccttctatatctgttcctctgt

SEQ ID NO: 405253 - DNA, 33 bp, Homo sapien
tgctgtgcagaccgaaagagatagcccgggcaa

SEQ ID NO: 405254 - DNA, 33 bp, Homo sapien
tgctgtgcagaccgaatgagatagcccgggcaa

SEQ ID NO: 405255 - DNA, 33 bp, Homo sapien
tgtgtgcactggagtcactcaacatctccacct

SEQ ID NO: 405256 - DNA, 33 bp, Homo sapien
tgtgtgcactggagtcgctcaacatctccacct

SEQ ID NO: 405257 - DNA, 33 bp, Homo sapien
cccgcgtctgctcagaatcgaccaggtatgcgt

SEQ ID NO: 405258 - DNA, 33 bp, Homo sapien
cccgcgtctgctcagagtcgaccaggtatgcgt

SEQ ID NO: 405259 - DNA, 33 bp, Homo sapien
tcctttgtactgtcaaatctccaccattcttgc

SEQ ID NO: 405260 - DNA, 33 bp, Homo sapien
tcctttgtactgtcaagtctccaccattcttgc

SEQ ID NO: 405261 - DNA, 33 bp, Homo sapien
cttggtaatgaataagaaatgaatagatacaac

SEQ ID NO: 405262 - DNA, 33 bp, Homo sapien
cttggtaatgaataaggaatgaatagatacaac

SEQ ID NO: 405263 - DNA, 33 bp, Homo sapien
ttaatctaattggcacaaggcgcagcctggggt

SEQ ID NO: 405264 - DNA, 33 bp, Homo sapien
ttaatctaattggcacgaggcgcagcctggggt

SEQ ID NO: 405265 - DNA, 33 bp, Homo sapien
cccaccctccgtacaaaggctaagttattcatt

SEQ ID NO: 405266 - DNA, 33 bp, Homo sapien
cccaccctccgtacaagggctaagttattcatt

SEQ ID NO: 405267 - DNA, 33 bp, Homo sapien
tttggatttaccttgaaaacagtgggaagcaac

SEQ ID NO: 405268 - DNA, 33 bp, Homo sapien
tttggatttaccttgagaacagtgggaagcaac

SEQ ID NO: 405269 - DNA, 33 bp, Homo sapien
taaagctcagtgtcttcaaacaacaacttttat

SEQ ID NO: 405270 - DNA, 33 bp, Homo sapien
taaagctcagtgtcttgaaacaacaacttttat

SEQ ID NO: 405271 - DNA, 33 bp, Homo sapien
ctctttttcacacccaagttctggattcatcac

SEQ ID NO: 405272 - DNA, 33 bp, Homo sapien
ctctttttcacacccaggttctggattcatcac

SEQ ID NO: 405273 - DNA, 33 bp, Homo sapien
aggctgcctttactgacgttgggcatggtcgga

SEQ ID NO: 405274 - DNA, 33 bp, Homo sapien
aggctgcctttactgatgttgggcatggtcgga

SEQ ID NO: 405275 - DNA, 33 bp, Homo sapien
gcactaaataatggaacctcatatatcttctgc

SEQ ID NO: 405276 - DNA, 33 bp, Homo sapien
gcactaaataatggaagctcatatatcttctgc

SEQ ID NO: 405277 - DNA, 33 bp, Homo sapien
aggaaagaaaagcccaagattcctcacagcaat

SEQ ID NO: 405278 - DNA, 33 bp, Homo sapien
aggaaagaaaagcccacgattcctcacagcaat

SEQ ID NO: 405279 - DNA, 33 bp, Homo sapien
gagaaaattgagaaaactcagagaaatgaacag

SEQ ID NO: 405280 - DNA, 33 bp, Homo sapien
gagaaaattgagaaaattcagagaaatgaacag

SEQ ID NO: 405281 - DNA, 33 bp, Homo sapien
ttcatatttgtgccccaagtgactaatacaata

SEQ ID NO: 405282 - DNA, 33 bp, Homo sapien
ttcatatttgtgccccgagtgactaatacaata

SEQ ID NO: 405283 - DNA, 33 bp, Homo sapien
ttcccacttcccagaccctctgaacatgtcctt

SEQ ID NO: 405284 - DNA, 33 bp, Homo sapien
ttcccacttcccagacgctctgaacatgtcctt

SEQ ID NO: 405285 - DNA, 33 bp, Homo sapien
gtgctatggattaaacaaggagaaagcagttgt

SEQ ID NO: 405286 - DNA, 33 bp, Homo sapien
gtgctatggattaaacgaggagaaagcagttgt

SEQ ID NO: 405287 - DNA, 33 bp, Homo sapien
ctttactatcctgaaaaccatctggaatttaac

SEQ ID NO: 405288 - DNA, 33 bp, Homo sapien
ctttactatcctgaaagccatctggaatttaac

SEQ ID NO: 405289 - DNA, 33 bp, Homo sapien
tttggttttgtgtaagcattttgctcttaactt

SEQ ID NO: 405290 - DNA, 33 bp, Homo sapien
tttggttttgtgtaagtattttgctcttaactt

SEQ ID NO: 405291 - DNA, 33 bp, Homo sapien
tgaaatctgatttgcaatatcttcatctttttt

SEQ ID NO: 405292 - DNA, 33 bp, Homo sapien
tgaaatctgatttgcagtatcttcatctttttt

SEQ ID NO: 405293 - DNA, 33 bp, Homo sapien
tttccataaataattccgaatgcttggagaaaa

SEQ ID NO: 405294 - DNA, 33 bp, Homo sapien
tttccataaataattctgaatgcttggagaaaa

SEQ ID NO: 405295 - DNA, 33 bp, Homo sapien
ttcaggaaactgcttgaattagggtgaatctga

SEQ ID NO: 405296 - DNA, 33 bp, Homo sapien
ttcaggaaactgcttgcattagggtgaatctga

SEQ ID NO: 405297 - DNA, 33 bp, Homo sapien
gcagctcagagtaaacagctaaagtatttgaag

SEQ ID NO: 405298 - DNA, 33 bp, Homo sapien
gcagctcagagtaaacggctaaagtatttgaag

SEQ ID NO: 405299 - DNA, 33 bp, Homo sapien
agctgttttccaccatcaaatcattacaataaa

SEQ ID NO: 405300 - DNA, 33 bp, Homo sapien
agctgttttccaccatgaaatcattacaataaa

SEQ ID NO: 405301 - DNA, 33 bp, Homo sapien
gataacagaactaaaacgtaccctgcaagccct

SEQ ID NO: 405302 - DNA, 33 bp, Homo sapien
gataacagaactaaaatgtaccctgcaagccct

SEQ ID NO: 405303 - DNA, 33 bp, Homo sapien
cttttctgtttgcatcacgatagtcttttttcc

SEQ ID NO: 405304 - DNA, 33 bp, Homo sapien
cttttctgtttgcatcgcgatagtcttttttcc

SEQ ID NO: 405305 - DNA, 33 bp, Homo sapien
aatagaaataaagtacacaataaacgtaatgtg

SEQ ID NO: 405306 - DNA, 33 bp, Homo sapien
aatagaaataaagtacgcaataaacgtaatgtg

SEQ ID NO: 405307 - DNA, 33 bp, Homo sapien
ctttcttttttaacaaagcagccattagaggct

SEQ ID NO: 405308 - DNA, 33 bp, Homo sapien
ctttcttttttaacaatgcagccattagaggct

SEQ ID NO: 405309 - DNA, 33 bp, Homo sapien
agagaggtccaacacaaaaggttggaagtggga

SEQ ID NO: 405310 - DNA, 33 bp, Homo sapien
agagaggtccaacacacaaggttggaagtggga

SEQ ID NO: 405311 - DNA, 33 bp, Homo sapien
tctccctcctggttacaggcacaaaaaagacaa

SEQ ID NO: 405312 - DNA, 33 bp, Homo sapien
tctccctcctggttacgggcacaaaaaagacaa

SEQ ID NO: 405313 - DNA, 33 bp, Homo sapien
catcaccattcagcaaagtccccaacctcaaag

SEQ ID NO: 405314 - DNA, 33 bp, Homo sapien
catcaccattcagcaaggtccccaacctcaaag

SEQ ID NO: 405315 - DNA, 33 bp, Homo sapien
agataggagaaataaacccatcaagggacttcc

SEQ ID NO: 405316 - DNA, 33 bp, Homo sapien
agataggagaaataaatccatcaagggacttcc

SEQ ID NO: 405317 - DNA, 33 bp, Homo sapien
ctgcagggtttagctccctcatttccttcaggt

SEQ ID NO: 405318 - DNA, 33 bp, Homo sapien
ctgcagggtttagctctctcatttccttcaggt

SEQ ID NO: 405319 - DNA, 33 bp, Homo sapien
ctgtttatgatgaacacagcagttaaaagttgg

SEQ ID NO: 405320 - DNA, 33 bp, Homo sapien
ctgtttatgatgaacatagcagttaaaagttgg

SEQ ID NO: 405321 - DNA, 33 bp, Homo sapien
gaaggatggactccatcatgagctgtatgtgac

SEQ ID NO: 405322 - DNA, 33 bp, Homo sapien
gaaggatggactccattatgagctgtatgtgac

SEQ ID NO: 405323 - DNA, 33 bp, Homo sapien
ttccagggcatgagaacgtgatcaggagcggta

SEQ ID NO: 405324 - DNA, 33 bp, Homo sapien
ttccagggcatgagaatgtgatcaggagcggta

SEQ ID NO: 405325 - DNA, 33 bp, Homo sapien
aagaaggagagcttacactacacatccttgacc

SEQ ID NO: 405326 - DNA, 33 bp, Homo sapien
aagaaggagagcttacgctacacatccttgacc

SEQ ID NO: 405327 - DNA, 33 bp, Homo sapien
gttaaaaaataaaaaagtagcattgcacaacag

SEQ ID NO: 405328 - DNA, 33 bp, Homo sapien
gttaaaaaataaaaaattagcattgcacaacag

SEQ ID NO: 405329 - DNA, 33 bp, Homo sapien
gatgctcatgtcagccagaatggaagttaactt

SEQ ID NO: 405330 - DNA, 33 bp, Homo sapien
gatgctcatgtcagccggaatggaagttaactt

SEQ ID NO: 405331 - DNA, 33 bp, Homo sapien
aaaggaactctaattaacaacatgaaaacatat

SEQ ID NO: 405332 - DNA, 33 bp, Homo sapien
aaaggaactctaattagcaacatgaaaacatat

SEQ ID NO: 405333 - DNA, 33 bp, Homo sapien
ttgggatcaactttagaaattaaaaagaatcag

SEQ ID NO: 405334 - DNA, 33 bp, Homo sapien
ttgggatcaactttagcaattaaaaagaatcag

SEQ ID NO: 405335 - DNA, 33 bp, Homo sapien
aaatatgtatgatctccagagtaggaaattcta

SEQ ID NO: 405336 - DNA, 33 bp, Homo sapien
aaatatgtatgatctctagagtaggaaattcta

SEQ ID NO: 405337 - DNA, 33 bp, Homo sapien
gcccggaatgagcttaccgagatgaaacgcact

SEQ ID NO: 405338 - DNA, 33 bp, Homo sapien
gcccggaatgagcttatcgagatgaaacgcact

SEQ ID NO: 405339 - DNA, 33 bp, Homo sapien
aggactcttcgcaaaccattgatgtccgcctcc

SEQ ID NO: 405340 - DNA, 33 bp, Homo sapien
aggactcttcgcaaactattgatgtccgcctcc

SEQ ID NO: 405341 - DNA, 33 bp, Homo sapien
tttcccaattattgacaaacttaagaaccaggt

SEQ ID NO: 405342 - DNA, 33 bp, Homo sapien
tttcccaattattgacgaacttaagaaccaggt

SEQ ID NO: 405343 - DNA, 33 bp, Homo sapien
tgtgcttttgggggcacctcatctgcaggaggc

SEQ ID NO: 405344 - DNA, 33 bp, Homo sapien
tgtgcttttgggggcagctcatctgcaggaggc

SEQ ID NO: 405345 - DNA, 33 bp, Homo sapien
ttataacatgtaatgaagtaacgggtacacata

SEQ ID NO: 405346 - DNA, 33 bp, Homo sapien
ttataacatgtaatgaggtaacgggtacacata

SEQ ID NO: 405347 - DNA, 33 bp, Homo sapien
ttctaattgtgacttacgtagagaaccaaaatt

SEQ ID NO: 405348 - DNA, 33 bp, Homo sapien
ttctaattgtgacttatgtagagaaccaaaatt

SEQ ID NO: 405349 - DNA, 33 bp, Homo sapien
attacagactgtagaagtagcaaagaggaagta

SEQ ID NO: 405350 - DNA, 33 bp, Homo sapien
attacagactgtagaattagcaaagaggaagta

SEQ ID NO: 405351 - DNA, 33 bp, Homo sapien
cactgatacgaggcaaatacacatatgttacta

SEQ ID NO: 405352 - DNA, 33 bp, Homo sapien
cactgatacgaggcaagtacacatatgttacta

SEQ ID NO: 405353 - DNA, 33 bp, Homo sapien
tttaaatgtaacacacaatagtaacagagaaaa

SEQ ID NO: 405354 - DNA, 33 bp, Homo sapien
tttaaatgtaacacactatagtaacagagaaaa

SEQ ID NO: 405355 - DNA, 33 bp, Homo sapien
tttcagactagacaagccttccttatcatactt

SEQ ID NO: 405356 - DNA, 33 bp, Homo sapien
tttcagactagacaaggcttccttatcatactt

SEQ ID NO: 405357 - DNA, 33 bp, Homo sapien
gaggtctgacccagagaactcaacaacaggata

SEQ ID NO: 405358 - DNA, 33 bp, Homo sapien
gaggtctgacccagagtactcaacaacaggata

SEQ ID NO: 405359 - DNA, 33 bp, Homo sapien
atgtgtgggaacatacactgaggatcatatcca

SEQ ID NO: 405360 - DNA, 33 bp, Homo sapien
atgtgtgggaacatacgctgaggatcatatcca

SEQ ID NO: 405361 - DNA, 33 bp, Homo sapien
tggctttcctattctgacactttcttggtcttg

SEQ ID NO: 405362 - DNA, 33 bp, Homo sapien
tggctttcctattctgccactttcttggtcttg

SEQ ID NO: 405363 - DNA, 33 bp, Homo sapien
ggcagcaaaacaatgacggaaacctcagcaggt

SEQ ID NO: 405364 - DNA, 33 bp, Homo sapien
ggcagcaaaacaatgatggaaacctcagcaggt

SEQ ID NO: 405365 - DNA, 33 bp, Homo sapien
ttgcgtatttgttccaccattttgaagaagagt

SEQ ID NO: 405366 - DNA, 33 bp, Homo sapien
ttgcgtatttgttccatcattttgaagaagagt

SEQ ID NO: 405367 - DNA, 33 bp, Homo sapien
attctagttgctaaaagatgtcattgttttttc

SEQ ID NO: 405368 - DNA, 33 bp, Homo sapien
attctagttgctaaaatatgtcattgttttttc

SEQ ID NO: 405369 - DNA, 33 bp, Homo sapien
atattttccagatggacactagaatttgcattt

SEQ ID NO: 405370 - DNA, 33 bp, Homo sapien
atattttccagatggatactagaatttgcattt

SEQ ID NO: 405371 - DNA, 33 bp, Homo sapien
aagtaagtaacatctcaatgatctcacaggtat

SEQ ID NO: 405372 - DNA, 33 bp, Homo sapien
aagtaagtaacatctctatgatctcacaggtat

SEQ ID NO: 405373 - DNA, 33 bp, Homo sapien
aattatgtcaaaatgaagtggtctttttgaaaa

SEQ ID NO: 405374 - DNA, 33 bp, Homo sapien
aattatgtcaaaatgatgtggtctttttgaaaa

SEQ ID NO: 405375 - DNA, 33 bp, Homo sapien
gagagaagtctttatcacacattagaattatca

SEQ ID NO: 405376 - DNA, 33 bp, Homo sapien
gagagaagtctttatcgcacattagaattatca

SEQ ID NO: 405377 - DNA, 33 bp, Homo sapien
tctagtccattctccagcttaaaattttatctt

SEQ ID NO: 405378 - DNA, 33 bp, Homo sapien
tctagtccattctccatcttaaaattttatctt

SEQ ID NO: 405379 - DNA, 33 bp, Homo sapien
tcatgtaactgacaagaaattagtttccagaat

SEQ ID NO: 405380 - DNA, 33 bp, Homo sapien
tcatgtaactgacaagcaattagtttccagaat

SEQ ID NO: 405381 - DNA, 33 bp, Homo sapien
ggaacaaaatgagtcccgctgtagggaagaaag

SEQ ID NO: 405382 - DNA, 33 bp, Homo sapien
ggaacaaaatgagtcctgctgtagggaagaaag

SEQ ID NO: 405383 - DNA, 33 bp, Homo sapien
ggacaaagatgagatacgagtgtttattcaacc

SEQ ID NO: 405384 - DNA, 33 bp, Homo sapien
ggacaaagatgagatatgagtgtttattcaacc

SEQ ID NO: 405385 - DNA, 33 bp, Homo sapien
acacaaggacagaaaaacagacaccgtgtgttc

SEQ ID NO: 405386 - DNA, 33 bp, Homo sapien
acacaaggacagaaaaccagacaccgtgtgttc

SEQ ID NO: 405387 - DNA, 33 bp, Homo sapien
tcaagataattggtcaactgttgctcactcaga

SEQ ID NO: 405388 - DNA, 33 bp, Homo sapien
tcaagataattggtcagctgttgctcactcaga

SEQ ID NO: 405389 - DNA, 33 bp, Homo sapien
cttatgatattaaaaaaagacacgatgcagcta

SEQ ID NO: 405390 - DNA, 33 bp, Homo sapien
cttatgatattaaaaagagacacgatgcagcta

SEQ ID NO: 405391 - DNA, 33 bp, Homo sapien
tgacgcagctacgccacgaactggagcggcaga

SEQ ID NO: 405392 - DNA, 33 bp, Homo sapien
tgacgcagctacgccatgaactggagcggcaga

SEQ ID NO: 405393 - DNA, 33 bp, Homo sapien
actattttgaagattacgcctaaaagttgtcac

SEQ ID NO: 405394 - DNA, 33 bp, Homo sapien
actattttgaagattatgcctaaaagttgtcac

SEQ ID NO: 405395 - DNA, 33 bp, Homo sapien
taataggacttgccaaatggtgtagctctttta

SEQ ID NO: 405396 - DNA, 33 bp, Homo sapien
taataggacttgccaattggtgtagctctttta

SEQ ID NO: 405397 - DNA, 33 bp, Homo sapien
accagaatctacaatgaaattaatgcttctcta

SEQ ID NO: 405398 - DNA, 33 bp, Homo sapien
accagaatctacaatggaattaatgcttctcta

SEQ ID NO: 405399 - DNA, 33 bp, Homo sapien
cagacatgcctgaaataattagagaagcattaa

SEQ ID NO: 405400 - DNA, 33 bp, Homo sapien
cagacatgcctgaaatgattagagaagcattaa

SEQ ID NO: 405401 - DNA, 33 bp, Homo sapien
aggactggaaagaaaaacaacgctgagccactt

SEQ ID NO: 405402 - DNA, 33 bp, Homo sapien
aggactggaaagaaaagcaacgctgagccactt

SEQ ID NO: 405403 - DNA, 33 bp, Homo sapien
atctcgtcacccttaactctgccttcatcacat

SEQ ID NO: 405404 - DNA, 33 bp, Homo sapien
atctcgtcacccttaattctgccttcatcacat

SEQ ID NO: 405405 - DNA, 33 bp, Homo sapien
gaacagtaagatagtaaattcgtgttttgtgtt

SEQ ID NO: 405406 - DNA, 33 bp, Homo sapien
gaacagtaagatagtacattcgtgttttgtgtt

SEQ ID NO: 405407 - DNA, 33 bp, Homo sapien
ggctcaccttctttagacctccaagacaagcat

SEQ ID NO: 405408 - DNA, 33 bp, Homo sapien
ggctcaccttctttagccctccaagacaagcat

SEQ ID NO: 405409 - DNA, 33 bp, Homo sapien
gactcttcaaagcttacgtccttagtttctctt

SEQ ID NO: 405410 - DNA, 33 bp, Homo sapien
gactcttcaaagcttatgtccttagtttctctt

SEQ ID NO: 405411 - DNA, 33 bp, Homo sapien
tagatagtcacgagtacggatcctattaaactc

SEQ ID NO: 405412 - DNA, 33 bp, Homo sapien
tagatagtcacgagtatggatcctattaaactc

SEQ ID NO: 405413 - DNA, 33 bp, Homo sapien
catttctctggaaggacgttttgcatttatctg

SEQ ID NO: 405414 - DNA, 33 bp, Homo sapien
catttctctggaaggatgttttgcatttatctg

SEQ ID NO: 405415 - DNA, 33 bp, Homo sapien
cgattatgtaagtttcaattagtcaataccatc

SEQ ID NO: 405416 - DNA, 33 bp, Homo sapien
cgattatgtaagtttccattagtcaataccatc

SEQ ID NO: 405417 - DNA, 33 bp, Homo sapien
gccactagtccttgagaccaacagaagcatgta

SEQ ID NO: 405418 - DNA, 33 bp, Homo sapien
gccactagtccttgaggccaacagaagcatgta

SEQ ID NO: 405419 - DNA, 33 bp, Homo sapien
cgggacttgacgtccagcaggatctcgtattct

SEQ ID NO: 405420 - DNA, 33 bp, Homo sapien
cgggacttgacgtccatcaggatctcgtattct

SEQ ID NO: 405421 - DNA, 33 bp, Homo sapien
caagagtgcatcctaacggagacagaggctcgc

SEQ ID NO: 405422 - DNA, 33 bp, Homo sapien
caagagtgcatcctaatggagacagaggctcgc

SEQ ID NO: 405423 - DNA, 33 bp, Homo sapien
ccatgcaaatcttgaacgagcgccttgctaact

SEQ ID NO: 405424 - DNA, 33 bp, Homo sapien
ccatgcaaatcttgaatgagcgccttgctaact

SEQ ID NO: 405425 - DNA, 33 bp, Homo sapien
tatagcctctcttctacgtggtgtcacacaggt

SEQ ID NO: 405426 - DNA, 33 bp, Homo sapien
tatagcctctcttctatgtggtgtcacacaggt

SEQ ID NO: 405427 - DNA, 33 bp, Homo sapien
tgggacagcttttgtacgtgtatgttccatcat

SEQ ID NO: 405428 - DNA, 33 bp, Homo sapien
tgggacagcttttgtatgtgtatgttccatcat

SEQ ID NO: 405429 - DNA, 33 bp, Homo sapien
aggcacaaaacagtacaaacagtatgactacat

SEQ ID NO: 405430 - DNA, 33 bp, Homo sapien
aggcacaaaacagtacgaacagtatgactacat

SEQ ID NO: 405431 - DNA, 33 bp, Homo sapien
aaaatctcaacttacaggaaaaaagatgatcaa

SEQ ID NO: 405432 - DNA, 33 bp, Homo sapien
aaaatctcaacttacatgaaaaaagatgatcaa

SEQ ID NO: 405433 - DNA, 33 bp, Homo sapien
tgtcaagctgtacagcaagtctagaattctctg

SEQ ID NO: 405434 - DNA, 33 bp, Homo sapien
tgtcaagctgtacagcgagtctagaattctctg

SEQ ID NO: 405435 - DNA, 33 bp, Homo sapien
tttgagagaaacctaaataaacttctatccaac

SEQ ID NO: 405436 - DNA, 33 bp, Homo sapien
tttgagagaaacctaagtaaacttctatccaac

SEQ ID NO: 405437 - DNA, 33 bp, Homo sapien
caccattaatgttttccccatcagtagtttgta

SEQ ID NO: 405438 - DNA, 33 bp, Homo sapien
caccattaatgttttctccatcagtagtttgta

SEQ ID NO: 405439 - DNA, 33 bp, Homo sapien
tctcccctatgtatcactaactcttagaatttt

SEQ ID NO: 405440 - DNA, 33 bp, Homo sapien
tctcccctatgtatcattaactcttagaatttt

SEQ ID NO: 405441 - DNA, 33 bp, Homo sapien
tcatggcctttcatgacgtctatttctttttct

SEQ ID NO: 405442 - DNA, 33 bp, Homo sapien
tcatggcctttcatgatgtctatttctttttct

SEQ ID NO: 405443 - DNA, 33 bp, Homo sapien
aggatgaagctcctaaaagtgaattacttacca

SEQ ID NO: 405444 - DNA, 33 bp, Homo sapien
aggatgaagctcctaagagtgaattacttacca

SEQ ID NO: 405445 - DNA, 33 bp, Homo sapien
agatctcttgttgacaatatcctctgtagtgtc

SEQ ID NO: 405446 - DNA, 33 bp, Homo sapien
agatctcttgttgacagtatcctctgtagtgtc

SEQ ID NO: 405447 - DNA, 33 bp, Homo sapien
agtaatcaatagaatgccaatacttttcaggtg

SEQ ID NO: 405448 - DNA, 33 bp, Homo sapien
agtaatcaatagaatgtcaatacttttcaggtg

SEQ ID NO: 405449 - DNA, 33 bp, Homo sapien
agtatggtggcaaataaaggtatgtccctggtg

SEQ ID NO: 405450 - DNA, 33 bp, Homo sapien
agtatggtggcaaatagaggtatgtccctggtg

SEQ ID NO: 405451 - DNA, 33 bp, Homo sapien
aagagtagataaataaatgttggttcacaccaa

SEQ ID NO: 405452 - DNA, 33 bp, Homo sapien
aagagtagataaataagtgttggttcacaccaa

SEQ ID NO: 405453 - DNA, 33 bp, Homo sapien
atcttttaaagaagaccctattggcagaatgac

SEQ ID NO: 405454 - DNA, 33 bp, Homo sapien
atcttttaaagaagactctattggcagaatgac

SEQ ID NO: 405455 - DNA, 33 bp, Homo sapien
caatgcccacttgggaaggtatataagagccct

SEQ ID NO: 405456 - DNA, 33 bp, Homo sapien
caatgcccacttgggagggtatataagagccct

SEQ ID NO: 405457 - DNA, 33 bp, Homo sapien
tggacatgtaaatgacaaactgattagagaatc

SEQ ID NO: 405458 - DNA, 33 bp, Homo sapien
tggacatgtaaatgacgaactgattagagaatc

SEQ ID NO: 405459 - DNA, 33 bp, Homo sapien
gtagtgaatttctcaaggttgtattattctatg

SEQ ID NO: 405460 - DNA, 33 bp, Homo sapien
gtagtgaatttctcaatgttgtattattctatg

SEQ ID NO: 405461 - DNA, 33 bp, Homo sapien
ggatttgtgctgatcacggacaggtgtaggaag

SEQ ID NO: 405462 - DNA, 33 bp, Homo sapien
ggatttgtgctgatcatggacaggtgtaggaag

SEQ ID NO: 405463 - DNA, 33 bp, Homo sapien
acattaccaaaaaccaatacgatctacttaaaa

SEQ ID NO: 405464 - DNA, 33 bp, Homo sapien
acattaccaaaaaccagtacgatctacttaaaa

SEQ ID NO: 405465 - DNA, 33 bp, Homo sapien
gggggagagcaaaccaacctctgtgagatgaga

SEQ ID NO: 405466 - DNA, 33 bp, Homo sapien
gggggagagcaaaccagcctctgtgagatgaga

SEQ ID NO: 405467 - DNA, 33 bp, Homo sapien
ggtcatgttaaggatacgttttctctttaatgc

SEQ ID NO: 405468 - DNA, 33 bp, Homo sapien
ggtcatgttaaggatatgttttctctttaatgc

SEQ ID NO: 405469 - DNA, 33 bp, Homo sapien
accactgaagaacagagaagcaaattcaagtgg

SEQ ID NO: 405470 - DNA, 33 bp, Homo sapien
accactgaagaacagataagcaaattcaagtgg

SEQ ID NO: 405471 - DNA, 33 bp, Homo sapien
atactgcctcaacattcaatgctataattaccc

SEQ ID NO: 405472 - DNA, 33 bp, Homo sapien
atactgcctcaacatttaatgctataattaccc

SEQ ID NO: 405473 - DNA, 33 bp, Homo sapien
atttagttttgaagtaaggggatccatggtagc

SEQ ID NO: 405474 - DNA, 33 bp, Homo sapien
atttagttttgaagtagggggatccatggtagc

SEQ ID NO: 405475 - DNA, 33 bp, Homo sapien
catatatttttctccaaacttacttgaccatgg

SEQ ID NO: 405476 - DNA, 33 bp, Homo sapien
catatatttttctccagacttacttgaccatgg

SEQ ID NO: 405477 - DNA, 33 bp, Homo sapien
gaatagagacatttccgagtttcatctaaacca

SEQ ID NO: 405478 - DNA, 33 bp, Homo sapien
gaatagagacatttcctagtttcatctaaacca

SEQ ID NO: 405479 - DNA, 33 bp, Homo sapien
acctgttagaatccaactgagaaactagaaaga

SEQ ID NO: 405480 - DNA, 33 bp, Homo sapien
acctgttagaatccaattgagaaactagaaaga

SEQ ID NO: 405481 - DNA, 33 bp, Homo sapien
taacagttagggtcccacagaagatgagaacca

SEQ ID NO: 405482 - DNA, 33 bp, Homo sapien
taacagttagggtcccgcagaagatgagaacca

SEQ ID NO: 405483 - DNA, 33 bp, Homo sapien
aaacaacagtttcagcgctacaggacatctccc

SEQ ID NO: 405484 - DNA, 33 bp, Homo sapien
aaacaacagtttcagctctacaggacatctccc

SEQ ID NO: 405485 - DNA, 33 bp, Homo sapien
acaaaggtaaggtaacagtatctattttacagg

SEQ ID NO: 405486 - DNA, 33 bp, Homo sapien
acaaaggtaaggtaactgtatctattttacagg

SEQ ID NO: 405487 - DNA, 33 bp, Homo sapien
aatacaatcccctgaacatctgagtatagatat

SEQ ID NO: 405488 - DNA, 33 bp, Homo sapien
aatacaatcccctgaatatctgagtatagatat

SEQ ID NO: 405489 - DNA, 33 bp, Homo sapien
gttaaactccttgccaataaaaaatgaaatgca

SEQ ID NO: 405490 - DNA, 33 bp, Homo sapien
gttaaactccttgccactaaaaaatgaaatgca

SEQ ID NO: 405491 - DNA, 33 bp, Homo sapien
gaaaggaggtgaaccaacgtggccttgttagta

SEQ ID NO: 405492 - DNA, 33 bp, Homo sapien
gaaaggaggtgaaccagcgtggccttgttagta

SEQ ID NO: 405493 - DNA, 33 bp, Homo sapien
agacacagtgaaaaagactaggtatgagaggct

SEQ ID NO: 405494 - DNA, 33 bp, Homo sapien
agacacagtgaaaaaggctaggtatgagaggct

SEQ ID NO: 405495 - DNA, 33 bp, Homo sapien
gatgaattaaggtatcaaaggatggagacaaga

SEQ ID NO: 405496 - DNA, 33 bp, Homo sapien
gatgaattaaggtatcgaaggatggagacaaga

SEQ ID NO: 405497 - DNA, 33 bp, Homo sapien
gtatatcccaagcaaactgatgatcagcaggtg

SEQ ID NO: 405498 - DNA, 33 bp, Homo sapien
gtatatcccaagcaaattgatgatcagcaggtg

SEQ ID NO: 405499 - DNA, 33 bp, Homo sapien
tggatgctaagtaccaggatgttgttaagctgc

SEQ ID NO: 405500 - DNA, 33 bp, Homo sapien
tggatgctaagtaccatgatgttgttaagctgc

SEQ ID NO: 405501 - DNA, 33 bp, Homo sapien
gcactgtgtaaggttaagttatggtaacagagc

SEQ ID NO: 405502 - DNA, 33 bp, Homo sapien
gcactgtgtaaggttaggttatggtaacagagc

SEQ ID NO: 405503 - DNA, 33 bp, Homo sapien
ctgtttacataattccagaagtctcttgcttat

SEQ ID NO: 405504 - DNA, 33 bp, Homo sapien
ctgtttacataattcctgaagtctcttgcttat

SEQ ID NO: 405505 - DNA, 33 bp, Homo sapien
aacaggactgtccacaataggatgggcggcagc

SEQ ID NO: 405506 - DNA, 33 bp, Homo sapien
aacaggactgtccacagtaggatgggcggcagc

SEQ ID NO: 405507 - DNA, 33 bp, Homo sapien
gataaaaatgttgctcaccacaaatagaggaat

SEQ ID NO: 405508 - DNA, 33 bp, Homo sapien
gataaaaatgttgctcgccacaaatagaggaat

SEQ ID NO: 405509 - DNA, 33 bp, Homo sapien
gtgtgtggctattgaaatgtaaaataaagttgt

SEQ ID NO: 405510 - DNA, 33 bp, Homo sapien
gtgtgtggctattgaagtgtaaaataaagttgt

SEQ ID NO: 405511 - DNA, 33 bp, Homo sapien
cagacaacatgatatacgagttagactggagtc

SEQ ID NO: 405512 - DNA, 33 bp, Homo sapien
cagacaacatgatataggagttagactggagtc

SEQ ID NO: 405513 - DNA, 33 bp, Homo sapien
catctcaagttgttagcattctttgccactgct

SEQ ID NO: 405514 - DNA, 33 bp, Homo sapien
catctcaagttgttagtattctttgccactgct

SEQ ID NO: 405515 - DNA, 33 bp, Homo sapien
tccctgatctttgaaggcctttgagtctatgat

SEQ ID NO: 405516 - DNA, 33 bp, Homo sapien
tccctgatctttgaagtcctttgagtctatgat

SEQ ID NO: 405517 - DNA, 33 bp, Homo sapien
ttcctccaaagtcgtacggatcaaagagtggca

SEQ ID NO: 405518 - DNA, 33 bp, Homo sapien
ttcctccaaagtcgtatggatcaaagagtggca

SEQ ID NO: 405519 - DNA, 33 bp, Homo sapien
aaagaccagggatacacctcttgtccaatagct

SEQ ID NO: 405520 - DNA, 33 bp, Homo sapien
aaagaccagggatacatctcttgtccaatagct

SEQ ID NO: 405521 - DNA, 33 bp, Homo sapien
gattatttctgagaacaaagtccttaaggaatg

SEQ ID NO: 405522 - DNA, 33 bp, Homo sapien
gattatttctgagaacgaagtccttaaggaatg

SEQ ID NO: 405523 - DNA, 33 bp, Homo sapien
tgtttattagcgtacaaagataagcaagatttt

SEQ ID NO: 405524 - DNA, 33 bp, Homo sapien
tgtttattagcgtacacagataagcaagatttt

SEQ ID NO: 405525 - DNA, 33 bp, Homo sapien
agggctctgtgaagtacggcataaagagccaag

SEQ ID NO: 405526 - DNA, 33 bp, Homo sapien
agggctctgtgaagtatggcataaagagccaag

SEQ ID NO: 405527 - DNA, 33 bp, Homo sapien
accacatggagacacactgtacaggaagaagtg

SEQ ID NO: 405528 - DNA, 33 bp, Homo sapien
accacatggagacacattgtacaggaagaagtg

SEQ ID NO: 405529 - DNA, 33 bp, Homo sapien
tcaaaaatagaactcaactgcaattccaatttg

SEQ ID NO: 405530 - DNA, 33 bp, Homo sapien
tcaaaaatagaactcatctgcaattccaatttg

SEQ ID NO: 405531 - DNA, 33 bp, Homo sapien
aatggaggttcctgcacagtctgtagaacagaa

SEQ ID NO: 405532 - DNA, 33 bp, Homo sapien
aatggaggttcctgcatagtctgtagaacagaa

SEQ ID NO: 405533 - DNA, 33 bp, Homo sapien
tcatcacttagaagcactctttagctatgatgc

SEQ ID NO: 405534 - DNA, 33 bp, Homo sapien
tcatcacttagaagcattctttagctatgatgc

SEQ ID NO: 405535 - DNA, 33 bp, Homo sapien
aatgtattgggaagaaactaaatgacattatta

SEQ ID NO: 405536 - DNA, 33 bp, Homo sapien
aatgtattgggaagaagctaaatgacattatta

SEQ ID NO: 405537 - DNA, 33 bp, Homo sapien
atgcaatctatgcatgcaacaaagtcacacttg

SEQ ID NO: 405538 - DNA, 33 bp, Homo sapien
atgcaatctatgcatgtaacaaagtcacacttg

SEQ ID NO: 405539 - DNA, 33 bp, Homo sapien
accagactgactgttgcagtactgtaggatatg

SEQ ID NO: 405540 - DNA, 33 bp, Homo sapien
accagactgactgttgtagtactgtaggatatg

SEQ ID NO: 405541 - DNA, 33 bp, Homo sapien
catgtccttctcatacacaaaatatattccttt

SEQ ID NO: 405542 - DNA, 33 bp, Homo sapien
catgtccttctcatacgcaaaatatattccttt

SEQ ID NO: 405543 - DNA, 33 bp, Homo sapien
ttcaaaatgatttcaacacgggttgctcctcct

SEQ ID NO: 405544 - DNA, 33 bp, Homo sapien
ttcaaaatgatttcaagacgggttgctcctcct

SEQ ID NO: 405545 - DNA, 33 bp, Homo sapien
gaaggcactactcttgaagattctaattaggat

SEQ ID NO: 405546 - DNA, 33 bp, Homo sapien
gaaggcactactcttggagattctaattaggat

SEQ ID NO: 405547 - DNA, 33 bp, Homo sapien
ctgtagtttgtaggtccaccttaaggctcttct

SEQ ID NO: 405548 - DNA, 33 bp, Homo sapien
ctgtagtttgtaggtcgaccttaaggctcttct

SEQ ID NO: 405549 - DNA, 33 bp, Homo sapien
tgaggtcacatgaaccaatcaaaggatggtaaa

SEQ ID NO: 405550 - DNA, 33 bp, Homo sapien
tgaggtcacatgaacctatcaaaggatggtaaa

SEQ ID NO: 405551 - DNA, 33 bp, Homo sapien; identical to SEQ ID NO: 405549

SEQ ID NO: 405552 - DNA, 33 bp, Homo sapien; identical to SEQ ID NO: 405550

SEQ ID NO: 405553 - DNA, 33 bp, Homo sapien
caggacttatcctgagacaaattctcctccata

SEQ ID NO: 405554 - DNA, 33 bp, Homo sapien
caggacttatcctgaggcaaattctcctccata

SEQ ID NO: 405555 - DNA, 33 bp, Homo sapien
tacattgtgagaaaaaacagctttcgagtatga

SEQ ID NO: 405556 - DNA, 33 bp, Homo sapien
tacattgtgagaaaaagcagctttcgagtatga

SEQ ID NO: 405557 - DNA, 33 bp, Homo sapien
atctaacaggtgagaaatatcgtaccatattat

SEQ ID NO: 405558 - DNA, 33 bp, Homo sapien
atctaacaggtgagaagtatcgtaccatattat

SEQ ID NO: 405559 - DNA, 33 bp, Homo sapien
atctaatataaagacaatctgagcaagtatttc

SEQ ID NO: 405560 - DNA, 33 bp, Homo sapien
atctaatataaagacagtctgagcaagtatttc

SEQ ID NO: 405561 - DNA, 33 bp, Homo sapien
tgatttttaaaattgaagtccacagttacataa

SEQ ID NO: 405562 - DNA, 33 bp, Homo sapien
tgatttttaaaattgaggtccacagttacataa

SEQ ID NO: 405563 - DNA, 33 bp, Homo sapien
tctggccagtgagtaacgaagaggttaatcaac

SEQ ID NO: 405564 - DNA, 33 bp, Homo sapien
tctggccagtgagtaaggaagaggttaatcaac

SEQ ID NO: 405565 - DNA, 33 bp, Homo sapien
ttagcatgggcaaataatactgagagactttga

SEQ ID NO: 405566 - DNA, 33 bp, Homo sapien
ttagcatgggcaaatagtactgagagactttga

SEQ ID NO: 405567 - DNA, 33 bp, Homo sapien
tcatttcctgtagatacataaggtacccagaag

SEQ ID NO: 405568 - DNA, 33 bp, Homo sapien
tcatttcctgtagatatataaggtacccagaag

SEQ ID NO: 405569 - DNA, 33 bp, Homo sapien
tgagtactttttcacaaacctgttagccatttg

SEQ ID NO: 405570 - DNA, 33 bp, Homo sapien
tgagtactttttcacacacctgttagccatttg

SEQ ID NO: 405571 - DNA, 33 bp, Homo sapien
tatacactaatagcaaaccatctgaaaaagaaa

SEQ ID NO: 405572 - DNA, 33 bp, Homo sapien
tatacactaatagcaagccatctgaaaaagaaa

SEQ ID NO: 405573 - DNA, 33 bp, Homo sapien
ttccagtactatgttgaataggagtggtacaag

SEQ ID NO: 405574 - DNA, 33 bp, Homo sapien
ttccagtactatgttggataggagtggtacaag

SEQ ID NO: 405575 - DNA, 33 bp, Homo sapien
acaagactaggatgacaacttgtaccactccta

SEQ ID NO: 405576 - DNA, 33 bp, Homo sapien
acaagactaggatgacgacttgtaccactccta

SEQ ID NO: 405577 - DNA, 33 bp, Homo sapien
acagaaatactctcacaaggaatcaaacctaac

SEQ ID NO: 405578 - DNA, 33 bp, Homo sapien
acagaaatactctcacgaggaatcaaacctaac

SEQ ID NO: 405579 - DNA, 33 bp, Homo sapien
gtgcctcagtcagaaacaccagctcacactgaa

SEQ ID NO: 405580 - DNA, 33 bp, Homo sapien
gtgcctcagtcagaaataccagctcacactgaa

SEQ ID NO: 405581 - DNA, 33 bp, Homo sapien
aacctgcttctgttcactctgactgaggacaaa

SEQ ID NO: 405582 - DNA, 33 bp, Homo sapien
aacctgcttctgttcattctgactgaggacaaa

SEQ ID NO: 405583 - DNA, 33 bp, Homo sapien
taattcaagttctcgaggaaatcttagagttgt

SEQ ID NO: 405584 - DNA, 33 bp, Homo sapien
taattcaagttctcgatgaaatcttagagttgt

SEQ ID NO: 405585 - DNA, 33 bp, Homo sapien
tactagatccctagaacttagtaccaatgtcag

SEQ ID NO: 405586 - DNA, 33 bp, Homo sapien
tactagatccctagaatttagtaccaatgtcag

SEQ ID NO: 405587 - DNA, 33 bp, Homo sapien
tgtataagctggggggcaattgaatgattaaaa

SEQ ID NO: 405588 - DNA, 33 bp, Homo sapien
tgtataagctggggggtaattgaatgattaaaa

SEQ ID NO: 405589 - DNA, 33 bp, Homo sapien
ttcccaatgattttaaaccattaaatggacaaa

SEQ ID NO: 405590 - DNA, 33 bp, Homo sapien
ttcccaatgattttaagccattaaatggacaaa

SEQ ID NO: 405591 - DNA, 33 bp, Homo sapien
gtgttgattgcaaataccagttgggttcacttc

SEQ ID NO: 405592 - DNA, 33 bp, Homo sapien
gtgttgattgcaaatatcagttgggttcacttc

SEQ ID NO: 405593 - DNA, 33 bp, Homo sapien
gattctatttcttgacgaaggctttgggtacat

SEQ ID NO: 405594 - DNA, 33 bp, Homo sapien
gattctatttcttgactaaggctttgggtacat

SEQ ID NO: 405595 - DNA, 33 bp, Homo sapien
tggaaaacactatgacacagagaacataggtaa

SEQ ID NO: 405596 - DNA, 33 bp, Homo sapien
tggaaaacactatgacgcagagaacataggtaa

SEQ ID NO: 405597 - DNA, 33 bp, Homo sapien
tggttattgaaaaggacacatttgccagtttgg

SEQ ID NO: 405598 - DNA, 33 bp, Homo sapien
tggttattgaaaaggatacatttgccagtttgg

SEQ ID NO: 405599 - DNA, 33 bp, Homo sapien
gtgacttttataagaaaatgctctcaggagaaa

SEQ ID NO: 405600 - DNA, 33 bp, Homo sapien
gtgacttttataagaagatgctctcaggagaaa

SEQ ID NO: 405601 - DNA, 33 bp, Homo sapien
tttaacacatggacaaattgatataaatgacac

SEQ ID NO: 405602 - DNA, 33 bp, Homo sapien
tttaacacatggacaagttgatataaatgacac

SEQ ID NO: 405603 - DNA, 33 bp, Homo sapien
acttgctatcaaactacctgcttcaggaccacc

SEQ ID NO: 405604 - DNA, 33 bp, Homo sapien
acttgctatcaaactatctgcttcaggaccacc

SEQ ID NO: 405605 - DNA, 33 bp, Homo sapien
tgcacactccagaaaccgaaattatttacattc

SEQ ID NO: 405606 - DNA, 33 bp, Homo sapien
tgcacactccagaaactgaaattatttacattc

SEQ ID NO: 405607 - DNA, 33 bp, Homo sapien
tttcacttttcatgcaagtatatctataggaag

SEQ ID NO: 405608 - DNA, 33 bp, Homo sapien
tttcacttttcatgcaggtatatctataggaag

SEQ ID NO: 405609 - DNA, 33 bp, Homo sapien
gggctctgaagagatcaactgttctcccagcac

SEQ ID NO: 405610 - DNA, 33 bp, Homo sapien
gggctctgaagagatcgactgttctcccagcac

SEQ ID NO: 405611 - DNA, 33 bp, Homo sapien
gccctgaatgcagggagctctttttgtctcagc

SEQ ID NO: 405612 - DNA, 33 bp, Homo sapien
gccctgaatgcagggatctctttttgtctcagc

SEQ ID NO: 405613 - DNA, 33 bp, Homo sapien
cactggagtgctagaagtacctctgatcagcta

SEQ ID NO: 405614 - DNA, 33 bp, Homo sapien
cactggagtgctagaattacctctgatcagcta

SEQ ID NO: 405615 - DNA, 33 bp, Homo sapien
tggtggggtaaaggagaactagcacattctcat

SEQ ID NO: 405616 - DNA, 33 bp, Homo sapien
tggtggggtaaaggagtactagcacattctcat

SEQ ID NO: 405617 - DNA, 33 bp, Homo sapien
ttaagaaacagattaaacccttactctcagaag

SEQ ID NO: 405618 - DNA, 33 bp, Homo sapien
ttaagaaacagattaagcccttactctcagaag

SEQ ID NO: 405619 - DNA, 33 bp, Homo sapien
aacaggaacttctaaaacaccacatgagtaagg

SEQ ID NO: 405620 - DNA, 33 bp, Homo sapien
aacaggaacttctaaaccaccacatgagtaagg

SEQ ID NO: 405621 - DNA, 33 bp, Homo sapien
aaaagatgtatgcattaaaagtctgaggaattg

SEQ ID NO: 405622 - DNA, 33 bp, Homo sapien
aaaagatgtatgcattcaaagtctgaggaattg

SEQ ID NO: 405623 - DNA, 33 bp, Homo sapien
ttttctgcattagttacctccaaacctacaatt

SEQ ID NO: 405624 - DNA, 33 bp, Homo sapien
ttttctgcattagttatctccaaacctacaatt

SEQ ID NO: 405625 - DNA, 33 bp, Homo sapien
ttagcgagtttatacaatctatccaatttaggc

SEQ ID NO: 405626 - DNA, 33 bp, Homo sapien
ttagcgagtttatacagtctatccaatttaggc

SEQ ID NO: 405627 - DNA, 33 bp, Homo sapien
ctaaactgacctaaaactgctcttgctgaagac

SEQ ID NO: 405628 - DNA, 33 bp, Homo sapien
ctaaactgacctaaaagtgctcttgctgaagac

SEQ ID NO: 405629 - DNA, 33 bp, Homo sapien
agtccaatgtttctttaaaaaggcagtaaggac

SEQ ID NO: 405630 - DNA, 33 bp, Homo sapien
agtccaatgtttctttcaaaaggcagtaaggac

SEQ ID NO: 405631 - DNA, 33 bp, Homo sapien
aattaaccagttattaagacaatcagcagaggt

SEQ ID NO: 405632 - DNA, 33 bp, Homo sapien
aattaaccagttattaggacaatcagcagaggt

SEQ ID NO: 405633 - DNA, 33 bp, Homo sapien
attactaggtgataaactgggaaatgccttagt

SEQ ID NO: 405634 - DNA, 33 bp, Homo sapien
attactaggtgataaattgggaaatgccttagt

SEQ ID NO: 405635 - DNA, 33 bp, Homo sapien
ggcttgaaaatatagcagatgggttgataataa

SEQ ID NO: 405636 - DNA, 33 bp, Homo sapien
ggcttgaaaatatagctgatgggttgataataa

SEQ ID NO: 405637 - DNA, 33 bp, Homo sapien
catcctgctcggaatccacttgttgtcaggaaa

SEQ ID NO: 405638 - DNA, 33 bp, Homo sapien
catcctgctcggaatctacttgttgtcaggaaa

SEQ ID NO: 405639 - DNA, 33 bp, Homo sapien
ttcgtgtcaacctacccgccttccagcaacgtc

SEQ ID NO: 405640 - DNA, 33 bp, Homo sapien
ttcgtgtcaacctacctgccttccagcaacgtc

SEQ ID NO: 405641 - DNA, 33 bp, Homo sapien
cattggaaagacatccaatacagaggggctttt

SEQ ID NO: 405642 - DNA, 33 bp, Homo sapien
cattggaaagacatccgatacagaggggctttt

SEQ ID NO: 405643 - DNA, 33 bp, Homo sapien
ccaagaaagtccctcacgaattcctcttggaag

SEQ ID NO: 405644 - DNA, 33 bp, Homo sapien
ccaagaaagtccctcatgaattcctcttggaag

SEQ ID NO: 405645 - DNA, 33 bp, Homo sapien
tctgattataagcataacaatgaactctaaaaa

SEQ ID NO: 405646 - DNA, 33 bp, Homo sapien
tctgattataagcatagcaatgaactctaaaaa

SEQ ID NO: 405647 - DNA, 33 bp, Homo sapien
caggcatgagggacggaatgttttctttgttat

SEQ ID NO: 405648 - DNA, 33 bp, Homo sapien
caggcatgagggacgggatgttttctttgttat

SEQ ID NO: 405649 - DNA, 33 bp, Homo sapien
aatgagaggatgtagacgtagaggatgtagttc

SEQ ID NO: 405650 - DNA, 33 bp, Homo sapien
aatgagaggatgtagatgtagaggatgtagttc

SEQ ID NO: 405651 - DNA, 33 bp, Homo sapien
ctctcatggcatcaaccaagatattagagttct

SEQ ID NO: 405652 - DNA, 33 bp, Homo sapien
ctctcatggcatcaactaagatattagagttct

SEQ ID NO: 405653 - DNA, 33 bp, Homo sapien
ctgtgtcgccaacttacctggagcctttagaat

SEQ ID NO: 405654 - DNA, 33 bp, Homo sapien
ctgtgtcgccaacttatctggagcctttagaat

SEQ ID NO: 405655 - DNA, 33 bp, Homo sapien
gaagctgaccaaatgcactgctggaagtgggct

SEQ ID NO: 405656 - DNA, 33 bp, Homo sapien
gaagctgaccaaatgcgctgctggaagtgggct

SEQ ID NO: 405657 - DNA, 33 bp, Homo sapien
tattttaaaacatggacgtggttatccttccat

SEQ ID NO: 405658 - DNA, 33 bp, Homo sapien
tattttaaaacatggaggtggttatccttccat

SEQ ID NO: 405659 - DNA, 33 bp, Homo sapien
atgtgttgcaaggcccacaccgagcacgtaggc

SEQ ID NO: 405660 - DNA, 33 bp, Homo sapien
atgtgttgcaaggcccgcaccgagcacgtaggc

SEQ ID NO: 405661 - DNA, 33 bp, Homo sapien
ctggaggcactgtgtcacccactcctcaccttc

SEQ ID NO: 405662 - DNA, 33 bp, Homo sapien
ctggaggcactgtgtcgcccactcctcaccttc

SEQ ID NO: 405663 - DNA, 33 bp, Homo sapien
tgatgtaagagcttcacggtgtgacttcaaaga

SEQ ID NO: 405664 - DNA, 33 bp, Homo sapien
tgatgtaagagcttcatggtgtgacttcaaaga

SEQ ID NO: 405665 - DNA, 33 bp, Homo sapien
tgtggcttgaggcccccaactctttggcaagct

SEQ ID NO: 405666 - DNA, 33 bp, Homo sapien
tgtggcttgaggcccctaactctttggcaagct

SEQ ID NO: 405667 - DNA, 33 bp, Homo sapien
atttatatttaagccaagtgttgtgatgaaaag

SEQ ID NO: 405668 - DNA, 33 bp, Homo sapien
atttatatttaagccacgtgttgtgatgaaaag

SEQ ID NO: 405669 - DNA, 33 bp, Homo sapien
gacattctgagcagagcatggagtatcactcag

SEQ ID NO: 405670 - DNA, 33 bp, Homo sapien
gacattctgagcagaggatggagtatcactcag

SEQ ID NO: 405671 - DNA, 33 bp, Homo sapien
tccgtggttaagcatcactggtgggttggcatg

SEQ ID NO: 405672 - DNA, 33 bp, Homo sapien
tccgtggttaagcatcgctggtgggttggcatg

SEQ ID NO: 405673 - DNA, 33 bp, Homo sapien
acattaagttccaggaaacctcaagagtatgag

SEQ ID NO: 405674 - DNA, 33 bp, Homo sapien
acattaagttccaggagacctcaagagtatgag

SEQ ID NO: 405675 - DNA, 33 bp, Homo sapien
ttcttggctgccttacgcgggcaactccagcca

SEQ ID NO: 405676 - DNA, 33 bp, Homo sapien
ttcttggctgccttactcgggcaactccagcca

SEQ ID NO: 405677 - DNA, 33 bp, Homo sapien
gttgacaaagaagctcaactcacttcctgccat

SEQ ID NO: 405678 - DNA, 33 bp, Homo sapien
gttgacaaagaagctccactcacttcctgccat

SEQ ID NO: 405679 - DNA, 33 bp, Homo sapien
tttgctattaaacttcacttctgcagcagaatg

SEQ ID NO: 405680 - DNA, 33 bp, Homo sapien
tttgctattaaacttcgcttctgcagcagaatg

SEQ ID NO: 405681 - DNA, 33 bp, Homo sapien
cctcaggagaaggaaaataagagacacctggtt

SEQ ID NO: 405682 - DNA, 33 bp, Homo sapien
cctcaggagaaggaaagtaagagacacctggtt

SEQ ID NO: 405683 - DNA, 33 bp, Homo sapien
gtagaatctagggccccgatgctgagagtgggt

SEQ ID NO: 405684 - DNA, 33 bp, Homo sapien
gtagaatctagggccctgatgctgagagtgggt

SEQ ID NO: 405685 - DNA, 33 bp, Homo sapien
ataagcaaatgggaaaatcttgtccagagtgca

SEQ ID NO: 405686 - DNA, 33 bp, Homo sapien
ataagcaaatgggaaagtcttgtccagagtgca

SEQ ID NO: 405687 - DNA, 33 bp, Homo sapien
tcctctcacactttaacgaggaatttgaccgca

SEQ ID NO: 405688 - DNA, 33 bp, Homo sapien
tcctctcacactttaatgaggaatttgaccgca

SEQ ID NO: 405689 - DNA, 33 bp, Homo sapien
ggagttttctagctcaaatcatgaaggagaaaa

SEQ ID NO: 405690 - DNA, 33 bp, Homo sapien
ggagttttctagctcagatcatgaaggagaaaa

SEQ ID NO: 405691 - DNA, 33 bp, Homo sapien
acggcatgatttaaaactgcacttgcacttcaa

SEQ ID NO: 405692 - DNA, 33 bp, Homo sapien
acggcatgatttaaaattgcacttgcacttcaa

SEQ ID NO: 405693 - DNA, 33 bp, Homo sapien
aaggcgagggatacccaaagagagatgcttgtt

SEQ ID NO: 405694 - DNA, 33 bp, Homo sapien
aaggcgagggatacccgaagagagatgcttgtt

SEQ ID NO: 405695 - DNA, 33 bp, Homo sapien
gtcacgcaggagggagacgtggagcacggattg

SEQ ID NO: 405696 - DNA, 33 bp, Homo sapien
gtcacgcaggagggaggcgtggagcacggattg

SEQ ID NO: 405697 - DNA, 33 bp, Homo sapien
gtagtgagacctccaaaataaaatgctactagg

SEQ ID NO: 405698 - DNA, 33 bp, Homo sapien
gtagtgagacctccaagataaaatgctactagg

SEQ ID NO: 405699 - DNA, 33 bp, Homo sapien
ctgcagttgccacagaatacaatggcaaaaatg

SEQ ID NO: 405700 - DNA, 33 bp, Homo sapien
ctgcagttgccacagagtacaatggcaaaaatg

SEQ ID NO: 405701 - DNA, 33 bp, Homo sapien
aagatgcatgatcttacgcaagtcagttgatct

SEQ ID NO: 405702 - DNA, 33 bp, Homo sapien
aagatgcatgatcttaggcaagtcagttgatct

SEQ ID NO: 405703 - DNA, 33 bp, Homo sapien
gttcatccttcaaatcacctcattttgctcctg

SEQ ID NO: 405704 - DNA, 33 bp, Homo sapien
gttcatccttcaaatcgcctcattttgctcctg

SEQ ID NO: 405705 - DNA, 33 bp, Homo sapien
ggaggaatccatgtaaagctcagagaactttgg

SEQ ID NO: 405706 - DNA, 33 bp, Homo sapien
ggaggaatccatgtaaggctcagagaactttgg

SEQ ID NO: 405707 - DNA, 33 bp, Homo sapien
ccataaagaggccaaacccagtcaaggtctaag

SEQ ID NO: 405708 - DNA, 33 bp, Homo sapien
ccataaagaggccaaatccagtcaaggtctaag

SEQ ID NO: 405709 - DNA, 33 bp, Homo sapien
gaaccattgtcatcacaggggttagtcctcctg

SEQ ID NO: 405710 - DNA, 33 bp, Homo sapien
gaaccattgtcatcaccggggttagtcctcctg

SEQ ID NO: 405711 - DNA, 33 bp, Homo sapien
ctaggggattgagcaacgataccttttaatctt

SEQ ID NO: 405712 - DNA, 33 bp, Homo sapien
ctaggggattgagcaatgataccttttaatctt

SEQ ID NO: 405713 - DNA, 33 bp, Homo sapien
acgtctgatccctataaaggtgtatgttcagct

SEQ ID NO: 405714 - DNA, 33 bp, Homo sapien
acgtctgatccctatagaggtgtatgttcagct

SEQ ID NO: 405715 - DNA, 33 bp, Homo sapien
catggaatgaatctggacagaggataaagccaa

SEQ ID NO: 405716 - DNA, 33 bp, Homo sapien
catggaatgaatctgggcagaggataaagccaa

SEQ ID NO: 405717 - DNA, 33 bp, Homo sapien
caaccagagatatgccagcaaattagctctctg

SEQ ID NO: 405718 - DNA, 33 bp, Homo sapien
caaccagagatatgccggcaaattagctctctg

SEQ ID NO: 405719 - DNA, 33 bp, Homo sapien
tccagtttgtagtgtaagccaatttctgtggtg

SEQ ID NO: 405720 - DNA, 33 bp, Homo sapien
tccagtttgtagtgtaggccaatttctgtggtg

SEQ ID NO: 405721 - DNA, 33 bp, Homo sapien
aagaaatgtactgtcaggattttggttttagaa

SEQ ID NO: 405722 - DNA, 33 bp, Homo sapien
aagaaatgtactgtcatgattttggttttagaa

SEQ ID NO: 405723 - DNA, 33 bp, Homo sapien
ctggtgtatagtcaaaattagaagttgttctca

SEQ ID NO: 405724 - DNA, 33 bp, Homo sapien
ctggtgtatagtcaaagttagaagttgttctca

SEQ ID NO: 405725 - DNA, 33 bp, Homo sapien
ctcattggtctttgtacagtgtttatctctctc

SEQ ID NO: 405726 - DNA, 33 bp, Homo sapien
ctcattggtctttgtatagtgtttatctctctc

SEQ ID NO: 405727 - DNA, 33 bp, Homo sapien
gacctgtacctgacacaaaagagatggacagag

SEQ ID NO: 405728 - DNA, 33 bp, Homo sapien
gacctgtacctgacacgaaagagatggacagag

SEQ ID NO: 405729 - DNA, 33 bp, Homo sapien
tctttgaaccatttcaacaatcctctaaggtgg

SEQ ID NO: 405730 - DNA, 33 bp, Homo sapien
tctttgaaccatttcagcaatcctctaaggtgg

SEQ ID NO: 405731 - DNA, 33 bp, Homo sapien
caagacctatttcaaacgccaccagctacaaga

SEQ ID NO: 405732 - DNA, 33 bp, Homo sapien
caagacctatttcaaatgccaccagctacaaga

SEQ ID NO: 405733 - DNA, 33 bp, Homo sapien
caactaacttgaccaccctatgcctccatttcc

SEQ ID NO: 405734 - DNA, 33 bp, Homo sapien
caactaacttgaccactctatgcctccatttcc

SEQ ID NO: 405735 - DNA, 33 bp, Homo sapien
tgtctaaaatggataccatgtgtaccttacaag

SEQ ID NO: 405736 - DNA, 33 bp, Homo sapien
tgtctaaaatggatactatgtgtaccttacaag

SEQ ID NO: 405737 - DNA, 33 bp, Homo sapien
agcacttataatgcaccgagtactgtgtggagc

SEQ ID NO: 405738 - DNA, 33 bp, Homo sapien
agcacttataatgcactgagtactgtgtggagc

SEQ ID NO: 405739 - DNA, 33 bp, Homo sapien
ccaggactgaaatcgaagcctttgggctctaga

SEQ ID NO: 405740 - DNA, 33 bp, Homo sapien
ccaggactgaaatcgaggcctttgggctctaga

SEQ ID NO: 405741 - DNA, 33 bp, Homo sapien
atgacgtgggtcatacggagatggtagaaaagc

SEQ ID NO: 405742 - DNA, 33 bp, Homo sapien
atgacgtgggtcatactgagatggtagaaaagc

SEQ ID NO: 405743 - DNA, 33 bp, Homo sapien
aatgatggagaagcaacgccaaatgcggaataa

SEQ ID NO: 405744 - DNA, 33 bp, Homo sapien
aatgatggagaagcaatgccaaatgcggaataa

SEQ ID NO: 405745 - DNA, 33 bp, Homo sapien
aggtcatggcctgtccagagcttaggatgaaaa

SEQ ID NO: 405746 - DNA, 33 bp, Homo sapien
aggtcatggcctgtccggagcttaggatgaaaa

SEQ ID NO: 405747 - DNA, 33 bp, Homo sapien
agtgcatgatcaccaacgttgaggcccagctgg

SEQ ID NO: 405748 - DNA, 33 bp, Homo sapien
agtgcatgatcaccaatgttgaggcccagctgg

SEQ ID NO: 405749 - DNA, 33 bp, Homo sapien; identical to SEQ ID NO: 405747

SEQ ID NO: 405750 - DNA, 33 bp, Homo sapien; identical to SEQ ID NO: 405748

SEQ ID NO: 405751 - DNA, 33 bp, Homo sapien
agaaaaatgtgacaatcataggatcctggctca

SEQ ID NO: 405752 - DNA, 33 bp, Homo sapien
agaaaaatgtgacaatgataggatcctggctca

SEQ ID NO: 405753 - DNA, 33 bp, Homo sapien
ctcctctttttgcccccatccttattttgtcct

SEQ ID NO: 405754 - DNA, 33 bp, Homo sapien
ctcctctttttgcccctatccttattttgtcct

SEQ ID NO: 405755 - DNA, 33 bp, Homo sapien
tgtgccaagcaatgtgaaagggaagaatctcat

SEQ ID NO: 405756 - DNA, 33 bp, Homo sapien
tgtgccaagcaatgtggaagggaagaatctcat

SEQ ID NO: 405757 - DNA, 33 bp, Homo sapien
ataagaacagataccacacttgatcttagccaa

SEQ ID NO: 405758 - DNA, 33 bp, Homo sapien
ataagaacagataccagacttgatcttagccaa

SEQ ID NO: 405759 - DNA, 33 bp, Homo sapien
tgggagcagggagatgcaataagagcttgctct

SEQ ID NO: 405760 - DNA, 33 bp, Homo sapien
tgggagcagggagatggaataagagcttgctct

SEQ ID NO: 405761 - DNA, 33 bp, Homo sapien
cagtatatctacgctcgccttttcttatgcaat

SEQ ID NO: 405762 - DNA, 33 bp, Homo sapien
cagtatatctacgctctccttttcttatgcaat

SEQ ID NO: 405763 - DNA, 33 bp, Homo sapien
acgctgtttccattcaactacaagttctcaacc

SEQ ID NO: 405764 - DNA, 33 bp, Homo sapien
acgctgtttccattcagctacaagttctcaacc

SEQ ID NO: 405765 - DNA, 33 bp, Homo sapien
tggcacaaatcctttccaaacccatcctagctt

SEQ ID NO: 405766 - DNA, 33 bp, Homo sapien
tggcacaaatcctttctaaacccatcctagctt

SEQ ID NO: 405767 - DNA, 33 bp, Homo sapien
ctggtgaggtgtacaacgagccctcctcagatg

SEQ ID NO: 405768 - DNA, 33 bp, Homo sapien
ctggtgaggtgtacaatgagccctcctcagatg

SEQ ID NO: 405769 - DNA, 33 bp, Homo sapien
cagaactccagactccaaatgccaggctctttc

SEQ ID NO: 405770 - DNA, 33 bp, Homo sapien
cagaactccagactccgaatgccaggctctttc

SEQ ID NO: 405771 - DNA, 33 bp, Homo sapien
tgtagggaggaaaaaggctagaggtcagagaag

SEQ ID NO: 405772 - DNA, 33 bp, Homo sapien
tgtagggaggaaaaagtctagaggtcagagaag

SEQ ID NO: 405773 - DNA, 33 bp, Homo sapien
caggtttcaatgacctaaattcaaaccctcttc

SEQ ID NO: 405774 - DNA, 33 bp, Homo sapien
caggtttcaatgacctgaattcaaaccctcttc

SEQ ID NO: 405775 - DNA, 33 bp, Homo sapien
agcagatcagtgcctcaatggccacctgctggg

SEQ ID NO: 405776 - DNA, 33 bp, Homo sapien
agcagatcagtgcctcgatggccacctgctggg

SEQ ID NO: 405777 - DNA, 33 bp, Homo sapien
ggaacacaccagagacagcgcaggggcacgtga

SEQ ID NO: 405778 - DNA, 33 bp, Homo sapien
ggaacacaccagagacggcgcaggggcacgtga

SEQ ID NO: 405779 - DNA, 33 bp, Homo sapien
accactgaaaaatgggcactagatgagttaata

SEQ ID NO: 405780 - DNA, 33 bp, Homo sapien
accactgaaaaatggggactagatgagttaata

SEQ ID NO: 405781 - DNA, 33 bp, Homo sapien
tcattacacattctgccacccactcactcacca

SEQ ID NO: 405782 - DNA, 33 bp, Homo sapien
tcattacacattctgctacccactcactcacca

SEQ ID NO: 405783 - DNA, 33 bp, Homo sapien
gtgttatccaactcaaaaccctgtgagtgagtg

SEQ ID NO: 405784 - DNA, 33 bp, Homo sapien
gtgttatccaactcaagaccctgtgagtgagtg

SEQ ID NO: 405785 - DNA, 33 bp, Homo sapien
gcgtactgatttcctgaaaagatacagcagaga

SEQ ID NO: 405786 - DNA, 33 bp, Homo sapien
gcgtactgatttcctgtaaagatacagcagaga

SEQ ID NO: 405787 - DNA, 33 bp, Homo sapien
caagaggaatcagtgacgacccagtctgtcccc

SEQ ID NO: 405788 - DNA, 33 bp, Homo sapien
caagaggaatcagtgatgacccagtctgtcccc

SEQ ID NO: 405789 - DNA, 33 bp, Homo sapien
tggaactggaggtcaagctgctgctcccattta

SEQ ID NO: 405790 - DNA, 33 bp, Homo sapien
tggaactggaggtcaatctgctgctcccattta

SEQ ID NO: 405791 - DNA, 33 bp, Homo sapien
gtgaaactccaaaagacagtcagagagagcaga

SEQ ID NO: 405792 - DNA, 33 bp, Homo sapien
gtgaaactccaaaagagagtcagagagagcaga

SEQ ID NO: 405793 - DNA, 33 bp, Homo sapien
agggcagcagaagaaggcaccttgatccctttc

SEQ ID NO: 405794 - DNA, 33 bp, Homo sapien
agggcagcagaagaagtcaccttgatccctttc

SEQ ID NO: 405795 - DNA, 33 bp, Homo sapien
tgtgggcacatgcgagacattcccctggggact

SEQ ID NO: 405796 - DNA, 33 bp, Homo sapien
tgtgggcacatgcgaggcattcccctggggact

SEQ ID NO: 405797 - DNA, 33 bp, Homo sapien
acatgaagtactaggaagctcactgcagtatta

SEQ ID NO: 405798 - DNA, 33 bp, Homo sapien
acatgaagtactaggaggctcactgcagtatta

SEQ ID NO: 405799 - DNA, 33 bp, Homo sapien
atagctcttgattttacggagtgccagatactg

SEQ ID NO: 405800 - DNA, 33 bp, Homo sapien
atagctcttgattttatggagtgccagatactg

SEQ ID NO: 405801 - DNA, 33 bp, Homo sapien
ccaggagaaatagtacaacaagaagttaaaaga

SEQ ID NO: 405802 - DNA, 33 bp, Homo sapien
ccaggagaaatagtacgacaagaagttaaaaga

SEQ ID NO: 405803 - DNA, 33 bp, Homo sapien
agctccaccagaactaagtctagcacatcacta

SEQ ID NO: 405804 - DNA, 33 bp, Homo sapien
agctccaccagaactaggtctagcacatcacta

SEQ ID NO: 405805 - DNA, 33 bp, Homo sapien
gcacctgagacccagcaagaatcaacactgcct

SEQ ID NO: 405806 - DNA, 33 bp, Homo sapien
gcacctgagacccagcgagaatcaacactgcct

SEQ ID NO: 405807 - DNA, 33 bp, Homo sapien
cggtgctctcatcctcactgctaggtgtgtccc

SEQ ID NO: 405808 - DNA, 33 bp, Homo sapien
cggtgctctcatcctctctgctaggtgtgtccc

SEQ ID NO: 405809 - DNA, 33 bp, Homo sapien
ccaccgacagtcaggacgatgtcccaccatgta

SEQ ID NO: 405810 - DNA, 33 bp, Homo sapien
ccaccgacagtcaggatgatgtcccaccatgta

SEQ ID NO: 405811 - DNA, 33 bp, Homo sapien
cggtcaccattgtcgaagctgctgggctcactc

SEQ ID NO: 405812 - DNA, 33 bp, Homo sapien
cggtcaccattgtcgacgctgctgggctcactc

SEQ ID NO: 405813 - DNA, 33 bp, Homo sapien
tatgccacgttgactcaagatcatttcttatta

SEQ ID NO: 405814 - DNA, 33 bp, Homo sapien
tatgccacgttgactcgagatcatttcttatta

SEQ ID NO: 405815 - DNA, 33 bp, Homo sapien
tccaggaagaaggaacagcaactgagaggtatg

SEQ ID NO: 405816 - DNA, 33 bp, Homo sapien
tccaggaagaaggaacggcaactgagaggtatg

SEQ ID NO: 405817 - DNA, 33 bp, Homo sapien; identical to SEQ ID NO: 405815

SEQ ID NO: 405818 - DNA, 33 bp, Homo sapien; identical to SEQ ID NO: 405816

SEQ ID NO: 405819 - DNA, 33 bp, Homo sapien
tttcttccttaagaacagtgtcctcgtcagacc

SEQ ID NO: 405820 - DNA, 33 bp, Homo sapien
tttcttccttaagaacggtgtcctcgtcagacc

SEQ ID NO: 405821 - DNA, 33 bp, Homo sapien
attttatgcaacttaccgaaactctctgaattc

SEQ ID NO: 405822 - DNA, 33 bp, Homo sapien
attttatgcaacttactgaaactctctgaattc

SEQ ID NO: 405823 - DNA, 33 bp, Homo sapien
gtccaggagctccccaagatcagggcctgctgt

SEQ ID NO: 405824 - DNA, 33 bp, Homo sapien
gtccaggagctccccaggatcagggcctgctgt

SEQ ID NO: 405825 - DNA, 33 bp, Homo sapien
ctgccagactcacagacagtgatggagaagcta

SEQ ID NO: 405826 - DNA, 33 bp, Homo sapien
ctgccagactcacagagagtgatggagaagcta

SEQ ID NO: 405827 - DNA, 33 bp, Homo sapien
ttgaacataaacatgacgccctttgtgtgtcta

SEQ ID NO: 405828 - DNA, 33 bp, Homo sapien
ttgaacataaacatgatgccctttgtgtgtcta

SEQ ID NO: 405829 - DNA, 33 bp, Homo sapien
aggatgggggagaagacgcaaaatggattaaat

SEQ ID NO: 405830 - DNA, 33 bp, Homo sapien
aggatgggggagaagatgcaaaatggattaaat

SEQ ID NO: 405831 - DNA, 33 bp, Homo sapien
tgcattcagagatgagcatccttgaccctgagg

SEQ ID NO: 405832 - DNA, 33 bp, Homo sapien
tgcattcagagatgagtatccttgaccctgagg

SEQ ID NO: 405833 - DNA, 33 bp, Homo sapien
atggaataaatgaaaacgacaaaaagcagtgca

SEQ ID NO: 405834 - DNA, 33 bp, Homo sapien
atggaataaatgaaaatgacaaaaagcagtgca

SEQ ID NO: 405835 - DNA, 33 bp, Homo sapien
tcctcccttctgtatcaccggtggcaagaatag

SEQ ID NO: 405836 - DNA, 33 bp, Homo sapien
tcctcccttctgtatccccggtggcaagaatag

SEQ ID NO: 405837 - DNA, 33 bp, Homo sapien
aagtgtgcacttgttgaaagtaacttatatttt

SEQ ID NO: 405838 - DNA, 33 bp, Homo sapien
aagtgtgcacttgttgcaagtaacttatatttt

SEQ ID NO: 405839 - DNA, 33 bp, Homo sapien
tggatttgttcctatggcaagtagctgtggggt

SEQ ID NO: 405840 - DNA, 33 bp, Homo sapien
tggatttgttcctatgtcaagtagctgtggggt

SEQ ID NO: 405841 - DNA, 33 bp, Homo sapien
ccaggttctggactccaagtgtcatgtggggga

SEQ ID NO: 405842 - DNA, 33 bp, Homo sapien
ccaggttctggactccgagtgtcatgtggggga

SEQ ID NO: 405843 - DNA, 33 bp, Homo sapien
taggggctctttctatgacctaccctgttccag

SEQ ID NO: 405844 - DNA, 33 bp, Homo sapien
taggggctctttctattacctaccctgttccag

SEQ ID NO: 405845 - DNA, 33 bp, Homo sapien
gggatagagacagaggaataaatacacattcac

SEQ ID NO: 405846 - DNA, 33 bp, Homo sapien
gggatagagacagagggataaatacacattcac

SEQ ID NO: 405847 - DNA, 33 bp, Homo sapien
ggaaggacaaataccaagtgccttttgcagacg

SEQ ID NO: 405848 - DNA, 33 bp, Homo sapien
ggaaggacaaataccatgtgccttttgcagacg

SEQ ID NO: 405849 - DNA, 33 bp, Homo sapien
gcagtgaacatcttccactttggagaccacttg

SEQ ID NO: 405850 - DNA, 33 bp, Homo sapien
gcagtgaacatcttccgctttggagaccacttg

SEQ ID NO: 405851 - DNA, 33 bp, Homo sapien
cagaaaaggactgctcactcaagccacatgacg

SEQ ID NO: 405852 - DNA, 33 bp, Homo sapien
cagaaaaggactgctcgctcaagccacatgacg

SEQ ID NO: 405853 - DNA, 33 bp, Homo sapien
ggacagtctcctggacaaggagtttccagctgc

SEQ ID NO: 405854 - DNA, 33 bp, Homo sapien
ggacagtctcctggacgaggagtttccagctgc

SEQ ID NO: 405855 - DNA, 33 bp, Homo sapien
cgcaaaagctggactgaaagaaggactttgtga

SEQ ID NO: 405856 - DNA, 33 bp, Homo sapien
cgcaaaagctggactgcaagaaggactttgtga

SEQ ID NO: 405857 - DNA, 33 bp, Homo sapien
ggtatgttctagcctacagtggtttgactttat

SEQ ID NO: 405858 - DNA, 33 bp, Homo sapien
ggtatgttctagcctatagtggtttgactttat

SEQ ID NO: 405859 - DNA, 33 bp, Homo sapien
ttcaaagagaagaaagacatgaagagaagcagc

SEQ ID NO: 405860 - DNA, 33 bp, Homo sapien
ttcaaagagaagaaagccatgaagagaagcagc

SEQ ID NO: 405861 - DNA, 33 bp, Homo sapien
agtgagaacctttctccaaaaatcaggctgggc

SEQ ID NO: 405862 - DNA, 33 bp, Homo sapien
agtgagaacctttctctaaaaatcaggctgggc

SEQ ID NO: 405863 - DNA, 33 bp, Homo sapien
ttggaatgcatcaagacaggttatgggagagcc

SEQ ID NO: 405864 - DNA, 33 bp, Homo sapien
ttggaatgcatcaagataggttatgggagagcc

SEQ ID NO: 405865 - DNA, 33 bp, Homo sapien
tactcggtgagcattgcagctgttttcttcttc

SEQ ID NO: 405866 - DNA, 33 bp, Homo sapien
tactcggtgagcattgtagctgttttcttcttc

SEQ ID NO: 405867 - DNA, 33 bp, Homo sapien
tttccactgtcactaccattactacgaattgtg

SEQ ID NO: 405868 - DNA, 33 bp, Homo sapien
tttccactgtcactactattactacgaattgtg

SEQ ID NO: 405869 - DNA, 33 bp, Homo sapien
cacagcttgagtaggcacagagctggcgggggc

SEQ ID NO: 405870 - DNA, 33 bp, Homo sapien
cacagcttgagtaggcgcagagctggcgggggc

SEQ ID NO: 405871 - DNA, 33 bp, Homo sapien
gatcatcttcctccccaactgacaggtggttaa

SEQ ID NO: 405872 - DNA, 33 bp, Homo sapien
gatcatcttcctcccccactgacaggtggttaa

SEQ ID NO: 405873 - DNA, 33 bp, Homo sapien
tgccatctgtgccgaaagaacagccgccgtctg

SEQ ID NO: 405874 - DNA, 33 bp, Homo sapien
tgccatctgtgccgaaggaacagccgccgtctg

SEQ ID NO: 405875 - DNA, 33 bp, Homo sapien
agaagggtaactaccaatccaagtctaatacta

SEQ ID NO: 405876 - DNA, 33 bp, Homo sapien
agaagggtaactaccagtccaagtctaatacta

SEQ ID NO: 405877 - DNA, 33 bp, Homo sapien
aggaggttttgccttacagttgtgtggtagtat

SEQ ID NO: 405878 - DNA, 33 bp, Homo sapien
aggaggttttgccttagagttgtgtggtagtat

SEQ ID NO: 405879 - DNA, 33 bp, Homo sapien
gtaggttaattaataccagatgccactgggcta

SEQ ID NO: 405880 - DNA, 33 bp, Homo sapien
gtaggttaattaatacgagatgccactgggcta

SEQ ID NO: 405881 - DNA, 33 bp, Homo sapien
aggacttctcagggcaaagtctaggaaggcgag

SEQ ID NO: 405882 - DNA, 33 bp, Homo sapien
aggacttctcagggcagagtctaggaaggcgag

SEQ ID NO: 405883 - DNA, 33 bp, Homo sapien
cctcagtggctgaagagctatgtccagggagca

SEQ ID NO: 405884 - DNA, 33 bp, Homo sapien
cctcagtggctgaagatctatgtccagggagca

SEQ ID NO: 405885 - DNA, 33 bp, Homo sapien
tggtccacgcccctgaagacaagaaagagttga

SEQ ID NO: 405886 - DNA, 33 bp, Homo sapien
tggtccacgcccctgacgacaagaaagagttga

SEQ ID NO: 405887 - DNA, 33 bp, Homo sapien
ttgaaactggacaaacgggtgtccaaatcaaag

SEQ ID NO: 405888 - DNA, 33 bp, Homo sapien
ttgaaactggacaaactggtgtccaaatcaaag

SEQ ID NO: 405889 - DNA, 33 bp, Homo sapien
accccggccatctgtcacttaggggctggactc

SEQ ID NO: 405890 - DNA, 33 bp, Homo sapien
accccggccatctgtcgcttaggggctggactc

SEQ ID NO: 405891 - DNA, 33 bp, Homo sapien
atggtggagcccagtaaacgtaagtagagaatg

SEQ ID NO: 405892 - DNA, 33 bp, Homo sapien
atggtggagcccagtagacgtaagtagagaatg

SEQ ID NO: 405893 - DNA, 33 bp, Homo sapien
tgcacaggtacttctgcatttcatcctcccttc

SEQ ID NO: 405894 - DNA, 33 bp, Homo sapien
tgcacaggtacttctgtatttcatcctcccttc

SEQ ID NO: 405895 - DNA, 33 bp, Homo sapien
ccatgagtaaattgagcagtccgaggcctgaga

SEQ ID NO: 405896 - DNA, 33 bp, Homo sapien
ccatgagtaaattgagtagtccgaggcctgaga

SEQ ID NO: 405897 - DNA, 33 bp, Homo sapien
ccggaagctcctggtacgggtttctcccagttc

SEQ ID NO: 405898 - DNA, 33 bp, Homo sapien
ccggaagctcctggtatgggtttctcccagttc

SEQ ID NO: 405899 - DNA, 33 bp, Homo sapien
ctcctcgtagtacagactaattttcaaaatagt

SEQ ID NO: 405900 - DNA, 33 bp, Homo sapien
ctcctcgtagtacagattaattttcaaaatagt

SEQ ID NO: 405901 - DNA, 33 bp, Homo sapien
ttgaatggatttgacactggaattgttcctgat

SEQ ID NO: 405902 - DNA, 33 bp, Homo sapien
ttgaatggatttgacattggaattgttcctgat

SEQ ID NO: 405903 - DNA, 33 bp, Homo sapien
gcctattccaagatttaaaaaaatgatgagcgc

SEQ ID NO: 405904 - DNA, 33 bp, Homo sapien
gcctattccaagattttaaaaaatgatgagcgc

SEQ ID NO: 405905 - DNA, 33 bp, Homo sapien
gttgagtctgctcaacaaaagaggcctctttgt

SEQ ID NO: 405906 - DNA, 33 bp, Homo sapien
gttgagtctgctcaaccaaagaggcctctttgt

SEQ ID NO: 405907 - DNA, 33 bp, Homo sapien
cagaatgatactctcaaacagaaaaaaagactg

SEQ ID NO: 405908 - DNA, 33 bp, Homo sapien
cagaatgatactctcagacagaaaaaaagactg

SEQ ID NO: 405909 - DNA, 33 bp, Homo sapien
aataaaaatagaaaacaatgccaacacattaaa

SEQ ID NO: 405910 - DNA, 33 bp, Homo sapien
aataaaaatagaaaaccatgccaacacattaaa

SEQ ID NO: 405911 - DNA, 33 bp, Homo sapien
tcttgtccacttgacaggtataccagtgccctg

SEQ ID NO: 405912 - DNA, 33 bp, Homo sapien
tcttgtccacttgacatgtataccagtgccctg

SEQ ID NO: 405913 - DNA, 33 bp, Homo sapien
caagaggcggcctaaggacccacagattccgag

SEQ ID NO: 405914 - DNA, 33 bp, Homo sapien
caagaggcggcctaagtacccacagattccgag

SEQ ID NO: 405915 - DNA, 33 bp, Homo sapien
ttgcctctctttgtgacgctgagcctcagttgc

SEQ ID NO: 405916 - DNA, 33 bp, Homo sapien
ttgcctctctttgtgatgctgagcctcagttgc

SEQ ID NO: 405917 - DNA, 33 bp, Homo sapien
gcaacaaatacaagctgaatagagctctgagtt

SEQ ID NO: 405918 - DNA, 33 bp, Homo sapien
gcaacaaatacaagcttaatagagctctgagtt

SEQ ID NO: 405919 - DNA, 33 bp, Homo sapien
acagcctttctggaaccaggcagaggggacaag

SEQ ID NO: 405920 - DNA, 33 bp, Homo sapien
acagcctttctggaacgaggcagaggggacaag

SEQ ID NO: 405921 - DNA, 33 bp, Homo sapien
cagcaagaagtgatccagaagttccaagatgga

SEQ ID NO: 405922 - DNA, 33 bp, Homo sapien
cagcaagaagtgatccggaagttccaagatgga

SEQ ID NO: 405923 - DNA, 33 bp, Homo sapien
ctccagactgggagagactccagcactggggag

SEQ ID NO: 405924 - DNA, 33 bp, Homo sapien
ctccagactgggagaggctccagcactggggag

SEQ ID NO: 405925 - DNA, 33 bp, Homo sapien
aggtgatggaattataaccaaaactgacatagt

SEQ ID NO: 405926 - DNA, 33 bp, Homo sapien
aggtgatggaattatagccaaaactgacatagt

SEQ ID NO: 405927 - DNA, 33 bp, Homo sapien
ttcagtttgatagaaactcattttttcctagct

SEQ ID NO: 405928 - DNA, 33 bp, Homo sapien
ttcagtttgatagaaattcattttttcctagct

SEQ ID NO: 405929 - DNA, 33 bp, Homo sapien
cacactgctggatggaagagttataacttgatt

SEQ ID NO: 405930 - DNA, 33 bp, Homo sapien
cacactgctggatggaggagttataacttgatt

SEQ ID NO: 405931 - DNA, 33 bp, Homo sapien
tgcacccaacctgaaacgactttgaaggggaag

SEQ ID NO: 405932 - DNA, 33 bp, Homo sapien
tgcacccaacctgaaatgactttgaaggggaag

SEQ ID NO: 405933 - DNA, 33 bp, Homo sapien
tgggttgtgaggtacacgcagcaagcaaaattg

SEQ ID NO: 405934 - DNA, 33 bp, Homo sapien
tgggttgtgaggtacatgcagcaagcaaaattg

SEQ ID NO: 405935 - DNA, 33 bp, Homo sapien
cggtgggcggcccatcacggcgcagcgcctaca

SEQ ID NO: 405936 - DNA, 33 bp, Homo sapien
cggtgggcggcccatcgcggcgcagcgcctaca

SEQ ID NO: 405937 - DNA, 33 bp, Homo sapien
attcacgtacccagaaacaagacttcattctcc

SEQ ID NO: 405938 - DNA, 33 bp, Homo sapien
attcacgtacccagaaccaagacttcattctcc

SEQ ID NO: 405939 - DNA, 33 bp, Homo sapien
taacaactttgtgtccactctttaattttcatc

SEQ ID NO: 405940 - DNA, 33 bp, Homo sapien
taacaactttgtgtccgctctttaattttcatc

SEQ ID NO: 405941 - DNA, 33 bp, Homo sapien
tatcgctgtcctcaaacgtgtggtatttaaagg

SEQ ID NO: 405942 - DNA, 33 bp, Homo sapien
tatcgctgtcctcaaatgtgtggtatttaaagg

SEQ ID NO: 405943 - DNA, 33 bp, Homo sapien
gctgattttaagaaaaacttcctatgtgacaat

SEQ ID NO: 405944 - DNA, 33 bp, Homo sapien
gctgattttaagaaaagcttcctatgtgacaat

SEQ ID NO: 405945 - DNA, 33 bp, Homo sapien
gtttccactttattccagctccctgacctcctt

SEQ ID NO: 405946 - DNA, 33 bp, Homo sapien
gtttccactttattccggctccctgacctcctt

SEQ ID NO: 405947 - DNA, 33 bp, Homo sapien
gataacggcagatagtaacaccttcaaagtcca

SEQ ID NO: 405948 - DNA, 33 bp, Homo sapien
gataacggcagatagtgacaccttcaaagtcca

SEQ ID NO: 405949 - DNA, 33 bp, Homo sapien
gagacgaccttctctaagatgaacagggttcgc

SEQ ID NO: 405950 - DNA, 33 bp, Homo sapien
gagacgaccttctctaggatgaacagggttcgc

SEQ ID NO: 405951 - DNA, 33 bp, Homo sapien
gagatatgaccaggccagaatagaatgctcaga

SEQ ID NO: 405952 - DNA, 33 bp, Homo sapien
gagatatgaccaggccggaatagaatgctcaga

SEQ ID NO: 405953 - DNA, 33 bp, Homo sapien
tcctttcctgcccagcaatgtcagcgtttcctc

SEQ ID NO: 405954 - DNA, 33 bp, Homo sapien
tcctttcctgcccagcgatgtcagcgtttcctc

SEQ ID NO: 405955 - DNA, 33 bp, Homo sapien
gaattttacttgacagaagagtgaagtagcctg

SEQ ID NO: 405956 - DNA, 33 bp, Homo sapien
gaattttacttgacagtagagtgaagtagcctg

SEQ ID NO: 405957 - DNA, 33 bp, Homo sapien
ttcctcatttgaaaaaaagagctaagataggag

SEQ ID NO: 405958 - DNA, 33 bp, Homo sapien
ttcctcatttgaaaaacagagctaagataggag

SEQ ID NO: 405959 - DNA, 33 bp, Homo sapien
tctatgccttcaaaaacctcatgggcaagtatg

SEQ ID NO: 405960 - DNA, 33 bp, Homo sapien
tctatgccttcaaaaagctcatgggcaagtatg

SEQ ID NO: 405961 - DNA, 33 bp, Homo sapien
attcatttattcattcaagatggggcctcacta

SEQ ID NO: 405962 - DNA, 33 bp, Homo sapien
attcatttattcattcgagatggggcctcacta

SEQ ID NO: 405963 - DNA, 33 bp, Homo sapien
aagacagaaacagaaacgtgtattcttgggaga

SEQ ID NO: 405964 - DNA, 33 bp, Homo sapien
aagacagaaacagaaatgtgtattcttgggaga

SEQ ID NO: 405965 - DNA, 33 bp, Homo sapien
aagaagtatcccattacggtcaaacatttaaca

SEQ ID NO: 405966 - DNA, 33 bp, Homo sapien
aagaagtatcccattatggtcaaacatttaaca

SEQ ID NO: 405967 - DNA, 33 bp, Homo sapien
ctataaattactgtcaagctcgattccctcaag

SEQ ID NO: 405968 - DNA, 33 bp, Homo sapien
ctataaattactgtcaggctcgattccctcaag

SEQ ID NO: 405969 - DNA, 33 bp, Homo sapien
aatacctattttttcagcacctattatgagcca

SEQ ID NO: 405970 - DNA, 33 bp, Homo sapien
aatacctattttttcatcacctattatgagcca

SEQ ID NO: 405971 - DNA, 33 bp, Homo sapien
ctgtaggaattaaccccagcagtcagaaagtac

SEQ ID NO: 405972 - DNA, 33 bp, Homo sapien
ctgtaggaattaacccgagcagtcagaaagtac

SEQ ID NO: 405973 - DNA, 33 bp, Homo sapien
gggtagagaagatccacacagtctttgggttaa

SEQ ID NO: 405974 - DNA, 33 bp, Homo sapien
gggtagagaagatccatacagtctttgggttaa

SEQ ID NO: 405975 - DNA, 33 bp, Homo sapien
gtgcagaggcttaaaacagccttgtgtgttcag

SEQ ID NO: 405976 - DNA, 33 bp, Homo sapien
gtgcagaggcttaaaatagccttgtgtgttcag

SEQ ID NO: 405977 - DNA, 33 bp, Homo sapien
tgaaatttttaagtgccaaagacataaaatatg

SEQ ID NO: 405978 - DNA, 33 bp, Homo sapien
tgaaatttttaagtgcgaaagacataaaatatg

SEQ ID NO: 405979 - DNA, 33 bp, Homo sapien
tttactgcttacaaagcacttacacaccttata

SEQ ID NO: 405980 - DNA, 33 bp, Homo sapien
tttactgcttacaaaggacttacacaccttata

SEQ ID NO: 405981 - DNA, 33 bp, Homo sapien
taaaatctacctctgcaactatgggtttgacct

SEQ ID NO: 405982 - DNA, 33 bp, Homo sapien
taaaatctacctctgcgactatgggtttgacct

SEQ ID NO: 405983 - DNA, 33 bp, Homo sapien
cctgaggtgttttggcagagagaaggcccaaag

SEQ ID NO: 405984 - DNA, 33 bp, Homo sapien
cctgaggtgttttggcggagagaaggcccaaag

SEQ ID NO: 405985 - DNA, 33 bp, Homo sapien
ggcttatggactaacaagtgagcaaccccagtg

SEQ ID NO: 405986 - DNA, 33 bp, Homo sapien
ggcttatggactaacaggtgagcaaccccagtg

SEQ ID NO: 405987 - DNA, 33 bp, Homo sapien
taagcactttggtatgcaattgcttatttaatc

SEQ ID NO: 405988 - DNA, 33 bp, Homo sapien
taagcactttggtatggaattgcttatttaatc

SEQ ID NO: 405989 - DNA, 33 bp, Homo sapien
cttgagaacccagtccaaacagaatcaggcctc

SEQ ID NO: 405990 - DNA, 33 bp, Homo sapien
cttgagaacccagtccgaacagaatcaggcctc

SEQ ID NO: 405991 - DNA, 33 bp, Homo sapien
aacactcccttcacccccaaagattcaggaaaa

SEQ ID NO: 405992 - DNA, 33 bp, Homo sapien
aacactcccttcacccgcaaagattcaggaaaa

SEQ ID NO: 405993 - DNA, 33 bp, Homo sapien
cctgtcccctaagaaaataaggcaacataaact

SEQ ID NO: 405994 - DNA, 33 bp, Homo sapien
cctgtcccctaagaaattaaggcaacataaact

SEQ ID NO: 405995 - DNA, 33 bp, Homo sapien
agacgaaacaacttgacctgaatcctgggatga

SEQ ID NO: 405996 - DNA, 33 bp, Homo sapien
agacgaaacaacttgagctgaatcctgggatga

SEQ ID NO: 405997 - DNA, 33 bp, Homo sapien
agagccctactctccaaattgttgcctggaggg

SEQ ID NO: 405998 - DNA, 33 bp, Homo sapien
agagccctactctccacattgttgcctggaggg

SEQ ID NO: 405999 - DNA, 33 bp, Homo sapien
cacaaggaaatgataaatgcttgatatgacgga

SEQ ID NO: 406000 - DNA, 33 bp, Homo sapien
cacaaggaaatgataactgcttgatatgacgga

SEQ ID NO: 406001 - DNA, 33 bp, Homo sapien
cagacagagaacccacaaactcagaaaggagac

SEQ ID NO: 406002 - DNA, 33 bp, Homo sapien
cagacagagaacccaccaactcagaaaggagac

SEQ ID NO: 406003 - DNA, 33 bp, Homo sapien
agtaatgttgcagcaacgagggaggaagttttt

SEQ ID NO: 406004 - DNA, 33 bp, Homo sapien
agtaatgttgcagcaatgagggaggaagttttt

SEQ ID NO: 406005 - DNA, 33 bp, Homo sapien
gttaccttgagcctaacatcgttaatgaacaag

SEQ ID NO: 406006 - DNA, 33 bp, Homo sapien
gttaccttgagcctaatatcgttaatgaacaag

SEQ ID NO: 406007 - DNA, 33 bp, Homo sapien
aggacctcagacatacagagaatgaagaggaca

SEQ ID NO: 406008 - DNA, 33 bp, Homo sapien
aggacctcagacatacggagaatgaagaggaca

SEQ ID NO: 406009 - DNA, 33 bp, Homo sapien
gtgcttaagaggttatcaatgagtgttttcttt

SEQ ID NO: 406010 - DNA, 33 bp, Homo sapien
gtgcttaagaggttatgaatgagtgttttcttt

SEQ ID NO: 406011 - DNA, 33 bp, Homo sapien
atggtgtcattctttccacttacgcaatttggg

SEQ ID NO: 406012 - DNA, 33 bp, Homo sapien
atggtgtcattctttctacttacgcaatttggg

SEQ ID NO: 406013 - DNA, 33 bp, Homo sapien
agaggatccgggaacgcaagttggccaacttca

SEQ ID NO: 406014 - DNA, 33 bp, Homo sapien
agaggatccgggaacggaagttggccaacttca

SEQ ID NO: 406015 - DNA, 33 bp, Homo sapien; identical to SEQ ID NO: 406013

SEQ ID NO: 406016 - DNA, 33 bp, Homo sapien; identical to SEQ ID NO: 406014

SEQ ID NO: 406017 - DNA, 33 bp, Homo sapien; identical to SEQ ID NO: 406013

SEQ ID NO: 406018 - DNA, 33 bp, Homo sapien; identical to SEQ ID NO: 406014

SEQ ID NO: 406019 - DNA, 33 bp, Homo sapien
atgtcctctggcaccaaatcaatacactctttc

SEQ ID NO: 406020 - DNA, 33 bp, Homo sapien
atgtcctctggcaccagatcaatacactctttc

SEQ ID NO: 406021 - DNA, 33 bp, Homo sapien
tgcttggacatttcccagaaagaaatggacaca

SEQ ID NO: 406022 - DNA, 33 bp, Homo sapien
tgcttggacatttcccggaaagaaatggacaca

SEQ ID NO: 406023 - DNA, 33 bp, Homo sapien
cctttgtgggtgactccgaggctagtggcctga

SEQ ID NO: 406024 - DNA, 33 bp, Homo sapien
cctttgtgggtgactctgaggctagtggcctga

SEQ ID NO: 406025 - DNA, 33 bp, Homo sapien
ccagccgggtataagcacagatgcaggggcact

SEQ ID NO: 406026 - DNA, 33 bp, Homo sapien
ccagccgggtataagcgcagatgcaggggcact

SEQ ID NO: 406027 - DNA, 33 bp, Homo sapien
ggggactagggagatacaagacttagggaccaa

SEQ ID NO: 406028 - DNA, 33 bp, Homo sapien
ggggactagggagatataagacttagggaccaa

SEQ ID NO: 406029 - DNA, 33 bp, Homo sapien
acccagcataattacaatggtggacccactcta

SEQ ID NO: 406030 - DNA, 33 bp, Homo sapien
acccagcataattacagtggtggacccactcta

SEQ ID NO: 406031 - DNA, 33 bp, Homo sapien
tggggctgttggtttacgaagtgatggagagcc

SEQ ID NO: 406032 - DNA, 33 bp, Homo sapien
tggggctgttggtttatgaagtgatggagagcc

SEQ ID NO: 406033 - DNA, 33 bp, Homo sapien
tcctcagttcctctaaaacaatctggatcgact

SEQ ID NO: 406034 - DNA, 33 bp, Homo sapien
tcctcagttcctctaatacaatctggatcgact

SEQ ID NO: 406035 - DNA, 33 bp, Homo sapien
tgggatacagacagaacatgacttgagagattg

SEQ ID NO: 406036 - DNA, 33 bp, Homo sapien
tgggatacagacagaatatgacttgagagattg

SEQ ID NO: 406037 - DNA, 33 bp, Homo sapien
cggggtttatattcgccaggatggataggaagg

SEQ ID NO: 406038 - DNA, 33 bp, Homo sapien
cggggtttatattcgctaggatggataggaagg

SEQ ID NO: 406039 - DNA, 33 bp, Homo sapien
tctcagagcaaagtcaacactcaaatgacaagg

SEQ ID NO: 406040 - DNA, 33 bp, Homo sapien
tctcagagcaaagtcatcactcaaatgacaagg

SEQ ID NO: 406041 - DNA, 33 bp, Homo sapien
catccaggttctgtaacaggcagatttccaata

SEQ ID NO: 406042 - DNA, 33 bp, Homo sapien
catccaggttctgtaataggcagatttccaata

SEQ ID NO: 406043 - DNA, 33 bp, Homo sapien
gaaggctgagagcagaaagccatctaccatcac

SEQ ID NO: 406044 - DNA, 33 bp, Homo sapien
gaaggctgagagcagagagccatctaccatcac

SEQ ID NO: 406045 - DNA, 33 bp, Homo sapien
agaaacttacttcctcacatccttgaagacttg

SEQ ID NO: 406046 - DNA, 33 bp, Homo sapien
agaaacttacttcctcccatccttgaagacttg

SEQ ID NO: 406047 - DNA, 33 bp, Homo sapien
tggagtcttcggtgttcaaagtcaacaaccatg

SEQ ID NO: 406048 - DNA, 33 bp, Homo sapien
tggagtcttcggtgtttaaagtcaacaaccatg

SEQ ID NO: 406049 - DNA, 33 bp, Homo sapien
gttctgagggcaataactatggaatgagaagag

SEQ ID NO: 406050 - DNA, 33 bp, Homo sapien
gttctgagggcaataattatggaatgagaagag

SEQ ID NO: 406051 - DNA, 33 bp, Homo sapien
cttagaagtcacctaaacataatggataacctg

SEQ ID NO: 406052 - DNA, 33 bp, Homo sapien
cttagaagtcacctaatcataatggataacctg

SEQ ID NO: 406053 - DNA, 33 bp, Homo sapien
attccatttatagaaacgtccagaatcggcaaa

SEQ ID NO: 406054 - DNA, 33 bp, Homo sapien
attccatttatagaaatgtccagaatcggcaaa

SEQ ID NO: 406055 - DNA, 33 bp, Homo sapien
gagaaagtgataccaacgtggaggactgaatta

SEQ ID NO: 406056 - DNA, 33 bp, Homo sapien
gagaaagtgataccaatgtggaggactgaatta

SEQ ID NO: 406057 - DNA, 33 bp, Homo sapien
cagtcctaaagaaagacacaggctggacacagt

SEQ ID NO: 406058 - DNA, 33 bp, Homo sapien
cagtcctaaagaaagatacaggctggacacagt

SEQ ID NO: 406059 - DNA, 33 bp, Homo sapien
tttcatcacctacaacaaaagtaagttaactgg

SEQ ID NO: 406060 - DNA, 33 bp, Homo sapien
tttcatcacctacaacgaaagtaagttaactgg

SEQ ID NO: 406061 - DNA, 33 bp, Homo sapien
ggaaacagttcagactaaaataaacaaatcatt

SEQ ID NO: 406062 - DNA, 33 bp, Homo sapien
ggaaacagttcagactcaaataaacaaatcatt

SEQ ID NO: 406063 - DNA, 33 bp, Homo sapien
ggcaagtgacagagttcaacagacttggtcatg

SEQ ID NO: 406064 - DNA, 33 bp, Homo sapien
ggcaagtgacagagttgaacagacttggtcatg

SEQ ID NO: 406065 - DNA, 33 bp, Homo sapien
aagtccctttgatgtacgatagaccacttctga

SEQ ID NO: 406066 - DNA, 33 bp, Homo sapien
aagtccctttgatgtatgatagaccacttctga

SEQ ID NO: 406067 - DNA, 33 bp, Homo sapien
aggtgccaattcttgacgtactatttaagaggc

SEQ ID NO: 406068 - DNA, 33 bp, Homo sapien
aggtgccaattcttgatgtactatttaagaggc

SEQ ID NO: 406069 - DNA, 33 bp, Homo sapien
ggtagtcctcttttcacggcacagacaatgggc

SEQ ID NO: 406070 - DNA, 33 bp, Homo sapien
ggtagtcctcttttcatggcacagacaatgggc

SEQ ID NO: 406071 - DNA, 33 bp, Homo sapien
gccaaatatgaactaacgaggctaaaacactga

SEQ ID NO: 406072 - DNA, 33 bp, Homo sapien
gccaaatatgaactaatgaggctaaaacactga

SEQ ID NO: 406073 - DNA, 33 bp, Homo sapien
cattataattagttcaccttccctgtgaaacaa

SEQ ID NO: 406074 - DNA, 33 bp, Homo sapien
cattataattagttcatcttccctgtgaaacaa

SEQ ID NO: 406075 - DNA, 33 bp, Homo sapien
tcttcctctctcaaaaactctcccacgttcacc

SEQ ID NO: 406076 - DNA, 33 bp, Homo sapien
tcttcctctctcaaaagctctcccacgttcacc

SEQ ID NO: 406077 - DNA, 33 bp, Homo sapien
aaatctcttacctctaataagccgttccagatg

SEQ ID NO: 406078 - DNA, 33 bp, Homo sapien
aaatctcttacctctagtaagccgttccagatg

SEQ ID NO: 406079 - DNA, 33 bp, Homo sapien
atactccaccattcacgaccaaagcctacttac

SEQ ID NO: 406080 - DNA, 33 bp, Homo sapien
atactccaccattcactaccaaagcctacttac

SEQ ID NO: 406081 - DNA, 33 bp, Homo sapien
agggtgtgcaagattacggtgcagggagaggag

SEQ ID NO: 406082 - DNA, 33 bp, Homo sapien
agggtgtgcaagattatggtgcagggagaggag

SEQ ID NO: 406083 - DNA, 33 bp, Homo sapien
cggctgcccacccttcaacactattacccatcg

SEQ ID NO: 406084 - DNA, 33 bp, Homo sapien
cggctgcccacccttcgacactattacccatcg

SEQ ID NO: 406085 - DNA, 33 bp, Homo sapien
accctgtgttcacaaaggcagagagtcagaccc

SEQ ID NO: 406086 - DNA, 33 bp, Homo sapien
accctgtgttcacaaatgcagagagtcagaccc

SEQ ID NO: 406087 - DNA, 33 bp, Homo sapien
cagagccacaggaccccaagaatgagcttacaa

SEQ ID NO: 406088 - DNA, 33 bp, Homo sapien
cagagccacaggacccgaagaatgagcttacaa

SEQ ID NO: 406089 - DNA, 33 bp, Homo sapien
tacctcaagtactcaccatgaccccatcaacag

SEQ ID NO: 406090 - DNA, 33 bp, Homo sapien
tacctcaagtactcactatgaccccatcaacag

SEQ ID NO: 406091 - DNA, 33 bp, Homo sapien
ggcaagtgatcaagagacattgaaacagacaca

SEQ ID NO: 406092 - DNA, 33 bp, Homo sapien
ggcaagtgatcaagagccattgaaacagacaca

SEQ ID NO: 406093 - DNA, 33 bp, Homo sapien
gtactagtctatcatgaacacttttgttatact

SEQ ID NO: 406094 - DNA, 33 bp, Homo sapien
gtactagtctatcatggacacttttgttatact

SEQ ID NO: 406095 - DNA, 33 bp, Homo sapien
gtacgtgggttcaactcaagcaccagcctgctc

SEQ ID NO: 406096 - DNA, 33 bp, Homo sapien
gtacgtgggttcaactgaagcaccagcctgctc

SEQ ID NO: 406097 - DNA, 33 bp, Homo sapien; identical to SEQ ID NO: 406095

SEQ ID NO: 406098 - DNA, 33 bp, Homo sapien; identical to SEQ ID NO: 406096

SEQ ID NO: 406099 - DNA, 33 bp, Homo sapien
ttcattgcatgaggcccattgtagtaagaagag

SEQ ID NO: 406100 - DNA, 33 bp, Homo sapien
ttcattgcatgaggcctattgtagtaagaagag

SEQ ID NO: 406101 - DNA, 33 bp, Homo sapien
taataagcctaatccaaatacaagctgaagtct

SEQ ID NO: 406102 - DNA, 33 bp, Homo sapien
taataagcctaatccagatacaagctgaagtct

SEQ ID NO: 406103 - DNA, 33 bp, Homo sapien
cttgctttgggacaccgggatttgcttttataa

SEQ ID NO: 406104 - DNA, 33 bp, Homo sapien
cttgctttgggacacctggatttgcttttataa

SEQ ID NO: 406105 - DNA, 33 bp, Homo sapien
attattgttgaaaatcacttgatcacagatgta

SEQ ID NO: 406106 - DNA, 33 bp, Homo sapien
attattgttgaaaatcgcttgatcacagatgta

SEQ ID NO: 406107 - DNA, 33 bp, Homo sapien
ggattattacattttaacaccttgacctatctg

SEQ ID NO: 406108 - DNA, 33 bp, Homo sapien
ggattattacattttagcaccttgacctatctg

SEQ ID NO: 406109 - DNA, 33 bp, Homo sapien
ttctggtaggaacctacaggctattttaaatct

SEQ ID NO: 406110 - DNA, 33 bp, Homo sapien
ttctggtaggaacctataggctattttaaatct

SEQ ID NO: 406111 - DNA, 33 bp, Homo sapien
ctgtgtactcttattagatcacttcagaagacg

SEQ ID NO: 406112 - DNA, 33 bp, Homo sapien
ctgtgtactcttattatatcacttcagaagacg

SEQ ID NO: 406113 - DNA, 33 bp, Homo sapien
gatgctctttccctacaatatcctcctggatta

SEQ ID NO: 406114 - DNA, 33 bp, Homo sapien
gatgctctttccctacgatatcctcctggatta

SEQ ID NO: 406115 - DNA, 33 bp, Homo sapien
cactgttaaataggaactgtttcaggaaagaaa

SEQ ID NO: 406116 - DNA, 33 bp, Homo sapien
cactgttaaataggaattgtttcaggaaagaaa

SEQ ID NO: 406117 - DNA, 33 bp, Homo sapien
tcagaacttccaaatacggacttatttcttcta

SEQ ID NO: 406118 - DNA, 33 bp, Homo sapien
tcagaacttccaaatatggacttatttcttcta

SEQ ID NO: 406119 - DNA, 33 bp, Homo sapien
agagattcgagttttgaatagaggaagaatcaa

SEQ ID NO: 406120 - DNA, 33 bp, Homo sapien
agagattcgagttttggatagaggaagaatcaa

SEQ ID NO: 406121 - DNA, 33 bp, Homo sapien
tccagctcaaccagaacaagaaggtatgcactt

SEQ ID NO: 406122 - DNA, 33 bp, Homo sapien
tccagctcaaccagaataagaaggtatgcactt

SEQ ID NO: 406123 - DNA, 33 bp, Homo sapien
gaccggtaatggctccaaatgccaggctgtgct

SEQ ID NO: 406124 - DNA, 33 bp, Homo sapien
gaccggtaatggctccgaatgccaggctgtgct

SEQ ID NO: 406125 - DNA, 33 bp, Homo sapien
caagagactgagagcacgagctattccagtgta

SEQ ID NO: 406126 - DNA, 33 bp, Homo sapien
caagagactgagagcatgagctattccagtgta

SEQ ID NO: 406127 - DNA, 33 bp, Homo sapien
cgggcctgcattctcagaaggatattcctagct

SEQ ID NO: 406128 - DNA, 33 bp, Homo sapien
cgggcctgcattctcataaggatattcctagct

SEQ ID NO: 406129 - DNA, 33 bp, Homo sapien
gaaggattccgaggtgcagttttcgaagcggga

SEQ ID NO: 406130 - DNA, 33 bp, Homo sapien
gaaggattccgaggtgtagttttcgaagcggga

SEQ ID NO: 406131 - DNA, 33 bp, Homo sapien
attctcaatccggttaaaagcaaagaagtaata

SEQ ID NO: 406132 - DNA, 33 bp, Homo sapien
attctcaatccggttagaagcaaagaagtaata

SEQ ID NO: 406133 - DNA, 33 bp, Homo sapien
aaaggtaggtacacaaccaatcaaaagtttaaa

SEQ ID NO: 406134 - DNA, 33 bp, Homo sapien
aaaggtaggtacacaatcaatcaaaagtttaaa

SEQ ID NO: 406135 - DNA, 33 bp, Homo sapien
tgttgtttagtatcatcaggaactattttgaca

SEQ ID NO: 406136 - DNA, 33 bp, Homo sapien
tgttgtttagtatcattaggaactattttgaca

SEQ ID NO: 406137 - DNA, 33 bp, Homo sapien
acacatacctagaacacagcctaaaaaagcatc

SEQ ID NO: 406138 - DNA, 33 bp, Homo sapien
acacatacctagaacagagcctaaaaaagcatc

SEQ ID NO: 406139 - DNA, 33 bp, Homo sapien; identical to SEQ ID NO: 406137

SEQ ID NO: 406140 - DNA, 33 bp, Homo sapien; identical to SEQ ID NO: 406138

SEQ ID NO: 406141 - DNA, 33 bp, Homo sapien
attagattgtgtgttacgggatggcttgtgaaa

SEQ ID NO: 406142 - DNA, 33 bp, Homo sapien
attagattgtgtgttatgggatggcttgtgaaa

SEQ ID NO: 406143 - DNA, 33 bp, Homo sapien
gtgtggttaatcccctcaatccagtcaggaact

SEQ ID NO: 406144 - DNA, 33 bp, Homo sapien
gtgtggttaatccccttaatccagtcaggaact

SEQ ID NO: 406145 - DNA, 33 bp, Homo sapien
caagctcttccagaaccctcgctgtttcttggg

SEQ ID NO: 406146 - DNA, 33 bp, Homo sapien
caagctcttccagaacgctcgctgtttcttggg

SEQ ID NO: 406147 - DNA, 33 bp, Homo sapien
agaacagctacagccaatcctgctgttcaccat

SEQ ID NO: 406148 - DNA, 33 bp, Homo sapien
agaacagctacagccattcctgctgttcaccat

SEQ ID NO: 406149 - DNA, 33 bp, Homo sapien
ctaagtacctggataacagcagtgaacagaaca

SEQ ID NO: 406150 - DNA, 33 bp, Homo sapien
ctaagtacctggataatagcagtgaacagaaca

SEQ ID NO: 406151 - DNA, 33 bp, Homo sapien
atcactggtgtgaacaaaagagcaccagtcatt

SEQ ID NO: 406152 - DNA, 33 bp, Homo sapien
atcactggtgtgaacagaagagcaccagtcatt

SEQ ID NO: 406153 - DNA, 33 bp, Homo sapien
caaagaagagaaggcaacatttgtaacctgcta

SEQ ID NO: 406154 - DNA, 33 bp, Homo sapien
caaagaagagaaggcagcatttgtaacctgcta

SEQ ID NO: 406155 - DNA, 33 bp, Homo sapien
gagatccaaagaacaaatgattaatagccactg

SEQ ID NO: 406156 - DNA, 33 bp, Homo sapien
gagatccaaagaacaagtgattaatagccactg

SEQ ID NO: 406157 - DNA, 33 bp, Homo sapien
aaaagatatgagcccactcagctttcacaggtc

SEQ ID NO: 406158 - DNA, 33 bp, Homo sapien
aaaagatatgagcccattcagctttcacaggtc

SEQ ID NO: 406159 - DNA, 33 bp, Homo sapien
agctttccgtaagttccgaaacctggcctggca

SEQ ID NO: 406160 - DNA, 33 bp, Homo sapien
agctttccgtaagttctgaaacctggcctggca

SEQ ID NO: 406161 - DNA, 33 bp, Homo sapien
cttcctctttagcccaatatactcccagctagc

SEQ ID NO: 406162 - DNA, 33 bp, Homo sapien
cttcctctttagcccagtatactcccagctagc

SEQ ID NO: 406163 - DNA, 33 bp, Homo sapien
actgttttccttccaagaacacaccacacctct

SEQ ID NO: 406164 - DNA, 33 bp, Homo sapien
actgttttccttccaataacacaccacacctct

SEQ ID NO: 406165 - DNA, 33 bp, Homo sapien
ctgaagataaggtaaaacgcatggcacaatagc

SEQ ID NO: 406166 - DNA, 33 bp, Homo sapien
ctgaagataaggtaaagcgcatggcacaatagc

SEQ ID NO: 406167 - DNA, 33 bp, Homo sapien
tggcacagtggcgttcacttggcctgcacactg

SEQ ID NO: 406168 - DNA, 33 bp, Homo sapien
tggcacagtggcgttcgcttggcctgcacactg

SEQ ID NO: 406169 - DNA, 33 bp, Homo sapien
cccacaaacatattagaacatctttcacaaccc

SEQ ID NO: 406170 - DNA, 33 bp, Homo sapien
cccacaaacatattaggacatctttcacaaccc

SEQ ID NO: 406171 - DNA, 33 bp, Homo sapien
tgccagacgcatagtacgtgttccataagtgtt

SEQ ID NO: 406172 - DNA, 33 bp, Homo sapien
tgccagacgcatagtaggtgttccataagtgtt

SEQ ID NO: 406173 - DNA, 33 bp, Homo sapien
caggcagctggaaagaggagctgagaaaaagga

SEQ ID NO: 406174 - DNA, 33 bp, Homo sapien
caggcagctggaaagatgagctgagaaaaagga

SEQ ID NO: 406175 - DNA, 33 bp, Homo sapien
ttggaatctggttttggaattcttcctattttt

SEQ ID NO: 406176 - DNA, 33 bp, Homo sapien
ttggaatctggttttgtaattcttcctattttt

SEQ ID NO: 406177 - DNA, 33 bp, Homo sapien
ctcactgatttaagaccgagtccaaatgtggct

SEQ ID NO: 406178 - DNA, 33 bp, Homo sapien
ctcactgatttaagactgagtccaaatgtggct

SEQ ID NO: 406179 - DNA, 33 bp, Homo sapien
cagcaaatgcaaaataaagtctgcagggtcctc

SEQ ID NO: 406180 - DNA, 33 bp, Homo sapien
cagcaaatgcaaaatagagtctgcagggtcctc

SEQ ID NO: 406181 - DNA, 33 bp, Homo sapien
atctcccattcaccaaagtgtggacccaaatcc

SEQ ID NO: 406182 - DNA, 33 bp, Homo sapien
atctcccattcaccaacgtgtggacccaaatcc

SEQ ID NO: 406183 - DNA, 33 bp, Homo sapien
cctggtcttggccaagaaagaaatgtcatggcc

SEQ ID NO: 406184 - DNA, 33 bp, Homo sapien
cctggtcttggccaaggaagaaatgtcatggcc

SEQ ID NO: 406185 - DNA, 33 bp, Homo sapien
ccaccttctctccaacgcagtcatcacaatctc

SEQ ID NO: 406186 - DNA, 33 bp, Homo sapien
ccaccttctctccaactcagtcatcacaatctc

SEQ ID NO: 406187 - DNA, 33 bp, Homo sapien
acaagatgaggaaacaatagacaattcctagag

SEQ ID NO: 406188 - DNA, 33 bp, Homo sapien
acaagatgaggaaacagtagacaattcctagag

SEQ ID NO: 406189 - DNA, 33 bp, Homo sapien
ggcttgatgtcctcacaacgggtccgacctgcc

SEQ ID NO: 406190 - DNA, 33 bp, Homo sapien
ggcttgatgtcctcacgacgggtccgacctgcc

SEQ ID NO: 406191 - DNA, 33 bp, Homo sapien
aggggaagaggtaggcaagacctcactggctct

SEQ ID NO: 406192 - DNA, 33 bp, Homo sapien
aggggaagaggtaggccagacctcactggctct

SEQ ID NO: 406193 - DNA, 33 bp, Homo sapien
aagtgaggctcagaaacaacggcttggccaggc

SEQ ID NO: 406194 - DNA, 33 bp, Homo sapien
aagtgaggctcagaaataacggcttggccaggc

SEQ ID NO: 406195 - DNA, 33 bp, Homo sapien
gaaatgatatatgacacgcagcttcctttcctc

SEQ ID NO: 406196 - DNA, 33 bp, Homo sapien
gaaatgatatatgacatgcagcttcctttcctc

SEQ ID NO: 406197 - DNA, 33 bp, Homo sapien
attctctatcttcccaacttgtgtgtgttcctt

SEQ ID NO: 406198 - DNA, 33 bp, Homo sapien
attctctatcttcccaccttgtgtgtgttcctt

SEQ ID NO: 406199 - DNA, 33 bp, Homo sapien
tgatagttcttctattcaaagatgagaatcagt

SEQ ID NO: 406200 - DNA, 33 bp, Homo sapien
tgatagttcttctatttaaagatgagaatcagt

SEQ ID NO: 406201 - DNA, 33 bp, Homo sapien
gcaacaccacaacctacctgttcattcacactg

SEQ ID NO: 406202 - DNA, 33 bp, Homo sapien
gcaacaccacaacctatctgttcattcacactg

SEQ ID NO: 406203 - DNA, 33 bp, Homo sapien
gtagtaaacacgctagcccacagccacgtatac

SEQ ID NO: 406204 - DNA, 33 bp, Homo sapien
gtagtaaacacgctagtccacagccacgtatac

SEQ ID NO: 406205 - DNA, 33 bp, Homo sapien
ctatgcaaatgagagacgctcaggaagcacttg

SEQ ID NO: 406206 - DNA, 33 bp, Homo sapien
ctatgcaaatgagagatgctcaggaagcacttg

SEQ ID NO: 406207 - DNA, 33 bp, Homo sapien
gcgtcacagccctacacagtaattattggtgtt

SEQ ID NO: 406208 - DNA, 33 bp, Homo sapien
gcgtcacagccctacagagtaattattggtgtt

SEQ ID NO: 406209 - DNA, 33 bp, Homo sapien
ggaggcaagattcacaatgcaaactcttctcca

SEQ ID NO: 406210 - DNA, 33 bp, Homo sapien
ggaggcaagattcacagtgcaaactcttctcca

SEQ ID NO: 406211 - DNA, 33 bp, Homo sapien
cctttccaagttcctcaaacgcaaagcaaacag

SEQ ID NO: 406212 - DNA, 33 bp, Homo sapien
cctttccaagttcctctaacgcaaagcaaacag

SEQ ID NO: 406213 - DNA, 33 bp, Homo sapien
attaaggctgtaaaggacctcagagcatctggt

SEQ ID NO: 406214 - DNA, 33 bp, Homo sapien
attaaggctgtaaagggcctcagagcatctggt

SEQ ID NO: 406215 - DNA, 33 bp, Homo sapien
gaaatgccaaaaatgacggaatcaaagcctttt

SEQ ID NO: 406216 - DNA, 33 bp, Homo sapien
gaaatgccaaaaatgatggaatcaaagcctttt

SEQ ID NO: 406217 - DNA, 33 bp, Homo sapien
tctacattcatactctaacacaattctcactta

SEQ ID NO: 406218 - DNA, 33 bp, Homo sapien
tctacattcatactctgacacaattctcactta

SEQ ID NO: 406219 - DNA, 33 bp, Homo sapien
taggagaaagtcaataaatttctgggttttgtg

SEQ ID NO: 406220 - DNA, 33 bp, Homo sapien
taggagaaagtcaatacatttctgggttttgtg

SEQ ID NO: 406221 - DNA, 33 bp, Homo sapien
ctctctagctttagtccgaaaggctcctcatga

SEQ ID NO: 406222 - DNA, 33 bp, Homo sapien
ctctctagctttagtctgaaaggctcctcatga

SEQ ID NO: 406223 - DNA, 33 bp, Homo sapien
cttttcttgctttggcgcgtgtttcccacaaac

SEQ ID NO: 406224 - DNA, 33 bp, Homo sapien
cttttcttgctttggctcgtgtttcccacaaac

SEQ ID NO: 406225 - DNA, 33 bp, Homo sapien
ttgcttctaataatcacagaggactgaatgtgt

SEQ ID NO: 406226 - DNA, 33 bp, Homo sapien
ttgcttctaataatcagagaggactgaatgtgt

SEQ ID NO: 406227 - DNA, 33 bp, Homo sapien
cagctcaatgggaagaccatcaaagaatttgtg

SEQ ID NO: 406228 - DNA, 33 bp, Homo sapien
cagctcaatgggaagatcatcaaagaatttgtg

SEQ ID NO: 406229 - DNA, 33 bp, Homo sapien
gcagtcataaccctgccaatattcaaagaaaag

SEQ ID NO: 406230 - DNA, 33 bp, Homo sapien
gcagtcataaccctgcgaatattcaaagaaaag

SEQ ID NO: 406231 - DNA, 33 bp, Homo sapien
ggtctatgagcaactacgaggtgccaggccctg

SEQ ID NO: 406232 - DNA, 33 bp, Homo sapien
ggtctatgagcaactatgaggtgccaggccctg

SEQ ID NO: 406233 - DNA, 33 bp, Homo sapien
ggcccaaggagtctcacgctcagctggacattt

SEQ ID NO: 406234 - DNA, 33 bp, Homo sapien
ggcccaaggagtctcatgctcagctggacattt

SEQ ID NO: 406235 - DNA, 33 bp, Homo sapien
cttgtgaccccttccaccttctctcatggcact

SEQ ID NO: 406236 - DNA, 33 bp, Homo sapien
cttgtgaccccttccatcttctctcatggcact

SEQ ID NO: 406237 - DNA, 33 bp, Homo sapien
cagggatgcatagtcacgacagagaccttatgg

SEQ ID NO: 406238 - DNA, 33 bp, Homo sapien
cagggatgcatagtcatgacagagaccttatgg

SEQ ID NO: 406239 - DNA, 33 bp, Homo sapien
caattccagacaaaggaatcagtgcaagcaaag

SEQ ID NO: 406240 - DNA, 33 bp, Homo sapien
caattccagacaaagggatcagtgcaagcaaag

SEQ ID NO: 406241 - DNA, 33 bp, Homo sapien
atacccaagagatttgaaaatatgtcagtacaa

SEQ ID NO: 406242 - DNA, 33 bp, Homo sapien
atacccaagagatttggaaatatgtcagtacaa

SEQ ID NO: 406243 - DNA, 33 bp, Homo sapien
agttagagggcacttcaccaaggcaatatgagg

SEQ ID NO: 406244 - DNA, 33 bp, Homo sapien
agttagagggcacttcgccaaggcaatatgagg

SEQ ID NO: 406245 - DNA, 33 bp, Homo sapien
aactctagcatatgtcacgtcaggagacaaatt

SEQ ID NO: 406246 - DNA, 33 bp, Homo sapien
aactctagcatatgtcgcgtcaggagacaaatt

SEQ ID NO: 406247 - DNA, 33 bp, Homo sapien
aataatatatgtaggacggtatgaaaacatgga

SEQ ID NO: 406248 - DNA, 33 bp, Homo sapien
aataatatatgtaggatggtatgaaaacatgga

SEQ ID NO: 406249 - DNA, 33 bp, Homo sapien
agttctcgaaagaaaaataaagctggtgagcat

SEQ ID NO: 406250 - DNA, 33 bp, Homo sapien
agttctcgaaagaaaattaaagctggtgagcat

SEQ ID NO: 406251 - DNA, 33 bp, Homo sapien
ggaaaatctctaagcaacacccactttgtgaag

SEQ ID NO: 406252 - DNA, 33 bp, Homo sapien
ggaaaatctctaagcagcacccactttgtgaag

SEQ ID NO: 406253 - DNA, 33 bp, Homo sapien
gccatcccaggaccaactggtcacaaagaagct

SEQ ID NO: 406254 - DNA, 33 bp, Homo sapien
gccatcccaggaccaagtggtcacaaagaagct

SEQ ID NO: 406255 - DNA, 33 bp, Homo sapien
ccccacagagactttcaagaggtcctagttagc

SEQ ID NO: 406256 - DNA, 33 bp, Homo sapien
ccccacagagactttcgagaggtcctagttagc

SEQ ID NO: 406257 - DNA, 33 bp, Homo sapien
tgggatgtagcaccccaaagtagagctttctgc

SEQ ID NO: 406258 - DNA, 33 bp, Homo sapien
tgggatgtagcaccccgaagtagagctttctgc

SEQ ID NO: 406259 - DNA, 33 bp, Homo sapien
gtgatcagagaccttcacagccgggagtgaggc

SEQ ID NO: 406260 - DNA, 33 bp, Homo sapien
gtgatcagagaccttcccagccgggagtgaggc

SEQ ID NO: 406261 - DNA, 33 bp, Homo sapien
tccatttggacactccaccatgtctcatgtctg

SEQ ID NO: 406262 - DNA, 33 bp, Homo sapien
tccatttggacactccgccatgtctcatgtctg

SEQ ID NO: 406263 - DNA, 33 bp, Homo sapien
accctgtgcataggcaaccctctcacgtcttga

SEQ ID NO: 406264 - DNA, 33 bp, Homo sapien
accctgtgcataggcagccctctcacgtcttga

SEQ ID NO: 406265 - DNA, 33 bp, Homo sapien
caaggtgttgaggtccacactcaagagaggatt

SEQ ID NO: 406266 - DNA, 33 bp, Homo sapien
caaggtgttgaggtccgcactcaagagaggatt

SEQ ID NO: 406267 - DNA, 33 bp, Homo sapien
agtctgcagatactccacagtaaagcttctctc

SEQ ID NO: 406268 - DNA, 33 bp, Homo sapien
agtctgcagatactccgcagtaaagcttctctc

SEQ ID NO: 406269 - DNA, 33 bp, Homo sapien
gggatacaaaagaagcgcatgcaagagaaagaa

SEQ ID NO: 406270 - DNA, 33 bp, Homo sapien
gggatacaaaagaagctcatgcaagagaaagaa

SEQ ID NO: 406271 - DNA, 33 bp, Homo sapien
agaatttgctgggggcaaggagatggtcaagat

SEQ ID NO: 406272 - DNA, 33 bp, Homo sapien
agaatttgctgggggcgaggagatggtcaagat

SEQ ID NO: 406273 - DNA, 33 bp, Homo sapien
aatcatagcaggcctgcaacattgtctcaccgt

SEQ ID NO: 406274 - DNA, 33 bp, Homo sapien
aatcatagcaggcctgtaacattgtctcaccgt

SEQ ID NO: 406275 - DNA, 33 bp, Homo sapien
attgtactccagttacacaagatgctaacattg

SEQ ID NO: 406276 - DNA, 33 bp, Homo sapien
attgtactccagttacgcaagatgctaacattg

SEQ ID NO: 406277 - DNA, 33 bp, Homo sapien
ctacttcctttaaacaccaggcttatggtttca

SEQ ID NO: 406278 - DNA, 33 bp, Homo sapien
ctacttcctttaaacatcaggcttatggtttca

SEQ ID NO: 406279 - DNA, 33 bp, Homo sapien
gatcaactaaactcaacaggagagtgctgtgat

SEQ ID NO: 406280 - DNA, 33 bp, Homo sapien
gatcaactaaactcaagaggagagtgctgtgat

SEQ ID NO: 406281 - DNA, 33 bp, Homo sapien
ggtgctggcctaagaacagacatgtagaccaat

SEQ ID NO: 406282 - DNA, 33 bp, Homo sapien
ggtgctggcctaagaatagacatgtagaccaat

SEQ ID NO: 406283 - DNA, 33 bp, Homo sapien
cttagagaaccactcaaggaggcagtgaggaga

SEQ ID NO: 406284 - DNA, 33 bp, Homo sapien
cttagagaaccactcagggaggcagtgaggaga

SEQ ID NO: 406285 - DNA, 33 bp, Homo sapien
tgggagcccgactgcacgagctgaagcaaaagg

SEQ ID NO: 406286 - DNA, 33 bp, Homo sapien
tgggagcccgactgcatgagctgaagcaaaagg

SEQ ID NO: 406287 - DNA, 33 bp, Homo sapien
agatatgaatctacaaatactatgtgtggtcct

SEQ ID NO: 406288 - DNA, 33 bp, Homo sapien
agatatgaatctacaactactatgtgtggtcct

SEQ ID NO: 406289 - DNA, 33 bp, Homo sapien
ccacacccagattcaccagttgctcctttgcca

SEQ ID NO: 406290 - DNA, 33 bp, Homo sapien
ccacacccagattcactagttgctcctttgcca

SEQ ID NO: 406291 - DNA, 33 bp, Homo sapien
ccattcccttccaacgccagtgcttcttccatt

SEQ ID NO: 406292 - DNA, 33 bp, Homo sapien
ccattcccttccaacgtcagtgcttcttccatt

SEQ ID NO: 406293 - DNA, 33 bp, Homo sapien
aaccaaatctatgagaagactcaataagcaaga

SEQ ID NO: 406294 - DNA, 33 bp, Homo sapien
aaccaaatctatgagacgactcaataagcaaga

SEQ ID NO: 406295 - DNA, 33 bp, Homo sapien
caagggacacatgaaacattcttgagatgatgg

SEQ ID NO: 406296 - DNA, 33 bp, Homo sapien
caagggacacatgaaagattcttgagatgatgg

SEQ ID NO: 406297 - DNA, 33 bp, Homo sapien
ttgcttcctccccaaactaaacctgacacacac

SEQ ID NO: 406298 - DNA, 33 bp, Homo sapien
ttgcttcctccccaaattaaacctgacacacac

SEQ ID NO: 406299 - DNA, 33 bp, Homo sapien
cattggcgttcaaagacggcttcttccaccaga

SEQ ID NO: 406300 - DNA, 33 bp, Homo sapien
cattggcgttcaaagatggcttcttccaccaga

SEQ ID NO: 406301 - DNA, 33 bp, Homo sapien
aacacaagccactttaccccaaagtatttcagc

SEQ ID NO: 406302 - DNA, 33 bp, Homo sapien
aacacaagccactttatcccaaagtatttcagc

SEQ ID NO: 406303 - DNA, 33 bp, Homo sapien
gtgaaggattttgggggaacagaatagtcacat

SEQ ID NO: 406304 - DNA, 33 bp, Homo sapien
gtgaaggattttggggtaacagaatagtcacat

SEQ ID NO: 406305 - DNA, 33 bp, Homo sapien
ttttttttaggtgtgacaatagtagtgtagctt

SEQ ID NO: 406306 - DNA, 33 bp, Homo sapien
ttttttttaggtgtgagaatagtagtgtagctt

SEQ ID NO: 406307 - DNA, 33 bp, Homo sapien
agtaaagcctaattgaaaatgaaccaatgtgct

SEQ ID NO: 406308 - DNA, 33 bp, Homo sapien
agtaaagcctaattgagaatgaaccaatgtgct

SEQ ID NO: 406309 - DNA, 33 bp, Homo sapien
tgtgaataggctacaacccaaggacatggtgtc

SEQ ID NO: 406310 - DNA, 33 bp, Homo sapien
tgtgaataggctacaatccaaggacatggtgtc

SEQ ID NO: 406311 - DNA, 33 bp, Homo sapien
agggagaaagaaggtacagccaggtggtgggtt

SEQ ID NO: 406312 - DNA, 33 bp, Homo sapien
agggagaaagaaggtatagccaggtggtgggtt

SEQ ID NO: 406313 - DNA, 33 bp, Homo sapien
aattttctcttttagtcaatctctccccaacct

SEQ ID NO: 406314 - DNA, 33 bp, Homo sapien
aattttctcttttagtgaatctctccccaacct

SEQ ID NO: 406315 - DNA, 33 bp, Homo sapien
agtcatcctttcttcccccgtagcagcaggcgt

SEQ ID NO: 406316 - DNA, 33 bp, Homo sapien
agtcatcctttcttccgccgtagcagcaggcgt

SEQ ID NO: 406317 - DNA, 33 bp, Homo sapien; identical to SEQ ID NO: 406315

SEQ ID NO: 406318 - DNA, 33 bp, Homo sapien; identical to SEQ ID NO: 406316

SEQ ID NO: 406319 - DNA, 33 bp, Homo sapien
cccctttccaatcatacccctctctctaaccgt

SEQ ID NO: 406320 - DNA, 33 bp, Homo sapien
cccctttccaatcatatccctctctctaaccgt

SEQ ID NO: 406321 - DNA, 33 bp, Homo sapien
ataatattcttgctttaaaaatgtagctctggc

SEQ ID NO: 406322 - DNA, 33 bp, Homo sapien
ataatattcttgcttttaaaatgtagctctggc

SEQ ID NO: 406323 - DNA, 33 bp, Homo sapien
taattatcaaacatgcaacaaaagataccgaaa

SEQ ID NO: 406324 - DNA, 33 bp, Homo sapien
taattatcaaacatgcgacaaaagataccgaaa

SEQ ID NO: 406325 - DNA, 33 bp, Homo sapien
tttaaagtggaagggactccaaggttcgcctca

SEQ ID NO: 406326 - DNA, 33 bp, Homo sapien
tttaaagtggaagggattccaaggttcgcctca

SEQ ID NO: 406327 - DNA, 33 bp, Homo sapien
aacactgggctgtgacaaatggggataaggaat

SEQ ID NO: 406328 - DNA, 33 bp, Homo sapien
aacactgggctgtgacgaatggggataaggaat

SEQ ID NO: 406329 - DNA, 33 bp, Homo sapien
ttttacaaccttgccccataaaagcagcaatat

SEQ ID NO: 406330 - DNA, 33 bp, Homo sapien
ttttacaaccttgccctataaaagcagcaatat

SEQ ID NO: 406331 - DNA, 33 bp, Homo sapien
caggacgacatggacaatagcgtcttctccagg

SEQ ID NO: 406332 - DNA, 33 bp, Homo sapien
caggacgacatggacagtagcgtcttctccagg

SEQ ID NO: 406333 - DNA, 33 bp, Homo sapien
atgggtgtgatgagcccattttactgagaggaa

SEQ ID NO: 406334 - DNA, 33 bp, Homo sapien
atgggtgtgatgagcctattttactgagaggaa

SEQ ID NO: 406335 - DNA, 33 bp, Homo sapien
gcagggttgtggttaacgatccactgggctgat

SEQ ID NO: 406336 - DNA, 33 bp, Homo sapien
gcagggttgtggttaaggatccactgggctgat

SEQ ID NO: 406337 - DNA, 33 bp, Homo sapien
tgggagacgtcgttaaatgatgttgccagggta

SEQ ID NO: 406338 - DNA, 33 bp, Homo sapien
tgggagacgtcgttaagtgatgttgccagggta

SEQ ID NO: 406339 - DNA, 33 bp, Homo sapien
cccaggctggtctaaagttcttgggctaaagca

SEQ ID NO: 406340 - DNA, 33 bp, Homo sapien
cccaggctggtctaaatttcttgggctaaagca

SEQ ID NO: 406341 - DNA, 33 bp, Homo sapien
gatattccccagcctcaatacaagacagcgcca

SEQ ID NO: 406342 - DNA, 33 bp, Homo sapien
gatattccccagcctcgatacaagacagcgcca

SEQ ID NO: 406343 - DNA, 33 bp, Homo sapien
ggtttcaactccgctccgagagaggattgagtg

SEQ ID NO: 406344 - DNA, 33 bp, Homo sapien
ggtttcaactccgctctgagagaggattgagtg

SEQ ID NO: 406345 - DNA, 33 bp, Homo sapien
gatacagaattgtgcactcacataggccaggtg

SEQ ID NO: 406346 - DNA, 33 bp, Homo sapien
gatacagaattgtgcattcacataggccaggtg

SEQ ID NO: 406347 - DNA, 33 bp, Homo sapien
agctttagagtgagtcaagttggggtcctagac

SEQ ID NO: 406348 - DNA, 33 bp, Homo sapien
agctttagagtgagtcgagttggggtcctagac

SEQ ID NO: 406349 - DNA, 33 bp, Homo sapien
cgggctgcattcaaagaccagtttgcttcaata

SEQ ID NO: 406350 - DNA, 33 bp, Homo sapien
cgggctgcattcaaagtccagtttgcttcaata

SEQ ID NO: 406351 - DNA, 33 bp, Homo sapien
caaatggggaatatgacgtttccagaatccaaa

SEQ ID NO: 406352 - DNA, 33 bp, Homo sapien
caaatggggaatatgatgtttccagaatccaaa

SEQ ID NO: 406353 - DNA, 33 bp, Homo sapien; identical to SEQ ID NO: 406351

SEQ ID NO: 406354 - DNA, 33 bp, Homo sapien; identical to SEQ ID NO: 406352

SEQ ID NO: 406355 - DNA, 33 bp, Homo sapien; identical to SEQ ID NO: 406351

SEQ ID NO: 406356 - DNA, 33 bp, Homo sapien; identical to SEQ ID NO: 406352

SEQ ID NO: 406357 - DNA, 33 bp, Homo sapien
ccatcagacagatcccacaggatattgagagaa

SEQ ID NO: 406358 - DNA, 33 bp, Homo sapien
ccatcagacagatcccgcaggatattgagagaa

SEQ ID NO: 406359 - DNA, 33 bp, Homo sapien
tactgcaatgttggacactatagcaactagctt

SEQ ID NO: 406360 - DNA, 33 bp, Homo sapien
tactgcaatgttggacgctatagcaactagctt

SEQ ID NO: 406361 - DNA, 33 bp, Homo sapien
gtttcccattaattaaccacctccactcatcgt

SEQ ID NO: 406362 - DNA, 33 bp, Homo sapien
gtttcccattaattaatcacctccactcatcgt

SEQ ID NO: 406363 - DNA, 33 bp, Homo sapien
ccctggactagaagccaatttaggaaactggag

SEQ ID NO: 406364 - DNA, 33 bp, Homo sapien
ccctggactagaagccgatttaggaaactggag

SEQ ID NO: 406365 - DNA, 33 bp, Homo sapien
gagacaagcttcatgaaaacacctgcctgccca

SEQ ID NO: 406366 - DNA, 33 bp, Homo sapien
gagacaagcttcatgacaacacctgcctgccca

SEQ ID NO: 406367 - DNA, 33 bp, Homo sapien
tcaaaggcactaggaacttatcttgacccctcc

SEQ ID NO: 406368 - DNA, 33 bp, Homo sapien
tcaaaggcactaggaatttatcttgacccctcc

SEQ ID NO: 406369 - DNA, 33 bp, Homo sapien
acaggacaggaggtaacaaaatctgggtcttag

SEQ ID NO: 406370 - DNA, 33 bp, Homo sapien
acaggacaggaggtaagaaaatctgggtcttag

SEQ ID NO: 406371 - DNA, 33 bp, Homo sapien
gaggggtgagactagaaccaaagctcgcacgtt

SEQ ID NO: 406372 - DNA, 33 bp, Homo sapien
gaggggtgagactagatccaaagctcgcacgtt

SEQ ID NO: 406373 - DNA, 33 bp, Homo sapien
tactgagcgagctttgaagtgttagttaaattt

SEQ ID NO: 406374 - DNA, 33 bp, Homo sapien
tactgagcgagctttggagtgttagttaaattt

SEQ ID NO: 406375 - DNA, 33 bp, Homo sapien
tctcggccctgaggcaaacataccttccacagc

SEQ ID NO: 406376 - DNA, 33 bp, Homo sapien
tctcggccctgaggcagacataccttccacagc

SEQ ID NO: 406377 - DNA, 33 bp, Homo sapien
tccctgggcaaatccaatctggtgattaccatt

SEQ ID NO: 406378 - DNA, 33 bp, Homo sapien
tccctgggcaaatccagtctggtgattaccatt

SEQ ID NO: 406379 - DNA, 33 bp, Homo sapien
tgatgtggattaagaaagcagccgaagaccaaa

SEQ ID NO: 406380 - DNA, 33 bp, Homo sapien
tgatgtggattaagaaggcagccgaagaccaaa

SEQ ID NO: 406381 - DNA, 33 bp, Homo sapien; identical to SEQ ID NO: 406379

SEQ ID NO: 406382 - DNA, 33 bp, Homo sapien; identical to SEQ ID NO: 406380

SEQ ID NO: 406383 - DNA, 33 bp, Homo sapien
gcagcttggcacagtagaaatgataatagcctt

SEQ ID NO: 406384 - DNA, 33 bp, Homo sapien
gcagcttggcacagtataaatgataatagcctt

SEQ ID NO: 406385 - DNA, 33 bp, Homo sapien
cctggcgcatttagcaagtttactcagtattcc

SEQ ID NO: 406386 - DNA, 33 bp, Homo sapien
cctggcgcatttagcaggtttactcagtattcc

SEQ ID NO: 406387 - DNA, 33 bp, Homo sapien
cctgaggcagatgaaactgatttccacctagga

SEQ ID NO: 406388 - DNA, 33 bp, Homo sapien
cctgaggcagatgaaattgatttccacctagga

SEQ ID NO: 406389 - DNA, 33 bp, Homo sapien
ttcttcaagttttaggaagattgagtacaggct

SEQ ID NO: 406390 - DNA, 33 bp, Homo sapien
ttcttcaagttttaggtagattgagtacaggct

SEQ ID NO: 406391 - DNA, 33 bp, Homo sapien
gagcctgtaggagccactcatgcaccaagttac

SEQ ID NO: 406392 - DNA, 33 bp, Homo sapien
gagcctgtaggagccattcatgcaccaagttac

SEQ ID NO: 406393 - DNA, 33 bp, Homo sapien
aatggtaagaagatgacaaaaatatatacgatg

SEQ ID NO: 406394 - DNA, 33 bp, Homo sapien
aatggtaagaagatgagaaaaatatatacgatg

SEQ ID NO: 406395 - DNA, 33 bp, Homo sapien
tagtaccccttctgcaaaggatgctcaccgtgg

SEQ ID NO: 406396 - DNA, 33 bp, Homo sapien
tagtaccccttctgcagaggatgctcaccgtgg

SEQ ID NO: 406397 - DNA, 33 bp, Homo sapien
gcttctggtgtccttgccaagctttaaaatgtt

SEQ ID NO: 406398 - DNA, 33 bp, Homo sapien
gcttctggtgtccttgtcaagctttaaaatgtt

SEQ ID NO: 406399 - DNA, 33 bp, Homo sapien
ctgtaacttcttaagcaaaggaaaataaaaaaa

SEQ ID NO: 406400 - DNA, 33 bp, Homo sapien
ctgtaacttcttaagcgaaggaaaataaaaaaa

SEQ ID NO: 406401 - DNA, 33 bp, Homo sapien
ccatggcagcggacagcctgctgagaacaccca

SEQ ID NO: 406402 - DNA, 33 bp, Homo sapien
ccatggcagcggacagtctgctgagaacaccca

SEQ ID NO: 406403 - DNA, 33 bp, Homo sapien
ccacctcctggacagacaaggatgaagttcact

SEQ ID NO: 406404 - DNA, 33 bp, Homo sapien
ccacctcctggacagataaggatgaagttcact

SEQ ID NO: 406405 - DNA, 33 bp, Homo sapien
aaatttttattaatgaagtggaagcatgggtag

SEQ ID NO: 406406 - DNA, 33 bp, Homo sapien
aaatttttattaatgaggtggaagcatgggtag

SEQ ID NO: 406407 - DNA, 33 bp, Homo sapien
caagctttctgactccaatgctttacacatact

SEQ ID NO: 406408 - DNA, 33 bp, Homo sapien
caagctttctgactccgatgctttacacatact

SEQ ID NO: 406409 - DNA, 33 bp, Homo sapien
aggaattcagcaaaacgccttaaaagtatggta

SEQ ID NO: 406410 - DNA, 33 bp, Homo sapien
aggaattcagcaaaactccttaaaagtatggta

SEQ ID NO: 406411 - DNA, 33 bp, Homo sapien
tagttacttgctaacagaagaaggtacctatct

SEQ ID NO: 406412 - DNA, 33 bp, Homo sapien
tagttacttgctaacataagaaggtacctatct

SEQ ID NO: 406413 - DNA, 33 bp, Homo sapien
tcacactctggagaaaatcttgtgtgtatatat

SEQ ID NO: 406414 - DNA, 33 bp, Homo sapien
tcacactctggagaaactcttgtgtgtatatat

SEQ ID NO: 406415 - DNA, 33 bp, Homo sapien
ctttttaactaaatgccattctggcctacatac

SEQ ID NO: 406416 - DNA, 33 bp, Homo sapien
ctttttaactaaatgctattctggcctacatac

SEQ ID NO: 406417 - DNA, 33 bp, Homo sapien
tgtctcaagagaaaaccatgctacaggtatgtc

SEQ ID NO: 406418 - DNA, 33 bp, Homo sapien
tgtctcaagagaaaactatgctacaggtatgtc

SEQ ID NO: 406419 - DNA, 33 bp, Homo sapien
aaatgatagctgcagaaaactaagaagttatct

SEQ ID NO: 406420 - DNA, 33 bp, Homo sapien
aaatgatagctgcagacaactaagaagttatct

SEQ ID NO: 406421 - DNA, 33 bp, Homo sapien
ccacagacagtgaaaagacaagcaagaagtcat

SEQ ID NO: 406422 - DNA, 33 bp, Homo sapien
ccacagacagtgaaaatacaagcaagaagtcat

SEQ ID NO: 406423 - DNA, 33 bp, Homo sapien
agatactttgtggaaaacaggtctgagcattca

SEQ ID NO: 406424 - DNA, 33 bp, Homo sapien
agatactttgtggaaagcaggtctgagcattca

SEQ ID NO: 406425 - DNA, 33 bp, Homo sapien
ctgcttacaaatctgacatctaggaccaggtgg

SEQ ID NO: 406426 - DNA, 33 bp, Homo sapien
ctgcttacaaatctgatatctaggaccaggtgg

SEQ ID NO: 406427 - DNA, 33 bp, Homo sapien
gacctcttcctttcccaaaattctccagtatat

SEQ ID NO: 406428 - DNA, 33 bp, Homo sapien
gacctcttcctttccccaaattctccagtatat

SEQ ID NO: 406429 - DNA, 33 bp, Homo sapien
gttatttgatagatacagcatttatttctgagt

SEQ ID NO: 406430 - DNA, 33 bp, Homo sapien
gttatttgatagatactgcatttatttctgagt

SEQ ID NO: 406431 - DNA, 33 bp, Homo sapien
caccctggaggaagacccagaggtaaaccacct

SEQ ID NO: 406432 - DNA, 33 bp, Homo sapien
caccctggaggaagactcagaggtaaaccacct

SEQ ID NO: 406433 - DNA, 33 bp, Homo sapien
caaagcttagaagcaacgaagatgcccttcgat

SEQ ID NO: 406434 - DNA, 33 bp, Homo sapien
caaagcttagaagcaatgaagatgcccttcgat

SEQ ID NO: 406435 - DNA, 33 bp, Homo sapien
aagggttggatcctcaagccaacaagtcccaga

SEQ ID NO: 406436 - DNA, 33 bp, Homo sapien
aagggttggatcctcaggccaacaagtcccaga

SEQ ID NO: 406437 - DNA, 33 bp, Homo sapien
tgctgctgtttgtgagcatgcgctgtgcagggc

SEQ ID NO: 406438 - DNA, 33 bp, Homo sapien
tgctgctgtttgtgagtatgcgctgtgcagggc

SEQ ID NO: 406439 - DNA, 33 bp, Homo sapien
acactgagtcagtctgaagcgtgaggtagtgga

SEQ ID NO: 406440 - DNA, 33 bp, Homo sapien
acactgagtcagtctggagcgtgaggtagtgga

SEQ ID NO: 406441 - DNA, 33 bp, Homo sapien
tgcttgatctctttgtaaatgtggcgtcacctg

SEQ ID NO: 406442 - DNA, 33 bp, Homo sapien
tgcttgatctctttgttaatgtggcgtcacctg

SEQ ID NO: 406443 - DNA, 33 bp, Homo sapien
cactctaactcctctcaccgccagcggtacagt

SEQ ID NO: 406444 - DNA, 33 bp, Homo sapien
cactctaactcctctcgccgccagcggtacagt

SEQ ID NO: 406445 - DNA, 33 bp, Homo sapien
ccaatgcccatctgtgaataaaggaagtaaggc

SEQ ID NO: 406446 - DNA, 33 bp, Homo sapien
ccaatgcccatctgtggataaaggaagtaaggc

SEQ ID NO: 406447 - DNA, 33 bp, Homo sapien
gagggaatgacactctcacagcatttgagccct

SEQ ID NO: 406448 - DNA, 33 bp, Homo sapien
gagggaatgacactctgacagcatttgagccct

SEQ ID NO: 406449 - DNA, 33 bp, Homo sapien
tttggctgtaaattgaagtcaactgcctagttg

SEQ ID NO: 406450 - DNA, 33 bp, Homo sapien
tttggctgtaaattgaggtcaactgcctagttg

SEQ ID NO: 406451 - DNA, 33 bp, Homo sapien
tagttctaactttagccatgctcaccaatacaa

SEQ ID NO: 406452 - DNA, 33 bp, Homo sapien
tagttctaactttagctatgctcaccaatacaa

SEQ ID NO: 406453 - DNA, 33 bp, Homo sapien
gggtaataagtgatgaaaatgaccacattaggg

SEQ ID NO: 406454 - DNA, 33 bp, Homo sapien
gggtaataagtgatgagaatgaccacattaggg

SEQ ID NO: 406455 - DNA, 33 bp, Homo sapien
gctcttatggccttgccactggacatttggccc

SEQ ID NO: 406456 - DNA, 33 bp, Homo sapien
gctcttatggccttgctactggacatttggccc

SEQ ID NO: 406457 - DNA, 33 bp, Homo sapien
gcactttgagaggccaagtagggagcatccctt

SEQ ID NO: 406458 - DNA, 33 bp, Homo sapien
gcactttgagaggccacgtagggagcatccctt

SEQ ID NO: 406459 - DNA, 33 bp, Homo sapien
acttaaataaatggcaaccagtagtgtcatatt

SEQ ID NO: 406460 - DNA, 33 bp, Homo sapien
acttaaataaatggcagccagtagtgtcatatt

SEQ ID NO: 406461 - DNA, 33 bp, Homo sapien
aatccaggattgatacaacatcagactgagagg

SEQ ID NO: 406462 - DNA, 33 bp, Homo sapien
aatccaggattgatactacatcagactgagagg

SEQ ID NO: 406463 - DNA, 33 bp, Homo sapien
ttcatttccatgggtacgtagaagcaatcaaaa

SEQ ID NO: 406464 - DNA, 33 bp, Homo sapien
ttcatttccatgggtatgtagaagcaatcaaaa

SEQ ID NO: 406465 - DNA, 33 bp, Homo sapien
gggtccgaggtggataaattggtatatagttgg

SEQ ID NO: 406466 - DNA, 33 bp, Homo sapien
gggtccgaggtggatagattggtatatagttgg

SEQ ID NO: 406467 - DNA, 33 bp, Homo sapien
tggatttagcagctgaatacttcttcctggacg

SEQ ID NO: 406468 - DNA, 33 bp, Homo sapien
tggatttagcagctgagtacttcttcctggacg

SEQ ID NO: 406469 - DNA, 33 bp, Homo sapien
tttcaccttgccaccaacatcagctttcttggc

SEQ ID NO: 406470 - DNA, 33 bp, Homo sapien
tttcaccttgccaccagcatcagctttcttggc

SEQ ID NO: 406471 - DNA, 33 bp, Homo sapien
gcctgtttacactagaatagttgtcttgaacca

SEQ ID NO: 406472 - DNA, 33 bp, Homo sapien
gcctgtttacactagagtagttgtcttgaacca

SEQ ID NO: 406473 - DNA, 33 bp, Homo sapien
tattcatcgtgttgccaaagagggagccgttgt

SEQ ID NO: 406474 - DNA, 33 bp, Homo sapien
tattcatcgtgttgccgaagagggagccgttgt

SEQ ID NO: 406475 - DNA, 33 bp, Homo sapien
caactctttaaatgcacggacgcagagaagggt

SEQ ID NO: 406476 - DNA, 33 bp, Homo sapien
caactctttaaatgcatggacgcagagaagggt

SEQ ID NO: 406477 - DNA, 33 bp, Homo sapien
accttgtctccgcaacgccaggtaagggagagg

SEQ ID NO: 406478 - DNA, 33 bp, Homo sapien
accttgtctccgcaactccaggtaagggagagg

SEQ ID NO: 406479 - DNA, 33 bp, Homo sapien
cttgtttggggccctcgcttatctgtgcctcag

SEQ ID NO: 406480 - DNA, 33 bp, Homo sapien
cttgtttggggccctctcttatctgtgcctcag

SEQ ID NO: 406481 - DNA, 33 bp, Homo sapien
aggctcagagggatgaagtaaattgcccaaagt

SEQ ID NO: 406482 - DNA, 33 bp, Homo sapien
aggctcagagggatgacgtaaattgcccaaagt

SEQ ID NO: 406483 - DNA, 33 bp, Homo sapien
attaaatgaggtaatacatggttagtgccagag

SEQ ID NO: 406484 - DNA, 33 bp, Homo sapien
attaaatgaggtaatatatggttagtgccagag

SEQ ID NO: 406485 - DNA, 33 bp, Homo sapien
gtggtcagagtggagacaagagactgccctgaa

SEQ ID NO: 406486 - DNA, 33 bp, Homo sapien
gtggtcagagtggagataagagactgccctgaa

SEQ ID NO: 406487 - DNA, 33 bp, Homo sapien
aaccacacatcagacccggatagactgggaact

SEQ ID NO: 406488 - DNA, 33 bp, Homo sapien
aaccacacatcagacctggatagactgggaact

SEQ ID NO: 406489 - DNA, 33 bp, Homo sapien
agctctggcaactctgcatagctctggccaaat

SEQ ID NO: 406490 - DNA, 33 bp, Homo sapien
agctctggcaactctgtatagctctggccaaat

SEQ ID NO: 406491 - DNA, 33 bp, Homo sapien
tgttcataagagtatccgagggagtgtaacttg

SEQ ID NO: 406492 - DNA, 33 bp, Homo sapien
tgttcataagagtatctgagggagtgtaacttg

SEQ ID NO: 406493 - DNA, 33 bp, Homo sapien
gggtaccacctgacgacgaagactgtgtgtctg

SEQ ID NO: 406494 - DNA, 33 bp, Homo sapien
gggtaccacctgacgatgaagactgtgtgtctg

SEQ ID NO: 406495 - DNA, 33 bp, Homo sapien
actccagggcaaggaaaattcttaggggaggca

SEQ ID NO: 406496 - DNA, 33 bp, Homo sapien
actccagggcaaggaagattcttaggggaggca

SEQ ID NO: 406497 - DNA, 33 bp, Homo sapien
aaaagagctgtccaaaccatcaccaaaaagccc

SEQ ID NO: 406498 - DNA, 33 bp, Homo sapien
aaaagagctgtccaaatcatcaccaaaaagccc

SEQ ID NO: 406499 - DNA, 33 bp, Homo sapien
tttacgtggaacaaaacaagcaccccatctaac

SEQ ID NO: 406500 - DNA, 33 bp, Homo sapien
tttacgtggaacaaaataagcaccccatctaac

SEQ ID NO: 406501 - DNA, 33 bp, Homo sapien
agatcttgactattgaaaagaatgtgacactta

SEQ ID NO: 406502 - DNA, 33 bp, Homo sapien
agatcttgactattgagaagaatgtgacactta

SEQ ID NO: 406503 - DNA, 33 bp, Homo sapien
tgtgctctcgctaggaatataatacaataaggc

SEQ ID NO: 406504 - DNA, 33 bp, Homo sapien
tgtgctctcgctaggagtataatacaataaggc

SEQ ID NO: 406505 - DNA, 33 bp, Homo sapien
atgtctgcctccatacagctggctagaagcact

SEQ ID NO: 406506 - DNA, 33 bp, Homo sapien
atgtctgcctccatacggctggctagaagcact

SEQ ID NO: 406507 - DNA, 33 bp, Homo sapien
catggcaaggtaagacagaactttcagctactt

SEQ ID NO: 406508 - DNA, 33 bp, Homo sapien
catggcaaggtaagacggaactttcagctactt

SEQ ID NO: 406509 - DNA, 33 bp, Homo sapien
ccagaggtaaaaactgaagataagcccatacct

SEQ ID NO: 406510 - DNA, 33 bp, Homo sapien
ccagaggtaaaaactggagataagcccatacct

SEQ ID NO: 406511 - DNA, 33 bp, Homo sapien
cctgtaattatctctacccgagtctacagtagc

SEQ ID NO: 406512 - DNA, 33 bp, Homo sapien
cctgtaattatctctatccgagtctacagtagc

SEQ ID NO: 406513 - DNA, 33 bp, Homo sapien
ctgaattctgagatccaaatgcctcctcgactg

SEQ ID NO: 406514 - DNA, 33 bp, Homo sapien
ctgaattctgagatcccaatgcctcctcgactg

SEQ ID NO: 406515 - DNA, 33 bp, Homo sapien
ctcctgttatggtggactatagtagttaactct

SEQ ID NO: 406516 - DNA, 33 bp, Homo sapien
ctcctgttatggtggattatagtagttaactct

SEQ ID NO: 406517 - DNA, 33 bp, Homo sapien
gtgacatctcatgggcactacccagcctcgttc

SEQ ID NO: 406518 - DNA, 33 bp, Homo sapien
gtgacatctcatgggcgctacccagcctcgttc

SEQ ID NO: 406519 - DNA, 33 bp, Homo sapien
aggcaattgggatggcactaggcatacaagtag

SEQ ID NO: 406520 - DNA, 33 bp, Homo sapien
aggcaattgggatggcgctaggcatacaagtag

SEQ ID NO: 406521 - DNA, 33 bp, Homo sapien
tcaagctgggcaaagcgccgtgtctgagaggca

SEQ ID NO: 406522 - DNA, 33 bp, Homo sapien
tcaagctgggcaaagctccgtgtctgagaggca

SEQ ID NO: 406523 - DNA, 33 bp, Homo sapien
ccagattgtaaatggaacgccgccggctcgcgg

SEQ ID NO: 406524 - DNA, 33 bp, Homo sapien
ccagattgtaaatggagcgccgccggctcgcgg

SEQ ID NO: 406525 - DNA, 33 bp, Homo sapien
caactcctcctttatacggacacaggctcagaa

SEQ ID NO: 406526 - DNA, 33 bp, Homo sapien
caactcctcctttatatggacacaggctcagaa

SEQ ID NO: 406527 - DNA, 33 bp, Homo sapien
agagcatcttgaagacagggtgagcgcccagtg

SEQ ID NO: 406528 - DNA, 33 bp, Homo sapien
agagcatcttgaagacggggtgagcgcccagtg

SEQ ID NO: 406529 - DNA, 33 bp, Homo sapien
gcaagaagatacctaccgcttagaacggtcccc

SEQ ID NO: 406530 - DNA, 33 bp, Homo sapien
gcaagaagatacctactgcttagaacggtcccc

SEQ ID NO: 406531 - DNA, 33 bp, Homo sapien
accccactgatgccaacgcgacttcctcccgct

SEQ ID NO: 406532 - DNA, 33 bp, Homo sapien
accccactgatgccaatgcgacttcctcccgct

SEQ ID NO: 406533 - DNA, 33 bp, Homo sapien
acaactgctcttacggcagaatggctattatgc

SEQ ID NO: 406534 - DNA, 33 bp, Homo sapien
acaactgctcttacggtagaatggctattatgc

SEQ ID NO: 406535 - DNA, 33 bp, Homo sapien
agtaagataggaagcgcagtcctggcttccagc

SEQ ID NO: 406536 - DNA, 33 bp, Homo sapien
agtaagataggaagcgtagtcctggcttccagc

SEQ ID NO: 406537 - DNA, 33 bp, Homo sapien
ttatttacgtgagtcactctcaccggatctgag

SEQ ID NO: 406538 - DNA, 33 bp, Homo sapien
ttatttacgtgagtcattctcaccggatctgag

SEQ ID NO: 406539 - DNA, 33 bp, Homo sapien
cttaacactgcctagccaagactgatcatccac

SEQ ID NO: 406540 - DNA, 33 bp, Homo sapien
cttaacactgcctagctaagactgatcatccac

SEQ ID NO: 406541 - DNA, 33 bp, Homo sapien
gttcagattagttccagccagtgccagggaaat

SEQ ID NO: 406542 - DNA, 33 bp, Homo sapien
gttcagattagttccatccagtgccagggaaat

SEQ ID NO: 406543 - DNA, 33 bp, Homo sapien
tgctgtcaatcactgacgaatgcctgttaagtg

SEQ ID NO: 406544 - DNA, 33 bp, Homo sapien
tgctgtcaatcactgatgaatgcctgttaagtg

SEQ ID NO: 406545 - DNA, 33 bp, Homo sapien
agatggacagaaaagaaatatcaacctatcagg

SEQ ID NO: 406546 - DNA, 33 bp, Homo sapien
agatggacagaaaagagatatcaacctatcagg

SEQ ID NO: 406547 - DNA, 33 bp, Homo sapien
ggaagattcccaggccaccaacagtaatgtcat

SEQ ID NO: 406548 - DNA, 33 bp, Homo sapien
ggaagattcccaggccgccaacagtaatgtcat

SEQ ID NO: 406549 - DNA, 33 bp, Homo sapien
ccacttgtggagcacaatagaatctgatcgtca

SEQ ID NO: 406550 - DNA, 33 bp, Homo sapien
ccacttgtggagcacagtagaatctgatcgtca

SEQ ID NO: 406551 - DNA, 33 bp, Homo sapien
accaaagaatgattcgaacaagtccagcttcgt

SEQ ID NO: 406552 - DNA, 33 bp, Homo sapien
accaaagaatgattcggacaagtccagcttcgt

SEQ ID NO: 406553 - DNA, 33 bp, Homo sapien
ctttagaatcccaaccagccttgtcttgagaca

SEQ ID NO: 406554 - DNA, 33 bp, Homo sapien
ctttagaatcccaaccggccttgtcttgagaca

SEQ ID NO: 406555 - DNA, 33 bp, Homo sapien
gccatcacccaataaaaaggattccatcttgtg

SEQ ID NO: 406556 - DNA, 33 bp, Homo sapien
gccatcacccaataaataggattccatcttgtg

SEQ ID NO: 406557 - DNA, 33 bp, Homo sapien
agtgccagaattagaccctctcctccagactag

SEQ ID NO: 406558 - DNA, 33 bp, Homo sapien
agtgccagaattagactctctcctccagactag

SEQ ID NO: 406559 - DNA, 33 bp, Homo sapien
aggcttacaatgagaactatttggggagagaaa

SEQ ID NO: 406560 - DNA, 33 bp, Homo sapien
aggcttacaatgagaattatttggggagagaaa

SEQ ID NO: 406561 - DNA, 33 bp, Homo sapien
aattgatttgcaaaagaatttcctgatgtctaa

SEQ ID NO: 406562 - DNA, 33 bp, Homo sapien
aattgatttgcaaaaggatttcctgatgtctaa

SEQ ID NO: 406563 - DNA, 33 bp, Homo sapien
caagtaggtgtacttgaatctagacttcatgac

SEQ ID NO: 406564 - DNA, 33 bp, Homo sapien
caagtaggtgtacttgcatctagacttcatgac

SEQ ID NO: 406565 - DNA, 33 bp, Homo sapien
tattcataataactccaaggcattttgagaccc

SEQ ID NO: 406566 - DNA, 33 bp, Homo sapien
tattcataataactccgaggcattttgagaccc

SEQ ID NO: 406567 - DNA, 33 bp, Homo sapien
aacaaggcattcataccacaatacttccttgaa

SEQ ID NO: 406568 - DNA, 33 bp, Homo sapien
aacaaggcattcatactacaatacttccttgaa

SEQ ID NO: 406569 - DNA, 33 bp, Homo sapien
gagccagtgctgttggaaagaatcattatttgt

SEQ ID NO: 406570 - DNA, 33 bp, Homo sapien
gagccagtgctgttggcaagaatcattatttgt

SEQ ID NO: 406571 - DNA, 33 bp, Homo sapien
ctttgttttcctttcacctgtaaatgtagaaag

SEQ ID NO: 406572 - DNA, 33 bp, Homo sapien
ctttgttttcctttcatctgtaaatgtagaaag

SEQ ID NO: 406573 - DNA, 33 bp, Homo sapien
tagtgactttttaaaacagagtggccacactgc

SEQ ID NO: 406574 - DNA, 33 bp, Homo sapien
tagtgactttttaaaagagagtggccacactgc

SEQ ID NO: 406575 - DNA, 33 bp, Homo sapien
gccttctcccttacaacggcctttgagtacctc

SEQ ID NO: 406576 - DNA, 33 bp, Homo sapien
gccttctcccttacaatggcctttgagtacctc

SEQ ID NO: 406577 - DNA, 33 bp, Homo sapien
ttaggaaactcatgaccggcgagatggggtctt

SEQ ID NO: 406578 - DNA, 33 bp, Homo sapien
ttaggaaactcatgactggcgagatggggtctt

SEQ ID NO: 406579 - DNA, 33 bp, Homo sapien
aatcaccaagtctacacagtgctgccgggaagt

SEQ ID NO: 406580 - DNA, 33 bp, Homo sapien
aatcaccaagtctacatagtgctgccgggaagt

SEQ ID NO: 406581 - DNA, 33 bp, Homo sapien
ttagcacttagaattgcagccttgtttaagaca

SEQ ID NO: 406582 - DNA, 33 bp, Homo sapien
ttagcacttagaattgtagccttgtttaagaca

SEQ ID NO: 406583 - DNA, 33 bp, Homo sapien
acctgcaggtgccaacaggctttggtagtacca

SEQ ID NO: 406584 - DNA, 33 bp, Homo sapien
acctgcaggtgccaacgggctttggtagtacca

SEQ ID NO: 406585 - DNA, 33 bp, Homo sapien
tttcagtggctttatccagaatcgcactggtga

SEQ ID NO: 406586 - DNA, 33 bp, Homo sapien
tttcagtggctttatctagaatcgcactggtga

SEQ ID NO: 406587 - DNA, 33 bp, Homo sapien
gttctgctccctttgccagggattctcacgtgt

SEQ ID NO: 406588 - DNA, 33 bp, Homo sapien
gttctgctccctttgctagggattctcacgtgt

SEQ ID NO: 406589 - DNA, 33 bp, Homo sapien; identical to SEQ ID NO: 406587

SEQ ID NO: 406590 - DNA, 33 bp, Homo sapien; identical to SEQ ID NO: 406588

SEQ ID NO: 406591 - DNA, 33 bp, Homo sapien
gcgacagcagttagacaggagttgtggggaagg

SEQ ID NO: 406592 - DNA, 33 bp, Homo sapien
gcgacagcagttagacgggagttgtggggaagg

SEQ ID NO: 406593 - DNA, 33 bp, Homo sapien
gaagggtctgacaacaccaagtttgccctggaa

SEQ ID NO: 406594 - DNA, 33 bp, Homo sapien
gaagggtctgacaacatcaagtttgccctggaa

SEQ ID NO: 406595 - DNA, 33 bp, Homo sapien
tcattcagctttatgccaccccattggccactt

SEQ ID NO: 406596 - DNA, 33 bp, Homo sapien
tcattcagctttatgctaccccattggccactt

SEQ ID NO: 406597 - DNA, 33 bp, Homo sapien
gcagcaccgaggcctacgttaggtactgtagca

SEQ ID NO: 406598 - DNA, 33 bp, Homo sapien
gcagcaccgaggcctatgttaggtactgtagca

SEQ ID NO: 406599 - DNA, 33 bp, Homo sapien
gccccccgatctgggaatcagtcagataggtgt

SEQ ID NO: 406600 - DNA, 33 bp, Homo sapien
gccccccgatctgggagtcagtcagataggtgt

SEQ ID NO: 406601 - DNA, 33 bp, Homo sapien
tactgactagactccacgtaagtcatgccactt

SEQ ID NO: 406602 - DNA, 33 bp, Homo sapien
tactgactagactccatgtaagtcatgccactt

SEQ ID NO: 406603 - DNA, 33 bp, Homo sapien
tcccctgccctctccacctgcagcttttttgga

SEQ ID NO: 406604 - DNA, 33 bp, Homo sapien
tcccctgccctctccatctgcagcttttttgga

SEQ ID NO: 406605 - DNA, 33 bp, Homo sapien
cctgctcatgtactaacagacaaggaaactgag

SEQ ID NO: 406606 - DNA, 33 bp, Homo sapien
cctgctcatgtactaatagacaaggaaactgag

SEQ ID NO: 406607 - DNA, 33 bp, Homo sapien
ctcttctagtgcttctaaattccgaagtctggg

SEQ ID NO: 406608 - DNA, 33 bp, Homo sapien
ctcttctagtgcttctgaattccgaagtctggg

SEQ ID NO: 406609 - DNA, 33 bp, Homo sapien
caaggctgccagggaccccgtgtagaacttggg

SEQ ID NO: 406610 - DNA, 33 bp, Homo sapien
caaggctgccagggactccgtgtagaacttggg

SEQ ID NO: 406611 - DNA, 33 bp, Homo sapien
accttaagctatgcaactatgtctgaattttgc

SEQ ID NO: 406612 - DNA, 33 bp, Homo sapien
accttaagctatgcaagtatgtctgaattttgc

SEQ ID NO: 406613 - DNA, 33 bp, Homo sapien
cagttttgccatctgtcaaataggagaatcata

SEQ ID NO: 406614 - DNA, 33 bp, Homo sapien
cagttttgccatctgtgaaataggagaatcata

SEQ ID NO: 406615 - DNA, 33 bp, Homo sapien
tctgactcaatgtggacagctggacaaaggctg

SEQ ID NO: 406616 - DNA, 33 bp, Homo sapien
tctgactcaatgtggatagctggacaaaggctg

SEQ ID NO: 406617 - DNA, 33 bp, Homo sapien
cctcaatggctgtctaactccaggcagatcagc

SEQ ID NO: 406618 - DNA, 33 bp, Homo sapien
cctcaatggctgtctagctccaggcagatcagc

SEQ ID NO: 406619 - DNA, 33 bp, Homo sapien
ctggccattggcgaacagcttaacctttagccc

SEQ ID NO: 406620 - DNA, 33 bp, Homo sapien
ctggccattggcgaaccgcttaacctttagccc

SEQ ID NO: 406621 - DNA, 33 bp, Homo sapien
tttgaccaacggaaaaagaatctttggaagtat

SEQ ID NO: 406622 - DNA, 33 bp, Homo sapien
tttgaccaacggaaaaggaatctttggaagtat

SEQ ID NO: 406623 - DNA, 33 bp, Homo sapien
atcattttatccttaaggctatacatgaaaaac

SEQ ID NO: 406624 - DNA, 33 bp, Homo sapien
atcattttatccttaatgctatacatgaaaaac

SEQ ID NO: 406625 - DNA, 33 bp, Homo sapien
ctgctcctgggtagagcaaggatttggaaggat

SEQ ID NO: 406626 - DNA, 33 bp, Homo sapien
ctgctcctgggtagagtaaggatttggaaggat

SEQ ID NO: 406627 - DNA, 33 bp, Homo sapien
gcatcagaggtcaggccgcacatcggatcagag

SEQ ID NO: 406628 - DNA, 33 bp, Homo sapien
gcatcagaggtcaggctgcacatcggatcagag

SEQ ID NO: 406629 - DNA, 33 bp, Homo sapien
gttgctgctataaggcactgaagcctacctccc

SEQ ID NO: 406630 - DNA, 33 bp, Homo sapien
gttgctgctataaggcgctgaagcctacctccc

SEQ ID NO: 406631 - DNA, 33 bp, Homo sapien
ataaaatccgggttccaatcaaaaaaggagaga

SEQ ID NO: 406632 - DNA, 33 bp, Homo sapien
ataaaatccgggttccgatcaaaaaaggagaga

SEQ ID NO: 406633 - DNA, 33 bp, Homo sapien
aagtggcttaagataaacctgccattttacatc

SEQ ID NO: 406634 - DNA, 33 bp, Homo sapien
aagtggcttaagataaccctgccattttacatc

SEQ ID NO: 406635 - DNA, 33 bp, Homo sapien
tccaggagaagccacaatgggccctgatccttg

SEQ ID NO: 406636 - DNA, 33 bp, Homo sapien
tccaggagaagccacagtgggccctgatccttg

SEQ ID NO: 406637 - DNA, 33 bp, Homo sapien
tatttatatggtttgccattcctgtagctgttg

SEQ ID NO: 406638 - DNA, 33 bp, Homo sapien
tatttatatggtttgctattcctgtagctgttg

SEQ ID NO: 406639 - DNA, 33 bp, Homo sapien
ttctgctggaattatacctaggcattgaattcc

SEQ ID NO: 406640 - DNA, 33 bp, Homo sapien
ttctgctggaattatatctaggcattgaattcc

SEQ ID NO: 406641 - DNA, 33 bp, Homo sapien
tatggccagtttccaaagtagttgttacagttt

SEQ ID NO: 406642 - DNA, 33 bp, Homo sapien
tatggccagtttccaacgtagttgttacagttt

SEQ ID NO: 406643 - DNA, 33 bp, Homo sapien
cccagagcttcatttgcacagtctagggaccta

SEQ ID NO: 406644 - DNA, 33 bp, Homo sapien
cccagagcttcatttgtacagtctagggaccta

SEQ ID NO: 406645 - DNA, 33 bp, Homo sapien
tctgctagctcttgtacaaatgtgataaccaag

SEQ ID NO: 406646 - DNA, 33 bp, Homo sapien
tctgctagctcttgtataaatgtgataaccaag

SEQ ID NO: 406647 - DNA, 33 bp, Homo sapien
aaggttagaggaagacagaaacactgctgcaag

SEQ ID NO: 406648 - DNA, 33 bp, Homo sapien
aaggttagaggaagacggaaacactgctgcaag

SEQ ID NO: 406649 - DNA, 33 bp, Homo sapien
atgagcaataactgggaacaagagtgatcattt

SEQ ID NO: 406650 - DNA, 33 bp, Homo sapien
atgagcaataactggggacaagagtgatcattt

SEQ ID NO: 406651 - DNA, 33 bp, Homo sapien
tgttgtatcactctacccctaggacctaacatg

SEQ ID NO: 406652 - DNA, 33 bp, Homo sapien
tgttgtatcactctactcctaggacctaacatg

SEQ ID NO: 406653 - DNA, 33 bp, Homo sapien
ctaactgatagaagtacagaaagatgaggacca

SEQ ID NO: 406654 - DNA, 33 bp, Homo sapien
ctaactgatagaagtatagaaagatgaggacca

SEQ ID NO: 406655 - DNA, 33 bp, Homo sapien
gaggtaggcaagcctgaagacttttcaaagaag

SEQ ID NO: 406656 - DNA, 33 bp, Homo sapien
gaggtaggcaagcctgcagacttttcaaagaag

SEQ ID NO: 406657 - DNA, 33 bp, Homo sapien
agatacatctctagcacatttaagacagcactg

SEQ ID NO: 406658 - DNA, 33 bp, Homo sapien
agatacatctctagcatatttaagacagcactg

SEQ ID NO: 406659 - DNA, 33 bp, Homo sapien
ctgttaggtttcttccaagacagagaagattca

SEQ ID NO: 406660 - DNA, 33 bp, Homo sapien
ctgttaggtttcttccgagacagagaagattca

SEQ ID NO: 406661 - DNA, 33 bp, Homo sapien
gctttcaaagtgctgcacaaagaataaaaagtt

SEQ ID NO: 406662 - DNA, 33 bp, Homo sapien
gctttcaaagtgctgcgcaaagaataaaaagtt

SEQ ID NO: 406663 - DNA, 33 bp, Homo sapien
ctgtttttgtagacatcaaaactatttcacaca

SEQ ID NO: 406664 - DNA, 33 bp, Homo sapien
ctgtttttgtagacatgaaaactatttcacaca

SEQ ID NO: 406665 - DNA, 33 bp, Homo sapien
tttttaaaatgtgacaatctcaaaataatattt

SEQ ID NO: 406666 - DNA, 33 bp, Homo sapien
tttttaaaatgtgacactctcaaaataatattt

SEQ ID NO: 406667 - DNA, 33 bp, Homo sapien
aatcctgttgtactgcaaaggctgaaagaggaa

SEQ ID NO: 406668 - DNA, 33 bp, Homo sapien
aatcctgttgtactgcgaaggctgaaagaggaa

SEQ ID NO: 406669 - DNA, 33 bp, Homo sapien
gttttaccttttgcaaagcattatttcttaaga

SEQ ID NO: 406670 - DNA, 33 bp, Homo sapien
gttttaccttttgcaacgcattatttcttaaga

SEQ ID NO: 406671 - DNA, 33 bp, Homo sapien
gtgcaaaacacttacacgagctgcagagggaat

SEQ ID NO: 406672 - DNA, 33 bp, Homo sapien
gtgcaaaacacttacaggagctgcagagggaat

SEQ ID NO: 406673 - DNA, 33 bp, Homo sapien
agctgcagagggaataagctcaatacctatctc

SEQ ID NO: 406674 - DNA, 33 bp, Homo sapien
agctgcagagggaatacgctcaatacctatctc

SEQ ID NO: 406675 - DNA, 33 bp, Homo sapien
tgcaatccagtctccacgtttcaattaccggct

SEQ ID NO: 406676 - DNA, 33 bp, Homo sapien
tgcaatccagtctccatgtttcaattaccggct

SEQ ID NO: 406677 - DNA, 33 bp, Homo sapien
tccttctacaaatggccatgaagtctaagttga

SEQ ID NO: 406678 - DNA, 33 bp, Homo sapien
tccttctacaaatggcgatgaagtctaagttga

SEQ ID NO: 406679 - DNA, 33 bp, Homo sapien
agaatagcatgtgcaaattatagaaggtgaggg

SEQ ID NO: 406680 - DNA, 33 bp, Homo sapien
agaatagcatgtgcaagttatagaaggtgaggg

SEQ ID NO: 406681 - DNA, 33 bp, Homo sapien; identical to SEQ ID NO: 406679

SEQ ID NO: 406682 - DNA, 33 bp, Homo sapien; identical to SEQ ID NO: 406680

SEQ ID NO: 406683 - DNA, 33 bp, Homo sapien
tggatttaccatgttgaagctgtaggatcttgg

SEQ ID NO: 406684 - DNA, 33 bp, Homo sapien
tggatttaccatgttgcagctgtaggatcttgg

SEQ ID NO: 406685 - DNA, 33 bp, Homo sapien
tggagctggtgagtcaaagtaagtataagtggg

SEQ ID NO: 406686 - DNA, 33 bp, Homo sapien
tggagctggtgagtcagagtaagtataagtggg

SEQ ID NO: 406687 - DNA, 33 bp, Homo sapien
aggggaacattgaagacacaaggctggcggaag

SEQ ID NO: 406688 - DNA, 33 bp, Homo sapien
aggggaacattgaagagacaaggctggcggaag

SEQ ID NO: 406689 - DNA, 33 bp, Homo sapien
tcccacagcagctttcaagaggtaccaagaagc

SEQ ID NO: 406690 - DNA, 33 bp, Homo sapien
tcccacagcagctttcgagaggtaccaagaagc

SEQ ID NO: 406691 - DNA, 33 bp, Homo sapien
cccggctcttcctggacgctgaggccaatagca

SEQ ID NO: 406692 - DNA, 33 bp, Homo sapien
cccggctcttcctggatgctgaggccaatagca

SEQ ID NO: 406693 - DNA, 33 bp, Homo sapien
agatctttccacaaggcaaattccgcttgaagg

SEQ ID NO: 406694 - DNA, 33 bp, Homo sapien
agatctttccacaaggtaaattccgcttgaagg

SEQ ID NO: 406695 - DNA, 33 bp, Homo sapien
aggttcaatgactcagcaattcttgattcaatg

SEQ ID NO: 406696 - DNA, 33 bp, Homo sapien
aggttcaatgactcagtaattcttgattcaatg

SEQ ID NO: 406697 - DNA, 33 bp, Homo sapien
ctgcgcacagcatttacggattaactcacggaa

SEQ ID NO: 406698 - DNA, 33 bp, Homo sapien
ctgcgcacagcatttatggattaactcacggaa

SEQ ID NO: 406699 - DNA, 33 bp, Homo sapien
tggcaattgggtattccattacctgcacctaaa

SEQ ID NO: 406700 - DNA, 33 bp, Homo sapien
tggcaattgggtattctattacctgcacctaaa

SEQ ID NO: 406701 - DNA, 33 bp, Homo sapien
cattatcttagcttcaaggattgtccttctcct

SEQ ID NO: 406702 - DNA, 33 bp, Homo sapien
cattatcttagcttcagggattgtccttctcct

SEQ ID NO: 406703 - DNA, 33 bp, Homo sapien
actgtttcaggccccaagctcaaagatgaatag

SEQ ID NO: 406704 - DNA, 33 bp, Homo sapien
actgtttcaggccccacgctcaaagatgaatag

SEQ ID NO: 406705 - DNA, 33 bp, Homo sapien
ggtctcaccaacttcaagaatggagccacggac

SEQ ID NO: 406706 - DNA, 33 bp, Homo sapien
ggtctcaccaacttcaggaatggagccacggac

SEQ ID NO: 406707 - DNA, 33 bp, Homo sapien
aagaagagacaagcagacgtgagagactagggg

SEQ ID NO: 406708 - DNA, 33 bp, Homo sapien
aagaagagacaagcaggcgtgagagactagggg

SEQ ID NO: 406709 - DNA, 33 bp, Homo sapien
tcagttcaagtttgtcaactaaccgatctctgg

SEQ ID NO: 406710 - DNA, 33 bp, Homo sapien
tcagttcaagtttgtcgactaaccgatctctgg

SEQ ID NO: 406711 - DNA, 33 bp, Homo sapien
cctgccaatagctagcaaagaaacgaggccttt

SEQ ID NO: 406712 - DNA, 33 bp, Homo sapien
cctgccaatagctagcgaagaaacgaggccttt

SEQ ID NO: 406713 - DNA, 33 bp, Homo sapien
taagccatcttggaagccgaaccaccatcccca

SEQ ID NO: 406714 - DNA, 33 bp, Homo sapien
taagccatcttggaaggcgaaccaccatcccca

SEQ ID NO: 406715 - DNA, 33 bp, Homo sapien
acactccaggctactgacaatgttcccagtgac

SEQ ID NO: 406716 - DNA, 33 bp, Homo sapien
acactccaggctactggcaatgttcccagtgac

SEQ ID NO: 406717 - DNA, 33 bp, Homo sapien
gcagtatgtctggcaccgaaacatcaagagagc

SEQ ID NO: 406718 - DNA, 33 bp, Homo sapien
gcagtatgtctggcactgaaacatcaagagagc

SEQ ID NO: 406719 - DNA, 33 bp, Homo sapien
agttaacatatgcaacacttccctttgaaagca

SEQ ID NO: 406720 - DNA, 33 bp, Homo sapien
agttaacatatgcaacgcttccctttgaaagca

SEQ ID NO: 406721 - DNA, 33 bp, Homo sapien
tggtttttaggattcaaatcggttacaggaccg

SEQ ID NO: 406722 - DNA, 33 bp, Homo sapien
tggtttttaggattcacatcggttacaggaccg

SEQ ID NO: 406723 - DNA, 33 bp, Homo sapien
tcagggatggggtttaacaagaaactgaggagc

SEQ ID NO: 406724 - DNA, 33 bp, Homo sapien
tcagggatggggtttagcaagaaactgaggagc

SEQ ID NO: 406725 - DNA, 33 bp, Homo sapien
caacccgcagagctggaagaacacagaaactag

SEQ ID NO: 406726 - DNA, 33 bp, Homo sapien
caacccgcagagctgggagaacacagaaactag

SEQ ID NO: 406727 - DNA, 33 bp, Homo sapien
ctccatgacggcatccagccagtggaacaccca

SEQ ID NO: 406728 - DNA, 33 bp, Homo sapien
ctccatgacggcatccggccagtggaacaccca

SEQ ID NO: 406729 - DNA, 33 bp, Homo sapien
ttgctttgacatccaccgaggagcatgttccag

SEQ ID NO: 406730 - DNA, 33 bp, Homo sapien
ttgctttgacatccactgaggagcatgttccag

SEQ ID NO: 406731 - DNA, 33 bp, Homo sapien
ttttaaaagttgtccaaaatggttctattgcat

SEQ ID NO: 406732 - DNA, 33 bp, Homo sapien
ttttaaaagttgtccagaatggttctattgcat

SEQ ID NO: 406733 - DNA, 33 bp, Homo sapien
ctagttggtcactccacgtgtgcactccaaaac

SEQ ID NO: 406734 - DNA, 33 bp, Homo sapien
ctagttggtcactccatgtgtgcactccaaaac

SEQ ID NO: 406735 - DNA, 33 bp, Homo sapien
taaaggtcagatagggacactccagagctggaa

SEQ ID NO: 406736 - DNA, 33 bp, Homo sapien
taaaggtcagatagggtcactccagagctggaa

SEQ ID NO: 406737 - DNA, 33 bp, Homo sapien
tccaagagggtgaagcaattgataggttcagaa

SEQ ID NO: 406738 - DNA, 33 bp, Homo sapien
tccaagagggtgaagcgattgataggttcagaa

SEQ ID NO: 406739 - DNA, 33 bp, Homo sapien
cagctgaggcctcaggaacaattcagagaagat

SEQ ID NO: 406740 - DNA, 33 bp, Homo sapien
cagctgaggcctcagggacaattcagagaagat

SEQ ID NO: 406741 - DNA, 33 bp, Homo sapien
gcaagctctttcctcccgagacccagtgaggga

SEQ ID NO: 406742 - DNA, 33 bp, Homo sapien
gcaagctctttcctcctgagacccagtgaggga

SEQ ID NO: 406743 - DNA, 33 bp, Homo sapien
taccctgatccctgaccaacctgatgtctgagg

SEQ ID NO: 406744 - DNA, 33 bp, Homo sapien
taccctgatccctgactaacctgatgtctgagg

SEQ ID NO: 406745 - DNA, 33 bp, Homo sapien
tttgtctggaagagtgaaaatcgactctttctt

SEQ ID NO: 406746 - DNA, 33 bp, Homo sapien
tttgtctggaagagtggaaatcgactctttctt

SEQ ID NO: 406747 - DNA, 33 bp, Homo sapien
aatccctcatttcaaaaccttcaggaaaaaact

SEQ ID NO: 406748 - DNA, 33 bp, Homo sapien
aatccctcatttcaaagccttcaggaaaaaact

SEQ ID NO: 406749 - DNA, 33 bp, Homo sapien
tccctacctgcccataagtggcttgccctggtt

SEQ ID NO: 406750 - DNA, 33 bp, Homo sapien
tccctacctgcccatatgtggcttgccctggtt

SEQ ID NO: 406751 - DNA, 33 bp, Homo sapien
tcttccaagtgaggacaatgcggcttgcctttg

SEQ ID NO: 406752 - DNA, 33 bp, Homo sapien
tcttccaagtgaggaccatgcggcttgcctttg

SEQ ID NO: 406753 - DNA, 33 bp, Homo sapien
agatttcatgtcctgccagttactaattgtgtg

SEQ ID NO: 406754 - DNA, 33 bp, Homo sapien
agatttcatgtcctgctagttactaattgtgtg

SEQ ID NO: 406755 - DNA, 33 bp, Homo sapien
gatgagaagctgttggaaagttgagaccagagg

SEQ ID NO: 406756 - DNA, 33 bp, Homo sapien
gatgagaagctgttgggaagttgagaccagagg

SEQ ID NO: 406757 - DNA, 33 bp, Homo sapien
tccccaagtatgcgaaacagaactcctgtacct

SEQ ID NO: 406758 - DNA, 33 bp, Homo sapien
tccccaagtatgcgaatcagaactcctgtacct

SEQ ID NO: 406759 - DNA, 33 bp, Homo sapien
ctgcaggcatagaaagcaactggactgcacctg

SEQ ID NO: 406760 - DNA, 33 bp, Homo sapien
ctgcaggcatagaaagtaactggactgcacctg

SEQ ID NO: 406761 - DNA, 33 bp, Homo sapien
aaggtgaatcaggcacaagcttttcaaccttcc

SEQ ID NO: 406762 - DNA, 33 bp, Homo sapien
aaggtgaatcaggcacgagcttttcaaccttcc

SEQ ID NO: 406763 - DNA, 33 bp, Homo sapien
ttctaagtctcctctccagtgggttcttgggca

SEQ ID NO: 406764 - DNA, 33 bp, Homo sapien
ttctaagtctcctctctagtgggttcttgggca

SEQ ID NO: 406765 - DNA, 33 bp, Homo sapien
gccctgaccaatcataatacctttctacctctg

SEQ ID NO: 406766 - DNA, 33 bp, Homo sapien
gccctgaccaatcatagtacctttctacctctg

SEQ ID NO: 406767 - DNA, 33 bp, Homo sapien
gtgatcacacccaggccaataattgttccaaaa

SEQ ID NO: 406768 - DNA, 33 bp, Homo sapien
gtgatcacacccaggctaataattgttccaaaa

SEQ ID NO: 406769 - DNA, 33 bp, Homo sapien
gagtggagagatttaaacaccagggtaggggac

SEQ ID NO: 406770 - DNA, 33 bp, Homo sapien
gagtggagagatttaagcaccagggtaggggac

SEQ ID NO: 406771 - DNA, 33 bp, Homo sapien
ggagaattggcttccacgttctacagcctctct

SEQ ID NO: 406772 - DNA, 33 bp, Homo sapien
ggagaattggcttccaggttctacagcctctct

SEQ ID NO: 406773 - DNA, 33 bp, Homo sapien
ggtgtaacacctttcaccaagaaattgctgtcc

SEQ ID NO: 406774 - DNA, 33 bp, Homo sapien
ggtgtaacacctttcatcaagaaattgctgtcc

SEQ ID NO: 406775 - DNA, 33 bp, Homo sapien
tcttcttgcaagggaaactgaagctttagtctg

SEQ ID NO: 406776 - DNA, 33 bp, Homo sapien
tcttcttgcaagggaacctgaagctttagtctg

SEQ ID NO: 406777 - DNA, 33 bp, Homo sapien
atggtggcagagagaacgaaacgtaacagagga

SEQ ID NO: 406778 - DNA, 33 bp, Homo sapien
atggtggcagagagaatgaaacgtaacagagga

SEQ ID NO: 406779 - DNA, 33 bp, Homo sapien
ccatctctcaatccagcctcttagcatgggtgc

SEQ ID NO: 406780 - DNA, 33 bp, Homo sapien
ccatctctcaatccagtctcttagcatgggtgc

SEQ ID NO: 406781 - DNA, 33 bp, Homo sapien
ttcctcccaggccgcactaagtaataacaactg

SEQ ID NO: 406782 - DNA, 33 bp, Homo sapien
ttcctcccaggccgcagtaagtaataacaactg

SEQ ID NO: 406783 - DNA, 33 bp, Homo sapien
gggaccaggatactcaataaggatgtgttgagg

SEQ ID NO: 406784 - DNA, 33 bp, Homo sapien
gggaccaggatactcagtaaggatgtgttgagg

SEQ ID NO: 406785 - DNA, 33 bp, Homo sapien
gcgtggatctgcactcaatcaacaattcagccc

SEQ ID NO: 406786 - DNA, 33 bp, Homo sapien
gcgtggatctgcactcgatcaacaattcagccc

SEQ ID NO: 406787 - DNA, 33 bp, Homo sapien
tgaagaaatgataccaacagccattcctgcatt

SEQ ID NO: 406788 - DNA, 33 bp, Homo sapien
tgaagaaatgataccatcagccattcctgcatt

SEQ ID NO: 406789 - DNA, 33 bp, Homo sapien
ggaggttacggtgagcaaagaccacgccactgc

SEQ ID NO: 406790 - DNA, 33 bp, Homo sapien
ggaggttacggtgagccaagaccacgccactgc

SEQ ID NO: 406791 - DNA, 33 bp, Homo sapien
agaagatcagcgtggaaaggacctgcacacatc

SEQ ID NO: 406792 - DNA, 33 bp, Homo sapien
agaagatcagcgtggacaggacctgcacacatc

SEQ ID NO: 406793 - DNA, 33 bp, Homo sapien
gaaacttcaacagttcacagagaccctgaatgt

SEQ ID NO: 406794 - DNA, 33 bp, Homo sapien
gaaacttcaacagttcgcagagaccctgaatgt

SEQ ID NO: 406795 - DNA, 33 bp, Homo sapien
gccctgcagggaagaaccagctaaatgaagttg

SEQ ID NO: 406796 - DNA, 33 bp, Homo sapien
gccctgcagggaagaatcagctaaatgaagttg

SEQ ID NO: 406797 - DNA, 33 bp, Homo sapien
cccatccaatcattgacctagcccctcacgtct

SEQ ID NO: 406798 - DNA, 33 bp, Homo sapien
cccatccaatcattgatctagcccctcacgtct

SEQ ID NO: 406799 - DNA, 33 bp, Homo sapien
cgagggaccaagagaaatgtccttaggctacag

SEQ ID NO: 406800 - DNA, 33 bp, Homo sapien
cgagggaccaagagaagtgtccttaggctacag

SEQ ID NO: 406801 - DNA, 33 bp, Homo sapien
gttcccactcacaccaactagggacaggatgac

SEQ ID NO: 406802 - DNA, 33 bp, Homo sapien
gttcccactcacaccagctagggacaggatgac

SEQ ID NO: 406803 - DNA, 33 bp, Homo sapien
actccttcacttggaacccactcttgtgtggcc

SEQ ID NO: 406804 - DNA, 33 bp, Homo sapien
actccttcacttggaatccactcttgtgtggcc

SEQ ID NO: 406805 - DNA, 33 bp, Homo sapien
tggtcatggccctgtcaccttttgcagccagcc

SEQ ID NO: 406806 - DNA, 33 bp, Homo sapien
tggtcatggccctgtcgccttttgcagccagcc

SEQ ID NO: 406807 - DNA, 33 bp, Homo sapien
gtctgcctggctttaaactccctcttttccctg

SEQ ID NO: 406808 - DNA, 33 bp, Homo sapien
gtctgcctggctttaagctccctcttttccctg

SEQ ID NO: 406809 - DNA, 33 bp, Homo sapien
cacgcagtcaaactccaaagcagtgtgtgagtg

SEQ ID NO: 406810 - DNA, 33 bp, Homo sapien
cacgcagtcaaactcccaagcagtgtgtgagtg

SEQ ID NO: 406811 - DNA, 33 bp, Homo sapien
cctgatggtttaagacaataacagatatgaaaa

SEQ ID NO: 406812 - DNA, 33 bp, Homo sapien
cctgatggtttaagacgataacagatatgaaaa

SEQ ID NO: 406813 - DNA, 33 bp, Homo sapien
ttatctgagagtctcaagtctctgggaacctct

SEQ ID NO: 406814 - DNA, 33 bp, Homo sapien
ttatctgagagtctcaggtctctgggaacctct

SEQ ID NO: 406815 - DNA, 33 bp, Homo sapien
cctggcctgcagggtactaaatgttcagggtga

SEQ ID NO: 406816 - DNA, 33 bp, Homo sapien
cctggcctgcagggtagtaaatgttcagggtga

SEQ ID NO: 406817 - DNA, 33 bp, Homo sapien
aaaatgagacctgtcccgaggagagagcagctg

SEQ ID NO: 406818 - DNA, 33 bp, Homo sapien
aaaatgagacctgtcctgaggagagagcagctg

SEQ ID NO: 406819 - DNA, 33 bp, Homo sapien
tgtagagtccttaggaagtcatctcgtccatgc

SEQ ID NO: 406820 - DNA, 33 bp, Homo sapien
tgtagagtccttaggaggtcatctcgtccatgc

SEQ ID NO: 406821 - DNA, 33 bp, Homo sapien
cttaggaagtttgaacaagttggcctatgtcag

SEQ ID NO: 406822 - DNA, 33 bp, Homo sapien
cttaggaagtttgaacgagttggcctatgtcag

SEQ ID NO: 406823 - DNA, 33 bp, Homo sapien
tgcttctcactgggaagtcgtcctagtcaccta

SEQ ID NO: 406824 - DNA, 33 bp, Homo sapien
tgcttctcactgggaattcgtcctagtcaccta

SEQ ID NO: 406825 - DNA, 33 bp, Homo sapien
gtttttccagttcacacgtagaaggcagctgtc

SEQ ID NO: 406826 - DNA, 33 bp, Homo sapien
gtttttccagttcacatgtagaaggcagctgtc

SEQ ID NO: 406827 - DNA, 33 bp, Homo sapien
cgcccactttatggtaaggagacttttgcatcc

SEQ ID NO: 406828 - DNA, 33 bp, Homo sapien
cgcccactttatggtagggagacttttgcatcc

SEQ ID NO: 406829 - DNA, 33 bp, Homo sapien
aaaggttcagcatcaacccgcttgccagctaga

SEQ ID NO: 406830 - DNA, 33 bp, Homo sapien
aaaggttcagcatcaatccgcttgccagctaga

SEQ ID NO: 406831 - DNA, 33 bp, Homo sapien
tggcgggagagggtcacggatgcattctcttta

SEQ ID NO: 406832 - DNA, 33 bp, Homo sapien
tggcgggagagggtcatggatgcattctcttta

SEQ ID NO: 406833 - DNA, 33 bp, Homo sapien
tatgagaggggatagaagaatagtcccttatgc

SEQ ID NO: 406834 - DNA, 33 bp, Homo sapien
tatgagaggggatagaggaatagtcccttatgc

SEQ ID NO: 406835 - DNA, 33 bp, Homo sapien
atgtctttcacagcccggatcattctcttatct

SEQ ID NO: 406836 - DNA, 33 bp, Homo sapien
atgtctttcacagccctgatcattctcttatct

SEQ ID NO: 406837 - DNA, 33 bp, Homo sapien
aaaaggcattttctaccgaaacagatgacagcc

SEQ ID NO: 406838 - DNA, 33 bp, Homo sapien
aaaaggcattttctactgaaacagatgacagcc

SEQ ID NO: 406839 - DNA, 33 bp, Homo sapien
ccgccacatcattacaactctaagctcttcagg

SEQ ID NO: 406840 - DNA, 33 bp, Homo sapien
ccgccacatcattacagctctaagctcttcagg

SEQ ID NO: 406841 - DNA, 33 bp, Homo sapien
ataagggtgctggtgagcagtgcacagaggtag

SEQ ID NO: 406842 - DNA, 33 bp, Homo sapien
ataagggtgctggtgatcagtgcacagaggtag

SEQ ID NO: 406843 - DNA, 33 bp, Homo sapien
cagcacctgctacatagcggaagtgttgtgagg

SEQ ID NO: 406844 - DNA, 33 bp, Homo sapien
cagcacctgctacatatcggaagtgttgtgagg

SEQ ID NO: 406845 - DNA, 33 bp, Homo sapien
gggcttcagcaaaatacaaactcgaacaacttc

SEQ ID NO: 406846 - DNA, 33 bp, Homo sapien
gggcttcagcaaaatataaactcgaacaacttc

SEQ ID NO: 406847 - DNA, 33 bp, Homo sapien
tgtgctgagtaaccaacgctaaggtcgagtggt

SEQ ID NO: 406848 - DNA, 33 bp, Homo sapien
tgtgctgagtaaccaatgctaaggtcgagtggt

SEQ ID NO: 406849 - DNA, 33 bp, Homo sapien
aaggcccagtaacagaacttgtgtctaagatag

SEQ ID NO: 406850 - DNA, 33 bp, Homo sapien
aaggcccagtaacagagcttgtgtctaagatag

SEQ ID NO: 406851 - DNA, 33 bp, Homo sapien
acacagtctttgtacacgtccggcggctctggt

SEQ ID NO: 406852 - DNA, 33 bp, Homo sapien
acacagtctttgtacatgtccggcggctctggt

SEQ ID NO: 406853 - DNA, 33 bp, Homo sapien
aaggtgcacggctcagcagaggagaccccttga

SEQ ID NO: 406854 - DNA, 33 bp, Homo sapien
aaggtgcacggctcaggagaggagaccccttga

SEQ ID NO: 406855 - DNA, 33 bp, Homo sapien
aaattatagtggcaaacgtatgcatctttgcac

SEQ ID NO: 406856 - DNA, 33 bp, Homo sapien
aaattatagtggcaaatgtatgcatctttgcac

SEQ ID NO: 406857 - DNA, 33 bp, Homo sapien
tctttcattttaaatcaaacacttacatagcac

SEQ ID NO: 406858 - DNA, 33 bp, Homo sapien
tctttcattttaaatcgaacacttacatagcac

SEQ ID NO: 406859 - DNA, 33 bp, Homo sapien
cccacttcaattgtaaatgtagagccacgtgcg

SEQ ID NO: 406860 - DNA, 33 bp, Homo sapien
cccacttcaattgtaagtgtagagccacgtgcg

SEQ ID NO: 406861 - DNA, 33 bp, Homo sapien
catgagggcagtgtcccacctcagcggtttgca

SEQ ID NO: 406862 - DNA, 33 bp, Homo sapien
catgagggcagtgtcctacctcagcggtttgca

SEQ ID NO: 406863 - DNA, 33 bp, Homo sapien
gatacaggagggaaaaatctggtgtagattaag

SEQ ID NO: 406864 - DNA, 33 bp, Homo sapien
gatacaggagggaaaattctggtgtagattaag

SEQ ID NO: 406865 - DNA, 33 bp, Homo sapien
tttattcacgtagcaaaccatttcttgagtgcc

SEQ ID NO: 406866 - DNA, 33 bp, Homo sapien
tttattcacgtagcaagccatttcttgagtgcc

SEQ ID NO: 406867 - DNA, 33 bp, Homo sapien
tcccactgtctcaggaacggtgcttagcttttt

SEQ ID NO: 406868 - DNA, 33 bp, Homo sapien
tcccactgtctcaggagcggtgcttagcttttt

SEQ ID NO: 406869 - DNA, 33 bp, Homo sapien
tcctcagcactttggcaactccatctcctccca

SEQ ID NO: 406870 - DNA, 33 bp, Homo sapien
tcctcagcactttggcgactccatctcctccca

SEQ ID NO: 406871 - DNA, 33 bp, Homo sapien
gacaagacattctggaagagcccggatcagaga

SEQ ID NO: 406872 - DNA, 33 bp, Homo sapien
gacaagacattctggaggagcccggatcagaga

SEQ ID NO: 406873 - DNA, 33 bp, Homo sapien
gtgtgttggaattggcaagcctatcacttggga

SEQ ID NO: 406874 - DNA, 33 bp, Homo sapien
gtgtgttggaattggcgagcctatcacttggga

SEQ ID NO: 406875 - DNA, 33 bp, Homo sapien
agctgagccgagaacaggtgtccttcaggaaga

SEQ ID NO: 406876 - DNA, 33 bp, Homo sapien
agctgagccgagaacatgtgtccttcaggaaga

SEQ ID NO: 406877 - DNA, 33 bp, Homo sapien
ggaggctttggcttcacgtcttcctgaaggaca

SEQ ID NO: 406878 - DNA, 33 bp, Homo sapien
ggaggctttggcttcatgtcttcctgaaggaca

SEQ ID NO: 406879 - DNA, 33 bp, Homo sapien
aagggctggcccaacagaactaaagctcttgtt

SEQ ID NO: 406880 - DNA, 33 bp, Homo sapien
aagggctggcccaacataactaaagctcttgtt

SEQ ID NO: 406881 - DNA, 33 bp, Homo sapien
tgcagtcagctccctacgaacagttgctctcta

SEQ ID NO: 406882 - DNA, 33 bp, Homo sapien
tgcagtcagctccctatgaacagttgctctcta

SEQ ID NO: 406883 - DNA, 33 bp, Homo sapien
ctctctctagaacccacgaatttggaatatagg

SEQ ID NO: 406884 - DNA, 33 bp, Homo sapien
ctctctctagaacccatgaatttggaatatagg

SEQ ID NO: 406885 - DNA, 33 bp, Homo sapien
gctccatattcctgccaaagcgttatttacatc

SEQ ID NO: 406886 - DNA, 33 bp, Homo sapien
gctccatattcctgcccaagcgttatttacatc

SEQ ID NO: 406887 - DNA, 33 bp, Homo sapien
agagagaggaagaggcaaagtcaatttggccaa

SEQ ID NO: 406888 - DNA, 33 bp, Homo sapien
agagagaggaagaggcgaagtcaatttggccaa

SEQ ID NO: 406889 - DNA, 33 bp, Homo sapien
ggtcatatgaggaaaaatcaagcatcacgttgt

SEQ ID NO: 406890 - DNA, 33 bp, Homo sapien
ggtcatatgaggaaaagtcaagcatcacgttgt

SEQ ID NO: 406891 - DNA, 33 bp, Homo sapien
cctgtgctgtcttaagaatcaaatagttgtaag

SEQ ID NO: 406892 - DNA, 33 bp, Homo sapien
cctgtgctgtcttaaggatcaaatagttgtaag

SEQ ID NO: 406893 - DNA, 33 bp, Homo sapien
cacaggaggataaacacgcaaagctccctcact

SEQ ID NO: 406894 - DNA, 33 bp, Homo sapien
cacaggaggataaacatgcaaagctccctcact

SEQ ID NO: 406895 - DNA, 33 bp, Homo sapien
ctcgatgccttggtgcccagttacctccctggc

SEQ ID NO: 406896 - DNA, 33 bp, Homo sapien
ctcgatgccttggtgctcagttacctccctggc

SEQ ID NO: 406897 - DNA, 33 bp, Homo sapien
ccccatctagtcccaacgcaacaacctatgcaa

SEQ ID NO: 406898 - DNA, 33 bp, Homo sapien
ccccatctagtcccaatgcaacaacctatgcaa

SEQ ID NO: 406899 - DNA, 33 bp, Homo sapien
ccaaaatgtgtgatcaacaagaatggagtcttt

SEQ ID NO: 406900 - DNA, 33 bp, Homo sapien
ccaaaatgtgtgatcatcaagaatggagtcttt

SEQ ID NO: 406901 - DNA, 33 bp, Homo sapien
tagtatagttggaaaacctctgggcatactcat

SEQ ID NO: 406902 - DNA, 33 bp, Homo sapien
tagtatagttggaaaatctctgggcatactcat

SEQ ID NO: 406903 - DNA, 33 bp, Homo sapien
cttcctggccatcttacgctgaccaacccatct

SEQ ID NO: 406904 - DNA, 33 bp, Homo sapien
cttcctggccatcttatgctgaccaacccatct

SEQ ID NO: 406905 - DNA, 33 bp, Homo sapien
ggagggaaggaagagaacatctcagaatctccc

SEQ ID NO: 406906 - DNA, 33 bp, Homo sapien
ggagggaaggaagagagcatctcagaatctccc

SEQ ID NO: 406907 - DNA, 33 bp, Homo sapien
tcgtttgcctctcctcaatcagggccagggatg

SEQ ID NO: 406908 - DNA, 33 bp, Homo sapien
tcgtttgcctctcctcgatcagggccagggatg

SEQ ID NO: 406909 - DNA, 33 bp, Homo sapien
aactaaaagagtgtaactggactggctaacatg

SEQ ID NO: 406910 - DNA, 33 bp, Homo sapien
aactaaaagagtgtaattggactggctaacatg

SEQ ID NO: 406911 - DNA, 33 bp, Homo sapien
tacacctgagacgaataaaaaccagagtgctga

SEQ ID NO: 406912 - DNA, 33 bp, Homo sapien
tacacctgagacgaatgaaaaccagagtgctga

SEQ ID NO: 406913 - DNA, 33 bp, Homo sapien
cttggacactttgtggaatttagtctccctgtg

SEQ ID NO: 406914 - DNA, 33 bp, Homo sapien
cttggacactttgtgggatttagtctccctgtg

SEQ ID NO: 406915 - DNA, 33 bp, Homo sapien
tgccaacagtttcggccgcatttcttcacgcac

SEQ ID NO: 406916 - DNA, 33 bp, Homo sapien
tgccaacagtttcggctgcatttcttcacgcac

SEQ ID NO: 406917 - DNA, 33 bp, Homo sapien
actggctaagtgtcgcagagtgtcccgagccac

SEQ ID NO: 406918 - DNA, 33 bp, Homo sapien
actggctaagtgtcgcggagtgtcccgagccac

SEQ ID NO: 406919 - DNA, 33 bp, Homo sapien
agttgaggcaaacaaacaccaacagattttcct

SEQ ID NO: 406920 - DNA, 33 bp, Homo sapien
agttgaggcaaacaaagaccaacagattttcct

SEQ ID NO: 406921 - DNA, 33 bp, Homo sapien
ggaactagtggagatacatggaactagtggaga

SEQ ID NO: 406922 - DNA, 33 bp, Homo sapien
ggaactagtggagatatatggaactagtggaga

SEQ ID NO: 406923 - DNA, 33 bp, Homo sapien
gaagacttgtgggtgtcaagtgcaagctccttg

SEQ ID NO: 406924 - DNA, 33 bp, Homo sapien
gaagacttgtgggtgtgaagtgcaagctccttg

SEQ ID NO: 406925 - DNA, 33 bp, Homo sapien
tggtatttctccgtgaggttttttgctgttgga

SEQ ID NO: 406926 - DNA, 33 bp, Homo sapien
tggtatttctccgtgatgttttttgctgttgga

SEQ ID NO: 406927 - DNA, 33 bp, Homo sapien
aggtgtatatagagtaagaaccccaacagttaa

SEQ ID NO: 406928 - DNA, 33 bp, Homo sapien
aggtgtatatagagtaggaaccccaacagttaa

SEQ ID NO: 406929 - DNA, 33 bp, Homo sapien
ataaacattacagttgcagacttttacatttac

SEQ ID NO: 406930 - DNA, 33 bp, Homo sapien
ataaacattacagttgtagacttttacatttac

SEQ ID NO: 406931 - DNA, 33 bp, Homo sapien
gccaacaggattagggacacggaactgttgagt

SEQ ID NO: 406932 - DNA, 33 bp, Homo sapien
gccaacaggattagggccacggaactgttgagt

SEQ ID NO: 406933 - DNA, 33 bp, Homo sapien
gggggtgtccggccaaccccacacaggtactta

SEQ ID NO: 406934 - DNA, 33 bp, Homo sapien
gggggtgtccggccaatcccacacaggtactta

SEQ ID NO: 406935 - DNA, 33 bp, Homo sapien
ttgctgtagcagttaaaaagtgacctccattta

SEQ ID NO: 406936 - DNA, 33 bp, Homo sapien
ttgctgtagcagttaagaagtgacctccattta

SEQ ID NO: 406937 - DNA, 33 bp, Homo sapien
ggcagttgaccgataaaaaattcagctcacagt

SEQ ID NO: 406938 - DNA, 33 bp, Homo sapien
ggcagttgaccgataacaaattcagctcacagt

SEQ ID NO: 406939 - DNA, 33 bp, Homo sapien
aatcttgagtttgaaaattggttgttactcatt

SEQ ID NO: 406940 - DNA, 33 bp, Homo sapien
aatcttgagtttgaaagttggttgttactcatt

SEQ ID NO: 406941 - DNA, 33 bp, Homo sapien
tttctcaaattactcccaagaaatagacagtac

SEQ ID NO: 406942 - DNA, 33 bp, Homo sapien
tttctcaaattactccgaagaaatagacagtac

SEQ ID NO: 406943 - DNA, 33 bp, Homo sapien
agcattcggccctgtaaaacaatctgaaagctg

SEQ ID NO: 406944 - DNA, 33 bp, Homo sapien
agcattcggccctgtagaacaatctgaaagctg

SEQ ID NO: 406945 - DNA, 33 bp, Homo sapien
taaaatagactggatacgggacctgaaagtaag

SEQ ID NO: 406946 - DNA, 33 bp, Homo sapien
taaaatagactggatatgggacctgaaagtaag

SEQ ID NO: 406947 - DNA, 33 bp, Homo sapien
agcctctttaaaggaaaatggcacaatccacat

SEQ ID NO: 406948 - DNA, 33 bp, Homo sapien
agcctctttaaaggaagatggcacaatccacat

SEQ ID NO: 406949 - DNA, 33 bp, Homo sapien
gttctcagctggaactaagagagagaaacagac

SEQ ID NO: 406950 - DNA, 33 bp, Homo sapien
gttctcagctggaactgagagagagaaacagac

SEQ ID NO: 406951 - DNA, 33 bp, Homo sapien
acaaagtgttcagtaaattaaactcgttgggaa

SEQ ID NO: 406952 - DNA, 33 bp, Homo sapien
acaaagtgttcagtaagttaaactcgttgggaa

SEQ ID NO: 406953 - DNA, 33 bp, Homo sapien
aacctctatttgctaacgttcagacacaaagaa

SEQ ID NO: 406954 - DNA, 33 bp, Homo sapien
aacctctatttgctaatgttcagacacaaagaa

SEQ ID NO: 406955 - DNA, 33 bp, Homo sapien
gagttctcctctacataaaacacacgagtaaat

SEQ ID NO: 406956 - DNA, 33 bp, Homo sapien
gagttctcctctacatcaaacacacgagtaaat

SEQ ID NO: 406957 - DNA, 33 bp, Homo sapien
tgggtaataaacaagcacagtccaggagtttga

SEQ ID NO: 406958 - DNA, 33 bp, Homo sapien
tgggtaataaacaagcgcagtccaggagtttga

SEQ ID NO: 406959 - DNA, 33 bp, Homo sapien
agtggtgtacaagataactgtcttttgcaaata

SEQ ID NO: 406960 - DNA, 33 bp, Homo sapien
agtggtgtacaagatagctgtcttttgcaaata

SEQ ID NO: 406961 - DNA, 33 bp, Homo sapien
ctgaattaaaggttaaaacatgagctgttcatc

SEQ ID NO: 406962 - DNA, 33 bp, Homo sapien
ctgaattaaaggttaacacatgagctgttcatc

SEQ ID NO: 406963 - DNA, 33 bp, Homo sapien
aacttcaacagctttacgaaaattttgaagaga

SEQ ID NO: 406964 - DNA, 33 bp, Homo sapien
aacttcaacagctttatgaaaattttgaagaga

SEQ ID NO: 406965 - DNA, 33 bp, Homo sapien
acagcatgcagaagtaatacagaggagttccta

SEQ ID NO: 406966 - DNA, 33 bp, Homo sapien
acagcatgcagaagtagtacagaggagttccta

SEQ ID NO: 406967 - DNA, 33 bp, Homo sapien
tatggactaggataaaacacacggtaaaatcaa

SEQ ID NO: 406968 - DNA, 33 bp, Homo sapien
tatggactaggataaagcacacggtaaaatcaa

SEQ ID NO: 406969 - DNA, 33 bp, Homo sapien
atttacttaatacatcacaagctcgtaacacgc

SEQ ID NO: 406970 - DNA, 33 bp, Homo sapien
atttacttaatacatcgcaagctcgtaacacgc

SEQ ID NO: 406971 - DNA, 33 bp, Homo sapien
taggtttttttgaagacgagtattgccagaaag

SEQ ID NO: 406972 - DNA, 33 bp, Homo sapien
taggtttttttgaagatgagtattgccagaaag

SEQ ID NO: 406973 - DNA, 33 bp, Homo sapien
tttaaaaccgcttaagaaatgcatcagacgtaa

SEQ ID NO: 406974 - DNA, 33 bp, Homo sapien
tttaaaaccgcttaagcaatgcatcagacgtaa

SEQ ID NO: 406975 - DNA, 33 bp, Homo sapien
gttacatctgtacatacagggtagacttcatgc

SEQ ID NO: 406976 - DNA, 33 bp, Homo sapien
gttacatctgtacatatagggtagacttcatgc

SEQ ID NO: 406977 - DNA, 33 bp, Homo sapien
ttttcttgaaacatctaaaatgaattgagcctt

SEQ ID NO: 406978 - DNA, 33 bp, Homo sapien
ttttcttgaaacatctgaaatgaattgagcctt

SEQ ID NO: 406979 - DNA, 33 bp, Homo sapien
ctttaggaaagccaacagataaatctttgcaat

SEQ ID NO: 406980 - DNA, 33 bp, Homo sapien
ctttaggaaagccaaccgataaatctttgcaat

SEQ ID NO: 406981 - DNA, 33 bp, Homo sapien
aaactgttgaggtataccaacatagacaaaatc

SEQ ID NO: 406982 - DNA, 33 bp, Homo sapien
aaactgttgaggtatatcaacatagacaaaatc

SEQ ID NO: 406983 - DNA, 33 bp, Homo sapien
tctttcatggaaatgcacagcttatataaatat

SEQ ID NO: 406984 - DNA, 33 bp, Homo sapien
tctttcatggaaatgcgcagcttatataaatat

SEQ ID NO: 406985 - DNA, 33 bp, Homo sapien
gaaattcaacaggtaacttacaactggctctct

SEQ ID NO: 406986 - DNA, 33 bp, Homo sapien
gaaattcaacaggtaatttacaactggctctct

SEQ ID NO: 406987 - DNA, 33 bp, Homo sapien
agaagatagaaaataacatcccagtttgtccct

SEQ ID NO: 406988 - DNA, 33 bp, Homo sapien
agaagatagaaaataagatcccagtttgtccct

SEQ ID NO: 406989 - DNA, 33 bp, Homo sapien
ctataaagcacaagaggaaagcaaaaccttagt

SEQ ID NO: 406990 - DNA, 33 bp, Homo sapien
ctataaagcacaagagtaaagcaaaaccttagt

SEQ ID NO: 406991 - DNA, 33 bp, Homo sapien
caaaaccttagtaaaccgacaaatgttcccatt

SEQ ID NO: 406992 - DNA, 33 bp, Homo sapien
caaaaccttagtaaactgacaaatgttcccatt

SEQ ID NO: 406993 - DNA, 33 bp, Homo sapien
ctggatgttagatggaaatcatgttagccttaa

SEQ ID NO: 406994 - DNA, 33 bp, Homo sapien
ctggatgttagatggacatcatgttagccttaa

SEQ ID NO: 406995 - DNA, 33 bp, Homo sapien
gagacattttaagataacaatataggccaggtg

SEQ ID NO: 406996 - DNA, 33 bp, Homo sapien
gagacattttaagatagcaatataggccaggtg

SEQ ID NO: 406997 - DNA, 33 bp, Homo sapien
aaaatgaaacctaatccaagccttgtggtgaaa

SEQ ID NO: 406998 - DNA, 33 bp, Homo sapien
aaaatgaaacctaatctaagccttgtggtgaaa

SEQ ID NO: 406999 - DNA, 33 bp, Homo sapien
cctgggaagaaggatacgatgtaaatttaataa

SEQ ID NO: 407000 - DNA, 33 bp, Homo sapien
cctgggaagaaggatatgatgtaaatttaataa

SEQ ID NO: 407001 - DNA, 33 bp, Homo sapien
taccccctcgatacaactgtcataaaagttttc

SEQ ID NO: 407002 - DNA, 33 bp, Homo sapien
taccccctcgatacaattgtcataaaagttttc

SEQ ID NO: 407003 - DNA, 33 bp, Homo sapien
tcacaatattaggagaagtcatgaagtaacata

SEQ ID NO: 407004 - DNA, 33 bp, Homo sapien
tcacaatattaggagaggtcatgaagtaacata

SEQ ID NO: 407005 - DNA, 33 bp, Homo sapien
attctcactcaactacacccagtggcttatgaa

SEQ ID NO: 407006 - DNA, 33 bp, Homo sapien
attctcactcaactacccccagtggcttatgaa

SEQ ID NO: 407007 - DNA, 33 bp, Homo sapien
gctttctttctcaacccaaaatagtagaaattc

SEQ ID NO: 407008 - DNA, 33 bp, Homo sapien
gctttctttctcaacctaaaatagtagaaattc

SEQ ID NO: 407009 - DNA, 33 bp, Homo sapien
tttttgataaatgataagttacccttgtttatg

SEQ ID NO: 407010 - DNA, 33 bp, Homo sapien
tttttgataaatgataggttacccttgtttatg

SEQ ID NO: 407011 - DNA, 33 bp, Homo sapien
ttctctttatttaaagcccttacatatcgaggc

SEQ ID NO: 407012 - DNA, 33 bp, Homo sapien
ttctctttatttaaagtccttacatatcgaggc

SEQ ID NO: 407013 - DNA, 33 bp, Homo sapien
aaaacactctcctcataagctgctgcttcagtg

SEQ ID NO: 407014 - DNA, 33 bp, Homo sapien
aaaacactctcctcatgagctgctgcttcagtg

SEQ ID NO: 407015 - DNA, 33 bp, Homo sapien
tctgatagtgtttatacggagaactcctgcact

SEQ ID NO: 407016 - DNA, 33 bp, Homo sapien
tctgatagtgtttatatggagaactcctgcact

SEQ ID NO: 407017 - DNA, 33 bp, Homo sapien
tcattgaggatagtcaaaagtgtccttgtggca

SEQ ID NO: 407018 - DNA, 33 bp, Homo sapien
tcattgaggatagtcagaagtgtccttgtggca

SEQ ID NO: 407019 - DNA, 33 bp, Homo sapien
actaaaaggggagtaagagagtagaaagaattc

SEQ ID NO: 407020 - DNA, 33 bp, Homo sapien
actaaaaggggagtaatagagtagaaagaattc

SEQ ID NO: 407021 - DNA, 33 bp, Homo sapien
ataaaataccttcataactcaaaagagctcctt

SEQ ID NO: 407022 - DNA, 33 bp, Homo sapien
ataaaataccttcatatctcaaaagagctcctt

SEQ ID NO: 407023 - DNA, 33 bp, Homo sapien
tgcaaaataatcttaagagctcatgagagtcca

SEQ ID NO: 407024 - DNA, 33 bp, Homo sapien
tgcaaaataatcttaatagctcatgagagtcca

SEQ ID NO: 407025 - DNA, 33 bp, Homo sapien
gtgggattctgaagaaaggaacttaggcatcag

SEQ ID NO: 407026 - DNA, 33 bp, Homo sapien
gtgggattctgaagaagggaacttaggcatcag

SEQ ID NO: 407027 - DNA, 33 bp, Homo sapien
tatcctgaaaacaataagcttatagtgtctagg

SEQ ID NO: 407028 - DNA, 33 bp, Homo sapien
tatcctgaaaacaatacgcttatagtgtctagg

SEQ ID NO: 407029 - DNA, 33 bp, Homo sapien
aaagaaagatgggttaaggaagaagcaagcctc

SEQ ID NO: 407030 - DNA, 33 bp, Homo sapien
aaagaaagatgggttacggaagaagcaagcctc

SEQ ID NO: 407031 - DNA, 33 bp, Homo sapien
caggataattgactagcagatctttcattttct

SEQ ID NO: 407032 - DNA, 33 bp, Homo sapien
caggataattgactagtagatctttcattttct

SEQ ID NO: 407033 - DNA, 33 bp, Homo sapien
attattgctatacaaaattgtgtgttctacatc

SEQ ID NO: 407034 - DNA, 33 bp, Homo sapien
attattgctatacaaagttgtgtgttctacatc

SEQ ID NO: 407035 - DNA, 33 bp, Homo sapien
ttgtcatttgttaccacagattgaaaggtgcca

SEQ ID NO: 407036 - DNA, 33 bp, Homo sapien
ttgtcatttgttaccatagattgaaaggtgcca

SEQ ID NO: 407037 - DNA, 33 bp, Homo sapien
tttcccatggacaaacaaaaatcactaccagat

SEQ ID NO: 407038 - DNA, 33 bp, Homo sapien
tttcccatggacaaacgaaaatcactaccagat

SEQ ID NO: 407039 - DNA, 33 bp, Homo sapien
cttagcatagtatttcaagtcaataaaggtatg

SEQ ID NO: 407040 - DNA, 33 bp, Homo sapien
cttagcatagtatttcgagtcaataaaggtatg

SEQ ID NO: 407041 - DNA, 33 bp, Homo sapien
ttcaacattactcccaaagatattcataagtaa

SEQ ID NO: 407042 - DNA, 33 bp, Homo sapien
ttcaacattactcccagagatattcataagtaa

SEQ ID NO: 407043 - DNA, 33 bp, Homo sapien
aagaacagaatagttaagtaacctacaggaggt

SEQ ID NO: 407044 - DNA, 33 bp, Homo sapien
aagaacagaatagttaggtaacctacaggaggt

SEQ ID NO: 407045 - DNA, 33 bp, Homo sapien
acacaatgctttcactaaagaactggaatacaa

SEQ ID NO: 407046 - DNA, 33 bp, Homo sapien
acacaatgctttcactgaagaactggaatacaa

SEQ ID NO: 407047 - DNA, 33 bp, Homo sapien
tctccatggtaacatacggagagtttaatgaaa

SEQ ID NO: 407048 - DNA, 33 bp, Homo sapien
tctccatggtaacatatggagagtttaatgaaa

SEQ ID NO: 407049 - DNA, 33 bp, Homo sapien
tgatttgattagtctacgtcttgggaagcgtat

SEQ ID NO: 407050 - DNA, 33 bp, Homo sapien
tgatttgattagtctatgtcttgggaagcgtat

SEQ ID NO: 407051 - DNA, 33 bp, Homo sapien
tagttcacttgtgaacccatatcaaggtgagaa

SEQ ID NO: 407052 - DNA, 33 bp, Homo sapien
tagttcacttgtgaactcatatcaaggtgagaa

SEQ ID NO: 407053 - DNA, 33 bp, Homo sapien
tccatctatatgagtccactgaagtgaagtatt

SEQ ID NO: 407054 - DNA, 33 bp, Homo sapien
tccatctatatgagtctactgaagtgaagtatt

SEQ ID NO: 407055 - DNA, 33 bp, Homo sapien
gggtgttagaagcacaactcgtaggggctggag

SEQ ID NO: 407056 - DNA, 33 bp, Homo sapien
gggtgttagaagcacagctcgtaggggctggag

SEQ ID NO: 407057 - DNA, 33 bp, Homo sapien
ttccatacgataaacaacgctactcccgtgtct

SEQ ID NO: 407058 - DNA, 33 bp, Homo sapien
ttccatacgataaacagcgctactcccgtgtct

SEQ ID NO: 407059 - DNA, 33 bp, Homo sapien
atctgaaaacgtaagtaacctgaatttacaggc

SEQ ID NO: 407060 - DNA, 33 bp, Homo sapien
atctgaaaacgtaagtgacctgaatttacaggc

SEQ ID NO: 407061 - DNA, 33 bp, Homo sapien
cttcagtcatttaagccagttttgatgaatcct

SEQ ID NO: 407062 - DNA, 33 bp, Homo sapien
cttcagtcatttaagctagttttgatgaatcct

SEQ ID NO: 407063 - DNA, 33 bp, Homo sapien
gagagaccctgattccagctttgacgctttggc

SEQ ID NO: 407064 - DNA, 33 bp, Homo sapien
gagagaccctgattccggctttgacgctttggc

SEQ ID NO: 407065 - DNA, 33 bp, Homo sapien
ggagtcctcagagagagatgtcctgcttgtaac

SEQ ID NO: 407066 - DNA, 33 bp, Homo sapien
ggagtcctcagagagatatgtcctgcttgtaac

SEQ ID NO: 407067 - DNA, 33 bp, Homo sapien
tattccaaattctcacaatcacatttaaacaca

SEQ ID NO: 407068 - DNA, 33 bp, Homo sapien
tattccaaattctcactatcacatttaaacaca

SEQ ID NO: 407069 - DNA, 33 bp, Homo sapien
tggcaataccaaaatacgaccatgcttgttaat

SEQ ID NO: 407070 - DNA, 33 bp, Homo sapien
tggcaataccaaaatatgaccatgcttgttaat

SEQ ID NO: 407071 - DNA, 33 bp, Homo sapien
tagcttataaagtgaccgagtattctttcctta

SEQ ID NO: 407072 - DNA, 33 bp, Homo sapien
tagcttataaagtgacggagtattctttcctta

SEQ ID NO: 407073 - DNA, 33 bp, Homo sapien; identical to SEQ ID NO: 407071

SEQ ID NO: 407074 - DNA, 33 bp, Homo sapien; identical to SEQ ID NO: 407072

SEQ ID NO: 407075 - DNA, 33 bp, Homo sapien
tattccctaaagacaacgtgatgttctatgcaa

SEQ ID NO: 407076 - DNA, 33 bp, Homo sapien
tattccctaaagacaatgtgatgttctatgcaa

SEQ ID NO: 407077 - DNA, 33 bp, Homo sapien
tcaaagtggagcaaaccagcaatcagtacaata

SEQ ID NO: 407078 - DNA, 33 bp, Homo sapien
tcaaagtggagcaaactagcaatcagtacaata

SEQ ID NO: 407079 - DNA, 33 bp, Homo sapien
gttgaggggatacacacgcaaaagggcccataa

SEQ ID NO: 407080 - DNA, 33 bp, Homo sapien
gttgaggggatacacatgcaaaagggcccataa

SEQ ID NO: 407081 - DNA, 33 bp, Homo sapien
ttcctccccaaatctgcatgttgcgccaatttt

SEQ ID NO: 407082 - DNA, 33 bp, Homo sapien
ttcctccccaaatctgtatgttgcgccaatttt

SEQ ID NO: 407083 - DNA, 33 bp, Homo sapien
aggttggccccagactcactgagtgcctgcagc

SEQ ID NO: 407084 - DNA, 33 bp, Homo sapien
aggttggccccagacttactgagtgcctgcagc

SEQ ID NO: 407085 - DNA, 33 bp, Homo sapien
taaaggacatccaggacgggacgctagggaatc

SEQ ID NO: 407086 - DNA, 33 bp, Homo sapien
taaaggacatccaggatgggacgctagggaatc

SEQ ID NO: 407087 - DNA, 33 bp, Homo sapien
caattatggggcagacaggtaataaagagttga

SEQ ID NO: 407088 - DNA, 33 bp, Homo sapien
caattatggggcagactggtaataaagagttga

SEQ ID NO: 407089 - DNA, 33 bp, Homo sapien
ctccaagtatctagaaataccttagaatgtttc

SEQ ID NO: 407090 - DNA, 33 bp, Homo sapien
ctccaagtatctagaagtaccttagaatgtttc

SEQ ID NO: 407091 - DNA, 33 bp, Homo sapien
tactccacaccaggttaaaatgagtaaaatcta

SEQ ID NO: 407092 - DNA, 33 bp, Homo sapien
tactccacaccaggttgaaatgagtaaaatcta

SEQ ID NO: 407093 - DNA, 33 bp, Homo sapien
aatcattgataagatagggatggattatatgta

SEQ ID NO: 407094 - DNA, 33 bp, Homo sapien
aatcattgataagatatggatggattatatgta

SEQ ID NO: 407095 - DNA, 33 bp, Homo sapien
aaaagaaagcaagaaaaaatgatactgtggggt

SEQ ID NO: 407096 - DNA, 33 bp, Homo sapien
aaaagaaagcaagaaacaatgatactgtggggt

SEQ ID NO: 407097 - DNA, 33 bp, Homo sapien
aagtaaataaatctggaagaagcagccatgttc

SEQ ID NO: 407098 - DNA, 33 bp, Homo sapien
aagtaaataaatctgggagaagcagccatgttc

SEQ ID NO: 407099 - DNA, 33 bp, Homo sapien
attctttcttttcttacggattgtgatatcttt

SEQ ID NO: 407100 - DNA, 33 bp, Homo sapien
attctttcttttcttatggattgtgatatcttt

SEQ ID NO: 407101 - DNA, 33 bp, Homo sapien
atgtggtttaatggtaaatttgattcttcaata

SEQ ID NO: 407102 - DNA, 33 bp, Homo sapien
atgtggtttaatggtagatttgattcttcaata

SEQ ID NO: 407103 - DNA, 33 bp, Homo sapien; identical to SEQ ID NO: 407101

SEQ ID NO: 407104 - DNA, 33 bp, Homo sapien; identical to SEQ ID NO: 407102

SEQ ID NO: 407105 - DNA, 33 bp, Homo sapien
ttgtaatgtaagtgtacaacaaatgtagaaaaa

SEQ ID NO: 407106 - DNA, 33 bp, Homo sapien
ttgtaatgtaagtgtataacaaatgtagaaaaa

SEQ ID NO: 407107 - DNA, 33 bp, Homo sapien; identical to SEQ ID NO: 407105

SEQ ID NO: 407108 - DNA, 33 bp, Homo sapien; identical to SEQ ID NO: 407106

SEQ ID NO: 407109 - DNA, 33 bp, Homo sapien
atagcagaagagatgcacttaaaaagtatggca

SEQ ID NO: 407110 - DNA, 33 bp, Homo sapien
atagcagaagagatgcgcttaaaaagtatggca

SEQ ID NO: 407111 - DNA, 33 bp, Homo sapien; identical to SEQ ID NO: 407109

SEQ ID NO: 407112 - DNA, 33 bp, Homo sapien; identical to SEQ ID NO: 407110

SEQ ID NO: 407113 - DNA, 33 bp, Homo sapien
aaatgccaatgtcatgaaagatcaaagaaagta

SEQ ID NO: 407114 - DNA, 33 bp, Homo sapien
aaatgccaatgtcatggaagatcaaagaaagta

SEQ ID NO: 407115 - DNA, 33 bp, Homo sapien
acagaaaaatataaaaggctgacaactttcaat

SEQ ID NO: 407116 - DNA, 33 bp, Homo sapien
acagaaaaatataaaatgctgacaactttcaat

SEQ ID NO: 407117 - DNA, 33 bp, Homo sapien
gttacctagtctactgcattgctagaaccagaa

SEQ ID NO: 407118 - DNA, 33 bp, Homo sapien
gttacctagtctactgtattgctagaaccagaa

SEQ ID NO: 407119 - DNA, 33 bp, Homo sapien
gctgcagcccgtatctcacgactctaatttcct

SEQ ID NO: 407120 - DNA, 33 bp, Homo sapien
gctgcagcccgtatcttacgactctaatttcct

SEQ ID NO: 407121 - DNA, 33 bp, Homo sapien
cagtctcatgtcaggacaatctccctttctctt

SEQ ID NO: 407122 - DNA, 33 bp, Homo sapien
cagtctcatgtcaggataatctccctttctctt

SEQ ID NO: 407123 - DNA, 33 bp, Homo sapien
aaggtgacggaaatcacgcttaacaactttgac

SEQ ID NO: 407124 - DNA, 33 bp, Homo sapien
aaggtgacggaaatcatgcttaacaactttgac

SEQ ID NO: 407125 - DNA, 33 bp, Homo sapien
cgctgctccagttcggccagctttccatcatgc

SEQ ID NO: 407126 - DNA, 33 bp, Homo sapien
cgctgctccagttcggtcagctttccatcatgc

SEQ ID NO: 407127 - DNA, 33 bp, Homo sapien
ttgcctctttttcacaaatggatggtgctaaaa

SEQ ID NO: 407128 - DNA, 33 bp, Homo sapien
ttgcctctttttcacacatggatggtgctaaaa

SEQ ID NO: 407129 - DNA, 33 bp, Homo sapien
tttgtaagactctttacgtccaagttccttcat

SEQ ID NO: 407130 - DNA, 33 bp, Homo sapien
tttgtaagactctttatgtccaagttccttcat

SEQ ID NO: 407131 - DNA, 33 bp, Homo sapien
tttagaagtggtttagaagctacttaaatgatg

SEQ ID NO: 407132 - DNA, 33 bp, Homo sapien
tttagaagtggtttaggagctacttaaatgatg

SEQ ID NO: 407133 - DNA, 33 bp, Homo sapien
aggaattggatcatttaaaaagaacatggagtg

SEQ ID NO: 407134 - DNA, 33 bp, Homo sapien
aggaattggatcatttgaaaagaacatggagtg

SEQ ID NO: 407135 - DNA, 33 bp, Homo sapien
ctcatctgtatgtaacagggtagcctcgtaatt

SEQ ID NO: 407136 - DNA, 33 bp, Homo sapien
ctcatctgtatgtaacggggtagcctcgtaatt

SEQ ID NO: 407137 - DNA, 33 bp, Homo sapien
gttttccaatcgttgaacttcaaatgagttata

SEQ ID NO: 407138 - DNA, 33 bp, Homo sapien
gttttccaatcgttgagcttcaaatgagttata

SEQ ID NO: 407139 - DNA, 33 bp, Homo sapien
aagtgttgatagcaacaaattttaaagaaaata

SEQ ID NO: 407140 - DNA, 33 bp, Homo sapien
aagtgttgatagcaaccaattttaaagaaaata

SEQ ID NO: 407141 - DNA, 33 bp, Homo sapien
ctaattaatacacaaaatggcccagcacaattt

SEQ ID NO: 407142 - DNA, 33 bp, Homo sapien
ctaattaatacacaaagtggcccagcacaattt

SEQ ID NO: 407143 - DNA, 33 bp, Homo sapien
ttgaactgtgaacacacaggactcctggagggg

SEQ ID NO: 407144 - DNA, 33 bp, Homo sapien
ttgaactgtgaacacagaggactcctggagggg

SEQ ID NO: 407145 - DNA, 33 bp, Homo sapien
ctgatgagaaactctacatcattttgcaataaa

SEQ ID NO: 407146 - DNA, 33 bp, Homo sapien
ctgatgagaaactctatatcattttgcaataaa

SEQ ID NO: 407147 - DNA, 33 bp, Homo sapien
aacgtaggaacttcctcagcggaaccaaggagt

SEQ ID NO: 407148 - DNA, 33 bp, Homo sapien
aacgtaggaacttcctgagcggaaccaaggagt

SEQ ID NO: 407149 - DNA, 33 bp, Homo sapien
gcaggctatacactacagcagatcacttggggt

SEQ ID NO: 407150 - DNA, 33 bp, Homo sapien
gcaggctatacactacggcagatcacttggggt

SEQ ID NO: 407151 - DNA, 33 bp, Homo sapien
gcagaaatcagaggccagctactgcgctcgcgt

SEQ ID NO: 407152 - DNA, 33 bp, Homo sapien
gcagaaatcagaggccggctactgcgctcgcgt

SEQ ID NO: 407153 - DNA, 33 bp, Homo sapien
tatctgtttgtgagtaagtggaagttctgtctg

SEQ ID NO: 407154 - DNA, 33 bp, Homo sapien
tatctgtttgtgagtaggtggaagttctgtctg

SEQ ID NO: 407155 - DNA, 33 bp, Homo sapien
tttaacagtttgtgaacctggcatgaaactttt

SEQ ID NO: 407156 - DNA, 33 bp, Homo sapien
tttaacagtttgtgaatctggcatgaaactttt

SEQ ID NO: 407157 - DNA, 33 bp, Homo sapien
caccatttcctccaggccatattatcagaactg

SEQ ID NO: 407158 - DNA, 33 bp, Homo sapien
caccatttcctccaggtcatattatcagaactg

SEQ ID NO: 407159 - DNA, 33 bp, Homo sapien
ttgcagttagttttagaaatcggccaccaccac

SEQ ID NO: 407160 - DNA, 33 bp, Homo sapien
ttgcagttagttttaggaatcggccaccaccac

SEQ ID NO: 407161 - DNA, 33 bp, Homo sapien
tgagagtctcgaacacggggtcaaatcaagcaa

SEQ ID NO: 407162 - DNA, 33 bp, Homo sapien
tgagagtctcgaacactgggtcaaatcaagcaa

SEQ ID NO: 407163 - DNA, 33 bp, Homo sapien
tctagacaggtaccacccgccgctttgatctct

SEQ ID NO: 407164 - DNA, 33 bp, Homo sapien
tctagacaggtaccacgcgccgctttgatctct

SEQ ID NO: 407165 - DNA, 33 bp, Homo sapien
cttagcttgctaatgacatgggaagaccactca

SEQ ID NO: 407166 - DNA, 33 bp, Homo sapien
cttagcttgctaatgatatgggaagaccactca

SEQ ID NO: 407167 - DNA, 33 bp, Homo sapien
aagccctcatggataccctggaaccttttatag

SEQ ID NO: 407168 - DNA, 33 bp, Homo sapien
aagccctcatggatactctggaaccttttatag

SEQ ID NO: 407169 - DNA, 33 bp, Homo sapien
gcagccaggcaaattcagaagctactatttcca

SEQ ID NO: 407170 - DNA, 33 bp, Homo sapien
gcagccaggcaaattcggaagctactatttcca

SEQ ID NO: 407171 - DNA, 33 bp, Homo sapien
tggagtcaaaatggcaagtttagccccaactgt

SEQ ID NO: 407172 - DNA, 33 bp, Homo sapien
tggagtcaaaatggcaggtttagccccaactgt

SEQ ID NO: 407173 - DNA, 33 bp, Homo sapien
gcctgccagttgcaataaggaggcttctcatct

SEQ ID NO: 407174 - DNA, 33 bp, Homo sapien
gcctgccagttgcaatgaggaggcttctcatct

SEQ ID NO: 407175 - DNA, 33 bp, Homo sapien
attctctctaccatacaccatcctcacctcctc

SEQ ID NO: 407176 - DNA, 33 bp, Homo sapien
attctctctaccatacgccatcctcacctcctc

SEQ ID NO: 407177 - DNA, 33 bp, Homo sapien
ctactctgctcatatacactgtcccacaggcag

SEQ ID NO: 407178 - DNA, 33 bp, Homo sapien
ctactctgctcatatatactgtcccacaggcag

SEQ ID NO: 407179 - DNA, 33 bp, Homo sapien
gtcaatcacattgcccgctgtgaagttagtccc

SEQ ID NO: 407180 - DNA, 33 bp, Homo sapien
gtcaatcacattgccctctgtgaagttagtccc

SEQ ID NO: 407181 - DNA, 33 bp, Homo sapien
ataaagttcaccctatgaaaatatacaattcag

SEQ ID NO: 407182 - DNA, 33 bp, Homo sapien
ataaagttcaccctattaaaatatacaattcag

SEQ ID NO: 407183 - DNA, 33 bp, Homo sapien
agttctatggggatacaattcacataaagttca

SEQ ID NO: 407184 - DNA, 33 bp, Homo sapien
agttctatggggataccattcacataaagttca

SEQ ID NO: 407185 - DNA, 33 bp, Homo sapien
cttccacactggcctgacacagctggagtcaat

SEQ ID NO: 407186 - DNA, 33 bp, Homo sapien
cttccacactggcctgccacagctggagtcaat

SEQ ID NO: 407187 - DNA, 33 bp, Homo sapien
gggtcccaaaaggagacagagataaccaaagaa

SEQ ID NO: 407188 - DNA, 33 bp, Homo sapien
gggtcccaaaaggagatagagataaccaaagaa

SEQ ID NO: 407189 - DNA, 33 bp, Homo sapien
agagtagaactcagataatccaagcatccctca

SEQ ID NO: 407190 - DNA, 33 bp, Homo sapien
agagtagaactcagatgatccaagcatccctca

SEQ ID NO: 407191 - DNA, 33 bp, Homo sapien
ggctgttatggctacaagagacaatttgctgat

SEQ ID NO: 407192 - DNA, 33 bp, Homo sapien
ggctgttatggctacatgagacaatttgctgat

SEQ ID NO: 407193 - DNA, 33 bp, Homo sapien
tccactcagcttcttgcagcacttactctggga

SEQ ID NO: 407194 - DNA, 33 bp, Homo sapien
tccactcagcttcttgtagcacttactctggga

SEQ ID NO: 407195 - DNA, 33 bp, Homo sapien
agtcattaagaccagcgcaggtttagagggaat

SEQ ID NO: 407196 - DNA, 33 bp, Homo sapien
agtcattaagaccagctcaggtttagagggaat

SEQ ID NO: 407197 - DNA, 33 bp, Homo sapien
ccaatcccacatttccacttggcgttgccctag

SEQ ID NO: 407198 - DNA, 33 bp, Homo sapien
ccaatcccacatttccgcttggcgttgccctag

SEQ ID NO: 407199 - DNA, 33 bp, Homo sapien
ctccagttcctaatgccatttatttaaagctgg

SEQ ID NO: 407200 - DNA, 33 bp, Homo sapien
ctccagttcctaatgctatttatttaaagctgg

SEQ ID NO: 407201 - DNA, 33 bp, Homo sapien
tttaattggagagtcaaggcacgtacgggaaag

SEQ ID NO: 407202 - DNA, 33 bp, Homo sapien
tttaattggagagtcagggcacgtacgggaaag

SEQ ID NO: 407203 - DNA, 33 bp, Homo sapien
atttgattttcttagcaataacctgtaaccaga

SEQ ID NO: 407204 - DNA, 33 bp, Homo sapien
atttgattttcttagcgataacctgtaaccaga

SEQ ID NO: 407205 - DNA, 33 bp, Homo sapien
atagttcttaagctccactgttcaggaaaaaaa

SEQ ID NO: 407206 - DNA, 33 bp, Homo sapien
atagttcttaagctccgctgttcaggaaaaaaa

SEQ ID NO: 407207 - DNA, 33 bp, Homo sapien
aaccttttttaaagacagctacaatgaccctgg

SEQ ID NO: 407208 - DNA, 33 bp, Homo sapien
aaccttttttaaagacggctacaatgaccctgg

SEQ ID NO: 407209 - DNA, 33 bp, Homo sapien
gagcaatgcaaaccagaaccccaaatctaccaa

SEQ ID NO: 407210 - DNA, 33 bp, Homo sapien
gagcaatgcaaaccaggaccccaaatctaccaa

SEQ ID NO: 407211 - DNA, 33 bp, Homo sapien
ctccaccgtgagcaccaggaagtggatggtggg

SEQ ID NO: 407212 - DNA, 33 bp, Homo sapien
ctccaccgtgagcaccgggaagtggatggtggg

SEQ ID NO: 407213 - DNA, 33 bp, Homo sapien
catgtacttttttcaaaacaacatttacggcct

SEQ ID NO: 407214 - DNA, 33 bp, Homo sapien
catgtacttttttcaagacaacatttacggcct

SEQ ID NO: 407215 - DNA, 33 bp, Homo sapien
aaaaacaaaataatcccaagcgatcatccttgg

SEQ ID NO: 407216 - DNA, 33 bp, Homo sapien
aaaaacaaaataatcctaagcgatcatccttgg

SEQ ID NO: 407217 - DNA, 33 bp, Homo sapien
ctttaggagacacccaatgaggtcttgaaggaa

SEQ ID NO: 407218 - DNA, 33 bp, Homo sapien
ctttaggagacacccagtgaggtcttgaaggaa

SEQ ID NO: 407219 - DNA, 33 bp, Homo sapien
ggtggctttgttcacacagctgatgcgtgccct

SEQ ID NO: 407220 - DNA, 33 bp, Homo sapien
ggtggctttgttcacatagctgatgcgtgccct

SEQ ID NO: 407221 - DNA, 33 bp, Homo sapien
tatggattaccaaaagccctgcgctaggtccct

SEQ ID NO: 407222 - DNA, 33 bp, Homo sapien
tatggattaccaaaagtcctgcgctaggtccct

SEQ ID NO: 407223 - DNA, 33 bp, Homo sapien
gaaaccctctcacttacgttctccatcatttat

SEQ ID NO: 407224 - DNA, 33 bp, Homo sapien
gaaaccctctcacttatgttctccatcatttat

SEQ ID NO: 407225 - DNA, 33 bp, Homo sapien
gcttctaagtacagcaagcctaaggcagtgtgt

SEQ ID NO: 407226 - DNA, 33 bp, Homo sapien
gcttctaagtacagcaggcctaaggcagtgtgt

SEQ ID NO: 407227 - DNA, 33 bp, Homo sapien
tgggatggaattgacacggtgggtggccatctt

SEQ ID NO: 407228 - DNA, 33 bp, Homo sapien
tgggatggaattgacatggtgggtggccatctt

SEQ ID NO: 407229 - DNA, 33 bp, Homo sapien
ttctcttgtcccttgacgattgtgtaatgatga

SEQ ID NO: 407230 - DNA, 33 bp, Homo sapien
ttctcttgtcccttgatgattgtgtaatgatga

SEQ ID NO: 407231 - DNA, 33 bp, Homo sapien
agcttcctaacgaagggattcatcattacacaa

SEQ ID NO: 407232 - DNA, 33 bp, Homo sapien
agcttcctaacgaaggtattcatcattacacaa

SEQ ID NO: 407233 - DNA, 33 bp, Homo sapien
ggggtatctttgaaaaccaactactacactgat

SEQ ID NO: 407234 - DNA, 33 bp, Homo sapien
ggggtatctttgaaaatcaactactacactgat

SEQ ID NO: 407235 - DNA, 33 bp, Homo sapien
gctcagtcctgctgcacgtgatactgacaggaa

SEQ ID NO: 407236 - DNA, 33 bp, Homo sapien
gctcagtcctgctgcatgtgatactgacaggaa

SEQ ID NO: 407237 - DNA, 33 bp, Homo sapien
atgacttctgtggcaccccagggctcctgcttc

SEQ ID NO: 407238 - DNA, 33 bp, Homo sapien
atgacttctgtggcactccagggctcctgcttc

SEQ ID NO: 407239 - DNA, 33 bp, Homo sapien
gcccccaaaactggaacgccggatgagggccat

SEQ ID NO: 407240 - DNA, 33 bp, Homo sapien
gcccccaaaactggaatgccggatgagggccat

SEQ ID NO: 407241 - DNA, 33 bp, Homo sapien
tgcctcagaacaccccacaatgctgtcatctca

SEQ ID NO: 407242 - DNA, 33 bp, Homo sapien
tgcctcagaacaccccgcaatgctgtcatctca

SEQ ID NO: 407243 - DNA, 33 bp, Homo sapien
tgggatttccgagtagcatctcttgagtgcaga

SEQ ID NO: 407244 - DNA, 33 bp, Homo sapien
tgggatttccgagtagtatctcttgagtgcaga

SEQ ID NO: 407245 - DNA, 33 bp, Homo sapien
gcttaaataataagcgaagagagtcagggcaga

SEQ ID NO: 407246 - DNA, 33 bp, Homo sapien
gcttaaataataagcggagagagtcagggcaga

SEQ ID NO: 407247 - DNA, 33 bp, Homo sapien
tgttgcaggagagtaaagaaagcactttgttat

SEQ ID NO: 407248 - DNA, 33 bp, Homo sapien
tgttgcaggagagtaaggaaagcactttgttat

SEQ ID NO: 407249 - DNA, 33 bp, Homo sapien
tttattaagcatctataacatgcccagtgcatt

SEQ ID NO: 407250 - DNA, 33 bp, Homo sapien
tttattaagcatctattacatgcccagtgcatt

SEQ ID NO: 407251 - DNA, 33 bp, Homo sapien
gaggcggtgaggaagaacatcagaagagatggc

SEQ ID NO: 407252 - DNA, 33 bp, Homo sapien
gaggcggtgaggaagagcatcagaagagatggc

SEQ ID NO: 407253 - DNA, 33 bp, Homo sapien
agtgctagggaatcacagtgaaagccagtccct

SEQ ID NO: 407254 - DNA, 33 bp, Homo sapien
agtgctagggaatcacggtgaaagccagtccct

SEQ ID NO: 407255 - DNA, 33 bp, Homo sapien
gagctcagtctggagaagaagacaagtaaagaa

SEQ ID NO: 407256 - DNA, 33 bp, Homo sapien
gagctcagtctggagaggaagacaagtaaagaa

SEQ ID NO: 407257 - DNA, 33 bp, Homo sapien
agttctggccaaaaaaatgtaaataaaacagtc

SEQ ID NO: 407258 - DNA, 33 bp, Homo sapien
agttctggccaaaaaagtgtaaataaaacagtc

SEQ ID NO: 407259 - DNA, 33 bp, Homo sapien
aaatgacccttcagtaggtcattttctcactga

SEQ ID NO: 407260 - DNA, 33 bp, Homo sapien
aaatgacccttcagtatgtcattttctcactga

SEQ ID NO: 407261 - DNA, 33 bp, Homo sapien
tcaataaatctgcctaaaatgttcaaaaattac

SEQ ID NO: 407262 - DNA, 33 bp, Homo sapien
tcaataaatctgcctataatgttcaaaaattac

SEQ ID NO: 407263 - DNA, 33 bp, Homo sapien
ggcagatgagcacatcaactactagcaccactg

SEQ ID NO: 407264 - DNA, 33 bp, Homo sapien
ggcagatgagcacatcgactactagcaccactg

SEQ ID NO: 407265 - DNA, 33 bp, Homo sapien
tttaaaataaccatacaattgcagtcaacagtg

SEQ ID NO: 407266 - DNA, 33 bp, Homo sapien
tttaaaataaccatacgattgcagtcaacagtg

SEQ ID NO: 407267 - DNA, 33 bp, Homo sapien
gtgttggctgtggtcacagaatattgttcatgt

SEQ ID NO: 407268 - DNA, 33 bp, Homo sapien
gtgttggctgtggtcatagaatattgttcatgt

SEQ ID NO: 407269 - DNA, 33 bp, Homo sapien
aactgcagaagcttagaacacctttctctccaa

SEQ ID NO: 407270 - DNA, 33 bp, Homo sapien
aactgcagaagcttaggacacctttctctccaa

SEQ ID NO: 407271 - DNA, 33 bp, Homo sapien
tcacttggatgtataaacgtgaacaaactactt

SEQ ID NO: 407272 - DNA, 33 bp, Homo sapien
tcacttggatgtataaccgtgaacaaactactt

SEQ ID NO: 407273 - DNA, 33 bp, Homo sapien
taacttttgtatggaccaaacataaaccattca

SEQ ID NO: 407274 - DNA, 33 bp, Homo sapien
taacttttgtatggacgaaacataaaccattca

SEQ ID NO: 407275 - DNA, 33 bp, Homo sapien
catgacatgacttggaaataatagcacaaacaa

SEQ ID NO: 407276 - DNA, 33 bp, Homo sapien
catgacatgacttggagataatagcacaaacaa

SEQ ID NO: 407277 - DNA, 33 bp, Homo sapien
ttttacagttaaatcacgtggtagttcctataa

SEQ ID NO: 407278 - DNA, 33 bp, Homo sapien
ttttacagttaaatcatgtggtagttcctataa

SEQ ID NO: 407279 - DNA, 33 bp, Homo sapien
tttctctctgccatgcaaggccacttcaagaag

SEQ ID NO: 407280 - DNA, 33 bp, Homo sapien
tttctctctgccatgcgaggccacttcaagaag

SEQ ID NO: 407281 - DNA, 33 bp, Homo sapien
ggtcagagagttgaagcctgggagctaggattt

SEQ ID NO: 407282 - DNA, 33 bp, Homo sapien
ggtcagagagttgaaggctgggagctaggattt

SEQ ID NO: 407283 - DNA, 33 bp, Homo sapien
gttggctactttattccaaatcattcaattcat

SEQ ID NO: 407284 - DNA, 33 bp, Homo sapien
gttggctactttattctaaatcattcaattcat

SEQ ID NO: 407285 - DNA, 33 bp, Homo sapien
aaagtctactgtaggccaatatcaaggtccagg

SEQ ID NO: 407286 - DNA, 33 bp, Homo sapien
aaagtctactgtaggctaatatcaaggtccagg

SEQ ID NO: 407287 - DNA, 33 bp, Homo sapien
actttgaaagtaggtacgaggaaaaataaaata

SEQ ID NO: 407288 - DNA, 33 bp, Homo sapien
actttgaaagtaggtatgaggaaaaataaaata

SEQ ID NO: 407289 - DNA, 33 bp, Homo sapien
tcatgcctggcatatacatactttttttttttt

SEQ ID NO: 407290 - DNA, 33 bp, Homo sapien
tcatgcctggcatatatatactttttttttttt

SEQ ID NO: 407291 - DNA, 33 bp, Homo sapien
agcaaggaattctgaaaataatgtctgattata

SEQ ID NO: 407292 - DNA, 33 bp, Homo sapien
agcaaggaattctgaagataatgtctgattata

SEQ ID NO: 407293 - DNA, 33 bp, Homo sapien
agagtgatatttattgaaaacttactacctgaa

SEQ ID NO: 407294 - DNA, 33 bp, Homo sapien
agagtgatatttattggaaacttactacctgaa

SEQ ID NO: 407295 - DNA, 33 bp, Homo sapien
actgcaagctggcactaaagaggattagactta

SEQ ID NO: 407296 - DNA, 33 bp, Homo sapien
actgcaagctggcactcaagaggattagactta

SEQ ID NO: 407297 - DNA, 33 bp, Homo sapien
taactgttaagaatgaatagaaataagtgctat

SEQ ID NO: 407298 - DNA, 33 bp, Homo sapien
taactgttaagaatgagtagaaataagtgctat

SEQ ID NO: 407299 - DNA, 33 bp, Homo sapien
aaaactcttctgctcacataatggttattcatt

SEQ ID NO: 407300 - DNA, 33 bp, Homo sapien
aaaactcttctgctcatataatggttattcatt

SEQ ID NO: 407301 - DNA, 33 bp, Homo sapien
aagcgctctcttgcctaaaagatgatcgagaag

SEQ ID NO: 407302 - DNA, 33 bp, Homo sapien
aagcgctctcttgcctgaaagatgatcgagaag

SEQ ID NO: 407303 - DNA, 33 bp, Homo sapien
atatacagtgacaagacaaggcggtggagaagg

SEQ ID NO: 407304 - DNA, 33 bp, Homo sapien
atatacagtgacaagagaaggcggtggagaagg

SEQ ID NO: 407305 - DNA, 33 bp, Homo sapien
tgagtgactggttgaaacacaaaaccagggatc

SEQ ID NO: 407306 - DNA, 33 bp, Homo sapien
tgagtgactggttgaatcacaaaaccagggatc

SEQ ID NO: 407307 - DNA, 33 bp, Homo sapien
ccaggcatctggtgtaagggtgtcattgtcatg

SEQ ID NO: 407308 - DNA, 33 bp, Homo sapien
ccaggcatctggtgtaggggtgtcattgtcatg

SEQ ID NO: 407309 - DNA, 33 bp, Homo sapien
tctgggtatggcttgactattgagtgtttggcc

SEQ ID NO: 407310 - DNA, 33 bp, Homo sapien
tctgggtatggcttgattattgagtgtttggcc

SEQ ID NO: 407311 - DNA, 33 bp, Homo sapien
ctttcctttgctcaggccataaaatggactcgt

SEQ ID NO: 407312 - DNA, 33 bp, Homo sapien
ctttcctttgctcaggtcataaaatggactcgt

SEQ ID NO: 407313 - DNA, 33 bp, Homo sapien
atctctagctccctggacaatgttggctgaatg

SEQ ID NO: 407314 - DNA, 33 bp, Homo sapien
atctctagctccctggccaatgttggctgaatg

SEQ ID NO: 407315 - DNA, 33 bp, Homo sapien
agatgttttgagtgccaggacttatttatattt

SEQ ID NO: 407316 - DNA, 33 bp, Homo sapien
agatgttttgagtgccgggacttatttatattt

SEQ ID NO: 407317 - DNA, 33 bp, Homo sapien
cagcagttgcaaccgacgagggttgagggtagg

SEQ ID NO: 407318 - DNA, 33 bp, Homo sapien
cagcagttgcaaccgatgagggttgagggtagg

SEQ ID NO: 407319 - DNA, 33 bp, Homo sapien
ataaatgcgaggggaaatgtctaaacagaacac

SEQ ID NO: 407320 - DNA, 33 bp, Homo sapien
ataaatgcgaggggaagtgtctaaacagaacac

SEQ ID NO: 407321 - DNA, 33 bp, Homo sapien
acacacacacaaataaacataaatgcgagggga

SEQ ID NO: 407322 - DNA, 33 bp, Homo sapien
acacacacacaaataatcataaatgcgagggga

SEQ ID NO: 407323 - DNA, 33 bp, Homo sapien
cccgagttgttaggatcaaatgacataacacgt

SEQ ID NO: 407324 - DNA, 33 bp, Homo sapien
cccgagttgttaggattaaatgacataacacgt

SEQ ID NO: 407325 - DNA, 33 bp, Homo sapien
ttagacccgttaaatactacagagcagttatca

SEQ ID NO: 407326 - DNA, 33 bp, Homo sapien
ttagacccgttaaatattacagagcagttatca

SEQ ID NO: 407327 - DNA, 33 bp, Homo sapien
tctctggtgctctctccaaggcccagtgcctct

SEQ ID NO: 407328 - DNA, 33 bp, Homo sapien
tctctggtgctctctctaaggcccagtgcctct

SEQ ID NO: 407329 - DNA, 33 bp, Homo sapien
cggccagaggaagggcaaagatggctttagacg

SEQ ID NO: 407330 - DNA, 33 bp, Homo sapien
cggccagaggaagggcgaagatggctttagacg

SEQ ID NO: 407331 - DNA, 33 bp, Homo sapien
gggtggcctgttcctacagtccagcatcctgtc

SEQ ID NO: 407332 - DNA, 33 bp, Homo sapien
gggtggcctgttcctatagtccagcatcctgtc

SEQ ID NO: 407333 - DNA, 33 bp, Homo sapien
tagtttcagaattcctcaatgttcacaacgaac

SEQ ID NO: 407334 - DNA, 33 bp, Homo sapien
tagtttcagaattcctgaatgttcacaacgaac

SEQ ID NO: 407335 - DNA, 33 bp, Homo sapien
gtgcttcaaggattccacatataatctagggtt

SEQ ID NO: 407336 - DNA, 33 bp, Homo sapien
gtgcttcaaggattccgcatataatctagggtt

SEQ ID NO: 407337 - DNA, 33 bp, Homo sapien
ttcagaattcaagcacaaaccttccaactctaa

SEQ ID NO: 407338 - DNA, 33 bp, Homo sapien
ttcagaattcaagcacgaaccttccaactctaa

SEQ ID NO: 407339 - DNA, 33 bp, Homo sapien
tctccagttttatgaccgctccaatccagccct

SEQ ID NO: 407340 - DNA, 33 bp, Homo sapien
tctccagttttatgactgctccaatccagccct

SEQ ID NO: 407341 - DNA, 33 bp, Homo sapien
atattctacatttgcaactttgaaatctggtta

SEQ ID NO: 407342 - DNA, 33 bp, Homo sapien
atattctacatttgcatctttgaaatctggtta

SEQ ID NO: 407343 - DNA, 33 bp, Homo sapien
ttacaataataaattgcagcaaaactctcaaga

SEQ ID NO: 407344 - DNA, 33 bp, Homo sapien
ttacaataataaattggagcaaaactctcaaga

SEQ ID NO: 407345 - DNA, 33 bp, Homo sapien
agaaatcacttgaacacgcaaagagaaaagaat

SEQ ID NO: 407346 - DNA, 33 bp, Homo sapien
agaaatcacttgaacatgcaaagagaaaagaat

SEQ ID NO: 407347 - DNA, 33 bp, Homo sapien
tgaggacacaaaatgacgtatctgaggtcacat

SEQ ID NO: 407348 - DNA, 33 bp, Homo sapien
tgaggacacaaaatgatgtatctgaggtcacat

SEQ ID NO: 407349 - DNA, 33 bp, Homo sapien
aagtccagcaatcagaactatggcgactctcta

SEQ ID NO: 407350 - DNA, 33 bp, Homo sapien
aagtccagcaatcagagctatggcgactctcta

SEQ ID NO: 407351 - DNA, 33 bp, Homo sapien
ttgatgaagacaataacgccaacaatggaatcg

SEQ ID NO: 407352 - DNA, 33 bp, Homo sapien
ttgatgaagacaataatgccaacaatggaatcg

SEQ ID NO: 407353 - DNA, 33 bp, Homo sapien
ggggcaggctcaggacagacaggagtggagcga

SEQ ID NO: 407354 - DNA, 33 bp, Homo sapien
ggggcaggctcaggacggacaggagtggagcga

SEQ ID NO: 407355 - DNA, 33 bp, Homo sapien
accaatgctgtcgatcacttgcttccctttaac

SEQ ID NO: 407356 - DNA, 33 bp, Homo sapien
accaatgctgtcgatcgcttgcttccctttaac

SEQ ID NO: 407357 - DNA, 33 bp, Homo sapien
gggacacagtaagagacggggctgggcgttttc

SEQ ID NO: 407358 - DNA, 33 bp, Homo sapien
gggacacagtaagagatggggctgggcgttttc

SEQ ID NO: 407359 - DNA, 33 bp, Homo sapien
aagattaagtatatagaaagttctcagtaaatg

SEQ ID NO: 407360 - DNA, 33 bp, Homo sapien
aagattaagtatataggaagttctcagtaaatg

SEQ ID NO: 407361 - DNA, 33 bp, Homo sapien
agaaatgtatcaggtgcaattcagaacacagag

SEQ ID NO: 407362 - DNA, 33 bp, Homo sapien
agaaatgtatcaggtggaattcagaacacagag

SEQ ID NO: 407363 - DNA, 33 bp, Homo sapien
tcagaaaatatacagccgatgaaagtgtttcct

SEQ ID NO: 407364 - DNA, 33 bp, Homo sapien
tcagaaaatatacagctgatgaaagtgtttcct

SEQ ID NO: 407365 - DNA, 33 bp, Homo sapien
gaacttgtaaggaaaaagtttcacaattgattt

SEQ ID NO: 407366 - DNA, 33 bp, Homo sapien
gaacttgtaaggaaaacgtttcacaattgattt

SEQ ID NO: 407367 - DNA, 33 bp, Homo sapien
ttcctcaccacttggacatctctataggactgc

SEQ ID NO: 407368 - DNA, 33 bp, Homo sapien
ttcctcaccacttggatatctctataggactgc

SEQ ID NO: 407369 - DNA, 33 bp, Homo sapien
gtgaccgtaagatctgcaggtgtctcaagggtt

SEQ ID NO: 407370 - DNA, 33 bp, Homo sapien
gtgaccgtaagatctgtaggtgtctcaagggtt

SEQ ID NO: 407371 - DNA, 33 bp, Homo sapien
acagacatatggataactgttctcctctaacta

SEQ ID NO: 407372 - DNA, 33 bp, Homo sapien
acagacatatggataattgttctcctctaacta

SEQ ID NO: 407373 - DNA, 33 bp, Homo sapien
atctagggtagacttaaatttcaagaacaaccc

SEQ ID NO: 407374 - DNA, 33 bp, Homo sapien
atctagggtagacttatatttcaagaacaaccc

SEQ ID NO: 407375 - DNA, 33 bp, Homo sapien
aagacctttcataacacaaacattccacaaacc

SEQ ID NO: 407376 - DNA, 33 bp, Homo sapien
aagacctttcataacataaacattccacaaacc

SEQ ID NO: 407377 - DNA, 33 bp, Homo sapien
tttttgagagtgggggaaataaggataattatt

SEQ ID NO: 407378 - DNA, 33 bp, Homo sapien
tttttgagagtggggggaataaggataattatt

SEQ ID NO: 407379 - DNA, 33 bp, Homo sapien
acgtaggacgccggcacagaaggagccgggtgg

SEQ ID NO: 407380 - DNA, 33 bp, Homo sapien
acgtaggacgccggcagagaaggagccgggtgg

SEQ ID NO: 407381 - DNA, 33 bp, Homo sapien
cctggctctaaattcccccgtattttgtaatct

SEQ ID NO: 407382 - DNA, 33 bp, Homo sapien
cctggctctaaattccgccgtattttgtaatct

SEQ ID NO: 407383 - DNA, 33 bp, Homo sapien
ttacgcaaaagtcagagccaataaagcaaccta

SEQ ID NO: 407384 - DNA, 33 bp, Homo sapien
ttacgcaaaagtcagatccaataaagcaaccta

SEQ ID NO: 407385 - DNA, 33 bp, Homo sapien
ttatacgcagatgaaacttggttttgattaaac

SEQ ID NO: 407386 - DNA, 33 bp, Homo sapien
ttatacgcagatgaaagttggttttgattaaac

SEQ ID NO: 407387 - DNA, 33 bp, Homo sapien
aagccaagttcctataggccagccaatgtttaa

SEQ ID NO: 407388 - DNA, 33 bp, Homo sapien
aagccaagttcctatatgccagccaatgtttaa

SEQ ID NO: 407389 - DNA, 33 bp, Homo sapien
ggaagagtccaaatgtcaaatatggttccagga

SEQ ID NO: 407390 - DNA, 33 bp, Homo sapien
ggaagagtccaaatgttaaatatggttccagga

SEQ ID NO: 407391 - DNA, 33 bp, Homo sapien
ctgtcaaatcaactcaccttcaacaaaggagtc

SEQ ID NO: 407392 - DNA, 33 bp, Homo sapien
ctgtcaaatcaactcatcttcaacaaaggagtc

SEQ ID NO: 407393 - DNA, 33 bp, Homo sapien
tcagagtctcggagaaatatgagagagaaaatg

SEQ ID NO: 407394 - DNA, 33 bp, Homo sapien
tcagagtctcggagaagtatgagagagaaaatg

SEQ ID NO: 407395 - DNA, 33 bp, Homo sapien
ataataacagtacccgcatcacaagattgtcca

SEQ ID NO: 407396 - DNA, 33 bp, Homo sapien
ataataacagtacccgtatcacaagattgtcca

SEQ ID NO: 407397 - DNA, 33 bp, Homo sapien
tctgaagaagccttagcagccagataaacaagc

SEQ ID NO: 407398 - DNA, 33 bp, Homo sapien
tctgaagaagccttagtagccagataaacaagc

SEQ ID NO: 407399 - DNA, 33 bp, Homo sapien
tgcgttttattgtacgaactttgtatcacctat

SEQ ID NO: 407400 - DNA, 33 bp, Homo sapien
tgcgttttattgtacggactttgtatcacctat

SEQ ID NO: 407401 - DNA, 33 bp, Homo sapien
atgactaacacacttacacatagatgcttatac

SEQ ID NO: 407402 - DNA, 33 bp, Homo sapien
atgactaacacacttatacatagatgcttatac

SEQ ID NO: 407403 - DNA, 33 bp, Homo sapien
cacaaattatatttagaatcgaacacacataac

SEQ ID NO: 407404 - DNA, 33 bp, Homo sapien
cacaaattatatttagcatcgaacacacataac

SEQ ID NO: 407405 - DNA, 33 bp, Homo sapien
taccagccctggattacgccattattcttcatt

SEQ ID NO: 407406 - DNA, 33 bp, Homo sapien
taccagccctggattatgccattattcttcatt

SEQ ID NO: 407407 - DNA, 33 bp, Homo sapien
agggagctatttgaaaaacaaaacatctgacac

SEQ ID NO: 407408 - DNA, 33 bp, Homo sapien
agggagctatttgaaagacaaaacatctgacac

SEQ ID NO: 407409 - DNA, 33 bp, Homo sapien
tgaagctagctgctacaaatgcactcctgaact

SEQ ID NO: 407410 - DNA, 33 bp, Homo sapien
tgaagctagctgctacgaatgcactcctgaact

SEQ ID NO: 407411 - DNA, 33 bp, Homo sapien
aatatccatttcaagaagtgtgtccctcctttt

SEQ ID NO: 407412 - DNA, 33 bp, Homo sapien
aatatccatttcaagatgtgtgtccctcctttt

SEQ ID NO: 407413 - DNA, 33 bp, Homo sapien
tacaaatgaggtaaggaaaaagtatgcatggag

SEQ ID NO: 407414 - DNA, 33 bp, Homo sapien
tacaaatgaggtaaggcaaaagtatgcatggag

SEQ ID NO: 407415 - DNA, 33 bp, Homo sapien
ccttgatttgacagaccgggctccgaattctgg

SEQ ID NO: 407416 - DNA, 33 bp, Homo sapien
ccttgatttgacagactgggctccgaattctgg

SEQ ID NO: 407417 - DNA, 33 bp, Homo sapien
gagagttcagtaagaaattcagtgcagatgcca

SEQ ID NO: 407418 - DNA, 33 bp, Homo sapien
gagagttcagtaagaagttcagtgcagatgcca

SEQ ID NO: 407419 - DNA, 33 bp, Homo sapien
atcacagcttttgcacagattagaaaaacattc

SEQ ID NO: 407420 - DNA, 33 bp, Homo sapien
atcacagcttttgcacggattagaaaaacattc

SEQ ID NO: 407421 - DNA, 33 bp, Homo sapien
ggaggaagatgagtccagatgggaaggacccag

SEQ ID NO: 407422 - DNA, 33 bp, Homo sapien
ggaggaagatgagtccggatgggaaggacccag

SEQ ID NO: 407423 - DNA, 33 bp, Homo sapien
tgaggggatgattctcaaagtgtgtatcaccat

SEQ ID NO: 407424 - DNA, 33 bp, Homo sapien
tgaggggatgattctcgaagtgtgtatcaccat

SEQ ID NO: 407425 - DNA, 33 bp, Homo sapien
ttttcaaagttggacaaaaaatacaggagtaat

SEQ ID NO: 407426 - DNA, 33 bp, Homo sapien
ttttcaaagttggacataaaatacaggagtaat

SEQ ID NO: 407427 - DNA, 33 bp, Homo sapien
cttgctggtatcaaataagtctatagccccagg

SEQ ID NO: 407428 - DNA, 33 bp, Homo sapien
cttgctggtatcaaatgagtctatagccccagg

SEQ ID NO: 407429 - DNA, 33 bp, Homo sapien
caggacttttgctgggaacactgtgaaatggac

SEQ ID NO: 407430 - DNA, 33 bp, Homo sapien
caggacttttgctgggtacactgtgaaatggac

SEQ ID NO: 407431 - DNA, 33 bp, Homo sapien
atgagtgttttcattaaatttgtgtggagtcct

SEQ ID NO: 407432 - DNA, 33 bp, Homo sapien
atgagtgttttcattagatttgtgtggagtcct

SEQ ID NO: 407433 - DNA, 33 bp, Homo sapien
gttaatatgcgacatgaaaagcatctctacagc

SEQ ID NO: 407434 - DNA, 33 bp, Homo sapien
gttaatatgcgacatggaaagcatctctacagc

SEQ ID NO: 407435 - DNA, 33 bp, Homo sapien
atgtaaaatgcctgggccattgtaggcaccaaa

SEQ ID NO: 407436 - DNA, 33 bp, Homo sapien
atgtaaaatgcctgggtcattgtaggcaccaaa

SEQ ID NO: 407437 - DNA, 33 bp, Homo sapien
gttacaacaaacttcaaagaacaggaattatat

SEQ ID NO: 407438 - DNA, 33 bp, Homo sapien
gttacaacaaacttcacagaacaggaattatat

SEQ ID NO: 407439 - DNA, 33 bp, Homo sapien
aaggagctagtgaagccaatttgacattttggc

SEQ ID NO: 407440 - DNA, 33 bp, Homo sapien
aaggagctagtgaagctaatttgacattttggc

SEQ ID NO: 407441 - DNA, 33 bp, Homo sapien
attttggaatggaacaatatgttaaaacaccct

SEQ ID NO: 407442 - DNA, 33 bp, Homo sapien
attttggaatggaacagtatgttaaaacaccct

SEQ ID NO: 407443 - DNA, 33 bp, Homo sapien
gtgtctgcaggttcacacgctaaactctgcttc

SEQ ID NO: 407444 - DNA, 33 bp, Homo sapien
gtgtctgcaggttcacccgctaaactctgcttc

SEQ ID NO: 407445 - DNA, 33 bp, Homo sapien
ccaccaggcggcagacagatagcagcgggaaag

SEQ ID NO: 407446 - DNA, 33 bp, Homo sapien
ccaccaggcggcagacggatagcagcgggaaag

SEQ ID NO: 407447 - DNA, 33 bp, Homo sapien
gagagctctgcggggaaaaagaacaagaacaag

SEQ ID NO: 407448 - DNA, 33 bp, Homo sapien
gagagctctgcggggagaaagaacaagaacaag

SEQ ID NO: 407449 - DNA, 33 bp, Homo sapien
tgaggaagctctagtgaagaaattcaggacgcg

SEQ ID NO: 407450 - DNA, 33 bp, Homo sapien
tgaggaagctctagtgtagaaattcaggacgcg

SEQ ID NO: 407451 - DNA, 33 bp, Homo sapien
cctgggaacagcagggaaaaatggcttatcggg

SEQ ID NO: 407452 - DNA, 33 bp, Homo sapien
cctgggaacagcaggggaaaatggcttatcggg

SEQ ID NO: 407453 - DNA, 33 bp, Homo sapien
cagattgataattgaaataattttagcaatatt

SEQ ID NO: 407454 - DNA, 33 bp, Homo sapien
cagattgataattgaagtaattttagcaatatt

SEQ ID NO: 407455 - DNA, 33 bp, Homo sapien
agtgaagtaggacactcagccattgtcatgcac

SEQ ID NO: 407456 - DNA, 33 bp, Homo sapien
agtgaagtaggacacttagccattgtcatgcac

SEQ ID NO: 407457 - DNA, 33 bp, Homo sapien
ggggtgaggtcgaagaaaacagtaaattgatgt

SEQ ID NO: 407458 - DNA, 33 bp, Homo sapien
ggggtgaggtcgaagacaacagtaaattgatgt

SEQ ID NO: 407459 - DNA, 33 bp, Homo sapien
ccatcctgcaagaaccactttgtccctctccca

SEQ ID NO: 407460 - DNA, 33 bp, Homo sapien
ccatcctgcaagaaccgctttgtccctctccca

SEQ ID NO: 407461 - DNA, 33 bp, Homo sapien
attttcaggtctcctacgccacttctgtaccca

SEQ ID NO: 407462 - DNA, 33 bp, Homo sapien
attttcaggtctcctatgccacttctgtaccca

SEQ ID NO: 407463 - DNA, 33 bp, Homo sapien
taatctacactctttgaagtcagaatagagatt

SEQ ID NO: 407464 - DNA, 33 bp, Homo sapien
taatctacactctttggagtcagaatagagatt

SEQ ID NO: 407465 - DNA, 33 bp, Homo sapien
ggaggggaagtgcaacaggactttataagagat

SEQ ID NO: 407466 - DNA, 33 bp, Homo sapien
ggaggggaagtgcaaccggactttataagagat

SEQ ID NO: 407467 - DNA, 33 bp, Homo sapien
tgctcctcttctctaacgggacgttcccaggca

SEQ ID NO: 407468 - DNA, 33 bp, Homo sapien
tgctcctcttctctaatgggacgttcccaggca

SEQ ID NO: 407469 - DNA, 33 bp, Homo sapien
tgctgaatatttcaataagaggcaaacctcagc

SEQ ID NO: 407470 - DNA, 33 bp, Homo sapien
tgctgaatatttcaatgagaggcaaacctcagc

SEQ ID NO: 407471 - DNA, 33 bp, Homo sapien
aagtgattccagagaaaggagaacatagtacct

SEQ ID NO: 407472 - DNA, 33 bp, Homo sapien
aagtgattccagagaagggagaacatagtacct

SEQ ID NO: 407473 - DNA, 33 bp, Homo sapien
tcaaacaaaactcaaccgctaggagataatggc

SEQ ID NO: 407474 - DNA, 33 bp, Homo sapien
tcaaacaaaactcaactgctaggagataatggc

SEQ ID NO: 407475 - DNA, 33 bp, Homo sapien
tgctttgttttgcagaactaataggaactcagg

SEQ ID NO: 407476 - DNA, 33 bp, Homo sapien
tgctttgttttgcagagctaataggaactcagg

SEQ ID NO: 407477 - DNA, 33 bp, Homo sapien
tctgttcaggagtggcaaggctcgttttgagct

SEQ ID NO: 407478 - DNA, 33 bp, Homo sapien
tctgttcaggagtggcgaggctcgttttgagct

SEQ ID NO: 407479 - DNA, 33 bp, Homo sapien
tgtgctcattatcccacagcctaggattccatg

SEQ ID NO: 407480 - DNA, 33 bp, Homo sapien
tgtgctcattatcccagagcctaggattccatg

SEQ ID NO: 407481 - DNA, 33 bp, Homo sapien
agactcatctgacctcccttgacccagtgaaac

SEQ ID NO: 407482 - DNA, 33 bp, Homo sapien
agactcatctgacctctcttgacccagtgaaac

SEQ ID NO: 407483 - DNA, 33 bp, Homo sapien
actaacttcgagagtcaaaaaggaaaagagctg

SEQ ID NO: 407484 - DNA, 33 bp, Homo sapien
actaacttcgagagtcgaaaaggaaaagagctg

SEQ ID NO: 407485 - DNA, 33 bp, Homo sapien
gcccaccatgtgtcaccaaatgctgggtctgtt

SEQ ID NO: 407486 - DNA, 33 bp, Homo sapien
gcccaccatgtgtcactaaatgctgggtctgtt

SEQ ID NO: 407487 - DNA, 33 bp, Homo sapien
cccttgagatcttatgcagaattccgtgtttgt

SEQ ID NO: 407488 - DNA, 33 bp, Homo sapien
cccttgagatcttatgtagaattccgtgtttgt

SEQ ID NO: 407489 - DNA, 33 bp, Homo sapien
agagggacctaagacccagttgcaaatgaaaac

SEQ ID NO: 407490 - DNA, 33 bp, Homo sapien
agagggacctaagacctagttgcaaatgaaaac

SEQ ID NO: 407491 - DNA, 33 bp, Homo sapien
catttgtgtttaaggacgatccctgtggctaag

SEQ ID NO: 407492 - DNA, 33 bp, Homo sapien
catttgtgtttaaggatgatccctgtggctaag

SEQ ID NO: 407493 - DNA, 33 bp, Homo sapien
gaacgctggctccttacgctgggctgctcaaca

SEQ ID NO: 407494 - DNA, 33 bp, Homo sapien
gaacgctggctccttatgctgggctgctcaaca

SEQ ID NO: 407495 - DNA, 33 bp, Homo sapien
ggccaagtgaaagatacgagttctgaaaagccg

SEQ ID NO: 407496 - DNA, 33 bp, Homo sapien
ggccaagtgaaagataggagttctgaaaagccg

SEQ ID NO: 407497 - DNA, 33 bp, Homo sapien
atcactgctgaattataagccttgaatcctgat

SEQ ID NO: 407498 - DNA, 33 bp, Homo sapien
atcactgctgaattatgagccttgaatcctgat

SEQ ID NO: 407499 - DNA, 33 bp, Homo sapien
aggaggaagaatgacgaacaatgatgaggctta

SEQ ID NO: 407500 - DNA, 33 bp, Homo sapien
aggaggaagaatgacggacaatgatgaggctta

SEQ ID NO: 407501 - DNA, 33 bp, Homo sapien
atcactagattaaatgccaggtttctttcagtt

SEQ ID NO: 407502 - DNA, 33 bp, Homo sapien
atcactagattaaatgtcaggtttctttcagtt

SEQ ID NO: 407503 - DNA, 33 bp, Homo sapien
ttaaaagaaggctgaacaggaagttaggcagaa

SEQ ID NO: 407504 - DNA, 33 bp, Homo sapien
ttaaaagaaggctgaagaggaagttaggcagaa

SEQ ID NO: 407505 - DNA, 33 bp, Homo sapien
actcttcaaattctgaaagtggacttgattttt

SEQ ID NO: 407506 - DNA, 33 bp, Homo sapien
actcttcaaattctgagagtggacttgattttt

SEQ ID NO: 407507 - DNA, 33 bp, Homo sapien
catttgcctactgaaagtccttaaacaatacag

SEQ ID NO: 407508 - DNA, 33 bp, Homo sapien
catttgcctactgaaattccttaaacaatacag

SEQ ID NO: 407509 - DNA, 33 bp, Homo sapien
gacagatgtgtccagacggagaagatgacagtg

SEQ ID NO: 407510 - DNA, 33 bp, Homo sapien
gacagatgtgtccagatggagaagatgacagtg

SEQ ID NO: 407511 - DNA, 33 bp, Homo sapien
ccttagactccttagactaaatcgttagtgttt

SEQ ID NO: 407512 - DNA, 33 bp, Homo sapien
ccttagactccttagattaaatcgttagtgttt

SEQ ID NO: 407513 - DNA, 33 bp, Homo sapien
tcagcatctgttcttacgtgacgagaagaaaca

SEQ ID NO: 407514 - DNA, 33 bp, Homo sapien
tcagcatctgttcttatgtgacgagaagaaaca

SEQ ID NO: 407515 - DNA, 33 bp, Homo sapien
attgtcttgtagttaaacactgtagttgagcct

SEQ ID NO: 407516 - DNA, 33 bp, Homo sapien
attgtcttgtagttaaccactgtagttgagcct

SEQ ID NO: 407517 - DNA, 33 bp, Homo sapien
aatatttaggtgtggccatcaactctaaaaata

SEQ ID NO: 407518 - DNA, 33 bp, Homo sapien
aatatttaggtgtggctatcaactctaaaaata

SEQ ID NO: 407519 - DNA, 33 bp, Homo sapien
aacaagagtccaaaaaatatttgtgtcttagca

SEQ ID NO: 407520 - DNA, 33 bp, Homo sapien
aacaagagtccaaaaagtatttgtgtcttagca

SEQ ID NO: 407521 - DNA, 33 bp, Homo sapien
gagagccatacaaacccagagctcaaagcaatc

SEQ ID NO: 407522 - DNA, 33 bp, Homo sapien
gagagccatacaaacctagagctcaaagcaatc

SEQ ID NO: 407523 - DNA, 33 bp, Homo sapien
ttggcaggtgaggccaatagaaaaataacagca

SEQ ID NO: 407524 - DNA, 33 bp, Homo sapien
ttggcaggtgaggccactagaaaaataacagca

SEQ ID NO: 407525 - DNA, 33 bp, Homo sapien
gcagacacgaactgaacagaacaaggactagaa

SEQ ID NO: 407526 - DNA, 33 bp, Homo sapien
gcagacacgaactgaatagaacaaggactagaa

SEQ ID NO: 407527 - DNA, 33 bp, Homo sapien
taaacaaaaatcttgcccctccattgccttaag

SEQ ID NO: 407528 - DNA, 33 bp, Homo sapien
taaacaaaaatcttgctcctccattgccttaag

SEQ ID NO: 407529 - DNA, 33 bp, Homo sapien
tgttcaaagctcaaagaaaacggctccaagagt

SEQ ID NO: 407530 - DNA, 33 bp, Homo sapien
tgttcaaagctcaaagtaaacggctccaagagt

SEQ ID NO: 407531 - DNA, 33 bp, Homo sapien; identical to SEQ ID NO: 407529

SEQ ID NO: 407532 - DNA, 33 bp, Homo sapien; identical to SEQ ID NO: 407530

SEQ ID NO: 407533 - DNA, 33 bp, Homo sapien
ctttcttttccagtaacgaagttataaatatca

SEQ ID NO: 407534 - DNA, 33 bp, Homo sapien
ctttcttttccagtaatgaagttataaatatca

SEQ ID NO: 407535 - DNA, 33 bp, Homo sapien; identical to SEQ ID NO: 407533

SEQ ID NO: 407536 - DNA, 33 bp, Homo sapien; identical to SEQ ID NO: 407534

SEQ ID NO: 407537 - DNA, 33 bp, Homo sapien; identical to SEQ ID NO: 407533

SEQ ID NO: 407538 - DNA, 33 bp, Homo sapien; identical to SEQ ID NO: 407534

SEQ ID NO: 407539 - DNA, 33 bp, Homo sapien
agattctctgagggaagagaggatacctagatt

SEQ ID NO: 407540 - DNA, 33 bp, Homo sapien
agattctctgagggaatagaggatacctagatt

SEQ ID NO: 407541 - DNA, 33 bp, Homo sapien
aattcatacttttttccagccccactgctgctg

SEQ ID NO: 407542 - DNA, 33 bp, Homo sapien
aattcatacttttttctagccccactgctgctg

SEQ ID NO: 407543 - DNA, 33 bp, Homo sapien
attggatcaggagttacccattgcaagagatga

SEQ ID NO: 407544 - DNA, 33 bp, Homo sapien
attggatcaggagttatccattgcaagagatga

SEQ ID NO: 407545 - DNA, 33 bp, Homo sapien
gctagtgttgaaaatgaattggatcaggagtta

SEQ ID NO: 407546 - DNA, 33 bp, Homo sapien
gctagtgttgaaaatggattggatcaggagtta

SEQ ID NO: 407547 - DNA, 33 bp, Homo sapien
cttccctcacaaaatcgacattcctgtcaaaga

SEQ ID NO: 407548 - DNA, 33 bp, Homo sapien
cttccctcacaaaatctacattcctgtcaaaga

SEQ ID NO: 407549 - DNA, 33 bp, Homo sapien
agacatttgactgatacctggaatgttatatat

SEQ ID NO: 407550 - DNA, 33 bp, Homo sapien
agacatttgactgatatctggaatgttatatat

SEQ ID NO: 407551 - DNA, 33 bp, Homo sapien
tcaactccagttcctacataagcacccaaaaag

SEQ ID NO: 407552 - DNA, 33 bp, Homo sapien
tcaactccagttcctatataagcacccaaaaag

SEQ ID NO: 407553 - DNA, 33 bp, Homo sapien
gagtgcagtagcataaacgtgagcatagctcgc

SEQ ID NO: 407554 - DNA, 33 bp, Homo sapien
gagtgcagtagcataatcgtgagcatagctcgc

SEQ ID NO: 407555 - DNA, 33 bp, Homo sapien
tcaagttctgtcctgacgtagtcacctttcttc

SEQ ID NO: 407556 - DNA, 33 bp, Homo sapien
tcaagttctgtcctgatgtagtcacctttcttc

SEQ ID NO: 407557 - DNA, 33 bp, Homo sapien
ttttcttcatttctcacactaatgctagtgatt

SEQ ID NO: 407558 - DNA, 33 bp, Homo sapien
ttttcttcatttctcatactaatgctagtgatt

SEQ ID NO: 407559 - DNA, 33 bp, Homo sapien
attacatacctcatggaaactcaaacagcactt

SEQ ID NO: 407560 - DNA, 33 bp, Homo sapien
attacatacctcatgggaactcaaacagcactt

SEQ ID NO: 407561 - DNA, 33 bp, Homo sapien
agtttttacgagttacaatgtgagaggtagaca

SEQ ID NO: 407562 - DNA, 33 bp, Homo sapien
agtttttacgagttaccatgtgagaggtagaca

SEQ ID NO: 407563 - DNA, 33 bp, Homo sapien
gggacccccagtgagaagccattaacaaaggca

SEQ ID NO: 407564 - DNA, 33 bp, Homo sapien
gggacccccagtgagaggccattaacaaaggca

SEQ ID NO: 407565 - DNA, 33 bp, Homo sapien
gccctggatcaggaaaatctggcgggaaacctc

SEQ ID NO: 407566 - DNA, 33 bp, Homo sapien
gccctggatcaggaaagtctggcgggaaacctc

SEQ ID NO: 407567 - DNA, 33 bp, Homo sapien
ttttttggccctcctaaaagcaatcatttgctt

SEQ ID NO: 407568 - DNA, 33 bp, Homo sapien
ttttttggccctcctagaagcaatcatttgctt

SEQ ID NO: 407569 - DNA, 33 bp, Homo sapien
agaaatggagtttgagaaaaaggattaggattc

SEQ ID NO: 407570 - DNA, 33 bp, Homo sapien
agaaatggagtttgaggaaaaggattaggattc

SEQ ID NO: 407571 - DNA, 33 bp, Homo sapien
agcacttcagaaaatagccaggtgtcatgagaa

SEQ ID NO: 407572 - DNA, 33 bp, Homo sapien
agcacttcagaaaatatccaggtgtcatgagaa

SEQ ID NO: 407573 - DNA, 33 bp, Homo sapien
ccacaagtttccatcacccagcttcctgtccac

SEQ ID NO: 407574 - DNA, 33 bp, Homo sapien
ccacaagtttccatcatccagcttcctgtccac

SEQ ID NO: 407575 - DNA, 33 bp, Homo sapien
gccctttctttccacccgagaaggttcactgag

SEQ ID NO: 407576 - DNA, 33 bp, Homo sapien
gccctttctttccacctgagaaggttcactgag

SEQ ID NO: 407577 - DNA, 33 bp, Homo sapien
aggactcttcccatccaaaagcaaggaacatct

SEQ ID NO: 407578 - DNA, 33 bp, Homo sapien
aggactcttcccatcccaaagcaaggaacatct

SEQ ID NO: 407579 - DNA, 33 bp, Homo sapien
aatagataatcaaatgaaagaatgcacaaggac

SEQ ID NO: 407580 - DNA, 33 bp, Homo sapien
aatagataatcaaatgtaagaatgcacaaggac

SEQ ID NO: 407581 - DNA, 33 bp, Homo sapien
atgagaacatgacttacggggaagcctggcaga

SEQ ID NO: 407582 - DNA, 33 bp, Homo sapien
atgagaacatgacttatggggaagcctggcaga

SEQ ID NO: 407583 - DNA, 33 bp, Homo sapien
tggattcttcttctacaatatcctttggctctt

SEQ ID NO: 407584 - DNA, 33 bp, Homo sapien
tggattcttcttctacgatatcctttggctctt

SEQ ID NO: 407585 - DNA, 33 bp, Homo sapien
agtctgaagactaaaactgttacttaagtggtt

SEQ ID NO: 407586 - DNA, 33 bp, Homo sapien
agtctgaagactaaaagtgttacttaagtggtt

SEQ ID NO: 407587 - DNA, 33 bp, Homo sapien
aagtctttcttgccccaaccaggtcctctagtc

SEQ ID NO: 407588 - DNA, 33 bp, Homo sapien
aagtctttcttgccccgaccaggtcctctagtc

SEQ ID NO: 407589 - DNA, 33 bp, Homo sapien
aagtgaagaaaatcaggcgaagaataaagagaa

SEQ ID NO: 407590 - DNA, 33 bp, Homo sapien
aagtgaagaaaatcagtcgaagaataaagagaa

SEQ ID NO: 407591 - DNA, 33 bp, Homo sapien
tttaaaccataaaatcagagactataagtaagg

SEQ ID NO: 407592 - DNA, 33 bp, Homo sapien
tttaaaccataaaatcggagactataagtaagg

SEQ ID NO: 407593 - DNA, 33 bp, Homo sapien
cagtggtggctcattaagaaactatctctggcc

SEQ ID NO: 407594 - DNA, 33 bp, Homo sapien
cagtggtggctcattacgaaactatctctggcc

SEQ ID NO: 407595 - DNA, 33 bp, Homo sapien
ccttttcactcccacacgttatcccatattgac

SEQ ID NO: 407596 - DNA, 33 bp, Homo sapien
ccttttcactcccacaggttatcccatattgac

SEQ ID NO: 407597 - DNA, 33 bp, Homo sapien
ggagtccaccaagaaaaaaggtgacattgggtc

SEQ ID NO: 407598 - DNA, 33 bp, Homo sapien
ggagtccaccaagaaagaaggtgacattgggtc

SEQ ID NO: 407599 - DNA, 33 bp, Homo sapien
ctttctaggtaatctgaattgtgaacgagtggg

SEQ ID NO: 407600 - DNA, 33 bp, Homo sapien
ctttctaggtaatctggattgtgaacgagtggg

SEQ ID NO: 407601 - DNA, 33 bp, Homo sapien
tgtgtgataaaaatggccaaagctctaagctag

SEQ ID NO: 407602 - DNA, 33 bp, Homo sapien
tgtgtgataaaaatggtcaaagctctaagctag

SEQ ID NO: 407603 - DNA, 33 bp, Homo sapien
gttcacctgaatgacaaccataaattaagtctc

SEQ ID NO: 407604 - DNA, 33 bp, Homo sapien
gttcacctgaatgacatccataaattaagtctc

SEQ ID NO: 407605 - DNA, 33 bp, Homo sapien
agtcactgaacataaaaaaccataaagttacag

SEQ ID NO: 407606 - DNA, 33 bp, Homo sapien
agtcactgaacataaacaaccataaagttacag

SEQ ID NO: 407607 - DNA, 33 bp, Homo sapien
tgtactggtttgaggccgaacttggactgtgat

SEQ ID NO: 407608 - DNA, 33 bp, Homo sapien
tgtactggtttgaggctgaacttggactgtgat

SEQ ID NO: 407609 - DNA, 33 bp, Homo sapien
ggaagtctggtaaagtaaaagggaatgaaacag

SEQ ID NO: 407610 - DNA, 33 bp, Homo sapien
ggaagtctggtaaagtgaaagggaatgaaacag

SEQ ID NO: 407611 - DNA, 33 bp, Homo sapien
caggccatacagcataagattctttgtttaagg

SEQ ID NO: 407612 - DNA, 33 bp, Homo sapien
caggccatacagcatatgattctttgtttaagg

SEQ ID NO: 407613 - DNA, 33 bp, Homo sapien
ggcataaaagaaagtactaagtgcagttcaact

SEQ ID NO: 407614 - DNA, 33 bp, Homo sapien
ggcataaaagaaagtattaagtgcagttcaact

SEQ ID NO: 407615 - DNA, 33 bp, Homo sapien
aattttctccagcgcaatcatgcatagatttaa

SEQ ID NO: 407616 - DNA, 33 bp, Homo sapien
aattttctccagcgcagtcatgcatagatttaa

SEQ ID NO: 407617 - DNA, 33 bp, Homo sapien
cccatgcaagagcttacggtcaaccttaatgga

SEQ ID NO: 407618 - DNA, 33 bp, Homo sapien
cccatgcaagagcttatggtcaaccttaatgga

SEQ ID NO: 407619 - DNA, 33 bp, Homo sapien
ataatagattgatgctaagaagtcagaaaattt

SEQ ID NO: 407620 - DNA, 33 bp, Homo sapien
ataatagattgatgctgagaagtcagaaaattt

SEQ ID NO: 407621 - DNA, 33 bp, Homo sapien
gtccagaatactctgacggagaaaataattgat

SEQ ID NO: 407622 - DNA, 33 bp, Homo sapien
gtccagaatactctgatggagaaaataattgat

SEQ ID NO: 407623 - DNA, 33 bp, Homo sapien
gagtgtatcaatcaccagaaagagaaatggcag

SEQ ID NO: 407624 - DNA, 33 bp, Homo sapien
gagtgtatcaatcaccggaaagagaaatggcag

SEQ ID NO: 407625 - DNA, 33 bp, Homo sapien
agagcactttactgggaactggatgaaaagtta

SEQ ID NO: 407626 - DNA, 33 bp, Homo sapien
agagcactttactgggtactggatgaaaagtta

SEQ ID NO: 407627 - DNA, 33 bp, Homo sapien
gccaaagttagtatcacggaatctgggagttgg

SEQ ID NO: 407628 - DNA, 33 bp, Homo sapien
gccaaagttagtatcatggaatctgggagttgg

SEQ ID NO: 407629 - DNA, 33 bp, Homo sapien
acacaaagctgctttaactttctgctccaaccc

SEQ ID NO: 407630 - DNA, 33 bp, Homo sapien
acacaaagctgctttatctttctgctccaaccc

SEQ ID NO: 407631 - DNA, 33 bp, Homo sapien
tactctccatacctaacgtgactactgctatta

SEQ ID NO: 407632 - DNA, 33 bp, Homo sapien
tactctccatacctaatgtgactactgctatta

SEQ ID NO: 407633 - DNA, 33 bp, Homo sapien
ggaccaataaaaaaacacaggtggaaatgtgag

SEQ ID NO: 407634 - DNA, 33 bp, Homo sapien
ggaccaataaaaaaacgcaggtggaaatgtgag

SEQ ID NO: 407635 - DNA, 33 bp, Homo sapien
gtgggatgggtaggagcagtaagtggtttagat

SEQ ID NO: 407636 - DNA, 33 bp, Homo sapien
gtgggatgggtaggaggagtaagtggtttagat

SEQ ID NO: 407637 - DNA, 33 bp, Homo sapien
ccccacaaaccacacacaaagttctttgagaac

SEQ ID NO: 407638 - DNA, 33 bp, Homo sapien
ccccacaaaccacacagaaagttctttgagaac

SEQ ID NO: 407639 - DNA, 33 bp, Homo sapien
ttgtatctcatcaaaaatcctagcgatggctat

SEQ ID NO: 407640 - DNA, 33 bp, Homo sapien
ttgtatctcatcaaaagtcctagcgatggctat

SEQ ID NO: 407641 - DNA, 33 bp, Homo sapien
ttatatttttctcagcaacttttcattgagatt

SEQ ID NO: 407642 - DNA, 33 bp, Homo sapien
ttatatttttctcagcgacttttcattgagatt

SEQ ID NO: 407643 - DNA, 33 bp, Homo sapien
aactaagcctctaaaaattgtgccattattttt

SEQ ID NO: 407644 - DNA, 33 bp, Homo sapien
aactaagcctctaaaagttgtgccattattttt

SEQ ID NO: 407645 - DNA, 33 bp, Homo sapien
ttcgtcccagagataaaaggaaggggaagagat

SEQ ID NO: 407646 - DNA, 33 bp, Homo sapien
ttcgtcccagagataagaggaaggggaagagat

SEQ ID NO: 407647 - DNA, 33 bp, Homo sapien
tctccacctttcgagaccatggagttctggcat

SEQ ID NO: 407648 - DNA, 33 bp, Homo sapien
tctccacctttcgagatcatggagttctggcat

SEQ ID NO: 407649 - DNA, 33 bp, Homo sapien
ttgctgcacagaaaaaacaatctatccatcata

SEQ ID NO: 407650 - DNA, 33 bp, Homo sapien
ttgctgcacagaaaaagcaatctatccatcata

SEQ ID NO: 407651 - DNA, 33 bp, Homo sapien
cacataataaaacataagccatggattataaag

SEQ ID NO: 407652 - DNA, 33 bp, Homo sapien
cacataataaaacataggccatggattataaag

SEQ ID NO: 407653 - DNA, 33 bp, Homo sapien
agcatctgagagtcaccagtagcaacatggggt

SEQ ID NO: 407654 - DNA, 33 bp, Homo sapien
agcatctgagagtcactagtagcaacatggggt

SEQ ID NO: 407655 - DNA, 33 bp, Homo sapien
aggcaacatttgagcaagaaaataggaatgcat

SEQ ID NO: 407656 - DNA, 33 bp, Homo sapien
aggcaacatttgagcaggaaaataggaatgcat

SEQ ID NO: 407657 - DNA, 33 bp, Homo sapien
agaaaggctaagaatacagagttagtgcttaga

SEQ ID NO: 407658 - DNA, 33 bp, Homo sapien
agaaaggctaagaatagagagttagtgcttaga

SEQ ID NO: 407659 - DNA, 33 bp, Homo sapien
tgtttgcaaaatagtaataaacctgccctaact

SEQ ID NO: 407660 - DNA, 33 bp, Homo sapien
tgtttgcaaaatagtattaaacctgccctaact

SEQ ID NO: 407661 - DNA, 33 bp, Homo sapien
gcacacggtggccacaaaggtccttatgcttac

SEQ ID NO: 407662 - DNA, 33 bp, Homo sapien
gcacacggtggccacagaggtccttatgcttac

SEQ ID NO: 407663 - DNA, 33 bp, Homo sapien
ttacacctgccattgaagaatccttcctttact

SEQ ID NO: 407664 - DNA, 33 bp, Homo sapien
ttacacctgccattgaggaatccttcctttact

SEQ ID NO: 407665 - DNA, 33 bp, Homo sapien
acaaacaccatgacaacgtctggaaattactct

SEQ ID NO: 407666 - DNA, 33 bp, Homo sapien
acaaacaccatgacaatgtctggaaattactct

SEQ ID NO: 407667 - DNA, 33 bp, Homo sapien
tggggttatacatcccggcaaacaacccctgga

SEQ ID NO: 407668 - DNA, 33 bp, Homo sapien
tggggttatacatccctgcaaacaacccctgga

SEQ ID NO: 407669 - DNA, 33 bp, Homo sapien
tatctaatagatataccctgaagctggtactct

SEQ ID NO: 407670 - DNA, 33 bp, Homo sapien
tatctaatagatatactctgaagctggtactct

SEQ ID NO: 407671 - DNA, 33 bp, Homo sapien
caaaagctgtcagccccaaaccctcaaagccca

SEQ ID NO: 407672 - DNA, 33 bp, Homo sapien
caaaagctgtcagcccgaaaccctcaaagccca

SEQ ID NO: 407673 - DNA, 33 bp, Homo sapien
tgttttataataatcaaataatgtaggcatata

SEQ ID NO: 407674 - DNA, 33 bp, Homo sapien
tgttttataataatcagataatgtaggcatata

SEQ ID NO: 407675 - DNA, 33 bp, Homo sapien
ataccatctatgcgaactgtccaatctgtctca

SEQ ID NO: 407676 - DNA, 33 bp, Homo sapien
ataccatctatgcgaagtgtccaatctgtctca

SEQ ID NO: 407677 - DNA, 33 bp, Homo sapien
gagtaactggaggtgacggaagagaggaagttc

SEQ ID NO: 407678 - DNA, 33 bp, Homo sapien
gagtaactggaggtgatggaagagaggaagttc

SEQ ID NO: 407679 - DNA, 33 bp, Homo sapien
aaccccaaatttgaacaaggcctgtatctgatc

SEQ ID NO: 407680 - DNA, 33 bp, Homo sapien
aaccccaaatttgaactaggcctgtatctgatc

SEQ ID NO: 407681 - DNA, 33 bp, Homo sapien
taaaaaggatgacccaagagatgaaagaaggaa

SEQ ID NO: 407682 - DNA, 33 bp, Homo sapien
taaaaaggatgacccaggagatgaaagaaggaa

SEQ ID NO: 407683 - DNA, 33 bp, Homo sapien
gcgttctccctcaaaccggtggtccagagttag

SEQ ID NO: 407684 - DNA, 33 bp, Homo sapien
gcgttctccctcaaactggtggtccagagttag

SEQ ID NO: 407685 - DNA, 33 bp, Homo sapien
ttccccaggagcttagcccggcctgcatcctgg

SEQ ID NO: 407686 - DNA, 33 bp, Homo sapien
ttccccaggagcttagtccggcctgcatcctgg

SEQ ID NO: 407687 - DNA, 33 bp, Homo sapien
tgtggaccggtaacagcagttccaccaggatgc

SEQ ID NO: 407688 - DNA, 33 bp, Homo sapien
tgtggaccggtaacagtagttccaccaggatgc

SEQ ID NO: 407689 - DNA, 33 bp, Homo sapien
gggtgacgctgaagagaaagagttgagtctgtc

SEQ ID NO: 407690 - DNA, 33 bp, Homo sapien
gggtgacgctgaagaggaagagttgagtctgtc

SEQ ID NO: 407691 - DNA, 33 bp, Homo sapien
atgctcccttcctcaccagatcttattttgttc

SEQ ID NO: 407692 - DNA, 33 bp, Homo sapien
atgctcccttcctcactagatcttattttgttc

SEQ ID NO: 407693 - DNA, 33 bp, Homo sapien
aaatcagagtgcaaaaaccataacggtacagct

SEQ ID NO: 407694 - DNA, 33 bp, Homo sapien
aaatcagagtgcaaaagccataacggtacagct

SEQ ID NO: 407695 - DNA, 33 bp, Homo sapien
gggacaaaaatgtgccacttgaaactgagttta

SEQ ID NO: 407696 - DNA, 33 bp, Homo sapien
gggacaaaaatgtgcctcttgaaactgagttta

SEQ ID NO: 407697 - DNA, 33 bp, Homo sapien
aagaaatagggggccacgaagctggaattaaac

SEQ ID NO: 407698 - DNA, 33 bp, Homo sapien
aagaaatagggggccaggaagctggaattaaac

SEQ ID NO: 407699 - DNA, 33 bp, Homo sapien
agaaacaagtccaggacacaagaaggaagacaa

SEQ ID NO: 407700 - DNA, 33 bp, Homo sapien
agaaacaagtccaggatacaagaaggaagacaa

SEQ ID NO: 407701 - DNA, 33 bp, Homo sapien
ggactctccagaagaagaaacgtaaatatgagc

SEQ ID NO: 407702 - DNA, 33 bp, Homo sapien
ggactctccagaagaataaacgtaaatatgagc

SEQ ID NO: 407703 - DNA, 33 bp, Homo sapien
actactatccaattccagaacctgtgcctgtgt

SEQ ID NO: 407704 - DNA, 33 bp, Homo sapien
actactatccaattccggaacctgtgcctgtgt

SEQ ID NO: 407705 - DNA, 33 bp, Homo sapien
gttttactttctaacacggtaaatgtcaatgga

SEQ ID NO: 407706 - DNA, 33 bp, Homo sapien
gttttactttctaacatggtaaatgtcaatgga

SEQ ID NO: 407707 - DNA, 33 bp, Homo sapien
atcagtatgttcacaaaataaattgagtaaacc

SEQ ID NO: 407708 - DNA, 33 bp, Homo sapien
atcagtatgttcacaagataaattgagtaaacc

SEQ ID NO: 407709 - DNA, 33 bp, Homo sapien
catattctgttgttcaatcatctactctgcatc

SEQ ID NO: 407710 - DNA, 33 bp, Homo sapien
catattctgttgttcagtcatctactctgcatc

SEQ ID NO: 407711 - DNA, 33 bp, Homo sapien
gaaatgatacatacacaaacacataaagtagaa

SEQ ID NO: 407712 - DNA, 33 bp, Homo sapien
gaaatgatacatacacgaacacataaagtagaa

SEQ ID NO: 407713 - DNA, 33 bp, Homo sapien
attggcaatccagtaaccacctaaggagctggt

SEQ ID NO: 407714 - DNA, 33 bp, Homo sapien
attggcaatccagtaatcacctaaggagctggt

SEQ ID NO: 407715 - DNA, 33 bp, Homo sapien
aagtggtcagattgaagaacatgattgattaca

SEQ ID NO: 407716 - DNA, 33 bp, Homo sapien
aagtggtcagattgaataacatgattgattaca

SEQ ID NO: 407717 - DNA, 33 bp, Homo sapien
cccaagaatggaaataagagtcaaaacagcctc

SEQ ID NO: 407718 - DNA, 33 bp, Homo sapien
cccaagaatggaaataggagtcaaaacagcctc

SEQ ID NO: 407719 - DNA, 33 bp, Homo sapien
ctgctgatatagaaaaatgattgaaaatatttg

SEQ ID NO: 407720 - DNA, 33 bp, Homo sapien
ctgctgatatagaaaagtgattgaaaatatttg

SEQ ID NO: 407721 - DNA, 33 bp, Homo sapien
agactaagccagctgaacccacgtgacagggca

SEQ ID NO: 407722 - DNA, 33 bp, Homo sapien
agactaagccagctgagcccacgtgacagggca

SEQ ID NO: 407723 - DNA, 33 bp, Homo sapien
cctcatgctttctgagcacagtagtagatagcg

SEQ ID NO: 407724 - DNA, 33 bp, Homo sapien
cctcatgctttctgaggacagtagtagatagcg

SEQ ID NO: 407725 - DNA, 33 bp, Homo sapien
aaagtttgaggcaatcagagaagccagagaaac

SEQ ID NO: 407726 - DNA, 33 bp, Homo sapien
aaagtttgaggcaatcggagaagccagagaaac

SEQ ID NO: 407727 - DNA, 33 bp, Homo sapien
ggcgaggggcgaaaacaaactcctgttattggg

SEQ ID NO: 407728 - DNA, 33 bp, Homo sapien
ggcgaggggcgaaaacgaactcctgttattggg

SEQ ID NO: 407729 - DNA, 33 bp, Homo sapien
gggtctaacagacctcacttctccacccagtct

SEQ ID NO: 407730 - DNA, 33 bp, Homo sapien
gggtctaacagacctcgcttctccacccagtct

SEQ ID NO: 407731 - DNA, 33 bp, Homo sapien
tttcagggcttagcagaaaattagaaggaaatg

SEQ ID NO: 407732 - DNA, 33 bp, Homo sapien
tttcagggcttagcagcaaattagaaggaaatg

SEQ ID NO: 407733 - DNA, 33 bp, Homo sapien
tgagattgctgctcagaacttaggagagccatc

SEQ ID NO: 407734 - DNA, 33 bp, Homo sapien
tgagattgctgctcaggacttaggagagccatc

SEQ ID NO: 407735 - DNA, 33 bp, Homo sapien
cccgtttctccctggccatggcagaaatgctta

SEQ ID NO: 407736 - DNA, 33 bp, Homo sapien
cccgtttctccctggctatggcagaaatgctta

SEQ ID NO: 407737 - DNA, 33 bp, Homo sapien
taaagattactgacctgaaaactcagtagatgc

SEQ ID NO: 407738 - DNA, 33 bp, Homo sapien
taaagattactgaccttaaaactcagtagatgc

SEQ ID NO: 407739 - DNA, 33 bp, Homo sapien
gggcattctaggtgaacgaaacagcatgagtaa

SEQ ID NO: 407740 - DNA, 33 bp, Homo sapien
gggcattctaggtgaaggaaacagcatgagtaa

SEQ ID NO: 407741 - DNA, 33 bp, Homo sapien
tatcctatattgctacccgtaatggcagtaagg

SEQ ID NO: 407742 - DNA, 33 bp, Homo sapien
tatcctatattgctactcgtaatggcagtaagg

SEQ ID NO: 407743 - DNA, 33 bp, Homo sapien
tcctttgggaaatgaaaggacctagcaacattg

SEQ ID NO: 407744 - DNA, 33 bp, Homo sapien
tcctttgggaaatgaagggacctagcaacattg

SEQ ID NO: 407745 - DNA, 33 bp, Homo sapien
taatcaaacgaaggaactgaatgcaataaaaca

SEQ ID NO: 407746 - DNA, 33 bp, Homo sapien
taatcaaacgaaggaattgaatgcaataaaaca

SEQ ID NO: 407747 - DNA, 33 bp, Homo sapien
gggatggagccttgtccctcactatgacacact

SEQ ID NO: 407748 - DNA, 33 bp, Homo sapien
gggatggagccttgtctctcactatgacacact

SEQ ID NO: 407749 - DNA, 33 bp, Homo sapien
ctgaaagccaagcaagaaaatagtttcagaaaa

SEQ ID NO: 407750 - DNA, 33 bp, Homo sapien
ctgaaagccaagcaaggaaatagtttcagaaaa

SEQ ID NO: 407751 - DNA, 33 bp, Homo sapien
gaggtgaaacatgaagaagaacccaaccacaga

SEQ ID NO: 407752 - DNA, 33 bp, Homo sapien
gaggtgaaacatgaaggagaacccaaccacaga

SEQ ID NO: 407753 - DNA, 33 bp, Homo sapien
gtggtgcttggtaccgcaagtgtttgtactgtc

SEQ ID NO: 407754 - DNA, 33 bp, Homo sapien
gtggtgcttggtaccgtaagtgtttgtactgtc

SEQ ID NO: 407755 - DNA, 33 bp, Homo sapien
tctttcactctcaaaaatgctcctgtttggata

SEQ ID NO: 407756 - DNA, 33 bp, Homo sapien
tctttcactctcaaaagtgctcctgtttggata

SEQ ID NO: 407757 - DNA, 33 bp, Homo sapien
cagctcttcccccatcccgttactcttgacatt

SEQ ID NO: 407758 - DNA, 33 bp, Homo sapien
cagctcttcccccatctcgttactcttgacatt

SEQ ID NO: 407759 - DNA, 33 bp, Homo sapien
tctcagtcatttggaacagtaaactcaactggt

SEQ ID NO: 407760 - DNA, 33 bp, Homo sapien
tctcagtcatttggaatagtaaactcaactggt

SEQ ID NO: 407761 - DNA, 33 bp, Homo sapien
tagatgtaagacagaaagtaaatgtgactggga

SEQ ID NO: 407762 - DNA, 33 bp, Homo sapien
tagatgtaagacagaaggtaaatgtgactggga

SEQ ID NO: 407763 - DNA, 33 bp, Homo sapien
ctggggaagaggggtaaagcctagcatagtgga

SEQ ID NO: 407764 - DNA, 33 bp, Homo sapien
ctggggaagaggggtagagcctagcatagtgga

SEQ ID NO: 407765 - DNA, 33 bp, Homo sapien
gaagccggagttcttacattgctccctcttcac

SEQ ID NO: 407766 - DNA, 33 bp, Homo sapien
gaagccggagttcttatattgctccctcttcac

SEQ ID NO: 407767 - DNA, 33 bp, Homo sapien
gcctacttcctacctccctactattttctgtac

SEQ ID NO: 407768 - DNA, 33 bp, Homo sapien
gcctacttcctacctctctactattttctgtac

SEQ ID NO: 407769 - DNA, 33 bp, Homo sapien
agggtacttgtagtgaagacagacttggggtag

SEQ ID NO: 407770 - DNA, 33 bp, Homo sapien
agggtacttgtagtgaggacagacttggggtag

SEQ ID NO: 407771 - DNA, 33 bp, Homo sapien
gaagaccctggagttacgctgtgcctctctatt

SEQ ID NO: 407772 - DNA, 33 bp, Homo sapien
gaagaccctggagttatgctgtgcctctctatt

SEQ ID NO: 407773 - DNA, 33 bp, Homo sapien
gaaaaagcagtcatcacctcccatctacccgga

SEQ ID NO: 407774 - DNA, 33 bp, Homo sapien
gaaaaagcagtcatcatctcccatctacccgga

SEQ ID NO: 407775 - DNA, 33 bp, Homo sapien
aaaaacaatgggaagacgctgcaagttttgaag

SEQ ID NO: 407776 - DNA, 33 bp, Homo sapien
aaaaacaatgggaagatgctgcaagttttgaag

SEQ ID NO: 407777 - DNA, 33 bp, Homo sapien
taactttagagatgataaaaccaaggtcaaagg

SEQ ID NO: 407778 - DNA, 33 bp, Homo sapien
taactttagagatgatgaaaccaaggtcaaagg

SEQ ID NO: 407779 - DNA, 33 bp, Homo sapien
atactgattgacaatgcatattagccaggtaat

SEQ ID NO: 407780 - DNA, 33 bp, Homo sapien
atactgattgacaatgtatattagccaggtaat

SEQ ID NO: 407781 - DNA, 33 bp, Homo sapien
gtcttttttccacgaacggaatctcagctccca

SEQ ID NO: 407782 - DNA, 33 bp, Homo sapien
gtcttttttccacgaatggaatctcagctccca

SEQ ID NO: 407783 - DNA, 33 bp, Homo sapien
cctaacatattaggcaaaaaacttgcagtgaag

SEQ ID NO: 407784 - DNA, 33 bp, Homo sapien
cctaacatattaggcagaaaacttgcagtgaag

SEQ ID NO: 407785 - DNA, 33 bp, Homo sapien
gggagccttctctacaactttatcaggggctgg

SEQ ID NO: 407786 - DNA, 33 bp, Homo sapien
gggagccttctctacagctttatcaggggctgg

SEQ ID NO: 407787 - DNA, 33 bp, Homo sapien
tcatgatggctgctaaaatggaagcaattccac

SEQ ID NO: 407788 - DNA, 33 bp, Homo sapien
tcatgatggctgctaagatggaagcaattccac

SEQ ID NO: 407789 - DNA, 33 bp, Homo sapien
tctgaccgtttcactactagatagaaccaacat

SEQ ID NO: 407790 - DNA, 33 bp, Homo sapien
tctgaccgtttcactagtagatagaaccaacat

SEQ ID NO: 407791 - DNA, 33 bp, Homo sapien
tgatttttggatctgcaatatgattcctagatc

SEQ ID NO: 407792 - DNA, 33 bp, Homo sapien
tgatttttggatctgccatatgattcctagatc

SEQ ID NO: 407793 - DNA, 33 bp, Homo sapien
ctggtaacaagtttatcaaaagaacatccacac

SEQ ID NO: 407794 - DNA, 33 bp, Homo sapien
ctggtaacaagtttatgaaaagaacatccacac

SEQ ID NO: 407795 - DNA, 33 bp, Homo sapien
accctggaatttcctcaaagcagtcttactctg

SEQ ID NO: 407796 - DNA, 33 bp, Homo sapien
accctggaatttcctcgaagcagtcttactctg

SEQ ID NO: 407797 - DNA, 33 bp, Homo sapien
gtggttgctcaatttacctgatgtcacttaacg

SEQ ID NO: 407798 - DNA, 33 bp, Homo sapien
gtggttgctcaatttatctgatgtcacttaacg

SEQ ID NO: 407799 - DNA, 33 bp, Homo sapien
tctcttctgaaatcaacagtccccctagtagct

SEQ ID NO: 407800 - DNA, 33 bp, Homo sapien
tctcttctgaaatcaatagtccccctagtagct

SEQ ID NO: 407801 - DNA, 33 bp, Homo sapien
aaactatggtttctgcaacaataagaagaaaac

SEQ ID NO: 407802 - DNA, 33 bp, Homo sapien
aaactatggtttctgcgacaataagaagaaaac

SEQ ID NO: 407803 - DNA, 33 bp, Homo sapien
ctaggattttcacctaagagttgtgtctctaaa

SEQ ID NO: 407804 - DNA, 33 bp, Homo sapien
ctaggattttcacctaggagttgtgtctctaaa

SEQ ID NO: 407805 - DNA, 33 bp, Homo sapien
tagtgataaacacataccatagtgataagatca

SEQ ID NO: 407806 - DNA, 33 bp, Homo sapien
tagtgataaacacatagcatagtgataagatca

SEQ ID NO: 407807 - DNA, 33 bp, Homo sapien
aattgcattgtcagaacgtatgatctgaacgat

SEQ ID NO: 407808 - DNA, 33 bp, Homo sapien
aattgcattgtcagaaggtatgatctgaacgat

SEQ ID NO: 407809 - DNA, 33 bp, Homo sapien
atctttgtatttctaacccttctttcatatcct

SEQ ID NO: 407810 - DNA, 33 bp, Homo sapien
atctttgtatttctaatccttctttcatatcct

SEQ ID NO: 407811 - DNA, 33 bp, Homo sapien
aagggattttgctggaggctatagagaacatag

SEQ ID NO: 407812 - DNA, 33 bp, Homo sapien
aagggattttgctggatgctatagagaacatag

SEQ ID NO: 407813 - DNA, 33 bp, Homo sapien
agcatccttctaacaaattcccttttgatacaa

SEQ ID NO: 407814 - DNA, 33 bp, Homo sapien
agcatccttctaacaagttcccttttgatacaa

SEQ ID NO: 407815 - DNA, 33 bp, Homo sapien
ggattcagccactaaacggagaactggcatctg

SEQ ID NO: 407816 - DNA, 33 bp, Homo sapien
ggattcagccactaaatggagaactggcatctg

SEQ ID NO: 407817 - DNA, 33 bp, Homo sapien
gcactgacacccccagaacggccctgaaatgaa

SEQ ID NO: 407818 - DNA, 33 bp, Homo sapien
gcactgacacccccaggacggccctgaaatgaa

SEQ ID NO: 407819 - DNA, 33 bp, Homo sapien
atagtcaagaatggtaactgctagagaaacaac

SEQ ID NO: 407820 - DNA, 33 bp, Homo sapien
atagtcaagaatggtagctgctagagaaacaac

SEQ ID NO: 407821 - DNA, 33 bp, Homo sapien
gaggagggcagggagcaagatccttttggtgct

SEQ ID NO: 407822 - DNA, 33 bp, Homo sapien
gaggagggcagggagcgagatccttttggtgct

SEQ ID NO: 407823 - DNA, 33 bp, Homo sapien
ctgactttcagggccaacctcagaaggtcagtt

SEQ ID NO: 407824 - DNA, 33 bp, Homo sapien
ctgactttcagggccaccctcagaaggtcagtt

SEQ ID NO: 407825 - DNA, 33 bp, Homo sapien
ctgcctagaagacatcacatgaatccatagatg

SEQ ID NO: 407826 - DNA, 33 bp, Homo sapien
ctgcctagaagacatcgcatgaatccatagatg

SEQ ID NO: 407827 - DNA, 33 bp, Homo sapien
ggttggggctactgtcaacaggatttgctgatc

SEQ ID NO: 407828 - DNA, 33 bp, Homo sapien
ggttggggctactgtccacaggatttgctgatc

SEQ ID NO: 407829 - DNA, 33 bp, Homo sapien
cagcggagaggtctgcaagggctatgatggaat

SEQ ID NO: 407830 - DNA, 33 bp, Homo sapien
cagcggagaggtctgcgagggctatgatggaat

SEQ ID NO: 407831 - DNA, 33 bp, Homo sapien
actcacaatacaatacactcagtgcaacagcgg

SEQ ID NO: 407832 - DNA, 33 bp, Homo sapien
actcacaatacaatacgctcagtgcaacagcgg

SEQ ID NO: 407833 - DNA, 33 bp, Homo sapien
acccgctggaggagcaaaagttaagggaccaat

SEQ ID NO: 407834 - DNA, 33 bp, Homo sapien
acccgctggaggagcagaagttaagggaccaat

SEQ ID NO: 407835 - DNA, 33 bp, Homo sapien
ataagaggacctcccactgaccatattggtccc

SEQ ID NO: 407836 - DNA, 33 bp, Homo sapien
ataagaggacctcccattgaccatattggtccc

SEQ ID NO: 407837 - DNA, 33 bp, Homo sapien
gctgcttcctaaaaccacaagttgatctgaaat

SEQ ID NO: 407838 - DNA, 33 bp, Homo sapien
gctgcttcctaaaaccgcaagttgatctgaaat

SEQ ID NO: 407839 - DNA, 33 bp, Homo sapien
tcaggctctgacactaactaggagacttctggg

SEQ ID NO: 407840 - DNA, 33 bp, Homo sapien
tcaggctctgacactagctaggagacttctggg

SEQ ID NO: 407841 - DNA, 33 bp, Homo sapien
cagccagccaaggacccagtggaagatgctggc

SEQ ID NO: 407842 - DNA, 33 bp, Homo sapien
cagccagccaaggacctagtggaagatgctggc

SEQ ID NO: 407843 - DNA, 33 bp, Homo sapien
tcacagcccagggttgaaaaataaaactaagcc

SEQ ID NO: 407844 - DNA, 33 bp, Homo sapien
tcacagcccagggttggaaaataaaactaagcc

SEQ ID NO: 407845 - DNA, 33 bp, Homo sapien
gcatccggccctgggaaatatgatattgaacaa

SEQ ID NO: 407846 - DNA, 33 bp, Homo sapien
gcatccggccctgggagatatgatattgaacaa

SEQ ID NO: 407847 - DNA, 33 bp, Homo sapien
cacagacatggttagaaaattaacacaaggcag

SEQ ID NO: 407848 - DNA, 33 bp, Homo sapien
cacagacatggttagagaattaacacaaggcag

SEQ ID NO: 407849 - DNA, 33 bp, Homo sapien
caaggtcatacagttaagaaggtggctaaggca

SEQ ID NO: 407850 - DNA, 33 bp, Homo sapien
caaggtcatacagttaggaaggtggctaaggca

SEQ ID NO: 407851 - DNA, 33 bp, Homo sapien
tctttggagcaagcaaaatacaaagtgtgtctc

SEQ ID NO: 407852 - DNA, 33 bp, Homo sapien
tctttggagcaagcaacatacaaagtgtgtctc

SEQ ID NO: 407853 - DNA, 33 bp, Homo sapien
gagcagagatcaaattcaaacctagcatctttc

SEQ ID NO: 407854 - DNA, 33 bp, Homo sapien
gagcagagatcaaatttaaacctagcatctttc

SEQ ID NO: 407855 - DNA, 33 bp, Homo sapien
ttgtggagctttcagactctctgcaattggtct

SEQ ID NO: 407856 - DNA, 33 bp, Homo sapien
ttgtggagctttcagattctctgcaattggtct

SEQ ID NO: 407857 - DNA, 33 bp, Homo sapien
tccaacctcagctagtaacaaattaagactccc

SEQ ID NO: 407858 - DNA, 33 bp, Homo sapien
tccaacctcagctagtgacaaattaagactccc

SEQ ID NO: 407859 - DNA, 33 bp, Homo sapien
gttgctttgactgatgaactgatctcacagctg

SEQ ID NO: 407860 - DNA, 33 bp, Homo sapien
gttgctttgactgatgcactgatctcacagctg

SEQ ID NO: 407861 - DNA, 33 bp, Homo sapien
ttatttttcagttccacatttctgactccaggg

SEQ ID NO: 407862 - DNA, 33 bp, Homo sapien
ttatttttcagttccatatttctgactccaggg

SEQ ID NO: 407863 - DNA, 33 bp, Homo sapien
aaggtaagaatataccagagtcatgtgcaatgg

SEQ ID NO: 407864 - DNA, 33 bp, Homo sapien
aaggtaagaatataccggagtcatgtgcaatgg

SEQ ID NO: 407865 - DNA, 33 bp, Homo sapien
gagaccacagaatcaaccatttcatgaggttgt

SEQ ID NO: 407866 - DNA, 33 bp, Homo sapien
gagaccacagaatcaatcatttcatgaggttgt

SEQ ID NO: 407867 - DNA, 33 bp, Homo sapien
aatacttatttgcgaccaggtgcagtgactcac

SEQ ID NO: 407868 - DNA, 33 bp, Homo sapien
aatacttatttgcgacgaggtgcagtgactcac

SEQ ID NO: 407869 - DNA, 33 bp, Homo sapien
atgttgaaactgaatgaattatgtcttcagtaa

SEQ ID NO: 407870 - DNA, 33 bp, Homo sapien
atgttgaaactgaatgcattatgtcttcagtaa

SEQ ID NO: 407871 - DNA, 33 bp, Homo sapien
aagagaagacaaaggactagcataggagtgata

SEQ ID NO: 407872 - DNA, 33 bp, Homo sapien
aagagaagacaaaggattagcataggagtgata

SEQ ID NO: 407873 - DNA, 33 bp, Homo sapien
taattgataaatgttacatgcgttcatactgtt

SEQ ID NO: 407874 - DNA, 33 bp, Homo sapien
taattgataaatgttatatgcgttcatactgtt

SEQ ID NO: 407875 - DNA, 33 bp, Homo sapien
acagaaaagatggcaacagtacacacaaaactt

SEQ ID NO: 407876 - DNA, 33 bp, Homo sapien
acagaaaagatggcaatagtacacacaaaactt

SEQ ID NO: 407877 - DNA, 33 bp, Homo sapien
tctctaccaaaaatacaaaatttagctgagagt

SEQ ID NO: 407878 - DNA, 33 bp, Homo sapien
tctctaccaaaaatacgaaatttagctgagagt

SEQ ID NO: 407879 - DNA, 33 bp, Homo sapien
ttatggcacaaatcccaaactggctaataccaa

SEQ ID NO: 407880 - DNA, 33 bp, Homo sapien
ttatggcacaaatccccaactggctaataccaa

SEQ ID NO: 407881 - DNA, 33 bp, Homo sapien
tctcataaggctcaaaatgaagtattcctacat

SEQ ID NO: 407882 - DNA, 33 bp, Homo sapien
tctcataaggctcaaagtgaagtattcctacat

SEQ ID NO: 407883 - DNA, 33 bp, Homo sapien
agcagcattactatgactaaaagaagccagtct

SEQ ID NO: 407884 - DNA, 33 bp, Homo sapien
agcagcattactatgagtaaaagaagccagtct

SEQ ID NO: 407885 - DNA, 33 bp, Homo sapien
gattgacaggtcttctaaattccaaaatattca

SEQ ID NO: 407886 - DNA, 33 bp, Homo sapien
gattgacaggtcttctgaattccaaaatattca

SEQ ID NO: 407887 - DNA, 33 bp, Homo sapien
aaggaatttatgatataaactggcactttggaa

SEQ ID NO: 407888 - DNA, 33 bp, Homo sapien
aaggaatttatgatattaactggcactttggaa

SEQ ID NO: 407889 - DNA, 33 bp, Homo sapien
ccctaaacactttcaactatggacactctcttg

SEQ ID NO: 407890 - DNA, 33 bp, Homo sapien
ccctaaacactttcaattatggacactctcttg

SEQ ID NO: 407891 - DNA, 33 bp, Homo sapien
tttcccttcttggtccaccggggcagatacctg

SEQ ID NO: 407892 - DNA, 33 bp, Homo sapien
tttcccttcttggtccgccggggcagatacctg

SEQ ID NO: 407893 - DNA, 33 bp, Homo sapien
ttaatgagaagcaaaaggcaagtgaaggtctca

SEQ ID NO: 407894 - DNA, 33 bp, Homo sapien
ttaatgagaagcaaaatgcaagtgaaggtctca

SEQ ID NO: 407895 - DNA, 33 bp, Homo sapien
tcaatacataagttccagacatacattgtggag

SEQ ID NO: 407896 - DNA, 33 bp, Homo sapien
tcaatacataagttccggacatacattgtggag

SEQ ID NO: 407897 - DNA, 33 bp, Homo sapien
ccacaacagcacagaactgaagaggaggctttc

SEQ ID NO: 407898 - DNA, 33 bp, Homo sapien
ccacaacagcacagaattgaagaggaggctttc

SEQ ID NO: 407899 - DNA, 33 bp, Homo sapien
tctggcacagttcacaataaagagcacccgtag

SEQ ID NO: 407900 - DNA, 33 bp, Homo sapien
tctggcacagttcacagtaaagagcacccgtag

SEQ ID NO: 407901 - DNA, 33 bp, Homo sapien
tggctctctagcacccgctaatcaagccacttc

SEQ ID NO: 407902 - DNA, 33 bp, Homo sapien
tggctctctagcaccctctaatcaagccacttc

SEQ ID NO: 407903 - DNA, 33 bp, Homo sapien
tgggagccgtgggatcagaacagagtgttctag

SEQ ID NO: 407904 - DNA, 33 bp, Homo sapien
tgggagccgtgggatcggaacagagtgttctag

SEQ ID NO: 407905 - DNA, 33 bp, Homo sapien
ttcttccgggataatcagaaggggcttgaagga

SEQ ID NO: 407906 - DNA, 33 bp, Homo sapien
ttcttccgggataatcggaaggggcttgaagga

SEQ ID NO: 407907 - DNA, 33 bp, Homo sapien
taacactttacagtccaaagctcagtgaagtaa

SEQ ID NO: 407908 - DNA, 33 bp, Homo sapien
taacactttacagtccgaagctcagtgaagtaa

SEQ ID NO: 407909 - DNA, 33 bp, Homo sapien
ttctctgaaactacccaaattcagcacagcaaa

SEQ ID NO: 407910 - DNA, 33 bp, Homo sapien
ttctctgaaactacccgaattcagcacagcaaa

SEQ ID NO: 407911 - DNA, 33 bp, Homo sapien
cactcattccagagaccagccgaccagcctgcc

SEQ ID NO: 407912 - DNA, 33 bp, Homo sapien
cactcattccagagacgagccgaccagcctgcc

SEQ ID NO: 407913 - DNA, 33 bp, Homo sapien
atggcctaaaatataacggactcaaagataaat

SEQ ID NO: 407914 - DNA, 33 bp, Homo sapien
atggcctaaaatataatggactcaaagataaat

SEQ ID NO: 407915 - DNA, 33 bp, Homo sapien
cctcagccaagaactacgaccctgatttttgct

SEQ ID NO: 407916 - DNA, 33 bp, Homo sapien
cctcagccaagaactatgaccctgatttttgct

SEQ ID NO: 407917 - DNA, 33 bp, Homo sapien
acatagttcagcactacgtaaggaatgtctctc

SEQ ID NO: 407918 - DNA, 33 bp, Homo sapien
acatagttcagcactaggtaaggaatgtctctc

SEQ ID NO: 407919 - DNA, 33 bp, Homo sapien
gcttgctatggggcaaactctgttttcaaatag

SEQ ID NO: 407920 - DNA, 33 bp, Homo sapien
gcttgctatggggcaagctctgttttcaaatag

SEQ ID NO: 407921 - DNA, 33 bp, Homo sapien
ctatcaatgagggttaaaaaaacaacaacgaag

SEQ ID NO: 407922 - DNA, 33 bp, Homo sapien
ctatcaatgagggttataaaaacaacaacgaag

SEQ ID NO: 407923 - DNA, 33 bp, Homo sapien
gggtgctgccttagcccattgcgttatccctgt

SEQ ID NO: 407924 - DNA, 33 bp, Homo sapien
gggtgctgccttagcctattgcgttatccctgt

SEQ ID NO: 407925 - DNA, 33 bp, Homo sapien
gcaaacacataagaaccacatagtaaaagagtg

SEQ ID NO: 407926 - DNA, 33 bp, Homo sapien
gcaaacacataagaactacatagtaaaagagtg

SEQ ID NO: 407927 - DNA, 33 bp, Homo sapien
tctgcttcccaacttcccacttccaggcaggcc

SEQ ID NO: 407928 - DNA, 33 bp, Homo sapien
tctgcttcccaacttctcacttccaggcaggcc

SEQ ID NO: 407929 - DNA, 33 bp, Homo sapien
gaaacagaggctcaaaagcaaagaaggacttaa

SEQ ID NO: 407930 - DNA, 33 bp, Homo sapien
gaaacagaggctcaaaggcaaagaaggacttaa

SEQ ID NO: 407931 - DNA, 33 bp, Homo sapien
tccatctaaacttacaacaatgaatttctcttg

SEQ ID NO: 407932 - DNA, 33 bp, Homo sapien
tccatctaaacttacagcaatgaatttctcttg

SEQ ID NO: 407933 - DNA, 33 bp, Homo sapien
aaaccagtattgaacaagtctaacgtgccagac

SEQ ID NO: 407934 - DNA, 33 bp, Homo sapien
aaaccagtattgaacatgtctaacgtgccagac

SEQ ID NO: 407935 - DNA, 33 bp, Homo sapien
ctctgctttaaaaaagacctgagggcaggacct

SEQ ID NO: 407936 - DNA, 33 bp, Homo sapien
ctctgctttaaaaaaggcctgagggcaggacct

SEQ ID NO: 407937 - DNA, 33 bp, Homo sapien
agtgattgttaagctccgacaagtttgggaaac

SEQ ID NO: 407938 - DNA, 33 bp, Homo sapien
agtgattgttaagctctgacaagtttgggaaac

SEQ ID NO: 407939 - DNA, 33 bp, Homo sapien
tttcctcgttcaaataagtcttcaggattcact

SEQ ID NO: 407940 - DNA, 33 bp, Homo sapien
tttcctcgttcaaataggtcttcaggattcact

SEQ ID NO: 407941 - DNA, 33 bp, Homo sapien
agtagttttgtcttccccttgttgtgagtgctt

SEQ ID NO: 407942 - DNA, 33 bp, Homo sapien
agtagttttgtcttcctcttgttgtgagtgctt

SEQ ID NO: 407943 - DNA, 33 bp, Homo sapien
actttgaggagtcaagaaagtactgtattgagt

SEQ ID NO: 407944 - DNA, 33 bp, Homo sapien
actttgaggagtcaaggaagtactgtattgagt

SEQ ID NO: 407945 - DNA, 33 bp, Homo sapien
tcccattgttgacttcacgctgttccagccatg

SEQ ID NO: 407946 - DNA, 33 bp, Homo sapien
tcccattgttgacttcccgctgttccagccatg

SEQ ID NO: 407947 - DNA, 33 bp, Homo sapien
aacgtggtgttcatcacaaggaggaactcactt

SEQ ID NO: 407948 - DNA, 33 bp, Homo sapien
aacgtggtgttcatcataaggaggaactcactt

SEQ ID NO: 407949 - DNA, 33 bp, Homo sapien
aaaagagatgatgtaaactgcctgaggagtcag

SEQ ID NO: 407950 - DNA, 33 bp, Homo sapien
aaaagagatgatgtaacctgcctgaggagtcag

SEQ ID NO: 407951 - DNA, 33 bp, Homo sapien
ggttgcttcaggtcacactctggtagcagcaag

SEQ ID NO: 407952 - DNA, 33 bp, Homo sapien
ggttgcttcaggtcacgctctggtagcagcaag

SEQ ID NO: 407953 - DNA, 33 bp, Homo sapien
tttgggaaaagaacaaaagagtttccctgtatt

SEQ ID NO: 407954 - DNA, 33 bp, Homo sapien
tttgggaaaagaacaagagagtttccctgtatt

SEQ ID NO: 407955 - DNA, 33 bp, Homo sapien
aaagttcaggccagacaaaagcagagagaaccg

SEQ ID NO: 407956 - DNA, 33 bp, Homo sapien
aaagttcaggccagacgaaagcagagagaaccg

SEQ ID NO: 407957 - DNA, 33 bp, Homo sapien
cccacttttcttcatcacaaccttctgggccca

SEQ ID NO: 407958 - DNA, 33 bp, Homo sapien
cccacttttcttcatcgcaaccttctgggccca

SEQ ID NO: 407959 - DNA, 33 bp, Homo sapien
gggcctttaacactgacgaatggaagccgggca

SEQ ID NO: 407960 - DNA, 33 bp, Homo sapien
gggcctttaacactgatgaatggaagccgggca

SEQ ID NO: 407961 - DNA, 33 bp, Homo sapien
ctggggtgagtggacaaacaaacagccttgccc

SEQ ID NO: 407962 - DNA, 33 bp, Homo sapien
ctggggtgagtggacagacaaacagccttgccc

SEQ ID NO: 407963 - DNA, 33 bp, Homo sapien
tcacagataaggacaccggggctcagagattac

SEQ ID NO: 407964 - DNA, 33 bp, Homo sapien
tcacagataaggacactggggctcagagattac

SEQ ID NO: 407965 - DNA, 33 bp, Homo sapien
tactttcagttttgtacctaaacatttcagaaa

SEQ ID NO: 407966 - DNA, 33 bp, Homo sapien
tactttcagttttgtatctaaacatttcagaaa

SEQ ID NO: 407967 - DNA, 33 bp, Homo sapien
gatcagcctcatttaagaagtcaatctgcttta

SEQ ID NO: 407968 - DNA, 33 bp, Homo sapien
gatcagcctcatttaataagtcaatctgcttta

SEQ ID NO: 407969 - DNA, 33 bp, Homo sapien
gaaatcagactcaagaaagggagatgtttaaaa

SEQ ID NO: 407970 - DNA, 33 bp, Homo sapien
gaaatcagactcaagagagggagatgtttaaaa

SEQ ID NO: 407971 - DNA, 33 bp, Homo sapien
agctcttaaccaaacaacctgctggaaaggaaa

SEQ ID NO: 407972 - DNA, 33 bp, Homo sapien
agctcttaaccaaacaccctgctggaaaggaaa

SEQ ID NO: 407973 - DNA, 33 bp, Homo sapien
gtgattcctcagaataagcccattcctgccttg

SEQ ID NO: 407974 - DNA, 33 bp, Homo sapien
gtgattcctcagaataggcccattcctgccttg

SEQ ID NO: 407975 - DNA, 33 bp, Homo sapien
aggaaatagctgttgcagaatctaaggaaaagc

SEQ ID NO: 407976 - DNA, 33 bp, Homo sapien
aggaaatagctgttgcggaatctaaggaaaagc

SEQ ID NO: 407977 - DNA, 33 bp, Homo sapien
cacacacacacaccaaactggccaggtgcgatg

SEQ ID NO: 407978 - DNA, 33 bp, Homo sapien
cacacacacacaccaatctggccaggtgcgatg

SEQ ID NO: 407979 - DNA, 33 bp, Homo sapien
atgtgactagaaatccagatgtcggtgttagaa

SEQ ID NO: 407980 - DNA, 33 bp, Homo sapien
atgtgactagaaatccggatgtcggtgttagaa

SEQ ID NO: 407981 - DNA, 33 bp, Homo sapien
cctctcactagagacacaatcatgggatagaag

SEQ ID NO: 407982 - DNA, 33 bp, Homo sapien
cctctcactagagacagaatcatgggatagaag

SEQ ID NO: 407983 - DNA, 33 bp, Homo sapien
agtggtccttaacaaactctgcctacatccaga

SEQ ID NO: 407984 - DNA, 33 bp, Homo sapien
agtggtccttaacaaattctgcctacatccaga

SEQ ID NO: 407985 - DNA, 33 bp, Homo sapien
gtttctttgttcccttcaaggctgcacactatg

SEQ ID NO: 407986 - DNA, 33 bp, Homo sapien
gtttctttgttccctttaaggctgcacactatg

SEQ ID NO: 407987 - DNA, 33 bp, Homo sapien
agagggagattcagaacggcaagaagcccttcc

SEQ ID NO: 407988 - DNA, 33 bp, Homo sapien
agagggagattcagaatggcaagaagcccttcc

SEQ ID NO: 407989 - DNA, 33 bp, Homo sapien
ttgaaatgctggtgtaaagataaagttgtgcct

SEQ ID NO: 407990 - DNA, 33 bp, Homo sapien
ttgaaatgctggtgtagagataaagttgtgcct

SEQ ID NO: 407991 - DNA, 33 bp, Homo sapien
tagggactatgtatcacggataattgacttctt

SEQ ID NO: 407992 - DNA, 33 bp, Homo sapien
tagggactatgtatcatggataattgacttctt

SEQ ID NO: 407993 - DNA, 33 bp, Homo sapien
ctgccatttactaagaagatcttgggcaagtca

SEQ ID NO: 407994 - DNA, 33 bp, Homo sapien
ctgccatttactaagatgatcttgggcaagtca

SEQ ID NO: 407995 - DNA, 33 bp, Homo sapien
aggaacaagtgagagaactaagaagacagcatg

SEQ ID NO: 407996 - DNA, 33 bp, Homo sapien
aggaacaagtgagagagctaagaagacagcatg

SEQ ID NO: 407997 - DNA, 33 bp, Homo sapien
attacagacctagaaacagatgcccagacaagg

SEQ ID NO: 407998 - DNA, 33 bp, Homo sapien
attacagacctagaaatagatgcccagacaagg

SEQ ID NO: 407999 - DNA, 33 bp, Homo sapien
tctctctagctgatgaaaaagtcccaaagggct

SEQ ID NO: 408000 - DNA, 33 bp, Homo sapien
tctctctagctgatgacaaagtcccaaagggct

SEQ ID NO: 408001 - DNA, 33 bp, Homo sapien
tctatttaaggcaaaccagcccatacatagttc

SEQ ID NO: 408002 - DNA, 33 bp, Homo sapien
tctatttaaggcaaactagcccatacatagttc

SEQ ID NO: 408003 - DNA, 33 bp, Homo sapien
ggtatttgatcagtgacgatggtttttcgtgtt

SEQ ID NO: 408004 - DNA, 33 bp, Homo sapien
ggtatttgatcagtgaggatggtttttcgtgtt

SEQ ID NO: 408005 - DNA, 33 bp, Homo sapien
aagatgtactaacggacgcaaattccgccttct

SEQ ID NO: 408006 - DNA, 33 bp, Homo sapien
aagatgtactaacggatgcaaattccgccttct

SEQ ID NO: 408007 - DNA, 33 bp, Homo sapien
attttctgccttcaacaactgtaaataagtgca

SEQ ID NO: 408008 - DNA, 33 bp, Homo sapien
attttctgccttcaaccactgtaaataagtgca

SEQ ID NO: 408009 - DNA, 33 bp, Homo sapien
gcccagctgtcaaatgaactatttttgagtctc

SEQ ID NO: 408010 - DNA, 33 bp, Homo sapien
gcccagctgtcaaatggactatttttgagtctc

SEQ ID NO: 408011 - DNA, 33 bp, Homo sapien
agagtttaaactgtacaactgtgatcttgtggg

SEQ ID NO: 408012 - DNA, 33 bp, Homo sapien
agagtttaaactgtacgactgtgatcttgtggg

SEQ ID NO: 408013 - DNA, 33 bp, Homo sapien
cagagaccaacatccagggggataattacacac

SEQ ID NO: 408014 - DNA, 33 bp, Homo sapien
cagagaccaacatccatggggataattacacac

SEQ ID NO: 408015 - DNA, 33 bp, Homo sapien
tctagactgatggagaaaaaccatgctatggaa

SEQ ID NO: 408016 - DNA, 33 bp, Homo sapien
tctagactgatggagagaaaccatgctatggaa

SEQ ID NO: 408017 - DNA, 33 bp, Homo sapien
gatgtttcccagttagaattcacagatgagcaa

SEQ ID NO: 408018 - DNA, 33 bp, Homo sapien
gatgtttcccagttagtattcacagatgagcaa

SEQ ID NO: 408019 - DNA, 33 bp, Homo sapien
agatgggacattagaaatatttaccggggccgg

SEQ ID NO: 408020 - DNA, 33 bp, Homo sapien
agatgggacattagaagtatttaccggggccgg

SEQ ID NO: 408021 - DNA, 33 bp, Homo sapien
cttgcctggaaaagacggagatttcatgagaag

SEQ ID NO: 408022 - DNA, 33 bp, Homo sapien
cttgcctggaaaagactgagatttcatgagaag

SEQ ID NO: 408023 - DNA, 33 bp, Homo sapien
gagtacaaaaggtaggaaagagtgttgaggaag

SEQ ID NO: 408024 - DNA, 33 bp, Homo sapien
gagtacaaaaggtaggcaagagtgttgaggaag

SEQ ID NO: 408025 - DNA, 33 bp, Homo sapien
ggaggtctagggtggacagagtacaaaaggtag

SEQ ID NO: 408026 - DNA, 33 bp, Homo sapien
ggaggtctagggtggagagagtacaaaaggtag

SEQ ID NO: 408027 - DNA, 33 bp, Homo sapien
tccccaggctctgtaaacctgtcttctatgtcc

SEQ ID NO: 408028 - DNA, 33 bp, Homo sapien
tccccaggctctgtaaccctgtcttctatgtcc

SEQ ID NO: 408029 - DNA, 33 bp, Homo sapien
gaaaaatcctggagaccggagaaggtttctctc

SEQ ID NO: 408030 - DNA, 33 bp, Homo sapien
gaaaaatcctggagactggagaaggtttctctc

SEQ ID NO: 408031 - DNA, 33 bp, Homo sapien
aaacctgtcctgagaaagaatcatcaactctcc

SEQ ID NO: 408032 - DNA, 33 bp, Homo sapien
aaacctgtcctgagaacgaatcatcaactctcc

SEQ ID NO: 408033 - DNA, 33 bp, Homo sapien
atggaaacaggaagtcaccttaggcttgaagca

SEQ ID NO: 408034 - DNA, 33 bp, Homo sapien
atggaaacaggaagtcgccttaggcttgaagca

SEQ ID NO: 408035 - DNA, 33 bp, Homo sapien
agcaacaaagaaagtacagagggcgagcccaag

SEQ ID NO: 408036 - DNA, 33 bp, Homo sapien
agcaacaaagaaagtagagagggcgagcccaag

SEQ ID NO: 408037 - DNA, 33 bp, Homo sapien
aacacttcagttgggaaaggggctgtggcagac

SEQ ID NO: 408038 - DNA, 33 bp, Homo sapien
aacacttcagttgggacaggggctgtggcagac

SEQ ID NO: 408039 - DNA, 33 bp, Homo sapien
tcagtttcttgatctggaaaagggaatgataac

SEQ ID NO: 408040 - DNA, 33 bp, Homo sapien
tcagtttcttgatctgtaaaagggaatgataac

SEQ ID NO: 408041 - DNA, 33 bp, Homo sapien
agcttggggtggtccaatgctgtggttccacca

SEQ ID NO: 408042 - DNA, 33 bp, Homo sapien
agcttggggtggtccattgctgtggttccacca

SEQ ID NO: 408043 - DNA, 33 bp, Homo sapien
atgaacagaacagcccaaatctctgtcctcaag

SEQ ID NO: 408044 - DNA, 33 bp, Homo sapien
atgaacagaacagcccgaatctctgtcctcaag

SEQ ID NO: 408045 - DNA, 33 bp, Homo sapien
ctgagtaccttctgtaagtggcccaatccaggt

SEQ ID NO: 408046 - DNA, 33 bp, Homo sapien
ctgagtaccttctgtaggtggcccaatccaggt

SEQ ID NO: 408047 - DNA, 33 bp, Homo sapien
ccaaatagtggatgcccagaatgcaggatggcc

SEQ ID NO: 408048 - DNA, 33 bp, Homo sapien
ccaaatagtggatgcctagaatgcaggatggcc

SEQ ID NO: 408049 - DNA, 33 bp, Homo sapien
caccccacttgagaggaatggccttaggtctag

SEQ ID NO: 408050 - DNA, 33 bp, Homo sapien
caccccacttgagaggtatggccttaggtctag

SEQ ID NO: 408051 - DNA, 33 bp, Homo sapien
actgacattctatagaagacattcctctcctgg

SEQ ID NO: 408052 - DNA, 33 bp, Homo sapien
actgacattctatagaggacattcctctcctgg

SEQ ID NO: 408053 - DNA, 33 bp, Homo sapien
tcagcccttcctctgcacttgctgaatggtgct

SEQ ID NO: 408054 - DNA, 33 bp, Homo sapien
tcagcccttcctctgcccttgctgaatggtgct

SEQ ID NO: 408055 - DNA, 33 bp, Homo sapien
ttggccttgcacaacccatttgtgagcaaaagc

SEQ ID NO: 408056 - DNA, 33 bp, Homo sapien
ttggccttgcacaacctatttgtgagcaaaagc

SEQ ID NO: 408057 - DNA, 33 bp, Homo sapien
catgatgtgggctctacgttacatcagctggag

SEQ ID NO: 408058 - DNA, 33 bp, Homo sapien
catgatgtgggctctatgttacatcagctggag

SEQ ID NO: 408059 - DNA, 33 bp, Homo sapien
tccatgacctttggagacatcatttgatcattg

SEQ ID NO: 408060 - DNA, 33 bp, Homo sapien
tccatgacctttggaggcatcatttgatcattg

SEQ ID NO: 408061 - DNA, 33 bp, Homo sapien
ggaggatatctgaaataagaagtgaaggatgtg

SEQ ID NO: 408062 - DNA, 33 bp, Homo sapien
ggaggatatctgaaatgagaagtgaaggatgtg

SEQ ID NO: 408063 - DNA, 33 bp, Homo sapien
gaagatgaactgataaaagctggctttcattga

SEQ ID NO: 408064 - DNA, 33 bp, Homo sapien
gaagatgaactgataagagctggctttcattga

SEQ ID NO: 408065 - DNA, 33 bp, Homo sapien
tgctgcctatctgtaaataataaacctgcttca

SEQ ID NO: 408066 - DNA, 33 bp, Homo sapien
tgctgcctatctgtaagtaataaacctgcttca

SEQ ID NO: 408067 - DNA, 33 bp, Homo sapien
caaaggtcagggcatacgtaggagtttccaaag

SEQ ID NO: 408068 - DNA, 33 bp, Homo sapien
caaaggtcagggcataggtaggagtttccaaag

SEQ ID NO: 408069 - DNA, 33 bp, Homo sapien
gcaaaagctacaatgaactaaaatgaaaaagac

SEQ ID NO: 408070 - DNA, 33 bp, Homo sapien
gcaaaagctacaatgagctaaaatgaaaaagac

SEQ ID NO: 408071 - DNA, 33 bp, Homo sapien
ttagaggatttcaataacttgctcaatattatc

SEQ ID NO: 408072 - DNA, 33 bp, Homo sapien
ttagaggatttcaataccttgctcaatattatc

SEQ ID NO: 408073 - DNA, 33 bp, Homo sapien
cctcagctctaggaacaggagcttctcctctcc

SEQ ID NO: 408074 - DNA, 33 bp, Homo sapien
cctcagctctaggaacgggagcttctcctctcc

SEQ ID NO: 408075 - DNA, 33 bp, Homo sapien
aatagacatacaaaaacatgttcaatatcgtta

SEQ ID NO: 408076 - DNA, 33 bp, Homo sapien
aatagacatacaaaaagatgttcaatatcgtta

SEQ ID NO: 408077 - DNA, 33 bp, Homo sapien
gctcctggtggagagacagctgctgccacgccc

SEQ ID NO: 408078 - DNA, 33 bp, Homo sapien
gctcctggtggagagagagctgctgccacgccc

SEQ ID NO: 408079 - DNA, 33 bp, Homo sapien
ttgactcatttgtaccgcggggccagagtctct

SEQ ID NO: 408080 - DNA, 33 bp, Homo sapien
ttgactcatttgtacctcggggccagagtctct

SEQ ID NO: 408081 - DNA, 33 bp, Homo sapien
aggaagtagaagctcaagaaagattttgaagaa

SEQ ID NO: 408082 - DNA, 33 bp, Homo sapien
aggaagtagaagctcacgaaagattttgaagaa

SEQ ID NO: 408083 - DNA, 33 bp, Homo sapien
gggttattagaaagtaacacacgtaaaaggctg

SEQ ID NO: 408084 - DNA, 33 bp, Homo sapien
gggttattagaaagtagcacacgtaaaaggctg

SEQ ID NO: 408085 - DNA, 33 bp, Homo sapien
gtcgcataggcaaacacctgtgaatgcataagg

SEQ ID NO: 408086 - DNA, 33 bp, Homo sapien
gtcgcataggcaaacatctgtgaatgcataagg

SEQ ID NO: 408087 - DNA, 33 bp, Homo sapien
taaataaacagaagccacctttgtgggatattg

SEQ ID NO: 408088 - DNA, 33 bp, Homo sapien
taaataaacagaagccgcctttgtgggatattg

SEQ ID NO: 408089 - DNA, 33 bp, Homo sapien
aaggagctggagaagaaaggcagaaaaattggg

SEQ ID NO: 408090 - DNA, 33 bp, Homo sapien
aaggagctggagaagagaggcagaaaaattggg

SEQ ID NO: 408091 - DNA, 33 bp, Homo sapien
tccagggggagcagggccagtctttcaagcagg

SEQ ID NO: 408092 - DNA, 33 bp, Homo sapien
tccagggggagcaggggcagtctttcaagcagg

SEQ ID NO: 408093 - DNA, 33 bp, Homo sapien
gctccagcttcccagacagaaaagtagaacccc

SEQ ID NO: 408094 - DNA, 33 bp, Homo sapien
gctccagcttcccagatagaaaagtagaacccc

SEQ ID NO: 408095 - DNA, 33 bp, Homo sapien
gatgccacaacaaatcagaacaacaatgctcac

SEQ ID NO: 408096 - DNA, 33 bp, Homo sapien
gatgccacaacaaatcggaacaacaatgctcac

SEQ ID NO: 408097 - DNA, 33 bp, Homo sapien
tgaattctggaaaggaaatgcaggtttaagtat

SEQ ID NO: 408098 - DNA, 33 bp, Homo sapien
tgaattctggaaaggagatgcaggtttaagtat

SEQ ID NO: 408099 - DNA, 33 bp, Homo sapien
acaggacctcatgccaatatcagcaaccaccat

SEQ ID NO: 408100 - DNA, 33 bp, Homo sapien
acaggacctcatgccagtatcagcaaccaccat

SEQ ID NO: 408101 - DNA, 33 bp, Homo sapien
ttaaactagcacacacagattggccggcacctg

SEQ ID NO: 408102 - DNA, 33 bp, Homo sapien
ttaaactagcacacacggattggccggcacctg

SEQ ID NO: 408103 - DNA, 33 bp, Homo sapien
ggatgatccagggaaaatggaggcctgaggaca

SEQ ID NO: 408104 - DNA, 33 bp, Homo sapien
ggatgatccagggaaagtggaggcctgaggaca

SEQ ID NO: 408105 - DNA, 33 bp, Homo sapien
gaggtggcagccgagacataaggcacctgttcc

SEQ ID NO: 408106 - DNA, 33 bp, Homo sapien
gaggtggcagccgagatataaggcacctgttcc

SEQ ID NO: 408107 - DNA, 33 bp, Homo sapien
taggaggctgtttgtaataatccaggctaaaag

SEQ ID NO: 408108 - DNA, 33 bp, Homo sapien
taggaggctgtttgtagtaatccaggctaaaag

SEQ ID NO: 408109 - DNA, 33 bp, Homo sapien
agacagtcattggcgaccatatcccgaccgtat

SEQ ID NO: 408110 - DNA, 33 bp, Homo sapien
agacagtcattggcgatcatatcccgaccgtat

SEQ ID NO: 408111 - DNA, 33 bp, Homo sapien
attggattttgtagaaatacatcaacgtgaaat

SEQ ID NO: 408112 - DNA, 33 bp, Homo sapien
attggattttgtagaagtacatcaacgtgaaat

SEQ ID NO: 408113 - DNA, 33 bp, Homo sapien
ccttagtttgctcaacggccaaatggagataat

SEQ ID NO: 408114 - DNA, 33 bp, Homo sapien
ccttagtttgctcaactgccaaatggagataat

SEQ ID NO: 408115 - DNA, 33 bp, Homo sapien
cttcgctgctgagttcacggaggcctaggagag

SEQ ID NO: 408116 - DNA, 33 bp, Homo sapien
cttcgctgctgagttctcggaggcctaggagag

SEQ ID NO: 408117 - DNA, 33 bp, Homo sapien
cgtgggccgcgtgggaaagaatgcgaggctgcc

SEQ ID NO: 408118 - DNA, 33 bp, Homo sapien
cgtgggccgcgtgggagagaatgcgaggctgcc

SEQ ID NO: 408119 - DNA, 33 bp, Homo sapien
aggattttctatcaccagaatacagtagatttt

SEQ ID NO: 408120 - DNA, 33 bp, Homo sapien
aggattttctatcaccggaatacagtagatttt

SEQ ID NO: 408121 - DNA, 33 bp, Homo sapien
agggagtgggcaaagaaaggaagaatcctgaac

SEQ ID NO: 408122 - DNA, 33 bp, Homo sapien
agggagtgggcaaagagaggaagaatcctgaac

SEQ ID NO: 408123 - DNA, 33 bp, Homo sapien
agatagggccaagtacaacgcaccttgacggat

SEQ ID NO: 408124 - DNA, 33 bp, Homo sapien
agatagggccaagtacgacgcaccttgacggat

SEQ ID NO: 408125 - DNA, 33 bp, Homo sapien
ccatgatgcaactcaggatcttttggggaagag

SEQ ID NO: 408126 - DNA, 33 bp, Homo sapien
ccatgatgcaactcagtatcttttggggaagag

SEQ ID NO: 408127 - DNA, 33 bp, Homo sapien
agatttcaccaaacgaaggtttcactgtagatt

SEQ ID NO: 408128 - DNA, 33 bp, Homo sapien
agatttcaccaaacgacggtttcactgtagatt

SEQ ID NO: 408129 - DNA, 33 bp, Homo sapien
catcggtgaactttgaatacggactgcacatta

SEQ ID NO: 408130 - DNA, 33 bp, Homo sapien
catcggtgaactttgagtacggactgcacatta

SEQ ID NO: 408131 - DNA, 33 bp, Homo sapien
tgaaaaggatcaactacagggccggcaacaggc

SEQ ID NO: 408132 - DNA, 33 bp, Homo sapien
tgaaaaggatcaactatagggccggcaacaggc

SEQ ID NO: 408133 - DNA, 33 bp, Homo sapien
ttccagccacgtcatcccgtgatcctttccatg

SEQ ID NO: 408134 - DNA, 33 bp, Homo sapien
ttccagccacgtcatcgcgtgatcctttccatg

SEQ ID NO: 408135 - DNA, 33 bp, Homo sapien
acaatagttctccagcaaaagggagggaggcag

SEQ ID NO: 408136 - DNA, 33 bp, Homo sapien
acaatagttctccagcgaaagggagggaggcag

SEQ ID NO: 408137 - DNA, 33 bp, Homo sapien
aggagaggacccagaaactttttatgctccttg

SEQ ID NO: 408138 - DNA, 33 bp, Homo sapien
aggagaggacccagaatctttttatgctccttg

SEQ ID NO: 408139 - DNA, 33 bp, Homo sapien
ttggactggaattggacgcatctgtaggaatcc

SEQ ID NO: 408140 - DNA, 33 bp, Homo sapien
ttggactggaattggaggcatctgtaggaatcc

SEQ ID NO: 408141 - DNA, 33 bp, Homo sapien
tagaacatagtttgaaaggacagagcaagcatg

SEQ ID NO: 408142 - DNA, 33 bp, Homo sapien
tagaacatagtttgaagggacagagcaagcatg

SEQ ID NO: 408143 - DNA, 33 bp, Homo sapien
gctgctgtactcaaaactggagaaatagacagg

SEQ ID NO: 408144 - DNA, 33 bp, Homo sapien
gctgctgtactcaaaattggagaaatagacagg

SEQ ID NO: 408145 - DNA, 33 bp, Homo sapien
ttataggtgtacatcaacatacctggctaattt

SEQ ID NO: 408146 - DNA, 33 bp, Homo sapien
ttataggtgtacatcatcatacctggctaattt

SEQ ID NO: 408147 - DNA, 33 bp, Homo sapien
ctttctcgaaagagtcaatcgatgtagcaaact

SEQ ID NO: 408148 - DNA, 33 bp, Homo sapien
ctttctcgaaagagtcgatcgatgtagcaaact

SEQ ID NO: 408149 - DNA, 33 bp, Homo sapien
gccacgtggcatgtccaggaagagccagttctc

SEQ ID NO: 408150 - DNA, 33 bp, Homo sapien
gccacgtggcatgtccgggaagagccagttctc

SEQ ID NO: 408151 - DNA, 33 bp, Homo sapien
aagttaccctcggcccagacgttgccttccttt

SEQ ID NO: 408152 - DNA, 33 bp, Homo sapien
aagttaccctcggcccggacgttgccttccttt

SEQ ID NO: 408153 - DNA, 33 bp, Homo sapien
atgatagcgatggagacacattagttgttgatg

SEQ ID NO: 408154 - DNA, 33 bp, Homo sapien
atgatagcgatggagatacattagttgttgatg

SEQ ID NO: 408155 - DNA, 33 bp, Homo sapien
tccatattgtcttgtcaccttttctttctcttc

SEQ ID NO: 408156 - DNA, 33 bp, Homo sapien
tccatattgtcttgtcgccttttctttctcttc

SEQ ID NO: 408157 - DNA, 33 bp, Homo sapien
tcagtagcctcgtgtacgcccgtgcccagtcac

SEQ ID NO: 408158 - DNA, 33 bp, Homo sapien
tcagtagcctcgtgtatgcccgtgcccagtcac

SEQ ID NO: 408159 - DNA, 33 bp, Homo sapien
ttctgagtcaaagtctcagaagtcatgttcttc

SEQ ID NO: 408160 - DNA, 33 bp, Homo sapien
ttctgagtcaaagtctgagaagtcatgttcttc

SEQ ID NO: 408161 - DNA, 33 bp, Homo sapien
acattctatagctttcaacaaacataatgatat

SEQ ID NO: 408162 - DNA, 33 bp, Homo sapien
acattctatagctttcgacaaacataatgatat

SEQ ID NO: 408163 - DNA, 33 bp, Homo sapien
tcagaactggccctgcacaaggtaaagtctcca

SEQ ID NO: 408164 - DNA, 33 bp, Homo sapien
tcagaactggccctgcgcaaggtaaagtctcca

SEQ ID NO: 408165 - DNA, 33 bp, Homo sapien
ccagggccacatggacagatctcagaaatataa

SEQ ID NO: 408166 - DNA, 33 bp, Homo sapien
ccagggccacatggaccgatctcagaaatataa

SEQ ID NO: 408167 - DNA, 33 bp, Homo sapien
tttaaacttcatttgcagacatttgagttagtt

SEQ ID NO: 408168 - DNA, 33 bp, Homo sapien
tttaaacttcatttgccgacatttgagttagtt

SEQ ID NO: 408169 - DNA, 33 bp, Homo sapien
gtaaagaaagaactcaactggaaactgagagca

SEQ ID NO: 408170 - DNA, 33 bp, Homo sapien
gtaaagaaagaactcagctggaaactgagagca

SEQ ID NO: 408171 - DNA, 33 bp, Homo sapien; identical to SEQ ID NO: 408169

SEQ ID NO: 408172 - DNA, 33 bp, Homo sapien; identical to SEQ ID NO: 408170

SEQ ID NO: 408173 - DNA, 33 bp, Homo sapien
gttaatgaaaagagggccccgcttagacacact

SEQ ID NO: 408174 - DNA, 33 bp, Homo sapien
gttaatgaaaagagggtcccgcttagacacact

SEQ ID NO: 408175 - DNA, 33 bp, Homo sapien
aaaaatccaagagaacaaaagatagaaaagtaa

SEQ ID NO: 408176 - DNA, 33 bp, Homo sapien
aaaaatccaagagaactaaagatagaaaagtaa

SEQ ID NO: 408177 - DNA, 33 bp, Homo sapien
attttcctttcagggccatatagactgttcgtc

SEQ ID NO: 408178 - DNA, 33 bp, Homo sapien
attttcctttcagggctatatagactgttcgtc

SEQ ID NO: 408179 - DNA, 33 bp, Homo sapien
aagctttggaaactataaagtggctctctggag

SEQ ID NO: 408180 - DNA, 33 bp, Homo sapien
aagctttggaaactatcaagtggctctctggag

SEQ ID NO: 408181 - DNA, 33 bp, Homo sapien
gtgcagagatctgggcaagttggagtcccactg

SEQ ID NO: 408182 - DNA, 33 bp, Homo sapien
gtgcagagatctgggcgagttggagtcccactg

SEQ ID NO: 408183 - DNA, 33 bp, Homo sapien
ctagagaacctgggtaaggaccaacagatcacc

SEQ ID NO: 408184 - DNA, 33 bp, Homo sapien
ctagagaacctgggtagggaccaacagatcacc

SEQ ID NO: 408185 - DNA, 33 bp, Homo sapien
gggccacatgctgatacgtgagaggcggtgggg

SEQ ID NO: 408186 - DNA, 33 bp, Homo sapien
gggccacatgctgataggtgagaggcggtgggg

SEQ ID NO: 408187 - DNA, 33 bp, Homo sapien
cggaagtgagtgatcgaaagcatggcgtcggtg

SEQ ID NO: 408188 - DNA, 33 bp, Homo sapien
cggaagtgagtgatcgcaagcatggcgtcggtg

SEQ ID NO: 408189 - DNA, 33 bp, Homo sapien
cttgaactgagtaggccaaaaatttgctttcct

SEQ ID NO: 408190 - DNA, 33 bp, Homo sapien
cttgaactgagtaggctaaaaatttgctttcct

SEQ ID NO: 408191 - DNA, 33 bp, Homo sapien
agagagaccttcacaaataataagacccaagaa

SEQ ID NO: 408192 - DNA, 33 bp, Homo sapien
agagagaccttcacaagtaataagacccaagaa

SEQ ID NO: 408193 - DNA, 33 bp, Homo sapien
ggggagctcagattgccgagtacaagtgtgctg

SEQ ID NO: 408194 - DNA, 33 bp, Homo sapien
ggggagctcagattgctgagtacaagtgtgctg

SEQ ID NO: 408195 - DNA, 33 bp, Homo sapien
cccagatccacataaactcgctcatggatgacc

SEQ ID NO: 408196 - DNA, 33 bp, Homo sapien
cccagatccacataaagtcgctcatggatgacc

SEQ ID NO: 408197 - DNA, 33 bp, Homo sapien
taagcttggagcccaacgcaatcctgactaccc

SEQ ID NO: 408198 - DNA, 33 bp, Homo sapien
taagcttggagcccaatgcaatcctgactaccc

SEQ ID NO: 408199 - DNA, 33 bp, Homo sapien
tgttcaatgtattcatcaagtgcttactgtatg

SEQ ID NO: 408200 - DNA, 33 bp, Homo sapien
tgttcaatgtattcatgaagtgcttactgtatg

SEQ ID NO: 408201 - DNA, 33 bp, Homo sapien
tgccagcttcctagaaaagccaggttctgggcc

SEQ ID NO: 408202 - DNA, 33 bp, Homo sapien
tgccagcttcctagaagagccaggttctgggcc

SEQ ID NO: 408203 - DNA, 33 bp, Homo sapien
gcctactccttatttaacaaatccccgctgtgc

SEQ ID NO: 408204 - DNA, 33 bp, Homo sapien
gcctactccttatttatcaaatccccgctgtgc

SEQ ID NO: 408205 - DNA, 33 bp, Homo sapien
acataatatatgtaaaccacagtctgaggcaca

SEQ ID NO: 408206 - DNA, 33 bp, Homo sapien
acataatatatgtaaagcacagtctgaggcaca

SEQ ID NO: 408207 - DNA, 33 bp, Homo sapien
aaggctgccaacagacaacaggcttcactttct

SEQ ID NO: 408208 - DNA, 33 bp, Homo sapien
aaggctgccaacagacgacaggcttcactttct

SEQ ID NO: 408209 - DNA, 33 bp, Homo sapien
agcattgctgtagcagaacaagccacaaacaaa

SEQ ID NO: 408210 - DNA, 33 bp, Homo sapien
agcattgctgtagcaggacaagccacaaacaaa

SEQ ID NO: 408211 - DNA, 33 bp, Homo sapien
tcacagtgcttttctacataatgtctgtaatct

SEQ ID NO: 408212 - DNA, 33 bp, Homo sapien
tcacagtgcttttctatataatgtctgtaatct

SEQ ID NO: 408213 - DNA, 33 bp, Homo sapien
caatcagttacaggaactaatgtgtttgatgag

SEQ ID NO: 408214 - DNA, 33 bp, Homo sapien
caatcagttacaggaattaatgtgtttgatgag

SEQ ID NO: 408215 - DNA, 33 bp, Homo sapien
gggtgggaattctgacagatttgaaagtaggag

SEQ ID NO: 408216 - DNA, 33 bp, Homo sapien
gggtgggaattctgactgatttgaaagtaggag

SEQ ID NO: 408217 - DNA, 33 bp, Homo sapien
ttgggagttagttgacaggaaagcaaatcccag

SEQ ID NO: 408218 - DNA, 33 bp, Homo sapien
ttgggagttagttgacgggaaagcaaatcccag

SEQ ID NO: 408219 - DNA, 33 bp, Homo sapien
aataagcaagagccctcacttgtccatgaaatt

SEQ ID NO: 408220 - DNA, 33 bp, Homo sapien
aataagcaagagccctgacttgtccatgaaatt

SEQ ID NO: 408221 - DNA, 33 bp, Homo sapien
accagcaggaactggacagaaaacacgagccag

SEQ ID NO: 408222 - DNA, 33 bp, Homo sapien
accagcaggaactggagagaaaacacgagccag

SEQ ID NO: 408223 - DNA, 33 bp, Homo sapien
tatgattatgcccagcaatctgaatctcataaa

SEQ ID NO: 408224 - DNA, 33 bp, Homo sapien
tatgattatgcccagcgatctgaatctcataaa

SEQ ID NO: 408225 - DNA, 33 bp, Homo sapien
gagttagaggaaaaacagcagtgccagttgttc

SEQ ID NO: 408226 - DNA, 33 bp, Homo sapien
gagttagaggaaaaaccgcagtgccagttgttc

SEQ ID NO: 408227 - DNA, 33 bp, Homo sapien
tccacctgtgcactgaaatggataggtagccac

SEQ ID NO: 408228 - DNA, 33 bp, Homo sapien
tccacctgtgcactgagatggataggtagccac

SEQ ID NO: 408229 - DNA, 33 bp, Homo sapien
ctatggaactggagtacgtcctcaagaaggtac

SEQ ID NO: 408230 - DNA, 33 bp, Homo sapien
ctatggaactggagtatgtcctcaagaaggtac

SEQ ID NO: 408231 - DNA, 33 bp, Homo sapien
tttgtcttgctaagagaaaaattgttatgaaat

SEQ ID NO: 408232 - DNA, 33 bp, Homo sapien
tttgtcttgctaagaggaaaattgttatgaaat

SEQ ID NO: 408233 - DNA, 33 bp, Homo sapien
acttctctggaggagacgtttgaatgaagagga

SEQ ID NO: 408234 - DNA, 33 bp, Homo sapien
acttctctggaggagatgtttgaatgaagagga

SEQ ID NO: 408235 - DNA, 33 bp, Homo sapien
ccactttgtcacaggaaactggaaatagccatg

SEQ ID NO: 408236 - DNA, 33 bp, Homo sapien
ccactttgtcacaggacactggaaatagccatg

SEQ ID NO: 408237 - DNA, 33 bp, Homo sapien
gctaagatacacaccacaatcttaacaatggct

SEQ ID NO: 408238 - DNA, 33 bp, Homo sapien
gctaagatacacaccagaatcttaacaatggct

SEQ ID NO: 408239 - DNA, 33 bp, Homo sapien
aatcacaaaccacagcaacatactcctaagaag

SEQ ID NO: 408240 - DNA, 33 bp, Homo sapien
aatcacaaaccacagcgacatactcctaagaag

SEQ ID NO: 408241 - DNA, 33 bp, Homo sapien
ttgtcatcctcagaacccctacacatacacttc

SEQ ID NO: 408242 - DNA, 33 bp, Homo sapien
ttgtcatcctcagaactcctacacatacacttc

SEQ ID NO: 408243 - DNA, 33 bp, Homo sapien
ccctttcctttctccaacttcttcagctctatt

SEQ ID NO: 408244 - DNA, 33 bp, Homo sapien
ccctttcctttctccagcttcttcagctctatt

SEQ ID NO: 408245 - DNA, 33 bp, Homo sapien
ggacagtcttgggtacacatcacttaacctctc

SEQ ID NO: 408246 - DNA, 33 bp, Homo sapien
ggacagtcttgggtacgcatcacttaacctctc

SEQ ID NO: 408247 - DNA, 33 bp, Homo sapien
gccacactgtgaaactcactgcggacgacagat

SEQ ID NO: 408248 - DNA, 33 bp, Homo sapien
gccacactgtgaaactgactgcggacgacagat

SEQ ID NO: 408249 - DNA, 33 bp, Homo sapien
tccatgatgctcttccactgaggactcttggtc

SEQ ID NO: 408250 - DNA, 33 bp, Homo sapien
tccatgatgctcttccgctgaggactcttggtc

SEQ ID NO: 408251 - DNA, 33 bp, Homo sapien
cccaggactagggttacgaggcctgcatgaatt

SEQ ID NO: 408252 - DNA, 33 bp, Homo sapien
cccaggactagggttaggaggcctgcatgaatt

SEQ ID NO: 408253 - DNA, 33 bp, Homo sapien
ccaaggatgtcctcaacagtagctcactgggag

SEQ ID NO: 408254 - DNA, 33 bp, Homo sapien
ccaaggatgtcctcaatagtagctcactgggag

SEQ ID NO: 408255 - DNA, 33 bp, Homo sapien
ttgtctgcagactgaacggaatgaataaggcag

SEQ ID NO: 408256 - DNA, 33 bp, Homo sapien
ttgtctgcagactgaatggaatgaataaggcag

SEQ ID NO: 408257 - DNA, 33 bp, Homo sapien
agcttctccagccctgaattgagcaaggtccgc

SEQ ID NO: 408258 - DNA, 33 bp, Homo sapien
agcttctccagccctgtattgagcaaggtccgc

SEQ ID NO: 408259 - DNA, 33 bp, Homo sapien
ttgtatgaaagcagacaaatggacaacatgacc

SEQ ID NO: 408260 - DNA, 33 bp, Homo sapien
ttgtatgaaagcagacgaatggacaacatgacc

SEQ ID NO: 408261 - DNA, 33 bp, Homo sapien
gtaggtgcatgtgcgaagtgaagctctttcctt

SEQ ID NO: 408262 - DNA, 33 bp, Homo sapien
gtaggtgcatgtgcgatgtgaagctctttcctt

SEQ ID NO: 408263 - DNA, 33 bp, Homo sapien
cccagactcgggtaggcagcatgaaaggaatta

SEQ ID NO: 408264 - DNA, 33 bp, Homo sapien
cccagactcgggtagggagcatgaaaggaatta

SEQ ID NO: 408265 - DNA, 33 bp, Homo sapien
agaggaggagcaggaacagcaagcttgtgcgga

SEQ ID NO: 408266 - DNA, 33 bp, Homo sapien
agaggaggagcaggaatagcaagcttgtgcgga

SEQ ID NO: 408267 - DNA, 33 bp, Homo sapien
gcagcaaggccagatcaatacgatgaaaaacaa

SEQ ID NO: 408268 - DNA, 33 bp, Homo sapien
gcagcaaggccagatcgatacgatgaaaaacaa

SEQ ID NO: 408269 - DNA, 33 bp, Homo sapien
ctcagtggcaacgctccctcacaaaccgtctga

SEQ ID NO: 408270 - DNA, 33 bp, Homo sapien
ctcagtggcaacgctcgctcacaaaccgtctga

SEQ ID NO: 408271 - DNA, 33 bp, Homo sapien
tgcctctctcccttcgaagcatttcctgtgcct

SEQ ID NO: 408272 - DNA, 33 bp, Homo sapien
tgcctctctcccttcggagcatttcctgtgcct

SEQ ID NO: 408273 - DNA, 33 bp, Homo sapien
cacgtcatacaaaacacgtccagaactgagctc

SEQ ID NO: 408274 - DNA, 33 bp, Homo sapien
cacgtcatacaaaacaggtccagaactgagctc

SEQ ID NO: 408275 - DNA, 33 bp, Homo sapien
ctgagctaggacatcaactatgggacacgtcat

SEQ ID NO: 408276 - DNA, 33 bp, Homo sapien
ctgagctaggacatcatctatgggacacgtcat

SEQ ID NO: 408277 - DNA, 33 bp, Homo sapien
cctgtcaccagaccagactaatgttttacattt

SEQ ID NO: 408278 - DNA, 33 bp, Homo sapien
cctgtcaccagaccaggctaatgttttacattt

SEQ ID NO: 408279 - DNA, 33 bp, Homo sapien
gtgccacactgacaaactgtactatgagaaagc

SEQ ID NO: 408280 - DNA, 33 bp, Homo sapien
gtgccacactgacaaattgtactatgagaaagc

SEQ ID NO: 408281 - DNA, 33 bp, Homo sapien
ataataggttccttacagaaatcaaacaaaaaa

SEQ ID NO: 408282 - DNA, 33 bp, Homo sapien
ataataggttccttactgaaatcaaacaaaaaa

SEQ ID NO: 408283 - DNA, 33 bp, Homo sapien
aggcgagagaataggacgggggaatcaggagtg

SEQ ID NO: 408284 - DNA, 33 bp, Homo sapien
aggcgagagaataggatgggggaatcaggagtg

SEQ ID NO: 408285 - DNA, 33 bp, Homo sapien
aagggggtagtggtagaaacttcggagggagag

SEQ ID NO: 408286 - DNA, 33 bp, Homo sapien
aagggggtagtggtaggaacttcggagggagag

SEQ ID NO: 408287 - DNA, 33 bp, Homo sapien
tggcttggagcctccacgaagacctatgggccc

SEQ ID NO: 408288 - DNA, 33 bp, Homo sapien
tggcttggagcctccaggaagacctatgggccc

SEQ ID NO: 408289 - DNA, 33 bp, Homo sapien
tcacctggtaaatgccacccctcaatcctgcca

SEQ ID NO: 408290 - DNA, 33 bp, Homo sapien
tcacctggtaaatgcctcccctcaatcctgcca

SEQ ID NO: 408291 - DNA, 33 bp, Homo sapien
ccatgtgaaatatagactcagaagactgctgtt

SEQ ID NO: 408292 - DNA, 33 bp, Homo sapien
ccatgtgaaatatagattcagaagactgctgtt

SEQ ID NO: 408293 - DNA, 33 bp, Homo sapien
tggctggagaatcaaactcagctactactcctt

SEQ ID NO: 408294 - DNA, 33 bp, Homo sapien
tggctggagaatcaaattcagctactactcctt

SEQ ID NO: 408295 - DNA, 33 bp, Homo sapien
ttatctgtagtggtaacgcacactgaactgtgg

SEQ ID NO: 408296 - DNA, 33 bp, Homo sapien
ttatctgtagtggtaatgcacactgaactgtgg

SEQ ID NO: 408297 - DNA, 33 bp, Homo sapien
aacatgtccataaaccaagaaagaggaaagaaa

SEQ ID NO: 408298 - DNA, 33 bp, Homo sapien
aacatgtccataaaccgagaaagaggaaagaaa

SEQ ID NO: 408299 - DNA, 33 bp, Homo sapien
attctacctgtctccacgtttaatcaccagcat

SEQ ID NO: 408300 - DNA, 33 bp, Homo sapien
attctacctgtctccatgtttaatcaccagcat

SEQ ID NO: 408301 - DNA, 33 bp, Homo sapien
ccttctcaactgtgtcaactgaagaatgacagc

SEQ ID NO: 408302 - DNA, 33 bp, Homo sapien
ccttctcaactgtgtcgactgaagaatgacagc

SEQ ID NO: 408303 - DNA, 33 bp, Homo sapien
ttaaaagtatctgatacgggctgagaggtgttt

SEQ ID NO: 408304 - DNA, 33 bp, Homo sapien
ttaaaagtatctgatatgggctgagaggtgttt

SEQ ID NO: 408305 - DNA, 33 bp, Homo sapien
atccgacctcacagcacagtcagatccaacctc

SEQ ID NO: 408306 - DNA, 33 bp, Homo sapien
atccgacctcacagcatagtcagatccaacctc

SEQ ID NO: 408307 - DNA, 33 bp, Homo sapien
ggatcaagtctttacacggcttaaaacccatca

SEQ ID NO: 408308 - DNA, 33 bp, Homo sapien
ggatcaagtctttacagggcttaaaacccatca

SEQ ID NO: 408309 - DNA, 33 bp, Homo sapien
ctatttcatcgagtcccgcacaggggcattata

SEQ ID NO: 408310 - DNA, 33 bp, Homo sapien
ctatttcatcgagtcctgcacaggggcattata

SEQ ID NO: 408311 - DNA, 33 bp, Homo sapien
acaaaattgattttcacaattgtcattctgtac

SEQ ID NO: 408312 - DNA, 33 bp, Homo sapien
acaaaattgattttcataattgtcattctgtac

SEQ ID NO: 408313 - DNA, 33 bp, Homo sapien
atgaaaccctgttgccactaaaaatataaaaat

SEQ ID NO: 408314 - DNA, 33 bp, Homo sapien
atgaaaccctgttgccgctaaaaatataaaaat

SEQ ID NO: 408315 - DNA, 33 bp, Homo sapien
tctctaaagaaagaaagaaatagtcattgccaa

SEQ ID NO: 408316 - DNA, 33 bp, Homo sapien
tctctaaagaaagaaataaatagtcattgccaa

SEQ ID NO: 408317 - DNA, 33 bp, Homo sapien
tcacggcagtccagaaaaatgctttggcctgct

SEQ ID NO: 408318 - DNA, 33 bp, Homo sapien
tcacggcagtccagaacaatgctttggcctgct

SEQ ID NO: 408319 - DNA, 33 bp, Homo sapien
gtgtgggacctttcaccggaaaagcaacaagaa

SEQ ID NO: 408320 - DNA, 33 bp, Homo sapien
gtgtgggacctttcacgggaaaagcaacaagaa

SEQ ID NO: 408321 - DNA, 33 bp, Homo sapien
ctgttggctgtggatcaatctgggccctctcac

SEQ ID NO: 408322 - DNA, 33 bp, Homo sapien
ctgttggctgtggatcgatctgggccctctcac

SEQ ID NO: 408323 - DNA, 33 bp, Homo sapien
tgtcaagttcagaggcaagaaggtggaggagat

SEQ ID NO: 408324 - DNA, 33 bp, Homo sapien
tgtcaagttcagaggcgagaaggtggaggagat

SEQ ID NO: 408325 - DNA, 33 bp, Homo sapien
tacaaaggattgacacaaatttctctttactcc

SEQ ID NO: 408326 - DNA, 33 bp, Homo sapien
tacaaaggattgacacgaatttctctttactcc

SEQ ID NO: 408327 - DNA, 33 bp, Homo sapien
tgtaagtctcactaaaactgtgttctagtcatc

SEQ ID NO: 408328 - DNA, 33 bp, Homo sapien
tgtaagtctcactaaagctgtgttctagtcatc

SEQ ID NO: 408329 - DNA, 33 bp, Homo sapien
ttattaagtctctcaaataaaatgccagacatg

SEQ ID NO: 408330 - DNA, 33 bp, Homo sapien
ttattaagtctctcaattaaaatgccagacatg

SEQ ID NO: 408331 - DNA, 33 bp, Homo sapien
gaggcctcaatgagaaatcttttgtagatggct

SEQ ID NO: 408332 - DNA, 33 bp, Homo sapien
gaggcctcaatgagaagtcttttgtagatggct

SEQ ID NO: 408333 - DNA, 33 bp, Homo sapien
tagctccaagagattcaatgttgaccaacacag

SEQ ID NO: 408334 - DNA, 33 bp, Homo sapien
tagctccaagagattcgatgttgaccaacacag

SEQ ID NO: 408335 - DNA, 33 bp, Homo sapien
acgagttggtataacacggataccaaagtggac

SEQ ID NO: 408336 - DNA, 33 bp, Homo sapien
acgagttggtataacatggataccaaagtggac

SEQ ID NO: 408337 - DNA, 33 bp, Homo sapien
gaaagaatgaaggatgcaattgggtgttagtag

SEQ ID NO: 408338 - DNA, 33 bp, Homo sapien
gaaagaatgaaggatgtaattgggtgttagtag

SEQ ID NO: 408339 - DNA, 33 bp, Homo sapien
cttcttagactgtaagcagaagctaggtaacat

SEQ ID NO: 408340 - DNA, 33 bp, Homo sapien
cttcttagactgtaaggagaagctaggtaacat

SEQ ID NO: 408341 - DNA, 33 bp, Homo sapien
aatttcacaaatgagaaatatgagactcagaga

SEQ ID NO: 408342 - DNA, 33 bp, Homo sapien
aatttcacaaatgagagatatgagactcagaga

SEQ ID NO: 408343 - DNA, 33 bp, Homo sapien
catcctctcctttacaatctggagacagaagcc

SEQ ID NO: 408344 - DNA, 33 bp, Homo sapien
catcctctcctttacagtctggagacagaagcc

SEQ ID NO: 408345 - DNA, 33 bp, Homo sapien
aagtcactctgcaaatcagcgacagagctgggg

SEQ ID NO: 408346 - DNA, 33 bp, Homo sapien
aagtcactctgcaaattagcgacagagctgggg

SEQ ID NO: 408347 - DNA, 33 bp, Homo sapien
tctgccacgctctcagacacttggaggcgcttg

SEQ ID NO: 408348 - DNA, 33 bp, Homo sapien
tctgccacgctctcaggcacttggaggcgcttg

SEQ ID NO: 408349 - DNA, 33 bp, Homo sapien
cactatgtggttattgcagccgacggcccctca

SEQ ID NO: 408350 - DNA, 33 bp, Homo sapien
cactatgtggttattgtagccgacggcccctca

SEQ ID NO: 408351 - DNA, 33 bp, Homo sapien
ctaactctcagggggacgtgccgagttccagca

SEQ ID NO: 408352 - DNA, 33 bp, Homo sapien
ctaactctcagggggatgtgccgagttccagca

SEQ ID NO: 408353 - DNA, 33 bp, Homo sapien
aaagcctagagatcacaaggggcctggacttaa

SEQ ID NO: 408354 - DNA, 33 bp, Homo sapien
aaagcctagagatcacgaggggcctggacttaa

SEQ ID NO: 408355 - DNA, 33 bp, Homo sapien
agtagaagaaatactaagagtcagaatcctcac

SEQ ID NO: 408356 - DNA, 33 bp, Homo sapien
agtagaagaaatactatgagtcagaatcctcac

SEQ ID NO: 408357 - DNA, 33 bp, Homo sapien
gtaaagtccaaaaccacaaaacaatcatacatt

SEQ ID NO: 408358 - DNA, 33 bp, Homo sapien
gtaaagtccaaaaccataaaacaatcatacatt

SEQ ID NO: 408359 - DNA, 33 bp, Homo sapien
gagagttactgttaagaaattgggtcacacagt

SEQ ID NO: 408360 - DNA, 33 bp, Homo sapien
gagagttactgttaaggaattgggtcacacagt

SEQ ID NO: 408361 - DNA, 33 bp, Homo sapien
agaccatttttggcaaaccacgatgataaaata

SEQ ID NO: 408362 - DNA, 33 bp, Homo sapien
agaccatttttggcaatccacgatgataaaata

SEQ ID NO: 408363 - DNA, 33 bp, Homo sapien
ggagtagacagataaaattcctgaagacctgaa

SEQ ID NO: 408364 - DNA, 33 bp, Homo sapien
ggagtagacagataaagttcctgaagacctgaa

SEQ ID NO: 408365 - DNA, 33 bp, Homo sapien
tcatcttacagtggaccgcttccttagtttaat

SEQ ID NO: 408366 - DNA, 33 bp, Homo sapien
tcatcttacagtggactgcttccttagtttaat

SEQ ID NO: 408367 - DNA, 33 bp, Homo sapien
aacttatgaatttgaaccattatttacagcata

SEQ ID NO: 408368 - DNA, 33 bp, Homo sapien
aacttatgaatttgaagcattatttacagcata

SEQ ID NO: 408369 - DNA, 33 bp, Homo sapien
cgtctggccaagcccaatctttagtgtacttat

SEQ ID NO: 408370 - DNA, 33 bp, Homo sapien
cgtctggccaagcccagtctttagtgtacttat

SEQ ID NO: 408371 - DNA, 33 bp, Homo sapien
cttgaaatttcagtatgaggagacccgtagcca

SEQ ID NO: 408372 - DNA, 33 bp, Homo sapien
cttgaaatttcagtattaggagacccgtagcca

SEQ ID NO: 408373 - DNA, 33 bp, Homo sapien
gtatcaccgcggagtaaagaaagctggaggatc

SEQ ID NO: 408374 - DNA, 33 bp, Homo sapien
gtatcaccgcggagtacagaaagctggaggatc

SEQ ID NO: 408375 - DNA, 33 bp, Homo sapien
gggaattatgctgactaaagaaaagccaaacat

SEQ ID NO: 408376 - DNA, 33 bp, Homo sapien
gggaattatgctgactgaagaaaagccaaacat

SEQ ID NO: 408377 - DNA, 33 bp, Homo sapien
ggaagctcaagaccaacaactcaaacatgctca

SEQ ID NO: 408378 - DNA, 33 bp, Homo sapien
ggaagctcaagaccaagaactcaaacatgctca

SEQ ID NO: 408379 - DNA, 33 bp, Homo sapien
tacctgttttcatataccagctaatggttagtg

SEQ ID NO: 408380 - DNA, 33 bp, Homo sapien
tacctgttttcatatatcagctaatggttagtg

SEQ ID NO: 408381 - DNA, 33 bp, Homo sapien
agaaggattaaaatgcgcccattgccagaaatc

SEQ ID NO: 408382 - DNA, 33 bp, Homo sapien
agaaggattaaaatgctcccattgccagaaatc

SEQ ID NO: 408383 - DNA, 33 bp, Homo sapien
taatgtggaaaatacactcactaccctatgcta

SEQ ID NO: 408384 - DNA, 33 bp, Homo sapien
taatgtggaaaatacagtcactaccctatgcta

SEQ ID NO: 408385 - DNA, 33 bp, Homo sapien
acacttgtcaaacagaagaaattgagtattatt

SEQ ID NO: 408386 - DNA, 33 bp, Homo sapien
acacttgtcaaacagacgaaattgagtattatt

SEQ ID NO: 408387 - DNA, 33 bp, Homo sapien
gcataactagtttcgcaagaagcatgtaatggt

SEQ ID NO: 408388 - DNA, 33 bp, Homo sapien
gcataactagtttcgcgagaagcatgtaatggt

SEQ ID NO: 408389 - DNA, 33 bp, Homo sapien
aaaaaaaaaagggcaaatatgatgcttaaataa

SEQ ID NO: 408390 - DNA, 33 bp, Homo sapien
aaaaaaaaaagggcaattatgatgcttaaataa

SEQ ID NO: 408391 - DNA, 33 bp, Homo sapien
ggtgcttagtacctaaacattaaggcctctaag

SEQ ID NO: 408392 - DNA, 33 bp, Homo sapien
ggtgcttagtacctaaccattaaggcctctaag

SEQ ID NO: 408393 - DNA, 33 bp, Homo sapien
ctgaataaaacagaatcacttcactctggaaaa

SEQ ID NO: 408394 - DNA, 33 bp, Homo sapien
ctgaataaaacagaatgacttcactctggaaaa

SEQ ID NO: 408395 - DNA, 33 bp, Homo sapien
tatctgtcatactaacaggcagtactttagtta

SEQ ID NO: 408396 - DNA, 33 bp, Homo sapien
tatctgtcatactaacgggcagtactttagtta

SEQ ID NO: 408397 - DNA, 33 bp, Homo sapien
ccagtgtaataaccaacgttttcagtaatagca

SEQ ID NO: 408398 - DNA, 33 bp, Homo sapien
ccagtgtaataaccaatgttttcagtaatagca

SEQ ID NO: 408399 - DNA, 33 bp, Homo sapien
aggagatgtaaagaatgaggaagttaagcttta

SEQ ID NO: 408400 - DNA, 33 bp, Homo sapien
aggagatgtaaagaattaggaagttaagcttta

SEQ ID NO: 408401 - DNA, 33 bp, Homo sapien
agtggactctctcatgaaatcctagaaactgga

SEQ ID NO: 408402 - DNA, 33 bp, Homo sapien
agtggactctctcatgcaatcctagaaactgga

SEQ ID NO: 408403 - DNA, 33 bp, Homo sapien
gagaagaggacatagcagaatctacaagaggtc

SEQ ID NO: 408404 - DNA, 33 bp, Homo sapien
gagaagaggacatagcggaatctacaagaggtc

SEQ ID NO: 408405 - DNA, 33 bp, Homo sapien
agctggcatttacagaacactcagatccctcct

SEQ ID NO: 408406 - DNA, 33 bp, Homo sapien
agctggcatttacagagcactcagatccctcct

SEQ ID NO: 408407 - DNA, 33 bp, Homo sapien
agaaaagagaagaaaacttgaggtgtggcctga

SEQ ID NO: 408408 - DNA, 33 bp, Homo sapien
agaaaagagaagaaaatttgaggtgtggcctga

SEQ ID NO: 408409 - DNA, 33 bp, Homo sapien
tccctgagcggggagacgtaaaagcagaagttc

SEQ ID NO: 408410 - DNA, 33 bp, Homo sapien
tccctgagcggggagatgtaaaagcagaagttc

SEQ ID NO: 408411 - DNA, 33 bp, Homo sapien
atttcctccatggcccaatgaggctgttgttat

SEQ ID NO: 408412 - DNA, 33 bp, Homo sapien
atttcctccatggccccatgaggctgttgttat

SEQ ID NO: 408413 - DNA, 33 bp, Homo sapien
ctcggatcccaagggccgattgattcctgcgcc

SEQ ID NO: 408414 - DNA, 33 bp, Homo sapien
ctcggatcccaagggctgattgattcctgcgcc

SEQ ID NO: 408415 - DNA, 33 bp, Homo sapien
ttaaatgtggtgtctaaatatacaacagaatat

SEQ ID NO: 408416 - DNA, 33 bp, Homo sapien
ttaaatgtggtgtctatatatacaacagaatat

SEQ ID NO: 408417 - DNA, 33 bp, Homo sapien
cagtgagggtcatggactagggagttaatattt

SEQ ID NO: 408418 - DNA, 33 bp, Homo sapien
cagtgagggtcatggattagggagttaatattt

SEQ ID NO: 408419 - DNA, 33 bp, Homo sapien
gacaaggcttgtgcaacttctccattgtttaca

SEQ ID NO: 408420 - DNA, 33 bp, Homo sapien
gacaaggcttgtgcaatttctccattgtttaca

SEQ ID NO: 408421 - DNA, 33 bp, Homo sapien
ccaggaaaaacatcccaaagtcacataccctga

SEQ ID NO: 408422 - DNA, 33 bp, Homo sapien
ccaggaaaaacatcccgaagtcacataccctga

SEQ ID NO: 408423 - DNA, 33 bp, Homo sapien
tttctgagacatttaaaaacattcacgaaagcc

SEQ ID NO: 408424 - DNA, 33 bp, Homo sapien
tttctgagacatttaagaacattcacgaaagcc

SEQ ID NO: 408425 - DNA, 33 bp, Homo sapien
atacacaggtaaacaagagggatacacaaagta

SEQ ID NO: 408426 - DNA, 33 bp, Homo sapien
atacacaggtaaacaatagggatacacaaagta

SEQ ID NO: 408427 - DNA, 33 bp, Homo sapien
gaaggtaaagcaggatcaggtcccttgccagtt

SEQ ID NO: 408428 - DNA, 33 bp, Homo sapien
gaaggtaaagcaggattaggtcccttgccagtt

SEQ ID NO: 408429 - DNA, 33 bp, Homo sapien
gtgggagagtgttcagcctatgagtaatcatgt

SEQ ID NO: 408430 - DNA, 33 bp, Homo sapien
gtgggagagtgttcagtctatgagtaatcatgt

SEQ ID NO: 408431 - DNA, 33 bp, Homo sapien
atttagcatccttcatcacatccttcattccag

SEQ ID NO: 408432 - DNA, 33 bp, Homo sapien
atttagcatccttcattacatccttcattccag

SEQ ID NO: 408433 - DNA, 33 bp, Homo sapien
tgtcatgtttcccaagcagtagtggtcataaaa

SEQ ID NO: 408434 - DNA, 33 bp, Homo sapien
tgtcatgtttcccaagtagtagtggtcataaaa

SEQ ID NO: 408435 - DNA, 33 bp, Homo sapien
catgacctgtcatgggaccattaagtaacaata

SEQ ID NO: 408436 - DNA, 33 bp, Homo sapien
catgacctgtcatggggccattaagtaacaata

SEQ ID NO: 408437 - DNA, 33 bp, Homo sapien
atcctgtgggaacatacggcaaggagaatttac

SEQ ID NO: 408438 - DNA, 33 bp, Homo sapien
atcctgtgggaacatatggcaaggagaatttac

SEQ ID NO: 408439 - DNA, 33 bp, Homo sapien
aacctttccagaaacactctctttccaaaagtt

SEQ ID NO: 408440 - DNA, 33 bp, Homo sapien
aacctttccagaaacattctctttccaaaagtt

SEQ ID NO: 408441 - DNA, 33 bp, Homo sapien
gcctgttccatagtgaaaaacagtagtgtagtt

SEQ ID NO: 408442 - DNA, 33 bp, Homo sapien
gcctgttccatagtgagaaacagtagtgtagtt

SEQ ID NO: 408443 - DNA, 33 bp, Homo sapien
atgctttcaaatttaaaatagcaacaataagaa

SEQ ID NO: 408444 - DNA, 33 bp, Homo sapien
atgctttcaaatttaagatagcaacaataagaa

SEQ ID NO: 408445 - DNA, 33 bp, Homo sapien
tggaacacctttccacaaagactgtttcctaaa

SEQ ID NO: 408446 - DNA, 33 bp, Homo sapien
tggaacacctttccacgaagactgtttcctaaa

SEQ ID NO: 408447 - DNA, 33 bp, Homo sapien
aaacggtgtacctcaacgtctttgagtgtctcc

SEQ ID NO: 408448 - DNA, 33 bp, Homo sapien
aaacggtgtacctcaatgtctttgagtgtctcc

SEQ ID NO: 408449 - DNA, 33 bp, Homo sapien
aaaccaataggctttaaagagaaggtgtcaatt

SEQ ID NO: 408450 - DNA, 33 bp, Homo sapien
aaaccaataggctttagagagaaggtgtcaatt

SEQ ID NO: 408451 - DNA, 33 bp, Homo sapien
aaacgtagccaaatcaacatgagcttgcaccca

SEQ ID NO: 408452 - DNA, 33 bp, Homo sapien
aaacgtagccaaatcagcatgagcttgcaccca

SEQ ID NO: 408453 - DNA, 33 bp, Homo sapien
aatttgggaactttagaaatgtctttctctatc

SEQ ID NO: 408454 - DNA, 33 bp, Homo sapien
aatttgggaactttaggaatgtctttctctatc

SEQ ID NO: 408455 - DNA, 33 bp, Homo sapien
ctttgttaggataatgacacccccaggttctcc

SEQ ID NO: 408456 - DNA, 33 bp, Homo sapien
ctttgttaggataatgtcacccccaggttctcc

SEQ ID NO: 408457 - DNA, 33 bp, Homo sapien
ggatgcacagaccatacagtctttacttttcag

SEQ ID NO: 408458 - DNA, 33 bp, Homo sapien
ggatgcacagaccatatagtctttacttttcag

SEQ ID NO: 408459 - DNA, 33 bp, Homo sapien
tgtggggatgatgtaactggcagtggagctatc

SEQ ID NO: 408460 - DNA, 33 bp, Homo sapien
tgtggggatgatgtaattggcagtggagctatc

SEQ ID NO: 408461 - DNA, 33 bp, Homo sapien
ggatgtcatagttccacaggaataacagaccag

SEQ ID NO: 408462 - DNA, 33 bp, Homo sapien
ggatgtcatagttccataggaataacagaccag

SEQ ID NO: 408463 - DNA, 33 bp, Homo sapien
gttgatagaatccagacaagataaaaagaagat

SEQ ID NO: 408464 - DNA, 33 bp, Homo sapien
gttgatagaatccagagaagataaaaagaagat

SEQ ID NO: 408465 - DNA, 33 bp, Homo sapien
tggcctaaattttaaacgaatcgaggagaaatg

SEQ ID NO: 408466 - DNA, 33 bp, Homo sapien
tggcctaaattttaaatgaatcgaggagaaatg

SEQ ID NO: 408467 - DNA, 33 bp, Homo sapien
aatcactgtggctcgaaaaattcagtggtctga

SEQ ID NO: 408468 - DNA, 33 bp, Homo sapien
aatcactgtggctcgagaaattcagtggtctga

SEQ ID NO: 408469 - DNA, 33 bp, Homo sapien
caaaactggagggacaagatcactatttcactt

SEQ ID NO: 408470 - DNA, 33 bp, Homo sapien
caaaactggagggacatgatcactatttcactt

SEQ ID NO: 408471 - DNA, 33 bp, Homo sapien
atcatcacaagcaataaaacactgagacactgt

SEQ ID NO: 408472 - DNA, 33 bp, Homo sapien
atcatcacaagcaatacaacactgagacactgt

SEQ ID NO: 408473 - DNA, 33 bp, Homo sapien
aatattgagccacacacaatggccatagagaat

SEQ ID NO: 408474 - DNA, 33 bp, Homo sapien
aatattgagccacacagaatggccatagagaat

SEQ ID NO: 408475 - DNA, 33 bp, Homo sapien
tacagagaagtgattcaaaagaggcaacaccta

SEQ ID NO: 408476 - DNA, 33 bp, Homo sapien
tacagagaagtgattcgaaagaggcaacaccta

SEQ ID NO: 408477 - DNA, 33 bp, Homo sapien
tcttttctatctcccactcctactatactgagc

SEQ ID NO: 408478 - DNA, 33 bp, Homo sapien
tcttttctatctcccattcctactatactgagc

SEQ ID NO: 408479 - DNA, 33 bp, Homo sapien
gagacagagttacacaatgcaaattataaagca

SEQ ID NO: 408480 - DNA, 33 bp, Homo sapien
gagacagagttacacagtgcaaattataaagca

SEQ ID NO: 408481 - DNA, 33 bp, Homo sapien
agcactgcgtgggtaacgtcttcctctctcact

SEQ ID NO: 408482 - DNA, 33 bp, Homo sapien
agcactgcgtgggtaatgtcttcctctctcact

SEQ ID NO: 408483 - DNA, 33 bp, Homo sapien
gtcttgagagatatagaaagctcaagaaaccta

SEQ ID NO: 408484 - DNA, 33 bp, Homo sapien
gtcttgagagatataggaagctcaagaaaccta

SEQ ID NO: 408485 - DNA, 33 bp, Homo sapien
tgtctttgctattttgaatagtgctacaatgaa

SEQ ID NO: 408486 - DNA, 33 bp, Homo sapien
tgtctttgctattttggatagtgctacaatgaa

SEQ ID NO: 408487 - DNA, 33 bp, Homo sapien
gttcacacaggtgacaagtggtagagctagtag

SEQ ID NO: 408488 - DNA, 33 bp, Homo sapien
gttcacacaggtgacaggtggtagagctagtag

SEQ ID NO: 408489 - DNA, 33 bp, Homo sapien
ataagagtggcttggaaatacaatagccaatgt

SEQ ID NO: 408490 - DNA, 33 bp, Homo sapien
ataagagtggcttggagatacaatagccaatgt

SEQ ID NO: 408491 - DNA, 33 bp, Homo sapien
attccaggcaagagaaaggcattgagtaaacat

SEQ ID NO: 408492 - DNA, 33 bp, Homo sapien
attccaggcaagagaagggcattgagtaaacat

SEQ ID NO: 408493 - DNA, 33 bp, Homo sapien
gacagataaatctcaccatagtatatctgccag

SEQ ID NO: 408494 - DNA, 33 bp, Homo sapien
gacagataaatctcactatagtatatctgccag

SEQ ID NO: 408495 - DNA, 33 bp, Homo sapien
ggttccccgatgcaaaacataattggtccctct

SEQ ID NO: 408496 - DNA, 33 bp, Homo sapien
ggttccccgatgcaaagcataattggtccctct

SEQ ID NO: 408497 - DNA, 33 bp, Homo sapien
gagaggcatcagactacgctgcaggtttggccc

SEQ ID NO: 408498 - DNA, 33 bp, Homo sapien
gagaggcatcagactatgctgcaggtttggccc

SEQ ID NO: 408499 - DNA, 33 bp, Homo sapien
caaagaaaagacattaactggtagctgcctccc

SEQ ID NO: 408500 - DNA, 33 bp, Homo sapien
caaagaaaagacattagctggtagctgcctccc

SEQ ID NO: 408501 - DNA, 33 bp, Homo sapien
aactcccactaccttaaacaaagccattagaga

SEQ ID NO: 408502 - DNA, 33 bp, Homo sapien
aactcccactaccttagacaaagccattagaga

SEQ ID NO: 408503 - DNA, 33 bp, Homo sapien
aaatgagatgagcctgaaacagcttatggtaca

SEQ ID NO: 408504 - DNA, 33 bp, Homo sapien
aaatgagatgagcctggaacagcttatggtaca

SEQ ID NO: 408505 - DNA, 33 bp, Homo sapien
cttgtagaaattgtgacaatacaaaaggtaaat

SEQ ID NO: 408506 - DNA, 33 bp, Homo sapien
cttgtagaaattgtgataatacaaaaggtaaat

SEQ ID NO: 408507 - DNA, 33 bp, Homo sapien
caggttctttcagagacgaggagaatgcccctt

SEQ ID NO: 408508 - DNA, 33 bp, Homo sapien
caggttctttcagagatgaggagaatgcccctt

SEQ ID NO: 408509 - DNA, 33 bp, Homo sapien
ggtattttccaatatcccacattgcatttcttt

SEQ ID NO: 408510 - DNA, 33 bp, Homo sapien
ggtattttccaatatctcacattgcatttcttt

SEQ ID NO: 408511 - DNA, 33 bp, Homo sapien
gtgctcaatagctttacgtatctagtggctacc

SEQ ID NO: 408512 - DNA, 33 bp, Homo sapien
gtgctcaatagctttatgtatctagtggctacc

SEQ ID NO: 408513 - DNA, 33 bp, Homo sapien
atcttctagcttctgacaggtagaatatctagg

SEQ ID NO: 408514 - DNA, 33 bp, Homo sapien
atcttctagcttctgataggtagaatatctagg

SEQ ID NO: 408515 - DNA, 33 bp, Homo sapien
gaagttcagtgatacacctggaatgcttctgag

SEQ ID NO: 408516 - DNA, 33 bp, Homo sapien
gaagttcagtgatacatctggaatgcttctgag

SEQ ID NO: 408517 - DNA, 33 bp, Homo sapien
ccactagctagggtccaataatgaataagttga

SEQ ID NO: 408518 - DNA, 33 bp, Homo sapien
ccactagctagggtcctataatgaataagttga

SEQ ID NO: 408519 - DNA, 33 bp, Homo sapien
cctacaacaattgggcccctaccctacaacaac

SEQ ID NO: 408520 - DNA, 33 bp, Homo sapien
cctacaacaattgggctcctaccctacaacaac

SEQ ID NO: 408521 - DNA, 33 bp, Homo sapien
tatttagctctagaatcagtttttaaatccttt

SEQ ID NO: 408522 - DNA, 33 bp, Homo sapien
tatttagctctagaatgagtttttaaatccttt

SEQ ID NO: 408523 - DNA, 33 bp, Homo sapien
gtgtcctctgctttaccctttgatgtcagaggg

SEQ ID NO: 408524 - DNA, 33 bp, Homo sapien
gtgtcctctgctttactctttgatgtcagaggg

SEQ ID NO: 408525 - DNA, 33 bp, Homo sapien
actattctgtgtttgagccctatactaagaaca

SEQ ID NO: 408526 - DNA, 33 bp, Homo sapien
actattctgtgtttgatccctatactaagaaca

SEQ ID NO: 408527 - DNA, 33 bp, Homo sapien
tgaacaacttggtagcaatcagagcatcagggt

SEQ ID NO: 408528 - DNA, 33 bp, Homo sapien
tgaacaacttggtagcgatcagagcatcagggt

SEQ ID NO: 408529 - DNA, 33 bp, Homo sapien
tctatttgtcagtatacctggttgtaaattccc

SEQ ID NO: 408530 - DNA, 33 bp, Homo sapien
tctatttgtcagtatagctggttgtaaattccc

SEQ ID NO: 408531 - DNA, 33 bp, Homo sapien
agccggacctgcaaacactttgctttcttgact

SEQ ID NO: 408532 - DNA, 33 bp, Homo sapien
agccggacctgcaaacgctttgctttcttgact

SEQ ID NO: 408533 - DNA, 33 bp, Homo sapien
gctgcagaaacacaaacacttagacacctgagt

SEQ ID NO: 408534 - DNA, 33 bp, Homo sapien
gctgcagaaacacaaatacttagacacctgagt

SEQ ID NO: 408535 - DNA, 33 bp, Homo sapien
ctcagtagctggttgacctgcccttctacctgt

SEQ ID NO: 408536 - DNA, 33 bp, Homo sapien
ctcagtagctggttgatctgcccttctacctgt

SEQ ID NO: 408537 - DNA, 33 bp, Homo sapien
acatatttgatacataagtcaacaactctgaat

SEQ ID NO: 408538 - DNA, 33 bp, Homo sapien
acatatttgatacataggtcaacaactctgaat

SEQ ID NO: 408539 - DNA, 33 bp, Homo sapien
tgtctgacattgatgcaaaaagtaaagtaaaag

SEQ ID NO: 408540 - DNA, 33 bp, Homo sapien
tgtctgacattgatgcgaaaagtaaagtaaaag

SEQ ID NO: 408541 - DNA, 33 bp, Homo sapien
tgtatttatatcattccaaacgattggctccat

SEQ ID NO: 408542 - DNA, 33 bp, Homo sapien
tgtatttatatcattctaaacgattggctccat

SEQ ID NO: 408543 - DNA, 33 bp, Homo sapien
ctacagtggccttgacaccctacccgattccca

SEQ ID NO: 408544 - DNA, 33 bp, Homo sapien
ctacagtggccttgacgccctacccgattccca

SEQ ID NO: 408545 - DNA, 33 bp, Homo sapien
cctctctaaacttccaaggctctattcatgagt

SEQ ID NO: 408546 - DNA, 33 bp, Homo sapien
cctctctaaacttccatggctctattcatgagt

SEQ ID NO: 408547 - DNA, 33 bp, Homo sapien
tttgaacatctgtcctcacttccaccaataaac

SEQ ID NO: 408548 - DNA, 33 bp, Homo sapien
tttgaacatctgtcctgacttccaccaataaac

SEQ ID NO: 408549 - DNA, 33 bp, Homo sapien
aacattctatggatccaaaaccatctttcaaca

SEQ ID NO: 408550 - DNA, 33 bp, Homo sapien
aacattctatggatccgaaaccatctttcaaca

SEQ ID NO: 408551 - DNA, 33 bp, Homo sapien
ccatctttcaacataaacaagcttgttagccaa

SEQ ID NO: 408552 - DNA, 33 bp, Homo sapien
ccatctttcaacataagcaagcttgttagccaa

SEQ ID NO: 408553 - DNA, 33 bp, Homo sapien
tcaaatttttatatgacagtgttgtaattttgt

SEQ ID NO: 408554 - DNA, 33 bp, Homo sapien
tcaaatttttatatgagagtgttgtaattttgt

SEQ ID NO: 408555 - DNA, 33 bp, Homo sapien
attcagctaaaagatgaatgtgtaggcaaggac

SEQ ID NO: 408556 - DNA, 33 bp, Homo sapien
attcagctaaaagatgcatgtgtaggcaaggac

SEQ ID NO: 408557 - DNA, 33 bp, Homo sapien
caggttaagatgaagaaaactcagggggcccta

SEQ ID NO: 408558 - DNA, 33 bp, Homo sapien
caggttaagatgaagacaactcagggggcccta

SEQ ID NO: 408559 - DNA, 33 bp, Homo sapien
ggggctttgccaattacgggattgagaaagccc

SEQ ID NO: 408560 - DNA, 33 bp, Homo sapien
ggggctttgccaattatgggattgagaaagccc

SEQ ID NO: 408561 - DNA, 33 bp, Homo sapien
caagctcctacagaaacgttcattcctaccgag

SEQ ID NO: 408562 - DNA, 33 bp, Homo sapien
caagctcctacagaaatgttcattcctaccgag

SEQ ID NO: 408563 - DNA, 33 bp, Homo sapien
ttttccttattaggaacggaactgccctgtagg

SEQ ID NO: 408564 - DNA, 33 bp, Homo sapien
ttttccttattaggaatggaactgccctgtagg

SEQ ID NO: 408565 - DNA, 33 bp, Homo sapien
gagatgtgctctatagacctttgcagtttacag

SEQ ID NO: 408566 - DNA, 33 bp, Homo sapien
gagatgtgctctataggcctttgcagtttacag

SEQ ID NO: 408567 - DNA, 33 bp, Homo sapien
gaggtggcctttctgaaatgagaagtcaagtca

SEQ ID NO: 408568 - DNA, 33 bp, Homo sapien
gaggtggcctttctgagatgagaagtcaagtca

SEQ ID NO: 408569 - DNA, 33 bp, Homo sapien
gcaggagaagaccatgaagagcttggcaggcca

SEQ ID NO: 408570 - DNA, 33 bp, Homo sapien
gcaggagaagaccatggagagcttggcaggcca

SEQ ID NO: 408571 - DNA, 33 bp, Homo sapien
ttgaaagctgagttaccggtcaccaaaggccaa

SEQ ID NO: 408572 - DNA, 33 bp, Homo sapien
ttgaaagctgagttactggtcaccaaaggccaa

SEQ ID NO: 408573 - DNA, 33 bp, Homo sapien
gttcccattagagataacctttggaattccaga

SEQ ID NO: 408574 - DNA, 33 bp, Homo sapien
gttcccattagagataccctttggaattccaga

SEQ ID NO: 408575 - DNA, 33 bp, Homo sapien
aggctttgcaacccacacagcccaatgtgatac

SEQ ID NO: 408576 - DNA, 33 bp, Homo sapien
aggctttgcaacccacgcagcccaatgtgatac

SEQ ID NO: 408577 - DNA, 33 bp, Homo sapien
ccctaaggtttggtaactatcatgggtctgtcc

SEQ ID NO: 408578 - DNA, 33 bp, Homo sapien
ccctaaggtttggtaattatcatgggtctgtcc

SEQ ID NO: 408579 - DNA, 33 bp, Homo sapien
cgggagaccacaatgcaaagttttatcctctta

SEQ ID NO: 408580 - DNA, 33 bp, Homo sapien
cgggagaccacaatgcgaagttttatcctctta

SEQ ID NO: 408581 - DNA, 33 bp, Homo sapien
caattaatgtgtacaaaaccaagcctagttttg

SEQ ID NO: 408582 - DNA, 33 bp, Homo sapien
caattaatgtgtacaacaccaagcctagttttg

SEQ ID NO: 408583 - DNA, 33 bp, Homo sapien
acataccacctaacaacatttccttcaatgaca

SEQ ID NO: 408584 - DNA, 33 bp, Homo sapien
acataccacctaacaagatttccttcaatgaca

SEQ ID NO: 408585 - DNA, 33 bp, Homo sapien
gcttgtctcaacagagaagaaggctaggcaaag

SEQ ID NO: 408586 - DNA, 33 bp, Homo sapien
gcttgtctcaacagaggagaaggctaggcaaag

SEQ ID NO: 408587 - DNA, 33 bp, Homo sapien
ctgtgtggtcattgaacgtcacttctgtgcagg

SEQ ID NO: 408588 - DNA, 33 bp, Homo sapien
ctgtgtggtcattgaatgtcacttctgtgcagg

SEQ ID NO: 408589 - DNA, 33 bp, Homo sapien
tttactgggtacaacaccaaggcattgtacttg

SEQ ID NO: 408590 - DNA, 33 bp, Homo sapien
tttactgggtacaacatcaaggcattgtacttg

SEQ ID NO: 408591 - DNA, 33 bp, Homo sapien
accagaagccagaatgaaagtgaactccagata

SEQ ID NO: 408592 - DNA, 33 bp, Homo sapien
accagaagccagaatgcaagtgaactccagata

SEQ ID NO: 408593 - DNA, 33 bp, Homo sapien
ccctccccactagaaaacagccagagctcaggg

SEQ ID NO: 408594 - DNA, 33 bp, Homo sapien
ccctccccactagaaagcagccagagctcaggg

SEQ ID NO: 408595 - DNA, 33 bp, Homo sapien
tataccacaaattgcccattcattcattgatgg

SEQ ID NO: 408596 - DNA, 33 bp, Homo sapien
tataccacaaattgcctattcattcattgatgg

SEQ ID NO: 408597 - DNA, 33 bp, Homo sapien
aatggtcgcttaagaaagaatccgctgggtttt

SEQ ID NO: 408598 - DNA, 33 bp, Homo sapien
aatggtcgcttaagaaggaatccgctgggtttt

SEQ ID NO: 408599 - DNA, 33 bp, Homo sapien
ctcaaaatgacataccaatgaccaataggtata

SEQ ID NO: 408600 - DNA, 33 bp, Homo sapien
ctcaaaatgacataccgatgaccaataggtata

SEQ ID NO: 408601 - DNA, 33 bp, Homo sapien
gtgtctccggttgcaacaaggggaggaggttag

SEQ ID NO: 408602 - DNA, 33 bp, Homo sapien
gtgtctccggttgcaagaaggggaggaggttag

SEQ ID NO: 408603 - DNA, 33 bp, Homo sapien
cccagagatagaaagaacctggctgctactact

SEQ ID NO: 408604 - DNA, 33 bp, Homo sapien
cccagagatagaaagagcctggctgctactact

SEQ ID NO: 408605 - DNA, 33 bp, Homo sapien
cccttcctttcctttgaataactgtgcctactg

SEQ ID NO: 408606 - DNA, 33 bp, Homo sapien
cccttcctttcctttggataactgtgcctactg

SEQ ID NO: 408607 - DNA, 33 bp, Homo sapien
aggaatctgaattataagtggagtgaaatatga

SEQ ID NO: 408608 - DNA, 33 bp, Homo sapien
aggaatctgaattataggtggagtgaaatatga

SEQ ID NO: 408609 - DNA, 33 bp, Homo sapien
gtgaaataatcacaaaacagggaatgaggtatc

SEQ ID NO: 408610 - DNA, 33 bp, Homo sapien
gtgaaataatcacaaagcagggaatgaggtatc

SEQ ID NO: 408611 - DNA, 33 bp, Homo sapien
attagatgctgggctacgggggaaatacaccat

SEQ ID NO: 408612 - DNA, 33 bp, Homo sapien
attagatgctgggctatgggggaaatacaccat

SEQ ID NO: 408613 - DNA, 33 bp, Homo sapien
aaggcaagtcaatccacgtggtcagataaaggg

SEQ ID NO: 408614 - DNA, 33 bp, Homo sapien
aaggcaagtcaatccatgtggtcagataaaggg

SEQ ID NO: 408615 - DNA, 33 bp, Homo sapien
acatctgggactgttaaaaagataagtcaacac

SEQ ID NO: 408616 - DNA, 33 bp, Homo sapien
acatctgggactgttacaaagataagtcaacac

SEQ ID NO: 408617 - DNA, 33 bp, Homo sapien
atgctcatattcagaactggttggaaagggcag

SEQ ID NO: 408618 - DNA, 33 bp, Homo sapien
atgctcatattcagaattggttggaaagggcag

SEQ ID NO: 408619 - DNA, 33 bp, Homo sapien
aaacaccacttaagcactgactgtatgtcaggc

SEQ ID NO: 408620 - DNA, 33 bp, Homo sapien
aaacaccacttaagcattgactgtatgtcaggc

SEQ ID NO: 408621 - DNA, 33 bp, Homo sapien
tatactgaagaaacaactgtcactaaagaataa

SEQ ID NO: 408622 - DNA, 33 bp, Homo sapien
tatactgaagaaacaagtgtcactaaagaataa

SEQ ID NO: 408623 - DNA, 33 bp, Homo sapien
ttttcatcatttgtgactaatattttgtgcatt

SEQ ID NO: 408624 - DNA, 33 bp, Homo sapien
ttttcatcatttgtgattaatattttgtgcatt

SEQ ID NO: 408625 - DNA, 33 bp, Homo sapien
gcccctgatttttccaactacttgtgccagtgt

SEQ ID NO: 408626 - DNA, 33 bp, Homo sapien
gcccctgatttttccacctacttgtgccagtgt

SEQ ID NO: 408627 - DNA, 33 bp, Homo sapien
acatcacataattttaaaagtcagctacacaaa

SEQ ID NO: 408628 - DNA, 33 bp, Homo sapien
acatcacataattttagaagtcagctacacaaa

SEQ ID NO: 408629 - DNA, 33 bp, Homo sapien
gtaaataatagaactacgtgaagccctagcaaa

SEQ ID NO: 408630 - DNA, 33 bp, Homo sapien
gtaaataatagaactatgtgaagccctagcaaa

SEQ ID NO: 408631 - DNA, 33 bp, Homo sapien
gaagctgagatcactacgaggtaagcagtgcca

SEQ ID NO: 408632 - DNA, 33 bp, Homo sapien
gaagctgagatcactaggaggtaagcagtgcca

SEQ ID NO: 408633 - DNA, 33 bp, Homo sapien
tacaggcataattaaaccctcctcatgcaatta

SEQ ID NO: 408634 - DNA, 33 bp, Homo sapien
tacaggcataattaaatcctcctcatgcaatta

SEQ ID NO: 408635 - DNA, 33 bp, Homo sapien
aacactctctgtaaaacggtaaagagccatatt

SEQ ID NO: 408636 - DNA, 33 bp, Homo sapien
aacactctctgtaaaatggtaaagagccatatt

SEQ ID NO: 408637 - DNA, 33 bp, Homo sapien
gaagccaagactcggaaaatgtgctgtctcatc

SEQ ID NO: 408638 - DNA, 33 bp, Homo sapien
gaagccaagactcggagaatgtgctgtctcatc

SEQ ID NO: 408639 - DNA, 33 bp, Homo sapien
agagtagaagtacacacggagcagtggcaactc

SEQ ID NO: 408640 - DNA, 33 bp, Homo sapien
agagtagaagtacacatggagcagtggcaactc

SEQ ID NO: 408641 - DNA, 33 bp, Homo sapien
ggtggacctactatcccatgcatggaaaatgga

SEQ ID NO: 408642 - DNA, 33 bp, Homo sapien
ggtggacctactatcctatgcatggaaaatgga

SEQ ID NO: 408643 - DNA, 33 bp, Homo sapien
gttttgcagtacatcaccaccttcaatattatc

SEQ ID NO: 408644 - DNA, 33 bp, Homo sapien
gttttgcagtacatcatcaccttcaatattatc

SEQ ID NO: 408645 - DNA, 33 bp, Homo sapien
agaaataaatgccttcacctcttttgttttgct

SEQ ID NO: 408646 - DNA, 33 bp, Homo sapien
agaaataaatgccttcgcctcttttgttttgct

SEQ ID NO: 408647 - DNA, 33 bp, Homo sapien
aaggagagagtgctaccaaattatgtggcaaag

SEQ ID NO: 408648 - DNA, 33 bp, Homo sapien
aaggagagagtgctactaaattatgtggcaaag

SEQ ID NO: 408649 - DNA, 33 bp, Homo sapien
gaaccaaatgagataactcctttaaagttactc

SEQ ID NO: 408650 - DNA, 33 bp, Homo sapien
gaaccaaatgagataattcctttaaagttactc

SEQ ID NO: 408651 - DNA, 33 bp, Homo sapien
cacttacaatattataagcactttccaagctat

SEQ ID NO: 408652 - DNA, 33 bp, Homo sapien
cacttacaatattataggcactttccaagctat

SEQ ID NO: 408653 - DNA, 33 bp, Homo sapien
ttcatttattccacagacatttctaaacaccta

SEQ ID NO: 408654 - DNA, 33 bp, Homo sapien
ttcatttattccacaggcatttctaaacaccta

SEQ ID NO: 408655 - DNA, 33 bp, Homo sapien
ttacaaagataagtaacataccaacattgtggc

SEQ ID NO: 408656 - DNA, 33 bp, Homo sapien
ttacaaagataagtaagataccaacattgtggc

SEQ ID NO: 408657 - DNA, 33 bp, Homo sapien
gattgcatatcctagtaaatcttatctacacag

SEQ ID NO: 408658 - DNA, 33 bp, Homo sapien
gattgcatatcctagtgaatcttatctacacag

SEQ ID NO: 408659 - DNA, 33 bp, Homo sapien
aagagttgtcatcatccactggttcagctgtgg

SEQ ID NO: 408660 - DNA, 33 bp, Homo sapien
aagagttgtcatcatctactggttcagctgtgg

SEQ ID NO: 408661 - DNA, 33 bp, Homo sapien
gcagttctaacaattccaccactaagagcacta

SEQ ID NO: 408662 - DNA, 33 bp, Homo sapien
gcagttctaacaattctaccactaagagcacta

SEQ ID NO: 408663 - DNA, 33 bp, Homo sapien
tggagtttcagcttcacaggtagcagcatagcc

SEQ ID NO: 408664 - DNA, 33 bp, Homo sapien
tggagtttcagcttcataggtagcagcatagcc

SEQ ID NO: 408665 - DNA, 33 bp, Homo sapien
gctctagctagaaaaaaaaaagtttggaatgac

SEQ ID NO: 408666 - DNA, 33 bp, Homo sapien
gctctagctagaaaaagaaaagtttggaatgac

SEQ ID NO: 408667 - DNA, 33 bp, Homo sapien
agaagagggcctggtaaagagtatattctacat

SEQ ID NO: 408668 - DNA, 33 bp, Homo sapien
agaagagggcctggtacagagtatattctacat

SEQ ID NO: 408669 - DNA, 33 bp, Homo sapien
aatgggcaagagaatagccagactagctaggac

SEQ ID NO: 408670 - DNA, 33 bp, Homo sapien
aatgggcaagagaatatccagactagctaggac

SEQ ID NO: 408671 - DNA, 33 bp, Homo sapien
aattcctaaagtcattcaagagttgcaactttc

SEQ ID NO: 408672 - DNA, 33 bp, Homo sapien
aattcctaaagtcattgaagagttgcaactttc

SEQ ID NO: 408673 - DNA, 33 bp, Homo sapien
tgtcaatgaccaataacactatcaatggctcca

SEQ ID NO: 408674 - DNA, 33 bp, Homo sapien
tgtcaatgaccaataagactatcaatggctcca

SEQ ID NO: 408675 - DNA, 33 bp, Homo sapien
atcctgaaggcaaaaccgagttagcgggccttt

SEQ ID NO: 408676 - DNA, 33 bp, Homo sapien
atcctgaaggcaaaactgagttagcgggccttt

SEQ ID NO: 408677 - DNA, 33 bp, Homo sapien
cttttataacaggtacaaggataatgctaaaag

SEQ ID NO: 408678 - DNA, 33 bp, Homo sapien
cttttataacaggtaccaggataatgctaaaag

SEQ ID NO: 408679 - DNA, 33 bp, Homo sapien
ttttgaagactaaccaaggtttctttgaagtga

SEQ ID NO: 408680 - DNA, 33 bp, Homo sapien
ttttgaagactaaccatggtttctttgaagtga

SEQ ID NO: 408681 - DNA, 33 bp, Homo sapien
ggtggagaaagaaaaccgtagagcaagccaact

SEQ ID NO: 408682 - DNA, 33 bp, Homo sapien
ggtggagaaagaaaactgtagagcaagccaact

SEQ ID NO: 408683 - DNA, 33 bp, Homo sapien
tcattggccagagtaacctcgtgaggaaggtgg

SEQ ID NO: 408684 - DNA, 33 bp, Homo sapien
tcattggccagagtaatctcgtgaggaaggtgg

SEQ ID NO: 408685 - DNA, 33 bp, Homo sapien
gaaactgaggccaagtaaataggttcacagggc

SEQ ID NO: 408686 - DNA, 33 bp, Homo sapien
gaaactgaggccaagtcaataggttcacagggc

SEQ ID NO: 408687 - DNA, 33 bp, Homo sapien
aaagtgaactttctaacgtttctagcattcccg

SEQ ID NO: 408688 - DNA, 33 bp, Homo sapien
aaagtgaactttctaatgtttctagcattcccg

SEQ ID NO: 408689 - DNA, 33 bp, Homo sapien
gcatcaacttactatcacaacaaactattagca

SEQ ID NO: 408690 - DNA, 33 bp, Homo sapien
gcatcaacttactatcgcaacaaactattagca

SEQ ID NO: 408691 - DNA, 33 bp, Homo sapien
tgactggtatacatcaaattgcatttattctac

SEQ ID NO: 408692 - DNA, 33 bp, Homo sapien
tgactggtatacatcacattgcatttattctac

SEQ ID NO: 408693 - DNA, 33 bp, Homo sapien
tttaaagaacttgctgaacttcaaagctaatac

SEQ ID NO: 408694 - DNA, 33 bp, Homo sapien
tttaaagaacttgctgcacttcaaagctaatac

SEQ ID NO: 408695 - DNA, 33 bp, Homo sapien
gtgagggtacattttcaccccatgatctgatat

SEQ ID NO: 408696 - DNA, 33 bp, Homo sapien
gtgagggtacattttccccccatgatctgatat

SEQ ID NO: 408697 - DNA, 33 bp, Homo sapien
tcatcatgtaccttcaaagactcatgtgtaggc

SEQ ID NO: 408698 - DNA, 33 bp, Homo sapien
tcatcatgtaccttcagagactcatgtgtaggc

SEQ ID NO: 408699 - DNA, 33 bp, Homo sapien
tagatccaggtcaaaaatgcctttctaggctgg

SEQ ID NO: 408700 - DNA, 33 bp, Homo sapien
tagatccaggtcaaaactgcctttctaggctgg

SEQ ID NO: 408701 - DNA, 33 bp, Homo sapien
taaagctgcctccacacgaagaaggactgtgag

SEQ ID NO: 408702 - DNA, 33 bp, Homo sapien
taaagctgcctccacatgaagaaggactgtgag

SEQ ID NO: 408703 - DNA, 33 bp, Homo sapien
tctctgtatttccgaaccttttcagcattttct

SEQ ID NO: 408704 - DNA, 33 bp, Homo sapien
tctctgtatttccgaagcttttcagcattttct

SEQ ID NO: 408705 - DNA, 33 bp, Homo sapien
gaaatacagtatagtactaatagctgctggttc

SEQ ID NO: 408706 - DNA, 33 bp, Homo sapien
gaaatacagtatagtattaatagctgctggttc

SEQ ID NO: 408707 - DNA, 33 bp, Homo sapien
tttgccctaagattggaaatcaaaaagtttatc

SEQ ID NO: 408708 - DNA, 33 bp, Homo sapien
tttgccctaagattgggaatcaaaaagtttatc

SEQ ID NO: 408709 - DNA, 33 bp, Homo sapien
acatgatatttcaaagcagccgtgctatctttc

SEQ ID NO: 408710 - DNA, 33 bp, Homo sapien
acatgatatttcaaaggagccgtgctatctttc

SEQ ID NO: 408711 - DNA, 33 bp, Homo sapien
tcccaagtcacaccaacaagaggatgatcaaag

SEQ ID NO: 408712 - DNA, 33 bp, Homo sapien
tcccaagtcacaccaagaagaggatgatcaaag

SEQ ID NO: 408713 - DNA, 33 bp, Homo sapien
atcatatgaaatgactcaaaggatgactgccta

SEQ ID NO: 408714 - DNA, 33 bp, Homo sapien
atcatatgaaatgacttaaaggatgactgccta

SEQ ID NO: 408715 - DNA, 33 bp, Homo sapien
cattattacctgcctaataagtgcattttttca

SEQ ID NO: 408716 - DNA, 33 bp, Homo sapien
cattattacctgcctactaagtgcattttttca

SEQ ID NO: 408717 - DNA, 33 bp, Homo sapien
taaaaaagtgtgacaaacctcaaaaagttaaac

SEQ ID NO: 408718 - DNA, 33 bp, Homo sapien
taaaaaagtgtgacaatcctcaaaaagttaaac

SEQ ID NO: 408719 - DNA, 33 bp, Homo sapien
atttggcatcacgcaccgggttaggctgaatct

SEQ ID NO: 408720 - DNA, 33 bp, Homo sapien
atttggcatcacgcactgggttaggctgaatct

SEQ ID NO: 408721 - DNA, 33 bp, Homo sapien
tggcttcccctcatccagagtctcataacatac

SEQ ID NO: 408722 - DNA, 33 bp, Homo sapien
tggcttcccctcatccggagtctcataacatac

SEQ ID NO: 408723 - DNA, 33 bp, Homo sapien
cattaatgactaaaaagccaattcaaactcctt

SEQ ID NO: 408724 - DNA, 33 bp, Homo sapien
cattaatgactaaaaatccaattcaaactcctt

SEQ ID NO: 408725 - DNA, 33 bp, Homo sapien
cttgtgtgtgcgttacggacaaagactgctagg

SEQ ID NO: 408726 - DNA, 33 bp, Homo sapien
cttgtgtgtgcgttactgacaaagactgctagg

SEQ ID NO: 408727 - DNA, 33 bp, Homo sapien
acaaagaagtcaaggcaagttttaactctcctt

SEQ ID NO: 408728 - DNA, 33 bp, Homo sapien
acaaagaagtcaaggccagttttaactctcctt

SEQ ID NO: 408729 - DNA, 33 bp, Homo sapien
tatgtgaatttgctaaatcctatggcaacaaga

SEQ ID NO: 408730 - DNA, 33 bp, Homo sapien
tatgtgaatttgctaagtcctatggcaacaaga

SEQ ID NO: 408731 - DNA, 33 bp, Homo sapien
agaacatgatagatcaatattactgtccagaaa

SEQ ID NO: 408732 - DNA, 33 bp, Homo sapien
agaacatgatagatcactattactgtccagaaa

SEQ ID NO: 408733 - DNA, 33 bp, Homo sapien
tgcaactactgccttagactgagttgctttaag

SEQ ID NO: 408734 - DNA, 33 bp, Homo sapien
tgcaactactgccttatactgagttgctttaag

SEQ ID NO: 408735 - DNA, 33 bp, Homo sapien
ctagggccttctaataatagggaactatctcct

SEQ ID NO: 408736 - DNA, 33 bp, Homo sapien
ctagggccttctaatagtagggaactatctcct

SEQ ID NO: 408737 - DNA, 33 bp, Homo sapien
cctcagcaggttccacaaggttgtcttgaagat

SEQ ID NO: 408738 - DNA, 33 bp, Homo sapien
cctcagcaggttccacgaggttgtcttgaagat

SEQ ID NO: 408739 - DNA, 33 bp, Homo sapien
agctggagtggaagctcaatttccaaaaagcac

SEQ ID NO: 408740 - DNA, 33 bp, Homo sapien
agctggagtggaagctgaatttccaaaaagcac

SEQ ID NO: 408741 - DNA, 33 bp, Homo sapien
ccttctaagagtaaagaacacagaggcatgcac

SEQ ID NO: 408742 - DNA, 33 bp, Homo sapien
ccttctaagagtaaaggacacagaggcatgcac

SEQ ID NO: 408743 - DNA, 33 bp, Homo sapien
tttctttgcagctacacacgtcatttaatgaac

SEQ ID NO: 408744 - DNA, 33 bp, Homo sapien
tttctttgcagctacatacgtcatttaatgaac

SEQ ID NO: 408745 - DNA, 33 bp, Homo sapien
cagtcagagcacaacacatttgcatggattata

SEQ ID NO: 408746 - DNA, 33 bp, Homo sapien
cagtcagagcacaacatatttgcatggattata

SEQ ID NO: 408747 - DNA, 33 bp, Homo sapien
tactcacaaattggaaagatcaatatttttaaa

SEQ ID NO: 408748 - DNA, 33 bp, Homo sapien
tactcacaaattggaaggatcaatatttttaaa

SEQ ID NO: 408749 - DNA, 33 bp, Homo sapien
atacagaatggcaaaaagttgaaaggatttcct

SEQ ID NO: 408750 - DNA, 33 bp, Homo sapien
atacagaatggcaaaacgttgaaaggatttcct

SEQ ID NO: 408751 - DNA, 33 bp, Homo sapien; identical to SEQ ID NO: 408749

SEQ ID NO: 408752 - DNA, 33 bp, Homo sapien; identical to SEQ ID NO: 408750

SEQ ID NO: 408753 - DNA, 33 bp, Homo sapien
atttcactgattagcaaaacttctacttgtaaa

SEQ ID NO: 408754 - DNA, 33 bp, Homo sapien
atttcactgattagcacaacttctacttgtaaa

SEQ ID NO: 408755 - DNA, 33 bp, Homo sapien
atctgatctacacagactaaatttagaataaac

SEQ ID NO: 408756 - DNA, 33 bp, Homo sapien
atctgatctacacagattaaatttagaataaac

SEQ ID NO: 408757 - DNA, 33 bp, Homo sapien
aagccattctccttgacagacaaaactctacca

SEQ ID NO: 408758 - DNA, 33 bp, Homo sapien
aagccattctccttgatagacaaaactctacca

SEQ ID NO: 408759 - DNA, 33 bp, Homo sapien
ggatgaacaaaacagcactaggtatggatggat

SEQ ID NO: 408760 - DNA, 33 bp, Homo sapien
ggatgaacaaaacagcgctaggtatggatggat

SEQ ID NO: 408761 - DNA, 33 bp, Homo sapien
cgaagcctgtgatgaagatgaaggttgagagca

SEQ ID NO: 408762 - DNA, 33 bp, Homo sapien
cgaagcctgtgatgaatatgaaggttgagagca

SEQ ID NO: 408763 - DNA, 33 bp, Homo sapien
aacacccacttaagagaaaataagcacagagta

SEQ ID NO: 408764 - DNA, 33 bp, Homo sapien
aacacccacttaagaggaaataagcacagagta

SEQ ID NO: 408765 - DNA, 33 bp, Homo sapien
ttctttgactccataactatccatcttgcctcc

SEQ ID NO: 408766 - DNA, 33 bp, Homo sapien
ttctttgactccataattatccatcttgcctcc

SEQ ID NO: 408767 - DNA, 33 bp, Homo sapien
cttcttgcgatgcttacatgagggaatgtggaa

SEQ ID NO: 408768 - DNA, 33 bp, Homo sapien
cttcttgcgatgcttatatgagggaatgtggaa

SEQ ID NO: 408769 - DNA, 33 bp, Homo sapien
tacatggtaataagcaaactggcttcttgcgat

SEQ ID NO: 408770 - DNA, 33 bp, Homo sapien
tacatggtaataagcacactggcttcttgcgat

SEQ ID NO: 408771 - DNA, 33 bp, Homo sapien
gcaatctggctcttacaatgtactgtggtattt

SEQ ID NO: 408772 - DNA, 33 bp, Homo sapien
gcaatctggctcttacgatgtactgtggtattt

SEQ ID NO: 408773 - DNA, 33 bp, Homo sapien
taggtaggagaatcaaagaatgaatatggatct

SEQ ID NO: 408774 - DNA, 33 bp, Homo sapien
taggtaggagaatcaatgaatgaatatggatct

SEQ ID NO: 408775 - DNA, 33 bp, Homo sapien
cacagaggaggattaaggaaataaggtacaaaa

SEQ ID NO: 408776 - DNA, 33 bp, Homo sapien
cacagaggaggattaatgaaataaggtacaaaa

SEQ ID NO: 408777 - DNA, 33 bp, Homo sapien
gagtaggtttgttatacggaatcaacctcgata

SEQ ID NO: 408778 - DNA, 33 bp, Homo sapien
gagtaggtttgttatatggaatcaacctcgata

SEQ ID NO: 408779 - DNA, 33 bp, Homo sapien
tcagggctcccttcaaatgacatcttcccagca

SEQ ID NO: 408780 - DNA, 33 bp, Homo sapien
tcagggctcccttcaagtgacatcttcccagca

SEQ ID NO: 408781 - DNA, 33 bp, Homo sapien
aaaagaaatgaatacaaaacaacttcaataaat

SEQ ID NO: 408782 - DNA, 33 bp, Homo sapien
aaaagaaatgaatacataacaacttcaataaat

SEQ ID NO: 408783 - DNA, 33 bp, Homo sapien
gttatagttagcagcactaaggaatagaatatt

SEQ ID NO: 408784 - DNA, 33 bp, Homo sapien
gttatagttagcagcattaaggaatagaatatt

SEQ ID NO: 408785 - DNA, 33 bp, Homo sapien
actttaagcaaaacaacgtatagtaggtccttc

SEQ ID NO: 408786 - DNA, 33 bp, Homo sapien
actttaagcaaaacaatgtatagtaggtccttc

SEQ ID NO: 408787 - DNA, 33 bp, Homo sapien
tgatgaaaatgttttacgtatgccgttcagtac

SEQ ID NO: 408788 - DNA, 33 bp, Homo sapien
tgatgaaaatgttttatgtatgccgttcagtac

SEQ ID NO: 408789 - DNA, 33 bp, Homo sapien
agccatctgaaacttaccatgatccaatgaaac

SEQ ID NO: 408790 - DNA, 33 bp, Homo sapien
agccatctgaaacttagcatgatccaatgaaac

SEQ ID NO: 408791 - DNA, 33 bp, Homo sapien
atcctttacaatgactcaatcactcttcagtat

SEQ ID NO: 408792 - DNA, 33 bp, Homo sapien
atcctttacaatgacttaatcactcttcagtat

SEQ ID NO: 408793 - DNA, 33 bp, Homo sapien
attgttgctctccaaaatccctccttagccacc

SEQ ID NO: 408794 - DNA, 33 bp, Homo sapien
attgttgctctccaaagtccctccttagccacc

SEQ ID NO: 408795 - DNA, 33 bp, Homo sapien
taaacttgtttgaatcacaaccacaagtggaac

SEQ ID NO: 408796 - DNA, 33 bp, Homo sapien
taaacttgtttgaatcgcaaccacaagtggaac

SEQ ID NO: 408797 - DNA, 33 bp, Homo sapien
attacccagtccctagacacagttcaaagaaga

SEQ ID NO: 408798 - DNA, 33 bp, Homo sapien
attacccagtccctagtcacagttcaaagaaga

SEQ ID NO: 408799 - DNA, 33 bp, Homo sapien
tccatcagcaaatgaacgaataagtaatgtata

SEQ ID NO: 408800 - DNA, 33 bp, Homo sapien
tccatcagcaaatgaatgaataagtaatgtata

SEQ ID NO: 408801 - DNA, 33 bp, Homo sapien
gccaggacctgataggaagaaggacaatttttg

SEQ ID NO: 408802 - DNA, 33 bp, Homo sapien
gccaggacctgataggtagaaggacaatttttg

SEQ ID NO: 408803 - DNA, 33 bp, Homo sapien
tgggatgaaggagagaagataaatgcaggacta

SEQ ID NO: 408804 - DNA, 33 bp, Homo sapien
tgggatgaaggagagaggataaatgcaggacta

SEQ ID NO: 408805 - DNA, 33 bp, Homo sapien
tattctgttccctcatcataaccttaccccaac

SEQ ID NO: 408806 - DNA, 33 bp, Homo sapien
tattctgttccctcatgataaccttaccccaac

SEQ ID NO: 408807 - DNA, 33 bp, Homo sapien
agaatgggaaccttcccaatgagcaatatgttt

SEQ ID NO: 408808 - DNA, 33 bp, Homo sapien
agaatgggaaccttcctaatgagcaatatgttt

SEQ ID NO: 408809 - DNA, 33 bp, Homo sapien
tcaggataaatgagggccacgagagatttataa

SEQ ID NO: 408810 - DNA, 33 bp, Homo sapien
tcaggataaatgagggtcacgagagatttataa

SEQ ID NO: 408811 - DNA, 33 bp, Homo sapien
ctcctcataaataaaaggtaaggtctaatctta

SEQ ID NO: 408812 - DNA, 33 bp, Homo sapien
ctcctcataaataaaatgtaaggtctaatctta

SEQ ID NO: 408813 - DNA, 33 bp, Homo sapien
ccttgtagaaacaacaaccttgagaggtaatta

SEQ ID NO: 408814 - DNA, 33 bp, Homo sapien
ccttgtagaaacaacagccttgagaggtaatta

SEQ ID NO: 408815 - DNA, 33 bp, Homo sapien
aaacattggcgctttggagcttagtgttttgtt

SEQ ID NO: 408816 - DNA, 33 bp, Homo sapien
aaacattggcgctttgtagcttagtgttttgtt

SEQ ID NO: 408817 - DNA, 33 bp, Homo sapien
catgagtaaattaaaactgcaaatcatggagac

SEQ ID NO: 408818 - DNA, 33 bp, Homo sapien
catgagtaaattaaaattgcaaatcatggagac

SEQ ID NO: 408819 - DNA, 33 bp, Homo sapien
atgtataggaaatgcaatgcactaaggttgaat

SEQ ID NO: 408820 - DNA, 33 bp, Homo sapien
atgtataggaaatgcagtgcactaaggttgaat

SEQ ID NO: 408821 - DNA, 33 bp, Homo sapien
tagcagaaaaccctcaaatttctgaatccgttc

SEQ ID NO: 408822 - DNA, 33 bp, Homo sapien
tagcagaaaaccctcagatttctgaatccgttc

SEQ ID NO: 408823 - DNA, 33 bp, Homo sapien
tctctatctagtagcaatcagagaacggattca

SEQ ID NO: 408824 - DNA, 33 bp, Homo sapien
tctctatctagtagcactcagagaacggattca

SEQ ID NO: 408825 - DNA, 33 bp, Homo sapien
acaaagcaacaacaaccaagacggaggctggaa

SEQ ID NO: 408826 - DNA, 33 bp, Homo sapien
acaaagcaacaacaacgaagacggaggctggaa

SEQ ID NO: 408827 - DNA, 33 bp, Homo sapien
atgttagggaacttatcaatgttatgcaagaga

SEQ ID NO: 408828 - DNA, 33 bp, Homo sapien
atgttagggaacttatgaatgttatgcaagaga

SEQ ID NO: 408829 - DNA, 33 bp, Homo sapien
tgactttttagattaaacttttggctgaagtaa

SEQ ID NO: 408830 - DNA, 33 bp, Homo sapien
tgactttttagattaatcttttggctgaagtaa

SEQ ID NO: 408831 - DNA, 33 bp, Homo sapien
gcttcattgattgacaacaaaagtactgagcta

SEQ ID NO: 408832 - DNA, 33 bp, Homo sapien
gcttcattgattgacagcaaaagtactgagcta

SEQ ID NO: 408833 - DNA, 33 bp, Homo sapien
ttcatgtcagtctcagaataacaagagtaccac

SEQ ID NO: 408834 - DNA, 33 bp, Homo sapien
ttcatgtcagtctcaggataacaagagtaccac

SEQ ID NO: 408835 - DNA, 33 bp, Homo sapien
gggcccattgagcagggatggggttaatccaac

SEQ ID NO: 408836 - DNA, 33 bp, Homo sapien
gggcccattgagcaggtatggggttaatccaac

SEQ ID NO: 408837 - DNA, 33 bp, Homo sapien
tatgttgaacactcttaaaactcataggtaaaa

SEQ ID NO: 408838 - DNA, 33 bp, Homo sapien
tatgttgaacactcttgaaactcataggtaaaa

SEQ ID NO: 408839 - DNA, 33 bp, Homo sapien
attattttcttaggaccactaaagatcatccta

SEQ ID NO: 408840 - DNA, 33 bp, Homo sapien
attattttcttaggactactaaagatcatccta

SEQ ID NO: 408841 - DNA, 33 bp, Homo sapien
gtaaatctctcagacaatagagagacgaaggat

SEQ ID NO: 408842 - DNA, 33 bp, Homo sapien
gtaaatctctcagacagtagagagacgaaggat

SEQ ID NO: 408843 - DNA, 33 bp, Homo sapien
aaaaggctattggactcaacatatgcaatgtgg

SEQ ID NO: 408844 - DNA, 33 bp, Homo sapien
aaaaggctattggacttaacatatgcaatgtgg

SEQ ID NO: 408845 - DNA, 33 bp, Homo sapien
cataattcataggtgaaaaaaatgacacccaaa

SEQ ID NO: 408846 - DNA, 33 bp, Homo sapien
cataattcataggtgagaaaaatgacacccaaa

SEQ ID NO: 408847 - DNA, 33 bp, Homo sapien
aacaggtctatttccaagacgttttactcatca

SEQ ID NO: 408848 - DNA, 33 bp, Homo sapien
aacaggtctatttccaggacgttttactcatca

SEQ ID NO: 408849 - DNA, 33 bp, Homo sapien
tcatgtcaccaaattaagaagaggcactaggaa

SEQ ID NO: 408850 - DNA, 33 bp, Homo sapien
tcatgtcaccaaattaggaagaggcactaggaa

SEQ ID NO: 408851 - DNA, 33 bp, Homo sapien
atccatgaaaagtatacaagcagctgatatttt

SEQ ID NO: 408852 - DNA, 33 bp, Homo sapien
atccatgaaaagtatataagcagctgatatttt

SEQ ID NO: 408853 - DNA, 33 bp, Homo sapien
ctggtgtaataaaagaacaggaaatacaaagtc

SEQ ID NO: 408854 - DNA, 33 bp, Homo sapien
ctggtgtaataaaagaccaggaaatacaaagtc

SEQ ID NO: 408855 - DNA, 33 bp, Homo sapien
aagattaataaaaaacgacagaagtgctttata

SEQ ID NO: 408856 - DNA, 33 bp, Homo sapien
aagattaataaaaaactacagaagtgctttata

SEQ ID NO: 408857 - DNA, 33 bp, Homo sapien
tatgcttgagtaactacattccggggtctatat

SEQ ID NO: 408858 - DNA, 33 bp, Homo sapien
tatgcttgagtaactatattccggggtctatat

SEQ ID NO: 408859 - DNA, 33 bp, Homo sapien
ctggtgctctctgttgcactattagaatcagct

SEQ ID NO: 408860 - DNA, 33 bp, Homo sapien
ctggtgctctctgttgtactattagaatcagct

SEQ ID NO: 408861 - DNA, 33 bp, Homo sapien
tacctattgaaacaaaaactttggacatgtggc

SEQ ID NO: 408862 - DNA, 33 bp, Homo sapien
tacctattgaaacaaacactttggacatgtggc

SEQ ID NO: 408863 - DNA, 33 bp, Homo sapien
catggcttctcaatcaagcaagtacatgtttta

SEQ ID NO: 408864 - DNA, 33 bp, Homo sapien
catggcttctcaatcaggcaagtacatgtttta

SEQ ID NO: 408865 - DNA, 33 bp, Homo sapien
agtaatcgatgggctacatgaggtagaagttgt

SEQ ID NO: 408866 - DNA, 33 bp, Homo sapien
agtaatcgatgggctagatgaggtagaagttgt

SEQ ID NO: 408867 - DNA, 33 bp, Homo sapien
tttactggatagattccaaagaaggggaaactc

SEQ ID NO: 408868 - DNA, 33 bp, Homo sapien
tttactggatagattctaaagaaggggaaactc

SEQ ID NO: 408869 - DNA, 33 bp, Homo sapien
tttgccatgtagaaaaattattcaacacagaga

SEQ ID NO: 408870 - DNA, 33 bp, Homo sapien
tttgccatgtagaaaagttattcaacacagaga

SEQ ID NO: 408871 - DNA, 33 bp, Homo sapien
gagacaactcagacaccgagttatgagatgaat

SEQ ID NO: 408872 - DNA, 33 bp, Homo sapien
gagacaactcagacacggagttatgagatgaat

SEQ ID NO: 408873 - DNA, 33 bp, Homo sapien
gatgttgctcacatgcagagtttgtggtgaaaa

SEQ ID NO: 408874 - DNA, 33 bp, Homo sapien
gatgttgctcacatgcggagtttgtggtgaaaa

SEQ ID NO: 408875 - DNA, 33 bp, Homo sapien
gatgaaaattcaagtaagtagtcattgatgaag

SEQ ID NO: 408876 - DNA, 33 bp, Homo sapien
gatgaaaattcaagtaggtagtcattgatgaag

SEQ ID NO: 408877 - DNA, 33 bp, Homo sapien
tactgcaggtagaatacagaggtgaaaagaaat

SEQ ID NO: 408878 - DNA, 33 bp, Homo sapien
tactgcaggtagaatatagaggtgaaaagaaat

SEQ ID NO: 408879 - DNA, 33 bp, Homo sapien
ttccaaatgagaacaacggactcccacagttta

SEQ ID NO: 408880 - DNA, 33 bp, Homo sapien
ttccaaatgagaacaatggactcccacagttta

SEQ ID NO: 408881 - DNA, 33 bp, Homo sapien
tgtctggaatctataaataacataaccagttag

SEQ ID NO: 408882 - DNA, 33 bp, Homo sapien
tgtctggaatctataagtaacataaccagttag

SEQ ID NO: 408883 - DNA, 33 bp, Homo sapien; identical to SEQ ID NO: 408881

SEQ ID NO: 408884 - DNA, 33 bp, Homo sapien; identical to SEQ ID NO: 408882

SEQ ID NO: 408885 - DNA, 33 bp, Homo sapien
ttcaatcagaattgcaatcttccaaacagaatg

SEQ ID NO: 408886 - DNA, 33 bp, Homo sapien
ttcaatcagaattgcagtcttccaaacagaatg

SEQ ID NO: 408887 - DNA, 33 bp, Homo sapien
gagtctcaatgtcaacacatatcctgtgtccaa

SEQ ID NO: 408888 - DNA, 33 bp, Homo sapien
gagtctcaatgtcaactcatatcctgtgtccaa

SEQ ID NO: 408889 - DNA, 33 bp, Homo sapien
atttgttccaatgcaaatgatgtattaggaaat

SEQ ID NO: 408890 - DNA, 33 bp, Homo sapien
atttgttccaatgcaattgatgtattaggaaat

SEQ ID NO: 408891 - DNA, 33 bp, Homo sapien
actttgttcagtaaaacccaagcttgaggactg

SEQ ID NO: 408892 - DNA, 33 bp, Homo sapien
actttgttcagtaaaatccaagcttgaggactg

SEQ ID NO: 408893 - DNA, 33 bp, Homo sapien
ggtttgtatgcttaaccggatttcaaaatagtt

SEQ ID NO: 408894 - DNA, 33 bp, Homo sapien
ggtttgtatgcttaactggatttcaaaatagtt

SEQ ID NO: 408895 - DNA, 33 bp, Homo sapien
agactttgaacaggaacaaagctcttggtttta

SEQ ID NO: 408896 - DNA, 33 bp, Homo sapien
agactttgaacaggaataaagctcttggtttta

SEQ ID NO: 408897 - DNA, 33 bp, Homo sapien
ttgcttttggctgcacactagtgaatggattat

SEQ ID NO: 408898 - DNA, 33 bp, Homo sapien
ttgcttttggctgcacgctagtgaatggattat

SEQ ID NO: 408899 - DNA, 33 bp, Homo sapien
cctgcactcatgatacaagtcaccaaatcctga

SEQ ID NO: 408900 - DNA, 33 bp, Homo sapien
cctgcactcatgatacgagtcaccaaatcctga

SEQ ID NO: 408901 - DNA, 33 bp, Homo sapien
cctagtgccaaaataagtcttcccaacacttca

SEQ ID NO: 408902 - DNA, 33 bp, Homo sapien
cctagtgccaaaataattcttcccaacacttca

SEQ ID NO: 408903 - DNA, 33 bp, Homo sapien
cagttctgtcaactcacgatttcatacctgttt

SEQ ID NO: 408904 - DNA, 33 bp, Homo sapien
cagttctgtcaactcatgatttcatacctgttt

SEQ ID NO: 408905 - DNA, 33 bp, Homo sapien
gcaggcagtacagcaacagtcatctttcaaggt

SEQ ID NO: 408906 - DNA, 33 bp, Homo sapien
gcaggcagtacagcaatagtcatctttcaaggt

SEQ ID NO: 408907 - DNA, 33 bp, Homo sapien
agattagcagcagatcaagggaaaagaataaaa

SEQ ID NO: 408908 - DNA, 33 bp, Homo sapien
agattagcagcagatcgagggaaaagaataaaa

SEQ ID NO: 408909 - DNA, 33 bp, Homo sapien
gagccttagactgcacaaatcgtagaatgggtt

SEQ ID NO: 408910 - DNA, 33 bp, Homo sapien
gagccttagactgcaccaatcgtagaatgggtt

SEQ ID NO: 408911 - DNA, 33 bp, Homo sapien
ctagttcttgccatccacttagcccatttctct

SEQ ID NO: 408912 - DNA, 33 bp, Homo sapien
ctagttcttgccatccgcttagcccatttctct

SEQ ID NO: 408913 - DNA, 33 bp, Homo sapien
tcagggagatatttgacagtgctgccaagacga

SEQ ID NO: 408914 - DNA, 33 bp, Homo sapien
tcagggagatatttgatagtgctgccaagacga

SEQ ID NO: 408915 - DNA, 33 bp, Homo sapien
gtggcattgtcaattacatttgaagatgcacat

SEQ ID NO: 408916 - DNA, 33 bp, Homo sapien
gtggcattgtcaattatatttgaagatgcacat

SEQ ID NO: 408917 - DNA, 33 bp, Homo sapien
tacactatgccatgttaaaaaactacaaggctc

SEQ ID NO: 408918 - DNA, 33 bp, Homo sapien
tacactatgccatgttgaaaaactacaaggctc

SEQ ID NO: 408919 - DNA, 33 bp, Homo sapien
gagcatgattgctagactatatgataggactat

SEQ ID NO: 408920 - DNA, 33 bp, Homo sapien
gagcatgattgctagattatatgataggactat

SEQ ID NO: 408921 - DNA, 33 bp, Homo sapien
ctttatttggtggtataagaagcaagggaggaa

SEQ ID NO: 408922 - DNA, 33 bp, Homo sapien
ctttatttggtggtatgagaagcaagggaggaa

SEQ ID NO: 408923 - DNA, 33 bp, Homo sapien
gaaagtactgctagctcagagggtttccttgag

SEQ ID NO: 408924 - DNA, 33 bp, Homo sapien
gaaagtactgctagcttagagggtttccttgag

SEQ ID NO: 408925 - DNA, 33 bp, Homo sapien
caatatgatggtaactaacatttcctcctattc

SEQ ID NO: 408926 - DNA, 33 bp, Homo sapien
caatatgatggtaacttacatttcctcctattc

SEQ ID NO: 408927 - DNA, 33 bp, Homo sapien
aagtggtgtaacagaaagttgagaaattgtaag

SEQ ID NO: 408928 - DNA, 33 bp, Homo sapien
aagtggtgtaacagaaggttgagaaattgtaag

SEQ ID NO: 408929 - DNA, 33 bp, Homo sapien
ggccttgatttttcacaggaatttcttcacatc

SEQ ID NO: 408930 - DNA, 33 bp, Homo sapien
ggccttgatttttcacgggaatttcttcacatc

SEQ ID NO: 408931 - DNA, 33 bp, Homo sapien
atgctgagttttataacctgggaccataaggaa

SEQ ID NO: 408932 - DNA, 33 bp, Homo sapien
atgctgagttttataatctgggaccataaggaa

SEQ ID NO: 408933 - DNA, 33 bp, Homo sapien
caatactggagacataggttacctgactttaaa

SEQ ID NO: 408934 - DNA, 33 bp, Homo sapien
caatactggagacatatgttacctgactttaaa

SEQ ID NO: 408935 - DNA, 33 bp, Homo sapien
ctcttggtcctgtgcacaccattcatcctcatg

SEQ ID NO: 408936 - DNA, 33 bp, Homo sapien
ctcttggtcctgtgcataccattcatcctcatg

SEQ ID NO: 408937 - DNA, 33 bp, Homo sapien
attgacatcttctacaatacagccccatttagt

SEQ ID NO: 408938 - DNA, 33 bp, Homo sapien
attgacatcttctacattacagccccatttagt

SEQ ID NO: 408939 - DNA, 33 bp, Homo sapien
aacatctccagatagcgacaacttcctcctggg

SEQ ID NO: 408940 - DNA, 33 bp, Homo sapien
aacatctccagatagctacaacttcctcctggg

SEQ ID NO: 408941 - DNA, 33 bp, Homo sapien
ctggaccatatatgacccttgaaaactttacca

SEQ ID NO: 408942 - DNA, 33 bp, Homo sapien
ctggaccatatatgacgcttgaaaactttacca

SEQ ID NO: 408943 - DNA, 33 bp, Homo sapien
agtcctaatcacctgaactttctaagtcccact

SEQ ID NO: 408944 - DNA, 33 bp, Homo sapien
agtcctaatcacctgacctttctaagtcccact

SEQ ID NO: 408945 - DNA, 33 bp, Homo sapien
atagaacaggagaacgaaactggagaatgtaga

SEQ ID NO: 408946 - DNA, 33 bp, Homo sapien
atagaacaggagaacggaactggagaatgtaga

SEQ ID NO: 408947 - DNA, 33 bp, Homo sapien
gaaatatttggttttgcatcttgcttgagaaaa

SEQ ID NO: 408948 - DNA, 33 bp, Homo sapien
gaaatatttggttttggatcttgcttgagaaaa

SEQ ID NO: 408949 - DNA, 33 bp, Homo sapien
ccttgttgcaaattcacagaggcagtagccggg

SEQ ID NO: 408950 - DNA, 33 bp, Homo sapien
ccttgttgcaaattcatagaggcagtagccggg

SEQ ID NO: 408951 - DNA, 33 bp, Homo sapien
gaaaggaaaagtaggaaggagtaagccattttt

SEQ ID NO: 408952 - DNA, 33 bp, Homo sapien
gaaaggaaaagtaggagggagtaagccattttt

SEQ ID NO: 408953 - DNA, 33 bp, Homo sapien
tctctaggaccctaaaatgatggcctctggtat

SEQ ID NO: 408954 - DNA, 33 bp, Homo sapien
tctctaggaccctaaagtgatggcctctggtat

SEQ ID NO: 408955 - DNA, 33 bp, Homo sapien
gttgttacccatccaactaagccagaactttgc

SEQ ID NO: 408956 - DNA, 33 bp, Homo sapien
gttgttacccatccaagtaagccagaactttgc

SEQ ID NO: 408957 - DNA, 33 bp, Homo sapien
gaacatgatgagttaaagtcccccagtggagag

SEQ ID NO: 408958 - DNA, 33 bp, Homo sapien
gaacatgatgagttaaggtcccccagtggagag

SEQ ID NO: 408959 - DNA, 33 bp, Homo sapien
acattaaaaatcactaaggaaaatttctgagta

SEQ ID NO: 408960 - DNA, 33 bp, Homo sapien
acattaaaaatcactacggaaaatttctgagta

SEQ ID NO: 408961 - DNA, 33 bp, Homo sapien
ttgaaaaatagcatcccctgaaatgtactcaga

SEQ ID NO: 408962 - DNA, 33 bp, Homo sapien
ttgaaaaatagcatcctctgaaatgtactcaga

SEQ ID NO: 408963 - DNA, 33 bp, Homo sapien
atcaggcatctataaaagcacctcatgtattac

SEQ ID NO: 408964 - DNA, 33 bp, Homo sapien
atcaggcatctataaaggcacctcatgtattac

SEQ ID NO: 408965 - DNA, 33 bp, Homo sapien
tcaaatatgagtgaaaagtgaaataagcctcta

SEQ ID NO: 408966 - DNA, 33 bp, Homo sapien
tcaaatatgagtgaaatgtgaaataagcctcta

SEQ ID NO: 408967 - DNA, 33 bp, Homo sapien
ttaggaaagtcgctgcaaactggtactataaat

SEQ ID NO: 408968 - DNA, 33 bp, Homo sapien
ttaggaaagtcgctgcgaactggtactataaat

SEQ ID NO: 408969 - DNA, 33 bp, Homo sapien
ggttaattgaactaaaactgtgaatcaagtaaa

SEQ ID NO: 408970 - DNA, 33 bp, Homo sapien
ggttaattgaactaaagctgtgaatcaagtaaa

SEQ ID NO: 408971 - DNA, 33 bp, Homo sapien
gatttcagtgctattcccatgacaccagtccat

SEQ ID NO: 408972 - DNA, 33 bp, Homo sapien
gatttcagtgctattctcatgacaccagtccat

SEQ ID NO: 408973 - DNA, 33 bp, Homo sapien
gagtggaccagataacagaaattcagctaatgg

SEQ ID NO: 408974 - DNA, 33 bp, Homo sapien
gagtggaccagataacggaaattcagctaatgg

SEQ ID NO: 408975 - DNA, 33 bp, Homo sapien
tttttgttgatttttcaatttttcatcctttgc

SEQ ID NO: 408976 - DNA, 33 bp, Homo sapien
tttttgttgatttttcgatttttcatcctttgc

SEQ ID NO: 408977 - DNA, 33 bp, Homo sapien
aggacagatcaaaacaataactttttatattga

SEQ ID NO: 408978 - DNA, 33 bp, Homo sapien
aggacagatcaaaacagtaactttttatattga

SEQ ID NO: 408979 - DNA, 33 bp, Homo sapien
agataaatattcatgacgttaccttgacatact

SEQ ID NO: 408980 - DNA, 33 bp, Homo sapien
agataaatattcatgatgttaccttgacatact

SEQ ID NO: 408981 - DNA, 33 bp, Homo sapien
gtcaccaagaatatgcaaacaactttttaatgt

SEQ ID NO: 408982 - DNA, 33 bp, Homo sapien
gtcaccaagaatatgccaacaactttttaatgt

SEQ ID NO: 408983 - DNA, 33 bp, Homo sapien
gtccccaccctctaatgatcagcatccaaacta

SEQ ID NO: 408984 - DNA, 33 bp, Homo sapien
gtccccaccctctaattatcagcatccaaacta

SEQ ID NO: 408985 - DNA, 33 bp, Homo sapien
tgagatgaaaatggaaactacttcaaagatagt

SEQ ID NO: 408986 - DNA, 33 bp, Homo sapien
tgagatgaaaatggaagctacttcaaagatagt

SEQ ID NO: 408987 - DNA, 33 bp, Homo sapien
ttattctgactgttaaaaatcatcattattatc

SEQ ID NO: 408988 - DNA, 33 bp, Homo sapien
ttattctgactgttaacaatcatcattattatc

SEQ ID NO: 408989 - DNA, 33 bp, Homo sapien
ctctcctttttgtcccagcaagattcttataag

SEQ ID NO: 408990 - DNA, 33 bp, Homo sapien
ctctcctttttgtcccggcaagattcttataag

SEQ ID NO: 408991 - DNA, 33 bp, Homo sapien
attattaagacagtaactgcagtgcattaaact

SEQ ID NO: 408992 - DNA, 33 bp, Homo sapien
attattaagacagtaagtgcagtgcattaaact

SEQ ID NO: 408993 - DNA, 33 bp, Homo sapien
ccagatttaaatgtgcaaaagtgctcaacccct

SEQ ID NO: 408994 - DNA, 33 bp, Homo sapien
ccagatttaaatgtgcgaaagtgctcaacccct

SEQ ID NO: 408995 - DNA, 33 bp, Homo sapien
tgtccatagccatagaatcaagagtatcatgaa

SEQ ID NO: 408996 - DNA, 33 bp, Homo sapien
tgtccatagccatagagtcaagagtatcatgaa

SEQ ID NO: 408997 - DNA, 33 bp, Homo sapien
ttaatcgatagagagacggttggcaaaacccgg

SEQ ID NO: 408998 - DNA, 33 bp, Homo sapien
ttaatcgatagagagatggttggcaaaacccgg

SEQ ID NO: 408999 - DNA, 33 bp, Homo sapien
atcaattgaccctcgagggagttaggtgacaag

SEQ ID NO: 409000 - DNA, 33 bp, Homo sapien
atcaattgaccctcgatggagttaggtgacaag

SEQ ID NO: 409001 - DNA, 33 bp, Homo sapien
ggggaaattgaggatgcctaatgggtaacaaaa

SEQ ID NO: 409002 - DNA, 33 bp, Homo sapien
ggggaaattgaggatggctaatgggtaacaaaa

SEQ ID NO: 409003 - DNA, 33 bp, Homo sapien
gcaaggatttccaaaaaacttgaaggtactttg

SEQ ID NO: 409004 - DNA, 33 bp, Homo sapien
gcaaggatttccaaaacacttgaaggtactttg

SEQ ID NO: 409005 - DNA, 33 bp, Homo sapien
attcaagcacattacaggcattacatttattgt

SEQ ID NO: 409006 - DNA, 33 bp, Homo sapien
attcaagcacattacatgcattacatttattgt

SEQ ID NO: 409007 - DNA, 33 bp, Homo sapien
tggctataaatatagacgaagctttactccctg

SEQ ID NO: 409008 - DNA, 33 bp, Homo sapien
tggctataaatatagatgaagctttactccctg

SEQ ID NO: 409009 - DNA, 33 bp, Homo sapien
acataagcttaacccacgcaccagaagatggaa

SEQ ID NO: 409010 - DNA, 33 bp, Homo sapien
acataagcttaacccatgcaccagaagatggaa

SEQ ID NO: 409011 - DNA, 33 bp, Homo sapien
gttgattcctttagcaaaatctcttagacatta

SEQ ID NO: 409012 - DNA, 33 bp, Homo sapien
gttgattcctttagcataatctcttagacatta

SEQ ID NO: 409013 - DNA, 33 bp, Homo sapien
cgagtatgaaggaatgaaggtacatcctgtagg

SEQ ID NO: 409014 - DNA, 33 bp, Homo sapien
cgagtatgaaggaatggaggtacatcctgtagg

SEQ ID NO: 409015 - DNA, 33 bp, Homo sapien
caaaaatggactaatacgcagctttaccacaag

SEQ ID NO: 409016 - DNA, 33 bp, Homo sapien
caaaaatggactaatatgcagctttaccacaag

SEQ ID NO: 409017 - DNA, 33 bp, Homo sapien
actatatttttgtcaaagtcactacctcttgct

SEQ ID NO: 409018 - DNA, 33 bp, Homo sapien
actatatttttgtcaatgtcactacctcttgct

SEQ ID NO: 409019 - DNA, 33 bp, Homo sapien
ttcctcattccactaacaacattcatcttttta

SEQ ID NO: 409020 - DNA, 33 bp, Homo sapien
ttcctcattccactaagaacattcatcttttta

SEQ ID NO: 409021 - DNA, 33 bp, Homo sapien
gggcatctttggagaaacaggacttgccctgga

SEQ ID NO: 409022 - DNA, 33 bp, Homo sapien
gggcatctttggagaagcaggacttgccctgga

SEQ ID NO: 409023 - DNA, 33 bp, Homo sapien
gataaaacaacacaaaagttggcaaagatgtag

SEQ ID NO: 409024 - DNA, 33 bp, Homo sapien
gataaaacaacacaaaggttggcaaagatgtag

SEQ ID NO: 409025 - DNA, 33 bp, Homo sapien
cactgtctgcctttatcaaattatttcgttatt

SEQ ID NO: 409026 - DNA, 33 bp, Homo sapien
cactgtctgcctttatgaaattatttcgttatt

SEQ ID NO: 409027 - DNA, 33 bp, Homo sapien
catgagattatggcagaaactcatgactggaaa

SEQ ID NO: 409028 - DNA, 33 bp, Homo sapien
catgagattatggcaggaactcatgactggaaa

SEQ ID NO: 409029 - DNA, 33 bp, Homo sapien
cccagctacccatacaacttctacctctttaat

SEQ ID NO: 409030 - DNA, 33 bp, Homo sapien
cccagctacccatacagcttctacctctttaat

SEQ ID NO: 409031 - DNA, 33 bp, Homo sapien
atactgtgattaaaaccaaaccccattgttata

SEQ ID NO: 409032 - DNA, 33 bp, Homo sapien
atactgtgattaaaacgaaaccccattgttata

SEQ ID NO: 409033 - DNA, 33 bp, Homo sapien
aagttctacgtataagaaagtgcattggactga

SEQ ID NO: 409034 - DNA, 33 bp, Homo sapien
aagttctacgtataaggaagtgcattggactga

SEQ ID NO: 409035 - DNA, 33 bp, Homo sapien
aggtagcataccgtaaacaacaatccaaaaagt

SEQ ID NO: 409036 - DNA, 33 bp, Homo sapien
aggtagcataccgtaagcaacaatccaaaaagt

SEQ ID NO: 409037 - DNA, 33 bp, Homo sapien
gaagttcaagccctaccctagacctactgaatt

SEQ ID NO: 409038 - DNA, 33 bp, Homo sapien
gaagttcaagccctacgctagacctactgaatt

SEQ ID NO: 409039 - DNA, 33 bp, Homo sapien
gatatcctaatgtccaatgcaaaattaaaaata

SEQ ID NO: 409040 - DNA, 33 bp, Homo sapien
gatatcctaatgtccagtgcaaaattaaaaata

SEQ ID NO: 409041 - DNA, 33 bp, Homo sapien
cagcagagacaaagatgactgtaaccaatcagt

SEQ ID NO: 409042 - DNA, 33 bp, Homo sapien
cagcagagacaaagattactgtaaccaatcagt

SEQ ID NO: 409043 - DNA, 33 bp, Homo sapien
cttaaattcttccaaaatccactctcaaattct

SEQ ID NO: 409044 - DNA, 33 bp, Homo sapien
cttaaattcttccaaagtccactctcaaattct

SEQ ID NO: 409045 - DNA, 33 bp, Homo sapien
tgtttttaatattttacctactgtcgctaacta

SEQ ID NO: 409046 - DNA, 33 bp, Homo sapien
tgtttttaatattttatctactgtcgctaacta

SEQ ID NO: 409047 - DNA, 33 bp, Homo sapien
ctgttctacctggctacagtccctagctagcca

SEQ ID NO: 409048 - DNA, 33 bp, Homo sapien
ctgttctacctggctatagtccctagctagcca

SEQ ID NO: 409049 - DNA, 33 bp, Homo sapien
gccctgcaaatatgtaagatcacaggtctgctt

SEQ ID NO: 409050 - DNA, 33 bp, Homo sapien
gccctgcaaatatgtaggatcacaggtctgctt

SEQ ID NO: 409051 - DNA, 33 bp, Homo sapien
ttagattctagttcatgaatgcatgtgagtatg

SEQ ID NO: 409052 - DNA, 33 bp, Homo sapien
ttagattctagttcattaatgcatgtgagtatg

SEQ ID NO: 409053 - DNA, 33 bp, Homo sapien
caaacatcactacatacctataaatacgtacaa

SEQ ID NO: 409054 - DNA, 33 bp, Homo sapien
caaacatcactacatatctataaatacgtacaa

SEQ ID NO: 409055 - DNA, 33 bp, Homo sapien
atggagagatgagaaacaacatggtagcaaagg

SEQ ID NO: 409056 - DNA, 33 bp, Homo sapien
atggagagatgagaaagaacatggtagcaaagg

SEQ ID NO: 409057 - DNA, 33 bp, Homo sapien
ttttaaaatttagaagccacatctaatgaaact

SEQ ID NO: 409058 - DNA, 33 bp, Homo sapien
ttttaaaatttagaaggcacatctaatgaaact

SEQ ID NO: 409059 - DNA, 33 bp, Homo sapien
tcaagggtctcttctaaatgaggaagcaactgt

SEQ ID NO: 409060 - DNA, 33 bp, Homo sapien
tcaagggtctcttctacatgaggaagcaactgt

SEQ ID NO: 409061 - DNA, 33 bp, Homo sapien
cattttgccattaagacaattggacattttaaa

SEQ ID NO: 409062 - DNA, 33 bp, Homo sapien
cattttgccattaagataattggacattttaaa

SEQ ID NO: 409063 - DNA, 33 bp, Homo sapien
gtacaataaaatcagaacaaaccactcaaatat

SEQ ID NO: 409064 - DNA, 33 bp, Homo sapien
gtacaataaaatcagatcaaaccactcaaatat

SEQ ID NO: 409065 - DNA, 33 bp, Homo sapien
tcattctccctctaagcagagctgtaggagcac

SEQ ID NO: 409066 - DNA, 33 bp, Homo sapien
tcattctccctctaagtagagctgtaggagcac

SEQ ID NO: 409067 - DNA, 33 bp, Homo sapien
aagcagaggtattcaggaagatttgcaaacacc

SEQ ID NO: 409068 - DNA, 33 bp, Homo sapien
aagcagaggtattcagtaagatttgcaaacacc

SEQ ID NO: 409069 - DNA, 33 bp, Homo sapien
tctattttaaagtctcaagtgaagtagtttgga

SEQ ID NO: 409070 - DNA, 33 bp, Homo sapien
tctattttaaagtctcgagtgaagtagtttgga

SEQ ID NO: 409071 - DNA, 33 bp, Homo sapien
gaataaagtgagataaaggacacaaagcacttt

SEQ ID NO: 409072 - DNA, 33 bp, Homo sapien
gaataaagtgagataatggacacaaagcacttt

SEQ ID NO: 409073 - DNA, 33 bp, Homo sapien
tctgccctatttgcaacggttgcagttaggcca

SEQ ID NO: 409074 - DNA, 33 bp, Homo sapien
tctgccctatttgcaatggttgcagttaggcca

SEQ ID NO: 409075 - DNA, 33 bp, Homo sapien
ctaatttcagtttttcactctagacattctatc

SEQ ID NO: 409076 - DNA, 33 bp, Homo sapien
ctaatttcagtttttcgctctagacattctatc

SEQ ID NO: 409077 - DNA, 33 bp, Homo sapien
ttatttacctgagatacgtaaactaaatgatgt

SEQ ID NO: 409078 - DNA, 33 bp, Homo sapien
ttatttacctgagatatgtaaactaaatgatgt

SEQ ID NO: 409079 - DNA, 33 bp, Homo sapien
ataaagatcacctgcactgattaaatctagagg

SEQ ID NO: 409080 - DNA, 33 bp, Homo sapien
ataaagatcacctgcattgattaaatctagagg

SEQ ID NO: 409081 - DNA, 33 bp, Homo sapien
actctcatttctgtccagaggatttctatcatt

SEQ ID NO: 409082 - DNA, 33 bp, Homo sapien
actctcatttctgtccggaggatttctatcatt

SEQ ID NO: 409083 - DNA, 33 bp, Homo sapien
atactaaagtttcatgcagattctataactgaa

SEQ ID NO: 409084 - DNA, 33 bp, Homo sapien
atactaaagtttcatggagattctataactgaa

SEQ ID NO: 409085 - DNA, 33 bp, Homo sapien
tattaatataggctacaaacatttctgttacat

SEQ ID NO: 409086 - DNA, 33 bp, Homo sapien
tattaatataggctacgaacatttctgttacat

SEQ ID NO: 409087 - DNA, 33 bp, Homo sapien
gccaggaattgtgataaacttcaagaattcaaa

SEQ ID NO: 409088 - DNA, 33 bp, Homo sapien
gccaggaattgtgatacacttcaagaattcaaa

SEQ ID NO: 409089 - DNA, 33 bp, Homo sapien
ctttgctttttcctgacgctcccgttattttag

SEQ ID NO: 409090 - DNA, 33 bp, Homo sapien
ctttgctttttcctgatgctcccgttattttag

SEQ ID NO: 409091 - DNA, 33 bp, Homo sapien
actatgcagctgatacaatctacttagctttcc

SEQ ID NO: 409092 - DNA, 33 bp, Homo sapien
actatgcagctgatacgatctacttagctttcc

SEQ ID NO: 409093 - DNA, 33 bp, Homo sapien
tatttagttgtagttagaggcatcccagaaaaa

SEQ ID NO: 409094 - DNA, 33 bp, Homo sapien
tatttagttgtagttataggcatcccagaaaaa

SEQ ID NO: 409095 - DNA, 33 bp, Homo sapien
tttccctatgctcaccactttgataagttactt

SEQ ID NO: 409096 - DNA, 33 bp, Homo sapien
tttccctatgctcacctctttgataagttactt

SEQ ID NO: 409097 - DNA, 33 bp, Homo sapien
tattattcagtcacaacgataaaatcatgtcct

SEQ ID NO: 409098 - DNA, 33 bp, Homo sapien
tattattcagtcacaaggataaaatcatgtcct

SEQ ID NO: 409099 - DNA, 33 bp, Homo sapien
gagtttgaagtattagaaatcacatcttttttg

SEQ ID NO: 409100 - DNA, 33 bp, Homo sapien
gagtttgaagtattaggaatcacatcttttttg

SEQ ID NO: 409101 - DNA, 33 bp, Homo sapien
ggcctgaaaaatcaacaccccagagatcctgta

SEQ ID NO: 409102 - DNA, 33 bp, Homo sapien
ggcctgaaaaatcaacgccccagagatcctgta

SEQ ID NO: 409103 - DNA, 33 bp, Homo sapien
agtaatgtatcatctgcacctgaagaagcaaga

SEQ ID NO: 409104 - DNA, 33 bp, Homo sapien
agtaatgtatcatctggacctgaagaagcaaga

SEQ ID NO: 409105 - DNA, 33 bp, Homo sapien
aaagtattctatttgagccaaaaggttacataa

SEQ ID NO: 409106 - DNA, 33 bp, Homo sapien
aaagtattctatttgatccaaaaggttacataa

SEQ ID NO: 409107 - DNA, 33 bp, Homo sapien
ggcactgataagcacacagtctcttgcaaaaat

SEQ ID NO: 409108 - DNA, 33 bp, Homo sapien
ggcactgataagcacatagtctcttgcaaaaat

SEQ ID NO: 409109 - DNA, 33 bp, Homo sapien
attcacttcctataaaagctagtcttgctttga

SEQ ID NO: 409110 - DNA, 33 bp, Homo sapien
attcacttcctataaaggctagtcttgctttga

SEQ ID NO: 409111 - DNA, 33 bp, Homo sapien
agtttacatgccaggaataaaggcaagtcaaag

SEQ ID NO: 409112 - DNA, 33 bp, Homo sapien
agtttacatgccaggagtaaaggcaagtcaaag

SEQ ID NO: 409113 - DNA, 33 bp, Homo sapien
tgcagatgtgtgcaaggctcttctagctgctgc

SEQ ID NO: 409114 - DNA, 33 bp, Homo sapien
tgcagatgtgtgcaagtctcttctagctgctgc

SEQ ID NO: 409115 - DNA, 33 bp, Homo sapien
attgcgtgtacccaccggagttagccacaacca

SEQ ID NO: 409116 - DNA, 33 bp, Homo sapien
attgcgtgtacccacctgagttagccacaacca

SEQ ID NO: 409117 - DNA, 33 bp, Homo sapien
aggactgaataattcacgaggaagaaaactagt

SEQ ID NO: 409118 - DNA, 33 bp, Homo sapien
aggactgaataattcatgaggaagaaaactagt

SEQ ID NO: 409119 - DNA, 33 bp, Homo sapien
gatttaaaaaactacaaagtggcatagaatata

SEQ ID NO: 409120 - DNA, 33 bp, Homo sapien
gatttaaaaaactacagagtggcatagaatata

SEQ ID NO: 409121 - DNA, 33 bp, Homo sapien
aaattaaaaacaagtcaacttttcatcaacaga

SEQ ID NO: 409122 - DNA, 33 bp, Homo sapien
aaattaaaaacaagtcgacttttcatcaacaga

SEQ ID NO: 409123 - DNA, 33 bp, Homo sapien
gaggatctcattactccagtccctttcgaatgt

SEQ ID NO: 409124 - DNA, 33 bp, Homo sapien
gaggatctcattactctagtccctttcgaatgt

SEQ ID NO: 409125 - DNA, 33 bp, Homo sapien
cttaacccttcacctcagaaatctgtacatgat

SEQ ID NO: 409126 - DNA, 33 bp, Homo sapien
cttaacccttcacctcggaaatctgtacatgat

SEQ ID NO: 409127 - DNA, 33 bp, Homo sapien
gtttgagaaaaaccaccggagcgcacatgagaa

SEQ ID NO: 409128 - DNA, 33 bp, Homo sapien
gtttgagaaaaaccactggagcgcacatgagaa

SEQ ID NO: 409129 - DNA, 33 bp, Homo sapien
tctacactttaacttcgcccctgccacacacac

SEQ ID NO: 409130 - DNA, 33 bp, Homo sapien
tctacactttaacttctcccctgccacacacac

SEQ ID NO: 409131 - DNA, 33 bp, Homo sapien
tattctcaatctccataatctccattgttatga

SEQ ID NO: 409132 - DNA, 33 bp, Homo sapien
tattctcaatctccatgatctccattgttatga

SEQ ID NO: 409133 - DNA, 33 bp, Homo sapien
atccactctcaagaggaccaagtgtctgttgtt

SEQ ID NO: 409134 - DNA, 33 bp, Homo sapien
atccactctcaagaggcccaagtgtctgttgtt

SEQ ID NO: 409135 - DNA, 33 bp, Homo sapien
ctgatggtagtggtggccacaatgagaggctcc

SEQ ID NO: 409136 - DNA, 33 bp, Homo sapien
ctgatggtagtggtggtcacaatgagaggctcc

SEQ ID NO: 409137 - DNA, 33 bp, Homo sapien
atacacattaaacttcaaatcttgtccttaagt

SEQ ID NO: 409138 - DNA, 33 bp, Homo sapien
atacacattaaacttctaatcttgtccttaagt

SEQ ID NO: 409139 - DNA, 33 bp, Homo sapien
attacataatggtaaacggattaatgcaacaag

SEQ ID NO: 409140 - DNA, 33 bp, Homo sapien
attacataatggtaaagggattaatgcaacaag

SEQ ID NO: 409141 - DNA, 33 bp, Homo sapien
tcagtgcaggcagcagaaacttgctggatgtta

SEQ ID NO: 409142 - DNA, 33 bp, Homo sapien
tcagtgcaggcagcaggaacttgctggatgtta

SEQ ID NO: 409143 - DNA, 33 bp, Homo sapien
actagttattgcacacaaagttacaaatatctc

SEQ ID NO: 409144 - DNA, 33 bp, Homo sapien
actagttattgcacaccaagttacaaatatctc

SEQ ID NO: 409145 - DNA, 33 bp, Homo sapien
aaaatgggatctagcaccattggcatcactggg

SEQ ID NO: 409146 - DNA, 33 bp, Homo sapien
aaaatgggatctagcatcattggcatcactggg

SEQ ID NO: 409147 - DNA, 33 bp, Homo sapien
aaaattctacataaaaacaaagcatatgatatg

SEQ ID NO: 409148 - DNA, 33 bp, Homo sapien
aaaattctacataaaagcaaagcatatgatatg

SEQ ID NO: 409149 - DNA, 33 bp, Homo sapien
ttcacatgcaaagtcaaggtaaacaacacttct

SEQ ID NO: 409150 - DNA, 33 bp, Homo sapien
ttcacatgcaaagtcagggtaaacaacacttct

SEQ ID NO: 409151 - DNA, 33 bp, Homo sapien
gtttatatctaaaaaacacacagacataaacct

SEQ ID NO: 409152 - DNA, 33 bp, Homo sapien
gtttatatctaaaaaagacacagacataaacct

SEQ ID NO: 409153 - DNA, 33 bp, Homo sapien
tgaaatgcaaacttaaaaggtctgtgaatgttg

SEQ ID NO: 409154 - DNA, 33 bp, Homo sapien
tgaaatgcaaacttaagaggtctgtgaatgttg

SEQ ID NO: 409155 - DNA, 33 bp, Homo sapien
tttgtaatgttttctgcaactatctctgtacca

SEQ ID NO: 409156 - DNA, 33 bp, Homo sapien
tttgtaatgttttctggaactatctctgtacca

SEQ ID NO: 409157 - DNA, 33 bp, Homo sapien
agggtaagatagagatcagtgttttacattcat

SEQ ID NO: 409158 - DNA, 33 bp, Homo sapien
agggtaagatagagatgagtgttttacattcat

SEQ ID NO: 409159 - DNA, 33 bp, Homo sapien
ctatacatattcaacaaaagttatgtactaatc

SEQ ID NO: 409160 - DNA, 33 bp, Homo sapien
ctatacatattcaacagaagttatgtactaatc

SEQ ID NO: 409161 - DNA, 33 bp, Homo sapien
ggcgaccacaaagggaaaatcgactatcaccaa

SEQ ID NO: 409162 - DNA, 33 bp, Homo sapien
ggcgaccacaaagggacaatcgactatcaccaa

SEQ ID NO: 409163 - DNA, 33 bp, Homo sapien
agatattggaactaaaccggttggcaaggcaaa

SEQ ID NO: 409164 - DNA, 33 bp, Homo sapien
agatattggaactaaagcggttggcaaggcaaa

SEQ ID NO: 409165 - DNA, 33 bp, Homo sapien
cacgtgtagcaaatgggcaacactatatcatag

SEQ ID NO: 409166 - DNA, 33 bp, Homo sapien
cacgtgtagcaaatggtcaacactatatcatag

SEQ ID NO: 409167 - DNA, 33 bp, Homo sapien
gaatcccgattataaaacataacaaagcaagca

SEQ ID NO: 409168 - DNA, 33 bp, Homo sapien
gaatcccgattataaagcataacaaagcaagca

SEQ ID NO: 409169 - DNA, 33 bp, Homo sapien
catagcatagcagtcaaattttttctccatcac

SEQ ID NO: 409170 - DNA, 33 bp, Homo sapien
catagcatagcagtcagattttttctccatcac

SEQ ID NO: 409171 - DNA, 33 bp, Homo sapien
ccctggatccagtccaagaaaccactttttcct

SEQ ID NO: 409172 - DNA, 33 bp, Homo sapien
ccctggatccagtccaggaaaccactttttcct

SEQ ID NO: 409173 - DNA, 33 bp, Homo sapien
aatattattgaccaaaatataacctgaagaaga

SEQ ID NO: 409174 - DNA, 33 bp, Homo sapien
aatattattgaccaaagtataacctgaagaaga

SEQ ID NO: 409175 - DNA, 33 bp, Homo sapien
ttggaaatatgcatagaacaggatgtggcttga

SEQ ID NO: 409176 - DNA, 33 bp, Homo sapien
ttggaaatatgcatagtacaggatgtggcttga

SEQ ID NO: 409177 - DNA, 33 bp, Homo sapien
agataacagacaataacgatattcttcaccacc

SEQ ID NO: 409178 - DNA, 33 bp, Homo sapien
agataacagacaataatgatattcttcaccacc

SEQ ID NO: 409179 - DNA, 33 bp, Homo sapien
gtaacaagagcaatgcagagtgactttaaataa

SEQ ID NO: 409180 - DNA, 33 bp, Homo sapien
gtaacaagagcaatgcggagtgactttaaataa

SEQ ID NO: 409181 - DNA, 33 bp, Homo sapien
ttgtcactgtcattgccatcactgttctctgaa

SEQ ID NO: 409182 - DNA, 33 bp, Homo sapien
ttgtcactgtcattgctatcactgttctctgaa

SEQ ID NO: 409183 - DNA, 33 bp, Homo sapien
atgtttgggacctgaacgtatctcagtgccact

SEQ ID NO: 409184 - DNA, 33 bp, Homo sapien
atgtttgggacctgaatgtatctcagtgccact

SEQ ID NO: 409185 - DNA, 33 bp, Homo sapien
gccaggtgtgttagggaaaaaaacacgtttatg

SEQ ID NO: 409186 - DNA, 33 bp, Homo sapien
gccaggtgtgttaggggaaaaaacacgtttatg

SEQ ID NO: 409187 - DNA, 33 bp, Homo sapien
ctacaggagtcttccaaaacagtgactttggct

SEQ ID NO: 409188 - DNA, 33 bp, Homo sapien
ctacaggagtcttccacaacagtgactttggct

SEQ ID NO: 409189 - DNA, 33 bp, Homo sapien
acataatgaaataaaacgatggacgattttaaa

SEQ ID NO: 409190 - DNA, 33 bp, Homo sapien
acataatgaaataaaatgatggacgattttaaa

SEQ ID NO: 409191 - DNA, 33 bp, Homo sapien
gtctaacagtgatatcaaaaacaagacagatct

SEQ ID NO: 409192 - DNA, 33 bp, Homo sapien
gtctaacagtgatatctaaaacaagacagatct

SEQ ID NO: 409193 - DNA, 33 bp, Homo sapien
gatgaatggcgaatgacgcagcagataaagagg

SEQ ID NO: 409194 - DNA, 33 bp, Homo sapien
gatgaatggcgaatgatgcagcagataaagagg

SEQ ID NO: 409195 - DNA, 33 bp, Homo sapien
atgacgattgaagatgaagttaagatgctaaca

SEQ ID NO: 409196 - DNA, 33 bp, Homo sapien
atgacgattgaagatggagttaagatgctaaca

SEQ ID NO: 409197 - DNA, 33 bp, Homo sapien
tccctgaagcctataccagcagctatattgggc

SEQ ID NO: 409198 - DNA, 33 bp, Homo sapien
tccctgaagcctatactagcagctatattgggc

SEQ ID NO: 409199 - DNA, 33 bp, Homo sapien
cacactagtgataaaacgaaatctccagcctct

SEQ ID NO: 409200 - DNA, 33 bp, Homo sapien
cacactagtgataaaatgaaatctccagcctct

SEQ ID NO: 409201 - DNA, 33 bp, Homo sapien
ttgttctacactgagcccagaggaatttagtag

SEQ ID NO: 409202 - DNA, 33 bp, Homo sapien
ttgttctacactgagcgcagaggaatttagtag

SEQ ID NO: 409203 - DNA, 33 bp, Homo sapien
ttaagtgtcatttacaacaatgtacaacttgtg

SEQ ID NO: 409204 - DNA, 33 bp, Homo sapien
ttaagtgtcatttacatcaatgtacaacttgtg

SEQ ID NO: 409205 - DNA, 33 bp, Homo sapien
gtcttgaagttctgacggggtttgttgttctgg

SEQ ID NO: 409206 - DNA, 33 bp, Homo sapien
gtcttgaagttctgactgggtttgttgttctgg

SEQ ID NO: 409207 - DNA, 33 bp, Homo sapien
agcaaaagtgaatttcgaagcatctctctagtg

SEQ ID NO: 409208 - DNA, 33 bp, Homo sapien
agcaaaagtgaatttctaagcatctctctagtg

SEQ ID NO: 409209 - DNA, 33 bp, Homo sapien
agttgcggcccttataacttagattgcctttca

SEQ ID NO: 409210 - DNA, 33 bp, Homo sapien
agttgcggcccttatagcttagattgcctttca

SEQ ID NO: 409211 - DNA, 33 bp, Homo sapien
gggaatcacatcatacgaggcaaatttcatcaa

SEQ ID NO: 409212 - DNA, 33 bp, Homo sapien
gggaatcacatcatactaggcaaatttcatcaa

SEQ ID NO: 409213 - DNA, 33 bp, Homo sapien
ggagtcattactgtggaaatctacacacctagt

SEQ ID NO: 409214 - DNA, 33 bp, Homo sapien
ggagtcattactgtgggaatctacacacctagt

SEQ ID NO: 409215 - DNA, 33 bp, Homo sapien
tatgttggtctgacttcaaaacgtatcctccct

SEQ ID NO: 409216 - DNA, 33 bp, Homo sapien
tatgttggtctgactttaaaacgtatcctccct

SEQ ID NO: 409217 - DNA, 33 bp, Homo sapien
ctccctatccttgtggccaggtattcataaatt

SEQ ID NO: 409218 - DNA, 33 bp, Homo sapien
ctccctatccttgtggtcaggtattcataaatt

SEQ ID NO: 409219 - DNA, 33 bp, Homo sapien
tatttaagtgaaacacaaggctaaacttcagga

SEQ ID NO: 409220 - DNA, 33 bp, Homo sapien
tatttaagtgaaacacgaggctaaacttcagga

SEQ ID NO: 409221 - DNA, 33 bp, Homo sapien
ttaaaataatgagatacaaggttttttttggtt

SEQ ID NO: 409222 - DNA, 33 bp, Homo sapien
ttaaaataatgagatagaaggttttttttggtt

SEQ ID NO: 409223 - DNA, 33 bp, Homo sapien
atgtaagaataaacccaaactgactcttgacaa

SEQ ID NO: 409224 - DNA, 33 bp, Homo sapien
atgtaagaataaaccccaactgactcttgacaa

SEQ ID NO: 409225 - DNA, 33 bp, Homo sapien
ttgtcacagtgagggcaagataaaatgttcaca

SEQ ID NO: 409226 - DNA, 33 bp, Homo sapien
ttgtcacagtgagggcgagataaaatgttcaca

SEQ ID NO: 409227 - DNA, 33 bp, Homo sapien
aggagaatttggagaggtataaaatgaggtctg

SEQ ID NO: 409228 - DNA, 33 bp, Homo sapien
aggagaatttggagagttataaaatgaggtctg

SEQ ID NO: 409229 - DNA, 33 bp, Homo sapien
aaataacagatgttcacgaggttgaggaaaaaa

SEQ ID NO: 409230 - DNA, 33 bp, Homo sapien
aaataacagatgttcatgaggttgaggaaaaaa

SEQ ID NO: 409231 - DNA, 33 bp, Homo sapien
ttgcctttgttctcaaaaacatctttgaaaaac

SEQ ID NO: 409232 - DNA, 33 bp, Homo sapien
ttgcctttgttctcaataacatctttgaaaaac

SEQ ID NO: 409233 - DNA, 33 bp, Homo sapien
ttattaatgagccacaacttagcataggtttat

SEQ ID NO: 409234 - DNA, 33 bp, Homo sapien
ttattaatgagccacagcttagcataggtttat

SEQ ID NO: 409235 - DNA, 33 bp, Homo sapien
cttttattcgcagcttcaaaacagactaataca

SEQ ID NO: 409236 - DNA, 33 bp, Homo sapien
cttttattcgcagcttgaaaacagactaataca

SEQ ID NO: 409237 - DNA, 33 bp, Homo sapien
aatatgtatcaatgtaatacaaagtcctgtcag

SEQ ID NO: 409238 - DNA, 33 bp, Homo sapien
aatatgtatcaatgtattacaaagtcctgtcag

SEQ ID NO: 409239 - DNA, 33 bp, Homo sapien
gtttgtaaagctctggaaagggggtcaattcag

SEQ ID NO: 409240 - DNA, 33 bp, Homo sapien
gtttgtaaagctctggcaagggggtcaattcag

SEQ ID NO: 409241 - DNA, 33 bp, Homo sapien
ggcttcatgacactgaacagggaaagacctcat

SEQ ID NO: 409242 - DNA, 33 bp, Homo sapien
ggcttcatgacactgaccagggaaagacctcat

SEQ ID NO: 409243 - DNA, 33 bp, Homo sapien
atttctttcttcccccccaaagattagtttatt

SEQ ID NO: 409244 - DNA, 33 bp, Homo sapien
atttctttcttccccctcaaagattagtttatt

SEQ ID NO: 409245 - DNA, 33 bp, Homo sapien
ttgtcaacaaaaatggaatcagacaatgcttac

SEQ ID NO: 409246 - DNA, 33 bp, Homo sapien
ttgtcaacaaaaatggtatcagacaatgcttac

SEQ ID NO: 409247 - DNA, 33 bp, Homo sapien
aacttgtgtctctttccctatcagaatttagtg

SEQ ID NO: 409248 - DNA, 33 bp, Homo sapien
aacttgtgtctctttctctatcagaatttagtg

SEQ ID NO: 409249 - DNA, 33 bp, Homo sapien
gttgttgtttatctccacttagtaatgtctgtt

SEQ ID NO: 409250 - DNA, 33 bp, Homo sapien
gttgttgtttatctccgcttagtaatgtctgtt

SEQ ID NO: 409251 - DNA, 33 bp, Homo sapien
cacagacaggaggtcaaatgtctttgtttgtgt

SEQ ID NO: 409252 - DNA, 33 bp, Homo sapien
cacagacaggaggtcatatgtctttgtttgtgt

SEQ ID NO: 409253 - DNA, 33 bp, Homo sapien
taggtaatgaagcatcaatcagaatttgaggat

SEQ ID NO: 409254 - DNA, 33 bp, Homo sapien
taggtaatgaagcatcgatcagaatttgaggat

SEQ ID NO: 409255 - DNA, 33 bp, Homo sapien
gtgaaacaaattatcaaaaagtgaatgtttcca

SEQ ID NO: 409256 - DNA, 33 bp, Homo sapien
gtgaaacaaattatcataaagtgaatgtttcca

SEQ ID NO: 409257 - DNA, 33 bp, Homo sapien
tccaccaaagtaaaaaatcagagcatttccagc

SEQ ID NO: 409258 - DNA, 33 bp, Homo sapien
tccaccaaagtaaaaactcagagcatttccagc

SEQ ID NO: 409259 - DNA, 33 bp, Homo sapien
aaaacattatgctaagcaatgaagccggactaa

SEQ ID NO: 409260 - DNA, 33 bp, Homo sapien
aaaacattatgctaaggaatgaagccggactaa

SEQ ID NO: 409261 - DNA, 33 bp, Homo sapien
atgagaaatgctaacaaggactttcatgcattg

SEQ ID NO: 409262 - DNA, 33 bp, Homo sapien
atgagaaatgctaacagggactttcatgcattg

SEQ ID NO: 409263 - DNA, 33 bp, Homo sapien
tgatacttacgttcaaagtgatgtcctggatgg

SEQ ID NO: 409264 - DNA, 33 bp, Homo sapien
tgatacttacgttcaatgtgatgtcctggatgg

SEQ ID NO: 409265 - DNA, 33 bp, Homo sapien
agtgcctaggaaatgacagcagtcaaaaagagc

SEQ ID NO: 409266 - DNA, 33 bp, Homo sapien
agtgcctaggaaatgatagcagtcaaaaagagc

SEQ ID NO: 409267 - DNA, 33 bp, Homo sapien
aacaaataatgacccaactctctttgacagaaa

SEQ ID NO: 409268 - DNA, 33 bp, Homo sapien
aacaaataatgacccacctctctttgacagaaa

SEQ ID NO: 409269 - DNA, 33 bp, Homo sapien
gcatttttataatggaatatggcagctccacag

SEQ ID NO: 409270 - DNA, 33 bp, Homo sapien
gcatttttataatggagtatggcagctccacag

SEQ ID NO: 409271 - DNA, 33 bp, Homo sapien
aagagccagcttatcacatctgtacacaatgct

SEQ ID NO: 409272 - DNA, 33 bp, Homo sapien
aagagccagcttatcatatctgtacacaatgct

SEQ ID NO: 409273 - DNA, 33 bp, Homo sapien
atctgaagagtggtaactccaattatttgcagt

SEQ ID NO: 409274 - DNA, 33 bp, Homo sapien
atctgaagagtggtaattccaattatttgcagt

SEQ ID NO: 409275 - DNA, 33 bp, Homo sapien
ggtgattgccacaggacggactcgtcttttgaa

SEQ ID NO: 409276 - DNA, 33 bp, Homo sapien
ggtgattgccacaggatggactcgtcttttgaa

SEQ ID NO: 409277 - DNA, 33 bp, Homo sapien
aagtgactcggaaaaacaggtgacagactttct

SEQ ID NO: 409278 - DNA, 33 bp, Homo sapien
aagtgactcggaaaaataggtgacagactttct

SEQ ID NO: 409279 - DNA, 33 bp, Homo sapien
cttccgctgcatcctccataaaaacttaacatg

SEQ ID NO: 409280 - DNA, 33 bp, Homo sapien
cttccgctgcatcctctataaaaacttaacatg

SEQ ID NO: 409281 - DNA, 33 bp, Homo sapien
gcttatactgagcattcaacatttagttcatct

SEQ ID NO: 409282 - DNA, 33 bp, Homo sapien
gcttatactgagcatttaacatttagttcatct

SEQ ID NO: 409283 - DNA, 33 bp, Homo sapien
aaagataaaatgtatgaaatggttagaagagaa

SEQ ID NO: 409284 - DNA, 33 bp, Homo sapien
aaagataaaatgtatgtaatggttagaagagaa

SEQ ID NO: 409285 - DNA, 33 bp, Homo sapien
tacctttgtgtatatccgagcgcagacactcct

SEQ ID NO: 409286 - DNA, 33 bp, Homo sapien
tacctttgtgtatatctgagcgcagacactcct

SEQ ID NO: 409287 - DNA, 33 bp, Homo sapien
tccaattagccttaacactttcagtccttttct

SEQ ID NO: 409288 - DNA, 33 bp, Homo sapien
tccaattagccttaaccctttcagtccttttct

SEQ ID NO: 409289 - DNA, 33 bp, Homo sapien
ttatgactcccacagacgtaattcactctcatg

SEQ ID NO: 409290 - DNA, 33 bp, Homo sapien
ttatgactcccacagatgtaattcactctcatg

SEQ ID NO: 409291 - DNA, 33 bp, Homo sapien
ctacggtccagtaaacaaaattcagtttttcaa

SEQ ID NO: 409292 - DNA, 33 bp, Homo sapien
ctacggtccagtaaaccaaattcagtttttcaa

SEQ ID NO: 409293 - DNA, 33 bp, Homo sapien
cataattggctttcaagaactgaatactgaatg

SEQ ID NO: 409294 - DNA, 33 bp, Homo sapien
cataattggctttcaataactgaatactgaatg

SEQ ID NO: 409295 - DNA, 33 bp, Homo sapien
ccccattgtgctatcacaaatgtaaagaaaata

SEQ ID NO: 409296 - DNA, 33 bp, Homo sapien
ccccattgtgctatcataaatgtaaagaaaata

SEQ ID NO: 409297 - DNA, 33 bp, Homo sapien
ataagggccctaagtaaaatattcagcaaaaac

SEQ ID NO: 409298 - DNA, 33 bp, Homo sapien
ataagggccctaagtacaatattcagcaaaaac

SEQ ID NO: 409299 - DNA, 33 bp, Homo sapien
ataatgtatttgcctacgtttgtgagtgagaag

SEQ ID NO: 409300 - DNA, 33 bp, Homo sapien
ataatgtatttgcctatgtttgtgagtgagaag

SEQ ID NO: 409301 - DNA, 33 bp, Homo sapien
caaagaccaacgaaacagaagcaagagcacaga

SEQ ID NO: 409302 - DNA, 33 bp, Homo sapien
caaagaccaacgaaacggaagcaagagcacaga

SEQ ID NO: 409303 - DNA, 33 bp, Homo sapien
agtgttgcaaagcacacacatgttgatgtgtct

SEQ ID NO: 409304 - DNA, 33 bp, Homo sapien
agtgttgcaaagcacatacatgttgatgtgtct

SEQ ID NO: 409305 - DNA, 33 bp, Homo sapien
tgtccatgagttgtggcacggaaaaagaaaacg

SEQ ID NO: 409306 - DNA, 33 bp, Homo sapien
tgtccatgagttgtggtacggaaaaagaaaacg

SEQ ID NO: 409307 - DNA, 33 bp, Homo sapien
tgaaaatcaatctagaacagtatttgaggctcc

SEQ ID NO: 409308 - DNA, 33 bp, Homo sapien
tgaaaatcaatctagagcagtatttgaggctcc

SEQ ID NO: 409309 - DNA, 33 bp, Homo sapien
ttaaacaaaaataggaagtatagacaggatagc

SEQ ID NO: 409310 - DNA, 33 bp, Homo sapien
ttaaacaaaaataggaggtatagacaggatagc

SEQ ID NO: 409311 - DNA, 33 bp, Homo sapien
acccctgaacaatttacgtattttctctgagcc

SEQ ID NO: 409312 - DNA, 33 bp, Homo sapien
acccctgaacaatttatgtattttctctgagcc

SEQ ID NO: 409313 - DNA, 33 bp, Homo sapien
aatagcaattgatttccatgatttcttttatat

SEQ ID NO: 409314 - DNA, 33 bp, Homo sapien
aatagcaattgatttctatgatttcttttatat

SEQ ID NO: 409315 - DNA, 33 bp, Homo sapien
ctactgcctctatagaatctacctctgtgggca

SEQ ID NO: 409316 - DNA, 33 bp, Homo sapien
ctactgcctctatagactctacctctgtgggca

SEQ ID NO: 409317 - DNA, 33 bp, Homo sapien
ttgttcttatgatagagcttagcaatctcatcc

SEQ ID NO: 409318 - DNA, 33 bp, Homo sapien
ttgttcttatgatagatcttagcaatctcatcc

SEQ ID NO: 409319 - DNA, 33 bp, Homo sapien
cacctggatactcctagcagaatcattaaactg

SEQ ID NO: 409320 - DNA, 33 bp, Homo sapien
cacctggatactcctatcagaatcattaaactg

SEQ ID NO: 409321 - DNA, 33 bp, Homo sapien
atatatgaaaattaccggaagacaagaagacta

SEQ ID NO: 409322 - DNA, 33 bp, Homo sapien
atatatgaaaattacctgaagacaagaagacta

SEQ ID NO: 409323 - DNA, 33 bp, Homo sapien
aatagggacagaaaaacaggaataatagccaca

SEQ ID NO: 409324 - DNA, 33 bp, Homo sapien
aatagggacagaaaaataggaataatagccaca

SEQ ID NO: 409325 - DNA, 33 bp, Homo sapien
acaattgcataagggcgaatctccacaataaat

SEQ ID NO: 409326 - DNA, 33 bp, Homo sapien
acaattgcataagggctaatctccacaataaat

SEQ ID NO: 409327 - DNA, 33 bp, Homo sapien
atacccgtgacctgaccgtaggagccagtaggg

SEQ ID NO: 409328 - DNA, 33 bp, Homo sapien
atacccgtgacctgactgtaggagccagtaggg

SEQ ID NO: 409329 - DNA, 33 bp, Homo sapien
gcaaatgtattttaataacagcactgttcacaa

SEQ ID NO: 409330 - DNA, 33 bp, Homo sapien
gcaaatgtattttaatcacagcactgttcacaa

SEQ ID NO: 409331 - DNA, 33 bp, Homo sapien
actctggagggtgcaacgattaagtttgtctca

SEQ ID NO: 409332 - DNA, 33 bp, Homo sapien
actctggagggtgcaatgattaagtttgtctca

SEQ ID NO: 409333 - DNA, 33 bp, Homo sapien
tggggaactgttaaaaggacatgattgtgtttc

SEQ ID NO: 409334 - DNA, 33 bp, Homo sapien
tggggaactgttaaaatgacatgattgtgtttc

SEQ ID NO: 409335 - DNA, 33 bp, Homo sapien
aaacacattcaggaaaatcacagtatacaaaat

SEQ ID NO: 409336 - DNA, 33 bp, Homo sapien
aaacacattcaggaaagtcacagtatacaaaat

SEQ ID NO: 409337 - DNA, 33 bp, Homo sapien; identical to SEQ ID NO: 409335

SEQ ID NO: 409338 - DNA, 33 bp, Homo sapien; identical to SEQ ID NO: 409336

SEQ ID NO: 409339 - DNA, 33 bp, Homo sapien
agaatgaggaaatacagtaacccacagaggcat

SEQ ID NO: 409340 - DNA, 33 bp, Homo sapien
agaatgaggaaatacattaacccacagaggcat

SEQ ID NO: 409341 - DNA, 33 bp, Homo sapien
aaccaaatttgcgttaccataaaacccatgagc

SEQ ID NO: 409342 - DNA, 33 bp, Homo sapien
aaccaaatttgcgttatcataaaacccatgagc

SEQ ID NO: 409343 - DNA, 33 bp, Homo sapien
cagcattaaagcagaacttacctgagtaactct

SEQ ID NO: 409344 - DNA, 33 bp, Homo sapien
cagcattaaagcagaatttacctgagtaactct

SEQ ID NO: 409345 - DNA, 33 bp, Homo sapien
caggaaagatggtcacaatctatgtcgattaaa

SEQ ID NO: 409346 - DNA, 33 bp, Homo sapien
caggaaagatggtcactatctatgtcgattaaa

SEQ ID NO: 409347 - DNA, 33 bp, Homo sapien
tgcagaaatgcctttaactaattaaaaagatgt

SEQ ID NO: 409348 - DNA, 33 bp, Homo sapien
tgcagaaatgcctttagctaattaaaaagatgt

SEQ ID NO: 409349 - DNA, 33 bp, Homo sapien
tttaacatcttatatcagaattgaatgaggtta

SEQ ID NO: 409350 - DNA, 33 bp, Homo sapien
tttaacatcttatatcggaattgaatgaggtta

SEQ ID NO: 409351 - DNA, 33 bp, Homo sapien
gttttctacagtttcaaaagtgggcctattttt

SEQ ID NO: 409352 - DNA, 33 bp, Homo sapien
gttttctacagtttcagaagtgggcctattttt

SEQ ID NO: 409353 - DNA, 33 bp, Homo sapien
ttttcttcacatgacaatcgagaaacttgtcca

SEQ ID NO: 409354 - DNA, 33 bp, Homo sapien
ttttcttcacatgacagtcgagaaacttgtcca

SEQ ID NO: 409355 - DNA, 33 bp, Homo sapien
aagaacgaaagagatacagcagcaaaaacaaaa

SEQ ID NO: 409356 - DNA, 33 bp, Homo sapien
aagaacgaaagagatatagcagcaaaaacaaaa

SEQ ID NO: 409357 - DNA, 33 bp, Homo sapien
agggagagtatagtgacaactttaatggtttgg

SEQ ID NO: 409358 - DNA, 33 bp, Homo sapien
agggagagtatagtgagaactttaatggtttgg

SEQ ID NO: 409359 - DNA, 33 bp, Homo sapien
cacacacacataatagaatactgttaagccatt

SEQ ID NO: 409360 - DNA, 33 bp, Homo sapien
cacacacacataatagtatactgttaagccatt

SEQ ID NO: 409361 - DNA, 33 bp, Homo sapien
tatgatgtgcaagagaagacaagaatgggctgc

SEQ ID NO: 409362 - DNA, 33 bp, Homo sapien
tatgatgtgcaagagaggacaagaatgggctgc

SEQ ID NO: 409363 - DNA, 33 bp, Homo sapien
ttaatgaattacaaaacccccaaaatcaggata

SEQ ID NO: 409364 - DNA, 33 bp, Homo sapien
ttaatgaattacaaaatccccaaaatcaggata

SEQ ID NO: 409365 - DNA, 33 bp, Homo sapien
tctaccaggacccaacaataacgctactggggt

SEQ ID NO: 409366 - DNA, 33 bp, Homo sapien
tctaccaggacccaaccataacgctactggggt

SEQ ID NO: 409367 - DNA, 33 bp, Homo sapien
ggaatgcagctgcgaaaatgaaggcgatagata

SEQ ID NO: 409368 - DNA, 33 bp, Homo sapien
ggaatgcagctgcgaatatgaaggcgatagata

SEQ ID NO: 409369 - DNA, 33 bp, Homo sapien
aaagtacataggcgacacaaacaattcactgtc

SEQ ID NO: 409370 - DNA, 33 bp, Homo sapien
aaagtacataggcgacccaaacaattcactgtc

SEQ ID NO: 409371 - DNA, 33 bp, Homo sapien
taaaaacaatggactcacactaggaaatcttat

SEQ ID NO: 409372 - DNA, 33 bp, Homo sapien
taaaaacaatggactctcactaggaaatcttat

SEQ ID NO: 409373 - DNA, 33 bp, Homo sapien
tcaaatatccaatacaatcttcatctgaacagc

SEQ ID NO: 409374 - DNA, 33 bp, Homo sapien
tcaaatatccaatacagtcttcatctgaacagc

SEQ ID NO: 409375 - DNA, 33 bp, Homo sapien
atacctgctgcctcccactaaaacagaaaaatc

SEQ ID NO: 409376 - DNA, 33 bp, Homo sapien
atacctgctgcctcccgctaaaacagaaaaatc

SEQ ID NO: 409377 - DNA, 33 bp, Homo sapien
cattaaatgtcatgaaagaaaaatgatttcaat

SEQ ID NO: 409378 - DNA, 33 bp, Homo sapien
cattaaatgtcatgaaggaaaaatgatttcaat

SEQ ID NO: 409379 - DNA, 33 bp, Homo sapien
ggacacgattataccaaaagatgaactgcatga

SEQ ID NO: 409380 - DNA, 33 bp, Homo sapien
ggacacgattataccacaagatgaactgcatga

SEQ ID NO: 409381 - DNA, 33 bp, Homo sapien
agactgattttcacacaaagttacatctatgct

SEQ ID NO: 409382 - DNA, 33 bp, Homo sapien
agactgattttcacacgaagttacatctatgct

SEQ ID NO: 409383 - DNA, 33 bp, Homo sapien
tttctagtttgggggaaaaattgtcacttgaat

SEQ ID NO: 409384 - DNA, 33 bp, Homo sapien
tttctagtttgggggataaattgtcacttgaat

SEQ ID NO: 409385 - DNA, 33 bp, Homo sapien
ctttcttcctggagaccggaaaagcagtaactt

SEQ ID NO: 409386 - DNA, 33 bp, Homo sapien
ctttcttcctggagactggaaaagcagtaactt

SEQ ID NO: 409387 - DNA, 33 bp, Homo sapien
tagccaagtccaaagtcaatgaagctggtatgt

SEQ ID NO: 409388 - DNA, 33 bp, Homo sapien
tagccaagtccaaagttaatgaagctggtatgt

SEQ ID NO: 409389 - DNA, 33 bp, Homo sapien
gaacattgatagcatacaggaagtactcaataa

SEQ ID NO: 409390 - DNA, 33 bp, Homo sapien
gaacattgatagcatataggaagtactcaataa

SEQ ID NO: 409391 - DNA, 33 bp, Homo sapien
ggtctaaacttaaaaaacttcaccttgaatgct

SEQ ID NO: 409392 - DNA, 33 bp, Homo sapien
ggtctaaacttaaaaagcttcaccttgaatgct

SEQ ID NO: 409393 - DNA, 33 bp, Homo sapien
tgtgttttcttgattacgatatgacccactttt

SEQ ID NO: 409394 - DNA, 33 bp, Homo sapien
tgtgttttcttgattatgatatgacccactttt

SEQ ID NO: 409395 - DNA, 33 bp, Homo sapien
aataatatgtaaaatacaaagatgacaacaaaa

SEQ ID NO: 409396 - DNA, 33 bp, Homo sapien
aataatatgtaaaatagaaagatgacaacaaaa

SEQ ID NO: 409397 - DNA, 33 bp, Homo sapien
cagatatcagaaatacagagcttcttaaataac

SEQ ID NO: 409398 - DNA, 33 bp, Homo sapien
cagatatcagaaatacggagcttcttaaataac

SEQ ID NO: 409399 - DNA, 33 bp, Homo sapien
aaggaaaaggaaaagcaaaagcatatggccatt

SEQ ID NO: 409400 - DNA, 33 bp, Homo sapien
aaggaaaaggaaaagcgaaagcatatggccatt

SEQ ID NO: 409401 - DNA, 33 bp, Homo sapien
gaaagtcaatgacaaagggatcattatgtcaga

SEQ ID NO: 409402 - DNA, 33 bp, Homo sapien
gaaagtcaatgacaaatggatcattatgtcaga

SEQ ID NO: 409403 - DNA, 33 bp, Homo sapien
aggataaggtgcacaacagtggaagaaaatcaa

SEQ ID NO: 409404 - DNA, 33 bp, Homo sapien
aggataaggtgcacaagagtggaagaaaatcaa

SEQ ID NO: 409405 - DNA, 33 bp, Homo sapien
gtatgcttaagaaagcactcctgaatctgacac

SEQ ID NO: 409406 - DNA, 33 bp, Homo sapien
gtatgcttaagaaagcgctcctgaatctgacac

SEQ ID NO: 409407 - DNA, 33 bp, Homo sapien
aaaggtccagtttcacactcattcctaatacaa

SEQ ID NO: 409408 - DNA, 33 bp, Homo sapien
aaaggtccagtttcactctcattcctaatacaa

SEQ ID NO: 409409 - DNA, 33 bp, Homo sapien
cagtcttattaatgcaaactatcatttcttgaa

SEQ ID NO: 409410 - DNA, 33 bp, Homo sapien
cagtcttattaatgcagactatcatttcttgaa

SEQ ID NO: 409411 - DNA, 33 bp, Homo sapien
cacaataatatcagcaactttttgattatagta

SEQ ID NO: 409412 - DNA, 33 bp, Homo sapien
cacaataatatcagcacctttttgattatagta

SEQ ID NO: 409413 - DNA, 33 bp, Homo sapien
aatgaacgcagtctggaatgaacaatagacagc

SEQ ID NO: 409414 - DNA, 33 bp, Homo sapien
aatgaacgcagtctgggatgaacaatagacagc

SEQ ID NO: 409415 - DNA, 33 bp, Homo sapien
acaagatcatcagaaaatacagaaaatctgacc

SEQ ID NO: 409416 - DNA, 33 bp, Homo sapien
acaagatcatcagaaagtacagaaaatctgacc

SEQ ID NO: 409417 - DNA, 33 bp, Homo sapien
ggcaggcgtacatcacaagaaacctccttaggc

SEQ ID NO: 409418 - DNA, 33 bp, Homo sapien
ggcaggcgtacatcacgagaaacctccttaggc

SEQ ID NO: 409419 - DNA, 33 bp, Homo sapien
gtttacgtgaacgagacgacttttggaaatccc

SEQ ID NO: 409420 - DNA, 33 bp, Homo sapien
gtttacgtgaacgagatgacttttggaaatccc

SEQ ID NO: 409421 - DNA, 33 bp, Homo sapien
ggtagtagccttagagacaataggttgtaagat

SEQ ID NO: 409422 - DNA, 33 bp, Homo sapien
ggtagtagccttagaggcaataggttgtaagat

SEQ ID NO: 409423 - DNA, 33 bp, Homo sapien
aaccgtgtgccaatatcacaaagaacgtacaca

SEQ ID NO: 409424 - DNA, 33 bp, Homo sapien
aaccgtgtgccaatattacaaagaacgtacaca

SEQ ID NO: 409425 - DNA, 33 bp, Homo sapien
catataataagtgctcaatgactgttaaataca

SEQ ID NO: 409426 - DNA, 33 bp, Homo sapien
catataataagtgctcgatgactgttaaataca

SEQ ID NO: 409427 - DNA, 33 bp, Homo sapien
gaaagctaaaagatggccaacacaaatggattt

SEQ ID NO: 409428 - DNA, 33 bp, Homo sapien
gaaagctaaaagatggtcaacacaaatggattt

SEQ ID NO: 409429 - DNA, 33 bp, Homo sapien
tttgtaatgagaaagccgattaaactgtaataa

SEQ ID NO: 409430 - DNA, 33 bp, Homo sapien
tttgtaatgagaaagctgattaaactgtaataa

SEQ ID NO: 409431 - DNA, 33 bp, Homo sapien
agcgagagacaaccttaaaggacctggatatca

SEQ ID NO: 409432 - DNA, 33 bp, Homo sapien
agcgagagacaaccttgaaggacctggatatca

SEQ ID NO: 409433 - DNA, 33 bp, Homo sapien
acatcctgtgccaccaaagcataaatgccctta

SEQ ID NO: 409434 - DNA, 33 bp, Homo sapien
acatcctgtgccaccagagcataaatgccctta

SEQ ID NO: 409435 - DNA, 33 bp, Homo sapien
catcctgaagtcaggacggataatgcatggcaa

SEQ ID NO: 409436 - DNA, 33 bp, Homo sapien
catcctgaagtcaggagggataatgcatggcaa

SEQ ID NO: 409437 - DNA, 33 bp, Homo sapien
agaaaccctgctgtagaagaaaccagctgtgat

SEQ ID NO: 409438 - DNA, 33 bp, Homo sapien
agaaaccctgctgtaggagaaaccagctgtgat

SEQ ID NO: 409439 - DNA, 33 bp, Homo sapien
tacactgggacttgaactgcatctgaaatgttt

SEQ ID NO: 409440 - DNA, 33 bp, Homo sapien
tacactgggacttgaagtgcatctgaaatgttt

SEQ ID NO: 409441 - DNA, 33 bp, Homo sapien
agcaaaagtgaatggcaaattttgaaaatagga

SEQ ID NO: 409442 - DNA, 33 bp, Homo sapien
agcaaaagtgaatggcgaattttgaaaatagga

SEQ ID NO: 409443 - DNA, 33 bp, Homo sapien
ttttatacacaggttaagagctgtcatttaatc

SEQ ID NO: 409444 - DNA, 33 bp, Homo sapien
ttttatacacaggttaggagctgtcatttaatc

SEQ ID NO: 409445 - DNA, 33 bp, Homo sapien
ttatgctctgacatcaaactctttactcactct

SEQ ID NO: 409446 - DNA, 33 bp, Homo sapien
ttatgctctgacatcacactctttactcactct

SEQ ID NO: 409447 - DNA, 33 bp, Homo sapien
tctcatttgatttgtaagaaccattagccaacc

SEQ ID NO: 409448 - DNA, 33 bp, Homo sapien
tctcatttgatttgtaggaaccattagccaacc

SEQ ID NO: 409449 - DNA, 33 bp, Homo sapien
ttaccacctcatagtacaactgttttagcgctt

SEQ ID NO: 409450 - DNA, 33 bp, Homo sapien
ttaccacctcatagtataactgttttagcgctt

SEQ ID NO: 409451 - DNA, 33 bp, Homo sapien
tgatttgaaatgtctacgggatttcgagccaga

SEQ ID NO: 409452 - DNA, 33 bp, Homo sapien
tgatttgaaatgtctatgggatttcgagccaga

SEQ ID NO: 409453 - DNA, 33 bp, Homo sapien
cgtgtactgctgccctaactactcagacggctc

SEQ ID NO: 409454 - DNA, 33 bp, Homo sapien
cgtgtactgctgccctgactactcagacggctc

SEQ ID NO: 409455 - DNA, 33 bp, Homo sapien
agcctgaggattaagcaaaatggtgtgcaggtc

SEQ ID NO: 409456 - DNA, 33 bp, Homo sapien
agcctgaggattaagcgaaatggtgtgcaggtc

SEQ ID NO: 409457 - DNA, 33 bp, Homo sapien
aaataaaactcgataacaaaaacagtcaatgta

SEQ ID NO: 409458 - DNA, 33 bp, Homo sapien
aaataaaactcgataataaaaacagtcaatgta

SEQ ID NO: 409459 - DNA, 33 bp, Homo sapien
tcatttctctgaattacagaactgcttccaaat

SEQ ID NO: 409460 - DNA, 33 bp, Homo sapien
tcatttctctgaattatagaactgcttccaaat

SEQ ID NO: 409461 - DNA, 33 bp, Homo sapien
attgtttgagtgtccacctaacatggtcctcta

SEQ ID NO: 409462 - DNA, 33 bp, Homo sapien
attgtttgagtgtccatctaacatggtcctcta

SEQ ID NO: 409463 - DNA, 33 bp, Homo sapien
atcctagagagacaaaacagagtgagccagtgg

SEQ ID NO: 409464 - DNA, 33 bp, Homo sapien
atcctagagagacaaagcagagtgagccagtgg

SEQ ID NO: 409465 - DNA, 33 bp, Homo sapien
cttggaatcagaatgaacgttgggaccaaagtt

SEQ ID NO: 409466 - DNA, 33 bp, Homo sapien
cttggaatcagaatgagcgttgggaccaaagtt

SEQ ID NO: 409467 - DNA, 33 bp, Homo sapien
aaacaaacaaacaaaacgcctccttcatctcaa

SEQ ID NO: 409468 - DNA, 33 bp, Homo sapien
aaacaaacaaacaaaatgcctccttcatctcaa

SEQ ID NO: 409469 - DNA, 33 bp, Homo sapien
tgtggtttagagtttagaagagaagataattgt

SEQ ID NO: 409470 - DNA, 33 bp, Homo sapien
tgtggtttagagtttataagagaagataattgt

SEQ ID NO: 409471 - DNA, 33 bp, Homo sapien
atcaatgtatacacacagaagtatggtttcttt

SEQ ID NO: 409472 - DNA, 33 bp, Homo sapien
atcaatgtatacacacggaagtatggtttcttt

SEQ ID NO: 409473 - DNA, 33 bp, Homo sapien
atggaatctaaaggaactgtaaagtcattaaaa

SEQ ID NO: 409474 - DNA, 33 bp, Homo sapien
atggaatctaaaggaattgtaaagtcattaaaa

SEQ ID NO: 409475 - DNA, 33 bp, Homo sapien
ccatgtactaaagaagacctgaatttaaagatc

SEQ ID NO: 409476 - DNA, 33 bp, Homo sapien
ccatgtactaaagaaggcctgaatttaaagatc

SEQ ID NO: 409477 - DNA, 33 bp, Homo sapien
tgaaataaaggagtaaggtagaggtcaagtaat

SEQ ID NO: 409478 - DNA, 33 bp, Homo sapien
tgaaataaaggagtaatgtagaggtcaagtaat

SEQ ID NO: 409479 - DNA, 33 bp, Homo sapien
atatattcataaaggaagagtcttgatataagt

SEQ ID NO: 409480 - DNA, 33 bp, Homo sapien
atatattcataaaggacgagtcttgatataagt

SEQ ID NO: 409481 - DNA, 33 bp, Homo sapien
aataccccagtttagggattatgtgctttatta

SEQ ID NO: 409482 - DNA, 33 bp, Homo sapien
aataccccagtttaggtattatgtgctttatta

SEQ ID NO: 409483 - DNA, 33 bp, Homo sapien
tttataacaagggtaagtaaaagtatcagctcc

SEQ ID NO: 409484 - DNA, 33 bp, Homo sapien
tttataacaagggtaattaaaagtatcagctcc

SEQ ID NO: 409485 - DNA, 33 bp, Homo sapien
cagtttattcatgttcaaaagttggatggttca

SEQ ID NO: 409486 - DNA, 33 bp, Homo sapien
cagtttattcatgttcgaaagttggatggttca

SEQ ID NO: 409487 - DNA, 33 bp, Homo sapien
ttaaagcaccaatcaaaataatctctgaggtca

SEQ ID NO: 409488 - DNA, 33 bp, Homo sapien
ttaaagcaccaatcaagataatctctgaggtca

SEQ ID NO: 409489 - DNA, 33 bp, Homo sapien
atgggcttttgtgaacaatagtttctggggatg

SEQ ID NO: 409490 - DNA, 33 bp, Homo sapien
atgggcttttgtgaacgatagtttctggggatg

SEQ ID NO: 409491 - DNA, 33 bp, Homo sapien
gttagagagcataacagtcttctggatcgtaga

SEQ ID NO: 409492 - DNA, 33 bp, Homo sapien
gttagagagcataacattcttctggatcgtaga

SEQ ID NO: 409493 - DNA, 33 bp, Homo sapien
gcctgcttgtgtgtatcacatgaaagttagcag

SEQ ID NO: 409494 - DNA, 33 bp, Homo sapien
gcctgcttgtgtgtattacatgaaagttagcag

SEQ ID NO: 409495 - DNA, 33 bp, Homo sapien
gaatgttaatgcttcactagaaagagctcttcc

SEQ ID NO: 409496 - DNA, 33 bp, Homo sapien
gaatgttaatgcttcattagaaagagctcttcc

SEQ ID NO: 409497 - DNA, 33 bp, Homo sapien
aagttaaatggtggtacaatcatttggtgtctg

SEQ ID NO: 409498 - DNA, 33 bp, Homo sapien
aagttaaatggtggtataatcatttggtgtctg

SEQ ID NO: 409499 - DNA, 33 bp, Homo sapien
acaaaaccaatctcaccaaacacgtacctcaga

SEQ ID NO: 409500 - DNA, 33 bp, Homo sapien
acaaaaccaatctcactaaacacgtacctcaga

SEQ ID NO: 409501 - DNA, 33 bp, Homo sapien
ttagaacctccccaaaattactcaaccaaagct

SEQ ID NO: 409502 - DNA, 33 bp, Homo sapien
ttagaacctccccaaagttactcaaccaaagct

SEQ ID NO: 409503 - DNA, 33 bp, Homo sapien
attactggaaaattgaagactatatcaatatgc

SEQ ID NO: 409504 - DNA, 33 bp, Homo sapien
attactggaaaattgaggactatatcaatatgc

SEQ ID NO: 409505 - DNA, 33 bp, Homo sapien
tttacctgaaagcaagaaaatagatttagggaa

SEQ ID NO: 409506 - DNA, 33 bp, Homo sapien
tttacctgaaagcaaggaaatagatttagggaa

SEQ ID NO: 409507 - DNA, 33 bp, Homo sapien
tgaaagactgattgaaagaggtgttctaaaaaa

SEQ ID NO: 409508 - DNA, 33 bp, Homo sapien
tgaaagactgattgaaggaggtgttctaaaaaa

SEQ ID NO: 409509 - DNA, 33 bp, Homo sapien
attctcagaaaaatgaccacttttgcctaatga

SEQ ID NO: 409510 - DNA, 33 bp, Homo sapien
attctcagaaaaatgatcacttttgcctaatga

SEQ ID NO: 409511 - DNA, 33 bp, Homo sapien
tggtttatgtctaaatcaaaagcagccaaataa

SEQ ID NO: 409512 - DNA, 33 bp, Homo sapien
tggtttatgtctaaattaaaagcagccaaataa

SEQ ID NO: 409513 - DNA, 33 bp, Homo sapien
ttttcttaacattgctaaaaaattcaaaagcaa

SEQ ID NO: 409514 - DNA, 33 bp, Homo sapien
ttttcttaacattgctcaaaaattcaaaagcaa

SEQ ID NO: 409515 - DNA, 33 bp, Homo sapien
tttcttaaaaattcaaaaataacaagcattacc

SEQ ID NO: 409516 - DNA, 33 bp, Homo sapien
tttcttaaaaattcaacaataacaagcattacc

SEQ ID NO: 409517 - DNA, 33 bp, Homo sapien
tatcctttaggagaaaagttgtctttgatagta

SEQ ID NO: 409518 - DNA, 33 bp, Homo sapien
tatcctttaggagaaaggttgtctttgatagta

SEQ ID NO: 409519 - DNA, 33 bp, Homo sapien
agtgtcaaatgaaaaacaagttacagaaatagc

SEQ ID NO: 409520 - DNA, 33 bp, Homo sapien
agtgtcaaatgaaaaagaagttacagaaatagc

SEQ ID NO: 409521 - DNA, 33 bp, Homo sapien
aagacttcgctataataaagtgaaaatgattag

SEQ ID NO: 409522 - DNA, 33 bp, Homo sapien
aagacttcgctataatgaagtgaaaatgattag

SEQ ID NO: 409523 - DNA, 33 bp, Homo sapien
caatcttattactctacacaccctttcaacaac

SEQ ID NO: 409524 - DNA, 33 bp, Homo sapien
caatcttattactctatacaccctttcaacaac

SEQ ID NO: 409525 - DNA, 33 bp, Homo sapien
atcttagtttgccaaaacacaaggttctaaaat

SEQ ID NO: 409526 - DNA, 33 bp, Homo sapien
atcttagtttgccaaaccacaaggttctaaaat

SEQ ID NO: 409527 - DNA, 33 bp, Homo sapien
gtgccagaaggaaaaggctcctattgagcaaat

SEQ ID NO: 409528 - DNA, 33 bp, Homo sapien
gtgccagaaggaaaagtctcctattgagcaaat

SEQ ID NO: 409529 - DNA, 33 bp, Homo sapien
gtctcagtcctctataaattcattgcacaaatc

SEQ ID NO: 409530 - DNA, 33 bp, Homo sapien
gtctcagtcctctatacattcattgcacaaatc

SEQ ID NO: 409531 - DNA, 33 bp, Homo sapien
ttttggccagagaataacaaggatgacttatct

SEQ ID NO: 409532 - DNA, 33 bp, Homo sapien
ttttggccagagaatagcaaggatgacttatct

SEQ ID NO: 409533 - DNA, 33 bp, Homo sapien
taaaccggttatactcaaatagttgcctagaat

SEQ ID NO: 409534 - DNA, 33 bp, Homo sapien
taaaccggttatactccaatagttgcctagaat

SEQ ID NO: 409535 - DNA, 33 bp, Homo sapien
actgaccttaaacttcaaaataagcttcattct

SEQ ID NO: 409536 - DNA, 33 bp, Homo sapien
actgaccttaaacttcgaaataagcttcattct

SEQ ID NO: 409537 - DNA, 33 bp, Homo sapien
aatagaaagacacaaaattcagaaagctagggc

SEQ ID NO: 409538 - DNA, 33 bp, Homo sapien
aatagaaagacacaaagttcagaaagctagggc

SEQ ID NO: 409539 - DNA, 33 bp, Homo sapien
caagatcatccggaaacttgaaaccagtggaat

SEQ ID NO: 409540 - DNA, 33 bp, Homo sapien
caagatcatccggaaatttgaaaccagtggaat

SEQ ID NO: 409541 - DNA, 33 bp, Homo sapien
tgatttatttcattgacctgtatgtactgtgtc

SEQ ID NO: 409542 - DNA, 33 bp, Homo sapien
tgatttatttcattgatctgtatgtactgtgtc

SEQ ID NO: 409543 - DNA, 33 bp, Homo sapien
ctttgtccaaatgtaacataagggtagggactg

SEQ ID NO: 409544 - DNA, 33 bp, Homo sapien
ctttgtccaaatgtaatataagggtagggactg

SEQ ID NO: 409545 - DNA, 33 bp, Homo sapien
tgcaggattttaaaagaatgagactctcaagaa

SEQ ID NO: 409546 - DNA, 33 bp, Homo sapien
tgcaggattttaaaagtatgagactctcaagaa

SEQ ID NO: 409547 - DNA, 33 bp, Homo sapien
ggaaaaatgtcaaaaagtagagttaccttgata

SEQ ID NO: 409548 - DNA, 33 bp, Homo sapien
ggaaaaatgtcaaaaattagagttaccttgata

SEQ ID NO: 409549 - DNA, 33 bp, Homo sapien
agcaaatgatctttaacagtagtgtctagaaga

SEQ ID NO: 409550 - DNA, 33 bp, Homo sapien
agcaaatgatctttaatagtagtgtctagaaga

SEQ ID NO: 409551 - DNA, 33 bp, Homo sapien
gaaaaatcactgaactaagaaaactgtttagaa

SEQ ID NO: 409552 - DNA, 33 bp, Homo sapien
gaaaaatcactgaactcagaaaactgtttagaa

SEQ ID NO: 409553 - DNA, 33 bp, Homo sapien
gcttggtgaaaagttcaaaggaccgccttcttt

SEQ ID NO: 409554 - DNA, 33 bp, Homo sapien
gcttggtgaaaagttctaaggaccgccttcttt

SEQ ID NO: 409555 - DNA, 33 bp, Homo sapien
tattcaaagactaagaccattattttacccata

SEQ ID NO: 409556 - DNA, 33 bp, Homo sapien
tattcaaagactaagatcattattttacccata

SEQ ID NO: 409557 - DNA, 33 bp, Homo sapien
tagcaatcctccctgcacttggttggtttgagg

SEQ ID NO: 409558 - DNA, 33 bp, Homo sapien
tagcaatcctccctgcgcttggttggtttgagg

SEQ ID NO: 409559 - DNA, 33 bp, Homo sapien
tacttgtgaataattacgaattgtgttgttcct

SEQ ID NO: 409560 - DNA, 33 bp, Homo sapien
tacttgtgaataattatgaattgtgttgttcct

SEQ ID NO: 409561 - DNA, 33 bp, Homo sapien
actaagacaagcaaagactacagcagaggtcct

SEQ ID NO: 409562 - DNA, 33 bp, Homo sapien
actaagacaagcaaaggctacagcagaggtcct

SEQ ID NO: 409563 - DNA, 33 bp, Homo sapien
tatgtttcaatacatccccatgggttacatagc

SEQ ID NO: 409564 - DNA, 33 bp, Homo sapien
tatgtttcaatacatctccatgggttacatagc

SEQ ID NO: 409565 - DNA, 33 bp, Homo sapien
ggaattgctatgttcacatcttgctttgtattc

SEQ ID NO: 409566 - DNA, 33 bp, Homo sapien
ggaattgctatgttcatatcttgctttgtattc

SEQ ID NO: 409567 - DNA, 33 bp, Homo sapien
aatacacaccctttgaacctcttttctccatat

SEQ ID NO: 409568 - DNA, 33 bp, Homo sapien
aatacacaccctttgaccctcttttctccatat

SEQ ID NO: 409569 - DNA, 33 bp, Homo sapien
atgttctgaaaacagacaagtgttgtgtttaaa

SEQ ID NO: 409570 - DNA, 33 bp, Homo sapien
atgttctgaaaacagataagtgttgtgtttaaa

SEQ ID NO: 409571 - DNA, 33 bp, Homo sapien
agatatcttcaaggaaattcatttcaatatagt

SEQ ID NO: 409572 - DNA, 33 bp, Homo sapien
agatatcttcaaggaagttcatttcaatatagt

SEQ ID NO: 409573 - DNA, 33 bp, Homo sapien
agaaggctgcaaatatcagaagcttttttgatt

SEQ ID NO: 409574 - DNA, 33 bp, Homo sapien
agaaggctgcaaatatgagaagcttttttgatt

SEQ ID NO: 409575 - DNA, 33 bp, Homo sapien
ctgcctagtcacattacgagttgtgtgcagaaa

SEQ ID NO: 409576 - DNA, 33 bp, Homo sapien
ctgcctagtcacattatgagttgtgtgcagaaa

SEQ ID NO: 409577 - DNA, 33 bp, Homo sapien
cacgcagtatctgataagtgctgaagaaatatt

SEQ ID NO: 409578 - DNA, 33 bp, Homo sapien
cacgcagtatctgatatgtgctgaagaaatatt

SEQ ID NO: 409579 - DNA, 33 bp, Homo sapien
aaggatgagtgatacacagagtagaaggatgct

SEQ ID NO: 409580 - DNA, 33 bp, Homo sapien
aaggatgagtgatacatagagtagaaggatgct

SEQ ID NO: 409581 - DNA, 33 bp, Homo sapien
aggatacgagttgcaccactaaactgctgagaa

SEQ ID NO: 409582 - DNA, 33 bp, Homo sapien
aggatacgagttgcactactaaactgctgagaa

SEQ ID NO: 409583 - DNA, 33 bp, Homo sapien
agtctgctttacctgaaattacacacgaaaacc

SEQ ID NO: 409584 - DNA, 33 bp, Homo sapien
agtctgctttacctgagattacacacgaaaacc

SEQ ID NO: 409585 - DNA, 33 bp, Homo sapien
gtgtctactcctaacacgtaccagatactgaat

SEQ ID NO: 409586 - DNA, 33 bp, Homo sapien
gtgtctactcctaacatgtaccagatactgaat

SEQ ID NO: 409587 - DNA, 33 bp, Homo sapien
aactaaagcaaacagacggccagatataataaa

SEQ ID NO: 409588 - DNA, 33 bp, Homo sapien
aactaaagcaaacagatggccagatataataaa

SEQ ID NO: 409589 - DNA, 33 bp, Homo sapien
tgcaacatttgagcccaaaaacccagagtgcct

SEQ ID NO: 409590 - DNA, 33 bp, Homo sapien
tgcaacatttgagcccgaaaacccagagtgcct

SEQ ID NO: 409591 - DNA, 33 bp, Homo sapien
taggtgctgggtactacggtagaaaattagtag

SEQ ID NO: 409592 - DNA, 33 bp, Homo sapien
taggtgctgggtactatggtagaaaattagtag

SEQ ID NO: 409593 - DNA, 33 bp, Homo sapien
cccttgttctataatacggataagcaaaaatat

SEQ ID NO: 409594 - DNA, 33 bp, Homo sapien
cccttgttctataatatggataagcaaaaatat

SEQ ID NO: 409595 - DNA, 33 bp, Homo sapien
aaataaaaatcatagaaggtgacttataggagt

SEQ ID NO: 409596 - DNA, 33 bp, Homo sapien
aaataaaaatcatagacggtgacttataggagt

SEQ ID NO: 409597 - DNA, 33 bp, Homo sapien
ttcacataccacaatccatcccaggtttcatcc

SEQ ID NO: 409598 - DNA, 33 bp, Homo sapien
ttcacataccacaatctatcccaggtttcatcc

SEQ ID NO: 409599 - DNA, 33 bp, Homo sapien
cctatatgttcacatcaccaagtttctcttact

SEQ ID NO: 409600 - DNA, 33 bp, Homo sapien
cctatatgttcacatcgccaagtttctcttact

SEQ ID NO: 409601 - DNA, 33 bp, Homo sapien
cccactgtgtctctgacggttacacaccaccag

SEQ ID NO: 409602 - DNA, 33 bp, Homo sapien
cccactgtgtctctgatggttacacaccaccag

SEQ ID NO: 409603 - DNA, 33 bp, Homo sapien
ccagctctagcataccaccatagaatcttcaga

SEQ ID NO: 409604 - DNA, 33 bp, Homo sapien
ccagctctagcataccgccatagaatcttcaga

SEQ ID NO: 409605 - DNA, 33 bp, Homo sapien
tagggcctgaagcttaaccccagcatactggag

SEQ ID NO: 409606 - DNA, 33 bp, Homo sapien
tagggcctgaagcttacccccagcatactggag

SEQ ID NO: 409607 - DNA, 33 bp, Homo sapien
aagacaatccttggcactgagtggggtatgtgt

SEQ ID NO: 409608 - DNA, 33 bp, Homo sapien
aagacaatccttggcattgagtggggtatgtgt

SEQ ID NO: 409609 - DNA, 33 bp, Homo sapien
tatgagtaccgtcaaaagagtttctagcattaa

SEQ ID NO: 409610 - DNA, 33 bp, Homo sapien
tatgagtaccgtcaaatgagtttctagcattaa

SEQ ID NO: 409611 - DNA, 33 bp, Homo sapien
tgccatctaagtaaaccgaatgcctgccttcag

SEQ ID NO: 409612 - DNA, 33 bp, Homo sapien
tgccatctaagtaaactgaatgcctgccttcag

SEQ ID NO: 409613 - DNA, 33 bp, Homo sapien
aagagttaaacacaaaagaaggcaataaagaag

SEQ ID NO: 409614 - DNA, 33 bp, Homo sapien
aagagttaaacacaaacgaaggcaataaagaag

SEQ ID NO: 409615 - DNA, 33 bp, Homo sapien
gagggattagcagaacagatttttaaaaccaca

SEQ ID NO: 409616 - DNA, 33 bp, Homo sapien
gagggattagcagaacggatttttaaaaccaca

SEQ ID NO: 409617 - DNA, 33 bp, Homo sapien
aacatctccaatgtctaaattttgtctagatct

SEQ ID NO: 409618 - DNA, 33 bp, Homo sapien
aacatctccaatgtcttaattttgtctagatct

SEQ ID NO: 409619 - DNA, 33 bp, Homo sapien
aacgagtggttcacagcatcgtctagtcagata

SEQ ID NO: 409620 - DNA, 33 bp, Homo sapien
aacgagtggttcacagtatcgtctagtcagata

SEQ ID NO: 409621 - DNA, 33 bp, Homo sapien
ctcaagtttggaccacagggtttggtgatttcc

SEQ ID NO: 409622 - DNA, 33 bp, Homo sapien
ctcaagtttggaccacggggtttggtgatttcc

SEQ ID NO: 409623 - DNA, 33 bp, Homo sapien
agctcagccacagcagaatatcacactggtcag

SEQ ID NO: 409624 - DNA, 33 bp, Homo sapien
agctcagccacagcagtatatcacactggtcag

SEQ ID NO: 409625 - DNA, 33 bp, Homo sapien
atcttgatggtcttgaacaagatccagggggat

SEQ ID NO: 409626 - DNA, 33 bp, Homo sapien
atcttgatggtcttgagcaagatccagggggat

SEQ ID NO: 409627 - DNA, 33 bp, Homo sapien
actacacgactacagtaactaaatctcatggta

SEQ ID NO: 409628 - DNA, 33 bp, Homo sapien
actacacgactacagtgactaaatctcatggta

SEQ ID NO: 409629 - DNA, 33 bp, Homo sapien
tgaatatgatgcctagaaagtcacaaattacat

SEQ ID NO: 409630 - DNA, 33 bp, Homo sapien
tgaatatgatgcctaggaagtcacaaattacat

SEQ ID NO: 409631 - DNA, 33 bp, Homo sapien
tagagcattaaaaatacagagttcttctgaaga

SEQ ID NO: 409632 - DNA, 33 bp, Homo sapien
tagagcattaaaaatatagagttcttctgaaga

SEQ ID NO: 409633 - DNA, 33 bp, Homo sapien
tgttccatgtgtgctacaaaaaaatgtgtgttc

SEQ ID NO: 409634 - DNA, 33 bp, Homo sapien
tgttccatgtgtgctagaaaaaaatgtgtgttc

SEQ ID NO: 409635 - DNA, 33 bp, Homo sapien
ttgggctagtaaagtgaactcaatctaattaaa

SEQ ID NO: 409636 - DNA, 33 bp, Homo sapien
ttgggctagtaaagtggactcaatctaattaaa

SEQ ID NO: 409637 - DNA, 33 bp, Homo sapien
tttcctaactaaattaagctcaatcttagctaa

SEQ ID NO: 409638 - DNA, 33 bp, Homo sapien
tttcctaactaaattatgctcaatcttagctaa

SEQ ID NO: 409639 - DNA, 33 bp, Homo sapien
aatgtcttagctacatcaatgctctataaactt

SEQ ID NO: 409640 - DNA, 33 bp, Homo sapien
aatgtcttagctacatgaatgctctataaactt

SEQ ID NO: 409641 - DNA, 33 bp, Homo sapien
cacctacttagccagtcaccagacaagcccacc

SEQ ID NO: 409642 - DNA, 33 bp, Homo sapien
cacctacttagccagttaccagacaagcccacc

SEQ ID NO: 409643 - DNA, 33 bp, Homo sapien
ctggcgtcagggaatacggtagcacctggaagc

SEQ ID NO: 409644 - DNA, 33 bp, Homo sapien
ctggcgtcagggaatatggtagcacctggaagc

SEQ ID NO: 409645 - DNA, 33 bp, Homo sapien
agagatcaaaccttcccatcttttggttgccag

SEQ ID NO: 409646 - DNA, 33 bp, Homo sapien
agagatcaaaccttccgatcttttggttgccag

SEQ ID NO: 409647 - DNA, 33 bp, Homo sapien
ttagtcacaaggtacactaagcagcacctcatc

SEQ ID NO: 409648 - DNA, 33 bp, Homo sapien
ttagtcacaaggtacattaagcagcacctcatc

SEQ ID NO: 409649 - DNA, 33 bp, Homo sapien
ttcagcattttccataacactaagcactatgtt

SEQ ID NO: 409650 - DNA, 33 bp, Homo sapien
ttcagcattttccatagcactaagcactatgtt

SEQ ID NO: 409651 - DNA, 33 bp, Homo sapien
ttaggaatggatgacaaattttttcctccacca

SEQ ID NO: 409652 - DNA, 33 bp, Homo sapien
ttaggaatggatgacatattttttcctccacca

SEQ ID NO: 409653 - DNA, 33 bp, Homo sapien
tatttaaaacctgaaacggaagactgtacaaat

SEQ ID NO: 409654 - DNA, 33 bp, Homo sapien
tatttaaaacctgaaatggaagactgtacaaat

SEQ ID NO: 409655 - DNA, 33 bp, Homo sapien
attttaactcaaccaccaagtttacttttttct

SEQ ID NO: 409656 - DNA, 33 bp, Homo sapien
attttaactcaaccacgaagtttacttttttct

SEQ ID NO: 409657 - DNA, 33 bp, Homo sapien
gagaggtgcaaatatcaaggtggaaagctgtta

SEQ ID NO: 409658 - DNA, 33 bp, Homo sapien
gagaggtgcaaatatcgaggtggaaagctgtta

SEQ ID NO: 409659 - DNA, 33 bp, Homo sapien
aaaacactgatatagcacttagatttaacacct

SEQ ID NO: 409660 - DNA, 33 bp, Homo sapien
aaaacactgatatagctcttagatttaacacct

SEQ ID NO: 409661 - DNA, 33 bp, Homo sapien
gtggcacctatgatagcagagaaagttctgtgc

SEQ ID NO: 409662 - DNA, 33 bp, Homo sapien
gtggcacctatgataggagagaaagttctgtgc

SEQ ID NO: 409663 - DNA, 33 bp, Homo sapien
tctgtcttaaatggataatacaagtcattccag

SEQ ID NO: 409664 - DNA, 33 bp, Homo sapien
tctgtcttaaatggatgatacaagtcattccag

SEQ ID NO: 409665 - DNA, 33 bp, Homo sapien
ccttatcaaaacttccccagaggccatgattgt

SEQ ID NO: 409666 - DNA, 33 bp, Homo sapien
ccttatcaaaacttcctcagaggccatgattgt

SEQ ID NO: 409667 - DNA, 33 bp, Homo sapien
ttgtatatcatccttacgtttacaactaaaaca

SEQ ID NO: 409668 - DNA, 33 bp, Homo sapien
ttgtatatcatccttatgtttacaactaaaaca

SEQ ID NO: 409669 - DNA, 33 bp, Homo sapien
gggcctcatactaaaaacgtaggaattggatga

SEQ ID NO: 409670 - DNA, 33 bp, Homo sapien
gggcctcatactaaaatcgtaggaattggatga

SEQ ID NO: 409671 - DNA, 33 bp, Homo sapien
tgcaggtgtcagggtacgagactcctctgtctt

SEQ ID NO: 409672 - DNA, 33 bp, Homo sapien
tgcaggtgtcagggtatgagactcctctgtctt

SEQ ID NO: 409673 - DNA, 33 bp, Homo sapien
gctcctaagtaatgcacagaaaatggttaacat

SEQ ID NO: 409674 - DNA, 33 bp, Homo sapien
gctcctaagtaatgcatagaaaatggttaacat

SEQ ID NO: 409675 - DNA, 33 bp, Homo sapien
atgatctacctattccacctcactttaggtgga

SEQ ID NO: 409676 - DNA, 33 bp, Homo sapien
atgatctacctattccgcctcactttaggtgga

SEQ ID NO: 409677 - DNA, 33 bp, Homo sapien
ttgacataagacaatacgcgtccaaccacaaga

SEQ ID NO: 409678 - DNA, 33 bp, Homo sapien
ttgacataagacaatatgcgtccaaccacaaga

SEQ ID NO: 409679 - DNA, 33 bp, Homo sapien
gaatccagattgtgacaagataatggttttact

SEQ ID NO: 409680 - DNA, 33 bp, Homo sapien
gaatccagattgtgacgagataatggttttact

SEQ ID NO: 409681 - DNA, 33 bp, Homo sapien
agtagaaagcaaaacaaacacacctgaaaggac

SEQ ID NO: 409682 - DNA, 33 bp, Homo sapien
agtagaaagcaaaacagacacacctgaaaggac

SEQ ID NO: 409683 - DNA, 33 bp, Homo sapien
gcacaactctcacaaaatgaaaggggctcaact

SEQ ID NO: 409684 - DNA, 33 bp, Homo sapien
gcacaactctcacaaattgaaaggggctcaact

SEQ ID NO: 409685 - DNA, 33 bp, Homo sapien
tcaagctactgcccaacgctcatcaagagaata

SEQ ID NO: 409686 - DNA, 33 bp, Homo sapien
tcaagctactgcccaatgctcatcaagagaata

SEQ ID NO: 409687 - DNA, 33 bp, Homo sapien
aacatcagctaaaaccacgaaattattgtatct

SEQ ID NO: 409688 - DNA, 33 bp, Homo sapien
aacatcagctaaaacctcgaaattattgtatct

SEQ ID NO: 409689 - DNA, 33 bp, Homo sapien
ttatgtgtacatacaaaagaagattatgccatt

SEQ ID NO: 409690 - DNA, 33 bp, Homo sapien
ttatgtgtacatacaagagaagattatgccatt

SEQ ID NO: 409691 - DNA, 33 bp, Homo sapien
gaacaattcctttcacaggcagatcacagctag

SEQ ID NO: 409692 - DNA, 33 bp, Homo sapien
gaacaattcctttcacgggcagatcacagctag

SEQ ID NO: 409693 - DNA, 33 bp, Homo sapien
agtacttaaaataagccgacaagatgaattatt

SEQ ID NO: 409694 - DNA, 33 bp, Homo sapien
agtacttaaaataagctgacaagatgaattatt

SEQ ID NO: 409695 - DNA, 33 bp, Homo sapien
ttagatagatggaataagttctggtgctttatt

SEQ ID NO: 409696 - DNA, 33 bp, Homo sapien
ttagatagatggaatacgttctggtgctttatt

SEQ ID NO: 409697 - DNA, 33 bp, Homo sapien
agctagtcacctataaaggaaaccccatcagac

SEQ ID NO: 409698 - DNA, 33 bp, Homo sapien
agctagtcacctataatggaaaccccatcagac

SEQ ID NO: 409699 - DNA, 33 bp, Homo sapien
tttaggtctataggaaaccctgctttgaaaatg

SEQ ID NO: 409700 - DNA, 33 bp, Homo sapien
tttaggtctataggaacccctgctttgaaaatg

SEQ ID NO: 409701 - DNA, 33 bp, Homo sapien
acacagaaaattcacaacaacatttgtcagatt

SEQ ID NO: 409702 - DNA, 33 bp, Homo sapien
acacagaaaattcacagcaacatttgtcagatt

SEQ ID NO: 409703 - DNA, 33 bp, Homo sapien
taactatgcattctctaaccttaataaaaaggt

SEQ ID NO: 409704 - DNA, 33 bp, Homo sapien
taactatgcattctctcaccttaataaaaaggt

SEQ ID NO: 409705 - DNA, 33 bp, Homo sapien
atacactttctgaacaatacaaaaactaggaaa

SEQ ID NO: 409706 - DNA, 33 bp, Homo sapien
atacactttctgaacagtacaaaaactaggaaa

SEQ ID NO: 409707 - DNA, 33 bp, Homo sapien
gcagctgtagtccctgaagacttagctacttcc

SEQ ID NO: 409708 - DNA, 33 bp, Homo sapien
gcagctgtagtccctggagacttagctacttcc

SEQ ID NO: 409709 - DNA, 33 bp, Homo sapien
aggcactctatgcaaacgtatgctcttaatctc

SEQ ID NO: 409710 - DNA, 33 bp, Homo sapien
aggcactctatgcaaatgtatgctcttaatctc

SEQ ID NO: 409711 - DNA, 33 bp, Homo sapien
aataaccacaaaattcaatcatgtaattacaga

SEQ ID NO: 409712 - DNA, 33 bp, Homo sapien
aataaccacaaaattccatcatgtaattacaga

SEQ ID NO: 409713 - DNA, 33 bp, Homo sapien
tcagtaggaacttctacatcaccctatttataa

SEQ ID NO: 409714 - DNA, 33 bp, Homo sapien
tcagtaggaacttctatatcaccctatttataa

SEQ ID NO: 409715 - DNA, 33 bp, Homo sapien
agattcactaagctaaaaagacatgagattcct

SEQ ID NO: 409716 - DNA, 33 bp, Homo sapien
agattcactaagctaagaagacatgagattcct

SEQ ID NO: 409717 - DNA, 33 bp, Homo sapien
acaaggactataactcaattattgcacattgtc

SEQ ID NO: 409718 - DNA, 33 bp, Homo sapien
acaaggactataactccattattgcacattgtc

SEQ ID NO: 409719 - DNA, 33 bp, Homo sapien
tacatacccagaaagcacagggaattcagtgtg

SEQ ID NO: 409720 - DNA, 33 bp, Homo sapien
tacatacccagaaagcgcagggaattcagtgtg

SEQ ID NO: 409721 - DNA, 33 bp, Homo sapien
ctgaattagaatgagggccatttttatcccccc

SEQ ID NO: 409722 - DNA, 33 bp, Homo sapien
ctgaattagaatgaggtccatttttatcccccc

SEQ ID NO: 409723 - DNA, 33 bp, Homo sapien
ataatcttgaaaaaaaagtttgcacaaaaacat

SEQ ID NO: 409724 - DNA, 33 bp, Homo sapien
ataatcttgaaaaaaacgtttgcacaaaaacat

SEQ ID NO: 409725 - DNA, 33 bp, Homo sapien
acactggtgtgtttgacataagtcagtatttca

SEQ ID NO: 409726 - DNA, 33 bp, Homo sapien
acactggtgtgtttgatataagtcagtatttca

SEQ ID NO: 409727 - DNA, 33 bp, Homo sapien
caaatgattctcacaactagtcaaatttaagag

SEQ ID NO: 409728 - DNA, 33 bp, Homo sapien
caaatgattctcacaagtagtcaaatttaagag

SEQ ID NO: 409729 - DNA, 33 bp, Homo sapien
ttgatctgtttttgagcatcacataagatttct

SEQ ID NO: 409730 - DNA, 33 bp, Homo sapien
ttgatctgtttttgaggatcacataagatttct

SEQ ID NO: 409731 - DNA, 33 bp, Homo sapien
aaagcacaaaggcaggaagttaccaagtctatc

SEQ ID NO: 409732 - DNA, 33 bp, Homo sapien
aaagcacaaaggcagggagttaccaagtctatc

SEQ ID NO: 409733 - DNA, 33 bp, Homo sapien
ttattttgctaggcccagatgattaaagtctaa

SEQ ID NO: 409734 - DNA, 33 bp, Homo sapien
ttattttgctaggccctgatgattaaagtctaa

SEQ ID NO: 409735 - DNA, 33 bp, Homo sapien
aacagaaagaattcaaaagttgagctaatttga

SEQ ID NO: 409736 - DNA, 33 bp, Homo sapien
aacagaaagaattcaacagttgagctaatttga

SEQ ID NO: 409737 - DNA, 33 bp, Homo sapien
gaataatgccaccttcaagggaataatttcaaa

SEQ ID NO: 409738 - DNA, 33 bp, Homo sapien
gaataatgccaccttcgagggaataatttcaaa

SEQ ID NO: 409739 - DNA, 33 bp, Homo sapien
tagaaatattacttggaaagagagcaatcgtca

SEQ ID NO: 409740 - DNA, 33 bp, Homo sapien
tagaaatattacttggcaagagagcaatcgtca

SEQ ID NO: 409741 - DNA, 33 bp, Homo sapien
tgtccaaaagactcagaagtgatatatttagat

SEQ ID NO: 409742 - DNA, 33 bp, Homo sapien
tgtccaaaagactcaggagtgatatatttagat

SEQ ID NO: 409743 - DNA, 33 bp, Homo sapien
atcatgagttttaaccacttcacacctgcagtt

SEQ ID NO: 409744 - DNA, 33 bp, Homo sapien
atcatgagttttaaccgcttcacacctgcagtt

SEQ ID NO: 409745 - DNA, 33 bp, Homo sapien
ctcccttcaatttccactcactcttgcagttcc

SEQ ID NO: 409746 - DNA, 33 bp, Homo sapien
ctcccttcaatttccagtcactcttgcagttcc

SEQ ID NO: 409747 - DNA, 33 bp, Homo sapien
gctttagatcctgttacctttcactggagaatg

SEQ ID NO: 409748 - DNA, 33 bp, Homo sapien
gctttagatcctgttatctttcactggagaatg

SEQ ID NO: 409749 - DNA, 33 bp, Homo sapien
tccctagtgcacataaaaagaattgtatcttag

SEQ ID NO: 409750 - DNA, 33 bp, Homo sapien
tccctagtgcacataagaagaattgtatcttag

SEQ ID NO: 409751 - DNA, 33 bp, Homo sapien
tgtgttattgtaaatgacactgtttctaatttt

SEQ ID NO: 409752 - DNA, 33 bp, Homo sapien
tgtgttattgtaaatggcactgtttctaatttt

SEQ ID NO: 409753 - DNA, 33 bp, Homo sapien
tgtgtgtttataacacaatttttctgtgcttat

SEQ ID NO: 409754 - DNA, 33 bp, Homo sapien
tgtgtgtttataacaccatttttctgtgcttat

SEQ ID NO: 409755 - DNA, 33 bp, Homo sapien
gaggtctttgtgtgtaagcactcatcacataca

SEQ ID NO: 409756 - DNA, 33 bp, Homo sapien
gaggtctttgtgtgtaggcactcatcacataca

SEQ ID NO: 409757 - DNA, 33 bp, Homo sapien
atataaagagtgtcaaagagaatccagtgaggt

SEQ ID NO: 409758 - DNA, 33 bp, Homo sapien
atataaagagtgtcaaggagaatccagtgaggt

SEQ ID NO: 409759 - DNA, 33 bp, Homo sapien
aactttccttttcaaccctacactgtcatcagt

SEQ ID NO: 409760 - DNA, 33 bp, Homo sapien
aactttccttttcaactctacactgtcatcagt

SEQ ID NO: 409761 - DNA, 33 bp, Homo sapien
gactacttgaatgaaagaagtggttttgaatat

SEQ ID NO: 409762 - DNA, 33 bp, Homo sapien
gactacttgaatgaaataagtggttttgaatat

SEQ ID NO: 409763 - DNA, 33 bp, Homo sapien
ttttctagttctataactctgtcatttgaacac

SEQ ID NO: 409764 - DNA, 33 bp, Homo sapien
ttttctagttctataattctgtcatttgaacac

SEQ ID NO: 409765 - DNA, 33 bp, Homo sapien
actcctgggcccaaacaatcagcctgcttcagc

SEQ ID NO: 409766 - DNA, 33 bp, Homo sapien
actcctgggcccaaacgatcagcctgcttcagc

SEQ ID NO: 409767 - DNA, 33 bp, Homo sapien
acatgaactggtaaacactgaataagctctatg

SEQ ID NO: 409768 - DNA, 33 bp, Homo sapien
acatgaactggtaaacgctgaataagctctatg

SEQ ID NO: 409769 - DNA, 33 bp, Homo sapien
acaggaaattgtaaaaataatacagagaaattt

SEQ ID NO: 409770 - DNA, 33 bp, Homo sapien
acaggaaattgtaaaagtaatacagagaaattt

SEQ ID NO: 409771 - DNA, 33 bp, Homo sapien
ggagacagatgtaaaaaaaagtgcgttcaacag

SEQ ID NO: 409772 - DNA, 33 bp, Homo sapien
ggagacagatgtaaaacaaagtgcgttcaacag

SEQ ID NO: 409773 - DNA, 33 bp, Homo sapien
aatagtagcagagctcagactcaaaaaccaggt

SEQ ID NO: 409774 - DNA, 33 bp, Homo sapien
aatagtagcagagctcggactcaaaaaccaggt

SEQ ID NO: 409775 - DNA, 33 bp, Homo sapien
gtgctgtaattgttacaaatgtgttagacttgc

SEQ ID NO: 409776 - DNA, 33 bp, Homo sapien
gtgctgtaattgttactaatgtgttagacttgc

SEQ ID NO: 409777 - DNA, 33 bp, Homo sapien
tgcattgtatgcacaaagcacacagaattctca

SEQ ID NO: 409778 - DNA, 33 bp, Homo sapien
tgcattgtatgcacaaggcacacagaattctca

SEQ ID NO: 409779 - DNA, 33 bp, Homo sapien
ggcaagcaaataaaggacaaagcctccagtgaa

SEQ ID NO: 409780 - DNA, 33 bp, Homo sapien
ggcaagcaaataaagggcaaagcctccagtgaa

SEQ ID NO: 409781 - DNA, 33 bp, Homo sapien
actcaatgtgaagacaatgagtatgatgacctt

SEQ ID NO: 409782 - DNA, 33 bp, Homo sapien
actcaatgtgaagacagtgagtatgatgacctt

SEQ ID NO: 409783 - DNA, 33 bp, Homo sapien
gtaaacacaaacaataagaaactcactttaaaa

SEQ ID NO: 409784 - DNA, 33 bp, Homo sapien
gtaaacacaaacaatacgaaactcactttaaaa

SEQ ID NO: 409785 - DNA, 33 bp, Homo sapien
atgttgaaacacttaaccaaatgcttaatgcct

SEQ ID NO: 409786 - DNA, 33 bp, Homo sapien
atgttgaaacacttaatcaaatgcttaatgcct

SEQ ID NO: 409787 - DNA, 33 bp, Homo sapien
taataagccaggttaacaactatagtatcatac

SEQ ID NO: 409788 - DNA, 33 bp, Homo sapien
taataagccaggttaataactatagtatcatac

SEQ ID NO: 409789 - DNA, 33 bp, Homo sapien
aatctgaccatttgcactgatttttccatgctt

SEQ ID NO: 409790 - DNA, 33 bp, Homo sapien
aatctgaccatttgcattgatttttccatgctt

SEQ ID NO: 409791 - DNA, 33 bp, Homo sapien
tgatttgcctatatccagatctatacattatgt

SEQ ID NO: 409792 - DNA, 33 bp, Homo sapien
tgatttgcctatatccggatctatacattatgt

SEQ ID NO: 409793 - DNA, 33 bp, Homo sapien
tctttgcttcttaggaacaggataattgatttg

SEQ ID NO: 409794 - DNA, 33 bp, Homo sapien
tctttgcttcttaggagcaggataattgatttg

SEQ ID NO: 409795 - DNA, 33 bp, Homo sapien
atctgataatttaacacaagaaagccaagattc

SEQ ID NO: 409796 - DNA, 33 bp, Homo sapien
atctgataatttaacagaagaaagccaagattc

SEQ ID NO: 409797 - DNA, 33 bp, Homo sapien
tccagtaacatttttacgtgcaaataactgcaa

SEQ ID NO: 409798 - DNA, 33 bp, Homo sapien
tccagtaacatttttatgtgcaaataactgcaa

SEQ ID NO: 409799 - DNA, 33 bp, Homo sapien
tgcatgtgagtcactactaggtactaaggtata

SEQ ID NO: 409800 - DNA, 33 bp, Homo sapien
tgcatgtgagtcactattaggtactaaggtata

SEQ ID NO: 409801 - DNA, 33 bp, Homo sapien
aactgcagcaaatgcaaactcatgaagactgac

SEQ ID NO: 409802 - DNA, 33 bp, Homo sapien
aactgcagcaaatgcacactcatgaagactgac

SEQ ID NO: 409803 - DNA, 33 bp, Homo sapien
gcaacttcctacaatcccccttgtgagtcctct

SEQ ID NO: 409804 - DNA, 33 bp, Homo sapien
gcaacttcctacaatctcccttgtgagtcctct

SEQ ID NO: 409805 - DNA, 33 bp, Homo sapien
aggggagacaaatacaactgcttgaccaggttc

SEQ ID NO: 409806 - DNA, 33 bp, Homo sapien
aggggagacaaatacagctgcttgaccaggttc

SEQ ID NO: 409807 - DNA, 33 bp, Homo sapien
aaatgccttctggctcaataagtcaataatcct

SEQ ID NO: 409808 - DNA, 33 bp, Homo sapien
aaatgccttctggctccataagtcaataatcct

SEQ ID NO: 409809 - DNA, 33 bp, Homo sapien
acttgaaatgtgctaccgatttgttattaattt

SEQ ID NO: 409810 - DNA, 33 bp, Homo sapien
acttgaaatgtgctactgatttgttattaattt

SEQ ID NO: 409811 - DNA, 33 bp, Homo sapien
cttaatacatgaatgaagcaaagacaacattga

SEQ ID NO: 409812 - DNA, 33 bp, Homo sapien
cttaatacatgaatgaggcaaagacaacattga

SEQ ID NO: 409813 - DNA, 33 bp, Homo sapien
atctattacgtgtcaaagtttgttgtgatactt

SEQ ID NO: 409814 - DNA, 33 bp, Homo sapien
atctattacgtgtcaatgtttgttgtgatactt

SEQ ID NO: 409815 - DNA, 33 bp, Homo sapien
ggagatgacagctccacgtatgttattttcccc

SEQ ID NO: 409816 - DNA, 33 bp, Homo sapien
ggagatgacagctccatgtatgttattttcccc

SEQ ID NO: 409817 - DNA, 33 bp, Homo sapien
gcgatgtattgctacccactgtgtggctgccct

SEQ ID NO: 409818 - DNA, 33 bp, Homo sapien
gcgatgtattgctacctactgtgtggctgccct

SEQ ID NO: 409819 - DNA, 33 bp, Homo sapien
cagaaaccgttttttaaaaatctggatgtacat

SEQ ID NO: 409820 - DNA, 33 bp, Homo sapien
cagaaaccgttttttataaatctggatgtacat

SEQ ID NO: 409821 - DNA, 33 bp, Homo sapien
ccccatatggtgaaaactgttccatgacaagtc

SEQ ID NO: 409822 - DNA, 33 bp, Homo sapien
ccccatatggtgaaaattgttccatgacaagtc

SEQ ID NO: 409823 - DNA, 33 bp, Homo sapien
cagcaaatattggctacgttgggagatttctcc

SEQ ID NO: 409824 - DNA, 33 bp, Homo sapien
cagcaaatattggctatgttgggagatttctcc

SEQ ID NO: 409825 - DNA, 33 bp, Homo sapien
ttcctgattgagaatacggataagcgttcagtg

SEQ ID NO: 409826 - DNA, 33 bp, Homo sapien
ttcctgattgagaatatggataagcgttcagtg

SEQ ID NO: 409827 - DNA, 33 bp, Homo sapien
ctcaccactacagagaagggctagcactgaaaa

SEQ ID NO: 409828 - DNA, 33 bp, Homo sapien
ctcaccactacagagatgggctagcactgaaaa

SEQ ID NO: 409829 - DNA, 33 bp, Homo sapien
ttcaataactgttggagcccaaagcttaaagta

SEQ ID NO: 409830 - DNA, 33 bp, Homo sapien
ttcaataactgttggatcccaaagcttaaagta

SEQ ID NO: 409831 - DNA, 33 bp, Homo sapien
gcccgttttacagatcagaagaggaggctctgg

SEQ ID NO: 409832 - DNA, 33 bp, Homo sapien
gcccgttttacagatctgaagaggaggctctgg

SEQ ID NO: 409833 - DNA, 33 bp, Homo sapien
gaaataggtcaccaccaggagtcaaccagcttc

SEQ ID NO: 409834 - DNA, 33 bp, Homo sapien
gaaataggtcaccaccgggagtcaaccagcttc

SEQ ID NO: 409835 - DNA, 33 bp, Homo sapien
tcatcacattcactcccgctaggaagttctcca

SEQ ID NO: 409836 - DNA, 33 bp, Homo sapien
tcatcacattcactcctgctaggaagttctcca

SEQ ID NO: 409837 - DNA, 33 bp, Homo sapien
aacgctatatgctgccgctttatgtattgccat

SEQ ID NO: 409838 - DNA, 33 bp, Homo sapien
aacgctatatgctgcctctttatgtattgccat

SEQ ID NO: 409839 - DNA, 33 bp, Homo sapien
cattaacaccaatgcacagtactaaatgctaaa

SEQ ID NO: 409840 - DNA, 33 bp, Homo sapien
cattaacaccaatgcagagtactaaatgctaaa

SEQ ID NO: 409841 - DNA, 33 bp, Homo sapien
cagctgtggcttaaaaagacttgacatgaattg

SEQ ID NO: 409842 - DNA, 33 bp, Homo sapien
cagctgtggcttaaaaggacttgacatgaattg

SEQ ID NO: 409843 - DNA, 33 bp, Homo sapien
ttactccttcttggaactgaactatggtaagtc

SEQ ID NO: 409844 - DNA, 33 bp, Homo sapien
ttactccttcttggaattgaactatggtaagtc

SEQ ID NO: 409845 - DNA, 33 bp, Homo sapien
tagagtttctgtcaaaaaaaggagagagatttc

SEQ ID NO: 409846 - DNA, 33 bp, Homo sapien
tagagtttctgtcaaagaaaggagagagatttc

SEQ ID NO: 409847 - DNA, 33 bp, Homo sapien
tgaatcttaggatgtaagtgtttcacagttgtt

SEQ ID NO: 409848 - DNA, 33 bp, Homo sapien
tgaatcttaggatgtacgtgtttcacagttgtt

SEQ ID NO: 409849 - DNA, 33 bp, Homo sapien
tgactaagtttggagccacaatttctctaaatc

SEQ ID NO: 409850 - DNA, 33 bp, Homo sapien
tgactaagtttggagctacaatttctctaaatc

SEQ ID NO: 409851 - DNA, 33 bp, Homo sapien
ttaggagtccactatgcattttttcctaactca

SEQ ID NO: 409852 - DNA, 33 bp, Homo sapien
ttaggagtccactatgtattttttcctaactca

SEQ ID NO: 409853 - DNA, 33 bp, Homo sapien
ctgtgaagaacagtgccaggggcagacaagtaa

SEQ ID NO: 409854 - DNA, 33 bp, Homo sapien
ctgtgaagaacagtgctaggggcagacaagtaa

SEQ ID NO: 409855 - DNA, 33 bp, Homo sapien
gcaggagggtaaggcaaactgctagatacccgg

SEQ ID NO: 409856 - DNA, 33 bp, Homo sapien
gcaggagggtaaggcagactgctagatacccgg

SEQ ID NO: 409857 - DNA, 33 bp, Homo sapien
ctgtgttcccaacataacagagtggaaagtggt

SEQ ID NO: 409858 - DNA, 33 bp, Homo sapien
ctgtgttcccaacatagcagagtggaaagtggt

SEQ ID NO: 409859 - DNA, 33 bp, Homo sapien
acaaaactgagagattaaagactaaaatcaaga

SEQ ID NO: 409860 - DNA, 33 bp, Homo sapien
acaaaactgagagattgaagactaaaatcaaga

SEQ ID NO: 409861 - DNA, 33 bp, Homo sapien
catttgtgaaatcatcaccacaatcaaggcacc

SEQ ID NO: 409862 - DNA, 33 bp, Homo sapien
catttgtgaaatcatcgccacaatcaaggcacc

SEQ ID NO: 409863 - DNA, 33 bp, Homo sapien
tgaggagctagattcacagactgtgtggttttc

SEQ ID NO: 409864 - DNA, 33 bp, Homo sapien
tgaggagctagattcagagactgtgtggttttc

SEQ ID NO: 409865 - DNA, 33 bp, Homo sapien
tggtctaggatagcagcaatgagtagtgagtaa

SEQ ID NO: 409866 - DNA, 33 bp, Homo sapien
tggtctaggatagcagtaatgagtagtgagtaa

SEQ ID NO: 409867 - DNA, 33 bp, Homo sapien
cttccacaagatcctccctatcaattactgaat

SEQ ID NO: 409868 - DNA, 33 bp, Homo sapien
cttccacaagatcctcgctatcaattactgaat

SEQ ID NO: 409869 - DNA, 33 bp, Homo sapien; identical to SEQ ID NO: 409867

SEQ ID NO: 409870 - DNA, 33 bp, Homo sapien; identical to SEQ ID NO: 409868

SEQ ID NO: 409871 - DNA, 33 bp, Homo sapien
gctgggttaagtgaaccatcagtggtgttaaat

SEQ ID NO: 409872 - DNA, 33 bp, Homo sapien
gctgggttaagtgaactatcagtggtgttaaat

SEQ ID NO: 409873 - DNA, 33 bp, Homo sapien
aatatagccatgtatgaaaattttaatctagaa

SEQ ID NO: 409874 - DNA, 33 bp, Homo sapien
aatatagccatgtatgcaaattttaatctagaa

SEQ ID NO: 409875 - DNA, 33 bp, Homo sapien
ttcattgttgttgagaagcagaatctcaatgaa

SEQ ID NO: 409876 - DNA, 33 bp, Homo sapien
ttcattgttgttgagaggcagaatctcaatgaa

SEQ ID NO: 409877 - DNA, 33 bp, Homo sapien
tgctgtttcttggtcagagtttaatggtggaga

SEQ ID NO: 409878 - DNA, 33 bp, Homo sapien
tgctgtttcttggtcatagtttaatggtggaga

SEQ ID NO: 409879 - DNA, 33 bp, Homo sapien
atgtatttaggctcaaacaaaagcaaatgtccc

SEQ ID NO: 409880 - DNA, 33 bp, Homo sapien
atgtatttaggctcaagcaaaagcaaatgtccc

SEQ ID NO: 409881 - DNA, 33 bp, Homo sapien
aatttaatacctaccacagcgagaaagtaaaat

SEQ ID NO: 409882 - DNA, 33 bp, Homo sapien
aatttaatacctaccatagcgagaaagtaaaat

SEQ ID NO: 409883 - DNA, 33 bp, Homo sapien
aagctcactttatggaagagtgcatccccagtt

SEQ ID NO: 409884 - DNA, 33 bp, Homo sapien
aagctcactttatggaggagtgcatccccagtt

SEQ ID NO: 409885 - DNA, 33 bp, Homo sapien
ctggttggataaggtcacacattttcagaaaaa

SEQ ID NO: 409886 - DNA, 33 bp, Homo sapien
ctggttggataaggtctcacattttcagaaaaa

SEQ ID NO: 409887 - DNA, 33 bp, Homo sapien
cactgctagcttttaaaatggaaaagccatgag

SEQ ID NO: 409888 - DNA, 33 bp, Homo sapien
cactgctagcttttaagatggaaaagccatgag

SEQ ID NO: 409889 - DNA, 33 bp, Homo sapien
atggatgaaacagacacgatccctacctttata

SEQ ID NO: 409890 - DNA, 33 bp, Homo sapien
atggatgaaacagacatgatccctacctttata

SEQ ID NO: 409891 - DNA, 33 bp, Homo sapien
gagtaggagccaaccacctaatgagttaaggag

SEQ ID NO: 409892 - DNA, 33 bp, Homo sapien
gagtaggagccaaccatctaatgagttaaggag

SEQ ID NO: 409893 - DNA, 33 bp, Homo sapien
cttggtttctataatactacatttgcctaattt

SEQ ID NO: 409894 - DNA, 33 bp, Homo sapien
cttggtttctataatagtacatttgcctaattt

SEQ ID NO: 409895 - DNA, 33 bp, Homo sapien
taactactgaaaagcacatgtatttaaagccat

SEQ ID NO: 409896 - DNA, 33 bp, Homo sapien
taactactgaaaagcatatgtatttaaagccat

SEQ ID NO: 409897 - DNA, 33 bp, Homo sapien
tataaatcagttaatacagcttccactttttgg

SEQ ID NO: 409898 - DNA, 33 bp, Homo sapien
tataaatcagttaatatagcttccactttttgg

SEQ ID NO: 409899 - DNA, 33 bp, Homo sapien
ccagaatctccttgtccagctgttagcaggtct

SEQ ID NO: 409900 - DNA, 33 bp, Homo sapien
ccagaatctccttgtctagctgttagcaggtct

SEQ ID NO: 409901 - DNA, 33 bp, Homo sapien
tctggaaaagcagagacgaaaagaagtctatag

SEQ ID NO: 409902 - DNA, 33 bp, Homo sapien
tctggaaaagcagagatgaaaagaagtctatag

SEQ ID NO: 409903 - DNA, 33 bp, Homo sapien
ccatttgccctatgccactaaaacagctcttgt

SEQ ID NO: 409904 - DNA, 33 bp, Homo sapien
ccatttgccctatgccgctaaaacagctcttgt

SEQ ID NO: 409905 - DNA, 33 bp, Homo sapien
actacaatttttgcccactaaataatttgtctg

SEQ ID NO: 409906 - DNA, 33 bp, Homo sapien
actacaatttttgcccgctaaataatttgtctg

SEQ ID NO: 409907 - DNA, 33 bp, Homo sapien
atgcgccatgataaacagctctgctgcaccagt

SEQ ID NO: 409908 - DNA, 33 bp, Homo sapien
atgcgccatgataaactgctctgctgcaccagt

SEQ ID NO: 409909 - DNA, 33 bp, Homo sapien
ctgaggttaacagagacgtaggaactgtgtaaa

SEQ ID NO: 409910 - DNA, 33 bp, Homo sapien
ctgaggttaacagagatgtaggaactgtgtaaa

SEQ ID NO: 409911 - DNA, 33 bp, Homo sapien
taatcacttcatgctaaagattgcaagaaaaaa

SEQ ID NO: 409912 - DNA, 33 bp, Homo sapien
taatcacttcatgctagagattgcaagaaaaaa

SEQ ID NO: 409913 - DNA, 33 bp, Homo sapien
agaataatactgcctacgtgataaagaatagaa

SEQ ID NO: 409914 - DNA, 33 bp, Homo sapien
agaataatactgcctatgtgataaagaatagaa

SEQ ID NO: 409915 - DNA, 33 bp, Homo sapien
atcatccctacaaataccaggccctgtgctagg

SEQ ID NO: 409916 - DNA, 33 bp, Homo sapien
atcatccctacaaatatcaggccctgtgctagg

SEQ ID NO: 409917 - DNA, 33 bp, Homo sapien
acacatcacgaaatcacgctcttaacctggtgg

SEQ ID NO: 409918 - DNA, 33 bp, Homo sapien
acacatcacgaaatcatgctcttaacctggtgg

SEQ ID NO: 409919 - DNA, 33 bp, Homo sapien
taatttgtgtggccagaaatttattgaacacta

SEQ ID NO: 409920 - DNA, 33 bp, Homo sapien
taatttgtgtggccagcaatttattgaacacta

SEQ ID NO: 409921 - DNA, 33 bp, Homo sapien
aaacacatatatctcacattgtatccctactac

SEQ ID NO: 409922 - DNA, 33 bp, Homo sapien
aaacacatatatctcagattgtatccctactac

SEQ ID NO: 409923 - DNA, 33 bp, Homo sapien
aaatgattatgtggtaagtttaggcagtgggac

SEQ ID NO: 409924 - DNA, 33 bp, Homo sapien
aaatgattatgtggtatgtttaggcagtgggac

SEQ ID NO: 409925 - DNA, 33 bp, Homo sapien
ataatctggagaaagacgaaaagggtgaactga

SEQ ID NO: 409926 - DNA, 33 bp, Homo sapien
ataatctggagaaagatgaaaagggtgaactga

SEQ ID NO: 409927 - DNA, 33 bp, Homo sapien
tctcattacagcctcaaaaccttgggaggaagc

SEQ ID NO: 409928 - DNA, 33 bp, Homo sapien
tctcattacagcctcacaaccttgggaggaagc

SEQ ID NO: 409929 - DNA, 33 bp, Homo sapien
aaagcagctaatactcacccctcctactgtctg

SEQ ID NO: 409930 - DNA, 33 bp, Homo sapien
aaagcagctaatactcgcccctcctactgtctg

SEQ ID NO: 409931 - DNA, 33 bp, Homo sapien
cttctgtctgtctgcaccagtaaagtaaattta

SEQ ID NO: 409932 - DNA, 33 bp, Homo sapien
cttctgtctgtctgcatcagtaaagtaaattta

SEQ ID NO: 409933 - DNA, 33 bp, Homo sapien
caatggagagccattgaaggggagaaagaagca

SEQ ID NO: 409934 - DNA, 33 bp, Homo sapien
caatggagagccattgcaggggagaaagaagca

SEQ ID NO: 409935 - DNA, 33 bp, Homo sapien
aagctcaacaagttgacacagtgtagggttgaa

SEQ ID NO: 409936 - DNA, 33 bp, Homo sapien
aagctcaacaagttgatacagtgtagggttgaa

SEQ ID NO: 409937 - DNA, 33 bp, Homo sapien
gcgtcatgcgtagagaaccactggactttagac

SEQ ID NO: 409938 - DNA, 33 bp, Homo sapien
gcgtcatgcgtagagatccactggactttagac

SEQ ID NO: 409939 - DNA, 33 bp, Homo sapien
agtcttaagtctcaaaataccaggctatactag

SEQ ID NO: 409940 - DNA, 33 bp, Homo sapien
agtcttaagtctcaaagtaccaggctatactag

SEQ ID NO: 409941 - DNA, 33 bp, Homo sapien
cagagctggggagtcaaagtcaagccctagaca

SEQ ID NO: 409942 - DNA, 33 bp, Homo sapien
cagagctggggagtcagagtcaagccctagaca

SEQ ID NO: 409943 - DNA, 33 bp, Homo sapien
agcctgagcagaagagaagtctagcttattaag

SEQ ID NO: 409944 - DNA, 33 bp, Homo sapien
agcctgagcagaagaggagtctagcttattaag

SEQ ID NO: 409945 - DNA, 33 bp, Homo sapien
cctccagcagagagtagatgcggtggttgggaa

SEQ ID NO: 409946 - DNA, 33 bp, Homo sapien
cctccagcagagagtatatgcggtggttgggaa

SEQ ID NO: 409947 - DNA, 33 bp, Homo sapien
gtagtgggaaagggcgacaataacaatactaga

SEQ ID NO: 409948 - DNA, 33 bp, Homo sapien
gtagtgggaaagggcggcaataacaatactaga

SEQ ID NO: 409949 - DNA, 33 bp, Homo sapien
agaagctgagctctaccgcgggataagatcagc

SEQ ID NO: 409950 - DNA, 33 bp, Homo sapien
agaagctgagctctacggcgggataagatcagc

SEQ ID NO: 409951 - DNA, 33 bp, Homo sapien
gcgttgggaatggaacacttgacacccttccaa

SEQ ID NO: 409952 - DNA, 33 bp, Homo sapien
gcgttgggaatggaactcttgacacccttccaa

SEQ ID NO: 409953 - DNA, 33 bp, Homo sapien
gaaatctgactctaagactacactccctattga

SEQ ID NO: 409954 - DNA, 33 bp, Homo sapien
gaaatctgactctaaggctacactccctattga

SEQ ID NO: 409955 - DNA, 33 bp, Homo sapien
ggtagaaaaagataccaaaatgtcatggtgata

SEQ ID NO: 409956 - DNA, 33 bp, Homo sapien
ggtagaaaaagataccgaaatgtcatggtgata

SEQ ID NO: 409957 - DNA, 33 bp, Homo sapien
ggtgagaccccataagccagacattgtacaggc

SEQ ID NO: 409958 - DNA, 33 bp, Homo sapien
ggtgagaccccataagtcagacattgtacaggc

SEQ ID NO: 409959 - DNA, 33 bp, Homo sapien
ttcagattggatgttgcatttcagggatacatc

SEQ ID NO: 409960 - DNA, 33 bp, Homo sapien
ttcagattggatgttggatttcagggatacatc

SEQ ID NO: 409961 - DNA, 33 bp, Homo sapien
ttggatgttatcgaccaaattgtgtcccctccc

SEQ ID NO: 409962 - DNA, 33 bp, Homo sapien
ttggatgttatcgaccgaattgtgtcccctccc

SEQ ID NO: 409963 - DNA, 33 bp, Homo sapien
gcaaggctccaaaaacaaatagaaagcttggtt

SEQ ID NO: 409964 - DNA, 33 bp, Homo sapien
gcaaggctccaaaaacgaatagaaagcttggtt

SEQ ID NO: 409965 - DNA, 33 bp, Homo sapien
aggcagctgagcggagccctgaagattgaaaca

SEQ ID NO: 409966 - DNA, 33 bp, Homo sapien
aggcagctgagcggagtcctgaagattgaaaca

SEQ ID NO: 409967 - DNA, 33 bp, Homo sapien
gtgattaactctgtccaaagggctcaaagaagt

SEQ ID NO: 409968 - DNA, 33 bp, Homo sapien
gtgattaactctgtccgaagggctcaaagaagt

SEQ ID NO: 409969 - DNA, 33 bp, Homo sapien
cataaacactgcttacactgcaaagttctctct

SEQ ID NO: 409970 - DNA, 33 bp, Homo sapien
cataaacactgcttacgctgcaaagttctctct

SEQ ID NO: 409971 - DNA, 33 bp, Homo sapien
tgtcagtggactgttaaacaaagcttaggtaac

SEQ ID NO: 409972 - DNA, 33 bp, Homo sapien
tgtcagtggactgttacacaaagcttaggtaac

SEQ ID NO: 409973 - DNA, 33 bp, Homo sapien
acctttgcgggttggccgatgacatcctctctg

SEQ ID NO: 409974 - DNA, 33 bp, Homo sapien
acctttgcgggttggctgatgacatcctctctg

SEQ ID NO: 409975 - DNA, 33 bp, Homo sapien
agcagagcaccaggacacaggtaacttctgaac

SEQ ID NO: 409976 - DNA, 33 bp, Homo sapien
agcagagcaccaggacccaggtaacttctgaac

SEQ ID NO: 409977 - DNA, 33 bp, Homo sapien
caaagactgtacccacagactggcaggaggctg

SEQ ID NO: 409978 - DNA, 33 bp, Homo sapien
caaagactgtacccacggactggcaggaggctg

SEQ ID NO: 409979 - DNA, 33 bp, Homo sapien
ctcttaatccttcctaacactttgcattcattg

SEQ ID NO: 409980 - DNA, 33 bp, Homo sapien
ctcttaatccttcctagcactttgcattcattg

SEQ ID NO: 409981 - DNA, 33 bp, Homo sapien
caaagtgtaatatggtaaagtccgataaaacga

SEQ ID NO: 409982 - DNA, 33 bp, Homo sapien
caaagtgtaatatggtgaagtccgataaaacga

SEQ ID NO: 409983 - DNA, 33 bp, Homo sapien
atgttcccaaggagaacacaaagcaggcaccta

SEQ ID NO: 409984 - DNA, 33 bp, Homo sapien
atgttcccaaggagaatacaaagcaggcaccta

SEQ ID NO: 409985 - DNA, 33 bp, Homo sapien
ccacagattctttcccacatgagtctctaagtt

SEQ ID NO: 409986 - DNA, 33 bp, Homo sapien
ccacagattctttcccgcatgagtctctaagtt

SEQ ID NO: 409987 - DNA, 33 bp, Homo sapien
catgttcatccagaaacgcagactttaaaacaa

SEQ ID NO: 409988 - DNA, 33 bp, Homo sapien
catgttcatccagaaatgcagactttaaaacaa

SEQ ID NO: 409989 - DNA, 33 bp, Homo sapien
ttaactgacttctaacaggctgtggttatgagt

SEQ ID NO: 409990 - DNA, 33 bp, Homo sapien
ttaactgacttctaaccggctgtggttatgagt

SEQ ID NO: 409991 - DNA, 33 bp, Homo sapien
attccagtggtgtttaccatcatgcttccttgc

SEQ ID NO: 409992 - DNA, 33 bp, Homo sapien
attccagtggtgtttatcatcatgcttccttgc

SEQ ID NO: 409993 - DNA, 33 bp, Homo sapien
cctccactctagcccaataggttcctggacaag

SEQ ID NO: 409994 - DNA, 33 bp, Homo sapien
cctccactctagcccagtaggttcctggacaag

SEQ ID NO: 409995 - DNA, 33 bp, Homo sapien
taaaatatgtcagagccatgacaggttcccagc

SEQ ID NO: 409996 - DNA, 33 bp, Homo sapien
taaaatatgtcagagctatgacaggttcccagc

SEQ ID NO: 409997 - DNA, 33 bp, Homo sapien
tgaacaccctagagagacccagtaggcagctac

SEQ ID NO: 409998 - DNA, 33 bp, Homo sapien
tgaacaccctagagaggcccagtaggcagctac

SEQ ID NO: 409999 - DNA, 33 bp, Homo sapien
aagctagtgcatgaagaatttctgatttctgat

SEQ ID NO: 410000 - DNA, 33 bp, Homo sapien
aagctagtgcatgaaggatttctgatttctgat

SEQ ID NO: 410001 - DNA, 33 bp, Homo sapien
ggaaggaaaaagcctcgctgtattaaaccattg

SEQ ID NO: 410002 - DNA, 33 bp, Homo sapien
ggaaggaaaaagcctctctgtattaaaccattg

SEQ ID NO: 410003 - DNA, 33 bp, Homo sapien
gctaatcagcagttaggccatgcaacaagaaac

SEQ ID NO: 410004 - DNA, 33 bp, Homo sapien
gctaatcagcagttagtccatgcaacaagaaac

SEQ ID NO: 410005 - DNA, 33 bp, Homo sapien
atgagtgtgctttgaccagctttctgtgcctgt

SEQ ID NO: 410006 - DNA, 33 bp, Homo sapien
atgagtgtgctttgacgagctttctgtgcctgt

SEQ ID NO: 410007 - DNA, 33 bp, Homo sapien
tcctcattaagatgccaataaagatttgggaga

SEQ ID NO: 410008 - DNA, 33 bp, Homo sapien
tcctcattaagatgcctataaagatttgggaga

SEQ ID NO: 410009 - DNA, 33 bp, Homo sapien
ccaatatgtagctaagcagaccttcttccccat

SEQ ID NO: 410010 - DNA, 33 bp, Homo sapien
ccaatatgtagctaaggagaccttcttccccat

SEQ ID NO: 410011 - DNA, 33 bp, Homo sapien
ggcttggacccagggcacatgtaaggaaaccag

SEQ ID NO: 410012 - DNA, 33 bp, Homo sapien
ggcttggacccagggcgcatgtaaggaaaccag

SEQ ID NO: 410013 - DNA, 33 bp, Homo sapien
ccttctattagccctgcagtcctaccaacattc

SEQ ID NO: 410014 - DNA, 33 bp, Homo sapien
ccttctattagccctggagtcctaccaacattc

SEQ ID NO: 410015 - DNA, 33 bp, Homo sapien
cagagacactttccacaggaaaaattcacatat

SEQ ID NO: 410016 - DNA, 33 bp, Homo sapien
cagagacactttccacgggaaaaattcacatat

SEQ ID NO: 410017 - DNA, 33 bp, Homo sapien
gggagaggtaactttcgagctgaacaagactga

SEQ ID NO: 410018 - DNA, 33 bp, Homo sapien
gggagaggtaactttctagctgaacaagactga

SEQ ID NO: 410019 - DNA, 33 bp, Homo sapien
ttcctgtctgtctcagaacggttccaatgaagc

SEQ ID NO: 410020 - DNA, 33 bp, Homo sapien
ttcctgtctgtctcaggacggttccaatgaagc

SEQ ID NO: 410021 - DNA, 33 bp, Homo sapien
ctcaattcagatgttacactttcactgaaatga

SEQ ID NO: 410022 - DNA, 33 bp, Homo sapien
ctcaattcagatgttatactttcactgaaatga

SEQ ID NO: 410023 - DNA, 33 bp, Homo sapien
atagacagaccataccaatgggcaaaccctggg

SEQ ID NO: 410024 - DNA, 33 bp, Homo sapien
atagacagaccataccgatgggcaaaccctggg

SEQ ID NO: 410025 - DNA, 33 bp, Homo sapien
tatctggttgaagaaagtactaagtagcgaagc

SEQ ID NO: 410026 - DNA, 33 bp, Homo sapien
tatctggttgaagaaattactaagtagcgaagc

SEQ ID NO: 410027 - DNA, 33 bp, Homo sapien
gaataagtgaatgagcaaaaatgcatacaggct

SEQ ID NO: 410028 - DNA, 33 bp, Homo sapien
gaataagtgaatgagcgaaaatgcatacaggct

SEQ ID NO: 410029 - DNA, 33 bp, Homo sapien
taagggacatgacttaccacggttgatgttgac

SEQ ID NO: 410030 - DNA, 33 bp, Homo sapien
taagggacatgacttatcacggttgatgttgac

SEQ ID NO: 410031 - DNA, 33 bp, Homo sapien
ccactgcacccagctacgacttgtaaagcctga

SEQ ID NO: 410032 - DNA, 33 bp, Homo sapien
ccactgcacccagctatgacttgtaaagcctga

SEQ ID NO: 410033 - DNA, 33 bp, Homo sapien
tgagggcagagttcacaagtttctttaaataat

SEQ ID NO: 410034 - DNA, 33 bp, Homo sapien
tgagggcagagttcactagtttctttaaataat

SEQ ID NO: 410035 - DNA, 33 bp, Homo sapien
gcctctaactaaaacacagtagctgagtaacaa

SEQ ID NO: 410036 - DNA, 33 bp, Homo sapien
gcctctaactaaaacatagtagctgagtaacaa

SEQ ID NO: 410037 - DNA, 33 bp, Homo sapien
atggcttaattgtatccccactggttggcacaa

SEQ ID NO: 410038 - DNA, 33 bp, Homo sapien
atggcttaattgtatcgccactggttggcacaa

SEQ ID NO: 410039 - DNA, 33 bp, Homo sapien
tgggggaacagtgccaagcattcaacaccctga

SEQ ID NO: 410040 - DNA, 33 bp, Homo sapien
tgggggaacagtgccaggcattcaacaccctga

SEQ ID NO: 410041 - DNA, 33 bp, Homo sapien
actacatggcctgccaatcttatactatgtact

SEQ ID NO: 410042 - DNA, 33 bp, Homo sapien
actacatggcctgccagtcttatactatgtact

SEQ ID NO: 410043 - DNA, 33 bp, Homo sapien
gaagaagtttgcagcactgattctccagggtgg

SEQ ID NO: 410044 - DNA, 33 bp, Homo sapien
gaagaagtttgcagcattgattctccagggtgg

SEQ ID NO: 410045 - DNA, 33 bp, Homo sapien
tacctacatgttagcaaaagtgagattggtgag

SEQ ID NO: 410046 - DNA, 33 bp, Homo sapien
tacctacatgttagcagaagtgagattggtgag

SEQ ID NO: 410047 - DNA, 33 bp, Homo sapien
aatggatacaatgttaagacaaggcacacctgc

SEQ ID NO: 410048 - DNA, 33 bp, Homo sapien
aatggatacaatgttatgacaaggcacacctgc

SEQ ID NO: 410049 - DNA, 33 bp, Homo sapien
aaattgagaaacatagaaaaatctaagataaca

SEQ ID NO: 410050 - DNA, 33 bp, Homo sapien
aaattgagaaacataggaaaatctaagataaca

SEQ ID NO: 410051 - DNA, 33 bp, Homo sapien
gggcaaaataggtagacatactgaaagcaccaa

SEQ ID NO: 410052 - DNA, 33 bp, Homo sapien
gggcaaaataggtagatatactgaaagcaccaa

SEQ ID NO: 410053 - DNA, 33 bp, Homo sapien
aataatgacaaatatgaaggctgtctctttgtt

SEQ ID NO: 410054 - DNA, 33 bp, Homo sapien
aataatgacaaatatgcaggctgtctctttgtt

SEQ ID NO: 410055 - DNA, 33 bp, Homo sapien
agaatggataagaatacatatggatgctagtga

SEQ ID NO: 410056 - DNA, 33 bp, Homo sapien
agaatggataagaatatatatggatgctagtga

SEQ ID NO: 410057 - DNA, 33 bp, Homo sapien
caagttacatcaaaatcacctgagtgcttatta

SEQ ID NO: 410058 - DNA, 33 bp, Homo sapien
caagttacatcaaaattacctgagtgcttatta

SEQ ID NO: 410059 - DNA, 33 bp, Homo sapien
ctaaaattgcatgcacagtattaaaccctggga

SEQ ID NO: 410060 - DNA, 33 bp, Homo sapien
ctaaaattgcatgcacggtattaaaccctggga

SEQ ID NO: 410061 - DNA, 33 bp, Homo sapien
tatgaatgcgtacacccggtagcagtataagag

SEQ ID NO: 410062 - DNA, 33 bp, Homo sapien
tatgaatgcgtacacctggtagcagtataagag

SEQ ID NO: 410063 - DNA, 33 bp, Homo sapien
gtgaacactgaatggaaaaagttattattgctc

SEQ ID NO: 410064 - DNA, 33 bp, Homo sapien
gtgaacactgaatggagaaagttattattgctc

SEQ ID NO: 410065 - DNA, 33 bp, Homo sapien
actcccgcaaaaatacgcatcgatggccaggcg

SEQ ID NO: 410066 - DNA, 33 bp, Homo sapien
actcccgcaaaaatactcatcgatggccaggcg

SEQ ID NO: 410067 - DNA, 33 bp, Homo sapien
aacattatgatggaaacgaccttcaactcaccc

SEQ ID NO: 410068 - DNA, 33 bp, Homo sapien
aacattatgatggaaatgaccttcaactcaccc

SEQ ID NO: 410069 - DNA, 33 bp, Homo sapien
tcatgaacgaatccaaacagattagatcacaaa

SEQ ID NO: 410070 - DNA, 33 bp, Homo sapien
tcatgaacgaatccaatcagattagatcacaaa

SEQ ID NO: 410071 - DNA, 33 bp, Homo sapien
taattgatgcacaaaacgttaaacaggtcgggc

SEQ ID NO: 410072 - DNA, 33 bp, Homo sapien
taattgatgcacaaaatgttaaacaggtcgggc

SEQ ID NO: 410073 - DNA, 33 bp, Homo sapien
gttgttccaccaaccccatctctctcctctgct

SEQ ID NO: 410074 - DNA, 33 bp, Homo sapien
gttgttccaccaaccctatctctctcctctgct

SEQ ID NO: 410075 - DNA, 33 bp, Homo sapien
taatagctgtgaaaaaacagatggtaggaggtg

SEQ ID NO: 410076 - DNA, 33 bp, Homo sapien
taatagctgtgaaaaagcagatggtaggaggtg

SEQ ID NO: 410077 - DNA, 33 bp, Homo sapien
tccataagttagtccacgaccatagaatcatgg

SEQ ID NO: 410078 - DNA, 33 bp, Homo sapien
tccataagttagtccaggaccatagaatcatgg

SEQ ID NO: 410079 - DNA, 33 bp, Homo sapien
gagctattccagggggcattcaacacagaattc

SEQ ID NO: 410080 - DNA, 33 bp, Homo sapien
gagctattccagggggtattcaacacagaattc

SEQ ID NO: 410081 - DNA, 33 bp, Homo sapien
agcacttagtgtcatgaaaatccagggagaagt

SEQ ID NO: 410082 - DNA, 33 bp, Homo sapien
agcacttagtgtcatggaaatccagggagaagt

SEQ ID NO: 410083 - DNA, 33 bp, Homo sapien
tccactcaaattctgcgaatgatcttaactcat

SEQ ID NO: 410084 - DNA, 33 bp, Homo sapien
tccactcaaattctgctaatgatcttaactcat

SEQ ID NO: 410085 - DNA, 33 bp, Homo sapien
aaccttctattctgctcactgactaacctccaa

SEQ ID NO: 410086 - DNA, 33 bp, Homo sapien
aaccttctattctgcttactgactaacctccaa

SEQ ID NO: 410087 - DNA, 33 bp, Homo sapien
ctatttatatgaagccaaatggaaaacataagc

SEQ ID NO: 410088 - DNA, 33 bp, Homo sapien
ctatttatatgaagccgaatggaaaacataagc

SEQ ID NO: 410089 - DNA, 33 bp, Homo sapien
tccaccaatatttcaactgccaaaggaggacca

SEQ ID NO: 410090 - DNA, 33 bp, Homo sapien
tccaccaatatttcaattgccaaaggaggacca

SEQ ID NO: 410091 - DNA, 33 bp, Homo sapien
ccggtatatacaccagaccaagacaatataagg

SEQ ID NO: 410092 - DNA, 33 bp, Homo sapien
ccggtatatacaccaggccaagacaatataagg

SEQ ID NO: 410093 - DNA, 33 bp, Homo sapien
tttatgtattggctgacgtaccgaaagaaatca

SEQ ID NO: 410094 - DNA, 33 bp, Homo sapien
tttatgtattggctgatgtaccgaaagaaatca

SEQ ID NO: 410095 - DNA, 33 bp, Homo sapien
catcaggcactataggacagagatacttgaaac

SEQ ID NO: 410096 - DNA, 33 bp, Homo sapien
catcaggcactatagggcagagatacttgaaac

SEQ ID NO: 410097 - DNA, 33 bp, Homo sapien
gttttactaaagtaagccagtcaatcccttaga

SEQ ID NO: 410098 - DNA, 33 bp, Homo sapien
gttttactaaagtaagtcagtcaatcccttaga

SEQ ID NO: 410099 - DNA, 33 bp, Homo sapien
tcctttagatgccagtaacatactcccagttgt

SEQ ID NO: 410100 - DNA, 33 bp, Homo sapien
tcctttagatgccagtgacatactcccagttgt

SEQ ID NO: 410101 - DNA, 33 bp, Homo sapien
agactgaagagtgtcacaaaagccaatatagga

SEQ ID NO: 410102 - DNA, 33 bp, Homo sapien
agactgaagagtgtcataaaagccaatatagga

SEQ ID NO: 410103 - DNA, 33 bp, Homo sapien
tctgattttatccccacaatcaaaattgaagga

SEQ ID NO: 410104 - DNA, 33 bp, Homo sapien
tctgattttatccccataatcaaaattgaagga

SEQ ID NO: 410105 - DNA, 33 bp, Homo sapien
atgggggtggagggaaagtcgagcaatttgtag

SEQ ID NO: 410106 - DNA, 33 bp, Homo sapien
atgggggtggagggaaggtcgagcaatttgtag

SEQ ID NO: 410107 - DNA, 33 bp, Homo sapien
ttaaacactcggcactaaacgatctctgggtga

SEQ ID NO: 410108 - DNA, 33 bp, Homo sapien
ttaaacactcggcactcaacgatctctgggtga

SEQ ID NO: 410109 - DNA, 33 bp, Homo sapien
gttgaagtaggctgtgaaaaaggggtaagatgg

SEQ ID NO: 410110 - DNA, 33 bp, Homo sapien
gttgaagtaggctgtggaaaaggggtaagatgg

SEQ ID NO: 410111 - DNA, 33 bp, Homo sapien
cacctggtggcccacaatctgaaaggcaggaca

SEQ ID NO: 410112 - DNA, 33 bp, Homo sapien
cacctggtggcccacagtctgaaaggcaggaca

SEQ ID NO: 410113 - DNA, 33 bp, Homo sapien
acttaggttaatacaacgatctgggaacagtca

SEQ ID NO: 410114 - DNA, 33 bp, Homo sapien
acttaggttaatacaatgatctgggaacagtca

SEQ ID NO: 410115 - DNA, 33 bp, Homo sapien
tgtataattgtttctcaagtgtcagatacatag

SEQ ID NO: 410116 - DNA, 33 bp, Homo sapien
tgtataattgtttctcgagtgtcagatacatag

SEQ ID NO: 410117 - DNA, 33 bp, Homo sapien
tgtatgagtctatctacgcaatgcttttagctt

SEQ ID NO: 410118 - DNA, 33 bp, Homo sapien
tgtatgagtctatctatgcaatgcttttagctt

SEQ ID NO: 410119 - DNA, 33 bp, Homo sapien
taaaattttgataaacacagttatagcgaatat

SEQ ID NO: 410120 - DNA, 33 bp, Homo sapien
taaaattttgataaacgcagttatagcgaatat

SEQ ID NO: 410121 - DNA, 33 bp, Homo sapien
ggaaaaataaggccaccgctgtagtgatgggcc

SEQ ID NO: 410122 - DNA, 33 bp, Homo sapien
ggaaaaataaggccactgctgtagtgatgggcc

SEQ ID NO: 410123 - DNA, 33 bp, Homo sapien
ccagcctcgccaccataaagtgaacaacagccc

SEQ ID NO: 410124 - DNA, 33 bp, Homo sapien
ccagcctcgccaccatgaagtgaacaacagccc

SEQ ID NO: 410125 - DNA, 33 bp, Homo sapien
aacagacacatgaacaactaactcaaacataaa

SEQ ID NO: 410126 - DNA, 33 bp, Homo sapien
aacagacacatgaacagctaactcaaacataaa

SEQ ID NO: 410127 - DNA, 33 bp, Homo sapien
ttagcctggtatgtaacaggtattcagtaaata

SEQ ID NO: 410128 - DNA, 33 bp, Homo sapien
ttagcctggtatgtaataggtattcagtaaata

SEQ ID NO: 410129 - DNA, 33 bp, Homo sapien
tactatctattacaacacagctaaacaaaggat

SEQ ID NO: 410130 - DNA, 33 bp, Homo sapien
tactatctattacaacgcagctaaacaaaggat

SEQ ID NO: 410131 - DNA, 33 bp, Homo sapien
tgtaaactggcatatgacaatatttgttaaatt

SEQ ID NO: 410132 - DNA, 33 bp, Homo sapien
tgtaaactggcatatggcaatatttgttaaatt

SEQ ID NO: 410133 - DNA, 33 bp, Homo sapien
aaagtagtgcagaatacagtgggatattaggtt

SEQ ID NO: 410134 - DNA, 33 bp, Homo sapien
aaagtagtgcagaatatagtgggatattaggtt

SEQ ID NO: 410135 - DNA, 33 bp, Homo sapien
atctgtacctcaaagcaccctaaaaggatagct

SEQ ID NO: 410136 - DNA, 33 bp, Homo sapien
atctgtacctcaaagcgccctaaaaggatagct

SEQ ID NO: 410137 - DNA, 33 bp, Homo sapien
aaataatttcacctcaccagatttgtcctttca

SEQ ID NO: 410138 - DNA, 33 bp, Homo sapien
aaataatttcacctcagcagatttgtcctttca

SEQ ID NO: 410139 - DNA, 33 bp, Homo sapien
ctgcctctctggattacgccgatattgagatcg

SEQ ID NO: 410140 - DNA, 33 bp, Homo sapien
ctgcctctctggattatgccgatattgagatcg

SEQ ID NO: 410141 - DNA, 33 bp, Homo sapien
tcctttttgtttctaaatgtcctaacagacttg

SEQ ID NO: 410142 - DNA, 33 bp, Homo sapien
tcctttttgtttctaagtgtcctaacagacttg

SEQ ID NO: 410143 - DNA, 33 bp, Homo sapien
aataaatcaagaatgaaaaaatcctgagattga

SEQ ID NO: 410144 - DNA, 33 bp, Homo sapien
aataaatcaagaatgacaaaatcctgagattga

SEQ ID NO: 410145 - DNA, 33 bp, Homo sapien
caaaagaaacactcaactgttcctcaccagggg

SEQ ID NO: 410146 - DNA, 33 bp, Homo sapien
caaaagaaacactcaattgttcctcaccagggg

SEQ ID NO: 410147 - DNA, 33 bp, Homo sapien
aagtggagtaacaacagagtagtctgaaaagta

SEQ ID NO: 410148 - DNA, 33 bp, Homo sapien
aagtggagtaacaacatagtagtctgaaaagta

SEQ ID NO: 410149 - DNA, 33 bp, Homo sapien
cctggtctagagtgctaaaaaagggtctggatg

SEQ ID NO: 410150 - DNA, 33 bp, Homo sapien
cctggtctagagtgctgaaaaagggtctggatg

SEQ ID NO: 410151 - DNA, 33 bp, Homo sapien
tctttcctcaggcatacaaatttgcaaggtaca

SEQ ID NO: 410152 - DNA, 33 bp, Homo sapien
tctttcctcaggcatagaaatttgcaaggtaca

SEQ ID NO: 410153 - DNA, 33 bp, Homo sapien
tttccctgtttcctcacgtggcaaaaattgtta

SEQ ID NO: 410154 - DNA, 33 bp, Homo sapien
tttccctgtttcctcatgtggcaaaaattgtta

SEQ ID NO: 410155 - DNA, 33 bp, Homo sapien
gattatcttgtccttcagaaatggagcaggaaa

SEQ ID NO: 410156 - DNA, 33 bp, Homo sapien
gattatcttgtccttcggaaatggagcaggaaa

SEQ ID NO: 410157 - DNA, 33 bp, Homo sapien
ggaccaagaaactaaaacagctgggcgcggtgg

SEQ ID NO: 410158 - DNA, 33 bp, Homo sapien
ggaccaagaaactaaagcagctgggcgcggtgg

SEQ ID NO: 410159 - DNA, 33 bp, Homo sapien
tgtacaatcccttccacgcaagggctaagccag

SEQ ID NO: 410160 - DNA, 33 bp, Homo sapien
tgtacaatcccttccatgcaagggctaagccag

SEQ ID NO: 410161 - DNA, 33 bp, Homo sapien
tcaagggaaaaaagaactggacttcttgttcaa

SEQ ID NO: 410162 - DNA, 33 bp, Homo sapien
tcaagggaaaaaagaattggacttcttgttcaa

SEQ ID NO: 410163 - DNA, 33 bp, Homo sapien
gacatctttattctgacagaatgtcctgagtgg

SEQ ID NO: 410164 - DNA, 33 bp, Homo sapien
gacatctttattctgatagaatgtcctgagtgg

SEQ ID NO: 410165 - DNA, 33 bp, Homo sapien
gccaacaggatttgcaaggacataccctattcc

SEQ ID NO: 410166 - DNA, 33 bp, Homo sapien
gccaacaggatttgcagggacataccctattcc

SEQ ID NO: 410167 - DNA, 33 bp, Homo sapien
agctttgataccttacagcagagtttgtctgca

SEQ ID NO: 410168 - DNA, 33 bp, Homo sapien
agctttgataccttacggcagagtttgtctgca

SEQ ID NO: 410169 - DNA, 33 bp, Homo sapien
aaactaactgaaagccaactttaggagtatact

SEQ ID NO: 410170 - DNA, 33 bp, Homo sapien
aaactaactgaaagccgactttaggagtatact

SEQ ID NO: 410171 - DNA, 33 bp, Homo sapien
atgtcttggaatgcacccttggcttttttaaca

SEQ ID NO: 410172 - DNA, 33 bp, Homo sapien
atgtcttggaatgcactcttggcttttttaaca

SEQ ID NO: 410173 - DNA, 33 bp, Homo sapien
gaaaatgatgtggagaccaaagagcttgcattc

SEQ ID NO: 410174 - DNA, 33 bp, Homo sapien
gaaaatgatgtggagagcaaagagcttgcattc

SEQ ID NO: 410175 - DNA, 33 bp, Homo sapien
ccatctggatgataaccatgttgtgtgcaaagg

SEQ ID NO: 410176 - DNA, 33 bp, Homo sapien
ccatctggatgataacgatgttgtgtgcaaagg

SEQ ID NO: 410177 - DNA, 33 bp, Homo sapien
cctgggcagggccaaccgtggatctatttgctt

SEQ ID NO: 410178 - DNA, 33 bp, Homo sapien
cctgggcagggccaactgtggatctatttgctt

SEQ ID NO: 410179 - DNA, 33 bp, Homo sapien
tcacaggttgagaggaaggagcgaaactgaaaa

SEQ ID NO: 410180 - DNA, 33 bp, Homo sapien
tcacaggttgagaggacggagcgaaactgaaaa

SEQ ID NO: 410181 - DNA, 33 bp, Homo sapien
ggcaccggggatataaatgtgtatagaatcaac

SEQ ID NO: 410182 - DNA, 33 bp, Homo sapien
ggcaccggggatataagtgtgtatagaatcaac

SEQ ID NO: 410183 - DNA, 33 bp, Homo sapien
cagcaacaacagaaaactattttgccttaaatg

SEQ ID NO: 410184 - DNA, 33 bp, Homo sapien
cagcaacaacagaaaattattttgccttaaatg

SEQ ID NO: 410185 - DNA, 33 bp, Homo sapien
atttctttgccaaaatgagaactccttgtcaac

SEQ ID NO: 410186 - DNA, 33 bp, Homo sapien
atttctttgccaaaattagaactccttgtcaac

SEQ ID NO: 410187 - DNA, 33 bp, Homo sapien
tggactggtcatagcaaaatggatgaaccaaaa

SEQ ID NO: 410188 - DNA, 33 bp, Homo sapien
tggactggtcatagcacaatggatgaaccaaaa

SEQ ID NO: 410189 - DNA, 33 bp, Homo sapien
taggtcaacttccaccgaactcgttgtccagtt

SEQ ID NO: 410190 - DNA, 33 bp, Homo sapien
taggtcaacttccacctaactcgttgtccagtt

SEQ ID NO: 410191 - DNA, 33 bp, Homo sapien
tggctgctgctcctctaacgttggtcctctaca

SEQ ID NO: 410192 - DNA, 33 bp, Homo sapien
tggctgctgctcctctcacgttggtcctctaca

SEQ ID NO: 410193 - DNA, 33 bp, Homo sapien
tcttatgttgtctcacaattttttgcatcaaaa

SEQ ID NO: 410194 - DNA, 33 bp, Homo sapien
tcttatgttgtctcaccattttttgcatcaaaa

SEQ ID NO: 410195 - DNA, 33 bp, Homo sapien
ccaggacttcaatagcaaagctctttggactgc

SEQ ID NO: 410196 - DNA, 33 bp, Homo sapien
ccaggacttcaatagccaagctctttggactgc

SEQ ID NO: 410197 - DNA, 33 bp, Homo sapien
gtattgctacaaggcaaggctggagagagtgtg

SEQ ID NO: 410198 - DNA, 33 bp, Homo sapien
gtattgctacaaggcacggctggagagagtgtg

SEQ ID NO: 410199 - DNA, 33 bp, Homo sapien
cagacacactcactgcgcctcattatagactca

SEQ ID NO: 410200 - DNA, 33 bp, Homo sapien
cagacacactcactgctcctcattatagactca

SEQ ID NO: 410201 - DNA, 33 bp, Homo sapien
tctacagcagccattaaggccatgaaaccataa

SEQ ID NO: 410202 - DNA, 33 bp, Homo sapien
tctacagcagccattacggccatgaaaccataa

SEQ ID NO: 410203 - DNA, 33 bp, Homo sapien
atgagcaaaagcactccgaaaagtgaaagtgaa

SEQ ID NO: 410204 - DNA, 33 bp, Homo sapien
atgagcaaaagcactctgaaaagtgaaagtgaa

SEQ ID NO: 410205 - DNA, 33 bp, Homo sapien
cactttaagaaccagacaagtcactttaatttt

SEQ ID NO: 410206 - DNA, 33 bp, Homo sapien
cactttaagaaccagagaagtcactttaatttt

SEQ ID NO: 410207 - DNA, 33 bp, Homo sapien
ttgggaatccacatacaaaattaattctacaat

SEQ ID NO: 410208 - DNA, 33 bp, Homo sapien
ttgggaatccacataccaaattaattctacaat

SEQ ID NO: 410209 - DNA, 33 bp, Homo sapien
accgagcaattgagaaatgaatgaaatacgtgg

SEQ ID NO: 410210 - DNA, 33 bp, Homo sapien
accgagcaattgagaagtgaatgaaatacgtgg

SEQ ID NO: 410211 - DNA, 33 bp, Homo sapien
ggaaatgatgcttagaaaggccaacttacttgc

SEQ ID NO: 410212 - DNA, 33 bp, Homo sapien
ggaaatgatgcttagagaggccaacttacttgc

SEQ ID NO: 410213 - DNA, 33 bp, Homo sapien
ttatctctacctttacagaaggaaatgatgctt

SEQ ID NO: 410214 - DNA, 33 bp, Homo sapien
ttatctctacctttacggaaggaaatgatgctt

SEQ ID NO: 410215 - DNA, 33 bp, Homo sapien
gtaacacggccttagcacatggatgcaagagtt

SEQ ID NO: 410216 - DNA, 33 bp, Homo sapien
gtaacacggccttagcgcatggatgcaagagtt

SEQ ID NO: 410217 - DNA, 33 bp, Homo sapien
cactctctgtacggtgacaatttacaattcctg

SEQ ID NO: 410218 - DNA, 33 bp, Homo sapien
cactctctgtacggtggcaatttacaattcctg

SEQ ID NO: 410219 - DNA, 33 bp, Homo sapien
aagacagaatttttcaacaactgcttctttttg

SEQ ID NO: 410220 - DNA, 33 bp, Homo sapien
aagacagaatttttcaccaactgcttctttttg

SEQ ID NO: 410221 - DNA, 33 bp, Homo sapien
ttattagttcatggcactgaaaaaagtccaggg

SEQ ID NO: 410222 - DNA, 33 bp, Homo sapien
ttattagttcatggcattgaaaaaagtccaggg

SEQ ID NO: 410223 - DNA, 33 bp, Homo sapien
ctgtccctgggcaataagctttcagtggaaatt

SEQ ID NO: 410224 - DNA, 33 bp, Homo sapien
ctgtccctgggcaatacgctttcagtggaaatt

SEQ ID NO: 410225 - DNA, 33 bp, Homo sapien
cctcacataattaaaaacatgaagggatcactc

SEQ ID NO: 410226 - DNA, 33 bp, Homo sapien
cctcacataattaaaagcatgaagggatcactc

SEQ ID NO: 410227 - DNA, 33 bp, Homo sapien
tcttgccgtcactctcaatcgccaggctctgct

SEQ ID NO: 410228 - DNA, 33 bp, Homo sapien
tcttgccgtcactctcgatcgccaggctctgct

SEQ ID NO: 410229 - DNA, 33 bp, Homo sapien
ctgctgcagaaaaacacaccctgagaactcagg

SEQ ID NO: 410230 - DNA, 33 bp, Homo sapien
ctgctgcagaaaaacataccctgagaactcagg

SEQ ID NO: 410231 - DNA, 33 bp, Homo sapien
agtatttcctatctcaccaaagactaagctgta

SEQ ID NO: 410232 - DNA, 33 bp, Homo sapien
agtatttcctatctcatcaaagactaagctgta

SEQ ID NO: 410233 - DNA, 33 bp, Homo sapien
aaccactagagaggaactggataagatagatta

SEQ ID NO: 410234 - DNA, 33 bp, Homo sapien
aaccactagagaggaattggataagatagatta

SEQ ID NO: 410235 - DNA, 33 bp, Homo sapien
ataataagataatgaacgtgaaaatgctttgta

SEQ ID NO: 410236 - DNA, 33 bp, Homo sapien
ataataagataatgaatgtgaaaatgctttgta

SEQ ID NO: 410237 - DNA, 33 bp, Homo sapien
gtgagaggctctgttacgttttagggacaacga

SEQ ID NO: 410238 - DNA, 33 bp, Homo sapien
gtgagaggctctgttatgttttagggacaacga

SEQ ID NO: 410239 - DNA, 33 bp, Homo sapien
atgggtaatagcttggaacaactatccggcctc

SEQ ID NO: 410240 - DNA, 33 bp, Homo sapien
atgggtaatagcttgggacaactatccggcctc

SEQ ID NO: 410241 - DNA, 33 bp, Homo sapien
ggaggtcttgtgatcacactccttgtcaggcat

SEQ ID NO: 410242 - DNA, 33 bp, Homo sapien
ggaggtcttgtgatcatactccttgtcaggcat

SEQ ID NO: 410243 - DNA, 33 bp, Homo sapien
ggccattcagtgagtacaactaaagagatctga

SEQ ID NO: 410244 - DNA, 33 bp, Homo sapien
ggccattcagtgagtagaactaaagagatctga

SEQ ID NO: 410245 - DNA, 33 bp, Homo sapien
cacagccctgtcactcagagatgagaaggatcc

SEQ ID NO: 410246 - DNA, 33 bp, Homo sapien
cacagccctgtcactcggagatgagaaggatcc

SEQ ID NO: 410247 - DNA, 33 bp, Homo sapien
caccccttctggaagagaatcagtgatgtgcct

SEQ ID NO: 410248 - DNA, 33 bp, Homo sapien
caccccttctggaagataatcagtgatgtgcct

SEQ ID NO: 410249 - DNA, 33 bp, Homo sapien
cagtggttcagcattcacgcttaaatgaaaata

SEQ ID NO: 410250 - DNA, 33 bp, Homo sapien
cagtggttcagcattctcgcttaaatgaaaata

SEQ ID NO: 410251 - DNA, 33 bp, Homo sapien
cttgttctctttcaaactgaggaatctgaattc

SEQ ID NO: 410252 - DNA, 33 bp, Homo sapien
cttgttctctttcaaagtgaggaatctgaattc

SEQ ID NO: 410253 - DNA, 33 bp, Homo sapien
gaaagagaacaagaaaatgtcgcaccttttaat

SEQ ID NO: 410254 - DNA, 33 bp, Homo sapien
gaaagagaacaagaaagtgtcgcaccttttaat

SEQ ID NO: 410255 - DNA, 33 bp, Homo sapien
aagtgtaggtgccactaactagatgcaaatttt

SEQ ID NO: 410256 - DNA, 33 bp, Homo sapien
aagtgtaggtgccacttactagatgcaaatttt

SEQ ID NO: 410257 - DNA, 33 bp, Homo sapien
caaagtcaaattgcaaagagcttggatacaagg

SEQ ID NO: 410258 - DNA, 33 bp, Homo sapien
caaagtcaaattgcaacgagcttggatacaagg

SEQ ID NO: 410259 - DNA, 33 bp, Homo sapien
atcaaaactggcaaaacctaaagctaaaagaaa

SEQ ID NO: 410260 - DNA, 33 bp, Homo sapien
atcaaaactggcaaaatctaaagctaaaagaaa

SEQ ID NO: 410261 - DNA, 33 bp, Homo sapien
gcctaatcgtatctggaactctagtgcaaagga

SEQ ID NO: 410262 - DNA, 33 bp, Homo sapien
gcctaatcgtatctgggactctagtgcaaagga

SEQ ID NO: 410263 - DNA, 33 bp, Homo sapien
tcaggcttggaatccaacatcttttctgaatac

SEQ ID NO: 410264 - DNA, 33 bp, Homo sapien
tcaggcttggaatccagcatcttttctgaatac

SEQ ID NO: 410265 - DNA, 33 bp, Homo sapien
agattgactagtaggacgtctttctcttgatag

SEQ ID NO: 410266 - DNA, 33 bp, Homo sapien
agattgactagtaggatgtctttctcttgatag

SEQ ID NO: 410267 - DNA, 33 bp, Homo sapien
gtgacggtgtcctgccaaagctgagaagacaca

SEQ ID NO: 410268 - DNA, 33 bp, Homo sapien
gtgacggtgtcctgccgaagctgagaagacaca

SEQ ID NO: 410269 - DNA, 33 bp, Homo sapien
aatctgttctgatttaaaaatctccttcaaaat

SEQ ID NO: 410270 - DNA, 33 bp, Homo sapien
aatctgttctgatttagaaatctccttcaaaat

SEQ ID NO: 410271 - DNA, 33 bp, Homo sapien
tctaagaactcaatggaaggaaaatgacttgtc

SEQ ID NO: 410272 - DNA, 33 bp, Homo sapien
tctaagaactcaatggcaggaaaatgacttgtc

SEQ ID NO: 410273 - DNA, 33 bp, Homo sapien
cagatggtgttctgtcacttcactttcaacatc

SEQ ID NO: 410274 - DNA, 33 bp, Homo sapien
cagatggtgttctgtctcttcactttcaacatc

SEQ ID NO: 410275 - DNA, 33 bp, Homo sapien
gttgtatttaaatgggacaaagtactggggcaa

SEQ ID NO: 410276 - DNA, 33 bp, Homo sapien
gttgtatttaaatgggccaaagtactggggcaa

SEQ ID NO: 410277 - DNA, 33 bp, Homo sapien
tctactcaactctataaagggtagatggttctc

SEQ ID NO: 410278 - DNA, 33 bp, Homo sapien
tctactcaactctatatagggtagatggttctc

SEQ ID NO: 410279 - DNA, 33 bp, Homo sapien
tagttgggatcagtcacctcagtcactaacttt

SEQ ID NO: 410280 - DNA, 33 bp, Homo sapien
tagttgggatcagtcatctcagtcactaacttt

SEQ ID NO: 410281 - DNA, 33 bp, Homo sapien
gaagaggctgaggataaaagatcaattggaacc

SEQ ID NO: 410282 - DNA, 33 bp, Homo sapien
gaagaggctgaggatataagatcaattggaacc

SEQ ID NO: 410283 - DNA, 33 bp, Homo sapien
aaggaaattgtgtcctcaaaggagaatcaggct

SEQ ID NO: 410284 - DNA, 33 bp, Homo sapien
aaggaaattgtgtccttaaaggagaatcaggct

SEQ ID NO: 410285 - DNA, 33 bp, Homo sapien
tgaaaatggtcagacacgctatagaggaaaaag

SEQ ID NO: 410286 - DNA, 33 bp, Homo sapien
tgaaaatggtcagacatgctatagaggaaaaag

SEQ ID NO: 410287 - DNA, 33 bp, Homo sapien
ctggccccattggagaacttataagagttggtg

SEQ ID NO: 410288 - DNA, 33 bp, Homo sapien
ctggccccattggagatcttataagagttggtg

SEQ ID NO: 410289 - DNA, 33 bp, Homo sapien
gatgggacgtgggcaacagtaaatccagagaga

SEQ ID NO: 410290 - DNA, 33 bp, Homo sapien
gatgggacgtgggcaagagtaaatccagagaga

SEQ ID NO: 410291 - DNA, 33 bp, Homo sapien
atgggattattcataccggaaaccctagcatca

SEQ ID NO: 410292 - DNA, 33 bp, Homo sapien
atgggattattcatactggaaaccctagcatca

SEQ ID NO: 410293 - DNA, 33 bp, Homo sapien
taaatgaattggaaagaagaatgtgctaagccc

SEQ ID NO: 410294 - DNA, 33 bp, Homo sapien
taaatgaattggaaagtagaatgtgctaagccc

SEQ ID NO: 410295 - DNA, 33 bp, Homo sapien
tggtgtggagaatgaacggctcggggagtggtc

SEQ ID NO: 410296 - DNA, 33 bp, Homo sapien
tggtgtggagaatgaatggctcggggagtggtc

SEQ ID NO: 410297 - DNA, 33 bp, Homo sapien
gtctagcaatcagttacactggtagtctctttt

SEQ ID NO: 410298 - DNA, 33 bp, Homo sapien
gtctagcaatcagttatactggtagtctctttt

SEQ ID NO: 410299 - DNA, 33 bp, Homo sapien
acttggaagtgtacaacgagttttcacataatg

SEQ ID NO: 410300 - DNA, 33 bp, Homo sapien
acttggaagtgtacaatgagttttcacataatg

SEQ ID NO: 410301 - DNA, 33 bp, Homo sapien
gttatgcatttacaaaatgtctttcaaatcaat

SEQ ID NO: 410302 - DNA, 33 bp, Homo sapien
gttatgcatttacaaagtgtctttcaaatcaat

SEQ ID NO: 410303 - DNA, 33 bp, Homo sapien
tcacagttcacaaaaactgcccttcttgtcacc

SEQ ID NO: 410304 - DNA, 33 bp, Homo sapien
tcacagttcacaaaaattgcccttcttgtcacc

SEQ ID NO: 410305 - DNA, 33 bp, Homo sapien
gtattaagaatggctaacagtttcataaatcct

SEQ ID NO: 410306 - DNA, 33 bp, Homo sapien
gtattaagaatggctatcagtttcataaatcct

SEQ ID NO: 410307 - DNA, 33 bp, Homo sapien
atataaagtagtttaagtgcctcaaagtagcaa

SEQ ID NO: 410308 - DNA, 33 bp, Homo sapien
atataaagtagtttaattgcctcaaagtagcaa

SEQ ID NO: 410309 - DNA, 33 bp, Homo sapien
aaatagatacagctaacgagattttcaaaggcc

SEQ ID NO: 410310 - DNA, 33 bp, Homo sapien
aaatagatacagctaatgagattttcaaaggcc

SEQ ID NO: 410311 - DNA, 33 bp, Homo sapien
ctacaatgaaattcacgctatagccaccagagt

SEQ ID NO: 410312 - DNA, 33 bp, Homo sapien
ctacaatgaaattcactctatagccaccagagt

SEQ ID NO: 410313 - DNA, 33 bp, Homo sapien
tcttgtttgctctgaaccaaaattgcatcaaga

SEQ ID NO: 410314 - DNA, 33 bp, Homo sapien
tcttgtttgctctgaatcaaaattgcatcaaga

SEQ ID NO: 410315 - DNA, 33 bp, Homo sapien
caatgaaagccaataaagtcctgccttctccgt

SEQ ID NO: 410316 - DNA, 33 bp, Homo sapien
caatgaaagccaataaggtcctgccttctccgt

SEQ ID NO: 410317 - DNA, 33 bp, Homo sapien
tcctacttaatccctacgtgacagaaaagatag

SEQ ID NO: 410318 - DNA, 33 bp, Homo sapien
tcctacttaatccctatgtgacagaaaagatag

SEQ ID NO: 410319 - DNA, 33 bp, Homo sapien
ttttgtttaggattacaaagtcagcatcatccc

SEQ ID NO: 410320 - DNA, 33 bp, Homo sapien
ttttgtttaggattaccaagtcagcatcatccc

SEQ ID NO: 410321 - DNA, 33 bp, Homo sapien
attaacctaaacaccacagtatgtttttcaata

SEQ ID NO: 410322 - DNA, 33 bp, Homo sapien
attaacctaaacaccagagtatgtttttcaata

SEQ ID NO: 410323 - DNA, 33 bp, Homo sapien
cccagttccttctccaacttactatcagtgtga

SEQ ID NO: 410324 - DNA, 33 bp, Homo sapien
cccagttccttctccaccttactatcagtgtga

SEQ ID NO: 410325 - DNA, 33 bp, Homo sapien
gttttaatctcacccacgttcaacttcacagct

SEQ ID NO: 410326 - DNA, 33 bp, Homo sapien
gttttaatctcacccatgttcaacttcacagct

SEQ ID NO: 410327 - DNA, 33 bp, Homo sapien
aatgtggttaccagtcactttcctgtctctttc

SEQ ID NO: 410328 - DNA, 33 bp, Homo sapien
aatgtggttaccagtccctttcctgtctctttc

SEQ ID NO: 410329 - DNA, 33 bp, Homo sapien
agggacttctcagtctccatagttatatgagcc

SEQ ID NO: 410330 - DNA, 33 bp, Homo sapien
agggacttctcagtctgcatagttatatgagcc

SEQ ID NO: 410331 - DNA, 33 bp, Homo sapien
taaaaccatgtatgcaaatcactaaacgtagag

SEQ ID NO: 410332 - DNA, 33 bp, Homo sapien
taaaaccatgtatgcagatcactaaacgtagag

SEQ ID NO: 410333 - DNA, 33 bp, Homo sapien
aggtaccactaatttcccccataataaatgtaa

SEQ ID NO: 410334 - DNA, 33 bp, Homo sapien
aggtaccactaatttctcccataataaatgtaa

SEQ ID NO: 410335 - DNA, 33 bp, Homo sapien
gactttgaatgggccaatgattatggaattggg

SEQ ID NO: 410336 - DNA, 33 bp, Homo sapien
gactttgaatgggccagtgattatggaattggg

SEQ ID NO: 410337 - DNA, 33 bp, Homo sapien
gaccagggagctacatcaaactgaggctaagat

SEQ ID NO: 410338 - DNA, 33 bp, Homo sapien
gaccagggagctacattaaactgaggctaagat

SEQ ID NO: 410339 - DNA, 33 bp, Homo sapien
agaaagctaaatcagcagccacaagaatagtat

SEQ ID NO: 410340 - DNA, 33 bp, Homo sapien
agaaagctaaatcagcggccacaagaatagtat

SEQ ID NO: 410341 - DNA, 33 bp, Homo sapien
tgttgtcatttgctgaagatggtgctcctgcaa

SEQ ID NO: 410342 - DNA, 33 bp, Homo sapien
tgttgtcatttgctgaggatggtgctcctgcaa

SEQ ID NO: 410343 - DNA, 33 bp, Homo sapien
ctttgcaggattcagcccatctggaagtgtctt

SEQ ID NO: 410344 - DNA, 33 bp, Homo sapien
ctttgcaggattcagctcatctggaagtgtctt

SEQ ID NO: 410345 - DNA, 33 bp, Homo sapien
tatccctccctccaaacctatacatctatctat

SEQ ID NO: 410346 - DNA, 33 bp, Homo sapien
tatccctccctccaaatctatacatctatctat

SEQ ID NO: 410347 - DNA, 33 bp, Homo sapien
cttctaaatgcttaaaacaccagagagttgcgt

SEQ ID NO: 410348 - DNA, 33 bp, Homo sapien
cttctaaatgcttaaagcaccagagagttgcgt

SEQ ID NO: 410349 - DNA, 33 bp, Homo sapien
aaattctgtctcatggaacaactcttctcattg

SEQ ID NO: 410350 - DNA, 33 bp, Homo sapien
aaattctgtctcatgggacaactcttctcattg

SEQ ID NO: 410351 - DNA, 33 bp, Homo sapien
gccctgaaatatgagaaccaatggccccttctg

SEQ ID NO: 410352 - DNA, 33 bp, Homo sapien
gccctgaaatatgagagccaatggccccttctg

SEQ ID NO: 410353 - DNA, 33 bp, Homo sapien
ttacttattccacagaaatgtattgagcatctg

SEQ ID NO: 410354 - DNA, 33 bp, Homo sapien
ttacttattccacagatatgtattgagcatctg

SEQ ID NO: 410355 - DNA, 33 bp, Homo sapien
gttttagctagaatgcagatatcactgttcaag

SEQ ID NO: 410356 - DNA, 33 bp, Homo sapien
gttttagctagaatgcggatatcactgttcaag

SEQ ID NO: 410357 - DNA, 33 bp, Homo sapien
ctcttctagttatagaagagtgtcagaaagcag

SEQ ID NO: 410358 - DNA, 33 bp, Homo sapien
ctcttctagttatagacgagtgtcagaaagcag

SEQ ID NO: 410359 - DNA, 33 bp, Homo sapien
gtcacccccatgagagaagactttccaggaact

SEQ ID NO: 410360 - DNA, 33 bp, Homo sapien
gtcacccccatgagaggagactttccaggaact

SEQ ID NO: 410361 - DNA, 33 bp, Homo sapien
ctaatcccacaaagcacgttagatggaaagtat

SEQ ID NO: 410362 - DNA, 33 bp, Homo sapien
ctaatcccacaaagcatgttagatggaaagtat

SEQ ID NO: 410363 - DNA, 33 bp, Homo sapien
aggaaacaggttatgacacttatacatatttgg

SEQ ID NO: 410364 - DNA, 33 bp, Homo sapien
aggaaacaggttatgatacttatacatatttgg

SEQ ID NO: 410365 - DNA, 33 bp, Homo sapien
gtattataaaataccacgatcattccaacggtc

SEQ ID NO: 410366 - DNA, 33 bp, Homo sapien
gtattataaaataccaggatcattccaacggtc

SEQ ID NO: 410367 - DNA, 33 bp, Homo sapien
caataaggaggtaataccatttaaagttaaagg

SEQ ID NO: 410368 - DNA, 33 bp, Homo sapien
caataaggaggtaatatcatttaaagttaaagg

SEQ ID NO: 410369 - DNA, 33 bp, Homo sapien
agcccagccggtggaaactaacagccccaaagc

SEQ ID NO: 410370 - DNA, 33 bp, Homo sapien
agcccagccggtggaagctaacagccccaaagc

SEQ ID NO: 410371 - DNA, 33 bp, Homo sapien
gacatcactgtccagaagagctttcccaggtga

SEQ ID NO: 410372 - DNA, 33 bp, Homo sapien
gacatcactgtccagaggagctttcccaggtga

SEQ ID NO: 410373 - DNA, 33 bp, Homo sapien
aatgaataaaagagataatcactgaagcaattt

SEQ ID NO: 410374 - DNA, 33 bp, Homo sapien
aatgaataaaagagattatcactgaagcaattt

SEQ ID NO: 410375 - DNA, 33 bp, Homo sapien
tgtgattggttgctgcgcccttgcaatcttagt

SEQ ID NO: 410376 - DNA, 33 bp, Homo sapien
tgtgattggttgctgctcccttgcaatcttagt

SEQ ID NO: 410377 - DNA, 33 bp, Homo sapien
aaaagcatccatgtcagtaagatttttgaggct

SEQ ID NO: 410378 - DNA, 33 bp, Homo sapien
aaaagcatccatgtcattaagatttttgaggct

SEQ ID NO: 410379 - DNA, 33 bp, Homo sapien
atacagatttatcccaatagcctcaaaaatctt

SEQ ID NO: 410380 - DNA, 33 bp, Homo sapien
atacagatttatcccactagcctcaaaaatctt

SEQ ID NO: 410381 - DNA, 33 bp, Homo sapien
aaattaatcagtaaaccagaagccaatttactg

SEQ ID NO: 410382 - DNA, 33 bp, Homo sapien
aaattaatcagtaaactagaagccaatttactg

SEQ ID NO: 410383 - DNA, 33 bp, Homo sapien
agttaccgaagagaaacctgctacaaggatagc

SEQ ID NO: 410384 - DNA, 33 bp, Homo sapien
agttaccgaagagaaagctgctacaaggatagc

SEQ ID NO: 410385 - DNA, 33 bp, Homo sapien
cattgatcattcaacacgaaccattaatggagc

SEQ ID NO: 410386 - DNA, 33 bp, Homo sapien
cattgatcattcaacaggaaccattaatggagc

SEQ ID NO: 410387 - DNA, 33 bp, Homo sapien
tgtacttagctcctagaagaacccaggaaacca

SEQ ID NO: 410388 - DNA, 33 bp, Homo sapien
tgtacttagctcctagtagaacccaggaaacca

SEQ ID NO: 410389 - DNA, 33 bp, Homo sapien
ggagagagtaatttgccaaagaaatgcctggga

SEQ ID NO: 410390 - DNA, 33 bp, Homo sapien
ggagagagtaatttgctaaagaaatgcctggga

SEQ ID NO: 410391 - DNA, 33 bp, Homo sapien
tccagaaccaaggagacacaggttgtcactcat

SEQ ID NO: 410392 - DNA, 33 bp, Homo sapien
tccagaaccaaggagagacaggttgtcactcat

SEQ ID NO: 410393 - DNA, 33 bp, Homo sapien
ggcaagtcacaaaagcagagagatgaatgtctg

SEQ ID NO: 410394 - DNA, 33 bp, Homo sapien
ggcaagtcacaaaagcggagagatgaatgtctg

SEQ ID NO: 410395 - DNA, 33 bp, Homo sapien
tgatgaacaaattggaccgattaaattcttctc

SEQ ID NO: 410396 - DNA, 33 bp, Homo sapien
tgatgaacaaattggatcgattaaattcttctc

SEQ ID NO: 410397 - DNA, 33 bp, Homo sapien
gcctgatgtagcagcaagtgcttgtaattccag

SEQ ID NO: 410398 - DNA, 33 bp, Homo sapien
gcctgatgtagcagcaggtgcttgtaattccag

SEQ ID NO: 410399 - DNA, 33 bp, Homo sapien
gtgcacattgtcctacagaaacttactaaaaag

SEQ ID NO: 410400 - DNA, 33 bp, Homo sapien
gtgcacattgtcctacggaaacttactaaaaag

SEQ ID NO: 410401 - DNA, 33 bp, Homo sapien
ttgaactccaataccaagtcaagtgccagagta

SEQ ID NO: 410402 - DNA, 33 bp, Homo sapien
ttgaactccaataccaggtcaagtgccagagta

SEQ ID NO: 410403 - DNA, 33 bp, Homo sapien
tcatcgatgatcttcaaaaactttctgccagat

SEQ ID NO: 410404 - DNA, 33 bp, Homo sapien
tcatcgatgatcttcataaactttctgccagat

SEQ ID NO: 410405 - DNA, 33 bp, Homo sapien
tccattctagcctccaaaaaatttttcaaaagt

SEQ ID NO: 410406 - DNA, 33 bp, Homo sapien
tccattctagcctccagaaaatttttcaaaagt

SEQ ID NO: 410407 - DNA, 33 bp, Homo sapien
ttaacattgtgatggacgttctgctagttcttc

SEQ ID NO: 410408 - DNA, 33 bp, Homo sapien
ttaacattgtgatggatgttctgctagttcttc

SEQ ID NO: 410409 - DNA, 33 bp, Homo sapien
gaaacttaacgacttacccgcacctgctactca

SEQ ID NO: 410410 - DNA, 33 bp, Homo sapien
gaaacttaacgacttatccgcacctgctactca

SEQ ID NO: 410411 - DNA, 33 bp, Homo sapien
ggagaataccctaagcacagagacaattctaca

SEQ ID NO: 410412 - DNA, 33 bp, Homo sapien
ggagaataccctaagcgcagagacaattctaca

SEQ ID NO: 410413 - DNA, 33 bp, Homo sapien
ctcactaggggattgcaaaaacactggaattaa

SEQ ID NO: 410414 - DNA, 33 bp, Homo sapien
ctcactaggggattgccaaaacactggaattaa

SEQ ID NO: 410415 - DNA, 33 bp, Homo sapien
ctctgcccttaaggacaatcattttaaatggct

SEQ ID NO: 410416 - DNA, 33 bp, Homo sapien
ctctgcccttaaggaccatcattttaaatggct

SEQ ID NO: 410417 - DNA, 33 bp, Homo sapien
gcctctggttatcaagcctggaaaaggccaaag

SEQ ID NO: 410418 - DNA, 33 bp, Homo sapien
gcctctggttatcaagtctggaaaaggccaaag

SEQ ID NO: 410419 - DNA, 33 bp, Homo sapien
agaattcagtttcattcaaccagcataatcaag

SEQ ID NO: 410420 - DNA, 33 bp, Homo sapien
agaattcagtttcatttaaccagcataatcaag

SEQ ID NO: 410421 - DNA, 33 bp, Homo sapien
ttctcaatttgtgaaacacttgtcaaaggcaag

SEQ ID NO: 410422 - DNA, 33 bp, Homo sapien
ttctcaatttgtgaaatacttgtcaaaggcaag

SEQ ID NO: 410423 - DNA, 33 bp, Homo sapien
aaacgctaggctttgcagattgatttcactgcc

SEQ ID NO: 410424 - DNA, 33 bp, Homo sapien
aaacgctaggctttgcggattgatttcactgcc

SEQ ID NO: 410425 - DNA, 33 bp, Homo sapien
aaatctcatcttgaagcccgtccagtcctacca

SEQ ID NO: 410426 - DNA, 33 bp, Homo sapien
aaatctcatcttgaaggccgtccagtcctacca

SEQ ID NO: 410427 - DNA, 33 bp, Homo sapien
aatccagagggagaaactggtaggactggacgg

SEQ ID NO: 410428 - DNA, 33 bp, Homo sapien
aatccagagggagaaattggtaggactggacgg

SEQ ID NO: 410429 - DNA, 33 bp, Homo sapien
tgtggtgagaggaaaccaacatccaccaaagtt

SEQ ID NO: 410430 - DNA, 33 bp, Homo sapien
tgtggtgagaggaaactaacatccaccaaagtt

SEQ ID NO: 410431 - DNA, 33 bp, Homo sapien
aggcaagtttggataacgtggagcaattccccc

SEQ ID NO: 410432 - DNA, 33 bp, Homo sapien
aggcaagtttggataatgtggagcaattccccc

SEQ ID NO: 410433 - DNA, 33 bp, Homo sapien
cccgtggtgacaacccaaactatctgcagaaat

SEQ ID NO: 410434 - DNA, 33 bp, Homo sapien
cccgtggtgacaaccccaactatctgcagaaat

SEQ ID NO: 410435 - DNA, 33 bp, Homo sapien
tgagctaaatcgtataagcaacttaaactttga

SEQ ID NO: 410436 - DNA, 33 bp, Homo sapien
tgagctaaatcgtatatgcaacttaaactttga

SEQ ID NO: 410437 - DNA, 33 bp, Homo sapien
ttctttaatgaggcagcactaattatgttaaaa

SEQ ID NO: 410438 - DNA, 33 bp, Homo sapien
ttctttaatgaggcagtactaattatgttaaaa

SEQ ID NO: 410439 - DNA, 33 bp, Homo sapien
tagagtttgttaaatacaggcctagattaaaag

SEQ ID NO: 410440 - DNA, 33 bp, Homo sapien
tagagtttgttaaatataggcctagattaaaag

SEQ ID NO: 410441 - DNA, 33 bp, Homo sapien
cgagtcaaatttgcacggggaagcattatttat

SEQ ID NO: 410442 - DNA, 33 bp, Homo sapien
cgagtcaaatttgcactgggaagcattatttat

SEQ ID NO: 410443 - DNA, 33 bp, Homo sapien
taaaaggggcactgaaactaggtccagattggc

SEQ ID NO: 410444 - DNA, 33 bp, Homo sapien
taaaaggggcactgaagctaggtccagattggc

SEQ ID NO: 410445 - DNA, 33 bp, Homo sapien
tgcttgaacagctatcaaactgaactgctttcc

SEQ ID NO: 410446 - DNA, 33 bp, Homo sapien
tgcttgaacagctatccaactgaactgctttcc

SEQ ID NO: 410447 - DNA, 33 bp, Homo sapien
agttaagacctcaggcaattgtttggaaggcat

SEQ ID NO: 410448 - DNA, 33 bp, Homo sapien
agttaagacctcaggcgattgtttggaaggcat

SEQ ID NO: 410449 - DNA, 33 bp, Homo sapien
atggcaccaacggcaaattctcaggaggtacag

SEQ ID NO: 410450 - DNA, 33 bp, Homo sapien
atggcaccaacggcaagttctcaggaggtacag

SEQ ID NO: 410451 - DNA, 33 bp, Homo sapien
taattatgaaagctggcatggtgtggtaaagca

SEQ ID NO: 410452 - DNA, 33 bp, Homo sapien
taattatgaaagctggtatggtgtggtaaagca

SEQ ID NO: 410453 - DNA, 33 bp, Homo sapien
agttataggattgagtaacattctttaggggaa

SEQ ID NO: 410454 - DNA, 33 bp, Homo sapien
agttataggattgagtgacattctttaggggaa

SEQ ID NO: 410455 - DNA, 33 bp, Homo sapien
ccatcagcatattaaacgtctgagaagttctgc

SEQ ID NO: 410456 - DNA, 33 bp, Homo sapien
ccatcagcatattaaaggtctgagaagttctgc

SEQ ID NO: 410457 - DNA, 33 bp, Homo sapien
gggcttacagaagagaacttgagtacccttaca

SEQ ID NO: 410458 - DNA, 33 bp, Homo sapien
gggcttacagaagagaccttgagtacccttaca

SEQ ID NO: 410459 - DNA, 33 bp, Homo sapien
cttacattatgtgtagcacattaagggctcttt

SEQ ID NO: 410460 - DNA, 33 bp, Homo sapien
cttacattatgtgtagtacattaagggctcttt

SEQ ID NO: 410461 - DNA, 33 bp, Homo sapien
aaaaacagactaacacaaccagcatttggaaga

SEQ ID NO: 410462 - DNA, 33 bp, Homo sapien
aaaaacagactaacaccaccagcatttggaaga

SEQ ID NO: 410463 - DNA, 33 bp, Homo sapien
taagagcttctctgtcaaagaatgggtcagagc

SEQ ID NO: 410464 - DNA, 33 bp, Homo sapien
taagagcttctctgtcgaagaatgggtcagagc

SEQ ID NO: 410465 - DNA, 33 bp, Homo sapien
taatgtgtatccaacactatagtatcatacaga

SEQ ID NO: 410466 - DNA, 33 bp, Homo sapien
taatgtgtatccaacattatagtatcatacaga

SEQ ID NO: 410467 - DNA, 33 bp, Homo sapien
gcagttagtaaactcagtcacacctgtttgttc

SEQ ID NO: 410468 - DNA, 33 bp, Homo sapien
gcagttagtaaactcattcacacctgtttgttc

SEQ ID NO: 410469 - DNA, 33 bp, Homo sapien
tttggacagtagcctacgagacatgaaagattt

SEQ ID NO: 410470 - DNA, 33 bp, Homo sapien
tttggacagtagcctatgagacatgaaagattt

SEQ ID NO: 410471 - DNA, 33 bp, Homo sapien
atgccgctctttaggtaaaactctgcccagatc

SEQ ID NO: 410472 - DNA, 33 bp, Homo sapien
atgccgctctttaggtgaaactctgcccagatc

SEQ ID NO: 410473 - DNA, 33 bp, Homo sapien
ttcctttgcctttgaaggggagatgaacttact

SEQ ID NO: 410474 - DNA, 33 bp, Homo sapien
ttcctttgcctttgaatgggagatgaacttact

SEQ ID NO: 410475 - DNA, 33 bp, Homo sapien
tctacctaaaagattacggtgaagagtcaatga

SEQ ID NO: 410476 - DNA, 33 bp, Homo sapien
tctacctaaaagattatggtgaagagtcaatga

SEQ ID NO: 410477 - DNA, 33 bp, Homo sapien
gcaggtttttttctaaataagccaacatttgac

SEQ ID NO: 410478 - DNA, 33 bp, Homo sapien
gcaggtttttttctaattaagccaacatttgac

SEQ ID NO: 410479 - DNA, 33 bp, Homo sapien
tgtgaagcagctagcacagtatgtgaatctctc

SEQ ID NO: 410480 - DNA, 33 bp, Homo sapien
tgtgaagcagctagcagagtatgtgaatctctc

SEQ ID NO: 410481 - DNA, 33 bp, Homo sapien
ccctagaaggtgccaaactggctcaaggcaatt

SEQ ID NO: 410482 - DNA, 33 bp, Homo sapien
ccctagaaggtgccaagctggctcaaggcaatt

SEQ ID NO: 410483 - DNA, 33 bp, Homo sapien
ttcctttataaatctaaggttgtgactactgaa

SEQ ID NO: 410484 - DNA, 33 bp, Homo sapien
ttcctttataaatctacggttgtgactactgaa

SEQ ID NO: 410485 - DNA, 33 bp, Homo sapien
tccgggataacacttacaccacctagagcaata

SEQ ID NO: 410486 - DNA, 33 bp, Homo sapien
tccgggataacacttataccacctagagcaata

SEQ ID NO: 410487 - DNA, 33 bp, Homo sapien
accctaatacaatgtcagaaacactcactggag

SEQ ID NO: 410488 - DNA, 33 bp, Homo sapien
accctaatacaatgtcggaaacactcactggag

SEQ ID NO: 410489 - DNA, 33 bp, Homo sapien
tccatttggaaatacaatcatttgaaccctggg

SEQ ID NO: 410490 - DNA, 33 bp, Homo sapien
tccatttggaaatacagtcatttgaaccctggg

SEQ ID NO: 410491 - DNA, 33 bp, Homo sapien
acatacctttcattcaaaaccctattctcatct

SEQ ID NO: 410492 - DNA, 33 bp, Homo sapien
acatacctttcattcagaaccctattctcatct

SEQ ID NO: 410493 - DNA, 33 bp, Homo sapien
gtctcaagcttcttcacgctccctttgtgaagc

SEQ ID NO: 410494 - DNA, 33 bp, Homo sapien
gtctcaagcttcttcaggctccctttgtgaagc

SEQ ID NO: 410495 - DNA, 33 bp, Homo sapien
aaagacagttctgctcgcaaggtaagctgtcct

SEQ ID NO: 410496 - DNA, 33 bp, Homo sapien
aaagacagttctgctctcaaggtaagctgtcct

SEQ ID NO: 410497 - DNA, 33 bp, Homo sapien
cccaccaatggtgcaccggttacattttgaagt

SEQ ID NO: 410498 - DNA, 33 bp, Homo sapien
cccaccaatggtgcacgggttacattttgaagt

SEQ ID NO: 410499 - DNA, 33 bp, Homo sapien
acattgacttcttctacgtttgcttcattctca

SEQ ID NO: 410500 - DNA, 33 bp, Homo sapien
acattgacttcttctatgtttgcttcattctca

SEQ ID NO: 410501 - DNA, 33 bp, Homo sapien
aaagccaggcttgtccaatccaaagtctgggct

SEQ ID NO: 410502 - DNA, 33 bp, Homo sapien
aaagccaggcttgtccgatccaaagtctgggct

SEQ ID NO: 410503 - DNA, 33 bp, Homo sapien
atgatgctgtagaaccaggactcaaagccaggc

SEQ ID NO: 410504 - DNA, 33 bp, Homo sapien
atgatgctgtagaaccgggactcaaagccaggc

SEQ ID NO: 410505 - DNA, 33 bp, Homo sapien
gaagtgaaggttactcaaggccactgttatagg

SEQ ID NO: 410506 - DNA, 33 bp, Homo sapien
gaagtgaaggttactctaggccactgttatagg

SEQ ID NO: 410507 - DNA, 33 bp, Homo sapien
aaccacttgaccaatgacactcagcagtggact

SEQ ID NO: 410508 - DNA, 33 bp, Homo sapien
aaccacttgaccaatgccactcagcagtggact

SEQ ID NO: 410509 - DNA, 33 bp, Homo sapien
gcattgagaattcagacgggtgtgtataaattt

SEQ ID NO: 410510 - DNA, 33 bp, Homo sapien
gcattgagaattcagaggggtgtgtataaattt

SEQ ID NO: 410511 - DNA, 33 bp, Homo sapien
atctatcttcctatcaaccttaggagcagcagt

SEQ ID NO: 410512 - DNA, 33 bp, Homo sapien
atctatcttcctatcacccttaggagcagcagt

SEQ ID NO: 410513 - DNA, 33 bp, Homo sapien
aaatttgcgtagttaaaaaaacttgtccaaatt

SEQ ID NO: 410514 - DNA, 33 bp, Homo sapien
aaatttgcgtagttaacaaaacttgtccaaatt

SEQ ID NO: 410515 - DNA, 33 bp, Homo sapien
ctgaaaaactggagaccagcaaaggaaaggagg

SEQ ID NO: 410516 - DNA, 33 bp, Homo sapien
ctgaaaaactggagacgagcaaaggaaaggagg

SEQ ID NO: 410517 - DNA, 33 bp, Homo sapien
ttgctcagctttctaccgccataagaaatacct

SEQ ID NO: 410518 - DNA, 33 bp, Homo sapien
ttgctcagctttctactgccataagaaatacct

SEQ ID NO: 410519 - DNA, 33 bp, Homo sapien
cggcttctcttgcacaccttaggccaaaatgat

SEQ ID NO: 410520 - DNA, 33 bp, Homo sapien
cggcttctcttgcacagcttaggccaaaatgat

SEQ ID NO: 410521 - DNA, 33 bp, Homo sapien
gtttttattgctgagaagtattccattgtatgg

SEQ ID NO: 410522 - DNA, 33 bp, Homo sapien
gtttttattgctgagacgtattccattgtatgg

SEQ ID NO: 410523 - DNA, 33 bp, Homo sapien
tatactcttcgtgtcaatagtccttcagttttt

SEQ ID NO: 410524 - DNA, 33 bp, Homo sapien
tatactcttcgtgtcagtagtccttcagttttt

SEQ ID NO: 410525 - DNA, 33 bp, Homo sapien
tatggctctgatataacactgattgaactttat

SEQ ID NO: 410526 - DNA, 33 bp, Homo sapien
tatggctctgatataagactgattgaactttat

SEQ ID NO: 410527 - DNA, 33 bp, Homo sapien
aacccacaggagctagcagatatttggaaataa

SEQ ID NO: 410528 - DNA, 33 bp, Homo sapien
aacccacaggagctagtagatatttggaaataa

SEQ ID NO: 410529 - DNA, 33 bp, Homo sapien
ctgaggtttgctcttacctacagcccagccagg

SEQ ID NO: 410530 - DNA, 33 bp, Homo sapien
ctgaggtttgctcttatctacagcccagccagg

SEQ ID NO: 410531 - DNA, 33 bp, Homo sapien
tgagttgaattctagaagatatgaaggaatgaa

SEQ ID NO: 410532 - DNA, 33 bp, Homo sapien
tgagttgaattctagatgatatgaaggaatgaa

SEQ ID NO: 410533 - DNA, 33 bp, Homo sapien
taaaactcatggggaaaagtctgcataccctct

SEQ ID NO: 410534 - DNA, 33 bp, Homo sapien
taaaactcatggggaagagtctgcataccctct

SEQ ID NO: 410535 - DNA, 33 bp, Homo sapien
tgagtggattatttagaaaattcaaaggaaatt

SEQ ID NO: 410536 - DNA, 33 bp, Homo sapien
tgagtggattatttaggaaattcaaaggaaatt

SEQ ID NO: 410537 - DNA, 33 bp, Homo sapien
ttgatgagttccaaaagttcctttctgtgtcat

SEQ ID NO: 410538 - DNA, 33 bp, Homo sapien
ttgatgagttccaaaatttcctttctgtgtcat

SEQ ID NO: 410539 - DNA, 33 bp, Homo sapien
cttcataaacactgtacaattaagctacactaa

SEQ ID NO: 410540 - DNA, 33 bp, Homo sapien
cttcataaacactgtataattaagctacactaa

SEQ ID NO: 410541 - DNA, 33 bp, Homo sapien
agagcaggatggctaaacaatctgatgtaaatc

SEQ ID NO: 410542 - DNA, 33 bp, Homo sapien
agagcaggatggctaagcaatctgatgtaaatc

SEQ ID NO: 410543 - DNA, 33 bp, Homo sapien
tcatccagagagtacacatttgttgccatgacc

SEQ ID NO: 410544 - DNA, 33 bp, Homo sapien
tcatccagagagtacatatttgttgccatgacc

SEQ ID NO: 410545 - DNA, 33 bp, Homo sapien
gccgagcaatgcacctaaacacactggtccagg

SEQ ID NO: 410546 - DNA, 33 bp, Homo sapien
gccgagcaatgcacctcaacacactggtccagg

SEQ ID NO: 410547 - DNA, 33 bp, Homo sapien
caatttggctattaggcataaagttgctataaa

SEQ ID NO: 410548 - DNA, 33 bp, Homo sapien
caatttggctattaggtataaagttgctataaa

SEQ ID NO: 410549 - DNA, 33 bp, Homo sapien
tcctgcgtatgggatgaaaagagtctgtacctg

SEQ ID NO: 410550 - DNA, 33 bp, Homo sapien
tcctgcgtatgggatgcaaagagtctgtacctg

SEQ ID NO: 410551 - DNA, 33 bp, Homo sapien
actatagttgtttgagaccccaaagtcctggtg

SEQ ID NO: 410552 - DNA, 33 bp, Homo sapien
actatagttgtttgagtccccaaagtcctggtg

SEQ ID NO: 410553 - DNA, 33 bp, Homo sapien
gttgtagagaaggaataatggaggtacacaggt

SEQ ID NO: 410554 - DNA, 33 bp, Homo sapien
gttgtagagaaggaatcatggaggtacacaggt

SEQ ID NO: 410555 - DNA, 33 bp, Homo sapien
gaaagtgctgtagttacctctattttgtgtgtt

SEQ ID NO: 410556 - DNA, 33 bp, Homo sapien
gaaagtgctgtagttatctctattttgtgtgtt

SEQ ID NO: 410557 - DNA, 33 bp, Homo sapien
atattttccaacatcaaaatgactctcccttct

SEQ ID NO: 410558 - DNA, 33 bp, Homo sapien
atattttccaacatcacaatgactctcccttct

SEQ ID NO: 410559 - DNA, 33 bp, Homo sapien
cagcccttgattttcaaccttcagcttagagct

SEQ ID NO: 410560 - DNA, 33 bp, Homo sapien
cagcccttgattttcagccttcagcttagagct

SEQ ID NO: 410561 - DNA, 33 bp, Homo sapien
aagtgcatagaaactaagagggaacttcaaata

SEQ ID NO: 410562 - DNA, 33 bp, Homo sapien
aagtgcatagaaactaggagggaacttcaaata

SEQ ID NO: 410563 - DNA, 33 bp, Homo sapien
atactgttggccctgcaaagtattgaaatgatg

SEQ ID NO: 410564 - DNA, 33 bp, Homo sapien
atactgttggccctgcgaagtattgaaatgatg

SEQ ID NO: 410565 - DNA, 33 bp, Homo sapien
atgtttgattagtaggaataactggcaaagaac

SEQ ID NO: 410566 - DNA, 33 bp, Homo sapien
atgtttgattagtagggataactggcaaagaac

SEQ ID NO: 410567 - DNA, 33 bp, Homo sapien
agatgctttctctaaaattgctagtcattcttc

SEQ ID NO: 410568 - DNA, 33 bp, Homo sapien
agatgctttctctaaagttgctagtcattcttc

SEQ ID NO: 410569 - DNA, 33 bp, Homo sapien
gaatgtgcagactagacgaaatccacagtccca

SEQ ID NO: 410570 - DNA, 33 bp, Homo sapien
gaatgtgcagactagatgaaatccacagtccca

SEQ ID NO: 410571 - DNA, 33 bp, Homo sapien
ttgattattagataggaatccagtggtaatggg

SEQ ID NO: 410572 - DNA, 33 bp, Homo sapien
ttgattattagatagggatccagtggtaatggg

SEQ ID NO: 410573 - DNA, 33 bp, Homo sapien
gtcacatttgcttaaacaagcattttccaaact

SEQ ID NO: 410574 - DNA, 33 bp, Homo sapien
gtcacatttgcttaaagaagcattttccaaact

SEQ ID NO: 410575 - DNA, 33 bp, Homo sapien
tgcaatacaatagtaaatgaaaccctgcctact

SEQ ID NO: 410576 - DNA, 33 bp, Homo sapien
tgcaatacaatagtaactgaaaccctgcctact

SEQ ID NO: 410577 - DNA, 33 bp, Homo sapien
ttactgtaacatagtaaggttcaccttgactga

SEQ ID NO: 410578 - DNA, 33 bp, Homo sapien
ttactgtaacatagtagggttcaccttgactga

SEQ ID NO: 410579 - DNA, 33 bp, Homo sapien
gaataaccattaccaaagtaagcttgaaactgg

SEQ ID NO: 410580 - DNA, 33 bp, Homo sapien
gaataaccattaccaacgtaagcttgaaactgg

SEQ ID NO: 410581 - DNA, 33 bp, Homo sapien
ccaaagtaacgtgtgcactacattttcaaagca

SEQ ID NO: 410582 - DNA, 33 bp, Homo sapien
ccaaagtaacgtgtgcgctacattttcaaagca

SEQ ID NO: 410583 - DNA, 33 bp, Homo sapien
ggttcactatcagctgcagataggttttctaag

SEQ ID NO: 410584 - DNA, 33 bp, Homo sapien
ggttcactatcagctgtagataggttttctaag

SEQ ID NO: 410585 - DNA, 33 bp, Homo sapien
aagttatgatccacgacggggttttcaaaacag

SEQ ID NO: 410586 - DNA, 33 bp, Homo sapien
aagttatgatccacgatggggttttcaaaacag

SEQ ID NO: 410587 - DNA, 33 bp, Homo sapien
gcaacttcaagaaaaactgttggcataaaggag

SEQ ID NO: 410588 - DNA, 33 bp, Homo sapien
gcaacttcaagaaaaagtgttggcataaaggag

SEQ ID NO: 410589 - DNA, 33 bp, Homo sapien
attaatctctttgtcacaggcaatactacttaa

SEQ ID NO: 410590 - DNA, 33 bp, Homo sapien
attaatctctttgtcataggcaatactacttaa

SEQ ID NO: 410591 - DNA, 33 bp, Homo sapien
ttcaaccacatccaatcaatcacaaagttccat

SEQ ID NO: 410592 - DNA, 33 bp, Homo sapien
ttcaaccacatccaattaatcacaaagttccat

SEQ ID NO: 410593 - DNA, 33 bp, Homo sapien
ctcctgagttgagaaaaacctccttgaaatgag

SEQ ID NO: 410594 - DNA, 33 bp, Homo sapien
ctcctgagttgagaaacacctccttgaaatgag

SEQ ID NO: 410595 - DNA, 33 bp, Homo sapien
actcattcttcaagaacctcttttactctgttt

SEQ ID NO: 410596 - DNA, 33 bp, Homo sapien
actcattcttcaagaagctcttttactctgttt

SEQ ID NO: 410597 - DNA, 33 bp, Homo sapien
aggaaatgatggagacaaaggctggactctttc

SEQ ID NO: 410598 - DNA, 33 bp, Homo sapien
aggaaatgatggagacgaaggctggactctttc

SEQ ID NO: 410599 - DNA, 33 bp, Homo sapien
agagcaagggagtctacgtaaatacagttagga

SEQ ID NO: 410600 - DNA, 33 bp, Homo sapien
agagcaagggagtctatgtaaatacagttagga

SEQ ID NO: 410601 - DNA, 33 bp, Homo sapien
cctgatgaaagattcaataaaagtcttcattta

SEQ ID NO: 410602 - DNA, 33 bp, Homo sapien
cctgatgaaagattcagtaaaagtcttcattta

SEQ ID NO: 410603 - DNA, 33 bp, Homo sapien
cccagtctctcaaggaaagcctgtattgttttc

SEQ ID NO: 410604 - DNA, 33 bp, Homo sapien
cccagtctctcaaggacagcctgtattgttttc

SEQ ID NO: 410605 - DNA, 33 bp, Homo sapien
taaacaaaataaagcactcagagttcttagcat

SEQ ID NO: 410606 - DNA, 33 bp, Homo sapien
taaacaaaataaagcattcagagttcttagcat

SEQ ID NO: 410607 - DNA, 33 bp, Homo sapien
ccctaaaactatcacacagctggttccttctga

SEQ ID NO: 410608 - DNA, 33 bp, Homo sapien
ccctaaaactatcacatagctggttccttctga

SEQ ID NO: 410609 - DNA, 33 bp, Homo sapien
gcatgaaaatgatccacagatttttacaggggt

SEQ ID NO: 410610 - DNA, 33 bp, Homo sapien
gcatgaaaatgatccatagatttttacaggggt

SEQ ID NO: 410611 - DNA, 33 bp, Homo sapien
aagtgccctgcagatacggtcagtcagcaatgg

SEQ ID NO: 410612 - DNA, 33 bp, Homo sapien
aagtgccctgcagatatggtcagtcagcaatgg

SEQ ID NO: 410613 - DNA, 33 bp, Homo sapien
agatgtgtgtccaacactgagctgctaaacaga

SEQ ID NO: 410614 - DNA, 33 bp, Homo sapien
agatgtgtgtccaacattgagctgctaaacaga

SEQ ID NO: 410615 - DNA, 33 bp, Homo sapien
tgactctgtcccttaagagcattttgaacatgg

SEQ ID NO: 410616 - DNA, 33 bp, Homo sapien
tgactctgtcccttaatagcattttgaacatgg

SEQ ID NO: 410617 - DNA, 33 bp, Homo sapien
attttgtcattgtcccaccttgggtcttttcca

SEQ ID NO: 410618 - DNA, 33 bp, Homo sapien
attttgtcattgtcccgccttgggtcttttcca

SEQ ID NO: 410619 - DNA, 33 bp, Homo sapien
caaatagaaaagcaacacaacccttactcataa

SEQ ID NO: 410620 - DNA, 33 bp, Homo sapien
caaatagaaaagcaactcaacccttactcataa

SEQ ID NO: 410621 - DNA, 33 bp, Homo sapien
ggaaagagagattgaactgttcagtcctgcagg

SEQ ID NO: 410622 - DNA, 33 bp, Homo sapien
ggaaagagagattgaattgttcagtcctgcagg

SEQ ID NO: 410623 - DNA, 33 bp, Homo sapien
aagcccaaatagttcactaactcctataaaatt

SEQ ID NO: 410624 - DNA, 33 bp, Homo sapien
aagcccaaatagttcattaactcctataaaatt

SEQ ID NO: 410625 - DNA, 33 bp, Homo sapien
ttgtcgtccccttagaaattgcagaaaccttga

SEQ ID NO: 410626 - DNA, 33 bp, Homo sapien
ttgtcgtccccttagagattgcagaaaccttga

SEQ ID NO: 410627 - DNA, 33 bp, Homo sapien
ccatgagaaagatccacgcagttttagagatgt

SEQ ID NO: 410628 - DNA, 33 bp, Homo sapien
ccatgagaaagatccatgcagttttagagatgt

SEQ ID NO: 410629 - DNA, 33 bp, Homo sapien
aggagaagaataggaaccagtgtcctccacaaa

SEQ ID NO: 410630 - DNA, 33 bp, Homo sapien
aggagaagaataggaatcagtgtcctccacaaa

SEQ ID NO: 410631 - DNA, 33 bp, Homo sapien
ttgcagcacttacctcgaattactctacatgga

SEQ ID NO: 410632 - DNA, 33 bp, Homo sapien
ttgcagcacttacctctaattactctacatgga

SEQ ID NO: 410633 - DNA, 33 bp, Homo sapien
ctcctgggcagagaagaactgaaggtcaggttt

SEQ ID NO: 410634 - DNA, 33 bp, Homo sapien
ctcctgggcagagaagcactgaaggtcaggttt

SEQ ID NO: 410635 - DNA, 33 bp, Homo sapien
aacactagcctcacacacagcaggaagagatac

SEQ ID NO: 410636 - DNA, 33 bp, Homo sapien
aacactagcctcacacgcagcaggaagagatac

SEQ ID NO: 410637 - DNA, 33 bp, Homo sapien
tcaggagcatgagaaactgattggctgtaccac

SEQ ID NO: 410638 - DNA, 33 bp, Homo sapien
tcaggagcatgagaaagtgattggctgtaccac

SEQ ID NO: 410639 - DNA, 33 bp, Homo sapien
tgcattaccttaggaaatgataataacctctcc

SEQ ID NO: 410640 - DNA, 33 bp, Homo sapien
tgcattaccttaggaagtgataataacctctcc

SEQ ID NO: 410641 - DNA, 33 bp, Homo sapien
cactccaaaggaactacagtcatgccccacata

SEQ ID NO: 410642 - DNA, 33 bp, Homo sapien
cactccaaaggaactatagtcatgccccacata

SEQ ID NO: 410643 - DNA, 33 bp, Homo sapien
ttggtaggaggactacggctttgatacaaatac

SEQ ID NO: 410644 - DNA, 33 bp, Homo sapien
ttggtaggaggactactgctttgatacaaatac

SEQ ID NO: 410645 - DNA, 33 bp, Homo sapien
aaagtaaaaatatgaacgtctccctcatctctc

SEQ ID NO: 410646 - DNA, 33 bp, Homo sapien
aaagtaaaaatatgaatgtctccctcatctctc

SEQ ID NO: 410647 - DNA, 33 bp, Homo sapien
ttattcctgcagttaaggtttgttaagtgctgc

SEQ ID NO: 410648 - DNA, 33 bp, Homo sapien
ttattcctgcagttaatgtttgttaagtgctgc

SEQ ID NO: 410649 - DNA, 33 bp, Homo sapien
ttcctgcctttgctcaagtaaaaccaactctct

SEQ ID NO: 410650 - DNA, 33 bp, Homo sapien
ttcctgcctttgctcacgtaaaaccaactctct

SEQ ID NO: 410651 - DNA, 33 bp, Homo sapien
agagcaaatagtgtgaataaaagctcagaagca

SEQ ID NO: 410652 - DNA, 33 bp, Homo sapien
agagcaaatagtgtgagtaaaagctcagaagca

SEQ ID NO: 410653 - DNA, 33 bp, Homo sapien
aattagattggcattaccaaaggtggattagca

SEQ ID NO: 410654 - DNA, 33 bp, Homo sapien
aattagattggcattatcaaaggtggattagca

SEQ ID NO: 410655 - DNA, 33 bp, Homo sapien
gaggcctgatattttaacaattagattggcatt

SEQ ID NO: 410656 - DNA, 33 bp, Homo sapien
gaggcctgatattttagcaattagattggcatt

SEQ ID NO: 410657 - DNA, 33 bp, Homo sapien
accagagaaaaaggaaaggtgttcattgaggag

SEQ ID NO: 410658 - DNA, 33 bp, Homo sapien
accagagaaaaaggaagggtgttcattgaggag

SEQ ID NO: 410659 - DNA, 33 bp, Homo sapien
tgtctttctcagaaaacaatactcccctaagtc

SEQ ID NO: 410660 - DNA, 33 bp, Homo sapien
tgtctttctcagaaaataatactcccctaagtc

SEQ ID NO: 410661 - DNA, 33 bp, Homo sapien
gaaagataaatgagaactcttcagcagcttaca

SEQ ID NO: 410662 - DNA, 33 bp, Homo sapien
gaaagataaatgagaattcttcagcagcttaca

SEQ ID NO: 410663 - DNA, 33 bp, Homo sapien
ctttccagataaaggcaacactatcacttctgt

SEQ ID NO: 410664 - DNA, 33 bp, Homo sapien
ctttccagataaaggccacactatcacttctgt

SEQ ID NO: 410665 - DNA, 33 bp, Homo sapien
tctttcacatctaacaaggtctggcccaaataa

SEQ ID NO: 410666 - DNA, 33 bp, Homo sapien
tctttcacatctaacagggtctggcccaaataa

SEQ ID NO: 410667 - DNA, 33 bp, Homo sapien
tcctttggtatttcaacggcatttgtaattatg

SEQ ID NO: 410668 - DNA, 33 bp, Homo sapien
tcctttggtatttcaatggcatttgtaattatg

SEQ ID NO: 410669 - DNA, 33 bp, Homo sapien
ttgatgttcctacaaacagtgcagaaggatata

SEQ ID NO: 410670 - DNA, 33 bp, Homo sapien
ttgatgttcctacaaagagtgcagaaggatata

SEQ ID NO: 410671 - DNA, 33 bp, Homo sapien
ggctcctgccacttcacgggagaggagagcact

SEQ ID NO: 410672 - DNA, 33 bp, Homo sapien
ggctcctgccacttcatgggagaggagagcact

SEQ ID NO: 410673 - DNA, 33 bp, Homo sapien
aatatgttttgaacaaatcattcaatctaccaa

SEQ ID NO: 410674 - DNA, 33 bp, Homo sapien
aatatgttttgaacaagtcattcaatctaccaa

SEQ ID NO: 410675 - DNA, 33 bp, Homo sapien
tcatgtgtatgtggcacgtactgttacctacct

SEQ ID NO: 410676 - DNA, 33 bp, Homo sapien
tcatgtgtatgtggcatgtactgttacctacct

SEQ ID NO: 410677 - DNA, 33 bp, Homo sapien
ttggtatttcactggcacctagacaagtgctct

SEQ ID NO: 410678 - DNA, 33 bp, Homo sapien
ttggtatttcactggctcctagacaagtgctct

SEQ ID NO: 410679 - DNA, 33 bp, Homo sapien
agagaatttattggagacattaaagggagctta

SEQ ID NO: 410680 - DNA, 33 bp, Homo sapien
agagaatttattggaggcattaaagggagctta

SEQ ID NO: 410681 - DNA, 33 bp, Homo sapien
agccaagttcacaaaacgattcgagatcaatac

SEQ ID NO: 410682 - DNA, 33 bp, Homo sapien
agccaagttcacaaaatgattcgagatcaatac

SEQ ID NO: 410683 - DNA, 33 bp, Homo sapien
ttctctccctcatttgaaacaactgcagaacaa

SEQ ID NO: 410684 - DNA, 33 bp, Homo sapien
ttctctccctcatttggaacaactgcagaacaa

SEQ ID NO: 410685 - DNA, 33 bp, Homo sapien
aaaaaagactgcgagcaacttcaatgtcaagga

SEQ ID NO: 410686 - DNA, 33 bp, Homo sapien
aaaaaagactgcgagcgacttcaatgtcaagga

SEQ ID NO: 410687 - DNA, 33 bp, Homo sapien
gtctgaactcaaacccaggactatgtgattcca

SEQ ID NO: 410688 - DNA, 33 bp, Homo sapien
gtctgaactcaaacccgggactatgtgattcca

SEQ ID NO: 410689 - DNA, 33 bp, Homo sapien
aagagtaaggaaatgaagatgagtccaatatgt

SEQ ID NO: 410690 - DNA, 33 bp, Homo sapien
aagagtaaggaaatgaggatgagtccaatatgt

SEQ ID NO: 410691 - DNA, 33 bp, Homo sapien
agacactctgattcagaagaggcttggaagttt

SEQ ID NO: 410692 - DNA, 33 bp, Homo sapien
agacactctgattcaggagaggcttggaagttt

SEQ ID NO: 410693 - DNA, 33 bp, Homo sapien
tgcttaattagttagacgctccatgccaggaca

SEQ ID NO: 410694 - DNA, 33 bp, Homo sapien
tgcttaattagttagatgctccatgccaggaca

SEQ ID NO: 410695 - DNA, 33 bp, Homo sapien
tgggccactgataccacgaagagtgttcttctc

SEQ ID NO: 410696 - DNA, 33 bp, Homo sapien
tgggccactgataccatgaagagtgttcttctc

SEQ ID NO: 410697 - DNA, 33 bp, Homo sapien
taagaaaacactctcactcactttgtctcaatg

SEQ ID NO: 410698 - DNA, 33 bp, Homo sapien
taagaaaacactctcagtcactttgtctcaatg

SEQ ID NO: 410699 - DNA, 33 bp, Homo sapien
tgtggaagtcattgtgaaccagaggtaggatct

SEQ ID NO: 410700 - DNA, 33 bp, Homo sapien
tgtggaagtcattgtggaccagaggtaggatct

SEQ ID NO: 410701 - DNA, 33 bp, Homo sapien
aggaagctagagaagaactacagcatgaggctg

SEQ ID NO: 410702 - DNA, 33 bp, Homo sapien
aggaagctagagaagatctacagcatgaggctg

SEQ ID NO: 410703 - DNA, 33 bp, Homo sapien
ctattaatctattacaccaactcttctcttgca

SEQ ID NO: 410704 - DNA, 33 bp, Homo sapien
ctattaatctattacatcaactcttctcttgca

SEQ ID NO: 410705 - DNA, 33 bp, Homo sapien
aatattgttaagtaccaactgtatgtgagatat

SEQ ID NO: 410706 - DNA, 33 bp, Homo sapien
aatattgttaagtacctactgtatgtgagatat

SEQ ID NO: 410707 - DNA, 33 bp, Homo sapien
aggtagcttgttgatccagttggcaggagcctc

SEQ ID NO: 410708 - DNA, 33 bp, Homo sapien
aggtagcttgttgatctagttggcaggagcctc

SEQ ID NO: 410709 - DNA, 33 bp, Homo sapien
ccccatcattacgacaaggatctccatcacagc

SEQ ID NO: 410710 - DNA, 33 bp, Homo sapien
ccccatcattacgacatggatctccatcacagc

SEQ ID NO: 410711 - DNA, 33 bp, Homo sapien
aggttgtctttatttacaggaaggtgtattccc

SEQ ID NO: 410712 - DNA, 33 bp, Homo sapien
aggttgtctttatttataggaaggtgtattccc

SEQ ID NO: 410713 - DNA, 33 bp, Homo sapien
atatctgaggcttttcaatgaccaccagctcag

SEQ ID NO: 410714 - DNA, 33 bp, Homo sapien
atatctgaggcttttccatgaccaccagctcag

SEQ ID NO: 410715 - DNA, 33 bp, Homo sapien
catctaatgataaatcagacaggatcaaggtta

SEQ ID NO: 410716 - DNA, 33 bp, Homo sapien
catctaatgataaatcggacaggatcaaggtta

SEQ ID NO: 410717 - DNA, 33 bp, Homo sapien
tgcaccttcaagaagcaaggagcaggaacctgg

SEQ ID NO: 410718 - DNA, 33 bp, Homo sapien
tgcaccttcaagaagcgaggagcaggaacctgg

SEQ ID NO: 410719 - DNA, 33 bp, Homo sapien
tagacagaggacagtacaacattatggcagggt

SEQ ID NO: 410720 - DNA, 33 bp, Homo sapien
tagacagaggacagtataacattatggcagggt

SEQ ID NO: 410721 - DNA, 33 bp, Homo sapien
aaaagaagcagaatccaccctaaacatgcactg

SEQ ID NO: 410722 - DNA, 33 bp, Homo sapien
aaaagaagcagaatccgccctaaacatgcactg

SEQ ID NO: 410723 - DNA, 33 bp, Homo sapien
acaaacaatctgtgaacatttaaaaacaagcac

SEQ ID NO: 410724 - DNA, 33 bp, Homo sapien
acaaacaatctgtgaatatttaaaaacaagcac

SEQ ID NO: 410725 - DNA, 33 bp, Homo sapien
catacacacaggttgcacctaataaactccttc

SEQ ID NO: 410726 - DNA, 33 bp, Homo sapien
catacacacaggttgcgcctaataaactccttc

SEQ ID NO: 410727 - DNA, 33 bp, Homo sapien
cgaggacaggagggataaagggagctcttctct

SEQ ID NO: 410728 - DNA, 33 bp, Homo sapien
cgaggacaggagggattaagggagctcttctct

SEQ ID NO: 410729 - DNA, 33 bp, Homo sapien
ggtgggttgctcatcaaggctttacatattttg

SEQ ID NO: 410730 - DNA, 33 bp, Homo sapien
ggtgggttgctcatcatggctttacatattttg

SEQ ID NO: 410731 - DNA, 33 bp, Homo sapien
gatgaatagtaagaggccatcaacgtgtactgc

SEQ ID NO: 410732 - DNA, 33 bp, Homo sapien
gatgaatagtaagaggtcatcaacgtgtactgc

SEQ ID NO: 410733 - DNA, 33 bp, Homo sapien
cgctcacatcacctaccgggtaaaagcagccac

SEQ ID NO: 410734 - DNA, 33 bp, Homo sapien
cgctcacatcacctactgggtaaaagcagccac

SEQ ID NO: 410735 - DNA, 33 bp, Homo sapien
tatcatttcctaggtcaaattctctaaggaaga

SEQ ID NO: 410736 - DNA, 33 bp, Homo sapien
tatcatttcctaggtcgaattctctaaggaaga

SEQ ID NO: 410737 - DNA, 33 bp, Homo sapien
aataataatgcataaaactcttggcagaaagca

SEQ ID NO: 410738 - DNA, 33 bp, Homo sapien
aataataatgcataaatctcttggcagaaagca

SEQ ID NO: 410739 - DNA, 33 bp, Homo sapien
agattggggccaaagacagtggaagctcaaggg

SEQ ID NO: 410740 - DNA, 33 bp, Homo sapien
agattggggccaaagagagtggaagctcaaggg

SEQ ID NO: 410741 - DNA, 33 bp, Homo sapien
gagcctactttgaagcacttgttctttctacag

SEQ ID NO: 410742 - DNA, 33 bp, Homo sapien
gagcctactttgaagcgcttgttctttctacag

SEQ ID NO: 410743 - DNA, 33 bp, Homo sapien
tcctgtgtttgttgaaatgttcgatccatcaga

SEQ ID NO: 410744 - DNA, 33 bp, Homo sapien
tcctgtgtttgttgaactgttcgatccatcaga

SEQ ID NO: 410745 - DNA, 33 bp, Homo sapien
cctcccattgtgctccacgcttggtaggttctt

SEQ ID NO: 410746 - DNA, 33 bp, Homo sapien
cctcccattgtgctccgcgcttggtaggttctt

SEQ ID NO: 410747 - DNA, 33 bp, Homo sapien
tgggtggtagtttccactcacttctcttggaac

SEQ ID NO: 410748 - DNA, 33 bp, Homo sapien
tgggtggtagtttccattcacttctcttggaac

SEQ ID NO: 410749 - DNA, 33 bp, Homo sapien
gcttctaaatgaataacgggcagggagtgtcta

SEQ ID NO: 410750 - DNA, 33 bp, Homo sapien
gcttctaaatgaataatgggcagggagtgtcta

SEQ ID NO: 410751 - DNA, 33 bp, Homo sapien
cagttttctgcacttacactttgattaaagatt

SEQ ID NO: 410752 - DNA, 33 bp, Homo sapien
cagttttctgcacttatactttgattaaagatt

SEQ ID NO: 410753 - DNA, 33 bp, Homo sapien
tactctcacacatgggccattacagtggcctcc

SEQ ID NO: 410754 - DNA, 33 bp, Homo sapien
tactctcacacatgggtcattacagtggcctcc

SEQ ID NO: 410755 - DNA, 33 bp, Homo sapien
cttgtggaagaggaggccagaataaaaggagaa

SEQ ID NO: 410756 - DNA, 33 bp, Homo sapien
cttgtggaagaggaggtcagaataaaaggagaa

SEQ ID NO: 410757 - DNA, 33 bp, Homo sapien
ttgcaagctatgattacgttgttgttgttctta

SEQ ID NO: 410758 - DNA, 33 bp, Homo sapien
ttgcaagctatgattatgttgttgttgttctta

SEQ ID NO: 410759 - DNA, 33 bp, Homo sapien
ggagaaagacatggaggccatcactaggccagc

SEQ ID NO: 410760 - DNA, 33 bp, Homo sapien
ggagaaagacatggagtccatcactaggccagc

SEQ ID NO: 410761 - DNA, 33 bp, Homo sapien
gctcacattgaagacacggcccaaacagctgcc

SEQ ID NO: 410762 - DNA, 33 bp, Homo sapien
gctcacattgaagacatggcccaaacagctgcc

SEQ ID NO: 410763 - DNA, 33 bp, Homo sapien
ctcttggctatcacacagtattgctcaggaggc

SEQ ID NO: 410764 - DNA, 33 bp, Homo sapien
ctcttggctatcacacggtattgctcaggaggc

SEQ ID NO: 410765 - DNA, 33 bp, Homo sapien
gtcacttataacccagccacaaggtttgggaag

SEQ ID NO: 410766 - DNA, 33 bp, Homo sapien
gtcacttataacccagtcacaaggtttgggaag

SEQ ID NO: 410767 - DNA, 33 bp, Homo sapien
gatcacgtgtctttacagattttttacaagaat

SEQ ID NO: 410768 - DNA, 33 bp, Homo sapien
gatcacgtgtctttactgattttttacaagaat

SEQ ID NO: 410769 - DNA, 33 bp, Homo sapien
catgttctcaactgcaaactttttttgatcacg

SEQ ID NO: 410770 - DNA, 33 bp, Homo sapien
catgttctcaactgcagactttttttgatcacg

SEQ ID NO: 410771 - DNA, 33 bp, Homo sapien
gtgagggaagctgatacgatttcacgaacaacg

SEQ ID NO: 410772 - DNA, 33 bp, Homo sapien
gtgagggaagctgatatgatttcacgaacaacg

SEQ ID NO: 410773 - DNA, 33 bp, Homo sapien
ccagtgtttcagtaaacaaagtagaatttgcat

SEQ ID NO: 410774 - DNA, 33 bp, Homo sapien
ccagtgtttcagtaaagaaagtagaatttgcat

SEQ ID NO: 410775 - DNA, 33 bp, Homo sapien
catatattgaagacctaacctcgagtacttcaa

SEQ ID NO: 410776 - DNA, 33 bp, Homo sapien
catatattgaagacctgacctcgagtacttcaa

SEQ ID NO: 410777 - DNA, 33 bp, Homo sapien
agggagtctggccctgcaagcctactagttaga

SEQ ID NO: 410778 - DNA, 33 bp, Homo sapien
agggagtctggccctgtaagcctactagttaga

SEQ ID NO: 410779 - DNA, 33 bp, Homo sapien
cttcagtgtgcatccactggaatcaggacatat

SEQ ID NO: 410780 - DNA, 33 bp, Homo sapien
cttcagtgtgcatccattggaatcaggacatat

SEQ ID NO: 410781 - DNA, 33 bp, Homo sapien
ctcatggctaataagcagcagaacccttattgc

SEQ ID NO: 410782 - DNA, 33 bp, Homo sapien
ctcatggctaataagccgcagaacccttattgc

SEQ ID NO: 410783 - DNA, 33 bp, Homo sapien
gtgagcaagggtgagagcaaggagatgggactg

SEQ ID NO: 410784 - DNA, 33 bp, Homo sapien
gtgagcaagggtgagatcaaggagatgggactg

SEQ ID NO: 410785 - DNA, 33 bp, Homo sapien
tgatctcagctagtgcaaagcagaaaacccact

SEQ ID NO: 410786 - DNA, 33 bp, Homo sapien
tgatctcagctagtgcgaagcagaaaacccact

SEQ ID NO: 410787 - DNA, 33 bp, Homo sapien
cggggcccatgaaggcaaatgagctccctttaa

SEQ ID NO: 410788 - DNA, 33 bp, Homo sapien
cggggcccatgaaggcgaatgagctccctttaa

SEQ ID NO: 410789 - DNA, 33 bp, Homo sapien
atatcctcagactccaagtaaatagtccgtggc

SEQ ID NO: 410790 - DNA, 33 bp, Homo sapien
atatcctcagactccaggtaaatagtccgtggc

SEQ ID NO: 410791 - DNA, 33 bp, Homo sapien
gattcacaatctacaacaccagcccagcctatc

SEQ ID NO: 410792 - DNA, 33 bp, Homo sapien
gattcacaatctacaagaccagcccagcctatc

SEQ ID NO: 410793 - DNA, 33 bp, Homo sapien
gccttccttttgcgacagccagaattactgccg

SEQ ID NO: 410794 - DNA, 33 bp, Homo sapien
gccttccttttgcgaccgccagaattactgccg

SEQ ID NO: 410795 - DNA, 33 bp, Homo sapien
agggcagagcacgagcaaactgagagaggagat

SEQ ID NO: 410796 - DNA, 33 bp, Homo sapien
agggcagagcacgagccaactgagagaggagat

SEQ ID NO: 410797 - DNA, 33 bp, Homo sapien
ttcataattactccaacttggaagcaaccaaga

SEQ ID NO: 410798 - DNA, 33 bp, Homo sapien
ttcataattactccaatttggaagcaaccaaga

SEQ ID NO: 410799 - DNA, 33 bp, Homo sapien
aaaacttagagttctaaagtggacccgaccctt

SEQ ID NO: 410800 - DNA, 33 bp, Homo sapien
aaaacttagagttctatagtggacccgaccctt

SEQ ID NO: 410801 - DNA, 33 bp, Homo sapien
atgcacataaaacatgcatagccagttcaacac

SEQ ID NO: 410802 - DNA, 33 bp, Homo sapien
atgcacataaaacatgtatagccagttcaacac

SEQ ID NO: 410803 - DNA, 33 bp, Homo sapien
tctgtttggggagaaagtaatgaagatcaggct

SEQ ID NO: 410804 - DNA, 33 bp, Homo sapien
tctgtttggggagaaattaatgaagatcaggct

SEQ ID NO: 410805 - DNA, 33 bp, Homo sapien
acataatcttattatcactgggcatcttccagt

SEQ ID NO: 410806 - DNA, 33 bp, Homo sapien
acataatcttattatcgctgggcatcttccagt

SEQ ID NO: 410807 - DNA, 33 bp, Homo sapien
tcgactccatgtaacacacgaaaagcagcttgc

SEQ ID NO: 410808 - DNA, 33 bp, Homo sapien
tcgactccatgtaacatacgaaaagcagcttgc

SEQ ID NO: 410809 - DNA, 33 bp, Homo sapien
aactcattttgaggaaacaagctaataaataaa

SEQ ID NO: 410810 - DNA, 33 bp, Homo sapien
aactcattttgaggaagcaagctaataaataaa

SEQ ID NO: 410811 - DNA, 33 bp, Homo sapien
cccttttgtgaattcactcatgttccatattca

SEQ ID NO: 410812 - DNA, 33 bp, Homo sapien
cccttttgtgaattcagtcatgttccatattca

SEQ ID NO: 410813 - DNA, 33 bp, Homo sapien
tagatatatttaggtgacacagattaagagagg

SEQ ID NO: 410814 - DNA, 33 bp, Homo sapien
tagatatatttaggtgtcacagattaagagagg

SEQ ID NO: 410815 - DNA, 33 bp, Homo sapien
ttatactgccactttccctagtctctgtagctc

SEQ ID NO: 410816 - DNA, 33 bp, Homo sapien
ttatactgccactttctctagtctctgtagctc

SEQ ID NO: 410817 - DNA, 33 bp, Homo sapien
tttaaacagtggtttacggctcatgcagctggt

SEQ ID NO: 410818 - DNA, 33 bp, Homo sapien
tttaaacagtggtttatggctcatgcagctggt

SEQ ID NO: 410819 - DNA, 33 bp, Homo sapien
atgcagctggtcactgaacactagcggctagag

SEQ ID NO: 410820 - DNA, 33 bp, Homo sapien
atgcagctggtcactgtacactagcggctagag

SEQ ID NO: 410821 - DNA, 33 bp, Homo sapien
gctacaaaagccatgcaatatgaattttttatt

SEQ ID NO: 410822 - DNA, 33 bp, Homo sapien
gctacaaaagccatgcgatatgaattttttatt

SEQ ID NO: 410823 - DNA, 33 bp, Homo sapien
ttaggtaatggcaatgaactctggaccaataaa

SEQ ID NO: 410824 - DNA, 33 bp, Homo sapien
ttaggtaatggcaatggactctggaccaataaa

SEQ ID NO: 410825 - DNA, 33 bp, Homo sapien
atgaataatataatgaaccctcacacctccatc

SEQ ID NO: 410826 - DNA, 33 bp, Homo sapien
atgaataatataatgagccctcacacctccatc

SEQ ID NO: 410827 - DNA, 33 bp, Homo sapien
tacaaaggttcctccaactctaggactccaggg

SEQ ID NO: 410828 - DNA, 33 bp, Homo sapien
tacaaaggttcctccagctctaggactccaggg

SEQ ID NO: 410829 - DNA, 33 bp, Homo sapien
ttgtgacacggagtacactgatgacctcagagc

SEQ ID NO: 410830 - DNA, 33 bp, Homo sapien
ttgtgacacggagtaccctgatgacctcagagc

SEQ ID NO: 410831 - DNA, 33 bp, Homo sapien
gtgaaggccggtgaccacaatcgccctgccttc

SEQ ID NO: 410832 - DNA, 33 bp, Homo sapien
gtgaaggccggtgaccgcaatcgccctgccttc

SEQ ID NO: 410833 - DNA, 33 bp, Homo sapien
aaagaatagtgggaaaggaacaagtgttgaccc

SEQ ID NO: 410834 - DNA, 33 bp, Homo sapien
aaagaatagtgggaaatgaacaagtgttgaccc

SEQ ID NO: 410835 - DNA, 33 bp, Homo sapien
agaatatcatgctctaagattgtactttccaat

SEQ ID NO: 410836 - DNA, 33 bp, Homo sapien
agaatatcatgctctaggattgtactttccaat

SEQ ID NO: 410837 - DNA, 33 bp, Homo sapien
cagagtctcaagtccgaccccaccagtggccaa

SEQ ID NO: 410838 - DNA, 33 bp, Homo sapien
cagagtctcaagtccgcccccaccagtggccaa

SEQ ID NO: 410839 - DNA, 33 bp, Homo sapien
gtgatgagcagcagtaacagggctcaaaaagca

SEQ ID NO: 410840 - DNA, 33 bp, Homo sapien
gtgatgagcagcagtagcagggctcaaaaagca

SEQ ID NO: 410841 - DNA, 33 bp, Homo sapien
gaattacctgtggttaactgataatgcagaaga

SEQ ID NO: 410842 - DNA, 33 bp, Homo sapien
gaattacctgtggttacctgataatgcagaaga

SEQ ID NO: 410843 - DNA, 33 bp, Homo sapien
gtcagaaaactaactaaacagacaaacaaatca

SEQ ID NO: 410844 - DNA, 33 bp, Homo sapien
gtcagaaaactaactatacagacaaacaaatca

SEQ ID NO: 410845 - DNA, 33 bp, Homo sapien
gttttttcaattgtgacctgttacaaaagaaat

SEQ ID NO: 410846 - DNA, 33 bp, Homo sapien
gttttttcaattgtgatctgttacaaaagaaat

SEQ ID NO: 410847 - DNA, 33 bp, Homo sapien
ctgaaggagctctaacaggactagacactgggc

SEQ ID NO: 410848 - DNA, 33 bp, Homo sapien
ctgaaggagctctaaccggactagacactgggc

SEQ ID NO: 410849 - DNA, 33 bp, Homo sapien
aggaaagattaacacacacggggatcaaataat

SEQ ID NO: 410850 - DNA, 33 bp, Homo sapien
aggaaagattaacacagacggggatcaaataat

SEQ ID NO: 410851 - DNA, 33 bp, Homo sapien
taatttgtgtgactcaaaaagcaatcaaggtag

SEQ ID NO: 410852 - DNA, 33 bp, Homo sapien
taatttgtgtgactcagaaagcaatcaaggtag

SEQ ID NO: 410853 - DNA, 33 bp, Homo sapien
taggccactcatcctacgtggcagatagcacat

SEQ ID NO: 410854 - DNA, 33 bp, Homo sapien
taggccactcatcctatgtggcagatagcacat

SEQ ID NO: 410855 - DNA, 33 bp, Homo sapien
ataaaaaagctacatccaaggccacagttggtt

SEQ ID NO: 410856 - DNA, 33 bp, Homo sapien
ataaaaaagctacatcgaaggccacagttggtt

SEQ ID NO: 410857 - DNA, 33 bp, Homo sapien
aaagcagatgtttccaaagatttagggtcactg

SEQ ID NO: 410858 - DNA, 33 bp, Homo sapien
aaagcagatgtttccagagatttagggtcactg

SEQ ID NO: 410859 - DNA, 33 bp, Homo sapien
cgctattagcactagacactgcgagcacaaggg

SEQ ID NO: 410860 - DNA, 33 bp, Homo sapien
cgctattagcactagagactgcgagcacaaggg

SEQ ID NO: 410861 - DNA, 33 bp, Homo sapien
tttagtctcagggtctcaaggggttagtcacgt

SEQ ID NO: 410862 - DNA, 33 bp, Homo sapien
tttagtctcagggtctgaaggggttagtcacgt

SEQ ID NO: 410863 - DNA, 33 bp, Homo sapien
aacagcctatgaggaaccgaatcgtgccaataa

SEQ ID NO: 410864 - DNA, 33 bp, Homo sapien
aacagcctatgaggaagcgaatcgtgccaataa

SEQ ID NO: 410865 - DNA, 33 bp, Homo sapien
tttttttttgtcttgccagcatcaggcagaatc

SEQ ID NO: 410866 - DNA, 33 bp, Homo sapien
tttttttttgtcttgctagcatcaggcagaatc

SEQ ID NO: 410867 - DNA, 33 bp, Homo sapien
aaaagtctcattacccaaaaaagtcatttggct

SEQ ID NO: 410868 - DNA, 33 bp, Homo sapien
aaaagtctcattaccctaaaaagtcatttggct

SEQ ID NO: 410869 - DNA, 33 bp, Homo sapien
taaattagaagttggacgtcacgaatcctatag

SEQ ID NO: 410870 - DNA, 33 bp, Homo sapien
taaattagaagttggatgtcacgaatcctatag

SEQ ID NO: 410871 - DNA, 33 bp, Homo sapien
aattgttcttagacaaggtgtgaagaggccttt

SEQ ID NO: 410872 - DNA, 33 bp, Homo sapien
aattgttcttagacaatgtgtgaagaggccttt

SEQ ID NO: 410873 - DNA, 33 bp, Homo sapien
gtatttattgactgagaaaaagccatttctggc

SEQ ID NO: 410874 - DNA, 33 bp, Homo sapien
gtatttattgactgaggaaaagccatttctggc

SEQ ID NO: 410875 - DNA, 33 bp, Homo sapien
catgatcttataaatacggcatttttttcggta

SEQ ID NO: 410876 - DNA, 33 bp, Homo sapien
catgatcttataaatatggcatttttttcggta

SEQ ID NO: 410877 - DNA, 33 bp, Homo sapien
aatggatttgtgtctaggtctagttccttgtag

SEQ ID NO: 410878 - DNA, 33 bp, Homo sapien
aatggatttgtgtctatgtctagttccttgtag

SEQ ID NO: 410879 - DNA, 33 bp, Homo sapien
gatttcaatgggacaacatgcccacaggatcta

SEQ ID NO: 410880 - DNA, 33 bp, Homo sapien
gatttcaatgggacaagatgcccacaggatcta

SEQ ID NO: 410881 - DNA, 33 bp, Homo sapien
cattaagttcccatcacatgtggcatcccactg

SEQ ID NO: 410882 - DNA, 33 bp, Homo sapien
cattaagttcccatcatatgtggcatcccactg

SEQ ID NO: 410883 - DNA, 33 bp, Homo sapien
gccatgcctcctttcacgtttgcattttggttt

SEQ ID NO: 410884 - DNA, 33 bp, Homo sapien
gccatgcctcctttcatgtttgcattttggttt

SEQ ID NO: 410885 - DNA, 33 bp, Homo sapien
tcggcacatgagatcaacttctttcggtaacat

SEQ ID NO: 410886 - DNA, 33 bp, Homo sapien
tcggcacatgagatcatcttctttcggtaacat

SEQ ID NO: 410887 - DNA, 33 bp, Homo sapien
tctaattgctgagtaacaaagttccatttcatt

SEQ ID NO: 410888 - DNA, 33 bp, Homo sapien
tctaattgctgagtaataaagttccatttcatt

SEQ ID NO: 410889 - DNA, 33 bp, Homo sapien
caggaacacgcagagacgacagtacaaagctgg

SEQ ID NO: 410890 - DNA, 33 bp, Homo sapien
caggaacacgcagagatgacagtacaaagctgg

SEQ ID NO: 410891 - DNA, 33 bp, Homo sapien
aacttggttcctcaaccggtgaccttccccagt

SEQ ID NO: 410892 - DNA, 33 bp, Homo sapien
aacttggttcctcaactggtgaccttccccagt

SEQ ID NO: 410893 - DNA, 33 bp, Homo sapien
gagacctcgcaacccacggtcaaaacagccact

SEQ ID NO: 410894 - DNA, 33 bp, Homo sapien
gagacctcgcaacccagggtcaaaacagccact

SEQ ID NO: 410895 - DNA, 33 bp, Homo sapien
gaataggaataaaccaagtaaatatagcactcg

SEQ ID NO: 410896 - DNA, 33 bp, Homo sapien
gaataggaataaaccaggtaaatatagcactcg

SEQ ID NO: 410897 - DNA, 33 bp, Homo sapien
catatgactcccagtgaataaactaagggccgc

SEQ ID NO: 410898 - DNA, 33 bp, Homo sapien
catatgactcccagtggataaactaagggccgc

SEQ ID NO: 410899 - DNA, 33 bp, Homo sapien
aacagctgagaaccagcataagccagctggctt

SEQ ID NO: 410900 - DNA, 33 bp, Homo sapien
aacagctgagaaccaggataagccagctggctt

SEQ ID NO: 410901 - DNA, 33 bp, Homo sapien
tgtgatgaccatttcaaatttacagttgcaatt

SEQ ID NO: 410902 - DNA, 33 bp, Homo sapien
tgtgatgaccatttcatatttacagttgcaatt

SEQ ID NO: 410903 - DNA, 33 bp, Homo sapien
tgacatgtggctggaaaaatcttgagttccctt

SEQ ID NO: 410904 - DNA, 33 bp, Homo sapien
tgacatgtggctggaagaatcttgagttccctt

SEQ ID NO: 410905 - DNA, 33 bp, Homo sapien
ttccaccctgttctcactataggcattggtgtc

SEQ ID NO: 410906 - DNA, 33 bp, Homo sapien
ttccaccctgttctcattataggcattggtgtc

SEQ ID NO: 410907 - DNA, 33 bp, Homo sapien
accaccacccctaaagcagcgtggattcatctt

SEQ ID NO: 410908 - DNA, 33 bp, Homo sapien
accaccacccctaaagtagcgtggattcatctt

SEQ ID NO: 410909 - DNA, 33 bp, Homo sapien
actatcacactgataccgacagccttatttatg

SEQ ID NO: 410910 - DNA, 33 bp, Homo sapien
actatcacactgatactgacagccttatttatg

SEQ ID NO: 410911 - DNA, 33 bp, Homo sapien
ccccactgtttacagagggggttatgagaagag

SEQ ID NO: 410912 - DNA, 33 bp, Homo sapien
ccccactgtttacagatggggttatgagaagag

SEQ ID NO: 410913 - DNA, 33 bp, Homo sapien
aaccgggtcttctgcactccagactctgtcttt

SEQ ID NO: 410914 - DNA, 33 bp, Homo sapien
aaccgggtcttctgcattccagactctgtcttt

SEQ ID NO: 410915 - DNA, 33 bp, Homo sapien
ggattaactgaaataacaaaaagagctaacatt

SEQ ID NO: 410916 - DNA, 33 bp, Homo sapien
ggattaactgaaataagaaaaagagctaacatt

SEQ ID NO: 410917 - DNA, 33 bp, Homo sapien
tctcaaaatggctacaaatgcttctctcttatg

SEQ ID NO: 410918 - DNA, 33 bp, Homo sapien
tctcaaaatggctacagatgcttctctcttatg

SEQ ID NO: 410919 - DNA, 33 bp, Homo sapien
tgttttggcttctggaactgagagtgtcctgct

SEQ ID NO: 410920 - DNA, 33 bp, Homo sapien
tgttttggcttctggagctgagagtgtcctgct

SEQ ID NO: 410921 - DNA, 33 bp, Homo sapien
gttggaatggttgcacaaagcagcagatgtgcc

SEQ ID NO: 410922 - DNA, 33 bp, Homo sapien
gttggaatggttgcacgaagcagcagatgtgcc

SEQ ID NO: 410923 - DNA, 33 bp, Homo sapien
gagcaacacctatgccagaagttgtgttcattc

SEQ ID NO: 410924 - DNA, 33 bp, Homo sapien
gagcaacacctatgccggaagttgtgttcattc

SEQ ID NO: 410925 - DNA, 33 bp, Homo sapien
tgtattttagggaaaaaggaccattatttgcct

SEQ ID NO: 410926 - DNA, 33 bp, Homo sapien
tgtattttagggaaaagggaccattatttgcct

SEQ ID NO: 410927 - DNA, 33 bp, Homo sapien
ttgcaagaaaaatgcccagttgcaaggtagacc

SEQ ID NO: 410928 - DNA, 33 bp, Homo sapien
ttgcaagaaaaatgcctagttgcaaggtagacc

SEQ ID NO: 410929 - DNA, 33 bp, Homo sapien
agggggaagtcctatacacttgttaaccagttc

SEQ ID NO: 410930 - DNA, 33 bp, Homo sapien
agggggaagtcctatatacttgttaaccagttc

SEQ ID NO: 410931 - DNA, 33 bp, Homo sapien
tttttaaaagaaaacacggattcattgttatta

SEQ ID NO: 410932 - DNA, 33 bp, Homo sapien
tttttaaaagaaaacatggattcattgttatta

SEQ ID NO: 410933 - DNA, 33 bp, Homo sapien
tggcaaccccatattcaccctggctttctgcct

SEQ ID NO: 410934 - DNA, 33 bp, Homo sapien
tggcaaccccatattcgccctggctttctgcct

SEQ ID NO: 410935 - DNA, 33 bp, Homo sapien
cagcaatggttgtttaaggctaggctttattct

SEQ ID NO: 410936 - DNA, 33 bp, Homo sapien
cagcaatggttgtttacggctaggctttattct

SEQ ID NO: 410937 - DNA, 33 bp, Homo sapien
agaggcaccaaaaaatcagtaggaaactgaaaa

SEQ ID NO: 410938 - DNA, 33 bp, Homo sapien
agaggcaccaaaaaattagtaggaaactgaaaa

SEQ ID NO: 410939 - DNA, 33 bp, Homo sapien
attctaggacaagataggctaaagctgccacaa

SEQ ID NO: 410940 - DNA, 33 bp, Homo sapien
attctaggacaagatatgctaaagctgccacaa

SEQ ID NO: 410941 - DNA, 33 bp, Homo sapien
gggaagcagtggattacaaagagaggtgaagaa

SEQ ID NO: 410942 - DNA, 33 bp, Homo sapien
gggaagcagtggattataaagagaggtgaagaa

SEQ ID NO: 410943 - DNA, 33 bp, Homo sapien
aaaacatctcactttaaacatatactgagtgct

SEQ ID NO: 410944 - DNA, 33 bp, Homo sapien
aaaacatctcactttacacatatactgagtgct

SEQ ID NO: 410945 - DNA, 33 bp, Homo sapien
ctgaactgcggggaccaaatgtgagaagggtgg

SEQ ID NO: 410946 - DNA, 33 bp, Homo sapien
ctgaactgcggggacctaatgtgagaagggtgg

SEQ ID NO: 410947 - DNA, 33 bp, Homo sapien
tctatacaaaggaataaaaagtgccacaagtgg

SEQ ID NO: 410948 - DNA, 33 bp, Homo sapien
tctatacaaaggaatacaaagtgccacaagtgg

SEQ ID NO: 410949 - DNA, 33 bp, Homo sapien
taaatgtgaagtaaagacagactatattacatt

SEQ ID NO: 410950 - DNA, 33 bp, Homo sapien
taaatgtgaagtaaaggcagactatattacatt

SEQ ID NO: 410951 - DNA, 33 bp, Homo sapien
tgtctctcaaacaggacggatgggcaaagtggc

SEQ ID NO: 410952 - DNA, 33 bp, Homo sapien
tgtctctcaaacaggatggatgggcaaagtggc

SEQ ID NO: 410953 - DNA, 33 bp, Homo sapien
aattgtctggaaactccatggaacaaggcctca

SEQ ID NO: 410954 - DNA, 33 bp, Homo sapien
aattgtctggaaactctatggaacaaggcctca

SEQ ID NO: 410955 - DNA, 33 bp, Homo sapien
cagaatgattattacacggagtctccacagcca

SEQ ID NO: 410956 - DNA, 33 bp, Homo sapien
cagaatgattattacatggagtctccacagcca

SEQ ID NO: 410957 - DNA, 33 bp, Homo sapien
gcaaaaggactgtaaaactaatagagatgctgt

SEQ ID NO: 410958 - DNA, 33 bp, Homo sapien
gcaaaaggactgtaaagctaatagagatgctgt

SEQ ID NO: 410959 - DNA, 33 bp, Homo sapien
tacttctataaaaaccaacaggtcaagctgaca

SEQ ID NO: 410960 - DNA, 33 bp, Homo sapien
tacttctataaaaaccgacaggtcaagctgaca

SEQ ID NO: 410961 - DNA, 33 bp, Homo sapien
tattgaagggagataaacgataaataaatcagg

SEQ ID NO: 410962 - DNA, 33 bp, Homo sapien
tattgaagggagataatcgataaataaatcagg

SEQ ID NO: 410963 - DNA, 33 bp, Homo sapien
cactgtgacctgaacacaaaaacacagaagttt

SEQ ID NO: 410964 - DNA, 33 bp, Homo sapien
cactgtgacctgaacataaaaacacagaagttt

SEQ ID NO: 410965 - DNA, 33 bp, Homo sapien
caataataaattagcaaaaacttgtggagcaca

SEQ ID NO: 410966 - DNA, 33 bp, Homo sapien
caataataaattagcagaaacttgtggagcaca

SEQ ID NO: 410967 - DNA, 33 bp, Homo sapien
cctagaaaggagcaacagtgctaatcaacccac

SEQ ID NO: 410968 - DNA, 33 bp, Homo sapien
cctagaaaggagcaacggtgctaatcaacccac

SEQ ID NO: 410969 - DNA, 33 bp, Homo sapien
gtttttcagaacactcacccagtactgtttaga

SEQ ID NO: 410970 - DNA, 33 bp, Homo sapien
gtttttcagaacactcgcccagtactgtttaga

SEQ ID NO: 410971 - DNA, 33 bp, Homo sapien
ctaactagtggattcaccatgtcttctacctgg

SEQ ID NO: 410972 - DNA, 33 bp, Homo sapien
ctaactagtggattcatcatgtcttctacctgg

SEQ ID NO: 410973 - DNA, 33 bp, Homo sapien
gtccctcctgatgagacggttttaagttggcac

SEQ ID NO: 410974 - DNA, 33 bp, Homo sapien
gtccctcctgatgagatggttttaagttggcac

SEQ ID NO: 410975 - DNA, 33 bp, Homo sapien
gtacttgtgtggagagccggtgtctgttggctg

SEQ ID NO: 410976 - DNA, 33 bp, Homo sapien
gtacttgtgtggagagtcggtgtctgttggctg

SEQ ID NO: 410977 - DNA, 33 bp, Homo sapien
ccttcccttccagagaataacaatataatagtt

SEQ ID NO: 410978 - DNA, 33 bp, Homo sapien
ccttcccttccagagagtaacaatataatagtt

SEQ ID NO: 410979 - DNA, 33 bp, Homo sapien
ataggatgagaaaaaaagctaagcacacataaa

SEQ ID NO: 410980 - DNA, 33 bp, Homo sapien
ataggatgagaaaaaaggctaagcacacataaa

SEQ ID NO: 410981 - DNA, 33 bp, Homo sapien
tatctttgcaatccaaacgttcctcttcgttta

SEQ ID NO: 410982 - DNA, 33 bp, Homo sapien
tatctttgcaatccaagcgttcctcttcgttta

SEQ ID NO: 410983 - DNA, 33 bp, Homo sapien
gagaaaatccaaaaaccgatcactgctaagctc

SEQ ID NO: 410984 - DNA, 33 bp, Homo sapien
gagaaaatccaaaaactgatcactgctaagctc

SEQ ID NO: 410985 - DNA, 33 bp, Homo sapien
gaagctcgctgaatcacgttggtgggaagctca

SEQ ID NO: 410986 - DNA, 33 bp, Homo sapien
gaagctcgctgaatcaggttggtgggaagctca

SEQ ID NO: 410987 - DNA, 33 bp, Homo sapien
ccaagactgagacaccaatttcagcatgcccag

SEQ ID NO: 410988 - DNA, 33 bp, Homo sapien
ccaagactgagacaccgatttcagcatgcccag

SEQ ID NO: 410989 - DNA, 33 bp, Homo sapien
gtcttggggcccaggactcagtgtttaatatct

SEQ ID NO: 410990 - DNA, 33 bp, Homo sapien
gtcttggggcccaggagtcagtgtttaatatct

SEQ ID NO: 410991 - DNA, 33 bp, Homo sapien
catgggtaagacagaaatgcttacaagttcctt

SEQ ID NO: 410992 - DNA, 33 bp, Homo sapien
catgggtaagacagaagtgcttacaagttcctt

SEQ ID NO: 410993 - DNA, 33 bp, Homo sapien
ataatggtgaaagaaaagtgcatgcaataaata

SEQ ID NO: 410994 - DNA, 33 bp, Homo sapien
ataatggtgaaagaaaggtgcatgcaataaata

SEQ ID NO: 410995 - DNA, 33 bp, Homo sapien
tcacctcccaaatatagccatgcgattagatta

SEQ ID NO: 410996 - DNA, 33 bp, Homo sapien
tcacctcccaaatatatccatgcgattagatta

SEQ ID NO: 410997 - DNA, 33 bp, Homo sapien
tggtggtgcacagtaacaacggagagattgggc

SEQ ID NO: 410998 - DNA, 33 bp, Homo sapien
tggtggtgcacagtaataacggagagattgggc

SEQ ID NO: 410999 - DNA, 33 bp, Homo sapien
tacagcaggaacaaatgagggtgatggggaaat

SEQ ID NO: 411000 - DNA, 33 bp, Homo sapien
tacagcaggaacaaattagggtgatggggaaat

SEQ ID NO: 411001 - DNA, 33 bp, Homo sapien
acacttaactcacttcaatcttctaaatacgtg

SEQ ID NO: 411002 - DNA, 33 bp, Homo sapien
acacttaactcacttccatcttctaaatacgtg

SEQ ID NO: 411003 - DNA, 33 bp, Homo sapien
gtactggatataagtcccaggaaagtcggcctt

SEQ ID NO: 411004 - DNA, 33 bp, Homo sapien
gtactggatataagtcgcaggaaagtcggcctt

SEQ ID NO: 411005 - DNA, 33 bp, Homo sapien
ccaagaagcttgaacacaagaaactggctcctt

SEQ ID NO: 411006 - DNA, 33 bp, Homo sapien
ccaagaagcttgaacataagaaactggctcctt

SEQ ID NO: 411007 - DNA, 33 bp, Homo sapien
tgagttgccagaaaaccaaaggaatgaaaagtg

SEQ ID NO: 411008 - DNA, 33 bp, Homo sapien
tgagttgccagaaaactaaaggaatgaaaagtg

SEQ ID NO: 411009 - DNA, 33 bp, Homo sapien
tgatcagtggtaaccacgaaaatcagcatgtga

SEQ ID NO: 411010 - DNA, 33 bp, Homo sapien
tgatcagtggtaaccatgaaaatcagcatgtga

SEQ ID NO: 411011 - DNA, 33 bp, Homo sapien
caggcctttgtggttgcatcctgttcacataaa

SEQ ID NO: 411012 - DNA, 33 bp, Homo sapien
caggcctttgtggttgtatcctgttcacataaa

SEQ ID NO: 411013 - DNA, 33 bp, Homo sapien
tggctggatgatcaagccactaaggtcaaaggt

SEQ ID NO: 411014 - DNA, 33 bp, Homo sapien
tggctggatgatcaagtcactaaggtcaaaggt

SEQ ID NO: 411015 - DNA, 33 bp, Homo sapien
ccacacgtgaaggcacagagctttctggaaaac

SEQ ID NO: 411016 - DNA, 33 bp, Homo sapien
ccacacgtgaaggcacggagctttctggaaaac

SEQ ID NO: 411017 - DNA, 33 bp, Homo sapien
cacccatgttttattacgatgggggcttcagaa

SEQ ID NO: 411018 - DNA, 33 bp, Homo sapien
cacccatgttttattatgatgggggcttcagaa

SEQ ID NO: 411019 - DNA, 33 bp, Homo sapien
gaaaatgttagaactacgctttatgcccatgga

SEQ ID NO: 411020 - DNA, 33 bp, Homo sapien
gaaaatgttagaactaggctttatgcccatgga

SEQ ID NO: 411021 - DNA, 33 bp, Homo sapien
aaaatgtaactacttaacctatcatcaactaga

SEQ ID NO: 411022 - DNA, 33 bp, Homo sapien
aaaatgtaactacttagcctatcatcaactaga

SEQ ID NO: 411023 - DNA, 33 bp, Homo sapien
tcccagtagaaaaaaaactcatggtgaggccag

SEQ ID NO: 411024 - DNA, 33 bp, Homo sapien
tcccagtagaaaaaaatctcatggtgaggccag

SEQ ID NO: 411025 - DNA, 33 bp, Homo sapien
gctgggcaaattttaacgtttcattgttggttt

SEQ ID NO: 411026 - DNA, 33 bp, Homo sapien
gctgggcaaattttaatgtttcattgttggttt

SEQ ID NO: 411027 - DNA, 33 bp, Homo sapien
cctggccatgttgccacgggaaatagttaaagt

SEQ ID NO: 411028 - DNA, 33 bp, Homo sapien
cctggccatgttgccaggggaaatagttaaagt

SEQ ID NO: 411029 - DNA, 33 bp, Homo sapien
gggaacccacatatcacctaattaaagcaagca

SEQ ID NO: 411030 - DNA, 33 bp, Homo sapien
gggaacccacatatcatctaattaaagcaagca

SEQ ID NO: 411031 - DNA, 33 bp, Homo sapien
tttgatccctggagaaaaggtatacaatacttt

SEQ ID NO: 411032 - DNA, 33 bp, Homo sapien
tttgatccctggagaacaggtatacaatacttt

SEQ ID NO: 411033 - DNA, 33 bp, Homo sapien
ggctcaaagggatgaaaagtcttgctcagggcc

SEQ ID NO: 411034 - DNA, 33 bp, Homo sapien
ggctcaaagggatgaagagtcttgctcagggcc

SEQ ID NO: 411035 - DNA, 33 bp, Homo sapien
ggaaggcataagaagcaataagcacattgcacc

SEQ ID NO: 411036 - DNA, 33 bp, Homo sapien
ggaaggcataagaagcgataagcacattgcacc

SEQ ID NO: 411037 - DNA, 33 bp, Homo sapien
agaccctcggatacaccacaacttaaggaaaac

SEQ ID NO: 411038 - DNA, 33 bp, Homo sapien
agaccctcggatacacgacaacttaaggaaaac

SEQ ID NO: 411039 - DNA, 33 bp, Homo sapien
gagaacgtgaggctcgcaactgttaggagactt

SEQ ID NO: 411040 - DNA, 33 bp, Homo sapien
gagaacgtgaggctcggaactgttaggagactt

SEQ ID NO: 411041 - DNA, 33 bp, Homo sapien
tgaaaatatctcttcaaacaccctccaccgttg

SEQ ID NO: 411042 - DNA, 33 bp, Homo sapien
tgaaaatatctcttcatacaccctccaccgttg

SEQ ID NO: 411043 - DNA, 33 bp, Homo sapien
catggggttcagattagagtatggctctccaga

SEQ ID NO: 411044 - DNA, 33 bp, Homo sapien
catggggttcagattatagtatggctctccaga

SEQ ID NO: 411045 - DNA, 33 bp, Homo sapien
gattcccatgaatccacgagcatcatagccatg

SEQ ID NO: 411046 - DNA, 33 bp, Homo sapien
gattcccatgaatccatgagcatcatagccatg

SEQ ID NO: 411047 - DNA, 33 bp, Homo sapien
agttgcgtgttgtggccaatgaggttctgaagt

SEQ ID NO: 411048 - DNA, 33 bp, Homo sapien
agttgcgtgttgtggctaatgaggttctgaagt

SEQ ID NO: 411049 - DNA, 33 bp, Homo sapien
gagtcaaggacccgtcacataaagctgcataaa

SEQ ID NO: 411050 - DNA, 33 bp, Homo sapien
gagtcaaggacccgtcgcataaagctgcataaa

SEQ ID NO: 411051 - DNA, 33 bp, Homo sapien
tttaggtctgtaaaaaaccagtgacattgacat

SEQ ID NO: 411052 - DNA, 33 bp, Homo sapien
tttaggtctgtaaaaacccagtgacattgacat

SEQ ID NO: 411053 - DNA, 33 bp, Homo sapien
cctgcgtcctggaccccagaggtgcaacctgac

SEQ ID NO: 411054 - DNA, 33 bp, Homo sapien
cctgcgtcctggaccctagaggtgcaacctgac

SEQ ID NO: 411055 - DNA, 33 bp, Homo sapien
tgtccttgctctcccccacttttggagcctttg

SEQ ID NO: 411056 - DNA, 33 bp, Homo sapien
tgtccttgctctccccgacttttggagcctttg

SEQ ID NO: 411057 - DNA, 33 bp, Homo sapien
acatcaaagcagaccacgagcagggttagcggt

SEQ ID NO: 411058 - DNA, 33 bp, Homo sapien
acatcaaagcagaccatgagcagggttagcggt

SEQ ID NO: 411059 - DNA, 33 bp, Homo sapien
agactgaaagagggaaaccgcaagtcagaattc

SEQ ID NO: 411060 - DNA, 33 bp, Homo sapien
agactgaaagagggaacccgcaagtcagaattc

SEQ ID NO: 411061 - DNA, 33 bp, Homo sapien
actcaggaagcacttgaaatggcctggaaatca

SEQ ID NO: 411062 - DNA, 33 bp, Homo sapien
actcaggaagcacttggaatggcctggaaatca

SEQ ID NO: 411063 - DNA, 33 bp, Homo sapien
ccggttttgtcctagaaaggatatagctgaaga

SEQ ID NO: 411064 - DNA, 33 bp, Homo sapien
ccggttttgtcctagacaggatatagctgaaga

SEQ ID NO: 411065 - DNA, 33 bp, Homo sapien
gactggcatgaataaaagcagaggccaggcgtg

SEQ ID NO: 411066 - DNA, 33 bp, Homo sapien
gactggcatgaataaaggcagaggccaggcgtg

SEQ ID NO: 411067 - DNA, 33 bp, Homo sapien
attatgtggtcctaagactgaaatgaggccacg

SEQ ID NO: 411068 - DNA, 33 bp, Homo sapien
attatgtggtcctaaggctgaaatgaggccacg

SEQ ID NO: 411069 - DNA, 33 bp, Homo sapien
aaacacaccatcggaacaacaaaccctcaggtc

SEQ ID NO: 411070 - DNA, 33 bp, Homo sapien
aaacacaccatcggaagaacaaaccctcaggtc

SEQ ID NO: 411071 - DNA, 33 bp, Homo sapien
cttccacactttgagcacattcactctgcagtt

SEQ ID NO: 411072 - DNA, 33 bp, Homo sapien
cttccacactttgagcgcattcactctgcagtt

SEQ ID NO: 411073 - DNA, 33 bp, Homo sapien
caaagtgaagtgatgcccttttgatggtaaaca

SEQ ID NO: 411074 - DNA, 33 bp, Homo sapien
caaagtgaagtgatgctcttttgatggtaaaca

SEQ ID NO: 411075 - DNA, 33 bp, Homo sapien
aatttttggtggggaaatacaatgtgatgttta

SEQ ID NO: 411076 - DNA, 33 bp, Homo sapien
aatttttggtggggaagtacaatgtgatgttta

SEQ ID NO: 411077 - DNA, 33 bp, Homo sapien
cctcctcgtcctctaaatcaggtgaggccatag

SEQ ID NO: 411078 - DNA, 33 bp, Homo sapien
cctcctcgtcctctaattcaggtgaggccatag

SEQ ID NO: 411079 - DNA, 33 bp, Homo sapien
ttagtaacaaacattccatgctggttgcctgtt

SEQ ID NO: 411080 - DNA, 33 bp, Homo sapien
ttagtaacaaacattctatgctggttgcctgtt

SEQ ID NO: 411081 - DNA, 33 bp, Homo sapien
ttcccttgctgcccctcacctggtttcgaggct

SEQ ID NO: 411082 - DNA, 33 bp, Homo sapien
ttcccttgctgccccttacctggtttcgaggct

SEQ ID NO: 411083 - DNA, 33 bp, Homo sapien
agatgttcttgagagacgtggggagcaggggcc

SEQ ID NO: 411084 - DNA, 33 bp, Homo sapien
agatgttcttgagagatgtggggagcaggggcc

SEQ ID NO: 411085 - DNA, 33 bp, Homo sapien
aggtatgagaacaccccggagattctgatggag

SEQ ID NO: 411086 - DNA, 33 bp, Homo sapien
aggtatgagaacaccctggagattctgatggag

SEQ ID NO: 411087 - DNA, 33 bp, Homo sapien
ggcgaagcttttgggggactcatctattcattt

SEQ ID NO: 411088 - DNA, 33 bp, Homo sapien
ggcgaagcttttggggtactcatctattcattt

SEQ ID NO: 411089 - DNA, 33 bp, Homo sapien
ttcccctgcagacatcaacatcactttgcttgc

SEQ ID NO: 411090 - DNA, 33 bp, Homo sapien
ttcccctgcagacatcgacatcactttgcttgc

SEQ ID NO: 411091 - DNA, 33 bp, Homo sapien
aataatttaacaagcaacaagaaatcaaattgt

SEQ ID NO: 411092 - DNA, 33 bp, Homo sapien
aataatttaacaagcagcaagaaatcaaattgt

SEQ ID NO: 411093 - DNA, 33 bp, Homo sapien
ctaactagactccaaccaatgcaagagggataa

SEQ ID NO: 411094 - DNA, 33 bp, Homo sapien
ctaactagactccaacgaatgcaagagggataa

SEQ ID NO: 411095 - DNA, 33 bp, Homo sapien
gcggaagcttgcttgaataatgaaagataatca

SEQ ID NO: 411096 - DNA, 33 bp, Homo sapien
gcggaagcttgcttgagtaatgaaagataatca

SEQ ID NO: 411097 - DNA, 33 bp, Homo sapien
tgatgcctgccactcaatagatgctagttcttc

SEQ ID NO: 411098 - DNA, 33 bp, Homo sapien
tgatgcctgccactcagtagatgctagttcttc

SEQ ID NO: 411099 - DNA, 33 bp, Homo sapien
aaactgaaatatggtacctgccaagaacaagcc

SEQ ID NO: 411100 - DNA, 33 bp, Homo sapien
aaactgaaatatggtatctgccaagaacaagcc

SEQ ID NO: 411101 - DNA, 33 bp, Homo sapien
cgttttctaattgtgcaatgtaattttcttttt

SEQ ID NO: 411102 - DNA, 33 bp, Homo sapien
cgttttctaattgtgctatgtaattttcttttt

SEQ ID NO: 411103 - DNA, 33 bp, Homo sapien
aacaagtctggcagaaaaagtcacatttaaagg

SEQ ID NO: 411104 - DNA, 33 bp, Homo sapien
aacaagtctggcagaagaagtcacatttaaagg

SEQ ID NO: 411105 - DNA, 33 bp, Homo sapien
ctaagcttctgtacaacgagtttgactgcctga

SEQ ID NO: 411106 - DNA, 33 bp, Homo sapien
ctaagcttctgtacaaggagtttgactgcctga

SEQ ID NO: 411107 - DNA, 33 bp, Homo sapien
tgagcaattgctctggaactttaaagacctgga

SEQ ID NO: 411108 - DNA, 33 bp, Homo sapien
tgagcaattgctctgggactttaaagacctgga

SEQ ID NO: 411109 - DNA, 33 bp, Homo sapien
tctctcaccccataaaactccagggcgtcatcc

SEQ ID NO: 411110 - DNA, 33 bp, Homo sapien
tctctcaccccataaatctccagggcgtcatcc

SEQ ID NO: 411111 - DNA, 33 bp, Homo sapien
gtattccttgcttttaaaaagaatgcctcacca

SEQ ID NO: 411112 - DNA, 33 bp, Homo sapien
gtattccttgcttttagaaagaatgcctcacca

SEQ ID NO: 411113 - DNA, 33 bp, Homo sapien
tacaccggagtggacggcatatggtcatcatcc

SEQ ID NO: 411114 - DNA, 33 bp, Homo sapien
tacaccggagtggacgtcatatggtcatcatcc

SEQ ID NO: 411115 - DNA, 33 bp, Homo sapien
tctaccaaaaagtgaacagaggtgattaggtaa

SEQ ID NO: 411116 - DNA, 33 bp, Homo sapien
tctaccaaaaagtgaatagaggtgattaggtaa

SEQ ID NO: 411117 - DNA, 33 bp, Homo sapien
aacttaatcctggagacgtagacattttatcta

SEQ ID NO: 411118 - DNA, 33 bp, Homo sapien
aacttaatcctggagatgtagacattttatcta

SEQ ID NO: 411119 - DNA, 33 bp, Homo sapien
aggaaatggtttttcaactatccagtactggaa

SEQ ID NO: 411120 - DNA, 33 bp, Homo sapien
aggaaatggtttttcagctatccagtactggaa

SEQ ID NO: 411121 - DNA, 33 bp, Homo sapien
gtgtagagggcatctgcacttaattgtgttttt

SEQ ID NO: 411122 - DNA, 33 bp, Homo sapien
gtgtagagggcatctgtacttaattgtgttttt

SEQ ID NO: 411123 - DNA, 33 bp, Homo sapien
agaaagggcacagtccaagaagaagggttgttg

SEQ ID NO: 411124 - DNA, 33 bp, Homo sapien
agaaagggcacagtccgagaagaagggttgttg

SEQ ID NO: 411125 - DNA, 33 bp, Homo sapien
ttgccaagttgaatgaaccagctagaaacgcca

SEQ ID NO: 411126 - DNA, 33 bp, Homo sapien
ttgccaagttgaatgagccagctagaaacgcca

SEQ ID NO: 411127 - DNA, 33 bp, Homo sapien
actttctgaaaccaaccgagggccacgtccaat

SEQ ID NO: 411128 - DNA, 33 bp, Homo sapien
actttctgaaaccaactgagggccacgtccaat

SEQ ID NO: 411129 - DNA, 33 bp, Homo sapien
aaggatcaaaataggaaagaagacacctgcccc

SEQ ID NO: 411130 - DNA, 33 bp, Homo sapien
aaggatcaaaataggagagaagacacctgcccc

SEQ ID NO: 411131 - DNA, 33 bp, Homo sapien
tcctatgctccctgcaaaaccgtggataactca

SEQ ID NO: 411132 - DNA, 33 bp, Homo sapien
tcctatgctccctgcacaaccgtggataactca

SEQ ID NO: 411133 - DNA, 33 bp, Homo sapien
agtgtgggttctgtcccagcttttgccatctat

SEQ ID NO: 411134 - DNA, 33 bp, Homo sapien
agtgtgggttctgtcctagcttttgccatctat

SEQ ID NO: 411135 - DNA, 33 bp, Homo sapien
tgcgccaagtagcaagccaactaatcacaccaa

SEQ ID NO: 411136 - DNA, 33 bp, Homo sapien
tgcgccaagtagcaaggcaactaatcacaccaa

SEQ ID NO: 411137 - DNA, 33 bp, Homo sapien
gagatctgggacctgtaaaacccaagcgtggtc

SEQ ID NO: 411138 - DNA, 33 bp, Homo sapien
gagatctgggacctgttaaacccaagcgtggtc

SEQ ID NO: 411139 - DNA, 33 bp, Homo sapien
ctgcaagatagatcccactttcagagaagttaa

SEQ ID NO: 411140 - DNA, 33 bp, Homo sapien
ctgcaagatagatcccgctttcagagaagttaa

SEQ ID NO: 411141 - DNA, 33 bp, Homo sapien
ccgtggaaatttcttacgggctggtgctgttcc

SEQ ID NO: 411142 - DNA, 33 bp, Homo sapien
ccgtggaaatttcttatgggctggtgctgttcc

SEQ ID NO: 411143 - DNA, 33 bp, Homo sapien
actcctgattttccacaccgagggaggaacgtg

SEQ ID NO: 411144 - DNA, 33 bp, Homo sapien
actcctgattttccacgccgagggaggaacgtg

SEQ ID NO: 411145 - DNA, 33 bp, Homo sapien
tccatcagcaaaaacaagtgaaaggctgcaact

SEQ ID NO: 411146 - DNA, 33 bp, Homo sapien
tccatcagcaaaaacacgtgaaaggctgcaact

SEQ ID NO: 411147 - DNA, 33 bp, Homo sapien
ggagagactttgctcccgatggaaatggctaca

SEQ ID NO: 411148 - DNA, 33 bp, Homo sapien
ggagagactttgctcctgatggaaatggctaca

SEQ ID NO: 411149 - DNA, 33 bp, Homo sapien
accagcctgggttagcacaaggagtaaatcctc

SEQ ID NO: 411150 - DNA, 33 bp, Homo sapien
accagcctgggttagcgcaaggagtaaatcctc

SEQ ID NO: 411151 - DNA, 33 bp, Homo sapien
tgggctacagaatggccatgtgacttatttaaa

SEQ ID NO: 411152 - DNA, 33 bp, Homo sapien
tgggctacagaatggctatgtgacttatttaaa

SEQ ID NO: 411153 - DNA, 33 bp, Homo sapien
tctgggtactctctgaccttgtaggaatctatc

SEQ ID NO: 411154 - DNA, 33 bp, Homo sapien
tctgggtactctctgatcttgtaggaatctatc

SEQ ID NO: 411155 - DNA, 33 bp, Homo sapien
caataaaatactctgacggctgacctaggaaag

SEQ ID NO: 411156 - DNA, 33 bp, Homo sapien
caataaaatactctgatggctgacctaggaaag

SEQ ID NO: 411157 - DNA, 33 bp, Homo sapien
tataagtggtgatagacggtcccctaaattgag

SEQ ID NO: 411158 - DNA, 33 bp, Homo sapien
tataagtggtgatagatggtcccctaaattgag

SEQ ID NO: 411159 - DNA, 33 bp, Homo sapien
cagaaaaacatcacagcccacaggtcaaaagac

SEQ ID NO: 411160 - DNA, 33 bp, Homo sapien
cagaaaaacatcacagtccacaggtcaaaagac

SEQ ID NO: 411161 - DNA, 33 bp, Homo sapien
ctgattgctcagctcaaagaaaggggaggccca

SEQ ID NO: 411162 - DNA, 33 bp, Homo sapien
ctgattgctcagctcagagaaaggggaggccca

SEQ ID NO: 411163 - DNA, 33 bp, Homo sapien
caattagtaaacctgaactgatggctctatata

SEQ ID NO: 411164 - DNA, 33 bp, Homo sapien
caattagtaaacctgatctgatggctctatata

SEQ ID NO: 411165 - DNA, 33 bp, Homo sapien
cctttttaatttttcaaaagaagtgtggatttg

SEQ ID NO: 411166 - DNA, 33 bp, Homo sapien
cctttttaatttttcagaagaagtgtggatttg

SEQ ID NO: 411167 - DNA, 33 bp, Homo sapien
aaatgtctagtggtaacgcaaaatattgcagtc

SEQ ID NO: 411168 - DNA, 33 bp, Homo sapien
aaatgtctagtggtaatgcaaaatattgcagtc

SEQ ID NO: 411169 - DNA, 33 bp, Homo sapien
taacttgattttctgaaatggcgaataactctt

SEQ ID NO: 411170 - DNA, 33 bp, Homo sapien
taacttgattttctgagatggcgaataactctt

SEQ ID NO: 411171 - DNA, 33 bp, Homo sapien
tcatcctgtaatcaagacagctgcgccggattc

SEQ ID NO: 411172 - DNA, 33 bp, Homo sapien
tcatcctgtaatcaagtcagctgcgccggattc

SEQ ID NO: 411173 - DNA, 33 bp, Homo sapien
aataaacttataataaagctgccagagccccag

SEQ ID NO: 411174 - DNA, 33 bp, Homo sapien
aataaacttataataaggctgccagagccccag

SEQ ID NO: 411175 - DNA, 33 bp, Homo sapien
gaacctgagatggagccgaagggagctttgcag

SEQ ID NO: 411176 - DNA, 33 bp, Homo sapien
gaacctgagatggagctgaagggagctttgcag

SEQ ID NO: 411177 - DNA, 33 bp, Homo sapien
gatggcaacggctggaccctagctaaggtatca

SEQ ID NO: 411178 - DNA, 33 bp, Homo sapien
gatggcaacggctggatcctagctaaggtatca

SEQ ID NO: 411179 - DNA, 33 bp, Homo sapien
gaatggatctattctcccttaactgtgtttgat

SEQ ID NO: 411180 - DNA, 33 bp, Homo sapien
gaatggatctattctctcttaactgtgtttgat

SEQ ID NO: 411181 - DNA, 33 bp, Homo sapien
cttcagtaggaaaaaaagcatgcacaaattatt

SEQ ID NO: 411182 - DNA, 33 bp, Homo sapien
cttcagtaggaaaaaaggcatgcacaaattatt

SEQ ID NO: 411183 - DNA, 33 bp, Homo sapien
gaagaaggatgtctgccatcttagggatctaaa

SEQ ID NO: 411184 - DNA, 33 bp, Homo sapien
gaagaaggatgtctgctatcttagggatctaaa

SEQ ID NO: 411185 - DNA, 33 bp, Homo sapien
acccaggctactcatacactcatgagaaataat

SEQ ID NO: 411186 - DNA, 33 bp, Homo sapien
acccaggctactcatagactcatgagaaataat

SEQ ID NO: 411187 - DNA, 33 bp, Homo sapien
tcatggagtgaaattaagctggatcaacccaga

SEQ ID NO: 411188 - DNA, 33 bp, Homo sapien
tcatggagtgaaattacgctggatcaacccaga

SEQ ID NO: 411189 - DNA, 33 bp, Homo sapien
aggtcatattgataaacaccactcacacaaaca

SEQ ID NO: 411190 - DNA, 33 bp, Homo sapien
aggtcatattgataaataccactcacacaaaca

SEQ ID NO: 411191 - DNA, 33 bp, Homo sapien
gcagcagatgtggcaaatcttccagagtagagg

SEQ ID NO: 411192 - DNA, 33 bp, Homo sapien
gcagcagatgtggcaagtcttccagagtagagg

SEQ ID NO: 411193 - DNA, 33 bp, Homo sapien
ggctattagcatggagaaaaccatctgttattt

SEQ ID NO: 411194 - DNA, 33 bp, Homo sapien
ggctattagcatggaggaaaccatctgttattt

SEQ ID NO: 411195 - DNA, 33 bp, Homo sapien
aagactctcttcaaaaaaacaaaaaaagcagct

SEQ ID NO: 411196 - DNA, 33 bp, Homo sapien
aagactctcttcaaaagaacaaaaaaagcagct

SEQ ID NO: 411197 - DNA, 33 bp, Homo sapien
atggaatctgctgtaaacccagaactggaaaga

SEQ ID NO: 411198 - DNA, 33 bp, Homo sapien
atggaatctgctgtaagcccagaactggaaaga

SEQ ID NO: 411199 - DNA, 33 bp, Homo sapien
tacacagggtgagaaacccatgatccctggcct

SEQ ID NO: 411200 - DNA, 33 bp, Homo sapien
tacacagggtgagaaatccatgatccctggcct

SEQ ID NO: 411201 - DNA, 33 bp, Homo sapien
ggtagtggaatcaagaagttgctgtttttgcta

SEQ ID NO: 411202 - DNA, 33 bp, Homo sapien
ggtagtggaatcaagaggttgctgtttttgcta

SEQ ID NO: 411203 - DNA, 33 bp, Homo sapien
ctttttaatgacgttgaagtttgcttctcagaa

SEQ ID NO: 411204 - DNA, 33 bp, Homo sapien
ctttttaatgacgttgcagtttgcttctcagaa

SEQ ID NO: 411205 - DNA, 33 bp, Homo sapien
tttcttagtttcctcgcatatatggaaggaaat

SEQ ID NO: 411206 - DNA, 33 bp, Homo sapien
tttcttagtttcctcgtatatatggaaggaaat

SEQ ID NO: 411207 - DNA, 33 bp, Homo sapien
catgaggaggctgtaaccactgaaataggccag

SEQ ID NO: 411208 - DNA, 33 bp, Homo sapien
catgaggaggctgtaatcactgaaataggccag

SEQ ID NO: 411209 - DNA, 33 bp, Homo sapien
agctgcattgtttaggacaggggtgagacaact

SEQ ID NO: 411210 - DNA, 33 bp, Homo sapien
agctgcattgtttagggcaggggtgagacaact

SEQ ID NO: 411211 - DNA, 33 bp, Homo sapien
acaatagttgagatacacagtaaagtcagaaaa

SEQ ID NO: 411212 - DNA, 33 bp, Homo sapien
acaatagttgagatacgcagtaaagtcagaaaa

SEQ ID NO: 411213 - DNA, 33 bp, Homo sapien
taaggctatgtgatggccatgctgttaagggga

SEQ ID NO: 411214 - DNA, 33 bp, Homo sapien
taaggctatgtgatggtcatgctgttaagggga

SEQ ID NO: 411215 - DNA, 33 bp, Homo sapien
cggaatctcatgaaaccggaaagatctggggga

SEQ ID NO: 411216 - DNA, 33 bp, Homo sapien
cggaatctcatgaaactggaaagatctggggga

SEQ ID NO: 411217 - DNA, 33 bp, Homo sapien
ctgaactagagctaacgatgacagccaacattc

SEQ ID NO: 411218 - DNA, 33 bp, Homo sapien
ctgaactagagctaactatgacagccaacattc

SEQ ID NO: 411219 - DNA, 33 bp, Homo sapien
cactgagcattcactccgagctaagcatgatgc

SEQ ID NO: 411220 - DNA, 33 bp, Homo sapien
cactgagcattcactctgagctaagcatgatgc

SEQ ID NO: 411221 - DNA, 33 bp, Homo sapien
taattggcaaagttatcacctttcttccgaggc

SEQ ID NO: 411222 - DNA, 33 bp, Homo sapien
taattggcaaagttattacctttcttccgaggc

SEQ ID NO: 411223 - DNA, 33 bp, Homo sapien
aattcacaaacaatgcaaaagccaaatgtaatc

SEQ ID NO: 411224 - DNA, 33 bp, Homo sapien
aattcacaaacaatgcgaaagccaaatgtaatc

SEQ ID NO: 411225 - DNA, 33 bp, Homo sapien
acttagggatggggaacaagatatgcgtttgga

SEQ ID NO: 411226 - DNA, 33 bp, Homo sapien
acttagggatggggaataagatatgcgtttgga

SEQ ID NO: 411227 - DNA, 33 bp, Homo sapien
ttctctctgtacatacccgctgctagctgtcgc

SEQ ID NO: 411228 - DNA, 33 bp, Homo sapien
ttctctctgtacatacgcgctgctagctgtcgc

SEQ ID NO: 411229 - DNA, 33 bp, Homo sapien
accagggaaattacagaagtaactggataagag

SEQ ID NO: 411230 - DNA, 33 bp, Homo sapien
accagggaaattacaggagtaactggataagag

SEQ ID NO: 411231 - DNA, 33 bp, Homo sapien
tcagcttactttgagaacaagttaaagtcttgc

SEQ ID NO: 411232 - DNA, 33 bp, Homo sapien
tcagcttactttgagagcaagttaaagtcttgc

SEQ ID NO: 411233 - DNA, 33 bp, Homo sapien
cagacatctttttctgcatttggagtgatttcc

SEQ ID NO: 411234 - DNA, 33 bp, Homo sapien
cagacatctttttctgtatttggagtgatttcc

SEQ ID NO: 411235 - DNA, 33 bp, Homo sapien
tgtattcttcaatggccagttgggtgttatgtt

SEQ ID NO: 411236 - DNA, 33 bp, Homo sapien
tgtattcttcaatggctagttgggtgttatgtt

SEQ ID NO: 411237 - DNA, 33 bp, Homo sapien
gtgctacacacttttaaactagcagatctcatc

SEQ ID NO: 411238 - DNA, 33 bp, Homo sapien
gtgctacacacttttatactagcagatctcatc

SEQ ID NO: 411239 - DNA, 33 bp, Homo sapien
gcaaaaagcctagctacattgcgcccctgcttt

SEQ ID NO: 411240 - DNA, 33 bp, Homo sapien
gcaaaaagcctagctatattgcgcccctgcttt

SEQ ID NO: 411241 - DNA, 33 bp, Homo sapien
ctggatgctgtcttaaggttagttgctaccaaa

SEQ ID NO: 411242 - DNA, 33 bp, Homo sapien
ctggatgctgtcttaatgttagttgctaccaaa

SEQ ID NO: 411243 - DNA, 33 bp, Homo sapien
tgagtgatgctttggacgttatctggatgctgt

SEQ ID NO: 411244 - DNA, 33 bp, Homo sapien
tgagtgatgctttggatgttatctggatgctgt

SEQ ID NO: 411245 - DNA, 33 bp, Homo sapien
cgagtgaagctgagaaagaagggacaaaaatca

SEQ ID NO: 411246 - DNA, 33 bp, Homo sapien
cgagtgaagctgagaaggaagggacaaaaatca

SEQ ID NO: 411247 - DNA, 33 bp, Homo sapien
tgttatttataatagcaaaatcaaagtctgtgc

SEQ ID NO: 411248 - DNA, 33 bp, Homo sapien
tgttatttataatagcgaaatcaaagtctgtgc

SEQ ID NO: 411249 - DNA, 33 bp, Homo sapien
tagggaagtgcttacacatcaatctgtacatgt

SEQ ID NO: 411250 - DNA, 33 bp, Homo sapien
tagggaagtgcttacatatcaatctgtacatgt

SEQ ID NO: 411251 - DNA, 33 bp, Homo sapien
cctaccattgctaggaagtctcatcctgtaagc

SEQ ID NO: 411252 - DNA, 33 bp, Homo sapien
cctaccattgctaggaggtctcatcctgtaagc

SEQ ID NO: 411253 - DNA, 33 bp, Homo sapien
gaaattgaatgatacaagcaaagcctttagctc

SEQ ID NO: 411254 - DNA, 33 bp, Homo sapien
gaaattgaatgatacatgcaaagcctttagctc

SEQ ID NO: 411255 - DNA, 33 bp, Homo sapien
cagctctggagtaggagatggcattatttttga

SEQ ID NO: 411256 - DNA, 33 bp, Homo sapien
cagctctggagtaggatatggcattatttttga

SEQ ID NO: 411257 - DNA, 33 bp, Homo sapien
cactgaatattccagaaataaccctgagcacgc

SEQ ID NO: 411258 - DNA, 33 bp, Homo sapien
cactgaatattccagagataaccctgagcacgc

SEQ ID NO: 411259 - DNA, 33 bp, Homo sapien
ccttctactgttacgcaaaataaagatgcagga

SEQ ID NO: 411260 - DNA, 33 bp, Homo sapien
ccttctactgttacgcgaaataaagatgcagga

SEQ ID NO: 411261 - DNA, 33 bp, Homo sapien
gtcaggcttggtcacaaatgaaagctgaggatg

SEQ ID NO: 411262 - DNA, 33 bp, Homo sapien
gtcaggcttggtcacagatgaaagctgaggatg

SEQ ID NO: 411263 - DNA, 33 bp, Homo sapien
ctttgtttaaaaaaagaaatctgctgaaggttt

SEQ ID NO: 411264 - DNA, 33 bp, Homo sapien
ctttgtttaaaaaaaggaatctgctgaaggttt

SEQ ID NO: 411265 - DNA, 33 bp, Homo sapien
tgggcttttccactaccgctcaaaatagtaata

SEQ ID NO: 411266 - DNA, 33 bp, Homo sapien
tgggcttttccactactgctcaaaatagtaata

SEQ ID NO: 411267 - DNA, 33 bp, Homo sapien
aaatttcatccattcaaagacattacacaacca

SEQ ID NO: 411268 - DNA, 33 bp, Homo sapien
aaatttcatccattcagagacattacacaacca

SEQ ID NO: 411269 - DNA, 33 bp, Homo sapien
tccagcacactcaatccatgacattaaagttac

SEQ ID NO: 411270 - DNA, 33 bp, Homo sapien
tccagcacactcaatcgatgacattaaagttac

SEQ ID NO: 411271 - DNA, 33 bp, Homo sapien
actcttaccacaaagcgcaagtcagcttggcct

SEQ ID NO: 411272 - DNA, 33 bp, Homo sapien
actcttaccacaaagctcaagtcagcttggcct

SEQ ID NO: 411273 - DNA, 33 bp, Homo sapien
gttatatatctttagccaattaattgagtgaaa

SEQ ID NO: 411274 - DNA, 33 bp, Homo sapien
gttatatatctttagcgaattaattgagtgaaa

SEQ ID NO: 411275 - DNA, 33 bp, Homo sapien
aaaccaagtctctcttgaacttccatcagattg

SEQ ID NO: 411276 - DNA, 33 bp, Homo sapien
aaaccaagtctctctttaacttccatcagattg

SEQ ID NO: 411277 - DNA, 33 bp, Homo sapien
acacatgctacttgtacaaaatttagatacaca

SEQ ID NO: 411278 - DNA, 33 bp, Homo sapien
acacatgctacttgtagaaaatttagatacaca

SEQ ID NO: 411279 - DNA, 33 bp, Homo sapien
gtaaaacagtaaggcaatctatgaaatattatc

SEQ ID NO: 411280 - DNA, 33 bp, Homo sapien
gtaaaacagtaaggcagtctatgaaatattatc

SEQ ID NO: 411281 - DNA, 33 bp, Homo sapien
aatgtcgaccaagtcacggggatccatatcttt

SEQ ID NO: 411282 - DNA, 33 bp, Homo sapien
aatgtcgaccaagtcagggggatccatatcttt

SEQ ID NO: 411283 - DNA, 33 bp, Homo sapien
tgcacacacagtagaccgctgaaccctccccat

SEQ ID NO: 411284 - DNA, 33 bp, Homo sapien
tgcacacacagtagacggctgaaccctccccat

SEQ ID NO: 411285 - DNA, 33 bp, Homo sapien
aatggaacctggttgcaagccaaaatccaacgg

SEQ ID NO: 411286 - DNA, 33 bp, Homo sapien
aatggaacctggttgcgagccaaaatccaacgg

SEQ ID NO: 411287 - DNA, 33 bp, Homo sapien
tctctctttgcccacacaatttgtgccagccag

SEQ ID NO: 411288 - DNA, 33 bp, Homo sapien
tctctctttgcccacataatttgtgccagccag

SEQ ID NO: 411289 - DNA, 33 bp, Homo sapien
agacctcctggaagtacctaacggcgggtgagg

SEQ ID NO: 411290 - DNA, 33 bp, Homo sapien
agacctcctggaagtatctaacggcgggtgagg

SEQ ID NO: 411291 - DNA, 33 bp, Homo sapien
tccagttatcaaactaccttaatgaaagagact

SEQ ID NO: 411292 - DNA, 33 bp, Homo sapien
tccagttatcaaactatcttaatgaaagagact

SEQ ID NO: 411293 - DNA, 33 bp, Homo sapien
tatacagttgactctcaaataacaagagtttga

SEQ ID NO: 411294 - DNA, 33 bp, Homo sapien
tatacagttgactctcgaataacaagagtttga

SEQ ID NO: 411295 - DNA, 33 bp, Homo sapien
gaaaagctctgttggcaaagacatctggctcat

SEQ ID NO: 411296 - DNA, 33 bp, Homo sapien
gaaaagctctgttggccaagacatctggctcat

SEQ ID NO: 411297 - DNA, 33 bp, Homo sapien
ctaattagaacccagacagcggagtaacccagg

SEQ ID NO: 411298 - DNA, 33 bp, Homo sapien
ctaattagaacccagatagcggagtaacccagg

SEQ ID NO: 411299 - DNA, 33 bp, Homo sapien
ccatctgcaacatgggcatactagcacatacct

SEQ ID NO: 411300 - DNA, 33 bp, Homo sapien
ccatctgcaacatggggatactagcacatacct

SEQ ID NO: 411301 - DNA, 33 bp, Homo sapien
ttttctaggacttggaatcacaatcttaacagc

SEQ ID NO: 411302 - DNA, 33 bp, Homo sapien
ttttctaggacttggagtcacaatcttaacagc

SEQ ID NO: 411303 - DNA, 33 bp, Homo sapien
agaacgtacatgggtacctggcgtataataagc

SEQ ID NO: 411304 - DNA, 33 bp, Homo sapien
agaacgtacatgggtagctggcgtataataagc

SEQ ID NO: 411305 - DNA, 33 bp, Homo sapien
acagcaggtccacagagaaaatacaggccaact

SEQ ID NO: 411306 - DNA, 33 bp, Homo sapien
acagcaggtccacagataaaatacaggccaact

SEQ ID NO: 411307 - DNA, 33 bp, Homo sapien
gagggttcaataggccaaagccacgtgggagtg

SEQ ID NO: 411308 - DNA, 33 bp, Homo sapien
gagggttcaataggccgaagccacgtgggagtg

SEQ ID NO: 411309 - DNA, 33 bp, Homo sapien
ctatttatgttgatcacaagaaagggagaggag

SEQ ID NO: 411310 - DNA, 33 bp, Homo sapien
ctatttatgttgatcagaagaaagggagaggag

SEQ ID NO: 411311 - DNA, 33 bp, Homo sapien
tgtcctccctattggacgggcctcaggcgctta

SEQ ID NO: 411312 - DNA, 33 bp, Homo sapien
tgtcctccctattggatgggcctcaggcgctta

SEQ ID NO: 411313 - DNA, 33 bp, Homo sapien
ggcctggtactgccagcaaagatgctctcgagc

SEQ ID NO: 411314 - DNA, 33 bp, Homo sapien
ggcctggtactgccagtaaagatgctctcgagc

SEQ ID NO: 411315 - DNA, 33 bp, Homo sapien
cacaggatctgggaccagaaaaaagcttaagaa

SEQ ID NO: 411316 - DNA, 33 bp, Homo sapien
cacaggatctgggaccggaaaaaagcttaagaa

SEQ ID NO: 411317 - DNA, 33 bp, Homo sapien
gatgtcatggcctaacaccctataaacctagct

SEQ ID NO: 411318 - DNA, 33 bp, Homo sapien
gatgtcatggcctaacgccctataaacctagct

SEQ ID NO: 411319 - DNA, 33 bp, Homo sapien
gcgcctggccattagccattattagactattac

SEQ ID NO: 411320 - DNA, 33 bp, Homo sapien
gcgcctggccattagctattattagactattac

SEQ ID NO: 411321 - DNA, 33 bp, Homo sapien
agctggggacaggtaactgacaacggcagagat

SEQ ID NO: 411322 - DNA, 33 bp, Homo sapien
agctggggacaggtaattgacaacggcagagat

SEQ ID NO: 411323 - DNA, 33 bp, Homo sapien
gagcagtagagcatgagagcatggtgcatattt

SEQ ID NO: 411324 - DNA, 33 bp, Homo sapien
gagcagtagagcatgatagcatggtgcatattt

SEQ ID NO: 411325 - DNA, 33 bp, Homo sapien
tggccataacaacaccaaaaaaggtagagaaaa

SEQ ID NO: 411326 - DNA, 33 bp, Homo sapien
tggccataacaacaccgaaaaaggtagagaaaa

SEQ ID NO: 411327 - DNA, 33 bp, Homo sapien
cggatgagatattgctcaatctgggctaataag

SEQ ID NO: 411328 - DNA, 33 bp, Homo sapien
cggatgagatattgcttaatctgggctaataag

SEQ ID NO: 411329 - DNA, 33 bp, Homo sapien
tcaatccaatccgacaagagagacaagagctct

SEQ ID NO: 411330 - DNA, 33 bp, Homo sapien
tcaatccaatccgacaggagagacaagagctct

SEQ ID NO: 411331 - DNA, 33 bp, Homo sapien
ctactttattgaatccccacacaaagctttaaa

SEQ ID NO: 411332 - DNA, 33 bp, Homo sapien
ctactttattgaatcctcacacaaagctttaaa

SEQ ID NO: 411333 - DNA, 33 bp, Homo sapien
ttaccctcagcctgcaaagaaaacatagtctgc

SEQ ID NO: 411334 - DNA, 33 bp, Homo sapien
ttaccctcagcctgcagagaaaacatagtctgc

SEQ ID NO: 411335 - DNA, 33 bp, Homo sapien
aactgcagtgtggacacctcagaacaacactgt

SEQ ID NO: 411336 - DNA, 33 bp, Homo sapien
aactgcagtgtggacatctcagaacaacactgt

SEQ ID NO: 411337 - DNA, 33 bp, Homo sapien
tcttctgagtccatagcagagttttagccccag

SEQ ID NO: 411338 - DNA, 33 bp, Homo sapien
tcttctgagtccataggagagttttagccccag

SEQ ID NO: 411339 - DNA, 33 bp, Homo sapien
tttccagtgttgtaacagaagtcagaaagagaa

SEQ ID NO: 411340 - DNA, 33 bp, Homo sapien
tttccagtgttgtaacggaagtcagaaagagaa

SEQ ID NO: 411341 - DNA, 33 bp, Homo sapien
gaatcactctcgggagaccttgctctctttggc

SEQ ID NO: 411342 - DNA, 33 bp, Homo sapien
gaatcactctcgggagcccttgctctctttggc

SEQ ID NO: 411343 - DNA, 33 bp, Homo sapien
actgaaaaagacgataagtaaagatagatggag

SEQ ID NO: 411344 - DNA, 33 bp, Homo sapien
actgaaaaagacgatacgtaaagatagatggag

SEQ ID NO: 411345 - DNA, 33 bp, Homo sapien
atgcttataacatagaagattgttgaaaacatg

SEQ ID NO: 411346 - DNA, 33 bp, Homo sapien
atgcttataacatagatgattgttgaaaacatg

SEQ ID NO: 411347 - DNA, 33 bp, Homo sapien
gctcacaccacgtggaaaccaaatgaccccaag

SEQ ID NO: 411348 - DNA, 33 bp, Homo sapien
gctcacaccacgtggataccaaatgaccccaag

SEQ ID NO: 411349 - DNA, 33 bp, Homo sapien
gctctttgttttaagacggccatagacagagta

SEQ ID NO: 411350 - DNA, 33 bp, Homo sapien
gctctttgttttaagatggccatagacagagta

SEQ ID NO: 411351 - DNA, 33 bp, Homo sapien
gcaattcctagatgaaaaatgaggcccagagag

SEQ ID NO: 411352 - DNA, 33 bp, Homo sapien
gcaattcctagatgaacaatgaggcccagagag

SEQ ID NO: 411353 - DNA, 33 bp, Homo sapien
tccactacaaagattacggctttaggaaggcaa

SEQ ID NO: 411354 - DNA, 33 bp, Homo sapien
tccactacaaagattatggctttaggaaggcaa

SEQ ID NO: 411355 - DNA, 33 bp, Homo sapien
agaggaaggaactcacaacccactgaggaacac

SEQ ID NO: 411356 - DNA, 33 bp, Homo sapien
agaggaaggaactcacgacccactgaggaacac

SEQ ID NO: 411357 - DNA, 33 bp, Homo sapien
cacttgaagagggcagaatttcagaagttgaag

SEQ ID NO: 411358 - DNA, 33 bp, Homo sapien
cacttgaagagggcaggatttcagaagttgaag

SEQ ID NO: 411359 - DNA, 33 bp, Homo sapien
cttatctcactttttacaaagctgccttctgtc

SEQ ID NO: 411360 - DNA, 33 bp, Homo sapien
cttatctcactttttagaaagctgccttctgtc

SEQ ID NO: 411361 - DNA, 33 bp, Homo sapien
ttggttcccaaaagaaagtgtgattgcttaatg

SEQ ID NO: 411362 - DNA, 33 bp, Homo sapien
ttggttcccaaaagaatgtgtgattgcttaatg

SEQ ID NO: 411363 - DNA, 33 bp, Homo sapien
cactgtaatggctaaagcccgtcagtaaccgtg

SEQ ID NO: 411364 - DNA, 33 bp, Homo sapien
cactgtaatggctaaatcccgtcagtaaccgtg

SEQ ID NO: 411365 - DNA, 33 bp, Homo sapien
caattcccttataagagcatcagtgcaatcact

SEQ ID NO: 411366 - DNA, 33 bp, Homo sapien
caattcccttataagatcatcagtgcaatcact

SEQ ID NO: 411367 - DNA, 33 bp, Homo sapien
attatctcaaaacttacgagggatttcagtact

SEQ ID NO: 411368 - DNA, 33 bp, Homo sapien
attatctcaaaacttatgagggatttcagtact

SEQ ID NO: 411369 - DNA, 33 bp, Homo sapien
gggcgtggtcagggaaataagtctctggaaccc

SEQ ID NO: 411370 - DNA, 33 bp, Homo sapien
gggcgtggtcagggaagtaagtctctggaaccc

SEQ ID NO: 411371 - DNA, 33 bp, Homo sapien
gctggctaggcaagtacgtaatctgcagggcag

SEQ ID NO: 411372 - DNA, 33 bp, Homo sapien
gctggctaggcaagtatgtaatctgcagggcag

SEQ ID NO: 411373 - DNA, 33 bp, Homo sapien
ctgcaaccactagccaatataatggttgccagt

SEQ ID NO: 411374 - DNA, 33 bp, Homo sapien
ctgcaaccactagccagtataatggttgccagt

SEQ ID NO: 411375 - DNA, 33 bp, Homo sapien
cccagagctcaagtataagagtgagacagttct

SEQ ID NO: 411376 - DNA, 33 bp, Homo sapien
cccagagctcaagtatgagagtgagacagttct

SEQ ID NO: 411377 - DNA, 33 bp, Homo sapien
tttctttataaattacaagtcttagtctcagat

SEQ ID NO: 411378 - DNA, 33 bp, Homo sapien
tttctttataaattacgagtcttagtctcagat

SEQ ID NO: 411379 - DNA, 33 bp, Homo sapien
cactgctgtatgccagaaactgtataaaacatg

SEQ ID NO: 411380 - DNA, 33 bp, Homo sapien
cactgctgtatgccaggaactgtataaaacatg

SEQ ID NO: 411381 - DNA, 33 bp, Homo sapien
gctccaagatcatgacacattcttttttctctc

SEQ ID NO: 411382 - DNA, 33 bp, Homo sapien
gctccaagatcatgactcattcttttttctctc

SEQ ID NO: 411383 - DNA, 33 bp, Homo sapien
ttgctcaacgtcacacagtcagaagtggtgcca

SEQ ID NO: 411384 - DNA, 33 bp, Homo sapien
ttgctcaacgtcacacggtcagaagtggtgcca

SEQ ID NO: 411385 - DNA, 33 bp, Homo sapien
ccttcagcagcagtacagggaactccaaatcct

SEQ ID NO: 411386 - DNA, 33 bp, Homo sapien
ccttcagcagcagtacggggaactccaaatcct

SEQ ID NO: 411387 - DNA, 33 bp, Homo sapien
agggtatggaaggacacgaaagcctcccaactt

SEQ ID NO: 411388 - DNA, 33 bp, Homo sapien
agggtatggaaggacatgaaagcctcccaactt

SEQ ID NO: 411389 - DNA, 33 bp, Homo sapien
ttgcttgatctcttaaatgcggggagtaaaaca

SEQ ID NO: 411390 - DNA, 33 bp, Homo sapien
ttgcttgatctcttaagtgcggggagtaaaaca

SEQ ID NO: 411391 - DNA, 33 bp, Homo sapien
aaaggaaagaagctcaggtttccggagtgcctg

SEQ ID NO: 411392 - DNA, 33 bp, Homo sapien
aaaggaaagaagctcatgtttccggagtgcctg

SEQ ID NO: 411393 - DNA, 33 bp, Homo sapien
cacattaaattgcttaagtctcagttcctaaac

SEQ ID NO: 411394 - DNA, 33 bp, Homo sapien
cacattaaattgcttaggtctcagttcctaaac

SEQ ID NO: 411395 - DNA, 33 bp, Homo sapien
aataatctacttcaaccgaaagatttgaggcac

SEQ ID NO: 411396 - DNA, 33 bp, Homo sapien
aataatctacttcaactgaaagatttgaggcac

SEQ ID NO: 411397 - DNA, 33 bp, Homo sapien
ctgtgctaggtactgggagagatggaaagagga

SEQ ID NO: 411398 - DNA, 33 bp, Homo sapien
ctgtgctaggtactggtagagatggaaagagga

SEQ ID NO: 411399 - DNA, 33 bp, Homo sapien
gaagactagcagcttcaccctactgttgaggcg

SEQ ID NO: 411400 - DNA, 33 bp, Homo sapien
gaagactagcagcttcgccctactgttgaggcg

SEQ ID NO: 411401 - DNA, 33 bp, Homo sapien
cacagagacagaacgaatcacatttaaacattc

SEQ ID NO: 411402 - DNA, 33 bp, Homo sapien
cacagagacagaacgagtcacatttaaacattc

SEQ ID NO: 411403 - DNA, 33 bp, Homo sapien
cagaaggcatccttgaccaatgtcacaggtaca

SEQ ID NO: 411404 - DNA, 33 bp, Homo sapien
cagaaggcatccttgatcaatgtcacaggtaca

SEQ ID NO: 411405 - DNA, 33 bp, Homo sapien
tgcccagcaggataccccattcttcacgatgtg

SEQ ID NO: 411406 - DNA, 33 bp, Homo sapien
tgcccagcaggatacctcattcttcacgatgtg

SEQ ID NO: 411407 - DNA, 33 bp, Homo sapien
aaggaatgccaagataataccagatatatgctc

SEQ ID NO: 411408 - DNA, 33 bp, Homo sapien
aaggaatgccaagatagtaccagatatatgctc

SEQ ID NO: 411409 - DNA, 33 bp, Homo sapien
aagcactgtgcaaataagtaaatgaagaataga

SEQ ID NO: 411410 - DNA, 33 bp, Homo sapien
aagcactgtgcaaataggtaaatgaagaataga

SEQ ID NO: 411411 - DNA, 33 bp, Homo sapien
ggctctttgtgaatcaagctctagaattttaga

SEQ ID NO: 411412 - DNA, 33 bp, Homo sapien
ggctctttgtgaatcaggctctagaattttaga

SEQ ID NO: 411413 - DNA, 33 bp, Homo sapien
attcccttaaaagagcaaaaggacactcaagca

SEQ ID NO: 411414 - DNA, 33 bp, Homo sapien
attcccttaaaagagcgaaaggacactcaagca

SEQ ID NO: 411415 - DNA, 33 bp, Homo sapien
aacagaatgagaattgaaacacagtatatcaaa

SEQ ID NO: 411416 - DNA, 33 bp, Homo sapien
aacagaatgagaattggaacacagtatatcaaa

SEQ ID NO: 411417 - DNA, 33 bp, Homo sapien
aggagattcagtaaggaaaaagatgctagagcc

SEQ ID NO: 411418 - DNA, 33 bp, Homo sapien
aggagattcagtaagggaaaagatgctagagcc

SEQ ID NO: 411419 - DNA, 33 bp, Homo sapien
agtcctaatatggatgccacgtcatgttctata

SEQ ID NO: 411420 - DNA, 33 bp, Homo sapien
agtcctaatatggatgtcacgtcatgttctata

SEQ ID NO: 411421 - DNA, 33 bp, Homo sapien
agtctgaccactacgcagcagggttcaaggcag

SEQ ID NO: 411422 - DNA, 33 bp, Homo sapien
agtctgaccactacgccgcagggttcaaggcag

SEQ ID NO: 411423 - DNA, 33 bp, Homo sapien
aggaacaaggtgggaacagcccttcatcaggat

SEQ ID NO: 411424 - DNA, 33 bp, Homo sapien
aggaacaaggtgggaatagcccttcatcaggat

SEQ ID NO: 411425 - DNA, 33 bp, Homo sapien
tgtgtttctctgccataagatcccaggaagcgg

SEQ ID NO: 411426 - DNA, 33 bp, Homo sapien
tgtgtttctctgccatgagatcccaggaagcgg

SEQ ID NO: 411427 - DNA, 33 bp, Homo sapien
cctataagaaccttcccagagcagcagaggccc

SEQ ID NO: 411428 - DNA, 33 bp, Homo sapien
cctataagaaccttccgagagcagcagaggccc

SEQ ID NO: 411429 - DNA, 33 bp, Homo sapien
tttccatccttgctctaagacaaaacttttccc

SEQ ID NO: 411430 - DNA, 33 bp, Homo sapien
tttccatccttgctctgagacaaaacttttccc

SEQ ID NO: 411431 - DNA, 33 bp, Homo sapien
cttcctctgcccagataaagtccagcagaaatt

SEQ ID NO: 411432 - DNA, 33 bp, Homo sapien
cttcctctgcccagatgaagtccagcagaaatt

SEQ ID NO: 411433 - DNA, 33 bp, Homo sapien
tgcacaacctccattacctgaacttttatctta

SEQ ID NO: 411434 - DNA, 33 bp, Homo sapien
tgcacaacctccattagctgaacttttatctta

SEQ ID NO: 411435 - DNA, 33 bp, Homo sapien
aaagtattacaatgaagcgcaaacattaaatta

SEQ ID NO: 411436 - DNA, 33 bp, Homo sapien
aaagtattacaatgaatcgcaaacattaaatta

SEQ ID NO: 411437 - DNA, 33 bp, Homo sapien
aggtggaatagctgaaccattgtgcctccatag

SEQ ID NO: 411438 - DNA, 33 bp, Homo sapien
aggtggaatagctgaatcattgtgcctccatag

SEQ ID NO: 411439 - DNA, 33 bp, Homo sapien
gcaaagggatgactataaacattttatcaacat

SEQ ID NO: 411440 - DNA, 33 bp, Homo sapien
gcaaagggatgactatgaacattttatcaacat

SEQ ID NO: 411441 - DNA, 33 bp, Homo sapien
ggtacattcttcttaaatggttctctatatgcc

SEQ ID NO: 411442 - DNA, 33 bp, Homo sapien
ggtacattcttcttaagtggttctctatatgcc

SEQ ID NO: 411443 - DNA, 33 bp, Homo sapien
ttcatagctgctataccattttataatcccacc

SEQ ID NO: 411444 - DNA, 33 bp, Homo sapien
ttcatagctgctatactattttataatcccacc

SEQ ID NO: 411445 - DNA, 33 bp, Homo sapien
ataggtgtgatctttacgcttctaatcctacat

SEQ ID NO: 411446 - DNA, 33 bp, Homo sapien
ataggtgtgatctttatgcttctaatcctacat

SEQ ID NO: 411447 - DNA, 33 bp, Homo sapien
ccttatacccaccagacatgcaacctgaaaaaa

SEQ ID NO: 411448 - DNA, 33 bp, Homo sapien
ccttatacccaccagatatgcaacctgaaaaaa

SEQ ID NO: 411449 - DNA, 33 bp, Homo sapien
agatactccaatgatacggcttaaaaagatggg

SEQ ID NO: 411450 - DNA, 33 bp, Homo sapien
agatactccaatgatatggcttaaaaagatggg

SEQ ID NO: 411451 - DNA, 33 bp, Homo sapien
gatgcgtggggagatcacttcagcttaggagtt

SEQ ID NO: 411452 - DNA, 33 bp, Homo sapien
gatgcgtggggagatcgcttcagcttaggagtt

SEQ ID NO: 411453 - DNA, 33 bp, Homo sapien
gcttaggtaatggtcaaacctaagtgagtagat

SEQ ID NO: 411454 - DNA, 33 bp, Homo sapien
gcttaggtaatggtcagacctaagtgagtagat

SEQ ID NO: 411455 - DNA, 33 bp, Homo sapien
caatgcagagggcaaaggctgtggggcttccag

SEQ ID NO: 411456 - DNA, 33 bp, Homo sapien
caatgcagagggcaaatgctgtggggcttccag

SEQ ID NO: 411457 - DNA, 33 bp, Homo sapien
ggtcctgacacccttacgttatttgtggcaggc

SEQ ID NO: 411458 - DNA, 33 bp, Homo sapien
ggtcctgacacccttatgttatttgtggcaggc

SEQ ID NO: 411459 - DNA, 33 bp, Homo sapien
gagcactcggtaaatccccagtgactgacgcaa

SEQ ID NO: 411460 - DNA, 33 bp, Homo sapien
gagcactcggtaaatcgccagtgactgacgcaa

SEQ ID NO: 411461 - DNA, 33 bp, Homo sapien
acccactcctcggggaaccgagactggaccaag

SEQ ID NO: 411462 - DNA, 33 bp, Homo sapien
acccactcctcggggacccgagactggaccaag

SEQ ID NO: 411463 - DNA, 33 bp, Homo sapien
tggagttaaatgaacaaacagtaaatgctagga

SEQ ID NO: 411464 - DNA, 33 bp, Homo sapien
tggagttaaatgaacagacagtaaatgctagga

SEQ ID NO: 411465 - DNA, 33 bp, Homo sapien
caaatgacaaggaggccaaagtgtccatcagat

SEQ ID NO: 411466 - DNA, 33 bp, Homo sapien
caaatgacaaggaggctaaagtgtccatcagat

SEQ ID NO: 411467 - DNA, 33 bp, Homo sapien
aaacattttagttaaaagccttagaagagaaaa

SEQ ID NO: 411468 - DNA, 33 bp, Homo sapien
aaacattttagttaaaggccttagaagagaaaa

SEQ ID NO: 411469 - DNA, 33 bp, Homo sapien
gaggaggcactgcaaacggtaagtgaactacct

SEQ ID NO: 411470 - DNA, 33 bp, Homo sapien
gaggaggcactgcaaatggtaagtgaactacct

SEQ ID NO: 411471 - DNA, 33 bp, Homo sapien
tatttggaggaggtaaagtacaaattcttacta

SEQ ID NO: 411472 - DNA, 33 bp, Homo sapien
tatttggaggaggtaaggtacaaattcttacta

SEQ ID NO: 411473 - DNA, 33 bp, Homo sapien
gatatatatcagaacactagaaggaaaaggggg

SEQ ID NO: 411474 - DNA, 33 bp, Homo sapien
gatatatatcagaacagtagaaggaaaaggggg

SEQ ID NO: 411475 - DNA, 33 bp, Homo sapien
ttttcctgcttatttcacaatattcaggacctg

SEQ ID NO: 411476 - DNA, 33 bp, Homo sapien
ttttcctgcttatttcgcaatattcaggacctg

SEQ ID NO: 411477 - DNA, 33 bp, Homo sapien
tctgcctcattggaagacggatgttattactga

SEQ ID NO: 411478 - DNA, 33 bp, Homo sapien
tctgcctcattggaaggcggatgttattactga

SEQ ID NO: 411479 - DNA, 33 bp, Homo sapien
ttcaagagagtttacaaatgcctacaagttacc

SEQ ID NO: 411480 - DNA, 33 bp, Homo sapien
ttcaagagagtttacagatgcctacaagttacc

SEQ ID NO: 411481 - DNA, 33 bp, Homo sapien
gccgttagggtatgaccggagccatgacacttt

SEQ ID NO: 411482 - DNA, 33 bp, Homo sapien
gccgttagggtatgactggagccatgacacttt

SEQ ID NO: 411483 - DNA, 33 bp, Homo sapien
ttccagtctttccataggatcctcatggttacc

SEQ ID NO: 411484 - DNA, 33 bp, Homo sapien
ttccagtctttccatatgatcctcatggttacc

SEQ ID NO: 411485 - DNA, 33 bp, Homo sapien
ctacagctgtgtaaaacgaaggcaaagatgctt

SEQ ID NO: 411486 - DNA, 33 bp, Homo sapien
ctacagctgtgtaaaatgaaggcaaagatgctt

SEQ ID NO: 411487 - DNA, 33 bp, Homo sapien
gagcctctaagatagaagaaatacgctgtgctg

SEQ ID NO: 411488 - DNA, 33 bp, Homo sapien
gagcctctaagatagaggaaatacgctgtgctg

SEQ ID NO: 411489 - DNA, 33 bp, Homo sapien
catatgacatcaaaagcacaagtatagtatgtc

SEQ ID NO: 411490 - DNA, 33 bp, Homo sapien
catatgacatcaaaagtacaagtatagtatgtc

SEQ ID NO: 411491 - DNA, 33 bp, Homo sapien
aagagaaagggccaaacgatatccagttctaag

SEQ ID NO: 411492 - DNA, 33 bp, Homo sapien
aagagaaagggccaaatgatatccagttctaag

SEQ ID NO: 411493 - DNA, 33 bp, Homo sapien
cgcacggctttcttgcacagttaaacaagctgc

SEQ ID NO: 411494 - DNA, 33 bp, Homo sapien
cgcacggctttcttgcgcagttaaacaagctgc

SEQ ID NO: 411495 - DNA, 33 bp, Homo sapien
aagaaattctaaacacaactgattccactgagt

SEQ ID NO: 411496 - DNA, 33 bp, Homo sapien
aagaaattctaaacacgactgattccactgagt

SEQ ID NO: 411497 - DNA, 33 bp, Homo sapien
ccccatttggtaggtcaaagaaagtcttgtagg

SEQ ID NO: 411498 - DNA, 33 bp, Homo sapien
ccccatttggtaggtccaagaaagtcttgtagg

SEQ ID NO: 411499 - DNA, 33 bp, Homo sapien
agggcatgcctataaaaccaagattaaggatat

SEQ ID NO: 411500 - DNA, 33 bp, Homo sapien
agggcatgcctataaagccaagattaaggatat

SEQ ID NO: 411501 - DNA, 33 bp, Homo sapien
gcggagaggctagcataaatctgacattttcta

SEQ ID NO: 411502 - DNA, 33 bp, Homo sapien
gcggagaggctagcatgaatctgacattttcta

SEQ ID NO: 411503 - DNA, 33 bp, Homo sapien
aaatatcagtgttaccaagcatcagatgagata

SEQ ID NO: 411504 - DNA, 33 bp, Homo sapien
aaatatcagtgttaccgagcatcagatgagata

SEQ ID NO: 411505 - DNA, 33 bp, Homo sapien
ttctgtgaagtcattaaggaacccaggctgatg

SEQ ID NO: 411506 - DNA, 33 bp, Homo sapien
ttctgtgaagtcattagggaacccaggctgatg

SEQ ID NO: 411507 - DNA, 33 bp, Homo sapien
ttaattctcaacctacactccagattattttta

SEQ ID NO: 411508 - DNA, 33 bp, Homo sapien
ttaattctcaacctacgctccagattattttta

SEQ ID NO: 411509 - DNA, 33 bp, Homo sapien
aaaaacaacagatgtcagaaaggctgtggagaa

SEQ ID NO: 411510 - DNA, 33 bp, Homo sapien
aaaaacaacagatgtcggaaaggctgtggagaa

SEQ ID NO: 411511 - DNA, 33 bp, Homo sapien
gcacccggcctaaagccagtatgttagctttaa

SEQ ID NO: 411512 - DNA, 33 bp, Homo sapien
gcacccggcctaaagcgagtatgttagctttaa

SEQ ID NO: 411513 - DNA, 33 bp, Homo sapien
ggaagaatcaaggaagcataaattcaatgattt

SEQ ID NO: 411514 - DNA, 33 bp, Homo sapien
ggaagaatcaaggaaggataaattcaatgattt

SEQ ID NO: 411515 - DNA, 33 bp, Homo sapien
cagacgagtctctctcaaagttaattgatggaa

SEQ ID NO: 411516 - DNA, 33 bp, Homo sapien
cagacgagtctctctccaagttaattgatggaa

SEQ ID NO: 411517 - DNA, 33 bp, Homo sapien
cctcgtttccaagccaccttatatactaaagct

SEQ ID NO: 411518 - DNA, 33 bp, Homo sapien
cctcgtttccaagccatcttatatactaaagct

SEQ ID NO: 411519 - DNA, 33 bp, Homo sapien
gataggtccacaggtacatgacaccatgccctg

SEQ ID NO: 411520 - DNA, 33 bp, Homo sapien
gataggtccacaggtatatgacaccatgccctg

SEQ ID NO: 411521 - DNA, 33 bp, Homo sapien
tataataaaatgctataagtaactgtatgctca

SEQ ID NO: 411522 - DNA, 33 bp, Homo sapien
tataataaaatgctatcagtaactgtatgctca

SEQ ID NO: 411523 - DNA, 33 bp, Homo sapien
tgaaggattgaaggaaaaccagtatggcaaaga

SEQ ID NO: 411524 - DNA, 33 bp, Homo sapien
tgaaggattgaaggaagaccagtatggcaaaga

SEQ ID NO: 411525 - DNA, 33 bp, Homo sapien
aactctgattttgatgcagttttaaggcaagat

SEQ ID NO: 411526 - DNA, 33 bp, Homo sapien
aactctgattttgatgtagttttaaggcaagat

SEQ ID NO: 411527 - DNA, 33 bp, Homo sapien
tcgtaattctttagatcacataactctttagac

SEQ ID NO: 411528 - DNA, 33 bp, Homo sapien
tcgtaattctttagatgacataactctttagac

SEQ ID NO: 411529 - DNA, 33 bp, Homo sapien
tgttcgctattatgaactggtgcaataagtcct

SEQ ID NO: 411530 - DNA, 33 bp, Homo sapien
tgttcgctattatgaattggtgcaataagtcct

SEQ ID NO: 411531 - DNA, 33 bp, Homo sapien
gttgggattgaaaaaacggtagtatcatggaga

SEQ ID NO: 411532 - DNA, 33 bp, Homo sapien
gttgggattgaaaaaatggtagtatcatggaga

SEQ ID NO: 411533 - DNA, 33 bp, Homo sapien; identical to SEQ ID NO: 411531

SEQ ID NO: 411534 - DNA, 33 bp, Homo sapien; identical to SEQ ID NO: 411532

SEQ ID NO: 411535 - DNA, 33 bp, Homo sapien
tcatcgttttcaataacggcatggtattccaaa

SEQ ID NO: 411536 - DNA, 33 bp, Homo sapien
tcatcgttttcaataatggcatggtattccaaa

SEQ ID NO: 411537 - DNA, 33 bp, Homo sapien
tatccctgataaactcaaggcaatatatgcttt

SEQ ID NO: 411538 - DNA, 33 bp, Homo sapien
tatccctgataaactcgaggcaatatatgcttt

SEQ ID NO: 411539 - DNA, 33 bp, Homo sapien
ctactggtgtctctcaccctctttgaacccatg

SEQ ID NO: 411540 - DNA, 33 bp, Homo sapien
ctactggtgtctctcatcctctttgaacccatg

SEQ ID NO: 411541 - DNA, 33 bp, Homo sapien
taaaggcccaagttcaaagctgcacactgtcaa

SEQ ID NO: 411542 - DNA, 33 bp, Homo sapien
taaaggcccaagttcagagctgcacactgtcaa

SEQ ID NO: 411543 - DNA, 33 bp, Homo sapien
tgggagccctagaatccgaaatttcctagcatc

SEQ ID NO: 411544 - DNA, 33 bp, Homo sapien
tgggagccctagaatctgaaatttcctagcatc

SEQ ID NO: 411545 - DNA, 33 bp, Homo sapien
cactgaagcaggaacacggttccgtggagaaca

SEQ ID NO: 411546 - DNA, 33 bp, Homo sapien
cactgaagcaggaacatggttccgtggagaaca

SEQ ID NO: 411547 - DNA, 33 bp, Homo sapien
gcctattcaaggaactaagaagtgaccagtgtg

SEQ ID NO: 411548 - DNA, 33 bp, Homo sapien
gcctattcaaggaactgagaagtgaccagtgtg

SEQ ID NO: 411549 - DNA, 33 bp, Homo sapien
tgaaaactgagaagagaccaaacttcgttgatc

SEQ ID NO: 411550 - DNA, 33 bp, Homo sapien
tgaaaactgagaagaggccaaacttcgttgatc

SEQ ID NO: 411551 - DNA, 33 bp, Homo sapien
agtgctgaaggtaaaaactatacacaggcaaca

SEQ ID NO: 411552 - DNA, 33 bp, Homo sapien
agtgctgaaggtaaaagctatacacaggcaaca

SEQ ID NO: 411553 - DNA, 33 bp, Homo sapien
ctgatgtataaaaggcagaaataacagttgaaa

SEQ ID NO: 411554 - DNA, 33 bp, Homo sapien
ctgatgtataaaaggcggaaataacagttgaaa

SEQ ID NO: 411555 - DNA, 33 bp, Homo sapien
tccaaagttagtttgacgtggctcactcgatgg

SEQ ID NO: 411556 - DNA, 33 bp, Homo sapien
tccaaagttagtttgatgtggctcactcgatgg

SEQ ID NO: 411557 - DNA, 33 bp, Homo sapien
ccagccagccggccaacaacaaaaaaagtgtta

SEQ ID NO: 411558 - DNA, 33 bp, Homo sapien
ccagccagccggccaataacaaaaaaagtgtta

SEQ ID NO: 411559 - DNA, 33 bp, Homo sapien
catctttacgcagacccagacgaagttttttgt

SEQ ID NO: 411560 - DNA, 33 bp, Homo sapien
catctttacgcagaccgagacgaagttttttgt

SEQ ID NO: 411561 - DNA, 33 bp, Homo sapien
acgagaaaggaaagccaataagataaggtctga

SEQ ID NO: 411562 - DNA, 33 bp, Homo sapien
acgagaaaggaaagccgataagataaggtctga

SEQ ID NO: 411563 - DNA, 33 bp, Homo sapien
accctggtgagaattccattccataggccagac

SEQ ID NO: 411564 - DNA, 33 bp, Homo sapien
accctggtgagaattctattccataggccagac

SEQ ID NO: 411565 - DNA, 33 bp, Homo sapien
cgtattccaaacctcacggctacaccaaagcca

SEQ ID NO: 411566 - DNA, 33 bp, Homo sapien
cgtattccaaacctcatggctacaccaaagcca

SEQ ID NO: 411567 - DNA, 33 bp, Homo sapien
gtgccatgtttggtcccagtgtaagacgccagg

SEQ ID NO: 411568 - DNA, 33 bp, Homo sapien
gtgccatgtttggtccgagtgtaagacgccagg

SEQ ID NO: 411569 - DNA, 33 bp, Homo sapien
tagggaagaatgaagacggggtcatgaaggtgt

SEQ ID NO: 411570 - DNA, 33 bp, Homo sapien
tagggaagaatgaagatggggtcatgaaggtgt

SEQ ID NO: 411571 - DNA, 33 bp, Homo sapien
agtggagtgggtctaccgaaataatctttatgg

SEQ ID NO: 411572 - DNA, 33 bp, Homo sapien
agtggagtgggtctactgaaataatctttatgg

SEQ ID NO: 411573 - DNA, 33 bp, Homo sapien
tccactagaacttgcagatctgaatttccttcc

SEQ ID NO: 411574 - DNA, 33 bp, Homo sapien
tccactagaacttgcatatctgaatttccttcc

SEQ ID NO: 411575 - DNA, 33 bp, Homo sapien
caatcccacaaggccacggaaagcgagtagaag

SEQ ID NO: 411576 - DNA, 33 bp, Homo sapien
caatcccacaaggccatggaaagcgagtagaag

SEQ ID NO: 411577 - DNA, 33 bp, Homo sapien
tgatgccgagacaaaactgtttagcttatgtta

SEQ ID NO: 411578 - DNA, 33 bp, Homo sapien
tgatgccgagacaaaattgtttagcttatgtta

SEQ ID NO: 411579 - DNA, 33 bp, Homo sapien
aaaaggcaaacaagaacgaaatgataacaggca

SEQ ID NO: 411580 - DNA, 33 bp, Homo sapien
aaaaggcaaacaagaatgaaatgataacaggca

SEQ ID NO: 411581 - DNA, 33 bp, Homo sapien
tctataatctgaaagcacccaggctgcccagag

SEQ ID NO: 411582 - DNA, 33 bp, Homo sapien
tctataatctgaaagcgcccaggctgcccagag

SEQ ID NO: 411583 - DNA, 33 bp, Homo sapien
agcaaagtctatcatgcatcaacctttacagtg

SEQ ID NO: 411584 - DNA, 33 bp, Homo sapien
agcaaagtctatcatgtatcaacctttacagtg

SEQ ID NO: 411585 - DNA, 33 bp, Homo sapien
acacagctgaagacacaagagaggaagaggtga

SEQ ID NO: 411586 - DNA, 33 bp, Homo sapien
acacagctgaagacacgagagaggaagaggtga

SEQ ID NO: 411587 - DNA, 33 bp, Homo sapien
gtgatcaaagaggaaaagccttattgcaaggta

SEQ ID NO: 411588 - DNA, 33 bp, Homo sapien
gtgatcaaagaggaaacgccttattgcaaggta

SEQ ID NO: 411589 - DNA, 33 bp, Homo sapien
acaggacacaacagcaataatagctaacacttc

SEQ ID NO: 411590 - DNA, 33 bp, Homo sapien
acaggacacaacagcagtaatagctaacacttc

SEQ ID NO: 411591 - DNA, 33 bp, Homo sapien
ttatttcaataagaaaagagcagctgttttagt

SEQ ID NO: 411592 - DNA, 33 bp, Homo sapien
ttatttcaataagaaaggagcagctgttttagt

SEQ ID NO: 411593 - DNA, 33 bp, Homo sapien
tcctggtagaccctcaagccaattgctcccacc

SEQ ID NO: 411594 - DNA, 33 bp, Homo sapien
tcctggtagaccctcatgccaattgctcccacc

SEQ ID NO: 411595 - DNA, 33 bp, Homo sapien
ccagaattgagtcttaagggctttgattggccc

SEQ ID NO: 411596 - DNA, 33 bp, Homo sapien
ccagaattgagtcttacgggctttgattggccc

SEQ ID NO: 411597 - DNA, 33 bp, Homo sapien
ctggcctgtcttcttaagtccctttccggattt

SEQ ID NO: 411598 - DNA, 33 bp, Homo sapien
ctggcctgtcttcttatgtccctttccggattt

SEQ ID NO: 411599 - DNA, 33 bp, Homo sapien
tagagtttccatgcaacgactgagagtttgctg

SEQ ID NO: 411600 - DNA, 33 bp, Homo sapien
tagagtttccatgcaatgactgagagtttgctg

SEQ ID NO: 411601 - DNA, 33 bp, Homo sapien
tccctcgggtcaataacgtgaaagtacatgtgt

SEQ ID NO: 411602 - DNA, 33 bp, Homo sapien
tccctcgggtcaataaggtgaaagtacatgtgt

SEQ ID NO: 411603 - DNA, 33 bp, Homo sapien
tttcaaattagatgtgaattcttccactttttt

SEQ ID NO: 411604 - DNA, 33 bp, Homo sapien
tttcaaattagatgtggattcttccactttttt

SEQ ID NO: 411605 - DNA, 33 bp, Homo sapien
gaaaagggttacttcgacaagtacatttattcg

SEQ ID NO: 411606 - DNA, 33 bp, Homo sapien
gaaaagggttacttcgtcaagtacatttattcg

SEQ ID NO: 411607 - DNA, 33 bp, Homo sapien
ttgtttagggagacaccgctttggggatttatc

SEQ ID NO: 411608 - DNA, 33 bp, Homo sapien
ttgtttagggagacactgctttggggatttatc

SEQ ID NO: 411609 - DNA, 33 bp, Homo sapien
cctgctgttagaattaaccaacacttactacca

SEQ ID NO: 411610 - DNA, 33 bp, Homo sapien
cctgctgttagaattagccaacacttactacca

SEQ ID NO: 411611 - DNA, 33 bp, Homo sapien
tcaaaccactgcattccctgtcattatggaatt

SEQ ID NO: 411612 - DNA, 33 bp, Homo sapien
tcaaaccactgcattctctgtcattatggaatt

SEQ ID NO: 411613 - DNA, 33 bp, Homo sapien
ttatttgaaaattataaatgactgaggaaagtg

SEQ ID NO: 411614 - DNA, 33 bp, Homo sapien
ttatttgaaaattatagatgactgaggaaagtg

SEQ ID NO: 411615 - DNA, 33 bp, Homo sapien
cccctaacatttgactcaacaacacattccatg

SEQ ID NO: 411616 - DNA, 33 bp, Homo sapien
cccctaacatttgacttaacaacacattccatg

SEQ ID NO: 411617 - DNA, 33 bp, Homo sapien
tgatggaactgtctaccagctacatagggatat

SEQ ID NO: 411618 - DNA, 33 bp, Homo sapien
tgatggaactgtctactagctacatagggatat

SEQ ID NO: 411619 - DNA, 33 bp, Homo sapien
tagatcaatcatttaaagcatactcagtctacc

SEQ ID NO: 411620 - DNA, 33 bp, Homo sapien
tagatcaatcatttaaggcatactcagtctacc

SEQ ID NO: 411621 - DNA, 33 bp, Homo sapien
agtctgtttaagaacaatctatatcggccaggc

SEQ ID NO: 411622 - DNA, 33 bp, Homo sapien
agtctgtttaagaacagtctatatcggccaggc

SEQ ID NO: 411623 - DNA, 33 bp, Homo sapien
ttttgaatagttatcacgtgcatacagtaaagc

SEQ ID NO: 411624 - DNA, 33 bp, Homo sapien
ttttgaatagttatcatgtgcatacagtaaagc

SEQ ID NO: 411625 - DNA, 33 bp, Homo sapien
tgaccgtattggctaacagaaggttaaatttgc

SEQ ID NO: 411626 - DNA, 33 bp, Homo sapien
tgaccgtattggctaagagaaggttaaatttgc

SEQ ID NO: 411627 - DNA, 33 bp, Homo sapien
cttatatggcttgatacagaggcaatgtagact

SEQ ID NO: 411628 - DNA, 33 bp, Homo sapien
cttatatggcttgatatagaggcaatgtagact

SEQ ID NO: 411629 - DNA, 33 bp, Homo sapien
aaatagtagtcaaatcaaatttccaagcatcca

SEQ ID NO: 411630 - DNA, 33 bp, Homo sapien
aaatagtagtcaaatcgaatttccaagcatcca

SEQ ID NO: 411631 - DNA, 33 bp, Homo sapien
tccctgtagttgataactgctctgccttggaga

SEQ ID NO: 411632 - DNA, 33 bp, Homo sapien
tccctgtagttgataattgctctgccttggaga

SEQ ID NO: 411633 - DNA, 33 bp, Homo sapien
agagactcctgtccaaatatcccaaatctgatg

SEQ ID NO: 411634 - DNA, 33 bp, Homo sapien
agagactcctgtccaagtatcccaaatctgatg

SEQ ID NO: 411635 - DNA, 33 bp, Homo sapien
gaggaactagtgtttaagaagtactgatgtaaa

SEQ ID NO: 411636 - DNA, 33 bp, Homo sapien
gaggaactagtgtttaggaagtactgatgtaaa

SEQ ID NO: 411637 - DNA, 33 bp, Homo sapien
cataaattcttctgcagtaagctttgaagttac

SEQ ID NO: 411638 - DNA, 33 bp, Homo sapien
cataaattcttctgcattaagctttgaagttac

SEQ ID NO: 411639 - DNA, 33 bp, Homo sapien
aatgacagaccaagtacaaggctttggttgaga

SEQ ID NO: 411640 - DNA, 33 bp, Homo sapien
aatgacagaccaagtataaggctttggttgaga

SEQ ID NO: 411641 - DNA, 33 bp, Homo sapien
ggtaataatgaattcacggtctggcaatacttc

SEQ ID NO: 411642 - DNA, 33 bp, Homo sapien
ggtaataatgaattcatggtctggcaatacttc

SEQ ID NO: 411643 - DNA, 33 bp, Homo sapien
atgtttgagataggaaacacatcaagtccttaa

SEQ ID NO: 411644 - DNA, 33 bp, Homo sapien
atgtttgagataggaagcacatcaagtccttaa

SEQ ID NO: 411645 - DNA, 33 bp, Homo sapien
tgcaggcataagatcaaaggtgtgttttgcctt

SEQ ID NO: 411646 - DNA, 33 bp, Homo sapien
tgcaggcataagatcagaggtgtgttttgcctt

SEQ ID NO: 411647 - DNA, 33 bp, Homo sapien
catccttcacacatgaacaacaatgaacttctt

SEQ ID NO: 411648 - DNA, 33 bp, Homo sapien
catccttcacacatgagcaacaatgaacttctt

SEQ ID NO: 411649 - DNA, 33 bp, Homo sapien
tggggttgtcttcccaataggtcagtgtactcc

SEQ ID NO: 411650 - DNA, 33 bp, Homo sapien
tggggttgtcttcccagtaggtcagtgtactcc

SEQ ID NO: 411651 - DNA, 33 bp, Homo sapien
gttgacttaagtattcaagagaaatgaactaca

SEQ ID NO: 411652 - DNA, 33 bp, Homo sapien
gttgacttaagtattccagagaaatgaactaca

SEQ ID NO: 411653 - DNA, 33 bp, Homo sapien
ctgagatccagatacaaaacattaccggaactc

SEQ ID NO: 411654 - DNA, 33 bp, Homo sapien
ctgagatccagatacagaacattaccggaactc

SEQ ID NO: 411655 - DNA, 33 bp, Homo sapien
atcccaatggaaaaaaatcacactaagaataaa

SEQ ID NO: 411656 - DNA, 33 bp, Homo sapien
atcccaatggaaaaaagtcacactaagaataaa

SEQ ID NO: 411657 - DNA, 33 bp, Homo sapien
atcagcagtttatcaccgaagagctgaggaata

SEQ ID NO: 411658 - DNA, 33 bp, Homo sapien
atcagcagtttatcacggaagagctgaggaata

SEQ ID NO: 411659 - DNA, 33 bp, Homo sapien
tgacaccactctccagaagtaccagagttcaga

SEQ ID NO: 411660 - DNA, 33 bp, Homo sapien
tgacaccactctccaggagtaccagagttcaga

SEQ ID NO: 411661 - DNA, 33 bp, Homo sapien
tcccaggtgctcccagaacatttaatttgtagt

SEQ ID NO: 411662 - DNA, 33 bp, Homo sapien
tcccaggtgctcccaggacatttaatttgtagt

SEQ ID NO: 411663 - DNA, 33 bp, Homo sapien
aaagttatcaatcaaacgctgtcaaaggctgcc

SEQ ID NO: 411664 - DNA, 33 bp, Homo sapien
aaagttatcaatcaaatgctgtcaaaggctgcc

SEQ ID NO: 411665 - DNA, 33 bp, Homo sapien
gttcttccctttccaccttcactgacttgcttt

SEQ ID NO: 411666 - DNA, 33 bp, Homo sapien
gttcttccctttccactttcactgacttgcttt

SEQ ID NO: 411667 - DNA, 33 bp, Homo sapien
agatgaaatattaaccgggcgcaatggctcatg

SEQ ID NO: 411668 - DNA, 33 bp, Homo sapien
agatgaaatattaacctggcgcaatggctcatg

SEQ ID NO: 411669 - DNA, 33 bp, Homo sapien
cagtgttacctctagaaggctcacacaagaagt

SEQ ID NO: 411670 - DNA, 33 bp, Homo sapien
cagtgttacctctagagggctcacacaagaagt

SEQ ID NO: 411671 - DNA, 33 bp, Homo sapien
ctttactctgtggatccaatctttcactttttt

SEQ ID NO: 411672 - DNA, 33 bp, Homo sapien
ctttactctgtggatctaatctttcactttttt

SEQ ID NO: 411673 - DNA, 33 bp, Homo sapien
aagttattgttctatgaaaccgcaatatttcag

SEQ ID NO: 411674 - DNA, 33 bp, Homo sapien
aagttattgttctatggaaccgcaatatttcag

SEQ ID NO: 411675 - DNA, 33 bp, Homo sapien
ccaatgatttatatgacgggctcgtgtaactta

SEQ ID NO: 411676 - DNA, 33 bp, Homo sapien
ccaatgatttatatgatgggctcgtgtaactta

SEQ ID NO: 411677 - DNA, 33 bp, Homo sapien
aacaaactgtctacccagaattagatatcaatg

SEQ ID NO: 411678 - DNA, 33 bp, Homo sapien
aacaaactgtctacccggaattagatatcaatg

SEQ ID NO: 411679 - DNA, 33 bp, Homo sapien
tcagctcgtatgcagacgatggccattgttgaa

SEQ ID NO: 411680 - DNA, 33 bp, Homo sapien
tcagctcgtatgcagatgatggccattgttgaa

SEQ ID NO: 411681 - DNA, 33 bp, Homo sapien; identical to SEQ ID NO: 411679

SEQ ID NO: 411682 - DNA, 33 bp, Homo sapien; identical to SEQ ID NO: 411680

SEQ ID NO: 411683 - DNA, 33 bp, Homo sapien
gttcaccactgccaacagtatgccaggtataat

SEQ ID NO: 411684 - DNA, 33 bp, Homo sapien
gttcaccactgccaacggtatgccaggtataat

SEQ ID NO: 411685 - DNA, 33 bp, Homo sapien
tcacaaaggctcatgacgtgttgacagtatttc

SEQ ID NO: 411686 - DNA, 33 bp, Homo sapien
tcacaaaggctcatgatgtgttgacagtatttc

SEQ ID NO: 411687 - DNA, 33 bp, Homo sapien
ccttttgatatttttaacttcagtttgtgcttt

SEQ ID NO: 411688 - DNA, 33 bp, Homo sapien
ccttttgatatttttagcttcagtttgtgcttt

SEQ ID NO: 411689 - DNA, 33 bp, Homo sapien
tcaacatggcaatgtacatcacagggttaaaat

SEQ ID NO: 411690 - DNA, 33 bp, Homo sapien
tcaacatggcaatgtatatcacagggttaaaat

SEQ ID NO: 411691 - DNA, 33 bp, Homo sapien
agactccaaggctgaaactagtattactgtcac

SEQ ID NO: 411692 - DNA, 33 bp, Homo sapien
agactccaaggctgaagctagtattactgtcac

SEQ ID NO: 411693 - DNA, 33 bp, Homo sapien
atgcagatctcctatcgctaccccctttaaaga

SEQ ID NO: 411694 - DNA, 33 bp, Homo sapien
atgcagatctcctatctctaccccctttaaaga

SEQ ID NO: 411695 - DNA, 33 bp, Homo sapien
aagtatgaatcaaaacactttaagatgaacagg

SEQ ID NO: 411696 - DNA, 33 bp, Homo sapien
aagtatgaatcaaaacgctttaagatgaacagg

SEQ ID NO: 411697 - DNA, 33 bp, Homo sapien
ctggatgaagaccaccactagttcaaaagatgc

SEQ ID NO: 411698 - DNA, 33 bp, Homo sapien
ctggatgaagaccaccgctagttcaaaagatgc

SEQ ID NO: 411699 - DNA, 33 bp, Homo sapien
gaacacactgttaccagatgcttatgaaaccat

SEQ ID NO: 411700 - DNA, 33 bp, Homo sapien
gaacacactgttaccatatgcttatgaaaccat

SEQ ID NO: 411701 - DNA, 33 bp, Homo sapien
agaaatgagagctctgacaacttctacctgtct

SEQ ID NO: 411702 - DNA, 33 bp, Homo sapien
agaaatgagagctctgtcaacttctacctgtct

SEQ ID NO: 411703 - DNA, 33 bp, Homo sapien
cagcagtctctacttacatttgaaaagagtaac

SEQ ID NO: 411704 - DNA, 33 bp, Homo sapien
cagcagtctctacttatatttgaaaagagtaac

SEQ ID NO: 411705 - DNA, 33 bp, Homo sapien
actcatctgaagctcaaataactccataggaaa

SEQ ID NO: 411706 - DNA, 33 bp, Homo sapien
actcatctgaagctcagataactccataggaaa

SEQ ID NO: 411707 - DNA, 33 bp, Homo sapien
ggttacggcttcttgaaatggattacttgcttg

SEQ ID NO: 411708 - DNA, 33 bp, Homo sapien
ggttacggcttcttgagatggattacttgcttg

SEQ ID NO: 411709 - DNA, 33 bp, Homo sapien
ggagcacctaacttggaagaggaggtttcagcc

SEQ ID NO: 411710 - DNA, 33 bp, Homo sapien
ggagcacctaacttgggagaggaggtttcagcc

SEQ ID NO: 411711 - DNA, 33 bp, Homo sapien
ctgattccgatgatgccgatgaattgccaggtt

SEQ ID NO: 411712 - DNA, 33 bp, Homo sapien
ctgattccgatgatgctgatgaattgccaggtt

SEQ ID NO: 411713 - DNA, 33 bp, Homo sapien
aagaaataataacacacgccaggaggaatggct

SEQ ID NO: 411714 - DNA, 33 bp, Homo sapien
aagaaataataacacaggccaggaggaatggct

SEQ ID NO: 411715 - DNA, 33 bp, Homo sapien
cagcattttggatgtactaaatgccattgaatt

SEQ ID NO: 411716 - DNA, 33 bp, Homo sapien
cagcattttggatgtattaaatgccattgaatt

SEQ ID NO: 411717 - DNA, 33 bp, Homo sapien
caaaacattctgatacacctcaattaaaaagtc

SEQ ID NO: 411718 - DNA, 33 bp, Homo sapien
caaaacattctgatactcctcaattaaaaagtc

SEQ ID NO: 411719 - DNA, 33 bp, Homo sapien
ttccacaatgtctttgcagttcttggaggaaac

SEQ ID NO: 411720 - DNA, 33 bp, Homo sapien
ttccacaatgtctttgtagttcttggaggaaac

SEQ ID NO: 411721 - DNA, 33 bp, Homo sapien
agtagaaactccatctaacataaaaggcgacag

SEQ ID NO: 411722 - DNA, 33 bp, Homo sapien
agtagaaactccatcttacataaaaggcgacag

SEQ ID NO: 411723 - DNA, 33 bp, Homo sapien
gttaatttctaatattcaaaactgatcattgca

SEQ ID NO: 411724 - DNA, 33 bp, Homo sapien
gttaatttctaatattgaaaactgatcattgca

SEQ ID NO: 411725 - DNA, 33 bp, Homo sapien
agaccctctctctaaaccaaaaatgaaccgaaa

SEQ ID NO: 411726 - DNA, 33 bp, Homo sapien
agaccctctctctaaatcaaaaatgaaccgaaa

SEQ ID NO: 411727 - DNA, 33 bp, Homo sapien
ctgttctctcccagtcaataccgaccctcagag

SEQ ID NO: 411728 - DNA, 33 bp, Homo sapien
ctgttctctcccagtcgataccgaccctcagag

SEQ ID NO: 411729 - DNA, 33 bp, Homo sapien; identical to SEQ ID NO: 411727

SEQ ID NO: 411730 - DNA, 33 bp, Homo sapien; identical to SEQ ID NO: 411728

SEQ ID NO: 411731 - DNA, 33 bp, Homo sapien
accccatactaatctcacaggaatttatttatc

SEQ ID NO: 411732 - DNA, 33 bp, Homo sapien
accccatactaatctctcaggaatttatttatc

SEQ ID NO: 411733 - DNA, 33 bp, Homo sapien
gctaacagactaaactcaataccaaactaataa

SEQ ID NO: 411734 - DNA, 33 bp, Homo sapien
gctaacagactaaactgaataccaaactaataa

SEQ ID NO: 411735 - DNA, 33 bp, Homo sapien
tcccttgagcttgggcagaactgtatgactgct

SEQ ID NO: 411736 - DNA, 33 bp, Homo sapien
tcccttgagcttgggcggaactgtatgactgct

SEQ ID NO: 411737 - DNA, 33 bp, Homo sapien
ctccttctgaattgaactggggatatatataca

SEQ ID NO: 411738 - DNA, 33 bp, Homo sapien
ctccttctgaattgaattggggatatatataca

SEQ ID NO: 411739 - DNA, 33 bp, Homo sapien
atttaaagagaaaacgcaatgcttcataatgtt

SEQ ID NO: 411740 - DNA, 33 bp, Homo sapien
atttaaagagaaaacgtaatgcttcataatgtt

SEQ ID NO: 411741 - DNA, 33 bp, Homo sapien
gctataaagactgcgacaaattaccttacttcc

SEQ ID NO: 411742 - DNA, 33 bp, Homo sapien
gctataaagactgcgagaaattaccttacttcc

SEQ ID NO: 411743 - DNA, 33 bp, Homo sapien
atgtcgttggtatgtacgaagtgcgctggcctg

SEQ ID NO: 411744 - DNA, 33 bp, Homo sapien
atgtcgttggtatgtaggaagtgcgctggcctg

SEQ ID NO: 411745 - DNA, 33 bp, Homo sapien
gtttgtggtgcacagtcaagtgttggatcacta

SEQ ID NO: 411746 - DNA, 33 bp, Homo sapien
gtttgtggtgcacagttaagtgttggatcacta

SEQ ID NO: 411747 - DNA, 33 bp, Homo sapien
tcttggctgtggaggaacttagttgccaggaaa

SEQ ID NO: 411748 - DNA, 33 bp, Homo sapien
tcttggctgtggaggaccttagttgccaggaaa

SEQ ID NO: 411749 - DNA, 33 bp, Homo sapien
ccaacaggctaggaacaaaggtctttctcaaat

SEQ ID NO: 411750 - DNA, 33 bp, Homo sapien
ccaacaggctaggaacgaaggtctttctcaaat

SEQ ID NO: 411751 - DNA, 33 bp, Homo sapien
agcacattaagtcataaccctaaccaaaatggc

SEQ ID NO: 411752 - DNA, 33 bp, Homo sapien
agcacattaagtcatatccctaaccaaaatggc

SEQ ID NO: 411753 - DNA, 33 bp, Homo sapien
tcatacctcttactaccggcttcagtatcaaaa

SEQ ID NO: 411754 - DNA, 33 bp, Homo sapien
tcatacctcttactactggcttcagtatcaaaa

SEQ ID NO: 411755 - DNA, 33 bp, Homo sapien
agcaaatgtcactaaaactgcctttgtagtaac

SEQ ID NO: 411756 - DNA, 33 bp, Homo sapien
agcaaatgtcactaaagctgcctttgtagtaac

SEQ ID NO: 411757 - DNA, 33 bp, Homo sapien
ttgtgaaaaccatataaaattgtatacatacat

SEQ ID NO: 411758 - DNA, 33 bp, Homo sapien
ttgtgaaaaccatatagaattgtatacatacat

SEQ ID NO: 411759 - DNA, 33 bp, Homo sapien
attaaaaccttcagcaagaaagatttgttattt

SEQ ID NO: 411760 - DNA, 33 bp, Homo sapien
attaaaaccttcagcaggaaagatttgttattt

SEQ ID NO: 411761 - DNA, 33 bp, Homo sapien
caccccagcattatgcaatataaccgtgtaaca

SEQ ID NO: 411762 - DNA, 33 bp, Homo sapien
caccccagcattatgccatataaccgtgtaaca

SEQ ID NO: 411763 - DNA, 33 bp, Homo sapien
cccatacccaagtagcaaaacagtacccagtaa

SEQ ID NO: 411764 - DNA, 33 bp, Homo sapien
cccatacccaagtagcgaaacagtacccagtaa

SEQ ID NO: 411765 - DNA, 33 bp, Homo sapien
gcagaggttgaagtgactcaagattttgccact

SEQ ID NO: 411766 - DNA, 33 bp, Homo sapien
gcagaggttgaagtgagtcaagattttgccact

SEQ ID NO: 411767 - DNA, 33 bp, Homo sapien
cgatgtaagtccagaaaacagccataataataa

SEQ ID NO: 411768 - DNA, 33 bp, Homo sapien
cgatgtaagtccagaagacagccataataataa

SEQ ID NO: 411769 - DNA, 33 bp, Homo sapien
aaataaacactcttaaccttcttcagtctatat

SEQ ID NO: 411770 - DNA, 33 bp, Homo sapien
aaataaacactcttaatcttcttcagtctatat

SEQ ID NO: 411771 - DNA, 33 bp, Homo sapien
gagggctccgaagaagacttcagatttaggaca

SEQ ID NO: 411772 - DNA, 33 bp, Homo sapien
gagggctccgaagaagtcttcagatttaggaca

SEQ ID NO: 411773 - DNA, 33 bp, Homo sapien
gcatcattttatattcacctagcaacgtacaag

SEQ ID NO: 411774 - DNA, 33 bp, Homo sapien
gcatcattttatattcgcctagcaacgtacaag

SEQ ID NO: 411775 - DNA, 33 bp, Homo sapien
tactggaagaaatgtaaatgagtagagtacaac

SEQ ID NO: 411776 - DNA, 33 bp, Homo sapien
tactggaagaaatgtagatgagtagagtacaac

SEQ ID NO: 411777 - DNA, 33 bp, Homo sapien
aagtaaaaaaaaatgcaatggacctgtgtggaa

SEQ ID NO: 411778 - DNA, 33 bp, Homo sapien
aagtaaaaaaaaatgcgatggacctgtgtggaa

SEQ ID NO: 411779 - DNA, 33 bp, Homo sapien
gctcagccataagccactaagtgtttagataat

SEQ ID NO: 411780 - DNA, 33 bp, Homo sapien
gctcagccataagccagtaagtgtttagataat

SEQ ID NO: 411781 - DNA, 33 bp, Homo sapien
agcaatagatacaaaaagacagtggagcagtgt

SEQ ID NO: 411782 - DNA, 33 bp, Homo sapien
agcaatagatacaaaatgacagtggagcagtgt

SEQ ID NO: 411783 - DNA, 33 bp, Homo sapien
tttggaatatggaaaaatcaccagactcacttg

SEQ ID NO: 411784 - DNA, 33 bp, Homo sapien
tttggaatatggaaaagtcaccagactcacttg

SEQ ID NO: 411785 - DNA, 33 bp, Homo sapien
caaaaacataaaaattaaaaaaatgctgacagg

SEQ ID NO: 411786 - DNA, 33 bp, Homo sapien
caaaaacataaaaatttaaaaaatgctgacagg

SEQ ID NO: 411787 - DNA, 33 bp, Homo sapien
ccttggaattgataggacacgtagacttgagag

SEQ ID NO: 411788 - DNA, 33 bp, Homo sapien
ccttggaattgatagggcacgtagacttgagag

SEQ ID NO: 411789 - DNA, 33 bp, Homo sapien
aggtttttctttcccaagagccccagcaaatat

SEQ ID NO: 411790 - DNA, 33 bp, Homo sapien
aggtttttctttcccaggagccccagcaaatat

SEQ ID NO: 411791 - DNA, 33 bp, Homo sapien
ctcaaatcgttgtggaacccgaaccgacggctg

SEQ ID NO: 411792 - DNA, 33 bp, Homo sapien
ctcaaatcgttgtggagcccgaaccgacggctg

SEQ ID NO: 411793 - DNA, 33 bp, Homo sapien
aagcacacaagaatctcacaagcagcacatgat

SEQ ID NO: 411794 - DNA, 33 bp, Homo sapien
aagcacacaagaatctgacaagcagcacatgat

SEQ ID NO: 411795 - DNA, 33 bp, Homo sapien
acttcagtaaaagggacagtagtaggtcaattt

SEQ ID NO: 411796 - DNA, 33 bp, Homo sapien
acttcagtaaaagggagagtagtaggtcaattt

SEQ ID NO: 411797 - DNA, 33 bp, Homo sapien
tttcaccaaaataaggaaccctggaggaaaatc

SEQ ID NO: 411798 - DNA, 33 bp, Homo sapien
tttcaccaaaataagggaccctggaggaaaatc

SEQ ID NO: 411799 - DNA, 33 bp, Homo sapien
ttcactttttcttccacgtcttaaattgcaaag

SEQ ID NO: 411800 - DNA, 33 bp, Homo sapien
ttcactttttcttccatgtcttaaattgcaaag

SEQ ID NO: 411801 - DNA, 33 bp, Homo sapien
ctatgcacgtaagaaacattcacaagtaccgca

SEQ ID NO: 411802 - DNA, 33 bp, Homo sapien
ctatgcacgtaagaaatattcacaagtaccgca

SEQ ID NO: 411803 - DNA, 33 bp, Homo sapien
atgtaccaccatcaagccaaaggacagacctgc

SEQ ID NO: 411804 - DNA, 33 bp, Homo sapien
atgtaccaccatcaagtcaaaggacagacctgc

SEQ ID NO: 411805 - DNA, 33 bp, Homo sapien
tatgagataatgctacaggtttgatttgagact

SEQ ID NO: 411806 - DNA, 33 bp, Homo sapien
tatgagataatgctacgggtttgatttgagact

SEQ ID NO: 411807 - DNA, 33 bp, Homo sapien
tgaggcatgtgtaagcaagcgagcggggggttc

SEQ ID NO: 411808 - DNA, 33 bp, Homo sapien
tgaggcatgtgtaagcgagcgagcggggggttc

SEQ ID NO: 411809 - DNA, 33 bp, Homo sapien
cagctgtcagcataaacggtatacctaagatgt

SEQ ID NO: 411810 - DNA, 33 bp, Homo sapien
cagctgtcagcataaatggtatacctaagatgt

SEQ ID NO: 411811 - DNA, 33 bp, Homo sapien
ctactacatgaataccaaaggcagatttgttag

SEQ ID NO: 411812 - DNA, 33 bp, Homo sapien
ctactacatgaataccgaaggcagatttgttag

SEQ ID NO: 411813 - DNA, 33 bp, Homo sapien
ttgttctttaggagccaaatgagaatacaaata

SEQ ID NO: 411814 - DNA, 33 bp, Homo sapien
ttgttctttaggagccgaatgagaatacaaata

SEQ ID NO: 411815 - DNA, 33 bp, Homo sapien
ccttagttagaccaacaaaggtatctgaaccaa

SEQ ID NO: 411816 - DNA, 33 bp, Homo sapien
ccttagttagaccaacgaaggtatctgaaccaa

SEQ ID NO: 411817 - DNA, 33 bp, Homo sapien
ttaggtttacctttaaagtcatagccccatgtt

SEQ ID NO: 411818 - DNA, 33 bp, Homo sapien
ttaggtttacctttaaggtcatagccccatgtt

SEQ ID NO: 411819 - DNA, 33 bp, Homo sapien
tcatcaagaaatcttacagttattccactgaac

SEQ ID NO: 411820 - DNA, 33 bp, Homo sapien
tcatcaagaaatcttagagttattccactgaac

SEQ ID NO: 411821 - DNA, 33 bp, Homo sapien
ttatgtctacaccaacaaattcaaacacacaac

SEQ ID NO: 411822 - DNA, 33 bp, Homo sapien
ttatgtctacaccaacgaattcaaacacacaac

SEQ ID NO: 411823 - DNA, 33 bp, Homo sapien
aagatttagcaaggacactaaactttcataaag

SEQ ID NO: 411824 - DNA, 33 bp, Homo sapien
aagatttagcaaggacgctaaactttcataaag

SEQ ID NO: 411825 - DNA, 33 bp, Homo sapien
tttgcctccaggtaaactctgaaaacaagtgaa

SEQ ID NO: 411826 - DNA, 33 bp, Homo sapien
tttgcctccaggtaaagtctgaaaacaagtgaa

SEQ ID NO: 411827 - DNA, 33 bp, Homo sapien
tctttgaaatgactatcaaatcataaaagcaga

SEQ ID NO: 411828 - DNA, 33 bp, Homo sapien
tctttgaaatgactatgaaatcataaaagcaga

SEQ ID NO: 411829 - DNA, 33 bp, Homo sapien
gaatactggaaaacaaaggtcccaaagtctcca

SEQ ID NO: 411830 - DNA, 33 bp, Homo sapien
gaatactggaaaacaatggtcccaaagtctcca

SEQ ID NO: 411831 - DNA, 33 bp, Homo sapien
ccgcgcccagcctcacggaaatattctaacata

SEQ ID NO: 411832 - DNA, 33 bp, Homo sapien
ccgcgcccagcctcactgaaatattctaacata

SEQ ID NO: 411833 - DNA, 33 bp, Homo sapien
cattgttgttagtatacagaaatgcaactgatt

SEQ ID NO: 411834 - DNA, 33 bp, Homo sapien
cattgttgttagtatatagaaatgcaactgatt

SEQ ID NO: 411835 - DNA, 33 bp, Homo sapien
cagaagcaaacttgcagctttaggaaatagtga

SEQ ID NO: 411836 - DNA, 33 bp, Homo sapien
cagaagcaaacttgcatctttaggaaatagtga

SEQ ID NO: 411837 - DNA, 33 bp, Homo sapien
tgctagaaaactgctacacaaacatcatcagta

SEQ ID NO: 411838 - DNA, 33 bp, Homo sapien
tgctagaaaactgctagacaaacatcatcagta

SEQ ID NO: 411839 - DNA, 33 bp, Homo sapien
aaaatcaacatacaacaatcagtagcatttcta

SEQ ID NO: 411840 - DNA, 33 bp, Homo sapien
aaaatcaacatacaacgatcagtagcatttcta

SEQ ID NO: 411841 - DNA, 33 bp, Homo sapien
tacacatctacatagaaaacacaattttaacac

SEQ ID NO: 411842 - DNA, 33 bp, Homo sapien
tacacatctacatagagaacacaattttaacac

SEQ ID NO: 411843 - DNA, 33 bp, Homo sapien
cttatgtggtttgctgaataaagaagcaagaat

SEQ ID NO: 411844 - DNA, 33 bp, Homo sapien
cttatgtggtttgctgtataaagaagcaagaat

SEQ ID NO: 411845 - DNA, 33 bp, Homo sapien
cagggattagaaagataataactacagtagtcc

SEQ ID NO: 411846 - DNA, 33 bp, Homo sapien
cagggattagaaagatgataactacagtagtcc

SEQ ID NO: 411847 - DNA, 33 bp, Homo sapien
aaccagcccagtaaccaaggcataaggttggtg

SEQ ID NO: 411848 - DNA, 33 bp, Homo sapien
aaccagcccagtaaccgaggcataaggttggtg

SEQ ID NO: 411849 - DNA, 33 bp, Homo sapien
acaaacacattgtatacactttcacactgacag

SEQ ID NO: 411850 - DNA, 33 bp, Homo sapien
acaaacacattgtatatactttcacactgacag

SEQ ID NO: 411851 - DNA, 33 bp, Homo sapien
acaatgtgtttgtccgacacacaacaggagagt

SEQ ID NO: 411852 - DNA, 33 bp, Homo sapien
acaatgtgtttgtccggcacacaacaggagagt

SEQ ID NO: 411853 - DNA, 33 bp, Homo sapien
aacattccctatcccccccattgagcgtgaaat

SEQ ID NO: 411854 - DNA, 33 bp, Homo sapien
aacattccctatcccctccattgagcgtgaaat

SEQ ID NO: 411855 - DNA, 33 bp, Homo sapien
ttgaatgagaaatatacgttaacgcattttttg

SEQ ID NO: 411856 - DNA, 33 bp, Homo sapien
ttgaatgagaaatatatgttaacgcattttttg

SEQ ID NO: 411857 - DNA, 33 bp, Homo sapien
aaaagatgagattgtaagtgataacacaatcca

SEQ ID NO: 411858 - DNA, 33 bp, Homo sapien
aaaagatgagattgtaggtgataacacaatcca

SEQ ID NO: 411859 - DNA, 33 bp, Homo sapien
aatatttagtagacaccgagaactactgatatc

SEQ ID NO: 411860 - DNA, 33 bp, Homo sapien
aatatttagtagacactgagaactactgatatc

SEQ ID NO: 411861 - DNA, 33 bp, Homo sapien
caccagacttactataagaagtatggcaagcac

SEQ ID NO: 411862 - DNA, 33 bp, Homo sapien
caccagacttactataggaagtatggcaagcac

SEQ ID NO: 411863 - DNA, 33 bp, Homo sapien
ccatgcctacttttcaccgtcttagccacctgt

SEQ ID NO: 411864 - DNA, 33 bp, Homo sapien
ccatgcctacttttcatcgtcttagccacctgt

SEQ ID NO: 411865 - DNA, 33 bp, Homo sapien
tatcacttcatgtacactgtaagaaccttacaa

SEQ ID NO: 411866 - DNA, 33 bp, Homo sapien
tatcacttcatgtacagtgtaagaaccttacaa

SEQ ID NO: 411867 - DNA, 33 bp, Homo sapien
tcatattgaatgtaaacggtctaaacactcaat

SEQ ID NO: 411868 - DNA, 33 bp, Homo sapien
tcatattgaatgtaaatggtctaaacactcaat

SEQ ID NO: 411869 - DNA, 33 bp, Homo sapien
gaaaattcgatgtgaaaagctcataagaacaaa

SEQ ID NO: 411870 - DNA, 33 bp, Homo sapien
gaaaattcgatgtgaagagctcataagaacaaa

SEQ ID NO: 411871 - DNA, 33 bp, Homo sapien
ctatttagtaaatgtacggatgaaactaaattc

SEQ ID NO: 411872 - DNA, 33 bp, Homo sapien
ctatttagtaaatgtatggatgaaactaaattc

SEQ ID NO: 411873 - DNA, 33 bp, Homo sapien
tgttactgctaatgacaagtgacacgcccttta

SEQ ID NO: 411874 - DNA, 33 bp, Homo sapien
tgttactgctaatgacgagtgacacgcccttta

SEQ ID NO: 411875 - DNA, 33 bp, Homo sapien
taaaaagagaacataacgtggtgaaattgttac

SEQ ID NO: 411876 - DNA, 33 bp, Homo sapien
taaaaagagaacataatgtggtgaaattgttac

SEQ ID NO: 411877 - DNA, 33 bp, Homo sapien
tctttactacagtctacaaacaatcattcccaa

SEQ ID NO: 411878 - DNA, 33 bp, Homo sapien
tctttactacagtctataaacaatcattcccaa

SEQ ID NO: 411879 - DNA, 33 bp, Homo sapien
ccaagaggcacagggacggatctgcacagttgc

SEQ ID NO: 411880 - DNA, 33 bp, Homo sapien
ccaagaggcacagggatggatctgcacagttgc

SEQ ID NO: 411881 - DNA, 33 bp, Homo sapien
cagaatcctaattctacagagccatcctttatc

SEQ ID NO: 411882 - DNA, 33 bp, Homo sapien
cagaatcctaattctagagagccatcctttatc

SEQ ID NO: 411883 - DNA, 33 bp, Homo sapien
tgattttgggaacaaccggactggaaaaggaga

SEQ ID NO: 411884 - DNA, 33 bp, Homo sapien
tgattttgggaacaactggactggaaaaggaga

SEQ ID NO: 411885 - DNA, 33 bp, Homo sapien
ttattgagctgtataaaactgttcattttaaaa

SEQ ID NO: 411886 - DNA, 33 bp, Homo sapien
ttattgagctgtataacactgttcattttaaaa

SEQ ID NO: 411887 - DNA, 33 bp, Homo sapien
ccctgcctaacattcaagtggtttcagatggta

SEQ ID NO: 411888 - DNA, 33 bp, Homo sapien
ccctgcctaacattcaggtggtttcagatggta

SEQ ID NO: 411889 - DNA, 33 bp, Homo sapien
aaagcctgggaattaaacagttgctgagtcctt

SEQ ID NO: 411890 - DNA, 33 bp, Homo sapien
aaagcctgggaattaagcagttgctgagtcctt

SEQ ID NO: 411891 - DNA, 33 bp, Homo sapien
caatgtaaccaggcaacgtcagaattttaaaaa

SEQ ID NO: 411892 - DNA, 33 bp, Homo sapien
caatgtaaccaggcaatgtcagaattttaaaaa

SEQ ID NO: 411893 - DNA, 33 bp, Homo sapien
ccttctctcctaaacagcttgcttaaatgccag

SEQ ID NO: 411894 - DNA, 33 bp, Homo sapien
ccttctctcctaaacatcttgcttaaatgccag

SEQ ID NO: 411895 - DNA, 33 bp, Homo sapien
ttaagtgttccagccactggagctggttctctt

SEQ ID NO: 411896 - DNA, 33 bp, Homo sapien
ttaagtgttccagccattggagctggttctctt

SEQ ID NO: 411897 - DNA, 33 bp, Homo sapien
aatgatttaacactgaactaagacttggtatct

SEQ ID NO: 411898 - DNA, 33 bp, Homo sapien
aatgatttaacactgagctaagacttggtatct

SEQ ID NO: 411899 - DNA, 33 bp, Homo sapien
atgatggttgtgttcacactttctttaaaatct

SEQ ID NO: 411900 - DNA, 33 bp, Homo sapien
atgatggttgtgttcatactttctttaaaatct

SEQ ID NO: 411901 - DNA, 33 bp, Homo sapien
ggaagggaagaagtaaaactgtttctattgcta

SEQ ID NO: 411902 - DNA, 33 bp, Homo sapien
ggaagggaagaagtaagactgtttctattgcta

SEQ ID NO: 411903 - DNA, 33 bp, Homo sapien
tgatttctccccttcactaaaactcatttaatt

SEQ ID NO: 411904 - DNA, 33 bp, Homo sapien
tgatttctccccttcattaaaactcatttaatt

SEQ ID NO: 411905 - DNA, 33 bp, Homo sapien
ctttacctggccctaaagtgaaaagctctacat

SEQ ID NO: 411906 - DNA, 33 bp, Homo sapien
ctttacctggccctaacgtgaaaagctctacat

SEQ ID NO: 411907 - DNA, 33 bp, Homo sapien
caagatatggcgcactaaaggactggaaatttt

SEQ ID NO: 411908 - DNA, 33 bp, Homo sapien
caagatatggcgcactgaaggactggaaatttt

SEQ ID NO: 411909 - DNA, 33 bp, Homo sapien
agtcttctaggatctcaaagggttttcaaagtc

SEQ ID NO: 411910 - DNA, 33 bp, Homo sapien
agtcttctaggatctccaagggttttcaaagtc

SEQ ID NO: 411911 - DNA, 33 bp, Homo sapien
gggacagaagagatgaaacagaagagtactcaa

SEQ ID NO: 411912 - DNA, 33 bp, Homo sapien
gggacagaagagatgacacagaagagtactcaa

SEQ ID NO: 411913 - DNA, 33 bp, Homo sapien
agaatgccgatgaggaccttctatgacatgagt

SEQ ID NO: 411914 - DNA, 33 bp, Homo sapien
agaatgccgatgaggatcttctatgacatgagt

SEQ ID NO: 411915 - DNA, 33 bp, Homo sapien
tatatatatgacagaaaggatcttggcaccctg

SEQ ID NO: 411916 - DNA, 33 bp, Homo sapien
tatatatatgacagaagggatcttggcaccctg

SEQ ID NO: 411917 - DNA, 33 bp, Homo sapien
cagctagcgtccgctccgagactgctctgcatg

SEQ ID NO: 411918 - DNA, 33 bp, Homo sapien
cagctagcgtccgctctgagactgctctgcatg

SEQ ID NO: 411919 - DNA, 33 bp, Homo sapien
ttcatttaagatataaactgtggcccaaagtta

SEQ ID NO: 411920 - DNA, 33 bp, Homo sapien
ttcatttaagatataagctgtggcccaaagtta

SEQ ID NO: 411921 - DNA, 33 bp, Homo sapien
tctgccatctctctacgaggtcaggtgaaacca

SEQ ID NO: 411922 - DNA, 33 bp, Homo sapien
tctgccatctctctactaggtcaggtgaaacca

SEQ ID NO: 411923 - DNA, 33 bp, Homo sapien
cccagaacgcaggacacggtcttatatgctttt

SEQ ID NO: 411924 - DNA, 33 bp, Homo sapien
cccagaacgcaggacatggtcttatatgctttt

SEQ ID NO: 411925 - DNA, 33 bp, Homo sapien
agtatttttggccaccactctcaaattcttcta

SEQ ID NO: 411926 - DNA, 33 bp, Homo sapien
agtatttttggccaccgctctcaaattcttcta

SEQ ID NO: 411927 - DNA, 33 bp, Homo sapien
gggggtcacatgtcaccgattgagtaatagagt

SEQ ID NO: 411928 - DNA, 33 bp, Homo sapien
gggggtcacatgtcactgattgagtaatagagt

SEQ ID NO: 411929 - DNA, 33 bp, Homo sapien
aggatgcagaaactgacgattggcagtcatctt

SEQ ID NO: 411930 - DNA, 33 bp, Homo sapien
aggatgcagaaactgatgattggcagtcatctt

SEQ ID NO: 411931 - DNA, 33 bp, Homo sapien
tcttctcatgttggtccgaaatatgccagatca

SEQ ID NO: 411932 - DNA, 33 bp, Homo sapien
tcttctcatgttggtctgaaatatgccagatca

SEQ ID NO: 411933 - DNA, 33 bp, Homo sapien
cagcctggcgttactacaatttatcacacaaag

SEQ ID NO: 411934 - DNA, 33 bp, Homo sapien
cagcctggcgttactagaatttatcacacaaag

SEQ ID NO: 411935 - DNA, 33 bp, Homo sapien
tgccatcccgtaaacaaggtgactcatcgtcac

SEQ ID NO: 411936 - DNA, 33 bp, Homo sapien
tgccatcccgtaaacatggtgactcatcgtcac

SEQ ID NO: 411937 - DNA, 33 bp, Homo sapien
tgtctgcaatagagacacagagacgatgaattc

SEQ ID NO: 411938 - DNA, 33 bp, Homo sapien
tgtctgcaatagagacgcagagacgatgaattc

SEQ ID NO: 411939 - DNA, 33 bp, Homo sapien
ttgttcagaatctcacacctcacagaaaggtca

SEQ ID NO: 411940 - DNA, 33 bp, Homo sapien
ttgttcagaatctcacgcctcacagaaaggtca

SEQ ID NO: 411941 - DNA, 33 bp, Homo sapien
caaggctggtctttcccctaccttgagttccca

SEQ ID NO: 411942 - DNA, 33 bp, Homo sapien
caaggctggtctttcctctaccttgagttccca

SEQ ID NO: 411943 - DNA, 33 bp, Homo sapien
ctgagcaagttacccaataggtcaccttgccat

SEQ ID NO: 411944 - DNA, 33 bp, Homo sapien
ctgagcaagttacccagtaggtcaccttgccat

SEQ ID NO: 411945 - DNA, 33 bp, Homo sapien
gtttggttgttgataccggacgcgctgagacta

SEQ ID NO: 411946 - DNA, 33 bp, Homo sapien
gtttggttgttgatactggacgcgctgagacta

SEQ ID NO: 411947 - DNA, 33 bp, Homo sapien
tgcaattgctgaaccacgtggtaactctatgtt

SEQ ID NO: 411948 - DNA, 33 bp, Homo sapien
tgcaattgctgaaccatgtggtaactctatgtt

SEQ ID NO: 411949 - DNA, 33 bp, Homo sapien
tctctggctgagacacagaccgtctctcaatgt

SEQ ID NO: 411950 - DNA, 33 bp, Homo sapien
tctctggctgagacacggaccgtctctcaatgt

SEQ ID NO: 411951 - DNA, 33 bp, Homo sapien
aaataaatgattgagtaaaataagtgaatcaat

SEQ ID NO: 411952 - DNA, 33 bp, Homo sapien
aaataaatgattgagtgaaataagtgaatcaat

SEQ ID NO: 411953 - DNA, 33 bp, Homo sapien
tgtgcctgcattttcactatggccaatcatatg

SEQ ID NO: 411954 - DNA, 33 bp, Homo sapien
tgtgcctgcattttcattatggccaatcatatg

SEQ ID NO: 411955 - DNA, 33 bp, Homo sapien
aaaagaaaaaacaactaagactagatgcgttga

SEQ ID NO: 411956 - DNA, 33 bp, Homo sapien
aaaagaaaaaacaactgagactagatgcgttga

SEQ ID NO: 411957 - DNA, 33 bp, Homo sapien
ggtgaatttcaagtgacctgtaccgatgaggaa

SEQ ID NO: 411958 - DNA, 33 bp, Homo sapien
ggtgaatttcaagtgagctgtaccgatgaggaa

SEQ ID NO: 411959 - DNA, 33 bp, Homo sapien
catgaaaagcttgcagcagagtctgtgtgtaca

SEQ ID NO: 411960 - DNA, 33 bp, Homo sapien
catgaaaagcttgcagtagagtctgtgtgtaca

SEQ ID NO: 411961 - DNA, 33 bp, Homo sapien
atgtatgtgtgtgaaacgtggaaatcgatttat

SEQ ID NO: 411962 - DNA, 33 bp, Homo sapien
atgtatgtgtgtgaaatgtggaaatcgatttat

SEQ ID NO: 411963 - DNA, 33 bp, Homo sapien
cccccattgaccagagaaaaaaatagctgctgg

SEQ ID NO: 411964 - DNA, 33 bp, Homo sapien
cccccattgaccagaggaaaaaatagctgctgg

SEQ ID NO: 411965 - DNA, 33 bp, Homo sapien
aaatgagagggtttacaggaagcactttgcacg

SEQ ID NO: 411966 - DNA, 33 bp, Homo sapien
aaatgagagggtttaccggaagcactttgcacg

SEQ ID NO: 411967 - DNA, 33 bp, Homo sapien
acaccacagtgtctacaaaattaagaaatagaa

SEQ ID NO: 411968 - DNA, 33 bp, Homo sapien
acaccacagtgtctaccaaattaagaaatagaa

SEQ ID NO: 411969 - DNA, 33 bp, Homo sapien
tgggcccccgctctcgaacctgagactgggaga

SEQ ID NO: 411970 - DNA, 33 bp, Homo sapien
tgggcccccgctctcggacctgagactgggaga

SEQ ID NO: 411971 - DNA, 33 bp, Homo sapien
ctttacccagcaggaaatctcatctcagtcctg

SEQ ID NO: 411972 - DNA, 33 bp, Homo sapien
ctttacccagcaggaagtctcatctcagtcctg

SEQ ID NO: 411973 - DNA, 33 bp, Homo sapien
gaagggtttgaaggaaaagaccatttggaacct

SEQ ID NO: 411974 - DNA, 33 bp, Homo sapien
gaagggtttgaaggaagagaccatttggaacct

SEQ ID NO: 411975 - DNA, 33 bp, Homo sapien
ctccagtctgtcccataaaagacccaaatgtaa

SEQ ID NO: 411976 - DNA, 33 bp, Homo sapien
ctccagtctgtcccatgaaagacccaaatgtaa

SEQ ID NO: 411977 - DNA, 33 bp, Homo sapien
gtctgaatataattccaacggcatcaaggtcat

SEQ ID NO: 411978 - DNA, 33 bp, Homo sapien
gtctgaatataattccgacggcatcaaggtcat

SEQ ID NO: 411979 - DNA, 33 bp, Homo sapien
cttctatgataacaacaccttctggaataactc

SEQ ID NO: 411980 - DNA, 33 bp, Homo sapien
cttctatgataacaacgccttctggaataactc

SEQ ID NO: 411981 - DNA, 33 bp, Homo sapien
ctactacatatgctacaaggtggtcccatgaga

SEQ ID NO: 411982 - DNA, 33 bp, Homo sapien
ctactacatatgctacgaggtggtcccatgaga

SEQ ID NO: 411983 - DNA, 33 bp, Homo sapien
atgggggaggataatacgaatgaaggtctaggg

SEQ ID NO: 411984 - DNA, 33 bp, Homo sapien
atgggggaggataatatgaatgaaggtctaggg

SEQ ID NO: 411985 - DNA, 33 bp, Homo sapien
ggtccacttttcttaaactatagctgcagattc

SEQ ID NO: 411986 - DNA, 33 bp, Homo sapien
ggtccacttttcttaagctatagctgcagattc

SEQ ID NO: 411987 - DNA, 33 bp, Homo sapien
aatagttatcaagtgacgttacagaaaaaaaaa

SEQ ID NO: 411988 - DNA, 33 bp, Homo sapien
aatagttatcaagtgatgttacagaaaaaaaaa

SEQ ID NO: 411989 - DNA, 33 bp, Homo sapien
ttttcagagacatgatcaaaggattaccgtgtt

SEQ ID NO: 411990 - DNA, 33 bp, Homo sapien
ttttcagagacatgatgaaaggattaccgtgtt

SEQ ID NO: 411991 - DNA, 33 bp, Homo sapien
tcaccagtgtgtacaacagaacaaaagaaagac

SEQ ID NO: 411992 - DNA, 33 bp, Homo sapien
tcaccagtgtgtacaatagaacaaaagaaagac

SEQ ID NO: 411993 - DNA, 33 bp, Homo sapien
ttactaatctacctgaaaactatctttaagagg

SEQ ID NO: 411994 - DNA, 33 bp, Homo sapien
ttactaatctacctgagaactatctttaagagg

SEQ ID NO: 411995 - DNA, 33 bp, Homo sapien
gataatcctttgccaactaagatagttctccag

SEQ ID NO: 411996 - DNA, 33 bp, Homo sapien
gataatcctttgccaagtaagatagttctccag

SEQ ID NO: 411997 - DNA, 33 bp, Homo sapien
ttctgtgcaaattaaactgaatggtttggaaac

SEQ ID NO: 411998 - DNA, 33 bp, Homo sapien
ttctgtgcaaattaaattgaatggtttggaaac

SEQ ID NO: 411999 - DNA, 33 bp, Homo sapien
agatttttaggtttggcagcacgatgtcaaagg

SEQ ID NO: 412000 - DNA, 33 bp, Homo sapien
agatttttaggtttggtagcacgatgtcaaagg

SEQ ID NO: 412001 - DNA, 33 bp, Homo sapien
tttttttctaaaatgcagatcttttactatacg

SEQ ID NO: 412002 - DNA, 33 bp, Homo sapien
tttttttctaaaatgcggatcttttactatacg

SEQ ID NO: 412003 - DNA, 33 bp, Homo sapien
gtaatagtccattacacagatatacattttatt

SEQ ID NO: 412004 - DNA, 33 bp, Homo sapien
gtaatagtccattacatagatatacattttatt

SEQ ID NO: 412005 - DNA, 33 bp, Homo sapien
caaagaagggaaccccaaaatgtaagtataaat

SEQ ID NO: 412006 - DNA, 33 bp, Homo sapien
caaagaagggaaccccgaaatgtaagtataaat

SEQ ID NO: 412007 - DNA, 33 bp, Homo sapien
cacaaactaacttctaaacagataaacacaaaa

SEQ ID NO: 412008 - DNA, 33 bp, Homo sapien
cacaaactaacttctagacagataaacacaaaa

SEQ ID NO: 412009 - DNA, 33 bp, Homo sapien
taataatatgactatcaatctatgtaacgttgt

SEQ ID NO: 412010 - DNA, 33 bp, Homo sapien
taataatatgactatccatctatgtaacgttgt

SEQ ID NO: 412011 - DNA, 33 bp, Homo sapien
aagggcatgaggcaacaggagacatttatacaa

SEQ ID NO: 412012 - DNA, 33 bp, Homo sapien
aagggcatgaggcaaccggagacatttatacaa

SEQ ID NO: 412013 - DNA, 33 bp, Homo sapien
caggcacagctgaggacgtattaaagatggagg

SEQ ID NO: 412014 - DNA, 33 bp, Homo sapien
caggcacagctgaggatgtattaaagatggagg

SEQ ID NO: 412015 - DNA, 33 bp, Homo sapien
aagtgtagagtgaaaaaaaagagggtcagtgac

SEQ ID NO: 412016 - DNA, 33 bp, Homo sapien
aagtgtagagtgaaaacaaagagggtcagtgac

SEQ ID NO: 412017 - DNA, 33 bp, Homo sapien
gtaccaaatgtaaagcacccttactatgatagt

SEQ ID NO: 412018 - DNA, 33 bp, Homo sapien
gtaccaaatgtaaagctcccttactatgatagt

SEQ ID NO: 412019 - DNA, 33 bp, Homo sapien
tacctaaagactgctacggactagaaaaataaa

SEQ ID NO: 412020 - DNA, 33 bp, Homo sapien
tacctaaagactgctatggactagaaaaataaa

SEQ ID NO: 412021 - DNA, 33 bp, Homo sapien
atgttcacaatgttcacctttgagtttatgagt

SEQ ID NO: 412022 - DNA, 33 bp, Homo sapien
atgttcacaatgttcatctttgagtttatgagt

SEQ ID NO: 412023 - DNA, 33 bp, Homo sapien
atatttggaaaactgacctggcattgatatgca

SEQ ID NO: 412024 - DNA, 33 bp, Homo sapien
atatttggaaaactgatctggcattgatatgca

SEQ ID NO: 412025 - DNA, 33 bp, Homo sapien
tcaaaactggaaaaatgattaagtgacactggg

SEQ ID NO: 412026 - DNA, 33 bp, Homo sapien
tcaaaactggaaaaattattaagtgacactggg

SEQ ID NO: 412027 - DNA, 33 bp, Homo sapien
gcagtgttacagacatgaaggaagaagaaaatg

SEQ ID NO: 412028 - DNA, 33 bp, Homo sapien
gcagtgttacagacattaaggaagaagaaaatg

SEQ ID NO: 412029 - DNA, 33 bp, Homo sapien
acataagtatcaggtaggtttatgtgtgatctt

SEQ ID NO: 412030 - DNA, 33 bp, Homo sapien
acataagtatcaggtatgtttatgtgtgatctt

SEQ ID NO: 412031 - DNA, 33 bp, Homo sapien
cctgacagggtttttacgaaaattagccagggc

SEQ ID NO: 412032 - DNA, 33 bp, Homo sapien
cctgacagggtttttatgaaaattagccagggc

SEQ ID NO: 412033 - DNA, 33 bp, Homo sapien
ttgcgattctatctgtaaagctctgagaatgag

SEQ ID NO: 412034 - DNA, 33 bp, Homo sapien
ttgcgattctatctgtgaagctctgagaatgag

SEQ ID NO: 412035 - DNA, 33 bp, Homo sapien
acctcatattctatgaaaatgagtttgtagctg

SEQ ID NO: 412036 - DNA, 33 bp, Homo sapien
acctcatattctatgagaatgagtttgtagctg

SEQ ID NO: 412037 - DNA, 33 bp, Homo sapien
aaaggtaacatcattgaaatagattctataata

SEQ ID NO: 412038 - DNA, 33 bp, Homo sapien
aaaggtaacatcattgtaatagattctataata

SEQ ID NO: 412039 - DNA, 33 bp, Homo sapien
tttctaaggaatgtgaagaatcttactctttcc

SEQ ID NO: 412040 - DNA, 33 bp, Homo sapien
tttctaaggaatgtgaggaatcttactctttcc

SEQ ID NO: 412041 - DNA, 33 bp, Homo sapien
atgcttccaaatctaaagtatctaaagtttaga

SEQ ID NO: 412042 - DNA, 33 bp, Homo sapien
atgcttccaaatctaacgtatctaaagtttaga

SEQ ID NO: 412043 - DNA, 33 bp, Homo sapien
ggcgcaactagaaccaataagtccctcaggctg

SEQ ID NO: 412044 - DNA, 33 bp, Homo sapien
ggcgcaactagaaccagtaagtccctcaggctg

SEQ ID NO: 412045 - DNA, 33 bp, Homo sapien
agatcagataggagtacctgtctattgcaatgg

SEQ ID NO: 412046 - DNA, 33 bp, Homo sapien
agatcagataggagtatctgtctattgcaatgg

SEQ ID NO: 412047 - DNA, 33 bp, Homo sapien
aaccaaagataaggagcattactgtatttacga

SEQ ID NO: 412048 - DNA, 33 bp, Homo sapien
aaccaaagataaggaggattactgtatttacga

SEQ ID NO: 412049 - DNA, 33 bp, Homo sapien
ccttaaattttagcacaatggatcgggataaag

SEQ ID NO: 412050 - DNA, 33 bp, Homo sapien
ccttaaattttagcacgatggatcgggataaag

SEQ ID NO: 412051 - DNA, 33 bp, Homo sapien
attatagtttgagagactaaatagtacagactg

SEQ ID NO: 412052 - DNA, 33 bp, Homo sapien
attatagtttgagagattaaatagtacagactg

SEQ ID NO: 412053 - DNA, 33 bp, Homo sapien
gtaatgataatggtggaaacaatttgtatgttc

SEQ ID NO: 412054 - DNA, 33 bp, Homo sapien
gtaatgataatggtggtaacaatttgtatgttc

SEQ ID NO: 412055 - DNA, 33 bp, Homo sapien
gtgatggctacctaaccagtatagcattataga

SEQ ID NO: 412056 - DNA, 33 bp, Homo sapien
gtgatggctacctaactagtatagcattataga

SEQ ID NO: 412057 - DNA, 33 bp, Homo sapien
taaagtcatgtagtacaaaaagatgaaaagcct

SEQ ID NO: 412058 - DNA, 33 bp, Homo sapien
taaagtcatgtagtacgaaaagatgaaaagcct

SEQ ID NO: 412059 - DNA, 33 bp, Homo sapien
gtgtgatagtttgttacgccactgaatgcttat

SEQ ID NO: 412060 - DNA, 33 bp, Homo sapien
gtgtgatagtttgttatgccactgaatgcttat

SEQ ID NO: 412061 - DNA, 33 bp, Homo sapien
ggaattgttacttagaggtgctacagatttttc

SEQ ID NO: 412062 - DNA, 33 bp, Homo sapien
ggaattgttacttagatgtgctacagatttttc

SEQ ID NO: 412063 - DNA, 33 bp, Homo sapien
tcaacacagcactgacacttatgccagactcca

SEQ ID NO: 412064 - DNA, 33 bp, Homo sapien
tcaacacagcactgactcttatgccagactcca

SEQ ID NO: 412065 - DNA, 33 bp, Homo sapien
ttttagacaagccatacaaaggcatcaaggcac

SEQ ID NO: 412066 - DNA, 33 bp, Homo sapien
ttttagacaagccatataaaggcatcaaggcac

SEQ ID NO: 412067 - DNA, 33 bp, Homo sapien
ggagtcttcgtttcataaggaaaatggtctgga

SEQ ID NO: 412068 - DNA, 33 bp, Homo sapien
ggagtcttcgtttcatgaggaaaatggtctgga

SEQ ID NO: 412069 - DNA, 33 bp, Homo sapien
agttactcattactcaaagacaattcaaaagga

SEQ ID NO: 412070 - DNA, 33 bp, Homo sapien
agttactcattactcagagacaattcaaaagga

SEQ ID NO: 412071 - DNA, 33 bp, Homo sapien
cacaacttttatccaagaattgttacttggcta

SEQ ID NO: 412072 - DNA, 33 bp, Homo sapien
cacaacttttatccaataattgttacttggcta

SEQ ID NO: 412073 - DNA, 33 bp, Homo sapien
ggcaggagattgcatacagagtataatttttat

SEQ ID NO: 412074 - DNA, 33 bp, Homo sapien
ggcaggagattgcatatagagtataatttttat

SEQ ID NO: 412075 - DNA, 33 bp, Homo sapien
caagaatggatcgaccaattaatcaaaatttta

SEQ ID NO: 412076 - DNA, 33 bp, Homo sapien
caagaatggatcgaccgattaatcaaaatttta

SEQ ID NO: 412077 - DNA, 33 bp, Homo sapien
gcaatgaggaatgcaccgactgagggacactgg

SEQ ID NO: 412078 - DNA, 33 bp, Homo sapien
gcaatgaggaatgcactgactgagggacactgg

SEQ ID NO: 412079 - DNA, 33 bp, Homo sapien
aggagccagcaaagtacatctggcactatatct

SEQ ID NO: 412080 - DNA, 33 bp, Homo sapien
aggagccagcaaagtatatctggcactatatct

SEQ ID NO: 412081 - DNA, 33 bp, Homo sapien
gcaaagttccaaagaaagttgggttctctatca

SEQ ID NO: 412082 - DNA, 33 bp, Homo sapien
gcaaagttccaaagaaggttgggttctctatca

SEQ ID NO: 412083 - DNA, 33 bp, Homo sapien
cagaagtaatgtgtgcaacttcctacacttatc

SEQ ID NO: 412084 - DNA, 33 bp, Homo sapien
cagaagtaatgtgtgctacttcctacacttatc

SEQ ID NO: 412085 - DNA, 33 bp, Homo sapien
agtttgcttaggataacgctttccagctgcacc

SEQ ID NO: 412086 - DNA, 33 bp, Homo sapien
agtttgcttaggataatgctttccagctgcacc

SEQ ID NO: 412087 - DNA, 33 bp, Homo sapien
gaaatgcaaacaataaggataaagtgaaaaata

SEQ ID NO: 412088 - DNA, 33 bp, Homo sapien
gaaatgcaaacaataatgataaagtgaaaaata

SEQ ID NO: 412089 - DNA, 33 bp, Homo sapien
attgtctttatgattacgattttgtcttgtctt

SEQ ID NO: 412090 - DNA, 33 bp, Homo sapien
attgtctttatgattatgattttgtcttgtctt

SEQ ID NO: 412091 - DNA, 33 bp, Homo sapien
aaggagaaagaaatccagacactgaatgaccac

SEQ ID NO: 412092 - DNA, 33 bp, Homo sapien
aaggagaaagaaatccggacactgaatgaccac

SEQ ID NO: 412093 - DNA, 33 bp, Homo sapien
gttcactttaaacttacggcttgatctttttct

SEQ ID NO: 412094 - DNA, 33 bp, Homo sapien
gttcactttaaacttatggcttgatctttttct

SEQ ID NO: 412095 - DNA, 33 bp, Homo sapien
caaggctcacagtcaactctttgttcttatttt

SEQ ID NO: 412096 - DNA, 33 bp, Homo sapien
caaggctcacagtcaattctttgttcttatttt

SEQ ID NO: 412097 - DNA, 33 bp, Homo sapien
aaaacagttcttcaaaatagtaatagatatcaa

SEQ ID NO: 412098 - DNA, 33 bp, Homo sapien
aaaacagttcttcaaagtagtaatagatatcaa

SEQ ID NO: 412099 - DNA, 33 bp, Homo sapien
tcttttctgtgctttaggaaattgtattaatca

SEQ ID NO: 412100 - DNA, 33 bp, Homo sapien
tcttttctgtgctttatgaaattgtattaatca

SEQ ID NO: 412101 - DNA, 33 bp, Homo sapien
ctggatgcctctgaaacttaatacataatctca

SEQ ID NO: 412102 - DNA, 33 bp, Homo sapien
ctggatgcctctgaaatttaatacataatctca

SEQ ID NO: 412103 - DNA, 33 bp, Homo sapien
tctaccttttaataagcccagtctatcccatct

SEQ ID NO: 412104 - DNA, 33 bp, Homo sapien
tctaccttttaataagtccagtctatcccatct

SEQ ID NO: 412105 - DNA, 33 bp, Homo sapien
acaatttcagaccttaacttggatcaaacattg

SEQ ID NO: 412106 - DNA, 33 bp, Homo sapien
acaatttcagaccttatcttggatcaaacattg

SEQ ID NO: 412107 - DNA, 33 bp, Homo sapien
catctgctaatccccaagtctggctgattgtca

SEQ ID NO: 412108 - DNA, 33 bp, Homo sapien
catctgctaatccccaggtctggctgattgtca

SEQ ID NO: 412109 - DNA, 33 bp, Homo sapien
ttttatagcttgcttaaggctatgtgtacaatc

SEQ ID NO: 412110 - DNA, 33 bp, Homo sapien
ttttatagcttgcttagggctatgtgtacaatc

SEQ ID NO: 412111 - DNA, 33 bp, Homo sapien; identical to SEQ ID NO: 412109

SEQ ID NO: 412112 - DNA, 33 bp, Homo sapien; identical to SEQ ID NO: 412110

SEQ ID NO: 412113 - DNA, 33 bp, Homo sapien
gctcactgcagtcttcacctttgagttcaagcg

SEQ ID NO: 412114 - DNA, 33 bp, Homo sapien
gctcactgcagtcttcgcctttgagttcaagcg

SEQ ID NO: 412115 - DNA, 33 bp, Homo sapien
tgaattttcattaagagtctattgagcatttct

SEQ ID NO: 412116 - DNA, 33 bp, Homo sapien
tgaattttcattaagattctattgagcatttct

SEQ ID NO: 412117 - DNA, 33 bp, Homo sapien
aatcaacatcaacatgacaaatactgagtataa

SEQ ID NO: 412118 - DNA, 33 bp, Homo sapien
aatcaacatcaacatggcaaatactgagtataa

SEQ ID NO: 412119 - DNA, 33 bp, Homo sapien
ttaagaactaaggcacacaactcattagcctag

SEQ ID NO: 412120 - DNA, 33 bp, Homo sapien
ttaagaactaaggcacgcaactcattagcctag

SEQ ID NO: 412121 - DNA, 33 bp, Homo sapien
ctagggaaggtggtcaaatcactttatctttgg

SEQ ID NO: 412122 - DNA, 33 bp, Homo sapien
ctagggaaggtggtcacatcactttatctttgg

SEQ ID NO: 412123 - DNA, 33 bp, Homo sapien
ctagagaggtttggtacgagcagtgggtggagc

SEQ ID NO: 412124 - DNA, 33 bp, Homo sapien
ctagagaggtttggtatgagcagtgggtggagc

SEQ ID NO: 412125 - DNA, 33 bp, Homo sapien
aatcctccgggaagcaaggttgtccaaataatt

SEQ ID NO: 412126 - DNA, 33 bp, Homo sapien
aatcctccgggaagcacggttgtccaaataatt

SEQ ID NO: 412127 - DNA, 33 bp, Homo sapien
ataagatggaaaagcaatagcacccacaggtct

SEQ ID NO: 412128 - DNA, 33 bp, Homo sapien
ataagatggaaaagcagtagcacccacaggtct

SEQ ID NO: 412129 - DNA, 33 bp, Homo sapien
gtcggttctagaacacacctgctctcctccacc

SEQ ID NO: 412130 - DNA, 33 bp, Homo sapien
gtcggttctagaacacgcctgctctcctccacc

SEQ ID NO: 412131 - DNA, 33 bp, Homo sapien
caccacatcagtctggaactactattattccca

SEQ ID NO: 412132 - DNA, 33 bp, Homo sapien
caccacatcagtctgggactactattattccca

SEQ ID NO: 412133 - DNA, 33 bp, Homo sapien
agggcagagagaggagaacgagagagaaagatg

SEQ ID NO: 412134 - DNA, 33 bp, Homo sapien
agggcagagagaggaggacgagagagaaagatg

SEQ ID NO: 412135 - DNA, 33 bp, Homo sapien
caaaagagagtggcacaaggtgaaaatctaact

SEQ ID NO: 412136 - DNA, 33 bp, Homo sapien
caaaagagagtggcacgaggtgaaaatctaact

SEQ ID NO: 412137 - DNA, 33 bp, Homo sapien
ttagggactgggaagcaaaggaatgatgggggc

SEQ ID NO: 412138 - DNA, 33 bp, Homo sapien
ttagggactgggaagcgaaggaatgatgggggc

SEQ ID NO: 412139 - DNA, 33 bp, Homo sapien
atatgggatctcgcaaaaccaacacatcctaca

SEQ ID NO: 412140 - DNA, 33 bp, Homo sapien
atatgggatctcgcaacaccaacacatcctaca

SEQ ID NO: 412141 - DNA, 33 bp, Homo sapien
gacaagatttaaagacaggattccaggtaaatt

SEQ ID NO: 412142 - DNA, 33 bp, Homo sapien
gacaagatttaaagaccggattccaggtaaatt

SEQ ID NO: 412143 - DNA, 33 bp, Homo sapien
atcaaaaatcatctcactagggtcagagggggc

SEQ ID NO: 412144 - DNA, 33 bp, Homo sapien
atcaaaaatcatctcagtagggtcagagggggc

SEQ ID NO: 412145 - DNA, 33 bp, Homo sapien
agagaaagaatgggtccatggccaggttgactg

SEQ ID NO: 412146 - DNA, 33 bp, Homo sapien
agagaaagaatgggtctatggccaggttgactg

SEQ ID NO: 412147 - DNA, 33 bp, Homo sapien
tgcaagcatctgggaaccgtatgcctttctctt

SEQ ID NO: 412148 - DNA, 33 bp, Homo sapien
tgcaagcatctgggaatcgtatgcctttctctt

SEQ ID NO: 412149 - DNA, 33 bp, Homo sapien
attcaccttgcaaataaattcttctgaagattt

SEQ ID NO: 412150 - DNA, 33 bp, Homo sapien
attcaccttgcaaatacattcttctgaagattt

SEQ ID NO: 412151 - DNA, 33 bp, Homo sapien
gctgctcttcaaataaatatttccccatccaaa

SEQ ID NO: 412152 - DNA, 33 bp, Homo sapien
gctgctcttcaaataagtatttccccatccaaa

SEQ ID NO: 412153 - DNA, 33 bp, Homo sapien
caatcagtcaatcaataaaatacaactctgatt

SEQ ID NO: 412154 - DNA, 33 bp, Homo sapien
caatcagtcaatcaatgaaatacaactctgatt

SEQ ID NO: 412155 - DNA, 33 bp, Homo sapien
gtgtggtcaccaaccaagtaaactgaacagtga

SEQ ID NO: 412156 - DNA, 33 bp, Homo sapien
gtgtggtcaccaaccatgtaaactgaacagtga

SEQ ID NO: 412157 - DNA, 33 bp, Homo sapien
accacacatttttcccacttccaaatactaggg

SEQ ID NO: 412158 - DNA, 33 bp, Homo sapien
accacacatttttcccgcttccaaatactaggg

SEQ ID NO: 412159 - DNA, 33 bp, Homo sapien
agtcaattgagatgtagcatacgcgcctattat

SEQ ID NO: 412160 - DNA, 33 bp, Homo sapien
agtcaattgagatgtatcatacgcgcctattat

SEQ ID NO: 412161 - DNA, 33 bp, Homo sapien
tagggacaggctattcaatcagtgccaaagaac

SEQ ID NO: 412162 - DNA, 33 bp, Homo sapien
tagggacaggctattcgatcagtgccaaagaac

SEQ ID NO: 412163 - DNA, 33 bp, Homo sapien
cctttattgatgtcatcagatggttagagagct

SEQ ID NO: 412164 - DNA, 33 bp, Homo sapien
cctttattgatgtcattagatggttagagagct

SEQ ID NO: 412165 - DNA, 33 bp, Homo sapien
ggattcttgacactgacatcgctttctgaagcc

SEQ ID NO: 412166 - DNA, 33 bp, Homo sapien
ggattcttgacactgagatcgctttctgaagcc

SEQ ID NO: 412167 - DNA, 33 bp, Homo sapien
gtgtgtgtgcatctgacatatcgtctggagcat

SEQ ID NO: 412168 - DNA, 33 bp, Homo sapien
gtgtgtgtgcatctgatatatcgtctggagcat

SEQ ID NO: 412169 - DNA, 33 bp, Homo sapien
gggccagcttaaagtacagaaaaagtgggcaac

SEQ ID NO: 412170 - DNA, 33 bp, Homo sapien
gggccagcttaaagtagagaaaaagtgggcaac

SEQ ID NO: 412171 - DNA, 33 bp, Homo sapien
ttctgttcatctcttacatgcttcacaaataac

SEQ ID NO: 412172 - DNA, 33 bp, Homo sapien
ttctgttcatctcttatatgcttcacaaataac

SEQ ID NO: 412173 - DNA, 33 bp, Homo sapien
ccacacctggccagtaaccagatgattttgaat

SEQ ID NO: 412174 - DNA, 33 bp, Homo sapien
ccacacctggccagtagccagatgattttgaat

SEQ ID NO: 412175 - DNA, 33 bp, Homo sapien
tatacatgcatttttaaagattggaaagcacca

SEQ ID NO: 412176 - DNA, 33 bp, Homo sapien
tatacatgcatttttagagattggaaagcacca

SEQ ID NO: 412177 - DNA, 33 bp, Homo sapien
ttcctgcaacaatagcacaggttcctagatcag

SEQ ID NO: 412178 - DNA, 33 bp, Homo sapien
ttcctgcaacaatagcgcaggttcctagatcag

SEQ ID NO: 412179 - DNA, 33 bp, Homo sapien
ctctctgtaagtaacacgagtaaattgagctta

SEQ ID NO: 412180 - DNA, 33 bp, Homo sapien
ctctctgtaagtaacatgagtaaattgagctta

SEQ ID NO: 412181 - DNA, 33 bp, Homo sapien
cataatggctgacactcagtaaatggtttcctt

SEQ ID NO: 412182 - DNA, 33 bp, Homo sapien
cataatggctgacacttagtaaatggtttcctt

SEQ ID NO: 412183 - DNA, 33 bp, Homo sapien
agaaacagacaacagaacagagaactaagtggt

SEQ ID NO: 412184 - DNA, 33 bp, Homo sapien
agaaacagacaacagagcagagaactaagtggt

SEQ ID NO: 412185 - DNA, 33 bp, Homo sapien
ccatgtttggaggaaacagaatatgtaaaccct

SEQ ID NO: 412186 - DNA, 33 bp, Homo sapien
ccatgtttggaggaaatagaatatgtaaaccct

SEQ ID NO: 412187 - DNA, 33 bp, Homo sapien
ctgtcttcatccaagacgctatcacctcttact

SEQ ID NO: 412188 - DNA, 33 bp, Homo sapien
ctgtcttcatccaagatgctatcacctcttact

SEQ ID NO: 412189 - DNA, 33 bp, Homo sapien
tgctcattgaacagaaagatctcaaggctgggt

SEQ ID NO: 412190 - DNA, 33 bp, Homo sapien
tgctcattgaacagaaggatctcaaggctgggt

SEQ ID NO: 412191 - DNA, 33 bp, Homo sapien
tacagcaataatgctcccgagtctcatttccca

SEQ ID NO: 412192 - DNA, 33 bp, Homo sapien
tacagcaataatgctctcgagtctcatttccca

SEQ ID NO: 412193 - DNA, 33 bp, Homo sapien
tttggcagttccaattcaagaccaggttaaggc

SEQ ID NO: 412194 - DNA, 33 bp, Homo sapien
tttggcagttccaatttaagaccaggttaaggc

SEQ ID NO: 412195 - DNA, 33 bp, Homo sapien
ctctccagacaaaagaacctggtaagttgtaag

SEQ ID NO: 412196 - DNA, 33 bp, Homo sapien
ctctccagacaaaagagcctggtaagttgtaag

SEQ ID NO: 412197 - DNA, 33 bp, Homo sapien
tgccagatcttgcctacgaacaattataagact

SEQ ID NO: 412198 - DNA, 33 bp, Homo sapien
tgccagatcttgcctatgaacaattataagact

SEQ ID NO: 412199 - DNA, 33 bp, Homo sapien
ggctagtatgtttaagaaattacgtgaaacgaa

SEQ ID NO: 412200 - DNA, 33 bp, Homo sapien
ggctagtatgtttaaggaattacgtgaaacgaa

SEQ ID NO: 412201 - DNA, 33 bp, Homo sapien
cacacccataaaccaacttgaggtaaaatccaa

SEQ ID NO: 412202 - DNA, 33 bp, Homo sapien
cacacccataaaccaagttgaggtaaaatccaa

SEQ ID NO: 412203 - DNA, 33 bp, Homo sapien
gaaccttgccgaaggacagaactttaaattaat

SEQ ID NO: 412204 - DNA, 33 bp, Homo sapien
gaaccttgccgaaggatagaactttaaattaat

SEQ ID NO: 412205 - DNA, 33 bp, Homo sapien
gaatagagcaatataacgagaggaagggaagat

SEQ ID NO: 412206 - DNA, 33 bp, Homo sapien
gaatagagcaatataatgagaggaagggaagat

SEQ ID NO: 412207 - DNA, 33 bp, Homo sapien
caataaactggaaggaagaaaaactatcactgc

SEQ ID NO: 412208 - DNA, 33 bp, Homo sapien
caataaactggaaggaggaaaaactatcactgc

SEQ ID NO: 412209 - DNA, 33 bp, Homo sapien
cctgggctggtctctacctcttaggctcaagtg

SEQ ID NO: 412210 - DNA, 33 bp, Homo sapien
cctgggctggtctctatctcttaggctcaagtg

SEQ ID NO: 412211 - DNA, 33 bp, Homo sapien
atgcttaagtctattacgtaaaatgatacagtg

SEQ ID NO: 412212 - DNA, 33 bp, Homo sapien
atgcttaagtctattatgtaaaatgatacagtg

SEQ ID NO: 412213 - DNA, 33 bp, Homo sapien
tgaaaaaactcaaagaaactcatattccaatgt

SEQ ID NO: 412214 - DNA, 33 bp, Homo sapien
tgaaaaaactcaaagatactcatattccaatgt

SEQ ID NO: 412215 - DNA, 33 bp, Homo sapien
taatacaaacagtcacacatgattctaacaaca

SEQ ID NO: 412216 - DNA, 33 bp, Homo sapien
taatacaaacagtcacgcatgattctaacaaca

SEQ ID NO: 412217 - DNA, 33 bp, Homo sapien
aactcacactgcattaaagtcatcaataaaata

SEQ ID NO: 412218 - DNA, 33 bp, Homo sapien
aactcacactgcattacagtcatcaataaaata

SEQ ID NO: 412219 - DNA, 33 bp, Homo sapien
ttcgttctttcatacaatcacttgtcttatttt

SEQ ID NO: 412220 - DNA, 33 bp, Homo sapien
ttcgttctttcatacagtcacttgtcttatttt

SEQ ID NO: 412221 - DNA, 33 bp, Homo sapien
aggccaagtcaaatcaaaggaacatacttaaga

SEQ ID NO: 412222 - DNA, 33 bp, Homo sapien
aggccaagtcaaatcagaggaacatacttaaga

SEQ ID NO: 412223 - DNA, 33 bp, Homo sapien
actagcaattgcacaccatggcttgctaagcag

SEQ ID NO: 412224 - DNA, 33 bp, Homo sapien
actagcaattgcacacgatggcttgctaagcag

SEQ ID NO: 412225 - DNA, 33 bp, Homo sapien
actattagaaagtcacaaagaaaatagaatatg

SEQ ID NO: 412226 - DNA, 33 bp, Homo sapien
actattagaaagtcacgaagaaaatagaatatg

SEQ ID NO: 412227 - DNA, 33 bp, Homo sapien
acagattgtgcctgaaaaagaaatatacaaaga

SEQ ID NO: 412228 - DNA, 33 bp, Homo sapien
acagattgtgcctgaagaagaaatatacaaaga

SEQ ID NO: 412229 - DNA, 33 bp, Homo sapien
atttcagattcaactaatactttgtgccagtac

SEQ ID NO: 412230 - DNA, 33 bp, Homo sapien
atttcagattcaactagtactttgtgccagtac

SEQ ID NO: 412231 - DNA, 33 bp, Homo sapien
attcgaatgtgtatcaatagcattcctgaattt

SEQ ID NO: 412232 - DNA, 33 bp, Homo sapien
attcgaatgtgtatcactagcattcctgaattt

SEQ ID NO: 412233 - DNA, 33 bp, Homo sapien
agagtagctttccctacacttttggacttaacc

SEQ ID NO: 412234 - DNA, 33 bp, Homo sapien
agagtagctttccctatacttttggacttaacc

SEQ ID NO: 412235 - DNA, 33 bp, Homo sapien
tttacaacagcatccaatatcataaaattatca

SEQ ID NO: 412236 - DNA, 33 bp, Homo sapien
tttacaacagcatccagtatcataaaattatca

SEQ ID NO: 412237 - DNA, 33 bp, Homo sapien
taacaatgtcctctcacggaatttttacacatt

SEQ ID NO: 412238 - DNA, 33 bp, Homo sapien
taacaatgtcctctcatggaatttttacacatt

SEQ ID NO: 412239 - DNA, 33 bp, Homo sapien
aagaacatttgaggtgacaagccatgcattgat

SEQ ID NO: 412240 - DNA, 33 bp, Homo sapien
aagaacatttgaggtggcaagccatgcattgat

SEQ ID NO: 412241 - DNA, 33 bp, Homo sapien
ttgaagagatagacacagtgattaaagactgga

SEQ ID NO: 412242 - DNA, 33 bp, Homo sapien
ttgaagagatagacacggtgattaaagactgga

SEQ ID NO: 412243 - DNA, 33 bp, Homo sapien
gctttcatgaatatgactaatgctaatttataa

SEQ ID NO: 412244 - DNA, 33 bp, Homo sapien
gctttcatgaatatgagtaatgctaatttataa

SEQ ID NO: 412245 - DNA, 33 bp, Homo sapien
cacaacagtctgatgacagttattactactttc

SEQ ID NO: 412246 - DNA, 33 bp, Homo sapien
cacaacagtctgatgatagttattactactttc

SEQ ID NO: 412247 - DNA, 33 bp, Homo sapien
gcgtatgttcattaaaatactagtgacagtaac

SEQ ID NO: 412248 - DNA, 33 bp, Homo sapien
gcgtatgttcattaaagtactagtgacagtaac

SEQ ID NO: 412249 - DNA, 33 bp, Homo sapien
gcctgggggagcaaaaatttatagaaaacagcc

SEQ ID NO: 412250 - DNA, 33 bp, Homo sapien
gcctgggggagcaaaagtttatagaaaacagcc

SEQ ID NO: 412251 - DNA, 33 bp, Homo sapien
tcaacaccagttcatacaggtaacagatttgtg

SEQ ID NO: 412252 - DNA, 33 bp, Homo sapien
tcaacaccagttcatataggtaacagatttgtg

SEQ ID NO: 412253 - DNA, 33 bp, Homo sapien
tcacaactggtgtccacatcttttttcttaata

SEQ ID NO: 412254 - DNA, 33 bp, Homo sapien
tcacaactggtgtccagatcttttttcttaata

SEQ ID NO: 412255 - DNA, 33 bp, Homo sapien
ctataaacctcttaataagtagcccaacttgca

SEQ ID NO: 412256 - DNA, 33 bp, Homo sapien
ctataaacctcttaattagtagcccaacttgca

SEQ ID NO: 412257 - DNA, 33 bp, Homo sapien
cagatactgaagaggcactttttcaagctattc

SEQ ID NO: 412258 - DNA, 33 bp, Homo sapien
cagatactgaagaggcgctttttcaagctattc

SEQ ID NO: 412259 - DNA, 33 bp, Homo sapien
tgggtccttcaatacagagcttgaaaaaacaat

SEQ ID NO: 412260 - DNA, 33 bp, Homo sapien
tgggtccttcaatacatagcttgaaaaaacaat

SEQ ID NO: 412261 - DNA, 33 bp, Homo sapien
ataccaaggacatatcaccattgtgcatatcac

SEQ ID NO: 412262 - DNA, 33 bp, Homo sapien
ataccaaggacatatctccattgtgcatatcac

SEQ ID NO: 412263 - DNA, 33 bp, Homo sapien
aagaggacaagcgacacgcccccaaattcccat

SEQ ID NO: 412264 - DNA, 33 bp, Homo sapien
aagaggacaagcgacaggcccccaaattcccat

SEQ ID NO: 412265 - DNA, 33 bp, Homo sapien
gcacccaggcagcaccagctaatggagggcagt

SEQ ID NO: 412266 - DNA, 33 bp, Homo sapien
gcacccaggcagcaccggctaatggagggcagt

SEQ ID NO: 412267 - DNA, 33 bp, Homo sapien
tgcagtctccgtatcacccacagctcacagcct

SEQ ID NO: 412268 - DNA, 33 bp, Homo sapien
tgcagtctccgtatcatccacagctcacagcct

SEQ ID NO: 412269 - DNA, 33 bp, Homo sapien
tcttttccgtatgaaaaatggccagtttgtcga

SEQ ID NO: 412270 - DNA, 33 bp, Homo sapien
tcttttccgtatgaaagatggccagtttgtcga

SEQ ID NO: 412271 - DNA, 33 bp, Homo sapien
ctttctgttaaaggaaacattctggagtaggaa

SEQ ID NO: 412272 - DNA, 33 bp, Homo sapien
ctttctgttaaaggaagcattctggagtaggaa

SEQ ID NO: 412273 - DNA, 33 bp, Homo sapien
ttgtgtagggtctgtgcagacagcaggtaaacc

SEQ ID NO: 412274 - DNA, 33 bp, Homo sapien
ttgtgtagggtctgtggagacagcaggtaaacc

SEQ ID NO: 412275 - DNA, 33 bp, Homo sapien
ctgggcatccagggcacctaagccgaccatgtc

SEQ ID NO: 412276 - DNA, 33 bp, Homo sapien
ctgggcatccagggcatctaagccgaccatgtc

SEQ ID NO: 412277 - DNA, 33 bp, Homo sapien
acaaggacccgcacacagatacctcccagctcc

SEQ ID NO: 412278 - DNA, 33 bp, Homo sapien
acaaggacccgcacacggatacctcccagctcc

SEQ ID NO: 412279 - DNA, 33 bp, Homo sapien
ccacttgggagaagtgacaaagaccatctgtca

SEQ ID NO: 412280 - DNA, 33 bp, Homo sapien
ccacttgggagaagtggcaaagaccatctgtca

SEQ ID NO: 412281 - DNA, 33 bp, Homo sapien
agaaaaagcccaaacacgtgaacataagaggtc

SEQ ID NO: 412282 - DNA, 33 bp, Homo sapien
agaaaaagcccaaacatgtgaacataagaggtc

SEQ ID NO: 412283 - DNA, 33 bp, Homo sapien
ctcctggaagccctaaacttcctccaggcaaga

SEQ ID NO: 412284 - DNA, 33 bp, Homo sapien
ctcctggaagccctaatcttcctccaggcaaga

SEQ ID NO: 412285 - DNA, 33 bp, Homo sapien
tgtctataaaatggaacgaagtaggccaggtgt

SEQ ID NO: 412286 - DNA, 33 bp, Homo sapien
tgtctataaaatggaaggaagtaggccaggtgt

SEQ ID NO: 412287 - DNA, 33 bp, Homo sapien
cccatttcctcttgtgcagccttctgtgttcag

SEQ ID NO: 412288 - DNA, 33 bp, Homo sapien
cccatttcctcttgtgtagccttctgtgttcag

SEQ ID NO: 412289 - DNA, 33 bp, Homo sapien
ggagaccagtcacccaatagaaaaagagaaata

SEQ ID NO: 412290 - DNA, 33 bp, Homo sapien
ggagaccagtcacccagtagaaaaagagaaata

SEQ ID NO: 412291 - DNA, 33 bp, Homo sapien
gtaaatgattcttgaacgtatgaagaactgaac

SEQ ID NO: 412292 - DNA, 33 bp, Homo sapien
gtaaatgattcttgaatgtatgaagaactgaac

SEQ ID NO: 412293 - DNA, 33 bp, Homo sapien
ggaaagtccacaaacaatattagaaagttgatc

SEQ ID NO: 412294 - DNA, 33 bp, Homo sapien
ggaaagtccacaaacattattagaaagttgatc

SEQ ID NO: 412295 - DNA, 33 bp, Homo sapien
aagactgagctgctctcaagaagggctaccaca

SEQ ID NO: 412296 - DNA, 33 bp, Homo sapien
aagactgagctgctcttaagaagggctaccaca

SEQ ID NO: 412297 - DNA, 33 bp, Homo sapien
caaatttactgtaaatgataacttcagcttcta

SEQ ID NO: 412298 - DNA, 33 bp, Homo sapien
caaatttactgtaaattataacttcagcttcta

SEQ ID NO: 412299 - DNA, 33 bp, Homo sapien
gtgaaaagtagcaacaatgaagtgacaatttaa

SEQ ID NO: 412300 - DNA, 33 bp, Homo sapien
gtgaaaagtagcaacagtgaagtgacaatttaa

SEQ ID NO: 412301 - DNA, 33 bp, Homo sapien
acttttgtgtgtgcttgaaatttccataataaa

SEQ ID NO: 412302 - DNA, 33 bp, Homo sapien
acttttgtgtgtgctttaaatttccataataaa

SEQ ID NO: 412303 - DNA, 33 bp, Homo sapien
agaagagttagctctgcaggcccagggttaaaa

SEQ ID NO: 412304 - DNA, 33 bp, Homo sapien
agaagagttagctctggaggcccagggttaaaa

SEQ ID NO: 412305 - DNA, 33 bp, Homo sapien
tcaaaacatgtaaagcacttagaacaacaaagc

SEQ ID NO: 412306 - DNA, 33 bp, Homo sapien
tcaaaacatgtaaagcgcttagaacaacaaagc

SEQ ID NO: 412307 - DNA, 33 bp, Homo sapien
agtgacagcataagatagctcatttacaaagac

SEQ ID NO: 412308 - DNA, 33 bp, Homo sapien
agtgacagcataagatggctcatttacaaagac

SEQ ID NO: 412309 - DNA, 33 bp, Homo sapien
gactccatttacatatcaccagattaaaagctt

SEQ ID NO: 412310 - DNA, 33 bp, Homo sapien
gactccatttacatattaccagattaaaagctt

SEQ ID NO: 412311 - DNA, 33 bp, Homo sapien
tgtgctttttttactacgccatattgtcaccct

SEQ ID NO: 412312 - DNA, 33 bp, Homo sapien
tgtgctttttttactatgccatattgtcaccct

SEQ ID NO: 412313 - DNA, 33 bp, Homo sapien
tgtgttaacttgatcaacatactttggcttgcc

SEQ ID NO: 412314 - DNA, 33 bp, Homo sapien
tgtgttaacttgatcagcatactttggcttgcc

SEQ ID NO: 412315 - DNA, 33 bp, Homo sapien
aaggggtcacgtgtccaagaaaatgtgagctgc

SEQ ID NO: 412316 - DNA, 33 bp, Homo sapien
aaggggtcacgtgtccgagaaaatgtgagctgc

SEQ ID NO: 412317 - DNA, 33 bp, Homo sapien
gactaaatgacatgacaaaaaagattagaagct

SEQ ID NO: 412318 - DNA, 33 bp, Homo sapien
gactaaatgacatgacgaaaaagattagaagct

SEQ ID NO: 412319 - DNA, 33 bp, Homo sapien
tggtatgtattcttcccgctggttttctgtgta

SEQ ID NO: 412320 - DNA, 33 bp, Homo sapien
tggtatgtattcttcctgctggttttctgtgta

SEQ ID NO: 412321 - DNA, 33 bp, Homo sapien
ctgaggaactattggacgagcttgcagaaaata

SEQ ID NO: 412322 - DNA, 33 bp, Homo sapien
ctgaggaactattggatgagcttgcagaaaata

SEQ ID NO: 412323 - DNA, 33 bp, Homo sapien
ggcaaccaggagtcatcagtgaaagcagtttca

SEQ ID NO: 412324 - DNA, 33 bp, Homo sapien
ggcaaccaggagtcatgagtgaaagcagtttca

SEQ ID NO: 412325 - DNA, 33 bp, Homo sapien
tatgtattcatgtctgaaggaaaggtactatga

SEQ ID NO: 412326 - DNA, 33 bp, Homo sapien
tatgtattcatgtctgcaggaaaggtactatga

SEQ ID NO: 412327 - DNA, 33 bp, Homo sapien
tttggtaagtatcctgcatagtttgtaagtggc

SEQ ID NO: 412328 - DNA, 33 bp, Homo sapien
tttggtaagtatcctgtatagtttgtaagtggc

SEQ ID NO: 412329 - DNA, 33 bp, Homo sapien
gcaccttaaaccaatgcagccaatgtgcagccc

SEQ ID NO: 412330 - DNA, 33 bp, Homo sapien
gcaccttaaaccaatgtagccaatgtgcagccc

SEQ ID NO: 412331 - DNA, 33 bp, Homo sapien
tatacaacttggcaaaggatgaggtttacagaa

SEQ ID NO: 412332 - DNA, 33 bp, Homo sapien
tatacaacttggcaaatgatgaggtttacagaa

SEQ ID NO: 412333 - DNA, 33 bp, Homo sapien
gctacataaatcaaaacgctcaggcccccatcc

SEQ ID NO: 412334 - DNA, 33 bp, Homo sapien
gctacataaatcaaaaggctcaggcccccatcc

SEQ ID NO: 412335 - DNA, 33 bp, Homo sapien
tgtctctggctctgaactggtacagaaattcat

SEQ ID NO: 412336 - DNA, 33 bp, Homo sapien
tgtctctggctctgaattggtacagaaattcat

SEQ ID NO: 412337 - DNA, 33 bp, Homo sapien
tggcctcaaagccgtcaagctggttgagcaact

SEQ ID NO: 412338 - DNA, 33 bp, Homo sapien
tggcctcaaagccgtcgagctggttgagcaact

SEQ ID NO: 412339 - DNA, 33 bp, Homo sapien
atcactacatttataaaactaaagctggagagt

SEQ ID NO: 412340 - DNA, 33 bp, Homo sapien
atcactacatttataagactaaagctggagagt

SEQ ID NO: 412341 - DNA, 33 bp, Homo sapien
ggaatcttcagtatccagagctccagggctgaa

SEQ ID NO: 412342 - DNA, 33 bp, Homo sapien
ggaatcttcagtatccggagctccagggctgaa

SEQ ID NO: 412343 - DNA, 33 bp, Homo sapien
gccatctgcaggaacactgtaataaccacacaa

SEQ ID NO: 412344 - DNA, 33 bp, Homo sapien
gccatctgcaggaacattgtaataaccacacaa

SEQ ID NO: 412345 - DNA, 33 bp, Homo sapien
acagtatagttctccaatgctttttagaaatta

SEQ ID NO: 412346 - DNA, 33 bp, Homo sapien
acagtatagttctccagtgctttttagaaatta

SEQ ID NO: 412347 - DNA, 33 bp, Homo sapien
ttttggagtagcttccaagaggactctgattct

SEQ ID NO: 412348 - DNA, 33 bp, Homo sapien
ttttggagtagcttcccagaggactctgattct

SEQ ID NO: 412349 - DNA, 33 bp, Homo sapien
ataaagcagatcaaaccgttaaatataactcag

SEQ ID NO: 412350 - DNA, 33 bp, Homo sapien
ataaagcagatcaaacggttaaatataactcag

SEQ ID NO: 412351 - DNA, 33 bp, Homo sapien
gctctgatacagctccaccagtgctgccatctt

SEQ ID NO: 412352 - DNA, 33 bp, Homo sapien
gctctgatacagctccgccagtgctgccatctt

SEQ ID NO: 412353 - DNA, 33 bp, Homo sapien
gataaatgcataaacaagtcatttccccacatg

SEQ ID NO: 412354 - DNA, 33 bp, Homo sapien
gataaatgcataaacaggtcatttccccacatg

SEQ ID NO: 412355 - DNA, 33 bp, Homo sapien
tgaaggcttcgtccacagccacccaggcaggct

SEQ ID NO: 412356 - DNA, 33 bp, Homo sapien
tgaaggcttcgtccacggccacccaggcaggct

SEQ ID NO: 412357 - DNA, 33 bp, Homo sapien
tctccaagggtgctacactgggtacatgacact

SEQ ID NO: 412358 - DNA, 33 bp, Homo sapien
tctccaagggtgctacgctgggtacatgacact

SEQ ID NO: 412359 - DNA, 33 bp, Homo sapien
atacttagaaagaaatcacataatacttgcaat

SEQ ID NO: 412360 - DNA, 33 bp, Homo sapien
atacttagaaagaaatgacataatacttgcaat

SEQ ID NO: 412361 - DNA, 33 bp, Homo sapien
ggatcaccaacttctacccacacctgtgggcct

SEQ ID NO: 412362 - DNA, 33 bp, Homo sapien
ggatcaccaacttctatccacacctgtgggcct

SEQ ID NO: 412363 - DNA, 33 bp, Homo sapien
tcaacttggtgtggacagcaatttccgctgcaa

SEQ ID NO: 412364 - DNA, 33 bp, Homo sapien
tcaacttggtgtggacggcaatttccgctgcaa

SEQ ID NO: 412365 - DNA, 33 bp, Homo sapien
ccaacaagagcctctacgtggccagtggggaga

SEQ ID NO: 412366 - DNA, 33 bp, Homo sapien
ccaacaagagcctctatgtggccagtggggaga

SEQ ID NO: 412367 - DNA, 33 bp, Homo sapien
gactggatgaaggaataagctctaccctctttg

SEQ ID NO: 412368 - DNA, 33 bp, Homo sapien
gactggatgaaggaatcagctctaccctctttg

SEQ ID NO: 412369 - DNA, 33 bp, Homo sapien; identical to SEQ ID NO: 412367

SEQ ID NO: 412370 - DNA, 33 bp, Homo sapien; identical to SEQ ID NO: 412368

SEQ ID NO: 412371 - DNA, 33 bp, Homo sapien; identical to SEQ ID NO: 412367

SEQ ID NO: 412372 - DNA, 33 bp, Homo sapien; identical to SEQ ID NO: 412368

SEQ ID NO: 412373 - DNA, 33 bp, Homo sapien
gggagccatttaacgaccacagggtttcagctg

SEQ ID NO: 412374 - DNA, 33 bp, Homo sapien
gggagccatttaacgagcacagggtttcagctg

SEQ ID NO: 412375 - DNA, 33 bp, Homo sapien
cctgacatccttctccgcattcaggttggccac

SEQ ID NO: 412376 - DNA, 33 bp, Homo sapien
cctgacatccttctcctcattcaggttggccac

SEQ ID NO: 412377 - DNA, 33 bp, Homo sapien
aagctaaaataactaaataactcagtagcatca

SEQ ID NO: 412378 - DNA, 33 bp, Homo sapien
aagctaaaataactaattaactcagtagcatca

SEQ ID NO: 412379 - DNA, 33 bp, Homo sapien
gcatctgtgagccctcaagggtgtgggaaaggt

SEQ ID NO: 412380 - DNA, 33 bp, Homo sapien
gcatctgtgagccctcgagggtgtgggaaaggt

SEQ ID NO: 412381 - DNA, 33 bp, Homo sapien
gtggacagagggcaccaacgatttagcatctct

SEQ ID NO: 412382 - DNA, 33 bp, Homo sapien
gtggacagagggcaccgacgatttagcatctct

SEQ ID NO: 412383 - DNA, 33 bp, Homo sapien
gttgtctttattgtccaccatgctctctcacct

SEQ ID NO: 412384 - DNA, 33 bp, Homo sapien
gttgtctttattgtccgccatgctctctcacct

SEQ ID NO: 412385 - DNA, 33 bp, Homo sapien
gcttcctgaattttaaccaaacttttcatgaga

SEQ ID NO: 412386 - DNA, 33 bp, Homo sapien
gcttcctgaattttaatcaaacttttcatgaga

SEQ ID NO: 412387 - DNA, 33 bp, Homo sapien
ggtcgaacttctcccacgtctcgtagaacatct

SEQ ID NO: 412388 - DNA, 33 bp, Homo sapien
ggtcgaacttctcccatgtctcgtagaacatct

SEQ ID NO: 412389 - DNA, 33 bp, Homo sapien
taacctatcccggaggcacagcgagttccttta

SEQ ID NO: 412390 - DNA, 33 bp, Homo sapien
taacctatcccggaggtacagcgagttccttta

SEQ ID NO: 412391 - DNA, 33 bp, Homo sapien
ggcccccgccgttcaacgacaccaacaccacgt

SEQ ID NO: 412392 - DNA, 33 bp, Homo sapien
ggcccccgccgttcaatgacaccaacaccacgt

SEQ ID NO: 412393 - DNA, 33 bp, Homo sapien
atgaagtcatattaacacaagaggcactacgat

SEQ ID NO: 412394 - DNA, 33 bp, Homo sapien
atgaagtcatattaacgcaagaggcactacgat

SEQ ID NO: 412395 - DNA, 33 bp, Homo sapien
tcagtcatgtgcaaatcacccttcatacgttca

SEQ ID NO: 412396 - DNA, 33 bp, Homo sapien
tcagtcatgtgcaaattacccttcatacgttca

SEQ ID NO: 412397 - DNA, 33 bp, Homo sapien
ttagaaactcccaagacgaaagagattgtcttt

SEQ ID NO: 412398 - DNA, 33 bp, Homo sapien
ttagaaactcccaagatgaaagagattgtcttt

SEQ ID NO: 412399 - DNA, 33 bp, Homo sapien
atggagttgggagtgagaagtcactttcagccc

SEQ ID NO: 412400 - DNA, 33 bp, Homo sapien
atggagttgggagtgataagtcactttcagccc

SEQ ID NO: 412401 - DNA, 33 bp, Homo sapien
catgcctgggagacaaccatccaaaggccagga

SEQ ID NO: 412402 - DNA, 33 bp, Homo sapien
catgcctgggagacaagcatccaaaggccagga

SEQ ID NO: 412403 - DNA, 33 bp, Homo sapien
aaggcacgaatccttacacacctaacaacatag

SEQ ID NO: 412404 - DNA, 33 bp, Homo sapien
aaggcacgaatccttagacacctaacaacatag

SEQ ID NO: 412405 - DNA, 33 bp, Homo sapien
ctttgtggctttccaacgtctacagaaagaatt

SEQ ID NO: 412406 - DNA, 33 bp, Homo sapien
ctttgtggctttccaatgtctacagaaagaatt

SEQ ID NO: 412407 - DNA, 33 bp, Homo sapien
tctaactagtcggtggaaagacgtccagtcatc

SEQ ID NO: 412408 - DNA, 33 bp, Homo sapien
tctaactagtcggtggtaagacgtccagtcatc

SEQ ID NO: 412409 - DNA, 33 bp, Homo sapien
tggagagaagaagagacgactccctggtgggtt

SEQ ID NO: 412410 - DNA, 33 bp, Homo sapien
tggagagaagaagagatgactccctggtgggtt

SEQ ID NO: 412411 - DNA, 33 bp, Homo sapien
gggagtttagatttgaccacaaaagcaaaaggg

SEQ ID NO: 412412 - DNA, 33 bp, Homo sapien
gggagtttagatttgatcacaaaagcaaaaggg

SEQ ID NO: 412413 - DNA, 33 bp, Homo sapien
caccccatcttgcaacaacatcctctactcttg

SEQ ID NO: 412414 - DNA, 33 bp, Homo sapien
caccccatcttgcaaccacatcctctactcttg

SEQ ID NO: 412415 - DNA, 33 bp, Homo sapien
gaggatttgtttgttacaattagataaggacca

SEQ ID NO: 412416 - DNA, 33 bp, Homo sapien
gaggatttgtttgttataattagataaggacca

SEQ ID NO: 412417 - DNA, 33 bp, Homo sapien
aaagttgaagctgtaagatccttctttgagacc

SEQ ID NO: 412418 - DNA, 33 bp, Homo sapien
aaagttgaagctgtaatatccttctttgagacc

SEQ ID NO: 412419 - DNA, 33 bp, Homo sapien
tcaatggacaaggaacagactgagaaagataca

SEQ ID NO: 412420 - DNA, 33 bp, Homo sapien
tcaatggacaaggaacggactgagaaagataca

SEQ ID NO: 412421 - DNA, 33 bp, Homo sapien
ttccataacaaatggccagttttgtatctttct

SEQ ID NO: 412422 - DNA, 33 bp, Homo sapien
ttccataacaaatggctagttttgtatctttct

SEQ ID NO: 412423 - DNA, 33 bp, Homo sapien
catgcagataatgagacgtgagattttgggact

SEQ ID NO: 412424 - DNA, 33 bp, Homo sapien
catgcagataatgagaggtgagattttgggact

SEQ ID NO: 412425 - DNA, 33 bp, Homo sapien
atgtattccagcttctaactgtagtgactgctt

SEQ ID NO: 412426 - DNA, 33 bp, Homo sapien
atgtattccagcttctgactgtagtgactgctt

SEQ ID NO: 412427 - DNA, 33 bp, Homo sapien
ggggggtaggagtcaagacttttattcctatat

SEQ ID NO: 412428 - DNA, 33 bp, Homo sapien
ggggggtaggagtcaatacttttattcctatat

SEQ ID NO: 412429 - DNA, 33 bp, Homo sapien
taattcctgtgagagacggttcttaaaaagagc

SEQ ID NO: 412430 - DNA, 33 bp, Homo sapien
taattcctgtgagagatggttcttaaaaagagc

SEQ ID NO: 412431 - DNA, 33 bp, Homo sapien
gctccacagggtcaaggctaagctccttagtgc

SEQ ID NO: 412432 - DNA, 33 bp, Homo sapien
gctccacagggtcaagtctaagctccttagtgc

SEQ ID NO: 412433 - DNA, 33 bp, Homo sapien
attcacagagctctctcaagttttatttccatt

SEQ ID NO: 412434 - DNA, 33 bp, Homo sapien
attcacagagctctctgaagttttatttccatt

SEQ ID NO: 412435 - DNA, 33 bp, Homo sapien
agaaacatgactgaaaagactgggagagcccac

SEQ ID NO: 412436 - DNA, 33 bp, Homo sapien
agaaacatgactgaaaggactgggagagcccac

SEQ ID NO: 412437 - DNA, 33 bp, Homo sapien
tcattggaagaagaaacatatctggacatgaat

SEQ ID NO: 412438 - DNA, 33 bp, Homo sapien
tcattggaagaagaaatatatctggacatgaat

SEQ ID NO: 412439 - DNA, 33 bp, Homo sapien
tagttcctgagcagtaaaatgtggttgttaaaa

SEQ ID NO: 412440 - DNA, 33 bp, Homo sapien
tagttcctgagcagtataatgtggttgttaaaa

SEQ ID NO: 412441 - DNA, 33 bp, Homo sapien
ggtgggcctgtttccaaatgtcttcccaaatta

SEQ ID NO: 412442 - DNA, 33 bp, Homo sapien
ggtgggcctgtttccagatgtcttcccaaatta

SEQ ID NO: 412443 - DNA, 33 bp, Homo sapien
gtgtgtcttattgagccagacattgactcatta

SEQ ID NO: 412444 - DNA, 33 bp, Homo sapien
gtgtgtcttattgagctagacattgactcatta

SEQ ID NO: 412445 - DNA, 33 bp, Homo sapien
gagcggatggttgcaaaagtgaggtgacagctt

SEQ ID NO: 412446 - DNA, 33 bp, Homo sapien
gagcggatggttgcaagagtgaggtgacagctt

SEQ ID NO: 412447 - DNA, 33 bp, Homo sapien
caactgacatgagaacccaggaaattttccgga

SEQ ID NO: 412448 - DNA, 33 bp, Homo sapien
caactgacatgagaactcaggaaattttccgga

SEQ ID NO: 412449 - DNA, 33 bp, Homo sapien
gagacttaaatgggacaaaatgaacaagggaca

SEQ ID NO: 412450 - DNA, 33 bp, Homo sapien
gagacttaaatgggacgaaatgaacaagggaca

SEQ ID NO: 412451 - DNA, 33 bp, Homo sapien
atgctttaaatgaagacgcataattaaattaag

SEQ ID NO: 412452 - DNA, 33 bp, Homo sapien
atgctttaaatgaagatgcataattaaattaag

SEQ ID NO: 412453 - DNA, 33 bp, Homo sapien
ctattctccttaaaatgactgctttgactataa

SEQ ID NO: 412454 - DNA, 33 bp, Homo sapien
ctattctccttaaaattactgctttgactataa

SEQ ID NO: 412455 - DNA, 33 bp, Homo sapien
gacagttacaggtagacaaggctaaaaatgatg

SEQ ID NO: 412456 - DNA, 33 bp, Homo sapien
gacagttacaggtagataaggctaaaaatgatg

SEQ ID NO: 412457 - DNA, 33 bp, Homo sapien
atttcagtggacaacccatccatgtttttcgca

SEQ ID NO: 412458 - DNA, 33 bp, Homo sapien
atttcagtggacaacctatccatgtttttcgca

SEQ ID NO: 412459 - DNA, 33 bp, Homo sapien
cttcgggttggatagacgggcaaataaatagga

SEQ ID NO: 412460 - DNA, 33 bp, Homo sapien
cttcgggttggatagatgggcaaataaatagga

SEQ ID NO: 412461 - DNA, 33 bp, Homo sapien
gcaggaaccaactccacatacattgccacagcc

SEQ ID NO: 412462 - DNA, 33 bp, Homo sapien
gcaggaaccaactccagatacattgccacagcc

SEQ ID NO: 412463 - DNA, 33 bp, Homo sapien
aagatagatgataacaagtattagtgaggatgt

SEQ ID NO: 412464 - DNA, 33 bp, Homo sapien
aagatagatgataacaggtattagtgaggatgt

SEQ ID NO: 412465 - DNA, 33 bp, Homo sapien
tggagtgtgcaaacctcacctgagaacccaggg

SEQ ID NO: 412466 - DNA, 33 bp, Homo sapien
tggagtgtgcaaacctgacctgagaacccaggg

SEQ ID NO: 412467 - DNA, 33 bp, Homo sapien
tattaggatggacgaaagcagtatcacacataa

SEQ ID NO: 412468 - DNA, 33 bp, Homo sapien
tattaggatggacgaaggcagtatcacacataa

SEQ ID NO: 412469 - DNA, 33 bp, Homo sapien
gtgattaggtttgcaccgggaaattgctttctg

SEQ ID NO: 412470 - DNA, 33 bp, Homo sapien
gtgattaggtttgcactgggaaattgctttctg

SEQ ID NO: 412471 - DNA, 33 bp, Homo sapien
gaaggtattttcaggacgctaaaaactgtactt

SEQ ID NO: 412472 - DNA, 33 bp, Homo sapien
gaaggtattttcaggatgctaaaaactgtactt

SEQ ID NO: 412473 - DNA, 33 bp, Homo sapien
gccataagttaatgaactgagtgaaaaactggc

SEQ ID NO: 412474 - DNA, 33 bp, Homo sapien
gccataagttaatgaattgagtgaaaaactggc

SEQ ID NO: 412475 - DNA, 33 bp, Homo sapien
ttacaagtaatctaccacaatcgacattatgtg

SEQ ID NO: 412476 - DNA, 33 bp, Homo sapien
ttacaagtaatctaccgcaatcgacattatgtg

SEQ ID NO: 412477 - DNA, 33 bp, Homo sapien
aagaaaggattgcccactgatgagatgattggg

SEQ ID NO: 412478 - DNA, 33 bp, Homo sapien
aagaaaggattgcccagtgatgagatgattggg

SEQ ID NO: 412479 - DNA, 33 bp, Homo sapien
ccacttgttctcaaaagatcctattgatttggc

SEQ ID NO: 412480 - DNA, 33 bp, Homo sapien
ccacttgttctcaaaatatcctattgatttggc

SEQ ID NO: 412481 - DNA, 33 bp, Homo sapien
cactgttaaaagtcacaaacttctaacaaaact

SEQ ID NO: 412482 - DNA, 33 bp, Homo sapien
cactgttaaaagtcacgaacttctaacaaaact

SEQ ID NO: 412483 - DNA, 33 bp, Homo sapien
aaattaaggttatttcaagactaagaacataac

SEQ ID NO: 412484 - DNA, 33 bp, Homo sapien
aaattaaggttatttcgagactaagaacataac

SEQ ID NO: 412485 - DNA, 33 bp, Homo sapien
aaagagttttacctagacatataatcatacccc

SEQ ID NO: 412486 - DNA, 33 bp, Homo sapien
aaagagttttacctagccatataatcatacccc

SEQ ID NO: 412487 - DNA, 33 bp, Homo sapien
accattgactataagaaacactgttattttatg

SEQ ID NO: 412488 - DNA, 33 bp, Homo sapien
accattgactataagacacactgttattttatg

SEQ ID NO: 412489 - DNA, 33 bp, Homo sapien
ttcctggggaaaaaaaacatcttgtaatgtatg

SEQ ID NO: 412490 - DNA, 33 bp, Homo sapien
ttcctggggaaaaaaagcatcttgtaatgtatg

SEQ ID NO: 412491 - DNA, 33 bp, Homo sapien
gtaaaagatttcccaacagcctcgtgaattact

SEQ ID NO: 412492 - DNA, 33 bp, Homo sapien
gtaaaagatttcccaatagcctcgtgaattact

SEQ ID NO: 412493 - DNA, 33 bp, Homo sapien
aacagcaacagatgccacagaatggtcaaatta

SEQ ID NO: 412494 - DNA, 33 bp, Homo sapien
aacagcaacagatgccgcagaatggtcaaatta

SEQ ID NO: 412495 - DNA, 33 bp, Homo sapien
gcctccactccagcacaggaaatccaatcttga

SEQ ID NO: 412496 - DNA, 33 bp, Homo sapien
gcctccactccagcacgggaaatccaatcttga

SEQ ID NO: 412497 - DNA, 33 bp, Homo sapien
attattttcccaggacactcatgccttacctgg

SEQ ID NO: 412498 - DNA, 33 bp, Homo sapien
attattttcccaggactctcatgccttacctgg

SEQ ID NO: 412499 - DNA, 33 bp, Homo sapien
aaagacatacctgacacacccaagactaggcga

SEQ ID NO: 412500 - DNA, 33 bp, Homo sapien
aaagacatacctgacatacccaagactaggcga

SEQ ID NO: 412501 - DNA, 33 bp, Homo sapien
tttcttgttttcgtgcacttctacggatttctt

SEQ ID NO: 412502 - DNA, 33 bp, Homo sapien
tttcttgttttcgtgcccttctacggatttctt

SEQ ID NO: 412503 - DNA, 33 bp, Homo sapien
cttcagatcctttgggaaaaatacctaacacaa

SEQ ID NO: 412504 - DNA, 33 bp, Homo sapien
cttcagatcctttggggaaaatacctaacacaa

SEQ ID NO: 412505 - DNA, 33 bp, Homo sapien
ttagagtaattaactacgatctagtgcctgtta

SEQ ID NO: 412506 - DNA, 33 bp, Homo sapien
ttagagtaattaactatgatctagtgcctgtta

SEQ ID NO: 412507 - DNA, 33 bp, Homo sapien
aattggtaaagaatacaccctcatgcccttgag

SEQ ID NO: 412508 - DNA, 33 bp, Homo sapien
aattggtaaagaatacgccctcatgcccttgag

SEQ ID NO: 412509 - DNA, 33 bp, Homo sapien
tccgagaagaacagataatccctgtatttcaag

SEQ ID NO: 412510 - DNA, 33 bp, Homo sapien
tccgagaagaacagatgatccctgtatttcaag

SEQ ID NO: 412511 - DNA, 33 bp, Homo sapien
tttacagattaggaagcagaggtcttgagaggc

SEQ ID NO: 412512 - DNA, 33 bp, Homo sapien
tttacagattaggaagtagaggtcttgagaggc

SEQ ID NO: 412513 - DNA, 33 bp, Homo sapien
tgtagggggtaattagaatcggctaaattgcaa

SEQ ID NO: 412514 - DNA, 33 bp, Homo sapien
tgtagggggtaattagtatcggctaaattgcaa

SEQ ID NO: 412515 - DNA, 33 bp, Homo sapien
ctacaaaacaaaggataacatggcagtgagcaa

SEQ ID NO: 412516 - DNA, 33 bp, Homo sapien
ctacaaaacaaaggatgacatggcagtgagcaa

SEQ ID NO: 412517 - DNA, 33 bp, Homo sapien
aacccagttcaactgccccaacaacatcacagg

SEQ ID NO: 412518 - DNA, 33 bp, Homo sapien
aacccagttcaactgctccaacaacatcacagg

SEQ ID NO: 412519 - DNA, 33 bp, Homo sapien
ctgcccaccaatgctgaaagatccctccaggat

SEQ ID NO: 412520 - DNA, 33 bp, Homo sapien
ctgcccaccaatgctgcaagatccctccaggat

SEQ ID NO: 412521 - DNA, 33 bp, Homo sapien
ccccgggatccagaacaagatcctgaggtctgg

SEQ ID NO: 412522 - DNA, 33 bp, Homo sapien
ccccgggatccagaacgagatcctgaggtctgg

SEQ ID NO: 412523 - DNA, 33 bp, Homo sapien
ctctttccccatttgcacaaaagctgtgtgggc

SEQ ID NO: 412524 - DNA, 33 bp, Homo sapien
ctctttccccatttgcgcaaaagctgtgtgggc

SEQ ID NO: 412525 - DNA, 33 bp, Homo sapien
tcacaatgacgatgtcagaaaccatgcaatgaa

SEQ ID NO: 412526 - DNA, 33 bp, Homo sapien
tcacaatgacgatgtcggaaaccatgcaatgaa

SEQ ID NO: 412527 - DNA, 33 bp, Homo sapien
taattacatcacaaaaagtcctgtcccagacca

SEQ ID NO: 412528 - DNA, 33 bp, Homo sapien
taattacatcacaaaaggtcctgtcccagacca

SEQ ID NO: 412529 - DNA, 33 bp, Homo sapien
tttgccacaaagggaaagcaatttcaatattct

SEQ ID NO: 412530 - DNA, 33 bp, Homo sapien
tttgccacaaagggaatgcaatttcaatattct

SEQ ID NO: 412531 - DNA, 33 bp, Homo sapien
taccacttctgaactccaacaacgagaaaatgt

SEQ ID NO: 412532 - DNA, 33 bp, Homo sapien
taccacttctgaactctaacaacgagaaaatgt

SEQ ID NO: 412533 - DNA, 33 bp, Homo sapien
cacacacaactcacacccaaggaaggcctatat

SEQ ID NO: 412534 - DNA, 33 bp, Homo sapien
cacacacaactcacactcaaggaaggcctatat

SEQ ID NO: 412535 - DNA, 33 bp, Homo sapien
tcaaaaggcaggaatgaaagagacaaatgtgtg

SEQ ID NO: 412536 - DNA, 33 bp, Homo sapien
tcaaaaggcaggaatgcaagagacaaatgtgtg

SEQ ID NO: 412537 - DNA, 33 bp, Homo sapien
aagcaaatttggctaacgcaccaagcagtggtt

SEQ ID NO: 412538 - DNA, 33 bp, Homo sapien
aagcaaatttggctaatgcaccaagcagtggtt

SEQ ID NO: 412539 - DNA, 33 bp, Homo sapien
gtaggcggcggaactcaactccaaaggtagggc

SEQ ID NO: 412540 - DNA, 33 bp, Homo sapien
gtaggcggcggaactcgactccaaaggtagggc

SEQ ID NO: 412541 - DNA, 33 bp, Homo sapien
ttctgacaaaaggtgagatttagaagattaaca

SEQ ID NO: 412542 - DNA, 33 bp, Homo sapien
ttctgacaaaaggtgatatttagaagattaaca

SEQ ID NO: 412543 - DNA, 33 bp, Homo sapien
attccctttagcagaaattctagcactgagagt

SEQ ID NO: 412544 - DNA, 33 bp, Homo sapien
attccctttagcagaagttctagcactgagagt

SEQ ID NO: 412545 - DNA, 33 bp, Homo sapien
aatacagtcatgcttcacctaacagtggaggtc

SEQ ID NO: 412546 - DNA, 33 bp, Homo sapien
aatacagtcatgcttcgcctaacagtggaggtc

SEQ ID NO: 412547 - DNA, 33 bp, Homo sapien
agtaacctctttgaaacgctccatcaaggccac

SEQ ID NO: 412548 - DNA, 33 bp, Homo sapien
agtaacctctttgaaatgctccatcaaggccac

SEQ ID NO: 412549 - DNA, 33 bp, Homo sapien; identical to SEQ ID NO: 412547

SEQ ID NO: 412550 - DNA, 33 bp, Homo sapien; identical to SEQ ID NO: 412548

SEQ ID NO: 412551 - DNA, 33 bp, Homo sapien
tactggtactacaacaagtacatcaacgtgaag

SEQ ID NO: 412552 - DNA, 33 bp, Homo sapien
tactggtactacaacaggtacatcaacgtgaag

SEQ ID NO: 412553 - DNA, 33 bp, Homo sapien
aaaaagatgagaactaactaacttccttgcatg

SEQ ID NO: 412554 - DNA, 33 bp, Homo sapien
aaaaagatgagaactagctaacttccttgcatg

SEQ ID NO: 412555 - DNA, 33 bp, Homo sapien
taaggaacagctagtaacatttcttgagaacgt

SEQ ID NO: 412556 - DNA, 33 bp, Homo sapien
taaggaacagctagtagcatttcttgagaacgt

SEQ ID NO: 412557 - DNA, 33 bp, Homo sapien
tacgaggaaagaaaaaagtcaatctgaagggag

SEQ ID NO: 412558 - DNA, 33 bp, Homo sapien
tacgaggaaagaaaaaggtcaatctgaagggag

SEQ ID NO: 412559 - DNA, 33 bp, Homo sapien
catttactagaatccacgatcgagttacagcct

SEQ ID NO: 412560 - DNA, 33 bp, Homo sapien
catttactagaatccatgatcgagttacagcct

SEQ ID NO: 412561 - DNA, 33 bp, Homo sapien
ttcaaatggctatacccaggtttctgtatagat

SEQ ID NO: 412562 - DNA, 33 bp, Homo sapien
ttcaaatggctatacctaggtttctgtatagat

SEQ ID NO: 412563 - DNA, 33 bp, Homo sapien
ctctaagttaaatgcaccttttggcctctggca

SEQ ID NO: 412564 - DNA, 33 bp, Homo sapien
ctctaagttaaatgcatcttttggcctctggca

SEQ ID NO: 412565 - DNA, 33 bp, Homo sapien
ttatggaaaactggcaacctttgaaagcatgtg

SEQ ID NO: 412566 - DNA, 33 bp, Homo sapien
ttatggaaaactggcagcctttgaaagcatgtg

SEQ ID NO: 412567 - DNA, 33 bp, Homo sapien
tctacgtacggtaaaacaagactcctcaacctt

SEQ ID NO: 412568 - DNA, 33 bp, Homo sapien
tctacgtacggtaaaataagactcctcaacctt

SEQ ID NO: 412569 - DNA, 33 bp, Homo sapien
acacatgtaactgaacaaatacggggaaagacg

SEQ ID NO: 412570 - DNA, 33 bp, Homo sapien
acacatgtaactgaacgaatacggggaaagacg

SEQ ID NO: 412571 - DNA, 33 bp, Homo sapien
ttgagaataagcataaaatttttactcttcaat

SEQ ID NO: 412572 - DNA, 33 bp, Homo sapien
ttgagaataagcataacatttttactcttcaat

SEQ ID NO: 412573 - DNA, 33 bp, Homo sapien
tacaaaatgactggcccctgcgagaagggcata

SEQ ID NO: 412574 - DNA, 33 bp, Homo sapien
tacaaaatgactggcctctgcgagaagggcata

SEQ ID NO: 412575 - DNA, 33 bp, Homo sapien
agttgaatgaagctccaggaccatagtttggac

SEQ ID NO: 412576 - DNA, 33 bp, Homo sapien
agttgaatgaagctccgggaccatagtttggac

SEQ ID NO: 412577 - DNA, 33 bp, Homo sapien
aatgattgctttggcaaatataggtccctgtgt

SEQ ID NO: 412578 - DNA, 33 bp, Homo sapien
aatgattgctttggcacatataggtccctgtgt

SEQ ID NO: 412579 - DNA, 33 bp, Homo sapien
tcagcaatactctaaaactacaatttccaaaat

SEQ ID NO: 412580 - DNA, 33 bp, Homo sapien
tcagcaatactctaaacctacaatttccaaaat

SEQ ID NO: 412581 - DNA, 33 bp, Homo sapien
caaagtatatagctacagaactacacgcagacc

SEQ ID NO: 412582 - DNA, 33 bp, Homo sapien
caaagtatatagctactgaactacacgcagacc

SEQ ID NO: 412583 - DNA, 33 bp, Homo sapien
cttagtaatttcaacaacattaagttataaaga

SEQ ID NO: 412584 - DNA, 33 bp, Homo sapien
cttagtaatttcaacatcattaagttataaaga

SEQ ID NO: 412585 - DNA, 33 bp, Homo sapien
gacaaagaaaatagcacggtagaaagtcatttt

SEQ ID NO: 412586 - DNA, 33 bp, Homo sapien
gacaaagaaaatagcatggtagaaagtcatttt

SEQ ID NO: 412587 - DNA, 33 bp, Homo sapien
ggagatgaaggcaaagcaaccattcttcctggg

SEQ ID NO: 412588 - DNA, 33 bp, Homo sapien
ggagatgaaggcaaagtaaccattcttcctggg

SEQ ID NO: 412589 - DNA, 33 bp, Homo sapien
cagaaggcatacctacagagattctccagctgg

SEQ ID NO: 412590 - DNA, 33 bp, Homo sapien
cagaaggcatacctacggagattctccagctgg

SEQ ID NO: 412591 - DNA, 33 bp, Homo sapien
ttcgaagatgccaccaaacctttcttgctgtct

SEQ ID NO: 412592 - DNA, 33 bp, Homo sapien
ttcgaagatgccaccagacctttcttgctgtct

SEQ ID NO: 412593 - DNA, 33 bp, Homo sapien
aagcatttacttggaactcctacatgcacaatg

SEQ ID NO: 412594 - DNA, 33 bp, Homo sapien
aagcatttacttggaattcctacatgcacaatg

SEQ ID NO: 412595 - DNA, 33 bp, Homo sapien
agagggtaatgcattccaactttcaggccctcc

SEQ ID NO: 412596 - DNA, 33 bp, Homo sapien
agagggtaatgcattctaactttcaggccctcc

SEQ ID NO: 412597 - DNA, 33 bp, Homo sapien
ctttcccttgttcttaaatctgtgaagatgggc

SEQ ID NO: 412598 - DNA, 33 bp, Homo sapien
ctttcccttgttcttagatctgtgaagatgggc

SEQ ID NO: 412599 - DNA, 33 bp, Homo sapien
gtgtagcccagtcaacccttaacttccagcagg

SEQ ID NO: 412600 - DNA, 33 bp, Homo sapien
gtgtagcccagtcaactcttaacttccagcagg

SEQ ID NO: 412601 - DNA, 33 bp, Homo sapien
tttttcatgcaaattacagcaccttagaaaaag

SEQ ID NO: 412602 - DNA, 33 bp, Homo sapien
tttttcatgcaaattatagcaccttagaaaaag

SEQ ID NO: 412603 - DNA, 33 bp, Homo sapien
gggcaggaaacgcgtcactgtccccggctgcgc

SEQ ID NO: 412604 - DNA, 33 bp, Homo sapien
gggcaggaaacgcgtcgctgtccccggctgcgc

SEQ ID NO: 412605 - DNA, 33 bp, Homo sapien
tgagttcagagcctggaatttgtgggatggcca

SEQ ID NO: 412606 - DNA, 33 bp, Homo sapien
tgagttcagagcctgggatttgtgggatggcca

SEQ ID NO: 412607 - DNA, 33 bp, Homo sapien; identical to SEQ ID NO: 412605

SEQ ID NO: 412608 - DNA, 33 bp, Homo sapien; identical to SEQ ID NO: 412606

SEQ ID NO: 412609 - DNA, 33 bp, Homo sapien
aagacttggagcaagccgccacttcttagggtc

SEQ ID NO: 412610 - DNA, 33 bp, Homo sapien
aagacttggagcaagctgccacttcttagggtc

SEQ ID NO: 412611 - DNA, 33 bp, Homo sapien
ttgcaattaggataaacggtatttgcaactttg

SEQ ID NO: 412612 - DNA, 33 bp, Homo sapien
ttgcaattaggataaatggtatttgcaactttg

SEQ ID NO: 412613 - DNA, 33 bp, Homo sapien
tgtaaaaatgttttgcaatatatacaatcatta

SEQ ID NO: 412614 - DNA, 33 bp, Homo sapien
tgtaaaaatgttttgcgatatatacaatcatta

SEQ ID NO: 412615 - DNA, 33 bp, Homo sapien
gagggactacgcatgacgagagctatagaagca

SEQ ID NO: 412616 - DNA, 33 bp, Homo sapien
gagggactacgcatgatgagagctatagaagca

SEQ ID NO: 412617 - DNA, 33 bp, Homo sapien
ctgcccaggactctgacagtaagaactagcctg

SEQ ID NO: 412618 - DNA, 33 bp, Homo sapien
ctgcccaggactctgagagtaagaactagcctg

SEQ ID NO: 412619 - DNA, 33 bp, Homo sapien
accacccagctagtgaacatcttaaacaaggac

SEQ ID NO: 412620 - DNA, 33 bp, Homo sapien
accacccagctagtgatcatcttaaacaaggac

SEQ ID NO: 412621 - DNA, 33 bp, Homo sapien
ctagagcatcctgaaacttgacttgtttgtttt

SEQ ID NO: 412622 - DNA, 33 bp, Homo sapien
ctagagcatcctgaaatttgacttgtttgtttt

SEQ ID NO: 412623 - DNA, 33 bp, Homo sapien
ctccaatcttctaatcaagtgctgtgcaataga

SEQ ID NO: 412624 - DNA, 33 bp, Homo sapien
ctccaatcttctaatcgagtgctgtgcaataga

SEQ ID NO: 412625 - DNA, 33 bp, Homo sapien
aacaagcacgtgcaaaagcatgaatgggtaaaa

SEQ ID NO: 412626 - DNA, 33 bp, Homo sapien
aacaagcacgtgcaaaggcatgaatgggtaaaa

SEQ ID NO: 412627 - DNA, 33 bp, Homo sapien
acaacacttctgctcacggcccagtaattctaa

SEQ ID NO: 412628 - DNA, 33 bp, Homo sapien
acaacacttctgctcatggcccagtaattctaa

SEQ ID NO: 412629 - DNA, 33 bp, Homo sapien
atggtagcagcctagacagttgagtcaagacat

SEQ ID NO: 412630 - DNA, 33 bp, Homo sapien
atggtagcagcctagagagttgagtcaagacat

SEQ ID NO: 412631 - DNA, 33 bp, Homo sapien
accaaccataatactaggcattaagtgtcaaat

SEQ ID NO: 412632 - DNA, 33 bp, Homo sapien
accaaccataatactatgcattaagtgtcaaat

SEQ ID NO: 412633 - DNA, 33 bp, Homo sapien
ctggactaggatattacaagcagaaaaaattac

SEQ ID NO: 412634 - DNA, 33 bp, Homo sapien
ctggactaggatattataagcagaaaaaattac

SEQ ID NO: 412635 - DNA, 33 bp, Homo sapien
ttagaaaggaatatcaatacagatcccacaaat

SEQ ID NO: 412636 - DNA, 33 bp, Homo sapien
ttagaaaggaatatcagtacagatcccacaaat

SEQ ID NO: 412637 - DNA, 33 bp, Homo sapien
ttatattgtactgagacatatagtgagcttgca

SEQ ID NO: 412638 - DNA, 33 bp, Homo sapien
ttatattgtactgagatatatagtgagcttgca

SEQ ID NO: 412639 - DNA, 33 bp, Homo sapien
aaatgtgaattgtgtcaaaattctaaaattcag

SEQ ID NO: 412640 - DNA, 33 bp, Homo sapien
aaatgtgaattgtgtcgaaattctaaaattcag

SEQ ID NO: 412641 - DNA, 33 bp, Homo sapien
ttccctagtgtcttaccatatctttgttgagat

SEQ ID NO: 412642 - DNA, 33 bp, Homo sapien
ttccctagtgtcttactatatctttgttgagat

SEQ ID NO: 412643 - DNA, 33 bp, Homo sapien
aggagggaagacctaactcatgagggatgggac

SEQ ID NO: 412644 - DNA, 33 bp, Homo sapien
aggagggaagacctaattcatgagggatgggac

SEQ ID NO: 412645 - DNA, 33 bp, Homo sapien
tctagaggtttcacaaggatgaacaacaggtaa

SEQ ID NO: 412646 - DNA, 33 bp, Homo sapien
tctagaggtttcacaatgatgaacaacaggtaa

SEQ ID NO: 412647 - DNA, 33 bp, Homo sapien
actacattttgtgggacccatctttgctcattg

SEQ ID NO: 412648 - DNA, 33 bp, Homo sapien
actacattttgtgggatccatctttgctcattg

SEQ ID NO: 412649 - DNA, 33 bp, Homo sapien
agccactcagtctatgcatctttgtgacgacag

SEQ ID NO: 412650 - DNA, 33 bp, Homo sapien
agccactcagtctatggatctttgtgacgacag

SEQ ID NO: 412651 - DNA, 33 bp, Homo sapien
taactgaccagtgcaaagatattctaggacaat

SEQ ID NO: 412652 - DNA, 33 bp, Homo sapien
taactgaccagtgcaaggatattctaggacaat

SEQ ID NO: 412653 - DNA, 33 bp, Homo sapien
tgaattagaaggtaaaaggtggagcaaaacaaa

SEQ ID NO: 412654 - DNA, 33 bp, Homo sapien
tgaattagaaggtaaacggtggagcaaaacaaa

SEQ ID NO: 412655 - DNA, 33 bp, Homo sapien
ccacagccaagttcagcaaccagtgtcctcact

SEQ ID NO: 412656 - DNA, 33 bp, Homo sapien
ccacagccaagttcaggaaccagtgtcctcact

SEQ ID NO: 412657 - DNA, 33 bp, Homo sapien
gggtctcagcacaaaacgtggttgaccatgtag

SEQ ID NO: 412658 - DNA, 33 bp, Homo sapien
gggtctcagcacaaaatgtggttgaccatgtag

SEQ ID NO: 412659 - DNA, 33 bp, Homo sapien
atttgaatagcttcacaatgttccatcatgtta

SEQ ID NO: 412660 - DNA, 33 bp, Homo sapien
atttgaatagcttcactatgttccatcatgtta

SEQ ID NO: 412661 - DNA, 33 bp, Homo sapien
tccagcttgtggacaaaagacctaatggttccc

SEQ ID NO: 412662 - DNA, 33 bp, Homo sapien
tccagcttgtggacaagagacctaatggttccc

SEQ ID NO: 412663 - DNA, 33 bp, Homo sapien
aagattgcgatcatgtgaagtaaatagccgtcc

SEQ ID NO: 412664 - DNA, 33 bp, Homo sapien
aagattgcgatcatgttaagtaaatagccgtcc

SEQ ID NO: 412665 - DNA, 33 bp, Homo sapien
cctagaagcaagtatagtaagccaaagggagac

SEQ ID NO: 412666 - DNA, 33 bp, Homo sapien
cctagaagcaagtatattaagccaaagggagac

SEQ ID NO: 412667 - DNA, 33 bp, Homo sapien
ttaacaaaaacatcaacgttcaggccttatcct

SEQ ID NO: 412668 - DNA, 33 bp, Homo sapien
ttaacaaaaacatcaatgttcaggccttatcct

SEQ ID NO: 412669 - DNA, 33 bp, Homo sapien
ctctctggtgcatttaaaaatcatccttgcagg

SEQ ID NO: 412670 - DNA, 33 bp, Homo sapien
ctctctggtgcatttacaaatcatccttgcagg

SEQ ID NO: 412671 - DNA, 33 bp, Homo sapien
cttggggaaaggagccacatcttcacttctacg

SEQ ID NO: 412672 - DNA, 33 bp, Homo sapien
cttggggaaaggagccgcatcttcacttctacg

SEQ ID NO: 412673 - DNA, 33 bp, Homo sapien
ctattcctagactctaacctagttctcataact

SEQ ID NO: 412674 - DNA, 33 bp, Homo sapien
ctattcctagactctatcctagttctcataact

SEQ ID NO: 412675 - DNA, 33 bp, Homo sapien
aaatagctaggccccaatgaacagagaaagagg

SEQ ID NO: 412676 - DNA, 33 bp, Homo sapien
aaatagctaggccccagtgaacagagaaagagg

SEQ ID NO: 412677 - DNA, 33 bp, Homo sapien
ctagcccctcggcggaacctcagaatgatttgg

SEQ ID NO: 412678 - DNA, 33 bp, Homo sapien
ctagcccctcggcggatcctcagaatgatttgg

SEQ ID NO: 412679 - DNA, 33 bp, Homo sapien
gtaggtgctcaatagacgtgctgaatgagtgag

SEQ ID NO: 412680 - DNA, 33 bp, Homo sapien
gtaggtgctcaatagatgtgctgaatgagtgag

SEQ ID NO: 412681 - DNA, 33 bp, Homo sapien
aatagagcaacattcaacaagtgttcattgttc

SEQ ID NO: 412682 - DNA, 33 bp, Homo sapien
aatagagcaacattcagcaagtgttcattgttc

SEQ ID NO: 412683 - DNA, 33 bp, Homo sapien
cagaatcccatgctgaagactgaattgcaaggg

SEQ ID NO: 412684 - DNA, 33 bp, Homo sapien
cagaatcccatgctgaggactgaattgcaaggg

SEQ ID NO: 412685 - DNA, 33 bp, Homo sapien
acaaatgcctgcccaaagattataaaggaaatt

SEQ ID NO: 412686 - DNA, 33 bp, Homo sapien
acaaatgcctgcccaaggattataaaggaaatt

SEQ ID NO: 412687 - DNA, 33 bp, Homo sapien
tgggtgagggggaaacggtgcaagatgagttta

SEQ ID NO: 412688 - DNA, 33 bp, Homo sapien
tgggtgagggggaaactgtgcaagatgagttta

SEQ ID NO: 412689 - DNA, 33 bp, Homo sapien
gtggtcactggtttcacgttagcaaaatgattc

SEQ ID NO: 412690 - DNA, 33 bp, Homo sapien
gtggtcactggtttcatgttagcaaaatgattc

SEQ ID NO: 412691 - DNA, 33 bp, Homo sapien
gtgatattatagggaaaccacataatgttttgg

SEQ ID NO: 412692 - DNA, 33 bp, Homo sapien
gtgatattatagggaagccacataatgttttgg

SEQ ID NO: 412693 - DNA, 33 bp, Homo sapien
tctccccaagtctccactgccttcaccaggcta

SEQ ID NO: 412694 - DNA, 33 bp, Homo sapien
tctccccaagtctccagtgccttcaccaggcta

SEQ ID NO: 412695 - DNA, 33 bp, Homo sapien
gggacaaaatatgagtaaagacctaagacaatt

SEQ ID NO: 412696 - DNA, 33 bp, Homo sapien
gggacaaaatatgagtgaagacctaagacaatt

SEQ ID NO: 412697 - DNA, 33 bp, Homo sapien
tctgtgttgcatcgctcacaagttttctttctg

SEQ ID NO: 412698 - DNA, 33 bp, Homo sapien
tctgtgttgcatcgcttacaagttttctttctg

SEQ ID NO: 412699 - DNA, 33 bp, Homo sapien
ccctctccccctaagcaacacaggcaggaggga

SEQ ID NO: 412700 - DNA, 33 bp, Homo sapien
ccctctccccctaagcgacacaggcaggaggga

SEQ ID NO: 412701 - DNA, 33 bp, Homo sapien
tcacagggctgcttggaaacctatagagtgata

SEQ ID NO: 412702 - DNA, 33 bp, Homo sapien
tcacagggctgcttgggaacctatagagtgata

SEQ ID NO: 412703 - DNA, 33 bp, Homo sapien
ggaaatcacatctgcaaactgaaggtggtctcc

SEQ ID NO: 412704 - DNA, 33 bp, Homo sapien
ggaaatcacatctgcagactgaaggtggtctcc

SEQ ID NO: 412705 - DNA, 33 bp, Homo sapien
taaaggatgcacttcactacaaagaaaactgga

SEQ ID NO: 412706 - DNA, 33 bp, Homo sapien
taaaggatgcacttcagtacaaagaaaactgga

SEQ ID NO: 412707 - DNA, 33 bp, Homo sapien
ggagaaattactctcaacctatctttttcaatt

SEQ ID NO: 412708 - DNA, 33 bp, Homo sapien
ggagaaattactctcatcctatctttttcaatt

SEQ ID NO: 412709 - DNA, 33 bp, Homo sapien
attctcatttattgtcgctggataatgcttcct

SEQ ID NO: 412710 - DNA, 33 bp, Homo sapien
attctcatttattgtctctggataatgcttcct

SEQ ID NO: 412711 - DNA, 33 bp, Homo sapien
gcctggccaccaaatcacctttttaaagtctgt

SEQ ID NO: 412712 - DNA, 33 bp, Homo sapien
gcctggccaccaaatcgcctttttaaagtctgt

SEQ ID NO: 412713 - DNA, 33 bp, Homo sapien
tcctgttaagctttacactgggaccactgatgc

SEQ ID NO: 412714 - DNA, 33 bp, Homo sapien
tcctgttaagctttacgctgggaccactgatgc

SEQ ID NO: 412715 - DNA, 33 bp, Homo sapien
catctttttactgcaacgtaagtttctttcttt

SEQ ID NO: 412716 - DNA, 33 bp, Homo sapien
catctttttactgcaatgtaagtttctttcttt

SEQ ID NO: 412717 - DNA, 33 bp, Homo sapien
acgactgtgaagagtcaatgagagtgtgtgtgt

SEQ ID NO: 412718 - DNA, 33 bp, Homo sapien
acgactgtgaagagtctatgagagtgtgtgtgt

SEQ ID NO: 412719 - DNA, 33 bp, Homo sapien
ttcattttccccctcactattgaatctttctca

SEQ ID NO: 412720 - DNA, 33 bp, Homo sapien
ttcattttccccctcattattgaatctttctca

SEQ ID NO: 412721 - DNA, 33 bp, Homo sapien
ttatgccttgggaaaaagagaagttgaaagtta

SEQ ID NO: 412722 - DNA, 33 bp, Homo sapien
ttatgccttgggaaaaggagaagttgaaagtta

SEQ ID NO: 412723 - DNA, 33 bp, Homo sapien
tctgcttttgggaaacaaacctaagatgttgct

SEQ ID NO: 412724 - DNA, 33 bp, Homo sapien
tctgcttttgggaaaccaacctaagatgttgct

SEQ ID NO: 412725 - DNA, 33 bp, Homo sapien
tgcttagtgctttgggaaattaagatcttgggg

SEQ ID NO: 412726 - DNA, 33 bp, Homo sapien
tgcttagtgctttggggaattaagatcttgggg

SEQ ID NO: 412727 - DNA, 33 bp, Homo sapien
atgtcattgatttgtaaggtacacctagtaagt

SEQ ID NO: 412728 - DNA, 33 bp, Homo sapien
atgtcattgatttgtagggtacacctagtaagt

SEQ ID NO: 412729 - DNA, 33 bp, Homo sapien
ttctctgaggtgacccaaagaactattcagaga

SEQ ID NO: 412730 - DNA, 33 bp, Homo sapien
ttctctgaggtgacccgaagaactattcagaga

SEQ ID NO: 412731 - DNA, 33 bp, Homo sapien
agcccctatgacaggacgatgcctccgtctccc

SEQ ID NO: 412732 - DNA, 33 bp, Homo sapien
agcccctatgacaggatgatgcctccgtctccc

SEQ ID NO: 412733 - DNA, 33 bp, Homo sapien
cacattaaggcttccacagtctcagagtttcta

SEQ ID NO: 412734 - DNA, 33 bp, Homo sapien
cacattaaggcttccatagtctcagagtttcta

SEQ ID NO: 412735 - DNA, 33 bp, Homo sapien
ttagtgtaaaaactgcccagagagtccacctct

SEQ ID NO: 412736 - DNA, 33 bp, Homo sapien
ttagtgtaaaaactgctcagagagtccacctct

SEQ ID NO: 412737 - DNA, 33 bp, Homo sapien
aaaactgttgcgatgacgcatgcacgtttgaat

SEQ ID NO: 412738 - DNA, 33 bp, Homo sapien
aaaactgttgcgatgatgcatgcacgtttgaat

SEQ ID NO: 412739 - DNA, 33 bp, Homo sapien
tttccttaccccactccataaaggcagccataa

SEQ ID NO: 412740 - DNA, 33 bp, Homo sapien
tttccttaccccactcgataaaggcagccataa

SEQ ID NO: 412741 - DNA, 33 bp, Homo sapien
caggccaattgtcttacactgactgataaaagc

SEQ ID NO: 412742 - DNA, 33 bp, Homo sapien
caggccaattgtcttatactgactgataaaagc

SEQ ID NO: 412743 - DNA, 33 bp, Homo sapien
accagccaaaccgtggacaataggcaggaagca

SEQ ID NO: 412744 - DNA, 33 bp, Homo sapien
accagccaaaccgtgggcaataggcaggaagca

SEQ ID NO: 412745 - DNA, 33 bp, Homo sapien
gactcactctccaaacagtgacttctgcctggc

SEQ ID NO: 412746 - DNA, 33 bp, Homo sapien
gactcactctccaaacggtgacttctgcctggc

SEQ ID NO: 412747 - DNA, 33 bp, Homo sapien
caagggatgtctagaaccaagaacccaggattg

SEQ ID NO: 412748 - DNA, 33 bp, Homo sapien
caagggatgtctagaatcaagaacccaggattg

SEQ ID NO: 412749 - DNA, 33 bp, Homo sapien
ctggtagtttgcagaaaagatgagagtcaggaa

SEQ ID NO: 412750 - DNA, 33 bp, Homo sapien
ctggtagtttgcagaagagatgagagtcaggaa

SEQ ID NO: 412751 - DNA, 33 bp, Homo sapien
gaggggtgaataggatcagagcaatgcgtctgg

SEQ ID NO: 412752 - DNA, 33 bp, Homo sapien
gaggggtgaataggattagagcaatgcgtctgg

SEQ ID NO: 412753 - DNA, 33 bp, Homo sapien
ttcaagatgcactgacacattgcattatccccc

SEQ ID NO: 412754 - DNA, 33 bp, Homo sapien
ttcaagatgcactgacgcattgcattatccccc

SEQ ID NO: 412755 - DNA, 33 bp, Homo sapien
ccagtgttcagcctgacgctatacccagtatgg

SEQ ID NO: 412756 - DNA, 33 bp, Homo sapien
ccagtgttcagcctgatgctatacccagtatgg

SEQ ID NO: 412757 - DNA, 33 bp, Homo sapien
gttcatttggcttacccgagtgtattagcctgc

SEQ ID NO: 412758 - DNA, 33 bp, Homo sapien
gttcatttggcttacctgagtgtattagcctgc

SEQ ID NO: 412759 - DNA, 33 bp, Homo sapien
attccacattcgagcaaagaaactatttggctc

SEQ ID NO: 412760 - DNA, 33 bp, Homo sapien
attccacattcgagcagagaaactatttggctc

SEQ ID NO: 412761 - DNA, 33 bp, Homo sapien
tgcatagacaggaaaacgggatggtcccatgtt

SEQ ID NO: 412762 - DNA, 33 bp, Homo sapien
tgcatagacaggaaaatgggatggtcccatgtt

SEQ ID NO: 412763 - DNA, 33 bp, Homo sapien
gctcaaatgcatatcactaattatcaggggtat

SEQ ID NO: 412764 - DNA, 33 bp, Homo sapien
gctcaaatgcatatcattaattatcaggggtat

SEQ ID NO: 412765 - DNA, 33 bp, Homo sapien
tcactgcactgccaacaaaggctcatgagcaga

SEQ ID NO: 412766 - DNA, 33 bp, Homo sapien
tcactgcactgccaaccaaggctcatgagcaga

SEQ ID NO: 412767 - DNA, 33 bp, Homo sapien
aagagcctccagagaaagtagagagcccatgca

SEQ ID NO: 412768 - DNA, 33 bp, Homo sapien
aagagcctccagagaaggtagagagcccatgca

SEQ ID NO: 412769 - DNA, 33 bp, Homo sapien
ggcctcgatgagagaaataatctgccacaaaga

SEQ ID NO: 412770 - DNA, 33 bp, Homo sapien
ggcctcgatgagagaagtaatctgccacaaaga

SEQ ID NO: 412771 - DNA, 33 bp, Homo sapien
tgtaggtatgttgtaacgtgtatcaatggtcca

SEQ ID NO: 412772 - DNA, 33 bp, Homo sapien
tgtaggtatgttgtaatgtgtatcaatggtcca

SEQ ID NO: 412773 - DNA, 33 bp, Homo sapien
atgtcttgtgaagagcaaccatttcaagctgca

SEQ ID NO: 412774 - DNA, 33 bp, Homo sapien
atgtcttgtgaagagcgaccatttcaagctgca

SEQ ID NO: 412775 - DNA, 33 bp, Homo sapien
actcatctggattccaagcaaagttcctggact

SEQ ID NO: 412776 - DNA, 33 bp, Homo sapien
actcatctggattccaggcaaagttcctggact

SEQ ID NO: 412777 - DNA, 33 bp, Homo sapien
tccttaggggtagccactgaagcaaatgatgat

SEQ ID NO: 412778 - DNA, 33 bp, Homo sapien
tccttaggggtagccattgaagcaaatgatgat

SEQ ID NO: 412779 - DNA, 33 bp, Homo sapien
tggctcctcagtcaacacgaatttgcttgaagg

SEQ ID NO: 412780 - DNA, 33 bp, Homo sapien
tggctcctcagtcaacgcgaatttgcttgaagg

SEQ ID NO: 412781 - DNA, 33 bp, Homo sapien
cccttctaaccctgaaactctagccatgttgcc

SEQ ID NO: 412782 - DNA, 33 bp, Homo sapien
cccttctaaccctgaagctctagccatgttgcc

SEQ ID NO: 412783 - DNA, 33 bp, Homo sapien
tgtcaaaaacaaagagacccaagacctacccca

SEQ ID NO: 412784 - DNA, 33 bp, Homo sapien
tgtcaaaaacaaagaggcccaagacctacccca

SEQ ID NO: 412785 - DNA, 33 bp, Homo sapien
cttacaaagcacttacaaccataccctgcacct

SEQ ID NO: 412786 - DNA, 33 bp, Homo sapien
cttacaaagcacttaccaccataccctgcacct

SEQ ID NO: 412787 - DNA, 33 bp, Homo sapien
tgtgaccttaatttccaaaccaaaaatgaagac

SEQ ID NO: 412788 - DNA, 33 bp, Homo sapien
tgtgaccttaatttccgaaccaaaaatgaagac

SEQ ID NO: 412789 - DNA, 33 bp, Homo sapien
ttactgcagggccaaacgagaacaagtgtctga

SEQ ID NO: 412790 - DNA, 33 bp, Homo sapien
ttactgcagggccaaatgagaacaagtgtctga

SEQ ID NO: 412791 - DNA, 33 bp, Homo sapien
ttgttctcagcttagcactttccaacatttcca

SEQ ID NO: 412792 - DNA, 33 bp, Homo sapien
ttgttctcagcttagccctttccaacatttcca

SEQ ID NO: 412793 - DNA, 33 bp, Homo sapien
ctgacatcagagaagggcaggctttactccttt

SEQ ID NO: 412794 - DNA, 33 bp, Homo sapien
ctgacatcagagaaggtcaggctttactccttt

SEQ ID NO: 412795 - DNA, 33 bp, Homo sapien
cattaatgctgttctcacttgtcaaccagttca

SEQ ID NO: 412796 - DNA, 33 bp, Homo sapien
cattaatgctgttctctcttgtcaaccagttca

SEQ ID NO: 412797 - DNA, 33 bp, Homo sapien
ggactttgggacacacaagagtcctcagagcca

SEQ ID NO: 412798 - DNA, 33 bp, Homo sapien
ggactttgggacacacgagagtcctcagagcca

SEQ ID NO: 412799 - DNA, 33 bp, Homo sapien
aaaggtcacgtaattcacagagacatagatgga

SEQ ID NO: 412800 - DNA, 33 bp, Homo sapien
aaaggtcacgtaattcgcagagacatagatgga

SEQ ID NO: 412801 - DNA, 33 bp, Homo sapien
ccggattcataaaggacataggagtgcttggat

SEQ ID NO: 412802 - DNA, 33 bp, Homo sapien
ccggattcataaaggatataggagtgcttggat

SEQ ID NO: 412803 - DNA, 33 bp, Homo sapien
tcctctaatggctataagtggttgagaaaatga

SEQ ID NO: 412804 - DNA, 33 bp, Homo sapien
tcctctaatggctataggtggttgagaaaatga

SEQ ID NO: 412805 - DNA, 33 bp, Homo sapien
aggatggattccaatgaagctctgtaagagtgc

SEQ ID NO: 412806 - DNA, 33 bp, Homo sapien
aggatggattccaatgtagctctgtaagagtgc

SEQ ID NO: 412807 - DNA, 33 bp, Homo sapien
gtaatttgctgaaaatgaatgcaaactaaaata

SEQ ID NO: 412808 - DNA, 33 bp, Homo sapien
gtaatttgctgaaaattaatgcaaactaaaata

SEQ ID NO: 412809 - DNA, 33 bp, Homo sapien
tccagggtgttcagaacggtaaactaacgttgg

SEQ ID NO: 412810 - DNA, 33 bp, Homo sapien
tccagggtgttcagaatggtaaactaacgttgg

SEQ ID NO: 412811 - DNA, 33 bp, Homo sapien
gaagccaggtggcgatcaagacacacttctctg

SEQ ID NO: 412812 - DNA, 33 bp, Homo sapien
gaagccaggtggcgatgaagacacacttctctg

SEQ ID NO: 412813 - DNA, 33 bp, Homo sapien
atgggcatctttataacgagtatgagttgaaat

SEQ ID NO: 412814 - DNA, 33 bp, Homo sapien
atgggcatctttataatgagtatgagttgaaat

SEQ ID NO: 412815 - DNA, 33 bp, Homo sapien
gttgtttgtagccaaaaacatcctcactgctac

SEQ ID NO: 412816 - DNA, 33 bp, Homo sapien
gttgtttgtagccaaagacatcctcactgctac

SEQ ID NO: 412817 - DNA, 33 bp, Homo sapien
actccaagtagcaagaaggtcaggaaagcactg

SEQ ID NO: 412818 - DNA, 33 bp, Homo sapien
actccaagtagcaagagggtcaggaaagcactg

SEQ ID NO: 412819 - DNA, 33 bp, Homo sapien
aaatttcgacttcctgaaggatttcaatctatt

SEQ ID NO: 412820 - DNA, 33 bp, Homo sapien
aaatttcgacttcctgtaggatttcaatctatt

SEQ ID NO: 412821 - DNA, 33 bp, Homo sapien
aggtggtgacatatgacaatgatcagatcttag

SEQ ID NO: 412822 - DNA, 33 bp, Homo sapien
aggtggtgacatatgataatgatcagatcttag

SEQ ID NO: 412823 - DNA, 33 bp, Homo sapien
tgtagctgttgttcaccaagagatagcccctct

SEQ ID NO: 412824 - DNA, 33 bp, Homo sapien
tgtagctgttgttcacgaagagatagcccctct

SEQ ID NO: 412825 - DNA, 33 bp, Homo sapien
cttggcagtgtggggaaaatagacttctagatt

SEQ ID NO: 412826 - DNA, 33 bp, Homo sapien
cttggcagtgtggggagaatagacttctagatt

SEQ ID NO: 412827 - DNA, 33 bp, Homo sapien
gaaggtgaattaatttcaaaaagagggccaggc

SEQ ID NO: 412828 - DNA, 33 bp, Homo sapien
gaaggtgaattaatttgaaaaagagggccaggc

SEQ ID NO: 412829 - DNA, 33 bp, Homo sapien
atttttacagatgaaaaatgaaaggggtcatgg

SEQ ID NO: 412830 - DNA, 33 bp, Homo sapien
atttttacagatgaaacatgaaaggggtcatgg

SEQ ID NO: 412831 - DNA, 33 bp, Homo sapien
gagggacagcaaacagcccatgtgggtacagta

SEQ ID NO: 412832 - DNA, 33 bp, Homo sapien
gagggacagcaaacagtccatgtgggtacagta

SEQ ID NO: 412833 - DNA, 33 bp, Homo sapien
tgatgctagcaggaaccagatggtgtaaatggc

SEQ ID NO: 412834 - DNA, 33 bp, Homo sapien
tgatgctagcaggaactagatggtgtaaatggc

SEQ ID NO: 412835 - DNA, 33 bp, Homo sapien
gggccatgcatctagcccagagcctggaacatt

SEQ ID NO: 412836 - DNA, 33 bp, Homo sapien
gggccatgcatctagctcagagcctggaacatt

SEQ ID NO: 412837 - DNA, 33 bp, Homo sapien
gccaatggcattgaagcacacgcgtcaagtggc

SEQ ID NO: 412838 - DNA, 33 bp, Homo sapien
gccaatggcattgaagtacacgcgtcaagtggc

SEQ ID NO: 412839 - DNA, 33 bp, Homo sapien
cttccagctatcctacaaataggtactatccct

SEQ ID NO: 412840 - DNA, 33 bp, Homo sapien
cttccagctatcctacgaataggtactatccct

SEQ ID NO: 412841 - DNA, 33 bp, Homo sapien
ggactgttttgttaggccaattgcttcccaatg

SEQ ID NO: 412842 - DNA, 33 bp, Homo sapien
ggactgttttgttaggtcaattgcttcccaatg

SEQ ID NO: 412843 - DNA, 33 bp, Homo sapien
ttcattcctttgtccacctttctctctcctcca

SEQ ID NO: 412844 - DNA, 33 bp, Homo sapien
ttcattcctttgtccatctttctctctcctcca

SEQ ID NO: 412845 - DNA, 33 bp, Homo sapien
ttgggatgtgagtaggaagacacgaaggaggca

SEQ ID NO: 412846 - DNA, 33 bp, Homo sapien
ttgggatgtgagtagggagacacgaaggaggca

SEQ ID NO: 412847 - DNA, 33 bp, Homo sapien
agcattgtatcaaggacgctttggttctaagat

SEQ ID NO: 412848 - DNA, 33 bp, Homo sapien
agcattgtatcaaggatgctttggttctaagat

SEQ ID NO: 412849 - DNA, 33 bp, Homo sapien
tgtgtcattgaggcacaggttattaacactcgt

SEQ ID NO: 412850 - DNA, 33 bp, Homo sapien
tgtgtcattgaggcacgggttattaacactcgt

SEQ ID NO: 412851 - DNA, 33 bp, Homo sapien
atttaaaacttcctaactggactgactttcaag

SEQ ID NO: 412852 - DNA, 33 bp, Homo sapien
atttaaaacttcctaattggactgactttcaag

SEQ ID NO: 412853 - DNA, 33 bp, Homo sapien
agtagtcgctgtgtcacgaggagctgtggttgg

SEQ ID NO: 412854 - DNA, 33 bp, Homo sapien
agtagtcgctgtgtcatgaggagctgtggttgg

SEQ ID NO: 412855 - DNA, 33 bp, Homo sapien
agattctggacccacacatgaagatgtatcctc

SEQ ID NO: 412856 - DNA, 33 bp, Homo sapien
agattctggacccacagatgaagatgtatcctc

SEQ ID NO: 412857 - DNA, 33 bp, Homo sapien
atggtcaatgacgacaagcataagctattggca

SEQ ID NO: 412858 - DNA, 33 bp, Homo sapien
atggtcaatgacgacatgcataagctattggca

SEQ ID NO: 412859 - DNA, 33 bp, Homo sapien
gttgttgggaggattaaacgaagaagtgatgca

SEQ ID NO: 412860 - DNA, 33 bp, Homo sapien
gttgttgggaggattagacgaagaagtgatgca

SEQ ID NO: 412861 - DNA, 33 bp, Homo sapien
ctcatgtcttgaaatgaaacagatgaaagcaac

SEQ ID NO: 412862 - DNA, 33 bp, Homo sapien
ctcatgtcttgaaatggaacagatgaaagcaac

SEQ ID NO: 412863 - DNA, 33 bp, Homo sapien
aagactgcaagaaaacaacgagactctgactgt

SEQ ID NO: 412864 - DNA, 33 bp, Homo sapien
aagactgcaagaaaacgacgagactctgactgt

SEQ ID NO: 412865 - DNA, 33 bp, Homo sapien
tatccgaagccaagataagactgtcccaaaacg

SEQ ID NO: 412866 - DNA, 33 bp, Homo sapien
tatccgaagccaagatgagactgtcccaaaacg

SEQ ID NO: 412867 - DNA, 33 bp, Homo sapien
agcaagagaaaacggacgttaattaccaagtga

SEQ ID NO: 412868 - DNA, 33 bp, Homo sapien
agcaagagaaaacggatgttaattaccaagtga

SEQ ID NO: 412869 - DNA, 33 bp, Homo sapien
gcaaagacagtacaccacctctaataagtcccc

SEQ ID NO: 412870 - DNA, 33 bp, Homo sapien
gcaaagacagtacaccgcctctaataagtcccc

SEQ ID NO: 412871 - DNA, 33 bp, Homo sapien
tgtctgtggcatgttgaatgtgcttaatggccc

SEQ ID NO: 412872 - DNA, 33 bp, Homo sapien
tgtctgtggcatgttggatgtgcttaatggccc

SEQ ID NO: 412873 - DNA, 33 bp, Homo sapien
tttttcttattttttgaatgaatggatatgtta

SEQ ID NO: 412874 - DNA, 33 bp, Homo sapien
tttttcttattttttggatgaatggatatgtta

SEQ ID NO: 412875 - DNA, 33 bp, Homo sapien
gccaaagcccccttcaaaagttcactgtggttg

SEQ ID NO: 412876 - DNA, 33 bp, Homo sapien
gccaaagcccccttcataagttcactgtggttg

SEQ ID NO: 412877 - DNA, 33 bp, Homo sapien
tctgatccttgaggaaatgaagagacactgccc

SEQ ID NO: 412878 - DNA, 33 bp, Homo sapien
tctgatccttgaggaagtgaagagacactgccc

SEQ ID NO: 412879 - DNA, 33 bp, Homo sapien
ctccataaggaaaaagcccacttattacattgc

SEQ ID NO: 412880 - DNA, 33 bp, Homo sapien
ctccataaggaaaaaggccacttattacattgc

SEQ ID NO: 412881 - DNA, 33 bp, Homo sapien
ggaattaagctgctgacgcatgatctttgaggg

SEQ ID NO: 412882 - DNA, 33 bp, Homo sapien
ggaattaagctgctgatgcatgatctttgaggg

SEQ ID NO: 412883 - DNA, 33 bp, Homo sapien
ggtatcatggtgtgaacgtgtccctcaaagatc

SEQ ID NO: 412884 - DNA, 33 bp, Homo sapien
ggtatcatggtgtgaatgtgtccctcaaagatc

SEQ ID NO: 412885 - DNA, 33 bp, Homo sapien
tcttgaatcagctaaaggcttccagtcaaaagg

SEQ ID NO: 412886 - DNA, 33 bp, Homo sapien
tcttgaatcagctaaatgcttccagtcaaaagg

SEQ ID NO: 412887 - DNA, 33 bp, Homo sapien
ccacctgaataggctacaccaaagggaaaaact

SEQ ID NO: 412888 - DNA, 33 bp, Homo sapien
ccacctgaataggctataccaaagggaaaaact

SEQ ID NO: 412889 - DNA, 33 bp, Homo sapien
tgtagattgagctcaacgcttcaaagctggatt

SEQ ID NO: 412890 - DNA, 33 bp, Homo sapien
tgtagattgagctcaatgcttcaaagctggatt

SEQ ID NO: 412891 - DNA, 33 bp, Homo sapien
gctttcttaaggatcaccgattgatattataat

SEQ ID NO: 412892 - DNA, 33 bp, Homo sapien
gctttcttaaggatcatcgattgatattataat

SEQ ID NO: 412893 - DNA, 33 bp, Homo sapien
ggcatctttaacagtacagaaatgtatgctaca

SEQ ID NO: 412894 - DNA, 33 bp, Homo sapien
ggcatctttaacagtatagaaatgtatgctaca

SEQ ID NO: 412895 - DNA, 33 bp, Homo sapien
aagtgattgtctaaaaacttcagggctttcagg

SEQ ID NO: 412896 - DNA, 33 bp, Homo sapien
aagtgattgtctaaaaccttcagggctttcagg

SEQ ID NO: 412897 - DNA, 33 bp, Homo sapien
tcacaaaacacatttaaacatctctctcacaag

SEQ ID NO: 412898 - DNA, 33 bp, Homo sapien
tcacaaaacacatttagacatctctctcacaag

SEQ ID NO: 412899 - DNA, 33 bp, Homo sapien
gagaggatggaaatgaaccacagcagaccagcc

SEQ ID NO: 412900 - DNA, 33 bp, Homo sapien
gagaggatggaaatgagccacagcagaccagcc

SEQ ID NO: 412901 - DNA, 33 bp, Homo sapien
cctcaaccacatcgcaccaaagagaggggcttc

SEQ ID NO: 412902 - DNA, 33 bp, Homo sapien
cctcaaccacatcgcatcaaagagaggggcttc

SEQ ID NO: 412903 - DNA, 33 bp, Homo sapien
tttactgtagacattccgaagaccttgtcattt

SEQ ID NO: 412904 - DNA, 33 bp, Homo sapien
tttactgtagacattctgaagaccttgtcattt

SEQ ID NO: 412905 - DNA, 33 bp, Homo sapien
cacagcagagagaaaagaattttttgttcaatt

SEQ ID NO: 412906 - DNA, 33 bp, Homo sapien
cacagcagagagaaaataattttttgttcaatt

SEQ ID NO: 412907 - DNA, 33 bp, Homo sapien
ccattatcccacatagaagttactgatgtctcc

SEQ ID NO: 412908 - DNA, 33 bp, Homo sapien
ccattatcccacataggagttactgatgtctcc

SEQ ID NO: 412909 - DNA, 33 bp, Homo sapien
gggaaactcagtataacagacatttggggaaag

SEQ ID NO: 412910 - DNA, 33 bp, Homo sapien
gggaaactcagtataatagacatttggggaaag

SEQ ID NO: 412911 - DNA, 33 bp, Homo sapien
tttctctaatcaataaacagcaatttaaaatca

SEQ ID NO: 412912 - DNA, 33 bp, Homo sapien
tttctctaatcaataagcagcaatttaaaatca

SEQ ID NO: 412913 - DNA, 33 bp, Homo sapien
tgacagacactgtacaataaatgttacacatac

SEQ ID NO: 412914 - DNA, 33 bp, Homo sapien
tgacagacactgtacagtaaatgttacacatac

SEQ ID NO: 412915 - DNA, 33 bp, Homo sapien
tgtgtgtcaagaattacgataggtactctagac

SEQ ID NO: 412916 - DNA, 33 bp, Homo sapien
tgtgtgtcaagaattatgataggtactctagac

SEQ ID NO: 412917 - DNA, 33 bp, Homo sapien
tcatcaacaagcacagaaactattgcattcatc

SEQ ID NO: 412918 - DNA, 33 bp, Homo sapien
tcatcaacaagcacaggaactattgcattcatc

SEQ ID NO: 412919 - DNA, 33 bp, Homo sapien
accactgtcagagtgaacttcttaaacttaaat

SEQ ID NO: 412920 - DNA, 33 bp, Homo sapien
accactgtcagagtgatcttcttaaacttaaat

SEQ ID NO: 412921 - DNA, 33 bp, Homo sapien
gcagggtgtgggacgccgagtgtagcactctca

SEQ ID NO: 412922 - DNA, 33 bp, Homo sapien
gcagggtgtgggacgctgagtgtagcactctca

SEQ ID NO: 412923 - DNA, 33 bp, Homo sapien
tccaattccctgtcaacggttccacttcaccca

SEQ ID NO: 412924 - DNA, 33 bp, Homo sapien
tccaattccctgtcaatggttccacttcaccca

SEQ ID NO: 412925 - DNA, 33 bp, Homo sapien
aatttggagggggcacggatagtgtctagcaat

SEQ ID NO: 412926 - DNA, 33 bp, Homo sapien
aatttggagggggcactgatagtgtctagcaat

SEQ ID NO: 412927 - DNA, 33 bp, Homo sapien
tccttcttagctgatgaaagagatactgcttga

SEQ ID NO: 412928 - DNA, 33 bp, Homo sapien
tccttcttagctgatggaagagatactgcttga

SEQ ID NO: 412929 - DNA, 33 bp, Homo sapien
ttcagatctagattaacggaacccatattcacc

SEQ ID NO: 412930 - DNA, 33 bp, Homo sapien
ttcagatctagattaatggaacccatattcacc

SEQ ID NO: 412931 - DNA, 33 bp, Homo sapien
acatccagcctgccacaagccttaacaccaatg

SEQ ID NO: 412932 - DNA, 33 bp, Homo sapien
acatccagcctgccacgagccttaacaccaatg

SEQ ID NO: 412933 - DNA, 33 bp, Homo sapien
aaagtgaaaactgggcacttctgtctaaaaact

SEQ ID NO: 412934 - DNA, 33 bp, Homo sapien
aaagtgaaaactgggcgcttctgtctaaaaact

SEQ ID NO: 412935 - DNA, 33 bp, Homo sapien
atgagagagaacacgacgtttgagaacagagtg

SEQ ID NO: 412936 - DNA, 33 bp, Homo sapien
atgagagagaacacgatgtttgagaacagagtg

SEQ ID NO: 412937 - DNA, 33 bp, Homo sapien
tcttaatttctgaaaacgtcgtatgactaaatt

SEQ ID NO: 412938 - DNA, 33 bp, Homo sapien
tcttaatttctgaaaatgtcgtatgactaaatt

SEQ ID NO: 412939 - DNA, 33 bp, Homo sapien
ggactagtagttgtccagaatatcctgttaatg

SEQ ID NO: 412940 - DNA, 33 bp, Homo sapien
ggactagtagttgtccggaatatcctgttaatg

SEQ ID NO: 412941 - DNA, 33 bp, Homo sapien
tctcactttgagattacgttaagtgtgtttcag

SEQ ID NO: 412942 - DNA, 33 bp, Homo sapien
tctcactttgagattatgttaagtgtgtttcag

SEQ ID NO: 412943 - DNA, 33 bp, Homo sapien
tgatacctaagccagaaaaagcaacataggaaa

SEQ ID NO: 412944 - DNA, 33 bp, Homo sapien
tgatacctaagccagacaaagcaacataggaaa

SEQ ID NO: 412945 - DNA, 33 bp, Homo sapien
gaaaactataggccaacctctctgaagaacatt

SEQ ID NO: 412946 - DNA, 33 bp, Homo sapien
gaaaactataggccaatctctctgaagaacatt

SEQ ID NO: 412947 - DNA, 33 bp, Homo sapien
acagtttagatacagaaggaaagttcttcaaca

SEQ ID NO: 412948 - DNA, 33 bp, Homo sapien
acagtttagatacagatggaaagttcttcaaca

SEQ ID NO: 412949 - DNA, 33 bp, Homo sapien
tttggtcaacataggggagaggaacctgaagcc

SEQ ID NO: 412950 - DNA, 33 bp, Homo sapien
tttggtcaacatagggtagaggaacctgaagcc

SEQ ID NO: 412951 - DNA, 33 bp, Homo sapien
cacctgctgacttgccacttccatctaagctgt

SEQ ID NO: 412952 - DNA, 33 bp, Homo sapien
cacctgctgacttgccgcttccatctaagctgt

SEQ ID NO: 412953 - DNA, 33 bp, Homo sapien
aagtgtaacagtgtcaaagacttagaaaaatat

SEQ ID NO: 412954 - DNA, 33 bp, Homo sapien
aagtgtaacagtgtcagagacttagaaaaatat

SEQ ID NO: 412955 - DNA, 33 bp, Homo sapien
tgcatatggctagcccactatctatatcccagc

SEQ ID NO: 412956 - DNA, 33 bp, Homo sapien
tgcatatggctagcccgctatctatatcccagc

SEQ ID NO: 412957 - DNA, 33 bp, Homo sapien
tctgtcttgttgattacatccagtctaatgggt

SEQ ID NO: 412958 - DNA, 33 bp, Homo sapien
tctgtcttgttgattatatccagtctaatgggt

SEQ ID NO: 412959 - DNA, 33 bp, Homo sapien
aagaaatacatcatacaggaagctaaaaactct

SEQ ID NO: 412960 - DNA, 33 bp, Homo sapien
aagaaatacatcatacgggaagctaaaaactct

SEQ ID NO: 412961 - DNA, 33 bp, Homo sapien
gcaacttgtcaaagaacagtaagctataaagca

SEQ ID NO: 412962 - DNA, 33 bp, Homo sapien
gcaacttgtcaaagaagagtaagctataaagca

SEQ ID NO: 412963 - DNA, 33 bp, Homo sapien
ttctgttctgcgattacagtactggagatcagt

SEQ ID NO: 412964 - DNA, 33 bp, Homo sapien
ttctgttctgcgattatagtactggagatcagt

SEQ ID NO: 412965 - DNA, 33 bp, Homo sapien
acaagtttaacctcaaactaatagctgttaata

SEQ ID NO: 412966 - DNA, 33 bp, Homo sapien
acaagtttaacctcaagctaatagctgttaata

SEQ ID NO: 412967 - DNA, 33 bp, Homo sapien
gatttttcagcatctactaaagtgaccatatgg

SEQ ID NO: 412968 - DNA, 33 bp, Homo sapien
gatttttcagcatctattaaagtgaccatatgg

SEQ ID NO: 412969 - DNA, 33 bp, Homo sapien
aaacctctcaataaaccgtgtatagtagaaaca

SEQ ID NO: 412970 - DNA, 33 bp, Homo sapien
aaacctctcaataaactgtgtatagtagaaaca

SEQ ID NO: 412971 - DNA, 33 bp, Homo sapien
ctctcaaaaatcattaacaaattattagcaaac

SEQ ID NO: 412972 - DNA, 33 bp, Homo sapien
ctctcaaaaatcattagcaaattattagcaaac

SEQ ID NO: 412973 - DNA, 33 bp, Homo sapien
acttcataagttggccactgcagacactaaaag

SEQ ID NO: 412974 - DNA, 33 bp, Homo sapien
acttcataagttggccgctgcagacactaaaag

SEQ ID NO: 412975 - DNA, 33 bp, Homo sapien
gttgtcctttgaggtcaagttgtctagcgagga

SEQ ID NO: 412976 - DNA, 33 bp, Homo sapien
gttgtcctttgaggtcgagttgtctagcgagga

SEQ ID NO: 412977 - DNA, 33 bp, Homo sapien
gatagtagatgaggtacataatttacgagattg

SEQ ID NO: 412978 - DNA, 33 bp, Homo sapien
gatagtagatgaggtatataatttacgagattg

SEQ ID NO: 412979 - DNA, 33 bp, Homo sapien
caagctatgcagctctgaagtgcaagggctagg

SEQ ID NO: 412980 - DNA, 33 bp, Homo sapien
caagctatgcagctcttaagtgcaagggctagg

SEQ ID NO: 412981 - DNA, 33 bp, Homo sapien
acagtccgggctttaacaggggagcctggaaca

SEQ ID NO: 412982 - DNA, 33 bp, Homo sapien
acagtccgggctttaataggggagcctggaaca

SEQ ID NO: 412983 - DNA, 33 bp, Homo sapien
ttgttgtgcctgtcaacgtcactataactggag

SEQ ID NO: 412984 - DNA, 33 bp, Homo sapien
ttgttgtgcctgtcaatgtcactataactggag

SEQ ID NO: 412985 - DNA, 33 bp, Homo sapien
aggttatgtctctgaaaaatttgcatctgcaaa

SEQ ID NO: 412986 - DNA, 33 bp, Homo sapien
aggttatgtctctgaacaatttgcatctgcaaa

SEQ ID NO: 412987 - DNA, 33 bp, Homo sapien
aatggttgccacgttaactggtaattgcctcag

SEQ ID NO: 412988 - DNA, 33 bp, Homo sapien
aatggttgccacgttagctggtaattgcctcag

SEQ ID NO: 412989 - DNA, 33 bp, Homo sapien
ctggagtctggattgccgaggacagattaagga

SEQ ID NO: 412990 - DNA, 33 bp, Homo sapien
ctggagtctggattgctgaggacagattaagga

SEQ ID NO: 412991 - DNA, 33 bp, Homo sapien
tttcaaagttgactcaagttttccttcttctct

SEQ ID NO: 412992 - DNA, 33 bp, Homo sapien
tttcaaagttgactcaggttttccttcttctct

SEQ ID NO: 412993 - DNA, 33 bp, Homo sapien
cttggattacagaactaacaaaagtcacattac

SEQ ID NO: 412994 - DNA, 33 bp, Homo sapien
cttggattacagaactgacaaaagtcacattac

SEQ ID NO: 412995 - DNA, 33 bp, Homo sapien
tggtaagcaaaagtgacacaggaactaaacaga

SEQ ID NO: 412996 - DNA, 33 bp, Homo sapien
tggtaagcaaaagtgatacaggaactaaacaga

SEQ ID NO: 412997 - DNA, 33 bp, Homo sapien
attttcatgaacatcacaattgttgcagaatat

SEQ ID NO: 412998 - DNA, 33 bp, Homo sapien
attttcatgaacatcataattgttgcagaatat

SEQ ID NO: 412999 - DNA, 33 bp, Homo sapien
ctggttaaatgatccaacgaagaacccaatttg

SEQ ID NO: 413000 - DNA, 33 bp, Homo sapien
ctggttaaatgatccagcgaagaacccaatttg

SEQ ID NO: 413001 - DNA, 33 bp, Homo sapien
gataaggatagccaggaatgaaagatcctattt

SEQ ID NO: 413002 - DNA, 33 bp, Homo sapien
gataaggatagccagggatgaaagatcctattt

SEQ ID NO: 413003 - DNA, 33 bp, Homo sapien
gggagctaaggtatgaagacacaaacacataag

SEQ ID NO: 413004 - DNA, 33 bp, Homo sapien
gggagctaaggtatgaggacacaaacacataag

SEQ ID NO: 413005 - DNA, 33 bp, Homo sapien
aacatgctccttgctcgccttgttgaaggcaaa

SEQ ID NO: 413006 - DNA, 33 bp, Homo sapien
aacatgctccttgctctccttgttgaaggcaaa

SEQ ID NO: 413007 - DNA, 33 bp, Homo sapien
gggatcccgtaacacaaggctcaatcctcagtc

SEQ ID NO: 413008 - DNA, 33 bp, Homo sapien
gggatcccgtaacacagggctcaatcctcagtc

SEQ ID NO: 413009 - DNA, 33 bp, Homo sapien
atacatgggatatgaaaagataaatagacacaa

SEQ ID NO: 413010 - DNA, 33 bp, Homo sapien
atacatgggatatgaagagataaatagacacaa

SEQ ID NO: 413011 - DNA, 33 bp, Homo sapien
gatgccaagctggcagcaaatgaagtatactgt

SEQ ID NO: 413012 - DNA, 33 bp, Homo sapien
gatgccaagctggcaggaaatgaagtatactgt

SEQ ID NO: 413013 - DNA, 33 bp, Homo sapien
aatatttaaaataacaactttcataagcatgac

SEQ ID NO: 413014 - DNA, 33 bp, Homo sapien
aatatttaaaataacacctttcataagcatgac

SEQ ID NO: 413015 - DNA, 33 bp, Homo sapien
ttggtagtttcatgagcatgtacatagttcaaa

SEQ ID NO: 413016 - DNA, 33 bp, Homo sapien
ttggtagtttcatgagtatgtacatagttcaaa

SEQ ID NO: 413017 - DNA, 33 bp, Homo sapien
caagagcacatgatccaaagattgtattctaaa

SEQ ID NO: 413018 - DNA, 33 bp, Homo sapien
caagagcacatgatccgaagattgtattctaaa

SEQ ID NO: 413019 - DNA, 33 bp, Homo sapien
ctatcaattgaaaaaccgtttcctgctattcta

SEQ ID NO: 413020 - DNA, 33 bp, Homo sapien
ctatcaattgaaaaactgtttcctgctattcta

SEQ ID NO: 413021 - DNA, 33 bp, Homo sapien
ttttgatttgggagacagtcaaggccaataaat

SEQ ID NO: 413022 - DNA, 33 bp, Homo sapien
ttttgatttgggagacggtcaaggccaataaat

SEQ ID NO: 413023 - DNA, 33 bp, Homo sapien
agctatactttcgaaccggattgtctcatgaaa

SEQ ID NO: 413024 - DNA, 33 bp, Homo sapien
agctatactttcgaactggattgtctcatgaaa

SEQ ID NO: 413025 - DNA, 33 bp, Homo sapien
tgtaagaggaagcaaaaaactggtggaaggatt

SEQ ID NO: 413026 - DNA, 33 bp, Homo sapien
tgtaagaggaagcaaagaactggtggaaggatt

SEQ ID NO: 413027 - DNA, 33 bp, Homo sapien
tggagtgtatagtaaaaccttagccatcacttt

SEQ ID NO: 413028 - DNA, 33 bp, Homo sapien
tggagtgtatagtaaagccttagccatcacttt

SEQ ID NO: 413029 - DNA, 33 bp, Homo sapien
acatattttggttgaaagatacgttataaattg

SEQ ID NO: 413030 - DNA, 33 bp, Homo sapien
acatattttggttgaatgatacgttataaattg

SEQ ID NO: 413031 - DNA, 33 bp, Homo sapien
accccttttctgactccatgcagtttttttttt

SEQ ID NO: 413032 - DNA, 33 bp, Homo sapien
accccttttctgactctatgcagtttttttttt

SEQ ID NO: 413033 - DNA, 33 bp, Homo sapien
tgtggtttacctctcaatctgtgggacctcaaa

SEQ ID NO: 413034 - DNA, 33 bp, Homo sapien
tgtggtttacctctcagtctgtgggacctcaaa

SEQ ID NO: 413035 - DNA, 33 bp, Homo sapien
attaaaatataacaaacgtggagaatggtagat

SEQ ID NO: 413036 - DNA, 33 bp, Homo sapien
attaaaatataacaaatgtggagaatggtagat

SEQ ID NO: 413037 - DNA, 33 bp, Homo sapien
gccttggaaagacttaagtaatgcaaaaggtta

SEQ ID NO: 413038 - DNA, 33 bp, Homo sapien
gccttggaaagacttacgtaatgcaaaaggtta

SEQ ID NO: 413039 - DNA, 33 bp, Homo sapien
tcctctcagccagacacgctgtttcctcctccc

SEQ ID NO: 413040 - DNA, 33 bp, Homo sapien
tcctctcagccagacatgctgtttcctcctccc

SEQ ID NO: 413041 - DNA, 33 bp, Homo sapien
tgggttctatcattatcaaataactggtagcaa

SEQ ID NO: 413042 - DNA, 33 bp, Homo sapien
tgggttctatcattatgaaataactggtagcaa

SEQ ID NO: 413043 - DNA, 33 bp, Homo sapien
tttcttttctatttccaagctgtctttcttcac

SEQ ID NO: 413044 - DNA, 33 bp, Homo sapien
tttcttttctatttcccagctgtctttcttcac

SEQ ID NO: 413045 - DNA, 33 bp, Homo sapien
aacttcagagaaatacaggattatgtgaagaga

SEQ ID NO: 413046 - DNA, 33 bp, Homo sapien
aacttcagagaaatacgggattatgtgaagaga

SEQ ID NO: 413047 - DNA, 33 bp, Homo sapien
ctgcaacacagcagcaagtgggggacgggtaca

SEQ ID NO: 413048 - DNA, 33 bp, Homo sapien
ctgcaacacagcagcaggtgggggacgggtaca

SEQ ID NO: 413049 - DNA, 33 bp, Homo sapien
atatgttaagcacctacgttctaaaatgtactg

SEQ ID NO: 413050 - DNA, 33 bp, Homo sapien
atatgttaagcacctatgttctaaaatgtactg

SEQ ID NO: 413051 - DNA, 33 bp, Homo sapien
acacctgccccctacaaataacctattgcttgt

SEQ ID NO: 413052 - DNA, 33 bp, Homo sapien
acacctgccccctacagataacctattgcttgt

SEQ ID NO: 413053 - DNA, 33 bp, Homo sapien
gtgatctcaagccttgaagttttgatgtcttat

SEQ ID NO: 413054 - DNA, 33 bp, Homo sapien
gtgatctcaagccttggagttttgatgtcttat

SEQ ID NO: 413055 - DNA, 33 bp, Homo sapien
gggcgtgggaatcttacgttattcccaagcact

SEQ ID NO: 413056 - DNA, 33 bp, Homo sapien
gggcgtgggaatcttatgttattcccaagcact

SEQ ID NO: 413057 - DNA, 33 bp, Homo sapien
gttcatgtgtacccatcatatagcttccactta

SEQ ID NO: 413058 - DNA, 33 bp, Homo sapien
gttcatgtgtacccattatatagcttccactta

SEQ ID NO: 413059 - DNA, 33 bp, Homo sapien
taccaaatacatcccactgattgtgtagtttta

SEQ ID NO: 413060 - DNA, 33 bp, Homo sapien
taccaaatacatcccattgattgtgtagtttta

SEQ ID NO: 413061 - DNA, 33 bp, Homo sapien
tatcttaacctctcataataacatgttgaaatt

SEQ ID NO: 413062 - DNA, 33 bp, Homo sapien
tatcttaacctctcattataacatgttgaaatt

SEQ ID NO: 413063 - DNA, 33 bp, Homo sapien
aaaacacatctatgaaaaaaaggtaatatgttt

SEQ ID NO: 413064 - DNA, 33 bp, Homo sapien
aaaacacatctatgaagaaaaggtaatatgttt

SEQ ID NO: 413065 - DNA, 33 bp, Homo sapien
tgcaaaactctgaactaaagtttgacattaagt

SEQ ID NO: 413066 - DNA, 33 bp, Homo sapien
tgcaaaactctgaactgaagtttgacattaagt

SEQ ID NO: 413067 - DNA, 33 bp, Homo sapien
ttcagagttttgcatacgattaagtaagcccta

SEQ ID NO: 413068 - DNA, 33 bp, Homo sapien
ttcagagttttgcatatgattaagtaagcccta

SEQ ID NO: 413069 - DNA, 33 bp, Homo sapien
agccaggacttgaggaaacaagatccctcagaa

SEQ ID NO: 413070 - DNA, 33 bp, Homo sapien
agccaggacttgaggacacaagatccctcagaa

SEQ ID NO: 413071 - DNA, 33 bp, Homo sapien
gtgggcaccacaccagcagttttctcaagagaa

SEQ ID NO: 413072 - DNA, 33 bp, Homo sapien
gtgggcaccacaccagtagttttctcaagagaa

SEQ ID NO: 413073 - DNA, 33 bp, Homo sapien
gcaactccatctccaaaaagaaaaagaaaaaga

SEQ ID NO: 413074 - DNA, 33 bp, Homo sapien
gcaactccatctccaagaagaaaaagaaaaaga

SEQ ID NO: 413075 - DNA, 33 bp, Homo sapien
ttacaggaatagtccaaaagaagaagtctcgtg

SEQ ID NO: 413076 - DNA, 33 bp, Homo sapien
ttacaggaatagtccagaagaagaagtctcgtg

SEQ ID NO: 413077 - DNA, 33 bp, Homo sapien
aataaataaatccacacactttgcctaaagaaa

SEQ ID NO: 413078 - DNA, 33 bp, Homo sapien
aataaataaatccacagactttgcctaaagaaa

SEQ ID NO: 413079 - DNA, 33 bp, Homo sapien
cacttctgcttatttacccaaaagaactgaagt

SEQ ID NO: 413080 - DNA, 33 bp, Homo sapien
cacttctgcttatttatccaaaagaactgaagt

SEQ ID NO: 413081 - DNA, 33 bp, Homo sapien
gtactcccatgcaaaagtattcactatagccaa

SEQ ID NO: 413082 - DNA, 33 bp, Homo sapien
gtactcccatgcaaaattattcactatagccaa

SEQ ID NO: 413083 - DNA, 33 bp, Homo sapien
gccaagatgtataaacagcatagcataaaccag

SEQ ID NO: 413084 - DNA, 33 bp, Homo sapien
gccaagatgtataaacggcatagcataaaccag

SEQ ID NO: 413085 - DNA, 33 bp, Homo sapien
gagaaaatggtgaataagagatgggactaatgt

SEQ ID NO: 413086 - DNA, 33 bp, Homo sapien
gagaaaatggtgaataggagatgggactaatgt

SEQ ID NO: 413087 - DNA, 33 bp, Homo sapien
tagcccctggcaatcaccactctactttgttta

SEQ ID NO: 413088 - DNA, 33 bp, Homo sapien
tagcccctggcaatcatcactctactttgttta

SEQ ID NO: 413089 - DNA, 33 bp, Homo sapien
actctgtacccattgaatagcaacttccatttt

SEQ ID NO: 413090 - DNA, 33 bp, Homo sapien
actctgtacccattgagtagcaacttccatttt

SEQ ID NO: 413091 - DNA, 33 bp, Homo sapien
acattaaatgtgcatacatgtaaaattcttgcc

SEQ ID NO: 413092 - DNA, 33 bp, Homo sapien
acattaaatgtgcatatatgtaaaattcttgcc

SEQ ID NO: 413093 - DNA, 33 bp, Homo sapien
ctatattactagtcccaaaaattcaaaagaaca

SEQ ID NO: 413094 - DNA, 33 bp, Homo sapien
ctatattactagtccccaaaattcaaaagaaca

SEQ ID NO: 413095 - DNA, 33 bp, Homo sapien
ctaagtggcaaatagaccagagtttaaatgtta

SEQ ID NO: 413096 - DNA, 33 bp, Homo sapien
ctaagtggcaaatagagcagagtttaaatgtta

SEQ ID NO: 413097 - DNA, 33 bp, Homo sapien
gccaaaaaagcactaagtgtaaaagacttatac

SEQ ID NO: 413098 - DNA, 33 bp, Homo sapien
gccaaaaaagcactaattgtaaaagacttatac

SEQ ID NO: 413099 - DNA, 33 bp, Homo sapien
gtgctgggaacttcttaaactgagtccttcttt

SEQ ID NO: 413100 - DNA, 33 bp, Homo sapien
gtgctgggaacttctttaactgagtccttcttt

SEQ ID NO: 413101 - DNA, 33 bp, Homo sapien
gagatcctctatctcaccctgaccagtgtcaca

SEQ ID NO: 413102 - DNA, 33 bp, Homo sapien
gagatcctctatctcatcctgaccagtgtcaca

SEQ ID NO: 413103 - DNA, 33 bp, Homo sapien
gaaggaggtcaccacaatcaggctacacagcag

SEQ ID NO: 413104 - DNA, 33 bp, Homo sapien
gaaggaggtcaccacagtcaggctacacagcag

SEQ ID NO: 413105 - DNA, 33 bp, Homo sapien
gtctatgtctggttcccgagttaatatgatcta

SEQ ID NO: 413106 - DNA, 33 bp, Homo sapien
gtctatgtctggttcctgagttaatatgatcta

SEQ ID NO: 413107 - DNA, 33 bp, Homo sapien
aaggaagagtggtagacacattcaaaagatgaa

SEQ ID NO: 413108 - DNA, 33 bp, Homo sapien
aaggaagagtggtagatacattcaaaagatgaa

SEQ ID NO: 413109 - DNA, 33 bp, Homo sapien
catcctatgtctctcaccttaagtcccagttat

SEQ ID NO: 413110 - DNA, 33 bp, Homo sapien
catcctatgtctctcagcttaagtcccagttat

SEQ ID NO: 413111 - DNA, 33 bp, Homo sapien
taacaaagtgtatctaacatgtgcttattaatt

SEQ ID NO: 413112 - DNA, 33 bp, Homo sapien
taacaaagtgtatctatcatgtgcttattaatt

SEQ ID NO: 413113 - DNA, 33 bp, Homo sapien
gtaggccaattccaagcctgttaggcagaggca

SEQ ID NO: 413114 - DNA, 33 bp, Homo sapien
gtaggccaattccaagtctgttaggcagaggca

SEQ ID NO: 413115 - DNA, 33 bp, Homo sapien
aaaattcacacatttaaacaatacaaatcaaag

SEQ ID NO: 413116 - DNA, 33 bp, Homo sapien
aaaattcacacatttacacaatacaaatcaaag

SEQ ID NO: 413117 - DNA, 33 bp, Homo sapien
tttcacttcggttatacggtttaacactataat

SEQ ID NO: 413118 - DNA, 33 bp, Homo sapien
tttcacttcggttatatggtttaacactataat

SEQ ID NO: 413119 - DNA, 33 bp, Homo sapien
tgatgagttaaaggagcaagtctcaaaataata

SEQ ID NO: 413120 - DNA, 33 bp, Homo sapien
tgatgagttaaaggagtaagtctcaaaataata

SEQ ID NO: 413121 - DNA, 33 bp, Homo sapien
cactccaaactagtccaaatccctaaagctaac

SEQ ID NO: 413122 - DNA, 33 bp, Homo sapien
cactccaaactagtcccaatccctaaagctaac

SEQ ID NO: 413123 - DNA, 33 bp, Homo sapien
gagaaacaatttctaacatactagatgcttggc

SEQ ID NO: 413124 - DNA, 33 bp, Homo sapien
gagaaacaatttctaatatactagatgcttggc

SEQ ID NO: 413125 - DNA, 33 bp, Homo sapien
gtgagtttatttttgaactgcctattctcttac

SEQ ID NO: 413126 - DNA, 33 bp, Homo sapien
gtgagtttatttttgacctgcctattctcttac

SEQ ID NO: 413127 - DNA, 33 bp, Homo sapien
acatttcccctttctcaagcaattcgtagagtt

SEQ ID NO: 413128 - DNA, 33 bp, Homo sapien
acatttcccctttctccagcaattcgtagagtt

SEQ ID NO: 413129 - DNA, 33 bp, Homo sapien
gagaccattgagatacagaaaaagtaggaatag

SEQ ID NO: 413130 - DNA, 33 bp, Homo sapien
gagaccattgagatacggaaaaagtaggaatag

SEQ ID NO: 413131 - DNA, 33 bp, Homo sapien
tttagcagacgaaaacaactttggtagtgccag

SEQ ID NO: 413132 - DNA, 33 bp, Homo sapien
tttagcagacgaaaaccactttggtagtgccag

SEQ ID NO: 413133 - DNA, 33 bp, Homo sapien
ggaacaccaaaagatcaaagctcctgtttcact

SEQ ID NO: 413134 - DNA, 33 bp, Homo sapien
ggaacaccaaaagatcgaagctcctgtttcact

SEQ ID NO: 413135 - DNA, 33 bp, Homo sapien
actctagataaaaataaaaattgcaacatatgg

SEQ ID NO: 413136 - DNA, 33 bp, Homo sapien
actctagataaaaatagaaattgcaacatatgg

SEQ ID NO: 413137 - DNA, 33 bp, Homo sapien
tgcctttgctctttggaaacaacctggaacatc

SEQ ID NO: 413138 - DNA, 33 bp, Homo sapien
tgcctttgctctttggcaacaacctggaacatc

SEQ ID NO: 413139 - DNA, 33 bp, Homo sapien
cattccactctccaaaacaatggcatcttctgt

SEQ ID NO: 413140 - DNA, 33 bp, Homo sapien
cattccactctccaaaccaatggcatcttctgt

SEQ ID NO: 413141 - DNA, 33 bp, Homo sapien
ctgtggaagtaatgggccccactcagcacccct

SEQ ID NO: 413142 - DNA, 33 bp, Homo sapien
ctgtggaagtaatgggtcccactcagcacccct

SEQ ID NO: 413143 - DNA, 33 bp, Homo sapien
atgtatattcctgggcaaccctgcagagtctaa

SEQ ID NO: 413144 - DNA, 33 bp, Homo sapien
atgtatattcctgggcgaccctgcagagtctaa

SEQ ID NO: 413145 - DNA, 33 bp, Homo sapien
agaggttgcttctgcaatgaagagaattaggca

SEQ ID NO: 413146 - DNA, 33 bp, Homo sapien
agaggttgcttctgcagtgaagagaattaggca

SEQ ID NO: 413147 - DNA, 33 bp, Homo sapien
ttggcacgatcttaaccaactacaacccccacc

SEQ ID NO: 413148 - DNA, 33 bp, Homo sapien
ttggcacgatcttaactaactacaacccccacc

SEQ ID NO: 413149 - DNA, 33 bp, Homo sapien
gcacccatagcttaggacatctttgtctaacca

SEQ ID NO: 413150 - DNA, 33 bp, Homo sapien
gcacccatagcttagggcatctttgtctaacca

SEQ ID NO: 413151 - DNA, 33 bp, Homo sapien
atattcatattgcacacggtatcttgatccagg

SEQ ID NO: 413152 - DNA, 33 bp, Homo sapien
atattcatattgcacatggtatcttgatccagg

SEQ ID NO: 413153 - DNA, 33 bp, Homo sapien
cctgctccaatatctaaaaagtgttgaaatatt

SEQ ID NO: 413154 - DNA, 33 bp, Homo sapien
cctgctccaatatctagaaagtgttgaaatatt

SEQ ID NO: 413155 - DNA, 33 bp, Homo sapien
agagctctcatccaaagaaattatctaggggaa

SEQ ID NO: 413156 - DNA, 33 bp, Homo sapien
agagctctcatccaaataaattatctaggggaa

SEQ ID NO: 413157 - DNA, 33 bp, Homo sapien
tactcatctttcaacagatactaaggtgaacag

SEQ ID NO: 413158 - DNA, 33 bp, Homo sapien
tactcatctttcaacatatactaaggtgaacag

SEQ ID NO: 413159 - DNA, 33 bp, Homo sapien
gcctctcatgaaaaaaacagaacatctttgctg

SEQ ID NO: 413160 - DNA, 33 bp, Homo sapien
gcctctcatgaaaaaaccagaacatctttgctg

SEQ ID NO: 413161 - DNA, 33 bp, Homo sapien
attggatgatatccttaaaaaaccaggcactct

SEQ ID NO: 413162 - DNA, 33 bp, Homo sapien
attggatgatatcctttaaaaaccaggcactct

SEQ ID NO: 413163 - DNA, 33 bp, Homo sapien
tattttattctatgcaacatattcaaggtttag

SEQ ID NO: 413164 - DNA, 33 bp, Homo sapien
tattttattctatgcaccatattcaaggtttag

SEQ ID NO: 413165 - DNA, 33 bp, Homo sapien
ttactagaatgaaatacggcctaaaattagttg

SEQ ID NO: 413166 - DNA, 33 bp, Homo sapien
ttactagaatgaaatatggcctaaaattagttg

SEQ ID NO: 413167 - DNA, 33 bp, Homo sapien
cagattatttttacccaatgaggcagtgctttc

SEQ ID NO: 413168 - DNA, 33 bp, Homo sapien
cagattatttttacccgatgaggcagtgctttc

SEQ ID NO: 413169 - DNA, 33 bp, Homo sapien
ctacctcatgattccacccaacttgtacctcag

SEQ ID NO: 413170 - DNA, 33 bp, Homo sapien
ctacctcatgattccatccaacttgtacctcag

SEQ ID NO: 413171 - DNA, 33 bp, Homo sapien
acagaataatggaaaaacctggcactaactttg

SEQ ID NO: 413172 - DNA, 33 bp, Homo sapien
acagaataatggaaaaccctggcactaactttg

SEQ ID NO: 413173 - DNA, 33 bp, Homo sapien
tggaaatggaatactccgaatctgcatgaagaa

SEQ ID NO: 413174 - DNA, 33 bp, Homo sapien
tggaaatggaatactctgaatctgcatgaagaa

SEQ ID NO: 413175 - DNA, 33 bp, Homo sapien
tcagagatctggaaaaccatcttcctgtagact

SEQ ID NO: 413176 - DNA, 33 bp, Homo sapien
tcagagatctggaaaagcatcttcctgtagact

SEQ ID NO: 413177 - DNA, 33 bp, Homo sapien
tgagcccttcctctcacatcagaattgcctgtt

SEQ ID NO: 413178 - DNA, 33 bp, Homo sapien
tgagcccttcctctcagatcagaattgcctgtt

SEQ ID NO: 413179 - DNA, 33 bp, Homo sapien
cagtgctaacacttcacggttttcctggccagg

SEQ ID NO: 413180 - DNA, 33 bp, Homo sapien
cagtgctaacacttcatggttttcctggccagg

SEQ ID NO: 413181 - DNA, 33 bp, Homo sapien
gaattttagtgtgagtgaaaggatgtacaactg

SEQ ID NO: 413182 - DNA, 33 bp, Homo sapien
gaattttagtgtgagttaaaggatgtacaactg

SEQ ID NO: 413183 - DNA, 33 bp, Homo sapien
ttatcaaactcctaaactgtttgcaaattgagg

SEQ ID NO: 413184 - DNA, 33 bp, Homo sapien
ttatcaaactcctaaattgtttgcaaattgagg

SEQ ID NO: 413185 - DNA, 33 bp, Homo sapien
atcactttcatcctaaaatcgggtagattacct

SEQ ID NO: 413186 - DNA, 33 bp, Homo sapien
atcactttcatcctaagatcgggtagattacct

SEQ ID NO: 413187 - DNA, 33 bp, Homo sapien
tccctttaacagtgtcaaacaagacttgattgt

SEQ ID NO: 413188 - DNA, 33 bp, Homo sapien
tccctttaacagtgtcgaacaagacttgattgt

SEQ ID NO: 413189 - DNA, 33 bp, Homo sapien
gaataacttggtataacgtgtgtagggcaacag

SEQ ID NO: 413190 - DNA, 33 bp, Homo sapien
gaataacttggtataatgtgtgtagggcaacag

SEQ ID NO: 413191 - DNA, 33 bp, Homo sapien
agagggcaactgcaacaagtgaaatgctaggct

SEQ ID NO: 413192 - DNA, 33 bp, Homo sapien
agagggcaactgcaacgagtgaaatgctaggct

SEQ ID NO: 413193 - DNA, 33 bp, Homo sapien
cagggtcgtggagagacggcacttgtgtgggtc

SEQ ID NO: 413194 - DNA, 33 bp, Homo sapien
cagggtcgtggagagagggcacttgtgtgggtc

SEQ ID NO: 413195 - DNA, 33 bp, Homo sapien
atcacgatgttcccatcaagggttgaaatgaac

SEQ ID NO: 413196 - DNA, 33 bp, Homo sapien
atcacgatgttcccattaagggttgaaatgaac

SEQ ID NO: 413197 - DNA, 33 bp, Homo sapien
cgcggcaccttcccacacaacttgcagccacga

SEQ ID NO: 413198 - DNA, 33 bp, Homo sapien
cgcggcaccttcccacgcaacttgcagccacga

SEQ ID NO: 413199 - DNA, 33 bp, Homo sapien
atccactacgctgcagaagaggtcctcaagcct

SEQ ID NO: 413200 - DNA, 33 bp, Homo sapien
atccactacgctgcaggagaggtcctcaagcct

SEQ ID NO: 413201 - DNA, 33 bp, Homo sapien
ttgaaaaatatgccggaagtatctggtttctat

SEQ ID NO: 413202 - DNA, 33 bp, Homo sapien
ttgaaaaatatgccggtagtatctggtttctat

SEQ ID NO: 413203 - DNA, 33 bp, Homo sapien
ggtatgaccttttgggaaccaatggtgggattc

SEQ ID NO: 413204 - DNA, 33 bp, Homo sapien
ggtatgaccttttggggaccaatggtgggattc

SEQ ID NO: 413205 - DNA, 33 bp, Homo sapien
cgtgtggggacagggtaaaacaatccaagcaaa

SEQ ID NO: 413206 - DNA, 33 bp, Homo sapien
cgtgtggggacagggtgaaacaatccaagcaaa

SEQ ID NO: 413207 - DNA, 33 bp, Homo sapien
acgtggtttttatgcaatcattgatggaaagct

SEQ ID NO: 413208 - DNA, 33 bp, Homo sapien
acgtggtttttatgcagtcattgatggaaagct

SEQ ID NO: 413209 - DNA, 33 bp, Homo sapien
tctattcttatattcccaatttcagatcacgga

SEQ ID NO: 413210 - DNA, 33 bp, Homo sapien
tctattcttatattcctaatttcagatcacgga

SEQ ID NO: 413211 - DNA, 33 bp, Homo sapien
tttgtcctgagccccaagtttgtgaacatctgc

SEQ ID NO: 413212 - DNA, 33 bp, Homo sapien
tttgtcctgagccccaggtttgtgaacatctgc

SEQ ID NO: 413213 - DNA, 33 bp, Homo sapien
tgggttagtagtttcacgaagatacaccaccct

SEQ ID NO: 413214 - DNA, 33 bp, Homo sapien
tgggttagtagtttcatgaagatacaccaccct

SEQ ID NO: 413215 - DNA, 33 bp, Homo sapien
aggggctggtttgataccttgtggtcttcctgc

SEQ ID NO: 413216 - DNA, 33 bp, Homo sapien
aggggctggtttgatatcttgtggtcttcctgc

SEQ ID NO: 413217 - DNA, 33 bp, Homo sapien
ttttgccatgaagagaacgatatttaaattgga

SEQ ID NO: 413218 - DNA, 33 bp, Homo sapien
ttttgccatgaagagagcgatatttaaattgga

SEQ ID NO: 413219 - DNA, 33 bp, Homo sapien
ttgaaaaatgcttgcccgataaaatgcttgcct

SEQ ID NO: 413220 - DNA, 33 bp, Homo sapien
ttgaaaaatgcttgcctgataaaatgcttgcct

SEQ ID NO: 413221 - DNA, 33 bp, Homo sapien
tataaagctgaaaatcacttgatagagctataa

SEQ ID NO: 413222 - DNA, 33 bp, Homo sapien
tataaagctgaaaatcccttgatagagctataa

SEQ ID NO: 413223 - DNA, 33 bp, Homo sapien
ctgagagagtctcaccagaatgcagcgaggatt

SEQ ID NO: 413224 - DNA, 33 bp, Homo sapien
ctgagagagtctcaccggaatgcagcgaggatt

SEQ ID NO: 413225 - DNA, 33 bp, Homo sapien
acagtatgcattaaaggcttcagtaacagccag

SEQ ID NO: 413226 - DNA, 33 bp, Homo sapien
acagtatgcattaaagtcttcagtaacagccag

SEQ ID NO: 413227 - DNA, 33 bp, Homo sapien
gcagaaggaaacaggaacttcgtaggtggttga

SEQ ID NO: 413228 - DNA, 33 bp, Homo sapien
gcagaaggaaacaggaccttcgtaggtggttga

SEQ ID NO: 413229 - DNA, 33 bp, Homo sapien
tattatcagggaggaaaattaatcaccacaggg

SEQ ID NO: 413230 - DNA, 33 bp, Homo sapien
tattatcagggaggaagattaatcaccacaggg

SEQ ID NO: 413231 - DNA, 33 bp, Homo sapien
atatgtgagaaaactacggcttagggaggtcat

SEQ ID NO: 413232 - DNA, 33 bp, Homo sapien
atatgtgagaaaactatggcttagggaggtcat

SEQ ID NO: 413233 - DNA, 33 bp, Homo sapien
caagctgtctaggccacgcagctaacaagccga

SEQ ID NO: 413234 - DNA, 33 bp, Homo sapien
caagctgtctaggccatgcagctaacaagccga

SEQ ID NO: 413235 - DNA, 33 bp, Homo sapien
gcaatcgcgagacgcaatcacggaatcacagat

SEQ ID NO: 413236 - DNA, 33 bp, Homo sapien
gcaatcgcgagacgcactcacggaatcacagat

SEQ ID NO: 413237 - DNA, 33 bp, Homo sapien
gatgccgcctacaaaaagtatctataaggtatc

SEQ ID NO: 413238 - DNA, 33 bp, Homo sapien
gatgccgcctacaaaaggtatctataaggtatc

SEQ ID NO: 413239 - DNA, 33 bp, Homo sapien
agtctgtgctcagatgaagcgggtatccattca

SEQ ID NO: 413240 - DNA, 33 bp, Homo sapien
agtctgtgctcagatgtagcgggtatccattca

SEQ ID NO: 413241 - DNA, 33 bp, Homo sapien
aagtctgcccaggtccaaagccatcattagatt

SEQ ID NO: 413242 - DNA, 33 bp, Homo sapien
aagtctgcccaggtccgaagccatcattagatt

SEQ ID NO: 413243 - DNA, 33 bp, Homo sapien
ctttagcaagaaaacgccatcccacattttact

SEQ ID NO: 413244 - DNA, 33 bp, Homo sapien
ctttagcaagaaaacgtcatcccacattttact

SEQ ID NO: 413245 - DNA, 33 bp, Homo sapien
ctgatcatgccagagcaatttaatatttcaata

SEQ ID NO: 413246 - DNA, 33 bp, Homo sapien
ctgatcatgccagagcgatttaatatttcaata

SEQ ID NO: 413247 - DNA, 33 bp, Homo sapien
aatgacgtactgggaaagtcggtaaccaaatgt

SEQ ID NO: 413248 - DNA, 33 bp, Homo sapien
aatgacgtactgggaaggtcggtaaccaaatgt

SEQ ID NO: 413249 - DNA, 33 bp, Homo sapien
tcacctgagttgtggtaaacagtttcaaatatc

SEQ ID NO: 413250 - DNA, 33 bp, Homo sapien
tcacctgagttgtggtgaacagtttcaaatatc

SEQ ID NO: 413251 - DNA, 33 bp, Homo sapien
gctacatgggaagtaactattatgttaaggcaa

SEQ ID NO: 413252 - DNA, 33 bp, Homo sapien
gctacatgggaagtaattattatgttaaggcaa

SEQ ID NO: 413253 - DNA, 33 bp, Homo sapien
ggaaatttattgaggccagtaacattttaaatg

SEQ ID NO: 413254 - DNA, 33 bp, Homo sapien
ggaaatttattgaggctagtaacattttaaatg

SEQ ID NO: 413255 - DNA, 33 bp, Homo sapien
tctccttacctcaaaacggaagaaacttcttgg

SEQ ID NO: 413256 - DNA, 33 bp, Homo sapien
tctccttacctcaaaatggaagaaacttcttgg

SEQ ID NO: 413257 - DNA, 33 bp, Homo sapien
aaacataaatgcccacagatacagccatttcaa

SEQ ID NO: 413258 - DNA, 33 bp, Homo sapien
aaacataaatgcccacggatacagccatttcaa

SEQ ID NO: 413259 - DNA, 33 bp, Homo sapien
tgagccaccgcgctcgaccacaaagttgttatt

SEQ ID NO: 413260 - DNA, 33 bp, Homo sapien
tgagccaccgcgctcggccacaaagttgttatt

SEQ ID NO: 413261 - DNA, 33 bp, Homo sapien
ataaatatttgttgaccagaaggtaagtgaacc

SEQ ID NO: 413262 - DNA, 33 bp, Homo sapien
ataaatatttgttgactagaaggtaagtgaacc

SEQ ID NO: 413263 - DNA, 33 bp, Homo sapien
caaacttctctctgcaatatttttaaggttttt

SEQ ID NO: 413264 - DNA, 33 bp, Homo sapien
caaacttctctctgcagtatttttaaggttttt

SEQ ID NO: 413265 - DNA, 33 bp, Homo sapien
tttggtattagagtcacgataaacccttgtata

SEQ ID NO: 413266 - DNA, 33 bp, Homo sapien
tttggtattagagtcatgataaacccttgtata

SEQ ID NO: 413267 - DNA, 33 bp, Homo sapien
ggcagtacaagcttcacgtctgaacatccaaaa

SEQ ID NO: 413268 - DNA, 33 bp, Homo sapien
ggcagtacaagcttcatgtctgaacatccaaaa

SEQ ID NO: 413269 - DNA, 33 bp, Homo sapien
aagcttgtactgccaaatgaggaaggctttatg

SEQ ID NO: 413270 - DNA, 33 bp, Homo sapien
aagcttgtactgccaagtgaggaaggctttatg

SEQ ID NO: 413271 - DNA, 33 bp, Homo sapien
agtgaatgcttgtgaacgggagacaggaaggga

SEQ ID NO: 413272 - DNA, 33 bp, Homo sapien
agtgaatgcttgtgaatgggagacaggaaggga

SEQ ID NO: 413273 - DNA, 33 bp, Homo sapien
ctgcccagatcccccaaatctagcatgctgtac

SEQ ID NO: 413274 - DNA, 33 bp, Homo sapien
ctgcccagatcccccacatctagcatgctgtac

SEQ ID NO: 413275 - DNA, 33 bp, Homo sapien
ctgaaaggttctgaacaaagagtaacacagaca

SEQ ID NO: 413276 - DNA, 33 bp, Homo sapien
ctgaaaggttctgaacgaagagtaacacagaca

SEQ ID NO: 413277 - DNA, 33 bp, Homo sapien
aagtggggtatgtcctaaagataaagattccta

SEQ ID NO: 413278 - DNA, 33 bp, Homo sapien
aagtggggtatgtcctgaagataaagattccta

SEQ ID NO: 413279 - DNA, 33 bp, Homo sapien
ggtggaagagatgcacagagaataggcaagagt

SEQ ID NO: 413280 - DNA, 33 bp, Homo sapien
ggtggaagagatgcacggagaataggcaagagt

SEQ ID NO: 413281 - DNA, 33 bp, Homo sapien
gtgcatcattcaaactgagcaaatgcaaaagag

SEQ ID NO: 413282 - DNA, 33 bp, Homo sapien
gtgcatcattcaaacttagcaaatgcaaaagag

SEQ ID NO: 413283 - DNA, 33 bp, Homo sapien
acctttctctagtctaagccatgtaattctctt

SEQ ID NO: 413284 - DNA, 33 bp, Homo sapien
acctttctctagtctaggccatgtaattctctt

SEQ ID NO: 413285 - DNA, 33 bp, Homo sapien
cttgatctgctgatgacagaaaaaggagacaag

SEQ ID NO: 413286 - DNA, 33 bp, Homo sapien
cttgatctgctgatgatagaaaaaggagacaag

SEQ ID NO: 413287 - DNA, 33 bp, Homo sapien
ccctcctttaatacccacagcctgtgctgcaca

SEQ ID NO: 413288 - DNA, 33 bp, Homo sapien
ccctcctttaatacccgcagcctgtgctgcaca

SEQ ID NO: 413289 - DNA, 33 bp, Homo sapien
cagaaattctgtctaacgtcaaggttaactcaa

SEQ ID NO: 413290 - DNA, 33 bp, Homo sapien
cagaaattctgtctaatgtcaaggttaactcaa

SEQ ID NO: 413291 - DNA, 33 bp, Homo sapien
aaaaagaattaacaccaagttcttggcgcaagt

SEQ ID NO: 413292 - DNA, 33 bp, Homo sapien
aaaaagaattaacaccgagttcttggcgcaagt

SEQ ID NO: 413293 - DNA, 33 bp, Homo sapien
acacctcaactggatgacacttgcgccaagaac

SEQ ID NO: 413294 - DNA, 33 bp, Homo sapien
acacctcaactggatggcacttgcgccaagaac

SEQ ID NO: 413295 - DNA, 33 bp, Homo sapien
catagaaactgcaagaagtgaaaaaaaagtggg

SEQ ID NO: 413296 - DNA, 33 bp, Homo sapien
catagaaactgcaagacgtgaaaaaaaagtggg

SEQ ID NO: 413297 - DNA, 33 bp, Homo sapien
tctcagttatgctaggaagaaaggagctcttgt

SEQ ID NO: 413298 - DNA, 33 bp, Homo sapien
tctcagttatgctaggcagaaaggagctcttgt

SEQ ID NO: 413299 - DNA, 33 bp, Homo sapien
cctttcggtcctgccaactgacaagagctcctt

SEQ ID NO: 413300 - DNA, 33 bp, Homo sapien
cctttcggtcctgccagctgacaagagctcctt

SEQ ID NO: 413301 - DNA, 33 bp, Homo sapien
gtcaggttctggtcacactgtcattctggctgc

SEQ ID NO: 413302 - DNA, 33 bp, Homo sapien
gtcaggttctggtcacgctgtcattctggctgc

SEQ ID NO: 413303 - DNA, 33 bp, Homo sapien
gcaggtcattcttaggaaaaactgggagttaaa

SEQ ID NO: 413304 - DNA, 33 bp, Homo sapien
gcaggtcattcttaggtaaaactgggagttaaa

SEQ ID NO: 413305 - DNA, 33 bp, Homo sapien
agagagacagattagcactggcacgtgtgagac

SEQ ID NO: 413306 - DNA, 33 bp, Homo sapien
agagagacagattagcgctggcacgtgtgagac

SEQ ID NO: 413307 - DNA, 33 bp, Homo sapien
actgcttgatttataacgaatgctgaatttggc

SEQ ID NO: 413308 - DNA, 33 bp, Homo sapien
actgcttgatttataatgaatgctgaatttggc

SEQ ID NO: 413309 - DNA, 33 bp, Homo sapien
tcatttagaggcaataagaagaacatgaccttt

SEQ ID NO: 413310 - DNA, 33 bp, Homo sapien
tcatttagaggcaatatgaagaacatgaccttt

SEQ ID NO: 413311 - DNA, 33 bp, Homo sapien
acttgcttttctgacacgtgcagagttttactc

SEQ ID NO: 413312 - DNA, 33 bp, Homo sapien
acttgcttttctgacatgtgcagagttttactc

SEQ ID NO: 413313 - DNA, 33 bp, Homo sapien
ttttccatcatggttaagtctcttcacccgaga

SEQ ID NO: 413314 - DNA, 33 bp, Homo sapien
ttttccatcatggttacgtctcttcacccgaga

SEQ ID NO: 413315 - DNA, 33 bp, Homo sapien
ccaagcatagctcttactaaacggcttcttttc

SEQ ID NO: 413316 - DNA, 33 bp, Homo sapien
ccaagcatagctcttattaaacggcttcttttc

SEQ ID NO: 413317 - DNA, 33 bp, Homo sapien
atttgagttacagggacaagaagcctttggatt

SEQ ID NO: 413318 - DNA, 33 bp, Homo sapien
atttgagttacagggagaagaagcctttggatt

SEQ ID NO: 413319 - DNA, 33 bp, Homo sapien
tgtatttattggcatacatgttgactgtccgtc

SEQ ID NO: 413320 - DNA, 33 bp, Homo sapien
tgtatttattggcatatatgttgactgtccgtc

SEQ ID NO: 413321 - DNA, 33 bp, Homo sapien
caggctacatactgcacgacttcaactatatga

SEQ ID NO: 413322 - DNA, 33 bp, Homo sapien
caggctacatactgcatgacttcaactatatga

SEQ ID NO: 413323 - DNA, 33 bp, Homo sapien
tgtgtggtttatgcaaacagatttatgactctg

SEQ ID NO: 413324 - DNA, 33 bp, Homo sapien
tgtgtggtttatgcaagcagatttatgactctg

SEQ ID NO: 413325 - DNA, 33 bp, Homo sapien
agtaactgagaaaatacgcaagatgaaccacct

SEQ ID NO: 413326 - DNA, 33 bp, Homo sapien
agtaactgagaaaatatgcaagatgaaccacct

SEQ ID NO: 413327 - DNA, 33 bp, Homo sapien
gtgcctggcaaagcataaagaagcttgggtttt

SEQ ID NO: 413328 - DNA, 33 bp, Homo sapien
gtgcctggcaaagcatgaagaagcttgggtttt

SEQ ID NO: 413329 - DNA, 33 bp, Homo sapien
attacaatggttcaagcagtgcaccttctagac

SEQ ID NO: 413330 - DNA, 33 bp, Homo sapien
attacaatggttcaaggagtgcaccttctagac

SEQ ID NO: 413331 - DNA, 33 bp, Homo sapien
ttcacacatcttgatcacaggttccggaaacat

SEQ ID NO: 413332 - DNA, 33 bp, Homo sapien
ttcacacatcttgatcgcaggttccggaaacat

SEQ ID NO: 413333 - DNA, 33 bp, Homo sapien
tcttctttatgtatcccgactgagtctgacatg

SEQ ID NO: 413334 - DNA, 33 bp, Homo sapien
tcttctttatgtatcctgactgagtctgacatg

SEQ ID NO: 413335 - DNA, 33 bp, Homo sapien
tttagaaactgactcccgcaatatctactaatc

SEQ ID NO: 413336 - DNA, 33 bp, Homo sapien
tttagaaactgactcctgcaatatctactaatc

SEQ ID NO: 413337 - DNA, 33 bp, Homo sapien
gtacccataagcttcacccatttaaagtgtata

SEQ ID NO: 413338 - DNA, 33 bp, Homo sapien
gtacccataagcttcatccatttaaagtgtata

SEQ ID NO: 413339 - DNA, 33 bp, Homo sapien
caactctaggcatacacaaaaaatcactgagct

SEQ ID NO: 413340 - DNA, 33 bp, Homo sapien
caactctaggcatacataaaaaatcactgagct

SEQ ID NO: 413341 - DNA, 33 bp, Homo sapien
ctcagccattgtcacactattaattagcttcca

SEQ ID NO: 413342 - DNA, 33 bp, Homo sapien
ctcagccattgtcacattattaattagcttcca

SEQ ID NO: 413343 - DNA, 33 bp, Homo sapien
ttacagaaagagaaggccattgcttgcaaacaa

SEQ ID NO: 413344 - DNA, 33 bp, Homo sapien
ttacagaaagagaaggtcattgcttgcaaacaa

SEQ ID NO: 413345 - DNA, 33 bp, Homo sapien
aaatgtaaattctacaagtagcagggacctgat

SEQ ID NO: 413346 - DNA, 33 bp, Homo sapien
aaatgtaaattctacacgtagcagggacctgat

SEQ ID NO: 413347 - DNA, 33 bp, Homo sapien
tggttactatattgaacagtgtggataaaatac

SEQ ID NO: 413348 - DNA, 33 bp, Homo sapien
tggttactatattgaagagtgtggataaaatac

SEQ ID NO: 413349 - DNA, 33 bp, Homo sapien
tgtgctagacgctgaaccaatggcacatcctag

SEQ ID NO: 413350 - DNA, 33 bp, Homo sapien
tgtgctagacgctgaatcaatggcacatcctag

SEQ ID NO: 413351 - DNA, 33 bp, Homo sapien
aaatatgtttccgaaccctctgcgtacaggtga

SEQ ID NO: 413352 - DNA, 33 bp, Homo sapien
aaatatgtttccgaactctctgcgtacaggtga

SEQ ID NO: 413353 - DNA, 33 bp, Homo sapien
tttgttagcagtataacctagtctcttcattcc

SEQ ID NO: 413354 - DNA, 33 bp, Homo sapien
tttgttagcagtataatctagtctcttcattcc

SEQ ID NO: 413355 - DNA, 33 bp, Homo sapien
tgtttgtgaagtgaacagaacaaccctaaatgg

SEQ ID NO: 413356 - DNA, 33 bp, Homo sapien
tgtttgtgaagtgaacggaacaaccctaaatgg

SEQ ID NO: 413357 - DNA, 33 bp, Homo sapien
gataggcattgttgcactaattttccctgggga

SEQ ID NO: 413358 - DNA, 33 bp, Homo sapien
gataggcattgttgcattaattttccctgggga

SEQ ID NO: 413359 - DNA, 33 bp, Homo sapien
aacactgaacgccccaatcattcttacttctcc

SEQ ID NO: 413360 - DNA, 33 bp, Homo sapien
aacactgaacgccccactcattcttacttctcc

SEQ ID NO: 413361 - DNA, 33 bp, Homo sapien
aagcattcaagaaacacccggagcttctctggt

SEQ ID NO: 413362 - DNA, 33 bp, Homo sapien
aagcattcaagaaacagccggagcttctctggt

SEQ ID NO: 413363 - DNA, 33 bp, Homo sapien
cctcagccagagccaacggtcagctgcttacaa

SEQ ID NO: 413364 - DNA, 33 bp, Homo sapien
cctcagccagagccaatggtcagctgcttacaa

SEQ ID NO: 413365 - DNA, 33 bp, Homo sapien
tatgttttagctaagacgcactttcctgttttc

SEQ ID NO: 413366 - DNA, 33 bp, Homo sapien
tatgttttagctaagatgcactttcctgttttc

SEQ ID NO: 413367 - DNA, 33 bp, Homo sapien
gctcatcttaatgtcaaatatgtacagacttgc

SEQ ID NO: 413368 - DNA, 33 bp, Homo sapien
gctcatcttaatgtcagatatgtacagacttgc

SEQ ID NO: 413369 - DNA, 33 bp, Homo sapien
agagtcaggactgaaagagttaatttgtcaata

SEQ ID NO: 413370 - DNA, 33 bp, Homo sapien
agagtcaggactgaaatagttaatttgtcaata

SEQ ID NO: 413371 - DNA, 33 bp, Homo sapien
catttgttttttcttcactatgcccaccaagca

SEQ ID NO: 413372 - DNA, 33 bp, Homo sapien
catttgttttttcttcgctatgcccaccaagca

SEQ ID NO: 413373 - DNA, 33 bp, Homo sapien
gtgaaatcactttcaaaattggaaggcctctgt

SEQ ID NO: 413374 - DNA, 33 bp, Homo sapien
gtgaaatcactttcaagattggaaggcctctgt

SEQ ID NO: 413375 - DNA, 33 bp, Homo sapien
ccagagctgaagggaacgtcagggttcatgtag

SEQ ID NO: 413376 - DNA, 33 bp, Homo sapien
ccagagctgaagggaatgtcagggttcatgtag

SEQ ID NO: 413377 - DNA, 33 bp, Homo sapien
taccatcagttcctcacgaaggggcacacttat

SEQ ID NO: 413378 - DNA, 33 bp, Homo sapien
taccatcagttcctcaggaaggggcacacttat

SEQ ID NO: 413379 - DNA, 33 bp, Homo sapien
agaaatgactgggggccgagtatcttggatgta

SEQ ID NO: 413380 - DNA, 33 bp, Homo sapien
agaaatgactgggggctgagtatcttggatgta

SEQ ID NO: 413381 - DNA, 33 bp, Homo sapien
gatggttctgaatgaacactcatgcaggtgact

SEQ ID NO: 413382 - DNA, 33 bp, Homo sapien
gatggttctgaatgaagactcatgcaggtgact

SEQ ID NO: 413383 - DNA, 33 bp, Homo sapien
gtaaatctaacataccacaaggctaggagcaaa

SEQ ID NO: 413384 - DNA, 33 bp, Homo sapien
gtaaatctaacataccgcaaggctaggagcaaa

SEQ ID NO: 413385 - DNA, 33 bp, Homo sapien
aaggactatatgaaggacccttaactatctagt

SEQ ID NO: 413386 - DNA, 33 bp, Homo sapien
aaggactatatgaagggcccttaactatctagt

SEQ ID NO: 413387 - DNA, 33 bp, Homo sapien
taaatcccatctggaacgtctgcgtgtttagtt

SEQ ID NO: 413388 - DNA, 33 bp, Homo sapien
taaatcccatctggaatgtctgcgtgtttagtt

SEQ ID NO: 413389 - DNA, 33 bp, Homo sapien
cctgtgtgtttaagaacgccacagattttctga

SEQ ID NO: 413390 - DNA, 33 bp, Homo sapien
cctgtgtgtttaagaatgccacagattttctga

SEQ ID NO: 413391 - DNA, 33 bp, Homo sapien
gcctgactgcagtgcacgcccaccaatgggaag

SEQ ID NO: 413392 - DNA, 33 bp, Homo sapien
gcctgactgcagtgcatgcccaccaatgggaag

SEQ ID NO: 413393 - DNA, 33 bp, Homo sapien
gtacagccctaagatcagaagtcagagacaggc

SEQ ID NO: 413394 - DNA, 33 bp, Homo sapien
gtacagccctaagatcggaagtcagagacaggc

SEQ ID NO: 413395 - DNA, 33 bp, Homo sapien
tagttacacagatacacgcacctttttatttat

SEQ ID NO: 413396 - DNA, 33 bp, Homo sapien
tagttacacagatacatgcacctttttatttat

SEQ ID NO: 413397 - DNA, 33 bp, Homo sapien
tgaacatggcagctaaacattggcacaagtctt

SEQ ID NO: 413398 - DNA, 33 bp, Homo sapien
tgaacatggcagctaagcattggcacaagtctt

SEQ ID NO: 413399 - DNA, 33 bp, Homo sapien
aaattgccttgacttacgcagtctaaagactac

SEQ ID NO: 413400 - DNA, 33 bp, Homo sapien
aaattgccttgacttatgcagtctaaagactac

SEQ ID NO: 413401 - DNA, 33 bp, Homo sapien
ctccactttctggaaacgacccctgaccctcat

SEQ ID NO: 413402 - DNA, 33 bp, Homo sapien
ctccactttctggaaatgacccctgaccctcat

SEQ ID NO: 413403 - DNA, 33 bp, Homo sapien
tagtggtgtgagaaaacgagattgagtacaaca

SEQ ID NO: 413404 - DNA, 33 bp, Homo sapien
tagtggtgtgagaaaatgagattgagtacaaca

SEQ ID NO: 413405 - DNA, 33 bp, Homo sapien
ttacaggatttcagcccatgatatattacacta

SEQ ID NO: 413406 - DNA, 33 bp, Homo sapien
ttacaggatttcagcctatgatatattacacta

SEQ ID NO: 413407 - DNA, 33 bp, Homo sapien
ttaatctcaccatgaaaagtcaaagagaagagg

SEQ ID NO: 413408 - DNA, 33 bp, Homo sapien
ttaatctcaccatgaatagtcaaagagaagagg

SEQ ID NO: 413409 - DNA, 33 bp, Homo sapien
cgaagcagaaagccacaaaggaactgagggttt

SEQ ID NO: 413410 - DNA, 33 bp, Homo sapien
cgaagcagaaagccacgaaggaactgagggttt

SEQ ID NO: 413411 - DNA, 33 bp, Homo sapien
cagttaagaatcagaaactgaaccattactcca

SEQ ID NO: 413412 - DNA, 33 bp, Homo sapien
cagttaagaatcagaatctgaaccattactcca

SEQ ID NO: 413413 - DNA, 33 bp, Homo sapien
aatacaggtccaaagactcatctacagttaaga

SEQ ID NO: 413414 - DNA, 33 bp, Homo sapien
aatacaggtccaaagattcatctacagttaaga

SEQ ID NO: 413415 - DNA, 33 bp, Homo sapien
tacgccatactcctgacatagaatagtctaact

SEQ ID NO: 413416 - DNA, 33 bp, Homo sapien
tacgccatactcctgatatagaatagtctaact

SEQ ID NO: 413417 - DNA, 33 bp, Homo sapien
cttgaatttgagaatgaaaagtatacaggcatc

SEQ ID NO: 413418 - DNA, 33 bp, Homo sapien
cttgaatttgagaatgtaaagtatacaggcatc

SEQ ID NO: 413419 - DNA, 33 bp, Homo sapien
aagatgtactcctgaactgatttttcagtctat

SEQ ID NO: 413420 - DNA, 33 bp, Homo sapien
aagatgtactcctgaattgatttttcagtctat

SEQ ID NO: 413421 - DNA, 33 bp, Homo sapien
tctgacgcgtccaaacagcaccatttggaaaga

SEQ ID NO: 413422 - DNA, 33 bp, Homo sapien
tctgacgcgtccaaacggcaccatttggaaaga

SEQ ID NO: 413423 - DNA, 33 bp, Homo sapien
atgctggagtaggaaagcttccatgtaaacatt

SEQ ID NO: 413424 - DNA, 33 bp, Homo sapien
atgctggagtaggaaatcttccatgtaaacatt

SEQ ID NO: 413425 - DNA, 33 bp, Homo sapien
ttgggttatatggttccctgcaagtttgtctgc

SEQ ID NO: 413426 - DNA, 33 bp, Homo sapien
ttgggttatatggttctctgcaagtttgtctgc

SEQ ID NO: 413427 - DNA, 33 bp, Homo sapien
gccattgactcactgacggtgactgtgtacgaa

SEQ ID NO: 413428 - DNA, 33 bp, Homo sapien
gccattgactcactgatggtgactgtgtacgaa

SEQ ID NO: 413429 - DNA, 33 bp, Homo sapien
taacatttaaattgtaaaggccctgagaagtcc

SEQ ID NO: 413430 - DNA, 33 bp, Homo sapien
taacatttaaattgtacaggccctgagaagtcc

SEQ ID NO: 413431 - DNA, 33 bp, Homo sapien
caactctattcctagaacatttcctcaaccaaa

SEQ ID NO: 413432 - DNA, 33 bp, Homo sapien
caactctattcctagagcatttcctcaaccaaa

SEQ ID NO: 413433 - DNA, 33 bp, Homo sapien
actagacaagtcatgaccagcaactctattcct

SEQ ID NO: 413434 - DNA, 33 bp, Homo sapien
actagacaagtcatgatcagcaactctattcct

SEQ ID NO: 413435 - DNA, 33 bp, Homo sapien
agccagttcctcccgacctcagtatctcttcca

SEQ ID NO: 413436 - DNA, 33 bp, Homo sapien
agccagttcctcccgatctcagtatctcttcca

SEQ ID NO: 413437 - DNA, 33 bp, Homo sapien
gcgactagttaattccaacttgcccactgcagg

SEQ ID NO: 413438 - DNA, 33 bp, Homo sapien
gcgactagttaattccgacttgcccactgcagg

SEQ ID NO: 413439 - DNA, 33 bp, Homo sapien
acaacgacagtgaagacagaagcacgtggctgc

SEQ ID NO: 413440 - DNA, 33 bp, Homo sapien
acaacgacagtgaagatagaagcacgtggctgc

SEQ ID NO: 413441 - DNA, 33 bp, Homo sapien
acagcaaaaagcaaccaaagtcgaagctgcaca

SEQ ID NO: 413442 - DNA, 33 bp, Homo sapien
acagcaaaaagcaaccgaagtcgaagctgcaca

SEQ ID NO: 413443 - DNA, 33 bp, Homo sapien
tttctgttctcctttacgtgtgaccttatacag

SEQ ID NO: 413444 - DNA, 33 bp, Homo sapien
tttctgttctcctttatgtgtgaccttatacag

SEQ ID NO: 413445 - DNA, 33 bp, Homo sapien
atttttgctgcaatgcagaatgaagcagagtgg

SEQ ID NO: 413446 - DNA, 33 bp, Homo sapien
atttttgctgcaatgcggaatgaagcagagtgg

SEQ ID NO: 413447 - DNA, 33 bp, Homo sapien
ctagctctttcatttcactagaaccattttcca

SEQ ID NO: 413448 - DNA, 33 bp, Homo sapien
ctagctctttcatttccctagaaccattttcca

SEQ ID NO: 413449 - DNA, 33 bp, Homo sapien
gtctagggaagacaccaaatggtcctgacccag

SEQ ID NO: 413450 - DNA, 33 bp, Homo sapien
gtctagggaagacaccgaatggtcctgacccag

SEQ ID NO: 413451 - DNA, 33 bp, Homo sapien
cttcagtcactgggaagcagcgcctctgcctac

SEQ ID NO: 413452 - DNA, 33 bp, Homo sapien
cttcagtcactgggaatcagcgcctctgcctac

SEQ ID NO: 413453 - DNA, 33 bp, Homo sapien
tccaggtcaagtttgaaatgagcagtatctgaa

SEQ ID NO: 413454 - DNA, 33 bp, Homo sapien
tccaggtcaagtttgagatgagcagtatctgaa

SEQ ID NO: 413455 - DNA, 33 bp, Homo sapien
gtttgtccctcttaacagtaaaatggtaatata

SEQ ID NO: 413456 - DNA, 33 bp, Homo sapien
gtttgtccctcttaactgtaaaatggtaatata

SEQ ID NO: 413457 - DNA, 33 bp, Homo sapien
ctttggcatgggtaaactgcctagaagcgactg

SEQ ID NO: 413458 - DNA, 33 bp, Homo sapien
ctttggcatgggtaaattgcctagaagcgactg

SEQ ID NO: 413459 - DNA, 33 bp, Homo sapien
ggagaacatcctcaaacgcccactgctggaatt

SEQ ID NO: 413460 - DNA, 33 bp, Homo sapien
ggagaacatcctcaaatgcccactgctggaatt

SEQ ID NO: 413461 - DNA, 33 bp, Homo sapien
cttgagctacactgaacagaaggagcctacagg

SEQ ID NO: 413462 - DNA, 33 bp, Homo sapien
cttgagctacactgaatagaaggagcctacagg

SEQ ID NO: 413463 - DNA, 33 bp, Homo sapien
agtagcaattcccagaagtagaatcactggaac

SEQ ID NO: 413464 - DNA, 33 bp, Homo sapien
agtagcaattcccagaggtagaatcactggaac

SEQ ID NO: 413465 - DNA, 33 bp, Homo sapien
gatgaaaatgcttaacactcaaccaaattgctt

SEQ ID NO: 413466 - DNA, 33 bp, Homo sapien
gatgaaaatgcttaacgctcaaccaaattgctt

SEQ ID NO: 413467 - DNA, 33 bp, Homo sapien
atatagaaaatttccaacataacaaggatccct

SEQ ID NO: 413468 - DNA, 33 bp, Homo sapien
atatagaaaatttccatcataacaaggatccct

SEQ ID NO: 413469 - DNA, 33 bp, Homo sapien
caaagcactgtgatgcacttctataaatacctc

SEQ ID NO: 413470 - DNA, 33 bp, Homo sapien
caaagcactgtgatgcgcttctataaatacctc

SEQ ID NO: 413471 - DNA, 33 bp, Homo sapien
gactcgaatcactcccagacccaccatcagcca

SEQ ID NO: 413472 - DNA, 33 bp, Homo sapien
gactcgaatcactcccggacccaccatcagcca

SEQ ID NO: 413473 - DNA, 33 bp, Homo sapien
ctttctgctcctccaactaatgactcgaatcac

SEQ ID NO: 413474 - DNA, 33 bp, Homo sapien
ctttctgctcctccaattaatgactcgaatcac

SEQ ID NO: 413475 - DNA, 33 bp, Homo sapien
taaatgtatggattaaatggaagagaaagatgg

SEQ ID NO: 413476 - DNA, 33 bp, Homo sapien
taaatgtatggattaagtggaagagaaagatgg

SEQ ID NO: 413477 - DNA, 33 bp, Homo sapien
agacaaggttgtaagacgcagcactctcatata

SEQ ID NO: 413478 - DNA, 33 bp, Homo sapien
agacaaggttgtaagatgcagcactctcatata

SEQ ID NO: 413479 - DNA, 33 bp, Homo sapien
tctttgtctactgagacgccactgtgcccacca

SEQ ID NO: 413480 - DNA, 33 bp, Homo sapien
tctttgtctactgagatgccactgtgcccacca

SEQ ID NO: 413481 - DNA, 33 bp, Homo sapien
cacatcagaaaaaactaaaatctctccaatttg

SEQ ID NO: 413482 - DNA, 33 bp, Homo sapien
cacatcagaaaaaactcaaatctctccaatttg

SEQ ID NO: 413483 - DNA, 33 bp, Homo sapien
ctgcttgacagcccaactaaacttccagccagt

SEQ ID NO: 413484 - DNA, 33 bp, Homo sapien
ctgcttgacagcccaattaaacttccagccagt

SEQ ID NO: 413485 - DNA, 33 bp, Homo sapien
caggtgagcaaactgaggatcagtgaggttaag

SEQ ID NO: 413486 - DNA, 33 bp, Homo sapien
caggtgagcaaactgatgatcagtgaggttaag

SEQ ID NO: 413487 - DNA, 33 bp, Homo sapien
atttttatattaatagcagttagccaaaccctg

SEQ ID NO: 413488 - DNA, 33 bp, Homo sapien
atttttatattaatagtagttagccaaaccctg

SEQ ID NO: 413489 - DNA, 33 bp, Homo sapien
aactctgcaagcggcaacacctctgattttgtt

SEQ ID NO: 413490 - DNA, 33 bp, Homo sapien
aactctgcaagcggcagcacctctgattttgtt

SEQ ID NO: 413491 - DNA, 33 bp, Homo sapien
gaggcagctgaaaatgaacagaagccagatttg

SEQ ID NO: 413492 - DNA, 33 bp, Homo sapien
gaggcagctgaaaatggacagaagccagatttg

SEQ ID NO: 413493 - DNA, 33 bp, Homo sapien
gattttgagtagcaaaacaatgctgtgtgtcgc

SEQ ID NO: 413494 - DNA, 33 bp, Homo sapien
gattttgagtagcaaagcaatgctgtgtgtcgc

SEQ ID NO: 413495 - DNA, 33 bp, Homo sapien
cagccctggtaacacaggattcttctgaaggtc

SEQ ID NO: 413496 - DNA, 33 bp, Homo sapien
cagccctggtaacacatgattcttctgaaggtc

SEQ ID NO: 413497 - DNA, 33 bp, Homo sapien
agtcttgactttctccccacactcagtgaacca

SEQ ID NO: 413498 - DNA, 33 bp, Homo sapien
agtcttgactttctccgcacactcagtgaacca

SEQ ID NO: 413499 - DNA, 33 bp, Homo sapien
tctcttctatggcacactggagcagccactgct

SEQ ID NO: 413500 - DNA, 33 bp, Homo sapien
tctcttctatggcacattggagcagccactgct

SEQ ID NO: 413501 - DNA, 33 bp, Homo sapien
ccctcactcttaaaacaaagctgtcaccctatg

SEQ ID NO: 413502 - DNA, 33 bp, Homo sapien
ccctcactcttaaaaccaagctgtcaccctatg

SEQ ID NO: 413503 - DNA, 33 bp, Homo sapien
gtggtggaacctcgccacactcttgttctggat

SEQ ID NO: 413504 - DNA, 33 bp, Homo sapien
gtggtggaacctcgccgcactcttgttctggat

SEQ ID NO: 413505 - DNA, 33 bp, Homo sapien
ctgtcaaggccatgtcactctgggctactggga

SEQ ID NO: 413506 - DNA, 33 bp, Homo sapien
ctgtcaaggccatgtcgctctgggctactggga

SEQ ID NO: 413507 - DNA, 33 bp, Homo sapien
tcttgtatatctgggcaaactcaccattcctct

SEQ ID NO: 413508 - DNA, 33 bp, Homo sapien
tcttgtatatctgggctaactcaccattcctct

SEQ ID NO: 413509 - DNA, 33 bp, Homo sapien
tccactttatacgggcaagggaaagcagcgaag

SEQ ID NO: 413510 - DNA, 33 bp, Homo sapien
tccactttatacgggcgagggaaagcagcgaag

SEQ ID NO: 413511 - DNA, 33 bp, Homo sapien
atctctgtcacataaaagggtctttggtattat

SEQ ID NO: 413512 - DNA, 33 bp, Homo sapien
atctctgtcacataaatgggtctttggtattat

SEQ ID NO: 413513 - DNA, 33 bp, Homo sapien
agggcgaagcttttaacagaaagttgccttctg

SEQ ID NO: 413514 - DNA, 33 bp, Homo sapien
agggcgaagcttttaatagaaagttgccttctg

SEQ ID NO: 413515 - DNA, 33 bp, Homo sapien
cctgggaggctcagtaaaacggctgactcacag

SEQ ID NO: 413516 - DNA, 33 bp, Homo sapien
cctgggaggctcagtagaacggctgactcacag

SEQ ID NO: 413517 - DNA, 33 bp, Homo sapien
gtcaaggccagcaccaaagacggcgtccagcac

SEQ ID NO: 413518 - DNA, 33 bp, Homo sapien
gtcaaggccagcaccagagacggcgtccagcac

SEQ ID NO: 413519 - DNA, 33 bp, Homo sapien
gatgttcagctccgggaaatttacttaactttc

SEQ ID NO: 413520 - DNA, 33 bp, Homo sapien
gatgttcagctccgggcaatttacttaactttc

SEQ ID NO: 413521 - DNA, 33 bp, Homo sapien
ccactgtttacacagacagcaaattcaagatgt

SEQ ID NO: 413522 - DNA, 33 bp, Homo sapien
ccactgtttacacagagagcaaattcaagatgt

SEQ ID NO: 413523 - DNA, 33 bp, Homo sapien
tgtcaacctcaggaagccaagaagcagtcttcc

SEQ ID NO: 413524 - DNA, 33 bp, Homo sapien
tgtcaacctcaggaaggcaagaagcagtcttcc

SEQ ID NO: 413525 - DNA, 33 bp, Homo sapien
gctccatgagtcatggcacgtgaagggtgagag

SEQ ID NO: 413526 - DNA, 33 bp, Homo sapien
gctccatgagtcatgggacgtgaagggtgagag

SEQ ID NO: 413527 - DNA, 33 bp, Homo sapien
acaaacttcatggaccaccaattctttgcacct

SEQ ID NO: 413528 - DNA, 33 bp, Homo sapien
acaaacttcatggaccgccaattctttgcacct

SEQ ID NO: 413529 - DNA, 33 bp, Homo sapien
agaggaattgcatgacaaggcttctgagcagga

SEQ ID NO: 413530 - DNA, 33 bp, Homo sapien
agaggaattgcatgacgaggcttctgagcagga

SEQ ID NO: 413531 - DNA, 33 bp, Homo sapien
cattctgagtagtgctcacagtgcctggcaccg

SEQ ID NO: 413532 - DNA, 33 bp, Homo sapien
cattctgagtagtgcttacagtgcctggcaccg

SEQ ID NO: 413533 - DNA, 33 bp, Homo sapien
cagcagtctcttgtcccggaagatgggttcgtg

SEQ ID NO: 413534 - DNA, 33 bp, Homo sapien
cagcagtctcttgtcctggaagatgggttcgtg

SEQ ID NO: 413535 - DNA, 33 bp, Homo sapien
gagtcaattgatagccgcaatccagaaagatgt

SEQ ID NO: 413536 - DNA, 33 bp, Homo sapien
gagtcaattgatagcctcaatccagaaagatgt

SEQ ID NO: 413537 - DNA, 33 bp, Homo sapien
tgagatctcaggtgaactgacacaaagcatgat

SEQ ID NO: 413538 - DNA, 33 bp, Homo sapien
tgagatctcaggtgaattgacacaaagcatgat

SEQ ID NO: 413539 - DNA, 33 bp, Homo sapien
ttcatccatccagcaaatgctgccaagagcctg

SEQ ID NO: 413540 - DNA, 33 bp, Homo sapien
ttcatccatccagcaagtgctgccaagagcctg

SEQ ID NO: 413541 - DNA, 33 bp, Homo sapien
ttttggatattcgcagcacactgagccacccca

SEQ ID NO: 413542 - DNA, 33 bp, Homo sapien
ttttggatattcgcaggacactgagccacccca

SEQ ID NO: 413543 - DNA, 33 bp, Homo sapien
tctactgaatacccaacaggagaacagactcaa

SEQ ID NO: 413544 - DNA, 33 bp, Homo sapien
tctactgaatacccaagaggagaacagactcaa

SEQ ID NO: 413545 - DNA, 33 bp, Homo sapien
gttggctttggttgaaaactatattccctgcaa

SEQ ID NO: 413546 - DNA, 33 bp, Homo sapien
gttggctttggttgaacactatattccctgcaa

SEQ ID NO: 413547 - DNA, 33 bp, Homo sapien
taatgaggaacaactagggagctgtaaagggcg

SEQ ID NO: 413548 - DNA, 33 bp, Homo sapien
taatgaggaacaactatggagctgtaaagggcg

SEQ ID NO: 413549 - DNA, 33 bp, Homo sapien
ttcctccacttccacaccgagtgccaaagaaac

SEQ ID NO: 413550 - DNA, 33 bp, Homo sapien
ttcctccacttccacatcgagtgccaaagaaac

SEQ ID NO: 413551 - DNA, 33 bp, Homo sapien
actgtatgctgtgaaacggggtagctgtactca

SEQ ID NO: 413552 - DNA, 33 bp, Homo sapien
actgtatgctgtgaaagggggtagctgtactca

SEQ ID NO: 413553 - DNA, 33 bp, Homo sapien
atgagcaggtacaggcccgtctgcacacgtgta

SEQ ID NO: 413554 - DNA, 33 bp, Homo sapien
atgagcaggtacaggctcgtctgcacacgtgta

SEQ ID NO: 413555 - DNA, 33 bp, Homo sapien
taaatgccctaggccaacgctaacgaaattaaa

SEQ ID NO: 413556 - DNA, 33 bp, Homo sapien
taaatgccctaggccagcgctaacgaaattaaa

SEQ ID NO: 413557 - DNA, 33 bp, Homo sapien
agcttgtgcccttctccaccgcctcgttagtaa

SEQ ID NO: 413558 - DNA, 33 bp, Homo sapien
agcttgtgcccttctctaccgcctcgttagtaa

SEQ ID NO: 413559 - DNA, 33 bp, Homo sapien
ctcgctctgccactgactagctgaccggggaca

SEQ ID NO: 413560 - DNA, 33 bp, Homo sapien
ctcgctctgccactgattagctgaccggggaca

SEQ ID NO: 413561 - DNA, 33 bp, Homo sapien
agtgtccacagaaccaactttgtagccctgaca

SEQ ID NO: 413562 - DNA, 33 bp, Homo sapien
agtgtccacagaaccacctttgtagccctgaca

SEQ ID NO: 413563 - DNA, 33 bp, Homo sapien
agtaacagccatgaaaccaacaaaccgcatcac

SEQ ID NO: 413564 - DNA, 33 bp, Homo sapien
agtaacagccatgaaagcaacaaaccgcatcac

SEQ ID NO: 413565 - DNA, 33 bp, Homo sapien
caccacacacacaatcacagttctcaaacacat

SEQ ID NO: 413566 - DNA, 33 bp, Homo sapien
caccacacacacaatcgcagttctcaaacacat

SEQ ID NO: 413567 - DNA, 33 bp, Homo sapien
accccaaatactgccgccatcacaacacatcga

SEQ ID NO: 413568 - DNA, 33 bp, Homo sapien
accccaaatactgccgtcatcacaacacatcga

SEQ ID NO: 413569 - DNA, 33 bp, Homo sapien
cagatagtttaggctaacaatgtgattgatggt

SEQ ID NO: 413570 - DNA, 33 bp, Homo sapien
cagatagtttaggctagcaatgtgattgatggt

SEQ ID NO: 413571 - DNA, 33 bp, Homo sapien
gctggagtcttggaccacaccagatagtttagg

SEQ ID NO: 413572 - DNA, 33 bp, Homo sapien
gctggagtcttggaccgcaccagatagtttagg

SEQ ID NO: 413573 - DNA, 33 bp, Homo sapien
gaatgacaacaacagtaacaaaataatatttcc

SEQ ID NO: 413574 - DNA, 33 bp, Homo sapien
gaatgacaacaacagtcacaaaataatatttcc

SEQ ID NO: 413575 - DNA, 33 bp, Homo sapien
cctcccttctttgtgaacaagaaacaggctcag

SEQ ID NO: 413576 - DNA, 33 bp, Homo sapien
cctcccttctttgtgagcaagaaacaggctcag

SEQ ID NO: 413577 - DNA, 33 bp, Homo sapien
tgcgagagggggaccaagctagagggtgatgga

SEQ ID NO: 413578 - DNA, 33 bp, Homo sapien
tgcgagagggggaccatgctagagggtgatgga

SEQ ID NO: 413579 - DNA, 33 bp, Homo sapien
ccttccttcgcaagggcaactttgccaggggga

SEQ ID NO: 413580 - DNA, 33 bp, Homo sapien
ccttccttcgcaagggtaactttgccaggggga

SEQ ID NO: 413581 - DNA, 33 bp, Homo sapien
tgtgctctttgcctcacaagcagactgcaagat

SEQ ID NO: 413582 - DNA, 33 bp, Homo sapien
tgtgctctttgcctcagaagcagactgcaagat

SEQ ID NO: 413583 - DNA, 33 bp, Homo sapien
aacagctgggcacttacgagtcttctgggcctc

SEQ ID NO: 413584 - DNA, 33 bp, Homo sapien
aacagctgggcacttatgagtcttctgggcctc

SEQ ID NO: 413585 - DNA, 33 bp, Homo sapien
ttttagacgctttagacgaccactgcggaactg

SEQ ID NO: 413586 - DNA, 33 bp, Homo sapien
ttttagacgctttagatgaccactgcggaactg

SEQ ID NO: 413587 - DNA, 33 bp, Homo sapien
atggataagacactctaaacttgtatgatggaa

SEQ ID NO: 413588 - DNA, 33 bp, Homo sapien
atggataagacactctgaacttgtatgatggaa

SEQ ID NO: 413589 - DNA, 33 bp, Homo sapien
tttgacctcttcccaacaatcacaacaagaaag

SEQ ID NO: 413590 - DNA, 33 bp, Homo sapien
tttgacctcttcccaagaatcacaacaagaaag

SEQ ID NO: 413591 - DNA, 33 bp, Homo sapien
atttttacttttcacaatctctctaacatgacc

SEQ ID NO: 413592 - DNA, 33 bp, Homo sapien
atttttacttttcacagtctctctaacatgacc

SEQ ID NO: 413593 - DNA, 33 bp, Homo sapien
atcactaaatcacatcaatgtttccaggcccag

SEQ ID NO: 413594 - DNA, 33 bp, Homo sapien
atcactaaatcacatcgatgtttccaggcccag

SEQ ID NO: 413595 - DNA, 33 bp, Homo sapien
acacctcagttctgtcactctgctttagtaaac

SEQ ID NO: 413596 - DNA, 33 bp, Homo sapien
acacctcagttctgtcgctctgctttagtaaac

SEQ ID NO: 413597 - DNA, 33 bp, Homo sapien
gacaatggtatgcttacatagactcatctctct

SEQ ID NO: 413598 - DNA, 33 bp, Homo sapien
gacaatggtatgcttatatagactcatctctct

SEQ ID NO: 413599 - DNA, 33 bp, Homo sapien
aatgcaattgggaattcaattaggtctgggatc

SEQ ID NO: 413600 - DNA, 33 bp, Homo sapien
aatgcaattgggaattgaattaggtctgggatc

SEQ ID NO: 413601 - DNA, 33 bp, Homo sapien
tttattctgattccaaagagtactgaaaagatg

SEQ ID NO: 413602 - DNA, 33 bp, Homo sapien
tttattctgattccaaggagtactgaaaagatg

SEQ ID NO: 413603 - DNA, 33 bp, Homo sapien
taactgttaaatttggacaccatcgttgtttca

SEQ ID NO: 413604 - DNA, 33 bp, Homo sapien
taactgttaaatttgggcaccatcgttgtttca

SEQ ID NO: 413605 - DNA, 33 bp, Homo sapien
ttacttacacacatacaaacagaaacagaagca

SEQ ID NO: 413606 - DNA, 33 bp, Homo sapien
ttacttacacacatacgaacagaaacagaagca

SEQ ID NO: 413607 - DNA, 33 bp, Homo sapien
actcttttagcatataaaaagccacgcttgtga

SEQ ID NO: 413608 - DNA, 33 bp, Homo sapien
actcttttagcatatagaaagccacgcttgtga

SEQ ID NO: 413609 - DNA, 33 bp, Homo sapien
tgactgatttggatgaggacattcccactgagc

SEQ ID NO: 413610 - DNA, 33 bp, Homo sapien
tgactgatttggatgatgacattcccactgagc

SEQ ID NO: 413611 - DNA, 33 bp, Homo sapien
tcttcatcagcttgcacataatttttctgcaaa

SEQ ID NO: 413612 - DNA, 33 bp, Homo sapien
tcttcatcagcttgcatataatttttctgcaaa

SEQ ID NO: 413613 - DNA, 33 bp, Homo sapien
tgatgtgggtgaaatcaattgttcaataaaagt

SEQ ID NO: 413614 - DNA, 33 bp, Homo sapien
tgatgtgggtgaaatcgattgttcaataaaagt

SEQ ID NO: 413615 - DNA, 33 bp, Homo sapien
caagtcagtgtttctcacagggataggagttta

SEQ ID NO: 413616 - DNA, 33 bp, Homo sapien
caagtcagtgtttctctcagggataggagttta

SEQ ID NO: 413617 - DNA, 33 bp, Homo sapien
cacaccaccaggaagccgagaagcaaagggaag

SEQ ID NO: 413618 - DNA, 33 bp, Homo sapien
cacaccaccaggaagctgagaagcaaagggaag

SEQ ID NO: 413619 - DNA, 33 bp, Homo sapien
ttgttggcacaggcaaccgtctacaatcatgaa

SEQ ID NO: 413620 - DNA, 33 bp, Homo sapien
ttgttggcacaggcaagcgtctacaatcatgaa

SEQ ID NO: 413621 - DNA, 33 bp, Homo sapien
ttcactttttttctggaaacgcctgggcccaac

SEQ ID NO: 413622 - DNA, 33 bp, Homo sapien
ttcactttttttctgggaacgcctgggcccaac

SEQ ID NO: 413623 - DNA, 33 bp, Homo sapien
tccagttactactgaaactttgatgatctattc

SEQ ID NO: 413624 - DNA, 33 bp, Homo sapien
tccagttactactgaagctttgatgatctattc

SEQ ID NO: 413625 - DNA, 33 bp, Homo sapien
tgtcattctggttttacacgccagtggatggat

SEQ ID NO: 413626 - DNA, 33 bp, Homo sapien
tgtcattctggttttatacgccagtggatggat

SEQ ID NO: 413627 - DNA, 33 bp, Homo sapien
tggttatcaaatgtgaaaaatgaaatagtttat

SEQ ID NO: 413628 - DNA, 33 bp, Homo sapien
tggttatcaaatgtgacaaatgaaatagtttat

SEQ ID NO: 413629 - DNA, 33 bp, Homo sapien
aatccgtgataagatacccaattcccagaaaaa

SEQ ID NO: 413630 - DNA, 33 bp, Homo sapien
aatccgtgataagatatccaattcccagaaaaa

SEQ ID NO: 413631 - DNA, 33 bp, Homo sapien
ctttgaattgtcctaacactacataaaacataa

SEQ ID NO: 413632 - DNA, 33 bp, Homo sapien
ctttgaattgtcctaatactacataaaacataa

SEQ ID NO: 413633 - DNA, 33 bp, Homo sapien
agtgcctgcctgagaaaactgaagtctgccaaa

SEQ ID NO: 413634 - DNA, 33 bp, Homo sapien
agtgcctgcctgagaatactgaagtctgccaaa

SEQ ID NO: 413635 - DNA, 33 bp, Homo sapien
tgttacaaattgcttcacatagaaaaaaaactg

SEQ ID NO: 413636 - DNA, 33 bp, Homo sapien
tgttacaaattgcttcccatagaaaaaaaactg

SEQ ID NO: 413637 - DNA, 33 bp, Homo sapien
atgaacactattgctcggaactcacttgaacgt

SEQ ID NO: 413638 - DNA, 33 bp, Homo sapien
atgaacactattgctctgaactcacttgaacgt

SEQ ID NO: 413639 - DNA, 33 bp, Homo sapien
aacctgaagaccagaaagcaacttggtgtcagg

SEQ ID NO: 413640 - DNA, 33 bp, Homo sapien
aacctgaagaccagaaggcaacttggtgtcagg

SEQ ID NO: 413641 - DNA, 33 bp, Homo sapien
gctgaatagtattccagtgaaaagatataccac

SEQ ID NO: 413642 - DNA, 33 bp, Homo sapien
gctgaatagtattccattgaaaagatataccac

SEQ ID NO: 413643 - DNA, 33 bp, Homo sapien
tctataatctcattacccgcaggtcactatttg

SEQ ID NO: 413644 - DNA, 33 bp, Homo sapien
tctataatctcattactcgcaggtcactatttg

SEQ ID NO: 413645 - DNA, 33 bp, Homo sapien
ggaagcaagttatgaaggaggaatacggatttt

SEQ ID NO: 413646 - DNA, 33 bp, Homo sapien
ggaagcaagttatgaatgaggaatacggatttt

SEQ ID NO: 413647 - DNA, 33 bp, Homo sapien
tcccttatctgcctaacgtctagacctggcaaa

SEQ ID NO: 413648 - DNA, 33 bp, Homo sapien
tcccttatctgcctaatgtctagacctggcaaa

SEQ ID NO: 413649 - DNA, 33 bp, Homo sapien
ttcaagtgacagggaaaaagaataagaaaataa

SEQ ID NO: 413650 - DNA, 33 bp, Homo sapien
ttcaagtgacagggaagaagaataagaaaataa

SEQ ID NO: 413651 - DNA, 33 bp, Homo sapien
tgctgacgacccgagactccttgttaaactgcc

SEQ ID NO: 413652 - DNA, 33 bp, Homo sapien
tgctgacgacccgagattccttgttaaactgcc

SEQ ID NO: 413653 - DNA, 33 bp, Homo sapien
tctaatacaagattcaaatgatgaaaacagaga

SEQ ID NO: 413654 - DNA, 33 bp, Homo sapien
tctaatacaagattcagatgatgaaaacagaga

SEQ ID NO: 413655 - DNA, 33 bp, Homo sapien
gctttagactgttaaagacaaaaaatgagaaac

SEQ ID NO: 413656 - DNA, 33 bp, Homo sapien
gctttagactgttaaatacaaaaaatgagaaac

SEQ ID NO: 413657 - DNA, 33 bp, Homo sapien
ttcgcttttctgataacgggtaagtttatgggc

SEQ ID NO: 413658 - DNA, 33 bp, Homo sapien
ttcgcttttctgataatgggtaagtttatgggc

SEQ ID NO: 413659 - DNA, 33 bp, Homo sapien
tttccaggttgtctaacgatgaaacatgaatgg

SEQ ID NO: 413660 - DNA, 33 bp, Homo sapien
tttccaggttgtctaatgatgaaacatgaatgg

SEQ ID NO: 413661 - DNA, 33 bp, Homo sapien
aactttcttggcacaacgatcaagagtcaaaat

SEQ ID NO: 413662 - DNA, 33 bp, Homo sapien
aactttcttggcacaatgatcaagagtcaaaat

SEQ ID NO: 413663 - DNA, 33 bp, Homo sapien
atgggctgtacctggaagcaaaaggagacggag

SEQ ID NO: 413664 - DNA, 33 bp, Homo sapien
atgggctgtacctggaggcaaaaggagacggag

SEQ ID NO: 413665 - DNA, 33 bp, Homo sapien
ctgcacattttagtaacatcagaaatgaggtgg

SEQ ID NO: 413666 - DNA, 33 bp, Homo sapien
ctgcacattttagtaagatcagaaatgaggtgg

SEQ ID NO: 413667 - DNA, 33 bp, Homo sapien
tcacacaaacttcctcaagtacccaaaactaga

SEQ ID NO: 413668 - DNA, 33 bp, Homo sapien
tcacacaaacttcctcgagtacccaaaactaga

SEQ ID NO: 413669 - DNA, 33 bp, Homo sapien
tttgcatctgccttgaagtctagagcaaatgaa

SEQ ID NO: 413670 - DNA, 33 bp, Homo sapien
tttgcatctgccttgaggtctagagcaaatgaa

SEQ ID NO: 413671 - DNA, 33 bp, Homo sapien
gtaaacaaaacacacaaaaaagctgctctgatc

SEQ ID NO: 413672 - DNA, 33 bp, Homo sapien
gtaaacaaaacacacagaaaagctgctctgatc

SEQ ID NO: 413673 - DNA, 33 bp, Homo sapien
caaagggaagacctggaaaacgttttgacaaag

SEQ ID NO: 413674 - DNA, 33 bp, Homo sapien
caaagggaagacctgggaaacgttttgacaaag

SEQ ID NO: 413675 - DNA, 33 bp, Homo sapien
atattaaaaaagaaaaagatttcgcatcaataa

SEQ ID NO: 413676 - DNA, 33 bp, Homo sapien
atattaaaaaagaaaatgatttcgcatcaataa

SEQ ID NO: 413677 - DNA, 33 bp, Homo sapien
ctgtttagtgcccatcactccatggcttcactg

SEQ ID NO: 413678 - DNA, 33 bp, Homo sapien
ctgtttagtgcccatcgctccatggcttcactg

SEQ ID NO: 413679 - DNA, 33 bp, Homo sapien
ttagctgaggtaccttcaagaggcaaattcata

SEQ ID NO: 413680 - DNA, 33 bp, Homo sapien
ttagctgaggtaccttgaagaggcaaattcata

SEQ ID NO: 413681 - DNA, 33 bp, Homo sapien
tcctagtgaggtagtgaagttttgctgtgagca

SEQ ID NO: 413682 - DNA, 33 bp, Homo sapien
tcctagtgaggtagtggagttttgctgtgagca

SEQ ID NO: 413683 - DNA, 33 bp, Homo sapien
ccaagtggtgtcaaaagtctaattacacacagg

SEQ ID NO: 413684 - DNA, 33 bp, Homo sapien
ccaagtggtgtcaaaattctaattacacacagg

SEQ ID NO: 413685 - DNA, 33 bp, Homo sapien
aggtgatatggcgtccacccattttgatggtaa

SEQ ID NO: 413686 - DNA, 33 bp, Homo sapien
aggtgatatggcgtccgcccattttgatggtaa

SEQ ID NO: 413687 - DNA, 33 bp, Homo sapien
agagtgttagcctttacgagcaaaagtcaaagc

SEQ ID NO: 413688 - DNA, 33 bp, Homo sapien
agagtgttagcctttatgagcaaaagtcaaagc

SEQ ID NO: 413689 - DNA, 33 bp, Homo sapien
tctgctgagaagagaaagcagccacatgggcct

SEQ ID NO: 413690 - DNA, 33 bp, Homo sapien
tctgctgagaagagaaggcagccacatgggcct

SEQ ID NO: 413691 - DNA, 33 bp, Homo sapien
ccttgaggtggctctacgttgtgatgattaaac

SEQ ID NO: 413692 - DNA, 33 bp, Homo sapien
ccttgaggtggctctaggttgtgatgattaaac

SEQ ID NO: 413693 - DNA, 33 bp, Homo sapien
aaaggggaataattccaagtcagaaatatttaa

SEQ ID NO: 413694 - DNA, 33 bp, Homo sapien
aaaggggaataattccgagtcagaaatatttaa

SEQ ID NO: 413695 - DNA, 33 bp, Homo sapien
ggctatttggattgaaaccaaaaactcaactct

SEQ ID NO: 413696 - DNA, 33 bp, Homo sapien
ggctatttggattgaacccaaaaactcaactct

SEQ ID NO: 413697 - DNA, 33 bp, Homo sapien
cactgccagaattcctaagcgactggctcccaa

SEQ ID NO: 413698 - DNA, 33 bp, Homo sapien
cactgccagaattcctgagcgactggctcccaa

SEQ ID NO: 413699 - DNA, 33 bp, Homo sapien
gtccagaagtatgtaacgtgggaacccatcctg

SEQ ID NO: 413700 - DNA, 33 bp, Homo sapien
gtccagaagtatgtaatgtgggaacccatcctg

SEQ ID NO: 413701 - DNA, 33 bp, Homo sapien
tttgactgttagtctcagacctgtccattgagc

SEQ ID NO: 413702 - DNA, 33 bp, Homo sapien
tttgactgttagtctcggacctgtccattgagc

SEQ ID NO: 413703 - DNA, 33 bp, Homo sapien
tcttatgtcttgataactgtgatagtgctgaag

SEQ ID NO: 413704 - DNA, 33 bp, Homo sapien
tcttatgtcttgataattgtgatagtgctgaag

SEQ ID NO: 413705 - DNA, 33 bp, Homo sapien
ttgtaggaatttgaaaacttaagttacaggaaa

SEQ ID NO: 413706 - DNA, 33 bp, Homo sapien
ttgtaggaatttgaaatcttaagttacaggaaa

SEQ ID NO: 413707 - DNA, 33 bp, Homo sapien
aaataaaagaacttcacaatttccactactctc

SEQ ID NO: 413708 - DNA, 33 bp, Homo sapien
aaataaaagaacttcataatttccactactctc

SEQ ID NO: 413709 - DNA, 33 bp, Homo sapien
aggagaaagtactgacacgcttggagttaccag

SEQ ID NO: 413710 - DNA, 33 bp, Homo sapien
aggagaaagtactgacccgcttggagttaccag

SEQ ID NO: 413711 - DNA, 33 bp, Homo sapien
gaggagacagcagagaaggtgttaatgaataat

SEQ ID NO: 413712 - DNA, 33 bp, Homo sapien
gaggagacagcagagagggtgttaatgaataat

SEQ ID NO: 413713 - DNA, 33 bp, Homo sapien
ggtggcttaagaagagaattttgatggatgttg

SEQ ID NO: 413714 - DNA, 33 bp, Homo sapien
ggtggcttaagaagagcattttgatggatgttg

SEQ ID NO: 413715 - DNA, 33 bp, Homo sapien
acgaatgaaggcccaaataattctcataagtat

SEQ ID NO: 413716 - DNA, 33 bp, Homo sapien
acgaatgaaggcccaagtaattctcataagtat

SEQ ID NO: 413717 - DNA, 33 bp, Homo sapien
gtagcatatacagagcagagttgacggacaaag

SEQ ID NO: 413718 - DNA, 33 bp, Homo sapien
gtagcatatacagagcggagttgacggacaaag

SEQ ID NO: 413719 - DNA, 33 bp, Homo sapien
acccaccaaggcaccaaccactggactcaacaa

SEQ ID NO: 413720 - DNA, 33 bp, Homo sapien
acccaccaaggcaccatccactggactcaacaa

SEQ ID NO: 413721 - DNA, 33 bp, Homo sapien
actggctggcttcctaataatgcaaatgacttg

SEQ ID NO: 413722 - DNA, 33 bp, Homo sapien
actggctggcttcctagtaatgcaaatgacttg

SEQ ID NO: 413723 - DNA, 33 bp, Homo sapien
aacaacccctggtgccaaatagatgtttaacaa

SEQ ID NO: 413724 - DNA, 33 bp, Homo sapien
aacaacccctggtgccgaatagatgtttaacaa

SEQ ID NO: 413725 - DNA, 33 bp, Homo sapien
agttcagttcaacaacagcaaaaaataaaaatt

SEQ ID NO: 413726 - DNA, 33 bp, Homo sapien
agttcagttcaacaacggcaaaaaataaaaatt

SEQ ID NO: 413727 - DNA, 33 bp, Homo sapien
tttgcaccaaaattagaccaaactcatgaaagg

SEQ ID NO: 413728 - DNA, 33 bp, Homo sapien
tttgcaccaaaattaggccaaactcatgaaagg

SEQ ID NO: 413729 - DNA, 33 bp, Homo sapien
cggttggatgctaagaagcggttttgtttttgt

SEQ ID NO: 413730 - DNA, 33 bp, Homo sapien
cggttggatgctaagaggcggttttgtttttgt

SEQ ID NO: 413731 - DNA, 33 bp, Homo sapien
cctattcgccaaatacgctcaaattggtctccc

SEQ ID NO: 413732 - DNA, 33 bp, Homo sapien
cctattcgccaaatactctcaaattggtctccc

SEQ ID NO: 413733 - DNA, 33 bp, Homo sapien
ccggatgctgatgggccgaatctgttcctggat

SEQ ID NO: 413734 - DNA, 33 bp, Homo sapien
ccggatgctgatgggctgaatctgttcctggat

SEQ ID NO: 413735 - DNA, 33 bp, Homo sapien
gggaacatcattcatgacaattactgcagcagt

SEQ ID NO: 413736 - DNA, 33 bp, Homo sapien
gggaacatcattcatgccaattactgcagcagt

SEQ ID NO: 413737 - DNA, 33 bp, Homo sapien
cctacaccaagtaagactccttcaggtaaagct

SEQ ID NO: 413738 - DNA, 33 bp, Homo sapien
cctacaccaagtaagattccttcaggtaaagct

SEQ ID NO: 413739 - DNA, 33 bp, Homo sapien
gcaccttatgagtcaaactcctttaagagagtc

SEQ ID NO: 413740 - DNA, 33 bp, Homo sapien
gcaccttatgagtcaagctcctttaagagagtc

SEQ ID NO: 413741 - DNA, 33 bp, Homo sapien
ctcacccatctcccaaccctcagcaaccacact

SEQ ID NO: 413742 - DNA, 33 bp, Homo sapien
ctcacccatctcccaagcctcagcaaccacact

SEQ ID NO: 413743 - DNA, 33 bp, Homo sapien
gcaaaaaggtcctaacagaggaggcagatctgt

SEQ ID NO: 413744 - DNA, 33 bp, Homo sapien
gcaaaaaggtcctaacggaggaggcagatctgt

SEQ ID NO: 413745 - DNA, 33 bp, Homo sapien
tgcctaatttaagagaatattgcaactggtacg

SEQ ID NO: 413746 - DNA, 33 bp, Homo sapien
tgcctaatttaagagactattgcaactggtacg

SEQ ID NO: 413747 - DNA, 33 bp, Homo sapien
tgcaaatacattggtaaacagtcagcccttcac

SEQ ID NO: 413748 - DNA, 33 bp, Homo sapien
tgcaaatacattggtagacagtcagcccttcac

SEQ ID NO: 413749 - DNA, 33 bp, Homo sapien
ttctctttatgaaaaacatgaccagttaattat

SEQ ID NO: 413750 - DNA, 33 bp, Homo sapien
ttctctttatgaaaaatatgaccagttaattat

SEQ ID NO: 413751 - DNA, 33 bp, Homo sapien
gaatacagaactagaccggggaaatatgtgcct

SEQ ID NO: 413752 - DNA, 33 bp, Homo sapien
gaatacagaactagacgggggaaatatgtgcct

SEQ ID NO: 413753 - DNA, 33 bp, Homo sapien
gcaggtacattaggcacagaaagtcagtctgtc

SEQ ID NO: 413754 - DNA, 33 bp, Homo sapien
gcaggtacattaggcagagaaagtcagtctgtc

SEQ ID NO: 413755 - DNA, 33 bp, Homo sapien
acagctcattagcaacacttgagaatcattttg

SEQ ID NO: 413756 - DNA, 33 bp, Homo sapien
acagctcattagcaacccttgagaatcattttg

SEQ ID NO: 413757 - DNA, 33 bp, Homo sapien
ttactttcctctaacaataggtggtctccaact

SEQ ID NO: 413758 - DNA, 33 bp, Homo sapien
ttactttcctctaacagtaggtggtctccaact

SEQ ID NO: 413759 - DNA, 33 bp, Homo sapien
gaaggtggtttgaaaccagttgttttgaactca

SEQ ID NO: 413760 - DNA, 33 bp, Homo sapien
gaaggtggtttgaaactagttgttttgaactca

SEQ ID NO: 413761 - DNA, 33 bp, Homo sapien
aaagaaggtgtttagacagcctcaaacttcttc

SEQ ID NO: 413762 - DNA, 33 bp, Homo sapien
aaagaaggtgtttagatagcctcaaacttcttc

SEQ ID NO: 413763 - DNA, 33 bp, Homo sapien
agttctatcaggaccacaatgaggaatgaggat

SEQ ID NO: 413764 - DNA, 33 bp, Homo sapien
agttctatcaggaccagaatgaggaatgaggat

SEQ ID NO: 413765 - DNA, 33 bp, Homo sapien
tctgccatgcttatctgagaaacatacatttct

SEQ ID NO: 413766 - DNA, 33 bp, Homo sapien
tctgccatgcttatcttagaaacatacatttct

SEQ ID NO: 413767 - DNA, 33 bp, Homo sapien
tttagacatttagaacgggaaagaactttcaag

SEQ ID NO: 413768 - DNA, 33 bp, Homo sapien
tttagacatttagaactggaaagaactttcaag

SEQ ID NO: 413769 - DNA, 33 bp, Homo sapien
gaagctatactaacacagaagctctatcaattc

SEQ ID NO: 413770 - DNA, 33 bp, Homo sapien
gaagctatactaacacggaagctctatcaattc

SEQ ID NO: 413771 - DNA, 33 bp, Homo sapien
aagtttgacaaaactgaatgtcagtaagaatgt

SEQ ID NO: 413772 - DNA, 33 bp, Homo sapien
aagtttgacaaaactggatgtcagtaagaatgt

SEQ ID NO: 413773 - DNA, 33 bp, Homo sapien
gaaagtgtgtttgtcaaccagacattgggcaag

SEQ ID NO: 413774 - DNA, 33 bp, Homo sapien
gaaagtgtgtttgtcagccagacattgggcaag

SEQ ID NO: 413775 - DNA, 33 bp, Homo sapien
ctctgcaggagcaaaaatcttttagcacaaggg

SEQ ID NO: 413776 - DNA, 33 bp, Homo sapien
ctctgcaggagcaaaagtcttttagcacaaggg

SEQ ID NO: 413777 - DNA, 33 bp, Homo sapien
atcttctagttaagaaagtaggtcatctcactg

SEQ ID NO: 413778 - DNA, 33 bp, Homo sapien
atcttctagttaagaaggtaggtcatctcactg

SEQ ID NO: 413779 - DNA, 33 bp, Homo sapien
agatgtataattaagaacttgtgaacagataca

SEQ ID NO: 413780 - DNA, 33 bp, Homo sapien
agatgtataattaagagcttgtgaacagataca

SEQ ID NO: 413781 - DNA, 33 bp, Homo sapien
gaggattccactcctcaattcagctgccagagg

SEQ ID NO: 413782 - DNA, 33 bp, Homo sapien
gaggattccactcctcgattcagctgccagagg

SEQ ID NO: 413783 - DNA, 33 bp, Homo sapien
ccaccgtataagcaaacggctaggaccttaagt

SEQ ID NO: 413784 - DNA, 33 bp, Homo sapien
ccaccgtataagcaaatggctaggaccttaagt

SEQ ID NO: 413785 - DNA, 33 bp, Homo sapien
tgtaccttctaaatcaccaaccaccgtataagc

SEQ ID NO: 413786 - DNA, 33 bp, Homo sapien
tgtaccttctaaatcatcaaccaccgtataagc

SEQ ID NO: 413787 - DNA, 33 bp, Homo sapien
gtgcaaaactctgttaaaggagctgcaggggga

SEQ ID NO: 413788 - DNA, 33 bp, Homo sapien
gtgcaaaactctgttacaggagctgcaggggga

SEQ ID NO: 413789 - DNA, 33 bp, Homo sapien
atccaaattaacatcaaagccaataaaggaaaa

SEQ ID NO: 413790 - DNA, 33 bp, Homo sapien
atccaaattaacatcacagccaataaaggaaaa

SEQ ID NO: 413791 - DNA, 33 bp, Homo sapien
ttgcctggaatgagtaacaatgcatgacagtga

SEQ ID NO: 413792 - DNA, 33 bp, Homo sapien
ttgcctggaatgagtaccaatgcatgacagtga

SEQ ID NO: 413793 - DNA, 33 bp, Homo sapien
gaaggattaggattcacagacttttggttgaga

SEQ ID NO: 413794 - DNA, 33 bp, Homo sapien
gaaggattaggattcagagacttttggttgaga

SEQ ID NO: 413795 - DNA, 33 bp, Homo sapien
gttctgtaattcacacacttgggaaacggcatg

SEQ ID NO: 413796 - DNA, 33 bp, Homo sapien
gttctgtaattcacacgcttgggaaacggcatg

SEQ ID NO: 413797 - DNA, 33 bp, Homo sapien
ttttactgtaatttcacatacatatttgaactt

SEQ ID NO: 413798 - DNA, 33 bp, Homo sapien
ttttactgtaatttcagatacatatttgaactt

SEQ ID NO: 413799 - DNA, 33 bp, Homo sapien
atatttagcaaatgaactatacttcttccaatt

SEQ ID NO: 413800 - DNA, 33 bp, Homo sapien
atatttagcaaatgaattatacttcttccaatt

SEQ ID NO: 413801 - DNA, 33 bp, Homo sapien
cccttacattcctgcaacaaacctctcttgatc

SEQ ID NO: 413802 - DNA, 33 bp, Homo sapien
cccttacattcctgcagcaaacctctcttgatc

SEQ ID NO: 413803 - DNA, 33 bp, Homo sapien
catgaggtccagtcacaaggggccttcgtgact

SEQ ID NO: 413804 - DNA, 33 bp, Homo sapien
catgaggtccagtcacgaggggccttcgtgact

SEQ ID NO: 413805 - DNA, 33 bp, Homo sapien; identical to SEQ ID NO: 413803

SEQ ID NO: 413806 - DNA, 33 bp, Homo sapien; identical to SEQ ID NO: 413804

SEQ ID NO: 413807 - DNA, 33 bp, Homo sapien
tgtcaaggtttttctgcatgtggacaagacacc

SEQ ID NO: 413808 - DNA, 33 bp, Homo sapien
tgtcaaggtttttctgtatgtggacaagacacc

SEQ ID NO: 413809 - DNA, 33 bp, Homo sapien
tgacacaaagaaaaataacctcaaaattcagaa

SEQ ID NO: 413810 - DNA, 33 bp, Homo sapien
tgacacaaagaaaaatgacctcaaaattcagaa

SEQ ID NO: 413811 - DNA, 33 bp, Homo sapien
tactccaagtaagttagagcacaccaagagtgt

SEQ ID NO: 413812 - DNA, 33 bp, Homo sapien
tactccaagtaagttatagcacaccaagagtgt

SEQ ID NO: 413813 - DNA, 33 bp, Homo sapien
tgtgtttccctatcaccgcacagagaaggggga

SEQ ID NO: 413814 - DNA, 33 bp, Homo sapien
tgtgtttccctatcactgcacagagaaggggga

SEQ ID NO: 413815 - DNA, 33 bp, Homo sapien
tccaaaatggctgaaccgactgataggcccacc

SEQ ID NO: 413816 - DNA, 33 bp, Homo sapien
tccaaaatggctgaactgactgataggcccacc

SEQ ID NO: 413817 - DNA, 33 bp, Homo sapien
caggagcaatattcacaaagaatacaatgggaa

SEQ ID NO: 413818 - DNA, 33 bp, Homo sapien
caggagcaatattcacgaagaatacaatgggaa

SEQ ID NO: 413819 - DNA, 33 bp, Homo sapien
ttctggacagaagagacagcgcctagagaattt

SEQ ID NO: 413820 - DNA, 33 bp, Homo sapien
ttctggacagaagagagagcgcctagagaattt

SEQ ID NO: 413821 - DNA, 33 bp, Homo sapien
taaagctgtggtaatgaaaagtgtggcagcatg

SEQ ID NO: 413822 - DNA, 33 bp, Homo sapien
taaagctgtggtaatggaaagtgtggcagcatg

SEQ ID NO: 413823 - DNA, 33 bp, Homo sapien
agtgtccttgagaaaccggtaagcctaagtagg

SEQ ID NO: 413824 - DNA, 33 bp, Homo sapien
agtgtccttgagaaactggtaagcctaagtagg

SEQ ID NO: 413825 - DNA, 33 bp, Homo sapien
cattcaaatggtttgaaatcaaggaaacacacc

SEQ ID NO: 413826 - DNA, 33 bp, Homo sapien
cattcaaatggtttgagatcaaggaaacacacc

SEQ ID NO: 413827 - DNA, 33 bp, Homo sapien
aatgacattggttttcaacttttagaatcaccc

SEQ ID NO: 413828 - DNA, 33 bp, Homo sapien
aatgacattggttttcgacttttagaatcaccc

SEQ ID NO: 413829 - DNA, 33 bp, Homo sapien
tctgcaccaggctaaaatgagtaaaatctattt

SEQ ID NO: 413830 - DNA, 33 bp, Homo sapien
tctgcaccaggctaaagtgagtaaaatctattt

SEQ ID NO: 413831 - DNA, 33 bp, Homo sapien
ttttggatggagaatagaattcactcctctaac

SEQ ID NO: 413832 - DNA, 33 bp, Homo sapien
ttttggatggagaatataattcactcctctaac

SEQ ID NO: 413833 - DNA, 33 bp, Homo sapien
ctgcaaagcttgggtacaccagagtcagggtct

SEQ ID NO: 413834 - DNA, 33 bp, Homo sapien
ctgcaaagcttgggtataccagagtcagggtct

SEQ ID NO: 413835 - DNA, 33 bp, Homo sapien
gccaagaaccatctctcaatcaactgtccaatg

SEQ ID NO: 413836 - DNA, 33 bp, Homo sapien
gccaagaaccatctcttaatcaactgtccaatg

SEQ ID NO: 413837 - DNA, 33 bp, Homo sapien
gtcatggattcccaaacagacaacactgctcca

SEQ ID NO: 413838 - DNA, 33 bp, Homo sapien
gtcatggattcccaaagagacaacactgctcca

SEQ ID NO: 413839 - DNA, 33 bp, Homo sapien
tttttctggaatgtacgactcgtttagcagcct

SEQ ID NO: 413840 - DNA, 33 bp, Homo sapien
tttttctggaatgtactactcgtttagcagcct

SEQ ID NO: 413841 - DNA, 33 bp, Homo sapien
tgaatgtacccagaaccgtaacctagcatttta

SEQ ID NO: 413842 - DNA, 33 bp, Homo sapien
tgaatgtacccagaactgtaacctagcatttta

SEQ ID NO: 413843 - DNA, 33 bp, Homo sapien
tctacaaggcgagccaactggtcagtgagaagg

SEQ ID NO: 413844 - DNA, 33 bp, Homo sapien
tctacaaggcgagccagctggtcagtgagaagg

SEQ ID NO: 413845 - DNA, 33 bp, Homo sapien
aaagcatactgacaaacctttgagactgtaaat

SEQ ID NO: 413846 - DNA, 33 bp, Homo sapien
aaagcatactgacaaatctttgagactgtaaat

SEQ ID NO: 413847 - DNA, 33 bp, Homo sapien
taatgaactccaataaagcaattagttcaatgt

SEQ ID NO: 413848 - DNA, 33 bp, Homo sapien
taatgaactccaataaggcaattagttcaatgt

SEQ ID NO: 413849 - DNA, 33 bp, Homo sapien; identical to SEQ ID NO: 413847

SEQ ID NO: 413850 - DNA, 33 bp, Homo sapien; identical to SEQ ID NO: 413848

SEQ ID NO: 413851 - DNA, 33 bp, Homo sapien
gtcaaaactcatcaaactagcgccgggcgtggt

SEQ ID NO: 413852 - DNA, 33 bp, Homo sapien
gtcaaaactcatcaaagtagcgccgggcgtggt

SEQ ID NO: 413853 - DNA, 33 bp, Homo sapien
aataaaaatgcatccacgattcttagctcataa

SEQ ID NO: 413854 - DNA, 33 bp, Homo sapien
aataaaaatgcatccatgattcttagctcataa

SEQ ID NO: 413855 - DNA, 33 bp, Homo sapien
ctcctgaagctgttagaatttttagtgtgagtt

SEQ ID NO: 413856 - DNA, 33 bp, Homo sapien
ctcctgaagctgttaggatttttagtgtgagtt

SEQ ID NO: 413857 - DNA, 33 bp, Homo sapien; identical to SEQ ID NO: 413855

SEQ ID NO: 413858 - DNA, 33 bp, Homo sapien; identical to SEQ ID NO: 413856

SEQ ID NO: 413859 - DNA, 33 bp, Homo sapien
cgatcaaggttaattcaatgaggaatggaatat

SEQ ID NO: 413860 - DNA, 33 bp, Homo sapien
cgatcaaggttaattcgatgaggaatggaatat

SEQ ID NO: 413861 - DNA, 33 bp, Homo sapien
agcttatttagtaacaatgctgtgaagatgaga

SEQ ID NO: 413862 - DNA, 33 bp, Homo sapien
agcttatttagtaacagtgctgtgaagatgaga

SEQ ID NO: 413863 - DNA, 33 bp, Homo sapien
gctgaactacaataccaaccatctgctaccaac

SEQ ID NO: 413864 - DNA, 33 bp, Homo sapien
gctgaactacaataccgaccatctgctaccaac

SEQ ID NO: 413865 - DNA, 33 bp, Homo sapien
aactgaagaaaagagaacataactccagtgact

SEQ ID NO: 413866 - DNA, 33 bp, Homo sapien
aactgaagaaaagagagcataactccagtgact

SEQ ID NO: 413867 - DNA, 33 bp, Homo sapien
tcctggggcttaggcacgctggtgtcatatgac

SEQ ID NO: 413868 - DNA, 33 bp, Homo sapien
tcctggggcttaggcaggctggtgtcatatgac

SEQ ID NO: 413869 - DNA, 33 bp, Homo sapien
tttttgattgttataggaatgaattgctcaact

SEQ ID NO: 413870 - DNA, 33 bp, Homo sapien
tttttgattgttatagtaatgaattgctcaact

SEQ ID NO: 413871 - DNA, 33 bp, Homo sapien
atggttttacattctcgctaacaatacataatg

SEQ ID NO: 413872 - DNA, 33 bp, Homo sapien
atggttttacattctctctaacaatacataatg

SEQ ID NO: 413873 - DNA, 33 bp, Homo sapien
ccgtcaatttcacacactggtttccagttttgt

SEQ ID NO: 413874 - DNA, 33 bp, Homo sapien
ccgtcaatttcacacattggtttccagttttgt

SEQ ID NO: 413875 - DNA, 33 bp, Homo sapien
tccccagctatgaacacagattcctaaaaatgt

SEQ ID NO: 413876 - DNA, 33 bp, Homo sapien
tccccagctatgaacatagattcctaaaaatgt

SEQ ID NO: 413877 - DNA, 33 bp, Homo sapien; identical to SEQ ID NO: 413875

SEQ ID NO: 413878 - DNA, 33 bp, Homo sapien; identical to SEQ ID NO: 413876

SEQ ID NO: 413879 - DNA, 33 bp, Homo sapien
ggagacagagggatatcagacacaccgaggaga

SEQ ID NO: 413880 - DNA, 33 bp, Homo sapien
ggagacagagggatattagacacaccgaggaga

SEQ ID NO: 413881 - DNA, 33 bp, Homo sapien
gcccgctgacaaaaggacctgttgatgtgagtc

SEQ ID NO: 413882 - DNA, 33 bp, Homo sapien
gcccgctgacaaaagggcctgttgatgtgagtc

SEQ ID NO: 413883 - DNA, 33 bp, Homo sapien
tttcttagcaaaaaaacaacttgttaaatgtca

SEQ ID NO: 413884 - DNA, 33 bp, Homo sapien
tttcttagcaaaaaaagaacttgttaaatgtca

SEQ ID NO: 413885 - DNA, 33 bp, Homo sapien
accccctcggctggcacctgcatttagcacagc

SEQ ID NO: 413886 - DNA, 33 bp, Homo sapien
accccctcggctggcatctgcatttagcacagc

SEQ ID NO: 413887 - DNA, 33 bp, Homo sapien
atcacgggcaaacgggaaggagctggccaccct

SEQ ID NO: 413888 - DNA, 33 bp, Homo sapien
atcacgggcaaacggggaggagctggccaccct

SEQ ID NO: 413889 - DNA, 33 bp, Homo sapien
tggtctggaattttagccagcctcttcaacccc

SEQ ID NO: 413890 - DNA, 33 bp, Homo sapien
tggtctggaattttagtcagcctcttcaacccc

SEQ ID NO: 413891 - DNA, 33 bp, Homo sapien
atatgaattaactcatcagtgccacatgaaaaa

SEQ ID NO: 413892 - DNA, 33 bp, Homo sapien
atatgaattaactcattagtgccacatgaaaaa

SEQ ID NO: 413893 - DNA, 33 bp, Homo sapien
gacattattactgaaagaaacctgaaagccgct

SEQ ID NO: 413894 - DNA, 33 bp, Homo sapien
gacattattactgaaataaacctgaaagccgct

SEQ ID NO: 413895 - DNA, 33 bp, Homo sapien
tgcaatatttagtaaagctcttccgactagttg

SEQ ID NO: 413896 - DNA, 33 bp, Homo sapien
tgcaatatttagtaaatctcttccgactagttg

SEQ ID NO: 413897 - DNA, 33 bp, Homo sapien
aaatagtcatccaggaaaatcggaaagaagcgc

SEQ ID NO: 413898 - DNA, 33 bp, Homo sapien
aaatagtcatccaggacaatcggaaagaagcgc

SEQ ID NO: 413899 - DNA, 33 bp, Homo sapien
gctggtcctctgataaagatgggtctgagcagt

SEQ ID NO: 413900 - DNA, 33 bp, Homo sapien
gctggtcctctgataatgatgggtctgagcagt

SEQ ID NO: 413901 - DNA, 33 bp, Homo sapien
aaataatataaggtcaataatggactcaagacc

SEQ ID NO: 413902 - DNA, 33 bp, Homo sapien
aaataatataaggtcagtaatggactcaagacc

SEQ ID NO: 413903 - DNA, 33 bp, Homo sapien
aaaatagaaccaggaacgacttcatgaaacttg

SEQ ID NO: 413904 - DNA, 33 bp, Homo sapien
aaaatagaaccaggaatgacttcatgaaacttg

SEQ ID NO: 413905 - DNA, 33 bp, Homo sapien
ttgttttgaggataaaaggataataaatatgag

SEQ ID NO: 413906 - DNA, 33 bp, Homo sapien
ttgttttgaggataaagggataataaatatgag

SEQ ID NO: 413907 - DNA, 33 bp, Homo sapien
cctttttcttcttgcactagcctcatgatgttt

SEQ ID NO: 413908 - DNA, 33 bp, Homo sapien
cctttttcttcttgcagtagcctcatgatgttt

SEQ ID NO: 413909 - DNA, 33 bp, Homo sapien
tggcaaccagcagaacaaggagagaggcatgga

SEQ ID NO: 413910 - DNA, 33 bp, Homo sapien
tggcaaccagcagaaccaggagagaggcatgga

SEQ ID NO: 413911 - DNA, 33 bp, Homo sapien
gcctgcaatcttatcccgcctactccagcttca

SEQ ID NO: 413912 - DNA, 33 bp, Homo sapien
gcctgcaatcttatcctgcctactccagcttca

SEQ ID NO: 413913 - DNA, 33 bp, Homo sapien
tcaaggaacagaaacacgtgcaatgtgaggaac

SEQ ID NO: 413914 - DNA, 33 bp, Homo sapien
tcaaggaacagaaacatgtgcaatgtgaggaac

SEQ ID NO: 413915 - DNA, 33 bp, Homo sapien
gaaatgagatcaaggcacaaagttaacatattg

SEQ ID NO: 413916 - DNA, 33 bp, Homo sapien
gaaatgagatcaaggcgcaaagttaacatattg

SEQ ID NO: 413917 - DNA, 33 bp, Homo sapien
cctgtcccaccatgccaagagcttacaaagaga

SEQ ID NO: 413918 - DNA, 33 bp, Homo sapien
cctgtcccaccatgccgagagcttacaaagaga

SEQ ID NO: 413919 - DNA, 33 bp, Homo sapien
gacagtgggtctgggacactcaaaggctgttga

SEQ ID NO: 413920 - DNA, 33 bp, Homo sapien
gacagtgggtctgggatactcaaaggctgttga

SEQ ID NO: 413921 - DNA, 33 bp, Homo sapien
gaggcaggaatgcccacgacccatctgacttcc

SEQ ID NO: 413922 - DNA, 33 bp, Homo sapien
gaggcaggaatgcccatgacccatctgacttcc

SEQ ID NO: 413923 - DNA, 33 bp, Homo sapien
ctttcctccgttcacactgagctgtatttgaag

SEQ ID NO: 413924 - DNA, 33 bp, Homo sapien
ctttcctccgttcacattgagctgtatttgaag

SEQ ID NO: 413925 - DNA, 33 bp, Homo sapien
gtattggcaagagaaccgagtttcaggccggtg

SEQ ID NO: 413926 - DNA, 33 bp, Homo sapien
gtattggcaagagaactgagtttcaggccggtg

SEQ ID NO: 413927 - DNA, 33 bp, Homo sapien
accaggacagtgcaccacagagaggatgtaaga

SEQ ID NO: 413928 - DNA, 33 bp, Homo sapien
accaggacagtgcaccgcagagaggatgtaaga

SEQ ID NO: 413929 - DNA, 33 bp, Homo sapien
ggcccccttgtcaaggaagagcgggaagccaca

SEQ ID NO: 413930 - DNA, 33 bp, Homo sapien
ggcccccttgtcaaggtagagcgggaagccaca

SEQ ID NO: 413931 - DNA, 33 bp, Homo sapien
ctggtagctgagtcacaggtaagggcacgtgca

SEQ ID NO: 413932 - DNA, 33 bp, Homo sapien
ctggtagctgagtcacgggtaagggcacgtgca

SEQ ID NO: 413933 - DNA, 33 bp, Homo sapien
agactgtccatctcccagagccctgcaccatac

SEQ ID NO: 413934 - DNA, 33 bp, Homo sapien
agactgtccatctcccggagccctgcaccatac

SEQ ID NO: 413935 - DNA, 33 bp, Homo sapien
tatgaaacaaacaataccagtttattgtggggg

SEQ ID NO: 413936 - DNA, 33 bp, Homo sapien
tatgaaacaaacaatatcagtttattgtggggg

SEQ ID NO: 413937 - DNA, 33 bp, Homo sapien
caacactggggattacaattcgtcatgagattt

SEQ ID NO: 413938 - DNA, 33 bp, Homo sapien
caacactggggattacgattcgtcatgagattt

SEQ ID NO: 413939 - DNA, 33 bp, Homo sapien
ttgggtcagaactgtaggttagcaagatcccca

SEQ ID NO: 413940 - DNA, 33 bp, Homo sapien
ttgggtcagaactgtatgttagcaagatcccca

SEQ ID NO: 413941 - DNA, 33 bp, Homo sapien
ttcctgggacccatcccgagtgcttctgattct

SEQ ID NO: 413942 - DNA, 33 bp, Homo sapien
ttcctgggacccatcctgagtgcttctgattct

SEQ ID NO: 413943 - DNA, 33 bp, Homo sapien
atatactgtagacttacaataaaatgagctaga

SEQ ID NO: 413944 - DNA, 33 bp, Homo sapien
atatactgtagacttataataaaatgagctaga

SEQ ID NO: 413945 - DNA, 33 bp, Homo sapien
tctaacaggaagacacaattatatatgccagcc

SEQ ID NO: 413946 - DNA, 33 bp, Homo sapien
tctaacaggaagacacgattatatatgccagcc

SEQ ID NO: 413947 - DNA, 33 bp, Homo sapien
taaggcggcaataagaataatggtgagacatca

SEQ ID NO: 413948 - DNA, 33 bp, Homo sapien
taaggcggcaataagagtaatggtgagacatca

SEQ ID NO: 413949 - DNA, 33 bp, Homo sapien
caaggttcctgccacaaaccggaaagcaaagag

SEQ ID NO: 413950 - DNA, 33 bp, Homo sapien
caaggttcctgccacataccggaaagcaaagag

SEQ ID NO: 413951 - DNA, 33 bp, Homo sapien
tgctggacatttttccaactgtggtagccctgg

SEQ ID NO: 413952 - DNA, 33 bp, Homo sapien
tgctggacatttttccgactgtggtagccctgg

SEQ ID NO: 413953 - DNA, 33 bp, Homo sapien
ttacctcaaggacggcactttgatggtgtggac

SEQ ID NO: 413954 - DNA, 33 bp, Homo sapien
ttacctcaaggacggcgctttgatggtgtggac

SEQ ID NO: 413955 - DNA, 33 bp, Homo sapien
tgcttcagagtgcaaacaggggacattgaggag

SEQ ID NO: 413956 - DNA, 33 bp, Homo sapien
tgcttcagagtgcaaagaggggacattgaggag

SEQ ID NO: 413957 - DNA, 33 bp, Homo sapien
caaagcaaagtcatagacctaaggaaataagag

SEQ ID NO: 413958 - DNA, 33 bp, Homo sapien
caaagcaaagtcataggcctaaggaaataagag

SEQ ID NO: 413959 - DNA, 33 bp, Homo sapien
cgaagggacaactctacacgaccagctctcgaa

SEQ ID NO: 413960 - DNA, 33 bp, Homo sapien
cgaagggacaactctatacgaccagctctcgaa

SEQ ID NO: 413961 - DNA, 33 bp, Homo sapien
gtcacgttcaaagacaagaaataatcctgaaag

SEQ ID NO: 413962 - DNA, 33 bp, Homo sapien
gtcacgttcaaagacatgaaataatcctgaaag

SEQ ID NO: 413963 - DNA, 33 bp, Homo sapien
tgaggaggaggtgtcacgttcaaagggacattt

SEQ ID NO: 413964 - DNA, 33 bp, Homo sapien
tgaggaggaggtgtcatgttcaaagggacattt

SEQ ID NO: 413965 - DNA, 33 bp, Homo sapien
gcctggagtggaaaatcaatctctgataataat

SEQ ID NO: 413966 - DNA, 33 bp, Homo sapien
gcctggagtggaaaatgaatctctgataataat

SEQ ID NO: 413967 - DNA, 33 bp, Homo sapien
ccccaacctgcagagaaaggcaggatcaggaca

SEQ ID NO: 413968 - DNA, 33 bp, Homo sapien
ccccaacctgcagagagaggcaggatcaggaca

SEQ ID NO: 413969 - DNA, 33 bp, Homo sapien
cagcaaaactgaaagccgagatgctgttttaac

SEQ ID NO: 413970 - DNA, 33 bp, Homo sapien
cagcaaaactgaaagctgagatgctgttttaac

SEQ ID NO: 413971 - DNA, 33 bp, Homo sapien
atgcctctatgctcaacgtggtgttcttcctcc

SEQ ID NO: 413972 - DNA, 33 bp, Homo sapien
atgcctctatgctcaatgtggtgttcttcctcc

SEQ ID NO: 413973 - DNA, 33 bp, Homo sapien
ttccaagaattgttgacatggcacataaataaa

SEQ ID NO: 413974 - DNA, 33 bp, Homo sapien
ttccaagaattgttgatatggcacataaataaa

SEQ ID NO: 413975 - DNA, 33 bp, Homo sapien
agcttcgagataaaccccactaagactcaaaaa

SEQ ID NO: 413976 - DNA, 33 bp, Homo sapien
agcttcgagataaacctcactaagactcaaaaa

SEQ ID NO: 413977 - DNA, 33 bp, Homo sapien
cacagatccctagcaactggaactaaagccggg

SEQ ID NO: 413978 - DNA, 33 bp, Homo sapien
cacagatccctagcaattggaactaaagccggg

SEQ ID NO: 413979 - DNA, 33 bp, Homo sapien
gggatatgattgcttccaaacttagctgcttag

SEQ ID NO: 413980 - DNA, 33 bp, Homo sapien
gggatatgattgcttcgaaacttagctgcttag

SEQ ID NO: 413981 - DNA, 33 bp, Homo sapien
tggtaaagaactggaacgaaatgtcctggtttg

SEQ ID NO: 413982 - DNA, 33 bp, Homo sapien
tggtaaagaactggaatgaaatgtcctggtttg

SEQ ID NO: 413983 - DNA, 33 bp, Homo sapien
agaacctctgttataaatggaaatgtgaactgg

SEQ ID NO: 413984 - DNA, 33 bp, Homo sapien
agaacctctgttataagtggaaatgtgaactgg

SEQ ID NO: 413985 - DNA, 33 bp, Homo sapien
atcacaatcaaaatgcccaagttttcctatttg

SEQ ID NO: 413986 - DNA, 33 bp, Homo sapien
atcacaatcaaaatgctcaagttttcctatttg

SEQ ID NO: 413987 - DNA, 33 bp, Homo sapien
taatattctattgcgaactcatcttctgggtag

SEQ ID NO: 413988 - DNA, 33 bp, Homo sapien
taatattctattgcgagctcatcttctgggtag

SEQ ID NO: 413989 - DNA, 33 bp, Homo sapien
tggagatgcgattacccatctgtgaagagagaa

SEQ ID NO: 413990 - DNA, 33 bp, Homo sapien
tggagatgcgattacctatctgtgaagagagaa

SEQ ID NO: 413991 - DNA, 33 bp, Homo sapien
ctgaagaaaattgtagaagaaattccaacacct

SEQ ID NO: 413992 - DNA, 33 bp, Homo sapien
ctgaagaaaattgtagtagaaattccaacacct

SEQ ID NO: 413993 - DNA, 33 bp, Homo sapien
accatttggaaagcacggaggctatttagtttt

SEQ ID NO: 413994 - DNA, 33 bp, Homo sapien
accatttggaaagcactgaggctatttagtttt

SEQ ID NO: 413995 - DNA, 33 bp, Homo sapien
atagccaccggtaataagacagtatacgaacag

SEQ ID NO: 413996 - DNA, 33 bp, Homo sapien
atagccaccggtaataggacagtatacgaacag

SEQ ID NO: 413997 - DNA, 33 bp, Homo sapien
cttgctttgttcaaaacgggaggagcattaact

SEQ ID NO: 413998 - DNA, 33 bp, Homo sapien
cttgctttgttcaaaatgggaggagcattaact

SEQ ID NO: 413999 - DNA, 33 bp, Homo sapien
accggatctccaggaacgcacttgacttcaaaa

SEQ ID NO: 414000 - DNA, 33 bp, Homo sapien
accggatctccaggaatgcacttgacttcaaaa

SEQ ID NO: 414001 - DNA, 33 bp, Homo sapien
tattaatgggcaaaagccattagtacaagccat

SEQ ID NO: 414002 - DNA, 33 bp, Homo sapien
tattaatgggcaaaagtcattagtacaagccat

SEQ ID NO: 414003 - DNA, 33 bp, Homo sapien
agcccatctaaacatacactgccagggcctaac

SEQ ID NO: 414004 - DNA, 33 bp, Homo sapien
agcccatctaaacatatactgccagggcctaac

SEQ ID NO: 414005 - DNA, 33 bp, Homo sapien
tctcaaaagccaggaacacaatatgagtttgaa

SEQ ID NO: 414006 - DNA, 33 bp, Homo sapien
tctcaaaagccaggaagacaatatgagtttgaa

SEQ ID NO: 414007 - DNA, 33 bp, Homo sapien
atgctgtctgtggcaaaccacacctgctggagg

SEQ ID NO: 414008 - DNA, 33 bp, Homo sapien
atgctgtctgtggcaacccacacctgctggagg

SEQ ID NO: 414009 - DNA, 33 bp, Homo sapien
ttcttctttctcttcccgagctgtgagttcagg

SEQ ID NO: 414010 - DNA, 33 bp, Homo sapien
ttcttctttctcttcctgagctgtgagttcagg

SEQ ID NO: 414011 - DNA, 33 bp, Homo sapien
ggtagagtactggcccaagtgatattccgggtc

SEQ ID NO: 414012 - DNA, 33 bp, Homo sapien
ggtagagtactggcccgagtgatattccgggtc

SEQ ID NO: 414013 - DNA, 33 bp, Homo sapien
gtgctttcacctaataccataacagtgagactc

SEQ ID NO: 414014 - DNA, 33 bp, Homo sapien
gtgctttcacctaatatcataacagtgagactc

SEQ ID NO: 414015 - DNA, 33 bp, Homo sapien
gacagcagcgagatgaagagacaccagtggact

SEQ ID NO: 414016 - DNA, 33 bp, Homo sapien
gacagcagcgagatgaggagacaccagtggact

SEQ ID NO: 414017 - DNA, 33 bp, Homo sapien
tctgtcccaaacaaaacaaagtggttggctaac

SEQ ID NO: 414018 - DNA, 33 bp, Homo sapien
tctgtcccaaacaaaataaagtggttggctaac

SEQ ID NO: 414019 - DNA, 33 bp, Homo sapien
aacttctttccataatcagtgttaagtaccttc

SEQ ID NO: 414020 - DNA, 33 bp, Homo sapien
aacttctttccataattagtgttaagtaccttc

SEQ ID NO: 414021 - DNA, 33 bp, Homo sapien
ctttctcaacagcaaaaagttaatcaggttctg

SEQ ID NO: 414022 - DNA, 33 bp, Homo sapien
ctttctcaacagcaaacagttaatcaggttctg

SEQ ID NO: 414023 - DNA, 33 bp, Homo sapien
aagggggtcatctgaggcaggaagtaaatggtc

SEQ ID NO: 414024 - DNA, 33 bp, Homo sapien
aagggggtcatctgagtcaggaagtaaatggtc

SEQ ID NO: 414025 - DNA, 33 bp, Homo sapien
tattgaaaaaccaataagtaagagacacataaa

SEQ ID NO: 414026 - DNA, 33 bp, Homo sapien
tattgaaaaaccaataggtaagagacacataaa

SEQ ID NO: 414027 - DNA, 33 bp, Homo sapien
gctttcagcctaatcaatcaactgaaataattg

SEQ ID NO: 414028 - DNA, 33 bp, Homo sapien
gctttcagcctaatcactcaactgaaataattg

SEQ ID NO: 414029 - DNA, 33 bp, Homo sapien
tacagcttacaagtgacccaaactgttctcatt

SEQ ID NO: 414030 - DNA, 33 bp, Homo sapien
tacagcttacaagtgatccaaactgttctcatt

SEQ ID NO: 414031 - DNA, 33 bp, Homo sapien
ggtagttgtaatcatcacatacacaaattttat

SEQ ID NO: 414032 - DNA, 33 bp, Homo sapien
ggtagttgtaatcatcccatacacaaattttat

SEQ ID NO: 414033 - DNA, 33 bp, Homo sapien
gagcctcttatttttacggaatgcacctctctt

SEQ ID NO: 414034 - DNA, 33 bp, Homo sapien
gagcctcttatttttatggaatgcacctctctt

SEQ ID NO: 414035 - DNA, 33 bp, Homo sapien
tttttatatgttgcacaaggatagcataagaga

SEQ ID NO: 414036 - DNA, 33 bp, Homo sapien
tttttatatgttgcacgaggatagcataagaga

SEQ ID NO: 414037 - DNA, 33 bp, Homo sapien
ttgcttctttgattctgaacagtgtctttcgaa

SEQ ID NO: 414038 - DNA, 33 bp, Homo sapien
ttgcttctttgattcttaacagtgtctttcgaa

SEQ ID NO: 414039 - DNA, 33 bp, Homo sapien
atgtaagattacaaagactagaactaatagcaa

SEQ ID NO: 414040 - DNA, 33 bp, Homo sapien
atgtaagattacaaaggctagaactaatagcaa

SEQ ID NO: 414041 - DNA, 33 bp, Homo sapien
gaacaaaacatcattacgtagcatatgactgta

SEQ ID NO: 414042 - DNA, 33 bp, Homo sapien
gaacaaaacatcattatgtagcatatgactgta

SEQ ID NO: 414043 - DNA, 33 bp, Homo sapien
aggggagaatgaataccgatagttaagtagcag

SEQ ID NO: 414044 - DNA, 33 bp, Homo sapien
aggggagaatgaatactgatagttaagtagcag

SEQ ID NO: 414045 - DNA, 33 bp, Homo sapien
gttggcggtagggaagaagaaaattggataggt

SEQ ID NO: 414046 - DNA, 33 bp, Homo sapien
gttggcggtagggaaggagaaaattggataggt

SEQ ID NO: 414047 - DNA, 33 bp, Homo sapien
gctggacattcttctaactggtcttcctgcaca

SEQ ID NO: 414048 - DNA, 33 bp, Homo sapien
gctggacattcttctagctggtcttcctgcaca

SEQ ID NO: 414049 - DNA, 33 bp, Homo sapien
taagttttaaccagcaaagcagcataatagatg

SEQ ID NO: 414050 - DNA, 33 bp, Homo sapien
taagttttaaccagcagagcagcataatagatg

SEQ ID NO: 414051 - DNA, 33 bp, Homo sapien
attttcagtagttgtagagcatttcagtgaatg

SEQ ID NO: 414052 - DNA, 33 bp, Homo sapien
attttcagtagttgtatagcatttcagtgaatg

SEQ ID NO: 414053 - DNA, 33 bp, Homo sapien
ctactaagtgaagaaaagaggctgttagaccac

SEQ ID NO: 414054 - DNA, 33 bp, Homo sapien
ctactaagtgaagaaaggaggctgttagaccac

SEQ ID NO: 414055 - DNA, 33 bp, Homo sapien
aatggctgcttcatgaaatatacttgtgactaa

SEQ ID NO: 414056 - DNA, 33 bp, Homo sapien
aatggctgcttcatgatatatacttgtgactaa

SEQ ID NO: 414057 - DNA, 33 bp, Homo sapien
aatgattaaaatgtcaaaaagtaaatgctggca

SEQ ID NO: 414058 - DNA, 33 bp, Homo sapien
aatgattaaaatgtcataaagtaaatgctggca

SEQ ID NO: 414059 - DNA, 33 bp, Homo sapien
cctcggatgttgaccaaaatctgggtaacagag

SEQ ID NO: 414060 - DNA, 33 bp, Homo sapien
cctcggatgttgaccacaatctgggtaacagag

SEQ ID NO: 414061 - DNA, 33 bp, Homo sapien
gacacaaaaacataccagaggcaggattcagtt

SEQ ID NO: 414062 - DNA, 33 bp, Homo sapien
gacacaaaaacataccggaggcaggattcagtt

SEQ ID NO: 414063 - DNA, 33 bp, Homo sapien
gagtgacagactcccacgctatgccaaaaacgg

SEQ ID NO: 414064 - DNA, 33 bp, Homo sapien
gagtgacagactcccatgctatgccaaaaacgg

SEQ ID NO: 414065 - DNA, 33 bp, Homo sapien
gagtttggctgacttacggtaaaaaataaacat

SEQ ID NO: 414066 - DNA, 33 bp, Homo sapien
gagtttggctgacttatggtaaaaaataaacat

SEQ ID NO: 414067 - DNA, 33 bp, Homo sapien
aaagcttttaacatacacatggagcaaagtaat

SEQ ID NO: 414068 - DNA, 33 bp, Homo sapien
aaagcttttaacatacgcatggagcaaagtaat

SEQ ID NO: 414069 - DNA, 33 bp, Homo sapien
gatgacagcaaccacaagaaaaagaaatcagtg

SEQ ID NO: 414070 - DNA, 33 bp, Homo sapien
gatgacagcaaccacaggaaaaagaaatcagtg

SEQ ID NO: 414071 - DNA, 33 bp, Homo sapien
tctggcaactcatggaactctttctctcattca

SEQ ID NO: 414072 - DNA, 33 bp, Homo sapien
tctggcaactcatggagctctttctctcattca

SEQ ID NO: 414073 - DNA, 33 bp, Homo sapien
gactttcagtgctaaaagttggaaagtcctggg

SEQ ID NO: 414074 - DNA, 33 bp, Homo sapien
gactttcagtgctaaaggttggaaagtcctggg

SEQ ID NO: 414075 - DNA, 33 bp, Homo sapien
aatctcatctgccacaagagactaaatctagcc

SEQ ID NO: 414076 - DNA, 33 bp, Homo sapien
aatctcatctgccacaggagactaaatctagcc

SEQ ID NO: 414077 - DNA, 33 bp, Homo sapien
agaagcattctcttccacttctgttcactgcaa

SEQ ID NO: 414078 - DNA, 33 bp, Homo sapien
agaagcattctcttccgcttctgttcactgcaa

SEQ ID NO: 414079 - DNA, 33 bp, Homo sapien
ctgcagagatgagtgacgaggcaaggtctcgta

SEQ ID NO: 414080 - DNA, 33 bp, Homo sapien
ctgcagagatgagtgatgaggcaaggtctcgta

SEQ ID NO: 414081 - DNA, 33 bp, Homo sapien
ttttcaagccactatcgcaggtctggatgttga

SEQ ID NO: 414082 - DNA, 33 bp, Homo sapien
ttttcaagccactatctcaggtctggatgttga

SEQ ID NO: 414083 - DNA, 33 bp, Homo sapien
gcacaaatagtgtttacatatgtggcttcctca

SEQ ID NO: 414084 - DNA, 33 bp, Homo sapien
gcacaaatagtgtttatatatgtggcttcctca

SEQ ID NO: 414085 - DNA, 33 bp, Homo sapien
gagagataatagtcaactcataacccaaagtat

SEQ ID NO: 414086 - DNA, 33 bp, Homo sapien
gagagataatagtcaattcataacccaaagtat

SEQ ID NO: 414087 - DNA, 33 bp, Homo sapien
aaagtgaggtcatcaactgggagagagctacca

SEQ ID NO: 414088 - DNA, 33 bp, Homo sapien
aaagtgaggtcatcaattgggagagagctacca

SEQ ID NO: 414089 - DNA, 33 bp, Homo sapien
gataggtgcagcagaccactagtgcacacgttt

SEQ ID NO: 414090 - DNA, 33 bp, Homo sapien
gataggtgcagcagacgactagtgcacacgttt

SEQ ID NO: 414091 - DNA, 33 bp, Homo sapien
ccaggtggtgagcacaatactcaataggcagct

SEQ ID NO: 414092 - DNA, 33 bp, Homo sapien
ccaggtggtgagcacagtactcaataggcagct

SEQ ID NO: 414093 - DNA, 33 bp, Homo sapien
ttaaaaaattaagagacgttgctatcttacatt

SEQ ID NO: 414094 - DNA, 33 bp, Homo sapien
ttaaaaaattaagagatgttgctatcttacatt

SEQ ID NO: 414095 - DNA, 33 bp, Homo sapien
ttaatgtggattgttacagtcaggcaattatcc

SEQ ID NO: 414096 - DNA, 33 bp, Homo sapien
ttaatgtggattgttatagtcaggcaattatcc

SEQ ID NO: 414097 - DNA, 33 bp, Homo sapien
gggcctatccaaagtccaagagagtgctattta

SEQ ID NO: 414098 - DNA, 33 bp, Homo sapien
gggcctatccaaagtcgaagagagtgctattta

SEQ ID NO: 414099 - DNA, 33 bp, Homo sapien
tctcctctccagtgggaatttacagtcaatact

SEQ ID NO: 414100 - DNA, 33 bp, Homo sapien
tctcctctccagtgggcatttacagtcaatact

SEQ ID NO: 414101 - DNA, 33 bp, Homo sapien
tgagaattttagagacaattggccacgttcttt

SEQ ID NO: 414102 - DNA, 33 bp, Homo sapien
tgagaattttagagacgattggccacgttcttt

SEQ ID NO: 414103 - DNA, 33 bp, Homo sapien
ctttctgcttcttgagaatttgcacattgccag

SEQ ID NO: 414104 - DNA, 33 bp, Homo sapien
ctttctgcttcttgagcatttgcacattgccag

SEQ ID NO: 414105 - DNA, 33 bp, Homo sapien
gtgtaaccttacaataaatgctgctcttcatag

SEQ ID NO: 414106 - DNA, 33 bp, Homo sapien
gtgtaaccttacaatagatgctgctcttcatag

SEQ ID NO: 414107 - DNA, 33 bp, Homo sapien
tctctgtcctagccaacggctcctccactggca

SEQ ID NO: 414108 - DNA, 33 bp, Homo sapien
tctctgtcctagccaatggctcctccactggca

SEQ ID NO: 414109 - DNA, 33 bp, Homo sapien
tcatatgaaacagcaactcagaggaataaatag

SEQ ID NO: 414110 - DNA, 33 bp, Homo sapien
tcatatgaaacagcaagtcagaggaataaatag

SEQ ID NO: 414111 - DNA, 33 bp, Homo sapien
acagtggctttaaacactggatagaaaggtgac

SEQ ID NO: 414112 - DNA, 33 bp, Homo sapien
acagtggctttaaacattggatagaaaggtgac

SEQ ID NO: 414113 - DNA, 33 bp, Homo sapien
tgcagccaaaatccacagtgatccacataatac

SEQ ID NO: 414114 - DNA, 33 bp, Homo sapien
tgcagccaaaatccacggtgatccacataatac

SEQ ID NO: 414115 - DNA, 33 bp, Homo sapien
tatctcattcacagatgatatcctaatgttgga

SEQ ID NO: 414116 - DNA, 33 bp, Homo sapien
tatctcattcacagattatatcctaatgttgga

SEQ ID NO: 414117 - DNA, 33 bp, Homo sapien
ccggaagtaacctgagaataggattttggtgtc

SEQ ID NO: 414118 - DNA, 33 bp, Homo sapien
ccggaagtaacctgaggataggattttggtgtc

SEQ ID NO: 414119 - DNA, 33 bp, Homo sapien
atccagtatggagttcccttattcttcagagct

SEQ ID NO: 414120 - DNA, 33 bp, Homo sapien
atccagtatggagttctcttattcttcagagct

SEQ ID NO: 414121 - DNA, 33 bp, Homo sapien
ctgaatgtgaggcacacagaaagaaggcaatag

SEQ ID NO: 414122 - DNA, 33 bp, Homo sapien
ctgaatgtgaggcacatagaaagaaggcaatag

SEQ ID NO: 414123 - DNA, 33 bp, Homo sapien
actcaaacatatggtaaagatctttctctgaga

SEQ ID NO: 414124 - DNA, 33 bp, Homo sapien
actcaaacatatggtagagatctttctctgaga

SEQ ID NO: 414125 - DNA, 33 bp, Homo sapien
agtttcatgattggaactggcactcattgatta

SEQ ID NO: 414126 - DNA, 33 bp, Homo sapien
agtttcatgattggaagtggcactcattgatta

SEQ ID NO: 414127 - DNA, 33 bp, Homo sapien
ttctccaagtgcaatgaaccacttacatcctaa

SEQ ID NO: 414128 - DNA, 33 bp, Homo sapien
ttctccaagtgcaatgtaccacttacatcctaa

SEQ ID NO: 414129 - DNA, 33 bp, Homo sapien
tcagttcagtggatgaagaagaggaggataaaa

SEQ ID NO: 414130 - DNA, 33 bp, Homo sapien
tcagttcagtggatgaggaagaggaggataaaa

SEQ ID NO: 414131 - DNA, 33 bp, Homo sapien
cctctttcctcttcatcatctgccatgattgta

SEQ ID NO: 414132 - DNA, 33 bp, Homo sapien
cctctttcctcttcatgatctgccatgattgta

SEQ ID NO: 414133 - DNA, 33 bp, Homo sapien
cttatcatgtgactaacatttgcattttcttac

SEQ ID NO: 414134 - DNA, 33 bp, Homo sapien
cttatcatgtgactaagatttgcattttcttac

SEQ ID NO: 414135 - DNA, 33 bp, Homo sapien
ttcatgccctgtgtaaatatgcttcactcaagt

SEQ ID NO: 414136 - DNA, 33 bp, Homo sapien
ttcatgccctgtgtaagtatgcttcactcaagt

SEQ ID NO: 414137 - DNA, 33 bp, Homo sapien
tccttgattacagtataaaagaagcaagctgcc

SEQ ID NO: 414138 - DNA, 33 bp, Homo sapien
tccttgattacagtattaaagaagcaagctgcc

SEQ ID NO: 414139 - DNA, 33 bp, Homo sapien
cttaaaattgagggcaacttctggacaacagcc

SEQ ID NO: 414140 - DNA, 33 bp, Homo sapien
cttaaaattgagggcagcttctggacaacagcc

SEQ ID NO: 414141 - DNA, 33 bp, Homo sapien
atttgaggcagtatcacggaaataatgaattat

SEQ ID NO: 414142 - DNA, 33 bp, Homo sapien
atttgaggcagtatcatggaaataatgaattat

SEQ ID NO: 414143 - DNA, 33 bp, Homo sapien
aggcatggagttagaaaatggcttagtttatct

SEQ ID NO: 414144 - DNA, 33 bp, Homo sapien
aggcatggagttagaagatggcttagtttatct

SEQ ID NO: 414145 - DNA, 33 bp, Homo sapien
gagtgtttatggtatcaatatcctttacacggt

SEQ ID NO: 414146 - DNA, 33 bp, Homo sapien
gagtgtttatggtatcgatatcctttacacggt

SEQ ID NO: 414147 - DNA, 33 bp, Homo sapien
aaaggaagatagtgcacgtaatggatgcctgtt

SEQ ID NO: 414148 - DNA, 33 bp, Homo sapien
aaaggaagatagtgcatgtaatggatgcctgtt

SEQ ID NO: 414149 - DNA, 33 bp, Homo sapien
tgcctcttgaacttaaccaagtgagtgtatttt

SEQ ID NO: 414150 - DNA, 33 bp, Homo sapien
tgcctcttgaacttaagcaagtgagtgtatttt

SEQ ID NO: 414151 - DNA, 33 bp, Homo sapien
gcccaagataaacaaaatcattgcagggttttg

SEQ ID NO: 414152 - DNA, 33 bp, Homo sapien
gcccaagataaacaaagtcattgcagggttttg

SEQ ID NO: 414153 - DNA, 33 bp, Homo sapien
ggcagataaggaggaaaaaactaagcaaggaat

SEQ ID NO: 414154 - DNA, 33 bp, Homo sapien
ggcagataaggaggaataaactaagcaaggaat

SEQ ID NO: 414155 - DNA, 33 bp, Homo sapien
attcagccttctttgacgttctttcatttttaa

SEQ ID NO: 414156 - DNA, 33 bp, Homo sapien
attcagccttctttgatgttctttcatttttaa

SEQ ID NO: 414157 - DNA, 33 bp, Homo sapien
aaatgaatcaggtgcactataagaaaatgcttg

SEQ ID NO: 414158 - DNA, 33 bp, Homo sapien
aaatgaatcaggtgcagtataagaaaatgcttg

SEQ ID NO: 414159 - DNA, 33 bp, Homo sapien
gtttaatcttgtgtcacagaaaagggatctcat

SEQ ID NO: 414160 - DNA, 33 bp, Homo sapien
gtttaatcttgtgtcatagaaaagggatctcat

SEQ ID NO: 414161 - DNA, 33 bp, Homo sapien
caactaggccaccaaaacttccaatggtgaaag

SEQ ID NO: 414162 - DNA, 33 bp, Homo sapien
caactaggccaccaaaccttccaatggtgaaag

SEQ ID NO: 414163 - DNA, 33 bp, Homo sapien
agaaaaatctagcaagaatcaaaggttaagtac

SEQ ID NO: 414164 - DNA, 33 bp, Homo sapien
agaaaaatctagcaaggatcaaaggttaagtac

SEQ ID NO: 414165 - DNA, 33 bp, Homo sapien
cccagcaagaaatagacgaagcagaactgtttt

SEQ ID NO: 414166 - DNA, 33 bp, Homo sapien
cccagcaagaaatagatgaagcagaactgtttt

SEQ ID NO: 414167 - DNA, 33 bp, Homo sapien
cctcatctttactctcaatagacatctgtcatg

SEQ ID NO: 414168 - DNA, 33 bp, Homo sapien
cctcatctttactctcgatagacatctgtcatg

SEQ ID NO: 414169 - DNA, 33 bp, Homo sapien
ccaaaagtgaccaacacactccaaaatcttgat

SEQ ID NO: 414170 - DNA, 33 bp, Homo sapien
ccaaaagtgaccaacatactccaaaatcttgat

SEQ ID NO: 414171 - DNA, 33 bp, Homo sapien
ttcactcactgggtacacttcacttttatgggt

SEQ ID NO: 414172 - DNA, 33 bp, Homo sapien
ttcactcactgggtactcttcacttttatgggt

SEQ ID NO: 414173 - DNA, 33 bp, Homo sapien
cctttgtgagaatgggaagccaacaggtgcact

SEQ ID NO: 414174 - DNA, 33 bp, Homo sapien
cctttgtgagaatgggcagccaacaggtgcact

SEQ ID NO: 414175 - DNA, 33 bp, Homo sapien
tctttttgagcatggaaagcgaagaagagaaag

SEQ ID NO: 414176 - DNA, 33 bp, Homo sapien
tctttttgagcatggagagcgaagaagagaaag

SEQ ID NO: 414177 - DNA, 33 bp, Homo sapien
ctttttttattcatacactctcatattgataaa

SEQ ID NO: 414178 - DNA, 33 bp, Homo sapien
ctttttttattcataccctctcatattgataaa

SEQ ID NO: 414179 - DNA, 33 bp, Homo sapien
gtttcttaatatacagcctaagacagtaaaata

SEQ ID NO: 414180 - DNA, 33 bp, Homo sapien
gtttcttaatatacaggctaagacagtaaaata

SEQ ID NO: 414181 - DNA, 33 bp, Homo sapien
ttttatcttttatgccaatttttactctatctt

SEQ ID NO: 414182 - DNA, 33 bp, Homo sapien
ttttatcttttatgccgatttttactctatctt

SEQ ID NO: 414183 - DNA, 33 bp, Homo sapien
ttatagaaataacaacccacatacaaagctaca

SEQ ID NO: 414184 - DNA, 33 bp, Homo sapien
ttatagaaataacaacgcacatacaaagctaca

SEQ ID NO: 414185 - DNA, 33 bp, Homo sapien
aggggccaacaacactaaactgtctgagtatta

SEQ ID NO: 414186 - DNA, 33 bp, Homo sapien
aggggccaacaacactgaactgtctgagtatta

SEQ ID NO: 414187 - DNA, 33 bp, Homo sapien
aaggcttggccagcaactgttagatgacctcag

SEQ ID NO: 414188 - DNA, 33 bp, Homo sapien
aaggcttggccagcaagtgttagatgacctcag

SEQ ID NO: 414189 - DNA, 33 bp, Homo sapien
acctccaaggttgatacaaactcccttctcagc

SEQ ID NO: 414190 - DNA, 33 bp, Homo sapien
acctccaaggttgatataaactcccttctcagc

SEQ ID NO: 414191 - DNA, 33 bp, Homo sapien
agtagagatgcttacacaaggtttcatagactt

SEQ ID NO: 414192 - DNA, 33 bp, Homo sapien
agtagagatgcttacataaggtttcatagactt

SEQ ID NO: 414193 - DNA, 33 bp, Homo sapien
taatgtgtttacaaatcacctgagcatcttgtt

SEQ ID NO: 414194 - DNA, 33 bp, Homo sapien
taatgtgtttacaaattacctgagcatcttgtt

SEQ ID NO: 414195 - DNA, 33 bp, Homo sapien
agaggcccaaaacaccaggacacaatcatcctt

SEQ ID NO: 414196 - DNA, 33 bp, Homo sapien
agaggcccaaaacaccgggacacaatcatcctt

SEQ ID NO: 414197 - DNA, 33 bp, Homo sapien
acgttactggccattaacaaaatacaaatcaaa

SEQ ID NO: 414198 - DNA, 33 bp, Homo sapien
acgttactggccattagcaaaatacaaatcaaa

SEQ ID NO: 414199 - DNA, 33 bp, Homo sapien
gtgaaccactggcacaagttggaaagatctttg

SEQ ID NO: 414200 - DNA, 33 bp, Homo sapien
gtgaaccactggcacaggttggaaagatctttg

SEQ ID NO: 414201 - DNA, 33 bp, Homo sapien
ttagtatgccaaattaaagcatcactatctgtc

SEQ ID NO: 414202 - DNA, 33 bp, Homo sapien
ttagtatgccaaattagagcatcactatctgtc

SEQ ID NO: 414203 - DNA, 33 bp, Homo sapien
gtctcatttttcagtactaataaaacatccatg

SEQ ID NO: 414204 - DNA, 33 bp, Homo sapien
gtctcatttttcagtattaataaaacatccatg

SEQ ID NO: 414205 - DNA, 33 bp, Homo sapien
ctttttctgttctccaaggcagtttgtaacaca

SEQ ID NO: 414206 - DNA, 33 bp, Homo sapien
ctttttctgttctccagggcagtttgtaacaca

SEQ ID NO: 414207 - DNA, 33 bp, Homo sapien
ggataaggatgggctaaattatcattgctgtta

SEQ ID NO: 414208 - DNA, 33 bp, Homo sapien
ggataaggatgggctagattatcattgctgtta

SEQ ID NO: 414209 - DNA, 33 bp, Homo sapien
cccagatgatcaatgacgggaagttgaagaaga

SEQ ID NO: 414210 - DNA, 33 bp, Homo sapien
cccagatgatcaatgatgggaagttgaagaaga

SEQ ID NO: 414211 - DNA, 33 bp, Homo sapien
gaaaaggaaaaccagtcaattaagaacaagtat

SEQ ID NO: 414212 - DNA, 33 bp, Homo sapien
gaaaaggaaaaccagtgaattaagaacaagtat

SEQ ID NO: 414213 - DNA, 33 bp, Homo sapien
ttaggcttatgccctacgatcgccctcactgac

SEQ ID NO: 414214 - DNA, 33 bp, Homo sapien
ttaggcttatgccctatgatcgccctcactgac

SEQ ID NO: 414215 - DNA, 33 bp, Homo sapien
cagtgagacaacaggcaatgtcagtgagggcga

SEQ ID NO: 414216 - DNA, 33 bp, Homo sapien
cagtgagacaacaggcgatgtcagtgagggcga

SEQ ID NO: 414217 - DNA, 33 bp, Homo sapien
tacccaatgaaagaaaaggccagcaattcttca

SEQ ID NO: 414218 - DNA, 33 bp, Homo sapien
tacccaatgaaagaaagggccagcaattcttca

SEQ ID NO: 414219 - DNA, 33 bp, Homo sapien
gtgtctctctaacaccacacagatgtgactatt

SEQ ID NO: 414220 - DNA, 33 bp, Homo sapien
gtgtctctctaacaccgcacagatgtgactatt

SEQ ID NO: 414221 - DNA, 33 bp, Homo sapien
tttcagaaacacctcactcaaagttgttatgga

SEQ ID NO: 414222 - DNA, 33 bp, Homo sapien
tttcagaaacacctcattcaaagttgttatgga

SEQ ID NO: 414223 - DNA, 33 bp, Homo sapien
agggaagatgagagggacaaattgaattaataa

SEQ ID NO: 414224 - DNA, 33 bp, Homo sapien
agggaagatgagaggggcaaattgaattaataa

SEQ ID NO: 414225 - DNA, 33 bp, Homo sapien
cagaattctgtgggaaagaagccatcaggtaac

SEQ ID NO: 414226 - DNA, 33 bp, Homo sapien
cagaattctgtgggaaggaagccatcaggtaac

SEQ ID NO: 414227 - DNA, 33 bp, Homo sapien
atcatagctccagctgcactttggagtgagtca

SEQ ID NO: 414228 - DNA, 33 bp, Homo sapien
atcatagctccagctggactttggagtgagtca

SEQ ID NO: 414229 - DNA, 33 bp, Homo sapien
tccacatatgtataggaaggttatagccatcat

SEQ ID NO: 414230 - DNA, 33 bp, Homo sapien
tccacatatgtatagggaggttatagccatcat

SEQ ID NO: 414231 - DNA, 33 bp, Homo sapien
agctgaactgagaccaaattctcctgggaaatt

SEQ ID NO: 414232 - DNA, 33 bp, Homo sapien
agctgaactgagaccagattctcctgggaaatt

SEQ ID NO: 414233 - DNA, 33 bp, Homo sapien
tccatttccaaaacagaaatttcatgatacgta

SEQ ID NO: 414234 - DNA, 33 bp, Homo sapien
tccatttccaaaacaggaatttcatgatacgta

SEQ ID NO: 414235 - DNA, 33 bp, Homo sapien
agaacagatgtttagaacaagaggggcagagat

SEQ ID NO: 414236 - DNA, 33 bp, Homo sapien
agaacagatgtttagagcaagaggggcagagat

SEQ ID NO: 414237 - DNA, 33 bp, Homo sapien
tcctatataatacatgacagatcaagatgaatg

SEQ ID NO: 414238 - DNA, 33 bp, Homo sapien
tcctatataatacatggcagatcaagatgaatg

SEQ ID NO: 414239 - DNA, 33 bp, Homo sapien
tgccatcatcagatcaaacttttagatatgacc

SEQ ID NO: 414240 - DNA, 33 bp, Homo sapien
tgccatcatcagatcagacttttagatatgacc

SEQ ID NO: 414241 - DNA, 33 bp, Homo sapien
tagttggttcatctaaaagcaaaatctacagag

SEQ ID NO: 414242 - DNA, 33 bp, Homo sapien
tagttggttcatctaagagcaaaatctacagag

SEQ ID NO: 414243 - DNA, 33 bp, Homo sapien
ttctgtgatataccaaatctcataacaacccta

SEQ ID NO: 414244 - DNA, 33 bp, Homo sapien
ttctgtgatataccaagtctcataacaacccta

SEQ ID NO: 414245 - DNA, 33 bp, Homo sapien
atcagtaatagtaaaacaatgcgcaaagaagcc

SEQ ID NO: 414246 - DNA, 33 bp, Homo sapien
atcagtaatagtaaaagaatgcgcaaagaagcc

SEQ ID NO: 414247 - DNA, 33 bp, Homo sapien
aagtaaacaatgggaactcaaaggaaataacat

SEQ ID NO: 414248 - DNA, 33 bp, Homo sapien
aagtaaacaatgggaattcaaaggaaataacat

SEQ ID NO: 414249 - DNA, 33 bp, Homo sapien
tattgggtgatacaaacctgtttttcatgagcc

SEQ ID NO: 414250 - DNA, 33 bp, Homo sapien
tattgggtgatacaaatctgtttttcatgagcc

SEQ ID NO: 414251 - DNA, 33 bp, Homo sapien
tcatactatttacacaatacatgcacacagagc

SEQ ID NO: 414252 - DNA, 33 bp, Homo sapien
tcatactatttacacagtacatgcacacagagc

SEQ ID NO: 414253 - DNA, 33 bp, Homo sapien
aaagtgattttgaaataatgagtgcgtgtacac

SEQ ID NO: 414254 - DNA, 33 bp, Homo sapien
aaagtgattttgaaatcatgagtgcgtgtacac

SEQ ID NO: 414255 - DNA, 33 bp, Homo sapien
acaacaatgacaactaaagccatgatactatta

SEQ ID NO: 414256 - DNA, 33 bp, Homo sapien
acaacaatgacaactacagccatgatactatta

SEQ ID NO: 414257 - DNA, 33 bp, Homo sapien
aacttgcatataacccaaacgtaacaactctgg

SEQ ID NO: 414258 - DNA, 33 bp, Homo sapien
aacttgcatataacccgaacgtaacaactctgg

SEQ ID NO: 414259 - DNA, 33 bp, Homo sapien
actgtctctattgtataactttacaaacacttg

SEQ ID NO: 414260 - DNA, 33 bp, Homo sapien
actgtctctattgtatgactttacaaacacttg

SEQ ID NO: 414261 - DNA, 33 bp, Homo sapien
tgctctcagtatttcacggtacagagagaagtc

SEQ ID NO: 414262 - DNA, 33 bp, Homo sapien
tgctctcagtatttcatggtacagagagaagtc

SEQ ID NO: 414263 - DNA, 33 bp, Homo sapien
caaacaaaccctggaaacttcaagacttaatag

SEQ ID NO: 414264 - DNA, 33 bp, Homo sapien
caaacaaaccctggaaccttcaagacttaatag

SEQ ID NO: 414265 - DNA, 33 bp, Homo sapien
gttggatttagtataaacaggaatatcacaaac

SEQ ID NO: 414266 - DNA, 33 bp, Homo sapien
gttggatttagtataagcaggaatatcacaaac

SEQ ID NO: 414267 - DNA, 33 bp, Homo sapien
aatggagctgaggaaaaaagttactcttgaggc

SEQ ID NO: 414268 - DNA, 33 bp, Homo sapien
aatggagctgaggaaagaagttactcttgaggc

SEQ ID NO: 414269 - DNA, 33 bp, Homo sapien
tgccctcggtgtgaaacggcaatgtgtgtcccc

SEQ ID NO: 414270 - DNA, 33 bp, Homo sapien
tgccctcggtgtgaaagggcaatgtgtgtcccc

SEQ ID NO: 414271 - DNA, 33 bp, Homo sapien
ctgaggaaaagggcctcactgcctcatgtgcta

SEQ ID NO: 414272 - DNA, 33 bp, Homo sapien
ctgaggaaaagggcctgactgcctcatgtgcta

SEQ ID NO: 414273 - DNA, 33 bp, Homo sapien
tactgtctcattggaactgaatccattacatat

SEQ ID NO: 414274 - DNA, 33 bp, Homo sapien
tactgtctcattggaattgaatccattacatat

SEQ ID NO: 414275 - DNA, 33 bp, Homo sapien
aatgatggaaagttcagggaaaggcctcctgtt

SEQ ID NO: 414276 - DNA, 33 bp, Homo sapien
aatgatggaaagttcatggaaaggcctcctgtt

SEQ ID NO: 414277 - DNA, 33 bp, Homo sapien
aaaagagaagagaaaaagatgatgttctaattc

SEQ ID NO: 414278 - DNA, 33 bp, Homo sapien
aaaagagaagagaaaacgatgatgttctaattc

SEQ ID NO: 414279 - DNA, 33 bp, Homo sapien
cgtccctggtaacataaatcatcatattggaaa

SEQ ID NO: 414280 - DNA, 33 bp, Homo sapien
cgtccctggtaacatagatcatcatattggaaa

SEQ ID NO: 414281 - DNA, 33 bp, Homo sapien
aatgcatagaaagcaactgtttattaaaaacct

SEQ ID NO: 414282 - DNA, 33 bp, Homo sapien
aatgcatagaaagcaagtgtttattaaaaacct

SEQ ID NO: 414283 - DNA, 33 bp, Homo sapien
accaagagataaccaacaaaggaaatgttaatg

SEQ ID NO: 414284 - DNA, 33 bp, Homo sapien
accaagagataaccaagaaaggaaatgttaatg

SEQ ID NO: 414285 - DNA, 33 bp, Homo sapien
caaatacagtcctccaccagatccctaacaagc

SEQ ID NO: 414286 - DNA, 33 bp, Homo sapien
caaatacagtcctccatcagatccctaacaagc

SEQ ID NO: 414287 - DNA, 33 bp, Homo sapien
ttcgagcttagtttgagaaagtcaggtcaaaga

SEQ ID NO: 414288 - DNA, 33 bp, Homo sapien
ttcgagcttagtttgataaagtcaggtcaaaga

SEQ ID NO: 414289 - DNA, 33 bp, Homo sapien
ttgtatggtatgaagagcggttatttaggtctc

SEQ ID NO: 414290 - DNA, 33 bp, Homo sapien
ttgtatggtatgaagatcggttatttaggtctc

SEQ ID NO: 414291 - DNA, 33 bp, Homo sapien
aagcttttacatggcccattgctaggtgttcaa

SEQ ID NO: 414292 - DNA, 33 bp, Homo sapien
aagcttttacatggcctattgctaggtgttcaa

SEQ ID NO: 414293 - DNA, 33 bp, Homo sapien
tgaccaaattttagcacggcctctagcagcata

SEQ ID NO: 414294 - DNA, 33 bp, Homo sapien
tgaccaaattttagcatggcctctagcagcata

SEQ ID NO: 414295 - DNA, 33 bp, Homo sapien
tctcaccacatggtaccatttactaaagaaatt

SEQ ID NO: 414296 - DNA, 33 bp, Homo sapien
tctcaccacatggtactatttactaaagaaatt

SEQ ID NO: 414297 - DNA, 33 bp, Homo sapien
cacacgactacatgataagccctccaaacatta

SEQ ID NO: 414298 - DNA, 33 bp, Homo sapien
cacacgactacatgatgagccctccaaacatta

SEQ ID NO: 414299 - DNA, 33 bp, Homo sapien
ggtaaatttactttcaacatcaacctcatgtaa

SEQ ID NO: 414300 - DNA, 33 bp, Homo sapien
ggtaaatttactttcagcatcaacctcatgtaa

SEQ ID NO: 414301 - DNA, 33 bp, Homo sapien
cagatggctaaaggaaccctacataagctgggc

SEQ ID NO: 414302 - DNA, 33 bp, Homo sapien
cagatggctaaaggaatcctacataagctgggc

SEQ ID NO: 414303 - DNA, 33 bp, Homo sapien
ttgttacatctcagaaataatgagccaaattaa

SEQ ID NO: 414304 - DNA, 33 bp, Homo sapien
ttgttacatctcagaagtaatgagccaaattaa

SEQ ID NO: 414305 - DNA, 33 bp, Homo sapien
gccactcattctttcacgtagactatgcctggg

SEQ ID NO: 414306 - DNA, 33 bp, Homo sapien
gccactcattctttcatgtagactatgcctggg

SEQ ID NO: 414307 - DNA, 33 bp, Homo sapien
ttacaataatttcatcaaataccctgtcttaca

SEQ ID NO: 414308 - DNA, 33 bp, Homo sapien
ttacaataatttcatcgaataccctgtcttaca

SEQ ID NO: 414309 - DNA, 33 bp, Homo sapien
agaattagtggtattcagaagacatacagaaag

SEQ ID NO: 414310 - DNA, 33 bp, Homo sapien
agaattagtggtattcggaagacatacagaaag

SEQ ID NO: 414311 - DNA, 33 bp, Homo sapien
gagacagaatatatcagggatagttttcattac

SEQ ID NO: 414312 - DNA, 33 bp, Homo sapien
gagacagaatatatcatggatagttttcattac

SEQ ID NO: 414313 - DNA, 33 bp, Homo sapien
aataaaattgacaataaaagtgccactagtaaa

SEQ ID NO: 414314 - DNA, 33 bp, Homo sapien
aataaaattgacaatagaagtgccactagtaaa

SEQ ID NO: 414315 - DNA, 33 bp, Homo sapien
cagtctccaatggatacaaaactcagggccaca

SEQ ID NO: 414316 - DNA, 33 bp, Homo sapien
cagtctccaatggatataaaactcagggccaca

SEQ ID NO: 414317 - DNA, 33 bp, Homo sapien
aatgtgaatgcaataaactggatgaagtaaaaa

SEQ ID NO: 414318 - DNA, 33 bp, Homo sapien
aatgtgaatgcaataacctggatgaagtaaaaa

SEQ ID NO: 414319 - DNA, 33 bp, Homo sapien
ggtttaagtaccttcactagtcaacacatggag

SEQ ID NO: 414320 - DNA, 33 bp, Homo sapien
ggtttaagtaccttcagtagtcaacacatggag

SEQ ID NO: 414321 - DNA, 33 bp, Homo sapien
agggaaaggctctttgaaggagaatggcaaata

SEQ ID NO: 414322 - DNA, 33 bp, Homo sapien
agggaaaggctctttggaggagaatggcaaata

SEQ ID NO: 414323 - DNA, 33 bp, Homo sapien
ttaacagagtccaagccgagtaaatatagcata

SEQ ID NO: 414324 - DNA, 33 bp, Homo sapien
ttaacagagtccaagctgagtaaatatagcata

SEQ ID NO: 414325 - DNA, 33 bp, Homo sapien
aatctaatgattcagcatagttcactacttgcc

SEQ ID NO: 414326 - DNA, 33 bp, Homo sapien
aatctaatgattcagcgtagttcactacttgcc

SEQ ID NO: 414327 - DNA, 33 bp, Homo sapien
atacaaagtaactaaaggccatctctttaatac

SEQ ID NO: 414328 - DNA, 33 bp, Homo sapien
atacaaagtaactaaatgccatctctttaatac

SEQ ID NO: 414329 - DNA, 33 bp, Homo sapien
ggaaggtttatgaagaaggtggtgtttactgtg

SEQ ID NO: 414330 - DNA, 33 bp, Homo sapien
ggaaggtttatgaagagggtggtgtttactgtg

SEQ ID NO: 414331 - DNA, 33 bp, Homo sapien
ggagatattagcactgcactcttccctatggat

SEQ ID NO: 414332 - DNA, 33 bp, Homo sapien
ggagatattagcactgtactcttccctatggat

SEQ ID NO: 414333 - DNA, 33 bp, Homo sapien
catatgctaatcaaaaaattcaaaccaaagata

SEQ ID NO: 414334 - DNA, 33 bp, Homo sapien
catatgctaatcaaaacattcaaaccaaagata

SEQ ID NO: 414335 - DNA, 33 bp, Homo sapien
gttggttcaataatcaacgtctagctgggtcag

SEQ ID NO: 414336 - DNA, 33 bp, Homo sapien
gttggttcaataatcagcgtctagctgggtcag

SEQ ID NO: 414337 - DNA, 33 bp, Homo sapien
taaaaaatgaaaattacagccgtggccaagctc

SEQ ID NO: 414338 - DNA, 33 bp, Homo sapien
taaaaaatgaaaattatagccgtggccaagctc

SEQ ID NO: 414339 - DNA, 33 bp, Homo sapien
tatagaggacacatgaagattctgcaggtgtga

SEQ ID NO: 414340 - DNA, 33 bp, Homo sapien
tatagaggacacatgaggattctgcaggtgtga

SEQ ID NO: 414341 - DNA, 33 bp, Homo sapien
ttcctttgaacttggactaaccaagcaatagac

SEQ ID NO: 414342 - DNA, 33 bp, Homo sapien
ttcctttgaacttggagtaaccaagcaatagac

SEQ ID NO: 414343 - DNA, 33 bp, Homo sapien
ttctctgcattatcggaatctctactgtggcca

SEQ ID NO: 414344 - DNA, 33 bp, Homo sapien
ttctctgcattatcgggatctctactgtggcca

SEQ ID NO: 414345 - DNA, 33 bp, Homo sapien
taaaagtaaatataacactaaggtagcagctgg

SEQ ID NO: 414346 - DNA, 33 bp, Homo sapien
taaaagtaaatataacgctaaggtagcagctgg

SEQ ID NO: 414347 - DNA, 33 bp, Homo sapien
ttagtcctgtgaataacgctttaaacccatcca

SEQ ID NO: 414348 - DNA, 33 bp, Homo sapien
ttagtcctgtgaataatgctttaaacccatcca

SEQ ID NO: 414349 - DNA, 33 bp, Homo sapien
aagcctatttaactgacaacataagtgaatcct

SEQ ID NO: 414350 - DNA, 33 bp, Homo sapien
aagcctatttaactgataacataagtgaatcct

SEQ ID NO: 414351 - DNA, 33 bp, Homo sapien
gagggctgaaccataaccttttctctcacagac

SEQ ID NO: 414352 - DNA, 33 bp, Homo sapien
gagggctgaaccataatcttttctctcacagac

SEQ ID NO: 414353 - DNA, 33 bp, Homo sapien
tctatagcaccttcacagatatcagccaggccc

SEQ ID NO: 414354 - DNA, 33 bp, Homo sapien
tctatagcaccttcacggatatcagccaggccc

SEQ ID NO: 414355 - DNA, 33 bp, Homo sapien
ctgtatgtgggctcggcattgtgggctttctct

SEQ ID NO: 414356 - DNA, 33 bp, Homo sapien
ctgtatgtgggctcggtattgtgggctttctct

SEQ ID NO: 414357 - DNA, 33 bp, Homo sapien
ccctgtagccagaatacgagtctaattacagtc

SEQ ID NO: 414358 - DNA, 33 bp, Homo sapien
ccctgtagccagaatatgagtctaattacagtc

SEQ ID NO: 414359 - DNA, 33 bp, Homo sapien
ctgactgataagatgactatttcaggtctcaga

SEQ ID NO: 414360 - DNA, 33 bp, Homo sapien
ctgactgataagatgattatttcaggtctcaga

SEQ ID NO: 414361 - DNA, 33 bp, Homo sapien
gtttgcctgctctcatcaactttattaacctag

SEQ ID NO: 414362 - DNA, 33 bp, Homo sapien
gtttgcctgctctcatgaactttattaacctag

SEQ ID NO: 414363 - DNA, 33 bp, Homo sapien
tgcatcctctctactcaaccaggctgtcttatc

SEQ ID NO: 414364 - DNA, 33 bp, Homo sapien
tgcatcctctctactctaccaggctgtcttatc

SEQ ID NO: 414365 - DNA, 33 bp, Homo sapien
gtattgtctcttttaacactcactcctgcttca

SEQ ID NO: 414366 - DNA, 33 bp, Homo sapien
gtattgtctcttttaatactcactcctgcttca

SEQ ID NO: 414367 - DNA, 33 bp, Homo sapien
aatcaggtaagaaaaaatcatgtctgccaccta

SEQ ID NO: 414368 - DNA, 33 bp, Homo sapien
aatcaggtaagaaaaagtcatgtctgccaccta

SEQ ID NO: 414369 - DNA, 33 bp, Homo sapien
ccctatcagggttcacacacattagcattcttt

SEQ ID NO: 414370 - DNA, 33 bp, Homo sapien
ccctatcagggttcacgcacattagcattcttt

SEQ ID NO: 414371 - DNA, 33 bp, Homo sapien
agaaatgacatgacaccgagcaaacagtattaa

SEQ ID NO: 414372 - DNA, 33 bp, Homo sapien
agaaatgacatgacactgagcaaacagtattaa

SEQ ID NO: 414373 - DNA, 33 bp, Homo sapien
ctccctaacacggattgaagggtgtgtattctt

SEQ ID NO: 414374 - DNA, 33 bp, Homo sapien
ctccctaacacggatttaagggtgtgtattctt

SEQ ID NO: 414375 - DNA, 33 bp, Homo sapien
aaacagcatttgggtaagaaattaggaactagg

SEQ ID NO: 414376 - DNA, 33 bp, Homo sapien
aaacagcatttgggtaggaaattaggaactagg

SEQ ID NO: 414377 - DNA, 33 bp, Homo sapien
tgaggtggctaagttgaaaaaggttaagaactc

SEQ ID NO: 414378 - DNA, 33 bp, Homo sapien
tgaggtggctaagttggaaaaggttaagaactc

SEQ ID NO: 414379 - DNA, 33 bp, Homo sapien
tccctgttctcactgcaacagaagactcaggcc

SEQ ID NO: 414380 - DNA, 33 bp, Homo sapien
tccctgttctcactgcgacagaagactcaggcc

SEQ ID NO: 414381 - DNA, 33 bp, Homo sapien
cagaatgctataaaaaggacagtctgccagtga

SEQ ID NO: 414382 - DNA, 33 bp, Homo sapien
cagaatgctataaaaatgacagtctgccagtga

SEQ ID NO: 414383 - DNA, 33 bp, Homo sapien
ttaccttccactaaagccttgatttcaaactac

SEQ ID NO: 414384 - DNA, 33 bp, Homo sapien
ttaccttccactaaagtcttgatttcaaactac

SEQ ID NO: 414385 - DNA, 33 bp, Homo sapien
atttctgggaacactaacaaaacttaacctatg

SEQ ID NO: 414386 - DNA, 33 bp, Homo sapien
atttctgggaacactatcaaaacttaacctatg

SEQ ID NO: 414387 - DNA, 33 bp, Homo sapien
tggcactgactgatcacgtaaagcaaatatcct

SEQ ID NO: 414388 - DNA, 33 bp, Homo sapien
tggcactgactgatcatgtaaagcaaatatcct

SEQ ID NO: 414389 - DNA, 33 bp, Homo sapien
gtgtttaagtacataaccaaaacatcaagaaac

SEQ ID NO: 414390 - DNA, 33 bp, Homo sapien
gtgtttaagtacataatcaaaacatcaagaaac

SEQ ID NO: 414391 - DNA, 33 bp, Homo sapien
caacccaatctagccacatagagaggccacatg

SEQ ID NO: 414392 - DNA, 33 bp, Homo sapien
caacccaatctagccatatagagaggccacatg

SEQ ID NO: 414393 - DNA, 33 bp, Homo sapien
catctcatagtagttgcaattctttcatggaag

SEQ ID NO: 414394 - DNA, 33 bp, Homo sapien
catctcatagtagttggaattctttcatggaag

SEQ ID NO: 414395 - DNA, 33 bp, Homo sapien
ggcagacttggaacataatgctatttgcctaaa

SEQ ID NO: 414396 - DNA, 33 bp, Homo sapien
ggcagacttggaacatgatgctatttgcctaaa

SEQ ID NO: 414397 - DNA, 33 bp, Homo sapien
cctctggactgaaaaaatacccagttaggttta

SEQ ID NO: 414398 - DNA, 33 bp, Homo sapien
cctctggactgaaaaagtacccagttaggttta

SEQ ID NO: 414399 - DNA, 33 bp, Homo sapien
aattctatgcacttaaatgattatttcaagact

SEQ ID NO: 414400 - DNA, 33 bp, Homo sapien
aattctatgcacttaactgattatttcaagact

SEQ ID NO: 414401 - DNA, 33 bp, Homo sapien
agagtgttgagcagcacagtgttataatcaggt

SEQ ID NO: 414402 - DNA, 33 bp, Homo sapien
agagtgttgagcagcagagtgttataatcaggt

SEQ ID NO: 414403 - DNA, 33 bp, Homo sapien
tagatcctgagatgaactggagctgctgtatta

SEQ ID NO: 414404 - DNA, 33 bp, Homo sapien
tagatcctgagatgaattggagctgctgtatta

SEQ ID NO: 414405 - DNA, 33 bp, Homo sapien
ccaacaggatcttaaactactgtaacaatccat

SEQ ID NO: 414406 - DNA, 33 bp, Homo sapien
ccaacaggatcttaaagtactgtaacaatccat

SEQ ID NO: 414407 - DNA, 33 bp, Homo sapien
tgtttaataggacaaactgatctacatgtaacc

SEQ ID NO: 414408 - DNA, 33 bp, Homo sapien
tgtttaataggacaaattgatctacatgtaacc

SEQ ID NO: 414409 - DNA, 33 bp, Homo sapien
cctacaaaaaaagatacgaatgtcaactctgcc

SEQ ID NO: 414410 - DNA, 33 bp, Homo sapien
cctacaaaaaaagatatgaatgtcaactctgcc

SEQ ID NO: 414411 - DNA, 33 bp, Homo sapien
atctcatcaaagaggacgcctacctgcaatgct

SEQ ID NO: 414412 - DNA, 33 bp, Homo sapien
atctcatcaaagaggatgcctacctgcaatgct

SEQ ID NO: 414413 - DNA, 33 bp, Homo sapien
cataatatttgactgccaaagattaaagtatat

SEQ ID NO: 414414 - DNA, 33 bp, Homo sapien
cataatatttgactgctaaagattaaagtatat

SEQ ID NO: 414415 - DNA, 33 bp, Homo sapien
accagtgcattcctgacgatcttggtgaaagct

SEQ ID NO: 414416 - DNA, 33 bp, Homo sapien
accagtgcattcctgatgatcttggtgaaagct

SEQ ID NO: 414417 - DNA, 33 bp, Homo sapien
aagagaagtcaaacgactataaatttcaggagg

SEQ ID NO: 414418 - DNA, 33 bp, Homo sapien
aagagaagtcaaacgattataaatttcaggagg

SEQ ID NO: 414419 - DNA, 33 bp, Homo sapien
caggcctgactgtctacattgaagccctcttat

SEQ ID NO: 414420 - DNA, 33 bp, Homo sapien
caggcctgactgtctatattgaagccctcttat

SEQ ID NO: 414421 - DNA, 33 bp, Homo sapien
ggttaaacatcacatacagagttcttacacatc

SEQ ID NO: 414422 - DNA, 33 bp, Homo sapien
ggttaaacatcacatagagagttcttacacatc

SEQ ID NO: 414423 - DNA, 33 bp, Homo sapien
tgtataccacaataaaccattattatcagtatc

SEQ ID NO: 414424 - DNA, 33 bp, Homo sapien
tgtataccacaataaagcattattatcagtatc

SEQ ID NO: 414425 - DNA, 33 bp, Homo sapien
tattttcctatagaaactgtaccatttggaaga

SEQ ID NO: 414426 - DNA, 33 bp, Homo sapien
tattttcctatagaaattgtaccatttggaaga

SEQ ID NO: 414427 - DNA, 33 bp, Homo sapien
aaacaaacttaaaacaaggatcatatttatttc

SEQ ID NO: 414428 - DNA, 33 bp, Homo sapien
aaacaaacttaaaacagggatcatatttatttc

SEQ ID NO: 414429 - DNA, 33 bp, Homo sapien
ctgtaaaaactcatacacacccatcatactgcc

SEQ ID NO: 414430 - DNA, 33 bp, Homo sapien
ctgtaaaaactcatacgcacccatcatactgcc

SEQ ID NO: 414431 - DNA, 33 bp, Homo sapien
aaatggaaaataactccgagaacatactgagtt

SEQ ID NO: 414432 - DNA, 33 bp, Homo sapien
aaatggaaaataactctgagaacatactgagtt

SEQ ID NO: 414433 - DNA, 33 bp, Homo sapien
ctccttatatggagtccgacctgattctcttcc

SEQ ID NO: 414434 - DNA, 33 bp, Homo sapien
ctccttatatggagtctgacctgattctcttcc

SEQ ID NO: 414435 - DNA, 33 bp, Homo sapien
agataatttctatccaaaatgactttaagctat

SEQ ID NO: 414436 - DNA, 33 bp, Homo sapien
agataatttctatccagaatgactttaagctat

SEQ ID NO: 414437 - DNA, 33 bp, Homo sapien
ttggtcacagggctacaaatcttgatctgtcca

SEQ ID NO: 414438 - DNA, 33 bp, Homo sapien
ttggtcacagggctaccaatcttgatctgtcca

SEQ ID NO: 414439 - DNA, 33 bp, Homo sapien
agagcaagtaatcagagagttagaactttgaac

SEQ ID NO: 414440 - DNA, 33 bp, Homo sapien
agagcaagtaatcagatagttagaactttgaac

SEQ ID NO: 414441 - DNA, 33 bp, Homo sapien
tacttgagctaggtcacatacagtactgtgtct

SEQ ID NO: 414442 - DNA, 33 bp, Homo sapien
tacttgagctaggtcatatacagtactgtgtct

SEQ ID NO: 414443 - DNA, 33 bp, Homo sapien
gtagtagcccagaagacgagaaaaaaggagttc

SEQ ID NO: 414444 - DNA, 33 bp, Homo sapien
gtagtagcccagaagatgagaaaaaaggagttc

SEQ ID NO: 414445 - DNA, 33 bp, Homo sapien
ggaaagcaagaggtaaatacaggtcaaatcaaa

SEQ ID NO: 414446 - DNA, 33 bp, Homo sapien
ggaaagcaagaggtaactacaggtcaaatcaaa

SEQ ID NO: 414447 - DNA, 33 bp, Homo sapien
ttactttgctttctcacccatccgattcaaaat

SEQ ID NO: 414448 - DNA, 33 bp, Homo sapien
ttactttgctttctcatccatccgattcaaaat

SEQ ID NO: 414449 - DNA, 33 bp, Homo sapien
agatatccaaattttaaacttgatcataggagt

SEQ ID NO: 414450 - DNA, 33 bp, Homo sapien
agatatccaaattttacacttgatcataggagt

SEQ ID NO: 414451 - DNA, 33 bp, Homo sapien
tgctctgagattggaacggacaccaacagcagg

SEQ ID NO: 414452 - DNA, 33 bp, Homo sapien
tgctctgagattggaatggacaccaacagcagg

SEQ ID NO: 414453 - DNA, 33 bp, Homo sapien
cagcctaaatcccataccttcaaaagagacgca

SEQ ID NO: 414454 - DNA, 33 bp, Homo sapien
cagcctaaatcccatagcttcaaaagagacgca

SEQ ID NO: 414455 - DNA, 33 bp, Homo sapien
atgatcctgacttccaccgaaaaacattgtagt

SEQ ID NO: 414456 - DNA, 33 bp, Homo sapien
atgatcctgacttccatcgaaaaacattgtagt

SEQ ID NO: 414457 - DNA, 33 bp, Homo sapien
tctggtcaccactaacaattatatatgtaacct

SEQ ID NO: 414458 - DNA, 33 bp, Homo sapien
tctggtcaccactaacgattatatatgtaacct

SEQ ID NO: 414459 - DNA, 33 bp, Homo sapien
aataaggtcataaacaaccttgactaaagcatc

SEQ ID NO: 414460 - DNA, 33 bp, Homo sapien
aataaggtcataaacatccttgactaaagcatc

SEQ ID NO: 414461 - DNA, 33 bp, Homo sapien
gtcctgactccagataccttaccgagcgagtga

SEQ ID NO: 414462 - DNA, 33 bp, Homo sapien
gtcctgactccagatatcttaccgagcgagtga

SEQ ID NO: 414463 - DNA, 33 bp, Homo sapien
cataaatacatttgcccagctttgcctacagtt

SEQ ID NO: 414464 - DNA, 33 bp, Homo sapien
cataaatacatttgcctagctttgcctacagtt

SEQ ID NO: 414465 - DNA, 33 bp, Homo sapien
ttgagaattttgaatcacttacaacaacttgaa

SEQ ID NO: 414466 - DNA, 33 bp, Homo sapien
ttgagaattttgaatctcttacaacaacttgaa

SEQ ID NO: 414467 - DNA, 33 bp, Homo sapien
caaaagtggcggtcaaatgaattttggggtgag

SEQ ID NO: 414468 - DNA, 33 bp, Homo sapien
caaaagtggcggtcaagtgaattttggggtgag

SEQ ID NO: 414469 - DNA, 33 bp, Homo sapien
ttgggagaaaaggaacccatgaatgaggatttt

SEQ ID NO: 414470 - DNA, 33 bp, Homo sapien
ttgggagaaaaggaactcatgaatgaggatttt

SEQ ID NO: 414471 - DNA, 33 bp, Homo sapien
aaagatttaggagttgcaccaagtttgagtcct

SEQ ID NO: 414472 - DNA, 33 bp, Homo sapien
aaagatttaggagttggaccaagtttgagtcct

SEQ ID NO: 414473 - DNA, 33 bp, Homo sapien
tacagtaaatgccaccgatacttcttggacgga

SEQ ID NO: 414474 - DNA, 33 bp, Homo sapien
tacagtaaatgccacctatacttcttggacgga

SEQ ID NO: 414475 - DNA, 33 bp, Homo sapien
acctgtacacaatatgccaagtggtgtgttggc

SEQ ID NO: 414476 - DNA, 33 bp, Homo sapien
acctgtacacaatatgtcaagtggtgtgttggc

SEQ ID NO: 414477 - DNA, 33 bp, Homo sapien
ctgagtcttgaaagaacaccatacctagatccc

SEQ ID NO: 414478 - DNA, 33 bp, Homo sapien
ctgagtcttgaaagaataccatacctagatccc

SEQ ID NO: 414479 - DNA, 33 bp, Homo sapien
ggatgagtggggaatacagtgagtgcttgatat

SEQ ID NO: 414480 - DNA, 33 bp, Homo sapien
ggatgagtggggaatagagtgagtgcttgatat

SEQ ID NO: 414481 - DNA, 33 bp, Homo sapien
gacgcaatgtgcttgacgatcaaaagtggtaag

SEQ ID NO: 414482 - DNA, 33 bp, Homo sapien
gacgcaatgtgcttgatgatcaaaagtggtaag

SEQ ID NO: 414483 - DNA, 33 bp, Homo sapien
tttactgtttccaggacgcttacattaccatca

SEQ ID NO: 414484 - DNA, 33 bp, Homo sapien
tttactgtttccaggatgcttacattaccatca

SEQ ID NO: 414485 - DNA, 33 bp, Homo sapien
atgatggtatttaaggacactactgatgttctt

SEQ ID NO: 414486 - DNA, 33 bp, Homo sapien
atgatggtatttaaggtcactactgatgttctt

SEQ ID NO: 414487 - DNA, 33 bp, Homo sapien
caatatacctttccaacattatcatccattgct

SEQ ID NO: 414488 - DNA, 33 bp, Homo sapien
caatatacctttccaatattatcatccattgct

SEQ ID NO: 414489 - DNA, 33 bp, Homo sapien
ggagcatgtctaaccaaagggggttgtcaatag

SEQ ID NO: 414490 - DNA, 33 bp, Homo sapien
ggagcatgtctaaccacagggggttgtcaatag

SEQ ID NO: 414491 - DNA, 33 bp, Homo sapien
gggactcaaaggcttccacgggaaaactgcttc

SEQ ID NO: 414492 - DNA, 33 bp, Homo sapien
gggactcaaaggcttctacgggaaaactgcttc

SEQ ID NO: 414493 - DNA, 33 bp, Homo sapien
ttctcattcaggtctcccaacaatagtgcaaag

SEQ ID NO: 414494 - DNA, 33 bp, Homo sapien
ttctcattcaggtctctcaacaatagtgcaaag

SEQ ID NO: 414495 - DNA, 33 bp, Homo sapien
cacagctaaattcccactggattgttggtctga

SEQ ID NO: 414496 - DNA, 33 bp, Homo sapien
cacagctaaattcccattggattgttggtctga

SEQ ID NO: 414497 - DNA, 33 bp, Homo sapien
gtgaggtcctccctaaccatataattcaaattg

SEQ ID NO: 414498 - DNA, 33 bp, Homo sapien
gtgaggtcctccctaagcatataattcaaattg

SEQ ID NO: 414499 - DNA, 33 bp, Homo sapien
ttacactcttacattacggatggctaagtggag

SEQ ID NO: 414500 - DNA, 33 bp, Homo sapien
ttacactcttacattatggatggctaagtggag

SEQ ID NO: 414501 - DNA, 33 bp, Homo sapien
aaagtgagaattttaacggatgtacaaggcaca

SEQ ID NO: 414502 - DNA, 33 bp, Homo sapien
aaagtgagaattttaatggatgtacaaggcaca

SEQ ID NO: 414503 - DNA, 33 bp, Homo sapien
ctgatacttcaaactacaaccttctggtcactt

SEQ ID NO: 414504 - DNA, 33 bp, Homo sapien
ctgatacttcaaactataaccttctggtcactt

SEQ ID NO: 414505 - DNA, 33 bp, Homo sapien
aattgacattggtagaagtgactccttccagtt

SEQ ID NO: 414506 - DNA, 33 bp, Homo sapien
aattgacattggtagaggtgactccttccagtt

SEQ ID NO: 414507 - DNA, 33 bp, Homo sapien
taagtgtatggcaacagggaaaggtctgtgcct

SEQ ID NO: 414508 - DNA, 33 bp, Homo sapien
taagtgtatggcaacatggaaaggtctgtgcct

SEQ ID NO: 414509 - DNA, 33 bp, Homo sapien
cagaattttccctaaccctcagaccaagaaaag

SEQ ID NO: 414510 - DNA, 33 bp, Homo sapien
cagaattttccctaactctcagaccaagaaaag

SEQ ID NO: 414511 - DNA, 33 bp, Homo sapien
ttgaatttgcagctaaccaaaaagtaggaaaag

SEQ ID NO: 414512 - DNA, 33 bp, Homo sapien
ttgaatttgcagctaatcaaaaagtaggaaaag

SEQ ID NO: 414513 - DNA, 33 bp, Homo sapien
tctctctccatcttccaattctaaccttgaatt

SEQ ID NO: 414514 - DNA, 33 bp, Homo sapien
tctctctccatcttccgattctaaccttgaatt

SEQ ID NO: 414515 - DNA, 33 bp, Homo sapien
tatctgtgctataagaagtcttaagagttcatt

SEQ ID NO: 414516 - DNA, 33 bp, Homo sapien
tatctgtgctataagatgtcttaagagttcatt

SEQ ID NO: 414517 - DNA, 33 bp, Homo sapien
ctgtttcaccaaaagcaatcagagaatgttgat

SEQ ID NO: 414518 - DNA, 33 bp, Homo sapien
ctgtttcaccaaaagcgatcagagaatgttgat

SEQ ID NO: 414519 - DNA, 33 bp, Homo sapien
tgttcatgcattagggaaggccaggtataatat

SEQ ID NO: 414520 - DNA, 33 bp, Homo sapien
tgttcatgcattaggggaggccaggtataatat

SEQ ID NO: 414521 - DNA, 33 bp, Homo sapien
tgcacaggacctttctaactatagggctctgtg

SEQ ID NO: 414522 - DNA, 33 bp, Homo sapien
tgcacaggacctttctcactatagggctctgtg

SEQ ID NO: 414523 - DNA, 33 bp, Homo sapien
cacttctctgcaaatacgtaaaagggaatggca

SEQ ID NO: 414524 - DNA, 33 bp, Homo sapien
cacttctctgcaaataggtaaaagggaatggca

SEQ ID NO: 414525 - DNA, 33 bp, Homo sapien
aaatctttaacaggaaaacaaaagggccacttc

SEQ ID NO: 414526 - DNA, 33 bp, Homo sapien
aaatctttaacaggaagacaaaagggccacttc

SEQ ID NO: 414527 - DNA, 33 bp, Homo sapien
tcacaggtaaatgaagcaaatgttggaaactag

SEQ ID NO: 414528 - DNA, 33 bp, Homo sapien
tcacaggtaaatgaagtaaatgttggaaactag

SEQ ID NO: 414529 - DNA, 33 bp, Homo sapien
caggatttccaagtaacgaagaatcaagctagg

SEQ ID NO: 414530 - DNA, 33 bp, Homo sapien
caggatttccaagtaatgaagaatcaagctagg

SEQ ID NO: 414531 - DNA, 33 bp, Homo sapien
tctggtacatggtaaaggataaaaaatatttga

SEQ ID NO: 414532 - DNA, 33 bp, Homo sapien
tctggtacatggtaaatgataaaaaatatttga

SEQ ID NO: 414533 - DNA, 33 bp, Homo sapien
atctttaaaaatcaaacgctttatacttccttg

SEQ ID NO: 414534 - DNA, 33 bp, Homo sapien
atctttaaaaatcaaatgctttatacttccttg

SEQ ID NO: 414535 - DNA, 33 bp, Homo sapien
gaagatcataggtatacatgtaactcttctaac

SEQ ID NO: 414536 - DNA, 33 bp, Homo sapien
gaagatcataggtatatatgtaactcttctaac

SEQ ID NO: 414537 - DNA, 33 bp, Homo sapien
aatgcatttgtgtatacggtccatgaaaatgtt

SEQ ID NO: 414538 - DNA, 33 bp, Homo sapien
aatgcatttgtgtatatggtccatgaaaatgtt

SEQ ID NO: 414539 - DNA, 33 bp, Homo sapien; identical to SEQ ID NO: 414537

SEQ ID NO: 414540 - DNA, 33 bp, Homo sapien; identical to SEQ ID NO: 414538

SEQ ID NO: 414541 - DNA, 33 bp, Homo sapien
atgtttgatctctttacacagtctctcacattt

SEQ ID NO: 414542 - DNA, 33 bp, Homo sapien
atgtttgatctctttatacagtctctcacattt

SEQ ID NO: 414543 - DNA, 33 bp, Homo sapien
aatttaggagaatatgaaaggagagcatgtggt

SEQ ID NO: 414544 - DNA, 33 bp, Homo sapien
aatttaggagaatatggaaggagagcatgtggt

SEQ ID NO: 414545 - DNA, 33 bp, Homo sapien
tatttatcatgaccaacaagttttttgaaatac

SEQ ID NO: 414546 - DNA, 33 bp, Homo sapien
tatttatcatgaccaataagttttttgaaatac

SEQ ID NO: 414547 - DNA, 33 bp, Homo sapien
atggtggttaccagagactcgcgctgataagat

SEQ ID NO: 414548 - DNA, 33 bp, Homo sapien
atggtggttaccagaggctcgcgctgataagat

SEQ ID NO: 414549 - DNA, 33 bp, Homo sapien
ggtggtcttgcattgactaagagggtaagtgga

SEQ ID NO: 414550 - DNA, 33 bp, Homo sapien
ggtggtcttgcattgagtaagagggtaagtgga

SEQ ID NO: 414551 - DNA, 33 bp, Homo sapien
tagggagagccatcagaaagagcaaaggtgttg

SEQ ID NO: 414552 - DNA, 33 bp, Homo sapien
tagggagagccatcaggaagagcaaaggtgttg

SEQ ID NO: 414553 - DNA, 33 bp, Homo sapien
agcaggtgcaagggtaggagatggtgtcaggga

SEQ ID NO: 414554 - DNA, 33 bp, Homo sapien
agcaggtgcaagggtatgagatggtgtcaggga

SEQ ID NO: 414555 - DNA, 33 bp, Homo sapien
tgagagttggaaataaataggcttgtgttatgc

SEQ ID NO: 414556 - DNA, 33 bp, Homo sapien
tgagagttggaaataagtaggcttgtgttatgc

SEQ ID NO: 414557 - DNA, 33 bp, Homo sapien
actcctggaggcaaaactcaaaagtgtgtctct

SEQ ID NO: 414558 - DNA, 33 bp, Homo sapien
actcctggaggcaaaattcaaaagtgtgtctct

SEQ ID NO: 414559 - DNA, 33 bp, Homo sapien
tgcctgggaagaagcaagagtaagttcatgaaa

SEQ ID NO: 414560 - DNA, 33 bp, Homo sapien
tgcctgggaagaagcaggagtaagttcatgaaa

SEQ ID NO: 414561 - DNA, 33 bp, Homo sapien
actcaaaaatgttacccgaagtgcattttttaa

SEQ ID NO: 414562 - DNA, 33 bp, Homo sapien
actcaaaaatgttaccggaagtgcattttttaa

SEQ ID NO: 414563 - DNA, 33 bp, Homo sapien
aaatggattacttttcaatgtgcatttggggag

SEQ ID NO: 414564 - DNA, 33 bp, Homo sapien
aaatggattacttttcgatgtgcatttggggag

SEQ ID NO: 414565 - DNA, 33 bp, Homo sapien
gctttagctgaaaaacgaaggaactaattaaat

SEQ ID NO: 414566 - DNA, 33 bp, Homo sapien
gctttagctgaaaaactaaggaactaattaaat

SEQ ID NO: 414567 - DNA, 33 bp, Homo sapien
attatctttgatgcaactactcttcccctggaa

SEQ ID NO: 414568 - DNA, 33 bp, Homo sapien
attatctttgatgcaattactcttcccctggaa

SEQ ID NO: 414569 - DNA, 33 bp, Homo sapien
ctatgagtttggaacacgaattatctatctgtg

SEQ ID NO: 414570 - DNA, 33 bp, Homo sapien
ctatgagtttggaacatgaattatctatctgtg

SEQ ID NO: 414571 - DNA, 33 bp, Homo sapien
ctcaatagaagtgttacgctagcaaggaattag

SEQ ID NO: 414572 - DNA, 33 bp, Homo sapien
ctcaatagaagtgttatgctagcaaggaattag

SEQ ID NO: 414573 - DNA, 33 bp, Homo sapien
ttgtgtttcccttacaagtttcatgttggtgag

SEQ ID NO: 414574 - DNA, 33 bp, Homo sapien
ttgtgtttcccttacacgtttcatgttggtgag

SEQ ID NO: 414575 - DNA, 33 bp, Homo sapien
gtcaagagacaggaaactaagaaatctaagtaa

SEQ ID NO: 414576 - DNA, 33 bp, Homo sapien
gtcaagagacaggaaattaagaaatctaagtaa

SEQ ID NO: 414577 - DNA, 33 bp, Homo sapien
tggatgcaaaacataacattctaatagaggctt

SEQ ID NO: 414578 - DNA, 33 bp, Homo sapien
tggatgcaaaacataagattctaatagaggctt

SEQ ID NO: 414579 - DNA, 33 bp, Homo sapien
gacacaatagtgcagacacacacgaacaatatt

SEQ ID NO: 414580 - DNA, 33 bp, Homo sapien
gacacaatagtgcagagacacacgaacaatatt

SEQ ID NO: 414581 - DNA, 33 bp, Homo sapien
tggtgactcttaacaactaacatctcaaggaca

SEQ ID NO: 414582 - DNA, 33 bp, Homo sapien
tggtgactcttaacaagtaacatctcaaggaca

SEQ ID NO: 414583 - DNA, 33 bp, Homo sapien
tcttttcacacctggacagagtgcttaagatgg

SEQ ID NO: 414584 - DNA, 33 bp, Homo sapien
tcttttcacacctggatagagtgcttaagatgg

SEQ ID NO: 414585 - DNA, 33 bp, Homo sapien
atgattcaagggtatgcattcagttcaagcaaa

SEQ ID NO: 414586 - DNA, 33 bp, Homo sapien
atgattcaagggtatgtattcagttcaagcaaa

SEQ ID NO: 414587 - DNA, 33 bp, Homo sapien
acattccatgtcctgtcacagcttgggtgagag

SEQ ID NO: 414588 - DNA, 33 bp, Homo sapien
acattccatgtcctgtgacagcttgggtgagag

SEQ ID NO: 414589 - DNA, 33 bp, Homo sapien
aacatctacctaaaagcacattggaatgaacca

SEQ ID NO: 414590 - DNA, 33 bp, Homo sapien
aacatctacctaaaagtacattggaatgaacca

SEQ ID NO: 414591 - DNA, 33 bp, Homo sapien
tattatcttacctcccaataatggccataagaa

SEQ ID NO: 414592 - DNA, 33 bp, Homo sapien
tattatcttacctccccataatggccataagaa

SEQ ID NO: 414593 - DNA, 33 bp, Homo sapien
caggcgatcttagtacagataacaaaaaataga

SEQ ID NO: 414594 - DNA, 33 bp, Homo sapien
caggcgatcttagtacggataacaaaaaataga

SEQ ID NO: 414595 - DNA, 33 bp, Homo sapien
gcatcaataccaaatcacaatttaaaccaagtt

SEQ ID NO: 414596 - DNA, 33 bp, Homo sapien
gcatcaataccaaatcgcaatttaaaccaagtt

SEQ ID NO: 414597 - DNA, 33 bp, Homo sapien
tgattgtaatagggttcaaaagagaatagagaa

SEQ ID NO: 414598 - DNA, 33 bp, Homo sapien
tgattgtaatagggttgaaaagagaatagagaa

SEQ ID NO: 414599 - DNA, 33 bp, Homo sapien
tcgtttggggttgaacagctaactctgtatctg

SEQ ID NO: 414600 - DNA, 33 bp, Homo sapien
tcgtttggggttgaacggctaactctgtatctg

SEQ ID NO: 414601 - DNA, 33 bp, Homo sapien
aggatgggaaagagtcaaggttctttgcaagga

SEQ ID NO: 414602 - DNA, 33 bp, Homo sapien
aggatgggaaagagtcgaggttctttgcaagga

SEQ ID NO: 414603 - DNA, 33 bp, Homo sapien
taccactccagctctacctcatacttctcccca

SEQ ID NO: 414604 - DNA, 33 bp, Homo sapien
taccactccagctctatctcatacttctcccca

SEQ ID NO: 414605 - DNA, 33 bp, Homo sapien
acctacacttaagaagaacacacttggaagagg

SEQ ID NO: 414606 - DNA, 33 bp, Homo sapien
acctacacttaagaagcacacacttggaagagg

SEQ ID NO: 414607 - DNA, 33 bp, Homo sapien
tatttgtcaggccaacaagacagatcatcctga

SEQ ID NO: 414608 - DNA, 33 bp, Homo sapien
tatttgtcaggccaacgagacagatcatcctga

SEQ ID NO: 414609 - DNA, 33 bp, Homo sapien
tgctatagaagaataacgaatcatcctgtcctg

SEQ ID NO: 414610 - DNA, 33 bp, Homo sapien
tgctatagaagaataatgaatcatcctgtcctg

SEQ ID NO: 414611 - DNA, 33 bp, Homo sapien
gaaaatgggaattgagacatcagccaataacac

SEQ ID NO: 414612 - DNA, 33 bp, Homo sapien
gaaaatgggaattgagccatcagccaataacac

SEQ ID NO: 414613 - DNA, 33 bp, Homo sapien
ttgagcagaaacaagaggaaaggcaaaataaca

SEQ ID NO: 414614 - DNA, 33 bp, Homo sapien
ttgagcagaaacaagatgaaaggcaaaataaca

SEQ ID NO: 414615 - DNA, 33 bp, Homo sapien
actccacttaaagccacaaactcccgtaaggca

SEQ ID NO: 414616 - DNA, 33 bp, Homo sapien
actccacttaaagccagaaactcccgtaaggca

SEQ ID NO: 414617 - DNA, 33 bp, Homo sapien
aattcatcactaaatacgtgttcagcaccttct

SEQ ID NO: 414618 - DNA, 33 bp, Homo sapien
aattcatcactaaatatgtgttcagcaccttct

SEQ ID NO: 414619 - DNA, 33 bp, Homo sapien
gcccactcagaaatgacgaaatacaaatattta

SEQ ID NO: 414620 - DNA, 33 bp, Homo sapien
gcccactcagaaatgatgaaatacaaatattta

SEQ ID NO: 414621 - DNA, 33 bp, Homo sapien
acatgaagagatcctacggtgagagagaaagca

SEQ ID NO: 414622 - DNA, 33 bp, Homo sapien
acatgaagagatcctatggtgagagagaaagca

SEQ ID NO: 414623 - DNA, 33 bp, Homo sapien
atgaaaacttttacaaaaaatcaatgtcaggtc

SEQ ID NO: 414624 - DNA, 33 bp, Homo sapien
atgaaaacttttacaacaaatcaatgtcaggtc

SEQ ID NO: 414625 - DNA, 33 bp, Homo sapien
gctcatatctcttaacaacccaacaatctcctt

SEQ ID NO: 414626 - DNA, 33 bp, Homo sapien
gctcatatctcttaactacccaacaatctcctt

SEQ ID NO: 414627 - DNA, 33 bp, Homo sapien
actaaaagtatgacacaattgatcttaaaatta

SEQ ID NO: 414628 - DNA, 33 bp, Homo sapien
actaaaagtatgacactattgatcttaaaatta

SEQ ID NO: 414629 - DNA, 33 bp, Homo sapien
ttggttgaacaactgtcacagacaactcttcta

SEQ ID NO: 414630 - DNA, 33 bp, Homo sapien
ttggttgaacaactgttacagacaactcttcta

SEQ ID NO: 414631 - DNA, 33 bp, Homo sapien
atcaattctagcaaacaaattactggcctcaaa

SEQ ID NO: 414632 - DNA, 33 bp, Homo sapien
atcaattctagcaaacgaattactggcctcaaa

SEQ ID NO: 414633 - DNA, 33 bp, Homo sapien
ttatgtaacactagccaaatggtagcctctggg

SEQ ID NO: 414634 - DNA, 33 bp, Homo sapien
ttatgtaacactagccgaatggtagcctctggg

SEQ ID NO: 414635 - DNA, 33 bp, Homo sapien
attgagataattaagcaagaccggttatggtaa

SEQ ID NO: 414636 - DNA, 33 bp, Homo sapien
attgagataattaagccagaccggttatggtaa

SEQ ID NO: 414637 - DNA, 33 bp, Homo sapien
gctttacaaaatatgccgcaccgggagagtgga

SEQ ID NO: 414638 - DNA, 33 bp, Homo sapien
gctttacaaaatatgctgcaccgggagagtgga

SEQ ID NO: 414639 - DNA, 33 bp, Homo sapien
atctgccatgaatgaaacaactgccaggcagag

SEQ ID NO: 414640 - DNA, 33 bp, Homo sapien
atctgccatgaatgaagcaactgccaggcagag

SEQ ID NO: 414641 - DNA, 33 bp, Homo sapien
tacctctttcacaccactgaagaatctatctct

SEQ ID NO: 414642 - DNA, 33 bp, Homo sapien
tacctctttcacaccattgaagaatctatctct

SEQ ID NO: 414643 - DNA, 33 bp, Homo sapien
actttcatttttggcacgaactgcattatttcc

SEQ ID NO: 414644 - DNA, 33 bp, Homo sapien
actttcatttttggcatgaactgcattatttcc

SEQ ID NO: 414645 - DNA, 33 bp, Homo sapien
cattgcttactaattacggatgtcaaatgataa

SEQ ID NO: 414646 - DNA, 33 bp, Homo sapien
cattgcttactaattatggatgtcaaatgataa

SEQ ID NO: 414647 - DNA, 33 bp, Homo sapien
gaaagagtttggtccacgttacaatttcttccc

SEQ ID NO: 414648 - DNA, 33 bp, Homo sapien
gaaagagtttggtccatgttacaatttcttccc

SEQ ID NO: 414649 - DNA, 33 bp, Homo sapien
aattgatttatgtacacctctgacagcaaataa

SEQ ID NO: 414650 - DNA, 33 bp, Homo sapien
aattgatttatgtacatctctgacagcaaataa

SEQ ID NO: 414651 - DNA, 33 bp, Homo sapien
tatttatgtcttcctacgtcaacaggcaagtct

SEQ ID NO: 414652 - DNA, 33 bp, Homo sapien
tatttatgtcttcctatgtcaacaggcaagtct

SEQ ID NO: 414653 - DNA, 33 bp, Homo sapien
aaagaactccatctgaaaatagacaaagttgga

SEQ ID NO: 414654 - DNA, 33 bp, Homo sapien
aaagaactccatctgagaatagacaaagttgga

SEQ ID NO: 414655 - DNA, 33 bp, Homo sapien
ttcataggatgcgttacgaattatcactgccat

SEQ ID NO: 414656 - DNA, 33 bp, Homo sapien
ttcataggatgcgttaggaattatcactgccat

SEQ ID NO: 414657 - DNA, 33 bp, Homo sapien
gttgcatcattgggaacctaattaatcaaaaga

SEQ ID NO: 414658 - DNA, 33 bp, Homo sapien
gttgcatcattgggaatctaattaatcaaaaga

SEQ ID NO: 414659 - DNA, 33 bp, Homo sapien
cttgggtagaatcccacgaaagcagggttacca

SEQ ID NO: 414660 - DNA, 33 bp, Homo sapien
cttgggtagaatcccatgaaagcagggttacca

SEQ ID NO: 414661 - DNA, 33 bp, Homo sapien; identical to SEQ ID NO: 414659

SEQ ID NO: 414662 - DNA, 33 bp, Homo sapien; identical to SEQ ID NO: 414660

SEQ ID NO: 414663 - DNA, 33 bp, Homo sapien
gaatttctgacaatgacggcaagaaaaatgaaa

SEQ ID NO: 414664 - DNA, 33 bp, Homo sapien
gaatttctgacaatgatggcaagaaaaatgaaa

SEQ ID NO: 414665 - DNA, 33 bp, Homo sapien
gcctattgctttactaacctgttcattttcatg

SEQ ID NO: 414666 - DNA, 33 bp, Homo sapien
gcctattgctttactagcctgttcattttcatg

SEQ ID NO: 414667 - DNA, 33 bp, Homo sapien
taagggaaagagcatacaagagaattggtggct

SEQ ID NO: 414668 - DNA, 33 bp, Homo sapien
taagggaaagagcatagaagagaattggtggct

SEQ ID NO: 414669 - DNA, 33 bp, Homo sapien
tcaccccaccttaaaacggacacatcctaatct

SEQ ID NO: 414670 - DNA, 33 bp, Homo sapien
tcaccccaccttaaaatggacacatcctaatct

SEQ ID NO: 414671 - DNA, 33 bp, Homo sapien
agctagggagcgtatcctgggttattcatgtgg

SEQ ID NO: 414672 - DNA, 33 bp, Homo sapien
agctagggagcgtatcgtgggttattcatgtgg

SEQ ID NO: 414673 - DNA, 33 bp, Homo sapien
attcatagcaatgctcaaacgttgtaatttggg

SEQ ID NO: 414674 - DNA, 33 bp, Homo sapien
attcatagcaatgctcgaacgttgtaatttggg

SEQ ID NO: 414675 - DNA, 33 bp, Homo sapien
ttagcctcttccaaacagtataaatcaaagtgg

SEQ ID NO: 414676 - DNA, 33 bp, Homo sapien
ttagcctcttccaaaccgtataaatcaaagtgg

SEQ ID NO: 414677 - DNA, 33 bp, Homo sapien
tttttgttctgtagtcaagatagcctcgaatgc

SEQ ID NO: 414678 - DNA, 33 bp, Homo sapien
tttttgttctgtagtccagatagcctcgaatgc

SEQ ID NO: 414679 - DNA, 33 bp, Homo sapien
aaataataccaattcaagtggaaaataaccatt

SEQ ID NO: 414680 - DNA, 33 bp, Homo sapien
aaataataccaattcaggtggaaaataaccatt

SEQ ID NO: 414681 - DNA, 33 bp, Homo sapien
gctgaggaccagctaacctatgcataaatgtga

SEQ ID NO: 414682 - DNA, 33 bp, Homo sapien
gctgaggaccagctaagctatgcataaatgtga

SEQ ID NO: 414683 - DNA, 33 bp, Homo sapien
ccaattcaaatgctaaactttttcagaagcatt

SEQ ID NO: 414684 - DNA, 33 bp, Homo sapien
ccaattcaaatgctaacctttttcagaagcatt

SEQ ID NO: 414685 - DNA, 33 bp, Homo sapien
gcagcaaccttccaagccttcgagtgctattgc

SEQ ID NO: 414686 - DNA, 33 bp, Homo sapien
gcagcaaccttccaagtcttcgagtgctattgc

SEQ ID NO: 414687 - DNA, 33 bp, Homo sapien
tataaaggaagacgaccgcaaacgtgtgacatg

SEQ ID NO: 414688 - DNA, 33 bp, Homo sapien
tataaaggaagacgactgcaaacgtgtgacatg

SEQ ID NO: 414689 - DNA, 33 bp, Homo sapien
gtgttctggaaagatcacttaattaggagtcac

SEQ ID NO: 414690 - DNA, 33 bp, Homo sapien
gtgttctggaaagatcgcttaattaggagtcac

SEQ ID NO: 414691 - DNA, 33 bp, Homo sapien
tggttagaatgcagcggattattttggttttgt

SEQ ID NO: 414692 - DNA, 33 bp, Homo sapien
tggttagaatgcagcgtattattttggttttgt

SEQ ID NO: 414693 - DNA, 33 bp, Homo sapien
agttcctgtccacaaaacagattacaatctatc

SEQ ID NO: 414694 - DNA, 33 bp, Homo sapien
agttcctgtccacaaagcagattacaatctatc

SEQ ID NO: 414695 - DNA, 33 bp, Homo sapien
tgtggaagagtaggaaagtgatgttaaaacaaa

SEQ ID NO: 414696 - DNA, 33 bp, Homo sapien
tgtggaagagtaggaacgtgatgttaaaacaaa

SEQ ID NO: 414697 - DNA, 33 bp, Homo sapien
aaacctctctgagttccagttgtcttcagttga

SEQ ID NO: 414698 - DNA, 33 bp, Homo sapien
aaacctctctgagttctagttgtcttcagttga

SEQ ID NO: 414699 - DNA, 33 bp, Homo sapien
gtgctgcccatgttaactagtgtctaccctacc

SEQ ID NO: 414700 - DNA, 33 bp, Homo sapien
gtgctgcccatgttaattagtgtctaccctacc

SEQ ID NO: 414701 - DNA, 33 bp, Homo sapien
aagatggaaagcaggacgagtgagctaaggtga

SEQ ID NO: 414702 - DNA, 33 bp, Homo sapien
aagatggaaagcaggatgagtgagctaaggtga

SEQ ID NO: 414703 - DNA, 33 bp, Homo sapien
ttccattttgctctgacgggctccaattctggc

SEQ ID NO: 414704 - DNA, 33 bp, Homo sapien
ttccattttgctctgatgggctccaattctggc

SEQ ID NO: 414705 - DNA, 33 bp, Homo sapien
tttctaagtatagcaacggtatgggatgtgtgt

SEQ ID NO: 414706 - DNA, 33 bp, Homo sapien
tttctaagtatagcaatggtatgggatgtgtgt

SEQ ID NO: 414707 - DNA, 33 bp, Homo sapien
ataccttttgacgaaccggaaataccttttgac

SEQ ID NO: 414708 - DNA, 33 bp, Homo sapien
ataccttttgacgaactggaaataccttttgac

SEQ ID NO: 414709 - DNA, 33 bp, Homo sapien
agaaatgttcaagaagcctcgatcaccattgac

SEQ ID NO: 414710 - DNA, 33 bp, Homo sapien
agaaatgttcaagaagtctcgatcaccattgac

SEQ ID NO: 414711 - DNA, 33 bp, Homo sapien
atctattcctgaatgaatcagttgtcaatggtg

SEQ ID NO: 414712 - DNA, 33 bp, Homo sapien
atctattcctgaatgagtcagttgtcaatggtg

SEQ ID NO: 414713 - DNA, 33 bp, Homo sapien
cctgtcctctctttaaatgctccaaatatgctt

SEQ ID NO: 414714 - DNA, 33 bp, Homo sapien
cctgtcctctctttaactgctccaaatatgctt

SEQ ID NO: 414715 - DNA, 33 bp, Homo sapien
gaaccaagcaaatatacccagttccccataacc

SEQ ID NO: 414716 - DNA, 33 bp, Homo sapien
gaaccaagcaaatatatccagttccccataacc

SEQ ID NO: 414717 - DNA, 33 bp, Homo sapien
ttctgcacataatcaaaagttgggcagcatcca

SEQ ID NO: 414718 - DNA, 33 bp, Homo sapien
ttctgcacataatcaagagttgggcagcatcca

SEQ ID NO: 414719 - DNA, 33 bp, Homo sapien
attgtaccaacagggacgagtaacatttagctt

SEQ ID NO: 414720 - DNA, 33 bp, Homo sapien
attgtaccaacagggatgagtaacatttagctt

SEQ ID NO: 414721 - DNA, 33 bp, Homo sapien
gctactggtctgtgtacggttcagttacttttt

SEQ ID NO: 414722 - DNA, 33 bp, Homo sapien
gctactggtctgtgtatggttcagttacttttt

SEQ ID NO: 414723 - DNA, 33 bp, Homo sapien
atgcagtgttatgaaaaagtatcagaactatca

SEQ ID NO: 414724 - DNA, 33 bp, Homo sapien
atgcagtgttatgaaagagtatcagaactatca

SEQ ID NO: 414725 - DNA, 33 bp, Homo sapien
attctccactttttccacaaggtagattatgtt

SEQ ID NO: 414726 - DNA, 33 bp, Homo sapien
attctccactttttccgcaaggtagattatgtt

SEQ ID NO: 414727 - DNA, 33 bp, Homo sapien
ttcatttctttgccatcatcaggttagatgtgg

SEQ ID NO: 414728 - DNA, 33 bp, Homo sapien
ttcatttctttgccattatcaggttagatgtgg

SEQ ID NO: 414729 - DNA, 33 bp, Homo sapien
ggagagttgacacacagcattgacacaacttac

SEQ ID NO: 414730 - DNA, 33 bp, Homo sapien
ggagagttgacacacatcattgacacaacttac

SEQ ID NO: 414731 - DNA, 33 bp, Homo sapien
agccagtccttccttcaagggccgtgtggttgt

SEQ ID NO: 414732 - DNA, 33 bp, Homo sapien
agccagtccttccttcgagggccgtgtggttgt

SEQ ID NO: 414733 - DNA, 33 bp, Homo sapien
ctatggtagtccattacagcagcataagacgat

SEQ ID NO: 414734 - DNA, 33 bp, Homo sapien
ctatggtagtccattatagcagcataagacgat

SEQ ID NO: 414735 - DNA, 33 bp, Homo sapien
ccatcccagctctatgaaatagtttattatgtg

SEQ ID NO: 414736 - DNA, 33 bp, Homo sapien
ccatcccagctctatggaatagtttattatgtg

SEQ ID NO: 414737 - DNA, 33 bp, Homo sapien
gaaaacaaaactaaaacatgagctaccagttaa

SEQ ID NO: 414738 - DNA, 33 bp, Homo sapien
gaaaacaaaactaaaatatgagctaccagttaa

SEQ ID NO: 414739 - DNA, 33 bp, Homo sapien
atcttacattgttcacaaagtggtaagagcact

SEQ ID NO: 414740 - DNA, 33 bp, Homo sapien
atcttacattgttcaccaagtggtaagagcact

SEQ ID NO: 414741 - DNA, 33 bp, Homo sapien
aggtccattgccatgaaagaggcagagtgggca

SEQ ID NO: 414742 - DNA, 33 bp, Homo sapien
aggtccattgccatgagagaggcagagtgggca

SEQ ID NO: 414743 - DNA, 33 bp, Homo sapien
atacatctgttaaacaaacctgtataaaatggt

SEQ ID NO: 414744 - DNA, 33 bp, Homo sapien
atacatctgttaaacatacctgtataaaatggt

SEQ ID NO: 414745 - DNA, 33 bp, Homo sapien
gataactgaaagtacaatgactgcctacggtgt

SEQ ID NO: 414746 - DNA, 33 bp, Homo sapien
gataactgaaagtacagtgactgcctacggtgt

SEQ ID NO: 414747 - DNA, 33 bp, Homo sapien
aaatccattcaacaatcatcatctgtgtgatgg

SEQ ID NO: 414748 - DNA, 33 bp, Homo sapien
aaatccattcaacaattatcatctgtgtgatgg

SEQ ID NO: 414749 - DNA, 33 bp, Homo sapien
agtttgtactaactggaatgagtcattaccttg

SEQ ID NO: 414750 - DNA, 33 bp, Homo sapien
agtttgtactaactggtatgagtcattaccttg

SEQ ID NO: 414751 - DNA, 33 bp, Homo sapien
tgcatgactctatttgaaaatgtgatttgccca

SEQ ID NO: 414752 - DNA, 33 bp, Homo sapien
tgcatgactctatttggaaatgtgatttgccca

SEQ ID NO: 414753 - DNA, 33 bp, Homo sapien
tttttcatcctttatacggacatgggtgattat

SEQ ID NO: 414754 - DNA, 33 bp, Homo sapien
tttttcatcctttatatggacatgggtgattat

SEQ ID NO: 414755 - DNA, 33 bp, Homo sapien
ctccatagatggcacactctcgaaaagacattt

SEQ ID NO: 414756 - DNA, 33 bp, Homo sapien
ctccatagatggcacattctcgaaaagacattt

SEQ ID NO: 414757 - DNA, 33 bp, Homo sapien
tgaattatctttaaaacctgttctaatgctcat

SEQ ID NO: 414758 - DNA, 33 bp, Homo sapien
tgaattatctttaaaagctgttctaatgctcat

SEQ ID NO: 414759 - DNA, 33 bp, Homo sapien
tgattacattcaaaaagtcttagcactcgcttt

SEQ ID NO: 414760 - DNA, 33 bp, Homo sapien
tgattacattcaaaaattcttagcactcgcttt

SEQ ID NO: 414761 - DNA, 33 bp, Homo sapien
agggaattggtaagacaaactttatctttcttt

SEQ ID NO: 414762 - DNA, 33 bp, Homo sapien
agggaattggtaagacgaactttatctttcttt

SEQ ID NO: 414763 - DNA, 33 bp, Homo sapien
aacctattggttttgccgagaactcttcattga

SEQ ID NO: 414764 - DNA, 33 bp, Homo sapien
aacctattggttttgctgagaactcttcattga

SEQ ID NO: 414765 - DNA, 33 bp, Homo sapien
gacattaagaaaggcccagaggaagatctacac

SEQ ID NO: 414766 - DNA, 33 bp, Homo sapien
gacattaagaaaggcctagaggaagatctacac

SEQ ID NO: 414767 - DNA, 33 bp, Homo sapien
atgtggtgtgcttgaacatttaatggcggcagt

SEQ ID NO: 414768 - DNA, 33 bp, Homo sapien
atgtggtgtgcttgaatatttaatggcggcagt

SEQ ID NO: 414769 - DNA, 33 bp, Homo sapien
tgactcacatctcttcaagggatcaacaattgt

SEQ ID NO: 414770 - DNA, 33 bp, Homo sapien
tgactcacatctcttcgagggatcaacaattgt

SEQ ID NO: 414771 - DNA, 33 bp, Homo sapien
agctatacttttcagagccattccaatattctt

SEQ ID NO: 414772 - DNA, 33 bp, Homo sapien
agctatacttttcagatccattccaatattctt

SEQ ID NO: 414773 - DNA, 33 bp, Homo sapien
tagctagagcttgtcacccattcaagatgcttt

SEQ ID NO: 414774 - DNA, 33 bp, Homo sapien
tagctagagcttgtcatccattcaagatgcttt

SEQ ID NO: 414775 - DNA, 33 bp, Homo sapien
aggaaaaaaatcacataatcatatcagtagctg

SEQ ID NO: 414776 - DNA, 33 bp, Homo sapien
aggaaaaaaatcacatgatcatatcagtagctg

SEQ ID NO: 414777 - DNA, 33 bp, Homo sapien
aagaattttaagctacccacgaaataaatgaat

SEQ ID NO: 414778 - DNA, 33 bp, Homo sapien
aagaattttaagctactcacgaaataaatgaat

SEQ ID NO: 414779 - DNA, 33 bp, Homo sapien
atttacaccagcctgaggtttataacgccattt

SEQ ID NO: 414780 - DNA, 33 bp, Homo sapien
atttacaccagcctgatgtttataacgccattt

SEQ ID NO: 414781 - DNA, 33 bp, Homo sapien
actgtagagtccataaaaagatcagtggtttcc

SEQ ID NO: 414782 - DNA, 33 bp, Homo sapien
actgtagagtccataacaagatcagtggtttcc

SEQ ID NO: 414783 - DNA, 33 bp, Homo sapien
acagaaatgatgacacggcttctaattcttagt

SEQ ID NO: 414784 - DNA, 33 bp, Homo sapien
acagaaatgatgacactgcttctaattcttagt

SEQ ID NO: 414785 - DNA, 33 bp, Homo sapien
gaatgagtacgcaggaaaccatcaagggacact

SEQ ID NO: 414786 - DNA, 33 bp, Homo sapien
gaatgagtacgcaggagaccatcaagggacact

SEQ ID NO: 414787 - DNA, 33 bp, Homo sapien
gtggaactcaaatccaaaaatggagaatcgtga

SEQ ID NO: 414788 - DNA, 33 bp, Homo sapien
gtggaactcaaatccagaaatggagaatcgtga

SEQ ID NO: 414789 - DNA, 33 bp, Homo sapien
gtatttcatcaatgcactcagagtatttgagaa

SEQ ID NO: 414790 - DNA, 33 bp, Homo sapien
gtatttcatcaatgcattcagagtatttgagaa

SEQ ID NO: 414791 - DNA, 33 bp, Homo sapien
agaaaaagtgggaacaatgcccttgagctttca

SEQ ID NO: 414792 - DNA, 33 bp, Homo sapien
agaaaaagtgggaacagtgcccttgagctttca

SEQ ID NO: 414793 - DNA, 33 bp, Homo sapien
actgacatcttgagaacattatggcttccaacc

SEQ ID NO: 414794 - DNA, 33 bp, Homo sapien
actgacatcttgagaatattatggcttccaacc

SEQ ID NO: 414795 - DNA, 33 bp, Homo sapien
gaagatattgccaagtgaatgactccatgataa

SEQ ID NO: 414796 - DNA, 33 bp, Homo sapien
gaagatattgccaagttaatgactccatgataa

SEQ ID NO: 414797 - DNA, 33 bp, Homo sapien
ggaattacacatcgtaagttgaagtggaggtat

SEQ ID NO: 414798 - DNA, 33 bp, Homo sapien
ggaattacacatcgtaggttgaagtggaggtat

SEQ ID NO: 414799 - DNA, 33 bp, Homo sapien
tgaatttgtctcgcaccatttacataaaactaa

SEQ ID NO: 414800 - DNA, 33 bp, Homo sapien
tgaatttgtctcgcactatttacataaaactaa

SEQ ID NO: 414801 - DNA, 33 bp, Homo sapien
ggccacttaagctttgcacatggacctgcactg

SEQ ID NO: 414802 - DNA, 33 bp, Homo sapien
ggccacttaagctttgtacatggacctgcactg

SEQ ID NO: 414803 - DNA, 33 bp, Homo sapien
acatgtggtagacacgacatgggaaatgctacc

SEQ ID NO: 414804 - DNA, 33 bp, Homo sapien
acatgtggtagacacggcatgggaaatgctacc

SEQ ID NO: 414805 - DNA, 33 bp, Homo sapien
ttaaggaaactatacaagatacaagagaataca

SEQ ID NO: 414806 - DNA, 33 bp, Homo sapien
ttaaggaaactatacaggatacaagagaataca

SEQ ID NO: 414807 - DNA, 33 bp, Homo sapien
gtggtctttctaaaacaaaaatataatcataaa

SEQ ID NO: 414808 - DNA, 33 bp, Homo sapien
gtggtctttctaaaacgaaaatataatcataaa

SEQ ID NO: 414809 - DNA, 33 bp, Homo sapien
tgctacccatgaggcaaggttaaagacagaagg

SEQ ID NO: 414810 - DNA, 33 bp, Homo sapien
tgctacccatgaggcagggttaaagacagaagg

SEQ ID NO: 414811 - DNA, 33 bp, Homo sapien
tgttagaggtatttcacgaatatttgagatttg

SEQ ID NO: 414812 - DNA, 33 bp, Homo sapien
tgttagaggtatttcatgaatatttgagatttg

SEQ ID NO: 414813 - DNA, 33 bp, Homo sapien
taaaagaattggaacaactgattcatatgttag

SEQ ID NO: 414814 - DNA, 33 bp, Homo sapien
taaaagaattggaacagctgattcatatgttag

SEQ ID NO: 414815 - DNA, 33 bp, Homo sapien
aaaatgccttgagcaaacaagattgtctcaggt

SEQ ID NO: 414816 - DNA, 33 bp, Homo sapien
aaaatgccttgagcaagcaagattgtctcaggt

SEQ ID NO: 414817 - DNA, 33 bp, Homo sapien
gtgtctttttttctaactgttcccaggtgcagt

SEQ ID NO: 414818 - DNA, 33 bp, Homo sapien
gtgtctttttttctaattgttcccaggtgcagt

SEQ ID NO: 414819 - DNA, 33 bp, Homo sapien
aatgagttaccaggtacagtgaggtgaagtgat

SEQ ID NO: 414820 - DNA, 33 bp, Homo sapien
aatgagttaccaggtagagtgaggtgaagtgat

SEQ ID NO: 414821 - DNA, 33 bp, Homo sapien
ttgatcacttaatccaatcgaggcctgagcatg

SEQ ID NO: 414822 - DNA, 33 bp, Homo sapien
ttgatcacttaatccagtcgaggcctgagcatg

SEQ ID NO: 414823 - DNA, 33 bp, Homo sapien
tcttcagttccaacaacgcactgttttatgtct

SEQ ID NO: 414824 - DNA, 33 bp, Homo sapien
tcttcagttccaacaatgcactgttttatgtct

SEQ ID NO: 414825 - DNA, 33 bp, Homo sapien
ggagttagaagcataaatagacatttgcaataa

SEQ ID NO: 414826 - DNA, 33 bp, Homo sapien
ggagttagaagcataagtagacatttgcaataa

SEQ ID NO: 414827 - DNA, 33 bp, Homo sapien
tacagtaaaaatactccatgaaaaatgaaatat

SEQ ID NO: 414828 - DNA, 33 bp, Homo sapien
tacagtaaaaatactcgatgaaaaatgaaatat

SEQ ID NO: 414829 - DNA, 33 bp, Homo sapien
tgtcaaacctgcttctcactcttctctgactta

SEQ ID NO: 414830 - DNA, 33 bp, Homo sapien
tgtcaaacctgcttcttactcttctctgactta

SEQ ID NO: 414831 - DNA, 33 bp, Homo sapien
ttggtttatctttagccgagtgcctctcagttc

SEQ ID NO: 414832 - DNA, 33 bp, Homo sapien
ttggtttatctttagctgagtgcctctcagttc

SEQ ID NO: 414833 - DNA, 33 bp, Homo sapien
cacaccagttgcccagaatctgcaatctgtaac

SEQ ID NO: 414834 - DNA, 33 bp, Homo sapien
cacaccagttgcccaggatctgcaatctgtaac

SEQ ID NO: 414835 - DNA, 33 bp, Homo sapien
aaacatgtttcaacacaataaattctcttagcc

SEQ ID NO: 414836 - DNA, 33 bp, Homo sapien
aaacatgtttcaacacgataaattctcttagcc

SEQ ID NO: 414837 - DNA, 33 bp, Homo sapien
aaagaatgcattgtcacaaaatttctttctcct

SEQ ID NO: 414838 - DNA, 33 bp, Homo sapien
aaagaatgcattgtcataaaatttctttctcct

SEQ ID NO: 414839 - DNA, 33 bp, Homo sapien
gaagcatctctatagaacattcagaagatgtct

SEQ ID NO: 414840 - DNA, 33 bp, Homo sapien
gaagcatctctatagaccattcagaagatgtct

SEQ ID NO: 414841 - DNA, 33 bp, Homo sapien
accttcttttttatcagcagtgtttctaggtag

SEQ ID NO: 414842 - DNA, 33 bp, Homo sapien
accttcttttttatcatcagtgtttctaggtag

SEQ ID NO: 414843 - DNA, 33 bp, Homo sapien
ttttgctgaagtggctcaccacagatggaatgg

SEQ ID NO: 414844 - DNA, 33 bp, Homo sapien
ttttgctgaagtggcttaccacagatggaatgg

SEQ ID NO: 414845 - DNA, 33 bp, Homo sapien
atcatatagctatagcacaaactttttttaccc

SEQ ID NO: 414846 - DNA, 33 bp, Homo sapien
atcatatagctatagcgcaaactttttttaccc

SEQ ID NO: 414847 - DNA, 33 bp, Homo sapien
cagccttctttatgcacggccagcgaggtgcag

SEQ ID NO: 414848 - DNA, 33 bp, Homo sapien
cagccttctttatgcatggccagcgaggtgcag

SEQ ID NO: 414849 - DNA, 33 bp, Homo sapien
aagacttatttagaaacgggccagttgtatatg

SEQ ID NO: 414850 - DNA, 33 bp, Homo sapien
aagacttatttagaaatgggccagttgtatatg

SEQ ID NO: 414851 - DNA, 33 bp, Homo sapien
catggttttcatcatacatcatacctcctcctc

SEQ ID NO: 414852 - DNA, 33 bp, Homo sapien
catggttttcatcatatatcatacctcctcctc

SEQ ID NO: 414853 - DNA, 33 bp, Homo sapien
tgagttgaaactcagacccaatcaacacttaaa

SEQ ID NO: 414854 - DNA, 33 bp, Homo sapien
tgagttgaaactcagatccaatcaacacttaaa

SEQ ID NO: 414855 - DNA, 33 bp, Homo sapien
cacatcaaaatgttaaaaaggaccatcactgga

SEQ ID NO: 414856 - DNA, 33 bp, Homo sapien
cacatcaaaatgttaataaggaccatcactgga

SEQ ID NO: 414857 - DNA, 33 bp, Homo sapien
catgtgttgattgatgaatttactttgatacag

SEQ ID NO: 414858 - DNA, 33 bp, Homo sapien
catgtgttgattgatgcatttactttgatacag

SEQ ID NO: 414859 - DNA, 33 bp, Homo sapien
attaaaataaagacaactggttttgagcacaca

SEQ ID NO: 414860 - DNA, 33 bp, Homo sapien
attaaaataaagacaattggttttgagcacaca

SEQ ID NO: 414861 - DNA, 33 bp, Homo sapien
tttgggcatacaggccagatatacacacacagg

SEQ ID NO: 414862 - DNA, 33 bp, Homo sapien
tttgggcatacaggccggatatacacacacagg

SEQ ID NO: 414863 - DNA, 33 bp, Homo sapien
agcatccgcgtccacgcaagagcagctacatgg

SEQ ID NO: 414864 - DNA, 33 bp, Homo sapien
agcatccgcgtccacggaagagcagctacatgg

SEQ ID NO: 414865 - DNA, 33 bp, Homo sapien
tcacttttgtactccacagccactccagcaaag

SEQ ID NO: 414866 - DNA, 33 bp, Homo sapien
tcacttttgtactccatagccactccagcaaag

SEQ ID NO: 414867 - DNA, 33 bp, Homo sapien
tacaaagtcaatatcccgaagttcagcattaca

SEQ ID NO: 414868 - DNA, 33 bp, Homo sapien
tacaaagtcaatatcctgaagttcagcattaca

SEQ ID NO: 414869 - DNA, 33 bp, Homo sapien
cctgaatggattccaccgtagctgggaacttgc

SEQ ID NO: 414870 - DNA, 33 bp, Homo sapien
cctgaatggattccacggtagctgggaacttgc

SEQ ID NO: 414871 - DNA, 33 bp, Homo sapien
gtgtccacagagtaaaggtaacaagaaatgttg

SEQ ID NO: 414872 - DNA, 33 bp, Homo sapien
gtgtccacagagtaaatgtaacaagaaatgttg

SEQ ID NO: 414873 - DNA, 33 bp, Homo sapien
ttcgcaacagaggccacataaacagctttatcc

SEQ ID NO: 414874 - DNA, 33 bp, Homo sapien
ttcgcaacagaggccatataaacagctttatcc

SEQ ID NO: 414875 - DNA, 33 bp, Homo sapien
attatttatccatccacgctaaaagaattttcc

SEQ ID NO: 414876 - DNA, 33 bp, Homo sapien
attatttatccatccatgctaaaagaattttcc

SEQ ID NO: 414877 - DNA, 33 bp, Homo sapien
aagaaaatccttctaacgtatgcataaacaaaa

SEQ ID NO: 414878 - DNA, 33 bp, Homo sapien
aagaaaatccttctaatgtatgcataaacaaaa

SEQ ID NO: 414879 - DNA, 33 bp, Homo sapien
gattaggagtttagtaaggattagaccacacaa

SEQ ID NO: 414880 - DNA, 33 bp, Homo sapien
gattaggagtttagtatggattagaccacacaa

SEQ ID NO: 414881 - DNA, 33 bp, Homo sapien
tcttcttagagcaataaaaagacgtggaagaaa

SEQ ID NO: 414882 - DNA, 33 bp, Homo sapien
tcttcttagagcaatagaaagacgtggaagaaa

SEQ ID NO: 414883 - DNA, 33 bp, Homo sapien
ctgtctcttaatgcaacaggggtatctaagcaa

SEQ ID NO: 414884 - DNA, 33 bp, Homo sapien
ctgtctcttaatgcaataggggtatctaagcaa

SEQ ID NO: 414885 - DNA, 33 bp, Homo sapien
ccattgttttgatgcccaaagtgctgaatgcaa

SEQ ID NO: 414886 - DNA, 33 bp, Homo sapien
ccattgttttgatgccgaaagtgctgaatgcaa

SEQ ID NO: 414887 - DNA, 33 bp, Homo sapien
tctattttgtgtataaccattgctgaaattgct

SEQ ID NO: 414888 - DNA, 33 bp, Homo sapien
tctattttgtgtataatcattgctgaaattgct

SEQ ID NO: 414889 - DNA, 33 bp, Homo sapien
tcatttgtgtgtaaaaactgtgatgttatatac

SEQ ID NO: 414890 - DNA, 33 bp, Homo sapien
tcatttgtgtgtaaaagctgtgatgttatatac

SEQ ID NO: 414891 - DNA, 33 bp, Homo sapien
tctctctcttctaacaatgatggtactggtata

SEQ ID NO: 414892 - DNA, 33 bp, Homo sapien
tctctctcttctaacagtgatggtactggtata

SEQ ID NO: 414893 - DNA, 33 bp, Homo sapien
agtgaaggttgtgctcaatttaaatcactgtaa

SEQ ID NO: 414894 - DNA, 33 bp, Homo sapien
agtgaaggttgtgctcgatttaaatcactgtaa

SEQ ID NO: 414895 - DNA, 33 bp, Homo sapien
ttttctaagcaccttacgtgtaaaattcactta

SEQ ID NO: 414896 - DNA, 33 bp, Homo sapien
ttttctaagcaccttatgtgtaaaattcactta

SEQ ID NO: 414897 - DNA, 33 bp, Homo sapien
tcagagagatgtggcaaggagatcagaagtatg

SEQ ID NO: 414898 - DNA, 33 bp, Homo sapien
tcagagagatgtggcagggagatcagaagtatg

SEQ ID NO: 414899 - DNA, 33 bp, Homo sapien
ggtagatactaggtgaatagaaatcaggagaga

SEQ ID NO: 414900 - DNA, 33 bp, Homo sapien
ggtagatactaggtgagtagaaatcaggagaga

SEQ ID NO: 414901 - DNA, 33 bp, Homo sapien
ccttatgtttgcttatcaatttgtctccatgaa

SEQ ID NO: 414902 - DNA, 33 bp, Homo sapien
ccttatgtttgcttatgaatttgtctccatgaa

SEQ ID NO: 414903 - DNA, 33 bp, Homo sapien
tgatgacagttgcccacactttatgaagagagc

SEQ ID NO: 414904 - DNA, 33 bp, Homo sapien
tgatgacagttgcccatactttatgaagagagc

SEQ ID NO: 414905 - DNA, 33 bp, Homo sapien
attccccacatttcaaccagctgtgtgccagca

SEQ ID NO: 414906 - DNA, 33 bp, Homo sapien
attccccacatttcaatcagctgtgtgccagca

SEQ ID NO: 414907 - DNA, 33 bp, Homo sapien
aacaagaaactaatacactttggaagccagaac

SEQ ID NO: 414908 - DNA, 33 bp, Homo sapien
aacaagaaactaatacgctttggaagccagaac

SEQ ID NO: 414909 - DNA, 33 bp, Homo sapien
atcatatctccttctccgactctgtcctgtccc

SEQ ID NO: 414910 - DNA, 33 bp, Homo sapien
atcatatctccttctctgactctgtcctgtccc

SEQ ID NO: 414911 - DNA, 33 bp, Homo sapien
ccaccatcaccaacaaagaaagaattctccaga

SEQ ID NO: 414912 - DNA, 33 bp, Homo sapien
ccaccatcaccaacaatgaaagaattctccaga

SEQ ID NO: 414913 - DNA, 33 bp, Homo sapien
ccatccatcctaataaacattaatttactactg

SEQ ID NO: 414914 - DNA, 33 bp, Homo sapien
ccatccatcctaataagcattaatttactactg

SEQ ID NO: 414915 - DNA, 33 bp, Homo sapien
tagttcgtagcctaagccctggaagtcccagag

SEQ ID NO: 414916 - DNA, 33 bp, Homo sapien
tagttcgtagcctaagtcctggaagtcccagag

SEQ ID NO: 414917 - DNA, 33 bp, Homo sapien
tcacggataatacctcaactgttgatacttgtg

SEQ ID NO: 414918 - DNA, 33 bp, Homo sapien
tcacggataatacctcgactgttgatacttgtg

SEQ ID NO: 414919 - DNA, 33 bp, Homo sapien
catcacacctggctaagaacagatttgaatgtt

SEQ ID NO: 414920 - DNA, 33 bp, Homo sapien
catcacacctggctaataacagatttgaatgtt

SEQ ID NO: 414921 - DNA, 33 bp, Homo sapien
aagaaagttcaaggagaataattttgcaccagg

SEQ ID NO: 414922 - DNA, 33 bp, Homo sapien
aagaaagttcaaggagcataattttgcaccagg

SEQ ID NO: 414923 - DNA, 33 bp, Homo sapien
gttaaaacagaagagactatgtgataagaaaat

SEQ ID NO: 414924 - DNA, 33 bp, Homo sapien
gttaaaacagaagagattatgtgataagaaaat

SEQ ID NO: 414925 - DNA, 33 bp, Homo sapien
tctttataaccacgaaattcagctgctgtggga

SEQ ID NO: 414926 - DNA, 33 bp, Homo sapien
tctttataaccacgaagttcagctgctgtggga

SEQ ID NO: 414927 - DNA, 33 bp, Homo sapien
catataacccattctcccattatgcatatgtac

SEQ ID NO: 414928 - DNA, 33 bp, Homo sapien
catataacccattctctcattatgcatatgtac

SEQ ID NO: 414929 - DNA, 33 bp, Homo sapien
ataaaacagaagcatccctttaaacaatctgtt

SEQ ID NO: 414930 - DNA, 33 bp, Homo sapien
ataaaacagaagcatcgctttaaacaatctgtt

SEQ ID NO: 414931 - DNA, 33 bp, Homo sapien
ttattttagcaaggaaaaagtattcagcctgtc

SEQ ID NO: 414932 - DNA, 33 bp, Homo sapien
ttattttagcaaggaagaagtattcagcctgtc

SEQ ID NO: 414933 - DNA, 33 bp, Homo sapien
tgttattctccttgcacaggtaaggaaactgag

SEQ ID NO: 414934 - DNA, 33 bp, Homo sapien
tgttattctccttgcataggtaaggaaactgag

SEQ ID NO: 414935 - DNA, 33 bp, Homo sapien
ggtggatgtatcatcaatctaattttgcggaaa

SEQ ID NO: 414936 - DNA, 33 bp, Homo sapien
ggtggatgtatcatcagtctaattttgcggaaa

SEQ ID NO: 414937 - DNA, 33 bp, Homo sapien
tgtttactttttctcacgtgcataatccctttc

SEQ ID NO: 414938 - DNA, 33 bp, Homo sapien
tgtttactttttctcatgtgcataatccctttc

SEQ ID NO: 414939 - DNA, 33 bp, Homo sapien
aggctctgtacataccaagacaaactgactgac

SEQ ID NO: 414940 - DNA, 33 bp, Homo sapien
aggctctgtacataccgagacaaactgactgac

SEQ ID NO: 414941 - DNA, 33 bp, Homo sapien
tatttataaatggactaactttggagctaagac

SEQ ID NO: 414942 - DNA, 33 bp, Homo sapien
tatttataaatggactcactttggagctaagac

SEQ ID NO: 414943 - DNA, 33 bp, Homo sapien
atatgtaaaaatattacgtatcagtcaggttaa

SEQ ID NO: 414944 - DNA, 33 bp, Homo sapien
atatgtaaaaatattatgtatcagtcaggttaa

SEQ ID NO: 414945 - DNA, 33 bp, Homo sapien
aggccggctctaattcaagcatttcattggtca

SEQ ID NO: 414946 - DNA, 33 bp, Homo sapien
aggccggctctaattcgagcatttcattggtca

SEQ ID NO: 414947 - DNA, 33 bp, Homo sapien
gccaatgaaatgctctgaaacattatcacgcca

SEQ ID NO: 414948 - DNA, 33 bp, Homo sapien
gccaatgaaatgctcttaaacattatcacgcca

SEQ ID NO: 414949 - DNA, 33 bp, Homo sapien
ctgcagcctaagataacaatttcctcactgctt

SEQ ID NO: 414950 - DNA, 33 bp, Homo sapien
ctgcagcctaagataataatttcctcactgctt

SEQ ID NO: 414951 - DNA, 33 bp, Homo sapien
aatgtggtagaagtaaagttataagagttctag

SEQ ID NO: 414952 - DNA, 33 bp, Homo sapien
aatgtggtagaagtaaggttataagagttctag

SEQ ID NO: 414953 - DNA, 33 bp, Homo sapien
atctcaaattcatgtacgggtgacatttgcatg

SEQ ID NO: 414954 - DNA, 33 bp, Homo sapien
atctcaaattcatgtatgggtgacatttgcatg

SEQ ID NO: 414955 - DNA, 33 bp, Homo sapien
gattacccgatggaagccttacacctgacttat

SEQ ID NO: 414956 - DNA, 33 bp, Homo sapien
gattacccgatggaaggcttacacctgacttat

SEQ ID NO: 414957 - DNA, 33 bp, Homo sapien
ttgagatttgtttcaaatatggccattacttca

SEQ ID NO: 414958 - DNA, 33 bp, Homo sapien
ttgagatttgtttcaattatggccattacttca

SEQ ID NO: 414959 - DNA, 33 bp, Homo sapien
ctcacgtgaagtctaaacagcagctgtattagt

SEQ ID NO: 414960 - DNA, 33 bp, Homo sapien
ctcacgtgaagtctaatcagcagctgtattagt

SEQ ID NO: 414961 - DNA, 33 bp, Homo sapien
tcctatttttaagcaacatcttcgaggaagcag

SEQ ID NO: 414962 - DNA, 33 bp, Homo sapien
tcctatttttaagcaatatcttcgaggaagcag

SEQ ID NO: 414963 - DNA, 33 bp, Homo sapien
agtgtgtatgcagtaacggtgaattcttctgta

SEQ ID NO: 414964 - DNA, 33 bp, Homo sapien
agtgtgtatgcagtaatggtgaattcttctgta

SEQ ID NO: 414965 - DNA, 33 bp, Homo sapien
acagacagaaaatgaaagggtacagaagacatg

SEQ ID NO: 414966 - DNA, 33 bp, Homo sapien
acagacagaaaatgaaggggtacagaagacatg

SEQ ID NO: 414967 - DNA, 33 bp, Homo sapien
gccaggaggcatggaaatcactgtggtacactt

SEQ ID NO: 414968 - DNA, 33 bp, Homo sapien
gccaggaggcatggaagtcactgtggtacactt

SEQ ID NO: 414969 - DNA, 33 bp, Homo sapien
tttctctgtctcctcacctgttaagtattaact

SEQ ID NO: 414970 - DNA, 33 bp, Homo sapien
tttctctgtctcctcatctgttaagtattaact

SEQ ID NO: 414971 - DNA, 33 bp, Homo sapien
taagggttggcaatgaagtatagttaccacaag

SEQ ID NO: 414972 - DNA, 33 bp, Homo sapien
taagggttggcaatgatgtatagttaccacaag

SEQ ID NO: 414973 - DNA, 33 bp, Homo sapien
ccatccacggctcatgcaggcttaaaatggatg

SEQ ID NO: 414974 - DNA, 33 bp, Homo sapien
ccatccacggctcatgtaggcttaaaatggatg

SEQ ID NO: 414975 - DNA, 33 bp, Homo sapien
gagtaccaattgttacagccaaagtacagtatg

SEQ ID NO: 414976 - DNA, 33 bp, Homo sapien
gagtaccaattgttaccgccaaagtacagtatg

SEQ ID NO: 414977 - DNA, 33 bp, Homo sapien
aatttccacaactcgcagcaattttctttatgt

SEQ ID NO: 414978 - DNA, 33 bp, Homo sapien
aatttccacaactcgcggcaattttctttatgt

SEQ ID NO: 414979 - DNA, 33 bp, Homo sapien
tgtacatttgaccataggctggcagaacccatc

SEQ ID NO: 414980 - DNA, 33 bp, Homo sapien
tgtacatttgaccatatgctggcagaacccatc

SEQ ID NO: 414981 - DNA, 33 bp, Homo sapien
gagcattatggatatgaaacagggaagcctata

SEQ ID NO: 414982 - DNA, 33 bp, Homo sapien
gagcattatggatatggaacagggaagcctata

SEQ ID NO: 414983 - DNA, 33 bp, Homo sapien
atcagggggaatgatcaaaatcgtggcatggtt

SEQ ID NO: 414984 - DNA, 33 bp, Homo sapien
atcagggggaatgatcgaaatcgtggcatggtt

SEQ ID NO: 414985 - DNA, 33 bp, Homo sapien
agataccatctaacaccaatcagaatgactatt

SEQ ID NO: 414986 - DNA, 33 bp, Homo sapien
agataccatctaacactaatcagaatgactatt

SEQ ID NO: 414987 - DNA, 33 bp, Homo sapien
ttaatcattgcctttacccctcttggagacttg

SEQ ID NO: 414988 - DNA, 33 bp, Homo sapien
ttaatcattgcctttatccctcttggagacttg

SEQ ID NO: 414989 - DNA, 33 bp, Homo sapien
ttatctacgtgatttacggtgtatgcatatatg

SEQ ID NO: 414990 - DNA, 33 bp, Homo sapien
ttatctacgtgatttatggtgtatgcatatatg

SEQ ID NO: 414991 - DNA, 33 bp, Homo sapien
taagatccatgaaagacgtaatcctcctttgat

SEQ ID NO: 414992 - DNA, 33 bp, Homo sapien
taagatccatgaaagatgtaatcctcctttgat

SEQ ID NO: 414993 - DNA, 33 bp, Homo sapien
cacggcaaggacgccactgacgtttttattcga

SEQ ID NO: 414994 - DNA, 33 bp, Homo sapien
cacggcaaggacgccattgacgtttttattcga

SEQ ID NO: 414995 - DNA, 33 bp, Homo sapien
ttattgatactaggaacgaactgcaagaagacc

SEQ ID NO: 414996 - DNA, 33 bp, Homo sapien
ttattgatactaggaatgaactgcaagaagacc

SEQ ID NO: 414997 - DNA, 33 bp, Homo sapien
ttttctgaactctgtaatacaagaactttctta

SEQ ID NO: 414998 - DNA, 33 bp, Homo sapien
ttttctgaactctgtagtacaagaactttctta

SEQ ID NO: 414999 - DNA, 33 bp, Homo sapien
gtcttcattgttcaccacagtgatttaaaacta

SEQ ID NO: 415000 - DNA, 33 bp, Homo sapien
gtcttcattgttcaccgcagtgatttaaaacta

SEQ ID NO: 415001 - DNA, 33 bp, Homo sapien
tctatggactcggcccaaattcttgcttgcttg

SEQ ID NO: 415002 - DNA, 33 bp, Homo sapien
tctatggactcggccccaattcttgcttgcttg

SEQ ID NO: 415003 - DNA, 33 bp, Homo sapien
acaaattggttatctagggcagcataaatccaa

SEQ ID NO: 415004 - DNA, 33 bp, Homo sapien
acaaattggttatctatggcagcataaatccaa

SEQ ID NO: 415005 - DNA, 33 bp, Homo sapien
cctcttagctatgtgccctttgaaaattaaact

SEQ ID NO: 415006 - DNA, 33 bp, Homo sapien
cctcttagctatgtgctctttgaaaattaaact

SEQ ID NO: 415007 - DNA, 33 bp, Homo sapien
gcaggttccgcggggacgaagatagacctatta

SEQ ID NO: 415008 - DNA, 33 bp, Homo sapien
gcaggttccgcggggatgaagatagacctatta

SEQ ID NO: 415009 - DNA, 33 bp, Homo sapien
gaacatgagattacgacattcgcgttgaggtag

SEQ ID NO: 415010 - DNA, 33 bp, Homo sapien
gaacatgagattacgatattcgcgttgaggtag

SEQ ID NO: 415011 - DNA, 33 bp, Homo sapien
tgggagtctgcacttacgtcagcacggatagtt

SEQ ID NO: 415012 - DNA, 33 bp, Homo sapien
tgggagtctgcacttatgtcagcacggatagtt

SEQ ID NO: 415013 - DNA, 33 bp, Homo sapien
tcagggctgcctgttacaatagccggaggaaca

SEQ ID NO: 415014 - DNA, 33 bp, Homo sapien
tcagggctgcctgttagaatagccggaggaaca

SEQ ID NO: 415015 - DNA, 33 bp, Homo sapien
agagggatggaaaaataattgagagaagaccag

SEQ ID NO: 415016 - DNA, 33 bp, Homo sapien
agagggatggaaaaatgattgagagaagaccag

SEQ ID NO: 415017 - DNA, 33 bp, Homo sapien
gaaccaacttcttccaccttcacgtggttttcg

SEQ ID NO: 415018 - DNA, 33 bp, Homo sapien
gaaccaacttcttccatcttcacgtggttttcg

SEQ ID NO: 415019 - DNA, 33 bp, Homo sapien
ggatgcccttagacaaacctggttcctttgcag

SEQ ID NO: 415020 - DNA, 33 bp, Homo sapien
ggatgcccttagacaaccctggttcctttgcag

SEQ ID NO: 415021 - DNA, 33 bp, Homo sapien; identical to SEQ ID NO: 415019

SEQ ID NO: 415022 - DNA, 33 bp, Homo sapien; identical to SEQ ID NO: 415020

SEQ ID NO: 415023 - DNA, 33 bp, Homo sapien
ctatctcaattcttcccacgtttgttatgcata

SEQ ID NO: 415024 - DNA, 33 bp, Homo sapien
ctatctcaattcttcctacgtttgttatgcata

SEQ ID NO: 415025 - DNA, 33 bp, Homo sapien
tatgtggagtttcaagaaatggtagaacattta

SEQ ID NO: 415026 - DNA, 33 bp, Homo sapien
tatgtggagtttcaagcaatggtagaacattta

SEQ ID NO: 415027 - DNA, 33 bp, Homo sapien
catttatagagaagaaatgatcgatgatgctgt

SEQ ID NO: 415028 - DNA, 33 bp, Homo sapien
catttatagagaagaattgatcgatgatgctgt

SEQ ID NO: 415029 - DNA, 33 bp, Homo sapien
ggcacattagaggtaaaccttgtcttttgcacg

SEQ ID NO: 415030 - DNA, 33 bp, Homo sapien
ggcacattagaggtaagccttgtcttttgcacg

SEQ ID NO: 415031 - DNA, 33 bp, Homo sapien
ttctgggcaaaggtcaataatcacatggaaagt

SEQ ID NO: 415032 - DNA, 33 bp, Homo sapien
ttctgggcaaaggtcagtaatcacatggaaagt

SEQ ID NO: 415033 - DNA, 33 bp, Homo sapien
caccaatagtataaaacggacaatctttcccaa

SEQ ID NO: 415034 - DNA, 33 bp, Homo sapien
caccaatagtataaaatggacaatctttcccaa

SEQ ID NO: 415035 - DNA, 33 bp, Homo sapien
catgggtgtatcactacgtcaaagctcattgaa

SEQ ID NO: 415036 - DNA, 33 bp, Homo sapien
catgggtgtatcactatgtcaaagctcattgaa

SEQ ID NO: 415037 - DNA, 33 bp, Homo sapien
aaagcatctgctcatcaaaagacactgaaaaaa

SEQ ID NO: 415038 - DNA, 33 bp, Homo sapien
aaagcatctgctcatcgaaagacactgaaaaaa

SEQ ID NO: 415039 - DNA, 33 bp, Homo sapien
gatgataatgaccatgcagtatagaaaaaccca

SEQ ID NO: 415040 - DNA, 33 bp, Homo sapien
gatgataatgaccatgtagtatagaaaaaccca

SEQ ID NO: 415041 - DNA, 33 bp, Homo sapien
aaagtcctgaggcttacaaaagcatatggccca

SEQ ID NO: 415042 - DNA, 33 bp, Homo sapien
aaagtcctgaggcttagaaaagcatatggccca

SEQ ID NO: 415043 - DNA, 33 bp, Homo sapien
tctttcagtatacttacgctacctataacctct

SEQ ID NO: 415044 - DNA, 33 bp, Homo sapien
tctttcagtatacttatgctacctataacctct

SEQ ID NO: 415045 - DNA, 33 bp, Homo sapien
aacctcaaaatgtctaaaattcagtcactctta

SEQ ID NO: 415046 - DNA, 33 bp, Homo sapien
aacctcaaaatgtctacaattcagtcactctta

SEQ ID NO: 415047 - DNA, 33 bp, Homo sapien
atgttgacaatttcccactattttgaaggacat

SEQ ID NO: 415048 - DNA, 33 bp, Homo sapien
atgttgacaatttcccgctattttgaaggacat

SEQ ID NO: 415049 - DNA, 33 bp, Homo sapien
accattcttgctcaggcagacaaaaagactctg

SEQ ID NO: 415050 - DNA, 33 bp, Homo sapien
accattcttgctcaggtagacaaaaagactctg

SEQ ID NO: 415051 - DNA, 33 bp, Homo sapien
aggtaaaataacaaacagtactaggcttctgta

SEQ ID NO: 415052 - DNA, 33 bp, Homo sapien
aggtaaaataacaaacggtactaggcttctgta

SEQ ID NO: 415053 - DNA, 33 bp, Homo sapien
cagactctaggggagaataagatgaagcaagga

SEQ ID NO: 415054 - DNA, 33 bp, Homo sapien
cagactctaggggagagtaagatgaagcaagga

SEQ ID NO: 415055 - DNA, 33 bp, Homo sapien
aattaaactttgaatacaagtgggcacaaagaa

SEQ ID NO: 415056 - DNA, 33 bp, Homo sapien
aattaaactttgaatagaagtgggcacaaagaa

SEQ ID NO: 415057 - DNA, 33 bp, Homo sapien
actaaaacaggattaccatgctacctagcaatc

SEQ ID NO: 415058 - DNA, 33 bp, Homo sapien
actaaaacaggattactatgctacctagcaatc

SEQ ID NO: 415059 - DNA, 33 bp, Homo sapien
cagagcagtgcagatagcttccttcttgagaaa

SEQ ID NO: 415060 - DNA, 33 bp, Homo sapien
cagagcagtgcagatatcttccttcttgagaaa

SEQ ID NO: 415061 - DNA, 33 bp, Homo sapien
ccactgatttagggcccagtattacctcatctt

SEQ ID NO: 415062 - DNA, 33 bp, Homo sapien
ccactgatttagggcctagtattacctcatctt

SEQ ID NO: 415063 - DNA, 33 bp, Homo sapien
aatgtacaggataaaacaggctatggagtcaga

SEQ ID NO: 415064 - DNA, 33 bp, Homo sapien
aatgtacaggataaaataggctatggagtcaga

SEQ ID NO: 415065 - DNA, 33 bp, Homo sapien
tgttgcttgtatattacggtttaactttgctta

SEQ ID NO: 415066 - DNA, 33 bp, Homo sapien
tgttgcttgtatattatggtttaactttgctta

SEQ ID NO: 415067 - DNA, 33 bp, Homo sapien
aaatgttagcacgggacgacaatattaaaagtg

SEQ ID NO: 415068 - DNA, 33 bp, Homo sapien
aaatgttagcacgggatgacaatattaaaagtg

SEQ ID NO: 415069 - DNA, 33 bp, Homo sapien
tggtagaaccggtgagaacctgaatagtaaata

SEQ ID NO: 415070 - DNA, 33 bp, Homo sapien
tggtagaaccggtgaggacctgaatagtaaata

SEQ ID NO: 415071 - DNA, 33 bp, Homo sapien
cagtggtgtaaaagcaaaaagaatgagaaggaa

SEQ ID NO: 415072 - DNA, 33 bp, Homo sapien
cagtggtgtaaaagcagaaagaatgagaaggaa

SEQ ID NO: 415073 - DNA, 33 bp, Homo sapien
actcagagaagtgatacggaggagaaataaata

SEQ ID NO: 415074 - DNA, 33 bp, Homo sapien
actcagagaagtgatatggaggagaaataaata

SEQ ID NO: 415075 - DNA, 33 bp, Homo sapien
atggttgacatctccaagtgagaaaaatggcct

SEQ ID NO: 415076 - DNA, 33 bp, Homo sapien
atggttgacatctccaggtgagaaaaatggcct

SEQ ID NO: 415077 - DNA, 33 bp, Homo sapien
caccatgagggatatgaagatagtgtcattccc

SEQ ID NO: 415078 - DNA, 33 bp, Homo sapien
caccatgagggatatggagatagtgtcattccc

SEQ ID NO: 415079 - DNA, 33 bp, Homo sapien
aaaatgcattagcaccacaaaaagtagaaatag

SEQ ID NO: 415080 - DNA, 33 bp, Homo sapien
aaaatgcattagcaccgcaaaaagtagaaatag

SEQ ID NO: 415081 - DNA, 33 bp, Homo sapien
tctgtccagatccccaatggattggatgaagcc

SEQ ID NO: 415082 - DNA, 33 bp, Homo sapien
tctgtccagatccccagtggattggatgaagcc

SEQ ID NO: 415083 - DNA, 33 bp, Homo sapien
ttccaagtagatgggactacacatttgtgccac

SEQ ID NO: 415084 - DNA, 33 bp, Homo sapien
ttccaagtagatgggattacacatttgtgccac

SEQ ID NO: 415085 - DNA, 33 bp, Homo sapien
gacaggataacaatacaatatctggactgtctg

SEQ ID NO: 415086 - DNA, 33 bp, Homo sapien
gacaggataacaataccatatctggactgtctg

SEQ ID NO: 415087 - DNA, 33 bp, Homo sapien
atcctaaccacagagacaaagtactgtgctcga

SEQ ID NO: 415088 - DNA, 33 bp, Homo sapien
atcctaaccacagagataaagtactgtgctcga

SEQ ID NO: 415089 - DNA, 33 bp, Homo sapien
tgttcccgactgtgtaagaagaagcagatttta

SEQ ID NO: 415090 - DNA, 33 bp, Homo sapien
tgttcccgactgtgtatgaagaagcagatttta

SEQ ID NO: 415091 - DNA, 33 bp, Homo sapien
tagtgaaattcacccaaatgaggaaaagctttg

SEQ ID NO: 415092 - DNA, 33 bp, Homo sapien
tagtgaaattcacccagatgaggaaaagctttg

SEQ ID NO: 415093 - DNA, 33 bp, Homo sapien
ctacataaagttgaagaacataaacacatttat

SEQ ID NO: 415094 - DNA, 33 bp, Homo sapien
ctacataaagttgaagtacataaacacatttat

SEQ ID NO: 415095 - DNA, 33 bp, Homo sapien
attttgagaagacaccaacaagcgaatatgcat

SEQ ID NO: 415096 - DNA, 33 bp, Homo sapien
attttgagaagacaccgacaagcgaatatgcat

SEQ ID NO: 415097 - DNA, 33 bp, Homo sapien
acacacactttccacagtctgacagtgtcctga

SEQ ID NO: 415098 - DNA, 33 bp, Homo sapien
acacacactttccacattctgacagtgtcctga

SEQ ID NO: 415099 - DNA, 33 bp, Homo sapien
atgaagcatgtgtttacaaagctaaagatatgt

SEQ ID NO: 415100 - DNA, 33 bp, Homo sapien
atgaagcatgtgtttataaagctaaagatatgt

SEQ ID NO: 415101 - DNA, 33 bp, Homo sapien
ttttcaatggtttatcacagatgacagctgatt

SEQ ID NO: 415102 - DNA, 33 bp, Homo sapien
ttttcaatggtttatcccagatgacagctgatt

SEQ ID NO: 415103 - DNA, 33 bp, Homo sapien
catgtgaaatcttggaagtcatacaacagatga

SEQ ID NO: 415104 - DNA, 33 bp, Homo sapien
catgtgaaatcttggatgtcatacaacagatga

SEQ ID NO: 415105 - DNA, 33 bp, Homo sapien
atacaaacatggttaaatagaagacataggaag

SEQ ID NO: 415106 - DNA, 33 bp, Homo sapien
atacaaacatggttaagtagaagacataggaag

SEQ ID NO: 415107 - DNA, 33 bp, Homo sapien
aatgtccaagcgacatcaggtgttttagtacag

SEQ ID NO: 415108 - DNA, 33 bp, Homo sapien
aatgtccaagcgacattaggtgttttagtacag

SEQ ID NO: 415109 - DNA, 33 bp, Homo sapien
ctctgagacaccaataaactctctctaagaagg

SEQ ID NO: 415110 - DNA, 33 bp, Homo sapien
ctctgagacaccaatacactctctctaagaagg

SEQ ID NO: 415111 - DNA, 33 bp, Homo sapien
ataactttggttccaagattttgattttctaat

SEQ ID NO: 415112 - DNA, 33 bp, Homo sapien
ataactttggttccaatattttgattttctaat

SEQ ID NO: 415113 - DNA, 33 bp, Homo sapien
aaacttcgcattcccaatatgaagaagtgataa

SEQ ID NO: 415114 - DNA, 33 bp, Homo sapien
aaacttcgcattcccagtatgaagaagtgataa

SEQ ID NO: 415115 - DNA, 33 bp, Homo sapien
attgccttggtagaaaagagtatggtgggcacc

SEQ ID NO: 415116 - DNA, 33 bp, Homo sapien
attgccttggtagaaaggagtatggtgggcacc

SEQ ID NO: 415117 - DNA, 33 bp, Homo sapien
tctgccaaaggtaactaaattttatccagaact

SEQ ID NO: 415118 - DNA, 33 bp, Homo sapien
tctgccaaaggtaactcaattttatccagaact

SEQ ID NO: 415119 - DNA, 33 bp, Homo sapien
gttgtcacagccagaacattttacaacagtgtg

SEQ ID NO: 415120 - DNA, 33 bp, Homo sapien
gttgtcacagccagaatattttacaacagtgtg

SEQ ID NO: 415121 - DNA, 33 bp, Homo sapien
aataaattcgaagtcacagaattgtttaaggtt

SEQ ID NO: 415122 - DNA, 33 bp, Homo sapien
aataaattcgaagtcatagaattgtttaaggtt

SEQ ID NO: 415123 - DNA, 33 bp, Homo sapien
ggcagttttgatggagcctcaagagatacagtc

SEQ ID NO: 415124 - DNA, 33 bp, Homo sapien
ggcagttttgatggaggctcaagagatacagtc

SEQ ID NO: 415125 - DNA, 33 bp, Homo sapien
cagcccaactaaaccaccaactccaagactcac

SEQ ID NO: 415126 - DNA, 33 bp, Homo sapien
cagcccaactaaaccatcaactccaagactcac

SEQ ID NO: 415127 - DNA, 33 bp, Homo sapien
cccagcacgatagctacgttttagggatactga

SEQ ID NO: 415128 - DNA, 33 bp, Homo sapien
cccagcacgatagctatgttttagggatactga

SEQ ID NO: 415129 - DNA, 33 bp, Homo sapien
ctctcggctacccttcccaatccttgctcacca

SEQ ID NO: 415130 - DNA, 33 bp, Homo sapien
ctctcggctacccttctcaatccttgctcacca

SEQ ID NO: 415131 - DNA, 33 bp, Homo sapien
caaattgtcataagcaatcaacgttttagtctg

SEQ ID NO: 415132 - DNA, 33 bp, Homo sapien
caaattgtcataagcagtcaacgttttagtctg

SEQ ID NO: 415133 - DNA, 33 bp, Homo sapien
cacatttgaagtaggacattaagtacagtaaga

SEQ ID NO: 415134 - DNA, 33 bp, Homo sapien
cacatttgaagtaggatattaagtacagtaaga

SEQ ID NO: 415135 - DNA, 33 bp, Homo sapien
attcaattctccctgacagcattgtcttgccac

SEQ ID NO: 415136 - DNA, 33 bp, Homo sapien
attcaattctccctgatagcattgtcttgccac

SEQ ID NO: 415137 - DNA, 33 bp, Homo sapien
aggaggggcatccacactgtcttattcagccat

SEQ ID NO: 415138 - DNA, 33 bp, Homo sapien
aggaggggcatccacattgtcttattcagccat

SEQ ID NO: 415139 - DNA, 33 bp, Homo sapien
ccacatgatggtctcaataggtgtagaaaaggc

SEQ ID NO: 415140 - DNA, 33 bp, Homo sapien
ccacatgatggtctcagtaggtgtagaaaaggc

SEQ ID NO: 415141 - DNA, 33 bp, Homo sapien
gggctcatgaactgaacagagggaatccagaaa

SEQ ID NO: 415142 - DNA, 33 bp, Homo sapien
gggctcatgaactgaatagagggaatccagaaa

SEQ ID NO: 415143 - DNA, 33 bp, Homo sapien
tgaataggctacttcaaagagtaacaagaaata

SEQ ID NO: 415144 - DNA, 33 bp, Homo sapien
tgaataggctacttcagagagtaacaagaaata

SEQ ID NO: 415145 - DNA, 33 bp, Homo sapien
atcataccaagtgaaaataggcaaatttactca

SEQ ID NO: 415146 - DNA, 33 bp, Homo sapien
atcataccaagtgaaagtaggcaaatttactca

SEQ ID NO: 415147 - DNA, 33 bp, Homo sapien
ggaagaggttcagagcaaagtggtggaaaagcc

SEQ ID NO: 415148 - DNA, 33 bp, Homo sapien
ggaagaggttcagagcgaagtggtggaaaagcc

SEQ ID NO: 415149 - DNA, 33 bp, Homo sapien
ttatagctatcataaaagtgaagaaaaacatcc

SEQ ID NO: 415150 - DNA, 33 bp, Homo sapien
ttatagctatcataaaggtgaagaaaaacatcc

SEQ ID NO: 415151 - DNA, 33 bp, Homo sapien
tctgctgaaaatactaaatgcttgtgggcaatc

SEQ ID NO: 415152 - DNA, 33 bp, Homo sapien
tctgctgaaaatactagatgcttgtgggcaatc

SEQ ID NO: 415153 - DNA, 33 bp, Homo sapien
gataacaatccaacacagtgcttatggagcatg

SEQ ID NO: 415154 - DNA, 33 bp, Homo sapien
gataacaatccaacaccgtgcttatggagcatg

SEQ ID NO: 415155 - DNA, 33 bp, Homo sapien
ataatgacggagcacccacaagaaacatccaag

SEQ ID NO: 415156 - DNA, 33 bp, Homo sapien
ataatgacggagcacctacaagaaacatccaag

SEQ ID NO: 415157 - DNA, 33 bp, Homo sapien
tggtatgatctgaattcaagagtcctttctggc

SEQ ID NO: 415158 - DNA, 33 bp, Homo sapien
tggtatgatctgaatttaagagtcctttctggc

SEQ ID NO: 415159 - DNA, 33 bp, Homo sapien
ggagctgaagattccaaaaaatatgaacaacag

SEQ ID NO: 415160 - DNA, 33 bp, Homo sapien
ggagctgaagattccagaaaatatgaacaacag

SEQ ID NO: 415161 - DNA, 33 bp, Homo sapien
gaggtccacgcttagcagaatttgtagaatgga

SEQ ID NO: 415162 - DNA, 33 bp, Homo sapien
gaggtccacgcttagcggaatttgtagaatgga

SEQ ID NO: 415163 - DNA, 33 bp, Homo sapien
agggagactagaaacccgaaggaagctatatta

SEQ ID NO: 415164 - DNA, 33 bp, Homo sapien
agggagactagaaacctgaaggaagctatatta

SEQ ID NO: 415165 - DNA, 33 bp, Homo sapien
acattgaatttcccacaaaggagagagtctttt

SEQ ID NO: 415166 - DNA, 33 bp, Homo sapien
acattgaatttcccacgaaggagagagtctttt

SEQ ID NO: 415167 - DNA, 33 bp, Homo sapien
tgaccaatacaaacccaggctgatcaactcatg

SEQ ID NO: 415168 - DNA, 33 bp, Homo sapien
tgaccaatacaaacccgggctgatcaactcatg

SEQ ID NO: 415169 - DNA, 33 bp, Homo sapien
caataaacttgtaagcacagagccagggacgac

SEQ ID NO: 415170 - DNA, 33 bp, Homo sapien
caataaacttgtaagcgcagagccagggacgac

SEQ ID NO: 415171 - DNA, 33 bp, Homo sapien
atggatcccaggatgaaatgcagattgttacaa

SEQ ID NO: 415172 - DNA, 33 bp, Homo sapien
atggatcccaggatgagatgcagattgttacaa

SEQ ID NO: 415173 - DNA, 33 bp, Homo sapien
agatcttcctttgcaccggaataacttcttgaa

SEQ ID NO: 415174 - DNA, 33 bp, Homo sapien
agatcttcctttgcactggaataacttcttgaa

SEQ ID NO: 415175 - DNA, 33 bp, Homo sapien
aggtaggatgtccagacaaaaaagaacaattgt

SEQ ID NO: 415176 - DNA, 33 bp, Homo sapien
aggtaggatgtccagataaaaaagaacaattgt

SEQ ID NO: 415177 - DNA, 33 bp, Homo sapien
aagtgggagtgtctaaaatcaaattgagaaaaa

SEQ ID NO: 415178 - DNA, 33 bp, Homo sapien
aagtgggagtgtctaatatcaaattgagaaaaa

SEQ ID NO: 415179 - DNA, 33 bp, Homo sapien
gataacatttcaacataagacttggcagggtca

SEQ ID NO: 415180 - DNA, 33 bp, Homo sapien
gataacatttcaacatgagacttggcagggtca

SEQ ID NO: 415181 - DNA, 33 bp, Homo sapien
ggttatatacacaaaaattagtgtccctatatc

SEQ ID NO: 415182 - DNA, 33 bp, Homo sapien
ggttatatacacaaaacttagtgtccctatatc

SEQ ID NO: 415183 - DNA, 33 bp, Homo sapien
aaccactatgaatgccaccaaaaattgcctcat

SEQ ID NO: 415184 - DNA, 33 bp, Homo sapien
aaccactatgaatgccgccaaaaattgcctcat

SEQ ID NO: 415185 - DNA, 33 bp, Homo sapien
tttgaaaagtcgtttcccaggtagaattttctt

SEQ ID NO: 415186 - DNA, 33 bp, Homo sapien
tttgaaaagtcgtttctcaggtagaattttctt

SEQ ID NO: 415187 - DNA, 33 bp, Homo sapien
ttcgctcctaaacatacacccaaaagaattgaa

SEQ ID NO: 415188 - DNA, 33 bp, Homo sapien
ttcgctcctaaacatatacccaaaagaattgaa

SEQ ID NO: 415189 - DNA, 33 bp, Homo sapien
gaaggggcacgcaatcaagttccagacaaagag

SEQ ID NO: 415190 - DNA, 33 bp, Homo sapien
gaaggggcacgcaatcgagttccagacaaagag

SEQ ID NO: 415191 - DNA, 33 bp, Homo sapien
gaaatgtttgcaatcaagaagaacagtagccat

SEQ ID NO: 415192 - DNA, 33 bp, Homo sapien
gaaatgtttgcaatcatgaagaacagtagccat

SEQ ID NO: 415193 - DNA, 33 bp, Homo sapien
aagaacagtagccataagtcagatctattttca

SEQ ID NO: 415194 - DNA, 33 bp, Homo sapien
aagaacagtagccataggtcagatctattttca

SEQ ID NO: 415195 - DNA, 33 bp, Homo sapien
aaaacttgaaagcggcaagtatgatgaaaaaca

SEQ ID NO: 415196 - DNA, 33 bp, Homo sapien
aaaacttgaaagcggcgagtatgatgaaaaaca

SEQ ID NO: 415197 - DNA, 33 bp, Homo sapien
gggaaggctgtaagtacgagactccaacctttg

SEQ ID NO: 415198 - DNA, 33 bp, Homo sapien
gggaaggctgtaagtatgagactccaacctttg

SEQ ID NO: 415199 - DNA, 33 bp, Homo sapien
atggcgtttttcacacacattcaataattttaa

SEQ ID NO: 415200 - DNA, 33 bp, Homo sapien
atggcgtttttcacacgcattcaataattttaa

SEQ ID NO: 415201 - DNA, 33 bp, Homo sapien
tatgccctcttttctacgtgtccaaatccttac

SEQ ID NO: 415202 - DNA, 33 bp, Homo sapien
tatgccctcttttctatgtgtccaaatccttac

SEQ ID NO: 415203 - DNA, 33 bp, Homo sapien
gtccaactggagagtaggtatgtagcagccagc

SEQ ID NO: 415204 - DNA, 33 bp, Homo sapien
gtccaactggagagtatgtatgtagcagccagc

SEQ ID NO: 415205 - DNA, 33 bp, Homo sapien
taataggaatctcctagaacttgacaatgtaag

SEQ ID NO: 415206 - DNA, 33 bp, Homo sapien
taataggaatctcctataacttgacaatgtaag

SEQ ID NO: 415207 - DNA, 33 bp, Homo sapien
ctcctccccaagtagaaagaacgatgatctaac

SEQ ID NO: 415208 - DNA, 33 bp, Homo sapien
ctcctccccaagtagagagaacgatgatctaac

SEQ ID NO: 415209 - DNA, 33 bp, Homo sapien
aaggctatttattttcaaccaatttgatagctg

SEQ ID NO: 415210 - DNA, 33 bp, Homo sapien
aaggctatttattttccaccaatttgatagctg

SEQ ID NO: 415211 - DNA, 33 bp, Homo sapien
acatcaaggctaattacgtgcgaagcaattgag

SEQ ID NO: 415212 - DNA, 33 bp, Homo sapien
acatcaaggctaattatgtgcgaagcaattgag

SEQ ID NO: 415213 - DNA, 33 bp, Homo sapien
gagggttacatttccaaataaattagaggtcaa

SEQ ID NO: 415214 - DNA, 33 bp, Homo sapien
gagggttacatttccagataaattagaggtcaa

SEQ ID NO: 415215 - DNA, 33 bp, Homo sapien
tcaaactcctttcttcactgcgttactactgtt

SEQ ID NO: 415216 - DNA, 33 bp, Homo sapien
tcaaactcctttcttcgctgcgttactactgtt

SEQ ID NO: 415217 - DNA, 33 bp, Homo sapien
aaaaagagaactggaacaccacagagtttacaa

SEQ ID NO: 415218 - DNA, 33 bp, Homo sapien
aaaaagagaactggaataccacagagtttacaa

SEQ ID NO: 415219 - DNA, 33 bp, Homo sapien
cttattaagtcatgggccataggatccacttga

SEQ ID NO: 415220 - DNA, 33 bp, Homo sapien
cttattaagtcatggggcataggatccacttga

SEQ ID NO: 415221 - DNA, 33 bp, Homo sapien
ttgtaacttgcaatacaatgatgtcaattatgt

SEQ ID NO: 415222 - DNA, 33 bp, Homo sapien
ttgtaacttgcaatacgatgatgtcaattatgt

SEQ ID NO: 415223 - DNA, 33 bp, Homo sapien
gattagatgaggaatgcataatggatatttggc

SEQ ID NO: 415224 - DNA, 33 bp, Homo sapien
gattagatgaggaatggataatggatatttggc

SEQ ID NO: 415225 - DNA, 33 bp, Homo sapien
aaggaacagaggaaaacggaatggcacaaatga

SEQ ID NO: 415226 - DNA, 33 bp, Homo sapien
aaggaacagaggaaaatggaatggcacaaatga

SEQ ID NO: 415227 - DNA, 33 bp, Homo sapien; identical to SEQ ID NO: 415225

SEQ ID NO: 415228 - DNA, 33 bp, Homo sapien; identical to SEQ ID NO: 415226

SEQ ID NO: 415229 - DNA, 33 bp, Homo sapien
catggaaacatgataacaggatggaaggaaaac

SEQ ID NO: 415230 - DNA, 33 bp, Homo sapien
catggaaacatgataagaggatggaaggaaaac

SEQ ID NO: 415231 - DNA, 33 bp, Homo sapien
tttcctatgctcctaccacgctgaactccttgt

SEQ ID NO: 415232 - DNA, 33 bp, Homo sapien
tttcctatgctcctacgacgctgaactccttgt

SEQ ID NO: 415233 - DNA, 33 bp, Homo sapien
tttgaggccctctgaactacaacttctaaactg

SEQ ID NO: 415234 - DNA, 33 bp, Homo sapien
tttgaggccctctgaattacaacttctaaactg

SEQ ID NO: 415235 - DNA, 33 bp, Homo sapien
tttcccaatttgtaacagtcatggaaccatttt

SEQ ID NO: 415236 - DNA, 33 bp, Homo sapien
tttcccaatttgtaacggtcatggaaccatttt

SEQ ID NO: 415237 - DNA, 33 bp, Homo sapien
atgagaagtgggaatacgaagattacaaagtga

SEQ ID NO: 415238 - DNA, 33 bp, Homo sapien
atgagaagtgggaatatgaagattacaaagtga

SEQ ID NO: 415239 - DNA, 33 bp, Homo sapien
tatttctcacactgcaaaggtcaagaaagtacc

SEQ ID NO: 415240 - DNA, 33 bp, Homo sapien
tatttctcacactgcagaggtcaagaaagtacc

SEQ ID NO: 415241 - DNA, 33 bp, Homo sapien
ctataaaaaagttcacactcatattaaaggacg

SEQ ID NO: 415242 - DNA, 33 bp, Homo sapien
ctataaaaaagttcacgctcatattaaaggacg

SEQ ID NO: 415243 - DNA, 33 bp, Homo sapien
atactatagattggtcccgtggctagtataaaa

SEQ ID NO: 415244 - DNA, 33 bp, Homo sapien
atactatagattggtctcgtggctagtataaaa

SEQ ID NO: 415245 - DNA, 33 bp, Homo sapien
gttcagtttgtgtacccgagtagcaagcacaat

SEQ ID NO: 415246 - DNA, 33 bp, Homo sapien
gttcagtttgtgtacctgagtagcaagcacaat

SEQ ID NO: 415247 - DNA, 33 bp, Homo sapien
aagaagactgcaatgaaggaagactccagagaa

SEQ ID NO: 415248 - DNA, 33 bp, Homo sapien
aagaagactgcaatgagggaagactccagagaa

SEQ ID NO: 415249 - DNA, 33 bp, Homo sapien
caatatcagagtttccaaaactttaaatataca

SEQ ID NO: 415250 - DNA, 33 bp, Homo sapien
caatatcagagtttccgaaactttaaatataca

SEQ ID NO: 415251 - DNA, 33 bp, Homo sapien
cttgcaagtgcaagtcacgttgaactagcttca

SEQ ID NO: 415252 - DNA, 33 bp, Homo sapien
cttgcaagtgcaagtcgcgttgaactagcttca

SEQ ID NO: 415253 - DNA, 33 bp, Homo sapien
aggatcagttattgcacataaagcacagaccac

SEQ ID NO: 415254 - DNA, 33 bp, Homo sapien
aggatcagttattgcatataaagcacagaccac

SEQ ID NO: 415255 - DNA, 33 bp, Homo sapien
tagaagttaaagagccacaccaagtgaacctta

SEQ ID NO: 415256 - DNA, 33 bp, Homo sapien
tagaagttaaagagccgcaccaagtgaacctta

SEQ ID NO: 415257 - DNA, 33 bp, Homo sapien
ttctcaggctatatgccagaaatctcacatatg

SEQ ID NO: 415258 - DNA, 33 bp, Homo sapien
ttctcaggctatatgctagaaatctcacatatg

SEQ ID NO: 415259 - DNA, 33 bp, Homo sapien
actccttgaaggtaaaataagtaggtgagttta

SEQ ID NO: 415260 - DNA, 33 bp, Homo sapien
actccttgaaggtaaagtaagtaggtgagttta

SEQ ID NO: 415261 - DNA, 33 bp, Homo sapien
aattgttcattcttgtcaatctgaactacaaat

SEQ ID NO: 415262 - DNA, 33 bp, Homo sapien
aattgttcattcttgtgaatctgaactacaaat

SEQ ID NO: 415263 - DNA, 33 bp, Homo sapien
tttaaagtttccgtgcaaatacatatatacttt

SEQ ID NO: 415264 - DNA, 33 bp, Homo sapien
tttaaagtttccgtgcgaatacatatatacttt

SEQ ID NO: 415265 - DNA, 33 bp, Homo sapien
catcaattgaaattcgcttccggtgccaggtga

SEQ ID NO: 415266 - DNA, 33 bp, Homo sapien
catcaattgaaattcggttccggtgccaggtga

SEQ ID NO: 415267 - DNA, 33 bp, Homo sapien
ctgtgtgtgtaggtaacagtgctatgaaaatct

SEQ ID NO: 415268 - DNA, 33 bp, Homo sapien
ctgtgtgtgtaggtaatagtgctatgaaaatct

SEQ ID NO: 415269 - DNA, 33 bp, Homo sapien
ctagtatttgtcatagcaactttaagtcataaa

SEQ ID NO: 415270 - DNA, 33 bp, Homo sapien
ctagtatttgtcatagtaactttaagtcataaa

SEQ ID NO: 415271 - DNA, 33 bp, Homo sapien
gctcaacaccaaattaactggctagattaggaa

SEQ ID NO: 415272 - DNA, 33 bp, Homo sapien
gctcaacaccaaattatctggctagattaggaa

SEQ ID NO: 415273 - DNA, 33 bp, Homo sapien
tgtgatttttatagcccaacatccctgccttta

SEQ ID NO: 415274 - DNA, 33 bp, Homo sapien
tgtgatttttatagccgaacatccctgccttta

SEQ ID NO: 415275 - DNA, 33 bp, Homo sapien
taaatttggggttctagtacttagaaagaatgg

SEQ ID NO: 415276 - DNA, 33 bp, Homo sapien
taaatttggggttctattacttagaaagaatgg

SEQ ID NO: 415277 - DNA, 33 bp, Homo sapien
tcttctatttcctgccgagagggatgacccaat

SEQ ID NO: 415278 - DNA, 33 bp, Homo sapien
tcttctatttcctgcctagagggatgacccaat

SEQ ID NO: 415279 - DNA, 33 bp, Homo sapien
atgccaccagccacgaggtgatcttgatttgag

SEQ ID NO: 415280 - DNA, 33 bp, Homo sapien
atgccaccagccacgatgtgatcttgatttgag

SEQ ID NO: 415281 - DNA, 33 bp, Homo sapien
aaagagggatgagcaacgtgtcaatcaggcttc

SEQ ID NO: 415282 - DNA, 33 bp, Homo sapien
aaagagggatgagcaatgtgtcaatcaggcttc

SEQ ID NO: 415283 - DNA, 33 bp, Homo sapien
cttctcttgtagtcaacatttggatatgtgaat

SEQ ID NO: 415284 - DNA, 33 bp, Homo sapien
cttctcttgtagtcaatatttggatatgtgaat

SEQ ID NO: 415285 - DNA, 33 bp, Homo sapien
aggaagctcggtgttacgtcagtgatgttggtt

SEQ ID NO: 415286 - DNA, 33 bp, Homo sapien
aggaagctcggtgttatgtcagtgatgttggtt

SEQ ID NO: 415287 - DNA, 33 bp, Homo sapien
atcttgcttgcacttacgtctcaggtcaaatgc

SEQ ID NO: 415288 - DNA, 33 bp, Homo sapien
atcttgcttgcacttaggtctcaggtcaaatgc

SEQ ID NO: 415289 - DNA, 33 bp, Homo sapien
gtatgacacttcatcaatagggtttttgtttca

SEQ ID NO: 415290 - DNA, 33 bp, Homo sapien
gtatgacacttcatcagtagggtttttgtttca

SEQ ID NO: 415291 - DNA, 33 bp, Homo sapien
gtgcaacgaggcgctacgggaaagtgaaaagaa

SEQ ID NO: 415292 - DNA, 33 bp, Homo sapien
gtgcaacgaggcgctatgggaaagtgaaaagaa

SEQ ID NO: 415293 - DNA, 33 bp, Homo sapien
agtatgaactcccttacagtaggtgggtgcaaa

SEQ ID NO: 415294 - DNA, 33 bp, Homo sapien
agtatgaactcccttatagtaggtgggtgcaaa

SEQ ID NO: 415295 - DNA, 33 bp, Homo sapien
gagtgcagagattagacggttagatgctcctcc

SEQ ID NO: 415296 - DNA, 33 bp, Homo sapien
gagtgcagagattagagggttagatgctcctcc

SEQ ID NO: 415297 - DNA, 33 bp, Homo sapien
cagacatctcgtgaacagtcatttagtaggtgg

SEQ ID NO: 415298 - DNA, 33 bp, Homo sapien
cagacatctcgtgaacggtcatttagtaggtgg

SEQ ID NO: 415299 - DNA, 33 bp, Homo sapien
tcatccctgtttatctaaaggcaatttccacat

SEQ ID NO: 415300 - DNA, 33 bp, Homo sapien
tcatccctgtttatctgaaggcaatttccacat

SEQ ID NO: 415301 - DNA, 33 bp, Homo sapien
gtaaagtgcttaccacggtgcacgacatagtat

SEQ ID NO: 415302 - DNA, 33 bp, Homo sapien
gtaaagtgcttaccactgtgcacgacatagtat

SEQ ID NO: 415303 - DNA, 33 bp, Homo sapien
gtccaccaccttgaaaaatcaatacaggataga

SEQ ID NO: 415304 - DNA, 33 bp, Homo sapien
gtccaccaccttgaaagatcaatacaggataga

SEQ ID NO: 415305 - DNA, 33 bp, Homo sapien
tgttgtatgtcaattccatgcagataattcagt

SEQ ID NO: 415306 - DNA, 33 bp, Homo sapien
tgttgtatgtcaattctatgcagataattcagt

SEQ ID NO: 415307 - DNA, 33 bp, Homo sapien
aacattttgcaaaaccaattccttttatgcaca

SEQ ID NO: 415308 - DNA, 33 bp, Homo sapien
aacattttgcaaaacctattccttttatgcaca

SEQ ID NO: 415309 - DNA, 33 bp, Homo sapien
tctgtaacacttcctaaaaactcagcgctaaat

SEQ ID NO: 415310 - DNA, 33 bp, Homo sapien
tctgtaacacttcctacaaactcagcgctaaat

SEQ ID NO: 415311 - DNA, 33 bp, Homo sapien
caaacctgtggtgaaacagtcccattgttactg

SEQ ID NO: 415312 - DNA, 33 bp, Homo sapien
caaacctgtggtgaaatagtcccattgttactg

SEQ ID NO: 415313 - DNA, 33 bp, Homo sapien
aggaaattacagtgtcaagaaaaagacccagga

SEQ ID NO: 415314 - DNA, 33 bp, Homo sapien
aggaaattacagtgtcgagaaaaagacccagga

SEQ ID NO: 415315 - DNA, 33 bp, Homo sapien
aaggtgaccatgtccaacgtcttgtctgatatg

SEQ ID NO: 415316 - DNA, 33 bp, Homo sapien
aaggtgaccatgtccagcgtcttgtctgatatg

SEQ ID NO: 415317 - DNA, 33 bp, Homo sapien
agttaattccttaaagccatcgaatctggagcc

SEQ ID NO: 415318 - DNA, 33 bp, Homo sapien
agttaattccttaaagtcatcgaatctggagcc

SEQ ID NO: 415319 - DNA, 33 bp, Homo sapien
tcaccaagtgaaagcacatcaagtctgccactg

SEQ ID NO: 415320 - DNA, 33 bp, Homo sapien
tcaccaagtgaaagcatatcaagtctgccactg

SEQ ID NO: 415321 - DNA, 33 bp, Homo sapien
atgcatgagtttctcaagggactcatgactcct

SEQ ID NO: 415322 - DNA, 33 bp, Homo sapien
atgcatgagtttctcaggggactcatgactcct

SEQ ID NO: 415323 - DNA, 33 bp, Homo sapien
tactctaattttctcaaaatgcagccacaatgc

SEQ ID NO: 415324 - DNA, 33 bp, Homo sapien
tactctaattttctcagaatgcagccacaatgc

SEQ ID NO: 415325 - DNA, 33 bp, Homo sapien
aactgagaaacatctgaataatgaagagcattg

SEQ ID NO: 415326 - DNA, 33 bp, Homo sapien
aactgagaaacatctggataatgaagagcattg

SEQ ID NO: 415327 - DNA, 33 bp, Homo sapien
gccacatcttgctttacgtaaaaatgaaaggag

SEQ ID NO: 415328 - DNA, 33 bp, Homo sapien
gccacatcttgctttatgtaaaaatgaaaggag

SEQ ID NO: 415329 - DNA, 33 bp, Homo sapien
gaccttcttctggacacatgccagcatggatca

SEQ ID NO: 415330 - DNA, 33 bp, Homo sapien
gaccttcttctggacagatgccagcatggatca

SEQ ID NO: 415331 - DNA, 33 bp, Homo sapien
atttggaacataagcacaggcaggtactgagaa

SEQ ID NO: 415332 - DNA, 33 bp, Homo sapien
atttggaacataagcataggcaggtactgagaa

SEQ ID NO: 415333 - DNA, 33 bp, Homo sapien
ttatataaagacaccaatgaaaagtcaatatga

SEQ ID NO: 415334 - DNA, 33 bp, Homo sapien
ttatataaagacaccagtgaaaagtcaatatga

SEQ ID NO: 415335 - DNA, 33 bp, Homo sapien
gttgtttaagagtctgacaccctcctcctctct

SEQ ID NO: 415336 - DNA, 33 bp, Homo sapien
gttgtttaagagtctggcaccctcctcctctct

SEQ ID NO: 415337 - DNA, 33 bp, Homo sapien
aaaatgaaattaaacacgtagaggcttttacac

SEQ ID NO: 415338 - DNA, 33 bp, Homo sapien
aaaatgaaattaaacatgtagaggcttttacac

SEQ ID NO: 415339 - DNA, 33 bp, Homo sapien
caaacaacagggttctaaaacgcagagacccgg

SEQ ID NO: 415340 - DNA, 33 bp, Homo sapien
caaacaacagggttctgaaacgcagagacccgg

SEQ ID NO: 415341 - DNA, 33 bp, Homo sapien
ccttgtttctctgcctcaaaacagcacacctca

SEQ ID NO: 415342 - DNA, 33 bp, Homo sapien
ccttgtttctctgccttaaaacagcacacctca

SEQ ID NO: 415343 - DNA, 33 bp, Homo sapien
gcctcagaaagcaagacggtgctaacaatggga

SEQ ID NO: 415344 - DNA, 33 bp, Homo sapien
gcctcagaaagcaagatggtgctaacaatggga

SEQ ID NO: 415345 - DNA, 33 bp, Homo sapien
ggagtgtcctaatataaccgaaaaggaagcctt

SEQ ID NO: 415346 - DNA, 33 bp, Homo sapien
ggagtgtcctaatatatccgaaaaggaagcctt

SEQ ID NO: 415347 - DNA, 33 bp, Homo sapien
cagaataaaccatgataaggacggcagaaagca

SEQ ID NO: 415348 - DNA, 33 bp, Homo sapien
cagaataaaccatgatgaggacggcagaaagca

SEQ ID NO: 415349 - DNA, 33 bp, Homo sapien
cctgggtacacatggacataaagttaggaacag

SEQ ID NO: 415350 - DNA, 33 bp, Homo sapien
cctgggtacacatggatataaagttaggaacag

SEQ ID NO: 415351 - DNA, 33 bp, Homo sapien
cacaaatttacatgttcaaatcctaacctccaa

SEQ ID NO: 415352 - DNA, 33 bp, Homo sapien
cacaaatttacatgttgaaatcctaacctccaa

SEQ ID NO: 415353 - DNA, 33 bp, Homo sapien
aagaatataggaaaagcagcaacggatttactg

SEQ ID NO: 415354 - DNA, 33 bp, Homo sapien
aagaatataggaaaaggagcaacggatttactg

SEQ ID NO: 415355 - DNA, 33 bp, Homo sapien
ccagacatctgtttaacgtgtttacttgccagt

SEQ ID NO: 415356 - DNA, 33 bp, Homo sapien
ccagacatctgtttaatgtgtttacttgccagt

SEQ ID NO: 415357 - DNA, 33 bp, Homo sapien
tcttacaaaaattaaaacctgagagatcccaag

SEQ ID NO: 415358 - DNA, 33 bp, Homo sapien
tcttacaaaaattaaaccctgagagatcccaag

SEQ ID NO: 415359 - DNA, 33 bp, Homo sapien
tgacttgcatactttgaaacatacttgatattt

SEQ ID NO: 415360 - DNA, 33 bp, Homo sapien
tgacttgcatactttggaacatacttgatattt

SEQ ID NO: 415361 - DNA, 33 bp, Homo sapien
atttcttccagatgaccggtgttctttcttact

SEQ ID NO: 415362 - DNA, 33 bp, Homo sapien
atttcttccagatgactggtgttctttcttact

SEQ ID NO: 415363 - DNA, 33 bp, Homo sapien
gtgctttgaaagactgaacatctaatttgttga

SEQ ID NO: 415364 - DNA, 33 bp, Homo sapien
gtgctttgaaagactgcacatctaatttgttga

SEQ ID NO: 415365 - DNA, 33 bp, Homo sapien
tgtaacgacagctagacggacaactttctataa

SEQ ID NO: 415366 - DNA, 33 bp, Homo sapien
tgtaacgacagctagatggacaactttctataa

SEQ ID NO: 415367 - DNA, 33 bp, Homo sapien
acaaagactcatattaccagcctcttaaataca

SEQ ID NO: 415368 - DNA, 33 bp, Homo sapien
acaaagactcatattatcagcctcttaaataca

SEQ ID NO: 415369 - DNA, 33 bp, Homo sapien
agttgaaaatgtgagaatcagacaatttagcag

SEQ ID NO: 415370 - DNA, 33 bp, Homo sapien
agttgaaaatgtgagattcagacaatttagcag

SEQ ID NO: 415371 - DNA, 33 bp, Homo sapien
ataactgtttctgtaaatgtctgcacaatgaat

SEQ ID NO: 415372 - DNA, 33 bp, Homo sapien
ataactgtttctgtaactgtctgcacaatgaat

SEQ ID NO: 415373 - DNA, 33 bp, Homo sapien
caataccctcaaacacaaaaaatgcagaaaagc

SEQ ID NO: 415374 - DNA, 33 bp, Homo sapien
caataccctcaaacacgaaaaatgcagaaaagc

SEQ ID NO: 415375 - DNA, 33 bp, Homo sapien
gaaaaacaccataactaaagttcagaggctaag

SEQ ID NO: 415376 - DNA, 33 bp, Homo sapien
gaaaaacaccataactgaagttcagaggctaag

SEQ ID NO: 415377 - DNA, 33 bp, Homo sapien
acatatcattatgagggaaaacatgtgaaatat

SEQ ID NO: 415378 - DNA, 33 bp, Homo sapien
acatatcattatgaggtaaaacatgtgaaatat

SEQ ID NO: 415379 - DNA, 33 bp, Homo sapien
aggatcggtatgactacatgattgctaatatac

SEQ ID NO: 415380 - DNA, 33 bp, Homo sapien
aggatcggtatgactatatgattgctaatatac

SEQ ID NO: 415381 - DNA, 33 bp, Homo sapien
agagaaccatttgggaatcagttattcattcct

SEQ ID NO: 415382 - DNA, 33 bp, Homo sapien
agagaaccatttgggagtcagttattcattcct

SEQ ID NO: 415383 - DNA, 33 bp, Homo sapien
tctcaaatctctaataaaactcggctccatccc

SEQ ID NO: 415384 - DNA, 33 bp, Homo sapien
tctcaaatctctaatagaactcggctccatccc

SEQ ID NO: 415385 - DNA, 33 bp, Homo sapien
tgtaaggttactgagaaaacggaaagctatgaa

SEQ ID NO: 415386 - DNA, 33 bp, Homo sapien
tgtaaggttactgagagaacggaaagctatgaa

SEQ ID NO: 415387 - DNA, 33 bp, Homo sapien
accttttgtttcaaagaccatttattacggatt

SEQ ID NO: 415388 - DNA, 33 bp, Homo sapien
accttttgtttcaaaggccatttattacggatt

SEQ ID NO: 415389 - DNA, 33 bp, Homo sapien
atgtaagaaagctcagcctccttctaagctcag

SEQ ID NO: 415390 - DNA, 33 bp, Homo sapien
atgtaagaaagctcaggctccttctaagctcag

SEQ ID NO: 415391 - DNA, 33 bp, Homo sapien
gagtaggaattaagccaaaattgaggaagctaa

SEQ ID NO: 415392 - DNA, 33 bp, Homo sapien
gagtaggaattaagccgaaattgaggaagctaa

SEQ ID NO: 415393 - DNA, 33 bp, Homo sapien
tttatgtttaactggactattgagaatgaattg

SEQ ID NO: 415394 - DNA, 33 bp, Homo sapien
tttatgtttaactggagtattgagaatgaattg

SEQ ID NO: 415395 - DNA, 33 bp, Homo sapien
ggatggattaatattgacaaagatctcctaaaa

SEQ ID NO: 415396 - DNA, 33 bp, Homo sapien
ggatggattaatattggcaaagatctcctaaaa

SEQ ID NO: 415397 - DNA, 33 bp, Homo sapien
gacaattacatccagaagtgtgaccatttacac

SEQ ID NO: 415398 - DNA, 33 bp, Homo sapien
gacaattacatccagatgtgtgaccatttacac

SEQ ID NO: 415399 - DNA, 33 bp, Homo sapien
cagtttggtgattgtcaagaaaaagaagcattc

SEQ ID NO: 415400 - DNA, 33 bp, Homo sapien
cagtttggtgattgtcgagaaaaagaagcattc

SEQ ID NO: 415401 - DNA, 33 bp, Homo sapien
ctttgatctcccccaacgtatacccacaatctc

SEQ ID NO: 415402 - DNA, 33 bp, Homo sapien
ctttgatctcccccaatgtatacccacaatctc

SEQ ID NO: 415403 - DNA, 33 bp, Homo sapien
acctgagaatcctataccttctgtcgttctcct

SEQ ID NO: 415404 - DNA, 33 bp, Homo sapien
acctgagaatcctatagcttctgtcgttctcct

SEQ ID NO: 415405 - DNA, 33 bp, Homo sapien
tctaggatctctttgcaatttatctttttatca

SEQ ID NO: 415406 - DNA, 33 bp, Homo sapien
tctaggatctctttgcgatttatctttttatca

SEQ ID NO: 415407 - DNA, 33 bp, Homo sapien
agtttttgactgataacgttatgatccatcgag

SEQ ID NO: 415408 - DNA, 33 bp, Homo sapien
agtttttgactgataatgttatgatccatcgag

SEQ ID NO: 415409 - DNA, 33 bp, Homo sapien
taagcatggcaatctacactttatcttaaaaaa

SEQ ID NO: 415410 - DNA, 33 bp, Homo sapien
taagcatggcaatctatactttatcttaaaaaa

SEQ ID NO: 415411 - DNA, 33 bp, Homo sapien
attatatctttttcaaagtggtgaaaatcaaat

SEQ ID NO: 415412 - DNA, 33 bp, Homo sapien
attatatctttttcaaggtggtgaaaatcaaat

SEQ ID NO: 415413 - DNA, 33 bp, Homo sapien
gattaatatcttatcccatctgtaagtgctgtt

SEQ ID NO: 415414 - DNA, 33 bp, Homo sapien
gattaatatcttatccgatctgtaagtgctgtt

SEQ ID NO: 415415 - DNA, 33 bp, Homo sapien
gctgagggtatttgtgaatcatcagcctatatg

SEQ ID NO: 415416 - DNA, 33 bp, Homo sapien
gctgagggtatttgtggatcatcagcctatatg

SEQ ID NO: 415417 - DNA, 33 bp, Homo sapien
actactctgcatcataagaaaatcttttggtgt

SEQ ID NO: 415418 - DNA, 33 bp, Homo sapien
actactctgcatcataggaaaatcttttggtgt

SEQ ID NO: 415419 - DNA, 33 bp, Homo sapien
gaaaactgtggtcgagaaaactggcaaaagcag

SEQ ID NO: 415420 - DNA, 33 bp, Homo sapien
gaaaactgtggtcgaggaaactggcaaaagcag

SEQ ID NO: 415421 - DNA, 33 bp, Homo sapien
atatcgttttcttcacagccttcctcttccaga

SEQ ID NO: 415422 - DNA, 33 bp, Homo sapien
atatcgttttcttcacggccttcctcttccaga

SEQ ID NO: 415423 - DNA, 33 bp, Homo sapien
tccagactgagtttgcagagatttatgtggaga

SEQ ID NO: 415424 - DNA, 33 bp, Homo sapien
tccagactgagtttgcggagatttatgtggaga

SEQ ID NO: 415425 - DNA, 33 bp, Homo sapien
cgtgtgctctaaaatagggaactgaattctgga

SEQ ID NO: 415426 - DNA, 33 bp, Homo sapien
cgtgtgctctaaaatatggaactgaattctgga

SEQ ID NO: 415427 - DNA, 33 bp, Homo sapien
gttcatctttgtatcacgtgcactggaaataat

SEQ ID NO: 415428 - DNA, 33 bp, Homo sapien
gttcatctttgtatcatgtgcactggaaataat

SEQ ID NO: 415429 - DNA, 33 bp, Homo sapien
ttactaagacctgttgaaagaaatagtacaata

SEQ ID NO: 415430 - DNA, 33 bp, Homo sapien
ttactaagacctgttggaagaaatagtacaata

SEQ ID NO: 415431 - DNA, 33 bp, Homo sapien
gatctacttggctccaaattccacactgtcttc

SEQ ID NO: 415432 - DNA, 33 bp, Homo sapien
gatctacttggctccacattccacactgtcttc

SEQ ID NO: 415433 - DNA, 33 bp, Homo sapien
aataatccagctaaaccgtaatgcaggagaaga

SEQ ID NO: 415434 - DNA, 33 bp, Homo sapien
aataatccagctaaactgtaatgcaggagaaga

SEQ ID NO: 415435 - DNA, 33 bp, Homo sapien
tttcatcccaaacagcacaggccttgtctaaca

SEQ ID NO: 415436 - DNA, 33 bp, Homo sapien
tttcatcccaaacagcgcaggccttgtctaaca

SEQ ID NO: 415437 - DNA, 33 bp, Homo sapien
actgtaaagtctaaaactgtattctttatctac

SEQ ID NO: 415438 - DNA, 33 bp, Homo sapien
actgtaaagtctaaaattgtattctttatctac

SEQ ID NO: 415439 - DNA, 33 bp, Homo sapien
ttcattagataggtcactgaatagttgagaaat

SEQ ID NO: 415440 - DNA, 33 bp, Homo sapien
ttcattagataggtcattgaatagttgagaaat

SEQ ID NO: 415441 - DNA, 33 bp, Homo sapien
catctttttcaagtacaattgccgcttctgagt

SEQ ID NO: 415442 - DNA, 33 bp, Homo sapien
catctttttcaagtaccattgccgcttctgagt

SEQ ID NO: 415443 - DNA, 33 bp, Homo sapien
ggagtttctaatgcacacttgcagtcattgaat

SEQ ID NO: 415444 - DNA, 33 bp, Homo sapien
ggagtttctaatgcacccttgcagtcattgaat

SEQ ID NO: 415445 - DNA, 33 bp, Homo sapien
ctgattgtggaaagaaagcattggcagggagat

SEQ ID NO: 415446 - DNA, 33 bp, Homo sapien
ctgattgtggaaagaaggcattggcagggagat

SEQ ID NO: 415447 - DNA, 33 bp, Homo sapien
tacatacagatcttaacgatgatgataagaaca

SEQ ID NO: 415448 - DNA, 33 bp, Homo sapien
tacatacagatcttaatgatgatgataagaaca

SEQ ID NO: 415449 - DNA, 33 bp, Homo sapien
ttaaaataggtcttggacaattgtttagttctt

SEQ ID NO: 415450 - DNA, 33 bp, Homo sapien
ttaaaataggtcttgggcaattgtttagttctt

SEQ ID NO: 415451 - DNA, 33 bp, Homo sapien
agactactctgccataaggaaaagtccatggtc

SEQ ID NO: 415452 - DNA, 33 bp, Homo sapien
agactactctgccatagggaaaagtccatggtc

SEQ ID NO: 415453 - DNA, 33 bp, Homo sapien
aatctcattagagagaaaggaagaggccaggtc

SEQ ID NO: 415454 - DNA, 33 bp, Homo sapien
aatctcattagagagagaggaagaggccaggtc

SEQ ID NO: 415455 - DNA, 33 bp, Homo sapien
gatgtgttaccttttacatcagacatgctaaaa

SEQ ID NO: 415456 - DNA, 33 bp, Homo sapien
gatgtgttaccttttatatcagacatgctaaaa

SEQ ID NO: 415457 - DNA, 33 bp, Homo sapien
gtgttagtgtatttgacagcaaaggatcaagga

SEQ ID NO: 415458 - DNA, 33 bp, Homo sapien
gtgttagtgtatttgatagcaaaggatcaagga

SEQ ID NO: 415459 - DNA, 33 bp, Homo sapien
aaaaaaagaaaggcaaatcagaggaaggggata

SEQ ID NO: 415460 - DNA, 33 bp, Homo sapien
aaaaaaagaaaggcaattcagaggaaggggata

SEQ ID NO: 415461 - DNA, 33 bp, Homo sapien
gattgtccaatattcaaattttgccctgtggcc

SEQ ID NO: 415462 - DNA, 33 bp, Homo sapien
gattgtccaatattcagattttgccctgtggcc

SEQ ID NO: 415463 - DNA, 33 bp, Homo sapien
gagtactttaataaagaagtcagacatctctgc

SEQ ID NO: 415464 - DNA, 33 bp, Homo sapien
gagtactttaataaagcagtcagacatctctgc

SEQ ID NO: 415465 - DNA, 33 bp, Homo sapien
ccataacaaatgccacggggcttaaacaacata

SEQ ID NO: 415466 - DNA, 33 bp, Homo sapien
ccataacaaatgccactgggcttaaacaacata

SEQ ID NO: 415467 - DNA, 33 bp, Homo sapien
tgtggtataagagaaggagctaaacagagaaat

SEQ ID NO: 415468 - DNA, 33 bp, Homo sapien
tgtggtataagagaagtagctaaacagagaaat

SEQ ID NO: 415469 - DNA, 33 bp, Homo sapien
ttctaagcttttcaccaattctctatggaaatc

SEQ ID NO: 415470 - DNA, 33 bp, Homo sapien
ttctaagcttttcaccgattctctatggaaatc

SEQ ID NO: 415471 - DNA, 33 bp, Homo sapien
ttataagaaacctccgaatacctgaaaaagaca

SEQ ID NO: 415472 - DNA, 33 bp, Homo sapien
ttataagaaacctccggatacctgaaaaagaca

SEQ ID NO: 415473 - DNA, 33 bp, Homo sapien
ttcccatccaagaggcaactctgtataatctgc

SEQ ID NO: 415474 - DNA, 33 bp, Homo sapien
ttcccatccaagaggcgactctgtataatctgc

SEQ ID NO: 415475 - DNA, 33 bp, Homo sapien
tttattggcagtgaatcatgttgcctatctctg

SEQ ID NO: 415476 - DNA, 33 bp, Homo sapien
tttattggcagtgaattatgttgcctatctctg

SEQ ID NO: 415477 - DNA, 33 bp, Homo sapien
gggtttcctctgctgacgtggaatcacaaatta

SEQ ID NO: 415478 - DNA, 33 bp, Homo sapien
gggtttcctctgctgatgtggaatcacaaatta

SEQ ID NO: 415479 - DNA, 33 bp, Homo sapien
caaaccagtaaggcccggctaacagatattttc

SEQ ID NO: 415480 - DNA, 33 bp, Homo sapien
caaaccagtaaggccctgctaacagatattttc

SEQ ID NO: 415481 - DNA, 33 bp, Homo sapien
tgacttctggcagctaagcattatcacttggcc

SEQ ID NO: 415482 - DNA, 33 bp, Homo sapien
tgacttctggcagctacgcattatcacttggcc

SEQ ID NO: 415483 - DNA, 33 bp, Homo sapien
gaattaacatggttcaatagcaatttctttaga

SEQ ID NO: 415484 - DNA, 33 bp, Homo sapien
gaattaacatggttcagtagcaatttctttaga

SEQ ID NO: 415485 - DNA, 33 bp, Homo sapien
gtgtcacattcaaaaaaaataagtagcaatcgg

SEQ ID NO: 415486 - DNA, 33 bp, Homo sapien
gtgtcacattcaaaaagaataagtagcaatcgg

SEQ ID NO: 415487 - DNA, 33 bp, Homo sapien
gtcagccatcctcaagcagaatagaaacaaatg

SEQ ID NO: 415488 - DNA, 33 bp, Homo sapien
gtcagccatcctcaagtagaatagaaacaaatg

SEQ ID NO: 415489 - DNA, 33 bp, Homo sapien
atttgttaatcatggtcaaggatagactctttg

SEQ ID NO: 415490 - DNA, 33 bp, Homo sapien
atttgttaatcatggtgaaggatagactctttg

SEQ ID NO: 415491 - DNA, 33 bp, Homo sapien
gaaattgagaaagagaatctatcaaggcaatgg

SEQ ID NO: 415492 - DNA, 33 bp, Homo sapien
gaaattgagaaagagattctatcaaggcaatgg

SEQ ID NO: 415493 - DNA, 33 bp, Homo sapien
ataaggagggatcttgcaggatatgacaggaaa

SEQ ID NO: 415494 - DNA, 33 bp, Homo sapien
ataaggagggatcttgtaggatatgacaggaaa

SEQ ID NO: 415495 - DNA, 33 bp, Homo sapien
tgccagaggttttacactggttcattctcgtct

SEQ ID NO: 415496 - DNA, 33 bp, Homo sapien
tgccagaggttttacattggttcattctcgtct

SEQ ID NO: 415497 - DNA, 33 bp, Homo sapien
ttcatcctggttaagaaccattgctagggtgct

SEQ ID NO: 415498 - DNA, 33 bp, Homo sapien
ttcatcctggttaagagccattgctagggtgct

SEQ ID NO: 415499 - DNA, 33 bp, Homo sapien
tgcagaagattaaagacgaagacgtgcaatggg

SEQ ID NO: 415500 - DNA, 33 bp, Homo sapien
tgcagaagattaaagatgaagacgtgcaatggg

SEQ ID NO: 415501 - DNA, 33 bp, Homo sapien
gacttaagaaaacctaggccagaaagctactgg

SEQ ID NO: 415502 - DNA, 33 bp, Homo sapien
gacttaagaaaacctatgccagaaagctactgg

SEQ ID NO: 415503 - DNA, 33 bp, Homo sapien
tccaattcaaagagaacacagcaggtggtaggc

SEQ ID NO: 415504 - DNA, 33 bp, Homo sapien
tccaattcaaagagaatacagcaggtggtaggc

SEQ ID NO: 415505 - DNA, 33 bp, Homo sapien
agctgacctaaagaacaaatcatcacagcgact

SEQ ID NO: 415506 - DNA, 33 bp, Homo sapien
agctgacctaaagaacgaatcatcacagcgact

SEQ ID NO: 415507 - DNA, 33 bp, Homo sapien
agttcctctagcatcacccactcgctaacatca

SEQ ID NO: 415508 - DNA, 33 bp, Homo sapien
agttcctctagcatcatccactcgctaacatca

SEQ ID NO: 415509 - DNA, 33 bp, Homo sapien
agcctcggatatgtcactatcagtaaactaatg

SEQ ID NO: 415510 - DNA, 33 bp, Homo sapien
agcctcggatatgtcagtatcagtaaactaatg

SEQ ID NO: 415511 - DNA, 33 bp, Homo sapien
catcttcaaagcggcacggtccacttttgtgct

SEQ ID NO: 415512 - DNA, 33 bp, Homo sapien
catcttcaaagcggcatggtccacttttgtgct

SEQ ID NO: 415513 - DNA, 33 bp, Homo sapien
cctaggaaaggagtctcagaaaatgtgttggaa

SEQ ID NO: 415514 - DNA, 33 bp, Homo sapien
cctaggaaaggagtctgagaaaatgtgttggaa

SEQ ID NO: 415515 - DNA, 33 bp, Homo sapien
gaaatcaatcttgggcagccaaaacacatatgc

SEQ ID NO: 415516 - DNA, 33 bp, Homo sapien
gaaatcaatcttgggcggccaaaacacatatgc

SEQ ID NO: 415517 - DNA, 33 bp, Homo sapien
aataaacaagccagtacggaaagtctatttaca

SEQ ID NO: 415518 - DNA, 33 bp, Homo sapien
aataaacaagccagtatggaaagtctatttaca

SEQ ID NO: 415519 - DNA, 33 bp, Homo sapien
tgtggtacatatacaccattgaatgctatgaag

SEQ ID NO: 415520 - DNA, 33 bp, Homo sapien
tgtggtacatatacacgattgaatgctatgaag

SEQ ID NO: 415521 - DNA, 33 bp, Homo sapien
agtctgtttgttgcctgacagttgttggcttgt

SEQ ID NO: 415522 - DNA, 33 bp, Homo sapien
agtctgtttgttgccttacagttgttggcttgt

SEQ ID NO: 415523 - DNA, 33 bp, Homo sapien
tgtggacaaatccctacgcttggtgctctgaag

SEQ ID NO: 415524 - DNA, 33 bp, Homo sapien
tgtggacaaatccctatgcttggtgctctgaag

SEQ ID NO: 415525 - DNA, 33 bp, Homo sapien
cattccataccatttcccaagaacgtgctgtgg

SEQ ID NO: 415526 - DNA, 33 bp, Homo sapien
cattccataccatttctcaagaacgtgctgtgg

SEQ ID NO: 415527 - DNA, 33 bp, Homo sapien
ttcagtataacaatgacgtaagaggctgaatgt

SEQ ID NO: 415528 - DNA, 33 bp, Homo sapien
ttcagtataacaatgatgtaagaggctgaatgt

SEQ ID NO: 415529 - DNA, 33 bp, Homo sapien
agggaaaactggatgacgcagtaaatggagact

SEQ ID NO: 415530 - DNA, 33 bp, Homo sapien
agggaaaactggatgatgcagtaaatggagact

SEQ ID NO: 415531 - DNA, 33 bp, Homo sapien
gaacttcttagtggaaacttctaggcatgagtt

SEQ ID NO: 415532 - DNA, 33 bp, Homo sapien
gaacttcttagtggaaccttctaggcatgagtt

SEQ ID NO: 415533 - DNA, 33 bp, Homo sapien
catctagcacatagaaatactcaataactctct

SEQ ID NO: 415534 - DNA, 33 bp, Homo sapien
catctagcacatagaagtactcaataactctct

SEQ ID NO: 415535 - DNA, 33 bp, Homo sapien
aagggccaggttccccagacttatgaaatagcc

SEQ ID NO: 415536 - DNA, 33 bp, Homo sapien
aagggccaggttccccggacttatgaaatagcc

SEQ ID NO: 415537 - DNA, 33 bp, Homo sapien
aacctcattaagccaacgcaagaagctatgtga

SEQ ID NO: 415538 - DNA, 33 bp, Homo sapien
aacctcattaagccaatgcaagaagctatgtga

SEQ ID NO: 415539 - DNA, 33 bp, Homo sapien
ttttccaagcacaagaatctgccctttctcttt

SEQ ID NO: 415540 - DNA, 33 bp, Homo sapien
ttttccaagcacaagagtctgccctttctcttt

SEQ ID NO: 415541 - DNA, 33 bp, Homo sapien
aagagacacatcgaaaacttgatcctgggactt

SEQ ID NO: 415542 - DNA, 33 bp, Homo sapien
aagagacacatcgaaatcttgatcctgggactt

SEQ ID NO: 415543 - DNA, 33 bp, Homo sapien
tagtctcataaaaaaaaatcatgaggcatatga

SEQ ID NO: 415544 - DNA, 33 bp, Homo sapien
tagtctcataaaaaaatatcatgaggcatatga

SEQ ID NO: 415545 - DNA, 33 bp, Homo sapien
taagagacttgcaatgaatgtaataactggatg

SEQ ID NO: 415546 - DNA, 33 bp, Homo sapien
taagagacttgcaatggatgtaataactggatg

SEQ ID NO: 415547 - DNA, 33 bp, Homo sapien
aggagattgaaggaggaatcttatagagctgga

SEQ ID NO: 415548 - DNA, 33 bp, Homo sapien
aggagattgaaggagggatcttatagagctgga

SEQ ID NO: 415549 - DNA, 33 bp, Homo sapien
tttgtagggatctatgaacactgagctaaggat

SEQ ID NO: 415550 - DNA, 33 bp, Homo sapien
tttgtagggatctatggacactgagctaaggat

SEQ ID NO: 415551 - DNA, 33 bp, Homo sapien
tctgacagggaagatacgtatggaaatgtagtc

SEQ ID NO: 415552 - DNA, 33 bp, Homo sapien
tctgacagggaagatatgtatggaaatgtagtc

SEQ ID NO: 415553 - DNA, 33 bp, Homo sapien
atgcagtgttcggaatcaaaaatcagaactcaa

SEQ ID NO: 415554 - DNA, 33 bp, Homo sapien
atgcagtgttcggaattaaaaatcagaactcaa

SEQ ID NO: 415555 - DNA, 33 bp, Homo sapien
gtttagagtgagtttgaaggagcttaggatgaa

SEQ ID NO: 415556 - DNA, 33 bp, Homo sapien
gtttagagtgagtttggaggagcttaggatgaa

SEQ ID NO: 415557 - DNA, 33 bp, Homo sapien
atacttactgtaaagaccttcgacaggcttcct

SEQ ID NO: 415558 - DNA, 33 bp, Homo sapien
atacttactgtaaagatcttcgacaggcttcct

SEQ ID NO: 415559 - DNA, 33 bp, Homo sapien
cctaaccctatctacgccatggttttctgcaag

SEQ ID NO: 415560 - DNA, 33 bp, Homo sapien
cctaaccctatctacgtcatggttttctgcaag

SEQ ID NO: 415561 - DNA, 33 bp, Homo sapien
agcacaaggagctaaacaaatagaagtccaata

SEQ ID NO: 415562 - DNA, 33 bp, Homo sapien
agcacaaggagctaaagaaatagaagtccaata

SEQ ID NO: 415563 - DNA, 33 bp, Homo sapien
tctagctctgagagtcaaggaacctttctaagc

SEQ ID NO: 415564 - DNA, 33 bp, Homo sapien
tctagctctgagagtcgaggaacctttctaagc

SEQ ID NO: 415565 - DNA, 33 bp, Homo sapien
tctgaatctttggaaggagtaggaatcttagca

SEQ ID NO: 415566 - DNA, 33 bp, Homo sapien
tctgaatctttggaagtagtaggaatcttagca

SEQ ID NO: 415567 - DNA, 33 bp, Homo sapien
ctctcccaatcttgccaggatgaaccagatgaa

SEQ ID NO: 415568 - DNA, 33 bp, Homo sapien
ctctcccaatcttgccgggatgaaccagatgaa

SEQ ID NO: 415569 - DNA, 33 bp, Homo sapien
tgggtgagtcaataacgatggtcctttgtaggg

SEQ ID NO: 415570 - DNA, 33 bp, Homo sapien
tgggtgagtcaataactatggtcctttgtaggg

SEQ ID NO: 415571 - DNA, 33 bp, Homo sapien
ctgctgtctcgggggaagaaaccttcagaggag

SEQ ID NO: 415572 - DNA, 33 bp, Homo sapien
ctgctgtctcgggggacgaaaccttcagaggag

SEQ ID NO: 415573 - DNA, 33 bp, Homo sapien
atacaagcagcactgaataattataaaagttca

SEQ ID NO: 415574 - DNA, 33 bp, Homo sapien
atacaagcagcactgagtaattataaaagttca

SEQ ID NO: 415575 - DNA, 33 bp, Homo sapien
catctctttgtgtccaaactcccatttaggcta

SEQ ID NO: 415576 - DNA, 33 bp, Homo sapien
catctctttgtgtccatactcccatttaggcta

SEQ ID NO: 415577 - DNA, 33 bp, Homo sapien
ccacttcacaggagagacgacgcaagggtcggg

SEQ ID NO: 415578 - DNA, 33 bp, Homo sapien
ccacttcacaggagaggcgacgcaagggtcggg

SEQ ID NO: 415579 - DNA, 33 bp, Homo sapien
gctctacctgctataacaacccctaagaaccca

SEQ ID NO: 415580 - DNA, 33 bp, Homo sapien
gctctacctgctataataacccctaagaaccca

SEQ ID NO: 415581 - DNA, 33 bp, Homo sapien
ctggtcgttcatgttacgccactcacaatagct

SEQ ID NO: 415582 - DNA, 33 bp, Homo sapien
ctggtcgttcatgttatgccactcacaatagct

SEQ ID NO: 415583 - DNA, 33 bp, Homo sapien
atcaagagtttaggaactggtctcatattttac

SEQ ID NO: 415584 - DNA, 33 bp, Homo sapien
atcaagagtttaggaattggtctcatattttac

SEQ ID NO: 415585 - DNA, 33 bp, Homo sapien
ctcagggctaactatacggatggttcctatgct

SEQ ID NO: 415586 - DNA, 33 bp, Homo sapien
ctcagggctaactatatggatggttcctatgct

SEQ ID NO: 415587 - DNA, 33 bp, Homo sapien
agttgtttggggaaaactatgtccactagacct

SEQ ID NO: 415588 - DNA, 33 bp, Homo sapien
agttgtttggggaaaattatgtccactagacct

SEQ ID NO: 415589 - DNA, 33 bp, Homo sapien
attttcttgactctgcacttttagagaaccgaa

SEQ ID NO: 415590 - DNA, 33 bp, Homo sapien
attttcttgactctgcgcttttagagaaccgaa

SEQ ID NO: 415591 - DNA, 33 bp, Homo sapien
caactgctataatctgaatctcaaaacttgttt

SEQ ID NO: 415592 - DNA, 33 bp, Homo sapien
caactgctataatctgtatctcaaaacttgttt

SEQ ID NO: 415593 - DNA, 33 bp, Homo sapien
aactaaatcctggaagaaagagtgaaatattaa

SEQ ID NO: 415594 - DNA, 33 bp, Homo sapien
aactaaatcctggaaggaagagtgaaatattaa

SEQ ID NO: 415595 - DNA, 33 bp, Homo sapien
atctccttctccctgaaataaaacctgtcttcc

SEQ ID NO: 415596 - DNA, 33 bp, Homo sapien
atctccttctccctgatataaaacctgtcttcc

SEQ ID NO: 415597 - DNA, 33 bp, Homo sapien
ttcaaacatctctgccccaggatagatggcaag

SEQ ID NO: 415598 - DNA, 33 bp, Homo sapien
ttcaaacatctctgccgcaggatagatggcaag

SEQ ID NO: 415599 - DNA, 33 bp, Homo sapien
caaagcagagttccaaaaacgtttgcagaacca

SEQ ID NO: 415600 - DNA, 33 bp, Homo sapien
caaagcagagttccaagaacgtttgcagaacca

SEQ ID NO: 415601 - DNA, 33 bp, Homo sapien
tagggattcatagggacggcaagtcatattggc

SEQ ID NO: 415602 - DNA, 33 bp, Homo sapien
tagggattcatagggatggcaagtcatattggc

SEQ ID NO: 415603 - DNA, 33 bp, Homo sapien
ttatccataaaaacaccacaatttcttccacat

SEQ ID NO: 415604 - DNA, 33 bp, Homo sapien
ttatccataaaaacactacaatttcttccacat

SEQ ID NO: 415605 - DNA, 33 bp, Homo sapien
atcttacactttacacaaaaatgaactaaaaat

SEQ ID NO: 415606 - DNA, 33 bp, Homo sapien
atcttacactttacacgaaaatgaactaaaaat

SEQ ID NO: 415607 - DNA, 33 bp, Homo sapien
cctgtccaccagcctacagttcctttgctattg

SEQ ID NO: 415608 - DNA, 33 bp, Homo sapien
cctgtccaccagcctatagttcctttgctattg

SEQ ID NO: 415609 - DNA, 33 bp, Homo sapien
ggctgaagggcagaaaggttaaatggattaact

SEQ ID NO: 415610 - DNA, 33 bp, Homo sapien
ggctgaagggcagaaatgttaaatggattaact

SEQ ID NO: 415611 - DNA, 33 bp, Homo sapien
attgaggaatacacaacacgtaaatgtgagcca

SEQ ID NO: 415612 - DNA, 33 bp, Homo sapien
attgaggaatacacaatacgtaaatgtgagcca

SEQ ID NO: 415613 - DNA, 33 bp, Homo sapien
ctattccactctaacaacaagcaggcagtaata

SEQ ID NO: 415614 - DNA, 33 bp, Homo sapien
ctattccactctaacagcaagcaggcagtaata

SEQ ID NO: 415615 - DNA, 33 bp, Homo sapien
cctcacagctcctcacaatctcctcttaataac

SEQ ID NO: 415616 - DNA, 33 bp, Homo sapien
cctcacagctcctcaccatctcctcttaataac

SEQ ID NO: 415617 - DNA, 33 bp, Homo sapien
attatttttcctgatacatgctgtttttttata

SEQ ID NO: 415618 - DNA, 33 bp, Homo sapien
attatttttcctgatatatgctgtttttttata

SEQ ID NO: 415619 - DNA, 33 bp, Homo sapien
tttggtgaaattgtcaaaggaaattcttgatga

SEQ ID NO: 415620 - DNA, 33 bp, Homo sapien
tttggtgaaattgtcagaggaaattcttgatga

SEQ ID NO: 415621 - DNA, 33 bp, Homo sapien
tgaagtattgtttctgaatgtgtctgtaagggt

SEQ ID NO: 415622 - DNA, 33 bp, Homo sapien
tgaagtattgtttctggatgtgtctgtaagggt

SEQ ID NO: 415623 - DNA, 33 bp, Homo sapien
agcctgacccaaaggacgacatactgcacgctt

SEQ ID NO: 415624 - DNA, 33 bp, Homo sapien
agcctgacccaaaggatgacatactgcacgctt

SEQ ID NO: 415625 - DNA, 33 bp, Homo sapien
attacacccttctcacaaatgactccaaacttt

SEQ ID NO: 415626 - DNA, 33 bp, Homo sapien
attacacccttctcaccaatgactccaaacttt

SEQ ID NO: 415627 - DNA, 33 bp, Homo sapien
tggactgatgagtaggaaggaaggcccagaaac

SEQ ID NO: 415628 - DNA, 33 bp, Homo sapien
tggactgatgagtaggcaggaaggcccagaaac

SEQ ID NO: 415629 - DNA, 33 bp, Homo sapien
tatttgaatgcttttcactgtctatattcttcc

SEQ ID NO: 415630 - DNA, 33 bp, Homo sapien
tatttgaatgcttttcgctgtctatattcttcc

SEQ ID NO: 415631 - DNA, 33 bp, Homo sapien
acttgtctggctatccgcacacaatagtttgat

SEQ ID NO: 415632 - DNA, 33 bp, Homo sapien
acttgtctggctatcctcacacaatagtttgat

SEQ ID NO: 415633 - DNA, 33 bp, Homo sapien
cctggcagcctacgggcagtgtccaagcctcat

SEQ ID NO: 415634 - DNA, 33 bp, Homo sapien
cctggcagcctacgggtagtgtccaagcctcat

SEQ ID NO: 415635 - DNA, 33 bp, Homo sapien
actaagtatcacagacaaggtggctgaagcaac

SEQ ID NO: 415636 - DNA, 33 bp, Homo sapien
actaagtatcacagacgaggtggctgaagcaac

SEQ ID NO: 415637 - DNA, 33 bp, Homo sapien
gttttgagggtcataccatctttttcataattg

SEQ ID NO: 415638 - DNA, 33 bp, Homo sapien
gttttgagggtcatactatctttttcataattg

SEQ ID NO: 415639 - DNA, 33 bp, Homo sapien
catagaagatcaaccacaaataccttttgaagt

SEQ ID NO: 415640 - DNA, 33 bp, Homo sapien
catagaagatcaaccataaataccttttgaagt

SEQ ID NO: 415641 - DNA, 33 bp, Homo sapien
cagtgaaatcggaccagaataccatgatctctg

SEQ ID NO: 415642 - DNA, 33 bp, Homo sapien
cagtgaaatcggaccataataccatgatctctg

SEQ ID NO: 415643 - DNA, 33 bp, Homo sapien
acgttcttcttctagacggtctcatggttggcc

SEQ ID NO: 415644 - DNA, 33 bp, Homo sapien
acgttcttcttctagatggtctcatggttggcc

SEQ ID NO: 415645 - DNA, 33 bp, Homo sapien
gcataacctggtgggaaatggtggtaccgccgc

SEQ ID NO: 415646 - DNA, 33 bp, Homo sapien
gcataacctggtgggagatggtggtaccgccgc

SEQ ID NO: 415647 - DNA, 33 bp, Homo sapien
tttctgttctgttacaatgaattccttactatt

SEQ ID NO: 415648 - DNA, 33 bp, Homo sapien
tttctgttctgttacagtgaattccttactatt

SEQ ID NO: 415649 - DNA, 33 bp, Homo sapien
tgttcctgctttgggacgctcttgctatgacat

SEQ ID NO: 415650 - DNA, 33 bp, Homo sapien
tgttcctgctttgggatgctcttgctatgacat

SEQ ID NO: 415651 - DNA, 33 bp, Homo sapien
gttcaattgcagtctacgtggatagcagtatca

SEQ ID NO: 415652 - DNA, 33 bp, Homo sapien
gttcaattgcagtctatgtggatagcagtatca

SEQ ID NO: 415653 - DNA, 33 bp, Homo sapien
agatgctatggcagaacagggaccatgatgaac

SEQ ID NO: 415654 - DNA, 33 bp, Homo sapien
agatgctatggcagaagagggaccatgatgaac

SEQ ID NO: 415655 - DNA, 33 bp, Homo sapien
cacagtgctagaaactcaattgtaagaaagtaa

SEQ ID NO: 415656 - DNA, 33 bp, Homo sapien
cacagtgctagaaactgaattgtaagaaagtaa

SEQ ID NO: 415657 - DNA, 33 bp, Homo sapien
tttaagctagcttttccctctctttcctagtct

SEQ ID NO: 415658 - DNA, 33 bp, Homo sapien
tttaagctagcttttctctctctttcctagtct

SEQ ID NO: 415659 - DNA, 33 bp, Homo sapien
cagatggaaagccttcgatctcaatgtcacctg

SEQ ID NO: 415660 - DNA, 33 bp, Homo sapien
cagatggaaagccttctatctcaatgtcacctg

SEQ ID NO: 415661 - DNA, 33 bp, Homo sapien
gagaaagctcttgctcagacaatgattcggccc

SEQ ID NO: 415662 - DNA, 33 bp, Homo sapien
gagaaagctcttgctcggacaatgattcggccc

SEQ ID NO: 415663 - DNA, 33 bp, Homo sapien
accttcactttccacaaccatgcaatggtcatg

SEQ ID NO: 415664 - DNA, 33 bp, Homo sapien
accttcactttccacatccatgcaatggtcatg

SEQ ID NO: 415665 - DNA, 33 bp, Homo sapien
tttatgaaccaaatcgaaggatgagagtttccg

SEQ ID NO: 415666 - DNA, 33 bp, Homo sapien
tttatgaaccaaatcggaggatgagagtttccg

SEQ ID NO: 415667 - DNA, 33 bp, Homo sapien
cacagttccctatcacagcagcaaaacgaaagg

SEQ ID NO: 415668 - DNA, 33 bp, Homo sapien
cacagttccctatcaccgcagcaaaacgaaagg

SEQ ID NO: 415669 - DNA, 33 bp, Homo sapien
tcttaaagttgaaacaagtgcaaggtactaaat

SEQ ID NO: 415670 - DNA, 33 bp, Homo sapien
tcttaaagttgaaacatgtgcaaggtactaaat

SEQ ID NO: 415671 - DNA, 33 bp, Homo sapien
acaggtcaaccaaatcactccctgaaaactaaa

SEQ ID NO: 415672 - DNA, 33 bp, Homo sapien
acaggtcaaccaaatcgctccctgaaaactaaa

SEQ ID NO: 415673 - DNA, 33 bp, Homo sapien
catctgtggacctcctaagagaaaggaatagaa

SEQ ID NO: 415674 - DNA, 33 bp, Homo sapien
catctgtggacctcctgagagaaaggaatagaa

SEQ ID NO: 415675 - DNA, 33 bp, Homo sapien
aatgactcttgaggtcccaaaatggcagtcgtt

SEQ ID NO: 415676 - DNA, 33 bp, Homo sapien
aatgactcttgaggtctcaaaatggcagtcgtt

SEQ ID NO: 415677 - DNA, 33 bp, Homo sapien
aaaaatgtattaatcaccaggcaccaatgggag

SEQ ID NO: 415678 - DNA, 33 bp, Homo sapien
aaaaatgtattaatcatcaggcaccaatgggag

SEQ ID NO: 415679 - DNA, 33 bp, Homo sapien
ctcctcttttccctcacaggttgcttattcccc

SEQ ID NO: 415680 - DNA, 33 bp, Homo sapien
ctcctcttttccctcataggttgcttattcccc

SEQ ID NO: 415681 - DNA, 33 bp, Homo sapien
ggctgggaaaatccaacagctacagagctgcat

SEQ ID NO: 415682 - DNA, 33 bp, Homo sapien
ggctgggaaaatccaagagctacagagctgcat

SEQ ID NO: 415683 - DNA, 33 bp, Homo sapien
ccagaccatcttgggacgttgaaagtccactgt

SEQ ID NO: 415684 - DNA, 33 bp, Homo sapien
ccagaccatcttgggatgttgaaagtccactgt

SEQ ID NO: 415685 - DNA, 33 bp, Homo sapien
aatcatgccttttcaagtaaagtggcttaggga

SEQ ID NO: 415686 - DNA, 33 bp, Homo sapien
aatcatgccttttcaattaaagtggcttaggga

SEQ ID NO: 415687 - DNA, 33 bp, Homo sapien
tcccttttaagcaggacagtaaccagaaagaag

SEQ ID NO: 415688 - DNA, 33 bp, Homo sapien
tcccttttaagcaggatagtaaccagaaagaag

SEQ ID NO: 415689 - DNA, 33 bp, Homo sapien
gaaggtcttgacctcaaagcccgggccatcaca

SEQ ID NO: 415690 - DNA, 33 bp, Homo sapien
gaaggtcttgacctcagagcccgggccatcaca

SEQ ID NO: 415691 - DNA, 33 bp, Homo sapien
agtcagtggttgcataatagaatcatctgagaa

SEQ ID NO: 415692 - DNA, 33 bp, Homo sapien
agtcagtggttgcatattagaatcatctgagaa

SEQ ID NO: 415693 - DNA, 33 bp, Homo sapien
atcatctttgcttctgaattttggcatatcatc

SEQ ID NO: 415694 - DNA, 33 bp, Homo sapien
atcatctttgcttctggattttggcatatcatc

SEQ ID NO: 415695 - DNA, 33 bp, Homo sapien
ttggatagccgccaacactcatgggataaatta

SEQ ID NO: 415696 - DNA, 33 bp, Homo sapien
ttggatagccgccaacgctcatgggataaatta

SEQ ID NO: 415697 - DNA, 33 bp, Homo sapien
gggctgtctcagagtcggaacacacacaagccc

SEQ ID NO: 415698 - DNA, 33 bp, Homo sapien
gggctgtctcagagtctgaacacacacaagccc

SEQ ID NO: 415699 - DNA, 33 bp, Homo sapien
gctcactattttgcagaccacccactctctgtt

SEQ ID NO: 415700 - DNA, 33 bp, Homo sapien
gctcactattttgcaggccacccactctctgtt

SEQ ID NO: 415701 - DNA, 33 bp, Homo sapien
tttctcaaccttagcactaccaactttgaaggc

SEQ ID NO: 415702 - DNA, 33 bp, Homo sapien
tttctcaaccttagcattaccaactttgaaggc

SEQ ID NO: 415703 - DNA, 33 bp, Homo sapien
aggttcctggctagcccatctggattgcggtgg

SEQ ID NO: 415704 - DNA, 33 bp, Homo sapien
aggttcctggctagcctatctggattgcggtgg

SEQ ID NO: 415705 - DNA, 33 bp, Homo sapien
gctgttcttacttctcactggcattctgtacct

SEQ ID NO: 415706 - DNA, 33 bp, Homo sapien
gctgttcttacttctccctggcattctgtacct

SEQ ID NO: 415707 - DNA, 33 bp, Homo sapien
atccagaggggttgtacgtgggtgaccatctct

SEQ ID NO: 415708 - DNA, 33 bp, Homo sapien
atccagaggggttgtatgtgggtgaccatctct

SEQ ID NO: 415709 - DNA, 33 bp, Homo sapien
tctgcctattaacaccaaaggtctctacctgtg

SEQ ID NO: 415710 - DNA, 33 bp, Homo sapien
tctgcctattaacaccgaaggtctctacctgtg

SEQ ID NO: 415711 - DNA, 33 bp, Homo sapien
ccattatcttccagccagatacagagtgaatag

SEQ ID NO: 415712 - DNA, 33 bp, Homo sapien
ccattatcttccagccggatacagagtgaatag

SEQ ID NO: 415713 - DNA, 33 bp, Homo sapien
ggttacgtgcaatcacaggacagctgctaatca

SEQ ID NO: 415714 - DNA, 33 bp, Homo sapien
ggttacgtgcaatcacgggacagctgctaatca

SEQ ID NO: 415715 - DNA, 33 bp, Homo sapien
ctgtgttttttttttccataacactatcacctc

SEQ ID NO: 415716 - DNA, 33 bp, Homo sapien
ctgtgttttttttttcgataacactatcacctc

SEQ ID NO: 415717 - DNA, 33 bp, Homo sapien
ggacaggaaagacaaaagaggaatgatggctga

SEQ ID NO: 415718 - DNA, 33 bp, Homo sapien
ggacaggaaagacaaaggaggaatgatggctga

SEQ ID NO: 415719 - DNA, 33 bp, Homo sapien
tgttgcttagtacttacgactgagacttacacc

SEQ ID NO: 415720 - DNA, 33 bp, Homo sapien
tgttgcttagtacttatgactgagacttacacc

SEQ ID NO: 415721 - DNA, 33 bp, Homo sapien
tgcttcctacctagtaacaaactgaaaatgggt

SEQ ID NO: 415722 - DNA, 33 bp, Homo sapien
tgcttcctacctagtagcaaactgaaaatgggt

SEQ ID NO: 415723 - DNA, 33 bp, Homo sapien
ggtaacactgaagctacgtccattcagctgggc

SEQ ID NO: 415724 - DNA, 33 bp, Homo sapien
ggtaacactgaagctatgtccattcagctgggc

SEQ ID NO: 415725 - DNA, 33 bp, Homo sapien
tggatcactgcattcaacacaatggtttgtttc

SEQ ID NO: 415726 - DNA, 33 bp, Homo sapien
tggatcactgcattcagcacaatggtttgtttc

SEQ ID NO: 415727 - DNA, 33 bp, Homo sapien
gaaaatcatttacaaccatcatggtgaagacct

SEQ ID NO: 415728 - DNA, 33 bp, Homo sapien
gaaaatcatttacaactatcatggtgaagacct

SEQ ID NO: 415729 - DNA, 33 bp, Homo sapien
aggcagtctttgagaacgagaatctttgcatat

SEQ ID NO: 415730 - DNA, 33 bp, Homo sapien
aggcagtctttgagaatgagaatctttgcatat

SEQ ID NO: 415731 - DNA, 33 bp, Homo sapien
aaggaggctaatgacacatgacaatttaaagca

SEQ ID NO: 415732 - DNA, 33 bp, Homo sapien
aaggaggctaatgacatatgacaatttaaagca

SEQ ID NO: 415733 - DNA, 33 bp, Homo sapien
aggaatttatggctgacatttggtgaccaccca

SEQ ID NO: 415734 - DNA, 33 bp, Homo sapien
aggaatttatggctgatatttggtgaccaccca

SEQ ID NO: 415735 - DNA, 33 bp, Homo sapien
taatcagacaccactgcaataaccccacatgct

SEQ ID NO: 415736 - DNA, 33 bp, Homo sapien
taatcagacaccactgtaataaccccacatgct

SEQ ID NO: 415737 - DNA, 33 bp, Homo sapien
cagggctcagggtgatcacttattggagaagac

SEQ ID NO: 415738 - DNA, 33 bp, Homo sapien
cagggctcagggtgattacttattggagaagac

SEQ ID NO: 415739 - DNA, 33 bp, Homo sapien
caccaatggtccaaaaaaaatggcaggtataat

SEQ ID NO: 415740 - DNA, 33 bp, Homo sapien
caccaatggtccaaaagaaatggcaggtataat

SEQ ID NO: 415741 - DNA, 33 bp, Homo sapien
atttctttactattcacctatgcattgtgtatt

SEQ ID NO: 415742 - DNA, 33 bp, Homo sapien
atttctttactattcatctatgcattgtgtatt

SEQ ID NO: 415743 - DNA, 33 bp, Homo sapien
aagcattagctacataccagacacttgacatca

SEQ ID NO: 415744 - DNA, 33 bp, Homo sapien
aagcattagctacatatcagacacttgacatca

SEQ ID NO: 415745 - DNA, 33 bp, Homo sapien
gagtttaaccacaaaaacttcaggaagaaatgg

SEQ ID NO: 415746 - DNA, 33 bp, Homo sapien
gagtttaaccacaaaaccttcaggaagaaatgg

SEQ ID NO: 415747 - DNA, 33 bp, Homo sapien
tcttttaaaattgcgtcacaacaactggtgctt

SEQ ID NO: 415748 - DNA, 33 bp, Homo sapien
tcttttaaaattgcgttacaacaactggtgctt

SEQ ID NO: 415749 - DNA, 33 bp, Homo sapien
ttttttaatttggaaaagaagcttaaagaccac

SEQ ID NO: 415750 - DNA, 33 bp, Homo sapien
ttttttaatttggaaaggaagcttaaagaccac

SEQ ID NO: 415751 - DNA, 33 bp, Homo sapien
caaagaacatcccaaacggcttcgtgtgaaaag

SEQ ID NO: 415752 - DNA, 33 bp, Homo sapien
caaagaacatcccaaatggcttcgtgtgaaaag

SEQ ID NO: 415753 - DNA, 33 bp, Homo sapien
tcatccctcctgacttaaaggtgtggccttgac

SEQ ID NO: 415754 - DNA, 33 bp, Homo sapien
tcatccctcctgacttgaaggtgtggccttgac

SEQ ID NO: 415755 - DNA, 33 bp, Homo sapien
tagagctcaatgaagggccggtatctcctgtcc

SEQ ID NO: 415756 - DNA, 33 bp, Homo sapien
tagagctcaatgaaggtccggtatctcctgtcc

SEQ ID NO: 415757 - DNA, 33 bp, Homo sapien
caaaaatatagcaacacctgtgctgttggggtc

SEQ ID NO: 415758 - DNA, 33 bp, Homo sapien
caaaaatatagcaacatctgtgctgttggggtc

SEQ ID NO: 415759 - DNA, 33 bp, Homo sapien
gttcaatgaaaaagcacgcgacccagctaaatg

SEQ ID NO: 415760 - DNA, 33 bp, Homo sapien
gttcaatgaaaaagcaggcgacccagctaaatg

SEQ ID NO: 415761 - DNA, 33 bp, Homo sapien
ttcattacaaactacccaggctcagatagtcct

SEQ ID NO: 415762 - DNA, 33 bp, Homo sapien
ttcattacaaactacctaggctcagatagtcct

SEQ ID NO: 415763 - DNA, 33 bp, Homo sapien
cagctccttcacttacactccttgatcccatct

SEQ ID NO: 415764 - DNA, 33 bp, Homo sapien
cagctccttcacttaccctccttgatcccatct

SEQ ID NO: 415765 - DNA, 33 bp, Homo sapien
cagtaaaccttccaaaagcacatccaagtgtcc

SEQ ID NO: 415766 - DNA, 33 bp, Homo sapien
cagtaaaccttccaaaggcacatccaagtgtcc

SEQ ID NO: 415767 - DNA, 33 bp, Homo sapien
taaatgtatagctgaaagtcacttgaatcagag

SEQ ID NO: 415768 - DNA, 33 bp, Homo sapien
taaatgtatagctgaacgtcacttgaatcagag

SEQ ID NO: 415769 - DNA, 33 bp, Homo sapien
ccatgaatcgagtctgcagtttggaggaatctc

SEQ ID NO: 415770 - DNA, 33 bp, Homo sapien
ccatgaatcgagtctgtagtttggaggaatctc

SEQ ID NO: 415771 - DNA, 33 bp, Homo sapien
atcctgctgatgagaaaaatgagtcccaagagt

SEQ ID NO: 415772 - DNA, 33 bp, Homo sapien
atcctgctgatgagaagaatgagtcccaagagt

SEQ ID NO: 415773 - DNA, 33 bp, Homo sapien
ctctgccaaatagccacgttcgcgggattcctt

SEQ ID NO: 415774 - DNA, 33 bp, Homo sapien
ctctgccaaatagccatgttcgcgggattcctt

SEQ ID NO: 415775 - DNA, 33 bp, Homo sapien
atgaatctcatcaccccctcggatggtcccggt

SEQ ID NO: 415776 - DNA, 33 bp, Homo sapien
atgaatctcatcacccgctcggatggtcccggt

SEQ ID NO: 415777 - DNA, 33 bp, Homo sapien
ctgagcatctctaggccaatggtgttgctccca

SEQ ID NO: 415778 - DNA, 33 bp, Homo sapien
ctgagcatctctaggctaatggtgttgctccca

SEQ ID NO: 415779 - DNA, 33 bp, Homo sapien
atgtacctgtgcttcccaagggcgctaatttcc

SEQ ID NO: 415780 - DNA, 33 bp, Homo sapien
atgtacctgtgcttcctaagggcgctaatttcc

SEQ ID NO: 415781 - DNA, 33 bp, Homo sapien
cttgtgacctgctcaccggaaaggaagaaatga

SEQ ID NO: 415782 - DNA, 33 bp, Homo sapien
cttgtgacctgctcactggaaaggaagaaatga

SEQ ID NO: 415783 - DNA, 33 bp, Homo sapien
gaagatgacatgataacaacaaatgttggcgag

SEQ ID NO: 415784 - DNA, 33 bp, Homo sapien
gaagatgacatgataagaacaaatgttggcgag

SEQ ID NO: 415785 - DNA, 33 bp, Homo sapien
agtatactggaaaaggcccaattctcctgctca

SEQ ID NO: 415786 - DNA, 33 bp, Homo sapien
agtatactggaaaaggtccaattctcctgctca

SEQ ID NO: 415787 - DNA, 33 bp, Homo sapien
aagaaaggaagtcgtcagaaaagaagggaaagg

SEQ ID NO: 415788 - DNA, 33 bp, Homo sapien
aagaaaggaagtcgtcggaaaagaagggaaagg

SEQ ID NO: 415789 - DNA, 33 bp, Homo sapien
taagttggtgggagacagtcgttgtattcattt

SEQ ID NO: 415790 - DNA, 33 bp, Homo sapien
taagttggtgggagacggtcgttgtattcattt

SEQ ID NO: 415791 - DNA, 33 bp, Homo sapien
ccccaggcttgccccacgtttccacttttccct

SEQ ID NO: 415792 - DNA, 33 bp, Homo sapien
ccccaggcttgccccatgtttccacttttccct

SEQ ID NO: 415793 - DNA, 33 bp, Homo sapien
atgtctgactttggaactgacctctctgcctgt

SEQ ID NO: 415794 - DNA, 33 bp, Homo sapien
atgtctgactttggaattgacctctctgcctgt

SEQ ID NO: 415795 - DNA, 33 bp, Homo sapien
gaatatagatgttgaacagaaaaagagtgatat

SEQ ID NO: 415796 - DNA, 33 bp, Homo sapien
gaatatagatgttgaatagaaaaagagtgatat

SEQ ID NO: 415797 - DNA, 33 bp, Homo sapien
ggtggaggctatgaatcaaactcaagtggttct

SEQ ID NO: 415798 - DNA, 33 bp, Homo sapien
ggtggaggctatgaatgaaactcaagtggttct

SEQ ID NO: 415799 - DNA, 33 bp, Homo sapien
taaccataaccgttcaccccatatacaataaaa

SEQ ID NO: 415800 - DNA, 33 bp, Homo sapien
taaccataaccgttcatcccatatacaataaaa

SEQ ID NO: 415801 - DNA, 33 bp, Homo sapien
acagcagattccaaaactctttcattcacttga

SEQ ID NO: 415802 - DNA, 33 bp, Homo sapien
acagcagattccaaaagtctttcattcacttga

SEQ ID NO: 415803 - DNA, 33 bp, Homo sapien
cctcaaagcaaagtaaaaatggttctattataa

SEQ ID NO: 415804 - DNA, 33 bp, Homo sapien
cctcaaagcaaagtaagaatggttctattataa

SEQ ID NO: 415805 - DNA, 33 bp, Homo sapien
caacgctgttgcacacaggggcagattttaagc

SEQ ID NO: 415806 - DNA, 33 bp, Homo sapien
caacgctgttgcacacgggggcagattttaagc

SEQ ID NO: 415807 - DNA, 33 bp, Homo sapien
gtctctttgaaacagacctttgcagaggaatga

SEQ ID NO: 415808 - DNA, 33 bp, Homo sapien
gtctctttgaaacagagctttgcagaggaatga

SEQ ID NO: 415809 - DNA, 33 bp, Homo sapien
aagagaacggagggcacgaatgtgtaagtcatt

SEQ ID NO: 415810 - DNA, 33 bp, Homo sapien
aagagaacggagggcatgaatgtgtaagtcatt

SEQ ID NO: 415811 - DNA, 33 bp, Homo sapien
tatcccaagcacatagacaaatgccaggtgcat

SEQ ID NO: 415812 - DNA, 33 bp, Homo sapien
tatcccaagcacatagtcaaatgccaggtgcat

SEQ ID NO: 415813 - DNA, 33 bp, Homo sapien
cagggctcgtgagaaaaccttggctatttgcat

SEQ ID NO: 415814 - DNA, 33 bp, Homo sapien
cagggctcgtgagaaatccttggctatttgcat

SEQ ID NO: 415815 - DNA, 33 bp, Homo sapien
ctgctgattgtgatgacgataagaagtctagca

SEQ ID NO: 415816 - DNA, 33 bp, Homo sapien
ctgctgattgtgatgatgataagaagtctagca

SEQ ID NO: 415817 - DNA, 33 bp, Homo sapien
atgcagaaagagtaaacatagcaggtgtgagac

SEQ ID NO: 415818 - DNA, 33 bp, Homo sapien
atgcagaaagagtaaagatagcaggtgtgagac

SEQ ID NO: 415819 - DNA, 33 bp, Homo sapien
acatgcaagggacctacgttgtgatgatcggtc

SEQ ID NO: 415820 - DNA, 33 bp, Homo sapien
acatgcaagggacctatgttgtgatgatcggtc

SEQ ID NO: 415821 - DNA, 33 bp, Homo sapien
aacaggggattacacacccaatacttgtgccat

SEQ ID NO: 415822 - DNA, 33 bp, Homo sapien
aacaggggattacacatccaatacttgtgccat

SEQ ID NO: 415823 - DNA, 33 bp, Homo sapien
ctgtctttactatcaccaacgagccaagagcca

SEQ ID NO: 415824 - DNA, 33 bp, Homo sapien
ctgtctttactatcacgaacgagccaagagcca

SEQ ID NO: 415825 - DNA, 33 bp, Homo sapien
tacagagatcctaagacgtggggcaaatagact

SEQ ID NO: 415826 - DNA, 33 bp, Homo sapien
tacagagatcctaagatgtggggcaaatagact

SEQ ID NO: 415827 - DNA, 33 bp, Homo sapien
ggggactccagaaatacggctgcagctactcta

SEQ ID NO: 415828 - DNA, 33 bp, Homo sapien
ggggactccagaaatatggctgcagctactcta

SEQ ID NO: 415829 - DNA, 33 bp, Homo sapien
ctaaggaatggtggccagaagatgacggacaaa

SEQ ID NO: 415830 - DNA, 33 bp, Homo sapien
ctaaggaatggtggccggaagatgacggacaaa

SEQ ID NO: 415831 - DNA, 33 bp, Homo sapien
tcttcccggcacgtagcatccacagcctgacat

SEQ ID NO: 415832 - DNA, 33 bp, Homo sapien
tcttcccggcacgtagtatccacagcctgacat

SEQ ID NO: 415833 - DNA, 33 bp, Homo sapien
caagaacctgaatgaacataggagatgtttagc

SEQ ID NO: 415834 - DNA, 33 bp, Homo sapien
caagaacctgaatgaatataggagatgtttagc

SEQ ID NO: 415835 - DNA, 33 bp, Homo sapien
ccacctcaaaataagaaaaactgttggccgggg

SEQ ID NO: 415836 - DNA, 33 bp, Homo sapien
ccacctcaaaataagacaaactgttggccgggg

SEQ ID NO: 415837 - DNA, 33 bp, Homo sapien
tttgttttctggcacaatctgtctctatgactg

SEQ ID NO: 415838 - DNA, 33 bp, Homo sapien
tttgttttctggcacagtctgtctctatgactg

SEQ ID NO: 415839 - DNA, 33 bp, Homo sapien
cctctcacagttggacacaaagccccaaggcca

SEQ ID NO: 415840 - DNA, 33 bp, Homo sapien
cctctcacagttggacgcaaagccccaaggcca

SEQ ID NO: 415841 - DNA, 33 bp, Homo sapien
tctgattcagaagcccacgaataaacttcctct

SEQ ID NO: 415842 - DNA, 33 bp, Homo sapien
tctgattcagaagcccgcgaataaacttcctct

SEQ ID NO: 415843 - DNA, 33 bp, Homo sapien
tgtcgctatccaaatccatgttcggcttgtaca

SEQ ID NO: 415844 - DNA, 33 bp, Homo sapien
tgtcgctatccaaatctatgttcggcttgtaca

SEQ ID NO: 415845 - DNA, 33 bp, Homo sapien
acgcggtagcttggtagcataggttgctagaca

SEQ ID NO: 415846 - DNA, 33 bp, Homo sapien
acgcggtagcttggtatcataggttgctagaca

SEQ ID NO: 415847 - DNA, 33 bp, Homo sapien
tggctgctgtcttaaacaattgttaatatatca

SEQ ID NO: 415848 - DNA, 33 bp, Homo sapien
tggctgctgtcttaaataattgttaatatatca

SEQ ID NO: 415849 - DNA, 33 bp, Homo sapien
ctatccatggcacactaaagttcgcagccagcc

SEQ ID NO: 415850 - DNA, 33 bp, Homo sapien
ctatccatggcacactgaagttcgcagccagcc

SEQ ID NO: 415851 - DNA, 33 bp, Homo sapien
tctaatgactgggctacagtttatatatgtcca

SEQ ID NO: 415852 - DNA, 33 bp, Homo sapien
tctaatgactgggctagagtttatatatgtcca

SEQ ID NO: 415853 - DNA, 33 bp, Homo sapien
ggggaatgctgtcttcaaagtgccaagaaaaag

SEQ ID NO: 415854 - DNA, 33 bp, Homo sapien
ggggaatgctgtcttcgaagtgccaagaaaaag

SEQ ID NO: 415855 - DNA, 33 bp, Homo sapien
agtgtcatcttaaaccacaaggatatctgtcag

SEQ ID NO: 415856 - DNA, 33 bp, Homo sapien
agtgtcatcttaaaccgcaaggatatctgtcag

SEQ ID NO: 415857 - DNA, 33 bp, Homo sapien
tcaggctgtgagctaaactactccaagcgattg

SEQ ID NO: 415858 - DNA, 33 bp, Homo sapien
tcaggctgtgagctaagctactccaagcgattg

SEQ ID NO: 415859 - DNA, 33 bp, Homo sapien
caactctaagtcggcacccatgactggagaata

SEQ ID NO: 415860 - DNA, 33 bp, Homo sapien
caactctaagtcggcagccatgactggagaata

SEQ ID NO: 415861 - DNA, 33 bp, Homo sapien
acagctcggaatcttcaatgccagtataggcat

SEQ ID NO: 415862 - DNA, 33 bp, Homo sapien
acagctcggaatcttccatgccagtataggcat

SEQ ID NO: 415863 - DNA, 33 bp, Homo sapien
acaactttgttgtgaacatacaaggttccccag

SEQ ID NO: 415864 - DNA, 33 bp, Homo sapien
acaactttgttgtgaatatacaaggttccccag

SEQ ID NO: 415865 - DNA, 33 bp, Homo sapien
tccatctagtgttttacgaatctgagcctggag

SEQ ID NO: 415866 - DNA, 33 bp, Homo sapien
tccatctagtgttttatgaatctgagcctggag

SEQ ID NO: 415867 - DNA, 33 bp, Homo sapien
aggttcacctgattccccgacccatctggcttg

SEQ ID NO: 415868 - DNA, 33 bp, Homo sapien
aggttcacctgattcctcgacccatctggcttg

SEQ ID NO: 415869 - DNA, 33 bp, Homo sapien
atacaaaagcaggaaacgccaatgccaggggag

SEQ ID NO: 415870 - DNA, 33 bp, Homo sapien
atacaaaagcaggaaatgccaatgccaggggag

SEQ ID NO: 415871 - DNA, 33 bp, Homo sapien
ctttccaggaaaccctcaactgcggtatcactg

SEQ ID NO: 415872 - DNA, 33 bp, Homo sapien
ctttccaggaaacccttaactgcggtatcactg

SEQ ID NO: 415873 - DNA, 33 bp, Homo sapien
ttcctaacttgtatacaccaaccggaacattct

SEQ ID NO: 415874 - DNA, 33 bp, Homo sapien
ttcctaacttgtatacgccaaccggaacattct

SEQ ID NO: 415875 - DNA, 33 bp, Homo sapien
cataaaaaattcatgaaaaaagcacaaagctga

SEQ ID NO: 415876 - DNA, 33 bp, Homo sapien
cataaaaaattcatgagaaaagcacaaagctga

SEQ ID NO: 415877 - DNA, 33 bp, Homo sapien
ccttctgtgtttaccacgtcaaccccgttgata

SEQ ID NO: 415878 - DNA, 33 bp, Homo sapien
ccttctgtgtttaccatgtcaaccccgttgata

SEQ ID NO: 415879 - DNA, 33 bp, Homo sapien
ccgtgtctgtcaagcccaaactttttctttttt

SEQ ID NO: 415880 - DNA, 33 bp, Homo sapien
ccgtgtctgtcaagcctaaactttttctttttt

SEQ ID NO: 415881 - DNA, 33 bp, Homo sapien
ctgccatgggtctgagaaaacaaggttaaggag

SEQ ID NO: 415882 - DNA, 33 bp, Homo sapien
ctgccatgggtctgaggaaacaaggttaaggag

SEQ ID NO: 415883 - DNA, 33 bp, Homo sapien
attaagattcattataaccaaagtgtgtcctag

SEQ ID NO: 415884 - DNA, 33 bp, Homo sapien
attaagattcattatacccaaagtgtgtcctag

SEQ ID NO: 415885 - DNA, 33 bp, Homo sapien
tgagcacattaccgcacagtcttttttttatta

SEQ ID NO: 415886 - DNA, 33 bp, Homo sapien
tgagcacattaccgcatagtcttttttttatta

SEQ ID NO: 415887 - DNA, 33 bp, Homo sapien
ctccatttcttttgccgatcactggtttgttgc

SEQ ID NO: 415888 - DNA, 33 bp, Homo sapien
ctccatttcttttgcctatcactggtttgttgc

SEQ ID NO: 415889 - DNA, 33 bp, Homo sapien
gtgtggctttcttccaactcaacctgtcacttc

SEQ ID NO: 415890 - DNA, 33 bp, Homo sapien
gtgtggctttcttccatctcaacctgtcacttc

SEQ ID NO: 415891 - DNA, 33 bp, Homo sapien
gcgatgcaacaggaacacgcctacaggaagcct

SEQ ID NO: 415892 - DNA, 33 bp, Homo sapien
gcgatgcaacaggaacccgcctacaggaagcct

SEQ ID NO: 415893 - DNA, 33 bp, Homo sapien
aagcaatctagcctaaatggcaaatgtatgtag

SEQ ID NO: 415894 - DNA, 33 bp, Homo sapien
aagcaatctagcctaagtggcaaatgtatgtag

SEQ ID NO: 415895 - DNA, 33 bp, Homo sapien
aagccaggctacaaggcactagctaatttccat

SEQ ID NO: 415896 - DNA, 33 bp, Homo sapien
aagccaggctacaaggtactagctaatttccat

SEQ ID NO: 415897 - DNA, 33 bp, Homo sapien
ttcacaccatccatacactgataacttccagat

SEQ ID NO: 415898 - DNA, 33 bp, Homo sapien
ttcacaccatccatacgctgataacttccagat

SEQ ID NO: 415899 - DNA, 33 bp, Homo sapien
aatccaatgggcaggacgagaaaaacacatgga

SEQ ID NO: 415900 - DNA, 33 bp, Homo sapien
aatccaatgggcaggatgagaaaaacacatgga

SEQ ID NO: 415901 - DNA, 33 bp, Homo sapien
atgagattccctccccaacatctctggatcaca

SEQ ID NO: 415902 - DNA, 33 bp, Homo sapien
atgagattccctccccgacatctctggatcaca

SEQ ID NO: 415903 - DNA, 33 bp, Homo sapien
caactgtagaaccccaataatttaagagagtaa

SEQ ID NO: 415904 - DNA, 33 bp, Homo sapien
caactgtagaaccccagtaatttaagagagtaa

SEQ ID NO: 415905 - DNA, 33 bp, Homo sapien
cctcaccctcttgtcactacagaacctgccttg

SEQ ID NO: 415906 - DNA, 33 bp, Homo sapien
cctcaccctcttgtcattacagaacctgccttg

SEQ ID NO: 415907 - DNA, 33 bp, Homo sapien
aggttttgtgaggctcaaaggtgtcaaggaagc

SEQ ID NO: 415908 - DNA, 33 bp, Homo sapien
aggttttgtgaggctccaaggtgtcaaggaagc

SEQ ID NO: 415909 - DNA, 33 bp, Homo sapien
tgtgctccagagtccacgctctagttttaaatc

SEQ ID NO: 415910 - DNA, 33 bp, Homo sapien
tgtgctccagagtccatgctctagttttaaatc

SEQ ID NO: 415911 - DNA, 33 bp, Homo sapien
tatttctctattccacacaatccaatctgccat

SEQ ID NO: 415912 - DNA, 33 bp, Homo sapien
tatttctctattccacgcaatccaatctgccat

SEQ ID NO: 415913 - DNA, 33 bp, Homo sapien
agtggtcttgggaataagagcgcagcaaaaagc

SEQ ID NO: 415914 - DNA, 33 bp, Homo sapien
agtggtcttgggaataggagcgcagcaaaaagc

SEQ ID NO: 415915 - DNA, 33 bp, Homo sapien
tcatgttcttggtgagcaatcttcaggcttgca

SEQ ID NO: 415916 - DNA, 33 bp, Homo sapien
tcatgttcttggtgagtaatcttcaggcttgca

SEQ ID NO: 415917 - DNA, 33 bp, Homo sapien
tgctatgactgaggaaatggtgtgtaatcttgt

SEQ ID NO: 415918 - DNA, 33 bp, Homo sapien
tgctatgactgaggaactggtgtgtaatcttgt

SEQ ID NO: 415919 - DNA, 33 bp, Homo sapien
actctactgagaagtacctgaccctcttgcaga

SEQ ID NO: 415920 - DNA, 33 bp, Homo sapien
actctactgagaagtatctgaccctcttgcaga

SEQ ID NO: 415921 - DNA, 33 bp, Homo sapien
tcctggtagttccaaaatgtgccctgttgctta

SEQ ID NO: 415922 - DNA, 33 bp, Homo sapien
tcctggtagttccaaagtgtgccctgttgctta

SEQ ID NO: 415923 - DNA, 33 bp, Homo sapien
actatggaattggacacagcaagtctaaaagat

SEQ ID NO: 415924 - DNA, 33 bp, Homo sapien
actatggaattggacagagcaagtctaaaagat

SEQ ID NO: 415925 - DNA, 33 bp, Homo sapien
aaaggtctgtacctaacagtagaattttctgct

SEQ ID NO: 415926 - DNA, 33 bp, Homo sapien
aaaggtctgtacctaatagtagaattttctgct

SEQ ID NO: 415927 - DNA, 33 bp, Homo sapien
ttctcttgggtacataccttggagtagaattgc

SEQ ID NO: 415928 - DNA, 33 bp, Homo sapien
ttctcttgggtacatagcttggagtagaattgc

SEQ ID NO: 415929 - DNA, 33 bp, Homo sapien
ggatgagaaaatgccaaacaataaagttgcttg

SEQ ID NO: 415930 - DNA, 33 bp, Homo sapien
ggatgagaaaatgccacacaataaagttgcttg

SEQ ID NO: 415931 - DNA, 33 bp, Homo sapien
ctcacaatcaaaaaacaaattcctgatagtccc

SEQ ID NO: 415932 - DNA, 33 bp, Homo sapien
ctcacaatcaaaaaacgaattcctgatagtccc

SEQ ID NO: 415933 - DNA, 33 bp, Homo sapien
tcaccacatccagcacgaccaccttggtctgca

SEQ ID NO: 415934 - DNA, 33 bp, Homo sapien
tcaccacatccagcactaccaccttggtctgca

SEQ ID NO: 415935 - DNA, 33 bp, Homo sapien
acaccctcttcaaaaccctgcaatggctcatca

SEQ ID NO: 415936 - DNA, 33 bp, Homo sapien
acaccctcttcaaaactctgcaatggctcatca

SEQ ID NO: 415937 - DNA, 33 bp, Homo sapien
gcagatctctgggaaacagtgagtgttttaggc

SEQ ID NO: 415938 - DNA, 33 bp, Homo sapien
gcagatctctgggaaagagtgagtgttttaggc

SEQ ID NO: 415939 - DNA, 33 bp, Homo sapien
ctgtggcagttcctcaaagtgctaagaacagaa

SEQ ID NO: 415940 - DNA, 33 bp, Homo sapien
ctgtggcagttcctcagagtgctaagaacagaa

SEQ ID NO: 415941 - DNA, 33 bp, Homo sapien
cccaatttagggaccaagttctatggagttgag

SEQ ID NO: 415942 - DNA, 33 bp, Homo sapien
cccaatttagggaccaggttctatggagttgag

SEQ ID NO: 415943 - DNA, 33 bp, Homo sapien
cactcactgtaaagcaactgtttttctgcccat

SEQ ID NO: 415944 - DNA, 33 bp, Homo sapien
cactcactgtaaagcagctgtttttctgcccat

SEQ ID NO: 415945 - DNA, 33 bp, Homo sapien
aagttataagtcttgaaaaagatacaagaagct

SEQ ID NO: 415946 - DNA, 33 bp, Homo sapien
aagttataagtcttgagaaagatacaagaagct

SEQ ID NO: 415947 - DNA, 33 bp, Homo sapien
acattaaaatctgtgaccagttatttgtgggaa

SEQ ID NO: 415948 - DNA, 33 bp, Homo sapien
acattaaaatctgtgatcagttatttgtgggaa

SEQ ID NO: 415949 - DNA, 33 bp, Homo sapien
tttactaagtagttcacagagctggcatcccat

SEQ ID NO: 415950 - DNA, 33 bp, Homo sapien
tttactaagtagttcatagagctggcatcccat

SEQ ID NO: 415951 - DNA, 33 bp, Homo sapien
gccatctttatgactgaaccagttgaggtacct

SEQ ID NO: 415952 - DNA, 33 bp, Homo sapien
gccatctttatgactggaccagttgaggtacct

SEQ ID NO: 415953 - DNA, 33 bp, Homo sapien
taatcctttattcactcagtaaacatttgttag

SEQ ID NO: 415954 - DNA, 33 bp, Homo sapien
taatcctttattcactgagtaaacatttgttag

SEQ ID NO: 415955 - DNA, 33 bp, Homo sapien
tgttagtgctgtacccaaacagcgtaccgaaag

SEQ ID NO: 415956 - DNA, 33 bp, Homo sapien
tgttagtgctgtaccccaacagcgtaccgaaag

SEQ ID NO: 415957 - DNA, 33 bp, Homo sapien
aacaggatccacagaaacgtaggagagtctgga

SEQ ID NO: 415958 - DNA, 33 bp, Homo sapien
aacaggatccacagaagcgtaggagagtctgga

SEQ ID NO: 415959 - DNA, 33 bp, Homo sapien
ctcacccatataatgacaccatgctggggtcct

SEQ ID NO: 415960 - DNA, 33 bp, Homo sapien
ctcacccatataatgataccatgctggggtcct

SEQ ID NO: 415961 - DNA, 33 bp, Homo sapien
aagagaccttaaaccactatttgatcaccttaa

SEQ ID NO: 415962 - DNA, 33 bp, Homo sapien
aagagaccttaaaccattatttgatcaccttaa

SEQ ID NO: 415963 - DNA, 33 bp, Homo sapien
cttaagcataaatgaaaccatacagccctaact

SEQ ID NO: 415964 - DNA, 33 bp, Homo sapien
cttaagcataaatgaacccatacagccctaact

SEQ ID NO: 415965 - DNA, 33 bp, Homo sapien
ctgtgctcattggaggaaccgtgtaagagcctg

SEQ ID NO: 415966 - DNA, 33 bp, Homo sapien
ctgtgctcattggagggaccgtgtaagagcctg

SEQ ID NO: 415967 - DNA, 33 bp, Homo sapien
ttgtccttacctgtaacgtaagagcactgagct

SEQ ID NO: 415968 - DNA, 33 bp, Homo sapien
ttgtccttacctgtaatgtaagagcactgagct

SEQ ID NO: 415969 - DNA, 33 bp, Homo sapien
tttgagatcaatggaccgccagctagagcttgg

SEQ ID NO: 415970 - DNA, 33 bp, Homo sapien
tttgagatcaatggactgccagctagagcttgg

SEQ ID NO: 415971 - DNA, 33 bp, Homo sapien
tccaaatctcccgaagacagtttcacatttatt

SEQ ID NO: 415972 - DNA, 33 bp, Homo sapien
tccaaatctcccgaaggcagtttcacatttatt

SEQ ID NO: 415973 - DNA, 33 bp, Homo sapien
gtgtgattttatcttaccagtcagctctttctt

SEQ ID NO: 415974 - DNA, 33 bp, Homo sapien
gtgtgattttatcttatcagtcagctctttctt

SEQ ID NO: 415975 - DNA, 33 bp, Homo sapien
ttgtatttcaaaagagaaagaagcgcatccaca

SEQ ID NO: 415976 - DNA, 33 bp, Homo sapien
ttgtatttcaaaagaggaagaagcgcatccaca

SEQ ID NO: 415977 - DNA, 33 bp, Homo sapien
ctgggtctgtgtagagaaaggggtacctttgca

SEQ ID NO: 415978 - DNA, 33 bp, Homo sapien
ctgggtctgtgtagaggaaggggtacctttgca

SEQ ID NO: 415979 - DNA, 33 bp, Homo sapien
tagcaagttactcaacccaaactttcacactgc

SEQ ID NO: 415980 - DNA, 33 bp, Homo sapien
tagcaagttactcaactcaaactttcacactgc

SEQ ID NO: 415981 - DNA, 33 bp, Homo sapien
aaagctgaagtcgtaaacatttgagtcatgcag

SEQ ID NO: 415982 - DNA, 33 bp, Homo sapien
aaagctgaagtcgtaagcatttgagtcatgcag

SEQ ID NO: 415983 - DNA, 33 bp, Homo sapien
agagacttccccaaacacattatttcggaaacc

SEQ ID NO: 415984 - DNA, 33 bp, Homo sapien
agagacttccccaaacgcattatttcggaaacc

SEQ ID NO: 415985 - DNA, 33 bp, Homo sapien
aagatatgtttcactaagaaagtatgtcagctg

SEQ ID NO: 415986 - DNA, 33 bp, Homo sapien
aagatatgtttcactatgaaagtatgtcagctg

SEQ ID NO: 415987 - DNA, 33 bp, Homo sapien
aaaaagaaagaaatagcatgcaaatggtaccta

SEQ ID NO: 415988 - DNA, 33 bp, Homo sapien
aaaaagaaagaaatagtatgcaaatggtaccta

SEQ ID NO: 415989 - DNA, 33 bp, Homo sapien
tcacttcaagtctctccgacctcaaggaaggcc

SEQ ID NO: 415990 - DNA, 33 bp, Homo sapien
tcacttcaagtctctctgacctcaaggaaggcc

SEQ ID NO: 415991 - DNA, 33 bp, Homo sapien
aggtggagatctgagacggcccttaagaattat

SEQ ID NO: 415992 - DNA, 33 bp, Homo sapien
aggtggagatctgagatggcccttaagaattat

SEQ ID NO: 415993 - DNA, 33 bp, Homo sapien
tgccaggcagaacctcaactatataatgacttg

SEQ ID NO: 415994 - DNA, 33 bp, Homo sapien
tgccaggcagaacctcgactatataatgacttg

SEQ ID NO: 415995 - DNA, 33 bp, Homo sapien
tgctattagttctccacgtgtagacaattgtaa

SEQ ID NO: 415996 - DNA, 33 bp, Homo sapien
tgctattagttctccatgtgtagacaattgtaa

SEQ ID NO: 415997 - DNA, 33 bp, Homo sapien
ccatcttttccttgcacaaaagttggctcaaac

SEQ ID NO: 415998 - DNA, 33 bp, Homo sapien
ccatcttttccttgcataaaagttggctcaaac

SEQ ID NO: 415999 - DNA, 33 bp, Homo sapien
gggacaacctccctgaagacttttgctgacctc

SEQ ID NO: 416000 - DNA, 33 bp, Homo sapien
gggacaacctccctgatgacttttgctgacctc

SEQ ID NO: 416001 - DNA, 33 bp, Homo sapien
aaagcgaacaatgactaaagtacaatagaccat

SEQ ID NO: 416002 - DNA, 33 bp, Homo sapien
aaagcgaacaatgactgaagtacaatagaccat

SEQ ID NO: 416003 - DNA, 33 bp, Homo sapien
agcatgctacctgttagaggcaagatttgtttt

SEQ ID NO: 416004 - DNA, 33 bp, Homo sapien
agcatgctacctgttataggcaagatttgtttt

SEQ ID NO: 416005 - DNA, 33 bp, Homo sapien
aggaggcaggcccatcaaattgccactatcagc

SEQ ID NO: 416006 - DNA, 33 bp, Homo sapien
aggaggcaggcccatcgaattgccactatcagc

SEQ ID NO: 416007 - DNA, 33 bp, Homo sapien
aatgcaatgctacaagaagctttcaaggccgtt

SEQ ID NO: 416008 - DNA, 33 bp, Homo sapien
aatgcaatgctacaagcagctttcaaggccgtt

SEQ ID NO: 416009 - DNA, 33 bp, Homo sapien
agtaatttattctttcaatgagacgtcatccta

SEQ ID NO: 416010 - DNA, 33 bp, Homo sapien
agtaatttattctttcgatgagacgtcatccta

SEQ ID NO: 416011 - DNA, 33 bp, Homo sapien
ccaatttttgtttaatcaattttgcagcctaat

SEQ ID NO: 416012 - DNA, 33 bp, Homo sapien
ccaatttttgtttaattaattttgcagcctaat

SEQ ID NO: 416013 - DNA, 33 bp, Homo sapien
cgatgcagagccttgacggctgctacaaataaa

SEQ ID NO: 416014 - DNA, 33 bp, Homo sapien
cgatgcagagccttgatggctgctacaaataaa

SEQ ID NO: 416015 - DNA, 33 bp, Homo sapien
taagaaacaggaccaaaaagttatccccaggag

SEQ ID NO: 416016 - DNA, 33 bp, Homo sapien
taagaaacaggaccaagaagttatccccaggag

SEQ ID NO: 416017 - DNA, 33 bp, Homo sapien
cagtaggtatttgatacgtgtcagttcccttat

SEQ ID NO: 416018 - DNA, 33 bp, Homo sapien
cagtaggtatttgatatgtgtcagttcccttat

SEQ ID NO: 416019 - DNA, 33 bp, Homo sapien
gggccaggaggagaacagtgaacgaagtccaag

SEQ ID NO: 416020 - DNA, 33 bp, Homo sapien
gggccaggaggagaacggtgaacgaagtccaag

SEQ ID NO: 416021 - DNA, 33 bp, Homo sapien
ctagctttcattgtaagtgccttcactctgcaa

SEQ ID NO: 416022 - DNA, 33 bp, Homo sapien
ctagctttcattgtaattgccttcactctgcaa

SEQ ID NO: 416023 - DNA, 33 bp, Homo sapien
agaagacttgggcttcaaaaagaaacaggaaga

SEQ ID NO: 416024 - DNA, 33 bp, Homo sapien
agaagacttgggcttccaaaagaaacaggaaga

SEQ ID NO: 416025 - DNA, 33 bp, Homo sapien
agatgacgctgggagcaaagagaacaagggcct

SEQ ID NO: 416026 - DNA, 33 bp, Homo sapien
agatgacgctgggagcgaagagaacaagggcct

SEQ ID NO: 416027 - DNA, 33 bp, Homo sapien
gcaatttcctatctcaggtattcgtgcgtgaca

SEQ ID NO: 416028 - DNA, 33 bp, Homo sapien
gcaatttcctatctcatgtattcgtgcgtgaca

SEQ ID NO: 416029 - DNA, 33 bp, Homo sapien
atgaaccaaagctaaaactagtcaccttcccat

SEQ ID NO: 416030 - DNA, 33 bp, Homo sapien
atgaaccaaagctaaatctagtcaccttcccat

SEQ ID NO: 416031 - DNA, 33 bp, Homo sapien
caatgtccccacgaaacgagtcgggcttacttg

SEQ ID NO: 416032 - DNA, 33 bp, Homo sapien
caatgtccccacgaaatgagtcgggcttacttg

SEQ ID NO: 416033 - DNA, 33 bp, Homo sapien
ctaactactcaaccacagagagatggctgagca

SEQ ID NO: 416034 - DNA, 33 bp, Homo sapien
ctaactactcaaccacggagagatggctgagca

SEQ ID NO: 416035 - DNA, 33 bp, Homo sapien
taagaaagaaatcaccaatcagttcctctaatg

SEQ ID NO: 416036 - DNA, 33 bp, Homo sapien
taagaaagaaatcaccgatcagttcctctaatg

SEQ ID NO: 416037 - DNA, 33 bp, Homo sapien
cccgcggtaatcctcactcacttgtccgctgct

SEQ ID NO: 416038 - DNA, 33 bp, Homo sapien
cccgcggtaatcctcattcacttgtccgctgct

SEQ ID NO: 416039 - DNA, 33 bp, Homo sapien
ctaacagggccatcgccgaagacaccaggtata

SEQ ID NO: 416040 - DNA, 33 bp, Homo sapien
ctaacagggccatcgctgaagacaccaggtata

SEQ ID NO: 416041 - DNA, 33 bp, Homo sapien
agtaataagttccataaagcaaggcaaccatcc

SEQ ID NO: 416042 - DNA, 33 bp, Homo sapien
agtaataagttccatacagcaaggcaaccatcc

SEQ ID NO: 416043 - DNA, 33 bp, Homo sapien
ggaaaaaaaagaaatacaggagcttagttttgg

SEQ ID NO: 416044 - DNA, 33 bp, Homo sapien
ggaaaaaaaagaaatataggagcttagttttgg

SEQ ID NO: 416045 - DNA, 33 bp, Homo sapien
tcaggtctgttgatggacatcgcaccagctgct

SEQ ID NO: 416046 - DNA, 33 bp, Homo sapien
tcaggtctgttgatgggcatcgcaccagctgct

SEQ ID NO: 416047 - DNA, 33 bp, Homo sapien
tcaaggaggctcacggaaaagattctgacaagt

SEQ ID NO: 416048 - DNA, 33 bp, Homo sapien
tcaaggaggctcacggtaaagattctgacaagt

SEQ ID NO: 416049 - DNA, 33 bp, Homo sapien
cactggttcataaaaccgttaacccaccatcaa

SEQ ID NO: 416050 - DNA, 33 bp, Homo sapien
cactggttcataaaactgttaacccaccatcaa

SEQ ID NO: 416051 - DNA, 33 bp, Homo sapien
cttaacaatttcacaaccaactgacttagcatg

SEQ ID NO: 416052 - DNA, 33 bp, Homo sapien
cttaacaatttcacaatcaactgacttagcatg

SEQ ID NO: 416053 - DNA, 33 bp, Homo sapien
tctctgtttgtaagcgccagagaagtaaaacct

SEQ ID NO: 416054 - DNA, 33 bp, Homo sapien
tctctgtttgtaagcggcagagaagtaaaacct

SEQ ID NO: 416055 - DNA, 33 bp, Homo sapien
ggagatactcctattaggaaaacaaagaagtgg

SEQ ID NO: 416056 - DNA, 33 bp, Homo sapien
ggagatactcctattatgaaaacaaagaagtgg

SEQ ID NO: 416057 - DNA, 33 bp, Homo sapien
cagcaccttttgttcactacgttcttaacaacc

SEQ ID NO: 416058 - DNA, 33 bp, Homo sapien
cagcaccttttgttcattacgttcttaacaacc

SEQ ID NO: 416059 - DNA, 33 bp, Homo sapien
gacatcatttttcttacgcatcttagtaccaac

SEQ ID NO: 416060 - DNA, 33 bp, Homo sapien
gacatcatttttcttatgcatcttagtaccaac

SEQ ID NO: 416061 - DNA, 33 bp, Homo sapien
cccaaaccttatcttcaattgtagcttccacaa

SEQ ID NO: 416062 - DNA, 33 bp, Homo sapien
cccaaaccttatcttctattgtagcttccacaa

SEQ ID NO: 416063 - DNA, 33 bp, Homo sapien
ctagtttttccagatcacagggctataaaaact

SEQ ID NO: 416064 - DNA, 33 bp, Homo sapien
ctagtttttccagatcgcagggctataaaaact

SEQ ID NO: 416065 - DNA, 33 bp, Homo sapien
tttagacagcaatcgaagtttatttgacagctg

SEQ ID NO: 416066 - DNA, 33 bp, Homo sapien
tttagacagcaatcgaggtttatttgacagctg

SEQ ID NO: 416067 - DNA, 33 bp, Homo sapien
ggcccaaaagagccacacaaataaagactggcc

SEQ ID NO: 416068 - DNA, 33 bp, Homo sapien
ggcccaaaagagccacgcaaataaagactggcc

SEQ ID NO: 416069 - DNA, 33 bp, Homo sapien
ggtactatgcgtgacccaagaacattagatttc

SEQ ID NO: 416070 - DNA, 33 bp, Homo sapien
ggtactatgcgtgaccgaagaacattagatttc

SEQ ID NO: 416071 - DNA, 33 bp, Homo sapien
tgcctgcacgagcaccaaactccagctcaactg

SEQ ID NO: 416072 - DNA, 33 bp, Homo sapien
tgcctgcacgagcacccaactccagctcaactg

SEQ ID NO: 416073 - DNA, 33 bp, Homo sapien
agtgtgcatttctaaccaattcccaggttgggt

SEQ ID NO: 416074 - DNA, 33 bp, Homo sapien
agtgtgcatttctaactaattcccaggttgggt

SEQ ID NO: 416075 - DNA, 33 bp, Homo sapien
gctatggccatcgagaccacgggtagcttttct

SEQ ID NO: 416076 - DNA, 33 bp, Homo sapien
gctatggccatcgagatcacgggtagcttttct

SEQ ID NO: 416077 - DNA, 33 bp, Homo sapien
ggaggctgagattggacgatggcttgagcccag

SEQ ID NO: 416078 - DNA, 33 bp, Homo sapien
ggaggctgagattggatgatggcttgagcccag

SEQ ID NO: 416079 - DNA, 33 bp, Homo sapien
taggtaaaaaatagcacctcactggtatcttcc

SEQ ID NO: 416080 - DNA, 33 bp, Homo sapien
taggtaaaaaatagcatctcactggtatcttcc

SEQ ID NO: 416081 - DNA, 33 bp, Homo sapien
aatgtgttaaattgcaagagtgaggtagtcaaa

SEQ ID NO: 416082 - DNA, 33 bp, Homo sapien
aatgtgttaaattgcaggagtgaggtagtcaaa

SEQ ID NO: 416083 - DNA, 33 bp, Homo sapien
atacttcctggttagcacttagtcacatgacca

SEQ ID NO: 416084 - DNA, 33 bp, Homo sapien
atacttcctggttagcgcttagtcacatgacca

SEQ ID NO: 416085 - DNA, 33 bp, Homo sapien
tacccaccaacaggaaatggtacgattgtggct

SEQ ID NO: 416086 - DNA, 33 bp, Homo sapien
tacccaccaacaggaagtggtacgattgtggct

SEQ ID NO: 416087 - DNA, 33 bp, Homo sapien
caaccttgggaaagcacgcttctcaggatgtta

SEQ ID NO: 416088 - DNA, 33 bp, Homo sapien
caaccttgggaaagcaggcttctcaggatgtta

SEQ ID NO: 416089 - DNA, 33 bp, Homo sapien
acagggtgcatatggaaggagcaggaaggatct

SEQ ID NO: 416090 - DNA, 33 bp, Homo sapien
acagggtgcatatggacggagcaggaaggatct

SEQ ID NO: 416091 - DNA, 33 bp, Homo sapien
tgactgtgtcctctcaggataagggaactcaga

SEQ ID NO: 416092 - DNA, 33 bp, Homo sapien
tgactgtgtcctctcatgataagggaactcaga

SEQ ID NO: 416093 - DNA, 33 bp, Homo sapien
ttttttcttctcatccccattttggccgaaatg

SEQ ID NO: 416094 - DNA, 33 bp, Homo sapien
ttttttcttctcatccgcattttggccgaaatg

SEQ ID NO: 416095 - DNA, 33 bp, Homo sapien
acggcagaagcattgcgcttttctcatcaatag

SEQ ID NO: 416096 - DNA, 33 bp, Homo sapien
acggcagaagcattgctcttttctcatcaatag

SEQ ID NO: 416097 - DNA, 33 bp, Homo sapien
tgtggagctcctagacgatgaactcctcttggc

SEQ ID NO: 416098 - DNA, 33 bp, Homo sapien
tgtggagctcctagactatgaactcctcttggc

SEQ ID NO: 416099 - DNA, 33 bp, Homo sapien
ggctgtgtctgctcaccgtcagtgggaagaggg

SEQ ID NO: 416100 - DNA, 33 bp, Homo sapien
ggctgtgtctgctcactgtcagtgggaagaggg

SEQ ID NO: 416101 - DNA, 33 bp, Homo sapien
aggcttccaaagagaagtgtttgagctgggtct

SEQ ID NO: 416102 - DNA, 33 bp, Homo sapien
aggcttccaaagagaattgtttgagctgggtct

SEQ ID NO: 416103 - DNA, 33 bp, Homo sapien
atataattcattcacactcacgagtcccttgat

SEQ ID NO: 416104 - DNA, 33 bp, Homo sapien
atataattcattcacattcacgagtcccttgat

SEQ ID NO: 416105 - DNA, 33 bp, Homo sapien
atgtctgagaggctaaaccagaaatgtgtaaat

SEQ ID NO: 416106 - DNA, 33 bp, Homo sapien
atgtctgagaggctaagccagaaatgtgtaaat

SEQ ID NO: 416107 - DNA, 33 bp, Homo sapien
gttgctgttagcagtacaagtgcttcatgccaa

SEQ ID NO: 416108 - DNA, 33 bp, Homo sapien
gttgctgttagcagtataagtgcttcatgccaa

SEQ ID NO: 416109 - DNA, 33 bp, Homo sapien
gctggcctaatgaacaaacttcgatctgagtct

SEQ ID NO: 416110 - DNA, 33 bp, Homo sapien
gctggcctaatgaacagacttcgatctgagtct

SEQ ID NO: 416111 - DNA, 33 bp, Homo sapien
aggaaagaagacaaacaccataaacccgtaatg

SEQ ID NO: 416112 - DNA, 33 bp, Homo sapien
aggaaagaagacaaacgccataaacccgtaatg

SEQ ID NO: 416113 - DNA, 33 bp, Homo sapien
gctggcacacggtagacgctgagcaaattatca

SEQ ID NO: 416114 - DNA, 33 bp, Homo sapien
gctggcacacggtagatgctgagcaaattatca

SEQ ID NO: 416115 - DNA, 33 bp, Homo sapien
ccttttgaaagacaaactccttcttggttctcc

SEQ ID NO: 416116 - DNA, 33 bp, Homo sapien
ccttttgaaagacaaattccttcttggttctcc

SEQ ID NO: 416117 - DNA, 33 bp, Homo sapien
tctcagtgttgatagacctgtagcaacacagag

SEQ ID NO: 416118 - DNA, 33 bp, Homo sapien
tctcagtgttgatagatctgtagcaacacagag

SEQ ID NO: 416119 - DNA, 33 bp, Homo sapien
gaccccggtttgccacactgacccaggccgcat

SEQ ID NO: 416120 - DNA, 33 bp, Homo sapien
gaccccggtttgccacgctgacccaggccgcat

SEQ ID NO: 416121 - DNA, 33 bp, Homo sapien
gggtataagcgaagataaaaactaaaagcctat

SEQ ID NO: 416122 - DNA, 33 bp, Homo sapien
gggtataagcgaagatgaaaactaaaagcctat

SEQ ID NO: 416123 - DNA, 33 bp, Homo sapien
tcatgccatgtacttgaaaaaaacagcttctag

SEQ ID NO: 416124 - DNA, 33 bp, Homo sapien
tcatgccatgtacttggaaaaaacagcttctag

SEQ ID NO: 416125 - DNA, 33 bp, Homo sapien
tccagcttgttcttaacgccacagtcaagagaa

SEQ ID NO: 416126 - DNA, 33 bp, Homo sapien
tccagcttgttcttaatgccacagtcaagagaa

SEQ ID NO: 416127 - DNA, 33 bp, Homo sapien
gtctccctcggaatgaacaaacttaaatgtggt

SEQ ID NO: 416128 - DNA, 33 bp, Homo sapien
gtctccctcggaatgagcaaacttaaatgtggt

SEQ ID NO: 416129 - DNA, 33 bp, Homo sapien
cctctaataaaaccccagagcctgccaggtgca

SEQ ID NO: 416130 - DNA, 33 bp, Homo sapien
cctctaataaaaccccggagcctgccaggtgca

SEQ ID NO: 416131 - DNA, 33 bp, Homo sapien
ggctctagaagaggcaaataatcagctcagggg

SEQ ID NO: 416132 - DNA, 33 bp, Homo sapien
ggctctagaagaggcatataatcagctcagggg

SEQ ID NO: 416133 - DNA, 33 bp, Homo sapien
ctgagtgttgcttaagcatgtcctacctttccc

SEQ ID NO: 416134 - DNA, 33 bp, Homo sapien
ctgagtgttgcttaagtatgtcctacctttccc

SEQ ID NO: 416135 - DNA, 33 bp, Homo sapien
agtaaatgaatgcatacggctttcgaatatcaa

SEQ ID NO: 416136 - DNA, 33 bp, Homo sapien
agtaaatgaatgcatatggctttcgaatatcaa

SEQ ID NO: 416137 - DNA, 33 bp, Homo sapien
ctgcagccactttcccacttacttaagaaagga

SEQ ID NO: 416138 - DNA, 33 bp, Homo sapien
ctgcagccactttcccgcttacttaagaaagga

SEQ ID NO: 416139 - DNA, 33 bp, Homo sapien
agcttccagggacagactcatttggatcagaaa

SEQ ID NO: 416140 - DNA, 33 bp, Homo sapien
agcttccagggacagagtcatttggatcagaaa

SEQ ID NO: 416141 - DNA, 33 bp, Homo sapien
ggctactgtaagatccagcagtgatggcctggc

SEQ ID NO: 416142 - DNA, 33 bp, Homo sapien
ggctactgtaagatccggcagtgatggcctggc

SEQ ID NO: 416143 - DNA, 33 bp, Homo sapien
actcagagagaaacgtaaatttcagaaaaacaa

SEQ ID NO: 416144 - DNA, 33 bp, Homo sapien
actcagagagaaacgtgaatttcagaaaaacaa

SEQ ID NO: 416145 - DNA, 33 bp, Homo sapien
actaagcctcctcttcaaaattcacagtggcga

SEQ ID NO: 416146 - DNA, 33 bp, Homo sapien
actaagcctcctcttcgaaattcacagtggcga

SEQ ID NO: 416147 - DNA, 33 bp, Homo sapien
cctcaatagttctacccgcaaggatgtgctggg

SEQ ID NO: 416148 - DNA, 33 bp, Homo sapien
cctcaatagttctacctgcaaggatgtgctggg

SEQ ID NO: 416149 - DNA, 33 bp, Homo sapien
agggtttcctgccccccactgctggcagagact

SEQ ID NO: 416150 - DNA, 33 bp, Homo sapien
agggtttcctgcccccgactgctggcagagact

SEQ ID NO: 416151 - DNA, 33 bp, Homo sapien
agcagagaagtcaactaaagtcagtaaaacttg

SEQ ID NO: 416152 - DNA, 33 bp, Homo sapien
agcagagaagtcaactgaagtcagtaaaacttg

SEQ ID NO: 416153 - DNA, 33 bp, Homo sapien
taaatcccttcctagaactcagcacatggccca

SEQ ID NO: 416154 - DNA, 33 bp, Homo sapien
taaatcccttcctagagctcagcacatggccca

SEQ ID NO: 416155 - DNA, 33 bp, Homo sapien
ccctctgttacctctacaagccttttgctctcc

SEQ ID NO: 416156 - DNA, 33 bp, Homo sapien
ccctctgttacctctataagccttttgctctcc

SEQ ID NO: 416157 - DNA, 33 bp, Homo sapien
cacagccagctactagaagaatctgggataaga

SEQ ID NO: 416158 - DNA, 33 bp, Homo sapien
cacagccagctactagcagaatctgggataaga

SEQ ID NO: 416159 - DNA, 33 bp, Homo sapien
agatcaaggtggtcccactatgtggtgaagtgg

SEQ ID NO: 416160 - DNA, 33 bp, Homo sapien
agatcaaggtggtcccgctatgtggtgaagtgg

SEQ ID NO: 416161 - DNA, 33 bp, Homo sapien
aagcccagcccagtgacggattatttgggagga

SEQ ID NO: 416162 - DNA, 33 bp, Homo sapien
aagcccagcccagtgagggattatttgggagga

SEQ ID NO: 416163 - DNA, 33 bp, Homo sapien
gctgtgaaggaagcagcaggcgggcacaaacgg

SEQ ID NO: 416164 - DNA, 33 bp, Homo sapien
gctgtgaaggaagcagtaggcgggcacaaacgg

SEQ ID NO: 416165 - DNA, 33 bp, Homo sapien
tgacagcttgtcccacactcatagcccgggctc

SEQ ID NO: 416166 - DNA, 33 bp, Homo sapien
tgacagcttgtcccacgctcatagcccgggctc

SEQ ID NO: 416167 - DNA, 33 bp, Homo sapien
caggggccgggatgccaccttcttcctggcagt

SEQ ID NO: 416168 - DNA, 33 bp, Homo sapien
caggggccgggatgccgccttcttcctggcagt

SEQ ID NO: 416169 - DNA, 33 bp, Homo sapien
cccaggattcctggccagaaaataagcttcccc

SEQ ID NO: 416170 - DNA, 33 bp, Homo sapien
cccaggattcctggccggaaaataagcttcccc

SEQ ID NO: 416171 - DNA, 33 bp, Homo sapien
accaagaaaacagaaaacaatcagacctatagg

SEQ ID NO: 416172 - DNA, 33 bp, Homo sapien
accaagaaaacagaaagcaatcagacctatagg

SEQ ID NO: 416173 - DNA, 33 bp, Homo sapien
agctgtggtaaaattacagagagaaatgacttc

SEQ ID NO: 416174 - DNA, 33 bp, Homo sapien
agctgtggtaaaattagagagagaaatgacttc

SEQ ID NO: 416175 - DNA, 33 bp, Homo sapien
tatgactattctgaaactgttgtgtgtgtttgt

SEQ ID NO: 416176 - DNA, 33 bp, Homo sapien
tatgactattctgaaagtgttgtgtgtgtttgt

SEQ ID NO: 416177 - DNA, 33 bp, Homo sapien
taccaaatttttcgtacaatgaattggttctgg

SEQ ID NO: 416178 - DNA, 33 bp, Homo sapien
taccaaatttttcgtataatgaattggttctgg

SEQ ID NO: 416179 - DNA, 33 bp, Homo sapien
cagttcaggttgggtcaaagcgttgttgcttct

SEQ ID NO: 416180 - DNA, 33 bp, Homo sapien
cagttcaggttgggtcgaagcgttgttgcttct

SEQ ID NO: 416181 - DNA, 33 bp, Homo sapien
cttccaagacctgccaccctggtgagttactaa

SEQ ID NO: 416182 - DNA, 33 bp, Homo sapien
cttccaagacctgccatcctggtgagttactaa

SEQ ID NO: 416183 - DNA, 33 bp, Homo sapien
caggttgggttccccacgtacacttgtgaaggt

SEQ ID NO: 416184 - DNA, 33 bp, Homo sapien
caggttgggttccccatgtacacttgtgaaggt

SEQ ID NO: 416185 - DNA, 33 bp, Homo sapien
ggcttgttctctgtagcccaagaagagaaaacc

SEQ ID NO: 416186 - DNA, 33 bp, Homo sapien
ggcttgttctctgtagtccaagaagagaaaacc

SEQ ID NO: 416187 - DNA, 33 bp, Homo sapien
gtacttgttaggtgtgaatatttccatatttca

SEQ ID NO: 416188 - DNA, 33 bp, Homo sapien
gtacttgttaggtgtgtatatttccatatttca

SEQ ID NO: 416189 - DNA, 33 bp, Homo sapien
actcctgctcccaaagcaagcctcatttatcat

SEQ ID NO: 416190 - DNA, 33 bp, Homo sapien
actcctgctcccaaagtaagcctcatttatcat

SEQ ID NO: 416191 - DNA, 33 bp, Homo sapien
tactcagagagccagacgggcctttctgtgccc

SEQ ID NO: 416192 - DNA, 33 bp, Homo sapien
tactcagagagccagatgggcctttctgtgccc

SEQ ID NO: 416193 - DNA, 33 bp, Homo sapien
ttgagactaggtcatcgaaacgatacagctgcc

SEQ ID NO: 416194 - DNA, 33 bp, Homo sapien
ttgagactaggtcatctaaacgatacagctgcc

SEQ ID NO: 416195 - DNA, 33 bp, Homo sapien
cacccccggaagatcacggagaccctcaggctg

SEQ ID NO: 416196 - DNA, 33 bp, Homo sapien
cacccccggaagatcatggagaccctcaggctg

SEQ ID NO: 416197 - DNA, 33 bp, Homo sapien
tgctgcagcggcaaaccgaggtccaggtggcct

SEQ ID NO: 416198 - DNA, 33 bp, Homo sapien
tgctgcagcggcaaactgaggtccaggtggcct

SEQ ID NO: 416199 - DNA, 33 bp, Homo sapien
tttctttcactatgacagaagttgagcatattt

SEQ ID NO: 416200 - DNA, 33 bp, Homo sapien
tttctttcactatgacggaagttgagcatattt

SEQ ID NO: 416201 - DNA, 33 bp, Homo sapien
aatcaaacaaggacaccgagggaactctgcaaa

SEQ ID NO: 416202 - DNA, 33 bp, Homo sapien
aatcaaacaaggacactgagggaactctgcaaa

SEQ ID NO: 416203 - DNA, 33 bp, Homo sapien
gcctgaccagggaaataacactgagtgaaattg

SEQ ID NO: 416204 - DNA, 33 bp, Homo sapien
gcctgaccagggaaatgacactgagtgaaattg

SEQ ID NO: 416205 - DNA, 33 bp, Homo sapien
cgaaaggattttggtcaagggagtacaagaccc

SEQ ID NO: 416206 - DNA, 33 bp, Homo sapien
cgaaaggattttggtcgagggagtacaagaccc

SEQ ID NO: 416207 - DNA, 33 bp, Homo sapien
taaaggtacgtccatccgaacaaatggagaaac

SEQ ID NO: 416208 - DNA, 33 bp, Homo sapien
taaaggtacgtccatcggaacaaatggagaaac

SEQ ID NO: 416209 - DNA, 33 bp, Homo sapien
tctgtaaataatgagaaggcaaaaaaggtgtca

SEQ ID NO: 416210 - DNA, 33 bp, Homo sapien
tctgtaaataatgagacggcaaaaaaggtgtca

SEQ ID NO: 416211 - DNA, 33 bp, Homo sapien; identical to SEQ ID NO: 416209

SEQ ID NO: 416212 - DNA, 33 bp, Homo sapien; identical to SEQ ID NO: 416210

SEQ ID NO: 416213 - DNA, 33 bp, Homo sapien
tgccacatagacataaaccaagatctggcaggt

SEQ ID NO: 416214 - DNA, 33 bp, Homo sapien
tgccacatagacataagccaagatctggcaggt

SEQ ID NO: 416215 - DNA, 33 bp, Homo sapien
aagcgcttcattagccaggaaagaagactcttg

SEQ ID NO: 416216 - DNA, 33 bp, Homo sapien
aagcgcttcattagccgggaaagaagactcttg

SEQ ID NO: 416217 - DNA, 33 bp, Homo sapien
cgttggcctatggaaaagggtaagtgcttcaac

SEQ ID NO: 416218 - DNA, 33 bp, Homo sapien
cgttggcctatggaaaggggtaagtgcttcaac

SEQ ID NO: 416219 - DNA, 33 bp, Homo sapien
ctgcgtttggagcccacgaacagattccaaggc

SEQ ID NO: 416220 - DNA, 33 bp, Homo sapien
ctgcgtttggagcccaggaacagattccaaggc

SEQ ID NO: 416221 - DNA, 33 bp, Homo sapien
gctttgtggcgtgtaacaaagactgccgagcag

SEQ ID NO: 416222 - DNA, 33 bp, Homo sapien
gctttgtggcgtgtaataaagactgccgagcag

SEQ ID NO: 416223 - DNA, 33 bp, Homo sapien
tgcgtgcaggatggacagcaaattgaactccaa

SEQ ID NO: 416224 - DNA, 33 bp, Homo sapien
tgcgtgcaggatggacggcaaattgaactccaa

SEQ ID NO: 416225 - DNA, 33 bp, Homo sapien
tctcattcctactggccacttctccatgcttgg

SEQ ID NO: 416226 - DNA, 33 bp, Homo sapien
tctcattcctactggctacttctccatgcttgg

SEQ ID NO: 416227 - DNA, 33 bp, Homo sapien
cagatcaatctctctacggctcatctgctccca

SEQ ID NO: 416228 - DNA, 33 bp, Homo sapien
cagatcaatctctctatggctcatctgctccca

SEQ ID NO: 416229 - DNA, 33 bp, Homo sapien
gggacgctcctctcaccgggaaataaaagcttc

SEQ ID NO: 416230 - DNA, 33 bp, Homo sapien
gggacgctcctctcactgggaaataaaagcttc

SEQ ID NO: 416231 - DNA, 33 bp, Homo sapien
aggcacagataacttacggaccaatcaatacag

SEQ ID NO: 416232 - DNA, 33 bp, Homo sapien
aggcacagataacttatggaccaatcaatacag

SEQ ID NO: 416233 - DNA, 33 bp, Homo sapien
cctatcaatggcccaacttacagattgaggaaa

SEQ ID NO: 416234 - DNA, 33 bp, Homo sapien
cctatcaatggcccaatttacagattgaggaaa

SEQ ID NO: 416235 - DNA, 33 bp, Homo sapien
ccctcactggactgaactgagtttagcccgaaa

SEQ ID NO: 416236 - DNA, 33 bp, Homo sapien
ccctcactggactgaattgagtttagcccgaaa

SEQ ID NO: 416237 - DNA, 33 bp, Homo sapien
tctgtcaaggcaatgaagaggctaaggagggtg

SEQ ID NO: 416238 - DNA, 33 bp, Homo sapien
tctgtcaaggcaatgatgaggctaaggagggtg

SEQ ID NO: 416239 - DNA, 33 bp, Homo sapien
tcctcactgtttgccccaccctcaggaatggaa

SEQ ID NO: 416240 - DNA, 33 bp, Homo sapien
tcctcactgtttgcccgaccctcaggaatggaa

SEQ ID NO: 416241 - DNA, 33 bp, Homo sapien
atctgatcttctagcacaagccagggtggtaga

SEQ ID NO: 416242 - DNA, 33 bp, Homo sapien
atctgatcttctagcataagccagggtggtaga

SEQ ID NO: 416243 - DNA, 33 bp, Homo sapien
agtggtaagtatataacgcaaatatttcaaaat

SEQ ID NO: 416244 - DNA, 33 bp, Homo sapien
agtggtaagtatataaggcaaatatttcaaaat

SEQ ID NO: 416245 - DNA, 33 bp, Homo sapien
aactgctggaccttcaggcttaaagagtcacac

SEQ ID NO: 416246 - DNA, 33 bp, Homo sapien
aactgctggaccttcatgcttaaagagtcacac

SEQ ID NO: 416247 - DNA, 33 bp, Homo sapien
actaaatgatctgttccagcaagaaagacaaac

SEQ ID NO: 416248 - DNA, 33 bp, Homo sapien
actaaatgatctgttcgagcaagaaagacaaac

SEQ ID NO: 416249 - DNA, 33 bp, Homo sapien
acgtccactctgatcaaccagtgcgattggcac

SEQ ID NO: 416250 - DNA, 33 bp, Homo sapien
acgtccactctgatcagccagtgcgattggcac

SEQ ID NO: 416251 - DNA, 33 bp, Homo sapien
aagggagttctgcagccgacaagcccagggtgg

SEQ ID NO: 416252 - DNA, 33 bp, Homo sapien
aagggagttctgcagcggacaagcccagggtgg

SEQ ID NO: 416253 - DNA, 33 bp, Homo sapien
caatggggaaaaaacaggtctcttcaacaaatg

SEQ ID NO: 416254 - DNA, 33 bp, Homo sapien
caatggggaaaaaacatgtctcttcaacaaatg

SEQ ID NO: 416255 - DNA, 33 bp, Homo sapien
agatgttgaaattagcagacacgaattttaaag

SEQ ID NO: 416256 - DNA, 33 bp, Homo sapien
agatgttgaaattagcggacacgaattttaaag

SEQ ID NO: 416257 - DNA, 33 bp, Homo sapien
tgtctaattgttgaaacgcacaggacgggtagc

SEQ ID NO: 416258 - DNA, 33 bp, Homo sapien
tgtctaattgttgaaatgcacaggacgggtagc

SEQ ID NO: 416259 - DNA, 33 bp, Homo sapien
tgggaagattgtctgacgtacgatttgggaacg

SEQ ID NO: 416260 - DNA, 33 bp, Homo sapien
tgggaagattgtctgatgtacgatttgggaacg

SEQ ID NO: 416261 - DNA, 33 bp, Homo sapien
gaacagctggacccataatctggcttctccagc

SEQ ID NO: 416262 - DNA, 33 bp, Homo sapien
gaacagctggacccatgatctggcttctccagc

SEQ ID NO: 416263 - DNA, 33 bp, Homo sapien
cagcagcttaaaccacagtgaatcatctaagca

SEQ ID NO: 416264 - DNA, 33 bp, Homo sapien
cagcagcttaaaccacggtgaatcatctaagca

SEQ ID NO: 416265 - DNA, 33 bp, Homo sapien
cacttactaagcaccacctgtatactaagtgag

SEQ ID NO: 416266 - DNA, 33 bp, Homo sapien
cacttactaagcaccatctgtatactaagtgag

SEQ ID NO: 416267 - DNA, 33 bp, Homo sapien
aaagccaacagtacacaagggagcgggatgaaa

SEQ ID NO: 416268 - DNA, 33 bp, Homo sapien
aaagccaacagtacacgagggagcgggatgaaa

SEQ ID NO: 416269 - DNA, 33 bp, Homo sapien
aggcatggcacagaacaagggacgaaacaattg

SEQ ID NO: 416270 - DNA, 33 bp, Homo sapien
aggcatggcacagaacgagggacgaaacaattg

SEQ ID NO: 416271 - DNA, 33 bp, Homo sapien
gggaaatcctggtttccctcccgctgattgtgc

SEQ ID NO: 416272 - DNA, 33 bp, Homo sapien
gggaaatcctggtttctctcccgctgattgtgc

SEQ ID NO: 416273 - DNA, 33 bp, Homo sapien
agtttgtggccctttcagaaaaccgagtggctg

SEQ ID NO: 416274 - DNA, 33 bp, Homo sapien
agtttgtggccctttcggaaaaccgagtggctg

SEQ ID NO: 416275 - DNA, 33 bp, Homo sapien
cttgggtgggttaatacctgttccagtaaccag

SEQ ID NO: 416276 - DNA, 33 bp, Homo sapien
cttgggtgggttaatagctgttccagtaaccag

SEQ ID NO: 416277 - DNA, 33 bp, Homo sapien
agtgaaatcctgtttgcaacgtgtgagcaccag

SEQ ID NO: 416278 - DNA, 33 bp, Homo sapien
agtgaaatcctgtttggaacgtgtgagcaccag

SEQ ID NO: 416279 - DNA, 33 bp, Homo sapien
tttcagatccagggcaagataaggacatcaagg

SEQ ID NO: 416280 - DNA, 33 bp, Homo sapien
tttcagatccagggcaggataaggacatcaagg

SEQ ID NO: 416281 - DNA, 33 bp, Homo sapien
tgctgtcaaggaactcaaagttcaacagagaag

SEQ ID NO: 416282 - DNA, 33 bp, Homo sapien
tgctgtcaaggaactcgaagttcaacagagaag

SEQ ID NO: 416283 - DNA, 33 bp, Homo sapien
ctggccatgtcctctcactggcatctgccttgc

SEQ ID NO: 416284 - DNA, 33 bp, Homo sapien
ctggccatgtcctctcgctggcatctgccttgc

SEQ ID NO: 416285 - DNA, 33 bp, Homo sapien
acgtaaaactcttaccactgcataatgtgccct

SEQ ID NO: 416286 - DNA, 33 bp, Homo sapien
acgtaaaactcttaccgctgcataatgtgccct

SEQ ID NO: 416287 - DNA, 33 bp, Homo sapien
ttcacttgtcttcttcactgtggtacctccagc

SEQ ID NO: 416288 - DNA, 33 bp, Homo sapien
ttcacttgtcttcttcgctgtggtacctccagc

SEQ ID NO: 416289 - DNA, 33 bp, Homo sapien
tttcaactgtacaaggaatggttgtgtgatgtg

SEQ ID NO: 416290 - DNA, 33 bp, Homo sapien
tttcaactgtacaaggcatggttgtgtgatgtg

SEQ ID NO: 416291 - DNA, 33 bp, Homo sapien
gaaagtgtcaaattgccgaaaagactagtgttt

SEQ ID NO: 416292 - DNA, 33 bp, Homo sapien
gaaagtgtcaaattgctgaaaagactagtgttt

SEQ ID NO: 416293 - DNA, 33 bp, Homo sapien
ctagtgacatgaatgaaggtaacaaagttattt

SEQ ID NO: 416294 - DNA, 33 bp, Homo sapien
ctagtgacatgaatgagggtaacaaagttattt

SEQ ID NO: 416295 - DNA, 33 bp, Homo sapien
tgcctaatgcaagcaacgactgtgcctaaatct

SEQ ID NO: 416296 - DNA, 33 bp, Homo sapien
tgcctaatgcaagcaatgactgtgcctaaatct

SEQ ID NO: 416297 - DNA, 33 bp, Homo sapien
catgcatgttttgttgcatgtacatctggttct

SEQ ID NO: 416298 - DNA, 33 bp, Homo sapien
catgcatgttttgttgtatgtacatctggttct

SEQ ID NO: 416299 - DNA, 33 bp, Homo sapien
agattgcctgtagagaactaaaccccagaccct

SEQ ID NO: 416300 - DNA, 33 bp, Homo sapien
agattgcctgtagagatctaaaccccagaccct

SEQ ID NO: 416301 - DNA, 33 bp, Homo sapien
tggcactgtaccaaacaatcatttacagaaaac

SEQ ID NO: 416302 - DNA, 33 bp, Homo sapien
tggcactgtaccaaacgatcatttacagaaaac

SEQ ID NO: 416303 - DNA, 33 bp, Homo sapien
ctgacatctgactgcaactgtgtaggagatcca

SEQ ID NO: 416304 - DNA, 33 bp, Homo sapien
ctgacatctgactgcagctgtgtaggagatcca

SEQ ID NO: 416305 - DNA, 33 bp, Homo sapien
ttcgcaaatctctgccacacaaaatcatgagca

SEQ ID NO: 416306 - DNA, 33 bp, Homo sapien
ttcgcaaatctctgccgcacaaaatcatgagca

SEQ ID NO: 416307 - DNA, 33 bp, Homo sapien
aatatctatcttcccacgtggaccatacgttct

SEQ ID NO: 416308 - DNA, 33 bp, Homo sapien
aatatctatcttcccatgtggaccatacgttct

SEQ ID NO: 416309 - DNA, 33 bp, Homo sapien
tattacaggaacatcaccatttgaagggggtaa

SEQ ID NO: 416310 - DNA, 33 bp, Homo sapien
tattacaggaacatcatcatttgaagggggtaa

SEQ ID NO: 416311 - DNA, 33 bp, Homo sapien
gaggaaaccagtgtcacactgagaacggcagag

SEQ ID NO: 416312 - DNA, 33 bp, Homo sapien
gaggaaaccagtgtcatactgagaacggcagag

SEQ ID NO: 416313 - DNA, 33 bp, Homo sapien
tggctgtgtgcagtcaagatgtttggagcaatg

SEQ ID NO: 416314 - DNA, 33 bp, Homo sapien
tggctgtgtgcagtcacgatgtttggagcaatg

SEQ ID NO: 416315 - DNA, 33 bp, Homo sapien
ttccaggtatgaacagcaatggatgggagcagg

SEQ ID NO: 416316 - DNA, 33 bp, Homo sapien
ttccaggtatgaacagtaatggatgggagcagg

SEQ ID NO: 416317 - DNA, 33 bp, Homo sapien
agcccgtgttcttctcgccttgccagctgtctg

SEQ ID NO: 416318 - DNA, 33 bp, Homo sapien
agcccgtgttcttctctccttgccagctgtctg

SEQ ID NO: 416319 - DNA, 33 bp, Homo sapien
acacagccaataatgcaaaaatcacctcatttg

SEQ ID NO: 416320 - DNA, 33 bp, Homo sapien
acacagccaataatgccaaaatcacctcatttg

SEQ ID NO: 416321 - DNA, 33 bp, Homo sapien
gcaaactgggaatgaaagctgatgtaacttgga

SEQ ID NO: 416322 - DNA, 33 bp, Homo sapien
gcaaactgggaatgaatgctgatgtaacttgga

SEQ ID NO: 416323 - DNA, 33 bp, Homo sapien
gacttgtgtcagaggccctttctcttagttgtt

SEQ ID NO: 416324 - DNA, 33 bp, Homo sapien
gacttgtgtcagaggctctttctcttagttgtt

SEQ ID NO: 416325 - DNA, 33 bp, Homo sapien
ggctattaaggtcaaaggtatagtaatggagat

SEQ ID NO: 416326 - DNA, 33 bp, Homo sapien
ggctattaaggtcaaatgtatagtaatggagat

SEQ ID NO: 416327 - DNA, 33 bp, Homo sapien
gtggatgggcaagtgacagatgtgtggaaactc

SEQ ID NO: 416328 - DNA, 33 bp, Homo sapien
gtggatgggcaagtgatagatgtgtggaaactc

SEQ ID NO: 416329 - DNA, 33 bp, Homo sapien
atgcctggtctcttccgctttggtctgcatttc

SEQ ID NO: 416330 - DNA, 33 bp, Homo sapien
atgcctggtctcttcctctttggtctgcatttc

SEQ ID NO: 416331 - DNA, 33 bp, Homo sapien
tggaaatggtgctctgcatcactggaggaagca

SEQ ID NO: 416332 - DNA, 33 bp, Homo sapien
tggaaatggtgctctgtatcactggaggaagca

SEQ ID NO: 416333 - DNA, 33 bp, Homo sapien
gcacagtttgtgacaccgaagcacatactctgc

SEQ ID NO: 416334 - DNA, 33 bp, Homo sapien
gcacagtttgtgacactgaagcacatactctgc

SEQ ID NO: 416335 - DNA, 33 bp, Homo sapien
cattatgggccccagaaccaatcatgctggatt

SEQ ID NO: 416336 - DNA, 33 bp, Homo sapien
cattatgggccccagagccaatcatgctggatt

SEQ ID NO: 416337 - DNA, 33 bp, Homo sapien
gagggaacttgagacactaaggactcacttctg

SEQ ID NO: 416338 - DNA, 33 bp, Homo sapien
gagggaacttgagacattaaggactcacttctg

SEQ ID NO: 416339 - DNA, 33 bp, Homo sapien
aggtgtgctctcgaaacgcatctgtgtaggtct

SEQ ID NO: 416340 - DNA, 33 bp, Homo sapien
aggtgtgctctcgaaatgcatctgtgtaggtct

SEQ ID NO: 416341 - DNA, 33 bp, Homo sapien
ccaaagtcaggaaacccgggatgactgaatgct

SEQ ID NO: 416342 - DNA, 33 bp, Homo sapien
ccaaagtcaggaaacctgggatgactgaatgct

SEQ ID NO: 416343 - DNA, 33 bp, Homo sapien
ctctgctgccacaacccaagtacatcccacaac

SEQ ID NO: 416344 - DNA, 33 bp, Homo sapien
ctctgctgccacaaccgaagtacatcccacaac

SEQ ID NO: 416345 - DNA, 33 bp, Homo sapien
agcaggacgtgagaacaaggagaatgagatggt

SEQ ID NO: 416346 - DNA, 33 bp, Homo sapien
agcaggacgtgagaacgaggagaatgagatggt

SEQ ID NO: 416347 - DNA, 33 bp, Homo sapien
gaggtgatcttgggaagtactagtaggggagtg

SEQ ID NO: 416348 - DNA, 33 bp, Homo sapien
gaggtgatcttgggaattactagtaggggagtg

SEQ ID NO: 416349 - DNA, 33 bp, Homo sapien
ctgttatgaacgaccacgtgatgcagaaaaaat

SEQ ID NO: 416350 - DNA, 33 bp, Homo sapien
ctgttatgaacgaccatgtgatgcagaaaaaat

SEQ ID NO: 416351 - DNA, 33 bp, Homo sapien
agcttggtaagtgtgaagaaagcaaatcatttc

SEQ ID NO: 416352 - DNA, 33 bp, Homo sapien
agcttggtaagtgtgaggaaagcaaatcatttc

SEQ ID NO: 416353 - DNA, 33 bp, Homo sapien
tatgctggaaatagcactcgagccagacgccct

SEQ ID NO: 416354 - DNA, 33 bp, Homo sapien
tatgctggaaatagcattcgagccagacgccct

SEQ ID NO: 416355 - DNA, 33 bp, Homo sapien
ctggaggctgcgagcacagccaaaaagatgaac

SEQ ID NO: 416356 - DNA, 33 bp, Homo sapien
ctggaggctgcgagcagagccaaaaagatgaac

SEQ ID NO: 416357 - DNA, 33 bp, Homo sapien
aggattatgaataaccccttcgatcattagaac

SEQ ID NO: 416358 - DNA, 33 bp, Homo sapien
aggattatgaataacctcttcgatcattagaac

SEQ ID NO: 416359 - DNA, 33 bp, Homo sapien
catagtgccaaggcccactgctactgttatgag

SEQ ID NO: 416360 - DNA, 33 bp, Homo sapien
catagtgccaaggcccgctgctactgttatgag

SEQ ID NO: 416361 - DNA, 33 bp, Homo sapien
cagcatcggactgaccacctcttgggaacatag

SEQ ID NO: 416362 - DNA, 33 bp, Homo sapien
cagcatcggactgaccgcctcttgggaacatag

SEQ ID NO: 416363 - DNA, 33 bp, Homo sapien
ctgccccctctaaataatagttccgggtcttct

SEQ ID NO: 416364 - DNA, 33 bp, Homo sapien
ctgccccctctaaatagtagttccgggtcttct

SEQ ID NO: 416365 - DNA, 33 bp, Homo sapien
ctccagatactgatgaaggggtgcgggcatatt

SEQ ID NO: 416366 - DNA, 33 bp, Homo sapien
ctccagatactgatgagggggtgcgggcatatt

SEQ ID NO: 416367 - DNA, 33 bp, Homo sapien
ttctttggctcccatcccgagggttctgacttg

SEQ ID NO: 416368 - DNA, 33 bp, Homo sapien
ttctttggctcccatctcgagggttctgacttg

SEQ ID NO: 416369 - DNA, 33 bp, Homo sapien
agttgggaaaatggaagctttggtgactgtggg

SEQ ID NO: 416370 - DNA, 33 bp, Homo sapien
agttgggaaaatggaatctttggtgactgtggg

SEQ ID NO: 416371 - DNA, 33 bp, Homo sapien
caagatgaggtctttgcagatagcacaggctgg

SEQ ID NO: 416372 - DNA, 33 bp, Homo sapien
caagatgaggtctttgtagatagcacaggctgg

SEQ ID NO: 416373 - DNA, 33 bp, Homo sapien
tgcctcccagatcttacgccttttgagtgatgg

SEQ ID NO: 416374 - DNA, 33 bp, Homo sapien
tgcctcccagatcttaggccttttgagtgatgg

SEQ ID NO: 416375 - DNA, 33 bp, Homo sapien
ggcagggaaactaggaacaacttgtagataggg

SEQ ID NO: 416376 - DNA, 33 bp, Homo sapien
ggcagggaaactaggagcaacttgtagataggg

SEQ ID NO: 416377 - DNA, 33 bp, Homo sapien
cttgacaaaaatccaaaaaagagctcaatcctt

SEQ ID NO: 416378 - DNA, 33 bp, Homo sapien
cttgacaaaaatccaataaagagctcaatcctt

SEQ ID NO: 416379 - DNA, 33 bp, Homo sapien
tgggatactgtggaaacgatttttgtggtatta

SEQ ID NO: 416380 - DNA, 33 bp, Homo sapien
tgggatactgtggaaatgatttttgtggtatta

SEQ ID NO: 416381 - DNA, 33 bp, Homo sapien
gggggcaccgcaggaacggatgctggccagtga

SEQ ID NO: 416382 - DNA, 33 bp, Homo sapien
gggggcaccgcaggaatggatgctggccagtga

SEQ ID NO: 416383 - DNA, 33 bp, Homo sapien
cccctcctgatgggaaatatggcaggctggaga

SEQ ID NO: 416384 - DNA, 33 bp, Homo sapien
cccctcctgatgggaagtatggcaggctggaga

SEQ ID NO: 416385 - DNA, 33 bp, Homo sapien
gattgtaatggatctacataagagttggtatga

SEQ ID NO: 416386 - DNA, 33 bp, Homo sapien
gattgtaatggatctatataagagttggtatga

SEQ ID NO: 416387 - DNA, 33 bp, Homo sapien
tgcagagagaagaaaacgcgttggcttttttag

SEQ ID NO: 416388 - DNA, 33 bp, Homo sapien
tgcagagagaagaaaatgcgttggcttttttag

SEQ ID NO: 416389 - DNA, 33 bp, Homo sapien
aaaggaatgaagtgccaataggacagcatgaat

SEQ ID NO: 416390 - DNA, 33 bp, Homo sapien
aaaggaatgaagtgccgataggacagcatgaat

SEQ ID NO: 416391 - DNA, 33 bp, Homo sapien
ttagacctgttagaccggctgctaaatcttgct

SEQ ID NO: 416392 - DNA, 33 bp, Homo sapien
ttagacctgttagacctgctgctaaatcttgct

SEQ ID NO: 416393 - DNA, 33 bp, Homo sapien
cactgctggaaggggacaaatttgtgttctcct

SEQ ID NO: 416394 - DNA, 33 bp, Homo sapien
cactgctggaaggggataaatttgtgttctcct

SEQ ID NO: 416395 - DNA, 33 bp, Homo sapien
ttcccagttactaggacggacacttttcattat

SEQ ID NO: 416396 - DNA, 33 bp, Homo sapien
ttcccagttactaggatggacacttttcattat

SEQ ID NO: 416397 - DNA, 33 bp, Homo sapien
cctgggcacgtgagacccccatcaaagcagcct

SEQ ID NO: 416398 - DNA, 33 bp, Homo sapien
cctgggcacgtgagactcccatcaaagcagcct

SEQ ID NO: 416399 - DNA, 33 bp, Homo sapien
tggggcacttcttaaaagctccacgtgcattca

SEQ ID NO: 416400 - DNA, 33 bp, Homo sapien
tggggcacttcttaaatgctccacgtgcattca

SEQ ID NO: 416401 - DNA, 33 bp, Homo sapien
ctgatcctcaaagacacatcctaagttcaggat

SEQ ID NO: 416402 - DNA, 33 bp, Homo sapien
ctgatcctcaaagacatatcctaagttcaggat

SEQ ID NO: 416403 - DNA, 33 bp, Homo sapien
agctgtggcaagtgacagcttcttgcctgggaa

SEQ ID NO: 416404 - DNA, 33 bp, Homo sapien
agctgtggcaagtgacggcttcttgcctgggaa

SEQ ID NO: 416405 - DNA, 33 bp, Homo sapien
caagatttagtgcagagctccaatccttaaaca

SEQ ID NO: 416406 - DNA, 33 bp, Homo sapien
caagatttagtgcagatctccaatccttaaaca

SEQ ID NO: 416407 - DNA, 33 bp, Homo sapien
tgaagctccagtgagactcaatgagggattcag

SEQ ID NO: 416408 - DNA, 33 bp, Homo sapien
tgaagctccagtgagattcaatgagggattcag

SEQ ID NO: 416409 - DNA, 33 bp, Homo sapien
gtgtaaaaatttatcacgaagagctggctctca

SEQ ID NO: 416410 - DNA, 33 bp, Homo sapien
gtgtaaaaatttatcatgaagagctggctctca

SEQ ID NO: 416411 - DNA, 33 bp, Homo sapien
ctgctctttcctgctacatctcttcaaggcggg

SEQ ID NO: 416412 - DNA, 33 bp, Homo sapien
ctgctctttcctgctatatctcttcaaggcggg

SEQ ID NO: 416413 - DNA, 33 bp, Homo sapien
ccagtcaggtgagcaaacttagccaatcataca

SEQ ID NO: 416414 - DNA, 33 bp, Homo sapien
ccagtcaggtgagcaagcttagccaatcataca

SEQ ID NO: 416415 - DNA, 33 bp, Homo sapien
gaatgagaggtagaaagatgggagacttgggta

SEQ ID NO: 416416 - DNA, 33 bp, Homo sapien
gaatgagaggtagaaatatgggagacttgggta

SEQ ID NO: 416417 - DNA, 33 bp, Homo sapien
tgcctagctcaaggccaataaccatgttgaacc

SEQ ID NO: 416418 - DNA, 33 bp, Homo sapien
tgcctagctcaaggccgataaccatgttgaacc

SEQ ID NO: 416419 - DNA, 33 bp, Homo sapien
tgttgaccaacatttacctattcagtactagcc

SEQ ID NO: 416420 - DNA, 33 bp, Homo sapien
tgttgaccaacatttatctattcagtactagcc

SEQ ID NO: 416421 - DNA, 33 bp, Homo sapien
ctcgtgctggcattcaaggtccgctcagataat

SEQ ID NO: 416422 - DNA, 33 bp, Homo sapien
ctcgtgctggcattcagggtccgctcagataat

SEQ ID NO: 416423 - DNA, 33 bp, Homo sapien
aaactaatatagagagccacaaaaggctggtgc

SEQ ID NO: 416424 - DNA, 33 bp, Homo sapien
aaactaatatagagagtcacaaaaggctggtgc

SEQ ID NO: 416425 - DNA, 33 bp, Homo sapien
acgggactatcgccaaacatcttgtcctcttgg

SEQ ID NO: 416426 - DNA, 33 bp, Homo sapien
acgggactatcgccaagcatcttgtcctcttgg

SEQ ID NO: 416427 - DNA, 33 bp, Homo sapien
ttgccaattctgatccacttcctccttcacccc

SEQ ID NO: 416428 - DNA, 33 bp, Homo sapien
ttgccaattctgatccgcttcctccttcacccc

SEQ ID NO: 416429 - DNA, 33 bp, Homo sapien
gccactgagaatgattgaaccacatcgagcctg

SEQ ID NO: 416430 - DNA, 33 bp, Homo sapien
gccactgagaatgatttaaccacatcgagcctg

SEQ ID NO: 416431 - DNA, 33 bp, Homo sapien
cctggtcctggaacctcaaagctcacctcctcc

SEQ ID NO: 416432 - DNA, 33 bp, Homo sapien
cctggtcctggaacctgaaagctcacctcctcc

SEQ ID NO: 416433 - DNA, 33 bp, Homo sapien
atgggagaacaaaaacacaaggcttcatatccc

SEQ ID NO: 416434 - DNA, 33 bp, Homo sapien
atgggagaacaaaaacgcaaggcttcatatccc

SEQ ID NO: 416435 - DNA, 33 bp, Homo sapien
agattgctagtccttcacaaatctgaatgacca

SEQ ID NO: 416436 - DNA, 33 bp, Homo sapien
agattgctagtccttcgcaaatctgaatgacca

SEQ ID NO: 416437 - DNA, 33 bp, Homo sapien
accttagattgggaaccaaaaccataattagcc

SEQ ID NO: 416438 - DNA, 33 bp, Homo sapien
accttagattgggaactaaaaccataattagcc

SEQ ID NO: 416439 - DNA, 33 bp, Homo sapien
ttctcacctgtggaaacaatgagccatgtgtat

SEQ ID NO: 416440 - DNA, 33 bp, Homo sapien
ttctcacctgtggaaagaatgagccatgtgtat

SEQ ID NO: 416441 - DNA, 33 bp, Homo sapien
gctttttttcggcaaggaccataggacaaataa

SEQ ID NO: 416442 - DNA, 33 bp, Homo sapien
gctttttttcggcaagtaccataggacaaataa

SEQ ID NO: 416443 - DNA, 33 bp, Homo sapien
attcgagccagtctaaatgtctatgagggatgt

SEQ ID NO: 416444 - DNA, 33 bp, Homo sapien
attcgagccagtctaagtgtctatgagggatgt

SEQ ID NO: 416445 - DNA, 33 bp, Homo sapien
atcaaatctgaaacacagggaataggtagaatt

SEQ ID NO: 416446 - DNA, 33 bp, Homo sapien
atcaaatctgaaacacggggaataggtagaatt

SEQ ID NO: 416447 - DNA, 33 bp, Homo sapien
agcaacaactgtgccacatgtgaaagaaggaga

SEQ ID NO: 416448 - DNA, 33 bp, Homo sapien
agcaacaactgtgccatatgtgaaagaaggaga

SEQ ID NO: 416449 - DNA, 33 bp, Homo sapien
cttctgggcaacttacacaggactctgagatac

SEQ ID NO: 416450 - DNA, 33 bp, Homo sapien
cttctgggcaacttacccaggactctgagatac

SEQ ID NO: 416451 - DNA, 33 bp, Homo sapien
gagctcagatgcccaaataagtggaggactctt

SEQ ID NO: 416452 - DNA, 33 bp, Homo sapien
gagctcagatgcccaagtaagtggaggactctt

SEQ ID NO: 416453 - DNA, 33 bp, Homo sapien
tgcccatcacactggcaagcatccttataggcc

SEQ ID NO: 416454 - DNA, 33 bp, Homo sapien
tgcccatcacactggcgagcatccttataggcc

SEQ ID NO: 416455 - DNA, 33 bp, Homo sapien
ttctagggattgaagggaattgaaggaaaggtt

SEQ ID NO: 416456 - DNA, 33 bp, Homo sapien
ttctagggattgaaggtaattgaaggaaaggtt

SEQ ID NO: 416457 - DNA, 33 bp, Homo sapien
aaggccgcattcattaacagaagccgcattagc

SEQ ID NO: 416458 - DNA, 33 bp, Homo sapien
aaggccgcattcattagcagaagccgcattagc

SEQ ID NO: 416459 - DNA, 33 bp, Homo sapien
attaagaaagtgcaggaataaaagattggctgc

SEQ ID NO: 416460 - DNA, 33 bp, Homo sapien
attaagaaagtgcagggataaaagattggctgc

SEQ ID NO: 416461 - DNA, 33 bp, Homo sapien
tgagatgacgttgacaatgatggactctgagca

SEQ ID NO: 416462 - DNA, 33 bp, Homo sapien
tgagatgacgttgacagtgatggactctgagca

SEQ ID NO: 416463 - DNA, 33 bp, Homo sapien
tccctgttctctccacagtcatagccaagagcc

SEQ ID NO: 416464 - DNA, 33 bp, Homo sapien
tccctgttctctccacggtcatagccaagagcc

SEQ ID NO: 416465 - DNA, 33 bp, Homo sapien
cgtgtgtgtacgcgcacgaacatctatgtgtct

SEQ ID NO: 416466 - DNA, 33 bp, Homo sapien
cgtgtgtgtacgcgcatgaacatctatgtgtct

SEQ ID NO: 416467 - DNA, 33 bp, Homo sapien
tctgaagggctaaaacacaagtggaaaaggcaa

SEQ ID NO: 416468 - DNA, 33 bp, Homo sapien
tctgaagggctaaaacgcaagtggaaaaggcaa

SEQ ID NO: 416469 - DNA, 33 bp, Homo sapien
ttgcctgcttgtaacacgcacttagacccttcc

SEQ ID NO: 416470 - DNA, 33 bp, Homo sapien
ttgcctgcttgtaacatgcacttagacccttcc

SEQ ID NO: 416471 - DNA, 33 bp, Homo sapien
tctagaatcttccagacaaacgaagtggtagaa

SEQ ID NO: 416472 - DNA, 33 bp, Homo sapien
tctagaatcttccagataaacgaagtggtagaa

SEQ ID NO: 416473 - DNA, 33 bp, Homo sapien
ctgtttcacctcatccagagacttgcacttgag

SEQ ID NO: 416474 - DNA, 33 bp, Homo sapien
ctgtttcacctcatccggagacttgcacttgag

SEQ ID NO: 416475 - DNA, 33 bp, Homo sapien
atggttgatgtaagccactaagttttagggtag

SEQ ID NO: 416476 - DNA, 33 bp, Homo sapien
atggttgatgtaagccgctaagttttagggtag

SEQ ID NO: 416477 - DNA, 33 bp, Homo sapien
caggaagctctaaaaacgaggctttcttgtctg

SEQ ID NO: 416478 - DNA, 33 bp, Homo sapien
caggaagctctaaaaatgaggctttcttgtctg

SEQ ID NO: 416479 - DNA, 33 bp, Homo sapien
gcatctgacctggaggcaaagcccagaaatata

SEQ ID NO: 416480 - DNA, 33 bp, Homo sapien
gcatctgacctggaggtaaagcccagaaatata

SEQ ID NO: 416481 - DNA, 33 bp, Homo sapien
tgttgttacttgcagcagagcacaccccctttc

SEQ ID NO: 416482 - DNA, 33 bp, Homo sapien
tgttgttacttgcagctgagcacaccccctttc

SEQ ID NO: 416483 - DNA, 33 bp, Homo sapien
tcactgtatagacaaaccacaagctatggatga

SEQ ID NO: 416484 - DNA, 33 bp, Homo sapien
tcactgtatagacaaatcacaagctatggatga

SEQ ID NO: 416485 - DNA, 33 bp, Homo sapien
ccaaaatggagatagaagagtacctactggctg

SEQ ID NO: 416486 - DNA, 33 bp, Homo sapien
ccaaaatggagatagaggagtacctactggctg

SEQ ID NO: 416487 - DNA, 33 bp, Homo sapien
actggactttcttgtacctgaggctgaagacgc

SEQ ID NO: 416488 - DNA, 33 bp, Homo sapien
actggactttcttgtatctgaggctgaagacgc

SEQ ID NO: 416489 - DNA, 33 bp, Homo sapien
atcggcagcaggaagcacaagaaaggcgatcgg

SEQ ID NO: 416490 - DNA, 33 bp, Homo sapien
atcggcagcaggaagcgcaagaaaggcgatcgg

SEQ ID NO: 416491 - DNA, 33 bp, Homo sapien
atcacaatgtaatttacgacaacaagaacactt

SEQ ID NO: 416492 - DNA, 33 bp, Homo sapien
atcacaatgtaatttatgacaacaagaacactt

SEQ ID NO: 416493 - DNA, 33 bp, Homo sapien
gctttgatgtgacagccaaagaaaaaaaaacaa

SEQ ID NO: 416494 - DNA, 33 bp, Homo sapien
gctttgatgtgacagcgaaagaaaaaaaaacaa

SEQ ID NO: 416495 - DNA, 33 bp, Homo sapien
attctactgctggtcaagttctagaagtagtaa

SEQ ID NO: 416496 - DNA, 33 bp, Homo sapien
attctactgctggtcacgttctagaagtagtaa

SEQ ID NO: 416497 - DNA, 33 bp, Homo sapien
acctgcctggttccccgcagtccttgcataatc

SEQ ID NO: 416498 - DNA, 33 bp, Homo sapien
acctgcctggttcccctcagtccttgcataatc

SEQ ID NO: 416499 - DNA, 33 bp, Homo sapien
gactcagtggctgttacgaactgaatgtgtgtg

SEQ ID NO: 416500 - DNA, 33 bp, Homo sapien
gactcagtggctgttatgaactgaatgtgtgtg

SEQ ID NO: 416501 - DNA, 33 bp, Homo sapien
ccagccaagaaggcaacagaaagactctgtaac

SEQ ID NO: 416502 - DNA, 33 bp, Homo sapien
ccagccaagaaggcaatagaaagactctgtaac

SEQ ID NO: 416503 - DNA, 33 bp, Homo sapien
aaagacaactcaaagacgtgctgtttggaattg

SEQ ID NO: 416504 - DNA, 33 bp, Homo sapien
aaagacaactcaaagatgtgctgtttggaattg

SEQ ID NO: 416505 - DNA, 33 bp, Homo sapien
gttctatgcgagctccaattgcctttctcagca

SEQ ID NO: 416506 - DNA, 33 bp, Homo sapien
gttctatgcgagctccgattgcctttctcagca

SEQ ID NO: 416507 - DNA, 33 bp, Homo sapien
ttaacattttcttccaacgaaatgtagctcttt

SEQ ID NO: 416508 - DNA, 33 bp, Homo sapien
ttaacattttcttccaccgaaatgtagctcttt

SEQ ID NO: 416509 - DNA, 33 bp, Homo sapien
ccctaaccactaaccacactgaaagtgagagcc

SEQ ID NO: 416510 - DNA, 33 bp, Homo sapien
ccctaaccactaaccatactgaaagtgagagcc

SEQ ID NO: 416511 - DNA, 33 bp, Homo sapien
ggcaatgacagagcaacattgcagatggggctg

SEQ ID NO: 416512 - DNA, 33 bp, Homo sapien
ggcaatgacagagcaagattgcagatggggctg

SEQ ID NO: 416513 - DNA, 33 bp, Homo sapien
gccccatagctctcaacgcacgtattaaagtgg

SEQ ID NO: 416514 - DNA, 33 bp, Homo sapien
gccccatagctctcaatgcacgtattaaagtgg

SEQ ID NO: 416515 - DNA, 33 bp, Homo sapien
aacttcacctgagttacgaccactgaagactcg

SEQ ID NO: 416516 - DNA, 33 bp, Homo sapien
aacttcacctgagttatgaccactgaagactcg

SEQ ID NO: 416517 - DNA, 33 bp, Homo sapien
gaagactagatgcctccgaggagtccaaaaatg

SEQ ID NO: 416518 - DNA, 33 bp, Homo sapien
gaagactagatgcctctgaggagtccaaaaatg

SEQ ID NO: 416519 - DNA, 33 bp, Homo sapien
caggagcatcgaaaacaggtctgagaaccagca

SEQ ID NO: 416520 - DNA, 33 bp, Homo sapien
caggagcatcgaaaacgggtctgagaaccagca

SEQ ID NO: 416521 - DNA, 33 bp, Homo sapien
atgggagctcagagacagacataaagtggtttc

SEQ ID NO: 416522 - DNA, 33 bp, Homo sapien
atgggagctcagagacggacataaagtggtttc

SEQ ID NO: 416523 - DNA, 33 bp, Homo sapien
atgtggtaggcagaatcatactcccttctccca

SEQ ID NO: 416524 - DNA, 33 bp, Homo sapien
atgtggtaggcagaattatactcccttctccca

SEQ ID NO: 416525 - DNA, 33 bp, Homo sapien
gcaagaaagtacgtgccaataagagcaagagag

SEQ ID NO: 416526 - DNA, 33 bp, Homo sapien
gcaagaaagtacgtgcgaataagagcaagagag

SEQ ID NO: 416527 - DNA, 33 bp, Homo sapien
aggaaggagaaaagagccgatgcatataatgcc

SEQ ID NO: 416528 - DNA, 33 bp, Homo sapien
aggaaggagaaaagaggcgatgcatataatgcc

SEQ ID NO: 416529 - DNA, 33 bp, Homo sapien
actgattgctcctccccgatgggaaagtcacga

SEQ ID NO: 416530 - DNA, 33 bp, Homo sapien
actgattgctcctccctgatgggaaagtcacga

SEQ ID NO: 416531 - DNA, 33 bp, Homo sapien
ccgaaatggaactcccaaagtttctgccttcgt

SEQ ID NO: 416532 - DNA, 33 bp, Homo sapien
ccgaaatggaactcccgaagtttctgccttcgt

SEQ ID NO: 416533 - DNA, 33 bp, Homo sapien
gctggaaaactctcacactaaaaacaggtcagt

SEQ ID NO: 416534 - DNA, 33 bp, Homo sapien
gctggaaaactctcacgctaaaaacaggtcagt

SEQ ID NO: 416535 - DNA, 33 bp, Homo sapien
catacttctccacaaccgttcacttctttagca

SEQ ID NO: 416536 - DNA, 33 bp, Homo sapien
catacttctccacaactgttcacttctttagca

SEQ ID NO: 416537 - DNA, 33 bp, Homo sapien
tcaattttagataggacgtattgctccactttc

SEQ ID NO: 416538 - DNA, 33 bp, Homo sapien
tcaattttagataggatgtattgctccactttc

SEQ ID NO: 416539 - DNA, 33 bp, Homo sapien
accgagaaaccacaagaaaagtggaaaccaaaa

SEQ ID NO: 416540 - DNA, 33 bp, Homo sapien
accgagaaaccacaaggaaagtggaaaccaaaa

SEQ ID NO: 416541 - DNA, 33 bp, Homo sapien
cgtcacacctccattaacactaatccagcttgt

SEQ ID NO: 416542 - DNA, 33 bp, Homo sapien
cgtcacacctccattatcactaatccagcttgt

SEQ ID NO: 416543 - DNA, 33 bp, Homo sapien
agttagtgtagatccacacttttggttatctct

SEQ ID NO: 416544 - DNA, 33 bp, Homo sapien
agttagtgtagatccatacttttggttatctct

SEQ ID NO: 416545 - DNA, 33 bp, Homo sapien
gtactactatccatgacctcatagggtgcctta

SEQ ID NO: 416546 - DNA, 33 bp, Homo sapien
gtactactatccatgatctcatagggtgcctta

SEQ ID NO: 416547 - DNA, 33 bp, Homo sapien
gaagttaatatcaacacgacctcataaaaacaa

SEQ ID NO: 416548 - DNA, 33 bp, Homo sapien
gaagttaatatcaacatgacctcataaaaacaa

SEQ ID NO: 416549 - DNA, 33 bp, Homo sapien
actcttctaaactctacgttttggtgctaagat

SEQ ID NO: 416550 - DNA, 33 bp, Homo sapien
actcttctaaactctatgttttggtgctaagat

SEQ ID NO: 416551 - DNA, 33 bp, Homo sapien
agggaggagtggtcctcagccgagtctctgcag

SEQ ID NO: 416552 - DNA, 33 bp, Homo sapien
agggaggagtggtcctgagccgagtctctgcag

SEQ ID NO: 416553 - DNA, 33 bp, Homo sapien
ccaggacttctcattcactttccattttgggga

SEQ ID NO: 416554 - DNA, 33 bp, Homo sapien
ccaggacttctcattcgctttccattttgggga

SEQ ID NO: 416555 - DNA, 33 bp, Homo sapien
aggaaaaaacctgcaacctggtggaggcgtggg

SEQ ID NO: 416556 - DNA, 33 bp, Homo sapien
aggaaaaaacctgcaagctggtggaggcgtggg

SEQ ID NO: 416557 - DNA, 33 bp, Homo sapien
ataataatacttccaaaagctgtcgcagcgctg

SEQ ID NO: 416558 - DNA, 33 bp, Homo sapien
ataataatacttccaacagctgtcgcagcgctg

SEQ ID NO: 416559 - DNA, 33 bp, Homo sapien
tcatcaatggcttgaagaggagccaacaaatgg

SEQ ID NO: 416560 - DNA, 33 bp, Homo sapien
tcatcaatggcttgaataggagccaacaaatgg

SEQ ID NO: 416561 - DNA, 33 bp, Homo sapien
acaacatagacagacccggtatttataatacgt

SEQ ID NO: 416562 - DNA, 33 bp, Homo sapien
acaacatagacagacctggtatttataatacgt

SEQ ID NO: 416563 - DNA, 33 bp, Homo sapien
gaccctagcatgatgacgatgaatgcacaggaa

SEQ ID NO: 416564 - DNA, 33 bp, Homo sapien
gaccctagcatgatgatgatgaatgcacaggaa

SEQ ID NO: 416565 - DNA, 33 bp, Homo sapien
cacagaacagggccaaacatggagctgacagct

SEQ ID NO: 416566 - DNA, 33 bp, Homo sapien
cacagaacagggccaagcatggagctgacagct

SEQ ID NO: 416567 - DNA, 33 bp, Homo sapien
aggggcctctgctctacgatttagctgataacc

SEQ ID NO: 416568 - DNA, 33 bp, Homo sapien
aggggcctctgctctatgatttagctgataacc

SEQ ID NO: 416569 - DNA, 33 bp, Homo sapien
gttctagaaacagagaatacgatgacattgatg

SEQ ID NO: 416570 - DNA, 33 bp, Homo sapien
gttctagaaacagagactacgatgacattgatg

SEQ ID NO: 416571 - DNA, 33 bp, Homo sapien
tgcaaaatgcacataacggtggtgattcatacc

SEQ ID NO: 416572 - DNA, 33 bp, Homo sapien
tgcaaaatgcacataatggtggtgattcatacc

SEQ ID NO: 416573 - DNA, 33 bp, Homo sapien
cttgtggtctccttgacggaaagactgtggtct

SEQ ID NO: 416574 - DNA, 33 bp, Homo sapien
cttgtggtctccttgatggaaagactgtggtct

SEQ ID NO: 416575 - DNA, 33 bp, Homo sapien
caactacccagcttgaaaaaagggaagtgtccc

SEQ ID NO: 416576 - DNA, 33 bp, Homo sapien
caactacccagcttgagaaaagggaagtgtccc

SEQ ID NO: 416577 - DNA, 33 bp, Homo sapien
tcagctttgattatgacgtttctaggtatggat

SEQ ID NO: 416578 - DNA, 33 bp, Homo sapien
tcagctttgattatgatgtttctaggtatggat

SEQ ID NO: 416579 - DNA, 33 bp, Homo sapien
gccatcctgtagcttcgctgctatatttttatt

SEQ ID NO: 416580 - DNA, 33 bp, Homo sapien
gccatcctgtagcttctctgctatatttttatt

SEQ ID NO: 416581 - DNA, 33 bp, Homo sapien
taaaggaagtcacatcaaaagaactaaagaaaa

SEQ ID NO: 416582 - DNA, 33 bp, Homo sapien
taaaggaagtcacatcgaaagaactaaagaaaa

SEQ ID NO: 416583 - DNA, 33 bp, Homo sapien
cctgggtttgagtcccagctttaccaggtacta

SEQ ID NO: 416584 - DNA, 33 bp, Homo sapien
cctgggtttgagtcccggctttaccaggtacta

SEQ ID NO: 416585 - DNA, 33 bp, Homo sapien
caaaacaaaacaaaaacctgggcttcaagttgg

SEQ ID NO: 416586 - DNA, 33 bp, Homo sapien
caaaacaaaacaaaaatctgggcttcaagttgg

SEQ ID NO: 416587 - DNA, 33 bp, Homo sapien
ccaagacgtcagctgaaaagattgtgtgcacct

SEQ ID NO: 416588 - DNA, 33 bp, Homo sapien
ccaagacgtcagctgagaagattgtgtgcacct

SEQ ID NO: 416589 - DNA, 33 bp, Homo sapien
tcccaggtggtcgtcaaatgcttctaagtgagg

SEQ ID NO: 416590 - DNA, 33 bp, Homo sapien
tcccaggtggtcgtcagatgcttctaagtgagg

SEQ ID NO: 416591 - DNA, 33 bp, Homo sapien
gaatatttgttggctcaagaaacttggaagacc

SEQ ID NO: 416592 - DNA, 33 bp, Homo sapien
gaatatttgttggctctagaaacttggaagacc

SEQ ID NO: 416593 - DNA, 33 bp, Homo sapien
gcatgtgcgtacattaacctacaaagaccctct

SEQ ID NO: 416594 - DNA, 33 bp, Homo sapien
gcatgtgcgtacattagcctacaaagaccctct

SEQ ID NO: 416595 - DNA, 33 bp, Homo sapien
gactaaagaaagctgccccaggacccctcacgg

SEQ ID NO: 416596 - DNA, 33 bp, Homo sapien
gactaaagaaagctgctccaggacccctcacgg

SEQ ID NO: 416597 - DNA, 33 bp, Homo sapien
ggttctgagacccacaactctgaatctgcccag

SEQ ID NO: 416598 - DNA, 33 bp, Homo sapien
ggttctgagacccacagctctgaatctgcccag

SEQ ID NO: 416599 - DNA, 33 bp, Homo sapien
acagtaagtgagggaacggggattcacactcag

SEQ ID NO: 416600 - DNA, 33 bp, Homo sapien
acagtaagtgagggaatggggattcacactcag

SEQ ID NO: 416601 - DNA, 33 bp, Homo sapien
cctccgctcagtaatcactgtaatagcaaatat

SEQ ID NO: 416602 - DNA, 33 bp, Homo sapien
cctccgctcagtaatctctgtaatagcaaatat

SEQ ID NO: 416603 - DNA, 33 bp, Homo sapien
ccttgatctcgggttggatgttccccgtgtccc

SEQ ID NO: 416604 - DNA, 33 bp, Homo sapien
ccttgatctcgggttgtatgttccccgtgtccc

SEQ ID NO: 416605 - DNA, 33 bp, Homo sapien
gttctagaaaagtgacggcccctggttagggga

SEQ ID NO: 416606 - DNA, 33 bp, Homo sapien
gttctagaaaagtgactgcccctggttagggga

SEQ ID NO: 416607 - DNA, 33 bp, Homo sapien
gtgattgagatggacacagaggcactgccctgg

SEQ ID NO: 416608 - DNA, 33 bp, Homo sapien
gtgattgagatggacagagaggcactgccctgg

SEQ ID NO: 416609 - DNA, 33 bp, Homo sapien
gaggagggaagtgatgaaggaagcacacctgct

SEQ ID NO: 416610 - DNA, 33 bp, Homo sapien
gaggagggaagtgatggaggaagcacacctgct

SEQ ID NO: 416611 - DNA, 33 bp, Homo sapien
gggggccaaagagggaagtgtattatgaagggt

SEQ ID NO: 416612 - DNA, 33 bp, Homo sapien
gggggccaaagagggatgtgtattatgaagggt

SEQ ID NO: 416613 - DNA, 33 bp, Homo sapien
atttttttatagagtgaaacatacacgtatcat

SEQ ID NO: 416614 - DNA, 33 bp, Homo sapien
atttttttatagagtggaacatacacgtatcat

SEQ ID NO: 416615 - DNA, 33 bp, Homo sapien
aatgtcagggctatataagagataagagaagtg

SEQ ID NO: 416616 - DNA, 33 bp, Homo sapien
aatgtcagggctatatgagagataagagaagtg

SEQ ID NO: 416617 - DNA, 33 bp, Homo sapien
ggcatcagctacttaactgcacaggaaaaatct

SEQ ID NO: 416618 - DNA, 33 bp, Homo sapien
ggcatcagctacttaattgcacaggaaaaatct

SEQ ID NO: 416619 - DNA, 33 bp, Homo sapien
acagtggtgggtgtgaaatttcccatagtgttg

SEQ ID NO: 416620 - DNA, 33 bp, Homo sapien
acagtggtgggtgtgagatttcccatagtgttg

SEQ ID NO: 416621 - DNA, 33 bp, Homo sapien
tcaagtagctgaggaactggcacacacagtaag

SEQ ID NO: 416622 - DNA, 33 bp, Homo sapien
tcaagtagctgaggaattggcacacacagtaag

SEQ ID NO: 416623 - DNA, 33 bp, Homo sapien
tcctctgtcgtcttaacgttttccttgaagatc

SEQ ID NO: 416624 - DNA, 33 bp, Homo sapien
tcctctgtcgtcttaatgttttccttgaagatc

SEQ ID NO: 416625 - DNA, 33 bp, Homo sapien
agctcagattaaaagacagaacaggaactcttg

SEQ ID NO: 416626 - DNA, 33 bp, Homo sapien
agctcagattaaaagagagaacaggaactcttg

SEQ ID NO: 416627 - DNA, 33 bp, Homo sapien
gcacccaaatcctatcaaatatactacccctgg

SEQ ID NO: 416628 - DNA, 33 bp, Homo sapien
gcacccaaatcctatcgaatatactacccctgg

SEQ ID NO: 416629 - DNA, 33 bp, Homo sapien
gttctgtctactgcccactaagatacaaggacc

SEQ ID NO: 416630 - DNA, 33 bp, Homo sapien
gttctgtctactgcccgctaagatacaaggacc

SEQ ID NO: 416631 - DNA, 33 bp, Homo sapien
cagcaagacttctgcaacaggcgtttttgtctc

SEQ ID NO: 416632 - DNA, 33 bp, Homo sapien
cagcaagacttctgcagcaggcgtttttgtctc

SEQ ID NO: 416633 - DNA, 33 bp, Homo sapien
agctcctgttgcctgacccagtttggtgtttaa

SEQ ID NO: 416634 - DNA, 33 bp, Homo sapien
agctcctgttgcctgagccagtttggtgtttaa

SEQ ID NO: 416635 - DNA, 33 bp, Homo sapien
ttccttcgttgcagaactgaatgcacttcctct

SEQ ID NO: 416636 - DNA, 33 bp, Homo sapien
ttccttcgttgcagaattgaatgcacttcctct

SEQ ID NO: 416637 - DNA, 33 bp, Homo sapien
gaaaaaaatactgaagaagagtagttcagggtg

SEQ ID NO: 416638 - DNA, 33 bp, Homo sapien
gaaaaaaatactgaaggagagtagttcagggtg

SEQ ID NO: 416639 - DNA, 33 bp, Homo sapien
ttattgtatctattaactgggctcataatgttt

SEQ ID NO: 416640 - DNA, 33 bp, Homo sapien
ttattgtatctattaattgggctcataatgttt

SEQ ID NO: 416641 - DNA, 33 bp, Homo sapien
gatagaaaagaaattgaataagatcagcaagcg

SEQ ID NO: 416642 - DNA, 33 bp, Homo sapien
gatagaaaagaaattgcataagatcagcaagcg

SEQ ID NO: 416643 - DNA, 33 bp, Homo sapien
aacctggatatctgtcaaatgcctgctcctctc

SEQ ID NO: 416644 - DNA, 33 bp, Homo sapien
aacctggatatctgtcgaatgcctgctcctctc

SEQ ID NO: 416645 - DNA, 33 bp, Homo sapien
gctgaacaggtgatgacgagtgggagactcagg

SEQ ID NO: 416646 - DNA, 33 bp, Homo sapien
gctgaacaggtgatgatgagtgggagactcagg

SEQ ID NO: 416647 - DNA, 33 bp, Homo sapien
cctctgaaagtgctcacctggctatgaagtact

SEQ ID NO: 416648 - DNA, 33 bp, Homo sapien
cctctgaaagtgctcatctggctatgaagtact

SEQ ID NO: 416649 - DNA, 33 bp, Homo sapien
cacacagaggagtctccaacaacaggtgcaaat

SEQ ID NO: 416650 - DNA, 33 bp, Homo sapien
cacacagaggagtctcgaacaacaggtgcaaat

SEQ ID NO: 416651 - DNA, 33 bp, Homo sapien
agtgtcagtatgaggacgaatacaggactttca

SEQ ID NO: 416652 - DNA, 33 bp, Homo sapien
agtgtcagtatgaggaggaatacaggactttca

SEQ ID NO: 416653 - DNA, 33 bp, Homo sapien
gcccacagcaaaacagcctggaaaatacaagcc

SEQ ID NO: 416654 - DNA, 33 bp, Homo sapien
gcccacagcaaaacagtctggaaaatacaagcc

SEQ ID NO: 416655 - DNA, 33 bp, Homo sapien
agggagcttctctcctcagctttctgcaatctc

SEQ ID NO: 416656 - DNA, 33 bp, Homo sapien
agggagcttctctcctgagctttctgcaatctc

SEQ ID NO: 416657 - DNA, 33 bp, Homo sapien
aatttctttgtgaacgaattgtgagggaggtat

SEQ ID NO: 416658 - DNA, 33 bp, Homo sapien
aatttctttgtgaacgtattgtgagggaggtat

SEQ ID NO: 416659 - DNA, 33 bp, Homo sapien
accagtgcaaagacaacggtgatttgagagtgg

SEQ ID NO: 416660 - DNA, 33 bp, Homo sapien
accagtgcaaagacaatggtgatttgagagtgg

SEQ ID NO: 416661 - DNA, 33 bp, Homo sapien
gggagtcattgttttcaaagtccttccacccat

SEQ ID NO: 416662 - DNA, 33 bp, Homo sapien
gggagtcattgttttcgaagtccttccacccat

SEQ ID NO: 416663 - DNA, 33 bp, Homo sapien
agatggcacagcggcccattttggggagagaat

SEQ ID NO: 416664 - DNA, 33 bp, Homo sapien
agatggcacagcggcctattttggggagagaat

SEQ ID NO: 416665 - DNA, 33 bp, Homo sapien
cagaaaagctgttatacgcatggttatggttta

SEQ ID NO: 416666 - DNA, 33 bp, Homo sapien
cagaaaagctgttatatgcatggttatggttta

SEQ ID NO: 416667 - DNA, 33 bp, Homo sapien
ggacaaatctaaaaacagccaaggagcaaatcc

SEQ ID NO: 416668 - DNA, 33 bp, Homo sapien
ggacaaatctaaaaacggccaaggagcaaatcc

SEQ ID NO: 416669 - DNA, 33 bp, Homo sapien
atggtcacggtgaacacgtggtttttctgattg

SEQ ID NO: 416670 - DNA, 33 bp, Homo sapien
atggtcacggtgaacatgtggtttttctgattg

SEQ ID NO: 416671 - DNA, 33 bp, Homo sapien
actttagacttcattgaaatgtcttgaaaaacc

SEQ ID NO: 416672 - DNA, 33 bp, Homo sapien
actttagacttcattggaatgtcttgaaaaacc

SEQ ID NO: 416673 - DNA, 33 bp, Homo sapien
attggaagggaaagtaaaagcatgaaataaaca

SEQ ID NO: 416674 - DNA, 33 bp, Homo sapien
attggaagggaaagtacaagcatgaaataaaca

SEQ ID NO: 416675 - DNA, 33 bp, Homo sapien
ctagcatattttacctaaaaacacaatcaaata

SEQ ID NO: 416676 - DNA, 33 bp, Homo sapien
ctagcatattttacctgaaaacacaatcaaata

SEQ ID NO: 416677 - DNA, 33 bp, Homo sapien
ggccatcccagcagtgcactaggaccagtctcc

SEQ ID NO: 416678 - DNA, 33 bp, Homo sapien
ggccatcccagcagtgtactaggaccagtctcc

SEQ ID NO: 416679 - DNA, 33 bp, Homo sapien
cctgcaaagccctttgcaggtgaagatatgatg

SEQ ID NO: 416680 - DNA, 33 bp, Homo sapien
cctgcaaagccctttgtaggtgaagatatgatg

SEQ ID NO: 416681 - DNA, 33 bp, Homo sapien
tcctctcgggtcagcaacagagtttggtacagg

SEQ ID NO: 416682 - DNA, 33 bp, Homo sapien
tcctctcgggtcagcaccagagtttggtacagg

SEQ ID NO: 416683 - DNA, 33 bp, Homo sapien
tcctcctttccttccactcatgcctttgttctc

SEQ ID NO: 416684 - DNA, 33 bp, Homo sapien
tcctcctttccttccattcatgcctttgttctc

SEQ ID NO: 416685 - DNA, 33 bp, Homo sapien
gcaactccaagaaaacaatctgaacctaagaca

SEQ ID NO: 416686 - DNA, 33 bp, Homo sapien
gcaactccaagaaaaccatctgaacctaagaca

SEQ ID NO: 416687 - DNA, 33 bp, Homo sapien
acgcagctgcacctgggacagcagacacagctg

SEQ ID NO: 416688 - DNA, 33 bp, Homo sapien
acgcagctgcacctggtacagcagacacagctg

SEQ ID NO: 416689 - DNA, 33 bp, Homo sapien
caggctctgggctccacgcttcaccgagtccct

SEQ ID NO: 416690 - DNA, 33 bp, Homo sapien
caggctctgggctccatgcttcaccgagtccct

SEQ ID NO: 416691 - DNA, 33 bp, Homo sapien
tatatgtgacatgaagacgctacattatgattc

SEQ ID NO: 416692 - DNA, 33 bp, Homo sapien
tatatgtgacatgaaggcgctacattatgattc

SEQ ID NO: 416693 - DNA, 33 bp, Homo sapien
caggctcagtgtgatccgataagccgcgttcaa

SEQ ID NO: 416694 - DNA, 33 bp, Homo sapien
caggctcagtgtgatctgataagccgcgttcaa

SEQ ID NO: 416695 - DNA, 33 bp, Homo sapien
ggtcttgaatggaccaatgatgagagagtgttc

SEQ ID NO: 416696 - DNA, 33 bp, Homo sapien
ggtcttgaatggaccagtgatgagagagtgttc

SEQ ID NO: 416697 - DNA, 33 bp, Homo sapien
aatagttctgttttgacgaagcttagtgtaaag

SEQ ID NO: 416698 - DNA, 33 bp, Homo sapien
aatagttctgttttgatgaagcttagtgtaaag

SEQ ID NO: 416699 - DNA, 33 bp, Homo sapien
ttccagctgggacctacatttgctgaggacgga

SEQ ID NO: 416700 - DNA, 33 bp, Homo sapien
ttccagctgggacctagatttgctgaggacgga

SEQ ID NO: 416701 - DNA, 33 bp, Homo sapien
cagaatgagcagagctaacagtagccacaacat

SEQ ID NO: 416702 - DNA, 33 bp, Homo sapien
cagaatgagcagagctgacagtagccacaacat

SEQ ID NO: 416703 - DNA, 33 bp, Homo sapien
tgtctcaggtctacacaagacagggagtgggag

SEQ ID NO: 416704 - DNA, 33 bp, Homo sapien
tgtctcaggtctacacgagacagggagtgggag

SEQ ID NO: 416705 - DNA, 33 bp, Homo sapien
taccttccatgagaacaagcacctaagttgcac

SEQ ID NO: 416706 - DNA, 33 bp, Homo sapien
taccttccatgagaacgagcacctaagttgcac

SEQ ID NO: 416707 - DNA, 33 bp, Homo sapien
agaagagatcttaaacaatatagggtctggata

SEQ ID NO: 416708 - DNA, 33 bp, Homo sapien
agaagagatcttaaacgatatagggtctggata

SEQ ID NO: 416709 - DNA, 33 bp, Homo sapien
ctggtgtagggaatcacaggactcaaatgcaac

SEQ ID NO: 416710 - DNA, 33 bp, Homo sapien
ctggtgtagggaatcataggactcaaatgcaac

SEQ ID NO: 416711 - DNA, 33 bp, Homo sapien
ggaaaggagcattttaagcccaggaaacagtgt

SEQ ID NO: 416712 - DNA, 33 bp, Homo sapien
ggaaaggagcattttaggcccaggaaacagtgt

SEQ ID NO: 416713 - DNA, 33 bp, Homo sapien
agtgggttcaagttcacgtattctctctgggct

SEQ ID NO: 416714 - DNA, 33 bp, Homo sapien
agtgggttcaagttcatgtattctctctgggct

SEQ ID NO: 416715 - DNA, 33 bp, Homo sapien
ccaagaaggaccacaaactcccggagtcctagc

SEQ ID NO: 416716 - DNA, 33 bp, Homo sapien
ccaagaaggaccacaagctcccggagtcctagc

SEQ ID NO: 416717 - DNA, 33 bp, Homo sapien
atcatgcatccttgtagctcccggaaagcaccc

SEQ ID NO: 416718 - DNA, 33 bp, Homo sapien
atcatgcatccttgtatctcccggaaagcaccc

SEQ ID NO: 416719 - DNA, 33 bp, Homo sapien
ggggatgatgacctctaactcttcacctgtcaa

SEQ ID NO: 416720 - DNA, 33 bp, Homo sapien
ggggatgatgacctcttactcttcacctgtcaa

SEQ ID NO: 416721 - DNA, 33 bp, Homo sapien
tgcactacacatgaagaagaaatagtgctgttt

SEQ ID NO: 416722 - DNA, 33 bp, Homo sapien
tgcactacacatgaagcagaaatagtgctgttt

SEQ ID NO: 416723 - DNA, 33 bp, Homo sapien
ttgaccatgtttgtaacggctttttattcatct

SEQ ID NO: 416724 - DNA, 33 bp, Homo sapien
ttgaccatgtttgtaatggctttttattcatct

SEQ ID NO: 416725 - DNA, 33 bp, Homo sapien
atggaaaaagttagacaacacactgatcaaaag

SEQ ID NO: 416726 - DNA, 33 bp, Homo sapien
atggaaaaagttagacgacacactgatcaaaag

SEQ ID NO: 416727 - DNA, 33 bp, Homo sapien
tgggcttccctgtccccatatgtgaaagcaggg

SEQ ID NO: 416728 - DNA, 33 bp, Homo sapien
tgggcttccctgtcccgatatgtgaaagcaggg

SEQ ID NO: 416729 - DNA, 33 bp, Homo sapien
gcagggattagacaggccatctgagattctccc

SEQ ID NO: 416730 - DNA, 33 bp, Homo sapien
gcagggattagacaggtcatctgagattctccc

SEQ ID NO: 416731 - DNA, 33 bp, Homo sapien
gtgaagagggaatcaaatgtgcaagggttttac

SEQ ID NO: 416732 - DNA, 33 bp, Homo sapien
gtgaagagggaatcaagtgtgcaagggttttac

SEQ ID NO: 416733 - DNA, 33 bp, Homo sapien
gtggtagctcttcacacggaccaaacgggaaaa

SEQ ID NO: 416734 - DNA, 33 bp, Homo sapien
gtggtagctcttcacatggaccaaacgggaaaa

SEQ ID NO: 416735 - DNA, 33 bp, Homo sapien
gtgatatctaccattcaaaaggccaggactgag

SEQ ID NO: 416736 - DNA, 33 bp, Homo sapien
gtgatatctaccattcgaaaggccaggactgag

SEQ ID NO: 416737 - DNA, 33 bp, Homo sapien
tatgatgctctgtccccgggaagcctacagcct

SEQ ID NO: 416738 - DNA, 33 bp, Homo sapien
tatgatgctctgtcccggggaagcctacagcct

SEQ ID NO: 416739 - DNA, 33 bp, Homo sapien
gtgacttctgagacaacgccaaggcccatctgc

SEQ ID NO: 416740 - DNA, 33 bp, Homo sapien
gtgacttctgagacaatgccaaggcccatctgc

SEQ ID NO: 416741 - DNA, 33 bp, Homo sapien
ctcaaacccgcttcaacagagctcattaatcag

SEQ ID NO: 416742 - DNA, 33 bp, Homo sapien
ctcaaacccgcttcaagagagctcattaatcag

SEQ ID NO: 416743 - DNA, 33 bp, Homo sapien
gaaattcggacagtgacggattagagtaggcgc

SEQ ID NO: 416744 - DNA, 33 bp, Homo sapien
gaaattcggacagtgatggattagagtaggcgc

SEQ ID NO: 416745 - DNA, 33 bp, Homo sapien
ttggaagctgcagtccactccgtctccttccag

SEQ ID NO: 416746 - DNA, 33 bp, Homo sapien
ttggaagctgcagtccgctccgtctccttccag

SEQ ID NO: 416747 - DNA, 33 bp, Homo sapien
acatggtttcatttcacgctcatggcccgctgc

SEQ ID NO: 416748 - DNA, 33 bp, Homo sapien
acatggtttcatttcatgctcatggcccgctgc

SEQ ID NO: 416749 - DNA, 33 bp, Homo sapien
gccagctaatttataacgtcatatgggctagac

SEQ ID NO: 416750 - DNA, 33 bp, Homo sapien
gccagctaatttataatgtcatatgggctagac

SEQ ID NO: 416751 - DNA, 33 bp, Homo sapien
gccgaggacaggaacacagatggacagggcccc

SEQ ID NO: 416752 - DNA, 33 bp, Homo sapien
gccgaggacaggaacagagatggacagggcccc

SEQ ID NO: 416753 - DNA, 33 bp, Homo sapien
aaggctggcatgaactcagaaaaaggcaagtgg

SEQ ID NO: 416754 - DNA, 33 bp, Homo sapien
aaggctggcatgaacttagaaaaaggcaagtgg

SEQ ID NO: 416755 - DNA, 33 bp, Homo sapien
ggcaggatgatttaatcagctttgtctttaagc

SEQ ID NO: 416756 - DNA, 33 bp, Homo sapien
ggcaggatgatttaattagctttgtctttaagc

SEQ ID NO: 416757 - DNA, 33 bp, Homo sapien
gtccacacaatttcacactctctaccctatggg

SEQ ID NO: 416758 - DNA, 33 bp, Homo sapien
gtccacacaatttcacgctctctaccctatggg

SEQ ID NO: 416759 - DNA, 33 bp, Homo sapien
atgtatggtggttttacgttcttaagcccttat

SEQ ID NO: 416760 - DNA, 33 bp, Homo sapien
atgtatggtggttttatgttcttaagcccttat

SEQ ID NO: 416761 - DNA, 33 bp, Homo sapien
ttcaaaagatcctgcacgccagtgatggcccga

SEQ ID NO: 416762 - DNA, 33 bp, Homo sapien
ttcaaaagatcctgcatgccagtgatggcccga

SEQ ID NO: 416763 - DNA, 33 bp, Homo sapien
atgtagtttaaccacaatcagagccttaagcta

SEQ ID NO: 416764 - DNA, 33 bp, Homo sapien
atgtagtttaaccacagtcagagccttaagcta

SEQ ID NO: 416765 - DNA, 33 bp, Homo sapien
ttcagttaccgggagcccggcccattttggatc

SEQ ID NO: 416766 - DNA, 33 bp, Homo sapien
ttcagttaccgggagctcggcccattttggatc

SEQ ID NO: 416767 - DNA, 33 bp, Homo sapien
ccgaagctcctggtcacgtctgagttcctgacc

SEQ ID NO: 416768 - DNA, 33 bp, Homo sapien
ccgaagctcctggtcatgtctgagttcctgacc

SEQ ID NO: 416769 - DNA, 33 bp, Homo sapien
aatgttttgggtgagacgggtagctacagggaa

SEQ ID NO: 416770 - DNA, 33 bp, Homo sapien
aatgttttgggtgagaggggtagctacagggaa

SEQ ID NO: 416771 - DNA, 33 bp, Homo sapien
gggtagctacagggaaaacacatccggaggtca

SEQ ID NO: 416772 - DNA, 33 bp, Homo sapien
gggtagctacagggaatacacatccggaggtca

SEQ ID NO: 416773 - DNA, 33 bp, Homo sapien
ccccgcccattgtaggccagttgtgagcatgaa

SEQ ID NO: 416774 - DNA, 33 bp, Homo sapien
ccccgcccattgtagggcagttgtgagcatgaa

SEQ ID NO: 416775 - DNA, 33 bp, Homo sapien
ccacgatggagtagtaagagatggcgtactgac

SEQ ID NO: 416776 - DNA, 33 bp, Homo sapien
ccacgatggagtagtaggagatggcgtactgac

SEQ ID NO: 416777 - DNA, 33 bp, Homo sapien
attttctcccctttcccactccactctgtcatc

SEQ ID NO: 416778 - DNA, 33 bp, Homo sapien
attttctcccctttcctactccactctgtcatc

SEQ ID NO: 416779 - DNA, 33 bp, Homo sapien
gctggaccttgtcttccctgtcatcgagatggt

SEQ ID NO: 416780 - DNA, 33 bp, Homo sapien
gctggaccttgtcttctctgtcatcgagatggt

SEQ ID NO: 416781 - DNA, 33 bp, Homo sapien
taaaaagtagctagccaaggagtgaagcccgag

SEQ ID NO: 416782 - DNA, 33 bp, Homo sapien
taaaaagtagctagccgaggagtgaagcccgag

SEQ ID NO: 416783 - DNA, 33 bp, Homo sapien
cctgaatgcaatccatcaaacaaatagggttta

SEQ ID NO: 416784 - DNA, 33 bp, Homo sapien
cctgaatgcaatccattaaacaaatagggttta

SEQ ID NO: 416785 - DNA, 33 bp, Homo sapien
ctctggtcctgccttacgccatactcttcactt

SEQ ID NO: 416786 - DNA, 33 bp, Homo sapien
ctctggtcctgccttatgccatactcttcactt

SEQ ID NO: 416787 - DNA, 33 bp, Homo sapien
aacatcttttggagagaatggttgtggctaggg

SEQ ID NO: 416788 - DNA, 33 bp, Homo sapien
aacatcttttggagaggatggttgtggctaggg

SEQ ID NO: 416789 - DNA, 33 bp, Homo sapien
aacacaacctacaacaacttacgttattcagct

SEQ ID NO: 416790 - DNA, 33 bp, Homo sapien
aacacaacctacaacagcttacgttattcagct

SEQ ID NO: 416791 - DNA, 33 bp, Homo sapien
caagaagttgggccaaaaagttctgaatcatct

SEQ ID NO: 416792 - DNA, 33 bp, Homo sapien
caagaagttgggccaagaagttctgaatcatct

SEQ ID NO: 416793 - DNA, 33 bp, Homo sapien
tgtttgttttttattaaatcttgcacacacaca

SEQ ID NO: 416794 - DNA, 33 bp, Homo sapien
tgtttgttttttattacatcttgcacacacaca

SEQ ID NO: 416795 - DNA, 33 bp, Homo sapien
ggcactatggttgaacacctatcaaggagcacg

SEQ ID NO: 416796 - DNA, 33 bp, Homo sapien
ggcactatggttgaacgcctatcaaggagcacg

SEQ ID NO: 416797 - DNA, 33 bp, Homo sapien
tgcagacaaaactccagtccctggccgggccca

SEQ ID NO: 416798 - DNA, 33 bp, Homo sapien
tgcagacaaaactccattccctggccgggccca

SEQ ID NO: 416799 - DNA, 33 bp, Homo sapien
tatttacagttcaatcaaccacaaggcctttgg

SEQ ID NO: 416800 - DNA, 33 bp, Homo sapien
tatttacagttcaatcgaccacaaggcctttgg

SEQ ID NO: 416801 - DNA, 33 bp, Homo sapien
aaggggtataaatccacaagccttcagaatcta

SEQ ID NO: 416802 - DNA, 33 bp, Homo sapien
aaggggtataaatccataagccttcagaatcta

SEQ ID NO: 416803 - DNA, 33 bp, Homo sapien
gttgccaaatgtgttacgttgtgtctcagagag

SEQ ID NO: 416804 - DNA, 33 bp, Homo sapien
gttgccaaatgtgttatgttgtgtctcagagag

SEQ ID NO: 416805 - DNA, 33 bp, Homo sapien
gaccttttgaacctcgacctggggtaaggtgtt

SEQ ID NO: 416806 - DNA, 33 bp, Homo sapien
gaccttttgaacctcggcctggggtaaggtgtt

SEQ ID NO: 416807 - DNA, 33 bp, Homo sapien
cctcctgatgatctccaagaagtgggtgttcgc

SEQ ID NO: 416808 - DNA, 33 bp, Homo sapien
cctcctgatgatctccgagaagtgggtgttcgc

SEQ ID NO: 416809 - DNA, 33 bp, Homo sapien
gctgctgcagtctgaacggtgacggtggcccct

SEQ ID NO: 416810 - DNA, 33 bp, Homo sapien
gctgctgcagtctgaatggtgacggtggcccct

SEQ ID NO: 416811 - DNA, 33 bp, Homo sapien
ctcactttctcactgcaatttttgtcagtaatt

SEQ ID NO: 416812 - DNA, 33 bp, Homo sapien
ctcactttctcactgcgatttttgtcagtaatt

SEQ ID NO: 416813 - DNA, 33 bp, Homo sapien
gactgaaccctagaaacaagtgctaacatcacc

SEQ ID NO: 416814 - DNA, 33 bp, Homo sapien
gactgaaccctagaaataagtgctaacatcacc

SEQ ID NO: 416815 - DNA, 33 bp, Homo sapien
agttcaatcacttaaccaagttcaaaagcacat

SEQ ID NO: 416816 - DNA, 33 bp, Homo sapien
agttcaatcacttaactaagttcaaaagcacat

SEQ ID NO: 416817 - DNA, 33 bp, Homo sapien
tctgtgaagatgtggtcaagtcacaagtgatac

SEQ ID NO: 416818 - DNA, 33 bp, Homo sapien
tctgtgaagatgtggttaagtcacaagtgatac

SEQ ID NO: 416819 - DNA, 33 bp, Homo sapien
ggtgaagtagttgacacggttgatgcacagtaa

SEQ ID NO: 416820 - DNA, 33 bp, Homo sapien
ggtgaagtagttgacatggttgatgcacagtaa

SEQ ID NO: 416821 - DNA, 33 bp, Homo sapien
cactagcgaaggtgtcacactgatggctgaggc

SEQ ID NO: 416822 - DNA, 33 bp, Homo sapien
cactagcgaaggtgtcgcactgatggctgaggc

SEQ ID NO: 416823 - DNA, 33 bp, Homo sapien
tggcacaatgcacacacatttgtggaacagctg

SEQ ID NO: 416824 - DNA, 33 bp, Homo sapien
tggcacaatgcacacagatttgtggaacagctg

SEQ ID NO: 416825 - DNA, 33 bp, Homo sapien
ttgcaacacaacaaagaagaggacaagtgttag

SEQ ID NO: 416826 - DNA, 33 bp, Homo sapien
ttgcaacacaacaaaggagaggacaagtgttag

SEQ ID NO: 416827 - DNA, 33 bp, Homo sapien
caacttgctataaccacagtggaattagtttgc

SEQ ID NO: 416828 - DNA, 33 bp, Homo sapien
caacttgctataaccagagtggaattagtttgc

SEQ ID NO: 416829 - DNA, 33 bp, Homo sapien
gtgcctgctttgctagaatacttggtaaactaa

SEQ ID NO: 416830 - DNA, 33 bp, Homo sapien
gtgcctgctttgctaggatacttggtaaactaa

SEQ ID NO: 416831 - DNA, 33 bp, Homo sapien
ggggcggacctttggacatataaaggaagcagt

SEQ ID NO: 416832 - DNA, 33 bp, Homo sapien
ggggcggacctttggatatataaaggaagcagt

SEQ ID NO: 416833 - DNA, 33 bp, Homo sapien
cagttcctaaaacttgaaattctatccagatga

SEQ ID NO: 416834 - DNA, 33 bp, Homo sapien
cagttcctaaaacttggaattctatccagatga

SEQ ID NO: 416835 - DNA, 33 bp, Homo sapien
taaagaaataaattttaaaaatcaggccaggtt

SEQ ID NO: 416836 - DNA, 33 bp, Homo sapien
taaagaaataaatttttaaaatcaggccaggtt

SEQ ID NO: 416837 - DNA, 33 bp, Homo sapien
cttgcaatcatgtctccatcctgttgcttcact

SEQ ID NO: 416838 - DNA, 33 bp, Homo sapien
cttgcaatcatgtctctatcctgttgcttcact

SEQ ID NO: 416839 - DNA, 33 bp, Homo sapien
cttattctgttcttaccgagtgcaaaataattc

SEQ ID NO: 416840 - DNA, 33 bp, Homo sapien
cttattctgttcttactgagtgcaaaataattc

SEQ ID NO: 416841 - DNA, 33 bp, Homo sapien
aatcttcaaaaaatttaaaaattcgctaggtgt

SEQ ID NO: 416842 - DNA, 33 bp, Homo sapien
aatcttcaaaaaattttaaaattcgctaggtgt

SEQ ID NO: 416843 - DNA, 33 bp, Homo sapien
tgttttctgtgttaaacaagaagaaggacagaa

SEQ ID NO: 416844 - DNA, 33 bp, Homo sapien
tgttttctgtgttaaagaagaagaaggacagaa

SEQ ID NO: 416845 - DNA, 33 bp, Homo sapien
aacggtttcactcgaaatattatcagttatacg

SEQ ID NO: 416846 - DNA, 33 bp, Homo sapien
aacggtttcactcgaagtattatcagttatacg

SEQ ID NO: 416847 - DNA, 33 bp, Homo sapien
gataaatctggaggcaatgaaacctaaatgcat

SEQ ID NO: 416848 - DNA, 33 bp, Homo sapien
gataaatctggaggcagtgaaacctaaatgcat

SEQ ID NO: 416849 - DNA, 33 bp, Homo sapien
taagccaaagacaactcaaagcctgaaagccac

SEQ ID NO: 416850 - DNA, 33 bp, Homo sapien
taagccaaagacaactgaaagcctgaaagccac

SEQ ID NO: 416851 - DNA, 33 bp, Homo sapien
gaacacctgacacactgaaattgagaggatttt

SEQ ID NO: 416852 - DNA, 33 bp, Homo sapien
gaacacctgacacacttaaattgagaggatttt

SEQ ID NO: 416853 - DNA, 33 bp, Homo sapien
agtgagataagggaaactgctgattttgagctg

SEQ ID NO: 416854 - DNA, 33 bp, Homo sapien
agtgagataagggaaattgctgattttgagctg

SEQ ID NO: 416855 - DNA, 33 bp, Homo sapien
gtgacagagcaaataacttaggtcaaacttgtc

SEQ ID NO: 416856 - DNA, 33 bp, Homo sapien
gtgacagagcaaataatttaggtcaaacttgtc

SEQ ID NO: 416857 - DNA, 33 bp, Homo sapien
tttagatcgtaagcacagtaaagtgtaattata

SEQ ID NO: 416858 - DNA, 33 bp, Homo sapien
tttagatcgtaagcacggtaaagtgtaattata

SEQ ID NO: 416859 - DNA, 33 bp, Homo sapien
gtgctgaagtagtccacgtcatatatcccagtg

SEQ ID NO: 416860 - DNA, 33 bp, Homo sapien
gtgctgaagtagtccatgtcatatatcccagtg

SEQ ID NO: 416861 - DNA, 33 bp, Homo sapien
agcattatctatggcaacctaagatttttattt

SEQ ID NO: 416862 - DNA, 33 bp, Homo sapien
agcattatctatggcatcctaagatttttattt

SEQ ID NO: 416863 - DNA, 33 bp, Homo sapien
gactgtagcagtttgcccttttggatgtgtaat

SEQ ID NO: 416864 - DNA, 33 bp, Homo sapien
gactgtagcagtttgctcttttggatgtgtaat

SEQ ID NO: 416865 - DNA, 33 bp, Homo sapien
tggggtatagtgtactaaacactgaagcctaat

SEQ ID NO: 416866 - DNA, 33 bp, Homo sapien
tggggtatagtgtacttaacactgaagcctaat

SEQ ID NO: 416867 - DNA, 33 bp, Homo sapien
agataatggttgtaaaatgcttggcagaagtct

SEQ ID NO: 416868 - DNA, 33 bp, Homo sapien
agataatggttgtaaactgcttggcagaagtct

SEQ ID NO: 416869 - DNA, 33 bp, Homo sapien
aagccagagaccttaactagtattttcagtctc

SEQ ID NO: 416870 - DNA, 33 bp, Homo sapien
aagccagagaccttaagtagtattttcagtctc

SEQ ID NO: 416871 - DNA, 33 bp, Homo sapien
tgcaattcttccctcacgtcttcctctctgctt

SEQ ID NO: 416872 - DNA, 33 bp, Homo sapien
tgcaattcttccctcatgtcttcctctctgctt

SEQ ID NO: 416873 - DNA, 33 bp, Homo sapien
actgaaaggtagtcaactatttttagggaaaag

SEQ ID NO: 416874 - DNA, 33 bp, Homo sapien
actgaaaggtagtcaattatttttagggaaaag

SEQ ID NO: 416875 - DNA, 33 bp, Homo sapien
ctccctaggactctcgacaaataaccaggaaat

SEQ ID NO: 416876 - DNA, 33 bp, Homo sapien
ctccctaggactctcgtcaaataaccaggaaat

SEQ ID NO: 416877 - DNA, 33 bp, Homo sapien
cacagagtcaagtctcaagtctttagcaataat

SEQ ID NO: 416878 - DNA, 33 bp, Homo sapien
cacagagtcaagtctccagtctttagcaataat

SEQ ID NO: 416879 - DNA, 33 bp, Homo sapien
gacttcatctccttaacgggcagagtgtgtgct

SEQ ID NO: 416880 - DNA, 33 bp, Homo sapien
gacttcatctccttaatgggcagagtgtgtgct

SEQ ID NO: 416881 - DNA, 33 bp, Homo sapien
gacagaagctttgtgcaagtgtgtgatatatta

SEQ ID NO: 416882 - DNA, 33 bp, Homo sapien
gacagaagctttgtgcgagtgtgtgatatatta

SEQ ID NO: 416883 - DNA, 33 bp, Homo sapien
ttctggtgattcataacgtccctggctccttag

SEQ ID NO: 416884 - DNA, 33 bp, Homo sapien
ttctggtgattcataatgtccctggctccttag

SEQ ID NO: 416885 - DNA, 33 bp, Homo sapien
ccatactgcattcacaatctgcaaaagttagat

SEQ ID NO: 416886 - DNA, 33 bp, Homo sapien
ccatactgcattcacagtctgcaaaagttagat

SEQ ID NO: 416887 - DNA, 33 bp, Homo sapien
ggtgtctttctttaccaaaatgataggatttaa

SEQ ID NO: 416888 - DNA, 33 bp, Homo sapien
ggtgtctttctttacccaaatgataggatttaa

SEQ ID NO: 416889 - DNA, 33 bp, Homo sapien
cttcaaaatatgccataaaaaaattgacgttgg

SEQ ID NO: 416890 - DNA, 33 bp, Homo sapien
cttcaaaatatgccattaaaaaattgacgttgg

SEQ ID NO: 416891 - DNA, 33 bp, Homo sapien
cctgctacgggtttcagatcagacagttaagaa

SEQ ID NO: 416892 - DNA, 33 bp, Homo sapien
cctgctacgggtttcatatcagacagttaagaa

SEQ ID NO: 416893 - DNA, 33 bp, Homo sapien
ggtttgaactctctcccccaggcacagagcaga

SEQ ID NO: 416894 - DNA, 33 bp, Homo sapien
ggtttgaactctctccgccaggcacagagcaga

SEQ ID NO: 416895 - DNA, 33 bp, Homo sapien
acattgcaggcactaacgggataagaggccagg

SEQ ID NO: 416896 - DNA, 33 bp, Homo sapien
acattgcaggcactaatgggataagaggccagg

SEQ ID NO: 416897 - DNA, 33 bp, Homo sapien
cactgggcacaagggaacttctcggagcctaag

SEQ ID NO: 416898 - DNA, 33 bp, Homo sapien
cactgggcacaagggaccttctcggagcctaag

SEQ ID NO: 416899 - DNA, 33 bp, Homo sapien
taacaatgtgaatgaacgtacttcaaccctcta

SEQ ID NO: 416900 - DNA, 33 bp, Homo sapien
taacaatgtgaatgaatgtacttcaaccctcta

SEQ ID NO: 416901 - DNA, 33 bp, Homo sapien
ccacaggctaagaaacacagagagaaatggcag

SEQ ID NO: 416902 - DNA, 33 bp, Homo sapien
ccacaggctaagaaacccagagagaaatggcag

SEQ ID NO: 416903 - DNA, 33 bp, Homo sapien
tgatcctgagctgcaaaagacatgttggctgtc

SEQ ID NO: 416904 - DNA, 33 bp, Homo sapien
tgatcctgagctgcaagagacatgttggctgtc

SEQ ID NO: 416905 - DNA, 33 bp, Homo sapien
ctgtcacacaatttaccaggctgactcagggct

SEQ ID NO: 416906 - DNA, 33 bp, Homo sapien
ctgtcacacaatttacgaggctgactcagggct

SEQ ID NO: 416907 - DNA, 33 bp, Homo sapien
tcgccctgggcactgaagttctcgttggggtcc

SEQ ID NO: 416908 - DNA, 33 bp, Homo sapien
tcgccctgggcactgaggttctcgttggggtcc

SEQ ID NO: 416909 - DNA, 33 bp, Homo sapien
acttctgagatgagcaactcgagaactatgagg

SEQ ID NO: 416910 - DNA, 33 bp, Homo sapien
acttctgagatgagcacctcgagaactatgagg

SEQ ID NO: 416911 - DNA, 33 bp, Homo sapien
taaactgaaatatgcaaaccgacattagctaat

SEQ ID NO: 416912 - DNA, 33 bp, Homo sapien
taaactgaaatatgcacaccgacattagctaat

SEQ ID NO: 416913 - DNA, 33 bp, Homo sapien
gcttttctctgcatggaaagtttttgttgttgt

SEQ ID NO: 416914 - DNA, 33 bp, Homo sapien
gcttttctctgcatgggaagtttttgttgttgt

SEQ ID NO: 416915 - DNA, 33 bp, Homo sapien
cttccatgttttttacaagctgctggcagggct

SEQ ID NO: 416916 - DNA, 33 bp, Homo sapien
cttccatgttttttacgagctgctggcagggct

SEQ ID NO: 416917 - DNA, 33 bp, Homo sapien
catgtgcttttaaacacgtctttcaaagatcac

SEQ ID NO: 416918 - DNA, 33 bp, Homo sapien
catgtgcttttaaacaggtctttcaaagatcac

SEQ ID NO: 416919 - DNA, 33 bp, Homo sapien
ctgccaacatgccctacgtggtgttaacctggc

SEQ ID NO: 416920 - DNA, 33 bp, Homo sapien
ctgccaacatgccctatgtggtgttaacctggc

SEQ ID NO: 416921 - DNA, 33 bp, Homo sapien
gtgttgtgcactgtacacactttgcttttaaac

SEQ ID NO: 416922 - DNA, 33 bp, Homo sapien
gtgttgtgcactgtacgcactttgcttttaaac

SEQ ID NO: 416923 - DNA, 33 bp, Homo sapien
tgcttgaacctgggaaacagattgcagtgagct

SEQ ID NO: 416924 - DNA, 33 bp, Homo sapien
tgcttgaacctgggaagcagattgcagtgagct

SEQ ID NO: 416925 - DNA, 33 bp, Homo sapien
aaggccggccaaggaaaaggtgtatgtttccat

SEQ ID NO: 416926 - DNA, 33 bp, Homo sapien
aaggccggccaaggaataggtgtatgtttccat

SEQ ID NO: 416927 - DNA, 33 bp, Homo sapien
ctataagacttgctaaatggtcattttttgtcc

SEQ ID NO: 416928 - DNA, 33 bp, Homo sapien
ctataagacttgctaagtggtcattttttgtcc

SEQ ID NO: 416929 - DNA, 33 bp, Homo sapien
tccacatacagcattgaatttttatttgtttat

SEQ ID NO: 416930 - DNA, 33 bp, Homo sapien
tccacatacagcattgcatttttatttgtttat

SEQ ID NO: 416931 - DNA, 33 bp, Homo sapien
ctgaagtaggaaaatcacttgaacaaaggatat

SEQ ID NO: 416932 - DNA, 33 bp, Homo sapien
ctgaagtaggaaaatcgcttgaacaaaggatat

SEQ ID NO: 416933 - DNA, 33 bp, Homo sapien
tgtcacctccactaccaagaacactcccaatgc

SEQ ID NO: 416934 - DNA, 33 bp, Homo sapien
tgtcacctccactacccagaacactcccaatgc

SEQ ID NO: 416935 - DNA, 33 bp, Homo sapien
ctccaaagcgagcccgccattccactgaacgct

SEQ ID NO: 416936 - DNA, 33 bp, Homo sapien
ctccaaagcgagcccgtcattccactgaacgct

SEQ ID NO: 416937 - DNA, 33 bp, Homo sapien
caggctccaagtcccacataccctaaatactag

SEQ ID NO: 416938 - DNA, 33 bp, Homo sapien
caggctccaagtcccatataccctaaatactag

SEQ ID NO: 416939 - DNA, 33 bp, Homo sapien
tcaacatggctcaagaccccataaggctaacaa

SEQ ID NO: 416940 - DNA, 33 bp, Homo sapien
tcaacatggctcaagatcccataaggctaacaa

SEQ ID NO: 416941 - DNA, 33 bp, Homo sapien
attgggcagagctgacgcggtaattccctcacc

SEQ ID NO: 416942 - DNA, 33 bp, Homo sapien
attgggcagagctgactcggtaattccctcacc

SEQ ID NO: 416943 - DNA, 33 bp, Homo sapien
gtcaggaacgggtgtaactaggtccagagtttg

SEQ ID NO: 416944 - DNA, 33 bp, Homo sapien
gtcaggaacgggtgtatctaggtccagagtttg

SEQ ID NO: 416945 - DNA, 33 bp, Homo sapien
ggggaggggacaccaacgctgaattacaaaaaa

SEQ ID NO: 416946 - DNA, 33 bp, Homo sapien
ggggaggggacaccaatgctgaattacaaaaaa

SEQ ID NO: 416947 - DNA, 33 bp, Homo sapien
aggataagcctatgccaactgcaaatacactga

SEQ ID NO: 416948 - DNA, 33 bp, Homo sapien
aggataagcctatgccgactgcaaatacactga

SEQ ID NO: 416949 - DNA, 33 bp, Homo sapien
aggtgcttggggccacccgtctcgtctaaggct

SEQ ID NO: 416950 - DNA, 33 bp, Homo sapien
aggtgcttggggccactcgtctcgtctaaggct

SEQ ID NO: 416951 - DNA, 33 bp, Homo sapien
tggagataaagcagaaatcaggatcacgatcca

SEQ ID NO: 416952 - DNA, 33 bp, Homo sapien
tggagataaagcagaagtcaggatcacgatcca

SEQ ID NO: 416953 - DNA, 33 bp, Homo sapien
tcagcctcccaaagtacacatctgtaatcacac

SEQ ID NO: 416954 - DNA, 33 bp, Homo sapien
tcagcctcccaaagtatacatctgtaatcacac

SEQ ID NO: 416955 - DNA, 33 bp, Homo sapien
ctaaaaagaaatgtagacactgagatcataatt

SEQ ID NO: 416956 - DNA, 33 bp, Homo sapien
ctaaaaagaaatgtagtcactgagatcataatt

SEQ ID NO: 416957 - DNA, 33 bp, Homo sapien
ctatatgtctctgtacgcaaatctgtaggtttg

SEQ ID NO: 416958 - DNA, 33 bp, Homo sapien
ctatatgtctctgtactcaaatctgtaggtttg

SEQ ID NO: 416959 - DNA, 33 bp, Homo sapien
gcttccattttaaaaactgttctgtacagagag

SEQ ID NO: 416960 - DNA, 33 bp, Homo sapien
gcttccattttaaaaattgttctgtacagagag

SEQ ID NO: 416961 - DNA, 33 bp, Homo sapien
gaggtgggagggaggaagtacctcttaggcctc

SEQ ID NO: 416962 - DNA, 33 bp, Homo sapien
gaggtgggagggaggacgtacctcttaggcctc

SEQ ID NO: 416963 - DNA, 33 bp, Homo sapien
ggctgtggtcacttacggcttcgtctgggggca

SEQ ID NO: 416964 - DNA, 33 bp, Homo sapien
ggctgtggtcacttactgcttcgtctgggggca

SEQ ID NO: 416965 - DNA, 33 bp, Homo sapien
gttgaataaaaatgacagaaaccagcctcccag

SEQ ID NO: 416966 - DNA, 33 bp, Homo sapien
gttgaataaaaatgacggaaaccagcctcccag

SEQ ID NO: 416967 - DNA, 33 bp, Homo sapien
agggagactttgaggacgtggaagatgctagta

SEQ ID NO: 416968 - DNA, 33 bp, Homo sapien
agggagactttgaggatgtggaagatgctagta

SEQ ID NO: 416969 - DNA, 33 bp, Homo sapien
aagaatgaataccccacagatgagagataggga

SEQ ID NO: 416970 - DNA, 33 bp, Homo sapien
aagaatgaataccccagagatgagagataggga

SEQ ID NO: 416971 - DNA, 33 bp, Homo sapien
cgtgaagtcgccattgcagagaaaaagaaacaa

SEQ ID NO: 416972 - DNA, 33 bp, Homo sapien
cgtgaagtcgccattggagagaaaaagaaacaa

SEQ ID NO: 416973 - DNA, 33 bp, Homo sapien
agcactgcgggtaagcaaaactacaaaccgttc

SEQ ID NO: 416974 - DNA, 33 bp, Homo sapien
agcactgcgggtaagcgaaactacaaaccgttc

SEQ ID NO: 416975 - DNA, 33 bp, Homo sapien
tgatgaaaagttatgaccaggtgcactcaggaa

SEQ ID NO: 416976 - DNA, 33 bp, Homo sapien
tgatgaaaagttatgatcaggtgcactcaggaa

SEQ ID NO: 416977 - DNA, 33 bp, Homo sapien
cagcccagtaactctacccttgatacaactgca

SEQ ID NO: 416978 - DNA, 33 bp, Homo sapien
cagcccagtaactctatccttgatacaactgca

SEQ ID NO: 416979 - DNA, 33 bp, Homo sapien
ataagaaggcaatgccaaaaagctctactcacc

SEQ ID NO: 416980 - DNA, 33 bp, Homo sapien
ataagaaggcaatgccgaaaagctctactcacc

SEQ ID NO: 416981 - DNA, 33 bp, Homo sapien
gaaaatgaaactgagcactttcttctgcaaaag

SEQ ID NO: 416982 - DNA, 33 bp, Homo sapien
gaaaatgaaactgagcgctttcttctgcaaaag

SEQ ID NO: 416983 - DNA, 33 bp, Homo sapien
gtcaaatattcggccacgctctactgaaacact

SEQ ID NO: 416984 - DNA, 33 bp, Homo sapien
gtcaaatattcggccatgctctactgaaacact

SEQ ID NO: 416985 - DNA, 33 bp, Homo sapien
gctggggaaattactgcacaagcatagcatgga

SEQ ID NO: 416986 - DNA, 33 bp, Homo sapien
gctggggaaattactgtacaagcatagcatgga

SEQ ID NO: 416987 - DNA, 33 bp, Homo sapien
tgtccttagaagcctcaaaaatggaaatcccac

SEQ ID NO: 416988 - DNA, 33 bp, Homo sapien
tgtccttagaagcctcgaaaatggaaatcccac

SEQ ID NO: 416989 - DNA, 33 bp, Homo sapien
tgtcatagatcccggcaatagggaagctgtcat

SEQ ID NO: 416990 - DNA, 33 bp, Homo sapien
tgtcatagatcccggcgatagggaagctgtcat

SEQ ID NO: 416991 - DNA, 33 bp, Homo sapien
ccgagagagaagctggaagagaagaaactggtg

SEQ ID NO: 416992 - DNA, 33 bp, Homo sapien
ccgagagagaagctgggagagaagaaactggtg

SEQ ID NO: 416993 - DNA, 33 bp, Homo sapien
ctcttgccccgggccaatgcagacctggattta

SEQ ID NO: 416994 - DNA, 33 bp, Homo sapien
ctcttgccccgggccagtgcagacctggattta

SEQ ID NO: 416995 - DNA, 33 bp, Homo sapien
ggtttttgaggaatacaaagcaggattagtaac

SEQ ID NO: 416996 - DNA, 33 bp, Homo sapien
ggtttttgaggaatacgaagcaggattagtaac

SEQ ID NO: 416997 - DNA, 33 bp, Homo sapien
ccttgttcttactgaaaccctgtgaaactttca

SEQ ID NO: 416998 - DNA, 33 bp, Homo sapien
ccttgttcttactgaatccctgtgaaactttca

SEQ ID NO: 416999 - DNA, 33 bp, Homo sapien
ttccaaacatcttgtaagtgatactaacctgta

SEQ ID NO: 417000 - DNA, 33 bp, Homo sapien
ttccaaacatcttgtatgtgatactaacctgta

SEQ ID NO: 417001 - DNA, 33 bp, Homo sapien
tggtctgagcgtgaaacggctgccccaagacaa

SEQ ID NO: 417002 - DNA, 33 bp, Homo sapien
tggtctgagcgtgaaagggctgccccaagacaa

SEQ ID NO: 417003 - DNA, 33 bp, Homo sapien
cagagctgctccatccactgtgcaggcagctgc

SEQ ID NO: 417004 - DNA, 33 bp, Homo sapien
cagagctgctccatccgctgtgcaggcagctgc

SEQ ID NO: 417005 - DNA, 33 bp, Homo sapien
tggacttttacttttcacccatggctttgaaaa

SEQ ID NO: 417006 - DNA, 33 bp, Homo sapien
tggacttttacttttcgcccatggctttgaaaa

SEQ ID NO: 417007 - DNA, 33 bp, Homo sapien
ctgtacctgccttcatcatatttttgtgtttaa

SEQ ID NO: 417008 - DNA, 33 bp, Homo sapien
ctgtacctgccttcattatatttttgtgtttaa

SEQ ID NO: 417009 - DNA, 33 bp, Homo sapien
ggggtccgcagaataacgtgagaagcttgggga

SEQ ID NO: 417010 - DNA, 33 bp, Homo sapien
ggggtccgcagaataatgtgagaagcttgggga

SEQ ID NO: 417011 - DNA, 33 bp, Homo sapien
aaagggatggcgtacacgtcccagggaaggcaa

SEQ ID NO: 417012 - DNA, 33 bp, Homo sapien
aaagggatggcgtacatgtcccagggaaggcaa

SEQ ID NO: 417013 - DNA, 33 bp, Homo sapien
gggagggtagcggagaacgaggaccaccactag

SEQ ID NO: 417014 - DNA, 33 bp, Homo sapien
gggagggtagcggagagcgaggaccaccactag

SEQ ID NO: 417015 - DNA, 33 bp, Homo sapien
ttggtcggccttgtccactgaacaggtcctcct

SEQ ID NO: 417016 - DNA, 33 bp, Homo sapien
ttggtcggccttgtccgctgaacaggtcctcct

SEQ ID NO: 417017 - DNA, 33 bp, Homo sapien
aactcaggtctcataaagaaggaaatcataatt

SEQ ID NO: 417018 - DNA, 33 bp, Homo sapien
aactcaggtctcataaggaaggaaatcataatt

SEQ ID NO: 417019 - DNA, 33 bp, Homo sapien
ctcgtgacagcaaacccaaaccttcttcagaac

SEQ ID NO: 417020 - DNA, 33 bp, Homo sapien
ctcgtgacagcaaacctaaaccttcttcagaac

SEQ ID NO: 417021 - DNA, 33 bp, Homo sapien
gctccagatgacgacaaggtgagattctcactt

SEQ ID NO: 417022 - DNA, 33 bp, Homo sapien
gctccagatgacgacagggtgagattctcactt

SEQ ID NO: 417023 - DNA, 33 bp, Homo sapien
cgctaaatttctggacactggcttacgatttct

SEQ ID NO: 417024 - DNA, 33 bp, Homo sapien
cgctaaatttctggacgctggcttacgatttct

SEQ ID NO: 417025 - DNA, 33 bp, Homo sapien
gcaacagactgttaaaacggagagtgggatata

SEQ ID NO: 417026 - DNA, 33 bp, Homo sapien
gcaacagactgttaaaccggagagtgggatata

SEQ ID NO: 417027 - DNA, 33 bp, Homo sapien
aaaggggctgctcggacgcttgaaggccatgct

SEQ ID NO: 417028 - DNA, 33 bp, Homo sapien
aaaggggctgctcggatgcttgaaggccatgct

SEQ ID NO: 417029 - DNA, 33 bp, Homo sapien
ggaaacacatagtgaacgttaaatgacttagta

SEQ ID NO: 417030 - DNA, 33 bp, Homo sapien
ggaaacacatagtgaatgttaaatgacttagta

SEQ ID NO: 417031 - DNA, 33 bp, Homo sapien
ctcaggcgtttgctgacgaaggctctgtgtgtt

SEQ ID NO: 417032 - DNA, 33 bp, Homo sapien
ctcaggcgtttgctgatgaaggctctgtgtgtt

SEQ ID NO: 417033 - DNA, 33 bp, Homo sapien
ttgtgacttgtttgaaacctcgattggccactt

SEQ ID NO: 417034 - DNA, 33 bp, Homo sapien
ttgtgacttgtttgaagcctcgattggccactt

SEQ ID NO: 417035 - DNA, 33 bp, Homo sapien
ccatggaccaatttataaccttgcagagaaggc

SEQ ID NO: 417036 - DNA, 33 bp, Homo sapien
ccatggaccaatttatgaccttgcagagaaggc

SEQ ID NO: 417037 - DNA, 33 bp, Homo sapien
attttgaaaagtgtaccactggacgaaaaatta

SEQ ID NO: 417038 - DNA, 33 bp, Homo sapien
attttgaaaagtgtactactggacgaaaaatta

SEQ ID NO: 417039 - DNA, 33 bp, Homo sapien
gctaatgaattaaccactgcctggcagccccta

SEQ ID NO: 417040 - DNA, 33 bp, Homo sapien
gctaatgaattaaccagtgcctggcagccccta

SEQ ID NO: 417041 - DNA, 33 bp, Homo sapien
gggtcctctctcgctaagttcaatcatggccac

SEQ ID NO: 417042 - DNA, 33 bp, Homo sapien
gggtcctctctcgctaggttcaatcatggccac

SEQ ID NO: 417043 - DNA, 33 bp, Homo sapien
gatgctagtaaaccaactcattattttggaaac

SEQ ID NO: 417044 - DNA, 33 bp, Homo sapien
gatgctagtaaaccaattcattattttggaaac

SEQ ID NO: 417045 - DNA, 33 bp, Homo sapien
gctttagatcacaaaaataagaagaaaactaga

SEQ ID NO: 417046 - DNA, 33 bp, Homo sapien
gctttagatcacaaaagtaagaagaaaactaga

SEQ ID NO: 417047 - DNA, 33 bp, Homo sapien
tcacccaggctaaaaacgtcagtcatcaaagaa

SEQ ID NO: 417048 - DNA, 33 bp, Homo sapien
tcacccaggctaaaaatgtcagtcatcaaagaa

SEQ ID NO: 417049 - DNA, 33 bp, Homo sapien
tgatcagtccactctcccaggaaaaaaaacacc

SEQ ID NO: 417050 - DNA, 33 bp, Homo sapien
tgatcagtccactctctcaggaaaaaaaacacc

SEQ ID NO: 417051 - DNA, 33 bp, Homo sapien
cagataggaggaaaaacccagaagtgactgcac

SEQ ID NO: 417052 - DNA, 33 bp, Homo sapien
cagataggaggaaaaatccagaagtgactgcac

SEQ ID NO: 417053 - DNA, 33 bp, Homo sapien
caccttcacagacgcaacccatcattgacagaa

SEQ ID NO: 417054 - DNA, 33 bp, Homo sapien
caccttcacagacgcagcccatcattgacagaa

SEQ ID NO: 417055 - DNA, 33 bp, Homo sapien
accatcagtcagcaggaaaaagcgagtgttcat

SEQ ID NO: 417056 - DNA, 33 bp, Homo sapien
accatcagtcagcagggaaaagcgagtgttcat

SEQ ID NO: 417057 - DNA, 33 bp, Homo sapien
gagaaaaactagctaaaaaggtcaagacagacc

SEQ ID NO: 417058 - DNA, 33 bp, Homo sapien
gagaaaaactagctaacaaggtcaagacagacc

SEQ ID NO: 417059 - DNA, 33 bp, Homo sapien
gctccagttcaaacaccgtgtaggggcggatgg

SEQ ID NO: 417060 - DNA, 33 bp, Homo sapien
gctccagttcaaacactgtgtaggggcggatgg

SEQ ID NO: 417061 - DNA, 33 bp, Homo sapien
ggcctgtgtgtcattacggtcctctgtgtgttt

SEQ ID NO: 417062 - DNA, 33 bp, Homo sapien
ggcctgtgtgtcattagggtcctctgtgtgttt

SEQ ID NO: 417063 - DNA, 33 bp, Homo sapien
gacagaggcatagcccaggactccctagacaaa

SEQ ID NO: 417064 - DNA, 33 bp, Homo sapien
gacagaggcatagcccgggactccctagacaaa

SEQ ID NO: 417065 - DNA, 33 bp, Homo sapien
gaccaggtcttggaaacgcaaaaataagcttct

SEQ ID NO: 417066 - DNA, 33 bp, Homo sapien
gaccaggtcttggaaatgcaaaaataagcttct

SEQ ID NO: 417067 - DNA, 33 bp, Homo sapien
gcagacacaatccaggccaaagacagtggtcca

SEQ ID NO: 417068 - DNA, 33 bp, Homo sapien
gcagacacaatccaggtcaaagacagtggtcca

SEQ ID NO: 417069 - DNA, 33 bp, Homo sapien
ctgggcaggaattccacgtcggtccgaggctcg

SEQ ID NO: 417070 - DNA, 33 bp, Homo sapien
ctgggcaggaattccatgtcggtccgaggctcg

SEQ ID NO: 417071 - DNA, 33 bp, Homo sapien
ttttcaaatatgcagagtctcaaaaatatggag

SEQ ID NO: 417072 - DNA, 33 bp, Homo sapien
ttttcaaatatgcagattctcaaaaatatggag

SEQ ID NO: 417073 - DNA, 33 bp, Homo sapien
agccaaatcactaacacacatccctttctaggg

SEQ ID NO: 417074 - DNA, 33 bp, Homo sapien
agccaaatcactaacatacatccctttctaggg

SEQ ID NO: 417075 - DNA, 33 bp, Homo sapien
caatccgggcaaaagaagatatctaactccagg

SEQ ID NO: 417076 - DNA, 33 bp, Homo sapien
caatccgggcaaaagaggatatctaactccagg

SEQ ID NO: 417077 - DNA, 33 bp, Homo sapien
atgtctatttgcataacggtttgcttgggtact

SEQ ID NO: 417078 - DNA, 33 bp, Homo sapien
atgtctatttgcataatggtttgcttgggtact

SEQ ID NO: 417079 - DNA, 33 bp, Homo sapien
tttcttctcatgtcacagtctatttgaaaaaaa

SEQ ID NO: 417080 - DNA, 33 bp, Homo sapien
tttcttctcatgtcacggtctatttgaaaaaaa

SEQ ID NO: 417081 - DNA, 33 bp, Homo sapien
gctggctagtgggtcacgagtcctttgcagtag

SEQ ID NO: 417082 - DNA, 33 bp, Homo sapien
gctggctagtgggtcatgagtcctttgcagtag

SEQ ID NO: 417083 - DNA, 33 bp, Homo sapien
tgttccgttttcacaactaagaatgggtgtccc

SEQ ID NO: 417084 - DNA, 33 bp, Homo sapien
tgttccgttttcacaagtaagaatgggtgtccc

SEQ ID NO: 417085 - DNA, 33 bp, Homo sapien
aaattcattccttacccattttgacctttgtct

SEQ ID NO: 417086 - DNA, 33 bp, Homo sapien
aaattcattccttacctattttgacctttgtct

SEQ ID NO: 417087 - DNA, 33 bp, Homo sapien
tcttggctaagcctatcaaagagagtcacagaa

SEQ ID NO: 417088 - DNA, 33 bp, Homo sapien
tcttggctaagcctattaaagagagtcacagaa

SEQ ID NO: 417089 - DNA, 33 bp, Homo sapien
gctcttgtagtctttacctctaagtaggacatt

SEQ ID NO: 417090 - DNA, 33 bp, Homo sapien
gctcttgtagtctttatctctaagtaggacatt

SEQ ID NO: 417091 - DNA, 33 bp, Homo sapien
gtatttaacacgtgcaatctagagtgatgctgg

SEQ ID NO: 417092 - DNA, 33 bp, Homo sapien
gtatttaacacgtgcagtctagagtgatgctgg

SEQ ID NO: 417093 - DNA, 33 bp, Homo sapien
tttctataattcatgccgaaactggcccggtta

SEQ ID NO: 417094 - DNA, 33 bp, Homo sapien
tttctataattcatgctgaaactggcccggtta

SEQ ID NO: 417095 - DNA, 33 bp, Homo sapien
aaggcaggaggcaaacactaaggagacattata

SEQ ID NO: 417096 - DNA, 33 bp, Homo sapien
aaggcaggaggcaaacgctaaggagacattata

SEQ ID NO: 417097 - DNA, 33 bp, Homo sapien
tatgaacattcctggacgagtttttgtgtggac

SEQ ID NO: 417098 - DNA, 33 bp, Homo sapien
tatgaacattcctggatgagtttttgtgtggac

SEQ ID NO: 417099 - DNA, 33 bp, Homo sapien
cttttaatgccaaaaaacgcaatttccccaggc

SEQ ID NO: 417100 - DNA, 33 bp, Homo sapien
cttttaatgccaaaaagcgcaatttccccaggc

SEQ ID NO: 417101 - DNA, 33 bp, Homo sapien
aggaagaccttgaggccatgcaattagggagct

SEQ ID NO: 417102 - DNA, 33 bp, Homo sapien
aggaagaccttgaggctatgcaattagggagct

SEQ ID NO: 417103 - DNA, 33 bp, Homo sapien
ctcgcttctcccagcaatctcttcacgtccatc

SEQ ID NO: 417104 - DNA, 33 bp, Homo sapien
ctcgcttctcccagcagtctcttcacgtccatc

SEQ ID NO: 417105 - DNA, 33 bp, Homo sapien
cttaccaagcagggaggagtagctgtcaaggtg

SEQ ID NO: 417106 - DNA, 33 bp, Homo sapien
cttaccaagcagggagtagtagctgtcaaggtg

SEQ ID NO: 417107 - DNA, 33 bp, Homo sapien
cttccctggagaagacaataacatttacaaaga

SEQ ID NO: 417108 - DNA, 33 bp, Homo sapien
cttccctggagaagacgataacatttacaaaga

SEQ ID NO: 417109 - DNA, 33 bp, Homo sapien
caggactcaaataccaacggaaacagcaccatc

SEQ ID NO: 417110 - DNA, 33 bp, Homo sapien
caggactcaaataccagcggaaacagcaccatc

SEQ ID NO: 417111 - DNA, 33 bp, Homo sapien
ctaatagtatagaaaaaattgtcagaaggctga

SEQ ID NO: 417112 - DNA, 33 bp, Homo sapien
ctaatagtatagaaaacattgtcagaaggctga

SEQ ID NO: 417113 - DNA, 33 bp, Homo sapien
ctgaattgaatatctaaacttcctccaactgtt

SEQ ID NO: 417114 - DNA, 33 bp, Homo sapien
ctgaattgaatatctagacttcctccaactgtt

SEQ ID NO: 417115 - DNA, 33 bp, Homo sapien
gtggtgatgtttttgacacctctatgtgtgata

SEQ ID NO: 417116 - DNA, 33 bp, Homo sapien
gtggtgatgtttttgagacctctatgtgtgata

SEQ ID NO: 417117 - DNA, 33 bp, Homo sapien
tttcctctgccgctcacctgtgtcagatcccgt

SEQ ID NO: 417118 - DNA, 33 bp, Homo sapien
tttcctctgccgctcatctgtgtcagatcccgt

SEQ ID NO: 417119 - DNA, 33 bp, Homo sapien
ctcagttatcaaagtacgttcctgtcaatccac

SEQ ID NO: 417120 - DNA, 33 bp, Homo sapien
ctcagttatcaaagtatgttcctgtcaatccac

SEQ ID NO: 417121 - DNA, 33 bp, Homo sapien
tccatcagtaagaccaacataaccagtgtttcc

SEQ ID NO: 417122 - DNA, 33 bp, Homo sapien
tccatcagtaagaccagcataaccagtgtttcc

SEQ ID NO: 417123 - DNA, 33 bp, Homo sapien
acacacgtgggtttccagaatggttatcagcac

SEQ ID NO: 417124 - DNA, 33 bp, Homo sapien
acacacgtgggtttcctgaatggttatcagcac

SEQ ID NO: 417125 - DNA, 33 bp, Homo sapien
atcctattaagtgagaaaagtgatagcctcttg

SEQ ID NO: 417126 - DNA, 33 bp, Homo sapien
atcctattaagtgagataagtgatagcctcttg

SEQ ID NO: 417127 - DNA, 33 bp, Homo sapien
cccagtattgtgtcaggaaaagagggttattgc

SEQ ID NO: 417128 - DNA, 33 bp, Homo sapien
cccagtattgtgtcagtaaaagagggttattgc

SEQ ID NO: 417129 - DNA, 33 bp, Homo sapien
tgctgtcactattgctcaaacttttcactgttg

SEQ ID NO: 417130 - DNA, 33 bp, Homo sapien
tgctgtcactattgcttaaacttttcactgttg

SEQ ID NO: 417131 - DNA, 33 bp, Homo sapien
cctcactcttaagctccacatgcaatcaaagcc

SEQ ID NO: 417132 - DNA, 33 bp, Homo sapien
cctcactcttaagctctacatgcaatcaaagcc

SEQ ID NO: 417133 - DNA, 33 bp, Homo sapien
ggaaatgaattcctaacaaaagctaatgttatc

SEQ ID NO: 417134 - DNA, 33 bp, Homo sapien
ggaaatgaattcctaagaaaagctaatgttatc

SEQ ID NO: 417135 - DNA, 33 bp, Homo sapien
aaggcagcagacagatcagacggcctggggcct

SEQ ID NO: 417136 - DNA, 33 bp, Homo sapien
aaggcagcagacagattagacggcctggggcct

SEQ ID NO: 417137 - DNA, 33 bp, Homo sapien
gatgcgcctcgagcaccccctgggagcaggccc

SEQ ID NO: 417138 - DNA, 33 bp, Homo sapien
gatgcgcctcgagcactccctgggagcaggccc

SEQ ID NO: 417139 - DNA, 33 bp, Homo sapien
tctacttgtgtctccccccttgttctctgcccc

SEQ ID NO: 417140 - DNA, 33 bp, Homo sapien
tctacttgtgtctccctccttgttctctgcccc

SEQ ID NO: 417141 - DNA, 33 bp, Homo sapien
agactgtcagaaacaccgatccgttctcgtcct

SEQ ID NO: 417142 - DNA, 33 bp, Homo sapien
agactgtcagaaacactgatccgttctcgtcct

SEQ ID NO: 417143 - DNA, 33 bp, Homo sapien
agagtaagtacatcccaaatttcagtggctgtt

SEQ ID NO: 417144 - DNA, 33 bp, Homo sapien
agagtaagtacatcccgaatttcagtggctgtt

SEQ ID NO: 417145 - DNA, 33 bp, Homo sapien
acaaactttctggaagaatatctgtggagtaac

SEQ ID NO: 417146 - DNA, 33 bp, Homo sapien
acaaactttctggaaggatatctgtggagtaac

SEQ ID NO: 417147 - DNA, 33 bp, Homo sapien
ctggactcgcatacaacgttctccatgtccatg

SEQ ID NO: 417148 - DNA, 33 bp, Homo sapien
ctggactcgcatacaatgttctccatgtccatg

SEQ ID NO: 417149 - DNA, 33 bp, Homo sapien
tttttcatctcatgccaaccagtgctgctaaat

SEQ ID NO: 417150 - DNA, 33 bp, Homo sapien
tttttcatctcatgccgaccagtgctgctaaat

SEQ ID NO: 417151 - DNA, 33 bp, Homo sapien
ttccgagcgtctgaggacctagtatcccaatgt

SEQ ID NO: 417152 - DNA, 33 bp, Homo sapien
ttccgagcgtctgaggccctagtatcccaatgt

SEQ ID NO: 417153 - DNA, 33 bp, Homo sapien
ggcaagggccaggataaggtgcacgcacaggcg

SEQ ID NO: 417154 - DNA, 33 bp, Homo sapien
ggcaagggccaggatacggtgcacgcacaggcg

SEQ ID NO: 417155 - DNA, 33 bp, Homo sapien
gaaacagaaaaccagaacagatcagcacttctc

SEQ ID NO: 417156 - DNA, 33 bp, Homo sapien
gaaacagaaaaccagagcagatcagcacttctc

SEQ ID NO: 417157 - DNA, 33 bp, Homo sapien
ggcacaatccggtttgaactgtaaattactgaa

SEQ ID NO: 417158 - DNA, 33 bp, Homo sapien
ggcacaatccggtttgcactgtaaattactgaa

SEQ ID NO: 417159 - DNA, 33 bp, Homo sapien
ctgccctgctgtggtaccttcctccgtgtgaat

SEQ ID NO: 417160 - DNA, 33 bp, Homo sapien
ctgccctgctgtggtatcttcctccgtgtgaat

SEQ ID NO: 417161 - DNA, 33 bp, Homo sapien
gcctggcgcaaggtaaacacttgataaatggga

SEQ ID NO: 417162 - DNA, 33 bp, Homo sapien
gcctggcgcaaggtaagcacttgataaatggga

SEQ ID NO: 417163 - DNA, 33 bp, Homo sapien
agtgtaaggatcttcacgatgaaatttctgtaa

SEQ ID NO: 417164 - DNA, 33 bp, Homo sapien
agtgtaaggatcttcatgatgaaatttctgtaa

SEQ ID NO: 417165 - DNA, 33 bp, Homo sapien; identical to SEQ ID NO: 417163

SEQ ID NO: 417166 - DNA, 33 bp, Homo sapien; identical to SEQ ID NO: 417164

SEQ ID NO: 417167 - DNA, 33 bp, Homo sapien
tggtcttccagggttacgattgcccagataatg

SEQ ID NO: 417168 - DNA, 33 bp, Homo sapien
tggtcttccagggttatgattgcccagataatg

SEQ ID NO: 417169 - DNA, 33 bp, Homo sapien
ggccccagtagtttacagcctgcaagtaaaaca

SEQ ID NO: 417170 - DNA, 33 bp, Homo sapien
ggccccagtagtttacggcctgcaagtaaaaca

SEQ ID NO: 417171 - DNA, 33 bp, Homo sapien
taaattgaccaacgtaactgatgtgcctcagga

SEQ ID NO: 417172 - DNA, 33 bp, Homo sapien
taaattgaccaacgtagctgatgtgcctcagga

SEQ ID NO: 417173 - DNA, 33 bp, Homo sapien
ccaaatgcctctccacaactcacacctaaatct

SEQ ID NO: 417174 - DNA, 33 bp, Homo sapien
ccaaatgcctctccacgactcacacctaaatct

SEQ ID NO: 417175 - DNA, 33 bp, Homo sapien
agctagtgagctgaaacgtctctttttgcttcc

SEQ ID NO: 417176 - DNA, 33 bp, Homo sapien
agctagtgagctgaaatgtctctttttgcttcc

SEQ ID NO: 417177 - DNA, 33 bp, Homo sapien
cccactaagctccccacaaattcctgacccatt

SEQ ID NO: 417178 - DNA, 33 bp, Homo sapien
cccactaagctccccagaaattcctgacccatt

SEQ ID NO: 417179 - DNA, 33 bp, Homo sapien
cgggactcctctgcagcatgggatgtgaatggc

SEQ ID NO: 417180 - DNA, 33 bp, Homo sapien
cgggactcctctgcagtatgggatgtgaatggc

SEQ ID NO: 417181 - DNA, 33 bp, Homo sapien
tttagtctcttgggcacggaaaacacctcttaa

SEQ ID NO: 417182 - DNA, 33 bp, Homo sapien
tttagtctcttgggcatggaaaacacctcttaa

SEQ ID NO: 417183 - DNA, 33 bp, Homo sapien
tgactgtgttgttctgcattaatacaggcttaa

SEQ ID NO: 417184 - DNA, 33 bp, Homo sapien
tgactgtgttgttctggattaatacaggcttaa

SEQ ID NO: 417185 - DNA, 33 bp, Homo sapien
gattagagccaaaggcacgtgacacggtagcct

SEQ ID NO: 417186 - DNA, 33 bp, Homo sapien
gattagagccaaaggcccgtgacacggtagcct

SEQ ID NO: 417187 - DNA, 33 bp, Homo sapien
aggctcttttcaagaacgttggtataggccagg

SEQ ID NO: 417188 - DNA, 33 bp, Homo sapien
aggctcttttcaagaatgttggtataggccagg

SEQ ID NO: 417189 - DNA, 33 bp, Homo sapien
ggcagtagagcacttaagagaggggactccaaa

SEQ ID NO: 417190 - DNA, 33 bp, Homo sapien
ggcagtagagcacttaggagaggggactccaaa

SEQ ID NO: 417191 - DNA, 33 bp, Homo sapien
gatagtaccaacttcaagaggattgctgtgctc

SEQ ID NO: 417192 - DNA, 33 bp, Homo sapien
gatagtaccaacttcatgaggattgctgtgctc

SEQ ID NO: 417193 - DNA, 33 bp, Homo sapien
tgagcgtaggaggagacgaaagacaaactcttg

SEQ ID NO: 417194 - DNA, 33 bp, Homo sapien
tgagcgtaggaggagatgaaagacaaactcttg

SEQ ID NO: 417195 - DNA, 33 bp, Homo sapien
gaagaaaaggataatcaagtgaagtctcaggta

SEQ ID NO: 417196 - DNA, 33 bp, Homo sapien
gaagaaaaggataatcgagtgaagtctcaggta

SEQ ID NO: 417197 - DNA, 33 bp, Homo sapien
actatggtattagaaacgctaactacagagatg

SEQ ID NO: 417198 - DNA, 33 bp, Homo sapien
actatggtattagaaatgctaactacagagatg

SEQ ID NO: 417199 - DNA, 33 bp, Homo sapien
tttcttaattgttgaaacctgtaattcattgaa

SEQ ID NO: 417200 - DNA, 33 bp, Homo sapien
tttcttaattgttgaatcctgtaattcattgaa

SEQ ID NO: 417201 - DNA, 33 bp, Homo sapien
ggttggaggagaaacacggcctgtagttgctgt

SEQ ID NO: 417202 - DNA, 33 bp, Homo sapien
ggttggaggagaaacatggcctgtagttgctgt

SEQ ID NO: 417203 - DNA, 33 bp, Homo sapien
tgtacactgaagaatacagaaggcagctgggcc

SEQ ID NO: 417204 - DNA, 33 bp, Homo sapien
tgtacactgaagaatatagaaggcagctgggcc

SEQ ID NO: 417205 - DNA, 33 bp, Homo sapien
ataaaaataattcataaaagttcacttctgaag

SEQ ID NO: 417206 - DNA, 33 bp, Homo sapien
ataaaaataattcatacaagttcacttctgaag

SEQ ID NO: 417207 - DNA, 33 bp, Homo sapien
cagcctggatggcaaaacgagactccgtttcaa

SEQ ID NO: 417208 - DNA, 33 bp, Homo sapien
cagcctggatggcaaagcgagactccgtttcaa

SEQ ID NO: 417209 - DNA, 33 bp, Homo sapien
cttcatgataatcccaaaaggaagataactgct

SEQ ID NO: 417210 - DNA, 33 bp, Homo sapien
cttcatgataatcccacaaggaagataactgct

SEQ ID NO: 417211 - DNA, 33 bp, Homo sapien
cacttctctggatcccacattctgcccaggcac

SEQ ID NO: 417212 - DNA, 33 bp, Homo sapien
cacttctctggatcccgcattctgcccaggcac

SEQ ID NO: 417213 - DNA, 33 bp, Homo sapien
atttgagttggcagaaagaagaatcagccaaca

SEQ ID NO: 417214 - DNA, 33 bp, Homo sapien
atttgagttggcagaaggaagaatcagccaaca

SEQ ID NO: 417215 - DNA, 33 bp, Homo sapien
taaggatgatgatgtccataccaagaagcagaa

SEQ ID NO: 417216 - DNA, 33 bp, Homo sapien
taaggatgatgatgtcgataccaagaagcagaa

SEQ ID NO: 417217 - DNA, 33 bp, Homo sapien
cagctccgagatcaccaccaaggacttaaagga

SEQ ID NO: 417218 - DNA, 33 bp, Homo sapien
cagctccgagatcaccgccaaggacttaaagga

SEQ ID NO: 417219 - DNA, 33 bp, Homo sapien
tttcacaagctgtatacctccgggaatattgac

SEQ ID NO: 417220 - DNA, 33 bp, Homo sapien
tttcacaagctgtatatctccgggaatattgac

SEQ ID NO: 417221 - DNA, 33 bp, Homo sapien
aacatcttagctggtacaagtgtacaaaaattc

SEQ ID NO: 417222 - DNA, 33 bp, Homo sapien
aacatcttagctggtataagtgtacaaaaattc

SEQ ID NO: 417223 - DNA, 33 bp, Homo sapien
ggtttgacgtgtgtaccgctgaagaggcagagc

SEQ ID NO: 417224 - DNA, 33 bp, Homo sapien
ggtttgacgtgtgtactgctgaagaggcagagc

SEQ ID NO: 417225 - DNA, 33 bp, Homo sapien
gctgaggatctctctacgcctccctcactgggt

SEQ ID NO: 417226 - DNA, 33 bp, Homo sapien
gctgaggatctctctatgcctccctcactgggt

SEQ ID NO: 417227 - DNA, 33 bp, Homo sapien
gcctccccatcggtccacatcagcctatccggt

SEQ ID NO: 417228 - DNA, 33 bp, Homo sapien
gcctccccatcggtccgcatcagcctatccggt

SEQ ID NO: 417229 - DNA, 33 bp, Homo sapien
actgttggtcagtgacaggaaaagattgcactg

SEQ ID NO: 417230 - DNA, 33 bp, Homo sapien
actgttggtcagtgacgggaaaagattgcactg

SEQ ID NO: 417231 - DNA, 33 bp, Homo sapien
aatggagcggttctcaagcagggaaaggcaggg

SEQ ID NO: 417232 - DNA, 33 bp, Homo sapien
aatggagcggttctcaggcagggaaaggcaggg

SEQ ID NO: 417233 - DNA, 33 bp, Homo sapien
ctttggagagctagaaatgaaatggtgagcatg

SEQ ID NO: 417234 - DNA, 33 bp, Homo sapien
ctttggagagctagaactgaaatggtgagcatg

SEQ ID NO: 417235 - DNA, 33 bp, Homo sapien
tggattttgagataaacacgttgtaaccaaaaa

SEQ ID NO: 417236 - DNA, 33 bp, Homo sapien
tggattttgagataaatacgttgtaaccaaaaa

SEQ ID NO: 417237 - DNA, 33 bp, Homo sapien
ttgaacgcttgaattactaagacacggacagct

SEQ ID NO: 417238 - DNA, 33 bp, Homo sapien
ttgaacgcttgaattattaagacacggacagct

SEQ ID NO: 417239 - DNA, 33 bp, Homo sapien
tggtggcgggtggccaaggtagactaggaagag

SEQ ID NO: 417240 - DNA, 33 bp, Homo sapien
tggtggcgggtggccagggtagactaggaagag

SEQ ID NO: 417241 - DNA, 33 bp, Homo sapien
tgataggcccaagtcagctctggatagtacagt

SEQ ID NO: 417242 - DNA, 33 bp, Homo sapien
tgataggcccaagtcatctctggatagtacagt

SEQ ID NO: 417243 - DNA, 33 bp, Homo sapien
gtaataatagaaacaaattaaaaaggcaggaag

SEQ ID NO: 417244 - DNA, 33 bp, Homo sapien
gtaataatagaaacaatttaaaaaggcaggaag

SEQ ID NO: 417245 - DNA, 33 bp, Homo sapien
gtagttccttctgatccagggattgcaaacaac

SEQ ID NO: 417246 - DNA, 33 bp, Homo sapien
gtagttccttctgatctagggattgcaaacaac

SEQ ID NO: 417247 - DNA, 33 bp, Homo sapien
tacatgcattgtctgaactaggaaattaggctc

SEQ ID NO: 417248 - DNA, 33 bp, Homo sapien
tacatgcattgtctgagctaggaaattaggctc

SEQ ID NO: 417249 - DNA, 33 bp, Homo sapien
atttgttaattgacaaatgaaaattgcctgtta

SEQ ID NO: 417250 - DNA, 33 bp, Homo sapien
atttgttaattgacaagtgaaaattgcctgtta

SEQ ID NO: 417251 - DNA, 33 bp, Homo sapien
cttcggtcactctctacggagaaaaaagaagaa

SEQ ID NO: 417252 - DNA, 33 bp, Homo sapien
cttcggtcactctctatggagaaaaaagaagaa

SEQ ID NO: 417253 - DNA, 33 bp, Homo sapien
gttctcgatacccaaacagtcatagcagcaagg

SEQ ID NO: 417254 - DNA, 33 bp, Homo sapien
gttctcgatacccaaatagtcatagcagcaagg

SEQ ID NO: 417255 - DNA, 33 bp, Homo sapien
cacaacccccatgttaaagagatgttgataagg

SEQ ID NO: 417256 - DNA, 33 bp, Homo sapien
cacaacccccatgttagagagatgttgataagg

SEQ ID NO: 417257 - DNA, 33 bp, Homo sapien
taaatcttcatcagtgaatggaacaaaatgtac

SEQ ID NO: 417258 - DNA, 33 bp, Homo sapien
taaatcttcatcagtggatggaacaaaatgtac

SEQ ID NO: 417259 - DNA, 33 bp, Homo sapien
tgttagttccatggtaacggggaattgaggttg

SEQ ID NO: 417260 - DNA, 33 bp, Homo sapien
tgttagttccatggtatcggggaattgaggttg

SEQ ID NO: 417261 - DNA, 33 bp, Homo sapien
tggcaaaaccactttcaaaacagtaatatctgg

SEQ ID NO: 417262 - DNA, 33 bp, Homo sapien
tggcaaaaccactttcgaaacagtaatatctgg

SEQ ID NO: 417263 - DNA, 33 bp, Homo sapien
atgccctggagagaaggcgtattactttcctcg

SEQ ID NO: 417264 - DNA, 33 bp, Homo sapien
atgccctggagagaagtcgtattactttcctcg

SEQ ID NO: 417265 - DNA, 33 bp, Homo sapien
cataaattattcaaaaacaggattatttaactg

SEQ ID NO: 417266 - DNA, 33 bp, Homo sapien
cataaattattcaaaagcaggattatttaactg

SEQ ID NO: 417267 - DNA, 33 bp, Homo sapien
caagaagaaacctcaaactgcaccgaaatgatg

SEQ ID NO: 417268 - DNA, 33 bp, Homo sapien
caagaagaaacctcaatctgcaccgaaatgatg

SEQ ID NO: 417269 - DNA, 33 bp, Homo sapien
agtcagatacaagaacagcccacaagcaccact

SEQ ID NO: 417270 - DNA, 33 bp, Homo sapien
agtcagatacaagaacggcccacaagcaccact

SEQ ID NO: 417271 - DNA, 33 bp, Homo sapien
ataaaatagactgctcaatatttcattacactc

SEQ ID NO: 417272 - DNA, 33 bp, Homo sapien
ataaaatagactgctcgatatttcattacactc

SEQ ID NO: 417273 - DNA, 33 bp, Homo sapien
gcttccaacaaatataacacagaaatgataaga

SEQ ID NO: 417274 - DNA, 33 bp, Homo sapien
gcttccaacaaatatatcacagaaatgataaga

SEQ ID NO: 417275 - DNA, 33 bp, Homo sapien
ccttagtaactgggccgagtacttggggagggc

SEQ ID NO: 417276 - DNA, 33 bp, Homo sapien
ccttagtaactgggcctagtacttggggagggc

SEQ ID NO: 417277 - DNA, 33 bp, Homo sapien
ttagtggaaagaagcaagtggactcttctgtct

SEQ ID NO: 417278 - DNA, 33 bp, Homo sapien
ttagtggaaagaagcaggtggactcttctgtct

SEQ ID NO: 417279 - DNA, 33 bp, Homo sapien
acaattctgaaacctaaaagtccaagttcaagg

SEQ ID NO: 417280 - DNA, 33 bp, Homo sapien
acaattctgaaacctagaagtccaagttcaagg

SEQ ID NO: 417281 - DNA, 33 bp, Homo sapien
attggtcaacaaaacaatctgtgtacaaatggg

SEQ ID NO: 417282 - DNA, 33 bp, Homo sapien
attggtcaacaaaacagtctgtgtacaaatggg

SEQ ID NO: 417283 - DNA, 33 bp, Homo sapien
tgcagcaagagggaaaaaagtcagatctcctcc

SEQ ID NO: 417284 - DNA, 33 bp, Homo sapien
tgcagcaagagggaaagaagtcagatctcctcc

SEQ ID NO: 417285 - DNA, 33 bp, Homo sapien
ccctattccagggagacgagctccactttccct

SEQ ID NO: 417286 - DNA, 33 bp, Homo sapien
ccctattccagggagatgagctccactttccct

SEQ ID NO: 417287 - DNA, 33 bp, Homo sapien
tgatcctgtagtgacacgttattcccaagccag

SEQ ID NO: 417288 - DNA, 33 bp, Homo sapien
tgatcctgtagtgacaggttattcccaagccag

SEQ ID NO: 417289 - DNA, 33 bp, Homo sapien
cacagccatgatcctcacagtgacagcttattc

SEQ ID NO: 417290 - DNA, 33 bp, Homo sapien
cacagccatgatcctcgcagtgacagcttattc

SEQ ID NO: 417291 - DNA, 33 bp, Homo sapien
ttttcttttccaaccaagcatttcccaggtcat

SEQ ID NO: 417292 - DNA, 33 bp, Homo sapien
ttttcttttccaaccaggcatttcccaggtcat

SEQ ID NO: 417293 - DNA, 33 bp, Homo sapien
cagaaaaacttacacaagtacatcaggtgacat

SEQ ID NO: 417294 - DNA, 33 bp, Homo sapien
cagaaaaacttacacaggtacatcaggtgacat

SEQ ID NO: 417295 - DNA, 33 bp, Homo sapien
tctgattggccttctcgccactaatgctaatgc

SEQ ID NO: 417296 - DNA, 33 bp, Homo sapien
tctgattggccttctctccactaatgctaatgc

SEQ ID NO: 417297 - DNA, 33 bp, Homo sapien
agtggattgtgcgggaagaagcagatggagtcc

SEQ ID NO: 417298 - DNA, 33 bp, Homo sapien
agtggattgtgcgggaggaagcagatggagtcc

SEQ ID NO: 417299 - DNA, 33 bp, Homo sapien
aatcctcacactaaacccggacttgagagcatt

SEQ ID NO: 417300 - DNA, 33 bp, Homo sapien
aatcctcacactaaactcggacttgagagcatt

SEQ ID NO: 417301 - DNA, 33 bp, Homo sapien
cagcgttctttcctagcaagcaaactcagtgct

SEQ ID NO: 417302 - DNA, 33 bp, Homo sapien
cagcgttctttcctagtaagcaaactcagtgct

SEQ ID NO: 417303 - DNA, 33 bp, Homo sapien
ctctgactactttgcaaggattctttttaatta

SEQ ID NO: 417304 - DNA, 33 bp, Homo sapien
ctctgactactttgcagggattctttttaatta

SEQ ID NO: 417305 - DNA, 33 bp, Homo sapien
ccgggctggctttttaaaaacttgtagtaagat

SEQ ID NO: 417306 - DNA, 33 bp, Homo sapien
ccgggctggctttttacaaacttgtagtaagat

SEQ ID NO: 417307 - DNA, 33 bp, Homo sapien
gatttacacatttgatgaaagcatgcatcccaa

SEQ ID NO: 417308 - DNA, 33 bp, Homo sapien
gatttacacatttgattaaagcatgcatcccaa

SEQ ID NO: 417309 - DNA, 33 bp, Homo sapien
attaaatatccttggactcaataaacggtttat

SEQ ID NO: 417310 - DNA, 33 bp, Homo sapien
attaaatatccttggattcaataaacggtttat

SEQ ID NO: 417311 - DNA, 33 bp, Homo sapien
gcagatataatgactcgaatacctgtagccatc

SEQ ID NO: 417312 - DNA, 33 bp, Homo sapien
gcagatataatgactctaatacctgtagccatc

SEQ ID NO: 417313 - DNA, 33 bp, Homo sapien
gtggacacaacccagacggtgagatccccctga

SEQ ID NO: 417314 - DNA, 33 bp, Homo sapien
gtggacacaacccagatggtgagatccccctga

SEQ ID NO: 417315 - DNA, 33 bp, Homo sapien
gatcctgcccactctacaaatgaggacaccagg

SEQ ID NO: 417316 - DNA, 33 bp, Homo sapien
gatcctgcccactctataaatgaggacaccagg

SEQ ID NO: 417317 - DNA, 33 bp, Homo sapien
ttgcaaaccaatcctccaagacttctcctgcag

SEQ ID NO: 417318 - DNA, 33 bp, Homo sapien
ttgcaaaccaatcctctaagacttctcctgcag

SEQ ID NO: 417319 - DNA, 33 bp, Homo sapien
aacaatgtgtcttggaagttgggccaaacgctg

SEQ ID NO: 417320 - DNA, 33 bp, Homo sapien
aacaatgtgtcttggaggttgggccaaacgctg

SEQ ID NO: 417321 - DNA, 33 bp, Homo sapien
gacgttccgcctgccacgaatctcctgccggag

SEQ ID NO: 417322 - DNA, 33 bp, Homo sapien
gacgttccgcctgccatgaatctcctgccggag

SEQ ID NO: 417323 - DNA, 33 bp, Homo sapien
atagccacttgggaagacagcttggcagtttct

SEQ ID NO: 417324 - DNA, 33 bp, Homo sapien
atagccacttgggaagccagcttggcagtttct

SEQ ID NO: 417325 - DNA, 33 bp, Homo sapien
gttcttcaatttgagacgaggccagactggatt

SEQ ID NO: 417326 - DNA, 33 bp, Homo sapien
gttcttcaatttgagatgaggccagactggatt

SEQ ID NO: 417327 - DNA, 33 bp, Homo sapien
aggaaaggaaaggaacaaccacaagcatccaca

SEQ ID NO: 417328 - DNA, 33 bp, Homo sapien
aggaaaggaaaggaaccaccacaagcatccaca

SEQ ID NO: 417329 - DNA, 33 bp, Homo sapien
tgtgtgaccttgaacacaagtaggagaatcctc

SEQ ID NO: 417330 - DNA, 33 bp, Homo sapien
tgtgtgaccttgaacataagtaggagaatcctc

SEQ ID NO: 417331 - DNA, 33 bp, Homo sapien
ggtcagtggtcattggaattcaagctaagtctt

SEQ ID NO: 417332 - DNA, 33 bp, Homo sapien
ggtcagtggtcattgggattcaagctaagtctt

SEQ ID NO: 417333 - DNA, 33 bp, Homo sapien
ccgccctcggttccccacatctgaggtctatag

SEQ ID NO: 417334 - DNA, 33 bp, Homo sapien
ccgccctcggttccccgcatctgaggtctatag

SEQ ID NO: 417335 - DNA, 33 bp, Homo sapien
tctagcccatctctgagaactgatactgggttt

SEQ ID NO: 417336 - DNA, 33 bp, Homo sapien
tctagcccatctctgataactgatactgggttt

SEQ ID NO: 417337 - DNA, 33 bp, Homo sapien
ggcccagagagctcccgctttccttctactgtg

SEQ ID NO: 417338 - DNA, 33 bp, Homo sapien
ggcccagagagctccctctttccttctactgtg

SEQ ID NO: 417339 - DNA, 33 bp, Homo sapien
cacaaatgcttctacactcctcacttcaaggaa

SEQ ID NO: 417340 - DNA, 33 bp, Homo sapien
cacaaatgcttctacattcctcacttcaaggaa

SEQ ID NO: 417341 - DNA, 33 bp, Homo sapien
acactgcatcctcagaataacacacaaaatgtg

SEQ ID NO: 417342 - DNA, 33 bp, Homo sapien
acactgcatcctcagagtaacacacaaaatgtg

SEQ ID NO: 417343 - DNA, 33 bp, Homo sapien
tgctagatcaaaagtaagtgcttctaaaaggtc

SEQ ID NO: 417344 - DNA, 33 bp, Homo sapien
tgctagatcaaaagtaggtgcttctaaaaggtc

SEQ ID NO: 417345 - DNA, 33 bp, Homo sapien
tgaaggaggagaagaaaggctactttggagaaa

SEQ ID NO: 417346 - DNA, 33 bp, Homo sapien
tgaaggaggagaagaagggctactttggagaaa

SEQ ID NO: 417347 - DNA, 33 bp, Homo sapien
tagtttctctgatccacgttttataaggtcaaa

SEQ ID NO: 417348 - DNA, 33 bp, Homo sapien
tagtttctctgatccaggttttataaggtcaaa

SEQ ID NO: 417349 - DNA, 33 bp, Homo sapien
ggctcctggctgtcccaccgagtgacagtaatc

SEQ ID NO: 417350 - DNA, 33 bp, Homo sapien
ggctcctggctgtcccgccgagtgacagtaatc

SEQ ID NO: 417351 - DNA, 33 bp, Homo sapien
tcaaagcaaccctaggaatgaggtattgttgtg

SEQ ID NO: 417352 - DNA, 33 bp, Homo sapien
tcaaagcaaccctagggatgaggtattgttgtg

SEQ ID NO: 417353 - DNA, 33 bp, Homo sapien
tattgaatgaaagacacgacagtaacattgttt

SEQ ID NO: 417354 - DNA, 33 bp, Homo sapien
tattgaatgaaagacatgacagtaacattgttt

SEQ ID NO: 417355 - DNA, 33 bp, Homo sapien
gtgtgccacgactcccagaaaggtggcactgct

SEQ ID NO: 417356 - DNA, 33 bp, Homo sapien
gtgtgccacgactcccggaaaggtggcactgct

SEQ ID NO: 417357 - DNA, 33 bp, Homo sapien
tcgaggagttggttcaatcttggtttgggagtt

SEQ ID NO: 417358 - DNA, 33 bp, Homo sapien
tcgaggagttggttcattcttggtttgggagtt

SEQ ID NO: 417359 - DNA, 33 bp, Homo sapien
ataagtccagggctccaactctcaaggagctag

SEQ ID NO: 417360 - DNA, 33 bp, Homo sapien
ataagtccagggctcccactctcaaggagctag

SEQ ID NO: 417361 - DNA, 33 bp, Homo sapien
cacacactgcagcgcaaggcggtaggcaccttt

SEQ ID NO: 417362 - DNA, 33 bp, Homo sapien
cacacactgcagcgcagggcggtaggcaccttt

SEQ ID NO: 417363 - DNA, 33 bp, Homo sapien
aggagactcatttaaccacttgaaagctgtata

SEQ ID NO: 417364 - DNA, 33 bp, Homo sapien
aggagactcatttaactacttgaaagctgtata

SEQ ID NO: 417365 - DNA, 33 bp, Homo sapien
ggtggccggatacaagcattcatggggagtcag

SEQ ID NO: 417366 - DNA, 33 bp, Homo sapien
ggtggccggatacaagtattcatggggagtcag

SEQ ID NO: 417367 - DNA, 33 bp, Homo sapien
taggatttttacaatacgtgaaacgaattctat

SEQ ID NO: 417368 - DNA, 33 bp, Homo sapien
taggatttttacaatatgtgaaacgaattctat

SEQ ID NO: 417369 - DNA, 33 bp, Homo sapien
gtttctattattcccaccttgtgcagagattca

SEQ ID NO: 417370 - DNA, 33 bp, Homo sapien
gtttctattattcccatcttgtgcagagattca

SEQ ID NO: 417371 - DNA, 33 bp, Homo sapien
ctgggaatgcgcttaacgtaaggaaagcctcgg

SEQ ID NO: 417372 - DNA, 33 bp, Homo sapien
ctgggaatgcgcttaatgtaaggaaagcctcgg

SEQ ID NO: 417373 - DNA, 33 bp, Homo sapien
gccacacagcctttaacggtgaatcaggagctg

SEQ ID NO: 417374 - DNA, 33 bp, Homo sapien
gccacacagcctttaatggtgaatcaggagctg

SEQ ID NO: 417375 - DNA, 33 bp, Homo sapien
gtgaacactggagtcacactgttgggtttggat

SEQ ID NO: 417376 - DNA, 33 bp, Homo sapien
gtgaacactggagtcagactgttgggtttggat

SEQ ID NO: 417377 - DNA, 33 bp, Homo sapien
aagcatttacatagagcctaaccatttacaaaa

SEQ ID NO: 417378 - DNA, 33 bp, Homo sapien
aagcatttacatagagtctaaccatttacaaaa

SEQ ID NO: 417379 - DNA, 33 bp, Homo sapien
ctaaatgaacttttgaggaggcctttattctga

SEQ ID NO: 417380 - DNA, 33 bp, Homo sapien
ctaaatgaacttttgatgaggcctttattctga

SEQ ID NO: 417381 - DNA, 33 bp, Homo sapien
agtcaaaacagtggctcacttgaaccaggggag

SEQ ID NO: 417382 - DNA, 33 bp, Homo sapien
agtcaaaacagtggctgacttgaaccaggggag

SEQ ID NO: 417383 - DNA, 33 bp, Homo sapien
ggtggtagagaagataaagaattctgtagatga

SEQ ID NO: 417384 - DNA, 33 bp, Homo sapien
ggtggtagagaagatagagaattctgtagatga

SEQ ID NO: 417385 - DNA, 33 bp, Homo sapien
gacttgaacacttaacagggggtagggtcatct

SEQ ID NO: 417386 - DNA, 33 bp, Homo sapien
gacttgaacacttaacggggggtagggtcatct

SEQ ID NO: 417387 - DNA, 33 bp, Homo sapien
taaaaccgtactctgccaagtccaggcggatct

SEQ ID NO: 417388 - DNA, 33 bp, Homo sapien
taaaaccgtactctgctaagtccaggcggatct

SEQ ID NO: 417389 - DNA, 33 bp, Homo sapien
tctaccttttagagcaccttggaaaataataag

SEQ ID NO: 417390 - DNA, 33 bp, Homo sapien
tctaccttttagagcagcttggaaaataataag

SEQ ID NO: 417391 - DNA, 33 bp, Homo sapien
cccactgcagttcagacgcaatatgtgttaaaa

SEQ ID NO: 417392 - DNA, 33 bp, Homo sapien
cccactgcagttcagatgcaatatgtgttaaaa

SEQ ID NO: 417393 - DNA, 33 bp, Homo sapien
accgcaaacacactacagaggtcggcatgtgac

SEQ ID NO: 417394 - DNA, 33 bp, Homo sapien
accgcaaacacactacggaggtcggcatgtgac

SEQ ID NO: 417395 - DNA, 33 bp, Homo sapien
cactgcacccagttaccaaagctgactcatata

SEQ ID NO: 417396 - DNA, 33 bp, Homo sapien
cactgcacccagttactaaagctgactcatata

SEQ ID NO: 417397 - DNA, 33 bp, Homo sapien
acaggacctggggaaacctggctgaggacagcc

SEQ ID NO: 417398 - DNA, 33 bp, Homo sapien
acaggacctggggaaagctggctgaggacagcc

SEQ ID NO: 417399 - DNA, 33 bp, Homo sapien
cagcaggagagaaagacaaggaataggaaggga

SEQ ID NO: 417400 - DNA, 33 bp, Homo sapien
cagcaggagagaaagagaaggaataggaaggga

SEQ ID NO: 417401 - DNA, 33 bp, Homo sapien
ggaatgtcactgatctaaaacctgtctgtagtg

SEQ ID NO: 417402 - DNA, 33 bp, Homo sapien
ggaatgtcactgatctgaaacctgtctgtagtg

SEQ ID NO: 417403 - DNA, 33 bp, Homo sapien
gatgagactggaatccacctaaggttgaaatct

SEQ ID NO: 417404 - DNA, 33 bp, Homo sapien
gatgagactggaatccgcctaaggttgaaatct

SEQ ID NO: 417405 - DNA, 33 bp, Homo sapien
attcttatcatgcgcacagttgaggctccatgt

SEQ ID NO: 417406 - DNA, 33 bp, Homo sapien
attcttatcatgcgcagagttgaggctccatgt

SEQ ID NO: 417407 - DNA, 33 bp, Homo sapien
agccctggaaagaatgcaagaggcaaccctaag

SEQ ID NO: 417408 - DNA, 33 bp, Homo sapien
agccctggaaagaatgtaagaggcaaccctaag

SEQ ID NO: 417409 - DNA, 33 bp, Homo sapien
gcagccagtgcctttcacgggtccagttgatcc

SEQ ID NO: 417410 - DNA, 33 bp, Homo sapien
gcagccagtgcctttcgcgggtccagttgatcc

SEQ ID NO: 417411 - DNA, 33 bp, Homo sapien
ctgtgtaacaaatgaccacagatttcatggttt

SEQ ID NO: 417412 - DNA, 33 bp, Homo sapien
ctgtgtaacaaatgactacagatttcatggttt

SEQ ID NO: 417413 - DNA, 33 bp, Homo sapien
tccgaattttccttccaattccaagaaatcaga

SEQ ID NO: 417414 - DNA, 33 bp, Homo sapien
tccgaattttccttccgattccaagaaatcaga

SEQ ID NO: 417415 - DNA, 33 bp, Homo sapien
aatgaatgaccaaatccacatggagagttgaaa

SEQ ID NO: 417416 - DNA, 33 bp, Homo sapien
aatgaatgaccaaatctacatggagagttgaaa

SEQ ID NO: 417417 - DNA, 33 bp, Homo sapien
atggaaaccgcttgagcatttatttatttattt

SEQ ID NO: 417418 - DNA, 33 bp, Homo sapien
atggaaaccgcttgagtatttatttatttattt

SEQ ID NO: 417419 - DNA, 33 bp, Homo sapien
aggcagaaagagcaaacttagggcgccctgtgc

SEQ ID NO: 417420 - DNA, 33 bp, Homo sapien
aggcagaaagagcaaagttagggcgccctgtgc

SEQ ID NO: 417421 - DNA, 33 bp, Homo sapien
acagcttataggcttgaagggactctaccaaca

SEQ ID NO: 417422 - DNA, 33 bp, Homo sapien
acagcttataggcttggagggactctaccaaca

SEQ ID NO: 417423 - DNA, 33 bp, Homo sapien
tcacccatagctacccactcttcctctatttct

SEQ ID NO: 417424 - DNA, 33 bp, Homo sapien
tcacccatagctacccgctcttcctctatttct

SEQ ID NO: 417425 - DNA, 33 bp, Homo sapien
tgtcaggctacagcccagatggttggctgagca

SEQ ID NO: 417426 - DNA, 33 bp, Homo sapien
tgtcaggctacagcccggatggttggctgagca

SEQ ID NO: 417427 - DNA, 33 bp, Homo sapien
cctcggtctcctacctaaaatagcatttctgtg

SEQ ID NO: 417428 - DNA, 33 bp, Homo sapien
cctcggtctcctacctgaaatagcatttctgtg

SEQ ID NO: 417429 - DNA, 33 bp, Homo sapien
atcaattaaggaagaactggcattttaacaata

SEQ ID NO: 417430 - DNA, 33 bp, Homo sapien
atcaattaaggaagaattggcattttaacaata

SEQ ID NO: 417431 - DNA, 33 bp, Homo sapien
aaaaggacctttaaaacggagatataccatcta

SEQ ID NO: 417432 - DNA, 33 bp, Homo sapien
aaaaggacctttaaaatggagatataccatcta

SEQ ID NO: 417433 - DNA, 33 bp, Homo sapien
tcctaccgacattacaatgacaaggaacacagg

SEQ ID NO: 417434 - DNA, 33 bp, Homo sapien
tcctaccgacattacagtgacaaggaacacagg

SEQ ID NO: 417435 - DNA, 33 bp, Homo sapien
atatctcaagtaggtaaaagctggagtagagtc

SEQ ID NO: 417436 - DNA, 33 bp, Homo sapien
atatctcaagtaggtagaagctggagtagagtc

SEQ ID NO: 417437 - DNA, 33 bp, Homo sapien
taacaaaggaccacaaatgaggtgactcaaaac

SEQ ID NO: 417438 - DNA, 33 bp, Homo sapien
taacaaaggaccacaagtgaggtgactcaaaac

SEQ ID NO: 417439 - DNA, 33 bp, Homo sapien
aacaagcaggcgtcacaattgcaccgccctcca

SEQ ID NO: 417440 - DNA, 33 bp, Homo sapien
aacaagcaggcgtcacgattgcaccgccctcca

SEQ ID NO: 417441 - DNA, 33 bp, Homo sapien
cttttacaaggaaacaagctcagaggccttgag

SEQ ID NO: 417442 - DNA, 33 bp, Homo sapien
cttttacaaggaaacaggctcagaggccttgag

SEQ ID NO: 417443 - DNA, 33 bp, Homo sapien
cccacacatccaagacaggatctggcgcacagc

SEQ ID NO: 417444 - DNA, 33 bp, Homo sapien
cccacacatccaagacgggatctggcgcacagc

SEQ ID NO: 417445 - DNA, 33 bp, Homo sapien
ggtctcctggcgtttacgtccgggtctagagat

SEQ ID NO: 417446 - DNA, 33 bp, Homo sapien
ggtctcctggcgtttatgtccgggtctagagat

SEQ ID NO: 417447 - DNA, 33 bp, Homo sapien
ccagccaccaggttgacgcttctggacgtctgg

SEQ ID NO: 417448 - DNA, 33 bp, Homo sapien
ccagccaccaggttgatgcttctggacgtctgg

SEQ ID NO: 417449 - DNA, 33 bp, Homo sapien
gccatcacctagattccaccactaacaccaagc

SEQ ID NO: 417450 - DNA, 33 bp, Homo sapien
gccatcacctagattctaccactaacaccaagc

SEQ ID NO: 417451 - DNA, 33 bp, Homo sapien
aaacgagggcgttaaactgtatgttataaataa

SEQ ID NO: 417452 - DNA, 33 bp, Homo sapien
aaacgagggcgttaaattgtatgttataaataa

SEQ ID NO: 417453 - DNA, 33 bp, Homo sapien
ctttgagattgtatcacgtcagagaaagttgcg

SEQ ID NO: 417454 - DNA, 33 bp, Homo sapien
ctttgagattgtatcatgtcagagaaagttgcg

SEQ ID NO: 417455 - DNA, 33 bp, Homo sapien
aaagacccgatgctctaactatgggaacctgtg

SEQ ID NO: 417456 - DNA, 33 bp, Homo sapien
aaagacccgatgctctgactatgggaacctgtg

SEQ ID NO: 417457 - DNA, 33 bp, Homo sapien
ttcaatgtaatcactcagagccacatgaccagg

SEQ ID NO: 417458 - DNA, 33 bp, Homo sapien
ttcaatgtaatcactcggagccacatgaccagg

SEQ ID NO: 417459 - DNA, 33 bp, Homo sapien
tctgagcacagtcacgaaggcatgcgcactttc

SEQ ID NO: 417460 - DNA, 33 bp, Homo sapien
tctgagcacagtcacgcaggcatgcgcactttc

SEQ ID NO: 417461 - DNA, 33 bp, Homo sapien
ccagcaccggcagtcaagaggacgcaggaaagc

SEQ ID NO: 417462 - DNA, 33 bp, Homo sapien
ccagcaccggcagtcacgaggacgcaggaaagc

SEQ ID NO: 417463 - DNA, 33 bp, Homo sapien
ggagcggtcgcagggaagagttgcaaagaggca

SEQ ID NO: 417464 - DNA, 33 bp, Homo sapien
ggagcggtcgcagggaggagttgcaaagaggca

SEQ ID NO: 417465 - DNA, 33 bp, Homo sapien
agcaaaaccattcaggacacacaagggggagac

SEQ ID NO: 417466 - DNA, 33 bp, Homo sapien
agcaaaaccattcagggcacacaagggggagac

SEQ ID NO: 417467 - DNA, 33 bp, Homo sapien
caggcagcttccgaatcagggtagagaaaagtc

SEQ ID NO: 417468 - DNA, 33 bp, Homo sapien
caggcagcttccgaatgagggtagagaaaagtc

SEQ ID NO: 417469 - DNA, 33 bp, Homo sapien
ccctctaaatgaaccaactcgtagtcgggacag

SEQ ID NO: 417470 - DNA, 33 bp, Homo sapien
ccctctaaatgaaccagctcgtagtcgggacag

SEQ ID NO: 417471 - DNA, 33 bp, Homo sapien
gctgtgcctttggaaactgctggcccgagctag

SEQ ID NO: 417472 - DNA, 33 bp, Homo sapien
gctgtgcctttggaaattgctggcccgagctag

SEQ ID NO: 417473 - DNA, 33 bp, Homo sapien
ttctcttcattaaatcacaggtttcagccaagt

SEQ ID NO: 417474 - DNA, 33 bp, Homo sapien
ttctcttcattaaatcgcaggtttcagccaagt

SEQ ID NO: 417475 - DNA, 33 bp, Homo sapien
gcattccttccagaaacggagcactggcaggcc

SEQ ID NO: 417476 - DNA, 33 bp, Homo sapien
gcattccttccagaaatggagcactggcaggcc

SEQ ID NO: 417477 - DNA, 33 bp, Homo sapien
gaaaacttcaaatgcaccaggggggtcagcacc

SEQ ID NO: 417478 - DNA, 33 bp, Homo sapien
gaaaacttcaaatgcatcaggggggtcagcacc

SEQ ID NO: 417479 - DNA, 33 bp, Homo sapien
atccacagtacctctgaacaaggaggaaaagaa

SEQ ID NO: 417480 - DNA, 33 bp, Homo sapien
atccacagtacctctggacaaggaggaaaagaa

SEQ ID NO: 417481 - DNA, 33 bp, Homo sapien
cacattcctctctaaacaggcccaggtccaggc

SEQ ID NO: 417482 - DNA, 33 bp, Homo sapien
cacattcctctctaaataggcccaggtccaggc

SEQ ID NO: 417483 - DNA, 33 bp, Homo sapien
agtacagaaagatttacgtacgaggacatttgc

SEQ ID NO: 417484 - DNA, 33 bp, Homo sapien
agtacagaaagatttatgtacgaggacatttgc

SEQ ID NO: 417485 - DNA, 33 bp, Homo sapien
gtgtccatcttccccaaggaaaccatgtcccgg

SEQ ID NO: 417486 - DNA, 33 bp, Homo sapien
gtgtccatcttccccagggaaaccatgtcccgg

SEQ ID NO: 417487 - DNA, 33 bp, Homo sapien
aaacacccagagggatcatagagccaggcagta

SEQ ID NO: 417488 - DNA, 33 bp, Homo sapien
aaacacccagagggattatagagccaggcagta

SEQ ID NO: 417489 - DNA, 33 bp, Homo sapien
ccaggcccacgtgcacaagcggatcattctaga

SEQ ID NO: 417490 - DNA, 33 bp, Homo sapien
ccaggcccacgtgcaccagcggatcattctaga

SEQ ID NO: 417491 - DNA, 33 bp, Homo sapien
gcatccttccgtgcggccaagttggagaacaga

SEQ ID NO: 417492 - DNA, 33 bp, Homo sapien
gcatccttccgtgcggtcaagttggagaacaga

SEQ ID NO: 417493 - DNA, 33 bp, Homo sapien
tattgtatttttccacacacacaaggttcctag

SEQ ID NO: 417494 - DNA, 33 bp, Homo sapien
tattgtatttttccactcacacaaggttcctag

SEQ ID NO: 417495 - DNA, 33 bp, Homo sapien
cacgttggagccggggcatgggagaaaaccatc

SEQ ID NO: 417496 - DNA, 33 bp, Homo sapien
cacgttggagccggggtatgggagaaaaccatc

SEQ ID NO: 417497 - DNA, 33 bp, Homo sapien
catggctaccatcagcacacctgggtcaagctc

SEQ ID NO: 417498 - DNA, 33 bp, Homo sapien
catggctaccatcagcgcacctgggtcaagctc

SEQ ID NO: 417499 - DNA, 33 bp, Homo sapien
ccttccaaaatggcccacagaggttaagatata

SEQ ID NO: 417500 - DNA, 33 bp, Homo sapien
ccttccaaaatggcccgcagaggttaagatata

SEQ ID NO: 417501 - DNA, 33 bp, Homo sapien
cccctcccctcgtcgacctgctcagctgtctgc

SEQ ID NO: 417502 - DNA, 33 bp, Homo sapien
cccctcccctcgtcgagctgctcagctgtctgc

SEQ ID NO: 417503 - DNA, 33 bp, Homo sapien
aagaacatcccagaaacaaaatcaaaagtaggc

SEQ ID NO: 417504 - DNA, 33 bp, Homo sapien
aagaacatcccagaaataaaatcaaaagtaggc

SEQ ID NO: 417505 - DNA, 33 bp, Homo sapien
ttaaaatgttccagaacgcagagggtaaaagaa

SEQ ID NO: 417506 - DNA, 33 bp, Homo sapien
ttaaaatgttccagaaggcagagggtaaaagaa

SEQ ID NO: 417507 - DNA, 33 bp, Homo sapien
cttattttgctccttacgcctccgcaccgtcca

SEQ ID NO: 417508 - DNA, 33 bp, Homo sapien
cttattttgctccttatgcctccgcaccgtcca

SEQ ID NO: 417509 - DNA, 33 bp, Homo sapien
aaatgatgcatagtaacctctatgatgaacaaa

SEQ ID NO: 417510 - DNA, 33 bp, Homo sapien
aaatgatgcatagtaatctctatgatgaacaaa

SEQ ID NO: 417511 - DNA, 33 bp, Homo sapien
atacatcccatgaagcacataaagcttcgagcc

SEQ ID NO: 417512 - DNA, 33 bp, Homo sapien
atacatcccatgaagcgcataaagcttcgagcc

SEQ ID NO: 417513 - DNA, 33 bp, Homo sapien
acccagcacaagtggacgagatgggatgcaggg

SEQ ID NO: 417514 - DNA, 33 bp, Homo sapien
acccagcacaagtggatgagatgggatgcaggg

SEQ ID NO: 417515 - DNA, 33 bp, Homo sapien
ggctctcgcaggttgcaaaatggggacatcacc

SEQ ID NO: 417516 - DNA, 33 bp, Homo sapien
ggctctcgcaggttgcgaaatggggacatcacc

SEQ ID NO: 417517 - DNA, 33 bp, Homo sapien
atggaagcccctaagaagtccgtgctttaggga

SEQ ID NO: 417518 - DNA, 33 bp, Homo sapien
atggaagcccctaagaggtccgtgctttaggga

SEQ ID NO: 417519 - DNA, 33 bp, Homo sapien
atgcctgctggaagccaacgtgcacgaaagagt

SEQ ID NO: 417520 - DNA, 33 bp, Homo sapien
atgcctgctggaagccgacgtgcacgaaagagt

SEQ ID NO: 417521 - DNA, 33 bp, Homo sapien
gaaggaggaggctgtaggaggatggaggcagag

SEQ ID NO: 417522 - DNA, 33 bp, Homo sapien
gaaggaggaggctgtatgaggatggaggcagag

SEQ ID NO: 417523 - DNA, 33 bp, Homo sapien
tgctctgaagaaagccaggctggggtgagcgtg

SEQ ID NO: 417524 - DNA, 33 bp, Homo sapien
tgctctgaagaaagccgggctggggtgagcgtg

SEQ ID NO: 417525 - DNA, 33 bp, Homo sapien
tggaactgtgaaaatacgtttgtgttgttttaa

SEQ ID NO: 417526 - DNA, 33 bp, Homo sapien
tggaactgtgaaaataggtttgtgttgttttaa

SEQ ID NO: 417527 - DNA, 33 bp, Homo sapien
aaactcaatgaatgcacactgtattagtccatt

SEQ ID NO: 417528 - DNA, 33 bp, Homo sapien
aaactcaatgaatgcatactgtattagtccatt

SEQ ID NO: 417529 - DNA, 33 bp, Homo sapien
tgggaaatttcagcacagaaatggaaactataa

SEQ ID NO: 417530 - DNA, 33 bp, Homo sapien
tgggaaatttcagcacggaaatggaaactataa

SEQ ID NO: 417531 - DNA, 33 bp, Homo sapien
aacacctgctctgatacgaggggacgtggacca

SEQ ID NO: 417532 - DNA, 33 bp, Homo sapien
aacacctgctctgatatgaggggacgtggacca

SEQ ID NO: 417533 - DNA, 33 bp, Homo sapien
gtatctcaacaaggagaccgtttagtaactcac

SEQ ID NO: 417534 - DNA, 33 bp, Homo sapien
gtatctcaacaaggagcccgtttagtaactcac

SEQ ID NO: 417535 - DNA, 33 bp, Homo sapien
tgtgcatcagagacaacaggaacttttagaaac

SEQ ID NO: 417536 - DNA, 33 bp, Homo sapien
tgtgcatcagagacaagaggaacttttagaaac

SEQ ID NO: 417537 - DNA, 33 bp, Homo sapien
ggcccagcgctctgaacgccacttttcctggct

SEQ ID NO: 417538 - DNA, 33 bp, Homo sapien
ggcccagcgctctgaatgccacttttcctggct

SEQ ID NO: 417539 - DNA, 33 bp, Homo sapien
attataaaaataataacaggcacaatcccctcc

SEQ ID NO: 417540 - DNA, 33 bp, Homo sapien
attataaaaataataataggcacaatcccctcc

SEQ ID NO: 417541 - DNA, 33 bp, Homo sapien
gtccaaatccggaagaaaataatatgctgctta

SEQ ID NO: 417542 - DNA, 33 bp, Homo sapien
gtccaaatccggaagagaataatatgctgctta

SEQ ID NO: 417543 - DNA, 33 bp, Homo sapien
cactcctgtacctcaaaacttgcataggaaaac

SEQ ID NO: 417544 - DNA, 33 bp, Homo sapien
cactcctgtacctcaacacttgcataggaaaac

SEQ ID NO: 417545 - DNA, 33 bp, Homo sapien
ctgttccaagttcccaagttaggacctctgctg

SEQ ID NO: 417546 - DNA, 33 bp, Homo sapien
ctgttccaagttcccaggttaggacctctgctg

SEQ ID NO: 417547 - DNA, 33 bp, Homo sapien
aaacagagaaacagtaagcggagtggtgtgctg

SEQ ID NO: 417548 - DNA, 33 bp, Homo sapien
aaacagagaaacagtaggcggagtggtgtgctg

SEQ ID NO: 417549 - DNA, 33 bp, Homo sapien
ccttcccaaccttcataagacaatacctgttga

SEQ ID NO: 417550 - DNA, 33 bp, Homo sapien
ccttcccaaccttcatgagacaatacctgttga

SEQ ID NO: 417551 - DNA, 33 bp, Homo sapien
aaaaatctattgttagaaattcttcactttggg

SEQ ID NO: 417552 - DNA, 33 bp, Homo sapien
aaaaatctattgttaggaattcttcactttggg

SEQ ID NO: 417553 - DNA, 33 bp, Homo sapien
ccagtggcagtctgcacgatgttttccagtaga

SEQ ID NO: 417554 - DNA, 33 bp, Homo sapien
ccagtggcagtctgcatgatgttttccagtaga

SEQ ID NO: 417555 - DNA, 33 bp, Homo sapien
ctagcacggtgttgaaggtgtagcaggccctcc

SEQ ID NO: 417556 - DNA, 33 bp, Homo sapien
ctagcacggtgttgaatgtgtagcaggccctcc

SEQ ID NO: 417557 - DNA, 33 bp, Homo sapien
ctgctcctggccagaactgttcacttctaaatc

SEQ ID NO: 417558 - DNA, 33 bp, Homo sapien
ctgctcctggccagaattgttcacttctaaatc

SEQ ID NO: 417559 - DNA, 33 bp, Homo sapien
gacaccagtcatatccaatttagggcctcctgt

SEQ ID NO: 417560 - DNA, 33 bp, Homo sapien
gacaccagtcatatccgatttagggcctcctgt

SEQ ID NO: 417561 - DNA, 33 bp, Homo sapien
acagccagagaggaccagcctttaatgagggcc

SEQ ID NO: 417562 - DNA, 33 bp, Homo sapien
acagccagagaggaccggcctttaatgagggcc

SEQ ID NO: 417563 - DNA, 33 bp, Homo sapien
aaaaattaatacagcccaagttacaaatattaa

SEQ ID NO: 417564 - DNA, 33 bp, Homo sapien
aaaaattaatacagcctaagttacaaatattaa

SEQ ID NO: 417565 - DNA, 33 bp, Homo sapien
ggacatctgtagaaaccgctcgtgtctgtgggt

SEQ ID NO: 417566 - DNA, 33 bp, Homo sapien
ggacatctgtagaaactgctcgtgtctgtgggt

SEQ ID NO: 417567 - DNA, 33 bp, Homo sapien
gccaggagagcacccacgaaaagtagagaagct

SEQ ID NO: 417568 - DNA, 33 bp, Homo sapien
gccaggagagcacccatgaaaagtagagaagct

SEQ ID NO: 417569 - DNA, 33 bp, Homo sapien
cagagaaccagatggcaaaaagtcccaggaaag

SEQ ID NO: 417570 - DNA, 33 bp, Homo sapien
cagagaaccagatggccaaaagtcccaggaaag

SEQ ID NO: 417571 - DNA, 33 bp, Homo sapien
gaccatgctggagatacccaatataggacttgt

SEQ ID NO: 417572 - DNA, 33 bp, Homo sapien
gaccatgctggagatagccaatataggacttgt

SEQ ID NO: 417573 - DNA, 33 bp, Homo sapien
ttagctttctgaactcaatgttatttcaactgc

SEQ ID NO: 417574 - DNA, 33 bp, Homo sapien
ttagctttctgaactctatgttatttcaactgc

SEQ ID NO: 417575 - DNA, 33 bp, Homo sapien
ctcttctggttttctacaaggcaagggaagagg

SEQ ID NO: 417576 - DNA, 33 bp, Homo sapien
ctcttctggttttctataaggcaagggaagagg

SEQ ID NO: 417577 - DNA, 33 bp, Homo sapien
caaaggattcaggctacgcaaacagacaacgtt

SEQ ID NO: 417578 - DNA, 33 bp, Homo sapien
caaaggattcaggctatgcaaacagacaacgtt

SEQ ID NO: 417579 - DNA, 33 bp, Homo sapien
tgctctatttcacacacctctgacaatttgacc

SEQ ID NO: 417580 - DNA, 33 bp, Homo sapien
tgctctatttcacacatctctgacaatttgacc

SEQ ID NO: 417581 - DNA, 33 bp, Homo sapien
gcattccttacattgaaactttgtgtctttcat

SEQ ID NO: 417582 - DNA, 33 bp, Homo sapien
gcattccttacattgatactttgtgtctttcat

SEQ ID NO: 417583 - DNA, 33 bp, Homo sapien
ctgttgttggatggaacggtatataaatgccaa

SEQ ID NO: 417584 - DNA, 33 bp, Homo sapien
ctgttgttggatggaatggtatataaatgccaa

SEQ ID NO: 417585 - DNA, 33 bp, Homo sapien
aatggcgtgtacattagaacccaaatagagaag

SEQ ID NO: 417586 - DNA, 33 bp, Homo sapien
aatggcgtgtacattataacccaaatagagaag

SEQ ID NO: 417587 - DNA, 33 bp, Homo sapien
aggtaggagagttctcactcactcagcaaaggg

SEQ ID NO: 417588 - DNA, 33 bp, Homo sapien
aggtaggagagttctcgctcactcagcaaaggg

SEQ ID NO: 417589 - DNA, 33 bp, Homo sapien
tgctgtttttcactcacagagaatggggtggcg

SEQ ID NO: 417590 - DNA, 33 bp, Homo sapien
tgctgtttttcactcatagagaatggggtggcg

SEQ ID NO: 417591 - DNA, 33 bp, Homo sapien
ttcagggagagctccacggcgctttccaggaac

SEQ ID NO: 417592 - DNA, 33 bp, Homo sapien
ttcagggagagctccatggcgctttccaggaac

SEQ ID NO: 417593 - DNA, 33 bp, Homo sapien
aggcagccacccttccccgcaaggacagcggct

SEQ ID NO: 417594 - DNA, 33 bp, Homo sapien
aggcagccacccttcctcgcaaggacagcggct

SEQ ID NO: 417595 - DNA, 33 bp, Homo sapien
ctagcactatgcccggaacatggcaggtgctcc

SEQ ID NO: 417596 - DNA, 33 bp, Homo sapien
ctagcactatgcccggcacatggcaggtgctcc

SEQ ID NO: 417597 - DNA, 33 bp, Homo sapien
tgtggtaaatagattacggcacagctgaaatac

SEQ ID NO: 417598 - DNA, 33 bp, Homo sapien
tgtggtaaatagattatggcacagctgaaatac

SEQ ID NO: 417599 - DNA, 33 bp, Homo sapien
ggttagttaaacatgcaagctttaggtggctgc

SEQ ID NO: 417600 - DNA, 33 bp, Homo sapien
ggttagttaaacatgcgagctttaggtggctgc

SEQ ID NO: 417601 - DNA, 33 bp, Homo sapien
gcttgggtgaacttcccaggttaacagcactct

SEQ ID NO: 417602 - DNA, 33 bp, Homo sapien
gcttgggtgaacttccgaggttaacagcactct

SEQ ID NO: 417603 - DNA, 33 bp, Homo sapien
tgaaagaagccagaggcagctcaatgcacaaaa

SEQ ID NO: 417604 - DNA, 33 bp, Homo sapien
tgaaagaagccagaggtagctcaatgcacaaaa

SEQ ID NO: 417605 - DNA, 33 bp, Homo sapien
atttatgcacctccaaacatctcttcacaaatt

SEQ ID NO: 417606 - DNA, 33 bp, Homo sapien
atttatgcacctccaagcatctcttcacaaatt

SEQ ID NO: 417607 - DNA, 33 bp, Homo sapien
aacaaattgtcaccaactgagtggcttcaaaga

SEQ ID NO: 417608 - DNA, 33 bp, Homo sapien
aacaaattgtcaccaagtgagtggcttcaaaga

SEQ ID NO: 417609 - DNA, 33 bp, Homo sapien
atgtcaataagcaagaagactccctgaggctga

SEQ ID NO: 417610 - DNA, 33 bp, Homo sapien
atgtcaataagcaagatgactccctgaggctga

SEQ ID NO: 417611 - DNA, 33 bp, Homo sapien
cagaaaacctactatcccaagccacaacttcac

SEQ ID NO: 417612 - DNA, 33 bp, Homo sapien
cagaaaacctactatctcaagccacaacttcac

SEQ ID NO: 417613 - DNA, 33 bp, Homo sapien
ctccaccatcaaaatcaaggactgtggatattt

SEQ ID NO: 417614 - DNA, 33 bp, Homo sapien
ctccaccatcaaaatcgaggactgtggatattt

SEQ ID NO: 417615 - DNA, 33 bp, Homo sapien
cagaaatttatctaggacagcaaagacaagggc

SEQ ID NO: 417616 - DNA, 33 bp, Homo sapien
cagaaatttatctagggcagcaaagacaagggc

SEQ ID NO: 417617 - DNA, 33 bp, Homo sapien
ttttgactctcctaaaacttaactacgaatagc

SEQ ID NO: 417618 - DNA, 33 bp, Homo sapien
ttttgactctcctaaagcttaactacgaatagc

SEQ ID NO: 417619 - DNA, 33 bp, Homo sapien
aaaagtggctgcccggacattaggtagatgtat

SEQ ID NO: 417620 - DNA, 33 bp, Homo sapien
aaaagtggctgcccggccattaggtagatgtat

SEQ ID NO: 417621 - DNA, 33 bp, Homo sapien
agcacctgcctcatccaaaatcgccagccctga

SEQ ID NO: 417622 - DNA, 33 bp, Homo sapien
agcacctgcctcatccgaaatcgccagccctga

SEQ ID NO: 417623 - DNA, 33 bp, Homo sapien
ccctggagacttcttacagatcttttcccagca

SEQ ID NO: 417624 - DNA, 33 bp, Homo sapien
ccctggagacttcttatagatcttttcccagca

SEQ ID NO: 417625 - DNA, 33 bp, Homo sapien
actgcttgaaaccatcactcgactaccagcctc

SEQ ID NO: 417626 - DNA, 33 bp, Homo sapien
actgcttgaaaccatctctcgactaccagcctc

SEQ ID NO: 417627 - DNA, 33 bp, Homo sapien
tattcatgtcgtcaaacaaatgaaatagaaaat

SEQ ID NO: 417628 - DNA, 33 bp, Homo sapien
tattcatgtcgtcaaataaatgaaatagaaaat

SEQ ID NO: 417629 - DNA, 33 bp, Homo sapien
atgtggactctcaccacgcaaacccgtatggtg

SEQ ID NO: 417630 - DNA, 33 bp, Homo sapien
atgtggactctcaccaggcaaacccgtatggtg

SEQ ID NO: 417631 - DNA, 33 bp, Homo sapien
taggcgaaactgcaacagtagttgtgaggatga

SEQ ID NO: 417632 - DNA, 33 bp, Homo sapien
taggcgaaactgcaacggtagttgtgaggatga

SEQ ID NO: 417633 - DNA, 33 bp, Homo sapien
gctcacgaggaacaggaatcctaactgcgtggg

SEQ ID NO: 417634 - DNA, 33 bp, Homo sapien
gctcacgaggaacaggtatcctaactgcgtggg

SEQ ID NO: 417635 - DNA, 33 bp, Homo sapien
cctagaagtttcccaactcagacggatcaaaga

SEQ ID NO: 417636 - DNA, 33 bp, Homo sapien
cctagaagtttcccaattcagacggatcaaaga

SEQ ID NO: 417637 - DNA, 33 bp, Homo sapien
cttttccctctcaagaaccagaaacaaagagcc

SEQ ID NO: 417638 - DNA, 33 bp, Homo sapien
cttttccctctcaagagccagaaacaaagagcc

SEQ ID NO: 417639 - DNA, 33 bp, Homo sapien
ctgtagaaagttctgccgagtagcactggtcta

SEQ ID NO: 417640 - DNA, 33 bp, Homo sapien
ctgtagaaagttctgctgagtagcactggtcta

SEQ ID NO: 417641 - DNA, 33 bp, Homo sapien
aacaaaggcccccaaccgacggcaaagtgaggg

SEQ ID NO: 417642 - DNA, 33 bp, Homo sapien
aacaaaggcccccaactgacggcaaagtgaggg

SEQ ID NO: 417643 - DNA, 33 bp, Homo sapien
cagagagggtctttccagcagaacctatgggtc

SEQ ID NO: 417644 - DNA, 33 bp, Homo sapien
cagagagggtctttccggcagaacctatgggtc

SEQ ID NO: 417645 - DNA, 33 bp, Homo sapien
tgggagaatgattctgaaagctgcagcctgaag

SEQ ID NO: 417646 - DNA, 33 bp, Homo sapien
tgggagaatgattctggaagctgcagcctgaag

SEQ ID NO: 417647 - DNA, 33 bp, Homo sapien
tgggattagcctgtaacgagcctgtgagcctgc

SEQ ID NO: 417648 - DNA, 33 bp, Homo sapien
tgggattagcctgtaatgagcctgtgagcctgc

SEQ ID NO: 417649 - DNA, 33 bp, Homo sapien
aaatggccacaccgcacctttctggccaacgag

SEQ ID NO: 417650 - DNA, 33 bp, Homo sapien
aaatggccacaccgcagctttctggccaacgag

SEQ ID NO: 417651 - DNA, 33 bp, Homo sapien
gatcactaatctattcaatcctactgtgtgcca

SEQ ID NO: 417652 - DNA, 33 bp, Homo sapien
gatcactaatctattcgatcctactgtgtgcca

SEQ ID NO: 417653 - DNA, 33 bp, Homo sapien
ttaaattctggtcttcacttttcaagtcaatac

SEQ ID NO: 417654 - DNA, 33 bp, Homo sapien
ttaaattctggtcttcgcttttcaagtcaatac

SEQ ID NO: 417655 - DNA, 33 bp, Homo sapien
acttctgaccttgacaaccaagatcctctttag

SEQ ID NO: 417656 - DNA, 33 bp, Homo sapien
acttctgaccttgacacccaagatcctctttag

SEQ ID NO: 417657 - DNA, 33 bp, Homo sapien
gttagacaaggagtggccagtttaggaattggc

SEQ ID NO: 417658 - DNA, 33 bp, Homo sapien
gttagacaaggagtggtcagtttaggaattggc

SEQ ID NO: 417659 - DNA, 33 bp, Homo sapien
ctggagcgcagtcctgccagaacctttgggagg

SEQ ID NO: 417660 - DNA, 33 bp, Homo sapien
ctggagcgcagtcctgtcagaacctttgggagg

SEQ ID NO: 417661 - DNA, 33 bp, Homo sapien
caatggctgctcaagaagaaatcttggcctgga

SEQ ID NO: 417662 - DNA, 33 bp, Homo sapien
caatggctgctcaagaggaaatcttggcctgga

SEQ ID NO: 417663 - DNA, 33 bp, Homo sapien
gatctgggttctgtaacgaaatcttttcagcgt

SEQ ID NO: 417664 - DNA, 33 bp, Homo sapien
gatctgggttctgtaatgaaatcttttcagcgt

SEQ ID NO: 417665 - DNA, 33 bp, Homo sapien
aaaatcatcaatagccaaccacatgtgggaaac

SEQ ID NO: 417666 - DNA, 33 bp, Homo sapien
aaaatcatcaatagccgaccacatgtgggaaac

SEQ ID NO: 417667 - DNA, 33 bp, Homo sapien
tactgttttttgctgacggttgcctgaagccga

SEQ ID NO: 417668 - DNA, 33 bp, Homo sapien
tactgttttttgctgatggttgcctgaagccga

SEQ ID NO: 417669 - DNA, 33 bp, Homo sapien
cgccccatccatgagcaagccaagggtagtatc

SEQ ID NO: 417670 - DNA, 33 bp, Homo sapien
cgccccatccatgagcgagccaagggtagtatc

SEQ ID NO: 417671 - DNA, 33 bp, Homo sapien
gtggcatctgcattcccgaagtcgctgagcatt

SEQ ID NO: 417672 - DNA, 33 bp, Homo sapien
gtggcatctgcattcctgaagtcgctgagcatt

SEQ ID NO: 417673 - DNA, 33 bp, Homo sapien
tgtttgctcaactcagaattatcaacccatgat

SEQ ID NO: 417674 - DNA, 33 bp, Homo sapien
tgtttgctcaactcagtattatcaacccatgat

SEQ ID NO: 417675 - DNA, 33 bp, Homo sapien
gggttcccagcgggagccatttgtcatttctac

SEQ ID NO: 417676 - DNA, 33 bp, Homo sapien
gggttcccagcgggagtcatttgtcatttctac

SEQ ID NO: 417677 - DNA, 33 bp, Homo sapien
gagcaggagaggagaccagaagaaaggatggcg

SEQ ID NO: 417678 - DNA, 33 bp, Homo sapien
gagcaggagaggagacgagaagaaaggatggcg

SEQ ID NO: 417679 - DNA, 33 bp, Homo sapien
gggaggaaacagctacaatctggcaataaccct

SEQ ID NO: 417680 - DNA, 33 bp, Homo sapien
gggaggaaacagctacgatctggcaataaccct

SEQ ID NO: 417681 - DNA, 33 bp, Homo sapien
tatatctctcctgaaaattgtgatatcaaagta

SEQ ID NO: 417682 - DNA, 33 bp, Homo sapien
tatatctctcctgaaagttgtgatatcaaagta

SEQ ID NO: 417683 - DNA, 33 bp, Homo sapien
cactgtgcaaggtagacagtaactttttaaata

SEQ ID NO: 417684 - DNA, 33 bp, Homo sapien
cactgtgcaaggtagagagtaactttttaaata

SEQ ID NO: 417685 - DNA, 33 bp, Homo sapien
attattatactataaacgcttactgtgtactaa

SEQ ID NO: 417686 - DNA, 33 bp, Homo sapien
attattatactataaatgcttactgtgtactaa

SEQ ID NO: 417687 - DNA, 33 bp, Homo sapien
cagatgtatacacggaaagttgcagatcactga

SEQ ID NO: 417688 - DNA, 33 bp, Homo sapien
cagatgtatacacggagagttgcagatcactga

SEQ ID NO: 417689 - DNA, 33 bp, Homo sapien
agccatatgcaagacaaatataagaactacaga

SEQ ID NO: 417690 - DNA, 33 bp, Homo sapien
agccatatgcaagacagatataagaactacaga

SEQ ID NO: 417691 - DNA, 33 bp, Homo sapien
tattcatgaatactccaagtagtgttttttata

SEQ ID NO: 417692 - DNA, 33 bp, Homo sapien
tattcatgaatactccgagtagtgttttttata

SEQ ID NO: 417693 - DNA, 33 bp, Homo sapien
gatggatttgaaagcaatgacagtgcatgattc

SEQ ID NO: 417694 - DNA, 33 bp, Homo sapien
gatggatttgaaagcagtgacagtgcatgattc

SEQ ID NO: 417695 - DNA, 33 bp, Homo sapien
cacacgtctcacgccacggacttgcactgagaa

SEQ ID NO: 417696 - DNA, 33 bp, Homo sapien
cacacgtctcacgccatggacttgcactgagaa

SEQ ID NO: 417697 - DNA, 33 bp, Homo sapien
cctgacactgttgataagttgacagcttgtatc

SEQ ID NO: 417698 - DNA, 33 bp, Homo sapien
cctgacactgttgatatgttgacagcttgtatc

SEQ ID NO: 417699 - DNA, 33 bp, Homo sapien
aaagtcaaagcaacccagcatattatgtttgat

SEQ ID NO: 417700 - DNA, 33 bp, Homo sapien
aaagtcaaagcaaccccgcatattatgtttgat

SEQ ID NO: 417701 - DNA, 33 bp, Homo sapien
cagcatgtcccaaatggcaaggcatctgtgtgc

SEQ ID NO: 417702 - DNA, 33 bp, Homo sapien
cagcatgtcccaaatgtcaaggcatctgtgtgc

SEQ ID NO: 417703 - DNA, 33 bp, Homo sapien
taatcaaagactattcacattttcaccttaatt

SEQ ID NO: 417704 - DNA, 33 bp, Homo sapien
taatcaaagactattcgcattttcaccttaatt

SEQ ID NO: 417705 - DNA, 33 bp, Homo sapien
gattcacgaaattttaaaagatgttttgtcctg

SEQ ID NO: 417706 - DNA, 33 bp, Homo sapien
gattcacgaaattttagaagatgttttgtcctg

SEQ ID NO: 417707 - DNA, 33 bp, Homo sapien
gggatgcaggttgtacagatccaagtcataagg

SEQ ID NO: 417708 - DNA, 33 bp, Homo sapien
gggatgcaggttgtaccgatccaagtcataagg

SEQ ID NO: 417709 - DNA, 33 bp, Homo sapien
gtgaagacctgcagatgacccataaatgttaac

SEQ ID NO: 417710 - DNA, 33 bp, Homo sapien
gtgaagacctgcagattacccataaatgttaac

SEQ ID NO: 417711 - DNA, 33 bp, Homo sapien
aagtgacatgtgggaaagaagaaacggggcatg

SEQ ID NO: 417712 - DNA, 33 bp, Homo sapien
aagtgacatgtgggaaggaagaaacggggcatg

SEQ ID NO: 417713 - DNA, 33 bp, Homo sapien
aaggcaggagatgggacagtgtgtactacagtg

SEQ ID NO: 417714 - DNA, 33 bp, Homo sapien
aaggcaggagatgggagagtgtgtactacagtg

SEQ ID NO: 417715 - DNA, 33 bp, Homo sapien
gggaaacaccactaagcctcatggattgtccca

SEQ ID NO: 417716 - DNA, 33 bp, Homo sapien
gggaaacaccactaagtctcatggattgtccca

SEQ ID NO: 417717 - DNA, 33 bp, Homo sapien
agaattggcaaagataggtcttaaacatctagc

SEQ ID NO: 417718 - DNA, 33 bp, Homo sapien
agaattggcaaagatatgtcttaaacatctagc

SEQ ID NO: 417719 - DNA, 33 bp, Homo sapien
cgggtcaacgtactcaacgggctcctggtggtt

SEQ ID NO: 417720 - DNA, 33 bp, Homo sapien
cgggtcaacgtactcatcgggctcctggtggtt

SEQ ID NO: 417721 - DNA, 33 bp, Homo sapien
acccttagagataacacgcaaccaggcacagtg

SEQ ID NO: 417722 - DNA, 33 bp, Homo sapien
acccttagagataacatgcaaccaggcacagtg

SEQ ID NO: 417723 - DNA, 33 bp, Homo sapien
tgtcagtgggcttcaacgtccataggcggcgga

SEQ ID NO: 417724 - DNA, 33 bp, Homo sapien
tgtcagtgggcttcaatgtccataggcggcgga

SEQ ID NO: 417725 - DNA, 33 bp, Homo sapien
gagcagagaactggaacagactagagtgtgtga

SEQ ID NO: 417726 - DNA, 33 bp, Homo sapien
gagcagagaactggaatagactagagtgtgtga

SEQ ID NO: 417727 - DNA, 33 bp, Homo sapien
accctaagtcgggcaacacttcctggttcccat

SEQ ID NO: 417728 - DNA, 33 bp, Homo sapien
accctaagtcgggcaatacttcctggttcccat

SEQ ID NO: 417729 - DNA, 33 bp, Homo sapien
accttccttgctcttaaggaaaaggaaacaggt

SEQ ID NO: 417730 - DNA, 33 bp, Homo sapien
accttccttgctcttacggaaaaggaaacaggt

SEQ ID NO: 417731 - DNA, 33 bp, Homo sapien
gaaggagcaaggttctcaactcaggagggttct

SEQ ID NO: 417732 - DNA, 33 bp, Homo sapien
gaaggagcaaggttcttaactcaggagggttct

SEQ ID NO: 417733 - DNA, 33 bp, Homo sapien
ggggaagtgccgggtgcaagaaccaagctcttt

SEQ ID NO: 417734 - DNA, 33 bp, Homo sapien
ggggaagtgccgggtggaagaaccaagctcttt

SEQ ID NO: 417735 - DNA, 33 bp, Homo sapien
gatcctacctctagaagaacaaaaacaaaacaa

SEQ ID NO: 417736 - DNA, 33 bp, Homo sapien
gatcctacctctagaataacaaaaacaaaacaa

SEQ ID NO: 417737 - DNA, 33 bp, Homo sapien
aattcccaaatacccaatgcttagcttacagtg

SEQ ID NO: 417738 - DNA, 33 bp, Homo sapien
aattcccaaatacccactgcttagcttacagtg

SEQ ID NO: 417739 - DNA, 33 bp, Homo sapien
ccatcacagtccattacaagtgcgctgctgggc

SEQ ID NO: 417740 - DNA, 33 bp, Homo sapien
ccatcacagtccattataagtgcgctgctgggc

SEQ ID NO: 417741 - DNA, 33 bp, Homo sapien
tcacctgtatagtagagatatgggagcacccag

SEQ ID NO: 417742 - DNA, 33 bp, Homo sapien
tcacctgtatagtagatatatgggagcacccag

SEQ ID NO: 417743 - DNA, 33 bp, Homo sapien
caacaaagcaaaggaccaactaagctgcagatt

SEQ ID NO: 417744 - DNA, 33 bp, Homo sapien
caacaaagcaaaggactaactaagctgcagatt

SEQ ID NO: 417745 - DNA, 33 bp, Homo sapien
tgcagattttctctccactgggcttagcctaca

SEQ ID NO: 417746 - DNA, 33 bp, Homo sapien
tgcagattttctctccgctgggcttagcctaca

SEQ ID NO: 417747 - DNA, 33 bp, Homo sapien
ggccgcagatccagccacacacgagaaggacca

SEQ ID NO: 417748 - DNA, 33 bp, Homo sapien
ggccgcagatccagccgcacacgagaaggacca

SEQ ID NO: 417749 - DNA, 33 bp, Homo sapien
aggccgcagtgtctgaactctgctgtttaccag

SEQ ID NO: 417750 - DNA, 33 bp, Homo sapien
aggccgcagtgtctgagctctgctgtttaccag

SEQ ID NO: 417751 - DNA, 33 bp, Homo sapien
attcattcaatcaacaaagctttatctgtgcca

SEQ ID NO: 417752 - DNA, 33 bp, Homo sapien
attcattcaatcaacagagctttatctgtgcca

SEQ ID NO: 417753 - DNA, 33 bp, Homo sapien
tagcacaggactccccagacgtgattacccagt

SEQ ID NO: 417754 - DNA, 33 bp, Homo sapien
tagcacaggactccccggacgtgattacccagt

SEQ ID NO: 417755 - DNA, 33 bp, Homo sapien
tcttctccggttaataacatttcagggaaggca

SEQ ID NO: 417756 - DNA, 33 bp, Homo sapien
tcttctccggttaatagcatttcagggaaggca

SEQ ID NO: 417757 - DNA, 33 bp, Homo sapien
ttctgtttgcagacagaacggtgcaacacacag

SEQ ID NO: 417758 - DNA, 33 bp, Homo sapien
ttctgtttgcagacaggacggtgcaacacacag

SEQ ID NO: 417759 - DNA, 33 bp, Homo sapien
ttggatttcttgcaaactaccgtactctctccg

SEQ ID NO: 417760 - DNA, 33 bp, Homo sapien
ttggatttcttgcaaattaccgtactctctccg

SEQ ID NO: 417761 - DNA, 33 bp, Homo sapien
gggcctgtatgactcaacgcaggatttagggca

SEQ ID NO: 417762 - DNA, 33 bp, Homo sapien
gggcctgtatgactcagcgcaggatttagggca

SEQ ID NO: 417763 - DNA, 33 bp, Homo sapien
gggggaagccagtcaccattccacgaggaagtt

SEQ ID NO: 417764 - DNA, 33 bp, Homo sapien
gggggaagccagtcactattccacgaggaagtt

SEQ ID NO: 417765 - DNA, 33 bp, Homo sapien
gttcggtgagggaaaaagtcaacaggggaccag

SEQ ID NO: 417766 - DNA, 33 bp, Homo sapien
gttcggtgagggaaaacgtcaacaggggaccag

SEQ ID NO: 417767 - DNA, 33 bp, Homo sapien
catgctcctataaacacgtacacactcacacac

SEQ ID NO: 417768 - DNA, 33 bp, Homo sapien
catgctcctataaacaggtacacactcacacac

SEQ ID NO: 417769 - DNA, 33 bp, Homo sapien
aacagagagcgccccaactgtgtatccacaggg

SEQ ID NO: 417770 - DNA, 33 bp, Homo sapien
aacagagagcgccccatctgtgtatccacaggg

SEQ ID NO: 417771 - DNA, 33 bp, Homo sapien
tgccacgcaaaaccccaagcactttgtaggcat

SEQ ID NO: 417772 - DNA, 33 bp, Homo sapien
tgccacgcaaaacccctagcactttgtaggcat

SEQ ID NO: 417773 - DNA, 33 bp, Homo sapien
gcaaagctcaagagaggagagcgaaggaccctt

SEQ ID NO: 417774 - DNA, 33 bp, Homo sapien
gcaaagctcaagagagtagagcgaaggaccctt

SEQ ID NO: 417775 - DNA, 33 bp, Homo sapien
atggttagctaccacacggcaacgttctaatga

SEQ ID NO: 417776 - DNA, 33 bp, Homo sapien
atggttagctaccacatggcaacgttctaatga

SEQ ID NO: 417777 - DNA, 33 bp, Homo sapien
gaacaatcactaggaaaggcttccggacaagga

SEQ ID NO: 417778 - DNA, 33 bp, Homo sapien
gaacaatcactaggaacggcttccggacaagga

SEQ ID NO: 417779 - DNA, 33 bp, Homo sapien
ctcggtatagtgaaacagacgggcccattgccc

SEQ ID NO: 417780 - DNA, 33 bp, Homo sapien
ctcggtatagtgaaacggacgggcccattgccc

SEQ ID NO: 417781 - DNA, 33 bp, Homo sapien
taactctgaacaaggacagaccaagaaacggca

SEQ ID NO: 417782 - DNA, 33 bp, Homo sapien
taactctgaacaaggatagaccaagaaacggca

SEQ ID NO: 417783 - DNA, 33 bp, Homo sapien
actaagcactctttacgaggagggcactgttgg

SEQ ID NO: 417784 - DNA, 33 bp, Homo sapien
actaagcactctttactaggagggcactgttgg

SEQ ID NO: 417785 - DNA, 33 bp, Homo sapien
caccctggaaacgctacgacaccaggtctcacg

SEQ ID NO: 417786 - DNA, 33 bp, Homo sapien
caccctggaaacgctatgacaccaggtctcacg

SEQ ID NO: 417787 - DNA, 33 bp, Homo sapien
tcagcactcggacaccaacaccacaaaagctat

SEQ ID NO: 417788 - DNA, 33 bp, Homo sapien
tcagcactcggacaccgacaccacaaaagctat

SEQ ID NO: 417789 - DNA, 33 bp, Homo sapien
gtggaaacagacaacacacctgagtggccagca

SEQ ID NO: 417790 - DNA, 33 bp, Homo sapien
gtggaaacagacaacatacctgagtggccagca

SEQ ID NO: 417791 - DNA, 33 bp, Homo sapien
ttgattgtctgataaacgattgataaaacaaca

SEQ ID NO: 417792 - DNA, 33 bp, Homo sapien
ttgattgtctgataaaggattgataaaacaaca

SEQ ID NO: 417793 - DNA, 33 bp, Homo sapien
gataggcaagtgcagacgctacaactggatgtt

SEQ ID NO: 417794 - DNA, 33 bp, Homo sapien
gataggcaagtgcagatgctacaactggatgtt

SEQ ID NO: 417795 - DNA, 33 bp, Homo sapien
gaaaagcaccggatcgcatggactctggaggat

SEQ ID NO: 417796 - DNA, 33 bp, Homo sapien
gaaaagcaccggatcggatggactctggaggat

SEQ ID NO: 417797 - DNA, 33 bp, Homo sapien
ccacgctggcattctccattcacctgctgatgg

SEQ ID NO: 417798 - DNA, 33 bp, Homo sapien
ccacgctggcattctctattcacctgctgatgg

SEQ ID NO: 417799 - DNA, 33 bp, Homo sapien
agagagagcacaaaacaggccaaactccttgtg

SEQ ID NO: 417800 - DNA, 33 bp, Homo sapien
agagagagcacaaaacgggccaaactccttgtg

SEQ ID NO: 417801 - DNA, 33 bp, Homo sapien
cttcttcggggcatcaccgaggacccggtccaa

SEQ ID NO: 417802 - DNA, 33 bp, Homo sapien
cttcttcggggcatcatcgaggacccggtccaa

SEQ ID NO: 417803 - DNA, 33 bp, Homo sapien
aataggtaacaatttgaaacactcagtgaccaa

SEQ ID NO: 417804 - DNA, 33 bp, Homo sapien
aataggtaacaatttggaacactcagtgaccaa

SEQ ID NO: 417805 - DNA, 33 bp, Homo sapien
gcaccgtcagctgttacgaaggcgagcccagag

SEQ ID NO: 417806 - DNA, 33 bp, Homo sapien
gcaccgtcagctgttatgaaggcgagcccagag

SEQ ID NO: 417807 - DNA, 33 bp, Homo sapien
aatctgatattctagaaggatcttttgaaaact

SEQ ID NO: 417808 - DNA, 33 bp, Homo sapien
aatctgatattctagagggatcttttgaaaact

SEQ ID NO: 417809 - DNA, 33 bp, Homo sapien
agagtaaacctttctacgtccctaagcgaatca

SEQ ID NO: 417810 - DNA, 33 bp, Homo sapien
agagtaaacctttctatgtccctaagcgaatca

SEQ ID NO: 417811 - DNA, 33 bp, Homo sapien
gggtgtgtccataagccaagggatgccaaggac

SEQ ID NO: 417812 - DNA, 33 bp, Homo sapien
gggtgtgtccataagctaagggatgccaaggac

SEQ ID NO: 417813 - DNA, 33 bp, Homo sapien
gcaaaaccacaacgcacgtgacaaagtctcacg

SEQ ID NO: 417814 - DNA, 33 bp, Homo sapien
gcaaaaccacaacgcatgtgacaaagtctcacg

SEQ ID NO: 417815 - DNA, 33 bp, Homo sapien
tgaaaggaactccggacgttggagagtgggctg

SEQ ID NO: 417816 - DNA, 33 bp, Homo sapien
tgaaaggaactccggatgttggagagtgggctg

SEQ ID NO: 417817 - DNA, 33 bp, Homo sapien
acccagtttcctaaaaaggaactcggacataca

SEQ ID NO: 417818 - DNA, 33 bp, Homo sapien
acccagtttcctaaaagggaactcggacataca

SEQ ID NO: 417819 - DNA, 33 bp, Homo sapien
cagcgttgaggttcccaatgagcagcgtgatga

SEQ ID NO: 417820 - DNA, 33 bp, Homo sapien
cagcgttgaggttccccatgagcagcgtgatga

SEQ ID NO: 417821 - DNA, 33 bp, Homo sapien
cctggagccacctggaaagcatcttcatcggct

SEQ ID NO: 417822 - DNA, 33 bp, Homo sapien
cctggagccacctggagagcatcttcatcggct

SEQ ID NO: 417823 - DNA, 33 bp, Homo sapien
cgctttctgcaactcaatacttaagtgttcaac

SEQ ID NO: 417824 - DNA, 33 bp, Homo sapien
cgctttctgcaactcagtacttaagtgttcaac

SEQ ID NO: 417825 - DNA, 33 bp, Homo sapien
aggaagactccaaaacacagttagagttgaaca

SEQ ID NO: 417826 - DNA, 33 bp, Homo sapien
aggaagactccaaaacgcagttagagttgaaca

SEQ ID NO: 417827 - DNA, 33 bp, Homo sapien
acatgcaatagtttggaacattttgtaaataac

SEQ ID NO: 417828 - DNA, 33 bp, Homo sapien
acatgcaatagtttgggacattttgtaaataac

SEQ ID NO: 417829 - DNA, 33 bp, Homo sapien
tcccaaatcgcttccacgtcccttgtctaatat

SEQ ID NO: 417830 - DNA, 33 bp, Homo sapien
tcccaaatcgcttccatgtcccttgtctaatat

SEQ ID NO: 417831 - DNA, 33 bp, Homo sapien
ttttacgttctcaagcacagatgtttctcaagt

SEQ ID NO: 417832 - DNA, 33 bp, Homo sapien
ttttacgttctcaagctcagatgtttctcaagt

SEQ ID NO: 417833 - DNA, 33 bp, Homo sapien
aatttcttgctcaggaatagaaactattggctc

SEQ ID NO: 417834 - DNA, 33 bp, Homo sapien
aatttcttgctcaggagtagaaactattggctc

SEQ ID NO: 417835 - DNA, 33 bp, Homo sapien
aatgctgggaaatcagaaactctcaggaggaaa

SEQ ID NO: 417836 - DNA, 33 bp, Homo sapien
aatgctgggaaatcaggaactctcaggaggaaa

SEQ ID NO: 417837 - DNA, 33 bp, Homo sapien
tttgagaggacactacagatttttcctctttgc

SEQ ID NO: 417838 - DNA, 33 bp, Homo sapien
tttgagaggacactacggatttttcctctttgc

SEQ ID NO: 417839 - DNA, 33 bp, Homo sapien
tcaccaggtgctacgacggccaactcttagtca

SEQ ID NO: 417840 - DNA, 33 bp, Homo sapien
tcaccaggtgctacgatggccaactcttagtca

SEQ ID NO: 417841 - DNA, 33 bp, Homo sapien
cgtacctgcagcttcaagtggatctcctctggc

SEQ ID NO: 417842 - DNA, 33 bp, Homo sapien
cgtacctgcagcttcaggtggatctcctctggc

SEQ ID NO: 417843 - DNA, 33 bp, Homo sapien
ggtacgcagtgagagcaagctatcgaatgaatg

SEQ ID NO: 417844 - DNA, 33 bp, Homo sapien
ggtacgcagtgagagcgagctatcgaatgaatg

SEQ ID NO: 417845 - DNA, 33 bp, Homo sapien
ccagacaactgaagacagcctatagcccagagc

SEQ ID NO: 417846 - DNA, 33 bp, Homo sapien
ccagacaactgaagacggcctatagcccagagc

SEQ ID NO: 417847 - DNA, 33 bp, Homo sapien
gttattagacatttatcaagttacagaacaatg

SEQ ID NO: 417848 - DNA, 33 bp, Homo sapien
gttattagacatttatgaagttacagaacaatg

SEQ ID NO: 417849 - DNA, 33 bp, Homo sapien
ggctaaatgaatcactaacacacaaagcaggta

SEQ ID NO: 417850 - DNA, 33 bp, Homo sapien
ggctaaatgaatcactgacacacaaagcaggta

SEQ ID NO: 417851 - DNA, 33 bp, Homo sapien
gtgaaagcgtctcaacaaaaaccataaagaagt

SEQ ID NO: 417852 - DNA, 33 bp, Homo sapien
gtgaaagcgtctcaacgaaaaccataaagaagt

SEQ ID NO: 417853 - DNA, 33 bp, Homo sapien
gtgtgtctgccctgaacagttctgcgttttcct

SEQ ID NO: 417854 - DNA, 33 bp, Homo sapien
gtgtgtctgccctgaatagttctgcgttttcct

SEQ ID NO: 417855 - DNA, 33 bp, Homo sapien
cttcctcccaaaggaaacctccatctctagttg

SEQ ID NO: 417856 - DNA, 33 bp, Homo sapien
cttcctcccaaaggaatcctccatctctagttg

SEQ ID NO: 417857 - DNA, 33 bp, Homo sapien
tgggaaggctaacacaacattattatactgcca

SEQ ID NO: 417858 - DNA, 33 bp, Homo sapien
tgggaaggctaacacagcattattatactgcca

SEQ ID NO: 417859 - DNA, 33 bp, Homo sapien
ttactgatttggatagcagaaatcctgtttcta

SEQ ID NO: 417860 - DNA, 33 bp, Homo sapien
ttactgatttggataggagaaatcctgtttcta

SEQ ID NO: 417861 - DNA, 33 bp, Homo sapien
actgatttccaggccacatgacacatgtagaca

SEQ ID NO: 417862 - DNA, 33 bp, Homo sapien
actgatttccaggccagatgacacatgtagaca

SEQ ID NO: 417863 - DNA, 33 bp, Homo sapien
acacctgtttaaaaagcagattgcacgagaatt

SEQ ID NO: 417864 - DNA, 33 bp, Homo sapien
acacctgtttaaaaaggagattgcacgagaatt

SEQ ID NO: 417865 - DNA, 33 bp, Homo sapien
tatgtattaaaagtaacggaaaagatggcaatt

SEQ ID NO: 417866 - DNA, 33 bp, Homo sapien
tatgtattaaaagtaatggaaaagatggcaatt

SEQ ID NO: 417867 - DNA, 33 bp, Homo sapien
agtcaagtgtatgatacggtagaaggtgcaaca

SEQ ID NO: 417868 - DNA, 33 bp, Homo sapien
agtcaagtgtatgatatggtagaaggtgcaaca

SEQ ID NO: 417869 - DNA, 33 bp, Homo sapien
atgctaagatcttgtacgatgcccagatggcgg

SEQ ID NO: 417870 - DNA, 33 bp, Homo sapien
atgctaagatcttgtatgatgcccagatggcgg

SEQ ID NO: 417871 - DNA, 33 bp, Homo sapien
acgttgcatttatatacctgggcttctactctg

SEQ ID NO: 417872 - DNA, 33 bp, Homo sapien
acgttgcatttatatatctgggcttctactctg

SEQ ID NO: 417873 - DNA, 33 bp, Homo sapien
tataaactccatgaccagccacacctccttctg

SEQ ID NO: 417874 - DNA, 33 bp, Homo sapien
tataaactccatgaccggccacacctccttctg

SEQ ID NO: 417875 - DNA, 33 bp, Homo sapien
ggacccagggagaagacgtccatctgcaagtca

SEQ ID NO: 417876 - DNA, 33 bp, Homo sapien
ggacccagggagaagatgtccatctgcaagtca

SEQ ID NO: 417877 - DNA, 33 bp, Homo sapien
cttttattgctttcccaggacctttcaacctga

SEQ ID NO: 417878 - DNA, 33 bp, Homo sapien
cttttattgctttcccgggacctttcaacctga

SEQ ID NO: 417879 - DNA, 33 bp, Homo sapien
tactctggggctgcgaagtcttttattgctttc

SEQ ID NO: 417880 - DNA, 33 bp, Homo sapien
tactctggggctgcgacgtcttttattgctttc

SEQ ID NO: 417881 - DNA, 33 bp, Homo sapien
cgcaagtttcttgcacaatcgggaggtctcatc

SEQ ID NO: 417882 - DNA, 33 bp, Homo sapien
cgcaagtttcttgcacgatcgggaggtctcatc

SEQ ID NO: 417883 - DNA, 33 bp, Homo sapien
ctggcccgtcttaacaatcttctaacccatgaa

SEQ ID NO: 417884 - DNA, 33 bp, Homo sapien
ctggcccgtcttaacagtcttctaacccatgaa

SEQ ID NO: 417885 - DNA, 33 bp, Homo sapien
ctccttggaagcctcacgggaccctcaaaactc

SEQ ID NO: 417886 - DNA, 33 bp, Homo sapien
ctccttggaagcctcatgggaccctcaaaactc

SEQ ID NO: 417887 - DNA, 33 bp, Homo sapien
ggctcactgcagctggaatgggtgccacacagg

SEQ ID NO: 417888 - DNA, 33 bp, Homo sapien
ggctcactgcagctgggatgggtgccacacagg

SEQ ID NO: 417889 - DNA, 33 bp, Homo sapien
gaaaagtacagagtgcccatgaactccaactta

SEQ ID NO: 417890 - DNA, 33 bp, Homo sapien
gaaaagtacagagtgctcatgaactccaactta

SEQ ID NO: 417891 - DNA, 33 bp, Homo sapien
atgaacgcaccccataaacagtccatctttaaa

SEQ ID NO: 417892 - DNA, 33 bp, Homo sapien
atgaacgcaccccatagacagtccatctttaaa

SEQ ID NO: 417893 - DNA, 33 bp, Homo sapien
tggacaaagagcagacagagctggatgactttg

SEQ ID NO: 417894 - DNA, 33 bp, Homo sapien
tggacaaagagcagacggagctggatgactttg

SEQ ID NO: 417895 - DNA, 33 bp, Homo sapien
atgagttcagtcattacggaaagccgcatggca

SEQ ID NO: 417896 - DNA, 33 bp, Homo sapien
atgagttcagtcattatggaaagccgcatggca

SEQ ID NO: 417897 - DNA, 33 bp, Homo sapien
gatgaagcacttagacaacatggcaaagtgaag

SEQ ID NO: 417898 - DNA, 33 bp, Homo sapien
gatgaagcacttagacgacatggcaaagtgaag

SEQ ID NO: 417899 - DNA, 33 bp, Homo sapien
gccaacagaactctcacagagtggcataagaag

SEQ ID NO: 417900 - DNA, 33 bp, Homo sapien
gccaacagaactctcatagagtggcataagaag

SEQ ID NO: 417901 - DNA, 33 bp, Homo sapien
ttgaaaaccaaaacaaagctaaaatgggatggg

SEQ ID NO: 417902 - DNA, 33 bp, Homo sapien
ttgaaaaccaaaacaatgctaaaatgggatggg

SEQ ID NO: 417903 - DNA, 33 bp, Homo sapien
acacacacagaaaagacgatatcaacgcatcag

SEQ ID NO: 417904 - DNA, 33 bp, Homo sapien
acacacacagaaaagatgatatcaacgcatcag

SEQ ID NO: 417905 - DNA, 33 bp, Homo sapien
cagtatccctcgagcaacccagatgcaccagtg

SEQ ID NO: 417906 - DNA, 33 bp, Homo sapien
cagtatccctcgagcaccccagatgcaccagtg

SEQ ID NO: 417907 - DNA, 33 bp, Homo sapien
acaaaaatctcagaatgacatcttgctggaaag

SEQ ID NO: 417908 - DNA, 33 bp, Homo sapien
acaaaaatctcagaattacatcttgctggaaag

SEQ ID NO: 417909 - DNA, 33 bp, Homo sapien
ggccatctttatgaaggctccagctgtcagtcc

SEQ ID NO: 417910 - DNA, 33 bp, Homo sapien
ggccatctttatgaagtctccagctgtcagtcc

SEQ ID NO: 417911 - DNA, 33 bp, Homo sapien
actacacatgcaattaccctcctgagtgctgac

SEQ ID NO: 417912 - DNA, 33 bp, Homo sapien
actacacatgcaattatcctcctgagtgctgac

SEQ ID NO: 417913 - DNA, 33 bp, Homo sapien
gccgggatgttttaagaatgaataatgttcatg

SEQ ID NO: 417914 - DNA, 33 bp, Homo sapien
gccgggatgttttaaggatgaataatgttcatg

SEQ ID NO: 417915 - DNA, 33 bp, Homo sapien
atgttatgcttagtgcaagaaactgggcacaaa

SEQ ID NO: 417916 - DNA, 33 bp, Homo sapien
atgttatgcttagtgcgagaaactgggcacaaa

SEQ ID NO: 417917 - DNA, 33 bp, Homo sapien
cacagacaggtttcaacggaacgcaaacaccca

SEQ ID NO: 417918 - DNA, 33 bp, Homo sapien
cacagacaggtttcaatggaacgcaaacaccca

SEQ ID NO: 417919 - DNA, 33 bp, Homo sapien
aaggatgccaaaggccacagttgctcaagtccc

SEQ ID NO: 417920 - DNA, 33 bp, Homo sapien
aaggatgccaaaggccgcagttgctcaagtccc

SEQ ID NO: 417921 - DNA, 33 bp, Homo sapien
atttgaaccaaacttacgttctggaatcaagcc

SEQ ID NO: 417922 - DNA, 33 bp, Homo sapien
atttgaaccaaacttatgttctggaatcaagcc

SEQ ID NO: 417923 - DNA, 33 bp, Homo sapien
gcaacagacagttatcaaatccagttacatggt

SEQ ID NO: 417924 - DNA, 33 bp, Homo sapien
gcaacagacagttatcgaatccagttacatggt

SEQ ID NO: 417925 - DNA, 33 bp, Homo sapien
aagactggcagacaagaactttcatgcagatta

SEQ ID NO: 417926 - DNA, 33 bp, Homo sapien
aagactggcagacaaggactttcatgcagatta

SEQ ID NO: 417927 - DNA, 33 bp, Homo sapien
tcagggcacacacgtgaagctagaggaaacaag

SEQ ID NO: 417928 - DNA, 33 bp, Homo sapien
tcagggcacacacgtggagctagaggaaacaag

SEQ ID NO: 417929 - DNA, 33 bp, Homo sapien
aggcgcttggtgaaccagcaccgaacagagaga

SEQ ID NO: 417930 - DNA, 33 bp, Homo sapien
aggcgcttggtgaaccggcaccgaacagagaga

SEQ ID NO: 417931 - DNA, 33 bp, Homo sapien
tcatgaaaggattgaacgattctaaatgtgact

SEQ ID NO: 417932 - DNA, 33 bp, Homo sapien
tcatgaaaggattgaatgattctaaatgtgact

SEQ ID NO: 417933 - DNA, 33 bp, Homo sapien
tttttcaagaaggttccaaagtgccgcatttca

SEQ ID NO: 417934 - DNA, 33 bp, Homo sapien
tttttcaagaaggttctaaagtgccgcatttca

SEQ ID NO: 417935 - DNA, 33 bp, Homo sapien
catgccttgccgtgaacgtgacagggtaatcaa

SEQ ID NO: 417936 - DNA, 33 bp, Homo sapien
catgccttgccgtgaaggtgacagggtaatcaa

SEQ ID NO: 417937 - DNA, 33 bp, Homo sapien
gcatgctttaggaccaagatgtctctttgaggt

SEQ ID NO: 417938 - DNA, 33 bp, Homo sapien
gcatgctttaggaccaggatgtctctttgaggt

SEQ ID NO: 417939 - DNA, 33 bp, Homo sapien
atgactgatttcctaaaggcaggagactggaaa

SEQ ID NO: 417940 - DNA, 33 bp, Homo sapien
atgactgatttcctaacggcaggagactggaaa

SEQ ID NO: 417941 - DNA, 33 bp, Homo sapien
gaagcctcttggcatcgcctggaattctgtgag

SEQ ID NO: 417942 - DNA, 33 bp, Homo sapien
gaagcctcttggcatctcctggaattctgtgag

SEQ ID NO: 417943 - DNA, 33 bp, Homo sapien
tacttcctgtatcaaaataacagttggtcagaa

SEQ ID NO: 417944 - DNA, 33 bp, Homo sapien
tacttcctgtatcaaagtaacagttggtcagaa

SEQ ID NO: 417945 - DNA, 33 bp, Homo sapien
gggataatgattgatacgggtattatgctttca

SEQ ID NO: 417946 - DNA, 33 bp, Homo sapien
gggataatgattgatatgggtattatgctttca

SEQ ID NO: 417947 - DNA, 33 bp, Homo sapien
ctcttttgcttgctaacactgaagattttcctt

SEQ ID NO: 417948 - DNA, 33 bp, Homo sapien
ctcttttgcttgctaatactgaagattttcctt

SEQ ID NO: 417949 - DNA, 33 bp, Homo sapien
tgttgggcccttctcgaaagctcctctgtcatg

SEQ ID NO: 417950 - DNA, 33 bp, Homo sapien
tgttgggcccttctcgcaagctcctctgtcatg

SEQ ID NO: 417951 - DNA, 33 bp, Homo sapien
aggttgctaatccttagccttgattatccaggt

SEQ ID NO: 417952 - DNA, 33 bp, Homo sapien
aggttgctaatccttatccttgattatccaggt

SEQ ID NO: 417953 - DNA, 33 bp, Homo sapien
gttggcatcttaccagaacagggaacccaggga

SEQ ID NO: 417954 - DNA, 33 bp, Homo sapien
gttggcatcttaccagtacagggaacccaggga

SEQ ID NO: 417955 - DNA, 33 bp, Homo sapien
tgcccttgtggttacacgacacctgagtctacg

SEQ ID NO: 417956 - DNA, 33 bp, Homo sapien
tgcccttgtggttacatgacacctgagtctacg

SEQ ID NO: 417957 - DNA, 33 bp, Homo sapien
gaggcagcaaatcacaaaacttagactcgcata

SEQ ID NO: 417958 - DNA, 33 bp, Homo sapien
gaggcagcaaatcacagaacttagactcgcata

SEQ ID NO: 417959 - DNA, 33 bp, Homo sapien
cggatctccagcgcgacgtccaagtaggggtcg

SEQ ID NO: 417960 - DNA, 33 bp, Homo sapien
cggatctccagcgcgatgtccaagtaggggtcg

SEQ ID NO: 417961 - DNA, 33 bp, Homo sapien
atatatatattctcatgaggaagtgccgtgcac

SEQ ID NO: 417962 - DNA, 33 bp, Homo sapien
atatatatattctcattaggaagtgccgtgcac

SEQ ID NO: 417963 - DNA, 33 bp, Homo sapien
caattacccagttcaccgaagggcagacctggg

SEQ ID NO: 417964 - DNA, 33 bp, Homo sapien
caattacccagttcactgaagggcagacctggg

SEQ ID NO: 417965 - DNA, 33 bp, Homo sapien
atgagacgaaaacaacagccatctagtcaaatc

SEQ ID NO: 417966 - DNA, 33 bp, Homo sapien
atgagacgaaaacaacggccatctagtcaaatc

SEQ ID NO: 417967 - DNA, 33 bp, Homo sapien
tagaatgagctgggaaagattctctcctcctct

SEQ ID NO: 417968 - DNA, 33 bp, Homo sapien
tagaatgagctgggaaggattctctcctcctct

SEQ ID NO: 417969 - DNA, 33 bp, Homo sapien
tcatcattcctacttacatcaaaaaagacacag

SEQ ID NO: 417970 - DNA, 33 bp, Homo sapien
tcatcattcctacttatatcaaaaaagacacag

SEQ ID NO: 417971 - DNA, 33 bp, Homo sapien
cccttctaaaaatcaacgtgtgcttagtgagca

SEQ ID NO: 417972 - DNA, 33 bp, Homo sapien
cccttctaaaaatcaatgtgtgcttagtgagca

SEQ ID NO: 417973 - DNA, 33 bp, Homo sapien
atgtaagacccccaaacctaaatatgccgggta

SEQ ID NO: 417974 - DNA, 33 bp, Homo sapien
atgtaagacccccaaagctaaatatgccgggta

SEQ ID NO: 417975 - DNA, 33 bp, Homo sapien
gtttgggacaggcaaaccggtggatatcaacac

SEQ ID NO: 417976 - DNA, 33 bp, Homo sapien
gtttgggacaggcaaatcggtggatatcaacac

SEQ ID NO: 417977 - DNA, 33 bp, Homo sapien
ttgatttttgggtgtccaagtgtaccgggctag

SEQ ID NO: 417978 - DNA, 33 bp, Homo sapien
ttgatttttgggtgtctaagtgtaccgggctag

SEQ ID NO: 417979 - DNA, 33 bp, Homo sapien
ttgagcagaaagaagacggggatgatcgacgtg

SEQ ID NO: 417980 - DNA, 33 bp, Homo sapien
ttgagcagaaagaagatggggatgatcgacgtg

SEQ ID NO: 417981 - DNA, 33 bp, Homo sapien
ctccctcgttcagattcgctccttgttcttcag

SEQ ID NO: 417982 - DNA, 33 bp, Homo sapien
ctccctcgttcagatttgctccttgttcttcag

SEQ ID NO: 417983 - DNA, 33 bp, Homo sapien
taatccaacagtgacacggaacactataactca

SEQ ID NO: 417984 - DNA, 33 bp, Homo sapien
taatccaacagtgacatggaacactataactca

SEQ ID NO: 417985 - DNA, 33 bp, Homo sapien
attcatccccaagccaatatcagtctgaatcag

SEQ ID NO: 417986 - DNA, 33 bp, Homo sapien
attcatccccaagccagtatcagtctgaatcag

SEQ ID NO: 417987 - DNA, 33 bp, Homo sapien
tactctgtacccagaaatctcacctttcctggg

SEQ ID NO: 417988 - DNA, 33 bp, Homo sapien
tactctgtacccagaactctcacctttcctggg

SEQ ID NO: 417989 - DNA, 33 bp, Homo sapien
taaagaaactgttggcaactcgttgtgcgaagt

SEQ ID NO: 417990 - DNA, 33 bp, Homo sapien
taaagaaactgttggcgactcgttgtgcgaagt

SEQ ID NO: 417991 - DNA, 33 bp, Homo sapien
cctacacatgttcatcccttcatatgcctgggt

SEQ ID NO: 417992 - DNA, 33 bp, Homo sapien
cctacacatgttcatctcttcatatgcctgggt

SEQ ID NO: 417993 - DNA, 33 bp, Homo sapien
ccaaaaagtgagttaacgagtcagactcaaatc

SEQ ID NO: 417994 - DNA, 33 bp, Homo sapien
ccaaaaagtgagttaatgagtcagactcaaatc

SEQ ID NO: 417995 - DNA, 33 bp, Homo sapien
tccactgtgatctagacagtaagaaacaaggca

SEQ ID NO: 417996 - DNA, 33 bp, Homo sapien
tccactgtgatctagatagtaagaaacaaggca

SEQ ID NO: 417997 - DNA, 33 bp, Homo sapien
cccttctgtaggcgacaggggcggaatttggac

SEQ ID NO: 417998 - DNA, 33 bp, Homo sapien
cccttctgtaggcgacgggggcggaatttggac

SEQ ID NO: 417999 - DNA, 33 bp, Homo sapien
aagatccaagaggccgaatcaaagaaactgtgg

SEQ ID NO: 418000 - DNA, 33 bp, Homo sapien
aagatccaagaggccgcatcaaagaaactgtgg

SEQ ID NO: 418001 - DNA, 33 bp, Homo sapien
caattggtaattgactaaatccctggcccttcc

SEQ ID NO: 418002 - DNA, 33 bp, Homo sapien
caattggtaattgactcaatccctggcccttcc

SEQ ID NO: 418003 - DNA, 33 bp, Homo sapien
ctagccacacccttgcacaaatacactcatgaa

SEQ ID NO: 418004 - DNA, 33 bp, Homo sapien
ctagccacacccttgcgcaaatacactcatgaa

SEQ ID NO: 418005 - DNA, 33 bp, Homo sapien
tcccaaaccaattcccacagcaaagaggatgga

SEQ ID NO: 418006 - DNA, 33 bp, Homo sapien
tcccaaaccaattcccgcagcaaagaggatgga

SEQ ID NO: 418007 - DNA, 33 bp, Homo sapien
tccacctttggatcgacgctgaccttgtgatgt

SEQ ID NO: 418008 - DNA, 33 bp, Homo sapien
tccacctttggatcgatgctgaccttgtgatgt

SEQ ID NO: 418009 - DNA, 33 bp, Homo sapien
tggtttttaaaaatctcactggcaggcagggtg

SEQ ID NO: 418010 - DNA, 33 bp, Homo sapien
tggtttttaaaaatcttactggcaggcagggtg

SEQ ID NO: 418011 - DNA, 33 bp, Homo sapien
accctcacatgatctgcagtgttagaaaagctc

SEQ ID NO: 418012 - DNA, 33 bp, Homo sapien
accctcacatgatctgtagtgttagaaaagctc

SEQ ID NO: 418013 - DNA, 33 bp, Homo sapien
cttcctgtttcgtgagcccttgaatgtgtgata

SEQ ID NO: 418014 - DNA, 33 bp, Homo sapien
cttcctgtttcgtgagtccttgaatgtgtgata

SEQ ID NO: 418015 - DNA, 33 bp, Homo sapien
ctactatatttgtggcaaagaaaaacctatggg

SEQ ID NO: 418016 - DNA, 33 bp, Homo sapien
ctactatatttgtggcgaagaaaaacctatggg

SEQ ID NO: 418017 - DNA, 33 bp, Homo sapien
gggtggatttgcacataagcagccccctgtgtg

SEQ ID NO: 418018 - DNA, 33 bp, Homo sapien
gggtggatttgcacatgagcagccccctgtgtg

SEQ ID NO: 418019 - DNA, 33 bp, Homo sapien
ctcaggcccttaatccagatgagatttttttaa

SEQ ID NO: 418020 - DNA, 33 bp, Homo sapien
ctcaggcccttaatccggatgagatttttttaa

SEQ ID NO: 418021 - DNA, 33 bp, Homo sapien
cagctgtcttctcagaaccgagccgctgcccct

SEQ ID NO: 418022 - DNA, 33 bp, Homo sapien
cagctgtcttctcagagccgagccgctgcccct

SEQ ID NO: 418023 - DNA, 33 bp, Homo sapien
tccattggccaagaacaccgacatgtgagactt

SEQ ID NO: 418024 - DNA, 33 bp, Homo sapien
tccattggccaagaacgccgacatgtgagactt

SEQ ID NO: 418025 - DNA, 33 bp, Homo sapien
cccgactctagattcccgactctagcagtatct

SEQ ID NO: 418026 - DNA, 33 bp, Homo sapien
cccgactctagattcctgactctagcagtatct

SEQ ID NO: 418027 - DNA, 33 bp, Homo sapien
gtattccaatgctgcaagagcctaacccagagg

SEQ ID NO: 418028 - DNA, 33 bp, Homo sapien
gtattccaatgctgcaggagcctaacccagagg

SEQ ID NO: 418029 - DNA, 33 bp, Homo sapien
ggaattttagccaaaaagcgaccttctcagttg

SEQ ID NO: 418030 - DNA, 33 bp, Homo sapien
ggaattttagccaaaaggcgaccttctcagttg

SEQ ID NO: 418031 - DNA, 33 bp, Homo sapien
agccggccggtcgctacccttgggaacagaatt

SEQ ID NO: 418032 - DNA, 33 bp, Homo sapien
agccggccggtcgctatccttgggaacagaatt

SEQ ID NO: 418033 - DNA, 33 bp, Homo sapien
gccagaaaagagaaacaaggctacacgcaggac

SEQ ID NO: 418034 - DNA, 33 bp, Homo sapien
gccagaaaagagaaaccaggctacacgcaggac

SEQ ID NO: 418035 - DNA, 33 bp, Homo sapien
tttgggtgacacaagacaatgccgggactccct

SEQ ID NO: 418036 - DNA, 33 bp, Homo sapien
tttgggtgacacaagataatgccgggactccct

SEQ ID NO: 418037 - DNA, 33 bp, Homo sapien
gaaatccacacttctaagagagggtctttgggt

SEQ ID NO: 418038 - DNA, 33 bp, Homo sapien
gaaatccacacttctaggagagggtctttgggt

SEQ ID NO: 418039 - DNA, 33 bp, Homo sapien
agctcctgagagtgaaccctgacacgggtgatt

SEQ ID NO: 418040 - DNA, 33 bp, Homo sapien
agctcctgagagtgaatcctgacacgggtgatt

SEQ ID NO: 418041 - DNA, 33 bp, Homo sapien
tacctcacaccatatacgaaaattaggccttgg

SEQ ID NO: 418042 - DNA, 33 bp, Homo sapien
tacctcacaccatatatgaaaattaggccttgg

SEQ ID NO: 418043 - DNA, 33 bp, Homo sapien
aggtcatgaagatgtacgcctgggctttcttct

SEQ ID NO: 418044 - DNA, 33 bp, Homo sapien
aggtcatgaagatgtatgcctgggctttcttct

SEQ ID NO: 418045 - DNA, 33 bp, Homo sapien
acttcagacacttttacagataggattagaagt

SEQ ID NO: 418046 - DNA, 33 bp, Homo sapien
acttcagacacttttatagataggattagaagt

SEQ ID NO: 418047 - DNA, 33 bp, Homo sapien
gttttccagtgacagagtctcccaatttttgtt

SEQ ID NO: 418048 - DNA, 33 bp, Homo sapien
gttttccagtgacagattctcccaatttttgtt

SEQ ID NO: 418049 - DNA, 33 bp, Homo sapien
ggaggagctcggtgaaagaaatgcgtgtctggg

SEQ ID NO: 418050 - DNA, 33 bp, Homo sapien
ggaggagctcggtgaaggaaatgcgtgtctggg

SEQ ID NO: 418051 - DNA, 33 bp, Homo sapien
ggggcacggaacctacaccagtgaaacatcagg

SEQ ID NO: 418052 - DNA, 33 bp, Homo sapien
ggggcacggaacctacgccagtgaaacatcagg

SEQ ID NO: 418053 - DNA, 33 bp, Homo sapien
aggtgctcagatttcggaggatgtgattacagt

SEQ ID NO: 418054 - DNA, 33 bp, Homo sapien
aggtgctcagatttcgtaggatgtgattacagt

SEQ ID NO: 418055 - DNA, 33 bp, Homo sapien
gctcccctgcatttccacatgtagccagaaagc

SEQ ID NO: 418056 - DNA, 33 bp, Homo sapien
gctcccctgcatttccgcatgtagccagaaagc

SEQ ID NO: 418057 - DNA, 33 bp, Homo sapien
ggacaacacagtgaaaacctctctacaaaaaat

SEQ ID NO: 418058 - DNA, 33 bp, Homo sapien
ggacaacacagtgaaaccctctctacaaaaaat

SEQ ID NO: 418059 - DNA, 33 bp, Homo sapien
ttcctcctcaaccttcaaaatattctcctttat

SEQ ID NO: 418060 - DNA, 33 bp, Homo sapien
ttcctcctcaaccttccaaatattctcctttat

SEQ ID NO: 418061 - DNA, 33 bp, Homo sapien
aatggtgcctcggaacactggcttggagtggga

SEQ ID NO: 418062 - DNA, 33 bp, Homo sapien
aatggtgcctcggaacgctggcttggagtggga

SEQ ID NO: 418063 - DNA, 33 bp, Homo sapien
tcatcttgcgcttccccgcctgctgtgttgaag

SEQ ID NO: 418064 - DNA, 33 bp, Homo sapien
tcatcttgcgcttccctgcctgctgtgttgaag

SEQ ID NO: 418065 - DNA, 33 bp, Homo sapien
ccacgtgtctggcaaaagtgaaccaggggccat

SEQ ID NO: 418066 - DNA, 33 bp, Homo sapien
ccacgtgtctggcaaaggtgaaccaggggccat

SEQ ID NO: 418067 - DNA, 33 bp, Homo sapien
atcttctcctgctgaccgggatgtgggctcctt

SEQ ID NO: 418068 - DNA, 33 bp, Homo sapien
atcttctcctgctgactgggatgtgggctcctt

SEQ ID NO: 418069 - DNA, 33 bp, Homo sapien
ctgcccaccaccaaccgcgaaaaaggagatcct

SEQ ID NO: 418070 - DNA, 33 bp, Homo sapien
ctgcccaccaccaacctcgaaaaaggagatcct

SEQ ID NO: 418071 - DNA, 33 bp, Homo sapien
agagagagaaggacaacctacagtcccacagct

SEQ ID NO: 418072 - DNA, 33 bp, Homo sapien
agagagagaaggacaagctacagtcccacagct

SEQ ID NO: 418073 - DNA, 33 bp, Homo sapien
cctgtctctccactgcagaacttctccgggcct

SEQ ID NO: 418074 - DNA, 33 bp, Homo sapien
cctgtctctccactgcggaacttctccgggcct

SEQ ID NO: 418075 - DNA, 33 bp, Homo sapien
catcccataccactgaatcagaatctctgcaag

SEQ ID NO: 418076 - DNA, 33 bp, Homo sapien
catcccataccactgagtcagaatctctgcaag

SEQ ID NO: 418077 - DNA, 33 bp, Homo sapien
cacttctctaacttcccaactgcggccccagga

SEQ ID NO: 418078 - DNA, 33 bp, Homo sapien
cacttctctaacttcctaactgcggccccagga

SEQ ID NO: 418079 - DNA, 33 bp, Homo sapien
acaatgcactctcacccactcacagacacatgc

SEQ ID NO: 418080 - DNA, 33 bp, Homo sapien
acaatgcactctcaccgactcacagacacatgc

SEQ ID NO: 418081 - DNA, 33 bp, Homo sapien
ctggactctaaactcaaggcctactgtggtgct

SEQ ID NO: 418082 - DNA, 33 bp, Homo sapien
ctggactctaaactcagggcctactgtggtgct

SEQ ID NO: 418083 - DNA, 33 bp, Homo sapien
agcaggaaaaggctcacgcttcagtagaacgga

SEQ ID NO: 418084 - DNA, 33 bp, Homo sapien
agcaggaaaaggctcatgcttcagtagaacgga

SEQ ID NO: 418085 - DNA, 33 bp, Homo sapien
ccagctgtgtgtgctcacctaaaaacatacacc

SEQ ID NO: 418086 - DNA, 33 bp, Homo sapien
ccagctgtgtgtgctcgcctaaaaacatacacc

SEQ ID NO: 418087 - DNA, 33 bp, Homo sapien
ggcaaatcatagtagaaaggaagcaactccaca

SEQ ID NO: 418088 - DNA, 33 bp, Homo sapien
ggcaaatcatagtagagaggaagcaactccaca

SEQ ID NO: 418089 - DNA, 33 bp, Homo sapien
atgatgactccagctcagactgggtatccagtg

SEQ ID NO: 418090 - DNA, 33 bp, Homo sapien
atgatgactccagctcggactgggtatccagtg

SEQ ID NO: 418091 - DNA, 33 bp, Homo sapien
gtagctcccattgctacggccggcatgaatttg

SEQ ID NO: 418092 - DNA, 33 bp, Homo sapien
gtagctcccattgctatggccggcatgaatttg

SEQ ID NO: 418093 - DNA, 33 bp, Homo sapien
accccgggtggactgacgcctgctaacagggaa

SEQ ID NO: 418094 - DNA, 33 bp, Homo sapien
accccgggtggactgatgcctgctaacagggaa

SEQ ID NO: 418095 - DNA, 33 bp, Homo sapien
cttgccggagactcctcacacagccttatccgc

SEQ ID NO: 418096 - DNA, 33 bp, Homo sapien
cttgccggagactcctgacacagccttatccgc

SEQ ID NO: 418097 - DNA, 33 bp, Homo sapien
gtcaggtttaacccgagagccttgcaagcagcg

SEQ ID NO: 418098 - DNA, 33 bp, Homo sapien
gtcaggtttaacccgatagccttgcaagcagcg

SEQ ID NO: 418099 - DNA, 33 bp, Homo sapien
taaaaccccagtgagcaaccgctacatacctag

SEQ ID NO: 418100 - DNA, 33 bp, Homo sapien
taaaaccccagtgagctaccgctacatacctag

SEQ ID NO: 418101 - DNA, 33 bp, Homo sapien
tccaaagtggttgcacaactttacattcccacc

SEQ ID NO: 418102 - DNA, 33 bp, Homo sapien
tccaaagtggttgcacgactttacattcccacc

SEQ ID NO: 418103 - DNA, 33 bp, Homo sapien
gtgaggaagagattacaaagaggcacaatgtaa

SEQ ID NO: 418104 - DNA, 33 bp, Homo sapien
gtgaggaagagattacgaagaggcacaatgtaa

SEQ ID NO: 418105 - DNA, 33 bp, Homo sapien
tctgcctgttatctaaacgccgcctcccagcca

SEQ ID NO: 418106 - DNA, 33 bp, Homo sapien
tctgcctgttatctaaccgccgcctcccagcca

SEQ ID NO: 418107 - DNA, 33 bp, Homo sapien
ccatcattttgggacacctcttcttaactccat

SEQ ID NO: 418108 - DNA, 33 bp, Homo sapien
ccatcattttgggacatctcttcttaactccat

SEQ ID NO: 418109 - DNA, 33 bp, Homo sapien
acacctttgggcttccagatttcttggtcacct

SEQ ID NO: 418110 - DNA, 33 bp, Homo sapien
acacctttgggcttccggatttcttggtcacct

SEQ ID NO: 418111 - DNA, 33 bp, Homo sapien
tctaaattgttgataacgaaacgcgctcatcta

SEQ ID NO: 418112 - DNA, 33 bp, Homo sapien
tctaaattgttgataatgaaacgcgctcatcta

SEQ ID NO: 418113 - DNA, 33 bp, Homo sapien
gacggatttctgaaaaccttagaggaatgaata

SEQ ID NO: 418114 - DNA, 33 bp, Homo sapien
gacggatttctgaaaatcttagaggaatgaata

SEQ ID NO: 418115 - DNA, 33 bp, Homo sapien
aagatgtattaatcccaaaaggcaattgctgag

SEQ ID NO: 418116 - DNA, 33 bp, Homo sapien
aagatgtattaatcccgaaaggcaattgctgag

SEQ ID NO: 418117 - DNA, 33 bp, Homo sapien
gtgggttagttgcagacggacgttcaccgggac

SEQ ID NO: 418118 - DNA, 33 bp, Homo sapien
gtgggttagttgcagatggacgttcaccgggac

SEQ ID NO: 418119 - DNA, 33 bp, Homo sapien
tattattaaacaaacccaactgtcgatacaggc

SEQ ID NO: 418120 - DNA, 33 bp, Homo sapien
tattattaaacaaaccgaactgtcgatacaggc

SEQ ID NO: 418121 - DNA, 33 bp, Homo sapien
aggtgggtcctgaaaccaggagctggcttggaa

SEQ ID NO: 418122 - DNA, 33 bp, Homo sapien
aggtgggtcctgaaactaggagctggcttggaa

SEQ ID NO: 418123 - DNA, 33 bp, Homo sapien
gtctctccagcctaacgcttgatggctctgggc

SEQ ID NO: 418124 - DNA, 33 bp, Homo sapien
gtctctccagcctaactcttgatggctctgggc

SEQ ID NO: 418125 - DNA, 33 bp, Homo sapien
caggtcagtacacctgcagagatggttctgaac

SEQ ID NO: 418126 - DNA, 33 bp, Homo sapien
caggtcagtacacctggagagatggttctgaac

SEQ ID NO: 418127 - DNA, 33 bp, Homo sapien
gccgaggctgagagacaacggaaacttgtggag

SEQ ID NO: 418128 - DNA, 33 bp, Homo sapien
gccgaggctgagagacgacggaaacttgtggag

SEQ ID NO: 418129 - DNA, 33 bp, Homo sapien
gtcttcctgcaaacagaatgtgagggtctcatt

SEQ ID NO: 418130 - DNA, 33 bp, Homo sapien
gtcttcctgcaaacaggatgtgagggtctcatt

SEQ ID NO: 418131 - DNA, 33 bp, Homo sapien
ttcatgactaatttaaagaccagaagatattcc

SEQ ID NO: 418132 - DNA, 33 bp, Homo sapien
ttcatgactaatttaaggaccagaagatattcc

SEQ ID NO: 418133 - DNA, 33 bp, Homo sapien
attaacccgcagcccaatctctgctgttacagc

SEQ ID NO: 418134 - DNA, 33 bp, Homo sapien
attaacccgcagcccagtctctgctgttacagc

SEQ ID NO: 418135 - DNA, 33 bp, Homo sapien
tgctttttccagacacaatgttaactctctggt

SEQ ID NO: 418136 - DNA, 33 bp, Homo sapien
tgctttttccagacacgatgttaactctctggt

SEQ ID NO: 418137 - DNA, 33 bp, Homo sapien
aggctctaccttacacacaaaatcaattcttcc

SEQ ID NO: 418138 - DNA, 33 bp, Homo sapien
aggctctaccttacacgcaaaatcaattcttcc

SEQ ID NO: 418139 - DNA, 33 bp, Homo sapien
tgggttaaataagcttaaacgtgaacaacagaa

SEQ ID NO: 418140 - DNA, 33 bp, Homo sapien
tgggttaaataagcttcaacgtgaacaacagaa

SEQ ID NO: 418141 - DNA, 33 bp, Homo sapien
ttttatgaaactcgaccctagctgagctctagc

SEQ ID NO: 418142 - DNA, 33 bp, Homo sapien
ttttatgaaactcgactctagctgagctctagc

SEQ ID NO: 418143 - DNA, 33 bp, Homo sapien
gtcaaccccagagaagactaagaccaagaagga

SEQ ID NO: 418144 - DNA, 33 bp, Homo sapien
gtcaaccccagagaagcctaagaccaagaagga

SEQ ID NO: 418145 - DNA, 33 bp, Homo sapien
caccagctccgtatgcaatctcagtctcctccc

SEQ ID NO: 418146 - DNA, 33 bp, Homo sapien
caccagctccgtatgcgatctcagtctcctccc

SEQ ID NO: 418147 - DNA, 33 bp, Homo sapien
cgcccactcctaactgaagccgagacacagaag

SEQ ID NO: 418148 - DNA, 33 bp, Homo sapien
cgcccactcctaactggagccgagacacagaag

SEQ ID NO: 418149 - DNA, 33 bp, Homo sapien
agctcaattgcaaagcacccagacaagcgtatt

SEQ ID NO: 418150 - DNA, 33 bp, Homo sapien
agctcaattgcaaagcgcccagacaagcgtatt

SEQ ID NO: 418151 - DNA, 33 bp, Homo sapien
agggagtttgtttccacacagagcagagttggg

SEQ ID NO: 418152 - DNA, 33 bp, Homo sapien
agggagtttgtttccatacagagcagagttggg

SEQ ID NO: 418153 - DNA, 33 bp, Homo sapien
tggtccatgtctctcacctgcaaagtctaggga

SEQ ID NO: 418154 - DNA, 33 bp, Homo sapien
tggtccatgtctctcatctgcaaagtctaggga

SEQ ID NO: 418155 - DNA, 33 bp, Homo sapien
aacaaatggctggtcgcacattttagcctggtg

SEQ ID NO: 418156 - DNA, 33 bp, Homo sapien
aacaaatggctggtcgtacattttagcctggtg

SEQ ID NO: 418157 - DNA, 33 bp, Homo sapien
aatgaaacatcatgtaagtgtatgtatatgtgt

SEQ ID NO: 418158 - DNA, 33 bp, Homo sapien
aatgaaacatcatgtacgtgtatgtatatgtgt

SEQ ID NO: 418159 - DNA, 33 bp, Homo sapien
caagaagagcccattcacaaatcggatcaagaa

SEQ ID NO: 418160 - DNA, 33 bp, Homo sapien
caagaagagcccattcgcaaatcggatcaagaa

SEQ ID NO: 418161 - DNA, 33 bp, Homo sapien
tctgaatttttatagaaccgcctccttccctct

SEQ ID NO: 418162 - DNA, 33 bp, Homo sapien
tctgaatttttatagagccgcctccttccctct

SEQ ID NO: 418163 - DNA, 33 bp, Homo sapien
ataccgtcacagctcaacaaagatgcgtcatgt

SEQ ID NO: 418164 - DNA, 33 bp, Homo sapien
ataccgtcacagctcagcaaagatgcgtcatgt

SEQ ID NO: 418165 - DNA, 33 bp, Homo sapien
tgatggtcctgtttaactctccaactcttccct

SEQ ID NO: 418166 - DNA, 33 bp, Homo sapien
tgatggtcctgtttaattctccaactcttccct

SEQ ID NO: 418167 - DNA, 33 bp, Homo sapien
tcactgcaaggaaaagacacgtgattctgcacg

SEQ ID NO: 418168 - DNA, 33 bp, Homo sapien
tcactgcaaggaaaagccacgtgattctgcacg

SEQ ID NO: 418169 - DNA, 33 bp, Homo sapien
cactctctcatgcacacgcacacggtatttctg

SEQ ID NO: 418170 - DNA, 33 bp, Homo sapien
cactctctcatgcacatgcacacggtatttctg

SEQ ID NO: 418171 - DNA, 33 bp, Homo sapien
gttttcacccccagaactcaaatggccttagca

SEQ ID NO: 418172 - DNA, 33 bp, Homo sapien
gttttcacccccagaattcaaatggccttagca

SEQ ID NO: 418173 - DNA, 33 bp, Homo sapien
catttgggcctagcacagtgaatgcaccctcta

SEQ ID NO: 418174 - DNA, 33 bp, Homo sapien
catttgggcctagcacggtgaatgcaccctcta

SEQ ID NO: 418175 - DNA, 33 bp, Homo sapien
agagagaattacaccccggccttgaaagaatga

SEQ ID NO: 418176 - DNA, 33 bp, Homo sapien
agagagaattacaccctggccttgaaagaatga

SEQ ID NO: 418177 - DNA, 33 bp, Homo sapien
ttgtcccaaaacacctaacgtgcatgggaaata

SEQ ID NO: 418178 - DNA, 33 bp, Homo sapien
ttgtcccaaaacacctgacgtgcatgggaaata

SEQ ID NO: 418179 - DNA, 33 bp, Homo sapien
tcctccacactgaccaggaatgagaacagagac

SEQ ID NO: 418180 - DNA, 33 bp, Homo sapien
tcctccacactgaccatgaatgagaacagagac

SEQ ID NO: 418181 - DNA, 33 bp, Homo sapien
gacccggatcctggaacggaaaccagtggcagg

SEQ ID NO: 418182 - DNA, 33 bp, Homo sapien
gacccggatcctggaatggaaaccagtggcagg

SEQ ID NO: 418183 - DNA, 33 bp, Homo sapien
tctagccaggaagtaacaatgtgatgtgggggc

SEQ ID NO: 418184 - DNA, 33 bp, Homo sapien
tctagccaggaagtaataatgtgatgtgggggc

SEQ ID NO: 418185 - DNA, 33 bp, Homo sapien
tgaagccatggacttacggggccgtttgttacg

SEQ ID NO: 418186 - DNA, 33 bp, Homo sapien
tgaagccatggacttatggggccgtttgttacg

SEQ ID NO: 418187 - DNA, 33 bp, Homo sapien
ctgaagtccatgaagcaagttgggattctcttt

SEQ ID NO: 418188 - DNA, 33 bp, Homo sapien
ctgaagtccatgaagcgagttgggattctcttt

SEQ ID NO: 418189 - DNA, 33 bp, Homo sapien
ccctaagatatgcccactagcgtgccatgttag

SEQ ID NO: 418190 - DNA, 33 bp, Homo sapien
ccctaagatatgcccattagcgtgccatgttag

SEQ ID NO: 418191 - DNA, 33 bp, Homo sapien
catcacagatgtaacaacacggcttcaataaag

SEQ ID NO: 418192 - DNA, 33 bp, Homo sapien
catcacagatgtaacaccacggcttcaataaag

SEQ ID NO: 418193 - DNA, 33 bp, Homo sapien
gcggtcacttgttatagcagatgcaggtcactc

SEQ ID NO: 418194 - DNA, 33 bp, Homo sapien
gcggtcacttgttatatcagatgcaggtcactc

SEQ ID NO: 418195 - DNA, 33 bp, Homo sapien
tctggcaggaacatggcatgtttgaggaggaag

SEQ ID NO: 418196 - DNA, 33 bp, Homo sapien
tctggcaggaacatgggatgtttgaggaggaag

SEQ ID NO: 418197 - DNA, 33 bp, Homo sapien
aaatattctcttctcactcacattctttctgtt

SEQ ID NO: 418198 - DNA, 33 bp, Homo sapien
aaatattctcttctcattcacattctttctgtt

SEQ ID NO: 418199 - DNA, 33 bp, Homo sapien
gctactcacctgacaacgttcagagtcctttct

SEQ ID NO: 418200 - DNA, 33 bp, Homo sapien
gctactcacctgacaatgttcagagtcctttct

SEQ ID NO: 418201 - DNA, 33 bp, Homo sapien
gaaaagcctgaagtgcacacaattcctcagtgg

SEQ ID NO: 418202 - DNA, 33 bp, Homo sapien
gaaaagcctgaagtgcgcacaattcctcagtgg

SEQ ID NO: 418203 - DNA, 33 bp, Homo sapien
tggcagaattaggcagcatcagaatgagggact

SEQ ID NO: 418204 - DNA, 33 bp, Homo sapien
tggcagaattaggcaggatcagaatgagggact

SEQ ID NO: 418205 - DNA, 33 bp, Homo sapien
aatccagtcactggacagagtaccacccccata

SEQ ID NO: 418206 - DNA, 33 bp, Homo sapien
aatccagtcactggacggagtaccacccccata

SEQ ID NO: 418207 - DNA, 33 bp, Homo sapien
gttttggtgaaatgaacgctgcaaagaaggaag

SEQ ID NO: 418208 - DNA, 33 bp, Homo sapien
gttttggtgaaatgaatgctgcaaagaaggaag

SEQ ID NO: 418209 - DNA, 33 bp, Homo sapien
caccaacaaatgggataaagaagttgtcactga

SEQ ID NO: 418210 - DNA, 33 bp, Homo sapien
caccaacaaatgggatcaagaagttgtcactga

SEQ ID NO: 418211 - DNA, 33 bp, Homo sapien
tgcattgctatacagaaatgcctgaggctgggt

SEQ ID NO: 418212 - DNA, 33 bp, Homo sapien
tgcattgctatacagagatgcctgaggctgggt

SEQ ID NO: 418213 - DNA, 33 bp, Homo sapien
ctggcaaatgatttcaacacgagagttggaggg

SEQ ID NO: 418214 - DNA, 33 bp, Homo sapien
ctggcaaatgatttcatcacgagagttggaggg

SEQ ID NO: 418215 - DNA, 33 bp, Homo sapien
agcccagcttcttcgccgattcattgggatccc

SEQ ID NO: 418216 - DNA, 33 bp, Homo sapien
agcccagcttcttcgctgattcattgggatccc

SEQ ID NO: 418217 - DNA, 33 bp, Homo sapien
ctcaacctgggtcagtaacgccctcagcatctc

SEQ ID NO: 418218 - DNA, 33 bp, Homo sapien
ctcaacctgggtcagtgacgccctcagcatctc

SEQ ID NO: 418219 - DNA, 33 bp, Homo sapien
ccactccattgtccagaagcgtgacccctcacc

SEQ ID NO: 418220 - DNA, 33 bp, Homo sapien
ccactccattgtccaggagcgtgacccctcacc

SEQ ID NO: 418221 - DNA, 33 bp, Homo sapien
cccatactcttcatgcaagccttcaggtagacg

SEQ ID NO: 418222 - DNA, 33 bp, Homo sapien
cccatactcttcatgcgagccttcaggtagacg

SEQ ID NO: 418223 - DNA, 33 bp, Homo sapien
tttcaggtgacagatacaaaggacaaatgttta

SEQ ID NO: 418224 - DNA, 33 bp, Homo sapien
tttcaggtgacagatataaaggacaaatgttta

SEQ ID NO: 418225 - DNA, 33 bp, Homo sapien
aaatgttcccagatacacagtgtctgcctcatc

SEQ ID NO: 418226 - DNA, 33 bp, Homo sapien
aaatgttcccagatacgcagtgtctgcctcatc

SEQ ID NO: 418227 - DNA, 33 bp, Homo sapien
aaggaaattgaagcacagaaaatcaaagatcat

SEQ ID NO: 418228 - DNA, 33 bp, Homo sapien
aaggaaattgaagcacggaaaatcaaagatcat

SEQ ID NO: 418229 - DNA, 33 bp, Homo sapien
tagagtccaggtccacaggaagtagttaaggtt

SEQ ID NO: 418230 - DNA, 33 bp, Homo sapien
tagagtccaggtccacgggaagtagttaaggtt

SEQ ID NO: 418231 - DNA, 33 bp, Homo sapien
aaggtcaaggatctccacttcccagatggcacc

SEQ ID NO: 418232 - DNA, 33 bp, Homo sapien
aaggtcaaggatctccgcttcccagatggcacc

SEQ ID NO: 418233 - DNA, 33 bp, Homo sapien
ggccacgagctcagtcactaactgaacctgcct

SEQ ID NO: 418234 - DNA, 33 bp, Homo sapien
ggccacgagctcagtcgctaactgaacctgcct

SEQ ID NO: 418235 - DNA, 33 bp, Homo sapien
ctaaatctgtcacccaagagttgaggagcctaa

SEQ ID NO: 418236 - DNA, 33 bp, Homo sapien
ctaaatctgtcacccaggagttgaggagcctaa

SEQ ID NO: 418237 - DNA, 33 bp, Homo sapien
ggcacaaggtctccaacggactctcaaatggtt

SEQ ID NO: 418238 - DNA, 33 bp, Homo sapien
ggcacaaggtctccaatggactctcaaatggtt

SEQ ID NO: 418239 - DNA, 33 bp, Homo sapien
gcagcaggaccccagaccagctgagcgtgcaca

SEQ ID NO: 418240 - DNA, 33 bp, Homo sapien
gcagcaggaccccagagcagctgagcgtgcaca

SEQ ID NO: 418241 - DNA, 33 bp, Homo sapien
ggggaccgaggagcagccaatcccggggccctg

SEQ ID NO: 418242 - DNA, 33 bp, Homo sapien
ggggaccgaggagcagtcaatcccggggccctg

SEQ ID NO: 418243 - DNA, 33 bp, Homo sapien
ttcgacagggtcatgacgaaaggtgcagcccag

SEQ ID NO: 418244 - DNA, 33 bp, Homo sapien
ttcgacagggtcatgatgaaaggtgcagcccag

SEQ ID NO: 418245 - DNA, 33 bp, Homo sapien
gactattaaacatttaccagcttgccattggtt

SEQ ID NO: 418246 - DNA, 33 bp, Homo sapien
gactattaaacatttatcagcttgccattggtt

SEQ ID NO: 418247 - DNA, 33 bp, Homo sapien
ccaccaccgcagtcacaacgctgaacgctgcgg

SEQ ID NO: 418248 - DNA, 33 bp, Homo sapien
ccaccaccgcagtcacgacgctgaacgctgcgg

SEQ ID NO: 418249 - DNA, 33 bp, Homo sapien
gtggctttttccctcaaaatcattccctggaga

SEQ ID NO: 418250 - DNA, 33 bp, Homo sapien
gtggctttttccctcacaatcattccctggaga

SEQ ID NO: 418251 - DNA, 33 bp, Homo sapien
ttgcaagtgctgcaaacaaagaattgccaacag

SEQ ID NO: 418252 - DNA, 33 bp, Homo sapien
ttgcaagtgctgcaaagaaagaattgccaacag

SEQ ID NO: 418253 - DNA, 33 bp, Homo sapien
aaccagtagcagccccaatggcaccagattaac

SEQ ID NO: 418254 - DNA, 33 bp, Homo sapien
aaccagtagcagccccgatggcaccagattaac

SEQ ID NO: 418255 - DNA, 33 bp, Homo sapien
cttctgccaccttaagaagaaccagcaggaacc

SEQ ID NO: 418256 - DNA, 33 bp, Homo sapien
cttctgccaccttaagcagaaccagcaggaacc

SEQ ID NO: 418257 - DNA, 33 bp, Homo sapien
tttgcatatattttaactgcaattgactatgtg

SEQ ID NO: 418258 - DNA, 33 bp, Homo sapien
tttgcatatattttaagtgcaattgactatgtg

SEQ ID NO: 418259 - DNA, 33 bp, Homo sapien
cagcagcattatccacaatcggaaagggtggaa

SEQ ID NO: 418260 - DNA, 33 bp, Homo sapien
cagcagcattatccacgatcggaaagggtggaa

SEQ ID NO: 418261 - DNA, 33 bp, Homo sapien
tctactttctgtcccaatgagcttgattattct

SEQ ID NO: 418262 - DNA, 33 bp, Homo sapien
tctactttctgtcccagtgagcttgattattct

SEQ ID NO: 418263 - DNA, 33 bp, Homo sapien
aaacacgtttctcatgaatgtaaattagtacaa

SEQ ID NO: 418264 - DNA, 33 bp, Homo sapien
aaacacgtttctcatgcatgtaaattagtacaa

SEQ ID NO: 418265 - DNA, 33 bp, Homo sapien
gcagctgctgtggaaactggtttggcatttcct

SEQ ID NO: 418266 - DNA, 33 bp, Homo sapien
gcagctgctgtggaaattggtttggcatttcct

SEQ ID NO: 418267 - DNA, 33 bp, Homo sapien
tgcaatctatcacacaagatcattttctttaaa

SEQ ID NO: 418268 - DNA, 33 bp, Homo sapien
tgcaatctatcacacaggatcattttctttaaa

SEQ ID NO: 418269 - DNA, 33 bp, Homo sapien
tcccattacacttggcactacggctgctggctg

SEQ ID NO: 418270 - DNA, 33 bp, Homo sapien
tcccattacacttggcgctacggctgctggctg

SEQ ID NO: 418271 - DNA, 33 bp, Homo sapien
aggcagaatgcattgacccaggaagcagggggt

SEQ ID NO: 418272 - DNA, 33 bp, Homo sapien
aggcagaatgcattgatccaggaagcagggggt

SEQ ID NO: 418273 - DNA, 33 bp, Homo sapien
caactaagtggtagccccaatggcagctgttct

SEQ ID NO: 418274 - DNA, 33 bp, Homo sapien
caactaagtggtagcctcaatggcagctgttct

SEQ ID NO: 418275 - DNA, 33 bp, Homo sapien
gttacagcagcaatagacgtctaatacaccacc

SEQ ID NO: 418276 - DNA, 33 bp, Homo sapien
gttacagcagcaatagtcgtctaatacaccacc

SEQ ID NO: 418277 - DNA, 33 bp, Homo sapien
gcagatggcagaggaacagaccaaaggctgaga

SEQ ID NO: 418278 - DNA, 33 bp, Homo sapien
gcagatggcagaggaagagaccaaaggctgaga

SEQ ID NO: 418279 - DNA, 33 bp, Homo sapien
atttcacttcttgagacgcacattctcccaaca

SEQ ID NO: 418280 - DNA, 33 bp, Homo sapien
atttcacttcttgagatgcacattctcccaaca

SEQ ID NO: 418281 - DNA, 33 bp, Homo sapien
gcagagactggagtcacgcacctacaagtcgag

SEQ ID NO: 418282 - DNA, 33 bp, Homo sapien
gcagagactggagtcatgcacctacaagtcgag

SEQ ID NO: 418283 - DNA, 33 bp, Homo sapien
gacaagacacacagacactgctgtcccggtact

SEQ ID NO: 418284 - DNA, 33 bp, Homo sapien
gacaagacacacagacgctgctgtcccggtact

SEQ ID NO: 418285 - DNA, 33 bp, Homo sapien
tgtggggcctcagggagcctgtgtccatttgcc

SEQ ID NO: 418286 - DNA, 33 bp, Homo sapien
tgtggggcctcagggatcctgtgtccatttgcc

SEQ ID NO: 418287 - DNA, 33 bp, Homo sapien
gggtctattggtaacacactaagcactttgcaa

SEQ ID NO: 418288 - DNA, 33 bp, Homo sapien
gggtctattggtaacatactaagcactttgcaa

SEQ ID NO: 418289 - DNA, 33 bp, Homo sapien
gagagatggctcacaaatggtcgtcactgttgt

SEQ ID NO: 418290 - DNA, 33 bp, Homo sapien
gagagatggctcacaattggtcgtcactgttgt

SEQ ID NO: 418291 - DNA, 33 bp, Homo sapien
tgggggatgctttccagactgaagtgaactgag

SEQ ID NO: 418292 - DNA, 33 bp, Homo sapien
tgggggatgctttccatactgaagtgaactgag

SEQ ID NO: 418293 - DNA, 33 bp, Homo sapien
cctggcccatttgctccgacgggcctaagactc

SEQ ID NO: 418294 - DNA, 33 bp, Homo sapien
cctggcccatttgctctgacgggcctaagactc

SEQ ID NO: 418295 - DNA, 33 bp, Homo sapien
aagatgaaagttgacaaaggaaaaatgaggagg

SEQ ID NO: 418296 - DNA, 33 bp, Homo sapien
aagatgaaagttgacacaggaaaaatgaggagg

SEQ ID NO: 418297 - DNA, 33 bp, Homo sapien
ctttctctgggatgcactgagtcagggaataga

SEQ ID NO: 418298 - DNA, 33 bp, Homo sapien
ctttctctgggatgcattgagtcagggaataga

SEQ ID NO: 418299 - DNA, 33 bp, Homo sapien
agcaaaagcatcccaacggtctgtgggtcagaa

SEQ ID NO: 418300 - DNA, 33 bp, Homo sapien
agcaaaagcatcccaatggtctgtgggtcagaa

SEQ ID NO: 418301 - DNA, 33 bp, Homo sapien
tcactgtatttttgcacccaatagccaaatctt

SEQ ID NO: 418302 - DNA, 33 bp, Homo sapien
tcactgtatttttgcagccaatagccaaatctt

SEQ ID NO: 418303 - DNA, 33 bp, Homo sapien
ttgcctgcaattctgacacaagttagctaccat

SEQ ID NO: 418304 - DNA, 33 bp, Homo sapien
ttgcctgcaattctgatacaagttagctaccat

SEQ ID NO: 418305 - DNA, 33 bp, Homo sapien
tcctctggagatattccaaacgcacagtcacga

SEQ ID NO: 418306 - DNA, 33 bp, Homo sapien
tcctctggagatattctaaacgcacagtcacga

SEQ ID NO: 418307 - DNA, 33 bp, Homo sapien
ctgcccagacacatcaagtgcccttctcggagg

SEQ ID NO: 418308 - DNA, 33 bp, Homo sapien
ctgcccagacacatcatgtgcccttctcggagg

SEQ ID NO: 418309 - DNA, 33 bp, Homo sapien
cttgccttgggacaccaatactcagctgacagc

SEQ ID NO: 418310 - DNA, 33 bp, Homo sapien
cttgccttgggacaccgatactcagctgacagc

SEQ ID NO: 418311 - DNA, 33 bp, Homo sapien
aacctctgaatttataactagttgatcgaaagt

SEQ ID NO: 418312 - DNA, 33 bp, Homo sapien
aacctctgaatttatacctagttgatcgaaagt

SEQ ID NO: 418313 - DNA, 33 bp, Homo sapien
gagcagaggactgtgcaaccttctctggtactg

SEQ ID NO: 418314 - DNA, 33 bp, Homo sapien
gagcagaggactgtgcgaccttctctggtactg

SEQ ID NO: 418315 - DNA, 33 bp, Homo sapien
ttgaaagcactcagcgcagtcttgcccagggga

SEQ ID NO: 418316 - DNA, 33 bp, Homo sapien
ttgaaagcactcagcgtagtcttgcccagggga

SEQ ID NO: 418317 - DNA, 33 bp, Homo sapien
tttgtggaaagcaacaatacatatcagtcaatg

SEQ ID NO: 418318 - DNA, 33 bp, Homo sapien
tttgtggaaagcaacagtacatatcagtcaatg

SEQ ID NO: 418319 - DNA, 33 bp, Homo sapien
cctgtctccaacttcacctacagccccgacacc

SEQ ID NO: 418320 - DNA, 33 bp, Homo sapien
cctgtctccaacttcatctacagccccgacacc

SEQ ID NO: 418321 - DNA, 33 bp, Homo sapien
cctctgggcagccgggaagcggtcgcgttgggg

SEQ ID NO: 418322 - DNA, 33 bp, Homo sapien
cctctgggcagccgggcagcggtcgcgttgggg

SEQ ID NO: 418323 - DNA, 33 bp, Homo sapien
ggttaagaagcaggaacgtttgtcttgaggcca

SEQ ID NO: 418324 - DNA, 33 bp, Homo sapien
ggttaagaagcaggaatgtttgtcttgaggcca

SEQ ID NO: 418325 - DNA, 33 bp, Homo sapien
agagaaaaaagctcagcattagcagagaagacg

SEQ ID NO: 418326 - DNA, 33 bp, Homo sapien
agagaaaaaagctcagtattagcagagaagacg

SEQ ID NO: 418327 - DNA, 33 bp, Homo sapien
tctgacacctctgttcacttcatttaaaaaaaa

SEQ ID NO: 418328 - DNA, 33 bp, Homo sapien
tctgacacctctgttcgcttcatttaaaaaaaa

SEQ ID NO: 418329 - DNA, 33 bp, Homo sapien
aacagacaaatgaatcaacaacgcacggcgttc

SEQ ID NO: 418330 - DNA, 33 bp, Homo sapien
aacagacaaatgaatcgacaacgcacggcgttc

SEQ ID NO: 418331 - DNA, 33 bp, Homo sapien
gcttaaatgaactgcccgaggggaagctgacac

SEQ ID NO: 418332 - DNA, 33 bp, Homo sapien
gcttaaatgaactgcctgaggggaagctgacac

SEQ ID NO: 418333 - DNA, 33 bp, Homo sapien
cagagcaagtgagaacacaggccgaggccaggt

SEQ ID NO: 418334 - DNA, 33 bp, Homo sapien
cagagcaagtgagaacgcaggccgaggccaggt

SEQ ID NO: 418335 - DNA, 33 bp, Homo sapien
ccctcaatcaccctcaatcaccatcttctgtgg

SEQ ID NO: 418336 - DNA, 33 bp, Homo sapien
ccctcaatcaccctcagtcaccatcttctgtgg

SEQ ID NO: 418337 - DNA, 33 bp, Homo sapien
gtatgtggactagagaacagaaaacggcttgtc

SEQ ID NO: 418338 - DNA, 33 bp, Homo sapien
gtatgtggactagagagcagaaaacggcttgtc

SEQ ID NO: 418339 - DNA, 33 bp, Homo sapien
aacaggactgagatcacaaggaatgaggcagag

SEQ ID NO: 418340 - DNA, 33 bp, Homo sapien
aacaggactgagatcagaaggaatgaggcagag

SEQ ID NO: 418341 - DNA, 33 bp, Homo sapien
ctgctcctgcacacacaactctccaacgatcat

SEQ ID NO: 418342 - DNA, 33 bp, Homo sapien
ctgctcctgcacacacgactctccaacgatcat

SEQ ID NO: 418343 - DNA, 33 bp, Homo sapien
gatgtatttagcagaacatggacaagcagggaa

SEQ ID NO: 418344 - DNA, 33 bp, Homo sapien
gatgtatttagcagaatatggacaagcagggaa

SEQ ID NO: 418345 - DNA, 33 bp, Homo sapien
ccccatccttaacgcgaatcccatgctttacaa

SEQ ID NO: 418346 - DNA, 33 bp, Homo sapien
ccccatccttaacgcggatcccatgctttacaa

SEQ ID NO: 418347 - DNA, 33 bp, Homo sapien
tctgggacattaaaaaagcaaaacacaactatg

SEQ ID NO: 418348 - DNA, 33 bp, Homo sapien
tctgggacattaaaaacgcaaaacacaactatg

SEQ ID NO: 418349 - DNA, 33 bp, Homo sapien
cattcgatgatatggaagcagactctacttgtc

SEQ ID NO: 418350 - DNA, 33 bp, Homo sapien
cattcgatgatatggaggcagactctacttgtc

SEQ ID NO: 418351 - DNA, 33 bp, Homo sapien
acaaacagaaatgagccacaggagaagcgcgag

SEQ ID NO: 418352 - DNA, 33 bp, Homo sapien
acaaacagaaatgagctacaggagaagcgcgag

SEQ ID NO: 418353 - DNA, 33 bp, Homo sapien
tgaatccagccagaagacagaaggcgctgaggg

SEQ ID NO: 418354 - DNA, 33 bp, Homo sapien
tgaatccagccagaaggcagaaggcgctgaggg

SEQ ID NO: 418355 - DNA, 33 bp, Homo sapien
gcccgccaagatctacggaatcggacaccctgg

SEQ ID NO: 418356 - DNA, 33 bp, Homo sapien
gcccgccaagatctactgaatcggacaccctgg

SEQ ID NO: 418357 - DNA, 33 bp, Homo sapien
gatgcttgttaatatccaaattgcaaatcccag

SEQ ID NO: 418358 - DNA, 33 bp, Homo sapien
gatgcttgttaatatctaaattgcaaatcccag

SEQ ID NO: 418359 - DNA, 33 bp, Homo sapien
ggaggatggaagcccaactggaaggtgcccagc

SEQ ID NO: 418360 - DNA, 33 bp, Homo sapien
ggaggatggaagcccagctggaaggtgcccagc

SEQ ID NO: 418361 - DNA, 33 bp, Homo sapien
tctccctccaggtttacgtggctgccatgtgct

SEQ ID NO: 418362 - DNA, 33 bp, Homo sapien
tctccctccaggtttatgtggctgccatgtgct

SEQ ID NO: 418363 - DNA, 33 bp, Homo sapien
ctcacctgcggatcagaattcctacaggaggct

SEQ ID NO: 418364 - DNA, 33 bp, Homo sapien
ctcacctgcggatcaggattcctacaggaggct

SEQ ID NO: 418365 - DNA, 33 bp, Homo sapien
cagccaaggttgcataagatgtcagccagaggc

SEQ ID NO: 418366 - DNA, 33 bp, Homo sapien
cagccaaggttgcatacgatgtcagccagaggc

SEQ ID NO: 418367 - DNA, 33 bp, Homo sapien
cagacatacaaaagtcaaaagttgaaagaagac

SEQ ID NO: 418368 - DNA, 33 bp, Homo sapien
cagacatacaaaagtcgaaagttgaaagaagac

SEQ ID NO: 418369 - DNA, 33 bp, Homo sapien
tggctatgtttagtaacaggctcacaaaactcc

SEQ ID NO: 418370 - DNA, 33 bp, Homo sapien
tggctatgtttagtaataggctcacaaaactcc

SEQ ID NO: 418371 - DNA, 33 bp, Homo sapien
cggtgacaagacagaacgaaggtgtcatccgca

SEQ ID NO: 418372 - DNA, 33 bp, Homo sapien
cggtgacaagacagaatgaaggtgtcatccgca

SEQ ID NO: 418373 - DNA, 33 bp, Homo sapien
cttcctgggaatcacgcactttcaggctgagaa

SEQ ID NO: 418374 - DNA, 33 bp, Homo sapien
cttcctgggaatcacgtactttcaggctgagaa

SEQ ID NO: 418375 - DNA, 33 bp, Homo sapien
cgtcctgttcagagccacaggtaaagtgtaagg

SEQ ID NO: 418376 - DNA, 33 bp, Homo sapien
cgtcctgttcagagccgcaggtaaagtgtaagg

SEQ ID NO: 418377 - DNA, 33 bp, Homo sapien
attagctgagttaaaacgaaagctgagcttcca

SEQ ID NO: 418378 - DNA, 33 bp, Homo sapien
attagctgagttaaaatgaaagctgagcttcca

SEQ ID NO: 418379 - DNA, 33 bp, Homo sapien
ccagagaagctttgtgcaggggatttgaagaga

SEQ ID NO: 418380 - DNA, 33 bp, Homo sapien
ccagagaagctttgtggaggggatttgaagaga

SEQ ID NO: 418381 - DNA, 33 bp, Homo sapien
catgtgtggatatgtggatatttaggctttttt

SEQ ID NO: 418382 - DNA, 33 bp, Homo sapien
catgtgtggatatgtgtatatttaggctttttt

SEQ ID NO: 418383 - DNA, 33 bp, Homo sapien
aggatggattcataggccatgcgaggagaagaa

SEQ ID NO: 418384 - DNA, 33 bp, Homo sapien
aggatggattcataggtcatgcgaggagaagaa

SEQ ID NO: 418385 - DNA, 33 bp, Homo sapien
cggcggtccagagcctcaggattctccgtctat

SEQ ID NO: 418386 - DNA, 33 bp, Homo sapien
cggcggtccagagcctgaggattctccgtctat

SEQ ID NO: 418387 - DNA, 33 bp, Homo sapien
gggacagaaggaacaacagcctacctaagacca

SEQ ID NO: 418388 - DNA, 33 bp, Homo sapien
gggacagaaggaacaagagcctacctaagacca

SEQ ID NO: 418389 - DNA, 33 bp, Homo sapien
gtgctggggtggggctcagattacaaccagtaa

SEQ ID NO: 418390 - DNA, 33 bp, Homo sapien
gtgctggggtggggctgagattacaaccagtaa

SEQ ID NO: 418391 - DNA, 33 bp, Homo sapien
actcaagtgggtgaaaactgcacagagacggga

SEQ ID NO: 418392 - DNA, 33 bp, Homo sapien
actcaagtgggtgaaagctgcacagagacggga

SEQ ID NO: 418393 - DNA, 33 bp, Homo sapien
tgaaaagttcaggccaactgttttgtaaactgt

SEQ ID NO: 418394 - DNA, 33 bp, Homo sapien
tgaaaagttcaggccatctgttttgtaaactgt

SEQ ID NO: 418395 - DNA, 33 bp, Homo sapien
ttggagtctcttcccgcacacctactgagcaag

SEQ ID NO: 418396 - DNA, 33 bp, Homo sapien
ttggagtctcttcccgtacacctactgagcaag

SEQ ID NO: 418397 - DNA, 33 bp, Homo sapien
gaatattattcagtggcaaaacgaagttagctc

SEQ ID NO: 418398 - DNA, 33 bp, Homo sapien
gaatattattcagtggtaaaacgaagttagctc

SEQ ID NO: 418399 - DNA, 33 bp, Homo sapien
ctttatactctgtacaacttcattatcttgcaa

SEQ ID NO: 418400 - DNA, 33 bp, Homo sapien
ctttatactctgtacatcttcattatcttgcaa

SEQ ID NO: 418401 - DNA, 33 bp, Homo sapien
tcatagcatatgcaaaaagagaaacagccatgt

SEQ ID NO: 418402 - DNA, 33 bp, Homo sapien
tcatagcatatgcaaagagagaaacagccatgt

SEQ ID NO: 418403 - DNA, 33 bp, Homo sapien
tttggccattgcgggaagtcatcttcttggaca

SEQ ID NO: 418404 - DNA, 33 bp, Homo sapien
tttggccattgcgggaggtcatcttcttggaca

SEQ ID NO: 418405 - DNA, 33 bp, Homo sapien
gagtggaatgattggcacatctggagacactgg

SEQ ID NO: 418406 - DNA, 33 bp, Homo sapien
gagtggaatgattggcgcatctggagacactgg

SEQ ID NO: 418407 - DNA, 33 bp, Homo sapien
gatctgaagatagtccaacccccgccactctcc

SEQ ID NO: 418408 - DNA, 33 bp, Homo sapien
gatctgaagatagtccgacccccgccactctcc

SEQ ID NO: 418409 - DNA, 33 bp, Homo sapien
gtagggaattgaaggaatagtcactgtctagac

SEQ ID NO: 418410 - DNA, 33 bp, Homo sapien
gtagggaattgaaggagtagtcactgtctagac

SEQ ID NO: 418411 - DNA, 33 bp, Homo sapien
tttactctacaagaaaacttgctgatttgctgt

SEQ ID NO: 418412 - DNA, 33 bp, Homo sapien
tttactctacaagaaaccttgctgatttgctgt

SEQ ID NO: 418413 - DNA, 33 bp, Homo sapien
catctagtttctctcacaatttcaaaatgtcag

SEQ ID NO: 418414 - DNA, 33 bp, Homo sapien
catctagtttctctcataatttcaaaatgtcag

SEQ ID NO: 418415 - DNA, 33 bp, Homo sapien
cgcccgcgcgccggcaatctcactgtgcgtcat

SEQ ID NO: 418416 - DNA, 33 bp, Homo sapien
cgcccgcgcgccggcactctcactgtgcgtcat

SEQ ID NO: 418417 - DNA, 33 bp, Homo sapien
actggttcctgaatgcccgaccgtggacctgca

SEQ ID NO: 418418 - DNA, 33 bp, Homo sapien
actggttcctgaatgctcgaccgtggacctgca

SEQ ID NO: 418419 - DNA, 33 bp, Homo sapien
gtgtaccgagtgtccaccgctgggcaagagacc

SEQ ID NO: 418420 - DNA, 33 bp, Homo sapien
gtgtaccgagtgtccatcgctgggcaagagacc

SEQ ID NO: 418421 - DNA, 33 bp, Homo sapien
cctcgcctaattacaccgcgtgctattcatctg

SEQ ID NO: 418422 - DNA, 33 bp, Homo sapien
cctcgcctaattacactgcgtgctattcatctg

SEQ ID NO: 418423 - DNA, 33 bp, Homo sapien
tgcccactagacagaaaaggagactgaggctga

SEQ ID NO: 418424 - DNA, 33 bp, Homo sapien
tgcccactagacagaagaggagactgaggctga

SEQ ID NO: 418425 - DNA, 33 bp, Homo sapien
cagagtttctctcttacccagatcacagtgtgt

SEQ ID NO: 418426 - DNA, 33 bp, Homo sapien
cagagtttctctcttatccagatcacagtgtgt

SEQ ID NO: 418427 - DNA, 33 bp, Homo sapien
ggggcacggttttcaacaggtggtcgcctcact

SEQ ID NO: 418428 - DNA, 33 bp, Homo sapien
ggggcacggttttcaataggtggtcgcctcact

SEQ ID NO: 418429 - DNA, 33 bp, Homo sapien
tatcattccacttacacgagtctcgctgggcac

SEQ ID NO: 418430 - DNA, 33 bp, Homo sapien
tatcattccacttacatgagtctcgctgggcac

SEQ ID NO: 418431 - DNA, 33 bp, Homo sapien
ataattgatttgcctccataaaattcacaagtg

SEQ ID NO: 418432 - DNA, 33 bp, Homo sapien
ataattgatttgcctctataaaattcacaagtg

SEQ ID NO: 418433 - DNA, 33 bp, Homo sapien
tttcctctttttatcaaaccaatacaggcaggt

SEQ ID NO: 418434 - DNA, 33 bp, Homo sapien
tttcctctttttatcagaccaatacaggcaggt

SEQ ID NO: 418435 - DNA, 33 bp, Homo sapien
accaaaactttctggcacagacttttgttgttt

SEQ ID NO: 418436 - DNA, 33 bp, Homo sapien
accaaaactttctggcgcagacttttgttgttt

SEQ ID NO: 418437 - DNA, 33 bp, Homo sapien
tccagggcacaaccaaagaggcagcgccaaaaa

SEQ ID NO: 418438 - DNA, 33 bp, Homo sapien
tccagggcacaaccaacgaggcagcgccaaaaa

SEQ ID NO: 418439 - DNA, 33 bp, Homo sapien
ctgtgccataataaccaaagttgtttcaagtca

SEQ ID NO: 418440 - DNA, 33 bp, Homo sapien
ctgtgccataataaccgaagttgtttcaagtca

SEQ ID NO: 418441 - DNA, 33 bp, Homo sapien
gaacttgagaaaaccaagtgcttcgctgagctg

SEQ ID NO: 418442 - DNA, 33 bp, Homo sapien
gaacttgagaaaaccaggtgcttcgctgagctg

SEQ ID NO: 418443 - DNA, 33 bp, Homo sapien
ttggaactgcagccccaagtggccagcccacca

SEQ ID NO: 418444 - DNA, 33 bp, Homo sapien
ttggaactgcagccccgagtggccagcccacca

SEQ ID NO: 418445 - DNA, 33 bp, Homo sapien
agactatcctcacagtcaccagcagaggcttca

SEQ ID NO: 418446 - DNA, 33 bp, Homo sapien
agactatcctcacagttaccagcagaggcttca

SEQ ID NO: 418447 - DNA, 33 bp, Homo sapien
aaatccgagtttcgtgaagacacagaagcaagt

SEQ ID NO: 418448 - DNA, 33 bp, Homo sapien
aaatccgagtttcgtggagacacagaagcaagt

SEQ ID NO: 418449 - DNA, 33 bp, Homo sapien
tcataataatggaacaccattggccttttccac

SEQ ID NO: 418450 - DNA, 33 bp, Homo sapien
tcataataatggaacatcattggccttttccac

SEQ ID NO: 418451 - DNA, 33 bp, Homo sapien
gtaatttcaaactgacagaaaacctgtaagaat

SEQ ID NO: 418452 - DNA, 33 bp, Homo sapien
gtaatttcaaactgacggaaaacctgtaagaat

SEQ ID NO: 418453 - DNA, 33 bp, Homo sapien
gtgaatttaccatctcaaccatctttcagcaca

SEQ ID NO: 418454 - DNA, 33 bp, Homo sapien
gtgaatttaccatctcgaccatctttcagcaca

SEQ ID NO: 418455 - DNA, 33 bp, Homo sapien
agactaacgaagtgaacgtggcatcagtagacc

SEQ ID NO: 418456 - DNA, 33 bp, Homo sapien
agactaacgaagtgaatgtggcatcagtagacc

SEQ ID NO: 418457 - DNA, 33 bp, Homo sapien
gcccatttgtctgaccactgtcaccctcacact

SEQ ID NO: 418458 - DNA, 33 bp, Homo sapien
gcccatttgtctgaccgctgtcaccctcacact

SEQ ID NO: 418459 - DNA, 33 bp, Homo sapien
ttggatctcaatctgaagccttaggaacggagc

SEQ ID NO: 418460 - DNA, 33 bp, Homo sapien
ttggatctcaatctgacgccttaggaacggagc

SEQ ID NO: 418461 - DNA, 33 bp, Homo sapien
gtcaaaaaatcggggaaatataaaagcaaaatg

SEQ ID NO: 418462 - DNA, 33 bp, Homo sapien
gtcaaaaaatcggggagatataaaagcaaaatg

SEQ ID NO: 418463 - DNA, 33 bp, Homo sapien
aaacatataaaacccaaggctaggcataaattc

SEQ ID NO: 418464 - DNA, 33 bp, Homo sapien
aaacatataaaacccagggctaggcataaattc

SEQ ID NO: 418465 - DNA, 33 bp, Homo sapien
caaacatacaaattcaatccaactacaaaggca

SEQ ID NO: 418466 - DNA, 33 bp, Homo sapien
caaacatacaaattcagtccaactacaaaggca

SEQ ID NO: 418467 - DNA, 33 bp, Homo sapien
gcagataactgagcacaaagctgagggtggtca

SEQ ID NO: 418468 - DNA, 33 bp, Homo sapien
gcagataactgagcacgaagctgagggtggtca

SEQ ID NO: 418469 - DNA, 33 bp, Homo sapien
atgttctcaaagaatagtaaatggcacaggaca

SEQ ID NO: 418470 - DNA, 33 bp, Homo sapien
atgttctcaaagaatattaaatggcacaggaca

SEQ ID NO: 418471 - DNA, 33 bp, Homo sapien
tcaccaacagttgcaacctgaaagtatgttttt

SEQ ID NO: 418472 - DNA, 33 bp, Homo sapien
tcaccaacagttgcaatctgaaagtatgttttt

SEQ ID NO: 418473 - DNA, 33 bp, Homo sapien
gtctggcagtgctttcaccccgtttatccacat

SEQ ID NO: 418474 - DNA, 33 bp, Homo sapien
gtctggcagtgctttctccccgtttatccacat

SEQ ID NO: 418475 - DNA, 33 bp, Homo sapien
aagggtgttcctttcacgccctgtaatatggag

SEQ ID NO: 418476 - DNA, 33 bp, Homo sapien
aagggtgttcctttcatgccctgtaatatggag

SEQ ID NO: 418477 - DNA, 33 bp, Homo sapien
aaactcagcctttgagcataaactgcttaaaac

SEQ ID NO: 418478 - DNA, 33 bp, Homo sapien
aaactcagcctttgaggataaactgcttaaaac

SEQ ID NO: 418479 - DNA, 33 bp, Homo sapien
cgaggcagacgtttgccatcactgggggacagg

SEQ ID NO: 418480 - DNA, 33 bp, Homo sapien
cgaggcagacgtttgctatcactgggggacagg

SEQ ID NO: 418481 - DNA, 33 bp, Homo sapien
tggttgcaagaatcaacgacgaagtctgtgcaa

SEQ ID NO: 418482 - DNA, 33 bp, Homo sapien
tggttgcaagaatcaatgacgaagtctgtgcaa

SEQ ID NO: 418483 - DNA, 33 bp, Homo sapien
ctttggggccattgggccagattgaggaaccca

SEQ ID NO: 418484 - DNA, 33 bp, Homo sapien
ctttggggccattgggtcagattgaggaaccca

SEQ ID NO: 418485 - DNA, 33 bp, Homo sapien
aaacacgaggcatctcaactacatttttacagg

SEQ ID NO: 418486 - DNA, 33 bp, Homo sapien
aaacacgaggcatctcgactacatttttacagg

SEQ ID NO: 418487 - DNA, 33 bp, Homo sapien
ctgccccacactcctgcaagtgcccgtctcacc

SEQ ID NO: 418488 - DNA, 33 bp, Homo sapien
ctgccccacactcctgtaagtgcccgtctcacc

SEQ ID NO: 418489 - DNA, 33 bp, Homo sapien
gttttagagatcttcccacaacagaaagaagtc

SEQ ID NO: 418490 - DNA, 33 bp, Homo sapien
gttttagagatcttcctacaacagaaagaagtc

SEQ ID NO: 418491 - DNA, 33 bp, Homo sapien
ctcctcagagtgtggccataatttctatagaac

SEQ ID NO: 418492 - DNA, 33 bp, Homo sapien
ctcctcagagtgtggctataatttctatagaac

SEQ ID NO: 418493 - DNA, 33 bp, Homo sapien
ctcaaactctatagacgcaagtattcatgcaaa

SEQ ID NO: 418494 - DNA, 33 bp, Homo sapien
ctcaaactctatagactcaagtattcatgcaaa

SEQ ID NO: 418495 - DNA, 33 bp, Homo sapien
acagatagtgaattcacgtgagaaagtttgttt

SEQ ID NO: 418496 - DNA, 33 bp, Homo sapien
acagatagtgaattcatgtgagaaagtttgttt

SEQ ID NO: 418497 - DNA, 33 bp, Homo sapien
gtccatcttacgcttacgactagagggagttca

SEQ ID NO: 418498 - DNA, 33 bp, Homo sapien
gtccatcttacgcttaggactagagggagttca

SEQ ID NO: 418499 - DNA, 33 bp, Homo sapien
ccgacagtgagttgtacgaagctcagaaatggg

SEQ ID NO: 418500 - DNA, 33 bp, Homo sapien
ccgacagtgagttgtaggaagctcagaaatggg

SEQ ID NO: 418501 - DNA, 33 bp, Homo sapien
gggctttgtgtgtgtccaaagttcatccctcaa

SEQ ID NO: 418502 - DNA, 33 bp, Homo sapien
gggctttgtgtgtgtctaaagttcatccctcaa

SEQ ID NO: 418503 - DNA, 33 bp, Homo sapien
ccaagatgcagatgcaacctctctaggaataat

SEQ ID NO: 418504 - DNA, 33 bp, Homo sapien
ccaagatgcagatgcagcctctctaggaataat

SEQ ID NO: 418505 - DNA, 33 bp, Homo sapien
gaagcaattgaggaccacgagaactgcatcaca

SEQ ID NO: 418506 - DNA, 33 bp, Homo sapien
gaagcaattgaggaccgcgagaactgcatcaca

SEQ ID NO: 418507 - DNA, 33 bp, Homo sapien
cagaggccactgttacagggagagagcacaggt

SEQ ID NO: 418508 - DNA, 33 bp, Homo sapien
cagaggccactgttacggggagagagcacaggt

SEQ ID NO: 418509 - DNA, 33 bp, Homo sapien
gccttttcttgggtgacgactctgtgcccagaa

SEQ ID NO: 418510 - DNA, 33 bp, Homo sapien
gccttttcttgggtgatgactctgtgcccagaa

SEQ ID NO: 418511 - DNA, 33 bp, Homo sapien
gtatgggatcagccaaaattcaggtatttagaa

SEQ ID NO: 418512 - DNA, 33 bp, Homo sapien
gtatgggatcagccaacattcaggtatttagaa

SEQ ID NO: 418513 - DNA, 33 bp, Homo sapien
ttacgaaaatgatggacacattctggattcatc

SEQ ID NO: 418514 - DNA, 33 bp, Homo sapien
ttacgaaaatgatggatacattctggattcatc

SEQ ID NO: 418515 - DNA, 33 bp, Homo sapien
agtccattttcatctacgaaggatgtgcgttga

SEQ ID NO: 418516 - DNA, 33 bp, Homo sapien
agtccattttcatctatgaaggatgtgcgttga

SEQ ID NO: 418517 - DNA, 33 bp, Homo sapien
aagctggctgtgttccccaacattcattttttc

SEQ ID NO: 418518 - DNA, 33 bp, Homo sapien
aagctggctgtgttcctcaacattcattttttc

SEQ ID NO: 418519 - DNA, 33 bp, Homo sapien
caccacacaatcttccacagcaccacccagcca

SEQ ID NO: 418520 - DNA, 33 bp, Homo sapien
caccacacaatcttccgcagcaccacccagcca

SEQ ID NO: 418521 - DNA, 33 bp, Homo sapien
gaggagatgtggagaaattcagtttgatggttt

SEQ ID NO: 418522 - DNA, 33 bp, Homo sapien
gaggagatgtggagaagttcagtttgatggttt

SEQ ID NO: 418523 - DNA, 33 bp, Homo sapien
cacttggtctcttataaaaacagtggaaattaa

SEQ ID NO: 418524 - DNA, 33 bp, Homo sapien
cacttggtctcttatataaacagtggaaattaa

SEQ ID NO: 418525 - DNA, 33 bp, Homo sapien
atgaggataaagccagccggctaaggatgcctg

SEQ ID NO: 418526 - DNA, 33 bp, Homo sapien
atgaggataaagccagtcggctaaggatgcctg

SEQ ID NO: 418527 - DNA, 33 bp, Homo sapien
ggcaatgacagtgctccactcacctggtacctg

SEQ ID NO: 418528 - DNA, 33 bp, Homo sapien
ggcaatgacagtgctctactcacctggtacctg

SEQ ID NO: 418529 - DNA, 33 bp, Homo sapien
aaaactagtaaaccacactgatattttttgcta

SEQ ID NO: 418530 - DNA, 33 bp, Homo sapien
aaaactagtaaaccacgctgatattttttgcta

SEQ ID NO: 418531 - DNA, 33 bp, Homo sapien
actgtacatttgaaacagttaacatggcaaatt

SEQ ID NO: 418532 - DNA, 33 bp, Homo sapien
actgtacatttgaaacggttaacatggcaaatt

SEQ ID NO: 418533 - DNA, 33 bp, Homo sapien
acaacaaggtacagaacgaggcttcagactgag

SEQ ID NO: 418534 - DNA, 33 bp, Homo sapien
acaacaaggtacagaatgaggcttcagactgag

SEQ ID NO: 418535 - DNA, 33 bp, Homo sapien
tataattcggctgtaacggaaagcattctgctg

SEQ ID NO: 418536 - DNA, 33 bp, Homo sapien
tataattcggctgtaatggaaagcattctgctg

SEQ ID NO: 418537 - DNA, 33 bp, Homo sapien
ctggaaataattgagaagagctggaaaatatca

SEQ ID NO: 418538 - DNA, 33 bp, Homo sapien
ctggaaataattgagaggagctggaaaatatca

SEQ ID NO: 418539 - DNA, 33 bp, Homo sapien
gggctacaggtttccactcagggagagacctcc

SEQ ID NO: 418540 - DNA, 33 bp, Homo sapien
gggctacaggtttccattcagggagagacctcc

SEQ ID NO: 418541 - DNA, 33 bp, Homo sapien
ccatcttatctcgttcaaggccacgttgtcagg

SEQ ID NO: 418542 - DNA, 33 bp, Homo sapien
ccatcttatctcgttcgaggccacgttgtcagg

SEQ ID NO: 418543 - DNA, 33 bp, Homo sapien
atttgtgctaaactggacagtatattgcggaag

SEQ ID NO: 418544 - DNA, 33 bp, Homo sapien
atttgtgctaaactgggcagtatattgcggaag

SEQ ID NO: 418545 - DNA, 33 bp, Homo sapien
ctcatcacagaccccaagctgaatggtcctgcc

SEQ ID NO: 418546 - DNA, 33 bp, Homo sapien
ctcatcacagaccccacgctgaatggtcctgcc

SEQ ID NO: 418547 - DNA, 33 bp, Homo sapien
cagcagcctccagacacgcgccactgagggtct

SEQ ID NO: 418548 - DNA, 33 bp, Homo sapien
cagcagcctccagacatgcgccactgagggtct

SEQ ID NO: 418549 - DNA, 33 bp, Homo sapien
ggcactgctgctgcccaatgagagccgagtggt

SEQ ID NO: 418550 - DNA, 33 bp, Homo sapien
ggcactgctgctgcccgatgagagccgagtggt

SEQ ID NO: 418551 - DNA, 33 bp, Homo sapien
gacgctgatttagaaacgaagaggtggaagcaa

SEQ ID NO: 418552 - DNA, 33 bp, Homo sapien
gacgctgatttagaaatgaagaggtggaagcaa

SEQ ID NO: 418553 - DNA, 33 bp, Homo sapien
ggtccccttcgtgttcaatgtgcaccccagcaa

SEQ ID NO: 418554 - DNA, 33 bp, Homo sapien
ggtccccttcgtgttcgatgtgcaccccagcaa

SEQ ID NO: 418555 - DNA, 33 bp, Homo sapien
accactgtgaaggaaacggaagatctccgtgct

SEQ ID NO: 418556 - DNA, 33 bp, Homo sapien
accactgtgaaggaaatggaagatctccgtgct

SEQ ID NO: 418557 - DNA, 33 bp, Homo sapien
gggagcctgccttcaacgaacggaagctgccct

SEQ ID NO: 418558 - DNA, 33 bp, Homo sapien
gggagcctgccttcaaggaacggaagctgccct

SEQ ID NO: 418559 - DNA, 33 bp, Homo sapien
ggatcctgtccttccgcatttaatggttcccct

SEQ ID NO: 418560 - DNA, 33 bp, Homo sapien
ggatcctgtccttccgtatttaatggttcccct

SEQ ID NO: 418561 - DNA, 33 bp, Homo sapien
agtgaacatggcacccaagagacaatagaaact

SEQ ID NO: 418562 - DNA, 33 bp, Homo sapien
agtgaacatggcacccgagagacaatagaaact

SEQ ID NO: 418563 - DNA, 33 bp, Homo sapien
gtcaatgtttttcaaagttcaagtcatggttga

SEQ ID NO: 418564 - DNA, 33 bp, Homo sapien
gtcaatgtttttcaaatttcaagtcatggttga

SEQ ID NO: 418565 - DNA, 33 bp, Homo sapien
gtgcatcctgctaaaaactaatctaagcctggc

SEQ ID NO: 418566 - DNA, 33 bp, Homo sapien
gtgcatcctgctaaaatctaatctaagcctggc

SEQ ID NO: 418567 - DNA, 33 bp, Homo sapien
gaatgcacctcaagaacgctgatttgaaaacgt

SEQ ID NO: 418568 - DNA, 33 bp, Homo sapien
gaatgcacctcaagaatgctgatttgaaaacgt

SEQ ID NO: 418569 - DNA, 33 bp, Homo sapien
acacccagctgtattgcgtccatttaacattat

SEQ ID NO: 418570 - DNA, 33 bp, Homo sapien
acacccagctgtattgtgtccatttaacattat

SEQ ID NO: 418571 - DNA, 33 bp, Homo sapien
gccatcaaatatgtacacggcatctgttctgta

SEQ ID NO: 418572 - DNA, 33 bp, Homo sapien
gccatcaaatatgtacgcggcatctgttctgta

SEQ ID NO: 418573 - DNA, 33 bp, Homo sapien
ggtagtgccagcgcacactcgtacaggatagaa

SEQ ID NO: 418574 - DNA, 33 bp, Homo sapien
ggtagtgccagcgcacgctcgtacaggatagaa

SEQ ID NO: 418575 - DNA, 33 bp, Homo sapien
ctccctgccgtgcgccaagcttctgctcagagc

SEQ ID NO: 418576 - DNA, 33 bp, Homo sapien
ctccctgccgtgcgccgagcttctgctcagagc

SEQ ID NO: 418577 - DNA, 33 bp, Homo sapien
gtgtaaataaaaccaccgcacatttatttttca

SEQ ID NO: 418578 - DNA, 33 bp, Homo sapien
gtgtaaataaaaccactgcacatttatttttca

SEQ ID NO: 418579 - DNA, 33 bp, Homo sapien
cagaccttgcagaaaacatccctaactagagag

SEQ ID NO: 418580 - DNA, 33 bp, Homo sapien
cagaccttgcagaaaatatccctaactagagag

SEQ ID NO: 418581 - DNA, 33 bp, Homo sapien
tccatgtgaattttacaatcagtgtgttaattt

SEQ ID NO: 418582 - DNA, 33 bp, Homo sapien
tccatgtgaattttaccatcagtgtgttaattt

SEQ ID NO: 418583 - DNA, 33 bp, Homo sapien
tcaggatagtcttaaacgaatctaggtacatac

SEQ ID NO: 418584 - DNA, 33 bp, Homo sapien
tcaggatagtcttaaatgaatctaggtacatac

SEQ ID NO: 418585 - DNA, 33 bp, Homo sapien
cagttcttttgggtccagcaaataatctttttg

SEQ ID NO: 418586 - DNA, 33 bp, Homo sapien
cagttcttttgggtccggcaaataatctttttg

SEQ ID NO: 418587 - DNA, 33 bp, Homo sapien
gtgagtgggttcagccgcagggtcatttggtaa

SEQ ID NO: 418588 - DNA, 33 bp, Homo sapien
gtgagtgggttcagcctcagggtcatttggtaa

SEQ ID NO: 418589 - DNA, 33 bp, Homo sapien
tgtcacgaggaaggtacgaggaaggctgtcccc

SEQ ID NO: 418590 - DNA, 33 bp, Homo sapien
tgtcacgaggaaggtatgaggaaggctgtcccc

SEQ ID NO: 418591 - DNA, 33 bp, Homo sapien
tttggcataaagacacaagtagattgaaggcaa

SEQ ID NO: 418592 - DNA, 33 bp, Homo sapien
tttggcataaagacacgagtagattgaaggcaa

SEQ ID NO: 418593 - DNA, 33 bp, Homo sapien
gtgtctggtaaagaaacgcaacttgaagagaat

SEQ ID NO: 418594 - DNA, 33 bp, Homo sapien
gtgtctggtaaagaaatgcaacttgaagagaat

SEQ ID NO: 418595 - DNA, 33 bp, Homo sapien
gctctagatcacacccaatggctggcggccttt

SEQ ID NO: 418596 - DNA, 33 bp, Homo sapien
gctctagatcacacccgatggctggcggccttt

SEQ ID NO: 418597 - DNA, 33 bp, Homo sapien
gtgcatttggctgtccactaaaatatgccaagt

SEQ ID NO: 418598 - DNA, 33 bp, Homo sapien
gtgcatttggctgtccgctaaaatatgccaagt

SEQ ID NO: 418599 - DNA, 33 bp, Homo sapien
tattcgagtataaatcaaggtattgccaagtca

SEQ ID NO: 418600 - DNA, 33 bp, Homo sapien
tattcgagtataaatcgaggtattgccaagtca

SEQ ID NO: 418601 - DNA, 33 bp, Homo sapien
tgtttgtgcagtcttacgactttcttttcttcc

SEQ ID NO: 418602 - DNA, 33 bp, Homo sapien
tgtttgtgcagtcttatgactttcttttcttcc

SEQ ID NO: 418603 - DNA, 33 bp, Homo sapien
taaaaagcttttacaactattttagtgaaaacg

SEQ ID NO: 418604 - DNA, 33 bp, Homo sapien
taaaaagcttttacaattattttagtgaaaacg

SEQ ID NO: 418605 - DNA, 33 bp, Homo sapien
ctctaatgttaaagacactcctaagactgcagt

SEQ ID NO: 418606 - DNA, 33 bp, Homo sapien
ctctaatgttaaagacgctcctaagactgcagt

SEQ ID NO: 418607 - DNA, 33 bp, Homo sapien
tcagcagagagttggacactaagaaagagtcaa

SEQ ID NO: 418608 - DNA, 33 bp, Homo sapien
tcagcagagagttggagactaagaaagagtcaa

SEQ ID NO: 418609 - DNA, 33 bp, Homo sapien
tcggagcttgctatgcacgttcactcctcaaca

SEQ ID NO: 418610 - DNA, 33 bp, Homo sapien
tcggagcttgctatgcgcgttcactcctcaaca

SEQ ID NO: 418611 - DNA, 33 bp, Homo sapien
cattgagaaaaaggagaaattgatgcctgtaga

SEQ ID NO: 418612 - DNA, 33 bp, Homo sapien
cattgagaaaaaggaggaattgatgcctgtaga

SEQ ID NO: 418613 - DNA, 33 bp, Homo sapien
ggaaaatgactgtcaacgtggggtaactgacat

SEQ ID NO: 418614 - DNA, 33 bp, Homo sapien
ggaaaatgactgtcaatgtggggtaactgacat

SEQ ID NO: 418615 - DNA, 33 bp, Homo sapien
cacataggccgacgtacccgggtaggacagtga

SEQ ID NO: 418616 - DNA, 33 bp, Homo sapien
cacataggccgacgtatccgggtaggacagtga

SEQ ID NO: 418617 - DNA, 33 bp, Homo sapien
cccggtacgtcatgacacggctgtaggggaggg

SEQ ID NO: 418618 - DNA, 33 bp, Homo sapien
cccggtacgtcatgacgcggctgtaggggaggg

SEQ ID NO: 418619 - DNA, 33 bp, Homo sapien
agagaactctctggaaacattaaaaagatcctg

SEQ ID NO: 418620 - DNA, 33 bp, Homo sapien
agagaactctctggaaccattaaaaagatcctg

SEQ ID NO: 418621 - DNA, 33 bp, Homo sapien; identical to SEQ ID NO: 418619

SEQ ID NO: 418622 - DNA, 33 bp, Homo sapien; identical to SEQ ID NO: 418620

SEQ ID NO: 418623 - DNA, 33 bp, Homo sapien
ggggattcggtgccaacaggggttttggaggga

SEQ ID NO: 418624 - DNA, 33 bp, Homo sapien
ggggattcggtgccaataggggttttggaggga

SEQ ID NO: 418625 - DNA, 33 bp, Homo sapien
caggatgatgtaaaacaggtcatggtttcactt

SEQ ID NO: 418626 - DNA, 33 bp, Homo sapien
caggatgatgtaaaacgggtcatggtttcactt

SEQ ID NO: 418627 - DNA, 33 bp, Homo sapien
tgacagtcgccaagcaaaccccctgccaggtcg

SEQ ID NO: 418628 - DNA, 33 bp, Homo sapien
tgacagtcgccaagcagaccccctgccaggtcg

SEQ ID NO: 418629 - DNA, 33 bp, Homo sapien
caccgcccggggagcaaaccctcagcaaaggcg

SEQ ID NO: 418630 - DNA, 33 bp, Homo sapien
caccgcccggggagcagaccctcagcaaaggcg

SEQ ID NO: 418631 - DNA, 33 bp, Homo sapien
cccccctggcagccaaaggaactgagcctgtgg

SEQ ID NO: 418632 - DNA, 33 bp, Homo sapien
cccccctggcagccaagggaactgagcctgtgg

SEQ ID NO: 418633 - DNA, 33 bp, Homo sapien
aggagcctggacacttgaactcccaggagtgcc

SEQ ID NO: 418634 - DNA, 33 bp, Homo sapien
aggagcctggacactttaactcccaggagtgcc

SEQ ID NO: 418635 - DNA, 33 bp, Homo sapien
ctccccaggtgacaacagagtaaaggtggtaaa

SEQ ID NO: 418636 - DNA, 33 bp, Homo sapien
ctccccaggtgacaacggagtaaaggtggtaaa

SEQ ID NO: 418637 - DNA, 33 bp, Homo sapien
cctaggagaccgtcacaaatgcccgtggaccca

SEQ ID NO: 418638 - DNA, 33 bp, Homo sapien
cctaggagaccgtcacgaatgcccgtggaccca

SEQ ID NO: 418639 - DNA, 33 bp, Homo sapien
aaaaaatgggatatggcaagagccgtgaagagt

SEQ ID NO: 418640 - DNA, 33 bp, Homo sapien
aaaaaatgggatatggtaagagccgtgaagagt

SEQ ID NO: 418641 - DNA, 33 bp, Homo sapien
cttgggtctctgcgaacgacagccggatgcgta

SEQ ID NO: 418642 - DNA, 33 bp, Homo sapien
cttgggtctctgcgaatgacagccggatgcgta

SEQ ID NO: 418643 - DNA, 33 bp, Homo sapien
aacgtcggacaatctcacctccaaacagccaca

SEQ ID NO: 418644 - DNA, 33 bp, Homo sapien
aacgtcggacaatctcgcctccaaacagccaca

SEQ ID NO: 418645 - DNA, 33 bp, Homo sapien
aaacacagggccaagaatctaccggcccaagga

SEQ ID NO: 418646 - DNA, 33 bp, Homo sapien
aaacacagggccaagagtctaccggcccaagga

SEQ ID NO: 418647 - DNA, 33 bp, Homo sapien
agactgaggaggaaaacggacgagaccaggggg

SEQ ID NO: 418648 - DNA, 33 bp, Homo sapien
agactgaggaggaaaatggacgagaccaggggg

SEQ ID NO: 418649 - DNA, 33 bp, Homo sapien
gcaacttgcagttccgaagagcgctggctgctt

SEQ ID NO: 418650 - DNA, 33 bp, Homo sapien
gcaacttgcagttccggagagcgctggctgctt

SEQ ID NO: 418651 - DNA, 33 bp, Homo sapien
ccctctcattaatgccgcactcttcccaaatac

SEQ ID NO: 418652 - DNA, 33 bp, Homo sapien
ccctctcattaatgcctcactcttcccaaatac

SEQ ID NO: 418653 - DNA, 33 bp, Homo sapien
cctcccgcaggccttacgagagcccaagtagct

SEQ ID NO: 418654 - DNA, 33 bp, Homo sapien
cctcccgcaggccttatgagagcccaagtagct

SEQ ID NO: 418655 - DNA, 33 bp, Homo sapien
ggatgagggtgcatcaaactcaactgcaagtct

SEQ ID NO: 418656 - DNA, 33 bp, Homo sapien
ggatgagggtgcatcagactcaactgcaagtct

SEQ ID NO: 418657 - DNA, 33 bp, Homo sapien
gagccactctcaccagcattgttggccttgagg

SEQ ID NO: 418658 - DNA, 33 bp, Homo sapien
gagccactctcaccagtattgttggccttgagg

SEQ ID NO: 418659 - DNA, 33 bp, Homo sapien
ctccatccttctaggaaaaacaagatgccttct

SEQ ID NO: 418660 - DNA, 33 bp, Homo sapien
ctccatccttctaggagaaacaagatgccttct

SEQ ID NO: 418661 - DNA, 33 bp, Homo sapien
ccatgccgccgaaagaccatctactagaaagcc

SEQ ID NO: 418662 - DNA, 33 bp, Homo sapien
ccatgccgccgaaagatcatctactagaaagcc

SEQ ID NO: 418663 - DNA, 33 bp, Homo sapien
acccaaaggagtgtgccgaagtcaagagcctgt

SEQ ID NO: 418664 - DNA, 33 bp, Homo sapien
acccaaaggagtgtgctgaagtcaagagcctgt

SEQ ID NO: 418665 - DNA, 33 bp, Homo sapien
agcttttgccctgcacacgggtgagcaagccag

SEQ ID NO: 418666 - DNA, 33 bp, Homo sapien
agcttttgccctgcacgcgggtgagcaagccag

SEQ ID NO: 418667 - DNA, 33 bp, Homo sapien
tctggctgagcaacttaaacgggaacctgcagc

SEQ ID NO: 418668 - DNA, 33 bp, Homo sapien
tctggctgagcaacttgaacgggaacctgcagc

SEQ ID NO: 418669 - DNA, 33 bp, Homo sapien
gtacgtggcggaagaacgcggcttctgtcaccg

SEQ ID NO: 418670 - DNA, 33 bp, Homo sapien
gtacgtggcggaagaatgcggcttctgtcaccg

SEQ ID NO: 418671 - DNA, 33 bp, Homo sapien
ctttcagcccaagttgaattaggccatctcact

SEQ ID NO: 418672 - DNA, 33 bp, Homo sapien
ctttcagcccaagttgcattaggccatctcact

SEQ ID NO: 418673 - DNA, 33 bp, Homo sapien
aaagcgcagccttctcccctggctgaaacagca

SEQ ID NO: 418674 - DNA, 33 bp, Homo sapien
aaagcgcagccttctctcctggctgaaacagca

SEQ ID NO: 418675 - DNA, 33 bp, Homo sapien
gggtagaaatggagacaggggagaggagagaac

SEQ ID NO: 418676 - DNA, 33 bp, Homo sapien
gggtagaaatggagaccggggagaggagagaac

SEQ ID NO: 418677 - DNA, 33 bp, Homo sapien
acagatactgaagggcaatgcgtgcactcagca

SEQ ID NO: 418678 - DNA, 33 bp, Homo sapien
acagatactgaagggcgatgcgtgcactcagca

SEQ ID NO: 418679 - DNA, 33 bp, Homo sapien
gacactggcttggggaacctttcacgacaccac

SEQ ID NO: 418680 - DNA, 33 bp, Homo sapien
gacactggcttggggaccctttcacgacaccac

SEQ ID NO: 418681 - DNA, 33 bp, Homo sapien
gggcagctgcaaacaacagaagtctattttctc

SEQ ID NO: 418682 - DNA, 33 bp, Homo sapien
gggcagctgcaaacaagagaagtctattttctc

SEQ ID NO: 418683 - DNA, 33 bp, Homo sapien
ccacatggggcctcgcactcgcgttacccttcc

SEQ ID NO: 418684 - DNA, 33 bp, Homo sapien
ccacatggggcctcgcgctcgcgttacccttcc

SEQ ID NO: 418685 - DNA, 33 bp, Homo sapien
gggtcgcatgctgcaccccaattccgtgcccag

SEQ ID NO: 418686 - DNA, 33 bp, Homo sapien
gggtcgcatgctgcactccaattccgtgcccag

SEQ ID NO: 418687 - DNA, 33 bp, Homo sapien
ctgcctcactgggtcacggatgggtctttgttc

SEQ ID NO: 418688 - DNA, 33 bp, Homo sapien
ctgcctcactgggtcatggatgggtctttgttc

SEQ ID NO: 418689 - DNA, 33 bp, Homo sapien
ggccacgccacttatcaacgtggaaaagtgagg

SEQ ID NO: 418690 - DNA, 33 bp, Homo sapien
ggccacgccacttatcgacgtggaaaagtgagg

SEQ ID NO: 418691 - DNA, 33 bp, Homo sapien
ctcctcaactgcaacaaatgcttataatgacag

SEQ ID NO: 418692 - DNA, 33 bp, Homo sapien
ctcctcaactgcaacagatgcttataatgacag

SEQ ID NO: 418693 - DNA, 33 bp, Homo sapien
ccggtggcctgactcaagaaacctcgctcccct

SEQ ID NO: 418694 - DNA, 33 bp, Homo sapien
ccggtggcctgactcaggaaacctcgctcccct

SEQ ID NO: 418695 - DNA, 33 bp, Homo sapien
gaagcggccttctagcgcagagaatagctgctt

SEQ ID NO: 418696 - DNA, 33 bp, Homo sapien
gaagcggccttctagctcagagaatagctgctt

SEQ ID NO: 418697 - DNA, 33 bp, Homo sapien
gaatacccaactgcagacggttcaatgtgtgga

SEQ ID NO: 418698 - DNA, 33 bp, Homo sapien
gaatacccaactgcaggcggttcaatgtgtgga

SEQ ID NO: 418699 - DNA, 33 bp, Homo sapien
agcggagataaggacactcagacctgtttccct

SEQ ID NO: 418700 - DNA, 33 bp, Homo sapien
agcggagataaggacattcagacctgtttccct

SEQ ID NO: 418701 - DNA, 33 bp, Homo sapien
tagtgtccaccagcaacaacatggatgctgcag

SEQ ID NO: 418702 - DNA, 33 bp, Homo sapien
tagtgtccaccagcaagaacatggatgctgcag

SEQ ID NO: 418703 - DNA, 33 bp, Homo sapien
aaaacaaaaagcccttaaaactgtgagcatttc

SEQ ID NO: 418704 - DNA, 33 bp, Homo sapien
aaaacaaaaagccctttaaactgtgagcatttc

SEQ ID NO: 418705 - DNA, 33 bp, Homo sapien
caaaccaagtccattaccctaatgagaagcccc

SEQ ID NO: 418706 - DNA, 33 bp, Homo sapien
caaaccaagtccattatcctaatgagaagcccc

SEQ ID NO: 418707 - DNA, 33 bp, Homo sapien
gcaaaaatcaaatccaatcaaactaaatcacca

SEQ ID NO: 418708 - DNA, 33 bp, Homo sapien
gcaaaaatcaaatccagtcaaactaaatcacca

SEQ ID NO: 418709 - DNA, 33 bp, Homo sapien
actcagaataaaatagacattaaaaccacactg

SEQ ID NO: 418710 - DNA, 33 bp, Homo sapien
actcagaataaaatagtcattaaaaccacactg

SEQ ID NO: 418711 - DNA, 33 bp, Homo sapien
cctaactgtaacatcaagggaaagtgataggaa

SEQ ID NO: 418712 - DNA, 33 bp, Homo sapien
cctaactgtaacatcaggggaaagtgataggaa

SEQ ID NO: 418713 - DNA, 33 bp, Homo sapien
tctatcactaacatccaagaaagctttcaagaa

SEQ ID NO: 418714 - DNA, 33 bp, Homo sapien
tctatcactaacatccgagaaagctttcaagaa

SEQ ID NO: 418715 - DNA, 33 bp, Homo sapien
cttcacccaatactgccaagcttcccccagaaa

SEQ ID NO: 418716 - DNA, 33 bp, Homo sapien
cttcacccaatactgctaagcttcccccagaaa

SEQ ID NO: 418717 - DNA, 33 bp, Homo sapien
gacccagcagtggctaacaggcgggtccttcca

SEQ ID NO: 418718 - DNA, 33 bp, Homo sapien
gacccagcagtggctagcaggcgggtccttcca

SEQ ID NO: 418719 - DNA, 33 bp, Homo sapien
cttgagaggcagtacccggcagtgacagaaagc

SEQ ID NO: 418720 - DNA, 33 bp, Homo sapien
cttgagaggcagtacctggcagtgacagaaagc

SEQ ID NO: 418721 - DNA, 33 bp, Homo sapien
cacacacgggcatctcactcccatcagtgcacc

SEQ ID NO: 418722 - DNA, 33 bp, Homo sapien
cacacacgggcatctcgctcccatcagtgcacc

SEQ ID NO: 418723 - DNA, 33 bp, Homo sapien
ctgatctcattgagtcactgtggcaaagccttt

SEQ ID NO: 418724 - DNA, 33 bp, Homo sapien
ctgatctcattgagtcgctgtggcaaagccttt

SEQ ID NO: 418725 - DNA, 33 bp, Homo sapien
tcccagctggatgctccgactcgccaactccca

SEQ ID NO: 418726 - DNA, 33 bp, Homo sapien
tcccagctggatgctcggactcgccaactccca

SEQ ID NO: 418727 - DNA, 33 bp, Homo sapien
tgtccctgaacaccaaataccgagacagctgat

SEQ ID NO: 418728 - DNA, 33 bp, Homo sapien
tgtccctgaacaccaactaccgagacagctgat

SEQ ID NO: 418729 - DNA, 33 bp, Homo sapien
gctggtgtcgaacttacggactcaagggatccg

SEQ ID NO: 418730 - DNA, 33 bp, Homo sapien
gctggtgtcgaacttatggactcaagggatccg

SEQ ID NO: 418731 - DNA, 33 bp, Homo sapien
aaccaggctttgctaaagtcctctgaaattggg

SEQ ID NO: 418732 - DNA, 33 bp, Homo sapien
aaccaggctttgctaaggtcctctgaaattggg

SEQ ID NO: 418733 - DNA, 33 bp, Homo sapien
aaatgtattagttttacatgacagccgggcacg

SEQ ID NO: 418734 - DNA, 33 bp, Homo sapien
aaatgtattagttttatatgacagccgggcacg

SEQ ID NO: 418735 - DNA, 33 bp, Homo sapien
cccatctggattcttaccctcgaggcatcttca

SEQ ID NO: 418736 - DNA, 33 bp, Homo sapien
cccatctggattcttatcctcgaggcatcttca

SEQ ID NO: 418737 - DNA, 33 bp, Homo sapien
ctaccgacataacttacgatccgtttgagaatc

SEQ ID NO: 418738 - DNA, 33 bp, Homo sapien
ctaccgacataacttatgatccgtttgagaatc

SEQ ID NO: 418739 - DNA, 33 bp, Homo sapien
gcgtggagatggcgcaaatgcaccgcagggact

SEQ ID NO: 418740 - DNA, 33 bp, Homo sapien
gcgtggagatggcgcagatgcaccgcagggact

SEQ ID NO: 418741 - DNA, 33 bp, Homo sapien
tgcgggtggtgcgtaccgacggcatcctggcac

SEQ ID NO: 418742 - DNA, 33 bp, Homo sapien
tgcgggtggtgcgtactgacggcatcctggcac

SEQ ID NO: 418743 - DNA, 33 bp, Homo sapien
agaacctttcacacgcaatctcagaatttacaa

SEQ ID NO: 418744 - DNA, 33 bp, Homo sapien
agaacctttcacacgcgatctcagaatttacaa

SEQ ID NO: 418745 - DNA, 33 bp, Homo sapien
gttccccgttgtaatcaatgacctgtggaagac

SEQ ID NO: 418746 - DNA, 33 bp, Homo sapien
gttccccgttgtaatcgatgacctgtggaagac

SEQ ID NO: 418747 - DNA, 33 bp, Homo sapien
ttctcagccattttccacagatcaggtgagcat

SEQ ID NO: 418748 - DNA, 33 bp, Homo sapien
ttctcagccattttccgcagatcaggtgagcat

SEQ ID NO: 418749 - DNA, 33 bp, Homo sapien
ccaggttaaagtagccaaaaggccactgccgga

SEQ ID NO: 418750 - DNA, 33 bp, Homo sapien
ccaggttaaagtagccgaaaggccactgccgga

SEQ ID NO: 418751 - DNA, 33 bp, Homo sapien
gtgtatgcagaaataactaggaagtgacgtttg

SEQ ID NO: 418752 - DNA, 33 bp, Homo sapien
gtgtatgcagaaataagtaggaagtgacgtttg

SEQ ID NO: 418753 - DNA, 33 bp, Homo sapien
acaattatgtgaacgcaaggagcctcctgcacc

SEQ ID NO: 418754 - DNA, 33 bp, Homo sapien
acaattatgtgaacgccaggagcctcctgcacc

SEQ ID NO: 418755 - DNA, 33 bp, Homo sapien
agaccaccagcgatgacgtagctcttgtgggcc

SEQ ID NO: 418756 - DNA, 33 bp, Homo sapien
agaccaccagcgatgatgtagctcttgtgggcc

SEQ ID NO: 418757 - DNA, 33 bp, Homo sapien
tcgcgtgtcctccacaagaacacaatgctctgc

SEQ ID NO: 418758 - DNA, 33 bp, Homo sapien
tcgcgtgtcctccacacgaacacaatgctctgc

SEQ ID NO: 418759 - DNA, 33 bp, Homo sapien
cagataaacaacgctaaggccaagcagacgccc

SEQ ID NO: 418760 - DNA, 33 bp, Homo sapien
cagataaacaacgctacggccaagcagacgccc

SEQ ID NO: 418761 - DNA, 33 bp, Homo sapien
tctgtcaggtaaagagaaaaaaacagcatgcat

SEQ ID NO: 418762 - DNA, 33 bp, Homo sapien
tctgtcaggtaaagaggaaaaaacagcatgcat

SEQ ID NO: 418763 - DNA, 33 bp, Homo sapien
tttctcagaaagttccaagactgccctgtcctt

SEQ ID NO: 418764 - DNA, 33 bp, Homo sapien
tttctcagaaagttccgagactgccctgtcctt

SEQ ID NO: 418765 - DNA, 33 bp, Homo sapien
gattaaaagaaaaagaatcaggagagagaggcc

SEQ ID NO: 418766 - DNA, 33 bp, Homo sapien
gattaaaagaaaaagattcaggagagagaggcc

SEQ ID NO: 418767 - DNA, 33 bp, Homo sapien
tcccacaagggtggtaagagtgttaggagggcc

SEQ ID NO: 418768 - DNA, 33 bp, Homo sapien
tcccacaagggtggtacgagtgttaggagggcc

SEQ ID NO: 418769 - DNA, 33 bp, Homo sapien
gtattaaagactcacaccatttggtgacagccc

SEQ ID NO: 418770 - DNA, 33 bp, Homo sapien
gtattaaagactcacatcatttggtgacagccc

SEQ ID NO: 418771 - DNA, 33 bp, Homo sapien
acatctcaggtaacaccccttcatctaagacat

SEQ ID NO: 418772 - DNA, 33 bp, Homo sapien
acatctcaggtaacactccttcatctaagacat

SEQ ID NO: 418773 - DNA, 33 bp, Homo sapien
tgagtgtttgcattcaacacaagaggaatccag

SEQ ID NO: 418774 - DNA, 33 bp, Homo sapien
tgagtgtttgcattcagcacaagaggaatccag

SEQ ID NO: 418775 - DNA, 33 bp, Homo sapien
atgaccccacatcaaacgagatcctttcatcaa

SEQ ID NO: 418776 - DNA, 33 bp, Homo sapien
atgaccccacatcaaatgagatcctttcatcaa

SEQ ID NO: 418777 - DNA, 33 bp, Homo sapien
gcatcagtttcttctacgcaataaaagaaccca

SEQ ID NO: 418778 - DNA, 33 bp, Homo sapien
gcatcagtttcttctaggcaataaaagaaccca

SEQ ID NO: 418779 - DNA, 33 bp, Homo sapien
agtgcctcagacgaacaagttacctgacacaca

SEQ ID NO: 418780 - DNA, 33 bp, Homo sapien
agtgcctcagacgaacgagttacctgacacaca

SEQ ID NO: 418781 - DNA, 33 bp, Homo sapien
gagctagcaggcataaaccccgtcactgccgtt

SEQ ID NO: 418782 - DNA, 33 bp, Homo sapien
gagctagcaggcataagccccgtcactgccgtt

SEQ ID NO: 418783 - DNA, 33 bp, Homo sapien
agtagaacattaaaaaaacatcagccgtattct

SEQ ID NO: 418784 - DNA, 33 bp, Homo sapien
agtagaacattaaaaagacatcagccgtattct

SEQ ID NO: 418785 - DNA, 33 bp, Homo sapien
cgacatccgcacattaactgtctgatgcccggg

SEQ ID NO: 418786 - DNA, 33 bp, Homo sapien
cgacatccgcacattacctgtctgatgcccggg

SEQ ID NO: 418787 - DNA, 33 bp, Homo sapien
ctttcttttggaaggacgtcacccagtgacagc

SEQ ID NO: 418788 - DNA, 33 bp, Homo sapien
ctttcttttggaaggatgtcacccagtgacagc

SEQ ID NO: 418789 - DNA, 33 bp, Homo sapien
tctggacgattcgaagaaaattcgaaggaaact

SEQ ID NO: 418790 - DNA, 33 bp, Homo sapien
tctggacgattcgaaggaaattcgaaggaaact

SEQ ID NO: 418791 - DNA, 33 bp, Homo sapien
ggaagacagtgaactacgcaagggccaacagtg

SEQ ID NO: 418792 - DNA, 33 bp, Homo sapien
ggaagacagtgaactatgcaagggccaacagtg

SEQ ID NO: 418793 - DNA, 33 bp, Homo sapien
gggcaggtgcagctcaatatcttaccgaccagc

SEQ ID NO: 418794 - DNA, 33 bp, Homo sapien
gggcaggtgcagctcagtatcttaccgaccagc

SEQ ID NO: 418795 - DNA, 33 bp, Homo sapien
gtttcccccatttcccacacaaatgctacagac

SEQ ID NO: 418796 - DNA, 33 bp, Homo sapien
gtttcccccatttcccgcacaaatgctacagac

SEQ ID NO: 418797 - DNA, 33 bp, Homo sapien
tacatggatcttcaaccgcctcgacagaaatgg

SEQ ID NO: 418798 - DNA, 33 bp, Homo sapien
tacatggatcttcaactgcctcgacagaaatgg

SEQ ID NO: 418799 - DNA, 33 bp, Homo sapien
gatagaagctcggtacaataaccacacagcagt

SEQ ID NO: 418800 - DNA, 33 bp, Homo sapien
gatagaagctcggtacgataaccacacagcagt

SEQ ID NO: 418801 - DNA, 33 bp, Homo sapien
ccctagccaatcatacaccaatgcacacaggaa

SEQ ID NO: 418802 - DNA, 33 bp, Homo sapien
ccctagccaatcatacgccaatgcacacaggaa

SEQ ID NO: 418803 - DNA, 33 bp, Homo sapien
aataaatctttaacacaacacagcagctgtcac

SEQ ID NO: 418804 - DNA, 33 bp, Homo sapien
aataaatctttaacacgacacagcagctgtcac

SEQ ID NO: 418805 - DNA, 33 bp, Homo sapien
aacctgcggtacttctgaagtgggggatggaag

SEQ ID NO: 418806 - DNA, 33 bp, Homo sapien
aacctgcggtacttcttaagtgggggatggaag

SEQ ID NO: 418807 - DNA, 33 bp, Homo sapien
agagaaaggcgaaaaaacgcactccaggatgct

SEQ ID NO: 418808 - DNA, 33 bp, Homo sapien
agagaaaggcgaaaaaccgcactccaggatgct

SEQ ID NO: 418809 - DNA, 33 bp, Homo sapien
tggaggagttaatacaaacgaagctgcgtggac

SEQ ID NO: 418810 - DNA, 33 bp, Homo sapien
tggaggagttaatacagacgaagctgcgtggac

SEQ ID NO: 418811 - DNA, 33 bp, Homo sapien
tttggtctctttgggaagaagttatacaaaaag

SEQ ID NO: 418812 - DNA, 33 bp, Homo sapien
tttggtctctttgggaggaagttatacaaaaag

SEQ ID NO: 418813 - DNA, 33 bp, Homo sapien
ctcccatttgggcttcaagcgcattgccatgtc

SEQ ID NO: 418814 - DNA, 33 bp, Homo sapien
ctcccatttgggcttcgagcgcattgccatgtc

SEQ ID NO: 418815 - DNA, 33 bp, Homo sapien
gtataaatgtgacggcggccctgccctgagctg

SEQ ID NO: 418816 - DNA, 33 bp, Homo sapien
gtataaatgtgacggctgccctgccctgagctg

SEQ ID NO: 418817 - DNA, 33 bp, Homo sapien
agggaaaagccaaccacaacgccattgcatgtg

SEQ ID NO: 418818 - DNA, 33 bp, Homo sapien
agggaaaagccaaccataacgccattgcatgtg

SEQ ID NO: 418819 - DNA, 33 bp, Homo sapien
gcatgtatgcatcaagacttcacagggacactt

SEQ ID NO: 418820 - DNA, 33 bp, Homo sapien
gcatgtatgcatcaaggcttcacagggacactt

SEQ ID NO: 418821 - DNA, 33 bp, Homo sapien
taattttgctgattgacgtttgcctagattata

SEQ ID NO: 418822 - DNA, 33 bp, Homo sapien
taattttgctgattgatgtttgcctagattata

SEQ ID NO: 418823 - DNA, 33 bp, Homo sapien
cctcctgagaccaccagagcagaaaaccctcct

SEQ ID NO: 418824 - DNA, 33 bp, Homo sapien
cctcctgagaccaccatagcagaaaaccctcct

SEQ ID NO: 418825 - DNA, 33 bp, Homo sapien
tctgaaataccgagtaacagtttttgtcagcac

SEQ ID NO: 418826 - DNA, 33 bp, Homo sapien
tctgaaataccgagtaccagtttttgtcagcac

SEQ ID NO: 418827 - DNA, 33 bp, Homo sapien
caccaacctcacgtccgctctgtctgcagcgtc

SEQ ID NO: 418828 - DNA, 33 bp, Homo sapien
caccaacctcacgtcctctctgtctgcagcgtc

SEQ ID NO: 418829 - DNA, 33 bp, Homo sapien
ttgggcccttacagctcacaaagtaaagataac

SEQ ID NO: 418830 - DNA, 33 bp, Homo sapien
ttgggcccttacagcttacaaagtaaagataac

SEQ ID NO: 418831 - DNA, 33 bp, Homo sapien
ataaataactggtggacgaacatatgaatactc

SEQ ID NO: 418832 - DNA, 33 bp, Homo sapien
ataaataactggtggatgaacatatgaatactc

SEQ ID NO: 418833 - DNA, 33 bp, Homo sapien
tgagcttccagaacacaggggtcatttacttcc

SEQ ID NO: 418834 - DNA, 33 bp, Homo sapien
tgagcttccagaacaccggggtcatttacttcc

SEQ ID NO: 418835 - DNA, 33 bp, Homo sapien
agccaaaccatatcacaggtgaaagagaaagag

SEQ ID NO: 418836 - DNA, 33 bp, Homo sapien
agccaaaccatatcacgggtgaaagagaaagag

SEQ ID NO: 418837 - DNA, 33 bp, Homo sapien
ttatgtgctagatgacaaggtcttgttagagcc

SEQ ID NO: 418838 - DNA, 33 bp, Homo sapien
ttatgtgctagatgaccaggtcttgttagagcc

SEQ ID NO: 418839 - DNA, 33 bp, Homo sapien
tttaagtttccacttcaaacagagcatctgtct

SEQ ID NO: 418840 - DNA, 33 bp, Homo sapien
tttaagtttccacttcgaacagagcatctgtct

SEQ ID NO: 418841 - DNA, 33 bp, Homo sapien
catcctctgctatagactcccttttctttcctg

SEQ ID NO: 418842 - DNA, 33 bp, Homo sapien
catcctctgctatagagtcccttttctttcctg

SEQ ID NO: 418843 - DNA, 33 bp, Homo sapien
tagccaataaacacaaaagaagatgttcaatgt

SEQ ID NO: 418844 - DNA, 33 bp, Homo sapien
tagccaataaacacaagagaagatgttcaatgt

SEQ ID NO: 418845 - DNA, 33 bp, Homo sapien
agttgtcttttcattacggagttacaggagttt

SEQ ID NO: 418846 - DNA, 33 bp, Homo sapien
agttgtcttttcattatggagttacaggagttt

SEQ ID NO: 418847 - DNA, 33 bp, Homo sapien
catggagataagttgacctttcagtgagggcca

SEQ ID NO: 418848 - DNA, 33 bp, Homo sapien
catggagataagttgatctttcagtgagggcca

SEQ ID NO: 418849 - DNA, 33 bp, Homo sapien
gtaattatgtaaaggccaaagtattattacgag

SEQ ID NO: 418850 - DNA, 33 bp, Homo sapien
gtaattatgtaaaggctaaagtattattacgag

SEQ ID NO: 418851 - DNA, 33 bp, Homo sapien
gtgtttggtaatgtcacatttgaagacttgttt

SEQ ID NO: 418852 - DNA, 33 bp, Homo sapien
gtgtttggtaatgtcagatttgaagacttgttt

SEQ ID NO: 418853 - DNA, 33 bp, Homo sapien
tcatgcatcacttaacggtggaaatcattctga

SEQ ID NO: 418854 - DNA, 33 bp, Homo sapien
tcatgcatcacttaactgtggaaatcattctga

SEQ ID NO: 418855 - DNA, 33 bp, Homo sapien
ctggacctgtgatgatgagaacgcagtagctct

SEQ ID NO: 418856 - DNA, 33 bp, Homo sapien
ctggacctgtgatgattagaacgcagtagctct

SEQ ID NO: 418857 - DNA, 33 bp, Homo sapien
taacagatgataaatgcacatggcataaaatgt

SEQ ID NO: 418858 - DNA, 33 bp, Homo sapien
taacagatgataaatgtacatggcataaaatgt

SEQ ID NO: 418859 - DNA, 33 bp, Homo sapien
cacacttacaaggcgaactgcaccgagaggtga

SEQ ID NO: 418860 - DNA, 33 bp, Homo sapien
cacacttacaaggcgagctgcaccgagaggtga

SEQ ID NO: 418861 - DNA, 33 bp, Homo sapien
gcccacacaagtaacactgatgaacctcaaata

SEQ ID NO: 418862 - DNA, 33 bp, Homo sapien
gcccacacaagtaacattgatgaacctcaaata

SEQ ID NO: 418863 - DNA, 33 bp, Homo sapien
ttctcattgtcttaaacggtcttcagctctgtc

SEQ ID NO: 418864 - DNA, 33 bp, Homo sapien
ttctcattgtcttaaatggtcttcagctctgtc

SEQ ID NO: 418865 - DNA, 33 bp, Homo sapien
ctggtgagaactgctacggcaactgtgtcctaa

SEQ ID NO: 418866 - DNA, 33 bp, Homo sapien
ctggtgagaactgctatggcaactgtgtcctaa

SEQ ID NO: 418867 - DNA, 33 bp, Homo sapien
gctcaccgtgttattacaagtcgccaaacaaac

SEQ ID NO: 418868 - DNA, 33 bp, Homo sapien
gctcaccgtgttattataagtcgccaaacaaac

SEQ ID NO: 418869 - DNA, 33 bp, Homo sapien
ttcttagaaacacactcacaaagccccaggtaa

SEQ ID NO: 418870 - DNA, 33 bp, Homo sapien
ttcttagaaacacactgacaaagccccaggtaa

SEQ ID NO: 418871 - DNA, 33 bp, Homo sapien
gtagtacttgtccatgaaatttctctgtaataa

SEQ ID NO: 418872 - DNA, 33 bp, Homo sapien
gtagtacttgtccatgtaatttctctgtaataa

SEQ ID NO: 418873 - DNA, 33 bp, Homo sapien
tggggatttgagcaaaagtgttgggtgctgccc

SEQ ID NO: 418874 - DNA, 33 bp, Homo sapien
tggggatttgagcaaacgtgttgggtgctgccc

SEQ ID NO: 418875 - DNA, 33 bp, Homo sapien
gttcacacaggcatcaacgccaaacacagggtg

SEQ ID NO: 418876 - DNA, 33 bp, Homo sapien
gttcacacaggcatcaccgccaaacacagggtg

SEQ ID NO: 418877 - DNA, 33 bp, Homo sapien
agaaccctttctgagacgttagctgtgatcaca

SEQ ID NO: 418878 - DNA, 33 bp, Homo sapien
agaaccctttctgagaggttagctgtgatcaca

SEQ ID NO: 418879 - DNA, 33 bp, Homo sapien
aactcctgtccttgtacaaatgttactaagtga

SEQ ID NO: 418880 - DNA, 33 bp, Homo sapien
aactcctgtccttgtagaaatgttactaagtga

SEQ ID NO: 418881 - DNA, 33 bp, Homo sapien
agccaacagttggacacggcatttaaggagatg

SEQ ID NO: 418882 - DNA, 33 bp, Homo sapien
agccaacagttggacatggcatttaaggagatg

SEQ ID NO: 418883 - DNA, 33 bp, Homo sapien
ccctgagagcgaccagaagccttccgatggcgg

SEQ ID NO: 418884 - DNA, 33 bp, Homo sapien
ccctgagagcgaccaggagccttccgatggcgg

SEQ ID NO: 418885 - DNA, 33 bp, Homo sapien
ttctcacagcaggtaccggtacgtgtgcacaga

SEQ ID NO: 418886 - DNA, 33 bp, Homo sapien
ttctcacagcaggtactggtacgtgtgcacaga

SEQ ID NO: 418887 - DNA, 33 bp, Homo sapien
agccacaatacagaagcaagggctataaacctg

SEQ ID NO: 418888 - DNA, 33 bp, Homo sapien
agccacaatacagaagtaagggctataaacctg

SEQ ID NO: 418889 - DNA, 33 bp, Homo sapien
gaggatggaaggtggacgctagaaaactatgag

SEQ ID NO: 418890 - DNA, 33 bp, Homo sapien
gaggatggaaggtggatgctagaaaactatgag

SEQ ID NO: 418891 - DNA, 33 bp, Homo sapien
aagacttgggtgtagacatgaaaccatcttact

SEQ ID NO: 418892 - DNA, 33 bp, Homo sapien
aagacttgggtgtagatatgaaaccatcttact

SEQ ID NO: 418893 - DNA, 33 bp, Homo sapien
ttggtcattttaagacacttttagtaagatggt

SEQ ID NO: 418894 - DNA, 33 bp, Homo sapien
ttggtcattttaagacgcttttagtaagatggt

SEQ ID NO: 418895 - DNA, 33 bp, Homo sapien
tttccccacactctcactcagcataatcatgct

SEQ ID NO: 418896 - DNA, 33 bp, Homo sapien
tttccccacactctcattcagcataatcatgct

SEQ ID NO: 418897 - DNA, 33 bp, Homo sapien
caaagagcagctcaaaaactgaatggtgaaact

SEQ ID NO: 418898 - DNA, 33 bp, Homo sapien
caaagagcagctcaaagactgaatggtgaaact

SEQ ID NO: 418899 - DNA, 33 bp, Homo sapien
cccaggccaggctgacaagagctgcaggagacc

SEQ ID NO: 418900 - DNA, 33 bp, Homo sapien
cccaggccaggctgacgagagctgcaggagacc

SEQ ID NO: 418901 - DNA, 33 bp, Homo sapien
agatcatgccactgacaccaaaaaaaaaggtaa

SEQ ID NO: 418902 - DNA, 33 bp, Homo sapien
agatcatgccactgacgccaaaaaaaaaggtaa

SEQ ID NO: 418903 - DNA, 33 bp, Homo sapien
ttctgccgccaaagcccaagctgtttgtcctct

SEQ ID NO: 418904 - DNA, 33 bp, Homo sapien
ttctgccgccaaagcctaagctgtttgtcctct

SEQ ID NO: 418905 - DNA, 33 bp, Homo sapien
atggttcagaaactgacacgtgatgtggaatac

SEQ ID NO: 418906 - DNA, 33 bp, Homo sapien
atggttcagaaactgatacgtgatgtggaatac

SEQ ID NO: 418907 - DNA, 33 bp, Homo sapien
gtctcttaggttctgcactcatttcagctgttg

SEQ ID NO: 418908 - DNA, 33 bp, Homo sapien
gtctcttaggttctgcgctcatttcagctgttg

SEQ ID NO: 418909 - DNA, 33 bp, Homo sapien
cacgagctgggacagcagaaagagcagaagagt

SEQ ID NO: 418910 - DNA, 33 bp, Homo sapien
cacgagctgggacagcggaaagagcagaagagt

SEQ ID NO: 418911 - DNA, 33 bp, Homo sapien
tggagaaccccgcccaagcacaatggttgtggc

SEQ ID NO: 418912 - DNA, 33 bp, Homo sapien
tggagaaccccgcccaggcacaatggttgtggc

SEQ ID NO: 418913 - DNA, 33 bp, Homo sapien
ttgctttctttcccgagcacttctatcagaagc

SEQ ID NO: 418914 - DNA, 33 bp, Homo sapien
ttgctttctttcccgatcacttctatcagaagc

SEQ ID NO: 418915 - DNA, 33 bp, Homo sapien
caccccactgttcttacgccctttagtgtagac

SEQ ID NO: 418916 - DNA, 33 bp, Homo sapien
caccccactgttcttatgccctttagtgtagac

SEQ ID NO: 418917 - DNA, 33 bp, Homo sapien
aaactttgataggacacagcggaagtaattaca

SEQ ID NO: 418918 - DNA, 33 bp, Homo sapien
aaactttgataggacagagcggaagtaattaca

SEQ ID NO: 418919 - DNA, 33 bp, Homo sapien
cttaactttatatttcaacacttctgttaagta

SEQ ID NO: 418920 - DNA, 33 bp, Homo sapien
cttaactttatatttcgacacttctgttaagta

SEQ ID NO: 418921 - DNA, 33 bp, Homo sapien
gacacgtgtacagaaaaggagaaaggttcactc

SEQ ID NO: 418922 - DNA, 33 bp, Homo sapien
gacacgtgtacagaaacggagaaaggttcactc

SEQ ID NO: 418923 - DNA, 33 bp, Homo sapien
agatgcgacgccccaacgcttctgttccccaga

SEQ ID NO: 418924 - DNA, 33 bp, Homo sapien
agatgcgacgccccaatgcttctgttccccaga

SEQ ID NO: 418925 - DNA, 33 bp, Homo sapien
attctgtatggagtaacgtattgttgaatgaca

SEQ ID NO: 418926 - DNA, 33 bp, Homo sapien
attctgtatggagtaatgtattgttgaatgaca

SEQ ID NO: 418927 - DNA, 33 bp, Homo sapien
tcccaatttattcatccactggacagaccgact

SEQ ID NO: 418928 - DNA, 33 bp, Homo sapien
tcccaatttattcatctactggacagaccgact

SEQ ID NO: 418929 - DNA, 33 bp, Homo sapien
taaaccaaatctgtgacgcccaaaaggccctca

SEQ ID NO: 418930 - DNA, 33 bp, Homo sapien
taaaccaaatctgtgatgcccaaaaggccctca

SEQ ID NO: 418931 - DNA, 33 bp, Homo sapien
tacagagggtctcagaactgtgttggcatcact

SEQ ID NO: 418932 - DNA, 33 bp, Homo sapien
tacagagggtctcagagctgtgttggcatcact

SEQ ID NO: 418933 - DNA, 33 bp, Homo sapien
gaccagccgtcgccccactctcctgttcatcat

SEQ ID NO: 418934 - DNA, 33 bp, Homo sapien
gaccagccgtcgccccgctctcctgttcatcat

SEQ ID NO: 418935 - DNA, 33 bp, Homo sapien
gggaggccggacacccaattgccacctggccct

SEQ ID NO: 418936 - DNA, 33 bp, Homo sapien
gggaggccggacaccccattgccacctggccct

SEQ ID NO: 418937 - DNA, 33 bp, Homo sapien
agtccagatcttcacacgaggcatgggtcgatt

SEQ ID NO: 418938 - DNA, 33 bp, Homo sapien
agtccagatcttcacatgaggcatgggtcgatt

SEQ ID NO: 418939 - DNA, 33 bp, Homo sapien
tgaggagaatttttggcacagtgtgagcattca

SEQ ID NO: 418940 - DNA, 33 bp, Homo sapien
tgaggagaatttttgggacagtgtgagcattca

SEQ ID NO: 418941 - DNA, 33 bp, Homo sapien
gaaaaagccattttgggataaacaaacgagagg

SEQ ID NO: 418942 - DNA, 33 bp, Homo sapien
gaaaaagccattttggtataaacaaacgagagg

SEQ ID NO: 418943 - DNA, 33 bp, Homo sapien
aagattgtctccaataaagtaataagtagactg

SEQ ID NO: 418944 - DNA, 33 bp, Homo sapien
aagattgtctccaatacagtaataagtagactg

SEQ ID NO: 418945 - DNA, 33 bp, Homo sapien
atgtgagagtaactaaaaacttacgcataaaaa

SEQ ID NO: 418946 - DNA, 33 bp, Homo sapien
atgtgagagtaactaataacttacgcataaaaa

SEQ ID NO: 418947 - DNA, 33 bp, Homo sapien
caggacccggctccacaacgcacaaaggcaact

SEQ ID NO: 418948 - DNA, 33 bp, Homo sapien
caggacccggctccacgacgcacaaaggcaact

SEQ ID NO: 418949 - DNA, 33 bp, Homo sapien
aaagaatcacagaagaaccataagctataacaa

SEQ ID NO: 418950 - DNA, 33 bp, Homo sapien
aaagaatcacagaagagccataagctataacaa

SEQ ID NO: 418951 - DNA, 33 bp, Homo sapien
tctcttgcaggtccgacgtggcctccgtgaact

SEQ ID NO: 418952 - DNA, 33 bp, Homo sapien
tctcttgcaggtccgatgtggcctccgtgaact

SEQ ID NO: 418953 - DNA, 33 bp, Homo sapien
agaccacgctgtctccagatgacccaacgtgcc

SEQ ID NO: 418954 - DNA, 33 bp, Homo sapien
agaccacgctgtctccggatgacccaacgtgcc

SEQ ID NO: 418955 - DNA, 33 bp, Homo sapien
ccagatctaatggaccactatataaagctggga

SEQ ID NO: 418956 - DNA, 33 bp, Homo sapien
ccagatctaatggaccgctatataaagctggga

SEQ ID NO: 418957 - DNA, 33 bp, Homo sapien
attaaagaagagaacaaaattaagtcatttaga

SEQ ID NO: 418958 - DNA, 33 bp, Homo sapien
attaaagaagagaacacaattaagtcatttaga

SEQ ID NO: 418959 - DNA, 33 bp, Homo sapien
ctgcccctgtctgatcccctctggcctctgtca

SEQ ID NO: 418960 - DNA, 33 bp, Homo sapien
ctgcccctgtctgatctcctctggcctctgtca

SEQ ID NO: 418961 - DNA, 33 bp, Homo sapien
cattgtgaccgtagcaggatcttctggagagcc

SEQ ID NO: 418962 - DNA, 33 bp, Homo sapien
cattgtgaccgtagcatgatcttctggagagcc

SEQ ID NO: 418963 - DNA, 33 bp, Homo sapien
tttcctagaaccaaaaagtacgagtgacctgat

SEQ ID NO: 418964 - DNA, 33 bp, Homo sapien
tttcctagaaccaaaacgtacgagtgacctgat

SEQ ID NO: 418965 - DNA, 33 bp, Homo sapien
ttataccaagacgaaacagagtctgaacagtcc

SEQ ID NO: 418966 - DNA, 33 bp, Homo sapien
ttataccaagacgaaatagagtctgaacagtcc

SEQ ID NO: 418967 - DNA, 33 bp, Homo sapien
gatggttttttgacaaagcccagaagcaaccag

SEQ ID NO: 418968 - DNA, 33 bp, Homo sapien
gatggttttttgacaaggcccagaagcaaccag

SEQ ID NO: 418969 - DNA, 33 bp, Homo sapien
ggggaagtggtgtagacggtctaggtcctcttg

SEQ ID NO: 418970 - DNA, 33 bp, Homo sapien
ggggaagtggtgtagatggtctaggtcctcttg

SEQ ID NO: 418971 - DNA, 33 bp, Homo sapien
gaatttctggttcaaactgtgcctcctccactt

SEQ ID NO: 418972 - DNA, 33 bp, Homo sapien
gaatttctggttcaaagtgtgcctcctccactt

SEQ ID NO: 418973 - DNA, 33 bp, Homo sapien
gtgactcctgctacccaagaatcaaaagcagca

SEQ ID NO: 418974 - DNA, 33 bp, Homo sapien
gtgactcctgctacccgagaatcaaaagcagca

SEQ ID NO: 418975 - DNA, 33 bp, Homo sapien
ttggcctccgatcaaccctgggctcctgatttt

SEQ ID NO: 418976 - DNA, 33 bp, Homo sapien
ttggcctccgatcaactctgggctcctgatttt

SEQ ID NO: 418977 - DNA, 33 bp, Homo sapien
aagaagagaggccttacgaggttttccatttcc

SEQ ID NO: 418978 - DNA, 33 bp, Homo sapien
aagaagagaggccttatgaggttttccatttcc

SEQ ID NO: 418979 - DNA, 33 bp, Homo sapien
gaaaaacccaagtgtacgtaggctgtgcagttc

SEQ ID NO: 418980 - DNA, 33 bp, Homo sapien
gaaaaacccaagtgtatgtaggctgtgcagttc

SEQ ID NO: 418981 - DNA, 33 bp, Homo sapien
tctgtggttcaccgccaagatgcgcgtccaggg

SEQ ID NO: 418982 - DNA, 33 bp, Homo sapien
tctgtggttcaccgccgagatgcgcgtccaggg

SEQ ID NO: 418983 - DNA, 33 bp, Homo sapien
tccaaaacgtgaagacagagaggctcagcatct

SEQ ID NO: 418984 - DNA, 33 bp, Homo sapien
tccaaaacgtgaagactgagaggctcagcatct

SEQ ID NO: 418985 - DNA, 33 bp, Homo sapien
taattcacgtaaccacaaaccagcaactgcaaa

SEQ ID NO: 418986 - DNA, 33 bp, Homo sapien
taattcacgtaaccacgaaccagcaactgcaaa

SEQ ID NO: 418987 - DNA, 33 bp, Homo sapien
ggagaaccctggggcgccaaattactccacaga

SEQ ID NO: 418988 - DNA, 33 bp, Homo sapien
ggagaaccctggggcgtcaaattactccacaga

SEQ ID NO: 418989 - DNA, 33 bp, Homo sapien
aataaacttttgctcaacccgaaggagaagttg

SEQ ID NO: 418990 - DNA, 33 bp, Homo sapien
aataaacttttgctcaccccgaaggagaagttg

SEQ ID NO: 418991 - DNA, 33 bp, Homo sapien
cgaggatctggtgataagttgggtggaggagga

SEQ ID NO: 418992 - DNA, 33 bp, Homo sapien
cgaggatctggtgatacgttgggtggaggagga

SEQ ID NO: 418993 - DNA, 33 bp, Homo sapien
agactgtcatcattcacagtatcaaagggtaga

SEQ ID NO: 418994 - DNA, 33 bp, Homo sapien
agactgtcatcattcatagtatcaaagggtaga

SEQ ID NO: 418995 - DNA, 33 bp, Homo sapien
atcatcctcccagaaaaaggaacggagcacgat

SEQ ID NO: 418996 - DNA, 33 bp, Homo sapien
atcatcctcccagaaagaggaacggagcacgat

SEQ ID NO: 418997 - DNA, 33 bp, Homo sapien
ttatcaacttacgtaccgaaacagtttcatgtt

SEQ ID NO: 418998 - DNA, 33 bp, Homo sapien
ttatcaacttacgtactgaaacagtttcatgtt

SEQ ID NO: 418999 - DNA, 33 bp, Homo sapien
aagattctggtgtccacgtgatcattggggggc

SEQ ID NO: 419000 - DNA, 33 bp, Homo sapien
aagattctggtgtccatgtgatcattggggggc

SEQ ID NO: 419001 - DNA, 33 bp, Homo sapien
aacattcgtccagccacggttcagcgttgtgga

SEQ ID NO: 419002 - DNA, 33 bp, Homo sapien
aacattcgtccagccatggttcagcgttgtgga

SEQ ID NO: 419003 - DNA, 33 bp, Homo sapien
aggtgctgatgaaagaagattgacgtcacgtgg

SEQ ID NO: 419004 - DNA, 33 bp, Homo sapien
aggtgctgatgaaagatgattgacgtcacgtgg

SEQ ID NO: 419005 - DNA, 33 bp, Homo sapien
cctccttgttgcttcccgacgtgagtggtggtc

SEQ ID NO: 419006 - DNA, 33 bp, Homo sapien
cctccttgttgcttccggacgtgagtggtggtc

SEQ ID NO: 419007 - DNA, 33 bp, Homo sapien
aggaggacacccagaacgtccagagagagcctc

SEQ ID NO: 419008 - DNA, 33 bp, Homo sapien
aggaggacacccagaaggtccagagagagcctc

SEQ ID NO: 419009 - DNA, 33 bp, Homo sapien
gcagagggaactgagccgaaaactaagtctcgg

SEQ ID NO: 419010 - DNA, 33 bp, Homo sapien
gcagagggaactgagctgaaaactaagtctcgg

SEQ ID NO: 419011 - DNA, 33 bp, Homo sapien
taaacaaatttcatgaatcagtaagtttcttct

SEQ ID NO: 419012 - DNA, 33 bp, Homo sapien
taaacaaatttcatgagtcagtaagtttcttct

SEQ ID NO: 419013 - DNA, 33 bp, Homo sapien
tgttgtaggcaatgtgcaattcctgaaaggctg

SEQ ID NO: 419014 - DNA, 33 bp, Homo sapien
tgttgtaggcaatgtgtaattcctgaaaggctg

SEQ ID NO: 419015 - DNA, 33 bp, Homo sapien
gataagtcatcctaaaacatacataaagaggcc

SEQ ID NO: 419016 - DNA, 33 bp, Homo sapien
gataagtcatcctaaatcatacataaagaggcc

SEQ ID NO: 419017 - DNA, 33 bp, Homo sapien
gccatactaaagaatacggactcacataaaatg

SEQ ID NO: 419018 - DNA, 33 bp, Homo sapien
gccatactaaagaatatggactcacataaaatg

SEQ ID NO: 419019 - DNA, 33 bp, Homo sapien
agtaagtggtagagggaatcgaacctatgcatt

SEQ ID NO: 419020 - DNA, 33 bp, Homo sapien
agtaagtggtagaggggatcgaacctatgcatt

SEQ ID NO: 419021 - DNA, 33 bp, Homo sapien
ccttctgggtgacaccacagtctcatggcttta

SEQ ID NO: 419022 - DNA, 33 bp, Homo sapien
ccttctgggtgacaccgcagtctcatggcttta

SEQ ID NO: 419023 - DNA, 33 bp, Homo sapien
tctgtagcattagaaaatgaatggatattggga

SEQ ID NO: 419024 - DNA, 33 bp, Homo sapien
tctgtagcattagaaagtgaatggatattggga

SEQ ID NO: 419025 - DNA, 33 bp, Homo sapien
aatatacttttgtgaagcattagctttacttat

SEQ ID NO: 419026 - DNA, 33 bp, Homo sapien
aatatacttttgtgaatcattagctttacttat

SEQ ID NO: 419027 - DNA, 33 bp, Homo sapien
atcctcttcttagcacaaaatagaacttcagag

SEQ ID NO: 419028 - DNA, 33 bp, Homo sapien
atcctcttcttagcacgaaatagaacttcagag

SEQ ID NO: 419029 - DNA, 33 bp, Homo sapien
agacctcctccaaagccgatttgcagactaagc

SEQ ID NO: 419030 - DNA, 33 bp, Homo sapien
agacctcctccaaagctgatttgcagactaagc

SEQ ID NO: 419031 - DNA, 33 bp, Homo sapien
ctttaaacctcgtaaaccaacttctgctagctt

SEQ ID NO: 419032 - DNA, 33 bp, Homo sapien
ctttaaacctcgtaaatcaacttctgctagctt

SEQ ID NO: 419033 - DNA, 33 bp, Homo sapien
aagcatgcaatcactacaaattggccagaacaa

SEQ ID NO: 419034 - DNA, 33 bp, Homo sapien
aagcatgcaatcactataaattggccagaacaa

SEQ ID NO: 419035 - DNA, 33 bp, Homo sapien
aacaaagaagagttaccaccctaatgaggcctt

SEQ ID NO: 419036 - DNA, 33 bp, Homo sapien
aacaaagaagagttactaccctaatgaggcctt

SEQ ID NO: 419037 - DNA, 33 bp, Homo sapien
ataaacctgatcaatcgattccccagctgaaaa

SEQ ID NO: 419038 - DNA, 33 bp, Homo sapien
ataaacctgatcaatctattccccagctgaaaa

SEQ ID NO: 419039 - DNA, 33 bp, Homo sapien
acagttttgaacacagaattaactaggtcttga

SEQ ID NO: 419040 - DNA, 33 bp, Homo sapien
acagttttgaacacagcattaactaggtcttga

SEQ ID NO: 419041 - DNA, 33 bp, Homo sapien
tttacttaccacaaacactgcaacgtgcagcag

SEQ ID NO: 419042 - DNA, 33 bp, Homo sapien
tttacttaccacaaacgctgcaacgtgcagcag

SEQ ID NO: 419043 - DNA, 33 bp, Homo sapien
tcattgagccaaaccactagtatgtcaagacta

SEQ ID NO: 419044 - DNA, 33 bp, Homo sapien
tcattgagccaaaccattagtatgtcaagacta

SEQ ID NO: 419045 - DNA, 33 bp, Homo sapien
ccaccaaaaattttagcatttgagaatgggctg

SEQ ID NO: 419046 - DNA, 33 bp, Homo sapien
ccaccaaaaattttaggatttgagaatgggctg

SEQ ID NO: 419047 - DNA, 33 bp, Homo sapien
ttctaggatgatgtaaatattgcttttgtgaca

SEQ ID NO: 419048 - DNA, 33 bp, Homo sapien
ttctaggatgatgtaagtattgcttttgtgaca

SEQ ID NO: 419049 - DNA, 33 bp, Homo sapien
ggactttgtagtctgcaaatcaatacagtggct

SEQ ID NO: 419050 - DNA, 33 bp, Homo sapien
ggactttgtagtctgcgaatcaatacagtggct

SEQ ID NO: 419051 - DNA, 33 bp, Homo sapien
ccacccataggaaagacgagaccctgagaagag

SEQ ID NO: 419052 - DNA, 33 bp, Homo sapien
ccacccataggaaagatgagaccctgagaagag

SEQ ID NO: 419053 - DNA, 33 bp, Homo sapien
agttactttgaattgacgaaattaaattttctg

SEQ ID NO: 419054 - DNA, 33 bp, Homo sapien
agttactttgaattgatgaaattaaattttctg

SEQ ID NO: 419055 - DNA, 33 bp, Homo sapien
tttgaaactgtaggaaccatatttagatccaga

SEQ ID NO: 419056 - DNA, 33 bp, Homo sapien
tttgaaactgtaggaatcatatttagatccaga

SEQ ID NO: 419057 - DNA, 33 bp, Homo sapien
cctagaaagacagagagagtaggagaagcgggg

SEQ ID NO: 419058 - DNA, 33 bp, Homo sapien
cctagaaagacagagatagtaggagaagcgggg

SEQ ID NO: 419059 - DNA, 33 bp, Homo sapien
gaacgtaagcatgttaactcattcgtgactcaa

SEQ ID NO: 419060 - DNA, 33 bp, Homo sapien
gaacgtaagcatgttagctcattcgtgactcaa

SEQ ID NO: 419061 - DNA, 33 bp, Homo sapien
aatatctattcattataaggacatgatacacac

SEQ ID NO: 419062 - DNA, 33 bp, Homo sapien
aatatctattcattatgaggacatgatacacac

SEQ ID NO: 419063 - DNA, 33 bp, Homo sapien
acagtacacagtacacagactgggaggcttaaa

SEQ ID NO: 419064 - DNA, 33 bp, Homo sapien
acagtacacagtacacggactgggaggcttaaa

SEQ ID NO: 419065 - DNA, 33 bp, Homo sapien
cttctgagcctgttaacggatgctctccaggat

SEQ ID NO: 419066 - DNA, 33 bp, Homo sapien
cttctgagcctgttaatggatgctctccaggat

SEQ ID NO: 419067 - DNA, 33 bp, Homo sapien
cttccccaaacaagacagcatgactggagatcc

SEQ ID NO: 419068 - DNA, 33 bp, Homo sapien
cttccccaaacaagacggcatgactggagatcc

SEQ ID NO: 419069 - DNA, 33 bp, Homo sapien
tgcacatgaaggttgacgggacaggggacagtg

SEQ ID NO: 419070 - DNA, 33 bp, Homo sapien
tgcacatgaaggttgatgggacaggggacagtg

SEQ ID NO: 419071 - DNA, 33 bp, Homo sapien
aggatgctgacatctagctagctttcactcatt

SEQ ID NO: 419072 - DNA, 33 bp, Homo sapien
aggatgctgacatctatctagctttcactcatt

SEQ ID NO: 419073 - DNA, 33 bp, Homo sapien
ctgtccagttcagccacatagacatttgccgca

SEQ ID NO: 419074 - DNA, 33 bp, Homo sapien
ctgtccagttcagccatatagacatttgccgca

SEQ ID NO: 419075 - DNA, 33 bp, Homo sapien
taggggctagaaaccacgtactgtgaggaaggg

SEQ ID NO: 419076 - DNA, 33 bp, Homo sapien
taggggctagaaaccatgtactgtgaggaaggg

SEQ ID NO: 419077 - DNA, 33 bp, Homo sapien
tcagggccttgtggtgaaactcataacagaaag

SEQ ID NO: 419078 - DNA, 33 bp, Homo sapien
tcagggccttgtggtggaactcataacagaaag

SEQ ID NO: 419079 - DNA, 33 bp, Homo sapien
tcacacaaacacatgggaacttactacttcttc

SEQ ID NO: 419080 - DNA, 33 bp, Homo sapien
tcacacaaacacatggtaacttactacttcttc

SEQ ID NO: 419081 - DNA, 33 bp, Homo sapien
ataataattactcagcaaaatgtcatactcact

SEQ ID NO: 419082 - DNA, 33 bp, Homo sapien
ataataattactcagcgaaatgtcatactcact

SEQ ID NO: 419083 - DNA, 33 bp, Homo sapien
actattttccctgcccacaagtgctaatgaaca

SEQ ID NO: 419084 - DNA, 33 bp, Homo sapien
actattttccctgcccgcaagtgctaatgaaca

SEQ ID NO: 419085 - DNA, 33 bp, Homo sapien
ggcaaaacctgtcaaaaatcctcagtacagtcg

SEQ ID NO: 419086 - DNA, 33 bp, Homo sapien
ggcaaaacctgtcaaacatcctcagtacagtcg

SEQ ID NO: 419087 - DNA, 33 bp, Homo sapien
tagcaagcacttactgaacattcacaattgtat

SEQ ID NO: 419088 - DNA, 33 bp, Homo sapien
tagcaagcacttactggacattcacaattgtat

SEQ ID NO: 419089 - DNA, 33 bp, Homo sapien
gacactgttaggcctacagcaattcaaatacaa

SEQ ID NO: 419090 - DNA, 33 bp, Homo sapien
gacactgttaggcctatagcaattcaaatacaa

SEQ ID NO: 419091 - DNA, 33 bp, Homo sapien
acaaccagctctcaaaattcttacaaatttaac

SEQ ID NO: 419092 - DNA, 33 bp, Homo sapien
acaaccagctctcaaagttcttacaaatttaac

SEQ ID NO: 419093 - DNA, 33 bp, Homo sapien
cactggttcacattccaaagagctggggcactt

SEQ ID NO: 419094 - DNA, 33 bp, Homo sapien
cactggttcacattccgaagagctggggcactt

SEQ ID NO: 419095 - DNA, 33 bp, Homo sapien
caagattctgagtgccaacatggtcagagggtg

SEQ ID NO: 419096 - DNA, 33 bp, Homo sapien
caagattctgagtgccgacatggtcagagggtg

SEQ ID NO: 419097 - DNA, 33 bp, Homo sapien
gagtattggcccacgaagcctgtgaggggagag

SEQ ID NO: 419098 - DNA, 33 bp, Homo sapien
gagtattggcccacgacgcctgtgaggggagag

SEQ ID NO: 419099 - DNA, 33 bp, Homo sapien
gatgtcccattaagaaatgtcctacttagtctg

SEQ ID NO: 419100 - DNA, 33 bp, Homo sapien
gatgtcccattaagaagtgtcctacttagtctg

SEQ ID NO: 419101 - DNA, 33 bp, Homo sapien
atttaatctcctcaacaactttatgaggcagat

SEQ ID NO: 419102 - DNA, 33 bp, Homo sapien
atttaatctcctcaacgactttatgaggcagat

SEQ ID NO: 419103 - DNA, 33 bp, Homo sapien
gagtttcctttcaaaacatcattttgcttcctt

SEQ ID NO: 419104 - DNA, 33 bp, Homo sapien
gagtttcctttcaaaagatcattttgcttcctt

SEQ ID NO: 419105 - DNA, 33 bp, Homo sapien
cataaagaacccgtaggaattaggactggaacc

SEQ ID NO: 419106 - DNA, 33 bp, Homo sapien
cataaagaacccgtagtaattaggactggaacc

SEQ ID NO: 419107 - DNA, 33 bp, Homo sapien
ttcggtcgagaaagccaaagttgcccagtcagg

SEQ ID NO: 419108 - DNA, 33 bp, Homo sapien
ttcggtcgagaaagccgaagttgcccagtcagg

SEQ ID NO: 419109 - DNA, 33 bp, Homo sapien
acagtgcgcaggacgaaagccatctggtagctt

SEQ ID NO: 419110 - DNA, 33 bp, Homo sapien
acagtgcgcaggacgagagccatctggtagctt

SEQ ID NO: 419111 - DNA, 33 bp, Homo sapien
ttctcatgcaaacttacgtactctgcctgagtt

SEQ ID NO: 419112 - DNA, 33 bp, Homo sapien
ttctcatgcaaacttaggtactctgcctgagtt

SEQ ID NO: 419113 - DNA, 33 bp, Homo sapien
acagcaccaaatcactaactcatactgaatagg

SEQ ID NO: 419114 - DNA, 33 bp, Homo sapien
acagcaccaaatcactgactcatactgaatagg

SEQ ID NO: 419115 - DNA, 33 bp, Homo sapien
agtatgcctggcctcccaaaaatgggatgagag

SEQ ID NO: 419116 - DNA, 33 bp, Homo sapien
agtatgcctggcctcctaaaaatgggatgagag

SEQ ID NO: 419117 - DNA, 33 bp, Homo sapien
catgttattggagaagccactgagtaggttagt

SEQ ID NO: 419118 - DNA, 33 bp, Homo sapien
catgttattggagaagtcactgagtaggttagt

SEQ ID NO: 419119 - DNA, 33 bp, Homo sapien
gaaagcatcgaaactacgagaaactggagaaga

SEQ ID NO: 419120 - DNA, 33 bp, Homo sapien
gaaagcatcgaaactatgagaaactggagaaga

SEQ ID NO: 419121 - DNA, 33 bp, Homo sapien
tttatgactgttggaacgtgtcttcaatcatca

SEQ ID NO: 419122 - DNA, 33 bp, Homo sapien
tttatgactgttggaatgtgtcttcaatcatca

SEQ ID NO: 419123 - DNA, 33 bp, Homo sapien
agctgcttctgctagacgggcacagtcgaaagg

SEQ ID NO: 419124 - DNA, 33 bp, Homo sapien
agctgcttctgctagatgggcacagtcgaaagg

SEQ ID NO: 419125 - DNA, 33 bp, Homo sapien
aggttccacctcaacactgacacagggcagatg

SEQ ID NO: 419126 - DNA, 33 bp, Homo sapien
aggttccacctcaacagtgacacagggcagatg

SEQ ID NO: 419127 - DNA, 33 bp, Homo sapien
tttactccacctttcacagtcttcttatgtttg

SEQ ID NO: 419128 - DNA, 33 bp, Homo sapien
tttactccacctttcagagtcttcttatgtttg

SEQ ID NO: 419129 - DNA, 33 bp, Homo sapien
gacttcgagttgtctggtcactttagtgagggg

SEQ ID NO: 419130 - DNA, 33 bp, Homo sapien
gacttcgagttgtctgttcactttagtgagggg

SEQ ID NO: 419131 - DNA, 33 bp, Homo sapien
acatttgctgtcaacaatctttatacaggaaga

SEQ ID NO: 419132 - DNA, 33 bp, Homo sapien
acatttgctgtcaacagtctttatacaggaaga

SEQ ID NO: 419133 - DNA, 33 bp, Homo sapien
cacaactctcctctgcaccacaatccagggtct

SEQ ID NO: 419134 - DNA, 33 bp, Homo sapien
cacaactctcctctgcgccacaatccagggtct

SEQ ID NO: 419135 - DNA, 33 bp, Homo sapien
ctatctttgagaattacctagccctggagggag

SEQ ID NO: 419136 - DNA, 33 bp, Homo sapien
ctatctttgagaattagctagccctggagggag

SEQ ID NO: 419137 - DNA, 33 bp, Homo sapien
gagcagatggcaaaaaatgtataaaggtatgac

SEQ ID NO: 419138 - DNA, 33 bp, Homo sapien
gagcagatggcaaaaagtgtataaaggtatgac

SEQ ID NO: 419139 - DNA, 33 bp, Homo sapien
aagccacagtacaaacaagtgagttgggttttt

SEQ ID NO: 419140 - DNA, 33 bp, Homo sapien
aagccacagtacaaacgagtgagttgggttttt

SEQ ID NO: 419141 - DNA, 33 bp, Homo sapien
gactcagaggaatgtaagagaaatatgaatgtg

SEQ ID NO: 419142 - DNA, 33 bp, Homo sapien
gactcagaggaatgtaggagaaatatgaatgtg

SEQ ID NO: 419143 - DNA, 33 bp, Homo sapien
aagtcactcgtcaatgcactggctcaacaagta

SEQ ID NO: 419144 - DNA, 33 bp, Homo sapien
aagtcactcgtcaatgtactggctcaacaagta

SEQ ID NO: 419145 - DNA, 33 bp, Homo sapien
tacctacaacttacacagtagtaaaattgctcg

SEQ ID NO: 419146 - DNA, 33 bp, Homo sapien
tacctacaacttacacggtagtaaaattgctcg

SEQ ID NO: 419147 - DNA, 33 bp, Homo sapien
caaccatctgctattacgccttaaaaaagtcat

SEQ ID NO: 419148 - DNA, 33 bp, Homo sapien
caaccatctgctattatgccttaaaaaagtcat

SEQ ID NO: 419149 - DNA, 33 bp, Homo sapien
aggtattttttaaccacatggaaggctttactt

SEQ ID NO: 419150 - DNA, 33 bp, Homo sapien
aggtattttttaaccagatggaaggctttactt

SEQ ID NO: 419151 - DNA, 33 bp, Homo sapien
taagtgagtggcaacacataggaactatggctg

SEQ ID NO: 419152 - DNA, 33 bp, Homo sapien
taagtgagtggcaacatataggaactatggctg

SEQ ID NO: 419153 - DNA, 33 bp, Homo sapien
tacttaaatattttaacgtaggtctcagagcta

SEQ ID NO: 419154 - DNA, 33 bp, Homo sapien
tacttaaatattttaatgtaggtctcagagcta

SEQ ID NO: 419155 - DNA, 33 bp, Homo sapien
tcagaaataagagtgtaaagttccaggaaattc

SEQ ID NO: 419156 - DNA, 33 bp, Homo sapien
tcagaaataagagtgtgaagttccaggaaattc

SEQ ID NO: 419157 - DNA, 33 bp, Homo sapien
aaggaagcagaaataacgattttggagaggaag

SEQ ID NO: 419158 - DNA, 33 bp, Homo sapien
aaggaagcagaaataatgattttggagaggaag

SEQ ID NO: 419159 - DNA, 33 bp, Homo sapien
aggttaaaatataggcacgaaaacaagaaaact

SEQ ID NO: 419160 - DNA, 33 bp, Homo sapien
aggttaaaatataggcgcgaaaacaagaaaact

SEQ ID NO: 419161 - DNA, 33 bp, Homo sapien
tgccctcttcttaggacattcacagttcatttc

SEQ ID NO: 419162 - DNA, 33 bp, Homo sapien
tgccctcttcttaggatattcacagttcatttc

SEQ ID NO: 419163 - DNA, 33 bp, Homo sapien
gagaggacaaggacaaaggagcaatagagagga

SEQ ID NO: 419164 - DNA, 33 bp, Homo sapien
gagaggacaaggacaagggagcaatagagagga

SEQ ID NO: 419165 - DNA, 33 bp, Homo sapien
agagagaaacaaggctaaagatcactgcttccc

SEQ ID NO: 419166 - DNA, 33 bp, Homo sapien
agagagaaacaaggctgaagatcactgcttccc

SEQ ID NO: 419167 - DNA, 33 bp, Homo sapien
tcagctggggaaaagacagttgctctgaattac

SEQ ID NO: 419168 - DNA, 33 bp, Homo sapien
tcagctggggaaaagatagttgctctgaattac

SEQ ID NO: 419169 - DNA, 33 bp, Homo sapien
agaggtccaaaataacaaggggcttttgaacag

SEQ ID NO: 419170 - DNA, 33 bp, Homo sapien
agaggtccaaaataacgaggggcttttgaacag

SEQ ID NO: 419171 - DNA, 33 bp, Homo sapien
ggggaaaatggcttcacgtgggagagagaagtc

SEQ ID NO: 419172 - DNA, 33 bp, Homo sapien
ggggaaaatggcttcatgtgggagagagaagtc

SEQ ID NO: 419173 - DNA, 33 bp, Homo sapien
tggctactgagtactcaaaaatgtggctacttg

SEQ ID NO: 419174 - DNA, 33 bp, Homo sapien
tggctactgagtactcgaaaatgtggctacttg

SEQ ID NO: 419175 - DNA, 33 bp, Homo sapien
acaggaacttagggaaagtggaagaataagaat

SEQ ID NO: 419176 - DNA, 33 bp, Homo sapien
acaggaacttagggaaggtggaagaataagaat

SEQ ID NO: 419177 - DNA, 33 bp, Homo sapien
cccaaatgcctaccaactgatgaaaatggataa

SEQ ID NO: 419178 - DNA, 33 bp, Homo sapien
cccaaatgcctaccaattgatgaaaatggataa

SEQ ID NO: 419179 - DNA, 33 bp, Homo sapien
cctgcagaggttggaaactttttctgggtacga

SEQ ID NO: 419180 - DNA, 33 bp, Homo sapien
cctgcagaggttggaagctttttctgggtacga

SEQ ID NO: 419181 - DNA, 33 bp, Homo sapien
gggagttgcaacggataactcacaggagacatg

SEQ ID NO: 419182 - DNA, 33 bp, Homo sapien
gggagttgcaacggatgactcacaggagacatg

SEQ ID NO: 419183 - DNA, 33 bp, Homo sapien
aggttgcttcttccccacagacagatggctgtc

SEQ ID NO: 419184 - DNA, 33 bp, Homo sapien
aggttgcttcttccccgcagacagatggctgtc

SEQ ID NO: 419185 - DNA, 33 bp, Homo sapien
aacccctgagtcccacagacctgtgtcttcctc

SEQ ID NO: 419186 - DNA, 33 bp, Homo sapien
aacccctgagtcccacggacctgtgtcttcctc

SEQ ID NO: 419187 - DNA, 33 bp, Homo sapien
gcctgtgctagcagccaggaaagctaagaggca

SEQ ID NO: 419188 - DNA, 33 bp, Homo sapien
gcctgtgctagcagccgggaaagctaagaggca

SEQ ID NO: 419189 - DNA, 33 bp, Homo sapien
aaaggtgaggctaaaacaggaggactgttggaa

SEQ ID NO: 419190 - DNA, 33 bp, Homo sapien
aaaggtgaggctaaaataggaggactgttggaa

SEQ ID NO: 419191 - DNA, 33 bp, Homo sapien
attagcaaagtctagagtcagaaagcaattaat

SEQ ID NO: 419192 - DNA, 33 bp, Homo sapien
attagcaaagtctagattcagaaagcaattaat

SEQ ID NO: 419193 - DNA, 33 bp, Homo sapien
ttatccttagaatttcaaaagcactgctgtatt

SEQ ID NO: 419194 - DNA, 33 bp, Homo sapien
ttatccttagaatttcgaaagcactgctgtatt

SEQ ID NO: 419195 - DNA, 33 bp, Homo sapien
gttactggagaatgcactgcactaaaataagca

SEQ ID NO: 419196 - DNA, 33 bp, Homo sapien
gttactggagaatgcattgcactaaaataagca

SEQ ID NO: 419197 - DNA, 33 bp, Homo sapien
ggaggtgagaggaaacaaaattcagagtcttct

SEQ ID NO: 419198 - DNA, 33 bp, Homo sapien
ggaggtgagaggaaaccaaattcagagtcttct

SEQ ID NO: 419199 - DNA, 33 bp, Homo sapien
aaatagcctggctgacagggagcaaaagatgct

SEQ ID NO: 419200 - DNA, 33 bp, Homo sapien
aaatagcctggctgaccgggagcaaaagatgct

SEQ ID NO: 419201 - DNA, 33 bp, Homo sapien
agccgagaagcaggaaatgactccacccagcat

SEQ ID NO: 419202 - DNA, 33 bp, Homo sapien
agccgagaagcaggaagtgactccacccagcat

SEQ ID NO: 419203 - DNA, 33 bp, Homo sapien
ataggctaagcccatcaacatatttcctcccat

SEQ ID NO: 419204 - DNA, 33 bp, Homo sapien
ataggctaagcccatcgacatatttcctcccat

SEQ ID NO: 419205 - DNA, 33 bp, Homo sapien
agtgcccggcacattacacatgcttaatagaca

SEQ ID NO: 419206 - DNA, 33 bp, Homo sapien
agtgcccggcacattatacatgcttaatagaca

SEQ ID NO: 419207 - DNA, 33 bp, Homo sapien
ttaggccctaaagacaaagtactaaatttaaga

SEQ ID NO: 419208 - DNA, 33 bp, Homo sapien
ttaggccctaaagacagagtactaaatttaaga

SEQ ID NO: 419209 - DNA, 33 bp, Homo sapien
acctaggtctcctaacagctttgagtatcattt

SEQ ID NO: 419210 - DNA, 33 bp, Homo sapien
acctaggtctcctaacggctttgagtatcattt

SEQ ID NO: 419211 - DNA, 33 bp, Homo sapien
agcactaagtggaaaaaacgcatgttacaacct

SEQ ID NO: 419212 - DNA, 33 bp, Homo sapien
agcactaagtggaaaacacgcatgttacaacct

SEQ ID NO: 419213 - DNA, 33 bp, Homo sapien
agatggaagaatagacacagctactctttgttg

SEQ ID NO: 419214 - DNA, 33 bp, Homo sapien
agatggaagaatagacgcagctactctttgttg

SEQ ID NO: 419215 - DNA, 33 bp, Homo sapien
caggtaagtgatcatgcataagtcaccttgctt

SEQ ID NO: 419216 - DNA, 33 bp, Homo sapien
caggtaagtgatcatgtataagtcaccttgctt

SEQ ID NO: 419217 - DNA, 33 bp, Homo sapien
cagtatgctggacagaagttctcttctccgggt

SEQ ID NO: 419218 - DNA, 33 bp, Homo sapien
cagtatgctggacagaggttctcttctccgggt

SEQ ID NO: 419219 - DNA, 33 bp, Homo sapien
cagaggtgaaagtgaacaaagtatagcaaacag

SEQ ID NO: 419220 - DNA, 33 bp, Homo sapien
cagaggtgaaagtgaataaagtatagcaaacag

SEQ ID NO: 419221 - DNA, 33 bp, Homo sapien
attattttccaatccagaggcaattaggagtag

SEQ ID NO: 419222 - DNA, 33 bp, Homo sapien
attattttccaatccataggcaattaggagtag

SEQ ID NO: 419223 - DNA, 33 bp, Homo sapien
tcctttatttcagcaaaacttgtctaggctaat

SEQ ID NO: 419224 - DNA, 33 bp, Homo sapien
tcctttatttcagcaatacttgtctaggctaat

SEQ ID NO: 419225 - DNA, 33 bp, Homo sapien
ctcccatgcttattaacccaagaagaagaacaa

SEQ ID NO: 419226 - DNA, 33 bp, Homo sapien
ctcccatgcttattaatccaagaagaagaacaa

SEQ ID NO: 419227 - DNA, 33 bp, Homo sapien
aattgtcacttcccccaaacagcaatggagttt

SEQ ID NO: 419228 - DNA, 33 bp, Homo sapien
aattgtcacttccccccaacagcaatggagttt

SEQ ID NO: 419229 - DNA, 33 bp, Homo sapien
gaggaagttcaagcccagaagacttagcaactt

SEQ ID NO: 419230 - DNA, 33 bp, Homo sapien
gaggaagttcaagccccgaagacttagcaactt

SEQ ID NO: 419231 - DNA, 33 bp, Homo sapien
tagaggttatgaccaccgaactaagagaccaga

SEQ ID NO: 419232 - DNA, 33 bp, Homo sapien
tagaggttatgaccactgaactaagagaccaga

SEQ ID NO: 419233 - DNA, 33 bp, Homo sapien
ctgggaggcctggggcaataatactgaagaatc

SEQ ID NO: 419234 - DNA, 33 bp, Homo sapien
ctgggaggcctggggcgataatactgaagaatc

SEQ ID NO: 419235 - DNA, 33 bp, Homo sapien
cattgggtgttgccgccagaacaagagggtttt

SEQ ID NO: 419236 - DNA, 33 bp, Homo sapien
cattgggtgttgccgctagaacaagagggtttt

SEQ ID NO: 419237 - DNA, 33 bp, Homo sapien
tccttctgagagagcaacagtcaaggaaaggag

SEQ ID NO: 419238 - DNA, 33 bp, Homo sapien
tccttctgagagagcagcagtcaaggaaaggag

SEQ ID NO: 419239 - DNA, 33 bp, Homo sapien
taacaattttgaaatacacaatgccttgttgtt

SEQ ID NO: 419240 - DNA, 33 bp, Homo sapien
taacaattttgaaatatacaatgccttgttgtt

SEQ ID NO: 419241 - DNA, 33 bp, Homo sapien
acaaacttcagcagaccctttgtgtggaggccc

SEQ ID NO: 419242 - DNA, 33 bp, Homo sapien
acaaacttcagcagacgctttgtgtggaggccc

SEQ ID NO: 419243 - DNA, 33 bp, Homo sapien
accaaacagcagatacactttcttttcaagcgc

SEQ ID NO: 419244 - DNA, 33 bp, Homo sapien
accaaacagcagatacgctttcttttcaagcgc

SEQ ID NO: 419245 - DNA, 33 bp, Homo sapien
agaaaaagaatcactcggaaaacgatcacatct

SEQ ID NO: 419246 - DNA, 33 bp, Homo sapien
agaaaaagaatcactctgaaaacgatcacatct

SEQ ID NO: 419247 - DNA, 33 bp, Homo sapien
gtggaaagtaggctaaactagagtaatcggttt

SEQ ID NO: 419248 - DNA, 33 bp, Homo sapien
gtggaaagtaggctaagctagagtaatcggttt

SEQ ID NO: 419249 - DNA, 33 bp, Homo sapien
gaaaatgcacagcacaatgtagacaattcctaa

SEQ ID NO: 419250 - DNA, 33 bp, Homo sapien
gaaaatgcacagcacagtgtagacaattcctaa

SEQ ID NO: 419251 - DNA, 33 bp, Homo sapien
actttccgtgactgtacagaatgttccttcttc

SEQ ID NO: 419252 - DNA, 33 bp, Homo sapien
actttccgtgactgtatagaatgttccttcttc

SEQ ID NO: 419253 - DNA, 33 bp, Homo sapien
ttatgttttattccagaaccctgacaaatgaag

SEQ ID NO: 419254 - DNA, 33 bp, Homo sapien
ttatgttttattccaggaccctgacaaatgaag

SEQ ID NO: 419255 - DNA, 33 bp, Homo sapien
ttaatatgacttttctgacagtagatgaagtga

SEQ ID NO: 419256 - DNA, 33 bp, Homo sapien
ttaatatgacttttcttacagtagatgaagtga

SEQ ID NO: 419257 - DNA, 33 bp, Homo sapien
gcttcatgatgatggtgaagtggaatataattt

SEQ ID NO: 419258 - DNA, 33 bp, Homo sapien
gcttcatgatgatggttaagtggaatataattt

SEQ ID NO: 419259 - DNA, 33 bp, Homo sapien
atagaggaatcagatggatttcaaaatgtcagg

SEQ ID NO: 419260 - DNA, 33 bp, Homo sapien
atagaggaatcagatgtatttcaaaatgtcagg

SEQ ID NO: 419261 - DNA, 33 bp, Homo sapien
ccaatcacacacatagaaagatggcttacttcc

SEQ ID NO: 419262 - DNA, 33 bp, Homo sapien
ccaatcacacacataggaagatggcttacttcc

SEQ ID NO: 419263 - DNA, 33 bp, Homo sapien
ggagtaagttagatacagcattcgagaatgaga

SEQ ID NO: 419264 - DNA, 33 bp, Homo sapien
ggagtaagttagataccgcattcgagaatgaga

SEQ ID NO: 419265 - DNA, 33 bp, Homo sapien
ggaaagaaatatgagaacaaaatgaacctatac

SEQ ID NO: 419266 - DNA, 33 bp, Homo sapien
ggaaagaaatatgagaccaaaatgaacctatac

SEQ ID NO: 419267 - DNA, 33 bp, Homo sapien
gaaaatatctaaagccaatcaagttttgagaag

SEQ ID NO: 419268 - DNA, 33 bp, Homo sapien
gaaaatatctaaagccgatcaagttttgagaag

SEQ ID NO: 419269 - DNA, 33 bp, Homo sapien
aaagaaaaaccttgagaaaattagcgcaactcc

SEQ ID NO: 419270 - DNA, 33 bp, Homo sapien
aaagaaaaaccttgagcaaattagcgcaactcc

SEQ ID NO: 419271 - DNA, 33 bp, Homo sapien
aaaaaaagatttgaatcaatagaaaggaatatc

SEQ ID NO: 419272 - DNA, 33 bp, Homo sapien
aaaaaaagatttgaatgaatagaaaggaatatc

SEQ ID NO: 419273 - DNA, 33 bp, Homo sapien
cctgagggctttaggacagtctgatcccttctt

SEQ ID NO: 419274 - DNA, 33 bp, Homo sapien
cctgagggctttaggatagtctgatcccttctt

SEQ ID NO: 419275 - DNA, 33 bp, Homo sapien
caactgagatggcttaagatttacctggatgcc

SEQ ID NO: 419276 - DNA, 33 bp, Homo sapien
caactgagatggcttaggatttacctggatgcc

SEQ ID NO: 419277 - DNA, 33 bp, Homo sapien
ggtgcccttcctagcacgtgtttgctccgttgt

SEQ ID NO: 419278 - DNA, 33 bp, Homo sapien
ggtgcccttcctagcatgtgtttgctccgttgt

SEQ ID NO: 419279 - DNA, 33 bp, Homo sapien
tcatggtcactgttccaaaaaaggtaacatcaa

SEQ ID NO: 419280 - DNA, 33 bp, Homo sapien
tcatggtcactgttccgaaaaaggtaacatcaa

SEQ ID NO: 419281 - DNA, 33 bp, Homo sapien
cctcccaaaattttgaaaactactgaaccagaa

SEQ ID NO: 419282 - DNA, 33 bp, Homo sapien
cctcccaaaattttgagaactactgaaccagaa

SEQ ID NO: 419283 - DNA, 33 bp, Homo sapien
aagtgatttgttaactcaagtgcagagcttcat

SEQ ID NO: 419284 - DNA, 33 bp, Homo sapien
aagtgatttgttaactgaagtgcagagcttcat

SEQ ID NO: 419285 - DNA, 33 bp, Homo sapien
gcctcagcctccgaaaattctggaattacaggc

SEQ ID NO: 419286 - DNA, 33 bp, Homo sapien
gcctcagcctccgaaagttctggaattacaggc

SEQ ID NO: 419287 - DNA, 33 bp, Homo sapien
ttactatgtctaaaaacgaccagagcagagagc

SEQ ID NO: 419288 - DNA, 33 bp, Homo sapien
ttactatgtctaaaaatgaccagagcagagagc

SEQ ID NO: 419289 - DNA, 33 bp, Homo sapien
actgacaatatccttcaagctcctttgaaagca

SEQ ID NO: 419290 - DNA, 33 bp, Homo sapien
actgacaatatccttcgagctcctttgaaagca

SEQ ID NO: 419291 - DNA, 33 bp, Homo sapien
cgtttgtattttttcacatggctgcagcagctg

SEQ ID NO: 419292 - DNA, 33 bp, Homo sapien
cgtttgtattttttcatatggctgcagcagctg

SEQ ID NO: 419293 - DNA, 33 bp, Homo sapien
aggtacaaagtgtaccaagaaagcctcacagtg

SEQ ID NO: 419294 - DNA, 33 bp, Homo sapien
aggtacaaagtgtaccgagaaagcctcacagtg

SEQ ID NO: 419295 - DNA, 33 bp, Homo sapien
cctgtcacagctgttcaataacaggcgatggaa

SEQ ID NO: 419296 - DNA, 33 bp, Homo sapien
cctgtcacagctgttctataacaggcgatggaa

SEQ ID NO: 419297 - DNA, 33 bp, Homo sapien
gtcccatttatcactcacagtcctgaatttggt

SEQ ID NO: 419298 - DNA, 33 bp, Homo sapien
gtcccatttatcactctcagtcctgaatttggt

SEQ ID NO: 419299 - DNA, 33 bp, Homo sapien
tataggacatgccagcagacaaggtcttagtgt

SEQ ID NO: 419300 - DNA, 33 bp, Homo sapien
tataggacatgccagcggacaaggtcttagtgt

SEQ ID NO: 419301 - DNA, 33 bp, Homo sapien
ctctggcctggattgaaggaccctactgaaaca

SEQ ID NO: 419302 - DNA, 33 bp, Homo sapien
ctctggcctggattgagggaccctactgaaaca

SEQ ID NO: 419303 - DNA, 33 bp, Homo sapien
cccagcccacacccaacgttctcctcaatgaac

SEQ ID NO: 419304 - DNA, 33 bp, Homo sapien
cccagcccacacccaatgttctcctcaatgaac

SEQ ID NO: 419305 - DNA, 33 bp, Homo sapien
tccacacctccagtacaacccatgaatttatgt

SEQ ID NO: 419306 - DNA, 33 bp, Homo sapien
tccacacctccagtacgacccatgaatttatgt

SEQ ID NO: 419307 - DNA, 33 bp, Homo sapien
tatttgtcacacattacaattatttcagctact

SEQ ID NO: 419308 - DNA, 33 bp, Homo sapien
tatttgtcacacattagaattatttcagctact

SEQ ID NO: 419309 - DNA, 33 bp, Homo sapien
ccatttctccaagcacaataagatcagggatga

SEQ ID NO: 419310 - DNA, 33 bp, Homo sapien
ccatttctccaagcacgataagatcagggatga

SEQ ID NO: 419311 - DNA, 33 bp, Homo sapien
atgcaaaaaagcctccaaagcctcataaaaaca

SEQ ID NO: 419312 - DNA, 33 bp, Homo sapien
atgcaaaaaagcctccgaagcctcataaaaaca

SEQ ID NO: 419313 - DNA, 33 bp, Homo sapien
cagggggccattactgaagaaatgttggaactt

SEQ ID NO: 419314 - DNA, 33 bp, Homo sapien
cagggggccattactgcagaaatgttggaactt

SEQ ID NO: 419315 - DNA, 33 bp, Homo sapien
tctgaaagtacacaagcaaatgcaaagccattc

SEQ ID NO: 419316 - DNA, 33 bp, Homo sapien
tctgaaagtacacaaggaaatgcaaagccattc

SEQ ID NO: 419317 - DNA, 33 bp, Homo sapien
aagaatgacgtatacacggctcagtatgcatct

SEQ ID NO: 419318 - DNA, 33 bp, Homo sapien
aagaatgacgtatacatggctcagtatgcatct

SEQ ID NO: 419319 - DNA, 33 bp, Homo sapien
acaccaaatcggtttcaagttcactattttcat

SEQ ID NO: 419320 - DNA, 33 bp, Homo sapien
acaccaaatcggtttccagttcactattttcat

SEQ ID NO: 419321 - DNA, 33 bp, Homo sapien
tgtgatgtgcacagcaagtctactcgcttttca

SEQ ID NO: 419322 - DNA, 33 bp, Homo sapien
tgtgatgtgcacagcacgtctactcgcttttca

SEQ ID NO: 419323 - DNA, 33 bp, Homo sapien
cgtgtgctgcaggagaagagttccccgccgaaa

SEQ ID NO: 419324 - DNA, 33 bp, Homo sapien
cgtgtgctgcaggagaggagttccccgccgaaa

SEQ ID NO: 419325 - DNA, 33 bp, Homo sapien
acacaatctgccaaaactcacacgagaagaaat

SEQ ID NO: 419326 - DNA, 33 bp, Homo sapien
acacaatctgccaaaattcacacgagaagaaat

SEQ ID NO: 419327 - DNA, 33 bp, Homo sapien
cgctccacttgttctaatacttcacggttcacc

SEQ ID NO: 419328 - DNA, 33 bp, Homo sapien
cgctccacttgttctagtacttcacggttcacc

SEQ ID NO: 419329 - DNA, 33 bp, Homo sapien
ggcattatgctaatcactatggaaacctaaaaa

SEQ ID NO: 419330 - DNA, 33 bp, Homo sapien
ggcattatgctaatcattatggaaacctaaaaa

SEQ ID NO: 419331 - DNA, 33 bp, Homo sapien
aaaaagtatttccttacgtatctgcttggtaag

SEQ ID NO: 419332 - DNA, 33 bp, Homo sapien
aaaaagtatttccttatgtatctgcttggtaag

SEQ ID NO: 419333 - DNA, 33 bp, Homo sapien
cctgcaatcttccccaactcgataaatgttaac

SEQ ID NO: 419334 - DNA, 33 bp, Homo sapien
cctgcaatcttccccatctcgataaatgttaac

SEQ ID NO: 419335 - DNA, 33 bp, Homo sapien
agtgaggcaagttgggacacagtagtaggagtt

SEQ ID NO: 419336 - DNA, 33 bp, Homo sapien
agtgaggcaagttggggcacagtagtaggagtt

SEQ ID NO: 419337 - DNA, 33 bp, Homo sapien
ccgtgattccatttataagaagccttacaagca

SEQ ID NO: 419338 - DNA, 33 bp, Homo sapien
ccgtgattccatttatgagaagccttacaagca

SEQ ID NO: 419339 - DNA, 33 bp, Homo sapien
cagcaatgaacattcccgagccctccttggtac

SEQ ID NO: 419340 - DNA, 33 bp, Homo sapien
cagcaatgaacattcctgagccctccttggtac

SEQ ID NO: 419341 - DNA, 33 bp, Homo sapien
ctcaacctatggcacaatctactaactttggaa

SEQ ID NO: 419342 - DNA, 33 bp, Homo sapien
ctcaacctatggcacactctactaactttggaa

SEQ ID NO: 419343 - DNA, 33 bp, Homo sapien
aactcaaactagtacaccctaaatgtcttctca

SEQ ID NO: 419344 - DNA, 33 bp, Homo sapien
aactcaaactagtacatcctaaatgtcttctca

SEQ ID NO: 419345 - DNA, 33 bp, Homo sapien
tctggagattcaaagacaaaatcagttcttgcc

SEQ ID NO: 419346 - DNA, 33 bp, Homo sapien
tctggagattcaaagagaaaatcagttcttgcc

SEQ ID NO: 419347 - DNA, 33 bp, Homo sapien
tgcctcaaattcataacctaaatcaaatcatga

SEQ ID NO: 419348 - DNA, 33 bp, Homo sapien
tgcctcaaattcataatctaaatcaaatcatga

SEQ ID NO: 419349 - DNA, 33 bp, Homo sapien
caggatgaatttcaaacaagcattctacttgag

SEQ ID NO: 419350 - DNA, 33 bp, Homo sapien
caggatgaatttcaaataagcattctacttgag

SEQ ID NO: 419351 - DNA, 33 bp, Homo sapien
aggcaggtttcactgccactagcaagcaggtgg

SEQ ID NO: 419352 - DNA, 33 bp, Homo sapien
aggcaggtttcactgcgactagcaagcaggtgg

SEQ ID NO: 419353 - DNA, 33 bp, Homo sapien
gctgctgcttccgccactgaggctatgatgatt

SEQ ID NO: 419354 - DNA, 33 bp, Homo sapien
gctgctgcttccgccagtgaggctatgatgatt

SEQ ID NO: 419355 - DNA, 33 bp, Homo sapien
catttgcaatattggccgaaattttccacaact

SEQ ID NO: 419356 - DNA, 33 bp, Homo sapien
catttgcaatattggctgaaattttccacaact

SEQ ID NO: 419357 - DNA, 33 bp, Homo sapien
gacatttttaagctgaggcatgtgaagtcactg

SEQ ID NO: 419358 - DNA, 33 bp, Homo sapien
gacatttttaagctgatgcatgtgaagtcactg

SEQ ID NO: 419359 - DNA, 33 bp, Homo sapien
cacccatgcccactgaacatctctaaattcatg

SEQ ID NO: 419360 - DNA, 33 bp, Homo sapien
cacccatgcccactgagcatctctaaattcatg

SEQ ID NO: 419361 - DNA, 33 bp, Homo sapien
gcagaatttcctgtcaatctatcctaggatggt

SEQ ID NO: 419362 - DNA, 33 bp, Homo sapien
gcagaatttcctgtcagtctatcctaggatggt

SEQ ID NO: 419363 - DNA, 33 bp, Homo sapien
gatgagagtgctaatgcaggaattggaaaagat

SEQ ID NO: 419364 - DNA, 33 bp, Homo sapien
gatgagagtgctaatgtaggaattggaaaagat

SEQ ID NO: 419365 - DNA, 33 bp, Homo sapien
gtgggacaatactggcagagaattttagcatcc

SEQ ID NO: 419366 - DNA, 33 bp, Homo sapien
gtgggacaatactggcggagaattttagcatcc

SEQ ID NO: 419367 - DNA, 33 bp, Homo sapien
atggaagtcgggattcagaagatgaagagactt

SEQ ID NO: 419368 - DNA, 33 bp, Homo sapien
atggaagtcgggattcggaagatgaagagactt

SEQ ID NO: 419369 - DNA, 33 bp, Homo sapien
tgcggtaacgtttcccggcctggaagcaccacg

SEQ ID NO: 419370 - DNA, 33 bp, Homo sapien
tgcggtaacgtttccctgcctggaagcaccacg

SEQ ID NO: 419371 - DNA, 33 bp, Homo sapien
tgcacatccataatccaagctgttctggaggct

SEQ ID NO: 419372 - DNA, 33 bp, Homo sapien
tgcacatccataatcccagctgttctggaggct

SEQ ID NO: 419373 - DNA, 33 bp, Homo sapien; identical to SEQ ID NO: 419371

SEQ ID NO: 419374 - DNA, 33 bp, Homo sapien; identical to SEQ ID NO: 419372

SEQ ID NO: 419375 - DNA, 33 bp, Homo sapien
atgctttgtgtttatccattgtatcagtccatt

SEQ ID NO: 419376 - DNA, 33 bp, Homo sapien
atgctttgtgtttatctattgtatcagtccatt

SEQ ID NO: 419377 - DNA, 33 bp, Homo sapien
atgagcccctagtctccaacgcttctgcctccc

SEQ ID NO: 419378 - DNA, 33 bp, Homo sapien
atgagcccctagtctcgaacgcttctgcctccc

SEQ ID NO: 419379 - DNA, 33 bp, Homo sapien
aaggagagtagtcctacgcagagagtggcaggg

SEQ ID NO: 419380 - DNA, 33 bp, Homo sapien
aaggagagtagtcctatgcagagagtggcaggg

SEQ ID NO: 419381 - DNA, 33 bp, Homo sapien
gactacaagtttcagaaagagcatggccctgcc

SEQ ID NO: 419382 - DNA, 33 bp, Homo sapien
gactacaagtttcagagagagcatggccctgcc

SEQ ID NO: 419383 - DNA, 33 bp, Homo sapien
gactggagttgtgctgccacagggcaaggaatg

SEQ ID NO: 419384 - DNA, 33 bp, Homo sapien
gactggagttgtgctgtcacagggcaaggaatg

SEQ ID NO: 419385 - DNA, 33 bp, Homo sapien
ctccccacacacatagcccataaagtacatctt

SEQ ID NO: 419386 - DNA, 33 bp, Homo sapien
ctccccacacacatagtccataaagtacatctt

SEQ ID NO: 419387 - DNA, 33 bp, Homo sapien
agcaagctgagcaaagcaagtgcgagaaggaac

SEQ ID NO: 419388 - DNA, 33 bp, Homo sapien
agcaagctgagcaaagtaagtgcgagaaggaac

SEQ ID NO: 419389 - DNA, 33 bp, Homo sapien
gcaccaatgggcatacaagtacaaatcataatc

SEQ ID NO: 419390 - DNA, 33 bp, Homo sapien
gcaccaatgggcatacgagtacaaatcataatc

SEQ ID NO: 419391 - DNA, 33 bp, Homo sapien
ttactgaaaagagagaaagcagataataaaccc

SEQ ID NO: 419392 - DNA, 33 bp, Homo sapien
ttactgaaaagagagagagcagataataaaccc

SEQ ID NO: 419393 - DNA, 33 bp, Homo sapien
tatgcttctaaaaataggtgcatcaacagtgta

SEQ ID NO: 419394 - DNA, 33 bp, Homo sapien
tatgcttctaaaaatatgtgcatcaacagtgta

SEQ ID NO: 419395 - DNA, 33 bp, Homo sapien
gctgcaaggaagagggaacttgtcagcccaaag

SEQ ID NO: 419396 - DNA, 33 bp, Homo sapien
gctgcaaggaagaggggacttgtcagcccaaag

SEQ ID NO: 419397 - DNA, 33 bp, Homo sapien
actatctggggaggacaactaactgctggctcc

SEQ ID NO: 419398 - DNA, 33 bp, Homo sapien
actatctggggaggacgactaactgctggctcc

SEQ ID NO: 419399 - DNA, 33 bp, Homo sapien
accctgtgtatacagccctgacgcaatgaaaag

SEQ ID NO: 419400 - DNA, 33 bp, Homo sapien
accctgtgtatacagctctgacgcaatgaaaag

SEQ ID NO: 419401 - DNA, 33 bp, Homo sapien
ttactatagttaaaatcagtgactagggtttgc

SEQ ID NO: 419402 - DNA, 33 bp, Homo sapien
ttactatagttaaaattagtgactagggtttgc

SEQ ID NO: 419403 - DNA, 33 bp, Homo sapien
gtaggatctataaagcactcattgctaatcagt

SEQ ID NO: 419404 - DNA, 33 bp, Homo sapien
gtaggatctataaagctctcattgctaatcagt

SEQ ID NO: 419405 - DNA, 33 bp, Homo sapien
gcataaaatttatcaccggtttagatcagaaga

SEQ ID NO: 419406 - DNA, 33 bp, Homo sapien
gcataaaatttatcactggtttagatcagaaga

SEQ ID NO: 419407 - DNA, 33 bp, Homo sapien
taggatctcttctggccagtccactttgagtgt

SEQ ID NO: 419408 - DNA, 33 bp, Homo sapien
taggatctcttctggctagtccactttgagtgt

SEQ ID NO: 419409 - DNA, 33 bp, Homo sapien
tatgaaactaccaaagcaaggcctctagatttt

SEQ ID NO: 419410 - DNA, 33 bp, Homo sapien
tatgaaactaccaaaggaaggcctctagatttt

SEQ ID NO: 419411 - DNA, 33 bp, Homo sapien
caagagaaagccagaactacctggagcttgcta

SEQ ID NO: 419412 - DNA, 33 bp, Homo sapien
caagagaaagccagaagtacctggagcttgcta

SEQ ID NO: 419413 - DNA, 33 bp, Homo sapien
atttcctcctctcaagaaagattcggggtttct

SEQ ID NO: 419414 - DNA, 33 bp, Homo sapien
atttcctcctctcaagtaagattcggggtttct

SEQ ID NO: 419415 - DNA, 33 bp, Homo sapien
tatgtgcaaacgcttgcaaacaaggtgtgtgcg

SEQ ID NO: 419416 - DNA, 33 bp, Homo sapien
tatgtgcaaacgcttggaaacaaggtgtgtgcg

SEQ ID NO: 419417 - DNA, 33 bp, Homo sapien
caaaatgaaatgttccccaaacaatattcagaa

SEQ ID NO: 419418 - DNA, 33 bp, Homo sapien
caaaatgaaatgttccgcaaacaatattcagaa

SEQ ID NO: 419419 - DNA, 33 bp, Homo sapien
ctccctcctactcccagactgtgatcaactgta

SEQ ID NO: 419420 - DNA, 33 bp, Homo sapien
ctccctcctactcccatactgtgatcaactgta

SEQ ID NO: 419421 - DNA, 33 bp, Homo sapien
gccaggtacaacaccaagtaatttgtatgcatg

SEQ ID NO: 419422 - DNA, 33 bp, Homo sapien
gccaggtacaacaccaggtaatttgtatgcatg

SEQ ID NO: 419423 - DNA, 33 bp, Homo sapien
aagaataaatgagacccactatttgatagcaca

SEQ ID NO: 419424 - DNA, 33 bp, Homo sapien
aagaataaatgagacctactatttgatagcaca

SEQ ID NO: 419425 - DNA, 33 bp, Homo sapien
gggtattgtaaccccacattctgccagagattc

SEQ ID NO: 419426 - DNA, 33 bp, Homo sapien
gggtattgtaaccccatattctgccagagattc

SEQ ID NO: 419427 - DNA, 33 bp, Homo sapien
gtgacaaaatagcaaaattggaaaaattgtagt

SEQ ID NO: 419428 - DNA, 33 bp, Homo sapien
gtgacaaaatagcaaacttggaaaaattgtagt

SEQ ID NO: 419429 - DNA, 33 bp, Homo sapien
ctgctcactgcccagaataataaagtgtttcta

SEQ ID NO: 419430 - DNA, 33 bp, Homo sapien
ctgctcactgcccagagtaataaagtgtttcta

SEQ ID NO: 419431 - DNA, 33 bp, Homo sapien
agaatagacttcaacaaggagcctgtggtatga

SEQ ID NO: 419432 - DNA, 33 bp, Homo sapien
agaatagacttcaacagggagcctgtggtatga

SEQ ID NO: 419433 - DNA, 33 bp, Homo sapien
gtatccatgttgatgacatccttggcctcagat

SEQ ID NO: 419434 - DNA, 33 bp, Homo sapien
gtatccatgttgatgatatccttggcctcagat

SEQ ID NO: 419435 - DNA, 33 bp, Homo sapien
ggtggtcagttgaggcaagctgagtttggctgt

SEQ ID NO: 419436 - DNA, 33 bp, Homo sapien
ggtggtcagttgaggcgagctgagtttggctgt

SEQ ID NO: 419437 - DNA, 33 bp, Homo sapien
atttaactggctttgaaatatgtataagctagg

SEQ ID NO: 419438 - DNA, 33 bp, Homo sapien
atttaactggctttgagatatgtataagctagg

SEQ ID NO: 419439 - DNA, 33 bp, Homo sapien
tgttcagacagatgaagaaattttatacaaagc

SEQ ID NO: 419440 - DNA, 33 bp, Homo sapien
tgttcagacagatgaataaattttatacaaagc

SEQ ID NO: 419441 - DNA, 33 bp, Homo sapien
ttattaacatttcacgacattgtttctagctca

SEQ ID NO: 419442 - DNA, 33 bp, Homo sapien
ttattaacatttcacggcattgtttctagctca

SEQ ID NO: 419443 - DNA, 33 bp, Homo sapien
tcgttctaaatgtggaaatggaaactttgggga

SEQ ID NO: 419444 - DNA, 33 bp, Homo sapien
tcgttctaaatgtggagatggaaactttgggga

SEQ ID NO: 419445 - DNA, 33 bp, Homo sapien
gcatcctatagaaccaatctctccttttatccc

SEQ ID NO: 419446 - DNA, 33 bp, Homo sapien
gcatcctatagaaccagtctctccttttatccc

SEQ ID NO: 419447 - DNA, 33 bp, Homo sapien
atctaaattgcatgcaacattatctattaatag

SEQ ID NO: 419448 - DNA, 33 bp, Homo sapien
atctaaattgcatgcatcattatctattaatag

SEQ ID NO: 419449 - DNA, 33 bp, Homo sapien
atcgtttaagtttgagaatgttatttggatttc

SEQ ID NO: 419450 - DNA, 33 bp, Homo sapien
atcgtttaagtttgaggatgttatttggatttc

SEQ ID NO: 419451 - DNA, 33 bp, Homo sapien
attataaagtggcagcacattcaatatcagttg

SEQ ID NO: 419452 - DNA, 33 bp, Homo sapien
attataaagtggcagcgcattcaatatcagttg

SEQ ID NO: 419453 - DNA, 33 bp, Homo sapien
cttctttatcaaaagtaacttcatgagctcaga

SEQ ID NO: 419454 - DNA, 33 bp, Homo sapien
cttctttatcaaaagttacttcatgagctcaga

SEQ ID NO: 419455 - DNA, 33 bp, Homo sapien
cttctgatcaactataactagcttgtcctccaa

SEQ ID NO: 419456 - DNA, 33 bp, Homo sapien
cttctgatcaactatatctagcttgtcctccaa

SEQ ID NO: 419457 - DNA, 33 bp, Homo sapien
tctatgcctattcctgcaagattggctcgtcgt

SEQ ID NO: 419458 - DNA, 33 bp, Homo sapien
tctatgcctattcctgtaagattggctcgtcgt

SEQ ID NO: 419459 - DNA, 33 bp, Homo sapien
gaaaaataccatgtagaatcaagaaaaaattat

SEQ ID NO: 419460 - DNA, 33 bp, Homo sapien
gaaaaataccatgtaggatcaagaaaaaattat

SEQ ID NO: 419461 - DNA, 33 bp, Homo sapien
tatccaaatggtctaaacaaaacgagaactttt

SEQ ID NO: 419462 - DNA, 33 bp, Homo sapien
tatccaaatggtctaagcaaaacgagaactttt

SEQ ID NO: 419463 - DNA, 33 bp, Homo sapien
aaagttttcaggcataccaaaatatgaattgca

SEQ ID NO: 419464 - DNA, 33 bp, Homo sapien
aaagttttcaggcatagcaaaatatgaattgca

SEQ ID NO: 419465 - DNA, 33 bp, Homo sapien
catctggcaaatctaacagtgctagaatacgtc

SEQ ID NO: 419466 - DNA, 33 bp, Homo sapien
catctggcaaatctaatagtgctagaatacgtc

SEQ ID NO: 419467 - DNA, 33 bp, Homo sapien
tggcaataaattttaccatttctctggctctca

SEQ ID NO: 419468 - DNA, 33 bp, Homo sapien
tggcaataaattttactatttctctggctctca

SEQ ID NO: 419469 - DNA, 33 bp, Homo sapien
aaagccctgtgtcgtgaagctgtcagacgttca

SEQ ID NO: 419470 - DNA, 33 bp, Homo sapien
aaagccctgtgtcgtgcagctgtcagacgttca

SEQ ID NO: 419471 - DNA, 33 bp, Homo sapien
aataccacttgcttcaagagttaccacttataa

SEQ ID NO: 419472 - DNA, 33 bp, Homo sapien
aataccacttgcttcaggagttaccacttataa

SEQ ID NO: 419473 - DNA, 33 bp, Homo sapien
acttctgttgggtatacagctaagtgtggaaat

SEQ ID NO: 419474 - DNA, 33 bp, Homo sapien
acttctgttgggtatatagctaagtgtggaaat

SEQ ID NO: 419475 - DNA, 33 bp, Homo sapien
gaatttggcacaattaactgacccactatgtgc

SEQ ID NO: 419476 - DNA, 33 bp, Homo sapien
gaatttggcacaattagctgacccactatgtgc

SEQ ID NO: 419477 - DNA, 33 bp, Homo sapien
tgcatacagcgcacacaatgttcaccaaaagac

SEQ ID NO: 419478 - DNA, 33 bp, Homo sapien
tgcatacagcgcacacgatgttcaccaaaagac

SEQ ID NO: 419479 - DNA, 33 bp, Homo sapien
aggtttttgaccaggagctgtactcccctcagt

SEQ ID NO: 419480 - DNA, 33 bp, Homo sapien
aggtttttgaccaggatctgtactcccctcagt

SEQ ID NO: 419481 - DNA, 33 bp, Homo sapien
ggccatcatgtcagaaaaggaagtgtgaattct

SEQ ID NO: 419482 - DNA, 33 bp, Homo sapien
ggccatcatgtcagaagaggaagtgtgaattct

SEQ ID NO: 419483 - DNA, 33 bp, Homo sapien
gattctaaagtgtagccgatttgagaactactg

SEQ ID NO: 419484 - DNA, 33 bp, Homo sapien
gattctaaagtgtagctgatttgagaactactg

SEQ ID NO: 419485 - DNA, 33 bp, Homo sapien
ggaattctttctataaatggcttgcttttctga

SEQ ID NO: 419486 - DNA, 33 bp, Homo sapien
ggaattctttctataagtggcttgcttttctga

SEQ ID NO: 419487 - DNA, 33 bp, Homo sapien
tgtaaacaagcagaaacgatttggatttttttt

SEQ ID NO: 419488 - DNA, 33 bp, Homo sapien
tgtaaacaagcagaaatgatttggatttttttt

SEQ ID NO: 419489 - DNA, 33 bp, Homo sapien
ttcacttgtgccttatcaattgcatttgttcac

SEQ ID NO: 419490 - DNA, 33 bp, Homo sapien
ttcacttgtgccttattaattgcatttgttcac

SEQ ID NO: 419491 - DNA, 33 bp, Homo sapien
ctcaagtctccaaatacgctgccagaaatttta

SEQ ID NO: 419492 - DNA, 33 bp, Homo sapien
ctcaagtctccaaatatgctgccagaaatttta

SEQ ID NO: 419493 - DNA, 33 bp, Homo sapien
agggtctctcatgactaagatcagtgtgtccat

SEQ ID NO: 419494 - DNA, 33 bp, Homo sapien
agggtctctcatgactgagatcagtgtgtccat

SEQ ID NO: 419495 - DNA, 33 bp, Homo sapien
tttcacgaatctaaccacagtaacaacatggaa

SEQ ID NO: 419496 - DNA, 33 bp, Homo sapien
tttcacgaatctaaccccagtaacaacatggaa

SEQ ID NO: 419497 - DNA, 33 bp, Homo sapien
ttcttcctcaactatcgcatccctaatcttcaa

SEQ ID NO: 419498 - DNA, 33 bp, Homo sapien
ttcttcctcaactatctcatccctaatcttcaa

SEQ ID NO: 419499 - DNA, 33 bp, Homo sapien
ttccaagaagacttagacactccatcctaatat

SEQ ID NO: 419500 - DNA, 33 bp, Homo sapien
ttccaagaagacttaggcactccatcctaatat

SEQ ID NO: 419501 - DNA, 33 bp, Homo sapien
gacacatcctagaatacggatgaacgttgaaga

SEQ ID NO: 419502 - DNA, 33 bp, Homo sapien
gacacatcctagaatatggatgaacgttgaaga

SEQ ID NO: 419503 - DNA, 33 bp, Homo sapien
cctcaggtcctcgtcacattctgaaagtgtgtc

SEQ ID NO: 419504 - DNA, 33 bp, Homo sapien
cctcaggtcctcgtcatattctgaaagtgtgtc

SEQ ID NO: 419505 - DNA, 33 bp, Homo sapien
gagagactgagaattacaataaagttttatgac

SEQ ID NO: 419506 - DNA, 33 bp, Homo sapien
gagagactgagaattagaataaagttttatgac

SEQ ID NO: 419507 - DNA, 33 bp, Homo sapien
tcatactttctgtttacgaatagttttaccctc

SEQ ID NO: 419508 - DNA, 33 bp, Homo sapien
tcatactttctgtttatgaatagttttaccctc

SEQ ID NO: 419509 - DNA, 33 bp, Homo sapien
cagctgttgatactgacaaactgttgatggtct

SEQ ID NO: 419510 - DNA, 33 bp, Homo sapien
cagctgttgatactgagaaactgttgatggtct

SEQ ID NO: 419511 - DNA, 33 bp, Homo sapien
ctgggattgaaaaatacagaacagtcatccaag

SEQ ID NO: 419512 - DNA, 33 bp, Homo sapien
ctgggattgaaaaatatagaacagtcatccaag

SEQ ID NO: 419513 - DNA, 33 bp, Homo sapien
gttggtcaagcgcagaagaggagttcaggaaaa

SEQ ID NO: 419514 - DNA, 33 bp, Homo sapien
gttggtcaagcgcagaggaggagttcaggaaaa

SEQ ID NO: 419515 - DNA, 33 bp, Homo sapien
ccacttactagctacacggcttttgacaagtca

SEQ ID NO: 419516 - DNA, 33 bp, Homo sapien
ccacttactagctacatggcttttgacaagtca

SEQ ID NO: 419517 - DNA, 33 bp, Homo sapien
cagtatttcacagtacaatatgttgagaaactt

SEQ ID NO: 419518 - DNA, 33 bp, Homo sapien
cagtatttcacagtacgatatgttgagaaactt

SEQ ID NO: 419519 - DNA, 33 bp, Homo sapien
gtgaactttgaacctgaaagagatgatttagag

SEQ ID NO: 419520 - DNA, 33 bp, Homo sapien
gtgaactttgaacctgcaagagatgatttagag

SEQ ID NO: 419521 - DNA, 33 bp, Homo sapien
gcaagatgaaaagctacggactgataaaaaaat

SEQ ID NO: 419522 - DNA, 33 bp, Homo sapien
gcaagatgaaaagctatggactgataaaaaaat

SEQ ID NO: 419523 - DNA, 33 bp, Homo sapien
tatcacaaaaagcttaacctaaactagataccc

SEQ ID NO: 419524 - DNA, 33 bp, Homo sapien
tatcacaaaaagcttatcctaaactagataccc

SEQ ID NO: 419525 - DNA, 33 bp, Homo sapien
ctgtttcctacaagccacagtgttatgcttgta

SEQ ID NO: 419526 - DNA, 33 bp, Homo sapien
ctgtttcctacaagccgcagtgttatgcttgta

SEQ ID NO: 419527 - DNA, 33 bp, Homo sapien
gcccagagtgactaaaaaatttgcagttccatg

SEQ ID NO: 419528 - DNA, 33 bp, Homo sapien
gcccagagtgactaaataatttgcagttccatg

SEQ ID NO: 419529 - DNA, 33 bp, Homo sapien
gaaaatgagtgtgttacgaaggatgaataaatc

SEQ ID NO: 419530 - DNA, 33 bp, Homo sapien
gaaaatgagtgtgttatgaaggatgaataaatc

SEQ ID NO: 419531 - DNA, 33 bp, Homo sapien
agctcattgaagataaatgcaaagtatacagag

SEQ ID NO: 419532 - DNA, 33 bp, Homo sapien
agctcattgaagataactgcaaagtatacagag

SEQ ID NO: 419533 - DNA, 33 bp, Homo sapien
tccagcaccgctttacaattaaaattctcagca

SEQ ID NO: 419534 - DNA, 33 bp, Homo sapien
tccagcaccgctttacgattaaaattctcagca

SEQ ID NO: 419535 - DNA, 33 bp, Homo sapien; identical to SEQ ID NO: 419533

SEQ ID NO: 419536 - DNA, 33 bp, Homo sapien; identical to SEQ ID NO: 419534

SEQ ID NO: 419537 - DNA, 33 bp, Homo sapien
actactagttatccacgggtggctgcttacaga

SEQ ID NO: 419538 - DNA, 33 bp, Homo sapien
actactagttatccactggtggctgcttacaga

SEQ ID NO: 419539 - DNA, 33 bp, Homo sapien
tatttcatgagaagtacgctgtttataagaaca

SEQ ID NO: 419540 - DNA, 33 bp, Homo sapien
tatttcatgagaagtatgctgtttataagaaca

SEQ ID NO: 419541 - DNA, 33 bp, Homo sapien
cacatggtgttttccaatcctcatcatacatca

SEQ ID NO: 419542 - DNA, 33 bp, Homo sapien
cacatggtgttttccagtcctcatcatacatca

SEQ ID NO: 419543 - DNA, 33 bp, Homo sapien
tagctactaggtcagacgaatttgcttaaaagt

SEQ ID NO: 419544 - DNA, 33 bp, Homo sapien
tagctactaggtcagaggaatttgcttaaaagt

SEQ ID NO: 419545 - DNA, 33 bp, Homo sapien
tagttgcattgttaggccattaatttaagagct

SEQ ID NO: 419546 - DNA, 33 bp, Homo sapien
tagttgcattgttaggtcattaatttaagagct

SEQ ID NO: 419547 - DNA, 33 bp, Homo sapien
ttgctctacatcctcacggacatttagaattgt

SEQ ID NO: 419548 - DNA, 33 bp, Homo sapien
ttgctctacatcctcatggacatttagaattgt

SEQ ID NO: 419549 - DNA, 33 bp, Homo sapien
ctactgccaatattcaataaaggctcaagggct

SEQ ID NO: 419550 - DNA, 33 bp, Homo sapien
ctactgccaatattcactaaaggctcaagggct

SEQ ID NO: 419551 - DNA, 33 bp, Homo sapien
gggagaaacatggtaacctaagaaaatggcatg

SEQ ID NO: 419552 - DNA, 33 bp, Homo sapien
gggagaaacatggtaatctaagaaaatggcatg

SEQ ID NO: 419553 - DNA, 33 bp, Homo sapien
caacctcacctggaaactgaagaaattttagtg

SEQ ID NO: 419554 - DNA, 33 bp, Homo sapien
caacctcacctggaaattgaagaaattttagtg

SEQ ID NO: 419555 - DNA, 33 bp, Homo sapien
tgctggaaataactccaaataggaagcacgttc

SEQ ID NO: 419556 - DNA, 33 bp, Homo sapien
tgctggaaataactccgaataggaagcacgttc

SEQ ID NO: 419557 - DNA, 33 bp, Homo sapien
gaggcatagaattaaacagttggttaggagcaa

SEQ ID NO: 419558 - DNA, 33 bp, Homo sapien
gaggcatagaattaaatagttggttaggagcaa

SEQ ID NO: 419559 - DNA, 33 bp, Homo sapien
cacttccatcagcctaaatcttgaaaactgaag

SEQ ID NO: 419560 - DNA, 33 bp, Homo sapien
cacttccatcagcctagatcttgaaaactgaag

SEQ ID NO: 419561 - DNA, 33 bp, Homo sapien
agaggtcctgaatttaaaaaccttcatgctcct

SEQ ID NO: 419562 - DNA, 33 bp, Homo sapien
agaggtcctgaatttacaaaccttcatgctcct

SEQ ID NO: 419563 - DNA, 33 bp, Homo sapien
ctgtcaaagtggttcaaactgaatactttaaat

SEQ ID NO: 419564 - DNA, 33 bp, Homo sapien
ctgtcaaagtggttcagactgaatactttaaat

SEQ ID NO: 419565 - DNA, 33 bp, Homo sapien
agaaacaatggaagtccaaacctgtaaaataat

SEQ ID NO: 419566 - DNA, 33 bp, Homo sapien
agaaacaatggaagtctaaacctgtaaaataat

SEQ ID NO: 419567 - DNA, 33 bp, Homo sapien
tttaggcagacaaaaccaagaagccgatcacat

SEQ ID NO: 419568 - DNA, 33 bp, Homo sapien
tttaggcagacaaaactaagaagccgatcacat

SEQ ID NO: 419569 - DNA, 33 bp, Homo sapien
aaggctcaaggttaataaatcgacagcctgctt

SEQ ID NO: 419570 - DNA, 33 bp, Homo sapien
aaggctcaaggttaattaatcgacagcctgctt

SEQ ID NO: 419571 - DNA, 33 bp, Homo sapien
tgggcctcacttaagcaattctacttcacttat

SEQ ID NO: 419572 - DNA, 33 bp, Homo sapien
tgggcctcacttaagcgattctacttcacttat

SEQ ID NO: 419573 - DNA, 33 bp, Homo sapien
gggcctactgcatacccgaactttttcctggcc

SEQ ID NO: 419574 - DNA, 33 bp, Homo sapien
gggcctactgcatacctgaactttttcctggcc

SEQ ID NO: 419575 - DNA, 33 bp, Homo sapien
atttgaaaatgggagacaagtagaagccagtag

SEQ ID NO: 419576 - DNA, 33 bp, Homo sapien
atttgaaaatgggagagaagtagaagccagtag

SEQ ID NO: 419577 - DNA, 33 bp, Homo sapien
cagataaggtacaattgaattgggtcagagatg

SEQ ID NO: 419578 - DNA, 33 bp, Homo sapien
cagataaggtacaatttaattgggtcagagatg

SEQ ID NO: 419579 - DNA, 33 bp, Homo sapien
ctgcaagaagactttcaccagaccaaataccag

SEQ ID NO: 419580 - DNA, 33 bp, Homo sapien
ctgcaagaagactttcgccagaccaaataccag

SEQ ID NO: 419581 - DNA, 33 bp, Homo sapien
tatttctaaataattcaaacttttgctttctgc

SEQ ID NO: 419582 - DNA, 33 bp, Homo sapien
tatttctaaataattctaacttttgctttctgc

SEQ ID NO: 419583 - DNA, 33 bp, Homo sapien
atgagctaagctttaagacagagttgggttcat

SEQ ID NO: 419584 - DNA, 33 bp, Homo sapien
atgagctaagctttaatacagagttgggttcat

SEQ ID NO: 419585 - DNA, 33 bp, Homo sapien
tcttcccatcaaaaaaactcacgtcttccttct

SEQ ID NO: 419586 - DNA, 33 bp, Homo sapien
tcttcccatcaaaaaacctcacgtcttccttct

SEQ ID NO: 419587 - DNA, 33 bp, Homo sapien
cagaagaaacaacaccaaacagtggctaaaagc

SEQ ID NO: 419588 - DNA, 33 bp, Homo sapien
cagaagaaacaacaccgaacagtggctaaaagc

SEQ ID NO: 419589 - DNA, 33 bp, Homo sapien
catgaccttatatgaaactaacaacatcatgta

SEQ ID NO: 419590 - DNA, 33 bp, Homo sapien
catgaccttatatgaacctaacaacatcatgta

SEQ ID NO: 419591 - DNA, 33 bp, Homo sapien
gtagagctacaagaagaaaaaatgagcataagt

SEQ ID NO: 419592 - DNA, 33 bp, Homo sapien
gtagagctacaagaagcaaaaatgagcataagt

SEQ ID NO: 419593 - DNA, 33 bp, Homo sapien
atggatattttaaatcaagcacatgaattatat

SEQ ID NO: 419594 - DNA, 33 bp, Homo sapien
atggatattttaaatccagcacatgaattatat

SEQ ID NO: 419595 - DNA, 33 bp, Homo sapien
gatacacagattgtcactaggttatcttctgta

SEQ ID NO: 419596 - DNA, 33 bp, Homo sapien
gatacacagattgtcattaggttatcttctgta

SEQ ID NO: 419597 - DNA, 33 bp, Homo sapien
ccaaagacagacaataactgtatagaaaaacat

SEQ ID NO: 419598 - DNA, 33 bp, Homo sapien
ccaaagacagacaatatctgtatagaaaaacat

SEQ ID NO: 419599 - DNA, 33 bp, Homo sapien
tagaattttaaaaagcactcagttttgttactg

SEQ ID NO: 419600 - DNA, 33 bp, Homo sapien
tagaattttaaaaagctctcagttttgttactg

SEQ ID NO: 419601 - DNA, 33 bp, Homo sapien
gattcatgattgcaataaactctaaacaaacat

SEQ ID NO: 419602 - DNA, 33 bp, Homo sapien
gattcatgattgcaatgaactctaaacaaacat

SEQ ID NO: 419603 - DNA, 33 bp, Homo sapien
aaatctttccttcttcaaaattcctgtagcact

SEQ ID NO: 419604 - DNA, 33 bp, Homo sapien
aaatctttccttcttcgaaattcctgtagcact

SEQ ID NO: 419605 - DNA, 33 bp, Homo sapien
catgcccagtgacgagcaggttatctaaacaac

SEQ ID NO: 419606 - DNA, 33 bp, Homo sapien
catgcccagtgacgagtaggttatctaaacaac

SEQ ID NO: 419607 - DNA, 33 bp, Homo sapien
tccttttaacaagggcagattggaaacatagtg

SEQ ID NO: 419608 - DNA, 33 bp, Homo sapien
tccttttaacaagggccgattggaaacatagtg

SEQ ID NO: 419609 - DNA, 33 bp, Homo sapien
ctaaatatgaagtgcaatcttccagtggatgtc

SEQ ID NO: 419610 - DNA, 33 bp, Homo sapien
ctaaatatgaagtgcagtcttccagtggatgtc

SEQ ID NO: 419611 - DNA, 33 bp, Homo sapien
tgcttaaggtttaccacaaattttgtagtgaaa

SEQ ID NO: 419612 - DNA, 33 bp, Homo sapien
tgcttaaggtttaccataaattttgtagtgaaa

SEQ ID NO: 419613 - DNA, 33 bp, Homo sapien
ccagaattgcatatgtaaaatggatttgctatg

SEQ ID NO: 419614 - DNA, 33 bp, Homo sapien
ccagaattgcatatgtgaaatggatttgctatg

SEQ ID NO: 419615 - DNA, 33 bp, Homo sapien
ccagaagcaccttctcaaccacagaattttcat

SEQ ID NO: 419616 - DNA, 33 bp, Homo sapien
ccagaagcaccttctctaccacagaattttcat

SEQ ID NO: 419617 - DNA, 33 bp, Homo sapien
gaaaactgagcaaaagacaatactatataaaat

SEQ ID NO: 419618 - DNA, 33 bp, Homo sapien
gaaaactgagcaaaaggcaatactatataaaat

SEQ ID NO: 419619 - DNA, 33 bp, Homo sapien
aatttcacatcgataaccattaatttcagttat

SEQ ID NO: 419620 - DNA, 33 bp, Homo sapien
aatttcacatcgataagcattaatttcagttat

SEQ ID NO: 419621 - DNA, 33 bp, Homo sapien
agtgtaggctttcccaaaagtatcagaccacag

SEQ ID NO: 419622 - DNA, 33 bp, Homo sapien
agtgtaggctttcccataagtatcagaccacag

SEQ ID NO: 419623 - DNA, 33 bp, Homo sapien
gtatgtaaagctctcacctactcagaatttact

SEQ ID NO: 419624 - DNA, 33 bp, Homo sapien
gtatgtaaagctctcagctactcagaatttact

SEQ ID NO: 419625 - DNA, 33 bp, Homo sapien
agaggggagagattaacgtactcacaatatatt

SEQ ID NO: 419626 - DNA, 33 bp, Homo sapien
agaggggagagattaatgtactcacaatatatt

SEQ ID NO: 419627 - DNA, 33 bp, Homo sapien
attacccgagatcatacgaataaacattggaga

SEQ ID NO: 419628 - DNA, 33 bp, Homo sapien
attacccgagatcataggaataaacattggaga

SEQ ID NO: 419629 - DNA, 33 bp, Homo sapien
tcatcacactaccaaaactcactgataatatgc

SEQ ID NO: 419630 - DNA, 33 bp, Homo sapien
tcatcacactaccaaagctcactgataatatgc

SEQ ID NO: 419631 - DNA, 33 bp, Homo sapien
atgggcaatctggccaagaaaataataataaag

SEQ ID NO: 419632 - DNA, 33 bp, Homo sapien
atgggcaatctggccaggaaaataataataaag

SEQ ID NO: 419633 - DNA, 33 bp, Homo sapien
cactatctccagggaaagaaaggctctgccatt

SEQ ID NO: 419634 - DNA, 33 bp, Homo sapien
cactatctccagggaaggaaaggctctgccatt

SEQ ID NO: 419635 - DNA, 33 bp, Homo sapien
aaataaagtctttcccagacaagtaaacaccaa

SEQ ID NO: 419636 - DNA, 33 bp, Homo sapien
aaataaagtctttcccggacaagtaaacaccaa

SEQ ID NO: 419637 - DNA, 33 bp, Homo sapien
cacagccacactgaaaacaagaaccaaaggaca

SEQ ID NO: 419638 - DNA, 33 bp, Homo sapien
cacagccacactgaaaccaagaaccaaaggaca

SEQ ID NO: 419639 - DNA, 33 bp, Homo sapien
cctggcctgtaaatcaccttttatggttcgaag

SEQ ID NO: 419640 - DNA, 33 bp, Homo sapien
cctggcctgtaaatcatcttttatggttcgaag

SEQ ID NO: 419641 - DNA, 33 bp, Homo sapien
ttagagagggcagtatcaggtccttttagtcta

SEQ ID NO: 419642 - DNA, 33 bp, Homo sapien
ttagagagggcagtattaggtccttttagtcta

SEQ ID NO: 419643 - DNA, 33 bp, Homo sapien
ggaatcctagtcacgggagagcccctcagcact

SEQ ID NO: 419644 - DNA, 33 bp, Homo sapien
ggaatcctagtcacggtagagcccctcagcact

SEQ ID NO: 419645 - DNA, 33 bp, Homo sapien
tgcagttatgccaagacagaaagactgagttgt

SEQ ID NO: 419646 - DNA, 33 bp, Homo sapien
tgcagttatgccaagagagaaagactgagttgt

SEQ ID NO: 419647 - DNA, 33 bp, Homo sapien
catatcactttcactacgctatgctgccaacga

SEQ ID NO: 419648 - DNA, 33 bp, Homo sapien
catatcactttcactatgctatgctgccaacga

SEQ ID NO: 419649 - DNA, 33 bp, Homo sapien
ctcaagattgtgagcaaaactatttaaatatct

SEQ ID NO: 419650 - DNA, 33 bp, Homo sapien
ctcaagattgtgagcacaactatttaaatatct

SEQ ID NO: 419651 - DNA, 33 bp, Homo sapien
gaaggttgcccagtaaacacatgaccaggtgct

SEQ ID NO: 419652 - DNA, 33 bp, Homo sapien
gaaggttgcccagtaagcacatgaccaggtgct

SEQ ID NO: 419653 - DNA, 33 bp, Homo sapien
ctaataacaccctaaaacatcaaaccctctctt

SEQ ID NO: 419654 - DNA, 33 bp, Homo sapien
ctaataacaccctaaagcatcaaaccctctctt

SEQ ID NO: 419655 - DNA, 33 bp, Homo sapien
aggatcttgactaataacaatggcaatatactt

SEQ ID NO: 419656 - DNA, 33 bp, Homo sapien
aggatcttgactaataccaatggcaatatactt

SEQ ID NO: 419657 - DNA, 33 bp, Homo sapien
ctgtatgaatttcccaacaaaatgttactgtcc

SEQ ID NO: 419658 - DNA, 33 bp, Homo sapien
ctgtatgaatttcccatcaaaatgttactgtcc

SEQ ID NO: 419659 - DNA, 33 bp, Homo sapien
ctctgaagtgaatcagaaggtgctttagtatta

SEQ ID NO: 419660 - DNA, 33 bp, Homo sapien
ctctgaagtgaatcaggaggtgctttagtatta

SEQ ID NO: 419661 - DNA, 33 bp, Homo sapien
tataattttagactgacatttgtattctattct

SEQ ID NO: 419662 - DNA, 33 bp, Homo sapien
tataattttagactgagatttgtattctattct

SEQ ID NO: 419663 - DNA, 33 bp, Homo sapien
aatatacaattcaaacactatacatgtattata

SEQ ID NO: 419664 - DNA, 33 bp, Homo sapien
aatatacaattcaaaccctatacatgtattata

SEQ ID NO: 419665 - DNA, 33 bp, Homo sapien
ttaaccaatcagcatgacatagtgactaaatca

SEQ ID NO: 419666 - DNA, 33 bp, Homo sapien
ttaaccaatcagcatgtcatagtgactaaatca

SEQ ID NO: 419667 - DNA, 33 bp, Homo sapien
aaagctataacaaaagcctcctaatgagttagg

SEQ ID NO: 419668 - DNA, 33 bp, Homo sapien
aaagctataacaaaaggctcctaatgagttagg

SEQ ID NO: 419669 - DNA, 33 bp, Homo sapien
taaaatttcctccccaatattgtaggcctaaag

SEQ ID NO: 419670 - DNA, 33 bp, Homo sapien
taaaatttcctccccagtattgtaggcctaaag

SEQ ID NO: 419671 - DNA, 33 bp, Homo sapien
agtagtagagaaaataaaaaaggcttgactttc

SEQ ID NO: 419672 - DNA, 33 bp, Homo sapien
agtagtagagaaaatagaaaaggcttgactttc

SEQ ID NO: 419673 - DNA, 33 bp, Homo sapien
ggaggagaagaagtatgaagtgcttgcttggac

SEQ ID NO: 419674 - DNA, 33 bp, Homo sapien
ggaggagaagaagtattaagtgcttgcttggac

SEQ ID NO: 419675 - DNA, 33 bp, Homo sapien
atgcaaggtctttataaacttggttacagaaaa

SEQ ID NO: 419676 - DNA, 33 bp, Homo sapien
atgcaaggtctttatatacttggttacagaaaa

SEQ ID NO: 419677 - DNA, 33 bp, Homo sapien
aaaagagttctttctgaattcgtaaggatttaa

SEQ ID NO: 419678 - DNA, 33 bp, Homo sapien
aaaagagttctttctgcattcgtaaggatttaa

SEQ ID NO: 419679 - DNA, 33 bp, Homo sapien
actgaccataggaatgaacatgattgtgtttca

SEQ ID NO: 419680 - DNA, 33 bp, Homo sapien
actgaccataggaatggacatgattgtgtttca

SEQ ID NO: 419681 - DNA, 33 bp, Homo sapien
caagcaattacagtacaatgtgataacacatgc

SEQ ID NO: 419682 - DNA, 33 bp, Homo sapien
caagcaattacagtaccatgtgataacacatgc

SEQ ID NO: 419683 - DNA, 33 bp, Homo sapien
tgtaaacccaacgttaaaatgcaatatgaaatt

SEQ ID NO: 419684 - DNA, 33 bp, Homo sapien
tgtaaacccaacgttagaatgcaatatgaaatt

SEQ ID NO: 419685 - DNA, 33 bp, Homo sapien
gccatccactgggcagaactcaacataaccacc

SEQ ID NO: 419686 - DNA, 33 bp, Homo sapien
gccatccactgggcaggactcaacataaccacc

SEQ ID NO: 419687 - DNA, 33 bp, Homo sapien
gtgcagggaggactaacagcaatgcagaatcaa

SEQ ID NO: 419688 - DNA, 33 bp, Homo sapien
gtgcagggaggactaatagcaatgcagaatcaa

SEQ ID NO: 419689 - DNA, 33 bp, Homo sapien
atcattcaagttaaccagaaattatgatatatg

SEQ ID NO: 419690 - DNA, 33 bp, Homo sapien
atcattcaagttaaccggaaattatgatatatg

SEQ ID NO: 419691 - DNA, 33 bp, Homo sapien
tgttcttgagtagatgaaaagaagaactgtaga

SEQ ID NO: 419692 - DNA, 33 bp, Homo sapien
tgttcttgagtagatgcaaagaagaactgtaga

SEQ ID NO: 419693 - DNA, 33 bp, Homo sapien
ctaagtgaaaagtgataagggacctgaaagcca

SEQ ID NO: 419694 - DNA, 33 bp, Homo sapien
ctaagtgaaaagtgatgagggacctgaaagcca

SEQ ID NO: 419695 - DNA, 33 bp, Homo sapien
cacagataaacagatacacaaatagtggtatgt

SEQ ID NO: 419696 - DNA, 33 bp, Homo sapien
cacagataaacagatatacaaatagtggtatgt

SEQ ID NO: 419697 - DNA, 33 bp, Homo sapien
taaataaagagacaacaaaaacaaataattaga

SEQ ID NO: 419698 - DNA, 33 bp, Homo sapien
taaataaagagacaacgaaaacaaataattaga

SEQ ID NO: 419699 - DNA, 33 bp, Homo sapien
ggaagggtgtttcagacaacctaatggaagatt

SEQ ID NO: 419700 - DNA, 33 bp, Homo sapien
ggaagggtgtttcagataacctaatggaagatt

SEQ ID NO: 419701 - DNA, 33 bp, Homo sapien
taagcaaactaatagcaaggcagtagaagatct

SEQ ID NO: 419702 - DNA, 33 bp, Homo sapien
taagcaaactaatagcgaggcagtagaagatct

SEQ ID NO: 419703 - DNA, 33 bp, Homo sapien
ccaacaatagcataaaaattttcctaagtacta

SEQ ID NO: 419704 - DNA, 33 bp, Homo sapien
ccaacaatagcataaacattttcctaagtacta

SEQ ID NO: 419705 - DNA, 33 bp, Homo sapien
tgaagaaaaggacaacaggtaagaagagaagac

SEQ ID NO: 419706 - DNA, 33 bp, Homo sapien
tgaagaaaaggacaacgggtaagaagagaagac

SEQ ID NO: 419707 - DNA, 33 bp, Homo sapien
gctgtcctgtaatcaacacttttcacacagatg

SEQ ID NO: 419708 - DNA, 33 bp, Homo sapien
gctgtcctgtaatcaagacttttcacacagatg

SEQ ID NO: 419709 - DNA, 33 bp, Homo sapien
agttagttggtgaataaagggctactggggtgt

SEQ ID NO: 419710 - DNA, 33 bp, Homo sapien
agttagttggtgaatagagggctactggggtgt

SEQ ID NO: 419711 - DNA, 33 bp, Homo sapien
tcccagtgctttgaaaagaactcttatttatcc

SEQ ID NO: 419712 - DNA, 33 bp, Homo sapien
tcccagtgctttgaaaggaactcttatttatcc

SEQ ID NO: 419713 - DNA, 33 bp, Homo sapien
tttttgtttcagccaacgcctgaggatggagtc

SEQ ID NO: 419714 - DNA, 33 bp, Homo sapien
tttttgtttcagccaatgcctgaggatggagtc

SEQ ID NO: 419715 - DNA, 33 bp, Homo sapien
actcatcttccatttacatagaagtgaccgagc

SEQ ID NO: 419716 - DNA, 33 bp, Homo sapien
actcatcttccatttatatagaagtgaccgagc

SEQ ID NO: 419717 - DNA, 33 bp, Homo sapien
atgaaaaagaacacgaagttccactgcattttg

SEQ ID NO: 419718 - DNA, 33 bp, Homo sapien
atgaaaaagaacacgaggttccactgcattttg

SEQ ID NO: 419719 - DNA, 33 bp, Homo sapien
aatcaaaggattcacacaagttcacataattga

SEQ ID NO: 419720 - DNA, 33 bp, Homo sapien
aatcaaaggattcacataagttcacataattga

SEQ ID NO: 419721 - DNA, 33 bp, Homo sapien
tatgtacgttgccttacgaatttctcaaaacaa

SEQ ID NO: 419722 - DNA, 33 bp, Homo sapien
tatgtacgttgccttatgaatttctcaaaacaa

SEQ ID NO: 419723 - DNA, 33 bp, Homo sapien
ctcgttacagggatataaattgaactcaaagta

SEQ ID NO: 419724 - DNA, 33 bp, Homo sapien
ctcgttacagggatatgaattgaactcaaagta

SEQ ID NO: 419725 - DNA, 33 bp, Homo sapien
gcaaacgaagcatgccgagaagtggtgtagtaa

SEQ ID NO: 419726 - DNA, 33 bp, Homo sapien
gcaaacgaagcatgcctagaagtggtgtagtaa

SEQ ID NO: 419727 - DNA, 33 bp, Homo sapien
gatatttaggaaattacggccttggtattccca

SEQ ID NO: 419728 - DNA, 33 bp, Homo sapien
gatatttaggaaattatggccttggtattccca

SEQ ID NO: 419729 - DNA, 33 bp, Homo sapien
atttaatttattgtgcagaaattaaggccattt

SEQ ID NO: 419730 - DNA, 33 bp, Homo sapien
atttaatttattgtgctgaaattaaggccattt

SEQ ID NO: 419731 - DNA, 33 bp, Homo sapien
ctacaaagaggcagtaagaatgacttcaggatt

SEQ ID NO: 419732 - DNA, 33 bp, Homo sapien
ctacaaagaggcagtacgaatgacttcaggatt

SEQ ID NO: 419733 - DNA, 33 bp, Homo sapien
ggccatgaggagattaaagcatctacagagccc

SEQ ID NO: 419734 - DNA, 33 bp, Homo sapien
ggccatgaggagattacagcatctacagagccc

SEQ ID NO: 419735 - DNA, 33 bp, Homo sapien
ctttattatattctaccgccaaagcatattgct

SEQ ID NO: 419736 - DNA, 33 bp, Homo sapien
ctttattatattctactgccaaagcatattgct

SEQ ID NO: 419737 - DNA, 33 bp, Homo sapien
ttgatgcttagaccaaaaaattcttaagatgta

SEQ ID NO: 419738 - DNA, 33 bp, Homo sapien
ttgatgcttagaccaagaaattcttaagatgta

SEQ ID NO: 419739 - DNA, 33 bp, Homo sapien
aataacaaaaggtttacggactcagaaaggaca

SEQ ID NO: 419740 - DNA, 33 bp, Homo sapien
aataacaaaaggtttatggactcagaaaggaca

SEQ ID NO: 419741 - DNA, 33 bp, Homo sapien
taaagtggtggaatcacacaagctctaaagttt

SEQ ID NO: 419742 - DNA, 33 bp, Homo sapien
taaagtggtggaatcatacaagctctaaagttt

SEQ ID NO: 419743 - DNA, 33 bp, Homo sapien
ataagagagctagtacaaagtattttattgaat

SEQ ID NO: 419744 - DNA, 33 bp, Homo sapien
ataagagagctagtacgaagtattttattgaat

SEQ ID NO: 419745 - DNA, 33 bp, Homo sapien
aaatagaggaggataagaaccctgtaaaggaac

SEQ ID NO: 419746 - DNA, 33 bp, Homo sapien
aaatagaggaggataataaccctgtaaaggaac

SEQ ID NO: 419747 - DNA, 33 bp, Homo sapien
tttgcctatagctaccacttaaccaattattgt

SEQ ID NO: 419748 - DNA, 33 bp, Homo sapien
tttgcctatagctaccgcttaaccaattattgt

SEQ ID NO: 419749 - DNA, 33 bp, Homo sapien
tgatttactgcaatcaaataaatatacattatt

SEQ ID NO: 419750 - DNA, 33 bp, Homo sapien
tgatttactgcaatcacataaatatacattatt

SEQ ID NO: 419751 - DNA, 33 bp, Homo sapien
aaaaagcaaagcgtagccagaattcacctttat

SEQ ID NO: 419752 - DNA, 33 bp, Homo sapien
aaaaagcaaagcgtagtcagaattcacctttat

SEQ ID NO: 419753 - DNA, 33 bp, Homo sapien
tcaaaatcacaactcaacaacttccacactcaa

SEQ ID NO: 419754 - DNA, 33 bp, Homo sapien
tcaaaatcacaactcagcaacttccacactcaa

SEQ ID NO: 419755 - DNA, 33 bp, Homo sapien
ttcctttcttaacacaatgaatgacaacagtgc

SEQ ID NO: 419756 - DNA, 33 bp, Homo sapien
ttcctttcttaacacagtgaatgacaacagtgc

SEQ ID NO: 419757 - DNA, 33 bp, Homo sapien
acctcaacctcccatacagttcatctctatctt

SEQ ID NO: 419758 - DNA, 33 bp, Homo sapien
acctcaacctcccatatagttcatctctatctt

SEQ ID NO: 419759 - DNA, 33 bp, Homo sapien
tccctaatgaatgtccaaagtattcaatgtgtt

SEQ ID NO: 419760 - DNA, 33 bp, Homo sapien
tccctaatgaatgtccgaagtattcaatgtgtt

SEQ ID NO: 419761 - DNA, 33 bp, Homo sapien
gggttcatgtttatagactacctttttgctatt

SEQ ID NO: 419762 - DNA, 33 bp, Homo sapien
gggttcatgtttatagtctacctttttgctatt

SEQ ID NO: 419763 - DNA, 33 bp, Homo sapien
tattacctgaatttgcgaccaaaattattctac

SEQ ID NO: 419764 - DNA, 33 bp, Homo sapien
tattacctgaatttgctaccaaaattattctac

SEQ ID NO: 419765 - DNA, 33 bp, Homo sapien
cttgaatatgtgatagaagtgagtgaagaactt

SEQ ID NO: 419766 - DNA, 33 bp, Homo sapien
cttgaatatgtgatagtagtgagtgaagaactt

SEQ ID NO: 419767 - DNA, 33 bp, Homo sapien
tttaaaatgcctaacacagtgactggcatatag

SEQ ID NO: 419768 - DNA, 33 bp, Homo sapien
tttaaaatgcctaacatagtgactggcatatag

SEQ ID NO: 419769 - DNA, 33 bp, Homo sapien
aatagcttgtcaaatacggaggatgaatttgaa

SEQ ID NO: 419770 - DNA, 33 bp, Homo sapien
aatagcttgtcaaatatggaggatgaatttgaa

SEQ ID NO: 419771 - DNA, 33 bp, Homo sapien
gtggtggattttaaaacttcagcatgaaattca

SEQ ID NO: 419772 - DNA, 33 bp, Homo sapien
gtggtggattttaaaagttcagcatgaaattca

SEQ ID NO: 419773 - DNA, 33 bp, Homo sapien
attgtataattttccaactgctccatgtaattt

SEQ ID NO: 419774 - DNA, 33 bp, Homo sapien
attgtataattttccagctgctccatgtaattt

SEQ ID NO: 419775 - DNA, 33 bp, Homo sapien
aacaggtacagatttaacaactgaaagaattgc

SEQ ID NO: 419776 - DNA, 33 bp, Homo sapien
aacaggtacagatttagcaactgaaagaattgc

SEQ ID NO: 419777 - DNA, 33 bp, Homo sapien
gtatgacccaagctaccgctgaactgtagtcat

SEQ ID NO: 419778 - DNA, 33 bp, Homo sapien
gtatgacccaagctactgctgaactgtagtcat

SEQ ID NO: 419779 - DNA, 33 bp, Homo sapien
gacattttagtattcacaggagtagatttgggt

SEQ ID NO: 419780 - DNA, 33 bp, Homo sapien
gacattttagtattcagaggagtagatttgggt

SEQ ID NO: 419781 - DNA, 33 bp, Homo sapien
ttcctccataaaatccaatcctggagcaacggg

SEQ ID NO: 419782 - DNA, 33 bp, Homo sapien
ttcctccataaaatcctatcctggagcaacggg

SEQ ID NO: 419783 - DNA, 33 bp, Homo sapien
gactttttcctttccaaatcatagaagttgagt

SEQ ID NO: 419784 - DNA, 33 bp, Homo sapien
gactttttcctttccatatcatagaagttgagt

SEQ ID NO: 419785 - DNA, 33 bp, Homo sapien
aactgattgctttactcaataacatagtgtcct

SEQ ID NO: 419786 - DNA, 33 bp, Homo sapien
aactgattgctttacttaataacatagtgtcct

SEQ ID NO: 419787 - DNA, 33 bp, Homo sapien
atattaatacccatccagattagcctcacaata

SEQ ID NO: 419788 - DNA, 33 bp, Homo sapien
atattaatacccatccggattagcctcacaata

SEQ ID NO: 419789 - DNA, 33 bp, Homo sapien
atggtgcctcttttaacctacacagactttaac

SEQ ID NO: 419790 - DNA, 33 bp, Homo sapien
atggtgcctcttttaatctacacagactttaac

SEQ ID NO: 419791 - DNA, 33 bp, Homo sapien
tgggaatatgaattaccatctagggtcatttgc

SEQ ID NO: 419792 - DNA, 33 bp, Homo sapien
tgggaatatgaattactatctagggtcatttgc

SEQ ID NO: 419793 - DNA, 33 bp, Homo sapien
aatcaggcatgaaaaaaatcaataaaactcacc

SEQ ID NO: 419794 - DNA, 33 bp, Homo sapien
aatcaggcatgaaaaagatcaataaaactcacc

SEQ ID NO: 419795 - DNA, 33 bp, Homo sapien
tgtgaagctgtgcaagaacctctgcaaaatgcc

SEQ ID NO: 419796 - DNA, 33 bp, Homo sapien
tgtgaagctgtgcaaggacctctgcaaaatgcc

SEQ ID NO: 419797 - DNA, 33 bp, Homo sapien
tattatgctgcttagaagtatcagaggttttac

SEQ ID NO: 419798 - DNA, 33 bp, Homo sapien
tattatgctgcttagaggtatcagaggttttac

SEQ ID NO: 419799 - DNA, 33 bp, Homo sapien
tcccatttgacccctacaagtttaactggataa

SEQ ID NO: 419800 - DNA, 33 bp, Homo sapien
tcccatttgacccctagaagtttaactggataa

SEQ ID NO: 419801 - DNA, 33 bp, Homo sapien
cccaccttcaagctaactgattttttctttagc

SEQ ID NO: 419802 - DNA, 33 bp, Homo sapien
cccaccttcaagctaattgattttttctttagc

SEQ ID NO: 419803 - DNA, 33 bp, Homo sapien
acacccacctgcagaggaagcatctagaccatc

SEQ ID NO: 419804 - DNA, 33 bp, Homo sapien
acacccacctgcagagtaagcatctagaccatc

SEQ ID NO: 419805 - DNA, 33 bp, Homo sapien
gggtaggagggcataactgaatgaatttcgtac

SEQ ID NO: 419806 - DNA, 33 bp, Homo sapien
gggtaggagggcataattgaatgaatttcgtac

SEQ ID NO: 419807 - DNA, 33 bp, Homo sapien
tattctctgcaactggaatattctaaaatttaa

SEQ ID NO: 419808 - DNA, 33 bp, Homo sapien
tattctctgcaactgggatattctaaaatttaa

SEQ ID NO: 419809 - DNA, 33 bp, Homo sapien
aaaatcaagctgtagcacaaacactttgggcca

SEQ ID NO: 419810 - DNA, 33 bp, Homo sapien
aaaatcaagctgtagcgcaaacactttgggcca

SEQ ID NO: 419811 - DNA, 33 bp, Homo sapien
agataaaatgttgcataaataaaatcatgcatg

SEQ ID NO: 419812 - DNA, 33 bp, Homo sapien
agataaaatgttgcatgaataaaatcatgcatg

SEQ ID NO: 419813 - DNA, 33 bp, Homo sapien
ctttccacggaaggagaaatgtccagatgtgca

SEQ ID NO: 419814 - DNA, 33 bp, Homo sapien
ctttccacggaaggaggaatgtccagatgtgca

SEQ ID NO: 419815 - DNA, 33 bp, Homo sapien
ttgagcattgttgagacgccaatgacaccttaa

SEQ ID NO: 419816 - DNA, 33 bp, Homo sapien
ttgagcattgttgagatgccaatgacaccttaa

SEQ ID NO: 419817 - DNA, 33 bp, Homo sapien
tgagacacacaaagatgaaggaaaatggtcaat

SEQ ID NO: 419818 - DNA, 33 bp, Homo sapien
tgagacacacaaagattaaggaaaatggtcaat

SEQ ID NO: 419819 - DNA, 33 bp, Homo sapien
atgtgtgaacagatgacgaattttagctacaaa

SEQ ID NO: 419820 - DNA, 33 bp, Homo sapien
atgtgtgaacagatgatgaattttagctacaaa

SEQ ID NO: 419821 - DNA, 33 bp, Homo sapien
ttcttattagggacaacgtaggccagaaagcaa

SEQ ID NO: 419822 - DNA, 33 bp, Homo sapien
ttcttattagggacaatgtaggccagaaagcaa

SEQ ID NO: 419823 - DNA, 33 bp, Homo sapien
ttctgggcatagtccacgactggagtaagaact

SEQ ID NO: 419824 - DNA, 33 bp, Homo sapien
ttctgggcatagtccatgactggagtaagaact

SEQ ID NO: 419825 - DNA, 33 bp, Homo sapien
aatgaccttaatttaacgcagaggcttaaaata

SEQ ID NO: 419826 - DNA, 33 bp, Homo sapien
aatgaccttaatttaatgcagaggcttaaaata

SEQ ID NO: 419827 - DNA, 33 bp, Homo sapien
tagatcttcaccaagccctaactgcttcagtga

SEQ ID NO: 419828 - DNA, 33 bp, Homo sapien
tagatcttcaccaagctctaactgcttcagtga

SEQ ID NO: 419829 - DNA, 33 bp, Homo sapien
gcattccagatatcaacttaattcccccgaggt

SEQ ID NO: 419830 - DNA, 33 bp, Homo sapien
gcattccagatatcaatttaattcccccgaggt

SEQ ID NO: 419831 - DNA, 33 bp, Homo sapien
cttaactgaaattgataacatgcttcccatgta

SEQ ID NO: 419832 - DNA, 33 bp, Homo sapien
cttaactgaaattgatcacatgcttcccatgta

SEQ ID NO: 419833 - DNA, 33 bp, Homo sapien
gagtgatgaccgaaatcagtaactgaggcatac

SEQ ID NO: 419834 - DNA, 33 bp, Homo sapien
gagtgatgaccgaaatgagtaactgaggcatac

SEQ ID NO: 419835 - DNA, 33 bp, Homo sapien
acaaatgtatgaaacaatctaagtgaagagttg

SEQ ID NO: 419836 - DNA, 33 bp, Homo sapien
acaaatgtatgaaacagtctaagtgaagagttg

SEQ ID NO: 419837 - DNA, 33 bp, Homo sapien
ggcctggggaaagaaccatatttgcagcttctc

SEQ ID NO: 419838 - DNA, 33 bp, Homo sapien
ggcctggggaaagaactatatttgcagcttctc

SEQ ID NO: 419839 - DNA, 33 bp, Homo sapien
attcactctgtacttacactgtaggtttataaa

SEQ ID NO: 419840 - DNA, 33 bp, Homo sapien
attcactctgtacttatactgtaggtttataaa

SEQ ID NO: 419841 - DNA, 33 bp, Homo sapien
taagtatagcaatttcacatgcactgtaataaa

SEQ ID NO: 419842 - DNA, 33 bp, Homo sapien
taagtatagcaatttcgcatgcactgtaataaa

SEQ ID NO: 419843 - DNA, 33 bp, Homo sapien
tggaggaaaaaatcaactagcataggaatatat

SEQ ID NO: 419844 - DNA, 33 bp, Homo sapien
tggaggaaaaaatcaagtagcataggaatatat

SEQ ID NO: 419845 - DNA, 33 bp, Homo sapien
accacaggcaatgcaagattgtgttctctaagg

SEQ ID NO: 419846 - DNA, 33 bp, Homo sapien
accacaggcaatgcaatattgtgttctctaagg

SEQ ID NO: 419847 - DNA, 33 bp, Homo sapien
tggccaaatcagacaacgctaggaatgagcctt

SEQ ID NO: 419848 - DNA, 33 bp, Homo sapien
tggccaaatcagacaatgctaggaatgagcctt

SEQ ID NO: 419849 - DNA, 33 bp, Homo sapien
acaatttagacactgacgaccaggcgtttcttg

SEQ ID NO: 419850 - DNA, 33 bp, Homo sapien
acaatttagacactgaggaccaggcgtttcttg

SEQ ID NO: 419851 - DNA, 33 bp, Homo sapien
caaatctattcttcccaccacttttgtattgca

SEQ ID NO: 419852 - DNA, 33 bp, Homo sapien
caaatctattcttccctccacttttgtattgca

SEQ ID NO: 419853 - DNA, 33 bp, Homo sapien
ctactgactttaaaaaatgaaattgcaattaca

SEQ ID NO: 419854 - DNA, 33 bp, Homo sapien
ctactgactttaaaaactgaaattgcaattaca

SEQ ID NO: 419855 - DNA, 33 bp, Homo sapien
tattacaagcggccaaagtttaatttcatccat

SEQ ID NO: 419856 - DNA, 33 bp, Homo sapien
tattacaagcggccaaggtttaatttcatccat

SEQ ID NO: 419857 - DNA, 33 bp, Homo sapien
ttttatggtcattagactaacagaaaataagca

SEQ ID NO: 419858 - DNA, 33 bp, Homo sapien
ttttatggtcattagattaacagaaaataagca

SEQ ID NO: 419859 - DNA, 33 bp, Homo sapien
cgttgcttggtagaacaagagacaaatccttga

SEQ ID NO: 419860 - DNA, 33 bp, Homo sapien
cgttgcttggtagaaccagagacaaatccttga

SEQ ID NO: 419861 - DNA, 33 bp, Homo sapien
ttggagagagagaaaacgacaatggttcagttg

SEQ ID NO: 419862 - DNA, 33 bp, Homo sapien
ttggagagagagaaaaggacaatggttcagttg

SEQ ID NO: 419863 - DNA, 33 bp, Homo sapien
agacaaatacagcttccaggttttccttcccaa

SEQ ID NO: 419864 - DNA, 33 bp, Homo sapien
agacaaatacagcttctaggttttccttcccaa

SEQ ID NO: 419865 - DNA, 33 bp, Homo sapien
acatatgcaatacctacaactgtaaaatttata

SEQ ID NO: 419866 - DNA, 33 bp, Homo sapien
acatatgcaatacctagaactgtaaaatttata

SEQ ID NO: 419867 - DNA, 33 bp, Homo sapien
gaatggaaggaagacactgggggagagtgggaa

SEQ ID NO: 419868 - DNA, 33 bp, Homo sapien
gaatggaaggaagacattgggggagagtgggaa

SEQ ID NO: 419869 - DNA, 33 bp, Homo sapien
tgagccacagatactaagggtgaacatctaaca

SEQ ID NO: 419870 - DNA, 33 bp, Homo sapien
tgagccacagatactaggggtgaacatctaaca

SEQ ID NO: 419871 - DNA, 33 bp, Homo sapien
tcccaaacttcacaaaactctattctctacata

SEQ ID NO: 419872 - DNA, 33 bp, Homo sapien
tcccaaacttcacaaagctctattctctacata

SEQ ID NO: 419873 - DNA, 33 bp, Homo sapien
taaaaatggacttgaaatgaaagtacggtaaac

SEQ ID NO: 419874 - DNA, 33 bp, Homo sapien
taaaaatggacttgaactgaaagtacggtaaac

SEQ ID NO: 419875 - DNA, 33 bp, Homo sapien
cagaggagcttcatcaagggatctcacaggatg

SEQ ID NO: 419876 - DNA, 33 bp, Homo sapien
cagaggagcttcatcaggggatctcacaggatg

SEQ ID NO: 419877 - DNA, 33 bp, Homo sapien
atatggaaccaaaaaaaatgccagatagctaaa

SEQ ID NO: 419878 - DNA, 33 bp, Homo sapien
atatggaaccaaaaaagatgccagatagctaaa

SEQ ID NO: 419879 - DNA, 33 bp, Homo sapien
cattttgacattaatgaaggagttgaactttct

SEQ ID NO: 419880 - DNA, 33 bp, Homo sapien
cattttgacattaatgcaggagttgaactttct

SEQ ID NO: 419881 - DNA, 33 bp, Homo sapien
agcagtgtatttgaaccgtaccatggaaaacac

SEQ ID NO: 419882 - DNA, 33 bp, Homo sapien
agcagtgtatttgaactgtaccatggaaaacac

SEQ ID NO: 419883 - DNA, 33 bp, Homo sapien
actgtattgattctaaaacatgagagaaattta

SEQ ID NO: 419884 - DNA, 33 bp, Homo sapien
actgtattgattctaagacatgagagaaattta

SEQ ID NO: 419885 - DNA, 33 bp, Homo sapien
gatctacatagggtgcaaaatctctggcagccc

SEQ ID NO: 419886 - DNA, 33 bp, Homo sapien
gatctacatagggtgcgaaatctctggcagccc

SEQ ID NO: 419887 - DNA, 33 bp, Homo sapien
cagatcaacatacttaaaatatttccagcactc

SEQ ID NO: 419888 - DNA, 33 bp, Homo sapien
cagatcaacatacttagaatatttccagcactc

SEQ ID NO: 419889 - DNA, 33 bp, Homo sapien
acagccatgtaaaataacgtgaatgaaaccacc

SEQ ID NO: 419890 - DNA, 33 bp, Homo sapien
acagccatgtaaaatagcgtgaatgaaaccacc

SEQ ID NO: 419891 - DNA, 33 bp, Homo sapien
aaaatctcaagtgcagcacaattttattagcaa

SEQ ID NO: 419892 - DNA, 33 bp, Homo sapien
aaaatctcaagtgcagtacaattttattagcaa

SEQ ID NO: 419893 - DNA, 33 bp, Homo sapien
tagagtaaagtaatcaagatggttaacttgcaa

SEQ ID NO: 419894 - DNA, 33 bp, Homo sapien
tagagtaaagtaatcacgatggttaacttgcaa

SEQ ID NO: 419895 - DNA, 33 bp, Homo sapien
tcagttatcttctccagcccttatctgttcctt

SEQ ID NO: 419896 - DNA, 33 bp, Homo sapien
tcagttatcttctccatcccttatctgttcctt

SEQ ID NO: 419897 - DNA, 33 bp, Homo sapien
ttcaccttaatcctaccgggggcttagctgtat

SEQ ID NO: 419898 - DNA, 33 bp, Homo sapien
ttcaccttaatcctactgggggcttagctgtat

SEQ ID NO: 419899 - DNA, 33 bp, Homo sapien
gaagtacacattgatccattcattggctgcaaa

SEQ ID NO: 419900 - DNA, 33 bp, Homo sapien
gaagtacacattgatcgattcattggctgcaaa

SEQ ID NO: 419901 - DNA, 33 bp, Homo sapien
tactaaaaccgagggcaacagacaaggaaggtg

SEQ ID NO: 419902 - DNA, 33 bp, Homo sapien
tactaaaaccgagggcgacagacaaggaaggtg

SEQ ID NO: 419903 - DNA, 33 bp, Homo sapien
cactgtgctttttgaacatttgaatgctttttt

SEQ ID NO: 419904 - DNA, 33 bp, Homo sapien
cactgtgctttttgaatatttgaatgctttttt

SEQ ID NO: 419905 - DNA, 33 bp, Homo sapien
aggggagcttccaaaggccctgggaatccagga

SEQ ID NO: 419906 - DNA, 33 bp, Homo sapien
aggggagcttccaaagtccctgggaatccagga

SEQ ID NO: 419907 - DNA, 33 bp, Homo sapien
agctttctctgattacacttctcctggtgcttg

SEQ ID NO: 419908 - DNA, 33 bp, Homo sapien
agctttctctgattacgcttctcctggtgcttg

SEQ ID NO: 419909 - DNA, 33 bp, Homo sapien
acaacatgaatttgagaaagttagatatcaatt

SEQ ID NO: 419910 - DNA, 33 bp, Homo sapien
acaacatgaatttgaggaagttagatatcaatt

SEQ ID NO: 419911 - DNA, 33 bp, Homo sapien
tatttcttgaagaaaaattgtttgcagcaagtc

SEQ ID NO: 419912 - DNA, 33 bp, Homo sapien
tatttcttgaagaaaatttgtttgcagcaagtc

SEQ ID NO: 419913 - DNA, 33 bp, Homo sapien
aatgccatcagatgtacagatattacaaaaggg

SEQ ID NO: 419914 - DNA, 33 bp, Homo sapien
aatgccatcagatgtatagatattacaaaaggg

SEQ ID NO: 419915 - DNA, 33 bp, Homo sapien
tacatatttgaagtgacggatatactaattaga

SEQ ID NO: 419916 - DNA, 33 bp, Homo sapien
tacatatttgaagtgatggatatactaattaga

SEQ ID NO: 419917 - DNA, 33 bp, Homo sapien
gtgaagctcactgaataactttgtgaaaataga

SEQ ID NO: 419918 - DNA, 33 bp, Homo sapien
gtgaagctcactgaatgactttgtgaaaataga

SEQ ID NO: 419919 - DNA, 33 bp, Homo sapien
tatgaattttggttcaacttccatagctgtact

SEQ ID NO: 419920 - DNA, 33 bp, Homo sapien
tatgaattttggttcaccttccatagctgtact

SEQ ID NO: 419921 - DNA, 33 bp, Homo sapien
tgaagtgtgagcataaactgtgaactccaagag

SEQ ID NO: 419922 - DNA, 33 bp, Homo sapien
tgaagtgtgagcataagctgtgaactccaagag

SEQ ID NO: 419923 - DNA, 33 bp, Homo sapien
ggcacctttctctgaacggaagctgcacctccc

SEQ ID NO: 419924 - DNA, 33 bp, Homo sapien
ggcacctttctctgaatggaagctgcacctccc

SEQ ID NO: 419925 - DNA, 33 bp, Homo sapien
gcagtgaagctccaacgactataacttgttact

SEQ ID NO: 419926 - DNA, 33 bp, Homo sapien
gcagtgaagctccaactactataacttgttact

SEQ ID NO: 419927 - DNA, 33 bp, Homo sapien
gccatgtaggatgaacaggaaactacctgtggg

SEQ ID NO: 419928 - DNA, 33 bp, Homo sapien
gccatgtaggatgaacgggaaactacctgtggg

SEQ ID NO: 419929 - DNA, 33 bp, Homo sapien
tcaacagacaacaaaacagagagaagtagcatt

SEQ ID NO: 419930 - DNA, 33 bp, Homo sapien
tcaacagacaacaaaatagagagaagtagcatt

SEQ ID NO: 419931 - DNA, 33 bp, Homo sapien
tctttttttgaccgaaccctgaatataatatcc

SEQ ID NO: 419932 - DNA, 33 bp, Homo sapien
tctttttttgaccgaagcctgaatataatatcc

SEQ ID NO: 419933 - DNA, 33 bp, Homo sapien
agcttagaagtattgaacaaattacgatgtcaa

SEQ ID NO: 419934 - DNA, 33 bp, Homo sapien
agcttagaagtattgagcaaattacgatgtcaa

SEQ ID NO: 419935 - DNA, 33 bp, Homo sapien
agtctgttaacaccaaatattagtgagatgagg

SEQ ID NO: 419936 - DNA, 33 bp, Homo sapien
agtctgttaacaccaagtattagtgagatgagg

SEQ ID NO: 419937 - DNA, 33 bp, Homo sapien
gggaaaatttgaaaacaaacttcatacgtctat

SEQ ID NO: 419938 - DNA, 33 bp, Homo sapien
gggaaaatttgaaaacgaacttcatacgtctat

SEQ ID NO: 419939 - DNA, 33 bp, Homo sapien
atctgatgactatatacgagttttcggagacta

SEQ ID NO: 419940 - DNA, 33 bp, Homo sapien
atctgatgactatataggagttttcggagacta

SEQ ID NO: 419941 - DNA, 33 bp, Homo sapien
gtccatagtagtaacaatccatttgcctttaga

SEQ ID NO: 419942 - DNA, 33 bp, Homo sapien
gtccatagtagtaacactccatttgcctttaga

SEQ ID NO: 419943 - DNA, 33 bp, Homo sapien
aattcatgtaaagatactagttcatgcttttca

SEQ ID NO: 419944 - DNA, 33 bp, Homo sapien
aattcatgtaaagatattagttcatgcttttca

SEQ ID NO: 419945 - DNA, 33 bp, Homo sapien
actgtgtaagttgtaaaatataaggcacagctc

SEQ ID NO: 419946 - DNA, 33 bp, Homo sapien
actgtgtaagttgtaagatataaggcacagctc

SEQ ID NO: 419947 - DNA, 33 bp, Homo sapien
acctgagatcagcatcagaaggaaaatgtacat

SEQ ID NO: 419948 - DNA, 33 bp, Homo sapien
acctgagatcagcatcggaaggaaaatgtacat

SEQ ID NO: 419949 - DNA, 33 bp, Homo sapien
ataaattgtctaagcccgcaaaatatagggtaa

SEQ ID NO: 419950 - DNA, 33 bp, Homo sapien
ataaattgtctaagcctgcaaaatatagggtaa

SEQ ID NO: 419951 - DNA, 33 bp, Homo sapien
gtattgacttgccatgcatcaggcaacaaaccc

SEQ ID NO: 419952 - DNA, 33 bp, Homo sapien
gtattgacttgccatgtatcaggcaacaaaccc

SEQ ID NO: 419953 - DNA, 33 bp, Homo sapien
agccgtgagagaaggaaaaacatattcctggta

SEQ ID NO: 419954 - DNA, 33 bp, Homo sapien
agccgtgagagaaggacaaacatattcctggta

SEQ ID NO: 419955 - DNA, 33 bp, Homo sapien
atacggttggacaaaaagtgtattatctaatgc

SEQ ID NO: 419956 - DNA, 33 bp, Homo sapien
atacggttggacaaaacgtgtattatctaatgc

SEQ ID NO: 419957 - DNA, 33 bp, Homo sapien
gtatacatgtaaaataaattcatatgccttttc

SEQ ID NO: 419958 - DNA, 33 bp, Homo sapien
gtatacatgtaaaatagattcatatgccttttc

SEQ ID NO: 419959 - DNA, 33 bp, Homo sapien
ggtggaatctcatgagcacatgcaaagacttga

SEQ ID NO: 419960 - DNA, 33 bp, Homo sapien
ggtggaatctcatgagtacatgcaaagacttga

SEQ ID NO: 419961 - DNA, 33 bp, Homo sapien
taggacaaccaactctcacactatatgaccaag

SEQ ID NO: 419962 - DNA, 33 bp, Homo sapien
taggacaaccaactcttacactatatgaccaag

SEQ ID NO: 419963 - DNA, 33 bp, Homo sapien
agccacaggtaaccacggatctcagaacaaaga

SEQ ID NO: 419964 - DNA, 33 bp, Homo sapien
agccacaggtaaccactgatctcagaacaaaga

SEQ ID NO: 419965 - DNA, 33 bp, Homo sapien
taggttgtctctcaaagagctttgacactgctg

SEQ ID NO: 419966 - DNA, 33 bp, Homo sapien
taggttgtctctcaaatagctttgacactgctg

SEQ ID NO: 419967 - DNA, 33 bp, Homo sapien
ctgccttgcagttatacctctttctctgctgca

SEQ ID NO: 419968 - DNA, 33 bp, Homo sapien
ctgccttgcagttatatctctttctctgctgca

SEQ ID NO: 419969 - DNA, 33 bp, Homo sapien
caatgtgtggcaagtcaatacactgagacacca

SEQ ID NO: 419970 - DNA, 33 bp, Homo sapien
caatgtgtggcaagtcgatacactgagacacca

SEQ ID NO: 419971 - DNA, 33 bp, Homo sapien
gcctgaaattatgtcacagtccactgaataagt

SEQ ID NO: 419972 - DNA, 33 bp, Homo sapien
gcctgaaattatgtcatagtccactgaataagt

SEQ ID NO: 419973 - DNA, 33 bp, Homo sapien
ctgtttcctttcacaaccacctcttgcacactg

SEQ ID NO: 419974 - DNA, 33 bp, Homo sapien
ctgtttcctttcacaatcacctcttgcacactg

SEQ ID NO: 419975 - DNA, 33 bp, Homo sapien
ccagtgactatcagaaatacactcaataaaggt

SEQ ID NO: 419976 - DNA, 33 bp, Homo sapien
ccagtgactatcagaagtacactcaataaaggt

SEQ ID NO: 419977 - DNA, 33 bp, Homo sapien
attgacatgtgattatcacctaaagcccatagt

SEQ ID NO: 419978 - DNA, 33 bp, Homo sapien
attgacatgtgattattacctaaagcccatagt

SEQ ID NO: 419979 - DNA, 33 bp, Homo sapien
tataccacagaaaaataatcaagccataggcag

SEQ ID NO: 419980 - DNA, 33 bp, Homo sapien
tataccacagaaaaatgatcaagccataggcag

SEQ ID NO: 419981 - DNA, 33 bp, Homo sapien
gttctgaacccactgacacatgaacagactaca

SEQ ID NO: 419982 - DNA, 33 bp, Homo sapien
gttctgaacccactgagacatgaacagactaca

SEQ ID NO: 419983 - DNA, 33 bp, Homo sapien
tactctctgccccgaacctagaacttgagaaag

SEQ ID NO: 419984 - DNA, 33 bp, Homo sapien
tactctctgccccgaatctagaacttgagaaag

SEQ ID NO: 419985 - DNA, 33 bp, Homo sapien
taggagaattttggacgctaatcttactaatta

SEQ ID NO: 419986 - DNA, 33 bp, Homo sapien
taggagaattttggactctaatcttactaatta

SEQ ID NO: 419987 - DNA, 33 bp, Homo sapien
caacagaataagagaaatgagacggcttagaga

SEQ ID NO: 419988 - DNA, 33 bp, Homo sapien
caacagaataagagaactgagacggcttagaga

SEQ ID NO: 419989 - DNA, 33 bp, Homo sapien
aatgaattatgtaaaaatcaatgagaagctctc

SEQ ID NO: 419990 - DNA, 33 bp, Homo sapien
aatgaattatgtaaaagtcaatgagaagctctc

SEQ ID NO: 419991 - DNA, 33 bp, Homo sapien
cttgaagctcttagaactcaaaatataatccta

SEQ ID NO: 419992 - DNA, 33 bp, Homo sapien
cttgaagctcttagaagtcaaaatataatccta

SEQ ID NO: 419993 - DNA, 33 bp, Homo sapien
tagtgctatactgtaccctgcaatactcaggat

SEQ ID NO: 419994 - DNA, 33 bp, Homo sapien
tagtgctatactgtactctgcaatactcaggat

SEQ ID NO: 419995 - DNA, 33 bp, Homo sapien
aacttggtttgaattgaaggttggtaaatcaaa

SEQ ID NO: 419996 - DNA, 33 bp, Homo sapien
aacttggtttgaattggaggttggtaaatcaaa

SEQ ID NO: 419997 - DNA, 33 bp, Homo sapien
gcctacgggaatgtataagatcacttagtgagc

SEQ ID NO: 419998 - DNA, 33 bp, Homo sapien
gcctacgggaatgtatgagatcacttagtgagc

SEQ ID NO: 419999 - DNA, 33 bp, Homo sapien
tttattactgaaaacacctgggttgaagaaact

SEQ ID NO: 420000 - DNA, 33 bp, Homo sapien
tttattactgaaaacatctgggttgaagaaact

SEQ ID NO: 420001 - DNA, 33 bp, Homo sapien
aggagaaatataaaacactgtgctttaagccac

SEQ ID NO: 420002 - DNA, 33 bp, Homo sapien
aggagaaatataaaaccctgtgctttaagccac

SEQ ID NO: 420003 - DNA, 33 bp, Homo sapien
agaaatttaagcaagaacacaaaggtatgtgat

SEQ ID NO: 420004 - DNA, 33 bp, Homo sapien
agaaatttaagcaagagcacaaaggtatgtgat

SEQ ID NO: 420005 - DNA, 33 bp, Homo sapien
gagagtcacttctgaaagaaagcaaagatagag

SEQ ID NO: 420006 - DNA, 33 bp, Homo sapien
gagagtcacttctgaacgaaagcaaagatagag

SEQ ID NO: 420007 - DNA, 33 bp, Homo sapien
ctgtttaacttctggacctaattatttaaaaca

SEQ ID NO: 420008 - DNA, 33 bp, Homo sapien
ctgtttaacttctggatctaattatttaaaaca

SEQ ID NO: 420009 - DNA, 33 bp, Homo sapien
agagagaatgctataacagaaaatgaaaggcag

SEQ ID NO: 420010 - DNA, 33 bp, Homo sapien
agagagaatgctataatagaaaatgaaaggcag

SEQ ID NO: 420011 - DNA, 33 bp, Homo sapien
ttgtgaacattaacagccagtccattgtgctgg

SEQ ID NO: 420012 - DNA, 33 bp, Homo sapien
ttgtgaacattaacagtcagtccattgtgctgg

SEQ ID NO: 420013 - DNA, 33 bp, Homo sapien
tctcagaagcccttgaaactactgtgcctgaat

SEQ ID NO: 420014 - DNA, 33 bp, Homo sapien
tctcagaagcccttgagactactgtgcctgaat

SEQ ID NO: 420015 - DNA, 33 bp, Homo sapien
gtgaaaagaaaaaaccagctctgcaaacatctt

SEQ ID NO: 420016 - DNA, 33 bp, Homo sapien
gtgaaaagaaaaaaccggctctgcaaacatctt

SEQ ID NO: 420017 - DNA, 33 bp, Homo sapien
acaagtcaccaagtcagatttcagccagcaagg

SEQ ID NO: 420018 - DNA, 33 bp, Homo sapien
acaagtcaccaagtcatatttcagccagcaagg

SEQ ID NO: 420019 - DNA, 33 bp, Homo sapien
tatacaaaatgaataactgcctagagttaacaa

SEQ ID NO: 420020 - DNA, 33 bp, Homo sapien
tatacaaaatgaataagtgcctagagttaacaa

SEQ ID NO: 420021 - DNA, 33 bp, Homo sapien
ccagttaatagaaccagagaagagatattatca

SEQ ID NO: 420022 - DNA, 33 bp, Homo sapien
ccagttaatagaaccatagaagagatattatca

SEQ ID NO: 420023 - DNA, 33 bp, Homo sapien
tggcagccttcattgacgtccaaaggttctttt

SEQ ID NO: 420024 - DNA, 33 bp, Homo sapien
tggcagccttcattgatgtccaaaggttctttt

SEQ ID NO: 420025 - DNA, 33 bp, Homo sapien
cgggggttgtctgcacagagtcttgtgatgtga

SEQ ID NO: 420026 - DNA, 33 bp, Homo sapien
cgggggttgtctgcacggagtcttgtgatgtga

SEQ ID NO: 420027 - DNA, 33 bp, Homo sapien
ctattcttaccatacaatacagcaattgcactc

SEQ ID NO: 420028 - DNA, 33 bp, Homo sapien
ctattcttaccatacagtacagcaattgcactc

SEQ ID NO: 420029 - DNA, 33 bp, Homo sapien
tttaggtgtgtcctaccggtcaatgattagtca

SEQ ID NO: 420030 - DNA, 33 bp, Homo sapien
tttaggtgtgtcctactggtcaatgattagtca

SEQ ID NO: 420031 - DNA, 33 bp, Homo sapien
atctgcaaactgtggaaatggctggcctcttaa

SEQ ID NO: 420032 - DNA, 33 bp, Homo sapien
atctgcaaactgtggacatggctggcctcttaa

SEQ ID NO: 420033 - DNA, 33 bp, Homo sapien
cagttacccaagggcaagaacttaccagcagat

SEQ ID NO: 420034 - DNA, 33 bp, Homo sapien
cagttacccaagggcaggaacttaccagcagat

SEQ ID NO: 420035 - DNA, 33 bp, Homo sapien
gtagaggaacaacccgaactgcatcttcacacc

SEQ ID NO: 420036 - DNA, 33 bp, Homo sapien
gtagaggaacaacccggactgcatcttcacacc

SEQ ID NO: 420037 - DNA, 33 bp, Homo sapien
acaactagaactgcaaataaattctaagccatg

SEQ ID NO: 420038 - DNA, 33 bp, Homo sapien
acaactagaactgcaagtaaattctaagccatg

SEQ ID NO: 420039 - DNA, 33 bp, Homo sapien
gaatattgatattaacggatcaaaactgcaggt

SEQ ID NO: 420040 - DNA, 33 bp, Homo sapien
gaatattgatattaactgatcaaaactgcaggt

SEQ ID NO: 420041 - DNA, 33 bp, Homo sapien
tagttcttgaatgcacagtacatagcccaatac

SEQ ID NO: 420042 - DNA, 33 bp, Homo sapien
tagttcttgaatgcacggtacatagcccaatac

SEQ ID NO: 420043 - DNA, 33 bp, Homo sapien
ataatcctaagtactcaagagttcaccatatgc

SEQ ID NO: 420044 - DNA, 33 bp, Homo sapien
ataatcctaagtactcgagagttcaccatatgc

SEQ ID NO: 420045 - DNA, 33 bp, Homo sapien
tcctgatgcaggaaagaagtgagtttcacagct

SEQ ID NO: 420046 - DNA, 33 bp, Homo sapien
tcctgatgcaggaaaggagtgagtttcacagct

SEQ ID NO: 420047 - DNA, 33 bp, Homo sapien
caaagcacaaatgaagcccaaaggaaaggttcc

SEQ ID NO: 420048 - DNA, 33 bp, Homo sapien
caaagcacaaatgaagtccaaaggaaaggttcc

SEQ ID NO: 420049 - DNA, 33 bp, Homo sapien
ggtacaaagtgattaaatgggccctagagaagc

SEQ ID NO: 420050 - DNA, 33 bp, Homo sapien
ggtacaaagtgattaagtgggccctagagaagc

SEQ ID NO: 420051 - DNA, 33 bp, Homo sapien
cctcttcttacaaacaaatattcagagattcac

SEQ ID NO: 420052 - DNA, 33 bp, Homo sapien
cctcttcttacaaacatatattcagagattcac

SEQ ID NO: 420053 - DNA, 33 bp, Homo sapien
ctgtctcatttcaactaaggaacacagatatgc

SEQ ID NO: 420054 - DNA, 33 bp, Homo sapien
ctgtctcatttcaactgaggaacacagatatgc

SEQ ID NO: 420055 - DNA, 33 bp, Homo sapien
tcaattaagcctctacaaaagttactcaaatta

SEQ ID NO: 420056 - DNA, 33 bp, Homo sapien
tcaattaagcctctacgaaagttactcaaatta

SEQ ID NO: 420057 - DNA, 33 bp, Homo sapien
atattaatagatataaagacaaaagccccatga

SEQ ID NO: 420058 - DNA, 33 bp, Homo sapien
atattaatagatataaggacaaaagccccatga

SEQ ID NO: 420059 - DNA, 33 bp, Homo sapien
aagaggcagagctttacaggagaatattagcat

SEQ ID NO: 420060 - DNA, 33 bp, Homo sapien
aagaggcagagctttagaggagaatattagcat

SEQ ID NO: 420061 - DNA, 33 bp, Homo sapien
cagtgggctcaaccaacgctatggtttagagga

SEQ ID NO: 420062 - DNA, 33 bp, Homo sapien
cagtgggctcaaccaaggctatggtttagagga

SEQ ID NO: 420063 - DNA, 33 bp, Homo sapien
gtatatggaattattcaaagttcctctttacct

SEQ ID NO: 420064 - DNA, 33 bp, Homo sapien
gtatatggaattattcgaagttcctctttacct

SEQ ID NO: 420065 - DNA, 33 bp, Homo sapien
tattcttttctaggtcagaacctactcaaataa

SEQ ID NO: 420066 - DNA, 33 bp, Homo sapien
tattcttttctaggtctgaacctactcaaataa

SEQ ID NO: 420067 - DNA, 33 bp, Homo sapien
aaataagacattttaagagagagactatattca

SEQ ID NO: 420068 - DNA, 33 bp, Homo sapien
aaataagacattttaatagagagactatattca

SEQ ID NO: 420069 - DNA, 33 bp, Homo sapien
tctgcagccctccacaggtttgcctgcaatatt

SEQ ID NO: 420070 - DNA, 33 bp, Homo sapien
tctgcagccctccacatgtttgcctgcaatatt

SEQ ID NO: 420071 - DNA, 33 bp, Homo sapien
gtgatttccacaatcccgctaactcactagagt

SEQ ID NO: 420072 - DNA, 33 bp, Homo sapien
gtgatttccacaatcctgctaactcactagagt

SEQ ID NO: 420073 - DNA, 33 bp, Homo sapien
tttatgacgttgttggaaaccactattggggct

SEQ ID NO: 420074 - DNA, 33 bp, Homo sapien
tttatgacgttgttggcaaccactattggggct

SEQ ID NO: 420075 - DNA, 33 bp, Homo sapien
tgtgtcttcggctaaaatctagttgtttgaatc

SEQ ID NO: 420076 - DNA, 33 bp, Homo sapien
tgtgtcttcggctaaagtctagttgtttgaatc

SEQ ID NO: 420077 - DNA, 33 bp, Homo sapien
ttagttatcttccttcacaaacccttaggaact

SEQ ID NO: 420078 - DNA, 33 bp, Homo sapien
ttagttatcttccttcgcaaacccttaggaact

SEQ ID NO: 420079 - DNA, 33 bp, Homo sapien
agtctggcctgatgataaaaggtaaatattctt

SEQ ID NO: 420080 - DNA, 33 bp, Homo sapien
agtctggcctgatgatgaaaggtaaatattctt

SEQ ID NO: 420081 - DNA, 33 bp, Homo sapien
atggtagagatatacacaatggagtattactca

SEQ ID NO: 420082 - DNA, 33 bp, Homo sapien
atggtagagatatacataatggagtattactca

SEQ ID NO: 420083 - DNA, 33 bp, Homo sapien
caaatgaatgggaaacaaatggtagataaaagc

SEQ ID NO: 420084 - DNA, 33 bp, Homo sapien
caaatgaatgggaaacgaatggtagataaaagc

SEQ ID NO: 420085 - DNA, 33 bp, Homo sapien
accgtcggatctgctggatcgtgtggcccaagt

SEQ ID NO: 420086 - DNA, 33 bp, Homo sapien
accgtcggatctgctgtatcgtgtggcccaagt

SEQ ID NO: 420087 - DNA, 33 bp, Homo sapien
agaaccaggctagaaaatcagtctatatttgaa

SEQ ID NO: 420088 - DNA, 33 bp, Homo sapien
agaaccaggctagaaagtcagtctatatttgaa

SEQ ID NO: 420089 - DNA, 33 bp, Homo sapien
ttatgagaaaatttcgaaagttccttctatccc

SEQ ID NO: 420090 - DNA, 33 bp, Homo sapien
ttatgagaaaatttcgtaagttccttctatccc

SEQ ID NO: 420091 - DNA, 33 bp, Homo sapien
cccttacacatataccacacatcttataattct

SEQ ID NO: 420092 - DNA, 33 bp, Homo sapien
cccttacacatataccgcacatcttataattct

SEQ ID NO: 420093 - DNA, 33 bp, Homo sapien
aatctgttgtcctaaacaatggtagaaattaga

SEQ ID NO: 420094 - DNA, 33 bp, Homo sapien
aatctgttgtcctaaagaatggtagaaattaga

SEQ ID NO: 420095 - DNA, 33 bp, Homo sapien
gattcacagaaatgcaatattttatttaacctt

SEQ ID NO: 420096 - DNA, 33 bp, Homo sapien
gattcacagaaatgcagtattttatttaacctt

SEQ ID NO: 420097 - DNA, 33 bp, Homo sapien
ttaccttcagcattccacttaaaatacctccct

SEQ ID NO: 420098 - DNA, 33 bp, Homo sapien
ttaccttcagcattccgcttaaaatacctccct

SEQ ID NO: 420099 - DNA, 33 bp, Homo sapien
aacaagtacaatacaccggaatgggacgcaaag

SEQ ID NO: 420100 - DNA, 33 bp, Homo sapien
aacaagtacaatacactggaatgggacgcaaag

SEQ ID NO: 420101 - DNA, 33 bp, Homo sapien
acacacacctaatgaaatgtataactaagaatc

SEQ ID NO: 420102 - DNA, 33 bp, Homo sapien
acacacacctaatgaagtgtataactaagaatc

SEQ ID NO: 420103 - DNA, 33 bp, Homo sapien
tccagatgtaattcatgatcccgttacattaac

SEQ ID NO: 420104 - DNA, 33 bp, Homo sapien
tccagatgtaattcattatcccgttacattaac

SEQ ID NO: 420105 - DNA, 33 bp, Homo sapien
cacgtgggtagggcacacttcttagcatagtag

SEQ ID NO: 420106 - DNA, 33 bp, Homo sapien
cacgtgggtagggcacgcttcttagcatagtag

SEQ ID NO: 420107 - DNA, 33 bp, Homo sapien
cccagtgttgcctaagactaagtgccctgatag

SEQ ID NO: 420108 - DNA, 33 bp, Homo sapien
cccagtgttgcctaaggctaagtgccctgatag

SEQ ID NO: 420109 - DNA, 33 bp, Homo sapien
ccctttgagagtaaaaggtgatgcgattaataa

SEQ ID NO: 420110 - DNA, 33 bp, Homo sapien
ccctttgagagtaaaatgtgatgcgattaataa

SEQ ID NO: 420111 - DNA, 33 bp, Homo sapien
aaccaacttcatgaaacgtaatctgacagccag

SEQ ID NO: 420112 - DNA, 33 bp, Homo sapien
aaccaacttcatgaaatgtaatctgacagccag

SEQ ID NO: 420113 - DNA, 33 bp, Homo sapien
acagccaaataatttgcaaggaccagtgaaaaa

SEQ ID NO: 420114 - DNA, 33 bp, Homo sapien
acagccaaataatttggaaggaccagtgaaaaa

SEQ ID NO: 420115 - DNA, 33 bp, Homo sapien
ccttttgttttgtcaacccttgctcctcatttt

SEQ ID NO: 420116 - DNA, 33 bp, Homo sapien
ccttttgttttgtcaatccttgctcctcatttt

SEQ ID NO: 420117 - DNA, 33 bp, Homo sapien
agggacctcccacttactaacactaggcaatct

SEQ ID NO: 420118 - DNA, 33 bp, Homo sapien
agggacctcccacttattaacactaggcaatct

SEQ ID NO: 420119 - DNA, 33 bp, Homo sapien
catattttgacaagacccaaatcagaagcaagt

SEQ ID NO: 420120 - DNA, 33 bp, Homo sapien
catattttgacaagactcaaatcagaagcaagt

SEQ ID NO: 420121 - DNA, 33 bp, Homo sapien
tggaagtaggagtaggaagaggagagtgtcccc

SEQ ID NO: 420122 - DNA, 33 bp, Homo sapien
tggaagtaggagtagggagaggagagtgtcccc

SEQ ID NO: 420123 - DNA, 33 bp, Homo sapien
ttccttcagtagcccacgtaaggtaggacaaaa

SEQ ID NO: 420124 - DNA, 33 bp, Homo sapien
ttccttcagtagcccatgtaaggtaggacaaaa

SEQ ID NO: 420125 - DNA, 33 bp, Homo sapien
aggctgaaaactgcataagctcagctgtcccat

SEQ ID NO: 420126 - DNA, 33 bp, Homo sapien
aggctgaaaactgcatgagctcagctgtcccat

SEQ ID NO: 420127 - DNA, 33 bp, Homo sapien
gacgaggttctgaaacccactcttggatctatg

SEQ ID NO: 420128 - DNA, 33 bp, Homo sapien
gacgaggttctgaaactcactcttggatctatg

SEQ ID NO: 420129 - DNA, 33 bp, Homo sapien
tatctgaggatcaataaaatgatgactgtgaat

SEQ ID NO: 420130 - DNA, 33 bp, Homo sapien
tatctgaggatcaatagaatgatgactgtgaat

SEQ ID NO: 420131 - DNA, 33 bp, Homo sapien
gctgcactgtctccttaaaatgaacagtcctgg

SEQ ID NO: 420132 - DNA, 33 bp, Homo sapien
gctgcactgtctccttcaaatgaacagtcctgg

SEQ ID NO: 420133 - DNA, 33 bp, Homo sapien
ctcctattttatagcacaggtaattattgtcaa

SEQ ID NO: 420134 - DNA, 33 bp, Homo sapien
ctcctattttatagcagaggtaattattgtcaa

SEQ ID NO: 420135 - DNA, 33 bp, Homo sapien
tttcatttcatcctcaaaataattctataaggc

SEQ ID NO: 420136 - DNA, 33 bp, Homo sapien
tttcatttcatcctcagaataattctataaggc

SEQ ID NO: 420137 - DNA, 33 bp, Homo sapien
tgtggaattcaacaaacagcaatgtagagtagc

SEQ ID NO: 420138 - DNA, 33 bp, Homo sapien
tgtggaattcaacaaagagcaatgtagagtagc

SEQ ID NO: 420139 - DNA, 33 bp, Homo sapien
ctctcaatcagggaacacactggaagttaaatg

SEQ ID NO: 420140 - DNA, 33 bp, Homo sapien
ctctcaatcagggaacgcactggaagttaaatg

SEQ ID NO: 420141 - DNA, 33 bp, Homo sapien
cacacaaaaagccctacgaaggtcttatactgg

SEQ ID NO: 420142 - DNA, 33 bp, Homo sapien
cacacaaaaagccctatgaaggtcttatactgg

SEQ ID NO: 420143 - DNA, 33 bp, Homo sapien
gtcacccctgcaaataaagcaaatacctatccc

SEQ ID NO: 420144 - DNA, 33 bp, Homo sapien
gtcacccctgcaaatacagcaaatacctatccc

SEQ ID NO: 420145 - DNA, 33 bp, Homo sapien
atgcctactctgaaaaaagtaaatgacttccta

SEQ ID NO: 420146 - DNA, 33 bp, Homo sapien
atgcctactctgaaaacagtaaatgacttccta

SEQ ID NO: 420147 - DNA, 33 bp, Homo sapien
catgatttaagatgaacacttctacacgcagtc

SEQ ID NO: 420148 - DNA, 33 bp, Homo sapien
catgatttaagatgaagacttctacacgcagtc

SEQ ID NO: 420149 - DNA, 33 bp, Homo sapien
acattctaagtggagagtaaacgtggacacaca

SEQ ID NO: 420150 - DNA, 33 bp, Homo sapien
acattctaagtggagattaaacgtggacacaca

SEQ ID NO: 420151 - DNA, 33 bp, Homo sapien
caaggaggcatagtgaaataggaaatcaaagtt

SEQ ID NO: 420152 - DNA, 33 bp, Homo sapien
caaggaggcatagtgagataggaaatcaaagtt

SEQ ID NO: 420153 - DNA, 33 bp, Homo sapien
cgcaagggaaaacaagactccacagataccaaa

SEQ ID NO: 420154 - DNA, 33 bp, Homo sapien
cgcaagggaaaacaaggctccacagataccaaa

SEQ ID NO: 420155 - DNA, 33 bp, Homo sapien
ctgctgtcacaaatgaccacaagtttggatggc

SEQ ID NO: 420156 - DNA, 33 bp, Homo sapien
ctgctgtcacaaatgatcacaagtttggatggc

SEQ ID NO: 420157 - DNA, 33 bp, Homo sapien
gaatcactggaattaaccaaatatgtgtgactc

SEQ ID NO: 420158 - DNA, 33 bp, Homo sapien
gaatcactggaattaatcaaatatgtgtgactc

SEQ ID NO: 420159 - DNA, 33 bp, Homo sapien
tttagcagtaagagtaccagttttaaaatatac

SEQ ID NO: 420160 - DNA, 33 bp, Homo sapien
tttagcagtaagagtagcagttttaaaatatac

SEQ ID NO: 420161 - DNA, 33 bp, Homo sapien
agagaatttgctcttcaaaagactccaataacg

SEQ ID NO: 420162 - DNA, 33 bp, Homo sapien
agagaatttgctcttccaaagactccaataacg

SEQ ID NO: 420163 - DNA, 33 bp, Homo sapien
tgaagaccattggcaccaagaaagcagcagttc

SEQ ID NO: 420164 - DNA, 33 bp, Homo sapien
tgaagaccattggcactaagaaagcagcagttc

SEQ ID NO: 420165 - DNA, 33 bp, Homo sapien
tctctatcaactttagcaatctgctcctcaaga

SEQ ID NO: 420166 - DNA, 33 bp, Homo sapien
tctctatcaactttaggaatctgctcctcaaga

SEQ ID NO: 420167 - DNA, 33 bp, Homo sapien
agaagtcctatcatacaaagcgtcagtaaggat

SEQ ID NO: 420168 - DNA, 33 bp, Homo sapien
agaagtcctatcataccaagcgtcagtaaggat

SEQ ID NO: 420169 - DNA, 33 bp, Homo sapien
gaatgcaaaacatagcaatttgtcttttacttt

SEQ ID NO: 420170 - DNA, 33 bp, Homo sapien
gaatgcaaaacatagcgatttgtcttttacttt

SEQ ID NO: 420171 - DNA, 33 bp, Homo sapien
tcaccttgagtggagcaaggaacaggaaaatgg

SEQ ID NO: 420172 - DNA, 33 bp, Homo sapien
tcaccttgagtggagccaggaacaggaaaatgg

SEQ ID NO: 420173 - DNA, 33 bp, Homo sapien
tttctatggccttctacgcagttactttcccca

SEQ ID NO: 420174 - DNA, 33 bp, Homo sapien
tttctatggccttctatgcagttactttcccca

SEQ ID NO: 420175 - DNA, 33 bp, Homo sapien
tatctccatacaagtcaaagtccccattttcct

SEQ ID NO: 420176 - DNA, 33 bp, Homo sapien
tatctccatacaagtcgaagtccccattttcct

SEQ ID NO: 420177 - DNA, 33 bp, Homo sapien
gtgagtgatttaaaaacttggtctttctgtgtt

SEQ ID NO: 420178 - DNA, 33 bp, Homo sapien
gtgagtgatttaaaaagttggtctttctgtgtt

SEQ ID NO: 420179 - DNA, 33 bp, Homo sapien
ccattagaaacattaagtcttcactgcagtctg

SEQ ID NO: 420180 - DNA, 33 bp, Homo sapien
ccattagaaacattaattcttcactgcagtctg

SEQ ID NO: 420181 - DNA, 33 bp, Homo sapien
gttaaggatattaatgaaacaagcacaaatact

SEQ ID NO: 420182 - DNA, 33 bp, Homo sapien
gttaaggatattaatgcaacaagcacaaatact

SEQ ID NO: 420183 - DNA, 33 bp, Homo sapien
tctcttgtcattcttactaaatagttggtgtct

SEQ ID NO: 420184 - DNA, 33 bp, Homo sapien
tctcttgtcattcttattaaatagttggtgtct

SEQ ID NO: 420185 - DNA, 33 bp, Homo sapien
aaaatgatagtacacgaaagtgggaggagaaca

SEQ ID NO: 420186 - DNA, 33 bp, Homo sapien
aaaatgatagtacacggaagtgggaggagaaca

SEQ ID NO: 420187 - DNA, 33 bp, Homo sapien
attatagccctgttacgagagttttatatttac

SEQ ID NO: 420188 - DNA, 33 bp, Homo sapien
attatagccctgttactagagttttatatttac

SEQ ID NO: 420189 - DNA, 33 bp, Homo sapien
tttggcttatttaaagcattttacagtaattgt

SEQ ID NO: 420190 - DNA, 33 bp, Homo sapien
tttggcttatttaaaggattttacagtaattgt

SEQ ID NO: 420191 - DNA, 33 bp, Homo sapien
gagtatctttgcataacatcttacctgaattac

SEQ ID NO: 420192 - DNA, 33 bp, Homo sapien
gagtatctttgcataatatcttacctgaattac

SEQ ID NO: 420193 - DNA, 33 bp, Homo sapien
aacgcttgcttgggagacctaccacttaacttg

SEQ ID NO: 420194 - DNA, 33 bp, Homo sapien
aacgcttgcttgggagccctaccacttaacttg

SEQ ID NO: 420195 - DNA, 33 bp, Homo sapien
tttttatcatgaaagagtattgttttcccaaat

SEQ ID NO: 420196 - DNA, 33 bp, Homo sapien
tttttatcatgaaagattattgttttcccaaat

SEQ ID NO: 420197 - DNA, 33 bp, Homo sapien
tttaattcatgtttaaccaacaacagtagtaaa

SEQ ID NO: 420198 - DNA, 33 bp, Homo sapien
tttaattcatgtttaatcaacaacagtagtaaa

SEQ ID NO: 420199 - DNA, 33 bp, Homo sapien
aactatgtcgaaaaaacggctttgaatgtgaaa

SEQ ID NO: 420200 - DNA, 33 bp, Homo sapien
aactatgtcgaaaaaatggctttgaatgtgaaa

SEQ ID NO: 420201 - DNA, 33 bp, Homo sapien
tggtatttagataaaaagaagtgtttggtgaga

SEQ ID NO: 420202 - DNA, 33 bp, Homo sapien
tggtatttagataaaaggaagtgtttggtgaga

SEQ ID NO: 420203 - DNA, 33 bp, Homo sapien
atacactgaaaaaaaacttgctacagtgttcct

SEQ ID NO: 420204 - DNA, 33 bp, Homo sapien
atacactgaaaaaaaatttgctacagtgttcct

SEQ ID NO: 420205 - DNA, 33 bp, Homo sapien
acaaacacatagaccaatggaggaggttagaga

SEQ ID NO: 420206 - DNA, 33 bp, Homo sapien
acaaacacatagaccagtggaggaggttagaga

SEQ ID NO: 420207 - DNA, 33 bp, Homo sapien
tagttataataattacagatcagtacggaaatc

SEQ ID NO: 420208 - DNA, 33 bp, Homo sapien
tagttataataattacggatcagtacggaaatc

SEQ ID NO: 420209 - DNA, 33 bp, Homo sapien
caagtgaaaaagatcaatctcaaactaaggcat

SEQ ID NO: 420210 - DNA, 33 bp, Homo sapien
caagtgaaaaagatcagtctcaaactaaggcat

SEQ ID NO: 420211 - DNA, 33 bp, Homo sapien
gggaaagaggaaaagccgctagtctttgcaaag

SEQ ID NO: 420212 - DNA, 33 bp, Homo sapien
gggaaagaggaaaagctgctagtctttgcaaag

SEQ ID NO: 420213 - DNA, 33 bp, Homo sapien
taacattaaacagaagaatagtcattagctgta

SEQ ID NO: 420214 - DNA, 33 bp, Homo sapien
taacattaaacagaaggatagtcattagctgta

SEQ ID NO: 420215 - DNA, 33 bp, Homo sapien
gcaagagttgggactgaatagaagttgagaggt

SEQ ID NO: 420216 - DNA, 33 bp, Homo sapien
gcaagagttgggactggatagaagttgagaggt

SEQ ID NO: 420217 - DNA, 33 bp, Homo sapien
aagaagtcttatgcaaaggaaaataattgtata

SEQ ID NO: 420218 - DNA, 33 bp, Homo sapien
aagaagtcttatgcaagggaaaataattgtata

SEQ ID NO: 420219 - DNA, 33 bp, Homo sapien
aatctccaagtatgaacgaagatttgtctattt

SEQ ID NO: 420220 - DNA, 33 bp, Homo sapien
aatctccaagtatgaatgaagatttgtctattt

SEQ ID NO: 420221 - DNA, 33 bp, Homo sapien
agacctaaactttcaacgagaagacaaagatta

SEQ ID NO: 420222 - DNA, 33 bp, Homo sapien
agacctaaactttcaatgagaagacaaagatta

SEQ ID NO: 420223 - DNA, 33 bp, Homo sapien
ttcggtgcttatatgagattcaaagacccttgg

SEQ ID NO: 420224 - DNA, 33 bp, Homo sapien
ttcggtgcttatatgatattcaaagacccttgg

SEQ ID NO: 420225 - DNA, 33 bp, Homo sapien
ataaaagtaggcaaaacgtaggaatgaatggac

SEQ ID NO: 420226 - DNA, 33 bp, Homo sapien
ataaaagtaggcaaaatgtaggaatgaatggac

SEQ ID NO: 420227 - DNA, 33 bp, Homo sapien
acgtctctggttaccaatgaagtttaactttta

SEQ ID NO: 420228 - DNA, 33 bp, Homo sapien
acgtctctggttaccagtgaagtttaactttta

SEQ ID NO: 420229 - DNA, 33 bp, Homo sapien
aaaattagcatacaaaaataatagcattcatat

SEQ ID NO: 420230 - DNA, 33 bp, Homo sapien
aaaattagcatacaaacataatagcattcatat

SEQ ID NO: 420231 - DNA, 33 bp, Homo sapien
agcactgagcaaaatacgtgaaagaatagtttt

SEQ ID NO: 420232 - DNA, 33 bp, Homo sapien
agcactgagcaaaatatgtgaaagaatagtttt

SEQ ID NO: 420233 - DNA, 33 bp, Homo sapien
tcaagactttggatatcaagcagtaaagaatgg

SEQ ID NO: 420234 - DNA, 33 bp, Homo sapien
tcaagactttggatatgaagcagtaaagaatgg

SEQ ID NO: 420235 - DNA, 33 bp, Homo sapien
aacagcctttcagatacactttccatccttttg

SEQ ID NO: 420236 - DNA, 33 bp, Homo sapien
aacagcctttcagatatactttccatccttttg

SEQ ID NO: 420237 - DNA, 33 bp, Homo sapien
gctcctggtaggggtacgctatcatttgggcct

SEQ ID NO: 420238 - DNA, 33 bp, Homo sapien
gctcctggtaggggtatgctatcatttgggcct

SEQ ID NO: 420239 - DNA, 33 bp, Homo sapien
atcttgataaaggctacatcagcaagtatcaat

SEQ ID NO: 420240 - DNA, 33 bp, Homo sapien
atcttgataaaggctatatcagcaagtatcaat

SEQ ID NO: 420241 - DNA, 33 bp, Homo sapien
ccaggctggaaaaaaacgttcttcagaaactca

SEQ ID NO: 420242 - DNA, 33 bp, Homo sapien
ccaggctggaaaaaaaggttcttcagaaactca

SEQ ID NO: 420243 - DNA, 33 bp, Homo sapien
ggaattgtgagagatacagtctttgaaattggt

SEQ ID NO: 420244 - DNA, 33 bp, Homo sapien
ggaattgtgagagatatagtctttgaaattggt

SEQ ID NO: 420245 - DNA, 33 bp, Homo sapien
tggcctcgaacccttaagctcaagcgagcctcc

SEQ ID NO: 420246 - DNA, 33 bp, Homo sapien
tggcctcgaacccttatgctcaagcgagcctcc

SEQ ID NO: 420247 - DNA, 33 bp, Homo sapien
gttcagagagctagcgcagaacttaggaggccg

SEQ ID NO: 420248 - DNA, 33 bp, Homo sapien
gttcagagagctagcggagaacttaggaggccg

SEQ ID NO: 420249 - DNA, 33 bp, Homo sapien
gggttggccgtggtatcaaaccttataccctca

SEQ ID NO: 420250 - DNA, 33 bp, Homo sapien
gggttggccgtggtatgaaaccttataccctca

SEQ ID NO: 420251 - DNA, 33 bp, Homo sapien
tttatttgctcttaaacgggagcggtgatggag

SEQ ID NO: 420252 - DNA, 33 bp, Homo sapien
tttatttgctcttaaatgggagcggtgatggag

SEQ ID NO: 420253 - DNA, 33 bp, Homo sapien
tatccaacaacaaaaactaatcaactacagctg

SEQ ID NO: 420254 - DNA, 33 bp, Homo sapien
tatccaacaacaaaaagtaatcaactacagctg

SEQ ID NO: 420255 - DNA, 33 bp, Homo sapien
gcatgtcttcagcaaacgatggtacacacacac

SEQ ID NO: 420256 - DNA, 33 bp, Homo sapien
gcatgtcttcagcaaatgatggtacacacacac

SEQ ID NO: 420257 - DNA, 33 bp, Homo sapien
ggacttgtgatccaaccctttctattcagagct

SEQ ID NO: 420258 - DNA, 33 bp, Homo sapien
ggacttgtgatccaactctttctattcagagct

SEQ ID NO: 420259 - DNA, 33 bp, Homo sapien
tcccatttgagaaggacacttttcagcccccaa

SEQ ID NO: 420260 - DNA, 33 bp, Homo sapien
tcccatttgagaaggatacttttcagcccccaa

SEQ ID NO: 420261 - DNA, 33 bp, Homo sapien
cggctcggcctcgaaacagcttgaagaaagcca

SEQ ID NO: 420262 - DNA, 33 bp, Homo sapien
cggctcggcctcgaaatagcttgaagaaagcca

SEQ ID NO: 420263 - DNA, 33 bp, Homo sapien
cccacagatggatagcaaaatattatctgtaga

SEQ ID NO: 420264 - DNA, 33 bp, Homo sapien
cccacagatggatagccaaatattatctgtaga

SEQ ID NO: 420265 - DNA, 33 bp, Homo sapien
gcagtttagggacaggaagtatctaaagctcca

SEQ ID NO: 420266 - DNA, 33 bp, Homo sapien
gcagtttagggacaggtagtatctaaagctcca

SEQ ID NO: 420267 - DNA, 33 bp, Homo sapien
agatgtcacgcttccaagtagagacagatgtct

SEQ ID NO: 420268 - DNA, 33 bp, Homo sapien
agatgtcacgcttccaggtagagacagatgtct

SEQ ID NO: 420269 - DNA, 33 bp, Homo sapien
ctcaataaaaatagtacgcttaaacctgcagca

SEQ ID NO: 420270 - DNA, 33 bp, Homo sapien
ctcaataaaaatagtatgcttaaacctgcagca

SEQ ID NO: 420271 - DNA, 33 bp, Homo sapien
ttgtaaaacactgtgcaaatgttaagtgtaatt

SEQ ID NO: 420272 - DNA, 33 bp, Homo sapien
ttgtaaaacactgtgcgaatgttaagtgtaatt

SEQ ID NO: 420273 - DNA, 33 bp, Homo sapien
ccggtgagtgtttgaacggaactggtactgtgt

SEQ ID NO: 420274 - DNA, 33 bp, Homo sapien
ccggtgagtgtttgaagggaactggtactgtgt

SEQ ID NO: 420275 - DNA, 33 bp, Homo sapien
atcttgtgcctttgaccgatcttgaagtaatag

SEQ ID NO: 420276 - DNA, 33 bp, Homo sapien
atcttgtgcctttgactgatcttgaagtaatag

SEQ ID NO: 420277 - DNA, 33 bp, Homo sapien
cacgtcccaattctcaaagcagttttgtaagca

SEQ ID NO: 420278 - DNA, 33 bp, Homo sapien
cacgtcccaattctcagagcagttttgtaagca

SEQ ID NO: 420279 - DNA, 33 bp, Homo sapien
tatcagactggcaaagaaggagaaggaaagatt

SEQ ID NO: 420280 - DNA, 33 bp, Homo sapien
tatcagactggcaaaggaggagaaggaaagatt

SEQ ID NO: 420281 - DNA, 33 bp, Homo sapien
ccactccatcagacaaaaagcaaaattataccc

SEQ ID NO: 420282 - DNA, 33 bp, Homo sapien
ccactccatcagacaagaagcaaaattataccc

SEQ ID NO: 420283 - DNA, 33 bp, Homo sapien
gccaaagggagacataaaaaataatctccaggt

SEQ ID NO: 420284 - DNA, 33 bp, Homo sapien
gccaaagggagacatacaaaataatctccaggt

SEQ ID NO: 420285 - DNA, 33 bp, Homo sapien
taatacacacattacccggagaaacaatccaag

SEQ ID NO: 420286 - DNA, 33 bp, Homo sapien
taatacacacattacctggagaaacaatccaag

SEQ ID NO: 420287 - DNA, 33 bp, Homo sapien
catggtagtgtaacatcatgagtctggttgcca

SEQ ID NO: 420288 - DNA, 33 bp, Homo sapien
catggtagtgtaacatgatgagtctggttgcca

SEQ ID NO: 420289 - DNA, 33 bp, Homo sapien
gggcccagtctgtctaccttttagctcagtgct

SEQ ID NO: 420290 - DNA, 33 bp, Homo sapien
gggcccagtctgtctatcttttagctcagtgct

SEQ ID NO: 420291 - DNA, 33 bp, Homo sapien
tgtacaatttagtaggcaacttggcatatgttt

SEQ ID NO: 420292 - DNA, 33 bp, Homo sapien
tgtacaatttagtagggaacttggcatatgttt

SEQ ID NO: 420293 - DNA, 33 bp, Homo sapien
tttggtagatcttggaagaattttagttggtaa

SEQ ID NO: 420294 - DNA, 33 bp, Homo sapien
tttggtagatcttggaggaattttagttggtaa

SEQ ID NO: 420295 - DNA, 33 bp, Homo sapien
atgaagataacctgaacgcctaccagcaagaaa

SEQ ID NO: 420296 - DNA, 33 bp, Homo sapien
atgaagataacctgaatgcctaccagcaagaaa

SEQ ID NO: 420297 - DNA, 33 bp, Homo sapien
gaggcttacggacagaagttaaaacagctttta

SEQ ID NO: 420298 - DNA, 33 bp, Homo sapien
gaggcttacggacagaggttaaaacagctttta

SEQ ID NO: 420299 - DNA, 33 bp, Homo sapien
atttgttctagaagtgcaagtatgtgtaaaggg

SEQ ID NO: 420300 - DNA, 33 bp, Homo sapien
atttgttctagaagtggaagtatgtgtaaaggg

SEQ ID NO: 420301 - DNA, 33 bp, Homo sapien
aacaccagctcagaacaattcaaaaactcccct

SEQ ID NO: 420302 - DNA, 33 bp, Homo sapien
aacaccagctcagaacgattcaaaaactcccct

SEQ ID NO: 420303 - DNA, 33 bp, Homo sapien
atagagagaaatgcaagaagtaaaatcattaag

SEQ ID NO: 420304 - DNA, 33 bp, Homo sapien
atagagagaaatgcaataagtaaaatcattaag

SEQ ID NO: 420305 - DNA, 33 bp, Homo sapien
gcagtagtggaggccaagaataactgttttgtt

SEQ ID NO: 420306 - DNA, 33 bp, Homo sapien
gcagtagtggaggccaggaataactgttttgtt

SEQ ID NO: 420307 - DNA, 33 bp, Homo sapien
atttatagccaagaacaaatatattctcatttt

SEQ ID NO: 420308 - DNA, 33 bp, Homo sapien
atttatagccaagaacgaatatattctcatttt

SEQ ID NO: 420309 - DNA, 33 bp, Homo sapien
acactggaccacaacaaatccacttctgatctc

SEQ ID NO: 420310 - DNA, 33 bp, Homo sapien
acactggaccacaacagatccacttctgatctc

SEQ ID NO: 420311 - DNA, 33 bp, Homo sapien
aatgactttctaaatccaaatgcttcaatcatc

SEQ ID NO: 420312 - DNA, 33 bp, Homo sapien
aatgactttctaaatctaaatgcttcaatcatc

SEQ ID NO: 420313 - DNA, 33 bp, Homo sapien
ttccctatgccttaagactcatccaactgaacc

SEQ ID NO: 420314 - DNA, 33 bp, Homo sapien
ttccctatgccttaagcctcatccaactgaacc

SEQ ID NO: 420315 - DNA, 33 bp, Homo sapien
tgactttagaaacaaaccaagagtgaaaatgag

SEQ ID NO: 420316 - DNA, 33 bp, Homo sapien
tgactttagaaacaaagcaagagtgaaaatgag

SEQ ID NO: 420317 - DNA, 33 bp, Homo sapien
aaactgagatggcaaaccccaaaccaaggtgct

SEQ ID NO: 420318 - DNA, 33 bp, Homo sapien
aaactgagatggcaaatcccaaaccaaggtgct

SEQ ID NO: 420319 - DNA, 33 bp, Homo sapien
ccatttctttttactccgaccccagtgactgtc

SEQ ID NO: 420320 - DNA, 33 bp, Homo sapien
ccatttctttttactctgaccccagtgactgtc

SEQ ID NO: 420321 - DNA, 33 bp, Homo sapien
aggaaagaaaataaacgctaacagcctgttcca

SEQ ID NO: 420322 - DNA, 33 bp, Homo sapien
aggaaagaaaataaactctaacagcctgttcca

SEQ ID NO: 420323 - DNA, 33 bp, Homo sapien
gagcacaggcatgtagaattcagaggagttccc

SEQ ID NO: 420324 - DNA, 33 bp, Homo sapien
gagcacaggcatgtagcattcagaggagttccc

SEQ ID NO: 420325 - DNA, 33 bp, Homo sapien
catgctgtttccatcactcctcctcattattcc

SEQ ID NO: 420326 - DNA, 33 bp, Homo sapien
catgctgtttccatcattcctcctcattattcc

SEQ ID NO: 420327 - DNA, 33 bp, Homo sapien
gaccaagagtaggaatcatgaggaggaataatg

SEQ ID NO: 420328 - DNA, 33 bp, Homo sapien
gaccaagagtaggaatgatgaggaggaataatg

SEQ ID NO: 420329 - DNA, 33 bp, Homo sapien
acaaaaataaaaattaactgtgcctatagtctc

SEQ ID NO: 420330 - DNA, 33 bp, Homo sapien
acaaaaataaaaattagctgtgcctatagtctc

SEQ ID NO: 420331 - DNA, 33 bp, Homo sapien
ttgttattttctttccaacagcccaggagccca

SEQ ID NO: 420332 - DNA, 33 bp, Homo sapien
ttgttattttctttcccacagcccaggagccca

SEQ ID NO: 420333 - DNA, 33 bp, Homo sapien
accagcaaagacaactaagaagaagaaacttgg

SEQ ID NO: 420334 - DNA, 33 bp, Homo sapien
accagcaaagacaactgagaagaagaaacttgg

SEQ ID NO: 420335 - DNA, 33 bp, Homo sapien
tgatctctcccctgaaccacagacttacttatc

SEQ ID NO: 420336 - DNA, 33 bp, Homo sapien
tgatctctcccctgaatcacagacttacttatc

SEQ ID NO: 420337 - DNA, 33 bp, Homo sapien
aggcagctgggtataactaactgttaagaaaat

SEQ ID NO: 420338 - DNA, 33 bp, Homo sapien
aggcagctgggtataattaactgttaagaaaat

SEQ ID NO: 420339 - DNA, 33 bp, Homo sapien
ctcatcaaaacacagagtaaatgcttctgtgtc

SEQ ID NO: 420340 - DNA, 33 bp, Homo sapien
ctcatcaaaacacagattaaatgcttctgtgtc

SEQ ID NO: 420341 - DNA, 33 bp, Homo sapien
atatggaggattacaaactggatacatagtgac

SEQ ID NO: 420342 - DNA, 33 bp, Homo sapien
atatggaggattacaagctggatacatagtgac

SEQ ID NO: 420343 - DNA, 33 bp, Homo sapien
acttggccttcttgccacctttcagggactcca

SEQ ID NO: 420344 - DNA, 33 bp, Homo sapien
acttggccttcttgccgcctttcagggactcca

SEQ ID NO: 420345 - DNA, 33 bp, Homo sapien
ccaacataatttctaacctggattcgctttttt

SEQ ID NO: 420346 - DNA, 33 bp, Homo sapien
ccaacataatttctaatctggattcgctttttt

SEQ ID NO: 420347 - DNA, 33 bp, Homo sapien
tggaacacttacttcaaattgatgcaggatttt

SEQ ID NO: 420348 - DNA, 33 bp, Homo sapien
tggaacacttacttcatattgatgcaggatttt

SEQ ID NO: 420349 - DNA, 33 bp, Homo sapien
ccagacatgactaaaccgactttgattaagact

SEQ ID NO: 420350 - DNA, 33 bp, Homo sapien
ccagacatgactaaacggactttgattaagact

SEQ ID NO: 420351 - DNA, 33 bp, Homo sapien
ctggcaaagataatccaatggaatgtagccaca

SEQ ID NO: 420352 - DNA, 33 bp, Homo sapien
ctggcaaagataatccgatggaatgtagccaca

SEQ ID NO: 420353 - DNA, 33 bp, Homo sapien
tgttgttgttatagcaactggcagagtgagaca

SEQ ID NO: 420354 - DNA, 33 bp, Homo sapien
tgttgttgttatagcatctggcagagtgagaca

SEQ ID NO: 420355 - DNA, 33 bp, Homo sapien
ctaattagtaatctccaaagactctcacgtttt

SEQ ID NO: 420356 - DNA, 33 bp, Homo sapien
ctaattagtaatctccgaagactctcacgtttt

SEQ ID NO: 420357 - DNA, 33 bp, Homo sapien
ttttctctttatccacggcctatttttaccttg

SEQ ID NO: 420358 - DNA, 33 bp, Homo sapien
ttttctctttatccactgcctatttttaccttg

SEQ ID NO: 420359 - DNA, 33 bp, Homo sapien
ttacccctcttgtatacatgcactatatgtggg

SEQ ID NO: 420360 - DNA, 33 bp, Homo sapien
ttacccctcttgtatatatgcactatatgtggg

SEQ ID NO: 420361 - DNA, 33 bp, Homo sapien
gtttatggaaagtactaaagtgtattgcaaagt

SEQ ID NO: 420362 - DNA, 33 bp, Homo sapien
gtttatggaaagtactgaagtgtattgcaaagt

SEQ ID NO: 420363 - DNA, 33 bp, Homo sapien
ggattctttttctgacaaaggcatgtttgccca

SEQ ID NO: 420364 - DNA, 33 bp, Homo sapien
ggattctttttctgacgaaggcatgtttgccca

SEQ ID NO: 420365 - DNA, 33 bp, Homo sapien
tgtctggattgtattacaagaggccaacatcct

SEQ ID NO: 420366 - DNA, 33 bp, Homo sapien
tgtctggattgtattataagaggccaacatcct

SEQ ID NO: 420367 - DNA, 33 bp, Homo sapien
ttctttgggttttgaacaatctcattactatta

SEQ ID NO: 420368 - DNA, 33 bp, Homo sapien
ttctttgggttttgaataatctcattactatta

SEQ ID NO: 420369 - DNA, 33 bp, Homo sapien
tcaccccagggaccagacactggaatatgaaca

SEQ ID NO: 420370 - DNA, 33 bp, Homo sapien
tcaccccagggaccagccactggaatatgaaca

SEQ ID NO: 420371 - DNA, 33 bp, Homo sapien
ataacgggaattttaacagagagacagagagag

SEQ ID NO: 420372 - DNA, 33 bp, Homo sapien
ataacgggaattttaagagagagacagagagag

SEQ ID NO: 420373 - DNA, 33 bp, Homo sapien
ttgtttcgcttcacccgagtcagttcaaacctc

SEQ ID NO: 420374 - DNA, 33 bp, Homo sapien
ttgtttcgcttcaccctagtcagttcaaacctc

SEQ ID NO: 420375 - DNA, 33 bp, Homo sapien
aagacgaagaaagtcccgatattaatgatggaa

SEQ ID NO: 420376 - DNA, 33 bp, Homo sapien
aagacgaagaaagtcctgatattaatgatggaa

SEQ ID NO: 420377 - DNA, 33 bp, Homo sapien
tttttgggcctgtgaacggtgccattttacagg

SEQ ID NO: 420378 - DNA, 33 bp, Homo sapien
tttttgggcctgtgaatggtgccattttacagg

SEQ ID NO: 420379 - DNA, 33 bp, Homo sapien
cttttaacaagtaagacgtggaaagaatcataa

SEQ ID NO: 420380 - DNA, 33 bp, Homo sapien
cttttaacaagtaagatgtggaaagaatcataa

SEQ ID NO: 420381 - DNA, 33 bp, Homo sapien
acttgttaaaaggaaaatatcatctccacaaat

SEQ ID NO: 420382 - DNA, 33 bp, Homo sapien
acttgttaaaaggaaagtatcatctccacaaat

SEQ ID NO: 420383 - DNA, 33 bp, Homo sapien
tccaattccactcttcccattgtttgaaaatat

SEQ ID NO: 420384 - DNA, 33 bp, Homo sapien
tccaattccactcttctcattgtttgaaaatat

SEQ ID NO: 420385 - DNA, 33 bp, Homo sapien
ttacctgggaacacacaaaatcaagacagtaca

SEQ ID NO: 420386 - DNA, 33 bp, Homo sapien
ttacctgggaacacacgaaatcaagacagtaca

SEQ ID NO: 420387 - DNA, 33 bp, Homo sapien
cctaatcaacagtgaaataacctctttggaagc

SEQ ID NO: 420388 - DNA, 33 bp, Homo sapien
cctaatcaacagtgaagtaacctctttggaagc

SEQ ID NO: 420389 - DNA, 33 bp, Homo sapien
gttatcgcagacagtgaagtccaatctcagata

SEQ ID NO: 420390 - DNA, 33 bp, Homo sapien
gttatcgcagacagtgcagtccaatctcagata

SEQ ID NO: 420391 - DNA, 33 bp, Homo sapien
ggaaggaatcacaacacctaaacagtccacggc

SEQ ID NO: 420392 - DNA, 33 bp, Homo sapien
ggaaggaatcacaacatctaaacagtccacggc

SEQ ID NO: 420393 - DNA, 33 bp, Homo sapien
agctcagctagcctgaagttacagtcaggcttg

SEQ ID NO: 420394 - DNA, 33 bp, Homo sapien
agctcagctagcctgaggttacagtcaggcttg

SEQ ID NO: 420395 - DNA, 33 bp, Homo sapien
acacactcagatctaccgccagagggtggaaga

SEQ ID NO: 420396 - DNA, 33 bp, Homo sapien
acacactcagatctactgccagagggtggaaga

SEQ ID NO: 420397 - DNA, 33 bp, Homo sapien
cctagacattatagtacaaagacacttgacaat

SEQ ID NO: 420398 - DNA, 33 bp, Homo sapien
cctagacattatagtataaagacacttgacaat

SEQ ID NO: 420399 - DNA, 33 bp, Homo sapien
ttgactagacattgcacgaaagttaccttactc

SEQ ID NO: 420400 - DNA, 33 bp, Homo sapien
ttgactagacattgcatgaaagttaccttactc

SEQ ID NO: 420401 - DNA, 33 bp, Homo sapien
tcaatacaatattctaaggtttgtcttccagta

SEQ ID NO: 420402 - DNA, 33 bp, Homo sapien
tcaatacaatattctagggtttgtcttccagta

SEQ ID NO: 420403 - DNA, 33 bp, Homo sapien
gaataccaaaataaccaagatttacagcaggga

SEQ ID NO: 420404 - DNA, 33 bp, Homo sapien
gaataccaaaataaccgagatttacagcaggga

SEQ ID NO: 420405 - DNA, 33 bp, Homo sapien
caggcattagagggcaaaagctgatgaaaacga

SEQ ID NO: 420406 - DNA, 33 bp, Homo sapien
caggcattagagggcagaagctgatgaaaacga

SEQ ID NO: 420407 - DNA, 33 bp, Homo sapien
ggataaatgtgagcgcacacaatgatatggcct

SEQ ID NO: 420408 - DNA, 33 bp, Homo sapien
ggataaatgtgagcgcgcacaatgatatggcct

SEQ ID NO: 420409 - DNA, 33 bp, Homo sapien
atttcagaagaatacaatgatgtgagagaagag

SEQ ID NO: 420410 - DNA, 33 bp, Homo sapien
atttcagaagaatacagtgatgtgagagaagag

SEQ ID NO: 420411 - DNA, 33 bp, Homo sapien
gggtagttccaaaccaagaggaggagaggggca

SEQ ID NO: 420412 - DNA, 33 bp, Homo sapien
gggtagttccaaaccaggaggaggagaggggca

SEQ ID NO: 420413 - DNA, 33 bp, Homo sapien
ttaacaacacacgtacagtacatttaaaagata

SEQ ID NO: 420414 - DNA, 33 bp, Homo sapien
ttaacaacacacgtacggtacatttaaaagata

SEQ ID NO: 420415 - DNA, 33 bp, Homo sapien
aaaagatacaatgtgaaaaaagaacttgaagct

SEQ ID NO: 420416 - DNA, 33 bp, Homo sapien
aaaagatacaatgtgagaaaagaacttgaagct

SEQ ID NO: 420417 - DNA, 33 bp, Homo sapien
ttgaagctaactaaagccaaaacaaggaagaaa

SEQ ID NO: 420418 - DNA, 33 bp, Homo sapien
ttgaagctaactaaaggcaaaacaaggaagaaa

SEQ ID NO: 420419 - DNA, 33 bp, Homo sapien
tgtaaattttcctgaaatgagagaaatagtgac

SEQ ID NO: 420420 - DNA, 33 bp, Homo sapien
tgtaaattttcctgaagtgagagaaatagtgac

SEQ ID NO: 420421 - DNA, 33 bp, Homo sapien
aatgaacaggaaatcaaatattcaggcttgaag

SEQ ID NO: 420422 - DNA, 33 bp, Homo sapien
aatgaacaggaaatcacatattcaggcttgaag

SEQ ID NO: 420423 - DNA, 33 bp, Homo sapien
ttaggaaggagaaataaattgctggagattaca

SEQ ID NO: 420424 - DNA, 33 bp, Homo sapien
ttaggaaggagaaatagattgctggagattaca

SEQ ID NO: 420425 - DNA, 33 bp, Homo sapien
caaagtgccactggagaagccagcaatacatga

SEQ ID NO: 420426 - DNA, 33 bp, Homo sapien
caaagtgccactggaggagccagcaatacatga

SEQ ID NO: 420427 - DNA, 33 bp, Homo sapien
tcagaactaggtggaacagattcttttacatac

SEQ ID NO: 420428 - DNA, 33 bp, Homo sapien
tcagaactaggtggaatagattcttttacatac

SEQ ID NO: 420429 - DNA, 33 bp, Homo sapien
aagtgggatagggcccaagccttagtcagatcc

SEQ ID NO: 420430 - DNA, 33 bp, Homo sapien
aagtgggatagggcccgagccttagtcagatcc

SEQ ID NO: 420431 - DNA, 33 bp, Homo sapien
ccatatgatttttgtaaaagtaacacacagtca

SEQ ID NO: 420432 - DNA, 33 bp, Homo sapien
ccatatgatttttgtagaagtaacacacagtca

SEQ ID NO: 420433 - DNA, 33 bp, Homo sapien
gtgaaatttctagaaaaagctgaactgtagaga

SEQ ID NO: 420434 - DNA, 33 bp, Homo sapien
gtgaaatttctagaaagagctgaactgtagaga

SEQ ID NO: 420435 - DNA, 33 bp, Homo sapien
ctgctataatttgttacctggtctctaagtgtt

SEQ ID NO: 420436 - DNA, 33 bp, Homo sapien
ctgctataatttgttatctggtctctaagtgtt

SEQ ID NO: 420437 - DNA, 33 bp, Homo sapien
gtcagaaaaggatcaccgagaaagaaaaaagta

SEQ ID NO: 420438 - DNA, 33 bp, Homo sapien
gtcagaaaaggatcactgagaaagaaaaaagta

SEQ ID NO: 420439 - DNA, 33 bp, Homo sapien
tgaagagtgacagtctaaattgtttgaaggaaa

SEQ ID NO: 420440 - DNA, 33 bp, Homo sapien
tgaagagtgacagtctcaattgtttgaaggaaa

SEQ ID NO: 420441 - DNA, 33 bp, Homo sapien
gcagtgtaatgttgagcaagttactacctaggc

SEQ ID NO: 420442 - DNA, 33 bp, Homo sapien
gcagtgtaatgttgaggaagttactacctaggc

SEQ ID NO: 420443 - DNA, 33 bp, Homo sapien
agaattgagactaacacccgaatctcttcattc

SEQ ID NO: 420444 - DNA, 33 bp, Homo sapien
agaattgagactaacagccgaatctcttcattc

SEQ ID NO: 420445 - DNA, 33 bp, Homo sapien
acagtggaaagaataccggaagcttgaggccca

SEQ ID NO: 420446 - DNA, 33 bp, Homo sapien
acagtggaaagaatactggaagcttgaggccca

SEQ ID NO: 420447 - DNA, 33 bp, Homo sapien
cccccacattggcttcccaaagcattaggatta

SEQ ID NO: 420448 - DNA, 33 bp, Homo sapien
cccccacattggcttctcaaagcattaggatta

SEQ ID NO: 420449 - DNA, 33 bp, Homo sapien
agtttgcagccaactggaatgatcataaaacct

SEQ ID NO: 420450 - DNA, 33 bp, Homo sapien
agtttgcagccaactgtaatgatcataaaacct

SEQ ID NO: 420451 - DNA, 33 bp, Homo sapien
aaagtaacctcatctacctaatgacatataatt

SEQ ID NO: 420452 - DNA, 33 bp, Homo sapien
aaagtaacctcatctatctaatgacatataatt

SEQ ID NO: 420453 - DNA, 33 bp, Homo sapien
gagttgcagtgagtaaatgaaatgtgagtggca

SEQ ID NO: 420454 - DNA, 33 bp, Homo sapien
gagttgcagtgagtaagtgaaatgtgagtggca

SEQ ID NO: 420455 - DNA, 33 bp, Homo sapien
gtgaagaggccatagaaatattttacacaagag

SEQ ID NO: 420456 - DNA, 33 bp, Homo sapien
gtgaagaggccatagagatattttacacaagag

SEQ ID NO: 420457 - DNA, 33 bp, Homo sapien
attttatacgattgacaagctttaggaatgaac

SEQ ID NO: 420458 - DNA, 33 bp, Homo sapien
attttatacgattgactagctttaggaatgaac

SEQ ID NO: 420459 - DNA, 33 bp, Homo sapien
tttcttgaatcttcccaacaaccttgtgggatt

SEQ ID NO: 420460 - DNA, 33 bp, Homo sapien
tttcttgaatcttcccgacaaccttgtgggatt

SEQ ID NO: 420461 - DNA, 33 bp, Homo sapien
ttggaattccaactcacgtcctaatagttaccc

SEQ ID NO: 420462 - DNA, 33 bp, Homo sapien
ttggaattccaactcatgtcctaatagttaccc

SEQ ID NO: 420463 - DNA, 33 bp, Homo sapien
gtagtcaccctgttacgctaccaaatactagat

SEQ ID NO: 420464 - DNA, 33 bp, Homo sapien
gtagtcaccctgttactctaccaaatactagat

SEQ ID NO: 420465 - DNA, 33 bp, Homo sapien
gatatccaattattccagagcctggcaactcta

SEQ ID NO: 420466 - DNA, 33 bp, Homo sapien
gatatccaattattccggagcctggcaactcta

SEQ ID NO: 420467 - DNA, 33 bp, Homo sapien
cctgtagtgtttccaccgcattagggtatttag

SEQ ID NO: 420468 - DNA, 33 bp, Homo sapien
cctgtagtgtttccactgcattagggtatttag

SEQ ID NO: 420469 - DNA, 33 bp, Homo sapien
aatcgtaatgaaaaaagacctcaattcaacatc

SEQ ID NO: 420470 - DNA, 33 bp, Homo sapien
aatcgtaatgaaaaaatacctcaattcaacatc

SEQ ID NO: 420471 - DNA, 33 bp, Homo sapien
actacaaaaggaaacactggagaagaagcaagc

SEQ ID NO: 420472 - DNA, 33 bp, Homo sapien
actacaaaaggaaacattggagaagaagcaagc

SEQ ID NO: 420473 - DNA, 33 bp, Homo sapien; identical to SEQ ID NO: 420471

SEQ ID NO: 420474 - DNA, 33 bp, Homo sapien; identical to SEQ ID NO: 420472

SEQ ID NO: 420475 - DNA, 33 bp, Homo sapien
tatttaagtgaaaaccagaatcaatgatacatt

SEQ ID NO: 420476 - DNA, 33 bp, Homo sapien
tatttaagtgaaaaccggaatcaatgatacatt

SEQ ID NO: 420477 - DNA, 33 bp, Homo sapien
ggcctttaacaccaaaagttcattttcaagcct

SEQ ID NO: 420478 - DNA, 33 bp, Homo sapien
ggcctttaacaccaaaggttcattttcaagcct

SEQ ID NO: 420479 - DNA, 33 bp, Homo sapien
ttacctttgtgggaaactgataagaggtggcct

SEQ ID NO: 420480 - DNA, 33 bp, Homo sapien
ttacctttgtgggaaattgataagaggtggcct

SEQ ID NO: 420481 - DNA, 33 bp, Homo sapien
atttttgtggttcaaaagaaagttgtaaaaatt

SEQ ID NO: 420482 - DNA, 33 bp, Homo sapien
atttttgtggttcaaaggaaagttgtaaaaatt

SEQ ID NO: 420483 - DNA, 33 bp, Homo sapien
aagattagtccaaacaacacttcctctatggag

SEQ ID NO: 420484 - DNA, 33 bp, Homo sapien
aagattagtccaaacagcacttcctctatggag

SEQ ID NO: 420485 - DNA, 33 bp, Homo sapien
atcacatgtacttgaacgaatctttagagcaag

SEQ ID NO: 420486 - DNA, 33 bp, Homo sapien
atcacatgtacttgaatgaatctttagagcaag

SEQ ID NO: 420487 - DNA, 33 bp, Homo sapien
ctggtaaggattctaaagaaactcctgaaaagc

SEQ ID NO: 420488 - DNA, 33 bp, Homo sapien
ctggtaaggattctaaggaaactcctgaaaagc

SEQ ID NO: 420489 - DNA, 33 bp, Homo sapien
gaggggactgctttcacagagatggtagcatca

SEQ ID NO: 420490 - DNA, 33 bp, Homo sapien
gaggggactgctttcatagagatggtagcatca

SEQ ID NO: 420491 - DNA, 33 bp, Homo sapien
gactgcaaattagaggcatgtgagaagtcttaa

SEQ ID NO: 420492 - DNA, 33 bp, Homo sapien
gactgcaaattagaggtatgtgagaagtcttaa

SEQ ID NO: 420493 - DNA, 33 bp, Homo sapien
tttgagtttatgagggacaggttcatctctgta

SEQ ID NO: 420494 - DNA, 33 bp, Homo sapien
tttgagtttatgagggtcaggttcatctctgta

SEQ ID NO: 420495 - DNA, 33 bp, Homo sapien
tgtcaataaatgttgccagaaggaatgagtgac

SEQ ID NO: 420496 - DNA, 33 bp, Homo sapien
tgtcaataaatgttgctagaaggaatgagtgac

SEQ ID NO: 420497 - DNA, 33 bp, Homo sapien
ttctgaccatttaaacgagtaagtggcagagct

SEQ ID NO: 420498 - DNA, 33 bp, Homo sapien
ttctgaccatttaaactagtaagtggcagagct

SEQ ID NO: 420499 - DNA, 33 bp, Homo sapien
tttccataggaagtccagagatagggtagcccc

SEQ ID NO: 420500 - DNA, 33 bp, Homo sapien
tttccataggaagtccggagatagggtagcccc

SEQ ID NO: 420501 - DNA, 33 bp, Homo sapien
atcacatccagacacaacaacaggccttttcct

SEQ ID NO: 420502 - DNA, 33 bp, Homo sapien
atcacatccagacacatcaacaggccttttcct

SEQ ID NO: 420503 - DNA, 33 bp, Homo sapien
gaaagtatgggacttcaaatacattaagttagt

SEQ ID NO: 420504 - DNA, 33 bp, Homo sapien
gaaagtatgggacttcgaatacattaagttagt

SEQ ID NO: 420505 - DNA, 33 bp, Homo sapien
cttcactccagttggacgcccacgccattctaa

SEQ ID NO: 420506 - DNA, 33 bp, Homo sapien
cttcactccagttggatgcccacgccattctaa

SEQ ID NO: 420507 - DNA, 33 bp, Homo sapien
aagttgggattttcaagttacccaaggcttctg

SEQ ID NO: 420508 - DNA, 33 bp, Homo sapien
aagttgggattttcaatttacccaaggcttctg

SEQ ID NO: 420509 - DNA, 33 bp, Homo sapien
tataagtcttagtggcagagatttttttggcct

SEQ ID NO: 420510 - DNA, 33 bp, Homo sapien
tataagtcttagtggcggagatttttttggcct

SEQ ID NO: 420511 - DNA, 33 bp, Homo sapien
caaacttcacaagcaacagataaactagactat

SEQ ID NO: 420512 - DNA, 33 bp, Homo sapien
caaacttcacaagcaagagataaactagactat

SEQ ID NO: 420513 - DNA, 33 bp, Homo sapien
aaatatacaaagaaccacaaaggagaaaaccca

SEQ ID NO: 420514 - DNA, 33 bp, Homo sapien
aaatatacaaagaaccgcaaaggagaaaaccca

SEQ ID NO: 420515 - DNA, 33 bp, Homo sapien
agtggcagaatttgaaagaaatgaaagcagttt

SEQ ID NO: 420516 - DNA, 33 bp, Homo sapien
agtggcagaatttgaatgaaatgaaagcagttt

SEQ ID NO: 420517 - DNA, 33 bp, Homo sapien
agaatgaaagtgtgaaaaggatggccaggcatg

SEQ ID NO: 420518 - DNA, 33 bp, Homo sapien
agaatgaaagtgtgaagaggatggccaggcatg

SEQ ID NO: 420519 - DNA, 33 bp, Homo sapien
gttggatatgaaccctaaaagagcatgtacatc

SEQ ID NO: 420520 - DNA, 33 bp, Homo sapien
gttggatatgaaccctgaaagagcatgtacatc

SEQ ID NO: 420521 - DNA, 33 bp, Homo sapien
aggctgaatgttcacaacatggaaagtcataat

SEQ ID NO: 420522 - DNA, 33 bp, Homo sapien
aggctgaatgttcacatcatggaaagtcataat

SEQ ID NO: 420523 - DNA, 33 bp, Homo sapien
atcctcaggccaccaacggaaggagcaagtcat

SEQ ID NO: 420524 - DNA, 33 bp, Homo sapien
atcctcaggccaccaatggaaggagcaagtcat

SEQ ID NO: 420525 - DNA, 33 bp, Homo sapien
aagcattctcctgacccaatacaagcgtggtgt

SEQ ID NO: 420526 - DNA, 33 bp, Homo sapien
aagcattctcctgacctaatacaagcgtggtgt

SEQ ID NO: 420527 - DNA, 33 bp, Homo sapien
tatatatagtatagtaagacgcaaactccatct

SEQ ID NO: 420528 - DNA, 33 bp, Homo sapien
tatatatagtatagtaggacgcaaactccatct

SEQ ID NO: 420529 - DNA, 33 bp, Homo sapien
atgcagcggtaaaaaagtaataaggatgatctc

SEQ ID NO: 420530 - DNA, 33 bp, Homo sapien
atgcagcggtaaaaaattaataaggatgatctc

SEQ ID NO: 420531 - DNA, 33 bp, Homo sapien
ttctagttcattctaaaatggaggctttccgtc

SEQ ID NO: 420532 - DNA, 33 bp, Homo sapien
ttctagttcattctaacatggaggctttccgtc

SEQ ID NO: 420533 - DNA, 33 bp, Homo sapien
tgacccatctagtgtcaccttctcccttacaca

SEQ ID NO: 420534 - DNA, 33 bp, Homo sapien
tgacccatctagtgtcgccttctcccttacaca

SEQ ID NO: 420535 - DNA, 33 bp, Homo sapien
gcctcgccagctttaacaaccgtttggatatga

SEQ ID NO: 420536 - DNA, 33 bp, Homo sapien
gcctcgccagctttaataaccgtttggatatga

SEQ ID NO: 420537 - DNA, 33 bp, Homo sapien
ttataaagaaaattaccgaaacttgaacatatt

SEQ ID NO: 420538 - DNA, 33 bp, Homo sapien
ttataaagaaaattactgaaacttgaacatatt

SEQ ID NO: 420539 - DNA, 33 bp, Homo sapien
attagcaaaaatttgaaacaagataggagaatt

SEQ ID NO: 420540 - DNA, 33 bp, Homo sapien
attagcaaaaatttgagacaagataggagaatt

SEQ ID NO: 420541 - DNA, 33 bp, Homo sapien
ggagttcattatttcacgcattggctagtcata

SEQ ID NO: 420542 - DNA, 33 bp, Homo sapien
ggagttcattatttcaggcattggctagtcata

SEQ ID NO: 420543 - DNA, 33 bp, Homo sapien
ttctgatttttgtacagaagcaagacctatgcc

SEQ ID NO: 420544 - DNA, 33 bp, Homo sapien
ttctgatttttgtacataagcaagacctatgcc

SEQ ID NO: 420545 - DNA, 33 bp, Homo sapien
cattttcaggcaacaaataagtgcaagtccaca

SEQ ID NO: 420546 - DNA, 33 bp, Homo sapien
cattttcaggcaacaagtaagtgcaagtccaca

SEQ ID NO: 420547 - DNA, 33 bp, Homo sapien
ccacatttaaaattggaaattatttgccattgt

SEQ ID NO: 420548 - DNA, 33 bp, Homo sapien
ccacatttaaaattggtaattatttgccattgt

SEQ ID NO: 420549 - DNA, 33 bp, Homo sapien
aatgcccttactcgtcacagtttaaacacttag

SEQ ID NO: 420550 - DNA, 33 bp, Homo sapien
aatgcccttactcgtcgcagtttaaacacttag

SEQ ID NO: 420551 - DNA, 33 bp, Homo sapien
gttcctattctgaggaaaaaaatcatagctcta

SEQ ID NO: 420552 - DNA, 33 bp, Homo sapien
gttcctattctgaggagaaaaatcatagctcta

SEQ ID NO: 420553 - DNA, 33 bp, Homo sapien
aaaagctatgtgaaagccaggaaaatggaaaat

SEQ ID NO: 420554 - DNA, 33 bp, Homo sapien
aaaagctatgtgaaagtcaggaaaatggaaaat

SEQ ID NO: 420555 - DNA, 33 bp, Homo sapien
gacctgttccagctccaagaaggtatatggagc

SEQ ID NO: 420556 - DNA, 33 bp, Homo sapien
gacctgttccagctccgagaaggtatatggagc

SEQ ID NO: 420557 - DNA, 33 bp, Homo sapien
tgatggttctcaattacgtctgatgcctgagct

SEQ ID NO: 420558 - DNA, 33 bp, Homo sapien
tgatggttctcaattatgtctgatgcctgagct

SEQ ID NO: 420559 - DNA, 33 bp, Homo sapien
aagtaactgagtaagacagtgattctcaaaaga

SEQ ID NO: 420560 - DNA, 33 bp, Homo sapien
aagtaactgagtaagatagtgattctcaaaaga

SEQ ID NO: 420561 - DNA, 33 bp, Homo sapien
ctcactctgtgtgtgaagtaagttctttcttcc

SEQ ID NO: 420562 - DNA, 33 bp, Homo sapien
ctcactctgtgtgtgaggtaagttctttcttcc

SEQ ID NO: 420563 - DNA, 33 bp, Homo sapien
aataaaggcactaaccgcattcaggacagccga

SEQ ID NO: 420564 - DNA, 33 bp, Homo sapien
aataaaggcactaacctcattcaggacagccga

SEQ ID NO: 420565 - DNA, 33 bp, Homo sapien
acacaaaatgtaatcccgagctcacttctccac

SEQ ID NO: 420566 - DNA, 33 bp, Homo sapien
acacaaaatgtaatcctgagctcacttctccac

SEQ ID NO: 420567 - DNA, 33 bp, Homo sapien
tgtcatgcaatagttgcagtgactagcctggaa

SEQ ID NO: 420568 - DNA, 33 bp, Homo sapien
tgtcatgcaatagttgtagtgactagcctggaa

SEQ ID NO: 420569 - DNA, 33 bp, Homo sapien
gaatgtattttgttaaatgactccctgaattca

SEQ ID NO: 420570 - DNA, 33 bp, Homo sapien
gaatgtattttgttaattgactccctgaattca

SEQ ID NO: 420571 - DNA, 33 bp, Homo sapien
atttaacaagatagacaatattttggcccaaaa

SEQ ID NO: 420572 - DNA, 33 bp, Homo sapien
atttaacaagatagactatattttggcccaaaa

SEQ ID NO: 420573 - DNA, 33 bp, Homo sapien
tgccacttcatacccaataggatagccataagg

SEQ ID NO: 420574 - DNA, 33 bp, Homo sapien
tgccacttcatacccactaggatagccataagg

SEQ ID NO: 420575 - DNA, 33 bp, Homo sapien
aaactacatattttcacctaagatcagtaacaa

SEQ ID NO: 420576 - DNA, 33 bp, Homo sapien
aaactacatattttcatctaagatcagtaacaa

SEQ ID NO: 420577 - DNA, 33 bp, Homo sapien
aatatataatatccacacatagtgttcatgcag

SEQ ID NO: 420578 - DNA, 33 bp, Homo sapien
aatatataatatccacgcatagtgttcatgcag

SEQ ID NO: 420579 - DNA, 33 bp, Homo sapien
ataaatgggaaatgtaggatttcataaaattac

SEQ ID NO: 420580 - DNA, 33 bp, Homo sapien
ataaatgggaaatgtatgatttcataaaattac

SEQ ID NO: 420581 - DNA, 33 bp, Homo sapien
tctcatataggcattcccatatacagtcatgac

SEQ ID NO: 420582 - DNA, 33 bp, Homo sapien
tctcatataggcattctcatatacagtcatgac

SEQ ID NO: 420583 - DNA, 33 bp, Homo sapien
aacaaaggaaggtggaagaagagaagaaacttc

SEQ ID NO: 420584 - DNA, 33 bp, Homo sapien
aacaaaggaaggtggacgaagagaagaaacttc

SEQ ID NO: 420585 - DNA, 33 bp, Homo sapien
ccacgcagaaatcacagtgtctttgttttcact

SEQ ID NO: 420586 - DNA, 33 bp, Homo sapien
ccacgcagaaatcacattgtctttgttttcact

SEQ ID NO: 420587 - DNA, 33 bp, Homo sapien
gttgttattaagtgcaactattatcaagcaagc

SEQ ID NO: 420588 - DNA, 33 bp, Homo sapien
gttgttattaagtgcagctattatcaagcaagc

SEQ ID NO: 420589 - DNA, 33 bp, Homo sapien
tccattcattaactaaattagcggaaattaaat

SEQ ID NO: 420590 - DNA, 33 bp, Homo sapien
tccattcattaactaagttagcggaaattaaat

SEQ ID NO: 420591 - DNA, 33 bp, Homo sapien
ctttccaacaggtgcaatcaagtcatccgtgta

SEQ ID NO: 420592 - DNA, 33 bp, Homo sapien
ctttccaacaggtgcagtcaagtcatccgtgta

SEQ ID NO: 420593 - DNA, 33 bp, Homo sapien
gcaagcaggatagagaaaatggttatgaggagg

SEQ ID NO: 420594 - DNA, 33 bp, Homo sapien
gcaagcaggatagagagaatggttatgaggagg

SEQ ID NO: 420595 - DNA, 33 bp, Homo sapien
ctttctccagaatgctaactttttttttcctga

SEQ ID NO: 420596 - DNA, 33 bp, Homo sapien
ctttctccagaatgcttactttttttttcctga

SEQ ID NO: 420597 - DNA, 33 bp, Homo sapien
tggctgttacagtgaacattaaagacttaaaat

SEQ ID NO: 420598 - DNA, 33 bp, Homo sapien
tggctgttacagtgaatattaaagacttaaaat

SEQ ID NO: 420599 - DNA, 33 bp, Homo sapien
aagcagaagggttgcacgtgtcaagtcagggaa

SEQ ID NO: 420600 - DNA, 33 bp, Homo sapien
aagcagaagggttgcatgtgtcaagtcagggaa

SEQ ID NO: 420601 - DNA, 33 bp, Homo sapien
atactgtcctctatggcaacaatagtagattgg

SEQ ID NO: 420602 - DNA, 33 bp, Homo sapien
atactgtcctctatggtaacaatagtagattgg

SEQ ID NO: 420603 - DNA, 33 bp, Homo sapien
agcattcccaacttcacgcctggatgttttccc

SEQ ID NO: 420604 - DNA, 33 bp, Homo sapien
agcattcccaacttcatgcctggatgttttccc

SEQ ID NO: 420605 - DNA, 33 bp, Homo sapien
taataagcatgaagcaatagagtataatatgtc

SEQ ID NO: 420606 - DNA, 33 bp, Homo sapien
taataagcatgaagcagtagagtataatatgtc

SEQ ID NO: 420607 - DNA, 33 bp, Homo sapien
taatgagcttgatgcaatcaaaaccactcaaga

SEQ ID NO: 420608 - DNA, 33 bp, Homo sapien
taatgagcttgatgcagtcaaaaccactcaaga

SEQ ID NO: 420609 - DNA, 33 bp, Homo sapien
atcagataatgttgaactacctagtaaactgtt

SEQ ID NO: 420610 - DNA, 33 bp, Homo sapien
atcagataatgttgaagtacctagtaaactgtt

SEQ ID NO: 420611 - DNA, 33 bp, Homo sapien
ttgctccagattacaacacagccaggaagttat

SEQ ID NO: 420612 - DNA, 33 bp, Homo sapien
ttgctccagattacaatacagccaggaagttat

SEQ ID NO: 420613 - DNA, 33 bp, Homo sapien
aactcctatggggctaaggagatcaattttata

SEQ ID NO: 420614 - DNA, 33 bp, Homo sapien
aactcctatggggctacggagatcaattttata

SEQ ID NO: 420615 - DNA, 33 bp, Homo sapien
ttctcggctttttgaacgtatgactgaagggaa

SEQ ID NO: 420616 - DNA, 33 bp, Homo sapien
ttctcggctttttgaatgtatgactgaagggaa

SEQ ID NO: 420617 - DNA, 33 bp, Homo sapien
ccatcagaccaagaaaagggctctggcccaacc

SEQ ID NO: 420618 - DNA, 33 bp, Homo sapien
ccatcagaccaagaaacgggctctggcccaacc

SEQ ID NO: 420619 - DNA, 33 bp, Homo sapien
gtggcctttccatcagaaccgtctcaggacttg

SEQ ID NO: 420620 - DNA, 33 bp, Homo sapien
gtggcctttccatcaggaccgtctcaggacttg

SEQ ID NO: 420621 - DNA, 33 bp, Homo sapien
tttaaagctacacacaataaaaggtgcaggtag

SEQ ID NO: 420622 - DNA, 33 bp, Homo sapien
tttaaagctacacacagtaaaaggtgcaggtag

SEQ ID NO: 420623 - DNA, 33 bp, Homo sapien
atatatgaggcaaatacctttttcatattgaga

SEQ ID NO: 420624 - DNA, 33 bp, Homo sapien
atatatgaggcaaatatctttttcatattgaga

SEQ ID NO: 420625 - DNA, 33 bp, Homo sapien
aggtctggaaccctaaaaccagtctgcgttgtc

SEQ ID NO: 420626 - DNA, 33 bp, Homo sapien
aggtctggaaccctaataccagtctgcgttgtc

SEQ ID NO: 420627 - DNA, 33 bp, Homo sapien
ttcataaaggttgaaaacagattttgcatttgt

SEQ ID NO: 420628 - DNA, 33 bp, Homo sapien
ttcataaaggttgaaaccagattttgcatttgt

SEQ ID NO: 420629 - DNA, 33 bp, Homo sapien
caaaagtacttaaggaatacaaatgcaaaatct

SEQ ID NO: 420630 - DNA, 33 bp, Homo sapien
caaaagtacttaaggagtacaaatgcaaaatct

SEQ ID NO: 420631 - DNA, 33 bp, Homo sapien
agtaagggccataatacagatatgcaaagtgtt

SEQ ID NO: 420632 - DNA, 33 bp, Homo sapien
agtaagggccataatagagatatgcaaagtgtt

SEQ ID NO: 420633 - DNA, 33 bp, Homo sapien
gggtttgtcatctcgcagcaggaaaatttagga

SEQ ID NO: 420634 - DNA, 33 bp, Homo sapien
gggtttgtcatctcgcggcaggaaaatttagga

SEQ ID NO: 420635 - DNA, 33 bp, Homo sapien
tttcttttccaagaacaaacaaggatcagaaag

SEQ ID NO: 420636 - DNA, 33 bp, Homo sapien
tttcttttccaagaacgaacaaggatcagaaag

SEQ ID NO: 420637 - DNA, 33 bp, Homo sapien
taggttattataccacacaacttaattctcaaa

SEQ ID NO: 420638 - DNA, 33 bp, Homo sapien
taggttattataccacgcaacttaattctcaaa

SEQ ID NO: 420639 - DNA, 33 bp, Homo sapien
gaaaatctgtttattgaaaaggacaaaagggaa

SEQ ID NO: 420640 - DNA, 33 bp, Homo sapien
gaaaatctgtttattgcaaaggacaaaagggaa

SEQ ID NO: 420641 - DNA, 33 bp, Homo sapien
gacaaaagggaatccagattgggctaggaagct

SEQ ID NO: 420642 - DNA, 33 bp, Homo sapien
gacaaaagggaatccatattgggctaggaagct

SEQ ID NO: 420643 - DNA, 33 bp, Homo sapien
acatagagagagataacacaagatgacctcaag

SEQ ID NO: 420644 - DNA, 33 bp, Homo sapien
acatagagagagataagacaagatgacctcaag

SEQ ID NO: 420645 - DNA, 33 bp, Homo sapien
gcttcatggtgctcaactggatatgcttcacag

SEQ ID NO: 420646 - DNA, 33 bp, Homo sapien
gcttcatggtgctcaattggatatgcttcacag

SEQ ID NO: 420647 - DNA, 33 bp, Homo sapien
attacagtaggaatatcagggtaggaaagtaga

SEQ ID NO: 420648 - DNA, 33 bp, Homo sapien
attacagtaggaatattagggtaggaaagtaga

SEQ ID NO: 420649 - DNA, 33 bp, Homo sapien
atgcaggaagcaataacatgtggcactattgtc

SEQ ID NO: 420650 - DNA, 33 bp, Homo sapien
atgcaggaagcaataagatgtggcactattgtc

SEQ ID NO: 420651 - DNA, 33 bp, Homo sapien
aatgttaattgctctcgaatgtcatcagatctt

SEQ ID NO: 420652 - DNA, 33 bp, Homo sapien
aatgttaattgctctctaatgtcatcagatctt

SEQ ID NO: 420653 - DNA, 33 bp, Homo sapien
ataaagaaggcctaaacaaatgcaaaggaatat

SEQ ID NO: 420654 - DNA, 33 bp, Homo sapien
ataaagaaggcctaaagaaatgcaaaggaatat

SEQ ID NO: 420655 - DNA, 33 bp, Homo sapien
tacaaatcagccttagcatttacttcctgcttg

SEQ ID NO: 420656 - DNA, 33 bp, Homo sapien
tacaaatcagccttagtatttacttcctgcttg

SEQ ID NO: 420657 - DNA, 33 bp, Homo sapien
gttacaccttgagtggcaagactgtcaccaggt

SEQ ID NO: 420658 - DNA, 33 bp, Homo sapien
gttacaccttgagtggtaagactgtcaccaggt

SEQ ID NO: 420659 - DNA, 33 bp, Homo sapien
ttttcagctcaccagacccgaacatattttgtt

SEQ ID NO: 420660 - DNA, 33 bp, Homo sapien
ttttcagctcaccagatccgaacatattttgtt

SEQ ID NO: 420661 - DNA, 33 bp, Homo sapien
ggattttgaatgaacccgggaggtattgtcttg

SEQ ID NO: 420662 - DNA, 33 bp, Homo sapien
ggattttgaatgaacctgggaggtattgtcttg

SEQ ID NO: 420663 - DNA, 33 bp, Homo sapien
aatatcccatggaatacgactcgaccaatgaaa

SEQ ID NO: 420664 - DNA, 33 bp, Homo sapien
aatatcccatggaatatgactcgaccaatgaaa

SEQ ID NO: 420665 - DNA, 33 bp, Homo sapien
aggaagactaggataacggctaagaaggaaaaa

SEQ ID NO: 420666 - DNA, 33 bp, Homo sapien
aggaagactaggataatggctaagaaggaaaaa

SEQ ID NO: 420667 - DNA, 33 bp, Homo sapien
ctctttatgtcacttacctgtcttgctggtttt

SEQ ID NO: 420668 - DNA, 33 bp, Homo sapien
ctctttatgtcacttatctgtcttgctggtttt

SEQ ID NO: 420669 - DNA, 33 bp, Homo sapien
aagggaggagacgtgcagagttaggaatgaagc

SEQ ID NO: 420670 - DNA, 33 bp, Homo sapien
aagggaggagacgtgcggagttaggaatgaagc

SEQ ID NO: 420671 - DNA, 33 bp, Homo sapien
gttttgaagtcagaaaaaaatgaatccatgcct

SEQ ID NO: 420672 - DNA, 33 bp, Homo sapien
gttttgaagtcagaaataaatgaatccatgcct

SEQ ID NO: 420673 - DNA, 33 bp, Homo sapien
cttgccgtagtgatacaccattctccaatatac

SEQ ID NO: 420674 - DNA, 33 bp, Homo sapien
cttgccgtagtgatacgccattctccaatatac

SEQ ID NO: 420675 - DNA, 33 bp, Homo sapien
aagataaaaagctggacggaaagttgaacttac

SEQ ID NO: 420676 - DNA, 33 bp, Homo sapien
aagataaaaagctggatggaaagttgaacttac

SEQ ID NO: 420677 - DNA, 33 bp, Homo sapien
tacccaggtaagaggaaaacagaaagatgtaga

SEQ ID NO: 420678 - DNA, 33 bp, Homo sapien
tacccaggtaagaggagaacagaaagatgtaga

SEQ ID NO: 420679 - DNA, 33 bp, Homo sapien
tctcagcagtggtaaaacatcgtaactgggcat

SEQ ID NO: 420680 - DNA, 33 bp, Homo sapien
tctcagcagtggtaaagcatcgtaactgggcat

SEQ ID NO: 420681 - DNA, 33 bp, Homo sapien
ttgtgctaatagtctggacttgttttaaagacc

SEQ ID NO: 420682 - DNA, 33 bp, Homo sapien
ttgtgctaatagtctgtacttgttttaaagacc

SEQ ID NO: 420683 - DNA, 33 bp, Homo sapien
acagtggaagaggagaatcggttagaagacaaa

SEQ ID NO: 420684 - DNA, 33 bp, Homo sapien
acagtggaagaggagagtcggttagaagacaaa

SEQ ID NO: 420685 - DNA, 33 bp, Homo sapien
ttctctggccaataacactgtgatgccattaag

SEQ ID NO: 420686 - DNA, 33 bp, Homo sapien
ttctctggccaataacgctgtgatgccattaag

SEQ ID NO: 420687 - DNA, 33 bp, Homo sapien
aaataataatattcacactatgacaccataagc

SEQ ID NO: 420688 - DNA, 33 bp, Homo sapien
aaataataatattcacgctatgacaccataagc

SEQ ID NO: 420689 - DNA, 33 bp, Homo sapien
gaagagtgaacaatagaactttcatgcttcaga

SEQ ID NO: 420690 - DNA, 33 bp, Homo sapien
gaagagtgaacaataggactttcatgcttcaga

SEQ ID NO: 420691 - DNA, 33 bp, Homo sapien
gagtgcatggatgcgacgtgaatctgagggtat

SEQ ID NO: 420692 - DNA, 33 bp, Homo sapien
gagtgcatggatgcgatgtgaatctgagggtat

SEQ ID NO: 420693 - DNA, 33 bp, Homo sapien
cgcctctctccacaaccgagggccatggaaatg

SEQ ID NO: 420694 - DNA, 33 bp, Homo sapien
cgcctctctccacaactgagggccatggaaatg

SEQ ID NO: 420695 - DNA, 33 bp, Homo sapien
gggccatggaaatgccacttagcctctccagat

SEQ ID NO: 420696 - DNA, 33 bp, Homo sapien
gggccatggaaatgccgcttagcctctccagat

SEQ ID NO: 420697 - DNA, 33 bp, Homo sapien
agaagtttgaacttccaatggttctgtggagaa

SEQ ID NO: 420698 - DNA, 33 bp, Homo sapien
agaagtttgaacttccgatggttctgtggagaa

SEQ ID NO: 420699 - DNA, 33 bp, Homo sapien
cctggttagattttgaagacagcatgcatcctt

SEQ ID NO: 420700 - DNA, 33 bp, Homo sapien
cctggttagattttgaggacagcatgcatcctt

SEQ ID NO: 420701 - DNA, 33 bp, Homo sapien
acgctccgggaactagaagaatagtgctttgcc

SEQ ID NO: 420702 - DNA, 33 bp, Homo sapien
acgctccgggaactagcagaatagtgctttgcc

SEQ ID NO: 420703 - DNA, 33 bp, Homo sapien
taaggcaagaggaaaacgaagaatgagagaagg

SEQ ID NO: 420704 - DNA, 33 bp, Homo sapien
taaggcaagaggaaaatgaagaatgagagaagg

SEQ ID NO: 420705 - DNA, 33 bp, Homo sapien
catccctccacctgccagaagcttgtccatgcc

SEQ ID NO: 420706 - DNA, 33 bp, Homo sapien
catccctccacctgccggaagcttgtccatgcc

SEQ ID NO: 420707 - DNA, 33 bp, Homo sapien
cccatcaattgtacccccataagacaggctgtc

SEQ ID NO: 420708 - DNA, 33 bp, Homo sapien
cccatcaattgtacccgcataagacaggctgtc

SEQ ID NO: 420709 - DNA, 33 bp, Homo sapien
tttgtggttgtgtctaaggttaagagaatttta

SEQ ID NO: 420710 - DNA, 33 bp, Homo sapien
tttgtggttgtgtctagggttaagagaatttta

SEQ ID NO: 420711 - DNA, 33 bp, Homo sapien
ggtacaatactcagcaaattacatgagctagtc

SEQ ID NO: 420712 - DNA, 33 bp, Homo sapien
ggtacaatactcagcagattacatgagctagtc

SEQ ID NO: 420713 - DNA, 33 bp, Homo sapien
ctggaggagtcagctacaatattactgtatatg

SEQ ID NO: 420714 - DNA, 33 bp, Homo sapien
ctggaggagtcagctagaatattactgtatatg

SEQ ID NO: 420715 - DNA, 33 bp, Homo sapien
atttacttgatagcaaatgatggttgaatagag

SEQ ID NO: 420716 - DNA, 33 bp, Homo sapien
atttacttgatagcaagtgatggttgaatagag

SEQ ID NO: 420717 - DNA, 33 bp, Homo sapien
acaaaggtaaggattcaaagtgtgtgaatttca

SEQ ID NO: 420718 - DNA, 33 bp, Homo sapien
acaaaggtaaggattcgaagtgtgtgaatttca

SEQ ID NO: 420719 - DNA, 33 bp, Homo sapien
gggacctccttgggcaaaaatcatccgtagctc

SEQ ID NO: 420720 - DNA, 33 bp, Homo sapien
gggacctccttgggcagaaatcatccgtagctc

SEQ ID NO: 420721 - DNA, 33 bp, Homo sapien
agagtttcgccctaaccgaacgccaagtgcaag

SEQ ID NO: 420722 - DNA, 33 bp, Homo sapien
agagtttcgccctaactgaacgccaagtgcaag

SEQ ID NO: 420723 - DNA, 33 bp, Homo sapien
attactgttttagtacagaggaatgtaagggac

SEQ ID NO: 420724 - DNA, 33 bp, Homo sapien
attactgttttagtacggaggaatgtaagggac

SEQ ID NO: 420725 - DNA, 33 bp, Homo sapien
tgataagtatgattccaaattgctgtcccatac

SEQ ID NO: 420726 - DNA, 33 bp, Homo sapien
tgataagtatgattccgaattgctgtcccatac

SEQ ID NO: 420727 - DNA, 33 bp, Homo sapien
agctgtacagtggaaaaatcaataggccatact

SEQ ID NO: 420728 - DNA, 33 bp, Homo sapien
agctgtacagtggaaacatcaataggccatact

SEQ ID NO: 420729 - DNA, 33 bp, Homo sapien
gcaatgatttttcagaagtctacatgatataga

SEQ ID NO: 420730 - DNA, 33 bp, Homo sapien
gcaatgatttttcagaggtctacatgatataga

SEQ ID NO: 420731 - DNA, 33 bp, Homo sapien
ggcacaaattcagatgccatcgctttgttgatc

SEQ ID NO: 420732 - DNA, 33 bp, Homo sapien
ggcacaaattcagatgtcatcgctttgttgatc

SEQ ID NO: 420733 - DNA, 33 bp, Homo sapien
gtagcaataaagacaactgttcagtaccctcta

SEQ ID NO: 420734 - DNA, 33 bp, Homo sapien
gtagcaataaagacaattgttcagtaccctcta

SEQ ID NO: 420735 - DNA, 33 bp, Homo sapien
tcagtagttaagaggaaaaatggccctggacat

SEQ ID NO: 420736 - DNA, 33 bp, Homo sapien
tcagtagttaagaggacaaatggccctggacat

SEQ ID NO: 420737 - DNA, 33 bp, Homo sapien
aaggcctaacatagcaatgatacatggtagcca

SEQ ID NO: 420738 - DNA, 33 bp, Homo sapien
aaggcctaacatagcattgatacatggtagcca

SEQ ID NO: 420739 - DNA, 33 bp, Homo sapien
gaaaactgaaaccttacacattacaggattgtt

SEQ ID NO: 420740 - DNA, 33 bp, Homo sapien
gaaaactgaaaccttatacattacaggattgtt

SEQ ID NO: 420741 - DNA, 33 bp, Homo sapien
aggacacacttcagcacaactcagcacagggag

SEQ ID NO: 420742 - DNA, 33 bp, Homo sapien
aggacacacttcagcataactcagcacagggag

SEQ ID NO: 420743 - DNA, 33 bp, Homo sapien
atggcttgggacaaaacgcttgagattgaaata

SEQ ID NO: 420744 - DNA, 33 bp, Homo sapien
atggcttgggacaaaatgcttgagattgaaata

SEQ ID NO: 420745 - DNA, 33 bp, Homo sapien
accgagatggattaacaggggaaagatgaacct

SEQ ID NO: 420746 - DNA, 33 bp, Homo sapien
accgagatggattaaccggggaaagatgaacct

SEQ ID NO: 420747 - DNA, 33 bp, Homo sapien
agctctgtgggcaaaagaaagacccaaacaccg

SEQ ID NO: 420748 - DNA, 33 bp, Homo sapien
agctctgtgggcaaaataaagacccaaacaccg

SEQ ID NO: 420749 - DNA, 33 bp, Homo sapien
gaagggacaatggcttgaacaaaaacaatgagg

SEQ ID NO: 420750 - DNA, 33 bp, Homo sapien
gaagggacaatggctttaacaaaaacaatgagg

SEQ ID NO: 420751 - DNA, 33 bp, Homo sapien
ccccccaccggaaatacagagagatgagtaaat

SEQ ID NO: 420752 - DNA, 33 bp, Homo sapien
ccccccaccggaaatagagagagatgagtaaat

SEQ ID NO: 420753 - DNA, 33 bp, Homo sapien
ttcctcattagcataaggtttggactcctgaaa

SEQ ID NO: 420754 - DNA, 33 bp, Homo sapien
ttcctcattagcataatgtttggactcctgaaa

SEQ ID NO: 420755 - DNA, 33 bp, Homo sapien
tcaccaaagccgtttacgatattccaggtccgt

SEQ ID NO: 420756 - DNA, 33 bp, Homo sapien
tcaccaaagccgtttatgatattccaggtccgt

SEQ ID NO: 420757 - DNA, 33 bp, Homo sapien
gtgaccgtaaaacacaataatttgcctgtttta

SEQ ID NO: 420758 - DNA, 33 bp, Homo sapien
gtgaccgtaaaacacagtaatttgcctgtttta

SEQ ID NO: 420759 - DNA, 33 bp, Homo sapien
aatatacaaaatcataggcttgaatttagtggc

SEQ ID NO: 420760 - DNA, 33 bp, Homo sapien
aatatacaaaatcatatgcttgaatttagtggc

SEQ ID NO: 420761 - DNA, 33 bp, Homo sapien
accaagccttacagtgaatacttgtgaactgtt

SEQ ID NO: 420762 - DNA, 33 bp, Homo sapien
accaagccttacagtggatacttgtgaactgtt

SEQ ID NO: 420763 - DNA, 33 bp, Homo sapien
agtttcgttgctaaaagtttggttgcttaaagt

SEQ ID NO: 420764 - DNA, 33 bp, Homo sapien
agtttcgttgctaaaattttggttgcttaaagt

SEQ ID NO: 420765 - DNA, 33 bp, Homo sapien
gaatgacaacggcgctaagaacagtaagtcatg

SEQ ID NO: 420766 - DNA, 33 bp, Homo sapien
gaatgacaacggcgctgagaacagtaagtcatg

SEQ ID NO: 420767 - DNA, 33 bp, Homo sapien
ccagagcagggctaaactgtgtttgaaagaaca

SEQ ID NO: 420768 - DNA, 33 bp, Homo sapien
ccagagcagggctaaattgtgtttgaaagaaca

SEQ ID NO: 420769 - DNA, 33 bp, Homo sapien
catcttttagttcatacggccctgccttttatt

SEQ ID NO: 420770 - DNA, 33 bp, Homo sapien
catcttttagttcatatggccctgccttttatt

SEQ ID NO: 420771 - DNA, 33 bp, Homo sapien
tgatattcctaaaagcagaagcaaagaggaata

SEQ ID NO: 420772 - DNA, 33 bp, Homo sapien
tgatattcctaaaagccgaagcaaagaggaata

SEQ ID NO: 420773 - DNA, 33 bp, Homo sapien
tatgtgtctcgtttccaagattccttggacagg

SEQ ID NO: 420774 - DNA, 33 bp, Homo sapien
tatgtgtctcgtttcctagattccttggacagg

SEQ ID NO: 420775 - DNA, 33 bp, Homo sapien
agccagtttccgtgaaaaagcattagtatcacc

SEQ ID NO: 420776 - DNA, 33 bp, Homo sapien
agccagtttccgtgaagaagcattagtatcacc

SEQ ID NO: 420777 - DNA, 33 bp, Homo sapien
atgattgcttatactcagagctccatctcatag

SEQ ID NO: 420778 - DNA, 33 bp, Homo sapien
atgattgcttatactccgagctccatctcatag

SEQ ID NO: 420779 - DNA, 33 bp, Homo sapien
atttctgattctttggacacacagggactttct

SEQ ID NO: 420780 - DNA, 33 bp, Homo sapien
atttctgattctttggtcacacagggactttct

SEQ ID NO: 420781 - DNA, 33 bp, Homo sapien
gggctatgaaatagtccattcagtgaaactagt

SEQ ID NO: 420782 - DNA, 33 bp, Homo sapien
gggctatgaaatagtctattcagtgaaactagt

SEQ ID NO: 420783 - DNA, 33 bp, Homo sapien
atcaaactaaacagaaacttgcttaatatgaac

SEQ ID NO: 420784 - DNA, 33 bp, Homo sapien
atcaaactaaacagaagcttgcttaatatgaac

SEQ ID NO: 420785 - DNA, 33 bp, Homo sapien
acatggggactattgtaaatgtattgcatactt

SEQ ID NO: 420786 - DNA, 33 bp, Homo sapien
acatggggactattgttaatgtattgcatactt

SEQ ID NO: 420787 - DNA, 33 bp, Homo sapien
caaatcaaagaaaaccaaaaggaatgccatgag

SEQ ID NO: 420788 - DNA, 33 bp, Homo sapien
caaatcaaagaaaaccgaaaggaatgccatgag

SEQ ID NO: 420789 - DNA, 33 bp, Homo sapien
aaatttaatggatggccctttcttatacaatta

SEQ ID NO: 420790 - DNA, 33 bp, Homo sapien
aaatttaatggatggctctttcttatacaatta

SEQ ID NO: 420791 - DNA, 33 bp, Homo sapien
tatcaacaaactgataccttggctgaaatgagt

SEQ ID NO: 420792 - DNA, 33 bp, Homo sapien
tatcaacaaactgatatcttggctgaaatgagt

SEQ ID NO: 420793 - DNA, 33 bp, Homo sapien
ggctgcttaacttctccatgtcaagaaacagct

SEQ ID NO: 420794 - DNA, 33 bp, Homo sapien
ggctgcttaacttctctatgtcaagaaacagct

SEQ ID NO: 420795 - DNA, 33 bp, Homo sapien
tatggttcatagcaacaatgtatatcacttctt

SEQ ID NO: 420796 - DNA, 33 bp, Homo sapien
tatggttcatagcaacgatgtatatcacttctt

SEQ ID NO: 420797 - DNA, 33 bp, Homo sapien
tagtttcatatgtgccgaaaataaaaggaaaaa

SEQ ID NO: 420798 - DNA, 33 bp, Homo sapien
tagtttcatatgtgcctaaaataaaaggaaaaa

SEQ ID NO: 420799 - DNA, 33 bp, Homo sapien
gaaaccatagatatcaacaaataattaagtgtt

SEQ ID NO: 420800 - DNA, 33 bp, Homo sapien
gaaaccatagatatcatcaaataattaagtgtt

SEQ ID NO: 420801 - DNA, 33 bp, Homo sapien
atataggtctgtgaaacgtgctggacatattaa

SEQ ID NO: 420802 - DNA, 33 bp, Homo sapien
atataggtctgtgaaatgtgctggacatattaa

SEQ ID NO: 420803 - DNA, 33 bp, Homo sapien
tcaacccacaacctccaaggataaattgtccca

SEQ ID NO: 420804 - DNA, 33 bp, Homo sapien
tcaacccacaacctccgaggataaattgtccca

SEQ ID NO: 420805 - DNA, 33 bp, Homo sapien
atgtggaggcaaagaagaagggtcattagcatc

SEQ ID NO: 420806 - DNA, 33 bp, Homo sapien
atgtggaggcaaagaataagggtcattagcatc

SEQ ID NO: 420807 - DNA, 33 bp, Homo sapien
aaaaaataaagaaaaaattcgctgggcatggta

SEQ ID NO: 420808 - DNA, 33 bp, Homo sapien
aaaaaataaagaaaaacttcgctgggcatggta

SEQ ID NO: 420809 - DNA, 33 bp, Homo sapien
aatgcttagcagtttaacagaaaaggaattccc

SEQ ID NO: 420810 - DNA, 33 bp, Homo sapien
aatgcttagcagtttaccagaaaaggaattccc

SEQ ID NO: 420811 - DNA, 33 bp, Homo sapien
gaaaacttggtaagtaagcaattctaattatgt

SEQ ID NO: 420812 - DNA, 33 bp, Homo sapien
gaaaacttggtaagtaggcaattctaattatgt

SEQ ID NO: 420813 - DNA, 33 bp, Homo sapien
aatatcaagcaaaacaagaattaagtagccaaa

SEQ ID NO: 420814 - DNA, 33 bp, Homo sapien
aatatcaagcaaaacaggaattaagtagccaaa

SEQ ID NO: 420815 - DNA, 33 bp, Homo sapien
gaccttgaggagagaaacttacccaactcatac

SEQ ID NO: 420816 - DNA, 33 bp, Homo sapien
gaccttgaggagagaagcttacccaactcatac

SEQ ID NO: 420817 - DNA, 33 bp, Homo sapien
tgaatcaaatcagaaccgtgagataccatctca

SEQ ID NO: 420818 - DNA, 33 bp, Homo sapien
tgaatcaaatcagaactgtgagataccatctca

SEQ ID NO: 420819 - DNA, 33 bp, Homo sapien
aaaaggacattgaaaccgagaaggctaagtaac

SEQ ID NO: 420820 - DNA, 33 bp, Homo sapien
aaaaggacattgaaactgagaaggctaagtaac

SEQ ID NO: 420821 - DNA, 33 bp, Homo sapien
ctgaagtccacgttctcactccaacattactaa

SEQ ID NO: 420822 - DNA, 33 bp, Homo sapien
ctgaagtccacgttcttactccaacattactaa

SEQ ID NO: 420823 - DNA, 33 bp, Homo sapien
atttataaattaactcaactgatgcacactgga

SEQ ID NO: 420824 - DNA, 33 bp, Homo sapien
atttataaattaactcgactgatgcacactgga

SEQ ID NO: 420825 - DNA, 33 bp, Homo sapien
ttgtaactctgctaaaactctaaagctttagta

SEQ ID NO: 420826 - DNA, 33 bp, Homo sapien
ttgtaactctgctaaatctctaaagctttagta

SEQ ID NO: 420827 - DNA, 33 bp, Homo sapien
cattttctttatctacacattggctgatgggca

SEQ ID NO: 420828 - DNA, 33 bp, Homo sapien
cattttctttatctactcattggctgatgggca

SEQ ID NO: 420829 - DNA, 33 bp, Homo sapien
ttgtccctaatgtaaccagcagaaattaaaaca

SEQ ID NO: 420830 - DNA, 33 bp, Homo sapien
ttgtccctaatgtaacgagcagaaattaaaaca

SEQ ID NO: 420831 - DNA, 33 bp, Homo sapien
tgaagccattcttacagggttaccaagaatttg

SEQ ID NO: 420832 - DNA, 33 bp, Homo sapien
tgaagccattcttacatggttaccaagaatttg

SEQ ID NO: 420833 - DNA, 33 bp, Homo sapien
tgttgctaaaaatatcagaagtaatgtgaagtg

SEQ ID NO: 420834 - DNA, 33 bp, Homo sapien
tgttgctaaaaatatcggaagtaatgtgaagtg

SEQ ID NO: 420835 - DNA, 33 bp, Homo sapien
gctcagagacaatacacggccaggaaaagattg

SEQ ID NO: 420836 - DNA, 33 bp, Homo sapien
gctcagagacaatacatggccaggaaaagattg

SEQ ID NO: 420837 - DNA, 33 bp, Homo sapien
cacaaacttcaccacaactggctgaactgaccc

SEQ ID NO: 420838 - DNA, 33 bp, Homo sapien
cacaaacttcaccacagctggctgaactgaccc

SEQ ID NO: 420839 - DNA, 33 bp, Homo sapien
aagaaaggccttttcccccacgattactgtgtt

SEQ ID NO: 420840 - DNA, 33 bp, Homo sapien
aagaaaggccttttccgccacgattactgtgtt

SEQ ID NO: 420841 - DNA, 33 bp, Homo sapien
ctgctaagttcctacaaagagacacgggtcctt

SEQ ID NO: 420842 - DNA, 33 bp, Homo sapien
ctgctaagttcctacagagagacacgggtcctt

SEQ ID NO: 420843 - DNA, 33 bp, Homo sapien
tattagggcataaaacacttattaattgagtga

SEQ ID NO: 420844 - DNA, 33 bp, Homo sapien
tattagggcataaaacgcttattaattgagtga

SEQ ID NO: 420845 - DNA, 33 bp, Homo sapien
acagatgtctgaaaaaatcaagttatcaaatag

SEQ ID NO: 420846 - DNA, 33 bp, Homo sapien
acagatgtctgaaaaattcaagttatcaaatag

SEQ ID NO: 420847 - DNA, 33 bp, Homo sapien
gagggaacagtgggaaagactttgacttgtgag

SEQ ID NO: 420848 - DNA, 33 bp, Homo sapien
gagggaacagtgggaaggactttgacttgtgag

SEQ ID NO: 420849 - DNA, 33 bp, Homo sapien
tctggcttgtgctataaagaaaggtggttttcc

SEQ ID NO: 420850 - DNA, 33 bp, Homo sapien
tctggcttgtgctatagagaaaggtggttttcc

SEQ ID NO: 420851 - DNA, 33 bp, Homo sapien
ttttccttgcttccgactcaggaaaagatccaa

SEQ ID NO: 420852 - DNA, 33 bp, Homo sapien
ttttccttgcttccgagtcaggaaaagatccaa

SEQ ID NO: 420853 - DNA, 33 bp, Homo sapien
ccagaacttccttcaaacttagcaagaaggcaa

SEQ ID NO: 420854 - DNA, 33 bp, Homo sapien
ccagaacttccttcaaccttagcaagaaggcaa

SEQ ID NO: 420855 - DNA, 33 bp, Homo sapien
tctgctttccttctccaatactgtaaactccaa

SEQ ID NO: 420856 - DNA, 33 bp, Homo sapien
tctgctttccttctccgatactgtaaactccaa

SEQ ID NO: 420857 - DNA, 33 bp, Homo sapien
attagatctgaggcataataaacttccatcaac

SEQ ID NO: 420858 - DNA, 33 bp, Homo sapien
attagatctgaggcatgataaacttccatcaac

SEQ ID NO: 420859 - DNA, 33 bp, Homo sapien
ccaacctaatgggtatcaagtagtaactcattg

SEQ ID NO: 420860 - DNA, 33 bp, Homo sapien
ccaacctaatgggtatgaagtagtaactcattg

SEQ ID NO: 420861 - DNA, 33 bp, Homo sapien
tttcagtttggaatgacgaaaaatatctgaaga

SEQ ID NO: 420862 - DNA, 33 bp, Homo sapien
tttcagtttggaatgatgaaaaatatctgaaga

SEQ ID NO: 420863 - DNA, 33 bp, Homo sapien
ctcatccaaactgttacgtttcttgcaatgtta

SEQ ID NO: 420864 - DNA, 33 bp, Homo sapien
ctcatccaaactgttatgtttcttgcaatgtta

SEQ ID NO: 420865 - DNA, 33 bp, Homo sapien
agcaacctgtaggctaaaaacagggcagagctg

SEQ ID NO: 420866 - DNA, 33 bp, Homo sapien
agcaacctgtaggctacaaacagggcagagctg

SEQ ID NO: 420867 - DNA, 33 bp, Homo sapien
tgtcttggccaacttaactcagaacaatagaga

SEQ ID NO: 420868 - DNA, 33 bp, Homo sapien
tgtcttggccaacttatctcagaacaatagaga

SEQ ID NO: 420869 - DNA, 33 bp, Homo sapien
aaaatgtaatatgaaaatacattgaccttaata

SEQ ID NO: 420870 - DNA, 33 bp, Homo sapien
aaaatgtaatatgaaagtacattgaccttaata

SEQ ID NO: 420871 - DNA, 33 bp, Homo sapien
taccataaagacccacacatgcaaacgttcatt

SEQ ID NO: 420872 - DNA, 33 bp, Homo sapien
taccataaagacccacgcatgcaaacgttcatt

SEQ ID NO: 420873 - DNA, 33 bp, Homo sapien
ttcaaagtttcaatgccctaaagttttcttgta

SEQ ID NO: 420874 - DNA, 33 bp, Homo sapien
ttcaaagtttcaatgctctaaagttttcttgta

SEQ ID NO: 420875 - DNA, 33 bp, Homo sapien
aacaacttctgtcaacactgtatccagaacata

SEQ ID NO: 420876 - DNA, 33 bp, Homo sapien
aacaacttctgtcaaccctgtatccagaacata

SEQ ID NO: 420877 - DNA, 33 bp, Homo sapien
gaaccagctaaccaaccgatgattacaataaca

SEQ ID NO: 420878 - DNA, 33 bp, Homo sapien
gaaccagctaaccaactgatgattacaataaca

SEQ ID NO: 420879 - DNA, 33 bp, Homo sapien
cttaatttctaaaggcagatccagaagtcagag

SEQ ID NO: 420880 - DNA, 33 bp, Homo sapien
cttaatttctaaaggcggatccagaagtcagag

SEQ ID NO: 420881 - DNA, 33 bp, Homo sapien
tttatgtcagataaacagaaatgtagtttacaa

SEQ ID NO: 420882 - DNA, 33 bp, Homo sapien
tttatgtcagataaacggaaatgtagtttacaa

SEQ ID NO: 420883 - DNA, 33 bp, Homo sapien
agaggtgggaaatatacggatcttgtaggcctt

SEQ ID NO: 420884 - DNA, 33 bp, Homo sapien
agaggtgggaaatatagggatcttgtaggcctt

SEQ ID NO: 420885 - DNA, 33 bp, Homo sapien
tggtccataattttaaatctggttgactacaaa

SEQ ID NO: 420886 - DNA, 33 bp, Homo sapien
tggtccataattttaagtctggttgactacaaa

SEQ ID NO: 420887 - DNA, 33 bp, Homo sapien
gatattcaggattgaaagagcaggctttgactc

SEQ ID NO: 420888 - DNA, 33 bp, Homo sapien
gatattcaggattgaaggagcaggctttgactc

SEQ ID NO: 420889 - DNA, 33 bp, Homo sapien
taggtggagtgaatataatagtgtataagaaag

SEQ ID NO: 420890 - DNA, 33 bp, Homo sapien
taggtggagtgaatattatagtgtataagaaag

SEQ ID NO: 420891 - DNA, 33 bp, Homo sapien
gtgaatttgatagtgaatataactggtgccacc

SEQ ID NO: 420892 - DNA, 33 bp, Homo sapien
gtgaatttgatagtgagtataactggtgccacc

SEQ ID NO: 420893 - DNA, 33 bp, Homo sapien
gactgatgtttgaagagattggttcagtataag

SEQ ID NO: 420894 - DNA, 33 bp, Homo sapien
gactgatgtttgaagatattggttcagtataag

SEQ ID NO: 420895 - DNA, 33 bp, Homo sapien
tgtaagaccagaatgaaaatgtcaaaaaagaga

SEQ ID NO: 420896 - DNA, 33 bp, Homo sapien
tgtaagaccagaatgagaatgtcaaaaaagaga

SEQ ID NO: 420897 - DNA, 33 bp, Homo sapien
aaagctataatcttcccaaaacaaagaaatgga

SEQ ID NO: 420898 - DNA, 33 bp, Homo sapien
aaagctataatcttcctaaaacaaagaaatgga

SEQ ID NO: 420899 - DNA, 33 bp, Homo sapien
tattatgaaaagcttcccccattccatgaggat

SEQ ID NO: 420900 - DNA, 33 bp, Homo sapien
tattatgaaaagcttctcccattccatgaggat

SEQ ID NO: 420901 - DNA, 33 bp, Homo sapien
aaggtgtgaccatatcccagattgatgctaaca

SEQ ID NO: 420902 - DNA, 33 bp, Homo sapien
aaggtgtgaccatatcgcagattgatgctaaca

SEQ ID NO: 420903 - DNA, 33 bp, Homo sapien
gtgcacctggctacacaagagtactaaggatcc

SEQ ID NO: 420904 - DNA, 33 bp, Homo sapien
gtgcacctggctacacgagagtactaaggatcc

SEQ ID NO: 420905 - DNA, 33 bp, Homo sapien
aagttatataatctcaagtctggaaaactttct

SEQ ID NO: 420906 - DNA, 33 bp, Homo sapien
aagttatataatctcacgtctggaaaactttct

SEQ ID NO: 420907 - DNA, 33 bp, Homo sapien
tgtcagagacaacccacgtacaacaatctcctt

SEQ ID NO: 420908 - DNA, 33 bp, Homo sapien
tgtcagagacaacccatgtacaacaatctcctt

SEQ ID NO: 420909 - DNA, 33 bp, Homo sapien
caatccatttatgtaccaggcacggttaaaaca

SEQ ID NO: 420910 - DNA, 33 bp, Homo sapien
caatccatttatgtacgaggcacggttaaaaca

SEQ ID NO: 420911 - DNA, 33 bp, Homo sapien
ccgatatgtggacaaaaaaaaattcagacagcc

SEQ ID NO: 420912 - DNA, 33 bp, Homo sapien
ccgatatgtggacaaacaaaaattcagacagcc

SEQ ID NO: 420913 - DNA, 33 bp, Homo sapien
gtcgtaactggtaaagcaggctcttctctcgca

SEQ ID NO: 420914 - DNA, 33 bp, Homo sapien
gtcgtaactggtaaagtaggctcttctctcgca

SEQ ID NO: 420915 - DNA, 33 bp, Homo sapien
caagaaaccttgtgtaaaacttataaagggaga

SEQ ID NO: 420916 - DNA, 33 bp, Homo sapien
caagaaaccttgtgtacaacttataaagggaga

SEQ ID NO: 420917 - DNA, 33 bp, Homo sapien
tctttctctatctatcactgttgctcttactca

SEQ ID NO: 420918 - DNA, 33 bp, Homo sapien
tctttctctatctatcgctgttgctcttactca

SEQ ID NO: 420919 - DNA, 33 bp, Homo sapien
tgcttctagataagtaccttgtgctcttaccta

SEQ ID NO: 420920 - DNA, 33 bp, Homo sapien
tgcttctagataagtatcttgtgctcttaccta

SEQ ID NO: 420921 - DNA, 33 bp, Homo sapien
acattattctgtatgccaaaaggttcattcatt

SEQ ID NO: 420922 - DNA, 33 bp, Homo sapien
acattattctgtatgctaaaaggttcattcatt

SEQ ID NO: 420923 - DNA, 33 bp, Homo sapien
caaaatgtgtgttagacgaaactctgacagttc

SEQ ID NO: 420924 - DNA, 33 bp, Homo sapien
caaaatgtgtgttagatgaaactctgacagttc

SEQ ID NO: 420925 - DNA, 33 bp, Homo sapien
aatagatgaagaattaaataagccggtgaatgt

SEQ ID NO: 420926 - DNA, 33 bp, Homo sapien
aatagatgaagaattatataagccggtgaatgt

SEQ ID NO: 420927 - DNA, 33 bp, Homo sapien
gatgagatactgtctcacagatgtcagaatgtc

SEQ ID NO: 420928 - DNA, 33 bp, Homo sapien
gatgagatactgtctcgcagatgtcagaatgtc

SEQ ID NO: 420929 - DNA, 33 bp, Homo sapien
tgagagcaaggaccaaatatctttaggctcacc

SEQ ID NO: 420930 - DNA, 33 bp, Homo sapien
tgagagcaaggaccaagtatctttaggctcacc

SEQ ID NO: 420931 - DNA, 33 bp, Homo sapien
aaatcttttctacctaataatacgcaaaatatt

SEQ ID NO: 420932 - DNA, 33 bp, Homo sapien
aaatcttttctacctactaatacgcaaaatatt

SEQ ID NO: 420933 - DNA, 33 bp, Homo sapien
agttgtatggtgcatacgtatctttttctgtgc

SEQ ID NO: 420934 - DNA, 33 bp, Homo sapien
agttgtatggtgcatatgtatctttttctgtgc

SEQ ID NO: 420935 - DNA, 33 bp, Homo sapien
taccttttcatcgtgaactcctagagagaactg

SEQ ID NO: 420936 - DNA, 33 bp, Homo sapien
taccttttcatcgtgagctcctagagagaactg

SEQ ID NO: 420937 - DNA, 33 bp, Homo sapien
tattatagcggaccttaaaaaatacgttatttg

SEQ ID NO: 420938 - DNA, 33 bp, Homo sapien
tattatagcggaccttcaaaaatacgttatttg

SEQ ID NO: 420939 - DNA, 33 bp, Homo sapien
tcatttagaatatgtacgcggaaggttagttaa

SEQ ID NO: 420940 - DNA, 33 bp, Homo sapien
tcatttagaatatgtatgcggaaggttagttaa

SEQ ID NO: 420941 - DNA, 33 bp, Homo sapien
tgactttagactcacaggaaactgggttttgac

SEQ ID NO: 420942 - DNA, 33 bp, Homo sapien
tgactttagactcacatgaaactgggttttgac

SEQ ID NO: 420943 - DNA, 33 bp, Homo sapien
agagtccaactgactacggtgcacttcctgctg

SEQ ID NO: 420944 - DNA, 33 bp, Homo sapien
agagtccaactgactatggtgcacttcctgctg

SEQ ID NO: 420945 - DNA, 33 bp, Homo sapien
tctttctttgtttctcaagtatgccacattagt

SEQ ID NO: 420946 - DNA, 33 bp, Homo sapien
tctttctttgtttctccagtatgccacattagt

SEQ ID NO: 420947 - DNA, 33 bp, Homo sapien
atatctcagacacctgcaaatgtacttaagaca

SEQ ID NO: 420948 - DNA, 33 bp, Homo sapien
atatctcagacacctgtaaatgtacttaagaca

SEQ ID NO: 420949 - DNA, 33 bp, Homo sapien
ggtcacaaggtacacacaaccaggtataaaatg

SEQ ID NO: 420950 - DNA, 33 bp, Homo sapien
ggtcacaaggtacacagaaccaggtataaaatg

SEQ ID NO: 420951 - DNA, 33 bp, Homo sapien
agctattttccattccaacaccatttttattaa

SEQ ID NO: 420952 - DNA, 33 bp, Homo sapien
agctattttccattcccacaccatttttattaa

SEQ ID NO: 420953 - DNA, 33 bp, Homo sapien
agcttttatcaattggacatcattctgcttata

SEQ ID NO: 420954 - DNA, 33 bp, Homo sapien
agcttttatcaattgggcatcattctgcttata

SEQ ID NO: 420955 - DNA, 33 bp, Homo sapien
gctgcctgagatcatcagagagtatgtatatga

SEQ ID NO: 420956 - DNA, 33 bp, Homo sapien
gctgcctgagatcatcggagagtatgtatatga

SEQ ID NO: 420957 - DNA, 33 bp, Homo sapien
agttttcttaggtctacagagtaatgagaaaga

SEQ ID NO: 420958 - DNA, 33 bp, Homo sapien
agttttcttaggtctatagagtaatgagaaaga

SEQ ID NO: 420959 - DNA, 33 bp, Homo sapien
ttttataccctaattacccctattatgcaacct

SEQ ID NO: 420960 - DNA, 33 bp, Homo sapien
ttttataccctaattatccctattatgcaacct

SEQ ID NO: 420961 - DNA, 33 bp, Homo sapien
ccctctaggcaagctcaccctttcccgcagctc

SEQ ID NO: 420962 - DNA, 33 bp, Homo sapien
ccctctaggcaagctctccctttcccgcagctc

SEQ ID NO: 420963 - DNA, 33 bp, Homo sapien
agaaccattaggacaacggcatttaaggaatgg

SEQ ID NO: 420964 - DNA, 33 bp, Homo sapien
agaaccattaggacaatggcatttaaggaatgg

SEQ ID NO: 420965 - DNA, 33 bp, Homo sapien
aacattaaatttaccaagtcagccatttttaag

SEQ ID NO: 420966 - DNA, 33 bp, Homo sapien
aacattaaatttaccatgtcagccatttttaag

SEQ ID NO: 420967 - DNA, 33 bp, Homo sapien
tattcaccagtaatatctaaactatgcattatt

SEQ ID NO: 420968 - DNA, 33 bp, Homo sapien
tattcaccagtaatatttaaactatgcattatt

SEQ ID NO: 420969 - DNA, 33 bp, Homo sapien
atttcttaagatcaaaaaccatacctcatttag

SEQ ID NO: 420970 - DNA, 33 bp, Homo sapien
atttcttaagatcaaacaccatacctcatttag

SEQ ID NO: 420971 - DNA, 33 bp, Homo sapien
aagttctttcaaaatgccagtgaaatagtgaat

SEQ ID NO: 420972 - DNA, 33 bp, Homo sapien
aagttctttcaaaatggcagtgaaatagtgaat

SEQ ID NO: 420973 - DNA, 33 bp, Homo sapien
agcatccactaacagacattctaactccaccgg

SEQ ID NO: 420974 - DNA, 33 bp, Homo sapien
agcatccactaacagatattctaactccaccgg

SEQ ID NO: 420975 - DNA, 33 bp, Homo sapien
tgctcttactaagtcacagaggcaaatccatct

SEQ ID NO: 420976 - DNA, 33 bp, Homo sapien
tgctcttactaagtcatagaggcaaatccatct

SEQ ID NO: 420977 - DNA, 33 bp, Homo sapien
cagagtagcagaaaaccgtaattcgtgagaata

SEQ ID NO: 420978 - DNA, 33 bp, Homo sapien
cagagtagcagaaaactgtaattcgtgagaata

SEQ ID NO: 420979 - DNA, 33 bp, Homo sapien
caataaagagtaaggaacatacctgaggaaaaa

SEQ ID NO: 420980 - DNA, 33 bp, Homo sapien
caataaagagtaaggagcatacctgaggaaaaa

SEQ ID NO: 420981 - DNA, 33 bp, Homo sapien
agctcttaaagggtgaaccccagccatcaggtg

SEQ ID NO: 420982 - DNA, 33 bp, Homo sapien
agctcttaaagggtgatccccagccatcaggtg

SEQ ID NO: 420983 - DNA, 33 bp, Homo sapien
tgggttatttgcaagacctatttgctattctgg

SEQ ID NO: 420984 - DNA, 33 bp, Homo sapien
tgggttatttgcaagatctatttgctattctgg

SEQ ID NO: 420985 - DNA, 33 bp, Homo sapien
atattaattaatgaatcagagcaagtgaaatct

SEQ ID NO: 420986 - DNA, 33 bp, Homo sapien
atattaattaatgaatgagagcaagtgaaatct

SEQ ID NO: 420987 - DNA, 33 bp, Homo sapien
ttgtgttgttctttgaataattcctgacactgt

SEQ ID NO: 420988 - DNA, 33 bp, Homo sapien
ttgtgttgttctttgagtaattcctgacactgt

SEQ ID NO: 420989 - DNA, 33 bp, Homo sapien
ttaatgatgagggaaactggacatctcagccag

SEQ ID NO: 420990 - DNA, 33 bp, Homo sapien
ttaatgatgagggaaattggacatctcagccag

SEQ ID NO: 420991 - DNA, 33 bp, Homo sapien
tatatcttgatgagggcacttgctatcttgcaa

SEQ ID NO: 420992 - DNA, 33 bp, Homo sapien
tatatcttgatgagggtacttgctatcttgcaa

SEQ ID NO: 420993 - DNA, 33 bp, Homo sapien
tctagtattggtaggaaagaaaggacatgagga

SEQ ID NO: 420994 - DNA, 33 bp, Homo sapien
tctagtattggtaggagagaaaggacatgagga

SEQ ID NO: 420995 - DNA, 33 bp, Homo sapien
aaagtatcatgttctggacaactttcttaatta

SEQ ID NO: 420996 - DNA, 33 bp, Homo sapien
aaagtatcatgttctgtacaactttcttaatta

SEQ ID NO: 420997 - DNA, 33 bp, Homo sapien
ccactgtaacagagacaaagaatgctttcacag

SEQ ID NO: 420998 - DNA, 33 bp, Homo sapien
ccactgtaacagagacgaagaatgctttcacag

SEQ ID NO: 420999 - DNA, 33 bp, Homo sapien
gaaacaacagggcagaacaaacatttgaagaaa

SEQ ID NO: 421000 - DNA, 33 bp, Homo sapien
gaaacaacagggcagagcaaacatttgaagaaa

SEQ ID NO: 421001 - DNA, 33 bp, Homo sapien
tactagacagttgctccctggatagtttattgg

SEQ ID NO: 421002 - DNA, 33 bp, Homo sapien
tactagacagttgctctctggatagtttattgg

SEQ ID NO: 421003 - DNA, 33 bp, Homo sapien
attcatgctctgaattaaagtccagaatgcctt

SEQ ID NO: 421004 - DNA, 33 bp, Homo sapien
attcatgctctgaattgaagtccagaatgcctt

SEQ ID NO: 421005 - DNA, 33 bp, Homo sapien
cttgtgtgagtctaaactggcaataccacgtag

SEQ ID NO: 421006 - DNA, 33 bp, Homo sapien
cttgtgtgagtctaaattggcaataccacgtag

SEQ ID NO: 421007 - DNA, 33 bp, Homo sapien
ttggccataccacaacagttgccatcagcctcc

SEQ ID NO: 421008 - DNA, 33 bp, Homo sapien
ttggccataccacaacggttgccatcagcctcc

SEQ ID NO: 421009 - DNA, 33 bp, Homo sapien
caatatccataagggagtagttctaggacctcc

SEQ ID NO: 421010 - DNA, 33 bp, Homo sapien
caatatccataagggattagttctaggacctcc

SEQ ID NO: 421011 - DNA, 33 bp, Homo sapien
tcctcgagttttggtacctacaggaggtcctag

SEQ ID NO: 421012 - DNA, 33 bp, Homo sapien
tcctcgagttttggtatctacaggaggtcctag

SEQ ID NO: 421013 - DNA, 33 bp, Homo sapien
aatgtaccgatagtaaagcattaattagtcaaa

SEQ ID NO: 421014 - DNA, 33 bp, Homo sapien
aatgtaccgatagtaacgcattaattagtcaaa

SEQ ID NO: 421015 - DNA, 33 bp, Homo sapien
aacctatatagacacacgagaagaaagatataa

SEQ ID NO: 421016 - DNA, 33 bp, Homo sapien
aacctatatagacacatgagaagaaagatataa

SEQ ID NO: 421017 - DNA, 33 bp, Homo sapien
aaagcataaatgaacacatacctcaaagagaaa

SEQ ID NO: 421018 - DNA, 33 bp, Homo sapien
aaagcataaatgaacagatacctcaaagagaaa

SEQ ID NO: 421019 - DNA, 33 bp, Homo sapien
atatgtattctgagcacagtaaattaaaactta

SEQ ID NO: 421020 - DNA, 33 bp, Homo sapien
atatgtattctgagcagagtaaattaaaactta

SEQ ID NO: 421021 - DNA, 33 bp, Homo sapien
ggagattacaaaggaaatcaaaatcatgactct

SEQ ID NO: 421022 - DNA, 33 bp, Homo sapien
ggagattacaaaggaagtcaaaatcatgactct

SEQ ID NO: 421023 - DNA, 33 bp, Homo sapien
gttgcttctgtgttccagatgggaagtgttact

SEQ ID NO: 421024 - DNA, 33 bp, Homo sapien
gttgcttctgtgttccggatgggaagtgttact

SEQ ID NO: 421025 - DNA, 33 bp, Homo sapien
agccaccaactgagtgaagataactgaaatgcc

SEQ ID NO: 421026 - DNA, 33 bp, Homo sapien
agccaccaactgagtggagataactgaaatgcc

SEQ ID NO: 421027 - DNA, 33 bp, Homo sapien
tgaagctagattttcacggatttgtaagactta

SEQ ID NO: 421028 - DNA, 33 bp, Homo sapien
tgaagctagattttcatggatttgtaagactta

SEQ ID NO: 421029 - DNA, 33 bp, Homo sapien
aattatctataaagcaaatgcaaatctagagga

SEQ ID NO: 421030 - DNA, 33 bp, Homo sapien
aattatctataaagcacatgcaaatctagagga

SEQ ID NO: 421031 - DNA, 33 bp, Homo sapien
taatgattactgggcaacaagtaacatcccact

SEQ ID NO: 421032 - DNA, 33 bp, Homo sapien
taatgattactgggcagcaagtaacatcccact

SEQ ID NO: 421033 - DNA, 33 bp, Homo sapien
gatagctgttgtataaatgagaaacagggttat

SEQ ID NO: 421034 - DNA, 33 bp, Homo sapien
gatagctgttgtataagtgagaaacagggttat

SEQ ID NO: 421035 - DNA, 33 bp, Homo sapien
aatagattaaaatgaacgtcagaagactatttc

SEQ ID NO: 421036 - DNA, 33 bp, Homo sapien
aatagattaaaatgaatgtcagaagactatttc

SEQ ID NO: 421037 - DNA, 33 bp, Homo sapien
gatttcagttcaggaaacgactttctattggcc

SEQ ID NO: 421038 - DNA, 33 bp, Homo sapien
gatttcagttcaggaagcgactttctattggcc

SEQ ID NO: 421039 - DNA, 33 bp, Homo sapien
cagcatttctcatctcaatgtctaaccacatct

SEQ ID NO: 421040 - DNA, 33 bp, Homo sapien
cagcatttctcatctccatgtctaaccacatct

SEQ ID NO: 421041 - DNA, 33 bp, Homo sapien
ggtcatcaataaaagaatataggtgatctctgg

SEQ ID NO: 421042 - DNA, 33 bp, Homo sapien
ggtcatcaataaaagactataggtgatctctgg

SEQ ID NO: 421043 - DNA, 33 bp, Homo sapien
gttagttaataacaaaactgtggtcatttctcc

SEQ ID NO: 421044 - DNA, 33 bp, Homo sapien
gttagttaataacaaagctgtggtcatttctcc

SEQ ID NO: 421045 - DNA, 33 bp, Homo sapien
ccccaatgaataccaccattgcccattacacgt

SEQ ID NO: 421046 - DNA, 33 bp, Homo sapien
ccccaatgaataccactattgcccattacacgt

SEQ ID NO: 421047 - DNA, 33 bp, Homo sapien
gtgatgaaaatattgcagaatgagatagtagtc

SEQ ID NO: 421048 - DNA, 33 bp, Homo sapien
gtgatgaaaatattgcggaatgagatagtagtc

SEQ ID NO: 421049 - DNA, 33 bp, Homo sapien
tgctttatgccttctcaatcataaaaggaagat

SEQ ID NO: 421050 - DNA, 33 bp, Homo sapien
tgctttatgccttctcgatcataaaaggaagat

SEQ ID NO: 421051 - DNA, 33 bp, Homo sapien
tatgactcagtttataggatgttctggagaaag

SEQ ID NO: 421052 - DNA, 33 bp, Homo sapien
tatgactcagtttatatgatgttctggagaaag

SEQ ID NO: 421053 - DNA, 33 bp, Homo sapien
atttcaaacctacccccgatgcctcaaacctac

SEQ ID NO: 421054 - DNA, 33 bp, Homo sapien
atttcaaacctacccctgatgcctcaaacctac

SEQ ID NO: 421055 - DNA, 33 bp, Homo sapien
tgctgctgcatgaaagactttaactgagaaaag

SEQ ID NO: 421056 - DNA, 33 bp, Homo sapien
tgctgctgcatgaaaggctttaactgagaaaag

SEQ ID NO: 421057 - DNA, 33 bp, Homo sapien
agtcacacactactgaaggaacaaaatattatt

SEQ ID NO: 421058 - DNA, 33 bp, Homo sapien
agtcacacactactgatggaacaaaatattatt

SEQ ID NO: 421059 - DNA, 33 bp, Homo sapien
gaaatgtatgacacaacgttaacacacctaagc

SEQ ID NO: 421060 - DNA, 33 bp, Homo sapien
gaaatgtatgacacaatgttaacacacctaagc

SEQ ID NO: 421061 - DNA, 33 bp, Homo sapien
aagtcaaaagtagtccacatttagctggcataa

SEQ ID NO: 421062 - DNA, 33 bp, Homo sapien
aagtcaaaagtagtccgcatttagctggcataa

SEQ ID NO: 421063 - DNA, 33 bp, Homo sapien
tggtgaataagttaagaccaagcactttaaaaa

SEQ ID NO: 421064 - DNA, 33 bp, Homo sapien
tggtgaataagttaaggccaagcactttaaaaa

SEQ ID NO: 421065 - DNA, 33 bp, Homo sapien
gataggttggaaggaaaacaggaacagttaatg

SEQ ID NO: 421066 - DNA, 33 bp, Homo sapien
gataggttggaaggaagacaggaacagttaatg

SEQ ID NO: 421067 - DNA, 33 bp, Homo sapien
aaagagatcattttgaaactttaagatttaatg

SEQ ID NO: 421068 - DNA, 33 bp, Homo sapien
aaagagatcattttgagactttaagatttaatg

SEQ ID NO: 421069 - DNA, 33 bp, Homo sapien
ccattaattacacctacgtcatgaagccccagt

SEQ ID NO: 421070 - DNA, 33 bp, Homo sapien
ccattaattacacctatgtcatgaagccccagt

SEQ ID NO: 421071 - DNA, 33 bp, Homo sapien
caacatatcttgagcaccaagtattgtcttctt

SEQ ID NO: 421072 - DNA, 33 bp, Homo sapien
caacatatcttgagcagcaagtattgtcttctt

SEQ ID NO: 421073 - DNA, 33 bp, Homo sapien
taattatgtaggtggaacaaaattgttgaggct

SEQ ID NO: 421074 - DNA, 33 bp, Homo sapien
taattatgtaggtggagcaaaattgttgaggct

SEQ ID NO: 421075 - DNA, 33 bp, Homo sapien
gagaaggctgaagctaacaactgtgctcaacgt

SEQ ID NO: 421076 - DNA, 33 bp, Homo sapien
gagaaggctgaagctagcaactgtgctcaacgt

SEQ ID NO: 421077 - DNA, 33 bp, Homo sapien
agccctcttattgaggaagtttcacggtaggac

SEQ ID NO: 421078 - DNA, 33 bp, Homo sapien
agccctcttattgaggtagtttcacggtaggac

SEQ ID NO: 421079 - DNA, 33 bp, Homo sapien
atatgtcagactaaaactggtgttgaattacat

SEQ ID NO: 421080 - DNA, 33 bp, Homo sapien
atatgtcagactaaaattggtgttgaattacat

SEQ ID NO: 421081 - DNA, 33 bp, Homo sapien
ttaatggtctgaaagaatatggaaaaaatggaa

SEQ ID NO: 421082 - DNA, 33 bp, Homo sapien
ttaatggtctgaaagagtatggaaaaaatggaa

SEQ ID NO: 421083 - DNA, 33 bp, Homo sapien
ttatgttgaacttttgcgttccttcttggatag

SEQ ID NO: 421084 - DNA, 33 bp, Homo sapien
ttatgttgaacttttgtgttccttcttggatag

SEQ ID NO: 421085 - DNA, 33 bp, Homo sapien
caacagaaaggacaccaaaaggacactcaaaat

SEQ ID NO: 421086 - DNA, 33 bp, Homo sapien
caacagaaaggacaccgaaaggacactcaaaat

SEQ ID NO: 421087 - DNA, 33 bp, Homo sapien
cgaatcagtccaaaaaacttttcgctacaatta

SEQ ID NO: 421088 - DNA, 33 bp, Homo sapien
cgaatcagtccaaaaaccttttcgctacaatta

SEQ ID NO: 421089 - DNA, 33 bp, Homo sapien
ctgtacaagacgaaataaggctttcttcaaagg

SEQ ID NO: 421090 - DNA, 33 bp, Homo sapien
ctgtacaagacgaaatgaggctttcttcaaagg

SEQ ID NO: 421091 - DNA, 33 bp, Homo sapien
ctccagtggcctattacaagattctgtatcatt

SEQ ID NO: 421092 - DNA, 33 bp, Homo sapien
ctccagtggcctattataagattctgtatcatt

SEQ ID NO: 421093 - DNA, 33 bp, Homo sapien
gtagggctgtttttaaatcaaggaagagtatct

SEQ ID NO: 421094 - DNA, 33 bp, Homo sapien
gtagggctgtttttaattcaaggaagagtatct

SEQ ID NO: 421095 - DNA, 33 bp, Homo sapien
tgtctggatttgtccaaagcacccagaacaatg

SEQ ID NO: 421096 - DNA, 33 bp, Homo sapien
tgtctggatttgtccacagcacccagaacaatg

SEQ ID NO: 421097 - DNA, 33 bp, Homo sapien
agtggtgaagaataataaaccatagactgagct

SEQ ID NO: 421098 - DNA, 33 bp, Homo sapien
agtggtgaagaataatgaaccatagactgagct

SEQ ID NO: 421099 - DNA, 33 bp, Homo sapien
tgacacaattatgacacgattctatgaggcacg

SEQ ID NO: 421100 - DNA, 33 bp, Homo sapien
tgacacaattatgacaggattctatgaggcacg

SEQ ID NO: 421101 - DNA, 33 bp, Homo sapien
taagccaggtacaaaacgacaagtaagcattgt

SEQ ID NO: 421102 - DNA, 33 bp, Homo sapien
taagccaggtacaaaaggacaagtaagcattgt

SEQ ID NO: 421103 - DNA, 33 bp, Homo sapien
accaaatatgaactcaaagtgtggccatgtggt

SEQ ID NO: 421104 - DNA, 33 bp, Homo sapien
accaaatatgaactcatagtgtggccatgtggt

SEQ ID NO: 421105 - DNA, 33 bp, Homo sapien
tttgctattgaattccaaattcaggcagcctgt

SEQ ID NO: 421106 - DNA, 33 bp, Homo sapien
tttgctattgaattccgaattcaggcagcctgt

SEQ ID NO: 421107 - DNA, 33 bp, Homo sapien
tttcaggagcaaatttaaaaatagttctgaaaa

SEQ ID NO: 421108 - DNA, 33 bp, Homo sapien
tttcaggagcaaatttgaaaatagttctgaaaa

SEQ ID NO: 421109 - DNA, 33 bp, Homo sapien
aattttacaaaattgactcaaagcttgtatttt

SEQ ID NO: 421110 - DNA, 33 bp, Homo sapien
aattttacaaaattgagtcaaagcttgtatttt

SEQ ID NO: 421111 - DNA, 33 bp, Homo sapien
ataagagttggagacacctatacttcactctta

SEQ ID NO: 421112 - DNA, 33 bp, Homo sapien
ataagagttggagacatctatacttcactctta

SEQ ID NO: 421113 - DNA, 33 bp, Homo sapien
gcaatgtgagaagagaccaatacatatatcaag

SEQ ID NO: 421114 - DNA, 33 bp, Homo sapien
gcaatgtgagaagagagcaatacatatatcaag

SEQ ID NO: 421115 - DNA, 33 bp, Homo sapien
aatataggaacataaacctcttagatttctctc

SEQ ID NO: 421116 - DNA, 33 bp, Homo sapien
aatataggaacataaagctcttagatttctctc

SEQ ID NO: 421117 - DNA, 33 bp, Homo sapien
aggagtctatacctcagtagtaagaaaactgtc

SEQ ID NO: 421118 - DNA, 33 bp, Homo sapien
aggagtctatacctcattagtaagaaaactgtc

SEQ ID NO: 421119 - DNA, 33 bp, Homo sapien
tagtaagaaaactgtcaaataataaaaatggat

SEQ ID NO: 421120 - DNA, 33 bp, Homo sapien
tagtaagaaaactgtccaataataaaaatggat

SEQ ID NO: 421121 - DNA, 33 bp, Homo sapien
acacacgtgtggtcataaagcatataaaaaact

SEQ ID NO: 421122 - DNA, 33 bp, Homo sapien
acacacgtgtggtcattaagcatataaaaaact

SEQ ID NO: 421123 - DNA, 33 bp, Homo sapien
ctggcagtaggccaaccggtgcaaaaacagagc

SEQ ID NO: 421124 - DNA, 33 bp, Homo sapien
ctggcagtaggccaactggtgcaaaaacagagc

SEQ ID NO: 421125 - DNA, 33 bp, Homo sapien; identical to SEQ ID NO: 421123

SEQ ID NO: 421126 - DNA, 33 bp, Homo sapien; identical to SEQ ID NO: 421124

SEQ ID NO: 421127 - DNA, 33 bp, Homo sapien
ttaactcagtccaacaaagaaagaagaataaga

SEQ ID NO: 421128 - DNA, 33 bp, Homo sapien
ttaactcagtccaacagagaaagaagaataaga

SEQ ID NO: 421129 - DNA, 33 bp, Homo sapien
cctgttcctcctgatcgctattataaaaaaccg

SEQ ID NO: 421130 - DNA, 33 bp, Homo sapien
cctgttcctcctgatctctattataaaaaaccg

SEQ ID NO: 421131 - DNA, 33 bp, Homo sapien
cccttggggtaaaacagtccagatgagttgaga

SEQ ID NO: 421132 - DNA, 33 bp, Homo sapien
cccttggggtaaaacattccagatgagttgaga

SEQ ID NO: 421133 - DNA, 33 bp, Homo sapien
gaagcccctcagactacagcagaaattctacaa

SEQ ID NO: 421134 - DNA, 33 bp, Homo sapien
gaagcccctcagactatagcagaaattctacaa

SEQ ID NO: 421135 - DNA, 33 bp, Homo sapien
ggatgtggaataacgcacaaaaccttttagaaa

SEQ ID NO: 421136 - DNA, 33 bp, Homo sapien
ggatgtggaataacgctcaaaaccttttagaaa

SEQ ID NO: 421137 - DNA, 33 bp, Homo sapien
tttaaaaggcgtaaaagtatgtcttatagaata

SEQ ID NO: 421138 - DNA, 33 bp, Homo sapien
tttaaaaggcgtaaaattatgtcttatagaata

SEQ ID NO: 421139 - DNA, 33 bp, Homo sapien
gagcagcattcctggaatcacttaaaaacgttt

SEQ ID NO: 421140 - DNA, 33 bp, Homo sapien
gagcagcattcctggagtcacttaaaaacgttt

SEQ ID NO: 421141 - DNA, 33 bp, Homo sapien
ataagtatatattgaccagtggattattattac

SEQ ID NO: 421142 - DNA, 33 bp, Homo sapien
ataagtatatattgactagtggattattattac

SEQ ID NO: 421143 - DNA, 33 bp, Homo sapien
ggtaatattaaagacaacaacaagttccaggga

SEQ ID NO: 421144 - DNA, 33 bp, Homo sapien
ggtaatattaaagacagcaacaagttccaggga

SEQ ID NO: 421145 - DNA, 33 bp, Homo sapien
gggaaacagactaaaacgtgttctttagatgta

SEQ ID NO: 421146 - DNA, 33 bp, Homo sapien
gggaaacagactaaaatgtgttctttagatgta

SEQ ID NO: 421147 - DNA, 33 bp, Homo sapien
agttaaggagaaagagccacttgaaagggagag

SEQ ID NO: 421148 - DNA, 33 bp, Homo sapien
agttaaggagaaagagtcacttgaaagggagag

SEQ ID NO: 421149 - DNA, 33 bp, Homo sapien
agggtctatttctatcgcaatcaagaggccttg

SEQ ID NO: 421150 - DNA, 33 bp, Homo sapien
agggtctatttctatctcaatcaagaggccttg

SEQ ID NO: 421151 - DNA, 33 bp, Homo sapien
tggctaagggataaaacagtctgcaatcaaact

SEQ ID NO: 421152 - DNA, 33 bp, Homo sapien
tggctaagggataaaagagtctgcaatcaaact

SEQ ID NO: 421153 - DNA, 33 bp, Homo sapien
gctttatagaaatagaaatgtctgtattccatc

SEQ ID NO: 421154 - DNA, 33 bp, Homo sapien
gctttatagaaatagagatgtctgtattccatc

SEQ ID NO: 421155 - DNA, 33 bp, Homo sapien
atttatacttttaatacgtacaagtcattgcag

SEQ ID NO: 421156 - DNA, 33 bp, Homo sapien
atttatacttttaatatgtacaagtcattgcag

SEQ ID NO: 421157 - DNA, 33 bp, Homo sapien
taatagaaaagagaagacaatgccacaaaaaag

SEQ ID NO: 421158 - DNA, 33 bp, Homo sapien
taatagaaaagagaaggcaatgccacaaaaaag

SEQ ID NO: 421159 - DNA, 33 bp, Homo sapien
ggaagaatgtcttgatcactgcctccagggtaa

SEQ ID NO: 421160 - DNA, 33 bp, Homo sapien
ggaagaatgtcttgatgactgcctccagggtaa

SEQ ID NO: 421161 - DNA, 33 bp, Homo sapien
tggctggagaaatgtcccatagagagaagttgc

SEQ ID NO: 421162 - DNA, 33 bp, Homo sapien
tggctggagaaatgtctcatagagagaagttgc

SEQ ID NO: 421163 - DNA, 33 bp, Homo sapien
caaaatagagagaaaagaagattatccacataa

SEQ ID NO: 421164 - DNA, 33 bp, Homo sapien
caaaatagagagaaaataagattatccacataa

SEQ ID NO: 421165 - DNA, 33 bp, Homo sapien
ccagacaagtagtcagcagtttcaaggaggtca

SEQ ID NO: 421166 - DNA, 33 bp, Homo sapien
ccagacaagtagtcagtagtttcaaggaggtca

SEQ ID NO: 421167 - DNA, 33 bp, Homo sapien
tcactatcatgaaaacggcctggaggaaccatc

SEQ ID NO: 421168 - DNA, 33 bp, Homo sapien
tcactatcatgaaaactgcctggaggaaccatc

SEQ ID NO: 421169 - DNA, 33 bp, Homo sapien
tggagaagttgaaaggcaagcaagtatggcagc

SEQ ID NO: 421170 - DNA, 33 bp, Homo sapien
tggagaagttgaaagggaagcaagtatggcagc

SEQ ID NO: 421171 - DNA, 33 bp, Homo sapien
gtcagaaatgaagtccaaaacacccatggaaaa

SEQ ID NO: 421172 - DNA, 33 bp, Homo sapien
gtcagaaatgaagtccgaaacacccatggaaaa

SEQ ID NO: 421173 - DNA, 33 bp, Homo sapien
ctggacctaatgtacaaaaacaaggaaatcaga

SEQ ID NO: 421174 - DNA, 33 bp, Homo sapien
ctggacctaatgtacagaaacaaggaaatcaga

SEQ ID NO: 421175 - DNA, 33 bp, Homo sapien
tatacatctgctaaaactcaccaaactttatac

SEQ ID NO: 421176 - DNA, 33 bp, Homo sapien
tatacatctgctaaaattcaccaaactttatac

SEQ ID NO: 421177 - DNA, 33 bp, Homo sapien
ttttaatatggttgggaactgcatcggaaggcc

SEQ ID NO: 421178 - DNA, 33 bp, Homo sapien
ttttaatatggttgggtactgcatcggaaggcc

SEQ ID NO: 421179 - DNA, 33 bp, Homo sapien
cccaaccatattaaaactgtgtatttgcagatc

SEQ ID NO: 421180 - DNA, 33 bp, Homo sapien
cccaaccatattaaaattgtgtatttgcagatc

SEQ ID NO: 421181 - DNA, 33 bp, Homo sapien
attgagactcagcagaagcgtaatgagaaacag

SEQ ID NO: 421182 - DNA, 33 bp, Homo sapien
attgagactcagcagaggcgtaatgagaaacag

SEQ ID NO: 421183 - DNA, 33 bp, Homo sapien
agcccattgtctcctgcagtgagaggtctgact

SEQ ID NO: 421184 - DNA, 33 bp, Homo sapien
agcccattgtctcctgtagtgagaggtctgact

SEQ ID NO: 421185 - DNA, 33 bp, Homo sapien
cagctcagaggcaacaatgtagatggatggggt

SEQ ID NO: 421186 - DNA, 33 bp, Homo sapien
cagctcagaggcaacattgtagatggatggggt

SEQ ID NO: 421187 - DNA, 33 bp, Homo sapien
taataccctcaccacactcactgtctggctgga

SEQ ID NO: 421188 - DNA, 33 bp, Homo sapien
taataccctcaccacattcactgtctggctgga

SEQ ID NO: 421189 - DNA, 33 bp, Homo sapien
gagacagaaatctaagccaattttccagactgt

SEQ ID NO: 421190 - DNA, 33 bp, Homo sapien
gagacagaaatctaaggcaattttccagactgt

SEQ ID NO: 421191 - DNA, 33 bp, Homo sapien
ggtgcctttgcaaaaaaggacacatcatagggg

SEQ ID NO: 421192 - DNA, 33 bp, Homo sapien
ggtgcctttgcaaaaagggacacatcatagggg

SEQ ID NO: 421193 - DNA, 33 bp, Homo sapien
gtggggcctaatgggaagtttagatcatgagga

SEQ ID NO: 421194 - DNA, 33 bp, Homo sapien
gtggggcctaatgggaggtttagatcatgagga

SEQ ID NO: 421195 - DNA, 33 bp, Homo sapien
taaatgttgggaatacagtaggggaacataggt

SEQ ID NO: 421196 - DNA, 33 bp, Homo sapien
taaatgttgggaatacggtaggggaacataggt

SEQ ID NO: 421197 - DNA, 33 bp, Homo sapien
taactctgcttataaaaggggtgtattctccct

SEQ ID NO: 421198 - DNA, 33 bp, Homo sapien
taactctgcttataaagggggtgtattctccct

SEQ ID NO: 421199 - DNA, 33 bp, Homo sapien
gaggaattcaagtgtacatgcttggtaatttaa

SEQ ID NO: 421200 - DNA, 33 bp, Homo sapien
gaggaattcaagtgtatatgcttggtaatttaa

SEQ ID NO: 421201 - DNA, 33 bp, Homo sapien
tttctatgcaacctcaacttgtggttatacctc

SEQ ID NO: 421202 - DNA, 33 bp, Homo sapien
tttctatgcaacctcatcttgtggttatacctc

SEQ ID NO: 421203 - DNA, 33 bp, Homo sapien
gtgtggtatgtactgaagaagctagaaaaccaa

SEQ ID NO: 421204 - DNA, 33 bp, Homo sapien
gtgtggtatgtactgacgaagctagaaaaccaa

SEQ ID NO: 421205 - DNA, 33 bp, Homo sapien
gagcaaaaataactgacacttgcaaaggaatgc

SEQ ID NO: 421206 - DNA, 33 bp, Homo sapien
gagcaaaaataactgagacttgcaaaggaatgc

SEQ ID NO: 421207 - DNA, 33 bp, Homo sapien
ctttaggaggtgaaagaagttttctagggggct

SEQ ID NO: 421208 - DNA, 33 bp, Homo sapien
ctttaggaggtgaaaggagttttctagggggct

SEQ ID NO: 421209 - DNA, 33 bp, Homo sapien
attagctagagtttaacagttttggaactcact

SEQ ID NO: 421210 - DNA, 33 bp, Homo sapien
attagctagagtttaatagttttggaactcact

SEQ ID NO: 421211 - DNA, 33 bp, Homo sapien
actctcacttaatttacgtaggatataacatga

SEQ ID NO: 421212 - DNA, 33 bp, Homo sapien
actctcacttaatttatgtaggatataacatga

SEQ ID NO: 421213 - DNA, 33 bp, Homo sapien
cagctgttcagtctcaagacaatacattagctc

SEQ ID NO: 421214 - DNA, 33 bp, Homo sapien
cagctgttcagtctcaggacaatacattagctc

SEQ ID NO: 421215 - DNA, 33 bp, Homo sapien
gggtgggcagtaaggacccggctctccaaatac

SEQ ID NO: 421216 - DNA, 33 bp, Homo sapien
gggtgggcagtaaggatccggctctccaaatac

SEQ ID NO: 421217 - DNA, 33 bp, Homo sapien
ggctgccttccctttgaagaatctgggcaacat

SEQ ID NO: 421218 - DNA, 33 bp, Homo sapien
ggctgccttccctttggagaatctgggcaacat

SEQ ID NO: 421219 - DNA, 33 bp, Homo sapien
aatttatagtgctaaacagccacatgaaaaact

SEQ ID NO: 421220 - DNA, 33 bp, Homo sapien
aatttatagtgctaaagagccacatgaaaaact

SEQ ID NO: 421221 - DNA, 33 bp, Homo sapien
ttaataaaatacatacacagctagctaggctaa

SEQ ID NO: 421222 - DNA, 33 bp, Homo sapien
ttaataaaatacatacgcagctagctaggctaa

SEQ ID NO: 421223 - DNA, 33 bp, Homo sapien
aattttaaaagaccatgatcagcttgaaagaga

SEQ ID NO: 421224 - DNA, 33 bp, Homo sapien
aattttaaaagaccattatcagcttgaaagaga

SEQ ID NO: 421225 - DNA, 33 bp, Homo sapien
aagggaccacaaagaaagtatatactgccattt

SEQ ID NO: 421226 - DNA, 33 bp, Homo sapien
aagggaccacaaagaaggtatatactgccattt

SEQ ID NO: 421227 - DNA, 33 bp, Homo sapien
ccattctggtaggtgaagacaaaagacaaactc

SEQ ID NO: 421228 - DNA, 33 bp, Homo sapien
ccattctggtaggtgacgacaaaagacaaactc

SEQ ID NO: 421229 - DNA, 33 bp, Homo sapien
cctattaaccttgccaacatgggctaaagttct

SEQ ID NO: 421230 - DNA, 33 bp, Homo sapien
cctattaaccttgccaccatgggctaaagttct

SEQ ID NO: 421231 - DNA, 33 bp, Homo sapien
ttctgattcagggatccgagactgattctggga

SEQ ID NO: 421232 - DNA, 33 bp, Homo sapien
ttctgattcagggatcggagactgattctggga

SEQ ID NO: 421233 - DNA, 33 bp, Homo sapien
acgttttagctcctcaaattaattctgaagcat

SEQ ID NO: 421234 - DNA, 33 bp, Homo sapien
acgttttagctcctcacattaattctgaagcat

SEQ ID NO: 421235 - DNA, 33 bp, Homo sapien
ttaacttttggataccagattataagtaaactc

SEQ ID NO: 421236 - DNA, 33 bp, Homo sapien
ttaacttttggataccggattataagtaaactc

SEQ ID NO: 421237 - DNA, 33 bp, Homo sapien
tagattagtagacccacaaaggattggaaggca

SEQ ID NO: 421238 - DNA, 33 bp, Homo sapien
tagattagtagacccataaaggattggaaggca

SEQ ID NO: 421239 - DNA, 33 bp, Homo sapien
gcagaagggggtgaacaatcagttcaaaaggaa

SEQ ID NO: 421240 - DNA, 33 bp, Homo sapien
gcagaagggggtgaaccatcagttcaaaaggaa

SEQ ID NO: 421241 - DNA, 33 bp, Homo sapien
aactctcctggaagaacgttatgttacttttga

SEQ ID NO: 421242 - DNA, 33 bp, Homo sapien
aactctcctggaagaatgttatgttacttttga

SEQ ID NO: 421243 - DNA, 33 bp, Homo sapien
tagcactcacctactcaatgcctaagcctccaa

SEQ ID NO: 421244 - DNA, 33 bp, Homo sapien
tagcactcacctactcgatgcctaagcctccaa

SEQ ID NO: 421245 - DNA, 33 bp, Homo sapien
ttctctaattcacaagccaaggaatacaccaca

SEQ ID NO: 421246 - DNA, 33 bp, Homo sapien
ttctctaattcacaagtcaaggaatacaccaca

SEQ ID NO: 421247 - DNA, 33 bp, Homo sapien
gtcaaagagttaactacgctgctccagatcatg

SEQ ID NO: 421248 - DNA, 33 bp, Homo sapien
gtcaaagagttaactatgctgctccagatcatg

SEQ ID NO: 421249 - DNA, 33 bp, Homo sapien
caacatgaacataataacatctgtagtcctttt

SEQ ID NO: 421250 - DNA, 33 bp, Homo sapien
caacatgaacataatagcatctgtagtcctttt

SEQ ID NO: 421251 - DNA, 33 bp, Homo sapien
tctccttgatgaaggccgcatgtggtctagcac

SEQ ID NO: 421252 - DNA, 33 bp, Homo sapien
tctccttgatgaaggctgcatgtggtctagcac

SEQ ID NO: 421253 - DNA, 33 bp, Homo sapien
ttcagtccaaagagtgcaaaggactgggagtgg

SEQ ID NO: 421254 - DNA, 33 bp, Homo sapien
ttcagtccaaagagtggaaaggactgggagtgg

SEQ ID NO: 421255 - DNA, 33 bp, Homo sapien
tcatagaattgaaaaccattgttcaaaaaaaat

SEQ ID NO: 421256 - DNA, 33 bp, Homo sapien
tcatagaattgaaaacgattgttcaaaaaaaat

SEQ ID NO: 421257 - DNA, 33 bp, Homo sapien
taatcatcttaataccaatgaactgctatctca

SEQ ID NO: 421258 - DNA, 33 bp, Homo sapien
taatcatcttaataccgatgaactgctatctca

SEQ ID NO: 421259 - DNA, 33 bp, Homo sapien
taattttgctgaagtccagtttagccatttttc

SEQ ID NO: 421260 - DNA, 33 bp, Homo sapien
taattttgctgaagtctagtttagccatttttc

SEQ ID NO: 421261 - DNA, 33 bp, Homo sapien
caaaatcctgctggtaacatagaccctaaggat

SEQ ID NO: 421262 - DNA, 33 bp, Homo sapien
caaaatcctgctggtagcatagaccctaaggat

SEQ ID NO: 421263 - DNA, 33 bp, Homo sapien
catgtattgtaagctcaatgagtatcgctttag

SEQ ID NO: 421264 - DNA, 33 bp, Homo sapien
catgtattgtaagctcgatgagtatcgctttag

SEQ ID NO: 421265 - DNA, 33 bp, Homo sapien
ttaaggaaccccgaaacgatgtggctctggtct

SEQ ID NO: 421266 - DNA, 33 bp, Homo sapien
ttaaggaaccccgaaaggatgtggctctggtct

SEQ ID NO: 421267 - DNA, 33 bp, Homo sapien
ccttaagaaattctgcaaaacacggattcagaa

SEQ ID NO: 421268 - DNA, 33 bp, Homo sapien
ccttaagaaattctgctaaacacggattcagaa

SEQ ID NO: 421269 - DNA, 33 bp, Homo sapien
tcttgagtccactatcacatttattctgacgtc

SEQ ID NO: 421270 - DNA, 33 bp, Homo sapien
tcttgagtccactatctcatttattctgacgtc

SEQ ID NO: 421271 - DNA, 33 bp, Homo sapien
ggtcaaaaggtcataacgtggctcctgggagtg

SEQ ID NO: 421272 - DNA, 33 bp, Homo sapien
ggtcaaaaggtcataatgtggctcctgggagtg

SEQ ID NO: 421273 - DNA, 33 bp, Homo sapien
gcttttatgtgactgcagaatatgttgtgttta

SEQ ID NO: 421274 - DNA, 33 bp, Homo sapien
gcttttatgtgactgcggaatatgttgtgttta

SEQ ID NO: 421275 - DNA, 33 bp, Homo sapien
attattaaatgataaaataagtgtgggccagtc

SEQ ID NO: 421276 - DNA, 33 bp, Homo sapien
attattaaatgataaagtaagtgtgggccagtc

SEQ ID NO: 421277 - DNA, 33 bp, Homo sapien
tcatcagacccaacggaaaatcatcttgaaagc

SEQ ID NO: 421278 - DNA, 33 bp, Homo sapien
tcatcagacccaacgggaaatcatcttgaaagc

SEQ ID NO: 421279 - DNA, 33 bp, Homo sapien
tgccagaatccaagcccccagtctttctgtaac

SEQ ID NO: 421280 - DNA, 33 bp, Homo sapien
tgccagaatccaagcctccagtctttctgtaac

SEQ ID NO: 421281 - DNA, 33 bp, Homo sapien
ctttgttggagttgaacggagcccagtctctgt

SEQ ID NO: 421282 - DNA, 33 bp, Homo sapien
ctttgttggagttgaatggagcccagtctctgt

SEQ ID NO: 421283 - DNA, 33 bp, Homo sapien
tttggcctttatagcacctaagcaaaagaacaa

SEQ ID NO: 421284 - DNA, 33 bp, Homo sapien
tttggcctttatagcatctaagcaaaagaacaa

SEQ ID NO: 421285 - DNA, 33 bp, Homo sapien
actcccctgcatggatcatatcagctgataagc

SEQ ID NO: 421286 - DNA, 33 bp, Homo sapien
actcccctgcatggattatatcagctgataagc

SEQ ID NO: 421287 - DNA, 33 bp, Homo sapien
tatatcattattatagccgattttcagagaaca

SEQ ID NO: 421288 - DNA, 33 bp, Homo sapien
tatatcattattataggcgattttcagagaaca

SEQ ID NO: 421289 - DNA, 33 bp, Homo sapien
agaataccacaaatttatagtttggttgcttta

SEQ ID NO: 421290 - DNA, 33 bp, Homo sapien
agaataccacaaatttgtagtttggttgcttta

SEQ ID NO: 421291 - DNA, 33 bp, Homo sapien
ttcttcagctgttgcacagaatgttctgtaaat

SEQ ID NO: 421292 - DNA, 33 bp, Homo sapien
ttcttcagctgttgcatagaatgttctgtaaat

SEQ ID NO: 421293 - DNA, 33 bp, Homo sapien
tagcaaaagaaagggaataacacagatcagaac

SEQ ID NO: 421294 - DNA, 33 bp, Homo sapien
tagcaaaagaaagggactaacacagatcagaac

SEQ ID NO: 421295 - DNA, 33 bp, Homo sapien
ctgtatgccctcagtacgtgtcatttccttatt

SEQ ID NO: 421296 - DNA, 33 bp, Homo sapien
ctgtatgccctcagtatgtgtcatttccttatt

SEQ ID NO: 421297 - DNA, 33 bp, Homo sapien
agcagttgcattcttacatcttaacactgatac

SEQ ID NO: 421298 - DNA, 33 bp, Homo sapien
agcagttgcattcttatatcttaacactgatac

SEQ ID NO: 421299 - DNA, 33 bp, Homo sapien
aatacatgagaacacaatggggacagtaaagtg

SEQ ID NO: 421300 - DNA, 33 bp, Homo sapien
aatacatgagaacacagtggggacagtaaagtg

SEQ ID NO: 421301 - DNA, 33 bp, Homo sapien
ccataatcagccccaaatgtaagtctcttaatg

SEQ ID NO: 421302 - DNA, 33 bp, Homo sapien
ccataatcagccccaagtgtaagtctcttaatg

SEQ ID NO: 421303 - DNA, 33 bp, Homo sapien
ttgaaaaagtgcattaaacgattctgttcatat

SEQ ID NO: 421304 - DNA, 33 bp, Homo sapien
ttgaaaaagtgcattagacgattctgttcatat

SEQ ID NO: 421305 - DNA, 33 bp, Homo sapien
gtgacaaccgggaccaaatccaactgggcgttg

SEQ ID NO: 421306 - DNA, 33 bp, Homo sapien
gtgacaaccgggaccacatccaactgggcgttg

SEQ ID NO: 421307 - DNA, 33 bp, Homo sapien
aggtgcgaaagggcaacggtctgttcttttcta

SEQ ID NO: 421308 - DNA, 33 bp, Homo sapien
aggtgcgaaagggcaatggtctgttcttttcta

SEQ ID NO: 421309 - DNA, 33 bp, Homo sapien
acaactcagatattggaaaaatccagtatactc

SEQ ID NO: 421310 - DNA, 33 bp, Homo sapien
acaactcagatattgggaaaatccagtatactc

SEQ ID NO: 421311 - DNA, 33 bp, Homo sapien
gagagagcctaatagactcaccatatatcacca

SEQ ID NO: 421312 - DNA, 33 bp, Homo sapien
gagagagcctaatagattcaccatatatcacca

SEQ ID NO: 421313 - DNA, 33 bp, Homo sapien
ggttagtctctgtgcgacatcacactcatactt

SEQ ID NO: 421314 - DNA, 33 bp, Homo sapien
ggttagtctctgtgcggcatcacactcatactt

SEQ ID NO: 421315 - DNA, 33 bp, Homo sapien
tgtagcttattgaatacgtatatctggcctgct

SEQ ID NO: 421316 - DNA, 33 bp, Homo sapien
tgtagcttattgaatatgtatatctggcctgct

SEQ ID NO: 421317 - DNA, 33 bp, Homo sapien
gaccgtctgggcagtgcagccgcggatgagagg

SEQ ID NO: 421318 - DNA, 33 bp, Homo sapien
gaccgtctgggcagtgtagccgcggatgagagg

SEQ ID NO: 421319 - DNA, 33 bp, Homo sapien
tagattcatcctcccaagagttccgaagcagct

SEQ ID NO: 421320 - DNA, 33 bp, Homo sapien
tagattcatcctcccaggagttccgaagcagct

SEQ ID NO: 421321 - DNA, 33 bp, Homo sapien
agtaatatttagtccccggaggaagtgagtata

SEQ ID NO: 421322 - DNA, 33 bp, Homo sapien
agtaatatttagtccctggaggaagtgagtata

SEQ ID NO: 421323 - DNA, 33 bp, Homo sapien
gagttgtgtgcaggtgcatgacagattggattt

SEQ ID NO: 421324 - DNA, 33 bp, Homo sapien
gagttgtgtgcaggtgtatgacagattggattt

SEQ ID NO: 421325 - DNA, 33 bp, Homo sapien
atggcaaatggttgacaaacaggaacaaaatta

SEQ ID NO: 421326 - DNA, 33 bp, Homo sapien
atggcaaatggttgaccaacaggaacaaaatta

SEQ ID NO: 421327 - DNA, 33 bp, Homo sapien
attgagtggtggctaaacagacaaaccaactaa

SEQ ID NO: 421328 - DNA, 33 bp, Homo sapien
attgagtggtggctaagcagacaaaccaactaa

SEQ ID NO: 421329 - DNA, 33 bp, Homo sapien
tgacctgtagtaagcactcacaactttgatatc

SEQ ID NO: 421330 - DNA, 33 bp, Homo sapien
tgacctgtagtaagcattcacaactttgatatc

SEQ ID NO: 421331 - DNA, 33 bp, Homo sapien
agccagacaacagatgcaaggagacctaggcca

SEQ ID NO: 421332 - DNA, 33 bp, Homo sapien
agccagacaacagatgtaaggagacctaggcca

SEQ ID NO: 421333 - DNA, 33 bp, Homo sapien
tgtcaaacagactcatcatacttgtccagaata

SEQ ID NO: 421334 - DNA, 33 bp, Homo sapien
tgtcaaacagactcattatacttgtccagaata

SEQ ID NO: 421335 - DNA, 33 bp, Homo sapien
agcagacaaaagtaaaatgccttctctcaattc

SEQ ID NO: 421336 - DNA, 33 bp, Homo sapien
agcagacaaaagtaaagtgccttctctcaattc

SEQ ID NO: 421337 - DNA, 33 bp, Homo sapien
gaaaccattgctcttaagaaaaatcaggattag

SEQ ID NO: 421338 - DNA, 33 bp, Homo sapien
gaaaccattgctcttaggaaaaatcaggattag

SEQ ID NO: 421339 - DNA, 33 bp, Homo sapien
aaatcaatgttaatgaatcaacagcatatgtta

SEQ ID NO: 421340 - DNA, 33 bp, Homo sapien
aaatcaatgttaatgagtcaacagcatatgtta

SEQ ID NO: 421341 - DNA, 33 bp, Homo sapien
ttgttgtgggatggtacctcgttgttttaattt

SEQ ID NO: 421342 - DNA, 33 bp, Homo sapien
ttgttgtgggatggtatctcgttgttttaattt

SEQ ID NO: 421343 - DNA, 33 bp, Homo sapien
tgtgagtagtgcactgaactataatgaactgct

SEQ ID NO: 421344 - DNA, 33 bp, Homo sapien
tgtgagtagtgcactggactataatgaactgct

SEQ ID NO: 421345 - DNA, 33 bp, Homo sapien
tattaaataacaaaaactactactatctctgct

SEQ ID NO: 421346 - DNA, 33 bp, Homo sapien
tattaaataacaaaaattactactatctctgct

SEQ ID NO: 421347 - DNA, 33 bp, Homo sapien
agaagattaattgctgcacgagatataaaaata

SEQ ID NO: 421348 - DNA, 33 bp, Homo sapien
agaagattaattgctgtacgagatataaaaata

SEQ ID NO: 421349 - DNA, 33 bp, Homo sapien
cctcttctgttgtaaccgaaagaatgaaggaga

SEQ ID NO: 421350 - DNA, 33 bp, Homo sapien
cctcttctgttgtaactgaaagaatgaaggaga

SEQ ID NO: 421351 - DNA, 33 bp, Homo sapien
ttaaggcattagcaaaacaggaacaccaaaaca

SEQ ID NO: 421352 - DNA, 33 bp, Homo sapien
ttaaggcattagcaaagcaggaacaccaaaaca

SEQ ID NO: 421353 - DNA, 33 bp, Homo sapien
ccctttgtggagtttccaacctggtgaaatgtg

SEQ ID NO: 421354 - DNA, 33 bp, Homo sapien
ccctttgtggagtttctaacctggtgaaatgtg

SEQ ID NO: 421355 - DNA, 33 bp, Homo sapien
aaatggaaagccataccatgttctgaattggaa

SEQ ID NO: 421356 - DNA, 33 bp, Homo sapien
aaatggaaagccatacgatgttctgaattggaa

SEQ ID NO: 421357 - DNA, 33 bp, Homo sapien
tatgcataaaagaccactggaatttcgatcagg

SEQ ID NO: 421358 - DNA, 33 bp, Homo sapien
tatgcataaaagaccattggaatttcgatcagg

SEQ ID NO: 421359 - DNA, 33 bp, Homo sapien
atcccttgccaaatccagcatcatgaaaattta

SEQ ID NO: 421360 - DNA, 33 bp, Homo sapien
atcccttgccaaatccggcatcatgaaaattta

SEQ ID NO: 421361 - DNA, 33 bp, Homo sapien
tttaaaaatggtcaaaagatctaagtagatatg

SEQ ID NO: 421362 - DNA, 33 bp, Homo sapien
tttaaaaatggtcaaaggatctaagtagatatg

SEQ ID NO: 421363 - DNA, 33 bp, Homo sapien
tataacagtttcaaaaaccaaataaacaagatg

SEQ ID NO: 421364 - DNA, 33 bp, Homo sapien
tataacagtttcaaaagccaaataaacaagatg

SEQ ID NO: 421365 - DNA, 33 bp, Homo sapien
atctttccaaaaactaaattaggcttttgccaa

SEQ ID NO: 421366 - DNA, 33 bp, Homo sapien
atctttccaaaaactagattaggcttttgccaa

SEQ ID NO: 421367 - DNA, 33 bp, Homo sapien
tgggagattggatagacgcctaacctatctcaa

SEQ ID NO: 421368 - DNA, 33 bp, Homo sapien
tgggagattggatagatgcctaacctatctcaa

SEQ ID NO: 421369 - DNA, 33 bp, Homo sapien
gtatctgctggcagaccacaagaaggtacacat

SEQ ID NO: 421370 - DNA, 33 bp, Homo sapien
gtatctgctggcagacgacaagaaggtacacat

SEQ ID NO: 421371 - DNA, 33 bp, Homo sapien
gtttatcaactcatgcacccattttctctggaa

SEQ ID NO: 421372 - DNA, 33 bp, Homo sapien
gtttatcaactcatgcgcccattttctctggaa

SEQ ID NO: 421373 - DNA, 33 bp, Homo sapien
aattaaccatcacatacctgcaaataaagacaa

SEQ ID NO: 421374 - DNA, 33 bp, Homo sapien
aattaaccatcacatatctgcaaataaagacaa

SEQ ID NO: 421375 - DNA, 33 bp, Homo sapien
tgcatacgtttggagacgagggaaggcaggaga

SEQ ID NO: 421376 - DNA, 33 bp, Homo sapien
tgcatacgtttggagatgagggaaggcaggaga

SEQ ID NO: 421377 - DNA, 33 bp, Homo sapien
ctgcatatacttgccacgtgaggacatcatttt

SEQ ID NO: 421378 - DNA, 33 bp, Homo sapien
ctgcatatacttgccatgtgaggacatcatttt

SEQ ID NO: 421379 - DNA, 33 bp, Homo sapien
gtatagctagtgaaaacatcctttaaacatgaa

SEQ ID NO: 421380 - DNA, 33 bp, Homo sapien
gtatagctagtgaaaatatcctttaaacatgaa

SEQ ID NO: 421381 - DNA, 33 bp, Homo sapien
cagcaaattaatcttacctccaaatctaaagtg

SEQ ID NO: 421382 - DNA, 33 bp, Homo sapien
cagcaaattaatcttatctccaaatctaaagtg

SEQ ID NO: 421383 - DNA, 33 bp, Homo sapien
gttacagcaaagagaacggaaagctctcactcc

SEQ ID NO: 421384 - DNA, 33 bp, Homo sapien
gttacagcaaagagaatggaaagctctcactcc

SEQ ID NO: 421385 - DNA, 33 bp, Homo sapien
tgcttggcctttaggacgtgtgactacagcttt

SEQ ID NO: 421386 - DNA, 33 bp, Homo sapien
tgcttggcctttaggatgtgtgactacagcttt

SEQ ID NO: 421387 - DNA, 33 bp, Homo sapien
aaagctttttaaagtaagtgctgcaggcagcaa

SEQ ID NO: 421388 - DNA, 33 bp, Homo sapien
aaagctttttaaagtaggtgctgcaggcagcaa

SEQ ID NO: 421389 - DNA, 33 bp, Homo sapien
caaatacaatcttaaaaacaaacgtgtatgcta

SEQ ID NO: 421390 - DNA, 33 bp, Homo sapien
caaatacaatcttaaagacaaacgtgtatgcta

SEQ ID NO: 421391 - DNA, 33 bp, Homo sapien
ttaagattgtatttgagaaatccaggtgttttt

SEQ ID NO: 421392 - DNA, 33 bp, Homo sapien
ttaagattgtatttgataaatccaggtgttttt

SEQ ID NO: 421393 - DNA, 33 bp, Homo sapien
aactcacaaaaaagctaaaattctttcaccctt

SEQ ID NO: 421394 - DNA, 33 bp, Homo sapien
aactcacaaaaaagctgaaattctttcaccctt

SEQ ID NO: 421395 - DNA, 33 bp, Homo sapien
ctgtaatcatccagagactaggcagcccagcaa

SEQ ID NO: 421396 - DNA, 33 bp, Homo sapien
ctgtaatcatccagaggctaggcagcccagcaa

SEQ ID NO: 421397 - DNA, 33 bp, Homo sapien
aaaagtagcaaaaaaacgattataaacagtttg

SEQ ID NO: 421398 - DNA, 33 bp, Homo sapien
aaaagtagcaaaaaaatgattataaacagtttg

SEQ ID NO: 421399 - DNA, 33 bp, Homo sapien
tttgccaattacaggcagaaaatgttatgatga

SEQ ID NO: 421400 - DNA, 33 bp, Homo sapien
tttgccaattacaggcggaaaatgttatgatga

SEQ ID NO: 421401 - DNA, 33 bp, Homo sapien
caatagctatttgtccagctactaggattttta

SEQ ID NO: 421402 - DNA, 33 bp, Homo sapien
caatagctatttgtccggctactaggattttta

SEQ ID NO: 421403 - DNA, 33 bp, Homo sapien
aagctgatttacagtaatacatacctggtcagc

SEQ ID NO: 421404 - DNA, 33 bp, Homo sapien
aagctgatttacagtactacatacctggtcagc

SEQ ID NO: 421405 - DNA, 33 bp, Homo sapien
gttgaagtcaaaggtacgtgtttaagttaccat

SEQ ID NO: 421406 - DNA, 33 bp, Homo sapien
gttgaagtcaaaggtatgtgtttaagttaccat

SEQ ID NO: 421407 - DNA, 33 bp, Homo sapien
tgcattgtcatttttacgtagttggatttgatt

SEQ ID NO: 421408 - DNA, 33 bp, Homo sapien
tgcattgtcatttttatgtagttggatttgatt

SEQ ID NO: 421409 - DNA, 33 bp, Homo sapien
gaactcatttgagtgacaactaagtagggagga

SEQ ID NO: 421410 - DNA, 33 bp, Homo sapien
gaactcatttgagtgataactaagtagggagga

SEQ ID NO: 421411 - DNA, 33 bp, Homo sapien
agggcctctccttctcacttcttggactattaa

SEQ ID NO: 421412 - DNA, 33 bp, Homo sapien
agggcctctccttctcgcttcttggactattaa

SEQ ID NO: 421413 - DNA, 33 bp, Homo sapien
tggtctccttcagcaaaaatgttgttaggtcag

SEQ ID NO: 421414 - DNA, 33 bp, Homo sapien
tggtctccttcagcaagaatgttgttaggtcag

SEQ ID NO: 421415 - DNA, 33 bp, Homo sapien
taaatgagtcttattcaaaactctactggctgc

SEQ ID NO: 421416 - DNA, 33 bp, Homo sapien
taaatgagtcttattccaaactctactggctgc

SEQ ID NO: 421417 - DNA, 33 bp, Homo sapien
aaagatgttcataaagaagaacgtgggagaaca

SEQ ID NO: 421418 - DNA, 33 bp, Homo sapien
aaagatgttcataaagcagaacgtgggagaaca

SEQ ID NO: 421419 - DNA, 33 bp, Homo sapien
aataatatattttggaagatagcaaaaaaaata

SEQ ID NO: 421420 - DNA, 33 bp, Homo sapien
aataatatattttggacgatagcaaaaaaaata

SEQ ID NO: 421421 - DNA, 33 bp, Homo sapien
ctgcagggttgttttgcagtccctcagtgctcc

SEQ ID NO: 421422 - DNA, 33 bp, Homo sapien
ctgcagggttgttttgtagtccctcagtgctcc

SEQ ID NO: 421423 - DNA, 33 bp, Homo sapien
ggtgccttaagaaaataatttagtctatctagg

SEQ ID NO: 421424 - DNA, 33 bp, Homo sapien
ggtgccttaagaaaatcatttagtctatctagg

SEQ ID NO: 421425 - DNA, 33 bp, Homo sapien
gaagcttaaaaataaaatgaagagctgtgaacc

SEQ ID NO: 421426 - DNA, 33 bp, Homo sapien
gaagcttaaaaataaagtgaagagctgtgaacc

SEQ ID NO: 421427 - DNA, 33 bp, Homo sapien
aaaatacctagttagcaacgctacttgaaaatt

SEQ ID NO: 421428 - DNA, 33 bp, Homo sapien
aaaatacctagttagcgacgctacttgaaaatt

SEQ ID NO: 421429 - DNA, 33 bp, Homo sapien
tgaaaatgggtcaacacgctttccttaccaacc

SEQ ID NO: 421430 - DNA, 33 bp, Homo sapien
tgaaaatgggtcaacaggctttccttaccaacc

SEQ ID NO: 421431 - DNA, 33 bp, Homo sapien
tatagtgcctgatcaacagtcaataaatgaata

SEQ ID NO: 421432 - DNA, 33 bp, Homo sapien
tatagtgcctgatcaagagtcaataaatgaata

SEQ ID NO: 421433 - DNA, 33 bp, Homo sapien
ggtcagtgctaattcacggttttggaggtttgc

SEQ ID NO: 421434 - DNA, 33 bp, Homo sapien
ggtcagtgctaattcatggttttggaggtttgc

SEQ ID NO: 421435 - DNA, 33 bp, Homo sapien
attggcattgctagcacggtgaaatttcagcct

SEQ ID NO: 421436 - DNA, 33 bp, Homo sapien
attggcattgctagcatggtgaaatttcagcct

SEQ ID NO: 421437 - DNA, 33 bp, Homo sapien
caggtttccaggccaacgagtgtcttaaacagt

SEQ ID NO: 421438 - DNA, 33 bp, Homo sapien
caggtttccaggccaatgagtgtcttaaacagt

SEQ ID NO: 421439 - DNA, 33 bp, Homo sapien
actgtgtgattccaacgacatcagtctcccatt

SEQ ID NO: 421440 - DNA, 33 bp, Homo sapien
actgtgtgattccaactacatcagtctcccatt

SEQ ID NO: 421441 - DNA, 33 bp, Homo sapien
aaatccgaaaaagctacatacttcctcccaaaa

SEQ ID NO: 421442 - DNA, 33 bp, Homo sapien
aaatccgaaaaagctatatacttcctcccaaaa

SEQ ID NO: 421443 - DNA, 33 bp, Homo sapien
tgaatattggcctagacgaaatccgaaaaagct

SEQ ID NO: 421444 - DNA, 33 bp, Homo sapien
tgaatattggcctagatgaaatccgaaaaagct

SEQ ID NO: 421445 - DNA, 33 bp, Homo sapien
taaaattggtttacacagacacaagtgcctaaa

SEQ ID NO: 421446 - DNA, 33 bp, Homo sapien
taaaattggtttacactgacacaagtgcctaaa

SEQ ID NO: 421447 - DNA, 33 bp, Homo sapien
atggaaataatactggcacttatgcaaaggatt

SEQ ID NO: 421448 - DNA, 33 bp, Homo sapien
atggaaataatactggtacttatgcaaaggatt

SEQ ID NO: 421449 - DNA, 33 bp, Homo sapien
gtattgttttctaacactcctctatcagggcat

SEQ ID NO: 421450 - DNA, 33 bp, Homo sapien
gtattgttttctaacattcctctatcagggcat

SEQ ID NO: 421451 - DNA, 33 bp, Homo sapien
gtgaacccacaatcccagaaagccagtgctaat

SEQ ID NO: 421452 - DNA, 33 bp, Homo sapien
gtgaacccacaatcccggaaagccagtgctaat

SEQ ID NO: 421453 - DNA, 33 bp, Homo sapien
tatggaatgccatggtcacagcaaataaagtca

SEQ ID NO: 421454 - DNA, 33 bp, Homo sapien
tatggaatgccatggtgacagcaaataaagtca

SEQ ID NO: 421455 - DNA, 33 bp, Homo sapien
agaaatataaacagtaagagtcctatttcatca

SEQ ID NO: 421456 - DNA, 33 bp, Homo sapien
agaaatataaacagtaggagtcctatttcatca

SEQ ID NO: 421457 - DNA, 33 bp, Homo sapien
atttcttgatatatacactcacatttttaatat

SEQ ID NO: 421458 - DNA, 33 bp, Homo sapien
atttcttgatatatacgctcacatttttaatat

SEQ ID NO: 421459 - DNA, 33 bp, Homo sapien
ctgataaaagggatcaagtacaaaatggaaatg

SEQ ID NO: 421460 - DNA, 33 bp, Homo sapien
ctgataaaagggatcaggtacaaaatggaaatg

SEQ ID NO: 421461 - DNA, 33 bp, Homo sapien
ggacagtgtgggacgccgaagcaaagcaggaaa

SEQ ID NO: 421462 - DNA, 33 bp, Homo sapien
ggacagtgtgggacgctgaagcaaagcaggaaa

SEQ ID NO: 421463 - DNA, 33 bp, Homo sapien
acagtatattttagagacctatactatccaatc

SEQ ID NO: 421464 - DNA, 33 bp, Homo sapien
acagtatattttagaggcctatactatccaatc

SEQ ID NO: 421465 - DNA, 33 bp, Homo sapien
ctggactagtctgttacggtttgaaagcagatt

SEQ ID NO: 421466 - DNA, 33 bp, Homo sapien
ctggactagtctgttatggtttgaaagcagatt

SEQ ID NO: 421467 - DNA, 33 bp, Homo sapien
aaagagattggtatacgggagaatgttactgtt

SEQ ID NO: 421468 - DNA, 33 bp, Homo sapien
aaagagattggtatactggagaatgttactgtt

SEQ ID NO: 421469 - DNA, 33 bp, Homo sapien
agatggttaaacatacaaaaatcaataaacatg

SEQ ID NO: 421470 - DNA, 33 bp, Homo sapien
agatggttaaacataccaaaatcaataaacatg

SEQ ID NO: 421471 - DNA, 33 bp, Homo sapien
tagcaaaacgaaatctcagataatcaggcctcc

SEQ ID NO: 421472 - DNA, 33 bp, Homo sapien
tagcaaaacgaaatcttagataatcaggcctcc

SEQ ID NO: 421473 - DNA, 33 bp, Homo sapien
gacaaggagtatagtcacgatgggtttcccata

SEQ ID NO: 421474 - DNA, 33 bp, Homo sapien
gacaaggagtatagtcgcgatgggtttcccata

SEQ ID NO: 421475 - DNA, 33 bp, Homo sapien
ctgtataagttggacacgtttctgagtcatagt

SEQ ID NO: 421476 - DNA, 33 bp, Homo sapien
ctgtataagttggacatgtttctgagtcatagt

SEQ ID NO: 421477 - DNA, 33 bp, Homo sapien
gcttctgtttgaataacaaaatgggactgtggc

SEQ ID NO: 421478 - DNA, 33 bp, Homo sapien
gcttctgtttgaataataaaatgggactgtggc

SEQ ID NO: 421479 - DNA, 33 bp, Homo sapien
gttagctaacaatgtacataaaatgcttacaaa

SEQ ID NO: 421480 - DNA, 33 bp, Homo sapien
gttagctaacaatgtagataaaatgcttacaaa

SEQ ID NO: 421481 - DNA, 33 bp, Homo sapien
aaatattgataatctcaacactagccataataa

SEQ ID NO: 421482 - DNA, 33 bp, Homo sapien
aaatattgataatctcgacactagccataataa

SEQ ID NO: 421483 - DNA, 33 bp, Homo sapien
ctgggttttctgccacaaatgaatgattagaaa

SEQ ID NO: 421484 - DNA, 33 bp, Homo sapien
ctgggttttctgccacgaatgaatgattagaaa

SEQ ID NO: 421485 - DNA, 33 bp, Homo sapien
tatgaaactccagataacagtagaggtttgcaa

SEQ ID NO: 421486 - DNA, 33 bp, Homo sapien
tatgaaactccagataccagtagaggtttgcaa

SEQ ID NO: 421487 - DNA, 33 bp, Homo sapien
ctagatcaatggttctcaagatttggtgtgatt

SEQ ID NO: 421488 - DNA, 33 bp, Homo sapien
ctagatcaatggttcttaagatttggtgtgatt

SEQ ID NO: 421489 - DNA, 33 bp, Homo sapien
cctttcaaatgtacacaaaacagagagaattgt

SEQ ID NO: 421490 - DNA, 33 bp, Homo sapien
cctttcaaatgtacacgaaacagagagaattgt

SEQ ID NO: 421491 - DNA, 33 bp, Homo sapien
acttggaataaaaccacaaatgatatttttttc

SEQ ID NO: 421492 - DNA, 33 bp, Homo sapien
acttggaataaaaccagaaatgatatttttttc

SEQ ID NO: 421493 - DNA, 33 bp, Homo sapien
gacgttttatgaattgcatctagcgattttccc

SEQ ID NO: 421494 - DNA, 33 bp, Homo sapien
gacgttttatgaattggatctagcgattttccc

SEQ ID NO: 421495 - DNA, 33 bp, Homo sapien
tactatggacacattaaagaacagaaaaagtct

SEQ ID NO: 421496 - DNA, 33 bp, Homo sapien
tactatggacacattagagaacagaaaaagtct

SEQ ID NO: 421497 - DNA, 33 bp, Homo sapien
ttgatgtaatttgaaaccctcttgcagttcata

SEQ ID NO: 421498 - DNA, 33 bp, Homo sapien
ttgatgtaatttgaaatcctcttgcagttcata

SEQ ID NO: 421499 - DNA, 33 bp, Homo sapien
aaaaagttgttattaccatacctatactatgac

SEQ ID NO: 421500 - DNA, 33 bp, Homo sapien
aaaaagttgttattactatacctatactatgac

SEQ ID NO: 421501 - DNA, 33 bp, Homo sapien
ctatgccattaatcaaaggaacccatctaattt

SEQ ID NO: 421502 - DNA, 33 bp, Homo sapien
ctatgccattaatcaagggaacccatctaattt

SEQ ID NO: 421503 - DNA, 33 bp, Homo sapien
ctgattgtactgccaaaatagtttagactttat

SEQ ID NO: 421504 - DNA, 33 bp, Homo sapien
ctgattgtactgccaacatagtttagactttat

SEQ ID NO: 421505 - DNA, 33 bp, Homo sapien
gaaaccaacattggtaacacactattaacaaaa

SEQ ID NO: 421506 - DNA, 33 bp, Homo sapien
gaaaccaacattggtaccacactattaacaaaa

SEQ ID NO: 421507 - DNA, 33 bp, Homo sapien
aaaccctgagtctcttaaaactagacaattgcc

SEQ ID NO: 421508 - DNA, 33 bp, Homo sapien
aaaccctgagtctcttcaaactagacaattgcc

SEQ ID NO: 421509 - DNA, 33 bp, Homo sapien
gaggaaacaccgatgaatacatatcattaacca

SEQ ID NO: 421510 - DNA, 33 bp, Homo sapien
gaggaaacaccgatgagtacatatcattaacca

SEQ ID NO: 421511 - DNA, 33 bp, Homo sapien
aggctatgctgcaaacacaaatgctggtgtgag

SEQ ID NO: 421512 - DNA, 33 bp, Homo sapien
aggctatgctgcaaacgcaaatgctggtgtgag

SEQ ID NO: 421513 - DNA, 33 bp, Homo sapien
aagccttaatctagtccagcagtgaatactaag

SEQ ID NO: 421514 - DNA, 33 bp, Homo sapien
aagccttaatctagtctagcagtgaatactaag

SEQ ID NO: 421515 - DNA, 33 bp, Homo sapien
actgagaatccacaaaaaacttttgcttaggta

SEQ ID NO: 421516 - DNA, 33 bp, Homo sapien
actgagaatccacaaagaacttttgcttaggta

SEQ ID NO: 421517 - DNA, 33 bp, Homo sapien
acagtgattaactggaaaaggaaagaagagttc

SEQ ID NO: 421518 - DNA, 33 bp, Homo sapien
acagtgattaactggagaaggaaagaagagttc

SEQ ID NO: 421519 - DNA, 33 bp, Homo sapien
ttttttaatcttacaaaccatgataattgctct

SEQ ID NO: 421520 - DNA, 33 bp, Homo sapien
ttttttaatcttacaagccatgataattgctct

SEQ ID NO: 421521 - DNA, 33 bp, Homo sapien
cagcttcccgagtataagaagtaccctgtctct

SEQ ID NO: 421522 - DNA, 33 bp, Homo sapien
cagcttcccgagtataggaagtaccctgtctct

SEQ ID NO: 421523 - DNA, 33 bp, Homo sapien
caaaatatgagataaacatgcattccttatgcg

SEQ ID NO: 421524 - DNA, 33 bp, Homo sapien
caaaatatgagataaatatgcattccttatgcg

SEQ ID NO: 421525 - DNA, 33 bp, Homo sapien
tgcattccttatgcggaaaatgtaaaaaagtta

SEQ ID NO: 421526 - DNA, 33 bp, Homo sapien
tgcattccttatgcgggaaatgtaaaaaagtta

SEQ ID NO: 421527 - DNA, 33 bp, Homo sapien
aagtaacttggaagaccgctatataccactggt

SEQ ID NO: 421528 - DNA, 33 bp, Homo sapien
aagtaacttggaagactgctatataccactggt

SEQ ID NO: 421529 - DNA, 33 bp, Homo sapien
atttgggtatcaaaataaataatgaaagtaatg

SEQ ID NO: 421530 - DNA, 33 bp, Homo sapien
atttgggtatcaaaatgaataatgaaagtaatg

SEQ ID NO: 421531 - DNA, 33 bp, Homo sapien
atataacaatctctgacgacatcagccgcctcc

SEQ ID NO: 421532 - DNA, 33 bp, Homo sapien
atataacaatctctgaggacatcagccgcctcc

SEQ ID NO: 421533 - DNA, 33 bp, Homo sapien
aaagaacttctgcttacgtggattgcatcagta

SEQ ID NO: 421534 - DNA, 33 bp, Homo sapien
aaagaacttctgcttatgtggattgcatcagta

SEQ ID NO: 421535 - DNA, 33 bp, Homo sapien
tatcaatatctcacaaccttacaaagttgaaat

SEQ ID NO: 421536 - DNA, 33 bp, Homo sapien
tatcaatatctcacaatcttacaaagttgaaat

SEQ ID NO: 421537 - DNA, 33 bp, Homo sapien
tcttgaattcttgggaaaaacaccaaatgtcca

SEQ ID NO: 421538 - DNA, 33 bp, Homo sapien
tcttgaattcttgggagaaacaccaaatgtcca

SEQ ID NO: 421539 - DNA, 33 bp, Homo sapien
tggagagcagtgtaaaacgacagagcattttta

SEQ ID NO: 421540 - DNA, 33 bp, Homo sapien
tggagagcagtgtaaagcgacagagcattttta

SEQ ID NO: 421541 - DNA, 33 bp, Homo sapien
atgagtcaagggtcacagagaactcaagaaaac

SEQ ID NO: 421542 - DNA, 33 bp, Homo sapien
atgagtcaagggtcacggagaactcaagaaaac

SEQ ID NO: 421543 - DNA, 33 bp, Homo sapien
gggctacagacggtgaaagatgctgaaaacaca

SEQ ID NO: 421544 - DNA, 33 bp, Homo sapien
gggctacagacggtgagagatgctgaaaacaca

SEQ ID NO: 421545 - DNA, 33 bp, Homo sapien
taagataggtcagatacgacacatctttttttt

SEQ ID NO: 421546 - DNA, 33 bp, Homo sapien
taagataggtcagataggacacatctttttttt

SEQ ID NO: 421547 - DNA, 33 bp, Homo sapien
aaacctgcctttgtccagcatttccctgcagga

SEQ ID NO: 421548 - DNA, 33 bp, Homo sapien
aaacctgcctttgtcccgcatttccctgcagga

SEQ ID NO: 421549 - DNA, 33 bp, Homo sapien
agacagatccagatagacccatggctccatcat

SEQ ID NO: 421550 - DNA, 33 bp, Homo sapien
agacagatccagataggcccatggctccatcat

SEQ ID NO: 421551 - DNA, 33 bp, Homo sapien
cagcatcaagtcagaaactttgtgtaatcatat

SEQ ID NO: 421552 - DNA, 33 bp, Homo sapien
cagcatcaagtcagaagctttgtgtaatcatat

SEQ ID NO: 421553 - DNA, 33 bp, Homo sapien
aagatacctgctcacacccctcacctgattctt

SEQ ID NO: 421554 - DNA, 33 bp, Homo sapien
aagatacctgctcacagccctcacctgattctt

SEQ ID NO: 421555 - DNA, 33 bp, Homo sapien
ggaaaggagagaggataacaaccttgtgcccat

SEQ ID NO: 421556 - DNA, 33 bp, Homo sapien
ggaaaggagagaggatgacaaccttgtgcccat

SEQ ID NO: 421557 - DNA, 33 bp, Homo sapien
tattaccattagtctcacttcctcttattcctc

SEQ ID NO: 421558 - DNA, 33 bp, Homo sapien
tattaccattagtctcgcttcctcttattcctc

SEQ ID NO: 421559 - DNA, 33 bp, Homo sapien
ataccgatgtgttacaaagcaatatgaaatatc

SEQ ID NO: 421560 - DNA, 33 bp, Homo sapien
ataccgatgtgttacagagcaatatgaaatatc

SEQ ID NO: 421561 - DNA, 33 bp, Homo sapien
aatattctggtaactactaggtctttggttcta

SEQ ID NO: 421562 - DNA, 33 bp, Homo sapien
aatattctggtaactattaggtctttggttcta

SEQ ID NO: 421563 - DNA, 33 bp, Homo sapien
agatacttcagagaacaatgaaaatgcacatcc

SEQ ID NO: 421564 - DNA, 33 bp, Homo sapien
agatacttcagagaacgatgaaaatgcacatcc

SEQ ID NO: 421565 - DNA, 33 bp, Homo sapien
aataattcacaacaagcctggatgaagtggtcc

SEQ ID NO: 421566 - DNA, 33 bp, Homo sapien
aataattcacaacaagtctggatgaagtggtcc

SEQ ID NO: 421567 - DNA, 33 bp, Homo sapien
tttctaacacagaggaaccaacaaatgtgatgt

SEQ ID NO: 421568 - DNA, 33 bp, Homo sapien
tttctaacacagaggagccaacaaatgtgatgt

SEQ ID NO: 421569 - DNA, 33 bp, Homo sapien
tcacacaactttagccgctacttataaaacttc

SEQ ID NO: 421570 - DNA, 33 bp, Homo sapien
tcacacaactttagcctctacttataaaacttc

SEQ ID NO: 421571 - DNA, 33 bp, Homo sapien
caacagctctaggggcagaatgcgtatttacag

SEQ ID NO: 421572 - DNA, 33 bp, Homo sapien
caacagctctaggggcggaatgcgtatttacag

SEQ ID NO: 421573 - DNA, 33 bp, Homo sapien
gatgtgcatctttgcaaaagtcatgtctctgaa

SEQ ID NO: 421574 - DNA, 33 bp, Homo sapien
gatgtgcatctttgcagaagtcatgtctctgaa

SEQ ID NO: 421575 - DNA, 33 bp, Homo sapien
caagtaacacatcaaccggaatgccttgctttg

SEQ ID NO: 421576 - DNA, 33 bp, Homo sapien
caagtaacacatcaactggaatgccttgctttg

SEQ ID NO: 421577 - DNA, 33 bp, Homo sapien
agtcaagtagggtccactggaaaccaaagtgaa

SEQ ID NO: 421578 - DNA, 33 bp, Homo sapien
agtcaagtagggtccattggaaaccaaagtgaa

SEQ ID NO: 421579 - DNA, 33 bp, Homo sapien
cagctgacttacaataagcatgtaacatgagca

SEQ ID NO: 421580 - DNA, 33 bp, Homo sapien
cagctgacttacaataggcatgtaacatgagca

SEQ ID NO: 421581 - DNA, 33 bp, Homo sapien
tacttgctttgaccaacgaaatagaagcagaaa

SEQ ID NO: 421582 - DNA, 33 bp, Homo sapien
tacttgctttgaccaatgaaatagaagcagaaa

SEQ ID NO: 421583 - DNA, 33 bp, Homo sapien
tgatatcaacagggccaagatgtgtgatcctct

SEQ ID NO: 421584 - DNA, 33 bp, Homo sapien
tgatatcaacagggccgagatgtgtgatcctct

SEQ ID NO: 421585 - DNA, 33 bp, Homo sapien
aaattcgtgcaagtataaaagatatcaaagaat

SEQ ID NO: 421586 - DNA, 33 bp, Homo sapien
aaattcgtgcaagtatgaaagatatcaaagaat

SEQ ID NO: 421587 - DNA, 33 bp, Homo sapien
tgaaggaggcatttgcagagaacatccacagag

SEQ ID NO: 421588 - DNA, 33 bp, Homo sapien
tgaaggaggcatttgcggagaacatccacagag

SEQ ID NO: 421589 - DNA, 33 bp, Homo sapien
ctatctagggagaaagacaattacattacgcag

SEQ ID NO: 421590 - DNA, 33 bp, Homo sapien
ctatctagggagaaaggcaattacattacgcag

SEQ ID NO: 421591 - DNA, 33 bp, Homo sapien
tagaggacaccctctgcatacaatgccagactt

SEQ ID NO: 421592 - DNA, 33 bp, Homo sapien
tagaggacaccctctggatacaatgccagactt

SEQ ID NO: 421593 - DNA, 33 bp, Homo sapien
cttcctcctttgagagactatcaatctggctct

SEQ ID NO: 421594 - DNA, 33 bp, Homo sapien
cttcctcctttgagaggctatcaatctggctct

SEQ ID NO: 421595 - DNA, 33 bp, Homo sapien
ccttatttgatcctgcactttgatctgctcaga

SEQ ID NO: 421596 - DNA, 33 bp, Homo sapien
ccttatttgatcctgctctttgatctgctcaga

SEQ ID NO: 421597 - DNA, 33 bp, Homo sapien
aaatttttcaatgttgcaatgaacagagacaca

SEQ ID NO: 421598 - DNA, 33 bp, Homo sapien
aaatttttcaatgttgtaatgaacagagacaca

SEQ ID NO: 421599 - DNA, 33 bp, Homo sapien
cttgatttaccaaggaaccatttatttcaccac

SEQ ID NO: 421600 - DNA, 33 bp, Homo sapien
cttgatttaccaaggagccatttatttcaccac

SEQ ID NO: 421601 - DNA, 33 bp, Homo sapien
gagttggccagcatgaaccctaataacagtagg

SEQ ID NO: 421602 - DNA, 33 bp, Homo sapien
gagttggccagcatgagccctaataacagtagg

SEQ ID NO: 421603 - DNA, 33 bp, Homo sapien
tctcagtacatgttaacattaattgtgattgtt

SEQ ID NO: 421604 - DNA, 33 bp, Homo sapien
tctcagtacatgttaatattaattgtgattgtt

SEQ ID NO: 421605 - DNA, 33 bp, Homo sapien
tactactctatcaccaatatcttttctatggtt

SEQ ID NO: 421606 - DNA, 33 bp, Homo sapien
tactactctatcaccagtatcttttctatggtt

SEQ ID NO: 421607 - DNA, 33 bp, Homo sapien
agtactttgctttaaccctggagacttcagttt

SEQ ID NO: 421608 - DNA, 33 bp, Homo sapien
agtactttgctttaactctggagacttcagttt

SEQ ID NO: 421609 - DNA, 33 bp, Homo sapien
gcaaaacaaatcccaacgagaggtcacctcaca

SEQ ID NO: 421610 - DNA, 33 bp, Homo sapien
gcaaaacaaatcccaatgagaggtcacctcaca

SEQ ID NO: 421611 - DNA, 33 bp, Homo sapien
ttaatcatatggtgtaaagtttcagtcaagcaa

SEQ ID NO: 421612 - DNA, 33 bp, Homo sapien
ttaatcatatggtgtagagtttcagtcaagcaa

SEQ ID NO: 421613 - DNA, 33 bp, Homo sapien
aaacataacaggtaaacggacagctgaggatag

SEQ ID NO: 421614 - DNA, 33 bp, Homo sapien
aaacataacaggtaaatggacagctgaggatag

SEQ ID NO: 421615 - DNA, 33 bp, Homo sapien
gctatagaatatcccacgagttattgtggagat

SEQ ID NO: 421616 - DNA, 33 bp, Homo sapien
gctatagaatatcccatgagttattgtggagat

SEQ ID NO: 421617 - DNA, 33 bp, Homo sapien
agtgcttccagtagcccaggttccagagtaacc

SEQ ID NO: 421618 - DNA, 33 bp, Homo sapien
agtgcttccagtagcctaggttccagagtaacc

SEQ ID NO: 421619 - DNA, 33 bp, Homo sapien
taaatcagcctgataactccttttggtaggggg

SEQ ID NO: 421620 - DNA, 33 bp, Homo sapien
taaatcagcctgataattccttttggtaggggg

SEQ ID NO: 421621 - DNA, 33 bp, Homo sapien
tgcatgcatttactcccctcataaacatgtatt

SEQ ID NO: 421622 - DNA, 33 bp, Homo sapien
tgcatgcatttactcctctcataaacatgtatt

SEQ ID NO: 421623 - DNA, 33 bp, Homo sapien
gcagttacacgattcaaagctgctggcagttaa

SEQ ID NO: 421624 - DNA, 33 bp, Homo sapien
gcagttacacgattcagagctgctggcagttaa

SEQ ID NO: 421625 - DNA, 33 bp, Homo sapien
tctttccaacagtgaccagggtcttaacaagca

SEQ ID NO: 421626 - DNA, 33 bp, Homo sapien
tctttccaacagtgacgagggtcttaacaagca

SEQ ID NO: 421627 - DNA, 33 bp, Homo sapien
ttatagagaaatgtagaaccaatatattatatc

SEQ ID NO: 421628 - DNA, 33 bp, Homo sapien
ttatagagaaatgtaggaccaatatattatatc

SEQ ID NO: 421629 - DNA, 33 bp, Homo sapien
gccaacaaaatgtgggccatcatgctatacagc

SEQ ID NO: 421630 - DNA, 33 bp, Homo sapien
gccaacaaaatgtgggtcatcatgctatacagc

SEQ ID NO: 421631 - DNA, 33 bp, Homo sapien
aatgaacaatctccacgcaaatccatgtctcag

SEQ ID NO: 421632 - DNA, 33 bp, Homo sapien
aatgaacaatctccactcaaatccatgtctcag

SEQ ID NO: 421633 - DNA, 33 bp, Homo sapien
agtttctttgtgcaaccggcttatctggaatgc

SEQ ID NO: 421634 - DNA, 33 bp, Homo sapien
agtttctttgtgcaactggcttatctggaatgc

SEQ ID NO: 421635 - DNA, 33 bp, Homo sapien
gagatgtcatacacttgaagataactcgatttt

SEQ ID NO: 421636 - DNA, 33 bp, Homo sapien
gagatgtcatacactttaagataactcgatttt

SEQ ID NO: 421637 - DNA, 33 bp, Homo sapien
ccaggaatactttcaaatgatcgactccttttc

SEQ ID NO: 421638 - DNA, 33 bp, Homo sapien
ccaggaatactttcaagtgatcgactccttttc

SEQ ID NO: 421639 - DNA, 33 bp, Homo sapien
gataaactaagtgacactcagctaggaaaaaaa

SEQ ID NO: 421640 - DNA, 33 bp, Homo sapien
gataaactaagtgacattcagctaggaaaaaaa

SEQ ID NO: 421641 - DNA, 33 bp, Homo sapien
ttttggaaattggaaacttataggtgtgtgcaa

SEQ ID NO: 421642 - DNA, 33 bp, Homo sapien
ttttggaaattggaaatttataggtgtgtgcaa

SEQ ID NO: 421643 - DNA, 33 bp, Homo sapien
tgctcagtctaggaaaacttaggccaaaggttt

SEQ ID NO: 421644 - DNA, 33 bp, Homo sapien
tgctcagtctaggaaagcttaggccaaaggttt

SEQ ID NO: 421645 - DNA, 33 bp, Homo sapien
atttgcaaaaccttctgaagttccattagccag

SEQ ID NO: 421646 - DNA, 33 bp, Homo sapien
atttgcaaaaccttcttaagttccattagccag

SEQ ID NO: 421647 - DNA, 33 bp, Homo sapien
gtgttaaggaagaaccacgagaggagtgcccag

SEQ ID NO: 421648 - DNA, 33 bp, Homo sapien
gtgttaaggaagaaccgcgagaggagtgcccag

SEQ ID NO: 421649 - DNA, 33 bp, Homo sapien
attggactattcatcaactgtgcactttttgtt

SEQ ID NO: 421650 - DNA, 33 bp, Homo sapien
attggactattcatcagctgtgcactttttgtt

SEQ ID NO: 421651 - DNA, 33 bp, Homo sapien
caacaactgaaaccaactcaattgagcagaaac

SEQ ID NO: 421652 - DNA, 33 bp, Homo sapien
caacaactgaaaccaattcaattgagcagaaac

SEQ ID NO: 421653 - DNA, 33 bp, Homo sapien
gacacctcacttggataagagcattagcaaagg

SEQ ID NO: 421654 - DNA, 33 bp, Homo sapien
gacacctcacttggatgagagcattagcaaagg

SEQ ID NO: 421655 - DNA, 33 bp, Homo sapien
ttgttatcactctgaccggtgtcttgttttctg

SEQ ID NO: 421656 - DNA, 33 bp, Homo sapien
ttgttatcactctgactggtgtcttgttttctg

SEQ ID NO: 421657 - DNA, 33 bp, Homo sapien
ttctcaaatttcaaacaactacccagacttgca

SEQ ID NO: 421658 - DNA, 33 bp, Homo sapien
ttctcaaatttcaaacgactacccagacttgca

SEQ ID NO: 421659 - DNA, 33 bp, Homo sapien
attatgcaacctgttcaaggccctactgctgaa

SEQ ID NO: 421660 - DNA, 33 bp, Homo sapien
attatgcaacctgttcgaggccctactgctgaa

SEQ ID NO: 421661 - DNA, 33 bp, Homo sapien
gtttcttttctggtgacggagaagaataaaggt

SEQ ID NO: 421662 - DNA, 33 bp, Homo sapien
gtttcttttctggtgatggagaagaataaaggt

SEQ ID NO: 421663 - DNA, 33 bp, Homo sapien
catggccgtatccacactgaatctggacttttt

SEQ ID NO: 421664 - DNA, 33 bp, Homo sapien
catggccgtatccacattgaatctggacttttt

SEQ ID NO: 421665 - DNA, 33 bp, Homo sapien
taaacaggcttccgtgacaaaacatttttattt

SEQ ID NO: 421666 - DNA, 33 bp, Homo sapien
taaacaggcttccgtggcaaaacatttttattt

SEQ ID NO: 421667 - DNA, 33 bp, Homo sapien
ttaaatacgaattcaacatacacgaactgttcc

SEQ ID NO: 421668 - DNA, 33 bp, Homo sapien
ttaaatacgaattcaatatacacgaactgttcc

SEQ ID NO: 421669 - DNA, 33 bp, Homo sapien
caattccaggtttcctcacctatattacagggt

SEQ ID NO: 421670 - DNA, 33 bp, Homo sapien
caattccaggtttccttacctatattacagggt

SEQ ID NO: 421671 - DNA, 33 bp, Homo sapien
agccactccctcttaccctacgtggacagactt

SEQ ID NO: 421672 - DNA, 33 bp, Homo sapien
agccactccctcttactctacgtggacagactt

SEQ ID NO: 421673 - DNA, 33 bp, Homo sapien
cagccacctacagtgcaagatgaaaagcctaat

SEQ ID NO: 421674 - DNA, 33 bp, Homo sapien
cagccacctacagtgcgagatgaaaagcctaat

SEQ ID NO: 421675 - DNA, 33 bp, Homo sapien
gttatggttataatgacgacagtaatagcctcc

SEQ ID NO: 421676 - DNA, 33 bp, Homo sapien
gttatggttataatgatgacagtaatagcctcc

SEQ ID NO: 421677 - DNA, 33 bp, Homo sapien
agaagtatcacctcccaagattacatttactgt

SEQ ID NO: 421678 - DNA, 33 bp, Homo sapien
agaagtatcacctcccgagattacatttactgt

SEQ ID NO: 421679 - DNA, 33 bp, Homo sapien
gaatcacctcccaatcccgtgattttgtttctg

SEQ ID NO: 421680 - DNA, 33 bp, Homo sapien
gaatcacctcccaatctcgtgattttgtttctg

SEQ ID NO: 421681 - DNA, 33 bp, Homo sapien
cccctgagaagttaataaaagctctggccctta

SEQ ID NO: 421682 - DNA, 33 bp, Homo sapien
cccctgagaagttaatgaaagctctggccctta

SEQ ID NO: 421683 - DNA, 33 bp, Homo sapien
atttttccaaattccccgaggcacaactccagg

SEQ ID NO: 421684 - DNA, 33 bp, Homo sapien
atttttccaaattccctgaggcacaactccagg

SEQ ID NO: 421685 - DNA, 33 bp, Homo sapien
ttacaggtaagtggtacattccttaaataatac

SEQ ID NO: 421686 - DNA, 33 bp, Homo sapien
ttacaggtaagtggtatattccttaaataatac

SEQ ID NO: 421687 - DNA, 33 bp, Homo sapien
aagctaattcaaaggaggtattttgtggttggg

SEQ ID NO: 421688 - DNA, 33 bp, Homo sapien
aagctaattcaaaggatgtattttgtggttggg

SEQ ID NO: 421689 - DNA, 33 bp, Homo sapien
ggaaagagcagtgaaacggaagtcaggttccgg

SEQ ID NO: 421690 - DNA, 33 bp, Homo sapien
ggaaagagcagtgaaatggaagtcaggttccgg

SEQ ID NO: 421691 - DNA, 33 bp, Homo sapien
tcatagagacgaaaaaacagaatattaagttaa

SEQ ID NO: 421692 - DNA, 33 bp, Homo sapien
tcatagagacgaaaaagcagaatattaagttaa

SEQ ID NO: 421693 - DNA, 33 bp, Homo sapien
atacaagtagcaagaaatgaaatatagctggct

SEQ ID NO: 421694 - DNA, 33 bp, Homo sapien
atacaagtagcaagaactgaaatatagctggct

SEQ ID NO: 421695 - DNA, 33 bp, Homo sapien
caaacttgcacatactaagtactgactgtgata

SEQ ID NO: 421696 - DNA, 33 bp, Homo sapien
caaacttgcacatactgagtactgactgtgata

SEQ ID NO: 421697 - DNA, 33 bp, Homo sapien
gctctataactagagccaggaaagaggaagatc

SEQ ID NO: 421698 - DNA, 33 bp, Homo sapien
gctctataactagagcgaggaaagaggaagatc

SEQ ID NO: 421699 - DNA, 33 bp, Homo sapien
cctgcatatcttctagccaatcacagttgcttc

SEQ ID NO: 421700 - DNA, 33 bp, Homo sapien
cctgcatatcttctaggcaatcacagttgcttc

SEQ ID NO: 421701 - DNA, 33 bp, Homo sapien
ctaagaaaaaaactaacgtggcaacagaaagat

SEQ ID NO: 421702 - DNA, 33 bp, Homo sapien
ctaagaaaaaaactaatgtggcaacagaaagat

SEQ ID NO: 421703 - DNA, 33 bp, Homo sapien
ttcttccttttcttacaagggcataatcgtgtc

SEQ ID NO: 421704 - DNA, 33 bp, Homo sapien
ttcttccttttcttaccagggcataatcgtgtc

SEQ ID NO: 421705 - DNA, 33 bp, Homo sapien
attgtaataaacagtacgcagtttaggaattta

SEQ ID NO: 421706 - DNA, 33 bp, Homo sapien
attgtaataaacagtatgcagtttaggaattta

SEQ ID NO: 421707 - DNA, 33 bp, Homo sapien
tggaataaggagaccaacattagcagattatca

SEQ ID NO: 421708 - DNA, 33 bp, Homo sapien
tggaataaggagaccagcattagcagattatca

SEQ ID NO: 421709 - DNA, 33 bp, Homo sapien
gcaaaggctagaaccacgggaaattctgaagta

SEQ ID NO: 421710 - DNA, 33 bp, Homo sapien
gcaaaggctagaaccatgggaaattctgaagta

SEQ ID NO: 421711 - DNA, 33 bp, Homo sapien
ccctccctgcatggaagtgactaaatagcagca

SEQ ID NO: 421712 - DNA, 33 bp, Homo sapien
ccctccctgcatggaattgactaaatagcagca

SEQ ID NO: 421713 - DNA, 33 bp, Homo sapien
aatacatagctattacactttttacaagtctgt

SEQ ID NO: 421714 - DNA, 33 bp, Homo sapien
aatacatagctattacgctttttacaagtctgt

SEQ ID NO: 421715 - DNA, 33 bp, Homo sapien
ataaaactgttgcatcgcaggtcattaggcatt

SEQ ID NO: 421716 - DNA, 33 bp, Homo sapien
ataaaactgttgcatctcaggtcattaggcatt

SEQ ID NO: 421717 - DNA, 33 bp, Homo sapien
acatcataacaaagtagggttagaacaaaagac

SEQ ID NO: 421718 - DNA, 33 bp, Homo sapien
acatcataacaaagtatggttagaacaaaagac

SEQ ID NO: 421719 - DNA, 33 bp, Homo sapien
tcttaattaacttgcacatccactcaccagtaa

SEQ ID NO: 421720 - DNA, 33 bp, Homo sapien
tcttaattaacttgcatatccactcaccagtaa

SEQ ID NO: 421721 - DNA, 33 bp, Homo sapien
cactgtatgccccaaaccataaactaattattt

SEQ ID NO: 421722 - DNA, 33 bp, Homo sapien
cactgtatgccccaaatcataaactaattattt

SEQ ID NO: 421723 - DNA, 33 bp, Homo sapien
ctgtcttttgaaagtacgattagtgtttcggtt

SEQ ID NO: 421724 - DNA, 33 bp, Homo sapien
ctgtcttttgaaagtatgattagtgtttcggtt

SEQ ID NO: 421725 - DNA, 33 bp, Homo sapien
tagtgaaaagcacccccatctattcagttgtcc

SEQ ID NO: 421726 - DNA, 33 bp, Homo sapien
tagtgaaaagcacccctatctattcagttgtcc

SEQ ID NO: 421727 - DNA, 33 bp, Homo sapien
ggcatccacaagtttaaagcagggagagtaaat

SEQ ID NO: 421728 - DNA, 33 bp, Homo sapien
ggcatccacaagtttacagcagggagagtaaat

SEQ ID NO: 421729 - DNA, 33 bp, Homo sapien
tctttcaatacggtcaatcgattaatctatctg

SEQ ID NO: 421730 - DNA, 33 bp, Homo sapien
tctttcaatacggtcattcgattaatctatctg

SEQ ID NO: 421731 - DNA, 33 bp, Homo sapien
attccaaacacaattccgaatcttgcctactcc

SEQ ID NO: 421732 - DNA, 33 bp, Homo sapien
attccaaacacaattctgaatcttgcctactcc

SEQ ID NO: 421733 - DNA, 33 bp, Homo sapien
tatctccattcaagaacaaggcagcaggccggg

SEQ ID NO: 421734 - DNA, 33 bp, Homo sapien
tatctccattcaagaataaggcagcaggccggg

SEQ ID NO: 421735 - DNA, 33 bp, Homo sapien
gttttactgttgaggcacttgatctgcagagca

SEQ ID NO: 421736 - DNA, 33 bp, Homo sapien
gttttactgttgaggcgcttgatctgcagagca

SEQ ID NO: 421737 - DNA, 33 bp, Homo sapien
caatctttcagaggaaaaatgggacagacatga

SEQ ID NO: 421738 - DNA, 33 bp, Homo sapien
caatctttcagaggaacaatgggacagacatga

SEQ ID NO: 421739 - DNA, 33 bp, Homo sapien
ataaatgtagtaatgaagatcatccttacaaaa

SEQ ID NO: 421740 - DNA, 33 bp, Homo sapien
ataaatgtagtaatgaggatcatccttacaaaa

SEQ ID NO: 421741 - DNA, 33 bp, Homo sapien
ccctggagatttagacagagattgagactattt

SEQ ID NO: 421742 - DNA, 33 bp, Homo sapien
ccctggagatttagacggagattgagactattt

SEQ ID NO: 421743 - DNA, 33 bp, Homo sapien
ctttaggtcatatgcaactctttatggaataaa

SEQ ID NO: 421744 - DNA, 33 bp, Homo sapien
ctttaggtcatatgcacctctttatggaataaa

SEQ ID NO: 421745 - DNA, 33 bp, Homo sapien
gagaataaataaattcacatatccaaacctaca

SEQ ID NO: 421746 - DNA, 33 bp, Homo sapien
gagaataaataaattcgcatatccaaacctaca

SEQ ID NO: 421747 - DNA, 33 bp, Homo sapien
tggcacctgtcaaccaactgtgattttctcttc

SEQ ID NO: 421748 - DNA, 33 bp, Homo sapien
tggcacctgtcaaccatctgtgattttctcttc

SEQ ID NO: 421749 - DNA, 33 bp, Homo sapien
cctttcccacggctcacctctctcttggagttc

SEQ ID NO: 421750 - DNA, 33 bp, Homo sapien
cctttcccacggctcatctctctcttggagttc

SEQ ID NO: 421751 - DNA, 33 bp, Homo sapien
atttatccaaaagaaccgaaatgagcacgtcaa

SEQ ID NO: 421752 - DNA, 33 bp, Homo sapien
atttatccaaaagaactgaaatgagcacgtcaa

SEQ ID NO: 421753 - DNA, 33 bp, Homo sapien
tatgaataattctgcaatgaatgcaggtgtaca

SEQ ID NO: 421754 - DNA, 33 bp, Homo sapien
tatgaataattctgcagtgaatgcaggtgtaca

SEQ ID NO: 421755 - DNA, 33 bp, Homo sapien
agtaaaaactatggcactatgacctgttgttgc

SEQ ID NO: 421756 - DNA, 33 bp, Homo sapien
agtaaaaactatggcagtatgacctgttgttgc

SEQ ID NO: 421757 - DNA, 33 bp, Homo sapien
gaagcaaataatggaaaaaaggtttcagataaa

SEQ ID NO: 421758 - DNA, 33 bp, Homo sapien
gaagcaaataatggaagaaaggtttcagataaa

SEQ ID NO: 421759 - DNA, 33 bp, Homo sapien
tccagaccaaagacacaaatttatggacaaaat

SEQ ID NO: 421760 - DNA, 33 bp, Homo sapien
tccagaccaaagacacgaatttatggacaaaat

SEQ ID NO: 421761 - DNA, 33 bp, Homo sapien
actaggagtatatagccatggagatcatcttcc

SEQ ID NO: 421762 - DNA, 33 bp, Homo sapien
actaggagtatatagctatggagatcatcttcc

SEQ ID NO: 421763 - DNA, 33 bp, Homo sapien
accatcaatgaaactacatgtactaaatttctc

SEQ ID NO: 421764 - DNA, 33 bp, Homo sapien
accatcaatgaaactagatgtactaaatttctc

SEQ ID NO: 421765 - DNA, 33 bp, Homo sapien
tattctccttgactaacccacattctccttgtt

SEQ ID NO: 421766 - DNA, 33 bp, Homo sapien
tattctccttgactaatccacattctccttgtt

SEQ ID NO: 421767 - DNA, 33 bp, Homo sapien
gaccttctaccatgtggaagtagccatgtggga

SEQ ID NO: 421768 - DNA, 33 bp, Homo sapien
gaccttctaccatgtgtaagtagccatgtggga

SEQ ID NO: 421769 - DNA, 33 bp, Homo sapien
agagacgggataaccacagggcaacacatctga

SEQ ID NO: 421770 - DNA, 33 bp, Homo sapien
agagacgggataaccagagggcaacacatctga

SEQ ID NO: 421771 - DNA, 33 bp, Homo sapien
ctacctgaatgtctcaaaagcatcccagagtct

SEQ ID NO: 421772 - DNA, 33 bp, Homo sapien
ctacctgaatgtctcagaagcatcccagagtct

SEQ ID NO: 421773 - DNA, 33 bp, Homo sapien
ccacgcctaccccagcagaaatcgttcgtactt

SEQ ID NO: 421774 - DNA, 33 bp, Homo sapien
ccacgcctaccccagcggaaatcgttcgtactt

SEQ ID NO: 421775 - DNA, 33 bp, Homo sapien
caggaatgtgtcctaacggtattaacgttacac

SEQ ID NO: 421776 - DNA, 33 bp, Homo sapien
caggaatgtgtcctaatggtattaacgttacac

SEQ ID NO: 421777 - DNA, 33 bp, Homo sapien
gccaatgagaagtagcaaaaggactcatgaaga

SEQ ID NO: 421778 - DNA, 33 bp, Homo sapien
gccaatgagaagtagccaaaggactcatgaaga

SEQ ID NO: 421779 - DNA, 33 bp, Homo sapien
atctataataaaacagaatgtggttacctctgg

SEQ ID NO: 421780 - DNA, 33 bp, Homo sapien
atctataataaaacaggatgtggttacctctgg

SEQ ID NO: 421781 - DNA, 33 bp, Homo sapien
ctctttgtggtttcctcaaatggcactgcttta

SEQ ID NO: 421782 - DNA, 33 bp, Homo sapien
ctctttgtggtttcctgaaatggcactgcttta

SEQ ID NO: 421783 - DNA, 33 bp, Homo sapien
aatgcagtacaatcaacggattagaggccctga

SEQ ID NO: 421784 - DNA, 33 bp, Homo sapien
aatgcagtacaatcaatggattagaggccctga

SEQ ID NO: 421785 - DNA, 33 bp, Homo sapien
ttattttgtttttccaatgaggaaggatttaaa

SEQ ID NO: 421786 - DNA, 33 bp, Homo sapien
ttattttgtttttccagtgaggaaggatttaaa

SEQ ID NO: 421787 - DNA, 33 bp, Homo sapien
tccaaatgtagcttcacgtcaggccggtttaca

SEQ ID NO: 421788 - DNA, 33 bp, Homo sapien
tccaaatgtagcttcatgtcaggccggtttaca

SEQ ID NO: 421789 - DNA, 33 bp, Homo sapien
gcaagtcacagtcagacagaatgccaaaggatc

SEQ ID NO: 421790 - DNA, 33 bp, Homo sapien
gcaagtcacagtcagagagaatgccaaaggatc

SEQ ID NO: 421791 - DNA, 33 bp, Homo sapien
tcctcctattcagggaaccaacaaactagggtc

SEQ ID NO: 421792 - DNA, 33 bp, Homo sapien
tcctcctattcagggagccaacaaactagggtc

SEQ ID NO: 421793 - DNA, 33 bp, Homo sapien
aggactttccagagaaccttataacagtattga

SEQ ID NO: 421794 - DNA, 33 bp, Homo sapien
aggactttccagagaatcttataacagtattga

SEQ ID NO: 421795 - DNA, 33 bp, Homo sapien
cttttatgtaaaacaactgcataaggcagaata

SEQ ID NO: 421796 - DNA, 33 bp, Homo sapien
cttttatgtaaaacaattgcataaggcagaata

SEQ ID NO: 421797 - DNA, 33 bp, Homo sapien
atagatgaggaataaccgacttcatgtaagtga

SEQ ID NO: 421798 - DNA, 33 bp, Homo sapien
atagatgaggaataactgacttcatgtaagtga

SEQ ID NO: 421799 - DNA, 33 bp, Homo sapien
ggagaattgctggttcaacttttaggaacgatt

SEQ ID NO: 421800 - DNA, 33 bp, Homo sapien
ggagaattgctggttcgacttttaggaacgatt

SEQ ID NO: 421801 - DNA, 33 bp, Homo sapien
gtttgttattcagtcacattgttgtattgtctc

SEQ ID NO: 421802 - DNA, 33 bp, Homo sapien
gtttgttattcagtcagattgttgtattgtctc

SEQ ID NO: 421803 - DNA, 33 bp, Homo sapien
tatttcacttgtaaaacagaatctcaactggtt

SEQ ID NO: 421804 - DNA, 33 bp, Homo sapien
tatttcacttgtaaaatagaatctcaactggtt

SEQ ID NO: 421805 - DNA, 33 bp, Homo sapien
tatatataaacacataggtatggttcctccact

SEQ ID NO: 421806 - DNA, 33 bp, Homo sapien
tatatataaacacatatgtatggttcctccact

SEQ ID NO: 421807 - DNA, 33 bp, Homo sapien
aaaggatgcttgagaactgaaaccagttattca

SEQ ID NO: 421808 - DNA, 33 bp, Homo sapien
aaaggatgcttgagaattgaaaccagttattca

SEQ ID NO: 421809 - DNA, 33 bp, Homo sapien
ggagaccggaaagggcaagatgcttcagagctt

SEQ ID NO: 421810 - DNA, 33 bp, Homo sapien
ggagaccggaaagggccagatgcttcagagctt

SEQ ID NO: 421811 - DNA, 33 bp, Homo sapien
cacaattaaagcattacagtgcaatacacagaa

SEQ ID NO: 421812 - DNA, 33 bp, Homo sapien
cacaattaaagcattatagtgcaatacacagaa

SEQ ID NO: 421813 - DNA, 33 bp, Homo sapien
actgtgaaatgtgactaaatgatatcaggaggc

SEQ ID NO: 421814 - DNA, 33 bp, Homo sapien
actgtgaaatgtgactgaatgatatcaggaggc

SEQ ID NO: 421815 - DNA, 33 bp, Homo sapien
gatacctcatcacccccgatacattattatgta

SEQ ID NO: 421816 - DNA, 33 bp, Homo sapien
gatacctcatcacccctgatacattattatgta

SEQ ID NO: 421817 - DNA, 33 bp, Homo sapien
tgtccgcctcagtgacaaggatcttcataactt

SEQ ID NO: 421818 - DNA, 33 bp, Homo sapien
tgtccgcctcagtgacgaggatcttcataactt

SEQ ID NO: 421819 - DNA, 33 bp, Homo sapien
tcactgaggcggacaacgcacacaatacccaga

SEQ ID NO: 421820 - DNA, 33 bp, Homo sapien
tcactgaggcggacaatgcacacaatacccaga

SEQ ID NO: 421821 - DNA, 33 bp, Homo sapien
aagaaaatgtattacacgatgtcacttcagcaa

SEQ ID NO: 421822 - DNA, 33 bp, Homo sapien
aagaaaatgtattacatgatgtcacttcagcaa

SEQ ID NO: 421823 - DNA, 33 bp, Homo sapien
gcattctaaaggataacgtatggatcgagaact

SEQ ID NO: 421824 - DNA, 33 bp, Homo sapien
gcattctaaaggataatgtatggatcgagaact

SEQ ID NO: 421825 - DNA, 33 bp, Homo sapien
tgattaatcagcttcacattcctcaaggtacct

SEQ ID NO: 421826 - DNA, 33 bp, Homo sapien
tgattaatcagcttcatattcctcaaggtacct

SEQ ID NO: 421827 - DNA, 33 bp, Homo sapien
tgtaatacatgccattaaaaaattacagagtgg

SEQ ID NO: 421828 - DNA, 33 bp, Homo sapien
tgtaatacatgccattgaaaaattacagagtgg

SEQ ID NO: 421829 - DNA, 33 bp, Homo sapien
taattgaaagtgtatacgtagaggactgatagc

SEQ ID NO: 421830 - DNA, 33 bp, Homo sapien
taattgaaagtgtatatgtagaggactgatagc

SEQ ID NO: 421831 - DNA, 33 bp, Homo sapien
cttaaccactcagtacactagccaaatccttgc

SEQ ID NO: 421832 - DNA, 33 bp, Homo sapien
cttaaccactcagtacgctagccaaatccttgc

SEQ ID NO: 421833 - DNA, 33 bp, Homo sapien
agtggttcccacaggaagtttggtgtcagtttc

SEQ ID NO: 421834 - DNA, 33 bp, Homo sapien
agtggttcccacaggacgtttggtgtcagtttc

SEQ ID NO: 421835 - DNA, 33 bp, Homo sapien
gactccgtgagagtgacgtaactgtttagaaag

SEQ ID NO: 421836 - DNA, 33 bp, Homo sapien
gactccgtgagagtgatgtaactgtttagaaag

SEQ ID NO: 421837 - DNA, 33 bp, Homo sapien
ttgcagataatcttcaccaacagcctgaaatgt

SEQ ID NO: 421838 - DNA, 33 bp, Homo sapien
ttgcagataatcttcagcaacagcctgaaatgt

SEQ ID NO: 421839 - DNA, 33 bp, Homo sapien
ctgctttttgaaagaaatgaagcattgcaatta

SEQ ID NO: 421840 - DNA, 33 bp, Homo sapien
ctgctttttgaaagaagtgaagcattgcaatta

SEQ ID NO: 421841 - DNA, 33 bp, Homo sapien
tgctgccaaaatgacaaacaacattaaatgaca

SEQ ID NO: 421842 - DNA, 33 bp, Homo sapien
tgctgccaaaatgacatacaacattaaatgaca

SEQ ID NO: 421843 - DNA, 33 bp, Homo sapien
aaacacgctatatgcaaaaataaaatcaaacta

SEQ ID NO: 421844 - DNA, 33 bp, Homo sapien
aaacacgctatatgcagaaataaaatcaaacta

SEQ ID NO: 421845 - DNA, 33 bp, Homo sapien
caatactatacaagaggaaaggtgaactgtcta

SEQ ID NO: 421846 - DNA, 33 bp, Homo sapien
caatactatacaagagtaaaggtgaactgtcta

SEQ ID NO: 421847 - DNA, 33 bp, Homo sapien
tgccaataagtgcactaaactcatcctttctct

SEQ ID NO: 421848 - DNA, 33 bp, Homo sapien
tgccaataagtgcactgaactcatcctttctct

SEQ ID NO: 421849 - DNA, 33 bp, Homo sapien
cctttgtctctccaaaacttgtctttctaaagt

SEQ ID NO: 421850 - DNA, 33 bp, Homo sapien
cctttgtctctccaaagcttgtctttctaaagt

SEQ ID NO: 421851 - DNA, 33 bp, Homo sapien
catcccttcaagtcaaaataatgtttatggtat

SEQ ID NO: 421852 - DNA, 33 bp, Homo sapien
catcccttcaagtcaacataatgtttatggtat

SEQ ID NO: 421853 - DNA, 33 bp, Homo sapien
ttatttattttttttacgaagtgaacacatctg

SEQ ID NO: 421854 - DNA, 33 bp, Homo sapien
ttatttattttttttatgaagtgaacacatctg

SEQ ID NO: 421855 - DNA, 33 bp, Homo sapien
cgtttgtgcataagagaacaataccaagagagt

SEQ ID NO: 421856 - DNA, 33 bp, Homo sapien
cgtttgtgcataagaggacaataccaagagagt

SEQ ID NO: 421857 - DNA, 33 bp, Homo sapien
aaatgagtggcctcccactgagaacaggcttcc

SEQ ID NO: 421858 - DNA, 33 bp, Homo sapien
aaatgagtggcctcccgctgagaacaggcttcc

SEQ ID NO: 421859 - DNA, 33 bp, Homo sapien
acacccagcctccagacgttgacttttattaat

SEQ ID NO: 421860 - DNA, 33 bp, Homo sapien
acacccagcctccagatgttgacttttattaat

SEQ ID NO: 421861 - DNA, 33 bp, Homo sapien
atgcacaagcactacactagtccaaggaagaga

SEQ ID NO: 421862 - DNA, 33 bp, Homo sapien
atgcacaagcactacattagtccaaggaagaga

SEQ ID NO: 421863 - DNA, 33 bp, Homo sapien
atgaccctcaaagcctaaatatttacagtctgg

SEQ ID NO: 421864 - DNA, 33 bp, Homo sapien
atgaccctcaaagccttaatatttacagtctgg

SEQ ID NO: 421865 - DNA, 33 bp, Homo sapien
gtttaagaggccttgcagaagaatggatattga

SEQ ID NO: 421866 - DNA, 33 bp, Homo sapien
gtttaagaggccttgcggaagaatggatattga

SEQ ID NO: 421867 - DNA, 33 bp, Homo sapien
tggctccactggaactaacttttctcacctggt

SEQ ID NO: 421868 - DNA, 33 bp, Homo sapien
tggctccactggaactcacttttctcacctggt

SEQ ID NO: 421869 - DNA, 33 bp, Homo sapien
ggatgagagagggaaaaggctaaaatggagaag

SEQ ID NO: 421870 - DNA, 33 bp, Homo sapien
ggatgagagagggaaatggctaaaatggagaag

SEQ ID NO: 421871 - DNA, 33 bp, Homo sapien
ccagactatcagctcagaggtggaactgagggg

SEQ ID NO: 421872 - DNA, 33 bp, Homo sapien
ccagactatcagctcataggtggaactgagggg

SEQ ID NO: 421873 - DNA, 33 bp, Homo sapien
gacatatagagtggtaccaagaactttggagac

SEQ ID NO: 421874 - DNA, 33 bp, Homo sapien
gacatatagagtggtatcaagaactttggagac

SEQ ID NO: 421875 - DNA, 33 bp, Homo sapien
atataatgtgtgattacatttggcccgttgaat

SEQ ID NO: 421876 - DNA, 33 bp, Homo sapien
atataatgtgtgattatatttggcccgttgaat

SEQ ID NO: 421877 - DNA, 33 bp, Homo sapien
aacctagccccaaaccagaattcagcggaagta

SEQ ID NO: 421878 - DNA, 33 bp, Homo sapien
aacctagccccaaaccggaattcagcggaagta

SEQ ID NO: 421879 - DNA, 33 bp, Homo sapien
gttctaagcactttccacaggctaactcacatt

SEQ ID NO: 421880 - DNA, 33 bp, Homo sapien
gttctaagcactttccgcaggctaactcacatt

SEQ ID NO: 421881 - DNA, 33 bp, Homo sapien
tttctacctgcttcaccaaatgttctggcttct

SEQ ID NO: 421882 - DNA, 33 bp, Homo sapien
tttctacctgcttcacgaaatgttctggcttct

SEQ ID NO: 421883 - DNA, 33 bp, Homo sapien
ttttttaggaccgagaacagtaagttgggtatt

SEQ ID NO: 421884 - DNA, 33 bp, Homo sapien
ttttttaggaccgagagcagtaagttgggtatt

SEQ ID NO: 421885 - DNA, 33 bp, Homo sapien
tatcactgtccgaagaacccaaattgaaaaatc

SEQ ID NO: 421886 - DNA, 33 bp, Homo sapien
tatcactgtccgaagagcccaaattgaaaaatc

SEQ ID NO: 421887 - DNA, 33 bp, Homo sapien
ccacgaagagcttctcagactaaaaataagaaa

SEQ ID NO: 421888 - DNA, 33 bp, Homo sapien
ccacgaagagcttctcggactaaaaataagaaa

SEQ ID NO: 421889 - DNA, 33 bp, Homo sapien
ctacagaaggatatgccagtcctgtgcttttat

SEQ ID NO: 421890 - DNA, 33 bp, Homo sapien
ctacagaaggatatgctagtcctgtgcttttat

SEQ ID NO: 421891 - DNA, 33 bp, Homo sapien
ttgatatcataaaggtgaattattggagatgcc

SEQ ID NO: 421892 - DNA, 33 bp, Homo sapien
ttgatatcataaaggttaattattggagatgcc

SEQ ID NO: 421893 - DNA, 33 bp, Homo sapien
gggaacaaaatgataaccacacatggacacata

SEQ ID NO: 421894 - DNA, 33 bp, Homo sapien
gggaacaaaatgataagcacacatggacacata

SEQ ID NO: 421895 - DNA, 33 bp, Homo sapien
agcaaatcttccttcacagtcagcctgatctcc

SEQ ID NO: 421896 - DNA, 33 bp, Homo sapien
agcaaatcttccttcagagtcagcctgatctcc

SEQ ID NO: 421897 - DNA, 33 bp, Homo sapien
tgcatgaatgaaattacagaggaggcaaaattc

SEQ ID NO: 421898 - DNA, 33 bp, Homo sapien
tgcatgaatgaaattatagaggaggcaaaattc

SEQ ID NO: 421899 - DNA, 33 bp, Homo sapien
ctgcccaattgctctacaaaatcactacatttt

SEQ ID NO: 421900 - DNA, 33 bp, Homo sapien
ctgcccaattgctctataaaatcactacatttt

SEQ ID NO: 421901 - DNA, 33 bp, Homo sapien
tatacaagatgtcatcacctgtaggccctgcag

SEQ ID NO: 421902 - DNA, 33 bp, Homo sapien
tatacaagatgtcatcccctgtaggccctgcag

SEQ ID NO: 421903 - DNA, 33 bp, Homo sapien
gatcttttatcaaaaaccccgaactgattgtgg

SEQ ID NO: 421904 - DNA, 33 bp, Homo sapien
gatcttttatcaaaaatcccgaactgattgtgg

SEQ ID NO: 421905 - DNA, 33 bp, Homo sapien
actggcctgtagtcctaactataggaggctgag

SEQ ID NO: 421906 - DNA, 33 bp, Homo sapien
actggcctgtagtccttactataggaggctgag

SEQ ID NO: 421907 - DNA, 33 bp, Homo sapien
agtgcttggtctttgccgagcagtaaatcttga

SEQ ID NO: 421908 - DNA, 33 bp, Homo sapien
agtgcttggtctttgctgagcagtaaatcttga

SEQ ID NO: 421909 - DNA, 33 bp, Homo sapien
ttagatattgcttcagaataaatgtgtgatagt

SEQ ID NO: 421910 - DNA, 33 bp, Homo sapien
ttagatattgcttcaggataaatgtgtgatagt

SEQ ID NO: 421911 - DNA, 33 bp, Homo sapien
tacaatggagaaaaaaattacttcatagagata

SEQ ID NO: 421912 - DNA, 33 bp, Homo sapien
tacaatggagaaaaaagttacttcatagagata

SEQ ID NO: 421913 - DNA, 33 bp, Homo sapien
ataatgtcttactatcaatcaaaagagatatct

SEQ ID NO: 421914 - DNA, 33 bp, Homo sapien
ataatgtcttactatccatcaaaagagatatct

SEQ ID NO: 421915 - DNA, 33 bp, Homo sapien
atgacaaacctgattaataaatgtgtgcactct

SEQ ID NO: 421916 - DNA, 33 bp, Homo sapien
atgacaaacctgattagtaaatgtgtgcactct

SEQ ID NO: 421917 - DNA, 33 bp, Homo sapien
gtgattttcacttaacactccattgtgaatatc

SEQ ID NO: 421918 - DNA, 33 bp, Homo sapien
gtgattttcacttaacgctccattgtgaatatc

SEQ ID NO: 421919 - DNA, 33 bp, Homo sapien
cataaatgtggttacaaagacatgaacaagggt

SEQ ID NO: 421920 - DNA, 33 bp, Homo sapien
cataaatgtggttacagagacatgaacaagggt

SEQ ID NO: 421921 - DNA, 33 bp, Homo sapien
cccccccagaggatgacgttccacaagagggcc

SEQ ID NO: 421922 - DNA, 33 bp, Homo sapien
cccccccagaggatgatgttccacaagagggcc

SEQ ID NO: 421923 - DNA, 33 bp, Homo sapien
aggcatctccacacagccagtaagtctaggacg

SEQ ID NO: 421924 - DNA, 33 bp, Homo sapien
aggcatctccacacaggcagtaagtctaggacg

SEQ ID NO: 421925 - DNA, 33 bp, Homo sapien
gtctgtaatctctctacgcaccctactgaaaca

SEQ ID NO: 421926 - DNA, 33 bp, Homo sapien
gtctgtaatctctctatgcaccctactgaaaca

SEQ ID NO: 421927 - DNA, 33 bp, Homo sapien
ggcacggtggcatctcaatccagaaaggaaaga

SEQ ID NO: 421928 - DNA, 33 bp, Homo sapien
ggcacggtggcatctcgatccagaaaggaaaga

SEQ ID NO: 421929 - DNA, 33 bp, Homo sapien
gtacctactcacgtgtaaagttagaaagtgacg

SEQ ID NO: 421930 - DNA, 33 bp, Homo sapien
gtacctactcacgtgtgaagttagaaagtgacg

SEQ ID NO: 421931 - DNA, 33 bp, Homo sapien
tgtgtgtcataaataacattgcatttacaaata

SEQ ID NO: 421932 - DNA, 33 bp, Homo sapien
tgtgtgtcataaataatattgcatttacaaata

SEQ ID NO: 421933 - DNA, 33 bp, Homo sapien
ttaattttttgatatacgtgtttacagctataa

SEQ ID NO: 421934 - DNA, 33 bp, Homo sapien
ttaattttttgatataggtgtttacagctataa

SEQ ID NO: 421935 - DNA, 33 bp, Homo sapien
tcttactgataagtgcaagttgaacaatgagaa

SEQ ID NO: 421936 - DNA, 33 bp, Homo sapien
tcttactgataagtgcgagttgaacaatgagaa

SEQ ID NO: 421937 - DNA, 33 bp, Homo sapien; identical to SEQ ID NO: 421935

SEQ ID NO: 421938 - DNA, 33 bp, Homo sapien; identical to SEQ ID NO: 421936

SEQ ID NO: 421939 - DNA, 33 bp, Homo sapien
atttctataatgtatacgttgggcccacttgat

SEQ ID NO: 421940 - DNA, 33 bp, Homo sapien
atttctataatgtatatgttgggcccacttgat

SEQ ID NO: 421941 - DNA, 33 bp, Homo sapien
gctactgcaaagataccggctttaactctgaat

SEQ ID NO: 421942 - DNA, 33 bp, Homo sapien
gctactgcaaagatactggctttaactctgaat

SEQ ID NO: 421943 - DNA, 33 bp, Homo sapien
ggacaataaagaccaactgaagacgaaggtgga

SEQ ID NO: 421944 - DNA, 33 bp, Homo sapien
ggacaataaagaccaagtgaagacgaaggtgga

SEQ ID NO: 421945 - DNA, 33 bp, Homo sapien
ggatggaatactaaaacactcaattgaagcaga

SEQ ID NO: 421946 - DNA, 33 bp, Homo sapien
ggatggaatactaaaatactcaattgaagcaga

SEQ ID NO: 421947 - DNA, 33 bp, Homo sapien
gtcaagcatggttgaactcactggcataaaacc

SEQ ID NO: 421948 - DNA, 33 bp, Homo sapien
gtcaagcatggttgaattcactggcataaaacc

SEQ ID NO: 421949 - DNA, 33 bp, Homo sapien
taaaatgtttgatggcacagatgtaacacaaga

SEQ ID NO: 421950 - DNA, 33 bp, Homo sapien
taaaatgtttgatggcgcagatgtaacacaaga

SEQ ID NO: 421951 - DNA, 33 bp, Homo sapien
gagaattgaatacgccaaaattcatgacaagct

SEQ ID NO: 421952 - DNA, 33 bp, Homo sapien
gagaattgaatacgccgaaattcatgacaagct

SEQ ID NO: 421953 - DNA, 33 bp, Homo sapien
tgcaatttcatacgtaacaaatttaattcagtt

SEQ ID NO: 421954 - DNA, 33 bp, Homo sapien
tgcaatttcatacgtagcaaatttaattcagtt

SEQ ID NO: 421955 - DNA, 33 bp, Homo sapien
agaagcagaaacacaaatgaggtctgatggttg

SEQ ID NO: 421956 - DNA, 33 bp, Homo sapien
agaagcagaaacacaactgaggtctgatggttg

SEQ ID NO: 421957 - DNA, 33 bp, Homo sapien
attctctttcactctagattcaacttcgaataa

SEQ ID NO: 421958 - DNA, 33 bp, Homo sapien
attctctttcactctatattcaacttcgaataa

SEQ ID NO: 421959 - DNA, 33 bp, Homo sapien
agatatgtcgctagaagtctctcttctattttc

SEQ ID NO: 421960 - DNA, 33 bp, Homo sapien
agatatgtcgctagaattctctcttctattttc

SEQ ID NO: 421961 - DNA, 33 bp, Homo sapien
atggggggctctcaggaatgcctccttagtgga

SEQ ID NO: 421962 - DNA, 33 bp, Homo sapien
atggggggctctcagggatgcctccttagtgga

SEQ ID NO: 421963 - DNA, 33 bp, Homo sapien
cggtgttgttggatcacgtaaccttcctggtca

SEQ ID NO: 421964 - DNA, 33 bp, Homo sapien
cggtgttgttggatcatgtaaccttcctggtca

SEQ ID NO: 421965 - DNA, 33 bp, Homo sapien
cttagggtgtggcataagagtgtagaaacttga

SEQ ID NO: 421966 - DNA, 33 bp, Homo sapien
cttagggtgtggcataggagtgtagaaacttga

SEQ ID NO: 421967 - DNA, 33 bp, Homo sapien
taggtgttttgttgtccctcaactataaacagg

SEQ ID NO: 421968 - DNA, 33 bp, Homo sapien
taggtgttttgttgtctctcaactataaacagg

SEQ ID NO: 421969 - DNA, 33 bp, Homo sapien
taaatctaatcccttccacctccaaggtcacca

SEQ ID NO: 421970 - DNA, 33 bp, Homo sapien
taaatctaatcccttctacctccaaggtcacca

SEQ ID NO: 421971 - DNA, 33 bp, Homo sapien
agctaccttggacttacactgcaagactgtatt

SEQ ID NO: 421972 - DNA, 33 bp, Homo sapien
agctaccttggacttatactgcaagactgtatt

SEQ ID NO: 421973 - DNA, 33 bp, Homo sapien
tgatgcgctggaaaaacgtaactataatatata

SEQ ID NO: 421974 - DNA, 33 bp, Homo sapien
tgatgcgctggaaaaatgtaactataatatata

SEQ ID NO: 421975 - DNA, 33 bp, Homo sapien
tgggcatcattttttcacacaagtgataatcca

SEQ ID NO: 421976 - DNA, 33 bp, Homo sapien
tgggcatcattttttctcacaagtgataatcca

SEQ ID NO: 421977 - DNA, 33 bp, Homo sapien
tccttaacagctaaaactggcagtctgtgctaa

SEQ ID NO: 421978 - DNA, 33 bp, Homo sapien
tccttaacagctaaaattggcagtctgtgctaa

SEQ ID NO: 421979 - DNA, 33 bp, Homo sapien
aactggtggttctgaacactggagttgaatttc

SEQ ID NO: 421980 - DNA, 33 bp, Homo sapien
aactggtggttctgaatactggagttgaatttc

SEQ ID NO: 421981 - DNA, 33 bp, Homo sapien
ttgagttttctcagacaaacctctctcttcggc

SEQ ID NO: 421982 - DNA, 33 bp, Homo sapien
ttgagttttctcagacgaacctctctcttcggc

SEQ ID NO: 421983 - DNA, 33 bp, Homo sapien
ttgtttgagagtggcaactgagaaagcatttgg

SEQ ID NO: 421984 - DNA, 33 bp, Homo sapien
ttgtttgagagtggcagctgagaaagcatttgg

SEQ ID NO: 421985 - DNA, 33 bp, Homo sapien
aggtaccaatgcaaacaggaagctcatgctgcc

SEQ ID NO: 421986 - DNA, 33 bp, Homo sapien
aggtaccaatgcaaacgggaagctcatgctgcc

SEQ ID NO: 421987 - DNA, 33 bp, Homo sapien
ctaaactctgccacatcagcattctgttgtagt

SEQ ID NO: 421988 - DNA, 33 bp, Homo sapien
ctaaactctgccacattagcattctgttgtagt

SEQ ID NO: 421989 - DNA, 33 bp, Homo sapien
tgtaatatgctttacactggtgccctactgcat

SEQ ID NO: 421990 - DNA, 33 bp, Homo sapien
tgtaatatgctttacattggtgccctactgcat

SEQ ID NO: 421991 - DNA, 33 bp, Homo sapien
ccaaagccactggcagaaatcaatcaatgatcg

SEQ ID NO: 421992 - DNA, 33 bp, Homo sapien
ccaaagccactggcaggaatcaatcaatgatcg

SEQ ID NO: 421993 - DNA, 33 bp, Homo sapien
tttgtaagttatacatcaatcaagctgattttc

SEQ ID NO: 421994 - DNA, 33 bp, Homo sapien
tttgtaagttatacatgaatcaagctgattttc

SEQ ID NO: 421995 - DNA, 33 bp, Homo sapien
aacttttctcgcatcaaagaagatgagttaggc

SEQ ID NO: 421996 - DNA, 33 bp, Homo sapien
aacttttctcgcatcacagaagatgagttaggc

SEQ ID NO: 421997 - DNA, 33 bp, Homo sapien
tgcagtaaaatagaaactcagtagccttgttgg

SEQ ID NO: 421998 - DNA, 33 bp, Homo sapien
tgcagtaaaatagaaattcagtagccttgttgg

SEQ ID NO: 421999 - DNA, 33 bp, Homo sapien
ctgcctttctccctacaagactgtgagtccctg

SEQ ID NO: 422000 - DNA, 33 bp, Homo sapien
ctgcctttctccctaccagactgtgagtccctg

SEQ ID NO: 422001 - DNA, 33 bp, Homo sapien
agtaaagaaattcaccaggcagagaaagaaggg

SEQ ID NO: 422002 - DNA, 33 bp, Homo sapien
agtaaagaaattcaccgggcagagaaagaaggg

SEQ ID NO: 422003 - DNA, 33 bp, Homo sapien
tgtgcttatcatgaggcagtaggaactggatgg

SEQ ID NO: 422004 - DNA, 33 bp, Homo sapien
tgtgcttatcatgagggagtaggaactggatgg

SEQ ID NO: 422005 - DNA, 33 bp, Homo sapien
attgatgtggaatctgacacccagagtggcttt

SEQ ID NO: 422006 - DNA, 33 bp, Homo sapien
attgatgtggaatctggcacccagagtggcttt

SEQ ID NO: 422007 - DNA, 33 bp, Homo sapien
aagcaccattctgcaaaggatgctattttctga

SEQ ID NO: 422008 - DNA, 33 bp, Homo sapien
aagcaccattctgcaagggatgctattttctga

SEQ ID NO: 422009 - DNA, 33 bp, Homo sapien
tctcagctgttttcaaatggggttttgccagtt

SEQ ID NO: 422010 - DNA, 33 bp, Homo sapien
tctcagctgttttcaactggggttttgccagtt

SEQ ID NO: 422011 - DNA, 33 bp, Homo sapien
gaatcttacccatcaactgtggaaggaaatgac

SEQ ID NO: 422012 - DNA, 33 bp, Homo sapien
gaatcttacccatcaattgtggaaggaaatgac

SEQ ID NO: 422013 - DNA, 33 bp, Homo sapien
cgctagagaaaacctacacatggctatattttt

SEQ ID NO: 422014 - DNA, 33 bp, Homo sapien
cgctagagaaaacctagacatggctatattttt

SEQ ID NO: 422015 - DNA, 33 bp, Homo sapien
tgtgtatgcatagagaaatacttagaaagatgt

SEQ ID NO: 422016 - DNA, 33 bp, Homo sapien
tgtgtatgcatagagagatacttagaaagatgt

SEQ ID NO: 422017 - DNA, 33 bp, Homo sapien
ttacacagtattggaaaatatggctaggctaca

SEQ ID NO: 422018 - DNA, 33 bp, Homo sapien
ttacacagtattggaatatatggctaggctaca

SEQ ID NO: 422019 - DNA, 33 bp, Homo sapien
tctgggaagctatcagaacatctcttttatggg

SEQ ID NO: 422020 - DNA, 33 bp, Homo sapien
tctgggaagctatcaggacatctcttttatggg

SEQ ID NO: 422021 - DNA, 33 bp, Homo sapien
caggggctctcaccaacatatttcattcacaca

SEQ ID NO: 422022 - DNA, 33 bp, Homo sapien
caggggctctcaccaatatatttcattcacaca

SEQ ID NO: 422023 - DNA, 33 bp, Homo sapien
ccgaattgtcaccagccgatctgatgtccctcc

SEQ ID NO: 422024 - DNA, 33 bp, Homo sapien
ccgaattgtcaccagctgatctgatgtccctcc

SEQ ID NO: 422025 - DNA, 33 bp, Homo sapien
ttacagtaagagtagacggcattaaatcttatc

SEQ ID NO: 422026 - DNA, 33 bp, Homo sapien
ttacagtaagagtagatggcattaaatcttatc

SEQ ID NO: 422027 - DNA, 33 bp, Homo sapien
gtatagagatagaacaatcttggtacaactttg

SEQ ID NO: 422028 - DNA, 33 bp, Homo sapien
gtatagagatagaacagtcttggtacaactttg

SEQ ID NO: 422029 - DNA, 33 bp, Homo sapien
cacaacattctataagaaaattaggaccagaac

SEQ ID NO: 422030 - DNA, 33 bp, Homo sapien
cacaacattctataaggaaattaggaccagaac

SEQ ID NO: 422031 - DNA, 33 bp, Homo sapien
ttaatctggctccaacagcaaaatggattgcag

SEQ ID NO: 422032 - DNA, 33 bp, Homo sapien
ttaatctggctccaacggcaaaatggattgcag

SEQ ID NO: 422033 - DNA, 33 bp, Homo sapien
gagccgagcacactaagtgtatccagttgaggt

SEQ ID NO: 422034 - DNA, 33 bp, Homo sapien
gagccgagcacactaattgtatccagttgaggt

SEQ ID NO: 422035 - DNA, 33 bp, Homo sapien
catttgcatttatccacgttctaactgctagtt

SEQ ID NO: 422036 - DNA, 33 bp, Homo sapien
catttgcatttatccatgttctaactgctagtt

SEQ ID NO: 422037 - DNA, 33 bp, Homo sapien
aatttaaatggtcttacggagagactcttggaa

SEQ ID NO: 422038 - DNA, 33 bp, Homo sapien
aatttaaatggtcttagggagagactcttggaa

SEQ ID NO: 422039 - DNA, 33 bp, Homo sapien
atgttagcttgctttacaattagtttgagaaaa

SEQ ID NO: 422040 - DNA, 33 bp, Homo sapien
atgttagcttgctttataattagtttgagaaaa

SEQ ID NO: 422041 - DNA, 33 bp, Homo sapien
gttagtatgccatagcagaaattttgtaaagtg

SEQ ID NO: 422042 - DNA, 33 bp, Homo sapien
gttagtatgccatagcggaaattttgtaaagtg

SEQ ID NO: 422043 - DNA, 33 bp, Homo sapien
tactgcatgtcccaaaacctctcactgtcttct

SEQ ID NO: 422044 - DNA, 33 bp, Homo sapien
tactgcatgtcccaaagcctctcactgtcttct

SEQ ID NO: 422045 - DNA, 33 bp, Homo sapien
gtactaaataggtttacgtaaagctaccataaa

SEQ ID NO: 422046 - DNA, 33 bp, Homo sapien
gtactaaataggtttatgtaaagctaccataaa

SEQ ID NO: 422047 - DNA, 33 bp, Homo sapien
tttctttacattttacaagaggaatatattttg

SEQ ID NO: 422048 - DNA, 33 bp, Homo sapien
tttctttacattttactagaggaatatattttg

SEQ ID NO: 422049 - DNA, 33 bp, Homo sapien
gaggtaggagttacctaaatttggagaaagcag

SEQ ID NO: 422050 - DNA, 33 bp, Homo sapien
gaggtaggagttacctgaatttggagaaagcag

SEQ ID NO: 422051 - DNA, 33 bp, Homo sapien
tatatgcattctaccacctttctaaaagccaaa

SEQ ID NO: 422052 - DNA, 33 bp, Homo sapien
tatatgcattctaccatctttctaaaagccaaa

SEQ ID NO: 422053 - DNA, 33 bp, Homo sapien
aagtctctatggcactaaaactgcaaaccaaaa

SEQ ID NO: 422054 - DNA, 33 bp, Homo sapien
aagtctctatggcactgaaactgcaaaccaaaa

SEQ ID NO: 422055 - DNA, 33 bp, Homo sapien
tccttcagggtatgcgacaggactctctctaga

SEQ ID NO: 422056 - DNA, 33 bp, Homo sapien
tccttcagggtatgcggcaggactctctctaga

SEQ ID NO: 422057 - DNA, 33 bp, Homo sapien
tgctacttaacatctcagaatctctgttgctgc

SEQ ID NO: 422058 - DNA, 33 bp, Homo sapien
tgctacttaacatctcggaatctctgttgctgc

SEQ ID NO: 422059 - DNA, 33 bp, Homo sapien
atctctaggagctagacgaagtggaaagacaag

SEQ ID NO: 422060 - DNA, 33 bp, Homo sapien
atctctaggagctagatgaagtggaaagacaag

SEQ ID NO: 422061 - DNA, 33 bp, Homo sapien
cttgttttgagttgaaagcaaccaggggaccaa

SEQ ID NO: 422062 - DNA, 33 bp, Homo sapien
cttgttttgagttgaaggcaaccaggggaccaa

SEQ ID NO: 422063 - DNA, 33 bp, Homo sapien
atctatttggaaattacaatagcaaaaacaaaa

SEQ ID NO: 422064 - DNA, 33 bp, Homo sapien
atctatttggaaattagaatagcaaaaacaaaa

SEQ ID NO: 422065 - DNA, 33 bp, Homo sapien
gaaaaggagaatgatccctatgctaccagcaaa

SEQ ID NO: 422066 - DNA, 33 bp, Homo sapien
gaaaaggagaatgatcgctatgctaccagcaaa

SEQ ID NO: 422067 - DNA, 33 bp, Homo sapien
ataacaaaacgtcacacactggatggcttaaga

SEQ ID NO: 422068 - DNA, 33 bp, Homo sapien
ataacaaaacgtcacagactggatggcttaaga

SEQ ID NO: 422069 - DNA, 33 bp, Homo sapien
aaatattagcatatcaacactgtgacactacct

SEQ ID NO: 422070 - DNA, 33 bp, Homo sapien
aaatattagcatatcagcactgtgacactacct

SEQ ID NO: 422071 - DNA, 33 bp, Homo sapien
cctaacacacaggtcagatccaatcagtcagag

SEQ ID NO: 422072 - DNA, 33 bp, Homo sapien
cctaacacacaggtcatatccaatcagtcagag

SEQ ID NO: 422073 - DNA, 33 bp, Homo sapien
tcaaatattttgaagcactgtgtctcagggcat

SEQ ID NO: 422074 - DNA, 33 bp, Homo sapien
tcaaatattttgaagcgctgtgtctcagggcat

SEQ ID NO: 422075 - DNA, 33 bp, Homo sapien
actcaggtaatataaacgagggccggaaatgag

SEQ ID NO: 422076 - DNA, 33 bp, Homo sapien
actcaggtaatataaatgagggccggaaatgag

SEQ ID NO: 422077 - DNA, 33 bp, Homo sapien
ctacccaagcaagtagaaacttttacagataaa

SEQ ID NO: 422078 - DNA, 33 bp, Homo sapien
ctacccaagcaagtaggaacttttacagataaa

SEQ ID NO: 422079 - DNA, 33 bp, Homo sapien
cttgttgtattatgacagaaaaaaagaatatga

SEQ ID NO: 422080 - DNA, 33 bp, Homo sapien
cttgttgtattatgacggaaaaaaagaatatga

SEQ ID NO: 422081 - DNA, 33 bp, Homo sapien
cgttcctgggccttctaaagagttattaaatat

SEQ ID NO: 422082 - DNA, 33 bp, Homo sapien
cgttcctgggccttcttaagagttattaaatat

SEQ ID NO: 422083 - DNA, 33 bp, Homo sapien
aaagacatctggtaaacagcatttacagaaagt

SEQ ID NO: 422084 - DNA, 33 bp, Homo sapien
aaagacatctggtaaagagcatttacagaaagt

SEQ ID NO: 422085 - DNA, 33 bp, Homo sapien
gctgtgatagactcgcaacagttcctcctatgc

SEQ ID NO: 422086 - DNA, 33 bp, Homo sapien
gctgtgatagactcgcgacagttcctcctatgc

SEQ ID NO: 422087 - DNA, 33 bp, Homo sapien
ggacaacagcagtaaaataaggagacatggccc

SEQ ID NO: 422088 - DNA, 33 bp, Homo sapien
ggacaacagcagtaaagtaaggagacatggccc

SEQ ID NO: 422089 - DNA, 33 bp, Homo sapien
tttcataaacattccactcaaaggccaactgtt

SEQ ID NO: 422090 - DNA, 33 bp, Homo sapien
tttcataaacattccattcaaaggccaactgtt

SEQ ID NO: 422091 - DNA, 33 bp, Homo sapien
ctttggccgatgtaaaatcatttcataaacatt

SEQ ID NO: 422092 - DNA, 33 bp, Homo sapien
ctttggccgatgtaaagtcatttcataaacatt

SEQ ID NO: 422093 - DNA, 33 bp, Homo sapien
actgcaaaacaatgtactaatagccttagcatg

SEQ ID NO: 422094 - DNA, 33 bp, Homo sapien
actgcaaaacaatgtagtaatagccttagcatg

SEQ ID NO: 422095 - DNA, 33 bp, Homo sapien
aacacgaaaggaaaaacttgttagtccatgcta

SEQ ID NO: 422096 - DNA, 33 bp, Homo sapien
aacacgaaaggaaaaagttgttagtccatgcta

SEQ ID NO: 422097 - DNA, 33 bp, Homo sapien
aattgaatagctcctaaattttattgaaggcag

SEQ ID NO: 422098 - DNA, 33 bp, Homo sapien
aattgaatagctcctagattttattgaaggcag

SEQ ID NO: 422099 - DNA, 33 bp, Homo sapien
atagcactggaaaccaacgaagaattccatagc

SEQ ID NO: 422100 - DNA, 33 bp, Homo sapien
atagcactggaaaccagcgaagaattccatagc

SEQ ID NO: 422101 - DNA, 33 bp, Homo sapien
taaccgcaaatgagcccggaaatcaggtttttt

SEQ ID NO: 422102 - DNA, 33 bp, Homo sapien
taaccgcaaatgagcctggaaatcaggtttttt

SEQ ID NO: 422103 - DNA, 33 bp, Homo sapien
ccactgcgaatccccactcattgtctctgagca

SEQ ID NO: 422104 - DNA, 33 bp, Homo sapien
ccactgcgaatccccattcattgtctctgagca

SEQ ID NO: 422105 - DNA, 33 bp, Homo sapien
ccaacgatgcgaagaaattcgcagctaagaata

SEQ ID NO: 422106 - DNA, 33 bp, Homo sapien
ccaacgatgcgaagaagttcgcagctaagaata

SEQ ID NO: 422107 - DNA, 33 bp, Homo sapien
agcagtattgggtctaaaaaatatctcactggc

SEQ ID NO: 422108 - DNA, 33 bp, Homo sapien
agcagtattgggtctacaaaatatctcactggc

SEQ ID NO: 422109 - DNA, 33 bp, Homo sapien
tcaataaagaccatacaaaacattttcaatgct

SEQ ID NO: 422110 - DNA, 33 bp, Homo sapien
tcaataaagaccatacgaaacattttcaatgct

SEQ ID NO: 422111 - DNA, 33 bp, Homo sapien
tggcatttgagtgaacacataataattttcctt

SEQ ID NO: 422112 - DNA, 33 bp, Homo sapien
tggcatttgagtgaacgcataataattttcctt

SEQ ID NO: 422113 - DNA, 33 bp, Homo sapien
ttatatagaagtgtgacgagaggtttttctaag

SEQ ID NO: 422114 - DNA, 33 bp, Homo sapien
ttatatagaagtgtgatgagaggtttttctaag

SEQ ID NO: 422115 - DNA, 33 bp, Homo sapien
aggtcttccgtgaagcaaggtcggagcagggca

SEQ ID NO: 422116 - DNA, 33 bp, Homo sapien
aggtcttccgtgaagcgaggtcggagcagggca

SEQ ID NO: 422117 - DNA, 33 bp, Homo sapien
acagaaagcagatgcaacctagaaagcataaac

SEQ ID NO: 422118 - DNA, 33 bp, Homo sapien
acagaaagcagatgcaccctagaaagcataaac

SEQ ID NO: 422119 - DNA, 33 bp, Homo sapien
cagggctggtatcatcaacttggttcaatccga

SEQ ID NO: 422120 - DNA, 33 bp, Homo sapien
cagggctggtatcatcgacttggttcaatccga

SEQ ID NO: 422121 - DNA, 33 bp, Homo sapien
tggctttgtgctttaaatgcttggggaggctga

SEQ ID NO: 422122 - DNA, 33 bp, Homo sapien
tggctttgtgctttaattgcttggggaggctga

SEQ ID NO: 422123 - DNA, 33 bp, Homo sapien
ggttcgctggtatcaaatcaaccacctgcaata

SEQ ID NO: 422124 - DNA, 33 bp, Homo sapien
ggttcgctggtatcaactcaaccacctgcaata

SEQ ID NO: 422125 - DNA, 33 bp, Homo sapien
actagtatcatcatcaatcaagcctcagatgct

SEQ ID NO: 422126 - DNA, 33 bp, Homo sapien
actagtatcatcatcagtcaagcctcagatgct

SEQ ID NO: 422127 - DNA, 33 bp, Homo sapien
tttgttttcagcattaggtttactggcctcaaa

SEQ ID NO: 422128 - DNA, 33 bp, Homo sapien
tttgttttcagcattatgtttactggcctcaaa

SEQ ID NO: 422129 - DNA, 33 bp, Homo sapien
taaaagagtctgacaaatgttaaaattaaatat

SEQ ID NO: 422130 - DNA, 33 bp, Homo sapien
taaaagagtctgacaagtgttaaaattaaatat

SEQ ID NO: 422131 - DNA, 33 bp, Homo sapien
ctacagtgatggcaccaaaccttttcttcagta

SEQ ID NO: 422132 - DNA, 33 bp, Homo sapien
ctacagtgatggcaccgaaccttttcttcagta

SEQ ID NO: 422133 - DNA, 33 bp, Homo sapien
ggagcaagtggaaaacaggttaatgtgtgtgtg

SEQ ID NO: 422134 - DNA, 33 bp, Homo sapien
ggagcaagtggaaaacgggttaatgtgtgtgtg

SEQ ID NO: 422135 - DNA, 33 bp, Homo sapien
gtgaacattttggatacgatatgttgagactct

SEQ ID NO: 422136 - DNA, 33 bp, Homo sapien
gtgaacattttggatatgatatgttgagactct

SEQ ID NO: 422137 - DNA, 33 bp, Homo sapien
ttgaatcttctctagccctggtcaagtacctat

SEQ ID NO: 422138 - DNA, 33 bp, Homo sapien
ttgaatcttctctagctctggtcaagtacctat

SEQ ID NO: 422139 - DNA, 33 bp, Homo sapien
ctacattttctcattacggttatgatgctcagt

SEQ ID NO: 422140 - DNA, 33 bp, Homo sapien
ctacattttctcattagggttatgatgctcagt

SEQ ID NO: 422141 - DNA, 33 bp, Homo sapien
tggcagagataaatgaaatatccaagggccctg

SEQ ID NO: 422142 - DNA, 33 bp, Homo sapien
tggcagagataaatgacatatccaagggccctg

SEQ ID NO: 422143 - DNA, 33 bp, Homo sapien
ttcaaaatcatacccccaccaattctcctcact

SEQ ID NO: 422144 - DNA, 33 bp, Homo sapien
ttcaaaatcatacccctaccaattctcctcact

SEQ ID NO: 422145 - DNA, 33 bp, Homo sapien
tgtaagagtacacatacggtaaaatctttcaaa

SEQ ID NO: 422146 - DNA, 33 bp, Homo sapien
tgtaagagtacacatatggtaaaatctttcaaa

SEQ ID NO: 422147 - DNA, 33 bp, Homo sapien
tgttagaactggatcacgttggtaaccatttgc

SEQ ID NO: 422148 - DNA, 33 bp, Homo sapien
tgttagaactggatcatgttggtaaccatttgc

SEQ ID NO: 422149 - DNA, 33 bp, Homo sapien
gaaaataaataaaacaaaatgtctcctgtgtaa

SEQ ID NO: 422150 - DNA, 33 bp, Homo sapien
gaaaataaataaaacagaatgtctcctgtgtaa

SEQ ID NO: 422151 - DNA, 33 bp, Homo sapien
ctgtcgtcataagacaatatttctgcctgtggt

SEQ ID NO: 422152 - DNA, 33 bp, Homo sapien
ctgtcgtcataagacagtatttctgcctgtggt

SEQ ID NO: 422153 - DNA, 33 bp, Homo sapien
tgtaaagaatagacacacaagtaccagaggatg

SEQ ID NO: 422154 - DNA, 33 bp, Homo sapien
tgtaaagaatagacacgcaagtaccagaggatg

SEQ ID NO: 422155 - DNA, 33 bp, Homo sapien
ctgttcacaaggtctcgctgaaggatccctcgg

SEQ ID NO: 422156 - DNA, 33 bp, Homo sapien
ctgttcacaaggtctctctgaaggatccctcgg

SEQ ID NO: 422157 - DNA, 33 bp, Homo sapien
cttccttgtttatccaatcaaaatctctcagag

SEQ ID NO: 422158 - DNA, 33 bp, Homo sapien
cttccttgtttatccagtcaaaatctctcagag

SEQ ID NO: 422159 - DNA, 33 bp, Homo sapien
ctggtgtgctcatctggaattaatcaatgaaca

SEQ ID NO: 422160 - DNA, 33 bp, Homo sapien
ctggtgtgctcatctgtaattaatcaatgaaca

SEQ ID NO: 422161 - DNA, 33 bp, Homo sapien
agatgttcaatgtaaacgctgaaacaattgttg

SEQ ID NO: 422162 - DNA, 33 bp, Homo sapien
agatgttcaatgtaaatgctgaaacaattgttg

SEQ ID NO: 422163 - DNA, 33 bp, Homo sapien
atgaggataaagctgtcaacaaagaggaagatc

SEQ ID NO: 422164 - DNA, 33 bp, Homo sapien
atgaggataaagctgtgaacaaagaggaagatc

SEQ ID NO: 422165 - DNA, 33 bp, Homo sapien
tgcctgaaacctcggcaagtacctaaacgtcat

SEQ ID NO: 422166 - DNA, 33 bp, Homo sapien
tgcctgaaacctcggctagtacctaaacgtcat

SEQ ID NO: 422167 - DNA, 33 bp, Homo sapien
agtgggattaaggtgaaagacagaagctctaag

SEQ ID NO: 422168 - DNA, 33 bp, Homo sapien
agtgggattaaggtgacagacagaagctctaag

SEQ ID NO: 422169 - DNA, 33 bp, Homo sapien
aaatatttggccagaaatggcttttcctaatga

SEQ ID NO: 422170 - DNA, 33 bp, Homo sapien
aaatatttggccagaactggcttttcctaatga

SEQ ID NO: 422171 - DNA, 33 bp, Homo sapien
aaaagcatattatacaccagcccaatgcgcggc

SEQ ID NO: 422172 - DNA, 33 bp, Homo sapien
aaaagcatattatacatcagcccaatgcgcggc

SEQ ID NO: 422173 - DNA, 33 bp, Homo sapien
ggaaatgaagttgggcacattagtagaaagcag

SEQ ID NO: 422174 - DNA, 33 bp, Homo sapien
ggaaatgaagttgggcgcattagtagaaagcag

SEQ ID NO: 422175 - DNA, 33 bp, Homo sapien
ctagggttgatggagaaaatcgtgttgtacgag

SEQ ID NO: 422176 - DNA, 33 bp, Homo sapien
ctagggttgatggagagaatcgtgttgtacgag

SEQ ID NO: 422177 - DNA, 33 bp, Homo sapien
ttcatcagtagcataaatggagaaaaagccaat

SEQ ID NO: 422178 - DNA, 33 bp, Homo sapien
ttcatcagtagcataattggagaaaaagccaat

SEQ ID NO: 422179 - DNA, 33 bp, Homo sapien
aagatacatatgcaacaaattactagtcaaaga

SEQ ID NO: 422180 - DNA, 33 bp, Homo sapien
aagatacatatgcaacgaattactagtcaaaga

SEQ ID NO: 422181 - DNA, 33 bp, Homo sapien
ttctcttccctagaaagcctcaggtggacaaat

SEQ ID NO: 422182 - DNA, 33 bp, Homo sapien
ttctcttccctagaaatcctcaggtggacaaat

SEQ ID NO: 422183 - DNA, 33 bp, Homo sapien
ttggggacttcgagaggatgaatgcagcctctg

SEQ ID NO: 422184 - DNA, 33 bp, Homo sapien
ttggggacttcgagagtatgaatgcagcctctg

SEQ ID NO: 422185 - DNA, 33 bp, Homo sapien
tccccaatcacatgacaactgcacattctctca

SEQ ID NO: 422186 - DNA, 33 bp, Homo sapien
tccccaatcacatgacgactgcacattctctca

SEQ ID NO: 422187 - DNA, 33 bp, Homo sapien
gtcaaagacgtggaaactcaagccaaccttttg

SEQ ID NO: 422188 - DNA, 33 bp, Homo sapien
gtcaaagacgtggaaattcaagccaaccttttg

SEQ ID NO: 422189 - DNA, 33 bp, Homo sapien
agggtgttgttttaccaagtgcattgttaatgg

SEQ ID NO: 422190 - DNA, 33 bp, Homo sapien
agggtgttgttttaccgagtgcattgttaatgg

SEQ ID NO: 422191 - DNA, 33 bp, Homo sapien
gaatatgatttcaataaacaatgagatcacaaa

SEQ ID NO: 422192 - DNA, 33 bp, Homo sapien
gaatatgatttcaatacacaatgagatcacaaa

SEQ ID NO: 422193 - DNA, 33 bp, Homo sapien
aagttcagcttattaacatgtaagacacagctc

SEQ ID NO: 422194 - DNA, 33 bp, Homo sapien
aagttcagcttattaagatgtaagacacagctc

SEQ ID NO: 422195 - DNA, 33 bp, Homo sapien
ttcatgaagctgagaaaggagtgatggaaaagg

SEQ ID NO: 422196 - DNA, 33 bp, Homo sapien
ttcatgaagctgagaagggagtgatggaaaagg

SEQ ID NO: 422197 - DNA, 33 bp, Homo sapien
tgctccattgtttcaaagtaagaagtaagccca

SEQ ID NO: 422198 - DNA, 33 bp, Homo sapien
tgctccattgtttcaaggtaagaagtaagccca

SEQ ID NO: 422199 - DNA, 33 bp, Homo sapien
aaagcatcactcaggaacataaggaagtcctgc

SEQ ID NO: 422200 - DNA, 33 bp, Homo sapien
aaagcatcactcaggagcataaggaagtcctgc

SEQ ID NO: 422201 - DNA, 33 bp, Homo sapien
acttagagcaattcctaaaggtaagtggaaagg

SEQ ID NO: 422202 - DNA, 33 bp, Homo sapien
acttagagcaattcctgaaggtaagtggaaagg

SEQ ID NO: 422203 - DNA, 33 bp, Homo sapien
tatgtgtgcatatagaaaagatgtgtgaagatt

SEQ ID NO: 422204 - DNA, 33 bp, Homo sapien
tatgtgtgcatatagacaagatgtgtgaagatt

SEQ ID NO: 422205 - DNA, 33 bp, Homo sapien
gattgtggtttagatactaacatcatcctatag

SEQ ID NO: 422206 - DNA, 33 bp, Homo sapien
gattgtggtttagatagtaacatcatcctatag

SEQ ID NO: 422207 - DNA, 33 bp, Homo sapien
cacttcagacattcatcacaacctgcagagaga

SEQ ID NO: 422208 - DNA, 33 bp, Homo sapien
cacttcagacattcattacaacctgcagagaga

SEQ ID NO: 422209 - DNA, 33 bp, Homo sapien
catggtactgtagatcaaggataaggcagtaaa

SEQ ID NO: 422210 - DNA, 33 bp, Homo sapien
catggtactgtagatcgaggataaggcagtaaa

SEQ ID NO: 422211 - DNA, 33 bp, Homo sapien
ctttggagatagcgtgcaagtttctctctctac

SEQ ID NO: 422212 - DNA, 33 bp, Homo sapien
ctttggagatagcgtgtaagtttctctctctac

SEQ ID NO: 422213 - DNA, 33 bp, Homo sapien
agtgatctatgcttagaaaataagaaaatgaaa

SEQ ID NO: 422214 - DNA, 33 bp, Homo sapien
agtgatctatgcttaggaaataagaaaatgaaa

SEQ ID NO: 422215 - DNA, 33 bp, Homo sapien
tctgtaggtgctcctcaagctattatgggaacc

SEQ ID NO: 422216 - DNA, 33 bp, Homo sapien
tctgtaggtgctcctcgagctattatgggaacc

SEQ ID NO: 422217 - DNA, 33 bp, Homo sapien
aaatgattactgtcgcaagttagaagctggtat

SEQ ID NO: 422218 - DNA, 33 bp, Homo sapien
aaatgattactgtcgcgagttagaagctggtat

SEQ ID NO: 422219 - DNA, 33 bp, Homo sapien
aggctgcattcatccaatacagccaagaaatta

SEQ ID NO: 422220 - DNA, 33 bp, Homo sapien
aggctgcattcatccactacagccaagaaatta

SEQ ID NO: 422221 - DNA, 33 bp, Homo sapien
cagaggcacacgccacaatgtttgtctaacttt

SEQ ID NO: 422222 - DNA, 33 bp, Homo sapien
cagaggcacacgccaccatgtttgtctaacttt

SEQ ID NO: 422223 - DNA, 33 bp, Homo sapien
aggatcagtgaggaacacctgagcaaactccca

SEQ ID NO: 422224 - DNA, 33 bp, Homo sapien
aggatcagtgaggaacccctgagcaaactccca

SEQ ID NO: 422225 - DNA, 33 bp, Homo sapien
ctgttgttgatgaaaacgtcattatttggtgca

SEQ ID NO: 422226 - DNA, 33 bp, Homo sapien
ctgttgttgatgaaaatgtcattatttggtgca

SEQ ID NO: 422227 - DNA, 33 bp, Homo sapien
atgaatttatctgtggacatcaatttgggaatt

SEQ ID NO: 422228 - DNA, 33 bp, Homo sapien
atgaatttatctgtgggcatcaatttgggaatt

SEQ ID NO: 422229 - DNA, 33 bp, Homo sapien
gaactttttatcatcccaaacgcaaactctgca

SEQ ID NO: 422230 - DNA, 33 bp, Homo sapien
gaactttttatcatccgaaacgcaaactctgca

SEQ ID NO: 422231 - DNA, 33 bp, Homo sapien
gggctaaagtatgagacgagtaggtgacagcat

SEQ ID NO: 422232 - DNA, 33 bp, Homo sapien
gggctaaagtatgagatgagtaggtgacagcat

SEQ ID NO: 422233 - DNA, 33 bp, Homo sapien
catcacaggaaaaacacattgaagctattaaga

SEQ ID NO: 422234 - DNA, 33 bp, Homo sapien
catcacaggaaaaacatattgaagctattaaga

SEQ ID NO: 422235 - DNA, 33 bp, Homo sapien
ccctcttgtgtccccacgtcgtagtaccatagt

SEQ ID NO: 422236 - DNA, 33 bp, Homo sapien
ccctcttgtgtccccatgtcgtagtaccatagt

SEQ ID NO: 422237 - DNA, 33 bp, Homo sapien
catagtaaccatctgcacatctgtatcaaagat

SEQ ID NO: 422238 - DNA, 33 bp, Homo sapien
catagtaaccatctgcgcatctgtatcaaagat

SEQ ID NO: 422239 - DNA, 33 bp, Homo sapien
gcacacataggaaagacagcactggccttcagg

SEQ ID NO: 422240 - DNA, 33 bp, Homo sapien
gcacacataggaaagatagcactggccttcagg

SEQ ID NO: 422241 - DNA, 33 bp, Homo sapien
gtttgctattcagaacacctgctgtaaaactca

SEQ ID NO: 422242 - DNA, 33 bp, Homo sapien
gtttgctattcagaacgcctgctgtaaaactca

SEQ ID NO: 422243 - DNA, 33 bp, Homo sapien
taacttctcacttgaaaccatgtaagccacaag

SEQ ID NO: 422244 - DNA, 33 bp, Homo sapien
taacttctcacttgaagccatgtaagccacaag

SEQ ID NO: 422245 - DNA, 33 bp, Homo sapien
cctcaacctagtcataagaaagcatcagacaag

SEQ ID NO: 422246 - DNA, 33 bp, Homo sapien
cctcaacctagtcataggaaagcatcagacaag

SEQ ID NO: 422247 - DNA, 33 bp, Homo sapien
aaaggcagtgaaagggaagtatattcataaaca

SEQ ID NO: 422248 - DNA, 33 bp, Homo sapien
aaaggcagtgaaaggggagtatattcataaaca

SEQ ID NO: 422249 - DNA, 33 bp, Homo sapien
cttgcatctgatgatacaaagaaggttttctag

SEQ ID NO: 422250 - DNA, 33 bp, Homo sapien
cttgcatctgatgatataaagaaggttttctag

SEQ ID NO: 422251 - DNA, 33 bp, Homo sapien
ctgtaggagatgttcaaccaatctttttttttt

SEQ ID NO: 422252 - DNA, 33 bp, Homo sapien
ctgtaggagatgttcagccaatctttttttttt

SEQ ID NO: 422253 - DNA, 33 bp, Homo sapien
ctgtccagcagtattcaaacttttcttctgctt

SEQ ID NO: 422254 - DNA, 33 bp, Homo sapien
ctgtccagcagtattcgaacttttcttctgctt

SEQ ID NO: 422255 - DNA, 33 bp, Homo sapien
ttcctagatctaacaacatgtaaaagtatgtag

SEQ ID NO: 422256 - DNA, 33 bp, Homo sapien
ttcctagatctaacaatatgtaaaagtatgtag

SEQ ID NO: 422257 - DNA, 33 bp, Homo sapien
gcattcacttttctgacagtaaacttagattac

SEQ ID NO: 422258 - DNA, 33 bp, Homo sapien
gcattcacttttctgatagtaaacttagattac

SEQ ID NO: 422259 - DNA, 33 bp, Homo sapien
cactttcacagggataactcagcaatattattt

SEQ ID NO: 422260 - DNA, 33 bp, Homo sapien
cactttcacagggatagctcagcaatattattt

SEQ ID NO: 422261 - DNA, 33 bp, Homo sapien
acatcgagactaggaagggaagacaacctttta

SEQ ID NO: 422262 - DNA, 33 bp, Homo sapien
acatcgagactaggaatggaagacaacctttta

SEQ ID NO: 422263 - DNA, 33 bp, Homo sapien
aaccacggtgcacaaacatctgcgtgatggccg

SEQ ID NO: 422264 - DNA, 33 bp, Homo sapien
aaccacggtgcacaaagatctgcgtgatggccg

SEQ ID NO: 422265 - DNA, 33 bp, Homo sapien
aagtgaaattttacacactcacaagaaacaata

SEQ ID NO: 422266 - DNA, 33 bp, Homo sapien
aagtgaaattttacacgctcacaagaaacaata

SEQ ID NO: 422267 - DNA, 33 bp, Homo sapien
ttacagaaaaattgaacgtaaagtacagagaat

SEQ ID NO: 422268 - DNA, 33 bp, Homo sapien
ttacagaaaaattgaatgtaaagtacagagaat

SEQ ID NO: 422269 - DNA, 33 bp, Homo sapien
atatgtccagtacagtgacataatgtgacaact

SEQ ID NO: 422270 - DNA, 33 bp, Homo sapien
atatgtccagtacagttacataatgtgacaact

SEQ ID NO: 422271 - DNA, 33 bp, Homo sapien
acggagaaaagtcaaaacattgttgcagggggt

SEQ ID NO: 422272 - DNA, 33 bp, Homo sapien
acggagaaaagtcaaaccattgttgcagggggt

SEQ ID NO: 422273 - DNA, 33 bp, Homo sapien
cttttgttgcaaagaaccacatctgttccaaga

SEQ ID NO: 422274 - DNA, 33 bp, Homo sapien
cttttgttgcaaagaatcacatctgttccaaga

SEQ ID NO: 422275 - DNA, 33 bp, Homo sapien
tttgaaaaatattggcaaagaagttgttgtaac

SEQ ID NO: 422276 - DNA, 33 bp, Homo sapien
tttgaaaaatattggcgaagaagttgttgtaac

SEQ ID NO: 422277 - DNA, 33 bp, Homo sapien
gtttacaagttgtggcaaaattcatcttcactc

SEQ ID NO: 422278 - DNA, 33 bp, Homo sapien
gtttacaagttgtggcgaaattcatcttcactc

SEQ ID NO: 422279 - DNA, 33 bp, Homo sapien
tttctcattcccgaaactatttcctgcatcttg

SEQ ID NO: 422280 - DNA, 33 bp, Homo sapien
tttctcattcccgaaagtatttcctgcatcttg

SEQ ID NO: 422281 - DNA, 33 bp, Homo sapien
aagtaaaaattcaactaaactggacacaaaaag

SEQ ID NO: 422282 - DNA, 33 bp, Homo sapien
aagtaaaaattcaactcaactggacacaaaaag

SEQ ID NO: 422283 - DNA, 33 bp, Homo sapien
ttgggcagtttgggaaagttttgctaagacggc

SEQ ID NO: 422284 - DNA, 33 bp, Homo sapien
ttgggcagtttgggaaggttttgctaagacggc

SEQ ID NO: 422285 - DNA, 33 bp, Homo sapien
agctgtaccccataccaattgaatcataatcta

SEQ ID NO: 422286 - DNA, 33 bp, Homo sapien
agctgtaccccatacctattgaatcataatcta

SEQ ID NO: 422287 - DNA, 33 bp, Homo sapien
tgtgttccaggcgttacgctaagcatgtttcat

SEQ ID NO: 422288 - DNA, 33 bp, Homo sapien
tgtgttccaggcgttatgctaagcatgtttcat

SEQ ID NO: 422289 - DNA, 33 bp, Homo sapien
gcaacctgctaagtataaacagttctaagtcac

SEQ ID NO: 422290 - DNA, 33 bp, Homo sapien
gcaacctgctaagtatgaacagttctaagtcac

SEQ ID NO: 422291 - DNA, 33 bp, Homo sapien
gcaactgctctctaccacactcaatagacttac

SEQ ID NO: 422292 - DNA, 33 bp, Homo sapien
gcaactgctctctaccgcactcaatagacttac

SEQ ID NO: 422293 - DNA, 33 bp, Homo sapien
tgccctgggtcatctacatgcagactttggaga

SEQ ID NO: 422294 - DNA, 33 bp, Homo sapien
tgccctgggtcatctatatgcagactttggaga

SEQ ID NO: 422295 - DNA, 33 bp, Homo sapien
gttttgaagaagttagcattggtggcctctttt

SEQ ID NO: 422296 - DNA, 33 bp, Homo sapien
gttttgaagaagttagtattggtggcctctttt

SEQ ID NO: 422297 - DNA, 33 bp, Homo sapien
taaatcctcatacagaacaaacataagtgcaag

SEQ ID NO: 422298 - DNA, 33 bp, Homo sapien
taaatcctcatacagaccaaacataagtgcaag

SEQ ID NO: 422299 - DNA, 33 bp, Homo sapien
caggttggttaattcaatagcccagcaatatca

SEQ ID NO: 422300 - DNA, 33 bp, Homo sapien
caggttggttaattcactagcccagcaatatca

SEQ ID NO: 422301 - DNA, 33 bp, Homo sapien
atatgtatatttggaacaatatgtcagttagga

SEQ ID NO: 422302 - DNA, 33 bp, Homo sapien
atatgtatatttggaagaatatgtcagttagga

SEQ ID NO: 422303 - DNA, 33 bp, Homo sapien
acaatgaatgtagaaaaaaattttgtagattgt

SEQ ID NO: 422304 - DNA, 33 bp, Homo sapien
acaatgaatgtagaaacaaattttgtagattgt

SEQ ID NO: 422305 - DNA, 33 bp, Homo sapien
aagtctgagatctgaccgagttgaaagtaacct

SEQ ID NO: 422306 - DNA, 33 bp, Homo sapien
aagtctgagatctgactgagttgaaagtaacct

SEQ ID NO: 422307 - DNA, 33 bp, Homo sapien
tttgggtgtgaaagagaattcagtcttcacgtg

SEQ ID NO: 422308 - DNA, 33 bp, Homo sapien
tttgggtgtgaaagaggattcagtcttcacgtg

SEQ ID NO: 422309 - DNA, 33 bp, Homo sapien
ctggtctccattgacaagaaggcctaaccactt

SEQ ID NO: 422310 - DNA, 33 bp, Homo sapien
ctggtctccattgacaggaaggcctaaccactt

SEQ ID NO: 422311 - DNA, 33 bp, Homo sapien
cccaattctatttgccaaacctaaggtctggtc

SEQ ID NO: 422312 - DNA, 33 bp, Homo sapien
cccaattctatttgccgaacctaaggtctggtc

SEQ ID NO: 422313 - DNA, 33 bp, Homo sapien
acttgataaaaacagacgaccttctgatgatat

SEQ ID NO: 422314 - DNA, 33 bp, Homo sapien
acttgataaaaacagatgaccttctgatgatat

SEQ ID NO: 422315 - DNA, 33 bp, Homo sapien
gagcctaaacagagtaccagcaaagtcagaccc

SEQ ID NO: 422316 - DNA, 33 bp, Homo sapien
gagcctaaacagagtatcagcaaagtcagaccc

SEQ ID NO: 422317 - DNA, 33 bp, Homo sapien
ggcaggtacccggtatgaatgaggctgaagtct

SEQ ID NO: 422318 - DNA, 33 bp, Homo sapien
ggcaggtacccggtattaatgaggctgaagtct

SEQ ID NO: 422319 - DNA, 33 bp, Homo sapien
ccgggccttgaggtgacgcaactatccccaaat

SEQ ID NO: 422320 - DNA, 33 bp, Homo sapien
ccgggccttgaggtgaggcaactatccccaaat

SEQ ID NO: 422321 - DNA, 33 bp, Homo sapien
aaaagtccggaatgacaactatatacttcctgt

SEQ ID NO: 422322 - DNA, 33 bp, Homo sapien
aaaagtccggaatgaccactatatacttcctgt

SEQ ID NO: 422323 - DNA, 33 bp, Homo sapien
cttgttgcacttgaaccccttttcatctcattt

SEQ ID NO: 422324 - DNA, 33 bp, Homo sapien
cttgttgcacttgaacgccttttcatctcattt

SEQ ID NO: 422325 - DNA, 33 bp, Homo sapien
tgcaacttctacactacagctgtgaatgtattt

SEQ ID NO: 422326 - DNA, 33 bp, Homo sapien
tgcaacttctacactatagctgtgaatgtattt

SEQ ID NO: 422327 - DNA, 33 bp, Homo sapien
ttttctactcgggatcacaagctgttgctgggc

SEQ ID NO: 422328 - DNA, 33 bp, Homo sapien
ttttctactcgggatcgcaagctgttgctgggc

SEQ ID NO: 422329 - DNA, 33 bp, Homo sapien
cacttatgtgaggaataagagtttcaacaggcc

SEQ ID NO: 422330 - DNA, 33 bp, Homo sapien
cacttatgtgaggaatgagagtttcaacaggcc

SEQ ID NO: 422331 - DNA, 33 bp, Homo sapien
tcaatgtagttctggaagcctaaggaagctaag

SEQ ID NO: 422332 - DNA, 33 bp, Homo sapien
tcaatgtagttctggaggcctaaggaagctaag

SEQ ID NO: 422333 - DNA, 33 bp, Homo sapien
cctgtcaccaaaggtcaattcaagtcaagcact

SEQ ID NO: 422334 - DNA, 33 bp, Homo sapien
cctgtcaccaaaggtcgattcaagtcaagcact

SEQ ID NO: 422335 - DNA, 33 bp, Homo sapien
gtgcactttatggaagacaccgcaaagactttg

SEQ ID NO: 422336 - DNA, 33 bp, Homo sapien
gtgcactttatggaaggcaccgcaaagactttg

SEQ ID NO: 422337 - DNA, 33 bp, Homo sapien
ttattccgagaacagcaacacggatggagtgcg

SEQ ID NO: 422338 - DNA, 33 bp, Homo sapien
ttattccgagaacagcgacacggatggagtgcg

SEQ ID NO: 422339 - DNA, 33 bp, Homo sapien
tttcagctaaaatgcaatcacttaaaagtccag

SEQ ID NO: 422340 - DNA, 33 bp, Homo sapien
tttcagctaaaatgcagtcacttaaaagtccag

SEQ ID NO: 422341 - DNA, 33 bp, Homo sapien
gcaccttctcagggaacctgctcggccctgcta

SEQ ID NO: 422342 - DNA, 33 bp, Homo sapien
gcaccttctcagggaatctgctcggccctgcta

SEQ ID NO: 422343 - DNA, 33 bp, Homo sapien
gagggggagcaaatacgagtgatgtgctctgag

SEQ ID NO: 422344 - DNA, 33 bp, Homo sapien
gagggggagcaaatactagtgatgtgctctgag

SEQ ID NO: 422345 - DNA, 33 bp, Homo sapien
taattgactgattaacaacttctctgattcatg

SEQ ID NO: 422346 - DNA, 33 bp, Homo sapien
taattgactgattaaccacttctctgattcatg

SEQ ID NO: 422347 - DNA, 33 bp, Homo sapien
ccattttagtaacttgaatgaaagcccccatct

SEQ ID NO: 422348 - DNA, 33 bp, Homo sapien
ccattttagtaacttggatgaaagcccccatct

SEQ ID NO: 422349 - DNA, 33 bp, Homo sapien
attgattcgtgctataactaagtactttatcct

SEQ ID NO: 422350 - DNA, 33 bp, Homo sapien
attgattcgtgctatagctaagtactttatcct

SEQ ID NO: 422351 - DNA, 33 bp, Homo sapien
ttgcatagtgaggctcaactttcaggtcctctt

SEQ ID NO: 422352 - DNA, 33 bp, Homo sapien
ttgcatagtgaggctcgactttcaggtcctctt

SEQ ID NO: 422353 - DNA, 33 bp, Homo sapien
tccatcccaccatttccacgtgatttcctttcc

SEQ ID NO: 422354 - DNA, 33 bp, Homo sapien
tccatcccaccatttctacgtgatttcctttcc

SEQ ID NO: 422355 - DNA, 33 bp, Homo sapien
agtctgcgtgagacaccgaatctcatgcccttt

SEQ ID NO: 422356 - DNA, 33 bp, Homo sapien
agtctgcgtgagacactgaatctcatgcccttt

SEQ ID NO: 422357 - DNA, 33 bp, Homo sapien
caaatatatatgggaaatcagcatgacatatgg

SEQ ID NO: 422358 - DNA, 33 bp, Homo sapien
caaatatatatgggaattcagcatgacatatgg

SEQ ID NO: 422359 - DNA, 33 bp, Homo sapien
aacactgttgtttgtacagaccattaacatcgg

SEQ ID NO: 422360 - DNA, 33 bp, Homo sapien
aacactgttgtttgtatagaccattaacatcgg

SEQ ID NO: 422361 - DNA, 33 bp, Homo sapien
agtctctattgattgaaacataagcagaatcaa

SEQ ID NO: 422362 - DNA, 33 bp, Homo sapien
agtctctattgattgacacataagcagaatcaa

SEQ ID NO: 422363 - DNA, 33 bp, Homo sapien
accatcctttccaataccctaaaatggcaacta

SEQ ID NO: 422364 - DNA, 33 bp, Homo sapien
accatcctttccaatatcctaaaatggcaacta

SEQ ID NO: 422365 - DNA, 33 bp, Homo sapien
gcctttgcatgatgaacgaatgtggaaggtgtc

SEQ ID NO: 422366 - DNA, 33 bp, Homo sapien
gcctttgcatgatgaatgaatgtggaaggtgtc

SEQ ID NO: 422367 - DNA, 33 bp, Homo sapien
gagggcttccttcgaaatcttcctggcacatta

SEQ ID NO: 422368 - DNA, 33 bp, Homo sapien
gagggcttccttcgaactcttcctggcacatta

SEQ ID NO: 422369 - DNA, 33 bp, Homo sapien
cttattaaagattcataagcctacctgtgaaga

SEQ ID NO: 422370 - DNA, 33 bp, Homo sapien
cttattaaagattcatgagcctacctgtgaaga

SEQ ID NO: 422371 - DNA, 33 bp, Homo sapien
atcgaatccctagatacgcagctagttcagtag

SEQ ID NO: 422372 - DNA, 33 bp, Homo sapien
atcgaatccctagatatgcagctagttcagtag

SEQ ID NO: 422373 - DNA, 33 bp, Homo sapien
gtgtggtgagtcagcaaagacttgagtcaccat

SEQ ID NO: 422374 - DNA, 33 bp, Homo sapien
gtgtggtgagtcagcagagacttgagtcaccat

SEQ ID NO: 422375 - DNA, 33 bp, Homo sapien
accagagactttacaacgcaggagaacaatggt

SEQ ID NO: 422376 - DNA, 33 bp, Homo sapien
accagagactttacaatgcaggagaacaatggt

SEQ ID NO: 422377 - DNA, 33 bp, Homo sapien
acgagttagaacagaaatagttagccatttcca

SEQ ID NO: 422378 - DNA, 33 bp, Homo sapien
acgagttagaacagaagtagttagccatttcca

SEQ ID NO: 422379 - DNA, 33 bp, Homo sapien
ttaaaattatattgcacgtgtctatgtagtata

SEQ ID NO: 422380 - DNA, 33 bp, Homo sapien
ttaaaattatattgcatgtgtctatgtagtata

SEQ ID NO: 422381 - DNA, 33 bp, Homo sapien
gccatgagatgcactcagacgtcattataaata

SEQ ID NO: 422382 - DNA, 33 bp, Homo sapien
gccatgagatgcactcggacgtcattataaata

SEQ ID NO: 422383 - DNA, 33 bp, Homo sapien
ctatcttttacgacacaaacctttctatgtgtt

SEQ ID NO: 422384 - DNA, 33 bp, Homo sapien
ctatcttttacgacactaacctttctatgtgtt

SEQ ID NO: 422385 - DNA, 33 bp, Homo sapien
ctgtctgatcttttgaagttgtcacctcccagc

SEQ ID NO: 422386 - DNA, 33 bp, Homo sapien
ctgtctgatcttttgaggttgtcacctcccagc

SEQ ID NO: 422387 - DNA, 33 bp, Homo sapien
taatccgcatcaagtgaacatttttttcctaat

SEQ ID NO: 422388 - DNA, 33 bp, Homo sapien
taatccgcatcaagtggacatttttttcctaat

SEQ ID NO: 422389 - DNA, 33 bp, Homo sapien
tacctccttctacaaaatgacccccgtctccac

SEQ ID NO: 422390 - DNA, 33 bp, Homo sapien
tacctccttctacaaactgacccccgtctccac

SEQ ID NO: 422391 - DNA, 33 bp, Homo sapien
aatcaatgaaaaaaaaaagttagagcacagctg

SEQ ID NO: 422392 - DNA, 33 bp, Homo sapien
aatcaatgaaaaaaaacagttagagcacagctg

SEQ ID NO: 422393 - DNA, 33 bp, Homo sapien
tcactttgagggtagcagccttgttgatagtcg

SEQ ID NO: 422394 - DNA, 33 bp, Homo sapien
tcactttgagggtagcggccttgttgatagtcg

SEQ ID NO: 422395 - DNA, 33 bp, Homo sapien
gtttgtcatgcagcaactgataatccaaacaga

SEQ ID NO: 422396 - DNA, 33 bp, Homo sapien
gtttgtcatgcagcaattgataatccaaacaga

SEQ ID NO: 422397 - DNA, 33 bp, Homo sapien
ggcagatactttgaaaacaggtgactattatct

SEQ ID NO: 422398 - DNA, 33 bp, Homo sapien
ggcagatactttgaaagcaggtgactattatct

SEQ ID NO: 422399 - DNA, 33 bp, Homo sapien
tgtcctggggccgctccaggtaccaactgtgta

SEQ ID NO: 422400 - DNA, 33 bp, Homo sapien
tgtcctggggccgctctaggtaccaactgtgta

SEQ ID NO: 422401 - DNA, 33 bp, Homo sapien
gggttgttatgggctaaactgaatatatagaga

SEQ ID NO: 422402 - DNA, 33 bp, Homo sapien
gggttgttatgggctagactgaatatatagaga

SEQ ID NO: 422403 - DNA, 33 bp, Homo sapien
caaaggaagcagcttcacctataagctgtaaaa

SEQ ID NO: 422404 - DNA, 33 bp, Homo sapien
caaaggaagcagcttcgcctataagctgtaaaa

SEQ ID NO: 422405 - DNA, 33 bp, Homo sapien
caaagataaggttaaccaaggtatagttgagtg

SEQ ID NO: 422406 - DNA, 33 bp, Homo sapien
caaagataaggttaacgaaggtatagttgagtg

SEQ ID NO: 422407 - DNA, 33 bp, Homo sapien
ggtaatagtaaagagaatcccttcccgttgttg

SEQ ID NO: 422408 - DNA, 33 bp, Homo sapien
ggtaatagtaaagagactcccttcccgttgttg

SEQ ID NO: 422409 - DNA, 33 bp, Homo sapien
attctgaatagctgacagccttccaacctcata

SEQ ID NO: 422410 - DNA, 33 bp, Homo sapien
attctgaatagctgacggccttccaacctcata

SEQ ID NO: 422411 - DNA, 33 bp, Homo sapien
actctatagcagagaaaaatagagtactggcag

SEQ ID NO: 422412 - DNA, 33 bp, Homo sapien
actctatagcagagaacaatagagtactggcag

SEQ ID NO: 422413 - DNA, 33 bp, Homo sapien
agggctatgaagagaaactttttgctcccaccc

SEQ ID NO: 422414 - DNA, 33 bp, Homo sapien
agggctatgaagagaacctttttgctcccaccc

SEQ ID NO: 422415 - DNA, 33 bp, Homo sapien
aggaagaactctgagaagcaaggctcccatctg

SEQ ID NO: 422416 - DNA, 33 bp, Homo sapien
aggaagaactctgagaggcaaggctcccatctg

SEQ ID NO: 422417 - DNA, 33 bp, Homo sapien
caggtaatttaatagacagcattcgaccactgg

SEQ ID NO: 422418 - DNA, 33 bp, Homo sapien
caggtaatttaatagagagcattcgaccactgg

SEQ ID NO: 422419 - DNA, 33 bp, Homo sapien
caccgcccctgaagagaaagtcctttgtttggt

SEQ ID NO: 422420 - DNA, 33 bp, Homo sapien
caccgcccctgaagaggaagtcctttgtttggt

SEQ ID NO: 422421 - DNA, 33 bp, Homo sapien
ctacctgaattttccaataaaacatctgtattt

SEQ ID NO: 422422 - DNA, 33 bp, Homo sapien
ctacctgaattttccagtaaaacatctgtattt

SEQ ID NO: 422423 - DNA, 33 bp, Homo sapien
gtcccagaacctcacactgctttcagaagttat

SEQ ID NO: 422424 - DNA, 33 bp, Homo sapien
gtcccagaacctcacattgctttcagaagttat

SEQ ID NO: 422425 - DNA, 33 bp, Homo sapien
tatacacgtacgcatagataaatgtgaaataaa

SEQ ID NO: 422426 - DNA, 33 bp, Homo sapien
tatacacgtacgcatatataaatgtgaaataaa

SEQ ID NO: 422427 - DNA, 33 bp, Homo sapien
tgtgccataatatccaggtaccattcatccagc

SEQ ID NO: 422428 - DNA, 33 bp, Homo sapien
tgtgccataatatccatgtaccattcatccagc

SEQ ID NO: 422429 - DNA, 33 bp, Homo sapien
cctgtgagttcaccaaaatcagtgacctttctt

SEQ ID NO: 422430 - DNA, 33 bp, Homo sapien
cctgtgagttcaccaagatcagtgacctttctt

SEQ ID NO: 422431 - DNA, 33 bp, Homo sapien
cacttttctttatcaacgatgagcatttttcta

SEQ ID NO: 422432 - DNA, 33 bp, Homo sapien
cacttttctttatcaatgatgagcatttttcta

SEQ ID NO: 422433 - DNA, 33 bp, Homo sapien
catccgtgccaattagcagaggcttataagctc

SEQ ID NO: 422434 - DNA, 33 bp, Homo sapien
catccgtgccaattagtagaggcttataagctc

SEQ ID NO: 422435 - DNA, 33 bp, Homo sapien
taggtccggaagcagcaaatgaaggctttgttg

SEQ ID NO: 422436 - DNA, 33 bp, Homo sapien
taggtccggaagcagcgaatgaaggctttgttg

SEQ ID NO: 422437 - DNA, 33 bp, Homo sapien
ggacctaagtaggggcaagggcacacgaaaggg

SEQ ID NO: 422438 - DNA, 33 bp, Homo sapien
ggacctaagtaggggcgagggcacacgaaaggg

SEQ ID NO: 422439 - DNA, 33 bp, Homo sapien
gcatagaaattagagaagagaaacgtattacaa

SEQ ID NO: 422440 - DNA, 33 bp, Homo sapien
gcatagaaattagagaggagaaacgtattacaa

SEQ ID NO: 422441 - DNA, 33 bp, Homo sapien
ttatcgttctggagagaccacagccttaggaag

SEQ ID NO: 422442 - DNA, 33 bp, Homo sapien
ttatcgttctggagagcccacagccttaggaag

SEQ ID NO: 422443 - DNA, 33 bp, Homo sapien
caaggagcaacagagaccgttttaagcagtctc

SEQ ID NO: 422444 - DNA, 33 bp, Homo sapien
caaggagcaacagagatcgttttaagcagtctc

SEQ ID NO: 422445 - DNA, 33 bp, Homo sapien
caatgatgcacttcacgcaatgcctagagaaaa

SEQ ID NO: 422446 - DNA, 33 bp, Homo sapien
caatgatgcacttcactcaatgcctagagaaaa

SEQ ID NO: 422447 - DNA, 33 bp, Homo sapien
ctagttgaggaggagacagctttaggtaatggg

SEQ ID NO: 422448 - DNA, 33 bp, Homo sapien
ctagttgaggaggagagagctttaggtaatggg

SEQ ID NO: 422449 - DNA, 33 bp, Homo sapien
aagctttcatctgaaacttacttacctggtctt

SEQ ID NO: 422450 - DNA, 33 bp, Homo sapien
aagctttcatctgaaatttacttacctggtctt

SEQ ID NO: 422451 - DNA, 33 bp, Homo sapien
taaagagaataccagaataaaatggaaccaaaa

SEQ ID NO: 422452 - DNA, 33 bp, Homo sapien
taaagagaataccagagtaaaatggaaccaaaa

SEQ ID NO: 422453 - DNA, 33 bp, Homo sapien
ttaacacagaactgcaaaagaggccaagttgtc

SEQ ID NO: 422454 - DNA, 33 bp, Homo sapien
ttaacacagaactgcataagaggccaagttgtc

SEQ ID NO: 422455 - DNA, 33 bp, Homo sapien
ctcagataaagacataaaaggcatggagagtat

SEQ ID NO: 422456 - DNA, 33 bp, Homo sapien
ctcagataaagacatagaaggcatggagagtat

SEQ ID NO: 422457 - DNA, 33 bp, Homo sapien
acaggatacaaaagacgatcaggagttggaaac

SEQ ID NO: 422458 - DNA, 33 bp, Homo sapien
acaggatacaaaagactatcaggagttggaaac

SEQ ID NO: 422459 - DNA, 33 bp, Homo sapien
caccctgggattgaaggcattggcccagttgaa

SEQ ID NO: 422460 - DNA, 33 bp, Homo sapien
caccctgggattgaagtcattggcccagttgaa

SEQ ID NO: 422461 - DNA, 33 bp, Homo sapien
ttaatgaagatgcggaaggacagttcacagcac

SEQ ID NO: 422462 - DNA, 33 bp, Homo sapien
ttaatgaagatgcggagggacagttcacagcac

SEQ ID NO: 422463 - DNA, 33 bp, Homo sapien
aactcactaacaaacaagagaagagctttatgt

SEQ ID NO: 422464 - DNA, 33 bp, Homo sapien
aactcactaacaaacaggagaagagctttatgt

SEQ ID NO: 422465 - DNA, 33 bp, Homo sapien
aagaagcaaaacctaaataatctgtcaaattat

SEQ ID NO: 422466 - DNA, 33 bp, Homo sapien
aagaagcaaaacctaagtaatctgtcaaattat

SEQ ID NO: 422467 - DNA, 33 bp, Homo sapien
agtttgactctccttgaacaaatactatggctt

SEQ ID NO: 422468 - DNA, 33 bp, Homo sapien
agtttgactctccttggacaaatactatggctt

SEQ ID NO: 422469 - DNA, 33 bp, Homo sapien
atgactttctcccatgacacttatcactggttt

SEQ ID NO: 422470 - DNA, 33 bp, Homo sapien
atgactttctcccatggcacttatcactggttt

SEQ ID NO: 422471 - DNA, 33 bp, Homo sapien
aatgaatgtggatggccaaagctaaaaaagacc

SEQ ID NO: 422472 - DNA, 33 bp, Homo sapien
aatgaatgtggatggctaaagctaaaaaagacc

SEQ ID NO: 422473 - DNA, 33 bp, Homo sapien
tacaatttttgattaaacctcatatccggtctg

SEQ ID NO: 422474 - DNA, 33 bp, Homo sapien
tacaatttttgattaagcctcatatccggtctg

SEQ ID NO: 422475 - DNA, 33 bp, Homo sapien
taagtaacaaaatggcaaaaggattcactgata

SEQ ID NO: 422476 - DNA, 33 bp, Homo sapien
taagtaacaaaatggcgaaaggattcactgata

SEQ ID NO: 422477 - DNA, 33 bp, Homo sapien
ggcagagctaaaagagcactgtaatacatccac

SEQ ID NO: 422478 - DNA, 33 bp, Homo sapien
ggcagagctaaaagagtactgtaatacatccac

SEQ ID NO: 422479 - DNA, 33 bp, Homo sapien
gcattaaaatcccccacatttgccctccttcaa

SEQ ID NO: 422480 - DNA, 33 bp, Homo sapien
gcattaaaatcccccatatttgccctccttcaa

SEQ ID NO: 422481 - DNA, 33 bp, Homo sapien
tgcaagagattggccaacagacatgggcggtgc

SEQ ID NO: 422482 - DNA, 33 bp, Homo sapien
tgcaagagattggccagcagacatgggcggtgc

SEQ ID NO: 422483 - DNA, 33 bp, Homo sapien
ctcataagtgctccaggatgggtgaatctgtga

SEQ ID NO: 422484 - DNA, 33 bp, Homo sapien
ctcataagtgctccagtatgggtgaatctgtga

SEQ ID NO: 422485 - DNA, 33 bp, Homo sapien
ataccgtggaatctggaatctgatgcctataaa

SEQ ID NO: 422486 - DNA, 33 bp, Homo sapien
ataccgtggaatctgggatctgatgcctataaa

SEQ ID NO: 422487 - DNA, 33 bp, Homo sapien
agctgagggcaagtcaacctctctaaggctttg

SEQ ID NO: 422488 - DNA, 33 bp, Homo sapien
agctgagggcaagtcatcctctctaaggctttg

SEQ ID NO: 422489 - DNA, 33 bp, Homo sapien
catagagcaatgcttcccaatgtgtgttagaaa

SEQ ID NO: 422490 - DNA, 33 bp, Homo sapien
catagagcaatgcttctcaatgtgtgttagaaa

SEQ ID NO: 422491 - DNA, 33 bp, Homo sapien
ctgatcttgctgcttacctcctatttccttcct

SEQ ID NO: 422492 - DNA, 33 bp, Homo sapien
ctgatcttgctgcttatctcctatttccttcct

SEQ ID NO: 422493 - DNA, 33 bp, Homo sapien
ttggtgctccctgatcacacatctgggaatcat

SEQ ID NO: 422494 - DNA, 33 bp, Homo sapien
ttggtgctccctgatcgcacatctgggaatcat

SEQ ID NO: 422495 - DNA, 33 bp, Homo sapien
cattcatttcccattcgctcaggctcaaaatct

SEQ ID NO: 422496 - DNA, 33 bp, Homo sapien
cattcatttcccattctctcaggctcaaaatct

SEQ ID NO: 422497 - DNA, 33 bp, Homo sapien
gattattgaatggttgaattaaggacaaactga

SEQ ID NO: 422498 - DNA, 33 bp, Homo sapien
gattattgaatggttggattaaggacaaactga

SEQ ID NO: 422499 - DNA, 33 bp, Homo sapien
ctattactgttcttaaccggtgaattcagaaat

SEQ ID NO: 422500 - DNA, 33 bp, Homo sapien
ctattactgttcttaatcggtgaattcagaaat

SEQ ID NO: 422501 - DNA, 33 bp, Homo sapien
ttcacatccggcacacaaactattactgttctt

SEQ ID NO: 422502 - DNA, 33 bp, Homo sapien
ttcacatccggcacacgaactattactgttctt

SEQ ID NO: 422503 - DNA, 33 bp, Homo sapien
agcttctgaaggagacaataacatgaggtagcc

SEQ ID NO: 422504 - DNA, 33 bp, Homo sapien
agcttctgaaggagacgataacatgaggtagcc

SEQ ID NO: 422505 - DNA, 33 bp, Homo sapien
agggtgatttggcaaaatatagaaaagactaaa

SEQ ID NO: 422506 - DNA, 33 bp, Homo sapien
agggtgatttggcaaagtatagaaaagactaaa

SEQ ID NO: 422507 - DNA, 33 bp, Homo sapien
ctgttactcagcctaacatagcctctaagcacc

SEQ ID NO: 422508 - DNA, 33 bp, Homo sapien
ctgttactcagcctaatatagcctctaagcacc

SEQ ID NO: 422509 - DNA, 33 bp, Homo sapien
agtcgaagacagagtcaaggtcttcctgagaat

SEQ ID NO: 422510 - DNA, 33 bp, Homo sapien
agtcgaagacagagtccaggtcttcctgagaat

SEQ ID NO: 422511 - DNA, 33 bp, Homo sapien
tttttcttttagcatcacctgactcccactcca

SEQ ID NO: 422512 - DNA, 33 bp, Homo sapien
tttttcttttagcatcgcctgactcccactcca

SEQ ID NO: 422513 - DNA, 33 bp, Homo sapien
agatgcttcttttgggaattcacagtcctgatt

SEQ ID NO: 422514 - DNA, 33 bp, Homo sapien
agatgcttcttttggggattcacagtcctgatt

SEQ ID NO: 422515 - DNA, 33 bp, Homo sapien
ctattatgcaggaatacgacatctacatttcta

SEQ ID NO: 422516 - DNA, 33 bp, Homo sapien
ctattatgcaggaatatgacatctacatttcta

SEQ ID NO: 422517 - DNA, 33 bp, Homo sapien
ctgttacaagagccaaaaaattccctgtttgat

SEQ ID NO: 422518 - DNA, 33 bp, Homo sapien
ctgttacaagagccaacaaattccctgtttgat

SEQ ID NO: 422519 - DNA, 33 bp, Homo sapien
aatcagtacttacttacaaacttgcatctgttg

SEQ ID NO: 422520 - DNA, 33 bp, Homo sapien
aatcagtacttacttataaacttgcatctgttg

SEQ ID NO: 422521 - DNA, 33 bp, Homo sapien
gcctcagttctataaacggaaactaaacacagt

SEQ ID NO: 422522 - DNA, 33 bp, Homo sapien
gcctcagttctataaatggaaactaaacacagt

SEQ ID NO: 422523 - DNA, 33 bp, Homo sapien
gtcgttaaggagctcacaggaaaactgaaggga

SEQ ID NO: 422524 - DNA, 33 bp, Homo sapien
gtcgttaaggagctcataggaaaactgaaggga

SEQ ID NO: 422525 - DNA, 33 bp, Homo sapien
taggcctgatgttgacagaagacaagccattct

SEQ ID NO: 422526 - DNA, 33 bp, Homo sapien
taggcctgatgttgacggaagacaagccattct

SEQ ID NO: 422527 - DNA, 33 bp, Homo sapien
catttatatccacacccctgaaagatgcacctg

SEQ ID NO: 422528 - DNA, 33 bp, Homo sapien
catttatatccacacctctgaaagatgcacctg

SEQ ID NO: 422529 - DNA, 33 bp, Homo sapien
tcttccacagaagcaaacacagtaagatgcctc

SEQ ID NO: 422530 - DNA, 33 bp, Homo sapien
tcttccacagaagcaaccacagtaagatgcctc

SEQ ID NO: 422531 - DNA, 33 bp, Homo sapien
ctttttccacatgccaatgagtgaagaaaagaa

SEQ ID NO: 422532 - DNA, 33 bp, Homo sapien
ctttttccacatgccagtgagtgaagaaaagaa

SEQ ID NO: 422533 - DNA, 33 bp, Homo sapien
accctaaagcctttcactccccggtcagacaag

SEQ ID NO: 422534 - DNA, 33 bp, Homo sapien
accctaaagcctttcattccccggtcagacaag

SEQ ID NO: 422535 - DNA, 33 bp, Homo sapien
aacagatgtaggaagcaagcaaccccagaaaca

SEQ ID NO: 422536 - DNA, 33 bp, Homo sapien
aacagatgtaggaagcgagcaaccccagaaaca

SEQ ID NO: 422537 - DNA, 33 bp, Homo sapien
gacttatttttagcttcaaatgacattagctag

SEQ ID NO: 422538 - DNA, 33 bp, Homo sapien
gacttatttttagcttgaaatgacattagctag

SEQ ID NO: 422539 - DNA, 33 bp, Homo sapien
agggctcttgtctgtaggatgtaaacaattaga

SEQ ID NO: 422540 - DNA, 33 bp, Homo sapien
agggctcttgtctgtatgatgtaaacaattaga

SEQ ID NO: 422541 - DNA, 33 bp, Homo sapien
cgtgcatggaaatctgcaaaaatacaacaaatt

SEQ ID NO: 422542 - DNA, 33 bp, Homo sapien
cgtgcatggaaatctggaaaaatacaacaaatt

SEQ ID NO: 422543 - DNA, 33 bp, Homo sapien
cagctatcatacaaaaacgtgattgtaaatcgt

SEQ ID NO: 422544 - DNA, 33 bp, Homo sapien
cagctatcatacaaaaccgtgattgtaaatcgt

SEQ ID NO: 422545 - DNA, 33 bp, Homo sapien
agctcatctccatctacgtgatgctggtttcat

SEQ ID NO: 422546 - DNA, 33 bp, Homo sapien
agctcatctccatctatgtgatgctggtttcat

SEQ ID NO: 422547 - DNA, 33 bp, Homo sapien
cacacactcaaaatacacatcatatttttaaag

SEQ ID NO: 422548 - DNA, 33 bp, Homo sapien
cacacactcaaaatacgcatcatatttttaaag

SEQ ID NO: 422549 - DNA, 33 bp, Homo sapien
ttttgttattcttgtaaaatccttgacgatgga

SEQ ID NO: 422550 - DNA, 33 bp, Homo sapien
ttttgttattcttgtagaatccttgacgatgga

SEQ ID NO: 422551 - DNA, 33 bp, Homo sapien
aggtgataactagggacgcaacaatagatctga

SEQ ID NO: 422552 - DNA, 33 bp, Homo sapien
aggtgataactagggatgcaacaatagatctga

SEQ ID NO: 422553 - DNA, 33 bp, Homo sapien
gagcttcaggcagatgcacagaaagggcaaagg

SEQ ID NO: 422554 - DNA, 33 bp, Homo sapien
gagcttcaggcagatggacagaaagggcaaagg

SEQ ID NO: 422555 - DNA, 33 bp, Homo sapien
atttctgctgtagcctcaagtgattcatcctgt

SEQ ID NO: 422556 - DNA, 33 bp, Homo sapien
atttctgctgtagcctgaagtgattcatcctgt

SEQ ID NO: 422557 - DNA, 33 bp, Homo sapien
atttacgaggtaataaataaaatgcatatatct

SEQ ID NO: 422558 - DNA, 33 bp, Homo sapien
atttacgaggtaataagtaaaatgcatatatct

SEQ ID NO: 422559 - DNA, 33 bp, Homo sapien
gcatggcagtccagcactctctaacagaccctg

SEQ ID NO: 422560 - DNA, 33 bp, Homo sapien
gcatggcagtccagcattctctaacagaccctg

SEQ ID NO: 422561 - DNA, 33 bp, Homo sapien
tctgtgagtctaaaacaataggaagactgtgct

SEQ ID NO: 422562 - DNA, 33 bp, Homo sapien
tctgtgagtctaaaaccataggaagactgtgct

SEQ ID NO: 422563 - DNA, 33 bp, Homo sapien
gtgtgacaaaatatgacgccatatgctcagtat

SEQ ID NO: 422564 - DNA, 33 bp, Homo sapien
gtgtgacaaaatatgatgccatatgctcagtat

SEQ ID NO: 422565 - DNA, 33 bp, Homo sapien
tcgaccttcgcaggaaaaaaggtagaagcctca

SEQ ID NO: 422566 - DNA, 33 bp, Homo sapien
tcgaccttcgcaggaagaaaggtagaagcctca

SEQ ID NO: 422567 - DNA, 33 bp, Homo sapien
ctcgtcaaccaggatgcagttctttcttccatg

SEQ ID NO: 422568 - DNA, 33 bp, Homo sapien
ctcgtcaaccaggatgtagttctttcttccatg

SEQ ID NO: 422569 - DNA, 33 bp, Homo sapien
ctggttgacgagatttgaaaaaagtttgtatca

SEQ ID NO: 422570 - DNA, 33 bp, Homo sapien
ctggttgacgagattttaaaaaagtttgtatca

SEQ ID NO: 422571 - DNA, 33 bp, Homo sapien
aatacacaatggttaaatatgtaccttgagagc

SEQ ID NO: 422572 - DNA, 33 bp, Homo sapien
aatacacaatggttaactatgtaccttgagagc

SEQ ID NO: 422573 - DNA, 33 bp, Homo sapien
actctcaagttgaaaaacctgaaactgtgagga

SEQ ID NO: 422574 - DNA, 33 bp, Homo sapien
actctcaagttgaaaagcctgaaactgtgagga

SEQ ID NO: 422575 - DNA, 33 bp, Homo sapien
tctgccaattcaggagaaagttgaataagtttc

SEQ ID NO: 422576 - DNA, 33 bp, Homo sapien
tctgccaattcaggaggaagttgaataagtttc

SEQ ID NO: 422577 - DNA, 33 bp, Homo sapien
atgtccatcatttagaagtggtgaataaccaga

SEQ ID NO: 422578 - DNA, 33 bp, Homo sapien
atgtccatcatttagatgtggtgaataaccaga

SEQ ID NO: 422579 - DNA, 33 bp, Homo sapien
tgtctgctgcctctatcactaccttacctacca

SEQ ID NO: 422580 - DNA, 33 bp, Homo sapien
tgtctgctgcctctatgactaccttacctacca

SEQ ID NO: 422581 - DNA, 33 bp, Homo sapien
ctaccatagagatgaaagttcctcacactaaac

SEQ ID NO: 422582 - DNA, 33 bp, Homo sapien
ctaccatagagatgaaggttcctcacactaaac

SEQ ID NO: 422583 - DNA, 33 bp, Homo sapien
aaacatttcacacttacgaaggggtcagaactc

SEQ ID NO: 422584 - DNA, 33 bp, Homo sapien
aaacatttcacacttatgaaggggtcagaactc

SEQ ID NO: 422585 - DNA, 33 bp, Homo sapien
tagataagccaaaatcaaatttaaaagctgaaa

SEQ ID NO: 422586 - DNA, 33 bp, Homo sapien
tagataagccaaaatcgaatttaaaagctgaaa

SEQ ID NO: 422587 - DNA, 33 bp, Homo sapien
cacaggctggattgcaacggtctgattataggt

SEQ ID NO: 422588 - DNA, 33 bp, Homo sapien
cacaggctggattgcagcggtctgattataggt

SEQ ID NO: 422589 - DNA, 33 bp, Homo sapien
tcaatagaaaggaaaaagtccagtcatccagtt

SEQ ID NO: 422590 - DNA, 33 bp, Homo sapien
tcaatagaaaggaaaaggtccagtcatccagtt

SEQ ID NO: 422591 - DNA, 33 bp, Homo sapien
agaaaaggagtttatacgtagtgtaattatttc

SEQ ID NO: 422592 - DNA, 33 bp, Homo sapien
agaaaaggagtttatatgtagtgtaattatttc

SEQ ID NO: 422593 - DNA, 33 bp, Homo sapien
taaaggaccagtgcaaaatagaaaatctgtaga

SEQ ID NO: 422594 - DNA, 33 bp, Homo sapien
taaaggaccagtgcaagatagaaaatctgtaga

SEQ ID NO: 422595 - DNA, 33 bp, Homo sapien
catggccttctcataacgggccacctgtcctct

SEQ ID NO: 422596 - DNA, 33 bp, Homo sapien
catggccttctcataatgggccacctgtcctct

SEQ ID NO: 422597 - DNA, 33 bp, Homo sapien
gtggaacacagaattacgtcattctccataggt

SEQ ID NO: 422598 - DNA, 33 bp, Homo sapien
gtggaacacagaattatgtcattctccataggt

SEQ ID NO: 422599 - DNA, 33 bp, Homo sapien
aagcctaacaatcttacgctccaaacaagctga

SEQ ID NO: 422600 - DNA, 33 bp, Homo sapien
aagcctaacaatcttatgctccaaacaagctga

SEQ ID NO: 422601 - DNA, 33 bp, Homo sapien
ccatgtttaatagaggaacctacaggatgttac

SEQ ID NO: 422602 - DNA, 33 bp, Homo sapien
ccatgtttaatagaggcacctacaggatgttac

SEQ ID NO: 422603 - DNA, 33 bp, Homo sapien
ttctattttagtgcaacagtggttttgtaaacc

SEQ ID NO: 422604 - DNA, 33 bp, Homo sapien
ttctattttagtgcaatagtggttttgtaaacc

SEQ ID NO: 422605 - DNA, 33 bp, Homo sapien
tgtaaataccaaccagacctctagaataagcta

SEQ ID NO: 422606 - DNA, 33 bp, Homo sapien
tgtaaataccaaccaggcctctagaataagcta

SEQ ID NO: 422607 - DNA, 33 bp, Homo sapien
tcttgaaagttttctgaagacaaaatggcaatg

SEQ ID NO: 422608 - DNA, 33 bp, Homo sapien
tcttgaaagttttctgcagacaaaatggcaatg

SEQ ID NO: 422609 - DNA, 33 bp, Homo sapien
gctcagagcagacaaacggagcttcccccagag

SEQ ID NO: 422610 - DNA, 33 bp, Homo sapien
gctcagagcagacaaatggagcttcccccagag

SEQ ID NO: 422611 - DNA, 33 bp, Homo sapien
taccaatggagaaaaactgtgttggcatgacac

SEQ ID NO: 422612 - DNA, 33 bp, Homo sapien
taccaatggagaaaaattgtgttggcatgacac

SEQ ID NO: 422613 - DNA, 33 bp, Homo sapien
attatattgtatgaagccacataactgtaaata

SEQ ID NO: 422614 - DNA, 33 bp, Homo sapien
attatattgtatgaagtcacataactgtaaata

SEQ ID NO: 422615 - DNA, 33 bp, Homo sapien
attaaatgtagcatacagaccactatgaagaat

SEQ ID NO: 422616 - DNA, 33 bp, Homo sapien
attaaatgtagcatacggaccactatgaagaat

SEQ ID NO: 422617 - DNA, 33 bp, Homo sapien
gtgatggctacaaataaactttgaaacttattt

SEQ ID NO: 422618 - DNA, 33 bp, Homo sapien
gtgatggctacaaatacactttgaaacttattt

SEQ ID NO: 422619 - DNA, 33 bp, Homo sapien
tcaaagaagtaatccaaatcttagttatccaat

SEQ ID NO: 422620 - DNA, 33 bp, Homo sapien
tcaaagaagtaatccatatcttagttatccaat

SEQ ID NO: 422621 - DNA, 33 bp, Homo sapien
aatgatgggcagagaaaaactgggaatttgaga

SEQ ID NO: 422622 - DNA, 33 bp, Homo sapien
aatgatgggcagagaagaactgggaatttgaga

SEQ ID NO: 422623 - DNA, 33 bp, Homo sapien
aactgtctatgccatacgaactctgagactcta

SEQ ID NO: 422624 - DNA, 33 bp, Homo sapien
aactgtctatgccatatgaactctgagactcta

SEQ ID NO: 422625 - DNA, 33 bp, Homo sapien
tctgtactctcacgacacattgtatgtatccag

SEQ ID NO: 422626 - DNA, 33 bp, Homo sapien
tctgtactctcacgacgcattgtatgtatccag

SEQ ID NO: 422627 - DNA, 33 bp, Homo sapien
agacattcttgttgccaaatgtgataatgtgtt

SEQ ID NO: 422628 - DNA, 33 bp, Homo sapien
agacattcttgttgccgaatgtgataatgtgtt

SEQ ID NO: 422629 - DNA, 33 bp, Homo sapien
atgcccggatacagataagcgtctacaagtatc

SEQ ID NO: 422630 - DNA, 33 bp, Homo sapien
atgcccggatacagatgagcgtctacaagtatc

SEQ ID NO: 422631 - DNA, 33 bp, Homo sapien
tgctggctattcagaaaccttggactctcagtc

SEQ ID NO: 422632 - DNA, 33 bp, Homo sapien
tgctggctattcagaacccttggactctcagtc

SEQ ID NO: 422633 - DNA, 33 bp, Homo sapien
agaggctagtcactgaaggcacatttctgatca

SEQ ID NO: 422634 - DNA, 33 bp, Homo sapien
agaggctagtcactgacggcacatttctgatca

SEQ ID NO: 422635 - DNA, 33 bp, Homo sapien
aagcaggtttgggaaacgctagcctagagtatc

SEQ ID NO: 422636 - DNA, 33 bp, Homo sapien
aagcaggtttgggaaatgctagcctagagtatc

SEQ ID NO: 422637 - DNA, 33 bp, Homo sapien
aatgttgttcatgcaacagcccattcaagcagg

SEQ ID NO: 422638 - DNA, 33 bp, Homo sapien
aatgttgttcatgcaatagcccattcaagcagg

SEQ ID NO: 422639 - DNA, 33 bp, Homo sapien
gtggtctgggattcctcacaacatgatgacttg

SEQ ID NO: 422640 - DNA, 33 bp, Homo sapien
gtggtctgggattcctgacaacatgatgacttg

SEQ ID NO: 422641 - DNA, 33 bp, Homo sapien
atttcctctgttcaaactgctatcatagttgca

SEQ ID NO: 422642 - DNA, 33 bp, Homo sapien
atttcctctgttcaaattgctatcatagttgca

SEQ ID NO: 422643 - DNA, 33 bp, Homo sapien
aattttacctagtcacccgtctctacttttgtt

SEQ ID NO: 422644 - DNA, 33 bp, Homo sapien
aattttacctagtcactcgtctctacttttgtt

SEQ ID NO: 422645 - DNA, 33 bp, Homo sapien
tgcatcagcacagggaatactgatactgcctct

SEQ ID NO: 422646 - DNA, 33 bp, Homo sapien
tgcatcagcacagggactactgatactgcctct

SEQ ID NO: 422647 - DNA, 33 bp, Homo sapien
aaatattatgctgtcacctgcaaagtcctgctg

SEQ ID NO: 422648 - DNA, 33 bp, Homo sapien
aaatattatgctgtcatctgcaaagtcctgctg

SEQ ID NO: 422649 - DNA, 33 bp, Homo sapien
ttaactgccagagagacggttcttttctaaagt

SEQ ID NO: 422650 - DNA, 33 bp, Homo sapien
ttaactgccagagagatggttcttttctaaagt

SEQ ID NO: 422651 - DNA, 33 bp, Homo sapien
atagtgaccatcaataccttggagggtagagga

SEQ ID NO: 422652 - DNA, 33 bp, Homo sapien
atagtgaccatcaatatcttggagggtagagga

SEQ ID NO: 422653 - DNA, 33 bp, Homo sapien
taggaaacttgcaaaaaagagttagttcactta

SEQ ID NO: 422654 - DNA, 33 bp, Homo sapien
taggaaacttgcaaaagagagttagttcactta

SEQ ID NO: 422655 - DNA, 33 bp, Homo sapien
ttagtttaatgtggacaccgtttcattttctcc

SEQ ID NO: 422656 - DNA, 33 bp, Homo sapien
ttagtttaatgtggaccccgtttcattttctcc

SEQ ID NO: 422657 - DNA, 33 bp, Homo sapien
tgttctatttttcaacgggcacatatcagtatt

SEQ ID NO: 422658 - DNA, 33 bp, Homo sapien
tgttctatttttcaactggcacatatcagtatt

SEQ ID NO: 422659 - DNA, 33 bp, Homo sapien
tcagtgttggaacctgccaagtttgagaagttt

SEQ ID NO: 422660 - DNA, 33 bp, Homo sapien
tcagtgttggaacctgtcaagtttgagaagttt

SEQ ID NO: 422661 - DNA, 33 bp, Homo sapien
ccactagccagcataagagctcctgaagtgtag

SEQ ID NO: 422662 - DNA, 33 bp, Homo sapien
ccactagccagcataatagctcctgaagtgtag

SEQ ID NO: 422663 - DNA, 33 bp, Homo sapien
catttttggaatttaacgatggacatacaatta

SEQ ID NO: 422664 - DNA, 33 bp, Homo sapien
catttttggaatttaatgatggacatacaatta

SEQ ID NO: 422665 - DNA, 33 bp, Homo sapien
caaaatctcaatagcaccaaggttaagaaaccc

SEQ ID NO: 422666 - DNA, 33 bp, Homo sapien
caaaatctcaatagcatcaaggttaagaaaccc

SEQ ID NO: 422667 - DNA, 33 bp, Homo sapien
tttcttattctgtcataaaacttctgtcctaat

SEQ ID NO: 422668 - DNA, 33 bp, Homo sapien
tttcttattctgtcatgaaacttctgtcctaat

SEQ ID NO: 422669 - DNA, 33 bp, Homo sapien
ccagtagttttaaaagcccaatttcagacacag

SEQ ID NO: 422670 - DNA, 33 bp, Homo sapien
ccagtagttttaaaagtccaatttcagacacag

SEQ ID NO: 422671 - DNA, 33 bp, Homo sapien
tctgctgagagctgagaacttgactggatgacc

SEQ ID NO: 422672 - DNA, 33 bp, Homo sapien
tctgctgagagctgagcacttgactggatgacc

SEQ ID NO: 422673 - DNA, 33 bp, Homo sapien
cctggaccttatggaccgctagaggagaaagat

SEQ ID NO: 422674 - DNA, 33 bp, Homo sapien
cctggaccttatggactgctagaggagaaagat

SEQ ID NO: 422675 - DNA, 33 bp, Homo sapien
ttcatctctttctcaccatcttgagcttcctgt

SEQ ID NO: 422676 - DNA, 33 bp, Homo sapien
ttcatctctttctcactatcttgagcttcctgt

SEQ ID NO: 422677 - DNA, 33 bp, Homo sapien
agtgaatacataatcaaaaacgatggccagggt

SEQ ID NO: 422678 - DNA, 33 bp, Homo sapien
agtgaatacataatcagaaacgatggccagggt

SEQ ID NO: 422679 - DNA, 33 bp, Homo sapien
tatcactatgtcaagacagcatgatcacaatgg

SEQ ID NO: 422680 - DNA, 33 bp, Homo sapien
tatcactatgtcaagatagcatgatcacaatgg

SEQ ID NO: 422681 - DNA, 33 bp, Homo sapien
ggcagtctggtccctgaaataagacctgctgtt

SEQ ID NO: 422682 - DNA, 33 bp, Homo sapien
ggcagtctggtccctggaataagacctgctgtt

SEQ ID NO: 422683 - DNA, 33 bp, Homo sapien
taaaagttttatcttaccatttgttgcaatgca

SEQ ID NO: 422684 - DNA, 33 bp, Homo sapien
taaaagttttatcttatcatttgttgcaatgca

SEQ ID NO: 422685 - DNA, 33 bp, Homo sapien
gcagggtggcaaaaaaatagaataactgcaaat

SEQ ID NO: 422686 - DNA, 33 bp, Homo sapien
gcagggtggcaaaaaagtagaataactgcaaat

SEQ ID NO: 422687 - DNA, 33 bp, Homo sapien
caaccacagcataacaatgtctcatatgtaaat

SEQ ID NO: 422688 - DNA, 33 bp, Homo sapien
caaccacagcataacagtgtctcatatgtaaat

SEQ ID NO: 422689 - DNA, 33 bp, Homo sapien
caagcagaggcaccgacggcctttgttctggtc

SEQ ID NO: 422690 - DNA, 33 bp, Homo sapien
caagcagaggcaccgatggcctttgttctggtc

SEQ ID NO: 422691 - DNA, 33 bp, Homo sapien
ctgtgtccagccatcacaggtcttttataaatg

SEQ ID NO: 422692 - DNA, 33 bp, Homo sapien
ctgtgtccagccatcagaggtcttttataaatg

SEQ ID NO: 422693 - DNA, 33 bp, Homo sapien
ttctgggtatctcataaaagtggaatcatacca

SEQ ID NO: 422694 - DNA, 33 bp, Homo sapien
ttctgggtatctcatacaagtggaatcatacca

SEQ ID NO: 422695 - DNA, 33 bp, Homo sapien
gagaatctcgaatggagtcaaatgacttgttgg

SEQ ID NO: 422696 - DNA, 33 bp, Homo sapien
gagaatctcgaatggattcaaatgacttgttgg

SEQ ID NO: 422697 - DNA, 33 bp, Homo sapien
agtcttaccttttggacagagttgacaagtatc

SEQ ID NO: 422698 - DNA, 33 bp, Homo sapien
agtcttaccttttggatagagttgacaagtatc

SEQ ID NO: 422699 - DNA, 33 bp, Homo sapien
ttccctactaacatacacttctcaaaacacttg

SEQ ID NO: 422700 - DNA, 33 bp, Homo sapien
ttccctactaacatacgcttctcaaaacacttg

SEQ ID NO: 422701 - DNA, 33 bp, Homo sapien
gaaatgtcctgttccccaaaccactgagttttg

SEQ ID NO: 422702 - DNA, 33 bp, Homo sapien
gaaatgtcctgttccctaaaccactgagttttg

SEQ ID NO: 422703 - DNA, 33 bp, Homo sapien
cactgtgaaggaggaacgccattagttcaagga

SEQ ID NO: 422704 - DNA, 33 bp, Homo sapien
cactgtgaaggaggaatgccattagttcaagga

SEQ ID NO: 422705 - DNA, 33 bp, Homo sapien
gttacaaccaagtcccaatactgcactggaaac

SEQ ID NO: 422706 - DNA, 33 bp, Homo sapien
gttacaaccaagtcccgatactgcactggaaac

SEQ ID NO: 422707 - DNA, 33 bp, Homo sapien
tggtccgtcagtgtgacaatttgctcaaaacca

SEQ ID NO: 422708 - DNA, 33 bp, Homo sapien
tggtccgtcagtgtgagaatttgctcaaaacca

SEQ ID NO: 422709 - DNA, 33 bp, Homo sapien
ctcctgtcagactctacagtgctgcaaacgtgc

SEQ ID NO: 422710 - DNA, 33 bp, Homo sapien
ctcctgtcagactctatagtgctgcaaacgtgc

SEQ ID NO: 422711 - DNA, 33 bp, Homo sapien
ttttatctctgttttcacaaattgcctgttata

SEQ ID NO: 422712 - DNA, 33 bp, Homo sapien
ttttatctctgttttcccaaattgcctgttata

SEQ ID NO: 422713 - DNA, 33 bp, Homo sapien
atgatgtggctactccacctgaaactatccttc

SEQ ID NO: 422714 - DNA, 33 bp, Homo sapien
atgatgtggctactccgcctgaaactatccttc

SEQ ID NO: 422715 - DNA, 33 bp, Homo sapien
ccttaattaacttcaaagccccaccaaatgtca

SEQ ID NO: 422716 - DNA, 33 bp, Homo sapien
ccttaattaacttcaaggccccaccaaatgtca

SEQ ID NO: 422717 - DNA, 33 bp, Homo sapien
ccatttcatatctagcactaagtttccaagaat

SEQ ID NO: 422718 - DNA, 33 bp, Homo sapien
ccatttcatatctagcgctaagtttccaagaat

SEQ ID NO: 422719 - DNA, 33 bp, Homo sapien
catgcctttcctataacaatgttttctgaagtt

SEQ ID NO: 422720 - DNA, 33 bp, Homo sapien
catgcctttcctataataatgttttctgaagtt

SEQ ID NO: 422721 - DNA, 33 bp, Homo sapien
ctatgatgcaatcttacaaacctgaaaaacatg

SEQ ID NO: 422722 - DNA, 33 bp, Homo sapien
ctatgatgcaatcttataaacctgaaaaacatg

SEQ ID NO: 422723 - DNA, 33 bp, Homo sapien
gcttcatcacaggcccaacaaatctaagtctct

SEQ ID NO: 422724 - DNA, 33 bp, Homo sapien
gcttcatcacaggccccacaaatctaagtctct

SEQ ID NO: 422725 - DNA, 33 bp, Homo sapien
taggatatacacttacagtaagaacacagatct

SEQ ID NO: 422726 - DNA, 33 bp, Homo sapien
taggatatacacttacggtaagaacacagatct

SEQ ID NO: 422727 - DNA, 33 bp, Homo sapien
ttaaactctggaaagcactgaccaattgaaagc

SEQ ID NO: 422728 - DNA, 33 bp, Homo sapien
ttaaactctggaaagcgctgaccaattgaaagc

SEQ ID NO: 422729 - DNA, 33 bp, Homo sapien
ataacacttagctctacaaaagctgagccatga

SEQ ID NO: 422730 - DNA, 33 bp, Homo sapien
ataacacttagctctataaaagctgagccatga

SEQ ID NO: 422731 - DNA, 33 bp, Homo sapien
aggtgtttctttaaggaaggcagcacacaggat

SEQ ID NO: 422732 - DNA, 33 bp, Homo sapien
aggtgtttctttaagggaggcagcacacaggat

SEQ ID NO: 422733 - DNA, 33 bp, Homo sapien
ggttcttgtgaagactaaatgaggtgatattat

SEQ ID NO: 422734 - DNA, 33 bp, Homo sapien
ggttcttgtgaagactgaatgaggtgatattat

SEQ ID NO: 422735 - DNA, 33 bp, Homo sapien
ataaactcagagcactaaaagattgcaaatgcc

SEQ ID NO: 422736 - DNA, 33 bp, Homo sapien
ataaactcagagcactgaaagattgcaaatgcc

SEQ ID NO: 422737 - DNA, 33 bp, Homo sapien
tactgtgaaaacaacaaaatatctgtcatcatg

SEQ ID NO: 422738 - DNA, 33 bp, Homo sapien
tactgtgaaaacaacagaatatctgtcatcatg

SEQ ID NO: 422739 - DNA, 33 bp, Homo sapien
aggacttaggatgtgaaatgggatctgactggt

SEQ ID NO: 422740 - DNA, 33 bp, Homo sapien
aggacttaggatgtgagatgggatctgactggt

SEQ ID NO: 422741 - DNA, 33 bp, Homo sapien
tgaatggatttcttgacagtatgtagggtatta

SEQ ID NO: 422742 - DNA, 33 bp, Homo sapien
tgaatggatttcttgatagtatgtagggtatta

SEQ ID NO: 422743 - DNA, 33 bp, Homo sapien
ctctaaatataagggacgaagccgtgaacgtgg

SEQ ID NO: 422744 - DNA, 33 bp, Homo sapien
ctctaaatataagggatgaagccgtgaacgtgg

SEQ ID NO: 422745 - DNA, 33 bp, Homo sapien
ctggtgacactactacacatttgctattctaga

SEQ ID NO: 422746 - DNA, 33 bp, Homo sapien
ctggtgacactactacgcatttgctattctaga

SEQ ID NO: 422747 - DNA, 33 bp, Homo sapien
taagctactcttggacacaggctctgctcactt

SEQ ID NO: 422748 - DNA, 33 bp, Homo sapien
taagctactcttggacgcaggctctgctcactt

SEQ ID NO: 422749 - DNA, 33 bp, Homo sapien
tataatataatcacaccggcaatctagaaatac

SEQ ID NO: 422750 - DNA, 33 bp, Homo sapien
tataatataatcacactggcaatctagaaatac

SEQ ID NO: 422751 - DNA, 33 bp, Homo sapien
tgtgtttcaagaatgacggcaaacctgttaaaa

SEQ ID NO: 422752 - DNA, 33 bp, Homo sapien
tgtgtttcaagaatgatggcaaacctgttaaaa

SEQ ID NO: 422753 - DNA, 33 bp, Homo sapien
tggtaatctcatgaaaacaactcaaagcctgta

SEQ ID NO: 422754 - DNA, 33 bp, Homo sapien
tggtaatctcatgaaaccaactcaaagcctgta

SEQ ID NO: 422755 - DNA, 33 bp, Homo sapien
atgatgtccgagaaaacgtccagctgaaatact

SEQ ID NO: 422756 - DNA, 33 bp, Homo sapien
atgatgtccgagaaaatgtccagctgaaatact

SEQ ID NO: 422757 - DNA, 33 bp, Homo sapien
gcatcaaacaggcaaacggaagaaccatgaagg

SEQ ID NO: 422758 - DNA, 33 bp, Homo sapien
gcatcaaacaggcaaatggaagaaccatgaagg

SEQ ID NO: 422759 - DNA, 33 bp, Homo sapien
aaccttgtcctgtgaacggaaatgaaagttcta

SEQ ID NO: 422760 - DNA, 33 bp, Homo sapien
aaccttgtcctgtgaatggaaatgaaagttcta

SEQ ID NO: 422761 - DNA, 33 bp, Homo sapien
cagagctttggggaagacctgaaactcacctga

SEQ ID NO: 422762 - DNA, 33 bp, Homo sapien
cagagctttggggaagccctgaaactcacctga

SEQ ID NO: 422763 - DNA, 33 bp, Homo sapien
tcaccattattggaaacgtaggtagtgcccaaa

SEQ ID NO: 422764 - DNA, 33 bp, Homo sapien
tcaccattattggaaatgtaggtagtgcccaaa

SEQ ID NO: 422765 - DNA, 33 bp, Homo sapien
tttttcaaaaccttccaacgggactccattgca

SEQ ID NO: 422766 - DNA, 33 bp, Homo sapien
tttttcaaaaccttccgacgggactccattgca

SEQ ID NO: 422767 - DNA, 33 bp, Homo sapien
gccgaggtcatgggtgaatatgaaactgtagag

SEQ ID NO: 422768 - DNA, 33 bp, Homo sapien
gccgaggtcatgggtggatatgaaactgtagag

SEQ ID NO: 422769 - DNA, 33 bp, Homo sapien
ctggtttgcctctacaccactggcaatgccttc

SEQ ID NO: 422770 - DNA, 33 bp, Homo sapien
ctggtttgcctctacagcactggcaatgccttc

SEQ ID NO: 422771 - DNA, 33 bp, Homo sapien
caggaaggatagttcccaagtaaataaagtgtt

SEQ ID NO: 422772 - DNA, 33 bp, Homo sapien
caggaaggatagttccgaagtaaataaagtgtt

SEQ ID NO: 422773 - DNA, 33 bp, Homo sapien
actgggagtgacaaagaagcattaaatttataa

SEQ ID NO: 422774 - DNA, 33 bp, Homo sapien
actgggagtgacaaaggagcattaaatttataa

SEQ ID NO: 422775 - DNA, 33 bp, Homo sapien
cattcttgcacacgaaaggtaacagcatgacct

SEQ ID NO: 422776 - DNA, 33 bp, Homo sapien
cattcttgcacacgaagggtaacagcatgacct

SEQ ID NO: 422777 - DNA, 33 bp, Homo sapien
ctaagagttactctacacgaagctatttccata

SEQ ID NO: 422778 - DNA, 33 bp, Homo sapien
ctaagagttactctacgcgaagctatttccata

SEQ ID NO: 422779 - DNA, 33 bp, Homo sapien
gggccacggttactcacattgactcagaataag

SEQ ID NO: 422780 - DNA, 33 bp, Homo sapien
gggccacggttactcatattgactcagaataag

SEQ ID NO: 422781 - DNA, 33 bp, Homo sapien
tacatttagctcaaagaaaacttaggtattaag

SEQ ID NO: 422782 - DNA, 33 bp, Homo sapien
tacatttagctcaaaggaaacttaggtattaag

SEQ ID NO: 422783 - DNA, 33 bp, Homo sapien
ggaaaccaagattttacaaagtttccatctctt

SEQ ID NO: 422784 - DNA, 33 bp, Homo sapien
ggaaaccaagattttagaaagtttccatctctt

SEQ ID NO: 422785 - DNA, 33 bp, Homo sapien
gtttccatctctttcacaaggaaagccggaact

SEQ ID NO: 422786 - DNA, 33 bp, Homo sapien
gtttccatctctttcataaggaaagccggaact

SEQ ID NO: 422787 - DNA, 33 bp, Homo sapien
ctacctccattaaccactctctgtccccgctca

SEQ ID NO: 422788 - DNA, 33 bp, Homo sapien
ctacctccattaaccattctctgtccccgctca

SEQ ID NO: 422789 - DNA, 33 bp, Homo sapien
ctatctgttacagaaacgttcctcaatctgatg

SEQ ID NO: 422790 - DNA, 33 bp, Homo sapien
ctatctgttacagaaatgttcctcaatctgatg

SEQ ID NO: 422791 - DNA, 33 bp, Homo sapien
ataaatagcatgtaaaagccaaatcgtttgctt

SEQ ID NO: 422792 - DNA, 33 bp, Homo sapien
ataaatagcatgtaaaggccaaatcgtttgctt

SEQ ID NO: 422793 - DNA, 33 bp, Homo sapien
tatttatggcaacaaaattcaaggaatcatatg

SEQ ID NO: 422794 - DNA, 33 bp, Homo sapien
tatttatggcaacaaagttcaaggaatcatatg

SEQ ID NO: 422795 - DNA, 33 bp, Homo sapien
atttgtatttgagaaagtctttgtttttccttc

SEQ ID NO: 422796 - DNA, 33 bp, Homo sapien
atttgtatttgagaaattctttgtttttccttc

SEQ ID NO: 422797 - DNA, 33 bp, Homo sapien
cccttctaatcctccacgtgcataaactaattt

SEQ ID NO: 422798 - DNA, 33 bp, Homo sapien
cccttctaatcctccatgtgcataaactaattt

SEQ ID NO: 422799 - DNA, 33 bp, Homo sapien
ctttgaaatttagcaagtcacatgttcccattt

SEQ ID NO: 422800 - DNA, 33 bp, Homo sapien
ctttgaaatttagcaattcacatgttcccattt

SEQ ID NO: 422801 - DNA, 33 bp, Homo sapien
taatcataactgacaagctattaagggtacttg

SEQ ID NO: 422802 - DNA, 33 bp, Homo sapien
taatcataactgacaatctattaagggtacttg

SEQ ID NO: 422803 - DNA, 33 bp, Homo sapien
gcttaggtcttgtctccaggattgtcaccccaa

SEQ ID NO: 422804 - DNA, 33 bp, Homo sapien
gcttaggtcttgtctctaggattgtcaccccaa

SEQ ID NO: 422805 - DNA, 33 bp, Homo sapien
cttctttaaaagatcaatgaatgttcacattta

SEQ ID NO: 422806 - DNA, 33 bp, Homo sapien
cttctttaaaagatcagtgaatgttcacattta

SEQ ID NO: 422807 - DNA, 33 bp, Homo sapien
cgctgtggcagtagtccagcgccgtgacacagg

SEQ ID NO: 422808 - DNA, 33 bp, Homo sapien
cgctgtggcagtagtctagcgccgtgacacagg

SEQ ID NO: 422809 - DNA, 33 bp, Homo sapien
ctcctgatggctatgacatcctttccaggagtc

SEQ ID NO: 422810 - DNA, 33 bp, Homo sapien
ctcctgatggctatgagatcctttccaggagtc

SEQ ID NO: 422811 - DNA, 33 bp, Homo sapien
ttagtgagcgggtttcgatgtgcaaagtgctta

SEQ ID NO: 422812 - DNA, 33 bp, Homo sapien
ttagtgagcgggtttctatgtgcaaagtgctta

SEQ ID NO: 422813 - DNA, 33 bp, Homo sapien
taccaccatgaatttgcagtctgtggccagatc

SEQ ID NO: 422814 - DNA, 33 bp, Homo sapien
taccaccatgaatttgtagtctgtggccagatc

SEQ ID NO: 422815 - DNA, 33 bp, Homo sapien
tcctgattagtctgccactcgtccactcaccct

SEQ ID NO: 422816 - DNA, 33 bp, Homo sapien
tcctgattagtctgccgctcgtccactcaccct

SEQ ID NO: 422817 - DNA, 33 bp, Homo sapien
atgtgagttgtagagcaagcatcaaatcatggt

SEQ ID NO: 422818 - DNA, 33 bp, Homo sapien
atgtgagttgtagagccagcatcaaatcatggt

SEQ ID NO: 422819 - DNA, 33 bp, Homo sapien
tggtaattaaaaactacagctcaggtcttctca

SEQ ID NO: 422820 - DNA, 33 bp, Homo sapien
tggtaattaaaaactatagctcaggtcttctca

SEQ ID NO: 422821 - DNA, 33 bp, Homo sapien
gtgatggtgatacttaactatttcttgtattct

SEQ ID NO: 422822 - DNA, 33 bp, Homo sapien
gtgatggtgatacttacctatttcttgtattct

SEQ ID NO: 422823 - DNA, 33 bp, Homo sapien
agggtgccacaagcaccggcaatgccatttgaa

SEQ ID NO: 422824 - DNA, 33 bp, Homo sapien
agggtgccacaagcactggcaatgccatttgaa

SEQ ID NO: 422825 - DNA, 33 bp, Homo sapien
tacaaagtgcaaacaaactgagaatttgcaaca

SEQ ID NO: 422826 - DNA, 33 bp, Homo sapien
tacaaagtgcaaacaagctgagaatttgcaaca

SEQ ID NO: 422827 - DNA, 33 bp, Homo sapien
gttctagccatcggcacgtacactcttgccttc

SEQ ID NO: 422828 - DNA, 33 bp, Homo sapien
gttctagccatcggcaggtacactcttgccttc

SEQ ID NO: 422829 - DNA, 33 bp, Homo sapien
gggatgactcaaaaaccgttttgtggcagaggt

SEQ ID NO: 422830 - DNA, 33 bp, Homo sapien
gggatgactcaaaaactgttttgtggcagaggt

SEQ ID NO: 422831 - DNA, 33 bp, Homo sapien
ggatgtagcctattgccgaaaacaatgataaaa

SEQ ID NO: 422832 - DNA, 33 bp, Homo sapien
ggatgtagcctattgctgaaaacaatgataaaa

SEQ ID NO: 422833 - DNA, 33 bp, Homo sapien
taggtgcctcaatgcccacttcatcatttcttt

SEQ ID NO: 422834 - DNA, 33 bp, Homo sapien
taggtgcctcaatgcctacttcatcatttcttt

SEQ ID NO: 422835 - DNA, 33 bp, Homo sapien
caaagtaaagttcataacctgaggtccatagaa

SEQ ID NO: 422836 - DNA, 33 bp, Homo sapien
caaagtaaagttcatatcctgaggtccatagaa

SEQ ID NO: 422837 - DNA, 33 bp, Homo sapien
gaggccattatcctaactgaccaatcgcaggaa

SEQ ID NO: 422838 - DNA, 33 bp, Homo sapien
gaggccattatcctaagtgaccaatcgcaggaa

SEQ ID NO: 422839 - DNA, 33 bp, Homo sapien
gtaccactgcaacctgaaatagtttacgtaact

SEQ ID NO: 422840 - DNA, 33 bp, Homo sapien
gtaccactgcaacctgtaatagtttacgtaact

SEQ ID NO: 422841 - DNA, 33 bp, Homo sapien
cagaaatggagtggagcaaacagggtgtgctgt

SEQ ID NO: 422842 - DNA, 33 bp, Homo sapien
cagaaatggagtggaggaaacagggtgtgctgt

SEQ ID NO: 422843 - DNA, 33 bp, Homo sapien
agttccttctacatccaagcaaaacaggattcc

SEQ ID NO: 422844 - DNA, 33 bp, Homo sapien
agttccttctacatccgagcaaaacaggattcc

SEQ ID NO: 422845 - DNA, 33 bp, Homo sapien
ttatctggagaagcttcaaaacacagcaccttt

SEQ ID NO: 422846 - DNA, 33 bp, Homo sapien
ttatctggagaagcttgaaaacacagcaccttt

SEQ ID NO: 422847 - DNA, 33 bp, Homo sapien
gtatgcatgtgtgtaaaccatattattatgaca

SEQ ID NO: 422848 - DNA, 33 bp, Homo sapien
gtatgcatgtgtgtaatccatattattatgaca

SEQ ID NO: 422849 - DNA, 33 bp, Homo sapien
aacagcagcaaacgaaaaaggctgagttcccct

SEQ ID NO: 422850 - DNA, 33 bp, Homo sapien
aacagcagcaaacgaagaaggctgagttcccct

SEQ ID NO: 422851 - DNA, 33 bp, Homo sapien
ctgatgacaatggctccagtggatgaatcagag

SEQ ID NO: 422852 - DNA, 33 bp, Homo sapien
ctgatgacaatggctctagtggatgaatcagag

SEQ ID NO: 422853 - DNA, 33 bp, Homo sapien
tcactcttgagtactacggagataatagctaaa

SEQ ID NO: 422854 - DNA, 33 bp, Homo sapien
tcactcttgagtactatggagataatagctaaa

SEQ ID NO: 422855 - DNA, 33 bp, Homo sapien
ctttatttctggtctgcagtagctgtctttatt

SEQ ID NO: 422856 - DNA, 33 bp, Homo sapien
ctttatttctggtctgtagtagctgtctttatt

SEQ ID NO: 422857 - DNA, 33 bp, Homo sapien
ggcctgcaccagaagcagaatcctgccagaccc

SEQ ID NO: 422858 - DNA, 33 bp, Homo sapien
ggcctgcaccagaagcggaatcctgccagaccc

SEQ ID NO: 422859 - DNA, 33 bp, Homo sapien
tttacattttggtgacaggatccatttgaataa

SEQ ID NO: 422860 - DNA, 33 bp, Homo sapien
tttacattttggtgacgggatccatttgaataa

SEQ ID NO: 422861 - DNA, 33 bp, Homo sapien
aatgttgccatgtgatcaggtaccagtgagaca

SEQ ID NO: 422862 - DNA, 33 bp, Homo sapien
aatgttgccatgtgattaggtaccagtgagaca

SEQ ID NO: 422863 - DNA, 33 bp, Homo sapien
tgattgtggcagttgacaaattggggggatagc

SEQ ID NO: 422864 - DNA, 33 bp, Homo sapien
tgattgtggcagttgataaattggggggatagc

SEQ ID NO: 422865 - DNA, 33 bp, Homo sapien
tttggaggactctcacaatcgtttaatgaagat

SEQ ID NO: 422866 - DNA, 33 bp, Homo sapien
tttggaggactctcacgatcgtttaatgaagat

SEQ ID NO: 422867 - DNA, 33 bp, Homo sapien
ctttgccataattggccgaccctggaaaatcct

SEQ ID NO: 422868 - DNA, 33 bp, Homo sapien
ctttgccataattggctgaccctggaaaatcct

SEQ ID NO: 422869 - DNA, 33 bp, Homo sapien
gtaccactctaagaaacgtcctctctgatgtac

SEQ ID NO: 422870 - DNA, 33 bp, Homo sapien
gtaccactctaagaaatgtcctctctgatgtac

SEQ ID NO: 422871 - DNA, 33 bp, Homo sapien
aagaataaggcagttacaagttttgatttctca

SEQ ID NO: 422872 - DNA, 33 bp, Homo sapien
aagaataaggcagttagaagttttgatttctca

SEQ ID NO: 422873 - DNA, 33 bp, Homo sapien
ttgcaactcccatccaccgagcagtttctactt

SEQ ID NO: 422874 - DNA, 33 bp, Homo sapien
ttgcaactcccatccatcgagcagtttctactt

SEQ ID NO: 422875 - DNA, 33 bp, Homo sapien
aaaggccagtttaccaccacattacttgattat

SEQ ID NO: 422876 - DNA, 33 bp, Homo sapien
aaaggccagtttaccatcacattacttgattat

SEQ ID NO: 422877 - DNA, 33 bp, Homo sapien
tatatctaatacaaacaaactacaatgttaata

SEQ ID NO: 422878 - DNA, 33 bp, Homo sapien
tatatctaatacaaacgaactacaatgttaata

SEQ ID NO: 422879 - DNA, 33 bp, Homo sapien
gtgagctcatggtatccctagtttacaaaacta

SEQ ID NO: 422880 - DNA, 33 bp, Homo sapien
gtgagctcatggtatctctagtttacaaaacta

SEQ ID NO: 422881 - DNA, 33 bp, Homo sapien
ataaagctttattaaaaaaatcgctagtagaaa

SEQ ID NO: 422882 - DNA, 33 bp, Homo sapien
ataaagctttattaaacaaatcgctagtagaaa

SEQ ID NO: 422883 - DNA, 33 bp, Homo sapien
ttcagtgacaaattagcaggcacttaagaaata

SEQ ID NO: 422884 - DNA, 33 bp, Homo sapien
ttcagtgacaaattaggaggcacttaagaaata

SEQ ID NO: 422885 - DNA, 33 bp, Homo sapien
tacttgatcctgctgaaatacctctgcagctga

SEQ ID NO: 422886 - DNA, 33 bp, Homo sapien
tacttgatcctgctgatatacctctgcagctga

SEQ ID NO: 422887 - DNA, 33 bp, Homo sapien
ggtagaataagtggacaaaggcaggaatcagca

SEQ ID NO: 422888 - DNA, 33 bp, Homo sapien
ggtagaataagtggacgaaggcaggaatcagca

SEQ ID NO: 422889 - DNA, 33 bp, Homo sapien
atcatacaccagttcagattaagtcaatgtgaa

SEQ ID NO: 422890 - DNA, 33 bp, Homo sapien
atcatacaccagttcatattaagtcaatgtgaa

SEQ ID NO: 422891 - DNA, 33 bp, Homo sapien
tctaatctctgtatctgaattcctgcatctgat

SEQ ID NO: 422892 - DNA, 33 bp, Homo sapien
tctaatctctgtatcttaattcctgcatctgat

SEQ ID NO: 422893 - DNA, 33 bp, Homo sapien
agtggctgttataacaaagtgttttgcttcata

SEQ ID NO: 422894 - DNA, 33 bp, Homo sapien
agtggctgttataacacagtgttttgcttcata

SEQ ID NO: 422895 - DNA, 33 bp, Homo sapien
gctctactgcactctacggcccagtcaccaggg

SEQ ID NO: 422896 - DNA, 33 bp, Homo sapien
gctctactgcactctatggcccagtcaccaggg

SEQ ID NO: 422897 - DNA, 33 bp, Homo sapien
cagtaagacagagaccaaaggcatgcgttgggg

SEQ ID NO: 422898 - DNA, 33 bp, Homo sapien
cagtaagacagagaccgaaggcatgcgttgggg

SEQ ID NO: 422899 - DNA, 33 bp, Homo sapien
gttcattgctccactcgccagcagcttaaagtt

SEQ ID NO: 422900 - DNA, 33 bp, Homo sapien
gttcattgctccactctccagcagcttaaagtt

SEQ ID NO: 422901 - DNA, 33 bp, Homo sapien
gtgttaatatcaggaaactcagagtgaactttt

SEQ ID NO: 422902 - DNA, 33 bp, Homo sapien
gtgttaatatcaggaacctcagagtgaactttt

SEQ ID NO: 422903 - DNA, 33 bp, Homo sapien
tgaaggcagccaatacaaattcttgcctttcca

SEQ ID NO: 422904 - DNA, 33 bp, Homo sapien
tgaaggcagccaatacgaattcttgcctttcca

SEQ ID NO: 422905 - DNA, 33 bp, Homo sapien
tcattttcgcacaagaactctgggacttggaat

SEQ ID NO: 422906 - DNA, 33 bp, Homo sapien
tcattttcgcacaagacctctgggacttggaat

SEQ ID NO: 422907 - DNA, 33 bp, Homo sapien
aaacactcttcaaagacggtggttccaatgact

SEQ ID NO: 422908 - DNA, 33 bp, Homo sapien
aaacactcttcaaagatggtggttccaatgact

SEQ ID NO: 422909 - DNA, 33 bp, Homo sapien
ataaaattctccctcaccaaacagtggcattaa

SEQ ID NO: 422910 - DNA, 33 bp, Homo sapien
ataaaattctccctcatcaaacagtggcattaa

SEQ ID NO: 422911 - DNA, 33 bp, Homo sapien
agtaaactcttaatggaaaggatcaggtaactg

SEQ ID NO: 422912 - DNA, 33 bp, Homo sapien
agtaaactcttaatgggaaggatcaggtaactg

SEQ ID NO: 422913 - DNA, 33 bp, Homo sapien
actgaacataaacagcccactcaagcagccatg

SEQ ID NO: 422914 - DNA, 33 bp, Homo sapien
actgaacataaacagctcactcaagcagccatg

SEQ ID NO: 422915 - DNA, 33 bp, Homo sapien
gaccagagagcaaacacgtgccgcaggaggttt

SEQ ID NO: 422916 - DNA, 33 bp, Homo sapien
gaccagagagcaaacatgtgccgcaggaggttt

SEQ ID NO: 422917 - DNA, 33 bp, Homo sapien
agagtctgcattttaacaagtcctccagtgata

SEQ ID NO: 422918 - DNA, 33 bp, Homo sapien
agagtctgcattttaataagtcctccagtgata

SEQ ID NO: 422919 - DNA, 33 bp, Homo sapien
tacagagatgacccaaatgaggatcacgctctg

SEQ ID NO: 422920 - DNA, 33 bp, Homo sapien
tacagagatgacccaactgaggatcacgctctg

SEQ ID NO: 422921 - DNA, 33 bp, Homo sapien
tggtgctctaaactccgcatggcgctgaggcat

SEQ ID NO: 422922 - DNA, 33 bp, Homo sapien
tggtgctctaaactcctcatggcgctgaggcat

SEQ ID NO: 422923 - DNA, 33 bp, Homo sapien
ccgtgttcctcctggaaattaccatatctgaga

SEQ ID NO: 422924 - DNA, 33 bp, Homo sapien
ccgtgttcctcctggagattaccatatctgaga

SEQ ID NO: 422925 - DNA, 33 bp, Homo sapien
ttgtgaaaagagaaagacaggttccatgttaaa

SEQ ID NO: 422926 - DNA, 33 bp, Homo sapien
ttgtgaaaagagaaaggcaggttccatgttaaa

SEQ ID NO: 422927 - DNA, 33 bp, Homo sapien
gagggccaggcctgcaccaaaaatctgtcaaga

SEQ ID NO: 422928 - DNA, 33 bp, Homo sapien
gagggccaggcctgcatcaaaaatctgtcaaga

SEQ ID NO: 422929 - DNA, 33 bp, Homo sapien
acatcaagatgagacaaccactatgctccaatg

SEQ ID NO: 422930 - DNA, 33 bp, Homo sapien
acatcaagatgagacacccactatgctccaatg

SEQ ID NO: 422931 - DNA, 33 bp, Homo sapien
ttaacgttcgtgaacacggtaattgatttctac

SEQ ID NO: 422932 - DNA, 33 bp, Homo sapien
ttaacgttcgtgaacatggtaattgatttctac

SEQ ID NO: 422933 - DNA, 33 bp, Homo sapien
accagctgctgctggactcaccattacaaataa

SEQ ID NO: 422934 - DNA, 33 bp, Homo sapien
accagctgctgctggattcaccattacaaataa

SEQ ID NO: 422935 - DNA, 33 bp, Homo sapien
aatccttgtggtacgaatcaatcctctttagac

SEQ ID NO: 422936 - DNA, 33 bp, Homo sapien
aatccttgtggtacgagtcaatcctctttagac

SEQ ID NO: 422937 - DNA, 33 bp, Homo sapien
tctcaagcttggcaagccttagaaaatggcatg

SEQ ID NO: 422938 - DNA, 33 bp, Homo sapien
tctcaagcttggcaagtcttagaaaatggcatg

SEQ ID NO: 422939 - DNA, 33 bp, Homo sapien
acgtggtatcagtctacggagaggctaagctca

SEQ ID NO: 422940 - DNA, 33 bp, Homo sapien
acgtggtatcagtctatggagaggctaagctca

SEQ ID NO: 422941 - DNA, 33 bp, Homo sapien
cagcactcaatttcccaccaggacacaggacac

SEQ ID NO: 422942 - DNA, 33 bp, Homo sapien
cagcactcaatttcccgccaggacacaggacac

SEQ ID NO: 422943 - DNA, 33 bp, Homo sapien
ctcactacacacaaaaaaagatgtatgtgagat

SEQ ID NO: 422944 - DNA, 33 bp, Homo sapien
ctcactacacacaaaacaagatgtatgtgagat

SEQ ID NO: 422945 - DNA, 33 bp, Homo sapien
ctagtctaattaaatcagaatcgctggagttgg

SEQ ID NO: 422946 - DNA, 33 bp, Homo sapien
ctagtctaattaaatcggaatcgctggagttgg

SEQ ID NO: 422947 - DNA, 33 bp, Homo sapien
tcagcccaggccataaatctattcatcagatta

SEQ ID NO: 422948 - DNA, 33 bp, Homo sapien
tcagcccaggccataagtctattcatcagatta

SEQ ID NO: 422949 - DNA, 33 bp, Homo sapien
agtgcagcaagacacaatccaagtcctgtctaa

SEQ ID NO: 422950 - DNA, 33 bp, Homo sapien
agtgcagcaagacacagtccaagtcctgtctaa

SEQ ID NO: 422951 - DNA, 33 bp, Homo sapien
gcaagctggtcaaaaggcccccagggcattggc

SEQ ID NO: 422952 - DNA, 33 bp, Homo sapien
gcaagctggtcaaaagtcccccagggcattggc

SEQ ID NO: 422953 - DNA, 33 bp, Homo sapien
tgcaggggagtgaaccaatccatagacttgggg

SEQ ID NO: 422954 - DNA, 33 bp, Homo sapien
tgcaggggagtgaaccgatccatagacttgggg

SEQ ID NO: 422955 - DNA, 33 bp, Homo sapien
gaagggccggagagtgaaaacctttagcagtag

SEQ ID NO: 422956 - DNA, 33 bp, Homo sapien
gaagggccggagagtgcaaacctttagcagtag

SEQ ID NO: 422957 - DNA, 33 bp, Homo sapien
tcctgaataagggagccgaacagtcaggggtgt

SEQ ID NO: 422958 - DNA, 33 bp, Homo sapien
tcctgaataagggagctgaacagtcaggggtgt

SEQ ID NO: 422959 - DNA, 33 bp, Homo sapien
tatttattagtaaaaactcagttgcaggtgaca

SEQ ID NO: 422960 - DNA, 33 bp, Homo sapien
tatttattagtaaaaattcagttgcaggtgaca

SEQ ID NO: 422961 - DNA, 33 bp, Homo sapien
taagggcatgatatgcaagagtgccacctaaaa

SEQ ID NO: 422962 - DNA, 33 bp, Homo sapien
taagggcatgatatgcgagagtgccacctaaaa

SEQ ID NO: 422963 - DNA, 33 bp, Homo sapien
gaatgctcattgccaacggttttaggagtatct

SEQ ID NO: 422964 - DNA, 33 bp, Homo sapien
gaatgctcattgccaatggttttaggagtatct

SEQ ID NO: 422965 - DNA, 33 bp, Homo sapien
gcccagcatcatcaacaagttcccggaagtctc

SEQ ID NO: 422966 - DNA, 33 bp, Homo sapien
gcccagcatcatcaaccagttcccggaagtctc

SEQ ID NO: 422967 - DNA, 33 bp, Homo sapien
gagctggagaaaggaaagccaattagaaggctg

SEQ ID NO: 422968 - DNA, 33 bp, Homo sapien
gagctggagaaaggaatgccaattagaaggctg

SEQ ID NO: 422969 - DNA, 33 bp, Homo sapien
caatatgtgctgtcataaaaagatcttgaagac

SEQ ID NO: 422970 - DNA, 33 bp, Homo sapien
caatatgtgctgtcatgaaaagatcttgaagac

SEQ ID NO: 422971 - DNA, 33 bp, Homo sapien
catgcctgcgccaagaaggaatcctgaagaaag

SEQ ID NO: 422972 - DNA, 33 bp, Homo sapien
catgcctgcgccaagagggaatcctgaagaaag

SEQ ID NO: 422973 - DNA, 33 bp, Homo sapien
acatatgtagtatgtacgacctatctagacatg

SEQ ID NO: 422974 - DNA, 33 bp, Homo sapien
acatatgtagtatgtatgacctatctagacatg

SEQ ID NO: 422975 - DNA, 33 bp, Homo sapien
aagggaagatgcatcaataaacgtcatcccgtg

SEQ ID NO: 422976 - DNA, 33 bp, Homo sapien
aagggaagatgcatcattaaacgtcatcccgtg

SEQ ID NO: 422977 - DNA, 33 bp, Homo sapien
attcctgcagaaaaagaacactaatttctgatg

SEQ ID NO: 422978 - DNA, 33 bp, Homo sapien
attcctgcagaaaaaggacactaatttctgatg

SEQ ID NO: 422979 - DNA, 33 bp, Homo sapien
ttaccttcagacttaccctctatgaagtggcca

SEQ ID NO: 422980 - DNA, 33 bp, Homo sapien
ttaccttcagacttactctctatgaagtggcca

SEQ ID NO: 422981 - DNA, 33 bp, Homo sapien
gcgtaattttttgatacactacatttgaaatgc

SEQ ID NO: 422982 - DNA, 33 bp, Homo sapien
gcgtaattttttgatagactacatttgaaatgc

SEQ ID NO: 422983 - DNA, 33 bp, Homo sapien
gtgagaggatcctgccaaaaggtgctcagtggc

SEQ ID NO: 422984 - DNA, 33 bp, Homo sapien
gtgagaggatcctgccgaaaggtgctcagtggc

SEQ ID NO: 422985 - DNA, 33 bp, Homo sapien
catctgtgacactggaacgcattgctgagaact

SEQ ID NO: 422986 - DNA, 33 bp, Homo sapien
catctgtgacactggatcgcattgctgagaact

SEQ ID NO: 422987 - DNA, 33 bp, Homo sapien
gcatctaatgaataccaaatgcagatgtgtaga

SEQ ID NO: 422988 - DNA, 33 bp, Homo sapien
gcatctaatgaataccgaatgcagatgtgtaga

SEQ ID NO: 422989 - DNA, 33 bp, Homo sapien
aaggataaggttaaatcacaccctacaaaccat

SEQ ID NO: 422990 - DNA, 33 bp, Homo sapien
aaggataaggttaaatgacaccctacaaaccat

SEQ ID NO: 422991 - DNA, 33 bp, Homo sapien
gcctagctacctactccgacaatatgggctcag

SEQ ID NO: 422992 - DNA, 33 bp, Homo sapien
gcctagctacctactctgacaatatgggctcag

SEQ ID NO: 422993 - DNA, 33 bp, Homo sapien
gagaggcctttcctgaacacatcatctagaagc

SEQ ID NO: 422994 - DNA, 33 bp, Homo sapien
gagaggcctttcctgaccacatcatctagaagc

SEQ ID NO: 422995 - DNA, 33 bp, Homo sapien
acacttatctgccatacatcacaacacaccttg

SEQ ID NO: 422996 - DNA, 33 bp, Homo sapien
acacttatctgccatatatcacaacacaccttg

SEQ ID NO: 422997 - DNA, 33 bp, Homo sapien
tcacagggaagccctaaagcatgaccatgagaa

SEQ ID NO: 422998 - DNA, 33 bp, Homo sapien
tcacagggaagccctagagcatgaccatgagaa

SEQ ID NO: 422999 - DNA, 33 bp, Homo sapien
catttgatttttcctacgaagtctttgaaatca

SEQ ID NO: 423000 - DNA, 33 bp, Homo sapien
catttgatttttcctatgaagtctttgaaatca

SEQ ID NO: 423001 - DNA, 33 bp, Homo sapien
gctcttccatttccaaattacagagcataattc

SEQ ID NO: 423002 - DNA, 33 bp, Homo sapien
gctcttccatttccaagttacagagcataattc

SEQ ID NO: 423003 - DNA, 33 bp, Homo sapien
acctgcacgttctaaactctcccctcacaaggt

SEQ ID NO: 423004 - DNA, 33 bp, Homo sapien
acctgcacgttctaaattctcccctcacaaggt

SEQ ID NO: 423005 - DNA, 33 bp, Homo sapien
ttattctatctcaaagactcaagacttggacta

SEQ ID NO: 423006 - DNA, 33 bp, Homo sapien
ttattctatctcaaagcctcaagacttggacta

SEQ ID NO: 423007 - DNA, 33 bp, Homo sapien
cagttccatccagtcaacttaggaaatgtttat

SEQ ID NO: 423008 - DNA, 33 bp, Homo sapien
cagttccatccagtcagcttaggaaatgtttat

SEQ ID NO: 423009 - DNA, 33 bp, Homo sapien
cagtggcttaggcaccaacattctctgcaaatc

SEQ ID NO: 423010 - DNA, 33 bp, Homo sapien
cagtggcttaggcaccgacattctctgcaaatc

SEQ ID NO: 423011 - DNA, 33 bp, Homo sapien
cagtcatttcacaccaatcacaccggccagcat

SEQ ID NO: 423012 - DNA, 33 bp, Homo sapien
cagtcatttcacaccattcacaccggccagcat

SEQ ID NO: 423013 - DNA, 33 bp, Homo sapien
tggaaagaggcattcaaacttgggaagatttaa

SEQ ID NO: 423014 - DNA, 33 bp, Homo sapien
tggaaagaggcattcagacttgggaagatttaa

SEQ ID NO: 423015 - DNA, 33 bp, Homo sapien
tgagatgaaggtgtcaacagggtttctttctac

SEQ ID NO: 423016 - DNA, 33 bp, Homo sapien
tgagatgaaggtgtcaccagggtttctttctac

SEQ ID NO: 423017 - DNA, 33 bp, Homo sapien
aatcagttagattcagccatttcacaattatac

SEQ ID NO: 423018 - DNA, 33 bp, Homo sapien
aatcagttagattcaggcatttcacaattatac

SEQ ID NO: 423019 - DNA, 33 bp, Homo sapien
gaaaatttcgtatacaatggtagaatatgaatt

SEQ ID NO: 423020 - DNA, 33 bp, Homo sapien
gaaaatttcgtatacactggtagaatatgaatt

SEQ ID NO: 423021 - DNA, 33 bp, Homo sapien
acgatcaccaaacacactacagggacagagaga

SEQ ID NO: 423022 - DNA, 33 bp, Homo sapien
acgatcaccaaacacattacagggacagagaga

SEQ ID NO: 423023 - DNA, 33 bp, Homo sapien
tttccatttcagatccacggctgttttcctcct

SEQ ID NO: 423024 - DNA, 33 bp, Homo sapien
tttccatttcagatccgcggctgttttcctcct

SEQ ID NO: 423025 - DNA, 33 bp, Homo sapien
aacttgaacaacttaccgaactccagcagtcct

SEQ ID NO: 423026 - DNA, 33 bp, Homo sapien
aacttgaacaacttactgaactccagcagtcct

SEQ ID NO: 423027 - DNA, 33 bp, Homo sapien
ctggctgaatttagaactagaggcaccttccct

SEQ ID NO: 423028 - DNA, 33 bp, Homo sapien
ctggctgaatttagaattagaggcaccttccct

SEQ ID NO: 423029 - DNA, 33 bp, Homo sapien
aaattatctactatcaggtacggccaaagaata

SEQ ID NO: 423030 - DNA, 33 bp, Homo sapien
aaattatctactatcatgtacggccaaagaata

SEQ ID NO: 423031 - DNA, 33 bp, Homo sapien
aagaaacagatcctcaaagatgagttcaacaaa

SEQ ID NO: 423032 - DNA, 33 bp, Homo sapien
aagaaacagatcctcagagatgagttcaacaaa

SEQ ID NO: 423033 - DNA, 33 bp, Homo sapien
gtcccacgctcacaaaccgtactcattggaaga

SEQ ID NO: 423034 - DNA, 33 bp, Homo sapien
gtcccacgctcacaaatcgtactcattggaaga

SEQ ID NO: 423035 - DNA, 33 bp, Homo sapien
agtaggtttattggaacgtcaagaatgagattg

SEQ ID NO: 423036 - DNA, 33 bp, Homo sapien
agtaggtttattggaatgtcaagaatgagattg

SEQ ID NO: 423037 - DNA, 33 bp, Homo sapien
gagtcgtgaagatacacgaggcaaagaataagt

SEQ ID NO: 423038 - DNA, 33 bp, Homo sapien
gagtcgtgaagatacatgaggcaaagaataagt

SEQ ID NO: 423039 - DNA, 33 bp, Homo sapien
cgattaacgcttcaacagaagtgcttgctgcgt

SEQ ID NO: 423040 - DNA, 33 bp, Homo sapien
cgattaacgcttcaacggaagtgcttgctgcgt

SEQ ID NO: 423041 - DNA, 33 bp, Homo sapien
aagagaaaacgagtaacacagaagtgatgcagg

SEQ ID NO: 423042 - DNA, 33 bp, Homo sapien
aagagaaaacgagtaatacagaagtgatgcagg

SEQ ID NO: 423043 - DNA, 33 bp, Homo sapien
tgggtacctaggaaaacgcctagttaagaggca

SEQ ID NO: 423044 - DNA, 33 bp, Homo sapien
tgggtacctaggaaaatgcctagttaagaggca

SEQ ID NO: 423045 - DNA, 33 bp, Homo sapien
gaagtctactggtctcactctattccctgagca

SEQ ID NO: 423046 - DNA, 33 bp, Homo sapien
gaagtctactggtctctctctattccctgagca

SEQ ID NO: 423047 - DNA, 33 bp, Homo sapien
ctcactctgccctatgcactgtgtgtaaactgt

SEQ ID NO: 423048 - DNA, 33 bp, Homo sapien
ctcactctgccctatgtactgtgtgtaaactgt

SEQ ID NO: 423049 - DNA, 33 bp, Homo sapien
aacaacctaactacagaacgattgatcagcagt

SEQ ID NO: 423050 - DNA, 33 bp, Homo sapien
aacaacctaactacaggacgattgatcagcagt

SEQ ID NO: 423051 - DNA, 33 bp, Homo sapien
aagctatctttgtccgacatacaaattgctttg

SEQ ID NO: 423052 - DNA, 33 bp, Homo sapien
aagctatctttgtccggcatacaaattgctttg

SEQ ID NO: 423053 - DNA, 33 bp, Homo sapien
tgcttatggcattccacgcaaaattctttttta

SEQ ID NO: 423054 - DNA, 33 bp, Homo sapien
tgcttatggcattccaggcaaaattctttttta

SEQ ID NO: 423055 - DNA, 33 bp, Homo sapien
aggagttggggagcgaaggccaatttagctgct

SEQ ID NO: 423056 - DNA, 33 bp, Homo sapien
aggagttggggagcgagggccaatttagctgct

SEQ ID NO: 423057 - DNA, 33 bp, Homo sapien
aataaatccacatattcaagcatttggattaca

SEQ ID NO: 423058 - DNA, 33 bp, Homo sapien
aataaatccacatatttaagcatttggattaca

SEQ ID NO: 423059 - DNA, 33 bp, Homo sapien
gttttgaaaaataggcaaaaaagtgtaggagaa

SEQ ID NO: 423060 - DNA, 33 bp, Homo sapien
gttttgaaaaataggcgaaaaagtgtaggagaa

SEQ ID NO: 423061 - DNA, 33 bp, Homo sapien
agtaagagtcctctgaaacattcacgtgggtaa

SEQ ID NO: 423062 - DNA, 33 bp, Homo sapien
agtaagagtcctctgacacattcacgtgggtaa

SEQ ID NO: 423063 - DNA, 33 bp, Homo sapien
gatgctgggtgatggacatttgctcacttaaat

SEQ ID NO: 423064 - DNA, 33 bp, Homo sapien
gatgctgggtgatggatatttgctcacttaaat

SEQ ID NO: 423065 - DNA, 33 bp, Homo sapien
aagcggggaaggggcacggatatctttaccgca

SEQ ID NO: 423066 - DNA, 33 bp, Homo sapien
aagcggggaaggggcatggatatctttaccgca

SEQ ID NO: 423067 - DNA, 33 bp, Homo sapien
tcctatgctcagtccaataacttccagttccag

SEQ ID NO: 423068 - DNA, 33 bp, Homo sapien
tcctatgctcagtccagtaacttccagttccag

SEQ ID NO: 423069 - DNA, 33 bp, Homo sapien
tggttacgagttcacaacattttcagtgttaag

SEQ ID NO: 423070 - DNA, 33 bp, Homo sapien
tggttacgagttcacaccattttcagtgttaag

SEQ ID NO: 423071 - DNA, 33 bp, Homo sapien
tatcccatcaagagaacgagctactcacttgac

SEQ ID NO: 423072 - DNA, 33 bp, Homo sapien
tatcccatcaagagaatgagctactcacttgac

SEQ ID NO: 423073 - DNA, 33 bp, Homo sapien
ggaaagggcacagatacggcaactcatccccca

SEQ ID NO: 423074 - DNA, 33 bp, Homo sapien
ggaaagggcacagatatggcaactcatccccca

SEQ ID NO: 423075 - DNA, 33 bp, Homo sapien
agaggacaaattcctcaagtcctgggagcagac

SEQ ID NO: 423076 - DNA, 33 bp, Homo sapien
agaggacaaattcctcgagtcctgggagcagac

SEQ ID NO: 423077 - DNA, 33 bp, Homo sapien
tcttatcaatggaatcaaacagtatgtctggct

SEQ ID NO: 423078 - DNA, 33 bp, Homo sapien
tcttatcaatggaatcgaacagtatgtctggct

SEQ ID NO: 423079 - DNA, 33 bp, Homo sapien
gggactggtaaaagtacggatagagtggagaaa

SEQ ID NO: 423080 - DNA, 33 bp, Homo sapien
gggactggtaaaagtatggatagagtggagaaa

SEQ ID NO: 423081 - DNA, 33 bp, Homo sapien
ttttgcatgacacagcagcctattaccccctac

SEQ ID NO: 423082 - DNA, 33 bp, Homo sapien
ttttgcatgacacagcggcctattaccccctac

SEQ ID NO: 423083 - DNA, 33 bp, Homo sapien
tactttctctattgataaaaaaaagggctgatc

SEQ ID NO: 423084 - DNA, 33 bp, Homo sapien
tactttctctattgattaaaaaaagggctgatc

SEQ ID NO: 423085 - DNA, 33 bp, Homo sapien
gtgaaagaattagggcaatctttaagaagtgga

SEQ ID NO: 423086 - DNA, 33 bp, Homo sapien
gtgaaagaattagggctatctttaagaagtgga

SEQ ID NO: 423087 - DNA, 33 bp, Homo sapien
ccccacctccatagaacatcacgctgagggtca

SEQ ID NO: 423088 - DNA, 33 bp, Homo sapien
ccccacctccatagaatatcacgctgagggtca

SEQ ID NO: 423089 - DNA, 33 bp, Homo sapien
tttttctcatcatgctcacatggccccataaag

SEQ ID NO: 423090 - DNA, 33 bp, Homo sapien
tttttctcatcatgctgacatggccccataaag

SEQ ID NO: 423091 - DNA, 33 bp, Homo sapien
tctcgcttcaacatagcactggctgcccaaggt

SEQ ID NO: 423092 - DNA, 33 bp, Homo sapien
tctcgcttcaacatagtactggctgcccaaggt

SEQ ID NO: 423093 - DNA, 33 bp, Homo sapien
acacataggagtaagaaagctctaaagactgga

SEQ ID NO: 423094 - DNA, 33 bp, Homo sapien
acacataggagtaagagagctctaaagactgga

SEQ ID NO: 423095 - DNA, 33 bp, Homo sapien
tgctgggaaagacagaatcatgcaagtaaaagg

SEQ ID NO: 423096 - DNA, 33 bp, Homo sapien
tgctgggaaagacagagtcatgcaagtaaaagg

SEQ ID NO: 423097 - DNA, 33 bp, Homo sapien
ggtggccccaggagaacctgacctattttgtgg

SEQ ID NO: 423098 - DNA, 33 bp, Homo sapien
ggtggccccaggagaatctgacctattttgtgg

SEQ ID NO: 423099 - DNA, 33 bp, Homo sapien
tgctttgcaagtgtcaaatccaccagggactgg

SEQ ID NO: 423100 - DNA, 33 bp, Homo sapien
tgctttgcaagtgtcacatccaccagggactgg

SEQ ID NO: 423101 - DNA, 33 bp, Homo sapien
gccctggcatttgccacagacgtgcttctgcaa

SEQ ID NO: 423102 - DNA, 33 bp, Homo sapien
gccctggcatttgccatagacgtgcttctgcaa

SEQ ID NO: 423103 - DNA, 33 bp, Homo sapien
aaaacttttcaaagagccaaaggccataatgag

SEQ ID NO: 423104 - DNA, 33 bp, Homo sapien
aaaacttttcaaagagtcaaaggccataatgag

SEQ ID NO: 423105 - DNA, 33 bp, Homo sapien
attacaagggagttgcccttccaagcccaggat

SEQ ID NO: 423106 - DNA, 33 bp, Homo sapien
attacaagggagttgctcttccaagcccaggat

SEQ ID NO: 423107 - DNA, 33 bp, Homo sapien
ctccatggtattgctaagtgccagcatggatgt

SEQ ID NO: 423108 - DNA, 33 bp, Homo sapien
ctccatggtattgctacgtgccagcatggatgt

SEQ ID NO: 423109 - DNA, 33 bp, Homo sapien
aattccagggctgtaacagcgatcagggcccgc

SEQ ID NO: 423110 - DNA, 33 bp, Homo sapien
aattccagggctgtaatagcgatcagggcccgc

SEQ ID NO: 423111 - DNA, 33 bp, Homo sapien
gtgtgctcacaatgcaacttttacactcagaga

SEQ ID NO: 423112 - DNA, 33 bp, Homo sapien
gtgtgctcacaatgcagcttttacactcagaga

SEQ ID NO: 423113 - DNA, 33 bp, Homo sapien
tccaaacaatgcagctaagaagggaacagcagg

SEQ ID NO: 423114 - DNA, 33 bp, Homo sapien
tccaaacaatgcagctcagaagggaacagcagg

SEQ ID NO: 423115 - DNA, 33 bp, Homo sapien
tctctaataaaaggaaacactgtggagattcaa

SEQ ID NO: 423116 - DNA, 33 bp, Homo sapien
tctctaataaaaggaagcactgtggagattcaa

SEQ ID NO: 423117 - DNA, 33 bp, Homo sapien
ggcctggtctcctttacacctgaaatctgacca

SEQ ID NO: 423118 - DNA, 33 bp, Homo sapien
ggcctggtctcctttatacctgaaatctgacca

SEQ ID NO: 423119 - DNA, 33 bp, Homo sapien
aaatgccagccacaagaaagttacgtggggttt

SEQ ID NO: 423120 - DNA, 33 bp, Homo sapien
aaatgccagccacaaggaagttacgtggggttt

SEQ ID NO: 423121 - DNA, 33 bp, Homo sapien
gatggaattgtcctaacagaggagtagcattgc

SEQ ID NO: 423122 - DNA, 33 bp, Homo sapien
gatggaattgtcctaatagaggagtagcattgc

SEQ ID NO: 423123 - DNA, 33 bp, Homo sapien
cctccagtgctaggcaccatctaaagcgtgggg

SEQ ID NO: 423124 - DNA, 33 bp, Homo sapien
cctccagtgctaggcatcatctaaagcgtgggg

SEQ ID NO: 423125 - DNA, 33 bp, Homo sapien
caggtaccgattaggaagaacaaacagtatcct

SEQ ID NO: 423126 - DNA, 33 bp, Homo sapien
caggtaccgattaggaggaacaaacagtatcct

SEQ ID NO: 423127 - DNA, 33 bp, Homo sapien
atcaaggtggtctgacaccgatgctcagggcaa

SEQ ID NO: 423128 - DNA, 33 bp, Homo sapien
atcaaggtggtctgaccccgatgctcagggcaa

SEQ ID NO: 423129 - DNA, 33 bp, Homo sapien
ctttccatacgtgcccaggagtctagcagcctg

SEQ ID NO: 423130 - DNA, 33 bp, Homo sapien
ctttccatacgtgcccgggagtctagcagcctg

SEQ ID NO: 423131 - DNA, 33 bp, Homo sapien
gtgcaacttgacccctaaatgaaacacttaaaa

SEQ ID NO: 423132 - DNA, 33 bp, Homo sapien
gtgcaacttgacccctcaatgaaacacttaaaa

SEQ ID NO: 423133 - DNA, 33 bp, Homo sapien
gtatgtgggttaatgacgaaggagtattgcgga

SEQ ID NO: 423134 - DNA, 33 bp, Homo sapien
gtatgtgggttaatgatgaaggagtattgcgga

SEQ ID NO: 423135 - DNA, 33 bp, Homo sapien
ccagatgaggacaggcagcaaccttctgagtgc

SEQ ID NO: 423136 - DNA, 33 bp, Homo sapien
ccagatgaggacaggcggcaaccttctgagtgc

SEQ ID NO: 423137 - DNA, 33 bp, Homo sapien
aataaaagttcctttgaaagtatcatctcctcc

SEQ ID NO: 423138 - DNA, 33 bp, Homo sapien
aataaaagttcctttgcaagtatcatctcctcc

SEQ ID NO: 423139 - DNA, 33 bp, Homo sapien
aacacgttttcttagacgcagcaggtttgtggc

SEQ ID NO: 423140 - DNA, 33 bp, Homo sapien
aacacgttttcttagatgcagcaggtttgtggc

SEQ ID NO: 423141 - DNA, 33 bp, Homo sapien
tcagggtggaaaataacgtgaagtcactcagct

SEQ ID NO: 423142 - DNA, 33 bp, Homo sapien
tcagggtggaaaataatgtgaagtcactcagct

SEQ ID NO: 423143 - DNA, 33 bp, Homo sapien
catcagaggacggccaagctgaagctgtcatca

SEQ ID NO: 423144 - DNA, 33 bp, Homo sapien
catcagaggacggccaggctgaagctgtcatca

SEQ ID NO: 423145 - DNA, 33 bp, Homo sapien
cagggaattgccaaaccagaataggaaagagac

SEQ ID NO: 423146 - DNA, 33 bp, Homo sapien
cagggaattgccaaactagaataggaaagagac

SEQ ID NO: 423147 - DNA, 33 bp, Homo sapien
cgtactagaaacctgacagccgtgcgaggtgcc

SEQ ID NO: 423148 - DNA, 33 bp, Homo sapien
cgtactagaaacctgatagccgtgcgaggtgcc

SEQ ID NO: 423149 - DNA, 33 bp, Homo sapien
cagagtctaccttgaaatcctattaggctactt

SEQ ID NO: 423150 - DNA, 33 bp, Homo sapien
cagagtctaccttgaagtcctattaggctactt

SEQ ID NO: 423151 - DNA, 33 bp, Homo sapien
ccccaaatcctatcaacaggaatgctggccatt

SEQ ID NO: 423152 - DNA, 33 bp, Homo sapien
ccccaaatcctatcaagaggaatgctggccatt

SEQ ID NO: 423153 - DNA, 33 bp, Homo sapien
caatgtatactctcaacatttgactacttggta

SEQ ID NO: 423154 - DNA, 33 bp, Homo sapien
caatgtatactctcaatatttgactacttggta

SEQ ID NO: 423155 - DNA, 33 bp, Homo sapien
ttgactacttggtaagacatataatataacctt

SEQ ID NO: 423156 - DNA, 33 bp, Homo sapien
ttgactacttggtaagccatataatataacctt

SEQ ID NO: 423157 - DNA, 33 bp, Homo sapien
gttaggtttcctaaaaatgaactggagtggttg

SEQ ID NO: 423158 - DNA, 33 bp, Homo sapien
gttaggtttcctaaaattgaactggagtggttg

SEQ ID NO: 423159 - DNA, 33 bp, Homo sapien
ggtgcttgttcatagccctcctctttagtcatt

SEQ ID NO: 423160 - DNA, 33 bp, Homo sapien
ggtgcttgttcatagctctcctctttagtcatt

SEQ ID NO: 423161 - DNA, 33 bp, Homo sapien
gtgtttgtagagaacgacataaacacgaggttg

SEQ ID NO: 423162 - DNA, 33 bp, Homo sapien
gtgtttgtagagaacggcataaacacgaggttg

SEQ ID NO: 423163 - DNA, 33 bp, Homo sapien
tttgatgattgtacttcaaaggcctcagggcag

SEQ ID NO: 423164 - DNA, 33 bp, Homo sapien
tttgatgattgtactttaaaggcctcagggcag

SEQ ID NO: 423165 - DNA, 33 bp, Homo sapien
tgcattgacaaaacaaaattttaagaccaagac

SEQ ID NO: 423166 - DNA, 33 bp, Homo sapien
tgcattgacaaaacaacattttaagaccaagac

SEQ ID NO: 423167 - DNA, 33 bp, Homo sapien
aacataccgggcagtcagaatcagaggacatgg

SEQ ID NO: 423168 - DNA, 33 bp, Homo sapien
aacataccgggcagtcggaatcagaggacatgg

SEQ ID NO: 423169 - DNA, 33 bp, Homo sapien
ggctatatccagtgccagaaaggaagggcaatg

SEQ ID NO: 423170 - DNA, 33 bp, Homo sapien
ggctatatccagtgccggaaaggaagggcaatg

SEQ ID NO: 423171 - DNA, 33 bp, Homo sapien
ctccccctggctacaccctcactgagaacgtgg

SEQ ID NO: 423172 - DNA, 33 bp, Homo sapien
ctccccctggctacacgctcactgagaacgtgg

SEQ ID NO: 423173 - DNA, 33 bp, Homo sapien
attattgcccttgatagtactcacaaatcaatc

SEQ ID NO: 423174 - DNA, 33 bp, Homo sapien
attattgcccttgatattactcacaaatcaatc

SEQ ID NO: 423175 - DNA, 33 bp, Homo sapien
atctctgtttgccaaaatgctgtttgaaatgtt

SEQ ID NO: 423176 - DNA, 33 bp, Homo sapien
atctctgtttgccaaagtgctgtttgaaatgtt

SEQ ID NO: 423177 - DNA, 33 bp, Homo sapien
ctgctgagatttctccacttttgtacatttgca

SEQ ID NO: 423178 - DNA, 33 bp, Homo sapien
ctgctgagatttctccgcttttgtacatttgca

SEQ ID NO: 423179 - DNA, 33 bp, Homo sapien
accatgccatgcagcgaccacagtggcttctcg

SEQ ID NO: 423180 - DNA, 33 bp, Homo sapien
accatgccatgcagcggccacagtggcttctcg

SEQ ID NO: 423181 - DNA, 33 bp, Homo sapien
atgcagactaacccaaggtgctcctgtgtcctc

SEQ ID NO: 423182 - DNA, 33 bp, Homo sapien
atgcagactaacccaatgtgctcctgtgtcctc

SEQ ID NO: 423183 - DNA, 33 bp, Homo sapien
tgtctggctctgagccaatcgtggtgacgggaa

SEQ ID NO: 423184 - DNA, 33 bp, Homo sapien
tgtctggctctgagcctatcgtggtgacgggaa

SEQ ID NO: 423185 - DNA, 33 bp, Homo sapien
ctcctcctgcacattgaaatgcttcccgtactg

SEQ ID NO: 423186 - DNA, 33 bp, Homo sapien
ctcctcctgcacattggaatgcttcccgtactg

SEQ ID NO: 423187 - DNA, 33 bp, Homo sapien
aagcaatagctactgaggactgtttcttttatt

SEQ ID NO: 423188 - DNA, 33 bp, Homo sapien
aagcaatagctactgatgactgtttcttttatt

SEQ ID NO: 423189 - DNA, 33 bp, Homo sapien
gaggagaccaggttcccagcttcacggagctaa

SEQ ID NO: 423190 - DNA, 33 bp, Homo sapien
gaggagaccaggttcctagcttcacggagctaa

SEQ ID NO: 423191 - DNA, 33 bp, Homo sapien
gcttcacggagctaacagctttgtcaccagacc

SEQ ID NO: 423192 - DNA, 33 bp, Homo sapien
gcttcacggagctaacggctttgtcaccagacc

SEQ ID NO: 423193 - DNA, 33 bp, Homo sapien
ttgctatttcttacccaaatgaagtgtaagaga

SEQ ID NO: 423194 - DNA, 33 bp, Homo sapien
ttgctatttcttacccgaatgaagtgtaagaga

SEQ ID NO: 423195 - DNA, 33 bp, Homo sapien
gttctgaattaaagagcctagctagatattttt

SEQ ID NO: 423196 - DNA, 33 bp, Homo sapien
gttctgaattaaagagtctagctagatattttt

SEQ ID NO: 423197 - DNA, 33 bp, Homo sapien
gcttctgctgacacaaccgctaagagaaccatc

SEQ ID NO: 423198 - DNA, 33 bp, Homo sapien
gcttctgctgacacaagcgctaagagaaccatc

SEQ ID NO: 423199 - DNA, 33 bp, Homo sapien
agcctcatctctcaaaactgagtgctctgcttg

SEQ ID NO: 423200 - DNA, 33 bp, Homo sapien
agcctcatctctcaaacctgagtgctctgcttg

SEQ ID NO: 423201 - DNA, 33 bp, Homo sapien
gcttccctttgaaatacgatctgcaaaaatatg

SEQ ID NO: 423202 - DNA, 33 bp, Homo sapien
gcttccctttgaaatatgatctgcaaaaatatg

SEQ ID NO: 423203 - DNA, 33 bp, Homo sapien
atgcagttatttgggcagataagttatactaaa

SEQ ID NO: 423204 - DNA, 33 bp, Homo sapien
atgcagttatttgggctgataagttatactaaa

SEQ ID NO: 423205 - DNA, 33 bp, Homo sapien
gttaacatttagaaaacaccagacttgcaaatt

SEQ ID NO: 423206 - DNA, 33 bp, Homo sapien
gttaacatttagaaaagaccagacttgcaaatt

SEQ ID NO: 423207 - DNA, 33 bp, Homo sapien
aggtgaggccaggacaaaatgaagtgaacataa

SEQ ID NO: 423208 - DNA, 33 bp, Homo sapien
aggtgaggccaggacacaatgaagtgaacataa

SEQ ID NO: 423209 - DNA, 33 bp, Homo sapien
aaatctctgaccaaacagctcaattaggttaag

SEQ ID NO: 423210 - DNA, 33 bp, Homo sapien
aaatctctgaccaaaccgctcaattaggttaag

SEQ ID NO: 423211 - DNA, 33 bp, Homo sapien
tgttcaattccaatgaaagtggaggcgaagcca

SEQ ID NO: 423212 - DNA, 33 bp, Homo sapien
tgttcaattccaatgagagtggaggcgaagcca

SEQ ID NO: 423213 - DNA, 33 bp, Homo sapien
actccaaaattagcaactcagccatcatcttgt

SEQ ID NO: 423214 - DNA, 33 bp, Homo sapien
actccaaaattagcaattcagccatcatcttgt

SEQ ID NO: 423215 - DNA, 33 bp, Homo sapien
aaagcaactttactaaaaggcttagctgagata

SEQ ID NO: 423216 - DNA, 33 bp, Homo sapien
aaagcaactttactaacaggcttagctgagata

SEQ ID NO: 423217 - DNA, 33 bp, Homo sapien
tagacctgaggcttccccttcagactcttggtg

SEQ ID NO: 423218 - DNA, 33 bp, Homo sapien
tagacctgaggcttcctcttcagactcttggtg

SEQ ID NO: 423219 - DNA, 33 bp, Homo sapien
gactcacagttttttacgtgtctttcagaattt

SEQ ID NO: 423220 - DNA, 33 bp, Homo sapien
gactcacagttttttatgtgtctttcagaattt

SEQ ID NO: 423221 - DNA, 33 bp, Homo sapien
tttctgagtgactccaagtgtatctgaaacaaa

SEQ ID NO: 423222 - DNA, 33 bp, Homo sapien
tttctgagtgactccacgtgtatctgaaacaaa

SEQ ID NO: 423223 - DNA, 33 bp, Homo sapien
actgagtcagaaccaaagaggaatcattttaaa

SEQ ID NO: 423224 - DNA, 33 bp, Homo sapien
actgagtcagaaccaatgaggaatcattttaaa

SEQ ID NO: 423225 - DNA, 33 bp, Homo sapien
attttaagggtactgtaaaagactctcggtcct

SEQ ID NO: 423226 - DNA, 33 bp, Homo sapien
attttaagggtactgtcaaagactctcggtcct

SEQ ID NO: 423227 - DNA, 33 bp, Homo sapien
tccatttttctgttcactctctcactcatatac

SEQ ID NO: 423228 - DNA, 33 bp, Homo sapien
tccatttttctgttcagtctctcactcatatac

SEQ ID NO: 423229 - DNA, 33 bp, Homo sapien
agacttaatacttaaccggcagcttccctactt

SEQ ID NO: 423230 - DNA, 33 bp, Homo sapien
agacttaatacttaactggcagcttccctactt

SEQ ID NO: 423231 - DNA, 33 bp, Homo sapien
ttatataactacataaccctgagagtcacactg

SEQ ID NO: 423232 - DNA, 33 bp, Homo sapien
ttatataactacataatcctgagagtcacactg

SEQ ID NO: 423233 - DNA, 33 bp, Homo sapien
aaagatgtagacctcagggtagctggcttcttc

SEQ ID NO: 423234 - DNA, 33 bp, Homo sapien
aaagatgtagacctcatggtagctggcttcttc

SEQ ID NO: 423235 - DNA, 33 bp, Homo sapien
tggagaaatatcatgaacaaaaattataccttt

SEQ ID NO: 423236 - DNA, 33 bp, Homo sapien
tggagaaatatcatgagcaaaaattataccttt

SEQ ID NO: 423237 - DNA, 33 bp, Homo sapien
ggcccggtcaggtgaaatgtttaggaagaacta

SEQ ID NO: 423238 - DNA, 33 bp, Homo sapien
ggcccggtcaggtgaagtgtttaggaagaacta

SEQ ID NO: 423239 - DNA, 33 bp, Homo sapien
ttacaggaggtccatcaagtagtcagatacata

SEQ ID NO: 423240 - DNA, 33 bp, Homo sapien
ttacaggaggtccatcgagtagtcagatacata

SEQ ID NO: 423241 - DNA, 33 bp, Homo sapien
actttccaaactcaccggatgggtcacagcttc

SEQ ID NO: 423242 - DNA, 33 bp, Homo sapien
actttccaaactcacctgatgggtcacagcttc

SEQ ID NO: 423243 - DNA, 33 bp, Homo sapien
ttcctgagtgaaaccaaatatgctgcaagaaag

SEQ ID NO: 423244 - DNA, 33 bp, Homo sapien
ttcctgagtgaaaccagatatgctgcaagaaag

SEQ ID NO: 423245 - DNA, 33 bp, Homo sapien
aggtcccgtgaggtcacagaaacagcttttaaa

SEQ ID NO: 423246 - DNA, 33 bp, Homo sapien
aggtcccgtgaggtcatagaaacagcttttaaa

SEQ ID NO: 423247 - DNA, 33 bp, Homo sapien
gtcaaacagattcaaacgggtttcacaattaat

SEQ ID NO: 423248 - DNA, 33 bp, Homo sapien
gtcaaacagattcaaatgggtttcacaattaat

SEQ ID NO: 423249 - DNA, 33 bp, Homo sapien
ccggttacaccgcaaacgagtgtgattgctcct

SEQ ID NO: 423250 - DNA, 33 bp, Homo sapien
ccggttacaccgcaaatgagtgtgattgctcct

SEQ ID NO: 423251 - DNA, 33 bp, Homo sapien
gttgggatttgtacacagagctgactagctgcc

SEQ ID NO: 423252 - DNA, 33 bp, Homo sapien
gttgggatttgtacacggagctgactagctgcc

SEQ ID NO: 423253 - DNA, 33 bp, Homo sapien
tggaacttctgcaagaaatgctacttgtaaagc

SEQ ID NO: 423254 - DNA, 33 bp, Homo sapien
tggaacttctgcaagagatgctacttgtaaagc

SEQ ID NO: 423255 - DNA, 33 bp, Homo sapien
acagttctcctgactcaattctatttcctctct

SEQ ID NO: 423256 - DNA, 33 bp, Homo sapien
acagttctcctgactcgattctatttcctctct

SEQ ID NO: 423257 - DNA, 33 bp, Homo sapien
cttcttttgtgctgagaaggcttaacggtgcca

SEQ ID NO: 423258 - DNA, 33 bp, Homo sapien
cttcttttgtgctgaggaggcttaacggtgcca

SEQ ID NO: 423259 - DNA, 33 bp, Homo sapien
cctcctcctataagagaagatttgaatgcaaat

SEQ ID NO: 423260 - DNA, 33 bp, Homo sapien
cctcctcctataagagcagatttgaatgcaaat

SEQ ID NO: 423261 - DNA, 33 bp, Homo sapien
atcatttctatgaaaaagaagtggatatgggct

SEQ ID NO: 423262 - DNA, 33 bp, Homo sapien
atcatttctatgaaaaggaagtggatatgggct

SEQ ID NO: 423263 - DNA, 33 bp, Homo sapien
tgtcacttttagctacaattaggatgcctttaa

SEQ ID NO: 423264 - DNA, 33 bp, Homo sapien
tgtcacttttagctacgattaggatgcctttaa

SEQ ID NO: 423265 - DNA, 33 bp, Homo sapien
ctccaactcccagccaataagaccttcatctgg

SEQ ID NO: 423266 - DNA, 33 bp, Homo sapien
ctccaactcccagccagtaagaccttcatctgg

SEQ ID NO: 423267 - DNA, 33 bp, Homo sapien
gcggaactttaggcatgaataacttcagaatta

SEQ ID NO: 423268 - DNA, 33 bp, Homo sapien
gcggaactttaggcattaataacttcagaatta

SEQ ID NO: 423269 - DNA, 33 bp, Homo sapien
ttccaagttcacaagactaaataagtgaataag

SEQ ID NO: 423270 - DNA, 33 bp, Homo sapien
ttccaagttcacaagagtaaataagtgaataag

SEQ ID NO: 423271 - DNA, 33 bp, Homo sapien
tcctcaggtgcaatacaatgtacagcaaaggga

SEQ ID NO: 423272 - DNA, 33 bp, Homo sapien
tcctcaggtgcaatacgatgtacagcaaaggga

SEQ ID NO: 423273 - DNA, 33 bp, Homo sapien
cttccccaaggaaagggaatgcgcctcaccatt

SEQ ID NO: 423274 - DNA, 33 bp, Homo sapien
cttccccaaggaaaggtaatgcgcctcaccatt

SEQ ID NO: 423275 - DNA, 33 bp, Homo sapien
ataaagatagaaaggaatcatcagtgtgcagtc

SEQ ID NO: 423276 - DNA, 33 bp, Homo sapien
ataaagatagaaaggactcatcagtgtgcagtc

SEQ ID NO: 423277 - DNA, 33 bp, Homo sapien
tctgatactatatacccggagttagcatcagat

SEQ ID NO: 423278 - DNA, 33 bp, Homo sapien
tctgatactatatacctggagttagcatcagat

SEQ ID NO: 423279 - DNA, 33 bp, Homo sapien
aatctgtaactttcccaactacacagcagctag

SEQ ID NO: 423280 - DNA, 33 bp, Homo sapien
aatctgtaactttccctactacacagcagctag

SEQ ID NO: 423281 - DNA, 33 bp, Homo sapien
gtggtggaggttgttacgtcatctagctgctgt

SEQ ID NO: 423282 - DNA, 33 bp, Homo sapien
gtggtggaggttgttatgtcatctagctgctgt

SEQ ID NO: 423283 - DNA, 33 bp, Homo sapien
tgcctggagagttagcaccacatgtatgccacc

SEQ ID NO: 423284 - DNA, 33 bp, Homo sapien
tgcctggagagttagccccacatgtatgccacc

SEQ ID NO: 423285 - DNA, 33 bp, Homo sapien
tgcccaaagttgcacaactcgctccaaatcaca

SEQ ID NO: 423286 - DNA, 33 bp, Homo sapien
tgcccaaagttgcacatctcgctccaaatcaca

SEQ ID NO: 423287 - DNA, 33 bp, Homo sapien
tgcacgtcactacaagaagttagctttcttctc

SEQ ID NO: 423288 - DNA, 33 bp, Homo sapien
tgcacgtcactacaaggagttagctttcttctc

SEQ ID NO: 423289 - DNA, 33 bp, Homo sapien
agacatcttcactaccacagatagtgataagtg

SEQ ID NO: 423290 - DNA, 33 bp, Homo sapien
agacatcttcactacctcagatagtgataagtg

SEQ ID NO: 423291 - DNA, 33 bp, Homo sapien
ccttatttctttattcacatctggttctccttt

SEQ ID NO: 423292 - DNA, 33 bp, Homo sapien
ccttatttctttattcgcatctggttctccttt

SEQ ID NO: 423293 - DNA, 33 bp, Homo sapien
gagacataatcagacccatttttttaaaagatg

SEQ ID NO: 423294 - DNA, 33 bp, Homo sapien
gagacataatcagacctatttttttaaaagatg

SEQ ID NO: 423295 - DNA, 33 bp, Homo sapien
aagtggtttgggataaatcaaagaaaagaggtt

SEQ ID NO: 423296 - DNA, 33 bp, Homo sapien
aagtggtttgggataactcaaagaaaagaggtt

SEQ ID NO: 423297 - DNA, 33 bp, Homo sapien
tgttgcttcaaataacaagatttcattcttttt

SEQ ID NO: 423298 - DNA, 33 bp, Homo sapien
tgttgcttcaaataacgagatttcattcttttt

SEQ ID NO: 423299 - DNA, 33 bp, Homo sapien
gaggccaggaatttaccatcagcctaggcaaca

SEQ ID NO: 423300 - DNA, 33 bp, Homo sapien
gaggccaggaatttacgatcagcctaggcaaca

SEQ ID NO: 423301 - DNA, 33 bp, Homo sapien
tttcttagtcaaggaaaattttaacgtgcaaga

SEQ ID NO: 423302 - DNA, 33 bp, Homo sapien
tttcttagtcaaggaatattttaacgtgcaaga

SEQ ID NO: 423303 - DNA, 33 bp, Homo sapien
aaatattccattgcaaaccctatgaatcatatt

SEQ ID NO: 423304 - DNA, 33 bp, Homo sapien
aaatattccattgcaacccctatgaatcatatt

SEQ ID NO: 423305 - DNA, 33 bp, Homo sapien
ccatcgctttccttaaaatagatatcatgaaaa

SEQ ID NO: 423306 - DNA, 33 bp, Homo sapien
ccatcgctttccttaatatagatatcatgaaaa

SEQ ID NO: 423307 - DNA, 33 bp, Homo sapien
ttatacctttcgggaaactgagcctgacaaaga

SEQ ID NO: 423308 - DNA, 33 bp, Homo sapien
ttatacctttcgggaatctgagcctgacaaaga

SEQ ID NO: 423309 - DNA, 33 bp, Homo sapien
acccctatcaatcaacaaggcttttgggaaagg

SEQ ID NO: 423310 - DNA, 33 bp, Homo sapien
acccctatcaatcaactaggcttttgggaaagg

SEQ ID NO: 423311 - DNA, 33 bp, Homo sapien
catcaccgtattgcacaggagaacatattccat

SEQ ID NO: 423312 - DNA, 33 bp, Homo sapien
catcaccgtattgcacgggagaacatattccat

SEQ ID NO: 423313 - DNA, 33 bp, Homo sapien
gaaagtttaagacacactacgatatctcgcaaa

SEQ ID NO: 423314 - DNA, 33 bp, Homo sapien
gaaagtttaagacacattacgatatctcgcaaa

SEQ ID NO: 423315 - DNA, 33 bp, Homo sapien
tgaactgctatgccaaccctgtactgcctatac

SEQ ID NO: 423316 - DNA, 33 bp, Homo sapien
tgaactgctatgccaatcctgtactgcctatac

SEQ ID NO: 423317 - DNA, 33 bp, Homo sapien
atatgactgagttctcacaccgtagcaagaagc

SEQ ID NO: 423318 - DNA, 33 bp, Homo sapien
atatgactgagttctcgcaccgtagcaagaagc

SEQ ID NO: 423319 - DNA, 33 bp, Homo sapien
acgtcttagtagcttccagtgtatttattagat

SEQ ID NO: 423320 - DNA, 33 bp, Homo sapien
acgtcttagtagcttctagtgtatttattagat

SEQ ID NO: 423321 - DNA, 33 bp, Homo sapien
caattgacatactttaaaacaaaatttcagaga

SEQ ID NO: 423322 - DNA, 33 bp, Homo sapien
caattgacatactttagaacaaaatttcagaga

SEQ ID NO: 423323 - DNA, 33 bp, Homo sapien
atgcggggagataacaatatatagtggaaatcc

SEQ ID NO: 423324 - DNA, 33 bp, Homo sapien
atgcggggagataacagtatatagtggaaatcc

SEQ ID NO: 423325 - DNA, 33 bp, Homo sapien
gcttttagtgtatttaccaagatgttccaccat

SEQ ID NO: 423326 - DNA, 33 bp, Homo sapien
gcttttagtgtatttatcaagatgttccaccat

SEQ ID NO: 423327 - DNA, 33 bp, Homo sapien
acagttccatatttaaataagtcaccaaaaatg

SEQ ID NO: 423328 - DNA, 33 bp, Homo sapien
acagttccatatttaagtaagtcaccaaaaatg

SEQ ID NO: 423329 - DNA, 33 bp, Homo sapien
gataataaactgaagaaattttgtgccaagttt

SEQ ID NO: 423330 - DNA, 33 bp, Homo sapien
gataataaactgaagagattttgtgccaagttt

SEQ ID NO: 423331 - DNA, 33 bp, Homo sapien
ttcacctatgaaagaacctgtgaatatatgtaa

SEQ ID NO: 423332 - DNA, 33 bp, Homo sapien
ttcacctatgaaagaatctgtgaatatatgtaa

SEQ ID NO: 423333 - DNA, 33 bp, Homo sapien
ttgtttctcaacatgacgttttgaaattcatcc

SEQ ID NO: 423334 - DNA, 33 bp, Homo sapien
ttgtttctcaacatgatgttttgaaattcatcc

SEQ ID NO: 423335 - DNA, 33 bp, Homo sapien
gccagatgttatgctaagcgccaaatagatgtg

SEQ ID NO: 423336 - DNA, 33 bp, Homo sapien
gccagatgttatgctaggcgccaaatagatgtg

SEQ ID NO: 423337 - DNA, 33 bp, Homo sapien
gttctatgaatgctaacggcttccaaaagacag

SEQ ID NO: 423338 - DNA, 33 bp, Homo sapien
gttctatgaatgctaatggcttccaaaagacag

SEQ ID NO: 423339 - DNA, 33 bp, Homo sapien
aaatgtataatagtaccgccgagaatcattttc

SEQ ID NO: 423340 - DNA, 33 bp, Homo sapien
aaatgtataatagtactgccgagaatcattttc

SEQ ID NO: 423341 - DNA, 33 bp, Homo sapien
ggggagtgctgttcaacgggtactgagtttcct

SEQ ID NO: 423342 - DNA, 33 bp, Homo sapien
ggggagtgctgttcaatgggtactgagtttcct

SEQ ID NO: 423343 - DNA, 33 bp, Homo sapien
agaaatataagagtggaaaagtgtgaagtgtga

SEQ ID NO: 423344 - DNA, 33 bp, Homo sapien
agaaatataagagtggcaaagtgtgaagtgtga

SEQ ID NO: 423345 - DNA, 33 bp, Homo sapien
agtaactcaaatatccaccaaccaataaatgga

SEQ ID NO: 423346 - DNA, 33 bp, Homo sapien
agtaactcaaatatcctccaaccaataaatgga

SEQ ID NO: 423347 - DNA, 33 bp, Homo sapien
cccataagctgtttgcaaccctgagtctcggtt

SEQ ID NO: 423348 - DNA, 33 bp, Homo sapien
cccataagctgtttgccaccctgagtctcggtt

SEQ ID NO: 423349 - DNA, 33 bp, Homo sapien
caaagcttatatgaaacgaaagtctggcaggat

SEQ ID NO: 423350 - DNA, 33 bp, Homo sapien
caaagcttatatgaaatgaaagtctggcaggat

SEQ ID NO: 423351 - DNA, 33 bp, Homo sapien
ctctgtgacttgcagactagggaagcagaagat

SEQ ID NO: 423352 - DNA, 33 bp, Homo sapien
ctctgtgacttgcagattagggaagcagaagat

SEQ ID NO: 423353 - DNA, 33 bp, Homo sapien
tatggaagcagtgcaacgctgaaaagttgaaag

SEQ ID NO: 423354 - DNA, 33 bp, Homo sapien
tatggaagcagtgcaatgctgaaaagttgaaag

SEQ ID NO: 423355 - DNA, 33 bp, Homo sapien
caaagtcagagttcaacgaatttgcctaacaaa

SEQ ID NO: 423356 - DNA, 33 bp, Homo sapien
caaagtcagagttcaaggaatttgcctaacaaa

SEQ ID NO: 423357 - DNA, 33 bp, Homo sapien
ggagaagggtagagaaagatgagtgagagaggt

SEQ ID NO: 423358 - DNA, 33 bp, Homo sapien
ggagaagggtagagaatgatgagtgagagaggt

SEQ ID NO: 423359 - DNA, 33 bp, Homo sapien
gaaagaagaggtaccactgggacagctggtgac

SEQ ID NO: 423360 - DNA, 33 bp, Homo sapien
gaaagaagaggtaccattgggacagctggtgac

SEQ ID NO: 423361 - DNA, 33 bp, Homo sapien
cttatctaacagtcacccatcagacttaatatc

SEQ ID NO: 423362 - DNA, 33 bp, Homo sapien
cttatctaacagtcactcatcagacttaatatc

SEQ ID NO: 423363 - DNA, 33 bp, Homo sapien
tgatacaaattcaaaaccaaaaggctgctccaa

SEQ ID NO: 423364 - DNA, 33 bp, Homo sapien
tgatacaaattcaaaatcaaaaggctgctccaa

SEQ ID NO: 423365 - DNA, 33 bp, Homo sapien
tcatttaatgcagttacatttctctctttggct

SEQ ID NO: 423366 - DNA, 33 bp, Homo sapien
tcatttaatgcagttagatttctctctttggct

SEQ ID NO: 423367 - DNA, 33 bp, Homo sapien
cttaagcaagaaagcacatttaattggaagatt

SEQ ID NO: 423368 - DNA, 33 bp, Homo sapien
cttaagcaagaaagcatatttaattggaagatt

SEQ ID NO: 423369 - DNA, 33 bp, Homo sapien
tgtttgaatgctatgaactgaatttgcactctt

SEQ ID NO: 423370 - DNA, 33 bp, Homo sapien
tgtttgaatgctatgagctgaatttgcactctt

SEQ ID NO: 423371 - DNA, 33 bp, Homo sapien
gccatgtaatcatctaaaggtgactgttaattt

SEQ ID NO: 423372 - DNA, 33 bp, Homo sapien
gccatgtaatcatctagaggtgactgttaattt

SEQ ID NO: 423373 - DNA, 33 bp, Homo sapien
ccaatgctactttgtcactatgtccaagatcct

SEQ ID NO: 423374 - DNA, 33 bp, Homo sapien
ccaatgctactttgtcgctatgtccaagatcct

SEQ ID NO: 423375 - DNA, 33 bp, Homo sapien
cattgttccatagcaacgggccttaggtacatg

SEQ ID NO: 423376 - DNA, 33 bp, Homo sapien
cattgttccatagcaatgggccttaggtacatg

SEQ ID NO: 423377 - DNA, 33 bp, Homo sapien
acaattgtttatgtacgcttttgtctcatggac

SEQ ID NO: 423378 - DNA, 33 bp, Homo sapien
acaattgtttatgtactcttttgtctcatggac

SEQ ID NO: 423379 - DNA, 33 bp, Homo sapien
tgctgtgtgtttactccagaacgccctgctcac

SEQ ID NO: 423380 - DNA, 33 bp, Homo sapien
tgctgtgtgtttactctagaacgccctgctcac

SEQ ID NO: 423381 - DNA, 33 bp, Homo sapien
aaccacatttgcatgacgaacactagaacattg

SEQ ID NO: 423382 - DNA, 33 bp, Homo sapien
aaccacatttgcatgatgaacactagaacattg

SEQ ID NO: 423383 - DNA, 33 bp, Homo sapien
tattatactgactcaaattgactggaatctcct

SEQ ID NO: 423384 - DNA, 33 bp, Homo sapien
tattatactgactcaagttgactggaatctcct

SEQ ID NO: 423385 - DNA, 33 bp, Homo sapien
cccagctcattgaaacactccttccactttata

SEQ ID NO: 423386 - DNA, 33 bp, Homo sapien
cccagctcattgaaacgctccttccactttata

SEQ ID NO: 423387 - DNA, 33 bp, Homo sapien
caaatatgaaccattaagagtccaaagaaagtc

SEQ ID NO: 423388 - DNA, 33 bp, Homo sapien
caaatatgaaccattaggagtccaaagaaagtc

SEQ ID NO: 423389 - DNA, 33 bp, Homo sapien
ggaaatcattgcatagacctctccctgacaata

SEQ ID NO: 423390 - DNA, 33 bp, Homo sapien
ggaaatcattgcataggcctctccctgacaata

SEQ ID NO: 423391 - DNA, 33 bp, Homo sapien
actatgtctgttagtaagagtctgctgagaggc

SEQ ID NO: 423392 - DNA, 33 bp, Homo sapien
actatgtctgttagtaggagtctgctgagaggc

SEQ ID NO: 423393 - DNA, 33 bp, Homo sapien
ctatctccaaaaaaacccaagaaagagcaagct

SEQ ID NO: 423394 - DNA, 33 bp, Homo sapien
ctatctccaaaaaaactcaagaaagagcaagct

SEQ ID NO: 423395 - DNA, 33 bp, Homo sapien
tctttcagaagaaaatgatggaaatccaattga

SEQ ID NO: 423396 - DNA, 33 bp, Homo sapien
tctttcagaagaaaattatggaaatccaattga

SEQ ID NO: 423397 - DNA, 33 bp, Homo sapien
acttcagaggctaataagacaaaaccaataaaa

SEQ ID NO: 423398 - DNA, 33 bp, Homo sapien
acttcagaggctaatacgacaaaaccaataaaa

SEQ ID NO: 423399 - DNA, 33 bp, Homo sapien
ctattgtaaacagtcacgaggaagtaatatgta

SEQ ID NO: 423400 - DNA, 33 bp, Homo sapien
ctattgtaaacagtcatgaggaagtaatatgta

SEQ ID NO: 423401 - DNA, 33 bp, Homo sapien
cagttttataaatgacaagtatacctcattttt

SEQ ID NO: 423402 - DNA, 33 bp, Homo sapien
cagttttataaatgaccagtatacctcattttt

SEQ ID NO: 423403 - DNA, 33 bp, Homo sapien
ctactactaatccttccactgtctctatagttt

SEQ ID NO: 423404 - DNA, 33 bp, Homo sapien
ctactactaatccttctactgtctctatagttt

SEQ ID NO: 423405 - DNA, 33 bp, Homo sapien
gccaaagacttgaagaatacatttgtgtgtgtg

SEQ ID NO: 423406 - DNA, 33 bp, Homo sapien
gccaaagacttgaagactacatttgtgtgtgtg

SEQ ID NO: 423407 - DNA, 33 bp, Homo sapien
aagcagtgaacttgagaagataggtaatggatt

SEQ ID NO: 423408 - DNA, 33 bp, Homo sapien
aagcagtgaacttgaggagataggtaatggatt

SEQ ID NO: 423409 - DNA, 33 bp, Homo sapien
atggcatctacagttacagagttcgtgtgtaga

SEQ ID NO: 423410 - DNA, 33 bp, Homo sapien
atggcatctacagttatagagttcgtgtgtaga

SEQ ID NO: 423411 - DNA, 33 bp, Homo sapien
tacattacatatcctgaagcgcacgtgtaaaag

SEQ ID NO: 423412 - DNA, 33 bp, Homo sapien
tacattacatatcctggagcgcacgtgtaaaag

SEQ ID NO: 423413 - DNA, 33 bp, Homo sapien
attcctcaggacctaaactttgccgagtacatc

SEQ ID NO: 423414 - DNA, 33 bp, Homo sapien
attcctcaggacctaagctttgccgagtacatc

SEQ ID NO: 423415 - DNA, 33 bp, Homo sapien
aggcagaggcttcagcataagatcccacagctt

SEQ ID NO: 423416 - DNA, 33 bp, Homo sapien
aggcagaggcttcagcgtaagatcccacagctt

SEQ ID NO: 423417 - DNA, 33 bp, Homo sapien
caggagacccaggagacgtgatagcaagcctgg

SEQ ID NO: 423418 - DNA, 33 bp, Homo sapien
caggagacccaggagatgtgatagcaagcctgg

SEQ ID NO: 423419 - DNA, 33 bp, Homo sapien
catttctaataagcagaaagtcaactgtaacat

SEQ ID NO: 423420 - DNA, 33 bp, Homo sapien
catttctaataagcaggaagtcaactgtaacat

SEQ ID NO: 423421 - DNA, 33 bp, Homo sapien
cttaaggcagtaattacgctcttaaccacgtgt

SEQ ID NO: 423422 - DNA, 33 bp, Homo sapien
cttaaggcagtaattatgctcttaaccacgtgt

SEQ ID NO: 423423 - DNA, 33 bp, Homo sapien
cttcactatattcacaacgattcagacttgagc

SEQ ID NO: 423424 - DNA, 33 bp, Homo sapien
cttcactatattcacagcgattcagacttgagc

SEQ ID NO: 423425 - DNA, 33 bp, Homo sapien
atgttggtaattcttggactagttcaatctttt

SEQ ID NO: 423426 - DNA, 33 bp, Homo sapien
atgttggtaattcttgtactagttcaatctttt

SEQ ID NO: 423427 - DNA, 33 bp, Homo sapien
ataatgttaacttaaaatatgtcacaaagatct

SEQ ID NO: 423428 - DNA, 33 bp, Homo sapien
ataatgttaacttaaagtatgtcacaaagatct

SEQ ID NO: 423429 - DNA, 33 bp, Homo sapien
gttttattcataatcacagcatgagcagttttg

SEQ ID NO: 423430 - DNA, 33 bp, Homo sapien
gttttattcataatcatagcatgagcagttttg

SEQ ID NO: 423431 - DNA, 33 bp, Homo sapien
agtaaaacaactaatacgtaccagatgttgaca

SEQ ID NO: 423432 - DNA, 33 bp, Homo sapien
agtaaaacaactaatatgtaccagatgttgaca

SEQ ID NO: 423433 - DNA, 33 bp, Homo sapien
tcctaaatatgattcacgttcaagggcaccttc

SEQ ID NO: 423434 - DNA, 33 bp, Homo sapien
tcctaaatatgattcatgttcaagggcaccttc

SEQ ID NO: 423435 - DNA, 33 bp, Homo sapien
aattattctggccaaggatacaaaaattatctt

SEQ ID NO: 423436 - DNA, 33 bp, Homo sapien
aattattctggccaagtatacaaaaattatctt

SEQ ID NO: 423437 - DNA, 33 bp, Homo sapien
cttgcaatagcattaaaaaggttgaatcctcaa

SEQ ID NO: 423438 - DNA, 33 bp, Homo sapien
cttgcaatagcattaagaaggttgaatcctcaa

SEQ ID NO: 423439 - DNA, 33 bp, Homo sapien
gctcaattttatgaaaggtcaattgtctttcaa

SEQ ID NO: 423440 - DNA, 33 bp, Homo sapien
gctcaattttatgaaatgtcaattgtctttcaa

SEQ ID NO: 423441 - DNA, 33 bp, Homo sapien
agaagctggaaaaggaaaggaaatgcattctac

SEQ ID NO: 423442 - DNA, 33 bp, Homo sapien
agaagctggaaaaggagaggaaatgcattctac

SEQ ID NO: 423443 - DNA, 33 bp, Homo sapien
tccaaagaggattgtacgatagctgtgttaggc

SEQ ID NO: 423444 - DNA, 33 bp, Homo sapien
tccaaagaggattgtatgatagctgtgttaggc

SEQ ID NO: 423445 - DNA, 33 bp, Homo sapien
gtcacctctaaactgactaataacaccaaggtt

SEQ ID NO: 423446 - DNA, 33 bp, Homo sapien
gtcacctctaaactgattaataacaccaaggtt

SEQ ID NO: 423447 - DNA, 33 bp, Homo sapien
gaaaaagtaatccccaaatcatatgatacagca

SEQ ID NO: 423448 - DNA, 33 bp, Homo sapien
gaaaaagtaatccccacatcatatgatacagca

SEQ ID NO: 423449 - DNA, 33 bp, Homo sapien
aataacgtgtatacgcaccaaatatgcaagcca

SEQ ID NO: 423450 - DNA, 33 bp, Homo sapien
aataacgtgtatacgcgccaaatatgcaagcca

SEQ ID NO: 423451 - DNA, 33 bp, Homo sapien
tgggagggacatggtaaaagataattgaatcat

SEQ ID NO: 423452 - DNA, 33 bp, Homo sapien
tgggagggacatggtagaagataattgaatcat

SEQ ID NO: 423453 - DNA, 33 bp, Homo sapien
ctgttcttgcaactaacgagcatggattggagc

SEQ ID NO: 423454 - DNA, 33 bp, Homo sapien
ctgttcttgcaactaatgagcatggattggagc

SEQ ID NO: 423455 - DNA, 33 bp, Homo sapien
gaaagtgcaattagaaaaatgtgattaggatat

SEQ ID NO: 423456 - DNA, 33 bp, Homo sapien
gaaagtgcaattagaagaatgtgattaggatat

SEQ ID NO: 423457 - DNA, 33 bp, Homo sapien
attgttaagtaaaatacgaagattgtgtcaaaa

SEQ ID NO: 423458 - DNA, 33 bp, Homo sapien
attgttaagtaaaataggaagattgtgtcaaaa

SEQ ID NO: 423459 - DNA, 33 bp, Homo sapien
ctttcactgataatagactagcaccaacatgca

SEQ ID NO: 423460 - DNA, 33 bp, Homo sapien
ctttcactgataataggctagcaccaacatgca

SEQ ID NO: 423461 - DNA, 33 bp, Homo sapien
tgcattgcagaggactaactacccatgtgcttc

SEQ ID NO: 423462 - DNA, 33 bp, Homo sapien
tgcattgcagaggacttactacccatgtgcttc

SEQ ID NO: 423463 - DNA, 33 bp, Homo sapien
ttccgtattcaagggaaaagtcagaagaccaga

SEQ ID NO: 423464 - DNA, 33 bp, Homo sapien
ttccgtattcaagggagaagtcagaagaccaga

SEQ ID NO: 423465 - DNA, 33 bp, Homo sapien
atccatatgtccaccaatggaagaatagacaaa

SEQ ID NO: 423466 - DNA, 33 bp, Homo sapien
atccatatgtccaccagtggaagaatagacaaa

SEQ ID NO: 423467 - DNA, 33 bp, Homo sapien
gaaggggctgggaaaacgtcgccagagaagctt

SEQ ID NO: 423468 - DNA, 33 bp, Homo sapien
gaaggggctgggaaaatgtcgccagagaagctt

SEQ ID NO: 423469 - DNA, 33 bp, Homo sapien
gagaaaccactgcttcaaaatgatttctgaagc

SEQ ID NO: 423470 - DNA, 33 bp, Homo sapien
gagaaaccactgcttcgaaatgatttctgaagc

SEQ ID NO: 423471 - DNA, 33 bp, Homo sapien
tgcaaaaggatgaaatcagaccttttttcacat

SEQ ID NO: 423472 - DNA, 33 bp, Homo sapien
tgcaaaaggatgaaattagaccttttttcacat

SEQ ID NO: 423473 - DNA, 33 bp, Homo sapien
gttctccactctgcaccacagcctggaaactgt

SEQ ID NO: 423474 - DNA, 33 bp, Homo sapien
gttctccactctgcactacagcctggaaactgt

SEQ ID NO: 423475 - DNA, 33 bp, Homo sapien
gtctatatgtgttatcaagtcatgtggcagccc

SEQ ID NO: 423476 - DNA, 33 bp, Homo sapien
gtctatatgtgttatccagtcatgtggcagccc

SEQ ID NO: 423477 - DNA, 33 bp, Homo sapien
aggttatttttcgtgcactacagttcttaccta

SEQ ID NO: 423478 - DNA, 33 bp, Homo sapien
aggttatttttcgtgccctacagttcttaccta

SEQ ID NO: 423479 - DNA, 33 bp, Homo sapien
gtggttacttgcatcaagcttgcttccagacgt

SEQ ID NO: 423480 - DNA, 33 bp, Homo sapien
gtggttacttgcatcatgcttgcttccagacgt

SEQ ID NO: 423481 - DNA, 33 bp, Homo sapien
cgaactgatctgtcaagatgggggtacaagaac

SEQ ID NO: 423482 - DNA, 33 bp, Homo sapien
cgaactgatctgtcaatatgggggtacaagaac

SEQ ID NO: 423483 - DNA, 33 bp, Homo sapien
ggcagacggaggctttgaaacatcaatcgtggc

SEQ ID NO: 423484 - DNA, 33 bp, Homo sapien
ggcagacggaggcttttaaacatcaatcgtggc

SEQ ID NO: 423485 - DNA, 33 bp, Homo sapien
ggccacatgcctgaacactattgacaaggtact

SEQ ID NO: 423486 - DNA, 33 bp, Homo sapien
ggccacatgcctgaacgctattgacaaggtact

SEQ ID NO: 423487 - DNA, 33 bp, Homo sapien
ttttgcaggttttaacaaaattacacaaagtaa

SEQ ID NO: 423488 - DNA, 33 bp, Homo sapien
ttttgcaggttttaacgaaattacacaaagtaa

SEQ ID NO: 423489 - DNA, 33 bp, Homo sapien
ctggctaaggagaaaacaaccgatgtagagtta

SEQ ID NO: 423490 - DNA, 33 bp, Homo sapien
ctggctaaggagaaaataaccgatgtagagtta

SEQ ID NO: 423491 - DNA, 33 bp, Homo sapien
cagactctttaccaaccgattgtttctggaact

SEQ ID NO: 423492 - DNA, 33 bp, Homo sapien
cagactctttaccaacggattgtttctggaact

SEQ ID NO: 423493 - DNA, 33 bp, Homo sapien
ttagggtccacttcccacatggcctttatgaca

SEQ ID NO: 423494 - DNA, 33 bp, Homo sapien
ttagggtccacttcccgcatggcctttatgaca

SEQ ID NO: 423495 - DNA, 33 bp, Homo sapien
gggagtgtaaattggcacaatatttgaggttaa

SEQ ID NO: 423496 - DNA, 33 bp, Homo sapien
gggagtgtaaattggcgcaatatttgaggttaa

SEQ ID NO: 423497 - DNA, 33 bp, Homo sapien
aaattttaatagaacacagagtccaaaaacaga

SEQ ID NO: 423498 - DNA, 33 bp, Homo sapien
aaattttaatagaacatagagtccaaaaacaga

SEQ ID NO: 423499 - DNA, 33 bp, Homo sapien
tttactcttctcttgacgtacttctcacacact

SEQ ID NO: 423500 - DNA, 33 bp, Homo sapien
tttactcttctcttgatgtacttctcacacact

SEQ ID NO: 423501 - DNA, 33 bp, Homo sapien
gcagagaagatatcaaagggtttggtgcttggg

SEQ ID NO: 423502 - DNA, 33 bp, Homo sapien
gcagagaagatatcaaggggtttggtgcttggg

SEQ ID NO: 423503 - DNA, 33 bp, Homo sapien
tgaaatctccaccctcaatggcaggcctgggtt

SEQ ID NO: 423504 - DNA, 33 bp, Homo sapien
tgaaatctccaccctcgatggcaggcctgggtt

SEQ ID NO: 423505 - DNA, 33 bp, Homo sapien
gttactgaaaataaacagatagtgtaatacctg

SEQ ID NO: 423506 - DNA, 33 bp, Homo sapien
gttactgaaaataaacggatagtgtaatacctg

SEQ ID NO: 423507 - DNA, 33 bp, Homo sapien
gcatgtggcctgagaacgcagatcccctgaagc

SEQ ID NO: 423508 - DNA, 33 bp, Homo sapien
gcatgtggcctgagaatgcagatcccctgaagc

SEQ ID NO: 423509 - DNA, 33 bp, Homo sapien
agccgtaggaaaagcaaagttcgtatttgtaaa

SEQ ID NO: 423510 - DNA, 33 bp, Homo sapien
agccgtaggaaaagcagagttcgtatttgtaaa

SEQ ID NO: 423511 - DNA, 33 bp, Homo sapien
tacatacagaattgcaagaggccccaaatagcc

SEQ ID NO: 423512 - DNA, 33 bp, Homo sapien
tacatacagaattgcaggaggccccaaatagcc

SEQ ID NO: 423513 - DNA, 33 bp, Homo sapien
gcacaagccctatgaaaggaatcacacaatatg

SEQ ID NO: 423514 - DNA, 33 bp, Homo sapien
gcacaagccctatgaatggaatcacacaatatg

SEQ ID NO: 423515 - DNA, 33 bp, Homo sapien
gtgatctgactctacaacctcagcacctaattt

SEQ ID NO: 423516 - DNA, 33 bp, Homo sapien
gtgatctgactctacagcctcagcacctaattt

SEQ ID NO: 423517 - DNA, 33 bp, Homo sapien
gatgcacttggcaccgcatagtttttctcgggc

SEQ ID NO: 423518 - DNA, 33 bp, Homo sapien
gatgcacttggcaccggatagtttttctcgggc

SEQ ID NO: 423519 - DNA, 33 bp, Homo sapien
agacatcaagacaaaacggagctaatgagattc

SEQ ID NO: 423520 - DNA, 33 bp, Homo sapien
agacatcaagacaaaatggagctaatgagattc

SEQ ID NO: 423521 - DNA, 33 bp, Homo sapien
accttgctagagagtacgaagctcctgctcaca

SEQ ID NO: 423522 - DNA, 33 bp, Homo sapien
accttgctagagagtaggaagctcctgctcaca

SEQ ID NO: 423523 - DNA, 33 bp, Homo sapien
atagacgttcagacatcaggaaggtggcctgaa

SEQ ID NO: 423524 - DNA, 33 bp, Homo sapien
atagacgttcagacatgaggaaggtggcctgaa

SEQ ID NO: 423525 - DNA, 33 bp, Homo sapien
ttaatggctactcaaaacaactctgaaatgtct

SEQ ID NO: 423526 - DNA, 33 bp, Homo sapien
ttaatggctactcaaagcaactctgaaatgtct

SEQ ID NO: 423527 - DNA, 33 bp, Homo sapien
ggaatattcagaatcactactcgcagagcagaa

SEQ ID NO: 423528 - DNA, 33 bp, Homo sapien
ggaatattcagaatcagtactcgcagagcagaa

SEQ ID NO: 423529 - DNA, 33 bp, Homo sapien
aacctcataatcctataaaactttgctctcatc

SEQ ID NO: 423530 - DNA, 33 bp, Homo sapien
aacctcataatcctatcaaactttgctctcatc

SEQ ID NO: 423531 - DNA, 33 bp, Homo sapien
tttttctctcattctcacagagctggcctatct

SEQ ID NO: 423532 - DNA, 33 bp, Homo sapien
tttttctctcattctcgcagagctggcctatct

SEQ ID NO: 423533 - DNA, 33 bp, Homo sapien
cttgaagattaggaaaatgccccttacagcagg

SEQ ID NO: 423534 - DNA, 33 bp, Homo sapien
cttgaagattaggaaattgccccttacagcagg

SEQ ID NO: 423535 - DNA, 33 bp, Homo sapien
tgttttcagccctccaatgcttgatgtttcctg

SEQ ID NO: 423536 - DNA, 33 bp, Homo sapien
tgttttcagccctccattgcttgatgtttcctg

SEQ ID NO: 423537 - DNA, 33 bp, Homo sapien
gcaacgcgaaggagaacgacatacaggaactta

SEQ ID NO: 423538 - DNA, 33 bp, Homo sapien
gcaacgcgaaggagaatgacatacaggaactta

SEQ ID NO: 423539 - DNA, 33 bp, Homo sapien
ggcacagacagagtggccattctgatgccgtga

SEQ ID NO: 423540 - DNA, 33 bp, Homo sapien
ggcacagacagagtggtcattctgatgccgtga

SEQ ID NO: 423541 - DNA, 33 bp, Homo sapien
ttttttttcctagtcaaccttcctcatgctacc

SEQ ID NO: 423542 - DNA, 33 bp, Homo sapien
ttttttttcctagtcagccttcctcatgctacc

SEQ ID NO: 423543 - DNA, 33 bp, Homo sapien
tgattgacataaagaccgatgttacttgggaag

SEQ ID NO: 423544 - DNA, 33 bp, Homo sapien
tgattgacataaagactgatgttacttgggaag

SEQ ID NO: 423545 - DNA, 33 bp, Homo sapien
ataaatgcaaggacgaagattggcagcttaaca

SEQ ID NO: 423546 - DNA, 33 bp, Homo sapien
ataaatgcaaggacgatgattggcagcttaaca

SEQ ID NO: 423547 - DNA, 33 bp, Homo sapien
aatgatgtaagcaaaaagaaaatgtactcatta

SEQ ID NO: 423548 - DNA, 33 bp, Homo sapien
aatgatgtaagcaaaaggaaaatgtactcatta

SEQ ID NO: 423549 - DNA, 33 bp, Homo sapien
gtattttcagcaaataaagagaattaggagtaa

SEQ ID NO: 423550 - DNA, 33 bp, Homo sapien
gtattttcagcaaatacagagaattaggagtaa

SEQ ID NO: 423551 - DNA, 33 bp, Homo sapien
catgaagaggtgaagaactggggataatacttt

SEQ ID NO: 423552 - DNA, 33 bp, Homo sapien
catgaagaggtgaagagctggggataatacttt

SEQ ID NO: 423553 - DNA, 33 bp, Homo sapien
actgtgctttctaccaatgcaaactgagatccc

SEQ ID NO: 423554 - DNA, 33 bp, Homo sapien
actgtgctttctaccagtgcaaactgagatccc

SEQ ID NO: 423555 - DNA, 33 bp, Homo sapien
caatatatagtggcacactactggcaagatgca

SEQ ID NO: 423556 - DNA, 33 bp, Homo sapien
caatatatagtggcacgctactggcaagatgca

SEQ ID NO: 423557 - DNA, 33 bp, Homo sapien
aagactgttagtttaacgacccatcactgttac

SEQ ID NO: 423558 - DNA, 33 bp, Homo sapien
aagactgttagtttaatgacccatcactgttac

SEQ ID NO: 423559 - DNA, 33 bp, Homo sapien
gtgcagtgttgatttaaggatggctaagtcagc

SEQ ID NO: 423560 - DNA, 33 bp, Homo sapien
gtgcagtgttgatttagggatggctaagtcagc

SEQ ID NO: 423561 - DNA, 33 bp, Homo sapien
gaaatcgtgtatgtgcaagaattaaacaatctt

SEQ ID NO: 423562 - DNA, 33 bp, Homo sapien
gaaatcgtgtatgtgccagaattaaacaatctt

SEQ ID NO: 423563 - DNA, 33 bp, Homo sapien
atgacttctttccttacgtctctgtaaatattg

SEQ ID NO: 423564 - DNA, 33 bp, Homo sapien
atgacttctttccttatgtctctgtaaatattg

SEQ ID NO: 423565 - DNA, 33 bp, Homo sapien
aacaggttctctaggggacttggccattccttt

SEQ ID NO: 423566 - DNA, 33 bp, Homo sapien
aacaggttctctagggtacttggccattccttt

SEQ ID NO: 423567 - DNA, 33 bp, Homo sapien
aaatctctgtttaaaacgctagttcttacagac

SEQ ID NO: 423568 - DNA, 33 bp, Homo sapien
aaatctctgtttaaaatgctagttcttacagac

SEQ ID NO: 423569 - DNA, 33 bp, Homo sapien
tatcaagatgactatacctagggcacaataaaa

SEQ ID NO: 423570 - DNA, 33 bp, Homo sapien
tatcaagatgactatagctagggcacaataaaa

SEQ ID NO: 423571 - DNA, 33 bp, Homo sapien
acaaggggctaggttccataatatgcaaagaac

SEQ ID NO: 423572 - DNA, 33 bp, Homo sapien
acaaggggctaggttctataatatgcaaagaac

SEQ ID NO: 423573 - DNA, 33 bp, Homo sapien
aaataatccaaaaccaacctgggcagagaacat

SEQ ID NO: 423574 - DNA, 33 bp, Homo sapien
aaataatccaaaaccaccctgggcagagaacat

SEQ ID NO: 423575 - DNA, 33 bp, Homo sapien
agactttctagaccaacctatatgcagaaatca

SEQ ID NO: 423576 - DNA, 33 bp, Homo sapien
agactttctagaccaatctatatgcagaaatca

SEQ ID NO: 423577 - DNA, 33 bp, Homo sapien
gttgccagaaaaactcaagcataatccctgtga

SEQ ID NO: 423578 - DNA, 33 bp, Homo sapien
gttgccagaaaaactccagcataatccctgtga

SEQ ID NO: 423579 - DNA, 33 bp, Homo sapien
taccaccctaaaaaaacctactgacctcttttc

SEQ ID NO: 423580 - DNA, 33 bp, Homo sapien
taccaccctaaaaaaatctactgacctcttttc

SEQ ID NO: 423581 - DNA, 33 bp, Homo sapien
cagggaaaaccatgacaaatatggcagtacaca

SEQ ID NO: 423582 - DNA, 33 bp, Homo sapien
cagggaaaaccatgacgaatatggcagtacaca

SEQ ID NO: 423583 - DNA, 33 bp, Homo sapien
ttgaaaccataattacccatgtttgagcaaagc

SEQ ID NO: 423584 - DNA, 33 bp, Homo sapien
ttgaaaccataattactcatgtttgagcaaagc

SEQ ID NO: 423585 - DNA, 33 bp, Homo sapien
tgactagacagacagaggtacagatgaatagat

SEQ ID NO: 423586 - DNA, 33 bp, Homo sapien
tgactagacagacagatgtacagatgaatagat

SEQ ID NO: 423587 - DNA, 33 bp, Homo sapien
tccctgttcctacttacattacatgtgctcctc

SEQ ID NO: 423588 - DNA, 33 bp, Homo sapien
tccctgttcctacttatattacatgtgctcctc

SEQ ID NO: 423589 - DNA, 33 bp, Homo sapien
ttcgccgcgcagcaccaattaccaagagtcacc

SEQ ID NO: 423590 - DNA, 33 bp, Homo sapien
ttcgccgcgcagcaccgattaccaagagtcacc

SEQ ID NO: 423591 - DNA, 33 bp, Homo sapien
ataaccaaatccagcccagatcacttgttccta

SEQ ID NO: 423592 - DNA, 33 bp, Homo sapien
ataaccaaatccagcctagatcacttgttccta

SEQ ID NO: 423593 - DNA, 33 bp, Homo sapien
caaggtttaatatgtacggagctctgattctgt

SEQ ID NO: 423594 - DNA, 33 bp, Homo sapien
caaggtttaatatgtatggagctctgattctgt

SEQ ID NO: 423595 - DNA, 33 bp, Homo sapien
caattaaagatgtttgaatccaaaggaagtcaa

SEQ ID NO: 423596 - DNA, 33 bp, Homo sapien
caattaaagatgtttgtatccaaaggaagtcaa

SEQ ID NO: 423597 - DNA, 33 bp, Homo sapien
aaactgttagcaagcgccatttggatgtcttga

SEQ ID NO: 423598 - DNA, 33 bp, Homo sapien
aaactgttagcaagcggcatttggatgtcttga

SEQ ID NO: 423599 - DNA, 33 bp, Homo sapien
caaaataagcctgcaactcagctggaaagaggt

SEQ ID NO: 423600 - DNA, 33 bp, Homo sapien
caaaataagcctgcaagtcagctggaaagaggt

SEQ ID NO: 423601 - DNA, 33 bp, Homo sapien
caatgttgatgcatgacagtgagttcattttca

SEQ ID NO: 423602 - DNA, 33 bp, Homo sapien
caatgttgatgcatgatagtgagttcattttca

SEQ ID NO: 423603 - DNA, 33 bp, Homo sapien
cattgatctcaaaaacagagtttggagtgcagg

SEQ ID NO: 423604 - DNA, 33 bp, Homo sapien
cattgatctcaaaaacggagtttggagtgcagg

SEQ ID NO: 423605 - DNA, 33 bp, Homo sapien
gggtggtatattgccaagcagagaggagcaaag

SEQ ID NO: 423606 - DNA, 33 bp, Homo sapien
gggtggtatattgccaggcagagaggagcaaag

SEQ ID NO: 423607 - DNA, 33 bp, Homo sapien
tactgcatcttttctaggtttaggtatggatta

SEQ ID NO: 423608 - DNA, 33 bp, Homo sapien
tactgcatcttttctatgtttaggtatggatta

SEQ ID NO: 423609 - DNA, 33 bp, Homo sapien
gagaaagaaatgctgacgttaagtaactttgga

SEQ ID NO: 423610 - DNA, 33 bp, Homo sapien
gagaaagaaatgctgatgttaagtaactttgga

SEQ ID NO: 423611 - DNA, 33 bp, Homo sapien
gaattcttctgtttggaatatttgcctcccccc

SEQ ID NO: 423612 - DNA, 33 bp, Homo sapien
gaattcttctgtttgggatatttgcctcccccc

SEQ ID NO: 423613 - DNA, 33 bp, Homo sapien
ttcctgataagattaccgccttgaagccagcac

SEQ ID NO: 423614 - DNA, 33 bp, Homo sapien
ttcctgataagattactgccttgaagccagcac

SEQ ID NO: 423615 - DNA, 33 bp, Homo sapien
caaggaggactttgagacatcactgaaggaggc

SEQ ID NO: 423616 - DNA, 33 bp, Homo sapien
caaggaggactttgaggcatcactgaaggaggc

SEQ ID NO: 423617 - DNA, 33 bp, Homo sapien
tctttggggattctgaaaagatatgtttggaaa

SEQ ID NO: 423618 - DNA, 33 bp, Homo sapien
tctttggggattctgataagatatgtttggaaa

SEQ ID NO: 423619 - DNA, 33 bp, Homo sapien
ataatagacaagaataagcaggaaaagtctcaa

SEQ ID NO: 423620 - DNA, 33 bp, Homo sapien
ataatagacaagaataggcaggaaaagtctcaa

SEQ ID NO: 423621 - DNA, 33 bp, Homo sapien
gctctaattctatccaatcctctgttggcaggg

SEQ ID NO: 423622 - DNA, 33 bp, Homo sapien
gctctaattctatccagtcctctgttggcaggg

SEQ ID NO: 423623 - DNA, 33 bp, Homo sapien
tttcagtaagacataccatctcttccatgatgt

SEQ ID NO: 423624 - DNA, 33 bp, Homo sapien
tttcagtaagacatacgatctcttccatgatgt

SEQ ID NO: 423625 - DNA, 33 bp, Homo sapien
ccaagtctcacagattcaacctaacttttcatc

SEQ ID NO: 423626 - DNA, 33 bp, Homo sapien
ccaagtctcacagatttaacctaacttttcatc

SEQ ID NO: 423627 - DNA, 33 bp, Homo sapien
ctgttattttcagcaacgtattaacaacatact

SEQ ID NO: 423628 - DNA, 33 bp, Homo sapien
ctgttattttcagcaatgtattaacaacatact

SEQ ID NO: 423629 - DNA, 33 bp, Homo sapien
gggccggattcaaagccatcatgggccacgtgt

SEQ ID NO: 423630 - DNA, 33 bp, Homo sapien
gggccggattcaaagcgatcatgggccacgtgt

SEQ ID NO: 423631 - DNA, 33 bp, Homo sapien
tagaggtcctggatggaagcatatacttaaagt

SEQ ID NO: 423632 - DNA, 33 bp, Homo sapien
tagaggtcctggatgggagcatatacttaaagt

SEQ ID NO: 423633 - DNA, 33 bp, Homo sapien
gtgaacatacataacacgtgcaagaaaatctaa

SEQ ID NO: 423634 - DNA, 33 bp, Homo sapien
gtgaacatacataacaggtgcaagaaaatctaa

SEQ ID NO: 423635 - DNA, 33 bp, Homo sapien
taaggaacttgcagcaatgagaaaccacgggaa

SEQ ID NO: 423636 - DNA, 33 bp, Homo sapien
taaggaacttgcagcagtgagaaaccacgggaa

SEQ ID NO: 423637 - DNA, 33 bp, Homo sapien
cctttctgagccttaaaccttcatcctagaaaa

SEQ ID NO: 423638 - DNA, 33 bp, Homo sapien
cctttctgagccttaagccttcatcctagaaaa

SEQ ID NO: 423639 - DNA, 33 bp, Homo sapien
gtctgttgtgactgtacaaggttaccacaaatt

SEQ ID NO: 423640 - DNA, 33 bp, Homo sapien
gtctgttgtgactgtagaaggttaccacaaatt

SEQ ID NO: 423641 - DNA, 33 bp, Homo sapien
cccccatcaccctgaacgtgcagcttgccatcc

SEQ ID NO: 423642 - DNA, 33 bp, Homo sapien
cccccatcaccctgaatgtgcagcttgccatcc

SEQ ID NO: 423643 - DNA, 33 bp, Homo sapien
gtggctattgtcctaaatcatttttcttaggga

SEQ ID NO: 423644 - DNA, 33 bp, Homo sapien
gtggctattgtcctaactcatttttcttaggga

SEQ ID NO: 423645 - DNA, 33 bp, Homo sapien
tgttctgccaaccatacctggtaaacctttttc

SEQ ID NO: 423646 - DNA, 33 bp, Homo sapien
tgttctgccaaccatatctggtaaacctttttc

SEQ ID NO: 423647 - DNA, 33 bp, Homo sapien
gggagatgaggataagcacattttctgatcgcc

SEQ ID NO: 423648 - DNA, 33 bp, Homo sapien
gggagatgaggataagtacattttctgatcgcc

SEQ ID NO: 423649 - DNA, 33 bp, Homo sapien
gattaaataagcagccaggatttgaggcaggaa

SEQ ID NO: 423650 - DNA, 33 bp, Homo sapien
gattaaataagcagccgggatttgaggcaggaa

SEQ ID NO: 423651 - DNA, 33 bp, Homo sapien
gcatcaaaaaattgggaatgagcaagtagcccg

SEQ ID NO: 423652 - DNA, 33 bp, Homo sapien
gcatcaaaaaattggggatgagcaagtagcccg

SEQ ID NO: 423653 - DNA, 33 bp, Homo sapien
agtcatctgagctgacaggcattttgggtgagt

SEQ ID NO: 423654 - DNA, 33 bp, Homo sapien
agtcatctgagctgacgggcattttgggtgagt

SEQ ID NO: 423655 - DNA, 33 bp, Homo sapien
aatgatggtttgtataaatgtggtttgaaacca

SEQ ID NO: 423656 - DNA, 33 bp, Homo sapien
aatgatggtttgtatatatgtggtttgaaacca

SEQ ID NO: 423657 - DNA, 33 bp, Homo sapien
tggaaacatgccatcaccaaaaggacaaaataa

SEQ ID NO: 423658 - DNA, 33 bp, Homo sapien
tggaaacatgccatcatcaaaaggacaaaataa

SEQ ID NO: 423659 - DNA, 33 bp, Homo sapien
tgtgttagacacacagaaatggtctttgcagtt

SEQ ID NO: 423660 - DNA, 33 bp, Homo sapien
tgtgttagacacacaggaatggtctttgcagtt

SEQ ID NO: 423661 - DNA, 33 bp, Homo sapien
atgggggtggagacaaaagcctaaggagagggt

SEQ ID NO: 423662 - DNA, 33 bp, Homo sapien
atgggggtggagacaagagcctaaggagagggt

SEQ ID NO: 423663 - DNA, 33 bp, Homo sapien
cactgggctgcacaaacccttgatgccaggaaa

SEQ ID NO: 423664 - DNA, 33 bp, Homo sapien
cactgggctgcacaaatccttgatgccaggaaa

SEQ ID NO: 423665 - DNA, 33 bp, Homo sapien
atgaatgccagatacaactgcaaacagtgtcca

SEQ ID NO: 423666 - DNA, 33 bp, Homo sapien
atgaatgccagatacagctgcaaacagtgtcca

SEQ ID NO: 423667 - DNA, 33 bp, Homo sapien
tgcagacatctacttaccaaatggaactgaact

SEQ ID NO: 423668 - DNA, 33 bp, Homo sapien
tgcagacatctacttatcaaatggaactgaact

SEQ ID NO: 423669 - DNA, 33 bp, Homo sapien
tcatcaccatcttatgcagctgtcacatcacaa

SEQ ID NO: 423670 - DNA, 33 bp, Homo sapien
tcatcaccatcttatgtagctgtcacatcacaa

SEQ ID NO: 423671 - DNA, 33 bp, Homo sapien
cacctctttcctgaagaaggcaatctcctccca

SEQ ID NO: 423672 - DNA, 33 bp, Homo sapien
cacctctttcctgaagcaggcaatctcctccca

SEQ ID NO: 423673 - DNA, 33 bp, Homo sapien
gagagcatccttatcacaagtccgggctctgga

SEQ ID NO: 423674 - DNA, 33 bp, Homo sapien
gagagcatccttatcagaagtccgggctctgga

SEQ ID NO: 423675 - DNA, 33 bp, Homo sapien
attttgtgctgggcctcacaaatcgtgtcactg

SEQ ID NO: 423676 - DNA, 33 bp, Homo sapien
attttgtgctgggccttacaaatcgtgtcactg

SEQ ID NO: 423677 - DNA, 33 bp, Homo sapien
ctttcatgtcactgaacacaaaatgaggctgca

SEQ ID NO: 423678 - DNA, 33 bp, Homo sapien
ctttcatgtcactgaatacaaaatgaggctgca

SEQ ID NO: 423679 - DNA, 33 bp, Homo sapien
cgttggcttacttggaacttgcttgtaataatt

SEQ ID NO: 423680 - DNA, 33 bp, Homo sapien
cgttggcttacttggagcttgcttgtaataatt

SEQ ID NO: 423681 - DNA, 33 bp, Homo sapien
agcttgggccagtccacacatggtgtttgcttt

SEQ ID NO: 423682 - DNA, 33 bp, Homo sapien
agcttgggccagtccatacatggtgtttgcttt

SEQ ID NO: 423683 - DNA, 33 bp, Homo sapien
atgtgtgtttgacggacacaggttgattagtac

SEQ ID NO: 423684 - DNA, 33 bp, Homo sapien
atgtgtgtttgacggatacaggttgattagtac

SEQ ID NO: 423685 - DNA, 33 bp, Homo sapien
tgctatgcatggcacacgggaatgacgtgatca

SEQ ID NO: 423686 - DNA, 33 bp, Homo sapien
tgctatgcatggcacaggggaatgacgtgatca

SEQ ID NO: 423687 - DNA, 33 bp, Homo sapien
aatgacgtgatcagtaataagaggaagaagaca

SEQ ID NO: 423688 - DNA, 33 bp, Homo sapien
aatgacgtgatcagtagtaagaggaagaagaca

SEQ ID NO: 423689 - DNA, 33 bp, Homo sapien
taaaccaaggtttcccaggattgtctaacttag

SEQ ID NO: 423690 - DNA, 33 bp, Homo sapien
taaaccaaggtttccctggattgtctaacttag

SEQ ID NO: 423691 - DNA, 33 bp, Homo sapien
ataaatgggagcgtgacattaaaagaagattaa

SEQ ID NO: 423692 - DNA, 33 bp, Homo sapien
ataaatgggagcgtgagattaaaagaagattaa

SEQ ID NO: 423693 - DNA, 33 bp, Homo sapien
ggtcaaatgctgacaactctctggaaataggcc

SEQ ID NO: 423694 - DNA, 33 bp, Homo sapien
ggtcaaatgctgacaattctctggaaataggcc

SEQ ID NO: 423695 - DNA, 33 bp, Homo sapien
tggaggcgacagggcccggaacaacaggagaaa

SEQ ID NO: 423696 - DNA, 33 bp, Homo sapien
tggaggcgacagggcctggaacaacaggagaaa

SEQ ID NO: 423697 - DNA, 33 bp, Homo sapien
agtgtcattgctgaagaagtcccagtaaatgag

SEQ ID NO: 423698 - DNA, 33 bp, Homo sapien
agtgtcattgctgaaggagtcccagtaaatgag

SEQ ID NO: 423699 - DNA, 33 bp, Homo sapien
gatgtctgtggccgcaatatcagaacgttataa

SEQ ID NO: 423700 - DNA, 33 bp, Homo sapien
gatgtctgtggccgcagtatcagaacgttataa

SEQ ID NO: 423701 - DNA, 33 bp, Homo sapien
gagcaaaatgtcaagaaatctagaggtggtgta

SEQ ID NO: 423702 - DNA, 33 bp, Homo sapien
gagcaaaatgtcaagagatctagaggtggtgta

SEQ ID NO: 423703 - DNA, 33 bp, Homo sapien
aacctactattgccaactatcagctttttgcct

SEQ ID NO: 423704 - DNA, 33 bp, Homo sapien
aacctactattgccaattatcagctttttgcct

SEQ ID NO: 423705 - DNA, 33 bp, Homo sapien
gctgtgggatgctctacctttgaaaatatgatc

SEQ ID NO: 423706 - DNA, 33 bp, Homo sapien
gctgtgggatgctctatctttgaaaatatgatc

SEQ ID NO: 423707 - DNA, 33 bp, Homo sapien
aaaagaaaaaaaatccccctgcacagatggggg

SEQ ID NO: 423708 - DNA, 33 bp, Homo sapien
aaaagaaaaaaaatcctcctgcacagatggggg

SEQ ID NO: 423709 - DNA, 33 bp, Homo sapien
ggtttggacaaagaaccgttctcgtcattgttt

SEQ ID NO: 423710 - DNA, 33 bp, Homo sapien
ggtttggacaaagaactgttctcgtcattgttt

SEQ ID NO: 423711 - DNA, 33 bp, Homo sapien
aaatttggagacaaaaactctcttctctgtcaa

SEQ ID NO: 423712 - DNA, 33 bp, Homo sapien
aaatttggagacaaaacctctcttctctgtcaa

SEQ ID NO: 423713 - DNA, 33 bp, Homo sapien
ctgtatacgatatatactactcaggtgataggt

SEQ ID NO: 423714 - DNA, 33 bp, Homo sapien
ctgtatacgatatatattactcaggtgataggt

SEQ ID NO: 423715 - DNA, 33 bp, Homo sapien
ttgggagagcggctccacagttgtttgtttcct

SEQ ID NO: 423716 - DNA, 33 bp, Homo sapien
ttgggagagcggctccgcagttgtttgtttcct

SEQ ID NO: 423717 - DNA, 33 bp, Homo sapien
gagatgacggctggataagcactcttcagaggg

SEQ ID NO: 423718 - DNA, 33 bp, Homo sapien
gagatgacggctggatgagcactcttcagaggg

SEQ ID NO: 423719 - DNA, 33 bp, Homo sapien
ataagaatgagccaccccctaatgagtgaactt

SEQ ID NO: 423720 - DNA, 33 bp, Homo sapien
ataagaatgagccaccgcctaatgagtgaactt

SEQ ID NO: 423721 - DNA, 33 bp, Homo sapien
ctacaaactactcagaagtgtggaaaataagaa

SEQ ID NO: 423722 - DNA, 33 bp, Homo sapien
ctacaaactactcagaggtgtggaaaataagaa

SEQ ID NO: 423723 - DNA, 33 bp, Homo sapien
ctgagtagtttgtagacgtaaagatgtggtccc

SEQ ID NO: 423724 - DNA, 33 bp, Homo sapien
ctgagtagtttgtagatgtaaagatgtggtccc

SEQ ID NO: 423725 - DNA, 33 bp, Homo sapien
aacctcacctcgtaaacaggtgttgacttttaa

SEQ ID NO: 423726 - DNA, 33 bp, Homo sapien
aacctcacctcgtaaataggtgttgacttttaa

SEQ ID NO: 423727 - DNA, 33 bp, Homo sapien
ctctttcagttttaaaagtctgaatcaaatccc

SEQ ID NO: 423728 - DNA, 33 bp, Homo sapien
ctctttcagttttaaacgtctgaatcaaatccc

SEQ ID NO: 423729 - DNA, 33 bp, Homo sapien
cctgctgtggtgaaaacgagatgttaggtcact

SEQ ID NO: 423730 - DNA, 33 bp, Homo sapien
cctgctgtggtgaaaatgagatgttaggtcact

SEQ ID NO: 423731 - DNA, 33 bp, Homo sapien
gctcctcttggaaacaactaggaccttcaacag

SEQ ID NO: 423732 - DNA, 33 bp, Homo sapien
gctcctcttggaaacagctaggaccttcaacag

SEQ ID NO: 423733 - DNA, 33 bp, Homo sapien
aggtgtcgcctgagagaagcatttgaagaccat

SEQ ID NO: 423734 - DNA, 33 bp, Homo sapien
aggtgtcgcctgagaggagcatttgaagaccat

SEQ ID NO: 423735 - DNA, 33 bp, Homo sapien
agtgcctttggagataagcatccataggcgatt

SEQ ID NO: 423736 - DNA, 33 bp, Homo sapien
agtgcctttggagataggcatccataggcgatt

SEQ ID NO: 423737 - DNA, 33 bp, Homo sapien
ctctgctctttctccaagagtcacattgctgta

SEQ ID NO: 423738 - DNA, 33 bp, Homo sapien
ctctgctctttctccaggagtcacattgctgta

SEQ ID NO: 423739 - DNA, 33 bp, Homo sapien
ctattctgttttgaaacggtaatgcaatgacaa

SEQ ID NO: 423740 - DNA, 33 bp, Homo sapien
ctattctgttttgaaatggtaatgcaatgacaa

SEQ ID NO: 423741 - DNA, 33 bp, Homo sapien
ctcagcatgttggtaaatgcttctcattggatt

SEQ ID NO: 423742 - DNA, 33 bp, Homo sapien
ctcagcatgttggtaagtgcttctcattggatt

SEQ ID NO: 423743 - DNA, 33 bp, Homo sapien
gcaaggccaaataccaggctccgctccatctaa

SEQ ID NO: 423744 - DNA, 33 bp, Homo sapien
gcaaggccaaataccatgctccgctccatctaa

SEQ ID NO: 423745 - DNA, 33 bp, Homo sapien
cagaggcggtgactgagagttgatggacataga

SEQ ID NO: 423746 - DNA, 33 bp, Homo sapien
cagaggcggtgactgatagttgatggacataga

SEQ ID NO: 423747 - DNA, 33 bp, Homo sapien
tcacccacagggataaacattgcctttgtaaag

SEQ ID NO: 423748 - DNA, 33 bp, Homo sapien
tcacccacagggataagcattgcctttgtaaag

SEQ ID NO: 423749 - DNA, 33 bp, Homo sapien
ccaggtgatcctgacactgctggtcacgttcag

SEQ ID NO: 423750 - DNA, 33 bp, Homo sapien
ccaggtgatcctgacattgctggtcacgttcag

SEQ ID NO: 423751 - DNA, 33 bp, Homo sapien
tgcagctgagattagaaaacgctcagatggcag

SEQ ID NO: 423752 - DNA, 33 bp, Homo sapien
tgcagctgagattagagaacgctcagatggcag

SEQ ID NO: 423753 - DNA, 33 bp, Homo sapien
atgagtgtattttaaacggaatctgttaaacca

SEQ ID NO: 423754 - DNA, 33 bp, Homo sapien
atgagtgtattttaaatggaatctgttaaacca

SEQ ID NO: 423755 - DNA, 33 bp, Homo sapien
caaacacatgcgaaaacaagggatgtgtctact

SEQ ID NO: 423756 - DNA, 33 bp, Homo sapien
caaacacatgcgaaaataagggatgtgtctact

SEQ ID NO: 423757 - DNA, 33 bp, Homo sapien
tgtattgctagccctgccaactgaagacaaact

SEQ ID NO: 423758 - DNA, 33 bp, Homo sapien
tgtattgctagccctggcaactgaagacaaact

SEQ ID NO: 423759 - DNA, 33 bp, Homo sapien
aaccaatcaaccaatcaaccatccaaccaatga

SEQ ID NO: 423760 - DNA, 33 bp, Homo sapien
aaccaatcaaccaatccaccatccaaccaatga

SEQ ID NO: 423761 - DNA, 33 bp, Homo sapien
agtcattaaatactgacggagctttgtctcagt

SEQ ID NO: 423762 - DNA, 33 bp, Homo sapien
agtcattaaatactgagggagctttgtctcagt

SEQ ID NO: 423763 - DNA, 33 bp, Homo sapien
agaggttcacttggctcaccattctgcaagctg

SEQ ID NO: 423764 - DNA, 33 bp, Homo sapien
agaggttcacttggcttaccattctgcaagctg

SEQ ID NO: 423765 - DNA, 33 bp, Homo sapien
aatagaactgaatgctaactatcccatacagtt

SEQ ID NO: 423766 - DNA, 33 bp, Homo sapien
aatagaactgaatgctgactatcccatacagtt

SEQ ID NO: 423767 - DNA, 33 bp, Homo sapien
gtgagtgtgtttgcacaagcaatcccgaattcc

SEQ ID NO: 423768 - DNA, 33 bp, Homo sapien
gtgagtgtgtttgcacgagcaatcccgaattcc

SEQ ID NO: 423769 - DNA, 33 bp, Homo sapien
gtgaagataccataaacttatagcaagcagtta

SEQ ID NO: 423770 - DNA, 33 bp, Homo sapien
gtgaagataccataaatttatagcaagcagtta

SEQ ID NO: 423771 - DNA, 33 bp, Homo sapien
ttcttctaccatatgacggcacttaaagactat

SEQ ID NO: 423772 - DNA, 33 bp, Homo sapien
ttcttctaccatatgatggcacttaaagactat

SEQ ID NO: 423773 - DNA, 33 bp, Homo sapien
aaaaatctggaaaataataatgactcaataaat

SEQ ID NO: 423774 - DNA, 33 bp, Homo sapien
aaaaatctggaaaatagtaatgactcaataaat

SEQ ID NO: 423775 - DNA, 33 bp, Homo sapien
gttcagattcaaactcactttgttcttgactgt

SEQ ID NO: 423776 - DNA, 33 bp, Homo sapien
gttcagattcaaactcgctttgttcttgactgt

SEQ ID NO: 423777 - DNA, 33 bp, Homo sapien
ggctttctgctttcacaagacggtctgcgcaga

SEQ ID NO: 423778 - DNA, 33 bp, Homo sapien
ggctttctgctttcacgagacggtctgcgcaga

SEQ ID NO: 423779 - DNA, 33 bp, Homo sapien
tcttcagctaccatcaggctatcatcacgccac

SEQ ID NO: 423780 - DNA, 33 bp, Homo sapien
tcttcagctaccatcatgctatcatcacgccac

SEQ ID NO: 423781 - DNA, 33 bp, Homo sapien
gccccggataaccccacagaatatagccagaga

SEQ ID NO: 423782 - DNA, 33 bp, Homo sapien
gccccggataaccccagagaatatagccagaga

SEQ ID NO: 423783 - DNA, 33 bp, Homo sapien
gttaagaaaatcagaaggtctagggatattgca

SEQ ID NO: 423784 - DNA, 33 bp, Homo sapien
gttaagaaaatcagaatgtctagggatattgca

SEQ ID NO: 423785 - DNA, 33 bp, Homo sapien
atgtgagtttctgaggacacagtctggcttgtt

SEQ ID NO: 423786 - DNA, 33 bp, Homo sapien
atgtgagtttctgagggcacagtctggcttgtt

SEQ ID NO: 423787 - DNA, 33 bp, Homo sapien
tctgtggtaagatgaaccagaagtcagttattt

SEQ ID NO: 423788 - DNA, 33 bp, Homo sapien
tctgtggtaagatgaatcagaagtcagttattt

SEQ ID NO: 423789 - DNA, 33 bp, Homo sapien
aggatccaattcaataccaagaatgtaaccacg

SEQ ID NO: 423790 - DNA, 33 bp, Homo sapien
aggatccaattcaatatcaagaatgtaaccacg

SEQ ID NO: 423791 - DNA, 33 bp, Homo sapien
gggaagtcctgccttacgttatttaactctcac

SEQ ID NO: 423792 - DNA, 33 bp, Homo sapien
gggaagtcctgccttatgttatttaactctcac

SEQ ID NO: 423793 - DNA, 33 bp, Homo sapien
tgcttagtgacaatgaaaaaggcattaaatgtg

SEQ ID NO: 423794 - DNA, 33 bp, Homo sapien
tgcttagtgacaatgagaaaggcattaaatgtg

SEQ ID NO: 423795 - DNA, 33 bp, Homo sapien
tatttaagtcatttccacttctgtaacacctga

SEQ ID NO: 423796 - DNA, 33 bp, Homo sapien
tatttaagtcatttcctcttctgtaacacctga

SEQ ID NO: 423797 - DNA, 33 bp, Homo sapien
aaaaataatgaccacactctaaaaacaaataga

SEQ ID NO: 423798 - DNA, 33 bp, Homo sapien
aaaaataatgaccacattctaaaaacaaataga

SEQ ID NO: 423799 - DNA, 33 bp, Homo sapien
aaaaattgaaaccagcaatgtggctgaattttc

SEQ ID NO: 423800 - DNA, 33 bp, Homo sapien
aaaaattgaaaccagcgatgtggctgaattttc

SEQ ID NO: 423801 - DNA, 33 bp, Homo sapien
ttaacttgtaacaacccgctgttgggagctaat

SEQ ID NO: 423802 - DNA, 33 bp, Homo sapien
ttaacttgtaacaacctgctgttgggagctaat

SEQ ID NO: 423803 - DNA, 33 bp, Homo sapien
ccaactcttcagaaccaaactttcaaaatcagg

SEQ ID NO: 423804 - DNA, 33 bp, Homo sapien
ccaactcttcagaaccgaactttcaaaatcagg

SEQ ID NO: 423805 - DNA, 33 bp, Homo sapien
gggttctaatagataagctacctgatcttggac

SEQ ID NO: 423806 - DNA, 33 bp, Homo sapien
gggttctaatagataatctacctgatcttggac

SEQ ID NO: 423807 - DNA, 33 bp, Homo sapien
caatgtctccttcccacggatttttcacctcaa

SEQ ID NO: 423808 - DNA, 33 bp, Homo sapien
caatgtctccttcccatggatttttcacctcaa

SEQ ID NO: 423809 - DNA, 33 bp, Homo sapien
ttaggaagacacaaaacaggcaaatgctttggg

SEQ ID NO: 423810 - DNA, 33 bp, Homo sapien
ttaggaagacacaaaagaggcaaatgctttggg

SEQ ID NO: 423811 - DNA, 33 bp, Homo sapien
gccttctctttgaaaccgcctgggaggagtgtg

SEQ ID NO: 423812 - DNA, 33 bp, Homo sapien
gccttctctttgaaacggcctgggaggagtgtg

SEQ ID NO: 423813 - DNA, 33 bp, Homo sapien
ttgtcattacgtgccacacaacagagaatctgt

SEQ ID NO: 423814 - DNA, 33 bp, Homo sapien
ttgtcattacgtgccatacaacagagaatctgt

SEQ ID NO: 423815 - DNA, 33 bp, Homo sapien
acttggctcatgtatcaaatgatgaacactcat

SEQ ID NO: 423816 - DNA, 33 bp, Homo sapien
acttggctcatgtatccaatgatgaacactcat

SEQ ID NO: 423817 - DNA, 33 bp, Homo sapien
aacacatggaaaaggactagtgtagacagatca

SEQ ID NO: 423818 - DNA, 33 bp, Homo sapien
aacacatggaaaaggattagtgtagacagatca

SEQ ID NO: 423819 - DNA, 33 bp, Homo sapien
catggtgtcagagacccaagttcaaatttgact

SEQ ID NO: 423820 - DNA, 33 bp, Homo sapien
catggtgtcagagacctaagttcaaatttgact

SEQ ID NO: 423821 - DNA, 33 bp, Homo sapien
ttcttattgtttttgaaatacggttgccatagc

SEQ ID NO: 423822 - DNA, 33 bp, Homo sapien
ttcttattgtttttgagatacggttgccatagc

SEQ ID NO: 423823 - DNA, 33 bp, Homo sapien
gcaaagtgtaataaaacgaggcgtgcctgtaca

SEQ ID NO: 423824 - DNA, 33 bp, Homo sapien
gcaaagtgtaataaaatgaggcgtgcctgtaca

SEQ ID NO: 423825 - DNA, 33 bp, Homo sapien
tctacaatattcataaaggccagaggattgtta

SEQ ID NO: 423826 - DNA, 33 bp, Homo sapien
tctacaatattcataacggccagaggattgtta

SEQ ID NO: 423827 - DNA, 33 bp, Homo sapien
ttatgcctgatgtccaacacaagcgacaaaata

SEQ ID NO: 423828 - DNA, 33 bp, Homo sapien
ttatgcctgatgtccagcacaagcgacaaaata

SEQ ID NO: 423829 - DNA, 33 bp, Homo sapien
cccaacactctgaacacgaactctgtcagacac

SEQ ID NO: 423830 - DNA, 33 bp, Homo sapien
cccaacactctgaacatgaactctgtcagacac

SEQ ID NO: 423831 - DNA, 33 bp, Homo sapien
tccatagaaccctgtaagtagttataccatccc

SEQ ID NO: 423832 - DNA, 33 bp, Homo sapien
tccatagaaccctgtacgtagttataccatccc

SEQ ID NO: 423833 - DNA, 33 bp, Homo sapien
aggcaactacatatcagggactcaaattcagct

SEQ ID NO: 423834 - DNA, 33 bp, Homo sapien
aggcaactacatatcatggactcaaattcagct

SEQ ID NO: 423835 - DNA, 33 bp, Homo sapien
ccagcctcttagttaactcaaggacacgaaaaa

SEQ ID NO: 423836 - DNA, 33 bp, Homo sapien
ccagcctcttagttaattcaaggacacgaaaaa

SEQ ID NO: 423837 - DNA, 33 bp, Homo sapien
gccccagaggaaataacgtggccatattcacac

SEQ ID NO: 423838 - DNA, 33 bp, Homo sapien
gccccagaggaaataatgtggccatattcacac

SEQ ID NO: 423839 - DNA, 33 bp, Homo sapien
tttagaaagtgccataactgaactgatttttaa

SEQ ID NO: 423840 - DNA, 33 bp, Homo sapien
tttagaaagtgccatagctgaactgatttttaa

SEQ ID NO: 423841 - DNA, 33 bp, Homo sapien
ttgcgaactgggtttgcagcacagatccactct

SEQ ID NO: 423842 - DNA, 33 bp, Homo sapien
ttgcgaactgggtttgtagcacagatccactct

SEQ ID NO: 423843 - DNA, 33 bp, Homo sapien
cattgggattatttcaacagggccccccttgtt

SEQ ID NO: 423844 - DNA, 33 bp, Homo sapien
cattgggattatttcagcagggccccccttgtt

SEQ ID NO: 423845 - DNA, 33 bp, Homo sapien
gtttttcttcactgcaactgtggggtatcagtt

SEQ ID NO: 423846 - DNA, 33 bp, Homo sapien
gtttttcttcactgcagctgtggggtatcagtt

SEQ ID NO: 423847 - DNA, 33 bp, Homo sapien
tcgcctctccaaaaaaaggcaatcagatatgca

SEQ ID NO: 423848 - DNA, 33 bp, Homo sapien
tcgcctctccaaaaaatggcaatcagatatgca

SEQ ID NO: 423849 - DNA, 33 bp, Homo sapien
tcaaaggaagaacaaaccccatttcagaatggg

SEQ ID NO: 423850 - DNA, 33 bp, Homo sapien
tcaaaggaagaacaaatcccatttcagaatggg

SEQ ID NO: 423851 - DNA, 33 bp, Homo sapien
ttatttccaggactccaagctcccctcaagaca

SEQ ID NO: 423852 - DNA, 33 bp, Homo sapien
ttatttccaggactccgagctcccctcaagaca

SEQ ID NO: 423853 - DNA, 33 bp, Homo sapien
catagcctgagggtccaacagctcaccctgaga

SEQ ID NO: 423854 - DNA, 33 bp, Homo sapien
catagcctgagggtccgacagctcaccctgaga

SEQ ID NO: 423855 - DNA, 33 bp, Homo sapien
cagcatctgccttgtaaaagtgtcgggggcttg

SEQ ID NO: 423856 - DNA, 33 bp, Homo sapien
cagcatctgccttgtagaagtgtcgggggcttg

SEQ ID NO: 423857 - DNA, 33 bp, Homo sapien
gaggaactccatccacgatcattttagggatac

SEQ ID NO: 423858 - DNA, 33 bp, Homo sapien
gaggaactccatccactatcattttagggatac

SEQ ID NO: 423859 - DNA, 33 bp, Homo sapien
atgaagtgttcgtgaacgtagcttcctgcttca

SEQ ID NO: 423860 - DNA, 33 bp, Homo sapien
atgaagtgttcgtgaatgtagcttcctgcttca

SEQ ID NO: 423861 - DNA, 33 bp, Homo sapien
gctcaacgataattgcactttgaacttttcctt

SEQ ID NO: 423862 - DNA, 33 bp, Homo sapien
gctcaacgataattgcgctttgaacttttcctt

SEQ ID NO: 423863 - DNA, 33 bp, Homo sapien
gtgaaatctcagcttacgctcaacgataattgc

SEQ ID NO: 423864 - DNA, 33 bp, Homo sapien
gtgaaatctcagcttaggctcaacgataattgc

SEQ ID NO: 423865 - DNA, 33 bp, Homo sapien
cagatgcaaaagaacacggaagaaaggacctca

SEQ ID NO: 423866 - DNA, 33 bp, Homo sapien
cagatgcaaaagaacatggaagaaaggacctca

SEQ ID NO: 423867 - DNA, 33 bp, Homo sapien
ccttctgttctagccactgacggcctctggtcc

SEQ ID NO: 423868 - DNA, 33 bp, Homo sapien
ccttctgttctagccagtgacggcctctggtcc

SEQ ID NO: 423869 - DNA, 33 bp, Homo sapien
cttctaagtgactcgtaaagatggggctagctg

SEQ ID NO: 423870 - DNA, 33 bp, Homo sapien
cttctaagtgactcgtcaagatggggctagctg

SEQ ID NO: 423871 - DNA, 33 bp, Homo sapien
ctgactcatcactcaccggctggatggtcttgg

SEQ ID NO: 423872 - DNA, 33 bp, Homo sapien
ctgactcatcactcactggctggatggtcttgg

SEQ ID NO: 423873 - DNA, 33 bp, Homo sapien
ctttgtttgatactgacagaaacatggtgtaag

SEQ ID NO: 423874 - DNA, 33 bp, Homo sapien
ctttgtttgatactgatagaaacatggtgtaag

SEQ ID NO: 423875 - DNA, 33 bp, Homo sapien
gtactggggcttctgaatatccttgtgttttta

SEQ ID NO: 423876 - DNA, 33 bp, Homo sapien
gtactggggcttctgagtatccttgtgttttta

SEQ ID NO: 423877 - DNA, 33 bp, Homo sapien
gtttggctttctctcacgtactcttctctccct

SEQ ID NO: 423878 - DNA, 33 bp, Homo sapien
gtttggctttctctcatgtactcttctctccct

SEQ ID NO: 423879 - DNA, 33 bp, Homo sapien
catatcatgaaaagccacgttaatgaatttctt

SEQ ID NO: 423880 - DNA, 33 bp, Homo sapien
catatcatgaaaagccgcgttaatgaatttctt

SEQ ID NO: 423881 - DNA, 33 bp, Homo sapien
tagcccacactggaccagatcctagaagaagca

SEQ ID NO: 423882 - DNA, 33 bp, Homo sapien
tagcccacactggaccggatcctagaagaagca

SEQ ID NO: 423883 - DNA, 33 bp, Homo sapien
caacataggctaagtaaagaccagtgaacagag

SEQ ID NO: 423884 - DNA, 33 bp, Homo sapien
caacataggctaagtagagaccagtgaacagag

SEQ ID NO: 423885 - DNA, 33 bp, Homo sapien
tgagtctgcatttccaaagcccctcttggctgt

SEQ ID NO: 423886 - DNA, 33 bp, Homo sapien
tgagtctgcatttccagagcccctcttggctgt

SEQ ID NO: 423887 - DNA, 33 bp, Homo sapien
ctgggacacatcagaagtccactttctttcctc

SEQ ID NO: 423888 - DNA, 33 bp, Homo sapien
ctgggacacatcagaattccactttctttcctc

SEQ ID NO: 423889 - DNA, 33 bp, Homo sapien
ggtggttggaaaagcactgaaatgtcactgact

SEQ ID NO: 423890 - DNA, 33 bp, Homo sapien
ggtggttggaaaagcattgaaatgtcactgact

SEQ ID NO: 423891 - DNA, 33 bp, Homo sapien
ataacaggtccaagagccaaatacagctaaatg

SEQ ID NO: 423892 - DNA, 33 bp, Homo sapien
ataacaggtccaagagtcaaatacagctaaatg

SEQ ID NO: 423893 - DNA, 33 bp, Homo sapien
tcacaaatgctttcacacttaactaaagttctt

SEQ ID NO: 423894 - DNA, 33 bp, Homo sapien
tcacaaatgctttcacgcttaactaaagttctt

SEQ ID NO: 423895 - DNA, 33 bp, Homo sapien
ccagagtgaactgctacggtgagagatgataga

SEQ ID NO: 423896 - DNA, 33 bp, Homo sapien
ccagagtgaactgctatggtgagagatgataga

SEQ ID NO: 423897 - DNA, 33 bp, Homo sapien
gaaatgagacatcagaccgtgggaattacaggg

SEQ ID NO: 423898 - DNA, 33 bp, Homo sapien
gaaatgagacatcagatcgtgggaattacaggg

SEQ ID NO: 423899 - DNA, 33 bp, Homo sapien
gtcacagaaggacccaatatggagagctatgct

SEQ ID NO: 423900 - DNA, 33 bp, Homo sapien
gtcacagaaggacccagtatggagagctatgct

SEQ ID NO: 423901 - DNA, 33 bp, Homo sapien
acagaatggacaagagcatgtggatgcccaggc

SEQ ID NO: 423902 - DNA, 33 bp, Homo sapien
acagaatggacaagagtatgtggatgcccaggc

SEQ ID NO: 423903 - DNA, 33 bp, Homo sapien
tctcctaaaacttgtcaaggcccagctagcacc

SEQ ID NO: 423904 - DNA, 33 bp, Homo sapien
tctcctaaaacttgtcgaggcccagctagcacc

SEQ ID NO: 423905 - DNA, 33 bp, Homo sapien
atctataatcctgagaaactgagctttaaataa

SEQ ID NO: 423906 - DNA, 33 bp, Homo sapien
atctataatcctgagatactgagctttaaataa

SEQ ID NO: 423907 - DNA, 33 bp, Homo sapien
agcccaggacattcacgccctggacacgcagga

SEQ ID NO: 423908 - DNA, 33 bp, Homo sapien
agcccaggacattcactccctggacacgcagga

SEQ ID NO: 423909 - DNA, 33 bp, Homo sapien
cgggtgaaaggcctcaaaaccagttgtattttc

SEQ ID NO: 423910 - DNA, 33 bp, Homo sapien
cgggtgaaaggcctcagaaccagttgtattttc

SEQ ID NO: 423911 - DNA, 33 bp, Homo sapien
ctcttcactcttccacacacagcttatacacaa

SEQ ID NO: 423912 - DNA, 33 bp, Homo sapien
ctcttcactcttccacccacagcttatacacaa

SEQ ID NO: 423913 - DNA, 33 bp, Homo sapien
aattcagagaacatcaaatatccttcctgcaaa

SEQ ID NO: 423914 - DNA, 33 bp, Homo sapien
aattcagagaacatcagatatccttcctgcaaa

SEQ ID NO: 423915 - DNA, 33 bp, Homo sapien
tttgatagaaatgtaaaacgtagtctaagtgtc

SEQ ID NO: 423916 - DNA, 33 bp, Homo sapien
tttgatagaaatgtaatacgtagtctaagtgtc

SEQ ID NO: 423917 - DNA, 33 bp, Homo sapien
acataccagatccacacgtcagctacccaggga

SEQ ID NO: 423918 - DNA, 33 bp, Homo sapien
acataccagatccacatgtcagctacccaggga

SEQ ID NO: 423919 - DNA, 33 bp, Homo sapien
gcaggcccagtcctccaaactcaggacgagctc

SEQ ID NO: 423920 - DNA, 33 bp, Homo sapien
gcaggcccagtcctccgaactcaggacgagctc

SEQ ID NO: 423921 - DNA, 33 bp, Homo sapien
aaagtttacaggcagaaaaaccatgcgtagact

SEQ ID NO: 423922 - DNA, 33 bp, Homo sapien
aaagtttacaggcagagaaaccatgcgtagact

SEQ ID NO: 423923 - DNA, 33 bp, Homo sapien
accaaggtgtttaaaagcttaccactgaagagt

SEQ ID NO: 423924 - DNA, 33 bp, Homo sapien
accaaggtgtttaaaatcttaccactgaagagt

SEQ ID NO: 423925 - DNA, 33 bp, Homo sapien
cagcaccagacactcaatccctgttgtgtattc

SEQ ID NO: 423926 - DNA, 33 bp, Homo sapien
cagcaccagacactcactccctgttgtgtattc

SEQ ID NO: 423927 - DNA, 33 bp, Homo sapien
gtgagcaggtggaggaacggaagagggtgaggg

SEQ ID NO: 423928 - DNA, 33 bp, Homo sapien
gtgagcaggtggaggagcggaagagggtgaggg

SEQ ID NO: 423929 - DNA, 33 bp, Homo sapien
tatacacaaaaaggcaccaggccaaagcttgcc

SEQ ID NO: 423930 - DNA, 33 bp, Homo sapien
tatacacaaaaaggcagcaggccaaagcttgcc

SEQ ID NO: 423931 - DNA, 33 bp, Homo sapien
tgtaggtgcggatggaaaaggtgtttctctctc

SEQ ID NO: 423932 - DNA, 33 bp, Homo sapien
tgtaggtgcggatggacaaggtgtttctctctc

SEQ ID NO: 423933 - DNA, 33 bp, Homo sapien
aatcaacaaaatgaaaaggcagccaatggatta

SEQ ID NO: 423934 - DNA, 33 bp, Homo sapien
aatcaacaaaatgaaacggcagccaatggatta

SEQ ID NO: 423935 - DNA, 33 bp, Homo sapien
aatcaaaacttaagaccataaaactcttaggag

SEQ ID NO: 423936 - DNA, 33 bp, Homo sapien
aatcaaaacttaagacgataaaactcttaggag

SEQ ID NO: 423937 - DNA, 33 bp, Homo sapien
aaatttgtatggaaccagaaaagacccttagtt

SEQ ID NO: 423938 - DNA, 33 bp, Homo sapien
aaatttgtatggaaccggaaaagacccttagtt

SEQ ID NO: 423939 - DNA, 33 bp, Homo sapien
ggaaaacaggtactccactcaagttacactcca

SEQ ID NO: 423940 - DNA, 33 bp, Homo sapien
ggaaaacaggtactccgctcaagttacactcca

SEQ ID NO: 423941 - DNA, 33 bp, Homo sapien
acagagcaagcacatgacataataccccaatat

SEQ ID NO: 423942 - DNA, 33 bp, Homo sapien
acagagcaagcacatggcataataccccaatat

SEQ ID NO: 423943 - DNA, 33 bp, Homo sapien
gaaggagtatagcagacgcctccgaaacaatgc

SEQ ID NO: 423944 - DNA, 33 bp, Homo sapien
gaaggagtatagcagatgcctccgaaacaatgc

SEQ ID NO: 423945 - DNA, 33 bp, Homo sapien
aggtgttgaagcctccaactacaataatagatt

SEQ ID NO: 423946 - DNA, 33 bp, Homo sapien
aggtgttgaagcctccgactacaataatagatt

SEQ ID NO: 423947 - DNA, 33 bp, Homo sapien
acactggttctgtaaggaggtgagcaagtttgc

SEQ ID NO: 423948 - DNA, 33 bp, Homo sapien
acactggttctgtaagtaggtgagcaagtttgc

SEQ ID NO: 423949 - DNA, 33 bp, Homo sapien
cctctacgtgctttgccaaatgtgctttgctaa

SEQ ID NO: 423950 - DNA, 33 bp, Homo sapien
cctctacgtgctttgctaaatgtgctttgctaa

SEQ ID NO: 423951 - DNA, 33 bp, Homo sapien
ctgcagttgttgggctaaaattattctgggcct

SEQ ID NO: 423952 - DNA, 33 bp, Homo sapien
ctgcagttgttgggcttaaattattctgggcct

SEQ ID NO: 423953 - DNA, 33 bp, Homo sapien
gtgaaagtgacagttccagtgagtaaagatgct

SEQ ID NO: 423954 - DNA, 33 bp, Homo sapien
gtgaaagtgacagttctagtgagtaaagatgct

SEQ ID NO: 423955 - DNA, 33 bp, Homo sapien
gctgaattctaccatcaacttattgaacttgag

SEQ ID NO: 423956 - DNA, 33 bp, Homo sapien
gctgaattctaccatccacttattgaacttgag

SEQ ID NO: 423957 - DNA, 33 bp, Homo sapien
gggccccaagagactaaagaagtttcagaagag

SEQ ID NO: 423958 - DNA, 33 bp, Homo sapien
gggccccaagagactagagaagtttcagaagag

SEQ ID NO: 423959 - DNA, 33 bp, Homo sapien
tttaatccgtgcaaaaaagaaaccaacactcct

SEQ ID NO: 423960 - DNA, 33 bp, Homo sapien
tttaatccgtgcaaaagagaaaccaacactcct

SEQ ID NO: 423961 - DNA, 33 bp, Homo sapien
taacaccatccacatagagtaaacaacaaataa

SEQ ID NO: 423962 - DNA, 33 bp, Homo sapien
taacaccatccacatatagtaaacaacaaataa

SEQ ID NO: 423963 - DNA, 33 bp, Homo sapien
ttttaactttggtttcaacataagatgttttct

SEQ ID NO: 423964 - DNA, 33 bp, Homo sapien
ttttaactttggtttctacataagatgttttct

SEQ ID NO: 423965 - DNA, 33 bp, Homo sapien
agttatgtagcatgaacgtggaataacccatca

SEQ ID NO: 423966 - DNA, 33 bp, Homo sapien
agttatgtagcatgaatgtggaataacccatca

SEQ ID NO: 423967 - DNA, 33 bp, Homo sapien
aaccgctgtatttttccatcatccagccagtgc

SEQ ID NO: 423968 - DNA, 33 bp, Homo sapien
aaccgctgtatttttctatcatccagccagtgc

SEQ ID NO: 423969 - DNA, 33 bp, Homo sapien
atgcgtgggtcccaaaagcatcacatgcagttg

SEQ ID NO: 423970 - DNA, 33 bp, Homo sapien
atgcgtgggtcccaaaggcatcacatgcagttg

SEQ ID NO: 423971 - DNA, 33 bp, Homo sapien
atttcagctttgcctgaaaactgtggtcttata

SEQ ID NO: 423972 - DNA, 33 bp, Homo sapien
atttcagctttgcctggaaactgtggtcttata

SEQ ID NO: 423973 - DNA, 33 bp, Homo sapien
tcccctgaaggttaataacaaccaggataagtc

SEQ ID NO: 423974 - DNA, 33 bp, Homo sapien
tcccctgaaggttaatgacaaccaggataagtc

SEQ ID NO: 423975 - DNA, 33 bp, Homo sapien
attacatatttctctccgacatggtttgactta

SEQ ID NO: 423976 - DNA, 33 bp, Homo sapien
attacatatttctctctgacatggtttgactta

SEQ ID NO: 423977 - DNA, 33 bp, Homo sapien
gtactaggaagaacccacacttttgatctcaat

SEQ ID NO: 423978 - DNA, 33 bp, Homo sapien
gtactaggaagaaccctcacttttgatctcaat

SEQ ID NO: 423979 - DNA, 33 bp, Homo sapien
gaatattagtgaaagagccagtggctgacaccc

SEQ ID NO: 423980 - DNA, 33 bp, Homo sapien
gaatattagtgaaagatccagtggctgacaccc

SEQ ID NO: 423981 - DNA, 33 bp, Homo sapien
tgatgtaacatcaacaagtgccagtaataccct

SEQ ID NO: 423982 - DNA, 33 bp, Homo sapien
tgatgtaacatcaacacgtgccagtaataccct

SEQ ID NO: 423983 - DNA, 33 bp, Homo sapien
ccttatagaaggtatccaggagatgaagccagg

SEQ ID NO: 423984 - DNA, 33 bp, Homo sapien
ccttatagaaggtatctaggagatgaagccagg

SEQ ID NO: 423985 - DNA, 33 bp, Homo sapien
gcttctgctgctctacaactgaaggccctccta

SEQ ID NO: 423986 - DNA, 33 bp, Homo sapien
gcttctgctgctctacgactgaaggccctccta

SEQ ID NO: 423987 - DNA, 33 bp, Homo sapien
cagagtcacaccgatacagtgaaaacctcgttg

SEQ ID NO: 423988 - DNA, 33 bp, Homo sapien
cagagtcacaccgatatagtgaaaacctcgttg

SEQ ID NO: 423989 - DNA, 33 bp, Homo sapien
caaatcttattcttccacttacacatgtatatt

SEQ ID NO: 423990 - DNA, 33 bp, Homo sapien
caaatcttattcttcctcttacacatgtatatt

SEQ ID NO: 423991 - DNA, 33 bp, Homo sapien
ctccttactgcttggccctctgtatacggcatt

SEQ ID NO: 423992 - DNA, 33 bp, Homo sapien
ctccttactgcttggctctctgtatacggcatt

SEQ ID NO: 423993 - DNA, 33 bp, Homo sapien
agttgaccagaaatctaagacaagtgtccctgg

SEQ ID NO: 423994 - DNA, 33 bp, Homo sapien
agttgaccagaaatctgagacaagtgtccctgg

SEQ ID NO: 423995 - DNA, 33 bp, Homo sapien
gtttttatcccttcataactgacgagtagacag

SEQ ID NO: 423996 - DNA, 33 bp, Homo sapien
gtttttatcccttcatcactgacgagtagacag

SEQ ID NO: 423997 - DNA, 33 bp, Homo sapien
gaggagtgtttgtgcaaggcggccaagggaagg

SEQ ID NO: 423998 - DNA, 33 bp, Homo sapien
gaggagtgtttgtgcagggcggccaagggaagg

SEQ ID NO: 423999 - DNA, 33 bp, Homo sapien
agccctgaaaaataaaagtggaaagttagccaa

SEQ ID NO: 424000 - DNA, 33 bp, Homo sapien
agccctgaaaaataaaggtggaaagttagccaa

SEQ ID NO: 424001 - DNA, 33 bp, Homo sapien
tggcagatcacctggacgttgtgcagctggtag

SEQ ID NO: 424002 - DNA, 33 bp, Homo sapien
tggcagatcacctggatgttgtgcagctggtag

SEQ ID NO: 424003 - DNA, 33 bp, Homo sapien
gcatgctctttttctgaagttctcaggtactcc

SEQ ID NO: 424004 - DNA, 33 bp, Homo sapien
gcatgctctttttctgcagttctcaggtactcc

SEQ ID NO: 424005 - DNA, 33 bp, Homo sapien
cctttccagaaataaacagtggcagggaacaga

SEQ ID NO: 424006 - DNA, 33 bp, Homo sapien
cctttccagaaataaatagtggcagggaacaga

SEQ ID NO: 424007 - DNA, 33 bp, Homo sapien
agctgatgagaatatacaatggtccagccacta

SEQ ID NO: 424008 - DNA, 33 bp, Homo sapien
agctgatgagaatatagaatggtccagccacta

SEQ ID NO: 424009 - DNA, 33 bp, Homo sapien
tgacagtacagacctacgcaaacatttcaggtg

SEQ ID NO: 424010 - DNA, 33 bp, Homo sapien
tgacagtacagacctatgcaaacatttcaggtg

SEQ ID NO: 424011 - DNA, 33 bp, Homo sapien
gcttggcattttctcacaaatctagaaattggt

SEQ ID NO: 424012 - DNA, 33 bp, Homo sapien
gcttggcattttctcataaatctagaaattggt

SEQ ID NO: 424013 - DNA, 33 bp, Homo sapien
tcattcagctgttacaatggaattcagaaacac

SEQ ID NO: 424014 - DNA, 33 bp, Homo sapien
tcattcagctgttacactggaattcagaaacac

SEQ ID NO: 424015 - DNA, 33 bp, Homo sapien
gcagggtaagattgggaagacagtctgagaaac

SEQ ID NO: 424016 - DNA, 33 bp, Homo sapien
gcagggtaagattgggtagacagtctgagaaac

SEQ ID NO: 424017 - DNA, 33 bp, Homo sapien
aagcaatactattcgtcacagcattctctgcca

SEQ ID NO: 424018 - DNA, 33 bp, Homo sapien
aagcaatactattcgttacagcattctctgcca

SEQ ID NO: 424019 - DNA, 33 bp, Homo sapien
gaaatacatatgcgaccgcaagaggaaaagatc

SEQ ID NO: 424020 - DNA, 33 bp, Homo sapien
gaaatacatatgcgactgcaagaggaaaagatc

SEQ ID NO: 424021 - DNA, 33 bp, Homo sapien
cccttaacctcagaaacctccacttttatcatc

SEQ ID NO: 424022 - DNA, 33 bp, Homo sapien
cccttaacctcagaaagctccacttttatcatc

SEQ ID NO: 424023 - DNA, 33 bp, Homo sapien
agaatgtttgaaaggtaaaatcgcccatctgct

SEQ ID NO: 424024 - DNA, 33 bp, Homo sapien
agaatgtttgaaaggtgaaatcgcccatctgct

SEQ ID NO: 424025 - DNA, 33 bp, Homo sapien
ctggctcaggagctgaaggtcactcaaacctga

SEQ ID NO: 424026 - DNA, 33 bp, Homo sapien
ctggctcaggagctgagggtcactcaaacctga

SEQ ID NO: 424027 - DNA, 33 bp, Homo sapien
caaggtctccaggccaatgagggaaggtgcctt

SEQ ID NO: 424028 - DNA, 33 bp, Homo sapien
caaggtctccaggccagtgagggaaggtgcctt

SEQ ID NO: 424029 - DNA, 33 bp, Homo sapien
acttctgcccagaggagccctcacgtaactgtg

SEQ ID NO: 424030 - DNA, 33 bp, Homo sapien
acttctgcccagaggatccctcacgtaactgtg

SEQ ID NO: 424031 - DNA, 33 bp, Homo sapien
tatgaatctacatatccagaaaactcaatgaac

SEQ ID NO: 424032 - DNA, 33 bp, Homo sapien
tatgaatctacatatctagaaaactcaatgaac

SEQ ID NO: 424033 - DNA, 33 bp, Homo sapien
gaagggagaataacgaaaaggagcagaaacaat

SEQ ID NO: 424034 - DNA, 33 bp, Homo sapien
gaagggagaataacgacaaggagcagaaacaat

SEQ ID NO: 424035 - DNA, 33 bp, Homo sapien
gtatagcaaaaacagaacagataagataaatag

SEQ ID NO: 424036 - DNA, 33 bp, Homo sapien
gtatagcaaaaacagagcagataagataaatag

SEQ ID NO: 424037 - DNA, 33 bp, Homo sapien
gacatggaaaattctccatcagttacagcattg

SEQ ID NO: 424038 - DNA, 33 bp, Homo sapien
gacatggaaaattctctatcagttacagcattg

SEQ ID NO: 424039 - DNA, 33 bp, Homo sapien
taaatgaatgcaataagatcaaagccaagaata

SEQ ID NO: 424040 - DNA, 33 bp, Homo sapien
taaatgaatgcaataatatcaaagccaagaata

SEQ ID NO: 424041 - DNA, 33 bp, Homo sapien
ttacgcaagtcataaactcgaggtctcattccc

SEQ ID NO: 424042 - DNA, 33 bp, Homo sapien
ttacgcaagtcataaattcgaggtctcattccc

SEQ ID NO: 424043 - DNA, 33 bp, Homo sapien
caaccttcaggctcagaatgcaccctgtaacat

SEQ ID NO: 424044 - DNA, 33 bp, Homo sapien
caaccttcaggctcaggatgcaccctgtaacat

SEQ ID NO: 424045 - DNA, 33 bp, Homo sapien
agtgtaacatttataggaggacaaaaatctata

SEQ ID NO: 424046 - DNA, 33 bp, Homo sapien
agtgtaacatttatagtaggacaaaaatctata

SEQ ID NO: 424047 - DNA, 33 bp, Homo sapien
atattctgtgcaaaaaactccagtacttaccta

SEQ ID NO: 424048 - DNA, 33 bp, Homo sapien
atattctgtgcaaaaagctccagtacttaccta

SEQ ID NO: 424049 - DNA, 33 bp, Homo sapien
agtctggacatcaacacctacattcaaagatct

SEQ ID NO: 424050 - DNA, 33 bp, Homo sapien
agtctggacatcaacagctacattcaaagatct

SEQ ID NO: 424051 - DNA, 33 bp, Homo sapien
ggacacatagggaacagtcagtaaataggagcc

SEQ ID NO: 424052 - DNA, 33 bp, Homo sapien
ggacacatagggaacattcagtaaataggagcc

SEQ ID NO: 424053 - DNA, 33 bp, Homo sapien
gctattgatatagctccaacgaatggaggaaca

SEQ ID NO: 424054 - DNA, 33 bp, Homo sapien
gctattgatatagctcgaacgaatggaggaaca

SEQ ID NO: 424055 - DNA, 33 bp, Homo sapien
ggtgtaccaagtgtcacggccacctccagataa

SEQ ID NO: 424056 - DNA, 33 bp, Homo sapien
ggtgtaccaagtgtcatggccacctccagataa

SEQ ID NO: 424057 - DNA, 33 bp, Homo sapien
tttattgatgaaaacaagtcataaggcaagttc

SEQ ID NO: 424058 - DNA, 33 bp, Homo sapien
tttattgatgaaaacatgtcataaggcaagttc

SEQ ID NO: 424059 - DNA, 33 bp, Homo sapien
caacttcccatttagaacacttatcacggcttg

SEQ ID NO: 424060 - DNA, 33 bp, Homo sapien
caacttcccatttagagcacttatcacggcttg

SEQ ID NO: 424061 - DNA, 33 bp, Homo sapien
ataatccgcgcccaacccaaataatcgctctaa

SEQ ID NO: 424062 - DNA, 33 bp, Homo sapien
ataatccgcgcccaacgcaaataatcgctctaa

SEQ ID NO: 424063 - DNA, 33 bp, Homo sapien
ttcttgactgacatacaattaatacccaaaagg

SEQ ID NO: 424064 - DNA, 33 bp, Homo sapien
ttcttgactgacatacgattaatacccaaaagg

SEQ ID NO: 424065 - DNA, 33 bp, Homo sapien
ggagatgcagaaactaccagaggccgttcagct

SEQ ID NO: 424066 - DNA, 33 bp, Homo sapien
ggagatgcagaaactatcagaggccgttcagct

SEQ ID NO: 424067 - DNA, 33 bp, Homo sapien
accaaacccagcttataaattgactttgttcca

SEQ ID NO: 424068 - DNA, 33 bp, Homo sapien
accaaacccagcttatgaattgactttgttcca

SEQ ID NO: 424069 - DNA, 33 bp, Homo sapien
atctacttacatcttaaagcatttgaggtcaat

SEQ ID NO: 424070 - DNA, 33 bp, Homo sapien
atctacttacatcttacagcatttgaggtcaat

SEQ ID NO: 424071 - DNA, 33 bp, Homo sapien
catgtctcatacttaaaatttttccatcagatc

SEQ ID NO: 424072 - DNA, 33 bp, Homo sapien
catgtctcatacttaacatttttccatcagatc

SEQ ID NO: 424073 - DNA, 33 bp, Homo sapien
agcataggaaatgttacctgcctctgttgattc

SEQ ID NO: 424074 - DNA, 33 bp, Homo sapien
agcataggaaatgttatctgcctctgttgattc

SEQ ID NO: 424075 - DNA, 33 bp, Homo sapien
gggtttgctactgcagcctgagaacatcctggg

SEQ ID NO: 424076 - DNA, 33 bp, Homo sapien
gggtttgctactgcaggctgagaacatcctggg

SEQ ID NO: 424077 - DNA, 33 bp, Homo sapien
tgaaaactaacgatgccctctgtaaactgtaaa

SEQ ID NO: 424078 - DNA, 33 bp, Homo sapien
tgaaaactaacgatgcgctctgtaaactgtaaa

SEQ ID NO: 424079 - DNA, 33 bp, Homo sapien
cgaagaggaatgatcaccaaagaggaagctagt

SEQ ID NO: 424080 - DNA, 33 bp, Homo sapien
cgaagaggaatgatcatcaaagaggaagctagt

SEQ ID NO: 424081 - DNA, 33 bp, Homo sapien
tttgggagtcagaatacggatcgaggtgagtca

SEQ ID NO: 424082 - DNA, 33 bp, Homo sapien
tttgggagtcagaatatggatcgaggtgagtca

SEQ ID NO: 424083 - DNA, 33 bp, Homo sapien
gctgatttattgaaacactgacatcattgatac

SEQ ID NO: 424084 - DNA, 33 bp, Homo sapien
gctgatttattgaaacgctgacatcattgatac

SEQ ID NO: 424085 - DNA, 33 bp, Homo sapien
taaagcttactacagacgacagatacacccaaa

SEQ ID NO: 424086 - DNA, 33 bp, Homo sapien
taaagcttactacagatgacagatacacccaaa

SEQ ID NO: 424087 - DNA, 33 bp, Homo sapien
gaattctaccagccccacgtgtgtcccatggtc

SEQ ID NO: 424088 - DNA, 33 bp, Homo sapien
gaattctaccagccccgcgtgtgtcccatggtc

SEQ ID NO: 424089 - DNA, 33 bp, Homo sapien
atgaaagcataccacaaagacatgaccacgaaa

SEQ ID NO: 424090 - DNA, 33 bp, Homo sapien
atgaaagcataccacagagacatgaccacgaaa

SEQ ID NO: 424091 - DNA, 33 bp, Homo sapien
gaacaccctggcagcccctctttggctaattcc

SEQ ID NO: 424092 - DNA, 33 bp, Homo sapien
gaacaccctggcagccgctctttggctaattcc

SEQ ID NO: 424093 - DNA, 33 bp, Homo sapien
ccctccactgacagcacccttgtttacagttcc

SEQ ID NO: 424094 - DNA, 33 bp, Homo sapien
ccctccactgacagcatccttgtttacagttcc

SEQ ID NO: 424095 - DNA, 33 bp, Homo sapien
cattctcatggggaacactgtttacttcctgat

SEQ ID NO: 424096 - DNA, 33 bp, Homo sapien
cattctcatggggaactctgtttacttcctgat

SEQ ID NO: 424097 - DNA, 33 bp, Homo sapien
ggcggccttcatgtgcaactcctccatgtctca

SEQ ID NO: 424098 - DNA, 33 bp, Homo sapien
ggcggccttcatgtgcgactcctccatgtctca

SEQ ID NO: 424099 - DNA, 33 bp, Homo sapien
tgctggagtgagaaataaatggtctctttcaat

SEQ ID NO: 424100 - DNA, 33 bp, Homo sapien
tgctggagtgagaaatcaatggtctctttcaat

SEQ ID NO: 424101 - DNA, 33 bp, Homo sapien
atcatctttaaacaacacggcaccctcatagcc

SEQ ID NO: 424102 - DNA, 33 bp, Homo sapien
atcatctttaaacaacgcggcaccctcatagcc

SEQ ID NO: 424103 - DNA, 33 bp, Homo sapien; identical to SEQ ID NO: 424101

SEQ ID NO: 424104 - DNA, 33 bp, Homo sapien; identical to SEQ ID NO: 424102

SEQ ID NO: 424105 - DNA, 33 bp, Homo sapien
tgtaaaatagataataaatgcagtaccaacata

SEQ ID NO: 424106 - DNA, 33 bp, Homo sapien
tgtaaaatagataatagatgcagtaccaacata

SEQ ID NO: 424107 - DNA, 33 bp, Homo sapien
ttttcatacagattaccgaaacattaaaaatac

SEQ ID NO: 424108 - DNA, 33 bp, Homo sapien
ttttcatacagattactgaaacattaaaaatac

SEQ ID NO: 424109 - DNA, 33 bp, Homo sapien
gctgggtttcaaaaccagcagtgtgagtaatgg

SEQ ID NO: 424110 - DNA, 33 bp, Homo sapien
gctgggtttcaaaaccggcagtgtgagtaatgg

SEQ ID NO: 424111 - DNA, 33 bp, Homo sapien
cccagataacttttgaaacccaagttttgttga

SEQ ID NO: 424112 - DNA, 33 bp, Homo sapien
cccagataacttttgacacccaagttttgttga

SEQ ID NO: 424113 - DNA, 33 bp, Homo sapien; identical to SEQ ID NO: 424111

SEQ ID NO: 424114 - DNA, 33 bp, Homo sapien; identical to SEQ ID NO: 424112

SEQ ID NO: 424115 - DNA, 33 bp, Homo sapien
gcgtaagtttcctccaagcaaggcaaaaacaaa

SEQ ID NO: 424116 - DNA, 33 bp, Homo sapien
gcgtaagtttcctccacgcaaggcaaaaacaaa

SEQ ID NO: 424117 - DNA, 33 bp, Homo sapien
taaggtgctcgcagaacgttggtcactacactc

SEQ ID NO: 424118 - DNA, 33 bp, Homo sapien
taaggtgctcgcagaatgttggtcactacactc

SEQ ID NO: 424119 - DNA, 33 bp, Homo sapien
aatgtgtcgggtaaacagcacagcaggatatca

SEQ ID NO: 424120 - DNA, 33 bp, Homo sapien
aatgtgtcgggtaaacggcacagcaggatatca

SEQ ID NO: 424121 - DNA, 33 bp, Homo sapien
agccccaggttctaaacaagtcatcatccaact

SEQ ID NO: 424122 - DNA, 33 bp, Homo sapien
agccccaggttctaaataagtcatcatccaact

SEQ ID NO: 424123 - DNA, 33 bp, Homo sapien
actgaggaaggcgacaagcatgtagaggacatg

SEQ ID NO: 424124 - DNA, 33 bp, Homo sapien
actgaggaaggcgacaggcatgtagaggacatg

SEQ ID NO: 424125 - DNA, 33 bp, Homo sapien
aaatccaggagtttgccgacttgaggctcggtg

SEQ ID NO: 424126 - DNA, 33 bp, Homo sapien
aaatccaggagtttgctgacttgaggctcggtg

SEQ ID NO: 424127 - DNA, 33 bp, Homo sapien
accagctgtcagtgtcaaatgtccccaagtctc

SEQ ID NO: 424128 - DNA, 33 bp, Homo sapien
accagctgtcagtgtctaatgtccccaagtctc

SEQ ID NO: 424129 - DNA, 33 bp, Homo sapien
tctgttaaagcattgaccttaataatagtcgta

SEQ ID NO: 424130 - DNA, 33 bp, Homo sapien
tctgttaaagcattgatcttaataatagtcgta

SEQ ID NO: 424131 - DNA, 33 bp, Homo sapien
ccaggccaccaagcatcaaagtctgattctgtg

SEQ ID NO: 424132 - DNA, 33 bp, Homo sapien
ccaggccaccaagcatgaaagtctgattctgtg

SEQ ID NO: 424133 - DNA, 33 bp, Homo sapien
gctaaaaagatcatacaaaaatttcataatgtt

SEQ ID NO: 424134 - DNA, 33 bp, Homo sapien
gctaaaaagatcataccaaaatttcataatgtt

SEQ ID NO: 424135 - DNA, 33 bp, Homo sapien
atgttggagaatgaatgaatgtgtgccagataa

SEQ ID NO: 424136 - DNA, 33 bp, Homo sapien
atgttggagaatgaattaatgtgtgccagataa

SEQ ID NO: 424137 - DNA, 33 bp, Homo sapien
aatacagtggattttgaaatgcaaaaataaaaa

SEQ ID NO: 424138 - DNA, 33 bp, Homo sapien
aatacagtggattttggaatgcaaaaataaaaa

SEQ ID NO: 424139 - DNA, 33 bp, Homo sapien
acaaagccagttgaaaattatggaccagcagag

SEQ ID NO: 424140 - DNA, 33 bp, Homo sapien
acaaagccagttgaaagttatggaccagcagag

SEQ ID NO: 424141 - DNA, 33 bp, Homo sapien
ataaaatggtgacacaaataaattcaatatata

SEQ ID NO: 424142 - DNA, 33 bp, Homo sapien
ataaaatggtgacacacataaattcaatatata

SEQ ID NO: 424143 - DNA, 33 bp, Homo sapien
cagcctagatccaaaggatggagtaaatgatag

SEQ ID NO: 424144 - DNA, 33 bp, Homo sapien
cagcctagatccaaagtatggagtaaatgatag

SEQ ID NO: 424145 - DNA, 33 bp, Homo sapien
catcacctgtgtgcccacgtagcaagttaacta

SEQ ID NO: 424146 - DNA, 33 bp, Homo sapien
catcacctgtgtgcccgcgtagcaagttaacta

SEQ ID NO: 424147 - DNA, 33 bp, Homo sapien
cgtaagagttccacaacgattcccactgctgaa

SEQ ID NO: 424148 - DNA, 33 bp, Homo sapien
cgtaagagttccacaatgattcccactgctgaa

SEQ ID NO: 424149 - DNA, 33 bp, Homo sapien
acacgtcagtcacggcactatactccgggtgga

SEQ ID NO: 424150 - DNA, 33 bp, Homo sapien
acacgtcagtcacggcgctatactccgggtgga

SEQ ID NO: 424151 - DNA, 33 bp, Homo sapien
cttgcttgaagcataacagaatggtatgatgcc

SEQ ID NO: 424152 - DNA, 33 bp, Homo sapien
cttgcttgaagcataatagaatggtatgatgcc

SEQ ID NO: 424153 - DNA, 33 bp, Homo sapien
acctgatgcctagggccaaggtgggaagtaaat

SEQ ID NO: 424154 - DNA, 33 bp, Homo sapien
acctgatgcctagggctaaggtgggaagtaaat

SEQ ID NO: 424155 - DNA, 33 bp, Homo sapien
ggtcccagagcaaagacagggcaaaggttagac

SEQ ID NO: 424156 - DNA, 33 bp, Homo sapien
ggtcccagagcaaagatagggcaaaggttagac

SEQ ID NO: 424157 - DNA, 33 bp, Homo sapien
gccagtggcacctgaaagtggcgttgaactgaa

SEQ ID NO: 424158 - DNA, 33 bp, Homo sapien
gccagtggcacctgaacgtggcgttgaactgaa

SEQ ID NO: 424159 - DNA, 33 bp, Homo sapien
agacaatatgatccacacacattgtggctgtct

SEQ ID NO: 424160 - DNA, 33 bp, Homo sapien
agacaatatgatccacgcacattgtggctgtct

SEQ ID NO: 424161 - DNA, 33 bp, Homo sapien
gttaagttcatttagcggacattttttccaaca

SEQ ID NO: 424162 - DNA, 33 bp, Homo sapien
gttaagttcatttagctgacattttttccaaca

SEQ ID NO: 424163 - DNA, 33 bp, Homo sapien
taaacgtaaacgtaaagttccatacgtcgcaac

SEQ ID NO: 424164 - DNA, 33 bp, Homo sapien
taaacgtaaacgtaaatttccatacgtcgcaac

SEQ ID NO: 424165 - DNA, 33 bp, Homo sapien
gttagactctgaaatacgtactcttatctgaat

SEQ ID NO: 424166 - DNA, 33 bp, Homo sapien
gttagactctgaaatatgtactcttatctgaat

SEQ ID NO: 424167 - DNA, 33 bp, Homo sapien
taaacactgagattctcaaatgcatagactgta

SEQ ID NO: 424168 - DNA, 33 bp, Homo sapien
taaacactgagattctgaaatgcatagactgta

SEQ ID NO: 424169 - DNA, 33 bp, Homo sapien
actgcagggatgcaccaagatacacggctgcca

SEQ ID NO: 424170 - DNA, 33 bp, Homo sapien
actgcagggatgcaccgagatacacggctgcca

SEQ ID NO: 424171 - DNA, 33 bp, Homo sapien
cctctgtgagatgtaactgttctcaggacagca

SEQ ID NO: 424172 - DNA, 33 bp, Homo sapien
cctctgtgagatgtaattgttctcaggacagca

SEQ ID NO: 424173 - DNA, 33 bp, Homo sapien
taaaagttactccaaacgtgcctgcctcttctg

SEQ ID NO: 424174 - DNA, 33 bp, Homo sapien
taaaagttactccaaatgtgcctgcctcttctg

SEQ ID NO: 424175 - DNA, 33 bp, Homo sapien
ggaggtaaatgagagagaagtaggactggcaaa

SEQ ID NO: 424176 - DNA, 33 bp, Homo sapien
ggaggtaaatgagagataagtaggactggcaaa

SEQ ID NO: 424177 - DNA, 33 bp, Homo sapien
attcctgacacattatcaagtgaaaaacaacag

SEQ ID NO: 424178 - DNA, 33 bp, Homo sapien
attcctgacacattattaagtgaaaaacaacag

SEQ ID NO: 424179 - DNA, 33 bp, Homo sapien
tgtgcaagtactgctacagaataagccaaacac

SEQ ID NO: 424180 - DNA, 33 bp, Homo sapien
tgtgcaagtactgctatagaataagccaaacac

SEQ ID NO: 424181 - DNA, 33 bp, Homo sapien
agtgttacatatcatactacagatcagtcccac

SEQ ID NO: 424182 - DNA, 33 bp, Homo sapien
agtgttacatatcatagtacagatcagtcccac

SEQ ID NO: 424183 - DNA, 33 bp, Homo sapien
atgagagcgtgtgaaaaaacaattcacagacca

SEQ ID NO: 424184 - DNA, 33 bp, Homo sapien
atgagagcgtgtgaaagaacaattcacagacca

SEQ ID NO: 424185 - DNA, 33 bp, Homo sapien
tttgtcccttgtgttacatgtggagaagtcagg

SEQ ID NO: 424186 - DNA, 33 bp, Homo sapien
tttgtcccttgtgttatatgtggagaagtcagg

SEQ ID NO: 424187 - DNA, 33 bp, Homo sapien
aacacaacaacaacaacgacagtaacaacaaaa

SEQ ID NO: 424188 - DNA, 33 bp, Homo sapien
aacacaacaacaacaatgacagtaacaacaaaa

SEQ ID NO: 424189 - DNA, 33 bp, Homo sapien
gcaatgtcccatcatcacaggaaaacatatttt

SEQ ID NO: 424190 - DNA, 33 bp, Homo sapien
gcaatgtcccatcatcgcaggaaaacatatttt

SEQ ID NO: 424191 - DNA, 33 bp, Homo sapien
gtgaatagggctctcgacctcagaattgggcaa

SEQ ID NO: 424192 - DNA, 33 bp, Homo sapien
gtgaatagggctctcggcctcagaattgggcaa

SEQ ID NO: 424193 - DNA, 33 bp, Homo sapien
taggttttctcgatccccttacaacctcatcga

SEQ ID NO: 424194 - DNA, 33 bp, Homo sapien
taggttttctcgatcctcttacaacctcatcga

SEQ ID NO: 424195 - DNA, 33 bp, Homo sapien
ctctatgtgaatggaagggagaaataatgcatg

SEQ ID NO: 424196 - DNA, 33 bp, Homo sapien
ctctatgtgaatggaatggagaaataatgcatg

SEQ ID NO: 424197 - DNA, 33 bp, Homo sapien
cccaaatggactgagacgataccaggtgtactg

SEQ ID NO: 424198 - DNA, 33 bp, Homo sapien
cccaaatggactgagatgataccaggtgtactg

SEQ ID NO: 424199 - DNA, 33 bp, Homo sapien
gtgtactgtagtagaactgcttgctcatgtgcc

SEQ ID NO: 424200 - DNA, 33 bp, Homo sapien
gtgtactgtagtagaattgcttgctcatgtgcc

SEQ ID NO: 424201 - DNA, 33 bp, Homo sapien
caattcagttgtgatagctccttgattttcggg

SEQ ID NO: 424202 - DNA, 33 bp, Homo sapien
caattcagttgtgatatctccttgattttcggg

SEQ ID NO: 424203 - DNA, 33 bp, Homo sapien
gtatagacattcagatcaggacacagctagagc

SEQ ID NO: 424204 - DNA, 33 bp, Homo sapien
gtatagacattcagattaggacacagctagagc

SEQ ID NO: 424205 - DNA, 33 bp, Homo sapien
cagttcatattgagccccttatgctaccaagag

SEQ ID NO: 424206 - DNA, 33 bp, Homo sapien
cagttcatattgagcctcttatgctaccaagag

SEQ ID NO: 424207 - DNA, 33 bp, Homo sapien
accatgtgatgaaaaaactagaaggtccacaaa

SEQ ID NO: 424208 - DNA, 33 bp, Homo sapien
accatgtgatgaaaaatctagaaggtccacaaa

SEQ ID NO: 424209 - DNA, 33 bp, Homo sapien
caggcttaatggtttgaagctggtacaacattt

SEQ ID NO: 424210 - DNA, 33 bp, Homo sapien
caggcttaatggtttggagctggtacaacattt

SEQ ID NO: 424211 - DNA, 33 bp, Homo sapien
cttcaagtgtctgcacagtctggacgtgtgtga

SEQ ID NO: 424212 - DNA, 33 bp, Homo sapien
cttcaagtgtctgcacggtctggacgtgtgtga

SEQ ID NO: 424213 - DNA, 33 bp, Homo sapien
tttgggactcgcagcaagtgcaggagtcctgtg

SEQ ID NO: 424214 - DNA, 33 bp, Homo sapien
tttgggactcgcagcaggtgcaggagtcctgtg

SEQ ID NO: 424215 - DNA, 33 bp, Homo sapien
gtccagaacagaaacacgctgtggacagagact

SEQ ID NO: 424216 - DNA, 33 bp, Homo sapien
gtccagaacagaaacaggctgtggacagagact

SEQ ID NO: 424217 - DNA, 33 bp, Homo sapien
atgagcatgatttagacgtgtagctgccacaga

SEQ ID NO: 424218 - DNA, 33 bp, Homo sapien
atgagcatgatttagatgtgtagctgccacaga

SEQ ID NO: 424219 - DNA, 33 bp, Homo sapien
ttttgggcaggacctactagcaaagctcaaaat

SEQ ID NO: 424220 - DNA, 33 bp, Homo sapien
ttttgggcaggacctattagcaaagctcaaaat

SEQ ID NO: 424221 - DNA, 33 bp, Homo sapien
tatgccccttatcccaagccacaaggccagcta

SEQ ID NO: 424222 - DNA, 33 bp, Homo sapien
tatgccccttatcccacgccacaaggccagcta

SEQ ID NO: 424223 - DNA, 33 bp, Homo sapien
ggaaggcaagtcaggactcatatcggtacagat

SEQ ID NO: 424224 - DNA, 33 bp, Homo sapien
ggaaggcaagtcaggattcatatcggtacagat

SEQ ID NO: 424225 - DNA, 33 bp, Homo sapien
atgtctcaaacgggtacaaaactaagcgcttat

SEQ ID NO: 424226 - DNA, 33 bp, Homo sapien
atgtctcaaacgggtataaaactaagcgcttat

SEQ ID NO: 424227 - DNA, 33 bp, Homo sapien
attttgtttttggctaggttcagcattagttgt

SEQ ID NO: 424228 - DNA, 33 bp, Homo sapien
attttgtttttggctatgttcagcattagttgt

SEQ ID NO: 424229 - DNA, 33 bp, Homo sapien
ttatataatggaaaacagtgtaaaatatgactc

SEQ ID NO: 424230 - DNA, 33 bp, Homo sapien
ttatataatggaaaactgtgtaaaatatgactc

SEQ ID NO: 424231 - DNA, 33 bp, Homo sapien
cttatagttaatattcaccaataccctgaagcc

SEQ ID NO: 424232 - DNA, 33 bp, Homo sapien
cttatagttaatattcgccaataccctgaagcc

SEQ ID NO: 424233 - DNA, 33 bp, Homo sapien
ggcgttagaataaaaacgggcagcaaaacaagc

SEQ ID NO: 424234 - DNA, 33 bp, Homo sapien
ggcgttagaataaaaatgggcagcaaaacaagc

SEQ ID NO: 424235 - DNA, 33 bp, Homo sapien
taggtgatcacggttacggtaggagcagagatt

SEQ ID NO: 424236 - DNA, 33 bp, Homo sapien
taggtgatcacggttatggtaggagcagagatt

SEQ ID NO: 424237 - DNA, 33 bp, Homo sapien
agagaaaagcgtgcaaataagtgctccgtgagg

SEQ ID NO: 424238 - DNA, 33 bp, Homo sapien
agagaaaagcgtgcaagtaagtgctccgtgagg

SEQ ID NO: 424239 - DNA, 33 bp, Homo sapien
atcccagccattggcaagaaatacgtaatactg

SEQ ID NO: 424240 - DNA, 33 bp, Homo sapien
atcccagccattggcaggaaatacgtaatactg

SEQ ID NO: 424241 - DNA, 33 bp, Homo sapien
agcctgcgggtagacacagattggaactgtact

SEQ ID NO: 424242 - DNA, 33 bp, Homo sapien
agcctgcgggtagacatagattggaactgtact

SEQ ID NO: 424243 - DNA, 33 bp, Homo sapien
catagaattactttgccagaccacttcatgtgc

SEQ ID NO: 424244 - DNA, 33 bp, Homo sapien
catagaattactttgctagaccacttcatgtgc

SEQ ID NO: 424245 - DNA, 33 bp, Homo sapien
ggaggtgtgctgtaacagggaaagcaataaatc

SEQ ID NO: 424246 - DNA, 33 bp, Homo sapien
ggaggtgtgctgtaacggggaaagcaataaatc

SEQ ID NO: 424247 - DNA, 33 bp, Homo sapien
caactcgaggtcggaaactgtatctcattgacc

SEQ ID NO: 424248 - DNA, 33 bp, Homo sapien
caactcgaggtcggaagctgtatctcattgacc

SEQ ID NO: 424249 - DNA, 33 bp, Homo sapien
atcctgttccagaacaacttcgtggtaaaccag

SEQ ID NO: 424250 - DNA, 33 bp, Homo sapien
atcctgttccagaacagcttcgtggtaaaccag

SEQ ID NO: 424251 - DNA, 33 bp, Homo sapien
aagaaagcttcaagtgaatccacataactaaat

SEQ ID NO: 424252 - DNA, 33 bp, Homo sapien
aagaaagcttcaagtgtatccacataactaaat

SEQ ID NO: 424253 - DNA, 33 bp, Homo sapien
ttttagagaatgatacactggttcaagcctcgg

SEQ ID NO: 424254 - DNA, 33 bp, Homo sapien
ttttagagaatgatacgctggttcaagcctcgg

SEQ ID NO: 424255 - DNA, 33 bp, Homo sapien
tcacttaatggaacacaatcaaaacaaatcagc

SEQ ID NO: 424256 - DNA, 33 bp, Homo sapien
tcacttaatggaacaccatcaaaacaaatcagc

SEQ ID NO: 424257 - DNA, 33 bp, Homo sapien
aacagataaccatgaaagatttacaaagcttct

SEQ ID NO: 424258 - DNA, 33 bp, Homo sapien
aacagataaccatgaatgatttacaaagcttct

SEQ ID NO: 424259 - DNA, 33 bp, Homo sapien
ctgcactttctgcgcacgaatcccagaacttaa

SEQ ID NO: 424260 - DNA, 33 bp, Homo sapien
ctgcactttctgcgcatgaatcccagaacttaa

SEQ ID NO: 424261 - DNA, 33 bp, Homo sapien
tgatagggaaaactgacgtgccaagacaaagac

SEQ ID NO: 424262 - DNA, 33 bp, Homo sapien
tgatagggaaaactgatgtgccaagacaaagac

SEQ ID NO: 424263 - DNA, 33 bp, Homo sapien
ttcatctgattgaatccatcaaatacaaagtca

SEQ ID NO: 424264 - DNA, 33 bp, Homo sapien
ttcatctgattgaatctatcaaatacaaagtca

SEQ ID NO: 424265 - DNA, 33 bp, Homo sapien
aatacaaatgtaaaaagcagtacaatataacaa

SEQ ID NO: 424266 - DNA, 33 bp, Homo sapien
aatacaaatgtaaaaatcagtacaatataacaa

SEQ ID NO: 424267 - DNA, 33 bp, Homo sapien
cttttgtcttttatgaagagatcacccaccctt

SEQ ID NO: 424268 - DNA, 33 bp, Homo sapien
cttttgtcttttatgacgagatcacccaccctt

SEQ ID NO: 424269 - DNA, 33 bp, Homo sapien
cccacacgtgtgctaacgacacaaaatgactga

SEQ ID NO: 424270 - DNA, 33 bp, Homo sapien
cccacacgtgtgctaaggacacaaaatgactga

SEQ ID NO: 424271 - DNA, 33 bp, Homo sapien
gttgattgatccctcaaatataatggacagtag

SEQ ID NO: 424272 - DNA, 33 bp, Homo sapien
gttgattgatccctcatatataatggacagtag

SEQ ID NO: 424273 - DNA, 33 bp, Homo sapien
caccctgactcaagtcgactcgtgtaggcacta

SEQ ID NO: 424274 - DNA, 33 bp, Homo sapien
caccctgactcaagtctactcgtgtaggcacta

SEQ ID NO: 424275 - DNA, 33 bp, Homo sapien
ttcttagacaaactacagaattttcctctctct

SEQ ID NO: 424276 - DNA, 33 bp, Homo sapien
ttcttagacaaactactgaattttcctctctct

SEQ ID NO: 424277 - DNA, 33 bp, Homo sapien
tgcctgtcagtgagagacctaagctggcaaatg

SEQ ID NO: 424278 - DNA, 33 bp, Homo sapien
tgcctgtcagtgagagtcctaagctggcaaatg

SEQ ID NO: 424279 - DNA, 33 bp, Homo sapien
tttcaataatgaatgacgctgtgaatacagctg

SEQ ID NO: 424280 - DNA, 33 bp, Homo sapien
tttcaataatgaatgatgctgtgaatacagctg

SEQ ID NO: 424281 - DNA, 33 bp, Homo sapien
agtcccgctaccgtggaaatacactatgtccga

SEQ ID NO: 424282 - DNA, 33 bp, Homo sapien
agtcccgctaccgtgggaatacactatgtccga

SEQ ID NO: 424283 - DNA, 33 bp, Homo sapien
ggtaggcaacattttcacatcggtagccctgga

SEQ ID NO: 424284 - DNA, 33 bp, Homo sapien
ggtaggcaacattttcgcatcggtagccctgga

SEQ ID NO: 424285 - DNA, 33 bp, Homo sapien
atatagatatttaggcaaatctgtgagacttcc

SEQ ID NO: 424286 - DNA, 33 bp, Homo sapien
atatagatatttaggccaatctgtgagacttcc

SEQ ID NO: 424287 - DNA, 33 bp, Homo sapien
cttgcagagggggaaacgtctggaagcagatac

SEQ ID NO: 424288 - DNA, 33 bp, Homo sapien
cttgcagagggggaaatgtctggaagcagatac

SEQ ID NO: 424289 - DNA, 33 bp, Homo sapien
tatagatacatacagacgcataccttcactttc

SEQ ID NO: 424290 - DNA, 33 bp, Homo sapien
tatagatacatacagatgcataccttcactttc

SEQ ID NO: 424291 - DNA, 33 bp, Homo sapien
caatttctactaaccaacaaatgaccatttctg

SEQ ID NO: 424292 - DNA, 33 bp, Homo sapien
caatttctactaaccagcaaatgaccatttctg

SEQ ID NO: 424293 - DNA, 33 bp, Homo sapien
tgactgtcactgataacaagaccgataagcaga

SEQ ID NO: 424294 - DNA, 33 bp, Homo sapien
tgactgtcactgataataagaccgataagcaga

SEQ ID NO: 424295 - DNA, 33 bp, Homo sapien
attcacaccgttgccacataatgtttctaaaac

SEQ ID NO: 424296 - DNA, 33 bp, Homo sapien
attcacaccgttgccagataatgtttctaaaac

SEQ ID NO: 424297 - DNA, 33 bp, Homo sapien
gtgttctagctccaggaaatgatagataagtaa

SEQ ID NO: 424298 - DNA, 33 bp, Homo sapien
gtgttctagctccagggaatgatagataagtaa

SEQ ID NO: 424299 - DNA, 33 bp, Homo sapien
attgtggaggccaaatcagataatgtttcagag

SEQ ID NO: 424300 - DNA, 33 bp, Homo sapien
attgtggaggccaaattagataatgtttcagag

SEQ ID NO: 424301 - DNA, 33 bp, Homo sapien
ggagaatttggtgggccgatggaactttacatt

SEQ ID NO: 424302 - DNA, 33 bp, Homo sapien
ggagaatttggtgggctgatggaactttacatt

SEQ ID NO: 424303 - DNA, 33 bp, Homo sapien
gatacttagtccatgactttcccttgcttggat

SEQ ID NO: 424304 - DNA, 33 bp, Homo sapien
gatacttagtccatgattttcccttgcttggat

SEQ ID NO: 424305 - DNA, 33 bp, Homo sapien
taaagaacagcaaagcccacctggaacaagaaa

SEQ ID NO: 424306 - DNA, 33 bp, Homo sapien
taaagaacagcaaagctcacctggaacaagaaa

SEQ ID NO: 424307 - DNA, 33 bp, Homo sapien
cttgaattttaggttaagctcaatgaaaatgtc

SEQ ID NO: 424308 - DNA, 33 bp, Homo sapien
cttgaattttaggttatgctcaatgaaaatgtc

SEQ ID NO: 424309 - DNA, 33 bp, Homo sapien
ttaaaggcaattattgaaaaggaactcagctgt

SEQ ID NO: 424310 - DNA, 33 bp, Homo sapien
ttaaaggcaattattggaaaggaactcagctgt

SEQ ID NO: 424311 - DNA, 33 bp, Homo sapien
tgtcatttctcctaaactagaggtcgttcaaat

SEQ ID NO: 424312 - DNA, 33 bp, Homo sapien
tgtcatttctcctaaagtagaggtcgttcaaat

SEQ ID NO: 424313 - DNA, 33 bp, Homo sapien
tcatgttttaagagaacgccttgataatcagtg

SEQ ID NO: 424314 - DNA, 33 bp, Homo sapien
tcatgttttaagagaatgccttgataatcagtg

SEQ ID NO: 424315 - DNA, 33 bp, Homo sapien
caaattgtgattgaaacaaagaagccttacaaa

SEQ ID NO: 424316 - DNA, 33 bp, Homo sapien
caaattgtgattgaaataaagaagccttacaaa

SEQ ID NO: 424317 - DNA, 33 bp, Homo sapien
ttctgctttgtaacacacaatcacagtatctca

SEQ ID NO: 424318 - DNA, 33 bp, Homo sapien
ttctgctttgtaacactcaatcacagtatctca

SEQ ID NO: 424319 - DNA, 33 bp, Homo sapien
ctactgtctaaactccccagtaattgcagagta

SEQ ID NO: 424320 - DNA, 33 bp, Homo sapien
ctactgtctaaactcctcagtaattgcagagta

SEQ ID NO: 424321 - DNA, 33 bp, Homo sapien
tcacaaggagactaaaagccattggcggctgaa

SEQ ID NO: 424322 - DNA, 33 bp, Homo sapien
tcacaaggagactaaacgccattggcggctgaa

SEQ ID NO: 424323 - DNA, 33 bp, Homo sapien
ggtctggcagctgtagaagattacagacacaga

SEQ ID NO: 424324 - DNA, 33 bp, Homo sapien
ggtctggcagctgtaggagattacagacacaga

SEQ ID NO: 424325 - DNA, 33 bp, Homo sapien
caaaggtcaggcctgcacagttaggggggctgt

SEQ ID NO: 424326 - DNA, 33 bp, Homo sapien
caaaggtcaggcctgcgcagttaggggggctgt

SEQ ID NO: 424327 - DNA, 33 bp, Homo sapien
gttcagataaagctgaaggacagtgtcaatgac

SEQ ID NO: 424328 - DNA, 33 bp, Homo sapien
gttcagataaagctgagggacagtgtcaatgac

SEQ ID NO: 424329 - DNA, 33 bp, Homo sapien
gcagaagccaacctcactcatttctcatctacc

SEQ ID NO: 424330 - DNA, 33 bp, Homo sapien
gcagaagccaacctcattcatttctcatctacc

SEQ ID NO: 424331 - DNA, 33 bp, Homo sapien
agagtgacttcctatgaatattagaggtctctg

SEQ ID NO: 424332 - DNA, 33 bp, Homo sapien
agagtgacttcctatgcatattagaggtctctg

SEQ ID NO: 424333 - DNA, 33 bp, Homo sapien
ataggtgtttgatataaccttacgcaaaataac

SEQ ID NO: 424334 - DNA, 33 bp, Homo sapien
ataggtgtttgatatatccttacgcaaaataac

SEQ ID NO: 424335 - DNA, 33 bp, Homo sapien
cataataaaaacattccccaaagcaggctagtt

SEQ ID NO: 424336 - DNA, 33 bp, Homo sapien
cataataaaaacattcgccaaagcaggctagtt

SEQ ID NO: 424337 - DNA, 33 bp, Homo sapien
ccattttctggttttacgtcacagaacagtggt

SEQ ID NO: 424338 - DNA, 33 bp, Homo sapien
ccattttctggttttatgtcacagaacagtggt

SEQ ID NO: 424339 - DNA, 33 bp, Homo sapien
ttcttttcctgccccccaaaggtgtatgacatc

SEQ ID NO: 424340 - DNA, 33 bp, Homo sapien
ttcttttcctgcccccgaaaggtgtatgacatc

SEQ ID NO: 424341 - DNA, 33 bp, Homo sapien
cctgcttaatgctgagaaaatactaaaaggcag

SEQ ID NO: 424342 - DNA, 33 bp, Homo sapien
cctgcttaatgctgaggaaatactaaaaggcag

SEQ ID NO: 424343 - DNA, 33 bp, Homo sapien
actaatgtataattaacgtcaggtcaggtcgcc

SEQ ID NO: 424344 - DNA, 33 bp, Homo sapien
actaatgtataattaatgtcaggtcaggtcgcc

SEQ ID NO: 424345 - DNA, 33 bp, Homo sapien
agtcacacaagaaaaaaacctcatcagaccaaa

SEQ ID NO: 424346 - DNA, 33 bp, Homo sapien
agtcacacaagaaaaatacctcatcagaccaaa

SEQ ID NO: 424347 - DNA, 33 bp, Homo sapien
aagtacattggcaaaccgaagggactgtcagca

SEQ ID NO: 424348 - DNA, 33 bp, Homo sapien
aagtacattggcaaactgaagggactgtcagca

SEQ ID NO: 424349 - DNA, 33 bp, Homo sapien
tctggaagagtgaatgcagcatggctttctagg

SEQ ID NO: 424350 - DNA, 33 bp, Homo sapien
tctggaagagtgaatgtagcatggctttctagg

SEQ ID NO: 424351 - DNA, 33 bp, Homo sapien
ttacctatcacttttacatcagtgtggcccttt

SEQ ID NO: 424352 - DNA, 33 bp, Homo sapien
ttacctatcacttttatatcagtgtggcccttt

SEQ ID NO: 424353 - DNA, 33 bp, Homo sapien
gtgaatttttcaacttcaagttctgtcacaagt

SEQ ID NO: 424354 - DNA, 33 bp, Homo sapien
gtgaatttttcaacttgaagttctgtcacaagt

SEQ ID NO: 424355 - DNA, 33 bp, Homo sapien
tttatgagccatttacaggagaatggggtagga

SEQ ID NO: 424356 - DNA, 33 bp, Homo sapien
tttatgagccatttacgggagaatggggtagga

SEQ ID NO: 424357 - DNA, 33 bp, Homo sapien
cccactccatgccatactagccctgctgcatag

SEQ ID NO: 424358 - DNA, 33 bp, Homo sapien
cccactccatgccatattagccctgctgcatag

SEQ ID NO: 424359 - DNA, 33 bp, Homo sapien
ttgagcatgacgagaaacagataattaaaatac

SEQ ID NO: 424360 - DNA, 33 bp, Homo sapien
ttgagcatgacgagaagcagataattaaaatac

SEQ ID NO: 424361 - DNA, 33 bp, Homo sapien
ttctttctgctttgaacctttaagaaaggaggt

SEQ ID NO: 424362 - DNA, 33 bp, Homo sapien
ttctttctgctttgaatctttaagaaaggaggt

SEQ ID NO: 424363 - DNA, 33 bp, Homo sapien
ctgttctcccgcctccaaagttaatcataggaa

SEQ ID NO: 424364 - DNA, 33 bp, Homo sapien
ctgttctcccgcctccgaagttaatcataggaa

SEQ ID NO: 424365 - DNA, 33 bp, Homo sapien
tgttggactttgctataaataatggtaactaga

SEQ ID NO: 424366 - DNA, 33 bp, Homo sapien
tgttggactttgctatgaataatggtaactaga

SEQ ID NO: 424367 - DNA, 33 bp, Homo sapien
taatagcatttaaagccctcgtagttttggata

SEQ ID NO: 424368 - DNA, 33 bp, Homo sapien
taatagcatttaaagctctcgtagttttggata

SEQ ID NO: 424369 - DNA, 33 bp, Homo sapien
acattcaagctagaaacgacttagaagacaaat

SEQ ID NO: 424370 - DNA, 33 bp, Homo sapien
acattcaagctagaaaggacttagaagacaaat

SEQ ID NO: 424371 - DNA, 33 bp, Homo sapien
gcataatccccagacagagtccaaggctgaatt

SEQ ID NO: 424372 - DNA, 33 bp, Homo sapien
gcataatccccagacatagtccaaggctgaatt

SEQ ID NO: 424373 - DNA, 33 bp, Homo sapien
taaagaaaaccgagaagattggagtttgcttta

SEQ ID NO: 424374 - DNA, 33 bp, Homo sapien
taaagaaaaccgagaatattggagtttgcttta

SEQ ID NO: 424375 - DNA, 33 bp, Homo sapien
atcctttgttgaatcaatcaaattttgtagggc

SEQ ID NO: 424376 - DNA, 33 bp, Homo sapien
atcctttgttgaatcattcaaattttgtagggc

SEQ ID NO: 424377 - DNA, 33 bp, Homo sapien
ccaggcagaacacagaaggttcccttaaattgt

SEQ ID NO: 424378 - DNA, 33 bp, Homo sapien
ccaggcagaacacagatggttcccttaaattgt

SEQ ID NO: 424379 - DNA, 33 bp, Homo sapien
gatttagaagcacttaataaaatgtccagtgag

SEQ ID NO: 424380 - DNA, 33 bp, Homo sapien
gatttagaagcacttagtaaaatgtccagtgag

SEQ ID NO: 424381 - DNA, 33 bp, Homo sapien
cgtgattccaaaacaccgagtcaatggtgtctt

SEQ ID NO: 424382 - DNA, 33 bp, Homo sapien
cgtgattccaaaacactgagtcaatggtgtctt

SEQ ID NO: 424383 - DNA, 33 bp, Homo sapien
gtatttggtagcaggacatggcccctaatgctt

SEQ ID NO: 424384 - DNA, 33 bp, Homo sapien
gtatttggtagcaggatatggcccctaatgctt

SEQ ID NO: 424385 - DNA, 33 bp, Homo sapien
gaagggcaggaaataaaccataaatctgagaaa

SEQ ID NO: 424386 - DNA, 33 bp, Homo sapien
gaagggcaggaaataagccataaatctgagaaa

SEQ ID NO: 424387 - DNA, 33 bp, Homo sapien
ttttacattaggacgacagggttggaagtatga

SEQ ID NO: 424388 - DNA, 33 bp, Homo sapien
ttttacattaggacgatagggttggaagtatga

SEQ ID NO: 424389 - DNA, 33 bp, Homo sapien
tcttgacaactccaccacgtccataacctcatg

SEQ ID NO: 424390 - DNA, 33 bp, Homo sapien
tcttgacaactccaccgcgtccataacctcatg

SEQ ID NO: 424391 - DNA, 33 bp, Homo sapien
catggaagtgcagctgaagattttattagcact

SEQ ID NO: 424392 - DNA, 33 bp, Homo sapien
catggaagtgcagctggagattttattagcact

SEQ ID NO: 424393 - DNA, 33 bp, Homo sapien
cttaaatgatcatgtgaaccataaagtgctaat

SEQ ID NO: 424394 - DNA, 33 bp, Homo sapien
cttaaatgatcatgtggaccataaagtgctaat

SEQ ID NO: 424395 - DNA, 33 bp, Homo sapien
ggtgtgttacattgaaattatgtaaatcagtac

SEQ ID NO: 424396 - DNA, 33 bp, Homo sapien
ggtgtgttacattgaatttatgtaaatcagtac

SEQ ID NO: 424397 - DNA, 33 bp, Homo sapien
tgttctcatcttaggccacttggaaagcaatga

SEQ ID NO: 424398 - DNA, 33 bp, Homo sapien
tgttctcatcttaggctacttggaaagcaatga

SEQ ID NO: 424399 - DNA, 33 bp, Homo sapien
atagtaaggcaggatcaattgcatctaaccttt

SEQ ID NO: 424400 - DNA, 33 bp, Homo sapien
atagtaaggcaggatcgattgcatctaaccttt

SEQ ID NO: 424401 - DNA, 33 bp, Homo sapien
gtgtgtgtttctttacaggtgatgtgtgtttgt

SEQ ID NO: 424402 - DNA, 33 bp, Homo sapien
gtgtgtgtttctttacgggtgatgtgtgtttgt

SEQ ID NO: 424403 - DNA, 33 bp, Homo sapien
ttttctgagtctgatacgaaaatgaggacagcg

SEQ ID NO: 424404 - DNA, 33 bp, Homo sapien
ttttctgagtctgatatgaaaatgaggacagcg

SEQ ID NO: 424405 - DNA, 33 bp, Homo sapien
catttgggatataaataaaaaatgctatgaaca

SEQ ID NO: 424406 - DNA, 33 bp, Homo sapien
catttgggatataaattaaaaatgctatgaaca

SEQ ID NO: 424407 - DNA, 33 bp, Homo sapien
tctgcactccttgatgaaaaagggctgtgtctt

SEQ ID NO: 424408 - DNA, 33 bp, Homo sapien
tctgcactccttgatggaaaagggctgtgtctt

SEQ ID NO: 424409 - DNA, 33 bp, Homo sapien
tatattttgatatgaacgattcggtgaaattga

SEQ ID NO: 424410 - DNA, 33 bp, Homo sapien
tatattttgatatgaatgattcggtgaaattga

SEQ ID NO: 424411 - DNA, 33 bp, Homo sapien
caaataagatgagaaacgtctttagtgattttt

SEQ ID NO: 424412 - DNA, 33 bp, Homo sapien
caaataagatgagaaaggtctttagtgattttt

SEQ ID NO: 424413 - DNA, 33 bp, Homo sapien
agtgatgaaaaatgaaatatgcacatatcatat

SEQ ID NO: 424414 - DNA, 33 bp, Homo sapien
agtgatgaaaaatgaactatgcacatatcatat

SEQ ID NO: 424415 - DNA, 33 bp, Homo sapien
ctcaggaggaataataaacctaaatataaaact

SEQ ID NO: 424416 - DNA, 33 bp, Homo sapien
ctcaggaggaataatagacctaaatataaaact

SEQ ID NO: 424417 - DNA, 33 bp, Homo sapien
tacttgcaagactgacacataaaaaagtacaaa

SEQ ID NO: 424418 - DNA, 33 bp, Homo sapien
tacttgcaagactgacgcataaaaaagtacaaa

SEQ ID NO: 424419 - DNA, 33 bp, Homo sapien
gagacctcaaagcaaaacacagggccatgaggg

SEQ ID NO: 424420 - DNA, 33 bp, Homo sapien
gagacctcaaagcaaagcacagggccatgaggg

SEQ ID NO: 424421 - DNA, 33 bp, Homo sapien
ggacattgggaagtagccataccttttattttt

SEQ ID NO: 424422 - DNA, 33 bp, Homo sapien
ggacattgggaagtagtcataccttttattttt

SEQ ID NO: 424423 - DNA, 33 bp, Homo sapien
gcttattcaaactacactactgatcagggaagg

SEQ ID NO: 424424 - DNA, 33 bp, Homo sapien
gcttattcaaactacattactgatcagggaagg

SEQ ID NO: 424425 - DNA, 33 bp, Homo sapien
cattggtcacacaagaaaattcacaaaagttca

SEQ ID NO: 424426 - DNA, 33 bp, Homo sapien
cattggtcacacaagataattcacaaaagttca

SEQ ID NO: 424427 - DNA, 33 bp, Homo sapien
acataaagtatgtagacgaaatgtagtccaaat

SEQ ID NO: 424428 - DNA, 33 bp, Homo sapien
acataaagtatgtagatgaaatgtagtccaaat

SEQ ID NO: 424429 - DNA, 33 bp, Homo sapien
tgttggacagaaataacgtttcttggcaaaatc

SEQ ID NO: 424430 - DNA, 33 bp, Homo sapien
tgttggacagaaataaggtttcttggcaaaatc

SEQ ID NO: 424431 - DNA, 33 bp, Homo sapien
aaacagcagtgaggtacgtgataagctgtgatg

SEQ ID NO: 424432 - DNA, 33 bp, Homo sapien
aaacagcagtgaggtaggtgataagctgtgatg

SEQ ID NO: 424433 - DNA, 33 bp, Homo sapien
ggccagatgtgcctcactcatcttagacttaca

SEQ ID NO: 424434 - DNA, 33 bp, Homo sapien
ggccagatgtgcctcattcatcttagacttaca

SEQ ID NO: 424435 - DNA, 33 bp, Homo sapien
actttcatgaaacagcaaactaattcttctaac

SEQ ID NO: 424436 - DNA, 33 bp, Homo sapien
actttcatgaaacagcgaactaattcttctaac

SEQ ID NO: 424437 - DNA, 33 bp, Homo sapien
aaggatttgataaacacccccaacttagcagga

SEQ ID NO: 424438 - DNA, 33 bp, Homo sapien
aaggatttgataaacatccccaacttagcagga

SEQ ID NO: 424439 - DNA, 33 bp, Homo sapien
ggtgtgggtatggtgcaaggaatgtgtgtgtga

SEQ ID NO: 424440 - DNA, 33 bp, Homo sapien
ggtgtgggtatggtgcgaggaatgtgtgtgtga

SEQ ID NO: 424441 - DNA, 33 bp, Homo sapien
gttttcaaataataccaactcacctcaaactct

SEQ ID NO: 424442 - DNA, 33 bp, Homo sapien
gttttcaaataataccgactcacctcaaactct

SEQ ID NO: 424443 - DNA, 33 bp, Homo sapien
aagcttatgatgaagacattgggaggtcagaga

SEQ ID NO: 424444 - DNA, 33 bp, Homo sapien
aagcttatgatgaagatattgggaggtcagaga

SEQ ID NO: 424445 - DNA, 33 bp, Homo sapien
tgacacacagaggtagacactattttgtcctag

SEQ ID NO: 424446 - DNA, 33 bp, Homo sapien
tgacacacagaggtaggcactattttgtcctag

SEQ ID NO: 424447 - DNA, 33 bp, Homo sapien
aggacacacccaagaaagagaaccccagtgata

SEQ ID NO: 424448 - DNA, 33 bp, Homo sapien
aggacacacccaagaaggagaaccccagtgata

SEQ ID NO: 424449 - DNA, 33 bp, Homo sapien
atttaagtgttttgtaaggattgtatcattaca

SEQ ID NO: 424450 - DNA, 33 bp, Homo sapien
atttaagtgttttgtagggattgtatcattaca

SEQ ID NO: 424451 - DNA, 33 bp, Homo sapien
agagccaaattttgagacatctgatcagtaacg

SEQ ID NO: 424452 - DNA, 33 bp, Homo sapien
agagccaaattttgaggcatctgatcagtaacg

SEQ ID NO: 424453 - DNA, 33 bp, Homo sapien
tgtcctggactacttacatcacctctggctctt

SEQ ID NO: 424454 - DNA, 33 bp, Homo sapien
tgtcctggactacttatatcacctctggctctt

SEQ ID NO: 424455 - DNA, 33 bp, Homo sapien
tatttcttcactgttacgagttcattccaagtt

SEQ ID NO: 424456 - DNA, 33 bp, Homo sapien
tatttcttcactgttatgagttcattccaagtt

SEQ ID NO: 424457 - DNA, 33 bp, Homo sapien
tacttgcccaggttgacgtaagtaggaaggggc

SEQ ID NO: 424458 - DNA, 33 bp, Homo sapien
tacttgcccaggttgatgtaagtaggaaggggc

SEQ ID NO: 424459 - DNA, 33 bp, Homo sapien
ccagctggagacaatgacagctcattactaagc

SEQ ID NO: 424460 - DNA, 33 bp, Homo sapien
ccagctggagacaatggcagctcattactaagc

SEQ ID NO: 424461 - DNA, 33 bp, Homo sapien
aattagaacgtgcaccactgtgagcaggtggct

SEQ ID NO: 424462 - DNA, 33 bp, Homo sapien
aattagaacgtgcacctctgtgagcaggtggct

SEQ ID NO: 424463 - DNA, 33 bp, Homo sapien
aggccagtgattagaaagaaaggaggtctggtc

SEQ ID NO: 424464 - DNA, 33 bp, Homo sapien
aggccagtgattagaaggaaaggaggtctggtc

SEQ ID NO: 424465 - DNA, 33 bp, Homo sapien
tttgggggactggcagaatactgttgaaattgg

SEQ ID NO: 424466 - DNA, 33 bp, Homo sapien
tttgggggactggcaggatactgttgaaattgg

SEQ ID NO: 424467 - DNA, 33 bp, Homo sapien
gtgctagcggttgcctaagaactgcagttgtgt

SEQ ID NO: 424468 - DNA, 33 bp, Homo sapien
gtgctagcggttgccttagaactgcagttgtgt

SEQ ID NO: 424469 - DNA, 33 bp, Homo sapien
ctaattttgagttcataaaatggtgctttttgt

SEQ ID NO: 424470 - DNA, 33 bp, Homo sapien
ctaattttgagttcattaaatggtgctttttgt

SEQ ID NO: 424471 - DNA, 33 bp, Homo sapien
tatctaaccttatttgaaaccaaatcttctacc

SEQ ID NO: 424472 - DNA, 33 bp, Homo sapien
tatctaaccttatttgtaaccaaatcttctacc

SEQ ID NO: 424473 - DNA, 33 bp, Homo sapien
gaaggttttatttcaacttcgaaggtgtcatca

SEQ ID NO: 424474 - DNA, 33 bp, Homo sapien
gaaggttttatttcaatttcgaaggtgtcatca

SEQ ID NO: 424475 - DNA, 33 bp, Homo sapien
ttctgcacagggttcacagtatttcataggaca

SEQ ID NO: 424476 - DNA, 33 bp, Homo sapien
ttctgcacagggttcatagtatttcataggaca

SEQ ID NO: 424477 - DNA, 33 bp, Homo sapien
aaaatagggtaagctacgtatcatatccaccag

SEQ ID NO: 424478 - DNA, 33 bp, Homo sapien
aaaatagggtaagctatgtatcatatccaccag

SEQ ID NO: 424479 - DNA, 33 bp, Homo sapien
atgtttacaagcctgaaaagcagcaaacacaag

SEQ ID NO: 424480 - DNA, 33 bp, Homo sapien
atgtttacaagcctgagaagcagcaaacacaag

SEQ ID NO: 424481 - DNA, 33 bp, Homo sapien
tgacacagaggcagcacgtgcaactcttcagga

SEQ ID NO: 424482 - DNA, 33 bp, Homo sapien
tgacacagaggcagcatgtgcaactcttcagga

SEQ ID NO: 424483 - DNA, 33 bp, Homo sapien
ttctttcattgtgggaattttaagcattttatc

SEQ ID NO: 424484 - DNA, 33 bp, Homo sapien
ttctttcattgtgggagttttaagcattttatc

SEQ ID NO: 424485 - DNA, 33 bp, Homo sapien
agtatcttattggaaaagccacagttggggatg

SEQ ID NO: 424486 - DNA, 33 bp, Homo sapien
agtatcttattggaaatgccacagttggggatg

SEQ ID NO: 424487 - DNA, 33 bp, Homo sapien
ggcaatgacactggggaaacacaggcagggcca

SEQ ID NO: 424488 - DNA, 33 bp, Homo sapien
ggcaatgacactgggggaacacaggcagggcca

SEQ ID NO: 424489 - DNA, 33 bp, Homo sapien
atcttttcttaccaaaagtctcacaaaaccagt

SEQ ID NO: 424490 - DNA, 33 bp, Homo sapien
atcttttcttaccaaacgtctcacaaaaccagt

SEQ ID NO: 424491 - DNA, 33 bp, Homo sapien
tttaaccaaacgctcaaactataaacttaggta

SEQ ID NO: 424492 - DNA, 33 bp, Homo sapien
tttaaccaaacgctcatactataaacttaggta

SEQ ID NO: 424493 - DNA, 33 bp, Homo sapien
aggctgtaggggaaaaatgtttctttgcctttt

SEQ ID NO: 424494 - DNA, 33 bp, Homo sapien
aggctgtaggggaaaactgtttctttgcctttt

SEQ ID NO: 424495 - DNA, 33 bp, Homo sapien
ctctatgagcacaactcaggttatcttctgttt

SEQ ID NO: 424496 - DNA, 33 bp, Homo sapien
ctctatgagcacaactgaggttatcttctgttt

SEQ ID NO: 424497 - DNA, 33 bp, Homo sapien
ctagcaccaactctctcagactgaatctgactg

SEQ ID NO: 424498 - DNA, 33 bp, Homo sapien
ctagcaccaactctcttagactgaatctgactg

SEQ ID NO: 424499 - DNA, 33 bp, Homo sapien
ctacttaacatcctcaatatttcttctaccttc

SEQ ID NO: 424500 - DNA, 33 bp, Homo sapien
ctacttaacatcctcagtatttcttctaccttc

SEQ ID NO: 424501 - DNA, 33 bp, Homo sapien
cactttctcataaaaaacatattgaaataagag

SEQ ID NO: 424502 - DNA, 33 bp, Homo sapien
cactttctcataaaaagcatattgaaataagag

SEQ ID NO: 424503 - DNA, 33 bp, Homo sapien
tttttattttgcaaccggcctcaaattatttta

SEQ ID NO: 424504 - DNA, 33 bp, Homo sapien
tttttattttgcaacctgcctcaaattatttta

SEQ ID NO: 424505 - DNA, 33 bp, Homo sapien
gagtattgatacagaaatagcgcatttgaaaag

SEQ ID NO: 424506 - DNA, 33 bp, Homo sapien
gagtattgatacagaagtagcgcatttgaaaag

SEQ ID NO: 424507 - DNA, 33 bp, Homo sapien
tcactcacttacatgacgtcttcagctctcact

SEQ ID NO: 424508 - DNA, 33 bp, Homo sapien
tcactcacttacatgatgtcttcagctctcact

SEQ ID NO: 424509 - DNA, 33 bp, Homo sapien
tgaaataattcctggagctcacacgtggccagg

SEQ ID NO: 424510 - DNA, 33 bp, Homo sapien
tgaaataattcctggatctcacacgtggccagg

SEQ ID NO: 424511 - DNA, 33 bp, Homo sapien
tcagaaataaacacaaaggagctagagaaaaag

SEQ ID NO: 424512 - DNA, 33 bp, Homo sapien
tcagaaataaacacaagggagctagagaaaaag

SEQ ID NO: 424513 - DNA, 33 bp, Homo sapien
gcttctgttaaattaccctggtttctgttccag

SEQ ID NO: 424514 - DNA, 33 bp, Homo sapien
gcttctgttaaattactctggtttctgttccag

SEQ ID NO: 424515 - DNA, 33 bp, Homo sapien
ggaggcttgaaaacgacgttgataacaacgaga

SEQ ID NO: 424516 - DNA, 33 bp, Homo sapien
ggaggcttgaaaacgatgttgataacaacgaga

SEQ ID NO: 424517 - DNA, 33 bp, Homo sapien
cagggatcagaagagcaaacagttcttggccgc

SEQ ID NO: 424518 - DNA, 33 bp, Homo sapien
cagggatcagaagagccaacagttcttggccgc

SEQ ID NO: 424519 - DNA, 33 bp, Homo sapien
ccagccatctataacagtcacaagaagaagttg

SEQ ID NO: 424520 - DNA, 33 bp, Homo sapien
ccagccatctataacattcacaagaagaagttg

SEQ ID NO: 424521 - DNA, 33 bp, Homo sapien
gcttgttaactgcatacgcaaagctcttacctt

SEQ ID NO: 424522 - DNA, 33 bp, Homo sapien
gcttgttaactgcatatgcaaagctcttacctt

SEQ ID NO: 424523 - DNA, 33 bp, Homo sapien
aggtgttacggaaaaaatgtttgtgtccctccc

SEQ ID NO: 424524 - DNA, 33 bp, Homo sapien
aggtgttacggaaaaagtgtttgtgtccctccc

SEQ ID NO: 424525 - DNA, 33 bp, Homo sapien
attacggattaatgtgaagaaagcaatcctcat

SEQ ID NO: 424526 - DNA, 33 bp, Homo sapien
attacggattaatgtggagaaagcaatcctcat

SEQ ID NO: 424527 - DNA, 33 bp, Homo sapien
gcttctcataatactcaacacttagacatacta

SEQ ID NO: 424528 - DNA, 33 bp, Homo sapien
gcttctcataatactcgacacttagacatacta

SEQ ID NO: 424529 - DNA, 33 bp, Homo sapien
gagaacagaagcttcaagagaagaaaatggccc

SEQ ID NO: 424530 - DNA, 33 bp, Homo sapien
gagaacagaagcttcaggagaagaaaatggccc

SEQ ID NO: 424531 - DNA, 33 bp, Homo sapien
tggttgggctctatgacgatgtgcattagccaa

SEQ ID NO: 424532 - DNA, 33 bp, Homo sapien
tggttgggctctatgatgatgtgcattagccaa

SEQ ID NO: 424533 - DNA, 33 bp, Homo sapien
gcttaaaaattcatgaagcaaaaatagacatac

SEQ ID NO: 424534 - DNA, 33 bp, Homo sapien
gcttaaaaattcatgaggcaaaaatagacatac

SEQ ID NO: 424535 - DNA, 33 bp, Homo sapien
cttgttcactatatggaatgtttactttcaaga

SEQ ID NO: 424536 - DNA, 33 bp, Homo sapien
cttgttcactatatggtatgtttactttcaaga

SEQ ID NO: 424537 - DNA, 33 bp, Homo sapien
tagtcacagcaagtgaataggtatggtatcctg

SEQ ID NO: 424538 - DNA, 33 bp, Homo sapien
tagtcacagcaagtgagtaggtatggtatcctg

SEQ ID NO: 424539 - DNA, 33 bp, Homo sapien
tcaaagacatacctaaccagagcagtcttctac

SEQ ID NO: 424540 - DNA, 33 bp, Homo sapien
tcaaagacatacctaatcagagcagtcttctac

SEQ ID NO: 424541 - DNA, 33 bp, Homo sapien
gcactacctgtagtgactagttaagtaaagtga

SEQ ID NO: 424542 - DNA, 33 bp, Homo sapien
gcactacctgtagtgagtagttaagtaaagtga

SEQ ID NO: 424543 - DNA, 33 bp, Homo sapien
ctgtttgcattactgaacattctccttcttctt

SEQ ID NO: 424544 - DNA, 33 bp, Homo sapien
ctgtttgcattactgatcattctccttcttctt

SEQ ID NO: 424545 - DNA, 33 bp, Homo sapien
acgaagacttgtctgcaaatagagaataagctg

SEQ ID NO: 424546 - DNA, 33 bp, Homo sapien
acgaagacttgtctgcgaatagagaataagctg

SEQ ID NO: 424547 - DNA, 33 bp, Homo sapien
ctcctagttattagcccacatggaactaattct

SEQ ID NO: 424548 - DNA, 33 bp, Homo sapien
ctcctagttattagcctacatggaactaattct

SEQ ID NO: 424549 - DNA, 33 bp, Homo sapien
tgtcattgaccatctaggtacttgaaatggatt

SEQ ID NO: 424550 - DNA, 33 bp, Homo sapien
tgtcattgaccatctatgtacttgaaatggatt

SEQ ID NO: 424551 - DNA, 33 bp, Homo sapien
ggaaaacatttctgaaactataagctttgttac

SEQ ID NO: 424552 - DNA, 33 bp, Homo sapien
ggaaaacatttctgaagctataagctttgttac

SEQ ID NO: 424553 - DNA, 33 bp, Homo sapien
tcagtcacagttcatgcatgattttaggcagtg

SEQ ID NO: 424554 - DNA, 33 bp, Homo sapien
tcagtcacagttcatggatgattttaggcagtg

SEQ ID NO: 424555 - DNA, 33 bp, Homo sapien
agaattaagattgaaaagaaaggatataatcag

SEQ ID NO: 424556 - DNA, 33 bp, Homo sapien
agaattaagattgaaaggaaaggatataatcag

SEQ ID NO: 424557 - DNA, 33 bp, Homo sapien
cagagcagagattctaagagtatgtccatggat

SEQ ID NO: 424558 - DNA, 33 bp, Homo sapien
cagagcagagattctaggagtatgtccatggat

SEQ ID NO: 424559 - DNA, 33 bp, Homo sapien
gataatgttggatcacgaaaggagaggagctaa

SEQ ID NO: 424560 - DNA, 33 bp, Homo sapien
gataatgttggatcactaaaggagaggagctaa

SEQ ID NO: 424561 - DNA, 33 bp, Homo sapien
tgcacagaattgagcaaaagggaatttagttca

SEQ ID NO: 424562 - DNA, 33 bp, Homo sapien
tgcacagaattgagcagaagggaatttagttca

SEQ ID NO: 424563 - DNA, 33 bp, Homo sapien
taccagagactcttcacggtttgctcagcattt

SEQ ID NO: 424564 - DNA, 33 bp, Homo sapien
taccagagactcttcatggtttgctcagcattt

SEQ ID NO: 424565 - DNA, 33 bp, Homo sapien
taaacgtctcccttccagcaaaagaatctggat

SEQ ID NO: 424566 - DNA, 33 bp, Homo sapien
taaacgtctcccttccggcaaaagaatctggat

SEQ ID NO: 424567 - DNA, 33 bp, Homo sapien
agaaaatgagacttgaggcaattggtgagtaga

SEQ ID NO: 424568 - DNA, 33 bp, Homo sapien
agaaaatgagacttgatgcaattggtgagtaga

SEQ ID NO: 424569 - DNA, 33 bp, Homo sapien
gaatataaacttgtaacatgaatggttcttctg

SEQ ID NO: 424570 - DNA, 33 bp, Homo sapien
gaatataaacttgtaatatgaatggttcttctg

SEQ ID NO: 424571 - DNA, 33 bp, Homo sapien
acactgcttctacagacgaactatggaaatacc

SEQ ID NO: 424572 - DNA, 33 bp, Homo sapien
acactgcttctacagatgaactatggaaatacc

SEQ ID NO: 424573 - DNA, 33 bp, Homo sapien
gctgagtctaagaacaagaactggatttcacca

SEQ ID NO: 424574 - DNA, 33 bp, Homo sapien
gctgagtctaagaacaggaactggatttcacca

SEQ ID NO: 424575 - DNA, 33 bp, Homo sapien
cccatttgaaaaatcacaggaataccaatacaa

SEQ ID NO: 424576 - DNA, 33 bp, Homo sapien
cccatttgaaaaatcataggaataccaatacaa

SEQ ID NO: 424577 - DNA, 33 bp, Homo sapien
tgtttcaggccaactccaatttggtgtttttgt

SEQ ID NO: 424578 - DNA, 33 bp, Homo sapien
tgtttcaggccaactctaatttggtgtttttgt

SEQ ID NO: 424579 - DNA, 33 bp, Homo sapien
tattttttttttgctgaagatcatattccagcc

SEQ ID NO: 424580 - DNA, 33 bp, Homo sapien
tattttttttttgctgcagatcatattccagcc

SEQ ID NO: 424581 - DNA, 33 bp, Homo sapien
ggcaggcactgtcctcactgcagaaagcttgcc

SEQ ID NO: 424582 - DNA, 33 bp, Homo sapien
ggcaggcactgtcctcgctgcagaaagcttgcc

SEQ ID NO: 424583 - DNA, 33 bp, Homo sapien
tggttctgaagtcagcgatgcaggagggatctc

SEQ ID NO: 424584 - DNA, 33 bp, Homo sapien
tggttctgaagtcagctatgcaggagggatctc

SEQ ID NO: 424585 - DNA, 33 bp, Homo sapien
ttttctaattcattcaatccttcaacagaaaat

SEQ ID NO: 424586 - DNA, 33 bp, Homo sapien
ttttctaattcattcagtccttcaacagaaaat

SEQ ID NO: 424587 - DNA, 33 bp, Homo sapien
caaaggggctcaaatcacctcaaatcttggtag

SEQ ID NO: 424588 - DNA, 33 bp, Homo sapien
caaaggggctcaaatcgcctcaaatcttggtag

SEQ ID NO: 424589 - DNA, 33 bp, Homo sapien
tggttggaaggaaataagggatttgccaaaatg

SEQ ID NO: 424590 - DNA, 33 bp, Homo sapien
tggttggaaggaaataggggatttgccaaaatg

SEQ ID NO: 424591 - DNA, 33 bp, Homo sapien
gcataccatgaatataagagtctgaatgggagg

SEQ ID NO: 424592 - DNA, 33 bp, Homo sapien
gcataccatgaatataggagtctgaatgggagg

SEQ ID NO: 424593 - DNA, 33 bp, Homo sapien
tatttttggttatgaacctctttaggtgttttt

SEQ ID NO: 424594 - DNA, 33 bp, Homo sapien
tatttttggttatgaatctctttaggtgttttt

SEQ ID NO: 424595 - DNA, 33 bp, Homo sapien
agaattaacttgctgggattgtgtatcgagctc

SEQ ID NO: 424596 - DNA, 33 bp, Homo sapien
agaattaacttgctggtattgtgtatcgagctc

SEQ ID NO: 424597 - DNA, 33 bp, Homo sapien
tcactgcaaaggacataaggcagcaggaacttt

SEQ ID NO: 424598 - DNA, 33 bp, Homo sapien
tcactgcaaaggacatgaggcagcaggaacttt

SEQ ID NO: 424599 - DNA, 33 bp, Homo sapien
ttggtgctgatatggaaacactgaaaatgggtg

SEQ ID NO: 424600 - DNA, 33 bp, Homo sapien
ttggtgctgatatggagacactgaaaatgggtg

SEQ ID NO: 424601 - DNA, 33 bp, Homo sapien
gcaccaatgtcatttaactgtaagattcttttt

SEQ ID NO: 424602 - DNA, 33 bp, Homo sapien
gcaccaatgtcatttagctgtaagattcttttt

SEQ ID NO: 424603 - DNA, 33 bp, Homo sapien
caaaagacatatctagaaaaccattgtgaggtt

SEQ ID NO: 424604 - DNA, 33 bp, Homo sapien
caaaagacatatctaggaaaccattgtgaggtt

SEQ ID NO: 424605 - DNA, 33 bp, Homo sapien
ttgttcaacgagatcacggtggcttcatgaaaa

SEQ ID NO: 424606 - DNA, 33 bp, Homo sapien
ttgttcaacgagatcatggtggcttcatgaaaa

SEQ ID NO: 424607 - DNA, 33 bp, Homo sapien
gagatagctgggctgcaatgaccactcagatag

SEQ ID NO: 424608 - DNA, 33 bp, Homo sapien
gagatagctgggctgcgatgaccactcagatag

SEQ ID NO: 424609 - DNA, 33 bp, Homo sapien
ctgctcagtaactacaacaaccctggagacaca

SEQ ID NO: 424610 - DNA, 33 bp, Homo sapien
ctgctcagtaactacagcaaccctggagacaca

SEQ ID NO: 424611 - DNA, 33 bp, Homo sapien
ctgccattctccaatccagtgcttcgtgtgcat

SEQ ID NO: 424612 - DNA, 33 bp, Homo sapien
ctgccattctccaatctagtgcttcgtgtgcat

SEQ ID NO: 424613 - DNA, 33 bp, Homo sapien
gtgacctttccttccaaataatgtaacaataaa

SEQ ID NO: 424614 - DNA, 33 bp, Homo sapien
gtgacctttccttccacataatgtaacaataaa

SEQ ID NO: 424615 - DNA, 33 bp, Homo sapien
tacatgtatatttttacggcaaaacaccacctc

SEQ ID NO: 424616 - DNA, 33 bp, Homo sapien
tacatgtatatttttatggcaaaacaccacctc

SEQ ID NO: 424617 - DNA, 33 bp, Homo sapien
gctatgcagaagctagaaagtttaattggagcc

SEQ ID NO: 424618 - DNA, 33 bp, Homo sapien
gctatgcagaagctaggaagtttaattggagcc

SEQ ID NO: 424619 - DNA, 33 bp, Homo sapien
tttgtaatgcaagttaaccattctcaataaaca

SEQ ID NO: 424620 - DNA, 33 bp, Homo sapien
tttgtaatgcaagttacccattctcaataaaca

SEQ ID NO: 424621 - DNA, 33 bp, Homo sapien
gtaataaaagttcccacgtggccagaaactttt

SEQ ID NO: 424622 - DNA, 33 bp, Homo sapien
gtaataaaagttcccatgtggccagaaactttt

SEQ ID NO: 424623 - DNA, 33 bp, Homo sapien
gaaacctcccaggtcaaagaaagcttggcaccc

SEQ ID NO: 424624 - DNA, 33 bp, Homo sapien
gaaacctcccaggtcagagaaagcttggcaccc

SEQ ID NO: 424625 - DNA, 33 bp, Homo sapien
atgggaaggctgaatcactttgcgtttgggatg

SEQ ID NO: 424626 - DNA, 33 bp, Homo sapien
atgggaaggctgaatcgctttgcgtttgggatg

SEQ ID NO: 424627 - DNA, 33 bp, Homo sapien
tttactttccatctcactcctcaaaatatcctc

SEQ ID NO: 424628 - DNA, 33 bp, Homo sapien
tttactttccatctcattcctcaaaatatcctc

SEQ ID NO: 424629 - DNA, 33 bp, Homo sapien
gagaaagagcaagaaacgctgggcgacaggatc

SEQ ID NO: 424630 - DNA, 33 bp, Homo sapien
gagaaagagcaagaaatgctgggcgacaggatc

SEQ ID NO: 424631 - DNA, 33 bp, Homo sapien
ttgtcattcagactcaagtttgcattaatgctc

SEQ ID NO: 424632 - DNA, 33 bp, Homo sapien
ttgtcattcagactcacgtttgcattaatgctc

SEQ ID NO: 424633 - DNA, 33 bp, Homo sapien
aggagtatctgtaatccgagctttccaaagaag

SEQ ID NO: 424634 - DNA, 33 bp, Homo sapien
aggagtatctgtaatctgagctttccaaagaag

SEQ ID NO: 424635 - DNA, 33 bp, Homo sapien
tcctacgtcctgtgtgaatgtttcataatgata

SEQ ID NO: 424636 - DNA, 33 bp, Homo sapien
tcctacgtcctgtgtgtatgtttcataatgata

SEQ ID NO: 424637 - DNA, 33 bp, Homo sapien
taatgccatgaagggaaaaaacaggattctcag

SEQ ID NO: 424638 - DNA, 33 bp, Homo sapien
taatgccatgaagggagaaaacaggattctcag

SEQ ID NO: 424639 - DNA, 33 bp, Homo sapien
cttgggcgatagtaaccgaggacggaaagctgg

SEQ ID NO: 424640 - DNA, 33 bp, Homo sapien
cttgggcgatagtaactgaggacggaaagctgg

SEQ ID NO: 424641 - DNA, 33 bp, Homo sapien
gggaaaaaagtcatcaaaatcccagagtggaga

SEQ ID NO: 424642 - DNA, 33 bp, Homo sapien
gggaaaaaagtcatcagaatcccagagtggaga

SEQ ID NO: 424643 - DNA, 33 bp, Homo sapien
agaattaaaagtggagaccgaagatgtgactaa

SEQ ID NO: 424644 - DNA, 33 bp, Homo sapien
agaattaaaagtggagcccgaagatgtgactaa

SEQ ID NO: 424645 - DNA, 33 bp, Homo sapien
actctgccttccctaaacacagtgaaccagctg

SEQ ID NO: 424646 - DNA, 33 bp, Homo sapien
actctgccttccctaagcacagtgaaccagctg

SEQ ID NO: 424647 - DNA, 33 bp, Homo sapien
caggtaacaaagcatactaggaactgtacaaaa

SEQ ID NO: 424648 - DNA, 33 bp, Homo sapien
caggtaacaaagcatattaggaactgtacaaaa

SEQ ID NO: 424649 - DNA, 33 bp, Homo sapien
tgaacaacgaactatactacggtcaacaaagac

SEQ ID NO: 424650 - DNA, 33 bp, Homo sapien
tgaacaacgaactatagtacggtcaacaaagac

SEQ ID NO: 424651 - DNA, 33 bp, Homo sapien
gaaggacaattttgacaacagacagaaggatag

SEQ ID NO: 424652 - DNA, 33 bp, Homo sapien
gaaggacaattttgacgacagacagaaggatag

SEQ ID NO: 424653 - DNA, 33 bp, Homo sapien
tggcagcaaccaagccagagtccaagcccctaa

SEQ ID NO: 424654 - DNA, 33 bp, Homo sapien
tggcagcaaccaagccggagtccaagcccctaa

SEQ ID NO: 424655 - DNA, 33 bp, Homo sapien
aaaagcactttccttacacagtgacgagacatt

SEQ ID NO: 424656 - DNA, 33 bp, Homo sapien
aaaagcactttccttatacagtgacgagacatt

SEQ ID NO: 424657 - DNA, 33 bp, Homo sapien
acagatgtgatgaaaaagtaccaaaatataccc

SEQ ID NO: 424658 - DNA, 33 bp, Homo sapien
acagatgtgatgaaaacgtaccaaaatataccc

SEQ ID NO: 424659 - DNA, 33 bp, Homo sapien
acaccaggtggtaatgacaaagtactgaccaac

SEQ ID NO: 424660 - DNA, 33 bp, Homo sapien
acaccaggtggtaatggcaaagtactgaccaac

SEQ ID NO: 424661 - DNA, 33 bp, Homo sapien
ccttccatgccagacacaagcgtctttaagagg

SEQ ID NO: 424662 - DNA, 33 bp, Homo sapien
ccttccatgccagacataagcgtctttaagagg

SEQ ID NO: 424663 - DNA, 33 bp, Homo sapien
ggtacagtagagatgacggcaacacctacttcc

SEQ ID NO: 424664 - DNA, 33 bp, Homo sapien
ggtacagtagagatgatggcaacacctacttcc

SEQ ID NO: 424665 - DNA, 33 bp, Homo sapien
cccaggtcccgtggtccgacatggcttactgtc

SEQ ID NO: 424666 - DNA, 33 bp, Homo sapien
cccaggtcccgtggtctgacatggcttactgtc

SEQ ID NO: 424667 - DNA, 33 bp, Homo sapien
gctggaagcagtgaacacctgtgtcttaggctc

SEQ ID NO: 424668 - DNA, 33 bp, Homo sapien
gctggaagcagtgaacgcctgtgtcttaggctc

SEQ ID NO: 424669 - DNA, 33 bp, Homo sapien
ccctatagaatcaatacggcagccctgagccta

SEQ ID NO: 424670 - DNA, 33 bp, Homo sapien
ccctatagaatcaatatggcagccctgagccta

SEQ ID NO: 424671 - DNA, 33 bp, Homo sapien
tgatgtgtgttgaaaacagatggtgcgtgaggc

SEQ ID NO: 424672 - DNA, 33 bp, Homo sapien
tgatgtgtgttgaaaatagatggtgcgtgaggc

SEQ ID NO: 424673 - DNA, 33 bp, Homo sapien
agcatacagtaagttaccaaattagagtaattg

SEQ ID NO: 424674 - DNA, 33 bp, Homo sapien
agcatacagtaagttatcaaattagagtaattg

SEQ ID NO: 424675 - DNA, 33 bp, Homo sapien
aaattggcttgataccaatgaaaatggcgacca

SEQ ID NO: 424676 - DNA, 33 bp, Homo sapien
aaattggcttgataccgatgaaaatggcgacca

SEQ ID NO: 424677 - DNA, 33 bp, Homo sapien
gatcatctgcgtaaaacctcagaggagtaagta

SEQ ID NO: 424678 - DNA, 33 bp, Homo sapien
gatcatctgcgtaaaatctcagaggagtaagta

SEQ ID NO: 424679 - DNA, 33 bp, Homo sapien
cactctaaagcttaaccagtcatctgaatacct

SEQ ID NO: 424680 - DNA, 33 bp, Homo sapien
cactctaaagcttaacgagtcatctgaatacct

SEQ ID NO: 424681 - DNA, 33 bp, Homo sapien
cagcccagtgaggggcaaagggcatagactctg

SEQ ID NO: 424682 - DNA, 33 bp, Homo sapien
cagcccagtgaggggcgaagggcatagactctg

SEQ ID NO: 424683 - DNA, 33 bp, Homo sapien
atcaaccagtgaatgaggatagtgctgaccaga

SEQ ID NO: 424684 - DNA, 33 bp, Homo sapien
atcaaccagtgaatgatgatagtgctgaccaga

SEQ ID NO: 424685 - DNA, 33 bp, Homo sapien
taaaaatttttgaaagaagacagaatgatagtc

SEQ ID NO: 424686 - DNA, 33 bp, Homo sapien
taaaaatttttgaaaggagacagaatgatagtc

SEQ ID NO: 424687 - DNA, 33 bp, Homo sapien
tcatgcccatttgagaaaggaacaagctgacgc

SEQ ID NO: 424688 - DNA, 33 bp, Homo sapien
tcatgcccatttgagagaggaacaagctgacgc

SEQ ID NO: 424689 - DNA, 33 bp, Homo sapien
ttatgaccagtgagagaataataagcaatgtac

SEQ ID NO: 424690 - DNA, 33 bp, Homo sapien
ttatgaccagtgagaggataataagcaatgtac

SEQ ID NO: 424691 - DNA, 33 bp, Homo sapien
tggggaggtcagatgacgagaggctttaggttt

SEQ ID NO: 424692 - DNA, 33 bp, Homo sapien
tggggaggtcagatgatgagaggctttaggttt

SEQ ID NO: 424693 - DNA, 33 bp, Homo sapien
ttataatctcacaaaaaaactgtggaaagtata

SEQ ID NO: 424694 - DNA, 33 bp, Homo sapien
ttataatctcacaaaacaactgtggaaagtata

SEQ ID NO: 424695 - DNA, 33 bp, Homo sapien
atggtattaactttgacgtaatttgcattttgg

SEQ ID NO: 424696 - DNA, 33 bp, Homo sapien
atggtattaactttgatgtaatttgcattttgg

SEQ ID NO: 424697 - DNA, 33 bp, Homo sapien
tggctaaccctttctacggtcctctgagggtgt

SEQ ID NO: 424698 - DNA, 33 bp, Homo sapien
tggctaaccctttctatggtcctctgagggtgt

SEQ ID NO: 424699 - DNA, 33 bp, Homo sapien
ttaaatgactgcttaacgattgaagtattgcag

SEQ ID NO: 424700 - DNA, 33 bp, Homo sapien
ttaaatgactgcttaatgattgaagtattgcag

SEQ ID NO: 424701 - DNA, 33 bp, Homo sapien
ttctagctgtgttcccaaataaaaaggtgatgc

SEQ ID NO: 424702 - DNA, 33 bp, Homo sapien
ttctagctgtgttcccgaataaaaaggtgatgc

SEQ ID NO: 424703 - DNA, 33 bp, Homo sapien
tgtgctggagagaagggataggtggagttccag

SEQ ID NO: 424704 - DNA, 33 bp, Homo sapien
tgtgctggagagaaggtataggtggagttccag

SEQ ID NO: 424705 - DNA, 33 bp, Homo sapien
taaaacatcaaaaagacagaatggtgtcagcaa

SEQ ID NO: 424706 - DNA, 33 bp, Homo sapien
taaaacatcaaaaagatagaatggtgtcagcaa

SEQ ID NO: 424707 - DNA, 33 bp, Homo sapien
ttcaaacaaaatcacaaatgtgagatacagctt

SEQ ID NO: 424708 - DNA, 33 bp, Homo sapien
ttcaaacaaaatcacagatgtgagatacagctt

SEQ ID NO: 424709 - DNA, 33 bp, Homo sapien
agattatctaattcaaaaatagttaagcacagc

SEQ ID NO: 424710 - DNA, 33 bp, Homo sapien
agattatctaattcaagaatagttaagcacagc

SEQ ID NO: 424711 - DNA, 33 bp, Homo sapien
cttaaaaacgagatcacagtgttttaaaatcag

SEQ ID NO: 424712 - DNA, 33 bp, Homo sapien
cttaaaaacgagatcatagtgttttaaaatcag

SEQ ID NO: 424713 - DNA, 33 bp, Homo sapien
tccatttttacataaaccatcagcctgttagtg

SEQ ID NO: 424714 - DNA, 33 bp, Homo sapien
tccatttttacataaatcatcagcctgttagtg

SEQ ID NO: 424715 - DNA, 33 bp, Homo sapien
ctctctctagacaataagtttcctcattagtct

SEQ ID NO: 424716 - DNA, 33 bp, Homo sapien
ctctctctagacaatatgtttcctcattagtct

SEQ ID NO: 424717 - DNA, 33 bp, Homo sapien
ccagcaggagagacaactaaggcccaagtgtgc

SEQ ID NO: 424718 - DNA, 33 bp, Homo sapien
ccagcaggagagacaagtaaggcccaagtgtgc

SEQ ID NO: 424719 - DNA, 33 bp, Homo sapien
ccactgtgctgcagccacatacacagcccagaa

SEQ ID NO: 424720 - DNA, 33 bp, Homo sapien
ccactgtgctgcagccgcatacacagcccagaa

SEQ ID NO: 424721 - DNA, 33 bp, Homo sapien
tataataagcaaaacactgtgacaactaaggtg

SEQ ID NO: 424722 - DNA, 33 bp, Homo sapien
tataataagcaaaacattgtgacaactaaggtg

SEQ ID NO: 424723 - DNA, 33 bp, Homo sapien
cgtaggctatttggaaaatgattagaattcata

SEQ ID NO: 424724 - DNA, 33 bp, Homo sapien
cgtaggctatttggaagatgattagaattcata

SEQ ID NO: 424725 - DNA, 33 bp, Homo sapien
ccagctcaagctgacactgattcgtggattctc

SEQ ID NO: 424726 - DNA, 33 bp, Homo sapien
ccagctcaagctgacattgattcgtggattctc

SEQ ID NO: 424727 - DNA, 33 bp, Homo sapien
tactggattttaactacgtcctttcagacagag

SEQ ID NO: 424728 - DNA, 33 bp, Homo sapien
tactggattttaactatgtcctttcagacagag

SEQ ID NO: 424729 - DNA, 33 bp, Homo sapien
tttttctatcctcacaaaagcactgaggtggac

SEQ ID NO: 424730 - DNA, 33 bp, Homo sapien
tttttctatcctcacagaagcactgaggtggac

SEQ ID NO: 424731 - DNA, 33 bp, Homo sapien
tacatgggccttaagtcaccgagattttccagc

SEQ ID NO: 424732 - DNA, 33 bp, Homo sapien
tacatgggccttaagttaccgagattttccagc

SEQ ID NO: 424733 - DNA, 33 bp, Homo sapien
actgggctaaaactcaagtgatggcaggacacc

SEQ ID NO: 424734 - DNA, 33 bp, Homo sapien
actgggctaaaactcaggtgatggcaggacacc

SEQ ID NO: 424735 - DNA, 33 bp, Homo sapien
aataaccaagctgcttaaaaggaattaccctga

SEQ ID NO: 424736 - DNA, 33 bp, Homo sapien
aataaccaagctgcttgaaaggaattaccctga

SEQ ID NO: 424737 - DNA, 33 bp, Homo sapien
tgtgttcactcctcccaattcacgtgtggatat

SEQ ID NO: 424738 - DNA, 33 bp, Homo sapien
tgtgttcactcctcccgattcacgtgtggatat

SEQ ID NO: 424739 - DNA, 33 bp, Homo sapien
atgttcaggtcaatgaataattttgtgcaatag

SEQ ID NO: 424740 - DNA, 33 bp, Homo sapien
atgttcaggtcaatgactaattttgtgcaatag

SEQ ID NO: 424741 - DNA, 33 bp, Homo sapien
gtccttctggcctgagcatttaacttgcagctt

SEQ ID NO: 424742 - DNA, 33 bp, Homo sapien
gtccttctggcctgaggatttaacttgcagctt

SEQ ID NO: 424743 - DNA, 33 bp, Homo sapien
ttggtgagactcaatcaaattgttacaggtgat

SEQ ID NO: 424744 - DNA, 33 bp, Homo sapien
ttggtgagactcaatcgaattgttacaggtgat

SEQ ID NO: 424745 - DNA, 33 bp, Homo sapien
aggtgcccattcacataataggctagactatat

SEQ ID NO: 424746 - DNA, 33 bp, Homo sapien
aggtgcccattcacatgataggctagactatat

SEQ ID NO: 424747 - DNA, 33 bp, Homo sapien
aaaatcttagtgcaggacaagagtgttttaaac

SEQ ID NO: 424748 - DNA, 33 bp, Homo sapien
aaaatcttagtgcagggcaagagtgttttaaac

SEQ ID NO: 424749 - DNA, 33 bp, Homo sapien
ccaggcataagatagaaaccaggtctaagtctt

SEQ ID NO: 424750 - DNA, 33 bp, Homo sapien
ccaggcataagatagagaccaggtctaagtctt

SEQ ID NO: 424751 - DNA, 33 bp, Homo sapien
acaaacgcttaataaccagcacaacaaggctgg

SEQ ID NO: 424752 - DNA, 33 bp, Homo sapien
acaaacgcttaataactagcacaacaaggctgg

SEQ ID NO: 424753 - DNA, 33 bp, Homo sapien
tttgtctaagtgagacaattgaagtgcttaaaa

SEQ ID NO: 424754 - DNA, 33 bp, Homo sapien
tttgtctaagtgagacgattgaagtgcttaaaa

SEQ ID NO: 424755 - DNA, 33 bp, Homo sapien
attttccagagtagaaaaaagggcatctctggt

SEQ ID NO: 424756 - DNA, 33 bp, Homo sapien
attttccagagtagaataaagggcatctctggt

SEQ ID NO: 424757 - DNA, 33 bp, Homo sapien
ggaatttaatgagtgaagtaacactgaaagcac

SEQ ID NO: 424758 - DNA, 33 bp, Homo sapien
ggaatttaatgagtgacgtaacactgaaagcac

SEQ ID NO: 424759 - DNA, 33 bp, Homo sapien
taaaataccatgcagcagaagttcccattgtgc

SEQ ID NO: 424760 - DNA, 33 bp, Homo sapien
taaaataccatgcagcggaagttcccattgtgc

SEQ ID NO: 424761 - DNA, 33 bp, Homo sapien
cctcctatctccccaccattctgcggctcatct

SEQ ID NO: 424762 - DNA, 33 bp, Homo sapien
cctcctatctccccactattctgcggctcatct

SEQ ID NO: 424763 - DNA, 33 bp, Homo sapien
acactctcactccaccagcaatgagttaggtat

SEQ ID NO: 424764 - DNA, 33 bp, Homo sapien
acactctcactccaccggcaatgagttaggtat

SEQ ID NO: 424765 - DNA, 33 bp, Homo sapien
ctatgctaagagaaaaagtgaggaaaagtgctg

SEQ ID NO: 424766 - DNA, 33 bp, Homo sapien
ctatgctaagagaaaaggtgaggaaaagtgctg

SEQ ID NO: 424767 - DNA, 33 bp, Homo sapien
atgtacacgttgcaaacaggatgctaaaatact

SEQ ID NO: 424768 - DNA, 33 bp, Homo sapien
atgtacacgttgcaaataggatgctaaaatact

SEQ ID NO: 424769 - DNA, 33 bp, Homo sapien
tacaaaaattagctgaaaaagtcattagatttt

SEQ ID NO: 424770 - DNA, 33 bp, Homo sapien
tacaaaaattagctgagaaagtcattagatttt

SEQ ID NO: 424771 - DNA, 33 bp, Homo sapien
tttaggaatcacatgacgtattgtatgaaaagg

SEQ ID NO: 424772 - DNA, 33 bp, Homo sapien
tttaggaatcacatgaggtattgtatgaaaagg

SEQ ID NO: 424773 - DNA, 33 bp, Homo sapien
cccaatgtgttagatacactgttattacagaag

SEQ ID NO: 424774 - DNA, 33 bp, Homo sapien
cccaatgtgttagatatactgttattacagaag

SEQ ID NO: 424775 - DNA, 33 bp, Homo sapien
gcagaaaatgatccaacggcttcccgctgctca

SEQ ID NO: 424776 - DNA, 33 bp, Homo sapien
gcagaaaatgatccaatggcttcccgctgctca

SEQ ID NO: 424777 - DNA, 33 bp, Homo sapien
tgcacctgtgaaacaacttctcttcgagtaaaa

SEQ ID NO: 424778 - DNA, 33 bp, Homo sapien
tgcacctgtgaaacaatttctcttcgagtaaaa

SEQ ID NO: 424779 - DNA, 33 bp, Homo sapien
gatctgtttctgtcacaagatctgcagctgatg

SEQ ID NO: 424780 - DNA, 33 bp, Homo sapien
gatctgtttctgtcacgagatctgcagctgatg

SEQ ID NO: 424781 - DNA, 33 bp, Homo sapien
acgcagcctaacctgcaatttgtcagttactta

SEQ ID NO: 424782 - DNA, 33 bp, Homo sapien
acgcagcctaacctgcgatttgtcagttactta

SEQ ID NO: 424783 - DNA, 33 bp, Homo sapien
caaaacatcaaacagaatccttgacatgggaaa

SEQ ID NO: 424784 - DNA, 33 bp, Homo sapien
caaaacatcaaacagagtccttgacatgggaaa

SEQ ID NO: 424785 - DNA, 33 bp, Homo sapien
tgacactccacacccacgacaactcacgctgca

SEQ ID NO: 424786 - DNA, 33 bp, Homo sapien
tgacactccacacccaggacaactcacgctgca

SEQ ID NO: 424787 - DNA, 33 bp, Homo sapien
gcggtggaaagaaaaccgccagtgagccctgaa

SEQ ID NO: 424788 - DNA, 33 bp, Homo sapien
gcggtggaaagaaaactgccagtgagccctgaa

SEQ ID NO: 424789 - DNA, 33 bp, Homo sapien
ccagagggactagaaacgactcaggcacaaagg

SEQ ID NO: 424790 - DNA, 33 bp, Homo sapien
ccagagggactagaaatgactcaggcacaaagg

SEQ ID NO: 424791 - DNA, 33 bp, Homo sapien
cagagctggagaaccacgctccgtttaagccac

SEQ ID NO: 424792 - DNA, 33 bp, Homo sapien
cagagctggagaaccatgctccgtttaagccac

SEQ ID NO: 424793 - DNA, 33 bp, Homo sapien
ccagacacctgcaggccctgaaaaagcgttgac

SEQ ID NO: 424794 - DNA, 33 bp, Homo sapien
ccagacacctgcaggctctgaaaaagcgttgac

SEQ ID NO: 424795 - DNA, 33 bp, Homo sapien
tggtgcttgttttaatcactgtgtcctccagaa

SEQ ID NO: 424796 - DNA, 33 bp, Homo sapien
tggtgcttgttttaatgactgtgtcctccagaa

SEQ ID NO: 424797 - DNA, 33 bp, Homo sapien
gtttttggagacacgccgaagtactgactagga

SEQ ID NO: 424798 - DNA, 33 bp, Homo sapien
gtttttggagacacgctgaagtactgactagga

SEQ ID NO: 424799 - DNA, 33 bp, Homo sapien
agaagctcgggcaagacgataaagccttgcatc

SEQ ID NO: 424800 - DNA, 33 bp, Homo sapien
agaagctcgggcaagatgataaagccttgcatc

SEQ ID NO: 424801 - DNA, 33 bp, Homo sapien
cttcacctggcaccaaaagagagctgacatggc

SEQ ID NO: 424802 - DNA, 33 bp, Homo sapien
cttcacctggcaccaacagagagctgacatggc

SEQ ID NO: 424803 - DNA, 33 bp, Homo sapien
gcagtatgtggattaacgagctctaatcaagga

SEQ ID NO: 424804 - DNA, 33 bp, Homo sapien
gcagtatgtggattaatgagctctaatcaagga

SEQ ID NO: 424805 - DNA, 33 bp, Homo sapien
tcaggtggcaggtgtagctctattcggtgagaa

SEQ ID NO: 424806 - DNA, 33 bp, Homo sapien
tcaggtggcaggtgtatctctattcggtgagaa

SEQ ID NO: 424807 - DNA, 33 bp, Homo sapien
atggctaaagtaaggacatgcaataaaaattta

SEQ ID NO: 424808 - DNA, 33 bp, Homo sapien
atggctaaagtaaggatatgcaataaaaattta

SEQ ID NO: 424809 - DNA, 33 bp, Homo sapien
ctctggtctcccacaaacctgagctgcctccag

SEQ ID NO: 424810 - DNA, 33 bp, Homo sapien
ctctggtctcccacaatcctgagctgcctccag

SEQ ID NO: 424811 - DNA, 33 bp, Homo sapien
aaatcctttcaaatgcaaaagtttttccaaacc

SEQ ID NO: 424812 - DNA, 33 bp, Homo sapien
aaatcctttcaaatgcgaaagtttttccaaacc

SEQ ID NO: 424813 - DNA, 33 bp, Homo sapien
gcctgcagatggcctacggctgccgcttgcctt

SEQ ID NO: 424814 - DNA, 33 bp, Homo sapien
gcctgcagatggcctatggctgccgcttgcctt

SEQ ID NO: 424815 - DNA, 33 bp, Homo sapien
ctcttactctgtgttacggagactgcctgggac

SEQ ID NO: 424816 - DNA, 33 bp, Homo sapien
ctcttactctgtgttatggagactgcctgggac

SEQ ID NO: 424817 - DNA, 33 bp, Homo sapien
atgctcaggattcctgaagaaacagtgtgcatt

SEQ ID NO: 424818 - DNA, 33 bp, Homo sapien
atgctcaggattcctgcagaaacagtgtgcatt

SEQ ID NO: 424819 - DNA, 33 bp, Homo sapien
ctcctaccactctaaccatactgcggtctctgt

SEQ ID NO: 424820 - DNA, 33 bp, Homo sapien
ctcctaccactctaactatactgcggtctctgt

SEQ ID NO: 424821 - DNA, 33 bp, Homo sapien
attttattcctgctacaatctttattatttatg

SEQ ID NO: 424822 - DNA, 33 bp, Homo sapien
attttattcctgctacgatctttattatttatg

SEQ ID NO: 424823 - DNA, 33 bp, Homo sapien
ggcagagtccagacacagtaaacaaaccttgga

SEQ ID NO: 424824 - DNA, 33 bp, Homo sapien
ggcagagtccagacacggtaaacaaaccttgga

SEQ ID NO: 424825 - DNA, 33 bp, Homo sapien
caagtcaaaaggtttcaatgcaagacactcagt

SEQ ID NO: 424826 - DNA, 33 bp, Homo sapien
caagtcaaaaggtttcgatgcaagacactcagt

SEQ ID NO: 424827 - DNA, 33 bp, Homo sapien
tgtctaatccacatccaaaatttagtcctttat

SEQ ID NO: 424828 - DNA, 33 bp, Homo sapien
tgtctaatccacatccgaaatttagtcctttat

SEQ ID NO: 424829 - DNA, 33 bp, Homo sapien
ttggcctattaaatagccagttatgatcctttg

SEQ ID NO: 424830 - DNA, 33 bp, Homo sapien
ttggcctattaaataggcagttatgatcctttg

SEQ ID NO: 424831 - DNA, 33 bp, Homo sapien
agatagctcttattgaccccacgctcattttga

SEQ ID NO: 424832 - DNA, 33 bp, Homo sapien
agatagctcttattgatcccacgctcattttga

SEQ ID NO: 424833 - DNA, 33 bp, Homo sapien
tttgagcacttttgcactgagaaaaacaacaat

SEQ ID NO: 424834 - DNA, 33 bp, Homo sapien
tttgagcacttttgcattgagaaaaacaacaat

SEQ ID NO: 424835 - DNA, 33 bp, Homo sapien
agtacagacagttcaacttcaaggacatcatac

SEQ ID NO: 424836 - DNA, 33 bp, Homo sapien
agtacagacagttcaatttcaaggacatcatac

SEQ ID NO: 424837 - DNA, 33 bp, Homo sapien
taaaacaactagaaagacaggaggaaaatctag

SEQ ID NO: 424838 - DNA, 33 bp, Homo sapien
taaaacaactagaaaggcaggaggaaaatctag

SEQ ID NO: 424839 - DNA, 33 bp, Homo sapien
ttgcgcagtatgtcccaaaaaggctagctaatg

SEQ ID NO: 424840 - DNA, 33 bp, Homo sapien
ttgcgcagtatgtcccgaaaaggctagctaatg

SEQ ID NO: 424841 - DNA, 33 bp, Homo sapien
ttcaaaaaaagtgtaccatttccatctgatcag

SEQ ID NO: 424842 - DNA, 33 bp, Homo sapien
ttcaaaaaaagtgtactatttccatctgatcag

SEQ ID NO: 424843 - DNA, 33 bp, Homo sapien
tgggttgcttggttaacaaataccacattaaat

SEQ ID NO: 424844 - DNA, 33 bp, Homo sapien
tgggttgcttggttaataaataccacattaaat

SEQ ID NO: 424845 - DNA, 33 bp, Homo sapien
aaggctctagtccttacgctgttgatgacattg

SEQ ID NO: 424846 - DNA, 33 bp, Homo sapien
aaggctctagtccttatgctgttgatgacattg

SEQ ID NO: 424847 - DNA, 33 bp, Homo sapien
cttttatccaaagaacaggcaataacaaatgct

SEQ ID NO: 424848 - DNA, 33 bp, Homo sapien
cttttatccaaagaaccggcaataacaaatgct

SEQ ID NO: 424849 - DNA, 33 bp, Homo sapien
gctacccatctgacaaaacattaataaccagag

SEQ ID NO: 424850 - DNA, 33 bp, Homo sapien
gctacccatctgacaagacattaataaccagag

SEQ ID NO: 424851 - DNA, 33 bp, Homo sapien
ggatgagccttggccaactcttgaaggtaaagg

SEQ ID NO: 424852 - DNA, 33 bp, Homo sapien
ggatgagccttggccagctcttgaaggtaaagg

SEQ ID NO: 424853 - DNA, 33 bp, Homo sapien
tacagtatcatttgcaaaactcaacaaggaaag

SEQ ID NO: 424854 - DNA, 33 bp, Homo sapien
tacagtatcatttgcagaactcaacaaggaaag

SEQ ID NO: 424855 - DNA, 33 bp, Homo sapien
ttacatatcagttgctaagaatatcttcttcca

SEQ ID NO: 424856 - DNA, 33 bp, Homo sapien
ttacatatcagttgctgagaatatcttcttcca

SEQ ID NO: 424857 - DNA, 33 bp, Homo sapien
ggcctgacctgacaaactaccctcttgaaatta

SEQ ID NO: 424858 - DNA, 33 bp, Homo sapien
ggcctgacctgacaaagtaccctcttgaaatta

SEQ ID NO: 424859 - DNA, 33 bp, Homo sapien
acacacgtatagaaagcagggaaaacacgaatg

SEQ ID NO: 424860 - DNA, 33 bp, Homo sapien
acacacgtatagaaagtagggaaaacacgaatg

SEQ ID NO: 424861 - DNA, 33 bp, Homo sapien
caatctgtacaggtaacatactgtgcactgcac

SEQ ID NO: 424862 - DNA, 33 bp, Homo sapien
caatctgtacaggtaatatactgtgcactgcac

SEQ ID NO: 424863 - DNA, 33 bp, Homo sapien
aggccaggtcctaacacatttgctaattgtgct

SEQ ID NO: 424864 - DNA, 33 bp, Homo sapien
aggccaggtcctaacatatttgctaattgtgct

SEQ ID NO: 424865 - DNA, 33 bp, Homo sapien
cccccagataaactcgccccgacaaggactgcc

SEQ ID NO: 424866 - DNA, 33 bp, Homo sapien
cccccagataaactcgtcccgacaaggactgcc

SEQ ID NO: 424867 - DNA, 33 bp, Homo sapien
gaggaagaagcagtacacaggaattggacagaa

SEQ ID NO: 424868 - DNA, 33 bp, Homo sapien
gaggaagaagcagtacgcaggaattggacagaa

SEQ ID NO: 424869 - DNA, 33 bp, Homo sapien
gagaagagttcaggtccactgtcagtctgtggc

SEQ ID NO: 424870 - DNA, 33 bp, Homo sapien
gagaagagttcaggtctactgtcagtctgtggc

SEQ ID NO: 424871 - DNA, 33 bp, Homo sapien
atagattcataacaaaatgattgcaaataacac

SEQ ID NO: 424872 - DNA, 33 bp, Homo sapien
atagattcataacaaagtgattgcaaataacac

SEQ ID NO: 424873 - DNA, 33 bp, Homo sapien
atgctgcttttcttgacctttctgtgctggccc

SEQ ID NO: 424874 - DNA, 33 bp, Homo sapien
atgctgcttttcttgatctttctgtgctggccc

SEQ ID NO: 424875 - DNA, 33 bp, Homo sapien
gattaggaatctgtcaactaaaagctctccctc

SEQ ID NO: 424876 - DNA, 33 bp, Homo sapien
gattaggaatctgtcatctaaaagctctccctc

SEQ ID NO: 424877 - DNA, 33 bp, Homo sapien
aaggggaggacattcaaaaggacctcttggcat

SEQ ID NO: 424878 - DNA, 33 bp, Homo sapien
aaggggaggacattcagaaggacctcttggcat

SEQ ID NO: 424879 - DNA, 33 bp, Homo sapien
atgtggttagacctcaaacttacaaaggctggg

SEQ ID NO: 424880 - DNA, 33 bp, Homo sapien
atgtggttagacctcagacttacaaaggctggg

SEQ ID NO: 424881 - DNA, 33 bp, Homo sapien
gcaatctgcagagtcccaatgaggaaaaaggag

SEQ ID NO: 424882 - DNA, 33 bp, Homo sapien
gcaatctgcagagtcctaatgaggaaaaaggag

SEQ ID NO: 424883 - DNA, 33 bp, Homo sapien
atccagacagactggaaagatgctagactgaga

SEQ ID NO: 424884 - DNA, 33 bp, Homo sapien
atccagacagactggagagatgctagactgaga

SEQ ID NO: 424885 - DNA, 33 bp, Homo sapien
cctattggatagttccaacatctgggccaggcc

SEQ ID NO: 424886 - DNA, 33 bp, Homo sapien
cctattggatagttccgacatctgggccaggcc

SEQ ID NO: 424887 - DNA, 33 bp, Homo sapien
cgtttttctctacaaaagttataggaaaaggca

SEQ ID NO: 424888 - DNA, 33 bp, Homo sapien
cgtttttctctacaaaggttataggaaaaggca

SEQ ID NO: 424889 - DNA, 33 bp, Homo sapien
aaaagaaacctcactaccctcgcctgcacctgc

SEQ ID NO: 424890 - DNA, 33 bp, Homo sapien
aaaagaaacctcactatcctcgcctgcacctgc

SEQ ID NO: 424891 - DNA, 33 bp, Homo sapien
ccagtggaggccctgggaaaagagctgctaagg

SEQ ID NO: 424892 - DNA, 33 bp, Homo sapien
ccagtggaggccctggtaaaagagctgctaagg

SEQ ID NO: 424893 - DNA, 33 bp, Homo sapien
cttggtagataaaatacggagtttctccagaaa

SEQ ID NO: 424894 - DNA, 33 bp, Homo sapien
cttggtagataaaatatggagtttctccagaaa

SEQ ID NO: 424895 - DNA, 33 bp, Homo sapien
tcctgagtcctcaacaaccttatttaggctgtt

SEQ ID NO: 424896 - DNA, 33 bp, Homo sapien
tcctgagtcctcaacacccttatttaggctgtt

SEQ ID NO: 424897 - DNA, 33 bp, Homo sapien
gtggcacagggagccacggttgctcctagcaca

SEQ ID NO: 424898 - DNA, 33 bp, Homo sapien
gtggcacagggagccatggttgctcctagcaca

SEQ ID NO: 424899 - DNA, 33 bp, Homo sapien
gttgctcacctcaccaaaaacatgggtgttgtc

SEQ ID NO: 424900 - DNA, 33 bp, Homo sapien
gttgctcacctcaccagaaacatgggtgttgtc

SEQ ID NO: 424901 - DNA, 33 bp, Homo sapien
caaaaaatctgtacaccgatgttcatggcagca

SEQ ID NO: 424902 - DNA, 33 bp, Homo sapien
caaaaaatctgtacactgatgttcatggcagca

SEQ ID NO: 424903 - DNA, 33 bp, Homo sapien
tcaatcctgaggaccaccctaagaagcaggtgc

SEQ ID NO: 424904 - DNA, 33 bp, Homo sapien
tcaatcctgaggaccatcctaagaagcaggtgc

SEQ ID NO: 424905 - DNA, 33 bp, Homo sapien
tgggcaatgggccaaacgcctggctcccatcac

SEQ ID NO: 424906 - DNA, 33 bp, Homo sapien
tgggcaatgggccaaatgcctggctcccatcac

SEQ ID NO: 424907 - DNA, 33 bp, Homo sapien
ctagtcaagagtagaactgatgtaaggctaaag

SEQ ID NO: 424908 - DNA, 33 bp, Homo sapien
ctagtcaagagtagaattgatgtaaggctaaag

SEQ ID NO: 424909 - DNA, 33 bp, Homo sapien
aatgaggcccaggactaaaaaacacgcagtaag

SEQ ID NO: 424910 - DNA, 33 bp, Homo sapien
aatgaggcccaggactgaaaaacacgcagtaag

SEQ ID NO: 424911 - DNA, 33 bp, Homo sapien
ccaaccagcacatagaaagaggctcaacatcat

SEQ ID NO: 424912 - DNA, 33 bp, Homo sapien
ccaaccagcacatagagagaggctcaacatcat

SEQ ID NO: 424913 - DNA, 33 bp, Homo sapien
ctgagtcatatgactacgtttaacctatgaaaa

SEQ ID NO: 424914 - DNA, 33 bp, Homo sapien
ctgagtcatatgactatgtttaacctatgaaaa

SEQ ID NO: 424915 - DNA, 33 bp, Homo sapien
ctgaaagtccatgtcaaattttcatttttacaa

SEQ ID NO: 424916 - DNA, 33 bp, Homo sapien
ctgaaagtccatgtcagattttcatttttacaa

SEQ ID NO: 424917 - DNA, 33 bp, Homo sapien
gagaggagctcgctcacatcgtgcactgcctcg

SEQ ID NO: 424918 - DNA, 33 bp, Homo sapien
gagaggagctcgctcatatcgtgcactgcctcg

SEQ ID NO: 424919 - DNA, 33 bp, Homo sapien
cttcttcctccctaacagaaccttgactttgtg

SEQ ID NO: 424920 - DNA, 33 bp, Homo sapien
cttcttcctccctaacggaaccttgactttgtg

SEQ ID NO: 424921 - DNA, 33 bp, Homo sapien
gtggcccaaatgctaacgagcagctgatggagg

SEQ ID NO: 424922 - DNA, 33 bp, Homo sapien
gtggcccaaatgctaaggagcagctgatggagg

SEQ ID NO: 424923 - DNA, 33 bp, Homo sapien
cacaattgcatggttcaaaaaactgaacataag

SEQ ID NO: 424924 - DNA, 33 bp, Homo sapien
cacaattgcatggttcgaaaaactgaacataag

SEQ ID NO: 424925 - DNA, 33 bp, Homo sapien
aattagttcactattcaagaaatgatatcatgg

SEQ ID NO: 424926 - DNA, 33 bp, Homo sapien
aattagttcactattctagaaatgatatcatgg

SEQ ID NO: 424927 - DNA, 33 bp, Homo sapien
gtttacttcagcctaaatggtataaaatcgtta

SEQ ID NO: 424928 - DNA, 33 bp, Homo sapien
gtttacttcagcctaactggtataaaatcgtta

SEQ ID NO: 424929 - DNA, 33 bp, Homo sapien
gcaaaactgtgctccaccgtggcaacaaaacag

SEQ ID NO: 424930 - DNA, 33 bp, Homo sapien
gcaaaactgtgctccagcgtggcaacaaaacag

SEQ ID NO: 424931 - DNA, 33 bp, Homo sapien
acaagaaaccaggacaaggaaggaagaactgga

SEQ ID NO: 424932 - DNA, 33 bp, Homo sapien
acaagaaaccaggacacggaaggaagaactgga

SEQ ID NO: 424933 - DNA, 33 bp, Homo sapien
gcataccaaaataataaagtatagcccacgtat

SEQ ID NO: 424934 - DNA, 33 bp, Homo sapien
gcataccaaaataatacagtatagcccacgtat

SEQ ID NO: 424935 - DNA, 33 bp, Homo sapien
atatattattctgtgtaaaaaaacctcaaaaaa

SEQ ID NO: 424936 - DNA, 33 bp, Homo sapien
atatattattctgtgttaaaaaacctcaaaaaa

SEQ ID NO: 424937 - DNA, 33 bp, Homo sapien
cacacttatataccaaatgtttcctggagctct

SEQ ID NO: 424938 - DNA, 33 bp, Homo sapien
cacacttatataccaagtgtttcctggagctct

SEQ ID NO: 424939 - DNA, 33 bp, Homo sapien
aatctgaaatacattaaaaccatgcaagagtct

SEQ ID NO: 424940 - DNA, 33 bp, Homo sapien
aatctgaaatacattacaaccatgcaagagtct

SEQ ID NO: 424941 - DNA, 33 bp, Homo sapien
ttacatgaatttcaaaagtaaaatccactatgt

SEQ ID NO: 424942 - DNA, 33 bp, Homo sapien
ttacatgaatttcaaaggtaaaatccactatgt

SEQ ID NO: 424943 - DNA, 33 bp, Homo sapien
aaaacaatgaattggaaataagcatggcttatg

SEQ ID NO: 424944 - DNA, 33 bp, Homo sapien
aaaacaatgaattggatataagcatggcttatg

SEQ ID NO: 424945 - DNA, 33 bp, Homo sapien
ttccaaggcaattgaccactttagttatccctc

SEQ ID NO: 424946 - DNA, 33 bp, Homo sapien
ttccaaggcaattgactactttagttatccctc

SEQ ID NO: 424947 - DNA, 33 bp, Homo sapien
aaaaccattgcaaataccaacaccagcgatggc

SEQ ID NO: 424948 - DNA, 33 bp, Homo sapien
aaaaccattgcaaatatcaacaccagcgatggc

SEQ ID NO: 424949 - DNA, 33 bp, Homo sapien
tgtctccaattcaagacggtgtccgaagaacta

SEQ ID NO: 424950 - DNA, 33 bp, Homo sapien
tgtctccaattcaagatggtgtccgaagaacta

SEQ ID NO: 424951 - DNA, 33 bp, Homo sapien
gcctttaaggagcaaactttatgggaatgtgaa

SEQ ID NO: 424952 - DNA, 33 bp, Homo sapien
gcctttaaggagcaaagtttatgggaatgtgaa

SEQ ID NO: 424953 - DNA, 33 bp, Homo sapien
catttattgaacgaataaagggatggatgaatg

SEQ ID NO: 424954 - DNA, 33 bp, Homo sapien
catttattgaacgaatgaagggatggatgaatg

SEQ ID NO: 424955 - DNA, 33 bp, Homo sapien
aatatagtccgggaaacgatccaagaagaaaaa

SEQ ID NO: 424956 - DNA, 33 bp, Homo sapien
aatatagtccgggaaatgatccaagaagaaaaa

SEQ ID NO: 424957 - DNA, 33 bp, Homo sapien
taatgacttccttggactattctcgagactttt

SEQ ID NO: 424958 - DNA, 33 bp, Homo sapien
taatgacttccttggattattctcgagactttt

SEQ ID NO: 424959 - DNA, 33 bp, Homo sapien
aaaaaatttattagacaagtccccttatgtccc

SEQ ID NO: 424960 - DNA, 33 bp, Homo sapien
aaaaaatttattagacgagtccccttatgtccc

SEQ ID NO: 424961 - DNA, 33 bp, Homo sapien
actatggcttatcttacaggtctcagatgaaat

SEQ ID NO: 424962 - DNA, 33 bp, Homo sapien
actatggcttatcttataggtctcagatgaaat

SEQ ID NO: 424963 - DNA, 33 bp, Homo sapien
agtatatgctactacaataaaaagccttcaagt

SEQ ID NO: 424964 - DNA, 33 bp, Homo sapien
agtatatgctactacagtaaaaagccttcaagt

SEQ ID NO: 424965 - DNA, 33 bp, Homo sapien
aggttctacaaggggcacactctagaaatgctt

SEQ ID NO: 424966 - DNA, 33 bp, Homo sapien
aggttctacaaggggcgcactctagaaatgctt

SEQ ID NO: 424967 - DNA, 33 bp, Homo sapien
actttctgtttatcaccgctaactttgtgggca

SEQ ID NO: 424968 - DNA, 33 bp, Homo sapien
actttctgtttatcactgctaactttgtgggca

SEQ ID NO: 424969 - DNA, 33 bp, Homo sapien
gtatattcatcgtggaatactactcttcagcca

SEQ ID NO: 424970 - DNA, 33 bp, Homo sapien
gtatattcatcgtggagtactactcttcagcca

SEQ ID NO: 424971 - DNA, 33 bp, Homo sapien
aaagaatgatataatgcactttgaggacttagc

SEQ ID NO: 424972 - DNA, 33 bp, Homo sapien
aaagaatgatataatggactttgaggacttagc

SEQ ID NO: 424973 - DNA, 33 bp, Homo sapien
aggcttttgcttcagaaaatgttgtggatggtt

SEQ ID NO: 424974 - DNA, 33 bp, Homo sapien
aggcttttgcttcagagaatgttgtggatggtt

SEQ ID NO: 424975 - DNA, 33 bp, Homo sapien
aataaatgcactacaaaaccttaacagaaaaag

SEQ ID NO: 424976 - DNA, 33 bp, Homo sapien
aataaatgcactacaacaccttaacagaaaaag

SEQ ID NO: 424977 - DNA, 33 bp, Homo sapien
tttccagtttgctgaacgctctctgacttttct

SEQ ID NO: 424978 - DNA, 33 bp, Homo sapien
tttccagtttgctgaatgctctctgacttttct

SEQ ID NO: 424979 - DNA, 33 bp, Homo sapien
tctgaacttgaacacaaaagctgaatacaacca

SEQ ID NO: 424980 - DNA, 33 bp, Homo sapien
tctgaacttgaacacacaagctgaatacaacca

SEQ ID NO: 424981 - DNA, 33 bp, Homo sapien
caacagtggatgtaaacagagttatggcttagt

SEQ ID NO: 424982 - DNA, 33 bp, Homo sapien
caacagtggatgtaaatagagttatggcttagt

SEQ ID NO: 424983 - DNA, 33 bp, Homo sapien
cttctccacccacctaccagtgcaggcagcaag

SEQ ID NO: 424984 - DNA, 33 bp, Homo sapien
cttctccacccacctagcagtgcaggcagcaag

SEQ ID NO: 424985 - DNA, 33 bp, Homo sapien
aatcaggcacacatggaactggcacatctgggt

SEQ ID NO: 424986 - DNA, 33 bp, Homo sapien
aatcaggcacacatggcactggcacatctgggt

SEQ ID NO: 424987 - DNA, 33 bp, Homo sapien
aatatcctaaactaacaaccacatctggaattg

SEQ ID NO: 424988 - DNA, 33 bp, Homo sapien
aatatcctaaactaacgaccacatctggaattg

SEQ ID NO: 424989 - DNA, 33 bp, Homo sapien
agtgagctgtttgaacggctgcactccaggctg

SEQ ID NO: 424990 - DNA, 33 bp, Homo sapien
agtgagctgtttgaactgctgcactccaggctg

SEQ ID NO: 424991 - DNA, 33 bp, Homo sapien
acgtgggcccagaaaacatgctcaccaccaggg

SEQ ID NO: 424992 - DNA, 33 bp, Homo sapien
acgtgggcccagaaaagatgctcaccaccaggg

SEQ ID NO: 424993 - DNA, 33 bp, Homo sapien
tagttatgtcctgctcaaatgtcccaactgcat

SEQ ID NO: 424994 - DNA, 33 bp, Homo sapien
tagttatgtcctgctcgaatgtcccaactgcat

SEQ ID NO: 424995 - DNA, 33 bp, Homo sapien
tcctgtcactgccataagttattgacatgacct

SEQ ID NO: 424996 - DNA, 33 bp, Homo sapien
tcctgtcactgccatacgttattgacatgacct

SEQ ID NO: 424997 - DNA, 33 bp, Homo sapien
aaatgtatcatttgaaagaaacaaaaataacaa

SEQ ID NO: 424998 - DNA, 33 bp, Homo sapien
aaatgtatcatttgaaggaaacaaaaataacaa

SEQ ID NO: 424999 - DNA, 33 bp, Homo sapien
atgccttggttcgggcgcttcctgagactctca

SEQ ID NO: 425000 - DNA, 33 bp, Homo sapien
atgccttggttcgggctcttcctgagactctca

SEQ ID NO: 425001 - DNA, 33 bp, Homo sapien
gagggaaatcacgttacattttagagggtaagg

SEQ ID NO: 425002 - DNA, 33 bp, Homo sapien
gagggaaatcacgttatattttagagggtaagg

SEQ ID NO: 425003 - DNA, 33 bp, Homo sapien
ctatgggacagcattgccaagagccctgactgg

SEQ ID NO: 425004 - DNA, 33 bp, Homo sapien
ctatgggacagcattggcaagagccctgactgg

SEQ ID NO: 425005 - DNA, 33 bp, Homo sapien
gagcaatctatgccccagctacacatcactgag

SEQ ID NO: 425006 - DNA, 33 bp, Homo sapien
gagcaatctatgccccggctacacatcactgag

SEQ ID NO: 425007 - DNA, 33 bp, Homo sapien
tgtaatgacttgccaaatgggacctgcccaggt

SEQ ID NO: 425008 - DNA, 33 bp, Homo sapien
tgtaatgacttgccaagtgggacctgcccaggt

SEQ ID NO: 425009 - DNA, 33 bp, Homo sapien
tataagtcacatagcaaagtgaatgaggttttt

SEQ ID NO: 425010 - DNA, 33 bp, Homo sapien
tataagtcacatagcagagtgaatgaggttttt

SEQ ID NO: 425011 - DNA, 33 bp, Homo sapien
agacatgatgctgggcgcttcacatgccatctc

SEQ ID NO: 425012 - DNA, 33 bp, Homo sapien
agacatgatgctgggctcttcacatgccatctc

SEQ ID NO: 425013 - DNA, 33 bp, Homo sapien
aagtgagagcacaggaaacatattttctagaca

SEQ ID NO: 425014 - DNA, 33 bp, Homo sapien
aagtgagagcacaggatacatattttctagaca

SEQ ID NO: 425015 - DNA, 33 bp, Homo sapien
ggcaattcagaactaacgttgtaagatctctag

SEQ ID NO: 425016 - DNA, 33 bp, Homo sapien
ggcaattcagaactaatgttgtaagatctctag

SEQ ID NO: 425017 - DNA, 33 bp, Homo sapien
accagcaaccagcttaagtatttatgcctgacc

SEQ ID NO: 425018 - DNA, 33 bp, Homo sapien
accagcaaccagcttacgtatttatgcctgacc

SEQ ID NO: 425019 - DNA, 33 bp, Homo sapien
tgcagtttgtggctagcaaggattttttttctg

SEQ ID NO: 425020 - DNA, 33 bp, Homo sapien
tgcagtttgtggctaggaaggattttttttctg

SEQ ID NO: 425021 - DNA, 33 bp, Homo sapien
cattttaagcacattacacctgagtgattgttg

SEQ ID NO: 425022 - DNA, 33 bp, Homo sapien
cattttaagcacattatacctgagtgattgttg

SEQ ID NO: 425023 - DNA, 33 bp, Homo sapien
ggctagatactataggaattatccaaatgcatg

SEQ ID NO: 425024 - DNA, 33 bp, Homo sapien
ggctagatactataggtattatccaaatgcatg

SEQ ID NO: 425025 - DNA, 33 bp, Homo sapien
aatctaaggagatccagagacattaaataactt

SEQ ID NO: 425026 - DNA, 33 bp, Homo sapien
aatctaaggagatccatagacattaaataactt

SEQ ID NO: 425027 - DNA, 33 bp, Homo sapien
tgtgatagaaggggaaagttttagctccagaac

SEQ ID NO: 425028 - DNA, 33 bp, Homo sapien
tgtgatagaaggggaaggttttagctccagaac

SEQ ID NO: 425029 - DNA, 33 bp, Homo sapien
acagtgttgtgacttacctgatgttacaatatc

SEQ ID NO: 425030 - DNA, 33 bp, Homo sapien
acagtgttgtgacttatctgatgttacaatatc

SEQ ID NO: 425031 - DNA, 33 bp, Homo sapien
agggagttgtgtcagcagactacacaagacaga

SEQ ID NO: 425032 - DNA, 33 bp, Homo sapien
agggagttgtgtcagcggactacacaagacaga

SEQ ID NO: 425033 - DNA, 33 bp, Homo sapien
agtaaggcagagcctacatcagactaaggaatt

SEQ ID NO: 425034 - DNA, 33 bp, Homo sapien
agtaaggcagagcctagatcagactaaggaatt

SEQ ID NO: 425035 - DNA, 33 bp, Homo sapien
tatacacaacagtgtaacaccaaccaaatcaag

SEQ ID NO: 425036 - DNA, 33 bp, Homo sapien
tatacacaacagtgtaccaccaaccaaatcaag

SEQ ID NO: 425037 - DNA, 33 bp, Homo sapien
ctgagtcttttggggaagtattcactgcaaaac

SEQ ID NO: 425038 - DNA, 33 bp, Homo sapien
ctgagtcttttggggatgtattcactgcaaaac

SEQ ID NO: 425039 - DNA, 33 bp, Homo sapien
agagaatgccagttacacctataatgagataat

SEQ ID NO: 425040 - DNA, 33 bp, Homo sapien
agagaatgccagttactcctataatgagataat

SEQ ID NO: 425041 - DNA, 33 bp, Homo sapien
ttttgtgcagctagacaaaagggagggggagtt

SEQ ID NO: 425042 - DNA, 33 bp, Homo sapien
ttttgtgcagctagacgaaagggagggggagtt

SEQ ID NO: 425043 - DNA, 33 bp, Homo sapien
tacatcctctgggacactgatggatgcagactc

SEQ ID NO: 425044 - DNA, 33 bp, Homo sapien
tacatcctctgggacagtgatggatgcagactc

SEQ ID NO: 425045 - DNA, 33 bp, Homo sapien
ggctttgaaaactactaacgtcacatagactgg

SEQ ID NO: 425046 - DNA, 33 bp, Homo sapien
ggctttgaaaactactgacgtcacatagactgg

SEQ ID NO: 425047 - DNA, 33 bp, Homo sapien
ggtggctacggaaagaaaccgcctcgcatccac

SEQ ID NO: 425048 - DNA, 33 bp, Homo sapien
ggtggctacggaaagagaccgcctcgcatccac

SEQ ID NO: 425049 - DNA, 33 bp, Homo sapien
ttgtgttccatatgaaggcccaccaaacggtga

SEQ ID NO: 425050 - DNA, 33 bp, Homo sapien
ttgtgttccatatgaatgcccaccaaacggtga

SEQ ID NO: 425051 - DNA, 33 bp, Homo sapien
gtgtgctcttagctccacctgtcctatttctgg

SEQ ID NO: 425052 - DNA, 33 bp, Homo sapien
gtgtgctcttagctccgcctgtcctatttctgg

SEQ ID NO: 425053 - DNA, 33 bp, Homo sapien
aaaagaaggtcaagtgaagaatgctgtagaaag

SEQ ID NO: 425054 - DNA, 33 bp, Homo sapien
aaaagaaggtcaagtgcagaatgctgtagaaag

SEQ ID NO: 425055 - DNA, 33 bp, Homo sapien
tacgcactaaaaaaaacgtgtgcttgctgctgc

SEQ ID NO: 425056 - DNA, 33 bp, Homo sapien
tacgcactaaaaaaaatgtgtgcttgctgctgc

SEQ ID NO: 425057 - DNA, 33 bp, Homo sapien
aagacttcttgtttgagcctccataaggctaca

SEQ ID NO: 425058 - DNA, 33 bp, Homo sapien
aagacttcttgtttgatcctccataaggctaca

SEQ ID NO: 425059 - DNA, 33 bp, Homo sapien
gctcaggattcactaaattaaactggagaatgg

SEQ ID NO: 425060 - DNA, 33 bp, Homo sapien
gctcaggattcactaagttaaactggagaatgg

SEQ ID NO: 425061 - DNA, 33 bp, Homo sapien
ggacatttattaacaacgatctggtgtgagtga

SEQ ID NO: 425062 - DNA, 33 bp, Homo sapien
ggacatttattaacaaggatctggtgtgagtga

SEQ ID NO: 425063 - DNA, 33 bp, Homo sapien
ttctaaaagtctgaaacggtgtgttggaaagtt

SEQ ID NO: 425064 - DNA, 33 bp, Homo sapien
ttctaaaagtctgaaatggtgtgttggaaagtt

SEQ ID NO: 425065 - DNA, 33 bp, Homo sapien
tggcagtagcaaatacgccaatgcattttggca

SEQ ID NO: 425066 - DNA, 33 bp, Homo sapien
tggcagtagcaaatactccaatgcattttggca

SEQ ID NO: 425067 - DNA, 33 bp, Homo sapien
ccttcaggctggccgcacctttggcctgaagtc

SEQ ID NO: 425068 - DNA, 33 bp, Homo sapien
ccttcaggctggccgctcctttggcctgaagtc

SEQ ID NO: 425069 - DNA, 33 bp, Homo sapien
ctacaaaaaggaccaaatatgttctcaacctcc

SEQ ID NO: 425070 - DNA, 33 bp, Homo sapien
ctacaaaaaggaccaagtatgttctcaacctcc

SEQ ID NO: 425071 - DNA, 33 bp, Homo sapien
acaggcaaatacagagaatcctaacataccagg

SEQ ID NO: 425072 - DNA, 33 bp, Homo sapien
acaggcaaatacagagcatcctaacataccagg

SEQ ID NO: 425073 - DNA, 33 bp, Homo sapien
gcagtacatatcaaaggcctcttgactcagata

SEQ ID NO: 425074 - DNA, 33 bp, Homo sapien
gcagtacatatcaaagtcctcttgactcagata

SEQ ID NO: 425075 - DNA, 33 bp, Homo sapien
tcattattagcaattaactattcatgctataaa

SEQ ID NO: 425076 - DNA, 33 bp, Homo sapien
tcattattagcaattagctattcatgctataaa

SEQ ID NO: 425077 - DNA, 33 bp, Homo sapien
aggtacctgtttgaaaatgaatctttgtcatac

SEQ ID NO: 425078 - DNA, 33 bp, Homo sapien
aggtacctgtttgaaagtgaatctttgtcatac

SEQ ID NO: 425079 - DNA, 33 bp, Homo sapien
tacaaatgttacagttaaaagtatatgcacctt

SEQ ID NO: 425080 - DNA, 33 bp, Homo sapien
tacaaatgttacagtttaaagtatatgcacctt

SEQ ID NO: 425081 - DNA, 33 bp, Homo sapien
tctccaggtttaaggaatagattctttggatcc

SEQ ID NO: 425082 - DNA, 33 bp, Homo sapien
tctccaggtttaaggagtagattctttggatcc

SEQ ID NO: 425083 - DNA, 33 bp, Homo sapien
agcacggtgcaaaattcaactggataaactaca

SEQ ID NO: 425084 - DNA, 33 bp, Homo sapien
agcacggtgcaaaatttaactggataaactaca

SEQ ID NO: 425085 - DNA, 33 bp, Homo sapien
caggttcctcacagcccgctttttctgtagccc

SEQ ID NO: 425086 - DNA, 33 bp, Homo sapien
caggttcctcacagcctgctttttctgtagccc

SEQ ID NO: 425087 - DNA, 33 bp, Homo sapien
aaaaccgccttccacaaaagttgaaataagaaa

SEQ ID NO: 425088 - DNA, 33 bp, Homo sapien
aaaaccgccttccacagaagttgaaataagaaa

SEQ ID NO: 425089 - DNA, 33 bp, Homo sapien
gcttctagtcagccgcaatcacaagggtgaaca

SEQ ID NO: 425090 - DNA, 33 bp, Homo sapien
gcttctagtcagccgcgatcacaagggtgaaca

SEQ ID NO: 425091 - DNA, 33 bp, Homo sapien
agcagtaccaggacaaaggcctcacagcggcca

SEQ ID NO: 425092 - DNA, 33 bp, Homo sapien
agcagtaccaggacaagggcctcacagcggcca

SEQ ID NO: 425093 - DNA, 33 bp, Homo sapien
aacgcctaagcctagacgttgatgacatcacat

SEQ ID NO: 425094 - DNA, 33 bp, Homo sapien
aacgcctaagcctagaggttgatgacatcacat

SEQ ID NO: 425095 - DNA, 33 bp, Homo sapien
agccagattctgcttacgttttggttgccccat

SEQ ID NO: 425096 - DNA, 33 bp, Homo sapien
agccagattctgcttatgttttggttgccccat

SEQ ID NO: 425097 - DNA, 33 bp, Homo sapien
gaggcctccctggacaatgcatccattttctca

SEQ ID NO: 425098 - DNA, 33 bp, Homo sapien
gaggcctccctggacattgcatccattttctca

SEQ ID NO: 425099 - DNA, 33 bp, Homo sapien
tcctcataagcttcacagtcccaaggtaaaatc

SEQ ID NO: 425100 - DNA, 33 bp, Homo sapien
tcctcataagcttcacggtcccaaggtaaaatc

SEQ ID NO: 425101 - DNA, 33 bp, Homo sapien
gaatggaatccagaaaaacccaaatacacacag

SEQ ID NO: 425102 - DNA, 33 bp, Homo sapien
gaatggaatccagaaagacccaaatacacacag

SEQ ID NO: 425103 - DNA, 33 bp, Homo sapien
aagaacacatttgccaatcatttatctgataac

SEQ ID NO: 425104 - DNA, 33 bp, Homo sapien
aagaacacatttgccagtcatttatctgataac

SEQ ID NO: 425105 - DNA, 33 bp, Homo sapien
tatttatgtattccatcagggagataattatga

SEQ ID NO: 425106 - DNA, 33 bp, Homo sapien
tatttatgtattccatgagggagataattatga

SEQ ID NO: 425107 - DNA, 33 bp, Homo sapien
agaggtgctaatgaccaatcacaccaatgagtc

SEQ ID NO: 425108 - DNA, 33 bp, Homo sapien
agaggtgctaatgaccgatcacaccaatgagtc

SEQ ID NO: 425109 - DNA, 33 bp, Homo sapien
ttattacctcactaaaagatgtgaatgacataa

SEQ ID NO: 425110 - DNA, 33 bp, Homo sapien
ttattacctcactaaaggatgtgaatgacataa

SEQ ID NO: 425111 - DNA, 33 bp, Homo sapien
tttctgtgttttgccactgaggcgtcctctaga

SEQ ID NO: 425112 - DNA, 33 bp, Homo sapien
tttctgtgttttgccagtgaggcgtcctctaga

SEQ ID NO: 425113 - DNA, 33 bp, Homo sapien
gcttcagacttcttcacagcattgtttcaggag

SEQ ID NO: 425114 - DNA, 33 bp, Homo sapien
gcttcagacttcttcatagcattgtttcaggag

SEQ ID NO: 425115 - DNA, 33 bp, Homo sapien
tgtcttcccaccttagcactgcttcatttggtg

SEQ ID NO: 425116 - DNA, 33 bp, Homo sapien
tgtcttcccaccttagtactgcttcatttggtg

SEQ ID NO: 425117 - DNA, 33 bp, Homo sapien
agaacactggtctgggccaatcccacattcccc

SEQ ID NO: 425118 - DNA, 33 bp, Homo sapien
agaacactggtctgggtcaatcccacattcccc

SEQ ID NO: 425119 - DNA, 33 bp, Homo sapien
tgtttgatgaaaaagcagagcctctgaaagcag

SEQ ID NO: 425120 - DNA, 33 bp, Homo sapien
tgtttgatgaaaaagcggagcctctgaaagcag

SEQ ID NO: 425121 - DNA, 33 bp, Homo sapien
catgaacgaatgttgaaaaaaagggaatttgag

SEQ ID NO: 425122 - DNA, 33 bp, Homo sapien
catgaacgaatgttgagaaaaagggaatttgag

SEQ ID NO: 425123 - DNA, 33 bp, Homo sapien
ggcaaagccaggcgaccaatgtgcgcacccagg

SEQ ID NO: 425124 - DNA, 33 bp, Homo sapien
ggcaaagccaggcgactaatgtgcgcacccagg

SEQ ID NO: 425125 - DNA, 33 bp, Homo sapien
ctttgtggtgacttcaagcaatacgggttatct

SEQ ID NO: 425126 - DNA, 33 bp, Homo sapien
ctttgtggtgacttcaggcaatacgggttatct

SEQ ID NO: 425127 - DNA, 33 bp, Homo sapien
gtgatgaggagatgggaagtgatttatggcatg

SEQ ID NO: 425128 - DNA, 33 bp, Homo sapien
gtgatgaggagatggggagtgatttatggcatg

SEQ ID NO: 425129 - DNA, 33 bp, Homo sapien
atgttgcatctaaccactgctttttattctttg

SEQ ID NO: 425130 - DNA, 33 bp, Homo sapien
atgttgcatctaaccattgctttttattctttg

SEQ ID NO: 425131 - DNA, 33 bp, Homo sapien
gcctcccaagaaatccaagaggtcctgttacat

SEQ ID NO: 425132 - DNA, 33 bp, Homo sapien
gcctcccaagaaatccgagaggtcctgttacat

SEQ ID NO: 425133 - DNA, 33 bp, Homo sapien
tctcctgagagcacaccgtaacttctattggag

SEQ ID NO: 425134 - DNA, 33 bp, Homo sapien
tctcctgagagcacactgtaacttctattggag

SEQ ID NO: 425135 - DNA, 33 bp, Homo sapien
ctctcgcatagacatcaatggcaggtccatcct

SEQ ID NO: 425136 - DNA, 33 bp, Homo sapien
ctctcgcatagacatctatggcaggtccatcct

SEQ ID NO: 425137 - DNA, 33 bp, Homo sapien
tggaatttgagaagaacggggacagtttgatca

SEQ ID NO: 425138 - DNA, 33 bp, Homo sapien
tggaatttgagaagaatggggacagtttgatca

SEQ ID NO: 425139 - DNA, 33 bp, Homo sapien
cacgatgccaaagaaacggacgatcctacagtc

SEQ ID NO: 425140 - DNA, 33 bp, Homo sapien
cacgatgccaaagaaatggacgatcctacagtc

SEQ ID NO: 425141 - DNA, 33 bp, Homo sapien
agtatgacagtggccaactagcaaacttcatca

SEQ ID NO: 425142 - DNA, 33 bp, Homo sapien
agtatgacagtggccagctagcaaacttcatca

SEQ ID NO: 425143 - DNA, 33 bp, Homo sapien
tccgcgatgaaagggccgaaggtggtccaggtg

SEQ ID NO: 425144 - DNA, 33 bp, Homo sapien
tccgcgatgaaagggctgaaggtggtccaggtg

SEQ ID NO: 425145 - DNA, 33 bp, Homo sapien
atttagcaacaaagaaaagagcagaagccatcc

SEQ ID NO: 425146 - DNA, 33 bp, Homo sapien
atttagcaacaaagaacagagcagaagccatcc

SEQ ID NO: 425147 - DNA, 33 bp, Homo sapien
agtaacagcttgctgcaatggtatttcacttca

SEQ ID NO: 425148 - DNA, 33 bp, Homo sapien
agtaacagcttgctgcgatggtatttcacttca

SEQ ID NO: 425149 - DNA, 33 bp, Homo sapien
ttcctggaggccagaacgccttgctagctctgc

SEQ ID NO: 425150 - DNA, 33 bp, Homo sapien
ttcctggaggccagaatgccttgctagctctgc

SEQ ID NO: 425151 - DNA, 33 bp, Homo sapien
cactcaatgtgccttacagatccttccacgtcc

SEQ ID NO: 425152 - DNA, 33 bp, Homo sapien
cactcaatgtgccttagagatccttccacgtcc

SEQ ID NO: 425153 - DNA, 33 bp, Homo sapien
tgtgtgaaaggtgggcgaaggtgcctgttcgac

SEQ ID NO: 425154 - DNA, 33 bp, Homo sapien
tgtgtgaaaggtgggctaaggtgcctgttcgac

SEQ ID NO: 425155 - DNA, 33 bp, Homo sapien
aggcctctgcaccaagaacaagcctctaactta

SEQ ID NO: 425156 - DNA, 33 bp, Homo sapien
aggcctctgcaccaaggacaagcctctaactta

SEQ ID NO: 425157 - DNA, 33 bp, Homo sapien
gcagtcacagggaagacctctggctttgctggg

SEQ ID NO: 425158 - DNA, 33 bp, Homo sapien
gcagtcacagggaagatctctggctttgctggg

SEQ ID NO: 425159 - DNA, 33 bp, Homo sapien
tgggatttgcttttcaccggcgaagtcatcatc

SEQ ID NO: 425160 - DNA, 33 bp, Homo sapien
tgggatttgcttttcatcggcgaagtcatcatc

SEQ ID NO: 425161 - DNA, 33 bp, Homo sapien
tcagaggagacattgaacctcggcatggtgtct

SEQ ID NO: 425162 - DNA, 33 bp, Homo sapien
tcagaggagacattgagcctcggcatggtgtct

SEQ ID NO: 425163 - DNA, 33 bp, Homo sapien
catcacagagaacatacaatgcaactgaagctt

SEQ ID NO: 425164 - DNA, 33 bp, Homo sapien
catcacagagaacatataatgcaactgaagctt

SEQ ID NO: 425165 - DNA, 33 bp, Homo sapien
ctgactgcaagaaaccaattccttccccacagc

SEQ ID NO: 425166 - DNA, 33 bp, Homo sapien
ctgactgcaagaaaccgattccttccccacagc

SEQ ID NO: 425167 - DNA, 33 bp, Homo sapien
gttcttgttcaaatgaaatccacacgtaagggc

SEQ ID NO: 425168 - DNA, 33 bp, Homo sapien
gttcttgttcaaatgacatccacacgtaagggc

SEQ ID NO: 425169 - DNA, 33 bp, Homo sapien
gttagctcagaggctaagagaagggaaagctat

SEQ ID NO: 425170 - DNA, 33 bp, Homo sapien
gttagctcagaggctatgagaagggaaagctat

SEQ ID NO: 425171 - DNA, 33 bp, Homo sapien
gcatgggaatgtaggaaggaatgcagagccacg

SEQ ID NO: 425172 - DNA, 33 bp, Homo sapien
gcatgggaatgtaggagggaatgcagagccacg

SEQ ID NO: 425173 - DNA, 33 bp, Homo sapien
gccatgacagagaggaacagcagctaagttaat

SEQ ID NO: 425174 - DNA, 33 bp, Homo sapien
gccatgacagagaggagcagcagctaagttaat

SEQ ID NO: 425175 - DNA, 33 bp, Homo sapien
agattacgtcaacacaagacttcacagtgtcag

SEQ ID NO: 425176 - DNA, 33 bp, Homo sapien
agattacgtcaacacaggacttcacagtgtcag

SEQ ID NO: 425177 - DNA, 33 bp, Homo sapien
tcttcatttagtaatacgcgtttcatgttctcc

SEQ ID NO: 425178 - DNA, 33 bp, Homo sapien
tcttcatttagtaatatgcgtttcatgttctcc

SEQ ID NO: 425179 - DNA, 33 bp, Homo sapien
aagaacaaacaccataggatcatctcaattgat

SEQ ID NO: 425180 - DNA, 33 bp, Homo sapien
aagaacaaacaccatatgatcatctcaattgat

SEQ ID NO: 425181 - DNA, 33 bp, Homo sapien
caaagtggctccgagacgtgatgttttttccct

SEQ ID NO: 425182 - DNA, 33 bp, Homo sapien
caaagtggctccgagatgtgatgttttttccct

SEQ ID NO: 425183 - DNA, 33 bp, Homo sapien
tgaatgataaggtcaccggaacagtcagctggc

SEQ ID NO: 425184 - DNA, 33 bp, Homo sapien
tgaatgataaggtcactggaacagtcagctggc

SEQ ID NO: 425185 - DNA, 33 bp, Homo sapien
ttcggaccgtgagaagacacaggtgccccggag

SEQ ID NO: 425186 - DNA, 33 bp, Homo sapien
ttcggaccgtgagaagccacaggtgccccggag

SEQ ID NO: 425187 - DNA, 33 bp, Homo sapien
ggaaagcattgtcttacaggaacatggagtcca

SEQ ID NO: 425188 - DNA, 33 bp, Homo sapien
ggaaagcattgtcttataggaacatggagtcca

SEQ ID NO: 425189 - DNA, 33 bp, Homo sapien
tcctgagggcagggaccggcctttctgatggca

SEQ ID NO: 425190 - DNA, 33 bp, Homo sapien
tcctgagggcagggactggcctttctgatggca

SEQ ID NO: 425191 - DNA, 33 bp, Homo sapien
tgtgacacacatcaaacgccacctgcggggccc

SEQ ID NO: 425192 - DNA, 33 bp, Homo sapien
tgtgacacacatcaaatgccacctgcggggccc

SEQ ID NO: 425193 - DNA, 33 bp, Homo sapien
caatcaaatatcaagaacctctatctttttcct

SEQ ID NO: 425194 - DNA, 33 bp, Homo sapien
caatcaaatatcaagagcctctatctttttcct

SEQ ID NO: 425195 - DNA, 33 bp, Homo sapien
accctgaactacattacgctgaacaagtaacca

SEQ ID NO: 425196 - DNA, 33 bp, Homo sapien
accctgaactacattatgctgaacaagtaacca

SEQ ID NO: 425197 - DNA, 33 bp, Homo sapien
tctcgcacattctttcaaaatgctttgaccaga

SEQ ID NO: 425198 - DNA, 33 bp, Homo sapien
tctcgcacattctttcgaaatgctttgaccaga

SEQ ID NO: 425199 - DNA, 33 bp, Homo sapien
agaatcatcctcttcacgttgttttaggatgta

SEQ ID NO: 425200 - DNA, 33 bp, Homo sapien
agaatcatcctcttcatgttgttttaggatgta

SEQ ID NO: 425201 - DNA, 33 bp, Homo sapien
aaaatatgctgcaaaaatagaggcaacattctc

SEQ ID NO: 425202 - DNA, 33 bp, Homo sapien
aaaatatgctgcaaaagtagaggcaacattctc

SEQ ID NO: 425203 - DNA, 33 bp, Homo sapien
ccgggggagttccgtaactggtgtgtaatgagc

SEQ ID NO: 425204 - DNA, 33 bp, Homo sapien
ccgggggagttccgtagctggtgtgtaatgagc

SEQ ID NO: 425205 - DNA, 33 bp, Homo sapien
ggagctctgtttcaaacacgttaatttctgttg

SEQ ID NO: 425206 - DNA, 33 bp, Homo sapien
ggagctctgtttcaaatacgttaatttctgttg

SEQ ID NO: 425207 - DNA, 33 bp, Homo sapien
tatcatccagagataacagtttgcttaatagaa

SEQ ID NO: 425208 - DNA, 33 bp, Homo sapien
tatcatccagagataatagtttgcttaatagaa

SEQ ID NO: 425209 - DNA, 33 bp, Homo sapien
atgatcagtgattctacaaatttttaagacagg

SEQ ID NO: 425210 - DNA, 33 bp, Homo sapien
atgatcagtgattctataaatttttaagacagg

SEQ ID NO: 425211 - DNA, 33 bp, Homo sapien
catatccacctggcaggatcaacagaggcagat

SEQ ID NO: 425212 - DNA, 33 bp, Homo sapien
catatccacctggcagtatcaacagaggcagat

SEQ ID NO: 425213 - DNA, 33 bp, Homo sapien
aggaaatgtgtctgaaataccattgatcctcat

SEQ ID NO: 425214 - DNA, 33 bp, Homo sapien
aggaaatgtgtctgaagtaccattgatcctcat

SEQ ID NO: 425215 - DNA, 33 bp, Homo sapien
tttcggtactgttctacgtaagaagtgaggaag

SEQ ID NO: 425216 - DNA, 33 bp, Homo sapien
tttcggtactgttctatgtaagaagtgaggaag

SEQ ID NO: 425217 - DNA, 33 bp, Homo sapien
cttaaccagaaaacaacctccttcccatgtccc

SEQ ID NO: 425218 - DNA, 33 bp, Homo sapien
cttaaccagaaaacaatctccttcccatgtccc

SEQ ID NO: 425219 - DNA, 33 bp, Homo sapien
tgctgagagtggggagacgaattcacacctgca

SEQ ID NO: 425220 - DNA, 33 bp, Homo sapien
tgctgagagtggggaggcgaattcacacctgca

SEQ ID NO: 425221 - DNA, 33 bp, Homo sapien
gagtactacctggacaagacacaatcgaagaag

SEQ ID NO: 425222 - DNA, 33 bp, Homo sapien
gagtactacctggacaggacacaatcgaagaag

SEQ ID NO: 425223 - DNA, 33 bp, Homo sapien
ttaagtatttgccacaaccctggggcagtgaag

SEQ ID NO: 425224 - DNA, 33 bp, Homo sapien
ttaagtatttgccacatccctggggcagtgaag

SEQ ID NO: 425225 - DNA, 33 bp, Homo sapien
ttcagcaagaaatgaactggcctaccgaactca

SEQ ID NO: 425226 - DNA, 33 bp, Homo sapien
ttcagcaagaaatgaattggcctaccgaactca

SEQ ID NO: 425227 - DNA, 33 bp, Homo sapien
ctgtactagcccagcacgcgtggacacattcat

SEQ ID NO: 425228 - DNA, 33 bp, Homo sapien
ctgtactagcccagcatgcgtggacacattcat

SEQ ID NO: 425229 - DNA, 33 bp, Homo sapien
tgccgttagttactcaaaattagaaataagtat

SEQ ID NO: 425230 - DNA, 33 bp, Homo sapien
tgccgttagttactcagaattagaaataagtat

SEQ ID NO: 425231 - DNA, 33 bp, Homo sapien
caagaaagctactagaacaaatagatgaattca

SEQ ID NO: 425232 - DNA, 33 bp, Homo sapien
caagaaagctactagagcaaatagatgaattca

SEQ ID NO: 425233 - DNA, 33 bp, Homo sapien
tagtctgttcttacaccgctatcaaaaatacct

SEQ ID NO: 425234 - DNA, 33 bp, Homo sapien
tagtctgttcttacactgctatcaaaaatacct

SEQ ID NO: 425235 - DNA, 33 bp, Homo sapien
catggcatttgtctataacccataaaccatctt

SEQ ID NO: 425236 - DNA, 33 bp, Homo sapien
catggcatttgtctatgacccataaaccatctt

SEQ ID NO: 425237 - DNA, 33 bp, Homo sapien
taaaaattaagtcataaattctgactggagctt

SEQ ID NO: 425238 - DNA, 33 bp, Homo sapien
taaaaattaagtcatacattctgactggagctt

SEQ ID NO: 425239 - DNA, 33 bp, Homo sapien
tgaagaggagcagagacgacttggccacccact

SEQ ID NO: 425240 - DNA, 33 bp, Homo sapien
tgaagaggagcagagatgacttggccacccact

SEQ ID NO: 425241 - DNA, 33 bp, Homo sapien
gagagaggctcacgcaagtcacatatctcgcct

SEQ ID NO: 425242 - DNA, 33 bp, Homo sapien
gagagaggctcacgcaggtcacatatctcgcct

SEQ ID NO: 425243 - DNA, 33 bp, Homo sapien
tctcgccttgaatcacacaagtggtaagcagtg

SEQ ID NO: 425244 - DNA, 33 bp, Homo sapien
tctcgccttgaatcacccaagtggtaagcagtg

SEQ ID NO: 425245 - DNA, 33 bp, Homo sapien
aagtgtccacggtctgcagatgaacagttgcaa

SEQ ID NO: 425246 - DNA, 33 bp, Homo sapien
aagtgtccacggtctgtagatgaacagttgcaa

SEQ ID NO: 425247 - DNA, 33 bp, Homo sapien
tagtcccaataggaacagaactaagcagaagaa

SEQ ID NO: 425248 - DNA, 33 bp, Homo sapien
tagtcccaataggaaccgaactaagcagaagaa

SEQ ID NO: 425249 - DNA, 33 bp, Homo sapien
ctgcgtatctaatgctcacgactctcactttgc

SEQ ID NO: 425250 - DNA, 33 bp, Homo sapien
ctgcgtatctaatgcttacgactctcactttgc

SEQ ID NO: 425251 - DNA, 33 bp, Homo sapien
tcttggagatactttacaacgctgagagcacac

SEQ ID NO: 425252 - DNA, 33 bp, Homo sapien
tcttggagatactttataacgctgagagcacac

SEQ ID NO: 425253 - DNA, 33 bp, Homo sapien
tttggggcaccacaaaccatacccatataagac

SEQ ID NO: 425254 - DNA, 33 bp, Homo sapien
tttggggcaccacaaatcatacccatataagac

SEQ ID NO: 425255 - DNA, 33 bp, Homo sapien
agttaggtttccaccacactgtagtctctctag

SEQ ID NO: 425256 - DNA, 33 bp, Homo sapien
agttaggtttccaccatactgtagtctctctag

SEQ ID NO: 425257 - DNA, 33 bp, Homo sapien
tctacctatcagaaaaagattacagaattcatg

SEQ ID NO: 425258 - DNA, 33 bp, Homo sapien
tctacctatcagaaaacgattacagaattcatg

SEQ ID NO: 425259 - DNA, 33 bp, Homo sapien
tgatagtgcagtggatcaagtttggccacagat

SEQ ID NO: 425260 - DNA, 33 bp, Homo sapien
tgatagtgcagtggatgaagtttggccacagat

SEQ ID NO: 425261 - DNA, 33 bp, Homo sapien
tccctgaattgatccacaatggtgagctatggc

SEQ ID NO: 425262 - DNA, 33 bp, Homo sapien
tccctgaattgatccagaatggtgagctatggc

SEQ ID NO: 425263 - DNA, 33 bp, Homo sapien
ctcctgttctttgctccacatttggaagctttt

SEQ ID NO: 425264 - DNA, 33 bp, Homo sapien
ctcctgttctttgctctacatttggaagctttt

SEQ ID NO: 425265 - DNA, 33 bp, Homo sapien
ggaacacaggctgataaaaggccactctccttc

SEQ ID NO: 425266 - DNA, 33 bp, Homo sapien
ggaacacaggctgatataaggccactctccttc

SEQ ID NO: 425267 - DNA, 33 bp, Homo sapien
tcatccagttagagaaagaagatgtgtctgtgt

SEQ ID NO: 425268 - DNA, 33 bp, Homo sapien
tcatccagttagagaaggaagatgtgtctgtgt

SEQ ID NO: 425269 - DNA, 33 bp, Homo sapien
gaagctctttccaaaacggagctacctctggtt

SEQ ID NO: 425270 - DNA, 33 bp, Homo sapien
gaagctctttccaaaatggagctacctctggtt

SEQ ID NO: 425271 - DNA, 33 bp, Homo sapien
ccactcagtgcagatacgagatatgcagactag

SEQ ID NO: 425272 - DNA, 33 bp, Homo sapien
ccactcagtgcagatatgagatatgcagactag

SEQ ID NO: 425273 - DNA, 33 bp, Homo sapien
tgctgacggtacaggcaaatgctgaagaggacc

SEQ ID NO: 425274 - DNA, 33 bp, Homo sapien
tgctgacggtacaggcgaatgctgaagaggacc

SEQ ID NO: 425275 - DNA, 33 bp, Homo sapien
cgatgggaaatgaaaacgcacagaggatatatc

SEQ ID NO: 425276 - DNA, 33 bp, Homo sapien
cgatgggaaatgaaaatgcacagaggatatatc

SEQ ID NO: 425277 - DNA, 33 bp, Homo sapien
ccttgtccttgaatgaagcatgaactgtgcctt

SEQ ID NO: 425278 - DNA, 33 bp, Homo sapien
ccttgtccttgaatgaggcatgaactgtgcctt

SEQ ID NO: 425279 - DNA, 33 bp, Homo sapien
ctgaaggcaattgcagaagccgtccaccgcatg

SEQ ID NO: 425280 - DNA, 33 bp, Homo sapien
ctgaaggcaattgcaggagccgtccaccgcatg

SEQ ID NO: 425281 - DNA, 33 bp, Homo sapien
tgaaaaatgttacggtcaatgcaaagaatatga

SEQ ID NO: 425282 - DNA, 33 bp, Homo sapien
tgaaaaatgttacggttaatgcaaagaatatga

SEQ ID NO: 425283 - DNA, 33 bp, Homo sapien
ttaatttcagatgtcacgtctttcctcccacca

SEQ ID NO: 425284 - DNA, 33 bp, Homo sapien
ttaatttcagatgtcatgtctttcctcccacca

SEQ ID NO: 425285 - DNA, 33 bp, Homo sapien
taagcaacttaaagtgaaccacgcatttcactg

SEQ ID NO: 425286 - DNA, 33 bp, Homo sapien
taagcaacttaaagtggaccacgcatttcactg

SEQ ID NO: 425287 - DNA, 33 bp, Homo sapien
taattattagtagaaacgtgcagagtgcagaac

SEQ ID NO: 425288 - DNA, 33 bp, Homo sapien
taattattagtagaaatgtgcagagtgcagaac

SEQ ID NO: 425289 - DNA, 33 bp, Homo sapien
gagggttgctgttggcacccgatgacactattt

SEQ ID NO: 425290 - DNA, 33 bp, Homo sapien
gagggttgctgttggcgcccgatgacactattt

SEQ ID NO: 425291 - DNA, 33 bp, Homo sapien
tcacttgataggcccaaattcatggcaggtcag

SEQ ID NO: 425292 - DNA, 33 bp, Homo sapien
tcacttgataggcccatattcatggcaggtcag

SEQ ID NO: 425293 - DNA, 33 bp, Homo sapien
aggaacttttttgggcagcaaactctgactttt

SEQ ID NO: 425294 - DNA, 33 bp, Homo sapien
aggaacttttttgggcggcaaactctgactttt

SEQ ID NO: 425295 - DNA, 33 bp, Homo sapien
ttttaactctgttccacgtctgtacatatttag

SEQ ID NO: 425296 - DNA, 33 bp, Homo sapien
ttttaactctgttccatgtctgtacatatttag

SEQ ID NO: 425297 - DNA, 33 bp, Homo sapien
gttgaaaatatttgtacgcttgcgtgtttgtga

SEQ ID NO: 425298 - DNA, 33 bp, Homo sapien
gttgaaaatatttgtatgcttgcgtgtttgtga

SEQ ID NO: 425299 - DNA, 33 bp, Homo sapien
cagggaagcagagaaaatacgatcattccatta

SEQ ID NO: 425300 - DNA, 33 bp, Homo sapien
cagggaagcagagaaagtacgatcattccatta

SEQ ID NO: 425301 - DNA, 33 bp, Homo sapien
agttagcccatagcaacgtatgaaactcagaag

SEQ ID NO: 425302 - DNA, 33 bp, Homo sapien
agttagcccatagcaatgtatgaaactcagaag

SEQ ID NO: 425303 - DNA, 33 bp, Homo sapien
gaaactcagaaggtaaatgactagttgttttta

SEQ ID NO: 425304 - DNA, 33 bp, Homo sapien
gaaactcagaaggtaactgactagttgttttta

SEQ ID NO: 425305 - DNA, 33 bp, Homo sapien
aaccagtgacaaccaccccccatcatggccttt

SEQ ID NO: 425306 - DNA, 33 bp, Homo sapien
aaccagtgacaaccactccccatcatggccttt

SEQ ID NO: 425307 - DNA, 33 bp, Homo sapien
cctagccaacaccgcaaaccctatctttacaaa

SEQ ID NO: 425308 - DNA, 33 bp, Homo sapien
cctagccaacaccgcagaccctatctttacaaa

SEQ ID NO: 425309 - DNA, 33 bp, Homo sapien
cctatcttcaaaccaagatgttggtctgccgtt

SEQ ID NO: 425310 - DNA, 33 bp, Homo sapien
cctatcttcaaaccaatatgttggtctgccgtt

SEQ ID NO: 425311 - DNA, 33 bp, Homo sapien
atgttcaacaatgagcaacagtacaaaagaaaa

SEQ ID NO: 425312 - DNA, 33 bp, Homo sapien
atgttcaacaatgagcgacagtacaaaagaaaa

SEQ ID NO: 425313 - DNA, 33 bp, Homo sapien
ccaacaccaggtggtcaagtaaaattaattagc

SEQ ID NO: 425314 - DNA, 33 bp, Homo sapien
ccaacaccaggtggtcgagtaaaattaattagc

SEQ ID NO: 425315 - DNA, 33 bp, Homo sapien
gaaatggaaactcagaaacatcaagcaacttgt

SEQ ID NO: 425316 - DNA, 33 bp, Homo sapien
gaaatggaaactcagagacatcaagcaacttgt

SEQ ID NO: 425317 - DNA, 33 bp, Homo sapien
ctcaggaactgaagccaagcagcattagctata

SEQ ID NO: 425318 - DNA, 33 bp, Homo sapien
ctcaggaactgaagccgagcagcattagctata

SEQ ID NO: 425319 - DNA, 33 bp, Homo sapien
aacgagtgcacttcacaccccacatcaggacct

SEQ ID NO: 425320 - DNA, 33 bp, Homo sapien
aacgagtgcacttcacgccccacatcaggacct

SEQ ID NO: 425321 - DNA, 33 bp, Homo sapien
cacttcctggatagacacacgcttggctatgtt

SEQ ID NO: 425322 - DNA, 33 bp, Homo sapien
cacttcctggatagacgcacgcttggctatgtt

SEQ ID NO: 425323 - DNA, 33 bp, Homo sapien
tcactgtgaatgtgaacgtcctcagcttccctg

SEQ ID NO: 425324 - DNA, 33 bp, Homo sapien
tcactgtgaatgtgaatgtcctcagcttccctg

SEQ ID NO: 425325 - DNA, 33 bp, Homo sapien
tcctctcctgagctgaactgtgatgattctgtg

SEQ ID NO: 425326 - DNA, 33 bp, Homo sapien
tcctctcctgagctgagctgtgatgattctgtg

SEQ ID NO: 425327 - DNA, 33 bp, Homo sapien
actcatttcttgttaactgtgcacaaataattc

SEQ ID NO: 425328 - DNA, 33 bp, Homo sapien
actcatttcttgttaattgtgcacaaataattc

SEQ ID NO: 425329 - DNA, 33 bp, Homo sapien
gaaattgttggcaatgcagagaaacagccatcc

SEQ ID NO: 425330 - DNA, 33 bp, Homo sapien
gaaattgttggcaatgtagagaaacagccatcc

SEQ ID NO: 425331 - DNA, 33 bp, Homo sapien
gatcagtaagctttcccgagcttttaatgcatt

SEQ ID NO: 425332 - DNA, 33 bp, Homo sapien
gatcagtaagctttcctgagcttttaatgcatt

SEQ ID NO: 425333 - DNA, 33 bp, Homo sapien
aatctcaatagacctgaaacaagtaaagagatt

SEQ ID NO: 425334 - DNA, 33 bp, Homo sapien
aatctcaatagacctgtaacaagtaaagagatt

SEQ ID NO: 425335 - DNA, 33 bp, Homo sapien
gattagataacttgtacgaaatgaaaaaaaatt

SEQ ID NO: 425336 - DNA, 33 bp, Homo sapien
gattagataacttgtatgaaatgaaaaaaaatt

SEQ ID NO: 425337 - DNA, 33 bp, Homo sapien
cacagtctcttttcccagaggtctaaacagttt

SEQ ID NO: 425338 - DNA, 33 bp, Homo sapien
cacagtctcttttccccgaggtctaaacagttt

SEQ ID NO: 425339 - DNA, 33 bp, Homo sapien
cttataaacctgccacacacaggtaccgccctg

SEQ ID NO: 425340 - DNA, 33 bp, Homo sapien
cttataaacctgccacgcacaggtaccgccctg

SEQ ID NO: 425341 - DNA, 33 bp, Homo sapien
ctttgggagaccaagacgggggaattgtttaag

SEQ ID NO: 425342 - DNA, 33 bp, Homo sapien
ctttgggagaccaagatgggggaattgtttaag

SEQ ID NO: 425343 - DNA, 33 bp, Homo sapien
aaattcaggcaaggataagaaagatctcagttg

SEQ ID NO: 425344 - DNA, 33 bp, Homo sapien
aaattcaggcaaggatgagaaagatctcagttg

SEQ ID NO: 425345 - DNA, 33 bp, Homo sapien
ctagcaactcaggtgtaaattacatcacagaca

SEQ ID NO: 425346 - DNA, 33 bp, Homo sapien
ctagcaactcaggtgtgaattacatcacagaca

SEQ ID NO: 425347 - DNA, 33 bp, Homo sapien
accgcagactgaccgaagtgcctagagaggaat

SEQ ID NO: 425348 - DNA, 33 bp, Homo sapien
accgcagactgaccgaggtgcctagagaggaat

SEQ ID NO: 425349 - DNA, 33 bp, Homo sapien
tagtgaggtcattaataaacagctgggtgaatg

SEQ ID NO: 425350 - DNA, 33 bp, Homo sapien
tagtgaggtcattaatgaacagctgggtgaatg

SEQ ID NO: 425351 - DNA, 33 bp, Homo sapien
tgccgctcagatggcaacattcccgcatactca

SEQ ID NO: 425352 - DNA, 33 bp, Homo sapien
tgccgctcagatggcagcattcccgcatactca

SEQ ID NO: 425353 - DNA, 33 bp, Homo sapien
ctcaccccacatgctacggagaacattttcagg

SEQ ID NO: 425354 - DNA, 33 bp, Homo sapien
ctcaccccacatgctatggagaacattttcagg

SEQ ID NO: 425355 - DNA, 33 bp, Homo sapien
cagtgaccaacgccataagccggtcctttgagg

SEQ ID NO: 425356 - DNA, 33 bp, Homo sapien
cagtgaccaacgccatgagccggtcctttgagg

SEQ ID NO: 425357 - DNA, 33 bp, Homo sapien
ggacagttgtgaagacccaaggaatgtgcacgc

SEQ ID NO: 425358 - DNA, 33 bp, Homo sapien
ggacagttgtgaagacgcaaggaatgtgcacgc

SEQ ID NO: 425359 - DNA, 33 bp, Homo sapien
tattactgtcatcttaagcaaaaacaagttaaa

SEQ ID NO: 425360 - DNA, 33 bp, Homo sapien
tattactgtcatcttaggcaaaaacaagttaaa

SEQ ID NO: 425361 - DNA, 33 bp, Homo sapien
catgctctgcctctcaacatttgaagacattca

SEQ ID NO: 425362 - DNA, 33 bp, Homo sapien
catgctctgcctctcaccatttgaagacattca

SEQ ID NO: 425363 - DNA, 33 bp, Homo sapien
gtaatcctggcacttcaagaagctgaggtggga

SEQ ID NO: 425364 - DNA, 33 bp, Homo sapien
gtaatcctggcacttcgagaagctgaggtggga

SEQ ID NO: 425365 - DNA, 33 bp, Homo sapien
gtgtaacagaatgaaaagcccaaaaggtatcaa

SEQ ID NO: 425366 - DNA, 33 bp, Homo sapien
gtgtaacagaatgaaaggcccaaaaggtatcaa

SEQ ID NO: 425367 - DNA, 33 bp, Homo sapien
atttatatagtttggccctcaatcctttatttt

SEQ ID NO: 425368 - DNA, 33 bp, Homo sapien
atttatatagtttggctctcaatcctttatttt

SEQ ID NO: 425369 - DNA, 33 bp, Homo sapien
atttcttgatttttaacgtaagcatgaattata

SEQ ID NO: 425370 - DNA, 33 bp, Homo sapien
atttcttgatttttaatgtaagcatgaattata

SEQ ID NO: 425371 - DNA, 33 bp, Homo sapien
tagaccactgctactaaggttaattctcagaag

SEQ ID NO: 425372 - DNA, 33 bp, Homo sapien
tagaccactgctactatggttaattctcagaag

SEQ ID NO: 425373 - DNA, 33 bp, Homo sapien
aaacctaacactatcaataagcccagttttgga

SEQ ID NO: 425374 - DNA, 33 bp, Homo sapien
aaacctaacactatcagtaagcccagttttgga

SEQ ID NO: 425375 - DNA, 33 bp, Homo sapien
gcgtctcaataggtacagacgctataaaagttc

SEQ ID NO: 425376 - DNA, 33 bp, Homo sapien
gcgtctcaataggtacggacgctataaaagttc

SEQ ID NO: 425377 - DNA, 33 bp, Homo sapien
tccataccgaaaagcaacagctaatttcaattc

SEQ ID NO: 425378 - DNA, 33 bp, Homo sapien
tccataccgaaaagcagcagctaatttcaattc

SEQ ID NO: 425379 - DNA, 33 bp, Homo sapien
attagccttttaattagatctgggctacctttt

SEQ ID NO: 425380 - DNA, 33 bp, Homo sapien
attagccttttaattatatctgggctacctttt

SEQ ID NO: 425381 - DNA, 33 bp, Homo sapien
agagccctctgaaacccctgagatttagaatgc

SEQ ID NO: 425382 - DNA, 33 bp, Homo sapien
agagccctctgaaaccgctgagatttagaatgc

SEQ ID NO: 425383 - DNA, 33 bp, Homo sapien
gagaaaaaggaaaaacaatcaatggctgtgtaa

SEQ ID NO: 425384 - DNA, 33 bp, Homo sapien
gagaaaaaggaaaaaccatcaatggctgtgtaa

SEQ ID NO: 425385 - DNA, 33 bp, Homo sapien
taagccaaaaattccactagaaatctgaggtaa

SEQ ID NO: 425386 - DNA, 33 bp, Homo sapien
taagccaaaaattccagtagaaatctgaggtaa

SEQ ID NO: 425387 - DNA, 33 bp, Homo sapien
acttcacgtaaatcaaaaatgtttatcaaatgg

SEQ ID NO: 425388 - DNA, 33 bp, Homo sapien
acttcacgtaaatcaataatgtttatcaaatgg

SEQ ID NO: 425389 - DNA, 33 bp, Homo sapien
ataatgcaagaattaccgtaatgtgacataaaa

SEQ ID NO: 425390 - DNA, 33 bp, Homo sapien
ataatgcaagaattactgtaatgtgacataaaa

SEQ ID NO: 425391 - DNA, 33 bp, Homo sapien
aatctgaacactgtggaaagagtttagttgctt

SEQ ID NO: 425392 - DNA, 33 bp, Homo sapien
aatctgaacactgtgggaagagtttagttgctt

SEQ ID NO: 425393 - DNA, 33 bp, Homo sapien
ccaaaactggtacttacgtgaactgttgtcctt

SEQ ID NO: 425394 - DNA, 33 bp, Homo sapien
ccaaaactggtacttatgtgaactgttgtcctt

SEQ ID NO: 425395 - DNA, 33 bp, Homo sapien
catgttaggccttagcaaagaacctgcctgcac

SEQ ID NO: 425396 - DNA, 33 bp, Homo sapien
catgttaggccttagcgaagaacctgcctgcac

SEQ ID NO: 425397 - DNA, 33 bp, Homo sapien
tatgatgtgccaactcgcactttgccttctgcc

SEQ ID NO: 425398 - DNA, 33 bp, Homo sapien
tatgatgtgccaactctcactttgccttctgcc

SEQ ID NO: 425399 - DNA, 33 bp, Homo sapien
aatttttccagcaatgacaatccaatcatacca

SEQ ID NO: 425400 - DNA, 33 bp, Homo sapien
aatttttccagcaatggcaatccaatcatacca

SEQ ID NO: 425401 - DNA, 33 bp, Homo sapien
tgcagtgatctatgaccgtaccactgtgctcca

SEQ ID NO: 425402 - DNA, 33 bp, Homo sapien
tgcagtgatctatgactgtaccactgtgctcca

SEQ ID NO: 425403 - DNA, 33 bp, Homo sapien
attaatctatggattcaacataatacgcataga

SEQ ID NO: 425404 - DNA, 33 bp, Homo sapien
attaatctatggattcgacataatacgcataga

SEQ ID NO: 425405 - DNA, 33 bp, Homo sapien
ggactcacaggatggcagaagcgactattaagt

SEQ ID NO: 425406 - DNA, 33 bp, Homo sapien
ggactcacaggatggcggaagcgactattaagt

SEQ ID NO: 425407 - DNA, 33 bp, Homo sapien
atgggaagaaatgtaaacataacagtcttgttc

SEQ ID NO: 425408 - DNA, 33 bp, Homo sapien
atgggaagaaatgtaaccataacagtcttgttc

SEQ ID NO: 425409 - DNA, 33 bp, Homo sapien
ctaattaaattactcacctgtcctcctgtcccc

SEQ ID NO: 425410 - DNA, 33 bp, Homo sapien
ctaattaaattactcagctgtcctcctgtcccc

SEQ ID NO: 425411 - DNA, 33 bp, Homo sapien
gctgttatttggacgacaggtttcccatccatt

SEQ ID NO: 425412 - DNA, 33 bp, Homo sapien
gctgttatttggacgataggtttcccatccatt

SEQ ID NO: 425413 - DNA, 33 bp, Homo sapien
aaatttagattcagcacagtatttagtaaacgg

SEQ ID NO: 425414 - DNA, 33 bp, Homo sapien
aaatttagattcagcagagtatttagtaaacgg

SEQ ID NO: 425415 - DNA, 33 bp, Homo sapien
acggggcccagcacacagtaaacacgcccagca

SEQ ID NO: 425416 - DNA, 33 bp, Homo sapien
acggggcccagcacacggtaaacacgcccagca

SEQ ID NO: 425417 - DNA, 33 bp, Homo sapien
atggccatgtctcagaccaaaatgatataacac

SEQ ID NO: 425418 - DNA, 33 bp, Homo sapien
atggccatgtctcagatcaaaatgatataacac

SEQ ID NO: 425419 - DNA, 33 bp, Homo sapien
agctagccatgagggaaccacactatcagcttc

SEQ ID NO: 425420 - DNA, 33 bp, Homo sapien
agctagccatgagggagccacactatcagcttc

SEQ ID NO: 425421 - DNA, 33 bp, Homo sapien
tgttttctcggaagtagagcagcgtgagaaatc

SEQ ID NO: 425422 - DNA, 33 bp, Homo sapien
tgttttctcggaagtatagcagcgtgagaaatc

SEQ ID NO: 425423 - DNA, 33 bp, Homo sapien
ctgtgcaagatgaatccctggagttacagaagg

SEQ ID NO: 425424 - DNA, 33 bp, Homo sapien
ctgtgcaagatgaatctctggagttacagaagg

SEQ ID NO: 425425 - DNA, 33 bp, Homo sapien
ctctcctttcgtctccacattctttcttctggt

SEQ ID NO: 425426 - DNA, 33 bp, Homo sapien
ctctcctttcgtctccgcattctttcttctggt

SEQ ID NO: 425427 - DNA, 33 bp, Homo sapien
cttctgattcaggctacaggatcacagacctct

SEQ ID NO: 425428 - DNA, 33 bp, Homo sapien
cttctgattcaggctataggatcacagacctct

SEQ ID NO: 425429 - DNA, 33 bp, Homo sapien
gaaaggctcttcctgacggtgctctagcctcca

SEQ ID NO: 425430 - DNA, 33 bp, Homo sapien
gaaaggctcttcctgagggtgctctagcctcca

SEQ ID NO: 425431 - DNA, 33 bp, Homo sapien
gagtttatttgcttcaaaagggaatgtatcatt

SEQ ID NO: 425432 - DNA, 33 bp, Homo sapien
gagtttatttgcttcagaagggaatgtatcatt

SEQ ID NO: 425433 - DNA, 33 bp, Homo sapien
ggattttggcatttcaagttgctttacaaatgt

SEQ ID NO: 425434 - DNA, 33 bp, Homo sapien
ggattttggcatttcatgttgctttacaaatgt

SEQ ID NO: 425435 - DNA, 33 bp, Homo sapien
atggcagaaacttgggaattgaacaggaagact

SEQ ID NO: 425436 - DNA, 33 bp, Homo sapien
atggcagaaacttgggcattgaacaggaagact

SEQ ID NO: 425437 - DNA, 33 bp, Homo sapien
ctttgtgtcttcctgacgacttgaccctttcat

SEQ ID NO: 425438 - DNA, 33 bp, Homo sapien
ctttgtgtcttcctgatgacttgaccctttcat

SEQ ID NO: 425439 - DNA, 33 bp, Homo sapien
catcctaaatacaaagcctgaaatgactggatt

SEQ ID NO: 425440 - DNA, 33 bp, Homo sapien
catcctaaatacaaaggctgaaatgactggatt

SEQ ID NO: 425441 - DNA, 33 bp, Homo sapien
ttacagcataagaaaacggcatttattttacag

SEQ ID NO: 425442 - DNA, 33 bp, Homo sapien
ttacagcataagaaaatggcatttattttacag

SEQ ID NO: 425443 - DNA, 33 bp, Homo sapien
agcatggctagaaggaaagtcctgagttcaaaa

SEQ ID NO: 425444 - DNA, 33 bp, Homo sapien
agcatggctagaaggacagtcctgagttcaaaa

SEQ ID NO: 425445 - DNA, 33 bp, Homo sapien
gaggaaagcagcgggaaccaggtggcgcctccc

SEQ ID NO: 425446 - DNA, 33 bp, Homo sapien
gaggaaagcagcgggacccaggtggcgcctccc

SEQ ID NO: 425447 - DNA, 33 bp, Homo sapien
agctttcataatcccacaatgcagatatatgct

SEQ ID NO: 425448 - DNA, 33 bp, Homo sapien
agctttcataatcccataatgcagatatatgct

SEQ ID NO: 425449 - DNA, 33 bp, Homo sapien
atgggaaaagtctgaaccttgttgatcttcctc

SEQ ID NO: 425450 - DNA, 33 bp, Homo sapien
atgggaaaagtctgaagcttgttgatcttcctc

SEQ ID NO: 425451 - DNA, 33 bp, Homo sapien
gcttcgagtttccaataataaatggaccttctc

SEQ ID NO: 425452 - DNA, 33 bp, Homo sapien
gcttcgagtttccaatgataaatggaccttctc

SEQ ID NO: 425453 - DNA, 33 bp, Homo sapien
ccttccttccctaatgaatgcaaggatgatccc

SEQ ID NO: 425454 - DNA, 33 bp, Homo sapien
ccttccttccctaatggatgcaaggatgatccc

SEQ ID NO: 425455 - DNA, 33 bp, Homo sapien
ttgttggaatgttacactattctggcacttggc

SEQ ID NO: 425456 - DNA, 33 bp, Homo sapien
ttgttggaatgttacattattctggcacttggc

SEQ ID NO: 425457 - DNA, 33 bp, Homo sapien
cattaactcccttcctaaaccacaagtggtgtc

SEQ ID NO: 425458 - DNA, 33 bp, Homo sapien
cattaactcccttcctgaaccacaagtggtgtc

SEQ ID NO: 425459 - DNA, 33 bp, Homo sapien
ctaactccagaagtgacaatagaagcatgattt

SEQ ID NO: 425460 - DNA, 33 bp, Homo sapien
ctaactccagaagtgataatagaagcatgattt

SEQ ID NO: 425461 - DNA, 33 bp, Homo sapien
ccttgaatagagctcaatgacaatttgaagagt

SEQ ID NO: 425462 - DNA, 33 bp, Homo sapien
ccttgaatagagctcagtgacaatttgaagagt

SEQ ID NO: 425463 - DNA, 33 bp, Homo sapien
agctaggaacaaatctgagaagaggtactattc

SEQ ID NO: 425464 - DNA, 33 bp, Homo sapien
agctaggaacaaatcttagaagaggtactattc

SEQ ID NO: 425465 - DNA, 33 bp, Homo sapien
tgctctattcatggtccaaaagcacttagcaag

SEQ ID NO: 425466 - DNA, 33 bp, Homo sapien
tgctctattcatggtcgaaaagcacttagcaag

SEQ ID NO: 425467 - DNA, 33 bp, Homo sapien
gagaaggaatgagctcagagagaaaagcaagca

SEQ ID NO: 425468 - DNA, 33 bp, Homo sapien
gagaaggaatgagctcggagagaaaagcaagca

SEQ ID NO: 425469 - DNA, 33 bp, Homo sapien
atgctgctccttggatcagccagcgaggccccc

SEQ ID NO: 425470 - DNA, 33 bp, Homo sapien
atgctgctccttggattagccagcgaggccccc

SEQ ID NO: 425471 - DNA, 33 bp, Homo sapien
agacttacaacagaaacgcagagctgctcagcc

SEQ ID NO: 425472 - DNA, 33 bp, Homo sapien
agacttacaacagaaatgcagagctgctcagcc

SEQ ID NO: 425473 - DNA, 33 bp, Homo sapien
tatgcaaggcattgaaccataattttttacttg

SEQ ID NO: 425474 - DNA, 33 bp, Homo sapien
tatgcaaggcattgaatcataattttttacttg

SEQ ID NO: 425475 - DNA, 33 bp, Homo sapien
gcagcagaagttggaactcagtgacaactgggg

SEQ ID NO: 425476 - DNA, 33 bp, Homo sapien
gcagcagaagttggaattcagtgacaactgggg

SEQ ID NO: 425477 - DNA, 33 bp, Homo sapien
gcatgatccaagttcccaaggcaggttctgttg

SEQ ID NO: 425478 - DNA, 33 bp, Homo sapien
gcatgatccaagttcctaaggcaggttctgttg

SEQ ID NO: 425479 - DNA, 33 bp, Homo sapien
taaacagggaggcagtcaaataagtgccatagt

SEQ ID NO: 425480 - DNA, 33 bp, Homo sapien
taaacagggaggcagtgaaataagtgccatagt

SEQ ID NO: 425481 - DNA, 33 bp, Homo sapien
caatgagggaccgccaaatgatgagaaggcagc

SEQ ID NO: 425482 - DNA, 33 bp, Homo sapien
caatgagggaccgccagatgatgagaaggcagc

SEQ ID NO: 425483 - DNA, 33 bp, Homo sapien
gagagagattcctaaccggcactcccagagatt

SEQ ID NO: 425484 - DNA, 33 bp, Homo sapien
gagagagattcctaacgggcactcccagagatt

SEQ ID NO: 425485 - DNA, 33 bp, Homo sapien
caaccccatatggcaacgagagcacagccatgg

SEQ ID NO: 425486 - DNA, 33 bp, Homo sapien
caaccccatatggcaaggagagcacagccatgg

SEQ ID NO: 425487 - DNA, 33 bp, Homo sapien
tatttgatggattccgcccctcctcccagttga

SEQ ID NO: 425488 - DNA, 33 bp, Homo sapien
tatttgatggattccgtccctcctcccagttga

SEQ ID NO: 425489 - DNA, 33 bp, Homo sapien
gctttcatcacaatttcaaaggagttacggcct

SEQ ID NO: 425490 - DNA, 33 bp, Homo sapien
gctttcatcacaattttaaaggagttacggcct

SEQ ID NO: 425491 - DNA, 33 bp, Homo sapien
acgggggccctagtacacacctgctgttctgat

SEQ ID NO: 425492 - DNA, 33 bp, Homo sapien
acgggggccctagtacgcacctgctgttctgat

SEQ ID NO: 425493 - DNA, 33 bp, Homo sapien
gatcacttgggttctcaataaaggccaattgaa

SEQ ID NO: 425494 - DNA, 33 bp, Homo sapien
gatcacttgggttctcgataaaggccaattgaa

SEQ ID NO: 425495 - DNA, 33 bp, Homo sapien
gtgagtagttggaggacagtctgtgaaggagac

SEQ ID NO: 425496 - DNA, 33 bp, Homo sapien
gtgagtagttggaggatagtctgtgaaggagac

SEQ ID NO: 425497 - DNA, 33 bp, Homo sapien
agaaaggaatattaaaactacatggagaaggca

SEQ ID NO: 425498 - DNA, 33 bp, Homo sapien
agaaaggaatattaaacctacatggagaaggca

SEQ ID NO: 425499 - DNA, 33 bp, Homo sapien
ctggtgtgagactcaactggtacaactgtcttg

SEQ ID NO: 425500 - DNA, 33 bp, Homo sapien
ctggtgtgagactcaattggtacaactgtcttg

SEQ ID NO: 425501 - DNA, 33 bp, Homo sapien
gaattatttcaccacaacctttctggaaattgt

SEQ ID NO: 425502 - DNA, 33 bp, Homo sapien
gaattatttcaccacatcctttctggaaattgt

SEQ ID NO: 425503 - DNA, 33 bp, Homo sapien
aattacacatagaatactagttgctctgaaaat

SEQ ID NO: 425504 - DNA, 33 bp, Homo sapien
aattacacatagaatagtagttgctctgaaaat

SEQ ID NO: 425505 - DNA, 33 bp, Homo sapien
gctttgagcaaatctaccaactccatttttcaa

SEQ ID NO: 425506 - DNA, 33 bp, Homo sapien
gctttgagcaaatctatcaactccatttttcaa

SEQ ID NO: 425507 - DNA, 33 bp, Homo sapien
tgcatctcagagaataaggaggcccaaggagag

SEQ ID NO: 425508 - DNA, 33 bp, Homo sapien
tgcatctcagagaatacggaggcccaaggagag

SEQ ID NO: 425509 - DNA, 33 bp, Homo sapien
aattgtgcgatcccacaacacaagacagaaaaa

SEQ ID NO: 425510 - DNA, 33 bp, Homo sapien
aattgtgcgatcccacgacacaagacagaaaaa

SEQ ID NO: 425511 - DNA, 33 bp, Homo sapien
aagctcccagatctgacaaacaattaaagtttc

SEQ ID NO: 425512 - DNA, 33 bp, Homo sapien
aagctcccagatctgataaacaattaaagtttc

SEQ ID NO: 425513 - DNA, 33 bp, Homo sapien
ggtcgggggagatagagaaactttcaggacaca

SEQ ID NO: 425514 - DNA, 33 bp, Homo sapien
ggtcgggggagatagataaactttcaggacaca

SEQ ID NO: 425515 - DNA, 33 bp, Homo sapien
ccgtggtttcatgacaatgtacacatgtatggc

SEQ ID NO: 425516 - DNA, 33 bp, Homo sapien
ccgtggtttcatgacagtgtacacatgtatggc

SEQ ID NO: 425517 - DNA, 33 bp, Homo sapien
tttactatcacggatcgactattagtcaagaag

SEQ ID NO: 425518 - DNA, 33 bp, Homo sapien
tttactatcacggatctactattagtcaagaag

SEQ ID NO: 425519 - DNA, 33 bp, Homo sapien
tcttcatgtggagataacaaaatgagtacagct

SEQ ID NO: 425520 - DNA, 33 bp, Homo sapien
tcttcatgtggagataccaaaatgagtacagct

SEQ ID NO: 425521 - DNA, 33 bp, Homo sapien
ccttcctgtttctatgcaacatcagttgaatct

SEQ ID NO: 425522 - DNA, 33 bp, Homo sapien
ccttcctgtttctatggaacatcagttgaatct

SEQ ID NO: 425523 - DNA, 33 bp, Homo sapien
ccaggaacagagggtacagggtgaggaggacaa

SEQ ID NO: 425524 - DNA, 33 bp, Homo sapien
ccaggaacagagggtagagggtgaggaggacaa

SEQ ID NO: 425525 - DNA, 33 bp, Homo sapien
aaaaagcatgtattcaaccattggtagttttat

SEQ ID NO: 425526 - DNA, 33 bp, Homo sapien
aaaaagcatgtattcagccattggtagttttat

SEQ ID NO: 425527 - DNA, 33 bp, Homo sapien
atatagaatatacttacacctcaaaaagcatgt

SEQ ID NO: 425528 - DNA, 33 bp, Homo sapien
atatagaatatacttagacctcaaaaagcatgt

SEQ ID NO: 425529 - DNA, 33 bp, Homo sapien
tagacacctggtaagaagctgcccagctcactt

SEQ ID NO: 425530 - DNA, 33 bp, Homo sapien
tagacacctggtaagaggctgcccagctcactt

SEQ ID NO: 425531 - DNA, 33 bp, Homo sapien
gcagtggggagcagacaaaaccagcatggacgg

SEQ ID NO: 425532 - DNA, 33 bp, Homo sapien
gcagtggggagcagacgaaaccagcatggacgg

SEQ ID NO: 425533 - DNA, 33 bp, Homo sapien
tgcaaatgctatgcaaatagtcgtatgctatat

SEQ ID NO: 425534 - DNA, 33 bp, Homo sapien
tgcaaatgctatgcaagtagtcgtatgctatat

SEQ ID NO: 425535 - DNA, 33 bp, Homo sapien
gcatggaaatggcaaacgtggctgcttgcttga

SEQ ID NO: 425536 - DNA, 33 bp, Homo sapien
gcatggaaatggcaaatgtggctgcttgcttga

SEQ ID NO: 425537 - DNA, 33 bp, Homo sapien
ctggatggatccttcacgttgtcctcacaaaga

SEQ ID NO: 425538 - DNA, 33 bp, Homo sapien
ctggatggatccttcatgttgtcctcacaaaga

SEQ ID NO: 425539 - DNA, 33 bp, Homo sapien
attggcagaaactcagaccagagagaaggtact

SEQ ID NO: 425540 - DNA, 33 bp, Homo sapien
attggcagaaactcaggccagagagaaggtact

SEQ ID NO: 425541 - DNA, 33 bp, Homo sapien
aaggagcgccgtgtgacgggaagacaccagcct

SEQ ID NO: 425542 - DNA, 33 bp, Homo sapien
aaggagcgccgtgtgatgggaagacaccagcct

SEQ ID NO: 425543 - DNA, 33 bp, Homo sapien
tccttgtcacaccatactacaaattatcccttg

SEQ ID NO: 425544 - DNA, 33 bp, Homo sapien
tccttgtcacaccatagtacaaattatcccttg

SEQ ID NO: 425545 - DNA, 33 bp, Homo sapien
aagattgccttttatgaagtgaaaaatctttgt

SEQ ID NO: 425546 - DNA, 33 bp, Homo sapien
aagattgccttttatgtagtgaaaaatctttgt

SEQ ID NO: 425547 - DNA, 33 bp, Homo sapien
ggtagcctggctgtgcaagtcagtatattctgg

SEQ ID NO: 425548 - DNA, 33 bp, Homo sapien
ggtagcctggctgtgcgagtcagtatattctgg

SEQ ID NO: 425549 - DNA, 33 bp, Homo sapien
gtttagctactgtggaaatcaatgtggagattt

SEQ ID NO: 425550 - DNA, 33 bp, Homo sapien
gtttagctactgtggacatcaatgtggagattt

SEQ ID NO: 425551 - DNA, 33 bp, Homo sapien
acgattgccatttccacattgagtaaatttaag

SEQ ID NO: 425552 - DNA, 33 bp, Homo sapien
acgattgccatttccatattgagtaaatttaag

SEQ ID NO: 425553 - DNA, 33 bp, Homo sapien
catacaatttaggcagaaaacagtgaaaatgta

SEQ ID NO: 425554 - DNA, 33 bp, Homo sapien
catacaatttaggcaggaaacagtgaaaatgta

SEQ ID NO: 425555 - DNA, 33 bp, Homo sapien
gccttcatttcattgtaacaatcatttaattat

SEQ ID NO: 425556 - DNA, 33 bp, Homo sapien
gccttcatttcattgtgacaatcatttaattat

SEQ ID NO: 425557 - DNA, 33 bp, Homo sapien
ttccaagccttctcccccaaattacaagccttc

SEQ ID NO: 425558 - DNA, 33 bp, Homo sapien
ttccaagccttctcccgcaaattacaagccttc

SEQ ID NO: 425559 - DNA, 33 bp, Homo sapien
tggtgcttaataaatacatcaggaaaggctggg

SEQ ID NO: 425560 - DNA, 33 bp, Homo sapien
tggtgcttaataaatagatcaggaaaggctggg

SEQ ID NO: 425561 - DNA, 33 bp, Homo sapien
ctaataggcactcaatcaatatttctgaatcaa

SEQ ID NO: 425562 - DNA, 33 bp, Homo sapien
ctaataggcactcaattaatatttctgaatcaa

SEQ ID NO: 425563 - DNA, 33 bp, Homo sapien
ggagtgtcagaacttaacattcgtggtgtaaaa

SEQ ID NO: 425564 - DNA, 33 bp, Homo sapien
ggagtgtcagaacttaccattcgtggtgtaaaa

SEQ ID NO: 425565 - DNA, 33 bp, Homo sapien
gagacagagaagttacagcagcattacattttc

SEQ ID NO: 425566 - DNA, 33 bp, Homo sapien
gagacagagaagttactgcagcattacattttc

SEQ ID NO: 425567 - DNA, 33 bp, Homo sapien
acaagtggccaagaaacatcattacagatgctg

SEQ ID NO: 425568 - DNA, 33 bp, Homo sapien
acaagtggccaagaaagatcattacagatgctg

SEQ ID NO: 425569 - DNA, 33 bp, Homo sapien
tctacttatcaatttaactacacagtaagtgca

SEQ ID NO: 425570 - DNA, 33 bp, Homo sapien
tctacttatcaatttatctacacagtaagtgca

SEQ ID NO: 425571 - DNA, 33 bp, Homo sapien
aatcattagataaatgcacatcataaccacaat

SEQ ID NO: 425572 - DNA, 33 bp, Homo sapien
aatcattagataaatggacatcataaccacaat

SEQ ID NO: 425573 - DNA, 33 bp, Homo sapien; identical to SEQ ID NO: 425571

SEQ ID NO: 425574 - DNA, 33 bp, Homo sapien; identical to SEQ ID NO: 425572

SEQ ID NO: 425575 - DNA, 33 bp, Homo sapien
aggggccattatatgaaaagtactctgctgtcc

SEQ ID NO: 425576 - DNA, 33 bp, Homo sapien
aggggccattatatgagaagtactctgctgtcc

SEQ ID NO: 425577 - DNA, 33 bp, Homo sapien
atactacagacgtaaggaagtattggccagctg

SEQ ID NO: 425578 - DNA, 33 bp, Homo sapien
atactacagacgtaagtaagtattggccagctg

SEQ ID NO: 425579 - DNA, 33 bp, Homo sapien
cttacattcctacaaaatatataacagtgtttt

SEQ ID NO: 425580 - DNA, 33 bp, Homo sapien
cttacattcctacaaagtatataacagtgtttt

SEQ ID NO: 425581 - DNA, 33 bp, Homo sapien
ctgggtatatttaaagactctatctaccctgac

SEQ ID NO: 425582 - DNA, 33 bp, Homo sapien
ctgggtatatttaaaggctctatctaccctgac

SEQ ID NO: 425583 - DNA, 33 bp, Homo sapien
acatcacagatgatgaaagaagtactgtgttct

SEQ ID NO: 425584 - DNA, 33 bp, Homo sapien
acatcacagatgatgacagaagtactgtgttct

SEQ ID NO: 425585 - DNA, 33 bp, Homo sapien
tgaatgaagccacatactaagtgccagccatgg

SEQ ID NO: 425586 - DNA, 33 bp, Homo sapien
tgaatgaagccacatattaagtgccagccatgg

SEQ ID NO: 425587 - DNA, 33 bp, Homo sapien
ttccttgttttccagacagaattttgctacaag

SEQ ID NO: 425588 - DNA, 33 bp, Homo sapien
ttccttgttttccagatagaattttgctacaag

SEQ ID NO: 425589 - DNA, 33 bp, Homo sapien
aactaaaactgggacaaggaggactttggaaaa

SEQ ID NO: 425590 - DNA, 33 bp, Homo sapien
aactaaaactgggacatggaggactttggaaaa

SEQ ID NO: 425591 - DNA, 33 bp, Homo sapien
atatgcagtttgttaagaaagacttttagtact

SEQ ID NO: 425592 - DNA, 33 bp, Homo sapien
atatgcagtttgttaataaagacttttagtact

SEQ ID NO: 425593 - DNA, 33 bp, Homo sapien
tgacttttgagtacaaagagtgggggtacagga

SEQ ID NO: 425594 - DNA, 33 bp, Homo sapien
tgacttttgagtacaaggagtgggggtacagga

SEQ ID NO: 425595 - DNA, 33 bp, Homo sapien
gagattaccagaaagaactacacaatggtgaat

SEQ ID NO: 425596 - DNA, 33 bp, Homo sapien
gagattaccagaaagagctacacaatggtgaat

SEQ ID NO: 425597 - DNA, 33 bp, Homo sapien
gcactgttcaggtgtaaaatcggctttcacata

SEQ ID NO: 425598 - DNA, 33 bp, Homo sapien
gcactgttcaggtgtacaatcggctttcacata

SEQ ID NO: 425599 - DNA, 33 bp, Homo sapien
caactacccattaaaaagtcttgctagtccatt

SEQ ID NO: 425600 - DNA, 33 bp, Homo sapien
caactacccattaaaaggtcttgctagtccatt

SEQ ID NO: 425601 - DNA, 33 bp, Homo sapien
cagttatttttgattcaatagtactgggtagtg

SEQ ID NO: 425602 - DNA, 33 bp, Homo sapien
cagttatttttgattcgatagtactgggtagtg

SEQ ID NO: 425603 - DNA, 33 bp, Homo sapien
ctgctggtaacaaatgcattggcaggaaggggc

SEQ ID NO: 425604 - DNA, 33 bp, Homo sapien
ctgctggtaacaaatgtattggcaggaaggggc

SEQ ID NO: 425605 - DNA, 33 bp, Homo sapien; identical to SEQ ID NO: 425603

SEQ ID NO: 425606 - DNA, 33 bp, Homo sapien; identical to SEQ ID NO: 425604

SEQ ID NO: 425607 - DNA, 33 bp, Homo sapien
ggtcggaagttcaagactagcgtgaccaacatg

SEQ ID NO: 425608 - DNA, 33 bp, Homo sapien
ggtcggaagttcaagagtagcgtgaccaacatg

SEQ ID NO: 425609 - DNA, 33 bp, Homo sapien
cagactatactacaacactgcagtaaccaaaac

SEQ ID NO: 425610 - DNA, 33 bp, Homo sapien
cagactatactacaactctgcagtaaccaaaac

SEQ ID NO: 425611 - DNA, 33 bp, Homo sapien
tctcatttaagcatcacgatggtgtcctatgag

SEQ ID NO: 425612 - DNA, 33 bp, Homo sapien
tctcatttaagcatcatgatggtgtcctatgag

SEQ ID NO: 425613 - DNA, 33 bp, Homo sapien; identical to SEQ ID NO: 425611

SEQ ID NO: 425614 - DNA, 33 bp, Homo sapien; identical to SEQ ID NO: 425612

SEQ ID NO: 425615 - DNA, 33 bp, Homo sapien
agggtttaaagaaggaatcaagccctagttgaa

SEQ ID NO: 425616 - DNA, 33 bp, Homo sapien
agggtttaaagaaggactcaagccctagttgaa

SEQ ID NO: 425617 - DNA, 33 bp, Homo sapien; identical to SEQ ID NO: 425615

SEQ ID NO: 425618 - DNA, 33 bp, Homo sapien; identical to SEQ ID NO: 425616

SEQ ID NO: 425619 - DNA, 33 bp, Homo sapien
tgtgttgagacaaggcactccttagctttgggt

SEQ ID NO: 425620 - DNA, 33 bp, Homo sapien
tgtgttgagacaaggcgctccttagctttgggt

SEQ ID NO: 425621 - DNA, 33 bp, Homo sapien; identical to SEQ ID NO: 425619

SEQ ID NO: 425622 - DNA, 33 bp, Homo sapien; identical to SEQ ID NO: 425620

SEQ ID NO: 425623 - DNA, 33 bp, Homo sapien
tgacagcaagggtaggaaaatgttactctaatt

SEQ ID NO: 425624 - DNA, 33 bp, Homo sapien
tgacagcaagggtagggaaatgttactctaatt

SEQ ID NO: 425625 - DNA, 33 bp, Homo sapien
aaagatcagaactccaactagcacataaatcaa

SEQ ID NO: 425626 - DNA, 33 bp, Homo sapien
aaagatcagaactccagctagcacataaatcaa

SEQ ID NO: 425627 - DNA, 33 bp, Homo sapien
agtatgtatggaatctaacatgtcgacagttat

SEQ ID NO: 425628 - DNA, 33 bp, Homo sapien
agtatgtatggaatctgacatgtcgacagttat

SEQ ID NO: 425629 - DNA, 33 bp, Homo sapien; identical to SEQ ID NO: 425627

SEQ ID NO: 425630 - DNA, 33 bp, Homo sapien; identical to SEQ ID NO: 425628

SEQ ID NO: 425631 - DNA, 33 bp, Homo sapien
gacgcagagttcttggaaaacctctactagggc

SEQ ID NO: 425632 - DNA, 33 bp, Homo sapien
gacgcagagttcttgggaaacctctactagggc

SEQ ID NO: 425633 - DNA, 33 bp, Homo sapien
ccaccagctgcttgcaacgttagtgttgaaaag

SEQ ID NO: 425634 - DNA, 33 bp, Homo sapien
ccaccagctgcttgcaccgttagtgttgaaaag

SEQ ID NO: 425635 - DNA, 33 bp, Homo sapien
ctcatgctccgtccaccagtggcttaacactat

SEQ ID NO: 425636 - DNA, 33 bp, Homo sapien
ctcatgctccgtccacgagtggcttaacactat

SEQ ID NO: 425637 - DNA, 33 bp, Homo sapien
agaaaattaatgctgccaagtgaagctatgaaa

SEQ ID NO: 425638 - DNA, 33 bp, Homo sapien
agaaaattaatgctgcgaagtgaagctatgaaa

SEQ ID NO: 425639 - DNA, 33 bp, Homo sapien
tgacctggtcttatgacctgttagcttccttca

SEQ ID NO: 425640 - DNA, 33 bp, Homo sapien
tgacctggtcttatgatctgttagcttccttca

SEQ ID NO: 425641 - DNA, 33 bp, Homo sapien
aatgttctcctggatcaagtaggtttcagtcac

SEQ ID NO: 425642 - DNA, 33 bp, Homo sapien
aatgttctcctggatcgagtaggtttcagtcac

SEQ ID NO: 425643 - DNA, 33 bp, Homo sapien
ccacttgatgcttgaaataaccctgcaagatca

SEQ ID NO: 425644 - DNA, 33 bp, Homo sapien
ccacttgatgcttgaagtaaccctgcaagatca

SEQ ID NO: 425645 - DNA, 33 bp, Homo sapien; identical to SEQ ID NO: 425643

SEQ ID NO: 425646 - DNA, 33 bp, Homo sapien; identical to SEQ ID NO: 425644

SEQ ID NO: 425647 - DNA, 33 bp, Homo sapien
gagtcatgctggaaagaaaccctataaatgtga

SEQ ID NO: 425648 - DNA, 33 bp, Homo sapien
gagtcatgctggaaaggaaccctataaatgtga

SEQ ID NO: 425649 - DNA, 33 bp, Homo sapien
tcaggggttcctcagcggcagtacacagtggag

SEQ ID NO: 425650 - DNA, 33 bp, Homo sapien
tcaggggttcctcagctgcagtacacagtggag

SEQ ID NO: 425651 - DNA, 33 bp, Homo sapien
tcctgagatagagagaaactgtctgggattgtc

SEQ ID NO: 425652 - DNA, 33 bp, Homo sapien
tcctgagatagagagagactgtctgggattgtc

SEQ ID NO: 425653 - DNA, 33 bp, Homo sapien
atgggtgtatgggaagaaaatactcaaaatgct

SEQ ID NO: 425654 - DNA, 33 bp, Homo sapien
atgggtgtatgggaaggaaatactcaaaatgct

SEQ ID NO: 425655 - DNA, 33 bp, Homo sapien
ctcagagatgggctccactggtaatctgtgatc

SEQ ID NO: 425656 - DNA, 33 bp, Homo sapien
ctcagagatgggctccgctggtaatctgtgatc

SEQ ID NO: 425657 - DNA, 33 bp, Homo sapien
aatcaccaccttgctaataaatatcaaaatctt

SEQ ID NO: 425658 - DNA, 33 bp, Homo sapien
aatcaccaccttgctagtaaatatcaaaatctt

SEQ ID NO: 425659 - DNA, 33 bp, Homo sapien
gaacggactcagtgaaagaggacaacttcaatt

SEQ ID NO: 425660 - DNA, 33 bp, Homo sapien
gaacggactcagtgaacgaggacaacttcaatt

SEQ ID NO: 425661 - DNA, 33 bp, Homo sapien; identical to SEQ ID NO: 425659

SEQ ID NO: 425662 - DNA, 33 bp, Homo sapien; identical to SEQ ID NO: 425660

SEQ ID NO: 425663 - DNA, 33 bp, Homo sapien
gctgagatttaacacaactttggaactcaactt

SEQ ID NO: 425664 - DNA, 33 bp, Homo sapien
gctgagatttaacacatctttggaactcaactt

SEQ ID NO: 425665 - DNA, 33 bp, Homo sapien; identical to SEQ ID NO: 425663

SEQ ID NO: 425666 - DNA, 33 bp, Homo sapien; identical to SEQ ID NO: 425664

SEQ ID NO: 425667 - DNA, 33 bp, Homo sapien
ggagcctagagactcgacccagttcaacaaggc

SEQ ID NO: 425668 - DNA, 33 bp, Homo sapien
ggagcctagagactcggcccagttcaacaaggc

SEQ ID NO: 425669 - DNA, 33 bp, Homo sapien
tgaggtttctctctggaaaatggctatgaattc

SEQ ID NO: 425670 - DNA, 33 bp, Homo sapien
tgaggtttctctctggcaaatggctatgaattc

SEQ ID NO: 425671 - DNA, 33 bp, Homo sapien
actttacctacacaacacatcctaaattgagtt

SEQ ID NO: 425672 - DNA, 33 bp, Homo sapien
actttacctacacaactcatcctaaattgagtt

SEQ ID NO: 425673 - DNA, 33 bp, Homo sapien
tttcccttgtcttccaatatataggtaattata

SEQ ID NO: 425674 - DNA, 33 bp, Homo sapien
tttcccttgtcttccagtatataggtaattata

SEQ ID NO: 425675 - DNA, 33 bp, Homo sapien
ttaaggaaataggaacccttcactcctgggact

SEQ ID NO: 425676 - DNA, 33 bp, Homo sapien
ttaaggaaataggaacgcttcactcctgggact

SEQ ID NO: 425677 - DNA, 33 bp, Homo sapien
agcagcagctcctttccatccacactggaacta

SEQ ID NO: 425678 - DNA, 33 bp, Homo sapien
agcagcagctcctttcgatccacactggaacta

SEQ ID NO: 425679 - DNA, 33 bp, Homo sapien
gagttaagtggcttaagtggtagcaacagagcc

SEQ ID NO: 425680 - DNA, 33 bp, Homo sapien
gagttaagtggcttaattggtagcaacagagcc

SEQ ID NO: 425681 - DNA, 33 bp, Homo sapien
cgacatgggaggacccagacccgtggatccatt

SEQ ID NO: 425682 - DNA, 33 bp, Homo sapien
cgacatgggaggacccggacccgtggatccatt

SEQ ID NO: 425683 - DNA, 33 bp, Homo sapien
tcaccacagatgggccaaactattatttgtagg

SEQ ID NO: 425684 - DNA, 33 bp, Homo sapien
tcaccacagatgggccgaactattatttgtagg

SEQ ID NO: 425685 - DNA, 33 bp, Homo sapien
aacatttaaaaatcaaatcttggtgagaatgtg

SEQ ID NO: 425686 - DNA, 33 bp, Homo sapien
aacatttaaaaatcaagtcttggtgagaatgtg

SEQ ID NO: 425687 - DNA, 33 bp, Homo sapien
ctacagaaattttagcggcgtaactggaaattt

SEQ ID NO: 425688 - DNA, 33 bp, Homo sapien
ctacagaaattttagctgcgtaactggaaattt

SEQ ID NO: 425689 - DNA, 33 bp, Homo sapien
tctttccgctactactaacttaatatcgtgtgc

SEQ ID NO: 425690 - DNA, 33 bp, Homo sapien
tctttccgctactactgacttaatatcgtgtgc

SEQ ID NO: 425691 - DNA, 33 bp, Homo sapien
ttcttatgtatccagacgtattcatagaataaa

SEQ ID NO: 425692 - DNA, 33 bp, Homo sapien
ttcttatgtatccagatgtattcatagaataaa

SEQ ID NO: 425693 - DNA, 33 bp, Homo sapien
aaggtgttcctattgcactgtgtagctgagatt

SEQ ID NO: 425694 - DNA, 33 bp, Homo sapien
aaggtgttcctattgccctgtgtagctgagatt

SEQ ID NO: 425695 - DNA, 33 bp, Homo sapien; identical to SEQ ID NO: 425693

SEQ ID NO: 425696 - DNA, 33 bp, Homo sapien; identical to SEQ ID NO: 425694

SEQ ID NO: 425697 - DNA, 33 bp, Homo sapien
ttataaatttcaggaacgaagacatgaatacct

SEQ ID NO: 425698 - DNA, 33 bp, Homo sapien
ttataaatttcaggaatgaagacatgaatacct

SEQ ID NO: 425699 - DNA, 33 bp, Homo sapien
acaacaagaacaaacacaaaattagtagaaaaa

SEQ ID NO: 425700 - DNA, 33 bp, Homo sapien
acaacaagaacaaacataaaattagtagaaaaa

SEQ ID NO: 425701 - DNA, 33 bp, Homo sapien
catcaatttttgacacgcccaatagtgcttttc

SEQ ID NO: 425702 - DNA, 33 bp, Homo sapien
catcaatttttgacactcccaatagtgcttttc

SEQ ID NO: 425703 - DNA, 33 bp, Homo sapien
gacagagtcgtccctacggatgctggttgccca

SEQ ID NO: 425704 - DNA, 33 bp, Homo sapien
gacagagtcgtccctatggatgctggttgccca

SEQ ID NO: 425705 - DNA, 33 bp, Homo sapien; identical to SEQ ID NO: 425703

SEQ ID NO: 425706 - DNA, 33 bp, Homo sapien; identical to SEQ ID NO: 425704

SEQ ID NO: 425707 - DNA, 33 bp, Homo sapien
ttttaaatagaattcaccttgtgtgtgtagtgc

SEQ ID NO: 425708 - DNA, 33 bp, Homo sapien
ttttaaatagaattcatcttgtgtgtgtagtgc

SEQ ID NO: 425709 - DNA, 33 bp, Homo sapien; identical to SEQ ID NO: 425707

SEQ ID NO: 425710 - DNA, 33 bp, Homo sapien; identical to SEQ ID NO: 425708

SEQ ID NO: 425711 - DNA, 33 bp, Homo sapien
aataaaaggtacttgagaattaggtacaaaaac

SEQ ID NO: 425712 - DNA, 33 bp, Homo sapien
aataaaaggtacttgataattaggtacaaaaac

SEQ ID NO: 425713 - DNA, 33 bp, Homo sapien
aaagggtttgatttacaaagaacgaatccaggc

SEQ ID NO: 425714 - DNA, 33 bp, Homo sapien
aaagggtttgatttacgaagaacgaatccaggc

SEQ ID NO: 425715 - DNA, 33 bp, Homo sapien
cagtcagcacaataaggaaaatcatcgtgtgca

SEQ ID NO: 425716 - DNA, 33 bp, Homo sapien
cagtcagcacaataagtaaaatcatcgtgtgca

SEQ ID NO: 425717 - DNA, 33 bp, Homo sapien
catctatatttgtaaacaagtcactgggataaa

SEQ ID NO: 425718 - DNA, 33 bp, Homo sapien
catctatatttgtaaataagtcactgggataaa

SEQ ID NO: 425719 - DNA, 33 bp, Homo sapien; identical to SEQ ID NO: 425717

SEQ ID NO: 425720 - DNA, 33 bp, Homo sapien; identical to SEQ ID NO: 425718

SEQ ID NO: 425721 - DNA, 33 bp, Homo sapien
aaacaaaggaatgagcaaattttgacccatgta

SEQ ID NO: 425722 - DNA, 33 bp, Homo sapien
aaacaaaggaatgagcgaattttgacccatgta

SEQ ID NO: 425723 - DNA, 33 bp, Homo sapien; identical to SEQ ID NO: 425721

SEQ ID NO: 425724 - DNA, 33 bp, Homo sapien; identical to SEQ ID NO: 425722

SEQ ID NO: 425725 - DNA, 33 bp, Homo sapien
ccagcaattttggaagacgaaccaggaggatca

SEQ ID NO: 425726 - DNA, 33 bp, Homo sapien
ccagcaattttggaagccgaaccaggaggatca

SEQ ID NO: 425727 - DNA, 33 bp, Homo sapien
tctgtaacgatacttactaaaatgcaagtgata

SEQ ID NO: 425728 - DNA, 33 bp, Homo sapien
tctgtaacgatacttattaaaatgcaagtgata

SEQ ID NO: 425729 - DNA, 33 bp, Homo sapien
taacttcatttcaaaacttgcttcactgatcta

SEQ ID NO: 425730 - DNA, 33 bp, Homo sapien
taacttcatttcaaaatttgcttcactgatcta

SEQ ID NO: 425731 - DNA, 33 bp, Homo sapien; identical to SEQ ID NO: 425729

SEQ ID NO: 425732 - DNA, 33 bp, Homo sapien; identical to SEQ ID NO: 425730

SEQ ID NO: 425733 - DNA, 33 bp, Homo sapien
ctgattgcaggcattaaatctccagttgcttga

SEQ ID NO: 425734 - DNA, 33 bp, Homo sapien
ctgattgcaggcattacatctccagttgcttga

SEQ ID NO: 425735 - DNA, 33 bp, Homo sapien; identical to SEQ ID NO: 425733

SEQ ID NO: 425736 - DNA, 33 bp, Homo sapien; identical to SEQ ID NO: 425734

SEQ ID NO: 425737 - DNA, 33 bp, Homo sapien
gttgataaatgcttggcaactgtgactttaagc

SEQ ID NO: 425738 - DNA, 33 bp, Homo sapien
gttgataaatgcttggtaactgtgactttaagc

SEQ ID NO: 425739 - DNA, 33 bp, Homo sapien
caaaacttaacgttgagatttaatcatcagtgt

SEQ ID NO: 425740 - DNA, 33 bp, Homo sapien
caaaacttaacgttgatatttaatcatcagtgt

SEQ ID NO: 425741 - DNA, 33 bp, Homo sapien
ttgaattaatgcttggcatctttgactgaaaat

SEQ ID NO: 425742 - DNA, 33 bp, Homo sapien
ttgaattaatgcttggtatctttgactgaaaat

SEQ ID NO: 425743 - DNA, 33 bp, Homo sapien
aacttccatctcaacaagtccatgaatgtaata

SEQ ID NO: 425744 - DNA, 33 bp, Homo sapien
aacttccatctcaacacgtccatgaatgtaata

SEQ ID NO: 425745 - DNA, 33 bp, Homo sapien
tttgcaactactctcactaagttaccaagattt

SEQ ID NO: 425746 - DNA, 33 bp, Homo sapien
tttgcaactactctcattaagttaccaagattt

SEQ ID NO: 425747 - DNA, 33 bp, Homo sapien
tgaaacaacctaaacactaatgccgagtaatga

SEQ ID NO: 425748 - DNA, 33 bp, Homo sapien
tgaaacaacctaaacattaatgccgagtaatga

SEQ ID NO: 425749 - DNA, 33 bp, Homo sapien
tatataacctttcaaactgaagctgataatcac

SEQ ID NO: 425750 - DNA, 33 bp, Homo sapien
tatataacctttcaaattgaagctgataatcac

SEQ ID NO: 425751 - DNA, 33 bp, Homo sapien
cctcattattgaacacagtcttacctaattttc

SEQ ID NO: 425752 - DNA, 33 bp, Homo sapien
cctcattattgaacactgtcttacctaattttc

SEQ ID NO: 425753 - DNA, 33 bp, Homo sapien
agacaaatctcttacaagtaaatctttgatggt

SEQ ID NO: 425754 - DNA, 33 bp, Homo sapien
agacaaatctcttacacgtaaatctttgatggt

SEQ ID NO: 425755 - DNA, 33 bp, Homo sapien
ggaagttggaagtgtagaaagcaaaacaaatag

SEQ ID NO: 425756 - DNA, 33 bp, Homo sapien
ggaagttggaagtgtataaagcaaaacaaatag

SEQ ID NO: 425757 - DNA, 33 bp, Homo sapien
gaggggcccaacattaataatgattccatacca

SEQ ID NO: 425758 - DNA, 33 bp, Homo sapien
gaggggcccaacattagtaatgattccatacca

SEQ ID NO: 425759 - DNA, 33 bp, Homo sapien
gtttggtatgctaagacaacgttctagctttac

SEQ ID NO: 425760 - DNA, 33 bp, Homo sapien
gtttggtatgctaagagaacgttctagctttac

SEQ ID NO: 425761 - DNA, 33 bp, Homo sapien
gttagaactttcattaataagccattttattca

SEQ ID NO: 425762 - DNA, 33 bp, Homo sapien
gttagaactttcattagtaagccattttattca

SEQ ID NO: 425763 - DNA, 33 bp, Homo sapien
tctaacattctgcagtaaaaatattctaaatgc

SEQ ID NO: 425764 - DNA, 33 bp, Homo sapien
tctaacattctgcagtgaaaatattctaaatgc

SEQ ID NO: 425765 - DNA, 33 bp, Homo sapien; identical to SEQ ID NO: 425763

SEQ ID NO: 425766 - DNA, 33 bp, Homo sapien
tctaacattctgcagtcaaaatattctaaatgc

SEQ ID NO: 425767 - DNA, 33 bp, Homo sapien
atgaaagtatcaaaaactagatgtcaatttcca

SEQ ID NO: 425768 - DNA, 33 bp, Homo sapien
atgaaagtatcaaaaattagatgtcaatttcca

SEQ ID NO: 425769 - DNA, 33 bp, Homo sapien
tgcaatgataagtaaagtgtacctttgaattct

SEQ ID NO: 425770 - DNA, 33 bp, Homo sapien
tgcaatgataagtaaattgtacctttgaattct

SEQ ID NO: 425771 - DNA, 33 bp, Homo sapien
gttcttcttcaaagcagtcccctcttagttgca

SEQ ID NO: 425772 - DNA, 33 bp, Homo sapien
gttcttcttcaaagcattcccctcttagttgca

SEQ ID NO: 425773 - DNA, 33 bp, Homo sapien
aagacaaaatgattaaagtggcatatatgtgaa

SEQ ID NO: 425774 - DNA, 33 bp, Homo sapien
aagacaaaatgattaaggtggcatatatgtgaa

SEQ ID NO: 425775 - DNA, 33 bp, Homo sapien
tgcaacgtcatctaaaagagaaaaatgaggagg

SEQ ID NO: 425776 - DNA, 33 bp, Homo sapien
tgcaacgtcatctaaacgagaaaaatgaggagg

SEQ ID NO: 425777 - DNA, 33 bp, Homo sapien
tctcttagtacagaagaaaatggagtctcctat

SEQ ID NO: 425778 - DNA, 33 bp, Homo sapien
tctcttagtacagaaggaaatggagtctcctat

SEQ ID NO: 425779 - DNA, 33 bp, Homo sapien
ggataagagaaagcccagaggcctactctgatt

SEQ ID NO: 425780 - DNA, 33 bp, Homo sapien
ggataagagaaagcccggaggcctactctgatt

SEQ ID NO: 425781 - DNA, 33 bp, Homo sapien
attgccataggaagaaagtgggctgtttttgtt

SEQ ID NO: 425782 - DNA, 33 bp, Homo sapien
attgccataggaagaacgtgggctgtttttgtt

SEQ ID NO: 425783 - DNA, 33 bp, Homo sapien
gtcaggtattcgttcaactttgccaatgatcca

SEQ ID NO: 425784 - DNA, 33 bp, Homo sapien
gtcaggtattcgttcagctttgccaatgatcca

SEQ ID NO: 425785 - DNA, 33 bp, Homo sapien
ttcttcactttcagtacattcaagagctattct

SEQ ID NO: 425786 - DNA, 33 bp, Homo sapien
ttcttcactttcagtatattcaagagctattct

SEQ ID NO: 425787 - DNA, 33 bp, Homo sapien
gaattcacttgtaaatcatgctctttgaaaatt

SEQ ID NO: 425788 - DNA, 33 bp, Homo sapien
gaattcacttgtaaatgatgctctttgaaaatt

SEQ ID NO: 425789 - DNA, 33 bp, Homo sapien
cagagggtggcttaaccggcagaagatgtgaaa

SEQ ID NO: 425790 - DNA, 33 bp, Homo sapien
cagagggtggcttaactggcagaagatgtgaaa

SEQ ID NO: 425791 - DNA, 33 bp, Homo sapien
accacagaatccttaaacacattcccaaagacc

SEQ ID NO: 425792 - DNA, 33 bp, Homo sapien
accacagaatccttaagcacattcccaaagacc

SEQ ID NO: 425793 - DNA, 33 bp, Homo sapien
ctcacagattagaaagcaaagcacacgaacaca

SEQ ID NO: 425794 - DNA, 33 bp, Homo sapien
ctcacagattagaaagtaaagcacacgaacaca

SEQ ID NO: 425795 - DNA, 33 bp, Homo sapien
aggaggccattggacacaggggtctgaagctca

SEQ ID NO: 425796 - DNA, 33 bp, Homo sapien
aggaggccattggacataggggtctgaagctca

SEQ ID NO: 425797 - DNA, 33 bp, Homo sapien
gagaagaaggtgatcaagcaattgttccaaata

SEQ ID NO: 425798 - DNA, 33 bp, Homo sapien
gagaagaaggtgatcatgcaattgttccaaata

SEQ ID NO: 425799 - DNA, 33 bp, Homo sapien
ccacttgtcctcttcaagtggtttttgcaagcc

SEQ ID NO: 425800 - DNA, 33 bp, Homo sapien
ccacttgtcctcttcaggtggtttttgcaagcc

SEQ ID NO: 425801 - DNA, 33 bp, Homo sapien
gggacacaggacatagaaagacaccagcccagg

SEQ ID NO: 425802 - DNA, 33 bp, Homo sapien
gggacacaggacataggaagacaccagcccagg

SEQ ID NO: 425803 - DNA, 33 bp, Homo sapien
tttcctctttcctctacccttgtcaagcgaaat

SEQ ID NO: 425804 - DNA, 33 bp, Homo sapien
tttcctctttcctctatccttgtcaagcgaaat

SEQ ID NO: 425805 - DNA, 33 bp, Homo sapien
cttttttgtctgatccaagtttatcttgcttca

SEQ ID NO: 425806 - DNA, 33 bp, Homo sapien
cttttttgtctgatccgagtttatcttgcttca

SEQ ID NO: 425807 - DNA, 33 bp, Homo sapien
atacactgtgaagctaaaggctaagattcagct

SEQ ID NO: 425808 - DNA, 33 bp, Homo sapien
atacactgtgaagctagaggctaagattcagct

SEQ ID NO: 425809 - DNA, 33 bp, Homo sapien; identical to SEQ ID NO: 425807

SEQ ID NO: 425810 - DNA, 33 bp, Homo sapien; identical to SEQ ID NO: 425808

SEQ ID NO: 425811 - DNA, 33 bp, Homo sapien
tgcatagcttcacagacaatccagtgatgtaga

SEQ ID NO: 425812 - DNA, 33 bp, Homo sapien
tgcatagcttcacagataatccagtgatgtaga

SEQ ID NO: 425813 - DNA, 33 bp, Homo sapien
tgctctgatccagagacagattctagcagtggg

SEQ ID NO: 425814 - DNA, 33 bp, Homo sapien
tgctctgatccagagatagattctagcagtggg

SEQ ID NO: 425815 - DNA, 33 bp, Homo sapien
tgtagaatgcttaatacggtgcctgacatatag

SEQ ID NO: 425816 - DNA, 33 bp, Homo sapien
tgtagaatgcttaatatggtgcctgacatatag

SEQ ID NO: 425817 - DNA, 33 bp, Homo sapien
aatttttactcttgacgaattgtgtaatatgct

SEQ ID NO: 425818 - DNA, 33 bp, Homo sapien
aatttttactcttgactaattgtgtaatatgct

SEQ ID NO: 425819 - DNA, 33 bp, Homo sapien
tctctctagatacagactagctcttaggaaaag

SEQ ID NO: 425820 - DNA, 33 bp, Homo sapien
tctctctagatacagattagctcttaggaaaag

SEQ ID NO: 425821 - DNA, 33 bp, Homo sapien
atagccacatttaaacagaatcattaactttgg

SEQ ID NO: 425822 - DNA, 33 bp, Homo sapien
atagccacatttaaacggaatcattaactttgg

SEQ ID NO: 425823 - DNA, 33 bp, Homo sapien; identical to SEQ ID NO: 425821

SEQ ID NO: 425824 - DNA, 33 bp, Homo sapien; identical to SEQ ID NO: 425822

SEQ ID NO: 425825 - DNA, 33 bp, Homo sapien
agaccctgagatgacccgaagtgagagagagac

SEQ ID NO: 425826 - DNA, 33 bp, Homo sapien
agaccctgagatgacctgaagtgagagagagac

SEQ ID NO: 425827 - DNA, 33 bp, Homo sapien
cagttttcctagagaacgccatcccatcttcta

SEQ ID NO: 425828 - DNA, 33 bp, Homo sapien
cagttttcctagagaatgccatcccatcttcta

SEQ ID NO: 425829 - DNA, 33 bp, Homo sapien
agaaacttatgcttgacgtgaaaccttttagga

SEQ ID NO: 425830 - DNA, 33 bp, Homo sapien
agaaacttatgcttgatgtgaaaccttttagga

SEQ ID NO: 425831 - DNA, 33 bp, Homo sapien; identical to SEQ ID NO: 425829

SEQ ID NO: 425832 - DNA, 33 bp, Homo sapien; identical to SEQ ID NO: 425830

SEQ ID NO: 425833 - DNA, 33 bp, Homo sapien
aagttttttgacacaaacaaagcacttaataaa

SEQ ID NO: 425834 - DNA, 33 bp, Homo sapien
aagttttttgacacaagcaaagcacttaataaa

SEQ ID NO: 425835 - DNA, 33 bp, Homo sapien
ggacagcctgacttaacctcaatttgttaacag

SEQ ID NO: 425836 - DNA, 33 bp, Homo sapien
ggacagcctgacttaatctcaatttgttaacag

SEQ ID NO: 425837 - DNA, 33 bp, Homo sapien
atgatctttgcctaccgagagaatttgttcaaa

SEQ ID NO: 425838 - DNA, 33 bp, Homo sapien
atgatctttgcctacctagagaatttgttcaaa

SEQ ID NO: 425839 - DNA, 33 bp, Homo sapien; identical to SEQ ID NO: 425837

SEQ ID NO: 425840 - DNA, 33 bp, Homo sapien; identical to SEQ ID NO: 425838

SEQ ID NO: 425841 - DNA, 33 bp, Homo sapien
tagttaccaatagtctaaaaaccagtcttctga

SEQ ID NO: 425842 - DNA, 33 bp, Homo sapien
tagttaccaatagtctgaaaaccagtcttctga

SEQ ID NO: 425843 - DNA, 33 bp, Homo sapien; identical to SEQ ID NO: 425841

SEQ ID NO: 425844 - DNA, 33 bp, Homo sapien; identical to SEQ ID NO: 425842

SEQ ID NO: 425845 - DNA, 33 bp, Homo sapien
agtcactatagagtaactcagtgttgtctaacc

SEQ ID NO: 425846 - DNA, 33 bp, Homo sapien
agtcactatagagtaagtcagtgttgtctaacc

SEQ ID NO: 425847 - DNA, 33 bp, Homo sapien
tcacatttcaaccatcaagaaccactgaactga

SEQ ID NO: 425848 - DNA, 33 bp, Homo sapien
tcacatttcaaccatcgagaaccactgaactga

SEQ ID NO: 425849 - DNA, 33 bp, Homo sapien
ttttgtgtgtatggcaaatatacgtaacatgaa

SEQ ID NO: 425850 - DNA, 33 bp, Homo sapien
ttttgtgtgtatggcagatatacgtaacatgaa

SEQ ID NO: 425851 - DNA, 33 bp, Homo sapien
ttttgtttttttccacaatggagtcttgctctg

SEQ ID NO: 425852 - DNA, 33 bp, Homo sapien
ttttgtttttttccacgatggagtcttgctctg

SEQ ID NO: 425853 - DNA, 33 bp, Homo sapien
cccaaacttatattcagctgccatctagttatt

SEQ ID NO: 425854 - DNA, 33 bp, Homo sapien
cccaaacttatattcatctgccatctagttatt

SEQ ID NO: 425855 - DNA, 33 bp, Homo sapien
ttcacataattcagaacacaggcaggaaaagca

SEQ ID NO: 425856 - DNA, 33 bp, Homo sapien
ttcacataattcagaatacaggcaggaaaagca

SEQ ID NO: 425857 - DNA, 33 bp, Homo sapien
agagccctgcttggcacattataagttttcaat

SEQ ID NO: 425858 - DNA, 33 bp, Homo sapien
agagccctgcttggcatattataagttttcaat

SEQ ID NO: 425859 - DNA, 33 bp, Homo sapien
gcatcagtctgtgataacttcctgtaagaatcg

SEQ ID NO: 425860 - DNA, 33 bp, Homo sapien
gcatcagtctgtgatagcttcctgtaagaatcg

SEQ ID NO: 425861 - DNA, 33 bp, Homo sapien
ttcccagtgcataatacgctaggataaagagaa

SEQ ID NO: 425862 - DNA, 33 bp, Homo sapien
ttcccagtgcataataggctaggataaagagaa

SEQ ID NO: 425863 - DNA, 33 bp, Homo sapien
tttaaacctagctctagtactcattggcaatat

SEQ ID NO: 425864 - DNA, 33 bp, Homo sapien
tttaaacctagctctattactcattggcaatat

SEQ ID NO: 425865 - DNA, 33 bp, Homo sapien
taacatcctttgatcaaaaatcttcaggggatc

SEQ ID NO: 425866 - DNA, 33 bp, Homo sapien
taacatcctttgatcacaaatcttcaggggatc

SEQ ID NO: 425867 - DNA, 33 bp, Homo sapien
actggacagctgtatgcataaatctggggttct

SEQ ID NO: 425868 - DNA, 33 bp, Homo sapien
actggacagctgtatgtataaatctggggttct

SEQ ID NO: 425869 - DNA, 33 bp, Homo sapien
ccttgctgctctttgccgataaatatcagtagg

SEQ ID NO: 425870 - DNA, 33 bp, Homo sapien
ccttgctgctctttgctgataaatatcagtagg

SEQ ID NO: 425871 - DNA, 33 bp, Homo sapien
tagcattctggctgtactacagagtgatgatgt

SEQ ID NO: 425872 - DNA, 33 bp, Homo sapien
tagcattctggctgtagtacagagtgatgatgt

SEQ ID NO: 425873 - DNA, 33 bp, Homo sapien
gagagaagagaggaccaatgaaggagtttagag

SEQ ID NO: 425874 - DNA, 33 bp, Homo sapien
gagagaagagaggaccgatgaaggagtttagag

SEQ ID NO: 425875 - DNA, 33 bp, Homo sapien
atttgtgataataggacaatacagtactgcttc

SEQ ID NO: 425876 - DNA, 33 bp, Homo sapien
atttgtgataataggataatacagtactgcttc

SEQ ID NO: 425877 - DNA, 33 bp, Homo sapien
agataacagaatgaaaggttataaaggagagtg

SEQ ID NO: 425878 - DNA, 33 bp, Homo sapien
agataacagaatgaaatgttataaaggagagtg

SEQ ID NO: 425879 - DNA, 33 bp, Homo sapien
aagtttgagcaatcataaacaaattcataagga

SEQ ID NO: 425880 - DNA, 33 bp, Homo sapien
aagtttgagcaatcatgaacaaattcataagga

SEQ ID NO: 425881 - DNA, 33 bp, Homo sapien
ttttccatgaagatgccataatcagaccagaat

SEQ ID NO: 425882 - DNA, 33 bp, Homo sapien
ttttccatgaagatgcgataatcagaccagaat

SEQ ID NO: 425883 - DNA, 33 bp, Homo sapien
ctttaaggtattggacaaatagtcaaatgttct

SEQ ID NO: 425884 - DNA, 33 bp, Homo sapien
ctttaaggtattggacgaatagtcaaatgttct

SEQ ID NO: 425885 - DNA, 33 bp, Homo sapien
aacaggtgatggggacacaatccataaaatctc

SEQ ID NO: 425886 - DNA, 33 bp, Homo sapien
aacaggtgatggggacgcaatccataaaatctc

SEQ ID NO: 425887 - DNA, 33 bp, Homo sapien
cctgaattctcgtcccaattaaacatcatctat

SEQ ID NO: 425888 - DNA, 33 bp, Homo sapien
cctgaattctcgtcccgattaaacatcatctat

SEQ ID NO: 425889 - DNA, 33 bp, Homo sapien
tccagaagtgcaagaaagtataatgcttgtagg

SEQ ID NO: 425890 - DNA, 33 bp, Homo sapien
tccagaagtgcaagaacgtataatgcttgtagg

SEQ ID NO: 425891 - DNA, 33 bp, Homo sapien
actcatttatgtcttaaaaccagtatatttaca

SEQ ID NO: 425892 - DNA, 33 bp, Homo sapien
actcatttatgtcttagaaccagtatatttaca

SEQ ID NO: 425893 - DNA, 33 bp, Homo sapien
caagcaaccatagtgacagactggcataattat

SEQ ID NO: 425894 - DNA, 33 bp, Homo sapien
caagcaaccatagtgatagactggcataattat

SEQ ID NO: 425895 - DNA, 33 bp, Homo sapien
tcacaagagtgcatacaaatatttttatgtgta

SEQ ID NO: 425896 - DNA, 33 bp, Homo sapien
tcacaagagtgcatactaatatttttatgtgta

SEQ ID NO: 425897 - DNA, 33 bp, Homo sapien
tggaaagaggtacacaatgtaatgccaagtgaa

SEQ ID NO: 425898 - DNA, 33 bp, Homo sapien
tggaaagaggtacacactgtaatgccaagtgaa

SEQ ID NO: 425899 - DNA, 33 bp, Homo sapien
ttctttcacttggaataatgttttcaagtttca

SEQ ID NO: 425900 - DNA, 33 bp, Homo sapien
ttctttcacttggaatgatgttttcaagtttca

SEQ ID NO: 425901 - DNA, 33 bp, Homo sapien
atgtagtacaccaaaagattcttctggcaggtg

SEQ ID NO: 425902 - DNA, 33 bp, Homo sapien
atgtagtacaccaaaatattcttctggcaggtg

SEQ ID NO: 425903 - DNA, 33 bp, Homo sapien
actatggggccacttacgctttcactctcattt

SEQ ID NO: 425904 - DNA, 33 bp, Homo sapien
actatggggccacttatgctttcactctcattt

SEQ ID NO: 425905 - DNA, 33 bp, Homo sapien
ttccatgttggataccaatgtaatgtctttctc

SEQ ID NO: 425906 - DNA, 33 bp, Homo sapien
ttccatgttggataccgatgtaatgtctttctc

SEQ ID NO: 425907 - DNA, 33 bp, Homo sapien
tgtatacaaaccattaccttggcagtatagcat

SEQ ID NO: 425908 - DNA, 33 bp, Homo sapien
tgtatacaaaccattatcttggcagtatagcat

SEQ ID NO: 425909 - DNA, 33 bp, Homo sapien
ctgagtctcgggtataaatagatcttctcagct

SEQ ID NO: 425910 - DNA, 33 bp, Homo sapien
ctgagtctcgggtatacatagatcttctcagct

SEQ ID NO: 425911 - DNA, 33 bp, Homo sapien
aatcaccatgtaagtcaactgatattaaagttc

SEQ ID NO: 425912 - DNA, 33 bp, Homo sapien
aatcaccatgtaagtcgactgatattaaagttc

SEQ ID NO: 425913 - DNA, 33 bp, Homo sapien
acagccttgaccacaacttagaaaatgaaactc

SEQ ID NO: 425914 - DNA, 33 bp, Homo sapien
acagccttgaccacaatttagaaaatgaaactc

SEQ ID NO: 425915 - DNA, 33 bp, Homo sapien
cacatcatgatggctacaaaatattgttgtaga

SEQ ID NO: 425916 - DNA, 33 bp, Homo sapien
cacatcatgatggctataaaatattgttgtaga

SEQ ID NO: 425917 - DNA, 33 bp, Homo sapien
gtttatcttacctttacgtggcatacttttacc

SEQ ID NO: 425918 - DNA, 33 bp, Homo sapien
gtttatcttacctttatgtggcatacttttacc

SEQ ID NO: 425919 - DNA, 33 bp, Homo sapien
aatatataagtggcataaattggtcagctgtag

SEQ ID NO: 425920 - DNA, 33 bp, Homo sapien
aatatataagtggcatgaattggtcagctgtag

SEQ ID NO: 425921 - DNA, 33 bp, Homo sapien
atatacacctgtactactaggcacttttaagta

SEQ ID NO: 425922 - DNA, 33 bp, Homo sapien
atatacacctgtactattaggcacttttaagta

SEQ ID NO: 425923 - DNA, 33 bp, Homo sapien
ttatcagcggtataaaattgtatgcacttcctc

SEQ ID NO: 425924 - DNA, 33 bp, Homo sapien
ttatcagcggtataaatttgtatgcacttcctc

SEQ ID NO: 425925 - DNA, 33 bp, Homo sapien
tctcatccctagacagcaaaacttgaacaactg

SEQ ID NO: 425926 - DNA, 33 bp, Homo sapien
tctcatccctagacaggaaaacttgaacaactg

SEQ ID NO: 425927 - DNA, 33 bp, Homo sapien
ttatttatccctagcaactaatatcttttctaa

SEQ ID NO: 425928 - DNA, 33 bp, Homo sapien
ttatttatccctagcagctaatatcttttctaa

SEQ ID NO: 425929 - DNA, 33 bp, Homo sapien
gttaatactataaacacggtatgatgggagttg

SEQ ID NO: 425930 - DNA, 33 bp, Homo sapien
gttaatactataaacatggtatgatgggagttg

SEQ ID NO: 425931 - DNA, 33 bp, Homo sapien
ttgctattagccctcaactataatgctaaaaga

SEQ ID NO: 425932 - DNA, 33 bp, Homo sapien
ttgctattagccctcagctataatgctaaaaga

SEQ ID NO: 425933 - DNA, 33 bp, Homo sapien
cttactaccagttaagcaggcatttgtgaatag

SEQ ID NO: 425934 - DNA, 33 bp, Homo sapien
cttactaccagttaagtaggcatttgtgaatag

SEQ ID NO: 425935 - DNA, 33 bp, Homo sapien
gtttctggtcccatcactctcacgtcaacagca

SEQ ID NO: 425936 - DNA, 33 bp, Homo sapien
gtttctggtcccatcattctcacgtcaacagca

SEQ ID NO: 425937 - DNA, 33 bp, Homo sapien
aatgtcatctctttggaatctgtgcatagaact

SEQ ID NO: 425938 - DNA, 33 bp, Homo sapien
aatgtcatctctttggtatctgtgcatagaact

SEQ ID NO: 425939 - DNA, 33 bp, Homo sapien
gggcagaggggttcaacgtccttcataagaagt

SEQ ID NO: 425940 - DNA, 33 bp, Homo sapien
gggcagaggggttcaatgtccttcataagaagt

SEQ ID NO: 425941 - DNA, 33 bp, Homo sapien
ctaattgcagttacataagaccttgaaaagatc

SEQ ID NO: 425942 - DNA, 33 bp, Homo sapien
ctaattgcagttacatgagaccttgaaaagatc

SEQ ID NO: 425943 - DNA, 33 bp, Homo sapien
actcatgtggttcttcacacttccaattatgaa

SEQ ID NO: 425944 - DNA, 33 bp, Homo sapien
actcatgtggttcttctcacttccaattatgaa

SEQ ID NO: 425945 - DNA, 33 bp, Homo sapien
atctgtgctaaaagtacgaaagttagccaggcg

SEQ ID NO: 425946 - DNA, 33 bp, Homo sapien
atctgtgctaaaagtaggaaagttagccaggcg

SEQ ID NO: 425947 - DNA, 33 bp, Homo sapien
ctcacaaggcaagtcaaaaattccagggagctg

SEQ ID NO: 425948 - DNA, 33 bp, Homo sapien
ctcacaaggcaagtcagaaattccagggagctg

SEQ ID NO: 425949 - DNA, 33 bp, Homo sapien
ccacactattctataccgcctgtcagtcctctt

SEQ ID NO: 425950 - DNA, 33 bp, Homo sapien
ccacactattctatactgcctgtcagtcctctt

SEQ ID NO: 425951 - DNA, 33 bp, Homo sapien
gggatacaatgaataacagggaaccaccgatgt

SEQ ID NO: 425952 - DNA, 33 bp, Homo sapien
gggatacaatgaataatagggaaccaccgatgt

SEQ ID NO: 425953 - DNA, 33 bp, Homo sapien
tggatttccaacgacaagaagcaatcaattccc

SEQ ID NO: 425954 - DNA, 33 bp, Homo sapien
tggatttccaacgacatgaagcaatcaattccc

SEQ ID NO: 425955 - DNA, 33 bp, Homo sapien
tgagagctttaagttaccgcacagtcagacgca

SEQ ID NO: 425956 - DNA, 33 bp, Homo sapien
tgagagctttaagttatcgcacagtcagacgca

SEQ ID NO: 425957 - DNA, 33 bp, Homo sapien
attctcagcactcatcactagctaacataccat

SEQ ID NO: 425958 - DNA, 33 bp, Homo sapien
attctcagcactcatcgctagctaacataccat

SEQ ID NO: 425959 - DNA, 33 bp, Homo sapien
gtttttccaaggattaactgtactataatactg

SEQ ID NO: 425960 - DNA, 33 bp, Homo sapien
gtttttccaaggattagctgtactataatactg

SEQ ID NO: 425961 - DNA, 33 bp, Homo sapien
aggaaaataagatagacggaggttaaataatga

SEQ ID NO: 425962 - DNA, 33 bp, Homo sapien
aggaaaataagatagatggaggttaaataatga

SEQ ID NO: 425963 - DNA, 33 bp, Homo sapien
ccattttattgtattccctgacaggttcccaag

SEQ ID NO: 425964 - DNA, 33 bp, Homo sapien
ccattttattgtattctctgacaggttcccaag

SEQ ID NO: 425965 - DNA, 33 bp, Homo sapien
aaaaaattacggaaacaaacgacagattagtat

SEQ ID NO: 425966 - DNA, 33 bp, Homo sapien
aaaaaattacggaaacgaacgacagattagtat

SEQ ID NO: 425967 - DNA, 33 bp, Homo sapien
ataaaagtgtaaagaacggatagatggaaattt

SEQ ID NO: 425968 - DNA, 33 bp, Homo sapien
ataaaagtgtaaagaatggatagatggaaattt

SEQ ID NO: 425969 - DNA, 33 bp, Homo sapien
tttgacaggcctatggaaaaaataagtctgtgc

SEQ ID NO: 425970 - DNA, 33 bp, Homo sapien
tttgacaggcctatggtaaaaataagtctgtgc

SEQ ID NO: 425971 - DNA, 33 bp, Homo sapien
aacatgcaggactgaaaatttctctaggcattt

SEQ ID NO: 425972 - DNA, 33 bp, Homo sapien
aacatgcaggactgaacatttctctaggcattt

SEQ ID NO: 425973 - DNA, 33 bp, Homo sapien
agctcaaaaaagatgccgagccctgacttgtat

SEQ ID NO: 425974 - DNA, 33 bp, Homo sapien
agctcaaaaaagatgcggagccctgacttgtat

SEQ ID NO: 425975 - DNA, 33 bp, Homo sapien
attaatggagaaaacaactggccagagataaag

SEQ ID NO: 425976 - DNA, 33 bp, Homo sapien
attaatggagaaaacatctggccagagataaag

SEQ ID NO: 425977 - DNA, 33 bp, Homo sapien
gttcagacagctaagacggccgagaaaatgaag

SEQ ID NO: 425978 - DNA, 33 bp, Homo sapien
gttcagacagctaagatggccgagaaaatgaag

SEQ ID NO: 425979 - DNA, 33 bp, Homo sapien
cagtaaccactatgtcaaaggactaaaggaaat

SEQ ID NO: 425980 - DNA, 33 bp, Homo sapien
cagtaaccactatgtcgaaggactaaaggaaat

SEQ ID NO: 425981 - DNA, 33 bp, Homo sapien
tgccagaagctgtgtcaaagctagggtagcaaa

SEQ ID NO: 425982 - DNA, 33 bp, Homo sapien
tgccagaagctgtgtccaagctagggtagcaaa

SEQ ID NO: 425983 - DNA, 33 bp, Homo sapien
acactgcttcttggaaaagacttccttcaccac

SEQ ID NO: 425984 - DNA, 33 bp, Homo sapien
acactgcttcttggaagagacttccttcaccac

SEQ ID NO: 425985 - DNA, 33 bp, Homo sapien
ctggtttacactgtgaagccatttttttaaggt

SEQ ID NO: 425986 - DNA, 33 bp, Homo sapien
ctggtttacactgtgaggccatttttttaaggt

SEQ ID NO: 425987 - DNA, 33 bp, Homo sapien
agattaaataacgtcaaaccttagaagtgacca

SEQ ID NO: 425988 - DNA, 33 bp, Homo sapien
agattaaataacgtcagaccttagaagtgacca

SEQ ID NO: 425989 - DNA, 33 bp, Homo sapien
aactggaagatgaaaaactagacatccctttca

SEQ ID NO: 425990 - DNA, 33 bp, Homo sapien
aactggaagatgaaaacctagacatccctttca

SEQ ID NO: 425991 - DNA, 33 bp, Homo sapien
caggatgtattccaaaagttaattgtaactgat

SEQ ID NO: 425992 - DNA, 33 bp, Homo sapien
caggatgtattccaaaggttaattgtaactgat

SEQ ID NO: 425993 - DNA, 33 bp, Homo sapien
atttgggaaacatccacgagctatttgagttgt

SEQ ID NO: 425994 - DNA, 33 bp, Homo sapien
atttgggaaacatccatgagctatttgagttgt

SEQ ID NO: 425995 - DNA, 33 bp, Homo sapien
gtaattcagtatcgcgccaaccaagagggatca

SEQ ID NO: 425996 - DNA, 33 bp, Homo sapien
gtaattcagtatcgcgtcaaccaagagggatca

SEQ ID NO: 425997 - DNA, 33 bp, Homo sapien
aaaaacagtgccctcaactcacttcaaggagac

SEQ ID NO: 425998 - DNA, 33 bp, Homo sapien
aaaaacagtgccctcatctcacttcaaggagac

SEQ ID NO: 425999 - DNA, 33 bp, Homo sapien
ctagatcaggagacaacgcccaggacagagacg

SEQ ID NO: 426000 - DNA, 33 bp, Homo sapien
ctagatcaggagacaaggcccaggacagagacg

SEQ ID NO: 426001 - DNA, 33 bp, Homo sapien
catatattgaaacttacagatgttatcctaaaa

SEQ ID NO: 426002 - DNA, 33 bp, Homo sapien
catatattgaaacttatagatgttatcctaaaa

SEQ ID NO: 426003 - DNA, 33 bp, Homo sapien
attctgaagtcacttcccaaacttctgtaggtg

SEQ ID NO: 426004 - DNA, 33 bp, Homo sapien
attctgaagtcacttctcaaacttctgtaggtg

SEQ ID NO: 426005 - DNA, 33 bp, Homo sapien
aaaggatataacacaactaggcactgaatggct

SEQ ID NO: 426006 - DNA, 33 bp, Homo sapien
aaaggatataacacaattaggcactgaatggct

SEQ ID NO: 426007 - DNA, 33 bp, Homo sapien
gacaccagcagctaaacttgtaaaacgtgttcg

SEQ ID NO: 426008 - DNA, 33 bp, Homo sapien
gacaccagcagctaaagttgtaaaacgtgttcg

SEQ ID NO: 426009 - DNA, 33 bp, Homo sapien
cccaattccagaagcacggggctttgattctac

SEQ ID NO: 426010 - DNA, 33 bp, Homo sapien
cccaattccagaagcatggggctttgattctac

SEQ ID NO: 426011 - DNA, 33 bp, Homo sapien
aattggagtggttatacctgtcaggagagtcaa

SEQ ID NO: 426012 - DNA, 33 bp, Homo sapien
aattggagtggttatatctgtcaggagagtcaa

SEQ ID NO: 426013 - DNA, 33 bp, Homo sapien
aacatatcgctgctgcacaaaaccacccaaacc

SEQ ID NO: 426014 - DNA, 33 bp, Homo sapien
aacatatcgctgctgcgcaaaaccacccaaacc

SEQ ID NO: 426015 - DNA, 33 bp, Homo sapien
tctatacttcaatggaggcaagactgtataaat

SEQ ID NO: 426016 - DNA, 33 bp, Homo sapien
tctatacttcaatggatgcaagactgtataaat

SEQ ID NO: 426017 - DNA, 33 bp, Homo sapien
gacattgagggtaggaaaaatgcctgtgtcccc

SEQ ID NO: 426018 - DNA, 33 bp, Homo sapien
gacattgagggtaggagaaatgcctgtgtcccc

SEQ ID NO: 426019 - DNA, 33 bp, Homo sapien
tgatttccaatcatgcacatcttgtccgtttgt

SEQ ID NO: 426020 - DNA, 33 bp, Homo sapien
tgatttccaatcatgctcatcttgtccgtttgt

SEQ ID NO: 426021 - DNA, 33 bp, Homo sapien
actattaacataatcaccttactgtgctatcca

SEQ ID NO: 426022 - DNA, 33 bp, Homo sapien
actattaacataatcatcttactgtgctatcca

SEQ ID NO: 426023 - DNA, 33 bp, Homo sapien
cccaacactttggaagccctagacagaagttcg

SEQ ID NO: 426024 - DNA, 33 bp, Homo sapien
cccaacactttggaaggcctagacagaagttcg

SEQ ID NO: 426025 - DNA, 33 bp, Homo sapien
tttcctctaagaactgcaacaaggaaaggatga

SEQ ID NO: 426026 - DNA, 33 bp, Homo sapien
tttcctctaagaactggaacaaggaaaggatga

SEQ ID NO: 426027 - DNA, 33 bp, Homo sapien
tgtcagagctgagaagaaaaccttgagttatct

SEQ ID NO: 426028 - DNA, 33 bp, Homo sapien
tgtcagagctgagaaggaaaccttgagttatct

SEQ ID NO: 426029 - DNA, 33 bp, Homo sapien
aacttgtaaaatagagaaagtcacacatacaaa

SEQ ID NO: 426030 - DNA, 33 bp, Homo sapien
aacttgtaaaatagaggaagtcacacatacaaa

SEQ ID NO: 426031 - DNA, 33 bp, Homo sapien
ttacaaaaagattataaccatttaagcccactt

SEQ ID NO: 426032 - DNA, 33 bp, Homo sapien
ttacaaaaagattatatccatttaagcccactt

SEQ ID NO: 426033 - DNA, 33 bp, Homo sapien
aagcaaaagagtgaacagaccatgtgggagagg

SEQ ID NO: 426034 - DNA, 33 bp, Homo sapien
aagcaaaagagtgaacggaccatgtgggagagg

SEQ ID NO: 426035 - DNA, 33 bp, Homo sapien
agcattttgtaaagtgaaaaaaagctggtgaaa

SEQ ID NO: 426036 - DNA, 33 bp, Homo sapien
agcattttgtaaagtgtaaaaaagctggtgaaa

SEQ ID NO: 426037 - DNA, 33 bp, Homo sapien
caccagacttgtgtgaaaaagaaaaaacactct

SEQ ID NO: 426038 - DNA, 33 bp, Homo sapien
caccagacttgtgtgacaaagaaaaaacactct

SEQ ID NO: 426039 - DNA, 33 bp, Homo sapien
gtgggtgctggcggagacactgatttgattgtg

SEQ ID NO: 426040 - DNA, 33 bp, Homo sapien
gtgggtgctggcggaggcactgatttgattgtg

SEQ ID NO: 426041 - DNA, 33 bp, Homo sapien
tgtctctaggcgggaaaaaataacaagactcag

SEQ ID NO: 426042 - DNA, 33 bp, Homo sapien
tgtctctaggcgggaagaaataacaagactcag

SEQ ID NO: 426043 - DNA, 33 bp, Homo sapien
cacctcagcctgcagaatagttgagacacaggt

SEQ ID NO: 426044 - DNA, 33 bp, Homo sapien
cacctcagcctgcagagtagttgagacacaggt

SEQ ID NO: 426045 - DNA, 33 bp, Homo sapien
cttcttcagccataaaacaagggaacacttgat

SEQ ID NO: 426046 - DNA, 33 bp, Homo sapien
cttcttcagccataaagcaagggaacacttgat

SEQ ID NO: 426047 - DNA, 33 bp, Homo sapien
taatttgccaagagagcagattttagctgggca

SEQ ID NO: 426048 - DNA, 33 bp, Homo sapien
taatttgccaagagagtagattttagctgggca

SEQ ID NO: 426049 - DNA, 33 bp, Homo sapien
agctggatcattcagacgagagcctttggggga

SEQ ID NO: 426050 - DNA, 33 bp, Homo sapien
agctggatcattcagatgagagcctttggggga

SEQ ID NO: 426051 - DNA, 33 bp, Homo sapien
tatccatccctgaccgaagcattttggcaaagg

SEQ ID NO: 426052 - DNA, 33 bp, Homo sapien
tatccatccctgaccggagcattttggcaaagg

SEQ ID NO: 426053 - DNA, 33 bp, Homo sapien
atagttcattggctaaactgaaccatgagcaac

SEQ ID NO: 426054 - DNA, 33 bp, Homo sapien
atagttcattggctaagctgaaccatgagcaac

SEQ ID NO: 426055 - DNA, 33 bp, Homo sapien
aagaattacttgtcaactgcctactctgcaaca

SEQ ID NO: 426056 - DNA, 33 bp, Homo sapien
aagaattacttgtcaagtgcctactctgcaaca

SEQ ID NO: 426057 - DNA, 33 bp, Homo sapien
acagttgtgagaaaggaatagtgatgaggcgct

SEQ ID NO: 426058 - DNA, 33 bp, Homo sapien
acagttgtgagaaagggatagtgatgaggcgct

SEQ ID NO: 426059 - DNA, 33 bp, Homo sapien
ccttgttatgacgtcgacacttacccatctgac

SEQ ID NO: 426060 - DNA, 33 bp, Homo sapien
ccttgttatgacgtcggcacttacccatctgac

SEQ ID NO: 426061 - DNA, 33 bp, Homo sapien
attttgcacacgattccattataacattctcac

SEQ ID NO: 426062 - DNA, 33 bp, Homo sapien
attttgcacacgattctattataacattctcac

SEQ ID NO: 426063 - DNA, 33 bp, Homo sapien
ttgaatctggccaagacagtgacctggaggaaa

SEQ ID NO: 426064 - DNA, 33 bp, Homo sapien
ttgaatctggccaagatagtgacctggaggaaa

SEQ ID NO: 426065 - DNA, 33 bp, Homo sapien
attccaatgtgacaaacgctgaccttttactat

SEQ ID NO: 426066 - DNA, 33 bp, Homo sapien
attccaatgtgacaaaggctgaccttttactat

SEQ ID NO: 426067 - DNA, 33 bp, Homo sapien
gtactgtttagaccaaagatgtttagcatttgg

SEQ ID NO: 426068 - DNA, 33 bp, Homo sapien
gtactgtttagaccaatgatgtttagcatttgg

SEQ ID NO: 426069 - DNA, 33 bp, Homo sapien
tgctccttatatgaggaacctagagaagtcaaa

SEQ ID NO: 426070 - DNA, 33 bp, Homo sapien
tgctccttatatgaggtacctagagaagtcaaa

SEQ ID NO: 426071 - DNA, 33 bp, Homo sapien
ttgcataaatgtggtacaagggacaaaggaaag

SEQ ID NO: 426072 - DNA, 33 bp, Homo sapien
ttgcataaatgtggtataagggacaaaggaaag

SEQ ID NO: 426073 - DNA, 33 bp, Homo sapien
aaccatgtaggagtcaacacattcatttcatgt

SEQ ID NO: 426074 - DNA, 33 bp, Homo sapien
aaccatgtaggagtcaccacattcatttcatgt

SEQ ID NO: 426075 - DNA, 33 bp, Homo sapien
aggataaagttggatgaatttgggattgagatg

SEQ ID NO: 426076 - DNA, 33 bp, Homo sapien
aggataaagttggatggatttgggattgagatg

SEQ ID NO: 426077 - DNA, 33 bp, Homo sapien
ccaagacattaggggaaaaattctcattgtact

SEQ ID NO: 426078 - DNA, 33 bp, Homo sapien
ccaagacattaggggagaaattctcattgtact

SEQ ID NO: 426079 - DNA, 33 bp, Homo sapien
tgtaactcaaagcagaaagtattggttaacatt

SEQ ID NO: 426080 - DNA, 33 bp, Homo sapien
tgtaactcaaagcagagagtattggttaacatt

SEQ ID NO: 426081 - DNA, 33 bp, Homo sapien
aaggctggggttgcggaactgtgtagtatgaac

SEQ ID NO: 426082 - DNA, 33 bp, Homo sapien
aaggctggggttgcggcactgtgtagtatgaac

SEQ ID NO: 426083 - DNA, 33 bp, Homo sapien
aaaggacttgggtggaaatagtcaaaatccatg

SEQ ID NO: 426084 - DNA, 33 bp, Homo sapien
aaaggacttgggtggagatagtcaaaatccatg

SEQ ID NO: 426085 - DNA, 33 bp, Homo sapien
caaagttgtccctggaggtttgagtcctgtgtt

SEQ ID NO: 426086 - DNA, 33 bp, Homo sapien
caaagttgtccctggatgtttgagtcctgtgtt

SEQ ID NO: 426087 - DNA, 33 bp, Homo sapien
caatacttaaacatgacattatgattcctggaa

SEQ ID NO: 426088 - DNA, 33 bp, Homo sapien
caatacttaaacatgatattatgattcctggaa

SEQ ID NO: 426089 - DNA, 33 bp, Homo sapien
gctcagtacatcataaatatttggcaaatgtta

SEQ ID NO: 426090 - DNA, 33 bp, Homo sapien
gctcagtacatcataactatttggcaaatgtta

SEQ ID NO: 426091 - DNA, 33 bp, Homo sapien
cacagaataaaatacaaagcttctccatcccac

SEQ ID NO: 426092 - DNA, 33 bp, Homo sapien
cacagaataaaatacagagcttctccatcccac

SEQ ID NO: 426093 - DNA, 33 bp, Homo sapien
tgcaaacaaataaaaggcatcattaccattgct

SEQ ID NO: 426094 - DNA, 33 bp, Homo sapien
tgcaaacaaataaaagtcatcattaccattgct

SEQ ID NO: 426095 - DNA, 33 bp, Homo sapien
ggcaggatagtagagacaagttaggaccatcct

SEQ ID NO: 426096 - DNA, 33 bp, Homo sapien
ggcaggatagtagagataagttaggaccatcct

SEQ ID NO: 426097 - DNA, 33 bp, Homo sapien
actcaaaacacaatgaaaggaagatgcataagg

SEQ ID NO: 426098 - DNA, 33 bp, Homo sapien
actcaaaacacaatgacaggaagatgcataagg

SEQ ID NO: 426099 - DNA, 33 bp, Homo sapien
ttcaggacttcgtggcacccctttccttcctac

SEQ ID NO: 426100 - DNA, 33 bp, Homo sapien
ttcaggacttcgtggcgcccctttccttcctac

SEQ ID NO: 426101 - DNA, 33 bp, Homo sapien
aaattaaattgtactacgtgctgtcattcagaa

SEQ ID NO: 426102 - DNA, 33 bp, Homo sapien
aaattaaattgtactatgtgctgtcattcagaa

SEQ ID NO: 426103 - DNA, 33 bp, Homo sapien
cctccctgagtgtcacaggagagctagaaggaa

SEQ ID NO: 426104 - DNA, 33 bp, Homo sapien
cctccctgagtgtcacgggagagctagaaggaa

SEQ ID NO: 426105 - DNA, 33 bp, Homo sapien
ttcatatgtagtgcagcactgttgtcagaaaca

SEQ ID NO: 426106 - DNA, 33 bp, Homo sapien
ttcatatgtagtgcagtactgttgtcagaaaca

SEQ ID NO: 426107 - DNA, 33 bp, Homo sapien
aagtgtagtaagaagacagtacaagattgaata

SEQ ID NO: 426108 - DNA, 33 bp, Homo sapien
aagtgtagtaagaagatagtacaagattgaata

SEQ ID NO: 426109 - DNA, 33 bp, Homo sapien
tagagctagaagttacaaaagctgtgaaagaca

SEQ ID NO: 426110 - DNA, 33 bp, Homo sapien
tagagctagaagttacgaaagctgtgaaagaca

SEQ ID NO: 426111 - DNA, 33 bp, Homo sapien
ctgtgagtgtctgttacggtatatgagtaactc

SEQ ID NO: 426112 - DNA, 33 bp, Homo sapien
ctgtgagtgtctgttatggtatatgagtaactc

SEQ ID NO: 426113 - DNA, 33 bp, Homo sapien
gccagtaagaggagcactgcctatgtgaaggta

SEQ ID NO: 426114 - DNA, 33 bp, Homo sapien
gccagtaagaggagcattgcctatgtgaaggta

SEQ ID NO: 426115 - DNA, 33 bp, Homo sapien
aacaagtgattattaaccttttggcaaacatac

SEQ ID NO: 426116 - DNA, 33 bp, Homo sapien
aacaagtgattattaatcttttggcaaacatac

SEQ ID NO: 426117 - DNA, 33 bp, Homo sapien
gggatgttatgaatatcaaggaacaagtgatta

SEQ ID NO: 426118 - DNA, 33 bp, Homo sapien
gggatgttatgaatattaaggaacaagtgatta

SEQ ID NO: 426119 - DNA, 33 bp, Homo sapien
tgctggaaactgaccacatccaagtccacaaag

SEQ ID NO: 426120 - DNA, 33 bp, Homo sapien
tgctggaaactgaccatatccaagtccacaaag

SEQ ID NO: 426121 - DNA, 33 bp, Homo sapien
ttacatcacagccaacacaaggtactgtcaaat

SEQ ID NO: 426122 - DNA, 33 bp, Homo sapien
ttacatcacagccaacgcaaggtactgtcaaat

SEQ ID NO: 426123 - DNA, 33 bp, Homo sapien
agcatccaaacaaagacgagagaagccagactg

SEQ ID NO: 426124 - DNA, 33 bp, Homo sapien
agcatccaaacaaagatgagagaagccagactg

SEQ ID NO: 426125 - DNA, 33 bp, Homo sapien
aactgcaaatccataacacaggaaagatataag

SEQ ID NO: 426126 - DNA, 33 bp, Homo sapien
aactgcaaatccataatacaggaaagatataag

SEQ ID NO: 426127 - DNA, 33 bp, Homo sapien
atcttgtatagttcaacaatgagcacatggctg

SEQ ID NO: 426128 - DNA, 33 bp, Homo sapien
atcttgtatagttcaagaatgagcacatggctg

SEQ ID NO: 426129 - DNA, 33 bp, Homo sapien
cttcatctgggctctccgaaagcagattcttag

SEQ ID NO: 426130 - DNA, 33 bp, Homo sapien
cttcatctgggctctctgaaagcagattcttag

SEQ ID NO: 426131 - DNA, 33 bp, Homo sapien
agttggaggtatgtacacattttcccagtgaat

SEQ ID NO: 426132 - DNA, 33 bp, Homo sapien
agttggaggtatgtactcattttcccagtgaat

SEQ ID NO: 426133 - DNA, 33 bp, Homo sapien
atagagctgttatgtggagtaaatgaccctctt

SEQ ID NO: 426134 - DNA, 33 bp, Homo sapien
atagagctgttatgtgtagtaaatgaccctctt

SEQ ID NO: 426135 - DNA, 33 bp, Homo sapien
gaaggaaactgtctagaacagccaggtggagat

SEQ ID NO: 426136 - DNA, 33 bp, Homo sapien
gaaggaaactgtctaggacagccaggtggagat

SEQ ID NO: 426137 - DNA, 33 bp, Homo sapien
ggaagacaggtaatgcaaaagaactagagttcc

SEQ ID NO: 426138 - DNA, 33 bp, Homo sapien
ggaagacaggtaatgcgaaagaactagagttcc

SEQ ID NO: 426139 - DNA, 33 bp, Homo sapien
caactcagtaggaaacagaccttgaacaagagt

SEQ ID NO: 426140 - DNA, 33 bp, Homo sapien
caactcagtaggaaacggaccttgaacaagagt

SEQ ID NO: 426141 - DNA, 33 bp, Homo sapien
ctcattttagcctcacaatatcccagagaggtg

SEQ ID NO: 426142 - DNA, 33 bp, Homo sapien
ctcattttagcctcacgatatcccagagaggtg

SEQ ID NO: 426143 - DNA, 33 bp, Homo sapien
catatccaacttaccagaagaccctggagacat

SEQ ID NO: 426144 - DNA, 33 bp, Homo sapien
catatccaacttaccataagaccctggagacat

SEQ ID NO: 426145 - DNA, 33 bp, Homo sapien
aaaaggcacagctaacgagaagagggggcccag

SEQ ID NO: 426146 - DNA, 33 bp, Homo sapien
aaaaggcacagctaactagaagagggggcccag

SEQ ID NO: 426147 - DNA, 33 bp, Homo sapien
aaggaaaagaactcagaattgcaaactgctagt

SEQ ID NO: 426148 - DNA, 33 bp, Homo sapien
aaggaaaagaactcaggattgcaaactgctagt

SEQ ID NO: 426149 - DNA, 33 bp, Homo sapien
gaaaagagttacgcataacacagaaataactgg

SEQ ID NO: 426150 - DNA, 33 bp, Homo sapien
gaaaagagttacgcatgacacagaaataactgg

SEQ ID NO: 426151 - DNA, 33 bp, Homo sapien
taaaaaatttctcaacaagttgaccgatattct

SEQ ID NO: 426152 - DNA, 33 bp, Homo sapien
taaaaaatttctcaaccagttgaccgatattct

SEQ ID NO: 426153 - DNA, 33 bp, Homo sapien
tacactcagagtctgaaggatattctggcctcc

SEQ ID NO: 426154 - DNA, 33 bp, Homo sapien
tacactcagagtctgatggatattctggcctcc

SEQ ID NO: 426155 - DNA, 33 bp, Homo sapien
cttggtttacctagcagcttctaccacctgggt

SEQ ID NO: 426156 - DNA, 33 bp, Homo sapien
cttggtttacctagcatcttctaccacctgggt

SEQ ID NO: 426157 - DNA, 33 bp, Homo sapien
aatggagaaggtgggagaccattcttggatata

SEQ ID NO: 426158 - DNA, 33 bp, Homo sapien
aatggagaaggtgggataccattcttggatata

SEQ ID NO: 426159 - DNA, 33 bp, Homo sapien
aacctcagaggagtcaataggaacccttagaat

SEQ ID NO: 426160 - DNA, 33 bp, Homo sapien
aacctcagaggagtcagtaggaacccttagaat

SEQ ID NO: 426161 - DNA, 33 bp, Homo sapien
ggaaggttagggcacactagtaagctctccacc

SEQ ID NO: 426162 - DNA, 33 bp, Homo sapien
ggaaggttagggcacattagtaagctctccacc

SEQ ID NO: 426163 - DNA, 33 bp, Homo sapien
cgattcaattatatgaactcagctattaaactg

SEQ ID NO: 426164 - DNA, 33 bp, Homo sapien
cgattcaattatatgacctcagctattaaactg

SEQ ID NO: 426165 - DNA, 33 bp, Homo sapien
gagaccatgtcccccccaaaaaaagccattcgg

SEQ ID NO: 426166 - DNA, 33 bp, Homo sapien
gagaccatgtccccccgaaaaaaagccattcgg

SEQ ID NO: 426167 - DNA, 33 bp, Homo sapien
tttaaaacaactgtgaacacaaactttaatctt

SEQ ID NO: 426168 - DNA, 33 bp, Homo sapien
tttaaaacaactgtgagcacaaactttaatctt

SEQ ID NO: 426169 - DNA, 33 bp, Homo sapien
taaatgttagctgctacgatcacccttgtcacg

SEQ ID NO: 426170 - DNA, 33 bp, Homo sapien
taaatgttagctgctatgatcacccttgtcacg

SEQ ID NO: 426171 - DNA, 33 bp, Homo sapien
tttatgtcagcaaaacgacatttagagtgacaa

SEQ ID NO: 426172 - DNA, 33 bp, Homo sapien
tttatgtcagcaaaactacatttagagtgacaa

SEQ ID NO: 426173 - DNA, 33 bp, Homo sapien
aatcgctaaacctcaaaggcacatccagagact

SEQ ID NO: 426174 - DNA, 33 bp, Homo sapien
aatcgctaaacctcaagggcacatccagagact

SEQ ID NO: 426175 - DNA, 33 bp, Homo sapien
tgcaacatcaaatgtaaccttgaaatgaaagac

SEQ ID NO: 426176 - DNA, 33 bp, Homo sapien
tgcaacatcaaatgtacccttgaaatgaaagac

SEQ ID NO: 426177 - DNA, 33 bp, Homo sapien
gcttatgatagggagaatacaaggtatcgtggc

SEQ ID NO: 426178 - DNA, 33 bp, Homo sapien
gcttatgatagggagagtacaaggtatcgtggc

SEQ ID NO: 426179 - DNA, 33 bp, Homo sapien
caccacgaagtagtgcaaccaagaaaacagctg

SEQ ID NO: 426180 - DNA, 33 bp, Homo sapien
caccacgaagtagtgcgaccaagaaaacagctg

SEQ ID NO: 426181 - DNA, 33 bp, Homo sapien
tttctccatttggacaaaaaaatctctgaactt

SEQ ID NO: 426182 - DNA, 33 bp, Homo sapien
tttctccatttggacagaaaaatctctgaactt

SEQ ID NO: 426183 - DNA, 33 bp, Homo sapien
tttggcagcttattgcaaattcatgtaacaatc

SEQ ID NO: 426184 - DNA, 33 bp, Homo sapien
tttggcagcttattgcgaattcatgtaacaatc

SEQ ID NO: 426185 - DNA, 33 bp, Homo sapien
gacaatgtaaacagcaaatactgttcctaggac

SEQ ID NO: 426186 - DNA, 33 bp, Homo sapien
gacaatgtaaacagcagatactgttcctaggac

SEQ ID NO: 426187 - DNA, 33 bp, Homo sapien
tactccagcaattcccagcagtcttttttaaac

SEQ ID NO: 426188 - DNA, 33 bp, Homo sapien
tactccagcaattcccggcagtcttttttaaac

SEQ ID NO: 426189 - DNA, 33 bp, Homo sapien
ttctgcttttgccactgaggtgttaatagtgtt

SEQ ID NO: 426190 - DNA, 33 bp, Homo sapien
ttctgcttttgccacttaggtgttaatagtgtt

SEQ ID NO: 426191 - DNA, 33 bp, Homo sapien
ccttaaacagtaactaagaaagtgcctatcctg

SEQ ID NO: 426192 - DNA, 33 bp, Homo sapien
ccttaaacagtaactaggaaagtgcctatcctg

SEQ ID NO: 426193 - DNA, 33 bp, Homo sapien
tcttcgaccctctaccactatataagaatccaa

SEQ ID NO: 426194 - DNA, 33 bp, Homo sapien
tcttcgaccctctaccgctatataagaatccaa

SEQ ID NO: 426195 - DNA, 33 bp, Homo sapien
cctggtccactgctgaccttaaattggtcttaa

SEQ ID NO: 426196 - DNA, 33 bp, Homo sapien
cctggtccactgctgatcttaaattggtcttaa

SEQ ID NO: 426197 - DNA, 33 bp, Homo sapien
ttctcttgaactccataagctgtagtaatcaac

SEQ ID NO: 426198 - DNA, 33 bp, Homo sapien
ttctcttgaactccatgagctgtagtaatcaac

SEQ ID NO: 426199 - DNA, 33 bp, Homo sapien
atctatctatctcaagaatctttcaggtctgtg

SEQ ID NO: 426200 - DNA, 33 bp, Homo sapien
atctatctatctcaagcatctttcaggtctgtg

SEQ ID NO: 426201 - DNA, 33 bp, Homo sapien
ggggtcacctattacaaccgaggaggccaagtt

SEQ ID NO: 426202 - DNA, 33 bp, Homo sapien
ggggtcacctattacacccgaggaggccaagtt

SEQ ID NO: 426203 - DNA, 33 bp, Homo sapien
taatctattcaagatacgtggaagaaaggacaa

SEQ ID NO: 426204 - DNA, 33 bp, Homo sapien
taatctattcaagatatgtggaagaaaggacaa

SEQ ID NO: 426205 - DNA, 33 bp, Homo sapien
aaagcatttgaagaagaagatggattctaccaa

SEQ ID NO: 426206 - DNA, 33 bp, Homo sapien
aaagcatttgaagaaggagatggattctaccaa

SEQ ID NO: 426207 - DNA, 33 bp, Homo sapien
agttttctaccaatgcacaggaattttgtgttt

SEQ ID NO: 426208 - DNA, 33 bp, Homo sapien
agttttctaccaatgcgcaggaattttgtgttt

SEQ ID NO: 426209 - DNA, 33 bp, Homo sapien
gtttgatatgtcttcaataaagggatgcctgcc

SEQ ID NO: 426210 - DNA, 33 bp, Homo sapien
gtttgatatgtcttcattaaagggatgcctgcc

SEQ ID NO: 426211 - DNA, 33 bp, Homo sapien
ctgcagacaagggtggcacactgtaaacaggcc

SEQ ID NO: 426212 - DNA, 33 bp, Homo sapien
ctgcagacaagggtggtacactgtaaacaggcc

SEQ ID NO: 426213 - DNA, 33 bp, Homo sapien
ttagcagaagcatttacgtgctaataagttctg

SEQ ID NO: 426214 - DNA, 33 bp, Homo sapien
ttagcagaagcatttatgtgctaataagttctg

SEQ ID NO: 426215 - DNA, 33 bp, Homo sapien
atctatacctaatccaactaaatatacttttgg

SEQ ID NO: 426216 - DNA, 33 bp, Homo sapien
atctatacctaatccagctaaatatacttttgg

SEQ ID NO: 426217 - DNA, 33 bp, Homo sapien
gatgagactaaggagacgcaaaaactaaatgca

SEQ ID NO: 426218 - DNA, 33 bp, Homo sapien
gatgagactaaggagatgcaaaaactaaatgca

SEQ ID NO: 426219 - DNA, 33 bp, Homo sapien
tgaagaaaggtattaaaaacaaagagttgcgct

SEQ ID NO: 426220 - DNA, 33 bp, Homo sapien
tgaagaaaggtattaacaacaaagagttgcgct

SEQ ID NO: 426221 - DNA, 33 bp, Homo sapien
aacaactcaagaaaacccagaacaccaaaaatg

SEQ ID NO: 426222 - DNA, 33 bp, Homo sapien
aacaactcaagaaaacgcagaacaccaaaaatg

SEQ ID NO: 426223 - DNA, 33 bp, Homo sapien
taaccatctacaaaaaacacagagtcctagaac

SEQ ID NO: 426224 - DNA, 33 bp, Homo sapien
taaccatctacaaaaaccacagagtcctagaac

SEQ ID NO: 426225 - DNA, 33 bp, Homo sapien
tttatctagtttccaaaaaagtaagacatttct

SEQ ID NO: 426226 - DNA, 33 bp, Homo sapien
tttatctagtttccaagaaagtaagacatttct

SEQ ID NO: 426227 - DNA, 33 bp, Homo sapien
gtatgtgttcatattaacagtaaggcttctggt

SEQ ID NO: 426228 - DNA, 33 bp, Homo sapien
gtatgtgttcatattatcagtaaggcttctggt

SEQ ID NO: 426229 - DNA, 33 bp, Homo sapien
aaatagaaaatccagaaatcctgcagtctaatt

SEQ ID NO: 426230 - DNA, 33 bp, Homo sapien
aaatagaaaatccagatatcctgcagtctaatt

SEQ ID NO: 426231 - DNA, 33 bp, Homo sapien
tggattaggaaggtcacgttaatgtaatcagta

SEQ ID NO: 426232 - DNA, 33 bp, Homo sapien
tggattaggaaggtcatgttaatgtaatcagta

SEQ ID NO: 426233 - DNA, 33 bp, Homo sapien
aatgaccttactattcaaagaaactcttgcctg

SEQ ID NO: 426234 - DNA, 33 bp, Homo sapien
aatgaccttactattccaagaaactcttgcctg

SEQ ID NO: 426235 - DNA, 33 bp, Homo sapien
cttgacaatattggagacccatcaaaatccaat

SEQ ID NO: 426236 - DNA, 33 bp, Homo sapien
cttgacaatattggaggcccatcaaaatccaat

SEQ ID NO: 426237 - DNA, 33 bp, Homo sapien
gctgataattcacaaaagatctattcatgttca

SEQ ID NO: 426238 - DNA, 33 bp, Homo sapien
gctgataattcacaaaggatctattcatgttca

SEQ ID NO: 426239 - DNA, 33 bp, Homo sapien
gaaatgaattcttccaataaatggtgtgagcta

SEQ ID NO: 426240 - DNA, 33 bp, Homo sapien
gaaatgaattcttccagtaaatggtgtgagcta

SEQ ID NO: 426241 - DNA, 33 bp, Homo sapien
agaacagaaaacctgacaattgtggtggttgaa

SEQ ID NO: 426242 - DNA, 33 bp, Homo sapien
agaacagaaaacctgataattgtggtggttgaa

SEQ ID NO: 426243 - DNA, 33 bp, Homo sapien
acagcaagcaaattcacataagcaagtgaatta

SEQ ID NO: 426244 - DNA, 33 bp, Homo sapien
acagcaagcaaattcatataagcaagtgaatta

SEQ ID NO: 426245 - DNA, 33 bp, Homo sapien
ctaatgtaaacatgtcacttgctctctcaatat

SEQ ID NO: 426246 - DNA, 33 bp, Homo sapien
ctaatgtaaacatgtctcttgctctctcaatat

SEQ ID NO: 426247 - DNA, 33 bp, Homo sapien
atggcacctgtaataaatcataggccaatggtg

SEQ ID NO: 426248 - DNA, 33 bp, Homo sapien
atggcacctgtaataagtcataggccaatggtg

SEQ ID NO: 426249 - DNA, 33 bp, Homo sapien
agagaaggaagaataacggtgacctccaataaa

SEQ ID NO: 426250 - DNA, 33 bp, Homo sapien
agagaaggaagaataatggtgacctccaataaa

SEQ ID NO: 426251 - DNA, 33 bp, Homo sapien
aagtacaagagtgtgaaatagacatgagaaagt

SEQ ID NO: 426252 - DNA, 33 bp, Homo sapien
aagtacaagagtgtgacatagacatgagaaagt

SEQ ID NO: 426253 - DNA, 33 bp, Homo sapien
cctatcctgggcagaactgttcattgtttacaa

SEQ ID NO: 426254 - DNA, 33 bp, Homo sapien
cctatcctgggcagaagtgttcattgtttacaa

SEQ ID NO: 426255 - DNA, 33 bp, Homo sapien
tgtaacactagcagaacgccggaagtctttaag

SEQ ID NO: 426256 - DNA, 33 bp, Homo sapien
tgtaacactagcagaatgccggaagtctttaag

SEQ ID NO: 426257 - DNA, 33 bp, Homo sapien
tggctcccagcaaagacgactccaggctttctt

SEQ ID NO: 426258 - DNA, 33 bp, Homo sapien
tggctcccagcaaagatgactccaggctttctt

SEQ ID NO: 426259 - DNA, 33 bp, Homo sapien
gagctgagtgaacaaacgtgaattaagggcatg

SEQ ID NO: 426260 - DNA, 33 bp, Homo sapien
gagctgagtgaacaaatgtgaattaagggcatg

SEQ ID NO: 426261 - DNA, 33 bp, Homo sapien; identical to SEQ ID NO: 426259

SEQ ID NO: 426262 - DNA, 33 bp, Homo sapien; identical to SEQ ID NO: 426260

SEQ ID NO: 426263 - DNA, 33 bp, Homo sapien
caagttggcagataaagtcgcttcattcaaagc

SEQ ID NO: 426264 - DNA, 33 bp, Homo sapien
caagttggcagataaattcgcttcattcaaagc

SEQ ID NO: 426265 - DNA, 33 bp, Homo sapien
ctttaatccaacagacaataaatatggagcttt

SEQ ID NO: 426266 - DNA, 33 bp, Homo sapien
ctttaatccaacagacgataaatatggagcttt

SEQ ID NO: 426267 - DNA, 33 bp, Homo sapien
actgccgtaatatgaccggctcttatcattttc

SEQ ID NO: 426268 - DNA, 33 bp, Homo sapien
actgccgtaatatgactggctcttatcattttc

SEQ ID NO: 426269 - DNA, 33 bp, Homo sapien
ctcgttccttctggacgctctatttccatcaca

SEQ ID NO: 426270 - DNA, 33 bp, Homo sapien
ctcgttccttctggactctctatttccatcaca

SEQ ID NO: 426271 - DNA, 33 bp, Homo sapien
gccttactagttgtctaaatttgagtaagacat

SEQ ID NO: 426272 - DNA, 33 bp, Homo sapien
gccttactagttgtctgaatttgagtaagacat

SEQ ID NO: 426273 - DNA, 33 bp, Homo sapien
gcatttactaaattcaagagatccctccaggga

SEQ ID NO: 426274 - DNA, 33 bp, Homo sapien
gcatttactaaattcaggagatccctccaggga

SEQ ID NO: 426275 - DNA, 33 bp, Homo sapien
gaactttctcaacacaataagagtttttttgca

SEQ ID NO: 426276 - DNA, 33 bp, Homo sapien
gaactttctcaacacactaagagtttttttgca

SEQ ID NO: 426277 - DNA, 33 bp, Homo sapien
gggttgttgagattgacgtgattattcctggaa

SEQ ID NO: 426278 - DNA, 33 bp, Homo sapien
gggttgttgagattgatgtgattattcctggaa

SEQ ID NO: 426279 - DNA, 33 bp, Homo sapien
gggttcaaatttggacaagctcaattactgcaa

SEQ ID NO: 426280 - DNA, 33 bp, Homo sapien
gggttcaaatttggacgagctcaattactgcaa

SEQ ID NO: 426281 - DNA, 33 bp, Homo sapien
tctgtgccttgggaaaactcaaacagccttaca

SEQ ID NO: 426282 - DNA, 33 bp, Homo sapien
tctgtgccttgggaaatctcaaacagccttaca

SEQ ID NO: 426283 - DNA, 33 bp, Homo sapien
ggcacaggttagataactcagaccacaaattcc

SEQ ID NO: 426284 - DNA, 33 bp, Homo sapien
ggcacaggttagataattcagaccacaaattcc

SEQ ID NO: 426285 - DNA, 33 bp, Homo sapien
tcacaagtcaacagcacatgaatgaaaaccaca

SEQ ID NO: 426286 - DNA, 33 bp, Homo sapien
tcacaagtcaacagcatatgaatgaaaaccaca

SEQ ID NO: 426287 - DNA, 33 bp, Homo sapien
cagatttgaagggcaacaattagggttaaatcc

SEQ ID NO: 426288 - DNA, 33 bp, Homo sapien
cagatttgaagggcaagaattagggttaaatcc

SEQ ID NO: 426289 - DNA, 33 bp, Homo sapien
agggagccacaataaaaaatcggccaatccctt

SEQ ID NO: 426290 - DNA, 33 bp, Homo sapien
agggagccacaataaagaatcggccaatccctt

SEQ ID NO: 426291 - DNA, 33 bp, Homo sapien
aattgttaaaaattccaaacgaatcattaaatc

SEQ ID NO: 426292 - DNA, 33 bp, Homo sapien
aattgttaaaaattccgaacgaatcattaaatc

SEQ ID NO: 426293 - DNA, 33 bp, Homo sapien
ggattgtgttaacttaagctttgaaaggtgtgc

SEQ ID NO: 426294 - DNA, 33 bp, Homo sapien
ggattgtgttaacttaggctttgaaaggtgtgc

SEQ ID NO: 426295 - DNA, 33 bp, Homo sapien
tacttagaaaatgctacgattgatcaaaactta

SEQ ID NO: 426296 - DNA, 33 bp, Homo sapien
tacttagaaaatgctatgattgatcaaaactta

SEQ ID NO: 426297 - DNA, 33 bp, Homo sapien
acagaaatcaagcaaaaacagaccatctaaggg

SEQ ID NO: 426298 - DNA, 33 bp, Homo sapien
acagaaatcaagcaaagacagaccatctaaggg

SEQ ID NO: 426299 - DNA, 33 bp, Homo sapien
gtatatatccttaatgccatctaaatgggatac

SEQ ID NO: 426300 - DNA, 33 bp, Homo sapien
gtatatatccttaatgtcatctaaatgggatac

SEQ ID NO: 426301 - DNA, 33 bp, Homo sapien
tatgacagccatgcaaatataagtggttgtccc

SEQ ID NO: 426302 - DNA, 33 bp, Homo sapien
tatgacagccatgcaactataagtggttgtccc

SEQ ID NO: 426303 - DNA, 33 bp, Homo sapien
acagacataggtatctcaccaaccaatacacag

SEQ ID NO: 426304 - DNA, 33 bp, Homo sapien
acagacataggtatcttaccaaccaatacacag

SEQ ID NO: 426305 - DNA, 33 bp, Homo sapien
tttttctaaccctggcacttaaaaggatctcag

SEQ ID NO: 426306 - DNA, 33 bp, Homo sapien
tttttctaaccctggcgcttaaaaggatctcag

SEQ ID NO: 426307 - DNA, 33 bp, Homo sapien
catatccaagccatcacgcagtccaattttact

SEQ ID NO: 426308 - DNA, 33 bp, Homo sapien
catatccaagccatcatgcagtccaattttact

SEQ ID NO: 426309 - DNA, 33 bp, Homo sapien
agtcttataaaatggggaagtgaatgatagttg

SEQ ID NO: 426310 - DNA, 33 bp, Homo sapien
agtcttataaaatgggtaagtgaatgatagttg

SEQ ID NO: 426311 - DNA, 33 bp, Homo sapien
tatgttttgtttttaaagcactgtacatcactt

SEQ ID NO: 426312 - DNA, 33 bp, Homo sapien
tatgttttgtttttaaggcactgtacatcactt

SEQ ID NO: 426313 - DNA, 33 bp, Homo sapien
ataattatggttatcactaacttaaatatatcc

SEQ ID NO: 426314 - DNA, 33 bp, Homo sapien
ataattatggttatcagtaacttaaatatatcc

SEQ ID NO: 426315 - DNA, 33 bp, Homo sapien
gttatgtgccatgatacaagtattacttttagt

SEQ ID NO: 426316 - DNA, 33 bp, Homo sapien
gttatgtgccatgatataagtattacttttagt

SEQ ID NO: 426317 - DNA, 33 bp, Homo sapien
cctttgaacatgagacagatctcagatggtcac

SEQ ID NO: 426318 - DNA, 33 bp, Homo sapien
cctttgaacatgagaccgatctcagatggtcac

SEQ ID NO: 426319 - DNA, 33 bp, Homo sapien
acaggacagtggctaaagaagaacatgggtcaa

SEQ ID NO: 426320 - DNA, 33 bp, Homo sapien
acaggacagtggctaaggaagaacatgggtcaa

SEQ ID NO: 426321 - DNA, 33 bp, Homo sapien
gactgaacgaagggacacatgtagaaatgataa

SEQ ID NO: 426322 - DNA, 33 bp, Homo sapien
gactgaacgaagggacccatgtagaaatgataa

SEQ ID NO: 426323 - DNA, 33 bp, Homo sapien
ggcagaagcctcctacaggatcttgaacattca

SEQ ID NO: 426324 - DNA, 33 bp, Homo sapien
ggcagaagcctcctacgggatcttgaacattca

SEQ ID NO: 426325 - DNA, 33 bp, Homo sapien
aaatttagttaaatgaagagaatagcccttaaa

SEQ ID NO: 426326 - DNA, 33 bp, Homo sapien
aaatttagttaaatgatgagaatagcccttaaa

SEQ ID NO: 426327 - DNA, 33 bp, Homo sapien
ttgaccaaaggctaccaatgtcttggcctaata

SEQ ID NO: 426328 - DNA, 33 bp, Homo sapien
ttgaccaaaggctacccatgtcttggcctaata

SEQ ID NO: 426329 - DNA, 33 bp, Homo sapien
gcctaatacaaggaacggtcaccagccaccctt

SEQ ID NO: 426330 - DNA, 33 bp, Homo sapien
gcctaatacaaggaactgtcaccagccaccctt

SEQ ID NO: 426331 - DNA, 33 bp, Homo sapien
gataagacccatgatcaagataaacctgccgtg

SEQ ID NO: 426332 - DNA, 33 bp, Homo sapien
gataagacccatgatcgagataaacctgccgtg

SEQ ID NO: 426333 - DNA, 33 bp, Homo sapien
caccaaaaccagaatgaacaggtgctttctgga

SEQ ID NO: 426334 - DNA, 33 bp, Homo sapien
caccaaaaccagaatggacaggtgctttctgga

SEQ ID NO: 426335 - DNA, 33 bp, Homo sapien
tagctgtaggacatgcaactgtatttagaaagg

SEQ ID NO: 426336 - DNA, 33 bp, Homo sapien
tagctgtaggacatgcgactgtatttagaaagg

SEQ ID NO: 426337 - DNA, 33 bp, Homo sapien
ctccacctctttcgtaatacaggaagagcaaat

SEQ ID NO: 426338 - DNA, 33 bp, Homo sapien
ctccacctctttcgtagtacaggaagagcaaat

SEQ ID NO: 426339 - DNA, 33 bp, Homo sapien
aagcaaattcatcttggaataggaaaaaaatcc

SEQ ID NO: 426340 - DNA, 33 bp, Homo sapien
aagcaaattcatcttgtaataggaaaaaaatcc

SEQ ID NO: 426341 - DNA, 33 bp, Homo sapien
ggtgctatggaattccactaatggcaagaaatg

SEQ ID NO: 426342 - DNA, 33 bp, Homo sapien
ggtgctatggaattcctctaatggcaagaaatg

SEQ ID NO: 426343 - DNA, 33 bp, Homo sapien
tgagttagtgaagaaacgacactgataacatag

SEQ ID NO: 426344 - DNA, 33 bp, Homo sapien
tgagttagtgaagaaaggacactgataacatag

SEQ ID NO: 426345 - DNA, 33 bp, Homo sapien
aagcgtgtgcatgaaccgaagggcgcgagcgcc

SEQ ID NO: 426346 - DNA, 33 bp, Homo sapien
aagcgtgtgcatgaactgaagggcgcgagcgcc

SEQ ID NO: 426347 - DNA, 33 bp, Homo sapien
gtgtgtccctccagcaaggttcggttctccctc

SEQ ID NO: 426348 - DNA, 33 bp, Homo sapien
gtgtgtccctccagcagggttcggttctccctc

SEQ ID NO: 426349 - DNA, 33 bp, Homo sapien
tgttgggctctgggaaagtgcatgtaggaagcc

SEQ ID NO: 426350 - DNA, 33 bp, Homo sapien
tgttgggctctgggaaggtgcatgtaggaagcc

SEQ ID NO: 426351 - DNA, 33 bp, Homo sapien
agtagatttatgtaaacttaccaccaccctacc

SEQ ID NO: 426352 - DNA, 33 bp, Homo sapien
agtagatttatgtaaagttaccaccaccctacc

SEQ ID NO: 426353 - DNA, 33 bp, Homo sapien
acacatcctaggaggcacctggaggttacccac

SEQ ID NO: 426354 - DNA, 33 bp, Homo sapien
acacatcctaggaggcgcctggaggttacccac

SEQ ID NO: 426355 - DNA, 33 bp, Homo sapien
aaggtcccaatgccagactcacggaattcagac

SEQ ID NO: 426356 - DNA, 33 bp, Homo sapien
aaggtcccaatgccagcctcacggaattcagac

SEQ ID NO: 426357 - DNA, 33 bp, Homo sapien
gcgagatgagctctgagaagttggtggtgactg

SEQ ID NO: 426358 - DNA, 33 bp, Homo sapien
gcgagatgagctctgataagttggtggtgactg

SEQ ID NO: 426359 - DNA, 33 bp, Homo sapien
ttttgaacttcatatcaaaatgaactcttttag

SEQ ID NO: 426360 - DNA, 33 bp, Homo sapien
ttttgaacttcatatccaaatgaactcttttag

SEQ ID NO: 426361 - DNA, 33 bp, Homo sapien
gtacacaagcgcgaggcactgagcacagctgct

SEQ ID NO: 426362 - DNA, 33 bp, Homo sapien
gtacacaagcgcgaggtactgagcacagctgct

SEQ ID NO: 426363 - DNA, 33 bp, Homo sapien
ttcttttttactgtcagaaatatggggtccttg

SEQ ID NO: 426364 - DNA, 33 bp, Homo sapien
ttcttttttactgtcataaatatggggtccttg

SEQ ID NO: 426365 - DNA, 33 bp, Homo sapien
catttctgcaaagccagtaggaagctgttttaa

SEQ ID NO: 426366 - DNA, 33 bp, Homo sapien
catttctgcaaagccattaggaagctgttttaa

SEQ ID NO: 426367 - DNA, 33 bp, Homo sapien
aagctccaaagccttccgaaagctacaacccat

SEQ ID NO: 426368 - DNA, 33 bp, Homo sapien
aagctccaaagccttctgaaagctacaacccat

SEQ ID NO: 426369 - DNA, 33 bp, Homo sapien
cctaggcattacagtaagttccaggcccttctt

SEQ ID NO: 426370 - DNA, 33 bp, Homo sapien
cctaggcattacagtaggttccaggcccttctt

SEQ ID NO: 426371 - DNA, 33 bp, Homo sapien
cagcagctcagttccacgggcttcctacttttc

SEQ ID NO: 426372 - DNA, 33 bp, Homo sapien
cagcagctcagttccatgggcttcctacttttc

SEQ ID NO: 426373 - DNA, 33 bp, Homo sapien
ctgatttgtattcatacggacacaatagcatgc

SEQ ID NO: 426374 - DNA, 33 bp, Homo sapien
ctgatttgtattcatatggacacaatagcatgc

SEQ ID NO: 426375 - DNA, 33 bp, Homo sapien
ccaaatttgatctgcaagtttgaaaaaggaacc

SEQ ID NO: 426376 - DNA, 33 bp, Homo sapien
ccaaatttgatctgcaggtttgaaaaaggaacc

SEQ ID NO: 426377 - DNA, 33 bp, Homo sapien
tccacttcactggcacacggagatgtctaataa

SEQ ID NO: 426378 - DNA, 33 bp, Homo sapien
tccacttcactggcacgcggagatgtctaataa

SEQ ID NO: 426379 - DNA, 33 bp, Homo sapien
tgtactacatcttataccactgagcatttttat

SEQ ID NO: 426380 - DNA, 33 bp, Homo sapien
tgtactacatcttatatcactgagcatttttat

SEQ ID NO: 426381 - DNA, 33 bp, Homo sapien
aggaatttgtctactcccactctagcccttcca

SEQ ID NO: 426382 - DNA, 33 bp, Homo sapien
aggaatttgtctactcgcactctagcccttcca

SEQ ID NO: 426383 - DNA, 33 bp, Homo sapien
gcaatcattcccacagccatagaagccactgta

SEQ ID NO: 426384 - DNA, 33 bp, Homo sapien
gcaatcattcccacagtcatagaagccactgta

SEQ ID NO: 426385 - DNA, 33 bp, Homo sapien
tccactgatcaaaaccactgggcagaatgtaga

SEQ ID NO: 426386 - DNA, 33 bp, Homo sapien
tccactgatcaaaacctctgggcagaatgtaga

SEQ ID NO: 426387 - DNA, 33 bp, Homo sapien
aatgaacggctgattgaaatcactttccaggat

SEQ ID NO: 426388 - DNA, 33 bp, Homo sapien
aatgaacggctgattgtaatcactttccaggat

SEQ ID NO: 426389 - DNA, 33 bp, Homo sapien
ggaagagtcacaaatcacctcagagatgtgagg

SEQ ID NO: 426390 - DNA, 33 bp, Homo sapien
ggaagagtcacaaatcgcctcagagatgtgagg

SEQ ID NO: 426391 - DNA, 33 bp, Homo sapien
cctgtagtgttgaatacccacgtcattgatgga

SEQ ID NO: 426392 - DNA, 33 bp, Homo sapien
cctgtagtgttgaatatccacgtcattgatgga

SEQ ID NO: 426393 - DNA, 33 bp, Homo sapien
gaaggtcagctctccactcccccgggacccctg

SEQ ID NO: 426394 - DNA, 33 bp, Homo sapien
gaaggtcagctctccattcccccgggacccctg

SEQ ID NO: 426395 - DNA, 33 bp, Homo sapien
tctccaagctgggagcaaggcagcagacagaca

SEQ ID NO: 426396 - DNA, 33 bp, Homo sapien
tctccaagctgggagcgaggcagcagacagaca

SEQ ID NO: 426397 - DNA, 33 bp, Homo sapien
tgaacctcatcgtcacgcattaccatctcagaa

SEQ ID NO: 426398 - DNA, 33 bp, Homo sapien
tgaacctcatcgtcactcattaccatctcagaa

SEQ ID NO: 426399 - DNA, 33 bp, Homo sapien
ttacaagaatacaaagcatagggaaagagattt

SEQ ID NO: 426400 - DNA, 33 bp, Homo sapien
ttacaagaatacaaaggatagggaaagagattt

SEQ ID NO: 426401 - DNA, 33 bp, Homo sapien
catgcgcatcagctcaaaagttgtcattcaata

SEQ ID NO: 426402 - DNA, 33 bp, Homo sapien
catgcgcatcagctcagaagttgtcattcaata

SEQ ID NO: 426403 - DNA, 33 bp, Homo sapien
aggaatctcaagtacacggcttgctgagcattt

SEQ ID NO: 426404 - DNA, 33 bp, Homo sapien
aggaatctcaagtacatggcttgctgagcattt

SEQ ID NO: 426405 - DNA, 33 bp, Homo sapien
gaatgcaaggcctgaaactaccagaacacccct

SEQ ID NO: 426406 - DNA, 33 bp, Homo sapien
gaatgcaaggcctgaagctaccagaacacccct

SEQ ID NO: 426407 - DNA, 33 bp, Homo sapien
agtccaaatggaattaagagccattattttcaa

SEQ ID NO: 426408 - DNA, 33 bp, Homo sapien
agtccaaatggaattaggagccattattttcaa

SEQ ID NO: 426409 - DNA, 33 bp, Homo sapien
tggaagtactgtaaaaatcaccaactcttttgc

SEQ ID NO: 426410 - DNA, 33 bp, Homo sapien
tggaagtactgtaaaagtcaccaactcttttgc

SEQ ID NO: 426411 - DNA, 33 bp, Homo sapien
agataggaagttgaaactcagaaaaattcctag

SEQ ID NO: 426412 - DNA, 33 bp, Homo sapien
agataggaagttgaaagtcagaaaaattcctag

SEQ ID NO: 426413 - DNA, 33 bp, Homo sapien
ttaaataatatgtagacagccctagattaatga

SEQ ID NO: 426414 - DNA, 33 bp, Homo sapien
ttaaataatatgtagagagccctagattaatga

SEQ ID NO: 426415 - DNA, 33 bp, Homo sapien
tcaaaggcactttttccccacgctaagtattct

SEQ ID NO: 426416 - DNA, 33 bp, Homo sapien
tcaaaggcactttttctccacgctaagtattct

SEQ ID NO: 426417 - DNA, 33 bp, Homo sapien
aggagaatcgggcttacgtgaagactaaaaaat

SEQ ID NO: 426418 - DNA, 33 bp, Homo sapien
aggagaatcgggcttatgtgaagactaaaaaat

SEQ ID NO: 426419 - DNA, 33 bp, Homo sapien
tcttagatccttgctcaccatcattaactcaga

SEQ ID NO: 426420 - DNA, 33 bp, Homo sapien
tcttagatccttgctcgccatcattaactcaga

SEQ ID NO: 426421 - DNA, 33 bp, Homo sapien
ctgaccacttttttaccacacacagatcacatt

SEQ ID NO: 426422 - DNA, 33 bp, Homo sapien
ctgaccacttttttactacacacagatcacatt

SEQ ID NO: 426423 - DNA, 33 bp, Homo sapien
tcaggaaaatcactaaataagcaaaacaacaat

SEQ ID NO: 426424 - DNA, 33 bp, Homo sapien
tcaggaaaatcactaagtaagcaaaacaacaat

SEQ ID NO: 426425 - DNA, 33 bp, Homo sapien
tcccattggctttctcacaaacctcctgtctag

SEQ ID NO: 426426 - DNA, 33 bp, Homo sapien
tcccattggctttctcgcaaacctcctgtctag

SEQ ID NO: 426427 - DNA, 33 bp, Homo sapien
actcccctattcaagcacaagttctgagtcaac

SEQ ID NO: 426428 - DNA, 33 bp, Homo sapien
actcccctattcaagcgcaagttctgagtcaac

SEQ ID NO: 426429 - DNA, 33 bp, Homo sapien
gtcatctctgcattcacagttactcagtaaagc

SEQ ID NO: 426430 - DNA, 33 bp, Homo sapien
gtcatctctgcattcatagttactcagtaaagc

SEQ ID NO: 426431 - DNA, 33 bp, Homo sapien
acatagcagacagacaagagctgaccgtggaga

SEQ ID NO: 426432 - DNA, 33 bp, Homo sapien
acatagcagacagacaggagctgaccgtggaga

SEQ ID NO: 426433 - DNA, 33 bp, Homo sapien
tgtcttctctgctgataaactcactgctggttc

SEQ ID NO: 426434 - DNA, 33 bp, Homo sapien
tgtcttctctgctgatgaactcactgctggttc

SEQ ID NO: 426435 - DNA, 33 bp, Homo sapien
ccttgaatggggaaacagccattttgctgtcag

SEQ ID NO: 426436 - DNA, 33 bp, Homo sapien
ccttgaatggggaaacggccattttgctgtcag

SEQ ID NO: 426437 - DNA, 33 bp, Homo sapien
actagcaccatttgaaacttaatgaaaagttat

SEQ ID NO: 426438 - DNA, 33 bp, Homo sapien
actagcaccatttgaagcttaatgaaaagttat

SEQ ID NO: 426439 - DNA, 33 bp, Homo sapien
tcatactttcattcagaacaaatgaattctagg

SEQ ID NO: 426440 - DNA, 33 bp, Homo sapien
tcatactttcattcaggacaaatgaattctagg

SEQ ID NO: 426441 - DNA, 33 bp, Homo sapien
gctgttcaatatggtaaccacatttgctgttga

SEQ ID NO: 426442 - DNA, 33 bp, Homo sapien
gctgttcaatatggtagccacatttgctgttga

SEQ ID NO: 426443 - DNA, 33 bp, Homo sapien
tgcttatatacaaggaaccaaaacactcactta

SEQ ID NO: 426444 - DNA, 33 bp, Homo sapien
tgcttatatacaaggagccaaaacactcactta

SEQ ID NO: 426445 - DNA, 33 bp, Homo sapien
tcatttctcaaccatcgattttcctgcttccaa

SEQ ID NO: 426446 - DNA, 33 bp, Homo sapien
tcatttctcaaccatctattttcctgcttccaa

SEQ ID NO: 426447 - DNA, 33 bp, Homo sapien
ctgatgcccggagcccaaatgagcagtaagaaa

SEQ ID NO: 426448 - DNA, 33 bp, Homo sapien
ctgatgcccggagcccgaatgagcagtaagaaa

SEQ ID NO: 426449 - DNA, 33 bp, Homo sapien
ttttattgcaaagtgacagtatgcactgaagag

SEQ ID NO: 426450 - DNA, 33 bp, Homo sapien
ttttattgcaaagtgatagtatgcactgaagag

SEQ ID NO: 426451 - DNA, 33 bp, Homo sapien
tcccagctgaaaagggaacgcttgtatgctgtt

SEQ ID NO: 426452 - DNA, 33 bp, Homo sapien
tcccagctgaaaaggggacgcttgtatgctgtt

SEQ ID NO: 426453 - DNA, 33 bp, Homo sapien
tattcaattgtagtcaaggaagaaatgaactgt

SEQ ID NO: 426454 - DNA, 33 bp, Homo sapien
tattcaattgtagtcacggaagaaatgaactgt

SEQ ID NO: 426455 - DNA, 33 bp, Homo sapien
ttgtcactaaattgaaccactgaagtagaagat

SEQ ID NO: 426456 - DNA, 33 bp, Homo sapien
ttgtcactaaattgaagcactgaagtagaagat

SEQ ID NO: 426457 - DNA, 33 bp, Homo sapien
ttcagtaatgtccttccattgtgccaccctttt

SEQ ID NO: 426458 - DNA, 33 bp, Homo sapien
ttcagtaatgtccttctattgtgccaccctttt

SEQ ID NO: 426459 - DNA, 33 bp, Homo sapien
tgtagagagggccccaaaaagttcctggtacag

SEQ ID NO: 426460 - DNA, 33 bp, Homo sapien
tgtagagagggccccagaaagttcctggtacag

SEQ ID NO: 426461 - DNA, 33 bp, Homo sapien
ccatgaataccttctcaagtgctctcatcttta

SEQ ID NO: 426462 - DNA, 33 bp, Homo sapien
ccatgaataccttctcgagtgctctcatcttta

SEQ ID NO: 426463 - DNA, 33 bp, Homo sapien
gctacaggcttgtgcaatctctaaagaataaca

SEQ ID NO: 426464 - DNA, 33 bp, Homo sapien
gctacaggcttgtgcagtctctaaagaataaca

SEQ ID NO: 426465 - DNA, 33 bp, Homo sapien
ttcatgtataatcaaaggtacagggtttactca

SEQ ID NO: 426466 - DNA, 33 bp, Homo sapien
ttcatgtataatcaaatgtacagggtttactca

SEQ ID NO: 426467 - DNA, 33 bp, Homo sapien
ctcctacaaaaccacaaggtaaagtgataaaga

SEQ ID NO: 426468 - DNA, 33 bp, Homo sapien
ctcctacaaaaccacagggtaaagtgataaaga

SEQ ID NO: 426469 - DNA, 33 bp, Homo sapien
aatttttcagcaaaacaggaaagatttggtaaa

SEQ ID NO: 426470 - DNA, 33 bp, Homo sapien
aatttttcagcaaaacgggaaagatttggtaaa

SEQ ID NO: 426471 - DNA, 33 bp, Homo sapien
agcaaggcgaggatcacggagaataagagggtg

SEQ ID NO: 426472 - DNA, 33 bp, Homo sapien
agcaaggcgaggatcatggagaataagagggtg

SEQ ID NO: 426473 - DNA, 33 bp, Homo sapien
gactgatccaatccaacatctactttgttcagg

SEQ ID NO: 426474 - DNA, 33 bp, Homo sapien
gactgatccaatccaatatctactttgttcagg

SEQ ID NO: 426475 - DNA, 33 bp, Homo sapien
actgataaaagctcacaggaaaaacattttatc

SEQ ID NO: 426476 - DNA, 33 bp, Homo sapien
actgataaaagctcacgggaaaaacattttatc

SEQ ID NO: 426477 - DNA, 33 bp, Homo sapien
gaagctagacacttgcagcaagcacttaaactt

SEQ ID NO: 426478 - DNA, 33 bp, Homo sapien
gaagctagacacttgcggcaagcacttaaactt

SEQ ID NO: 426479 - DNA, 33 bp, Homo sapien
tgtattctagctatgcacaactacctccctact

SEQ ID NO: 426480 - DNA, 33 bp, Homo sapien
tgtattctagctatgctcaactacctccctact

SEQ ID NO: 426481 - DNA, 33 bp, Homo sapien
aaagtcacataacaagaagtgttgacaaggctg

SEQ ID NO: 426482 - DNA, 33 bp, Homo sapien
aaagtcacataacaagcagtgttgacaaggctg

SEQ ID NO: 426483 - DNA, 33 bp, Homo sapien
cagctactgaagattacgttgatcctgttacaa

SEQ ID NO: 426484 - DNA, 33 bp, Homo sapien
cagctactgaagattatgttgatcctgttacaa

SEQ ID NO: 426485 - DNA, 33 bp, Homo sapien
aagcttctttcaacgacaggaacagttcaggaa

SEQ ID NO: 426486 - DNA, 33 bp, Homo sapien
aagcttctttcaacgataggaacagttcaggaa

SEQ ID NO: 426487 - DNA, 33 bp, Homo sapien
aaaatgacaggcaaaactagcattagacattct

SEQ ID NO: 426488 - DNA, 33 bp, Homo sapien
aaaatgacaggcaaaattagcattagacattct

SEQ ID NO: 426489 - DNA, 33 bp, Homo sapien
atagcagggaaaatgaatcatcacctaccaaag

SEQ ID NO: 426490 - DNA, 33 bp, Homo sapien
atagcagggaaaatgattcatcacctaccaaag

SEQ ID NO: 426491 - DNA, 33 bp, Homo sapien
atagtccatctttgaagagcacataatggaatg

SEQ ID NO: 426492 - DNA, 33 bp, Homo sapien
atagtccatctttgaatagcacataatggaatg

SEQ ID NO: 426493 - DNA, 33 bp, Homo sapien
aagataaggaaggttaagggtatgaggttacag

SEQ ID NO: 426494 - DNA, 33 bp, Homo sapien
aagataaggaaggttacgggtatgaggttacag

SEQ ID NO: 426495 - DNA, 33 bp, Homo sapien
ggcctggttggaatagaaatgataataacagca

SEQ ID NO: 426496 - DNA, 33 bp, Homo sapien
ggcctggttggaataggaatgataataacagca

SEQ ID NO: 426497 - DNA, 33 bp, Homo sapien
tgtaataaacaaagaccataaagcagagaggaa

SEQ ID NO: 426498 - DNA, 33 bp, Homo sapien
tgtaataaacaaagactataaagcagagaggaa

SEQ ID NO: 426499 - DNA, 33 bp, Homo sapien
gtccagcaacgtactaacagttataatgcattt

SEQ ID NO: 426500 - DNA, 33 bp, Homo sapien
gtccagcaacgtactagcagttataatgcattt

SEQ ID NO: 426501 - DNA, 33 bp, Homo sapien
aaaggccttttgagtcacgtagatgttttaaac

SEQ ID NO: 426502 - DNA, 33 bp, Homo sapien
aaaggccttttgagtcgcgtagatgttttaaac

SEQ ID NO: 426503 - DNA, 33 bp, Homo sapien
cattggatttagtgacagaataggcactggtga

SEQ ID NO: 426504 - DNA, 33 bp, Homo sapien
cattggatttagtgacggaataggcactggtga

SEQ ID NO: 426505 - DNA, 33 bp, Homo sapien
attctgctgagggttccaagtattcacacaaga

SEQ ID NO: 426506 - DNA, 33 bp, Homo sapien
attctgctgagggttctaagtattcacacaaga

SEQ ID NO: 426507 - DNA, 33 bp, Homo sapien
tgttatgcgagctcaacggcaggaatggccaac

SEQ ID NO: 426508 - DNA, 33 bp, Homo sapien
tgttatgcgagctcaatggcaggaatggccaac

SEQ ID NO: 426509 - DNA, 33 bp, Homo sapien
aggtcaatttctgcaaactgattgattattaag

SEQ ID NO: 426510 - DNA, 33 bp, Homo sapien
aggtcaatttctgcaacctgattgattattaag

SEQ ID NO: 426511 - DNA, 33 bp, Homo sapien
actcagtgtcttacaacggcataacaaatgcag

SEQ ID NO: 426512 - DNA, 33 bp, Homo sapien
actcagtgtcttacaatggcataacaaatgcag

SEQ ID NO: 426513 - DNA, 33 bp, Homo sapien
agtctctgcagagccaatcccacgacataggga

SEQ ID NO: 426514 - DNA, 33 bp, Homo sapien
agtctctgcagagccagtcccacgacataggga

SEQ ID NO: 426515 - DNA, 33 bp, Homo sapien
ttgctacagagaagaaattcctgtgctaagcat

SEQ ID NO: 426516 - DNA, 33 bp, Homo sapien
ttgctacagagaagaacttcctgtgctaagcat

SEQ ID NO: 426517 - DNA, 33 bp, Homo sapien
ggctcctgagccagtacagcctgcgtcgttgac

SEQ ID NO: 426518 - DNA, 33 bp, Homo sapien
ggctcctgagccagtagagcctgcgtcgttgac

SEQ ID NO: 426519 - DNA, 33 bp, Homo sapien
acaaaactgcccaatcaaaatgaaaagaacaca

SEQ ID NO: 426520 - DNA, 33 bp, Homo sapien
acaaaactgcccaatcgaaatgaaaagaacaca

SEQ ID NO: 426521 - DNA, 33 bp, Homo sapien
gaattacagttaggtccctactgacatagcata

SEQ ID NO: 426522 - DNA, 33 bp, Homo sapien
gaattacagttaggtctctactgacatagcata

SEQ ID NO: 426523 - DNA, 33 bp, Homo sapien
tctgtatagactgagaaaacattccagaagaaa

SEQ ID NO: 426524 - DNA, 33 bp, Homo sapien
tctgtatagactgagagaacattccagaagaaa

SEQ ID NO: 426525 - DNA, 33 bp, Homo sapien
gaatgtctcggggtcagtatcttcatctgaaat

SEQ ID NO: 426526 - DNA, 33 bp, Homo sapien
gaatgtctcggggtcattatcttcatctgaaat

SEQ ID NO: 426527 - DNA, 33 bp, Homo sapien
atgatccagatgcacactaaggtttgggaagca

SEQ ID NO: 426528 - DNA, 33 bp, Homo sapien
atgatccagatgcacattaaggtttgggaagca

SEQ ID NO: 426529 - DNA, 33 bp, Homo sapien
atggacatcttttgaaacaagtgatgaaactta

SEQ ID NO: 426530 - DNA, 33 bp, Homo sapien
atggacatcttttgaagcaagtgatgaaactta

SEQ ID NO: 426531 - DNA, 33 bp, Homo sapien
aaatgtacatcaaagaacttaacaaggccgggt

SEQ ID NO: 426532 - DNA, 33 bp, Homo sapien
aaatgtacatcaaagagcttaacaaggccgggt

SEQ ID NO: 426533 - DNA, 33 bp, Homo sapien
gagcggtaataaagaaaagtctgtagttaataa

SEQ ID NO: 426534 - DNA, 33 bp, Homo sapien
gagcggtaataaagaacagtctgtagttaataa

SEQ ID NO: 426535 - DNA, 33 bp, Homo sapien
ttaaagtacaatactacgcagctctttccagtt

SEQ ID NO: 426536 - DNA, 33 bp, Homo sapien
ttaaagtacaatactaggcagctctttccagtt

SEQ ID NO: 426537 - DNA, 33 bp, Homo sapien
atggttctcactgcccaaagctcgtgagctgtc

SEQ ID NO: 426538 - DNA, 33 bp, Homo sapien
atggttctcactgcccgaagctcgtgagctgtc

SEQ ID NO: 426539 - DNA, 33 bp, Homo sapien
attatttcagagtccaagtgcttaactaccagg

SEQ ID NO: 426540 - DNA, 33 bp, Homo sapien
attatttcagagtccatgtgcttaactaccagg

SEQ ID NO: 426541 - DNA, 33 bp, Homo sapien
ctttcattagagtcacactttcaaatgaaaatc

SEQ ID NO: 426542 - DNA, 33 bp, Homo sapien
ctttcattagagtcactctttcaaatgaaaatc

SEQ ID NO: 426543 - DNA, 33 bp, Homo sapien
taccaagtcctcaatacggcaccattctccagg

SEQ ID NO: 426544 - DNA, 33 bp, Homo sapien
taccaagtcctcaatatggcaccattctccagg

SEQ ID NO: 426545 - DNA, 33 bp, Homo sapien
gcctccatatcttgcaatacctggtctaaaaca

SEQ ID NO: 426546 - DNA, 33 bp, Homo sapien
gcctccatatcttgcagtacctggtctaaaaca

SEQ ID NO: 426547 - DNA, 33 bp, Homo sapien
ggggagcattagacacactttatatggagtggg

SEQ ID NO: 426548 - DNA, 33 bp, Homo sapien
ggggagcattagacacgctttatatggagtggg

SEQ ID NO: 426549 - DNA, 33 bp, Homo sapien
gtgcactctctccaaaatgcatagactccagtg

SEQ ID NO: 426550 - DNA, 33 bp, Homo sapien
gtgcactctctccaaactgcatagactccagtg

SEQ ID NO: 426551 - DNA, 33 bp, Homo sapien
aaatgggcaattaaaaatctcttggtacaatat

SEQ ID NO: 426552 - DNA, 33 bp, Homo sapien
aaatgggcaattaaaagtctcttggtacaatat

SEQ ID NO: 426553 - DNA, 33 bp, Homo sapien
cacttcaatttgacaaaattctatgtaatgttc

SEQ ID NO: 426554 - DNA, 33 bp, Homo sapien
cacttcaatttgacaagattctatgtaatgttc

SEQ ID NO: 426555 - DNA, 33 bp, Homo sapien
aaaagttgaaacctcaacagaagatgctgcaac

SEQ ID NO: 426556 - DNA, 33 bp, Homo sapien
aaaagttgaaacctcagcagaagatgctgcaac

SEQ ID NO: 426557 - DNA, 33 bp, Homo sapien
gttatttggttcaaaaatgtgagcttttaaatg

SEQ ID NO: 426558 - DNA, 33 bp, Homo sapien
gttatttggttcaaaactgtgagcttttaaatg

SEQ ID NO: 426559 - DNA, 33 bp, Homo sapien
ctgctcttaagaagtacctggaattcagttttt

SEQ ID NO: 426560 - DNA, 33 bp, Homo sapien
ctgctcttaagaagtagctggaattcagttttt

SEQ ID NO: 426561 - DNA, 33 bp, Homo sapien
ttcctacagtcctaaccatgcacaccagatttc

SEQ ID NO: 426562 - DNA, 33 bp, Homo sapien
ttcctacagtcctaactatgcacaccagatttc

SEQ ID NO: 426563 - DNA, 33 bp, Homo sapien
tgaccagtctctggagcatttttcgctcctttc

SEQ ID NO: 426564 - DNA, 33 bp, Homo sapien
tgaccagtctctggaggatttttcgctcctttc

SEQ ID NO: 426565 - DNA, 33 bp, Homo sapien
agggcatgctctaatccctccagccaggtaggt

SEQ ID NO: 426566 - DNA, 33 bp, Homo sapien
agggcatgctctaatctctccagccaggtaggt

SEQ ID NO: 426567 - DNA, 33 bp, Homo sapien
attatacacataggtcaacttttttggtaacca

SEQ ID NO: 426568 - DNA, 33 bp, Homo sapien
attatacacataggtcgacttttttggtaacca

SEQ ID NO: 426569 - DNA, 33 bp, Homo sapien
gagaaatatttggatcggaaaggcccatttctt

SEQ ID NO: 426570 - DNA, 33 bp, Homo sapien
gagaaatatttggatctgaaaggcccatttctt

SEQ ID NO: 426571 - DNA, 33 bp, Homo sapien
agagatcgcctcatcaactcattggccaaagca

SEQ ID NO: 426572 - DNA, 33 bp, Homo sapien
agagatcgcctcatcatctcattggccaaagca

SEQ ID NO: 426573 - DNA, 33 bp, Homo sapien
cagaaataaggaatcaactgagaacaggcttta

SEQ ID NO: 426574 - DNA, 33 bp, Homo sapien
cagaaataaggaatcagctgagaacaggcttta

SEQ ID NO: 426575 - DNA, 33 bp, Homo sapien
ttagtcccacagaagagaatcagtgtgtaggta

SEQ ID NO: 426576 - DNA, 33 bp, Homo sapien
ttagtcccacagaagataatcagtgtgtaggta

SEQ ID NO: 426577 - DNA, 33 bp, Homo sapien
gaagagaagacaaggaagactcccaatttccct

SEQ ID NO: 426578 - DNA, 33 bp, Homo sapien
gaagagaagacaaggaggactcccaatttccct

SEQ ID NO: 426579 - DNA, 33 bp, Homo sapien
cctacacagaatctaactgaggttcagaggagt

SEQ ID NO: 426580 - DNA, 33 bp, Homo sapien
cctacacagaatctaattgaggttcagaggagt

SEQ ID NO: 426581 - DNA, 33 bp, Homo sapien
tgaagcaaaacatgaaataagagatcacgtgtt

SEQ ID NO: 426582 - DNA, 33 bp, Homo sapien
tgaagcaaaacatgaagtaagagatcacgtgtt

SEQ ID NO: 426583 - DNA, 33 bp, Homo sapien
gaagtaaaaatgagaaatgaggggtgtgatatt

SEQ ID NO: 426584 - DNA, 33 bp, Homo sapien
gaagtaaaaatgagaagtgaggggtgtgatatt

SEQ ID NO: 426585 - DNA, 33 bp, Homo sapien
aggtgcaggagtagacacataaaggaggcctct

SEQ ID NO: 426586 - DNA, 33 bp, Homo sapien
aggtgcaggagtagacgcataaaggaggcctct

SEQ ID NO: 426587 - DNA, 33 bp, Homo sapien
aaattaaaattaaaaaatcctcagctggccatg

SEQ ID NO: 426588 - DNA, 33 bp, Homo sapien
aaattaaaattaaaaactcctcagctggccatg

SEQ ID NO: 426589 - DNA, 33 bp, Homo sapien
cctagtgagtggcaataaagtgactccactgat

SEQ ID NO: 426590 - DNA, 33 bp, Homo sapien
cctagtgagtggcaatgaagtgactccactgat

SEQ ID NO: 426591 - DNA, 33 bp, Homo sapien
gactctagtggactataagcacacctgtgaata

SEQ ID NO: 426592 - DNA, 33 bp, Homo sapien
gactctagtggactatgagcacacctgtgaata

SEQ ID NO: 426593 - DNA, 33 bp, Homo sapien
acatgtaccccgagtcaagggaccaacccttct

SEQ ID NO: 426594 - DNA, 33 bp, Homo sapien
acatgtaccccgagtcgagggaccaacccttct

SEQ ID NO: 426595 - DNA, 33 bp, Homo sapien
aatggaactcagtgaaaacagtacgagctatct

SEQ ID NO: 426596 - DNA, 33 bp, Homo sapien
aatggaactcagtgaagacagtacgagctatct

SEQ ID NO: 426597 - DNA, 33 bp, Homo sapien
catggtggttctggaagaattcaaatcaagatc

SEQ ID NO: 426598 - DNA, 33 bp, Homo sapien
catggtggttctggaataattcaaatcaagatc

SEQ ID NO: 426599 - DNA, 33 bp, Homo sapien
tacatgacattttacaatacattagctcgctta

SEQ ID NO: 426600 - DNA, 33 bp, Homo sapien
tacatgacattttacattacattagctcgctta

SEQ ID NO: 426601 - DNA, 33 bp, Homo sapien
tcattcagcctcttagccctttcagagggatta

SEQ ID NO: 426602 - DNA, 33 bp, Homo sapien
tcattcagcctcttagtcctttcagagggatta

SEQ ID NO: 426603 - DNA, 33 bp, Homo sapien
aaataaaatgccaaccccttgaagcatggaaga

SEQ ID NO: 426604 - DNA, 33 bp, Homo sapien
aaataaaatgccaacctcttgaagcatggaaga

SEQ ID NO: 426605 - DNA, 33 bp, Homo sapien
gccagtgagatgctatcgatgttgctagttgct

SEQ ID NO: 426606 - DNA, 33 bp, Homo sapien
gccagtgagatgctattgatgttgctagttgct

SEQ ID NO: 426607 - DNA, 33 bp, Homo sapien
taaggtgtcatgccaaggtattctttcttctag

SEQ ID NO: 426608 - DNA, 33 bp, Homo sapien
taaggtgtcatgccaatgtattctttcttctag

SEQ ID NO: 426609 - DNA, 33 bp, Homo sapien
gcccattaggcactcaataaatcctgtgtaatg

SEQ ID NO: 426610 - DNA, 33 bp, Homo sapien
gcccattaggcactcagtaaatcctgtgtaatg

SEQ ID NO: 426611 - DNA, 33 bp, Homo sapien
cccattcatccaataacccagactgggtgcctc

SEQ ID NO: 426612 - DNA, 33 bp, Homo sapien
cccattcatccaataatccagactgggtgcctc

SEQ ID NO: 426613 - DNA, 33 bp, Homo sapien
aaagtgtattcgctgacgttttccacattaata

SEQ ID NO: 426614 - DNA, 33 bp, Homo sapien
aaagtgtattcgctgatgttttccacattaata

SEQ ID NO: 426615 - DNA, 33 bp, Homo sapien
acaagctggcttgcataaatgtaaatgtctgct

SEQ ID NO: 426616 - DNA, 33 bp, Homo sapien
acaagctggcttgcatgaatgtaaatgtctgct

SEQ ID NO: 426617 - DNA, 33 bp, Homo sapien
tgatacttccactccacgtttttacagtgttgt

SEQ ID NO: 426618 - DNA, 33 bp, Homo sapien
tgatacttccactccatgtttttacagtgttgt

SEQ ID NO: 426619 - DNA, 33 bp, Homo sapien
acatgtgacgcataagaatgagaccttgccctg

SEQ ID NO: 426620 - DNA, 33 bp, Homo sapien
acatgtgacgcataaggatgagaccttgccctg

SEQ ID NO: 426621 - DNA, 33 bp, Homo sapien
ccttgttgctgtactaccatatttctcacattt

SEQ ID NO: 426622 - DNA, 33 bp, Homo sapien
ccttgttgctgtactatcatatttctcacattt

SEQ ID NO: 426623 - DNA, 33 bp, Homo sapien
gccaaccccttacctacgcatctcattcaatcc

SEQ ID NO: 426624 - DNA, 33 bp, Homo sapien
gccaaccccttacctatgcatctcattcaatcc

SEQ ID NO: 426625 - DNA, 33 bp, Homo sapien
tggagacatgtacagaatatttgttatgggacc

SEQ ID NO: 426626 - DNA, 33 bp, Homo sapien
tggagacatgtacagagtatttgttatgggacc

SEQ ID NO: 426627 - DNA, 33 bp, Homo sapien
gctggaaataaattcacaatcctgcctctgttg

SEQ ID NO: 426628 - DNA, 33 bp, Homo sapien
gctggaaataaattcagaatcctgcctctgttg

SEQ ID NO: 426629 - DNA, 33 bp, Homo sapien
tcttgtttatcacttaccctgtctcattaagcc

SEQ ID NO: 426630 - DNA, 33 bp, Homo sapien
tcttgtttatcacttatcctgtctcattaagcc

SEQ ID NO: 426631 - DNA, 33 bp, Homo sapien
atgccatgattttaaaacagaagatatttgggc

SEQ ID NO: 426632 - DNA, 33 bp, Homo sapien
atgccatgattttaaagcagaagatatttgggc

SEQ ID NO: 426633 - DNA, 33 bp, Homo sapien
gtgtagtactgcagtccgaactgtaagcatgaa

SEQ ID NO: 426634 - DNA, 33 bp, Homo sapien
gtgtagtactgcagtctgaactgtaagcatgaa

SEQ ID NO: 426635 - DNA, 33 bp, Homo sapien
aagccactcagttcacagtactttttaatagca

SEQ ID NO: 426636 - DNA, 33 bp, Homo sapien
aagccactcagttcacggtactttttaatagca

SEQ ID NO: 426637 - DNA, 33 bp, Homo sapien
ttcagacaggataatcaagtgaaggcaaggcag

SEQ ID NO: 426638 - DNA, 33 bp, Homo sapien
ttcagacaggataatcgagtgaaggcaaggcag

SEQ ID NO: 426639 - DNA, 33 bp, Homo sapien
ctgcttttccagatatgaagtctaacaggaaca

SEQ ID NO: 426640 - DNA, 33 bp, Homo sapien
ctgcttttccagatattaagtctaacaggaaca

SEQ ID NO: 426641 - DNA, 33 bp, Homo sapien
ggtccaaatgaagaaccctaaaatgtagatatt

SEQ ID NO: 426642 - DNA, 33 bp, Homo sapien
ggtccaaatgaagaactctaaaatgtagatatt

SEQ ID NO: 426643 - DNA, 33 bp, Homo sapien
cagaggggatgagttgaactcagaggggaaagg

SEQ ID NO: 426644 - DNA, 33 bp, Homo sapien
cagaggggatgagttggactcagaggggaaagg

SEQ ID NO: 426645 - DNA, 33 bp, Homo sapien
gtagtcagattccctcagacattcgagagcatg

SEQ ID NO: 426646 - DNA, 33 bp, Homo sapien
gtagtcagattccctcggacattcgagagcatg

SEQ ID NO: 426647 - DNA, 33 bp, Homo sapien
tgtaggagctctgaaaaccttgttcctcatcac

SEQ ID NO: 426648 - DNA, 33 bp, Homo sapien
tgtaggagctctgaaagccttgttcctcatcac

SEQ ID NO: 426649 - DNA, 33 bp, Homo sapien
acgttggaaggtgaagacgagtggatcacttga

SEQ ID NO: 426650 - DNA, 33 bp, Homo sapien
acgttggaaggtgaagtcgagtggatcacttga

SEQ ID NO: 426651 - DNA, 33 bp, Homo sapien
tatactattttccacaccgattttaccatttta

SEQ ID NO: 426652 - DNA, 33 bp, Homo sapien
tatactattttccacagcgattttaccatttta

SEQ ID NO: 426653 - DNA, 33 bp, Homo sapien
tccacaactagacatacaccccagcaatgtttt

SEQ ID NO: 426654 - DNA, 33 bp, Homo sapien
tccacaactagacatataccccagcaatgtttt

SEQ ID NO: 426655 - DNA, 33 bp, Homo sapien
cgtatagtatcattgacccctagacaaaacaat

SEQ ID NO: 426656 - DNA, 33 bp, Homo sapien
cgtatagtatcattgatccctagacaaaacaat

SEQ ID NO: 426657 - DNA, 33 bp, Homo sapien
ttgccgaatgctctaacaacttgattctctcaa

SEQ ID NO: 426658 - DNA, 33 bp, Homo sapien
ttgccgaatgctctaataacttgattctctcaa

SEQ ID NO: 426659 - DNA, 33 bp, Homo sapien
gaaataaatggaaacacggaatggaaacatttc

SEQ ID NO: 426660 - DNA, 33 bp, Homo sapien
gaaataaatggaaacatggaatggaaacatttc

SEQ ID NO: 426661 - DNA, 33 bp, Homo sapien
actttctagttgccaaactggaccgtgtatgct

SEQ ID NO: 426662 - DNA, 33 bp, Homo sapien
actttctagttgccaatctggaccgtgtatgct

SEQ ID NO: 426663 - DNA, 33 bp, Homo sapien
attagacgatgatcccaaattttattgtttttg

SEQ ID NO: 426664 - DNA, 33 bp, Homo sapien
attagacgatgatcccgaattttattgtttttg

SEQ ID NO: 426665 - DNA, 33 bp, Homo sapien
ttccacagatgctgtcaaatcatatatgagatc

SEQ ID NO: 426666 - DNA, 33 bp, Homo sapien
ttccacagatgctgtcgaatcatatatgagatc

SEQ ID NO: 426667 - DNA, 33 bp, Homo sapien
gccatgttgcttttaccacattctgcgtccaac

SEQ ID NO: 426668 - DNA, 33 bp, Homo sapien
gccatgttgcttttactacattctgcgtccaac

SEQ ID NO: 426669 - DNA, 33 bp, Homo sapien
tctcctttttctgtcactaaatagttttccatg

SEQ ID NO: 426670 - DNA, 33 bp, Homo sapien
tctcctttttctgtcattaaatagttttccatg

SEQ ID NO: 426671 - DNA, 33 bp, Homo sapien
ctgcttttctgttaaacctttggctttttggat

SEQ ID NO: 426672 - DNA, 33 bp, Homo sapien
ctgcttttctgttaaatctttggctttttggat

SEQ ID NO: 426673 - DNA, 33 bp, Homo sapien
atgcttaagcactcagcaggaataataaacacc

SEQ ID NO: 426674 - DNA, 33 bp, Homo sapien
atgcttaagcactcagtaggaataataaacacc

SEQ ID NO: 426675 - DNA, 33 bp, Homo sapien
gattgctattcattcacgtggagatgctgaaaa

SEQ ID NO: 426676 - DNA, 33 bp, Homo sapien
gattgctattcattcatgtggagatgctgaaaa

SEQ ID NO: 426677 - DNA, 33 bp, Homo sapien
gcttttgtctcattaactatacctggacacact

SEQ ID NO: 426678 - DNA, 33 bp, Homo sapien
gcttttgtctcattaattatacctggacacact

SEQ ID NO: 426679 - DNA, 33 bp, Homo sapien
tgttatgtgaatgaaaatgttggaaatgtaatc

SEQ ID NO: 426680 - DNA, 33 bp, Homo sapien
tgttatgtgaatgaaagtgttggaaatgtaatc

SEQ ID NO: 426681 - DNA, 33 bp, Homo sapien
tcttctcaagtaaacactagtgggaaggaggaa

SEQ ID NO: 426682 - DNA, 33 bp, Homo sapien
tcttctcaagtaaacattagtgggaaggaggaa

SEQ ID NO: 426683 - DNA, 33 bp, Homo sapien
caggggacttccagagacaaaaatattgagctt

SEQ ID NO: 426684 - DNA, 33 bp, Homo sapien
caggggacttccagaggcaaaaatattgagctt

SEQ ID NO: 426685 - DNA, 33 bp, Homo sapien
gtctccaacttcctaaacaccagttactaataa

SEQ ID NO: 426686 - DNA, 33 bp, Homo sapien
gtctccaacttcctaaccaccagttactaataa

SEQ ID NO: 426687 - DNA, 33 bp, Homo sapien
cactgtggcctacttcactgtctctggaacccc

SEQ ID NO: 426688 - DNA, 33 bp, Homo sapien
cactgtggcctacttcgctgtctctggaacccc

SEQ ID NO: 426689 - DNA, 33 bp, Homo sapien
gggaattttaagttgaacatctgagagatcgac

SEQ ID NO: 426690 - DNA, 33 bp, Homo sapien
gggaattttaagttgagcatctgagagatcgac

SEQ ID NO: 426691 - DNA, 33 bp, Homo sapien
tgtggatcgaacagtacggcaatgtggaaatta

SEQ ID NO: 426692 - DNA, 33 bp, Homo sapien
tgtggatcgaacagtatggcaatgtggaaatta

SEQ ID NO: 426693 - DNA, 33 bp, Homo sapien
actggagcaagttaacaattttgatgtttgttt

SEQ ID NO: 426694 - DNA, 33 bp, Homo sapien
actggagcaagttaacgattttgatgtttgttt

SEQ ID NO: 426695 - DNA, 33 bp, Homo sapien
aaaacaatcttctcgggcatatgccaaatggta

SEQ ID NO: 426696 - DNA, 33 bp, Homo sapien
aaaacaatcttctcggtcatatgccaaatggta

SEQ ID NO: 426697 - DNA, 33 bp, Homo sapien
gggatacagctcacaaatctattctttaaacaa

SEQ ID NO: 426698 - DNA, 33 bp, Homo sapien
gggatacagctcacaagtctattctttaaacaa

SEQ ID NO: 426699 - DNA, 33 bp, Homo sapien
atgagtaaactgtcccacgcacatttacaatga

SEQ ID NO: 426700 - DNA, 33 bp, Homo sapien
atgagtaaactgtcccgcgcacatttacaatga

SEQ ID NO: 426701 - DNA, 33 bp, Homo sapien
accatgtcatacctacaaaacatcaaatgttgg

SEQ ID NO: 426702 - DNA, 33 bp, Homo sapien
accatgtcatacctacgaaacatcaaatgttgg

SEQ ID NO: 426703 - DNA, 33 bp, Homo sapien
ggtgttgagtgactaacgccacattcaaggagc

SEQ ID NO: 426704 - DNA, 33 bp, Homo sapien
ggtgttgagtgactaatgccacattcaaggagc

SEQ ID NO: 426705 - DNA, 33 bp, Homo sapien
ggcctcctatttttaaagcaaatccaagctata

SEQ ID NO: 426706 - DNA, 33 bp, Homo sapien
ggcctcctatttttaaggcaaatccaagctata

SEQ ID NO: 426707 - DNA, 33 bp, Homo sapien
tccagcgttgagagccaaaggtgcattatctaa

SEQ ID NO: 426708 - DNA, 33 bp, Homo sapien
tccagcgttgagagccgaaggtgcattatctaa

SEQ ID NO: 426709 - DNA, 33 bp, Homo sapien
tgtggtggatgagtcaaaataagaattgaaaaa

SEQ ID NO: 426710 - DNA, 33 bp, Homo sapien
tgtggtggatgagtcacaataagaattgaaaaa

SEQ ID NO: 426711 - DNA, 33 bp, Homo sapien
tttgcctttgaaactacaaagctcagagtttat

SEQ ID NO: 426712 - DNA, 33 bp, Homo sapien
tttgcctttgaaactataaagctcagagtttat

SEQ ID NO: 426713 - DNA, 33 bp, Homo sapien
agaaaggctttcttgccaagcgttccccttaat

SEQ ID NO: 426714 - DNA, 33 bp, Homo sapien
agaaaggctttcttgctaagcgttccccttaat

SEQ ID NO: 426715 - DNA, 33 bp, Homo sapien
cagttcccaaaacctcaagatggaaagtgtgac

SEQ ID NO: 426716 - DNA, 33 bp, Homo sapien
cagttcccaaaacctcgagatggaaagtgtgac

SEQ ID NO: 426717 - DNA, 33 bp, Homo sapien
tctcaggatgaacttacgtataatgtcaagaga

SEQ ID NO: 426718 - DNA, 33 bp, Homo sapien
tctcaggatgaacttatgtataatgtcaagaga

SEQ ID NO: 426719 - DNA, 33 bp, Homo sapien
accatacacccagttccaggtggccgagcaaag

SEQ ID NO: 426720 - DNA, 33 bp, Homo sapien
accatacacccagttcgaggtggccgagcaaag

SEQ ID NO: 426721 - DNA, 33 bp, Homo sapien
cacaccacaattataacgttttgatattccgtg

SEQ ID NO: 426722 - DNA, 33 bp, Homo sapien
cacaccacaattataatgttttgatattccgtg

SEQ ID NO: 426723 - DNA, 33 bp, Homo sapien
cagaacttcctgaggcacatcctcaaatttgtc

SEQ ID NO: 426724 - DNA, 33 bp, Homo sapien
cagaacttcctgaggcgcatcctcaaatttgtc

SEQ ID NO: 426725 - DNA, 33 bp, Homo sapien
tctagtgataaaaagccgatcaatacttgcctg

SEQ ID NO: 426726 - DNA, 33 bp, Homo sapien
tctagtgataaaaagctgatcaatacttgcctg

SEQ ID NO: 426727 - DNA, 33 bp, Homo sapien
tgctctggtgacgtcaactgttcttttgcctaa

SEQ ID NO: 426728 - DNA, 33 bp, Homo sapien
tgctctggtgacgtcagctgttcttttgcctaa

SEQ ID NO: 426729 - DNA, 33 bp, Homo sapien
ataatgttacctaggaaaagacgcttgaacaag

SEQ ID NO: 426730 - DNA, 33 bp, Homo sapien
ataatgttacctaggagaagacgcttgaacaag

SEQ ID NO: 426731 - DNA, 33 bp, Homo sapien
taccagctcctattcaggccgtttgtttctgaa

SEQ ID NO: 426732 - DNA, 33 bp, Homo sapien
taccagctcctattcatgccgtttgtttctgaa

SEQ ID NO: 426733 - DNA, 33 bp, Homo sapien
agcctgttaggttttccatattaaagcaaaggt

SEQ ID NO: 426734 - DNA, 33 bp, Homo sapien
agcctgttaggttttctatattaaagcaaaggt

SEQ ID NO: 426735 - DNA, 33 bp, Homo sapien
cttgccaaagacatcaccttagggactaaaaaa

SEQ ID NO: 426736 - DNA, 33 bp, Homo sapien
cttgccaaagacatcagcttagggactaaaaaa

SEQ ID NO: 426737 - DNA, 33 bp, Homo sapien
gctgcttcctctcttaactattccttccttcct

SEQ ID NO: 426738 - DNA, 33 bp, Homo sapien
gctgcttcctctcttacctattccttccttcct

SEQ ID NO: 426739 - DNA, 33 bp, Homo sapien
tctgatataatttatcaatgtggtccaggttaa

SEQ ID NO: 426740 - DNA, 33 bp, Homo sapien
tctgatataatttatcgatgtggtccaggttaa

SEQ ID NO: 426741 - DNA, 33 bp, Homo sapien
tatcatatttggtacaccattttatgccttgtc

SEQ ID NO: 426742 - DNA, 33 bp, Homo sapien
tatcatatttggtacatcattttatgccttgtc

SEQ ID NO: 426743 - DNA, 33 bp, Homo sapien
gttaagaatgggaaaaagtagatttcttcaaga

SEQ ID NO: 426744 - DNA, 33 bp, Homo sapien
gttaagaatgggaaaaggtagatttcttcaaga

SEQ ID NO: 426745 - DNA, 33 bp, Homo sapien
cctatcagaggccccccacctgttgcagaaaac

SEQ ID NO: 426746 - DNA, 33 bp, Homo sapien
cctatcagaggccccctacctgttgcagaaaac

SEQ ID NO: 426747 - DNA, 33 bp, Homo sapien
cagccttgtgaaaatacagggaaggacattcta

SEQ ID NO: 426748 - DNA, 33 bp, Homo sapien
cagccttgtgaaaatagagggaaggacattcta

SEQ ID NO: 426749 - DNA, 33 bp, Homo sapien
tgttatatccacatgaagtactttccataaggt

SEQ ID NO: 426750 - DNA, 33 bp, Homo sapien
tgttatatccacatgatgtactttccataaggt

SEQ ID NO: 426751 - DNA, 33 bp, Homo sapien
gtgaatcccaggaggaaaaaataaggccataga

SEQ ID NO: 426752 - DNA, 33 bp, Homo sapien
gtgaatcccaggaggagaaaataaggccataga

SEQ ID NO: 426753 - DNA, 33 bp, Homo sapien
attggattcaaacttaacctttcaggtaaccat

SEQ ID NO: 426754 - DNA, 33 bp, Homo sapien
attggattcaaacttaccctttcaggtaaccat

SEQ ID NO: 426755 - DNA, 33 bp, Homo sapien
tgacactgaacttccacaaactcaaccaaatag

SEQ ID NO: 426756 - DNA, 33 bp, Homo sapien
tgacactgaacttccagaaactcaaccaaatag

SEQ ID NO: 426757 - DNA, 33 bp, Homo sapien
agtgtgatttgctgccagattcccagatggcat

SEQ ID NO: 426758 - DNA, 33 bp, Homo sapien
agtgtgatttgctgccggattcccagatggcat

SEQ ID NO: 426759 - DNA, 33 bp, Homo sapien
gtttccagagtatccacgtatccatgactgact

SEQ ID NO: 426760 - DNA, 33 bp, Homo sapien
gtttccagagtatccatgtatccatgactgact

SEQ ID NO: 426761 - DNA, 33 bp, Homo sapien
tgtatgttaggtgagagagagagaatttctgag

SEQ ID NO: 426762 - DNA, 33 bp, Homo sapien
tgtatgttaggtgagatagagagaatttctgag

SEQ ID NO: 426763 - DNA, 33 bp, Homo sapien
taactaacttttaatacgttaccatgagtcaat

SEQ ID NO: 426764 - DNA, 33 bp, Homo sapien
taactaacttttaatatgttaccatgagtcaat

SEQ ID NO: 426765 - DNA, 33 bp, Homo sapien
ataaagcttccaatcacgtgcttacgaaataac

SEQ ID NO: 426766 - DNA, 33 bp, Homo sapien
ataaagcttccaatcatgtgcttacgaaataac

SEQ ID NO: 426767 - DNA, 33 bp, Homo sapien
tctcctttctcctgcaaatgtgtggagtttccc

SEQ ID NO: 426768 - DNA, 33 bp, Homo sapien
tctcctttctcctgcagatgtgtggagtttccc

SEQ ID NO: 426769 - DNA, 33 bp, Homo sapien
tgtattttttgtagaaatagggtttcactactt

SEQ ID NO: 426770 - DNA, 33 bp, Homo sapien
tgtattttttgtagaactagggtttcactactt

SEQ ID NO: 426771 - DNA, 33 bp, Homo sapien
taatacctttaagaacactattcctgaaaaggg

SEQ ID NO: 426772 - DNA, 33 bp, Homo sapien
taatacctttaagaactctattcctgaaaaggg

SEQ ID NO: 426773 - DNA, 33 bp, Homo sapien
tcccttctacagtttgcaaatgaaaaacagatt

SEQ ID NO: 426774 - DNA, 33 bp, Homo sapien
tcccttctacagtttgtaaatgaaaaacagatt

SEQ ID NO: 426775 - DNA, 33 bp, Homo sapien
gagagatttgggctccgaagtttcctgaaacaa

SEQ ID NO: 426776 - DNA, 33 bp, Homo sapien
gagagatttgggctcctaagtttcctgaaacaa

SEQ ID NO: 426777 - DNA, 33 bp, Homo sapien
tgcttgctgcttacaaccaagaaactctacaga

SEQ ID NO: 426778 - DNA, 33 bp, Homo sapien
tgcttgctgcttacaatcaagaaactctacaga

SEQ ID NO: 426779 - DNA, 33 bp, Homo sapien
tctatactgagtagcactgaaccatctagattt

SEQ ID NO: 426780 - DNA, 33 bp, Homo sapien
tctatactgagtagcattgaaccatctagattt

SEQ ID NO: 426781 - DNA, 33 bp, Homo sapien
cactatgttagataaaagggataaactggtaag

SEQ ID NO: 426782 - DNA, 33 bp, Homo sapien
cactatgttagataaaggggataaactggtaag

SEQ ID NO: 426783 - DNA, 33 bp, Homo sapien
cctatcggctaaggaccaagttccttctgtcct

SEQ ID NO: 426784 - DNA, 33 bp, Homo sapien
cctatcggctaaggactaagttccttctgtcct

SEQ ID NO: 426785 - DNA, 33 bp, Homo sapien
gcaggtgtgacttaacccgccttaggtcttatt

SEQ ID NO: 426786 - DNA, 33 bp, Homo sapien
gcaggtgtgacttaacgcgccttaggtcttatt

SEQ ID NO: 426787 - DNA, 33 bp, Homo sapien
aacctctatccttgaccgcattgcattatgtta

SEQ ID NO: 426788 - DNA, 33 bp, Homo sapien
aacctctatccttgactgcattgcattatgtta

SEQ ID NO: 426789 - DNA, 33 bp, Homo sapien
tgtcaataggtgaatcacagaattcctgcagaa

SEQ ID NO: 426790 - DNA, 33 bp, Homo sapien
tgtcaataggtgaatcccagaattcctgcagaa

SEQ ID NO: 426791 - DNA, 33 bp, Homo sapien
ttatacctcaaattacagattacatcacaaata

SEQ ID NO: 426792 - DNA, 33 bp, Homo sapien
ttatacctcaaattactgattacatcacaaata

SEQ ID NO: 426793 - DNA, 33 bp, Homo sapien
ccaaatggagtggccacctagaacatataatac

SEQ ID NO: 426794 - DNA, 33 bp, Homo sapien
ccaaatggagtggccatctagaacatataatac

SEQ ID NO: 426795 - DNA, 33 bp, Homo sapien
ttcacataggcccagaagtaaagaagaaaactg

SEQ ID NO: 426796 - DNA, 33 bp, Homo sapien
ttcacataggcccagatgtaaagaagaaaactg

SEQ ID NO: 426797 - DNA, 33 bp, Homo sapien
aaatccaatgctttaaccgaactttccggctga

SEQ ID NO: 426798 - DNA, 33 bp, Homo sapien
aaatccaatgctttaagcgaactttccggctga

SEQ ID NO: 426799 - DNA, 33 bp, Homo sapien
agctacaggggctgcacgaggcatcaatatccc

SEQ ID NO: 426800 - DNA, 33 bp, Homo sapien
agctacaggggctgcatgaggcatcaatatccc

SEQ ID NO: 426801 - DNA, 33 bp, Homo sapien
ctaaatgaacattgtgcaaccattgattgtgat

SEQ ID NO: 426802 - DNA, 33 bp, Homo sapien
ctaaatgaacattgtgtaaccattgattgtgat

SEQ ID NO: 426803 - DNA, 33 bp, Homo sapien
acctacagttgcaaaacacaaagctgcaggctt

SEQ ID NO: 426804 - DNA, 33 bp, Homo sapien
acctacagttgcaaaatacaaagctgcaggctt

SEQ ID NO: 426805 - DNA, 33 bp, Homo sapien
caaatttagattctccacagagggccagttctg

SEQ ID NO: 426806 - DNA, 33 bp, Homo sapien
caaatttagattctccgcagagggccagttctg

SEQ ID NO: 426807 - DNA, 33 bp, Homo sapien
ttgcataaatcagaaaacgtgtgacaaagagca

SEQ ID NO: 426808 - DNA, 33 bp, Homo sapien
ttgcataaatcagaaagcgtgtgacaaagagca

SEQ ID NO: 426809 - DNA, 33 bp, Homo sapien
aaaaggaaaggaagaaagaaagcctgcattctc

SEQ ID NO: 426810 - DNA, 33 bp, Homo sapien
aaaaggaaaggaagaaggaaagcctgcattctc

SEQ ID NO: 426811 - DNA, 33 bp, Homo sapien
taaaagacaaggaagaagtgaggactaagaaga

SEQ ID NO: 426812 - DNA, 33 bp, Homo sapien
taaaagacaaggaagaggtgaggactaagaaga

SEQ ID NO: 426813 - DNA, 33 bp, Homo sapien
atgtgaatcgtcagcaaagtataacctatgcta

SEQ ID NO: 426814 - DNA, 33 bp, Homo sapien
atgtgaatcgtcagcagagtataacctatgcta

SEQ ID NO: 426815 - DNA, 33 bp, Homo sapien
accaataaaatcttaccggagagatgaaattaa

SEQ ID NO: 426816 - DNA, 33 bp, Homo sapien
accaataaaatcttactggagagatgaaattaa

SEQ ID NO: 426817 - DNA, 33 bp, Homo sapien
accaccaggcactccacagatgctcagtagatg

SEQ ID NO: 426818 - DNA, 33 bp, Homo sapien
accaccaggcactccatagatgctcagtagatg

SEQ ID NO: 426819 - DNA, 33 bp, Homo sapien
aagccctaaccacaaaacatcacaaatcaatca

SEQ ID NO: 426820 - DNA, 33 bp, Homo sapien
aagccctaaccacaaagcatcacaaatcaatca

SEQ ID NO: 426821 - DNA, 33 bp, Homo sapien
aacaggcagtgaaaatgacaccttgccagttcc

SEQ ID NO: 426822 - DNA, 33 bp, Homo sapien
aacaggcagtgaaaattacaccttgccagttcc

SEQ ID NO: 426823 - DNA, 33 bp, Homo sapien
cctcttccattctcacagtacaattttactctc

SEQ ID NO: 426824 - DNA, 33 bp, Homo sapien
cctcttccattctcacggtacaattttactctc

SEQ ID NO: 426825 - DNA, 33 bp, Homo sapien
cataaaacagttacatcacattcatagagttag

SEQ ID NO: 426826 - DNA, 33 bp, Homo sapien
cataaaacagttacattacattcatagagttag

SEQ ID NO: 426827 - DNA, 33 bp, Homo sapien
accatctccattatgacggctcaactgtgctgc

SEQ ID NO: 426828 - DNA, 33 bp, Homo sapien
accatctccattatgatggctcaactgtgctgc

SEQ ID NO: 426829 - DNA, 33 bp, Homo sapien
gtctacttctggtcaacgtgaatgtttgaattc

SEQ ID NO: 426830 - DNA, 33 bp, Homo sapien
gtctacttctggtcaatgtgaatgtttgaattc

SEQ ID NO: 426831 - DNA, 33 bp, Homo sapien
tttgaatttagctgaacgggctctaaaatttag

SEQ ID NO: 426832 - DNA, 33 bp, Homo sapien
tttgaatttagctgaatgggctctaaaatttag

SEQ ID NO: 426833 - DNA, 33 bp, Homo sapien
taaatcttgaacctctaaagtatatgtatattg

SEQ ID NO: 426834 - DNA, 33 bp, Homo sapien
taaatcttgaacctctgaagtatatgtatattg

SEQ ID NO: 426835 - DNA, 33 bp, Homo sapien
aaagagtttgaagtgagatttgaactgactttc

SEQ ID NO: 426836 - DNA, 33 bp, Homo sapien
aaagagtttgaagtgatatttgaactgactttc

SEQ ID NO: 426837 - DNA, 33 bp, Homo sapien
ctgctttgtctggccacgtcaagaagtgaccat

SEQ ID NO: 426838 - DNA, 33 bp, Homo sapien
ctgctttgtctggccatgtcaagaagtgaccat

SEQ ID NO: 426839 - DNA, 33 bp, Homo sapien
taaaagaataggagaaactaaagcaatgagaaa

SEQ ID NO: 426840 - DNA, 33 bp, Homo sapien
taaaagaataggagaatctaaagcaatgagaaa

SEQ ID NO: 426841 - DNA, 33 bp, Homo sapien
ttttcttggctctcacaacaccattctgccttt

SEQ ID NO: 426842 - DNA, 33 bp, Homo sapien
ttttcttggctctcacgacaccattctgccttt

SEQ ID NO: 426843 - DNA, 33 bp, Homo sapien
aatttcagtttgcagcactcttaatcctatgcc

SEQ ID NO: 426844 - DNA, 33 bp, Homo sapien
aatttcagtttgcagcgctcttaatcctatgcc

SEQ ID NO: 426845 - DNA, 33 bp, Homo sapien
ttacagcactactttacggagtgatccacttcc

SEQ ID NO: 426846 - DNA, 33 bp, Homo sapien
ttacagcactactttatggagtgatccacttcc

SEQ ID NO: 426847 - DNA, 33 bp, Homo sapien
accagaaaattgttaactcttgaaagagcacat

SEQ ID NO: 426848 - DNA, 33 bp, Homo sapien
accagaaaattgttaattcttgaaagagcacat

SEQ ID NO: 426849 - DNA, 33 bp, Homo sapien
tatgcaaaaccatctacagcattgggcaaaaga

SEQ ID NO: 426850 - DNA, 33 bp, Homo sapien
tatgcaaaaccatctagagcattgggcaaaaga

SEQ ID NO: 426851 - DNA, 33 bp, Homo sapien
cgtctctctcattttcccgctgtacacatttat

SEQ ID NO: 426852 - DNA, 33 bp, Homo sapien
cgtctctctcattttctcgctgtacacatttat

SEQ ID NO: 426853 - DNA, 33 bp, Homo sapien
aaaagccaagtgcccactagtaatggataaaaa

SEQ ID NO: 426854 - DNA, 33 bp, Homo sapien
aaaagccaagtgcccattagtaatggataaaaa

SEQ ID NO: 426855 - DNA, 33 bp, Homo sapien
tcagcacagtccttcacggttgatagtatgatc

SEQ ID NO: 426856 - DNA, 33 bp, Homo sapien
tcagcacagtccttcatggttgatagtatgatc

SEQ ID NO: 426857 - DNA, 33 bp, Homo sapien
gagtttcaatcttggacgatgaaaaaagttctg

SEQ ID NO: 426858 - DNA, 33 bp, Homo sapien
gagtttcaatcttggatgatgaaaaaagttctg

SEQ ID NO: 426859 - DNA, 33 bp, Homo sapien
gttttaactattttcacgtaccgttcagtgaca

SEQ ID NO: 426860 - DNA, 33 bp, Homo sapien
gttttaactattttcatgtaccgttcagtgaca

SEQ ID NO: 426861 - DNA, 33 bp, Homo sapien
catgtcggaagcaaacacaagctggtaggtatg

SEQ ID NO: 426862 - DNA, 33 bp, Homo sapien
catgtcggaagcaaacgcaagctggtaggtatg

SEQ ID NO: 426863 - DNA, 33 bp, Homo sapien
ctcggcttgctctgcccactggcttctgcctct

SEQ ID NO: 426864 - DNA, 33 bp, Homo sapien
ctcggcttgctctgcctactggcttctgcctct

SEQ ID NO: 426865 - DNA, 33 bp, Homo sapien
tggcagacccataacacacagcccagggaagtt

SEQ ID NO: 426866 - DNA, 33 bp, Homo sapien
tggcagacccataacagacagcccagggaagtt

SEQ ID NO: 426867 - DNA, 33 bp, Homo sapien
agaggagaataaaaacagagcccagaattcctc

SEQ ID NO: 426868 - DNA, 33 bp, Homo sapien
agaggagaataaaaacggagcccagaattcctc

SEQ ID NO: 426869 - DNA, 33 bp, Homo sapien
cgttggattggttccaagaagcctgcagataga

SEQ ID NO: 426870 - DNA, 33 bp, Homo sapien
cgttggattggttccaggaagcctgcagataga

SEQ ID NO: 426871 - DNA, 33 bp, Homo sapien
tatcatgtatcagatacggtgggcattaatgtt

SEQ ID NO: 426872 - DNA, 33 bp, Homo sapien
tatcatgtatcagatatggtgggcattaatgtt

SEQ ID NO: 426873 - DNA, 33 bp, Homo sapien
catcgtaagaaggtgaaggagacagatgtgcac

SEQ ID NO: 426874 - DNA, 33 bp, Homo sapien
catcgtaagaaggtgagggagacagatgtgcac

SEQ ID NO: 426875 - DNA, 33 bp, Homo sapien
tccacaccacagaaaaaccacttccagtcctct

SEQ ID NO: 426876 - DNA, 33 bp, Homo sapien
tccacaccacagaaaacccacttccagtcctct

SEQ ID NO: 426877 - DNA, 33 bp, Homo sapien
aagctggctaggaagacatatgaactctgagag

SEQ ID NO: 426878 - DNA, 33 bp, Homo sapien
aagctggctaggaagatatatgaactctgagag

SEQ ID NO: 426879 - DNA, 33 bp, Homo sapien
taagagctctgccacaatggaattcaaagcctg

SEQ ID NO: 426880 - DNA, 33 bp, Homo sapien
taagagctctgccacagtggaattcaaagcctg

SEQ ID NO: 426881 - DNA, 33 bp, Homo sapien
aaagttacccatccaccgacctgtctcataagg

SEQ ID NO: 426882 - DNA, 33 bp, Homo sapien
aaagttacccatccactgacctgtctcataagg

SEQ ID NO: 426883 - DNA, 33 bp, Homo sapien
agctatgaacacaggacgagaggtcaaggtcat

SEQ ID NO: 426884 - DNA, 33 bp, Homo sapien
agctatgaacacaggatgagaggtcaaggtcat

SEQ ID NO: 426885 - DNA, 33 bp, Homo sapien
gccaatgctatagctcaagcccgaacgctgtct

SEQ ID NO: 426886 - DNA, 33 bp, Homo sapien
gccaatgctatagctctagcccgaacgctgtct

SEQ ID NO: 426887 - DNA, 33 bp, Homo sapien
tggactcaggttcaaaactcagtggcctcaggc

SEQ ID NO: 426888 - DNA, 33 bp, Homo sapien
tggactcaggttcaaagctcagtggcctcaggc

SEQ ID NO: 426889 - DNA, 33 bp, Homo sapien
cagattctcagccagcaattacaaagtacaggg

SEQ ID NO: 426890 - DNA, 33 bp, Homo sapien
cagattctcagccagcgattacaaagtacaggg

SEQ ID NO: 426891 - DNA, 33 bp, Homo sapien
ccaaaaacttggtgtcaaataagtcttacatgc

SEQ ID NO: 426892 - DNA, 33 bp, Homo sapien
ccaaaaacttggtgtcgaataagtcttacatgc

SEQ ID NO: 426893 - DNA, 33 bp, Homo sapien
aattaaactgcaatcactgacaaagccgttaga

SEQ ID NO: 426894 - DNA, 33 bp, Homo sapien
aattaaactgcaatcagtgacaaagccgttaga

SEQ ID NO: 426895 - DNA, 33 bp, Homo sapien
tctcaaaatactgaacggtgaaactcaaaagcc

SEQ ID NO: 426896 - DNA, 33 bp, Homo sapien
tctcaaaatactgaactgtgaaactcaaaagcc

SEQ ID NO: 426897 - DNA, 33 bp, Homo sapien
tagtctcattgtttgacgcaggtgagaggtgag

SEQ ID NO: 426898 - DNA, 33 bp, Homo sapien
tagtctcattgtttgatgcaggtgagaggtgag

SEQ ID NO: 426899 - DNA, 33 bp, Homo sapien
atgccataacatttaccccacaactactgctct

SEQ ID NO: 426900 - DNA, 33 bp, Homo sapien
atgccataacatttactccacaactactgctct

SEQ ID NO: 426901 - DNA, 33 bp, Homo sapien
gactttgaacattttcgaatcaagcaattatgg

SEQ ID NO: 426902 - DNA, 33 bp, Homo sapien
gactttgaacattttctaatcaagcaattatgg

SEQ ID NO: 426903 - DNA, 33 bp, Homo sapien
ttttcaggaaacgtacacaggtccctcacatga

SEQ ID NO: 426904 - DNA, 33 bp, Homo sapien
ttttcaggaaacgtacgcaggtccctcacatga

SEQ ID NO: 426905 - DNA, 33 bp, Homo sapien
gttctgctcccagtaaaacagcctattcttctc

SEQ ID NO: 426906 - DNA, 33 bp, Homo sapien
gttctgctcccagtaagacagcctattcttctc

SEQ ID NO: 426907 - DNA, 33 bp, Homo sapien
cgcagatcagcctccccctctacccaatgctgt

SEQ ID NO: 426908 - DNA, 33 bp, Homo sapien
cgcagatcagcctccctctctacccaatgctgt

SEQ ID NO: 426909 - DNA, 33 bp, Homo sapien
cagttttggtgctaaaccaggcccacactaacc

SEQ ID NO: 426910 - DNA, 33 bp, Homo sapien
cagttttggtgctaaagcaggcccacactaacc

SEQ ID NO: 426911 - DNA, 33 bp, Homo sapien
ccacaaatctcctcacacatctggcagtgggtt

SEQ ID NO: 426912 - DNA, 33 bp, Homo sapien
ccacaaatctcctcacgcatctggcagtgggtt

SEQ ID NO: 426913 - DNA, 33 bp, Homo sapien
aagcccttctccgtccaatctgcctacgtggaa

SEQ ID NO: 426914 - DNA, 33 bp, Homo sapien
aagcccttctccgtccgatctgcctacgtggaa

SEQ ID NO: 426915 - DNA, 33 bp, Homo sapien
acaagtagctggatgaaagaaaaatctagtgtt

SEQ ID NO: 426916 - DNA, 33 bp, Homo sapien
acaagtagctggatgacagaaaaatctagtgtt

SEQ ID NO: 426917 - DNA, 33 bp, Homo sapien
cacagtgggcttccaaaacaaagttctttgagc

SEQ ID NO: 426918 - DNA, 33 bp, Homo sapien
cacagtgggcttccaagacaaagttctttgagc

SEQ ID NO: 426919 - DNA, 33 bp, Homo sapien
cggaagctatggtgtgcagatgtccagtctgtc

SEQ ID NO: 426920 - DNA, 33 bp, Homo sapien
cggaagctatggtgtgtagatgtccagtctgtc

SEQ ID NO: 426921 - DNA, 33 bp, Homo sapien
cagaaagcatctttcccaagggatggcagaact

SEQ ID NO: 426922 - DNA, 33 bp, Homo sapien
cagaaagcatctttcctaagggatggcagaact

SEQ ID NO: 426923 - DNA, 33 bp, Homo sapien
ttctcattgtaggtaactgctttatcagcacct

SEQ ID NO: 426924 - DNA, 33 bp, Homo sapien
ttctcattgtaggtaattgctttatcagcacct

SEQ ID NO: 426925 - DNA, 33 bp, Homo sapien
ctgtctgcctgtaaaaccattccttctctggat

SEQ ID NO: 426926 - DNA, 33 bp, Homo sapien
ctgtctgcctgtaaaatcattccttctctggat

SEQ ID NO: 426927 - DNA, 33 bp, Homo sapien
aggctttgattaaaagaatgttttggccacaag

SEQ ID NO: 426928 - DNA, 33 bp, Homo sapien
aggctttgattaaaaggatgttttggccacaag

SEQ ID NO: 426929 - DNA, 33 bp, Homo sapien
acctgagcttggtataaagtcaggatctgcccc

SEQ ID NO: 426930 - DNA, 33 bp, Homo sapien
acctgagcttggtatagagtcaggatctgcccc

SEQ ID NO: 426931 - DNA, 33 bp, Homo sapien
atgtgacaaatacataacttcacccgtgtgggt

SEQ ID NO: 426932 - DNA, 33 bp, Homo sapien
atgtgacaaatacatagcttcacccgtgtgggt

SEQ ID NO: 426933 - DNA, 33 bp, Homo sapien
aatgctgagtccaccaaacaagatacaggtaga

SEQ ID NO: 426934 - DNA, 33 bp, Homo sapien
aatgctgagtccaccatacaagatacaggtaga

SEQ ID NO: 426935 - DNA, 33 bp, Homo sapien
ggctgttagtacccaagggcaacaacatgaatg

SEQ ID NO: 426936 - DNA, 33 bp, Homo sapien
ggctgttagtacccaatggcaacaacatgaatg

SEQ ID NO: 426937 - DNA, 33 bp, Homo sapien
cagacaaaaccattcaccctgtctcagttcaca

SEQ ID NO: 426938 - DNA, 33 bp, Homo sapien
cagacaaaaccattcatcctgtctcagttcaca

SEQ ID NO: 426939 - DNA, 33 bp, Homo sapien
gtgttatcataagacccatttacataaggtaat

SEQ ID NO: 426940 - DNA, 33 bp, Homo sapien
gtgttatcataagacctatttacataaggtaat

SEQ ID NO: 426941 - DNA, 33 bp, Homo sapien
ctttcatttcttcctcgaagactgtgtaagaca

SEQ ID NO: 426942 - DNA, 33 bp, Homo sapien
ctttcatttcttcctctaagactgtgtaagaca

SEQ ID NO: 426943 - DNA, 33 bp, Homo sapien
aattctgagcaaaacaatagacccactgatagc

SEQ ID NO: 426944 - DNA, 33 bp, Homo sapien
aattctgagcaaaacagtagacccactgatagc

SEQ ID NO: 426945 - DNA, 33 bp, Homo sapien
ttcaaatgataagaaccgagactcaaagaggac

SEQ ID NO: 426946 - DNA, 33 bp, Homo sapien
ttcaaatgataagaactgagactcaaagaggac

SEQ ID NO: 426947 - DNA, 33 bp, Homo sapien
tgcaaccaggcttgaccgggctggacctgggca

SEQ ID NO: 426948 - DNA, 33 bp, Homo sapien
tgcaaccaggcttgactgggctggacctgggca

SEQ ID NO: 426949 - DNA, 33 bp, Homo sapien
agaagcagctcatttacagcaaaaagtcctggg

SEQ ID NO: 426950 - DNA, 33 bp, Homo sapien
agaagcagctcatttatagcaaaaagtcctggg

SEQ ID NO: 426951 - DNA, 33 bp, Homo sapien
taattctgaccacaaaactatgaaacataattt

SEQ ID NO: 426952 - DNA, 33 bp, Homo sapien
taattctgaccacaaagctatgaaacataattt

SEQ ID NO: 426953 - DNA, 33 bp, Homo sapien
gaattagtgggctgtaaactattcatttgtatt

SEQ ID NO: 426954 - DNA, 33 bp, Homo sapien
gaattagtgggctgtagactattcatttgtatt

SEQ ID NO: 426955 - DNA, 33 bp, Homo sapien
ctgtggcagtgcttaaatgtaagcgtgaagagg

SEQ ID NO: 426956 - DNA, 33 bp, Homo sapien
ctgtggcagtgcttaagtgtaagcgtgaagagg

SEQ ID NO: 426957 - DNA, 33 bp, Homo sapien
ttaaactgagaaacacaacctaagtctagaaaa

SEQ ID NO: 426958 - DNA, 33 bp, Homo sapien
ttaaactgagaaacacgacctaagtctagaaaa

SEQ ID NO: 426959 - DNA, 33 bp, Homo sapien
tattccaaaccaaagccgccatatttagctgtg

SEQ ID NO: 426960 - DNA, 33 bp, Homo sapien
tattccaaaccaaagctgccatatttagctgtg

SEQ ID NO: 426961 - DNA, 33 bp, Homo sapien
cctaggcgggctgtaactagaaagggattttgc

SEQ ID NO: 426962 - DNA, 33 bp, Homo sapien
cctaggcgggctgtaattagaaagggattttgc

SEQ ID NO: 426963 - DNA, 33 bp, Homo sapien
gggaaatgataactcaaaatggtactaaaatat

SEQ ID NO: 426964 - DNA, 33 bp, Homo sapien
gggaaatgataactcagaatggtactaaaatat

SEQ ID NO: 426965 - DNA, 33 bp, Homo sapien
aacatgcatcccatgaatcacattccactccaa

SEQ ID NO: 426966 - DNA, 33 bp, Homo sapien
aacatgcatcccatgagtcacattccactccaa

SEQ ID NO: 426967 - DNA, 33 bp, Homo sapien
atccatgcagaggacccagtcagtgcacagatg

SEQ ID NO: 426968 - DNA, 33 bp, Homo sapien
atccatgcagaggaccgagtcagtgcacagatg

SEQ ID NO: 426969 - DNA, 33 bp, Homo sapien
cttcctggttaaatacagcgttttcagggattt

SEQ ID NO: 426970 - DNA, 33 bp, Homo sapien
cttcctggttaaatacggcgttttcagggattt

SEQ ID NO: 426971 - DNA, 33 bp, Homo sapien
aaatacagttgatggaagctttgttaatctcca

SEQ ID NO: 426972 - DNA, 33 bp, Homo sapien
aaatacagttgatggaggctttgttaatctcca

SEQ ID NO: 426973 - DNA, 33 bp, Homo sapien
aaactgattgttccagaatttgcaaggatctgt

SEQ ID NO: 426974 - DNA, 33 bp, Homo sapien
aaactgattgttccagcatttgcaaggatctgt

SEQ ID NO: 426975 - DNA, 33 bp, Homo sapien
gcggttgtgtgcctggacatctttggtactgtc

SEQ ID NO: 426976 - DNA, 33 bp, Homo sapien
gcggttgtgtgcctggtcatctttggtactgtc

SEQ ID NO: 426977 - DNA, 33 bp, Homo sapien
taagttactgagacccgacgcatagacagtacc

SEQ ID NO: 426978 - DNA, 33 bp, Homo sapien
taagttactgagaccctacgcatagacagtacc

SEQ ID NO: 426979 - DNA, 33 bp, Homo sapien
tcccactacctccttaaagcagagagtgcaccc

SEQ ID NO: 426980 - DNA, 33 bp, Homo sapien
tcccactacctccttagagcagagagtgcaccc

SEQ ID NO: 426981 - DNA, 33 bp, Homo sapien
cagtggcttcctataaactcaaatgcctacaaa

SEQ ID NO: 426982 - DNA, 33 bp, Homo sapien
cagtggcttcctataagctcaaatgcctacaaa

SEQ ID NO: 426983 - DNA, 33 bp, Homo sapien
gttaggaatttaaaaacgtctgagattttatct

SEQ ID NO: 426984 - DNA, 33 bp, Homo sapien
gttaggaatttaaaaaggtctgagattttatct

SEQ ID NO: 426985 - DNA, 33 bp, Homo sapien
tgttttggggggactgaaaaaagcatcatgccc

SEQ ID NO: 426986 - DNA, 33 bp, Homo sapien
tgttttggggggactgcaaaaagcatcatgccc

SEQ ID NO: 426987 - DNA, 33 bp, Homo sapien
atatatactagaagaaagtgattgaggtaaagt

SEQ ID NO: 426988 - DNA, 33 bp, Homo sapien
atatatactagaagaaggtgattgaggtaaagt

SEQ ID NO: 426989 - DNA, 33 bp, Homo sapien
ctatgagattgctgtagggctgtcatccaaact

SEQ ID NO: 426990 - DNA, 33 bp, Homo sapien
ctatgagattgctgtatggctgtcatccaaact

SEQ ID NO: 426991 - DNA, 33 bp, Homo sapien
caaatgaagacaaggaaacgaattgaagggacc

SEQ ID NO: 426992 - DNA, 33 bp, Homo sapien
caaatgaagacaaggacacgaattgaagggacc

SEQ ID NO: 426993 - DNA, 33 bp, Homo sapien
agcgaactgaacacatcagtggagcttcaatgg

SEQ ID NO: 426994 - DNA, 33 bp, Homo sapien
agcgaactgaacacattagtggagcttcaatgg

SEQ ID NO: 426995 - DNA, 33 bp, Homo sapien
aagacataactattcaatactaagcttagcacc

SEQ ID NO: 426996 - DNA, 33 bp, Homo sapien
aagacataactattcagtactaagcttagcacc

SEQ ID NO: 426997 - DNA, 33 bp, Homo sapien; identical to SEQ ID NO: 426995

SEQ ID NO: 426998 - DNA, 33 bp, Homo sapien; identical to SEQ ID NO: 426996

SEQ ID NO: 426999 - DNA, 33 bp, Homo sapien
taagtatcaaggttgaaggtgtcaacatatctt

SEQ ID NO: 427000 - DNA, 33 bp, Homo sapien
taagtatcaaggttgagggtgtcaacatatctt

SEQ ID NO: 427001 - DNA, 33 bp, Homo sapien
ctatgctgtgctctaaccagaggccaatcacaa

SEQ ID NO: 427002 - DNA, 33 bp, Homo sapien
ctatgctgtgctctaatcagaggccaatcacaa

SEQ ID NO: 427003 - DNA, 33 bp, Homo sapien
tacattaaatgtttaaagagtcctactttctca

SEQ ID NO: 427004 - DNA, 33 bp, Homo sapien
tacattaaatgtttaaggagtcctactttctca

SEQ ID NO: 427005 - DNA, 33 bp, Homo sapien
atgtgaatgctcatcaaaaagtgacctcagcag

SEQ ID NO: 427006 - DNA, 33 bp, Homo sapien
atgtgaatgctcatcagaaagtgacctcagcag

SEQ ID NO: 427007 - DNA, 33 bp, Homo sapien
tatttctgctacttacagctgctctacagagac

SEQ ID NO: 427008 - DNA, 33 bp, Homo sapien
tatttctgctacttacggctgctctacagagac

SEQ ID NO: 427009 - DNA, 33 bp, Homo sapien
ctctcctgccagtcacagaaaaaaatagctgcc

SEQ ID NO: 427010 - DNA, 33 bp, Homo sapien
ctctcctgccagtcacggaaaaaaatagctgcc

SEQ ID NO: 427011 - DNA, 33 bp, Homo sapien
cctttgcctacaagccacatgagggaaatacca

SEQ ID NO: 427012 - DNA, 33 bp, Homo sapien
cctttgcctacaagccgcatgagggaaatacca

SEQ ID NO: 427013 - DNA, 33 bp, Homo sapien
gctgggataaatagcagaaagagactggaagaa

SEQ ID NO: 427014 - DNA, 33 bp, Homo sapien
gctgggataaatagcataaagagactggaagaa

SEQ ID NO: 427015 - DNA, 33 bp, Homo sapien
atattcagtaatttaacggaaaaggtggatata

SEQ ID NO: 427016 - DNA, 33 bp, Homo sapien
atattcagtaatttaatggaaaaggtggatata

SEQ ID NO: 427017 - DNA, 33 bp, Homo sapien
agtgtttacaccttcaaagtttagtagacattt

SEQ ID NO: 427018 - DNA, 33 bp, Homo sapien
agtgtttacaccttcagagtttagtagacattt

SEQ ID NO: 427019 - DNA, 33 bp, Homo sapien
actaccttttcttgagcatttattatgcaccta

SEQ ID NO: 427020 - DNA, 33 bp, Homo sapien
actaccttttcttgaggatttattatgcaccta

SEQ ID NO: 427021 - DNA, 33 bp, Homo sapien
ggactagggcattagacagattacccacaaggg

SEQ ID NO: 427022 - DNA, 33 bp, Homo sapien
ggactagggcattagatagattacccacaaggg

SEQ ID NO: 427023 - DNA, 33 bp, Homo sapien
gtaaagaactggcaataaagacaattctaaacg

SEQ ID NO: 427024 - DNA, 33 bp, Homo sapien
gtaaagaactggcaatgaagacaattctaaacg

SEQ ID NO: 427025 - DNA, 33 bp, Homo sapien
tgagaaggatcaagaacgaggaatccaccacgt

SEQ ID NO: 427026 - DNA, 33 bp, Homo sapien
tgagaaggatcaagaatgaggaatccaccacgt

SEQ ID NO: 427027 - DNA, 33 bp, Homo sapien
cagcaaagcctggtgagcttaggacactttcag

SEQ ID NO: 427028 - DNA, 33 bp, Homo sapien
cagcaaagcctggtgatcttaggacactttcag

SEQ ID NO: 427029 - DNA, 33 bp, Homo sapien
catgccagtttgttcactcctctacccatttat

SEQ ID NO: 427030 - DNA, 33 bp, Homo sapien
catgccagtttgttcattcctctacccatttat

SEQ ID NO: 427031 - DNA, 33 bp, Homo sapien
catttaatgtgttgaaagaaacagaccaccaac

SEQ ID NO: 427032 - DNA, 33 bp, Homo sapien
catttaatgtgttgaatgaaacagaccaccaac

SEQ ID NO: 427033 - DNA, 33 bp, Homo sapien
acatcaatgtcccacaggaggattctgcccatt

SEQ ID NO: 427034 - DNA, 33 bp, Homo sapien
acatcaatgtcccacatgaggattctgcccatt

SEQ ID NO: 427035 - DNA, 33 bp, Homo sapien
ccctgaccatggatacaaactatttcaactaga

SEQ ID NO: 427036 - DNA, 33 bp, Homo sapien
ccctgaccatggatactaactatttcaactaga

SEQ ID NO: 427037 - DNA, 33 bp, Homo sapien
tgccacatcgcagaaaggacgccccaaattcat

SEQ ID NO: 427038 - DNA, 33 bp, Homo sapien
tgccacatcgcagaaatgacgccccaaattcat

SEQ ID NO: 427039 - DNA, 33 bp, Homo sapien
cactccaggagagaacgaaaaagaaaatcgact

SEQ ID NO: 427040 - DNA, 33 bp, Homo sapien
cactccaggagagaactaaaaagaaaatcgact

SEQ ID NO: 427041 - DNA, 33 bp, Homo sapien
tacggaggagcttaaacaaatagcgtgattata

SEQ ID NO: 427042 - DNA, 33 bp, Homo sapien
tacggaggagcttaaagaaatagcgtgattata

SEQ ID NO: 427043 - DNA, 33 bp, Homo sapien
acttactttccactgcaactgtgtcctttccag

SEQ ID NO: 427044 - DNA, 33 bp, Homo sapien
acttactttccactgcgactgtgtcctttccag

SEQ ID NO: 427045 - DNA, 33 bp, Homo sapien
tgtctggccctcaagacgctatattaacaccag

SEQ ID NO: 427046 - DNA, 33 bp, Homo sapien
tgtctggccctcaagatgctatattaacaccag

SEQ ID NO: 427047 - DNA, 33 bp, Homo sapien
acgctccagacctgctaacagagcacctaatgc

SEQ ID NO: 427048 - DNA, 33 bp, Homo sapien
acgctccagacctgcttacagagcacctaatgc

SEQ ID NO: 427049 - DNA, 33 bp, Homo sapien
gagcacctaatgctggaaaagaacacagaggca

SEQ ID NO: 427050 - DNA, 33 bp, Homo sapien
gagcacctaatgctgggaaagaacacagaggca

SEQ ID NO: 427051 - DNA, 33 bp, Homo sapien
gtggttaaagttgtaaaagttgctgtagtcatc

SEQ ID NO: 427052 - DNA, 33 bp, Homo sapien
gtggttaaagttgtaagagttgctgtagtcatc

SEQ ID NO: 427053 - DNA, 33 bp, Homo sapien
gcctagttttatttgaaggtgaggggctgtgca

SEQ ID NO: 427054 - DNA, 33 bp, Homo sapien
gcctagttttatttgacggtgaggggctgtgca

SEQ ID NO: 427055 - DNA, 33 bp, Homo sapien
ctcattaacttgctgaacacttgtgacagtcaa

SEQ ID NO: 427056 - DNA, 33 bp, Homo sapien
ctcattaacttgctgagcacttgtgacagtcaa

SEQ ID NO: 427057 - DNA, 33 bp, Homo sapien
ccccaattattcttccaattattctgtagtacc

SEQ ID NO: 427058 - DNA, 33 bp, Homo sapien
ccccaattattcttccgattattctgtagtacc

SEQ ID NO: 427059 - DNA, 33 bp, Homo sapien
aacagcagtttctgaaaacaaattttgatgaga

SEQ ID NO: 427060 - DNA, 33 bp, Homo sapien
aacagcagtttctgaagacaaattttgatgaga

SEQ ID NO: 427061 - DNA, 33 bp, Homo sapien
gtattcaggtatatgcaacaaaagcaagcaaac

SEQ ID NO: 427062 - DNA, 33 bp, Homo sapien
gtattcaggtatatgcgacaaaagcaagcaaac

SEQ ID NO: 427063 - DNA, 33 bp, Homo sapien
gactcatctgagggacagaaaaaaggccctcag

SEQ ID NO: 427064 - DNA, 33 bp, Homo sapien
gactcatctgagggacggaaaaaaggccctcag

SEQ ID NO: 427065 - DNA, 33 bp, Homo sapien
ttttaagtgctgaacaccaaacaagcatcaagg

SEQ ID NO: 427066 - DNA, 33 bp, Homo sapien
ttttaagtgctgaacatcaaacaagcatcaagg

SEQ ID NO: 427067 - DNA, 33 bp, Homo sapien
tacataaaagagctgccgaaagtgactcagata

SEQ ID NO: 427068 - DNA, 33 bp, Homo sapien
tacataaaagagctgctgaaagtgactcagata

SEQ ID NO: 427069 - DNA, 33 bp, Homo sapien
aggaggtgggaccctacaaagaatgacacagac

SEQ ID NO: 427070 - DNA, 33 bp, Homo sapien
aggaggtgggaccctagaaagaatgacacagac

SEQ ID NO: 427071 - DNA, 33 bp, Homo sapien
ctgattgtggacaagaaataatcctgaaacaaa

SEQ ID NO: 427072 - DNA, 33 bp, Homo sapien
ctgattgtggacaagagataatcctgaaacaaa

SEQ ID NO: 427073 - DNA, 33 bp, Homo sapien
ttgtgggaacaagaaccgcatccatttggacca

SEQ ID NO: 427074 - DNA, 33 bp, Homo sapien
ttgtgggaacaagaactgcatccatttggacca

SEQ ID NO: 427075 - DNA, 33 bp, Homo sapien
agtgctaggcatacaactggttttcaacaaata

SEQ ID NO: 427076 - DNA, 33 bp, Homo sapien
agtgctaggcatacaattggttttcaacaaata

SEQ ID NO: 427077 - DNA, 33 bp, Homo sapien
aagtaaggctttaagaactaggagccataaaac

SEQ ID NO: 427078 - DNA, 33 bp, Homo sapien
aagtaaggctttaagagctaggagccataaaac

SEQ ID NO: 427079 - DNA, 33 bp, Homo sapien
aatgagtggctataaacaaagatcatgaatgta

SEQ ID NO: 427080 - DNA, 33 bp, Homo sapien
aatgagtggctataaataaagatcatgaatgta

SEQ ID NO: 427081 - DNA, 33 bp, Homo sapien
agaagaggcgtgaaaaaagagcagggacctgag

SEQ ID NO: 427082 - DNA, 33 bp, Homo sapien
agaagaggcgtgaaaagagagcagggacctgag

SEQ ID NO: 427083 - DNA, 33 bp, Homo sapien
gccaataaagagatgacgagataaagagaaagg

SEQ ID NO: 427084 - DNA, 33 bp, Homo sapien
gccaataaagagatgatgagataaagagaaagg

SEQ ID NO: 427085 - DNA, 33 bp, Homo sapien
gggccaaacgaatgaacgtgacaatgtggctct

SEQ ID NO: 427086 - DNA, 33 bp, Homo sapien
gggccaaacgaatgaatgtgacaatgtggctct

SEQ ID NO: 427087 - DNA, 33 bp, Homo sapien
gccaacagctatcaccaacttttcagccatgtg

SEQ ID NO: 427088 - DNA, 33 bp, Homo sapien
gccaacagctatcaccgacttttcagccatgtg

SEQ ID NO: 427089 - DNA, 33 bp, Homo sapien
aagaagaccgactgtaccacttatctatagctt

SEQ ID NO: 427090 - DNA, 33 bp, Homo sapien
aagaagaccgactgtatcacttatctatagctt

SEQ ID NO: 427091 - DNA, 33 bp, Homo sapien
aatgcattcattctaccacactgtttgtttccc

SEQ ID NO: 427092 - DNA, 33 bp, Homo sapien
aatgcattcattctactacactgtttgtttccc

SEQ ID NO: 427093 - DNA, 33 bp, Homo sapien
ttgagatgagttctcaaacttggacttgaacat

SEQ ID NO: 427094 - DNA, 33 bp, Homo sapien
ttgagatgagttctcagacttggacttgaacat

SEQ ID NO: 427095 - DNA, 33 bp, Homo sapien
attatgctagacctacaaatgaaaacctgattg

SEQ ID NO: 427096 - DNA, 33 bp, Homo sapien
attatgctagacctaccaatgaaaacctgattg

SEQ ID NO: 427097 - DNA, 33 bp, Homo sapien
agcccttctctggctcactgtttggcctgctgt

SEQ ID NO: 427098 - DNA, 33 bp, Homo sapien
agcccttctctggctcgctgtttggcctgctgt

SEQ ID NO: 427099 - DNA, 33 bp, Homo sapien
ctacatactccattgccatctcaactccttgcc

SEQ ID NO: 427100 - DNA, 33 bp, Homo sapien
ctacatactccattgctatctcaactccttgcc

SEQ ID NO: 427101 - DNA, 33 bp, Homo sapien
ctccacctgtactgccacaatttcaatccaaag

SEQ ID NO: 427102 - DNA, 33 bp, Homo sapien
ctccacctgtactgccgcaatttcaatccaaag

SEQ ID NO: 427103 - DNA, 33 bp, Homo sapien
atactttctttaaaaacctgccatacagccatg

SEQ ID NO: 427104 - DNA, 33 bp, Homo sapien
atactttctttaaaaagctgccatacagccatg

SEQ ID NO: 427105 - DNA, 33 bp, Homo sapien
acttgtatacacccaaccatcgaaccaataatt

SEQ ID NO: 427106 - DNA, 33 bp, Homo sapien
acttgtatacacccaatcatcgaaccaataatt

SEQ ID NO: 427107 - DNA, 33 bp, Homo sapien
atttacctattttttccacctagatttgtaaac

SEQ ID NO: 427108 - DNA, 33 bp, Homo sapien
atttacctattttttctacctagatttgtaaac

SEQ ID NO: 427109 - DNA, 33 bp, Homo sapien
agggacagtgataaaaaagatgcaagactaatt

SEQ ID NO: 427110 - DNA, 33 bp, Homo sapien
agggacagtgataaaagagatgcaagactaatt

SEQ ID NO: 427111 - DNA, 33 bp, Homo sapien
agatgtcccggaggaacgtgcttccgccctgtc

SEQ ID NO: 427112 - DNA, 33 bp, Homo sapien
agatgtcccggaggaatgtgcttccgccctgtc

SEQ ID NO: 427113 - DNA, 33 bp, Homo sapien
taaaccaggctggaaaaagtgctcctagagtat

SEQ ID NO: 427114 - DNA, 33 bp, Homo sapien
taaaccaggctggaaagagtgctcctagagtat

SEQ ID NO: 427115 - DNA, 33 bp, Homo sapien
ggaaccactgtgaaacagatcagtcaacgggac

SEQ ID NO: 427116 - DNA, 33 bp, Homo sapien
ggaaccactgtgaaaccgatcagtcaacgggac

SEQ ID NO: 427117 - DNA, 33 bp, Homo sapien
ataaccacagaaaactaagagagaaatagaatg

SEQ ID NO: 427118 - DNA, 33 bp, Homo sapien
ataaccacagaaaactgagagagaaatagaatg

SEQ ID NO: 427119 - DNA, 33 bp, Homo sapien
atcagttcctcacaaacgtccaagcacgaaaaa

SEQ ID NO: 427120 - DNA, 33 bp, Homo sapien
atcagttcctcacaaatgtccaagcacgaaaaa

SEQ ID NO: 427121 - DNA, 33 bp, Homo sapien
tctggaactctcaagcgcctctgtgtcctgaca

SEQ ID NO: 427122 - DNA, 33 bp, Homo sapien
tctggaactctcaagctcctctgtgtcctgaca

SEQ ID NO: 427123 - DNA, 33 bp, Homo sapien
ctggcatctccaagcaccttgcacatagtaggc

SEQ ID NO: 427124 - DNA, 33 bp, Homo sapien
ctggcatctccaagcatcttgcacatagtaggc

SEQ ID NO: 427125 - DNA, 33 bp, Homo sapien
atacttgtaatggtaaaagaatgtgaaactcaa

SEQ ID NO: 427126 - DNA, 33 bp, Homo sapien
atacttgtaatggtaagagaatgtgaaactcaa

SEQ ID NO: 427127 - DNA, 33 bp, Homo sapien
caggacatttgtcagcactccaaacccatgaag

SEQ ID NO: 427128 - DNA, 33 bp, Homo sapien
caggacatttgtcagcgctccaaacccatgaag

SEQ ID NO: 427129 - DNA, 33 bp, Homo sapien
aattatgatggtaagaagaacctgacactgttg

SEQ ID NO: 427130 - DNA, 33 bp, Homo sapien
aattatgatggtaagaggaacctgacactgttg

SEQ ID NO: 427131 - DNA, 33 bp, Homo sapien
aagtattctggttcccaaagtagaggtctgtcc

SEQ ID NO: 427132 - DNA, 33 bp, Homo sapien
aagtattctggttccccaagtagaggtctgtcc

SEQ ID NO: 427133 - DNA, 33 bp, Homo sapien
tgaaaagtttgtcttccgaaattagtaatcaaa

SEQ ID NO: 427134 - DNA, 33 bp, Homo sapien
tgaaaagtttgtcttctgaaattagtaatcaaa

SEQ ID NO: 427135 - DNA, 33 bp, Homo sapien
acaaaaaccagaagagaaacattgcctatggaa

SEQ ID NO: 427136 - DNA, 33 bp, Homo sapien
acaaaaaccagaagagtaacattgcctatggaa

SEQ ID NO: 427137 - DNA, 33 bp, Homo sapien
aatagcttgacagttaagatacagtgcagccac

SEQ ID NO: 427138 - DNA, 33 bp, Homo sapien
aatagcttgacagttaggatacagtgcagccac

SEQ ID NO: 427139 - DNA, 33 bp, Homo sapien
tacatgggacttgaaacggatgtacatgggtgt

SEQ ID NO: 427140 - DNA, 33 bp, Homo sapien
tacatgggacttgaaatggatgtacatgggtgt

SEQ ID NO: 427141 - DNA, 33 bp, Homo sapien
acttatgaaaccccaacggtaaaatatgatctg

SEQ ID NO: 427142 - DNA, 33 bp, Homo sapien
acttatgaaaccccaatggtaaaatatgatctg

SEQ ID NO: 427143 - DNA, 33 bp, Homo sapien
caaatgtaaccagctacgtgcgggtgtctggat

SEQ ID NO: 427144 - DNA, 33 bp, Homo sapien
caaatgtaaccagctatgtgcgggtgtctggat

SEQ ID NO: 427145 - DNA, 33 bp, Homo sapien
ctatgagaatccagaaatggaagagaagactag

SEQ ID NO: 427146 - DNA, 33 bp, Homo sapien
ctatgagaatccagaagtggaagagaagactag

SEQ ID NO: 427147 - DNA, 33 bp, Homo sapien
tccttttgcctttattcaagtgagatttggctt

SEQ ID NO: 427148 - DNA, 33 bp, Homo sapien
tccttttgcctttatttaagtgagatttggctt

SEQ ID NO: 427149 - DNA, 33 bp, Homo sapien
atcatccaggaataaaaagatttagagtcagac

SEQ ID NO: 427150 - DNA, 33 bp, Homo sapien
atcatccaggaataaacagatttagagtcagac

SEQ ID NO: 427151 - DNA, 33 bp, Homo sapien
taccacagtgatagacaccatctaaatacatag

SEQ ID NO: 427152 - DNA, 33 bp, Homo sapien
taccacagtgatagacgccatctaaatacatag

SEQ ID NO: 427153 - DNA, 33 bp, Homo sapien
ttaaatgagattaaccaaaattactcaatctga

SEQ ID NO: 427154 - DNA, 33 bp, Homo sapien
ttaaatgagattaaccgaaattactcaatctga

SEQ ID NO: 427155 - DNA, 33 bp, Homo sapien
aagccctaaaaatgcccgagtcctaatgaaacc

SEQ ID NO: 427156 - DNA, 33 bp, Homo sapien
aagccctaaaaatgcctgagtcctaatgaaacc

SEQ ID NO: 427157 - DNA, 33 bp, Homo sapien
gacgagccatttgatcaaaatatctttttcctt

SEQ ID NO: 427158 - DNA, 33 bp, Homo sapien
gacgagccatttgatccaaatatctttttcctt

SEQ ID NO: 427159 - DNA, 33 bp, Homo sapien
cacttggacccaaacaaggctgatgccaaaatc

SEQ ID NO: 427160 - DNA, 33 bp, Homo sapien
cacttggacccaaacatggctgatgccaaaatc

SEQ ID NO: 427161 - DNA, 33 bp, Homo sapien
aacccacatgagaaacacttcttgggactattt

SEQ ID NO: 427162 - DNA, 33 bp, Homo sapien
aacccacatgagaaacgcttcttgggactattt

SEQ ID NO: 427163 - DNA, 33 bp, Homo sapien
gctctggaggagaaagaaccacagtaggcgaca

SEQ ID NO: 427164 - DNA, 33 bp, Homo sapien
gctctggaggagaaaggaccacagtaggcgaca

SEQ ID NO: 427165 - DNA, 33 bp, Homo sapien
ttgcatttttccggagaagaagccagcaaccct

SEQ ID NO: 427166 - DNA, 33 bp, Homo sapien
ttgcatttttccggaggagaagccagcaaccct

SEQ ID NO: 427167 - DNA, 33 bp, Homo sapien
tgggtcttccattctcactccagcatggccccg

SEQ ID NO: 427168 - DNA, 33 bp, Homo sapien
tgggtcttccattctcgctccagcatggccccg

SEQ ID NO: 427169 - DNA, 33 bp, Homo sapien
gaactctggcatttacaaaaacagtagggtgta

SEQ ID NO: 427170 - DNA, 33 bp, Homo sapien
gaactctggcatttacgaaaacagtagggtgta

SEQ ID NO: 427171 - DNA, 33 bp, Homo sapien
taaggaacatatcttcacatccaatttggctgg

SEQ ID NO: 427172 - DNA, 33 bp, Homo sapien
taaggaacatatcttcgcatccaatttggctgg

SEQ ID NO: 427173 - DNA, 33 bp, Homo sapien
ttgtcatgggaatatagcgtatgtttggttcag

SEQ ID NO: 427174 - DNA, 33 bp, Homo sapien
ttgtcatgggaatatatcgtatgtttggttcag

SEQ ID NO: 427175 - DNA, 33 bp, Homo sapien
aacagtcctgtaaagacgcttcacggttaagca

SEQ ID NO: 427176 - DNA, 33 bp, Homo sapien
aacagtcctgtaaagatgcttcacggttaagca

SEQ ID NO: 427177 - DNA, 33 bp, Homo sapien
aaagcaattggtttccaacaggctggataataa

SEQ ID NO: 427178 - DNA, 33 bp, Homo sapien
aaagcaattggtttcccacaggctggataataa

SEQ ID NO: 427179 - DNA, 33 bp, Homo sapien
aacttaccttcaccaaaatattgcattatttgg

SEQ ID NO: 427180 - DNA, 33 bp, Homo sapien
aacttaccttcaccaatatattgcattatttgg

SEQ ID NO: 427181 - DNA, 33 bp, Homo sapien
tgcccagtggtgtaagacagacaattataaaat

SEQ ID NO: 427182 - DNA, 33 bp, Homo sapien
tgcccagtggtgtaagtcagacaattataaaat

SEQ ID NO: 427183 - DNA, 33 bp, Homo sapien
tttcttcttgttgatacggataaagagacaaaa

SEQ ID NO: 427184 - DNA, 33 bp, Homo sapien
tttcttcttgttgatatggataaagagacaaaa

SEQ ID NO: 427185 - DNA, 33 bp, Homo sapien
cctttatgaagacttacgagcttttataaagaa

SEQ ID NO: 427186 - DNA, 33 bp, Homo sapien
cctttatgaagacttatgagcttttataaagaa

SEQ ID NO: 427187 - DNA, 33 bp, Homo sapien
tttctgctaaaatctgcaatgctatcgtatctg

SEQ ID NO: 427188 - DNA, 33 bp, Homo sapien
tttctgctaaaatctgtaatgctatcgtatctg

SEQ ID NO: 427189 - DNA, 33 bp, Homo sapien
agtgttctattttctcaacaagcagaaaaacgg

SEQ ID NO: 427190 - DNA, 33 bp, Homo sapien
agtgttctattttctcgacaagcagaaaaacgg

SEQ ID NO: 427191 - DNA, 33 bp, Homo sapien
taacccttcttgctaacgtccttcctgaaaact

SEQ ID NO: 427192 - DNA, 33 bp, Homo sapien
taacccttcttgctaatgtccttcctgaaaact

SEQ ID NO: 427193 - DNA, 33 bp, Homo sapien
tggttacaaaagtcaaagttagcttcaagcaca

SEQ ID NO: 427194 - DNA, 33 bp, Homo sapien
tggttacaaaagtcaaggttagcttcaagcaca

SEQ ID NO: 427195 - DNA, 33 bp, Homo sapien
gtgttcttgatattaccactggtgaacctttgt

SEQ ID NO: 427196 - DNA, 33 bp, Homo sapien
gtgttcttgatattacgactggtgaacctttgt

SEQ ID NO: 427197 - DNA, 33 bp, Homo sapien
tttatattcttatttacctctcacactttacat

SEQ ID NO: 427198 - DNA, 33 bp, Homo sapien
tttatattcttatttatctctcacactttacat

SEQ ID NO: 427199 - DNA, 33 bp, Homo sapien
tggacaagctactcagcatccttcggccttggt

SEQ ID NO: 427200 - DNA, 33 bp, Homo sapien
tggacaagctactcagtatccttcggccttggt

SEQ ID NO: 427201 - DNA, 33 bp, Homo sapien
gccttaaaaatgccaaaataaaataatgtgtca

SEQ ID NO: 427202 - DNA, 33 bp, Homo sapien
gccttaaaaatgccaacataaaataatgtgtca

SEQ ID NO: 427203 - DNA, 33 bp, Homo sapien
tgcatttatactgcgcaagtgggtataactatt

SEQ ID NO: 427204 - DNA, 33 bp, Homo sapien
tgcatttatactgcgccagtgggtataactatt

SEQ ID NO: 427205 - DNA, 33 bp, Homo sapien
ttttatctgaaccaaggataggttttattgcct

SEQ ID NO: 427206 - DNA, 33 bp, Homo sapien
ttttatctgaaccaagtataggttttattgcct

SEQ ID NO: 427207 - DNA, 33 bp, Homo sapien
ggagcaatgttacttacgggaaatgacaagcaa

SEQ ID NO: 427208 - DNA, 33 bp, Homo sapien
ggagcaatgttacttatgggaaatgacaagcaa

SEQ ID NO: 427209 - DNA, 33 bp, Homo sapien
gataaaagaaaacttacatgtgtcagttcattt

SEQ ID NO: 427210 - DNA, 33 bp, Homo sapien
gataaaagaaaacttatatgtgtcagttcattt

SEQ ID NO: 427211 - DNA, 33 bp, Homo sapien
ggtaggcagttttgcaagcagaaatagaccagt

SEQ ID NO: 427212 - DNA, 33 bp, Homo sapien
ggtaggcagttttgcaggcagaaatagaccagt

SEQ ID NO: 427213 - DNA, 33 bp, Homo sapien
gcagtttgcgtttttccatcagtttctagctgt

SEQ ID NO: 427214 - DNA, 33 bp, Homo sapien
gcagtttgcgtttttctatcagtttctagctgt

SEQ ID NO: 427215 - DNA, 33 bp, Homo sapien
ctttcacagttgtatacgcagctagcaagaaaa

SEQ ID NO: 427216 - DNA, 33 bp, Homo sapien
ctttcacagttgtatatgcagctagcaagaaaa

SEQ ID NO: 427217 - DNA, 33 bp, Homo sapien
tggtatttattggagccgaatttcacctgtatt

SEQ ID NO: 427218 - DNA, 33 bp, Homo sapien
tggtatttattggagctgaatttcacctgtatt

SEQ ID NO: 427219 - DNA, 33 bp, Homo sapien
gccttttcaggctgccaaaaattcatgttggcg

SEQ ID NO: 427220 - DNA, 33 bp, Homo sapien
gccttttcaggctgccgaaaattcatgttggcg

SEQ ID NO: 427221 - DNA, 33 bp, Homo sapien
agggaagactttatgacgctactttctactgat

SEQ ID NO: 427222 - DNA, 33 bp, Homo sapien
agggaagactttatgatgctactttctactgat

SEQ ID NO: 427223 - DNA, 33 bp, Homo sapien
ttcttctcaatgggacaataccatttacttttg

SEQ ID NO: 427224 - DNA, 33 bp, Homo sapien
ttcttctcaatgggacgataccatttacttttg

SEQ ID NO: 427225 - DNA, 33 bp, Homo sapien
agtttagagtatcttaccaggcaagtggctaga

SEQ ID NO: 427226 - DNA, 33 bp, Homo sapien
agtttagagtatcttatcaggcaagtggctaga

SEQ ID NO: 427227 - DNA, 33 bp, Homo sapien
aaaaaaaatcctctcacattctaggcaaagctt

SEQ ID NO: 427228 - DNA, 33 bp, Homo sapien
aaaaaaaatcctctcatattctaggcaaagctt

SEQ ID NO: 427229 - DNA, 33 bp, Homo sapien
ttgaatacattcttaaaggcgaacaaaagtcct

SEQ ID NO: 427230 - DNA, 33 bp, Homo sapien
ttgaatacattcttaagggcgaacaaaagtcct

SEQ ID NO: 427231 - DNA, 33 bp, Homo sapien
tagagtctaagagtcacatttaaaacaaaaaac

SEQ ID NO: 427232 - DNA, 33 bp, Homo sapien
tagagtctaagagtcagatttaaaacaaaaaac

SEQ ID NO: 427233 - DNA, 33 bp, Homo sapien
tttatgggaacacaaaaaaatgtggctaactca

SEQ ID NO: 427234 - DNA, 33 bp, Homo sapien
tttatgggaacacaaacaaatgtggctaactca

SEQ ID NO: 427235 - DNA, 33 bp, Homo sapien
aataatcatattaaaaatcagacctaacagcga

SEQ ID NO: 427236 - DNA, 33 bp, Homo sapien
aataatcatattaaaattcagacctaacagcga

SEQ ID NO: 427237 - DNA, 33 bp, Homo sapien
caaaacactttccccccaagctaatgcctcagc

SEQ ID NO: 427238 - DNA, 33 bp, Homo sapien
caaaacactttccccctaagctaatgcctcagc

SEQ ID NO: 427239 - DNA, 33 bp, Homo sapien
atatttgaaagacaagaacaattggatttgtct

SEQ ID NO: 427240 - DNA, 33 bp, Homo sapien
atatttgaaagacaaggacaattggatttgtct

SEQ ID NO: 427241 - DNA, 33 bp, Homo sapien
ctcacatatatacatcacaatttaagattggcc

SEQ ID NO: 427242 - DNA, 33 bp, Homo sapien
ctcacatatatacatcgcaatttaagattggcc

SEQ ID NO: 427243 - DNA, 33 bp, Homo sapien
tcaatgcatgaaaagacccagaagttaaatcaa

SEQ ID NO: 427244 - DNA, 33 bp, Homo sapien
tcaatgcatgaaaagagccagaagttaaatcaa

SEQ ID NO: 427245 - DNA, 33 bp, Homo sapien
aagccaaagttgagaaatgagatctaattaaac

SEQ ID NO: 427246 - DNA, 33 bp, Homo sapien
aagccaaagttgagaagtgagatctaattaaac

SEQ ID NO: 427247 - DNA, 33 bp, Homo sapien
caaagatgtctattcaagtcacacgtaaagaaa

SEQ ID NO: 427248 - DNA, 33 bp, Homo sapien
caaagatgtctattcatgtcacacgtaaagaaa

SEQ ID NO: 427249 - DNA, 33 bp, Homo sapien
tcacctgtttatttccaagctatttgtcacctg

SEQ ID NO: 427250 - DNA, 33 bp, Homo sapien
tcacctgtttatttccgagctatttgtcacctg

SEQ ID NO: 427251 - DNA, 33 bp, Homo sapien
ctcggtataattgtcccctgtacccgacaaaga

SEQ ID NO: 427252 - DNA, 33 bp, Homo sapien
ctcggtataattgtccgctgtacccgacaaaga

SEQ ID NO: 427253 - DNA, 33 bp, Homo sapien
attctgttcttgtaccaggaattctaatttacc

SEQ ID NO: 427254 - DNA, 33 bp, Homo sapien
attctgttcttgtaccgggaattctaatttacc

SEQ ID NO: 427255 - DNA, 33 bp, Homo sapien
ttgtcattgtcagtaaattaaatgactagtttc

SEQ ID NO: 427256 - DNA, 33 bp, Homo sapien
ttgtcattgtcagtaatttaaatgactagtttc

SEQ ID NO: 427257 - DNA, 33 bp, Homo sapien
cagtgtttatagattcaattcatagatctgcct

SEQ ID NO: 427258 - DNA, 33 bp, Homo sapien
cagtgtttatagattcgattcatagatctgcct

SEQ ID NO: 427259 - DNA, 33 bp, Homo sapien
ggagaaatcattaacacatctttcaacccgtaa

SEQ ID NO: 427260 - DNA, 33 bp, Homo sapien
ggagaaatcattaacatatctttcaacccgtaa

SEQ ID NO: 427261 - DNA, 33 bp, Homo sapien
tcttgattttcacccaagatccaccactgatcc

SEQ ID NO: 427262 - DNA, 33 bp, Homo sapien
tcttgattttcacccatgatccaccactgatcc

SEQ ID NO: 427263 - DNA, 33 bp, Homo sapien
ccttaggggaacaacacgattacttcccttaag

SEQ ID NO: 427264 - DNA, 33 bp, Homo sapien
ccttaggggaacaacatgattacttcccttaag

SEQ ID NO: 427265 - DNA, 33 bp, Homo sapien
atcagagcctaactgacctggaaaaatggtaag

SEQ ID NO: 427266 - DNA, 33 bp, Homo sapien
atcagagcctaactgagctggaaaaatggtaag

SEQ ID NO: 427267 - DNA, 33 bp, Homo sapien
acttgctggtctaaaccggttctgtctattctt

SEQ ID NO: 427268 - DNA, 33 bp, Homo sapien
acttgctggtctaaactggttctgtctattctt

SEQ ID NO: 427269 - DNA, 33 bp, Homo sapien
cagctgctgattaataaaaccaatcccatctcc

SEQ ID NO: 427270 - DNA, 33 bp, Homo sapien
cagctgctgattaatacaaccaatcccatctcc

SEQ ID NO: 427271 - DNA, 33 bp, Homo sapien
gccatgcaatgatctacgcatattacattattt

SEQ ID NO: 427272 - DNA, 33 bp, Homo sapien
gccatgcaatgatctaggcatattacattattt

SEQ ID NO: 427273 - DNA, 33 bp, Homo sapien
gtgtctgctacaaataagtaattcagagaaaat

SEQ ID NO: 427274 - DNA, 33 bp, Homo sapien
gtgtctgctacaaatacgtaattcagagaaaat

SEQ ID NO: 427275 - DNA, 33 bp, Homo sapien
caggagacaatggaaacgccaggcctctgtgtg

SEQ ID NO: 427276 - DNA, 33 bp, Homo sapien
caggagacaatggaaaggccaggcctctgtgtg

SEQ ID NO: 427277 - DNA, 33 bp, Homo sapien
taacccaaggcagctaacatctactagtaatgc

SEQ ID NO: 427278 - DNA, 33 bp, Homo sapien
taacccaaggcagctatcatctactagtaatgc

SEQ ID NO: 427279 - DNA, 33 bp, Homo sapien
ttttagataggaaacacgggatattcatgggaa

SEQ ID NO: 427280 - DNA, 33 bp, Homo sapien
ttttagataggaaacatgggatattcatgggaa

SEQ ID NO: 427281 - DNA, 33 bp, Homo sapien
tcacttactgacttcaaaaatgtacataattgg

SEQ ID NO: 427282 - DNA, 33 bp, Homo sapien
tcacttactgacttcagaaatgtacataattgg

SEQ ID NO: 427283 - DNA, 33 bp, Homo sapien
acgcatagccgatacacctactgcaagaaaaca

SEQ ID NO: 427284 - DNA, 33 bp, Homo sapien
acgcatagccgatacatctactgcaagaaaaca

SEQ ID NO: 427285 - DNA, 33 bp, Homo sapien
tcctggctgccaatctcaatggatgaaatgaac

SEQ ID NO: 427286 - DNA, 33 bp, Homo sapien
tcctggctgccaatcttaatggatgaaatgaac

SEQ ID NO: 427287 - DNA, 33 bp, Homo sapien
aaataatgaagcaaccaagaatgaagttaatga

SEQ ID NO: 427288 - DNA, 33 bp, Homo sapien
aaataatgaagcaaccgagaatgaagttaatga

SEQ ID NO: 427289 - DNA, 33 bp, Homo sapien
tgcatttttttttctaagtcactaatctgtcag

SEQ ID NO: 427290 - DNA, 33 bp, Homo sapien
tgcatttttttttctacgtcactaatctgtcag

SEQ ID NO: 427291 - DNA, 33 bp, Homo sapien
tgcaatttgttgggcccgagctatctgtgtttt

SEQ ID NO: 427292 - DNA, 33 bp, Homo sapien
tgcaatttgttgggcctgagctatctgtgtttt

SEQ ID NO: 427293 - DNA, 33 bp, Homo sapien
gaaatgggaaagaccaactagaacaactgtaat

SEQ ID NO: 427294 - DNA, 33 bp, Homo sapien
gaaatgggaaagaccagctagaacaactgtaat

SEQ ID NO: 427295 - DNA, 33 bp, Homo sapien
tggactcgtgtagctaaatttaaaaactattgg

SEQ ID NO: 427296 - DNA, 33 bp, Homo sapien
tggactcgtgtagctacatttaaaaactattgg

SEQ ID NO: 427297 - DNA, 33 bp, Homo sapien
gtacagtgtggcctgccattagttttctgaaga

SEQ ID NO: 427298 - DNA, 33 bp, Homo sapien
gtacagtgtggcctgctattagttttctgaaga

SEQ ID NO: 427299 - DNA, 33 bp, Homo sapien
tgcttgtatatttctacgtgggtaagaagaata

SEQ ID NO: 427300 - DNA, 33 bp, Homo sapien
tgcttgtatatttctatgtgggtaagaagaata

SEQ ID NO: 427301 - DNA, 33 bp, Homo sapien
acactcctcaaagggccaagtaattagatagat

SEQ ID NO: 427302 - DNA, 33 bp, Homo sapien
acactcctcaaagggcgaagtaattagatagat

SEQ ID NO: 427303 - DNA, 33 bp, Homo sapien
ttttcttggtcacaacacccatcctcaatcttt

SEQ ID NO: 427304 - DNA, 33 bp, Homo sapien
ttttcttggtcacaacgcccatcctcaatcttt

SEQ ID NO: 427305 - DNA, 33 bp, Homo sapien
gatagatggagggagaaatttaatttattttac

SEQ ID NO: 427306 - DNA, 33 bp, Homo sapien
gatagatggagggagagatttaatttattttac

SEQ ID NO: 427307 - DNA, 33 bp, Homo sapien
tatacagaaagaatcacgtgtgttaccagttct

SEQ ID NO: 427308 - DNA, 33 bp, Homo sapien
tatacagaaagaatcatgtgtgttaccagttct

SEQ ID NO: 427309 - DNA, 33 bp, Homo sapien
caaaaggaggtaaaaaaactttgcaattgatgt

SEQ ID NO: 427310 - DNA, 33 bp, Homo sapien
caaaaggaggtaaaaagactttgcaattgatgt

SEQ ID NO: 427311 - DNA, 33 bp, Homo sapien
ttttactggctgatcaagaaagtgactgaagaa

SEQ ID NO: 427312 - DNA, 33 bp, Homo sapien
ttttactggctgatcaggaaagtgactgaagaa

SEQ ID NO: 427313 - DNA, 33 bp, Homo sapien
ttttcttctggatcaaacttttgtcacctaatt

SEQ ID NO: 427314 - DNA, 33 bp, Homo sapien
ttttcttctggatcaagcttttgtcacctaatt

SEQ ID NO: 427315 - DNA, 33 bp, Homo sapien
aaccacagggagaaatcaagcctcgttagaata

SEQ ID NO: 427316 - DNA, 33 bp, Homo sapien
aaccacagggagaaatgaagcctcgttagaata

SEQ ID NO: 427317 - DNA, 33 bp, Homo sapien
atcagaaaaatggctaaaccaggtgaagcccct

SEQ ID NO: 427318 - DNA, 33 bp, Homo sapien
atcagaaaaatggctagaccaggtgaagcccct

SEQ ID NO: 427319 - DNA, 33 bp, Homo sapien
tcctctgtcaaatggggatagagtagcacccac

SEQ ID NO: 427320 - DNA, 33 bp, Homo sapien
tcctctgtcaaatgggtatagagtagcacccac

SEQ ID NO: 427321 - DNA, 33 bp, Homo sapien
tctctcagtcacttccacttgcctagcacggtt

SEQ ID NO: 427322 - DNA, 33 bp, Homo sapien
tctctcagtcacttccgcttgcctagcacggtt

SEQ ID NO: 427323 - DNA, 33 bp, Homo sapien
gcagctccccgtcacaaatcatttttatctgca

SEQ ID NO: 427324 - DNA, 33 bp, Homo sapien
gcagctccccgtcacagatcatttttatctgca

SEQ ID NO: 427325 - DNA, 33 bp, Homo sapien
aggaagcaaaggctcaatacatgaaaatgattc

SEQ ID NO: 427326 - DNA, 33 bp, Homo sapien
aggaagcaaaggctcagtacatgaaaatgattc

SEQ ID NO: 427327 - DNA, 33 bp, Homo sapien
tgatcaaaggcctaacagtgaaataaatcattg

SEQ ID NO: 427328 - DNA, 33 bp, Homo sapien
tgatcaaaggcctaactgtgaaataaatcattg

SEQ ID NO: 427329 - DNA, 33 bp, Homo sapien
atccaaacataaaggacgcttaaaactcatcaa

SEQ ID NO: 427330 - DNA, 33 bp, Homo sapien
atccaaacataaaggatgcttaaaactcatcaa

SEQ ID NO: 427331 - DNA, 33 bp, Homo sapien
tctaccagtgaactccaattctgtacattttag

SEQ ID NO: 427332 - DNA, 33 bp, Homo sapien
tctaccagtgaactccgattctgtacattttag

SEQ ID NO: 427333 - DNA, 33 bp, Homo sapien
gggagcaaatggccaccgaaggaaaaacacagg

SEQ ID NO: 427334 - DNA, 33 bp, Homo sapien
gggagcaaatggccactgaaggaaaaacacagg

SEQ ID NO: 427335 - DNA, 33 bp, Homo sapien
tattttttatttttccggactacatttgaaatt

SEQ ID NO: 427336 - DNA, 33 bp, Homo sapien
tattttttatttttcctgactacatttgaaatt

SEQ ID NO: 427337 - DNA, 33 bp, Homo sapien
acttcttctaaagttaaatgtacaacctgtgaa

SEQ ID NO: 427338 - DNA, 33 bp, Homo sapien
acttcttctaaagttagatgtacaacctgtgaa

SEQ ID NO: 427339 - DNA, 33 bp, Homo sapien
tgtaaattacttaggcaaatataggcacctagg

SEQ ID NO: 427340 - DNA, 33 bp, Homo sapien
tgtaaattacttaggccaatataggcacctagg

SEQ ID NO: 427341 - DNA, 33 bp, Homo sapien
gaatgaaactagaaatgaatggcagacagaaaa

SEQ ID NO: 427342 - DNA, 33 bp, Homo sapien
gaatgaaactagaaattaatggcagacagaaaa

SEQ ID NO: 427343 - DNA, 33 bp, Homo sapien
tgttttctgtcttgtaaatttctgttactcttt

SEQ ID NO: 427344 - DNA, 33 bp, Homo sapien
tgttttctgtcttgtagatttctgttactcttt

SEQ ID NO: 427345 - DNA, 33 bp, Homo sapien
catagagttacctagaaagagatccatctagtg

SEQ ID NO: 427346 - DNA, 33 bp, Homo sapien
catagagttacctagacagagatccatctagtg

SEQ ID NO: 427347 - DNA, 33 bp, Homo sapien
cgactttcactctaggccccgggtatgcaaatc

SEQ ID NO: 427348 - DNA, 33 bp, Homo sapien
cgactttcactctaggtcccgggtatgcaaatc

SEQ ID NO: 427349 - DNA, 33 bp, Homo sapien
ctcttatgaaaatcacaggcttgacctgacagt

SEQ ID NO: 427350 - DNA, 33 bp, Homo sapien
ctcttatgaaaatcacgggcttgacctgacagt

SEQ ID NO: 427351 - DNA, 33 bp, Homo sapien
gaccatggggagcgtacggatttgcccttcctc

SEQ ID NO: 427352 - DNA, 33 bp, Homo sapien
gaccatggggagcgtatggatttgcccttcctc

SEQ ID NO: 427353 - DNA, 33 bp, Homo sapien
gggcattataggcaaacttaatggacagatcgt

SEQ ID NO: 427354 - DNA, 33 bp, Homo sapien
gggcattataggcaaagttaatggacagatcgt

SEQ ID NO: 427355 - DNA, 33 bp, Homo sapien
tagcaacacaaaatagactaagacacctttgga

SEQ ID NO: 427356 - DNA, 33 bp, Homo sapien
tagcaacacaaaataggctaagacacctttgga

SEQ ID NO: 427357 - DNA, 33 bp, Homo sapien
ttttctgttggttgaaataatcaagaaaactta

SEQ ID NO: 427358 - DNA, 33 bp, Homo sapien
ttttctgttggttgaagtaatcaagaaaactta

SEQ ID NO: 427359 - DNA, 33 bp, Homo sapien
taatatagtctgaagacactcggaatgtctaga

SEQ ID NO: 427360 - DNA, 33 bp, Homo sapien
taatatagtctgaagagactcggaatgtctaga

SEQ ID NO: 427361 - DNA, 33 bp, Homo sapien
catttatagactgtaaatgagtactattttctg

SEQ ID NO: 427362 - DNA, 33 bp, Homo sapien
catttatagactgtaagtgagtactattttctg

SEQ ID NO: 427363 - DNA, 33 bp, Homo sapien
tattgaacacctattacgggtaaggcaccaggt

SEQ ID NO: 427364 - DNA, 33 bp, Homo sapien
tattgaacacctattatgggtaaggcaccaggt

SEQ ID NO: 427365 - DNA, 33 bp, Homo sapien
aataagtagatggcaactgaagctaggggagtg

SEQ ID NO: 427366 - DNA, 33 bp, Homo sapien
aataagtagatggcaattgaagctaggggagtg

SEQ ID NO: 427367 - DNA, 33 bp, Homo sapien
aaagaacaagacaaagaccaggaccagtgtcca

SEQ ID NO: 427368 - DNA, 33 bp, Homo sapien
aaagaacaagacaaagcccaggaccagtgtcca

SEQ ID NO: 427369 - DNA, 33 bp, Homo sapien
gggagagagaagatcacgtatttagaataaaag

SEQ ID NO: 427370 - DNA, 33 bp, Homo sapien
gggagagagaagatcatgtatttagaataaaag

SEQ ID NO: 427371 - DNA, 33 bp, Homo sapien
atgatagggaagtccacagagggagaggtaaac

SEQ ID NO: 427372 - DNA, 33 bp, Homo sapien
atgatagggaagtccatagagggagaggtaaac

SEQ ID NO: 427373 - DNA, 33 bp, Homo sapien
agtaagctctgagaatcagaagtagaaaaccct

SEQ ID NO: 427374 - DNA, 33 bp, Homo sapien
agtaagctctgagaattagaagtagaaaaccct

SEQ ID NO: 427375 - DNA, 33 bp, Homo sapien
gttgggaagacctacccgaattatttttcctgc

SEQ ID NO: 427376 - DNA, 33 bp, Homo sapien
gttgggaagacctacctgaattatttttcctgc

SEQ ID NO: 427377 - DNA, 33 bp, Homo sapien
tgggagcttggagtaacgagcagtggtgggcat

SEQ ID NO: 427378 - DNA, 33 bp, Homo sapien
tgggagcttggagtaatgagcagtggtgggcat

SEQ ID NO: 427379 - DNA, 33 bp, Homo sapien
aattcttttttatctacggtctgatttctttaa

SEQ ID NO: 427380 - DNA, 33 bp, Homo sapien
aattcttttttatctatggtctgatttctttaa

SEQ ID NO: 427381 - DNA, 33 bp, Homo sapien
tttacaggggtagaaaggttgctagagggttgg

SEQ ID NO: 427382 - DNA, 33 bp, Homo sapien
tttacaggggtagaaatgttgctagagggttgg

SEQ ID NO: 427383 - DNA, 33 bp, Homo sapien
tcgataaaagccaccaacaacttggacatgaga

SEQ ID NO: 427384 - DNA, 33 bp, Homo sapien
tcgataaaagccaccagcaacttggacatgaga

SEQ ID NO: 427385 - DNA, 33 bp, Homo sapien
catattgccccatgctaacaccgagaagcaatg

SEQ ID NO: 427386 - DNA, 33 bp, Homo sapien
catattgccccatgctgacaccgagaagcaatg

SEQ ID NO: 427387 - DNA, 33 bp, Homo sapien
caggggaaacgctcaccaagccccgggtgcagc

SEQ ID NO: 427388 - DNA, 33 bp, Homo sapien
caggggaaacgctcactaagccccgggtgcagc

SEQ ID NO: 427389 - DNA, 33 bp, Homo sapien
tttaataggaaggaaggcacgatggctcaggaa

SEQ ID NO: 427390 - DNA, 33 bp, Homo sapien
tttaataggaaggaagtcacgatggctcaggaa

SEQ ID NO: 427391 - DNA, 33 bp, Homo sapien
ctaatgctttttctaaaccagagacccaggggc

SEQ ID NO: 427392 - DNA, 33 bp, Homo sapien
ctaatgctttttctaacccagagacccaggggc

SEQ ID NO: 427393 - DNA, 33 bp, Homo sapien
cccagggcccctctaaaatgaactttattcatt

SEQ ID NO: 427394 - DNA, 33 bp, Homo sapien
cccagggcccctctaacatgaactttattcatt

SEQ ID NO: 427395 - DNA, 33 bp, Homo sapien
cctctctcactgtccccgacgcgcgctttgctc

SEQ ID NO: 427396 - DNA, 33 bp, Homo sapien
cctctctcactgtccctgacgcgcgctttgctc

SEQ ID NO: 427397 - DNA, 33 bp, Homo sapien
acattcattgaagacaaatctctttctccctac

SEQ ID NO: 427398 - DNA, 33 bp, Homo sapien
acattcattgaagacatatctctttctccctac

SEQ ID NO: 427399 - DNA, 33 bp, Homo sapien
tcaccactcttactcagcacagtaccagaagtc

SEQ ID NO: 427400 - DNA, 33 bp, Homo sapien
tcaccactcttactcatcacagtaccagaagtc

SEQ ID NO: 427401 - DNA, 33 bp, Homo sapien
cacaactatgcctgaaataatttatccactgaa

SEQ ID NO: 427402 - DNA, 33 bp, Homo sapien
cacaactatgcctgaagtaatttatccactgaa

SEQ ID NO: 427403 - DNA, 33 bp, Homo sapien
gatatacagagtgaccacaaagtccctatgttt

SEQ ID NO: 427404 - DNA, 33 bp, Homo sapien
gatatacagagtgaccgcaaagtccctatgttt

SEQ ID NO: 427405 - DNA, 33 bp, Homo sapien
agaaatactacagatgacagtctcttgttgaag

SEQ ID NO: 427406 - DNA, 33 bp, Homo sapien
agaaatactacagatgccagtctcttgttgaag

SEQ ID NO: 427407 - DNA, 33 bp, Homo sapien
atcatatttaaggcaactattattaccagagag

SEQ ID NO: 427408 - DNA, 33 bp, Homo sapien
atcatatttaaggcaagtattattaccagagag

SEQ ID NO: 427409 - DNA, 33 bp, Homo sapien
aatatatgcttactgcaaaggctataccttagc

SEQ ID NO: 427410 - DNA, 33 bp, Homo sapien
aatatatgcttactgcgaaggctataccttagc

SEQ ID NO: 427411 - DNA, 33 bp, Homo sapien
ggtatctatcaaattgcaaatcgatacgtcagc

SEQ ID NO: 427412 - DNA, 33 bp, Homo sapien
ggtatctatcaaattggaaatcgatacgtcagc

SEQ ID NO: 427413 - DNA, 33 bp, Homo sapien
tgatcctttactgtccactaacctagattctaa

SEQ ID NO: 427414 - DNA, 33 bp, Homo sapien
tgatcctttactgtccgctaacctagattctaa

SEQ ID NO: 427415 - DNA, 33 bp, Homo sapien
aaaaaagcaatttgaccaaactgacacatagga

SEQ ID NO: 427416 - DNA, 33 bp, Homo sapien
aaaaaagcaatttgacgaaactgacacatagga

SEQ ID NO: 427417 - DNA, 33 bp, Homo sapien
tatattccacagaagacggattgttactgcttc

SEQ ID NO: 427418 - DNA, 33 bp, Homo sapien
tatattccacagaagatggattgttactgcttc

SEQ ID NO: 427419 - DNA, 33 bp, Homo sapien
gttttgcatgactgatgaatcctcacagcattg

SEQ ID NO: 427420 - DNA, 33 bp, Homo sapien
gttttgcatgactgattaatcctcacagcattg

SEQ ID NO: 427421 - DNA, 33 bp, Homo sapien
atttggctaattaaccagcatcaacacaaaatc

SEQ ID NO: 427422 - DNA, 33 bp, Homo sapien
atttggctaattaacccgcatcaacacaaaatc

SEQ ID NO: 427423 - DNA, 33 bp, Homo sapien
tcttcttctttttgtaacatattccctctcctt

SEQ ID NO: 427424 - DNA, 33 bp, Homo sapien
tcttcttctttttgtagcatattccctctcctt

SEQ ID NO: 427425 - DNA, 33 bp, Homo sapien
tacactgcagagcccactcaaataacttttctt

SEQ ID NO: 427426 - DNA, 33 bp, Homo sapien
tacactgcagagcccattcaaataacttttctt

SEQ ID NO: 427427 - DNA, 33 bp, Homo sapien
agatatggaaggtttgaactgaaatgacaggca

SEQ ID NO: 427428 - DNA, 33 bp, Homo sapien
agatatggaaggtttggactgaaatgacaggca

SEQ ID NO: 427429 - DNA, 33 bp, Homo sapien
tgcctttgaacctcagacaaacctaaaaggccc

SEQ ID NO: 427430 - DNA, 33 bp, Homo sapien
tgcctttgaacctcaggcaaacctaaaaggccc

SEQ ID NO: 427431 - DNA, 33 bp, Homo sapien
gaatagataatgagaccgatgcctaaataaaac

SEQ ID NO: 427432 - DNA, 33 bp, Homo sapien
gaatagataatgagactgatgcctaaataaaac

SEQ ID NO: 427433 - DNA, 33 bp, Homo sapien
taccttttgctgcgtaataaacaaacccaaaac

SEQ ID NO: 427434 - DNA, 33 bp, Homo sapien
taccttttgctgcgtagtaaacaaacccaaaac

SEQ ID NO: 427435 - DNA, 33 bp, Homo sapien
ctctctcgtggcacccacttatccccaattttc

SEQ ID NO: 427436 - DNA, 33 bp, Homo sapien
ctctctcgtggcacccgcttatccccaattttc

SEQ ID NO: 427437 - DNA, 33 bp, Homo sapien
gagattccccatgtcaatgaaagagagggagac

SEQ ID NO: 427438 - DNA, 33 bp, Homo sapien
gagattccccatgtcagtgaaagagagggagac

SEQ ID NO: 427439 - DNA, 33 bp, Homo sapien
ttcatatatgtttgttaaaagatgccatggaaa

SEQ ID NO: 427440 - DNA, 33 bp, Homo sapien
ttcatatatgtttgttgaaagatgccatggaaa

SEQ ID NO: 427441 - DNA, 33 bp, Homo sapien
ttggctttaggtagaactggctcaggaattggg

SEQ ID NO: 427442 - DNA, 33 bp, Homo sapien
ttggctttaggtagaattggctcaggaattggg

SEQ ID NO: 427443 - DNA, 33 bp, Homo sapien
ccagaaaacaagaagcaacatggacacccaccc

SEQ ID NO: 427444 - DNA, 33 bp, Homo sapien
ccagaaaacaagaagcgacatggacacccaccc

SEQ ID NO: 427445 - DNA, 33 bp, Homo sapien
ctcacttgctcactcacccactcagtatttatg

SEQ ID NO: 427446 - DNA, 33 bp, Homo sapien
ctcacttgctcactcatccactcagtatttatg

SEQ ID NO: 427447 - DNA, 33 bp, Homo sapien
aatgatatttccatgaactgtgtgccaaagaaa

SEQ ID NO: 427448 - DNA, 33 bp, Homo sapien
aatgatatttccatgagctgtgtgccaaagaaa

SEQ ID NO: 427449 - DNA, 33 bp, Homo sapien
gaaatggagctctagcagcagatcccaatacca

SEQ ID NO: 427450 - DNA, 33 bp, Homo sapien
gaaatggagctctagcggcagatcccaatacca

SEQ ID NO: 427451 - DNA, 33 bp, Homo sapien
gtatttttgcatcagtcaaatttcttaggtaaa

SEQ ID NO: 427452 - DNA, 33 bp, Homo sapien
gtatttttgcatcagtgaaatttcttaggtaaa

SEQ ID NO: 427453 - DNA, 33 bp, Homo sapien
aaagaatatttccataacctaggccctcactat

SEQ ID NO: 427454 - DNA, 33 bp, Homo sapien
aaagaatatttccatagcctaggccctcactat

SEQ ID NO: 427455 - DNA, 33 bp, Homo sapien
gataaaaattggccaaccaagctgttcaactgc

SEQ ID NO: 427456 - DNA, 33 bp, Homo sapien
gataaaaattggccaagcaagctgttcaactgc

SEQ ID NO: 427457 - DNA, 33 bp, Homo sapien
gggaatcctcagggtacggtgagaaaactgact

SEQ ID NO: 427458 - DNA, 33 bp, Homo sapien
gggaatcctcagggtatggtgagaaaactgact

SEQ ID NO: 427459 - DNA, 33 bp, Homo sapien
ctaagaccaaatttaaagtttagaaggctggat

SEQ ID NO: 427460 - DNA, 33 bp, Homo sapien
ctaagaccaaatttaaggtttagaaggctggat

SEQ ID NO: 427461 - DNA, 33 bp, Homo sapien
ctgttggccttgaagacaagcactgtgatacta

SEQ ID NO: 427462 - DNA, 33 bp, Homo sapien
ctgttggccttgaagataagcactgtgatacta

SEQ ID NO: 427463 - DNA, 33 bp, Homo sapien
ccgaatctcatacacacgacatcttttcctata

SEQ ID NO: 427464 - DNA, 33 bp, Homo sapien
ccgaatctcatacacatgacatcttttcctata

SEQ ID NO: 427465 - DNA, 33 bp, Homo sapien
aagggaattcaagtagccagttcatcccacgag

SEQ ID NO: 427466 - DNA, 33 bp, Homo sapien
aagggaattcaagtagtcagttcatcccacgag

SEQ ID NO: 427467 - DNA, 33 bp, Homo sapien
aaatccaatggaaatacataaaacacagtgttg

SEQ ID NO: 427468 - DNA, 33 bp, Homo sapien
aaatccaatggaaatagataaaacacagtgttg

SEQ ID NO: 427469 - DNA, 33 bp, Homo sapien
tatttgttccttttaccacttctcccaagtttc

SEQ ID NO: 427470 - DNA, 33 bp, Homo sapien
tatttgttccttttactacttctcccaagtttc

SEQ ID NO: 427471 - DNA, 33 bp, Homo sapien
gaaattctgaaacaccacaagaccaggaagagt

SEQ ID NO: 427472 - DNA, 33 bp, Homo sapien
gaaattctgaaacaccgcaagaccaggaagagt

SEQ ID NO: 427473 - DNA, 33 bp, Homo sapien
tttgcattgggcccagactggcaatgaccgtgt

SEQ ID NO: 427474 - DNA, 33 bp, Homo sapien
tttgcattgggcccagcctggcaatgaccgtgt

SEQ ID NO: 427475 - DNA, 33 bp, Homo sapien
gttgaggctgggtgagcaccttatgcaggaggt

SEQ ID NO: 427476 - DNA, 33 bp, Homo sapien
gttgaggctgggtgaggaccttatgcaggaggt

SEQ ID NO: 427477 - DNA, 33 bp, Homo sapien
aggacaatgttttgaaaagcgttgcaagagttt

SEQ ID NO: 427478 - DNA, 33 bp, Homo sapien
aggacaatgttttgaagagcgttgcaagagttt

SEQ ID NO: 427479 - DNA, 33 bp, Homo sapien
tgccccactccattaaagtaatttctctaggtc

SEQ ID NO: 427480 - DNA, 33 bp, Homo sapien
tgccccactccattaaggtaatttctctaggtc

SEQ ID NO: 427481 - DNA, 33 bp, Homo sapien
ttaagagcttcgtatcaaggcttcttcccatag

SEQ ID NO: 427482 - DNA, 33 bp, Homo sapien
ttaagagcttcgtatccaggcttcttcccatag

SEQ ID NO: 427483 - DNA, 33 bp, Homo sapien
ttcaaaggtctgaaaggctatgggaagaagcct

SEQ ID NO: 427484 - DNA, 33 bp, Homo sapien
ttcaaaggtctgaaagtctatgggaagaagcct

SEQ ID NO: 427485 - DNA, 33 bp, Homo sapien
aatcaagttaggcatcgcttcattccaggtctg

SEQ ID NO: 427486 - DNA, 33 bp, Homo sapien
aatcaagttaggcatctcttcattccaggtctg

SEQ ID NO: 427487 - DNA, 33 bp, Homo sapien
tctggacagagatgaaaactcacatgagatgac

SEQ ID NO: 427488 - DNA, 33 bp, Homo sapien
tctggacagagatgaagactcacatgagatgac

SEQ ID NO: 427489 - DNA, 33 bp, Homo sapien
taaagacagcatgaggcacaaataatgtttctc

SEQ ID NO: 427490 - DNA, 33 bp, Homo sapien
taaagacagcatgaggtacaaataatgtttctc

SEQ ID NO: 427491 - DNA, 33 bp, Homo sapien
tcattaacaattaggacctccaacggtgtattt

SEQ ID NO: 427492 - DNA, 33 bp, Homo sapien
tcattaacaattaggatctccaacggtgtattt

SEQ ID NO: 427493 - DNA, 33 bp, Homo sapien
ggaagttttgtattcactcctttagatttgaca

SEQ ID NO: 427494 - DNA, 33 bp, Homo sapien
ggaagttttgtattcattcctttagatttgaca

SEQ ID NO: 427495 - DNA, 33 bp, Homo sapien
ccaaagattggttggactaggtgtgacatttac

SEQ ID NO: 427496 - DNA, 33 bp, Homo sapien
ccaaagattggttggattaggtgtgacatttac

SEQ ID NO: 427497 - DNA, 33 bp, Homo sapien
aagatggaggaatgtcaccatacctagacagac

SEQ ID NO: 427498 - DNA, 33 bp, Homo sapien
aagatggaggaatgtcgccatacctagacagac

SEQ ID NO: 427499 - DNA, 33 bp, Homo sapien
gccaacaagcaaccaagttcagatggacatagc

SEQ ID NO: 427500 - DNA, 33 bp, Homo sapien
gccaacaagcaaccaatttcagatggacatagc

SEQ ID NO: 427501 - DNA, 33 bp, Homo sapien
gtgtctttgttctctccccaaaagtttgggtgt

SEQ ID NO: 427502 - DNA, 33 bp, Homo sapien
gtgtctttgttctctctccaaaagtttgggtgt

SEQ ID NO: 427503 - DNA, 33 bp, Homo sapien
ctcaggttcagtgcaaccaactcttatcaacaa

SEQ ID NO: 427504 - DNA, 33 bp, Homo sapien
ctcaggttcagtgcaatcaactcttatcaacaa

SEQ ID NO: 427505 - DNA, 33 bp, Homo sapien
ctcatatgggcatcagaattattccacccccac

SEQ ID NO: 427506 - DNA, 33 bp, Homo sapien
ctcatatgggcatcaggattattccacccccac

SEQ ID NO: 427507 - DNA, 33 bp, Homo sapien
ctttggatttatagcccccataactatgagaga

SEQ ID NO: 427508 - DNA, 33 bp, Homo sapien
ctttggatttatagcctccataactatgagaga

SEQ ID NO: 427509 - DNA, 33 bp, Homo sapien
actttttaatttttcacattagcaaagtttaag

SEQ ID NO: 427510 - DNA, 33 bp, Homo sapien
actttttaatttttcagattagcaaagtttaag

SEQ ID NO: 427511 - DNA, 33 bp, Homo sapien
gaaaggtgactgtaaacatcatcaagctctatc

SEQ ID NO: 427512 - DNA, 33 bp, Homo sapien
gaaaggtgactgtaaatatcatcaagctctatc

SEQ ID NO: 427513 - DNA, 33 bp, Homo sapien
aagcagataggcagtaaagggtctatgtacttt

SEQ ID NO: 427514 - DNA, 33 bp, Homo sapien
aagcagataggcagtatagggtctatgtacttt

SEQ ID NO: 427515 - DNA, 33 bp, Homo sapien
attctgttagccaaagaaaggactatggacaag

SEQ ID NO: 427516 - DNA, 33 bp, Homo sapien
attctgttagccaaagtaaggactatggacaag

SEQ ID NO: 427517 - DNA, 33 bp, Homo sapien
tattcaggtccatttcaatctctgactggacca

SEQ ID NO: 427518 - DNA, 33 bp, Homo sapien
tattcaggtccatttcgatctctgactggacca

SEQ ID NO: 427519 - DNA, 33 bp, Homo sapien
tcaataaggttgccacaatggagaagggacttt

SEQ ID NO: 427520 - DNA, 33 bp, Homo sapien
tcaataaggttgccaccatggagaagggacttt

SEQ ID NO: 427521 - DNA, 33 bp, Homo sapien
gaagcccatcactcccactgtaaggaaacttta

SEQ ID NO: 427522 - DNA, 33 bp, Homo sapien
gaagcccatcactcccgctgtaaggaaacttta

SEQ ID NO: 427523 - DNA, 33 bp, Homo sapien
ttttcttttgtttgcacattattttaggcatgt

SEQ ID NO: 427524 - DNA, 33 bp, Homo sapien
ttttcttttgtttgcagattattttaggcatgt

SEQ ID NO: 427525 - DNA, 33 bp, Homo sapien
aagaagacatgcaaagcattttgatagttttgt

SEQ ID NO: 427526 - DNA, 33 bp, Homo sapien
aagaagacatgcaaaggattttgatagttttgt

SEQ ID NO: 427527 - DNA, 33 bp, Homo sapien
ttattaagagatagaccaaaaggaggtgcttga

SEQ ID NO: 427528 - DNA, 33 bp, Homo sapien
ttattaagagatagacgaaaaggaggtgcttga

SEQ ID NO: 427529 - DNA, 33 bp, Homo sapien
aagtctgacctgttaaataaaaattgattgagg

SEQ ID NO: 427530 - DNA, 33 bp, Homo sapien
aagtctgacctgttaagtaaaaattgattgagg

SEQ ID NO: 427531 - DNA, 33 bp, Homo sapien
taattactgtcagtagcagcataaactttcttc

SEQ ID NO: 427532 - DNA, 33 bp, Homo sapien
taattactgtcagtaggagcataaactttcttc

SEQ ID NO: 427533 - DNA, 33 bp, Homo sapien
ttaaataaagaaggtaactagctccaggtgcct

SEQ ID NO: 427534 - DNA, 33 bp, Homo sapien
ttaaataaagaaggtagctagctccaggtgcct

SEQ ID NO: 427535 - DNA, 33 bp, Homo sapien
tcttctaaatgtactacatcgaaaatcacattt

SEQ ID NO: 427536 - DNA, 33 bp, Homo sapien
tcttctaaatgtactatatcgaaaatcacattt

SEQ ID NO: 427537 - DNA, 33 bp, Homo sapien
tttctcaggctacctacggtcagtgaattggat

SEQ ID NO: 427538 - DNA, 33 bp, Homo sapien
tttctcaggctacctatggtcagtgaattggat

SEQ ID NO: 427539 - DNA, 33 bp, Homo sapien
gaagaaaatatagaggaaatgctttaggacctt

SEQ ID NO: 427540 - DNA, 33 bp, Homo sapien
gaagaaaatatagaggtaatgctttaggacctt

SEQ ID NO: 427541 - DNA, 33 bp, Homo sapien
aaagatatgtgccactaacataagtattctgat

SEQ ID NO: 427542 - DNA, 33 bp, Homo sapien
aaagatatgtgccactgacataagtattctgat

SEQ ID NO: 427543 - DNA, 33 bp, Homo sapien
gttgcttggctttatacgcttaaaggatttggc

SEQ ID NO: 427544 - DNA, 33 bp, Homo sapien
gttgcttggctttatatgcttaaaggatttggc

SEQ ID NO: 427545 - DNA, 33 bp, Homo sapien
taaaagccctgaggaaagtacacatctggcctc

SEQ ID NO: 427546 - DNA, 33 bp, Homo sapien
taaaagccctgaggaaggtacacatctggcctc

SEQ ID NO: 427547 - DNA, 33 bp, Homo sapien
aatggaaagagttctgaagttgaaataagaatc

SEQ ID NO: 427548 - DNA, 33 bp, Homo sapien
aatggaaagagttctggagttgaaataagaatc

SEQ ID NO: 427549 - DNA, 33 bp, Homo sapien
ttatagaatagcgaaacgaaatgggaaaagata

SEQ ID NO: 427550 - DNA, 33 bp, Homo sapien
ttatagaatagcgaaatgaaatgggaaaagata

SEQ ID NO: 427551 - DNA, 33 bp, Homo sapien
tactgaaatcccctttcaaagaaaatcttcaca

SEQ ID NO: 427552 - DNA, 33 bp, Homo sapien
tactgaaatcccctttgaaagaaaatcttcaca

SEQ ID NO: 427553 - DNA, 33 bp, Homo sapien
actcaaaaccatcaacaccaagataaaaaagac

SEQ ID NO: 427554 - DNA, 33 bp, Homo sapien
actcaaaaccatcaacgccaagataaaaaagac

SEQ ID NO: 427555 - DNA, 33 bp, Homo sapien
taacgcagtagggaaagttctcattctgcatta

SEQ ID NO: 427556 - DNA, 33 bp, Homo sapien
taacgcagtagggaaatttctcattctgcatta

SEQ ID NO: 427557 - DNA, 33 bp, Homo sapien
aaaaatagaagaaagagatcacaccttatcaac

SEQ ID NO: 427558 - DNA, 33 bp, Homo sapien
aaaaatagaagaaagatatcacaccttatcaac

SEQ ID NO: 427559 - DNA, 33 bp, Homo sapien
agaatacagcaatgaaaaacagtaagaagatcc

SEQ ID NO: 427560 - DNA, 33 bp, Homo sapien
agaatacagcaatgaacaacagtaagaagatcc

SEQ ID NO: 427561 - DNA, 33 bp, Homo sapien
ttccctatcactgtgaataaaatcatgaaatca

SEQ ID NO: 427562 - DNA, 33 bp, Homo sapien
ttccctatcactgtgagtaaaatcatgaaatca

SEQ ID NO: 427563 - DNA, 33 bp, Homo sapien
cactaactagactacaaaaaaaggacgcttgtt

SEQ ID NO: 427564 - DNA, 33 bp, Homo sapien
cactaactagactacagaaaaaggacgcttgtt

SEQ ID NO: 427565 - DNA, 33 bp, Homo sapien
gtcaggtatctactaactatttggttctctctt

SEQ ID NO: 427566 - DNA, 33 bp, Homo sapien
gtcaggtatctactaattatttggttctctctt

SEQ ID NO: 427567 - DNA, 33 bp, Homo sapien
agctctcctacttaccacttcttaacatccgcc

SEQ ID NO: 427568 - DNA, 33 bp, Homo sapien
agctctcctacttaccgcttcttaacatccgcc

SEQ ID NO: 427569 - DNA, 33 bp, Homo sapien
gaggagataatatagccgaagttaatttccatg

SEQ ID NO: 427570 - DNA, 33 bp, Homo sapien
gaggagataatatagctgaagttaatttccatg

SEQ ID NO: 427571 - DNA, 33 bp, Homo sapien
gccttcgtgcacaactcactaggccctgaggat

SEQ ID NO: 427572 - DNA, 33 bp, Homo sapien
gccttcgtgcacaacttactaggccctgaggat

SEQ ID NO: 427573 - DNA, 33 bp, Homo sapien
tgaatttgaatgtacaataaaatctcccacatt

SEQ ID NO: 427574 - DNA, 33 bp, Homo sapien
tgaatttgaatgtacagtaaaatctcccacatt

SEQ ID NO: 427575 - DNA, 33 bp, Homo sapien
tgaatactgtaactaccctgaagccttcaagtt

SEQ ID NO: 427576 - DNA, 33 bp, Homo sapien
tgaatactgtaactactctgaagccttcaagtt

SEQ ID NO: 427577 - DNA, 33 bp, Homo sapien
caaagattttctcctaggctttgttccagaaga

SEQ ID NO: 427578 - DNA, 33 bp, Homo sapien
caaagattttctcctatgctttgttccagaaga

SEQ ID NO: 427579 - DNA, 33 bp, Homo sapien
gaaactaataaagccagaacaattttaagttta

SEQ ID NO: 427580 - DNA, 33 bp, Homo sapien
gaaactaataaagccataacaattttaagttta

SEQ ID NO: 427581 - DNA, 33 bp, Homo sapien
actgagaacatgaataaaggaaagagctagtac

SEQ ID NO: 427582 - DNA, 33 bp, Homo sapien
actgagaacatgaatataggaaagagctagtac

SEQ ID NO: 427583 - DNA, 33 bp, Homo sapien
cataactggttaatcacctctcaaattttaaga

SEQ ID NO: 427584 - DNA, 33 bp, Homo sapien
cataactggttaatcatctctcaaattttaaga

SEQ ID NO: 427585 - DNA, 33 bp, Homo sapien
ctccccatcctcaaacccaggtaaaatgtttcg

SEQ ID NO: 427586 - DNA, 33 bp, Homo sapien
ctccccatcctcaaacgcaggtaaaatgtttcg

SEQ ID NO: 427587 - DNA, 33 bp, Homo sapien
aacatttcttcccatacctgttggctgtttgca

SEQ ID NO: 427588 - DNA, 33 bp, Homo sapien
aacatttcttcccatatctgttggctgtttgca

SEQ ID NO: 427589 - DNA, 33 bp, Homo sapien
agctgctatctccttaggttatcctgacaaaga

SEQ ID NO: 427590 - DNA, 33 bp, Homo sapien
agctgctatctccttatgttatcctgacaaaga

SEQ ID NO: 427591 - DNA, 33 bp, Homo sapien
tgtcattttaaaatgacgaaaacacaacactcc

SEQ ID NO: 427592 - DNA, 33 bp, Homo sapien
tgtcattttaaaatgatgaaaacacaacactcc

SEQ ID NO: 427593 - DNA, 33 bp, Homo sapien
cacttggtaccagaaacggcatatggtgatatg

SEQ ID NO: 427594 - DNA, 33 bp, Homo sapien
cacttggtaccagaaatggcatatggtgatatg

SEQ ID NO: 427595 - DNA, 33 bp, Homo sapien
gtgactttctggaaccaaaatgcccatactcca

SEQ ID NO: 427596 - DNA, 33 bp, Homo sapien
gtgactttctggaaccgaaatgcccatactcca

SEQ ID NO: 427597 - DNA, 33 bp, Homo sapien
gagtagtagccatctgcatcagttaattcggct

SEQ ID NO: 427598 - DNA, 33 bp, Homo sapien
gagtagtagccatctgtatcagttaattcggct

SEQ ID NO: 427599 - DNA, 33 bp, Homo sapien
ctgcatttagtgtgggaagccatattttaatgt

SEQ ID NO: 427600 - DNA, 33 bp, Homo sapien
ctgcatttagtgtggggagccatattttaatgt

SEQ ID NO: 427601 - DNA, 33 bp, Homo sapien
ctgatttggtctttcacaggtcgcagatctaat

SEQ ID NO: 427602 - DNA, 33 bp, Homo sapien
ctgatttggtctttcagaggtcgcagatctaat

SEQ ID NO: 427603 - DNA, 33 bp, Homo sapien
agcgtgtgtggctgaaccaactgggcaggccca

SEQ ID NO: 427604 - DNA, 33 bp, Homo sapien
agcgtgtgtggctgaagcaactgggcaggccca

SEQ ID NO: 427605 - DNA, 33 bp, Homo sapien
tcttgggtgttggacagtctcattctctccttg

SEQ ID NO: 427606 - DNA, 33 bp, Homo sapien
tcttgggtgttggacattctcattctctccttg

SEQ ID NO: 427607 - DNA, 33 bp, Homo sapien
acaacagaagtttctacgaactttgcacacaca

SEQ ID NO: 427608 - DNA, 33 bp, Homo sapien
acaacagaagtttctaggaactttgcacacaca

SEQ ID NO: 427609 - DNA, 33 bp, Homo sapien
tactcaacttagtgcaacctaagaagcagacac

SEQ ID NO: 427610 - DNA, 33 bp, Homo sapien
tactcaacttagtgcagcctaagaagcagacac

SEQ ID NO: 427611 - DNA, 33 bp, Homo sapien
ggttccagcttagctaagtgacattgagcgggt

SEQ ID NO: 427612 - DNA, 33 bp, Homo sapien
ggttccagcttagctatgtgacattgagcgggt

SEQ ID NO: 427613 - DNA, 33 bp, Homo sapien
agggctgcctccttgaaaagcactgggaaataa

SEQ ID NO: 427614 - DNA, 33 bp, Homo sapien
agggctgcctccttgacaagcactgggaaataa

SEQ ID NO: 427615 - DNA, 33 bp, Homo sapien
ccatgtcaccatttaacacgttaagtctttagc

SEQ ID NO: 427616 - DNA, 33 bp, Homo sapien
ccatgtcaccatttaatacgttaagtctttagc

SEQ ID NO: 427617 - DNA, 33 bp, Homo sapien
cgtgaatgaatcacaaccttatttttcactact

SEQ ID NO: 427618 - DNA, 33 bp, Homo sapien
cgtgaatgaatcacaatcttatttttcactact

SEQ ID NO: 427619 - DNA, 33 bp, Homo sapien
tgcacagaatggtgtgcattggctactggcatc

SEQ ID NO: 427620 - DNA, 33 bp, Homo sapien
tgcacagaatggtgtgtattggctactggcatc

SEQ ID NO: 427621 - DNA, 33 bp, Homo sapien
atcttaccagcatgccagatttattttgagtgt

SEQ ID NO: 427622 - DNA, 33 bp, Homo sapien
atcttaccagcatgccggatttattttgagtgt

SEQ ID NO: 427623 - DNA, 33 bp, Homo sapien
cctagacatagacaaacttgctggcaggcagct

SEQ ID NO: 427624 - DNA, 33 bp, Homo sapien
cctagacatagacaaatttgctggcaggcagct

SEQ ID NO: 427625 - DNA, 33 bp, Homo sapien
ggctgcagttattacactctctctattttcttg

SEQ ID NO: 427626 - DNA, 33 bp, Homo sapien
ggctgcagttattacagtctctctattttcttg

SEQ ID NO: 427627 - DNA, 33 bp, Homo sapien
aagggtttctgagctacgcagtctattgtccct

SEQ ID NO: 427628 - DNA, 33 bp, Homo sapien
aagggtttctgagctatgcagtctattgtccct

SEQ ID NO: 427629 - DNA, 33 bp, Homo sapien
atgggaagtgaagtcaccaaactactactaaaa

SEQ ID NO: 427630 - DNA, 33 bp, Homo sapien
atgggaagtgaagtcatcaaactactactaaaa

SEQ ID NO: 427631 - DNA, 33 bp, Homo sapien
cctttgccactagggaacaaaaaaggccttatt

SEQ ID NO: 427632 - DNA, 33 bp, Homo sapien
cctttgccactagggagcaaaaaaggccttatt

SEQ ID NO: 427633 - DNA, 33 bp, Homo sapien
tgagatcctaaaacaacggcttgcacgatgagg

SEQ ID NO: 427634 - DNA, 33 bp, Homo sapien
tgagatcctaaaacaatggcttgcacgatgagg

SEQ ID NO: 427635 - DNA, 33 bp, Homo sapien
tgccagcatccaatccaagaaccaatgaatcac

SEQ ID NO: 427636 - DNA, 33 bp, Homo sapien
tgccagcatccaatccgagaaccaatgaatcac

SEQ ID NO: 427637 - DNA, 33 bp, Homo sapien
gtgtctctttcaccaacgtaattagaaaagata

SEQ ID NO: 427638 - DNA, 33 bp, Homo sapien
gtgtctctttcaccaatgtaattagaaaagata

SEQ ID NO: 427639 - DNA, 33 bp, Homo sapien
ctcaatgtagtacaaaaaaagatggtgatttct

SEQ ID NO: 427640 - DNA, 33 bp, Homo sapien
ctcaatgtagtacaaacaaagatggtgatttct

SEQ ID NO: 427641 - DNA, 33 bp, Homo sapien
aacaatctttggctaaaattataaatctgagag

SEQ ID NO: 427642 - DNA, 33 bp, Homo sapien
aacaatctttggctaacattataaatctgagag

SEQ ID NO: 427643 - DNA, 33 bp, Homo sapien
gacatacacaaactaaaatgatgatgggaaggt

SEQ ID NO: 427644 - DNA, 33 bp, Homo sapien
gacatacacaaactaagatgatgatgggaaggt

SEQ ID NO: 427645 - DNA, 33 bp, Homo sapien
gtaattccacattacaaagatcacacttctaac

SEQ ID NO: 427646 - DNA, 33 bp, Homo sapien
gtaattccacattacagagatcacacttctaac

SEQ ID NO: 427647 - DNA, 33 bp, Homo sapien
aatatgtatgtaaacaagtggtcaagaaaatga

SEQ ID NO: 427648 - DNA, 33 bp, Homo sapien
aatatgtatgtaaacaggtggtcaagaaaatga

SEQ ID NO: 427649 - DNA, 33 bp, Homo sapien
tttaaacatctcccacagtgccttgtatactgc

SEQ ID NO: 427650 - DNA, 33 bp, Homo sapien
tttaaacatctcccacggtgccttgtatactgc

SEQ ID NO: 427651 - DNA, 33 bp, Homo sapien
ggaccttgagtgataacagtgtgtcaatgtttc

SEQ ID NO: 427652 - DNA, 33 bp, Homo sapien
ggaccttgagtgataatagtgtgtcaatgtttc

SEQ ID NO: 427653 - DNA, 33 bp, Homo sapien
actcttttctctacacacaaattttaacatgga

SEQ ID NO: 427654 - DNA, 33 bp, Homo sapien
actcttttctctacacccaaattttaacatgga

SEQ ID NO: 427655 - DNA, 33 bp, Homo sapien
aagaactccaacttgaaggggtccatgttaaaa

SEQ ID NO: 427656 - DNA, 33 bp, Homo sapien
aagaactccaacttgagggggtccatgttaaaa

SEQ ID NO: 427657 - DNA, 33 bp, Homo sapien
atttgatggtttttgtcaactgagcaagtattt

SEQ ID NO: 427658 - DNA, 33 bp, Homo sapien
atttgatggtttttgttaactgagcaagtattt

SEQ ID NO: 427659 - DNA, 33 bp, Homo sapien
gggctgttcatttcacccgacccatcatgttcc

SEQ ID NO: 427660 - DNA, 33 bp, Homo sapien
gggctgttcatttcacgcgacccatcatgttcc

SEQ ID NO: 427661 - DNA, 33 bp, Homo sapien
atttgaacagttgataagaattttgcaatcaac

SEQ ID NO: 427662 - DNA, 33 bp, Homo sapien
atttgaacagttgatatgaattttgcaatcaac

SEQ ID NO: 427663 - DNA, 33 bp, Homo sapien
ttacagtatcgtaagtcaaaagtgtctgcgttt

SEQ ID NO: 427664 - DNA, 33 bp, Homo sapien
ttacagtatcgtaagtgaaaagtgtctgcgttt

SEQ ID NO: 427665 - DNA, 33 bp, Homo sapien
tctgactcctagactaaagagtgtccaaaacat

SEQ ID NO: 427666 - DNA, 33 bp, Homo sapien
tctgactcctagactagagagtgtccaaaacat

SEQ ID NO: 427667 - DNA, 33 bp, Homo sapien
tcgtcaagtacctgtcaaaacgcaaccctctct

SEQ ID NO: 427668 - DNA, 33 bp, Homo sapien
tcgtcaagtacctgtcgaaacgcaaccctctct

SEQ ID NO: 427669 - DNA, 33 bp, Homo sapien
tcatagacaaaaggaacgcccacaaattcaacc

SEQ ID NO: 427670 - DNA, 33 bp, Homo sapien
tcatagacaaaaggaatgcccacaaattcaacc

SEQ ID NO: 427671 - DNA, 33 bp, Homo sapien
tgcaaacttaggtcacagaagagaggggccagg

SEQ ID NO: 427672 - DNA, 33 bp, Homo sapien
tgcaaacttaggtcacggaagagaggggccagg

SEQ ID NO: 427673 - DNA, 33 bp, Homo sapien
tacgtagtttgaattacagattttcaaatattg

SEQ ID NO: 427674 - DNA, 33 bp, Homo sapien
tacgtagtttgaattagagattttcaaatattg

SEQ ID NO: 427675 - DNA, 33 bp, Homo sapien
aagattctgaaccccccagtcctcctgaattga

SEQ ID NO: 427676 - DNA, 33 bp, Homo sapien
aagattctgaacccccgagtcctcctgaattga

SEQ ID NO: 427677 - DNA, 33 bp, Homo sapien
taaaaggcctgaagcaaagtagactcaacccta

SEQ ID NO: 427678 - DNA, 33 bp, Homo sapien
taaaaggcctgaagcagagtagactcaacccta

SEQ ID NO: 427679 - DNA, 33 bp, Homo sapien
aaaaaaaactctgacccaaaatgatacatacat

SEQ ID NO: 427680 - DNA, 33 bp, Homo sapien
aaaaaaaactctgacctaaaatgatacatacat

SEQ ID NO: 427681 - DNA, 33 bp, Homo sapien
tgctgtcatctctgaaatctgtctccatggcct

SEQ ID NO: 427682 - DNA, 33 bp, Homo sapien
tgctgtcatctctgaactctgtctccatggcct

SEQ ID NO: 427683 - DNA, 33 bp, Homo sapien
gatgccattggaactgcagagcatgggctgaat

SEQ ID NO: 427684 - DNA, 33 bp, Homo sapien
gatgccattggaactggagagcatgggctgaat

SEQ ID NO: 427685 - DNA, 33 bp, Homo sapien
ttgttgagccaggagacgaagagtatggccaag

SEQ ID NO: 427686 - DNA, 33 bp, Homo sapien
ttgttgagccaggagatgaagagtatggccaag

SEQ ID NO: 427687 - DNA, 33 bp, Homo sapien
aagtgctggggaaccaaaggagaaatctgccat

SEQ ID NO: 427688 - DNA, 33 bp, Homo sapien
aagtgctggggaaccagaggagaaatctgccat

SEQ ID NO: 427689 - DNA, 33 bp, Homo sapien
aaatgaatggatacacagagcttacagccaaat

SEQ ID NO: 427690 - DNA, 33 bp, Homo sapien
aaatgaatggatacacggagcttacagccaaat

SEQ ID NO: 427691 - DNA, 33 bp, Homo sapien
ctcttttataaacacacggctccttttataaaa

SEQ ID NO: 427692 - DNA, 33 bp, Homo sapien
ctcttttataaacacatggctccttttataaaa

SEQ ID NO: 427693 - DNA, 33 bp, Homo sapien
gtagttggtgttccatcagttttgctgaactca

SEQ ID NO: 427694 - DNA, 33 bp, Homo sapien
gtagttggtgttccattagttttgctgaactca

SEQ ID NO: 427695 - DNA, 33 bp, Homo sapien
aataaagcaattaaccaatcaccaaatatgttt

SEQ ID NO: 427696 - DNA, 33 bp, Homo sapien
aataaagcaattaacctatcaccaaatatgttt

SEQ ID NO: 427697 - DNA, 33 bp, Homo sapien
agaaaaagggatacgaaaggaaggtgttgcagg

SEQ ID NO: 427698 - DNA, 33 bp, Homo sapien
agaaaaagggatacgagaggaaggtgttgcagg

SEQ ID NO: 427699 - DNA, 33 bp, Homo sapien
atgctgcattctctaaaataagcttatttagta

SEQ ID NO: 427700 - DNA, 33 bp, Homo sapien
atgctgcattctctaatataagcttatttagta

SEQ ID NO: 427701 - DNA, 33 bp, Homo sapien
attaatccctgtgaaacgagtttatctatgtaa

SEQ ID NO: 427702 - DNA, 33 bp, Homo sapien
attaatccctgtgaaatgagtttatctatgtaa

SEQ ID NO: 427703 - DNA, 33 bp, Homo sapien
ttctagctcactaccccgccatcctcagagtat

SEQ ID NO: 427704 - DNA, 33 bp, Homo sapien
ttctagctcactaccctgccatcctcagagtat

SEQ ID NO: 427705 - DNA, 33 bp, Homo sapien
ccatatgagtacatcccgatcaatgaaacggaa

SEQ ID NO: 427706 - DNA, 33 bp, Homo sapien
ccatatgagtacatcctgatcaatgaaacggaa

SEQ ID NO: 427707 - DNA, 33 bp, Homo sapien
gctctggcaaacttaaaacatcttccttgtgct

SEQ ID NO: 427708 - DNA, 33 bp, Homo sapien
gctctggcaaacttaacacatcttccttgtgct

SEQ ID NO: 427709 - DNA, 33 bp, Homo sapien
ttcctgctatattctaacacgtagatcagtgcc

SEQ ID NO: 427710 - DNA, 33 bp, Homo sapien
ttcctgctatattctagcacgtagatcagtgcc

SEQ ID NO: 427711 - DNA, 33 bp, Homo sapien
tgtgttgtgaggctgaacgattcatccctctcc

SEQ ID NO: 427712 - DNA, 33 bp, Homo sapien
tgtgttgtgaggctgagcgattcatccctctcc

SEQ ID NO: 427713 - DNA, 33 bp, Homo sapien
ctgagatgtttctttacagtccacgtcctttcc

SEQ ID NO: 427714 - DNA, 33 bp, Homo sapien
ctgagatgtttctttatagtccacgtcctttcc

SEQ ID NO: 427715 - DNA, 33 bp, Homo sapien
agaatcttagtgtctacattgtgccagacattg

SEQ ID NO: 427716 - DNA, 33 bp, Homo sapien
agaatcttagtgtctatattgtgccagacattg

SEQ ID NO: 427717 - DNA, 33 bp, Homo sapien
ctggatgatgtacataaggatgtgaagcctgga

SEQ ID NO: 427718 - DNA, 33 bp, Homo sapien
ctggatgatgtacatatggatgtgaagcctgga

SEQ ID NO: 427719 - DNA, 33 bp, Homo sapien
tagctaacaccgtgaaagcacagtgaagacatg

SEQ ID NO: 427720 - DNA, 33 bp, Homo sapien
tagctaacaccgtgaaggcacagtgaagacatg

SEQ ID NO: 427721 - DNA, 33 bp, Homo sapien
gggaggaagtgtggaaaggttttcttacttttg

SEQ ID NO: 427722 - DNA, 33 bp, Homo sapien
gggaggaagtgtggaagggttttcttacttttg

SEQ ID NO: 427723 - DNA, 33 bp, Homo sapien
caatggcgttccatgaaaaagtggctagtgcag

SEQ ID NO: 427724 - DNA, 33 bp, Homo sapien
caatggcgttccatgacaaagtggctagtgcag

SEQ ID NO: 427725 - DNA, 33 bp, Homo sapien
aatggttttaaagttgcagtgcatttaatggag

SEQ ID NO: 427726 - DNA, 33 bp, Homo sapien
aatggttttaaagttgtagtgcatttaatggag

SEQ ID NO: 427727 - DNA, 33 bp, Homo sapien
ctgcactcacttataaatcataccatatagaaa

SEQ ID NO: 427728 - DNA, 33 bp, Homo sapien
ctgcactcacttataagtcataccatatagaaa

SEQ ID NO: 427729 - DNA, 33 bp, Homo sapien
ttcaaccagccttctaaacaactctaatggcag

SEQ ID NO: 427730 - DNA, 33 bp, Homo sapien
ttcaaccagccttctagacaactctaatggcag

SEQ ID NO: 427731 - DNA, 33 bp, Homo sapien
gcccatcaaggcactgaaaaatagggcagcctt

SEQ ID NO: 427732 - DNA, 33 bp, Homo sapien
gcccatcaaggcactgcaaaatagggcagcctt

SEQ ID NO: 427733 - DNA, 33 bp, Homo sapien
ctagtctttgacttcaagaaacggatataacct

SEQ ID NO: 427734 - DNA, 33 bp, Homo sapien
ctagtctttgacttcaggaaacggatataacct

SEQ ID NO: 427735 - DNA, 33 bp, Homo sapien
aggtaaagtgtacagaatctaataaagggttgg

SEQ ID NO: 427736 - DNA, 33 bp, Homo sapien
aggtaaagtgtacagagtctaataaagggttgg

SEQ ID NO: 427737 - DNA, 33 bp, Homo sapien
aaatcactcaactgaaaacactttgaatatcac

SEQ ID NO: 427738 - DNA, 33 bp, Homo sapien
aaatcactcaactgaagacactttgaatatcac

SEQ ID NO: 427739 - DNA, 33 bp, Homo sapien
tggaaccacatggtacacttcataaaggaaaag

SEQ ID NO: 427740 - DNA, 33 bp, Homo sapien
tggaaccacatggtacgcttcataaaggaaaag

SEQ ID NO: 427741 - DNA, 33 bp, Homo sapien
gagtgctttgaaggaaaaggaatatggggttct

SEQ ID NO: 427742 - DNA, 33 bp, Homo sapien
gagtgctttgaaggaagaggaatatggggttct

SEQ ID NO: 427743 - DNA, 33 bp, Homo sapien
gacattcatcgaataactgaacaactgacagag

SEQ ID NO: 427744 - DNA, 33 bp, Homo sapien
gacattcatcgaataattgaacaactgacagag

SEQ ID NO: 427745 - DNA, 33 bp, Homo sapien
tgaaatctctaagaaagagttcaatcaatcaat

SEQ ID NO: 427746 - DNA, 33 bp, Homo sapien
tgaaatctctaagaaatagttcaatcaatcaat

SEQ ID NO: 427747 - DNA, 33 bp, Homo sapien
tttttgttgttcttgacctttgggggtgtgtgt

SEQ ID NO: 427748 - DNA, 33 bp, Homo sapien
tttttgttgttcttgatctttgggggtgtgtgt

SEQ ID NO: 427749 - DNA, 33 bp, Homo sapien
gccatagtggtttacaatgcagctctttaggaa

SEQ ID NO: 427750 - DNA, 33 bp, Homo sapien
gccatagtggtttacagtgcagctctttaggaa

SEQ ID NO: 427751 - DNA, 33 bp, Homo sapien
cttcattctttggacaacctattcgtattctat

SEQ ID NO: 427752 - DNA, 33 bp, Homo sapien
cttcattctttggacaccctattcgtattctat

SEQ ID NO: 427753 - DNA, 33 bp, Homo sapien
tgtggtgcggtgaaaaaaacatcaggccaaagt

SEQ ID NO: 427754 - DNA, 33 bp, Homo sapien
tgtggtgcggtgaaaagaacatcaggccaaagt

SEQ ID NO: 427755 - DNA, 33 bp, Homo sapien
ccagttaagtgactgaataatactacagatgag

SEQ ID NO: 427756 - DNA, 33 bp, Homo sapien
ccagttaagtgactgattaatactacagatgag

SEQ ID NO: 427757 - DNA, 33 bp, Homo sapien
gaatcacggaagtgacaggagaaacacgctgtg

SEQ ID NO: 427758 - DNA, 33 bp, Homo sapien
gaatcacggaagtgacgggagaaacacgctgtg

SEQ ID NO: 427759 - DNA, 33 bp, Homo sapien
gatgcaaagtgcatgacagagtagagagctaca

SEQ ID NO: 427760 - DNA, 33 bp, Homo sapien
gatgcaaagtgcatgagagagtagagagctaca

SEQ ID NO: 427761 - DNA, 33 bp, Homo sapien
gtgtgctccagagataaccttcttgaccaaaac

SEQ ID NO: 427762 - DNA, 33 bp, Homo sapien
gtgtgctccagagatacccttcttgaccaaaac

SEQ ID NO: 427763 - DNA, 33 bp, Homo sapien
tccatgtgacccagtcagaacgaggcataagga

SEQ ID NO: 427764 - DNA, 33 bp, Homo sapien
tccatgtgacccagtcggaacgaggcataagga

SEQ ID NO: 427765 - DNA, 33 bp, Homo sapien
tcattgagtgcccacccgatgagggtccatgta

SEQ ID NO: 427766 - DNA, 33 bp, Homo sapien
tcattgagtgcccaccggatgagggtccatgta

SEQ ID NO: 427767 - DNA, 33 bp, Homo sapien
tcagcgtcagccacagacaaaagtgtgaaataa

SEQ ID NO: 427768 - DNA, 33 bp, Homo sapien
tcagcgtcagccacaggcaaaagtgtgaaataa

SEQ ID NO: 427769 - DNA, 33 bp, Homo sapien
cctgagagctccaacaagagagaagtgaggccg

SEQ ID NO: 427770 - DNA, 33 bp, Homo sapien
cctgagagctccaacacgagagaagtgaggccg

SEQ ID NO: 427771 - DNA, 33 bp, Homo sapien
actgcaacctagatacaaaatttcactaattaa

SEQ ID NO: 427772 - DNA, 33 bp, Homo sapien
actgcaacctagatacgaaatttcactaattaa

SEQ ID NO: 427773 - DNA, 33 bp, Homo sapien
ttcagaatgggtagacggagtagtaatgagctt

SEQ ID NO: 427774 - DNA, 33 bp, Homo sapien
ttcagaatgggtagactgagtagtaatgagctt

SEQ ID NO: 427775 - DNA, 33 bp, Homo sapien
atcagaatgcttgaaacttgtaatgagagctgg

SEQ ID NO: 427776 - DNA, 33 bp, Homo sapien
atcagaatgcttgaaatttgtaatgagagctgg

SEQ ID NO: 427777 - DNA, 33 bp, Homo sapien
atattttaagcaaaaaaatagcctgctcatacc

SEQ ID NO: 427778 - DNA, 33 bp, Homo sapien
atattttaagcaaaaagatagcctgctcatacc

SEQ ID NO: 427779 - DNA, 33 bp, Homo sapien
cagatggtcacttcatcagcataaacactaagc

SEQ ID NO: 427780 - DNA, 33 bp, Homo sapien
cagatggtcacttcattagcataaacactaagc

SEQ ID NO: 427781 - DNA, 33 bp, Homo sapien
cagcacatggagatcactcaggggagaccgctt

SEQ ID NO: 427782 - DNA, 33 bp, Homo sapien
cagcacatggagatcagtcaggggagaccgctt

SEQ ID NO: 427783 - DNA, 33 bp, Homo sapien
ttccatataaattacacctcagaaaagttaatt

SEQ ID NO: 427784 - DNA, 33 bp, Homo sapien
ttccatataaattacatctcagaaaagttaatt

SEQ ID NO: 427785 - DNA, 33 bp, Homo sapien
aaaggaagccagacaaaagaaagcaattacaaa

SEQ ID NO: 427786 - DNA, 33 bp, Homo sapien
aaaggaagccagacaagagaaagcaattacaaa

SEQ ID NO: 427787 - DNA, 33 bp, Homo sapien
acctaaaatgtgaagggaagagtttgcaaggct

SEQ ID NO: 427788 - DNA, 33 bp, Homo sapien
acctaaaatgtgaaggtaagagtttgcaaggct

SEQ ID NO: 427789 - DNA, 33 bp, Homo sapien
aggagacacagcatcacgtgaaaacctaaaatg

SEQ ID NO: 427790 - DNA, 33 bp, Homo sapien
aggagacacagcatcatgtgaaaacctaaaatg

SEQ ID NO: 427791 - DNA, 33 bp, Homo sapien
caggattcagaagcaaagtgagattggcccatg

SEQ ID NO: 427792 - DNA, 33 bp, Homo sapien
caggattcagaagcaaggtgagattggcccatg

SEQ ID NO: 427793 - DNA, 33 bp, Homo sapien
agacaaggcacagacacagaggagaagccgtat

SEQ ID NO: 427794 - DNA, 33 bp, Homo sapien
agacaaggcacagacagagaggagaagccgtat

SEQ ID NO: 427795 - DNA, 33 bp, Homo sapien
tcattataaaacttaaacctttagccttcactg

SEQ ID NO: 427796 - DNA, 33 bp, Homo sapien
tcattataaaacttaagcctttagccttcactg

SEQ ID NO: 427797 - DNA, 33 bp, Homo sapien
ttggtaatattcccatcaagtgtcgtatgtact

SEQ ID NO: 427798 - DNA, 33 bp, Homo sapien
ttggtaatattcccattaagtgtcgtatgtact

SEQ ID NO: 427799 - DNA, 33 bp, Homo sapien
ggcaaagtcacacttacagggtgcaaaaaggaa

SEQ ID NO: 427800 - DNA, 33 bp, Homo sapien
ggcaaagtcacacttatagggtgcaaaaaggaa

SEQ ID NO: 427801 - DNA, 33 bp, Homo sapien
tttaatttgcatttacgcaatgattagtcatgt

SEQ ID NO: 427802 - DNA, 33 bp, Homo sapien
tttaatttgcatttactcaatgattagtcatgt

SEQ ID NO: 427803 - DNA, 33 bp, Homo sapien
tttttttccctagctcaattttcaaatgttttt

SEQ ID NO: 427804 - DNA, 33 bp, Homo sapien
tttttttccctagctccattttcaaatgttttt

SEQ ID NO: 427805 - DNA, 33 bp, Homo sapien
aatatgaagagcgtaccgtaatgtggcttaaac

SEQ ID NO: 427806 - DNA, 33 bp, Homo sapien
aatatgaagagcgtactgtaatgtggcttaaac

SEQ ID NO: 427807 - DNA, 33 bp, Homo sapien
aatcaatgaaaaaatgacattctatactatgag

SEQ ID NO: 427808 - DNA, 33 bp, Homo sapien
aatcaatgaaaaaatggcattctatactatgag

SEQ ID NO: 427809 - DNA, 33 bp, Homo sapien
ccagcattgggagagcaccttccacgcttagtg

SEQ ID NO: 427810 - DNA, 33 bp, Homo sapien
ccagcattgggagagcgccttccacgcttagtg

SEQ ID NO: 427811 - DNA, 33 bp, Homo sapien
acaataccaagggttacagagaaagcagatcag

SEQ ID NO: 427812 - DNA, 33 bp, Homo sapien
acaataccaagggttatagagaaagcagatcag

SEQ ID NO: 427813 - DNA, 33 bp, Homo sapien
ccctaaatcctttcaaccacattgatctgtgat

SEQ ID NO: 427814 - DNA, 33 bp, Homo sapien
ccctaaatcctttcaagcacattgatctgtgat

SEQ ID NO: 427815 - DNA, 33 bp, Homo sapien
agcagtcattttcaccacttttcaagaaaacaa

SEQ ID NO: 427816 - DNA, 33 bp, Homo sapien
agcagtcattttcaccgcttttcaagaaaacaa

SEQ ID NO: 427817 - DNA, 33 bp, Homo sapien
cccatcagaataactacattgcacctgaaacca

SEQ ID NO: 427818 - DNA, 33 bp, Homo sapien
cccatcagaataactatattgcacctgaaacca

SEQ ID NO: 427819 - DNA, 33 bp, Homo sapien
tgcagagtgttgccaccaagaaatggctgcctg

SEQ ID NO: 427820 - DNA, 33 bp, Homo sapien
tgcagagtgttgccactaagaaatggctgcctg

SEQ ID NO: 427821 - DNA, 33 bp, Homo sapien
acaactgtgctactcaaattctatttacaaccc

SEQ ID NO: 427822 - DNA, 33 bp, Homo sapien
acaactgtgctactcagattctatttacaaccc

SEQ ID NO: 427823 - DNA, 33 bp, Homo sapien
ttatcaaggaccaaaaaggcctgaagtctaagc

SEQ ID NO: 427824 - DNA, 33 bp, Homo sapien
ttatcaaggaccaaaacggcctgaagtctaagc

SEQ ID NO: 427825 - DNA, 33 bp, Homo sapien
ggctaaaaacccaataccacacttcatcaggaa

SEQ ID NO: 427826 - DNA, 33 bp, Homo sapien
ggctaaaaacccaatatcacacttcatcaggaa

SEQ ID NO: 427827 - DNA, 33 bp, Homo sapien
tttttatttaagaggccgattgcacttttcaaa

SEQ ID NO: 427828 - DNA, 33 bp, Homo sapien
tttttatttaagaggctgattgcacttttcaaa

SEQ ID NO: 427829 - DNA, 33 bp, Homo sapien
agaatggcatttgttacaaaacacaccagccca

SEQ ID NO: 427830 - DNA, 33 bp, Homo sapien
agaatggcatttgttataaaacacaccagccca

SEQ ID NO: 427831 - DNA, 33 bp, Homo sapien
ttcttgttcaaaaacaatgctgacttttcatca

SEQ ID NO: 427832 - DNA, 33 bp, Homo sapien
ttcttgttcaaaaacagtgctgacttttcatca

SEQ ID NO: 427833 - DNA, 33 bp, Homo sapien
ggttctgatttaggcaggaatacctaagtgact

SEQ ID NO: 427834 - DNA, 33 bp, Homo sapien
ggttctgatttaggcatgaatacctaagtgact

SEQ ID NO: 427835 - DNA, 33 bp, Homo sapien
caaaaaaggttcaaggaaagagttgtattttta

SEQ ID NO: 427836 - DNA, 33 bp, Homo sapien
caaaaaaggttcaagggaagagttgtattttta

SEQ ID NO: 427837 - DNA, 33 bp, Homo sapien
tacattgtggagtagccaaattgagctaattaa

SEQ ID NO: 427838 - DNA, 33 bp, Homo sapien
tacattgtggagtagctaaattgagctaattaa

SEQ ID NO: 427839 - DNA, 33 bp, Homo sapien
tctgtaaaacaacaccagattttaagggatttt

SEQ ID NO: 427840 - DNA, 33 bp, Homo sapien
tctgtaaaacaacaccggattttaagggatttt

SEQ ID NO: 427841 - DNA, 33 bp, Homo sapien
agaataaaagtgcaaactcattgagatcaggtt

SEQ ID NO: 427842 - DNA, 33 bp, Homo sapien
agaataaaagtgcaaattcattgagatcaggtt

SEQ ID NO: 427843 - DNA, 33 bp, Homo sapien
aaacactctttgtcaaatacttaaattgcagcc

SEQ ID NO: 427844 - DNA, 33 bp, Homo sapien
aaacactctttgtcaactacttaaattgcagcc

SEQ ID NO: 427845 - DNA, 33 bp, Homo sapien
ggagcatcagagtccacgtttgtgtcacactca

SEQ ID NO: 427846 - DNA, 33 bp, Homo sapien
ggagcatcagagtccatgtttgtgtcacactca

SEQ ID NO: 427847 - DNA, 33 bp, Homo sapien
cctggaccaactcagcaaacttaacattaccta

SEQ ID NO: 427848 - DNA, 33 bp, Homo sapien
cctggaccaactcagccaacttaacattaccta

SEQ ID NO: 427849 - DNA, 33 bp, Homo sapien
aagcggttttggaagaacctgggaattaggtgg

SEQ ID NO: 427850 - DNA, 33 bp, Homo sapien
aagcggttttggaagaccctgggaattaggtgg

SEQ ID NO: 427851 - DNA, 33 bp, Homo sapien
tcatgctgtgtctttaacggtctgcacaaactt

SEQ ID NO: 427852 - DNA, 33 bp, Homo sapien
tcatgctgtgtctttatcggtctgcacaaactt

SEQ ID NO: 427853 - DNA, 33 bp, Homo sapien
ggagagatctttttcaaatacccaaagaacacc

SEQ ID NO: 427854 - DNA, 33 bp, Homo sapien
ggagagatctttttcagatacccaaagaacacc

SEQ ID NO: 427855 - DNA, 33 bp, Homo sapien
gcatacccaaaacaacagagaggcagagcacag

SEQ ID NO: 427856 - DNA, 33 bp, Homo sapien
gcatacccaaaacaacggagaggcagagcacag

SEQ ID NO: 427857 - DNA, 33 bp, Homo sapien
taatattttggggagaacacattccagttagtg

SEQ ID NO: 427858 - DNA, 33 bp, Homo sapien
taatattttggggagatcacattccagttagtg

SEQ ID NO: 427859 - DNA, 33 bp, Homo sapien
ttatcatataacaagaagtctaggctgatgact

SEQ ID NO: 427860 - DNA, 33 bp, Homo sapien
ttatcatataacaagaggtctaggctgatgact

SEQ ID NO: 427861 - DNA, 33 bp, Homo sapien
gtgccccaaagagaaccgggctatgcattgtct

SEQ ID NO: 427862 - DNA, 33 bp, Homo sapien
gtgccccaaagagaacggggctatgcattgtct

SEQ ID NO: 427863 - DNA, 33 bp, Homo sapien
aatctctgggtttaaggcaacattaagaactct

SEQ ID NO: 427864 - DNA, 33 bp, Homo sapien
aatctctgggtttaagtcaacattaagaactct

SEQ ID NO: 427865 - DNA, 33 bp, Homo sapien
tttactgcaactgacaagtaattagtaaaatat

SEQ ID NO: 427866 - DNA, 33 bp, Homo sapien
tttactgcaactgacaggtaattagtaaaatat

SEQ ID NO: 427867 - DNA, 33 bp, Homo sapien
acctggatccaagtgacagttggaatctaactg

SEQ ID NO: 427868 - DNA, 33 bp, Homo sapien
acctggatccaagtgagagttggaatctaactg

SEQ ID NO: 427869 - DNA, 33 bp, Homo sapien
ttgtatagtgttacgaacttttgggggaggata

SEQ ID NO: 427870 - DNA, 33 bp, Homo sapien
ttgtatagtgttacgatcttttgggggaggata

SEQ ID NO: 427871 - DNA, 33 bp, Homo sapien
aatagtttgggctcccaaattccattgtagagt

SEQ ID NO: 427872 - DNA, 33 bp, Homo sapien
aatagtttgggctcccgaattccattgtagagt

SEQ ID NO: 427873 - DNA, 33 bp, Homo sapien
tggcctgtgatggcaacgggagtagggaacact

SEQ ID NO: 427874 - DNA, 33 bp, Homo sapien
tggcctgtgatggcaatgggagtagggaacact

SEQ ID NO: 427875 - DNA, 33 bp, Homo sapien
agggtcagcagtttgaaatctacctggaacaca

SEQ ID NO: 427876 - DNA, 33 bp, Homo sapien
agggtcagcagtttgagatctacctggaacaca

SEQ ID NO: 427877 - DNA, 33 bp, Homo sapien
cctccatgatgaggaaggacactgtttttgaga

SEQ ID NO: 427878 - DNA, 33 bp, Homo sapien
cctccatgatgaggaatgacactgtttttgaga

SEQ ID NO: 427879 - DNA, 33 bp, Homo sapien
gatattgtgagtaataccatcttcccttcttga

SEQ ID NO: 427880 - DNA, 33 bp, Homo sapien
gatattgtgagtaatatcatcttcccttcttga

SEQ ID NO: 427881 - DNA, 33 bp, Homo sapien
tgacccctataattggaagaggtgatctatgat

SEQ ID NO: 427882 - DNA, 33 bp, Homo sapien
tgacccctataattggcagaggtgatctatgat

SEQ ID NO: 427883 - DNA, 33 bp, Homo sapien
taattttgtacaattcacttcccccactggacc

SEQ ID NO: 427884 - DNA, 33 bp, Homo sapien
taattttgtacaattcgcttcccccactggacc

SEQ ID NO: 427885 - DNA, 33 bp, Homo sapien
tttatttatctgtaaacttgcaaacaaaagagt

SEQ ID NO: 427886 - DNA, 33 bp, Homo sapien
tttatttatctgtaaatttgcaaacaaaagagt

SEQ ID NO: 427887 - DNA, 33 bp, Homo sapien
aagtcaagggttgagaacaagttattaatttag

SEQ ID NO: 427888 - DNA, 33 bp, Homo sapien
aagtcaagggttgagagcaagttattaatttag

SEQ ID NO: 427889 - DNA, 33 bp, Homo sapien
ttctgtcttcctatacacactcttcctttggaa

SEQ ID NO: 427890 - DNA, 33 bp, Homo sapien
ttctgtcttcctatactcactcttcctttggaa

SEQ ID NO: 427891 - DNA, 33 bp, Homo sapien
ggtcagagtgaatagaacactaacaaaactaag

SEQ ID NO: 427892 - DNA, 33 bp, Homo sapien
ggtcagagtgaatagagcactaacaaaactaag

SEQ ID NO: 427893 - DNA, 33 bp, Homo sapien
gcaatgctcttttacactgagatgttgatggac

SEQ ID NO: 427894 - DNA, 33 bp, Homo sapien
gcaatgctcttttacattgagatgttgatggac

SEQ ID NO: 427895 - DNA, 33 bp, Homo sapien
cgctcaacagggaccccggagtatatgtatgct

SEQ ID NO: 427896 - DNA, 33 bp, Homo sapien
cgctcaacagggaccctggagtatatgtatgct

SEQ ID NO: 427897 - DNA, 33 bp, Homo sapien
ttcatcttagtgaggcaaattagttcgtctaaa

SEQ ID NO: 427898 - DNA, 33 bp, Homo sapien
ttcatcttagtgaggcgaattagttcgtctaaa

SEQ ID NO: 427899 - DNA, 33 bp, Homo sapien
aatggagtggaaatccaataagggtgataccag

SEQ ID NO: 427900 - DNA, 33 bp, Homo sapien
aatggagtggaaatcctataagggtgataccag

SEQ ID NO: 427901 - DNA, 33 bp, Homo sapien
agacagagcaatactcaaacagcaaagaggaag

SEQ ID NO: 427902 - DNA, 33 bp, Homo sapien
agacagagcaatactcgaacagcaaagaggaag

SEQ ID NO: 427903 - DNA, 33 bp, Homo sapien
aagagacaatgtcatgaaaaaggggagaacaga

SEQ ID NO: 427904 - DNA, 33 bp, Homo sapien
aagagacaatgtcatggaaaaggggagaacaga

SEQ ID NO: 427905 - DNA, 33 bp, Homo sapien
ttttttttttgcagtgaagttataaacaatgaa

SEQ ID NO: 427906 - DNA, 33 bp, Homo sapien
ttttttttttgcagtgtagttataaacaatgaa

SEQ ID NO: 427907 - DNA, 33 bp, Homo sapien
gcaaaataggtaactacaactccagaagaagat

SEQ ID NO: 427908 - DNA, 33 bp, Homo sapien
gcaaaataggtaactagaactccagaagaagat

SEQ ID NO: 427909 - DNA, 33 bp, Homo sapien
aacagtaaatggttgcactgaacttaaaggtgg

SEQ ID NO: 427910 - DNA, 33 bp, Homo sapien
aacagtaaatggttgcgctgaacttaaaggtgg

SEQ ID NO: 427911 - DNA, 33 bp, Homo sapien
ttccctaaacattgtaaacaagtaaaggtgagt

SEQ ID NO: 427912 - DNA, 33 bp, Homo sapien
ttccctaaacattgtacacaagtaaaggtgagt

SEQ ID NO: 427913 - DNA, 33 bp, Homo sapien
ttgacatgaaggactcactcctctgccatttcc

SEQ ID NO: 427914 - DNA, 33 bp, Homo sapien
ttgacatgaaggactcgctcctctgccatttcc

SEQ ID NO: 427915 - DNA, 33 bp, Homo sapien
tttctaaatagtttgaccttgatactttagtgt

SEQ ID NO: 427916 - DNA, 33 bp, Homo sapien
tttctaaatagtttgatcttgatactttagtgt

SEQ ID NO: 427917 - DNA, 33 bp, Homo sapien; identical to SEQ ID NO: 427915

SEQ ID NO: 427918 - DNA, 33 bp, Homo sapien; identical to SEQ ID NO: 427916

SEQ ID NO: 427919 - DNA, 33 bp, Homo sapien
gtcagtgttatcattacatttcttggtcatcca

SEQ ID NO: 427920 - DNA, 33 bp, Homo sapien
gtcagtgttatcattatatttcttggtcatcca

SEQ ID NO: 427921 - DNA, 33 bp, Homo sapien; identical to SEQ ID NO: 427919

SEQ ID NO: 427922 - DNA, 33 bp, Homo sapien; identical to SEQ ID NO: 427920

SEQ ID NO: 427923 - DNA, 33 bp, Homo sapien
actgtgggcaattttaagcacccaaccatggta

SEQ ID NO: 427924 - DNA, 33 bp, Homo sapien
actgtgggcaattttaggcacccaaccatggta

SEQ ID NO: 427925 - DNA, 33 bp, Homo sapien; identical to SEQ ID NO: 427923

SEQ ID NO: 427926 - DNA, 33 bp, Homo sapien; identical to SEQ ID NO: 427924

SEQ ID NO: 427927 - DNA, 33 bp, Homo sapien
gcttattccagtctctcaaggggaacacagaca

SEQ ID NO: 427928 - DNA, 33 bp, Homo sapien
gcttattccagtctctgaaggggaacacagaca

SEQ ID NO: 427929 - DNA, 33 bp, Homo sapien
gtttttttgcaattttaaaaagcgtatctgcta

SEQ ID NO: 427930 - DNA, 33 bp, Homo sapien
gtttttttgcaatttttaaaagcgtatctgcta

SEQ ID NO: 427931 - DNA, 33 bp, Homo sapien
agaatgaaacaacatacctacgtagctagcaag

SEQ ID NO: 427932 - DNA, 33 bp, Homo sapien
agaatgaaacaacatatctacgtagctagcaag

SEQ ID NO: 427933 - DNA, 33 bp, Homo sapien
aacacaagtttttagaacacactgcatcagtga

SEQ ID NO: 427934 - DNA, 33 bp, Homo sapien
aacacaagtttttagagcacactgcatcagtga

SEQ ID NO: 427935 - DNA, 33 bp, Homo sapien
aaatacaagagaaccacgtaataaaaatgcaac

SEQ ID NO: 427936 - DNA, 33 bp, Homo sapien
aaatacaagagaaccatgtaataaaaatgcaac

SEQ ID NO: 427937 - DNA, 33 bp, Homo sapien
ttgctcttagaacaaacggaagttctaatcatt

SEQ ID NO: 427938 - DNA, 33 bp, Homo sapien
ttgctcttagaacaaatggaagttctaatcatt

SEQ ID NO: 427939 - DNA, 33 bp, Homo sapien
agagaatctaaaaataacatcgatttgaagtaa

SEQ ID NO: 427940 - DNA, 33 bp, Homo sapien
agagaatctaaaaatagcatcgatttgaagtaa

SEQ ID NO: 427941 - DNA, 33 bp, Homo sapien
atagaaagaagtccacaaattccaatgaacttg

SEQ ID NO: 427942 - DNA, 33 bp, Homo sapien
atagaaagaagtccaccaattccaatgaacttg

SEQ ID NO: 427943 - DNA, 33 bp, Homo sapien
gatcattagttgtttaacctcatagtgtcctag

SEQ ID NO: 427944 - DNA, 33 bp, Homo sapien
gatcattagttgtttatcctcatagtgtcctag

SEQ ID NO: 427945 - DNA, 33 bp, Homo sapien
atttcagagccctttacgcacaacattggcaga

SEQ ID NO: 427946 - DNA, 33 bp, Homo sapien
atttcagagccctttatgcacaacattggcaga

SEQ ID NO: 427947 - DNA, 33 bp, Homo sapien
atatcattattgagaaattccctagttgcttct

SEQ ID NO: 427948 - DNA, 33 bp, Homo sapien
atatcattattgagaatttccctagttgcttct

SEQ ID NO: 427949 - DNA, 33 bp, Homo sapien
cctttggtaacatcaaacctttggaaaagttgg

SEQ ID NO: 427950 - DNA, 33 bp, Homo sapien
cctttggtaacatcaaccctttggaaaagttgg

SEQ ID NO: 427951 - DNA, 33 bp, Homo sapien
ataaattgaggcttaagctaaggaaactggatg

SEQ ID NO: 427952 - DNA, 33 bp, Homo sapien
ataaattgaggcttaatctaaggaaactggatg

SEQ ID NO: 427953 - DNA, 33 bp, Homo sapien
taggctatatcttgcacgttattgactcctatt

SEQ ID NO: 427954 - DNA, 33 bp, Homo sapien
taggctatatcttgcatgttattgactcctatt

SEQ ID NO: 427955 - DNA, 33 bp, Homo sapien
aacattttaagaggacactgaacattttcctag

SEQ ID NO: 427956 - DNA, 33 bp, Homo sapien
aacattttaagaggacgctgaacattttcctag

SEQ ID NO: 427957 - DNA, 33 bp, Homo sapien
gatctgcactggccaacgtttccaattgtcccc

SEQ ID NO: 427958 - DNA, 33 bp, Homo sapien
gatctgcactggccaatgtttccaattgtcccc

SEQ ID NO: 427959 - DNA, 33 bp, Homo sapien
ttgttctcagcttaaacctggagtcatccttta

SEQ ID NO: 427960 - DNA, 33 bp, Homo sapien
ttgttctcagcttaaatctggagtcatccttta

SEQ ID NO: 427961 - DNA, 33 bp, Homo sapien
ggatgtggaaggatacaaaaacagagataaagg

SEQ ID NO: 427962 - DNA, 33 bp, Homo sapien
ggatgtggaaggatacgaaaacagagataaagg

SEQ ID NO: 427963 - DNA, 33 bp, Homo sapien
tactggatcacgtctaagaaaatttaaatatgc

SEQ ID NO: 427964 - DNA, 33 bp, Homo sapien
tactggatcacgtctaggaaaatttaaatatgc

SEQ ID NO: 427965 - DNA, 33 bp, Homo sapien
tttcagttaaataatcagacaatgtatatgatt

SEQ ID NO: 427966 - DNA, 33 bp, Homo sapien
tttcagttaaataatcggacaatgtatatgatt

SEQ ID NO: 427967 - DNA, 33 bp, Homo sapien
ggctttaaaacctaagcagattttggagctaga

SEQ ID NO: 427968 - DNA, 33 bp, Homo sapien
ggctttaaaacctaagtagattttggagctaga

SEQ ID NO: 427969 - DNA, 33 bp, Homo sapien
ctggtcattagagaaactgggactataattatt

SEQ ID NO: 427970 - DNA, 33 bp, Homo sapien
ctggtcattagagaaattgggactataattatt

SEQ ID NO: 427971 - DNA, 33 bp, Homo sapien
aagggagagcattatgacaaatacctagtgcat

SEQ ID NO: 427972 - DNA, 33 bp, Homo sapien
aagggagagcattatgtcaaatacctagtgcat

SEQ ID NO: 427973 - DNA, 33 bp, Homo sapien
taggagcccatagaaaatagataaccccaggaa

SEQ ID NO: 427974 - DNA, 33 bp, Homo sapien
taggagcccatagaaagtagataaccccaggaa

SEQ ID NO: 427975 - DNA, 33 bp, Homo sapien
tagttgatttgcagggccagacctaaaacccag

SEQ ID NO: 427976 - DNA, 33 bp, Homo sapien
tagttgatttgcagggtcagacctaaaacccag

SEQ ID NO: 427977 - DNA, 33 bp, Homo sapien
ccacaatgtttcaggaataagatacttgaaaga

SEQ ID NO: 427978 - DNA, 33 bp, Homo sapien
ccacaatgtttcaggagtaagatacttgaaaga

SEQ ID NO: 427979 - DNA, 33 bp, Homo sapien
ttatctgaggacaaaaccaactcacttcaagaa

SEQ ID NO: 427980 - DNA, 33 bp, Homo sapien
ttatctgaggacaaaatcaactcacttcaagaa

SEQ ID NO: 427981 - DNA, 33 bp, Homo sapien
acataaaggcaccaaaacatccacaaatgttaa

SEQ ID NO: 427982 - DNA, 33 bp, Homo sapien
acataaaggcaccaaatcatccacaaatgttaa

SEQ ID NO: 427983 - DNA, 33 bp, Homo sapien
caatcatagttttcaaaattactctatctctct

SEQ ID NO: 427984 - DNA, 33 bp, Homo sapien
caatcatagttttcaagattactctatctctct

SEQ ID NO: 427985 - DNA, 33 bp, Homo sapien
gagaatcaagaaataaagttgcatgcctacagc

SEQ ID NO: 427986 - DNA, 33 bp, Homo sapien
gagaatcaagaaataaggttgcatgcctacagc

SEQ ID NO: 427987 - DNA, 33 bp, Homo sapien
aatttgtaaaccaatacctattctgactggtgt

SEQ ID NO: 427988 - DNA, 33 bp, Homo sapien
aatttgtaaaccaatagctattctgactggtgt

SEQ ID NO: 427989 - DNA, 33 bp, Homo sapien
aagtcaaattgaataccattttacacataaaac

SEQ ID NO: 427990 - DNA, 33 bp, Homo sapien
aagtcaaattgaatacgattttacacataaaac

SEQ ID NO: 427991 - DNA, 33 bp, Homo sapien
tccttgtttagggtaaatgtaagtaagcatttt

SEQ ID NO: 427992 - DNA, 33 bp, Homo sapien
tccttgtttagggtaactgtaagtaagcatttt

SEQ ID NO: 427993 - DNA, 33 bp, Homo sapien
aatgaactgaacaggcaaccaaagccagggaac

SEQ ID NO: 427994 - DNA, 33 bp, Homo sapien
aatgaactgaacaggcgaccaaagccagggaac

SEQ ID NO: 427995 - DNA, 33 bp, Homo sapien
atacccaagcagtcacactatacaatgaactga

SEQ ID NO: 427996 - DNA, 33 bp, Homo sapien
atacccaagcagtcactctatacaatgaactga

SEQ ID NO: 427997 - DNA, 33 bp, Homo sapien
ccaattttataattcaccaggagcccctgtcag

SEQ ID NO: 427998 - DNA, 33 bp, Homo sapien
ccaattttataattcagcaggagcccctgtcag

SEQ ID NO: 427999 - DNA, 33 bp, Homo sapien
tattcctgccacttgaaaaaaggtttgttttgc

SEQ ID NO: 428000 - DNA, 33 bp, Homo sapien
tattcctgccacttgacaaaaggtttgttttgc

SEQ ID NO: 428001 - DNA, 33 bp, Homo sapien
tgccagcaatattgaaaaatgcacggtttcatc

SEQ ID NO: 428002 - DNA, 33 bp, Homo sapien
tgccagcaatattgaagaatgcacggtttcatc

SEQ ID NO: 428003 - DNA, 33 bp, Homo sapien
acttcctcatggtttacgtgaggagacgcatct

SEQ ID NO: 428004 - DNA, 33 bp, Homo sapien
acttcctcatggtttaggtgaggagacgcatct

SEQ ID NO: 428005 - DNA, 33 bp, Homo sapien
ttccaggttctggtgaaacgcaactccatcaac

SEQ ID NO: 428006 - DNA, 33 bp, Homo sapien
ttccaggttctggtgagacgcaactccatcaac

SEQ ID NO: 428007 - DNA, 33 bp, Homo sapien
aacttccttttttaacagctacaagttcttgct

SEQ ID NO: 428008 - DNA, 33 bp, Homo sapien
aacttccttttttaacggctacaagttcttgct

SEQ ID NO: 428009 - DNA, 33 bp, Homo sapien
ctgatctagctgttgaccacctcgttaatttta

SEQ ID NO: 428010 - DNA, 33 bp, Homo sapien
ctgatctagctgttgatcacctcgttaatttta

SEQ ID NO: 428011 - DNA, 33 bp, Homo sapien
ggaaaacaatcaaaaaatggcttatgaactaga

SEQ ID NO: 428012 - DNA, 33 bp, Homo sapien
ggaaaacaatcaaaaagtggcttatgaactaga

SEQ ID NO: 428013 - DNA, 33 bp, Homo sapien
gtcttaatataagctgaagatgaactgtaattt

SEQ ID NO: 428014 - DNA, 33 bp, Homo sapien
gtcttaatataagctggagatgaactgtaattt

SEQ ID NO: 428015 - DNA, 33 bp, Homo sapien
gtgttatccgtggttgcaaggtgatagttttca

SEQ ID NO: 428016 - DNA, 33 bp, Homo sapien
gtgttatccgtggttggaaggtgatagttttca

SEQ ID NO: 428017 - DNA, 33 bp, Homo sapien
cttcccagtcagggtccacgttacatattttta

SEQ ID NO: 428018 - DNA, 33 bp, Homo sapien
cttcccagtcagggtctacgttacatattttta

SEQ ID NO: 428019 - DNA, 33 bp, Homo sapien
cttcagattaaatacaacaaaatggcattactt

SEQ ID NO: 428020 - DNA, 33 bp, Homo sapien
cttcagattaaatacagcaaaatggcattactt

SEQ ID NO: 428021 - DNA, 33 bp, Homo sapien
ttcatagcctttcaagaatttcagtcaagcatt

SEQ ID NO: 428022 - DNA, 33 bp, Homo sapien
ttcatagcctttcaaggatttcagtcaagcatt

SEQ ID NO: 428023 - DNA, 33 bp, Homo sapien
gggactgaggatttaacattctgacaaggatgt

SEQ ID NO: 428024 - DNA, 33 bp, Homo sapien
gggactgaggatttaatattctgacaaggatgt

SEQ ID NO: 428025 - DNA, 33 bp, Homo sapien
attgatcttctctttacgccagatttaacagcg

SEQ ID NO: 428026 - DNA, 33 bp, Homo sapien
attgatcttctctttatgccagatttaacagcg

SEQ ID NO: 428027 - DNA, 33 bp, Homo sapien
ttatgctatacaccctaactcgtttgcaaatat

SEQ ID NO: 428028 - DNA, 33 bp, Homo sapien
ttatgctatacacccttactcgtttgcaaatat

SEQ ID NO: 428029 - DNA, 33 bp, Homo sapien
ctgcctcacatagttgcagtgaagagtaatgag

SEQ ID NO: 428030 - DNA, 33 bp, Homo sapien
ctgcctcacatagttgtagtgaagagtaatgag

SEQ ID NO: 428031 - DNA, 33 bp, Homo sapien
gcttggtgatggattgaatataagaaagtaaag

SEQ ID NO: 428032 - DNA, 33 bp, Homo sapien
gcttggtgatggattggatataagaaagtaaag

SEQ ID NO: 428033 - DNA, 33 bp, Homo sapien
ttttactttggttttaagacactcacgacaatc

SEQ ID NO: 428034 - DNA, 33 bp, Homo sapien
ttttactttggttttaggacactcacgacaatc

SEQ ID NO: 428035 - DNA, 33 bp, Homo sapien
gaagggataaaacaacacagtggaaacagtaaa

SEQ ID NO: 428036 - DNA, 33 bp, Homo sapien
gaagggataaaacaacgcagtggaaacagtaaa

SEQ ID NO: 428037 - DNA, 33 bp, Homo sapien
attgttgtctgataaaaagcagtatcacacatg

SEQ ID NO: 428038 - DNA, 33 bp, Homo sapien
attgttgtctgataaagagcagtatcacacatg

SEQ ID NO: 428039 - DNA, 33 bp, Homo sapien
tctacctctcgtcttccctaatcagctcctcct

SEQ ID NO: 428040 - DNA, 33 bp, Homo sapien
tctacctctcgtcttctctaatcagctcctcct

SEQ ID NO: 428041 - DNA, 33 bp, Homo sapien
tctctgaacctgtcggaaaagttgtgaatctcc

SEQ ID NO: 428042 - DNA, 33 bp, Homo sapien
tctctgaacctgtcgggaaagttgtgaatctcc

SEQ ID NO: 428043 - DNA, 33 bp, Homo sapien
cattctttgacagcagaatcacatctaatcata

SEQ ID NO: 428044 - DNA, 33 bp, Homo sapien
cattctttgacagcaggatcacatctaatcata

SEQ ID NO: 428045 - DNA, 33 bp, Homo sapien
ctttcccggaatagcacatgaaaagctaagaaa

SEQ ID NO: 428046 - DNA, 33 bp, Homo sapien
ctttcccggaatagcagatgaaaagctaagaaa

SEQ ID NO: 428047 - DNA, 33 bp, Homo sapien
tgaattgtcacccaaaactcaacaacgtcaaga

SEQ ID NO: 428048 - DNA, 33 bp, Homo sapien
tgaattgtcacccaaagctcaacaacgtcaaga

SEQ ID NO: 428049 - DNA, 33 bp, Homo sapien
gaacctagtggcaccaacaggattgtcagagcc

SEQ ID NO: 428050 - DNA, 33 bp, Homo sapien
gaacctagtggcaccatcaggattgtcagagcc

SEQ ID NO: 428051 - DNA, 33 bp, Homo sapien
tcccacctttacagacaaaaccaatgtttatct

SEQ ID NO: 428052 - DNA, 33 bp, Homo sapien
tcccacctttacagacgaaaccaatgtttatct

SEQ ID NO: 428053 - DNA, 33 bp, Homo sapien
aaacttccttacctgaaagcctgaatgggtgaa

SEQ ID NO: 428054 - DNA, 33 bp, Homo sapien
aaacttccttacctgagagcctgaatgggtgaa

SEQ ID NO: 428055 - DNA, 33 bp, Homo sapien
ttcttctagacaaagacgtgactacaacagcaa

SEQ ID NO: 428056 - DNA, 33 bp, Homo sapien
ttcttctagacaaagatgtgactacaacagcaa

SEQ ID NO: 428057 - DNA, 33 bp, Homo sapien
cgctgtgcttttctgacggtgaggatgttaata

SEQ ID NO: 428058 - DNA, 33 bp, Homo sapien
cgctgtgcttttctgatggtgaggatgttaata

SEQ ID NO: 428059 - DNA, 33 bp, Homo sapien
ctattcttctgacatacctgtggagtaagtttt

SEQ ID NO: 428060 - DNA, 33 bp, Homo sapien
ctattcttctgacatatctgtggagtaagtttt

SEQ ID NO: 428061 - DNA, 33 bp, Homo sapien
ggtctcagtaatgataccctccagaccatcaac

SEQ ID NO: 428062 - DNA, 33 bp, Homo sapien
ggtctcagtaatgatatcctccagaccatcaac

SEQ ID NO: 428063 - DNA, 33 bp, Homo sapien
tttcataaatgtgtgccgaggattagagacatt

SEQ ID NO: 428064 - DNA, 33 bp, Homo sapien
tttcataaatgtgtgctgaggattagagacatt

SEQ ID NO: 428065 - DNA, 33 bp, Homo sapien
aactgagttttaagcacctgtgatctgcctcct

SEQ ID NO: 428066 - DNA, 33 bp, Homo sapien
aactgagttttaagcatctgtgatctgcctcct

SEQ ID NO: 428067 - DNA, 33 bp, Homo sapien
acctatctgagcagtaacatcttcgattctttg

SEQ ID NO: 428068 - DNA, 33 bp, Homo sapien
acctatctgagcagtagcatcttcgattctttg

SEQ ID NO: 428069 - DNA, 33 bp, Homo sapien
atagtcctcagtcttaaagtgattagagcttac

SEQ ID NO: 428070 - DNA, 33 bp, Homo sapien
atagtcctcagtcttacagtgattagagcttac

SEQ ID NO: 428071 - DNA, 33 bp, Homo sapien
taggaaagcatcttacacagcacacacttacgt

SEQ ID NO: 428072 - DNA, 33 bp, Homo sapien
taggaaagcatcttacccagcacacacttacgt

SEQ ID NO: 428073 - DNA, 33 bp, Homo sapien
gtgtctgtgctaaccaagaaaccaagactaggc

SEQ ID NO: 428074 - DNA, 33 bp, Homo sapien
gtgtctgtgctaaccacgaaaccaagactaggc

SEQ ID NO: 428075 - DNA, 33 bp, Homo sapien
tttgttttctatggaacatttcagctgaataaa

SEQ ID NO: 428076 - DNA, 33 bp, Homo sapien
tttgttttctatggaatatttcagctgaataaa

SEQ ID NO: 428077 - DNA, 33 bp, Homo sapien
cttctaattgctgcaaagaagtatctagctacg

SEQ ID NO: 428078 - DNA, 33 bp, Homo sapien
cttctaattgctgcaaggaagtatctagctacg

SEQ ID NO: 428079 - DNA, 33 bp, Homo sapien
ctctttgcctttcaccactctggaaaacatcct

SEQ ID NO: 428080 - DNA, 33 bp, Homo sapien
ctctttgcctttcaccgctctggaaaacatcct

SEQ ID NO: 428081 - DNA, 33 bp, Homo sapien
tgactggctgccttagacattatctttatgtac

SEQ ID NO: 428082 - DNA, 33 bp, Homo sapien
tgactggctgccttagccattatctttatgtac

SEQ ID NO: 428083 - DNA, 33 bp, Homo sapien
ataataactttttgtaccaattactgttaagta

SEQ ID NO: 428084 - DNA, 33 bp, Homo sapien
ataataactttttgtagcaattactgttaagta

SEQ ID NO: 428085 - DNA, 33 bp, Homo sapien
gaacagctatgccacaataggtcacttactgga

SEQ ID NO: 428086 - DNA, 33 bp, Homo sapien
gaacagctatgccacagtaggtcacttactgga

SEQ ID NO: 428087 - DNA, 33 bp, Homo sapien
agaatgcgaaacagtccagctgctatggaaaac

SEQ ID NO: 428088 - DNA, 33 bp, Homo sapien
agaatgcgaaacagtcgagctgctatggaaaac

SEQ ID NO: 428089 - DNA, 33 bp, Homo sapien
gctgctatggaaaacactacacggaactactca

SEQ ID NO: 428090 - DNA, 33 bp, Homo sapien
gctgctatggaaaacattacacggaactactca

SEQ ID NO: 428091 - DNA, 33 bp, Homo sapien
gttagagatttgacaacgaactagaagataagg

SEQ ID NO: 428092 - DNA, 33 bp, Homo sapien
gttagagatttgacaatgaactagaagataagg

SEQ ID NO: 428093 - DNA, 33 bp, Homo sapien
tttgcatccttcataactgtatattgtgccatc

SEQ ID NO: 428094 - DNA, 33 bp, Homo sapien
tttgcatccttcataattgtatattgtgccatc

SEQ ID NO: 428095 - DNA, 33 bp, Homo sapien
aaaacatgagctctcaagcaagtggaaaaagta

SEQ ID NO: 428096 - DNA, 33 bp, Homo sapien
aaaacatgagctctcaggcaagtggaaaaagta

SEQ ID NO: 428097 - DNA, 33 bp, Homo sapien
aaataatgtggtatcaaaggtcaactgcttcca

SEQ ID NO: 428098 - DNA, 33 bp, Homo sapien
aaataatgtggtatcagaggtcaactgcttcca

SEQ ID NO: 428099 - DNA, 33 bp, Homo sapien
cccttaagtaactcgcacacgcgggacctgttc

SEQ ID NO: 428100 - DNA, 33 bp, Homo sapien
cccttaagtaactcgcgcacgcgggacctgttc

SEQ ID NO: 428101 - DNA, 33 bp, Homo sapien
tagagcaacatacaaaagaaatctgctgttctc

SEQ ID NO: 428102 - DNA, 33 bp, Homo sapien
tagagcaacatacaaatgaaatctgctgttctc

SEQ ID NO: 428103 - DNA, 33 bp, Homo sapien
aatgaaattatcagaaataagatccatagctaa

SEQ ID NO: 428104 - DNA, 33 bp, Homo sapien
aatgaaattatcagaattaagatccatagctaa

SEQ ID NO: 428105 - DNA, 33 bp, Homo sapien
ttaaaagattgtttgtcaaagtttggctgggcg

SEQ ID NO: 428106 - DNA, 33 bp, Homo sapien
ttaaaagattgtttgtgaaagtttggctgggcg

SEQ ID NO: 428107 - DNA, 33 bp, Homo sapien
aactcaattacactgcacattattggttataag

SEQ ID NO: 428108 - DNA, 33 bp, Homo sapien
aactcaattacactgcgcattattggttataag

SEQ ID NO: 428109 - DNA, 33 bp, Homo sapien
cagtttactgagaatacgcacctaagagggagt

SEQ ID NO: 428110 - DNA, 33 bp, Homo sapien
cagtttactgagaatatgcacctaagagggagt

SEQ ID NO: 428111 - DNA, 33 bp, Homo sapien
aaagaaagatgaaaacaaaggcttttgaaaaat

SEQ ID NO: 428112 - DNA, 33 bp, Homo sapien
aaagaaagatgaaaactaaggcttttgaaaaat

SEQ ID NO: 428113 - DNA, 33 bp, Homo sapien
tcagtatttttaaaaaatgtcttgcaataatat

SEQ ID NO: 428114 - DNA, 33 bp, Homo sapien
tcagtatttttaaaaactgtcttgcaataatat

SEQ ID NO: 428115 - DNA, 33 bp, Homo sapien
catccaattaatgtgccaaaacttacttttact

SEQ ID NO: 428116 - DNA, 33 bp, Homo sapien
catccaattaatgtgctaaaacttacttttact

SEQ ID NO: 428117 - DNA, 33 bp, Homo sapien
ctttcaggctttcctacactaccaatttttctt

SEQ ID NO: 428118 - DNA, 33 bp, Homo sapien
ctttcaggctttcctatactaccaatttttctt

SEQ ID NO: 428119 - DNA, 33 bp, Homo sapien
actacaatattacacaaagacttgcacaatgtt

SEQ ID NO: 428120 - DNA, 33 bp, Homo sapien
actacaatattacacagagacttgcacaatgtt

SEQ ID NO: 428121 - DNA, 33 bp, Homo sapien
tttgttgaattactgactcaaggtgacaagtta

SEQ ID NO: 428122 - DNA, 33 bp, Homo sapien
tttgttgaattactgattcaaggtgacaagtta

SEQ ID NO: 428123 - DNA, 33 bp, Homo sapien
tgaacttctgttccccgctttgttaatcttatc

SEQ ID NO: 428124 - DNA, 33 bp, Homo sapien
tgaacttctgttcccctctttgttaatcttatc

SEQ ID NO: 428125 - DNA, 33 bp, Homo sapien
catgcatgaaagagaacggagacttaacaacaa

SEQ ID NO: 428126 - DNA, 33 bp, Homo sapien
catgcatgaaagagaatggagacttaacaacaa

SEQ ID NO: 428127 - DNA, 33 bp, Homo sapien
agtagagagagaaaaaatgagtatgaaagttat

SEQ ID NO: 428128 - DNA, 33 bp, Homo sapien
agtagagagagaaaaagtgagtatgaaagttat

SEQ ID NO: 428129 - DNA, 33 bp, Homo sapien
gaaattcatataaaggaccaagttagaataata

SEQ ID NO: 428130 - DNA, 33 bp, Homo sapien
gaaattcatataaaggtccaagttagaataata

SEQ ID NO: 428131 - DNA, 33 bp, Homo sapien
agcttaaaatggggatcacatttccgaagtaaa

SEQ ID NO: 428132 - DNA, 33 bp, Homo sapien
agcttaaaatggggatgacatttccgaagtaaa

SEQ ID NO: 428133 - DNA, 33 bp, Homo sapien
cattacaattaatagacgagaaatcaagttagg

SEQ ID NO: 428134 - DNA, 33 bp, Homo sapien
cattacaattaatagatgagaaatcaagttagg

SEQ ID NO: 428135 - DNA, 33 bp, Homo sapien
aatgaaactagaatcccggaaatcatcctagac

SEQ ID NO: 428136 - DNA, 33 bp, Homo sapien
aatgaaactagaatcctggaaatcatcctagac

SEQ ID NO: 428137 - DNA, 33 bp, Homo sapien
cttcttcccacccaccaaaagtgctcttgacaa

SEQ ID NO: 428138 - DNA, 33 bp, Homo sapien
cttcttcccacccaccgaaagtgctcttgacaa

SEQ ID NO: 428139 - DNA, 33 bp, Homo sapien
tatttcatgcataatagcttcattttaaaacag

SEQ ID NO: 428140 - DNA, 33 bp, Homo sapien
tatttcatgcataatatcttcattttaaaacag

SEQ ID NO: 428141 - DNA, 33 bp, Homo sapien
caagttaaatcctcaaccacttcaaatttacta

SEQ ID NO: 428142 - DNA, 33 bp, Homo sapien
caagttaaatcctcaatcacttcaaatttacta

SEQ ID NO: 428143 - DNA, 33 bp, Homo sapien
gctctcattacttgatcacaaaactccatcctt

SEQ ID NO: 428144 - DNA, 33 bp, Homo sapien
gctctcattacttgattacaaaactccatcctt

SEQ ID NO: 428145 - DNA, 33 bp, Homo sapien
ttgttttaaaagctaaacatctgaagtctagac

SEQ ID NO: 428146 - DNA, 33 bp, Homo sapien
ttgttttaaaagctaatcatctgaagtctagac

SEQ ID NO: 428147 - DNA, 33 bp, Homo sapien
gatatcctctaactcaacttactgccttgtcta

SEQ ID NO: 428148 - DNA, 33 bp, Homo sapien
gatatcctctaactcagcttactgccttgtcta

SEQ ID NO: 428149 - DNA, 33 bp, Homo sapien
agaagagtaatcccaccgagttagaaatgctcc

SEQ ID NO: 428150 - DNA, 33 bp, Homo sapien
agaagagtaatcccacggagttagaaatgctcc

SEQ ID NO: 428151 - DNA, 33 bp, Homo sapien
acacaagatctgtgccacttcaatacagacaag

SEQ ID NO: 428152 - DNA, 33 bp, Homo sapien
acacaagatctgtgccgcttcaatacagacaag

SEQ ID NO: 428153 - DNA, 33 bp, Homo sapien
ctgggaaacaggataacctcactgcaatttctc

SEQ ID NO: 428154 - DNA, 33 bp, Homo sapien
ctgggaaacaggataagctcactgcaatttctc

SEQ ID NO: 428155 - DNA, 33 bp, Homo sapien
ggagaccacactagccgctgacttttctgagtt

SEQ ID NO: 428156 - DNA, 33 bp, Homo sapien
ggagaccacactagcctctgacttttctgagtt

SEQ ID NO: 428157 - DNA, 33 bp, Homo sapien
ctctgagacacagagtaaaataggatcagggta

SEQ ID NO: 428158 - DNA, 33 bp, Homo sapien
ctctgagacacagagttaaataggatcagggta

SEQ ID NO: 428159 - DNA, 33 bp, Homo sapien
cacttttttactctagaacctatttcttcactg

SEQ ID NO: 428160 - DNA, 33 bp, Homo sapien
cacttttttactctaggacctatttcttcactg

SEQ ID NO: 428161 - DNA, 33 bp, Homo sapien
ccctccattagtgagcaatttttaattttctca

SEQ ID NO: 428162 - DNA, 33 bp, Homo sapien
ccctccattagtgagcgatttttaattttctca

SEQ ID NO: 428163 - DNA, 33 bp, Homo sapien
ggacttcttatattccagccactatgctaggtg

SEQ ID NO: 428164 - DNA, 33 bp, Homo sapien
ggacttcttatattccggccactatgctaggtg

SEQ ID NO: 428165 - DNA, 33 bp, Homo sapien
agtacctatccttttaattgcttatagtgtggt

SEQ ID NO: 428166 - DNA, 33 bp, Homo sapien
agtacctatccttttatttgcttatagtgtggt

SEQ ID NO: 428167 - DNA, 33 bp, Homo sapien
ttctatggacctggaggaccctgatttaaacag

SEQ ID NO: 428168 - DNA, 33 bp, Homo sapien
ttctatggacctggagtaccctgatttaaacag

SEQ ID NO: 428169 - DNA, 33 bp, Homo sapien
gtttcaatgtgaggcacagttagcacctccatc

SEQ ID NO: 428170 - DNA, 33 bp, Homo sapien
gtttcaatgtgaggcatagttagcacctccatc

SEQ ID NO: 428171 - DNA, 33 bp, Homo sapien
tacctcgctataaacactgagtaactggggaag

SEQ ID NO: 428172 - DNA, 33 bp, Homo sapien
tacctcgctataaacattgagtaactggggaag

SEQ ID NO: 428173 - DNA, 33 bp, Homo sapien
gttccatgcttatgaaatggattagtgctctca

SEQ ID NO: 428174 - DNA, 33 bp, Homo sapien
gttccatgcttatgaattggattagtgctctca

SEQ ID NO: 428175 - DNA, 33 bp, Homo sapien
atttgtcattatttcaagtcattagttcttaag

SEQ ID NO: 428176 - DNA, 33 bp, Homo sapien
atttgtcattatttcaggtcattagttcttaag

SEQ ID NO: 428177 - DNA, 33 bp, Homo sapien
attcttttctttgtcaaacttgaggggtaatcg

SEQ ID NO: 428178 - DNA, 33 bp, Homo sapien
attcttttctttgtcagacttgaggggtaatcg

SEQ ID NO: 428179 - DNA, 33 bp, Homo sapien
tcagtctataattacacgcgagcaaaaatagga

SEQ ID NO: 428180 - DNA, 33 bp, Homo sapien
tcagtctataattacaggcgagcaaaaatagga

SEQ ID NO: 428181 - DNA, 33 bp, Homo sapien
ggaaatgctgtggaaaaaagacccacgtgccac

SEQ ID NO: 428182 - DNA, 33 bp, Homo sapien
ggaaatgctgtggaaacaagacccacgtgccac

SEQ ID NO: 428183 - DNA, 33 bp, Homo sapien
ttcagctttagagcaacagttcagaacaccaaa

SEQ ID NO: 428184 - DNA, 33 bp, Homo sapien
ttcagctttagagcaatagttcagaacaccaaa

SEQ ID NO: 428185 - DNA, 33 bp, Homo sapien
tcagaggtgattctacaaaatcctgcaaaaact

SEQ ID NO: 428186 - DNA, 33 bp, Homo sapien
tcagaggtgattctacgaaatcctgcaaaaact

SEQ ID NO: 428187 - DNA, 33 bp, Homo sapien
acaggcactagcaggaataccagagagtgctac

SEQ ID NO: 428188 - DNA, 33 bp, Homo sapien
acaggcactagcaggattaccagagagtgctac

SEQ ID NO: 428189 - DNA, 33 bp, Homo sapien
tttttacagtcatacactattatagctggaagg

SEQ ID NO: 428190 - DNA, 33 bp, Homo sapien
tttttacagtcatacagtattatagctggaagg

SEQ ID NO: 428191 - DNA, 33 bp, Homo sapien
agaactgggggtgagacaatttaagagacttat

SEQ ID NO: 428192 - DNA, 33 bp, Homo sapien
agaactgggggtgagataatttaagagacttat

SEQ ID NO: 428193 - DNA, 33 bp, Homo sapien
taccttttggtttatacgagtgaaggaaatctt

SEQ ID NO: 428194 - DNA, 33 bp, Homo sapien
taccttttggtttatatgagtgaaggaaatctt

SEQ ID NO: 428195 - DNA, 33 bp, Homo sapien
gtgacatttaaactaacgcctacagtttcataa

SEQ ID NO: 428196 - DNA, 33 bp, Homo sapien
gtgacatttaaactaatgcctacagtttcataa

SEQ ID NO: 428197 - DNA, 33 bp, Homo sapien
tcaacctacagaaatacctaaactcatgtgctg

SEQ ID NO: 428198 - DNA, 33 bp, Homo sapien
tcaacctacagaaatatctaaactcatgtgctg

SEQ ID NO: 428199 - DNA, 33 bp, Homo sapien
ccctgtcagtggaagaggtaaaggacatagcca

SEQ ID NO: 428200 - DNA, 33 bp, Homo sapien
ccctgtcagtggaagatgtaaaggacatagcca

SEQ ID NO: 428201 - DNA, 33 bp, Homo sapien
cgggaacttgtatttcacgaaggtattggtgct

SEQ ID NO: 428202 - DNA, 33 bp, Homo sapien
cgggaacttgtatttcgcgaaggtattggtgct

SEQ ID NO: 428203 - DNA, 33 bp, Homo sapien
tttacatgtaacttcacgatgtctggtctccaa

SEQ ID NO: 428204 - DNA, 33 bp, Homo sapien
tttacatgtaacttcatgatgtctggtctccaa

SEQ ID NO: 428205 - DNA, 33 bp, Homo sapien
aagcacagaaaattaacctgctgtatggaatac

SEQ ID NO: 428206 - DNA, 33 bp, Homo sapien
aagcacagaaaattaatctgctgtatggaatac

SEQ ID NO: 428207 - DNA, 33 bp, Homo sapien
aacagaaacttctgccccttcccagatgctgtt

SEQ ID NO: 428208 - DNA, 33 bp, Homo sapien
aacagaaacttctgcctcttcccagatgctgtt

SEQ ID NO: 428209 - DNA, 33 bp, Homo sapien
ttcatttcacatttgacatgatatggcttggtt

SEQ ID NO: 428210 - DNA, 33 bp, Homo sapien
ttcatttcacatttgatatgatatggcttggtt

SEQ ID NO: 428211 - DNA, 33 bp, Homo sapien
atggcagcttctccaacttccttcatctactgt

SEQ ID NO: 428212 - DNA, 33 bp, Homo sapien
atggcagcttctccaatttccttcatctactgt

SEQ ID NO: 428213 - DNA, 33 bp, Homo sapien
ttcattcagcaaggagaccagggtgaatgaagc

SEQ ID NO: 428214 - DNA, 33 bp, Homo sapien
ttcattcagcaaggaggccagggtgaatgaagc

SEQ ID NO: 428215 - DNA, 33 bp, Homo sapien
ataggtgctgatcaacagtgtgaggctatggaa

SEQ ID NO: 428216 - DNA, 33 bp, Homo sapien
ataggtgctgatcaacggtgtgaggctatggaa

SEQ ID NO: 428217 - DNA, 33 bp, Homo sapien
tcaagatgtgttgaacccaggcgaaaggaaaga

SEQ ID NO: 428218 - DNA, 33 bp, Homo sapien
tcaagatgtgttgaacgcaggcgaaaggaaaga

SEQ ID NO: 428219 - DNA, 33 bp, Homo sapien
tcttaagcttctcaacagtacaaatgcttgtgg

SEQ ID NO: 428220 - DNA, 33 bp, Homo sapien
tcttaagcttctcaacggtacaaatgcttgtgg

SEQ ID NO: 428221 - DNA, 33 bp, Homo sapien
agtacaagggttatgcacagagatacacatatt

SEQ ID NO: 428222 - DNA, 33 bp, Homo sapien
agtacaagggttatgcgcagagatacacatatt

SEQ ID NO: 428223 - DNA, 33 bp, Homo sapien
ttctttcaattactgcccctacctcaggttcaa

SEQ ID NO: 428224 - DNA, 33 bp, Homo sapien
ttctttcaattactgctcctacctcaggttcaa

SEQ ID NO: 428225 - DNA, 33 bp, Homo sapien
gacaaagtttttaataacaccacttgattgcca

SEQ ID NO: 428226 - DNA, 33 bp, Homo sapien
gacaaagtttttaataccaccacttgattgcca

SEQ ID NO: 428227 - DNA, 33 bp, Homo sapien
gcaaatatacagaaacagagaatagtcagtggt

SEQ ID NO: 428228 - DNA, 33 bp, Homo sapien
gcaaatatacagaaacggagaatagtcagtggt

SEQ ID NO: 428229 - DNA, 33 bp, Homo sapien
ctagacttattcgtcccacataactataacttt

SEQ ID NO: 428230 - DNA, 33 bp, Homo sapien
ctagacttattcgtcctacataactataacttt

SEQ ID NO: 428231 - DNA, 33 bp, Homo sapien
atgagtaactatgtgaagtactggacatgtcca

SEQ ID NO: 428232 - DNA, 33 bp, Homo sapien
atgagtaactatgtgaggtactggacatgtcca

SEQ ID NO: 428233 - DNA, 33 bp, Homo sapien
tgacttcactgggaaacgaaagacctatccaag

SEQ ID NO: 428234 - DNA, 33 bp, Homo sapien
tgacttcactgggaaaggaaagacctatccaag

SEQ ID NO: 428235 - DNA, 33 bp, Homo sapien
aagttgggctgttgaacgcaacagatacagtgc

SEQ ID NO: 428236 - DNA, 33 bp, Homo sapien
aagttgggctgttgaatgcaacagatacagtgc

SEQ ID NO: 428237 - DNA, 33 bp, Homo sapien
caggctctggcatcaacggacaaaatagtacat

SEQ ID NO: 428238 - DNA, 33 bp, Homo sapien
caggctctggcatcaatggacaaaatagtacat

SEQ ID NO: 428239 - DNA, 33 bp, Homo sapien
ctagctgtgggtaaacaagcactctcatatatt

SEQ ID NO: 428240 - DNA, 33 bp, Homo sapien
ctagctgtgggtaaacgagcactctcatatatt

SEQ ID NO: 428241 - DNA, 33 bp, Homo sapien
ggatattttaaataagcattgagcaaccacagc

SEQ ID NO: 428242 - DNA, 33 bp, Homo sapien
ggatattttaaataagtattgagcaaccacagc

SEQ ID NO: 428243 - DNA, 33 bp, Homo sapien
agttcaccaaagtatacgccacgctgccttcag

SEQ ID NO: 428244 - DNA, 33 bp, Homo sapien
agttcaccaaagtatatgccacgctgccttcag

SEQ ID NO: 428245 - DNA, 33 bp, Homo sapien
tatgtaccaacaagacagatggagaggaggtgt

SEQ ID NO: 428246 - DNA, 33 bp, Homo sapien
tatgtaccaacaagacggatggagaggaggtgt

SEQ ID NO: 428247 - DNA, 33 bp, Homo sapien
tctcacactgctataaagatacacctgagactg

SEQ ID NO: 428248 - DNA, 33 bp, Homo sapien
tctcacactgctataacgatacacctgagactg

SEQ ID NO: 428249 - DNA, 33 bp, Homo sapien
gaagaatgtgaaatgaaaccattgatgtgaagg

SEQ ID NO: 428250 - DNA, 33 bp, Homo sapien
gaagaatgtgaaatgagaccattgatgtgaagg

SEQ ID NO: 428251 - DNA, 33 bp, Homo sapien
tttggacaagtacaaacaatttcaactgatatt

SEQ ID NO: 428252 - DNA, 33 bp, Homo sapien
tttggacaagtacaaataatttcaactgatatt

SEQ ID NO: 428253 - DNA, 33 bp, Homo sapien
cctcacctatctaagacgtgtcacagacagtcc

SEQ ID NO: 428254 - DNA, 33 bp, Homo sapien
cctcacctatctaagatgtgtcacagacagtcc

SEQ ID NO: 428255 - DNA, 33 bp, Homo sapien
caaatttacaaactaaacgcctgtgtttctcta

SEQ ID NO: 428256 - DNA, 33 bp, Homo sapien
caaatttacaaactaaccgcctgtgtttctcta

SEQ ID NO: 428257 - DNA, 33 bp, Homo sapien
gccatgctgtgttctgaacaagttttcattgat

SEQ ID NO: 428258 - DNA, 33 bp, Homo sapien
gccatgctgtgttctggacaagttttcattgat

SEQ ID NO: 428259 - DNA, 33 bp, Homo sapien
gtggcatagatgccaacgttatcaagaaagact

SEQ ID NO: 428260 - DNA, 33 bp, Homo sapien
gtggcatagatgccaatgttatcaagaaagact

SEQ ID NO: 428261 - DNA, 33 bp, Homo sapien
tggtcaagaatctgtaacgttaaccaatccact

SEQ ID NO: 428262 - DNA, 33 bp, Homo sapien
tggtcaagaatctgtaccgttaaccaatccact

SEQ ID NO: 428263 - DNA, 33 bp, Homo sapien
gcccactgggaattaaaagaagtacccattcca

SEQ ID NO: 428264 - DNA, 33 bp, Homo sapien
gcccactgggaattaacagaagtacccattcca

SEQ ID NO: 428265 - DNA, 33 bp, Homo sapien
gtgggatccatttaagaactgaattatgaaatg

SEQ ID NO: 428266 - DNA, 33 bp, Homo sapien
gtgggatccatttaaggactgaattatgaaatg

SEQ ID NO: 428267 - DNA, 33 bp, Homo sapien
ggctgtttgatttccaacggtttactcccatac

SEQ ID NO: 428268 - DNA, 33 bp, Homo sapien
ggctgtttgatttccagcggtttactcccatac

SEQ ID NO: 428269 - DNA, 33 bp, Homo sapien
tgaaaggaaaacatacaattctgcttggttctt

SEQ ID NO: 428270 - DNA, 33 bp, Homo sapien
tgaaaggaaaacatactattctgcttggttctt

SEQ ID NO: 428271 - DNA, 33 bp, Homo sapien
actcctctttaggctcgatttcattccgtgaac

SEQ ID NO: 428272 - DNA, 33 bp, Homo sapien
actcctctttaggctctatttcattccgtgaac

SEQ ID NO: 428273 - DNA, 33 bp, Homo sapien
aactgccgatggttgcgatatggctatttccaa

SEQ ID NO: 428274 - DNA, 33 bp, Homo sapien
aactgccgatggttgctatatggctatttccaa

SEQ ID NO: 428275 - DNA, 33 bp, Homo sapien
ctgagtcagattaaaaatggactggcttccata

SEQ ID NO: 428276 - DNA, 33 bp, Homo sapien
ctgagtcagattaaaagtggactggcttccata

SEQ ID NO: 428277 - DNA, 33 bp, Homo sapien
tagaacttcactgtggccagtctaactattttt

SEQ ID NO: 428278 - DNA, 33 bp, Homo sapien
tagaacttcactgtgggcagtctaactattttt

SEQ ID NO: 428279 - DNA, 33 bp, Homo sapien
gattattatcctggaagtaaagtctttcggggc

SEQ ID NO: 428280 - DNA, 33 bp, Homo sapien
gattattatcctggaattaaagtctttcggggc

SEQ ID NO: 428281 - DNA, 33 bp, Homo sapien
gacttccatagccttcacagaacaattcctcaa

SEQ ID NO: 428282 - DNA, 33 bp, Homo sapien
gacttccatagccttcgcagaacaattcctcaa

SEQ ID NO: 428283 - DNA, 33 bp, Homo sapien
cacagttatgctgtcacatctgtcctaaccaag

SEQ ID NO: 428284 - DNA, 33 bp, Homo sapien
cacagttatgctgtcagatctgtcctaaccaag

SEQ ID NO: 428285 - DNA, 33 bp, Homo sapien
atatagacagtagccaataatattttgaagtgg

SEQ ID NO: 428286 - DNA, 33 bp, Homo sapien
atatagacagtagccagtaatattttgaagtgg

SEQ ID NO: 428287 - DNA, 33 bp, Homo sapien
ctacatgttaacaagaatcccttctatagcaac

SEQ ID NO: 428288 - DNA, 33 bp, Homo sapien
ctacatgttaacaagagtcccttctatagcaac

SEQ ID NO: 428289 - DNA, 33 bp, Homo sapien
tttcacagttattatcacatctgaaccatatta

SEQ ID NO: 428290 - DNA, 33 bp, Homo sapien
tttcacagttattatctcatctgaaccatatta

SEQ ID NO: 428291 - DNA, 33 bp, Homo sapien
aaaattggcagaaaaccgtgaaagaaaatgagt

SEQ ID NO: 428292 - DNA, 33 bp, Homo sapien
aaaattggcagaaaactgtgaaagaaaatgagt

SEQ ID NO: 428293 - DNA, 33 bp, Homo sapien
aaatctatcaatgttcaaaagtatataaaccct

SEQ ID NO: 428294 - DNA, 33 bp, Homo sapien
aaatctatcaatgttcgaaagtatataaaccct

SEQ ID NO: 428295 - DNA, 33 bp, Homo sapien
taccaactgtcaataacgtcacataaattacat

SEQ ID NO: 428296 - DNA, 33 bp, Homo sapien
taccaactgtcaataatgtcacataaattacat

SEQ ID NO: 428297 - DNA, 33 bp, Homo sapien
ctcattcctccacacactaatcagagtagagcc

SEQ ID NO: 428298 - DNA, 33 bp, Homo sapien
ctcattcctccacacattaatcagagtagagcc

SEQ ID NO: 428299 - DNA, 33 bp, Homo sapien
atattgcatatcaggaaagaaaatacaaattct

SEQ ID NO: 428300 - DNA, 33 bp, Homo sapien
atattgcatatcaggagagaaaatacaaattct

SEQ ID NO: 428301 - DNA, 33 bp, Homo sapien
aaatgaatgaaactaaatcacagtgtgtaggct

SEQ ID NO: 428302 - DNA, 33 bp, Homo sapien
aaatgaatgaaactaagtcacagtgtgtaggct

SEQ ID NO: 428303 - DNA, 33 bp, Homo sapien
aaatgtataacttcacagatgtttgtctgaaat

SEQ ID NO: 428304 - DNA, 33 bp, Homo sapien
aaatgtataacttcactgatgtttgtctgaaat

SEQ ID NO: 428305 - DNA, 33 bp, Homo sapien
ttgcctcttacctcagaaaaggacaccatatgg

SEQ ID NO: 428306 - DNA, 33 bp, Homo sapien
ttgcctcttacctcaggaaaggacaccatatgg

SEQ ID NO: 428307 - DNA, 33 bp, Homo sapien
actaggtcacaaaataaattcacaaagagttta

SEQ ID NO: 428308 - DNA, 33 bp, Homo sapien
actaggtcacaaaatagattcacaaagagttta

SEQ ID NO: 428309 - DNA, 33 bp, Homo sapien
ggaatgtattcccaccagaagttgaggaccatc

SEQ ID NO: 428310 - DNA, 33 bp, Homo sapien
ggaatgtattcccaccggaagttgaggaccatc

SEQ ID NO: 428311 - DNA, 33 bp, Homo sapien
ggccaccaaagcagaactgttgcaataatgtga

SEQ ID NO: 428312 - DNA, 33 bp, Homo sapien
ggccaccaaagcagaattgttgcaataatgtga

SEQ ID NO: 428313 - DNA, 33 bp, Homo sapien
gtgaaatacacatgtaagtgcagtatcgtgatg

SEQ ID NO: 428314 - DNA, 33 bp, Homo sapien
gtgaaatacacatgtacgtgcagtatcgtgatg

SEQ ID NO: 428315 - DNA, 33 bp, Homo sapien
tctggtcatttcattaaggtggtccattatttt

SEQ ID NO: 428316 - DNA, 33 bp, Homo sapien
tctggtcatttcattacggtggtccattatttt

SEQ ID NO: 428317 - DNA, 33 bp, Homo sapien
agattacagcaaagaacgtggcccataaactac

SEQ ID NO: 428318 - DNA, 33 bp, Homo sapien
agattacagcaaagaatgtggcccataaactac

SEQ ID NO: 428319 - DNA, 33 bp, Homo sapien
tggggtctccagataacgttgaagctaggacct

SEQ ID NO: 428320 - DNA, 33 bp, Homo sapien
tggggtctccagataatgttgaagctaggacct

SEQ ID NO: 428321 - DNA, 33 bp, Homo sapien
gtaataatcagttacacaacggtttctctgtaa

SEQ ID NO: 428322 - DNA, 33 bp, Homo sapien
gtaataatcagttacataacggtttctctgtaa

SEQ ID NO: 428323 - DNA, 33 bp, Homo sapien
gagatcaggagccttcaaattatgtatataaga

SEQ ID NO: 428324 - DNA, 33 bp, Homo sapien
gagatcaggagccttctaattatgtatataaga

SEQ ID NO: 428325 - DNA, 33 bp, Homo sapien
gcatcaggaaagattgcacaagtggcttcaatt

SEQ ID NO: 428326 - DNA, 33 bp, Homo sapien
gcatcaggaaagattgtacaagtggcttcaatt

SEQ ID NO: 428327 - DNA, 33 bp, Homo sapien
gaggtatctacctaccaattaacactgctatcg

SEQ ID NO: 428328 - DNA, 33 bp, Homo sapien
gaggtatctacctacccattaacactgctatcg

SEQ ID NO: 428329 - DNA, 33 bp, Homo sapien
aacactgctatcggtacgaggatcactgtctgc

SEQ ID NO: 428330 - DNA, 33 bp, Homo sapien
aacactgctatcggtatgaggatcactgtctgc

SEQ ID NO: 428331 - DNA, 33 bp, Homo sapien
accagcatccaggaaaagttaaaatgaagaatg

SEQ ID NO: 428332 - DNA, 33 bp, Homo sapien
accagcatccaggaaaggttaaaatgaagaatg

SEQ ID NO: 428333 - DNA, 33 bp, Homo sapien
acattctattataaataaccacgaggactttga

SEQ ID NO: 428334 - DNA, 33 bp, Homo sapien
acattctattataaatcaccacgaggactttga

SEQ ID NO: 428335 - DNA, 33 bp, Homo sapien
cagttagcaatactgaaagtccaattacttttg

SEQ ID NO: 428336 - DNA, 33 bp, Homo sapien
cagttagcaatactgacagtccaattacttttg

SEQ ID NO: 428337 - DNA, 33 bp, Homo sapien
gtcaggaccattgaaaacttttgatgttttaca

SEQ ID NO: 428338 - DNA, 33 bp, Homo sapien
gtcaggaccattgaaagcttttgatgttttaca

SEQ ID NO: 428339 - DNA, 33 bp, Homo sapien
ttgaggtaataagctgcagtatattgaacactg

SEQ ID NO: 428340 - DNA, 33 bp, Homo sapien
ttgaggtaataagctgtagtatattgaacactg

SEQ ID NO: 428341 - DNA, 33 bp, Homo sapien
aatttgagaataacacagtcaaaaattcttcct

SEQ ID NO: 428342 - DNA, 33 bp, Homo sapien
aatttgagaataacacggtcaaaaattcttcct

SEQ ID NO: 428343 - DNA, 33 bp, Homo sapien
tagttagttggcaagaagttaggtggatatggc

SEQ ID NO: 428344 - DNA, 33 bp, Homo sapien
tagttagttggcaagaggttaggtggatatggc

SEQ ID NO: 428345 - DNA, 33 bp, Homo sapien
gggaatcttataactccccatagtgtatcacag

SEQ ID NO: 428346 - DNA, 33 bp, Homo sapien
gggaatcttataactctccatagtgtatcacag

SEQ ID NO: 428347 - DNA, 33 bp, Homo sapien
ttggcaagattcattacgtagtgaagatgtgaa

SEQ ID NO: 428348 - DNA, 33 bp, Homo sapien
ttggcaagattcattatgtagtgaagatgtgaa

SEQ ID NO: 428349 - DNA, 33 bp, Homo sapien
cggaagactattgaaccgagaaacttctaggct

SEQ ID NO: 428350 - DNA, 33 bp, Homo sapien
cggaagactattgaactgagaaacttctaggct

SEQ ID NO: 428351 - DNA, 33 bp, Homo sapien
cctacctgacctttcaactgtgttcctgtttca

SEQ ID NO: 428352 - DNA, 33 bp, Homo sapien
cctacctgacctttcagctgtgttcctgtttca

SEQ ID NO: 428353 - DNA, 33 bp, Homo sapien
gttatcttgctgactacgagttgaaattagtta

SEQ ID NO: 428354 - DNA, 33 bp, Homo sapien
gttatcttgctgactatgagttgaaattagtta

SEQ ID NO: 428355 - DNA, 33 bp, Homo sapien
tcttaatgtgttgctacgtctatataattttct

SEQ ID NO: 428356 - DNA, 33 bp, Homo sapien
tcttaatgtgttgctatgtctatataattttct

SEQ ID NO: 428357 - DNA, 33 bp, Homo sapien
tcctttgtacctcaaactaagtagcttcatatt

SEQ ID NO: 428358 - DNA, 33 bp, Homo sapien
tcctttgtacctcaaattaagtagcttcatatt

SEQ ID NO: 428359 - DNA, 33 bp, Homo sapien
atatgattgggttgcacgagcaaaggaatatga

SEQ ID NO: 428360 - DNA, 33 bp, Homo sapien
atatgattgggttgcatgagcaaaggaatatga

SEQ ID NO: 428361 - DNA, 33 bp, Homo sapien
gcatttcagtggagagaaaaattgagcttcaga

SEQ ID NO: 428362 - DNA, 33 bp, Homo sapien
gcatttcagtggagaggaaaattgagcttcaga

SEQ ID NO: 428363 - DNA, 33 bp, Homo sapien
tttgtaaatagcaaaaccatggtacttggctca

SEQ ID NO: 428364 - DNA, 33 bp, Homo sapien
tttgtaaatagcaaaatcatggtacttggctca

SEQ ID NO: 428365 - DNA, 33 bp, Homo sapien
gataagatcattggcaagtttttcgttgttgtt

SEQ ID NO: 428366 - DNA, 33 bp, Homo sapien
gataagatcattggcaggtttttcgttgttgtt

SEQ ID NO: 428367 - DNA, 33 bp, Homo sapien
gtttctttctctacacggaatggaaggaactat

SEQ ID NO: 428368 - DNA, 33 bp, Homo sapien
gtttctttctctacactgaatggaaggaactat

SEQ ID NO: 428369 - DNA, 33 bp, Homo sapien
ctttcaagggtaaccaacttctcaacatgaaaa

SEQ ID NO: 428370 - DNA, 33 bp, Homo sapien
ctttcaagggtaaccagcttctcaacatgaaaa

SEQ ID NO: 428371 - DNA, 33 bp, Homo sapien
ttactttcttgaactccgaaggaacgcttttca

SEQ ID NO: 428372 - DNA, 33 bp, Homo sapien
ttactttcttgaactctgaaggaacgcttttca

SEQ ID NO: 428373 - DNA, 33 bp, Homo sapien
gaagtctacaggtacactgacatctaatttcag

SEQ ID NO: 428374 - DNA, 33 bp, Homo sapien
gaagtctacaggtacattgacatctaatttcag

SEQ ID NO: 428375 - DNA, 33 bp, Homo sapien
gcatggtacatacttccataagggacatgtaaa

SEQ ID NO: 428376 - DNA, 33 bp, Homo sapien
gcatggtacatacttctataagggacatgtaaa

SEQ ID NO: 428377 - DNA, 33 bp, Homo sapien
gtgcagctgcagaagacgaaaatgttaaattga

SEQ ID NO: 428378 - DNA, 33 bp, Homo sapien
gtgcagctgcagaagaggaaaatgttaaattga

SEQ ID NO: 428379 - DNA, 33 bp, Homo sapien
acagacatttgccatcaattctctctaaaggct

SEQ ID NO: 428380 - DNA, 33 bp, Homo sapien
acagacatttgccatcgattctctctaaaggct

SEQ ID NO: 428381 - DNA, 33 bp, Homo sapien
aggattcacattatcaaagctcctgagactaat

SEQ ID NO: 428382 - DNA, 33 bp, Homo sapien
aggattcacattatcagagctcctgagactaat

SEQ ID NO: 428383 - DNA, 33 bp, Homo sapien
taggtaaacaaatgtacacataaaaaagcatga

SEQ ID NO: 428384 - DNA, 33 bp, Homo sapien
taggtaaacaaatgtagacataaaaaagcatga

SEQ ID NO: 428385 - DNA, 33 bp, Homo sapien
aatatattttcaaagcagatattttgagataat

SEQ ID NO: 428386 - DNA, 33 bp, Homo sapien
aatatattttcaaagccgatattttgagataat

SEQ ID NO: 428387 - DNA, 33 bp, Homo sapien
ctgtgccttgccaatgaattcactgctgtaaat

SEQ ID NO: 428388 - DNA, 33 bp, Homo sapien
ctgtgccttgccaatgcattcactgctgtaaat

SEQ ID NO: 428389 - DNA, 33 bp, Homo sapien
taggctggtttgagttaaaaaaactgctggggt

SEQ ID NO: 428390 - DNA, 33 bp, Homo sapien
taggctggtttgagttcaaaaaactgctggggt

SEQ ID NO: 428391 - DNA, 33 bp, Homo sapien
taaactcagacctacacataaacacatagagca

SEQ ID NO: 428392 - DNA, 33 bp, Homo sapien
taaactcagacctacatataaacacatagagca

SEQ ID NO: 428393 - DNA, 33 bp, Homo sapien
ctcattgtgtctgtagaaaaagatacaccttgg

SEQ ID NO: 428394 - DNA, 33 bp, Homo sapien
ctcattgtgtctgtagtaaaagatacaccttgg

SEQ ID NO: 428395 - DNA, 33 bp, Homo sapien
ctaatcccacttaaaactcttgatcgctagcag

SEQ ID NO: 428396 - DNA, 33 bp, Homo sapien
ctaatcccacttaaaattcttgatcgctagcag

SEQ ID NO: 428397 - DNA, 33 bp, Homo sapien
cctatcaacattctaccccttgctattgctaaa

SEQ ID NO: 428398 - DNA, 33 bp, Homo sapien
cctatcaacattctactccttgctattgctaaa

SEQ ID NO: 428399 - DNA, 33 bp, Homo sapien
ctttgtgttaaaagaaaaaagcacaggacatag

SEQ ID NO: 428400 - DNA, 33 bp, Homo sapien
ctttgtgttaaaagaagaaagcacaggacatag

SEQ ID NO: 428401 - DNA, 33 bp, Homo sapien
aggtagactacgcaataaatgatgctgacaaat

SEQ ID NO: 428402 - DNA, 33 bp, Homo sapien
aggtagactacgcaatgaatgatgctgacaaat

SEQ ID NO: 428403 - DNA, 33 bp, Homo sapien
aagcaactacacaattaaatctacataacaact

SEQ ID NO: 428404 - DNA, 33 bp, Homo sapien
aagcaactacacaattcaatctacataacaact

SEQ ID NO: 428405 - DNA, 33 bp, Homo sapien
tagcagcagaccccccagcaaaatcttacaaat

SEQ ID NO: 428406 - DNA, 33 bp, Homo sapien
tagcagcagacccccccgcaaaatcttacaaat

SEQ ID NO: 428407 - DNA, 33 bp, Homo sapien
cttgctgcttttgctcactttggaagaacaggc

SEQ ID NO: 428408 - DNA, 33 bp, Homo sapien
cttgctgcttttgctcgctttggaagaacaggc

SEQ ID NO: 428409 - DNA, 33 bp, Homo sapien
acagttttcctttcccccaaagtgacatgtgga

SEQ ID NO: 428410 - DNA, 33 bp, Homo sapien
acagttttcctttccctcaaagtgacatgtgga

SEQ ID NO: 428411 - DNA, 33 bp, Homo sapien
gcctgaagacttgaaactgtacaaatagcttct

SEQ ID NO: 428412 - DNA, 33 bp, Homo sapien
gcctgaagacttgaaattgtacaaatagcttct

SEQ ID NO: 428413 - DNA, 33 bp, Homo sapien
acagttattctattaaccacagtgaattcattt

SEQ ID NO: 428414 - DNA, 33 bp, Homo sapien
acagttattctattaatcacagtgaattcattt

SEQ ID NO: 428415 - DNA, 33 bp, Homo sapien
ttggctatagtcaaaaacagagtaatcattacg

SEQ ID NO: 428416 - DNA, 33 bp, Homo sapien
ttggctatagtcaaaagcagagtaatcattacg

SEQ ID NO: 428417 - DNA, 33 bp, Homo sapien
tcaaagacagactgccaatggaatccctcctca

SEQ ID NO: 428418 - DNA, 33 bp, Homo sapien
tcaaagacagactgccgatggaatccctcctca

SEQ ID NO: 428419 - DNA, 33 bp, Homo sapien
tgaaattttcagcaggaaaacgccgctcagagt

SEQ ID NO: 428420 - DNA, 33 bp, Homo sapien
tgaaattttcagcagggaaacgccgctcagagt

SEQ ID NO: 428421 - DNA, 33 bp, Homo sapien
gacactaaatggaccacgagaaggatagacagt

SEQ ID NO: 428422 - DNA, 33 bp, Homo sapien
gacactaaatggaccatgagaaggatagacagt

SEQ ID NO: 428423 - DNA, 33 bp, Homo sapien
tactatactactctacacagttcaaaaatagag

SEQ ID NO: 428424 - DNA, 33 bp, Homo sapien
tactatactactctacgcagttcaaaaatagag

SEQ ID NO: 428425 - DNA, 33 bp, Homo sapien
cattgagtaggtattacgtatcatgcagaatgg

SEQ ID NO: 428426 - DNA, 33 bp, Homo sapien
cattgagtaggtattatgtatcatgcagaatgg

SEQ ID NO: 428427 - DNA, 33 bp, Homo sapien
ttacatgtactcctgccctaaatacattaaaca

SEQ ID NO: 428428 - DNA, 33 bp, Homo sapien
ttacatgtactcctgctctaaatacattaaaca

SEQ ID NO: 428429 - DNA, 33 bp, Homo sapien
tttagagtagaattcacaggtcatgttggggct

SEQ ID NO: 428430 - DNA, 33 bp, Homo sapien
tttagagtagaattcataggtcatgttggggct

SEQ ID NO: 428431 - DNA, 33 bp, Homo sapien
ctatatgagttaaaaaaaagaaggcaatgttgc

SEQ ID NO: 428432 - DNA, 33 bp, Homo sapien
ctatatgagttaaaaagaagaaggcaatgttgc

SEQ ID NO: 428433 - DNA, 33 bp, Homo sapien
acatgagcattcctcaataaaatttgctagagt

SEQ ID NO: 428434 - DNA, 33 bp, Homo sapien
acatgagcattcctcagtaaaatttgctagagt

SEQ ID NO: 428435 - DNA, 33 bp, Homo sapien
aaacatcattccataaacactcagtaaatgttt

SEQ ID NO: 428436 - DNA, 33 bp, Homo sapien
aaacatcattccataagcactcagtaaatgttt

SEQ ID NO: 428437 - DNA, 33 bp, Homo sapien
ccactgaattcacaacaagagggaagaggaata

SEQ ID NO: 428438 - DNA, 33 bp, Homo sapien
ccactgaattcacaacgagagggaagaggaata

SEQ ID NO: 428439 - DNA, 33 bp, Homo sapien
atgtggcctcttgacaatagctttgacatatat

SEQ ID NO: 428440 - DNA, 33 bp, Homo sapien
atgtggcctcttgacagtagctttgacatatat

SEQ ID NO: 428441 - DNA, 33 bp, Homo sapien
ttacggtcacagatggaattaaaattgataatt

SEQ ID NO: 428442 - DNA, 33 bp, Homo sapien
ttacggtcacagatggtattaaaattgataatt

SEQ ID NO: 428443 - DNA, 33 bp, Homo sapien
atgtgatctaactccacacctctcatgcatggc

SEQ ID NO: 428444 - DNA, 33 bp, Homo sapien
atgtgatctaactccagacctctcatgcatggc

SEQ ID NO: 428445 - DNA, 33 bp, Homo sapien
aatcatcttaatctcccagtactacataactta

SEQ ID NO: 428446 - DNA, 33 bp, Homo sapien
aatcatcttaatctcctagtactacataactta

SEQ ID NO: 428447 - DNA, 33 bp, Homo sapien
taattcctaacacaaaaggtcaatggaaatgca

SEQ ID NO: 428448 - DNA, 33 bp, Homo sapien
taattcctaacacaaagggtcaatggaaatgca

SEQ ID NO: 428449 - DNA, 33 bp, Homo sapien
attttggatggaatcaacaacaaattagacata

SEQ ID NO: 428450 - DNA, 33 bp, Homo sapien
attttggatggaatcagcaacaaattagacata

SEQ ID NO: 428451 - DNA, 33 bp, Homo sapien
ttttagctcttaacaaaacatatgttcagaaaa

SEQ ID NO: 428452 - DNA, 33 bp, Homo sapien
ttttagctcttaacaagacatatgttcagaaaa

SEQ ID NO: 428453 - DNA, 33 bp, Homo sapien
gttcactgtgcccatacgaagaaagcgatcact

SEQ ID NO: 428454 - DNA, 33 bp, Homo sapien
gttcactgtgcccatatgaagaaagcgatcact

SEQ ID NO: 428455 - DNA, 33 bp, Homo sapien
aggactaggtggagtaaagaaggcatcactttc

SEQ ID NO: 428456 - DNA, 33 bp, Homo sapien
aggactaggtggagtagagaaggcatcactttc

SEQ ID NO: 428457 - DNA, 33 bp, Homo sapien
tgtttacctttgggaagtaggactaggtggagt

SEQ ID NO: 428458 - DNA, 33 bp, Homo sapien
tgtttacctttgggaattaggactaggtggagt

SEQ ID NO: 428459 - DNA, 33 bp, Homo sapien
aattcactgctttggtaaacttcacttacctct

SEQ ID NO: 428460 - DNA, 33 bp, Homo sapien
aattcactgctttggtgaacttcacttacctct

SEQ ID NO: 428461 - DNA, 33 bp, Homo sapien
tcactgaatgcaaactcaggaagtcacacaatt

SEQ ID NO: 428462 - DNA, 33 bp, Homo sapien
tcactgaatgcaaacttaggaagtcacacaatt

SEQ ID NO: 428463 - DNA, 33 bp, Homo sapien
actggtcttaagccacaattttattccttaatc

SEQ ID NO: 428464 - DNA, 33 bp, Homo sapien
actggtcttaagccacgattttattccttaatc

SEQ ID NO: 428465 - DNA, 33 bp, Homo sapien
gaatcacagttctgccactaattatctgtagta

SEQ ID NO: 428466 - DNA, 33 bp, Homo sapien
gaatcacagttctgccgctaattatctgtagta

SEQ ID NO: 428467 - DNA, 33 bp, Homo sapien
caaatataatatgatcaatggtgaagcaactag

SEQ ID NO: 428468 - DNA, 33 bp, Homo sapien
caaatataatatgatctatggtgaagcaactag

SEQ ID NO: 428469 - DNA, 33 bp, Homo sapien
ttcactctttccaacaatgatcgggtatataga

SEQ ID NO: 428470 - DNA, 33 bp, Homo sapien
ttcactctttccaacattgatcgggtatataga

SEQ ID NO: 428471 - DNA, 33 bp, Homo sapien
atttaccattcaaaaaatcctaaagcatttaag

SEQ ID NO: 428472 - DNA, 33 bp, Homo sapien
atttaccattcaaaaattcctaaagcatttaag

SEQ ID NO: 428473 - DNA, 33 bp, Homo sapien
caaagaaaagacctaactgtcctcaattttgtg

SEQ ID NO: 428474 - DNA, 33 bp, Homo sapien
caaagaaaagacctaagtgtcctcaattttgtg

SEQ ID NO: 428475 - DNA, 33 bp, Homo sapien
cctttaactgctcttcaccttcggacagagagc

SEQ ID NO: 428476 - DNA, 33 bp, Homo sapien
cctttaactgctcttcgccttcggacagagagc

SEQ ID NO: 428477 - DNA, 33 bp, Homo sapien
catagagggtgtgacacaaaagccatgaggagg

SEQ ID NO: 428478 - DNA, 33 bp, Homo sapien
catagagggtgtgacataaaagccatgaggagg

SEQ ID NO: 428479 - DNA, 33 bp, Homo sapien
atcatactatttgaataaatgaggacatgacca

SEQ ID NO: 428480 - DNA, 33 bp, Homo sapien
atcatactatttgaatgaatgaggacatgacca

SEQ ID NO: 428481 - DNA, 33 bp, Homo sapien
agagacagagggagaggagatgaaaatattcat

SEQ ID NO: 428482 - DNA, 33 bp, Homo sapien
agagacagagggagagtagatgaaaatattcat

SEQ ID NO: 428483 - DNA, 33 bp, Homo sapien
gatgtcctcttccacacaagctaagagagacag

SEQ ID NO: 428484 - DNA, 33 bp, Homo sapien
gatgtcctcttccacataagctaagagagacag

SEQ ID NO: 428485 - DNA, 33 bp, Homo sapien
acaaaggccaacaaaagttcctgttttctcatc

SEQ ID NO: 428486 - DNA, 33 bp, Homo sapien
acaaaggccaacaaaatttcctgttttctcatc

SEQ ID NO: 428487 - DNA, 33 bp, Homo sapien
gcctgcagtcccagataaggtcagagttaagtc

SEQ ID NO: 428488 - DNA, 33 bp, Homo sapien
gcctgcagtcccagattaggtcagagttaagtc

SEQ ID NO: 428489 - DNA, 33 bp, Homo sapien
ctccgctcctcctacaatcaatcttgctggctc

SEQ ID NO: 428490 - DNA, 33 bp, Homo sapien
ctccgctcctcctacagtcaatcttgctggctc

SEQ ID NO: 428491 - DNA, 33 bp, Homo sapien
tcaaatatgcatttaacggacaattcaagtaaa

SEQ ID NO: 428492 - DNA, 33 bp, Homo sapien
tcaaatatgcatttaatggacaattcaagtaaa

SEQ ID NO: 428493 - DNA, 33 bp, Homo sapien
ggttcgagctctaggacaatctgttgccatccc

SEQ ID NO: 428494 - DNA, 33 bp, Homo sapien
ggttcgagctctaggagaatctgttgccatccc

SEQ ID NO: 428495 - DNA, 33 bp, Homo sapien
tgtgttaatttgctgcagatgatattttccagc

SEQ ID NO: 428496 - DNA, 33 bp, Homo sapien
tgtgttaatttgctgcggatgatattttccagc

SEQ ID NO: 428497 - DNA, 33 bp, Homo sapien
ctatatttcattttaccactttccctacagagt

SEQ ID NO: 428498 - DNA, 33 bp, Homo sapien
ctatatttcattttactactttccctacagagt

SEQ ID NO: 428499 - DNA, 33 bp, Homo sapien
tacatttttattaggcaactttctgacccattg

SEQ ID NO: 428500 - DNA, 33 bp, Homo sapien
tacatttttattaggctactttctgacccattg

SEQ ID NO: 428501 - DNA, 33 bp, Homo sapien
ccagaatttccttaggcaagcagctacaaaatt

SEQ ID NO: 428502 - DNA, 33 bp, Homo sapien
ccagaatttccttaggtaagcagctacaaaatt

SEQ ID NO: 428503 - DNA, 33 bp, Homo sapien
tacccaaagtgtcttccatttaatctaccatat

SEQ ID NO: 428504 - DNA, 33 bp, Homo sapien
tacccaaagtgtcttctatttaatctaccatat

SEQ ID NO: 428505 - DNA, 33 bp, Homo sapien
tttgggtaattgaatgaaaggtgataacttgtc

SEQ ID NO: 428506 - DNA, 33 bp, Homo sapien
tttgggtaattgaatggaaggtgataacttgtc

SEQ ID NO: 428507 - DNA, 33 bp, Homo sapien
tcattaaaaaaacaaaatatctcagtcagccta

SEQ ID NO: 428508 - DNA, 33 bp, Homo sapien
tcattaaaaaaacaaattatctcagtcagccta

SEQ ID NO: 428509 - DNA, 33 bp, Homo sapien
aggttaaactgctctaactttctacataaaaag

SEQ ID NO: 428510 - DNA, 33 bp, Homo sapien
aggttaaactgctctatctttctacataaaaag

SEQ ID NO: 428511 - DNA, 33 bp, Homo sapien
agttcctctctgatcacatcttctattattcca

SEQ ID NO: 428512 - DNA, 33 bp, Homo sapien
agttcctctctgatcagatcttctattattcca

SEQ ID NO: 428513 - DNA, 33 bp, Homo sapien
actgattttcctgaaccgactgtattggatcat

SEQ ID NO: 428514 - DNA, 33 bp, Homo sapien
actgattttcctgaactgactgtattggatcat

SEQ ID NO: 428515 - DNA, 33 bp, Homo sapien
aaatgtcagtgtgtataacaagcagtataacag

SEQ ID NO: 428516 - DNA, 33 bp, Homo sapien
aaatgtcagtgtgtatcacaagcagtataacag

SEQ ID NO: 428517 - DNA, 33 bp, Homo sapien
gtcttcactaggagaagagttaaaagcgatcat

SEQ ID NO: 428518 - DNA, 33 bp, Homo sapien
gtcttcactaggagaatagttaaaagcgatcat

SEQ ID NO: 428519 - DNA, 33 bp, Homo sapien
gaaagatctttaacaacggtcatcttattctgg

SEQ ID NO: 428520 - DNA, 33 bp, Homo sapien
gaaagatctttaacaatggtcatcttattctgg

SEQ ID NO: 428521 - DNA, 33 bp, Homo sapien
tgatgaagtttatgaaagatatctagaggcctg

SEQ ID NO: 428522 - DNA, 33 bp, Homo sapien
tgatgaagtttatgaatgatatctagaggcctg

SEQ ID NO: 428523 - DNA, 33 bp, Homo sapien
aagagctaaaggaagaaagaggagtgagcacat

SEQ ID NO: 428524 - DNA, 33 bp, Homo sapien
aagagctaaaggaagagagaggagtgagcacat

SEQ ID NO: 428525 - DNA, 33 bp, Homo sapien
acaaatagtaaattccaagacaaacaatatcat

SEQ ID NO: 428526 - DNA, 33 bp, Homo sapien
acaaatagtaaattccgagacaaacaatatcat

SEQ ID NO: 428527 - DNA, 33 bp, Homo sapien
gtcctctgaagcacaaatgtgtatggcatttct

SEQ ID NO: 428528 - DNA, 33 bp, Homo sapien
gtcctctgaagcacaagtgtgtatggcatttct

SEQ ID NO: 428529 - DNA, 33 bp, Homo sapien
tgagaacagcattggactaagagagaagtcaac

SEQ ID NO: 428530 - DNA, 33 bp, Homo sapien
tgagaacagcattggattaagagagaagtcaac

SEQ ID NO: 428531 - DNA, 33 bp, Homo sapien
agaactattagcacacagtcatacaatgttcca

SEQ ID NO: 428532 - DNA, 33 bp, Homo sapien
agaactattagcacacggtcatacaatgttcca

SEQ ID NO: 428533 - DNA, 33 bp, Homo sapien
agatcttgattcagtcactcccattgccactcc

SEQ ID NO: 428534 - DNA, 33 bp, Homo sapien
agatcttgattcagtcgctcccattgccactcc

SEQ ID NO: 428535 - DNA, 33 bp, Homo sapien
gcgtggttttgaataaagttcattgctcttatt

SEQ ID NO: 428536 - DNA, 33 bp, Homo sapien
gcgtggttttgaataatgttcattgctcttatt

SEQ ID NO: 428537 - DNA, 33 bp, Homo sapien
attcctaatatggcaaaacaaggggggatttgt

SEQ ID NO: 428538 - DNA, 33 bp, Homo sapien
attcctaatatggcaagacaaggggggatttgt

SEQ ID NO: 428539 - DNA, 33 bp, Homo sapien
tctctgtagattctccaaccattatgtatcttt

SEQ ID NO: 428540 - DNA, 33 bp, Homo sapien
tctctgtagattctccgaccattatgtatcttt

SEQ ID NO: 428541 - DNA, 33 bp, Homo sapien
agatggttatgtgacacggaaagacaagttcat

SEQ ID NO: 428542 - DNA, 33 bp, Homo sapien
agatggttatgtgacatggaaagacaagttcat

SEQ ID NO: 428543 - DNA, 33 bp, Homo sapien
aaccaaaatataggggacagatatgctcattac

SEQ ID NO: 428544 - DNA, 33 bp, Homo sapien
aaccaaaatatagggggcagatatgctcattac

SEQ ID NO: 428545 - DNA, 33 bp, Homo sapien
gaaatagtttcagtaggaataggcccagctctt

SEQ ID NO: 428546 - DNA, 33 bp, Homo sapien
gaaatagtttcagtagtaataggcccagctctt

SEQ ID NO: 428547 - DNA, 33 bp, Homo sapien
tctgcacagccaaaaaagtatgagatcatgtct

SEQ ID NO: 428548 - DNA, 33 bp, Homo sapien
tctgcacagccaaaaaggtatgagatcatgtct

SEQ ID NO: 428549 - DNA, 33 bp, Homo sapien
aaactttctataaccaaactgcctcatgacata

SEQ ID NO: 428550 - DNA, 33 bp, Homo sapien
aaactttctataaccagactgcctcatgacata

SEQ ID NO: 428551 - DNA, 33 bp, Homo sapien
aaaaaatcaatgcaacaggatacttaaatttaa

SEQ ID NO: 428552 - DNA, 33 bp, Homo sapien
aaaaaatcaatgcaacgggatacttaaatttaa

SEQ ID NO: 428553 - DNA, 33 bp, Homo sapien
tgaacaaaggacatcccctagtttaatgccaga

SEQ ID NO: 428554 - DNA, 33 bp, Homo sapien
tgaacaaaggacatcctctagtttaatgccaga

SEQ ID NO: 428555 - DNA, 33 bp, Homo sapien
gttcgttttctcgggacacaggtttcctttctt

SEQ ID NO: 428556 - DNA, 33 bp, Homo sapien
gttcgttttctcgggatacaggtttcctttctt

SEQ ID NO: 428557 - DNA, 33 bp, Homo sapien
aaattttaccttcataagcaaaggtgattagca

SEQ ID NO: 428558 - DNA, 33 bp, Homo sapien
aaattttaccttcatacgcaaaggtgattagca

SEQ ID NO: 428559 - DNA, 33 bp, Homo sapien
cagtataggctcaatacggaggatcctataagg

SEQ ID NO: 428560 - DNA, 33 bp, Homo sapien
cagtataggctcaatatggaggatcctataagg

SEQ ID NO: 428561 - DNA, 33 bp, Homo sapien
gcagatcggtcagttacaaattttgctgcatat

SEQ ID NO: 428562 - DNA, 33 bp, Homo sapien
gcagatcggtcagttataaattttgctgcatat

SEQ ID NO: 428563 - DNA, 33 bp, Homo sapien
aacttgactttgtgaccgtatgggagtactttg

SEQ ID NO: 428564 - DNA, 33 bp, Homo sapien
aacttgactttgtgacggtatgggagtactttg

SEQ ID NO: 428565 - DNA, 33 bp, Homo sapien
aaggaaaatttaatacaggaaatcagaagttgt

SEQ ID NO: 428566 - DNA, 33 bp, Homo sapien
aaggaaaatttaatactggaaatcagaagttgt

SEQ ID NO: 428567 - DNA, 33 bp, Homo sapien
aattctactgactgagaagtttttacagaggga

SEQ ID NO: 428568 - DNA, 33 bp, Homo sapien
aattctactgactgaggagtttttacagaggga

SEQ ID NO: 428569 - DNA, 33 bp, Homo sapien
agtcaaaaagattagacgtaagaggaaggaggg

SEQ ID NO: 428570 - DNA, 33 bp, Homo sapien
agtcaaaaagattagatgtaagaggaaggaggg

SEQ ID NO: 428571 - DNA, 33 bp, Homo sapien
aaggatattcccctgacgctagtgtccaaccca

SEQ ID NO: 428572 - DNA, 33 bp, Homo sapien
aaggatattcccctgaggctagtgtccaaccca

SEQ ID NO: 428573 - DNA, 33 bp, Homo sapien
ccaatattgattgaaacaagagttgattgcatg

SEQ ID NO: 428574 - DNA, 33 bp, Homo sapien
ccaatattgattgaaataagagttgattgcatg

SEQ ID NO: 428575 - DNA, 33 bp, Homo sapien
ggtaataacatctaagaaatggctttctcctaa

SEQ ID NO: 428576 - DNA, 33 bp, Homo sapien
ggtaataacatctaagcaatggctttctcctaa

SEQ ID NO: 428577 - DNA, 33 bp, Homo sapien
tggagaatgtcatgtaagcaatgtaactctctg

SEQ ID NO: 428578 - DNA, 33 bp, Homo sapien
tggagaatgtcatgtaggcaatgtaactctctg

SEQ ID NO: 428579 - DNA, 33 bp, Homo sapien
ttagacatgattgatcactctcttccctgtact

SEQ ID NO: 428580 - DNA, 33 bp, Homo sapien
ttagacatgattgatccctctcttccctgtact

SEQ ID NO: 428581 - DNA, 33 bp, Homo sapien
cagttgcatgtaaggaggttttgcaattttttt

SEQ ID NO: 428582 - DNA, 33 bp, Homo sapien
cagttgcatgtaaggatgttttgcaattttttt

SEQ ID NO: 428583 - DNA, 33 bp, Homo sapien
tttaatattttgtgtaacctaacctagcaagac

SEQ ID NO: 428584 - DNA, 33 bp, Homo sapien
tttaatattttgtgtaccctaacctagcaagac

SEQ ID NO: 428585 - DNA, 33 bp, Homo sapien
ggaagtcagttaattaaaagcctcactacaaat

SEQ ID NO: 428586 - DNA, 33 bp, Homo sapien
ggaagtcagttaattagaagcctcactacaaat

SEQ ID NO: 428587 - DNA, 33 bp, Homo sapien
ctgtacttgtcttgaacgtcatccttggtcagc

SEQ ID NO: 428588 - DNA, 33 bp, Homo sapien
ctgtacttgtcttgaaggtcatccttggtcagc

SEQ ID NO: 428589 - DNA, 33 bp, Homo sapien
tcagcttgggaacttccagttaaagccatccag

SEQ ID NO: 428590 - DNA, 33 bp, Homo sapien
tcagcttgggaacttctagttaaagccatccag

SEQ ID NO: 428591 - DNA, 33 bp, Homo sapien
agaatgggcaatgtgcgaattggagaaggaaag

SEQ ID NO: 428592 - DNA, 33 bp, Homo sapien
agaatgggcaatgtgctaattggagaaggaaag

SEQ ID NO: 428593 - DNA, 33 bp, Homo sapien
gtgcatcatggtgagaaaagaaaattactctag

SEQ ID NO: 428594 - DNA, 33 bp, Homo sapien
gtgcatcatggtgagagaagaaaattactctag

SEQ ID NO: 428595 - DNA, 33 bp, Homo sapien
aatggaagagataatgcattgagaaagtgaaga

SEQ ID NO: 428596 - DNA, 33 bp, Homo sapien
aatggaagagataatgtattgagaaagtgaaga

SEQ ID NO: 428597 - DNA, 33 bp, Homo sapien
ggatattggttgctctcaccttaaagactgttt

SEQ ID NO: 428598 - DNA, 33 bp, Homo sapien
ggatattggttgctcttaccttaaagactgttt

SEQ ID NO: 428599 - DNA, 33 bp, Homo sapien
acatatcaaactcaaaactcaaagctcatatat

SEQ ID NO: 428600 - DNA, 33 bp, Homo sapien
acatatcaaactcaaacctcaaagctcatatat

SEQ ID NO: 428601 - DNA, 33 bp, Homo sapien
tggttgtttatttgtaaatttagtctcacaaac

SEQ ID NO: 428602 - DNA, 33 bp, Homo sapien
tggttgtttatttgtacatttagtctcacaaac

SEQ ID NO: 428603 - DNA, 33 bp, Homo sapien
tttgtttagttctgtccagttgtatactgattt

SEQ ID NO: 428604 - DNA, 33 bp, Homo sapien
tttgtttagttctgtctagttgtatactgattt

SEQ ID NO: 428605 - DNA, 33 bp, Homo sapien
tttaacttcttcattacgtaatccaagatcttt

SEQ ID NO: 428606 - DNA, 33 bp, Homo sapien
tttaacttcttcattatgtaatccaagatcttt

SEQ ID NO: 428607 - DNA, 33 bp, Homo sapien
tttcaagatcaatttacaagtcagaaaatactt

SEQ ID NO: 428608 - DNA, 33 bp, Homo sapien
tttcaagatcaatttataagtcagaaaatactt

SEQ ID NO: 428609 - DNA, 33 bp, Homo sapien
ataatgcaaatgttaaatcttcagtagagagat

SEQ ID NO: 428610 - DNA, 33 bp, Homo sapien
ataatgcaaatgttaagtcttcagtagagagat

SEQ ID NO: 428611 - DNA, 33 bp, Homo sapien
aaaatagattcactccaaataaaaattcattgg

SEQ ID NO: 428612 - DNA, 33 bp, Homo sapien
aaaatagattcactccgaataaaaattcattgg

SEQ ID NO: 428613 - DNA, 33 bp, Homo sapien
tattgaaggtcagagaagtaaactgtgctctct

SEQ ID NO: 428614 - DNA, 33 bp, Homo sapien
tattgaaggtcagagatgtaaactgtgctctct

SEQ ID NO: 428615 - DNA, 33 bp, Homo sapien
ctcatctcgatgctaaaagagacaaataacatt

SEQ ID NO: 428616 - DNA, 33 bp, Homo sapien
ctcatctcgatgctaacagagacaaataacatt

SEQ ID NO: 428617 - DNA, 33 bp, Homo sapien
tgtaaatcaccatggaaaattttacaccttcag

SEQ ID NO: 428618 - DNA, 33 bp, Homo sapien
tgtaaatcaccatggagaattttacaccttcag

SEQ ID NO: 428619 - DNA, 33 bp, Homo sapien
caaataacagtagagaacttgtgtatcataatc

SEQ ID NO: 428620 - DNA, 33 bp, Homo sapien
caaataacagtagagaccttgtgtatcataatc

SEQ ID NO: 428621 - DNA, 33 bp, Homo sapien
aaaactggtaagaacaaacttatggagattaag

SEQ ID NO: 428622 - DNA, 33 bp, Homo sapien
aaaactggtaagaacagacttatggagattaag

SEQ ID NO: 428623 - DNA, 33 bp, Homo sapien
ataaagcattcttctcgccatatctggccgctc

SEQ ID NO: 428624 - DNA, 33 bp, Homo sapien
ataaagcattcttctctccatatctggccgctc

SEQ ID NO: 428625 - DNA, 33 bp, Homo sapien
ccctaaaatatccttacccttctgcaatttatg

SEQ ID NO: 428626 - DNA, 33 bp, Homo sapien
ccctaaaatatccttatccttctgcaatttatg

SEQ ID NO: 428627 - DNA, 33 bp, Homo sapien
gaaataattattgcgcacgttgttttagtatac

SEQ ID NO: 428628 - DNA, 33 bp, Homo sapien
gaaataattattgcgcgcgttgttttagtatac

SEQ ID NO: 428629 - DNA, 33 bp, Homo sapien
ccattgtgtctctataaaaagggagaaatacat

SEQ ID NO: 428630 - DNA, 33 bp, Homo sapien
ccattgtgtctctatagaaagggagaaatacat

SEQ ID NO: 428631 - DNA, 33 bp, Homo sapien
gtcaatgtcttctcagcacctgctatgtgcctg

SEQ ID NO: 428632 - DNA, 33 bp, Homo sapien
gtcaatgtcttctcaggacctgctatgtgcctg

SEQ ID NO: 428633 - DNA, 33 bp, Homo sapien
aattgacgataagtgaaatcttgtctagcatgg

SEQ ID NO: 428634 - DNA, 33 bp, Homo sapien
aattgacgataagtgacatcttgtctagcatgg

SEQ ID NO: 428635 - DNA, 33 bp, Homo sapien
actatcaatgccaaacacaatgggtaattttct

SEQ ID NO: 428636 - DNA, 33 bp, Homo sapien
actatcaatgccaaacgcaatgggtaattttct

SEQ ID NO: 428637 - DNA, 33 bp, Homo sapien
gactgagcctcagaaaatgttttatagtgtctg

SEQ ID NO: 428638 - DNA, 33 bp, Homo sapien
gactgagcctcagaaagtgttttatagtgtctg

SEQ ID NO: 428639 - DNA, 33 bp, Homo sapien
ctgcattggtgacaaacgtaattgtatataaat

SEQ ID NO: 428640 - DNA, 33 bp, Homo sapien
ctgcattggtgacaaatgtaattgtatataaat

SEQ ID NO: 428641 - DNA, 33 bp, Homo sapien
taaaaattagcagtgtaaaaggataaaggcaag

SEQ ID NO: 428642 - DNA, 33 bp, Homo sapien
taaaaattagcagtgttaaaggataaaggcaag

SEQ ID NO: 428643 - DNA, 33 bp, Homo sapien
caacaccttttagcaacacctactggctcagtg

SEQ ID NO: 428644 - DNA, 33 bp, Homo sapien
caacaccttttagcaatacctactggctcagtg

SEQ ID NO: 428645 - DNA, 33 bp, Homo sapien
ttgagtttgtaaagccaataaaagaacttggaa

SEQ ID NO: 428646 - DNA, 33 bp, Homo sapien
ttgagtttgtaaagccgataaaagaacttggaa

SEQ ID NO: 428647 - DNA, 33 bp, Homo sapien
taattgttaaccatgcaaagtatattaggtttg

SEQ ID NO: 428648 - DNA, 33 bp, Homo sapien
taattgttaaccatgcgaagtatattaggtttg

SEQ ID NO: 428649 - DNA, 33 bp, Homo sapien
gactggcctacataaacatagtttcatttcttt

SEQ ID NO: 428650 - DNA, 33 bp, Homo sapien
gactggcctacataaatatagtttcatttcttt

SEQ ID NO: 428651 - DNA, 33 bp, Homo sapien
aaatcaagtaactgtcacaagatgagaaaattg

SEQ ID NO: 428652 - DNA, 33 bp, Homo sapien
aaatcaagtaactgtcgcaagatgagaaaattg

SEQ ID NO: 428653 - DNA, 33 bp, Homo sapien
actgtcgcattatcccaaacaattacgttaagt

SEQ ID NO: 428654 - DNA, 33 bp, Homo sapien
actgtcgcattatcccgaacaattacgttaagt

SEQ ID NO: 428655 - DNA, 33 bp, Homo sapien
acggcttactttggacacacatcttgatctctc

SEQ ID NO: 428656 - DNA, 33 bp, Homo sapien
acggcttactttggactcacatcttgatctctc

SEQ ID NO: 428657 - DNA, 33 bp, Homo sapien
gccgttgtcgtttgcccaaagtgttcttcatag

SEQ ID NO: 428658 - DNA, 33 bp, Homo sapien
gccgttgtcgtttgccgaaagtgttcttcatag

SEQ ID NO: 428659 - DNA, 33 bp, Homo sapien
tatttattctttaatccaaaaatactgagctcc

SEQ ID NO: 428660 - DNA, 33 bp, Homo sapien
tatttattctttaatcgaaaaatactgagctcc

SEQ ID NO: 428661 - DNA, 33 bp, Homo sapien
catcttgcatatgtgacagacattctcattttg

SEQ ID NO: 428662 - DNA, 33 bp, Homo sapien
catcttgcatatgtgatagacattctcattttg

SEQ ID NO: 428663 - DNA, 33 bp, Homo sapien
ggtgttttctaggaaactgatgagatttcagat

SEQ ID NO: 428664 - DNA, 33 bp, Homo sapien
ggtgttttctaggaaattgatgagatttcagat

SEQ ID NO: 428665 - DNA, 33 bp, Homo sapien
tcacagttgtctcgaacagaaaggacctggaag

SEQ ID NO: 428666 - DNA, 33 bp, Homo sapien
tcacagttgtctcgaatagaaaggacctggaag

SEQ ID NO: 428667 - DNA, 33 bp, Homo sapien
tccctgaactcaaacaatgttatgaccatggac

SEQ ID NO: 428668 - DNA, 33 bp, Homo sapien
tccctgaactcaaacagtgttatgaccatggac

SEQ ID NO: 428669 - DNA, 33 bp, Homo sapien
ctcattgtacttaccaagagataaagtatatac

SEQ ID NO: 428670 - DNA, 33 bp, Homo sapien
ctcattgtacttaccatgagataaagtatatac

SEQ ID NO: 428671 - DNA, 33 bp, Homo sapien
ccatattaaggattccacaagaactggattaag

SEQ ID NO: 428672 - DNA, 33 bp, Homo sapien
ccatattaaggattccgcaagaactggattaag

SEQ ID NO: 428673 - DNA, 33 bp, Homo sapien
tctatatttggtctcacatggcatcatttgaaa

SEQ ID NO: 428674 - DNA, 33 bp, Homo sapien
tctatatttggtctcatatggcatcatttgaaa

SEQ ID NO: 428675 - DNA, 33 bp, Homo sapien
cttcctactgtcatgaactttacacctgcttct

SEQ ID NO: 428676 - DNA, 33 bp, Homo sapien
cttcctactgtcatgagctttacacctgcttct

SEQ ID NO: 428677 - DNA, 33 bp, Homo sapien
ctgcttcttgtctttacacacaaagtagattag

SEQ ID NO: 428678 - DNA, 33 bp, Homo sapien
ctgcttcttgtctttatacacaaagtagattag

SEQ ID NO: 428679 - DNA, 33 bp, Homo sapien
agccttagcaagacaccaaatgtactccaaaag

SEQ ID NO: 428680 - DNA, 33 bp, Homo sapien
agccttagcaagacacgaaatgtactccaaaag

SEQ ID NO: 428681 - DNA, 33 bp, Homo sapien
tctatgctcatccttaagaaacaactcttcatt

SEQ ID NO: 428682 - DNA, 33 bp, Homo sapien
tctatgctcatccttaggaaacaactcttcatt

SEQ ID NO: 428683 - DNA, 33 bp, Homo sapien
gacttctttgcttcaactcctgtgtattccact

SEQ ID NO: 428684 - DNA, 33 bp, Homo sapien
gacttctttgcttcaattcctgtgtattccact

SEQ ID NO: 428685 - DNA, 33 bp, Homo sapien
atatgtaaaggtgctagaggtatgaataagaaa

SEQ ID NO: 428686 - DNA, 33 bp, Homo sapien
atatgtaaaggtgctataggtatgaataagaaa

SEQ ID NO: 428687 - DNA, 33 bp, Homo sapien
gattaaaaacaagtgaagtaagtaatgaagtca

SEQ ID NO: 428688 - DNA, 33 bp, Homo sapien
gattaaaaacaagtgaggtaagtaatgaagtca

SEQ ID NO: 428689 - DNA, 33 bp, Homo sapien
ccctggtcttcaaatgacaaaggcagtaatttt

SEQ ID NO: 428690 - DNA, 33 bp, Homo sapien
ccctggtcttcaaatggcaaaggcagtaatttt

SEQ ID NO: 428691 - DNA, 33 bp, Homo sapien
taagttatctgtgaccaaactctaccctggttc

SEQ ID NO: 428692 - DNA, 33 bp, Homo sapien
taagttatctgtgaccgaactctaccctggttc

SEQ ID NO: 428693 - DNA, 33 bp, Homo sapien
aaaatatttaatgcagaagaattacatgactta

SEQ ID NO: 428694 - DNA, 33 bp, Homo sapien
aaaatatttaatgcaggagaattacatgactta

SEQ ID NO: 428695 - DNA, 33 bp, Homo sapien
ttggacgttttttcccaccagatgcgctaaaac

SEQ ID NO: 428696 - DNA, 33 bp, Homo sapien
ttggacgttttttcccgccagatgcgctaaaac

SEQ ID NO: 428697 - DNA, 33 bp, Homo sapien
taggtgttattctttaaagcaaggtaatttatt

SEQ ID NO: 428698 - DNA, 33 bp, Homo sapien
taggtgttattctttatagcaaggtaatttatt

SEQ ID NO: 428699 - DNA, 33 bp, Homo sapien
ggaattttgattttggaacattggccagaaatg

SEQ ID NO: 428700 - DNA, 33 bp, Homo sapien
ggaattttgattttgggacattggccagaaatg

SEQ ID NO: 428701 - DNA, 33 bp, Homo sapien
tatttttaactgttccagaatatgtataggata

SEQ ID NO: 428702 - DNA, 33 bp, Homo sapien
tatttttaactgttcctgaatatgtataggata

SEQ ID NO: 428703 - DNA, 33 bp, Homo sapien
ccacacaagtctgataccttttatgcgtattta

SEQ ID NO: 428704 - DNA, 33 bp, Homo sapien
ccacacaagtctgatatcttttatgcgtattta

SEQ ID NO: 428705 - DNA, 33 bp, Homo sapien
tgccaatcgcacgtcaaattgactggtaggaat

SEQ ID NO: 428706 - DNA, 33 bp, Homo sapien
tgccaatcgcacgtcagattgactggtaggaat

SEQ ID NO: 428707 - DNA, 33 bp, Homo sapien; identical to SEQ ID NO: 428705

SEQ ID NO: 428708 - DNA, 33 bp, Homo sapien; identical to SEQ ID NO: 428706

SEQ ID NO: 428709 - DNA, 33 bp, Homo sapien
gtgacaatatggaaaacttgagggtcagaaaca

SEQ ID NO: 428710 - DNA, 33 bp, Homo sapien
gtgacaatatggaaaatttgagggtcagaaaca

SEQ ID NO: 428711 - DNA, 33 bp, Homo sapien
ttacagagtagttcaagattcaaccagctgtga

SEQ ID NO: 428712 - DNA, 33 bp, Homo sapien
ttacagagtagttcaatattcaaccagctgtga

SEQ ID NO: 428713 - DNA, 33 bp, Homo sapien
aaactagacaagagtaagaatggaacactgaag

SEQ ID NO: 428714 - DNA, 33 bp, Homo sapien
aaactagacaagagtaggaatggaacactgaag

SEQ ID NO: 428715 - DNA, 33 bp, Homo sapien
caggatagatttttaactagtgatgaaattatc

SEQ ID NO: 428716 - DNA, 33 bp, Homo sapien
caggatagatttttaagtagtgatgaaattatc

SEQ ID NO: 428717 - DNA, 33 bp, Homo sapien
atatttgagagaatcagtagcagtattttttga

SEQ ID NO: 428718 - DNA, 33 bp, Homo sapien
atatttgagagaatcattagcagtattttttga

SEQ ID NO: 428719 - DNA, 33 bp, Homo sapien
ttctttcagaaatttgaaccgagcactgatttg

SEQ ID NO: 428720 - DNA, 33 bp, Homo sapien
ttctttcagaaatttggaccgagcactgatttg

SEQ ID NO: 428721 - DNA, 33 bp, Homo sapien
catgggaggtcattaacataacataaggcaaag

SEQ ID NO: 428722 - DNA, 33 bp, Homo sapien
catgggaggtcattaatataacataaggcaaag

SEQ ID NO: 428723 - DNA, 33 bp, Homo sapien
tttaatatttcataaaagtcaatcaaggggaaa

SEQ ID NO: 428724 - DNA, 33 bp, Homo sapien
tttaatatttcataaaggtcaatcaaggggaaa

SEQ ID NO: 428725 - DNA, 33 bp, Homo sapien
cacctataatatccacagagagtagactgccac

SEQ ID NO: 428726 - DNA, 33 bp, Homo sapien
cacctataatatccacggagagtagactgccac

SEQ ID NO: 428727 - DNA, 33 bp, Homo sapien
atgtggccacaagatgcatatggttaagtggga

SEQ ID NO: 428728 - DNA, 33 bp, Homo sapien
atgtggccacaagatgtatatggttaagtggga

SEQ ID NO: 428729 - DNA, 33 bp, Homo sapien
gcctaagcttacacaacgagcaagtagcaaagc

SEQ ID NO: 428730 - DNA, 33 bp, Homo sapien
gcctaagcttacacaatgagcaagtagcaaagc

SEQ ID NO: 428731 - DNA, 33 bp, Homo sapien
ttatttaagccactcacgctgtgtattttgtta

SEQ ID NO: 428732 - DNA, 33 bp, Homo sapien
ttatttaagccactcaggctgtgtattttgtta

SEQ ID NO: 428733 - DNA, 33 bp, Homo sapien
gcagtaacatatgcaacgacagtgaatggcatt

SEQ ID NO: 428734 - DNA, 33 bp, Homo sapien
gcagtaacatatgcaatgacagtgaatggcatt

SEQ ID NO: 428735 - DNA, 33 bp, Homo sapien
ttttgcctttgaggtaaccaacagctatcataa

SEQ ID NO: 428736 - DNA, 33 bp, Homo sapien
ttttgcctttgaggtagccaacagctatcataa

SEQ ID NO: 428737 - DNA, 33 bp, Homo sapien
tgaaatgccctagtatcactgtattgatgtcaa

SEQ ID NO: 428738 - DNA, 33 bp, Homo sapien
tgaaatgccctagtattactgtattgatgtcaa

SEQ ID NO: 428739 - DNA, 33 bp, Homo sapien
actaaaaactatgaaacattggtagaagtaatt

SEQ ID NO: 428740 - DNA, 33 bp, Homo sapien
actaaaaactatgaaatattggtagaagtaatt

SEQ ID NO: 428741 - DNA, 33 bp, Homo sapien
gcacttgagaagatagaaagtctacaggatcag

SEQ ID NO: 428742 - DNA, 33 bp, Homo sapien
gcacttgagaagataggaagtctacaggatcag

SEQ ID NO: 428743 - DNA, 33 bp, Homo sapien
aagtcaacatcgtttaaaatggctaaaattcaa

SEQ ID NO: 428744 - DNA, 33 bp, Homo sapien
aagtcaacatcgtttagaatggctaaaattcaa

SEQ ID NO: 428745 - DNA, 33 bp, Homo sapien
aagctggaggtattacactacttgacttcaaac

SEQ ID NO: 428746 - DNA, 33 bp, Homo sapien
aagctggaggtattacgctacttgacttcaaac

SEQ ID NO: 428747 - DNA, 33 bp, Homo sapien
caatattctagtagtacaacattcaggagtggt

SEQ ID NO: 428748 - DNA, 33 bp, Homo sapien
caatattctagtagtagaacattcaggagtggt

SEQ ID NO: 428749 - DNA, 33 bp, Homo sapien
aaatgctttattccacaatcctctgtaaaattc

SEQ ID NO: 428750 - DNA, 33 bp, Homo sapien
aaatgctttattccacgatcctctgtaaaattc

SEQ ID NO: 428751 - DNA, 33 bp, Homo sapien
ggacaaagttctcaagaataaccacgagagaga

SEQ ID NO: 428752 - DNA, 33 bp, Homo sapien
ggacaaagttctcaaggataaccacgagagaga

SEQ ID NO: 428753 - DNA, 33 bp, Homo sapien
taatgtaccatacataaccatgtaacatgacca

SEQ ID NO: 428754 - DNA, 33 bp, Homo sapien
taatgtaccatacatacccatgtaacatgacca

SEQ ID NO: 428755 - DNA, 33 bp, Homo sapien
tatatttcatagaggaagaaagttttgtcacac

SEQ ID NO: 428756 - DNA, 33 bp, Homo sapien
tatatttcatagaggaggaaagttttgtcacac

SEQ ID NO: 428757 - DNA, 33 bp, Homo sapien
ttttccttgtgttcaacagatttaaaatggaga

SEQ ID NO: 428758 - DNA, 33 bp, Homo sapien
ttttccttgtgttcaatagatttaaaatggaga

SEQ ID NO: 428759 - DNA, 33 bp, Homo sapien
gactacagcaatcacacatgatcattcagcttt

SEQ ID NO: 428760 - DNA, 33 bp, Homo sapien
gactacagcaatcacatatgatcattcagcttt

SEQ ID NO: 428761 - DNA, 33 bp, Homo sapien
aatatttagtacatgacaatctctgtgataaat

SEQ ID NO: 428762 - DNA, 33 bp, Homo sapien
aatatttagtacatgataatctctgtgataaat

SEQ ID NO: 428763 - DNA, 33 bp, Homo sapien
ttaactgtaatagtgaagaaattgttcaatctt

SEQ ID NO: 428764 - DNA, 33 bp, Homo sapien
ttaactgtaatagtgacgaaattgttcaatctt

SEQ ID NO: 428765 - DNA, 33 bp, Homo sapien
atatactgaatcctaacaagggcgcttcagcag

SEQ ID NO: 428766 - DNA, 33 bp, Homo sapien
atatactgaatcctaataagggcgcttcagcag

SEQ ID NO: 428767 - DNA, 33 bp, Homo sapien
taatacatacactaaaacagttaggcgagggca

SEQ ID NO: 428768 - DNA, 33 bp, Homo sapien
taatacatacactaaagcagttaggcgagggca

SEQ ID NO: 428769 - DNA, 33 bp, Homo sapien
agcaggataaataacaaaatactagccatgtct

SEQ ID NO: 428770 - DNA, 33 bp, Homo sapien
agcaggataaataacagaatactagccatgtct

SEQ ID NO: 428771 - DNA, 33 bp, Homo sapien
tgggtagttagaattacactgacttagtcaatt

SEQ ID NO: 428772 - DNA, 33 bp, Homo sapien
tgggtagttagaattatactgacttagtcaatt

SEQ ID NO: 428773 - DNA, 33 bp, Homo sapien
atgcgatcttacattacatatcttctcatcttc

SEQ ID NO: 428774 - DNA, 33 bp, Homo sapien
atgcgatcttacattatatatcttctcatcttc

SEQ ID NO: 428775 - DNA, 33 bp, Homo sapien
gaaggagaaagaggagaatttcaaagtgatatt

SEQ ID NO: 428776 - DNA, 33 bp, Homo sapien
gaaggagaaagaggagcatttcaaagtgatatt

SEQ ID NO: 428777 - DNA, 33 bp, Homo sapien
tgtcaattatagatacaggtttatgaacaaatt

SEQ ID NO: 428778 - DNA, 33 bp, Homo sapien
tgtcaattatagatacgggtttatgaacaaatt

SEQ ID NO: 428779 - DNA, 33 bp, Homo sapien
atgtaaactatgcttaagagaaatcagaaagtc

SEQ ID NO: 428780 - DNA, 33 bp, Homo sapien
atgtaaactatgcttaggagaaatcagaaagtc

SEQ ID NO: 428781 - DNA, 33 bp, Homo sapien
ggagtcaaagatataacggttcaattttaccta

SEQ ID NO: 428782 - DNA, 33 bp, Homo sapien
ggagtcaaagatataatggttcaattttaccta

SEQ ID NO: 428783 - DNA, 33 bp, Homo sapien
aatatttgcatgtcaacctttcttaactggtct

SEQ ID NO: 428784 - DNA, 33 bp, Homo sapien
aatatttgcatgtcaatctttcttaactggtct

SEQ ID NO: 428785 - DNA, 33 bp, Homo sapien
ctaggtgagtctagtgaaggcagcaaatactta

SEQ ID NO: 428786 - DNA, 33 bp, Homo sapien
ctaggtgagtctagtggaggcagcaaatactta

SEQ ID NO: 428787 - DNA, 33 bp, Homo sapien
gccttgtgaaacacaacagatctgagaacaccg

SEQ ID NO: 428788 - DNA, 33 bp, Homo sapien
gccttgtgaaacacaatagatctgagaacaccg

SEQ ID NO: 428789 - DNA, 33 bp, Homo sapien
acataaagaagatgtcacgattgaatccattat

SEQ ID NO: 428790 - DNA, 33 bp, Homo sapien
acataaagaagatgtcgcgattgaatccattat

SEQ ID NO: 428791 - DNA, 33 bp, Homo sapien
aataccatgtagtttcaccttgtactaagatta

SEQ ID NO: 428792 - DNA, 33 bp, Homo sapien
aataccatgtagtttcgccttgtactaagatta

SEQ ID NO: 428793 - DNA, 33 bp, Homo sapien
tgtattgtgagcgccacgcttgacatttcctaa

SEQ ID NO: 428794 - DNA, 33 bp, Homo sapien
tgtattgtgagcgccatgcttgacatttcctaa

SEQ ID NO: 428795 - DNA, 33 bp, Homo sapien
tgccacttctttaacaagtaagctccttttcgc

SEQ ID NO: 428796 - DNA, 33 bp, Homo sapien
tgccacttctttaacaggtaagctccttttcgc

SEQ ID NO: 428797 - DNA, 33 bp, Homo sapien
tcagatgctgttctatcacatggattttgcaga

SEQ ID NO: 428798 - DNA, 33 bp, Homo sapien
tcagatgctgttctattacatggattttgcaga

SEQ ID NO: 428799 - DNA, 33 bp, Homo sapien
cttgatgacattatgcaaaccaaaataagtctg

SEQ ID NO: 428800 - DNA, 33 bp, Homo sapien
cttgatgacattatgcgaaccaaaataagtctg

SEQ ID NO: 428801 - DNA, 33 bp, Homo sapien
aaagttgcatagacatcagatggacagatatga

SEQ ID NO: 428802 - DNA, 33 bp, Homo sapien
aaagttgcatagacattagatggacagatatga

SEQ ID NO: 428803 - DNA, 33 bp, Homo sapien
tgtgcataaaagttaccagccccatgcccacca

SEQ ID NO: 428804 - DNA, 33 bp, Homo sapien
tgtgcataaaagttacgagccccatgcccacca

SEQ ID NO: 428805 - DNA, 33 bp, Homo sapien
cctacatcatcctcaacggtgagtctttccctc

SEQ ID NO: 428806 - DNA, 33 bp, Homo sapien
cctacatcatcctcaatggtgagtctttccctc

SEQ ID NO: 428807 - DNA, 33 bp, Homo sapien
atgtaggacacttaaaatgattttaccagtggc

SEQ ID NO: 428808 - DNA, 33 bp, Homo sapien
atgtaggacacttaaagtgattttaccagtggc

SEQ ID NO: 428809 - DNA, 33 bp, Homo sapien
agggaaatatttcccaagtaacctatgaacagc

SEQ ID NO: 428810 - DNA, 33 bp, Homo sapien
agggaaatatttcccaggtaacctatgaacagc

SEQ ID NO: 428811 - DNA, 33 bp, Homo sapien
acaggtaattgaaaaaaggtgtagcttaaacac

SEQ ID NO: 428812 - DNA, 33 bp, Homo sapien
acaggtaattgaaaaatggtgtagcttaaacac

SEQ ID NO: 428813 - DNA, 33 bp, Homo sapien
tgcatatacaaatacaatgcacccatgaaatga

SEQ ID NO: 428814 - DNA, 33 bp, Homo sapien
tgcatatacaaatacagtgcacccatgaaatga

SEQ ID NO: 428815 - DNA, 33 bp, Homo sapien
ttgctaagtaaacttccatttccagaccaattc

SEQ ID NO: 428816 - DNA, 33 bp, Homo sapien
ttgctaagtaaacttctatttccagaccaattc

SEQ ID NO: 428817 - DNA, 33 bp, Homo sapien
aacactttactttataccgtcacagagatagca

SEQ ID NO: 428818 - DNA, 33 bp, Homo sapien
aacactttactttatatcgtcacagagatagca

SEQ ID NO: 428819 - DNA, 33 bp, Homo sapien
tccactgggttcaacactggtttcctctcacaa

SEQ ID NO: 428820 - DNA, 33 bp, Homo sapien
tccactgggttcaacattggtttcctctcacaa

SEQ ID NO: 428821 - DNA, 33 bp, Homo sapien
tccctctacaaatgcaatcaagatattttattt

SEQ ID NO: 428822 - DNA, 33 bp, Homo sapien
tccctctacaaatgcagtcaagatattttattt

SEQ ID NO: 428823 - DNA, 33 bp, Homo sapien
acatattatgacatccaaaaacaatacaataaa

SEQ ID NO: 428824 - DNA, 33 bp, Homo sapien
acatattatgacatccgaaaacaatacaataaa

SEQ ID NO: 428825 - DNA, 33 bp, Homo sapien
cagttttaaaccagtaacaactcagacattggt

SEQ ID NO: 428826 - DNA, 33 bp, Homo sapien
cagttttaaaccagtatcaactcagacattggt

SEQ ID NO: 428827 - DNA, 33 bp, Homo sapien
ctgtggttgcaaaagacaaaatcagaatgagtg

SEQ ID NO: 428828 - DNA, 33 bp, Homo sapien
ctgtggttgcaaaagagaaaatcagaatgagtg

SEQ ID NO: 428829 - DNA, 33 bp, Homo sapien
tggttgcaaatttctcaagggcaacaaataaca

SEQ ID NO: 428830 - DNA, 33 bp, Homo sapien
tggttgcaaatttctcgagggcaacaaataaca

SEQ ID NO: 428831 - DNA, 33 bp, Homo sapien
aatgaggataaaaaaactacccaatacaatcca

SEQ ID NO: 428832 - DNA, 33 bp, Homo sapien
aatgaggataaaaaaagtacccaatacaatcca

SEQ ID NO: 428833 - DNA, 33 bp, Homo sapien
caatatatgcaaggtaacttcaacatttgacaa

SEQ ID NO: 428834 - DNA, 33 bp, Homo sapien
caatatatgcaaggtagcttcaacatttgacaa

SEQ ID NO: 428835 - DNA, 33 bp, Homo sapien
gatcttttgtgcattcaaggtttcttcctttga

SEQ ID NO: 428836 - DNA, 33 bp, Homo sapien
gatcttttgtgcattcgaggtttcttcctttga

SEQ ID NO: 428837 - DNA, 33 bp, Homo sapien
gctgaataacaggatgaaaatacaggtgagttt

SEQ ID NO: 428838 - DNA, 33 bp, Homo sapien
gctgaataacaggatggaaatacaggtgagttt

SEQ ID NO: 428839 - DNA, 33 bp, Homo sapien
gtcctaatattgcaacggatcaagctacctacc

SEQ ID NO: 428840 - DNA, 33 bp, Homo sapien
gtcctaatattgcaactgatcaagctacctacc

SEQ ID NO: 428841 - DNA, 33 bp, Homo sapien
tctagagtctgattcaggttatagttgaaactc

SEQ ID NO: 428842 - DNA, 33 bp, Homo sapien
tctagagtctgattcatgttatagttgaaactc

SEQ ID NO: 428843 - DNA, 33 bp, Homo sapien
atattaatgttaagtacgttgagatataaatgt

SEQ ID NO: 428844 - DNA, 33 bp, Homo sapien
atattaatgttaagtatgttgagatataaatgt

SEQ ID NO: 428845 - DNA, 33 bp, Homo sapien
ctgggcttaatattaacgctacttttcaaaacc

SEQ ID NO: 428846 - DNA, 33 bp, Homo sapien
ctgggcttaatattaatgctacttttcaaaacc

SEQ ID NO: 428847 - DNA, 33 bp, Homo sapien
tatgggattcttagacagactaaaagagcaaat

SEQ ID NO: 428848 - DNA, 33 bp, Homo sapien
tatgggattcttagactgactaaaagagcaaat

SEQ ID NO: 428849 - DNA, 33 bp, Homo sapien
atgcttccaatagctgaacctaaatggagtggt

SEQ ID NO: 428850 - DNA, 33 bp, Homo sapien
atgcttccaatagctgtacctaaatggagtggt

SEQ ID NO: 428851 - DNA, 33 bp, Homo sapien
aatgtattcaatataacctataaagcctccttg

SEQ ID NO: 428852 - DNA, 33 bp, Homo sapien
aatgtattcaatataatctataaagcctccttg

SEQ ID NO: 428853 - DNA, 33 bp, Homo sapien
ctcggttctctcttcactaataggtaattgtgt

SEQ ID NO: 428854 - DNA, 33 bp, Homo sapien
ctcggttctctcttcagtaataggtaattgtgt

SEQ ID NO: 428855 - DNA, 33 bp, Homo sapien
ctaaaagattcaaataaaagaggattcaactat

SEQ ID NO: 428856 - DNA, 33 bp, Homo sapien
ctaaaagattcaaatacaagaggattcaactat

SEQ ID NO: 428857 - DNA, 33 bp, Homo sapien
cacttaacaggaaagactcaaaatacattagac

SEQ ID NO: 428858 - DNA, 33 bp, Homo sapien
cacttaacaggaaagattcaaaatacattagac

SEQ ID NO: 428859 - DNA, 33 bp, Homo sapien
ggtagaaagtgtgttacgactttgaaatacata

SEQ ID NO: 428860 - DNA, 33 bp, Homo sapien
ggtagaaagtgtgttatgactttgaaatacata

SEQ ID NO: 428861 - DNA, 33 bp, Homo sapien
caaattggccttctaaaaaataatcacatttgt

SEQ ID NO: 428862 - DNA, 33 bp, Homo sapien
caaattggccttctaacaaataatcacatttgt

SEQ ID NO: 428863 - DNA, 33 bp, Homo sapien
agatgccagaatctgaagagcataaccttagca

SEQ ID NO: 428864 - DNA, 33 bp, Homo sapien
agatgccagaatctgaggagcataaccttagca

SEQ ID NO: 428865 - DNA, 33 bp, Homo sapien
ttagaaccaatgagtaaaaatatcatgagtgta

SEQ ID NO: 428866 - DNA, 33 bp, Homo sapien
ttagaaccaatgagtacaaatatcatgagtgta

SEQ ID NO: 428867 - DNA, 33 bp, Homo sapien
acctaagatagagaaacattggtagtatgtgtg

SEQ ID NO: 428868 - DNA, 33 bp, Homo sapien
acctaagatagagaaatattggtagtatgtgtg

SEQ ID NO: 428869 - DNA, 33 bp, Homo sapien
aatgtggattccttcaactaagtaagcagaggc

SEQ ID NO: 428870 - DNA, 33 bp, Homo sapien
aatgtggattccttcagctaagtaagcagaggc

SEQ ID NO: 428871 - DNA, 33 bp, Homo sapien
atgccctaaattagacaggagatcagacatcca

SEQ ID NO: 428872 - DNA, 33 bp, Homo sapien
atgccctaaattagactggagatcagacatcca

SEQ ID NO: 428873 - DNA, 33 bp, Homo sapien
gtgttatgatagaaataaggagaaccatgaggg

SEQ ID NO: 428874 - DNA, 33 bp, Homo sapien
gtgttatgatagaaatgaggagaaccatgaggg

SEQ ID NO: 428875 - DNA, 33 bp, Homo sapien
agaggatagtaaagacagccttgaattgccaat

SEQ ID NO: 428876 - DNA, 33 bp, Homo sapien
agaggatagtaaagacggccttgaattgccaat

SEQ ID NO: 428877 - DNA, 33 bp, Homo sapien
tactgggagtttaggcaatattctaaatgtctc

SEQ ID NO: 428878 - DNA, 33 bp, Homo sapien
tactgggagtttaggccatattctaaatgtctc

SEQ ID NO: 428879 - DNA, 33 bp, Homo sapien
gccacttatctcaacaatgtatttacagtttac

SEQ ID NO: 428880 - DNA, 33 bp, Homo sapien
gccacttatctcaacagtgtatttacagtttac

SEQ ID NO: 428881 - DNA, 33 bp, Homo sapien
ttgatattgttgtccacgtaatttgtattaaat

SEQ ID NO: 428882 - DNA, 33 bp, Homo sapien
ttgatattgttgtccatgtaatttgtattaaat

SEQ ID NO: 428883 - DNA, 33 bp, Homo sapien
gaaaatagtatctgcaaggattagtgataccaa

SEQ ID NO: 428884 - DNA, 33 bp, Homo sapien
gaaaatagtatctgcatggattagtgataccaa

SEQ ID NO: 428885 - DNA, 33 bp, Homo sapien
aactataattagtggaactaggaactaagactg

SEQ ID NO: 428886 - DNA, 33 bp, Homo sapien
aactataattagtggagctaggaactaagactg

SEQ ID NO: 428887 - DNA, 33 bp, Homo sapien
gaaacttcatccttccacaatcaggaaatggga

SEQ ID NO: 428888 - DNA, 33 bp, Homo sapien
gaaacttcatccttccgcaatcaggaaatggga

SEQ ID NO: 428889 - DNA, 33 bp, Homo sapien
ataacggcaaccatgactcaatcctttcactgt

SEQ ID NO: 428890 - DNA, 33 bp, Homo sapien
ataacggcaaccatgattcaatcctttcactgt

SEQ ID NO: 428891 - DNA, 33 bp, Homo sapien
aagtgttgccttaaacacagcaatgattggttt

SEQ ID NO: 428892 - DNA, 33 bp, Homo sapien
aagtgttgccttaaacgcagcaatgattggttt

SEQ ID NO: 428893 - DNA, 33 bp, Homo sapien
ctagaagctgaatgtaaactaaaattcctgggt

SEQ ID NO: 428894 - DNA, 33 bp, Homo sapien
ctagaagctgaatgtagactaaaattcctgggt

SEQ ID NO: 428895 - DNA, 33 bp, Homo sapien
ctttgatatgttaatcaccatactgtatgcaac

SEQ ID NO: 428896 - DNA, 33 bp, Homo sapien
ctttgatatgttaatcgccatactgtatgcaac

SEQ ID NO: 428897 - DNA, 33 bp, Homo sapien
ataatgatgatgataacagaagagaacctccaa

SEQ ID NO: 428898 - DNA, 33 bp, Homo sapien
ataatgatgatgataatagaagagaacctccaa

SEQ ID NO: 428899 - DNA, 33 bp, Homo sapien
tttctctttgtataaacgttggtcatgtgtatc

SEQ ID NO: 428900 - DNA, 33 bp, Homo sapien
tttctctttgtataaatgttggtcatgtgtatc

SEQ ID NO: 428901 - DNA, 33 bp, Homo sapien
aacatgaaatcactgcactctacttgctaaagt

SEQ ID NO: 428902 - DNA, 33 bp, Homo sapien
aacatgaaatcactgcgctctacttgctaaagt

SEQ ID NO: 428903 - DNA, 33 bp, Homo sapien
aggctgtagagcaaaggctgggttttcttgaag

SEQ ID NO: 428904 - DNA, 33 bp, Homo sapien
aggctgtagagcaaagtctgggttttcttgaag

SEQ ID NO: 428905 - DNA, 33 bp, Homo sapien
aagaattctgcttcaacaactcttgacccctgt

SEQ ID NO: 428906 - DNA, 33 bp, Homo sapien
aagaattctgcttcaataactcttgacccctgt

SEQ ID NO: 428907 - DNA, 33 bp, Homo sapien
ctcctttgccttttgacgtgattggaagcttcc

SEQ ID NO: 428908 - DNA, 33 bp, Homo sapien
ctcctttgccttttgatgtgattggaagcttcc

SEQ ID NO: 428909 - DNA, 33 bp, Homo sapien
gcaaaacatgaatttacactgatatctcccatg

SEQ ID NO: 428910 - DNA, 33 bp, Homo sapien
gcaaaacatgaatttatactgatatctcccatg

SEQ ID NO: 428911 - DNA, 33 bp, Homo sapien
tgctaacttagcaccacatgattcattctaggc

SEQ ID NO: 428912 - DNA, 33 bp, Homo sapien
tgctaacttagcaccatatgattcattctaggc

SEQ ID NO: 428913 - DNA, 33 bp, Homo sapien
cttgttctggggcccaacaatacttacatcttc

SEQ ID NO: 428914 - DNA, 33 bp, Homo sapien
cttgttctggggcccagcaatacttacatcttc

SEQ ID NO: 428915 - DNA, 33 bp, Homo sapien
cactccctggatgtaacatgataggaacaatat

SEQ ID NO: 428916 - DNA, 33 bp, Homo sapien
cactccctggatgtaatatgataggaacaatat

SEQ ID NO: 428917 - DNA, 33 bp, Homo sapien
tatctgtgggttcaaccaaccatgaattgaaca

SEQ ID NO: 428918 - DNA, 33 bp, Homo sapien
tatctgtgggttcaactaaccatgaattgaaca

SEQ ID NO: 428919 - DNA, 33 bp, Homo sapien
ggattgttgttttatgcagtcagtatctgtaaa

SEQ ID NO: 428920 - DNA, 33 bp, Homo sapien
ggattgttgttttatgtagtcagtatctgtaaa

SEQ ID NO: 428921 - DNA, 33 bp, Homo sapien
gtgaacagcttttctcaagttcgcagattaaga

SEQ ID NO: 428922 - DNA, 33 bp, Homo sapien
gtgaacagcttttctccagttcgcagattaaga

SEQ ID NO: 428923 - DNA, 33 bp, Homo sapien
catattggtatatgagcattaggcatttagatg

SEQ ID NO: 428924 - DNA, 33 bp, Homo sapien
catattggtatatgaggattaggcatttagatg

SEQ ID NO: 428925 - DNA, 33 bp, Homo sapien
ctggttgtttataagactcaggcgagtggttac

SEQ ID NO: 428926 - DNA, 33 bp, Homo sapien
ctggttgtttataagattcaggcgagtggttac

SEQ ID NO: 428927 - DNA, 33 bp, Homo sapien
tagcaaagatggtaataaagtggttgtcgaaaa

SEQ ID NO: 428928 - DNA, 33 bp, Homo sapien
tagcaaagatggtaattaagtggttgtcgaaaa

SEQ ID NO: 428929 - DNA, 33 bp, Homo sapien
aaaaattagccaaaggacctgaatagatgtttc

SEQ ID NO: 428930 - DNA, 33 bp, Homo sapien
aaaaattagccaaagggcctgaatagatgtttc

SEQ ID NO: 428931 - DNA, 33 bp, Homo sapien
tttggaatattacggacgtcctattgttttatt

SEQ ID NO: 428932 - DNA, 33 bp, Homo sapien
tttggaatattacggatgtcctattgttttatt

SEQ ID NO: 428933 - DNA, 33 bp, Homo sapien
tccccatctgggtcaacggaggccaaaagtaaa

SEQ ID NO: 428934 - DNA, 33 bp, Homo sapien
tccccatctgggtcaatggaggccaaaagtaaa

SEQ ID NO: 428935 - DNA, 33 bp, Homo sapien
gattaataatctagcacctaaaaatctgttaaa

SEQ ID NO: 428936 - DNA, 33 bp, Homo sapien
gattaataatctagcatctaaaaatctgttaaa

SEQ ID NO: 428937 - DNA, 33 bp, Homo sapien
ttcctattcaagactaaagaacatataaagaat

SEQ ID NO: 428938 - DNA, 33 bp, Homo sapien
ttcctattcaagactagagaacatataaagaat

SEQ ID NO: 428939 - DNA, 33 bp, Homo sapien
tatagaattatttatacgtgtaatggagataat

SEQ ID NO: 428940 - DNA, 33 bp, Homo sapien
tatagaattatttatatgtgtaatggagataat

SEQ ID NO: 428941 - DNA, 33 bp, Homo sapien
cttttacaaaaatcacacatttgcaacatttaa

SEQ ID NO: 428942 - DNA, 33 bp, Homo sapien
cttttacaaaaatcacccatttgcaacatttaa

SEQ ID NO: 428943 - DNA, 33 bp, Homo sapien
ttttgtgtacagccgaaaagtgtcattttgaca

SEQ ID NO: 428944 - DNA, 33 bp, Homo sapien
ttttgtgtacagccgataagtgtcattttgaca

SEQ ID NO: 428945 - DNA, 33 bp, Homo sapien
taggtctctagcctgcaatgatttttctgagct

SEQ ID NO: 428946 - DNA, 33 bp, Homo sapien
taggtctctagcctgcgatgatttttctgagct

SEQ ID NO: 428947 - DNA, 33 bp, Homo sapien
attattctcttgagtaactactgatttcagcaa

SEQ ID NO: 428948 - DNA, 33 bp, Homo sapien
attattctcttgagtagctactgatttcagcaa

SEQ ID NO: 428949 - DNA, 33 bp, Homo sapien
cacttctttaccggaaagtggtctcatcccaga

SEQ ID NO: 428950 - DNA, 33 bp, Homo sapien
cacttctttaccggaacgtggtctcatcccaga

SEQ ID NO: 428951 - DNA, 33 bp, Homo sapien
ctagacatgttgaaagcagattttacctgtaac

SEQ ID NO: 428952 - DNA, 33 bp, Homo sapien
ctagacatgttgaaagtagattttacctgtaac

SEQ ID NO: 428953 - DNA, 33 bp, Homo sapien
actaactgctttctataaaaaacttgaccagtt

SEQ ID NO: 428954 - DNA, 33 bp, Homo sapien
actaactgctttctatcaaaaacttgaccagtt

SEQ ID NO: 428955 - DNA, 33 bp, Homo sapien
aggcacagctaaacataactcagaacttttctg

SEQ ID NO: 428956 - DNA, 33 bp, Homo sapien
aggcacagctaaacatgactcagaacttttctg

SEQ ID NO: 428957 - DNA, 33 bp, Homo sapien
ttatgtggtcacctacactttgttgtttaatga

SEQ ID NO: 428958 - DNA, 33 bp, Homo sapien
ttatgtggtcacctacgctttgttgtttaatga

SEQ ID NO: 428959 - DNA, 33 bp, Homo sapien
taaatcctttcaaaaaattttactcgctcatag

SEQ ID NO: 428960 - DNA, 33 bp, Homo sapien
taaatcctttcaaaaacttttactcgctcatag

SEQ ID NO: 428961 - DNA, 33 bp, Homo sapien
gaaaacttatgagcagccctaaggatatgcata

SEQ ID NO: 428962 - DNA, 33 bp, Homo sapien
gaaaacttatgagcagtcctaaggatatgcata

SEQ ID NO: 428963 - DNA, 33 bp, Homo sapien
gtgtatgcaagtataccatgtgtgttaatttgt

SEQ ID NO: 428964 - DNA, 33 bp, Homo sapien
gtgtatgcaagtatactatgtgtgttaatttgt

SEQ ID NO: 428965 - DNA, 33 bp, Homo sapien
cagtcataaaagatgcgcaaatccaaatttacc

SEQ ID NO: 428966 - DNA, 33 bp, Homo sapien
cagtcataaaagatgctcaaatccaaatttacc

SEQ ID NO: 428967 - DNA, 33 bp, Homo sapien
tatttattaaaatgcacgactttatggtacact

SEQ ID NO: 428968 - DNA, 33 bp, Homo sapien
tatttattaaaatgcatgactttatggtacact

SEQ ID NO: 428969 - DNA, 33 bp, Homo sapien
gacaagtaaacagaaaagaggtgatcaaccaat

SEQ ID NO: 428970 - DNA, 33 bp, Homo sapien
gacaagtaaacagaaaggaggtgatcaaccaat

SEQ ID NO: 428971 - DNA, 33 bp, Homo sapien
gatcaaccaatcagaacataagttgcagttact

SEQ ID NO: 428972 - DNA, 33 bp, Homo sapien
gatcaaccaatcagaatataagttgcagttact

SEQ ID NO: 428973 - DNA, 33 bp, Homo sapien
tgtcatccctctaacacagtcacctagttaact

SEQ ID NO: 428974 - DNA, 33 bp, Homo sapien
tgtcatccctctaacatagtcacctagttaact

SEQ ID NO: 428975 - DNA, 33 bp, Homo sapien
tttcagggagaagtaactacagataaaaccatt

SEQ ID NO: 428976 - DNA, 33 bp, Homo sapien
tttcagggagaagtaagtacagataaaaccatt

SEQ ID NO: 428977 - DNA, 33 bp, Homo sapien
gcccacaaatgttccacgctctctgtttctcct

SEQ ID NO: 428978 - DNA, 33 bp, Homo sapien
gcccacaaatgttccaggctctctgtttctcct

SEQ ID NO: 428979 - DNA, 33 bp, Homo sapien
tttgtattctctctctcaagcaaataattcttt

SEQ ID NO: 428980 - DNA, 33 bp, Homo sapien
tttgtattctctctcttaagcaaataattcttt

SEQ ID NO: 428981 - DNA, 33 bp, Homo sapien
aaatgcatgaggctagaatagaagctggaactt

SEQ ID NO: 428982 - DNA, 33 bp, Homo sapien
aaatgcatgaggctaggatagaagctggaactt

SEQ ID NO: 428983 - DNA, 33 bp, Homo sapien
gcttttagtttccctaacttagtgcacctgaat

SEQ ID NO: 428984 - DNA, 33 bp, Homo sapien
gcttttagtttccctaccttagtgcacctgaat

SEQ ID NO: 428985 - DNA, 33 bp, Homo sapien
actctagaacacaaaccatgatatgcatctgta

SEQ ID NO: 428986 - DNA, 33 bp, Homo sapien
actctagaacacaaactatgatatgcatctgta

SEQ ID NO: 428987 - DNA, 33 bp, Homo sapien
gttgtgaggcctcccccacaatctggaactgta

SEQ ID NO: 428988 - DNA, 33 bp, Homo sapien
gttgtgaggcctccccgacaatctggaactgta

SEQ ID NO: 428989 - DNA, 33 bp, Homo sapien
taggaaaaaccaaaaccaacacattgtggactc

SEQ ID NO: 428990 - DNA, 33 bp, Homo sapien
taggaaaaaccaaaacgaacacattgtggactc

SEQ ID NO: 428991 - DNA, 33 bp, Homo sapien
gcggccattaacattaagttagaaacaaatcat

SEQ ID NO: 428992 - DNA, 33 bp, Homo sapien
gcggccattaacattacgttagaaacaaatcat

SEQ ID NO: 428993 - DNA, 33 bp, Homo sapien
tagatgtgtattttccgatcattaatcataatt

SEQ ID NO: 428994 - DNA, 33 bp, Homo sapien
tagatgtgtattttcctatcattaatcataatt

SEQ ID NO: 428995 - DNA, 33 bp, Homo sapien
accaacaacttcctaacagacagatttcggttt

SEQ ID NO: 428996 - DNA, 33 bp, Homo sapien
accaacaacttcctaatagacagatttcggttt

SEQ ID NO: 428997 - DNA, 33 bp, Homo sapien
ctttctttgtactgtacaactactttcctgaca

SEQ ID NO: 428998 - DNA, 33 bp, Homo sapien
ctttctttgtactgtataactactttcctgaca

SEQ ID NO: 428999 - DNA, 33 bp, Homo sapien
aacttaacataattccacaatagtaatgaagct

SEQ ID NO: 429000 - DNA, 33 bp, Homo sapien
aacttaacataattccgcaatagtaatgaagct

SEQ ID NO: 429001 - DNA, 33 bp, Homo sapien
atctgactcaccctggaaaaaacagagtaactt

SEQ ID NO: 429002 - DNA, 33 bp, Homo sapien
atctgactcaccctggcaaaaacagagtaactt

SEQ ID NO: 429003 - DNA, 33 bp, Homo sapien
ggaagacaggttctcagtctgctctgtggattt

SEQ ID NO: 429004 - DNA, 33 bp, Homo sapien
ggaagacaggttctcattctgctctgtggattt

SEQ ID NO: 429005 - DNA, 33 bp, Homo sapien
ttatatcctttcctccaattctcagatgttgtc

SEQ ID NO: 429006 - DNA, 33 bp, Homo sapien
ttatatcctttcctccgattctcagatgttgtc

SEQ ID NO: 429007 - DNA, 33 bp, Homo sapien
tttacatgtcctgctacacagatagttatactt

SEQ ID NO: 429008 - DNA, 33 bp, Homo sapien
tttacatgtcctgctatacagatagttatactt

SEQ ID NO: 429009 - DNA, 33 bp, Homo sapien
agagattcagaaaagacgggcataggtttccca

SEQ ID NO: 429010 - DNA, 33 bp, Homo sapien
agagattcagaaaagatgggcataggtttccca

SEQ ID NO: 429011 - DNA, 33 bp, Homo sapien
acaattcttccagaaacgtggtattgctgttgg

SEQ ID NO: 429012 - DNA, 33 bp, Homo sapien
acaattcttccagaaatgtggtattgctgttgg

SEQ ID NO: 429013 - DNA, 33 bp, Homo sapien
aatattacgttttgtcactttgttagtatcccc

SEQ ID NO: 429014 - DNA, 33 bp, Homo sapien
aatattacgttttgtcgctttgttagtatcccc

SEQ ID NO: 429015 - DNA, 33 bp, Homo sapien
tagtttgaatgataaacgttttctcagcactat

SEQ ID NO: 429016 - DNA, 33 bp, Homo sapien
tagtttgaatgataaatgttttctcagcactat

SEQ ID NO: 429017 - DNA, 33 bp, Homo sapien
ggccagctgataaaggaaacctgctgaggaatt

SEQ ID NO: 429018 - DNA, 33 bp, Homo sapien
ggccagctgataaagggaacctgctgaggaatt

SEQ ID NO: 429019 - DNA, 33 bp, Homo sapien
taagggctcttcttaccacatttatcgtgaagc

SEQ ID NO: 429020 - DNA, 33 bp, Homo sapien
taagggctcttcttactacatttatcgtgaagc

SEQ ID NO: 429021 - DNA, 33 bp, Homo sapien
ctgagcaacgattttacaaatacctcaaaacac

SEQ ID NO: 429022 - DNA, 33 bp, Homo sapien
ctgagcaacgattttataaatacctcaaaacac

SEQ ID NO: 429023 - DNA, 33 bp, Homo sapien
caaatgaactgagtgaatatttcaatctgacct

SEQ ID NO: 429024 - DNA, 33 bp, Homo sapien
caaatgaactgagtgagtatttcaatctgacct

SEQ ID NO: 429025 - DNA, 33 bp, Homo sapien
aactactttgctccaaatgttttgtcaataatt

SEQ ID NO: 429026 - DNA, 33 bp, Homo sapien
aactactttgctccaagtgttttgtcaataatt

SEQ ID NO: 429027 - DNA, 33 bp, Homo sapien
tataggaggaaatatagaagagggtgagcatag

SEQ ID NO: 429028 - DNA, 33 bp, Homo sapien
tataggaggaaatatataagagggtgagcatag

SEQ ID NO: 429029 - DNA, 33 bp, Homo sapien
caggaggaaaagcctgaatgtagtcaattgagg

SEQ ID NO: 429030 - DNA, 33 bp, Homo sapien
caggaggaaaagcctggatgtagtcaattgagg

SEQ ID NO: 429031 - DNA, 33 bp, Homo sapien
agacagaaaacctgtgcaatagacttcagaaac

SEQ ID NO: 429032 - DNA, 33 bp, Homo sapien
agacagaaaacctgtgtaatagacttcagaaac

SEQ ID NO: 429033 - DNA, 33 bp, Homo sapien
tttattgcctaatagaaagcagagaaaagtcaa

SEQ ID NO: 429034 - DNA, 33 bp, Homo sapien
tttattgcctaatagagagcagagaaaagtcaa

SEQ ID NO: 429035 - DNA, 33 bp, Homo sapien
aaatacaccaagaagaataaagcagaaatgcac

SEQ ID NO: 429036 - DNA, 33 bp, Homo sapien
aaatacaccaagaagagtaaagcagaaatgcac

SEQ ID NO: 429037 - DNA, 33 bp, Homo sapien
aagaaaaggttgatacagcatgggagaaggcat

SEQ ID NO: 429038 - DNA, 33 bp, Homo sapien
aagaaaaggttgatacggcatgggagaaggcat

SEQ ID NO: 429039 - DNA, 33 bp, Homo sapien
attttcatttatcttacgatgggtgcatttttg

SEQ ID NO: 429040 - DNA, 33 bp, Homo sapien
attttcatttatcttatgatgggtgcatttttg

SEQ ID NO: 429041 - DNA, 33 bp, Homo sapien
ttaagcagggagtgtaataatacgccagaattt

SEQ ID NO: 429042 - DNA, 33 bp, Homo sapien
ttaagcagggagtgtagtaatacgccagaattt

SEQ ID NO: 429043 - DNA, 33 bp, Homo sapien
ttaaatgtcagacaggaaaacacttatacaatt

SEQ ID NO: 429044 - DNA, 33 bp, Homo sapien
ttaaatgtcagacagggaaacacttatacaatt

SEQ ID NO: 429045 - DNA, 33 bp, Homo sapien
tttggttacctcagaaaaaaactctaataaatg

SEQ ID NO: 429046 - DNA, 33 bp, Homo sapien
tttggttacctcagaagaaaactctaataaatg

SEQ ID NO: 429047 - DNA, 33 bp, Homo sapien
tcttctatggcagtaaagagctaaccgaagaca

SEQ ID NO: 429048 - DNA, 33 bp, Homo sapien
tcttctatggcagtaaggagctaaccgaagaca

SEQ ID NO: 429049 - DNA, 33 bp, Homo sapien
tagttgatagtttaggaagaagcaaaaattact

SEQ ID NO: 429050 - DNA, 33 bp, Homo sapien
tagttgatagtttagggagaagcaaaaattact

SEQ ID NO: 429051 - DNA, 33 bp, Homo sapien
gtgtattaccttgtggaagtcacgagctgaacg

SEQ ID NO: 429052 - DNA, 33 bp, Homo sapien
gtgtattaccttgtgggagtcacgagctgaacg

SEQ ID NO: 429053 - DNA, 33 bp, Homo sapien
tgataggcctctattacactttgagtagctttt

SEQ ID NO: 429054 - DNA, 33 bp, Homo sapien
tgataggcctctattagactttgagtagctttt

SEQ ID NO: 429055 - DNA, 33 bp, Homo sapien
aatagtctctgctaccactaaaaattatgaatt

SEQ ID NO: 429056 - DNA, 33 bp, Homo sapien
aatagtctctgctacctctaaaaattatgaatt

SEQ ID NO: 429057 - DNA, 33 bp, Homo sapien
aggacaaactgactctaaagattccatcaaata

SEQ ID NO: 429058 - DNA, 33 bp, Homo sapien
aggacaaactgactctgaagattccatcaaata

SEQ ID NO: 429059 - DNA, 33 bp, Homo sapien
ctctttgcttgtgtcactcaatttctacacttg

SEQ ID NO: 429060 - DNA, 33 bp, Homo sapien
ctctttgcttgtgtcattcaatttctacacttg

SEQ ID NO: 429061 - DNA, 33 bp, Homo sapien
ctactggttgtcctgacgttttccagctattgg

SEQ ID NO: 429062 - DNA, 33 bp, Homo sapien
ctactggttgtcctgatgttttccagctattgg

SEQ ID NO: 429063 - DNA, 33 bp, Homo sapien
ttaaaaaaactccgtcaatttgtcattttcaat

SEQ ID NO: 429064 - DNA, 33 bp, Homo sapien
ttaaaaaaactccgtcgatttgtcattttcaat

SEQ ID NO: 429065 - DNA, 33 bp, Homo sapien
caaataacctagtagaagcaggaataaaggaca

SEQ ID NO: 429066 - DNA, 33 bp, Homo sapien
caaataacctagtagaggcaggaataaaggaca

SEQ ID NO: 429067 - DNA, 33 bp, Homo sapien
attatggcagttaaaccaatatcctaactagta

SEQ ID NO: 429068 - DNA, 33 bp, Homo sapien
attatggcagttaaacgaatatcctaactagta

SEQ ID NO: 429069 - DNA, 33 bp, Homo sapien
ttgggtcttgctcttacctgcataattcaccac

SEQ ID NO: 429070 - DNA, 33 bp, Homo sapien
ttgggtcttgctcttatctgcataattcaccac

SEQ ID NO: 429071 - DNA, 33 bp, Homo sapien
aggttgttccatcaaaaagaataaacatgaact

SEQ ID NO: 429072 - DNA, 33 bp, Homo sapien
aggttgttccatcaaagagaataaacatgaact

SEQ ID NO: 429073 - DNA, 33 bp, Homo sapien
atcccaaatgtgtatacgcctgagaataaggtg

SEQ ID NO: 429074 - DNA, 33 bp, Homo sapien
atcccaaatgtgtatatgcctgagaataaggtg

SEQ ID NO: 429075 - DNA, 33 bp, Homo sapien
tggacaagaaatgtaaaccctaaactttgataa

SEQ ID NO: 429076 - DNA, 33 bp, Homo sapien
tggacaagaaatgtaagccctaaactttgataa

SEQ ID NO: 429077 - DNA, 33 bp, Homo sapien
ggtttcaaatggcgaactctacagaactttgtc

SEQ ID NO: 429078 - DNA, 33 bp, Homo sapien
ggtttcaaatggcgaattctacagaactttgtc

SEQ ID NO: 429079 - DNA, 33 bp, Homo sapien
cagaccattaacagagacatttatttactacaa

SEQ ID NO: 429080 - DNA, 33 bp, Homo sapien
cagaccattaacagaggcatttatttactacaa

SEQ ID NO: 429081 - DNA, 33 bp, Homo sapien
agacatctgtctggtccctgaaattgttgatct

SEQ ID NO: 429082 - DNA, 33 bp, Homo sapien
agacatctgtctggtctctgaaattgttgatct

SEQ ID NO: 429083 - DNA, 33 bp, Homo sapien
gtgctttgaaacagggcaactacataatggttg

SEQ ID NO: 429084 - DNA, 33 bp, Homo sapien
gtgctttgaaacagggtaactacataatggttg

SEQ ID NO: 429085 - DNA, 33 bp, Homo sapien
caaggctgaatggaagaaaaggtgtttaaaggt

SEQ ID NO: 429086 - DNA, 33 bp, Homo sapien
caaggctgaatggaaggaaaggtgtttaaaggt

SEQ ID NO: 429087 - DNA, 33 bp, Homo sapien
gcaggtaatcataatgaaatttatgcataaact

SEQ ID NO: 429088 - DNA, 33 bp, Homo sapien
gcaggtaatcataatggaatttatgcataaact

SEQ ID NO: 429089 - DNA, 33 bp, Homo sapien
taatacctaactcccaaatttgtatcagatcac

SEQ ID NO: 429090 - DNA, 33 bp, Homo sapien
taatacctaactcccatatttgtatcagatcac

SEQ ID NO: 429091 - DNA, 33 bp, Homo sapien
tttatatatgctattacgttacaattgcctata

SEQ ID NO: 429092 - DNA, 33 bp, Homo sapien
tttatatatgctattatgttacaattgcctata

SEQ ID NO: 429093 - DNA, 33 bp, Homo sapien
tttctgttgtttaatccatcaagtctattactt

SEQ ID NO: 429094 - DNA, 33 bp, Homo sapien
tttctgttgtttaatctatcaagtctattactt

SEQ ID NO: 429095 - DNA, 33 bp, Homo sapien
agaattctaactgatagtactgaaaatgtccct

SEQ ID NO: 429096 - DNA, 33 bp, Homo sapien
agaattctaactgatattactgaaaatgtccct

SEQ ID NO: 429097 - DNA, 33 bp, Homo sapien
tctatatacatacaacacattttatatatacat

SEQ ID NO: 429098 - DNA, 33 bp, Homo sapien
tctatatacatacaactcattttatatatacat

SEQ ID NO: 429099 - DNA, 33 bp, Homo sapien
ggtagaatgaggaaaaaaacaatgtatcataga

SEQ ID NO: 429100 - DNA, 33 bp, Homo sapien
ggtagaatgaggaaaataacaatgtatcataga

SEQ ID NO: 429101 - DNA, 33 bp, Homo sapien
tacattgccttctatagctaaccgtgtccttaa

SEQ ID NO: 429102 - DNA, 33 bp, Homo sapien
tacattgccttctatatctaaccgtgtccttaa

SEQ ID NO: 429103 - DNA, 33 bp, Homo sapien
ctcatgtgattgtagaactaaagtctaagatct

SEQ ID NO: 429104 - DNA, 33 bp, Homo sapien
ctcatgtgattgtagagctaaagtctaagatct

SEQ ID NO: 429105 - DNA, 33 bp, Homo sapien
cagaagatacatggaaagcatataaacacatga

SEQ ID NO: 429106 - DNA, 33 bp, Homo sapien
cagaagatacatggaaggcatataaacacatga

SEQ ID NO: 429107 - DNA, 33 bp, Homo sapien
attattcatcattacaacaccaagagggcacta

SEQ ID NO: 429108 - DNA, 33 bp, Homo sapien
attattcatcattacaccaccaagagggcacta

SEQ ID NO: 429109 - DNA, 33 bp, Homo sapien
actgtattctaaatcccatcactcttgacaatt

SEQ ID NO: 429110 - DNA, 33 bp, Homo sapien
actgtattctaaatcctatcactcttgacaatt

SEQ ID NO: 429111 - DNA, 33 bp, Homo sapien
ggttatggacatttgcagaggatactaataaag

SEQ ID NO: 429112 - DNA, 33 bp, Homo sapien
ggttatggacatttgcggaggatactaataaag

SEQ ID NO: 429113 - DNA, 33 bp, Homo sapien
tgatgccactccaggtcaatttctgcatggtta

SEQ ID NO: 429114 - DNA, 33 bp, Homo sapien
tgatgccactccaggtgaatttctgcatggtta

SEQ ID NO: 429115 - DNA, 33 bp, Homo sapien
tcattctgtctctaacacatttgccaggcagtc

SEQ ID NO: 429116 - DNA, 33 bp, Homo sapien
tcattctgtctctaactcatttgccaggcagtc

SEQ ID NO: 429117 - DNA, 33 bp, Homo sapien
tggttcagttttggccaatgaaacacactcaga

SEQ ID NO: 429118 - DNA, 33 bp, Homo sapien
tggttcagttttggccgatgaaacacactcaga

SEQ ID NO: 429119 - DNA, 33 bp, Homo sapien
gtcagcttagaaggggccaacatttcagtatca

SEQ ID NO: 429120 - DNA, 33 bp, Homo sapien
gtcagcttagaaggggtcaacatttcagtatca

SEQ ID NO: 429121 - DNA, 33 bp, Homo sapien
caccaactgacttagacatttttgtcagcttag

SEQ ID NO: 429122 - DNA, 33 bp, Homo sapien
caccaactgacttagatatttttgtcagcttag

SEQ ID NO: 429123 - DNA, 33 bp, Homo sapien
aaagagagattgcacaataattttcttttaaag

SEQ ID NO: 429124 - DNA, 33 bp, Homo sapien
aaagagagattgcacattaattttcttttaaag

SEQ ID NO: 429125 - DNA, 33 bp, Homo sapien
taaactttgactgttccaattcaaaaaaatcct

SEQ ID NO: 429126 - DNA, 33 bp, Homo sapien
taaactttgactgttctaattcaaaaaaatcct

SEQ ID NO: 429127 - DNA, 33 bp, Homo sapien
aaatcccaaaccttgacggtccatagttggatt

SEQ ID NO: 429128 - DNA, 33 bp, Homo sapien
aaatcccaaaccttgatggtccatagttggatt

SEQ ID NO: 429129 - DNA, 33 bp, Homo sapien
ttcagagttattagtcacaaattcaaatattgc

SEQ ID NO: 429130 - DNA, 33 bp, Homo sapien
ttcagagttattagtcgcaaattcaaatattgc

SEQ ID NO: 429131 - DNA, 33 bp, Homo sapien
ttcataatcatttccaacatttccaaagaactg

SEQ ID NO: 429132 - DNA, 33 bp, Homo sapien
ttcataatcatttccagcatttccaaagaactg

SEQ ID NO: 429133 - DNA, 33 bp, Homo sapien
ggaatctgaagtccaactaagaacctgtctctc

SEQ ID NO: 429134 - DNA, 33 bp, Homo sapien
ggaatctgaagtccaattaagaacctgtctctc

SEQ ID NO: 429135 - DNA, 33 bp, Homo sapien
gcagattgggttttgaagctccgcaataacaac

SEQ ID NO: 429136 - DNA, 33 bp, Homo sapien
gcagattgggttttgatgctccgcaataacaac

SEQ ID NO: 429137 - DNA, 33 bp, Homo sapien
taacagtcctttattaaatgttttttgcaaaga

SEQ ID NO: 429138 - DNA, 33 bp, Homo sapien
taacagtcctttattagatgttttttgcaaaga

SEQ ID NO: 429139 - DNA, 33 bp, Homo sapien
tcaggaactatgtggacatcgtgtgaaaacaaa

SEQ ID NO: 429140 - DNA, 33 bp, Homo sapien
tcaggaactatgtggatatcgtgtgaaaacaaa

SEQ ID NO: 429141 - DNA, 33 bp, Homo sapien
atttggaggtgaaaaaccaatatgacatacaag

SEQ ID NO: 429142 - DNA, 33 bp, Homo sapien
atttggaggtgaaaaatcaatatgacatacaag

SEQ ID NO: 429143 - DNA, 33 bp, Homo sapien
attctaataccaatatcaagcaattgaaggatt

SEQ ID NO: 429144 - DNA, 33 bp, Homo sapien
attctaataccaatatgaagcaattgaaggatt

SEQ ID NO: 429145 - DNA, 33 bp, Homo sapien
aaagatgtcagataacagagttctttattcatc

SEQ ID NO: 429146 - DNA, 33 bp, Homo sapien
aaagatgtcagataacggagttctttattcatc

SEQ ID NO: 429147 - DNA, 33 bp, Homo sapien
cttcccagacatagaaagactagaggaaaagta

SEQ ID NO: 429148 - DNA, 33 bp, Homo sapien
cttcccagacatagaaggactagaggaaaagta

SEQ ID NO: 429149 - DNA, 33 bp, Homo sapien
gaagtttctaatcgccaatgagttgatttttca

SEQ ID NO: 429150 - DNA, 33 bp, Homo sapien
gaagtttctaatcgccgatgagttgatttttca

SEQ ID NO: 429151 - DNA, 33 bp, Homo sapien
aatatgtattttggaaactcctctaagatggtt

SEQ ID NO: 429152 - DNA, 33 bp, Homo sapien
aatatgtattttggaacctcctctaagatggtt

SEQ ID NO: 429153 - DNA, 33 bp, Homo sapien
tcagctggtctgtaaacatgtgcgaaataaagt

SEQ ID NO: 429154 - DNA, 33 bp, Homo sapien
tcagctggtctgtaaatatgtgcgaaataaagt

SEQ ID NO: 429155 - DNA, 33 bp, Homo sapien
tccactggtccacatacatggaactgctcagct

SEQ ID NO: 429156 - DNA, 33 bp, Homo sapien
tccactggtccacatatatggaactgctcagct

SEQ ID NO: 429157 - DNA, 33 bp, Homo sapien
aaagccatcagttcaaataacaggaagttcaca

SEQ ID NO: 429158 - DNA, 33 bp, Homo sapien
aaagccatcagttcaagtaacaggaagttcaca

SEQ ID NO: 429159 - DNA, 33 bp, Homo sapien
aagactactgaggttaaaaggatatgttaaata

SEQ ID NO: 429160 - DNA, 33 bp, Homo sapien
aagactactgaggttagaaggatatgttaaata

SEQ ID NO: 429161 - DNA, 33 bp, Homo sapien
aggcttcttgcttgaaaagactaatcaattctt

SEQ ID NO: 429162 - DNA, 33 bp, Homo sapien
aggcttcttgcttgaagagactaatcaattctt

SEQ ID NO: 429163 - DNA, 33 bp, Homo sapien
gtaagatgttcgtaaccggggaaatagtgtctt

SEQ ID NO: 429164 - DNA, 33 bp, Homo sapien
gtaagatgttcgtaactggggaaatagtgtctt

SEQ ID NO: 429165 - DNA, 33 bp, Homo sapien
gaaatgtattcatgagaaagacgaaggaaccct

SEQ ID NO: 429166 - DNA, 33 bp, Homo sapien
gaaatgtattcatgaggaagacgaaggaaccct

SEQ ID NO: 429167 - DNA, 33 bp, Homo sapien
atagcaaggagatggcagaagttgccatagcaa

SEQ ID NO: 429168 - DNA, 33 bp, Homo sapien
atagcaaggagatggccgaagttgccatagcaa

SEQ ID NO: 429169 - DNA, 33 bp, Homo sapien
ctaaaaaactcattccagcaggcttcttcacat

SEQ ID NO: 429170 - DNA, 33 bp, Homo sapien
ctaaaaaactcattccggcaggcttcttcacat

SEQ ID NO: 429171 - DNA, 33 bp, Homo sapien
gctgtgtccattttgacatgtagatgctccgag

SEQ ID NO: 429172 - DNA, 33 bp, Homo sapien
gctgtgtccattttgatatgtagatgctccgag

SEQ ID NO: 429173 - DNA, 33 bp, Homo sapien
cacctgacagcttttacgaatatcttatgacta

SEQ ID NO: 429174 - DNA, 33 bp, Homo sapien
cacctgacagcttttatgaatatcttatgacta

SEQ ID NO: 429175 - DNA, 33 bp, Homo sapien
gcctttgcttttaacaacccattggccaatccc

SEQ ID NO: 429176 - DNA, 33 bp, Homo sapien
gcctttgcttttaacatcccattggccaatccc

SEQ ID NO: 429177 - DNA, 33 bp, Homo sapien
aatattaaaagagtgaagatgtggattagcaat

SEQ ID NO: 429178 - DNA, 33 bp, Homo sapien
aatattaaaagagtgatgatgtggattagcaat

SEQ ID NO: 429179 - DNA, 33 bp, Homo sapien
attcctctatagtaaaacaaattggagtaacac

SEQ ID NO: 429180 - DNA, 33 bp, Homo sapien
attcctctatagtaaagcaaattggagtaacac

SEQ ID NO: 429181 - DNA, 33 bp, Homo sapien
attcttttactgcctacgtaattctccattata

SEQ ID NO: 429182 - DNA, 33 bp, Homo sapien
attcttttactgcctatgtaattctccattata

SEQ ID NO: 429183 - DNA, 33 bp, Homo sapien
gagctaagactgacagaatgaataggcacttgg

SEQ ID NO: 429184 - DNA, 33 bp, Homo sapien
gagctaagactgacaggatgaataggcacttgg

SEQ ID NO: 429185 - DNA, 33 bp, Homo sapien
acttttctctaatccaacctcaatgtccttttc

SEQ ID NO: 429186 - DNA, 33 bp, Homo sapien
acttttctctaatccatcctcaatgtccttttc

SEQ ID NO: 429187 - DNA, 33 bp, Homo sapien
tttgaccaaagcaaataaagggtactaagagga

SEQ ID NO: 429188 - DNA, 33 bp, Homo sapien
tttgaccaaagcaaatgaagggtactaagagga

SEQ ID NO: 429189 - DNA, 33 bp, Homo sapien
ctttaacattggatgacaggttaatattaccaa

SEQ ID NO: 429190 - DNA, 33 bp, Homo sapien
ctttaacattggatgagaggttaatattaccaa

SEQ ID NO: 429191 - DNA, 33 bp, Homo sapien
atgaaatattggaaccaaactttaaagagtaag

SEQ ID NO: 429192 - DNA, 33 bp, Homo sapien
atgaaatattggaaccgaactttaaagagtaag

SEQ ID NO: 429193 - DNA, 33 bp, Homo sapien
tgcctggcttttcttacgctttacagcttgtat

SEQ ID NO: 429194 - DNA, 33 bp, Homo sapien
tgcctggcttttcttatgctttacagcttgtat

SEQ ID NO: 429195 - DNA, 33 bp, Homo sapien
ctgatattgtgaattccaacatttgctaaagga

SEQ ID NO: 429196 - DNA, 33 bp, Homo sapien
ctgatattgtgaattctaacatttgctaaagga

SEQ ID NO: 429197 - DNA, 33 bp, Homo sapien
ctatgtcttttgtataactttgcataataaact

SEQ ID NO: 429198 - DNA, 33 bp, Homo sapien
ctatgtcttttgtatacctttgcataataaact

SEQ ID NO: 429199 - DNA, 33 bp, Homo sapien
ctgaccttcatttccaatacacactgggtgctc

SEQ ID NO: 429200 - DNA, 33 bp, Homo sapien
ctgaccttcatttccactacacactgggtgctc

SEQ ID NO: 429201 - DNA, 33 bp, Homo sapien
cacacattttcatagcccactttgtctaccaga

SEQ ID NO: 429202 - DNA, 33 bp, Homo sapien
cacacattttcatagctcactttgtctaccaga

SEQ ID NO: 429203 - DNA, 33 bp, Homo sapien
atttcattcttaagtaacggtaacctattacta

SEQ ID NO: 429204 - DNA, 33 bp, Homo sapien
atttcattcttaagtagcggtaacctattacta

SEQ ID NO: 429205 - DNA, 33 bp, Homo sapien
aatcttggaaactgtgaagaaaaagtaagttct

SEQ ID NO: 429206 - DNA, 33 bp, Homo sapien
aatcttggaaactgtggagaaaaagtaagttct

SEQ ID NO: 429207 - DNA, 33 bp, Homo sapien
ctgaggaagtttcggccctaacattttgtaaca

SEQ ID NO: 429208 - DNA, 33 bp, Homo sapien
ctgaggaagtttcggcgctaacattttgtaaca

SEQ ID NO: 429209 - DNA, 33 bp, Homo sapien
ttggggatttgaatggaaataatctgaaaggta

SEQ ID NO: 429210 - DNA, 33 bp, Homo sapien
ttggggatttgaatgggaataatctgaaaggta

SEQ ID NO: 429211 - DNA, 33 bp, Homo sapien
tattctgctgatcatgaattacacatggatttg

SEQ ID NO: 429212 - DNA, 33 bp, Homo sapien
tattctgctgatcatggattacacatggatttg

SEQ ID NO: 429213 - DNA, 33 bp, Homo sapien
catgccacttgggctacgtatcactttttataa

SEQ ID NO: 429214 - DNA, 33 bp, Homo sapien
catgccacttgggctatgtatcactttttataa

SEQ ID NO: 429215 - DNA, 33 bp, Homo sapien
agcctaaatcccacaaagccattactagcatta

SEQ ID NO: 429216 - DNA, 33 bp, Homo sapien
agcctaaatcccacaacgccattactagcatta

SEQ ID NO: 429217 - DNA, 33 bp, Homo sapien
ttttaaaataaagataacatagaaaatgcatag

SEQ ID NO: 429218 - DNA, 33 bp, Homo sapien
ttttaaaataaagatagcatagaaaatgcatag

SEQ ID NO: 429219 - DNA, 33 bp, Homo sapien
ttcctatgggtacttacaatagcatctgttact

SEQ ID NO: 429220 - DNA, 33 bp, Homo sapien
ttcctatgggtacttataatagcatctgttact

SEQ ID NO: 429221 - DNA, 33 bp, Homo sapien
tgaattaaacaaaaacagtgcaaaatcattgtt

SEQ ID NO: 429222 - DNA, 33 bp, Homo sapien
tgaattaaacaaaaacggtgcaaaatcattgtt

SEQ ID NO: 429223 - DNA, 33 bp, Homo sapien
tacagagaaactaggacacttgagggatgacaa

SEQ ID NO: 429224 - DNA, 33 bp, Homo sapien
tacagagaaactaggatacttgagggatgacaa

SEQ ID NO: 429225 - DNA, 33 bp, Homo sapien
tcagttactcctttcaatatagattaggttttt

SEQ ID NO: 429226 - DNA, 33 bp, Homo sapien
tcagttactcctttcagtatagattaggttttt

SEQ ID NO: 429227 - DNA, 33 bp, Homo sapien
actcctatgaaggttacgttttgccatcactgg

SEQ ID NO: 429228 - DNA, 33 bp, Homo sapien
actcctatgaaggttatgttttgccatcactgg

SEQ ID NO: 429229 - DNA, 33 bp, Homo sapien
aaacaacttcagttatcagtaaataccggtact

SEQ ID NO: 429230 - DNA, 33 bp, Homo sapien
aaacaacttcagttattagtaaataccggtact

SEQ ID NO: 429231 - DNA, 33 bp, Homo sapien
ctaaactaagctttgaaaaatatccatcatatc

SEQ ID NO: 429232 - DNA, 33 bp, Homo sapien
ctaaactaagctttgagaaatatccatcatatc

SEQ ID NO: 429233 - DNA, 33 bp, Homo sapien
tgacctcataaggctaagttagtgaaacactga

SEQ ID NO: 429234 - DNA, 33 bp, Homo sapien
tgacctcataaggctaggttagtgaaacactga

SEQ ID NO: 429235 - DNA, 33 bp, Homo sapien
gaaatttcctgctgtaaccagaagccagtttta

SEQ ID NO: 429236 - DNA, 33 bp, Homo sapien
gaaatttcctgctgtatccagaagccagtttta

SEQ ID NO: 429237 - DNA, 33 bp, Homo sapien
cccattctcatgataaagacagtaatccattca

SEQ ID NO: 429238 - DNA, 33 bp, Homo sapien
cccattctcatgataaggacagtaatccattca

SEQ ID NO: 429239 - DNA, 33 bp, Homo sapien
aattcaaatccaaacagggtaggtggaatagaa

SEQ ID NO: 429240 - DNA, 33 bp, Homo sapien
aattcaaatccaaacatggtaggtggaatagaa

SEQ ID NO: 429241 - DNA, 33 bp, Homo sapien
gagaggtataatcaagaagcgtgaagctgagtc

SEQ ID NO: 429242 - DNA, 33 bp, Homo sapien
gagaggtataatcaagcagcgtgaagctgagtc

SEQ ID NO: 429243 - DNA, 33 bp, Homo sapien
tccgaaatccttagtgcagcatttagaagtcct

SEQ ID NO: 429244 - DNA, 33 bp, Homo sapien
tccgaaatccttagtgtagcatttagaagtcct

SEQ ID NO: 429245 - DNA, 33 bp, Homo sapien
gttttcctcttctttaactattctcaccgtctc

SEQ ID NO: 429246 - DNA, 33 bp, Homo sapien
gttttcctcttctttagctattctcaccgtctc

SEQ ID NO: 429247 - DNA, 33 bp, Homo sapien
ttttagctgttgatcccgatgaacctgtccatg

SEQ ID NO: 429248 - DNA, 33 bp, Homo sapien
ttttagctgttgatcctgatgaacctgtccatg

SEQ ID NO: 429249 - DNA, 33 bp, Homo sapien
agctaatttgaaatgactattgctactgataat

SEQ ID NO: 429250 - DNA, 33 bp, Homo sapien
agctaatttgaaatgagtattgctactgataat

SEQ ID NO: 429251 - DNA, 33 bp, Homo sapien
aagccaaataaaggcaacttcccatactcagat

SEQ ID NO: 429252 - DNA, 33 bp, Homo sapien
aagccaaataaaggcaccttcccatactcagat

SEQ ID NO: 429253 - DNA, 33 bp, Homo sapien
agcctacgctataatccctctgctatcgtgtgc

SEQ ID NO: 429254 - DNA, 33 bp, Homo sapien
agcctacgctataatctctctgctatcgtgtgc

SEQ ID NO: 429255 - DNA, 33 bp, Homo sapien; identical to SEQ ID NO: 429253

SEQ ID NO: 429256 - DNA, 33 bp, Homo sapien; identical to SEQ ID NO: 429254

SEQ ID NO: 429257 - DNA, 33 bp, Homo sapien
agcaactgctggcaatcagaaatggatggaaat

SEQ ID NO: 429258 - DNA, 33 bp, Homo sapien
agcaactgctggcaatgagaaatggatggaaat

SEQ ID NO: 429259 - DNA, 33 bp, Homo sapien
ttgcttctcttatgtcacctcttttccatactt

SEQ ID NO: 429260 - DNA, 33 bp, Homo sapien
ttgcttctcttatgtcgcctcttttccatactt

SEQ ID NO: 429261 - DNA, 33 bp, Homo sapien
ccacaaaggaagatcactaggtaagagtggcat

SEQ ID NO: 429262 - DNA, 33 bp, Homo sapien
ccacaaaggaagatcagtaggtaagagtggcat

SEQ ID NO: 429263 - DNA, 33 bp, Homo sapien
tccttttatatgaagacgccattgaatatattt

SEQ ID NO: 429264 - DNA, 33 bp, Homo sapien
tccttttatatgaagatgccattgaatatattt

SEQ ID NO: 429265 - DNA, 33 bp, Homo sapien
tgttccggggtggatcactaatatatgcttgac

SEQ ID NO: 429266 - DNA, 33 bp, Homo sapien
tgttccggggtggatcgctaatatatgcttgac

SEQ ID NO: 429267 - DNA, 33 bp, Homo sapien
ataaaaaacaaaagcaatcagtggtattttctt

SEQ ID NO: 429268 - DNA, 33 bp, Homo sapien
ataaaaaacaaaagcagtcagtggtattttctt

SEQ ID NO: 429269 - DNA, 33 bp, Homo sapien
catgagaagtaaaaatcatgggagataaaaaaa

SEQ ID NO: 429270 - DNA, 33 bp, Homo sapien
catgagaagtaaaaatgatgggagataaaaaaa

SEQ ID NO: 429271 - DNA, 33 bp, Homo sapien
aagagcaagtgtttagaatagagaacatttgat

SEQ ID NO: 429272 - DNA, 33 bp, Homo sapien
aagagcaagtgtttagtatagagaacatttgat

SEQ ID NO: 429273 - DNA, 33 bp, Homo sapien
gaacaattaaactcacggcaataggaaaaattc

SEQ ID NO: 429274 - DNA, 33 bp, Homo sapien
gaacaattaaactcactgcaataggaaaaattc

SEQ ID NO: 429275 - DNA, 33 bp, Homo sapien
tgaacataaatttcaaagtatttcgatgtaaat

SEQ ID NO: 429276 - DNA, 33 bp, Homo sapien
tgaacataaatttcaatgtatttcgatgtaaat

SEQ ID NO: 429277 - DNA, 33 bp, Homo sapien
agtcaggcatatcaataaaagtcctacatcaaa

SEQ ID NO: 429278 - DNA, 33 bp, Homo sapien
agtcaggcatatcaattaaagtcctacatcaaa

SEQ ID NO: 429279 - DNA, 33 bp, Homo sapien
actctctcaccttctacagcacaactggatttt

SEQ ID NO: 429280 - DNA, 33 bp, Homo sapien
actctctcaccttctagagcacaactggatttt

SEQ ID NO: 429281 - DNA, 33 bp, Homo sapien
cttaataataaggagaaattcttaagcagatta

SEQ ID NO: 429282 - DNA, 33 bp, Homo sapien
cttaataataaggagacattcttaagcagatta

SEQ ID NO: 429283 - DNA, 33 bp, Homo sapien
aagttaaacttactagcagaatgcacatagtcc

SEQ ID NO: 429284 - DNA, 33 bp, Homo sapien
aagttaaacttactagtagaatgcacatagtcc

SEQ ID NO: 429285 - DNA, 33 bp, Homo sapien
cacaaaaccccaaatgcatgcttgtaaactgaa

SEQ ID NO: 429286 - DNA, 33 bp, Homo sapien
cacaaaaccccaaatgtatgcttgtaaactgaa

SEQ ID NO: 429287 - DNA, 33 bp, Homo sapien
tgactacaaatggaaacggcttagagaatgtgt

SEQ ID NO: 429288 - DNA, 33 bp, Homo sapien
tgactacaaatggaaatggcttagagaatgtgt

SEQ ID NO: 429289 - DNA, 33 bp, Homo sapien
catacctcgctgacctaaagggaggacaaccct

SEQ ID NO: 429290 - DNA, 33 bp, Homo sapien
catacctcgctgaccttaagggaggacaaccct

SEQ ID NO: 429291 - DNA, 33 bp, Homo sapien
aagcttcaggcttcaacagagtttcattccgca

SEQ ID NO: 429292 - DNA, 33 bp, Homo sapien
aagcttcaggcttcaagagagtttcattccgca

SEQ ID NO: 429293 - DNA, 33 bp, Homo sapien
agaatgctactccacacagcaatgaggacctca

SEQ ID NO: 429294 - DNA, 33 bp, Homo sapien
agaatgctactccacagagcaatgaggacctca

SEQ ID NO: 429295 - DNA, 33 bp, Homo sapien
tttctgagcttggcacaccctatttggattaaa

SEQ ID NO: 429296 - DNA, 33 bp, Homo sapien
tttctgagcttggcacgccctatttggattaaa

SEQ ID NO: 429297 - DNA, 33 bp, Homo sapien
tgtttagagaaacagaaatctggtataacccgt

SEQ ID NO: 429298 - DNA, 33 bp, Homo sapien
tgtttagagaaacagagatctggtataacccgt

SEQ ID NO: 429299 - DNA, 33 bp, Homo sapien
tggccaaggaaagccacgaacttactataatcc

SEQ ID NO: 429300 - DNA, 33 bp, Homo sapien
tggccaaggaaagccatgaacttactataatcc

SEQ ID NO: 429301 - DNA, 33 bp, Homo sapien
tttatttcctgctcaaaacaatattaagtagtg

SEQ ID NO: 429302 - DNA, 33 bp, Homo sapien
tttatttcctgctcaagacaatattaagtagtg

SEQ ID NO: 429303 - DNA, 33 bp, Homo sapien
ttcgcagtcagaaagacgtggatccaaatctca

SEQ ID NO: 429304 - DNA, 33 bp, Homo sapien
ttcgcagtcagaaagatgtggatccaaatctca

SEQ ID NO: 429305 - DNA, 33 bp, Homo sapien
ctaaattctaggtatacgtgagattaaagaaga

SEQ ID NO: 429306 - DNA, 33 bp, Homo sapien
ctaaattctaggtatatgtgagattaaagaaga

SEQ ID NO: 429307 - DNA, 33 bp, Homo sapien
aacatattggagaaagaaatcaggacaaaaata

SEQ ID NO: 429308 - DNA, 33 bp, Homo sapien
aacatattggagaaaggaatcaggacaaaaata

SEQ ID NO: 429309 - DNA, 33 bp, Homo sapien
tcaggacaaaaatataacaaggagaagaataaa

SEQ ID NO: 429310 - DNA, 33 bp, Homo sapien
tcaggacaaaaatatatcaaggagaagaataaa

SEQ ID NO: 429311 - DNA, 33 bp, Homo sapien
gggttggcttttcacacaggattctcaggacat

SEQ ID NO: 429312 - DNA, 33 bp, Homo sapien
gggttggcttttcacataggattctcaggacat

SEQ ID NO: 429313 - DNA, 33 bp, Homo sapien
tgatcaccaggttttacagtccttcctgttttt

SEQ ID NO: 429314 - DNA, 33 bp, Homo sapien
tgatcaccaggttttatagtccttcctgttttt

SEQ ID NO: 429315 - DNA, 33 bp, Homo sapien
gaaaatcacaagttcaaatgcctttaggagcca

SEQ ID NO: 429316 - DNA, 33 bp, Homo sapien
gaaaatcacaagttcatatgcctttaggagcca

SEQ ID NO: 429317 - DNA, 33 bp, Homo sapien
attaacaggaaaaccacctggagtgaaatattt

SEQ ID NO: 429318 - DNA, 33 bp, Homo sapien
attaacaggaaaaccagctggagtgaaatattt

SEQ ID NO: 429319 - DNA, 33 bp, Homo sapien
ctagggaagaggctatcaaccttttatcctttg

SEQ ID NO: 429320 - DNA, 33 bp, Homo sapien
ctagggaagaggctatgaaccttttatcctttg

SEQ ID NO: 429321 - DNA, 33 bp, Homo sapien
ctttggattccaacaaaggaggtggacatcaga

SEQ ID NO: 429322 - DNA, 33 bp, Homo sapien
ctttggattccaacaagggaggtggacatcaga

SEQ ID NO: 429323 - DNA, 33 bp, Homo sapien
ctattaagggtggtaaatgactctgagcacact

SEQ ID NO: 429324 - DNA, 33 bp, Homo sapien
ctattaagggtggtaattgactctgagcacact

SEQ ID NO: 429325 - DNA, 33 bp, Homo sapien
atacttagacaactatgaacagtatggtctatg

SEQ ID NO: 429326 - DNA, 33 bp, Homo sapien
atacttagacaactattaacagtatggtctatg

SEQ ID NO: 429327 - DNA, 33 bp, Homo sapien
tgggtaaaattcaaaaagtcctggataatttgc

SEQ ID NO: 429328 - DNA, 33 bp, Homo sapien
tgggtaaaattcaaaatgtcctggataatttgc

SEQ ID NO: 429329 - DNA, 33 bp, Homo sapien
ctctactcttagaaaaacaccacagcaggatgg

SEQ ID NO: 429330 - DNA, 33 bp, Homo sapien
ctctactcttagaaaatcaccacagcaggatgg

SEQ ID NO: 429331 - DNA, 33 bp, Homo sapien
tacttggctgaattcacatggcttataagtaga

SEQ ID NO: 429332 - DNA, 33 bp, Homo sapien
tacttggctgaattcatatggcttataagtaga

SEQ ID NO: 429333 - DNA, 33 bp, Homo sapien
ctgaagaaggtttggcaatctgagtaaaaacta

SEQ ID NO: 429334 - DNA, 33 bp, Homo sapien
ctgaagaaggtttggcgatctgagtaaaaacta

SEQ ID NO: 429335 - DNA, 33 bp, Homo sapien
ttgttgatgatgctgacgatgttttattcattt

SEQ ID NO: 429336 - DNA, 33 bp, Homo sapien
ttgttgatgatgctgatgatgttttattcattt

SEQ ID NO: 429337 - DNA, 33 bp, Homo sapien
gctccttcatttgtgcaaactggtgaggctgaa

SEQ ID NO: 429338 - DNA, 33 bp, Homo sapien
gctccttcatttgtgcgaactggtgaggctgaa

SEQ ID NO: 429339 - DNA, 33 bp, Homo sapien
acaagaaaaccgaggcccagtcttcttgattta

SEQ ID NO: 429340 - DNA, 33 bp, Homo sapien
acaagaaaaccgaggctcagtcttcttgattta

SEQ ID NO: 429341 - DNA, 33 bp, Homo sapien
atttgtctctcttcctgaattcccatcaactta

SEQ ID NO: 429342 - DNA, 33 bp, Homo sapien
atttgtctctcttccttaattcccatcaactta

SEQ ID NO: 429343 - DNA, 33 bp, Homo sapien
tcatgaaactggtaaaatatgaggcagataaac

SEQ ID NO: 429344 - DNA, 33 bp, Homo sapien
tcatgaaactggtaaagtatgaggcagataaac

SEQ ID NO: 429345 - DNA, 33 bp, Homo sapien
tatttgcatttctaaaactttgatatacttcct

SEQ ID NO: 429346 - DNA, 33 bp, Homo sapien
tatttgcatttctaaagctttgatatacttcct

SEQ ID NO: 429347 - DNA, 33 bp, Homo sapien
tctttaattcttgtcaccaatgttttatagttt

SEQ ID NO: 429348 - DNA, 33 bp, Homo sapien
tctttaattcttgtcatcaatgttttatagttt

SEQ ID NO: 429349 - DNA, 33 bp, Homo sapien
tatataacaaatgccactgaagtttcgatagag

SEQ ID NO: 429350 - DNA, 33 bp, Homo sapien
tatataacaaatgccattgaagtttcgatagag

SEQ ID NO: 429351 - DNA, 33 bp, Homo sapien
ttgtgagcagcatatacgggtgaacaggaattg

SEQ ID NO: 429352 - DNA, 33 bp, Homo sapien
ttgtgagcagcatataggggtgaacaggaattg

SEQ ID NO: 429353 - DNA, 33 bp, Homo sapien
gacataatgttgaagaaactggtattgaaagtg

SEQ ID NO: 429354 - DNA, 33 bp, Homo sapien
gacataatgttgaagagactggtattgaaagtg

SEQ ID NO: 429355 - DNA, 33 bp, Homo sapien
caaggtgactctgctccacatagccatccagga

SEQ ID NO: 429356 - DNA, 33 bp, Homo sapien
caaggtgactctgctctacatagccatccagga

SEQ ID NO: 429357 - DNA, 33 bp, Homo sapien
ttgaccataaagttaaaaagaaagtctgagatg

SEQ ID NO: 429358 - DNA, 33 bp, Homo sapien
ttgaccataaagttaagaagaaagtctgagatg

SEQ ID NO: 429359 - DNA, 33 bp, Homo sapien
ggttatggccatgtgacgaagttctcaccagta

SEQ ID NO: 429360 - DNA, 33 bp, Homo sapien
ggttatggccatgtgatgaagttctcaccagta

SEQ ID NO: 429361 - DNA, 33 bp, Homo sapien
gcacaaagtagccctgaaaaatatagcagtgtt

SEQ ID NO: 429362 - DNA, 33 bp, Homo sapien
gcacaaagtagccctgcaaaatatagcagtgtt

SEQ ID NO: 429363 - DNA, 33 bp, Homo sapien
ttcatatttgttttaccattgggagcctatatt

SEQ ID NO: 429364 - DNA, 33 bp, Homo sapien
ttcatatttgttttactattgggagcctatatt

SEQ ID NO: 429365 - DNA, 33 bp, Homo sapien
ataaccccactgcaaactgaggagcatctgtat

SEQ ID NO: 429366 - DNA, 33 bp, Homo sapien
ataaccccactgcaaattgaggagcatctgtat

SEQ ID NO: 429367 - DNA, 33 bp, Homo sapien
ccctggaaagaaagaaagagccagaattcttgt

SEQ ID NO: 429368 - DNA, 33 bp, Homo sapien
ccctggaaagaaagaaggagccagaattcttgt

SEQ ID NO: 429369 - DNA, 33 bp, Homo sapien
gaggaacctcagagcaaaagccagacccatgca

SEQ ID NO: 429370 - DNA, 33 bp, Homo sapien
gaggaacctcagagcagaagccagacccatgca

SEQ ID NO: 429371 - DNA, 33 bp, Homo sapien
acctcaccttccttcccctgcttttatccctga

SEQ ID NO: 429372 - DNA, 33 bp, Homo sapien
acctcaccttccttcctctgcttttatccctga

SEQ ID NO: 429373 - DNA, 33 bp, Homo sapien
gtgtggaccatacagacagggagctggaatgga

SEQ ID NO: 429374 - DNA, 33 bp, Homo sapien
gtgtggaccatacagagagggagctggaatgga

SEQ ID NO: 429375 - DNA, 33 bp, Homo sapien
ctgaggtatactcatccccttttaaccatatta

SEQ ID NO: 429376 - DNA, 33 bp, Homo sapien
ctgaggtatactcatctccttttaaccatatta

SEQ ID NO: 429377 - DNA, 33 bp, Homo sapien
ctgttcccaaaccacgaattgtaaagatttgtg

SEQ ID NO: 429378 - DNA, 33 bp, Homo sapien
ctgttcccaaaccacggattgtaaagatttgtg

SEQ ID NO: 429379 - DNA, 33 bp, Homo sapien
tattggttattcagaactgtctcaaggactcat

SEQ ID NO: 429380 - DNA, 33 bp, Homo sapien
tattggttattcagaattgtctcaaggactcat

SEQ ID NO: 429381 - DNA, 33 bp, Homo sapien
atgaaaatgcaacaggaatagagacaaaaattc

SEQ ID NO: 429382 - DNA, 33 bp, Homo sapien
atgaaaatgcaacagggatagagacaaaaattc

SEQ ID NO: 429383 - DNA, 33 bp, Homo sapien
tttagccagatgttacagagtacaggaaaaata

SEQ ID NO: 429384 - DNA, 33 bp, Homo sapien
tttagccagatgttactgagtacaggaaaaata

SEQ ID NO: 429385 - DNA, 33 bp, Homo sapien
atagacaaagtagtacaactgcacaagcattat

SEQ ID NO: 429386 - DNA, 33 bp, Homo sapien
atagacaaagtagtacgactgcacaagcattat

SEQ ID NO: 429387 - DNA, 33 bp, Homo sapien
ggacacctgagacaaacgaaatatcagtgacta

SEQ ID NO: 429388 - DNA, 33 bp, Homo sapien
ggacacctgagacaaaggaaatatcagtgacta

SEQ ID NO: 429389 - DNA, 33 bp, Homo sapien
ttcagtgacattaaaccgtagcatatggccaca

SEQ ID NO: 429390 - DNA, 33 bp, Homo sapien
ttcagtgacattaaactgtagcatatggccaca

SEQ ID NO: 429391 - DNA, 33 bp, Homo sapien
tgaagtagagtttatacggcagtaactgtgaga

SEQ ID NO: 429392 - DNA, 33 bp, Homo sapien
tgaagtagagtttatatggcagtaactgtgaga

SEQ ID NO: 429393 - DNA, 33 bp, Homo sapien
tgctaagtcatgctggaaaaagactgaatttag

SEQ ID NO: 429394 - DNA, 33 bp, Homo sapien
tgctaagtcatgctgggaaaagactgaatttag

SEQ ID NO: 429395 - DNA, 33 bp, Homo sapien
tgactgcgatataaaagttgtgcacttgatcgt

SEQ ID NO: 429396 - DNA, 33 bp, Homo sapien
tgactgcgatataaaatttgtgcacttgatcgt

SEQ ID NO: 429397 - DNA, 33 bp, Homo sapien
acaattgtacaaatacacttcctaatgcaggtt

SEQ ID NO: 429398 - DNA, 33 bp, Homo sapien
acaattgtacaaatacgcttcctaatgcaggtt

SEQ ID NO: 429399 - DNA, 33 bp, Homo sapien
caagtctcctggacagacaagagattacacctg

SEQ ID NO: 429400 - DNA, 33 bp, Homo sapien
caagtctcctggacaggcaagagattacacctg

SEQ ID NO: 429401 - DNA, 33 bp, Homo sapien
ttttgttaattctgcacctatttttcattcttc

SEQ ID NO: 429402 - DNA, 33 bp, Homo sapien
ttttgttaattctgcatctatttttcattcttc

SEQ ID NO: 429403 - DNA, 33 bp, Homo sapien
ctccatacactgattacatggaaacaaaaagaa

SEQ ID NO: 429404 - DNA, 33 bp, Homo sapien
ctccatacactgattatatggaaacaaaaagaa

SEQ ID NO: 429405 - DNA, 33 bp, Homo sapien
agctttcgtggtaaagcactgtaagaaagggct

SEQ ID NO: 429406 - DNA, 33 bp, Homo sapien
agctttcgtggtaaagtactgtaagaaagggct

SEQ ID NO: 429407 - DNA, 33 bp, Homo sapien
aaaaatagaatttcacacattgaactcccctat

SEQ ID NO: 429408 - DNA, 33 bp, Homo sapien
aaaaatagaatttcacgcattgaactcccctat

SEQ ID NO: 429409 - DNA, 33 bp, Homo sapien
taaggccttgccttgaacctctattctattctt

SEQ ID NO: 429410 - DNA, 33 bp, Homo sapien
taaggccttgccttgagcctctattctattctt

SEQ ID NO: 429411 - DNA, 33 bp, Homo sapien
ctagatttgtgtcttccaccatcacttactagc

SEQ ID NO: 429412 - DNA, 33 bp, Homo sapien
ctagatttgtgtcttctaccatcacttactagc

SEQ ID NO: 429413 - DNA, 33 bp, Homo sapien
attctagggttacatcaattaataaagtcagac

SEQ ID NO: 429414 - DNA, 33 bp, Homo sapien
attctagggttacatcgattaataaagtcagac

SEQ ID NO: 429415 - DNA, 33 bp, Homo sapien
tgaaactcagcttgaagcctaattatagtattc

SEQ ID NO: 429416 - DNA, 33 bp, Homo sapien
tgaaactcagcttgaatcctaattatagtattc

SEQ ID NO: 429417 - DNA, 33 bp, Homo sapien
ctttgatgaaatggaggaatgacaacaatgtga

SEQ ID NO: 429418 - DNA, 33 bp, Homo sapien
ctttgatgaaatggagtaatgacaacaatgtga

SEQ ID NO: 429419 - DNA, 33 bp, Homo sapien
agcacaattattttgcaattcatactcagagtt

SEQ ID NO: 429420 - DNA, 33 bp, Homo sapien
agcacaattattttgcgattcatactcagagtt

SEQ ID NO: 429421 - DNA, 33 bp, Homo sapien
agattcttcagtaactaaggaggaactacctga

SEQ ID NO: 429422 - DNA, 33 bp, Homo sapien
agattcttcagtaactgaggaggaactacctga

SEQ ID NO: 429423 - DNA, 33 bp, Homo sapien
caactccaggtctttaagtgacattgcttttta

SEQ ID NO: 429424 - DNA, 33 bp, Homo sapien
caactccaggtctttatgtgacattgcttttta

SEQ ID NO: 429425 - DNA, 33 bp, Homo sapien
agtcaggatgtgaacccaaaactcttcaactct

SEQ ID NO: 429426 - DNA, 33 bp, Homo sapien
agtcaggatgtgaacctaaaactcttcaactct

SEQ ID NO: 429427 - DNA, 33 bp, Homo sapien
ctggaaggtaagggaacgtatgaggagctgtgg

SEQ ID NO: 429428 - DNA, 33 bp, Homo sapien
ctggaaggtaagggaatgtatgaggagctgtgg

SEQ ID NO: 429429 - DNA, 33 bp, Homo sapien
attcctcttatcaaaccagcttcattctgcaga

SEQ ID NO: 429430 - DNA, 33 bp, Homo sapien
attcctcttatcaaactagcttcattctgcaga

SEQ ID NO: 429431 - DNA, 33 bp, Homo sapien
atacctcagtgggctcaatggaggatagagaag

SEQ ID NO: 429432 - DNA, 33 bp, Homo sapien
atacctcagtgggctcgatggaggatagagaag

SEQ ID NO: 429433 - DNA, 33 bp, Homo sapien
cttccaatgcaaccaacagtaattatctgcttt

SEQ ID NO: 429434 - DNA, 33 bp, Homo sapien
cttccaatgcaaccaagagtaattatctgcttt

SEQ ID NO: 429435 - DNA, 33 bp, Homo sapien
aaatgtgtctggaagaaagaagcagggcacaca

SEQ ID NO: 429436 - DNA, 33 bp, Homo sapien
aaatgtgtctggaagagagaagcagggcacaca

SEQ ID NO: 429437 - DNA, 33 bp, Homo sapien
tcaaatgttcttcctccgagaaggtttactggt

SEQ ID NO: 429438 - DNA, 33 bp, Homo sapien
tcaaatgttcttcctctgagaaggtttactggt

SEQ ID NO: 429439 - DNA, 33 bp, Homo sapien
attgagtacttacaaagcagtagcaggatgccc

SEQ ID NO: 429440 - DNA, 33 bp, Homo sapien
attgagtacttacaaatcagtagcaggatgccc

SEQ ID NO: 429441 - DNA, 33 bp, Homo sapien
gttgtaataagactaaagctgattttgcaactt

SEQ ID NO: 429442 - DNA, 33 bp, Homo sapien
gttgtaataagactaacgctgattttgcaactt

SEQ ID NO: 429443 - DNA, 33 bp, Homo sapien
aagtatgaaaagcaaccagagtgggcccaaaga

SEQ ID NO: 429444 - DNA, 33 bp, Homo sapien
aagtatgaaaagcaactagagtgggcccaaaga

SEQ ID NO: 429445 - DNA, 33 bp, Homo sapien
ttatagtctataaacaaagtcttaaaataattg

SEQ ID NO: 429446 - DNA, 33 bp, Homo sapien
ttatagtctataaacagagtcttaaaataattg

SEQ ID NO: 429447 - DNA, 33 bp, Homo sapien
ttttctctttggtgaacgtagtatttcatatgt

SEQ ID NO: 429448 - DNA, 33 bp, Homo sapien
ttttctctttggtgaatgtagtatttcatatgt

SEQ ID NO: 429449 - DNA, 33 bp, Homo sapien
agattaccgagttaaaagtaagagagaggctga

SEQ ID NO: 429450 - DNA, 33 bp, Homo sapien
agattaccgagttaaaggtaagagagaggctga

SEQ ID NO: 429451 - DNA, 33 bp, Homo sapien
gcatttgtggtttttagctttctattggacagt

SEQ ID NO: 429452 - DNA, 33 bp, Homo sapien
gcatttgtggtttttatctttctattggacagt

SEQ ID NO: 429453 - DNA, 33 bp, Homo sapien
ataagtatagatggacaggccaaaaggagatct

SEQ ID NO: 429454 - DNA, 33 bp, Homo sapien
ataagtatagatggacgggccaaaaggagatct

SEQ ID NO: 429455 - DNA, 33 bp, Homo sapien
ccctgcaacaacaaaaaatgagcattcccactt

SEQ ID NO: 429456 - DNA, 33 bp, Homo sapien
ccctgcaacaacaaaagatgagcattcccactt

SEQ ID NO: 429457 - DNA, 33 bp, Homo sapien
gaatatttgttttcccaggaagtaggtgatggg

SEQ ID NO: 429458 - DNA, 33 bp, Homo sapien
gaatatttgttttcccgggaagtaggtgatggg

SEQ ID NO: 429459 - DNA, 33 bp, Homo sapien
gccaactactgctaaactctaaccaaagttgtc

SEQ ID NO: 429460 - DNA, 33 bp, Homo sapien
gccaactactgctaaattctaaccaaagttgtc

SEQ ID NO: 429461 - DNA, 33 bp, Homo sapien
caacaatcagattgaaattaggacaagataaga

SEQ ID NO: 429462 - DNA, 33 bp, Homo sapien
caacaatcagattgaagttaggacaagataaga

SEQ ID NO: 429463 - DNA, 33 bp, Homo sapien
tgcaaatcaacagtagaacgaagtgtcttttca

SEQ ID NO: 429464 - DNA, 33 bp, Homo sapien
tgcaaatcaacagtaggacgaagtgtcttttca

SEQ ID NO: 429465 - DNA, 33 bp, Homo sapien
ctgttatactttttccaaactttagtgacgtgt

SEQ ID NO: 429466 - DNA, 33 bp, Homo sapien
ctgttatactttttcccaactttagtgacgtgt

SEQ ID NO: 429467 - DNA, 33 bp, Homo sapien
gtcattcaagatattcacccttttgcccataga

SEQ ID NO: 429468 - DNA, 33 bp, Homo sapien
gtcattcaagatattcgcccttttgcccataga

SEQ ID NO: 429469 - DNA, 33 bp, Homo sapien
ttctaggtgaaagcacaaacacttgattacttt

SEQ ID NO: 429470 - DNA, 33 bp, Homo sapien
ttctaggtgaaagcacgaacacttgattacttt

SEQ ID NO: 429471 - DNA, 33 bp, Homo sapien
agatggaccaagagacacttctgccttaggtgg

SEQ ID NO: 429472 - DNA, 33 bp, Homo sapien
agatggaccaagagacgcttctgccttaggtgg

SEQ ID NO: 429473 - DNA, 33 bp, Homo sapien
tgcgaacttggccactcactttaggacctgagt

SEQ ID NO: 429474 - DNA, 33 bp, Homo sapien
tgcgaacttggccactgactttaggacctgagt

SEQ ID NO: 429475 - DNA, 33 bp, Homo sapien
atctcactatcgaccacggtaggaattctgttg

SEQ ID NO: 429476 - DNA, 33 bp, Homo sapien
atctcactatcgaccatggtaggaattctgttg

SEQ ID NO: 429477 - DNA, 33 bp, Homo sapien
caagttcttgtccttacactcctttctccactg

SEQ ID NO: 429478 - DNA, 33 bp, Homo sapien
caagttcttgtccttatactcctttctccactg

SEQ ID NO: 429479 - DNA, 33 bp, Homo sapien
ctaagcatttgtcactcaaaaaataccatttta

SEQ ID NO: 429480 - DNA, 33 bp, Homo sapien
ctaagcatttgtcacttaaaaaataccatttta

SEQ ID NO: 429481 - DNA, 33 bp, Homo sapien
ctctctgatccaggcactgatctttctcttcaa

SEQ ID NO: 429482 - DNA, 33 bp, Homo sapien
ctctctgatccaggcagtgatctttctcttcaa

SEQ ID NO: 429483 - DNA, 33 bp, Homo sapien
ctcttaaatttgcccaaaaaactcccatcttgc

SEQ ID NO: 429484 - DNA, 33 bp, Homo sapien
ctcttaaatttgcccacaaaactcccatcttgc

SEQ ID NO: 429485 - DNA, 33 bp, Homo sapien
actagatttgatcttacccaaaagcctaagaag

SEQ ID NO: 429486 - DNA, 33 bp, Homo sapien
actagatttgatcttagccaaaagcctaagaag

SEQ ID NO: 429487 - DNA, 33 bp, Homo sapien
taaaatgagtattacaatgaaagcaaccgagtg

SEQ ID NO: 429488 - DNA, 33 bp, Homo sapien
taaaatgagtattacagtgaaagcaaccgagtg

SEQ ID NO: 429489 - DNA, 33 bp, Homo sapien
aatttgctgattatgccatgtataaggagccag

SEQ ID NO: 429490 - DNA, 33 bp, Homo sapien
aatttgctgattatgctatgtataaggagccag

SEQ ID NO: 429491 - DNA, 33 bp, Homo sapien
aaatagcaaaaatggaaatgataaaataagttt

SEQ ID NO: 429492 - DNA, 33 bp, Homo sapien
aaatagcaaaaatggacatgataaaataagttt

SEQ ID NO: 429493 - DNA, 33 bp, Homo sapien
aatgaattctccaaaaaacaagtgaaaagcttt

SEQ ID NO: 429494 - DNA, 33 bp, Homo sapien
aatgaattctccaaaacacaagtgaaaagcttt

SEQ ID NO: 429495 - DNA, 33 bp, Homo sapien
ctgagatgagaaagcaatgcaaggaatccctga

SEQ ID NO: 429496 - DNA, 33 bp, Homo sapien
ctgagatgagaaagcagtgcaaggaatccctga

SEQ ID NO: 429497 - DNA, 33 bp, Homo sapien
tgatttggatactatccgaacctagtcttggta

SEQ ID NO: 429498 - DNA, 33 bp, Homo sapien
tgatttggatactatctgaacctagtcttggta

SEQ ID NO: 429499 - DNA, 33 bp, Homo sapien
attctctacaacatggaaagtgtcaaaacagag

SEQ ID NO: 429500 - DNA, 33 bp, Homo sapien
attctctacaacatgggaagtgtcaaaacagag

SEQ ID NO: 429501 - DNA, 33 bp, Homo sapien
gtagagcaaggttcagcaagagcaagagtgtgt

SEQ ID NO: 429502 - DNA, 33 bp, Homo sapien
gtagagcaaggttcaggaagagcaagagtgtgt

SEQ ID NO: 429503 - DNA, 33 bp, Homo sapien
caccatctgttatgagaaccatttctaatagga

SEQ ID NO: 429504 - DNA, 33 bp, Homo sapien
caccatctgttatgagcaccatttctaatagga

SEQ ID NO: 429505 - DNA, 33 bp, Homo sapien
agacttccgtaatccaagtctcgtttctcaggc

SEQ ID NO: 429506 - DNA, 33 bp, Homo sapien
agacttccgtaatccaggtctcgtttctcaggc

SEQ ID NO: 429507 - DNA, 33 bp, Homo sapien
aagagaattaaaagaaacttgagagaccaacta

SEQ ID NO: 429508 - DNA, 33 bp, Homo sapien
aagagaattaaaagaagcttgagagaccaacta

SEQ ID NO: 429509 - DNA, 33 bp, Homo sapien
cctgtctcttcttccacgatatccacagtgact

SEQ ID NO: 429510 - DNA, 33 bp, Homo sapien
cctgtctcttcttccatgatatccacagtgact

SEQ ID NO: 429511 - DNA, 33 bp, Homo sapien
gccacagaaaaacccaagtgctctgtatgcaat

SEQ ID NO: 429512 - DNA, 33 bp, Homo sapien
gccacagaaaaacccacgtgctctgtatgcaat

SEQ ID NO: 429513 - DNA, 33 bp, Homo sapien
gccttgagaggttcccaaactccagaattctgc

SEQ ID NO: 429514 - DNA, 33 bp, Homo sapien
gccttgagaggttcccgaactccagaattctgc

SEQ ID NO: 429515 - DNA, 33 bp, Homo sapien
gctaggtcagtcattccagctgccaatcaaaac

SEQ ID NO: 429516 - DNA, 33 bp, Homo sapien
gctaggtcagtcattctagctgccaatcaaaac

SEQ ID NO: 429517 - DNA, 33 bp, Homo sapien
caggggtcctaaaaaccgagcattgagcctatg

SEQ ID NO: 429518 - DNA, 33 bp, Homo sapien
caggggtcctaaaaactgagcattgagcctatg

SEQ ID NO: 429519 - DNA, 33 bp, Homo sapien
tttcgttaacagggcaaaacttcagggatggct

SEQ ID NO: 429520 - DNA, 33 bp, Homo sapien
tttcgttaacagggcagaacttcagggatggct

SEQ ID NO: 429521 - DNA, 33 bp, Homo sapien
tgatgctaaagtttgaaagccattgtcttagat

SEQ ID NO: 429522 - DNA, 33 bp, Homo sapien
tgatgctaaagtttgatagccattgtcttagat

SEQ ID NO: 429523 - DNA, 33 bp, Homo sapien
atatgggccctacaccaagagtatcaccattcc

SEQ ID NO: 429524 - DNA, 33 bp, Homo sapien
atatgggccctacaccgagagtatcaccattcc

SEQ ID NO: 429525 - DNA, 33 bp, Homo sapien
taggctatgtaagttaaggggaatttgtcttct

SEQ ID NO: 429526 - DNA, 33 bp, Homo sapien
taggctatgtaagttagggggaatttgtcttct

SEQ ID NO: 429527 - DNA, 33 bp, Homo sapien
ccttaggatggtttataaggatgaacagaagcc

SEQ ID NO: 429528 - DNA, 33 bp, Homo sapien
ccttaggatggtttatcaggatgaacagaagcc

SEQ ID NO: 429529 - DNA, 33 bp, Homo sapien
acacgatcagtggatgcaacaaggagcactggg

SEQ ID NO: 429530 - DNA, 33 bp, Homo sapien
acacgatcagtggatggaacaaggagcactggg

SEQ ID NO: 429531 - DNA, 33 bp, Homo sapien
gctgcaggatttcttacggaatattactacatt

SEQ ID NO: 429532 - DNA, 33 bp, Homo sapien
gctgcaggatttcttatggaatattactacatt

SEQ ID NO: 429533 - DNA, 33 bp, Homo sapien
aaggaaataaaaaaggaagttgtagtgtgttgg

SEQ ID NO: 429534 - DNA, 33 bp, Homo sapien
aaggaaataaaaaaggcagttgtagtgtgttgg

SEQ ID NO: 429535 - DNA, 33 bp, Homo sapien
atatcatagccaaacactcttaactaggcctca

SEQ ID NO: 429536 - DNA, 33 bp, Homo sapien
atatcatagccaaacattcttaactaggcctca

SEQ ID NO: 429537 - DNA, 33 bp, Homo sapien
atattttggacaaataaaagccaagagcaagtc

SEQ ID NO: 429538 - DNA, 33 bp, Homo sapien
atattttggacaaatacaagccaagagcaagtc

SEQ ID NO: 429539 - DNA, 33 bp, Homo sapien
ctaagagctcctaataaaagtttccattttccc

SEQ ID NO: 429540 - DNA, 33 bp, Homo sapien
ctaagagctcctaatacaagtttccattttccc

SEQ ID NO: 429541 - DNA, 33 bp, Homo sapien
gaaggaaaaagctcaaatatgctggcaagctaa

SEQ ID NO: 429542 - DNA, 33 bp, Homo sapien
gaaggaaaaagctcaactatgctggcaagctaa

SEQ ID NO: 429543 - DNA, 33 bp, Homo sapien
atttgaggtgatgtgacgttgcattagggaggc

SEQ ID NO: 429544 - DNA, 33 bp, Homo sapien
atttgaggtgatgtgatgttgcattagggaggc

SEQ ID NO: 429545 - DNA, 33 bp, Homo sapien
gattagcttgtaataacattgaggccacttctc

SEQ ID NO: 429546 - DNA, 33 bp, Homo sapien
gattagcttgtaataatattgaggccacttctc

SEQ ID NO: 429547 - DNA, 33 bp, Homo sapien
tagcacctgtcaaacaagaaaatttagagtatt

SEQ ID NO: 429548 - DNA, 33 bp, Homo sapien
tagcacctgtcaaacaggaaaatttagagtatt

SEQ ID NO: 429549 - DNA, 33 bp, Homo sapien
ccctccaggctcagcaatcacctacctgctgtt

SEQ ID NO: 429550 - DNA, 33 bp, Homo sapien
ccctccaggctcagcagtcacctacctgctgtt

SEQ ID NO: 429551 - DNA, 33 bp, Homo sapien
taattattgaaggtggccatttctccatgtctt

SEQ ID NO: 429552 - DNA, 33 bp, Homo sapien
taattattgaaggtggtcatttctccatgtctt

SEQ ID NO: 429553 - DNA, 33 bp, Homo sapien
tgtatgtgaacaattaataaaactggcaaaagt

SEQ ID NO: 429554 - DNA, 33 bp, Homo sapien
tgtatgtgaacaattagtaaaactggcaaaagt

SEQ ID NO: 429555 - DNA, 33 bp, Homo sapien
aggatgatgttctacccgaggataattgaaatg

SEQ ID NO: 429556 - DNA, 33 bp, Homo sapien
aggatgatgttctacctgaggataattgaaatg

SEQ ID NO: 429557 - DNA, 33 bp, Homo sapien
gcgagcaccgcagaaacgggaagccactactta

SEQ ID NO: 429558 - DNA, 33 bp, Homo sapien
gcgagcaccgcagaaatgggaagccactactta

SEQ ID NO: 429559 - DNA, 33 bp, Homo sapien
ttcccttcagcaaaaaatacttcccttccatta

SEQ ID NO: 429560 - DNA, 33 bp, Homo sapien
ttcccttcagcaaaaagtacttcccttccatta

SEQ ID NO: 429561 - DNA, 33 bp, Homo sapien
gaaaatgtaaagtacaccaagacataaaacatt

SEQ ID NO: 429562 - DNA, 33 bp, Homo sapien
gaaaatgtaaagtacagcaagacataaaacatt

SEQ ID NO: 429563 - DNA, 33 bp, Homo sapien
tgggtcgtcttcattccctaaatcacctacgcc

SEQ ID NO: 429564 - DNA, 33 bp, Homo sapien
tgggtcgtcttcattctctaaatcacctacgcc

SEQ ID NO: 429565 - DNA, 33 bp, Homo sapien
gtacatgggttttcaacacatctaagaggtaag

SEQ ID NO: 429566 - DNA, 33 bp, Homo sapien
gtacatgggttttcaatacatctaagaggtaag

SEQ ID NO: 429567 - DNA, 33 bp, Homo sapien
tttcaatagccttttacatcctgttctaacagt

SEQ ID NO: 429568 - DNA, 33 bp, Homo sapien
tttcaatagccttttatatcctgttctaacagt

SEQ ID NO: 429569 - DNA, 33 bp, Homo sapien
ctgtgtattcccggaccggagagtggtcggctc

SEQ ID NO: 429570 - DNA, 33 bp, Homo sapien
ctgtgtattcccggactggagagtggtcggctc

SEQ ID NO: 429571 - DNA, 33 bp, Homo sapien
tagctttgttacaagactcattgggtccattcc

SEQ ID NO: 429572 - DNA, 33 bp, Homo sapien
tagctttgttacaagagtcattgggtccattcc

SEQ ID NO: 429573 - DNA, 33 bp, Homo sapien
tttgaagaaacaggaacagctttaacatgaggt

SEQ ID NO: 429574 - DNA, 33 bp, Homo sapien
tttgaagaaacaggaagagctttaacatgaggt

SEQ ID NO: 429575 - DNA, 33 bp, Homo sapien
cacactaattttgctacgtctatttaatgcaat

SEQ ID NO: 429576 - DNA, 33 bp, Homo sapien
cacactaattttgctatgtctatttaatgcaat

SEQ ID NO: 429577 - DNA, 33 bp, Homo sapien
ctactgcttgcattaaacacaacacttctttcc

SEQ ID NO: 429578 - DNA, 33 bp, Homo sapien
ctactgcttgcattaagcacaacacttctttcc

SEQ ID NO: 429579 - DNA, 33 bp, Homo sapien
tagctgaagaaagggaagtctgaaaagcaaagg

SEQ ID NO: 429580 - DNA, 33 bp, Homo sapien
tagctgaagaaagggaggtctgaaaagcaaagg

SEQ ID NO: 429581 - DNA, 33 bp, Homo sapien
tattcaacgtttttctcaaatgcctatacacac

SEQ ID NO: 429582 - DNA, 33 bp, Homo sapien
tattcaacgtttttctgaaatgcctatacacac

SEQ ID NO: 429583 - DNA, 33 bp, Homo sapien
tcagcaaaatgacaaactggtttaaagagtatt

SEQ ID NO: 429584 - DNA, 33 bp, Homo sapien
tcagcaaaatgacaaagtggtttaaagagtatt

SEQ ID NO: 429585 - DNA, 33 bp, Homo sapien
atctgtgctgtttgcacgaggtgagcccagagg

SEQ ID NO: 429586 - DNA, 33 bp, Homo sapien
atctgtgctgtttgcatgaggtgagcccagagg

SEQ ID NO: 429587 - DNA, 33 bp, Homo sapien
caaaagacttcaggaacaccaatcaaggccaac

SEQ ID NO: 429588 - DNA, 33 bp, Homo sapien
caaaagacttcaggaataccaatcaaggccaac

SEQ ID NO: 429589 - DNA, 33 bp, Homo sapien
aatttcctgagcaatactggtgctaagtatatc

SEQ ID NO: 429590 - DNA, 33 bp, Homo sapien
aatttcctgagcaatagtggtgctaagtatatc

SEQ ID NO: 429591 - DNA, 33 bp, Homo sapien
gaaggagggaaaacacagactcattagaataat

SEQ ID NO: 429592 - DNA, 33 bp, Homo sapien
gaaggagggaaaacaccgactcattagaataat

SEQ ID NO: 429593 - DNA, 33 bp, Homo sapien
tcaactcctcttgaacactgccacaagatttgc

SEQ ID NO: 429594 - DNA, 33 bp, Homo sapien
tcaactcctcttgaacgctgccacaagatttgc

SEQ ID NO: 429595 - DNA, 33 bp, Homo sapien
gaggaagtagtgaagcaatttgggtgagaatac

SEQ ID NO: 429596 - DNA, 33 bp, Homo sapien
gaggaagtagtgaagcgatttgggtgagaatac

SEQ ID NO: 429597 - DNA, 33 bp, Homo sapien
cacattcagcaagtaacgatattctgtaagatg

SEQ ID NO: 429598 - DNA, 33 bp, Homo sapien
cacattcagcaagtaatgatattctgtaagatg

SEQ ID NO: 429599 - DNA, 33 bp, Homo sapien
aaaaagcaaatgataaatacaggcagtccttaa

SEQ ID NO: 429600 - DNA, 33 bp, Homo sapien
aaaaagcaaatgataagtacaggcagtccttaa

SEQ ID NO: 429601 - DNA, 33 bp, Homo sapien
gagataaagttaaaacaagctcatcagggtagg

SEQ ID NO: 429602 - DNA, 33 bp, Homo sapien
gagataaagttaaaacgagctcatcagggtagg

SEQ ID NO: 429603 - DNA, 33 bp, Homo sapien
ataattatccagagccaactttggatcacatta

SEQ ID NO: 429604 - DNA, 33 bp, Homo sapien
ataattatccagagccgactttggatcacatta

SEQ ID NO: 429605 - DNA, 33 bp, Homo sapien
acactaaaagtattgaatagaaactagacattt

SEQ ID NO: 429606 - DNA, 33 bp, Homo sapien
acactaaaagtattgattagaaactagacattt

SEQ ID NO: 429607 - DNA, 33 bp, Homo sapien
agaagtcgcaacaaacaagttgagttccagaca

SEQ ID NO: 429608 - DNA, 33 bp, Homo sapien
agaagtcgcaacaaacgagttgagttccagaca

SEQ ID NO: 429609 - DNA, 33 bp, Homo sapien
atttatcaaaatgtcaaaagcacaattaactca

SEQ ID NO: 429610 - DNA, 33 bp, Homo sapien
atttatcaaaatgtcagaagcacaattaactca

SEQ ID NO: 429611 - DNA, 33 bp, Homo sapien
acctagattcattagaaggattggcagcagaaa

SEQ ID NO: 429612 - DNA, 33 bp, Homo sapien
acctagattcattagagggattggcagcagaaa

SEQ ID NO: 429613 - DNA, 33 bp, Homo sapien
aacattaaattagagaacacaagactgacaaaa

SEQ ID NO: 429614 - DNA, 33 bp, Homo sapien
aacattaaattagagatcacaagactgacaaaa

SEQ ID NO: 429615 - DNA, 33 bp, Homo sapien
aatcccgtaaaactgcccccgcaccatctccct

SEQ ID NO: 429616 - DNA, 33 bp, Homo sapien
aatcccgtaaaactgcgcccgcaccatctccct

SEQ ID NO: 429617 - DNA, 33 bp, Homo sapien
attgaaattccagagaatcatttacaagttact

SEQ ID NO: 429618 - DNA, 33 bp, Homo sapien
attgaaattccagagagtcatttacaagttact

SEQ ID NO: 429619 - DNA, 33 bp, Homo sapien
tactggcctagctaccaagaacttttaaagatt

SEQ ID NO: 429620 - DNA, 33 bp, Homo sapien
tactggcctagctaccgagaacttttaaagatt

SEQ ID NO: 429621 - DNA, 33 bp, Homo sapien
aggtgcacaaatatgcagatatcctgtattatg

SEQ ID NO: 429622 - DNA, 33 bp, Homo sapien
aggtgcacaaatatgctgatatcctgtattatg

SEQ ID NO: 429623 - DNA, 33 bp, Homo sapien
agggatagttgtctaacgtgatgggaaaaaatt

SEQ ID NO: 429624 - DNA, 33 bp, Homo sapien
agggatagttgtctaatgtgatgggaaaaaatt

SEQ ID NO: 429625 - DNA, 33 bp, Homo sapien
gtgtgaggttcaataacgataaaacacaaacat

SEQ ID NO: 429626 - DNA, 33 bp, Homo sapien
gtgtgaggttcaataaggataaaacacaaacat

SEQ ID NO: 429627 - DNA, 33 bp, Homo sapien
gaagatgctagctgagaatgcatagaaggagta

SEQ ID NO: 429628 - DNA, 33 bp, Homo sapien
gaagatgctagctgaggatgcatagaaggagta

SEQ ID NO: 429629 - DNA, 33 bp, Homo sapien
atagaaagtggaaataatatggccaatatctat

SEQ ID NO: 429630 - DNA, 33 bp, Homo sapien
atagaaagtggaaatattatggccaatatctat

SEQ ID NO: 429631 - DNA, 33 bp, Homo sapien
atggtctgcaggctaacaatgtcaacctcacct

SEQ ID NO: 429632 - DNA, 33 bp, Homo sapien
atggtctgcaggctaataatgtcaacctcacct

SEQ ID NO: 429633 - DNA, 33 bp, Homo sapien
tgttagtgttgtcctgcatcatgagggcagagg

SEQ ID NO: 429634 - DNA, 33 bp, Homo sapien
tgttagtgttgtcctggatcatgagggcagagg

SEQ ID NO: 429635 - DNA, 33 bp, Homo sapien
ctcttactgtgacacccaaagtggtaaaaacat

SEQ ID NO: 429636 - DNA, 33 bp, Homo sapien
ctcttactgtgacacctaaagtggtaaaaacat

SEQ ID NO: 429637 - DNA, 33 bp, Homo sapien
ggcttccattacaggtaaagttagatcagataa

SEQ ID NO: 429638 - DNA, 33 bp, Homo sapien
ggcttccattacaggtgaagttagatcagataa

SEQ ID NO: 429639 - DNA, 33 bp, Homo sapien
tctgctctaaaattcactgaagaagctaaataa

SEQ ID NO: 429640 - DNA, 33 bp, Homo sapien
tctgctctaaaattcattgaagaagctaaataa

SEQ ID NO: 429641 - DNA, 33 bp, Homo sapien
ttctgaaagctgatgcaaaagttggaaagtact

SEQ ID NO: 429642 - DNA, 33 bp, Homo sapien
ttctgaaagctgatgcgaaagttggaaagtact

SEQ ID NO: 429643 - DNA, 33 bp, Homo sapien
aattactcctttcttaacctcgagttctagaat

SEQ ID NO: 429644 - DNA, 33 bp, Homo sapien
aattactcctttcttagcctcgagttctagaat

SEQ ID NO: 429645 - DNA, 33 bp, Homo sapien
taaactgtctagctagcccttttggtatatgag

SEQ ID NO: 429646 - DNA, 33 bp, Homo sapien
taaactgtctagctagtccttttggtatatgag

SEQ ID NO: 429647 - DNA, 33 bp, Homo sapien
ttctctagtttgctgacgttagtataaatttaa

SEQ ID NO: 429648 - DNA, 33 bp, Homo sapien
ttctctagtttgctgatgttagtataaatttaa

SEQ ID NO: 429649 - DNA, 33 bp, Homo sapien
tttgttcctataggcacgttctctgacattgga

SEQ ID NO: 429650 - DNA, 33 bp, Homo sapien
tttgttcctataggcaggttctctgacattgga

SEQ ID NO: 429651 - DNA, 33 bp, Homo sapien
tgaatttccttcctcaggttaaagcaaatcaat

SEQ ID NO: 429652 - DNA, 33 bp, Homo sapien
tgaatttccttcctcatgttaaagcaaatcaat

SEQ ID NO: 429653 - DNA, 33 bp, Homo sapien
ccctcaattatggtgacattgccctgatgtgga

SEQ ID NO: 429654 - DNA, 33 bp, Homo sapien
ccctcaattatggtgatattgccctgatgtgga

SEQ ID NO: 429655 - DNA, 33 bp, Homo sapien
cagagcctcatgtaacaaacgtggacctcactg

SEQ ID NO: 429656 - DNA, 33 bp, Homo sapien
cagagcctcatgtaacgaacgtggacctcactg

SEQ ID NO: 429657 - DNA, 33 bp, Homo sapien
gtttacctaaatccaaccaatatcaaagtgttc

SEQ ID NO: 429658 - DNA, 33 bp, Homo sapien
gtttacctaaatccaagcaatatcaaagtgttc

SEQ ID NO: 429659 - DNA, 33 bp, Homo sapien
tacaatattccagcaacgtggtagtctagtcta

SEQ ID NO: 429660 - DNA, 33 bp, Homo sapien
tacaatattccagcaatgtggtagtctagtcta

SEQ ID NO: 429661 - DNA, 33 bp, Homo sapien
tctctttatatatcgcaatggaaagtaaaaccc

SEQ ID NO: 429662 - DNA, 33 bp, Homo sapien
tctctttatatatcgcgatggaaagtaaaaccc

SEQ ID NO: 429663 - DNA, 33 bp, Homo sapien
gctgattctgattggccacataaaaatggagca

SEQ ID NO: 429664 - DNA, 33 bp, Homo sapien
gctgattctgattggctacataaaaatggagca

SEQ ID NO: 429665 - DNA, 33 bp, Homo sapien
taataatgtagtcaaaccattgattgaaaatat

SEQ ID NO: 429666 - DNA, 33 bp, Homo sapien
taataatgtagtcaaagcattgattgaaaatat

SEQ ID NO: 429667 - DNA, 33 bp, Homo sapien
acatcaaaatgttcccaccgcagaccaaaaatt

SEQ ID NO: 429668 - DNA, 33 bp, Homo sapien
acatcaaaatgttcccgccgcagaccaaaaatt

SEQ ID NO: 429669 - DNA, 33 bp, Homo sapien
agctggcagattgcttcaaagttgagttaaatg

SEQ ID NO: 429670 - DNA, 33 bp, Homo sapien
agctggcagattgctttaaagttgagttaaatg

SEQ ID NO: 429671 - DNA, 33 bp, Homo sapien
catcagctttgttctcaagttggtttgttcttg

SEQ ID NO: 429672 - DNA, 33 bp, Homo sapien
catcagctttgttctcgagttggtttgttcttg

SEQ ID NO: 429673 - DNA, 33 bp, Homo sapien
acctgaagtcaatagcacaatattatggcactt

SEQ ID NO: 429674 - DNA, 33 bp, Homo sapien
acctgaagtcaatagcgcaatattatggcactt

SEQ ID NO: 429675 - DNA, 33 bp, Homo sapien
tactgcctgagactgccagtgtggttaatcaag

SEQ ID NO: 429676 - DNA, 33 bp, Homo sapien
tactgcctgagactgctagtgtggttaatcaag

SEQ ID NO: 429677 - DNA, 33 bp, Homo sapien
gtccggaggaagtgcacgtttctgggatgactt

SEQ ID NO: 429678 - DNA, 33 bp, Homo sapien
gtccggaggaagtgcaggtttctgggatgactt

SEQ ID NO: 429679 - DNA, 33 bp, Homo sapien
tccaaagaccagccaaatcttacaggttagttc

SEQ ID NO: 429680 - DNA, 33 bp, Homo sapien
tccaaagaccagccaagtcttacaggttagttc

SEQ ID NO: 429681 - DNA, 33 bp, Homo sapien
aactcattatagtagcagcctcctccagtggtt

SEQ ID NO: 429682 - DNA, 33 bp, Homo sapien
aactcattatagtagccgcctcctccagtggtt

SEQ ID NO: 429683 - DNA, 33 bp, Homo sapien
atcccaaatgtttttcaaagttcatatgacttt

SEQ ID NO: 429684 - DNA, 33 bp, Homo sapien
atcccaaatgtttttcgaagttcatatgacttt

SEQ ID NO: 429685 - DNA, 33 bp, Homo sapien
gtgtttgtcaaagtcacggaatcccttctcctg

SEQ ID NO: 429686 - DNA, 33 bp, Homo sapien
gtgtttgtcaaagtcagggaatcccttctcctg

SEQ ID NO: 429687 - DNA, 33 bp, Homo sapien
acagtgacataatgacagattcagtagcaacca

SEQ ID NO: 429688 - DNA, 33 bp, Homo sapien
acagtgacataatgactgattcagtagcaacca

SEQ ID NO: 429689 - DNA, 33 bp, Homo sapien
gatgtgtccactgggcacttgaaatgtggctag

SEQ ID NO: 429690 - DNA, 33 bp, Homo sapien
gatgtgtccactgggcgcttgaaatgtggctag

SEQ ID NO: 429691 - DNA, 33 bp, Homo sapien
ggttaacttccacacccatccagaatcagcatt

SEQ ID NO: 429692 - DNA, 33 bp, Homo sapien
ggttaacttccacaccgatccagaatcagcatt

SEQ ID NO: 429693 - DNA, 33 bp, Homo sapien
tgtaaaagagctggacaacagtgcactcatgtt

SEQ ID NO: 429694 - DNA, 33 bp, Homo sapien
tgtaaaagagctggacgacagtgcactcatgtt

SEQ ID NO: 429695 - DNA, 33 bp, Homo sapien
aaggaaagaaagacaccgtgatttacagtcttg

SEQ ID NO: 429696 - DNA, 33 bp, Homo sapien
aaggaaagaaagacactgtgatttacagtcttg

SEQ ID NO: 429697 - DNA, 33 bp, Homo sapien
gaggcagagccctagaatagaccagtaatgatg

SEQ ID NO: 429698 - DNA, 33 bp, Homo sapien
gaggcagagccctagagtagaccagtaatgatg

SEQ ID NO: 429699 - DNA, 33 bp, Homo sapien
aggaaggaaggaagaacgaaaccaagttacttc

SEQ ID NO: 429700 - DNA, 33 bp, Homo sapien
aggaaggaaggaagaatgaaaccaagttacttc

SEQ ID NO: 429701 - DNA, 33 bp, Homo sapien
acagggaaagagatgcagaaaggcaaatgccta

SEQ ID NO: 429702 - DNA, 33 bp, Homo sapien
acagggaaagagatgcggaaaggcaaatgccta

SEQ ID NO: 429703 - DNA, 33 bp, Homo sapien
cattctttctctgcaacggcagctttacttatg

SEQ ID NO: 429704 - DNA, 33 bp, Homo sapien
cattctttctctgcaatggcagctttacttatg

SEQ ID NO: 429705 - DNA, 33 bp, Homo sapien
caggcagaactgtctacgtacaataagttgatt

SEQ ID NO: 429706 - DNA, 33 bp, Homo sapien
caggcagaactgtctatgtacaataagttgatt

SEQ ID NO: 429707 - DNA, 33 bp, Homo sapien
ttcactagagctgcaactattcttgtgtgatgt

SEQ ID NO: 429708 - DNA, 33 bp, Homo sapien
ttcactagagctgcaattattcttgtgtgatgt

SEQ ID NO: 429709 - DNA, 33 bp, Homo sapien
aatttatgcgctctaagggatattgccacccag

SEQ ID NO: 429710 - DNA, 33 bp, Homo sapien
aatttatgcgctctaatggatattgccacccag

SEQ ID NO: 429711 - DNA, 33 bp, Homo sapien
gaattcagtgagcaaaactggttgctatttcat

SEQ ID NO: 429712 - DNA, 33 bp, Homo sapien
gaattcagtgagcaaagctggttgctatttcat

SEQ ID NO: 429713 - DNA, 33 bp, Homo sapien
atttctgttcattaaaggtagagatggagaaga

SEQ ID NO: 429714 - DNA, 33 bp, Homo sapien
atttctgttcattaaatgtagagatggagaaga

SEQ ID NO: 429715 - DNA, 33 bp, Homo sapien
gcaaatcacttgactaacttacatatgattatc

SEQ ID NO: 429716 - DNA, 33 bp, Homo sapien
gcaaatcacttgactagcttacatatgattatc

SEQ ID NO: 429717 - DNA, 33 bp, Homo sapien
gttgagaatactactccataccaactgtttctg

SEQ ID NO: 429718 - DNA, 33 bp, Homo sapien
gttgagaatactactctataccaactgtttctg

SEQ ID NO: 429719 - DNA, 33 bp, Homo sapien
aactagaaatcagtcaaaaaaggaacctcagaa

SEQ ID NO: 429720 - DNA, 33 bp, Homo sapien
aactagaaatcagtcacaaaaggaacctcagaa

SEQ ID NO: 429721 - DNA, 33 bp, Homo sapien
gaataaaacatcagagaaagtagcatctcggag

SEQ ID NO: 429722 - DNA, 33 bp, Homo sapien
gaataaaacatcagaggaagtagcatctcggag

SEQ ID NO: 429723 - DNA, 33 bp, Homo sapien
gcatagacattgccctaaattctcatgaaggga

SEQ ID NO: 429724 - DNA, 33 bp, Homo sapien
gcatagacattgccctgaattctcatgaaggga

SEQ ID NO: 429725 - DNA, 33 bp, Homo sapien
tcctattagcacaaaaaggggtgaaggctaagc

SEQ ID NO: 429726 - DNA, 33 bp, Homo sapien
tcctattagcacaaaatggggtgaaggctaagc

SEQ ID NO: 429727 - DNA, 33 bp, Homo sapien
gtgctcactttacacacgattttctaaagcatt

SEQ ID NO: 429728 - DNA, 33 bp, Homo sapien
gtgctcactttacacatgattttctaaagcatt

SEQ ID NO: 429729 - DNA, 33 bp, Homo sapien
ttgctgggcatatgaaccctggaacatggacaa

SEQ ID NO: 429730 - DNA, 33 bp, Homo sapien
ttgctgggcatatgaagcctggaacatggacaa

SEQ ID NO: 429731 - DNA, 33 bp, Homo sapien
cacagtgactctgatgcatttcaaattctgcat

SEQ ID NO: 429732 - DNA, 33 bp, Homo sapien
cacagtgactctgatggatttcaaattctgcat

SEQ ID NO: 429733 - DNA, 33 bp, Homo sapien
tgagtattatgtggaacggagtctgtggccaaa

SEQ ID NO: 429734 - DNA, 33 bp, Homo sapien
tgagtattatgtggaatggagtctgtggccaaa

SEQ ID NO: 429735 - DNA, 33 bp, Homo sapien
atgacatcaatctttcagaaacacggtgccctc

SEQ ID NO: 429736 - DNA, 33 bp, Homo sapien
atgacatcaatctttcggaaacacggtgccctc

SEQ ID NO: 429737 - DNA, 33 bp, Homo sapien
aaagaaaatgagttacaaaccggtggtcataaa

SEQ ID NO: 429738 - DNA, 33 bp, Homo sapien
aaagaaaatgagttacgaaccggtggtcataaa

SEQ ID NO: 429739 - DNA, 33 bp, Homo sapien
agacaggagctcatcacaaatgtcagcaaggac

SEQ ID NO: 429740 - DNA, 33 bp, Homo sapien
agacaggagctcatcagaaatgtcagcaaggac

SEQ ID NO: 429741 - DNA, 33 bp, Homo sapien
tcaacttacattttgcagagtcaaatttggtcg

SEQ ID NO: 429742 - DNA, 33 bp, Homo sapien
tcaacttacattttgcggagtcaaatttggtcg

SEQ ID NO: 429743 - DNA, 33 bp, Homo sapien
gatgtttgattattcacaacctattggtgaaat

SEQ ID NO: 429744 - DNA, 33 bp, Homo sapien
gatgtttgattattcataacctattggtgaaat

SEQ ID NO: 429745 - DNA, 33 bp, Homo sapien
tattatgaccattagaataagaacacaagaaaa

SEQ ID NO: 429746 - DNA, 33 bp, Homo sapien
tattatgaccattagagtaagaacacaagaaaa

SEQ ID NO: 429747 - DNA, 33 bp, Homo sapien
aagtactggtttgagaagactgaattggtgccc

SEQ ID NO: 429748 - DNA, 33 bp, Homo sapien
aagtactggtttgagaggactgaattggtgccc

SEQ ID NO: 429749 - DNA, 33 bp, Homo sapien
caggaggggacaaagccaatagagagaagacag

SEQ ID NO: 429750 - DNA, 33 bp, Homo sapien
caggaggggacaaagcgaatagagagaagacag

SEQ ID NO: 429751 - DNA, 33 bp, Homo sapien
tcccatccttgaggcaaatcactcacaaaccca

SEQ ID NO: 429752 - DNA, 33 bp, Homo sapien
tcccatccttgaggcacatcactcacaaaccca

SEQ ID NO: 429753 - DNA, 33 bp, Homo sapien
aatgtaaaagattcacagatagcacacacacat

SEQ ID NO: 429754 - DNA, 33 bp, Homo sapien
aatgtaaaagattcacggatagcacacacacat

SEQ ID NO: 429755 - DNA, 33 bp, Homo sapien
tttgaaagttaaaagcggaggaagccgggagac

SEQ ID NO: 429756 - DNA, 33 bp, Homo sapien
tttgaaagttaaaagctgaggaagccgggagac

SEQ ID NO: 429757 - DNA, 33 bp, Homo sapien
ttcaaagaacctagcgaactgttcaaaggaaat

SEQ ID NO: 429758 - DNA, 33 bp, Homo sapien
ttcaaagaacctagcgtactgttcaaaggaaat

SEQ ID NO: 429759 - DNA, 33 bp, Homo sapien
aacaaatcagtaaagaatcctgtattgaagaat

SEQ ID NO: 429760 - DNA, 33 bp, Homo sapien
aacaaatcagtaaagagtcctgtattgaagaat

SEQ ID NO: 429761 - DNA, 33 bp, Homo sapien
gtgtcagttttagtgacgctgcttaaaagcaaa

SEQ ID NO: 429762 - DNA, 33 bp, Homo sapien
gtgtcagttttagtgatgctgcttaaaagcaaa

SEQ ID NO: 429763 - DNA, 33 bp, Homo sapien
tcttccattctagctcaaaacaaacaggggccc

SEQ ID NO: 429764 - DNA, 33 bp, Homo sapien
tcttccattctagctcgaaacaaacaggggccc

SEQ ID NO: 429765 - DNA, 33 bp, Homo sapien
tggacaaaggctttgcacttcggggtggaacag

SEQ ID NO: 429766 - DNA, 33 bp, Homo sapien
tggacaaaggctttgcgcttcggggtggaacag

SEQ ID NO: 429767 - DNA, 33 bp, Homo sapien
catttcttaacacctaccaggcattctgtgtga

SEQ ID NO: 429768 - DNA, 33 bp, Homo sapien
catttcttaacacctatcaggcattctgtgtga

SEQ ID NO: 429769 - DNA, 33 bp, Homo sapien
tcaagggcaagtccagacctgtagctgctgggg

SEQ ID NO: 429770 - DNA, 33 bp, Homo sapien
tcaagggcaagtccagtcctgtagctgctgggg

SEQ ID NO: 429771 - DNA, 33 bp, Homo sapien
agttgaggttctcccaatgagtatagcagagat

SEQ ID NO: 429772 - DNA, 33 bp, Homo sapien
agttgaggttctcccagtgagtatagcagagat

SEQ ID NO: 429773 - DNA, 33 bp, Homo sapien
tactgccactaactatcagaagataaaaccctc

SEQ ID NO: 429774 - DNA, 33 bp, Homo sapien
tactgccactaactattagaagataaaaccctc

SEQ ID NO: 429775 - DNA, 33 bp, Homo sapien
attgccctaaaacacacgataaacagaagagat

SEQ ID NO: 429776 - DNA, 33 bp, Homo sapien
attgccctaaaacacaggataaacagaagagat

SEQ ID NO: 429777 - DNA, 33 bp, Homo sapien
actatcagtagcctcaaacatattttggcatac

SEQ ID NO: 429778 - DNA, 33 bp, Homo sapien
actatcagtagcctcagacatattttggcatac

SEQ ID NO: 429779 - DNA, 33 bp, Homo sapien
taacatcacaagagaaagtttaaaatataatat

SEQ ID NO: 429780 - DNA, 33 bp, Homo sapien
taacatcacaagagaatgtttaaaatataatat

SEQ ID NO: 429781 - DNA, 33 bp, Homo sapien
aagacatttgtggggcacaagaaatgcaaagta

SEQ ID NO: 429782 - DNA, 33 bp, Homo sapien
aagacatttgtggggcgcaagaaatgcaaagta

SEQ ID NO: 429783 - DNA, 33 bp, Homo sapien
cagttttgccttcaaacaggagtctaatatcaa

SEQ ID NO: 429784 - DNA, 33 bp, Homo sapien
cagttttgccttcaaataggagtctaatatcaa

SEQ ID NO: 429785 - DNA, 33 bp, Homo sapien
gtacatacgttaggcaatctttaaaagtcttcc

SEQ ID NO: 429786 - DNA, 33 bp, Homo sapien
gtacatacgttaggcagtctttaaaagtcttcc

SEQ ID NO: 429787 - DNA, 33 bp, Homo sapien
tggggaaaggagtacacgggaaatctctgtact

SEQ ID NO: 429788 - DNA, 33 bp, Homo sapien
tggggaaaggagtacatgggaaatctctgtact

SEQ ID NO: 429789 - DNA, 33 bp, Homo sapien
ttgtgcaaagatttgggagcaaaacgatcatca

SEQ ID NO: 429790 - DNA, 33 bp, Homo sapien
ttgtgcaaagatttggtagcaaaacgatcatca

SEQ ID NO: 429791 - DNA, 33 bp, Homo sapien
gatgggacactgtcggaattaaacgtagtaaac

SEQ ID NO: 429792 - DNA, 33 bp, Homo sapien
gatgggacactgtcgggattaaacgtagtaaac

SEQ ID NO: 429793 - DNA, 33 bp, Homo sapien
gtatatttagattctaccggcaacagctttaaa

SEQ ID NO: 429794 - DNA, 33 bp, Homo sapien
gtatatttagattctatcggcaacagctttaaa

SEQ ID NO: 429795 - DNA, 33 bp, Homo sapien
aaggcaatgtaattcaacctcctcttttcttgc

SEQ ID NO: 429796 - DNA, 33 bp, Homo sapien
aaggcaatgtaattcaccctcctcttttcttgc

SEQ ID NO: 429797 - DNA, 33 bp, Homo sapien
ccacaaatacaaaaaacgcagacggaggaagga

SEQ ID NO: 429798 - DNA, 33 bp, Homo sapien
ccacaaatacaaaaaatgcagacggaggaagga

SEQ ID NO: 429799 - DNA, 33 bp, Homo sapien
ttataggattagatagcattttagagtggtcac

SEQ ID NO: 429800 - DNA, 33 bp, Homo sapien
ttataggattagataggattttagagtggtcac

SEQ ID NO: 429801 - DNA, 33 bp, Homo sapien
tgacacccatcacttgacaagaatctctaagag

SEQ ID NO: 429802 - DNA, 33 bp, Homo sapien
tgacacccatcacttgtcaagaatctctaagag

SEQ ID NO: 429803 - DNA, 33 bp, Homo sapien
ctttctttctggacccaagtcatgccagtcttc

SEQ ID NO: 429804 - DNA, 33 bp, Homo sapien
ctttctttctggacccgagtcatgccagtcttc

SEQ ID NO: 429805 - DNA, 33 bp, Homo sapien
tgaagattctcagtgacggtgctttttctccac

SEQ ID NO: 429806 - DNA, 33 bp, Homo sapien
tgaagattctcagtgatggtgctttttctccac

SEQ ID NO: 429807 - DNA, 33 bp, Homo sapien
gaaatgctgttttcaaatatcctagagagaagg

SEQ ID NO: 429808 - DNA, 33 bp, Homo sapien
gaaatgctgttttcaagtatcctagagagaagg

SEQ ID NO: 429809 - DNA, 33 bp, Homo sapien
caggagtgactgtgaaaagattctgagcttaca

SEQ ID NO: 429810 - DNA, 33 bp, Homo sapien
caggagtgactgtgaagagattctgagcttaca

SEQ ID NO: 429811 - DNA, 33 bp, Homo sapien
tatctcaattcattaccctcatccacctcctcc

SEQ ID NO: 429812 - DNA, 33 bp, Homo sapien
tatctcaattcattactctcatccacctcctcc

SEQ ID NO: 429813 - DNA, 33 bp, Homo sapien
tgcaagtacagggaacagagtgtgtgaaggata

SEQ ID NO: 429814 - DNA, 33 bp, Homo sapien
tgcaagtacagggaacggagtgtgtgaaggata

SEQ ID NO: 429815 - DNA, 33 bp, Homo sapien
ctccaaactgattgagcacaattctcttcatct

SEQ ID NO: 429816 - DNA, 33 bp, Homo sapien
ctccaaactgattgagtacaattctcttcatct

SEQ ID NO: 429817 - DNA, 33 bp, Homo sapien
aggtcagggctgggaaatgccactagatataga

SEQ ID NO: 429818 - DNA, 33 bp, Homo sapien
aggtcagggctgggaagtgccactagatataga

SEQ ID NO: 429819 - DNA, 33 bp, Homo sapien
gatcatcaccaaaatgccagtgttggttatctg

SEQ ID NO: 429820 - DNA, 33 bp, Homo sapien
gatcatcaccaaaatgtcagtgttggttatctg

SEQ ID NO: 429821 - DNA, 33 bp, Homo sapien
gatgtaatgactgaacacaatgtagaaagctgg

SEQ ID NO: 429822 - DNA, 33 bp, Homo sapien
gatgtaatgactgaacgcaatgtagaaagctgg

SEQ ID NO: 429823 - DNA, 33 bp, Homo sapien
acgtctcaagatttaactgtctccacttagatc

SEQ ID NO: 429824 - DNA, 33 bp, Homo sapien
acgtctcaagatttaattgtctccacttagatc

SEQ ID NO: 429825 - DNA, 33 bp, Homo sapien
actgaggcacaaaaaacgttaggcaacatatat

SEQ ID NO: 429826 - DNA, 33 bp, Homo sapien
actgaggcacaaaaaaggttaggcaacatatat

SEQ ID NO: 429827 - DNA, 33 bp, Homo sapien
gcttaaagcaacaacaatatagtactgatccaa

SEQ ID NO: 429828 - DNA, 33 bp, Homo sapien
gcttaaagcaacaacagtatagtactgatccaa

SEQ ID NO: 429829 - DNA, 33 bp, Homo sapien
ccctacggtgttctgtaaaccagttctaacatg

SEQ ID NO: 429830 - DNA, 33 bp, Homo sapien
ccctacggtgttctgtgaaccagttctaacatg

SEQ ID NO: 429831 - DNA, 33 bp, Homo sapien
ataaacaggtaaataacaaggcagtgtggtttt

SEQ ID NO: 429832 - DNA, 33 bp, Homo sapien
ataaacaggtaaataagaaggcagtgtggtttt

SEQ ID NO: 429833 - DNA, 33 bp, Homo sapien
tatgtctctcctttcaataggcatttagattac

SEQ ID NO: 429834 - DNA, 33 bp, Homo sapien
tatgtctctcctttcagtaggcatttagattac

SEQ ID NO: 429835 - DNA, 33 bp, Homo sapien
tgagctttcactgatcaataaccacacacaaat

SEQ ID NO: 429836 - DNA, 33 bp, Homo sapien
tgagctttcactgatcgataaccacacacaaat

SEQ ID NO: 429837 - DNA, 33 bp, Homo sapien
tcggcatttgaacggacgacaaactatttcaaa

SEQ ID NO: 429838 - DNA, 33 bp, Homo sapien
tcggcatttgaacggatgacaaactatttcaaa

SEQ ID NO: 429839 - DNA, 33 bp, Homo sapien
tgagccacttttctgaaccctccttgctatttt

SEQ ID NO: 429840 - DNA, 33 bp, Homo sapien
tgagccacttttctgatccctccttgctatttt

SEQ ID NO: 429841 - DNA, 33 bp, Homo sapien
cctctacaatcttataaatttctcaaggattca

SEQ ID NO: 429842 - DNA, 33 bp, Homo sapien
cctctacaatcttatatatttctcaaggattca

SEQ ID NO: 429843 - DNA, 33 bp, Homo sapien
agatggttgaccaagccagttactctaatgtga

SEQ ID NO: 429844 - DNA, 33 bp, Homo sapien
agatggttgaccaagctagttactctaatgtga

SEQ ID NO: 429845 - DNA, 33 bp, Homo sapien
tttgctctgtgcaagacaattataccagctcca

SEQ ID NO: 429846 - DNA, 33 bp, Homo sapien
tttgctctgtgcaagagaattataccagctcca

SEQ ID NO: 429847 - DNA, 33 bp, Homo sapien
aacagtcagtttgacaatgggttcagctgcctc

SEQ ID NO: 429848 - DNA, 33 bp, Homo sapien
aacagtcagtttgacagtgggttcagctgcctc

SEQ ID NO: 429849 - DNA, 33 bp, Homo sapien
aaaaacagaagttgacaaatgtagtaccaatat

SEQ ID NO: 429850 - DNA, 33 bp, Homo sapien
aaaaacagaagttgacgaatgtagtaccaatat

SEQ ID NO: 429851 - DNA, 33 bp, Homo sapien
cattgtcaaagagacacctatcatttatcaaag

SEQ ID NO: 429852 - DNA, 33 bp, Homo sapien
cattgtcaaagagacatctatcatttatcaaag

SEQ ID NO: 429853 - DNA, 33 bp, Homo sapien
gagaaagtattgcaaaagatagccgttacagtc

SEQ ID NO: 429854 - DNA, 33 bp, Homo sapien
gagaaagtattgcaaaggatagccgttacagtc

SEQ ID NO: 429855 - DNA, 33 bp, Homo sapien
tgtaacagttggcataagggttgaattaatcac

SEQ ID NO: 429856 - DNA, 33 bp, Homo sapien
tgtaacagttggcataggggttgaattaatcac

SEQ ID NO: 429857 - DNA, 33 bp, Homo sapien
cctgaactgaatttccccttcaatacctcaaca

SEQ ID NO: 429858 - DNA, 33 bp, Homo sapien
cctgaactgaatttcctcttcaatacctcaaca

SEQ ID NO: 429859 - DNA, 33 bp, Homo sapien
tgacaaaggtttggaacgcctgaacagaggcat

SEQ ID NO: 429860 - DNA, 33 bp, Homo sapien
tgacaaaggtttggaatgcctgaacagaggcat

SEQ ID NO: 429861 - DNA, 33 bp, Homo sapien
tagaaggcatttaacaagctactatcacttcag

SEQ ID NO: 429862 - DNA, 33 bp, Homo sapien
tagaaggcatttaacaggctactatcacttcag

SEQ ID NO: 429863 - DNA, 33 bp, Homo sapien
cagcccaaggtagtcccggaaagaaaggtgttg

SEQ ID NO: 429864 - DNA, 33 bp, Homo sapien
cagcccaaggtagtcctggaaagaaaggtgttg

SEQ ID NO: 429865 - DNA, 33 bp, Homo sapien
gaaacacactcaagtcacccagagcatttctct

SEQ ID NO: 429866 - DNA, 33 bp, Homo sapien
gaaacacactcaagtcgcccagagcatttctct

SEQ ID NO: 429867 - DNA, 33 bp, Homo sapien
aacttgaaagacagtccctggctaatgcctttt

SEQ ID NO: 429868 - DNA, 33 bp, Homo sapien
aacttgaaagacagtctctggctaatgcctttt

SEQ ID NO: 429869 - DNA, 33 bp, Homo sapien; identical to SEQ ID NO: 429867

SEQ ID NO: 429870 - DNA, 33 bp, Homo sapien; identical to SEQ ID NO: 429868

SEQ ID NO: 429871 - DNA, 33 bp, Homo sapien
tttatatccaaatctactaccttcccttagccc

SEQ ID NO: 429872 - DNA, 33 bp, Homo sapien
tttatatccaaatctattaccttcccttagccc

SEQ ID NO: 429873 - DNA, 33 bp, Homo sapien
aagcctatgtacaaccactattcctgtcaccat

SEQ ID NO: 429874 - DNA, 33 bp, Homo sapien
aagcctatgtacaacccctattcctgtcaccat

SEQ ID NO: 429875 - DNA, 33 bp, Homo sapien
gcttgacagaagtggacataaggaaagttgagg

SEQ ID NO: 429876 - DNA, 33 bp, Homo sapien
gcttgacagaagtggatataaggaaagttgagg

SEQ ID NO: 429877 - DNA, 33 bp, Homo sapien
accgtggtttttaccacaaatagattcatagtt

SEQ ID NO: 429878 - DNA, 33 bp, Homo sapien
accgtggtttttaccataaatagattcatagtt

SEQ ID NO: 429879 - DNA, 33 bp, Homo sapien
taacattggacttcaaactaatgtatatgcaag

SEQ ID NO: 429880 - DNA, 33 bp, Homo sapien
taacattggacttcaatctaatgtatatgcaag

SEQ ID NO: 429881 - DNA, 33 bp, Homo sapien
catactaaaactaatgaactgaggaccaatata

SEQ ID NO: 429882 - DNA, 33 bp, Homo sapien
catactaaaactaatggactgaggaccaatata

SEQ ID NO: 429883 - DNA, 33 bp, Homo sapien
ggctcatgtcttaacaatgaacaactgtagaat

SEQ ID NO: 429884 - DNA, 33 bp, Homo sapien
ggctcatgtcttaacagtgaacaactgtagaat

SEQ ID NO: 429885 - DNA, 33 bp, Homo sapien
gctcaggccttaattacaacaagccctctctag

SEQ ID NO: 429886 - DNA, 33 bp, Homo sapien
gctcaggccttaattagaacaagccctctctag

SEQ ID NO: 429887 - DNA, 33 bp, Homo sapien
acccaacatgaacccactcacaggctaacagtc

SEQ ID NO: 429888 - DNA, 33 bp, Homo sapien
acccaacatgaacccattcacaggctaacagtc

SEQ ID NO: 429889 - DNA, 33 bp, Homo sapien
tgaactgtccaggagaaagtaacttgaggagct

SEQ ID NO: 429890 - DNA, 33 bp, Homo sapien
tgaactgtccaggagagagtaacttgaggagct

SEQ ID NO: 429891 - DNA, 33 bp, Homo sapien
gaaagggtctaatactcactgagcatctacttt

SEQ ID NO: 429892 - DNA, 33 bp, Homo sapien
gaaagggtctaatacttactgagcatctacttt

SEQ ID NO: 429893 - DNA, 33 bp, Homo sapien
tctgtatttctccataactagaataaaacagat

SEQ ID NO: 429894 - DNA, 33 bp, Homo sapien
tctgtatttctccatacctagaataaaacagat

SEQ ID NO: 429895 - DNA, 33 bp, Homo sapien
catctaatttgcatctcagaaaagtcaaccagc

SEQ ID NO: 429896 - DNA, 33 bp, Homo sapien
catctaatttgcatcttagaaaagtcaaccagc

SEQ ID NO: 429897 - DNA, 33 bp, Homo sapien
ttactaaacagatgaaaaaagagaaactcacag

SEQ ID NO: 429898 - DNA, 33 bp, Homo sapien
ttactaaacagatgaagaaagagaaactcacag

SEQ ID NO: 429899 - DNA, 33 bp, Homo sapien
agagtgtgctgagaaacaccaatttgctgcaaa

SEQ ID NO: 429900 - DNA, 33 bp, Homo sapien
agagtgtgctgagaaataccaatttgctgcaaa

SEQ ID NO: 429901 - DNA, 33 bp, Homo sapien
cacagagtcctcattacgtaaacacctcctcaa

SEQ ID NO: 429902 - DNA, 33 bp, Homo sapien
cacagagtcctcattatgtaaacacctcctcaa

SEQ ID NO: 429903 - DNA, 33 bp, Homo sapien
atcagttaatgagagacattttccgaagcttgg

SEQ ID NO: 429904 - DNA, 33 bp, Homo sapien
atcagttaatgagagatattttccgaagcttgg

SEQ ID NO: 429905 - DNA, 33 bp, Homo sapien
tgctttttaaaccaacgggctacatggctgtcc

SEQ ID NO: 429906 - DNA, 33 bp, Homo sapien
tgctttttaaaccaactggctacatggctgtcc

SEQ ID NO: 429907 - DNA, 33 bp, Homo sapien
tgtcaacttcagaccaataaaatgtagtatttg

SEQ ID NO: 429908 - DNA, 33 bp, Homo sapien
tgtcaacttcagaccagtaaaatgtagtatttg

SEQ ID NO: 429909 - DNA, 33 bp, Homo sapien
ccttagaatggattcactacacttttaagtgcg

SEQ ID NO: 429910 - DNA, 33 bp, Homo sapien
ccttagaatggattcagtacacttttaagtgcg

SEQ ID NO: 429911 - DNA, 33 bp, Homo sapien
acattctgatggttgaaacagatgactgatagg

SEQ ID NO: 429912 - DNA, 33 bp, Homo sapien
acattctgatggttgagacagatgactgatagg

SEQ ID NO: 429913 - DNA, 33 bp, Homo sapien
tagatttaattaggaaagacagtcaccaaagtg

SEQ ID NO: 429914 - DNA, 33 bp, Homo sapien
tagatttaattaggaatgacagtcaccaaagtg

SEQ ID NO: 429915 - DNA, 33 bp, Homo sapien
attttggtcacatacccacctttggagctaggg

SEQ ID NO: 429916 - DNA, 33 bp, Homo sapien
attttggtcacatacctacctttggagctaggg

SEQ ID NO: 429917 - DNA, 33 bp, Homo sapien
taaagctatgtaggaaggacttgagtagacgtg

SEQ ID NO: 429918 - DNA, 33 bp, Homo sapien
taaagctatgtaggaatgacttgagtagacgtg

SEQ ID NO: 429919 - DNA, 33 bp, Homo sapien
tgacaagctggaacacccgatcaatttgcttcc

SEQ ID NO: 429920 - DNA, 33 bp, Homo sapien
tgacaagctggaacactcgatcaatttgcttcc

SEQ ID NO: 429921 - DNA, 33 bp, Homo sapien
tgaggaaaacagtagacactagtgaggaggaat

SEQ ID NO: 429922 - DNA, 33 bp, Homo sapien
tgaggaaaacagtagagactagtgaggaggaat

SEQ ID NO: 429923 - DNA, 33 bp, Homo sapien
actgagagtcctagaaatacagactgctggggt

SEQ ID NO: 429924 - DNA, 33 bp, Homo sapien
actgagagtcctagaagtacagactgctggggt

SEQ ID NO: 429925 - DNA, 33 bp, Homo sapien
atccaagttttgagaaagctgaatattatccag

SEQ ID NO: 429926 - DNA, 33 bp, Homo sapien
atccaagttttgagaaggctgaatattatccag

SEQ ID NO: 429927 - DNA, 33 bp, Homo sapien
ggattactttcagttccataaatgtgtcatgct

SEQ ID NO: 429928 - DNA, 33 bp, Homo sapien
ggattactttcagttctataaatgtgtcatgct

SEQ ID NO: 429929 - DNA, 33 bp, Homo sapien
tcagcaccttcctaacagtgaggacattgtgca

SEQ ID NO: 429930 - DNA, 33 bp, Homo sapien
tcagcaccttcctaactgtgaggacattgtgca

SEQ ID NO: 429931 - DNA, 33 bp, Homo sapien
gtggctttaaagaggaaagcaagtgattcagtg

SEQ ID NO: 429932 - DNA, 33 bp, Homo sapien
gtggctttaaagaggagagcaagtgattcagtg

SEQ ID NO: 429933 - DNA, 33 bp, Homo sapien
ctaatctcttccagaaacactatcacaaacaca

SEQ ID NO: 429934 - DNA, 33 bp, Homo sapien
ctaatctcttccagaagcactatcacaaacaca

SEQ ID NO: 429935 - DNA, 33 bp, Homo sapien
ctcttttgccaggaaccatgttatttatgcaaa

SEQ ID NO: 429936 - DNA, 33 bp, Homo sapien
ctcttttgccaggaactatgttatttatgcaaa

SEQ ID NO: 429937 - DNA, 33 bp, Homo sapien
ttctaattatgtatggcatgactcttttgccag

SEQ ID NO: 429938 - DNA, 33 bp, Homo sapien
ttctaattatgtatgggatgactcttttgccag

SEQ ID NO: 429939 - DNA, 33 bp, Homo sapien
cagatacattggctaacaagaacaacatctaca

SEQ ID NO: 429940 - DNA, 33 bp, Homo sapien
cagatacattggctaataagaacaacatctaca

SEQ ID NO: 429941 - DNA, 33 bp, Homo sapien
taaggaaaagtatatcaactccatcttccctga

SEQ ID NO: 429942 - DNA, 33 bp, Homo sapien
taaggaaaagtatatctactccatcttccctga

SEQ ID NO: 429943 - DNA, 33 bp, Homo sapien
ctgagatggaaaacccaaagaacttggcatcct

SEQ ID NO: 429944 - DNA, 33 bp, Homo sapien
ctgagatggaaaacccgaagaacttggcatcct

SEQ ID NO: 429945 - DNA, 33 bp, Homo sapien
aaacaagcttttggagaagaagttactactcat

SEQ ID NO: 429946 - DNA, 33 bp, Homo sapien
aaacaagcttttggagtagaagttactactcat

SEQ ID NO: 429947 - DNA, 33 bp, Homo sapien
tggtctagttagacaccaggattatatcttctc

SEQ ID NO: 429948 - DNA, 33 bp, Homo sapien
tggtctagttagacacgaggattatatcttctc

SEQ ID NO: 429949 - DNA, 33 bp, Homo sapien
gaacatgaactgtagaataaaattggtgaaagg

SEQ ID NO: 429950 - DNA, 33 bp, Homo sapien
gaacatgaactgtagagtaaaattggtgaaagg

SEQ ID NO: 429951 - DNA, 33 bp, Homo sapien
tttagattgcctttcacagacaaagacttcttc

SEQ ID NO: 429952 - DNA, 33 bp, Homo sapien
tttagattgcctttcatagacaaagacttcttc

SEQ ID NO: 429953 - DNA, 33 bp, Homo sapien
ggaagattttagcctacagtgaatgttcacagt

SEQ ID NO: 429954 - DNA, 33 bp, Homo sapien
ggaagattttagcctagagtgaatgttcacagt

SEQ ID NO: 429955 - DNA, 33 bp, Homo sapien
caaaataaaatagcctaaaccttatatgttctt

SEQ ID NO: 429956 - DNA, 33 bp, Homo sapien
caaaataaaatagcctgaaccttatatgttctt

SEQ ID NO: 429957 - DNA, 33 bp, Homo sapien
gtgtaatcccaataagaaatctttaataatctt

SEQ ID NO: 429958 - DNA, 33 bp, Homo sapien
gtgtaatcccaataaggaatctttaataatctt

SEQ ID NO: 429959 - DNA, 33 bp, Homo sapien
tcatttataaggatacagactacatctttcttg

SEQ ID NO: 429960 - DNA, 33 bp, Homo sapien
tcatttataaggatacggactacatctttcttg

SEQ ID NO: 429961 - DNA, 33 bp, Homo sapien
gtcccaacacattttcgcaggcctcaattaaaa

SEQ ID NO: 429962 - DNA, 33 bp, Homo sapien
gtcccaacacattttctcaggcctcaattaaaa

SEQ ID NO: 429963 - DNA, 33 bp, Homo sapien
catctcctaagatcacagactgcaccttaattt

SEQ ID NO: 429964 - DNA, 33 bp, Homo sapien
catctcctaagatcacggactgcaccttaattt

SEQ ID NO: 429965 - DNA, 33 bp, Homo sapien
atatttatgaatgataggaatatttgccacttc

SEQ ID NO: 429966 - DNA, 33 bp, Homo sapien
atatttatgaatgatatgaatatttgccacttc

SEQ ID NO: 429967 - DNA, 33 bp, Homo sapien
ctggcatctgagaactgagatttcaggagcatt

SEQ ID NO: 429968 - DNA, 33 bp, Homo sapien
ctggcatctgagaacttagatttcaggagcatt

SEQ ID NO: 429969 - DNA, 33 bp, Homo sapien
gctcttgttttcttccactttacatcccattgc

SEQ ID NO: 429970 - DNA, 33 bp, Homo sapien
gctcttgttttcttccgctttacatcccattgc

SEQ ID NO: 429971 - DNA, 33 bp, Homo sapien
tcaaatgtttcaggtacatgatatgagatgagc

SEQ ID NO: 429972 - DNA, 33 bp, Homo sapien
tcaaatgtttcaggtagatgatatgagatgagc

SEQ ID NO: 429973 - DNA, 33 bp, Homo sapien
tccaagaggctgagaaacgctgaagtagttgcc

SEQ ID NO: 429974 - DNA, 33 bp, Homo sapien
tccaagaggctgagaagcgctgaagtagttgcc

SEQ ID NO: 429975 - DNA, 33 bp, Homo sapien
ctttgactcattcgtgaacttacaagatataga

SEQ ID NO: 429976 - DNA, 33 bp, Homo sapien
ctttgactcattcgtggacttacaagatataga

SEQ ID NO: 429977 - DNA, 33 bp, Homo sapien
ccattacacctggctacgcacgtccttctgacc

SEQ ID NO: 429978 - DNA, 33 bp, Homo sapien
ccattacacctggctatgcacgtccttctgacc

SEQ ID NO: 429979 - DNA, 33 bp, Homo sapien
aaaaacattccataccaaagaagaggcatgagc

SEQ ID NO: 429980 - DNA, 33 bp, Homo sapien
aaaaacattccataccgaagaagaggcatgagc

SEQ ID NO: 429981 - DNA, 33 bp, Homo sapien
atgtattagcaaaaacgggaggaagatgtgtgg

SEQ ID NO: 429982 - DNA, 33 bp, Homo sapien
atgtattagcaaaaactggaggaagatgtgtgg

SEQ ID NO: 429983 - DNA, 33 bp, Homo sapien
tcagggatgacacttaagatttcaggttggaga

SEQ ID NO: 429984 - DNA, 33 bp, Homo sapien
tcagggatgacacttaggatttcaggttggaga

SEQ ID NO: 429985 - DNA, 33 bp, Homo sapien
aacaacaaagacagaacgggttcaaaggcaagg

SEQ ID NO: 429986 - DNA, 33 bp, Homo sapien
aacaacaaagacagaatgggttcaaaggcaagg

SEQ ID NO: 429987 - DNA, 33 bp, Homo sapien
gtaattttaaggccaaatggagatgtttgggtt

SEQ ID NO: 429988 - DNA, 33 bp, Homo sapien
gtaattttaaggccaagtggagatgtttgggtt

SEQ ID NO: 429989 - DNA, 33 bp, Homo sapien
agtctgcctcaagaaagaagtctgggaaggaaa

SEQ ID NO: 429990 - DNA, 33 bp, Homo sapien
agtctgcctcaagaaataagtctgggaaggaaa

SEQ ID NO: 429991 - DNA, 33 bp, Homo sapien
gggcatgattactgaagtgctcaaaaacggcca

SEQ ID NO: 429992 - DNA, 33 bp, Homo sapien
gggcatgattactgaattgctcaaaaacggcca

SEQ ID NO: 429993 - DNA, 33 bp, Homo sapien
tatctaagtgtccagcagcatggaattgagggc

SEQ ID NO: 429994 - DNA, 33 bp, Homo sapien
tatctaagtgtccagcggcatggaattgagggc

SEQ ID NO: 429995 - DNA, 33 bp, Homo sapien
cacaatttttaggtcacgtgggtattcatgcat

SEQ ID NO: 429996 - DNA, 33 bp, Homo sapien
cacaatttttaggtcatgtgggtattcatgcat

SEQ ID NO: 429997 - DNA, 33 bp, Homo sapien
tggttttctcatcaacacaatggggatagtaat

SEQ ID NO: 429998 - DNA, 33 bp, Homo sapien
tggttttctcatcaacgcaatggggatagtaat

SEQ ID NO: 429999 - DNA, 33 bp, Homo sapien
tcttgccttttgcccacatctctcaaagtagct

SEQ ID NO: 430000 - DNA, 33 bp, Homo sapien
tcttgccttttgcccatatctctcaaagtagct

SEQ ID NO: 430001 - DNA, 33 bp, Homo sapien
aagccatgttctatgaaaccttattaggagttc

SEQ ID NO: 430002 - DNA, 33 bp, Homo sapien
aagccatgttctatgagaccttattaggagttc

SEQ ID NO: 430003 - DNA, 33 bp, Homo sapien
ctatttgacatatgagaaaacttaagatcagaa

SEQ ID NO: 430004 - DNA, 33 bp, Homo sapien
ctatttgacatatgaggaaacttaagatcagaa

SEQ ID NO: 430005 - DNA, 33 bp, Homo sapien
gttgctatgattttaaagataagagtaaagaca

SEQ ID NO: 430006 - DNA, 33 bp, Homo sapien
gttgctatgattttaaggataagagtaaagaca

SEQ ID NO: 430007 - DNA, 33 bp, Homo sapien
tcatagcaaccagataaaaacagtgcagtgttg

SEQ ID NO: 430008 - DNA, 33 bp, Homo sapien
tcatagcaaccagatagaaacagtgcagtgttg

SEQ ID NO: 430009 - DNA, 33 bp, Homo sapien
aagcagaaaaatctcactacacacatttaagag

SEQ ID NO: 430010 - DNA, 33 bp, Homo sapien
aagcagaaaaatctcattacacacatttaagag

SEQ ID NO: 430011 - DNA, 33 bp, Homo sapien
gcataaagaggtaaaacaagttgtatgacacca

SEQ ID NO: 430012 - DNA, 33 bp, Homo sapien
gcataaagaggtaaaataagttgtatgacacca

SEQ ID NO: 430013 - DNA, 33 bp, Homo sapien
atgtgactgtggataacggaagtccattgaaag

SEQ ID NO: 430014 - DNA, 33 bp, Homo sapien
atgtgactgtggataatggaagtccattgaaag

SEQ ID NO: 430015 - DNA, 33 bp, Homo sapien
ttgttgaaccttctaccatcctctttgttatta

SEQ ID NO: 430016 - DNA, 33 bp, Homo sapien
ttgttgaaccttctactatcctctttgttatta

SEQ ID NO: 430017 - DNA, 33 bp, Homo sapien
gtaatggtaaggatgacgggcaaaaatgcatcc

SEQ ID NO: 430018 - DNA, 33 bp, Homo sapien
gtaatggtaaggatgatgggcaaaaatgcatcc

SEQ ID NO: 430019 - DNA, 33 bp, Homo sapien
gactcctcttgacccgaaatgaataaactaaag

SEQ ID NO: 430020 - DNA, 33 bp, Homo sapien
gactcctcttgacccggaatgaataaactaaag

SEQ ID NO: 430021 - DNA, 33 bp, Homo sapien
tagagttgttcctcaaaacatttttattctatt

SEQ ID NO: 430022 - DNA, 33 bp, Homo sapien
tagagttgttcctcaatacatttttattctatt

SEQ ID NO: 430023 - DNA, 33 bp, Homo sapien
ttacataaaggaatgacgtctataaataagtct

SEQ ID NO: 430024 - DNA, 33 bp, Homo sapien
ttacataaaggaatgaggtctataaataagtct

SEQ ID NO: 430025 - DNA, 33 bp, Homo sapien
caagaaaagcagtactgagaaataaagatgaac

SEQ ID NO: 430026 - DNA, 33 bp, Homo sapien
caagaaaagcagtacttagaaataaagatgaac

SEQ ID NO: 430027 - DNA, 33 bp, Homo sapien
tcccttacttgtttcaaggttcagtcagtgggg

SEQ ID NO: 430028 - DNA, 33 bp, Homo sapien
tcccttacttgtttcagggttcagtcagtgggg

SEQ ID NO: 430029 - DNA, 33 bp, Homo sapien
ttctccaggcttctcccggaatattcatggcaa

SEQ ID NO: 430030 - DNA, 33 bp, Homo sapien
ttctccaggcttctcctggaatattcatggcaa

SEQ ID NO: 430031 - DNA, 33 bp, Homo sapien
tccaggaaaacagtcactcttttgacctattaa

SEQ ID NO: 430032 - DNA, 33 bp, Homo sapien
tccaggaaaacagtcattcttttgacctattaa

SEQ ID NO: 430033 - DNA, 33 bp, Homo sapien
tcaattttgaatacaacaatgccaattgaagtt

SEQ ID NO: 430034 - DNA, 33 bp, Homo sapien
tcaattttgaatacaagaatgccaattgaagtt

SEQ ID NO: 430035 - DNA, 33 bp, Homo sapien
agttggatttccacaacgtgagtattgacacta

SEQ ID NO: 430036 - DNA, 33 bp, Homo sapien
agttggatttccacaatgtgagtattgacacta

SEQ ID NO: 430037 - DNA, 33 bp, Homo sapien
ttgttgaaaaatatggaaagatggatgtgcatg

SEQ ID NO: 430038 - DNA, 33 bp, Homo sapien
ttgttgaaaaatatgggaagatggatgtgcatg

SEQ ID NO: 430039 - DNA, 33 bp, Homo sapien
taaaaaagtgtagagaatatcttccatttcttt

SEQ ID NO: 430040 - DNA, 33 bp, Homo sapien
taaaaaagtgtagagagtatcttccatttcttt

SEQ ID NO: 430041 - DNA, 33 bp, Homo sapien
tcctagtgatttgcgggataagttggatgttaa

SEQ ID NO: 430042 - DNA, 33 bp, Homo sapien
tcctagtgatttgcggtataagttggatgttaa

SEQ ID NO: 430043 - DNA, 33 bp, Homo sapien
gtctgggaaaccttaaactttggaggacaacat

SEQ ID NO: 430044 - DNA, 33 bp, Homo sapien
gtctgggaaaccttaacctttggaggacaacat

SEQ ID NO: 430045 - DNA, 33 bp, Homo sapien
ctgcccttatgtataaagctgctaactcttgag

SEQ ID NO: 430046 - DNA, 33 bp, Homo sapien
ctgcccttatgtataacgctgctaactcttgag

SEQ ID NO: 430047 - DNA, 33 bp, Homo sapien
gtgactctttttcacaatgtcgtggtctcaggg

SEQ ID NO: 430048 - DNA, 33 bp, Homo sapien
gtgactctttttcacactgtcgtggtctcaggg

SEQ ID NO: 430049 - DNA, 33 bp, Homo sapien
taacagtattaagagacggccctttaagaagag

SEQ ID NO: 430050 - DNA, 33 bp, Homo sapien
taacagtattaagagatggccctttaagaagag

SEQ ID NO: 430051 - DNA, 33 bp, Homo sapien
taaaaatgtagtaatcaaaatcaagagcaattt

SEQ ID NO: 430052 - DNA, 33 bp, Homo sapien
taaaaatgtagtaatcgaaatcaagagcaattt

SEQ ID NO: 430053 - DNA, 33 bp, Homo sapien
gacaattgtgccttcaaaggtatgtcaaaatgt

SEQ ID NO: 430054 - DNA, 33 bp, Homo sapien
gacaattgtgccttcagaggtatgtcaaaatgt

SEQ ID NO: 430055 - DNA, 33 bp, Homo sapien
ctggtgacaaggcagaacgtggagaataccatt

SEQ ID NO: 430056 - DNA, 33 bp, Homo sapien
ctggtgacaaggcagagcgtggagaataccatt

SEQ ID NO: 430057 - DNA, 33 bp, Homo sapien
ttttctttcatggcccaatatcattttcatacc

SEQ ID NO: 430058 - DNA, 33 bp, Homo sapien
ttttctttcatggcccgatatcattttcatacc

SEQ ID NO: 430059 - DNA, 33 bp, Homo sapien
gggcagactgagaaccagagagaatcctgtatt

SEQ ID NO: 430060 - DNA, 33 bp, Homo sapien
gggcagactgagaaccggagagaatcctgtatt

SEQ ID NO: 430061 - DNA, 33 bp, Homo sapien
aatgtttgtagcttaagtctctgatttgcccag

SEQ ID NO: 430062 - DNA, 33 bp, Homo sapien
aatgtttgtagcttaattctctgatttgcccag

SEQ ID NO: 430063 - DNA, 33 bp, Homo sapien
ttcaggatgaaacctgaagtctttgccacagac

SEQ ID NO: 430064 - DNA, 33 bp, Homo sapien
ttcaggatgaaacctggagtctttgccacagac

SEQ ID NO: 430065 - DNA, 33 bp, Homo sapien
aaatatcttaggcttaaaaagaactactctgac

SEQ ID NO: 430066 - DNA, 33 bp, Homo sapien
aaatatcttaggcttacaaagaactactctgac

SEQ ID NO: 430067 - DNA, 33 bp, Homo sapien
ccttgcaagtgcttgacatctgctcaaaagctg

SEQ ID NO: 430068 - DNA, 33 bp, Homo sapien
ccttgcaagtgcttgatatctgctcaaaagctg

SEQ ID NO: 430069 - DNA, 33 bp, Homo sapien
accgtccagaaataaactgcaagcccatctact

SEQ ID NO: 430070 - DNA, 33 bp, Homo sapien
accgtccagaaataaattgcaagcccatctact

SEQ ID NO: 430071 - DNA, 33 bp, Homo sapien
aagacaagagctcctcagaaattttattaacat

SEQ ID NO: 430072 - DNA, 33 bp, Homo sapien
aagacaagagctcctctgaaattttattaacat

SEQ ID NO: 430073 - DNA, 33 bp, Homo sapien
tgcatattcttgttaaaattttcttcctctgca

SEQ ID NO: 430074 - DNA, 33 bp, Homo sapien
tgcatattcttgttaagattttcttcctctgca

SEQ ID NO: 430075 - DNA, 33 bp, Homo sapien
ccatgatcatagaacaaaggtggttaaaacact

SEQ ID NO: 430076 - DNA, 33 bp, Homo sapien
ccatgatcatagaacagaggtggttaaaacact

SEQ ID NO: 430077 - DNA, 33 bp, Homo sapien
gtcttctgtgtgattcaagcatattcacgttaa

SEQ ID NO: 430078 - DNA, 33 bp, Homo sapien
gtcttctgtgtgattcgagcatattcacgttaa

SEQ ID NO: 430079 - DNA, 33 bp, Homo sapien
actattatctattatccaatgctactgtgaaaa

SEQ ID NO: 430080 - DNA, 33 bp, Homo sapien
actattatctattatctaatgctactgtgaaaa

SEQ ID NO: 430081 - DNA, 33 bp, Homo sapien
taaatcagaaacctgaaatccagacctttgcta

SEQ ID NO: 430082 - DNA, 33 bp, Homo sapien
taaatcagaaacctgagatccagacctttgcta

SEQ ID NO: 430083 - DNA, 33 bp, Homo sapien
gcaaaactgccctcaaaacaatgaccagagttg

SEQ ID NO: 430084 - DNA, 33 bp, Homo sapien
gcaaaactgccctcaagacaatgaccagagttg

SEQ ID NO: 430085 - DNA, 33 bp, Homo sapien
taataaattttgatgaagagagttgagtgtgta

SEQ ID NO: 430086 - DNA, 33 bp, Homo sapien
taataaattttgatgaggagagttgagtgtgta

SEQ ID NO: 430087 - DNA, 33 bp, Homo sapien
gactggtctccggcaaactgccagggttataag

SEQ ID NO: 430088 - DNA, 33 bp, Homo sapien
gactggtctccggcaatctgccagggttataag

SEQ ID NO: 430089 - DNA, 33 bp, Homo sapien
gctccagggtaaaacacagcatggatcttcaaa

SEQ ID NO: 430090 - DNA, 33 bp, Homo sapien
gctccagggtaaaacagagcatggatcttcaaa

SEQ ID NO: 430091 - DNA, 33 bp, Homo sapien
cagttaataaagaaaacttcacacgaattccct

SEQ ID NO: 430092 - DNA, 33 bp, Homo sapien
cagttaataaagaaaatttcacacgaattccct

SEQ ID NO: 430093 - DNA, 33 bp, Homo sapien
cctgcactacaagaaacgttaaatgaagtcttt

SEQ ID NO: 430094 - DNA, 33 bp, Homo sapien
cctgcactacaagaaatgttaaatgaagtcttt

SEQ ID NO: 430095 - DNA, 33 bp, Homo sapien
caactttgaggtgaaacaggaaattagagacta

SEQ ID NO: 430096 - DNA, 33 bp, Homo sapien
caactttgaggtgaaataggaaattagagacta

SEQ ID NO: 430097 - DNA, 33 bp, Homo sapien
gttcatatcctttgccaacattttcatcaggtt

SEQ ID NO: 430098 - DNA, 33 bp, Homo sapien
gttcatatcctttgccgacattttcatcaggtt

SEQ ID NO: 430099 - DNA, 33 bp, Homo sapien
gtgagctgtagttatacaacattatatgggagg

SEQ ID NO: 430100 - DNA, 33 bp, Homo sapien
gtgagctgtagttatagaacattatatgggagg

SEQ ID NO: 430101 - DNA, 33 bp, Homo sapien
aacaggcttaacttaacgtggcaaatgattgag

SEQ ID NO: 430102 - DNA, 33 bp, Homo sapien
aacaggcttaacttaatgtggcaaatgattgag

SEQ ID NO: 430103 - DNA, 33 bp, Homo sapien
atgagagcctaatgcaaaaggtgtctgtaagga

SEQ ID NO: 430104 - DNA, 33 bp, Homo sapien
atgagagcctaatgcagaaggtgtctgtaagga

SEQ ID NO: 430105 - DNA, 33 bp, Homo sapien
ccgcatttagagtccaaccaaatcactataaag

SEQ ID NO: 430106 - DNA, 33 bp, Homo sapien
ccgcatttagagtccatccaaatcactataaag

SEQ ID NO: 430107 - DNA, 33 bp, Homo sapien
tgaatagaggctcaccacactcaccttctccac

SEQ ID NO: 430108 - DNA, 33 bp, Homo sapien
tgaatagaggctcaccgcactcaccttctccac

SEQ ID NO: 430109 - DNA, 33 bp, Homo sapien
caataattctcccataatagagcccaagaaaag

SEQ ID NO: 430110 - DNA, 33 bp, Homo sapien
caataattctcccatagtagagcccaagaaaag

SEQ ID NO: 430111 - DNA, 33 bp, Homo sapien
aattccaatagattcaacctcgaagggtcttct

SEQ ID NO: 430112 - DNA, 33 bp, Homo sapien
aattccaatagattcagcctcgaagggtcttct

SEQ ID NO: 430113 - DNA, 33 bp, Homo sapien
tgtctctctttaaatgcaaaagtatttcaatta

SEQ ID NO: 430114 - DNA, 33 bp, Homo sapien
tgtctctctttaaatgtaaaagtatttcaatta

SEQ ID NO: 430115 - DNA, 33 bp, Homo sapien
ccttttatcccaattgcatatgttgaagtccta

SEQ ID NO: 430116 - DNA, 33 bp, Homo sapien
ccttttatcccaattgtatatgttgaagtccta

SEQ ID NO: 430117 - DNA, 33 bp, Homo sapien
ggtaaaaacagagctaacatttcactcagcaat

SEQ ID NO: 430118 - DNA, 33 bp, Homo sapien
ggtaaaaacagagctatcatttcactcagcaat

SEQ ID NO: 430119 - DNA, 33 bp, Homo sapien
taattcataaaaacaccatgaaacaactgagaa

SEQ ID NO: 430120 - DNA, 33 bp, Homo sapien
taattcataaaaacactatgaaacaactgagaa

SEQ ID NO: 430121 - DNA, 33 bp, Homo sapien
ttgtaatcttcataaaagaacctgtaaaatttt

SEQ ID NO: 430122 - DNA, 33 bp, Homo sapien
ttgtaatcttcataaaggaacctgtaaaatttt

SEQ ID NO: 430123 - DNA, 33 bp, Homo sapien
tgttgtagctattgcaaatgagatcttttcatt

SEQ ID NO: 430124 - DNA, 33 bp, Homo sapien
tgttgtagctattgcagatgagatcttttcatt

SEQ ID NO: 430125 - DNA, 33 bp, Homo sapien
aagctgtaatatccccaaagtatcaaggcttaa

SEQ ID NO: 430126 - DNA, 33 bp, Homo sapien
aagctgtaatatccccgaagtatcaaggcttaa

SEQ ID NO: 430127 - DNA, 33 bp, Homo sapien
aaatgctgtgttaaccagattataataagacag

SEQ ID NO: 430128 - DNA, 33 bp, Homo sapien
aaatgctgtgttaaccggattataataagacag

SEQ ID NO: 430129 - DNA, 33 bp, Homo sapien
gaggagtcagagtcaacagaaatattttcttgg

SEQ ID NO: 430130 - DNA, 33 bp, Homo sapien
gaggagtcagagtcaagagaaatattttcttgg

SEQ ID NO: 430131 - DNA, 33 bp, Homo sapien
tgaagttactcacaaacagacttggagcccgct

SEQ ID NO: 430132 - DNA, 33 bp, Homo sapien
tgaagttactcacaaagagacttggagcccgct

SEQ ID NO: 430133 - DNA, 33 bp, Homo sapien
atggagaagtgacacaagtctaaattgaaacaa

SEQ ID NO: 430134 - DNA, 33 bp, Homo sapien
atggagaagtgacacatgtctaaattgaaacaa

SEQ ID NO: 430135 - DNA, 33 bp, Homo sapien
aacaacaatttatgcaatctgctgtccataaat

SEQ ID NO: 430136 - DNA, 33 bp, Homo sapien
aacaacaatttatgcactctgctgtccataaat

SEQ ID NO: 430137 - DNA, 33 bp, Homo sapien
tagcaatggaagagcacctgcaattactctgtt

SEQ ID NO: 430138 - DNA, 33 bp, Homo sapien
tagcaatggaagagcatctgcaattactctgtt

SEQ ID NO: 430139 - DNA, 33 bp, Homo sapien
atggaggaagaggccagatgtcagagaatgtct

SEQ ID NO: 430140 - DNA, 33 bp, Homo sapien
atggaggaagaggccatatgtcagagaatgtct

SEQ ID NO: 430141 - DNA, 33 bp, Homo sapien
gtcctatattatatgcagacatcacctgaaagc

SEQ ID NO: 430142 - DNA, 33 bp, Homo sapien
gtcctatattatatgcggacatcacctgaaagc

SEQ ID NO: 430143 - DNA, 33 bp, Homo sapien
taatgagaggtagttcgaaaatacaggcaatcc

SEQ ID NO: 430144 - DNA, 33 bp, Homo sapien
taatgagaggtagttctaaaatacaggcaatcc

SEQ ID NO: 430145 - DNA, 33 bp, Homo sapien
ttaattcatttttaaagtctgttattgacccag

SEQ ID NO: 430146 - DNA, 33 bp, Homo sapien
ttaattcatttttaaattctgttattgacccag

SEQ ID NO: 430147 - DNA, 33 bp, Homo sapien
agtatcacagtctccaaatatttcgctgtcagc

SEQ ID NO: 430148 - DNA, 33 bp, Homo sapien
agtatcacagtctccagatatttcgctgtcagc

SEQ ID NO: 430149 - DNA, 33 bp, Homo sapien
gaagaaaaaacacaagcagaaatgaagtcattt

SEQ ID NO: 430150 - DNA, 33 bp, Homo sapien
gaagaaaaaacacaagtagaaatgaagtcattt

SEQ ID NO: 430151 - DNA, 33 bp, Homo sapien
gatatatattggattcccaccaggcttgtttgc

SEQ ID NO: 430152 - DNA, 33 bp, Homo sapien
gatatatattggattctcaccaggcttgtttgc

SEQ ID NO: 430153 - DNA, 33 bp, Homo sapien
tattgagtatacataaatcactctaccataaag

SEQ ID NO: 430154 - DNA, 33 bp, Homo sapien
tattgagtatacataattcactctaccataaag

SEQ ID NO: 430155 - DNA, 33 bp, Homo sapien
tcttacaagatagaaacacctaaatgtgtacat

SEQ ID NO: 430156 - DNA, 33 bp, Homo sapien
tcttacaagatagaaagacctaaatgtgtacat

SEQ ID NO: 430157 - DNA, 33 bp, Homo sapien
gatacagggctaaccactaatactatatctgtg

SEQ ID NO: 430158 - DNA, 33 bp, Homo sapien
gatacagggctaaccattaatactatatctgtg

SEQ ID NO: 430159 - DNA, 33 bp, Homo sapien
ttccagctgaaaaacaccgcactaaacttcgca

SEQ ID NO: 430160 - DNA, 33 bp, Homo sapien
ttccagctgaaaaacatcgcactaaacttcgca

SEQ ID NO: 430161 - DNA, 33 bp, Homo sapien
ggtgttacaatgcaccaattactgtactatgca

SEQ ID NO: 430162 - DNA, 33 bp, Homo sapien
ggtgttacaatgcaccgattactgtactatgca

SEQ ID NO: 430163 - DNA, 33 bp, Homo sapien
agttcatgcagaagacaacagcattaaacttgc

SEQ ID NO: 430164 - DNA, 33 bp, Homo sapien
agttcatgcagaagacgacagcattaaacttgc

SEQ ID NO: 430165 - DNA, 33 bp, Homo sapien
actatttcaggaccacacaacttgatctgcagt

SEQ ID NO: 430166 - DNA, 33 bp, Homo sapien
actatttcaggaccacgcaacttgatctgcagt

SEQ ID NO: 430167 - DNA, 33 bp, Homo sapien
ctttgagcactcatacagccattctgtttttct

SEQ ID NO: 430168 - DNA, 33 bp, Homo sapien
ctttgagcactcatacggccattctgtttttct

SEQ ID NO: 430169 - DNA, 33 bp, Homo sapien
atttgaagaacttgaacgtttagcacaagctgg

SEQ ID NO: 430170 - DNA, 33 bp, Homo sapien
atttgaagaacttgaatgtttagcacaagctgg

SEQ ID NO: 430171 - DNA, 33 bp, Homo sapien
tttttaagctgctgaaagaaaatagtgttccca

SEQ ID NO: 430172 - DNA, 33 bp, Homo sapien
tttttaagctgctgaaggaaaatagtgttccca

SEQ ID NO: 430173 - DNA, 33 bp, Homo sapien
atgttagtttctcaaacaggtgacaccgaatat

SEQ ID NO: 430174 - DNA, 33 bp, Homo sapien
atgttagtttctcaaagaggtgacaccgaatat

SEQ ID NO: 430175 - DNA, 33 bp, Homo sapien
ttctgaacactatttgcagaaaatctttaagtc

SEQ ID NO: 430176 - DNA, 33 bp, Homo sapien
ttctgaacactatttgtagaaaatctttaagtc

SEQ ID NO: 430177 - DNA, 33 bp, Homo sapien
ttttatttgcttttcacccaaatctgctagatt

SEQ ID NO: 430178 - DNA, 33 bp, Homo sapien
ttttatttgcttttcatccaaatctgctagatt

SEQ ID NO: 430179 - DNA, 33 bp, Homo sapien
taattttatctatttcaattatttgcacatata

SEQ ID NO: 430180 - DNA, 33 bp, Homo sapien
taattttatctatttcgattatttgcacatata

SEQ ID NO: 430181 - DNA, 33 bp, Homo sapien
aagagaagattaaaacacaggacaaagagataa

SEQ ID NO: 430182 - DNA, 33 bp, Homo sapien
aagagaagattaaaactcaggacaaagagataa

SEQ ID NO: 430183 - DNA, 33 bp, Homo sapien
caagagtcaggtctaccatatatctaagtcatg

SEQ ID NO: 430184 - DNA, 33 bp, Homo sapien
caagagtcaggtctactatatatctaagtcatg

SEQ ID NO: 430185 - DNA, 33 bp, Homo sapien
ctgagctacctgaggcaagacaatagaccctgg

SEQ ID NO: 430186 - DNA, 33 bp, Homo sapien
ctgagctacctgaggctagacaatagaccctgg

SEQ ID NO: 430187 - DNA, 33 bp, Homo sapien
aaattagctttaacacaccgatgaatcaatgga

SEQ ID NO: 430188 - DNA, 33 bp, Homo sapien
aaattagctttaacacgccgatgaatcaatgga

SEQ ID NO: 430189 - DNA, 33 bp, Homo sapien
tcaatcactatcctgaagacaccacaaagccat

SEQ ID NO: 430190 - DNA, 33 bp, Homo sapien
tcaatcactatcctgaggacaccacaaagccat

SEQ ID NO: 430191 - DNA, 33 bp, Homo sapien
tcttcaaattcatgtgaacttagtaattgataa

SEQ ID NO: 430192 - DNA, 33 bp, Homo sapien
tcttcaaattcatgtggacttagtaattgataa

SEQ ID NO: 430193 - DNA, 33 bp, Homo sapien
gccccatattgtcaaaagtgttcgaaccagagt

SEQ ID NO: 430194 - DNA, 33 bp, Homo sapien
gccccatattgtcaaaggtgttcgaaccagagt

SEQ ID NO: 430195 - DNA, 33 bp, Homo sapien
tatttattctgtagaagtccaataagccttgat

SEQ ID NO: 430196 - DNA, 33 bp, Homo sapien
tatttattctgtagaattccaataagccttgat

SEQ ID NO: 430197 - DNA, 33 bp, Homo sapien
tgggtaccataaatgccactggatttctaacag

SEQ ID NO: 430198 - DNA, 33 bp, Homo sapien
tgggtaccataaatgctactggatttctaacag

SEQ ID NO: 430199 - DNA, 33 bp, Homo sapien
ctcaagttacctatacagcatttgttttggaat

SEQ ID NO: 430200 - DNA, 33 bp, Homo sapien
ctcaagttacctatacggcatttgttttggaat

SEQ ID NO: 430201 - DNA, 33 bp, Homo sapien
gcgtatttcaagaggacgaatctcaacagacaa

SEQ ID NO: 430202 - DNA, 33 bp, Homo sapien
gcgtatttcaagaggatgaatctcaacagacaa

SEQ ID NO: 430203 - DNA, 33 bp, Homo sapien
tcattgaggcgctgagaatattttgtgtctccc

SEQ ID NO: 430204 - DNA, 33 bp, Homo sapien
tcattgaggcgctgagcatattttgtgtctccc

SEQ ID NO: 430205 - DNA, 33 bp, Homo sapien
aattcttaatatactcacactgaccatttgtgc

SEQ ID NO: 430206 - DNA, 33 bp, Homo sapien
aattcttaatatactctcactgaccatttgtgc

SEQ ID NO: 430207 - DNA, 33 bp, Homo sapien
gcactagtaaggatacaggaagaaaatcagcat

SEQ ID NO: 430208 - DNA, 33 bp, Homo sapien
gcactagtaaggatacgggaagaaaatcagcat

SEQ ID NO: 430209 - DNA, 33 bp, Homo sapien
aactactgcaatcatacggaaactctcaccatt

SEQ ID NO: 430210 - DNA, 33 bp, Homo sapien
aactactgcaatcatatggaaactctcaccatt

SEQ ID NO: 430211 - DNA, 33 bp, Homo sapien
caacaatggtgtgctggaatcagctcttgtata

SEQ ID NO: 430212 - DNA, 33 bp, Homo sapien
caacaatggtgtgctgtaatcagctcttgtata

SEQ ID NO: 430213 - DNA, 33 bp, Homo sapien
tggaagttcactttgccctctgtctattaaagt

SEQ ID NO: 430214 - DNA, 33 bp, Homo sapien
tggaagttcactttgctctctgtctattaaagt

SEQ ID NO: 430215 - DNA, 33 bp, Homo sapien
gtcttcagcaataaggaataaggatgctccttt

SEQ ID NO: 430216 - DNA, 33 bp, Homo sapien
gtcttcagcaataagggataaggatgctccttt

SEQ ID NO: 430217 - DNA, 33 bp, Homo sapien
aagtgaatagtcgtggaaaaatattacacacag

SEQ ID NO: 430218 - DNA, 33 bp, Homo sapien
aagtgaatagtcgtgggaaaatattacacacag

SEQ ID NO: 430219 - DNA, 33 bp, Homo sapien
atgaattagatttaacaatgactattctatgct

SEQ ID NO: 430220 - DNA, 33 bp, Homo sapien
atgaattagatttaacgatgactattctatgct

SEQ ID NO: 430221 - DNA, 33 bp, Homo sapien
aaaataggccattatacggaaataccagtaata

SEQ ID NO: 430222 - DNA, 33 bp, Homo sapien
aaaataggccattatagggaaataccagtaata

SEQ ID NO: 430223 - DNA, 33 bp, Homo sapien
atggtggacaatatcaactgaaactttttaaag

SEQ ID NO: 430224 - DNA, 33 bp, Homo sapien
atggtggacaatatcatctgaaactttttaaag

SEQ ID NO: 430225 - DNA, 33 bp, Homo sapien
aggttgagtgcaaggaaaaatcagacagcagtt

SEQ ID NO: 430226 - DNA, 33 bp, Homo sapien
aggttgagtgcaaggacaaatcagacagcagtt

SEQ ID NO: 430227 - DNA, 33 bp, Homo sapien
ttgttattctctaagacagccatgatgttacct

SEQ ID NO: 430228 - DNA, 33 bp, Homo sapien
ttgttattctctaagatagccatgatgttacct

SEQ ID NO: 430229 - DNA, 33 bp, Homo sapien
aaatctatttctatgaagagtcagagatgtata

SEQ ID NO: 430230 - DNA, 33 bp, Homo sapien
aaatctatttctatgaggagtcagagatgtata

SEQ ID NO: 430231 - DNA, 33 bp, Homo sapien
ttctgttgttagatgaagtattctataaatgtc

SEQ ID NO: 430232 - DNA, 33 bp, Homo sapien
ttctgttgttagatgaggtattctataaatgtc

SEQ ID NO: 430233 - DNA, 33 bp, Homo sapien
atgctataaatttcaacgtaggcactgttttca

SEQ ID NO: 430234 - DNA, 33 bp, Homo sapien
atgctataaatttcaatgtaggcactgttttca

SEQ ID NO: 430235 - DNA, 33 bp, Homo sapien
caaggctatttggagaagtgtcactgactgagg

SEQ ID NO: 430236 - DNA, 33 bp, Homo sapien
caaggctatttggagacgtgtcactgactgagg

SEQ ID NO: 430237 - DNA, 33 bp, Homo sapien
acaacacctggtctatcagaaaatcctacttgc

SEQ ID NO: 430238 - DNA, 33 bp, Homo sapien
acaacacctggtctatgagaaaatcctacttgc

SEQ ID NO: 430239 - DNA, 33 bp, Homo sapien
aaaaggagtattttaacagaggttcaggaagaa

SEQ ID NO: 430240 - DNA, 33 bp, Homo sapien
aaaaggagtattttaagagaggttcaggaagaa

SEQ ID NO: 430241 - DNA, 33 bp, Homo sapien
ctgtactccagaaaccaacagaggcacctggaa

SEQ ID NO: 430242 - DNA, 33 bp, Homo sapien
ctgtactccagaaaccgacagaggcacctggaa

SEQ ID NO: 430243 - DNA, 33 bp, Homo sapien
agagcctcagcttttccctagtgtttgtctggg

SEQ ID NO: 430244 - DNA, 33 bp, Homo sapien
agagcctcagcttttctctagtgtttgtctggg

SEQ ID NO: 430245 - DNA, 33 bp, Homo sapien
tcaagaaaatcaagaaactggtattattacaca

SEQ ID NO: 430246 - DNA, 33 bp, Homo sapien
tcaagaaaatcaagaacctggtattattacaca

SEQ ID NO: 430247 - DNA, 33 bp, Homo sapien
ccatttcaccggcgaaggtgtcagcaaagctga

SEQ ID NO: 430248 - DNA, 33 bp, Homo sapien
ccatttcaccggcgaatgtgtcagcaaagctga

SEQ ID NO: 430249 - DNA, 33 bp, Homo sapien
tttgtgtatccttctgaatttggacaaacacat

SEQ ID NO: 430250 - DNA, 33 bp, Homo sapien
tttgtgtatccttctgcatttggacaaacacat

SEQ ID NO: 430251 - DNA, 33 bp, Homo sapien
aaaggtcatggaactacgaaagttaaaatagta

SEQ ID NO: 430252 - DNA, 33 bp, Homo sapien
aaaggtcatggaactaggaaagttaaaatagta

SEQ ID NO: 430253 - DNA, 33 bp, Homo sapien
aaaagtaaaaagttgacagatggtaaggatgca

SEQ ID NO: 430254 - DNA, 33 bp, Homo sapien
aaaagtaaaaagttgagagatggtaaggatgca

SEQ ID NO: 430255 - DNA, 33 bp, Homo sapien
tcttcaattcagagccaatccagactgatggaa

SEQ ID NO: 430256 - DNA, 33 bp, Homo sapien
tcttcaattcagagccgatccagactgatggaa

SEQ ID NO: 430257 - DNA, 33 bp, Homo sapien
aacattctttattgccacaggaatttcaaggcg

SEQ ID NO: 430258 - DNA, 33 bp, Homo sapien
aacattctttattgccgcaggaatttcaaggcg

SEQ ID NO: 430259 - DNA, 33 bp, Homo sapien
ctggtggctatagtcacgttgttaagatttgca

SEQ ID NO: 430260 - DNA, 33 bp, Homo sapien
ctggtggctatagtcatgttgttaagatttgca

SEQ ID NO: 430261 - DNA, 33 bp, Homo sapien
acaggctcttatcggcgctgaaagttgagcttg

SEQ ID NO: 430262 - DNA, 33 bp, Homo sapien
acaggctcttatcggctctgaaagttgagcttg

SEQ ID NO: 430263 - DNA, 33 bp, Homo sapien
gacattttgtgcttcacagataattgtcttgtt

SEQ ID NO: 430264 - DNA, 33 bp, Homo sapien
gacattttgtgcttcagagataattgtcttgtt

SEQ ID NO: 430265 - DNA, 33 bp, Homo sapien
ccactcgttgctaagcaataggtgtatctagat

SEQ ID NO: 430266 - DNA, 33 bp, Homo sapien
ccactcgttgctaagcgataggtgtatctagat

SEQ ID NO: 430267 - DNA, 33 bp, Homo sapien
ttttctgagtagaaaaccattatgtgaaatgtt

SEQ ID NO: 430268 - DNA, 33 bp, Homo sapien
ttttctgagtagaaaatcattatgtgaaatgtt

SEQ ID NO: 430269 - DNA, 33 bp, Homo sapien
attctaagatattttacagcagtattttggcat

SEQ ID NO: 430270 - DNA, 33 bp, Homo sapien
attctaagatattttatagcagtattttggcat

SEQ ID NO: 430271 - DNA, 33 bp, Homo sapien
acgtgcaaacgagtgacatatgctaccagcttt

SEQ ID NO: 430272 - DNA, 33 bp, Homo sapien
acgtgcaaacgagtgagatatgctaccagcttt

SEQ ID NO: 430273 - DNA, 33 bp, Homo sapien
cccaccactttcataagtctaactaccatcacc

SEQ ID NO: 430274 - DNA, 33 bp, Homo sapien
cccaccactttcataattctaactaccatcacc

SEQ ID NO: 430275 - DNA, 33 bp, Homo sapien
agagaacatcattgtgcactgcagaggtgatta

SEQ ID NO: 430276 - DNA, 33 bp, Homo sapien
agagaacatcattgtggactgcagaggtgatta

SEQ ID NO: 430277 - DNA, 33 bp, Homo sapien
tccacattttagagtcaagggacctgtgaccta

SEQ ID NO: 430278 - DNA, 33 bp, Homo sapien
tccacattttagagtcgagggacctgtgaccta

SEQ ID NO: 430279 - DNA, 33 bp, Homo sapien
tctaacttcaaatttcaaggataaagacataat

SEQ ID NO: 430280 - DNA, 33 bp, Homo sapien
tctaacttcaaatttcgaggataaagacataat

SEQ ID NO: 430281 - DNA, 33 bp, Homo sapien
tacagcctttaggatacgaagctttcaaacttt

SEQ ID NO: 430282 - DNA, 33 bp, Homo sapien
tacagcctttaggatatgaagctttcaaacttt

SEQ ID NO: 430283 - DNA, 33 bp, Homo sapien
ttgtagaggctgtatcagagatagaaacacata

SEQ ID NO: 430284 - DNA, 33 bp, Homo sapien
ttgtagaggctgtatcggagatagaaacacata

SEQ ID NO: 430285 - DNA, 33 bp, Homo sapien
tacaatggcatttacacctagaaaattggaaac

SEQ ID NO: 430286 - DNA, 33 bp, Homo sapien
tacaatggcatttacatctagaaaattggaaac

SEQ ID NO: 430287 - DNA, 33 bp, Homo sapien
ttgctgggaggcctctaaaactacattcaacac

SEQ ID NO: 430288 - DNA, 33 bp, Homo sapien
ttgctgggaggcctctgaaactacattcaacac

SEQ ID NO: 430289 - DNA, 33 bp, Homo sapien
cagtgggctactcagacaaatatcatcatagtt

SEQ ID NO: 430290 - DNA, 33 bp, Homo sapien
cagtgggctactcagagaaatatcatcatagtt

SEQ ID NO: 430291 - DNA, 33 bp, Homo sapien
aaggtgattatttatacgcaatcatattcatac

SEQ ID NO: 430292 - DNA, 33 bp, Homo sapien
aaggtgattatttataggcaatcatattcatac

SEQ ID NO: 430293 - DNA, 33 bp, Homo sapien
aatgtagtattggagaagatttttatagtagag

SEQ ID NO: 430294 - DNA, 33 bp, Homo sapien
aatgtagtattggagacgatttttatagtagag

SEQ ID NO: 430295 - DNA, 33 bp, Homo sapien
ccatcaaaaacttgacagatgggaaatgacatg

SEQ ID NO: 430296 - DNA, 33 bp, Homo sapien
ccatcaaaaacttgacggatgggaaatgacatg

SEQ ID NO: 430297 - DNA, 33 bp, Homo sapien
tctgtgcttcctactagctctgcagggatgctt

SEQ ID NO: 430298 - DNA, 33 bp, Homo sapien
tctgtgcttcctactatctctgcagggatgctt

SEQ ID NO: 430299 - DNA, 33 bp, Homo sapien
tctcttagcagacactaacatacactaccatcc

SEQ ID NO: 430300 - DNA, 33 bp, Homo sapien
tctcttagcagacacttacatacactaccatcc

SEQ ID NO: 430301 - DNA, 33 bp, Homo sapien
caagtgccaaacctcaacttggacaaacatcag

SEQ ID NO: 430302 - DNA, 33 bp, Homo sapien
caagtgccaaacctcatcttggacaaacatcag

SEQ ID NO: 430303 - DNA, 33 bp, Homo sapien
accatctcaatatctacgactgatctaacacct

SEQ ID NO: 430304 - DNA, 33 bp, Homo sapien
accatctcaatatctatgactgatctaacacct

SEQ ID NO: 430305 - DNA, 33 bp, Homo sapien
ctgctttcagtgaactcactttctcacttttca

SEQ ID NO: 430306 - DNA, 33 bp, Homo sapien
ctgctttcagtgaactgactttctcacttttca

SEQ ID NO: 430307 - DNA, 33 bp, Homo sapien
gagttatgtttctccccactctgaccactgctt

SEQ ID NO: 430308 - DNA, 33 bp, Homo sapien
gagttatgtttctccctactctgaccactgctt

SEQ ID NO: 430309 - DNA, 33 bp, Homo sapien
tttgagcccttggcaacgtgctgtgctgaaatg

SEQ ID NO: 430310 - DNA, 33 bp, Homo sapien
tttgagcccttggcaatgtgctgtgctgaaatg

SEQ ID NO: 430311 - DNA, 33 bp, Homo sapien
ggcttacacaaagttcccaacaagctgagatat

SEQ ID NO: 430312 - DNA, 33 bp, Homo sapien
ggcttacacaaagttctcaacaagctgagatat

SEQ ID NO: 430313 - DNA, 33 bp, Homo sapien
caaagcagcacttagacggaaatgtggaaggct

SEQ ID NO: 430314 - DNA, 33 bp, Homo sapien
caaagcagcacttagatggaaatgtggaaggct

SEQ ID NO: 430315 - DNA, 33 bp, Homo sapien
atagagtctcctgggccatctgaattatactta

SEQ ID NO: 430316 - DNA, 33 bp, Homo sapien
atagagtctcctgggctatctgaattatactta

SEQ ID NO: 430317 - DNA, 33 bp, Homo sapien
tgttcccaatggctagactacatggatctggga

SEQ ID NO: 430318 - DNA, 33 bp, Homo sapien
tgttcccaatggctaggctacatggatctggga

SEQ ID NO: 430319 - DNA, 33 bp, Homo sapien
caacagatacttgttaagccactcatatgaacc

SEQ ID NO: 430320 - DNA, 33 bp, Homo sapien
caacagatacttgttacgccactcatatgaacc

SEQ ID NO: 430321 - DNA, 33 bp, Homo sapien
aatggagtgtagaaaacatcaaaaacaaacaaa

SEQ ID NO: 430322 - DNA, 33 bp, Homo sapien
aatggagtgtagaaaagatcaaaaacaaacaaa

SEQ ID NO: 430323 - DNA, 33 bp, Homo sapien
tgttttaaattcactcaccaactacataagaag

SEQ ID NO: 430324 - DNA, 33 bp, Homo sapien
tgttttaaattcactctccaactacataagaag

SEQ ID NO: 430325 - DNA, 33 bp, Homo sapien
gttttagctattgccagcgtgccaagaattttc

SEQ ID NO: 430326 - DNA, 33 bp, Homo sapien
gttttagctattgccatcgtgccaagaattttc

SEQ ID NO: 430327 - DNA, 33 bp, Homo sapien
gagagcctcagttcaacggacctacattacaga

SEQ ID NO: 430328 - DNA, 33 bp, Homo sapien
gagagcctcagttcaagggacctacattacaga

SEQ ID NO: 430329 - DNA, 33 bp, Homo sapien
cctgatgggataagaaatgaaagtagagattca

SEQ ID NO: 430330 - DNA, 33 bp, Homo sapien
cctgatgggataagaagtgaaagtagagattca

SEQ ID NO: 430331 - DNA, 33 bp, Homo sapien
acagtatgggttgggacgtttacaaaattcagc

SEQ ID NO: 430332 - DNA, 33 bp, Homo sapien
acagtatgggttgggatgtttacaaaattcagc

SEQ ID NO: 430333 - DNA, 33 bp, Homo sapien
gatttttatgcactcccatgctaccttgcatgc

SEQ ID NO: 430334 - DNA, 33 bp, Homo sapien
gatttttatgcactcctatgctaccttgcatgc

SEQ ID NO: 430335 - DNA, 33 bp, Homo sapien
tttctttttagcctaccacacttctagaagcat

SEQ ID NO: 430336 - DNA, 33 bp, Homo sapien
tttctttttagcctactacacttctagaagcat

SEQ ID NO: 430337 - DNA, 33 bp, Homo sapien
cacccgaccgtcgcaaggtttactggaaacatg

SEQ ID NO: 430338 - DNA, 33 bp, Homo sapien
cacccgaccgtcgcaatgtttactggaaacatg

SEQ ID NO: 430339 - DNA, 33 bp, Homo sapien
gaggtggaagctttcacgttctgtgtttgttgt

SEQ ID NO: 430340 - DNA, 33 bp, Homo sapien
gaggtggaagctttcatgttctgtgtttgttgt

SEQ ID NO: 430341 - DNA, 33 bp, Homo sapien
taacagcatgatcttcaaaatcaggatgatatc

SEQ ID NO: 430342 - DNA, 33 bp, Homo sapien
taacagcatgatcttcgaaatcaggatgatatc

SEQ ID NO: 430343 - DNA, 33 bp, Homo sapien
actccttccaaattcagtcactgctataccagt

SEQ ID NO: 430344 - DNA, 33 bp, Homo sapien
actccttccaaattcattcactgctataccagt

SEQ ID NO: 430345 - DNA, 33 bp, Homo sapien
ctgcctgtatataagcaatgagccaaaacagtt

SEQ ID NO: 430346 - DNA, 33 bp, Homo sapien
ctgcctgtatataagcgatgagccaaaacagtt

SEQ ID NO: 430347 - DNA, 33 bp, Homo sapien
agctgtgagagcatgacgttgggtgattcacat

SEQ ID NO: 430348 - DNA, 33 bp, Homo sapien
agctgtgagagcatgatgttgggtgattcacat

SEQ ID NO: 430349 - DNA, 33 bp, Homo sapien
tttccaacacaaattagcttcaaacagtactga

SEQ ID NO: 430350 - DNA, 33 bp, Homo sapien
tttccaacacaaattatcttcaaacagtactga

SEQ ID NO: 430351 - DNA, 33 bp, Homo sapien
ataaccctatatgatggcacaagatgcaaaagc

SEQ ID NO: 430352 - DNA, 33 bp, Homo sapien
ataaccctatatgatgtcacaagatgcaaaagc

SEQ ID NO: 430353 - DNA, 33 bp, Homo sapien
accacacatgcagttaaaaagagaattagactg

SEQ ID NO: 430354 - DNA, 33 bp, Homo sapien
accacacatgcagttataaagagaattagactg

SEQ ID NO: 430355 - DNA, 33 bp, Homo sapien
agcccataacattagacggaggaagaaaaatag

SEQ ID NO: 430356 - DNA, 33 bp, Homo sapien
agcccataacattagagggaggaagaaaaatag

SEQ ID NO: 430357 - DNA, 33 bp, Homo sapien
tgatacaatacagcccagggagcaatggacaaa

SEQ ID NO: 430358 - DNA, 33 bp, Homo sapien
tgatacaatacagcccggggagcaatggacaaa

SEQ ID NO: 430359 - DNA, 33 bp, Homo sapien
aagacactgcctaagacccaggcataatgaaaa

SEQ ID NO: 430360 - DNA, 33 bp, Homo sapien
aagacactgcctaagatccaggcataatgaaaa

SEQ ID NO: 430361 - DNA, 33 bp, Homo sapien
gtagacttctaaagagaaatcactgataacaca

SEQ ID NO: 430362 - DNA, 33 bp, Homo sapien
gtagacttctaaagaggaatcactgataacaca

SEQ ID NO: 430363 - DNA, 33 bp, Homo sapien
attccttggcatttcaaatttttatgattgcaa

SEQ ID NO: 430364 - DNA, 33 bp, Homo sapien
attccttggcatttcagatttttatgattgcaa

SEQ ID NO: 430365 - DNA, 33 bp, Homo sapien
tacactatttcttaaactggacagtgattttat

SEQ ID NO: 430366 - DNA, 33 bp, Homo sapien
tacactatttcttaaattggacagtgattttat

SEQ ID NO: 430367 - DNA, 33 bp, Homo sapien
ttctgagggaaaaagcaaactgattttgatact

SEQ ID NO: 430368 - DNA, 33 bp, Homo sapien
ttctgagggaaaaagcgaactgattttgatact

SEQ ID NO: 430369 - DNA, 33 bp, Homo sapien
aggaatttcaaaaactaaaatgcagggataaaa

SEQ ID NO: 430370 - DNA, 33 bp, Homo sapien
aggaatttcaaaaactgaaatgcagggataaaa

SEQ ID NO: 430371 - DNA, 33 bp, Homo sapien
ctttaaaaggtgattacagccctctatcaagtt

SEQ ID NO: 430372 - DNA, 33 bp, Homo sapien
ctttaaaaggtgattatagccctctatcaagtt

SEQ ID NO: 430373 - DNA, 33 bp, Homo sapien
gaaatgacaatggtacaactcagtattacccct

SEQ ID NO: 430374 - DNA, 33 bp, Homo sapien
gaaatgacaatggtacgactcagtattacccct

SEQ ID NO: 430375 - DNA, 33 bp, Homo sapien
taaagggagtaaataacgggtagtagaagaagg

SEQ ID NO: 430376 - DNA, 33 bp, Homo sapien
taaagggagtaaataatgggtagtagaagaagg

SEQ ID NO: 430377 - DNA, 33 bp, Homo sapien
gtgctgatttctgagaaggggagaagataaatg

SEQ ID NO: 430378 - DNA, 33 bp, Homo sapien
gtgctgatttctgagagggggagaagataaatg

SEQ ID NO: 430379 - DNA, 33 bp, Homo sapien
tttctttctgacgcataaatatttgaatcttgg

SEQ ID NO: 430380 - DNA, 33 bp, Homo sapien
tttctttctgacgcatgaatatttgaatcttgg

SEQ ID NO: 430381 - DNA, 33 bp, Homo sapien
aaatgacaaagcccaaaagaacagaggatcaaa

SEQ ID NO: 430382 - DNA, 33 bp, Homo sapien
aaatgacaaagcccaagagaacagaggatcaaa

SEQ ID NO: 430383 - DNA, 33 bp, Homo sapien
actagagtaaataaaccgttaaacattgagtga

SEQ ID NO: 430384 - DNA, 33 bp, Homo sapien
actagagtaaataaactgttaaacattgagtga

SEQ ID NO: 430385 - DNA, 33 bp, Homo sapien
cacatggaagatgtcacattctaagacgtgctt

SEQ ID NO: 430386 - DNA, 33 bp, Homo sapien
cacatggaagatgtcatattctaagacgtgctt

SEQ ID NO: 430387 - DNA, 33 bp, Homo sapien
gagtgagtagatacaacaaagatgatatggccc

SEQ ID NO: 430388 - DNA, 33 bp, Homo sapien
gagtgagtagatacaagaaagatgatatggccc

SEQ ID NO: 430389 - DNA, 33 bp, Homo sapien
gtagcttatcatacaacaccagtttcttgtcac

SEQ ID NO: 430390 - DNA, 33 bp, Homo sapien
gtagcttatcatacaataccagtttcttgtcac

SEQ ID NO: 430391 - DNA, 33 bp, Homo sapien
gagtgaaggttcatacactcattcaaatgaggc

SEQ ID NO: 430392 - DNA, 33 bp, Homo sapien
gagtgaaggttcatactctcattcaaatgaggc

SEQ ID NO: 430393 - DNA, 33 bp, Homo sapien
agttacgcattgacaaaaagtgcttctcagatg

SEQ ID NO: 430394 - DNA, 33 bp, Homo sapien
agttacgcattgacaataagtgcttctcagatg

SEQ ID NO: 430395 - DNA, 33 bp, Homo sapien
acattttaaactgataagcaaattatagcaaga

SEQ ID NO: 430396 - DNA, 33 bp, Homo sapien
acattttaaactgataggcaaattatagcaaga

SEQ ID NO: 430397 - DNA, 33 bp, Homo sapien
actgtgaagccaggcactaatttcttctctcta

SEQ ID NO: 430398 - DNA, 33 bp, Homo sapien
actgtgaagccaggcattaatttcttctctcta

SEQ ID NO: 430399 - DNA, 33 bp, Homo sapien
acatataaatgcttccagattttaaagtggctt

SEQ ID NO: 430400 - DNA, 33 bp, Homo sapien
acatataaatgcttccggattttaaagtggctt

SEQ ID NO: 430401 - DNA, 33 bp, Homo sapien
gagtttaaattgcaaccccactattcactctca

SEQ ID NO: 430402 - DNA, 33 bp, Homo sapien
gagtttaaattgcaactccactattcactctca

SEQ ID NO: 430403 - DNA, 33 bp, Homo sapien
gtaatttataaagaaaatgtggtttaatgtact

SEQ ID NO: 430404 - DNA, 33 bp, Homo sapien
gtaatttataaagaaagtgtggtttaatgtact

SEQ ID NO: 430405 - DNA, 33 bp, Homo sapien
tggatacaaaggtctccaaggcctagacttcca

SEQ ID NO: 430406 - DNA, 33 bp, Homo sapien
tggatacaaaggtctcgaaggcctagacttcca

SEQ ID NO: 430407 - DNA, 33 bp, Homo sapien
tccagagtcgaaaaaaagtagaattcactaggt

SEQ ID NO: 430408 - DNA, 33 bp, Homo sapien
tccagagtcgaaaaaatgtagaattcactaggt

SEQ ID NO: 430409 - DNA, 33 bp, Homo sapien
atttaagataaaaacccgggatcatgatgtagg

SEQ ID NO: 430410 - DNA, 33 bp, Homo sapien
atttaagataaaaacctgggatcatgatgtagg

SEQ ID NO: 430411 - DNA, 33 bp, Homo sapien
caagtactcaatatacactttcatttttccttg

SEQ ID NO: 430412 - DNA, 33 bp, Homo sapien
caagtactcaatatacgctttcatttttccttg

SEQ ID NO: 430413 - DNA, 33 bp, Homo sapien
tactgatttactcaggaatgaaatatgtaacgc

SEQ ID NO: 430414 - DNA, 33 bp, Homo sapien
tactgatttactcaggcatgaaatatgtaacgc

SEQ ID NO: 430415 - DNA, 33 bp, Homo sapien
gcagtacatacagcaaatcgccaaatgaaaata

SEQ ID NO: 430416 - DNA, 33 bp, Homo sapien
gcagtacatacagcaagtcgccaaatgaaaata

SEQ ID NO: 430417 - DNA, 33 bp, Homo sapien
ttagtagaattgcagaatacaaaatgaacatag

SEQ ID NO: 430418 - DNA, 33 bp, Homo sapien
ttagtagaattgcagagtacaaaatgaacatag

SEQ ID NO: 430419 - DNA, 33 bp, Homo sapien
agagaagaacttgggaacaatgccttgagcaat

SEQ ID NO: 430420 - DNA, 33 bp, Homo sapien
agagaagaacttgggagcaatgccttgagcaat

SEQ ID NO: 430421 - DNA, 33 bp, Homo sapien
tttagccatattgtaacgttgattattgttctt

SEQ ID NO: 430422 - DNA, 33 bp, Homo sapien
tttagccatattgtaatgttgattattgttctt

SEQ ID NO: 430423 - DNA, 33 bp, Homo sapien
ttcctatcccaattacaaatcccagtggattca

SEQ ID NO: 430424 - DNA, 33 bp, Homo sapien
ttcctatcccaattacgaatcccagtggattca

SEQ ID NO: 430425 - DNA, 33 bp, Homo sapien
gtccatctgtactataatactagaccatgagct

SEQ ID NO: 430426 - DNA, 33 bp, Homo sapien
gtccatctgtactatactactagaccatgagct

SEQ ID NO: 430427 - DNA, 33 bp, Homo sapien
tccctacctgcctattaaagttaaaatgatgtc

SEQ ID NO: 430428 - DNA, 33 bp, Homo sapien
tccctacctgcctattgaagttaaaatgatgtc

SEQ ID NO: 430429 - DNA, 33 bp, Homo sapien
ttatatggttgaattgaatgagagtttatatgg

SEQ ID NO: 430430 - DNA, 33 bp, Homo sapien
ttatatggttgaattggatgagagtttatatgg

SEQ ID NO: 430431 - DNA, 33 bp, Homo sapien
agaaatcaggttatcaacatagggacagtggag

SEQ ID NO: 430432 - DNA, 33 bp, Homo sapien
agaaatcaggttatcagcatagggacagtggag

SEQ ID NO: 430433 - DNA, 33 bp, Homo sapien
ctggagtatttcttggaatttccttcaaccact

SEQ ID NO: 430434 - DNA, 33 bp, Homo sapien
ctggagtatttcttgggatttccttcaaccact

SEQ ID NO: 430435 - DNA, 33 bp, Homo sapien
ggccgagctagtgtcaatatttatggctgagag

SEQ ID NO: 430436 - DNA, 33 bp, Homo sapien
ggccgagctagtgtcagtatttatggctgagag

SEQ ID NO: 430437 - DNA, 33 bp, Homo sapien
tgctgtcttcttaatgaattcactttaacatac

SEQ ID NO: 430438 - DNA, 33 bp, Homo sapien
tgctgtcttcttaatggattcactttaacatac

SEQ ID NO: 430439 - DNA, 33 bp, Homo sapien
agattgtggttgtagaaaaggaagaattcacag

SEQ ID NO: 430440 - DNA, 33 bp, Homo sapien
agattgtggttgtagataaggaagaattcacag

SEQ ID NO: 430441 - DNA, 33 bp, Homo sapien
tgtcataactaagaaaacagagctaattgaaac

SEQ ID NO: 430442 - DNA, 33 bp, Homo sapien
tgtcataactaagaaagcagagctaattgaaac

SEQ ID NO: 430443 - DNA, 33 bp, Homo sapien
aatgatggagaaatgacaatacttgaaataccc

SEQ ID NO: 430444 - DNA, 33 bp, Homo sapien
aatgatggagaaatgataatacttgaaataccc

SEQ ID NO: 430445 - DNA, 33 bp, Homo sapien
aactaatgcgtctgaccagtaaatttattatca

SEQ ID NO: 430446 - DNA, 33 bp, Homo sapien
aactaatgcgtctgactagtaaatttattatca

SEQ ID NO: 430447 - DNA, 33 bp, Homo sapien
gctaattacacaggagactccatctttgtgctc

SEQ ID NO: 430448 - DNA, 33 bp, Homo sapien
gctaattacacaggaggctccatctttgtgctc

SEQ ID NO: 430449 - DNA, 33 bp, Homo sapien
agagtctgtgagatgacgacagtgcactatggt

SEQ ID NO: 430450 - DNA, 33 bp, Homo sapien
agagtctgtgagatgatgacagtgcactatggt

SEQ ID NO: 430451 - DNA, 33 bp, Homo sapien
agcgatgacagtggtacggaagtagagagggag

SEQ ID NO: 430452 - DNA, 33 bp, Homo sapien
agcgatgacagtggtatggaagtagagagggag

SEQ ID NO: 430453 - DNA, 33 bp, Homo sapien
acaatgaaagcagacaatacaaattttgaagaa

SEQ ID NO: 430454 - DNA, 33 bp, Homo sapien
acaatgaaagcagacagtacaaattttgaagaa

SEQ ID NO: 430455 - DNA, 33 bp, Homo sapien
gagaccactcttggctaacaacgagcacaataa

SEQ ID NO: 430456 - DNA, 33 bp, Homo sapien
gagaccactcttggctgacaacgagcacaataa

SEQ ID NO: 430457 - DNA, 33 bp, Homo sapien
tttgctgaagagtagcaaaaagaatgtttttct

SEQ ID NO: 430458 - DNA, 33 bp, Homo sapien
tttgctgaagagtagcgaaaagaatgtttttct

SEQ ID NO: 430459 - DNA, 33 bp, Homo sapien
caacctctgggtgaggcagaaaagagcttcttc

SEQ ID NO: 430460 - DNA, 33 bp, Homo sapien
caacctctgggtgagggagaaaagagcttcttc

SEQ ID NO: 430461 - DNA, 33 bp, Homo sapien
tgttagagagagagagaactgcaattatagcac

SEQ ID NO: 430462 - DNA, 33 bp, Homo sapien
tgttagagagagagagcactgcaattatagcac

SEQ ID NO: 430463 - DNA, 33 bp, Homo sapien
ctttttacacagatatcagagcccagcatttgg

SEQ ID NO: 430464 - DNA, 33 bp, Homo sapien
ctttttacacagatattagagcccagcatttgg

SEQ ID NO: 430465 - DNA, 33 bp, Homo sapien
acattatctcacttaactgaattcttataactc

SEQ ID NO: 430466 - DNA, 33 bp, Homo sapien
acattatctcacttaattgaattcttataactc

SEQ ID NO: 430467 - DNA, 33 bp, Homo sapien
acacaaggaatattcaaaggatgccaatctaag

SEQ ID NO: 430468 - DNA, 33 bp, Homo sapien
acacaaggaatattcataggatgccaatctaag

SEQ ID NO: 430469 - DNA, 33 bp, Homo sapien
aacttgataagtggtaaaaattctcaggatact

SEQ ID NO: 430470 - DNA, 33 bp, Homo sapien
aacttgataagtggtagaaattctcaggatact

SEQ ID NO: 430471 - DNA, 33 bp, Homo sapien
ctgaaaaatatcttaaacgcagtgtaacttaaa

SEQ ID NO: 430472 - DNA, 33 bp, Homo sapien
ctgaaaaatatcttaagcgcagtgtaacttaaa

SEQ ID NO: 430473 - DNA, 33 bp, Homo sapien
acataatcacaaatcaaaagtttcaaggcttaa

SEQ ID NO: 430474 - DNA, 33 bp, Homo sapien
acataatcacaaatcagaagtttcaaggcttaa

SEQ ID NO: 430475 - DNA, 33 bp, Homo sapien
tctcttccacagttacacatctttcagggagta

SEQ ID NO: 430476 - DNA, 33 bp, Homo sapien
tctcttccacagttacgcatctttcagggagta

SEQ ID NO: 430477 - DNA, 33 bp, Homo sapien
catagctaatatgctgaaaaactagcattagac

SEQ ID NO: 430478 - DNA, 33 bp, Homo sapien
catagctaatatgctgcaaaactagcattagac

SEQ ID NO: 430479 - DNA, 33 bp, Homo sapien
cacttgagaatggtggaaaagggtctaaaacac

SEQ ID NO: 430480 - DNA, 33 bp, Homo sapien
cacttgagaatggtgggaaagggtctaaaacac

SEQ ID NO: 430481 - DNA, 33 bp, Homo sapien
acttttccaccgtggcactatgaaaatttaact

SEQ ID NO: 430482 - DNA, 33 bp, Homo sapien
acttttccaccgtggcgctatgaaaatttaact

SEQ ID NO: 430483 - DNA, 33 bp, Homo sapien
aatacatccactggcacggtgaggaactccagg

SEQ ID NO: 430484 - DNA, 33 bp, Homo sapien
aatacatccactggcagggtgaggaactccagg

SEQ ID NO: 430485 - DNA, 33 bp, Homo sapien
gagccagaagggagaacacgtttcctggcagag

SEQ ID NO: 430486 - DNA, 33 bp, Homo sapien
gagccagaagggagaagacgtttcctggcagag

SEQ ID NO: 430487 - DNA, 33 bp, Homo sapien
caaatcgaaggttcgcagcaaccctgtgtctag

SEQ ID NO: 430488 - DNA, 33 bp, Homo sapien
caaatcgaaggttcgcggcaaccctgtgtctag

SEQ ID NO: 430489 - DNA, 33 bp, Homo sapien
gtatagacgtacaacactatattgcactttgct

SEQ ID NO: 430490 - DNA, 33 bp, Homo sapien
gtatagacgtacaacattatattgcactttgct

SEQ ID NO: 430491 - DNA, 33 bp, Homo sapien
tagctcttaccgtttcacaacaacatatggaac

SEQ ID NO: 430492 - DNA, 33 bp, Homo sapien
tagctcttaccgtttcgcaacaacatatggaac

SEQ ID NO: 430493 - DNA, 33 bp, Homo sapien
gcttcactctgttggcccactcttgaatttctt

SEQ ID NO: 430494 - DNA, 33 bp, Homo sapien
gcttcactctgttggctcactcttgaatttctt

SEQ ID NO: 430495 - DNA, 33 bp, Homo sapien
aagaaatattcttctcaacatcagtcttgccaa

SEQ ID NO: 430496 - DNA, 33 bp, Homo sapien
aagaaatattcttctcgacatcagtcttgccaa

SEQ ID NO: 430497 - DNA, 33 bp, Homo sapien
cggtttttacttaatgaattttgaagcttttta

SEQ ID NO: 430498 - DNA, 33 bp, Homo sapien
cggtttttacttaatgcattttgaagcttttta

SEQ ID NO: 430499 - DNA, 33 bp, Homo sapien
aaataaatctgttcaacatagatgacttatcca

SEQ ID NO: 430500 - DNA, 33 bp, Homo sapien
aaataaatctgttcaatatagatgacttatcca

SEQ ID NO: 430501 - DNA, 33 bp, Homo sapien
atcaaaaggaaagtgcccttgatatattgctgt

SEQ ID NO: 430502 - DNA, 33 bp, Homo sapien
atcaaaaggaaagtgctcttgatatattgctgt

SEQ ID NO: 430503 - DNA, 33 bp, Homo sapien
ctctttgcaaataggcaagtaaccacataaagg

SEQ ID NO: 430504 - DNA, 33 bp, Homo sapien
ctctttgcaaataggcgagtaaccacataaagg

SEQ ID NO: 430505 - DNA, 33 bp, Homo sapien
tctctctttggcttgcagatagctgagttctca

SEQ ID NO: 430506 - DNA, 33 bp, Homo sapien
tctctctttggcttgcggatagctgagttctca

SEQ ID NO: 430507 - DNA, 33 bp, Homo sapien
ccaagatgtcctttaaactcacatgaccccaga

SEQ ID NO: 430508 - DNA, 33 bp, Homo sapien
ccaagatgtcctttaatctcacatgaccccaga

SEQ ID NO: 430509 - DNA, 33 bp, Homo sapien
gataatgtctcacaaccaagagctgtcctgact

SEQ ID NO: 430510 - DNA, 33 bp, Homo sapien
gataatgtctcacaactaagagctgtcctgact

SEQ ID NO: 430511 - DNA, 33 bp, Homo sapien
aggtcattatgcttggaattccatctctgttaa

SEQ ID NO: 430512 - DNA, 33 bp, Homo sapien
aggtcattatgcttgggattccatctctgttaa

SEQ ID NO: 430513 - DNA, 33 bp, Homo sapien
ccttaaatattgttgaagattatactagatatt

SEQ ID NO: 430514 - DNA, 33 bp, Homo sapien
ccttaaatattgttgaggattatactagatatt

SEQ ID NO: 430515 - DNA, 33 bp, Homo sapien
gccagtctacactgccaaagtgtttcacttagc

SEQ ID NO: 430516 - DNA, 33 bp, Homo sapien
gccagtctacactgccgaagtgtttcacttagc

SEQ ID NO: 430517 - DNA, 33 bp, Homo sapien
gcaatcaggatagaaaagtgtgaaggaaggggg

SEQ ID NO: 430518 - DNA, 33 bp, Homo sapien
gcaatcaggatagaaaggtgtgaaggaaggggg

SEQ ID NO: 430519 - DNA, 33 bp, Homo sapien
ggtaaaggtcaatagaaagcctaaagattgaca

SEQ ID NO: 430520 - DNA, 33 bp, Homo sapien
ggtaaaggtcaatagagagcctaaagattgaca

SEQ ID NO: 430521 - DNA, 33 bp, Homo sapien
gtctcatgtcaattaacggttatagcatataga

SEQ ID NO: 430522 - DNA, 33 bp, Homo sapien
gtctcatgtcaattaatggttatagcatataga

SEQ ID NO: 430523 - DNA, 33 bp, Homo sapien
aataaaaaagagcctaacctttatccagtcctt

SEQ ID NO: 430524 - DNA, 33 bp, Homo sapien
aataaaaaagagcctaccctttatccagtcctt

SEQ ID NO: 430525 - DNA, 33 bp, Homo sapien
ccctttcaagttgtcacgatgattcgtatatgg

SEQ ID NO: 430526 - DNA, 33 bp, Homo sapien
ccctttcaagttgtcatgatgattcgtatatgg

SEQ ID NO: 430527 - DNA, 33 bp, Homo sapien
gctaatctttatcacaagcatacatataacttt

SEQ ID NO: 430528 - DNA, 33 bp, Homo sapien
gctaatctttatcacaggcatacatataacttt

SEQ ID NO: 430529 - DNA, 33 bp, Homo sapien
ctgatttttaacctaactaagcattagcctatg

SEQ ID NO: 430530 - DNA, 33 bp, Homo sapien
ctgatttttaacctaagtaagcattagcctatg

SEQ ID NO: 430531 - DNA, 33 bp, Homo sapien
ttctactttttcttggacagtatctattttaat

SEQ ID NO: 430532 - DNA, 33 bp, Homo sapien
ttctactttttcttgggcagtatctattttaat

SEQ ID NO: 430533 - DNA, 33 bp, Homo sapien
aaatatccttaagggactaggacaggcagtatt

SEQ ID NO: 430534 - DNA, 33 bp, Homo sapien
aaatatccttaagggattaggacaggcagtatt

SEQ ID NO: 430535 - DNA, 33 bp, Homo sapien
tagaaatctcagaacactcaacaacgggaatag

SEQ ID NO: 430536 - DNA, 33 bp, Homo sapien
tagaaatctcagaacattcaacaacgggaatag

SEQ ID NO: 430537 - DNA, 33 bp, Homo sapien
tgattctaaatattaaagtggcaaatatttgtt

SEQ ID NO: 430538 - DNA, 33 bp, Homo sapien
tgattctaaatattaacgtggcaaatatttgtt

SEQ ID NO: 430539 - DNA, 33 bp, Homo sapien
aatttgtgtccttggaagccaataattttagga

SEQ ID NO: 430540 - DNA, 33 bp, Homo sapien
aatttgtgtccttggaggccaataattttagga

SEQ ID NO: 430541 - DNA, 33 bp, Homo sapien
cagaagtagcagacacagctagggttgactgga

SEQ ID NO: 430542 - DNA, 33 bp, Homo sapien
cagaagtagcagacacggctagggttgactgga

SEQ ID NO: 430543 - DNA, 33 bp, Homo sapien
aacaaatttaaccttgaattggctgtgctatag

SEQ ID NO: 430544 - DNA, 33 bp, Homo sapien
aacaaatttaaccttggattggctgtgctatag

SEQ ID NO: 430545 - DNA, 33 bp, Homo sapien
gcacttagagaaggtaacttggctatagcacag

SEQ ID NO: 430546 - DNA, 33 bp, Homo sapien
gcacttagagaaggtatcttggctatagcacag

SEQ ID NO: 430547 - DNA, 33 bp, Homo sapien
taacagtgcacacttgaaaatgaaatacttaag

SEQ ID NO: 430548 - DNA, 33 bp, Homo sapien
taacagtgcacacttggaaatgaaatacttaag

SEQ ID NO: 430549 - DNA, 33 bp, Homo sapien
ataatctgagctcatcaattctttacatggatt

SEQ ID NO: 430550 - DNA, 33 bp, Homo sapien
ataatctgagctcatcgattctttacatggatt

SEQ ID NO: 430551 - DNA, 33 bp, Homo sapien
ctgtaatgaaaatttaacaggtagagagtgatt

SEQ ID NO: 430552 - DNA, 33 bp, Homo sapien
ctgtaatgaaaatttagcaggtagagagtgatt

SEQ ID NO: 430553 - DNA, 33 bp, Homo sapien
agcgagatgcccgagacccctctgccagcggag

SEQ ID NO: 430554 - DNA, 33 bp, Homo sapien
agcgagatgcccgagatccctctgccagcggag

SEQ ID NO: 430555 - DNA, 33 bp, Homo sapien
caacgtctataactcaccttatttttaatacag

SEQ ID NO: 430556 - DNA, 33 bp, Homo sapien
caacgtctataactcatcttatttttaatacag

SEQ ID NO: 430557 - DNA, 33 bp, Homo sapien
gagtttccataagtaactgtacaaagagccagt

SEQ ID NO: 430558 - DNA, 33 bp, Homo sapien
gagtttccataagtaattgtacaaagagccagt

SEQ ID NO: 430559 - DNA, 33 bp, Homo sapien
tggaattatgtcctaacgttgtgccaagagcaa

SEQ ID NO: 430560 - DNA, 33 bp, Homo sapien
tggaattatgtcctaatgttgtgccaagagcaa

SEQ ID NO: 430561 - DNA, 33 bp, Homo sapien
gccactcttaggtacaaagtcactgtacccact

SEQ ID NO: 430562 - DNA, 33 bp, Homo sapien
gccactcttaggtacatagtcactgtacccact

SEQ ID NO: 430563 - DNA, 33 bp, Homo sapien
ctggcttctagggctacctctgtcactaaggaa

SEQ ID NO: 430564 - DNA, 33 bp, Homo sapien
ctggcttctagggctagctctgtcactaaggaa

SEQ ID NO: 430565 - DNA, 33 bp, Homo sapien
caggcaaggtttataacgtatgtctagcctttt

SEQ ID NO: 430566 - DNA, 33 bp, Homo sapien
caggcaaggtttataatgtatgtctagcctttt

SEQ ID NO: 430567 - DNA, 33 bp, Homo sapien
ccaacaacttgtagctcaaaatagtgccttttg

SEQ ID NO: 430568 - DNA, 33 bp, Homo sapien
ccaacaacttgtagctgaaaatagtgccttttg

SEQ ID NO: 430569 - DNA, 33 bp, Homo sapien
acaattcacagcttggaatttgaaggcaaacac

SEQ ID NO: 430570 - DNA, 33 bp, Homo sapien
acaattcacagcttgggatttgaaggcaaacac

SEQ ID NO: 430571 - DNA, 33 bp, Homo sapien
ataaaattcagcctcacctttagcatttcaatt

SEQ ID NO: 430572 - DNA, 33 bp, Homo sapien
ataaaattcagcctcatctttagcatttcaatt

SEQ ID NO: 430573 - DNA, 33 bp, Homo sapien
ttcgattattaaatccagcaaaaatgtaaaccc

SEQ ID NO: 430574 - DNA, 33 bp, Homo sapien
ttcgattattaaatccggcaaaaatgtaaaccc

SEQ ID NO: 430575 - DNA, 33 bp, Homo sapien
tggatttccaccctgaacttgaaaatagaaaga

SEQ ID NO: 430576 - DNA, 33 bp, Homo sapien
tggatttccaccctgagcttgaaaatagaaaga

SEQ ID NO: 430577 - DNA, 33 bp, Homo sapien
gaggagctttatgatacagtttaagacaatgaa

SEQ ID NO: 430578 - DNA, 33 bp, Homo sapien
gaggagctttatgatatagtttaagacaatgaa

SEQ ID NO: 430579 - DNA, 33 bp, Homo sapien
ctcgcttgtggcctgcccttgagggaatctgaa

SEQ ID NO: 430580 - DNA, 33 bp, Homo sapien
ctcgcttgtggcctgcgcttgagggaatctgaa

SEQ ID NO: 430581 - DNA, 33 bp, Homo sapien
cattgtagatacaggcaatgaaagaacaatgcc

SEQ ID NO: 430582 - DNA, 33 bp, Homo sapien
cattgtagatacaggcgatgaaagaacaatgcc

SEQ ID NO: 430583 - DNA, 33 bp, Homo sapien
ctattacgaataaagccactatgaacattcatg

SEQ ID NO: 430584 - DNA, 33 bp, Homo sapien
ctattacgaataaagctactatgaacattcatg

SEQ ID NO: 430585 - DNA, 33 bp, Homo sapien
atgcttagtaaacaccgctttagtagctgcata

SEQ ID NO: 430586 - DNA, 33 bp, Homo sapien
atgcttagtaaacacctctttagtagctgcata

SEQ ID NO: 430587 - DNA, 33 bp, Homo sapien
cagctgtcagaaccccaacaacaggtatatcgc

SEQ ID NO: 430588 - DNA, 33 bp, Homo sapien
cagctgtcagaacccccacaacaggtatatcgc

SEQ ID NO: 430589 - DNA, 33 bp, Homo sapien
agaggataaagagaccaaggtgcagagggaaca

SEQ ID NO: 430590 - DNA, 33 bp, Homo sapien
agaggataaagagaccgaggtgcagagggaaca

SEQ ID NO: 430591 - DNA, 33 bp, Homo sapien
ctcagagaatcagccaagcatattttagtttaa

SEQ ID NO: 430592 - DNA, 33 bp, Homo sapien
ctcagagaatcagccaggcatattttagtttaa

SEQ ID NO: 430593 - DNA, 33 bp, Homo sapien
ggacctgcgcagagaacgagaacacaaagttaa

SEQ ID NO: 430594 - DNA, 33 bp, Homo sapien
ggacctgcgcagagaatgagaacacaaagttaa

SEQ ID NO: 430595 - DNA, 33 bp, Homo sapien
aatagagttcctaacaatcatgatatccatgat

SEQ ID NO: 430596 - DNA, 33 bp, Homo sapien
aatagagttcctaacagtcatgatatccatgat

SEQ ID NO: 430597 - DNA, 33 bp, Homo sapien
aatgtgttgagaaaaaatactggggctgctaat

SEQ ID NO: 430598 - DNA, 33 bp, Homo sapien
aatgtgttgagaaaaattactggggctgctaat

SEQ ID NO: 430599 - DNA, 33 bp, Homo sapien
atacgatgtatcttggaagaatgactgtgtaca

SEQ ID NO: 430600 - DNA, 33 bp, Homo sapien
atacgatgtatcttggcagaatgactgtgtaca

SEQ ID NO: 430601 - DNA, 33 bp, Homo sapien
cgtaggttcatggatacggtgactgttttcact

SEQ ID NO: 430602 - DNA, 33 bp, Homo sapien
cgtaggttcatggatatggtgactgttttcact

SEQ ID NO: 430603 - DNA, 33 bp, Homo sapien
ctatcctggaagcgatgatattagacggccaat

SEQ ID NO: 430604 - DNA, 33 bp, Homo sapien
ctatcctggaagcgattatattagacggccaat

SEQ ID NO: 430605 - DNA, 33 bp, Homo sapien
tctagaacacattagactatcaataaatgtctg

SEQ ID NO: 430606 - DNA, 33 bp, Homo sapien
tctagaacacattagagtatcaataaatgtctg

SEQ ID NO: 430607 - DNA, 33 bp, Homo sapien
aaaaggggtattatgaggcacaaatggtagaga

SEQ ID NO: 430608 - DNA, 33 bp, Homo sapien
aaaaggggtattatgatgcacaaatggtagaga

SEQ ID NO: 430609 - DNA, 33 bp, Homo sapien
aagctagatcactagtaacaatgagcagtctta

SEQ ID NO: 430610 - DNA, 33 bp, Homo sapien
aagctagatcactagtcacaatgagcagtctta

SEQ ID NO: 430611 - DNA, 33 bp, Homo sapien
atgataactggcatgggaattagactcatggta

SEQ ID NO: 430612 - DNA, 33 bp, Homo sapien
atgataactggcatggtaattagactcatggta

SEQ ID NO: 430613 - DNA, 33 bp, Homo sapien
cagcacagactgtgtaggttttcaggagatttc

SEQ ID NO: 430614 - DNA, 33 bp, Homo sapien
cagcacagactgtgtatgttttcaggagatttc

SEQ ID NO: 430615 - DNA, 33 bp, Homo sapien
gacctatgtttcaaaacatacatgaccctgagc

SEQ ID NO: 430616 - DNA, 33 bp, Homo sapien
gacctatgtttcaaaatatacatgaccctgagc

SEQ ID NO: 430617 - DNA, 33 bp, Homo sapien
accatccctcaaggtaccactcacatgccatgt

SEQ ID NO: 430618 - DNA, 33 bp, Homo sapien
accatccctcaaggtagcactcacatgccatgt

SEQ ID NO: 430619 - DNA, 33 bp, Homo sapien
aatgtcctggaatttaagaagtccagtgtggct

SEQ ID NO: 430620 - DNA, 33 bp, Homo sapien
aatgtcctggaatttatgaagtccagtgtggct

SEQ ID NO: 430621 - DNA, 33 bp, Homo sapien
tatttcttaggatagacagaaagagacagaaag

SEQ ID NO: 430622 - DNA, 33 bp, Homo sapien
tatttcttaggatagatagaaagagacagaaag

SEQ ID NO: 430623 - DNA, 33 bp, Homo sapien
tgttatctctgtaagacatgatgcttctctcta

SEQ ID NO: 430624 - DNA, 33 bp, Homo sapien
tgttatctctgtaagatatgatgcttctctcta

SEQ ID NO: 430625 - DNA, 33 bp, Homo sapien
gatttcaaatttgcaaccttttctgtatatcaa

SEQ ID NO: 430626 - DNA, 33 bp, Homo sapien
gatttcaaatttgcaagcttttctgtatatcaa

SEQ ID NO: 430627 - DNA, 33 bp, Homo sapien
ccctagtgaaagtaaccatgacttaaatcagct

SEQ ID NO: 430628 - DNA, 33 bp, Homo sapien
ccctagtgaaagtaacgatgacttaaatcagct

SEQ ID NO: 430629 - DNA, 33 bp, Homo sapien
tgaaatacagctattagccctgtgttacacata

SEQ ID NO: 430630 - DNA, 33 bp, Homo sapien
tgaaatacagctattatccctgtgttacacata

SEQ ID NO: 430631 - DNA, 33 bp, Homo sapien
tatgttcatttacttacgttgaccccctgcaac

SEQ ID NO: 430632 - DNA, 33 bp, Homo sapien
tatgttcatttacttatgttgaccccctgcaac

SEQ ID NO: 430633 - DNA, 33 bp, Homo sapien
cacaggcaatcctctcaagcatccacagcttcc

SEQ ID NO: 430634 - DNA, 33 bp, Homo sapien
cacaggcaatcctctcgagcatccacagcttcc

SEQ ID NO: 430635 - DNA, 33 bp, Homo sapien
ggggtaaatacttccaagcattggccagacaat

SEQ ID NO: 430636 - DNA, 33 bp, Homo sapien
ggggtaaatacttccaggcattggccagacaat

SEQ ID NO: 430637 - DNA, 33 bp, Homo sapien
atatctcacaaaatacccccttccttattgtta

SEQ ID NO: 430638 - DNA, 33 bp, Homo sapien
atatctcacaaaatactcccttccttattgtta

SEQ ID NO: 430639 - DNA, 33 bp, Homo sapien
gtgtgtgtattagtaccgcaacctgtttaaaaa

SEQ ID NO: 430640 - DNA, 33 bp, Homo sapien
gtgtgtgtattagtactgcaacctgtttaaaaa

SEQ ID NO: 430641 - DNA, 33 bp, Homo sapien
ttcattaaaccccagaagacctctatctccaat

SEQ ID NO: 430642 - DNA, 33 bp, Homo sapien
ttcattaaaccccagaggacctctatctccaat

SEQ ID NO: 430643 - DNA, 33 bp, Homo sapien
tgaagaagcttgaccaaagtgaaagaagcttac

SEQ ID NO: 430644 - DNA, 33 bp, Homo sapien
tgaagaagcttgaccatagtgaaagaagcttac

SEQ ID NO: 430645 - DNA, 33 bp, Homo sapien
cactcacaaaaggaataaccttgactattctat

SEQ ID NO: 430646 - DNA, 33 bp, Homo sapien
cactcacaaaaggaatcaccttgactattctat

SEQ ID NO: 430647 - DNA, 33 bp, Homo sapien
actgcttcagctaccacgtaacactggagtacc

SEQ ID NO: 430648 - DNA, 33 bp, Homo sapien
actgcttcagctaccatgtaacactggagtacc

SEQ ID NO: 430649 - DNA, 33 bp, Homo sapien
acagtttcagtaaatacgtggaggatgcagtgt

SEQ ID NO: 430650 - DNA, 33 bp, Homo sapien
acagtttcagtaaatatgtggaggatgcagtgt

SEQ ID NO: 430651 - DNA, 33 bp, Homo sapien
taagtcacttaatgtcccaaagctcatattttt

SEQ ID NO: 430652 - DNA, 33 bp, Homo sapien
taagtcacttaatgtctcaaagctcatattttt

SEQ ID NO: 430653 - DNA, 33 bp, Homo sapien
gctctgataactgcaacatctgatgtgagaggt

SEQ ID NO: 430654 - DNA, 33 bp, Homo sapien
gctctgataactgcaatatctgatgtgagaggt

SEQ ID NO: 430655 - DNA, 33 bp, Homo sapien
ttcccaggtacagactaactactcgatgcacgt

SEQ ID NO: 430656 - DNA, 33 bp, Homo sapien
ttcccaggtacagactgactactcgatgcacgt

SEQ ID NO: 430657 - DNA, 33 bp, Homo sapien
ttccttatccattaaacgagtagaataatactg

SEQ ID NO: 430658 - DNA, 33 bp, Homo sapien
ttccttatccattaaaggagtagaataatactg

SEQ ID NO: 430659 - DNA, 33 bp, Homo sapien
caacataaatgatcgaatatagattgtccttag

SEQ ID NO: 430660 - DNA, 33 bp, Homo sapien
caacataaatgatcgagtatagattgtccttag

SEQ ID NO: 430661 - DNA, 33 bp, Homo sapien
aaggtaagacctgccaaataaattttcctgagc

SEQ ID NO: 430662 - DNA, 33 bp, Homo sapien
aaggtaagacctgccagataaattttcctgagc

SEQ ID NO: 430663 - DNA, 33 bp, Homo sapien
acactggtctaacaaactgttttacatctgagc

SEQ ID NO: 430664 - DNA, 33 bp, Homo sapien
acactggtctaacaaattgttttacatctgagc

SEQ ID NO: 430665 - DNA, 33 bp, Homo sapien
tgttagaccagtgtagcagtagctgtcagtaat

SEQ ID NO: 430666 - DNA, 33 bp, Homo sapien
tgttagaccagtgtagtagtagctgtcagtaat

SEQ ID NO: 430667 - DNA, 33 bp, Homo sapien
gcccacagtccttagaatcagcatggcaaaccc

SEQ ID NO: 430668 - DNA, 33 bp, Homo sapien
gcccacagtccttagactcagcatggcaaaccc

SEQ ID NO: 430669 - DNA, 33 bp, Homo sapien
catcataaggcacaacacaaatgtgaaattatt

SEQ ID NO: 430670 - DNA, 33 bp, Homo sapien
catcataaggcacaacgcaaatgtgaaattatt

SEQ ID NO: 430671 - DNA, 33 bp, Homo sapien
ggaaggtctccgaggactaagaagacattaagg

SEQ ID NO: 430672 - DNA, 33 bp, Homo sapien
ggaaggtctccgaggagtaagaagacattaagg

SEQ ID NO: 430673 - DNA, 33 bp, Homo sapien
aagcagaccacaacaaaaaataaagccacttac

SEQ ID NO: 430674 - DNA, 33 bp, Homo sapien
aagcagaccacaacaagaaataaagccacttac

SEQ ID NO: 430675 - DNA, 33 bp, Homo sapien
aggaaaccatttccagcatatgtgtcaatcaag

SEQ ID NO: 430676 - DNA, 33 bp, Homo sapien
aggaaaccatttccagtatatgtgtcaatcaag

SEQ ID NO: 430677 - DNA, 33 bp, Homo sapien
aacatcacccttctgaagtatttttagcattca

SEQ ID NO: 430678 - DNA, 33 bp, Homo sapien
aacatcacccttctgaggtatttttagcattca

SEQ ID NO: 430679 - DNA, 33 bp, Homo sapien
gtttcaccaaatcctaacagcagaactttgggc

SEQ ID NO: 430680 - DNA, 33 bp, Homo sapien
gtttcaccaaatcctagcagcagaactttgggc

SEQ ID NO: 430681 - DNA, 33 bp, Homo sapien
aagctgagtgccattacgtataccgtttcttca

SEQ ID NO: 430682 - DNA, 33 bp, Homo sapien
aagctgagtgccattatgtataccgtttcttca

SEQ ID NO: 430683 - DNA, 33 bp, Homo sapien
ctgaggtggggcttacaaattagtatttcgaag

SEQ ID NO: 430684 - DNA, 33 bp, Homo sapien
ctgaggtggggcttacgaattagtatttcgaag

SEQ ID NO: 430685 - DNA, 33 bp, Homo sapien
atagagtccacagtgacgatcactccttctatt

SEQ ID NO: 430686 - DNA, 33 bp, Homo sapien
atagagtccacagtgatgatcactccttctatt

SEQ ID NO: 430687 - DNA, 33 bp, Homo sapien
agaatagattaatataccagtcaagtgtttgcc

SEQ ID NO: 430688 - DNA, 33 bp, Homo sapien
agaatagattaatatagcagtcaagtgtttgcc

SEQ ID NO: 430689 - DNA, 33 bp, Homo sapien
taaacactatttgtgccagtaaaagagaactgg

SEQ ID NO: 430690 - DNA, 33 bp, Homo sapien
taaacactatttgtgctagtaaaagagaactgg

SEQ ID NO: 430691 - DNA, 33 bp, Homo sapien
ttcctgacttttgccaatgaaatcttaggggaa

SEQ ID NO: 430692 - DNA, 33 bp, Homo sapien
ttcctgacttttgccagtgaaatcttaggggaa

SEQ ID NO: 430693 - DNA, 33 bp, Homo sapien
agccaaacaaactgaagttcaatttagggctaa

SEQ ID NO: 430694 - DNA, 33 bp, Homo sapien
agccaaacaaactgaatttcaatttagggctaa

SEQ ID NO: 430695 - DNA, 33 bp, Homo sapien
agttctgtgtaagcacacagggaattatgccag

SEQ ID NO: 430696 - DNA, 33 bp, Homo sapien
agttctgtgtaagcacgcagggaattatgccag

SEQ ID NO: 430697 - DNA, 33 bp, Homo sapien
tttgaaatcatttaagactcatataaaaagcag

SEQ ID NO: 430698 - DNA, 33 bp, Homo sapien
tttgaaatcatttaagcctcatataaaaagcag

SEQ ID NO: 430699 - DNA, 33 bp, Homo sapien
cacagaatggacaaataacttaaaaagattgaa

SEQ ID NO: 430700 - DNA, 33 bp, Homo sapien
cacagaatggacaaatgacttaaaaagattgaa

SEQ ID NO: 430701 - DNA, 33 bp, Homo sapien
gggtagccacattgacaaatggaatagaataga

SEQ ID NO: 430702 - DNA, 33 bp, Homo sapien
gggtagccacattgaccaatggaatagaataga

SEQ ID NO: 430703 - DNA, 33 bp, Homo sapien
aataggctggctaatgccaaagcggcgatcaac

SEQ ID NO: 430704 - DNA, 33 bp, Homo sapien
aataggctggctaatggcaaagcggcgatcaac

SEQ ID NO: 430705 - DNA, 33 bp, Homo sapien
aatttagctgatgttaggtacctcaaaacttac

SEQ ID NO: 430706 - DNA, 33 bp, Homo sapien
aatttagctgatgttatgtacctcaaaacttac

SEQ ID NO: 430707 - DNA, 33 bp, Homo sapien
taaattaggtggatcacaattcctggcactcag

SEQ ID NO: 430708 - DNA, 33 bp, Homo sapien
taaattaggtggatcataattcctggcactcag

SEQ ID NO: 430709 - DNA, 33 bp, Homo sapien
gatgtggaaatgaatgaaagtttattgcaatct

SEQ ID NO: 430710 - DNA, 33 bp, Homo sapien
gatgtggaaatgaatgcaagtttattgcaatct

SEQ ID NO: 430711 - DNA, 33 bp, Homo sapien
agttattcacagagaaacattccccaccaagca

SEQ ID NO: 430712 - DNA, 33 bp, Homo sapien
agttattcacagagaagcattccccaccaagca

SEQ ID NO: 430713 - DNA, 33 bp, Homo sapien
accctctcctgtcagacaagcattctgttcctt

SEQ ID NO: 430714 - DNA, 33 bp, Homo sapien
accctctcctgtcagataagcattctgttcctt

SEQ ID NO: 430715 - DNA, 33 bp, Homo sapien
ttttcatttagaaaaacccacacttcttatcta

SEQ ID NO: 430716 - DNA, 33 bp, Homo sapien
ttttcatttagaaaaatccacacttcttatcta

SEQ ID NO: 430717 - DNA, 33 bp, Homo sapien
aatttgaaggaaataaagatattaagcacttgt

SEQ ID NO: 430718 - DNA, 33 bp, Homo sapien
aatttgaaggaaataaggatattaagcacttgt

SEQ ID NO: 430719 - DNA, 33 bp, Homo sapien
atgtctggccacaaaaactacaggaacatgaaa

SEQ ID NO: 430720 - DNA, 33 bp, Homo sapien
atgtctggccacaaaatctacaggaacatgaaa

SEQ ID NO: 430721 - DNA, 33 bp, Homo sapien
cagaagtgagtttgaaatagcagcttgatacat

SEQ ID NO: 430722 - DNA, 33 bp, Homo sapien
cagaagtgagtttgaagtagcagcttgatacat

SEQ ID NO: 430723 - DNA, 33 bp, Homo sapien
atcatggcataaatgtaaaatgtaagactacaa

SEQ ID NO: 430724 - DNA, 33 bp, Homo sapien
atcatggcataaatgtgaaatgtaagactacaa

SEQ ID NO: 430725 - DNA, 33 bp, Homo sapien
acataacatctaaaaaactatggaactaatgaa

SEQ ID NO: 430726 - DNA, 33 bp, Homo sapien
acataacatctaaaaatctatggaactaatgaa

SEQ ID NO: 430727 - DNA, 33 bp, Homo sapien
gtttccttgcttcacaatcaattcacatctcac

SEQ ID NO: 430728 - DNA, 33 bp, Homo sapien
gtttccttgcttcacagtcaattcacatctcac

SEQ ID NO: 430729 - DNA, 33 bp, Homo sapien
tagtactggggaattaagaaaatatagtataca

SEQ ID NO: 430730 - DNA, 33 bp, Homo sapien
tagtactggggaattatgaaaatatagtataca

SEQ ID NO: 430731 - DNA, 33 bp, Homo sapien
agctaaaatgtgtttgcacgtatgactgtggat

SEQ ID NO: 430732 - DNA, 33 bp, Homo sapien
agctaaaatgtgtttgtacgtatgactgtggat

SEQ ID NO: 430733 - DNA, 33 bp, Homo sapien
ggctgtaatactgtgaactagcaagtttaagac

SEQ ID NO: 430734 - DNA, 33 bp, Homo sapien
ggctgtaatactgtgagctagcaagtttaagac

SEQ ID NO: 430735 - DNA, 33 bp, Homo sapien
tatagcatttgcaccacattgttcataagtatg

SEQ ID NO: 430736 - DNA, 33 bp, Homo sapien
tatagcatttgcaccatattgttcataagtatg

SEQ ID NO: 430737 - DNA, 33 bp, Homo sapien
gttcataagtatgtcaaatttggttcctgaccc

SEQ ID NO: 430738 - DNA, 33 bp, Homo sapien
gttcataagtatgtcacatttggttcctgaccc

SEQ ID NO: 430739 - DNA, 33 bp, Homo sapien
tttagggtaaactccaaccactctggagtctgc

SEQ ID NO: 430740 - DNA, 33 bp, Homo sapien
tttagggtaaactccatccactctggagtctgc

SEQ ID NO: 430741 - DNA, 33 bp, Homo sapien
ttagtttacgatggccaaggatgtgtgggtttt

SEQ ID NO: 430742 - DNA, 33 bp, Homo sapien
ttagtttacgatggccgaggatgtgtgggtttt

SEQ ID NO: 430743 - DNA, 33 bp, Homo sapien
atcctgcctccataccaagtttctaggttccta

SEQ ID NO: 430744 - DNA, 33 bp, Homo sapien
atcctgcctccataccgagtttctaggttccta

SEQ ID NO: 430745 - DNA, 33 bp, Homo sapien
tctcctcagggcaccaacttttctcagtacccc

SEQ ID NO: 430746 - DNA, 33 bp, Homo sapien
tctcctcagggcaccagcttttctcagtacccc

SEQ ID NO: 430747 - DNA, 33 bp, Homo sapien
tatcaatacttgaccaacttgtttgatttatac

SEQ ID NO: 430748 - DNA, 33 bp, Homo sapien
tatcaatacttgaccatcttgtttgatttatac

SEQ ID NO: 430749 - DNA, 33 bp, Homo sapien
ctgtgatcatttttcccacgaggaagacagtaa

SEQ ID NO: 430750 - DNA, 33 bp, Homo sapien
ctgtgatcatttttccgacgaggaagacagtaa

SEQ ID NO: 430751 - DNA, 33 bp, Homo sapien
ttaatgagagtgataccgaacatagtactaagg

SEQ ID NO: 430752 - DNA, 33 bp, Homo sapien
ttaatgagagtgatactgaacatagtactaagg

SEQ ID NO: 430753 - DNA, 33 bp, Homo sapien
caaggaatgatgagctaaatgccaaaataaagc

SEQ ID NO: 430754 - DNA, 33 bp, Homo sapien
caaggaatgatgagctgaatgccaaaataaagc

SEQ ID NO: 430755 - DNA, 33 bp, Homo sapien
atagaaaatatggctaagttactgagtttgtta

SEQ ID NO: 430756 - DNA, 33 bp, Homo sapien
atagaaaatatggctatgttactgagtttgtta

SEQ ID NO: 430757 - DNA, 33 bp, Homo sapien
acactgacgttttgcacataagaatactgttgg

SEQ ID NO: 430758 - DNA, 33 bp, Homo sapien
acactgacgttttgcagataagaatactgttgg

SEQ ID NO: 430759 - DNA, 33 bp, Homo sapien
agcacttttccagaaacgcaacacaatctgtgg

SEQ ID NO: 430760 - DNA, 33 bp, Homo sapien
agcacttttccagaaatgcaacacaatctgtgg

SEQ ID NO: 430761 - DNA, 33 bp, Homo sapien
aaaaaggcaatttaaaatctagaaagagatcta

SEQ ID NO: 430762 - DNA, 33 bp, Homo sapien
aaaaaggcaatttaaagtctagaaagagatcta

SEQ ID NO: 430763 - DNA, 33 bp, Homo sapien
atagtccctcagagaaatggtccattaaaatac

SEQ ID NO: 430764 - DNA, 33 bp, Homo sapien
atagtccctcagagaattggtccattaaaatac

SEQ ID NO: 430765 - DNA, 33 bp, Homo sapien
atgttcttgaaaaacaccttaggatttattcaa

SEQ ID NO: 430766 - DNA, 33 bp, Homo sapien
atgttcttgaaaaacatcttaggatttattcaa

SEQ ID NO: 430767 - DNA, 33 bp, Homo sapien
ggcaatgaaaaatgtacggctcttcctaggaag

SEQ ID NO: 430768 - DNA, 33 bp, Homo sapien
ggcaatgaaaaatgtatggctcttcctaggaag

SEQ ID NO: 430769 - DNA, 33 bp, Homo sapien
ttcccttcaggcaactaagcgtttattaaccag

SEQ ID NO: 430770 - DNA, 33 bp, Homo sapien
ttcccttcaggcaactgagcgtttattaaccag

SEQ ID NO: 430771 - DNA, 33 bp, Homo sapien
tgctggagcttattaactatgagccattgggtt

SEQ ID NO: 430772 - DNA, 33 bp, Homo sapien
tgctggagcttattaattatgagccattgggtt

SEQ ID NO: 430773 - DNA, 33 bp, Homo sapien
tcttccttcccttaaagctatttgatgatgtca

SEQ ID NO: 430774 - DNA, 33 bp, Homo sapien
tcttccttcccttaaatctatttgatgatgtca

SEQ ID NO: 430775 - DNA, 33 bp, Homo sapien
tgacccttgcactcccaaattccttaattgcag

SEQ ID NO: 430776 - DNA, 33 bp, Homo sapien
tgacccttgcactcccgaattccttaattgcag

SEQ ID NO: 430777 - DNA, 33 bp, Homo sapien
cacttccatatgtcccagcacatgctccagact

SEQ ID NO: 430778 - DNA, 33 bp, Homo sapien
cacttccatatgtcccggcacatgctccagact

SEQ ID NO: 430779 - DNA, 33 bp, Homo sapien
tctgaactcacacaaaatatttgctgtttttta

SEQ ID NO: 430780 - DNA, 33 bp, Homo sapien
tctgaactcacacaaactatttgctgtttttta

SEQ ID NO: 430781 - DNA, 33 bp, Homo sapien
gttcccacacacaatgaaagtgtcaagagcagc

SEQ ID NO: 430782 - DNA, 33 bp, Homo sapien
gttcccacacacaatggaagtgtcaagagcagc

SEQ ID NO: 430783 - DNA, 33 bp, Homo sapien
ttattgagttatgtggaaaagatggcttgtatt

SEQ ID NO: 430784 - DNA, 33 bp, Homo sapien
ttattgagttatgtggtaaagatggcttgtatt

SEQ ID NO: 430785 - DNA, 33 bp, Homo sapien
ggggccgctaaggaaactgttccctgaatgccg

SEQ ID NO: 430786 - DNA, 33 bp, Homo sapien
ggggccgctaaggaaagtgttccctgaatgccg

SEQ ID NO: 430787 - DNA, 33 bp, Homo sapien
tgtactttgagcatgaaatttcaaacccaggta

SEQ ID NO: 430788 - DNA, 33 bp, Homo sapien
tgtactttgagcatgagatttcaaacccaggta

SEQ ID NO: 430789 - DNA, 33 bp, Homo sapien
tgtcttgtatagattacgagtacacagaaggtg

SEQ ID NO: 430790 - DNA, 33 bp, Homo sapien
tgtcttgtatagattaggagtacacagaaggtg

SEQ ID NO: 430791 - DNA, 33 bp, Homo sapien
aaaatggtggagatacaatatgcctgtcaattt

SEQ ID NO: 430792 - DNA, 33 bp, Homo sapien
aaaatggtggagatactatatgcctgtcaattt

SEQ ID NO: 430793 - DNA, 33 bp, Homo sapien
gtccatacccaaactaaagtgtgatgtgcaaga

SEQ ID NO: 430794 - DNA, 33 bp, Homo sapien
gtccatacccaaactacagtgtgatgtgcaaga

SEQ ID NO: 430795 - DNA, 33 bp, Homo sapien
taactctgatgttaaacttcaccactgcacctt

SEQ ID NO: 430796 - DNA, 33 bp, Homo sapien
taactctgatgttaaatttcaccactgcacctt

SEQ ID NO: 430797 - DNA, 33 bp, Homo sapien
ttaacatcatgactttaaaaaatctgtcattta

SEQ ID NO: 430798 - DNA, 33 bp, Homo sapien
ttaacatcatgacttttaaaaatctgtcattta

SEQ ID NO: 430799 - DNA, 33 bp, Homo sapien
ttagcaacactgtacaccaatgatttcaaatgt

SEQ ID NO: 430800 - DNA, 33 bp, Homo sapien
ttagcaacactgtacatcaatgatttcaaatgt

SEQ ID NO: 430801 - DNA, 33 bp, Homo sapien
tagtttcattccaatacgtgctggtctggtcat

SEQ ID NO: 430802 - DNA, 33 bp, Homo sapien
tagtttcattccaatatgtgctggtctggtcat

SEQ ID NO: 430803 - DNA, 33 bp, Homo sapien
atatgccctctctcagcccagtgtcctcagata

SEQ ID NO: 430804 - DNA, 33 bp, Homo sapien
atatgccctctctcagtccagtgtcctcagata

SEQ ID NO: 430805 - DNA, 33 bp, Homo sapien
aatgtcaaaacatacaagtcatccgaattaagt

SEQ ID NO: 430806 - DNA, 33 bp, Homo sapien
aatgtcaaaacatacaggtcatccgaattaagt

SEQ ID NO: 430807 - DNA, 33 bp, Homo sapien
tacaggcaagctggcccacaaagctgaaggtta

SEQ ID NO: 430808 - DNA, 33 bp, Homo sapien
tacaggcaagctggcctacaaagctgaaggtta

SEQ ID NO: 430809 - DNA, 33 bp, Homo sapien
aacaagagttggaatacgggcagggatgagcct

SEQ ID NO: 430810 - DNA, 33 bp, Homo sapien
aacaagagttggaatatgggcagggatgagcct

SEQ ID NO: 430811 - DNA, 33 bp, Homo sapien
ccaaaactttatgataaaaggtccacaatcctt

SEQ ID NO: 430812 - DNA, 33 bp, Homo sapien
ccaaaactttatgatagaaggtccacaatcctt

SEQ ID NO: 430813 - DNA, 33 bp, Homo sapien
agccccgtttccaagcagaatgatcttagaagc

SEQ ID NO: 430814 - DNA, 33 bp, Homo sapien
agccccgtttccaagcggaatgatcttagaagc

SEQ ID NO: 430815 - DNA, 33 bp, Homo sapien
tggatggaatcccaaaacatagaaaagtaagtc

SEQ ID NO: 430816 - DNA, 33 bp, Homo sapien
tggatggaatcccaaaccatagaaaagtaagtc

SEQ ID NO: 430817 - DNA, 33 bp, Homo sapien
catagagtctgttctaaataagtacttgccgaa

SEQ ID NO: 430818 - DNA, 33 bp, Homo sapien
catagagtctgttctagataagtacttgccgaa

SEQ ID NO: 430819 - DNA, 33 bp, Homo sapien
taaaatgaattgggtacgttttgctgtgacaaa

SEQ ID NO: 430820 - DNA, 33 bp, Homo sapien
taaaatgaattgggtatgttttgctgtgacaaa

SEQ ID NO: 430821 - DNA, 33 bp, Homo sapien
tgtttttgagaatgcacaattaattgcacttga

SEQ ID NO: 430822 - DNA, 33 bp, Homo sapien
tgtttttgagaatgcagaattaattgcacttga

SEQ ID NO: 430823 - DNA, 33 bp, Homo sapien
cttctacccacctttacgtctgagataccatca

SEQ ID NO: 430824 - DNA, 33 bp, Homo sapien
cttctacccacctttatgtctgagataccatca

SEQ ID NO: 430825 - DNA, 33 bp, Homo sapien
gctactagagatggggaatattatgtcagccat

SEQ ID NO: 430826 - DNA, 33 bp, Homo sapien
gctactagagatggggcatattatgtcagccat

SEQ ID NO: 430827 - DNA, 33 bp, Homo sapien
ccaactatggtccataccagctgacactgaaga

SEQ ID NO: 430828 - DNA, 33 bp, Homo sapien
ccaactatggtccatatcagctgacactgaaga

SEQ ID NO: 430829 - DNA, 33 bp, Homo sapien
ccccctcctaaaaacaacaccacctcaacgaaa

SEQ ID NO: 430830 - DNA, 33 bp, Homo sapien
ccccctcctaaaaacaccaccacctcaacgaaa

SEQ ID NO: 430831 - DNA, 33 bp, Homo sapien
tacagaaatacccacaaaagtagcaaaatacat

SEQ ID NO: 430832 - DNA, 33 bp, Homo sapien
tacagaaatacccacacaagtagcaaaatacat

SEQ ID NO: 430833 - DNA, 33 bp, Homo sapien
ataaggctaagagagacagactgaaaggttaga

SEQ ID NO: 430834 - DNA, 33 bp, Homo sapien
ataaggctaagagagagagactgaaaggttaga

SEQ ID NO: 430835 - DNA, 33 bp, Homo sapien
atgaaatagcctaacacatttctcagaccatag

SEQ ID NO: 430836 - DNA, 33 bp, Homo sapien
atgaaatagcctaacatatttctcagaccatag

SEQ ID NO: 430837 - DNA, 33 bp, Homo sapien
tttgtcttcaactgaaaggtcatttttatgcaa

SEQ ID NO: 430838 - DNA, 33 bp, Homo sapien
tttgtcttcaactgaagggtcatttttatgcaa

SEQ ID NO: 430839 - DNA, 33 bp, Homo sapien
caataaggtacatccactgagcaaaatctcagg

SEQ ID NO: 430840 - DNA, 33 bp, Homo sapien
caataaggtacatccattgagcaaaatctcagg

SEQ ID NO: 430841 - DNA, 33 bp, Homo sapien
atgtaccacagcttaactggaagaggaagcccg

SEQ ID NO: 430842 - DNA, 33 bp, Homo sapien
atgtaccacagcttaattggaagaggaagcccg

SEQ ID NO: 430843 - DNA, 33 bp, Homo sapien; identical to SEQ ID NO: 430841

SEQ ID NO: 430844 - DNA, 33 bp, Homo sapien; identical to SEQ ID NO: 430842

SEQ ID NO: 430845 - DNA, 33 bp, Homo sapien
taacatccatgaaaaacgtacatggctgcttat

SEQ ID NO: 430846 - DNA, 33 bp, Homo sapien
taacatccatgaaaaatgtacatggctgcttat

SEQ ID NO: 430847 - DNA, 33 bp, Homo sapien
tacctttctcaccctaaccttttcattaggcct

SEQ ID NO: 430848 - DNA, 33 bp, Homo sapien
tacctttctcaccctatccttttcattaggcct

SEQ ID NO: 430849 - DNA, 33 bp, Homo sapien
tcatttgataaaagggccatgctactttaaaca

SEQ ID NO: 430850 - DNA, 33 bp, Homo sapien
tcatttgataaaagggtcatgctactttaaaca

SEQ ID NO: 430851 - DNA, 33 bp, Homo sapien
gttttgcctcccttcaaatctatccttcgtgtt

SEQ ID NO: 430852 - DNA, 33 bp, Homo sapien
gttttgcctcccttcagatctatccttcgtgtt

SEQ ID NO: 430853 - DNA, 33 bp, Homo sapien
tatatctgattgcagcagcaaagggctatcccc

SEQ ID NO: 430854 - DNA, 33 bp, Homo sapien
tatatctgattgcagcggcaaagggctatcccc

SEQ ID NO: 430855 - DNA, 33 bp, Homo sapien; identical to SEQ ID NO: 430853

SEQ ID NO: 430856 - DNA, 33 bp, Homo sapien; identical to SEQ ID NO: 430854

SEQ ID NO: 430857 - DNA, 33 bp, Homo sapien
tatattctgtttaccacattttgtcgtggtctt

SEQ ID NO: 430858 - DNA, 33 bp, Homo sapien
tatattctgtttaccatattttgtcgtggtctt

SEQ ID NO: 430859 - DNA, 33 bp, Homo sapien
tcaaagaagtcactaaagtcagcccagattcaa

SEQ ID NO: 430860 - DNA, 33 bp, Homo sapien
tcaaagaagtcactaacgtcagcccagattcaa

SEQ ID NO: 430861 - DNA, 33 bp, Homo sapien
aggccaggctggcaacccatgctgaggtttaga

SEQ ID NO: 430862 - DNA, 33 bp, Homo sapien
aggccaggctggcaacgcatgctgaggtttaga

SEQ ID NO: 430863 - DNA, 33 bp, Homo sapien
aaaggctggggataggaagtaaaagccagattg

SEQ ID NO: 430864 - DNA, 33 bp, Homo sapien
aaaggctggggatagggagtaaaagccagattg

SEQ ID NO: 430865 - DNA, 33 bp, Homo sapien
tacaggtgtgaatcaccgtacctggcctagttt

SEQ ID NO: 430866 - DNA, 33 bp, Homo sapien
tacaggtgtgaatcactgtacctggcctagttt

SEQ ID NO: 430867 - DNA, 33 bp, Homo sapien
cctctcaatactgtcacatttgtgattaaattt

SEQ ID NO: 430868 - DNA, 33 bp, Homo sapien
cctctcaatactgtcagatttgtgattaaattt

SEQ ID NO: 430869 - DNA, 33 bp, Homo sapien
ctatctctgtgagcaacctacaaccaaccccac

SEQ ID NO: 430870 - DNA, 33 bp, Homo sapien
ctatctctgtgagcaagctacaaccaaccccac

SEQ ID NO: 430871 - DNA, 33 bp, Homo sapien
cagaaagggagatgaaatggaaagctgtttcaa

SEQ ID NO: 430872 - DNA, 33 bp, Homo sapien
cagaaagggagatgaagtggaaagctgtttcaa

SEQ ID NO: 430873 - DNA, 33 bp, Homo sapien
tgtttgactgccttcaagatcttctcttcgtct

SEQ ID NO: 430874 - DNA, 33 bp, Homo sapien
tgtttgactgccttcaggatcttctcttcgtct

SEQ ID NO: 430875 - DNA, 33 bp, Homo sapien
ggatatggcacattaaaagatcaacagaaagaa

SEQ ID NO: 430876 - DNA, 33 bp, Homo sapien
ggatatggcacattaagagatcaacagaaagaa

SEQ ID NO: 430877 - DNA, 33 bp, Homo sapien
taccttccagtcccaaaggcaaccgctgttcta

SEQ ID NO: 430878 - DNA, 33 bp, Homo sapien
taccttccagtcccaacggcaaccgctgttcta

SEQ ID NO: 430879 - DNA, 33 bp, Homo sapien
tcttctaatatacaaaataacagagtgatatca

SEQ ID NO: 430880 - DNA, 33 bp, Homo sapien
tcttctaatatacaaagtaacagagtgatatca

SEQ ID NO: 430881 - DNA, 33 bp, Homo sapien
ggatcacagcaaggcaaaaatctaagacaaccg

SEQ ID NO: 430882 - DNA, 33 bp, Homo sapien
ggatcacagcaaggcagaaatctaagacaaccg

SEQ ID NO: 430883 - DNA, 33 bp, Homo sapien
cattggaagtagcatccgaactgaggcaaaatg

SEQ ID NO: 430884 - DNA, 33 bp, Homo sapien
cattggaagtagcatctgaactgaggcaaaatg

SEQ ID NO: 430885 - DNA, 33 bp, Homo sapien
ttttgcaattccctgacgctgttgtgaagcact

SEQ ID NO: 430886 - DNA, 33 bp, Homo sapien
ttttgcaattccctgatgctgttgtgaagcact

SEQ ID NO: 430887 - DNA, 33 bp, Homo sapien
acagctctgggtggacactaaacaacagacata

SEQ ID NO: 430888 - DNA, 33 bp, Homo sapien
acagctctgggtggaccctaaacaacagacata

SEQ ID NO: 430889 - DNA, 33 bp, Homo sapien
cattcactagcttaaagccaggtacttgacatt

SEQ ID NO: 430890 - DNA, 33 bp, Homo sapien
cattcactagcttaaatccaggtacttgacatt

SEQ ID NO: 430891 - DNA, 33 bp, Homo sapien
cattcaagcattaggacagaatgtcaagtacct

SEQ ID NO: 430892 - DNA, 33 bp, Homo sapien
cattcaagcattaggagagaatgtcaagtacct

SEQ ID NO: 430893 - DNA, 33 bp, Homo sapien
ctctttgggacaacacaggtaatgcataaaaac

SEQ ID NO: 430894 - DNA, 33 bp, Homo sapien
ctctttgggacaacacgggtaatgcataaaaac

SEQ ID NO: 430895 - DNA, 33 bp, Homo sapien
ctggaagcagttaacaggtggtttatttgcggg

SEQ ID NO: 430896 - DNA, 33 bp, Homo sapien
ctggaagcagttaacatgtggtttatttgcggg

SEQ ID NO: 430897 - DNA, 33 bp, Homo sapien
cagccactagctcagtaaccccttctgagatgt

SEQ ID NO: 430898 - DNA, 33 bp, Homo sapien
cagccactagctcagtgaccccttctgagatgt

SEQ ID NO: 430899 - DNA, 33 bp, Homo sapien
gtattattttaggccactaagtttgtggaaatt

SEQ ID NO: 430900 - DNA, 33 bp, Homo sapien
gtattattttaggccattaagtttgtggaaatt

SEQ ID NO: 430901 - DNA, 33 bp, Homo sapien
gaggcacttgtttgggaatcctccataggcaag

SEQ ID NO: 430902 - DNA, 33 bp, Homo sapien
gaggcacttgtttggggatcctccataggcaag

SEQ ID NO: 430903 - DNA, 33 bp, Homo sapien
ctatgctgtgaaattccctgactgtagatgaat

SEQ ID NO: 430904 - DNA, 33 bp, Homo sapien
ctatgctgtgaaattctctgactgtagatgaat

SEQ ID NO: 430905 - DNA, 33 bp, Homo sapien
cattcagtaggcttcagtaacactggctcccct

SEQ ID NO: 430906 - DNA, 33 bp, Homo sapien
cattcagtaggcttcattaacactggctcccct

SEQ ID NO: 430907 - DNA, 33 bp, Homo sapien
tctgcctctttttagacgtaagcatatgtatct

SEQ ID NO: 430908 - DNA, 33 bp, Homo sapien
tctgcctctttttagatgtaagcatatgtatct

SEQ ID NO: 430909 - DNA, 33 bp, Homo sapien
gtcattcttctgagtacaatggtttctccttgt

SEQ ID NO: 430910 - DNA, 33 bp, Homo sapien
gtcattcttctgagtataatggtttctccttgt

SEQ ID NO: 430911 - DNA, 33 bp, Homo sapien
atcgctaggttctaaaatggatgcaccaagaac

SEQ ID NO: 430912 - DNA, 33 bp, Homo sapien
atcgctaggttctaaactggatgcaccaagaac

SEQ ID NO: 430913 - DNA, 33 bp, Homo sapien
atgtatttagtttgaacatcagtttgaagatta

SEQ ID NO: 430914 - DNA, 33 bp, Homo sapien
atgtatttagtttgaatatcagtttgaagatta

SEQ ID NO: 430915 - DNA, 33 bp, Homo sapien
cgtcgtgtgatttttcacatgcttcctggtaga

SEQ ID NO: 430916 - DNA, 33 bp, Homo sapien
cgtcgtgtgatttttcgcatgcttcctggtaga

SEQ ID NO: 430917 - DNA, 33 bp, Homo sapien
tgcactgggatggaaaccttagagtagagaaaa

SEQ ID NO: 430918 - DNA, 33 bp, Homo sapien
tgcactgggatggaaatcttagagtagagaaaa

SEQ ID NO: 430919 - DNA, 33 bp, Homo sapien
tggtctctggcttctcactttgtccttctgggg

SEQ ID NO: 430920 - DNA, 33 bp, Homo sapien
tggtctctggcttctcgctttgtccttctgggg

SEQ ID NO: 430921 - DNA, 33 bp, Homo sapien
ggataaatgaaaattacagtcaactgcaaagaa

SEQ ID NO: 430922 - DNA, 33 bp, Homo sapien
ggataaatgaaaattatagtcaactgcaaagaa

SEQ ID NO: 430923 - DNA, 33 bp, Homo sapien
ggaagcagaaacacaacggctctggcagaacac

SEQ ID NO: 430924 - DNA, 33 bp, Homo sapien
ggaagcagaaacacaatggctctggcagaacac

SEQ ID NO: 430925 - DNA, 33 bp, Homo sapien
attttttgtttttcaaagaagttgtcttactgc

SEQ ID NO: 430926 - DNA, 33 bp, Homo sapien
attttttgtttttcaatgaagttgtcttactgc

SEQ ID NO: 430927 - DNA, 33 bp, Homo sapien
caatcaaggtccaatacgtaatcagacaaaagt

SEQ ID NO: 430928 - DNA, 33 bp, Homo sapien
caatcaaggtccaatatgtaatcagacaaaagt

SEQ ID NO: 430929 - DNA, 33 bp, Homo sapien
tggtggtgctgcctaaaacagggtccaagctct

SEQ ID NO: 430930 - DNA, 33 bp, Homo sapien
tggtggtgctgcctaacacagggtccaagctct

SEQ ID NO: 430931 - DNA, 33 bp, Homo sapien
tgccagatcattacaacagaacactgcgttgga

SEQ ID NO: 430932 - DNA, 33 bp, Homo sapien
tgccagatcattacaagagaacactgcgttgga

SEQ ID NO: 430933 - DNA, 33 bp, Homo sapien
gaggaaatcttaactaccatgctaaagagtctg

SEQ ID NO: 430934 - DNA, 33 bp, Homo sapien
gaggaaatcttaactatcatgctaaagagtctg

SEQ ID NO: 430935 - DNA, 33 bp, Homo sapien
attcctctagctaatacaagtgaccaaatcctg

SEQ ID NO: 430936 - DNA, 33 bp, Homo sapien
attcctctagctaatagaagtgaccaaatcctg

SEQ ID NO: 430937 - DNA, 33 bp, Homo sapien
aacatctgaatttcaaatgtggttttacggtct

SEQ ID NO: 430938 - DNA, 33 bp, Homo sapien
aacatctgaatttcaagtgtggttttacggtct

SEQ ID NO: 430939 - DNA, 33 bp, Homo sapien
gatcactggcaaagcactctgattgctggtgca

SEQ ID NO: 430940 - DNA, 33 bp, Homo sapien
gatcactggcaaagcagtctgattgctggtgca

SEQ ID NO: 430941 - DNA, 33 bp, Homo sapien
caagtttctgactgatgaatcgtaatacctgtt

SEQ ID NO: 430942 - DNA, 33 bp, Homo sapien
caagtttctgactgattaatcgtaatacctgtt

SEQ ID NO: 430943 - DNA, 33 bp, Homo sapien
tggactggaagaggacaaggcaggtagcagata

SEQ ID NO: 430944 - DNA, 33 bp, Homo sapien
tggactggaagaggacgaggcaggtagcagata

SEQ ID NO: 430945 - DNA, 33 bp, Homo sapien
ttctgctagtgacaaacttctgtggtgcatttg

SEQ ID NO: 430946 - DNA, 33 bp, Homo sapien
ttctgctagtgacaaatttctgtggtgcatttg

SEQ ID NO: 430947 - DNA, 33 bp, Homo sapien
gcagcctaccattgaagggactctcactctgta

SEQ ID NO: 430948 - DNA, 33 bp, Homo sapien
gcagcctaccattgaatggactctcactctgta

SEQ ID NO: 430949 - DNA, 33 bp, Homo sapien
ataagaagttacttcaacagcttcagaagagga

SEQ ID NO: 430950 - DNA, 33 bp, Homo sapien
ataagaagttacttcagcagcttcagaagagga

SEQ ID NO: 430951 - DNA, 33 bp, Homo sapien
ccggaaatggtaacccagatatttgaggcttcc

SEQ ID NO: 430952 - DNA, 33 bp, Homo sapien
ccggaaatggtaacccggatatttgaggcttcc

SEQ ID NO: 430953 - DNA, 33 bp, Homo sapien
tctattaaacagacaaataattcaaaccctggt

SEQ ID NO: 430954 - DNA, 33 bp, Homo sapien
tctattaaacagacaagtaattcaaaccctggt

SEQ ID NO: 430955 - DNA, 33 bp, Homo sapien
tgcaatgccatttaaacgatatgttgattctag

SEQ ID NO: 430956 - DNA, 33 bp, Homo sapien
tgcaatgccatttaaatgatatgttgattctag

SEQ ID NO: 430957 - DNA, 33 bp, Homo sapien
cactgaagaacttacaatggatctagttgagat

SEQ ID NO: 430958 - DNA, 33 bp, Homo sapien
cactgaagaacttacagtggatctagttgagat

SEQ ID NO: 430959 - DNA, 33 bp, Homo sapien
catgtacaagccgtgacgcaggtttggagaggg

SEQ ID NO: 430960 - DNA, 33 bp, Homo sapien
catgtacaagccgtgatgcaggtttggagaggg

SEQ ID NO: 430961 - DNA, 33 bp, Homo sapien
cactgtaagtcagacactgctgtgattcaagta

SEQ ID NO: 430962 - DNA, 33 bp, Homo sapien
cactgtaagtcagacattgctgtgattcaagta

SEQ ID NO: 430963 - DNA, 33 bp, Homo sapien
ttcagaaagtacaaaccaaacttgggcactttc

SEQ ID NO: 430964 - DNA, 33 bp, Homo sapien
ttcagaaagtacaaactaaacttgggcactttc

SEQ ID NO: 430965 - DNA, 33 bp, Homo sapien
gaaaagaatgttctctcaaaactctatattctc

SEQ ID NO: 430966 - DNA, 33 bp, Homo sapien
gaaaagaatgttctctgaaaactctatattctc

SEQ ID NO: 430967 - DNA, 33 bp, Homo sapien
gagatcatcttttataaatcctgggtctccttt

SEQ ID NO: 430968 - DNA, 33 bp, Homo sapien
gagatcatcttttatagatcctgggtctccttt

SEQ ID NO: 430969 - DNA, 33 bp, Homo sapien
agcagccagagttgtacctggaacagggttctc

SEQ ID NO: 430970 - DNA, 33 bp, Homo sapien
agcagccagagttgtatctggaacagggttctc

SEQ ID NO: 430971 - DNA, 33 bp, Homo sapien
ctgtcctgatgtcgaacagttaaatactcagca

SEQ ID NO: 430972 - DNA, 33 bp, Homo sapien
ctgtcctgatgtcgaatagttaaatactcagca

SEQ ID NO: 430973 - DNA, 33 bp, Homo sapien
aacgtgctgtcataataaagagatttccaagat

SEQ ID NO: 430974 - DNA, 33 bp, Homo sapien
aacgtgctgtcataatgaagagatttccaagat

SEQ ID NO: 430975 - DNA, 33 bp, Homo sapien
tgatgaaggtattcaccctgctggcatcaaggt

SEQ ID NO: 430976 - DNA, 33 bp, Homo sapien
tgatgaaggtattcactctgctggcatcaaggt

SEQ ID NO: 430977 - DNA, 33 bp, Homo sapien
ctcttctaagaacaaaatataatgcctagagtt

SEQ ID NO: 430978 - DNA, 33 bp, Homo sapien
ctcttctaagaacaaagtataatgcctagagtt

SEQ ID NO: 430979 - DNA, 33 bp, Homo sapien
ctcctttgtttctctcacatcctacatcccacg

SEQ ID NO: 430980 - DNA, 33 bp, Homo sapien
ctcctttgtttctctcgcatcctacatcccacg

SEQ ID NO: 430981 - DNA, 33 bp, Homo sapien
agttttacctcttaaacgtaggtctttgatcct

SEQ ID NO: 430982 - DNA, 33 bp, Homo sapien
agttttacctcttaaatgtaggtctttgatcct

SEQ ID NO: 430983 - DNA, 33 bp, Homo sapien
tgtgtacatataatgcagagtctccttttatga

SEQ ID NO: 430984 - DNA, 33 bp, Homo sapien
tgtgtacatataatgcggagtctccttttatga

SEQ ID NO: 430985 - DNA, 33 bp, Homo sapien
tatggctgctataacacgttaccaaaagcttcg

SEQ ID NO: 430986 - DNA, 33 bp, Homo sapien
tatggctgctataacaggttaccaaaagcttcg

SEQ ID NO: 430987 - DNA, 33 bp, Homo sapien
tggatgtcagctttgacgtcaatactactgcta

SEQ ID NO: 430988 - DNA, 33 bp, Homo sapien
tggatgtcagctttgatgtcaatactactgcta

SEQ ID NO: 430989 - DNA, 33 bp, Homo sapien
aggaaggggataaaaaattgaggcgagtctgac

SEQ ID NO: 430990 - DNA, 33 bp, Homo sapien
aggaaggggataaaaatttgaggcgagtctgac

SEQ ID NO: 430991 - DNA, 33 bp, Homo sapien
tgttcaacatagaggcaccattttcccttttgt

SEQ ID NO: 430992 - DNA, 33 bp, Homo sapien
tgttcaacatagaggcgccattttcccttttgt

SEQ ID NO: 430993 - DNA, 33 bp, Homo sapien
agctttgctttaggggacatggttggtgataat

SEQ ID NO: 430994 - DNA, 33 bp, Homo sapien
agctttgctttagggggcatggttggtgataat

SEQ ID NO: 430995 - DNA, 33 bp, Homo sapien
aaagagattataataaatgctatacggatgtgg

SEQ ID NO: 430996 - DNA, 33 bp, Homo sapien
aaagagattataataagtgctatacggatgtgg

SEQ ID NO: 430997 - DNA, 33 bp, Homo sapien
atggctacgataagacaatgtatcagtgttaag

SEQ ID NO: 430998 - DNA, 33 bp, Homo sapien
atggctacgataagacgatgtatcagtgttaag

SEQ ID NO: 430999 - DNA, 33 bp, Homo sapien
gacaaaggattagaggcagtgatggccttcatg

SEQ ID NO: 431000 - DNA, 33 bp, Homo sapien
gacaaaggattagaggtagtgatggccttcatg

SEQ ID NO: 431001 - DNA, 33 bp, Homo sapien
tgactgtgatggataaagataaaaacaaaacca

SEQ ID NO: 431002 - DNA, 33 bp, Homo sapien
tgactgtgatggataaggataaaaacaaaacca

SEQ ID NO: 431003 - DNA, 33 bp, Homo sapien
gtgacagcatccccaccgcatattttactggaa

SEQ ID NO: 431004 - DNA, 33 bp, Homo sapien
gtgacagcatccccacggcatattttactggaa

SEQ ID NO: 431005 - DNA, 33 bp, Homo sapien
gttttgcttgtattataaggaatggcccttttt

SEQ ID NO: 431006 - DNA, 33 bp, Homo sapien
gttttgcttgtattatgaggaatggcccttttt

SEQ ID NO: 431007 - DNA, 33 bp, Homo sapien
tggaacttactctgcacaggctctgtgggtgat

SEQ ID NO: 431008 - DNA, 33 bp, Homo sapien
tggaacttactctgcataggctctgtgggtgat

SEQ ID NO: 431009 - DNA, 33 bp, Homo sapien
tttgtgttgaagtctacagtatagcagaaaaac

SEQ ID NO: 431010 - DNA, 33 bp, Homo sapien
tttgtgttgaagtctatagtatagcagaaaaac

SEQ ID NO: 431011 - DNA, 33 bp, Homo sapien
aacacatgtttcttacactttcaacaaccatac

SEQ ID NO: 431012 - DNA, 33 bp, Homo sapien
aacacatgtttcttacgctttcaacaaccatac

SEQ ID NO: 431013 - DNA, 33 bp, Homo sapien
attcctaccttacatgaaaatttaaagatcatt

SEQ ID NO: 431014 - DNA, 33 bp, Homo sapien
attcctaccttacatggaaatttaaagatcatt

SEQ ID NO: 431015 - DNA, 33 bp, Homo sapien
ctgtgatccagcttcacgtgggtccctgaagtc

SEQ ID NO: 431016 - DNA, 33 bp, Homo sapien
ctgtgatccagcttcatgtgggtccctgaagtc

SEQ ID NO: 431017 - DNA, 33 bp, Homo sapien
gaagccaataatacatcaaggcccatgaaaaag

SEQ ID NO: 431018 - DNA, 33 bp, Homo sapien
gaagccaataatacatgaaggcccatgaaaaag

SEQ ID NO: 431019 - DNA, 33 bp, Homo sapien
aagccttgtggtatgacgtgtattattatgtgg

SEQ ID NO: 431020 - DNA, 33 bp, Homo sapien
aagccttgtggtatgatgtgtattattatgtgg

SEQ ID NO: 431021 - DNA, 33 bp, Homo sapien
agccatgaagtatcgacaacttttatgactgca

SEQ ID NO: 431022 - DNA, 33 bp, Homo sapien
agccatgaagtatcgagaacttttatgactgca

SEQ ID NO: 431023 - DNA, 33 bp, Homo sapien
ccatacttcagtgatacctcagctggatataaa

SEQ ID NO: 431024 - DNA, 33 bp, Homo sapien
ccatacttcagtgatagctcagctggatataaa

SEQ ID NO: 431025 - DNA, 33 bp, Homo sapien
tatgtgttgaagaaacagcattatgcgacttgt

SEQ ID NO: 431026 - DNA, 33 bp, Homo sapien
tatgtgttgaagaaaccgcattatgcgacttgt

SEQ ID NO: 431027 - DNA, 33 bp, Homo sapien
tttagccaaaaacctaaaccaaacatcattctt

SEQ ID NO: 431028 - DNA, 33 bp, Homo sapien
tttagccaaaaacctagaccaaacatcattctt

SEQ ID NO: 431029 - DNA, 33 bp, Homo sapien
gagataatagatggcaagtttttcctattcaga

SEQ ID NO: 431030 - DNA, 33 bp, Homo sapien
gagataatagatggcacgtttttcctattcaga

SEQ ID NO: 431031 - DNA, 33 bp, Homo sapien
tattttggccagaagacggcaggtttgaggatg

SEQ ID NO: 431032 - DNA, 33 bp, Homo sapien
tattttggccagaagatggcaggtttgaggatg

SEQ ID NO: 431033 - DNA, 33 bp, Homo sapien
gaatcaactccaacacacttccttcccttaccc

SEQ ID NO: 431034 - DNA, 33 bp, Homo sapien
gaatcaactccaacactcttccttcccttaccc

SEQ ID NO: 431035 - DNA, 33 bp, Homo sapien
aacctcaaacctctgaactagtcaaaggagcat

SEQ ID NO: 431036 - DNA, 33 bp, Homo sapien
aacctcaaacctctgagctagtcaaaggagcat

SEQ ID NO: 431037 - DNA, 33 bp, Homo sapien
tgaaagactgatcaatcaacaaaaggaatgaac

SEQ ID NO: 431038 - DNA, 33 bp, Homo sapien
tgaaagactgatcaattaacaaaaggaatgaac

SEQ ID NO: 431039 - DNA, 33 bp, Homo sapien
accaatgccttgtgaaatagatttgtgagggca

SEQ ID NO: 431040 - DNA, 33 bp, Homo sapien
accaatgccttgtgaagtagatttgtgagggca

SEQ ID NO: 431041 - DNA, 33 bp, Homo sapien
ataacttatgtatccacccatttctaggagatt

SEQ ID NO: 431042 - DNA, 33 bp, Homo sapien
ataacttatgtatccatccatttctaggagatt

SEQ ID NO: 431043 - DNA, 33 bp, Homo sapien
gctttgggggtatttacggagtccaaagcaggg

SEQ ID NO: 431044 - DNA, 33 bp, Homo sapien
gctttgggggtatttagggagtccaaagcaggg

SEQ ID NO: 431045 - DNA, 33 bp, Homo sapien
tacccccaaagcaacaatggcctttcatttaaa

SEQ ID NO: 431046 - DNA, 33 bp, Homo sapien
tacccccaaagcaacagtggcctttcatttaaa

SEQ ID NO: 431047 - DNA, 33 bp, Homo sapien
gttttagattgctgggaagtcaactctcaataa

SEQ ID NO: 431048 - DNA, 33 bp, Homo sapien
gttttagattgctgggcagtcaactctcaataa

SEQ ID NO: 431049 - DNA, 33 bp, Homo sapien
aagtggtttacattagaataagtgcaaacaact

SEQ ID NO: 431050 - DNA, 33 bp, Homo sapien
aagtggtttacattagtataagtgcaaacaact

SEQ ID NO: 431051 - DNA, 33 bp, Homo sapien
aaatgcatactgtaaagccctgtagacacgttt

SEQ ID NO: 431052 - DNA, 33 bp, Homo sapien
aaatgcatactgtaaatccctgtagacacgttt

SEQ ID NO: 431053 - DNA, 33 bp, Homo sapien
ttttcctcttagtaaactattgctgtgtaacac

SEQ ID NO: 431054 - DNA, 33 bp, Homo sapien
ttttcctcttagtaaattattgctgtgtaacac

SEQ ID NO: 431055 - DNA, 33 bp, Homo sapien
tcttctcacatatggcaaacctttagagggtgt

SEQ ID NO: 431056 - DNA, 33 bp, Homo sapien
tcttctcacatatggcgaacctttagagggtgt

SEQ ID NO: 431057 - DNA, 33 bp, Homo sapien
cagctggcacttggaaatatggaaagaaattgg

SEQ ID NO: 431058 - DNA, 33 bp, Homo sapien
cagctggcacttggaagtatggaaagaaattgg

SEQ ID NO: 431059 - DNA, 33 bp, Homo sapien
acggaggagaagaagtaaagtggcttcggtcaa

SEQ ID NO: 431060 - DNA, 33 bp, Homo sapien
acggaggagaagaagttaagtggcttcggtcaa

SEQ ID NO: 431061 - DNA, 33 bp, Homo sapien
aatgcattatgtgcaacggtagagcaccactta

SEQ ID NO: 431062 - DNA, 33 bp, Homo sapien
aatgcattatgtgcaatggtagagcaccactta

SEQ ID NO: 431063 - DNA, 33 bp, Homo sapien
gctgaaaatgcctgaacatctagagtttcctct

SEQ ID NO: 431064 - DNA, 33 bp, Homo sapien
gctgaaaatgcctgaatatctagagtttcctct

SEQ ID NO: 431065 - DNA, 33 bp, Homo sapien
atatttgccaagctaacagattaactgctaggg

SEQ ID NO: 431066 - DNA, 33 bp, Homo sapien
atatttgccaagctaatagattaactgctaggg

SEQ ID NO: 431067 - DNA, 33 bp, Homo sapien
aaagaaatcagagtccagactattaaacaatat

SEQ ID NO: 431068 - DNA, 33 bp, Homo sapien
aaagaaatcagagtccggactattaaacaatat

SEQ ID NO: 431069 - DNA, 33 bp, Homo sapien
gctgcgagtcctgagcaccggaatgaaaacttg

SEQ ID NO: 431070 - DNA, 33 bp, Homo sapien
gctgcgagtcctgagcgccggaatgaaaacttg

SEQ ID NO: 431071 - DNA, 33 bp, Homo sapien
aacatattcttgttataaagcgacacatgactg

SEQ ID NO: 431072 - DNA, 33 bp, Homo sapien
aacatattcttgttattaagcgacacatgactg

SEQ ID NO: 431073 - DNA, 33 bp, Homo sapien
ggaacttttaaacaagcagatggttagataagt

SEQ ID NO: 431074 - DNA, 33 bp, Homo sapien
ggaacttttaaacaaggagatggttagataagt

SEQ ID NO: 431075 - DNA, 33 bp, Homo sapien
agatgccagtgcctaacgtggaagccattcaca

SEQ ID NO: 431076 - DNA, 33 bp, Homo sapien
agatgccagtgcctaatgtggaagccattcaca

SEQ ID NO: 431077 - DNA, 33 bp, Homo sapien
atcaccatccaggccaaagtggcgacgccggca

SEQ ID NO: 431078 - DNA, 33 bp, Homo sapien
atcaccatccaggccagagtggcgacgccggca

SEQ ID NO: 431079 - DNA, 33 bp, Homo sapien
aatattggttatgacacacagattgattttaca

SEQ ID NO: 431080 - DNA, 33 bp, Homo sapien
aatattggttatgacatacagattgattttaca

SEQ ID NO: 431081 - DNA, 33 bp, Homo sapien
aaaagctgaatacttgaaagattcaaaggcaag

SEQ ID NO: 431082 - DNA, 33 bp, Homo sapien
aaaagctgaatacttggaagattcaaaggcaag

SEQ ID NO: 431083 - DNA, 33 bp, Homo sapien
atttgcaaagggcaagcctgtaaaagtcacata

SEQ ID NO: 431084 - DNA, 33 bp, Homo sapien
atttgcaaagggcaagtctgtaaaagtcacata

SEQ ID NO: 431085 - DNA, 33 bp, Homo sapien
gagaagacagatgactaaaaagtggtcctcttt

SEQ ID NO: 431086 - DNA, 33 bp, Homo sapien
gagaagacagatgactgaaaagtggtcctcttt

SEQ ID NO: 431087 - DNA, 33 bp, Homo sapien
gttctgtctacataccgggcaaagtaatgctct

SEQ ID NO: 431088 - DNA, 33 bp, Homo sapien
gttctgtctacatacctggcaaagtaatgctct

SEQ ID NO: 431089 - DNA, 33 bp, Homo sapien
gacagtgaagtacagtaaattgttttccagcct

SEQ ID NO: 431090 - DNA, 33 bp, Homo sapien
gacagtgaagtacagtgaattgttttccagcct

SEQ ID NO: 431091 - DNA, 33 bp, Homo sapien
ttacttggtgttcagaatagacaaccatcttaa

SEQ ID NO: 431092 - DNA, 33 bp, Homo sapien
ttacttggtgttcagagtagacaaccatcttaa

SEQ ID NO: 431093 - DNA, 33 bp, Homo sapien
ggcaaataaacactacgaggaatgcttcactgt

SEQ ID NO: 431094 - DNA, 33 bp, Homo sapien
ggcaaataaacactactaggaatgcttcactgt

SEQ ID NO: 431095 - DNA, 33 bp, Homo sapien
tcaatgttcaatggaactgagtgtccagcagac

SEQ ID NO: 431096 - DNA, 33 bp, Homo sapien
tcaatgttcaatggaattgagtgtccagcagac

SEQ ID NO: 431097 - DNA, 33 bp, Homo sapien
atttgtttttattgcacggtagtagtctgttgt

SEQ ID NO: 431098 - DNA, 33 bp, Homo sapien
atttgtttttattgcatggtagtagtctgttgt

SEQ ID NO: 431099 - DNA, 33 bp, Homo sapien
cctttaggtgatcaacaatcatcatgtttgtag

SEQ ID NO: 431100 - DNA, 33 bp, Homo sapien
cctttaggtgatcaaccatcatcatgtttgtag

SEQ ID NO: 431101 - DNA, 33 bp, Homo sapien
tgtcctacagcagccaatgagattattatctgc

SEQ ID NO: 431102 - DNA, 33 bp, Homo sapien
tgtcctacagcagccagtgagattattatctgc

SEQ ID NO: 431103 - DNA, 33 bp, Homo sapien
atttcaataccttaacaatgtctacagaaaaaa

SEQ ID NO: 431104 - DNA, 33 bp, Homo sapien
atttcaataccttaacgatgtctacagaaaaaa

SEQ ID NO: 431105 - DNA, 33 bp, Homo sapien
cttcctcagttatccaagaactttgaaaggctt

SEQ ID NO: 431106 - DNA, 33 bp, Homo sapien
cttcctcagttatccacgaactttgaaaggctt

SEQ ID NO: 431107 - DNA, 33 bp, Homo sapien
agaatgctaccacaaaacctaatggataactta

SEQ ID NO: 431108 - DNA, 33 bp, Homo sapien
agaatgctaccacaaagcctaatggataactta

SEQ ID NO: 431109 - DNA, 33 bp, Homo sapien
gtgccaggacttgagaacatttcaagcatcaga

SEQ ID NO: 431110 - DNA, 33 bp, Homo sapien
gtgccaggacttgagagcatttcaagcatcaga

SEQ ID NO: 431111 - DNA, 33 bp, Homo sapien
aacaatttcatgctaaattaatcactgttgtcc

SEQ ID NO: 431112 - DNA, 33 bp, Homo sapien
aacaatttcatgctaagttaatcactgttgtcc

SEQ ID NO: 431113 - DNA, 33 bp, Homo sapien
ttagtagctttctgaacgtttatacttttttgg

SEQ ID NO: 431114 - DNA, 33 bp, Homo sapien
ttagtagctttctgaatgtttatacttttttgg

SEQ ID NO: 431115 - DNA, 33 bp, Homo sapien
agttccatcttgcaaaccctaagtcaccataat

SEQ ID NO: 431116 - DNA, 33 bp, Homo sapien
agttccatcttgcaaatcctaagtcaccataat

SEQ ID NO: 431117 - DNA, 33 bp, Homo sapien
aatatttcagttaccaagttccaagtacctttc

SEQ ID NO: 431118 - DNA, 33 bp, Homo sapien
aatatttcagttaccacgttccaagtacctttc

SEQ ID NO: 431119 - DNA, 33 bp, Homo sapien
tcctggagtttcgattcaaaatgcgcccgaatg

SEQ ID NO: 431120 - DNA, 33 bp, Homo sapien
tcctggagtttcgatttaaaatgcgcccgaatg

SEQ ID NO: 431121 - DNA, 33 bp, Homo sapien
acaagttgcctaataaaacttcttatgaaaagg

SEQ ID NO: 431122 - DNA, 33 bp, Homo sapien
acaagttgcctaataacacttcttatgaaaagg

SEQ ID NO: 431123 - DNA, 33 bp, Homo sapien
attagagttgccaaaactaaaagcaatgtaaac

SEQ ID NO: 431124 - DNA, 33 bp, Homo sapien
attagagttgccaaaattaaaagcaatgtaaac

SEQ ID NO: 431125 - DNA, 33 bp, Homo sapien
gagtttctgtttggtacggtaaagttctggaaa

SEQ ID NO: 431126 - DNA, 33 bp, Homo sapien
gagtttctgtttggtatggtaaagttctggaaa

SEQ ID NO: 431127 - DNA, 33 bp, Homo sapien
tgttaccaatgacctacaataacatatttaaga

SEQ ID NO: 431128 - DNA, 33 bp, Homo sapien
tgttaccaatgacctagaataacatatttaaga

SEQ ID NO: 431129 - DNA, 33 bp, Homo sapien
gaatccattcacacaacgagcttcctctaccaa

SEQ ID NO: 431130 - DNA, 33 bp, Homo sapien
gaatccattcacacaatgagcttcctctaccaa

SEQ ID NO: 431131 - DNA, 33 bp, Homo sapien
cgatatgggaatttccacagggattttggtggc

SEQ ID NO: 431132 - DNA, 33 bp, Homo sapien
cgatatgggaatttcctcagggattttggtggc

SEQ ID NO: 431133 - DNA, 33 bp, Homo sapien
ctttctcatagagacactggaaacagttcggca

SEQ ID NO: 431134 - DNA, 33 bp, Homo sapien
ctttctcatagagacattggaaacagttcggca

SEQ ID NO: 431135 - DNA, 33 bp, Homo sapien
tacacaaacacagataaacttcatgaattcagc

SEQ ID NO: 431136 - DNA, 33 bp, Homo sapien
tacacaaacacagatagacttcatgaattcagc

SEQ ID NO: 431137 - DNA, 33 bp, Homo sapien
attcctagaaacataccatctatcgaaactaaa

SEQ ID NO: 431138 - DNA, 33 bp, Homo sapien
attcctagaaacatactatctatcgaaactaaa

SEQ ID NO: 431139 - DNA, 33 bp, Homo sapien
gtgagactctgaagcacgtgaaaatctcagctt

SEQ ID NO: 431140 - DNA, 33 bp, Homo sapien
gtgagactctgaagcaggtgaaaatctcagctt

SEQ ID NO: 431141 - DNA, 33 bp, Homo sapien
gcctttgttgtttccaagttaatatatatctgt

SEQ ID NO: 431142 - DNA, 33 bp, Homo sapien
gcctttgttgtttccaggttaatatatatctgt

SEQ ID NO: 431143 - DNA, 33 bp, Homo sapien
ctttgtttgatcaaatgacaaggacggccaaaa

SEQ ID NO: 431144 - DNA, 33 bp, Homo sapien
ctttgtttgatcaaattacaaggacggccaaaa

SEQ ID NO: 431145 - DNA, 33 bp, Homo sapien
atagtgatagtttccactctcgagcacggtcaa

SEQ ID NO: 431146 - DNA, 33 bp, Homo sapien
atagtgatagtttccagtctcgagcacggtcaa

SEQ ID NO: 431147 - DNA, 33 bp, Homo sapien
ttttctcctcagctcactcacgggcaaatacaa

SEQ ID NO: 431148 - DNA, 33 bp, Homo sapien
ttttctcctcagctcattcacgggcaaatacaa

SEQ ID NO: 431149 - DNA, 33 bp, Homo sapien
atatatatgatgtatacggttcaggcattaaaa

SEQ ID NO: 431150 - DNA, 33 bp, Homo sapien
atatatatgatgtatatggttcaggcattaaaa

SEQ ID NO: 431151 - DNA, 33 bp, Homo sapien
gcttgtgggatggaaaacggattctgagtctat

SEQ ID NO: 431152 - DNA, 33 bp, Homo sapien
gcttgtgggatggaaagcggattctgagtctat

SEQ ID NO: 431153 - DNA, 33 bp, Homo sapien
gctacagaagtcaaggcagtcaaattgcagcga

SEQ ID NO: 431154 - DNA, 33 bp, Homo sapien
gctacagaagtcaaggtagtcaaattgcagcga

SEQ ID NO: 431155 - DNA, 33 bp, Homo sapien
ttgacagcttctaaataaattgagcaaaaatgg

SEQ ID NO: 431156 - DNA, 33 bp, Homo sapien
ttgacagcttctaaatcaattgagcaaaaatgg

SEQ ID NO: 431157 - DNA, 33 bp, Homo sapien
aggaataagtccatcaagaaggcatagcaatct

SEQ ID NO: 431158 - DNA, 33 bp, Homo sapien
aggaataagtccatcacgaaggcatagcaatct

SEQ ID NO: 431159 - DNA, 33 bp, Homo sapien
agcatcctcttcaagcactagccagcattcggt

SEQ ID NO: 431160 - DNA, 33 bp, Homo sapien
agcatcctcttcaagcgctagccagcattcggt

SEQ ID NO: 431161 - DNA, 33 bp, Homo sapien
attttgttcttttgggcatcaacgcttatctct

SEQ ID NO: 431162 - DNA, 33 bp, Homo sapien
attttgttcttttgggtatcaacgcttatctct

SEQ ID NO: 431163 - DNA, 33 bp, Homo sapien
ctgaaaacgttactaactaagtagaggaggaaa

SEQ ID NO: 431164 - DNA, 33 bp, Homo sapien
ctgaaaacgttactaattaagtagaggaggaaa

SEQ ID NO: 431165 - DNA, 33 bp, Homo sapien
ttttctgtagtctccaaatgtatccatgtgttc

SEQ ID NO: 431166 - DNA, 33 bp, Homo sapien
ttttctgtagtctccagatgtatccatgtgttc

SEQ ID NO: 431167 - DNA, 33 bp, Homo sapien
tggtattctgagttcaagtgtcagtcttggagg

SEQ ID NO: 431168 - DNA, 33 bp, Homo sapien
tggtattctgagttcatgtgtcagtcttggagg

SEQ ID NO: 431169 - DNA, 33 bp, Homo sapien
caagtaagggtcctaaagttgccaaggcctcca

SEQ ID NO: 431170 - DNA, 33 bp, Homo sapien
caagtaagggtcctaaggttgccaaggcctcca

SEQ ID NO: 431171 - DNA, 33 bp, Homo sapien
gggcatcaaactgaagcagtcgaggatggtctt

SEQ ID NO: 431172 - DNA, 33 bp, Homo sapien
gggcatcaaactgaagtagtcgaggatggtctt

SEQ ID NO: 431173 - DNA, 33 bp, Homo sapien
tggcagtggctcacaacatattagatgggtgca

SEQ ID NO: 431174 - DNA, 33 bp, Homo sapien
tggcagtggctcacaatatattagatgggtgca

SEQ ID NO: 431175 - DNA, 33 bp, Homo sapien
ccaggaggttcaaaccacaatttgagaaagaga

SEQ ID NO: 431176 - DNA, 33 bp, Homo sapien
ccaggaggttcaaaccgcaatttgagaaagaga

SEQ ID NO: 431177 - DNA, 33 bp, Homo sapien
gcagccagcttttcacaggcttgatccctcctg

SEQ ID NO: 431178 - DNA, 33 bp, Homo sapien
gcagccagcttttcaccggcttgatccctcctg

SEQ ID NO: 431179 - DNA, 33 bp, Homo sapien
gtttgtgacaggactcaactcaggttcctttcc

SEQ ID NO: 431180 - DNA, 33 bp, Homo sapien
gtttgtgacaggactccactcaggttcctttcc

SEQ ID NO: 431181 - DNA, 33 bp, Homo sapien
ttcacattcgttcaaacaagaatactacaatgt

SEQ ID NO: 431182 - DNA, 33 bp, Homo sapien
ttcacattcgttcaaataagaatactacaatgt

SEQ ID NO: 431183 - DNA, 33 bp, Homo sapien
ctcttcaggcaggaaacattactagagagaagg

SEQ ID NO: 431184 - DNA, 33 bp, Homo sapien
ctcttcaggcaggaaatattactagagagaagg

SEQ ID NO: 431185 - DNA, 33 bp, Homo sapien
gttagaatgattgaaccgagttttgtgttggtt

SEQ ID NO: 431186 - DNA, 33 bp, Homo sapien
gttagaatgattgaactgagttttgtgttggtt

SEQ ID NO: 431187 - DNA, 33 bp, Homo sapien
ccatggatccatggaaattcactttcaaaatgc

SEQ ID NO: 431188 - DNA, 33 bp, Homo sapien
ccatggatccatggaacttcactttcaaaatgc

SEQ ID NO: 431189 - DNA, 33 bp, Homo sapien
cttgcgctttccattaagtttacttttttcttt

SEQ ID NO: 431190 - DNA, 33 bp, Homo sapien
cttgcgctttccattaggtttacttttttcttt

SEQ ID NO: 431191 - DNA, 33 bp, Homo sapien
gtatatatttatagaacggttctgtgcaaatct

SEQ ID NO: 431192 - DNA, 33 bp, Homo sapien
gtatatatttatagaagggttctgtgcaaatct

SEQ ID NO: 431193 - DNA, 33 bp, Homo sapien
cagatttacagccctaactgtgtgagcctgcaa

SEQ ID NO: 431194 - DNA, 33 bp, Homo sapien
cagatttacagccctatctgtgtgagcctgcaa

SEQ ID NO: 431195 - DNA, 33 bp, Homo sapien
ggtgtctgagtttttcactctgtagggaaagtt

SEQ ID NO: 431196 - DNA, 33 bp, Homo sapien
ggtgtctgagtttttcgctctgtagggaaagtt

SEQ ID NO: 431197 - DNA, 33 bp, Homo sapien
acctctttgagaatccaatgaaggctttgaaat

SEQ ID NO: 431198 - DNA, 33 bp, Homo sapien
acctctttgagaatccgatgaaggctttgaaat

SEQ ID NO: 431199 - DNA, 33 bp, Homo sapien
agtcaggcaagaatgaagtaactcccatgctga

SEQ ID NO: 431200 - DNA, 33 bp, Homo sapien
agtcaggcaagaatgaggtaactcccatgctga

SEQ ID NO: 431201 - DNA, 33 bp, Homo sapien
tcaacaggatgatctacgctcttttgattagag

SEQ ID NO: 431202 - DNA, 33 bp, Homo sapien
tcaacaggatgatctatgctcttttgattagag

SEQ ID NO: 431203 - DNA, 33 bp, Homo sapien
gcttctttgaaagttcactattttggaaaagac

SEQ ID NO: 431204 - DNA, 33 bp, Homo sapien
gcttctttgaaagttctctattttggaaaagac

SEQ ID NO: 431205 - DNA, 33 bp, Homo sapien
atactttggttatgtacagaaaatggaatgtgt

SEQ ID NO: 431206 - DNA, 33 bp, Homo sapien
atactttggttatgtatagaaaatggaatgtgt

SEQ ID NO: 431207 - DNA, 33 bp, Homo sapien
gtcaattccagtctgacggaaggccccttagag

SEQ ID NO: 431208 - DNA, 33 bp, Homo sapien
gtcaattccagtctgatggaaggccccttagag

SEQ ID NO: 431209 - DNA, 33 bp, Homo sapien
gattgatttctcaccaaaatggaaagagcaact

SEQ ID NO: 431210 - DNA, 33 bp, Homo sapien
gattgatttctcaccataatggaaagagcaact

SEQ ID NO: 431211 - DNA, 33 bp, Homo sapien
caggccagacttgtgaaaggaaagtatttatgc

SEQ ID NO: 431212 - DNA, 33 bp, Homo sapien
caggccagacttgtgagaggaaagtatttatgc

SEQ ID NO: 431213 - DNA, 33 bp, Homo sapien
cttactttcctctaagacaatctgtgaaccaca

SEQ ID NO: 431214 - DNA, 33 bp, Homo sapien
cttactttcctctaaggcaatctgtgaaccaca

SEQ ID NO: 431215 - DNA, 33 bp, Homo sapien
ctgagaacagggcaaacgaatccatttctgaag

SEQ ID NO: 431216 - DNA, 33 bp, Homo sapien
ctgagaacagggcaaaggaatccatttctgaag

SEQ ID NO: 431217 - DNA, 33 bp, Homo sapien
acagaatcctcagaccaaaattccctcgcccct

SEQ ID NO: 431218 - DNA, 33 bp, Homo sapien
acagaatcctcagaccgaaattccctcgcccct

SEQ ID NO: 431219 - DNA, 33 bp, Homo sapien
tattccaggttaaagacaggagtgagtctaaaa

SEQ ID NO: 431220 - DNA, 33 bp, Homo sapien
tattccaggttaaagataggagtgagtctaaaa

SEQ ID NO: 431221 - DNA, 33 bp, Homo sapien
cacctgtaatccgtaaatgaatccaacctggaa

SEQ ID NO: 431222 - DNA, 33 bp, Homo sapien
cacctgtaatccgtaagtgaatccaacctggaa

SEQ ID NO: 431223 - DNA, 33 bp, Homo sapien
ctcccagcttctcccactgaggaggctcagaaa

SEQ ID NO: 431224 - DNA, 33 bp, Homo sapien
ctcccagcttctcccattgaggaggctcagaaa

SEQ ID NO: 431225 - DNA, 33 bp, Homo sapien
agctgttgtgtagtctcaatgatttgttccatt

SEQ ID NO: 431226 - DNA, 33 bp, Homo sapien
agctgttgtgtagtctgaatgatttgttccatt

SEQ ID NO: 431227 - DNA, 33 bp, Homo sapien
agggcaaggccttgcagggccgtgttcagagct

SEQ ID NO: 431228 - DNA, 33 bp, Homo sapien
agggcaaggccttgcatggccgtgttcagagct

SEQ ID NO: 431229 - DNA, 33 bp, Homo sapien
acaggatctcctaaggaagctttcaaattgcaa

SEQ ID NO: 431230 - DNA, 33 bp, Homo sapien
acaggatctcctaagggagctttcaaattgcaa

SEQ ID NO: 431231 - DNA, 33 bp, Homo sapien
gcagcagggtcatcaagactaaatgtggagcaa

SEQ ID NO: 431232 - DNA, 33 bp, Homo sapien
gcagcagggtcatcaatactaaatgtggagcaa

SEQ ID NO: 431233 - DNA, 33 bp, Homo sapien
ggaatcacccaaaaaacctctgtggccttataa

SEQ ID NO: 431234 - DNA, 33 bp, Homo sapien
ggaatcacccaaaaaagctctgtggccttataa

SEQ ID NO: 431235 - DNA, 33 bp, Homo sapien
gtctaacaggcttgcaaaataggtgtcatcact

SEQ ID NO: 431236 - DNA, 33 bp, Homo sapien
gtctaacaggcttgcagaataggtgtcatcact

SEQ ID NO: 431237 - DNA, 33 bp, Homo sapien
gtcttcggagtcagacaaacttcaattcaaatt

SEQ ID NO: 431238 - DNA, 33 bp, Homo sapien
gtcttcggagtcagaccaacttcaattcaaatt

SEQ ID NO: 431239 - DNA, 33 bp, Homo sapien
taaaaagaacttacaaggttaaaatcatggtct

SEQ ID NO: 431240 - DNA, 33 bp, Homo sapien
taaaaagaacttacaatgttaaaatcatggtct

SEQ ID NO: 431241 - DNA, 33 bp, Homo sapien
actttataagaataagaacagtcttacaaaaga

SEQ ID NO: 431242 - DNA, 33 bp, Homo sapien
actttataagaataaggacagtcttacaaaaga

SEQ ID NO: 431243 - DNA, 33 bp, Homo sapien
catgtgcaaaatgtcacatatgcaacgttattc

SEQ ID NO: 431244 - DNA, 33 bp, Homo sapien
catgtgcaaaatgtcatatatgcaacgttattc

SEQ ID NO: 431245 - DNA, 33 bp, Homo sapien
ccagcaatttgcagccaatcaatgtgaatgtgg

SEQ ID NO: 431246 - DNA, 33 bp, Homo sapien
ccagcaatttgcagccgatcaatgtgaatgtgg

SEQ ID NO: 431247 - DNA, 33 bp, Homo sapien
ttcacatttgctggtacaattttgtttgcagaa

SEQ ID NO: 431248 - DNA, 33 bp, Homo sapien
ttcacatttgctggtataattttgtttgcagaa

SEQ ID NO: 431249 - DNA, 33 bp, Homo sapien
aaaaaagagaccccaacagtggcgcttgactcc

SEQ ID NO: 431250 - DNA, 33 bp, Homo sapien
aaaaaagagaccccaatagtggcgcttgactcc

SEQ ID NO: 431251 - DNA, 33 bp, Homo sapien
gctcctccttgacatactagctgtccataagaa

SEQ ID NO: 431252 - DNA, 33 bp, Homo sapien
gctcctccttgacatattagctgtccataagaa

SEQ ID NO: 431253 - DNA, 33 bp, Homo sapien
gtgaaaaggaaatgaacatgcagaacggcagaa

SEQ ID NO: 431254 - DNA, 33 bp, Homo sapien
gtgaaaaggaaatgaatatgcagaacggcagaa

SEQ ID NO: 431255 - DNA, 33 bp, Homo sapien
ctccactgttccttgcaccacccagaagatagc

SEQ ID NO: 431256 - DNA, 33 bp, Homo sapien
ctccactgttccttgcgccacccagaagatagc

SEQ ID NO: 431257 - DNA, 33 bp, Homo sapien
ggagtgttcgaccagactctgcaagctcactga

SEQ ID NO: 431258 - DNA, 33 bp, Homo sapien
ggagtgttcgaccagattctgcaagctcactga

SEQ ID NO: 431259 - DNA, 33 bp, Homo sapien
cagcaaaacctgtgggcagtcacccgacccaga

SEQ ID NO: 431260 - DNA, 33 bp, Homo sapien
cagcaaaacctgtgggtagtcacccgacccaga

SEQ ID NO: 431261 - DNA, 33 bp, Homo sapien
tgtgtgtgtaaggtcagtctctcttatagattc

SEQ ID NO: 431262 - DNA, 33 bp, Homo sapien
tgtgtgtgtaaggtcattctctcttatagattc

SEQ ID NO: 431263 - DNA, 33 bp, Homo sapien
tgttgcatccaaatcaatagggcttccctccag

SEQ ID NO: 431264 - DNA, 33 bp, Homo sapien
tgttgcatccaaatcagtagggcttccctccag

SEQ ID NO: 431265 - DNA, 33 bp, Homo sapien
ttggtcctggaggaaagttgcctggtttgcact

SEQ ID NO: 431266 - DNA, 33 bp, Homo sapien
ttggtcctggaggaaatttgcctggtttgcact

SEQ ID NO: 431267 - DNA, 33 bp, Homo sapien
gtggtttgaggaataccgcaccccttgtctctg

SEQ ID NO: 431268 - DNA, 33 bp, Homo sapien
gtggtttgaggaatactgcaccccttgtctctg

SEQ ID NO: 431269 - DNA, 33 bp, Homo sapien
ttaccaattattctgacgtaagacctcagagac

SEQ ID NO: 431270 - DNA, 33 bp, Homo sapien
ttaccaattattctgatgtaagacctcagagac

SEQ ID NO: 431271 - DNA, 33 bp, Homo sapien
gttgtgtatagccttacgaagccagtaccagtt

SEQ ID NO: 431272 - DNA, 33 bp, Homo sapien
gttgtgtatagccttatgaagccagtaccagtt

SEQ ID NO: 431273 - DNA, 33 bp, Homo sapien
agtttgcttttattggcagagctgaaactgatt

SEQ ID NO: 431274 - DNA, 33 bp, Homo sapien
agtttgcttttattggtagagctgaaactgatt

SEQ ID NO: 431275 - DNA, 33 bp, Homo sapien
acaaaattctgccttaaactatttccaggctgt

SEQ ID NO: 431276 - DNA, 33 bp, Homo sapien
acaaaattctgccttagactatttccaggctgt

SEQ ID NO: 431277 - DNA, 33 bp, Homo sapien
agagacatgacttgctaaaaatgggtgaatttg

SEQ ID NO: 431278 - DNA, 33 bp, Homo sapien
agagacatgacttgctgaaaatgggtgaatttg

SEQ ID NO: 431279 - DNA, 33 bp, Homo sapien
tcagctatcactcgacaaagaggcagctgatgc

SEQ ID NO: 431280 - DNA, 33 bp, Homo sapien
tcagctatcactcgaccaagaggcagctgatgc

SEQ ID NO: 431281 - DNA, 33 bp, Homo sapien
gagacaaaacatgacaacttagatagcagggtc

SEQ ID NO: 431282 - DNA, 33 bp, Homo sapien
gagacaaaacatgacaccttagatagcagggtc

SEQ ID NO: 431283 - DNA, 33 bp, Homo sapien
gtaatgaatggggaacagaagaacaacagtaaa

SEQ ID NO: 431284 - DNA, 33 bp, Homo sapien
gtaatgaatggggaacggaagaacaacagtaaa

SEQ ID NO: 431285 - DNA, 33 bp, Homo sapien
tgtatttcttctttcaactttatgagttcctgc

SEQ ID NO: 431286 - DNA, 33 bp, Homo sapien
tgtatttcttctttcatctttatgagttcctgc

SEQ ID NO: 431287 - DNA, 33 bp, Homo sapien
cagatgaaagatcccactcttggaattctctgg

SEQ ID NO: 431288 - DNA, 33 bp, Homo sapien
cagatgaaagatcccagtcttggaattctctgg

SEQ ID NO: 431289 - DNA, 33 bp, Homo sapien
ctgtgttttcactgtcaatagagtcagtttaat

SEQ ID NO: 431290 - DNA, 33 bp, Homo sapien
ctgtgttttcactgtcgatagagtcagtttaat

SEQ ID NO: 431291 - DNA, 33 bp, Homo sapien
ggaataggcaaaagggaaggcccaaaatctgtc

SEQ ID NO: 431292 - DNA, 33 bp, Homo sapien
ggaataggcaaaagggcaggcccaaaatctgtc

SEQ ID NO: 431293 - DNA, 33 bp, Homo sapien
aaaacaccattaactacaaactggaacaggaat

SEQ ID NO: 431294 - DNA, 33 bp, Homo sapien
aaaacaccattaactataaactggaacaggaat

SEQ ID NO: 431295 - DNA, 33 bp, Homo sapien
tggctgccagcagttaccagaaccttaaaaaaa

SEQ ID NO: 431296 - DNA, 33 bp, Homo sapien
tggctgccagcagttatcagaaccttaaaaaaa

SEQ ID NO: 431297 - DNA, 33 bp, Homo sapien
aggttgttcttgatcgcaaatgtccagtggctg

SEQ ID NO: 431298 - DNA, 33 bp, Homo sapien
aggttgttcttgatcgtaaatgtccagtggctg

SEQ ID NO: 431299 - DNA, 33 bp, Homo sapien
ggccctggggttgtgacgatggaaccaagattc

SEQ ID NO: 431300 - DNA, 33 bp, Homo sapien
ggccctggggttgtgatgatggaaccaagattc

SEQ ID NO: 431301 - DNA, 33 bp, Homo sapien
tgttcataattcacaacctttaaacctgttaga

SEQ ID NO: 431302 - DNA, 33 bp, Homo sapien
tgttcataattcacaatctttaaacctgttaga

SEQ ID NO: 431303 - DNA, 33 bp, Homo sapien
atccagaaacaccagaaagacggcagctaaccc

SEQ ID NO: 431304 - DNA, 33 bp, Homo sapien
atccagaaacaccagagagacggcagctaaccc

SEQ ID NO: 431305 - DNA, 33 bp, Homo sapien
cactgcagtcatctgcaaatcatctcctggatt

SEQ ID NO: 431306 - DNA, 33 bp, Homo sapien
cactgcagtcatctgcgaatcatctcctggatt

SEQ ID NO: 431307 - DNA, 33 bp, Homo sapien
gtaaatcctagagaaaatcacatggatgcacaa

SEQ ID NO: 431308 - DNA, 33 bp, Homo sapien
gtaaatcctagagaaattcacatggatgcacaa

SEQ ID NO: 431309 - DNA, 33 bp, Homo sapien
cagaagtagcagttctaacccgggctggaaaat

SEQ ID NO: 431310 - DNA, 33 bp, Homo sapien
cagaagtagcagttctgacccgggctggaaaat

SEQ ID NO: 431311 - DNA, 33 bp, Homo sapien
ttaaaatcaaagtgtcacaaagttctaaatact

SEQ ID NO: 431312 - DNA, 33 bp, Homo sapien
ttaaaatcaaagtgtcgcaaagttctaaatact

SEQ ID NO: 431313 - DNA, 33 bp, Homo sapien
gcaggtggctgcagcagcaaggaagggcatgtg

SEQ ID NO: 431314 - DNA, 33 bp, Homo sapien
gcaggtggctgcagcatcaaggaagggcatgtg

SEQ ID NO: 431315 - DNA, 33 bp, Homo sapien
accattaaggagtgaccaaaaatggtagtagaa

SEQ ID NO: 431316 - DNA, 33 bp, Homo sapien
accattaaggagtgactaaaaatggtagtagaa

SEQ ID NO: 431317 - DNA, 33 bp, Homo sapien
tgttccaacaagcatactttccagagatcaaag

SEQ ID NO: 431318 - DNA, 33 bp, Homo sapien
tgttccaacaagcatattttccagagatcaaag

SEQ ID NO: 431319 - DNA, 33 bp, Homo sapien
caattcagccaggttccaattatggtggtaatg

SEQ ID NO: 431320 - DNA, 33 bp, Homo sapien
caattcagccaggttctaattatggtggtaatg

SEQ ID NO: 431321 - DNA, 33 bp, Homo sapien
tatattgctggaaaagcacccattgctctgttc

SEQ ID NO: 431322 - DNA, 33 bp, Homo sapien
tatattgctggaaaagtacccattgctctgttc

SEQ ID NO: 431323 - DNA, 33 bp, Homo sapien
ttcgagaaggatttcacactggttgttttccaa

SEQ ID NO: 431324 - DNA, 33 bp, Homo sapien
ttcgagaaggatttcatactggttgttttccaa

SEQ ID NO: 431325 - DNA, 33 bp, Homo sapien
tgtggaataaaaaaggccaaggtgccattaagt

SEQ ID NO: 431326 - DNA, 33 bp, Homo sapien
tgtggaataaaaaaggtcaaggtgccattaagt

SEQ ID NO: 431327 - DNA, 33 bp, Homo sapien
acttcacgcttctttacggtctcctatgttgac

SEQ ID NO: 431328 - DNA, 33 bp, Homo sapien
acttcacgcttctttatggtctcctatgttgac

SEQ ID NO: 431329 - DNA, 33 bp, Homo sapien
atggtttaacctgtgaaaaatctacctcacaga

SEQ ID NO: 431330 - DNA, 33 bp, Homo sapien
atggtttaacctgtgacaaatctacctcacaga

SEQ ID NO: 431331 - DNA, 33 bp, Homo sapien
agaagagaaaggattaaaaaccatgggcttagc

SEQ ID NO: 431332 - DNA, 33 bp, Homo sapien
agaagagaaaggattacaaaccatgggcttagc

SEQ ID NO: 431333 - DNA, 33 bp, Homo sapien
tttcccagctttctaacatgagcatcgattact

SEQ ID NO: 431334 - DNA, 33 bp, Homo sapien
tttcccagctttctaatatgagcatcgattact

SEQ ID NO: 431335 - DNA, 33 bp, Homo sapien
tacacagtcatttaccaaagctatgtcctaact

SEQ ID NO: 431336 - DNA, 33 bp, Homo sapien
tacacagtcatttacccaagctatgtcctaact

SEQ ID NO: 431337 - DNA, 33 bp, Homo sapien
tggtggtagggcaaaccggtagaaacctgtaat

SEQ ID NO: 431338 - DNA, 33 bp, Homo sapien
tggtggtagggcaaactggtagaaacctgtaat

SEQ ID NO: 431339 - DNA, 33 bp, Homo sapien
aggatttggtatgtgacgaatgtgtgatatcat

SEQ ID NO: 431340 - DNA, 33 bp, Homo sapien
aggatttggtatgtgatgaatgtgtgatatcat

SEQ ID NO: 431341 - DNA, 33 bp, Homo sapien
caaaatgtaacacgcgaccaggcacggtggctc

SEQ ID NO: 431342 - DNA, 33 bp, Homo sapien
caaaatgtaacacgcggccaggcacggtggctc

SEQ ID NO: 431343 - DNA, 33 bp, Homo sapien
caaaatgatagctgcaatagaaagtaaagctca

SEQ ID NO: 431344 - DNA, 33 bp, Homo sapien
caaaatgatagctgcagtagaaagtaaagctca

SEQ ID NO: 431345 - DNA, 33 bp, Homo sapien
tcctctaagaaagctcgctgtttgcatctgtcc

SEQ ID NO: 431346 - DNA, 33 bp, Homo sapien
tcctctaagaaagctctctgtttgcatctgtcc

SEQ ID NO: 431347 - DNA, 33 bp, Homo sapien
tgcataaaccagccagaatgtgtcgggaagaaa

SEQ ID NO: 431348 - DNA, 33 bp, Homo sapien
tgcataaaccagccaggatgtgtcgggaagaaa

SEQ ID NO: 431349 - DNA, 33 bp, Homo sapien
aattctactagcagtaaaataggatgacgttat

SEQ ID NO: 431350 - DNA, 33 bp, Homo sapien
aattctactagcagtagaataggatgacgttat

SEQ ID NO: 431351 - DNA, 33 bp, Homo sapien
ggatgagtggacatataagcagttgtctttttg

SEQ ID NO: 431352 - DNA, 33 bp, Homo sapien
ggatgagtggacatatgagcagttgtctttttg

SEQ ID NO: 431353 - DNA, 33 bp, Homo sapien
caaagtaaccatctcacctctcaagacagtcaa

SEQ ID NO: 431354 - DNA, 33 bp, Homo sapien
caaagtaaccatctcagctctcaagacagtcaa

SEQ ID NO: 431355 - DNA, 33 bp, Homo sapien
ggaagaacaactacaccgtggtgtggacttcaa

SEQ ID NO: 431356 - DNA, 33 bp, Homo sapien
ggaagaacaactacactgtggtgtggacttcaa

SEQ ID NO: 431357 - DNA, 33 bp, Homo sapien
cctacttactacaagacgtaaaaggcacaaatg

SEQ ID NO: 431358 - DNA, 33 bp, Homo sapien
cctacttactacaagatgtaaaaggcacaaatg

SEQ ID NO: 431359 - DNA, 33 bp, Homo sapien
cctgggctctgcaggcaaaggcttatgggtggt

SEQ ID NO: 431360 - DNA, 33 bp, Homo sapien
cctgggctctgcaggcgaaggcttatgggtggt

SEQ ID NO: 431361 - DNA, 33 bp, Homo sapien
ctctaagaatatccatcagcacagaagaaaagg

SEQ ID NO: 431362 - DNA, 33 bp, Homo sapien
ctctaagaatatccattagcacagaagaaaagg

SEQ ID NO: 431363 - DNA, 33 bp, Homo sapien
ggtacaagccataaaacacatggtactaattct

SEQ ID NO: 431364 - DNA, 33 bp, Homo sapien
ggtacaagccataaaatacatggtactaattct

SEQ ID NO: 431365 - DNA, 33 bp, Homo sapien
tctcccaagttacaagcctagagctatactgga

SEQ ID NO: 431366 - DNA, 33 bp, Homo sapien
tctcccaagttacaaggctagagctatactgga

SEQ ID NO: 431367 - DNA, 33 bp, Homo sapien
acacaggaaagagaaaagagtccagtatagctc

SEQ ID NO: 431368 - DNA, 33 bp, Homo sapien
acacaggaaagagaaaggagtccagtatagctc

SEQ ID NO: 431369 - DNA, 33 bp, Homo sapien
aggcaagaaacgatgaaggccagagctaaggaa

SEQ ID NO: 431370 - DNA, 33 bp, Homo sapien
aggcaagaaacgatgagggccagagctaaggaa

SEQ ID NO: 431371 - DNA, 33 bp, Homo sapien
cttgtgagtagaacgtcacttgatccttggatc

SEQ ID NO: 431372 - DNA, 33 bp, Homo sapien
cttgtgagtagaacgttacttgatccttggatc

SEQ ID NO: 431373 - DNA, 33 bp, Homo sapien
ccaggagtgtatccacccttatctgccctaccc

SEQ ID NO: 431374 - DNA, 33 bp, Homo sapien
ccaggagtgtatccacgcttatctgccctaccc

SEQ ID NO: 431375 - DNA, 33 bp, Homo sapien
cctgagatacacaaaccgtttaccaggagtgta

SEQ ID NO: 431376 - DNA, 33 bp, Homo sapien
cctgagatacacaaactgtttaccaggagtgta

SEQ ID NO: 431377 - DNA, 33 bp, Homo sapien
aagccattagtaaatgcacactgctgtatttat

SEQ ID NO: 431378 - DNA, 33 bp, Homo sapien
aagccattagtaaatggacactgctgtatttat

SEQ ID NO: 431379 - DNA, 33 bp, Homo sapien
tacctattctaacaccagcatttatggaggatt

SEQ ID NO: 431380 - DNA, 33 bp, Homo sapien
tacctattctaacaccggcatttatggaggatt

SEQ ID NO: 431381 - DNA, 33 bp, Homo sapien
ttgaacaaatagggaaatgaaactctgaagatg

SEQ ID NO: 431382 - DNA, 33 bp, Homo sapien
ttgaacaaatagggaagtgaaactctgaagatg

SEQ ID NO: 431383 - DNA, 33 bp, Homo sapien
atgtctttgggaagtacgctctctcgggacgat

SEQ ID NO: 431384 - DNA, 33 bp, Homo sapien
atgtctttgggaagtatgctctctcgggacgat

SEQ ID NO: 431385 - DNA, 33 bp, Homo sapien
cgtggctattgatgccaagctactgggaaacat

SEQ ID NO: 431386 - DNA, 33 bp, Homo sapien
cgtggctattgatgccgagctactgggaaacat

SEQ ID NO: 431387 - DNA, 33 bp, Homo sapien
ccataagtgaaaaacaaacatgagattagtcat

SEQ ID NO: 431388 - DNA, 33 bp, Homo sapien
ccataagtgaaaaacacacatgagattagtcat

SEQ ID NO: 431389 - DNA, 33 bp, Homo sapien
ggctgcagaccaagaccggagggccatgttctt

SEQ ID NO: 431390 - DNA, 33 bp, Homo sapien
ggctgcagaccaagactggagggccatgttctt

SEQ ID NO: 431391 - DNA, 33 bp, Homo sapien
atctaaaccttaagacagctttttgactagttg

SEQ ID NO: 431392 - DNA, 33 bp, Homo sapien
atctaaaccttaagacggctttttgactagttg

SEQ ID NO: 431393 - DNA, 33 bp, Homo sapien
tgcagttccatggccccgaggacctagcacagc

SEQ ID NO: 431394 - DNA, 33 bp, Homo sapien
tgcagttccatggccctgaggacctagcacagc

SEQ ID NO: 431395 - DNA, 33 bp, Homo sapien
cagtagactgtgtaagactagggtgaggaggtt

SEQ ID NO: 431396 - DNA, 33 bp, Homo sapien
cagtagactgtgtaaggctagggtgaggaggtt

SEQ ID NO: 431397 - DNA, 33 bp, Homo sapien
ataccaagtgatgaaaagaatgcaagtcaacta

SEQ ID NO: 431398 - DNA, 33 bp, Homo sapien
ataccaagtgatgaaaggaatgcaagtcaacta

SEQ ID NO: 431399 - DNA, 33 bp, Homo sapien
cctttcactaatggaaaataataaattctcgtt

SEQ ID NO: 431400 - DNA, 33 bp, Homo sapien
cctttcactaatggaagataataaattctcgtt

SEQ ID NO: 431401 - DNA, 33 bp, Homo sapien
tcctctctcagagaaactgactcccagccatgt

SEQ ID NO: 431402 - DNA, 33 bp, Homo sapien
tcctctctcagagaaattgactcccagccatgt

SEQ ID NO: 431403 - DNA, 33 bp, Homo sapien
gatctgtcctcctgctaaaaagcccaaccttga

SEQ ID NO: 431404 - DNA, 33 bp, Homo sapien
gatctgtcctcctgcttaaaagcccaaccttga

SEQ ID NO: 431405 - DNA, 33 bp, Homo sapien
tccaagttttgagaagcctgtctacagtttttt

SEQ ID NO: 431406 - DNA, 33 bp, Homo sapien
tccaagttttgagaaggctgtctacagtttttt

SEQ ID NO: 431407 - DNA, 33 bp, Homo sapien
gttagtatctgacacacggtagggaaacaaagg

SEQ ID NO: 431408 - DNA, 33 bp, Homo sapien
gttagtatctgacacatggtagggaaacaaagg

SEQ ID NO: 431409 - DNA, 33 bp, Homo sapien
acccagatcacatatcaacaaaacacagtcatt

SEQ ID NO: 431410 - DNA, 33 bp, Homo sapien
acccagatcacatatccacaaaacacagtcatt

SEQ ID NO: 431411 - DNA, 33 bp, Homo sapien
gggtaagctgggtgtccctggccatgcaagttc

SEQ ID NO: 431412 - DNA, 33 bp, Homo sapien
gggtaagctgggtgtctctggccatgcaagttc

SEQ ID NO: 431413 - DNA, 33 bp, Homo sapien
aaaaaaaaaagatgccaactgtatgaagagaga

SEQ ID NO: 431414 - DNA, 33 bp, Homo sapien
aaaaaaaaaagatgccgactgtatgaagagaga

SEQ ID NO: 431415 - DNA, 33 bp, Homo sapien
acaagttaattatccaactaagaaggactttta

SEQ ID NO: 431416 - DNA, 33 bp, Homo sapien
acaagttaattatccacctaagaaggactttta

SEQ ID NO: 431417 - DNA, 33 bp, Homo sapien
atgttaagacgtagataagctagaatcagcttt

SEQ ID NO: 431418 - DNA, 33 bp, Homo sapien
atgttaagacgtagatgagctagaatcagcttt

SEQ ID NO: 431419 - DNA, 33 bp, Homo sapien
gagtgtgctcgcaggaaaaaaggtggtaacaga

SEQ ID NO: 431420 - DNA, 33 bp, Homo sapien
gagtgtgctcgcaggagaaaaggtggtaacaga

SEQ ID NO: 431421 - DNA, 33 bp, Homo sapien
atgccctatgtcattacgctaacataaacgtgc

SEQ ID NO: 431422 - DNA, 33 bp, Homo sapien
atgccctatgtcattatgctaacataaacgtgc

SEQ ID NO: 431423 - DNA, 33 bp, Homo sapien
ataacagagcagctcaaaactctggtgttgatc

SEQ ID NO: 431424 - DNA, 33 bp, Homo sapien
ataacagagcagctcagaactctggtgttgatc

SEQ ID NO: 431425 - DNA, 33 bp, Homo sapien
tctaattcttaaattgaagacaggcagtctcca

SEQ ID NO: 431426 - DNA, 33 bp, Homo sapien
tctaattcttaaattgcagacaggcagtctcca

SEQ ID NO: 431427 - DNA, 33 bp, Homo sapien
agccagagtcacagcaaatggtttttgaggttt

SEQ ID NO: 431428 - DNA, 33 bp, Homo sapien
agccagagtcacagcagatggtttttgaggttt

SEQ ID NO: 431429 - DNA, 33 bp, Homo sapien
tcactactgccctgagaaagcctgtctgatgtt

SEQ ID NO: 431430 - DNA, 33 bp, Homo sapien
tcactactgccctgaggaagcctgtctgatgtt

SEQ ID NO: 431431 - DNA, 33 bp, Homo sapien
gagccttttgaatttgcaacttctgtgagaagg

SEQ ID NO: 431432 - DNA, 33 bp, Homo sapien
gagccttttgaatttgtaacttctgtgagaagg

SEQ ID NO: 431433 - DNA, 33 bp, Homo sapien
ctctcactgggccctcacattccacctgtgatt

SEQ ID NO: 431434 - DNA, 33 bp, Homo sapien
ctctcactgggccctcgcattccacctgtgatt

SEQ ID NO: 431435 - DNA, 33 bp, Homo sapien
agcaaattgttcatacaacaaggggcacgttgg

SEQ ID NO: 431436 - DNA, 33 bp, Homo sapien
agcaaattgttcatacgacaaggggcacgttgg

SEQ ID NO: 431437 - DNA, 33 bp, Homo sapien
acagtgctaccttatagatcccataacttctcc

SEQ ID NO: 431438 - DNA, 33 bp, Homo sapien
acagtgctaccttatatatcccataacttctcc

SEQ ID NO: 431439 - DNA, 33 bp, Homo sapien
actgtctcatgagctgcaggatgtttagcagaa

SEQ ID NO: 431440 - DNA, 33 bp, Homo sapien
actgtctcatgagctgtaggatgtttagcagaa

SEQ ID NO: 431441 - DNA, 33 bp, Homo sapien
cccgtcagatggagaacgtgaccatgctttcct

SEQ ID NO: 431442 - DNA, 33 bp, Homo sapien
cccgtcagatggagaatgtgaccatgctttcct

SEQ ID NO: 431443 - DNA, 33 bp, Homo sapien
aggccaggagagaacagtgaaggcccgtgccag

SEQ ID NO: 431444 - DNA, 33 bp, Homo sapien
aggccaggagagaacattgaaggcccgtgccag

SEQ ID NO: 431445 - DNA, 33 bp, Homo sapien
gctgttcagagtctcaatcccttacccatgtgt

SEQ ID NO: 431446 - DNA, 33 bp, Homo sapien
gctgttcagagtctcagtcccttacccatgtgt

SEQ ID NO: 431447 - DNA, 33 bp, Homo sapien
ccaaatcctgttctcacagagtttacatccatg

SEQ ID NO: 431448 - DNA, 33 bp, Homo sapien
ccaaatcctgttctcatagagtttacatccatg

SEQ ID NO: 431449 - DNA, 33 bp, Homo sapien
agtttacatccatgaaaaaggcaatttattgag

SEQ ID NO: 431450 - DNA, 33 bp, Homo sapien
agtttacatccatgaagaaggcaatttattgag

SEQ ID NO: 431451 - DNA, 33 bp, Homo sapien
ttaccttcattgactaagagtgatagtagtagt

SEQ ID NO: 431452 - DNA, 33 bp, Homo sapien
ttaccttcattgactatgagtgatagtagtagt

SEQ ID NO: 431453 - DNA, 33 bp, Homo sapien
agtgagcccttcagacaaggagcacagtgacag

SEQ ID NO: 431454 - DNA, 33 bp, Homo sapien
agtgagcccttcagacgaggagcacagtgacag

SEQ ID NO: 431455 - DNA, 33 bp, Homo sapien
ccctattcatcctcaccagtgcatgccctttcc

SEQ ID NO: 431456 - DNA, 33 bp, Homo sapien
ccctattcatcctcactagtgcatgccctttcc

SEQ ID NO: 431457 - DNA, 33 bp, Homo sapien
attccaagaggagtaacgccatcaatattggtc

SEQ ID NO: 431458 - DNA, 33 bp, Homo sapien
attccaagaggagtaatgccatcaatattggtc

SEQ ID NO: 431459 - DNA, 33 bp, Homo sapien
ataaatggaagtatgacgatttttattttcttt

SEQ ID NO: 431460 - DNA, 33 bp, Homo sapien
ataaatggaagtatgatgatttttattttcttt

SEQ ID NO: 431461 - DNA, 33 bp, Homo sapien
cccgtggctgcagcgaaaccaggcccactcctc

SEQ ID NO: 431462 - DNA, 33 bp, Homo sapien
cccgtggctgcagcgagaccaggcccactcctc

SEQ ID NO: 431463 - DNA, 33 bp, Homo sapien
cagattctttcctactaaggtatgcaaggcaag

SEQ ID NO: 431464 - DNA, 33 bp, Homo sapien
cagattctttcctactgaggtatgcaaggcaag

SEQ ID NO: 431465 - DNA, 33 bp, Homo sapien
tcttttgctgtgatcaatctctgctaagcccat

SEQ ID NO: 431466 - DNA, 33 bp, Homo sapien
tcttttgctgtgatcagtctctgctaagcccat

SEQ ID NO: 431467 - DNA, 33 bp, Homo sapien
tacgatagtgaatatacgttgctacaagaggaa

SEQ ID NO: 431468 - DNA, 33 bp, Homo sapien
tacgatagtgaatatatgttgctacaagaggaa

SEQ ID NO: 431469 - DNA, 33 bp, Homo sapien
aaaaaagatgagtaaacggcaaagggcaaaata

SEQ ID NO: 431470 - DNA, 33 bp, Homo sapien
aaaaaagatgagtaaatggcaaagggcaaaata

SEQ ID NO: 431471 - DNA, 33 bp, Homo sapien
taagtggccccctcataaacactagagactgtc

SEQ ID NO: 431472 - DNA, 33 bp, Homo sapien
taagtggccccctcatcaacactagagactgtc

SEQ ID NO: 431473 - DNA, 33 bp, Homo sapien
catgagaacattgctgaaaattgtggcaatgag

SEQ ID NO: 431474 - DNA, 33 bp, Homo sapien
catgagaacattgctggaaattgtggcaatgag

SEQ ID NO: 431475 - DNA, 33 bp, Homo sapien
cacttggcatgaaaagcaacaaatagctaaata

SEQ ID NO: 431476 - DNA, 33 bp, Homo sapien
cacttggcatgaaaaggaacaaatagctaaata

SEQ ID NO: 431477 - DNA, 33 bp, Homo sapien
gactgctctgtaactcacttgtctcactttctc

SEQ ID NO: 431478 - DNA, 33 bp, Homo sapien
gactgctctgtaactcgcttgtctcactttctc

SEQ ID NO: 431479 - DNA, 33 bp, Homo sapien
aaccaaaaatacaccaactgtggttatgtctag

SEQ ID NO: 431480 - DNA, 33 bp, Homo sapien
aaccaaaaatacaccagctgtggttatgtctag

SEQ ID NO: 431481 - DNA, 33 bp, Homo sapien
tggtcaaaacattgcaatataatctctgctgtt

SEQ ID NO: 431482 - DNA, 33 bp, Homo sapien
tggtcaaaacattgcagtataatctctgctgtt

SEQ ID NO: 431483 - DNA, 33 bp, Homo sapien
agccaataggacaaaaatatgaacttaatctaa

SEQ ID NO: 431484 - DNA, 33 bp, Homo sapien
agccaataggacaaaagtatgaacttaatctaa

SEQ ID NO: 431485 - DNA, 33 bp, Homo sapien
taatagcaatagctaacaattacatctagtgct

SEQ ID NO: 431486 - DNA, 33 bp, Homo sapien
taatagcaatagctaagaattacatctagtgct

SEQ ID NO: 431487 - DNA, 33 bp, Homo sapien
gaaatgaagaacaaatgattcccatatacttgt

SEQ ID NO: 431488 - DNA, 33 bp, Homo sapien
gaaatgaagaacaaattattcccatatacttgt

SEQ ID NO: 431489 - DNA, 33 bp, Homo sapien
gaggagttgtttaatgcacattgcgtttcacag

SEQ ID NO: 431490 - DNA, 33 bp, Homo sapien
gaggagttgtttaatggacattgcgtttcacag

SEQ ID NO: 431491 - DNA, 33 bp, Homo sapien
attaaagtgcctgatagggttttcagtaatcta

SEQ ID NO: 431492 - DNA, 33 bp, Homo sapien
attaaagtgcctgatatggttttcagtaatcta

SEQ ID NO: 431493 - DNA, 33 bp, Homo sapien
cctttgctatgccagtcaaaacagtgaagtcag

SEQ ID NO: 431494 - DNA, 33 bp, Homo sapien
cctttgctatgccagttaaaacagtgaagtcag

SEQ ID NO: 431495 - DNA, 33 bp, Homo sapien
ttgaggagttgccaggaaagaaatatgataagg

SEQ ID NO: 431496 - DNA, 33 bp, Homo sapien
ttgaggagttgccaggcaagaaatatgataagg

SEQ ID NO: 431497 - DNA, 33 bp, Homo sapien
tcactgtaatgtcaaacgagacctactgttatt

SEQ ID NO: 431498 - DNA, 33 bp, Homo sapien
tcactgtaatgtcaaatgagacctactgttatt

SEQ ID NO: 431499 - DNA, 33 bp, Homo sapien
aatacatggcattaaacttctcttggctgattt

SEQ ID NO: 431500 - DNA, 33 bp, Homo sapien
aatacatggcattaaatttctcttggctgattt

SEQ ID NO: 431501 - DNA, 33 bp, Homo sapien
acagagatttgaagggaaaaagggtgtttcaag

SEQ ID NO: 431502 - DNA, 33 bp, Homo sapien
acagagatttgaaggggaaaagggtgtttcaag

SEQ ID NO: 431503 - DNA, 33 bp, Homo sapien
gaaaaactaaagtggccacacaaatcgccctaa

SEQ ID NO: 431504 - DNA, 33 bp, Homo sapien
gaaaaactaaagtggctacacaaatcgccctaa

SEQ ID NO: 431505 - DNA, 33 bp, Homo sapien
ttttttatacagtctaacaattcctgccttgtg

SEQ ID NO: 431506 - DNA, 33 bp, Homo sapien
ttttttatacagtctatcaattcctgccttgtg

SEQ ID NO: 431507 - DNA, 33 bp, Homo sapien
cagagttcacacagggccaaaaccaggtagcac

SEQ ID NO: 431508 - DNA, 33 bp, Homo sapien
cagagttcacacagggtcaaaaccaggtagcac

SEQ ID NO: 431509 - DNA, 33 bp, Homo sapien
aacgagtatgactataaatttggccacattatc

SEQ ID NO: 431510 - DNA, 33 bp, Homo sapien
aacgagtatgactatacatttggccacattatc

SEQ ID NO: 431511 - DNA, 33 bp, Homo sapien
ccagggaacatacttacggtatgcgtatcaatc

SEQ ID NO: 431512 - DNA, 33 bp, Homo sapien
ccagggaacatacttagggtatgcgtatcaatc

SEQ ID NO: 431513 - DNA, 33 bp, Homo sapien
gaaccagaaatgcaatcatatttggcgagagtc

SEQ ID NO: 431514 - DNA, 33 bp, Homo sapien
gaaccagaaatgcaattatatttggcgagagtc

SEQ ID NO: 431515 - DNA, 33 bp, Homo sapien
tatcaattttgtgttgaagatgctgccgtggta

SEQ ID NO: 431516 - DNA, 33 bp, Homo sapien
tatcaattttgtgttggagatgctgccgtggta

SEQ ID NO: 431517 - DNA, 33 bp, Homo sapien
aatatagccatgtaacaaaactatactcatacc

SEQ ID NO: 431518 - DNA, 33 bp, Homo sapien
aatatagccatgtaacgaaactatactcatacc

SEQ ID NO: 431519 - DNA, 33 bp, Homo sapien
cccattaagctccacccctcaataatgttgcac

SEQ ID NO: 431520 - DNA, 33 bp, Homo sapien
cccattaagctccacctctcaataatgttgcac

SEQ ID NO: 431521 - DNA, 33 bp, Homo sapien
agaagactcactgttacacatttagaatatctg

SEQ ID NO: 431522 - DNA, 33 bp, Homo sapien
agaagactcactgttatacatttagaatatctg

SEQ ID NO: 431523 - DNA, 33 bp, Homo sapien
ttattttccatgactaagacaaaaatctaactg

SEQ ID NO: 431524 - DNA, 33 bp, Homo sapien
ttattttccatgactaggacaaaaatctaactg

SEQ ID NO: 431525 - DNA, 33 bp, Homo sapien
caagaaatagttgcccagctagaggtttgagta

SEQ ID NO: 431526 - DNA, 33 bp, Homo sapien
caagaaatagttgccccgctagaggtttgagta

SEQ ID NO: 431527 - DNA, 33 bp, Homo sapien
agtgttctaacagatccaaacgtttacttctag

SEQ ID NO: 431528 - DNA, 33 bp, Homo sapien
agtgttctaacagatctaaacgtttacttctag

SEQ ID NO: 431529 - DNA, 33 bp, Homo sapien
actttctagtatgaaactacttgcctcttacta

SEQ ID NO: 431530 - DNA, 33 bp, Homo sapien
actttctagtatgaaattacttgcctcttacta

SEQ ID NO: 431531 - DNA, 33 bp, Homo sapien
ttattagtatcagccaagtatacaaccgatttt

SEQ ID NO: 431532 - DNA, 33 bp, Homo sapien
ttattagtatcagccacgtatacaaccgatttt

SEQ ID NO: 431533 - DNA, 33 bp, Homo sapien
aaaacaaacaaacaaaccatgaaagccagaaga

SEQ ID NO: 431534 - DNA, 33 bp, Homo sapien
aaaacaaacaaacaaatcatgaaagccagaaga

SEQ ID NO: 431535 - DNA, 33 bp, Homo sapien
aggaagactggcacaacttcaataaagatagac

SEQ ID NO: 431536 - DNA, 33 bp, Homo sapien
aggaagactggcacaatttcaataaagatagac

SEQ ID NO: 431537 - DNA, 33 bp, Homo sapien
cttacgacaaatacaccgcaaacatcttaccaa

SEQ ID NO: 431538 - DNA, 33 bp, Homo sapien
cttacgacaaatacactgcaaacatcttaccaa

SEQ ID NO: 431539 - DNA, 33 bp, Homo sapien
ttaatgtaaaagaaggcacagaatgacatgatg

SEQ ID NO: 431540 - DNA, 33 bp, Homo sapien
ttaatgtaaaagaaggtacagaatgacatgatg

SEQ ID NO: 431541 - DNA, 33 bp, Homo sapien
taataaaaatgagctacatgaatgaacaaatga

SEQ ID NO: 431542 - DNA, 33 bp, Homo sapien
taataaaaatgagctatatgaatgaacaaatga

SEQ ID NO: 431543 - DNA, 33 bp, Homo sapien
gttgagtttcaactgagacacctgctttccagc

SEQ ID NO: 431544 - DNA, 33 bp, Homo sapien
gttgagtttcaactgatacacctgctttccagc

SEQ ID NO: 431545 - DNA, 33 bp, Homo sapien
gacctcaacgaggaaaataccaagcaagctgaa

SEQ ID NO: 431546 - DNA, 33 bp, Homo sapien
gacctcaacgaggaaagtaccaagcaagctgaa

SEQ ID NO: 431547 - DNA, 33 bp, Homo sapien
actttaagtgggacgtcaaggtcctagtgagat

SEQ ID NO: 431548 - DNA, 33 bp, Homo sapien
actttaagtgggacgtgaaggtcctagtgagat

SEQ ID NO: 431549 - DNA, 33 bp, Homo sapien
gcactgtgaactagaaaaatctgtttagaaatc

SEQ ID NO: 431550 - DNA, 33 bp, Homo sapien
gcactgtgaactagaagaatctgtttagaaatc

SEQ ID NO: 431551 - DNA, 33 bp, Homo sapien
taaaaccagaaaaccaatcaggataatgtgtta

SEQ ID NO: 431552 - DNA, 33 bp, Homo sapien
taaaaccagaaaaccagtcaggataatgtgtta

SEQ ID NO: 431553 - DNA, 33 bp, Homo sapien
atgaggtaattctttacactgatgagaagaaac

SEQ ID NO: 431554 - DNA, 33 bp, Homo sapien
atgaggtaattctttatactgatgagaagaaac

SEQ ID NO: 431555 - DNA, 33 bp, Homo sapien
caattaagaaggtgataaaccaagcagtgtaac

SEQ ID NO: 431556 - DNA, 33 bp, Homo sapien
caattaagaaggtgatgaaccaagcagtgtaac

SEQ ID NO: 431557 - DNA, 33 bp, Homo sapien
atacaggtctcttacacgaattgcagagttaaa

SEQ ID NO: 431558 - DNA, 33 bp, Homo sapien
atacaggtctcttacatgaattgcagagttaaa

SEQ ID NO: 431559 - DNA, 33 bp, Homo sapien
caatgctaaagtactaggctaagaattgtgaac

SEQ ID NO: 431560 - DNA, 33 bp, Homo sapien
caatgctaaagtactatgctaagaattgtgaac

SEQ ID NO: 431561 - DNA, 33 bp, Homo sapien
gcctcttagcagacaaaggaagagtgattaatg

SEQ ID NO: 431562 - DNA, 33 bp, Homo sapien
gcctcttagcagacaagggaagagtgattaatg

SEQ ID NO: 431563 - DNA, 33 bp, Homo sapien
gcaagcttttcatctacaacttcatctctctca

SEQ ID NO: 431564 - DNA, 33 bp, Homo sapien
gcaagcttttcatctataacttcatctctctca

SEQ ID NO: 431565 - DNA, 33 bp, Homo sapien
ctaactaatgctttaagccaggttgtgacatga

SEQ ID NO: 431566 - DNA, 33 bp, Homo sapien
ctaactaatgctttaatccaggttgtgacatga

SEQ ID NO: 431567 - DNA, 33 bp, Homo sapien
aaactggataacacgaggtggcaggaagaaact

SEQ ID NO: 431568 - DNA, 33 bp, Homo sapien
aaactggataacacgatgtggcaggaagaaact

SEQ ID NO: 431569 - DNA, 33 bp, Homo sapien
ttaagtacacggtgtagtaactcatgactgata

SEQ ID NO: 431570 - DNA, 33 bp, Homo sapien
ttaagtacacggtgtattaactcatgactgata

SEQ ID NO: 431571 - DNA, 33 bp, Homo sapien
tgtcatccatcataaaactatctgctttctgca

SEQ ID NO: 431572 - DNA, 33 bp, Homo sapien
tgtcatccatcataaatctatctgctttctgca

SEQ ID NO: 431573 - DNA, 33 bp, Homo sapien
gtctaggcctccaggcaatcattttcactccct

SEQ ID NO: 431574 - DNA, 33 bp, Homo sapien
gtctaggcctccaggcgatcattttcactccct

SEQ ID NO: 431575 - DNA, 33 bp, Homo sapien
caaatggactacgacactcccactgaacacctt

SEQ ID NO: 431576 - DNA, 33 bp, Homo sapien
caaatggactacgacattcccactgaacacctt

SEQ ID NO: 431577 - DNA, 33 bp, Homo sapien
tagtgcctggaactgacaaggtgttcagtggga

SEQ ID NO: 431578 - DNA, 33 bp, Homo sapien
tagtgcctggaactgataaggtgttcagtggga

SEQ ID NO: 431579 - DNA, 33 bp, Homo sapien
tgcacattgcaaaatcaccttgcagcgggagat

SEQ ID NO: 431580 - DNA, 33 bp, Homo sapien
tgcacattgcaaaatcgccttgcagcgggagat

SEQ ID NO: 431581 - DNA, 33 bp, Homo sapien
ctacaggtgttacagaaagactatagcctcctg

SEQ ID NO: 431582 - DNA, 33 bp, Homo sapien
ctacaggtgttacagagagactatagcctcctg

SEQ ID NO: 431583 - DNA, 33 bp, Homo sapien
atcttgcattttaaaacagaattctgaagacag

SEQ ID NO: 431584 - DNA, 33 bp, Homo sapien
atcttgcattttaaaagagaattctgaagacag

SEQ ID NO: 431585 - DNA, 33 bp, Homo sapien
attcctcatcagagcacggtcctcccgcagcag

SEQ ID NO: 431586 - DNA, 33 bp, Homo sapien
attcctcatcagagcatggtcctcccgcagcag

SEQ ID NO: 431587 - DNA, 33 bp, Homo sapien
ttgcttcggcaatctcaccctgacggagtatca

SEQ ID NO: 431588 - DNA, 33 bp, Homo sapien
ttgcttcggcaatctcgccctgacggagtatca

SEQ ID NO: 431589 - DNA, 33 bp, Homo sapien
aaccttgagctatgagaaggtccaatttgccca

SEQ ID NO: 431590 - DNA, 33 bp, Homo sapien
aaccttgagctatgagcaggtccaatttgccca

SEQ ID NO: 431591 - DNA, 33 bp, Homo sapien
tcagattctgatatcaaaggctagtaggagctg

SEQ ID NO: 431592 - DNA, 33 bp, Homo sapien
tcagattctgatatcacaggctagtaggagctg

SEQ ID NO: 431593 - DNA, 33 bp, Homo sapien
taaaatatgacaaagccaaaggccgttgtgttg

SEQ ID NO: 431594 - DNA, 33 bp, Homo sapien
taaaatatgacaaagctaaaggccgttgtgttg

SEQ ID NO: 431595 - DNA, 33 bp, Homo sapien
cccgttgggacagagcaacaaagcccaacagat

SEQ ID NO: 431596 - DNA, 33 bp, Homo sapien
cccgttgggacagagcgacaaagcccaacagat

SEQ ID NO: 431597 - DNA, 33 bp, Homo sapien
tgaagcctttcgaccaactcaatcatcgtattt

SEQ ID NO: 431598 - DNA, 33 bp, Homo sapien
tgaagcctttcgaccagctcaatcatcgtattt

SEQ ID NO: 431599 - DNA, 33 bp, Homo sapien
ttgttgttgttttggaagatagaaaccgcaaaa

SEQ ID NO: 431600 - DNA, 33 bp, Homo sapien
ttgttgttgttttggaggatagaaaccgcaaaa

SEQ ID NO: 431601 - DNA, 33 bp, Homo sapien
gctggacacagtttgaaggtaactcacacttca

SEQ ID NO: 431602 - DNA, 33 bp, Homo sapien
gctggacacagtttgagggtaactcacacttca

SEQ ID NO: 431603 - DNA, 33 bp, Homo sapien
agaaatgattctttaggcctgccataatctgtc

SEQ ID NO: 431604 - DNA, 33 bp, Homo sapien
agaaatgattctttagtcctgccataatctgtc

SEQ ID NO: 431605 - DNA, 33 bp, Homo sapien
ctattctcagccaccaaattaggtcagaatctg

SEQ ID NO: 431606 - DNA, 33 bp, Homo sapien
ctattctcagccaccagattaggtcagaatctg

SEQ ID NO: 431607 - DNA, 33 bp, Homo sapien
tcctctgggaactttcgctgatgctgctagacc

SEQ ID NO: 431608 - DNA, 33 bp, Homo sapien
tcctctgggaactttctctgatgctgctagacc

SEQ ID NO: 431609 - DNA, 33 bp, Homo sapien
tactttcctttgtaaactgcccaggctcagatg

SEQ ID NO: 431610 - DNA, 33 bp, Homo sapien
tactttcctttgtaaattgcccaggctcagatg

SEQ ID NO: 431611 - DNA, 33 bp, Homo sapien
ggccagagattgcaaacaggacttcagcaggca

SEQ ID NO: 431612 - DNA, 33 bp, Homo sapien
ggccagagattgcaaagaggacttcagcaggca

SEQ ID NO: 431613 - DNA, 33 bp, Homo sapien
aagaactgagaattagaaagagaaacagactgc

SEQ ID NO: 431614 - DNA, 33 bp, Homo sapien
aagaactgagaattaggaagagaaacagactgc

SEQ ID NO: 431615 - DNA, 33 bp, Homo sapien
gaccacatgcgcactgcaaacctccgggggatc

SEQ ID NO: 431616 - DNA, 33 bp, Homo sapien
gaccacatgcgcactgtaaacctccgggggatc

SEQ ID NO: 431617 - DNA, 33 bp, Homo sapien
atcttcaccccagtcacgtgagaggagcattta

SEQ ID NO: 431618 - DNA, 33 bp, Homo sapien
atcttcaccccagtcatgtgagaggagcattta

SEQ ID NO: 431619 - DNA, 33 bp, Homo sapien
cacacaccatgctccaactgcaagagtgcctgc

SEQ ID NO: 431620 - DNA, 33 bp, Homo sapien
cacacaccatgctccagctgcaagagtgcctgc

SEQ ID NO: 431621 - DNA, 33 bp, Homo sapien
tccttcttagagcgtccagaggaaataaatcag

SEQ ID NO: 431622 - DNA, 33 bp, Homo sapien
tccttcttagagcgtcgagaggaaataaatcag

SEQ ID NO: 431623 - DNA, 33 bp, Homo sapien
tcttgtctataatgtagggttaatgaacttgct

SEQ ID NO: 431624 - DNA, 33 bp, Homo sapien
tcttgtctataatgtatggttaatgaacttgct

SEQ ID NO: 431625 - DNA, 33 bp, Homo sapien
gaatacctgagacccaaagaattcataatcaaa

SEQ ID NO: 431626 - DNA, 33 bp, Homo sapien
gaatacctgagacccagagaattcataatcaaa

SEQ ID NO: 431627 - DNA, 33 bp, Homo sapien
ctgaaggaagaacaaacaggcctccagtcctgc

SEQ ID NO: 431628 - DNA, 33 bp, Homo sapien
ctgaaggaagaacaaagaggcctccagtcctgc

SEQ ID NO: 431629 - DNA, 33 bp, Homo sapien
tttgtggaagagatacagaaataaagaaggcct

SEQ ID NO: 431630 - DNA, 33 bp, Homo sapien
tttgtggaagagatacggaaataaagaaggcct

SEQ ID NO: 431631 - DNA, 33 bp, Homo sapien
caaacgtatcggtatacagtgctggagagttga

SEQ ID NO: 431632 - DNA, 33 bp, Homo sapien
caaacgtatcggtatatagtgctggagagttga

SEQ ID NO: 431633 - DNA, 33 bp, Homo sapien
tacgtttgtttaagacagtaaccacgaactcgg

SEQ ID NO: 431634 - DNA, 33 bp, Homo sapien
tacgtttgtttaagacggtaaccacgaactcgg

SEQ ID NO: 431635 - DNA, 33 bp, Homo sapien
ccagatgtcagtgttaacccttgaaatggaccg

SEQ ID NO: 431636 - DNA, 33 bp, Homo sapien
ccagatgtcagtgttaccccttgaaatggaccg

SEQ ID NO: 431637 - DNA, 33 bp, Homo sapien
taattcatccgccctccattcgccagatattta

SEQ ID NO: 431638 - DNA, 33 bp, Homo sapien
taattcatccgccctctattcgccagatattta

SEQ ID NO: 431639 - DNA, 33 bp, Homo sapien
tgttgctgggcagcacaattaagtcagtaccac

SEQ ID NO: 431640 - DNA, 33 bp, Homo sapien
tgttgctgggcagcacgattaagtcagtaccac

SEQ ID NO: 431641 - DNA, 33 bp, Homo sapien
aagccaatcaccaaacacttggcatccaaattc

SEQ ID NO: 431642 - DNA, 33 bp, Homo sapien
aagccaatcaccaaacgcttggcatccaaattc

SEQ ID NO: 431643 - DNA, 33 bp, Homo sapien
cagagcacgtcacagacaggctccctcttgatt

SEQ ID NO: 431644 - DNA, 33 bp, Homo sapien
cagagcacgtcacagagaggctccctcttgatt

SEQ ID NO: 431645 - DNA, 33 bp, Homo sapien
aacaccagggcaggtaagaatcagaaaataaag

SEQ ID NO: 431646 - DNA, 33 bp, Homo sapien
aacaccagggcaggtacgaatcagaaaataaag

SEQ ID NO: 431647 - DNA, 33 bp, Homo sapien
gccatgctggcatcaaacagtcagctggctctg

SEQ ID NO: 431648 - DNA, 33 bp, Homo sapien
gccatgctggcatcaagcagtcagctggctctg

SEQ ID NO: 431649 - DNA, 33 bp, Homo sapien
catagacaaggtctacaagctgggtcactgcag

SEQ ID NO: 431650 - DNA, 33 bp, Homo sapien
catagacaaggtctacgagctgggtcactgcag

SEQ ID NO: 431651 - DNA, 33 bp, Homo sapien
ttcactctcccatctccagcagcatgaaatgca

SEQ ID NO: 431652 - DNA, 33 bp, Homo sapien
ttcactctcccatctctagcagcatgaaatgca

SEQ ID NO: 431653 - DNA, 33 bp, Homo sapien
tatgtgttggtccccaaaaatagcaggttgaag

SEQ ID NO: 431654 - DNA, 33 bp, Homo sapien
tatgtgttggtccccagaaatagcaggttgaag

SEQ ID NO: 431655 - DNA, 33 bp, Homo sapien
gggagatgccttaggaaagctctttgcatggag

SEQ ID NO: 431656 - DNA, 33 bp, Homo sapien
gggagatgccttaggagagctctttgcatggag

SEQ ID NO: 431657 - DNA, 33 bp, Homo sapien
gatcagttcgttttaaaagatttcctgttggca

SEQ ID NO: 431658 - DNA, 33 bp, Homo sapien
gatcagttcgttttaagagatttcctgttggca

SEQ ID NO: 431659 - DNA, 33 bp, Homo sapien
attttccctgttctcactcccaattccaggagg

SEQ ID NO: 431660 - DNA, 33 bp, Homo sapien
attttccctgttctcattcccaattccaggagg

SEQ ID NO: 431661 - DNA, 33 bp, Homo sapien
ctgctcttccacgttagcccttagcccagcccc

SEQ ID NO: 431662 - DNA, 33 bp, Homo sapien
ctgctcttccacgttatcccttagcccagcccc

SEQ ID NO: 431663 - DNA, 33 bp, Homo sapien
ggtcccagctctgttacagcaaagtctccattc

SEQ ID NO: 431664 - DNA, 33 bp, Homo sapien
ggtcccagctctgttatagcaaagtctccattc

SEQ ID NO: 431665 - DNA, 33 bp, Homo sapien
tttcctgtgtgccagacgttctgtaaaatacag

SEQ ID NO: 431666 - DNA, 33 bp, Homo sapien
tttcctgtgtgccagatgttctgtaaaatacag

SEQ ID NO: 431667 - DNA, 33 bp, Homo sapien
acctcctcagcacataagaatcacaccatgccc

SEQ ID NO: 431668 - DNA, 33 bp, Homo sapien
acctcctcagcacatacgaatcacaccatgccc

SEQ ID NO: 431669 - DNA, 33 bp, Homo sapien
ggtacacaagacccaacaaaccatgtgactggg

SEQ ID NO: 431670 - DNA, 33 bp, Homo sapien
ggtacacaagacccaataaaccatgtgactggg

SEQ ID NO: 431671 - DNA, 33 bp, Homo sapien
atccacagaagacagcacctccaaccccagtca

SEQ ID NO: 431672 - DNA, 33 bp, Homo sapien
atccacagaagacagcgcctccaaccccagtca

SEQ ID NO: 431673 - DNA, 33 bp, Homo sapien
gtggatggagtgaaaagatgcttcattcattca

SEQ ID NO: 431674 - DNA, 33 bp, Homo sapien
gtggatggagtgaaaatatgcttcattcattca

SEQ ID NO: 431675 - DNA, 33 bp, Homo sapien
ctgccagctcattaccgcctcctgtcattagca

SEQ ID NO: 431676 - DNA, 33 bp, Homo sapien
ctgccagctcattacctcctcctgtcattagca

SEQ ID NO: 431677 - DNA, 33 bp, Homo sapien
agggtccgcttgagaactcaacaggtaacacgg

SEQ ID NO: 431678 - DNA, 33 bp, Homo sapien
agggtccgcttgagaagtcaacaggtaacacgg

SEQ ID NO: 431679 - DNA, 33 bp, Homo sapien
gttcacactatcgatccccctgtagagtctggg

SEQ ID NO: 431680 - DNA, 33 bp, Homo sapien
gttcacactatcgatctccctgtagagtctggg

SEQ ID NO: 431681 - DNA, 33 bp, Homo sapien
cttttcaaagttagaaaagccataaaatgcaag

SEQ ID NO: 431682 - DNA, 33 bp, Homo sapien
cttttcaaagttagaagagccataaaatgcaag

SEQ ID NO: 431683 - DNA, 33 bp, Homo sapien
gcaaggaagtgacagaccagaacctggccttag

SEQ ID NO: 431684 - DNA, 33 bp, Homo sapien
gcaaggaagtgacagatcagaacctggccttag

SEQ ID NO: 431685 - DNA, 33 bp, Homo sapien
cctcccagatgacagacatggattgaaagagaa

SEQ ID NO: 431686 - DNA, 33 bp, Homo sapien
cctcccagatgacagatatggattgaaagagaa

SEQ ID NO: 431687 - DNA, 33 bp, Homo sapien
actttcaggccaatccccagtgctccctcctct

SEQ ID NO: 431688 - DNA, 33 bp, Homo sapien
actttcaggccaatccgcagtgctccctcctct

SEQ ID NO: 431689 - DNA, 33 bp, Homo sapien
taggacttcttcatagcatggcacatcaccagc

SEQ ID NO: 431690 - DNA, 33 bp, Homo sapien
taggacttcttcatagtatggcacatcaccagc

SEQ ID NO: 431691 - DNA, 33 bp, Homo sapien
tttgtgtgaaagacccaaatggagataacggtc

SEQ ID NO: 431692 - DNA, 33 bp, Homo sapien
tttgtgtgaaagaccccaatggagataacggtc

SEQ ID NO: 431693 - DNA, 33 bp, Homo sapien
atattggtgacacagagataaacagacaggagt

SEQ ID NO: 431694 - DNA, 33 bp, Homo sapien
atattggtgacacagatataaacagacaggagt

SEQ ID NO: 431695 - DNA, 33 bp, Homo sapien
tttggaagcactaacacagaagtacccgaggag

SEQ ID NO: 431696 - DNA, 33 bp, Homo sapien
tttggaagcactaacatagaagtacccgaggag

SEQ ID NO: 431697 - DNA, 33 bp, Homo sapien
agcgtgcctgtctcccacgtgacattttcagca

SEQ ID NO: 431698 - DNA, 33 bp, Homo sapien
agcgtgcctgtctcccgcgtgacattttcagca

SEQ ID NO: 431699 - DNA, 33 bp, Homo sapien
ggtagggaaggagacaatgcaatgcccaactct

SEQ ID NO: 431700 - DNA, 33 bp, Homo sapien
ggtagggaaggagacagtgcaatgcccaactct

SEQ ID NO: 431701 - DNA, 33 bp, Homo sapien
ctgggaagcctagaaagctccgtaagtggggct

SEQ ID NO: 431702 - DNA, 33 bp, Homo sapien
ctgggaagcctagaaatctccgtaagtggggct

SEQ ID NO: 431703 - DNA, 33 bp, Homo sapien
atagtattgcattgtccagaaattcactaattg

SEQ ID NO: 431704 - DNA, 33 bp, Homo sapien
atagtattgcattgtcgagaaattcactaattg

SEQ ID NO: 431705 - DNA, 33 bp, Homo sapien
gaagaacctgtgtacacgtcagtcttattatga

SEQ ID NO: 431706 - DNA, 33 bp, Homo sapien
gaagaacctgtgtacatgtcagtcttattatga

SEQ ID NO: 431707 - DNA, 33 bp, Homo sapien
aaaaggacatgaaaatcacaggtcttcggggac

SEQ ID NO: 431708 - DNA, 33 bp, Homo sapien
aaaaggacatgaaaattacaggtcttcggggac

SEQ ID NO: 431709 - DNA, 33 bp, Homo sapien
gtgagaaaatgtagaaacatctagaatagtctc

SEQ ID NO: 431710 - DNA, 33 bp, Homo sapien
gtgagaaaatgtagaatcatctagaatagtctc

SEQ ID NO: 431711 - DNA, 33 bp, Homo sapien
ccctataatgctgtaactgactatttgatcagc

SEQ ID NO: 431712 - DNA, 33 bp, Homo sapien
ccctataatgctgtaattgactatttgatcagc

SEQ ID NO: 431713 - DNA, 33 bp, Homo sapien
gtgcagaaggttgagaccctgagctcagtaaac

SEQ ID NO: 431714 - DNA, 33 bp, Homo sapien
gtgcagaaggttgagagcctgagctcagtaaac

SEQ ID NO: 431715 - DNA, 33 bp, Homo sapien
tacacactcatgtagtaaagttctgagttctat

SEQ ID NO: 431716 - DNA, 33 bp, Homo sapien
tacacactcatgtagtgaagttctgagttctat

SEQ ID NO: 431717 - DNA, 33 bp, Homo sapien
ggccctgctgaagtgacatttacccatagcatt

SEQ ID NO: 431718 - DNA, 33 bp, Homo sapien
ggccctgctgaagtgatatttacccatagcatt

SEQ ID NO: 431719 - DNA, 33 bp, Homo sapien
cttcctactctcacaccctcagatcttttaagc

SEQ ID NO: 431720 - DNA, 33 bp, Homo sapien
cttcctactctcacactctcagatcttttaagc

SEQ ID NO: 431721 - DNA, 33 bp, Homo sapien
tgtcacttcctggctacgtgactctaagaaaga

SEQ ID NO: 431722 - DNA, 33 bp, Homo sapien
tgtcacttcctggctatgtgactctaagaaaga

SEQ ID NO: 431723 - DNA, 33 bp, Homo sapien
gccaggaagtgacagtaaaaattcaaaatccaa

SEQ ID NO: 431724 - DNA, 33 bp, Homo sapien
gccaggaagtgacagtgaaaattcaaaatccaa

SEQ ID NO: 431725 - DNA, 33 bp, Homo sapien
atgttcatgagaatgcgagtcgaagctaagaag

SEQ ID NO: 431726 - DNA, 33 bp, Homo sapien
atgttcatgagaatgctagtcgaagctaagaag

SEQ ID NO: 431727 - DNA, 33 bp, Homo sapien
cacacttcagcaccagaataccaggattagagg

SEQ ID NO: 431728 - DNA, 33 bp, Homo sapien
cacacttcagcaccaggataccaggattagagg

SEQ ID NO: 431729 - DNA, 33 bp, Homo sapien
gagtgttacagaacaacgagaaacaaagaggaa

SEQ ID NO: 431730 - DNA, 33 bp, Homo sapien
gagtgttacagaacaatgagaaacaaagaggaa

SEQ ID NO: 431731 - DNA, 33 bp, Homo sapien
agagcagagagggcaacgctcatttagggttga

SEQ ID NO: 431732 - DNA, 33 bp, Homo sapien
agagcagagagggcaaggctcatttagggttga

SEQ ID NO: 431733 - DNA, 33 bp, Homo sapien
ttgaaggactccaataagctgaaggacttgtgc

SEQ ID NO: 431734 - DNA, 33 bp, Homo sapien
ttgaaggactccaataggctgaaggacttgtgc

SEQ ID NO: 431735 - DNA, 33 bp, Homo sapien
agtctccagcacggaactgatactcctcatcaa

SEQ ID NO: 431736 - DNA, 33 bp, Homo sapien
agtctccagcacggaattgatactcctcatcaa

SEQ ID NO: 431737 - DNA, 33 bp, Homo sapien
agttctttgaggtagactaaaatgggcttcctg

SEQ ID NO: 431738 - DNA, 33 bp, Homo sapien
agttctttgaggtagattaaaatgggcttcctg

SEQ ID NO: 431739 - DNA, 33 bp, Homo sapien
tcccctatcgcagtgacagcttcaacaagaaag

SEQ ID NO: 431740 - DNA, 33 bp, Homo sapien
tcccctatcgcagtgagagcttcaacaagaaag

SEQ ID NO: 431741 - DNA, 33 bp, Homo sapien
tgtgaatgtggtattcaagcagtctccaactta

SEQ ID NO: 431742 - DNA, 33 bp, Homo sapien
tgtgaatgtggtattcgagcagtctccaactta

SEQ ID NO: 431743 - DNA, 33 bp, Homo sapien
cttaggatgaaaaggaaggtgttacttaggaat

SEQ ID NO: 431744 - DNA, 33 bp, Homo sapien
cttaggatgaaaaggacggtgttacttaggaat

SEQ ID NO: 431745 - DNA, 33 bp, Homo sapien
ctgcttctaagagggcaccaagatatcctgggc

SEQ ID NO: 431746 - DNA, 33 bp, Homo sapien
ctgcttctaagagggctccaagatatcctgggc

SEQ ID NO: 431747 - DNA, 33 bp, Homo sapien
gtcctgcatagacataactaatacctcaataga

SEQ ID NO: 431748 - DNA, 33 bp, Homo sapien
gtcctgcatagacatagctaatacctcaataga

SEQ ID NO: 431749 - DNA, 33 bp, Homo sapien
tcaactgacatacagaactagctagtgagggac

SEQ ID NO: 431750 - DNA, 33 bp, Homo sapien
tcaactgacatacagagctagctagtgagggac

SEQ ID NO: 431751 - DNA, 33 bp, Homo sapien
gctggtttatctcagaaccaggcaaatgggagc

SEQ ID NO: 431752 - DNA, 33 bp, Homo sapien
gctggtttatctcagagccaggcaaatgggagc

SEQ ID NO: 431753 - DNA, 33 bp, Homo sapien
ctgtaagcagtgataaattaagggtgtcagaga

SEQ ID NO: 431754 - DNA, 33 bp, Homo sapien
ctgtaagcagtgataagttaagggtgtcagaga

SEQ ID NO: 431755 - DNA, 33 bp, Homo sapien
ctaactgtcctgagtaactgaaaccccatccgc

SEQ ID NO: 431756 - DNA, 33 bp, Homo sapien
ctaactgtcctgagtatctgaaaccccatccgc

SEQ ID NO: 431757 - DNA, 33 bp, Homo sapien
tcactgatatcgggagcaattcgtagccatcaa

SEQ ID NO: 431758 - DNA, 33 bp, Homo sapien
tcactgatatcgggagtaattcgtagccatcaa

SEQ ID NO: 431759 - DNA, 33 bp, Homo sapien
gaacctggatacaggacgactgaaaaaagttac

SEQ ID NO: 431760 - DNA, 33 bp, Homo sapien
gaacctggatacaggatgactgaaaaaagttac

SEQ ID NO: 431761 - DNA, 33 bp, Homo sapien
gagggccaggcacagacggaatcatgaactaat

SEQ ID NO: 431762 - DNA, 33 bp, Homo sapien
gagggccaggcacagatggaatcatgaactaat

SEQ ID NO: 431763 - DNA, 33 bp, Homo sapien
ttgtacaccttgtaagcaatccataaattatag

SEQ ID NO: 431764 - DNA, 33 bp, Homo sapien
ttgtacaccttgtaaggaatccataaattatag

SEQ ID NO: 431765 - DNA, 33 bp, Homo sapien
accttctgtatcaaacaggtagtatggaggctg

SEQ ID NO: 431766 - DNA, 33 bp, Homo sapien
accttctgtatcaaacgggtagtatggaggctg

SEQ ID NO: 431767 - DNA, 33 bp, Homo sapien
tcttgtgatattcacccggacatttcttatgat

SEQ ID NO: 431768 - DNA, 33 bp, Homo sapien
tcttgtgatattcacctggacatttcttatgat

SEQ ID NO: 431769 - DNA, 33 bp, Homo sapien
cttctactccaacatccccagataaagtcatct

SEQ ID NO: 431770 - DNA, 33 bp, Homo sapien
cttctactccaacatcgccagataaagtcatct

SEQ ID NO: 431771 - DNA, 33 bp, Homo sapien
tagccagacttcttaccccacacaaagattcct

SEQ ID NO: 431772 - DNA, 33 bp, Homo sapien
tagccagacttcttactccacacaaagattcct

SEQ ID NO: 431773 - DNA, 33 bp, Homo sapien
aaaccccaaatcatacaacataacagtaggtta

SEQ ID NO: 431774 - DNA, 33 bp, Homo sapien
aaaccccaaatcatacgacataacagtaggtta

SEQ ID NO: 431775 - DNA, 33 bp, Homo sapien
agtgccactgtcctaaatatgtttcctgctgct

SEQ ID NO: 431776 - DNA, 33 bp, Homo sapien
agtgccactgtcctaactatgtttcctgctgct

SEQ ID NO: 431777 - DNA, 33 bp, Homo sapien
agaatgtgaagaaagacacaacctggtctctaa

SEQ ID NO: 431778 - DNA, 33 bp, Homo sapien
agaatgtgaagaaagatacaacctggtctctaa

SEQ ID NO: 431779 - DNA, 33 bp, Homo sapien
gtgtatacagatttgaagtagtgagagactgac

SEQ ID NO: 431780 - DNA, 33 bp, Homo sapien
gtgtatacagatttgacgtagtgagagactgac

SEQ ID NO: 431781 - DNA, 33 bp, Homo sapien
tttgagtacacataatcagttctcgaggaaagg

SEQ ID NO: 431782 - DNA, 33 bp, Homo sapien
tttgagtacacataattagttctcgaggaaagg

SEQ ID NO: 431783 - DNA, 33 bp, Homo sapien
ctttaagtggaactgacggtattacaaacacaa

SEQ ID NO: 431784 - DNA, 33 bp, Homo sapien
ctttaagtggaactgatggtattacaaacacaa

SEQ ID NO: 431785 - DNA, 33 bp, Homo sapien
cattaatttcaaataaaccttcctcagatgcca

SEQ ID NO: 431786 - DNA, 33 bp, Homo sapien
cattaatttcaaataatccttcctcagatgcca

SEQ ID NO: 431787 - DNA, 33 bp, Homo sapien
ttcagttggattaaggaacatggagagatttta

SEQ ID NO: 431788 - DNA, 33 bp, Homo sapien
ttcagttggattaaggtacatggagagatttta

SEQ ID NO: 431789 - DNA, 33 bp, Homo sapien
catatttcatatgcataaaggggagaaataaaa

SEQ ID NO: 431790 - DNA, 33 bp, Homo sapien
catatttcatatgcatcaaggggagaaataaaa

SEQ ID NO: 431791 - DNA, 33 bp, Homo sapien
gaagtgctgtctttcacgcctctgtgttgcctc

SEQ ID NO: 431792 - DNA, 33 bp, Homo sapien
gaagtgctgtctttcaggcctctgtgttgcctc

SEQ ID NO: 431793 - DNA, 33 bp, Homo sapien
tttgctgtttaatttacagtatcttagtgggct

SEQ ID NO: 431794 - DNA, 33 bp, Homo sapien
tttgctgtttaatttatagtatcttagtgggct

SEQ ID NO: 431795 - DNA, 33 bp, Homo sapien
ggctgcttgcttgaacagccacaccctctgaac

SEQ ID NO: 431796 - DNA, 33 bp, Homo sapien
ggctgcttgcttgaaccgccacaccctctgaac

SEQ ID NO: 431797 - DNA, 33 bp, Homo sapien
acagcaagcctgaaaaaggaaattgacgaagaa

SEQ ID NO: 431798 - DNA, 33 bp, Homo sapien
acagcaagcctgaaaacggaaattgacgaagaa

SEQ ID NO: 431799 - DNA, 33 bp, Homo sapien
gtggcctctgatagcaaaaagtagagcaaatgg

SEQ ID NO: 431800 - DNA, 33 bp, Homo sapien
gtggcctctgatagcagaaagtagagcaaatgg

SEQ ID NO: 431801 - DNA, 33 bp, Homo sapien
acatagtggaagtgacaaacgagctttcttggg

SEQ ID NO: 431802 - DNA, 33 bp, Homo sapien
acatagtggaagtgacgaacgagctttcttggg

SEQ ID NO: 431803 - DNA, 33 bp, Homo sapien
taatttgcataggaaacaatgaaggaatacata

SEQ ID NO: 431804 - DNA, 33 bp, Homo sapien
taatttgcataggaaataatgaaggaatacata

SEQ ID NO: 431805 - DNA, 33 bp, Homo sapien
ctgtataaactcttaacgtgtccttcctcctac

SEQ ID NO: 431806 - DNA, 33 bp, Homo sapien
ctgtataaactcttaatgtgtccttcctcctac

SEQ ID NO: 431807 - DNA, 33 bp, Homo sapien
tttcaacagatacttacggagcacccccatgtt

SEQ ID NO: 431808 - DNA, 33 bp, Homo sapien
tttcaacagatacttatggagcacccccatgtt

SEQ ID NO: 431809 - DNA, 33 bp, Homo sapien
agtaattgcactaggacagacgtgagtgccagg

SEQ ID NO: 431810 - DNA, 33 bp, Homo sapien
agtaattgcactaggatagacgtgagtgccagg

SEQ ID NO: 431811 - DNA, 33 bp, Homo sapien
ttctctttacattagaaaaaagtcctgattgcg

SEQ ID NO: 431812 - DNA, 33 bp, Homo sapien
ttctctttacattagagaaaagtcctgattgcg

SEQ ID NO: 431813 - DNA, 33 bp, Homo sapien
gtatggttgtgggtgcacgctgtctagtgtgta

SEQ ID NO: 431814 - DNA, 33 bp, Homo sapien
gtatggttgtgggtgcgcgctgtctagtgtgta

SEQ ID NO: 431815 - DNA, 33 bp, Homo sapien
tttaggcctagatctcacacaggtagctgcttg

SEQ ID NO: 431816 - DNA, 33 bp, Homo sapien
tttaggcctagatctcgcacaggtagctgcttg

SEQ ID NO: 431817 - DNA, 33 bp, Homo sapien
tcttaatctattttcaagttcattacttctttc

SEQ ID NO: 431818 - DNA, 33 bp, Homo sapien
tcttaatctattttcaggttcattacttctttc

SEQ ID NO: 431819 - DNA, 33 bp, Homo sapien
ttaaggccaagcaatgcatctcaggagaacaaa

SEQ ID NO: 431820 - DNA, 33 bp, Homo sapien
ttaaggccaagcaatggatctcaggagaacaaa

SEQ ID NO: 431821 - DNA, 33 bp, Homo sapien
ctgaccttacttgtccactctattcttttcaca

SEQ ID NO: 431822 - DNA, 33 bp, Homo sapien
ctgaccttacttgtcctctctattcttttcaca

SEQ ID NO: 431823 - DNA, 33 bp, Homo sapien
atcttaggaattagtgaactttatgagttagtt

SEQ ID NO: 431824 - DNA, 33 bp, Homo sapien
atcttaggaattagtggactttatgagttagtt

SEQ ID NO: 431825 - DNA, 33 bp, Homo sapien
gggcacaaccaggactcaaggatttcaaaggta

SEQ ID NO: 431826 - DNA, 33 bp, Homo sapien
gggcacaaccaggactgaaggatttcaaaggta

SEQ ID NO: 431827 - DNA, 33 bp, Homo sapien
ctgggacatcttgaaacagcaggtgttccatct

SEQ ID NO: 431828 - DNA, 33 bp, Homo sapien
ctgggacatcttgaaatagcaggtgttccatct

SEQ ID NO: 431829 - DNA, 33 bp, Homo sapien
gactacatgttgatccataaaaaatctaatcaa

SEQ ID NO: 431830 - DNA, 33 bp, Homo sapien
gactacatgttgatccgtaaaaaatctaatcaa

SEQ ID NO: 431831 - DNA, 33 bp, Homo sapien
acattgtatcaagtgacaaatcatatgtttaaa

SEQ ID NO: 431832 - DNA, 33 bp, Homo sapien
acattgtatcaagtgagaaatcatatgtttaaa

SEQ ID NO: 431833 - DNA, 33 bp, Homo sapien
cttcaatgagacttcaagttggtagcttgcaat

SEQ ID NO: 431834 - DNA, 33 bp, Homo sapien
cttcaatgagacttcaggttggtagcttgcaat

SEQ ID NO: 431835 - DNA, 33 bp, Homo sapien
gattcatttacccctcactgctgacataagaag

SEQ ID NO: 431836 - DNA, 33 bp, Homo sapien
gattcatttacccctcgctgctgacataagaag

SEQ ID NO: 431837 - DNA, 33 bp, Homo sapien
gctacaaaccccatgacgtttacatacttgtca

SEQ ID NO: 431838 - DNA, 33 bp, Homo sapien
gctacaaaccccatgatgtttacatacttgtca

SEQ ID NO: 431839 - DNA, 33 bp, Homo sapien
gtgtcaacttgacctacggtaagggatatccag

SEQ ID NO: 431840 - DNA, 33 bp, Homo sapien
gtgtcaacttgacctatggtaagggatatccag

SEQ ID NO: 431841 - DNA, 33 bp, Homo sapien
gatctgcccagaattaaaggaaagcaccaggtt

SEQ ID NO: 431842 - DNA, 33 bp, Homo sapien
gatctgcccagaattagaggaaagcaccaggtt

SEQ ID NO: 431843 - DNA, 33 bp, Homo sapien
agttgattgacagccacatacagcatcttttcc

SEQ ID NO: 431844 - DNA, 33 bp, Homo sapien
agttgattgacagccatatacagcatcttttcc

SEQ ID NO: 431845 - DNA, 33 bp, Homo sapien
tgcccttccctgcctaataagttgctccaatct

SEQ ID NO: 431846 - DNA, 33 bp, Homo sapien
tgcccttccctgcctagtaagttgctccaatct

SEQ ID NO: 431847 - DNA, 33 bp, Homo sapien
tttgaccatttagccactaccctaagacaagaa

SEQ ID NO: 431848 - DNA, 33 bp, Homo sapien
tttgaccatttagccagtaccctaagacaagaa

SEQ ID NO: 431849 - DNA, 33 bp, Homo sapien
gcagaatattagcccacggaaccagatggaaga

SEQ ID NO: 431850 - DNA, 33 bp, Homo sapien
gcagaatattagcccatggaaccagatggaaga

SEQ ID NO: 431851 - DNA, 33 bp, Homo sapien
caaggaacagtacaataataagactaggcacca

SEQ ID NO: 431852 - DNA, 33 bp, Homo sapien
caaggaacagtacaatgataagactaggcacca

SEQ ID NO: 431853 - DNA, 33 bp, Homo sapien
tattttagaaaacttacattatgctacagtaag

SEQ ID NO: 431854 - DNA, 33 bp, Homo sapien
tattttagaaaacttatattatgctacagtaag

SEQ ID NO: 431855 - DNA, 33 bp, Homo sapien
tcctttcagtacatcactatctggctagttgaa

SEQ ID NO: 431856 - DNA, 33 bp, Homo sapien
tcctttcagtacatcattatctggctagttgaa

SEQ ID NO: 431857 - DNA, 33 bp, Homo sapien
gaaattgtttttggaacgtgaatgcctctagta

SEQ ID NO: 431858 - DNA, 33 bp, Homo sapien
gaaattgtttttggaatgtgaatgcctctagta

SEQ ID NO: 431859 - DNA, 33 bp, Homo sapien
aggctatgatatggtcacccctagtcactcatc

SEQ ID NO: 431860 - DNA, 33 bp, Homo sapien
aggctatgatatggtcgcccctagtcactcatc

SEQ ID NO: 431861 - DNA, 33 bp, Homo sapien
cagctaaatcttgagcacacagatgatcaaaat

SEQ ID NO: 431862 - DNA, 33 bp, Homo sapien
cagctaaatcttgagcgcacagatgatcaaaat

SEQ ID NO: 431863 - DNA, 33 bp, Homo sapien
agaggttatgttacccaaaatcaacaaactacc

SEQ ID NO: 431864 - DNA, 33 bp, Homo sapien
agaggttatgttaccccaaatcaacaaactacc

SEQ ID NO: 431865 - DNA, 33 bp, Homo sapien
tctgccaaagactacaagattgtattataagca

SEQ ID NO: 431866 - DNA, 33 bp, Homo sapien
tctgccaaagactacaggattgtattataagca

SEQ ID NO: 431867 - DNA, 33 bp, Homo sapien
agagaaagagtcccatcacttgtcctgacagcc

SEQ ID NO: 431868 - DNA, 33 bp, Homo sapien
agagaaagagtcccattacttgtcctgacagcc

SEQ ID NO: 431869 - DNA, 33 bp, Homo sapien
atgcaaggagccatgaaaaagccctaagtgatt

SEQ ID NO: 431870 - DNA, 33 bp, Homo sapien
atgcaaggagccatgagaaagccctaagtgatt

SEQ ID NO: 431871 - DNA, 33 bp, Homo sapien
tccctcaaatttcaccgccttttggaaatgctc

SEQ ID NO: 431872 - DNA, 33 bp, Homo sapien
tccctcaaatttcacctccttttggaaatgctc

SEQ ID NO: 431873 - DNA, 33 bp, Homo sapien
ccaaacaagaagctcacggtaaacaacagtggc

SEQ ID NO: 431874 - DNA, 33 bp, Homo sapien
ccaaacaagaagctcatggtaaacaacagtggc

SEQ ID NO: 431875 - DNA, 33 bp, Homo sapien
caccatgttggttcatcaaatggatagtattat

SEQ ID NO: 431876 - DNA, 33 bp, Homo sapien
caccatgttggttcattaaatggatagtattat

SEQ ID NO: 431877 - DNA, 33 bp, Homo sapien
gtccaggaattttggacggaatcaagtggatat

SEQ ID NO: 431878 - DNA, 33 bp, Homo sapien
gtccaggaattttggatggaatcaagtggatat

SEQ ID NO: 431879 - DNA, 33 bp, Homo sapien
agtacaaagaacaccaactggaaaaatatggcc

SEQ ID NO: 431880 - DNA, 33 bp, Homo sapien
agtacaaagaacaccagctggaaaaatatggcc

SEQ ID NO: 431881 - DNA, 33 bp, Homo sapien
gttactcgatggaaacaattaaaatggactttt

SEQ ID NO: 431882 - DNA, 33 bp, Homo sapien
gttactcgatggaaacgattaaaatggactttt

SEQ ID NO: 431883 - DNA, 33 bp, Homo sapien
taaatttttaagaggaaatattgagcataatta

SEQ ID NO: 431884 - DNA, 33 bp, Homo sapien
taaatttttaagaggagatattgagcataatta

SEQ ID NO: 431885 - DNA, 33 bp, Homo sapien
gaaaaaaaattgcagaagctctcgataatatta

SEQ ID NO: 431886 - DNA, 33 bp, Homo sapien
gaaaaaaaattgcagaggctctcgataatatta

SEQ ID NO: 431887 - DNA, 33 bp, Homo sapien
ctgtcagcactctgtcacttcaaggaaacagat

SEQ ID NO: 431888 - DNA, 33 bp, Homo sapien
ctgtcagcactctgtcgcttcaaggaaacagat

SEQ ID NO: 431889 - DNA, 33 bp, Homo sapien
gagacacagtctgcaacagaaaccagataagac

SEQ ID NO: 431890 - DNA, 33 bp, Homo sapien
gagacacagtctgcaatagaaaccagataagac

SEQ ID NO: 431891 - DNA, 33 bp, Homo sapien
tgcttacagtttatcccaccctctgtcactcca

SEQ ID NO: 431892 - DNA, 33 bp, Homo sapien
tgcttacagtttatcctaccctctgtcactcca

SEQ ID NO: 431893 - DNA, 33 bp, Homo sapien
aaagctctctttcgaccaggttcagtggctcat

SEQ ID NO: 431894 - DNA, 33 bp, Homo sapien
aaagctctctttcgactaggttcagtggctcat

SEQ ID NO: 431895 - DNA, 33 bp, Homo sapien
actttaagattaactgccaaatgtatccaaatt

SEQ ID NO: 431896 - DNA, 33 bp, Homo sapien
actttaagattaactggcaaatgtatccaaatt

SEQ ID NO: 431897 - DNA, 33 bp, Homo sapien
tcttgaaagctgatttaaaaacacacacccact

SEQ ID NO: 431898 - DNA, 33 bp, Homo sapien
tcttgaaagctgattttaaaacacacacccact

SEQ ID NO: 431899 - DNA, 33 bp, Homo sapien
tacctcttcctccaagactatcagtaaggatgc

SEQ ID NO: 431900 - DNA, 33 bp, Homo sapien
tacctcttcctccaaggctatcagtaaggatgc

SEQ ID NO: 431901 - DNA, 33 bp, Homo sapien
ttatattttaccttgcccagagtgctggatact

SEQ ID NO: 431902 - DNA, 33 bp, Homo sapien
ttatattttaccttgctcagagtgctggatact

SEQ ID NO: 431903 - DNA, 33 bp, Homo sapien
agttcttaatgggaaactgtattgaactagcag

SEQ ID NO: 431904 - DNA, 33 bp, Homo sapien
agttcttaatgggaaattgtattgaactagcag

SEQ ID NO: 431905 - DNA, 33 bp, Homo sapien
catagcctaagaatagcagttcagaattggaat

SEQ ID NO: 431906 - DNA, 33 bp, Homo sapien
catagcctaagaataggagttcagaattggaat

SEQ ID NO: 431907 - DNA, 33 bp, Homo sapien
ctgcttgtgtgtttggaatgccctgcagaaatc

SEQ ID NO: 431908 - DNA, 33 bp, Homo sapien
ctgcttgtgtgtttgggatgccctgcagaaatc

SEQ ID NO: 431909 - DNA, 33 bp, Homo sapien
tttttagaacaatgaacgaatattttggtaatc

SEQ ID NO: 431910 - DNA, 33 bp, Homo sapien
tttttagaacaatgaatgaatattttggtaatc

SEQ ID NO: 431911 - DNA, 33 bp, Homo sapien
gattcaatggatgtgacggaaaaatggcaaaag

SEQ ID NO: 431912 - DNA, 33 bp, Homo sapien
gattcaatggatgtgatggaaaaatggcaaaag

SEQ ID NO: 431913 - DNA, 33 bp, Homo sapien
agacacagggtcactaagcaaaggaaggaagac

SEQ ID NO: 431914 - DNA, 33 bp, Homo sapien
agacacagggtcactaggcaaaggaaggaagac

SEQ ID NO: 431915 - DNA, 33 bp, Homo sapien
tttagacttttattcaagtaggaacaaagaagt

SEQ ID NO: 431916 - DNA, 33 bp, Homo sapien
tttagacttttattcaggtaggaacaaagaagt

SEQ ID NO: 431917 - DNA, 33 bp, Homo sapien
tgcaaatttcttctccaaatgatctttaaaaga

SEQ ID NO: 431918 - DNA, 33 bp, Homo sapien
tgcaaatttcttctccgaatgatctttaaaaga

SEQ ID NO: 431919 - DNA, 33 bp, Homo sapien
atgcctgattttcaacaggacatttggaggatg

SEQ ID NO: 431920 - DNA, 33 bp, Homo sapien
atgcctgattttcaacgggacatttggaggatg

SEQ ID NO: 431921 - DNA, 33 bp, Homo sapien
cagtatttgtggaacccataagagagtcacttg

SEQ ID NO: 431922 - DNA, 33 bp, Homo sapien
cagtatttgtggaacctataagagagtcacttg

SEQ ID NO: 431923 - DNA, 33 bp, Homo sapien
tcaaatgaagctcaagaatgtatatgtggacac

SEQ ID NO: 431924 - DNA, 33 bp, Homo sapien
tcaaatgaagctcaagtatgtatatgtggacac

SEQ ID NO: 431925 - DNA, 33 bp, Homo sapien
tcacagctattttagactagggttgattctagg

SEQ ID NO: 431926 - DNA, 33 bp, Homo sapien
tcacagctattttagattagggttgattctagg

SEQ ID NO: 431927 - DNA, 33 bp, Homo sapien
gtttcatatacaatggaatcctcaaacctttct

SEQ ID NO: 431928 - DNA, 33 bp, Homo sapien
gtttcatatacaatgggatcctcaaacctttct

SEQ ID NO: 431929 - DNA, 33 bp, Homo sapien
atctgagtgacaagtacatgggtgttttattac

SEQ ID NO: 431930 - DNA, 33 bp, Homo sapien
atctgagtgacaagtatatgggtgttttattac

SEQ ID NO: 431931 - DNA, 33 bp, Homo sapien
gtctgtgtttaataagacatgcatgtttgatct

SEQ ID NO: 431932 - DNA, 33 bp, Homo sapien
gtctgtgtttaataaggcatgcatgtttgatct

SEQ ID NO: 431933 - DNA, 33 bp, Homo sapien
ataagaagtgatatacagaaagtgatacctaca

SEQ ID NO: 431934 - DNA, 33 bp, Homo sapien
ataagaagtgatataccgaaagtgatacctaca

SEQ ID NO: 431935 - DNA, 33 bp, Homo sapien
ttgagcattttccgcaactgtgctaaccttggt

SEQ ID NO: 431936 - DNA, 33 bp, Homo sapien
ttgagcattttccgcatctgtgctaaccttggt

SEQ ID NO: 431937 - DNA, 33 bp, Homo sapien
tttcagagtcagcagacacattaacagctggtg

SEQ ID NO: 431938 - DNA, 33 bp, Homo sapien
tttcagagtcagcagagacattaacagctggtg

SEQ ID NO: 431939 - DNA, 33 bp, Homo sapien
atttggaattggaaagccctgaatttcagtctt

SEQ ID NO: 431940 - DNA, 33 bp, Homo sapien
atttggaattggaaagtcctgaatttcagtctt

SEQ ID NO: 431941 - DNA, 33 bp, Homo sapien
cagagaataaccagaaaaatctgctacctttgc

SEQ ID NO: 431942 - DNA, 33 bp, Homo sapien
cagagaataaccagaacaatctgctacctttgc

SEQ ID NO: 431943 - DNA, 33 bp, Homo sapien
gccataagggtaaaccaaccaagctaagatgca

SEQ ID NO: 431944 - DNA, 33 bp, Homo sapien
gccataagggtaaaccgaccaagctaagatgca

SEQ ID NO: 431945 - DNA, 33 bp, Homo sapien
agatcctacgttattgcagcctagtgaaaaagt

SEQ ID NO: 431946 - DNA, 33 bp, Homo sapien
agatcctacgttattgtagcctagtgaaaaagt

SEQ ID NO: 431947 - DNA, 33 bp, Homo sapien
actctattcaagagcaagacgttgttgtgcacc

SEQ ID NO: 431948 - DNA, 33 bp, Homo sapien
actctattcaagagcaggacgttgttgtgcacc

SEQ ID NO: 431949 - DNA, 33 bp, Homo sapien
acttcataaactaacactgagaaggcaatgcaa

SEQ ID NO: 431950 - DNA, 33 bp, Homo sapien
acttcataaactaacagtgagaaggcaatgcaa

SEQ ID NO: 431951 - DNA, 33 bp, Homo sapien
ctatagatgttgaatagtagaactttgtcagat

SEQ ID NO: 431952 - DNA, 33 bp, Homo sapien
ctatagatgttgaatattagaactttgtcagat

SEQ ID NO: 431953 - DNA, 33 bp, Homo sapien
cgttgccataaagtgacaattgcggtagattgg

SEQ ID NO: 431954 - DNA, 33 bp, Homo sapien
cgttgccataaagtgataattgcggtagattgg

SEQ ID NO: 431955 - DNA, 33 bp, Homo sapien
tctctatgattggagaaaaagtaaaagacaaat

SEQ ID NO: 431956 - DNA, 33 bp, Homo sapien
tctctatgattggagagaaagtaaaagacaaat

SEQ ID NO: 431957 - DNA, 33 bp, Homo sapien
gctgctcttctaagtccacagcatttggacaag

SEQ ID NO: 431958 - DNA, 33 bp, Homo sapien
gctgctcttctaagtctacagcatttggacaag

SEQ ID NO: 431959 - DNA, 33 bp, Homo sapien
tttaaaagactaacaaaatagacacctctaagg

SEQ ID NO: 431960 - DNA, 33 bp, Homo sapien
tttaaaagactaacaacatagacacctctaagg

SEQ ID NO: 431961 - DNA, 33 bp, Homo sapien
atttttcaggtcaaaaattcttatcacaatgga

SEQ ID NO: 431962 - DNA, 33 bp, Homo sapien
atttttcaggtcaaaatttcttatcacaatgga

SEQ ID NO: 431963 - DNA, 33 bp, Homo sapien
tatttctcagaactaacagaaatgccagttttt

SEQ ID NO: 431964 - DNA, 33 bp, Homo sapien
tatttctcagaactaatagaaatgccagttttt

SEQ ID NO: 431965 - DNA, 33 bp, Homo sapien
cacacctttattcaccactactatgaaggcaag

SEQ ID NO: 431966 - DNA, 33 bp, Homo sapien
cacacctttattcaccgctactatgaaggcaag

SEQ ID NO: 431967 - DNA, 33 bp, Homo sapien
tcaacagtttaattcaagttctttctactcttt

SEQ ID NO: 431968 - DNA, 33 bp, Homo sapien
tcaacagtttaattcaggttctttctactcttt

SEQ ID NO: 431969 - DNA, 33 bp, Homo sapien
ccaataaatagaccaacagaccaaaagacctca

SEQ ID NO: 431970 - DNA, 33 bp, Homo sapien
ccaataaatagaccaatagaccaaaagacctca

SEQ ID NO: 431971 - DNA, 33 bp, Homo sapien
attgtaacatataccactcaaacctggaacaat

SEQ ID NO: 431972 - DNA, 33 bp, Homo sapien
attgtaacatataccattcaaacctggaacaat

SEQ ID NO: 431973 - DNA, 33 bp, Homo sapien
taaatgcaatcatctagtacataccaagaaaaa

SEQ ID NO: 431974 - DNA, 33 bp, Homo sapien
taaatgcaatcatctattacataccaagaaaaa

SEQ ID NO: 431975 - DNA, 33 bp, Homo sapien
gctacataaaaccacaacactggattataggca

SEQ ID NO: 431976 - DNA, 33 bp, Homo sapien
gctacataaaaccacagcactggattataggca

SEQ ID NO: 431977 - DNA, 33 bp, Homo sapien
agctgctcatacctcaatagagaccctgaggag

SEQ ID NO: 431978 - DNA, 33 bp, Homo sapien
agctgctcatacctcattagagaccctgaggag

SEQ ID NO: 431979 - DNA, 33 bp, Homo sapien
ttacttgtgttcctcccgacctcccaatatctg

SEQ ID NO: 431980 - DNA, 33 bp, Homo sapien
ttacttgtgttcctcctgacctcccaatatctg

SEQ ID NO: 431981 - DNA, 33 bp, Homo sapien
gttttctcatttggagacctgagataaaatgta

SEQ ID NO: 431982 - DNA, 33 bp, Homo sapien
gttttctcatttggagccctgagataaaatgta

SEQ ID NO: 431983 - DNA, 33 bp, Homo sapien
ctcttccaagcttacacggttcgtgagcaacca

SEQ ID NO: 431984 - DNA, 33 bp, Homo sapien
ctcttccaagcttacatggttcgtgagcaacca

SEQ ID NO: 431985 - DNA, 33 bp, Homo sapien
ttctaggaaagttccaaagaatcattcctctct

SEQ ID NO: 431986 - DNA, 33 bp, Homo sapien
ttctaggaaagttccagagaatcattcctctct

SEQ ID NO: 431987 - DNA, 33 bp, Homo sapien
tgatgttcagtcatcacgctatttgatacatct

SEQ ID NO: 431988 - DNA, 33 bp, Homo sapien
tgatgttcagtcatcatgctatttgatacatct

SEQ ID NO: 431989 - DNA, 33 bp, Homo sapien
aacttagaaaggaagacgagaaatggcattgac

SEQ ID NO: 431990 - DNA, 33 bp, Homo sapien
aacttagaaaggaagatgagaaatggcattgac

SEQ ID NO: 431991 - DNA, 33 bp, Homo sapien
atacaacaaattcacaaatctgtcaatgccatt

SEQ ID NO: 431992 - DNA, 33 bp, Homo sapien
atacaacaaattcacatatctgtcaatgccatt

SEQ ID NO: 431993 - DNA, 33 bp, Homo sapien
caagtaagagataaagcatacgcataaaatatt

SEQ ID NO: 431994 - DNA, 33 bp, Homo sapien
caagtaagagataaagtatacgcataaaatatt

SEQ ID NO: 431995 - DNA, 33 bp, Homo sapien
ccatctgtgccaaaaaaggaaaacaaatcacac

SEQ ID NO: 431996 - DNA, 33 bp, Homo sapien
ccatctgtgccaaaaagggaaaacaaatcacac

SEQ ID NO: 431997 - DNA, 33 bp, Homo sapien
aggaagaaaatagagtcactagagtccagtgag

SEQ ID NO: 431998 - DNA, 33 bp, Homo sapien
aggaagaaaatagagttactagagtccagtgag

SEQ ID NO: 431999 - DNA, 33 bp, Homo sapien
aatagcatcaagaacaaaactactggccctggg

SEQ ID NO: 432000 - DNA, 33 bp, Homo sapien
aatagcatcaagaacagaactactggccctggg

SEQ ID NO: 432001 - DNA, 33 bp, Homo sapien
gaggaaatgctgaaaaactggcctgtaaaaaca

SEQ ID NO: 432002 - DNA, 33 bp, Homo sapien
gaggaaatgctgaaaagctggcctgtaaaaaca

SEQ ID NO: 432003 - DNA, 33 bp, Homo sapien
taatggattaggaagagtagttagagatgatgg

SEQ ID NO: 432004 - DNA, 33 bp, Homo sapien
taatggattaggaagattagttagagatgatgg

SEQ ID NO: 432005 - DNA, 33 bp, Homo sapien
taaaaaagggagtcagaaaatgccatacactct

SEQ ID NO: 432006 - DNA, 33 bp, Homo sapien
taaaaaagggagtcagcaaatgccatacactct

SEQ ID NO: 432007 - DNA, 33 bp, Homo sapien
tgccgccatgacgctcaccttccgccatggttg

SEQ ID NO: 432008 - DNA, 33 bp, Homo sapien
tgccgccatgacgctcgccttccgccatggttg

SEQ ID NO: 432009 - DNA, 33 bp, Homo sapien
actcatgcagtcaaacgcccttctgggttccag

SEQ ID NO: 432010 - DNA, 33 bp, Homo sapien
actcatgcagtcaaactcccttctgggttccag

SEQ ID NO: 432011 - DNA, 33 bp, Homo sapien
tgtgattaaattcatgcaacaattcaggtacca

SEQ ID NO: 432012 - DNA, 33 bp, Homo sapien
tgtgattaaattcatggaacaattcaggtacca

SEQ ID NO: 432013 - DNA, 33 bp, Homo sapien
aacaaacaatccggaaagtattctaagcaggca

SEQ ID NO: 432014 - DNA, 33 bp, Homo sapien
aacaaacaatccggaaggtattctaagcaggca

SEQ ID NO: 432015 - DNA, 33 bp, Homo sapien
ataaccagcagacaaaacaagagggttgtagag

SEQ ID NO: 432016 - DNA, 33 bp, Homo sapien
ataaccagcagacaaagcaagagggttgtagag

SEQ ID NO: 432017 - DNA, 33 bp, Homo sapien
aggtggcaatattgagcaatgatctgtacaggt

SEQ ID NO: 432018 - DNA, 33 bp, Homo sapien
aggtggcaatattgagtaatgatctgtacaggt

SEQ ID NO: 432019 - DNA, 33 bp, Homo sapien
tcattaatattgtatacggaacccccattcacc

SEQ ID NO: 432020 - DNA, 33 bp, Homo sapien
tcattaatattgtatatggaacccccattcacc

SEQ ID NO: 432021 - DNA, 33 bp, Homo sapien
gcaatcaaatatttcaatctaatccttcaatca

SEQ ID NO: 432022 - DNA, 33 bp, Homo sapien
gcaatcaaatatttcagtctaatccttcaatca

SEQ ID NO: 432023 - DNA, 33 bp, Homo sapien
caaacaacagtttataagacacagagtatccct

SEQ ID NO: 432024 - DNA, 33 bp, Homo sapien
caaacaacagtttatatgacacagagtatccct

SEQ ID NO: 432025 - DNA, 33 bp, Homo sapien
ctggggttatgaaatccaccttcagaaattcag

SEQ ID NO: 432026 - DNA, 33 bp, Homo sapien
ctggggttatgaaatctaccttcagaaattcag

SEQ ID NO: 432027 - DNA, 33 bp, Homo sapien
caaattttcaacacctcactggaatgtggttaa

SEQ ID NO: 432028 - DNA, 33 bp, Homo sapien
caaattttcaacaccttactggaatgtggttaa

SEQ ID NO: 432029 - DNA, 33 bp, Homo sapien
atgactatatgaattccaactatttgccctctc

SEQ ID NO: 432030 - DNA, 33 bp, Homo sapien
atgactatatgaattctaactatttgccctctc

SEQ ID NO: 432031 - DNA, 33 bp, Homo sapien
gaggtaggaggtgaataaaaattaaggagcaaa

SEQ ID NO: 432032 - DNA, 33 bp, Homo sapien
gaggtaggaggtgaatgaaaattaaggagcaaa

SEQ ID NO: 432033 - DNA, 33 bp, Homo sapien
agttgagctaggaccaaggaaaagagggactac

SEQ ID NO: 432034 - DNA, 33 bp, Homo sapien
agttgagctaggaccagggaaaagagggactac

SEQ ID NO: 432035 - DNA, 33 bp, Homo sapien
ctgcttgtccagagacagagttaatgaaggctt

SEQ ID NO: 432036 - DNA, 33 bp, Homo sapien
ctgcttgtccagagacggagttaatgaaggctt

SEQ ID NO: 432037 - DNA, 33 bp, Homo sapien
tgccagcttgctgtcccaagaaaagtcaaacta

SEQ ID NO: 432038 - DNA, 33 bp, Homo sapien
tgccagcttgctgtccgaagaaaagtcaaacta

SEQ ID NO: 432039 - DNA, 33 bp, Homo sapien
atcataattaatcactaaaatatccacttggta

SEQ ID NO: 432040 - DNA, 33 bp, Homo sapien
atcataattaatcactgaaatatccacttggta

SEQ ID NO: 432041 - DNA, 33 bp, Homo sapien
cgtccagttcttctgactagccaagtgccttaa

SEQ ID NO: 432042 - DNA, 33 bp, Homo sapien
cgtccagttcttctgagtagccaagtgccttaa

SEQ ID NO: 432043 - DNA, 33 bp, Homo sapien
tgcattttcatgccgaatccatttctctgtggg

SEQ ID NO: 432044 - DNA, 33 bp, Homo sapien
tgcattttcatgccgattccatttctctgtggg

SEQ ID NO: 432045 - DNA, 33 bp, Homo sapien
aactactatcagaatccaggatatttactagga

SEQ ID NO: 432046 - DNA, 33 bp, Homo sapien
aactactatcagaatctaggatatttactagga

SEQ ID NO: 432047 - DNA, 33 bp, Homo sapien
atatcgtacaatttgcacaaggagaactactat

SEQ ID NO: 432048 - DNA, 33 bp, Homo sapien
atatcgtacaatttgcgcaaggagaactactat

SEQ ID NO: 432049 - DNA, 33 bp, Homo sapien
tctcacagtattttcaagtatttgaatctttcc

SEQ ID NO: 432050 - DNA, 33 bp, Homo sapien
tctcacagtattttcaggtatttgaatctttcc

SEQ ID NO: 432051 - DNA, 33 bp, Homo sapien
ttggacatctgaagtagcacataatatagaaaa

SEQ ID NO: 432052 - DNA, 33 bp, Homo sapien
ttggacatctgaagtatcacataatatagaaaa

SEQ ID NO: 432053 - DNA, 33 bp, Homo sapien
aggagatttttggctacaaattgtgttttgcaa

SEQ ID NO: 432054 - DNA, 33 bp, Homo sapien
aggagatttttggctataaattgtgttttgcaa

SEQ ID NO: 432055 - DNA, 33 bp, Homo sapien
ctgcaaccctggagtccaattcttgtttttagg

SEQ ID NO: 432056 - DNA, 33 bp, Homo sapien
ctgcaaccctggagtctaattcttgtttttagg

SEQ ID NO: 432057 - DNA, 33 bp, Homo sapien
tccttattaggattagcaggtagcttccatctt

SEQ ID NO: 432058 - DNA, 33 bp, Homo sapien
tccttattaggattagtaggtagcttccatctt

SEQ ID NO: 432059 - DNA, 33 bp, Homo sapien
ggtatggttgctgatacaaactcaaaatacaaa

SEQ ID NO: 432060 - DNA, 33 bp, Homo sapien
ggtatggttgctgatataaactcaaaatacaaa

SEQ ID NO: 432061 - DNA, 33 bp, Homo sapien
ctcccatgaacttccagagattctctattaagc

SEQ ID NO: 432062 - DNA, 33 bp, Homo sapien
ctcccatgaacttccatagattctctattaagc

SEQ ID NO: 432063 - DNA, 33 bp, Homo sapien
atactgctaaagcactaacgtattcttccaaca

SEQ ID NO: 432064 - DNA, 33 bp, Homo sapien
atactgctaaagcactgacgtattcttccaaca

SEQ ID NO: 432065 - DNA, 33 bp, Homo sapien
ttctatgagtgagaaaagatgcagaaatatttg

SEQ ID NO: 432066 - DNA, 33 bp, Homo sapien
ttctatgagtgagaaacgatgcagaaatatttg

SEQ ID NO: 432067 - DNA, 33 bp, Homo sapien
accactttgtaagatgcatccttctgtgttttt

SEQ ID NO: 432068 - DNA, 33 bp, Homo sapien
accactttgtaagatgtatccttctgtgttttt

SEQ ID NO: 432069 - DNA, 33 bp, Homo sapien
aaattattcaaaacaacttggccaggttagaga

SEQ ID NO: 432070 - DNA, 33 bp, Homo sapien
aaattattcaaaacaatttggccaggttagaga

SEQ ID NO: 432071 - DNA, 33 bp, Homo sapien
aaggaagaggatgaaaccctgtctttgttacat

SEQ ID NO: 432072 - DNA, 33 bp, Homo sapien
aaggaagaggatgaaagcctgtctttgttacat

SEQ ID NO: 432073 - DNA, 33 bp, Homo sapien
gaaaagttctgtcctgaaacactacttctctcc

SEQ ID NO: 432074 - DNA, 33 bp, Homo sapien
gaaaagttctgtcctgcaacactacttctctcc

SEQ ID NO: 432075 - DNA, 33 bp, Homo sapien
gaagaccagagagaaacaaatgatgaactgagg

SEQ ID NO: 432076 - DNA, 33 bp, Homo sapien
gaagaccagagagaaagaaatgatgaactgagg

SEQ ID NO: 432077 - DNA, 33 bp, Homo sapien
ttagacgtatcaaaaaatgtcccatggcatcct

SEQ ID NO: 432078 - DNA, 33 bp, Homo sapien
ttagacgtatcaaaaagtgtcccatggcatcct

SEQ ID NO: 432079 - DNA, 33 bp, Homo sapien
cattgcaatccataaaacttatttgctgtgggg

SEQ ID NO: 432080 - DNA, 33 bp, Homo sapien
cattgcaatccataaaccttatttgctgtgggg

SEQ ID NO: 432081 - DNA, 33 bp, Homo sapien
ctttgtttatgtcacccccttctcaacaaatat

SEQ ID NO: 432082 - DNA, 33 bp, Homo sapien
ctttgtttatgtcacctccttctcaacaaatat

SEQ ID NO: 432083 - DNA, 33 bp, Homo sapien
ttgaagaaatgggccaaaggacagattagttag

SEQ ID NO: 432084 - DNA, 33 bp, Homo sapien
ttgaagaaatgggccagaggacagattagttag

SEQ ID NO: 432085 - DNA, 33 bp, Homo sapien
ggcttgggagctggtccaggttgagattctggt

SEQ ID NO: 432086 - DNA, 33 bp, Homo sapien
ggcttgggagctggtcgaggttgagattctggt

SEQ ID NO: 432087 - DNA, 33 bp, Homo sapien
tattttaaaagcaaccagaaccttcagtcaaag

SEQ ID NO: 432088 - DNA, 33 bp, Homo sapien
tattttaaaagcaaccggaaccttcagtcaaag

SEQ ID NO: 432089 - DNA, 33 bp, Homo sapien
tacatcaagataaataaagcaatatccatattt

SEQ ID NO: 432090 - DNA, 33 bp, Homo sapien
tacatcaagataaatagagcaatatccatattt

SEQ ID NO: 432091 - DNA, 33 bp, Homo sapien
ttctttccctgcatgaaccaactagaaaccttg

SEQ ID NO: 432092 - DNA, 33 bp, Homo sapien
ttctttccctgcatgagccaactagaaaccttg

SEQ ID NO: 432093 - DNA, 33 bp, Homo sapien
ggctcaggaagcctacactatttataatctggt

SEQ ID NO: 432094 - DNA, 33 bp, Homo sapien
ggctcaggaagcctacgctatttataatctggt

SEQ ID NO: 432095 - DNA, 33 bp, Homo sapien
acatcagtttaaaacacggaagcaatcataacc

SEQ ID NO: 432096 - DNA, 33 bp, Homo sapien
acatcagtttaaaacatggaagcaatcataacc

SEQ ID NO: 432097 - DNA, 33 bp, Homo sapien
gttcaaaagcagctctaacattgtttctggact

SEQ ID NO: 432098 - DNA, 33 bp, Homo sapien
gttcaaaagcagctcttacattgtttctggact

SEQ ID NO: 432099 - DNA, 33 bp, Homo sapien
attgaatgttgaaggaagcatcagtaaaacaag

SEQ ID NO: 432100 - DNA, 33 bp, Homo sapien
attgaatgttgaaggacgcatcagtaaaacaag

SEQ ID NO: 432101 - DNA, 33 bp, Homo sapien
aggggaccaaattacaatcctaacaaataagat

SEQ ID NO: 432102 - DNA, 33 bp, Homo sapien
aggggaccaaattacattcctaacaaataagat

SEQ ID NO: 432103 - DNA, 33 bp, Homo sapien
gagatgtgtgagataaagtgcctctcttcaggt

SEQ ID NO: 432104 - DNA, 33 bp, Homo sapien
gagatgtgtgagataatgtgcctctcttcaggt

SEQ ID NO: 432105 - DNA, 33 bp, Homo sapien
gaagatagcaacttgacagatataatctggaga

SEQ ID NO: 432106 - DNA, 33 bp, Homo sapien
gaagatagcaacttgatagatataatctggaga

SEQ ID NO: 432107 - DNA, 33 bp, Homo sapien
atgtgaaaatgcatgacgaccacctggcgcagt

SEQ ID NO: 432108 - DNA, 33 bp, Homo sapien
atgtgaaaatgcatgatgaccacctggcgcagt

SEQ ID NO: 432109 - DNA, 33 bp, Homo sapien
ccttgcccctagagtaacagccattcatccatg

SEQ ID NO: 432110 - DNA, 33 bp, Homo sapien
ccttgcccctagagtagcagccattcatccatg

SEQ ID NO: 432111 - DNA, 33 bp, Homo sapien
gaggcaattgaggtgacatggcaacaccataag

SEQ ID NO: 432112 - DNA, 33 bp, Homo sapien
gaggcaattgaggtgatatggcaacaccataag

SEQ ID NO: 432113 - DNA, 33 bp, Homo sapien
ttttcctctcatcaacactatctcttagtcctg

SEQ ID NO: 432114 - DNA, 33 bp, Homo sapien
ttttcctctcatcaactctatctcttagtcctg

SEQ ID NO: 432115 - DNA, 33 bp, Homo sapien
acaatttctagaaaaccgataattctgtctaga

SEQ ID NO: 432116 - DNA, 33 bp, Homo sapien
acaatttctagaaaactgataattctgtctaga

SEQ ID NO: 432117 - DNA, 33 bp, Homo sapien
agaggtgacttgatacagtagaaagggcatgga

SEQ ID NO: 432118 - DNA, 33 bp, Homo sapien
agaggtgacttgatacggtagaaagggcatgga

SEQ ID NO: 432119 - DNA, 33 bp, Homo sapien
cactaattatttaacacccagattgtgccatct

SEQ ID NO: 432120 - DNA, 33 bp, Homo sapien
cactaattatttaacatccagattgtgccatct

SEQ ID NO: 432121 - DNA, 33 bp, Homo sapien
taaatttcagatgggcacattttggaaatcata

SEQ ID NO: 432122 - DNA, 33 bp, Homo sapien
taaatttcagatgggctcattttggaaatcata

SEQ ID NO: 432123 - DNA, 33 bp, Homo sapien
gttatgtggtttgctaactttccctcaaccaag

SEQ ID NO: 432124 - DNA, 33 bp, Homo sapien
gttatgtggtttgctatctttccctcaaccaag

SEQ ID NO: 432125 - DNA, 33 bp, Homo sapien
tacgaggtgagattaaaagaatgtagtgtgtgg

SEQ ID NO: 432126 - DNA, 33 bp, Homo sapien
tacgaggtgagattaagagaatgtagtgtgtgg

SEQ ID NO: 432127 - DNA, 33 bp, Homo sapien
tgctgctaaggagatacggtatcactgcctatg

SEQ ID NO: 432128 - DNA, 33 bp, Homo sapien
tgctgctaaggagatatggtatcactgcctatg

SEQ ID NO: 432129 - DNA, 33 bp, Homo sapien
ttaaatgaaataaaacccctaggtggctttgaa

SEQ ID NO: 432130 - DNA, 33 bp, Homo sapien
ttaaatgaaataaaacgcctaggtggctttgaa

SEQ ID NO: 432131 - DNA, 33 bp, Homo sapien
taggtatttaaattagcccagctttcatctcta

SEQ ID NO: 432132 - DNA, 33 bp, Homo sapien
taggtatttaaattagtccagctttcatctcta

SEQ ID NO: 432133 - DNA, 33 bp, Homo sapien
gcaatcattgtcatcacacaattcatctgactg

SEQ ID NO: 432134 - DNA, 33 bp, Homo sapien
gcaatcattgtcatcatacaattcatctgactg

SEQ ID NO: 432135 - DNA, 33 bp, Homo sapien
cacagaagctcactgacgtctttataatgtgtt

SEQ ID NO: 432136 - DNA, 33 bp, Homo sapien
cacagaagctcactgatgtctttataatgtgtt

SEQ ID NO: 432137 - DNA, 33 bp, Homo sapien
ctctgagttataaaaaattggtggttcagagaa

SEQ ID NO: 432138 - DNA, 33 bp, Homo sapien
ctctgagttataaaaagttggtggttcagagaa

SEQ ID NO: 432139 - DNA, 33 bp, Homo sapien
tggctataaaagtcaaaatcaacaatgcactat

SEQ ID NO: 432140 - DNA, 33 bp, Homo sapien
tggctataaaagtcaagatcaacaatgcactat

SEQ ID NO: 432141 - DNA, 33 bp, Homo sapien
aacatgtgcccctctgaaccgcaattgaatgcc

SEQ ID NO: 432142 - DNA, 33 bp, Homo sapien
aacatgtgcccctctggaccgcaattgaatgcc

SEQ ID NO: 432143 - DNA, 33 bp, Homo sapien
tctaaaaaaatgcctgccaaacagtaagtgcct

SEQ ID NO: 432144 - DNA, 33 bp, Homo sapien
tctaaaaaaatgcctgtcaaacagtaagtgcct

SEQ ID NO: 432145 - DNA, 33 bp, Homo sapien
atgtttgcacaaatccaattcctgatttctttc

SEQ ID NO: 432146 - DNA, 33 bp, Homo sapien
atgtttgcacaaatcctattcctgatttctttc

SEQ ID NO: 432147 - DNA, 33 bp, Homo sapien
ttccaactcaaaaatccgaaatggctacccagt

SEQ ID NO: 432148 - DNA, 33 bp, Homo sapien
ttccaactcaaaaatctgaaatggctacccagt

SEQ ID NO: 432149 - DNA, 33 bp, Homo sapien
ggagaacgaagaatgaaaggcaataaaattttt

SEQ ID NO: 432150 - DNA, 33 bp, Homo sapien
ggagaacgaagaatgagaggcaataaaattttt

SEQ ID NO: 432151 - DNA, 33 bp, Homo sapien
tgtctatcttccatgtgaacactcttcactcat

SEQ ID NO: 432152 - DNA, 33 bp, Homo sapien
tgtctatcttccatgttaacactcttcactcat

SEQ ID NO: 432153 - DNA, 33 bp, Homo sapien
aaaatcctaggttgataaattgaatatggcttc

SEQ ID NO: 432154 - DNA, 33 bp, Homo sapien
aaaatcctaggttgatcaattgaatatggcttc

SEQ ID NO: 432155 - DNA, 33 bp, Homo sapien
aaaaactatagtgtgcaaatatttaaaaagaga

SEQ ID NO: 432156 - DNA, 33 bp, Homo sapien
aaaaactatagtgtgcgaatatttaaaaagaga

SEQ ID NO: 432157 - DNA, 33 bp, Homo sapien
caatcaataaattcaacggcttaacacaatgct

SEQ ID NO: 432158 - DNA, 33 bp, Homo sapien
caatcaataaattcaatggcttaacacaatgct

SEQ ID NO: 432159 - DNA, 33 bp, Homo sapien
aataggatatgtttagaaagttgtaaaaaatat

SEQ ID NO: 432160 - DNA, 33 bp, Homo sapien
aataggatatgtttaggaagttgtaaaaaatat

SEQ ID NO: 432161 - DNA, 33 bp, Homo sapien
ggtggctttagggaaacgtaatgtaggcaatgt

SEQ ID NO: 432162 - DNA, 33 bp, Homo sapien
ggtggctttagggaaatgtaatgtaggcaatgt

SEQ ID NO: 432163 - DNA, 33 bp, Homo sapien
gaaataacaatgtgaaaactcctctgtaattgg

SEQ ID NO: 432164 - DNA, 33 bp, Homo sapien
gaaataacaatgtgaacactcctctgtaattgg

SEQ ID NO: 432165 - DNA, 33 bp, Homo sapien
gtgatggcccagaaaagagtagtgaagccaatt

SEQ ID NO: 432166 - DNA, 33 bp, Homo sapien
gtgatggcccagaaaatagtagtgaagccaatt

SEQ ID NO: 432167 - DNA, 33 bp, Homo sapien
acctgaatattttatgaaagtcctactggatga

SEQ ID NO: 432168 - DNA, 33 bp, Homo sapien
acctgaatattttatgcaagtcctactggatga

SEQ ID NO: 432169 - DNA, 33 bp, Homo sapien
cccagattttgttcacaccagtgccaaactcat

SEQ ID NO: 432170 - DNA, 33 bp, Homo sapien
cccagattttgttcacgccagtgccaaactcat

SEQ ID NO: 432171 - DNA, 33 bp, Homo sapien
aaatctaacaaaatacaacacaaatggctcttc

SEQ ID NO: 432172 - DNA, 33 bp, Homo sapien
aaatctaacaaaatacgacacaaatggctcttc

SEQ ID NO: 432173 - DNA, 33 bp, Homo sapien
caccttattcagctagccctgggtatcagatac

SEQ ID NO: 432174 - DNA, 33 bp, Homo sapien
caccttattcagctagtcctgggtatcagatac

SEQ ID NO: 432175 - DNA, 33 bp, Homo sapien
tttcataaggactaaaatagatgccatatgtaa

SEQ ID NO: 432176 - DNA, 33 bp, Homo sapien
tttcataaggactaaagtagatgccatatgtaa

SEQ ID NO: 432177 - DNA, 33 bp, Homo sapien
atactttatatcctccaaatttctagagtggta

SEQ ID NO: 432178 - DNA, 33 bp, Homo sapien
atactttatatcctccgaatttctagagtggta

SEQ ID NO: 432179 - DNA, 33 bp, Homo sapien
ggttgccttaaaaccaatcctattgcctgatcc

SEQ ID NO: 432180 - DNA, 33 bp, Homo sapien
ggttgccttaaaaccactcctattgcctgatcc

SEQ ID NO: 432181 - DNA, 33 bp, Homo sapien
agaattcttgaggaagaagaagcaggtggagga

SEQ ID NO: 432182 - DNA, 33 bp, Homo sapien
agaattcttgaggaaggagaagcaggtggagga

SEQ ID NO: 432183 - DNA, 33 bp, Homo sapien
gaattttgaaaatagggactcctcatcttcacc

SEQ ID NO: 432184 - DNA, 33 bp, Homo sapien
gaattttgaaaataggtactcctcatcttcacc

SEQ ID NO: 432185 - DNA, 33 bp, Homo sapien
tcctaagtgatctgaacgtgcaaccagtgttca

SEQ ID NO: 432186 - DNA, 33 bp, Homo sapien
tcctaagtgatctgaatgtgcaaccagtgttca

SEQ ID NO: 432187 - DNA, 33 bp, Homo sapien
ctttaatattcactgaaggcaatagtaatttct

SEQ ID NO: 432188 - DNA, 33 bp, Homo sapien
ctttaatattcactgagggcaatagtaatttct

SEQ ID NO: 432189 - DNA, 33 bp, Homo sapien
agtggaaagcgcaggcggaaataattttggctg

SEQ ID NO: 432190 - DNA, 33 bp, Homo sapien
agtggaaagcgcaggctgaaataattttggctg

SEQ ID NO: 432191 - DNA, 33 bp, Homo sapien
atatctgttgttgccccgctagactttatacaa

SEQ ID NO: 432192 - DNA, 33 bp, Homo sapien
atatctgttgttgccctgctagactttatacaa

SEQ ID NO: 432193 - DNA, 33 bp, Homo sapien
tttaattctttgaacagaggtaaagcattctta

SEQ ID NO: 432194 - DNA, 33 bp, Homo sapien
tttaattctttgaacataggtaaagcattctta

SEQ ID NO: 432195 - DNA, 33 bp, Homo sapien
attcaatctaacagaaatcttcatagtgagact

SEQ ID NO: 432196 - DNA, 33 bp, Homo sapien
attcaatctaacagaagtcttcatagtgagact

SEQ ID NO: 432197 - DNA, 33 bp, Homo sapien
tgttatgtcagtgttccctttttgtcttttcat

SEQ ID NO: 432198 - DNA, 33 bp, Homo sapien
tgttatgtcagtgttctctttttgtcttttcat

SEQ ID NO: 432199 - DNA, 33 bp, Homo sapien
gagtctctaacattccagccacttacatgaatc

SEQ ID NO: 432200 - DNA, 33 bp, Homo sapien
gagtctctaacattccggccacttacatgaatc

SEQ ID NO: 432201 - DNA, 33 bp, Homo sapien
ttttgtttaaacataaaggcaaagaggaacttg

SEQ ID NO: 432202 - DNA, 33 bp, Homo sapien
ttttgtttaaacataagggcaaagaggaacttg

SEQ ID NO: 432203 - DNA, 33 bp, Homo sapien
cacaagaaaaactaccacttcttgccaagtagc

SEQ ID NO: 432204 - DNA, 33 bp, Homo sapien
cacaagaaaaactaccgcttcttgccaagtagc

SEQ ID NO: 432205 - DNA, 33 bp, Homo sapien
aggctgaaaagtcccaagatctgtagttgacaa

SEQ ID NO: 432206 - DNA, 33 bp, Homo sapien
aggctgaaaagtcccaggatctgtagttgacaa

SEQ ID NO: 432207 - DNA, 33 bp, Homo sapien
tcatctggaaattggacaaagtagactaggcca

SEQ ID NO: 432208 - DNA, 33 bp, Homo sapien
tcatctggaaattggataaagtagactaggcca

SEQ ID NO: 432209 - DNA, 33 bp, Homo sapien
tgagaaggttatagacaaggttgacagtgtcaa

SEQ ID NO: 432210 - DNA, 33 bp, Homo sapien
tgagaaggttatagacgaggttgacagtgtcaa

SEQ ID NO: 432211 - DNA, 33 bp, Homo sapien
actccttggctccaaaagcaacaaaataaaccc

SEQ ID NO: 432212 - DNA, 33 bp, Homo sapien
actccttggctccaaaggcaacaaaataaaccc

SEQ ID NO: 432213 - DNA, 33 bp, Homo sapien
tggaggaatatggtaaactgcatggccacagaa

SEQ ID NO: 432214 - DNA, 33 bp, Homo sapien
tggaggaatatggtaacctgcatggccacagaa

SEQ ID NO: 432215 - DNA, 33 bp, Homo sapien
agtattaaggaatgaaaagttttggtggccctt

SEQ ID NO: 432216 - DNA, 33 bp, Homo sapien
agtattaaggaatgaagagttttggtggccctt

SEQ ID NO: 432217 - DNA, 33 bp, Homo sapien
ggatggaagttcctggacaatgtggatctacca

SEQ ID NO: 432218 - DNA, 33 bp, Homo sapien
ggatggaagttcctgggcaatgtggatctacca

SEQ ID NO: 432219 - DNA, 33 bp, Homo sapien
tatttatcaagacaacacttgcactgtgggacg

SEQ ID NO: 432220 - DNA, 33 bp, Homo sapien
tatttatcaagacaacgcttgcactgtgggacg

SEQ ID NO: 432221 - DNA, 33 bp, Homo sapien
acctagttaacacttgaataataatgcagacaa

SEQ ID NO: 432222 - DNA, 33 bp, Homo sapien
acctagttaacacttgtataataatgcagacaa

SEQ ID NO: 432223 - DNA, 33 bp, Homo sapien
gctaggaaaagcaaaactgaatagtctgtgaga

SEQ ID NO: 432224 - DNA, 33 bp, Homo sapien
gctaggaaaagcaaaattgaatagtctgtgaga

SEQ ID NO: 432225 - DNA, 33 bp, Homo sapien
ttttcttagtcctcctcagagaagttacttcaa

SEQ ID NO: 432226 - DNA, 33 bp, Homo sapien
ttttcttagtcctccttagagaagttacttcaa

SEQ ID NO: 432227 - DNA, 33 bp, Homo sapien
agtgatattctccttgaagtgttgtgctagaga

SEQ ID NO: 432228 - DNA, 33 bp, Homo sapien
agtgatattctccttgcagtgttgtgctagaga

SEQ ID NO: 432229 - DNA, 33 bp, Homo sapien
actgagggctgcatggaactgagggcttcatgg

SEQ ID NO: 432230 - DNA, 33 bp, Homo sapien
actgagggctgcatgggactgagggcttcatgg

SEQ ID NO: 432231 - DNA, 33 bp, Homo sapien
gaacataccagggaagccaagataatccataga

SEQ ID NO: 432232 - DNA, 33 bp, Homo sapien
gaacataccagggaaggcaagataatccataga

SEQ ID NO: 432233 - DNA, 33 bp, Homo sapien
atgcgtatctgttgcaaagttgccatgtttatc

SEQ ID NO: 432234 - DNA, 33 bp, Homo sapien
atgcgtatctgttgcagagttgccatgtttatc

SEQ ID NO: 432235 - DNA, 33 bp, Homo sapien
gataagcacttttgaaatagattgctgtgaaga

SEQ ID NO: 432236 - DNA, 33 bp, Homo sapien
gataagcacttttgaagtagattgctgtgaaga

SEQ ID NO: 432237 - DNA, 33 bp, Homo sapien
atatagaaaaatagctaaaaaagacatctggag

SEQ ID NO: 432238 - DNA, 33 bp, Homo sapien
atatagaaaaatagcttaaaaagacatctggag

SEQ ID NO: 432239 - DNA, 33 bp, Homo sapien
taaatgcactttatgccacttcccataactgct

SEQ ID NO: 432240 - DNA, 33 bp, Homo sapien
taaatgcactttatgctacttcccataactgct

SEQ ID NO: 432241 - DNA, 33 bp, Homo sapien
agcttccctccacatacgcagttggttccacaa

SEQ ID NO: 432242 - DNA, 33 bp, Homo sapien
agcttccctccacatatgcagttggttccacaa

SEQ ID NO: 432243 - DNA, 33 bp, Homo sapien
agaagctgttatttgaagcagcactgggcttta

SEQ ID NO: 432244 - DNA, 33 bp, Homo sapien
agaagctgttatttgacgcagcactgggcttta

SEQ ID NO: 432245 - DNA, 33 bp, Homo sapien
atttggaacctagaaaacattgaatagtttgcg

SEQ ID NO: 432246 - DNA, 33 bp, Homo sapien
atttggaacctagaaagcattgaatagtttgcg

SEQ ID NO: 432247 - DNA, 33 bp, Homo sapien
ttactagttccacttcaagcagaaacaaagaaa

SEQ ID NO: 432248 - DNA, 33 bp, Homo sapien
ttactagttccacttcgagcagaaacaaagaaa

SEQ ID NO: 432249 - DNA, 33 bp, Homo sapien
tatctattttctcctacgttaatgtatcctttc

SEQ ID NO: 432250 - DNA, 33 bp, Homo sapien
tatctattttctcctatgttaatgtatcctttc

SEQ ID NO: 432251 - DNA, 33 bp, Homo sapien
tatgcagggcattaagaaataaacaaaagtagt

SEQ ID NO: 432252 - DNA, 33 bp, Homo sapien
tatgcagggcattaagcaataaacaaaagtagt

SEQ ID NO: 432253 - DNA, 33 bp, Homo sapien
acatatgtaccactgacagaattgttttaggta

SEQ ID NO: 432254 - DNA, 33 bp, Homo sapien
acatatgtaccactgatagaattgttttaggta

SEQ ID NO: 432255 - DNA, 33 bp, Homo sapien
ccaagtccccatcttacaatactgtggtagagt

SEQ ID NO: 432256 - DNA, 33 bp, Homo sapien
ccaagtccccatcttataatactgtggtagagt

SEQ ID NO: 432257 - DNA, 33 bp, Homo sapien
tggatctcactcttaaatatggataatatctaa

SEQ ID NO: 432258 - DNA, 33 bp, Homo sapien
tggatctcactcttaagtatggataatatctaa

SEQ ID NO: 432259 - DNA, 33 bp, Homo sapien
aatatctctgttctaaatgatgggttttgtttt

SEQ ID NO: 432260 - DNA, 33 bp, Homo sapien
aatatctctgttctaactgatgggttttgtttt

SEQ ID NO: 432261 - DNA, 33 bp, Homo sapien
acattggtttgaagaaaggatttcatgagattc

SEQ ID NO: 432262 - DNA, 33 bp, Homo sapien
acattggtttgaagaagggatttcatgagattc

SEQ ID NO: 432263 - DNA, 33 bp, Homo sapien
catatggaatcaaaaaagagctggcatagtcaa

SEQ ID NO: 432264 - DNA, 33 bp, Homo sapien
catatggaatcaaaaacgagctggcatagtcaa

SEQ ID NO: 432265 - DNA, 33 bp, Homo sapien
ccatatacattctcagcccatttctaagaaata

SEQ ID NO: 432266 - DNA, 33 bp, Homo sapien
ccatatacattctcaggccatttctaagaaata

SEQ ID NO: 432267 - DNA, 33 bp, Homo sapien
atgacaagcagcaaaaaaatttgtcttttcaat

SEQ ID NO: 432268 - DNA, 33 bp, Homo sapien
atgacaagcagcaaaacaatttgtcttttcaat

SEQ ID NO: 432269 - DNA, 33 bp, Homo sapien
catgagataaatgatcaatcagacagaatctta

SEQ ID NO: 432270 - DNA, 33 bp, Homo sapien
catgagataaatgatccatcagacagaatctta

SEQ ID NO: 432271 - DNA, 33 bp, Homo sapien
aaaatacataataccactcaatatgatgtagag

SEQ ID NO: 432272 - DNA, 33 bp, Homo sapien
aaaatacataataccattcaatatgatgtagag

SEQ ID NO: 432273 - DNA, 33 bp, Homo sapien
cactgtgcttggtacacaagtaagaatttgatt

SEQ ID NO: 432274 - DNA, 33 bp, Homo sapien
cactgtgcttggtacagaagtaagaatttgatt

SEQ ID NO: 432275 - DNA, 33 bp, Homo sapien
ttatcaccgttatccacagaggtatcttcaggc

SEQ ID NO: 432276 - DNA, 33 bp, Homo sapien
ttatcaccgttatccatagaggtatcttcaggc

SEQ ID NO: 432277 - DNA, 33 bp, Homo sapien
agtgtgatgtggttgaagaaagcgtcacagagt

SEQ ID NO: 432278 - DNA, 33 bp, Homo sapien
agtgtgatgtggttgaggaaagcgtcacagagt

SEQ ID NO: 432279 - DNA, 33 bp, Homo sapien
caatttgtgacctccagaagtcattccatctgg

SEQ ID NO: 432280 - DNA, 33 bp, Homo sapien
caatttgtgacctccataagtcattccatctgg

SEQ ID NO: 432281 - DNA, 33 bp, Homo sapien
cactggaaatttctaggcctgttcatcctgtct

SEQ ID NO: 432282 - DNA, 33 bp, Homo sapien
cactggaaatttctagtcctgttcatcctgtct

SEQ ID NO: 432283 - DNA, 33 bp, Homo sapien
aacagtgcctatgggcaatttttgtttaagaac

SEQ ID NO: 432284 - DNA, 33 bp, Homo sapien
aacagtgcctatgggccatttttgtttaagaac

SEQ ID NO: 432285 - DNA, 33 bp, Homo sapien
aaaaacaaaaatatcaatcacaatatcataaga

SEQ ID NO: 432286 - DNA, 33 bp, Homo sapien
aaaaacaaaaatatcagtcacaatatcataaga

SEQ ID NO: 432287 - DNA, 33 bp, Homo sapien
ataataattttccaaaaggacaggtagagggat

SEQ ID NO: 432288 - DNA, 33 bp, Homo sapien
ataataattttccaaatggacaggtagagggat

SEQ ID NO: 432289 - DNA, 33 bp, Homo sapien
acctgtagaaagacaaatcagcattatatagag

SEQ ID NO: 432290 - DNA, 33 bp, Homo sapien
acctgtagaaagacaagtcagcattatatagag

SEQ ID NO: 432291 - DNA, 33 bp, Homo sapien
agttgtaaaatcatttcaaacccaaactctgac

SEQ ID NO: 432292 - DNA, 33 bp, Homo sapien
agttgtaaaatcatttgaaacccaaactctgac

SEQ ID NO: 432293 - DNA, 33 bp, Homo sapien
tttaaaaaatgtaaaactgtttctgatgcaatg

SEQ ID NO: 432294 - DNA, 33 bp, Homo sapien
tttaaaaaatgtaaaagtgtttctgatgcaatg

SEQ ID NO: 432295 - DNA, 33 bp, Homo sapien
ttgagggaaagcatcaaagactagctgtgagct

SEQ ID NO: 432296 - DNA, 33 bp, Homo sapien
ttgagggaaagcatcagagactagctgtgagct

SEQ ID NO: 432297 - DNA, 33 bp, Homo sapien
gactccctgtgccaaaccaatcttaagtgttgc

SEQ ID NO: 432298 - DNA, 33 bp, Homo sapien
gactccctgtgccaaatcaatcttaagtgttgc

SEQ ID NO: 432299 - DNA, 33 bp, Homo sapien
catatcaaaaggaaaaattggtcctctgagtta

SEQ ID NO: 432300 - DNA, 33 bp, Homo sapien
catatcaaaaggaaaacttggtcctctgagtta

SEQ ID NO: 432301 - DNA, 33 bp, Homo sapien
aaataaaatgaaggtaggatttcaggagttcaa

SEQ ID NO: 432302 - DNA, 33 bp, Homo sapien
aaataaaatgaaggtatgatttcaggagttcaa

SEQ ID NO: 432303 - DNA, 33 bp, Homo sapien
gggacttaatatgtgaaatttgttgagcaagct

SEQ ID NO: 432304 - DNA, 33 bp, Homo sapien
gggacttaatatgtgagatttgttgagcaagct

SEQ ID NO: 432305 - DNA, 33 bp, Homo sapien
gtaattctaagctgagactaatggactcttggg

SEQ ID NO: 432306 - DNA, 33 bp, Homo sapien
gtaattctaagctgaggctaatggactcttggg

SEQ ID NO: 432307 - DNA, 33 bp, Homo sapien
ggaaactcaggatttaaaaaagatgcagaatgt

SEQ ID NO: 432308 - DNA, 33 bp, Homo sapien
ggaaactcaggatttagaaaagatgcagaatgt

SEQ ID NO: 432309 - DNA, 33 bp, Homo sapien
tttagtcttggcattgaaaatcattcttgttta

SEQ ID NO: 432310 - DNA, 33 bp, Homo sapien
tttagtcttggcattgcaaatcattcttgttta

SEQ ID NO: 432311 - DNA, 33 bp, Homo sapien
ggagccaagtatgacacgtaggaaagaaatcag

SEQ ID NO: 432312 - DNA, 33 bp, Homo sapien
ggagccaagtatgacatgtaggaaagaaatcag

SEQ ID NO: 432313 - DNA, 33 bp, Homo sapien
agaatgactatagttaacatgcattcctcacat

SEQ ID NO: 432314 - DNA, 33 bp, Homo sapien
agaatgactatagttagcatgcattcctcacat

SEQ ID NO: 432315 - DNA, 33 bp, Homo sapien
aaagcagaggacagcaccaggtgttagcttcta

SEQ ID NO: 432316 - DNA, 33 bp, Homo sapien
aaagcagaggacagcatcaggtgttagcttcta

SEQ ID NO: 432317 - DNA, 33 bp, Homo sapien
actaagccagtcagggaagaatcatcagtaaat

SEQ ID NO: 432318 - DNA, 33 bp, Homo sapien
actaagccagtcaggggagaatcatcagtaaat

SEQ ID NO: 432319 - DNA, 33 bp, Homo sapien
aaagccgtggtagaaaagctaacacacaggcat

SEQ ID NO: 432320 - DNA, 33 bp, Homo sapien
aaagccgtggtagaaaggctaacacacaggcat

SEQ ID NO: 432321 - DNA, 33 bp, Homo sapien
tagaataatctatggactcaaaagttgcctctt

SEQ ID NO: 432322 - DNA, 33 bp, Homo sapien
tagaataatctatggattcaaaagttgcctctt

SEQ ID NO: 432323 - DNA, 33 bp, Homo sapien
actctcctgttcttaaatccaaatatcaatttc

SEQ ID NO: 432324 - DNA, 33 bp, Homo sapien
actctcctgttcttaagtccaaatatcaatttc

SEQ ID NO: 432325 - DNA, 33 bp, Homo sapien
tatgcagcagcatgaactgacaacaaaattctt

SEQ ID NO: 432326 - DNA, 33 bp, Homo sapien
tatgcagcagcatgaattgacaacaaaattctt

SEQ ID NO: 432327 - DNA, 33 bp, Homo sapien
gtctcccaactttataccagattcatcaaaggt

SEQ ID NO: 432328 - DNA, 33 bp, Homo sapien
gtctcccaactttatatcagattcatcaaaggt

SEQ ID NO: 432329 - DNA, 33 bp, Homo sapien
taaaaacagtgctgaacagcatctcagagtcca

SEQ ID NO: 432330 - DNA, 33 bp, Homo sapien
taaaaacagtgctgaatagcatctcagagtcca

SEQ ID NO: 432331 - DNA, 33 bp, Homo sapien
ctttacaagcgtttcccaaaattgtaccatgta

SEQ ID NO: 432332 - DNA, 33 bp, Homo sapien
ctttacaagcgtttcctaaaattgtaccatgta

SEQ ID NO: 432333 - DNA, 33 bp, Homo sapien
aaataattggtaatgccaaaacaatgcaataac

SEQ ID NO: 432334 - DNA, 33 bp, Homo sapien
aaataattggtaatgcgaaaacaatgcaataac

SEQ ID NO: 432335 - DNA, 33 bp, Homo sapien
agctctgtttgtagaccgtataggaaatggagc

SEQ ID NO: 432336 - DNA, 33 bp, Homo sapien
agctctgtttgtagactgtataggaaatggagc

SEQ ID NO: 432337 - DNA, 33 bp, Homo sapien
ctataaataataaaaaattgatggcactgttta

SEQ ID NO: 432338 - DNA, 33 bp, Homo sapien
ctataaataataaaaagttgatggcactgttta

SEQ ID NO: 432339 - DNA, 33 bp, Homo sapien
tggccaaaatacagtacgattgcctcagtgcag

SEQ ID NO: 432340 - DNA, 33 bp, Homo sapien
tggccaaaatacagtatgattgcctcagtgcag

SEQ ID NO: 432341 - DNA, 33 bp, Homo sapien
attgatgtttcctctgcagctatgaaagtatta

SEQ ID NO: 432342 - DNA, 33 bp, Homo sapien
attgatgtttcctctgtagctatgaaagtatta

SEQ ID NO: 432343 - DNA, 33 bp, Homo sapien
tggtgaataggagctacgaaaaacagtgattta

SEQ ID NO: 432344 - DNA, 33 bp, Homo sapien
tggtgaataggagctatgaaaaacagtgattta

SEQ ID NO: 432345 - DNA, 33 bp, Homo sapien
aggcccagaatttccacgcagttgttaatatca

SEQ ID NO: 432346 - DNA, 33 bp, Homo sapien
aggcccagaatttccaggcagttgttaatatca

SEQ ID NO: 432347 - DNA, 33 bp, Homo sapien
ggtacaattcatctcaaaaaaggcaattaggca

SEQ ID NO: 432348 - DNA, 33 bp, Homo sapien
ggtacaattcatctcagaaaaggcaattaggca

SEQ ID NO: 432349 - DNA, 33 bp, Homo sapien
aacttatacacacaaaacaaagtagaaattaga

SEQ ID NO: 432350 - DNA, 33 bp, Homo sapien
aacttatacacacaaagcaaagtagaaattaga

SEQ ID NO: 432351 - DNA, 33 bp, Homo sapien
tgaaaagaaatagtaacgctatccatgtggaaa

SEQ ID NO: 432352 - DNA, 33 bp, Homo sapien
tgaaaagaaatagtaatgctatccatgtggaaa

SEQ ID NO: 432353 - DNA, 33 bp, Homo sapien
tgctctcattctgacaacccaactgatcacact

SEQ ID NO: 432354 - DNA, 33 bp, Homo sapien
tgctctcattctgacaccccaactgatcacact

SEQ ID NO: 432355 - DNA, 33 bp, Homo sapien
tggggtaatcggtaaccgtgcctctgactgctc

SEQ ID NO: 432356 - DNA, 33 bp, Homo sapien
tggggtaatcggtaactgtgcctctgactgctc

SEQ ID NO: 432357 - DNA, 33 bp, Homo sapien
acccctcatttgaaagaatacttacctggtcag

SEQ ID NO: 432358 - DNA, 33 bp, Homo sapien
acccctcatttgaaaggatacttacctggtcag

SEQ ID NO: 432359 - DNA, 33 bp, Homo sapien
gggcttatatctaaaagcgccatagcttaaaat

SEQ ID NO: 432360 - DNA, 33 bp, Homo sapien
gggcttatatctaaaatcgccatagcttaaaat

SEQ ID NO: 432361 - DNA, 33 bp, Homo sapien
acaaaataggattaacaaatggtagacataaat

SEQ ID NO: 432362 - DNA, 33 bp, Homo sapien
acaaaataggattaacgaatggtagacataaat

SEQ ID NO: 432363 - DNA, 33 bp, Homo sapien
ctcatttttattgagacctatacgtctaaatct

SEQ ID NO: 432364 - DNA, 33 bp, Homo sapien
ctcatttttattgagatctatacgtctaaatct

SEQ ID NO: 432365 - DNA, 33 bp, Homo sapien
aataaaatcacagtcccggaaaacgtcacagaa

SEQ ID NO: 432366 - DNA, 33 bp, Homo sapien
aataaaatcacagtccgggaaaacgtcacagaa

SEQ ID NO: 432367 - DNA, 33 bp, Homo sapien
ctttcataaagtaagaagttgagtgagttgttt

SEQ ID NO: 432368 - DNA, 33 bp, Homo sapien
ctttcataaagtaagaggttgagtgagttgttt

SEQ ID NO: 432369 - DNA, 33 bp, Homo sapien
taaatcccttttctgacattgttgtggctacca

SEQ ID NO: 432370 - DNA, 33 bp, Homo sapien
taaatcccttttctgatattgttgtggctacca

SEQ ID NO: 432371 - DNA, 33 bp, Homo sapien
tatgtggacatacagtaaatgtttttgtataag

SEQ ID NO: 432372 - DNA, 33 bp, Homo sapien
tatgtggacatacagtgaatgtttttgtataag

SEQ ID NO: 432373 - DNA, 33 bp, Homo sapien
aggacactgaggaaatgaacacaaatgcattca

SEQ ID NO: 432374 - DNA, 33 bp, Homo sapien
aggacactgaggaaattaacacaaatgcattca

SEQ ID NO: 432375 - DNA, 33 bp, Homo sapien
ctgtggccaaatgtcaatcctaagagcctgcac

SEQ ID NO: 432376 - DNA, 33 bp, Homo sapien
ctgtggccaaatgtcattcctaagagcctgcac

SEQ ID NO: 432377 - DNA, 33 bp, Homo sapien
aatcaagaatgcttcaactagggctatatgtta

SEQ ID NO: 432378 - DNA, 33 bp, Homo sapien
aatcaagaatgcttcagctagggctatatgtta

SEQ ID NO: 432379 - DNA, 33 bp, Homo sapien
atggtgtacttacagacgctatgtgtggtaaag

SEQ ID NO: 432380 - DNA, 33 bp, Homo sapien
atggtgtacttacagatgctatgtgtggtaaag

SEQ ID NO: 432381 - DNA, 33 bp, Homo sapien
ttatgtcaaacaagaaataattgaccacctact

SEQ ID NO: 432382 - DNA, 33 bp, Homo sapien
ttatgtcaaacaagaattaattgaccacctact

SEQ ID NO: 432383 - DNA, 33 bp, Homo sapien
gaagcctgaggactcacggcagtaattcacact

SEQ ID NO: 432384 - DNA, 33 bp, Homo sapien
gaagcctgaggactcagggcagtaattcacact

SEQ ID NO: 432385 - DNA, 33 bp, Homo sapien
gcctaaaactgcagaaatgttctacacacaaaa

SEQ ID NO: 432386 - DNA, 33 bp, Homo sapien
gcctaaaactgcagaagtgttctacacacaaaa

SEQ ID NO: 432387 - DNA, 33 bp, Homo sapien
acagatgcttacagaacatactaacagctctaa

SEQ ID NO: 432388 - DNA, 33 bp, Homo sapien
acagatgcttacagaatatactaacagctctaa

SEQ ID NO: 432389 - DNA, 33 bp, Homo sapien
taaattcaaaaggtcaataattacctgaatagt

SEQ ID NO: 432390 - DNA, 33 bp, Homo sapien
taaattcaaaaggtcagtaattacctgaatagt

SEQ ID NO: 432391 - DNA, 33 bp, Homo sapien
ctctaaaaaactcttaccatgctatcattgtat

SEQ ID NO: 432392 - DNA, 33 bp, Homo sapien
ctctaaaaaactcttatcatgctatcattgtat

SEQ ID NO: 432393 - DNA, 33 bp, Homo sapien
gtattagtatgttaggaatgctgtaacaaaatc

SEQ ID NO: 432394 - DNA, 33 bp, Homo sapien
gtattagtatgttagggatgctgtaacaaaatc

SEQ ID NO: 432395 - DNA, 33 bp, Homo sapien
agaggaaggcataagtcacaattcctctactcg

SEQ ID NO: 432396 - DNA, 33 bp, Homo sapien
agaggaaggcataagtgacaattcctctactcg

SEQ ID NO: 432397 - DNA, 33 bp, Homo sapien
taggacactaaatagaaaccttcagaattaagc

SEQ ID NO: 432398 - DNA, 33 bp, Homo sapien
taggacactaaatagagaccttcagaattaagc

SEQ ID NO: 432399 - DNA, 33 bp, Homo sapien
ttaatcaatcatatccacataatggaagcttta

SEQ ID NO: 432400 - DNA, 33 bp, Homo sapien
ttaatcaatcatatccgcataatggaagcttta

SEQ ID NO: 432401 - DNA, 33 bp, Homo sapien
tgttaggaaaattggaaaaatgcttcctgtata

SEQ ID NO: 432402 - DNA, 33 bp, Homo sapien
tgttaggaaaattggagaaatgcttcctgtata

SEQ ID NO: 432403 - DNA, 33 bp, Homo sapien
aagatatctgagtgaaagaggcacatcaaagta

SEQ ID NO: 432404 - DNA, 33 bp, Homo sapien
aagatatctgagtgaatgaggcacatcaaagta

SEQ ID NO: 432405 - DNA, 33 bp, Homo sapien
atcctaaatctaatgcccattgacttcagacag

SEQ ID NO: 432406 - DNA, 33 bp, Homo sapien
atcctaaatctaatgctcattgacttcagacag

SEQ ID NO: 432407 - DNA, 33 bp, Homo sapien
ttaagctagttgtgcacaatcacaaatttggct

SEQ ID NO: 432408 - DNA, 33 bp, Homo sapien
ttaagctagttgtgcataatcacaaatttggct

SEQ ID NO: 432409 - DNA, 33 bp, Homo sapien
gaatggtgagaaaatacatcaagagatgtctag

SEQ ID NO: 432410 - DNA, 33 bp, Homo sapien
gaatggtgagaaaatatatcaagagatgtctag

SEQ ID NO: 432411 - DNA, 33 bp, Homo sapien
actgtttctctccccaaatgcattattattagt

SEQ ID NO: 432412 - DNA, 33 bp, Homo sapien
actgtttctctccccagatgcattattattagt

SEQ ID NO: 432413 - DNA, 33 bp, Homo sapien
catcatttcaactgaacattgtactggaggcct

SEQ ID NO: 432414 - DNA, 33 bp, Homo sapien
catcatttcaactgaatattgtactggaggcct

SEQ ID NO: 432415 - DNA, 33 bp, Homo sapien
ggtagaaaagaaagacaaggtaatcggtggaag

SEQ ID NO: 432416 - DNA, 33 bp, Homo sapien
ggtagaaaagaaagacgaggtaatcggtggaag

SEQ ID NO: 432417 - DNA, 33 bp, Homo sapien
taatgaacaatttaagccatggttgtagtatcc

SEQ ID NO: 432418 - DNA, 33 bp, Homo sapien
taatgaacaatttaaggcatggttgtagtatcc

SEQ ID NO: 432419 - DNA, 33 bp, Homo sapien
tttcatgaagatcatacacttgccaagtggcag

SEQ ID NO: 432420 - DNA, 33 bp, Homo sapien
tttcatgaagatcatatacttgccaagtggcag

SEQ ID NO: 432421 - DNA, 33 bp, Homo sapien
gcttcgactgtgaagcagaaaatgtgggatgtg

SEQ ID NO: 432422 - DNA, 33 bp, Homo sapien
gcttcgactgtgaagcggaaaatgtgggatgtg

SEQ ID NO: 432423 - DNA, 33 bp, Homo sapien
agagagagaagcacacaataatttattctaagg

SEQ ID NO: 432424 - DNA, 33 bp, Homo sapien
agagagagaagcacacgataatttattctaagg

SEQ ID NO: 432425 - DNA, 33 bp, Homo sapien
tttccagaagaattccaaatgtgctaccatcca

SEQ ID NO: 432426 - DNA, 33 bp, Homo sapien
tttccagaagaattccgaatgtgctaccatcca

SEQ ID NO: 432427 - DNA, 33 bp, Homo sapien
ttggtattttgattctcactaggctcccctgca

SEQ ID NO: 432428 - DNA, 33 bp, Homo sapien
ttggtattttgattcttactaggctcccctgca

SEQ ID NO: 432429 - DNA, 33 bp, Homo sapien
acatacaagattcttgaaatatgcaattatatc

SEQ ID NO: 432430 - DNA, 33 bp, Homo sapien
acatacaagattcttggaatatgcaattatatc

SEQ ID NO: 432431 - DNA, 33 bp, Homo sapien
gaacctcattgcattacctttacttgccattct

SEQ ID NO: 432432 - DNA, 33 bp, Homo sapien
gaacctcattgcattatctttacttgccattct

SEQ ID NO: 432433 - DNA, 33 bp, Homo sapien
tgttcttttaagaacactgaatgccagaacttc

SEQ ID NO: 432434 - DNA, 33 bp, Homo sapien
tgttcttttaagaacattgaatgccagaacttc

SEQ ID NO: 432435 - DNA, 33 bp, Homo sapien
aactcaatattttcaaggtgtaagatgtgtagt

SEQ ID NO: 432436 - DNA, 33 bp, Homo sapien
aactcaatattttcaatgtgtaagatgtgtagt

SEQ ID NO: 432437 - DNA, 33 bp, Homo sapien
tctgcaatcgttgctaaaggagtaacaaagaaa

SEQ ID NO: 432438 - DNA, 33 bp, Homo sapien
tctgcaatcgttgctagaggagtaacaaagaaa

SEQ ID NO: 432439 - DNA, 33 bp, Homo sapien
cctcactcctgtaacaaaacctccactgcacat

SEQ ID NO: 432440 - DNA, 33 bp, Homo sapien
cctcactcctgtaacacaacctccactgcacat

SEQ ID NO: 432441 - DNA, 33 bp, Homo sapien
tcagcagaagaacacaaaagtgactggacattg

SEQ ID NO: 432442 - DNA, 33 bp, Homo sapien
tcagcagaagaacacacaagtgactggacattg

SEQ ID NO: 432443 - DNA, 33 bp, Homo sapien
acatttgaaaatgtgaactgataaagaattgtg

SEQ ID NO: 432444 - DNA, 33 bp, Homo sapien
acatttgaaaatgtgagctgataaagaattgtg

SEQ ID NO: 432445 - DNA, 33 bp, Homo sapien
cagagtggtgattcaaaaaaatcctgtcccaca

SEQ ID NO: 432446 - DNA, 33 bp, Homo sapien
cagagtggtgattcaagaaaatcctgtcccaca

SEQ ID NO: 432447 - DNA, 33 bp, Homo sapien
tttcctagctgggaaaaaaatacttgcaaaaat

SEQ ID NO: 432448 - DNA, 33 bp, Homo sapien
tttcctagctgggaaacaaatacttgcaaaaat

SEQ ID NO: 432449 - DNA, 33 bp, Homo sapien
cactgtgcctggtcagaacttctaatttctaaa

SEQ ID NO: 432450 - DNA, 33 bp, Homo sapien
cactgtgcctggtcaggacttctaatttctaaa

SEQ ID NO: 432451 - DNA, 33 bp, Homo sapien
ttttccaattagagccaacagtttaccagcatt

SEQ ID NO: 432452 - DNA, 33 bp, Homo sapien
ttttccaattagagcccacagtttaccagcatt

SEQ ID NO: 432453 - DNA, 33 bp, Homo sapien
agggtgatggcaagcccagagatttaggaaggg

SEQ ID NO: 432454 - DNA, 33 bp, Homo sapien
agggtgatggcaagcctagagatttaggaaggg

SEQ ID NO: 432455 - DNA, 33 bp, Homo sapien
gattctccttgaccaaagaactgtaagcagaga

SEQ ID NO: 432456 - DNA, 33 bp, Homo sapien
gattctccttgaccaatgaactgtaagcagaga

SEQ ID NO: 432457 - DNA, 33 bp, Homo sapien
caaaattccctagaagccctaactttgttttgc

SEQ ID NO: 432458 - DNA, 33 bp, Homo sapien
caaaattccctagaaggcctaactttgttttgc

SEQ ID NO: 432459 - DNA, 33 bp, Homo sapien
ttgaagctgggggcataatgataaaagaactct

SEQ ID NO: 432460 - DNA, 33 bp, Homo sapien
ttgaagctgggggcatgatgataaaagaactct

SEQ ID NO: 432461 - DNA, 33 bp, Homo sapien
gtcggtactggaagaacgaggtgagttgatgtc

SEQ ID NO: 432462 - DNA, 33 bp, Homo sapien
gtcggtactggaagaatgaggtgagttgatgtc

SEQ ID NO: 432463 - DNA, 33 bp, Homo sapien
ctcaacaccagaagaacaggtgatgtaaacaga

SEQ ID NO: 432464 - DNA, 33 bp, Homo sapien
ctcaacaccagaagaagaggtgatgtaaacaga

SEQ ID NO: 432465 - DNA, 33 bp, Homo sapien
atattcctaatttttcacctcctgaatctgagg

SEQ ID NO: 432466 - DNA, 33 bp, Homo sapien
atattcctaatttttcgcctcctgaatctgagg

SEQ ID NO: 432467 - DNA, 33 bp, Homo sapien
cttctactaatgcaaaaaagacacaagaatact

SEQ ID NO: 432468 - DNA, 33 bp, Homo sapien
cttctactaatgcaaagaagacacaagaatact

SEQ ID NO: 432469 - DNA, 33 bp, Homo sapien
aatgaaatcattatccaaacaatctacagatgg

SEQ ID NO: 432470 - DNA, 33 bp, Homo sapien
aatgaaatcattatccgaacaatctacagatgg

SEQ ID NO: 432471 - DNA, 33 bp, Homo sapien
gaaaagactggaaagcaaagaggaagtggtttc

SEQ ID NO: 432472 - DNA, 33 bp, Homo sapien
gaaaagactggaaagccaagaggaagtggtttc

SEQ ID NO: 432473 - DNA, 33 bp, Homo sapien
gaataaagctggaaaacctggaaaaagataaat

SEQ ID NO: 432474 - DNA, 33 bp, Homo sapien
gaataaagctggaaaatctggaaaaagataaat

SEQ ID NO: 432475 - DNA, 33 bp, Homo sapien
cctcaagaagtttccaatgaagtggagattgaa

SEQ ID NO: 432476 - DNA, 33 bp, Homo sapien
cctcaagaagtttccagtgaagtggagattgaa

SEQ ID NO: 432477 - DNA, 33 bp, Homo sapien
tgtagaataataaggcgcaaatgtcatagtgtc

SEQ ID NO: 432478 - DNA, 33 bp, Homo sapien
tgtagaataataaggctcaaatgtcatagtgtc

SEQ ID NO: 432479 - DNA, 33 bp, Homo sapien
taatacaataaagacaacattcgatcatctaat

SEQ ID NO: 432480 - DNA, 33 bp, Homo sapien
taatacaataaagacaccattcgatcatctaat

SEQ ID NO: 432481 - DNA, 33 bp, Homo sapien
atggtgacaacacttcacaaagctccaaataaa

SEQ ID NO: 432482 - DNA, 33 bp, Homo sapien
atggtgacaacacttcgcaaagctccaaataaa

SEQ ID NO: 432483 - DNA, 33 bp, Homo sapien
tgggattgagacatgacacaaagtgacaggggt

SEQ ID NO: 432484 - DNA, 33 bp, Homo sapien
tgggattgagacatgatacaaagtgacaggggt

SEQ ID NO: 432485 - DNA, 33 bp, Homo sapien
gcatagtgtaatttcacatacaactggcagaag

SEQ ID NO: 432486 - DNA, 33 bp, Homo sapien
gcatagtgtaatttcatatacaactggcagaag

SEQ ID NO: 432487 - DNA, 33 bp, Homo sapien
gattacagagcccggcaatgacaccaatgatag

SEQ ID NO: 432488 - DNA, 33 bp, Homo sapien
gattacagagcccggcgatgacaccaatgatag

SEQ ID NO: 432489 - DNA, 33 bp, Homo sapien
taatttcctcttgtccccagactgcatcttcat

SEQ ID NO: 432490 - DNA, 33 bp, Homo sapien
taatttcctcttgtccgcagactgcatcttcat

SEQ ID NO: 432491 - DNA, 33 bp, Homo sapien
acacacatacccctcacactgtgctttgtatac

SEQ ID NO: 432492 - DNA, 33 bp, Homo sapien
acacacatacccctcatactgtgctttgtatac

SEQ ID NO: 432493 - DNA, 33 bp, Homo sapien
tagaggaagtagttggcaaacgcaaaatgataa

SEQ ID NO: 432494 - DNA, 33 bp, Homo sapien
tagaggaagtagttggtaaacgcaaaatgataa

SEQ ID NO: 432495 - DNA, 33 bp, Homo sapien
ttcagggaagttgatacgaaaggtcaaaacaaa

SEQ ID NO: 432496 - DNA, 33 bp, Homo sapien
ttcagggaagttgataggaaaggtcaaaacaaa

SEQ ID NO: 432497 - DNA, 33 bp, Homo sapien
atggatctccatcatacattagaacacattagt

SEQ ID NO: 432498 - DNA, 33 bp, Homo sapien
atggatctccatcatatattagaacacattagt

SEQ ID NO: 432499 - DNA, 33 bp, Homo sapien
tatctaggtgaaagagaaaggtaactcagaata

SEQ ID NO: 432500 - DNA, 33 bp, Homo sapien
tatctaggtgaaagaggaaggtaactcagaata

SEQ ID NO: 432501 - DNA, 33 bp, Homo sapien
agcaaaggactagaaacgtgtcttgagggaaga

SEQ ID NO: 432502 - DNA, 33 bp, Homo sapien
agcaaaggactagaaatgtgtcttgagggaaga

SEQ ID NO: 432503 - DNA, 33 bp, Homo sapien
ttccctctagtgcttcaaatatcttgtgttcac

SEQ ID NO: 432504 - DNA, 33 bp, Homo sapien
ttccctctagtgcttcgaatatcttgtgttcac

SEQ ID NO: 432505 - DNA, 33 bp, Homo sapien
gcgcctgctgtagggagctatgaaatttgaact

SEQ ID NO: 432506 - DNA, 33 bp, Homo sapien
gcgcctgctgtagggatctatgaaatttgaact

SEQ ID NO: 432507 - DNA, 33 bp, Homo sapien
gtattcaaatcttggcaaatatccaactagcaa

SEQ ID NO: 432508 - DNA, 33 bp, Homo sapien
gtattcaaatcttggccaatatccaactagcaa

SEQ ID NO: 432509 - DNA, 33 bp, Homo sapien
ataagcactaaaatacagactagatgttaaaca

SEQ ID NO: 432510 - DNA, 33 bp, Homo sapien
ataagcactaaaatactgactagatgttaaaca

SEQ ID NO: 432511 - DNA, 33 bp, Homo sapien
ccctcctgtcacctcacaacctcaagtcccact

SEQ ID NO: 432512 - DNA, 33 bp, Homo sapien
ccctcctgtcacctcagaacctcaagtcccact

SEQ ID NO: 432513 - DNA, 33 bp, Homo sapien
gttataaaagtcagaagtaaaagtcctattcca

SEQ ID NO: 432514 - DNA, 33 bp, Homo sapien
gttataaaagtcagaattaaaagtcctattcca

SEQ ID NO: 432515 - DNA, 33 bp, Homo sapien
ggtaggattgttcataaactaaagggaatgtta

SEQ ID NO: 432516 - DNA, 33 bp, Homo sapien
ggtaggattgttcatagactaaagggaatgtta

SEQ ID NO: 432517 - DNA, 33 bp, Homo sapien
cctgttagagcacctaaaaagcctgtacctctg

SEQ ID NO: 432518 - DNA, 33 bp, Homo sapien
cctgttagagcacctagaaagcctgtacctctg

SEQ ID NO: 432519 - DNA, 33 bp, Homo sapien
aaaaggaattaggatacgatgtactctgaaggt

SEQ ID NO: 432520 - DNA, 33 bp, Homo sapien
aaaaggaattaggatatgatgtactctgaaggt

SEQ ID NO: 432521 - DNA, 33 bp, Homo sapien
aaattgtagtggataaatgctgtgtgcaaactg

SEQ ID NO: 432522 - DNA, 33 bp, Homo sapien
aaattgtagtggataactgctgtgtgcaaactg

SEQ ID NO: 432523 - DNA, 33 bp, Homo sapien
atcactattttacctacgcaactccatttttgc

SEQ ID NO: 432524 - DNA, 33 bp, Homo sapien
atcactattttacctatgcaactccatttttgc

SEQ ID NO: 432525 - DNA, 33 bp, Homo sapien
tccttagacttccggaaagacgtagtatgaatt

SEQ ID NO: 432526 - DNA, 33 bp, Homo sapien
tccttagacttccggagagacgtagtatgaatt

SEQ ID NO: 432527 - DNA, 33 bp, Homo sapien
taggtctaaagtagcccaatgcttagtccactt

SEQ ID NO: 432528 - DNA, 33 bp, Homo sapien
taggtctaaagtagcctaatgcttagtccactt

SEQ ID NO: 432529 - DNA, 33 bp, Homo sapien
tgacagcgctgaaagagacaagtgaggttctaa

SEQ ID NO: 432530 - DNA, 33 bp, Homo sapien
tgacagcgctgaaagatacaagtgaggttctaa

SEQ ID NO: 432531 - DNA, 33 bp, Homo sapien
taacctatgtttcagcaacagagtttggacgta

SEQ ID NO: 432532 - DNA, 33 bp, Homo sapien
taacctatgtttcagctacagagtttggacgta

SEQ ID NO: 432533 - DNA, 33 bp, Homo sapien
acatctttaatcatgtcaagcccaaatatgttt

SEQ ID NO: 432534 - DNA, 33 bp, Homo sapien
acatctttaatcatgttaagcccaaatatgttt

SEQ ID NO: 432535 - DNA, 33 bp, Homo sapien
gttagtcaccctaccaagttttagaagactaga

SEQ ID NO: 432536 - DNA, 33 bp, Homo sapien
gttagtcaccctaccatgttttagaagactaga

SEQ ID NO: 432537 - DNA, 33 bp, Homo sapien
atatcccgactcattcactgggtagcttgacca

SEQ ID NO: 432538 - DNA, 33 bp, Homo sapien
atatcccgactcattccctgggtagcttgacca

SEQ ID NO: 432539 - DNA, 33 bp, Homo sapien
gattataagcttaatcagaggtcatcagggata

SEQ ID NO: 432540 - DNA, 33 bp, Homo sapien
gattataagcttaatcggaggtcatcagggata

SEQ ID NO: 432541 - DNA, 33 bp, Homo sapien
gatcaagagaatcaaaaagagaggtaagtagaa

SEQ ID NO: 432542 - DNA, 33 bp, Homo sapien
gatcaagagaatcaaacagagaggtaagtagaa

SEQ ID NO: 432543 - DNA, 33 bp, Homo sapien
aattgagattctgacaccttaaaggtctgaaag

SEQ ID NO: 432544 - DNA, 33 bp, Homo sapien
aattgagattctgacatcttaaaggtctgaaag

SEQ ID NO: 432545 - DNA, 33 bp, Homo sapien
ttggggtcaaacactactacagtattttatagt

SEQ ID NO: 432546 - DNA, 33 bp, Homo sapien
ttggggtcaaacactattacagtattttatagt

SEQ ID NO: 432547 - DNA, 33 bp, Homo sapien
aacagctttaagtctaagtagaagcgacgtagc

SEQ ID NO: 432548 - DNA, 33 bp, Homo sapien
aacagctttaagtctatgtagaagcgacgtagc

SEQ ID NO: 432549 - DNA, 33 bp, Homo sapien
ggcttgttgttgcaatcataatgtcaggaaaag

SEQ ID NO: 432550 - DNA, 33 bp, Homo sapien
ggcttgttgttgcaattataatgtcaggaaaag

SEQ ID NO: 432551 - DNA, 33 bp, Homo sapien
atagacaggaagaggcagattcaagagatgatt

SEQ ID NO: 432552 - DNA, 33 bp, Homo sapien
atagacaggaagaggcggattcaagagatgatt

SEQ ID NO: 432553 - DNA, 33 bp, Homo sapien
tatgagattgagtacaacagcaactaaagggac

SEQ ID NO: 432554 - DNA, 33 bp, Homo sapien
tatgagattgagtacaccagcaactaaagggac

SEQ ID NO: 432555 - DNA, 33 bp, Homo sapien
gacatccaggcactgacgaacgagcgagtaaat

SEQ ID NO: 432556 - DNA, 33 bp, Homo sapien
gacatccaggcactgatgaacgagcgagtaaat

SEQ ID NO: 432557 - DNA, 33 bp, Homo sapien
caaagaaattcatgataaaggtttaagaatgac

SEQ ID NO: 432558 - DNA, 33 bp, Homo sapien
caaagaaattcatgatcaaggtttaagaatgac

SEQ ID NO: 432559 - DNA, 33 bp, Homo sapien
ttaaaacagccttcaccatttatatttctttat

SEQ ID NO: 432560 - DNA, 33 bp, Homo sapien
ttaaaacagccttcacgatttatatttctttat

SEQ ID NO: 432561 - DNA, 33 bp, Homo sapien
taccaaaattcacacaagaagatatagataata

SEQ ID NO: 432562 - DNA, 33 bp, Homo sapien
taccaaaattcacacaggaagatatagataata

SEQ ID NO: 432563 - DNA, 33 bp, Homo sapien
tttgtttgtttttatgcatgttgcaggtaatta

SEQ ID NO: 432564 - DNA, 33 bp, Homo sapien
tttgtttgtttttatgtatgttgcaggtaatta

SEQ ID NO: 432565 - DNA, 33 bp, Homo sapien
ttattccactcagatcaagtctagacaaatagc

SEQ ID NO: 432566 - DNA, 33 bp, Homo sapien
ttattccactcagatcgagtctagacaaatagc

SEQ ID NO: 432567 - DNA, 33 bp, Homo sapien
gcccttctcttctataaaagcatgcatacagct

SEQ ID NO: 432568 - DNA, 33 bp, Homo sapien
gcccttctcttctatacaagcatgcatacagct

SEQ ID NO: 432569 - DNA, 33 bp, Homo sapien
cctatcagtggtgaaaactgaagctgaagttgt

SEQ ID NO: 432570 - DNA, 33 bp, Homo sapien
cctatcagtggtgaaagctgaagctgaagttgt

SEQ ID NO: 432571 - DNA, 33 bp, Homo sapien
attgaatggaatgttaagcctcctttagctttt

SEQ ID NO: 432572 - DNA, 33 bp, Homo sapien
attgaatggaatgttaggcctcctttagctttt

SEQ ID NO: 432573 - DNA, 33 bp, Homo sapien
taacctactattctcaccatccaatgttttaaa

SEQ ID NO: 432574 - DNA, 33 bp, Homo sapien
taacctactattctcagcatccaatgttttaaa

SEQ ID NO: 432575 - DNA, 33 bp, Homo sapien
catacattagttccaactcccagttctaccact

SEQ ID NO: 432576 - DNA, 33 bp, Homo sapien
catacattagttccaattcccagttctaccact

SEQ ID NO: 432577 - DNA, 33 bp, Homo sapien
cttttttcacaatttcacagatactgactcatt

SEQ ID NO: 432578 - DNA, 33 bp, Homo sapien
cttttttcacaatttctcagatactgactcatt

SEQ ID NO: 432579 - DNA, 33 bp, Homo sapien
tgcaacctcttggaacaatgacggatccaggca

SEQ ID NO: 432580 - DNA, 33 bp, Homo sapien
tgcaacctcttggaacgatgacggatccaggca

SEQ ID NO: 432581 - DNA, 33 bp, Homo sapien
ttctaaagggatctacaggtgaagctatctaaa

SEQ ID NO: 432582 - DNA, 33 bp, Homo sapien
ttctaaagggatctacgggtgaagctatctaaa

SEQ ID NO: 432583 - DNA, 33 bp, Homo sapien
catgccctagaatggcacagagctaaaaacagg

SEQ ID NO: 432584 - DNA, 33 bp, Homo sapien
catgccctagaatggcgcagagctaaaaacagg

SEQ ID NO: 432585 - DNA, 33 bp, Homo sapien
attttcaacctggacaccttgccaaagttgatt

SEQ ID NO: 432586 - DNA, 33 bp, Homo sapien
attttcaacctggacatcttgccaaagttgatt

SEQ ID NO: 432587 - DNA, 33 bp, Homo sapien
gaacatgggctcactactacttagtaaagcaat

SEQ ID NO: 432588 - DNA, 33 bp, Homo sapien
gaacatgggctcactattacttagtaaagcaat

SEQ ID NO: 432589 - DNA, 33 bp, Homo sapien
agtagatcccagcttaaatgaaacccactgctt

SEQ ID NO: 432590 - DNA, 33 bp, Homo sapien
agtagatcccagcttacatgaaacccactgctt

SEQ ID NO: 432591 - DNA, 33 bp, Homo sapien
gggagaagagatgagaaagataagctggatcaa

SEQ ID NO: 432592 - DNA, 33 bp, Homo sapien
gggagaagagatgagagagataagctggatcaa

SEQ ID NO: 432593 - DNA, 33 bp, Homo sapien
attaatttaattggcccatagttatctagtctc

SEQ ID NO: 432594 - DNA, 33 bp, Homo sapien
attaatttaattggcctatagttatctagtctc

SEQ ID NO: 432595 - DNA, 33 bp, Homo sapien
acctatttataggataactgtccatggattatc

SEQ ID NO: 432596 - DNA, 33 bp, Homo sapien
acctatttataggatacctgtccatggattatc

SEQ ID NO: 432597 - DNA, 33 bp, Homo sapien
aaaagaaagaaaagcactaataacagcaacaat

SEQ ID NO: 432598 - DNA, 33 bp, Homo sapien
aaaagaaagaaaagcagtaataacagcaacaat

SEQ ID NO: 432599 - DNA, 33 bp, Homo sapien
ttgtatgcttacttacaatggctttgcatagca

SEQ ID NO: 432600 - DNA, 33 bp, Homo sapien
ttgtatgcttacttacgatggctttgcatagca

SEQ ID NO: 432601 - DNA, 33 bp, Homo sapien
tttagataagtatgggcaaaaacgtatcaacac

SEQ ID NO: 432602 - DNA, 33 bp, Homo sapien
tttagataagtatgggtaaaaacgtatcaacac

SEQ ID NO: 432603 - DNA, 33 bp, Homo sapien
aaagatataattatacacactatccacaaaagc

SEQ ID NO: 432604 - DNA, 33 bp, Homo sapien
aaagatataattatacccactatccacaaaagc

SEQ ID NO: 432605 - DNA, 33 bp, Homo sapien
aaacttttgtgaaatacacctgataaaagttta

SEQ ID NO: 432606 - DNA, 33 bp, Homo sapien
aaacttttgtgaaatatacctgataaaagttta

SEQ ID NO: 432607 - DNA, 33 bp, Homo sapien
attaatgttttaatcaagaagtggaacagaaac

SEQ ID NO: 432608 - DNA, 33 bp, Homo sapien
attaatgttttaatcatgaagtggaacagaaac

SEQ ID NO: 432609 - DNA, 33 bp, Homo sapien
cacagattttcaaaacaacctaaccatccttaa

SEQ ID NO: 432610 - DNA, 33 bp, Homo sapien
cacagattttcaaaaccacctaaccatccttaa

SEQ ID NO: 432611 - DNA, 33 bp, Homo sapien
caaaccagttataaccatgccaagtggagctcc

SEQ ID NO: 432612 - DNA, 33 bp, Homo sapien
caaaccagttataaccgtgccaagtggagctcc

SEQ ID NO: 432613 - DNA, 33 bp, Homo sapien
tacatacagttaaaaacagagagcttcagctgg

SEQ ID NO: 432614 - DNA, 33 bp, Homo sapien
tacatacagttaaaaatagagagcttcagctgg

SEQ ID NO: 432615 - DNA, 33 bp, Homo sapien
cagtctgaaaactaaaatgatgccagtgaagca

SEQ ID NO: 432616 - DNA, 33 bp, Homo sapien
cagtctgaaaactaaagtgatgccagtgaagca

SEQ ID NO: 432617 - DNA, 33 bp, Homo sapien
gtagtctcttgaaatccatggaaactagaaaac

SEQ ID NO: 432618 - DNA, 33 bp, Homo sapien
gtagtctcttgaaatctatggaaactagaaaac

SEQ ID NO: 432619 - DNA, 33 bp, Homo sapien
ttgaacatattctgacacatgaatctgggacag

SEQ ID NO: 432620 - DNA, 33 bp, Homo sapien
ttgaacatattctgacccatgaatctgggacag

SEQ ID NO: 432621 - DNA, 33 bp, Homo sapien
atttactaagagcgtgcagaagtacatttaaaa

SEQ ID NO: 432622 - DNA, 33 bp, Homo sapien
atttactaagagcgtgtagaagtacatttaaaa

SEQ ID NO: 432623 - DNA, 33 bp, Homo sapien
gctatgggttatggggaaatgccactcctctca

SEQ ID NO: 432624 - DNA, 33 bp, Homo sapien
gctatgggttatggggcaatgccactcctctca

SEQ ID NO: 432625 - DNA, 33 bp, Homo sapien
gtataattgtgattcaaatgcagatttaagaca

SEQ ID NO: 432626 - DNA, 33 bp, Homo sapien
gtataattgtgattcagatgcagatttaagaca

SEQ ID NO: 432627 - DNA, 33 bp, Homo sapien
actaaggtcattattcacttttcttccccctct

SEQ ID NO: 432628 - DNA, 33 bp, Homo sapien
actaaggtcattattcgcttttcttccccctct

SEQ ID NO: 432629 - DNA, 33 bp, Homo sapien
tgcagagactgaaaaactgttggccaagtaatt

SEQ ID NO: 432630 - DNA, 33 bp, Homo sapien
tgcagagactgaaaaattgttggccaagtaatt

SEQ ID NO: 432631 - DNA, 33 bp, Homo sapien
ctgagagacaccctgaatacttgaggttgagaa

SEQ ID NO: 432632 - DNA, 33 bp, Homo sapien
ctgagagacaccctgagtacttgaggttgagaa

SEQ ID NO: 432633 - DNA, 33 bp, Homo sapien
ccaagttgttgcagggaagaattctatcaaaac

SEQ ID NO: 432634 - DNA, 33 bp, Homo sapien
ccaagttgttgcaggggagaattctatcaaaac

SEQ ID NO: 432635 - DNA, 33 bp, Homo sapien
tggcttgtccaaactacgtactggtcgaacaac

SEQ ID NO: 432636 - DNA, 33 bp, Homo sapien
tggcttgtccaaactatgtactggtcgaacaac

SEQ ID NO: 432637 - DNA, 33 bp, Homo sapien
aggctttcagccaaagaaattgtaacgtacacc

SEQ ID NO: 432638 - DNA, 33 bp, Homo sapien
aggctttcagccaaaggaattgtaacgtacacc

SEQ ID NO: 432639 - DNA, 33 bp, Homo sapien
agcagaacaagcaaaaagtatctgtacagtcaa

SEQ ID NO: 432640 - DNA, 33 bp, Homo sapien
agcagaacaagcaaaaggtatctgtacagtcaa

SEQ ID NO: 432641 - DNA, 33 bp, Homo sapien
catctcaaagaaaaaaagttgtgtcctttaatg

SEQ ID NO: 432642 - DNA, 33 bp, Homo sapien
catctcaaagaaaaaaggttgtgtcctttaatg

SEQ ID NO: 432643 - DNA, 33 bp, Homo sapien
ttttttaaactgttacaaactctgcagattcta

SEQ ID NO: 432644 - DNA, 33 bp, Homo sapien
ttttttaaactgttaccaactctgcagattcta

SEQ ID NO: 432645 - DNA, 33 bp, Homo sapien
ccacctgaaatttacaagagttctcggccaagt

SEQ ID NO: 432646 - DNA, 33 bp, Homo sapien
ccacctgaaatttacatgagttctcggccaagt

SEQ ID NO: 432647 - DNA, 33 bp, Homo sapien
attatggctgattatagctcctactcatttttt

SEQ ID NO: 432648 - DNA, 33 bp, Homo sapien
attatggctgattatatctcctactcatttttt

SEQ ID NO: 432649 - DNA, 33 bp, Homo sapien
ctcaccattggctgtcaaatgcatggttagttc

SEQ ID NO: 432650 - DNA, 33 bp, Homo sapien
ctcaccattggctgtcgaatgcatggttagttc

SEQ ID NO: 432651 - DNA, 33 bp, Homo sapien
ttgtccaaatgagggccacaggctccaaatgag

SEQ ID NO: 432652 - DNA, 33 bp, Homo sapien
ttgtccaaatgagggctacaggctccaaatgag

SEQ ID NO: 432653 - DNA, 33 bp, Homo sapien
actgggcaatttagaaaaacacttactgccaga

SEQ ID NO: 432654 - DNA, 33 bp, Homo sapien
actgggcaatttagaagaacacttactgccaga

SEQ ID NO: 432655 - DNA, 33 bp, Homo sapien
tctgaagaaaagcgacaagaaagttacttctac

SEQ ID NO: 432656 - DNA, 33 bp, Homo sapien
tctgaagaaaagcgacgagaaagttacttctac

SEQ ID NO: 432657 - DNA, 33 bp, Homo sapien
aaaaagagacctaacaaaatgagcattccttag

SEQ ID NO: 432658 - DNA, 33 bp, Homo sapien
aaaaagagacctaacacaatgagcattccttag

SEQ ID NO: 432659 - DNA, 33 bp, Homo sapien
tttgatctgagtcaacgatttgctgtagggtcg

SEQ ID NO: 432660 - DNA, 33 bp, Homo sapien
tttgatctgagtcaactatttgctgtagggtcg

SEQ ID NO: 432661 - DNA, 33 bp, Homo sapien
tagacacaaatgggtcaaaggtcaatgacaaaa

SEQ ID NO: 432662 - DNA, 33 bp, Homo sapien
tagacacaaatgggtcgaaggtcaatgacaaaa

SEQ ID NO: 432663 - DNA, 33 bp, Homo sapien
tctgtcttaaaagcggaccatatttggtttaat

SEQ ID NO: 432664 - DNA, 33 bp, Homo sapien
tctgtcttaaaagcggtccatatttggtttaat

SEQ ID NO: 432665 - DNA, 33 bp, Homo sapien
catggtacagaaagaaaaggcgtgtgtatgtgt

SEQ ID NO: 432666 - DNA, 33 bp, Homo sapien
catggtacagaaagaagaggcgtgtgtatgtgt

SEQ ID NO: 432667 - DNA, 33 bp, Homo sapien
cacagcttcagacagtcacactgaaaagctagc

SEQ ID NO: 432668 - DNA, 33 bp, Homo sapien
cacagcttcagacagttacactgaaaagctagc

SEQ ID NO: 432669 - DNA, 33 bp, Homo sapien
ctcatgtctcagatataaaggaagagattgtga

SEQ ID NO: 432670 - DNA, 33 bp, Homo sapien
ctcatgtctcagatatgaaggaagagattgtga

SEQ ID NO: 432671 - DNA, 33 bp, Homo sapien
ttcagccagttttcacaaagaagatgaagcaaa

SEQ ID NO: 432672 - DNA, 33 bp, Homo sapien
ttcagccagttttcacgaagaagatgaagcaaa

SEQ ID NO: 432673 - DNA, 33 bp, Homo sapien
tgacctccttcaccaacggaatcactcactcca

SEQ ID NO: 432674 - DNA, 33 bp, Homo sapien
tgacctccttcaccaatggaatcactcactcca

SEQ ID NO: 432675 - DNA, 33 bp, Homo sapien
aataccacatttctacaatttacaatctgataa

SEQ ID NO: 432676 - DNA, 33 bp, Homo sapien
aataccacatttctacgatttacaatctgataa

SEQ ID NO: 432677 - DNA, 33 bp, Homo sapien
agtcttctgacaagatgaggtattgacaaacag

SEQ ID NO: 432678 - DNA, 33 bp, Homo sapien
agtcttctgacaagattaggtattgacaaacag

SEQ ID NO: 432679 - DNA, 33 bp, Homo sapien
ataccaagcgtgcaaaatatcaaattatttatt

SEQ ID NO: 432680 - DNA, 33 bp, Homo sapien
ataccaagcgtgcaaactatcaaattatttatt

SEQ ID NO: 432681 - DNA, 33 bp, Homo sapien
aataggtatataaaaagtctcacctcctgtgta

SEQ ID NO: 432682 - DNA, 33 bp, Homo sapien
aataggtatataaaaattctcacctcctgtgta

SEQ ID NO: 432683 - DNA, 33 bp, Homo sapien
aaaagattgaaaaaaaattgtgattcaatgaaa

SEQ ID NO: 432684 - DNA, 33 bp, Homo sapien
aaaagattgaaaaaaagttgtgattcaatgaaa

SEQ ID NO: 432685 - DNA, 33 bp, Homo sapien
aataggttcctggaagaccatagacattaattt

SEQ ID NO: 432686 - DNA, 33 bp, Homo sapien
aataggttcctggaagcccatagacattaattt

SEQ ID NO: 432687 - DNA, 33 bp, Homo sapien
catgacagattccaaagttcacattttaaataa

SEQ ID NO: 432688 - DNA, 33 bp, Homo sapien
catgacagattccaaatttcacattttaaataa

SEQ ID NO: 432689 - DNA, 33 bp, Homo sapien
caggatatcattattcaactcattcattcacct

SEQ ID NO: 432690 - DNA, 33 bp, Homo sapien
caggatatcattattcgactcattcattcacct

SEQ ID NO: 432691 - DNA, 33 bp, Homo sapien
gctttgttactcagtacatcacctttctttgct

SEQ ID NO: 432692 - DNA, 33 bp, Homo sapien
gctttgttactcagtatatcacctttctttgct

SEQ ID NO: 432693 - DNA, 33 bp, Homo sapien
acttcatcttgatctcaaaagttggctgggcac

SEQ ID NO: 432694 - DNA, 33 bp, Homo sapien
acttcatcttgatctccaaagttggctgggcac

SEQ ID NO: 432695 - DNA, 33 bp, Homo sapien
tggcattctgctgttacgtaagtattttcataa

SEQ ID NO: 432696 - DNA, 33 bp, Homo sapien
tggcattctgctgttatgtaagtattttcataa

SEQ ID NO: 432697 - DNA, 33 bp, Homo sapien
ataatgcttgcttgacacctacataaaaacaaa

SEQ ID NO: 432698 - DNA, 33 bp, Homo sapien
ataatgcttgcttgacgcctacataaaaacaaa

SEQ ID NO: 432699 - DNA, 33 bp, Homo sapien
gtctctttgaggtctcaagaaaatatgccacat

SEQ ID NO: 432700 - DNA, 33 bp, Homo sapien
gtctctttgaggtctcgagaaaatatgccacat

SEQ ID NO: 432701 - DNA, 33 bp, Homo sapien
gagatgaccaacaatacatgcaacagtcccccc

SEQ ID NO: 432702 - DNA, 33 bp, Homo sapien
gagatgaccaacaatatatgcaacagtcccccc

SEQ ID NO: 432703 - DNA, 33 bp, Homo sapien
ttaaagcttcagcaacaatgggaaacacctgta

SEQ ID NO: 432704 - DNA, 33 bp, Homo sapien
ttaaagcttcagcaacgatgggaaacacctgta

SEQ ID NO: 432705 - DNA, 33 bp, Homo sapien
atgtctacacctaaaaagtataaaagatgagag

SEQ ID NO: 432706 - DNA, 33 bp, Homo sapien
atgtctacacctaaaacgtataaaagatgagag

SEQ ID NO: 432707 - DNA, 33 bp, Homo sapien
taagtaaaagtataacaagccgtatgagacaca

SEQ ID NO: 432708 - DNA, 33 bp, Homo sapien
taagtaaaagtataacgagccgtatgagacaca

SEQ ID NO: 432709 - DNA, 33 bp, Homo sapien
cactgattaaaaccacgaatctctataatctcc

SEQ ID NO: 432710 - DNA, 33 bp, Homo sapien
cactgattaaaaccactaatctctataatctcc

SEQ ID NO: 432711 - DNA, 33 bp, Homo sapien
ttgttgtctggtatgcaaccctggagtgattaa

SEQ ID NO: 432712 - DNA, 33 bp, Homo sapien
ttgttgtctggtatgcgaccctggagtgattaa

SEQ ID NO: 432713 - DNA, 33 bp, Homo sapien
gcacaatttcaacacaccaaaaataggtcctgt

SEQ ID NO: 432714 - DNA, 33 bp, Homo sapien
gcacaatttcaacacatcaaaaataggtcctgt

SEQ ID NO: 432715 - DNA, 33 bp, Homo sapien
gttccagcctattccccggagtctctgagattt

SEQ ID NO: 432716 - DNA, 33 bp, Homo sapien
gttccagcctattccctggagtctctgagattt

SEQ ID NO: 432717 - DNA, 33 bp, Homo sapien
acggaaagaatcagacgattagccagcggcagg

SEQ ID NO: 432718 - DNA, 33 bp, Homo sapien
acggaaagaatcagactattagccagcggcagg

SEQ ID NO: 432719 - DNA, 33 bp, Homo sapien
attgtaatcattcacaacccaataaggtggtgt

SEQ ID NO: 432720 - DNA, 33 bp, Homo sapien
attgtaatcattcacagcccaataaggtggtgt

SEQ ID NO: 432721 - DNA, 33 bp, Homo sapien
gaaaacagacactatccacattgaacagttctc

SEQ ID NO: 432722 - DNA, 33 bp, Homo sapien
gaaaacagacactatcgacattgaacagttctc

SEQ ID NO: 432723 - DNA, 33 bp, Homo sapien
acaaaggtgatgaaaacataataacaacaaaag

SEQ ID NO: 432724 - DNA, 33 bp, Homo sapien
acaaaggtgatgaaaatataataacaacaaaag

SEQ ID NO: 432725 - DNA, 33 bp, Homo sapien
ttttcccaactgttaaatgagtatatgtatgaa

SEQ ID NO: 432726 - DNA, 33 bp, Homo sapien
ttttcccaactgttaagtgagtatatgtatgaa

SEQ ID NO: 432727 - DNA, 33 bp, Homo sapien
ataattttatagagaaccccatgtttgtaatta

SEQ ID NO: 432728 - DNA, 33 bp, Homo sapien
ataattttatagagaatcccatgtttgtaatta

SEQ ID NO: 432729 - DNA, 33 bp, Homo sapien
catggctgaaagcttcccaattttaatgcaaga

SEQ ID NO: 432730 - DNA, 33 bp, Homo sapien
catggctgaaagcttctcaattttaatgcaaga

SEQ ID NO: 432731 - DNA, 33 bp, Homo sapien
ataggggtcaggcaagaatattcatgaggtgaa

SEQ ID NO: 432732 - DNA, 33 bp, Homo sapien
ataggggtcaggcaagtatattcatgaggtgaa

SEQ ID NO: 432733 - DNA, 33 bp, Homo sapien
gactttttctgttgagaactttacttagaaaac

SEQ ID NO: 432734 - DNA, 33 bp, Homo sapien
gactttttctgttgaggactttacttagaaaac

SEQ ID NO: 432735 - DNA, 33 bp, Homo sapien
gcaagttgcaagcagaaccaaaaagaccatagc

SEQ ID NO: 432736 - DNA, 33 bp, Homo sapien
gcaagttgcaagcagatccaaaaagaccatagc

SEQ ID NO: 432737 - DNA, 33 bp, Homo sapien
aatatctgaatgcaccaatatattaataagtgt

SEQ ID NO: 432738 - DNA, 33 bp, Homo sapien
aatatctgaatgcaccgatatattaataagtgt

SEQ ID NO: 432739 - DNA, 33 bp, Homo sapien
gctcaaatggccatctaacaaattctggaatga

SEQ ID NO: 432740 - DNA, 33 bp, Homo sapien
gctcaaatggccatctgacaaattctggaatga

SEQ ID NO: 432741 - DNA, 33 bp, Homo sapien
tacttgatcaacttggcattagactttggtttc

SEQ ID NO: 432742 - DNA, 33 bp, Homo sapien
tacttgatcaacttggtattagactttggtttc

SEQ ID NO: 432743 - DNA, 33 bp, Homo sapien
gaatgatggatggaaaagatgaaattgttaata

SEQ ID NO: 432744 - DNA, 33 bp, Homo sapien
gaatgatggatggaaatgatgaaattgttaata

SEQ ID NO: 432745 - DNA, 33 bp, Homo sapien
tgacgtattttcattgaaccccagtcacacgca

SEQ ID NO: 432746 - DNA, 33 bp, Homo sapien
tgacgtattttcattgtaccccagtcacacgca

SEQ ID NO: 432747 - DNA, 33 bp, Homo sapien
tcactctctccatcacagtaactagaaagattc

SEQ ID NO: 432748 - DNA, 33 bp, Homo sapien
tcactctctccatcacggtaactagaaagattc

SEQ ID NO: 432749 - DNA, 33 bp, Homo sapien
ctagacctagaactgaaagtccagccagacacg

SEQ ID NO: 432750 - DNA, 33 bp, Homo sapien
ctagacctagaactgagagtccagccagacacg

SEQ ID NO: 432751 - DNA, 33 bp, Homo sapien
aaacagattatatgtgaacggttatttgctgag

SEQ ID NO: 432752 - DNA, 33 bp, Homo sapien
aaacagattatatgtggacggttatttgctgag

SEQ ID NO: 432753 - DNA, 33 bp, Homo sapien
gaagtactcagccaaagtaaatcagctaaatct

SEQ ID NO: 432754 - DNA, 33 bp, Homo sapien
gaagtactcagccaaattaaatcagctaaatct

SEQ ID NO: 432755 - DNA, 33 bp, Homo sapien
gagaagtaggccctgaatagatagggcaaagac

SEQ ID NO: 432756 - DNA, 33 bp, Homo sapien
gagaagtaggccctgagtagatagggcaaagac

SEQ ID NO: 432757 - DNA, 33 bp, Homo sapien
taaaaaacgtgtgtgacgtatgctgtagatatt

SEQ ID NO: 432758 - DNA, 33 bp, Homo sapien
taaaaaacgtgtgtgatgtatgctgtagatatt

SEQ ID NO: 432759 - DNA, 33 bp, Homo sapien
cctaagcctagtaacagaagtagttggagtcta

SEQ ID NO: 432760 - DNA, 33 bp, Homo sapien
cctaagcctagtaacataagtagttggagtcta

SEQ ID NO: 432761 - DNA, 33 bp, Homo sapien
ttcttgcttgatgatcaaagtgccagactggtt

SEQ ID NO: 432762 - DNA, 33 bp, Homo sapien
ttcttgcttgatgatcgaagtgccagactggtt

SEQ ID NO: 432763 - DNA, 33 bp, Homo sapien
ctgccttgcaagcttaccttcagacccaaaagt

SEQ ID NO: 432764 - DNA, 33 bp, Homo sapien
ctgccttgcaagcttatcttcagacccaaaagt

SEQ ID NO: 432765 - DNA, 33 bp, Homo sapien
agttcatcctgtggaaccaattaactcttctca

SEQ ID NO: 432766 - DNA, 33 bp, Homo sapien
agttcatcctgtggaagcaattaactcttctca

SEQ ID NO: 432767 - DNA, 33 bp, Homo sapien
aatactggagtgccacaagtgacttctttgtat

SEQ ID NO: 432768 - DNA, 33 bp, Homo sapien
aatactggagtgccacgagtgacttctttgtat

SEQ ID NO: 432769 - DNA, 33 bp, Homo sapien
tttaaccagagatgaaatatcttgtacaccgaa

SEQ ID NO: 432770 - DNA, 33 bp, Homo sapien
tttaaccagagatgaagtatcttgtacaccgaa

SEQ ID NO: 432771 - DNA, 33 bp, Homo sapien
tttgcttcctaaccagaagagtttaaaacaggc

SEQ ID NO: 432772 - DNA, 33 bp, Homo sapien
tttgcttcctaaccaggagagtttaaaacaggc

SEQ ID NO: 432773 - DNA, 33 bp, Homo sapien
tagggcaacaaatgtaagtaaggatctgccatg

SEQ ID NO: 432774 - DNA, 33 bp, Homo sapien
tagggcaacaaatgtaggtaaggatctgccatg

SEQ ID NO: 432775 - DNA, 33 bp, Homo sapien
gggatggaagcagggactagatttgccgacagc

SEQ ID NO: 432776 - DNA, 33 bp, Homo sapien
gggatggaagcagggattagatttgccgacagc

SEQ ID NO: 432777 - DNA, 33 bp, Homo sapien
gggacagagagacagaaaaaaagaataaacagg

SEQ ID NO: 432778 - DNA, 33 bp, Homo sapien
gggacagagagacagagaaaaagaataaacagg

SEQ ID NO: 432779 - DNA, 33 bp, Homo sapien
acatgacgttggtttaacagcattttttctcaa

SEQ ID NO: 432780 - DNA, 33 bp, Homo sapien
acatgacgttggtttaccagcattttttctcaa

SEQ ID NO: 432781 - DNA, 33 bp, Homo sapien
gttagagaatcttggaatcacaaataaaatgct

SEQ ID NO: 432782 - DNA, 33 bp, Homo sapien
gttagagaatcttggagtcacaaataaaatgct

SEQ ID NO: 432783 - DNA, 33 bp, Homo sapien
aaggaactgtggatgaactctagcagctgagag

SEQ ID NO: 432784 - DNA, 33 bp, Homo sapien
aaggaactgtggatgacctctagcagctgagag

SEQ ID NO: 432785 - DNA, 33 bp, Homo sapien
ggactagacagacataaaggtgagtattggtct

SEQ ID NO: 432786 - DNA, 33 bp, Homo sapien
ggactagacagacatagaggtgagtattggtct

SEQ ID NO: 432787 - DNA, 33 bp, Homo sapien
cacatattactcttgcactttattagaatttgg

SEQ ID NO: 432788 - DNA, 33 bp, Homo sapien
cacatattactcttgctctttattagaatttgg

SEQ ID NO: 432789 - DNA, 33 bp, Homo sapien
catatttcaacattaaatgcagcttgaaatata

SEQ ID NO: 432790 - DNA, 33 bp, Homo sapien
catatttcaacattaagtgcagcttgaaatata

SEQ ID NO: 432791 - DNA, 33 bp, Homo sapien
aagtattcttccaagaggctggattgtactttt

SEQ ID NO: 432792 - DNA, 33 bp, Homo sapien
aagtattcttccaagatgctggattgtactttt

SEQ ID NO: 432793 - DNA, 33 bp, Homo sapien
gacaaagagaggacaacgcagtgaagaaataaa

SEQ ID NO: 432794 - DNA, 33 bp, Homo sapien
gacaaagagaggacaatgcagtgaagaaataaa

SEQ ID NO: 432795 - DNA, 33 bp, Homo sapien
aagaaatgtttcccaactgtttttgtgacttct

SEQ ID NO: 432796 - DNA, 33 bp, Homo sapien
aagaaatgtttcccaattgtttttgtgacttct

SEQ ID NO: 432797 - DNA, 33 bp, Homo sapien
gttgtgttgtttctgaacgacttagctctcttc

SEQ ID NO: 432798 - DNA, 33 bp, Homo sapien
gttgtgttgtttctgaccgacttagctctcttc

SEQ ID NO: 432799 - DNA, 33 bp, Homo sapien
cttatatgttggaacgaatggaagaggagatca

SEQ ID NO: 432800 - DNA, 33 bp, Homo sapien
cttatatgttggaacgtatggaagaggagatca

SEQ ID NO: 432801 - DNA, 33 bp, Homo sapien
gaaataatttgacttacacagttagcactcagc

SEQ ID NO: 432802 - DNA, 33 bp, Homo sapien
gaaataatttgacttatacagttagcactcagc

SEQ ID NO: 432803 - DNA, 33 bp, Homo sapien
acacatattcgaaagaaccattacttaccaagt

SEQ ID NO: 432804 - DNA, 33 bp, Homo sapien
acacatattcgaaagagccattacttaccaagt

SEQ ID NO: 432805 - DNA, 33 bp, Homo sapien
ctgatttatttccctaccattcatcttgtttat

SEQ ID NO: 432806 - DNA, 33 bp, Homo sapien
ctgatttatttccctagcattcatcttgtttat

SEQ ID NO: 432807 - DNA, 33 bp, Homo sapien
cttaacctctgctgaaataataaagtaaactca

SEQ ID NO: 432808 - DNA, 33 bp, Homo sapien
cttaacctctgctgaactaataaagtaaactca

SEQ ID NO: 432809 - DNA, 33 bp, Homo sapien
ttgtctcaaaactcaaacacttccatcactccc

SEQ ID NO: 432810 - DNA, 33 bp, Homo sapien
ttgtctcaaaactcaagcacttccatcactccc

SEQ ID NO: 432811 - DNA, 33 bp, Homo sapien
gaaccatctgcaaaaccgtagagagctgctcca

SEQ ID NO: 432812 - DNA, 33 bp, Homo sapien
gaaccatctgcaaaactgtagagagctgctcca

SEQ ID NO: 432813 - DNA, 33 bp, Homo sapien
tggtttggacatcttaagtttctatccaaggct

SEQ ID NO: 432814 - DNA, 33 bp, Homo sapien
tggtttggacatcttaggtttctatccaaggct

SEQ ID NO: 432815 - DNA, 33 bp, Homo sapien
tctaaaattttggccacaggaatatgaatatca

SEQ ID NO: 432816 - DNA, 33 bp, Homo sapien
tctaaaattttggccataggaatatgaatatca

SEQ ID NO: 432817 - DNA, 33 bp, Homo sapien
tatagggaaaaaaatcacagaaagagtcatggc

SEQ ID NO: 432818 - DNA, 33 bp, Homo sapien
tatagggaaaaaaatcgcagaaagagtcatggc

SEQ ID NO: 432819 - DNA, 33 bp, Homo sapien
atttgaaaaatttaaaagtctataggcatttta

SEQ ID NO: 432820 - DNA, 33 bp, Homo sapien
atttgaaaaatttaaaggtctataggcatttta

SEQ ID NO: 432821 - DNA, 33 bp, Homo sapien
aacagactttgtatgacctcttttgcatattgg

SEQ ID NO: 432822 - DNA, 33 bp, Homo sapien
aacagactttgtatgatctcttttgcatattgg

SEQ ID NO: 432823 - DNA, 33 bp, Homo sapien
tacaatataaagtccaaactcctgaattggcca

SEQ ID NO: 432824 - DNA, 33 bp, Homo sapien
tacaatataaagtccagactcctgaattggcca

SEQ ID NO: 432825 - DNA, 33 bp, Homo sapien
gaaatggttctgatcaactaaaccaatatattg

SEQ ID NO: 432826 - DNA, 33 bp, Homo sapien
gaaatggttctgatcatctaaaccaatatattg

SEQ ID NO: 432827 - DNA, 33 bp, Homo sapien
aaagtgaagtgttcacagaaacaaagaataggg

SEQ ID NO: 432828 - DNA, 33 bp, Homo sapien
aaagtgaagtgttcacggaaacaaagaataggg

SEQ ID NO: 432829 - DNA, 33 bp, Homo sapien
agcaagaaccaggaaacgcactagatcagagga

SEQ ID NO: 432830 - DNA, 33 bp, Homo sapien
agcaagaaccaggaaatgcactagatcagagga

SEQ ID NO: 432831 - DNA, 33 bp, Homo sapien
ccaccctgtctagcaccgattaatggcactgat

SEQ ID NO: 432832 - DNA, 33 bp, Homo sapien
ccaccctgtctagcactgattaatggcactgat

SEQ ID NO: 432833 - DNA, 33 bp, Homo sapien
ctttatggttcataaactgttatagttgtcaga

SEQ ID NO: 432834 - DNA, 33 bp, Homo sapien
ctttatggttcataaagtgttatagttgtcaga

SEQ ID NO: 432835 - DNA, 33 bp, Homo sapien
catacccagaagagaaaaaaattatggtaggac

SEQ ID NO: 432836 - DNA, 33 bp, Homo sapien
catacccagaagagaagaaaattatggtaggac

SEQ ID NO: 432837 - DNA, 33 bp, Homo sapien
tgacacaccatatacaacattggaaacattatt

SEQ ID NO: 432838 - DNA, 33 bp, Homo sapien
tgacacaccatatacagcattggaaacattatt

SEQ ID NO: 432839 - DNA, 33 bp, Homo sapien
attcttccaatttcaacggagcaatgagtatca

SEQ ID NO: 432840 - DNA, 33 bp, Homo sapien
attcttccaatttcaatggagcaatgagtatca

SEQ ID NO: 432841 - DNA, 33 bp, Homo sapien
taagaaaagcaacagcagattactatggagcat

SEQ ID NO: 432842 - DNA, 33 bp, Homo sapien
taagaaaagcaacagcggattactatggagcat

SEQ ID NO: 432843 - DNA, 33 bp, Homo sapien
aaggctgtgtgttctccgaattctgttaagcac

SEQ ID NO: 432844 - DNA, 33 bp, Homo sapien
aaggctgtgtgttctctgaattctgttaagcac

SEQ ID NO: 432845 - DNA, 33 bp, Homo sapien
gtttagcaaaaggccaatattactcacctggca

SEQ ID NO: 432846 - DNA, 33 bp, Homo sapien
gtttagcaaaaggccagtattactcacctggca

SEQ ID NO: 432847 - DNA, 33 bp, Homo sapien
actggtgtctagtggacagaggttatggatgat

SEQ ID NO: 432848 - DNA, 33 bp, Homo sapien
actggtgtctagtggatagaggttatggatgat

SEQ ID NO: 432849 - DNA, 33 bp, Homo sapien
gcaacttcaagagacaatgtattatcagctatg

SEQ ID NO: 432850 - DNA, 33 bp, Homo sapien
gcaacttcaagagacagtgtattatcagctatg

SEQ ID NO: 432851 - DNA, 33 bp, Homo sapien
ccaaagcaagggatcacgaagcaggcctcccac

SEQ ID NO: 432852 - DNA, 33 bp, Homo sapien
ccaaagcaagggatcatgaagcaggcctcccac

SEQ ID NO: 432853 - DNA, 33 bp, Homo sapien
gagttccattttgtgccaggacagttctgccaa

SEQ ID NO: 432854 - DNA, 33 bp, Homo sapien
gagttccattttgtgctaggacagttctgccaa

SEQ ID NO: 432855 - DNA, 33 bp, Homo sapien
aatatatacgacttacaaaaatgtatttcttac

SEQ ID NO: 432856 - DNA, 33 bp, Homo sapien
aatatatacgacttacgaaaatgtatttcttac

SEQ ID NO: 432857 - DNA, 33 bp, Homo sapien
ttgggcaagcaaccaacaacagaagcatcaggc

SEQ ID NO: 432858 - DNA, 33 bp, Homo sapien
ttgggcaagcaaccaagaacagaagcatcaggc

SEQ ID NO: 432859 - DNA, 33 bp, Homo sapien
atgttttgcaaggatccatattatctttaaagc

SEQ ID NO: 432860 - DNA, 33 bp, Homo sapien
atgttttgcaaggatctatattatctttaaagc

SEQ ID NO: 432861 - DNA, 33 bp, Homo sapien
taattcaggaagagtccacagtgaaaagcaaaa

SEQ ID NO: 432862 - DNA, 33 bp, Homo sapien
taattcaggaagagtctacagtgaaaagcaaaa

SEQ ID NO: 432863 - DNA, 33 bp, Homo sapien
cttgtatactaaaaacaagtgaaaagacacatc

SEQ ID NO: 432864 - DNA, 33 bp, Homo sapien
cttgtatactaaaaaccagtgaaaagacacatc

SEQ ID NO: 432865 - DNA, 33 bp, Homo sapien
ccttgaagattacctaaaagtgtgctacttatc

SEQ ID NO: 432866 - DNA, 33 bp, Homo sapien
ccttgaagattacctagaagtgtgctacttatc

SEQ ID NO: 432867 - DNA, 33 bp, Homo sapien
aatatagagcacgataagtatcattatgtggaa

SEQ ID NO: 432868 - DNA, 33 bp, Homo sapien
aatatagagcacgataggtatcattatgtggaa

SEQ ID NO: 432869 - DNA, 33 bp, Homo sapien
tggccagctacgttcaaagttcctggctccctt

SEQ ID NO: 432870 - DNA, 33 bp, Homo sapien
tggccagctacgttcagagttcctggctccctt

SEQ ID NO: 432871 - DNA, 33 bp, Homo sapien
gccccaatgacggtgactaaaagtatatccttt

SEQ ID NO: 432872 - DNA, 33 bp, Homo sapien
gccccaatgacggtgattaaaagtatatccttt

SEQ ID NO: 432873 - DNA, 33 bp, Homo sapien
tcacagcagtcccttacgatttctgaccaaaca

SEQ ID NO: 432874 - DNA, 33 bp, Homo sapien
tcacagcagtcccttatgatttctgaccaaaca

SEQ ID NO: 432875 - DNA, 33 bp, Homo sapien
tggtggcccttctctcactttagattccaagtt

SEQ ID NO: 432876 - DNA, 33 bp, Homo sapien
tggtggcccttctctcgctttagattccaagtt

SEQ ID NO: 432877 - DNA, 33 bp, Homo sapien
ctatcgtttactgacaatacaaatcctgaataa

SEQ ID NO: 432878 - DNA, 33 bp, Homo sapien
ctatcgtttactgacattacaaatcctgaataa

SEQ ID NO: 432879 - DNA, 33 bp, Homo sapien
ttttaaccctaagaccgatgcagttttctgatc

SEQ ID NO: 432880 - DNA, 33 bp, Homo sapien
ttttaaccctaagacctatgcagttttctgatc

SEQ ID NO: 432881 - DNA, 33 bp, Homo sapien
ggaggtttaaaaaggcacaagtcactacacata

SEQ ID NO: 432882 - DNA, 33 bp, Homo sapien
ggaggtttaaaaaggcgcaagtcactacacata

SEQ ID NO: 432883 - DNA, 33 bp, Homo sapien
ggtgaaaatttggaaaaatatgcctttgaagta

SEQ ID NO: 432884 - DNA, 33 bp, Homo sapien
ggtgaaaatttggaaagatatgcctttgaagta

SEQ ID NO: 432885 - DNA, 33 bp, Homo sapien
tccacagttacatctcgagtttatcatgtgttc

SEQ ID NO: 432886 - DNA, 33 bp, Homo sapien
tccacagttacatctctagtttatcatgtgttc

SEQ ID NO: 432887 - DNA, 33 bp, Homo sapien
tttctaagcaatgaagacagaacaaatttgagt

SEQ ID NO: 432888 - DNA, 33 bp, Homo sapien
tttctaagcaatgaaggcagaacaaatttgagt

SEQ ID NO: 432889 - DNA, 33 bp, Homo sapien
ctataattttgtaggacgcatagttggccaata

SEQ ID NO: 432890 - DNA, 33 bp, Homo sapien
ctataattttgtaggatgcatagttggccaata

SEQ ID NO: 432891 - DNA, 33 bp, Homo sapien
tcactgttggtgggaaagtaggttgattccatg

SEQ ID NO: 432892 - DNA, 33 bp, Homo sapien
tcactgttggtgggaacgtaggttgattccatg

SEQ ID NO: 432893 - DNA, 33 bp, Homo sapien
tttagagaacattctcacaattctcaaaagctt

SEQ ID NO: 432894 - DNA, 33 bp, Homo sapien
tttagagaacattctcccaattctcaaaagctt

SEQ ID NO: 432895 - DNA, 33 bp, Homo sapien
tgtgtgtgtgttttccgctggcctgctccctcc

SEQ ID NO: 432896 - DNA, 33 bp, Homo sapien
tgtgtgtgtgttttcctctggcctgctccctcc

SEQ ID NO: 432897 - DNA, 33 bp, Homo sapien
caaatgagcaggcttgcaaaaatctctgcctgg

SEQ ID NO: 432898 - DNA, 33 bp, Homo sapien
caaatgagcaggcttggaaaaatctctgcctgg

SEQ ID NO: 432899 - DNA, 33 bp, Homo sapien
tgatagttgcctaataacttcctgtaaaaactc

SEQ ID NO: 432900 - DNA, 33 bp, Homo sapien
tgatagttgcctaatatcttcctgtaaaaactc

SEQ ID NO: 432901 - DNA, 33 bp, Homo sapien
aagggtcagaattagaggtagaggattattgat

SEQ ID NO: 432902 - DNA, 33 bp, Homo sapien
aagggtcagaattagatgtagaggattattgat

SEQ ID NO: 432903 - DNA, 33 bp, Homo sapien
cttaccctttgagcaaatacagtattcatactt

SEQ ID NO: 432904 - DNA, 33 bp, Homo sapien
cttaccctttgagcaagtacagtattcatactt

SEQ ID NO: 432905 - DNA, 33 bp, Homo sapien
tatattcaatccattcaaatttaacaaatatta

SEQ ID NO: 432906 - DNA, 33 bp, Homo sapien
tatattcaatccattctaatttaacaaatatta

SEQ ID NO: 432907 - DNA, 33 bp, Homo sapien
atcttctgaatttcaacagtactaaaaatattt

SEQ ID NO: 432908 - DNA, 33 bp, Homo sapien
atcttctgaatttcaagagtactaaaaatattt

SEQ ID NO: 432909 - DNA, 33 bp, Homo sapien
tgtctctgtctctcaactagataattcctactg

SEQ ID NO: 432910 - DNA, 33 bp, Homo sapien
tgtctctgtctctcaattagataattcctactg

SEQ ID NO: 432911 - DNA, 33 bp, Homo sapien
ctactgttcccactaccctactcaattcctccc

SEQ ID NO: 432912 - DNA, 33 bp, Homo sapien
ctactgttcccactactctactcaattcctccc

SEQ ID NO: 432913 - DNA, 33 bp, Homo sapien
tcttttcctcaataaacctcaagtctgtcacct

SEQ ID NO: 432914 - DNA, 33 bp, Homo sapien
tcttttcctcaataaatctcaagtctgtcacct

SEQ ID NO: 432915 - DNA, 33 bp, Homo sapien
agaaagctagggtaaaaggagttcttacatttc

SEQ ID NO: 432916 - DNA, 33 bp, Homo sapien
agaaagctagggtaaagggagttcttacatttc

SEQ ID NO: 432917 - DNA, 33 bp, Homo sapien
ttgacactggctttgagtaggctcttaataaat

SEQ ID NO: 432918 - DNA, 33 bp, Homo sapien
ttgacactggctttgattaggctcttaataaat

SEQ ID NO: 432919 - DNA, 33 bp, Homo sapien
taatacaactcacagaagctttactccaaatga

SEQ ID NO: 432920 - DNA, 33 bp, Homo sapien
taatacaactcacagacgctttactccaaatga

SEQ ID NO: 432921 - DNA, 33 bp, Homo sapien
aggcttactctcttaacaggggtgtatgtaatg

SEQ ID NO: 432922 - DNA, 33 bp, Homo sapien
aggcttactctcttaataggggtgtatgtaatg

SEQ ID NO: 432923 - DNA, 33 bp, Homo sapien
tcaaggctttgttttcgcatctatgtagcacaa

SEQ ID NO: 432924 - DNA, 33 bp, Homo sapien
tcaaggctttgttttctcatctatgtagcacaa

SEQ ID NO: 432925 - DNA, 33 bp, Homo sapien
gactcctaacataacaaccatctgcagccatag

SEQ ID NO: 432926 - DNA, 33 bp, Homo sapien
gactcctaacataacacccatctgcagccatag

SEQ ID NO: 432927 - DNA, 33 bp, Homo sapien
accctgatgaatcagcaactgtcaacactgagc

SEQ ID NO: 432928 - DNA, 33 bp, Homo sapien
accctgatgaatcagcgactgtcaacactgagc

SEQ ID NO: 432929 - DNA, 33 bp, Homo sapien
ggttccaatttctggaaaagctgtgacttctta

SEQ ID NO: 432930 - DNA, 33 bp, Homo sapien
ggttccaatttctggagaagctgtgacttctta

SEQ ID NO: 432931 - DNA, 33 bp, Homo sapien
aagacatttatgtggccgacaaatatattaaaa

SEQ ID NO: 432932 - DNA, 33 bp, Homo sapien
aagacatttatgtggctgacaaatatattaaaa

SEQ ID NO: 432933 - DNA, 33 bp, Homo sapien
caaaataaaatacacaatccttgatcctgattc

SEQ ID NO: 432934 - DNA, 33 bp, Homo sapien
caaaataaaatacacagtccttgatcctgattc

SEQ ID NO: 432935 - DNA, 33 bp, Homo sapien
tcacttctagatgtggccaggcattcataagta

SEQ ID NO: 432936 - DNA, 33 bp, Homo sapien
tcacttctagatgtggtcaggcattcataagta

SEQ ID NO: 432937 - DNA, 33 bp, Homo sapien
tgctctcctacataaccgttacttatgcttcat

SEQ ID NO: 432938 - DNA, 33 bp, Homo sapien
tgctctcctacataactgttacttatgcttcat

SEQ ID NO: 432939 - DNA, 33 bp, Homo sapien
tatgtcatctgagtgcaaatttctgattgcaat

SEQ ID NO: 432940 - DNA, 33 bp, Homo sapien
tatgtcatctgagtgcgaatttctgattgcaat

SEQ ID NO: 432941 - DNA, 33 bp, Homo sapien
aatgggacaatggcccaaacccaagatccattc

SEQ ID NO: 432942 - DNA, 33 bp, Homo sapien
aatgggacaatggccccaacccaagatccattc

SEQ ID NO: 432943 - DNA, 33 bp, Homo sapien
gaacctagctaaacaacttaaggcggtgacttg

SEQ ID NO: 432944 - DNA, 33 bp, Homo sapien
gaacctagctaaacaatttaaggcggtgacttg

SEQ ID NO: 432945 - DNA, 33 bp, Homo sapien
acaaagtggaacaaataatacgtctgttctagg

SEQ ID NO: 432946 - DNA, 33 bp, Homo sapien
acaaagtggaacaaatgatacgtctgttctagg

SEQ ID NO: 432947 - DNA, 33 bp, Homo sapien
atccaaagaatgctgaataatacagaaggtaat

SEQ ID NO: 432948 - DNA, 33 bp, Homo sapien
atccaaagaatgctgagtaatacagaaggtaat

SEQ ID NO: 432949 - DNA, 33 bp, Homo sapien
agttcatattagaaaacagtggcaattaacaca

SEQ ID NO: 432950 - DNA, 33 bp, Homo sapien
agttcatattagaaaagagtggcaattaacaca

SEQ ID NO: 432951 - DNA, 33 bp, Homo sapien
tcattccctgacaaagactcttggattcatgct

SEQ ID NO: 432952 - DNA, 33 bp, Homo sapien
tcattccctgacaaagtctcttggattcatgct

SEQ ID NO: 432953 - DNA, 33 bp, Homo sapien
ttaagcatgagaccaagtgcattaatctaaaga

SEQ ID NO: 432954 - DNA, 33 bp, Homo sapien
ttaagcatgagaccaattgcattaatctaaaga

SEQ ID NO: 432955 - DNA, 33 bp, Homo sapien
tcaattattttgtgaacagttcttaagccagga

SEQ ID NO: 432956 - DNA, 33 bp, Homo sapien
tcaattattttgtgaatagttcttaagccagga

SEQ ID NO: 432957 - DNA, 33 bp, Homo sapien
aagaaatattagagacaaatcctatgccttgtg

SEQ ID NO: 432958 - DNA, 33 bp, Homo sapien
aagaaatattagagactaatcctatgccttgtg

SEQ ID NO: 432959 - DNA, 33 bp, Homo sapien
taaaagaaaggctatacgtgactacacagtaaa

SEQ ID NO: 432960 - DNA, 33 bp, Homo sapien
taaaagaaaggctatatgtgactacacagtaaa

SEQ ID NO: 432961 - DNA, 33 bp, Homo sapien
ggaaaaactttcggaaaatgtctatgtaagtca

SEQ ID NO: 432962 - DNA, 33 bp, Homo sapien
ggaaaaactttcggaagatgtctatgtaagtca

SEQ ID NO: 432963 - DNA, 33 bp, Homo sapien
taaatattcataagcaaagcctctattatataa

SEQ ID NO: 432964 - DNA, 33 bp, Homo sapien
taaatattcataagcagagcctctattatataa

SEQ ID NO: 432965 - DNA, 33 bp, Homo sapien
tggctctcctaaaagcagcaggtaaatgggatt

SEQ ID NO: 432966 - DNA, 33 bp, Homo sapien
tggctctcctaaaagccgcaggtaaatgggatt

SEQ ID NO: 432967 - DNA, 33 bp, Homo sapien
tgattccatgtataggacataacttgaagtagt

SEQ ID NO: 432968 - DNA, 33 bp, Homo sapien
tgattccatgtataggtcataacttgaagtagt

SEQ ID NO: 432969 - DNA, 33 bp, Homo sapien
cagtttcacgtggctaagaggaggaggcaataa

SEQ ID NO: 432970 - DNA, 33 bp, Homo sapien
cagtttcacgtggctaggaggaggaggcaataa

SEQ ID NO: 432971 - DNA, 33 bp, Homo sapien
ttgcactccttgcggcaaaagtacactctgtct

SEQ ID NO: 432972 - DNA, 33 bp, Homo sapien
ttgcactccttgcggcgaaagtacactctgtct

SEQ ID NO: 432973 - DNA, 33 bp, Homo sapien
ccatcagatttcaacaacaagactgagtcatct

SEQ ID NO: 432974 - DNA, 33 bp, Homo sapien
ccatcagatttcaacagcaagactgagtcatct

SEQ ID NO: 432975 - DNA, 33 bp, Homo sapien
gttccatgaatggagccatttttccaaaactga

SEQ ID NO: 432976 - DNA, 33 bp, Homo sapien
gttccatgaatggagctatttttccaaaactga

SEQ ID NO: 432977 - DNA, 33 bp, Homo sapien
agggtggataaactggaataattacaacctcat

SEQ ID NO: 432978 - DNA, 33 bp, Homo sapien
agggtggataaactgggataattacaacctcat

SEQ ID NO: 432979 - DNA, 33 bp, Homo sapien
tgaggtagcctacatgaacagatgatagggtgt

SEQ ID NO: 432980 - DNA, 33 bp, Homo sapien
tgaggtagcctacatggacagatgatagggtgt

SEQ ID NO: 432981 - DNA, 33 bp, Homo sapien
gttctaagctacaagacgagaataagcagttaa

SEQ ID NO: 432982 - DNA, 33 bp, Homo sapien
gttctaagctacaagatgagaataagcagttaa

SEQ ID NO: 432983 - DNA, 33 bp, Homo sapien
gagaagtttgatttacaagtctgtttttgaagt

SEQ ID NO: 432984 - DNA, 33 bp, Homo sapien
gagaagtttgatttacgagtctgtttttgaagt

SEQ ID NO: 432985 - DNA, 33 bp, Homo sapien
tccatttccatacctcccaggatacaaccagac

SEQ ID NO: 432986 - DNA, 33 bp, Homo sapien
tccatttccatacctctcaggatacaaccagac

SEQ ID NO: 432987 - DNA, 33 bp, Homo sapien
tcagtacaatctataacgttcccacaagaacag

SEQ ID NO: 432988 - DNA, 33 bp, Homo sapien
tcagtacaatctataatgttcccacaagaacag

SEQ ID NO: 432989 - DNA, 33 bp, Homo sapien
gcaaaatccaagtgaaataagaggaagctgatg

SEQ ID NO: 432990 - DNA, 33 bp, Homo sapien
gcaaaatccaagtgaagtaagaggaagctgatg

SEQ ID NO: 432991 - DNA, 33 bp, Homo sapien
cctattcactataaccaatagataaagcatcaa

SEQ ID NO: 432992 - DNA, 33 bp, Homo sapien
cctattcactataaccgatagataaagcatcaa

SEQ ID NO: 432993 - DNA, 33 bp, Homo sapien
attctattttttgtacgagttagacatgctaaa

SEQ ID NO: 432994 - DNA, 33 bp, Homo sapien
attctattttttgtactagttagacatgctaaa

SEQ ID NO: 432995 - DNA, 33 bp, Homo sapien
tcatcaagtttttgaaatgtgtcttgtaaaatt

SEQ ID NO: 432996 - DNA, 33 bp, Homo sapien
tcatcaagtttttgaattgtgtcttgtaaaatt

SEQ ID NO: 432997 - DNA, 33 bp, Homo sapien
aataaccccacttgtaacagaaagcagtaggtt

SEQ ID NO: 432998 - DNA, 33 bp, Homo sapien
aataaccccacttgtagcagaaagcagtaggtt

SEQ ID NO: 432999 - DNA, 33 bp, Homo sapien
tgaataagcagcctaacgctacaagaactcatg

SEQ ID NO: 433000 - DNA, 33 bp, Homo sapien
tgaataagcagcctaatgctacaagaactcatg

SEQ ID NO: 433001 - DNA, 33 bp, Homo sapien
tcctttatccaaggctcaaataaaggttagaat

SEQ ID NO: 433002 - DNA, 33 bp, Homo sapien
tcctttatccaaggctgaaataaaggttagaat

SEQ ID NO: 433003 - DNA, 33 bp, Homo sapien
gattaccagtaatttaccatgcagagaatggat

SEQ ID NO: 433004 - DNA, 33 bp, Homo sapien
gattaccagtaatttatcatgcagagaatggat

SEQ ID NO: 433005 - DNA, 33 bp, Homo sapien
gtctataccttgcccagaagacaggattttctt

SEQ ID NO: 433006 - DNA, 33 bp, Homo sapien
gtctataccttgcccataagacaggattttctt

SEQ ID NO: 433007 - DNA, 33 bp, Homo sapien
ctcccccatggtgttaagtctgcaagcacacag

SEQ ID NO: 433008 - DNA, 33 bp, Homo sapien
ctcccccatggtgttacgtctgcaagcacacag

SEQ ID NO: 433009 - DNA, 33 bp, Homo sapien
tcaagcaaaacctccacattctcagtattccca

SEQ ID NO: 433010 - DNA, 33 bp, Homo sapien
tcaagcaaaacctccagattctcagtattccca

SEQ ID NO: 433011 - DNA, 33 bp, Homo sapien
atctttggttgtaatagcatttggtatattctt

SEQ ID NO: 433012 - DNA, 33 bp, Homo sapien
atctttggttgtaatatcatttggtatattctt

SEQ ID NO: 433013 - DNA, 33 bp, Homo sapien
ttaggcaaagactttacggtaaagattttctaa

SEQ ID NO: 433014 - DNA, 33 bp, Homo sapien
ttaggcaaagactttatggtaaagattttctaa

SEQ ID NO: 433015 - DNA, 33 bp, Homo sapien
gtccttatggaggcacagaatgatgtagaaatg

SEQ ID NO: 433016 - DNA, 33 bp, Homo sapien
gtccttatggaggcacggaatgatgtagaaatg

SEQ ID NO: 433017 - DNA, 33 bp, Homo sapien
atttttagatattaacccttgatcatcggtatg

SEQ ID NO: 433018 - DNA, 33 bp, Homo sapien
atttttagatattaacgcttgatcatcggtatg

SEQ ID NO: 433019 - DNA, 33 bp, Homo sapien
tgacaaatgcaaaggcaatttgatggagaaaca

SEQ ID NO: 433020 - DNA, 33 bp, Homo sapien
tgacaaatgcaaaggcgatttgatggagaaaca

SEQ ID NO: 433021 - DNA, 33 bp, Homo sapien
aataaaatggacacacaatatgcaaaagcatat

SEQ ID NO: 433022 - DNA, 33 bp, Homo sapien
aataaaatggacacacgatatgcaaaagcatat

SEQ ID NO: 433023 - DNA, 33 bp, Homo sapien
tgttcatggtaatctcgcgtgatccttctattt

SEQ ID NO: 433024 - DNA, 33 bp, Homo sapien
tgttcatggtaatctctcgtgatccttctattt

SEQ ID NO: 433025 - DNA, 33 bp, Homo sapien
agtttttatgccagtaactgctattttgataac

SEQ ID NO: 433026 - DNA, 33 bp, Homo sapien
agtttttatgccagtagctgctattttgataac

SEQ ID NO: 433027 - DNA, 33 bp, Homo sapien
attcttcaattccatacgttgtctcttcactct

SEQ ID NO: 433028 - DNA, 33 bp, Homo sapien
attcttcaattccataggttgtctcttcactct

SEQ ID NO: 433029 - DNA, 33 bp, Homo sapien
tatttaactccctaccaagttcactgttaagaa

SEQ ID NO: 433030 - DNA, 33 bp, Homo sapien
tatttaactccctacctagttcactgttaagaa

SEQ ID NO: 433031 - DNA, 33 bp, Homo sapien
tttttggaaccctccaccattataactgtcttt

SEQ ID NO: 433032 - DNA, 33 bp, Homo sapien
tttttggaaccctccagcattataactgtcttt

SEQ ID NO: 433033 - DNA, 33 bp, Homo sapien
gatttaccaattaggcccgaacacaaaatgcta

SEQ ID NO: 433034 - DNA, 33 bp, Homo sapien
gatttaccaattaggctcgaacacaaaatgcta

SEQ ID NO: 433035 - DNA, 33 bp, Homo sapien
tgaagatcattagttcagaaagatatgaatatt

SEQ ID NO: 433036 - DNA, 33 bp, Homo sapien
tgaagatcattagttcggaaagatatgaatatt

SEQ ID NO: 433037 - DNA, 33 bp, Homo sapien
cttcctttggtcagtgcatccaaaatcaaatga

SEQ ID NO: 433038 - DNA, 33 bp, Homo sapien
cttcctttggtcagtgtatccaaaatcaaatga

SEQ ID NO: 433039 - DNA, 33 bp, Homo sapien
ctattttcagtggcataagagtggtccgtagaa

SEQ ID NO: 433040 - DNA, 33 bp, Homo sapien
ctattttcagtggcattagagtggtccgtagaa

SEQ ID NO: 433041 - DNA, 33 bp, Homo sapien
atgccaaatgagctgagtaagaaaagtttctac

SEQ ID NO: 433042 - DNA, 33 bp, Homo sapien
atgccaaatgagctgattaagaaaagtttctac

SEQ ID NO: 433043 - DNA, 33 bp, Homo sapien
aagtgaagaagaagaacattccaggaagcatta

SEQ ID NO: 433044 - DNA, 33 bp, Homo sapien
aagtgaagaagaagaatattccaggaagcatta

SEQ ID NO: 433045 - DNA, 33 bp, Homo sapien
gtccctgggtagagcaaagtagacatgcatttc

SEQ ID NO: 433046 - DNA, 33 bp, Homo sapien
gtccctgggtagagcacagtagacatgcatttc

SEQ ID NO: 433047 - DNA, 33 bp, Homo sapien
gaacaaatatggttgaacaacgtagagacaaaa

SEQ ID NO: 433048 - DNA, 33 bp, Homo sapien
gaacaaatatggttgagcaacgtagagacaaaa

SEQ ID NO: 433049 - DNA, 33 bp, Homo sapien
gagtggcagtgctatacgatgtaaggtcagagg

SEQ ID NO: 433050 - DNA, 33 bp, Homo sapien
gagtggcagtgctatatgatgtaaggtcagagg

SEQ ID NO: 433051 - DNA, 33 bp, Homo sapien
tctgattctcttgagcagaagtgagaacatgag

SEQ ID NO: 433052 - DNA, 33 bp, Homo sapien
tctgattctcttgagcggaagtgagaacatgag

SEQ ID NO: 433053 - DNA, 33 bp, Homo sapien
gacactattcccctgcacatggtcatatcttgt

SEQ ID NO: 433054 - DNA, 33 bp, Homo sapien
gacactattcccctgcgcatggtcatatcttgt

SEQ ID NO: 433055 - DNA, 33 bp, Homo sapien
ccataattgcttttggaactatttgaggcattt

SEQ ID NO: 433056 - DNA, 33 bp, Homo sapien
ccataattgcttttgggactatttgaggcattt

SEQ ID NO: 433057 - DNA, 33 bp, Homo sapien
gcatcaaaaagatgccacttcacaaaatggcaa

SEQ ID NO: 433058 - DNA, 33 bp, Homo sapien
gcatcaaaaagatgccgcttcacaaaatggcaa

SEQ ID NO: 433059 - DNA, 33 bp, Homo sapien
taacatttccaatcataagacggcattatagaa

SEQ ID NO: 433060 - DNA, 33 bp, Homo sapien
taacatttccaatcatgagacggcattatagaa

SEQ ID NO: 433061 - DNA, 33 bp, Homo sapien
gaaatgtttgtacaaagaactagatgaaagtta

SEQ ID NO: 433062 - DNA, 33 bp, Homo sapien
gaaatgtttgtacaaataactagatgaaagtta

SEQ ID NO: 433063 - DNA, 33 bp, Homo sapien
agttgatttcatctaaaatttactgaaggccaa

SEQ ID NO: 433064 - DNA, 33 bp, Homo sapien
agttgatttcatctaacatttactgaaggccaa

SEQ ID NO: 433065 - DNA, 33 bp, Homo sapien
gacagtacattgacaaacacctaaaaacaagac

SEQ ID NO: 433066 - DNA, 33 bp, Homo sapien
gacagtacattgacaatcacctaaaaacaagac

SEQ ID NO: 433067 - DNA, 33 bp, Homo sapien
cttgtgtcctatcacacattgcaacatttccac

SEQ ID NO: 433068 - DNA, 33 bp, Homo sapien
cttgtgtcctatcacatattgcaacatttccac

SEQ ID NO: 433069 - DNA, 33 bp, Homo sapien
gaaatatactctcagaagtcaaaccattctcgt

SEQ ID NO: 433070 - DNA, 33 bp, Homo sapien
gaaatatactctcagaggtcaaaccattctcgt

SEQ ID NO: 433071 - DNA, 33 bp, Homo sapien
gtatataataattgaaaaactaatctcttccaa

SEQ ID NO: 433072 - DNA, 33 bp, Homo sapien
gtatataataattgaacaactaatctcttccaa

SEQ ID NO: 433073 - DNA, 33 bp, Homo sapien
attcttgggcaattgcagagagtagaaactcta

SEQ ID NO: 433074 - DNA, 33 bp, Homo sapien
attcttgggcaattgcggagagtagaaactcta

SEQ ID NO: 433075 - DNA, 33 bp, Homo sapien
attttggtaaaacactcagcttcttgattgtgc

SEQ ID NO: 433076 - DNA, 33 bp, Homo sapien
attttggtaaaacacttagcttcttgattgtgc

SEQ ID NO: 433077 - DNA, 33 bp, Homo sapien
tcatatctagtctacacagaggactttcataac

SEQ ID NO: 433078 - DNA, 33 bp, Homo sapien
tcatatctagtctacatagaggactttcataac

SEQ ID NO: 433079 - DNA, 33 bp, Homo sapien
acattacatcagctaacggcaatttgtataatt

SEQ ID NO: 433080 - DNA, 33 bp, Homo sapien
acattacatcagctaatggcaatttgtataatt

SEQ ID NO: 433081 - DNA, 33 bp, Homo sapien
acacatcatcagataaaatcccacaccaactta

SEQ ID NO: 433082 - DNA, 33 bp, Homo sapien
acacatcatcagataagatcccacaccaactta

SEQ ID NO: 433083 - DNA, 33 bp, Homo sapien
ctaatgggacatgggacaggcatgaatgacata

SEQ ID NO: 433084 - DNA, 33 bp, Homo sapien
ctaatgggacatgggagaggcatgaatgacata

SEQ ID NO: 433085 - DNA, 33 bp, Homo sapien
ctactgccataatgtcactcctttttttccttt

SEQ ID NO: 433086 - DNA, 33 bp, Homo sapien
ctactgccataatgtctctcctttttttccttt

SEQ ID NO: 433087 - DNA, 33 bp, Homo sapien
acacagatagccaatacatgataacttcatcaa

SEQ ID NO: 433088 - DNA, 33 bp, Homo sapien
acacagatagccaatatatgataacttcatcaa

SEQ ID NO: 433089 - DNA, 33 bp, Homo sapien
taattccaaacataaaaacaaggccttaggaaa

SEQ ID NO: 433090 - DNA, 33 bp, Homo sapien
taattccaaacataaacacaaggccttaggaaa

SEQ ID NO: 433091 - DNA, 33 bp, Homo sapien
catgtcctccaaagccaagtttttatgaatata

SEQ ID NO: 433092 - DNA, 33 bp, Homo sapien
catgtcctccaaagccgagtttttatgaatata

SEQ ID NO: 433093 - DNA, 33 bp, Homo sapien
agagttatcttgagacacttataagcattataa

SEQ ID NO: 433094 - DNA, 33 bp, Homo sapien
agagttatcttgagacccttataagcattataa

SEQ ID NO: 433095 - DNA, 33 bp, Homo sapien
tacttagttgttcaaacactattgattgctact

SEQ ID NO: 433096 - DNA, 33 bp, Homo sapien
tacttagttgttcaaatactattgattgctact

SEQ ID NO: 433097 - DNA, 33 bp, Homo sapien
atcccgaccttagatcgctttgctgagctccgt

SEQ ID NO: 433098 - DNA, 33 bp, Homo sapien
atcccgaccttagatctctttgctgagctccgt

SEQ ID NO: 433099 - DNA, 33 bp, Homo sapien
gcagttgatctatgtggaacacttttggaaccg

SEQ ID NO: 433100 - DNA, 33 bp, Homo sapien
gcagttgatctatgtgtaacacttttggaaccg

SEQ ID NO: 433101 - DNA, 33 bp, Homo sapien
ttaatggtcttgactgcagttaggagttgaccc

SEQ ID NO: 433102 - DNA, 33 bp, Homo sapien
ttaatggtcttgactgtagttaggagttgaccc

SEQ ID NO: 433103 - DNA, 33 bp, Homo sapien
tcagttctacaccacaatgattttttttttaag

SEQ ID NO: 433104 - DNA, 33 bp, Homo sapien
tcagttctacaccacagtgattttttttttaag

SEQ ID NO: 433105 - DNA, 33 bp, Homo sapien
agtgctttacataacacgttcaactttccaaca

SEQ ID NO: 433106 - DNA, 33 bp, Homo sapien
agtgctttacataacatgttcaactttccaaca

SEQ ID NO: 433107 - DNA, 33 bp, Homo sapien
atttcagcataagatcacatagttgcttaaatt

SEQ ID NO: 433108 - DNA, 33 bp, Homo sapien
atttcagcataagatcgcatagttgcttaaatt

SEQ ID NO: 433109 - DNA, 33 bp, Homo sapien
cagcttcacaattgtagtaaggactagagcata

SEQ ID NO: 433110 - DNA, 33 bp, Homo sapien
cagcttcacaattgtattaaggactagagcata

SEQ ID NO: 433111 - DNA, 33 bp, Homo sapien
cagcacatgattgaaccgaattacaaactgttg

SEQ ID NO: 433112 - DNA, 33 bp, Homo sapien
cagcacatgattgaactgaattacaaactgttg

SEQ ID NO: 433113 - DNA, 33 bp, Homo sapien
catttttgctcacatacgtttctaaacttgtta

SEQ ID NO: 433114 - DNA, 33 bp, Homo sapien
catttttgctcacatatgtttctaaacttgtta

SEQ ID NO: 433115 - DNA, 33 bp, Homo sapien
tttcagtttagtattcacacagctggagatact

SEQ ID NO: 433116 - DNA, 33 bp, Homo sapien
tttcagtttagtattcgcacagctggagatact

SEQ ID NO: 433117 - DNA, 33 bp, Homo sapien
tctttgttcatgtttcccatgtcaatcggctag

SEQ ID NO: 433118 - DNA, 33 bp, Homo sapien
tctttgttcatgtttctcatgtcaatcggctag

SEQ ID NO: 433119 - DNA, 33 bp, Homo sapien
tctcaatgacctataaagcacccatacctggca

SEQ ID NO: 433120 - DNA, 33 bp, Homo sapien
tctcaatgacctataaggcacccatacctggca

SEQ ID NO: 433121 - DNA, 33 bp, Homo sapien
gagaagacaactgagaaacagcattatcagtga

SEQ ID NO: 433122 - DNA, 33 bp, Homo sapien
gagaagacaactgagacacagcattatcagtga

SEQ ID NO: 433123 - DNA, 33 bp, Homo sapien
aggcttcgcttgagtacgcagtctgactcaggt

SEQ ID NO: 433124 - DNA, 33 bp, Homo sapien
aggcttcgcttgagtatgcagtctgactcaggt

SEQ ID NO: 433125 - DNA, 33 bp, Homo sapien
gataggttaccaacgactacttttgacagaatt

SEQ ID NO: 433126 - DNA, 33 bp, Homo sapien
gataggttaccaacgattacttttgacagaatt

SEQ ID NO: 433127 - DNA, 33 bp, Homo sapien
tcatttacagccttctcaagcaagaaatatttg

SEQ ID NO: 433128 - DNA, 33 bp, Homo sapien
tcatttacagccttctgaagcaagaaatatttg

SEQ ID NO: 433129 - DNA, 33 bp, Homo sapien
agcataaaattatcccaacagttacagcattca

SEQ ID NO: 433130 - DNA, 33 bp, Homo sapien
agcataaaattatcccgacagttacagcattca

SEQ ID NO: 433131 - DNA, 33 bp, Homo sapien
aaacggagataaattgacaaagtgacttgacaa

SEQ ID NO: 433132 - DNA, 33 bp, Homo sapien
aaacggagataaattggcaaagtgacttgacaa

SEQ ID NO: 433133 - DNA, 33 bp, Homo sapien
atgattgtgagtttataaaagctttggatgagc

SEQ ID NO: 433134 - DNA, 33 bp, Homo sapien
atgattgtgagtttatcaaagctttggatgagc

SEQ ID NO: 433135 - DNA, 33 bp, Homo sapien
ttcctctattagcctacgaattttctatgtgga

SEQ ID NO: 433136 - DNA, 33 bp, Homo sapien
ttcctctattagcctatgaattttctatgtgga

SEQ ID NO: 433137 - DNA, 33 bp, Homo sapien
ccctggttctttcaagaattcatctggatatct

SEQ ID NO: 433138 - DNA, 33 bp, Homo sapien
ccctggttctttcaaggattcatctggatatct

SEQ ID NO: 433139 - DNA, 33 bp, Homo sapien
cagaaatcaagctatcaaaagtttctaaatcct

SEQ ID NO: 433140 - DNA, 33 bp, Homo sapien
cagaaatcaagctatccaaagtttctaaatcct

SEQ ID NO: 433141 - DNA, 33 bp, Homo sapien
aggatctcttctgtaacggctgataagtaggtg

SEQ ID NO: 433142 - DNA, 33 bp, Homo sapien
aggatctcttctgtaatggctgataagtaggtg

SEQ ID NO: 433143 - DNA, 33 bp, Homo sapien
tgtctgcatcagaacaccatctctggctgtctc

SEQ ID NO: 433144 - DNA, 33 bp, Homo sapien
tgtctgcatcagaacatcatctctggctgtctc

SEQ ID NO: 433145 - DNA, 33 bp, Homo sapien
gtctctggatgattcaatatgccttgctgaacc

SEQ ID NO: 433146 - DNA, 33 bp, Homo sapien
gtctctggatgattcagtatgccttgctgaacc

SEQ ID NO: 433147 - DNA, 33 bp, Homo sapien
gtatatgcagatactgcagcttacctctatctt

SEQ ID NO: 433148 - DNA, 33 bp, Homo sapien
gtatatgcagatactgtagcttacctctatctt

SEQ ID NO: 433149 - DNA, 33 bp, Homo sapien
aaggtatatttgcaaaactgtactgaatgttgt

SEQ ID NO: 433150 - DNA, 33 bp, Homo sapien
aaggtatatttgcaaagctgtactgaatgttgt

SEQ ID NO: 433151 - DNA, 33 bp, Homo sapien
agaagacacatcaaaaacagggtgtgattaaat

SEQ ID NO: 433152 - DNA, 33 bp, Homo sapien
agaagacacatcaaaagcagggtgtgattaaat

SEQ ID NO: 433153 - DNA, 33 bp, Homo sapien
acaaatcattttcttccacctactttttgagta

SEQ ID NO: 433154 - DNA, 33 bp, Homo sapien
acaaatcattttcttctacctactttttgagta

SEQ ID NO: 433155 - DNA, 33 bp, Homo sapien
ctgtcttcttccacaccgaatgcacaatgaatg

SEQ ID NO: 433156 - DNA, 33 bp, Homo sapien
ctgtcttcttccacactgaatgcacaatgaatg

SEQ ID NO: 433157 - DNA, 33 bp, Homo sapien
aaaaacattgaaaaccaaagtgttaagaatata

SEQ ID NO: 433158 - DNA, 33 bp, Homo sapien
aaaaacattgaaaaccgaagtgttaagaatata

SEQ ID NO: 433159 - DNA, 33 bp, Homo sapien
tcatggttcgtagatacgttaaactagaaactc

SEQ ID NO: 433160 - DNA, 33 bp, Homo sapien
tcatggttcgtagatatgttaaactagaaactc

SEQ ID NO: 433161 - DNA, 33 bp, Homo sapien
tagcatgtgcagaaagcctgaattaggaaagaa

SEQ ID NO: 433162 - DNA, 33 bp, Homo sapien
tagcatgtgcagaaaggctgaattaggaaagaa

SEQ ID NO: 433163 - DNA, 33 bp, Homo sapien
tttttcacagcttacactgaaactttggcttca

SEQ ID NO: 433164 - DNA, 33 bp, Homo sapien
tttttcacagcttacattgaaactttggcttca

SEQ ID NO: 433165 - DNA, 33 bp, Homo sapien
actgggaataaatggaactggaagagaatatat

SEQ ID NO: 433166 - DNA, 33 bp, Homo sapien
actgggaataaatggacctggaagagaatatat

SEQ ID NO: 433167 - DNA, 33 bp, Homo sapien
aaggacactgatgacccgattgagttcagtagg

SEQ ID NO: 433168 - DNA, 33 bp, Homo sapien
aaggacactgatgacctgattgagttcagtagg

SEQ ID NO: 433169 - DNA, 33 bp, Homo sapien
ctaaacaaataagccaatcttctctaagtgcaa

SEQ ID NO: 433170 - DNA, 33 bp, Homo sapien
ctaaacaaataagccagtcttctctaagtgcaa

SEQ ID NO: 433171 - DNA, 33 bp, Homo sapien
aagaaacagcaaaacaaggcacagaaaggtacc

SEQ ID NO: 433172 - DNA, 33 bp, Homo sapien
aagaaacagcaaaacagggcacagaaaggtacc

SEQ ID NO: 433173 - DNA, 33 bp, Homo sapien
atctgaatgggcattaacagcttgttttcttgt

SEQ ID NO: 433174 - DNA, 33 bp, Homo sapien
atctgaatgggcattatcagcttgttttcttgt

SEQ ID NO: 433175 - DNA, 33 bp, Homo sapien
tgctttcacttctaaaactcaatgaactagagg

SEQ ID NO: 433176 - DNA, 33 bp, Homo sapien
tgctttcacttctaaagctcaatgaactagagg

SEQ ID NO: 433177 - DNA, 33 bp, Homo sapien
ccacttgttttaaaaccagccacaatttttttt

SEQ ID NO: 433178 - DNA, 33 bp, Homo sapien
ccacttgttttaaaacgagccacaatttttttt

SEQ ID NO: 433179 - DNA, 33 bp, Homo sapien
gagcccagcttctgagacatcatggaaccagtc

SEQ ID NO: 433180 - DNA, 33 bp, Homo sapien
gagcccagcttctgaggcatcatggaaccagtc

SEQ ID NO: 433181 - DNA, 33 bp, Homo sapien
tgaaccaaagctgaacgctaaaatcctttcgga

SEQ ID NO: 433182 - DNA, 33 bp, Homo sapien
tgaaccaaagctgaactctaaaatcctttcgga

SEQ ID NO: 433183 - DNA, 33 bp, Homo sapien
tgagctgctgtaataacggacaaggagggagag

SEQ ID NO: 433184 - DNA, 33 bp, Homo sapien
tgagctgctgtaataatggacaaggagggagag

SEQ ID NO: 433185 - DNA, 33 bp, Homo sapien
aacctgagatgttttacgccactgagagaaaaa

SEQ ID NO: 433186 - DNA, 33 bp, Homo sapien
aacctgagatgttttatgccactgagagaaaaa

SEQ ID NO: 433187 - DNA, 33 bp, Homo sapien
tccttttttgaccagaagaaaatgcaggactca

SEQ ID NO: 433188 - DNA, 33 bp, Homo sapien
tccttttttgaccagaggaaaatgcaggactca

SEQ ID NO: 433189 - DNA, 33 bp, Homo sapien
acattttctagcagtgaactttaattatttaat

SEQ ID NO: 433190 - DNA, 33 bp, Homo sapien
acattttctagcagtgtactttaattatttaat

SEQ ID NO: 433191 - DNA, 33 bp, Homo sapien
taattagacttgaaaaaagcaagttaccaccaa

SEQ ID NO: 433192 - DNA, 33 bp, Homo sapien
taattagacttgaaaatagcaagttaccaccaa

SEQ ID NO: 433193 - DNA, 33 bp, Homo sapien
cacaaataggttgaaaaagagtgtggagcaagg

SEQ ID NO: 433194 - DNA, 33 bp, Homo sapien
cacaaataggttgaaatagagtgtggagcaagg

SEQ ID NO: 433195 - DNA, 33 bp, Homo sapien
attgttttttgggagaagatttctaggatataa

SEQ ID NO: 433196 - DNA, 33 bp, Homo sapien
attgttttttgggagatgatttctaggatataa

SEQ ID NO: 433197 - DNA, 33 bp, Homo sapien
atgtatgcctgtataaactgcttcataatttat

SEQ ID NO: 433198 - DNA, 33 bp, Homo sapien
atgtatgcctgtataacctgcttcataatttat

SEQ ID NO: 433199 - DNA, 33 bp, Homo sapien
atgaagcctaatttcaagtacatttctagagac

SEQ ID NO: 433200 - DNA, 33 bp, Homo sapien
atgaagcctaatttcaggtacatttctagagac

SEQ ID NO: 433201 - DNA, 33 bp, Homo sapien
agagaaatttcctgaacgctcaaattcaaaata

SEQ ID NO: 433202 - DNA, 33 bp, Homo sapien
agagaaatttcctgaatgctcaaattcaaaata

SEQ ID NO: 433203 - DNA, 33 bp, Homo sapien
gaacctatcaccattaagattcttgaaattgta

SEQ ID NO: 433204 - DNA, 33 bp, Homo sapien
gaacctatcaccattaggattcttgaaattgta

SEQ ID NO: 433205 - DNA, 33 bp, Homo sapien
aagacaagttgacaaacaagatgattccagtca

SEQ ID NO: 433206 - DNA, 33 bp, Homo sapien
aagacaagttgacaaataagatgattccagtca

SEQ ID NO: 433207 - DNA, 33 bp, Homo sapien
tgactctgctggtagacaagtgcaccagtgtag

SEQ ID NO: 433208 - DNA, 33 bp, Homo sapien
tgactctgctggtagataagtgcaccagtgtag

SEQ ID NO: 433209 - DNA, 33 bp, Homo sapien
atgattcaactcagacaagtctattcagattac

SEQ ID NO: 433210 - DNA, 33 bp, Homo sapien
atgattcaactcagacgagtctattcagattac

SEQ ID NO: 433211 - DNA, 33 bp, Homo sapien
cataaagatgtagagtcaaacttttgctgcagc

SEQ ID NO: 433212 - DNA, 33 bp, Homo sapien
cataaagatgtagagtgaaacttttgctgcagc

SEQ ID NO: 433213 - DNA, 33 bp, Homo sapien
ggctgcttctcttagacgtatcatatctgcatt

SEQ ID NO: 433214 - DNA, 33 bp, Homo sapien
ggctgcttctcttagaggtatcatatctgcatt

SEQ ID NO: 433215 - DNA, 33 bp, Homo sapien
gcctatgtcaagaatgcaaaaagatttcccaga

SEQ ID NO: 433216 - DNA, 33 bp, Homo sapien
gcctatgtcaagaatgtaaaaagatttcccaga

SEQ ID NO: 433217 - DNA, 33 bp, Homo sapien
aataacagaagatgccacttatcactgagatga

SEQ ID NO: 433218 - DNA, 33 bp, Homo sapien
aataacagaagatgccgcttatcactgagatga

SEQ ID NO: 433219 - DNA, 33 bp, Homo sapien
atgagtaccgtaattcaattgcttgcagcttta

SEQ ID NO: 433220 - DNA, 33 bp, Homo sapien
atgagtaccgtaattcgattgcttgcagcttta

SEQ ID NO: 433221 - DNA, 33 bp, Homo sapien
tcaaatgttctttcagacacccaaaaacttagc

SEQ ID NO: 433222 - DNA, 33 bp, Homo sapien
tcaaatgttctttcaggcacccaaaaacttagc

SEQ ID NO: 433223 - DNA, 33 bp, Homo sapien
taaagggtattcaaacaaagtagaaaataggtc

SEQ ID NO: 433224 - DNA, 33 bp, Homo sapien
taaagggtattcaaacgaagtagaaaataggtc

SEQ ID NO: 433225 - DNA, 33 bp, Homo sapien
gaaattccgctaagaacctcctacatgctgaat

SEQ ID NO: 433226 - DNA, 33 bp, Homo sapien
gaaattccgctaagaatctcctacatgctgaat

SEQ ID NO: 433227 - DNA, 33 bp, Homo sapien
tccaggtttccttatcactcatgaaactctttt

SEQ ID NO: 433228 - DNA, 33 bp, Homo sapien
tccaggtttccttatcgctcatgaaactctttt

SEQ ID NO: 433229 - DNA, 33 bp, Homo sapien
aaacaggatacttggacagactatgtgaatgtg

SEQ ID NO: 433230 - DNA, 33 bp, Homo sapien
aaacaggatacttggagagactatgtgaatgtg

SEQ ID NO: 433231 - DNA, 33 bp, Homo sapien
atatacagaactctgaaaaaattgtaagaagaa

SEQ ID NO: 433232 - DNA, 33 bp, Homo sapien
atatacagaactctgagaaaattgtaagaagaa

SEQ ID NO: 433233 - DNA, 33 bp, Homo sapien
catcagttgggaattacgagtcttgagttctag

SEQ ID NO: 433234 - DNA, 33 bp, Homo sapien
catcagttgggaattatgagtcttgagttctag

SEQ ID NO: 433235 - DNA, 33 bp, Homo sapien
tttttgtctacattgaacaaatcccttgaaatt

SEQ ID NO: 433236 - DNA, 33 bp, Homo sapien
tttttgtctacattgatcaaatcccttgaaatt

SEQ ID NO: 433237 - DNA, 33 bp, Homo sapien
ccatttattgataggacgtgaagtttctacttt

SEQ ID NO: 433238 - DNA, 33 bp, Homo sapien
ccatttattgataggatgtgaagtttctacttt

SEQ ID NO: 433239 - DNA, 33 bp, Homo sapien
ttgctctatacaaagaaatggagagctaggcta

SEQ ID NO: 433240 - DNA, 33 bp, Homo sapien
ttgctctatacaaagagatggagagctaggcta

SEQ ID NO: 433241 - DNA, 33 bp, Homo sapien
ggataatccagcaagaaaatgtttttgtgatct

SEQ ID NO: 433242 - DNA, 33 bp, Homo sapien
ggataatccagcaagataatgtttttgtgatct

SEQ ID NO: 433243 - DNA, 33 bp, Homo sapien
cttgaggccataacacaaaccttactgaccttg

SEQ ID NO: 433244 - DNA, 33 bp, Homo sapien
cttgaggccataacacgaaccttactgaccttg

SEQ ID NO: 433245 - DNA, 33 bp, Homo sapien
tcctaactgatatttaactacctgcctctctcc

SEQ ID NO: 433246 - DNA, 33 bp, Homo sapien
tcctaactgatatttagctacctgcctctctcc

SEQ ID NO: 433247 - DNA, 33 bp, Homo sapien
aagtattctgatttgaaaataatgccttacatt

SEQ ID NO: 433248 - DNA, 33 bp, Homo sapien
aagtattctgatttgagaataatgccttacatt

SEQ ID NO: 433249 - DNA, 33 bp, Homo sapien
acaaaggcagtgtcacacataaactacattggg

SEQ ID NO: 433250 - DNA, 33 bp, Homo sapien
acaaaggcagtgtcacgcataaactacattggg

SEQ ID NO: 433251 - DNA, 33 bp, Homo sapien
agagatagatgggtcacaatgctatttattttt

SEQ ID NO: 433252 - DNA, 33 bp, Homo sapien
agagatagatgggtcagaatgctatttattttt

SEQ ID NO: 433253 - DNA, 33 bp, Homo sapien
aaatttatgaaagaaagccatttgggggtgtga

SEQ ID NO: 433254 - DNA, 33 bp, Homo sapien
aaatttatgaaagaaatccatttgggggtgtga

SEQ ID NO: 433255 - DNA, 33 bp, Homo sapien
tggtccttaaaaatgaagaagtttgaatgagat

SEQ ID NO: 433256 - DNA, 33 bp, Homo sapien
tggtccttaaaaatgaggaagtttgaatgagat

SEQ ID NO: 433257 - DNA, 33 bp, Homo sapien
aacttttgaggtgctgaaaaagacttactgtat

SEQ ID NO: 433258 - DNA, 33 bp, Homo sapien
aacttttgaggtgctgtaaaagacttactgtat

SEQ ID NO: 433259 - DNA, 33 bp, Homo sapien
agctggaaccctcaccgcaaggctggctatagg

SEQ ID NO: 433260 - DNA, 33 bp, Homo sapien
agctggaaccctcacctcaaggctggctatagg

SEQ ID NO: 433261 - DNA, 33 bp, Homo sapien
attcaacaattactacaaacctcaataaggata

SEQ ID NO: 433262 - DNA, 33 bp, Homo sapien
attcaacaattactacgaacctcaataaggata

SEQ ID NO: 433263 - DNA, 33 bp, Homo sapien
atcagatagtgtcaaacatccagtagaaattct

SEQ ID NO: 433264 - DNA, 33 bp, Homo sapien
atcagatagtgtcaaatatccagtagaaattct

SEQ ID NO: 433265 - DNA, 33 bp, Homo sapien
aatatgagatgaattacagtgcaccttgccggg

SEQ ID NO: 433266 - DNA, 33 bp, Homo sapien
aatatgagatgaattagagtgcaccttgccggg

SEQ ID NO: 433267 - DNA, 33 bp, Homo sapien
gcaactgcacacaaatgaatcaatgcacaaaac

SEQ ID NO: 433268 - DNA, 33 bp, Homo sapien
gcaactgcacacaaattaatcaatgcacaaaac

SEQ ID NO: 433269 - DNA, 33 bp, Homo sapien
atttctggttcatgcaccctctgttttgtgcat

SEQ ID NO: 433270 - DNA, 33 bp, Homo sapien
atttctggttcatgcatcctctgttttgtgcat

SEQ ID NO: 433271 - DNA, 33 bp, Homo sapien
caaggttgcacacccaaaaatgaggttcatccc

SEQ ID NO: 433272 - DNA, 33 bp, Homo sapien
caaggttgcacacccagaaatgaggttcatccc

SEQ ID NO: 433273 - DNA, 33 bp, Homo sapien
tccggcagaagaaccacgtactctgttgttttc

SEQ ID NO: 433274 - DNA, 33 bp, Homo sapien
tccggcagaagaaccatgtactctgttgttttc

SEQ ID NO: 433275 - DNA, 33 bp, Homo sapien
gaccaagttgacatatcagtgtttgttacggac

SEQ ID NO: 433276 - DNA, 33 bp, Homo sapien
gaccaagttgacatattagtgtttgttacggac

SEQ ID NO: 433277 - DNA, 33 bp, Homo sapien
tggccacttctacagaggaattttcttgcagga

SEQ ID NO: 433278 - DNA, 33 bp, Homo sapien
tggccacttctacagatgaattttcttgcagga

SEQ ID NO: 433279 - DNA, 33 bp, Homo sapien
ctttaagaggcattccaatgagtacaagttctg

SEQ ID NO: 433280 - DNA, 33 bp, Homo sapien
ctttaagaggcattcctatgagtacaagttctg

SEQ ID NO: 433281 - DNA, 33 bp, Homo sapien
tggtacattgaaggacagaaagatggtgagata

SEQ ID NO: 433282 - DNA, 33 bp, Homo sapien
tggtacattgaaggacggaaagatggtgagata

SEQ ID NO: 433283 - DNA, 33 bp, Homo sapien
aaaatgtgaaattagacgcctggaatataccag

SEQ ID NO: 433284 - DNA, 33 bp, Homo sapien
aaaatgtgaaattagatgcctggaatataccag

SEQ ID NO: 433285 - DNA, 33 bp, Homo sapien
agttcaaaccttatgaaagctacctgttcccca

SEQ ID NO: 433286 - DNA, 33 bp, Homo sapien
agttcaaaccttatgagagctacctgttcccca

SEQ ID NO: 433287 - DNA, 33 bp, Homo sapien
tgtgtttaaatggggacgactgacagtagccaa

SEQ ID NO: 433288 - DNA, 33 bp, Homo sapien
tgtgtttaaatggggatgactgacagtagccaa

SEQ ID NO: 433289 - DNA, 33 bp, Homo sapien
gtaatgatttttggtacaggttccactagagta

SEQ ID NO: 433290 - DNA, 33 bp, Homo sapien
gtaatgatttttggtataggttccactagagta

SEQ ID NO: 433291 - DNA, 33 bp, Homo sapien
gttgcacccatgataaagcaagaggatggagag

SEQ ID NO: 433292 - DNA, 33 bp, Homo sapien
gttgcacccatgataaggcaagaggatggagag

SEQ ID NO: 433293 - DNA, 33 bp, Homo sapien
ttagagcagtattttcccaagtgtgaaatgcta

SEQ ID NO: 433294 - DNA, 33 bp, Homo sapien
ttagagcagtattttctcaagtgtgaaatgcta

SEQ ID NO: 433295 - DNA, 33 bp, Homo sapien
cgtgccacacagtacaagtttgctttctcagct

SEQ ID NO: 433296 - DNA, 33 bp, Homo sapien
cgtgccacacagtacaggtttgctttctcagct

SEQ ID NO: 433297 - DNA, 33 bp, Homo sapien
atagttcctgttctcaagcctctaattcaacaa

SEQ ID NO: 433298 - DNA, 33 bp, Homo sapien
atagttcctgttctcaggcctctaattcaacaa

SEQ ID NO: 433299 - DNA, 33 bp, Homo sapien
gctgtccttactattacgtatttagtcttatct

SEQ ID NO: 433300 - DNA, 33 bp, Homo sapien
gctgtccttactattatgtatttagtcttatct

SEQ ID NO: 433301 - DNA, 33 bp, Homo sapien
aatcggccttgtgtacaacacttggtctcattg

SEQ ID NO: 433302 - DNA, 33 bp, Homo sapien
aatcggccttgtgtaccacacttggtctcattg

SEQ ID NO: 433303 - DNA, 33 bp, Homo sapien
cactcagcagcgaaaacgaccctcttcctgtgt

SEQ ID NO: 433304 - DNA, 33 bp, Homo sapien
cactcagcagcgaaaatgaccctcttcctgtgt

SEQ ID NO: 433305 - DNA, 33 bp, Homo sapien
acaaaacttaaaatcaaaatctcttcagaatat

SEQ ID NO: 433306 - DNA, 33 bp, Homo sapien
acaaaacttaaaatcataatctcttcagaatat

SEQ ID NO: 433307 - DNA, 33 bp, Homo sapien
gcagatactttgaaaacggatagctatattggc

SEQ ID NO: 433308 - DNA, 33 bp, Homo sapien
gcagatactttgaaaatggatagctatattggc

SEQ ID NO: 433309 - DNA, 33 bp, Homo sapien
gggagactaacacctacggaagatgaaacaaaa

SEQ ID NO: 433310 - DNA, 33 bp, Homo sapien
gggagactaacacctatggaagatgaaacaaaa

SEQ ID NO: 433311 - DNA, 33 bp, Homo sapien
gtgaggcatgtttgcactgaaagccagggttgc

SEQ ID NO: 433312 - DNA, 33 bp, Homo sapien
gtgaggcatgtttgcattgaaagccagggttgc

SEQ ID NO: 433313 - DNA, 33 bp, Homo sapien
caagtgatttgaccagacaaaacttaatatgaa

SEQ ID NO: 433314 - DNA, 33 bp, Homo sapien
caagtgatttgaccaggcaaaacttaatatgaa

SEQ ID NO: 433315 - DNA, 33 bp, Homo sapien
taaggaggggaggtacaactgatacgactgaag

SEQ ID NO: 433316 - DNA, 33 bp, Homo sapien
taaggaggggaggtacgactgatacgactgaag

SEQ ID NO: 433317 - DNA, 33 bp, Homo sapien
ctgtttctcagctccaagcctgtgtatgagttg

SEQ ID NO: 433318 - DNA, 33 bp, Homo sapien
ctgtttctcagctccaggcctgtgtatgagttg

SEQ ID NO: 433319 - DNA, 33 bp, Homo sapien
tgtttctattcaaagaagcttgaaccatggtgg

SEQ ID NO: 433320 - DNA, 33 bp, Homo sapien
tgtttctattcaaagaggcttgaaccatggtgg

SEQ ID NO: 433321 - DNA, 33 bp, Homo sapien
atggcattagagaggggagaagtgcagaaatta

SEQ ID NO: 433322 - DNA, 33 bp, Homo sapien
atggcattagagagggtagaagtgcagaaatta

SEQ ID NO: 433323 - DNA, 33 bp, Homo sapien
acttttcttagtatacgcattgccaaagtggga

SEQ ID NO: 433324 - DNA, 33 bp, Homo sapien
acttttcttagtatactcattgccaaagtggga

SEQ ID NO: 433325 - DNA, 33 bp, Homo sapien
cactatttagaaggataacctgactcacatgaa

SEQ ID NO: 433326 - DNA, 33 bp, Homo sapien
cactatttagaaggattacctgactcacatgaa

SEQ ID NO: 433327 - DNA, 33 bp, Homo sapien
agattagtggagaaacaaaaagtggagatgaaa

SEQ ID NO: 433328 - DNA, 33 bp, Homo sapien
agattagtggagaaacgaaaagtggagatgaaa

SEQ ID NO: 433329 - DNA, 33 bp, Homo sapien
aaaaattaagcctaaaataagtgtgatgcatat

SEQ ID NO: 433330 - DNA, 33 bp, Homo sapien
aaaaattaagcctaaagtaagtgtgatgcatat

SEQ ID NO: 433331 - DNA, 33 bp, Homo sapien
atagtgacaaatatacacaagaactatcaggga

SEQ ID NO: 433332 - DNA, 33 bp, Homo sapien
atagtgacaaatatactcaagaactatcaggga

SEQ ID NO: 433333 - DNA, 33 bp, Homo sapien
gaaggagtagaattcaataagtgtttcttttat

SEQ ID NO: 433334 - DNA, 33 bp, Homo sapien
gaaggagtagaattcactaagtgtttcttttat

SEQ ID NO: 433335 - DNA, 33 bp, Homo sapien
atagaagccaagattacaactgtggtgtcagaa

SEQ ID NO: 433336 - DNA, 33 bp, Homo sapien
atagaagccaagattagaactgtggtgtcagaa

SEQ ID NO: 433337 - DNA, 33 bp, Homo sapien
tagtatgagaacagaaactatcccaggcatggc

SEQ ID NO: 433338 - DNA, 33 bp, Homo sapien
tagtatgagaacagaagctatcccaggcatggc

SEQ ID NO: 433339 - DNA, 33 bp, Homo sapien
ttcattactctctcaacccctgaagttacagac

SEQ ID NO: 433340 - DNA, 33 bp, Homo sapien
ttcattactctctcaatccctgaagttacagac

SEQ ID NO: 433341 - DNA, 33 bp, Homo sapien
tatctgagcctctgtacgtgatgtttctctgcc

SEQ ID NO: 433342 - DNA, 33 bp, Homo sapien
tatctgagcctctgtatgtgatgtttctctgcc

SEQ ID NO: 433343 - DNA, 33 bp, Homo sapien
cttctccctgtaaggacgcagctacttactcac

SEQ ID NO: 433344 - DNA, 33 bp, Homo sapien
cttctccctgtaaggatgcagctacttactcac

SEQ ID NO: 433345 - DNA, 33 bp, Homo sapien
agaattaaagggaatgaactaatttgctctagc

SEQ ID NO: 433346 - DNA, 33 bp, Homo sapien
agaattaaagggaatggactaatttgctctagc

SEQ ID NO: 433347 - DNA, 33 bp, Homo sapien
atcagtaacttttgagcctagtacatttcttac

SEQ ID NO: 433348 - DNA, 33 bp, Homo sapien
atcagtaacttttgagtctagtacatttcttac

SEQ ID NO: 433349 - DNA, 33 bp, Homo sapien
tatctatgtctttggaaaactttgaaaagggct

SEQ ID NO: 433350 - DNA, 33 bp, Homo sapien
tatctatgtctttggagaactttgaaaagggct

SEQ ID NO: 433351 - DNA, 33 bp, Homo sapien
tcattgagttaatttccattacagcattgtcaa

SEQ ID NO: 433352 - DNA, 33 bp, Homo sapien
tcattgagttaatttctattacagcattgtcaa

SEQ ID NO: 433353 - DNA, 33 bp, Homo sapien
tgaagtttgttttgcaataattctctacacgtt

SEQ ID NO: 433354 - DNA, 33 bp, Homo sapien
tgaagtttgttttgcagtaattctctacacgtt

SEQ ID NO: 433355 - DNA, 33 bp, Homo sapien
gtttcaaatttaactccactgtgttgtctatat

SEQ ID NO: 433356 - DNA, 33 bp, Homo sapien
gtttcaaatttaactctactgtgttgtctatat

SEQ ID NO: 433357 - DNA, 33 bp, Homo sapien
taggtgccatagacatgatgctgaatcatagac

SEQ ID NO: 433358 - DNA, 33 bp, Homo sapien
taggtgccatagacattatgctgaatcatagac

SEQ ID NO: 433359 - DNA, 33 bp, Homo sapien
gcatctttgtagaatacacattgttgatttgca

SEQ ID NO: 433360 - DNA, 33 bp, Homo sapien
gcatctttgtagaatatacattgttgatttgca

SEQ ID NO: 433361 - DNA, 33 bp, Homo sapien
cactgttatcagaaggcagtgtttggaaaaaca

SEQ ID NO: 433362 - DNA, 33 bp, Homo sapien
cactgttatcagaaggtagtgtttggaaaaaca

SEQ ID NO: 433363 - DNA, 33 bp, Homo sapien
ccaaatagaaattcaccgtaagagggcttataa

SEQ ID NO: 433364 - DNA, 33 bp, Homo sapien
ccaaatagaaattcactgtaagagggcttataa

SEQ ID NO: 433365 - DNA, 33 bp, Homo sapien
ggatcctctctgtaaacattaggtttctcatct

SEQ ID NO: 433366 - DNA, 33 bp, Homo sapien
ggatcctctctgtaaatattaggtttctcatct

SEQ ID NO: 433367 - DNA, 33 bp, Homo sapien
ggtcgttatctgcaaaatacattatcttggaca

SEQ ID NO: 433368 - DNA, 33 bp, Homo sapien
ggtcgttatctgcaaattacattatcttggaca

SEQ ID NO: 433369 - DNA, 33 bp, Homo sapien
tagtgttatttagcaaggcagatgttatattat

SEQ ID NO: 433370 - DNA, 33 bp, Homo sapien
tagtgttatttagcaatgcagatgttatattat

SEQ ID NO: 433371 - DNA, 33 bp, Homo sapien
gtggaagcctgagccaaacagtgctttggagta

SEQ ID NO: 433372 - DNA, 33 bp, Homo sapien
gtggaagcctgagccagacagtgctttggagta

SEQ ID NO: 433373 - DNA, 33 bp, Homo sapien
gacctagaagcagaaacggaaaatggagaagcc

SEQ ID NO: 433374 - DNA, 33 bp, Homo sapien
gacctagaagcagaaatggaaaatggagaagcc

SEQ ID NO: 433375 - DNA, 33 bp, Homo sapien
gattttctctgttggcgaatccctgcttaacgc

SEQ ID NO: 433376 - DNA, 33 bp, Homo sapien
gattttctctgttggctaatccctgcttaacgc

SEQ ID NO: 433377 - DNA, 33 bp, Homo sapien
gcaatcacacatacacacaaaatcctcatcata

SEQ ID NO: 433378 - DNA, 33 bp, Homo sapien
gcaatcacacatacacgcaaaatcctcatcata

SEQ ID NO: 433379 - DNA, 33 bp, Homo sapien
caggtccctaactgcccatccaccagcatcata

SEQ ID NO: 433380 - DNA, 33 bp, Homo sapien
caggtccctaactgcctatccaccagcatcata

SEQ ID NO: 433381 - DNA, 33 bp, Homo sapien
tcatttatcataatcaccggtatacaaaggaat

SEQ ID NO: 433382 - DNA, 33 bp, Homo sapien
tcatttatcataatcatcggtatacaaaggaat

SEQ ID NO: 433383 - DNA, 33 bp, Homo sapien
gaagctctgaataaaactatcgttctcattatc

SEQ ID NO: 433384 - DNA, 33 bp, Homo sapien
gaagctctgaataaaattatcgttctcattatc

SEQ ID NO: 433385 - DNA, 33 bp, Homo sapien
attatatccagcactacagtggagatgggtgac

SEQ ID NO: 433386 - DNA, 33 bp, Homo sapien
attatatccagcactagagtggagatgggtgac

SEQ ID NO: 433387 - DNA, 33 bp, Homo sapien
gaatatatctgaaataaacaagcctaaggtctc

SEQ ID NO: 433388 - DNA, 33 bp, Homo sapien
gaatatatctgaaatatacaagcctaaggtctc

SEQ ID NO: 433389 - DNA, 33 bp, Homo sapien
tacgtagtagaatgtcactgaagtctggatcat

SEQ ID NO: 433390 - DNA, 33 bp, Homo sapien
tacgtagtagaatgtcgctgaagtctggatcat

SEQ ID NO: 433391 - DNA, 33 bp, Homo sapien
gagcttgtctttcatactacaatgagcatctca

SEQ ID NO: 433392 - DNA, 33 bp, Homo sapien
gagcttgtctttcatattacaatgagcatctca

SEQ ID NO: 433393 - DNA, 33 bp, Homo sapien
ggattatgcttcagagaagaaaaagttgatctt

SEQ ID NO: 433394 - DNA, 33 bp, Homo sapien
ggattatgcttcagaggagaaaaagttgatctt

SEQ ID NO: 433395 - DNA, 33 bp, Homo sapien
tagaagaatgccatggccagattagttctgtaa

SEQ ID NO: 433396 - DNA, 33 bp, Homo sapien
tagaagaatgccatggtcagattagttctgtaa

SEQ ID NO: 433397 - DNA, 33 bp, Homo sapien
actgagatctaaagcaatactctccaaccatgt

SEQ ID NO: 433398 - DNA, 33 bp, Homo sapien
actgagatctaaagcagtactctccaaccatgt

SEQ ID NO: 433399 - DNA, 33 bp, Homo sapien
gtcattagtgtcttcagaaaaactgagattaaa

SEQ ID NO: 433400 - DNA, 33 bp, Homo sapien
gtcattagtgtcttcataaaaactgagattaaa

SEQ ID NO: 433401 - DNA, 33 bp, Homo sapien
gttgtgaaatgagaaacactaattttaaaagga

SEQ ID NO: 433402 - DNA, 33 bp, Homo sapien
gttgtgaaatgagaaagactaattttaaaagga

SEQ ID NO: 433403 - DNA, 33 bp, Homo sapien
cctgggtgatgctttgaaaaaaatctgtttacc

SEQ ID NO: 433404 - DNA, 33 bp, Homo sapien
cctgggtgatgctttggaaaaaatctgtttacc

SEQ ID NO: 433405 - DNA, 33 bp, Homo sapien
ctctctttgttggaacagcgtacccttcaactg

SEQ ID NO: 433406 - DNA, 33 bp, Homo sapien
ctctctttgttggaacggcgtacccttcaactg

SEQ ID NO: 433407 - DNA, 33 bp, Homo sapien
catgcttaacacagtgaaacacaagaaatgctt

SEQ ID NO: 433408 - DNA, 33 bp, Homo sapien
catgcttaacacagtggaacacaagaaatgctt

SEQ ID NO: 433409 - DNA, 33 bp, Homo sapien
tcttctccactactgaacagacatttttgccaa

SEQ ID NO: 433410 - DNA, 33 bp, Homo sapien
tcttctccactactgagcagacatttttgccaa

SEQ ID NO: 433411 - DNA, 33 bp, Homo sapien
cagcttatctggactcgagaaaggtaataacca

SEQ ID NO: 433412 - DNA, 33 bp, Homo sapien
cagcttatctggactctagaaaggtaataacca

SEQ ID NO: 433413 - DNA, 33 bp, Homo sapien
ccatcctagagtcatacattatgttctgctatt

SEQ ID NO: 433414 - DNA, 33 bp, Homo sapien
ccatcctagagtcatatattatgttctgctatt

SEQ ID NO: 433415 - DNA, 33 bp, Homo sapien
gaagataatacatcataagaatgtgcacacaga

SEQ ID NO: 433416 - DNA, 33 bp, Homo sapien
gaagataatacatcatcagaatgtgcacacaga

SEQ ID NO: 433417 - DNA, 33 bp, Homo sapien
gatacagaagcgaaaaccttgcagtgctttttt

SEQ ID NO: 433418 - DNA, 33 bp, Homo sapien
gatacagaagcgaaaatcttgcagtgctttttt

SEQ ID NO: 433419 - DNA, 33 bp, Homo sapien
gtgatcttgaaattataagcttgaattagaaga

SEQ ID NO: 433420 - DNA, 33 bp, Homo sapien
gtgatcttgaaattatgagcttgaattagaaga

SEQ ID NO: 433421 - DNA, 33 bp, Homo sapien
gctgcattagagaaggcaaaataattgtggctt

SEQ ID NO: 433422 - DNA, 33 bp, Homo sapien
gctgcattagagaaggtaaaataattgtggctt

SEQ ID NO: 433423 - DNA, 33 bp, Homo sapien
caaaataatcactgtgaaacaaaacataaaggt

SEQ ID NO: 433424 - DNA, 33 bp, Homo sapien
caaaataatcactgtggaacaaaacataaaggt

SEQ ID NO: 433425 - DNA, 33 bp, Homo sapien
ctagtgtgtaattgagccagcttctgagtcttg

SEQ ID NO: 433426 - DNA, 33 bp, Homo sapien
ctagtgtgtaattgagtcagcttctgagtcttg

SEQ ID NO: 433427 - DNA, 33 bp, Homo sapien
gaaaaaagagttaacaaatcctcagcaaatctg

SEQ ID NO: 433428 - DNA, 33 bp, Homo sapien
gaaaaaagagttaacagatcctcagcaaatctg

SEQ ID NO: 433429 - DNA, 33 bp, Homo sapien
gattttgatttccagcacgcattctttgttaca

SEQ ID NO: 433430 - DNA, 33 bp, Homo sapien
gattttgatttccagcgcgcattctttgttaca

SEQ ID NO: 433431 - DNA, 33 bp, Homo sapien
ttaaatgaaatgataaatgagatgatacaggta

SEQ ID NO: 433432 - DNA, 33 bp, Homo sapien
ttaaatgaaatgataagtgagatgatacaggta

SEQ ID NO: 433433 - DNA, 33 bp, Homo sapien
tccaaggaaggcaggaactaggcagataggagc

SEQ ID NO: 433434 - DNA, 33 bp, Homo sapien
tccaaggaaggcaggagctaggcagataggagc

SEQ ID NO: 433435 - DNA, 33 bp, Homo sapien
gaggatatgaaaagcaagagctatggtaaccac

SEQ ID NO: 433436 - DNA, 33 bp, Homo sapien
gaggatatgaaaagcaggagctatggtaaccac

SEQ ID NO: 433437 - DNA, 33 bp, Homo sapien
aattattctttaaaaaacctagctccagacttt

SEQ ID NO: 433438 - DNA, 33 bp, Homo sapien
aattattctttaaaaatcctagctccagacttt

SEQ ID NO: 433439 - DNA, 33 bp, Homo sapien
gtaggcggacagtccacgaaagctctactctga

SEQ ID NO: 433440 - DNA, 33 bp, Homo sapien
gtaggcggacagtccatgaaagctctactctga

SEQ ID NO: 433441 - DNA, 33 bp, Homo sapien
attaataaaatagaaacttgcgaatactatcac

SEQ ID NO: 433442 - DNA, 33 bp, Homo sapien
attaataaaatagaaatttgcgaatactatcac

SEQ ID NO: 433443 - DNA, 33 bp, Homo sapien
cagagctaggttgtaaactgagacaatctcctg

SEQ ID NO: 433444 - DNA, 33 bp, Homo sapien
cagagctaggttgtaagctgagacaatctcctg

SEQ ID NO: 433445 - DNA, 33 bp, Homo sapien
ttctgatgtgctcccacggaatattatatcacc

SEQ ID NO: 433446 - DNA, 33 bp, Homo sapien
ttctgatgtgctcccatggaatattatatcacc

SEQ ID NO: 433447 - DNA, 33 bp, Homo sapien
gccactggaatttaaacctggcaaaattccaat

SEQ ID NO: 433448 - DNA, 33 bp, Homo sapien
gccactggaatttaaatctggcaaaattccaat

SEQ ID NO: 433449 - DNA, 33 bp, Homo sapien
tctctaaggaactacggacagtgagatgataat

SEQ ID NO: 433450 - DNA, 33 bp, Homo sapien
tctctaaggaactacgtacagtgagatgataat

SEQ ID NO: 433451 - DNA, 33 bp, Homo sapien
cctcctcttaatcaaactgacagaaactaaagc

SEQ ID NO: 433452 - DNA, 33 bp, Homo sapien
cctcctcttaatcaaattgacagaaactaaagc

SEQ ID NO: 433453 - DNA, 33 bp, Homo sapien
aaaaaattggtctagaaaagcagtgtccttttt

SEQ ID NO: 433454 - DNA, 33 bp, Homo sapien
aaaaaattggtctagagaagcagtgtccttttt

SEQ ID NO: 433455 - DNA, 33 bp, Homo sapien
tttgaatgcattaaacacacattgaagaagtaa

SEQ ID NO: 433456 - DNA, 33 bp, Homo sapien
tttgaatgcattaaacgcacattgaagaagtaa

SEQ ID NO: 433457 - DNA, 33 bp, Homo sapien
tgatatacctaaccaaatgaagacttaaccaag

SEQ ID NO: 433458 - DNA, 33 bp, Homo sapien
tgatatacctaaccaagtgaagacttaaccaag

SEQ ID NO: 433459 - DNA, 33 bp, Homo sapien
tctgttccaggcaagaaagcgtgacagctttgg

SEQ ID NO: 433460 - DNA, 33 bp, Homo sapien
tctgttccaggcaagacagcgtgacagctttgg

SEQ ID NO: 433461 - DNA, 33 bp, Homo sapien
tgctcataggaaattaacagtggatcaactatt

SEQ ID NO: 433462 - DNA, 33 bp, Homo sapien
tgctcataggaaattagcagtggatcaactatt

SEQ ID NO: 433463 - DNA, 33 bp, Homo sapien
tacaaaactaatattcaagaaacgacagaattg

SEQ ID NO: 433464 - DNA, 33 bp, Homo sapien
tacaaaactaatattcgagaaacgacagaattg

SEQ ID NO: 433465 - DNA, 33 bp, Homo sapien
atcttgctaataagtccataaatctgagaatct

SEQ ID NO: 433466 - DNA, 33 bp, Homo sapien
atcttgctaataagtctataaatctgagaatct

SEQ ID NO: 433467 - DNA, 33 bp, Homo sapien
aaccagccagatcataaactgtttgctgctgtt

SEQ ID NO: 433468 - DNA, 33 bp, Homo sapien
aaccagccagatcatagactgtttgctgctgtt

SEQ ID NO: 433469 - DNA, 33 bp, Homo sapien
ctccctagagtatgaccaccggctttcgcagat

SEQ ID NO: 433470 - DNA, 33 bp, Homo sapien
ctccctagagtatgactaccggctttcgcagat

SEQ ID NO: 433471 - DNA, 33 bp, Homo sapien
actgcaaccactgagcaaagggccggaagccat

SEQ ID NO: 433472 - DNA, 33 bp, Homo sapien
actgcaaccactgagcgaagggccggaagccat

SEQ ID NO: 433473 - DNA, 33 bp, Homo sapien
aactctgcctagtcaacttctctatcccaggaa

SEQ ID NO: 433474 - DNA, 33 bp, Homo sapien
aactctgcctagtcaatttctctatcccaggaa

SEQ ID NO: 433475 - DNA, 33 bp, Homo sapien
aaacagaccattcttacctagtggtttctattg

SEQ ID NO: 433476 - DNA, 33 bp, Homo sapien
aaacagaccattcttatctagtggtttctattg

SEQ ID NO: 433477 - DNA, 33 bp, Homo sapien
tctctaacctgctgaacgttactcattacttct

SEQ ID NO: 433478 - DNA, 33 bp, Homo sapien
tctctaacctgctgaatgttactcattacttct

SEQ ID NO: 433479 - DNA, 33 bp, Homo sapien
gcatatgaagacaagcaaaattcctacaatttt

SEQ ID NO: 433480 - DNA, 33 bp, Homo sapien
gcatatgaagacaagcgaaattcctacaatttt

SEQ ID NO: 433481 - DNA, 33 bp, Homo sapien
tctttacagtgctttcaagggttgtatacgtgg

SEQ ID NO: 433482 - DNA, 33 bp, Homo sapien
tctttacagtgctttcgagggttgtatacgtgg

SEQ ID NO: 433483 - DNA, 33 bp, Homo sapien
cctaaatgcaacctcaacttgaagcaaaagatg

SEQ ID NO: 433484 - DNA, 33 bp, Homo sapien
cctaaatgcaacctcatcttgaagcaaaagatg

SEQ ID NO: 433485 - DNA, 33 bp, Homo sapien
tgaggctaccatctggccacacttttaatttca

SEQ ID NO: 433486 - DNA, 33 bp, Homo sapien
tgaggctaccatctggtcacacttttaatttca

SEQ ID NO: 433487 - DNA, 33 bp, Homo sapien
tcatctgaggagataacactttaagccaagaat

SEQ ID NO: 433488 - DNA, 33 bp, Homo sapien
tcatctgaggagataatactttaagccaagaat

SEQ ID NO: 433489 - DNA, 33 bp, Homo sapien
tgctccattccacataaattaatgctcttatca

SEQ ID NO: 433490 - DNA, 33 bp, Homo sapien
tgctccattccacatatattaatgctcttatca

SEQ ID NO: 433491 - DNA, 33 bp, Homo sapien
aatcttgctccatgccactcctattgtaatgga

SEQ ID NO: 433492 - DNA, 33 bp, Homo sapien
aatcttgctccatgcccctcctattgtaatgga

SEQ ID NO: 433493 - DNA, 33 bp, Homo sapien
aaaaacattaagtctgccaagtttaccagtaaa

SEQ ID NO: 433494 - DNA, 33 bp, Homo sapien
aaaaacattaagtctggcaagtttaccagtaaa

SEQ ID NO: 433495 - DNA, 33 bp, Homo sapien
agaacactgtcaataccaaatgctagtgaggat

SEQ ID NO: 433496 - DNA, 33 bp, Homo sapien
agaacactgtcaatacgaaatgctagtgaggat

SEQ ID NO: 433497 - DNA, 33 bp, Homo sapien
tgaaagtcattcatacaaagaactaggactatc

SEQ ID NO: 433498 - DNA, 33 bp, Homo sapien
tgaaagtcattcataccaagaactaggactatc

SEQ ID NO: 433499 - DNA, 33 bp, Homo sapien
agcttcatctcttcaacgcaaggagtccaccag

SEQ ID NO: 433500 - DNA, 33 bp, Homo sapien
agcttcatctcttcaatgcaaggagtccaccag

SEQ ID NO: 433501 - DNA, 33 bp, Homo sapien
ggccagagattagagcaccttctctgcatcagg

SEQ ID NO: 433502 - DNA, 33 bp, Homo sapien
ggccagagattagagcgccttctctgcatcagg

SEQ ID NO: 433503 - DNA, 33 bp, Homo sapien
tcctctatgaagcagacatcaagccagttatag

SEQ ID NO: 433504 - DNA, 33 bp, Homo sapien
tcctctatgaagcagatatcaagccagttatag

SEQ ID NO: 433505 - DNA, 33 bp, Homo sapien
caagtaccaaggtatcaagcaactaggcaggtt

SEQ ID NO: 433506 - DNA, 33 bp, Homo sapien
caagtaccaaggtatcgagcaactaggcaggtt

SEQ ID NO: 433507 - DNA, 33 bp, Homo sapien
gtgaagtgataaaaccaggaagtgtatagattt

SEQ ID NO: 433508 - DNA, 33 bp, Homo sapien
gtgaagtgataaaacccggaagtgtatagattt

SEQ ID NO: 433509 - DNA, 33 bp, Homo sapien
actttctgaaactagaactaataaccatggaat

SEQ ID NO: 433510 - DNA, 33 bp, Homo sapien
actttctgaaactagatctaataaccatggaat

SEQ ID NO: 433511 - DNA, 33 bp, Homo sapien
agtgtaatggttaagaatacacagatgctggct

SEQ ID NO: 433512 - DNA, 33 bp, Homo sapien
agtgtaatggttaagagtacacagatgctggct

SEQ ID NO: 433513 - DNA, 33 bp, Homo sapien
gctaagcttaagacaactaaatgagatcctacc

SEQ ID NO: 433514 - DNA, 33 bp, Homo sapien
gctaagcttaagacaattaaatgagatcctacc

SEQ ID NO: 433515 - DNA, 33 bp, Homo sapien
ttgagatgttaggatgaatttggggtctgcatc

SEQ ID NO: 433516 - DNA, 33 bp, Homo sapien
ttgagatgttaggatgcatttggggtctgcatc

SEQ ID NO: 433517 - DNA, 33 bp, Homo sapien
actgtgggaaaatcaaatcatcatcacacaatt

SEQ ID NO: 433518 - DNA, 33 bp, Homo sapien
actgtgggaaaatcaagtcatcatcacacaatt

SEQ ID NO: 433519 - DNA, 33 bp, Homo sapien
agtagctgaagcagaaaaactgtgggaaaatca

SEQ ID NO: 433520 - DNA, 33 bp, Homo sapien
agtagctgaagcagaagaactgtgggaaaatca

SEQ ID NO: 433521 - DNA, 33 bp, Homo sapien
taatgactttggcacaatgtaaaatctaaaccg

SEQ ID NO: 433522 - DNA, 33 bp, Homo sapien
taatgactttggcacagtgtaaaatctaaaccg

SEQ ID NO: 433523 - DNA, 33 bp, Homo sapien
agttgcttaagtatgacctctggagtcagatgg

SEQ ID NO: 433524 - DNA, 33 bp, Homo sapien
agttgcttaagtatgagctctggagtcagatgg

SEQ ID NO: 433525 - DNA, 33 bp, Homo sapien
tcaggctttaaatgaaatgtcaaatataatttg

SEQ ID NO: 433526 - DNA, 33 bp, Homo sapien
tcaggctttaaatgaagtgtcaaatataatttg

SEQ ID NO: 433527 - DNA, 33 bp, Homo sapien
gaaaatcactgagttagctccctgccgaaatga

SEQ ID NO: 433528 - DNA, 33 bp, Homo sapien
gaaaatcactgagttatctccctgccgaaatga

SEQ ID NO: 433529 - DNA, 33 bp, Homo sapien
ttaggagagtacatgactaaaaatgtctggaga

SEQ ID NO: 433530 - DNA, 33 bp, Homo sapien
ttaggagagtacatgattaaaaatgtctggaga

SEQ ID NO: 433531 - DNA, 33 bp, Homo sapien
tgcaaagtttagcacagaactatttacatatta

SEQ ID NO: 433532 - DNA, 33 bp, Homo sapien
tgcaaagtttagcacataactatttacatatta

SEQ ID NO: 433533 - DNA, 33 bp, Homo sapien
gctaaggtggatattcaacaaggtgctaatggt

SEQ ID NO: 433534 - DNA, 33 bp, Homo sapien
gctaaggtggatattctacaaggtgctaatggt

SEQ ID NO: 433535 - DNA, 33 bp, Homo sapien
ggaagtatttacaatacggaaatcagcaaatat

SEQ ID NO: 433536 - DNA, 33 bp, Homo sapien
ggaagtatttacaatatggaaatcagcaaatat

SEQ ID NO: 433537 - DNA, 33 bp, Homo sapien
aattttcctttgaactcagggtagtaagcctga

SEQ ID NO: 433538 - DNA, 33 bp, Homo sapien
aattttcctttgaacttagggtagtaagcctga

SEQ ID NO: 433539 - DNA, 33 bp, Homo sapien
cacagagcgagctaagcaggaccataaagagag

SEQ ID NO: 433540 - DNA, 33 bp, Homo sapien
cacagagcgagctaagtaggaccataaagagag

SEQ ID NO: 433541 - DNA, 33 bp, Homo sapien
tggatagaggccattgcataatcatcttcatta

SEQ ID NO: 433542 - DNA, 33 bp, Homo sapien
tggatagaggccattgtataatcatcttcatta

SEQ ID NO: 433543 - DNA, 33 bp, Homo sapien
aagcaaaaattcaggccatgttatgcctcacat

SEQ ID NO: 433544 - DNA, 33 bp, Homo sapien
aagcaaaaattcaggctatgttatgcctcacat

SEQ ID NO: 433545 - DNA, 33 bp, Homo sapien
ttctaatgacagtgcaatctttctagacaatct

SEQ ID NO: 433546 - DNA, 33 bp, Homo sapien
ttctaatgacagtgcagtctttctagacaatct

SEQ ID NO: 433547 - DNA, 33 bp, Homo sapien
agaaaagactttagaaactaccattcccatacc

SEQ ID NO: 433548 - DNA, 33 bp, Homo sapien
agaaaagactttagaatctaccattcccatacc

SEQ ID NO: 433549 - DNA, 33 bp, Homo sapien
agtcctgtgatgtgaaacaccttcaggtctctc

SEQ ID NO: 433550 - DNA, 33 bp, Homo sapien
agtcctgtgatgtgaaccaccttcaggtctctc

SEQ ID NO: 433551 - DNA, 33 bp, Homo sapien; identical to SEQ ID NO: 433549

SEQ ID NO: 433552 - DNA, 33 bp, Homo sapien; identical to SEQ ID NO: 433550

SEQ ID NO: 433553 - DNA, 33 bp, Homo sapien
aaagagggatcgtccaccccaaacacacaccct

SEQ ID NO: 433554 - DNA, 33 bp, Homo sapien
aaagagggatcgtccatcccaaacacacaccct

SEQ ID NO: 433555 - DNA, 33 bp, Homo sapien
aaaagtggaaatgctacatcagaagttaggttt

SEQ ID NO: 433556 - DNA, 33 bp, Homo sapien
aaaagtggaaatgctatatcagaagttaggttt

SEQ ID NO: 433557 - DNA, 33 bp, Homo sapien
tttgacttttcctacacattagcttttactttt

SEQ ID NO: 433558 - DNA, 33 bp, Homo sapien
tttgacttttcctacatattagcttttactttt

SEQ ID NO: 433559 - DNA, 33 bp, Homo sapien
tttctctgtatgtacaaatttttctgagacaac

SEQ ID NO: 433560 - DNA, 33 bp, Homo sapien
tttctctgtatgtacacatttttctgagacaac

SEQ ID NO: 433561 - DNA, 33 bp, Homo sapien
cttcctttcctaatcacagtccaaggaagaatt

SEQ ID NO: 433562 - DNA, 33 bp, Homo sapien
cttcctttcctaatcatagtccaaggaagaatt

SEQ ID NO: 433563 - DNA, 33 bp, Homo sapien
atcaatcaacaagggacgaagaaaatatgttgt

SEQ ID NO: 433564 - DNA, 33 bp, Homo sapien
atcaatcaacaagggatgaagaaaatatgttgt

SEQ ID NO: 433565 - DNA, 33 bp, Homo sapien; identical to SEQ ID NO: 433563

SEQ ID NO: 433566 - DNA, 33 bp, Homo sapien; identical to SEQ ID NO: 433564

SEQ ID NO: 433567 - DNA, 33 bp, Homo sapien
gcaagtcctgacatgccgagagtgctttaggta

SEQ ID NO: 433568 - DNA, 33 bp, Homo sapien
gcaagtcctgacatgctgagagtgctttaggta

SEQ ID NO: 433569 - DNA, 33 bp, Homo sapien
agtagaatttgtattacctcgtggctgctgaag

SEQ ID NO: 433570 - DNA, 33 bp, Homo sapien
agtagaatttgtattatctcgtggctgctgaag

SEQ ID NO: 433571 - DNA, 33 bp, Homo sapien
actgttttttgccttgcattttgagaactttaa

SEQ ID NO: 433572 - DNA, 33 bp, Homo sapien
actgttttttgccttgtattttgagaactttaa

SEQ ID NO: 433573 - DNA, 33 bp, Homo sapien
acgtgtaatctcaggaaaatgtgtaatgtaagg

SEQ ID NO: 433574 - DNA, 33 bp, Homo sapien
acgtgtaatctcaggacaatgtgtaatgtaagg

SEQ ID NO: 433575 - DNA, 33 bp, Homo sapien
cacacataactagctagcagcaaaccagtcctg

SEQ ID NO: 433576 - DNA, 33 bp, Homo sapien
cacacataactagctatcagcaaaccagtcctg

SEQ ID NO: 433577 - DNA, 33 bp, Homo sapien
tttgaatgtgactttaaagttatctgtggggtg

SEQ ID NO: 433578 - DNA, 33 bp, Homo sapien
tttgaatgtgactttacagttatctgtggggtg

SEQ ID NO: 433579 - DNA, 33 bp, Homo sapien
accctaaatgtttacactagagaagagggaaaa

SEQ ID NO: 433580 - DNA, 33 bp, Homo sapien
accctaaatgtttacagtagagaagagggaaaa

SEQ ID NO: 433581 - DNA, 33 bp, Homo sapien
ctgagatattttgagaaggaggttgttaagtat

SEQ ID NO: 433582 - DNA, 33 bp, Homo sapien
ctgagatattttgagagggaggttgttaagtat

SEQ ID NO: 433583 - DNA, 33 bp, Homo sapien
tctatttttatggaaaattcacattgcattctg

SEQ ID NO: 433584 - DNA, 33 bp, Homo sapien
tctatttttatggaaagttcacattgcattctg

SEQ ID NO: 433585 - DNA, 33 bp, Homo sapien
acaattttagtctttacgtaacttctgttcaaa

SEQ ID NO: 433586 - DNA, 33 bp, Homo sapien
acaattttagtctttatgtaacttctgttcaaa

SEQ ID NO: 433587 - DNA, 33 bp, Homo sapien
caagccttgacgtgagaactcttcacaaaaatg

SEQ ID NO: 433588 - DNA, 33 bp, Homo sapien
caagccttgacgtgaggactcttcacaaaaatg

SEQ ID NO: 433589 - DNA, 33 bp, Homo sapien
attctggaagtagcaacgggataggaagtagaa

SEQ ID NO: 433590 - DNA, 33 bp, Homo sapien
attctggaagtagcaatgggataggaagtagaa

SEQ ID NO: 433591 - DNA, 33 bp, Homo sapien
gctttggttacaacaacgacaatgtatatgtta

SEQ ID NO: 433592 - DNA, 33 bp, Homo sapien
gctttggttacaacaatgacaatgtatatgtta

SEQ ID NO: 433593 - DNA, 33 bp, Homo sapien
ctcctttgatctaagcacttgcctctttttgag

SEQ ID NO: 433594 - DNA, 33 bp, Homo sapien
ctcctttgatctaagcgcttgcctctttttgag

SEQ ID NO: 433595 - DNA, 33 bp, Homo sapien
gaggcaaagatatgccagagtggtagagctggg

SEQ ID NO: 433596 - DNA, 33 bp, Homo sapien
gaggcaaagatatgccggagtggtagagctggg

SEQ ID NO: 433597 - DNA, 33 bp, Homo sapien
ctgaccacagctcccactatctcttaatcctgt

SEQ ID NO: 433598 - DNA, 33 bp, Homo sapien
ctgaccacagctcccattatctcttaatcctgt

SEQ ID NO: 433599 - DNA, 33 bp, Homo sapien
gaaaagttcatttttaacaaagccgccttttaa

SEQ ID NO: 433600 - DNA, 33 bp, Homo sapien
gaaaagttcatttttagcaaagccgccttttaa

SEQ ID NO: 433601 - DNA, 33 bp, Homo sapien
gctgtgactgtgataaatagatctgcaaatatc

SEQ ID NO: 433602 - DNA, 33 bp, Homo sapien
gctgtgactgtgataagtagatctgcaaatatc

SEQ ID NO: 433603 - DNA, 33 bp, Homo sapien
gcagcatacattattcacctccaaatatataaa

SEQ ID NO: 433604 - DNA, 33 bp, Homo sapien
gcagcatacattattcccctccaaatatataaa

SEQ ID NO: 433605 - DNA, 33 bp, Homo sapien
aggaatctagagtttacaagcagctacagcatg

SEQ ID NO: 433606 - DNA, 33 bp, Homo sapien
aggaatctagagtttataagcagctacagcatg

SEQ ID NO: 433607 - DNA, 33 bp, Homo sapien
ctaatcatggcaattaaacaaggttcaattgct

SEQ ID NO: 433608 - DNA, 33 bp, Homo sapien
ctaatcatggcaattagacaaggttcaattgct

SEQ ID NO: 433609 - DNA, 33 bp, Homo sapien
agaagaacatacaatacggcagtagcactgaag

SEQ ID NO: 433610 - DNA, 33 bp, Homo sapien
agaagaacatacaatatggcagtagcactgaag

SEQ ID NO: 433611 - DNA, 33 bp, Homo sapien
taacaatgaacagtgccgacaagctggtacaaa

SEQ ID NO: 433612 - DNA, 33 bp, Homo sapien
taacaatgaacagtgctgacaagctggtacaaa

SEQ ID NO: 433613 - DNA, 33 bp, Homo sapien
agtggtgtctttcatcaatgtctggtgagacca

SEQ ID NO: 433614 - DNA, 33 bp, Homo sapien
agtggtgtctttcatcgatgtctggtgagacca

SEQ ID NO: 433615 - DNA, 33 bp, Homo sapien
gaccaattgctgataacggttagtgtgttgttt

SEQ ID NO: 433616 - DNA, 33 bp, Homo sapien
gaccaattgctgataatggttagtgtgttgttt

SEQ ID NO: 433617 - DNA, 33 bp, Homo sapien
taaggtaaagcctcacccctgaccaaattgtgc

SEQ ID NO: 433618 - DNA, 33 bp, Homo sapien
taaggtaaagcctcactcctgaccaaattgtgc

SEQ ID NO: 433619 - DNA, 33 bp, Homo sapien
tgctttgttgttatcacgacacaattgctacaa

SEQ ID NO: 433620 - DNA, 33 bp, Homo sapien
tgctttgttgttatcatgacacaattgctacaa

SEQ ID NO: 433621 - DNA, 33 bp, Homo sapien
cagagagaacagaaataaccatgtgcaaatcaa

SEQ ID NO: 433622 - DNA, 33 bp, Homo sapien
cagagagaacagaaatgaccatgtgcaaatcaa

SEQ ID NO: 433623 - DNA, 33 bp, Homo sapien
atagacacccaatacacgtggaagtgagttgac

SEQ ID NO: 433624 - DNA, 33 bp, Homo sapien
atagacacccaatacatgtggaagtgagttgac

SEQ ID NO: 433625 - DNA, 33 bp, Homo sapien
catttactcagccccaaaatatagtaaagtggc

SEQ ID NO: 433626 - DNA, 33 bp, Homo sapien
catttactcagccccagaatatagtaaagtggc

SEQ ID NO: 433627 - DNA, 33 bp, Homo sapien
tttctacctccacacaaaaccatttcctactca

SEQ ID NO: 433628 - DNA, 33 bp, Homo sapien
tttctacctccacacagaaccatttcctactca

SEQ ID NO: 433629 - DNA, 33 bp, Homo sapien
tttaagtcaccagaccaagagaggatttaaaat

SEQ ID NO: 433630 - DNA, 33 bp, Homo sapien
tttaagtcaccagacctagagaggatttaaaat

SEQ ID NO: 433631 - DNA, 33 bp, Homo sapien
tactaagtgattactaagtgcttggtaagctta

SEQ ID NO: 433632 - DNA, 33 bp, Homo sapien
tactaagtgattactaggtgcttggtaagctta

SEQ ID NO: 433633 - DNA, 33 bp, Homo sapien
cagaaaaatgttcttcgccaacaacagctctgg

SEQ ID NO: 433634 - DNA, 33 bp, Homo sapien
cagaaaaatgttcttctccaacaacagctctgg

SEQ ID NO: 433635 - DNA, 33 bp, Homo sapien
gatggaagttctgagacaattccctagagatga

SEQ ID NO: 433636 - DNA, 33 bp, Homo sapien
gatggaagttctgagataattccctagagatga

SEQ ID NO: 433637 - DNA, 33 bp, Homo sapien
ttgaccaaatttcctacaccttgcatgtgctgg

SEQ ID NO: 433638 - DNA, 33 bp, Homo sapien
ttgaccaaatttcctagaccttgcatgtgctgg

SEQ ID NO: 433639 - DNA, 33 bp, Homo sapien
atccataatgaccttacgatttgcactgtattt

SEQ ID NO: 433640 - DNA, 33 bp, Homo sapien
atccataatgaccttaggatttgcactgtattt

SEQ ID NO: 433641 - DNA, 33 bp, Homo sapien
gaccaaacatacttaggcaatcctcttctcttt

SEQ ID NO: 433642 - DNA, 33 bp, Homo sapien
gaccaaacatacttagtcaatcctcttctcttt

SEQ ID NO: 433643 - DNA, 33 bp, Homo sapien
cctgtttctcactccagggactaagggtgtcct

SEQ ID NO: 433644 - DNA, 33 bp, Homo sapien
cctgtttctcactccatggactaagggtgtcct

SEQ ID NO: 433645 - DNA, 33 bp, Homo sapien
tcagtcgtttaacaggaaactttgggatgcttc

SEQ ID NO: 433646 - DNA, 33 bp, Homo sapien
tcagtcgtttaacaggcaactttgggatgcttc

SEQ ID NO: 433647 - DNA, 33 bp, Homo sapien
cttcaatgtgttcaaactaatctcaaaagaacc

SEQ ID NO: 433648 - DNA, 33 bp, Homo sapien
cttcaatgtgttcaaattaatctcaaaagaacc

SEQ ID NO: 433649 - DNA, 33 bp, Homo sapien
ttggtactgccaacaccgtgagtggaaacagct

SEQ ID NO: 433650 - DNA, 33 bp, Homo sapien
ttggtactgccaacactgtgagtggaaacagct

SEQ ID NO: 433651 - DNA, 33 bp, Homo sapien
caatcaaattttaggaaggtgaaatgaaacgat

SEQ ID NO: 433652 - DNA, 33 bp, Homo sapien
caatcaaattttaggagggtgaaatgaaacgat

SEQ ID NO: 433653 - DNA, 33 bp, Homo sapien
ttactctgagtacccaaccttatcattaaaatc

SEQ ID NO: 433654 - DNA, 33 bp, Homo sapien
ttactctgagtacccacccttatcattaaaatc

SEQ ID NO: 433655 - DNA, 33 bp, Homo sapien
agcagagaaatgacccaaaattggaacttatat

SEQ ID NO: 433656 - DNA, 33 bp, Homo sapien
agcagagaaatgaccccaaattggaacttatat

SEQ ID NO: 433657 - DNA, 33 bp, Homo sapien
tgtggtccagaggtcacagttgagacttatgag

SEQ ID NO: 433658 - DNA, 33 bp, Homo sapien
tgtggtccagaggtcatagttgagacttatgag

SEQ ID NO: 433659 - DNA, 33 bp, Homo sapien
tgatgatgaaattacactgcgaaattccaaaga

SEQ ID NO: 433660 - DNA, 33 bp, Homo sapien
tgatgatgaaattacagtgcgaaattccaaaga

SEQ ID NO: 433661 - DNA, 33 bp, Homo sapien
atgttatagatgtgaacggatggcagcgagcat

SEQ ID NO: 433662 - DNA, 33 bp, Homo sapien
atgttatagatgtgaatggatggcagcgagcat

SEQ ID NO: 433663 - DNA, 33 bp, Homo sapien
agtcctatgttttaacggccttgtggtctggac

SEQ ID NO: 433664 - DNA, 33 bp, Homo sapien
agtcctatgttttaactgccttgtggtctggac

SEQ ID NO: 433665 - DNA, 33 bp, Homo sapien
tatgatgagttactacaaagtccctattcattt

SEQ ID NO: 433666 - DNA, 33 bp, Homo sapien
tatgatgagttactacgaagtccctattcattt

SEQ ID NO: 433667 - DNA, 33 bp, Homo sapien
gtgatgtcttagaaaccaagtgaagaaagtttt

SEQ ID NO: 433668 - DNA, 33 bp, Homo sapien
gtgatgtcttagaaacgaagtgaagaaagtttt

SEQ ID NO: 433669 - DNA, 33 bp, Homo sapien
tgtggtattcttctcaacaatctgggggatttg

SEQ ID NO: 433670 - DNA, 33 bp, Homo sapien
tgtggtattcttctcatcaatctgggggatttg

SEQ ID NO: 433671 - DNA, 33 bp, Homo sapien
actcttgtgctaacacaaaccaagtagccatca

SEQ ID NO: 433672 - DNA, 33 bp, Homo sapien
actcttgtgctaacacgaaccaagtagccatca

SEQ ID NO: 433673 - DNA, 33 bp, Homo sapien
aaatcctgcgaaaccaagaacaaccaacactgc

SEQ ID NO: 433674 - DNA, 33 bp, Homo sapien
aaatcctgcgaaaccaggaacaaccaacactgc

SEQ ID NO: 433675 - DNA, 33 bp, Homo sapien
agatagttttttgagagcatgaaagaccaaaaa

SEQ ID NO: 433676 - DNA, 33 bp, Homo sapien
agatagttttttgagatcatgaaagaccaaaaa

SEQ ID NO: 433677 - DNA, 33 bp, Homo sapien
gatgctcataccactcaattacagctttctgtg

SEQ ID NO: 433678 - DNA, 33 bp, Homo sapien
gatgctcataccactcgattacagctttctgtg

SEQ ID NO: 433679 - DNA, 33 bp, Homo sapien
ttttacaagacatcaaaggagtttgactctaat

SEQ ID NO: 433680 - DNA, 33 bp, Homo sapien
ttttacaagacatcaacggagtttgactctaat

SEQ ID NO: 433681 - DNA, 33 bp, Homo sapien
acagaaaaccagaaaccgaaagcattcctttac

SEQ ID NO: 433682 - DNA, 33 bp, Homo sapien
acagaaaaccagaaactgaaagcattcctttac

SEQ ID NO: 433683 - DNA, 33 bp, Homo sapien
ttcctcagtctgccaacctgaaacgtgactctg

SEQ ID NO: 433684 - DNA, 33 bp, Homo sapien
ttcctcagtctgccaatctgaaacgtgactctg

SEQ ID NO: 433685 - DNA, 33 bp, Homo sapien
aaatatttttggcaaactgactgaaagttgtcc

SEQ ID NO: 433686 - DNA, 33 bp, Homo sapien
aaatatttttggcaaagtgactgaaagttgtcc

SEQ ID NO: 433687 - DNA, 33 bp, Homo sapien
gaccccagtgagctgacaggccatgaatattaa

SEQ ID NO: 433688 - DNA, 33 bp, Homo sapien
gaccccagtgagctgagaggccatgaatattaa

SEQ ID NO: 433689 - DNA, 33 bp, Homo sapien
gaactctcaattttagacagccttgctcaatga

SEQ ID NO: 433690 - DNA, 33 bp, Homo sapien
gaactctcaattttaggcagccttgctcaatga

SEQ ID NO: 433691 - DNA, 33 bp, Homo sapien
ttgactctcctttatgacacctacttactccct

SEQ ID NO: 433692 - DNA, 33 bp, Homo sapien
ttgactctcctttatggcacctacttactccct

SEQ ID NO: 433693 - DNA, 33 bp, Homo sapien
ctcataatcatctcacccttctctgacattttt

SEQ ID NO: 433694 - DNA, 33 bp, Homo sapien
ctcataatcatctcactcttctctgacattttt

SEQ ID NO: 433695 - DNA, 33 bp, Homo sapien
tttgcctgatatatacacactttgctaactgga

SEQ ID NO: 433696 - DNA, 33 bp, Homo sapien
tttgcctgatatatacgcactttgctaactgga

SEQ ID NO: 433697 - DNA, 33 bp, Homo sapien
ccaactcttctggaatcaacttcatagagaact

SEQ ID NO: 433698 - DNA, 33 bp, Homo sapien
ccaactcttctggaatgaacttcatagagaact

SEQ ID NO: 433699 - DNA, 33 bp, Homo sapien
attcccaagcatttcaccttagacatacctctg

SEQ ID NO: 433700 - DNA, 33 bp, Homo sapien
attcccaagcatttcatcttagacatacctctg

SEQ ID NO: 433701 - DNA, 33 bp, Homo sapien
ttttaaaaagagtaccaattcctgactcctgga

SEQ ID NO: 433702 - DNA, 33 bp, Homo sapien
ttttaaaaagagtaccgattcctgactcctgga

SEQ ID NO: 433703 - DNA, 33 bp, Homo sapien
aatcaatttttctggactaatcgagcctacagt

SEQ ID NO: 433704 - DNA, 33 bp, Homo sapien
aatcaatttttctggagtaatcgagcctacagt

SEQ ID NO: 433705 - DNA, 33 bp, Homo sapien
aatgctgacctgagaacctactcaaagtaactt

SEQ ID NO: 433706 - DNA, 33 bp, Homo sapien
aatgctgacctgagaatctactcaaagtaactt

SEQ ID NO: 433707 - DNA, 33 bp, Homo sapien
gggaagttgggtcacagctgataaaggattagg

SEQ ID NO: 433708 - DNA, 33 bp, Homo sapien
gggaagttgggtcacatctgataaaggattagg

SEQ ID NO: 433709 - DNA, 33 bp, Homo sapien
gcagcacaattatccccaatatttttcttcaca

SEQ ID NO: 433710 - DNA, 33 bp, Homo sapien
gcagcacaattatcccgaatatttttcttcaca

SEQ ID NO: 433711 - DNA, 33 bp, Homo sapien
taactcactttactgacgaaaatcttgaagaaa

SEQ ID NO: 433712 - DNA, 33 bp, Homo sapien
taactcactttactgaggaaaatcttgaagaaa

SEQ ID NO: 433713 - DNA, 33 bp, Homo sapien
gggtgagccctaaaacaaatataatggatggcc

SEQ ID NO: 433714 - DNA, 33 bp, Homo sapien
gggtgagccctaaaacgaatataatggatggcc

SEQ ID NO: 433715 - DNA, 33 bp, Homo sapien
attggagtgtcaggataagcccaaggaggttca

SEQ ID NO: 433716 - DNA, 33 bp, Homo sapien
attggagtgtcaggatgagcccaaggaggttca

SEQ ID NO: 433717 - DNA, 33 bp, Homo sapien
gtttgatacctagcagaaaagatacaatccctg

SEQ ID NO: 433718 - DNA, 33 bp, Homo sapien
gtttgatacctagcaggaaagatacaatccctg

SEQ ID NO: 433719 - DNA, 33 bp, Homo sapien
gaattcaatctggaaaaaagaacctgtaatcaa

SEQ ID NO: 433720 - DNA, 33 bp, Homo sapien
gaattcaatctggaaagaagaacctgtaatcaa

SEQ ID NO: 433721 - DNA, 33 bp, Homo sapien
aggatttttggaaagactctgtaaggactatga

SEQ ID NO: 433722 - DNA, 33 bp, Homo sapien
aggatttttggaaagagtctgtaaggactatga

SEQ ID NO: 433723 - DNA, 33 bp, Homo sapien
agaacatcttgaaaaaatctagacatatggtaa

SEQ ID NO: 433724 - DNA, 33 bp, Homo sapien
agaacatcttgaaaaactctagacatatggtaa

SEQ ID NO: 433725 - DNA, 33 bp, Homo sapien
tgtgtagtgtgtactaactcataattgttgaac

SEQ ID NO: 433726 - DNA, 33 bp, Homo sapien
tgtgtagtgtgtactacctcataattgttgaac

SEQ ID NO: 433727 - DNA, 33 bp, Homo sapien
acgtaaaatgctatgcaactaagccaaagtctt

SEQ ID NO: 433728 - DNA, 33 bp, Homo sapien
acgtaaaatgctatgcgactaagccaaagtctt

SEQ ID NO: 433729 - DNA, 33 bp, Homo sapien
atatagtaggagttaacaaatgatgatgtacta

SEQ ID NO: 433730 - DNA, 33 bp, Homo sapien
atatagtaggagttaagaaatgatgatgtacta

SEQ ID NO: 433731 - DNA, 33 bp, Homo sapien
tcaaaacctgagtataagtactgtaggagctaa

SEQ ID NO: 433732 - DNA, 33 bp, Homo sapien
tcaaaacctgagtatacgtactgtaggagctaa

SEQ ID NO: 433733 - DNA, 33 bp, Homo sapien
gacaaagattcggcacaagaattccggcaccat

SEQ ID NO: 433734 - DNA, 33 bp, Homo sapien
gacaaagattcggcacgagaattccggcaccat

SEQ ID NO: 433735 - DNA, 33 bp, Homo sapien
tttattttttagttcaggctgataatttctgag

SEQ ID NO: 433736 - DNA, 33 bp, Homo sapien
tttattttttagttcatgctgataatttctgag

SEQ ID NO: 433737 - DNA, 33 bp, Homo sapien
caggagttatgagtgcaaaatgctcttcaagaa

SEQ ID NO: 433738 - DNA, 33 bp, Homo sapien
caggagttatgagtgcgaaatgctcttcaagaa

SEQ ID NO: 433739 - DNA, 33 bp, Homo sapien
actcagaaaactaccacgtgggcagagattaga

SEQ ID NO: 433740 - DNA, 33 bp, Homo sapien
actcagaaaactaccatgtgggcagagattaga

SEQ ID NO: 433741 - DNA, 33 bp, Homo sapien
acccttttaaacagccactgaattccataaagc

SEQ ID NO: 433742 - DNA, 33 bp, Homo sapien
acccttttaaacagccgctgaattccataaagc

SEQ ID NO: 433743 - DNA, 33 bp, Homo sapien
atttgttcagctatccagagatctaattcttca

SEQ ID NO: 433744 - DNA, 33 bp, Homo sapien
atttgttcagctatccggagatctaattcttca

SEQ ID NO: 433745 - DNA, 33 bp, Homo sapien
tttgtaactttgatcaatccatgctaggagctt

SEQ ID NO: 433746 - DNA, 33 bp, Homo sapien
tttgtaactttgatcagtccatgctaggagctt

SEQ ID NO: 433747 - DNA, 33 bp, Homo sapien
tgtgcagaagtaatccaactagaaggtgaaacc

SEQ ID NO: 433748 - DNA, 33 bp, Homo sapien
tgtgcagaagtaatccgactagaaggtgaaacc

SEQ ID NO: 433749 - DNA, 33 bp, Homo sapien
taatgggggattttcacataatgtaattgaaac

SEQ ID NO: 433750 - DNA, 33 bp, Homo sapien
taatgggggattttcagataatgtaattgaaac

SEQ ID NO: 433751 - DNA, 33 bp, Homo sapien
tcctttcctactcaacaattctattcatttatc

SEQ ID NO: 433752 - DNA, 33 bp, Homo sapien
tcctttcctactcaacgattctattcatttatc

SEQ ID NO: 433753 - DNA, 33 bp, Homo sapien
ggtctagaaaatgagacactaatatgcgtttca

SEQ ID NO: 433754 - DNA, 33 bp, Homo sapien
ggtctagaaaatgagagactaatatgcgtttca

SEQ ID NO: 433755 - DNA, 33 bp, Homo sapien
tagggaaaaccatggccaatagacttgggaact

SEQ ID NO: 433756 - DNA, 33 bp, Homo sapien
tagggaaaaccatggcgaatagacttgggaact

SEQ ID NO: 433757 - DNA, 33 bp, Homo sapien
cccaaaacagcaaacaaaagactgaaattttag

SEQ ID NO: 433758 - DNA, 33 bp, Homo sapien
cccaaaacagcaaacataagactgaaattttag

SEQ ID NO: 433759 - DNA, 33 bp, Homo sapien
ttgccttccttctccacattgctgtgactctcc

SEQ ID NO: 433760 - DNA, 33 bp, Homo sapien
ttgccttccttctccatattgctgtgactctcc

SEQ ID NO: 433761 - DNA, 33 bp, Homo sapien
cctatgtcactcaagcgcttacctttttcaaac

SEQ ID NO: 433762 - DNA, 33 bp, Homo sapien
cctatgtcactcaagctcttacctttttcaaac

SEQ ID NO: 433763 - DNA, 33 bp, Homo sapien
acaaggggaaaatacacaggtagcagacattat

SEQ ID NO: 433764 - DNA, 33 bp, Homo sapien
acaaggggaaaatacataggtagcagacattat

SEQ ID NO: 433765 - DNA, 33 bp, Homo sapien
gaaattttgaagcttaaggttgttccaattgta

SEQ ID NO: 433766 - DNA, 33 bp, Homo sapien
gaaattttgaagcttagggttgttccaattgta

SEQ ID NO: 433767 - DNA, 33 bp, Homo sapien
ctgagaagagctattacgttaaatcagaatcta

SEQ ID NO: 433768 - DNA, 33 bp, Homo sapien
ctgagaagagctattatgttaaatcagaatcta

SEQ ID NO: 433769 - DNA, 33 bp, Homo sapien
aaaaaaaatccatagaatatccagagtgatgct

SEQ ID NO: 433770 - DNA, 33 bp, Homo sapien
aaaaaaaatccatagactatccagagtgatgct

SEQ ID NO: 433771 - DNA, 33 bp, Homo sapien
aaggtggtcaccattacgctaagagaaatacat

SEQ ID NO: 433772 - DNA, 33 bp, Homo sapien
aaggtggtcaccattatgctaagagaaatacat

SEQ ID NO: 433773 - DNA, 33 bp, Homo sapien
acccttttcatcttaccgggctggcacttaagg

SEQ ID NO: 433774 - DNA, 33 bp, Homo sapien
acccttttcatcttactgggctggcacttaagg

SEQ ID NO: 433775 - DNA, 33 bp, Homo sapien
ttgctcaaattctgcaaatcttaataatgttgc

SEQ ID NO: 433776 - DNA, 33 bp, Homo sapien
ttgctcaaattctgcagatcttaataatgttgc

SEQ ID NO: 433777 - DNA, 33 bp, Homo sapien
tggaaacagaagggaacatagtctaatgagaaa

SEQ ID NO: 433778 - DNA, 33 bp, Homo sapien
tggaaacagaagggaagatagtctaatgagaaa

SEQ ID NO: 433779 - DNA, 33 bp, Homo sapien
atctttatgaattttcacttagcctttttatcc

SEQ ID NO: 433780 - DNA, 33 bp, Homo sapien
atctttatgaattttcgcttagcctttttatcc

SEQ ID NO: 433781 - DNA, 33 bp, Homo sapien
aagcatattctgcaaacgaataggatatgtttt

SEQ ID NO: 433782 - DNA, 33 bp, Homo sapien
aagcatattctgcaaatgaataggatatgtttt

SEQ ID NO: 433783 - DNA, 33 bp, Homo sapien
agagatgcagccctccaataatgattttgcatt

SEQ ID NO: 433784 - DNA, 33 bp, Homo sapien
agagatgcagccctccgataatgattttgcatt

SEQ ID NO: 433785 - DNA, 33 bp, Homo sapien
ctcttgataatgtgaacgggtctcagtcaatca

SEQ ID NO: 433786 - DNA, 33 bp, Homo sapien
ctcttgataatgtgaatgggtctcagtcaatca

SEQ ID NO: 433787 - DNA, 33 bp, Homo sapien
caggtttgttattttacgtcttgtctgctggtg

SEQ ID NO: 433788 - DNA, 33 bp, Homo sapien
caggtttgttattttatgtcttgtctgctggtg

SEQ ID NO: 433789 - DNA, 33 bp, Homo sapien
accatagactgtagcacatataagaccaaagaa

SEQ ID NO: 433790 - DNA, 33 bp, Homo sapien
accatagactgtagcatatataagaccaaagaa

SEQ ID NO: 433791 - DNA, 33 bp, Homo sapien
gctggctgttggtaacaattgtggttagctgaa

SEQ ID NO: 433792 - DNA, 33 bp, Homo sapien
gctggctgttggtaacgattgtggttagctgaa

SEQ ID NO: 433793 - DNA, 33 bp, Homo sapien
tatggattaaatcagacagtatgtgtgaaaaca

SEQ ID NO: 433794 - DNA, 33 bp, Homo sapien
tatggattaaatcagatagtatgtgtgaaaaca

SEQ ID NO: 433795 - DNA, 33 bp, Homo sapien
gactattgcatgggataaaatgtgctctattat

SEQ ID NO: 433796 - DNA, 33 bp, Homo sapien
gactattgcatgggatgaaatgtgctctattat

SEQ ID NO: 433797 - DNA, 33 bp, Homo sapien
agaaacacaaagaggcaattattattacagaag

SEQ ID NO: 433798 - DNA, 33 bp, Homo sapien
agaaacacaaagaggcgattattattacagaag

SEQ ID NO: 433799 - DNA, 33 bp, Homo sapien
gtatgacactgtataaagtgggttaccatttat

SEQ ID NO: 433800 - DNA, 33 bp, Homo sapien
gtatgacactgtataacgtgggttaccatttat

SEQ ID NO: 433801 - DNA, 33 bp, Homo sapien
ttttaaaagaataattcaactgaccacagtcaa

SEQ ID NO: 433802 - DNA, 33 bp, Homo sapien
ttttaaaagaataatttaactgaccacagtcaa

SEQ ID NO: 433803 - DNA, 33 bp, Homo sapien
ttgtgtaatgtgttaaagtaaaaatagagagaa

SEQ ID NO: 433804 - DNA, 33 bp, Homo sapien
ttgtgtaatgtgttaatgtaaaaatagagagaa

SEQ ID NO: 433805 - DNA, 33 bp, Homo sapien
agaaagttttctgggcacctttaataatcttcc

SEQ ID NO: 433806 - DNA, 33 bp, Homo sapien
agaaagttttctgggcgcctttaataatcttcc

SEQ ID NO: 433807 - DNA, 33 bp, Homo sapien
atattctattatcaaacacacttagagaatgta

SEQ ID NO: 433808 - DNA, 33 bp, Homo sapien
atattctattatcaaagacacttagagaatgta

SEQ ID NO: 433809 - DNA, 33 bp, Homo sapien
tgcatttagtgcataacaagcaaatggccttct

SEQ ID NO: 433810 - DNA, 33 bp, Homo sapien
tgcatttagtgcataagaagcaaatggccttct

SEQ ID NO: 433811 - DNA, 33 bp, Homo sapien
atgtttctgtagctgacgcttggaatgcataat

SEQ ID NO: 433812 - DNA, 33 bp, Homo sapien
atgtttctgtagctgatgcttggaatgcataat

SEQ ID NO: 433813 - DNA, 33 bp, Homo sapien
agagaataatgtcagaacagtaatgcaaatgac

SEQ ID NO: 433814 - DNA, 33 bp, Homo sapien
agagaataatgtcagagcagtaatgcaaatgac

SEQ ID NO: 433815 - DNA, 33 bp, Homo sapien
cagtccaagctcttgaagatgggattctgaact

SEQ ID NO: 433816 - DNA, 33 bp, Homo sapien
cagtccaagctcttgacgatgggattctgaact

SEQ ID NO: 433817 - DNA, 33 bp, Homo sapien
tttttgagtgtcagtgaaaagattgtattgaac

SEQ ID NO: 433818 - DNA, 33 bp, Homo sapien
tttttgagtgtcagtggaaagattgtattgaac

SEQ ID NO: 433819 - DNA, 33 bp, Homo sapien
gattcccactcatttacattttcaagactatct

SEQ ID NO: 433820 - DNA, 33 bp, Homo sapien
gattcccactcatttatattttcaagactatct

SEQ ID NO: 433821 - DNA, 33 bp, Homo sapien
ccaattctactagcgggcattttattattgatc

SEQ ID NO: 433822 - DNA, 33 bp, Homo sapien
ccaattctactagcggtcattttattattgatc

SEQ ID NO: 433823 - DNA, 33 bp, Homo sapien
gtagtcctattcacagaatgaacaggctcacaa

SEQ ID NO: 433824 - DNA, 33 bp, Homo sapien
gtagtcctattcacaggatgaacaggctcacaa

SEQ ID NO: 433825 - DNA, 33 bp, Homo sapien
tttatagttgacaaatcatgacacatgaggctg

SEQ ID NO: 433826 - DNA, 33 bp, Homo sapien
tttatagttgacaaattatgacacatgaggctg

SEQ ID NO: 433827 - DNA, 33 bp, Homo sapien
tgaatgagctggtcaaacaggagtcctcaaact

SEQ ID NO: 433828 - DNA, 33 bp, Homo sapien
tgaatgagctggtcaagcaggagtcctcaaact

SEQ ID NO: 433829 - DNA, 33 bp, Homo sapien
agagatcttggcataaacatacactaataataa

SEQ ID NO: 433830 - DNA, 33 bp, Homo sapien
agagatcttggcataagcatacactaataataa

SEQ ID NO: 433831 - DNA, 33 bp, Homo sapien
tttaatttgaaagaaaattatgttactgcttat

SEQ ID NO: 433832 - DNA, 33 bp, Homo sapien
tttaatttgaaagaaatttatgttactgcttat

SEQ ID NO: 433833 - DNA, 33 bp, Homo sapien
aaccagcttctcatgtcaattgtttcaaaacca

SEQ ID NO: 433834 - DNA, 33 bp, Homo sapien
aaccagcttctcatgttaattgtttcaaaacca

SEQ ID NO: 433835 - DNA, 33 bp, Homo sapien
gagatcttattgcccaacaacattctcaattta

SEQ ID NO: 433836 - DNA, 33 bp, Homo sapien
gagatcttattgcccagcaacattctcaattta

SEQ ID NO: 433837 - DNA, 33 bp, Homo sapien
ccctgggggaacacaaaatcactttcttgctaa

SEQ ID NO: 433838 - DNA, 33 bp, Homo sapien
ccctgggggaacacaacatcactttcttgctaa

SEQ ID NO: 433839 - DNA, 33 bp, Homo sapien
gtttatagttgaagagaaggttttgatgaattc

SEQ ID NO: 433840 - DNA, 33 bp, Homo sapien
gtttatagttgaagaggaggttttgatgaattc

SEQ ID NO: 433841 - DNA, 33 bp, Homo sapien
cctttgcactgttaaaaaacctttcatatgtgt

SEQ ID NO: 433842 - DNA, 33 bp, Homo sapien
cctttgcactgttaaagaacctttcatatgtgt

SEQ ID NO: 433843 - DNA, 33 bp, Homo sapien
cagataagatttaatacgggcaaaacaatttag

SEQ ID NO: 433844 - DNA, 33 bp, Homo sapien
cagataagatttaatatgggcaaaacaatttag

SEQ ID NO: 433845 - DNA, 33 bp, Homo sapien
tctatgcaaagcacaacgcttgaaaatgtagtt

SEQ ID NO: 433846 - DNA, 33 bp, Homo sapien
tctatgcaaagcacaatgcttgaaaatgtagtt

SEQ ID NO: 433847 - DNA, 33 bp, Homo sapien
agcagtcatggattgaagtgaagattttctatt

SEQ ID NO: 433848 - DNA, 33 bp, Homo sapien
agcagtcatggattgaggtgaagattttctatt

SEQ ID NO: 433849 - DNA, 33 bp, Homo sapien
ggcactctgcaaaataccatatgtggtaaaata

SEQ ID NO: 433850 - DNA, 33 bp, Homo sapien
ggcactctgcaaaatagcatatgtggtaaaata

SEQ ID NO: 433851 - DNA, 33 bp, Homo sapien
tgtacatacaagcataaacatattccttcttcc

SEQ ID NO: 433852 - DNA, 33 bp, Homo sapien
tgtacatacaagcatatacatattccttcttcc

SEQ ID NO: 433853 - DNA, 33 bp, Homo sapien
tgatttacaatttgaccctgaacgtttaaacaa

SEQ ID NO: 433854 - DNA, 33 bp, Homo sapien
tgatttacaatttgactctgaacgtttaaacaa

SEQ ID NO: 433855 - DNA, 33 bp, Homo sapien
aaacaacccaagctacaatgaaaacatgatcaa

SEQ ID NO: 433856 - DNA, 33 bp, Homo sapien
aaacaacccaagctacgatgaaaacatgatcaa

SEQ ID NO: 433857 - DNA, 33 bp, Homo sapien
ggttctctaagactaacctgtaattgtggtttt

SEQ ID NO: 433858 - DNA, 33 bp, Homo sapien
ggttctctaagactaatctgtaattgtggtttt

SEQ ID NO: 433859 - DNA, 33 bp, Homo sapien
agtgaagcaattcggaatcatctcagcatctgc

SEQ ID NO: 433860 - DNA, 33 bp, Homo sapien
agtgaagcaattcggagtcatctcagcatctgc

SEQ ID NO: 433861 - DNA, 33 bp, Homo sapien
tataaagatgaacacaatagacaagttccgggc

SEQ ID NO: 433862 - DNA, 33 bp, Homo sapien
tataaagatgaacacactagacaagttccgggc

SEQ ID NO: 433863 - DNA, 33 bp, Homo sapien
taacaacaatctcttgaacttttctgtgttgtt

SEQ ID NO: 433864 - DNA, 33 bp, Homo sapien
taacaacaatctcttgcacttttctgtgttgtt

SEQ ID NO: 433865 - DNA, 33 bp, Homo sapien
ggaaagatacattttaggcccccatgcatttgt

SEQ ID NO: 433866 - DNA, 33 bp, Homo sapien
ggaaagatacattttatgcccccatgcatttgt

SEQ ID NO: 433867 - DNA, 33 bp, Homo sapien
ttgatgaaaatgactacatttgtgacctactgt

SEQ ID NO: 433868 - DNA, 33 bp, Homo sapien
ttgatgaaaatgactatatttgtgacctactgt

SEQ ID NO: 433869 - DNA, 33 bp, Homo sapien
tggaagccatggtctaagtggcagggcatctaa

SEQ ID NO: 433870 - DNA, 33 bp, Homo sapien
tggaagccatggtctatgtggcagggcatctaa

SEQ ID NO: 433871 - DNA, 33 bp, Homo sapien
tagcagccttccgggacgccaggatgccattac

SEQ ID NO: 433872 - DNA, 33 bp, Homo sapien
tagcagccttccgggatgccaggatgccattac

SEQ ID NO: 433873 - DNA, 33 bp, Homo sapien
ctgcttttttattattcaacagtattccgtgat

SEQ ID NO: 433874 - DNA, 33 bp, Homo sapien
ctgcttttttattattgaacagtattccgtgat

SEQ ID NO: 433875 - DNA, 33 bp, Homo sapien
ttgtttcatattttaaagccagagagacacagc

SEQ ID NO: 433876 - DNA, 33 bp, Homo sapien
ttgtttcatattttaatgccagagagacacagc

SEQ ID NO: 433877 - DNA, 33 bp, Homo sapien
tgcaaagtgctgcccagtagctttaagaaccac

SEQ ID NO: 433878 - DNA, 33 bp, Homo sapien
tgcaaagtgctgcccattagctttaagaaccac

SEQ ID NO: 433879 - DNA, 33 bp, Homo sapien
ttaactgagagttccaaaaatcgaaatggccca

SEQ ID NO: 433880 - DNA, 33 bp, Homo sapien
ttaactgagagttccagaaatcgaaatggccca

SEQ ID NO: 433881 - DNA, 33 bp, Homo sapien
atatccaaatgacaaaaaggagtcagccacaag

SEQ ID NO: 433882 - DNA, 33 bp, Homo sapien
atatccaaatgacaaagaggagtcagccacaag

SEQ ID NO: 433883 - DNA, 33 bp, Homo sapien
gcccagaagactttcaaaacttgtggctgactc

SEQ ID NO: 433884 - DNA, 33 bp, Homo sapien
gcccagaagactttcataacttgtggctgactc

SEQ ID NO: 433885 - DNA, 33 bp, Homo sapien
aaatattcaagtcctacattctagctattttca

SEQ ID NO: 433886 - DNA, 33 bp, Homo sapien
aaatattcaagtcctatattctagctattttca

SEQ ID NO: 433887 - DNA, 33 bp, Homo sapien
gccagacaccatgttcccagtctctagggagcc

SEQ ID NO: 433888 - DNA, 33 bp, Homo sapien
gccagacaccatgttcgcagtctctagggagcc

SEQ ID NO: 433889 - DNA, 33 bp, Homo sapien
ggcaactatgaaagagaactaattgcttaataa

SEQ ID NO: 433890 - DNA, 33 bp, Homo sapien
ggcaactatgaaagaggactaattgcttaataa

SEQ ID NO: 433891 - DNA, 33 bp, Homo sapien
tcaacaaacaactgcacgacagctaggtcctct

SEQ ID NO: 433892 - DNA, 33 bp, Homo sapien
tcaacaaacaactgcatgacagctaggtcctct

SEQ ID NO: 433893 - DNA, 33 bp, Homo sapien
agattagttaagacaacctctcaacttcaagta

SEQ ID NO: 433894 - DNA, 33 bp, Homo sapien
agattagttaagacaatctctcaacttcaagta

SEQ ID NO: 433895 - DNA, 33 bp, Homo sapien
ggagtacagtgcctagaatacatctctgtagtc

SEQ ID NO: 433896 - DNA, 33 bp, Homo sapien
ggagtacagtgcctagtatacatctctgtagtc

SEQ ID NO: 433897 - DNA, 33 bp, Homo sapien
aaaaaaagtgtccatcacttggaagattagctc

SEQ ID NO: 433898 - DNA, 33 bp, Homo sapien
aaaaaaagtgtccatctcttggaagattagctc

SEQ ID NO: 433899 - DNA, 33 bp, Homo sapien
caattgaaaacaagaacgttgacaaaaggagtc

SEQ ID NO: 433900 - DNA, 33 bp, Homo sapien
caattgaaaacaagaatgttgacaaaaggagtc

SEQ ID NO: 433901 - DNA, 33 bp, Homo sapien
tcgtgtgcatggccacgcatggtgggctcagaa

SEQ ID NO: 433902 - DNA, 33 bp, Homo sapien
tcgtgtgcatggccactcatggtgggctcagaa

SEQ ID NO: 433903 - DNA, 33 bp, Homo sapien
aaagttatctatgagtcaaaatctgacaggtga

SEQ ID NO: 433904 - DNA, 33 bp, Homo sapien
aaagttatctatgagttaaaatctgacaggtga

SEQ ID NO: 433905 - DNA, 33 bp, Homo sapien
attaaattcaactctaccctgctttgatttcat

SEQ ID NO: 433906 - DNA, 33 bp, Homo sapien
attaaattcaactctatcctgctttgatttcat

SEQ ID NO: 433907 - DNA, 33 bp, Homo sapien
gaagactagctggaagcaactatgtagaccctt

SEQ ID NO: 433908 - DNA, 33 bp, Homo sapien
gaagactagctggaaggaactatgtagaccctt

SEQ ID NO: 433909 - DNA, 33 bp, Homo sapien
cagagccctacttaacaatgatctttggggaat

SEQ ID NO: 433910 - DNA, 33 bp, Homo sapien
cagagccctacttaacgatgatctttggggaat

SEQ ID NO: 433911 - DNA, 33 bp, Homo sapien
tatgaacaactatacaacaacgaatgtataact

SEQ ID NO: 433912 - DNA, 33 bp, Homo sapien
tatgaacaactatacaccaacgaatgtataact

SEQ ID NO: 433913 - DNA, 33 bp, Homo sapien
aaactactcctgtttgaagatcctatatctaga

SEQ ID NO: 433914 - DNA, 33 bp, Homo sapien
aaactactcctgtttgcagatcctatatctaga

SEQ ID NO: 433915 - DNA, 33 bp, Homo sapien
atctatttaactaaaagcaagtttgtcatctct

SEQ ID NO: 433916 - DNA, 33 bp, Homo sapien
atctatttaactaaaatcaagtttgtcatctct

SEQ ID NO: 433917 - DNA, 33 bp, Homo sapien
caaagaggcatggttaaaatgtttacaatggca

SEQ ID NO: 433918 - DNA, 33 bp, Homo sapien
caaagaggcatggttagaatgtttacaatggca

SEQ ID NO: 433919 - DNA, 33 bp, Homo sapien
tgtatacaaagtagcaaacatttaggaggaaca

SEQ ID NO: 433920 - DNA, 33 bp, Homo sapien
tgtatacaaagtagcagacatttaggaggaaca

SEQ ID NO: 433921 - DNA, 33 bp, Homo sapien
agtatcacaaaaagaaatattcacactgacttt

SEQ ID NO: 433922 - DNA, 33 bp, Homo sapien
agtatcacaaaaagaagtattcacactgacttt

SEQ ID NO: 433923 - DNA, 33 bp, Homo sapien
ctgcaaagtcatggaacatttagtagctgttca

SEQ ID NO: 433924 - DNA, 33 bp, Homo sapien
ctgcaaagtcatggaatatttagtagctgttca

SEQ ID NO: 433925 - DNA, 33 bp, Homo sapien
gagtattaaatgacaccgtagatgccgtatctg

SEQ ID NO: 433926 - DNA, 33 bp, Homo sapien
gagtattaaatgacactgtagatgccgtatctg

SEQ ID NO: 433927 - DNA, 33 bp, Homo sapien
ctgtttgctaaacctgaattagtgacatggaca

SEQ ID NO: 433928 - DNA, 33 bp, Homo sapien
ctgtttgctaaacctgtattagtgacatggaca

SEQ ID NO: 433929 - DNA, 33 bp, Homo sapien
ctcttacattgttgaacggagggcttgagcaca

SEQ ID NO: 433930 - DNA, 33 bp, Homo sapien
ctcttacattgttgaatggagggcttgagcaca

SEQ ID NO: 433931 - DNA, 33 bp, Homo sapien
cactgcatgggaataggatttagcgatttagtg

SEQ ID NO: 433932 - DNA, 33 bp, Homo sapien
cactgcatgggaatagtatttagcgatttagtg

SEQ ID NO: 433933 - DNA, 33 bp, Homo sapien
ctgacttccccaaatgaacctacctcttgtatt

SEQ ID NO: 433934 - DNA, 33 bp, Homo sapien
ctgacttccccaaatggacctacctcttgtatt

SEQ ID NO: 433935 - DNA, 33 bp, Homo sapien
ttttctttacatttataagtggtatcaagatag

SEQ ID NO: 433936 - DNA, 33 bp, Homo sapien
ttttctttacatttatgagtggtatcaagatag

SEQ ID NO: 433937 - DNA, 33 bp, Homo sapien
ttccccagacaccagaaggttcaatcctcactt

SEQ ID NO: 433938 - DNA, 33 bp, Homo sapien
ttccccagacaccagatggttcaatcctcactt

SEQ ID NO: 433939 - DNA, 33 bp, Homo sapien
aagcaggttgtggaaacagtgtgacaagggtgg

SEQ ID NO: 433940 - DNA, 33 bp, Homo sapien
aagcaggttgtggaaatagtgtgacaagggtgg

SEQ ID NO: 433941 - DNA, 33 bp, Homo sapien
attaagttcaagccagcaaccatatttcaagcc

SEQ ID NO: 433942 - DNA, 33 bp, Homo sapien
attaagttcaagccaggaaccatatttcaagcc

SEQ ID NO: 433943 - DNA, 33 bp, Homo sapien
tcgttttctaattctcaaagaagataactctat

SEQ ID NO: 433944 - DNA, 33 bp, Homo sapien
tcgttttctaattctcgaagaagataactctat

SEQ ID NO: 433945 - DNA, 33 bp, Homo sapien
tcattatgttaggtgaaataagatagagaacaa

SEQ ID NO: 433946 - DNA, 33 bp, Homo sapien
tcattatgttaggtgagataagatagagaacaa

SEQ ID NO: 433947 - DNA, 33 bp, Homo sapien
tgtcatcgctttccaaattactttagaaatgcc

SEQ ID NO: 433948 - DNA, 33 bp, Homo sapien
tgtcatcgctttccaagttactttagaaatgcc

SEQ ID NO: 433949 - DNA, 33 bp, Homo sapien
ttcctagagtgagtaactgagaacaataataca

SEQ ID NO: 433950 - DNA, 33 bp, Homo sapien
ttcctagagtgagtaattgagaacaataataca

SEQ ID NO: 433951 - DNA, 33 bp, Homo sapien
acattaagacattgaaagatgctaactttttgt

SEQ ID NO: 433952 - DNA, 33 bp, Homo sapien
acattaagacattgaatgatgctaactttttgt

SEQ ID NO: 433953 - DNA, 33 bp, Homo sapien
tataatatctgattcacacagtgctgatgttgt

SEQ ID NO: 433954 - DNA, 33 bp, Homo sapien
tataatatctgattcatacagtgctgatgttgt

SEQ ID NO: 433955 - DNA, 33 bp, Homo sapien
ttgcaatgatgttatcggaaaaatgtttgtcac

SEQ ID NO: 433956 - DNA, 33 bp, Homo sapien
ttgcaatgatgttatctgaaaaatgtttgtcac

SEQ ID NO: 433957 - DNA, 33 bp, Homo sapien
catctcattaccgcaacccaccctgtctttgtt

SEQ ID NO: 433958 - DNA, 33 bp, Homo sapien
catctcattaccgcaatccaccctgtctttgtt

SEQ ID NO: 433959 - DNA, 33 bp, Homo sapien
ttgaattccgattagcagatctctgatttttga

SEQ ID NO: 433960 - DNA, 33 bp, Homo sapien
ttgaattccgattagcggatctctgatttttga

SEQ ID NO: 433961 - DNA, 33 bp, Homo sapien
cttttggatttaaggcccttagttcttgtttat

SEQ ID NO: 433962 - DNA, 33 bp, Homo sapien
cttttggatttaaggctcttagttcttgtttat

SEQ ID NO: 433963 - DNA, 33 bp, Homo sapien
atgagggtcgagtttacagtaaatactccaaaa

SEQ ID NO: 433964 - DNA, 33 bp, Homo sapien
atgagggtcgagtttatagtaaatactccaaaa

SEQ ID NO: 433965 - DNA, 33 bp, Homo sapien
tttctttagtcggggagcatctttctctgacag

SEQ ID NO: 433966 - DNA, 33 bp, Homo sapien
tttctttagtcggggatcatctttctctgacag

SEQ ID NO: 433967 - DNA, 33 bp, Homo sapien
ttgatctaatcgaatcaaaaatttaggcccatt

SEQ ID NO: 433968 - DNA, 33 bp, Homo sapien
ttgatctaatcgaatcgaaaatttaggcccatt

SEQ ID NO: 433969 - DNA, 33 bp, Homo sapien
tttatttcaaatcaggaaaagtattagacacac

SEQ ID NO: 433970 - DNA, 33 bp, Homo sapien
tttatttcaaatcagggaaagtattagacacac

SEQ ID NO: 433971 - DNA, 33 bp, Homo sapien
accttgtcaaccctcgacattttcaaaacttta

SEQ ID NO: 433972 - DNA, 33 bp, Homo sapien
accttgtcaaccctcggcattttcaaaacttta

SEQ ID NO: 433973 - DNA, 33 bp, Homo sapien
aatttgacagcctaagcatattttgcgtgaaca

SEQ ID NO: 433974 - DNA, 33 bp, Homo sapien
aatttgacagcctaagtatattttgcgtgaaca

SEQ ID NO: 433975 - DNA, 33 bp, Homo sapien
ttaagttccaactcacagctaggatgctaacca

SEQ ID NO: 433976 - DNA, 33 bp, Homo sapien
ttaagttccaactcacggctaggatgctaacca

SEQ ID NO: 433977 - DNA, 33 bp, Homo sapien
acagatgacttgagaacaaaaaaggcaaggcac

SEQ ID NO: 433978 - DNA, 33 bp, Homo sapien
acagatgacttgagaataaaaaaggcaaggcac

SEQ ID NO: 433979 - DNA, 33 bp, Homo sapien
gttttgcccccaaggaaggttgatggcacttag

SEQ ID NO: 433980 - DNA, 33 bp, Homo sapien
gttttgcccccaaggatggttgatggcacttag

SEQ ID NO: 433981 - DNA, 33 bp, Homo sapien
tttatatatcacgctacgtgctttgggtgtaaa

SEQ ID NO: 433982 - DNA, 33 bp, Homo sapien
tttatatatcacgctatgtgctttgggtgtaaa

SEQ ID NO: 433983 - DNA, 33 bp, Homo sapien
agagtagcatatataaatggttgctctcgtata

SEQ ID NO: 433984 - DNA, 33 bp, Homo sapien
agagtagcatatataagtggttgctctcgtata

SEQ ID NO: 433985 - DNA, 33 bp, Homo sapien
actctttcctagtgtggacattaatcaaagttt

SEQ ID NO: 433986 - DNA, 33 bp, Homo sapien
actctttcctagtgtgtacattaatcaaagttt

SEQ ID NO: 433987 - DNA, 33 bp, Homo sapien
aaatgattgactccccaggattgattaacccag

SEQ ID NO: 433988 - DNA, 33 bp, Homo sapien
aaatgattgactcccccggattgattaacccag

SEQ ID NO: 433989 - DNA, 33 bp, Homo sapien
attgaatgcaggcttaaatagttccctctacct

SEQ ID NO: 433990 - DNA, 33 bp, Homo sapien
attgaatgcaggcttagatagttccctctacct

SEQ ID NO: 433991 - DNA, 33 bp, Homo sapien
tgcagaggtctgattacggtatggtgtcagttc

SEQ ID NO: 433992 - DNA, 33 bp, Homo sapien
tgcagaggtctgattatggtatggtgtcagttc

SEQ ID NO: 433993 - DNA, 33 bp, Homo sapien
cccagtggccatgaaccaccacaaggctgtcat

SEQ ID NO: 433994 - DNA, 33 bp, Homo sapien
cccagtggccatgaacgaccacaaggctgtcat

SEQ ID NO: 433995 - DNA, 33 bp, Homo sapien
ggtcatgacagctttccgaaaatacaccaatgc

SEQ ID NO: 433996 - DNA, 33 bp, Homo sapien
ggtcatgacagctttctgaaaatacaccaatgc

SEQ ID NO: 433997 - DNA, 33 bp, Homo sapien
tgatttccaactgcaaatgggacatggcatgag

SEQ ID NO: 433998 - DNA, 33 bp, Homo sapien
tgatttccaactgcaattgggacatggcatgag

SEQ ID NO: 433999 - DNA, 33 bp, Homo sapien
gaatttcagcaggataaagagatgagtggtcca

SEQ ID NO: 434000 - DNA, 33 bp, Homo sapien
gaatttcagcaggatagagagatgagtggtcca

SEQ ID NO: 434001 - DNA, 33 bp, Homo sapien
ttatcgccaagtagcaaattttagttccttgcc

SEQ ID NO: 434002 - DNA, 33 bp, Homo sapien
ttatcgccaagtagcagattttagttccttgcc

SEQ ID NO: 434003 - DNA, 33 bp, Homo sapien
cagaagactgcaaaacaatgtagtaataatgca

SEQ ID NO: 434004 - DNA, 33 bp, Homo sapien
cagaagactgcaaaaccatgtagtaataatgca

SEQ ID NO: 434005 - DNA, 33 bp, Homo sapien
acatgatgctactggaagaataatcagaagtca

SEQ ID NO: 434006 - DNA, 33 bp, Homo sapien
acatgatgctactggaggaataatcagaagtca

SEQ ID NO: 434007 - DNA, 33 bp, Homo sapien
tcaacttccttttaccaaattagatgttgttgt

SEQ ID NO: 434008 - DNA, 33 bp, Homo sapien
tcaacttccttttacctaattagatgttgttgt

SEQ ID NO: 434009 - DNA, 33 bp, Homo sapien
tgaagactagctgaaacgtggaagagaaaaaaa

SEQ ID NO: 434010 - DNA, 33 bp, Homo sapien
tgaagactagctgaaatgtggaagagaaaaaaa

SEQ ID NO: 434011 - DNA, 33 bp, Homo sapien
agctgggttgctgtaccacccatatcatgtgca

SEQ ID NO: 434012 - DNA, 33 bp, Homo sapien
agctgggttgctgtactacccatatcatgtgca

SEQ ID NO: 434013 - DNA, 33 bp, Homo sapien
aaaaaggtgtcaagacaattgcattagaggtaa

SEQ ID NO: 434014 - DNA, 33 bp, Homo sapien
aaaaaggtgtcaagacgattgcattagaggtaa

SEQ ID NO: 434015 - DNA, 33 bp, Homo sapien
cagtggtcaagagctcaaagcttgaagctagat

SEQ ID NO: 434016 - DNA, 33 bp, Homo sapien
cagtggtcaagagctcgaagcttgaagctagat

SEQ ID NO: 434017 - DNA, 33 bp, Homo sapien
ttgtaaagcaaaaagaagctattcgttaacctc

SEQ ID NO: 434018 - DNA, 33 bp, Homo sapien
ttgtaaagcaaaaagaggctattcgttaacctc

SEQ ID NO: 434019 - DNA, 33 bp, Homo sapien
ttcaatttttgtgtaaacttctctataatatgt

SEQ ID NO: 434020 - DNA, 33 bp, Homo sapien
ttcaatttttgtgtaagcttctctataatatgt

SEQ ID NO: 434021 - DNA, 33 bp, Homo sapien
taacttcctcaaagcaggtttttaaagattacc

SEQ ID NO: 434022 - DNA, 33 bp, Homo sapien
taacttcctcaaagcatgtttttaaagattacc

SEQ ID NO: 434023 - DNA, 33 bp, Homo sapien
atcaacatctgcagaaaaggagtgattacttga

SEQ ID NO: 434024 - DNA, 33 bp, Homo sapien
atcaacatctgcagaagaggagtgattacttga

SEQ ID NO: 434025 - DNA, 33 bp, Homo sapien
gttaatgtttggtactaacaacgcaaacaggta

SEQ ID NO: 434026 - DNA, 33 bp, Homo sapien
gttaatgtttggtactgacaacgcaaacaggta

SEQ ID NO: 434027 - DNA, 33 bp, Homo sapien
tcacctagtgtagtatcagccatacggaaagag

SEQ ID NO: 434028 - DNA, 33 bp, Homo sapien
tcacctagtgtagtattagccatacggaaagag

SEQ ID NO: 434029 - DNA, 33 bp, Homo sapien
gaattgccttcccaaaatgcttatagtgtccct

SEQ ID NO: 434030 - DNA, 33 bp, Homo sapien
gaattgccttcccaaagtgcttatagtgtccct

SEQ ID NO: 434031 - DNA, 33 bp, Homo sapien
tttgtgcataaagaagcatagaagtagagtgtg

SEQ ID NO: 434032 - DNA, 33 bp, Homo sapien
tttgtgcataaagaagtatagaagtagagtgtg

SEQ ID NO: 434033 - DNA, 33 bp, Homo sapien
ggaaagctcataaatacaaaagagaagtccttg

SEQ ID NO: 434034 - DNA, 33 bp, Homo sapien
ggaaagctcataaatagaaaagagaagtccttg

SEQ ID NO: 434035 - DNA, 33 bp, Homo sapien
agctatgaagaatgaaatagtcaaaggaattca

SEQ ID NO: 434036 - DNA, 33 bp, Homo sapien
agctatgaagaatgaagtagtcaaaggaattca

SEQ ID NO: 434037 - DNA, 33 bp, Homo sapien
acatagagacaatctaaaagaactaatgtttct

SEQ ID NO: 434038 - DNA, 33 bp, Homo sapien
acatagagacaatctagaagaactaatgtttct

SEQ ID NO: 434039 - DNA, 33 bp, Homo sapien
tagctgctagagtgaaagaaaaaccttgtggca

SEQ ID NO: 434040 - DNA, 33 bp, Homo sapien
tagctgctagagtgaacgaaaaaccttgtggca

SEQ ID NO: 434041 - DNA, 33 bp, Homo sapien
ggtaatggaaaactgcaacagacaaatccaggc

SEQ ID NO: 434042 - DNA, 33 bp, Homo sapien
ggtaatggaaaactgcgacagacaaatccaggc

SEQ ID NO: 434043 - DNA, 33 bp, Homo sapien
aaataagaaatttgaaaacagattgaaaatagt

SEQ ID NO: 434044 - DNA, 33 bp, Homo sapien
aaataagaaatttgaagacagattgaaaatagt

SEQ ID NO: 434045 - DNA, 33 bp, Homo sapien
ctttgtcattagtaacaacttttgtctaacaca

SEQ ID NO: 434046 - DNA, 33 bp, Homo sapien
ctttgtcattagtaacgacttttgtctaacaca

SEQ ID NO: 434047 - DNA, 33 bp, Homo sapien
aagttgggggatgatacggtagagataggcata

SEQ ID NO: 434048 - DNA, 33 bp, Homo sapien
aagttgggggatgatatggtagagataggcata

SEQ ID NO: 434049 - DNA, 33 bp, Homo sapien
gaggtagcagatgaaaagggagcacagttgtaa

SEQ ID NO: 434050 - DNA, 33 bp, Homo sapien
gaggtagcagatgaaaggggagcacagttgtaa

SEQ ID NO: 434051 - DNA, 33 bp, Homo sapien
gatggattgcaccacactgagtaaaatagaaat

SEQ ID NO: 434052 - DNA, 33 bp, Homo sapien
gatggattgcaccacattgagtaaaatagaaat

SEQ ID NO: 434053 - DNA, 33 bp, Homo sapien
cttttccctactggaaccagttgataaattgtt

SEQ ID NO: 434054 - DNA, 33 bp, Homo sapien
cttttccctactggaatcagttgataaattgtt

SEQ ID NO: 434055 - DNA, 33 bp, Homo sapien
tttcaacttgaaaacactcttctggtagctgac

SEQ ID NO: 434056 - DNA, 33 bp, Homo sapien
tttcaacttgaaaacattcttctggtagctgac

SEQ ID NO: 434057 - DNA, 33 bp, Homo sapien
caaaactggcacccagaaaaattagctgacatg

SEQ ID NO: 434058 - DNA, 33 bp, Homo sapien
caaaactggcacccaggaaaattagctgacatg

SEQ ID NO: 434059 - DNA, 33 bp, Homo sapien
ttacatcagttggagaagttgaaaaaagtacat

SEQ ID NO: 434060 - DNA, 33 bp, Homo sapien
ttacatcagttggagatgttgaaaaaagtacat

SEQ ID NO: 434061 - DNA, 33 bp, Homo sapien
tcgtccaatgcttaccacagcaatatacaagtt

SEQ ID NO: 434062 - DNA, 33 bp, Homo sapien
tcgtccaatgcttacctcagcaatatacaagtt

SEQ ID NO: 434063 - DNA, 33 bp, Homo sapien
aattgagagatgagtaagtgaagctacaattta

SEQ ID NO: 434064 - DNA, 33 bp, Homo sapien
aattgagagatgagtatgtgaagctacaattta

SEQ ID NO: 434065 - DNA, 33 bp, Homo sapien
attttccggcaaacagacagattagttttcacc

SEQ ID NO: 434066 - DNA, 33 bp, Homo sapien
attttccggcaaacaggcagattagttttcacc

SEQ ID NO: 434067 - DNA, 33 bp, Homo sapien
ttgccagctaaaatccaatactcaattatactg

SEQ ID NO: 434068 - DNA, 33 bp, Homo sapien
ttgccagctaaaatccgatactcaattatactg

SEQ ID NO: 434069 - DNA, 33 bp, Homo sapien
ccttgtacacactaacaatggatgcatacatta

SEQ ID NO: 434070 - DNA, 33 bp, Homo sapien
ccttgtacacactaacgatggatgcatacatta

SEQ ID NO: 434071 - DNA, 33 bp, Homo sapien
gtcatctcatgctgaaaaaatattgaattttcc

SEQ ID NO: 434072 - DNA, 33 bp, Homo sapien
gtcatctcatgctgaagaaatattgaattttcc

SEQ ID NO: 434073 - DNA, 33 bp, Homo sapien
gaaataaactcagaatcagaacacctggattca

SEQ ID NO: 434074 - DNA, 33 bp, Homo sapien
gaaataaactcagaatgagaacacctggattca

SEQ ID NO: 434075 - DNA, 33 bp, Homo sapien
gatgattgacatacataaaccaattagagagca

SEQ ID NO: 434076 - DNA, 33 bp, Homo sapien
gatgattgacatacatgaaccaattagagagca

SEQ ID NO: 434077 - DNA, 33 bp, Homo sapien
ggcttggaccattgtaaatgaggatgggaaata

SEQ ID NO: 434078 - DNA, 33 bp, Homo sapien
ggcttggaccattgtacatgaggatgggaaata

SEQ ID NO: 434079 - DNA, 33 bp, Homo sapien
atgcttcacctcaaatcatgtgagtcaacattt

SEQ ID NO: 434080 - DNA, 33 bp, Homo sapien
atgcttcacctcaaattatgtgagtcaacattt

SEQ ID NO: 434081 - DNA, 33 bp, Homo sapien
gaccaggaagaactcaacctggaggagtatggg

SEQ ID NO: 434082 - DNA, 33 bp, Homo sapien
gaccaggaagaactcagcctggaggagtatggg

SEQ ID NO: 434083 - DNA, 33 bp, Homo sapien
tatattatttcctaatgatctccagtgaagtca

SEQ ID NO: 434084 - DNA, 33 bp, Homo sapien
tatattatttcctaattatctccagtgaagtca

SEQ ID NO: 434085 - DNA, 33 bp, Homo sapien
atatgtgctttagatgaaggtctgtaaactttt

SEQ ID NO: 434086 - DNA, 33 bp, Homo sapien
atatgtgctttagatgcaggtctgtaaactttt

SEQ ID NO: 434087 - DNA, 33 bp, Homo sapien
gtatgtgttctggatgcaccattgaccagccat

SEQ ID NO: 434088 - DNA, 33 bp, Homo sapien
gtatgtgttctggatgtaccattgaccagccat

SEQ ID NO: 434089 - DNA, 33 bp, Homo sapien
tacagtaacgaaatacacaacattcctggtcca

SEQ ID NO: 434090 - DNA, 33 bp, Homo sapien
tacagtaacgaaatacgcaacattcctggtcca

SEQ ID NO: 434091 - DNA, 33 bp, Homo sapien
ccttttatgttcaagaacttagtcccatgtcac

SEQ ID NO: 434092 - DNA, 33 bp, Homo sapien
ccttttatgttcaagagcttagtcccatgtcac

SEQ ID NO: 434093 - DNA, 33 bp, Homo sapien
gcattacaactactgcaaaaagcctggacattt

SEQ ID NO: 434094 - DNA, 33 bp, Homo sapien
gcattacaactactgcgaaaagcctggacattt

SEQ ID NO: 434095 - DNA, 33 bp, Homo sapien
ctaaaatcctgagtccagctatcttttcccccc

SEQ ID NO: 434096 - DNA, 33 bp, Homo sapien
ctaaaatcctgagtccggctatcttttcccccc

SEQ ID NO: 434097 - DNA, 33 bp, Homo sapien
actcattctccaaagccgaaaaagacatctctc

SEQ ID NO: 434098 - DNA, 33 bp, Homo sapien
actcattctccaaagctgaaaaagacatctctc

SEQ ID NO: 434099 - DNA, 33 bp, Homo sapien
tctataggaatggaaggcatcattgggtgttaa

SEQ ID NO: 434100 - DNA, 33 bp, Homo sapien
tctataggaatggaagtcatcattgggtgttaa

SEQ ID NO: 434101 - DNA, 33 bp, Homo sapien
gaattcaagtgaagtaagatggtactaaaggca

SEQ ID NO: 434102 - DNA, 33 bp, Homo sapien
gaattcaagtgaagtatgatggtactaaaggca

SEQ ID NO: 434103 - DNA, 33 bp, Homo sapien
agatgagtatgccctaccccaaaatactggaca

SEQ ID NO: 434104 - DNA, 33 bp, Homo sapien
agatgagtatgccctatcccaaaatactggaca

SEQ ID NO: 434105 - DNA, 33 bp, Homo sapien
ataaccatgagatcacaaaacaggaaaattaca

SEQ ID NO: 434106 - DNA, 33 bp, Homo sapien
ataaccatgagatcacgaaacaggaaaattaca

SEQ ID NO: 434107 - DNA, 33 bp, Homo sapien
acttttattattagcccatgtactattagagat

SEQ ID NO: 434108 - DNA, 33 bp, Homo sapien
acttttattattagccgatgtactattagagat

SEQ ID NO: 434109 - DNA, 33 bp, Homo sapien
ttagcaaacagaaatacagattcaacacaaaat

SEQ ID NO: 434110 - DNA, 33 bp, Homo sapien
ttagcaaacagaaatatagattcaacacaaaat

SEQ ID NO: 434111 - DNA, 33 bp, Homo sapien
taattcaatgggatcaaagtaagatggctgctt

SEQ ID NO: 434112 - DNA, 33 bp, Homo sapien
taattcaatgggatcagagtaagatggctgctt

SEQ ID NO: 434113 - DNA, 33 bp, Homo sapien
ccactgaaatgcctaaccttgtttttactctaa

SEQ ID NO: 434114 - DNA, 33 bp, Homo sapien
ccactgaaatgcctaatcttgtttttactctaa

SEQ ID NO: 434115 - DNA, 33 bp, Homo sapien
cactggactgaaattaaacttcagaccaattgg

SEQ ID NO: 434116 - DNA, 33 bp, Homo sapien
cactggactgaaattatacttcagaccaattgg

SEQ ID NO: 434117 - DNA, 33 bp, Homo sapien
ggagggatgggttccactaggtctaaagaggca

SEQ ID NO: 434118 - DNA, 33 bp, Homo sapien
ggagggatgggttccattaggtctaaagaggca

SEQ ID NO: 434119 - DNA, 33 bp, Homo sapien
agatatgtgccatcccaacattgtattcacata

SEQ ID NO: 434120 - DNA, 33 bp, Homo sapien
agatatgtgccatccccacattgtattcacata

SEQ ID NO: 434121 - DNA, 33 bp, Homo sapien
gcaatgttacacatgccatgtttgaagttgttg

SEQ ID NO: 434122 - DNA, 33 bp, Homo sapien
gcaatgttacacatgctatgtttgaagttgttg

SEQ ID NO: 434123 - DNA, 33 bp, Homo sapien
tgagaaagacctgaaagcatttgtggaaatggg

SEQ ID NO: 434124 - DNA, 33 bp, Homo sapien
tgagaaagacctgaaatcatttgtggaaatggg

SEQ ID NO: 434125 - DNA, 33 bp, Homo sapien
attccttcagtagaggaataacagaatttccta

SEQ ID NO: 434126 - DNA, 33 bp, Homo sapien
attccttcagtagagggataacagaatttccta

SEQ ID NO: 434127 - DNA, 33 bp, Homo sapien
aggaatggcacataagacctagattcttctgct

SEQ ID NO: 434128 - DNA, 33 bp, Homo sapien
aggaatggcacataaggcctagattcttctgct

SEQ ID NO: 434129 - DNA, 33 bp, Homo sapien
tccttcttcagactataaagtttccagccctat

SEQ ID NO: 434130 - DNA, 33 bp, Homo sapien
tccttcttcagactatgaagtttccagccctat

SEQ ID NO: 434131 - DNA, 33 bp, Homo sapien
gcctgtgacacagttcccgaaaatcctgagaac

SEQ ID NO: 434132 - DNA, 33 bp, Homo sapien
gcctgtgacacagttctcgaaaatcctgagaac

SEQ ID NO: 434133 - DNA, 33 bp, Homo sapien
taaaaagttatcctctaaagagctggaatcaat

SEQ ID NO: 434134 - DNA, 33 bp, Homo sapien
taaaaagttatcctctgaagagctggaatcaat

SEQ ID NO: 434135 - DNA, 33 bp, Homo sapien
aattatgacccatagcccaaatctggcctgttg

SEQ ID NO: 434136 - DNA, 33 bp, Homo sapien
aattatgacccatagctcaaatctggcctgttg

SEQ ID NO: 434137 - DNA, 33 bp, Homo sapien
aggcatgatttaggacaaggttctagactaaaa

SEQ ID NO: 434138 - DNA, 33 bp, Homo sapien
aggcatgatttaggaccaggttctagactaaaa

SEQ ID NO: 434139 - DNA, 33 bp, Homo sapien
gggcaagtagatttaacgtctggcattgatata

SEQ ID NO: 434140 - DNA, 33 bp, Homo sapien
gggcaagtagatttaatgtctggcattgatata

SEQ ID NO: 434141 - DNA, 33 bp, Homo sapien
tttagaatgcctgaacacaaactgaccttatta

SEQ ID NO: 434142 - DNA, 33 bp, Homo sapien
tttagaatgcctgaacgcaaactgaccttatta

SEQ ID NO: 434143 - DNA, 33 bp, Homo sapien
ttcagagcctcagttcactcttgggtttagaac

SEQ ID NO: 434144 - DNA, 33 bp, Homo sapien
ttcagagcctcagttccctcttgggtttagaac

SEQ ID NO: 434145 - DNA, 33 bp, Homo sapien
tttcccttttagattacagatgacttcctcttg

SEQ ID NO: 434146 - DNA, 33 bp, Homo sapien
tttcccttttagattagagatgacttcctcttg

SEQ ID NO: 434147 - DNA, 33 bp, Homo sapien
tctatcagtaacttaaaaaagaggtgcaggaag

SEQ ID NO: 434148 - DNA, 33 bp, Homo sapien
tctatcagtaacttaacaaagaggtgcaggaag

SEQ ID NO: 434149 - DNA, 33 bp, Homo sapien
ccacagtcattgactaaagtctactccttacac

SEQ ID NO: 434150 - DNA, 33 bp, Homo sapien
ccacagtcattgactacagtctactccttacac

SEQ ID NO: 434151 - DNA, 33 bp, Homo sapien
ttgtaaaaatacttaccggttcatgccagagaa

SEQ ID NO: 434152 - DNA, 33 bp, Homo sapien
ttgtaaaaatacttactggttcatgccagagaa

SEQ ID NO: 434153 - DNA, 33 bp, Homo sapien
agttatagggcaaaacacttatatttatgatat

SEQ ID NO: 434154 - DNA, 33 bp, Homo sapien
agttatagggcaaaacgcttatatttatgatat

SEQ ID NO: 434155 - DNA, 33 bp, Homo sapien
aatagataatctaagcactgataaaatatgaag

SEQ ID NO: 434156 - DNA, 33 bp, Homo sapien
aatagataatctaagcgctgataaaatatgaag

SEQ ID NO: 434157 - DNA, 33 bp, Homo sapien
ctttgagctcagagaacgcacttgccatgaggc

SEQ ID NO: 434158 - DNA, 33 bp, Homo sapien
ctttgagctcagagaaggcacttgccatgaggc

SEQ ID NO: 434159 - DNA, 33 bp, Homo sapien
ccagtgccagttgacaaaagagaaatgctatga

SEQ ID NO: 434160 - DNA, 33 bp, Homo sapien
ccagtgccagttgacacaagagaaatgctatga

SEQ ID NO: 434161 - DNA, 33 bp, Homo sapien
cctagtttgcacagttcgaggctcaaaaagaga

SEQ ID NO: 434162 - DNA, 33 bp, Homo sapien
cctagtttgcacagtttgaggctcaaaaagaga

SEQ ID NO: 434163 - DNA, 33 bp, Homo sapien
tggcagtacactactacaagttaggattttggg

SEQ ID NO: 434164 - DNA, 33 bp, Homo sapien
tggcagtacactactagaagttaggattttggg

SEQ ID NO: 434165 - DNA, 33 bp, Homo sapien
ccttaggcatagaaagaaatggaattactgcac

SEQ ID NO: 434166 - DNA, 33 bp, Homo sapien
ccttaggcatagaaaggaatggaattactgcac

SEQ ID NO: 434167 - DNA, 33 bp, Homo sapien
aacatttggtaaggaaataatcatctttcatta

SEQ ID NO: 434168 - DNA, 33 bp, Homo sapien
aacatttggtaaggaagtaatcatctttcatta

SEQ ID NO: 434169 - DNA, 33 bp, Homo sapien
taagtatatttcctagcatttgaacaccatgat

SEQ ID NO: 434170 - DNA, 33 bp, Homo sapien
taagtatatttcctagtatttgaacaccatgat

SEQ ID NO: 434171 - DNA, 33 bp, Homo sapien
taagttggtttttagacacgatgacattgaggc

SEQ ID NO: 434172 - DNA, 33 bp, Homo sapien
taagttggtttttagatacgatgacattgaggc

SEQ ID NO: 434173 - DNA, 33 bp, Homo sapien
taggtaaccatttcaaaggacaagacagtttgt

SEQ ID NO: 434174 - DNA, 33 bp, Homo sapien
taggtaaccatttcaagggacaagacagtttgt

SEQ ID NO: 434175 - DNA, 33 bp, Homo sapien
gatttgttagtgataaaccagaggggaacatga

SEQ ID NO: 434176 - DNA, 33 bp, Homo sapien
gatttgttagtgataatccagaggggaacatga

SEQ ID NO: 434177 - DNA, 33 bp, Homo sapien
taagtaatgaagaagaacagatagcaaagctgt

SEQ ID NO: 434178 - DNA, 33 bp, Homo sapien
taagtaatgaagaagagcagatagcaaagctgt

SEQ ID NO: 434179 - DNA, 33 bp, Homo sapien
catcgattaagacagaagttattgtttcatgcc

SEQ ID NO: 434180 - DNA, 33 bp, Homo sapien
catcgattaagacagacgttattgtttcatgcc

SEQ ID NO: 434181 - DNA, 33 bp, Homo sapien
cgtgatatcagggtcacattattctcttccttt

SEQ ID NO: 434182 - DNA, 33 bp, Homo sapien
cgtgatatcagggtcatattattctcttccttt

SEQ ID NO: 434183 - DNA, 33 bp, Homo sapien
aggaggagggatgtccaactttcttttaccttc

SEQ ID NO: 434184 - DNA, 33 bp, Homo sapien
aggaggagggatgtccgactttcttttaccttc

SEQ ID NO: 434185 - DNA, 33 bp, Homo sapien
gactggcttaatcaggaaaagcagggaaacaag

SEQ ID NO: 434186 - DNA, 33 bp, Homo sapien
gactggcttaatcaggcaaagcagggaaacaag

SEQ ID NO: 434187 - DNA, 33 bp, Homo sapien
gctcaaaaatggagaacattgacaggttacgta

SEQ ID NO: 434188 - DNA, 33 bp, Homo sapien
gctcaaaaatggagaatattgacaggttacgta

SEQ ID NO: 434189 - DNA, 33 bp, Homo sapien
tgtaggaacaaaagcaacattctttgcaaccca

SEQ ID NO: 434190 - DNA, 33 bp, Homo sapien
tgtaggaacaaaagcagcattctttgcaaccca

SEQ ID NO: 434191 - DNA, 33 bp, Homo sapien
ttctgaggcttgaagacgttggtggaagaaaca

SEQ ID NO: 434192 - DNA, 33 bp, Homo sapien
ttctgaggcttgaagatgttggtggaagaaaca

SEQ ID NO: 434193 - DNA, 33 bp, Homo sapien
cagagatgttacaatgaactgagaaagacaaaa

SEQ ID NO: 434194 - DNA, 33 bp, Homo sapien
cagagatgttacaatgcactgagaaagacaaaa

SEQ ID NO: 434195 - DNA, 33 bp, Homo sapien
cgaaagacacagataaacaacaaaacaatgcct

SEQ ID NO: 434196 - DNA, 33 bp, Homo sapien
cgaaagacacagataagcaacaaaacaatgcct

SEQ ID NO: 434197 - DNA, 33 bp, Homo sapien
gctacctcagcttaagaacattatcccaactgc

SEQ ID NO: 434198 - DNA, 33 bp, Homo sapien
gctacctcagcttaagtacattatcccaactgc

SEQ ID NO: 434199 - DNA, 33 bp, Homo sapien
aggctatacaggctgaacactccttatccagaa

SEQ ID NO: 434200 - DNA, 33 bp, Homo sapien
aggctatacaggctgagcactccttatccagaa

SEQ ID NO: 434201 - DNA, 33 bp, Homo sapien
ggtctttcacagtaaccatgaccaaaactgtaa

SEQ ID NO: 434202 - DNA, 33 bp, Homo sapien
ggtctttcacagtaactatgaccaaaactgtaa

SEQ ID NO: 434203 - DNA, 33 bp, Homo sapien
cataccctggataaaacttgcatttgaagtcat

SEQ ID NO: 434204 - DNA, 33 bp, Homo sapien
cataccctggataaaatttgcatttgaagtcat

SEQ ID NO: 434205 - DNA, 33 bp, Homo sapien
aatcaaatctgataaccgtatttcactgagata

SEQ ID NO: 434206 - DNA, 33 bp, Homo sapien
aatcaaatctgataactgtatttcactgagata

SEQ ID NO: 434207 - DNA, 33 bp, Homo sapien
ggcaaatttttctagcaaatctccttgaactcc

SEQ ID NO: 434208 - DNA, 33 bp, Homo sapien
ggcaaatttttctagcgaatctccttgaactcc

SEQ ID NO: 434209 - DNA, 33 bp, Homo sapien
tgagaaacttactcaacggccaatgtaaaacca

SEQ ID NO: 434210 - DNA, 33 bp, Homo sapien
tgagaaacttactcaatggccaatgtaaaacca

SEQ ID NO: 434211 - DNA, 33 bp, Homo sapien
aggttgcctcaggcagcagttgtaatagtccat

SEQ ID NO: 434212 - DNA, 33 bp, Homo sapien
aggttgcctcaggcagtagttgtaatagtccat

SEQ ID NO: 434213 - DNA, 33 bp, Homo sapien
gtaacccttggaatgaatcagctgagctagcat

SEQ ID NO: 434214 - DNA, 33 bp, Homo sapien
gtaacccttggaatgagtcagctgagctagcat

SEQ ID NO: 434215 - DNA, 33 bp, Homo sapien
taaaggccggaacctcacttctcttccctaggt

SEQ ID NO: 434216 - DNA, 33 bp, Homo sapien
taaaggccggaacctcgcttctcttccctaggt

SEQ ID NO: 434217 - DNA, 33 bp, Homo sapien
agcagttttgttactaaccatcatttcaacctg

SEQ ID NO: 434218 - DNA, 33 bp, Homo sapien
agcagttttgttactacccatcatttcaacctg

SEQ ID NO: 434219 - DNA, 33 bp, Homo sapien
taggtgatatttgacaccatccaggatacatga

SEQ ID NO: 434220 - DNA, 33 bp, Homo sapien
taggtgatatttgacagcatccaggatacatga

SEQ ID NO: 434221 - DNA, 33 bp, Homo sapien
acgtccaagaggcaaacgaggccgatactggat

SEQ ID NO: 434222 - DNA, 33 bp, Homo sapien
acgtccaagaggcaaatgaggccgatactggat

SEQ ID NO: 434223 - DNA, 33 bp, Homo sapien
actggggctgtcaaccagacaatcagcatagcc

SEQ ID NO: 434224 - DNA, 33 bp, Homo sapien
actggggctgtcaaccggacaatcagcatagcc

SEQ ID NO: 434225 - DNA, 33 bp, Homo sapien
gcagacaagtatatatgacatcttttgctttgt

SEQ ID NO: 434226 - DNA, 33 bp, Homo sapien
gcagacaagtatatattacatcttttgctttgt

SEQ ID NO: 434227 - DNA, 33 bp, Homo sapien
ctcgttttctcttaggacatggagctcaggcag

SEQ ID NO: 434228 - DNA, 33 bp, Homo sapien
ctcgttttctcttagggcatggagctcaggcag

SEQ ID NO: 434229 - DNA, 33 bp, Homo sapien
agaataagtcattaccactttaatgcaaggcgg

SEQ ID NO: 434230 - DNA, 33 bp, Homo sapien
agaataagtcattaccgctttaatgcaaggcgg

SEQ ID NO: 434231 - DNA, 33 bp, Homo sapien
gcatcaacactaatcaatacataaaacctgtaa

SEQ ID NO: 434232 - DNA, 33 bp, Homo sapien
gcatcaacactaatcagtacataaaacctgtaa

SEQ ID NO: 434233 - DNA, 33 bp, Homo sapien
gggtctgggtttcttccaagtgtgatatagtca

SEQ ID NO: 434234 - DNA, 33 bp, Homo sapien
gggtctgggtttcttctaagtgtgatatagtca

SEQ ID NO: 434235 - DNA, 33 bp, Homo sapien
tatttgttggaaaaaaatgacaatctcaaagct

SEQ ID NO: 434236 - DNA, 33 bp, Homo sapien
tatttgttggaaaaaagtgacaatctcaaagct

SEQ ID NO: 434237 - DNA, 33 bp, Homo sapien
tttcctttgagtagcactgaaattttttgttgg

SEQ ID NO: 434238 - DNA, 33 bp, Homo sapien
tttcctttgagtagcattgaaattttttgttgg

SEQ ID NO: 434239 - DNA, 33 bp, Homo sapien
aattgagacctataaacgactttatccaacaac

SEQ ID NO: 434240 - DNA, 33 bp, Homo sapien
aattgagacctataaatgactttatccaacaac

SEQ ID NO: 434241 - DNA, 33 bp, Homo sapien
gttagtaagtaagggaaagatctgtacaagaag

SEQ ID NO: 434242 - DNA, 33 bp, Homo sapien
gttagtaagtaagggatagatctgtacaagaag

SEQ ID NO: 434243 - DNA, 33 bp, Homo sapien
gacaatactggtacaaagattccaatacgtctt

SEQ ID NO: 434244 - DNA, 33 bp, Homo sapien
gacaatactggtacaacgattccaatacgtctt

SEQ ID NO: 434245 - DNA, 33 bp, Homo sapien
aaacattccacgttcacggaaggaagaatcagt

SEQ ID NO: 434246 - DNA, 33 bp, Homo sapien
aaacattccacgttcatggaaggaagaatcagt

SEQ ID NO: 434247 - DNA, 33 bp, Homo sapien
actggtgacctgccagccagagtagtgggtctt

SEQ ID NO: 434248 - DNA, 33 bp, Homo sapien
actggtgacctgccagtcagagtagtgggtctt

SEQ ID NO: 434249 - DNA, 33 bp, Homo sapien
agcaatggtggcttaaatagtcattcacagggc

SEQ ID NO: 434250 - DNA, 33 bp, Homo sapien
agcaatggtggcttaagtagtcattcacagggc

SEQ ID NO: 434251 - DNA, 33 bp, Homo sapien
ctaccatagtcttccacatgaactttatctaat

SEQ ID NO: 434252 - DNA, 33 bp, Homo sapien
ctaccatagtcttccagatgaactttatctaat

SEQ ID NO: 434253 - DNA, 33 bp, Homo sapien
tccccttggttgggaccgagacgattcagagag

SEQ ID NO: 434254 - DNA, 33 bp, Homo sapien
tccccttggttgggactgagacgattcagagag

SEQ ID NO: 434255 - DNA, 33 bp, Homo sapien
aataaattgtctttcacggttaggcggtatcag

SEQ ID NO: 434256 - DNA, 33 bp, Homo sapien
aataaattgtctttcatggttaggcggtatcag

SEQ ID NO: 434257 - DNA, 33 bp, Homo sapien
gaaaggtagactttaactgattaagaggcccag

SEQ ID NO: 434258 - DNA, 33 bp, Homo sapien
gaaaggtagactttaattgattaagaggcccag

SEQ ID NO: 434259 - DNA, 33 bp, Homo sapien
acgatgagtcctatgcagatgcatttttcagtc

SEQ ID NO: 434260 - DNA, 33 bp, Homo sapien
acgatgagtcctatgcggatgcatttttcagtc

SEQ ID NO: 434261 - DNA, 33 bp, Homo sapien
cttttgactggagaataaggcccaatatgtatg

SEQ ID NO: 434262 - DNA, 33 bp, Homo sapien
cttttgactggagaatcaggcccaatatgtatg

SEQ ID NO: 434263 - DNA, 33 bp, Homo sapien
aaccaaggatggcgaggcatataagtggaagaa

SEQ ID NO: 434264 - DNA, 33 bp, Homo sapien
aaccaaggatggcgagtcatataagtggaagaa

SEQ ID NO: 434265 - DNA, 33 bp, Homo sapien
aaaatacacaaacacaaatttatttagctcata

SEQ ID NO: 434266 - DNA, 33 bp, Homo sapien
aaaatacacaaacacacatttatttagctcata

SEQ ID NO: 434267 - DNA, 33 bp, Homo sapien
gctcttattaagtagaaggagatcctaatggct

SEQ ID NO: 434268 - DNA, 33 bp, Homo sapien
gctcttattaagtagatggagatcctaatggct

SEQ ID NO: 434269 - DNA, 33 bp, Homo sapien
tgtaatgatacttataagctcaaactaaagggt

SEQ ID NO: 434270 - DNA, 33 bp, Homo sapien
tgtaatgatacttataggctcaaactaaagggt

SEQ ID NO: 434271 - DNA, 33 bp, Homo sapien
tacttcaccttatcacactttaataaataatgt

SEQ ID NO: 434272 - DNA, 33 bp, Homo sapien
tacttcaccttatcacgctttaataaataatgt

SEQ ID NO: 434273 - DNA, 33 bp, Homo sapien
tgtgttcgcatcaccaagttcagaactttatta

SEQ ID NO: 434274 - DNA, 33 bp, Homo sapien
tgtgttcgcatcaccacgttcagaactttatta

SEQ ID NO: 434275 - DNA, 33 bp, Homo sapien
aaaccctatgaagaagacactgcaaattttgtc

SEQ ID NO: 434276 - DNA, 33 bp, Homo sapien
aaaccctatgaagaaggcactgcaaattttgtc

SEQ ID NO: 434277 - DNA, 33 bp, Homo sapien
tgaattataacatcaactgtgtatcaacaaaca

SEQ ID NO: 434278 - DNA, 33 bp, Homo sapien
tgaattataacatcaattgtgtatcaacaaaca

SEQ ID NO: 434279 - DNA, 33 bp, Homo sapien
caaactgggttttcaaaggtggaaaagatcact

SEQ ID NO: 434280 - DNA, 33 bp, Homo sapien
caaactgggttttcaatggtggaaaagatcact

SEQ ID NO: 434281 - DNA, 33 bp, Homo sapien
tttttccatgttttagccagtggtgaacttatc

SEQ ID NO: 434282 - DNA, 33 bp, Homo sapien
tttttccatgttttagtcagtggtgaacttatc

SEQ ID NO: 434283 - DNA, 33 bp, Homo sapien
taacctgaaatccaaagataaagagtctctttc

SEQ ID NO: 434284 - DNA, 33 bp, Homo sapien
taacctgaaatccaaatataaagagtctctttc

SEQ ID NO: 434285 - DNA, 33 bp, Homo sapien
attcactggtagtgtacggccttcaatattgtt

SEQ ID NO: 434286 - DNA, 33 bp, Homo sapien
attcactggtagtgtatggccttcaatattgtt

SEQ ID NO: 434287 - DNA, 33 bp, Homo sapien
actctaaaatttacctaaagttcactactcttc

SEQ ID NO: 434288 - DNA, 33 bp, Homo sapien
actctaaaatttacctgaagttcactactcttc

SEQ ID NO: 434289 - DNA, 33 bp, Homo sapien
ggtctctataatgaaaactataagatcaggaac

SEQ ID NO: 434290 - DNA, 33 bp, Homo sapien
ggtctctataatgaaagctataagatcaggaac

SEQ ID NO: 434291 - DNA, 33 bp, Homo sapien
ctaatgttagtgacataaaatacactttcaaaa

SEQ ID NO: 434292 - DNA, 33 bp, Homo sapien
ctaatgttagtgacatgaaatacactttcaaaa

SEQ ID NO: 434293 - DNA, 33 bp, Homo sapien
aaaaatctgtgcctcagtattacccaaggagag

SEQ ID NO: 434294 - DNA, 33 bp, Homo sapien
aaaaatctgtgcctcattattacccaaggagag

SEQ ID NO: 434295 - DNA, 33 bp, Homo sapien
ctctcttttctgtgctcactttccacctaatag

SEQ ID NO: 434296 - DNA, 33 bp, Homo sapien
ctctcttttctgtgcttactttccacctaatag

SEQ ID NO: 434297 - DNA, 33 bp, Homo sapien
atggttctggaacttacgacaccttcttgtgct

SEQ ID NO: 434298 - DNA, 33 bp, Homo sapien
atggttctggaacttatgacaccttcttgtgct

SEQ ID NO: 434299 - DNA, 33 bp, Homo sapien
ccctctgctgagaaaaaaatgagaatggctagc

SEQ ID NO: 434300 - DNA, 33 bp, Homo sapien
ccctctgctgagaaaagaatgagaatggctagc

SEQ ID NO: 434301 - DNA, 33 bp, Homo sapien
aatgaattgactctcccccttcaactgacagcc

SEQ ID NO: 434302 - DNA, 33 bp, Homo sapien
aatgaattgactctccgccttcaactgacagcc

SEQ ID NO: 434303 - DNA, 33 bp, Homo sapien
aaatgtgttgccatataactgcactttgtctaa

SEQ ID NO: 434304 - DNA, 33 bp, Homo sapien
aaatgtgttgccatatgactgcactttgtctaa

SEQ ID NO: 434305 - DNA, 33 bp, Homo sapien
tctaagttttgtttgacggctggatttgcactg

SEQ ID NO: 434306 - DNA, 33 bp, Homo sapien
tctaagttttgtttgatggctggatttgcactg

SEQ ID NO: 434307 - DNA, 33 bp, Homo sapien
aaaaaatactaggtgaggtaaactggcttaaca

SEQ ID NO: 434308 - DNA, 33 bp, Homo sapien
aaaaaatactaggtgatgtaaactggcttaaca

SEQ ID NO: 434309 - DNA, 33 bp, Homo sapien
gcattatgcaactgaaaggctttaaaaacattt

SEQ ID NO: 434310 - DNA, 33 bp, Homo sapien
gcattatgcaactgaatggctttaaaaacattt

SEQ ID NO: 434311 - DNA, 33 bp, Homo sapien
ttccagtgtaccagtcaatgtggtaaattctgc

SEQ ID NO: 434312 - DNA, 33 bp, Homo sapien
ttccagtgtaccagtcgatgtggtaaattctgc

SEQ ID NO: 434313 - DNA, 33 bp, Homo sapien
ggaagagtgtggtaagaaaatggacatgaacat

SEQ ID NO: 434314 - DNA, 33 bp, Homo sapien
ggaagagtgtggtaagcaaatggacatgaacat

SEQ ID NO: 434315 - DNA, 33 bp, Homo sapien
gcaaaacaatatttaacaatcctctgtcaagtt

SEQ ID NO: 434316 - DNA, 33 bp, Homo sapien
gcaaaacaatatttaagaatcctctgtcaagtt

SEQ ID NO: 434317 - DNA, 33 bp, Homo sapien
tacagaatggatcagactctatttctaacaagt

SEQ ID NO: 434318 - DNA, 33 bp, Homo sapien
tacagaatggatcagattctatttctaacaagt

SEQ ID NO: 434319 - DNA, 33 bp, Homo sapien
ttactcacttcactctgaataacatgaaatatt

SEQ ID NO: 434320 - DNA, 33 bp, Homo sapien
ttactcacttcactcttaataacatgaaatatt

SEQ ID NO: 434321 - DNA, 33 bp, Homo sapien
gcatatcattcagagagaaatatgccattgtcc

SEQ ID NO: 434322 - DNA, 33 bp, Homo sapien
gcatatcattcagagataaatatgccattgtcc

SEQ ID NO: 434323 - DNA, 33 bp, Homo sapien
gagaggactaagtgaaatgatgtatgtaaaatg

SEQ ID NO: 434324 - DNA, 33 bp, Homo sapien
gagaggactaagtgaattgatgtatgtaaaatg

SEQ ID NO: 434325 - DNA, 33 bp, Homo sapien
tcctccttttcaatacggatgccctcaatttct

SEQ ID NO: 434326 - DNA, 33 bp, Homo sapien
tcctccttttcaatactgatgccctcaatttct

SEQ ID NO: 434327 - DNA, 33 bp, Homo sapien
ttagtgtagttttgtaagtctctgattctggat

SEQ ID NO: 434328 - DNA, 33 bp, Homo sapien
ttagtgtagttttgtaggtctctgattctggat

SEQ ID NO: 434329 - DNA, 33 bp, Homo sapien
ggaggaggcagattgacggtgacgggtacctgc

SEQ ID NO: 434330 - DNA, 33 bp, Homo sapien
ggaggaggcagattgagggtgacgggtacctgc

SEQ ID NO: 434331 - DNA, 33 bp, Homo sapien
tcaaagacagtgtatcagaagaaaagatgcact

SEQ ID NO: 434332 - DNA, 33 bp, Homo sapien
tcaaagacagtgtatcggaagaaaagatgcact

SEQ ID NO: 434333 - DNA, 33 bp, Homo sapien
catatacatttactggaaaatgatctttaagaa

SEQ ID NO: 434334 - DNA, 33 bp, Homo sapien
catatacatttactgggaaatgatctttaagaa

SEQ ID NO: 434335 - DNA, 33 bp, Homo sapien
atcttttattgactacacttctttcatgtttga

SEQ ID NO: 434336 - DNA, 33 bp, Homo sapien
atcttttattgactacccttctttcatgtttga

SEQ ID NO: 434337 - DNA, 33 bp, Homo sapien
ataactttatttgtgaaatctttctattcatag

SEQ ID NO: 434338 - DNA, 33 bp, Homo sapien
ataactttatttgtgagatctttctattcatag

SEQ ID NO: 434339 - DNA, 33 bp, Homo sapien
aagttataaagaactccaagcaactggactagg

SEQ ID NO: 434340 - DNA, 33 bp, Homo sapien
aagttataaagaactctaagcaactggactagg

SEQ ID NO: 434341 - DNA, 33 bp, Homo sapien
aggggcgtgatgtaagaaagacagaaaatatat

SEQ ID NO: 434342 - DNA, 33 bp, Homo sapien
aggggcgtgatgtaaggaagacagaaaatatat

SEQ ID NO: 434343 - DNA, 33 bp, Homo sapien
cacggtgttgtaattgaagaatactgagaactg

SEQ ID NO: 434344 - DNA, 33 bp, Homo sapien
cacggtgttgtaattgcagaatactgagaactg

SEQ ID NO: 434345 - DNA, 33 bp, Homo sapien
caattttacaaaccaacacttacagatgggtac

SEQ ID NO: 434346 - DNA, 33 bp, Homo sapien
caattttacaaaccaagacttacagatgggtac

SEQ ID NO: 434347 - DNA, 33 bp, Homo sapien
tccacaggtttcttggacagtggaatgaatgat

SEQ ID NO: 434348 - DNA, 33 bp, Homo sapien
tccacaggtttcttgggcagtggaatgaatgat

SEQ ID NO: 434349 - DNA, 33 bp, Homo sapien
gcaggcagtcaggagaaggttattttgagggtt

SEQ ID NO: 434350 - DNA, 33 bp, Homo sapien
gcaggcagtcaggagacggttattttgagggtt

SEQ ID NO: 434351 - DNA, 33 bp, Homo sapien
tatttgtatcctgtaaagttcagcaggaaacct

SEQ ID NO: 434352 - DNA, 33 bp, Homo sapien
tatttgtatcctgtaacgttcagcaggaaacct

SEQ ID NO: 434353 - DNA, 33 bp, Homo sapien
tattaaataattatgacgaggtttgatgaatgg

SEQ ID NO: 434354 - DNA, 33 bp, Homo sapien
tattaaataattatgatgaggtttgatgaatgg

SEQ ID NO: 434355 - DNA, 33 bp, Homo sapien
atgaaactcatgctgaaaatctcagttggaagt

SEQ ID NO: 434356 - DNA, 33 bp, Homo sapien
atgaaactcatgctgataatctcagttggaagt

SEQ ID NO: 434357 - DNA, 33 bp, Homo sapien
tggaaggtggtggctaagggcatagaatataaa

SEQ ID NO: 434358 - DNA, 33 bp, Homo sapien
tggaaggtggtggctaggggcatagaatataaa

SEQ ID NO: 434359 - DNA, 33 bp, Homo sapien
caatgtttcttgcagacaaaaacttcgtgggaa

SEQ ID NO: 434360 - DNA, 33 bp, Homo sapien
caatgtttcttgcagataaaaacttcgtgggaa

SEQ ID NO: 434361 - DNA, 33 bp, Homo sapien
cccagaatcttggatagaaatgaaacttggaac

SEQ ID NO: 434362 - DNA, 33 bp, Homo sapien
cccagaatcttggatataaatgaaacttggaac

SEQ ID NO: 434363 - DNA, 33 bp, Homo sapien
tgattgtcttgttttacagagcaaatggggaaa

SEQ ID NO: 434364 - DNA, 33 bp, Homo sapien
tgattgtcttgttttatagagcaaatggggaaa

SEQ ID NO: 434365 - DNA, 33 bp, Homo sapien
tcaccttttctggcaaatctaccctctagatcg

SEQ ID NO: 434366 - DNA, 33 bp, Homo sapien
tcaccttttctggcaagtctaccctctagatcg

SEQ ID NO: 434367 - DNA, 33 bp, Homo sapien
ctgttataaagctctccgaattgatatgatttg

SEQ ID NO: 434368 - DNA, 33 bp, Homo sapien
ctgttataaagctctctgaattgatatgatttg

SEQ ID NO: 434369 - DNA, 33 bp, Homo sapien
caaatgtcacagcaacaacttggaagttactaa

SEQ ID NO: 434370 - DNA, 33 bp, Homo sapien
caaatgtcacagcaaccacttggaagttactaa

SEQ ID NO: 434371 - DNA, 33 bp, Homo sapien
aattgcatcaaacacaataagagctggacagac

SEQ ID NO: 434372 - DNA, 33 bp, Homo sapien
aattgcatcaaacacagtaagagctggacagac

SEQ ID NO: 434373 - DNA, 33 bp, Homo sapien
aagccatattggaaacgaattttgacaagatgt

SEQ ID NO: 434374 - DNA, 33 bp, Homo sapien
aagccatattggaaactaattttgacaagatgt

SEQ ID NO: 434375 - DNA, 33 bp, Homo sapien
gtttagtgcaattttacagtatgcaaatacaaa

SEQ ID NO: 434376 - DNA, 33 bp, Homo sapien
gtttagtgcaattttatagtatgcaaatacaaa

SEQ ID NO: 434377 - DNA, 33 bp, Homo sapien
ttactgctccttttcaagtactctgggtgcttt

SEQ ID NO: 434378 - DNA, 33 bp, Homo sapien
ttactgctccttttcaggtactctgggtgcttt

SEQ ID NO: 434379 - DNA, 33 bp, Homo sapien
cttcaagccagaaacaataatgactgagttaca

SEQ ID NO: 434380 - DNA, 33 bp, Homo sapien
cttcaagccagaaacagtaatgactgagttaca

SEQ ID NO: 434381 - DNA, 33 bp, Homo sapien
ccatcatctttatgacggtagcctttttacttt

SEQ ID NO: 434382 - DNA, 33 bp, Homo sapien
ccatcatctttatgactgtagcctttttacttt

SEQ ID NO: 434383 - DNA, 33 bp, Homo sapien
tatagcagctttgacaatccccctcttgattca

SEQ ID NO: 434384 - DNA, 33 bp, Homo sapien
tatagcagctttgacagtccccctcttgattca

SEQ ID NO: 434385 - DNA, 33 bp, Homo sapien
gagaaacagattttcagaaagatgaccaaaaag

SEQ ID NO: 434386 - DNA, 33 bp, Homo sapien
gagaaacagattttcataaagatgaccaaaaag

SEQ ID NO: 434387 - DNA, 33 bp, Homo sapien
catatccagtgagaaaggctttcttatcaaaag

SEQ ID NO: 434388 - DNA, 33 bp, Homo sapien
catatccagtgagaaatgctttcttatcaaaag

SEQ ID NO: 434389 - DNA, 33 bp, Homo sapien
ttagaaggtctcctaactcaatatgtcaacagc

SEQ ID NO: 434390 - DNA, 33 bp, Homo sapien
ttagaaggtctcctaattcaatatgtcaacagc

SEQ ID NO: 434391 - DNA, 33 bp, Homo sapien
agtagcatcattttcacaagttctttttcagct

SEQ ID NO: 434392 - DNA, 33 bp, Homo sapien
agtagcatcattttcataagttctttttcagct

SEQ ID NO: 434393 - DNA, 33 bp, Homo sapien
aaaattaggcattggccaagtcctttggaaatc

SEQ ID NO: 434394 - DNA, 33 bp, Homo sapien
aaaattaggcattggctaagtcctttggaaatc

SEQ ID NO: 434395 - DNA, 33 bp, Homo sapien
aacttttctgttttagacataatgatgactgct

SEQ ID NO: 434396 - DNA, 33 bp, Homo sapien
aacttttctgttttaggcataatgatgactgct

SEQ ID NO: 434397 - DNA, 33 bp, Homo sapien
ttacagaagcaaccctaaaatgctgtattgtgt

SEQ ID NO: 434398 - DNA, 33 bp, Homo sapien
ttacagaagcaaccctgaaatgctgtattgtgt

SEQ ID NO: 434399 - DNA, 33 bp, Homo sapien
gatattctcttcaggaggagtgccataaaagtg

SEQ ID NO: 434400 - DNA, 33 bp, Homo sapien
gatattctcttcaggatgagtgccataaaagtg

SEQ ID NO: 434401 - DNA, 33 bp, Homo sapien
gatcaattgaatcagacagacatatagtaaaat

SEQ ID NO: 434402 - DNA, 33 bp, Homo sapien
gatcaattgaatcagatagacatatagtaaaat

SEQ ID NO: 434403 - DNA, 33 bp, Homo sapien
ttaagttttaagttgacgattttgtcttttatg

SEQ ID NO: 434404 - DNA, 33 bp, Homo sapien
ttaagttttaagttgatgattttgtcttttatg

SEQ ID NO: 434405 - DNA, 33 bp, Homo sapien
gaactgaaatggtcccaagacccacagaagact

SEQ ID NO: 434406 - DNA, 33 bp, Homo sapien
gaactgaaatggtccccagacccacagaagact

SEQ ID NO: 434407 - DNA, 33 bp, Homo sapien
gatttaacaagtaagcacaccgagagaaaatac

SEQ ID NO: 434408 - DNA, 33 bp, Homo sapien
gatttaacaagtaagcgcaccgagagaaaatac

SEQ ID NO: 434409 - DNA, 33 bp, Homo sapien
tttctttgaccattcaaattctgtggggaaggc

SEQ ID NO: 434410 - DNA, 33 bp, Homo sapien
tttctttgaccattcagattctgtggggaaggc

SEQ ID NO: 434411 - DNA, 33 bp, Homo sapien
ggaagacatggagatacggactgttaacacctt

SEQ ID NO: 434412 - DNA, 33 bp, Homo sapien
ggaagacatggagatatggactgttaacacctt

SEQ ID NO: 434413 - DNA, 33 bp, Homo sapien
tgggtaaagagggaacacaagaggtgatttgag

SEQ ID NO: 434414 - DNA, 33 bp, Homo sapien
tgggtaaagagggaacccaagaggtgatttgag

SEQ ID NO: 434415 - DNA, 33 bp, Homo sapien
tgaattgccaataggcactactacagtcttttc

SEQ ID NO: 434416 - DNA, 33 bp, Homo sapien
tgaattgccaataggcgctactacagtcttttc

SEQ ID NO: 434417 - DNA, 33 bp, Homo sapien
aactagtggatctaaaacacaagaaagaggagc

SEQ ID NO: 434418 - DNA, 33 bp, Homo sapien
aactagtggatctaaatcacaagaaagaggagc

SEQ ID NO: 434419 - DNA, 33 bp, Homo sapien
catctctgtacctatcactctttaatggaaagc

SEQ ID NO: 434420 - DNA, 33 bp, Homo sapien
catctctgtacctatcgctctttaatggaaagc

SEQ ID NO: 434421 - DNA, 33 bp, Homo sapien
taaccaaagatttccacgcatcaggtaaagggc

SEQ ID NO: 434422 - DNA, 33 bp, Homo sapien
taaccaaagatttccatgcatcaggtaaagggc

SEQ ID NO: 434423 - DNA, 33 bp, Homo sapien
gagatctgtgagaaaccaaagcaatcaaagaag

SEQ ID NO: 434424 - DNA, 33 bp, Homo sapien
gagatctgtgagaaactaaagcaatcaaagaag

SEQ ID NO: 434425 - DNA, 33 bp, Homo sapien
aatcttatctctgcctaaaacattggcctagtt

SEQ ID NO: 434426 - DNA, 33 bp, Homo sapien
aatcttatctctgcctgaaacattggcctagtt

SEQ ID NO: 434427 - DNA, 33 bp, Homo sapien
agccttaacagtacacaccagtgccagaaaata

SEQ ID NO: 434428 - DNA, 33 bp, Homo sapien
agccttaacagtacacgccagtgccagaaaata

SEQ ID NO: 434429 - DNA, 33 bp, Homo sapien
gacttttaagcacagacgtttggctcttactca

SEQ ID NO: 434430 - DNA, 33 bp, Homo sapien
gacttttaagcacagatgtttggctcttactca

SEQ ID NO: 434431 - DNA, 33 bp, Homo sapien
gccatataattccgccagctttgagttcaaatt

SEQ ID NO: 434432 - DNA, 33 bp, Homo sapien
gccatataattccgccggctttgagttcaaatt

SEQ ID NO: 434433 - DNA, 33 bp, Homo sapien
agtggaagaatttcaaagcactgctggagatag

SEQ ID NO: 434434 - DNA, 33 bp, Homo sapien
agtggaagaatttcaacgcactgctggagatag

SEQ ID NO: 434435 - DNA, 33 bp, Homo sapien
tctacatgtaatctcccgagactttttcccact

SEQ ID NO: 434436 - DNA, 33 bp, Homo sapien
tctacatgtaatctcctgagactttttcccact

SEQ ID NO: 434437 - DNA, 33 bp, Homo sapien
gggccctttcagtaaccagtttgggttggattt

SEQ ID NO: 434438 - DNA, 33 bp, Homo sapien
gggccctttcagtaactagtttgggttggattt

SEQ ID NO: 434439 - DNA, 33 bp, Homo sapien
ttattgtcctaactgccagtttaccagtcctct

SEQ ID NO: 434440 - DNA, 33 bp, Homo sapien
ttattgtcctaactgctagtttaccagtcctct

SEQ ID NO: 434441 - DNA, 33 bp, Homo sapien
ccttactttctgtcaccgagttttttcttctag

SEQ ID NO: 434442 - DNA, 33 bp, Homo sapien
ccttactttctgtcactgagttttttcttctag

SEQ ID NO: 434443 - DNA, 33 bp, Homo sapien
ccagattttggagttaccagttacggattgtaa

SEQ ID NO: 434444 - DNA, 33 bp, Homo sapien
ccagattttggagttatcagttacggattgtaa

SEQ ID NO: 434445 - DNA, 33 bp, Homo sapien
gctccaaatcagttcaatatctgactaaattaa

SEQ ID NO: 434446 - DNA, 33 bp, Homo sapien
gctccaaatcagttcagtatctgactaaattaa

SEQ ID NO: 434447 - DNA, 33 bp, Homo sapien
agttggtagcttaaaacgcagccatggagtgcg

SEQ ID NO: 434448 - DNA, 33 bp, Homo sapien
agttggtagcttaaaatgcagccatggagtgcg

SEQ ID NO: 434449 - DNA, 33 bp, Homo sapien
atcagagagaaatctaacaggaaacaaaatttc

SEQ ID NO: 434450 - DNA, 33 bp, Homo sapien
atcagagagaaatctatcaggaaacaaaatttc

SEQ ID NO: 434451 - DNA, 33 bp, Homo sapien
ctatgggatgtccttgaaagtcccagcatagga

SEQ ID NO: 434452 - DNA, 33 bp, Homo sapien
ctatgggatgtccttgtaagtcccagcatagga

SEQ ID NO: 434453 - DNA, 33 bp, Homo sapien
ctgctctagccagaccactctttgcaaacactt

SEQ ID NO: 434454 - DNA, 33 bp, Homo sapien
ctgctctagccagaccgctctttgcaaacactt

SEQ ID NO: 434455 - DNA, 33 bp, Homo sapien
gtaggcagtgagtttccaatagctggctggaag

SEQ ID NO: 434456 - DNA, 33 bp, Homo sapien
gtaggcagtgagtttctaatagctggctggaag

SEQ ID NO: 434457 - DNA, 33 bp, Homo sapien
aacaatggcaattggaacattaagtgccactgg

SEQ ID NO: 434458 - DNA, 33 bp, Homo sapien
aacaatggcaattggagcattaagtgccactgg

SEQ ID NO: 434459 - DNA, 33 bp, Homo sapien
ctctgggcttaattgccaaagaggacttcggag

SEQ ID NO: 434460 - DNA, 33 bp, Homo sapien
ctctgggcttaattgctaaagaggacttcggag

SEQ ID NO: 434461 - DNA, 33 bp, Homo sapien
tagggtactttatgtaaggtcctagtcttctta

SEQ ID NO: 434462 - DNA, 33 bp, Homo sapien
tagggtactttatgtagggtcctagtcttctta

SEQ ID NO: 434463 - DNA, 33 bp, Homo sapien
tgaaggatgtacttgacagcactgtgatcccag

SEQ ID NO: 434464 - DNA, 33 bp, Homo sapien
tgaaggatgtacttgagagcactgtgatcccag

SEQ ID NO: 434465 - DNA, 33 bp, Homo sapien
agagctgtacgctacacggataatagatgggac

SEQ ID NO: 434466 - DNA, 33 bp, Homo sapien
agagctgtacgctacatggataatagatgggac

SEQ ID NO: 434467 - DNA, 33 bp, Homo sapien
tgatgtggcaaggggaaaatatttcagttatca

SEQ ID NO: 434468 - DNA, 33 bp, Homo sapien
tgatgtggcaaggggacaatatttcagttatca

SEQ ID NO: 434469 - DNA, 33 bp, Homo sapien
caggaatgtgaggctcaaagatttgccatgagt

SEQ ID NO: 434470 - DNA, 33 bp, Homo sapien
caggaatgtgaggctcgaagatttgccatgagt

SEQ ID NO: 434471 - DNA, 33 bp, Homo sapien
tgcctcttttgatgtacgcatggatcctggcac

SEQ ID NO: 434472 - DNA, 33 bp, Homo sapien
tgcctcttttgatgtaggcatggatcctggcac

SEQ ID NO: 434473 - DNA, 33 bp, Homo sapien
ctacaaaatcaacacacggcggtggccagaggc

SEQ ID NO: 434474 - DNA, 33 bp, Homo sapien
ctacaaaatcaacacatggcggtggccagaggc

SEQ ID NO: 434475 - DNA, 33 bp, Homo sapien
caaaattgcttagagcaagagaatactcgcctc

SEQ ID NO: 434476 - DNA, 33 bp, Homo sapien
caaaattgcttagagctagagaatactcgcctc

SEQ ID NO: 434477 - DNA, 33 bp, Homo sapien
attagactattaagacaagggaagaaaacacaa

SEQ ID NO: 434478 - DNA, 33 bp, Homo sapien
attagactattaagacgagggaagaaaacacaa

SEQ ID NO: 434479 - DNA, 33 bp, Homo sapien
ctcttaaaaaacctggaatggttccaatggaga

SEQ ID NO: 434480 - DNA, 33 bp, Homo sapien
ctcttaaaaaacctgggatggttccaatggaga

SEQ ID NO: 434481 - DNA, 33 bp, Homo sapien
ttcagcgcacctcttacgcaaagtagctctagt

SEQ ID NO: 434482 - DNA, 33 bp, Homo sapien
ttcagcgcacctcttatgcaaagtagctctagt

SEQ ID NO: 434483 - DNA, 33 bp, Homo sapien
gaggaactggaagatcaatgtaggtccaatgaa

SEQ ID NO: 434484 - DNA, 33 bp, Homo sapien
gaggaactggaagatccatgtaggtccaatgaa

SEQ ID NO: 434485 - DNA, 33 bp, Homo sapien
agaccaaccacctcaagaattctgatctctatg

SEQ ID NO: 434486 - DNA, 33 bp, Homo sapien
agaccaaccacctcaataattctgatctctatg

SEQ ID NO: 434487 - DNA, 33 bp, Homo sapien
cttttcactcctgcccaaatcttaagaccagtt

SEQ ID NO: 434488 - DNA, 33 bp, Homo sapien
cttttcactcctgcccgaatcttaagaccagtt

SEQ ID NO: 434489 - DNA, 33 bp, Homo sapien
gcctctatatttctgacggtgtaacataacact

SEQ ID NO: 434490 - DNA, 33 bp, Homo sapien
gcctctatatttctgagggtgtaacataacact

SEQ ID NO: 434491 - DNA, 33 bp, Homo sapien
ttagaggacttccaaacatctcccctacacatc

SEQ ID NO: 434492 - DNA, 33 bp, Homo sapien
ttagaggacttccaaatatctcccctacacatc

SEQ ID NO: 434493 - DNA, 33 bp, Homo sapien
tatatggcaccagacacgaagagtgttcacctt

SEQ ID NO: 434494 - DNA, 33 bp, Homo sapien
tatatggcaccagacatgaagagtgttcacctt

SEQ ID NO: 434495 - DNA, 33 bp, Homo sapien
ggcctaagatactggacggtaagtctaagagcc

SEQ ID NO: 434496 - DNA, 33 bp, Homo sapien
ggcctaagatactggatggtaagtctaagagcc

SEQ ID NO: 434497 - DNA, 33 bp, Homo sapien
ggtgctaagccttgcacagagagagtactaatg

SEQ ID NO: 434498 - DNA, 33 bp, Homo sapien
ggtgctaagccttgcatagagagagtactaatg

SEQ ID NO: 434499 - DNA, 33 bp, Homo sapien
ttcagagctgtgagtcaaaaggagggcttcctg

SEQ ID NO: 434500 - DNA, 33 bp, Homo sapien
ttcagagctgtgagtcgaaaggagggcttcctg

SEQ ID NO: 434501 - DNA, 33 bp, Homo sapien
ctgagtgtttgtcaagcaggaagagtatatgtg

SEQ ID NO: 434502 - DNA, 33 bp, Homo sapien
ctgagtgtttgtcaagtaggaagagtatatgtg

SEQ ID NO: 434503 - DNA, 33 bp, Homo sapien
actattacaggatagacagatgagagacctggg

SEQ ID NO: 434504 - DNA, 33 bp, Homo sapien
actattacaggatagatagatgagagacctggg

SEQ ID NO: 434505 - DNA, 33 bp, Homo sapien
atactgcacatttaccacaaccttggtgttatt

SEQ ID NO: 434506 - DNA, 33 bp, Homo sapien
atactgcacatttacctcaaccttggtgttatt

SEQ ID NO: 434507 - DNA, 33 bp, Homo sapien
aatgacctccttcttacgttttcctgctcctgc

SEQ ID NO: 434508 - DNA, 33 bp, Homo sapien
aatgacctccttcttatgttttcctgctcctgc

SEQ ID NO: 434509 - DNA, 33 bp, Homo sapien
gcccaagctgtcataaatacaaatgactcgaca

SEQ ID NO: 434510 - DNA, 33 bp, Homo sapien
gcccaagctgtcataagtacaaatgactcgaca

SEQ ID NO: 434511 - DNA, 33 bp, Homo sapien
agtgccctacccccacagtgcttgacacattgt

SEQ ID NO: 434512 - DNA, 33 bp, Homo sapien
agtgccctacccccacggtgcttgacacattgt

SEQ ID NO: 434513 - DNA, 33 bp, Homo sapien
cattcggaagcctcccaatgattccggcaggtc

SEQ ID NO: 434514 - DNA, 33 bp, Homo sapien
cattcggaagcctcccgatgattccggcaggtc

SEQ ID NO: 434515 - DNA, 33 bp, Homo sapien
gcttgtggactcttccccatggccttcatcact

SEQ ID NO: 434516 - DNA, 33 bp, Homo sapien
gcttgtggactcttccgcatggccttcatcact

SEQ ID NO: 434517 - DNA, 33 bp, Homo sapien
cacataaaatttacaaaagttttgcaatagggc

SEQ ID NO: 434518 - DNA, 33 bp, Homo sapien
cacataaaatttacaagagttttgcaatagggc

SEQ ID NO: 434519 - DNA, 33 bp, Homo sapien
ctttcattgcgatatgacaaaggtaagagaggg

SEQ ID NO: 434520 - DNA, 33 bp, Homo sapien
ctttcattgcgatatggcaaaggtaagagaggg

SEQ ID NO: 434521 - DNA, 33 bp, Homo sapien
cctcaagtggactctaagtaatctctcccttta

SEQ ID NO: 434522 - DNA, 33 bp, Homo sapien
cctcaagtggactctaggtaatctctcccttta

SEQ ID NO: 434523 - DNA, 33 bp, Homo sapien
aaggataagtgaaacactgtcatacaaaacagc

SEQ ID NO: 434524 - DNA, 33 bp, Homo sapien
aaggataagtgaaacattgtcatacaaaacagc

SEQ ID NO: 434525 - DNA, 33 bp, Homo sapien
aactgcagctcctcaaaaaatggaaggcagggt

SEQ ID NO: 434526 - DNA, 33 bp, Homo sapien
aactgcagctcctcaacaaatggaaggcagggt

SEQ ID NO: 434527 - DNA, 33 bp, Homo sapien
cactgccttgaaaagcacacatcctagaccctt

SEQ ID NO: 434528 - DNA, 33 bp, Homo sapien
cactgccttgaaaagcgcacatcctagaccctt

SEQ ID NO: 434529 - DNA, 33 bp, Homo sapien
gtgctcaggtgtggatcagaaataaaggaaaag

SEQ ID NO: 434530 - DNA, 33 bp, Homo sapien
gtgctcaggtgtggatgagaaataaaggaaaag

SEQ ID NO: 434531 - DNA, 33 bp, Homo sapien
aggtgcttgttgacaaccaaactctggatcatt

SEQ ID NO: 434532 - DNA, 33 bp, Homo sapien
aggtgcttgttgacaatcaaactctggatcatt

SEQ ID NO: 434533 - DNA, 33 bp, Homo sapien
tgctgtggtggaagataagaagagagtaaacaa

SEQ ID NO: 434534 - DNA, 33 bp, Homo sapien
tgctgtggtggaagatgagaagagagtaaacaa

SEQ ID NO: 434535 - DNA, 33 bp, Homo sapien
tgatacatatttaaggaaagtggagttattagg

SEQ ID NO: 434536 - DNA, 33 bp, Homo sapien
tgatacatatttaaggtaagtggagttattagg

SEQ ID NO: 434537 - DNA, 33 bp, Homo sapien
aggtcccttcttagcagctagtaaaatgtcact

SEQ ID NO: 434538 - DNA, 33 bp, Homo sapien
aggtcccttcttagcatctagtaaaatgtcact

SEQ ID NO: 434539 - DNA, 33 bp, Homo sapien
acagagattaataacactgatgctactgacagc

SEQ ID NO: 434540 - DNA, 33 bp, Homo sapien
acagagattaataacattgatgctactgacagc

SEQ ID NO: 434541 - DNA, 33 bp, Homo sapien
tcttggactccactgaacttggtctgttctttt

SEQ ID NO: 434542 - DNA, 33 bp, Homo sapien
tcttggactccactgatcttggtctgttctttt

SEQ ID NO: 434543 - DNA, 33 bp, Homo sapien
caggattgatccgagacgtaccatgctatacca

SEQ ID NO: 434544 - DNA, 33 bp, Homo sapien
caggattgatccgagatgtaccatgctatacca

SEQ ID NO: 434545 - DNA, 33 bp, Homo sapien
atttccctggccttcaccttccataacttcaga

SEQ ID NO: 434546 - DNA, 33 bp, Homo sapien
atttccctggccttcagcttccataacttcaga

SEQ ID NO: 434547 - DNA, 33 bp, Homo sapien
acgggaatataagagcaaacatgatctcagcct

SEQ ID NO: 434548 - DNA, 33 bp, Homo sapien
acgggaatataagagccaacatgatctcagcct

SEQ ID NO: 434549 - DNA, 33 bp, Homo sapien
tttcctcctgagcaacatgactgagtattccat

SEQ ID NO: 434550 - DNA, 33 bp, Homo sapien
tttcctcctgagcaacgtgactgagtattccat

SEQ ID NO: 434551 - DNA, 33 bp, Homo sapien
agtagagaagataagtaacgagcctcagttctc

SEQ ID NO: 434552 - DNA, 33 bp, Homo sapien
agtagagaagataagtgacgagcctcagttctc

SEQ ID NO: 434553 - DNA, 33 bp, Homo sapien
tgtcccaaagcttatcactccttagcccagttc

SEQ ID NO: 434554 - DNA, 33 bp, Homo sapien
tgtcccaaagcttatctctccttagcccagttc

SEQ ID NO: 434555 - DNA, 33 bp, Homo sapien
atatcttatcgggctccctgactcaggtcttta

SEQ ID NO: 434556 - DNA, 33 bp, Homo sapien
atatcttatcgggctctctgactcaggtcttta

SEQ ID NO: 434557 - DNA, 33 bp, Homo sapien
gggcctgctcacttacacccagggcagaccagc

SEQ ID NO: 434558 - DNA, 33 bp, Homo sapien
gggcctgctcacttacgcccagggcagaccagc

SEQ ID NO: 434559 - DNA, 33 bp, Homo sapien
atgccacctagcagtacaaagactgtgatagat

SEQ ID NO: 434560 - DNA, 33 bp, Homo sapien
atgccacctagcagtataaagactgtgatagat

SEQ ID NO: 434561 - DNA, 33 bp, Homo sapien
aaatccttgtggactccaggaatgttgctctgt

SEQ ID NO: 434562 - DNA, 33 bp, Homo sapien
aaatccttgtggactctaggaatgttgctctgt

SEQ ID NO: 434563 - DNA, 33 bp, Homo sapien
gctcaacatctctgtaaaagtagctcatcagga

SEQ ID NO: 434564 - DNA, 33 bp, Homo sapien
gctcaacatctctgtacaagtagctcatcagga

SEQ ID NO: 434565 - DNA, 33 bp, Homo sapien
ggaggaagcgaggaaacacatacattcgaagag

SEQ ID NO: 434566 - DNA, 33 bp, Homo sapien
ggaggaagcgaggaaagacatacattcgaagag

SEQ ID NO: 434567 - DNA, 33 bp, Homo sapien
gcaccggacatctttacgtgggagtttgtgtgg

SEQ ID NO: 434568 - DNA, 33 bp, Homo sapien
gcaccggacatctttatgtgggagtttgtgtgg

SEQ ID NO: 434569 - DNA, 33 bp, Homo sapien
gtggcagcacgagatcagagaacctggacgtgt

SEQ ID NO: 434570 - DNA, 33 bp, Homo sapien
gtggcagcacgagatcggagaacctggacgtgt

SEQ ID NO: 434571 - DNA, 33 bp, Homo sapien
ccatttctgaagaaaaacagccttacctggaga

SEQ ID NO: 434572 - DNA, 33 bp, Homo sapien
ccatttctgaagaaaatcagccttacctggaga

SEQ ID NO: 434573 - DNA, 33 bp, Homo sapien
cctataaagaccagagaagttagttattaggaa

SEQ ID NO: 434574 - DNA, 33 bp, Homo sapien
cctataaagaccagagcagttagttattaggaa

SEQ ID NO: 434575 - DNA, 33 bp, Homo sapien
agtggcaatctggggcaatctttaagtggtttc

SEQ ID NO: 434576 - DNA, 33 bp, Homo sapien
agtggcaatctggggcgatctttaagtggtttc

SEQ ID NO: 434577 - DNA, 33 bp, Homo sapien
ttgtagcaacgtaacaaaaaaaaatagctgaga

SEQ ID NO: 434578 - DNA, 33 bp, Homo sapien
ttgtagcaacgtaacacaaaaaaatagctgaga

SEQ ID NO: 434579 - DNA, 33 bp, Homo sapien
ggaaaatgatacaaaacgtctgaagaattgaga

SEQ ID NO: 434580 - DNA, 33 bp, Homo sapien
ggaaaatgatacaaaatgtctgaagaattgaga

SEQ ID NO: 434581 - DNA, 33 bp, Homo sapien
gttgaaagctatgcgaagttatgtagtaatcat

SEQ ID NO: 434582 - DNA, 33 bp, Homo sapien
gttgaaagctatgcgatgttatgtagtaatcat

SEQ ID NO: 434583 - DNA, 33 bp, Homo sapien
ctgtaataaatcatcaatatatggcaactctta

SEQ ID NO: 434584 - DNA, 33 bp, Homo sapien
ctgtaataaatcatcagtatatggcaactctta

SEQ ID NO: 434585 - DNA, 33 bp, Homo sapien
agtcaatgttcaggcaacactgagttctgaatt

SEQ ID NO: 434586 - DNA, 33 bp, Homo sapien
agtcaatgttcaggcatcactgagttctgaatt

SEQ ID NO: 434587 - DNA, 33 bp, Homo sapien
taactttgagattctacgatctatgaaattggc

SEQ ID NO: 434588 - DNA, 33 bp, Homo sapien
taactttgagattctatgatctatgaaattggc

SEQ ID NO: 434589 - DNA, 33 bp, Homo sapien
cctgaaagcacatgtaaacagatctcttacacc

SEQ ID NO: 434590 - DNA, 33 bp, Homo sapien
cctgaaagcacatgtagacagatctcttacacc

SEQ ID NO: 434591 - DNA, 33 bp, Homo sapien
gcgcacttattgtgaacggagattataggactg

SEQ ID NO: 434592 - DNA, 33 bp, Homo sapien
gcgcacttattgtgaatggagattataggactg

SEQ ID NO: 434593 - DNA, 33 bp, Homo sapien
agccttgtttataacacggcaaaggattcaaga

SEQ ID NO: 434594 - DNA, 33 bp, Homo sapien
agccttgtttataacatggcaaaggattcaaga

SEQ ID NO: 434595 - DNA, 33 bp, Homo sapien
ctcgaggacaggaggcacttcccactgtaaaca

SEQ ID NO: 434596 - DNA, 33 bp, Homo sapien
ctcgaggacaggaggcgcttcccactgtaaaca

SEQ ID NO: 434597 - DNA, 33 bp, Homo sapien
actgtgccttggaccccgaaaaatctagggcaa

SEQ ID NO: 434598 - DNA, 33 bp, Homo sapien
actgtgccttggaccctgaaaaatctagggcaa

SEQ ID NO: 434599 - DNA, 33 bp, Homo sapien
gtaaaaatctatccagcacataacacatcacct

SEQ ID NO: 434600 - DNA, 33 bp, Homo sapien
gtaaaaatctatccagtacataacacatcacct

SEQ ID NO: 434601 - DNA, 33 bp, Homo sapien
ttacgagcaaaatttacggagctatggcatagg

SEQ ID NO: 434602 - DNA, 33 bp, Homo sapien
ttacgagcaaaatttatggagctatggcatagg

SEQ ID NO: 434603 - DNA, 33 bp, Homo sapien
taatgttttactgtcaagtttgttagttgggaa

SEQ ID NO: 434604 - DNA, 33 bp, Homo sapien
taatgttttactgtcaggtttgttagttgggaa

SEQ ID NO: 434605 - DNA, 33 bp, Homo sapien
ccaactaactgtccacagctgaagaccaaacga

SEQ ID NO: 434606 - DNA, 33 bp, Homo sapien
ccaactaactgtccacggctgaagaccaaacga

SEQ ID NO: 434607 - DNA, 33 bp, Homo sapien
gaccttagtaacaatgccattgcaaaacaagat

SEQ ID NO: 434608 - DNA, 33 bp, Homo sapien
gaccttagtaacaatgtcattgcaaaacaagat

SEQ ID NO: 434609 - DNA, 33 bp, Homo sapien
taactggcattgattactaagtccttcacatta

SEQ ID NO: 434610 - DNA, 33 bp, Homo sapien
taactggcattgattattaagtccttcacatta

SEQ ID NO: 434611 - DNA, 33 bp, Homo sapien
taaaagacacagccggaaggaaatacagaaaac

SEQ ID NO: 434612 - DNA, 33 bp, Homo sapien
taaaagacacagccgggaggaaatacagaaaac

SEQ ID NO: 434613 - DNA, 33 bp, Homo sapien
cagatttaaccttgtacggactggaccattgag

SEQ ID NO: 434614 - DNA, 33 bp, Homo sapien
cagatttaaccttgtatggactggaccattgag

SEQ ID NO: 434615 - DNA, 33 bp, Homo sapien
cctgcctaaagccagaagtaattctaccttgct

SEQ ID NO: 434616 - DNA, 33 bp, Homo sapien
cctgcctaaagccagacgtaattctaccttgct

SEQ ID NO: 434617 - DNA, 33 bp, Homo sapien
tgagcagtttgaccaccgaggctgatctgtttg

SEQ ID NO: 434618 - DNA, 33 bp, Homo sapien
tgagcagtttgaccactgaggctgatctgtttg

SEQ ID NO: 434619 - DNA, 33 bp, Homo sapien
agcaaactttagtggcacttttactgcattagc

SEQ ID NO: 434620 - DNA, 33 bp, Homo sapien
agcaaactttagtggcgcttttactgcattagc

SEQ ID NO: 434621 - DNA, 33 bp, Homo sapien
cgtaatgtatagagaaactgtgatttcatttca

SEQ ID NO: 434622 - DNA, 33 bp, Homo sapien
cgtaatgtatagagaatctgtgatttcatttca

SEQ ID NO: 434623 - DNA, 33 bp, Homo sapien
gctatcattggatctcaactgctcgaggtgtag

SEQ ID NO: 434624 - DNA, 33 bp, Homo sapien
gctatcattggatctctactgctcgaggtgtag

SEQ ID NO: 434625 - DNA, 33 bp, Homo sapien
cttgttatcaacacaaatgctacagaactgcta

SEQ ID NO: 434626 - DNA, 33 bp, Homo sapien
cttgttatcaacacaagtgctacagaactgcta

SEQ ID NO: 434627 - DNA, 33 bp, Homo sapien
aagagaaacctctttaaggctgaattggaatga

SEQ ID NO: 434628 - DNA, 33 bp, Homo sapien
aagagaaacctctttatggctgaattggaatga

SEQ ID NO: 434629 - DNA, 33 bp, Homo sapien
acttttctacaatgcaaagtaatcttggtaaca

SEQ ID NO: 434630 - DNA, 33 bp, Homo sapien
acttttctacaatgcatagtaatcttggtaaca

SEQ ID NO: 434631 - DNA, 33 bp, Homo sapien
agttccttccctggacaagtatttttggctctg

SEQ ID NO: 434632 - DNA, 33 bp, Homo sapien
agttccttccctggacgagtatttttggctctg

SEQ ID NO: 434633 - DNA, 33 bp, Homo sapien
ttagcctcgtgaaggcactgctacagacaactg

SEQ ID NO: 434634 - DNA, 33 bp, Homo sapien
ttagcctcgtgaaggctctgctacagacaactg

SEQ ID NO: 434635 - DNA, 33 bp, Homo sapien
aatagtgtaagcgagccagccataatcatgcaa

SEQ ID NO: 434636 - DNA, 33 bp, Homo sapien
aatagtgtaagcgagctagccataatcatgcaa

SEQ ID NO: 434637 - DNA, 33 bp, Homo sapien
atctctgcagcaggaacagctgtgccaccagga

SEQ ID NO: 434638 - DNA, 33 bp, Homo sapien
atctctgcagcaggaatagctgtgccaccagga

SEQ ID NO: 434639 - DNA, 33 bp, Homo sapien
tagcctgagggactgactagttttcagtattca

SEQ ID NO: 434640 - DNA, 33 bp, Homo sapien
tagcctgagggactgagtagttttcagtattca

SEQ ID NO: 434641 - DNA, 33 bp, Homo sapien
atttgcttagtacatgcagtagagcagccacca

SEQ ID NO: 434642 - DNA, 33 bp, Homo sapien
atttgcttagtacatgtagtagagcagccacca

SEQ ID NO: 434643 - DNA, 33 bp, Homo sapien
cattagaacttatggacgtgagtaaggggtgtg

SEQ ID NO: 434644 - DNA, 33 bp, Homo sapien
cattagaacttatggatgtgagtaaggggtgtg

SEQ ID NO: 434645 - DNA, 33 bp, Homo sapien
gactggactagcagcaactggtgatctggtctc

SEQ ID NO: 434646 - DNA, 33 bp, Homo sapien
gactggactagcagcacctggtgatctggtctc

SEQ ID NO: 434647 - DNA, 33 bp, Homo sapien
tttgtatgatgtcaaacttccaaccacgatatt

SEQ ID NO: 434648 - DNA, 33 bp, Homo sapien
tttgtatgatgtcaaatttccaaccacgatatt

SEQ ID NO: 434649 - DNA, 33 bp, Homo sapien
gaaacagtaaggcaaccctatagacagaattct

SEQ ID NO: 434650 - DNA, 33 bp, Homo sapien
gaaacagtaaggcaactctatagacagaattct

SEQ ID NO: 434651 - DNA, 33 bp, Homo sapien
gtatttactaagtgaacgcaaaggaaaacaggt

SEQ ID NO: 434652 - DNA, 33 bp, Homo sapien
gtatttactaagtgaatgcaaaggaaaacaggt

SEQ ID NO: 434653 - DNA, 33 bp, Homo sapien
aaaaatgtacagcgaaattccagtgcaccattt

SEQ ID NO: 434654 - DNA, 33 bp, Homo sapien
aaaaatgtacagcgaagttccagtgcaccattt

SEQ ID NO: 434655 - DNA, 33 bp, Homo sapien
gccaagatggaaataaggtgaatggtcagactt

SEQ ID NO: 434656 - DNA, 33 bp, Homo sapien
gccaagatggaaataatgtgaatggtcagactt

SEQ ID NO: 434657 - DNA, 33 bp, Homo sapien
cctgctacagatatagcctagaaaaaatgaata

SEQ ID NO: 434658 - DNA, 33 bp, Homo sapien
cctgctacagatatagtctagaaaaaatgaata

SEQ ID NO: 434659 - DNA, 33 bp, Homo sapien
tcctgggagataatagaataaactcatggagga

SEQ ID NO: 434660 - DNA, 33 bp, Homo sapien
tcctgggagataataggataaactcatggagga

SEQ ID NO: 434661 - DNA, 33 bp, Homo sapien
gaaaagcattctattcaagttgaggaatgtctg

SEQ ID NO: 434662 - DNA, 33 bp, Homo sapien
gaaaagcattctattcgagttgaggaatgtctg

SEQ ID NO: 434663 - DNA, 33 bp, Homo sapien
tcaattcacaacaggcaaacttgaactgcagga

SEQ ID NO: 434664 - DNA, 33 bp, Homo sapien
tcaattcacaacaggcgaacttgaactgcagga

SEQ ID NO: 434665 - DNA, 33 bp, Homo sapien
tatttgaaccactctgaaacaagaagaaaattg

SEQ ID NO: 434666 - DNA, 33 bp, Homo sapien
tatttgaaccactctggaacaagaagaaaattg

SEQ ID NO: 434667 - DNA, 33 bp, Homo sapien
gtcagcaacaagctaaccaatgggactgaacaa

SEQ ID NO: 434668 - DNA, 33 bp, Homo sapien
gtcagcaacaagctaatcaatgggactgaacaa

SEQ ID NO: 434669 - DNA, 33 bp, Homo sapien
agtctgcaggacaggaaaacaatctaccaagat

SEQ ID NO: 434670 - DNA, 33 bp, Homo sapien
agtctgcaggacaggagaacaatctaccaagat

SEQ ID NO: 434671 - DNA, 33 bp, Homo sapien
gttagattggcaggaacggccctgagtatttat

SEQ ID NO: 434672 - DNA, 33 bp, Homo sapien
gttagattggcaggaatggccctgagtatttat

SEQ ID NO: 434673 - DNA, 33 bp, Homo sapien
taacttgggtgacagacagctttaagtgtctta

SEQ ID NO: 434674 - DNA, 33 bp, Homo sapien
taacttgggtgacagatagctttaagtgtctta

SEQ ID NO: 434675 - DNA, 33 bp, Homo sapien
gccagctccttgacggaattctttcatgaacag

SEQ ID NO: 434676 - DNA, 33 bp, Homo sapien
gccagctccttgacgggattctttcatgaacag

SEQ ID NO: 434677 - DNA, 33 bp, Homo sapien
tgaataacatggtaaaatcttggttcgataagt

SEQ ID NO: 434678 - DNA, 33 bp, Homo sapien
tgaataacatggtaaagtcttggttcgataagt

SEQ ID NO: 434679 - DNA, 33 bp, Homo sapien
tggatgtgtagtcaccactaaagcctttctatt

SEQ ID NO: 434680 - DNA, 33 bp, Homo sapien
tggatgtgtagtcaccgctaaagcctttctatt

SEQ ID NO: 434681 - DNA, 33 bp, Homo sapien
tctgtgtgttaccttgcagaattcattgtgcca

SEQ ID NO: 434682 - DNA, 33 bp, Homo sapien
tctgtgtgttaccttgtagaattcattgtgcca

SEQ ID NO: 434683 - DNA, 33 bp, Homo sapien
aagaaggcaggcttgcaaatgaggaagtgtcag

SEQ ID NO: 434684 - DNA, 33 bp, Homo sapien
aagaaggcaggcttgcgaatgaggaagtgtcag

SEQ ID NO: 434685 - DNA, 33 bp, Homo sapien
tctgtctgaatcactcaaatcttctcaattttg

SEQ ID NO: 434686 - DNA, 33 bp, Homo sapien
tctgtctgaatcactcgaatcttctcaattttg

SEQ ID NO: 434687 - DNA, 33 bp, Homo sapien
taaaattgagaacttacaaatgataggaagcag

SEQ ID NO: 434688 - DNA, 33 bp, Homo sapien
taaaattgagaacttagaaatgataggaagcag

SEQ ID NO: 434689 - DNA, 33 bp, Homo sapien
catcaccaatcaggagaaataaaaaatgaagaa

SEQ ID NO: 434690 - DNA, 33 bp, Homo sapien
catcaccaatcaggagtaataaaaaatgaagaa

SEQ ID NO: 434691 - DNA, 33 bp, Homo sapien
atgagagaccatgaacaattcaatgtgtgcaca

SEQ ID NO: 434692 - DNA, 33 bp, Homo sapien
atgagagaccatgaacgattcaatgtgtgcaca

SEQ ID NO: 434693 - DNA, 33 bp, Homo sapien
agattttcctgctcctaagaactgtaagtcaag

SEQ ID NO: 434694 - DNA, 33 bp, Homo sapien
agattttcctgctcctgagaactgtaagtcaag

SEQ ID NO: 434695 - DNA, 33 bp, Homo sapien
agccacaatccaggacaacaaaagatgctccaa

SEQ ID NO: 434696 - DNA, 33 bp, Homo sapien
agccacaatccaggacgacaaaagatgctccaa

SEQ ID NO: 434697 - DNA, 33 bp, Homo sapien
tgaagtggccaaagaaattatgcagtaaggtaa

SEQ ID NO: 434698 - DNA, 33 bp, Homo sapien
tgaagtggccaaagaatttatgcagtaaggtaa

SEQ ID NO: 434699 - DNA, 33 bp, Homo sapien
ttcatacctggagctaagggctgttctcaaagg

SEQ ID NO: 434700 - DNA, 33 bp, Homo sapien
ttcatacctggagctaggggctgttctcaaagg

SEQ ID NO: 434701 - DNA, 33 bp, Homo sapien
tttccatttacttggcaaatagaactaatatcc

SEQ ID NO: 434702 - DNA, 33 bp, Homo sapien
tttccatttacttggcgaatagaactaatatcc

SEQ ID NO: 434703 - DNA, 33 bp, Homo sapien
aaacatctactccagccacttaggtgtactgaa

SEQ ID NO: 434704 - DNA, 33 bp, Homo sapien
aaacatctactccagctacttaggtgtactgaa

SEQ ID NO: 434705 - DNA, 33 bp, Homo sapien
aaatgtgaacaatggaatattagtgccaggtca

SEQ ID NO: 434706 - DNA, 33 bp, Homo sapien
aaatgtgaacaatggagtattagtgccaggtca

SEQ ID NO: 434707 - DNA, 33 bp, Homo sapien
tcccagcgaccagagacaagagcctaagtccca

SEQ ID NO: 434708 - DNA, 33 bp, Homo sapien
tcccagcgaccagagagaagagcctaagtccca

SEQ ID NO: 434709 - DNA, 33 bp, Homo sapien
catcctgcagcactcactgaagaccaagatttc

SEQ ID NO: 434710 - DNA, 33 bp, Homo sapien
catcctgcagcactcattgaagaccaagatttc

SEQ ID NO: 434711 - DNA, 33 bp, Homo sapien
tcctaccagggacccaatggccaagcggaagca

SEQ ID NO: 434712 - DNA, 33 bp, Homo sapien
tcctaccagggacccagtggccaagcggaagca

SEQ ID NO: 434713 - DNA, 33 bp, Homo sapien
gagtcgtttgaatccaagagaaataggttgctg

SEQ ID NO: 434714 - DNA, 33 bp, Homo sapien
gagtcgtttgaatccaggagaaataggttgctg

SEQ ID NO: 434715 - DNA, 33 bp, Homo sapien
ccaagtgcttcacaaaagttaccataattaatc

SEQ ID NO: 434716 - DNA, 33 bp, Homo sapien
ccaagtgcttcacaaacgttaccataattaatc

SEQ ID NO: 434717 - DNA, 33 bp, Homo sapien
tatttagaaaaacatcacatatctgaacagaga

SEQ ID NO: 434718 - DNA, 33 bp, Homo sapien
tatttagaaaaacatcgcatatctgaacagaga

SEQ ID NO: 434719 - DNA, 33 bp, Homo sapien
ctcccatgaatgagtacgctggccaggaatggt

SEQ ID NO: 434720 - DNA, 33 bp, Homo sapien
ctcccatgaatgagtaggctggccaggaatggt

SEQ ID NO: 434721 - DNA, 33 bp, Homo sapien
gctgcccagggggctcagagacttgccttctaa

SEQ ID NO: 434722 - DNA, 33 bp, Homo sapien
gctgcccagggggctcggagacttgccttctaa

SEQ ID NO: 434723 - DNA, 33 bp, Homo sapien
actcagacatactcatcacacaatgaaatgaag

SEQ ID NO: 434724 - DNA, 33 bp, Homo sapien
actcagacatactcatgacacaatgaaatgaag

SEQ ID NO: 434725 - DNA, 33 bp, Homo sapien
aattctgtaaaacacaagctagttttgaaatgg

SEQ ID NO: 434726 - DNA, 33 bp, Homo sapien
aattctgtaaaacacaggctagttttgaaatgg

SEQ ID NO: 434727 - DNA, 33 bp, Homo sapien
ttacctctaagatagcaagcacagcacaggact

SEQ ID NO: 434728 - DNA, 33 bp, Homo sapien
ttacctctaagatagcgagcacagcacaggact

SEQ ID NO: 434729 - DNA, 33 bp, Homo sapien
tgatgattaactgtaagtcatgacattatgcaa

SEQ ID NO: 434730 - DNA, 33 bp, Homo sapien
tgatgattaactgtaattcatgacattatgcaa

SEQ ID NO: 434731 - DNA, 33 bp, Homo sapien
tgatggagtagttttgaaaaccagtgttactca

SEQ ID NO: 434732 - DNA, 33 bp, Homo sapien
tgatggagtagttttgcaaaccagtgttactca

SEQ ID NO: 434733 - DNA, 33 bp, Homo sapien
agaaaactcctattcaacattcacttctcaaag

SEQ ID NO: 434734 - DNA, 33 bp, Homo sapien
agaaaactcctattcatcattcacttctcaaag

SEQ ID NO: 434735 - DNA, 33 bp, Homo sapien
acaggttgtcaacaaaagaaagggtatttgact

SEQ ID NO: 434736 - DNA, 33 bp, Homo sapien
acaggttgtcaacaaaggaaagggtatttgact

SEQ ID NO: 434737 - DNA, 33 bp, Homo sapien
ggctgggcagttcccacgtgagagcttgagtgt

SEQ ID NO: 434738 - DNA, 33 bp, Homo sapien
ggctgggcagttcccaggtgagagcttgagtgt

SEQ ID NO: 434739 - DNA, 33 bp, Homo sapien
tgttggtgatggataaaactaagaccatatcta

SEQ ID NO: 434740 - DNA, 33 bp, Homo sapien
tgttggtgatggataacactaagaccatatcta

SEQ ID NO: 434741 - DNA, 33 bp, Homo sapien
tttaacaatgtgggcacaaaaaattttgcaatg

SEQ ID NO: 434742 - DNA, 33 bp, Homo sapien
tttaacaatgtgggcataaaaaattttgcaatg

SEQ ID NO: 434743 - DNA, 33 bp, Homo sapien
gatattagaaaatcctaacagcaaagggcagta

SEQ ID NO: 434744 - DNA, 33 bp, Homo sapien
gatattagaaaatcctgacagcaaagggcagta

SEQ ID NO: 434745 - DNA, 33 bp, Homo sapien
agctatacgactgcatcaaccactaaatttgcc

SEQ ID NO: 434746 - DNA, 33 bp, Homo sapien
agctatacgactgcattaaccactaaatttgcc

SEQ ID NO: 434747 - DNA, 33 bp, Homo sapien
gcacaggaatgaactcggaggttcccctctcct

SEQ ID NO: 434748 - DNA, 33 bp, Homo sapien
gcacaggaatgaactctgaggttcccctctcct

SEQ ID NO: 434749 - DNA, 33 bp, Homo sapien
ccactggtagaagtaacatagtccctaggctct

SEQ ID NO: 434750 - DNA, 33 bp, Homo sapien
ccactggtagaagtaagatagtccctaggctct

SEQ ID NO: 434751 - DNA, 33 bp, Homo sapien
ttttgatactgaatcaagaagccagatgtgaga

SEQ ID NO: 434752 - DNA, 33 bp, Homo sapien
ttttgatactgaatcaggaagccagatgtgaga

SEQ ID NO: 434753 - DNA, 33 bp, Homo sapien
tatcttccggtgaacactgcctattcagaaccc

SEQ ID NO: 434754 - DNA, 33 bp, Homo sapien
tatcttccggtgaacattgcctattcagaaccc

SEQ ID NO: 434755 - DNA, 33 bp, Homo sapien
tttctaattattcgacaacccaactgatggaag

SEQ ID NO: 434756 - DNA, 33 bp, Homo sapien
tttctaattattcgaccacccaactgatggaag

SEQ ID NO: 434757 - DNA, 33 bp, Homo sapien
attatttttctacaaaagaagcttaatgatgta

SEQ ID NO: 434758 - DNA, 33 bp, Homo sapien
attatttttctacaaatgaagcttaatgatgta

SEQ ID NO: 434759 - DNA, 33 bp, Homo sapien
aaatcgaaatatcttcgctgaaattaatgagcc

SEQ ID NO: 434760 - DNA, 33 bp, Homo sapien
aaatcgaaatatcttctctgaaattaatgagcc

SEQ ID NO: 434761 - DNA, 33 bp, Homo sapien
gaaaaccagctacaaacgaacttcaggagaacc

SEQ ID NO: 434762 - DNA, 33 bp, Homo sapien
gaaaaccagctacaaatgaacttcaggagaacc

SEQ ID NO: 434763 - DNA, 33 bp, Homo sapien
gctgatgttctgtttgcaccagagcaaaggaga

SEQ ID NO: 434764 - DNA, 33 bp, Homo sapien
gctgatgttctgtttgtaccagagcaaaggaga

SEQ ID NO: 434765 - DNA, 33 bp, Homo sapien
tttggtactttaaaaaattgagaaatctgtgag

SEQ ID NO: 434766 - DNA, 33 bp, Homo sapien
tttggtactttaaaaagttgagaaatctgtgag

SEQ ID NO: 434767 - DNA, 33 bp, Homo sapien
tctgatctgtcagtgacgtttttgatggcagaa

SEQ ID NO: 434768 - DNA, 33 bp, Homo sapien
tctgatctgtcagtgatgtttttgatggcagaa

SEQ ID NO: 434769 - DNA, 33 bp, Homo sapien
aaagccaactctgtcacagcattttcagggttt

SEQ ID NO: 434770 - DNA, 33 bp, Homo sapien
aaagccaactctgtcatagcattttcagggttt

SEQ ID NO: 434771 - DNA, 33 bp, Homo sapien
ttcatcagcttcttcacgttttccttatgcttt

SEQ ID NO: 434772 - DNA, 33 bp, Homo sapien
ttcatcagcttcttcatgttttccttatgcttt

SEQ ID NO: 434773 - DNA, 33 bp, Homo sapien
cccagagcgggtagtacgacttcagtgagaaat

SEQ ID NO: 434774 - DNA, 33 bp, Homo sapien
cccagagcgggtagtatgacttcagtgagaaat

SEQ ID NO: 434775 - DNA, 33 bp, Homo sapien
gagaaaatcagaagacagagactgaaacataac

SEQ ID NO: 434776 - DNA, 33 bp, Homo sapien
gagaaaatcagaagacggagactgaaacataac

SEQ ID NO: 434777 - DNA, 33 bp, Homo sapien
tagcacttcttcactcacttgctctcctgccag

SEQ ID NO: 434778 - DNA, 33 bp, Homo sapien
tagcacttcttcactcgcttgctctcctgccag

SEQ ID NO: 434779 - DNA, 33 bp, Homo sapien
gtcacctcttgtgacaatgatctgaagcccagt

SEQ ID NO: 434780 - DNA, 33 bp, Homo sapien
gtcacctcttgtgacagtgatctgaagcccagt

SEQ ID NO: 434781 - DNA, 33 bp, Homo sapien
agtctgaatgggttataaattttctttgtgttt

SEQ ID NO: 434782 - DNA, 33 bp, Homo sapien
agtctgaatgggttatgaattttctttgtgttt

SEQ ID NO: 434783 - DNA, 33 bp, Homo sapien
agcctgaatgcttttgcatcaataagtattcca

SEQ ID NO: 434784 - DNA, 33 bp, Homo sapien
agcctgaatgcttttgtatcaataagtattcca

SEQ ID NO: 434785 - DNA, 33 bp, Homo sapien
atggccaatattaagccaccaatgtgaggttac

SEQ ID NO: 434786 - DNA, 33 bp, Homo sapien
atggccaatattaagctaccaatgtgaggttac

SEQ ID NO: 434787 - DNA, 33 bp, Homo sapien
ctaagaagctatgttacatgtttccagatcatc

SEQ ID NO: 434788 - DNA, 33 bp, Homo sapien
ctaagaagctatgttagatgtttccagatcatc

SEQ ID NO: 434789 - DNA, 33 bp, Homo sapien
acaagggccatcctcaatctgaccttagatttc

SEQ ID NO: 434790 - DNA, 33 bp, Homo sapien
acaagggccatcctcagtctgaccttagatttc

SEQ ID NO: 434791 - DNA, 33 bp, Homo sapien
aatttggaagagtagcaatgtggatctgggagg

SEQ ID NO: 434792 - DNA, 33 bp, Homo sapien
aatttggaagagtagccatgtggatctgggagg

SEQ ID NO: 434793 - DNA, 33 bp, Homo sapien
ttctaactgttgatgcaacaacggatcagagaa

SEQ ID NO: 434794 - DNA, 33 bp, Homo sapien
ttctaactgttgatgcgacaacggatcagagaa

SEQ ID NO: 434795 - DNA, 33 bp, Homo sapien
cttgcatctaaaagcaactcttttcccctctgc

SEQ ID NO: 434796 - DNA, 33 bp, Homo sapien
cttgcatctaaaagcagctcttttcccctctgc

SEQ ID NO: 434797 - DNA, 33 bp, Homo sapien
tggaggaggagtctgcactatgtgttagcagga

SEQ ID NO: 434798 - DNA, 33 bp, Homo sapien
tggaggaggagtctgcgctatgtgttagcagga

SEQ ID NO: 434799 - DNA, 33 bp, Homo sapien
ctggctgtgggacctcaaactgttgattaacct

SEQ ID NO: 434800 - DNA, 33 bp, Homo sapien
ctggctgtgggacctcgaactgttgattaacct

SEQ ID NO: 434801 - DNA, 33 bp, Homo sapien
cattactttcacactcgaatacctctacaaata

SEQ ID NO: 434802 - DNA, 33 bp, Homo sapien
cattactttcacactctaatacctctacaaata

SEQ ID NO: 434803 - DNA, 33 bp, Homo sapien
gttccaatgctgagaaaacaagattgacaaaca

SEQ ID NO: 434804 - DNA, 33 bp, Homo sapien
gttccaatgctgagaacacaagattgacaaaca

SEQ ID NO: 434805 - DNA, 33 bp, Homo sapien
ggagttgcaaaatgccacaactagtagggacat

SEQ ID NO: 434806 - DNA, 33 bp, Homo sapien
ggagttgcaaaatgccgcaactagtagggacat

SEQ ID NO: 434807 - DNA, 33 bp, Homo sapien
aagtcaggttgaaatcaatttggtggaaatcgg

SEQ ID NO: 434808 - DNA, 33 bp, Homo sapien
aagtcaggttgaaatccatttggtggaaatcgg

SEQ ID NO: 434809 - DNA, 33 bp, Homo sapien
ttgctggggaaatcaaactggcatatgttttca

SEQ ID NO: 434810 - DNA, 33 bp, Homo sapien
ttgctggggaaatcaagctggcatatgttttca

SEQ ID NO: 434811 - DNA, 33 bp, Homo sapien
gtggtacttgtgaggaagtgagtcattacagca

SEQ ID NO: 434812 - DNA, 33 bp, Homo sapien
gtggtacttgtgaggatgtgagtcattacagca

SEQ ID NO: 434813 - DNA, 33 bp, Homo sapien
gaacctagggtccatccgaaagaagtttatggt

SEQ ID NO: 434814 - DNA, 33 bp, Homo sapien
gaacctagggtccatctgaaagaagtttatggt

SEQ ID NO: 434815 - DNA, 33 bp, Homo sapien
aactcagtcttaggacacaaaggaattagcctt

SEQ ID NO: 434816 - DNA, 33 bp, Homo sapien
aactcagtcttaggactcaaaggaattagcctt

SEQ ID NO: 434817 - DNA, 33 bp, Homo sapien
attatacaacagaagcacagtgaagggatatcg

SEQ ID NO: 434818 - DNA, 33 bp, Homo sapien
attatacaacagaagcgcagtgaagggatatcg

SEQ ID NO: 434819 - DNA, 33 bp, Homo sapien
agagataaaactggaacggtaccttcaggtcag

SEQ ID NO: 434820 - DNA, 33 bp, Homo sapien
agagataaaactggaatggtaccttcaggtcag

SEQ ID NO: 434821 - DNA, 33 bp, Homo sapien
atttactggctctttccaaagcaatcaacttgt

SEQ ID NO: 434822 - DNA, 33 bp, Homo sapien
atttactggctctttctaaagcaatcaacttgt

SEQ ID NO: 434823 - DNA, 33 bp, Homo sapien
aaatacggaccaaaaacatcgccttaacacatg

SEQ ID NO: 434824 - DNA, 33 bp, Homo sapien
aaatacggaccaaaaagatcgccttaacacatg

SEQ ID NO: 434825 - DNA, 33 bp, Homo sapien
gaaaaatcacgattacgcactcgataagttaga

SEQ ID NO: 434826 - DNA, 33 bp, Homo sapien
gaaaaatcacgattactcactcgataagttaga

SEQ ID NO: 434827 - DNA, 33 bp, Homo sapien
ccttgagaagagagtccaatggtcacttaggct

SEQ ID NO: 434828 - DNA, 33 bp, Homo sapien
ccttgagaagagagtctaatggtcacttaggct

SEQ ID NO: 434829 - DNA, 33 bp, Homo sapien
tttctctttcacttccccaaaacaattatctac

SEQ ID NO: 434830 - DNA, 33 bp, Homo sapien
tttctctttcacttcctcaaaacaattatctac

SEQ ID NO: 434831 - DNA, 33 bp, Homo sapien
gtttgaatccaattaacttaaatgtcattgtag

SEQ ID NO: 434832 - DNA, 33 bp, Homo sapien
gtttgaatccaattaagttaaatgtcattgtag

SEQ ID NO: 434833 - DNA, 33 bp, Homo sapien
ttatattaggtgtaaaagactatctgccattga

SEQ ID NO: 434834 - DNA, 33 bp, Homo sapien
ttatattaggtgtaaaggactatctgccattga

SEQ ID NO: 434835 - DNA, 33 bp, Homo sapien
tgtaaaaataagaacaacagtcttgccaaaatt

SEQ ID NO: 434836 - DNA, 33 bp, Homo sapien
tgtaaaaataagaacagcagtcttgccaaaatt

SEQ ID NO: 434837 - DNA, 33 bp, Homo sapien
agtctgttttcaaataggttagaggcaatcagg

SEQ ID NO: 434838 - DNA, 33 bp, Homo sapien
agtctgttttcaaatatgttagaggcaatcagg

SEQ ID NO: 434839 - DNA, 33 bp, Homo sapien
ccccacagctccttgacgaattcttatatggac

SEQ ID NO: 434840 - DNA, 33 bp, Homo sapien
ccccacagctccttgatgaattcttatatggac

SEQ ID NO: 434841 - DNA, 33 bp, Homo sapien
atgttgttaacttagacactaacctggttacta

SEQ ID NO: 434842 - DNA, 33 bp, Homo sapien
atgttgttaacttagatactaacctggttacta

SEQ ID NO: 434843 - DNA, 33 bp, Homo sapien
gttgaggattcatggaggaacacaaccaacctg

SEQ ID NO: 434844 - DNA, 33 bp, Homo sapien
gttgaggattcatggatgaacacaaccaacctg

SEQ ID NO: 434845 - DNA, 33 bp, Homo sapien
gaaacactcagttaaaacagtcacagggcactg

SEQ ID NO: 434846 - DNA, 33 bp, Homo sapien
gaaacactcagttaaaccagtcacagggcactg

SEQ ID NO: 434847 - DNA, 33 bp, Homo sapien
atggctctttcaagcacagattccaaggataag

SEQ ID NO: 434848 - DNA, 33 bp, Homo sapien
atggctctttcaagcagagattccaaggataag

SEQ ID NO: 434849 - DNA, 33 bp, Homo sapien
ccctttttgcctagaaaagaagcaggtgggtgt

SEQ ID NO: 434850 - DNA, 33 bp, Homo sapien
ccctttttgcctagaatagaagcaggtgggtgt

SEQ ID NO: 434851 - DNA, 33 bp, Homo sapien
gtgaaaaagcagaagacatcctcaaggctagag

SEQ ID NO: 434852 - DNA, 33 bp, Homo sapien
gtgaaaaagcagaagatatcctcaaggctagag

SEQ ID NO: 434853 - DNA, 33 bp, Homo sapien
agcaccagaaaacatcaagttatcattgaatga

SEQ ID NO: 434854 - DNA, 33 bp, Homo sapien
agcaccagaaaacatcgagttatcattgaatga

SEQ ID NO: 434855 - DNA, 33 bp, Homo sapien
taactaattcatccacaagacttcattgaacgt

SEQ ID NO: 434856 - DNA, 33 bp, Homo sapien
taactaattcatccaccagacttcattgaacgt

SEQ ID NO: 434857 - DNA, 33 bp, Homo sapien
ctagatagatggaatcacccaagccaaggcaca

SEQ ID NO: 434858 - DNA, 33 bp, Homo sapien
ctagatagatggaatcgcccaagccaaggcaca

SEQ ID NO: 434859 - DNA, 33 bp, Homo sapien
aaaaagagaggcagccaagcaccctgtataccc

SEQ ID NO: 434860 - DNA, 33 bp, Homo sapien
aaaaagagaggcagcccagcaccctgtataccc

SEQ ID NO: 434861 - DNA, 33 bp, Homo sapien
cactggagaccctggaacaaaggagctgattga

SEQ ID NO: 434862 - DNA, 33 bp, Homo sapien
cactggagaccctggagcaaaggagctgattga

SEQ ID NO: 434863 - DNA, 33 bp, Homo sapien
gtggagcaaaggtatccctcttgtcttgatccc

SEQ ID NO: 434864 - DNA, 33 bp, Homo sapien
gtggagcaaaggtatctctcttgtcttgatccc

SEQ ID NO: 434865 - DNA, 33 bp, Homo sapien
cagatatggggagctacgaaaggaatggtagca

SEQ ID NO: 434866 - DNA, 33 bp, Homo sapien
cagatatggggagctatgaaaggaatggtagca

SEQ ID NO: 434867 - DNA, 33 bp, Homo sapien
gggagaagatactgtcaattcttttatagctgt

SEQ ID NO: 434868 - DNA, 33 bp, Homo sapien
gggagaagatactgtcgattcttttatagctgt

SEQ ID NO: 434869 - DNA, 33 bp, Homo sapien
gccaaagataaaatcacaacatctcttgtgtag

SEQ ID NO: 434870 - DNA, 33 bp, Homo sapien
gccaaagataaaatcataacatctcttgtgtag

SEQ ID NO: 434871 - DNA, 33 bp, Homo sapien
cttgtatagtgaaaagaagattcgctatgatca

SEQ ID NO: 434872 - DNA, 33 bp, Homo sapien
cttgtatagtgaaaaggagattcgctatgatca

SEQ ID NO: 434873 - DNA, 33 bp, Homo sapien
taagtctcttcaaagactccatttattttggta

SEQ ID NO: 434874 - DNA, 33 bp, Homo sapien
taagtctcttcaaagattccatttattttggta

SEQ ID NO: 434875 - DNA, 33 bp, Homo sapien
tggtgatttcagtttacagaggccataatgtag

SEQ ID NO: 434876 - DNA, 33 bp, Homo sapien
tggtgatttcagtttatagaggccataatgtag

SEQ ID NO: 434877 - DNA, 33 bp, Homo sapien
tgtgatgctggccacacagtgttgtttccaaac

SEQ ID NO: 434878 - DNA, 33 bp, Homo sapien
tgtgatgctggccacagagtgttgtttccaaac

SEQ ID NO: 434879 - DNA, 33 bp, Homo sapien
atcagaaggaaaataggcatgtgtttcatctat

SEQ ID NO: 434880 - DNA, 33 bp, Homo sapien
atcagaaggaaaatagtcatgtgtttcatctat

SEQ ID NO: 434881 - DNA, 33 bp, Homo sapien
tgctgttgtttgggcagaaccctggatttggat

SEQ ID NO: 434882 - DNA, 33 bp, Homo sapien
tgctgttgtttgggcataaccctggatttggat

SEQ ID NO: 434883 - DNA, 33 bp, Homo sapien
actaggaatggcagaacagaaaggtagaaagag

SEQ ID NO: 434884 - DNA, 33 bp, Homo sapien
actaggaatggcagaagagaaaggtagaaagag

SEQ ID NO: 434885 - DNA, 33 bp, Homo sapien
gcttccttagaccaagaacgggctggaaggtgc

SEQ ID NO: 434886 - DNA, 33 bp, Homo sapien
gcttccttagaccaaggacgggctggaaggtgc

SEQ ID NO: 434887 - DNA, 33 bp, Homo sapien
ggggaatctaggatccaagtgaggaaatatgaa

SEQ ID NO: 434888 - DNA, 33 bp, Homo sapien
ggggaatctaggatccgagtgaggaaatatgaa

SEQ ID NO: 434889 - DNA, 33 bp, Homo sapien
aagatctcattgaaaacgtttccttcatagact

SEQ ID NO: 434890 - DNA, 33 bp, Homo sapien
aagatctcattgaaaatgtttccttcatagact

SEQ ID NO: 434891 - DNA, 33 bp, Homo sapien
gggagagaccagctgaaggagaaggagcctaat

SEQ ID NO: 434892 - DNA, 33 bp, Homo sapien
gggagagaccagctgagggagaaggagcctaat

SEQ ID NO: 434893 - DNA, 33 bp, Homo sapien
ggtgatgacatcataaccccgggtccccactgt

SEQ ID NO: 434894 - DNA, 33 bp, Homo sapien
ggtgatgacatcataatcccgggtccccactgt

SEQ ID NO: 434895 - DNA, 33 bp, Homo sapien
tacccagaaaattgcccgatgcatactgaagag

SEQ ID NO: 434896 - DNA, 33 bp, Homo sapien
tacccagaaaattgcctgatgcatactgaagag

SEQ ID NO: 434897 - DNA, 33 bp, Homo sapien
cttgctggaagaccatcaagctgtcatttttct

SEQ ID NO: 434898 - DNA, 33 bp, Homo sapien
cttgctggaagaccatgaagctgtcatttttct

SEQ ID NO: 434899 - DNA, 33 bp, Homo sapien
caaggatgatatcatgcaagttgtattaggcca

SEQ ID NO: 434900 - DNA, 33 bp, Homo sapien
caaggatgatatcatggaagttgtattaggcca

SEQ ID NO: 434901 - DNA, 33 bp, Homo sapien
tctcctccacctattccaggaaaagtcagtgct

SEQ ID NO: 434902 - DNA, 33 bp, Homo sapien
tctcctccacctattctaggaaaagtcagtgct

SEQ ID NO: 434903 - DNA, 33 bp, Homo sapien
tgaacttttaactggaaaggagctctgctatac

SEQ ID NO: 434904 - DNA, 33 bp, Homo sapien
tgaacttttaactggagaggagctctgctatac

SEQ ID NO: 434905 - DNA, 33 bp, Homo sapien
acttcagggcattccaatgaaaactttaatctc

SEQ ID NO: 434906 - DNA, 33 bp, Homo sapien
acttcagggcattccactgaaaactttaatctc

SEQ ID NO: 434907 - DNA, 33 bp, Homo sapien
tatgatttttgaatgaataatgatcctctttaa

SEQ ID NO: 434908 - DNA, 33 bp, Homo sapien
tatgatttttgaatgactaatgatcctctttaa

SEQ ID NO: 434909 - DNA, 33 bp, Homo sapien
catttagtccatcattcaaaaggtatttattta

SEQ ID NO: 434910 - DNA, 33 bp, Homo sapien
catttagtccatcattgaaaaggtatttattta

SEQ ID NO: 434911 - DNA, 33 bp, Homo sapien
gaagcataaacactataagcccatgagaaaatg

SEQ ID NO: 434912 - DNA, 33 bp, Homo sapien
gaagcataaacactattagcccatgagaaaatg

SEQ ID NO: 434913 - DNA, 33 bp, Homo sapien
gaattggggaatccaacgagagcctgagtaaag

SEQ ID NO: 434914 - DNA, 33 bp, Homo sapien
gaattggggaatccaatgagagcctgagtaaag

SEQ ID NO: 434915 - DNA, 33 bp, Homo sapien
ggagcaatctatactcccatcaccaggtttttt

SEQ ID NO: 434916 - DNA, 33 bp, Homo sapien
ggagcaatctatactctcatcaccaggtttttt

SEQ ID NO: 434917 - DNA, 33 bp, Homo sapien
agtgagtgactcaacaaagaaagagggaagaag

SEQ ID NO: 434918 - DNA, 33 bp, Homo sapien
agtgagtgactcaacagagaaagagggaagaag

SEQ ID NO: 434919 - DNA, 33 bp, Homo sapien
ttctaggagttcgttcaaaggatataaaatcct

SEQ ID NO: 434920 - DNA, 33 bp, Homo sapien
ttctaggagttcgttctaaggatataaaatcct

SEQ ID NO: 434921 - DNA, 33 bp, Homo sapien
gtggaggcaaaaatgccagtcggatgctacggc

SEQ ID NO: 434922 - DNA, 33 bp, Homo sapien
gtggaggcaaaaatgctagtcggatgctacggc

SEQ ID NO: 434923 - DNA, 33 bp, Homo sapien
tcctgtgtcccttgtagctttcaacgccaagga

SEQ ID NO: 434924 - DNA, 33 bp, Homo sapien
tcctgtgtcccttgtatctttcaacgccaagga

SEQ ID NO: 434925 - DNA, 33 bp, Homo sapien
actcaccccagctaaacagtaagcactggagca

SEQ ID NO: 434926 - DNA, 33 bp, Homo sapien
actcaccccagctaaatagtaagcactggagca

SEQ ID NO: 434927 - DNA, 33 bp, Homo sapien
aatccaccccagtgagactaaaactcatgatta

SEQ ID NO: 434928 - DNA, 33 bp, Homo sapien
aatccaccccagtgaggctaaaactcatgatta

SEQ ID NO: 434929 - DNA, 33 bp, Homo sapien
tcctgcagacttcatgacaatcccttccttccc

SEQ ID NO: 434930 - DNA, 33 bp, Homo sapien
tcctgcagacttcatggcaatcccttccttccc

SEQ ID NO: 434931 - DNA, 33 bp, Homo sapien
gggcctgtgttctcatgaggatatactgccttc

SEQ ID NO: 434932 - DNA, 33 bp, Homo sapien
gggcctgtgttctcattaggatatactgccttc

SEQ ID NO: 434933 - DNA, 33 bp, Homo sapien
tggttccagataatcaggaaaaagtgtctttca

SEQ ID NO: 434934 - DNA, 33 bp, Homo sapien
tggttccagataatcatgaaaaagtgtctttca

SEQ ID NO: 434935 - DNA, 33 bp, Homo sapien
aagtggtatatacgatcacaataacctcagaag

SEQ ID NO: 434936 - DNA, 33 bp, Homo sapien
aagtggtatatacgatgacaataacctcagaag

SEQ ID NO: 434937 - DNA, 33 bp, Homo sapien
tgaagcctcatgtcccaaggatcaggattccat

SEQ ID NO: 434938 - DNA, 33 bp, Homo sapien
tgaagcctcatgtccctaggatcaggattccat

SEQ ID NO: 434939 - DNA, 33 bp, Homo sapien
atcatttcaggtgtaacggggttgccaagtggc

SEQ ID NO: 434940 - DNA, 33 bp, Homo sapien
atcatttcaggtgtaatggggttgccaagtggc

SEQ ID NO: 434941 - DNA, 33 bp, Homo sapien
tatacccatggcagggaagtaatatatatacag

SEQ ID NO: 434942 - DNA, 33 bp, Homo sapien
tatacccatggcagggcagtaatatatatacag

SEQ ID NO: 434943 - DNA, 33 bp, Homo sapien
agtttgaaatatacccacagtgttttgaatgaa

SEQ ID NO: 434944 - DNA, 33 bp, Homo sapien
agtttgaaatatacccgcagtgttttgaatgaa

SEQ ID NO: 434945 - DNA, 33 bp, Homo sapien
agattcagaaagagaaaacgagtttaatattat

SEQ ID NO: 434946 - DNA, 33 bp, Homo sapien
agattcagaaagagaacacgagtttaatattat

SEQ ID NO: 434947 - DNA, 33 bp, Homo sapien
ggtaacagaaaggtaaatacttttgcaagagtc

SEQ ID NO: 434948 - DNA, 33 bp, Homo sapien
ggtaacagaaaggtaactacttttgcaagagtc

SEQ ID NO: 434949 - DNA, 33 bp, Homo sapien
gcactggataccctaacgaaggtggaagaagat

SEQ ID NO: 434950 - DNA, 33 bp, Homo sapien
gcactggataccctaatgaaggtggaagaagat

SEQ ID NO: 434951 - DNA, 33 bp, Homo sapien
ttgggtaggactcacacctttcagaattaattc

SEQ ID NO: 434952 - DNA, 33 bp, Homo sapien
ttgggtaggactcacatctttcagaattaattc

SEQ ID NO: 434953 - DNA, 33 bp, Homo sapien
aacatcagtaacaaacaggtccacattcttatg

SEQ ID NO: 434954 - DNA, 33 bp, Homo sapien
aacatcagtaacaaacgggtccacattcttatg

SEQ ID NO: 434955 - DNA, 33 bp, Homo sapien
ttcactagaccccatacgtatcctctgatataa

SEQ ID NO: 434956 - DNA, 33 bp, Homo sapien
ttcactagaccccatatgtatcctctgatataa

SEQ ID NO: 434957 - DNA, 33 bp, Homo sapien
ctgcgggctggcaagacaagcaaatcagctggt

SEQ ID NO: 434958 - DNA, 33 bp, Homo sapien
ctgcgggctggcaagataagcaaatcagctggt

SEQ ID NO: 434959 - DNA, 33 bp, Homo sapien
ttttggcaaattaaggcacttggaacgtctata

SEQ ID NO: 434960 - DNA, 33 bp, Homo sapien
ttttggcaaattaaggtacttggaacgtctata

SEQ ID NO: 434961 - DNA, 33 bp, Homo sapien
tcctattccttgttcccatgtacctatcaacca

SEQ ID NO: 434962 - DNA, 33 bp, Homo sapien
tcctattccttgttcctatgtacctatcaacca

SEQ ID NO: 434963 - DNA, 33 bp, Homo sapien
tggtaatcttcctgaacgacattcttagtaata

SEQ ID NO: 434964 - DNA, 33 bp, Homo sapien
tggtaatcttcctgaatgacattcttagtaata

SEQ ID NO: 434965 - DNA, 33 bp, Homo sapien
tgtgctgggccattcacacaatgattcttagtt

SEQ ID NO: 434966 - DNA, 33 bp, Homo sapien
tgtgctgggccattcatacaatgattcttagtt

SEQ ID NO: 434967 - DNA, 33 bp, Homo sapien
agaagggctccctgtggattctttcatcttctc

SEQ ID NO: 434968 - DNA, 33 bp, Homo sapien
agaagggctccctgtgtattctttcatcttctc

SEQ ID NO: 434969 - DNA, 33 bp, Homo sapien
ggctcaattgaaattcacttcagaacaaggttt

SEQ ID NO: 434970 - DNA, 33 bp, Homo sapien
ggctcaattgaaattcgcttcagaacaaggttt

SEQ ID NO: 434971 - DNA, 33 bp, Homo sapien
gttttgcttctgaacccgggtaggctgcctcac

SEQ ID NO: 434972 - DNA, 33 bp, Homo sapien
gttttgcttctgaacctgggtaggctgcctcac

SEQ ID NO: 434973 - DNA, 33 bp, Homo sapien
acgtcctagccaacaaaaccacttaattcttca

SEQ ID NO: 434974 - DNA, 33 bp, Homo sapien
acgtcctagccaacaagaccacttaattcttca

SEQ ID NO: 434975 - DNA, 33 bp, Homo sapien
cacacacccactggataagccttctcgttattt

SEQ ID NO: 434976 - DNA, 33 bp, Homo sapien
cacacacccactggatgagccttctcgttattt

SEQ ID NO: 434977 - DNA, 33 bp, Homo sapien
ccattgcaggagtaaagaatccaaaaccaggag

SEQ ID NO: 434978 - DNA, 33 bp, Homo sapien
ccattgcaggagtaaataatccaaaaccaggag

SEQ ID NO: 434979 - DNA, 33 bp, Homo sapien
ggtgtagtctagagtaacctctgcaaatacaat

SEQ ID NO: 434980 - DNA, 33 bp, Homo sapien
ggtgtagtctagagtaccctctgcaaatacaat

SEQ ID NO: 434981 - DNA, 33 bp, Homo sapien
ggaaagaaaagggtgaagcttgatgaagttgtt

SEQ ID NO: 434982 - DNA, 33 bp, Homo sapien
ggaaagaaaagggtgaggcttgatgaagttgtt

SEQ ID NO: 434983 - DNA, 33 bp, Homo sapien
caatagggagcatgtaagttattgagtaagaga

SEQ ID NO: 434984 - DNA, 33 bp, Homo sapien
caatagggagcatgtaggttattgagtaagaga

SEQ ID NO: 434985 - DNA, 33 bp, Homo sapien
cagactgatttttctccagaatgactttgcact

SEQ ID NO: 434986 - DNA, 33 bp, Homo sapien
cagactgatttttctctagaatgactttgcact

SEQ ID NO: 434987 - DNA, 33 bp, Homo sapien
aggttaaagagagtacaaaggtcagagcacccc

SEQ ID NO: 434988 - DNA, 33 bp, Homo sapien
aggttaaagagagtacgaaggtcagagcacccc

SEQ ID NO: 434989 - DNA, 33 bp, Homo sapien
acctcatgatgcctgaggataaagcctcataaa

SEQ ID NO: 434990 - DNA, 33 bp, Homo sapien
acctcatgatgcctgatgataaagcctcataaa

SEQ ID NO: 434991 - DNA, 33 bp, Homo sapien
ggctaatggattaagaagttgagccttccaagt

SEQ ID NO: 434992 - DNA, 33 bp, Homo sapien
ggctaatggattaagaggttgagccttccaagt

SEQ ID NO: 434993 - DNA, 33 bp, Homo sapien
aaaagatcaaattatacgtgatgtgtcacttca

SEQ ID NO: 434994 - DNA, 33 bp, Homo sapien
aaaagatcaaattatatgtgatgtgtcacttca

SEQ ID NO: 434995 - DNA, 33 bp, Homo sapien
gtctataaacttccacgcttttatccaagtaac

SEQ ID NO: 434996 - DNA, 33 bp, Homo sapien
gtctataaacttccactcttttatccaagtaac

SEQ ID NO: 434997 - DNA, 33 bp, Homo sapien
agatctcaccatcctacaaaggtgacaagtcaa

SEQ ID NO: 434998 - DNA, 33 bp, Homo sapien
agatctcaccatcctataaaggtgacaagtcaa

SEQ ID NO: 434999 - DNA, 33 bp, Homo sapien
tctgtgcagacacttacagtgaaggtgataaag

SEQ ID NO: 435000 - DNA, 33 bp, Homo sapien
tctgtgcagacacttatagtgaaggtgataaag

SEQ ID NO: 435001 - DNA, 33 bp, Homo sapien
tcagtcttgggagttacagctcaacactgaccc

SEQ ID NO: 435002 - DNA, 33 bp, Homo sapien
tcagtcttgggagttatagctcaacactgaccc

SEQ ID NO: 435003 - DNA, 33 bp, Homo sapien
ccagattttccaattacgagacctgggtgtggg

SEQ ID NO: 435004 - DNA, 33 bp, Homo sapien
ccagattttccaattatgagacctgggtgtggg

SEQ ID NO: 435005 - DNA, 33 bp, Homo sapien
ctgtgtgatttttcccagctctctgcttggctc

SEQ ID NO: 435006 - DNA, 33 bp, Homo sapien
ctgtgtgatttttcccggctctctgcttggctc

SEQ ID NO: 435007 - DNA, 33 bp, Homo sapien
gttcagctttagcggcccttggataccctcttc

SEQ ID NO: 435008 - DNA, 33 bp, Homo sapien
gttcagctttagcggctcttggataccctcttc

SEQ ID NO: 435009 - DNA, 33 bp, Homo sapien
gggcctgactacacacaccttcaaatagaccac

SEQ ID NO: 435010 - DNA, 33 bp, Homo sapien
gggcctgactacacacgccttcaaatagaccac

SEQ ID NO: 435011 - DNA, 33 bp, Homo sapien
ctcatcttcaacactccacctgctgattcctgt

SEQ ID NO: 435012 - DNA, 33 bp, Homo sapien
ctcatcttcaacactctacctgctgattcctgt

SEQ ID NO: 435013 - DNA, 33 bp, Homo sapien
tgttaagtgatctgcaatgacagcaagaaagat

SEQ ID NO: 435014 - DNA, 33 bp, Homo sapien
tgttaagtgatctgcagtgacagcaagaaagat

SEQ ID NO: 435015 - DNA, 33 bp, Homo sapien
ttcccctgccaagaaaaagaacctctcctcctt

SEQ ID NO: 435016 - DNA, 33 bp, Homo sapien
ttcccctgccaagaaagagaacctctcctcctt

SEQ ID NO: 435017 - DNA, 33 bp, Homo sapien
gggatgctctcagcgaaaaatgaagggtttgga

SEQ ID NO: 435018 - DNA, 33 bp, Homo sapien
gggatgctctcagcgagaaatgaagggtttgga

SEQ ID NO: 435019 - DNA, 33 bp, Homo sapien
ttatggagcgaattacacagaaatgaccttgga

SEQ ID NO: 435020 - DNA, 33 bp, Homo sapien
ttatggagcgaattactcagaaatgaccttgga

SEQ ID NO: 435021 - DNA, 33 bp, Homo sapien
gcttaatcctcagagaccactaattccacggtc

SEQ ID NO: 435022 - DNA, 33 bp, Homo sapien
gcttaatcctcagagagcactaattccacggtc

SEQ ID NO: 435023 - DNA, 33 bp, Homo sapien
ttcctgctcttaataaaaccagattataacact

SEQ ID NO: 435024 - DNA, 33 bp, Homo sapien
ttcctgctcttaataagaccagattataacact

SEQ ID NO: 435025 - DNA, 33 bp, Homo sapien
cagttcctgagagtccactgcacaagtgagcac

SEQ ID NO: 435026 - DNA, 33 bp, Homo sapien
cagttcctgagagtccgctgcacaagtgagcac

SEQ ID NO: 435027 - DNA, 33 bp, Homo sapien
gtatctgttataaggacgttgtgtgcgtgaaac

SEQ ID NO: 435028 - DNA, 33 bp, Homo sapien
gtatctgttataaggatgttgtgtgcgtgaaac

SEQ ID NO: 435029 - DNA, 33 bp, Homo sapien
aagcctcttttgcaaacggtcttctgcaaccat

SEQ ID NO: 435030 - DNA, 33 bp, Homo sapien
aagcctcttttgcaaatggtcttctgcaaccat

SEQ ID NO: 435031 - DNA, 33 bp, Homo sapien
atctaagaatcatccgcaaggcttattaaaaca

SEQ ID NO: 435032 - DNA, 33 bp, Homo sapien
atctaagaatcatccgtaaggcttattaaaaca

SEQ ID NO: 435033 - DNA, 33 bp, Homo sapien
aaatctttgaggttgaagcccagggatttgtgt

SEQ ID NO: 435034 - DNA, 33 bp, Homo sapien
aaatctttgaggttgaggcccagggatttgtgt

SEQ ID NO: 435035 - DNA, 33 bp, Homo sapien
ctagagccgggtggaaacaaaaatctgagcttc

SEQ ID NO: 435036 - DNA, 33 bp, Homo sapien
ctagagccgggtggaaccaaaaatctgagcttc

SEQ ID NO: 435037 - DNA, 33 bp, Homo sapien
gtgaactccttgtgaacagcgatgagttttgta

SEQ ID NO: 435038 - DNA, 33 bp, Homo sapien
gtgaactccttgtgaatagcgatgagttttgta

SEQ ID NO: 435039 - DNA, 33 bp, Homo sapien
ttataacctctgaggggccagattatgtatttt

SEQ ID NO: 435040 - DNA, 33 bp, Homo sapien
ttataacctctgagggtccagattatgtatttt

SEQ ID NO: 435041 - DNA, 33 bp, Homo sapien
gtgtgaaagtttcataagccaaggagtgtgcag

SEQ ID NO: 435042 - DNA, 33 bp, Homo sapien
gtgtgaaagtttcatacgccaaggagtgtgcag

SEQ ID NO: 435043 - DNA, 33 bp, Homo sapien
tgaacctaccttataccgcaatgaaacccccaa

SEQ ID NO: 435044 - DNA, 33 bp, Homo sapien
tgaacctaccttatactgcaatgaaacccccaa

SEQ ID NO: 435045 - DNA, 33 bp, Homo sapien
agtagggactaccaaaaacacccacatgaaaca

SEQ ID NO: 435046 - DNA, 33 bp, Homo sapien
agtagggactaccaaacacacccacatgaaaca

SEQ ID NO: 435047 - DNA, 33 bp, Homo sapien
tttataatgtaggctacagaaagtacagttcca

SEQ ID NO: 435048 - DNA, 33 bp, Homo sapien
tttataatgtaggctatagaaagtacagttcca

SEQ ID NO: 435049 - DNA, 33 bp, Homo sapien
tcctataccacaccaggatacatatgacttctt

SEQ ID NO: 435050 - DNA, 33 bp, Homo sapien
tcctataccacaccagtatacatatgacttctt

SEQ ID NO: 435051 - DNA, 33 bp, Homo sapien
gaatttacaaagatcaaggaatccaaggtggaa

SEQ ID NO: 435052 - DNA, 33 bp, Homo sapien
gaatttacaaagatcagggaatccaaggtggaa

SEQ ID NO: 435053 - DNA, 33 bp, Homo sapien
cacaggactgacacccactgcattgcaggagca

SEQ ID NO: 435054 - DNA, 33 bp, Homo sapien
cacaggactgacacccgctgcattgcaggagca

SEQ ID NO: 435055 - DNA, 33 bp, Homo sapien
gcgttaagtagattcaacatagtggttcgcaac

SEQ ID NO: 435056 - DNA, 33 bp, Homo sapien
gcgttaagtagattcagcatagtggttcgcaac

SEQ ID NO: 435057 - DNA, 33 bp, Homo sapien
ttgttcttgatgttaaagattttagtttggtga

SEQ ID NO: 435058 - DNA, 33 bp, Homo sapien
ttgttcttgatgttaaggattttagtttggtga

SEQ ID NO: 435059 - DNA, 33 bp, Homo sapien
gagtgaacggaggaaacgagaaaggtggtgtgg

SEQ ID NO: 435060 - DNA, 33 bp, Homo sapien
gagtgaacggaggaaatgagaaaggtggtgtgg

SEQ ID NO: 435061 - DNA, 33 bp, Homo sapien
gcttgaggctactctacggaccataatgccatc

SEQ ID NO: 435062 - DNA, 33 bp, Homo sapien
gcttgaggctactctagggaccataatgccatc

SEQ ID NO: 435063 - DNA, 33 bp, Homo sapien
tcatctttgaagacaactgtctgtgatctcaca

SEQ ID NO: 435064 - DNA, 33 bp, Homo sapien
tcatctttgaagacaagtgtctgtgatctcaca

SEQ ID NO: 435065 - DNA, 33 bp, Homo sapien
ccaaagtgtcagtggaagtctgaaagtgggcca

SEQ ID NO: 435066 - DNA, 33 bp, Homo sapien
ccaaagtgtcagtggaggtctgaaagtgggcca

SEQ ID NO: 435067 - DNA, 33 bp, Homo sapien
attaatgtcctagaaaattgtgtgtttattgca

SEQ ID NO: 435068 - DNA, 33 bp, Homo sapien
attaatgtcctagaaatttgtgtgtttattgca

SEQ ID NO: 435069 - DNA, 33 bp, Homo sapien
actggagtggctaaaagtacaaactttgagtca

SEQ ID NO: 435070 - DNA, 33 bp, Homo sapien
actggagtggctaaaattacaaactttgagtca

SEQ ID NO: 435071 - DNA, 33 bp, Homo sapien
ttccaaggtctttgaccagcaataatcctacca

SEQ ID NO: 435072 - DNA, 33 bp, Homo sapien
ttccaaggtctttgacgagcaataatcctacca

SEQ ID NO: 435073 - DNA, 33 bp, Homo sapien
aggattttagagaccacgtagttcaagccttca

SEQ ID NO: 435074 - DNA, 33 bp, Homo sapien
aggattttagagaccatgtagttcaagccttca

SEQ ID NO: 435075 - DNA, 33 bp, Homo sapien
tgggagaccgctaatgaagaaggaggactttgc

SEQ ID NO: 435076 - DNA, 33 bp, Homo sapien
tgggagaccgctaatggagaaggaggactttgc

SEQ ID NO: 435077 - DNA, 33 bp, Homo sapien
ttcccaggctctgcccagaaaagatacaccaga

SEQ ID NO: 435078 - DNA, 33 bp, Homo sapien
ttcccaggctctgcccggaaaagatacaccaga

SEQ ID NO: 435079 - DNA, 33 bp, Homo sapien
catgacagtagagagccatgcagacttgtcctc

SEQ ID NO: 435080 - DNA, 33 bp, Homo sapien
catgacagtagagagctatgcagacttgtcctc

SEQ ID NO: 435081 - DNA, 33 bp, Homo sapien
ctggattaatgtacgtaacatcatcttgcctgt

SEQ ID NO: 435082 - DNA, 33 bp, Homo sapien
ctggattaatgtacgtgacatcatcttgcctgt

SEQ ID NO: 435083 - DNA, 33 bp, Homo sapien
cttacttggagaagtaccccatttaattatgtg

SEQ ID NO: 435084 - DNA, 33 bp, Homo sapien
cttacttggagaagtatcccatttaattatgtg

SEQ ID NO: 435085 - DNA, 33 bp, Homo sapien
tttgttgtctccaaacacacatttcaaagttat

SEQ ID NO: 435086 - DNA, 33 bp, Homo sapien
tttgttgtctccaaacgcacatttcaaagttat

SEQ ID NO: 435087 - DNA, 33 bp, Homo sapien
gtttggctggaaagaacggattgtaatgtcctg

SEQ ID NO: 435088 - DNA, 33 bp, Homo sapien
gtttggctggaaagaatggattgtaatgtcctg

SEQ ID NO: 435089 - DNA, 33 bp, Homo sapien
caatttggatgcttacactaaagccagagaccc

SEQ ID NO: 435090 - DNA, 33 bp, Homo sapien
caatttggatgcttacgctaaagccagagaccc

SEQ ID NO: 435091 - DNA, 33 bp, Homo sapien
ctattgaacatagggaagcatggatagattaaa

SEQ ID NO: 435092 - DNA, 33 bp, Homo sapien
ctattgaacatagggatgcatggatagattaaa

SEQ ID NO: 435093 - DNA, 33 bp, Homo sapien
cccacaggacacccacaaactcctacaatgtaa

SEQ ID NO: 435094 - DNA, 33 bp, Homo sapien
cccacaggacacccacgaactcctacaatgtaa

SEQ ID NO: 435095 - DNA, 33 bp, Homo sapien
aagccaagatctcaagaaagatctggagcacag

SEQ ID NO: 435096 - DNA, 33 bp, Homo sapien
aagccaagatctcaaggaagatctggagcacag

SEQ ID NO: 435097 - DNA, 33 bp, Homo sapien
ttcagccccatttgagaacatctactttggact

SEQ ID NO: 435098 - DNA, 33 bp, Homo sapien
ttcagccccatttgaggacatctactttggact

SEQ ID NO: 435099 - DNA, 33 bp, Homo sapien
ggtctccaaagacgtccacatcttaaacctcag

SEQ ID NO: 435100 - DNA, 33 bp, Homo sapien
ggtctccaaagacgtctacatcttaaacctcag

SEQ ID NO: 435101 - DNA, 33 bp, Homo sapien
ttaatcatcagaacaactgtatgaattaaatat

SEQ ID NO: 435102 - DNA, 33 bp, Homo sapien
ttaatcatcagaacaattgtatgaattaaatat

SEQ ID NO: 435103 - DNA, 33 bp, Homo sapien
cttaagtttatcaacacctgtatcttctcccca

SEQ ID NO: 435104 - DNA, 33 bp, Homo sapien
cttaagtttatcaacatctgtatcttctcccca

SEQ ID NO: 435105 - DNA, 33 bp, Homo sapien
tttcctgtgattaaaaatgcatctacgaagcat

SEQ ID NO: 435106 - DNA, 33 bp, Homo sapien
tttcctgtgattaaaagtgcatctacgaagcat

SEQ ID NO: 435107 - DNA, 33 bp, Homo sapien
agtcagctaggaagacagaaaaatatggagcct

SEQ ID NO: 435108 - DNA, 33 bp, Homo sapien
agtcagctaggaagacggaaaaatatggagcct

SEQ ID NO: 435109 - DNA, 33 bp, Homo sapien
ggagacagaatggaaaaaaacaaagcaagtcaa

SEQ ID NO: 435110 - DNA, 33 bp, Homo sapien
ggagacagaatggaaagaaacaaagcaagtcaa

SEQ ID NO: 435111 - DNA, 33 bp, Homo sapien
cccagataaaagaagacatagaatgcccagatc

SEQ ID NO: 435112 - DNA, 33 bp, Homo sapien
cccagataaaagaagatatagaatgcccagatc

SEQ ID NO: 435113 - DNA, 33 bp, Homo sapien
cacaacctgtcgtttccaccccagataaaagaa

SEQ ID NO: 435114 - DNA, 33 bp, Homo sapien
cacaacctgtcgtttctaccccagataaaagaa

SEQ ID NO: 435115 - DNA, 33 bp, Homo sapien
gtttggaacagaaatccagaccaagacctttta

SEQ ID NO: 435116 - DNA, 33 bp, Homo sapien
gtttggaacagaaatctagaccaagacctttta

SEQ ID NO: 435117 - DNA, 33 bp, Homo sapien
cttgatctaacagttacggcttataaatcattc

SEQ ID NO: 435118 - DNA, 33 bp, Homo sapien
cttgatctaacagttatggcttataaatcattc

SEQ ID NO: 435119 - DNA, 33 bp, Homo sapien
taaatcattccatgtcagaagccccaccggaaa

SEQ ID NO: 435120 - DNA, 33 bp, Homo sapien
taaatcattccatgtcggaagccccaccggaaa

SEQ ID NO: 435121 - DNA, 33 bp, Homo sapien
gtgtacttttccaggaaggctaaatgctgtgca

SEQ ID NO: 435122 - DNA, 33 bp, Homo sapien
gtgtacttttccaggagggctaaatgctgtgca

SEQ ID NO: 435123 - DNA, 33 bp, Homo sapien
ttcccctggttgtgaaacattgtagcgcattca

SEQ ID NO: 435124 - DNA, 33 bp, Homo sapien
ttcccctggttgtgaagcattgtagcgcattca

SEQ ID NO: 435125 - DNA, 33 bp, Homo sapien
gtttacaatcataagcacctatatgttcagctt

SEQ ID NO: 435126 - DNA, 33 bp, Homo sapien
gtttacaatcataagcgcctatatgttcagctt

SEQ ID NO: 435127 - DNA, 33 bp, Homo sapien
ttgataagacactctgaacattacttcatatac

SEQ ID NO: 435128 - DNA, 33 bp, Homo sapien
ttgataagacactctggacattacttcatatac

SEQ ID NO: 435129 - DNA, 33 bp, Homo sapien
aaagagaaacctaaacaacagatggattaatcc

SEQ ID NO: 435130 - DNA, 33 bp, Homo sapien
aaagagaaacctaaaccacagatggattaatcc

SEQ ID NO: 435131 - DNA, 33 bp, Homo sapien
ctgtatggtgttgggacggtatcatggctgaca

SEQ ID NO: 435132 - DNA, 33 bp, Homo sapien
ctgtatggtgttgggatggtatcatggctgaca

SEQ ID NO: 435133 - DNA, 33 bp, Homo sapien
tctgaggcacaggagacggtgagactttgtata

SEQ ID NO: 435134 - DNA, 33 bp, Homo sapien
tctgaggcacaggagatggtgagactttgtata

SEQ ID NO: 435135 - DNA, 33 bp, Homo sapien
gaaaagaaagaaccaaacagagtcatgaaagtg

SEQ ID NO: 435136 - DNA, 33 bp, Homo sapien
gaaaagaaagaaccaaccagagtcatgaaagtg

SEQ ID NO: 435137 - DNA, 33 bp, Homo sapien
ttgctttctctttgtcaatcctcaacattggag

SEQ ID NO: 435138 - DNA, 33 bp, Homo sapien
ttgctttctctttgtcgatcctcaacattggag

SEQ ID NO: 435139 - DNA, 33 bp, Homo sapien
gaattccagcctaatacggtattttaatgaaga

SEQ ID NO: 435140 - DNA, 33 bp, Homo sapien
gaattccagcctaatatggtattttaatgaaga

SEQ ID NO: 435141 - DNA, 33 bp, Homo sapien
actcctctgccctttacgttcttaagccagtta

SEQ ID NO: 435142 - DNA, 33 bp, Homo sapien
actcctctgccctttatgttcttaagccagtta

SEQ ID NO: 435143 - DNA, 33 bp, Homo sapien
ttatgaaacaggaaaccagcaggaaaaggacct

SEQ ID NO: 435144 - DNA, 33 bp, Homo sapien
ttatgaaacaggaaacgagcaggaaaaggacct

SEQ ID NO: 435145 - DNA, 33 bp, Homo sapien
ctggtaggagttcagacggcagttacagccacc

SEQ ID NO: 435146 - DNA, 33 bp, Homo sapien
ctggtaggagttcagatggcagttacagccacc

SEQ ID NO: 435147 - DNA, 33 bp, Homo sapien
catcttacattatcacagtacattcatcacaac

SEQ ID NO: 435148 - DNA, 33 bp, Homo sapien
catcttacattatcacggtacattcatcacaac

SEQ ID NO: 435149 - DNA, 33 bp, Homo sapien
aatggcactttaacaaaaattaggtctgctggg

SEQ ID NO: 435150 - DNA, 33 bp, Homo sapien
aatggcactttaacaagaattaggtctgctggg

SEQ ID NO: 435151 - DNA, 33 bp, Homo sapien
tgctttatctctgtcaaccttcaggggtcatca

SEQ ID NO: 435152 - DNA, 33 bp, Homo sapien
tgctttatctctgtcagccttcaggggtcatca

SEQ ID NO: 435153 - DNA, 33 bp, Homo sapien
ttctgtgcagaaggaacgtcccgacctgtgatt

SEQ ID NO: 435154 - DNA, 33 bp, Homo sapien
ttctgtgcagaaggaatgtcccgacctgtgatt

SEQ ID NO: 435155 - DNA, 33 bp, Homo sapien
tagctgctttacgcacagactctccggccagac

SEQ ID NO: 435156 - DNA, 33 bp, Homo sapien
tagctgctttacgcacggactctccggccagac

SEQ ID NO: 435157 - DNA, 33 bp, Homo sapien
tacgtgagaagaaaccacccaggggataatcta

SEQ ID NO: 435158 - DNA, 33 bp, Homo sapien
tacgtgagaagaaaccgcccaggggataatcta

SEQ ID NO: 435159 - DNA, 33 bp, Homo sapien
attttctatgacataaaaagatgaacacatttc

SEQ ID NO: 435160 - DNA, 33 bp, Homo sapien
attttctatgacataacaagatgaacacatttc

SEQ ID NO: 435161 - DNA, 33 bp, Homo sapien
taacataaagttttcaaggttcatttatgttgt

SEQ ID NO: 435162 - DNA, 33 bp, Homo sapien
taacataaagttttcagggttcatttatgttgt

SEQ ID NO: 435163 - DNA, 33 bp, Homo sapien
ttattttttatgcaccacttggttctgtgtact

SEQ ID NO: 435164 - DNA, 33 bp, Homo sapien
ttattttttatgcacctcttggttctgtgtact

SEQ ID NO: 435165 - DNA, 33 bp, Homo sapien
gttttcattggctacactggaatttctctgaat

SEQ ID NO: 435166 - DNA, 33 bp, Homo sapien
gttttcattggctacattggaatttctctgaat

SEQ ID NO: 435167 - DNA, 33 bp, Homo sapien
tcccccacagctgtcacgtcagttctgtgtttg

SEQ ID NO: 435168 - DNA, 33 bp, Homo sapien
tcccccacagctgtcatgtcagttctgtgtttg

SEQ ID NO: 435169 - DNA, 33 bp, Homo sapien
gtgttctctcttcccaatagaaggctctaacaa

SEQ ID NO: 435170 - DNA, 33 bp, Homo sapien
gtgttctctcttcccagtagaaggctctaacaa

SEQ ID NO: 435171 - DNA, 33 bp, Homo sapien
agataacagcatttaacgcacagagaaataaga

SEQ ID NO: 435172 - DNA, 33 bp, Homo sapien
agataacagcatttaaggcacagagaaataaga

SEQ ID NO: 435173 - DNA, 33 bp, Homo sapien
gttatctttcccatcacatgagccttttctcca

SEQ ID NO: 435174 - DNA, 33 bp, Homo sapien
gttatctttcccatcatatgagccttttctcca

SEQ ID NO: 435175 - DNA, 33 bp, Homo sapien
tgcggagcaattgggcaaaataataatccttga

SEQ ID NO: 435176 - DNA, 33 bp, Homo sapien
tgcggagcaattgggccaaataataatccttga

SEQ ID NO: 435177 - DNA, 33 bp, Homo sapien
ggtacatccgcattcacagaaacattattcaca

SEQ ID NO: 435178 - DNA, 33 bp, Homo sapien
ggtacatccgcattcatagaaacattattcaca

SEQ ID NO: 435179 - DNA, 33 bp, Homo sapien
ccaagaatttgccctcaataagaaatagatgaa

SEQ ID NO: 435180 - DNA, 33 bp, Homo sapien
ccaagaatttgccctcgataagaaatagatgaa

SEQ ID NO: 435181 - DNA, 33 bp, Homo sapien
tgaatcacacaaatgaatatgagttttgtctgg

SEQ ID NO: 435182 - DNA, 33 bp, Homo sapien
tgaatcacacaaatgagtatgagttttgtctgg

SEQ ID NO: 435183 - DNA, 33 bp, Homo sapien
aaactgcatctctgaaatcttttccatttttca

SEQ ID NO: 435184 - DNA, 33 bp, Homo sapien
aaactgcatctctgaagtcttttccatttttca

SEQ ID NO: 435185 - DNA, 33 bp, Homo sapien
gtgtgtaatgtaacatcatggtttccacataac

SEQ ID NO: 435186 - DNA, 33 bp, Homo sapien
gtgtgtaatgtaacattatggtttccacataac

SEQ ID NO: 435187 - DNA, 33 bp, Homo sapien
cacacacacatacaaaggaaacagttagcagga

SEQ ID NO: 435188 - DNA, 33 bp, Homo sapien
cacacacacatacaaatgaaacagttagcagga

SEQ ID NO: 435189 - DNA, 33 bp, Homo sapien
gtggtagtgttataaagaaggttcaaaggcttc

SEQ ID NO: 435190 - DNA, 33 bp, Homo sapien
gtggtagtgttataaataaggttcaaaggcttc

SEQ ID NO: 435191 - DNA, 33 bp, Homo sapien
agaatagtgatttccacaatgtcctctggtttg

SEQ ID NO: 435192 - DNA, 33 bp, Homo sapien
agaatagtgatttccagaatgtcctctggtttg

SEQ ID NO: 435193 - DNA, 33 bp, Homo sapien
tcataccagaaagatacgaaactccatgaaaag

SEQ ID NO: 435194 - DNA, 33 bp, Homo sapien
tcataccagaaagatatgaaactccatgaaaag

SEQ ID NO: 435195 - DNA, 33 bp, Homo sapien
accctgagagactcaaatctataatggaacctg

SEQ ID NO: 435196 - DNA, 33 bp, Homo sapien
accctgagagactcaagtctataatggaacctg

SEQ ID NO: 435197 - DNA, 33 bp, Homo sapien
tgaaaccgtatctaccacttattagctgtctga

SEQ ID NO: 435198 - DNA, 33 bp, Homo sapien
tgaaaccgtatctaccgcttattagctgtctga

SEQ ID NO: 435199 - DNA, 33 bp, Homo sapien
ccacctctgagtgtatcactgaagttaatgttc

SEQ ID NO: 435200 - DNA, 33 bp, Homo sapien
ccacctctgagtgtattactgaagttaatgttc

SEQ ID NO: 435201 - DNA, 33 bp, Homo sapien
catatatcacagggtaaaattagtgatgcatca

SEQ ID NO: 435202 - DNA, 33 bp, Homo sapien
catatatcacagggtagaattagtgatgcatca

SEQ ID NO: 435203 - DNA, 33 bp, Homo sapien
ttcaaatgataaagtacgtcatagttgtgttaa

SEQ ID NO: 435204 - DNA, 33 bp, Homo sapien
ttcaaatgataaagtatgtcatagttgtgttaa

SEQ ID NO: 435205 - DNA, 33 bp, Homo sapien
gttgctgaaacagcaaataggaagctggtctac

SEQ ID NO: 435206 - DNA, 33 bp, Homo sapien
gttgctgaaacagcaactaggaagctggtctac

SEQ ID NO: 435207 - DNA, 33 bp, Homo sapien
aagcaagcaaaatcctaaagtgtgtcttcaaag

SEQ ID NO: 435208 - DNA, 33 bp, Homo sapien
aagcaagcaaaatcctgaagtgtgtcttcaaag

SEQ ID NO: 435209 - DNA, 33 bp, Homo sapien
tggctgtttttaaccaggcaggcctaaatacac

SEQ ID NO: 435210 - DNA, 33 bp, Homo sapien
tggctgtttttaaccatgcaggcctaaatacac

SEQ ID NO: 435211 - DNA, 33 bp, Homo sapien
tgacagaaaacaactacgcattatggaaccttt

SEQ ID NO: 435212 - DNA, 33 bp, Homo sapien
tgacagaaaacaactatgcattatggaaccttt

SEQ ID NO: 435213 - DNA, 33 bp, Homo sapien
tactataaaaattacccaagtgctaaaaatatt

SEQ ID NO: 435214 - DNA, 33 bp, Homo sapien
tactataaaaattacctaagtgctaaaaatatt

SEQ ID NO: 435215 - DNA, 33 bp, Homo sapien
ttaatgattgtgtcaacagcaattgaggttttc

SEQ ID NO: 435216 - DNA, 33 bp, Homo sapien
ttaatgattgtgtcaatagcaattgaggttttc

SEQ ID NO: 435217 - DNA, 33 bp, Homo sapien; identical to SEQ ID NO: 435215

SEQ ID NO: 435218 - DNA, 33 bp, Homo sapien; identical to SEQ ID NO: 435216

SEQ ID NO: 435219 - DNA, 33 bp, Homo sapien
agctacaccaaaactcgcctttgaacaatatgt

SEQ ID NO: 435220 - DNA, 33 bp, Homo sapien
agctacaccaaaactctcctttgaacaatatgt

SEQ ID NO: 435221 - DNA, 33 bp, Homo sapien
tggaagttccttgcagaaatgaaagatgaaccc

SEQ ID NO: 435222 - DNA, 33 bp, Homo sapien
tggaagttccttgcagcaatgaaagatgaaccc

SEQ ID NO: 435223 - DNA, 33 bp, Homo sapien; identical to SEQ ID NO: 435221

SEQ ID NO: 435224 - DNA, 33 bp, Homo sapien; identical to SEQ ID NO: 435222

SEQ ID NO: 435225 - DNA, 33 bp, Homo sapien
gcctctaccttccataagagctagatgaaaacc

SEQ ID NO: 435226 - DNA, 33 bp, Homo sapien
gcctctaccttccataggagctagatgaaaacc

SEQ ID NO: 435227 - DNA, 33 bp, Homo sapien
agtctagtgggtagagaacagtggcgctgctaa

SEQ ID NO: 435228 - DNA, 33 bp, Homo sapien
agtctagtgggtagaggacagtggcgctgctaa

SEQ ID NO: 435229 - DNA, 33 bp, Homo sapien
ttcttttcctattctacgttcccaagccttaca

SEQ ID NO: 435230 - DNA, 33 bp, Homo sapien
ttcttttcctattctatgttcccaagccttaca

SEQ ID NO: 435231 - DNA, 33 bp, Homo sapien
ctggagatgtcttcacccatgtctgaatgctgg

SEQ ID NO: 435232 - DNA, 33 bp, Homo sapien
ctggagatgtcttcactcatgtctgaatgctgg

SEQ ID NO: 435233 - DNA, 33 bp, Homo sapien
ggaatatcaatcaaggaagtcatagtagtccac

SEQ ID NO: 435234 - DNA, 33 bp, Homo sapien
ggaatatcaatcaaggcagtcatagtagtccac

SEQ ID NO: 435235 - DNA, 33 bp, Homo sapien
gctctgggtggactcaagacgcttagcctataa

SEQ ID NO: 435236 - DNA, 33 bp, Homo sapien
gctctgggtggactcacgacgcttagcctataa

SEQ ID NO: 435237 - DNA, 33 bp, Homo sapien
gccttcccatgttgacaactatctctaaaaaat

SEQ ID NO: 435238 - DNA, 33 bp, Homo sapien
gccttcccatgttgacgactatctctaaaaaat

SEQ ID NO: 435239 - DNA, 33 bp, Homo sapien
tgatgaatgttttaccacatatttgcaggtttt

SEQ ID NO: 435240 - DNA, 33 bp, Homo sapien
tgatgaatgttttaccgcatatttgcaggtttt

SEQ ID NO: 435241 - DNA, 33 bp, Homo sapien
tatttacacacctttaaattagctcaaatgaaa

SEQ ID NO: 435242 - DNA, 33 bp, Homo sapien
tatttacacacctttagattagctcaaatgaaa

SEQ ID NO: 435243 - DNA, 33 bp, Homo sapien
tattgctgatatacaaagaacatttcaagagaa

SEQ ID NO: 435244 - DNA, 33 bp, Homo sapien
tattgctgatatacaaggaacatttcaagagaa

SEQ ID NO: 435245 - DNA, 33 bp, Homo sapien
cacacatccctgaaaccaggctaatttctctta

SEQ ID NO: 435246 - DNA, 33 bp, Homo sapien
cacacatccctgaaactaggctaatttctctta

SEQ ID NO: 435247 - DNA, 33 bp, Homo sapien
cagtgcatagcatgtcacaagtatttattgtag

SEQ ID NO: 435248 - DNA, 33 bp, Homo sapien
cagtgcatagcatgtcgcaagtatttattgtag

SEQ ID NO: 435249 - DNA, 33 bp, Homo sapien
ctggaccctataagcacacaaaaggtggcattc

SEQ ID NO: 435250 - DNA, 33 bp, Homo sapien
ctggaccctataagcatacaaaaggtggcattc

SEQ ID NO: 435251 - DNA, 33 bp, Homo sapien
ccagtcagcttttaaacgacctgcgtaaccacc

SEQ ID NO: 435252 - DNA, 33 bp, Homo sapien
ccagtcagcttttaaatgacctgcgtaaccacc

SEQ ID NO: 435253 - DNA, 33 bp, Homo sapien
caggaatgttaaggaaaattttaagatgccctc

SEQ ID NO: 435254 - DNA, 33 bp, Homo sapien
caggaatgttaaggaagattttaagatgccctc

SEQ ID NO: 435255 - DNA, 33 bp, Homo sapien
caaaagctcacctgtacaagcactaattgaagt

SEQ ID NO: 435256 - DNA, 33 bp, Homo sapien
caaaagctcacctgtataagcactaattgaagt

SEQ ID NO: 435257 - DNA, 33 bp, Homo sapien
ctcttcttttcatcaaacttataaacaagacag

SEQ ID NO: 435258 - DNA, 33 bp, Homo sapien
ctcttcttttcatcaatcttataaacaagacag

SEQ ID NO: 435259 - DNA, 33 bp, Homo sapien
tagacatatgccccagcctctttgagttggaca

SEQ ID NO: 435260 - DNA, 33 bp, Homo sapien
tagacatatgccccagtctctttgagttggaca

SEQ ID NO: 435261 - DNA, 33 bp, Homo sapien
gctgacaagaattaccagcagagtggaatttag

SEQ ID NO: 435262 - DNA, 33 bp, Homo sapien
gctgacaagaattaccggcagagtggaatttag

SEQ ID NO: 435263 - DNA, 33 bp, Homo sapien
gttagattatcagtcccgagtttggtttagcaa

SEQ ID NO: 435264 - DNA, 33 bp, Homo sapien
gttagattatcagtcctgagtttggtttagcaa

SEQ ID NO: 435265 - DNA, 33 bp, Homo sapien
agagggcagcaccagaagccttcaacactagag

SEQ ID NO: 435266 - DNA, 33 bp, Homo sapien
agagggcagcaccagaggccttcaacactagag

SEQ ID NO: 435267 - DNA, 33 bp, Homo sapien
tgttaattgggtatacggagaagccacctacag

SEQ ID NO: 435268 - DNA, 33 bp, Homo sapien
tgttaattgggtatactgagaagccacctacag

SEQ ID NO: 435269 - DNA, 33 bp, Homo sapien
gttaaagaacttgatcacccttcccatccagag

SEQ ID NO: 435270 - DNA, 33 bp, Homo sapien
gttaaagaacttgatcgcccttcccatccagag

SEQ ID NO: 435271 - DNA, 33 bp, Homo sapien
agagcagactgaacaaacgagatgtgacaggtg

SEQ ID NO: 435272 - DNA, 33 bp, Homo sapien
agagcagactgaacaagcgagatgtgacaggtg

SEQ ID NO: 435273 - DNA, 33 bp, Homo sapien
tcataaagctactctaccaaccccagacagcct

SEQ ID NO: 435274 - DNA, 33 bp, Homo sapien
tcataaagctactctatcaaccccagacagcct

SEQ ID NO: 435275 - DNA, 33 bp, Homo sapien
aggctgccaaggtgtcacagggaatgctagcag

SEQ ID NO: 435276 - DNA, 33 bp, Homo sapien
aggctgccaaggtgtcgcagggaatgctagcag

SEQ ID NO: 435277 - DNA, 33 bp, Homo sapien
taggttcactgattgacgcatagctgttttgca

SEQ ID NO: 435278 - DNA, 33 bp, Homo sapien
taggttcactgattgatgcatagctgttttgca

SEQ ID NO: 435279 - DNA, 33 bp, Homo sapien
cttgcctgagctactacgtgtcagaggcagaat

SEQ ID NO: 435280 - DNA, 33 bp, Homo sapien
cttgcctgagctactatgtgtcagaggcagaat

SEQ ID NO: 435281 - DNA, 33 bp, Homo sapien
aggttgcacagagaaactggcataccatataca

SEQ ID NO: 435282 - DNA, 33 bp, Homo sapien
aggttgcacagagaaattggcataccatataca

SEQ ID NO: 435283 - DNA, 33 bp, Homo sapien
tgaatttgcaggagccgcagagcctgatgttac

SEQ ID NO: 435284 - DNA, 33 bp, Homo sapien
tgaatttgcaggagcctcagagcctgatgttac

SEQ ID NO: 435285 - DNA, 33 bp, Homo sapien
ggctaaacctggaagcacagacacagggctcct

SEQ ID NO: 435286 - DNA, 33 bp, Homo sapien
ggctaaacctggaagcgcagacacagggctcct

SEQ ID NO: 435287 - DNA, 33 bp, Homo sapien
ggtgagtcttaaaggaactggttgcccaggaag

SEQ ID NO: 435288 - DNA, 33 bp, Homo sapien
ggtgagtcttaaaggatctggttgcccaggaag

SEQ ID NO: 435289 - DNA, 33 bp, Homo sapien
tgtccttcactcgttcacttcctcacactaggc

SEQ ID NO: 435290 - DNA, 33 bp, Homo sapien
tgtccttcactcgttcgcttcctcacactaggc

SEQ ID NO: 435291 - DNA, 33 bp, Homo sapien
tctgccagagggcttaagcctatatcacaagaa

SEQ ID NO: 435292 - DNA, 33 bp, Homo sapien
tctgccagagggcttaggcctatatcacaagaa

SEQ ID NO: 435293 - DNA, 33 bp, Homo sapien
gttggaccttctgaggcaattcaattctgttct

SEQ ID NO: 435294 - DNA, 33 bp, Homo sapien
gttggaccttctgaggtaattcaattctgttct

SEQ ID NO: 435295 - DNA, 33 bp, Homo sapien
caactgattaagactcaactccatagagctgtc

SEQ ID NO: 435296 - DNA, 33 bp, Homo sapien
caactgattaagactcgactccatagagctgtc

SEQ ID NO: 435297 - DNA, 33 bp, Homo sapien
caagttcagaggcactcaagggtcctccctggg

SEQ ID NO: 435298 - DNA, 33 bp, Homo sapien
caagttcagaggcactgaagggtcctccctggg

SEQ ID NO: 435299 - DNA, 33 bp, Homo sapien
aggccctcaagaccaaatgtcagactcaagggg

SEQ ID NO: 435300 - DNA, 33 bp, Homo sapien
aggccctcaagaccaagtgtcagactcaagggg

SEQ ID NO: 435301 - DNA, 33 bp, Homo sapien
tatgaagacaacgtcacactcttcttggcatgt

SEQ ID NO: 435302 - DNA, 33 bp, Homo sapien
tatgaagacaacgtcatactcttcttggcatgt

SEQ ID NO: 435303 - DNA, 33 bp, Homo sapien
atttgtgttcacttaacgagcagcctgaagcat

SEQ ID NO: 435304 - DNA, 33 bp, Homo sapien
atttgtgttcacttaatgagcagcctgaagcat

SEQ ID NO: 435305 - DNA, 33 bp, Homo sapien
ctctcattaaaactcaatgaagtactgaccagg

SEQ ID NO: 435306 - DNA, 33 bp, Homo sapien
ctctcattaaaactcagtgaagtactgaccagg

SEQ ID NO: 435307 - DNA, 33 bp, Homo sapien
caaattctgaccaagacgatgctctaattaact

SEQ ID NO: 435308 - DNA, 33 bp, Homo sapien
caaattctgaccaagatgatgctctaattaact

SEQ ID NO: 435309 - DNA, 33 bp, Homo sapien
actatgtgactatcctgaataggacgtatgctc

SEQ ID NO: 435310 - DNA, 33 bp, Homo sapien
actatgtgactatccttaataggacgtatgctc

SEQ ID NO: 435311 - DNA, 33 bp, Homo sapien
aattaataaagtgacaactaaccttcatggcag

SEQ ID NO: 435312 - DNA, 33 bp, Homo sapien
aattaataaagtgacagctaaccttcatggcag

SEQ ID NO: 435313 - DNA, 33 bp, Homo sapien
gagaaatatttggtgcaaattcggtaatagcga

SEQ ID NO: 435314 - DNA, 33 bp, Homo sapien
gagaaatatttggtgcgaattcggtaatagcga

SEQ ID NO: 435315 - DNA, 33 bp, Homo sapien
gtccaagataagaggcactatcagttatctatc

SEQ ID NO: 435316 - DNA, 33 bp, Homo sapien
gtccaagataagaggcgctatcagttatctatc

SEQ ID NO: 435317 - DNA, 33 bp, Homo sapien
gcaagttggtgagagccagatagataactgata

SEQ ID NO: 435318 - DNA, 33 bp, Homo sapien
gcaagttggtgagagctagatagataactgata

SEQ ID NO: 435319 - DNA, 33 bp, Homo sapien
aagaggatcaaagagaaagccaacagaaggcag

SEQ ID NO: 435320 - DNA, 33 bp, Homo sapien
aagaggatcaaagagagagccaacagaaggcag

SEQ ID NO: 435321 - DNA, 33 bp, Homo sapien
aggacatttaggtagactagaaacacatgttgc

SEQ ID NO: 435322 - DNA, 33 bp, Homo sapien
aggacatttaggtagattagaaacacatgttgc

SEQ ID NO: 435323 - DNA, 33 bp, Homo sapien
gcttcgtgtgggaaagaaagcaaggtgaaaata

SEQ ID NO: 435324 - DNA, 33 bp, Homo sapien
gcttcgtgtgggaaagtaagcaaggtgaaaata

SEQ ID NO: 435325 - DNA, 33 bp, Homo sapien
gcgaatgagtgatacaagttgtaccaagaggga

SEQ ID NO: 435326 - DNA, 33 bp, Homo sapien
gcgaatgagtgatacaggttgtaccaagaggga

SEQ ID NO: 435327 - DNA, 33 bp, Homo sapien
tgctcattatatgtccacaaggaaactccaagt

SEQ ID NO: 435328 - DNA, 33 bp, Homo sapien
tgctcattatatgtccgcaaggaaactccaagt

SEQ ID NO: 435329 - DNA, 33 bp, Homo sapien
ctttgcaggcctaacaatcccctcagttttaat

SEQ ID NO: 435330 - DNA, 33 bp, Homo sapien
ctttgcaggcctaacagtcccctcagttttaat

SEQ ID NO: 435331 - DNA, 33 bp, Homo sapien
tgtactaaaccattcacacttgctgaccatgac

SEQ ID NO: 435332 - DNA, 33 bp, Homo sapien
tgtactaaaccattcatacttgctgaccatgac

SEQ ID NO: 435333 - DNA, 33 bp, Homo sapien
ggatctcaggcataaacgataggtcaataaagc

SEQ ID NO: 435334 - DNA, 33 bp, Homo sapien
ggatctcaggcataaatgataggtcaataaagc

SEQ ID NO: 435335 - DNA, 33 bp, Homo sapien
actgcactgtggttgcgccaatgaaggtcagac

SEQ ID NO: 435336 - DNA, 33 bp, Homo sapien
actgcactgtggttgctccaatgaaggtcagac

SEQ ID NO: 435337 - DNA, 33 bp, Homo sapien
gtccacggcatagggcaaagctgcactcatttt

SEQ ID NO: 435338 - DNA, 33 bp, Homo sapien
gtccacggcatagggccaagctgcactcatttt

SEQ ID NO: 435339 - DNA, 33 bp, Homo sapien
cctggacctccaaaccagagctattaatcacag

SEQ ID NO: 435340 - DNA, 33 bp, Homo sapien
cctggacctccaaaccggagctattaatcacag

SEQ ID NO: 435341 - DNA, 33 bp, Homo sapien
atgtttgaataccctggcagagagagatttcca

SEQ ID NO: 435342 - DNA, 33 bp, Homo sapien
atgtttgaataccctgtcagagagagatttcca

SEQ ID NO: 435343 - DNA, 33 bp, Homo sapien
ctagcacccctcaaaccatctatctgcccatat

SEQ ID NO: 435344 - DNA, 33 bp, Homo sapien
ctagcacccctcaaacgatctatctgcccatat

SEQ ID NO: 435345 - DNA, 33 bp, Homo sapien
aatccttcagagaaaaccacattgatgaagaat

SEQ ID NO: 435346 - DNA, 33 bp, Homo sapien
aatccttcagagaaaagcacattgatgaagaat

SEQ ID NO: 435347 - DNA, 33 bp, Homo sapien
tactgagaacaaatacacaatggttccagttac

SEQ ID NO: 435348 - DNA, 33 bp, Homo sapien
tactgagaacaaatactcaatggttccagttac

SEQ ID NO: 435349 - DNA, 33 bp, Homo sapien
tgggatgatcatactaactacgtcttggaaatg

SEQ ID NO: 435350 - DNA, 33 bp, Homo sapien
tgggatgatcatactacctacgtcttggaaatg

SEQ ID NO: 435351 - DNA, 33 bp, Homo sapien
agaggctggcaatgcacgctttaaggtcaggca

SEQ ID NO: 435352 - DNA, 33 bp, Homo sapien
agaggctggcaatgcaggctttaaggtcaggca

SEQ ID NO: 435353 - DNA, 33 bp, Homo sapien
gagctaggcactggacaaaggtctgtctatctc

SEQ ID NO: 435354 - DNA, 33 bp, Homo sapien
gagctaggcactggaccaaggtctgtctatctc

SEQ ID NO: 435355 - DNA, 33 bp, Homo sapien
aaaatcctgcaggtccagagcctagtgccaagc

SEQ ID NO: 435356 - DNA, 33 bp, Homo sapien
aaaatcctgcaggtccggagcctagtgccaagc

SEQ ID NO: 435357 - DNA, 33 bp, Homo sapien
tcctgaacaactctacaatgcctggagtgcctc

SEQ ID NO: 435358 - DNA, 33 bp, Homo sapien
tcctgaacaactctacgatgcctggagtgcctc

SEQ ID NO: 435359 - DNA, 33 bp, Homo sapien
tgctactgctattgtcactcttgtaatttccct

SEQ ID NO: 435360 - DNA, 33 bp, Homo sapien
tgctactgctattgtcgctcttgtaatttccct

SEQ ID NO: 435361 - DNA, 33 bp, Homo sapien
tgatgcaagtatctcaaggacaatggagatttt

SEQ ID NO: 435362 - DNA, 33 bp, Homo sapien
tgatgcaagtatctcagggacaatggagatttt

SEQ ID NO: 435363 - DNA, 33 bp, Homo sapien
gactgctacttcaataacaaaggaagcaaagga

SEQ ID NO: 435364 - DNA, 33 bp, Homo sapien
gactgctacttcaatagcaaaggaagcaaagga

SEQ ID NO: 435365 - DNA, 33 bp, Homo sapien
ctgggcataaacttaaaaagaatgtgtagcagt

SEQ ID NO: 435366 - DNA, 33 bp, Homo sapien
ctgggcataaacttaacaagaatgtgtagcagt

SEQ ID NO: 435367 - DNA, 33 bp, Homo sapien
ttaaattgttgggctaaccgagaaatgccaaat

SEQ ID NO: 435368 - DNA, 33 bp, Homo sapien
ttaaattgttgggctagccgagaaatgccaaat

SEQ ID NO: 435369 - DNA, 33 bp, Homo sapien
tctgcatgccaggagcaccttagccttcagcaa

SEQ ID NO: 435370 - DNA, 33 bp, Homo sapien
tctgcatgccaggagcgccttagccttcagcaa

SEQ ID NO: 435371 - DNA, 33 bp, Homo sapien
cctcctcagaaatgtcaccatcctatccaaaaa

SEQ ID NO: 435372 - DNA, 33 bp, Homo sapien
cctcctcagaaatgtcgccatcctatccaaaaa

SEQ ID NO: 435373 - DNA, 33 bp, Homo sapien
ttgaagaaatgcagaaatatatacaactgtgta

SEQ ID NO: 435374 - DNA, 33 bp, Homo sapien
ttgaagaaatgcagaagtatatacaactgtgta

SEQ ID NO: 435375 - DNA, 33 bp, Homo sapien
agtgtgtctgctacccagaaggaatgctgaggg

SEQ ID NO: 435376 - DNA, 33 bp, Homo sapien
agtgtgtctgctacccggaaggaatgctgaggg

SEQ ID NO: 435377 - DNA, 33 bp, Homo sapien
gactgacagctctgatcaatcctttccggtctg

SEQ ID NO: 435378 - DNA, 33 bp, Homo sapien
gactgacagctctgatgaatcctttccggtctg

SEQ ID NO: 435379 - DNA, 33 bp, Homo sapien
cagaattgagcctgcaagtataaagaactgggg

SEQ ID NO: 435380 - DNA, 33 bp, Homo sapien
cagaattgagcctgcaggtataaagaactgggg

SEQ ID NO: 435381 - DNA, 33 bp, Homo sapien
atctgtccactttgtgcgccagaattgagcctg

SEQ ID NO: 435382 - DNA, 33 bp, Homo sapien
atctgtccactttgtgtgccagaattgagcctg

SEQ ID NO: 435383 - DNA, 33 bp, Homo sapien
tgtgcttaaagaaatacggtattcaaagagagt

SEQ ID NO: 435384 - DNA, 33 bp, Homo sapien
tgtgcttaaagaaatatggtattcaaagagagt

SEQ ID NO: 435385 - DNA, 33 bp, Homo sapien
tgtaaactaaatgtccagaaaatacttctattt

SEQ ID NO: 435386 - DNA, 33 bp, Homo sapien
tgtaaactaaatgtccggaaaatacttctattt

SEQ ID NO: 435387 - DNA, 33 bp, Homo sapien
tttctatatcagcaacaaattgttagaaaatat

SEQ ID NO: 435388 - DNA, 33 bp, Homo sapien
tttctatatcagcaactaattgttagaaaatat

SEQ ID NO: 435389 - DNA, 33 bp, Homo sapien
attggtcaataggaaaatcagtaaaagacatga

SEQ ID NO: 435390 - DNA, 33 bp, Homo sapien
attggtcaataggaaactcagtaaaagacatga

SEQ ID NO: 435391 - DNA, 33 bp, Homo sapien
aggcaaggggaactgcaagccccacatcaggca

SEQ ID NO: 435392 - DNA, 33 bp, Homo sapien
aggcaaggggaactgcgagccccacatcaggca

SEQ ID NO: 435393 - DNA, 33 bp, Homo sapien
ttgcccaatatgtgaaactggtaaaaactagag

SEQ ID NO: 435394 - DNA, 33 bp, Homo sapien
ttgcccaatatgtgaagctggtaaaaactagag

SEQ ID NO: 435395 - DNA, 33 bp, Homo sapien
gctagggtatgtgggaaagattatctaggagaa

SEQ ID NO: 435396 - DNA, 33 bp, Homo sapien
gctagggtatgtgggagagattatctaggagaa

SEQ ID NO: 435397 - DNA, 33 bp, Homo sapien
tttttgcctaatttgcacaaaggttccatatag

SEQ ID NO: 435398 - DNA, 33 bp, Homo sapien
tttttgcctaatttgcccaaaggttccatatag

SEQ ID NO: 435399 - DNA, 33 bp, Homo sapien
cacaaggcactgggacaatggatgacaggcttt

SEQ ID NO: 435400 - DNA, 33 bp, Homo sapien
cacaaggcactgggacgatggatgacaggcttt

SEQ ID NO: 435401 - DNA, 33 bp, Homo sapien
tgtgtctgcaaggagagcaaggtggagggtatt

SEQ ID NO: 435402 - DNA, 33 bp, Homo sapien
tgtgtctgcaaggagatcaaggtggagggtatt

SEQ ID NO: 435403 - DNA, 33 bp, Homo sapien
ttgtgtgagtaaaggcaacctctagctgaggtc

SEQ ID NO: 435404 - DNA, 33 bp, Homo sapien
ttgtgtgagtaaaggcgacctctagctgaggtc

SEQ ID NO: 435405 - DNA, 33 bp, Homo sapien
ttccccttgtcttccaaaaagagattggtgtcc

SEQ ID NO: 435406 - DNA, 33 bp, Homo sapien
ttccccttgtcttccagaaagagattggtgtcc

SEQ ID NO: 435407 - DNA, 33 bp, Homo sapien
gctaggcaccttggcaagtactttacagatatc

SEQ ID NO: 435408 - DNA, 33 bp, Homo sapien
gctaggcaccttggcaggtactttacagatatc

SEQ ID NO: 435409 - DNA, 33 bp, Homo sapien
ttagagatgatgtatgaaaagcctctggcacac

SEQ ID NO: 435410 - DNA, 33 bp, Homo sapien
ttagagatgatgtatggaaagcctctggcacac

SEQ ID NO: 435411 - DNA, 33 bp, Homo sapien
aggataacacatctgccgcaatgtgtcatcatg

SEQ ID NO: 435412 - DNA, 33 bp, Homo sapien
aggataacacatctgctgcaatgtgtcatcatg

SEQ ID NO: 435413 - DNA, 33 bp, Homo sapien
caaacaggatggacaaaaagaacctcaaatatc

SEQ ID NO: 435414 - DNA, 33 bp, Homo sapien
caaacaggatggacaacaagaacctcaaatatc

SEQ ID NO: 435415 - DNA, 33 bp, Homo sapien
tccataatcccatgagccaacgcccctagtaag

SEQ ID NO: 435416 - DNA, 33 bp, Homo sapien
tccataatcccatgagtcaacgcccctagtaag

SEQ ID NO: 435417 - DNA, 33 bp, Homo sapien
tacaaaaaatttaaaacctggtggcacagacct

SEQ ID NO: 435418 - DNA, 33 bp, Homo sapien
tacaaaaaatttaaaatctggtggcacagacct

SEQ ID NO: 435419 - DNA, 33 bp, Homo sapien
tgtttcctgaaagagacggtaacaagaaaataa

SEQ ID NO: 435420 - DNA, 33 bp, Homo sapien
tgtttcctgaaagagagggtaacaagaaaataa

SEQ ID NO: 435421 - DNA, 33 bp, Homo sapien
ttcactcatacctcaactgttgcacacagctca

SEQ ID NO: 435422 - DNA, 33 bp, Homo sapien
ttcactcatacctcaattgttgcacacagctca

SEQ ID NO: 435423 - DNA, 33 bp, Homo sapien
ttctgtacccagtacaaccaacaagcaggactc

SEQ ID NO: 435424 - DNA, 33 bp, Homo sapien
ttctgtacccagtacatccaacaagcaggactc

SEQ ID NO: 435425 - DNA, 33 bp, Homo sapien
ctaatatctggatggtcaacaaatataaaacag

SEQ ID NO: 435426 - DNA, 33 bp, Homo sapien
ctaatatctggatggtgaacaaatataaaacag

SEQ ID NO: 435427 - DNA, 33 bp, Homo sapien
accagtcaaatggttcacctagcaaagactctg

SEQ ID NO: 435428 - DNA, 33 bp, Homo sapien
accagtcaaatggttcccctagcaaagactctg

SEQ ID NO: 435429 - DNA, 33 bp, Homo sapien
tacctccgtttccccccgaaggtatcgctacct

SEQ ID NO: 435430 - DNA, 33 bp, Homo sapien
tacctccgtttccccctgaaggtatcgctacct

SEQ ID NO: 435431 - DNA, 33 bp, Homo sapien
aagttgaatgtttgtacggtgcctttgtatcaa

SEQ ID NO: 435432 - DNA, 33 bp, Homo sapien
aagttgaatgtttgtatggtgcctttgtatcaa

SEQ ID NO: 435433 - DNA, 33 bp, Homo sapien
tcaagtggttggtctacaaatattcattttatt

SEQ ID NO: 435434 - DNA, 33 bp, Homo sapien
tcaagtggttggtctataaatattcattttatt

SEQ ID NO: 435435 - DNA, 33 bp, Homo sapien
ggacagaaccactatacgctccacttcttagcc

SEQ ID NO: 435436 - DNA, 33 bp, Homo sapien
ggacagaaccactatatgctccacttcttagcc

SEQ ID NO: 435437 - DNA, 33 bp, Homo sapien
atcagagtctcacagacaggaggctgggaagct

SEQ ID NO: 435438 - DNA, 33 bp, Homo sapien
atcagagtctcacagataggaggctgggaagct

SEQ ID NO: 435439 - DNA, 33 bp, Homo sapien
tgtctgcgtgtcctaccgtacctgattaaaaca

SEQ ID NO: 435440 - DNA, 33 bp, Homo sapien
tgtctgcgtgtcctactgtacctgattaaaaca

SEQ ID NO: 435441 - DNA, 33 bp, Homo sapien
caggaatcatgataggccataggttttacaaaa

SEQ ID NO: 435442 - DNA, 33 bp, Homo sapien
caggaatcatgataggtcataggttttacaaaa

SEQ ID NO: 435443 - DNA, 33 bp, Homo sapien
acctgttaaatctccactagccctaggtgaaca

SEQ ID NO: 435444 - DNA, 33 bp, Homo sapien
acctgttaaatctccagtagccctaggtgaaca

SEQ ID NO: 435445 - DNA, 33 bp, Homo sapien
aggactgtgagagcccagaacccctgctcttaa

SEQ ID NO: 435446 - DNA, 33 bp, Homo sapien
aggactgtgagagcccggaacccctgctcttaa

SEQ ID NO: 435447 - DNA, 33 bp, Homo sapien
agaggaagtgcagtgacactgttaagagcaggg

SEQ ID NO: 435448 - DNA, 33 bp, Homo sapien
agaggaagtgcagtgatactgttaagagcaggg

SEQ ID NO: 435449 - DNA, 33 bp, Homo sapien
agaaaaccccccagagaacgatggctgtcagag

SEQ ID NO: 435450 - DNA, 33 bp, Homo sapien
agaaaaccccccagaggacgatggctgtcagag

SEQ ID NO: 435451 - DNA, 33 bp, Homo sapien
agtttaggaatggaaccagcaggatgcattgat

SEQ ID NO: 435452 - DNA, 33 bp, Homo sapien
agtttaggaatggaactagcaggatgcattgat

SEQ ID NO: 435453 - DNA, 33 bp, Homo sapien
tctgctttcctgtaaactgaggaggccggatca

SEQ ID NO: 435454 - DNA, 33 bp, Homo sapien
tctgctttcctgtaaattgaggaggccggatca

SEQ ID NO: 435455 - DNA, 33 bp, Homo sapien
aaaagagcaagccccaaatagatgacacaagag

SEQ ID NO: 435456 - DNA, 33 bp, Homo sapien
aaaagagcaagccccagatagatgacacaagag

SEQ ID NO: 435457 - DNA, 33 bp, Homo sapien
ccacgctaggttctggcaattcaaaacggaaga

SEQ ID NO: 435458 - DNA, 33 bp, Homo sapien
ccacgctaggttctgggaattcaaaacggaaga

SEQ ID NO: 435459 - DNA, 33 bp, Homo sapien
aactgtcttactgagaagatggaagcacaaaca

SEQ ID NO: 435460 - DNA, 33 bp, Homo sapien
aactgtcttactgagacgatggaagcacaaaca

SEQ ID NO: 435461 - DNA, 33 bp, Homo sapien
agactggccatgtgctaaagacaaaatgcaact

SEQ ID NO: 435462 - DNA, 33 bp, Homo sapien
agactggccatgtgctcaagacaaaatgcaact

SEQ ID NO: 435463 - DNA, 33 bp, Homo sapien
aataacagttaaaaccagactgtcagttcttga

SEQ ID NO: 435464 - DNA, 33 bp, Homo sapien
aataacagttaaaaccggactgtcagttcttga

SEQ ID NO: 435465 - DNA, 33 bp, Homo sapien
tgttcacctttactgccatcctcacactggccc

SEQ ID NO: 435466 - DNA, 33 bp, Homo sapien
tgttcacctttactgctatcctcacactggccc

SEQ ID NO: 435467 - DNA, 33 bp, Homo sapien
ggcaggttagtagatcccacccgaagacagtca

SEQ ID NO: 435468 - DNA, 33 bp, Homo sapien
ggcaggttagtagatctcacccgaagacagtca

SEQ ID NO: 435469 - DNA, 33 bp, Homo sapien
tgtccagtggaaaagccgagcacttaggctgtt

SEQ ID NO: 435470 - DNA, 33 bp, Homo sapien
tgtccagtggaaaagctgagcacttaggctgtt

SEQ ID NO: 435471 - DNA, 33 bp, Homo sapien
gccgcttaggcttgggccaccgcgtttccaaga

SEQ ID NO: 435472 - DNA, 33 bp, Homo sapien
gccgcttaggcttgggtcaccgcgtttccaaga

SEQ ID NO: 435473 - DNA, 33 bp, Homo sapien
aaaagatttgaatcacaagagtggctgatatga

SEQ ID NO: 435474 - DNA, 33 bp, Homo sapien
aaaagatttgaatcacgagagtggctgatatga

SEQ ID NO: 435475 - DNA, 33 bp, Homo sapien
caatcatgaagcagacaccgacttctgctaaca

SEQ ID NO: 435476 - DNA, 33 bp, Homo sapien
caatcatgaagcagactccgacttctgctaaca

SEQ ID NO: 435477 - DNA, 33 bp, Homo sapien
gcatttctgctcacctaacagcaagataccctc

SEQ ID NO: 435478 - DNA, 33 bp, Homo sapien
gcatttctgctcacctgacagcaagataccctc

SEQ ID NO: 435479 - DNA, 33 bp, Homo sapien
gtagacatggctagtacggacactatgtgctag

SEQ ID NO: 435480 - DNA, 33 bp, Homo sapien
gtagacatggctagtatggacactatgtgctag

SEQ ID NO: 435481 - DNA, 33 bp, Homo sapien
gtgagaggtgctgtagaatgggagaaagagctc

SEQ ID NO: 435482 - DNA, 33 bp, Homo sapien
gtgagaggtgctgtaggatgggagaaagagctc

SEQ ID NO: 435483 - DNA, 33 bp, Homo sapien
ttcctactcaaatacaagtgattctaggtagag

SEQ ID NO: 435484 - DNA, 33 bp, Homo sapien
ttcctactcaaatacaggtgattctaggtagag

SEQ ID NO: 435485 - DNA, 33 bp, Homo sapien
agcaggcactcggtagccactctgggaagtacc

SEQ ID NO: 435486 - DNA, 33 bp, Homo sapien
agcaggcactcggtaggcactctgggaagtacc

SEQ ID NO: 435487 - DNA, 33 bp, Homo sapien
ccccatcctggccacaaaggcaaagctgaggca

SEQ ID NO: 435488 - DNA, 33 bp, Homo sapien
ccccatcctggccacataggcaaagctgaggca

SEQ ID NO: 435489 - DNA, 33 bp, Homo sapien
tgacacttgaatggacagattactaatagaaca

SEQ ID NO: 435490 - DNA, 33 bp, Homo sapien
tgacacttgaatggactgattactaatagaaca

SEQ ID NO: 435491 - DNA, 33 bp, Homo sapien
agacaccaaactcaacaaggatagtatgaaaaa

SEQ ID NO: 435492 - DNA, 33 bp, Homo sapien
agacaccaaactcaacgaggatagtatgaaaaa

SEQ ID NO: 435493 - DNA, 33 bp, Homo sapien
aagtccagaaaggtagcaaaaaaatccatgttc

SEQ ID NO: 435494 - DNA, 33 bp, Homo sapien
aagtccagaaaggtaggaaaaaaatccatgttc

SEQ ID NO: 435495 - DNA, 33 bp, Homo sapien
ttgtctgtgtcctggaagaagtccttatgtgta

SEQ ID NO: 435496 - DNA, 33 bp, Homo sapien
ttgtctgtgtcctggaggaagtccttatgtgta

SEQ ID NO: 435497 - DNA, 33 bp, Homo sapien
ttttaaaacataaattaaaaactggatctctgg

SEQ ID NO: 435498 - DNA, 33 bp, Homo sapien
ttttaaaacataaattcaaaactggatctctgg

SEQ ID NO: 435499 - DNA, 33 bp, Homo sapien
aaatagaattaccatacgatcccgcaatttcac

SEQ ID NO: 435500 - DNA, 33 bp, Homo sapien
aaatagaattaccatatgatcccgcaatttcac

SEQ ID NO: 435501 - DNA, 33 bp, Homo sapien
ataacttcattaggcaataagaattataacaca

SEQ ID NO: 435502 - DNA, 33 bp, Homo sapien
ataacttcattaggcagtaagaattataacaca

SEQ ID NO: 435503 - DNA, 33 bp, Homo sapien
atggtaaaggtcaataagaactctgtagattcc

SEQ ID NO: 435504 - DNA, 33 bp, Homo sapien
atggtaaaggtcaatatgaactctgtagattcc

SEQ ID NO: 435505 - DNA, 33 bp, Homo sapien
taagacggtagcctagccaggtaattgcctgga

SEQ ID NO: 435506 - DNA, 33 bp, Homo sapien
taagacggtagcctagtcaggtaattgcctgga

SEQ ID NO: 435507 - DNA, 33 bp, Homo sapien
ttaagataattactaaccagaacacatgctaga

SEQ ID NO: 435508 - DNA, 33 bp, Homo sapien
ttaagataattactaatcagaacacatgctaga

SEQ ID NO: 435509 - DNA, 33 bp, Homo sapien
caaatgcctgacaaaactactggaaaagaatga

SEQ ID NO: 435510 - DNA, 33 bp, Homo sapien
caaatgcctgacaaaattactggaaaagaatga

SEQ ID NO: 435511 - DNA, 33 bp, Homo sapien
tacgatttgagcaatcagatgaatggtggtttc

SEQ ID NO: 435512 - DNA, 33 bp, Homo sapien
tacgatttgagcaatcggatgaatggtggtttc

SEQ ID NO: 435513 - DNA, 33 bp, Homo sapien
gagaggcaaaaaccaacgggtaatagctaagat

SEQ ID NO: 435514 - DNA, 33 bp, Homo sapien
gagaggcaaaaaccaaggggtaatagctaagat

SEQ ID NO: 435515 - DNA, 33 bp, Homo sapien
caaaatttgaaaaaaaacgaatctcctgcttca

SEQ ID NO: 435516 - DNA, 33 bp, Homo sapien
caaaatttgaaaaaaaccgaatctcctgcttca

SEQ ID NO: 435517 - DNA, 33 bp, Homo sapien
gtgaccaggtcttaaaataataatgtgattttt

SEQ ID NO: 435518 - DNA, 33 bp, Homo sapien
gtgaccaggtcttaaagtaataatgtgattttt

SEQ ID NO: 435519 - DNA, 33 bp, Homo sapien
taagacctggtcaccacaagtaaaagctgcttc

SEQ ID NO: 435520 - DNA, 33 bp, Homo sapien
taagacctggtcaccataagtaaaagctgcttc

SEQ ID NO: 435521 - DNA, 33 bp, Homo sapien
acccagagtctgactaactttgtggaaactata

SEQ ID NO: 435522 - DNA, 33 bp, Homo sapien
acccagagtctgactagctttgtggaaactata

SEQ ID NO: 435523 - DNA, 33 bp, Homo sapien
ctaatataaatgcacaactatttggccagcaag

SEQ ID NO: 435524 - DNA, 33 bp, Homo sapien
ctaatataaatgcacagctatttggccagcaag

SEQ ID NO: 435525 - DNA, 33 bp, Homo sapien
aggagccattgacttcactcacctgctggattc

SEQ ID NO: 435526 - DNA, 33 bp, Homo sapien
aggagccattgacttctctcacctgctggattc

SEQ ID NO: 435527 - DNA, 33 bp, Homo sapien
aattaatgtcaaataacggaaaggtataatcac

SEQ ID NO: 435528 - DNA, 33 bp, Homo sapien
aattaatgtcaaataatggaaaggtataatcac

SEQ ID NO: 435529 - DNA, 33 bp, Homo sapien
tcttgattttcagggagatgctccagtcacccc

SEQ ID NO: 435530 - DNA, 33 bp, Homo sapien
tcttgattttcagggatatgctccagtcacccc

SEQ ID NO: 435531 - DNA, 33 bp, Homo sapien
tccccagacttctatacggagagcatttggcaa

SEQ ID NO: 435532 - DNA, 33 bp, Homo sapien
tccccagacttctatatggagagcatttggcaa

SEQ ID NO: 435533 - DNA, 33 bp, Homo sapien
aatttggctgaaaaaagaagttgaagtcaccag

SEQ ID NO: 435534 - DNA, 33 bp, Homo sapien
aatttggctgaaaaaataagttgaagtcaccag

SEQ ID NO: 435535 - DNA, 33 bp, Homo sapien
atgccctttcaactaacggttttagcatctatt

SEQ ID NO: 435536 - DNA, 33 bp, Homo sapien
atgccctttcaactaatggttttagcatctatt

SEQ ID NO: 435537 - DNA, 33 bp, Homo sapien
acctttttcagactgtgaaatgtggagagtcct

SEQ ID NO: 435538 - DNA, 33 bp, Homo sapien
acctttttcagactgttaaatgtggagagtcct

SEQ ID NO: 435539 - DNA, 33 bp, Homo sapien
tctacacatattgggacctttttctgtattttc

SEQ ID NO: 435540 - DNA, 33 bp, Homo sapien
tctacacatattgggatctttttctgtattttc

SEQ ID NO: 435541 - DNA, 33 bp, Homo sapien
ctgtgtggatgcttcaataaggattaaaatgat

SEQ ID NO: 435542 - DNA, 33 bp, Homo sapien
ctgtgtggatgcttcagtaaggattaaaatgat

SEQ ID NO: 435543 - DNA, 33 bp, Homo sapien
cactccccagttaaaactcttccagtgactccc

SEQ ID NO: 435544 - DNA, 33 bp, Homo sapien
cactccccagttaaaattcttccagtgactccc

SEQ ID NO: 435545 - DNA, 33 bp, Homo sapien
tccctagtcaaggacaaagcagtggttttatca

SEQ ID NO: 435546 - DNA, 33 bp, Homo sapien
tccctagtcaaggacagagcagtggttttatca

SEQ ID NO: 435547 - DNA, 33 bp, Homo sapien
tttttgactttgaaaaccatacacatattactt

SEQ ID NO: 435548 - DNA, 33 bp, Homo sapien
tttttgactttgaaaatcatacacatattactt

SEQ ID NO: 435549 - DNA, 33 bp, Homo sapien
ctggacagcagaagaacgtgtttggtggttgca

SEQ ID NO: 435550 - DNA, 33 bp, Homo sapien
ctggacagcagaagaatgtgtttggtggttgca

SEQ ID NO: 435551 - DNA, 33 bp, Homo sapien
aggaaattaaactatcaaggagagctagggttg

SEQ ID NO: 435552 - DNA, 33 bp, Homo sapien
aggaaattaaactatcgaggagagctagggttg

SEQ ID NO: 435553 - DNA, 33 bp, Homo sapien
tctgcattctattgatcaaaacaagtgccaagg

SEQ ID NO: 435554 - DNA, 33 bp, Homo sapien
tctgcattctattgatgaaaacaagtgccaagg

SEQ ID NO: 435555 - DNA, 33 bp, Homo sapien
gcacaggcaagttcaaaagtaggaggttgtcaa

SEQ ID NO: 435556 - DNA, 33 bp, Homo sapien
gcacaggcaagttcaagagtaggaggttgtcaa

SEQ ID NO: 435557 - DNA, 33 bp, Homo sapien
ttccaaaggaatacaaccctcattcatacagca

SEQ ID NO: 435558 - DNA, 33 bp, Homo sapien
ttccaaaggaatacaatcctcattcatacagca

SEQ ID NO: 435559 - DNA, 33 bp, Homo sapien
attctcagattgttccggatagcttcctgatgc

SEQ ID NO: 435560 - DNA, 33 bp, Homo sapien
attctcagattgttcctgatagcttcctgatgc

SEQ ID NO: 435561 - DNA, 33 bp, Homo sapien
aggaataacgatctaaactttatgcgcaatata

SEQ ID NO: 435562 - DNA, 33 bp, Homo sapien
aggaataacgatctaacctttatgcgcaatata

SEQ ID NO: 435563 - DNA, 33 bp, Homo sapien
aagaccagttctaaaactcaagagctttctaaa

SEQ ID NO: 435564 - DNA, 33 bp, Homo sapien
aagaccagttctaaaattcaagagctttctaaa

SEQ ID NO: 435565 - DNA, 33 bp, Homo sapien
ggaattctctaagtgcacattggtcgtacaaga

SEQ ID NO: 435566 - DNA, 33 bp, Homo sapien
ggaattctctaagtgctcattggtcgtacaaga

SEQ ID NO: 435567 - DNA, 33 bp, Homo sapien
aaacaaacaaaagcaactgactatctagaaatg

SEQ ID NO: 435568 - DNA, 33 bp, Homo sapien
aaacaaacaaaagcaattgactatctagaaatg

SEQ ID NO: 435569 - DNA, 33 bp, Homo sapien
cccttctttaggagtgacaatcagaaaaggcaa

SEQ ID NO: 435570 - DNA, 33 bp, Homo sapien
cccttctttaggagtgtcaatcagaaaaggcaa

SEQ ID NO: 435571 - DNA, 33 bp, Homo sapien
acacttcgttatgagacggattcgactaacttt

SEQ ID NO: 435572 - DNA, 33 bp, Homo sapien
acacttcgttatgagatggattcgactaacttt

SEQ ID NO: 435573 - DNA, 33 bp, Homo sapien
gggacggtagacagaaagttaaagacatccctt

SEQ ID NO: 435574 - DNA, 33 bp, Homo sapien
gggacggtagacagaaggttaaagacatccctt

SEQ ID NO: 435575 - DNA, 33 bp, Homo sapien
ctacttccaccaaccactggctgggggctactc

SEQ ID NO: 435576 - DNA, 33 bp, Homo sapien
ctacttccaccaaccattggctgggggctactc

SEQ ID NO: 435577 - DNA, 33 bp, Homo sapien
aggtgctattgactagaaaagtggctattagct

SEQ ID NO: 435578 - DNA, 33 bp, Homo sapien
aggtgctattgactagcaaagtggctattagct

SEQ ID NO: 435579 - DNA, 33 bp, Homo sapien
ttgtagaatttctggaaaggtgatattactaga

SEQ ID NO: 435580 - DNA, 33 bp, Homo sapien
ttgtagaatttctggagaggtgatattactaga

SEQ ID NO: 435581 - DNA, 33 bp, Homo sapien
agggaagaggtgagatgaggaaaatgagcggtg

SEQ ID NO: 435582 - DNA, 33 bp, Homo sapien
agggaagaggtgagattaggaaaatgagcggtg

SEQ ID NO: 435583 - DNA, 33 bp, Homo sapien
ctgtgcctattataaacaaatcagttgcaaatt

SEQ ID NO: 435584 - DNA, 33 bp, Homo sapien
ctgtgcctattataaagaaatcagttgcaaatt

SEQ ID NO: 435585 - DNA, 33 bp, Homo sapien
tgaaagttctgggacactgtagcagattacttc

SEQ ID NO: 435586 - DNA, 33 bp, Homo sapien
tgaaagttctgggacattgtagcagattacttc

SEQ ID NO: 435587 - DNA, 33 bp, Homo sapien
tacaccagtatgtccacgacctctccataaaca

SEQ ID NO: 435588 - DNA, 33 bp, Homo sapien
tacaccagtatgtccaggacctctccataaaca

SEQ ID NO: 435589 - DNA, 33 bp, Homo sapien
ctggttccttctcaccaacaagtgaacaacctg

SEQ ID NO: 435590 - DNA, 33 bp, Homo sapien
ctggttccttctcacccacaagtgaacaacctg

SEQ ID NO: 435591 - DNA, 33 bp, Homo sapien
gcagctgtgtcactagacattcttgaaagggga

SEQ ID NO: 435592 - DNA, 33 bp, Homo sapien
gcagctgtgtcactagtcattcttgaaagggga

SEQ ID NO: 435593 - DNA, 33 bp, Homo sapien
aatatatattatgctacatagtgataacagcac

SEQ ID NO: 435594 - DNA, 33 bp, Homo sapien
aatatatattatgctagatagtgataacagcac

SEQ ID NO: 435595 - DNA, 33 bp, Homo sapien
cacctgtgtcctccacgcatgttgtagaacaaa

SEQ ID NO: 435596 - DNA, 33 bp, Homo sapien
cacctgtgtcctccactcatgttgtagaacaaa

SEQ ID NO: 435597 - DNA, 33 bp, Homo sapien
tgtggaggtttggcccaatcactaccttcctgg

SEQ ID NO: 435598 - DNA, 33 bp, Homo sapien
tgtggaggtttggcccgatcactaccttcctgg

SEQ ID NO: 435599 - DNA, 33 bp, Homo sapien
ctcattgcctatgggaccaattaaaatgcttta

SEQ ID NO: 435600 - DNA, 33 bp, Homo sapien
ctcattgcctatgggatcaattaaaatgcttta

SEQ ID NO: 435601 - DNA, 33 bp, Homo sapien
ggtagccctggagacccaataccaattgcatag

SEQ ID NO: 435602 - DNA, 33 bp, Homo sapien
ggtagccctggagaccgaataccaattgcatag

SEQ ID NO: 435603 - DNA, 33 bp, Homo sapien
tacactgttgtaagaaattcccatagaacgcag

SEQ ID NO: 435604 - DNA, 33 bp, Homo sapien
tacactgttgtaagaacttcccatagaacgcag

SEQ ID NO: 435605 - DNA, 33 bp, Homo sapien
tccagaaatgtaccaaaccttcgcatttttctc

SEQ ID NO: 435606 - DNA, 33 bp, Homo sapien
tccagaaatgtaccaagccttcgcatttttctc

SEQ ID NO: 435607 - DNA, 33 bp, Homo sapien
tttttcaggagtagacaccaagactggatgaac

SEQ ID NO: 435608 - DNA, 33 bp, Homo sapien
tttttcaggagtagacgccaagactggatgaac

SEQ ID NO: 435609 - DNA, 33 bp, Homo sapien
gtagaacagatttcacaaactttgccacaccct

SEQ ID NO: 435610 - DNA, 33 bp, Homo sapien
gtagaacagatttcacgaactttgccacaccct

SEQ ID NO: 435611 - DNA, 33 bp, Homo sapien
agaaagaggcacctaaaacaagcaatcccagtg

SEQ ID NO: 435612 - DNA, 33 bp, Homo sapien
agaaagaggcacctaagacaagcaatcccagtg

SEQ ID NO: 435613 - DNA, 33 bp, Homo sapien
aatgggttttatagcaaggtggataaatcagtt

SEQ ID NO: 435614 - DNA, 33 bp, Homo sapien
aatgggttttatagcatggtggataaatcagtt

SEQ ID NO: 435615 - DNA, 33 bp, Homo sapien
cttggttctggctttcaaagctgctggttaatg

SEQ ID NO: 435616 - DNA, 33 bp, Homo sapien
cttggttctggctttcgaagctgctggttaatg

SEQ ID NO: 435617 - DNA, 33 bp, Homo sapien
tttaaatcttgccccaaatatgaggcctgaaat

SEQ ID NO: 435618 - DNA, 33 bp, Homo sapien
tttaaatcttgccccagatatgaggcctgaaat

SEQ ID NO: 435619 - DNA, 33 bp, Homo sapien
tgcatgtgtgtctactcagcgccctgaaaactt

SEQ ID NO: 435620 - DNA, 33 bp, Homo sapien
tgcatgtgtgtctacttagcgccctgaaaactt

SEQ ID NO: 435621 - DNA, 33 bp, Homo sapien
agtgggacatatctgacgggaaacagaggagat

SEQ ID NO: 435622 - DNA, 33 bp, Homo sapien
agtgggacatatctgaggggaaacagaggagat

SEQ ID NO: 435623 - DNA, 33 bp, Homo sapien
ctacctttccactagcacatccagttatcttct

SEQ ID NO: 435624 - DNA, 33 bp, Homo sapien
ctacctttccactagcgcatccagttatcttct

SEQ ID NO: 435625 - DNA, 33 bp, Homo sapien
ctatgaagttaagcaactggtgattactgctct

SEQ ID NO: 435626 - DNA, 33 bp, Homo sapien
ctatgaagttaagcaattggtgattactgctct

SEQ ID NO: 435627 - DNA, 33 bp, Homo sapien
aatgcttctcctaccaatcaattatcaaaatga

SEQ ID NO: 435628 - DNA, 33 bp, Homo sapien
aatgcttctcctaccagtcaattatcaaaatga

SEQ ID NO: 435629 - DNA, 33 bp, Homo sapien
aaaaggaaaatcttagaaactttcttctgagct

SEQ ID NO: 435630 - DNA, 33 bp, Homo sapien
aaaaggaaaatcttaggaactttcttctgagct

SEQ ID NO: 435631 - DNA, 33 bp, Homo sapien
ccttaatcacagcataataggaagagaagaaca

SEQ ID NO: 435632 - DNA, 33 bp, Homo sapien
ccttaatcacagcatagtaggaagagaagaaca

SEQ ID NO: 435633 - DNA, 33 bp, Homo sapien
tggaaaaaaggtattaagtgcttactgagtgca

SEQ ID NO: 435634 - DNA, 33 bp, Homo sapien
tggaaaaaaggtattacgtgcttactgagtgca

SEQ ID NO: 435635 - DNA, 33 bp, Homo sapien
aagaggaacacacaaactgcatagggcatggta
